United States Patent Application Publication US 2005/0244851 A1 - sequence listing, part 36

SEQ ID NO: 1390569 - DNA, 25 bp, Homo sapien
gcaggtatccctattctctgttggg

SEQ ID NO: 1390570 - DNA, 25 bp, Homo sapien
actgaagggctatgtgcaggtatcc

SEQ ID NO: 1390571 - DNA, 25 bp, Homo sapien
tattagcaccaatcaccatgttgcc

SEQ ID NO: 1390572 - DNA, 25 bp, Homo sapien
gaagccctatatttgccactggcac

SEQ ID NO: 1390573 - DNA, 25 bp, Homo sapien
gactgtggaagtactgccctttgaa

SEQ ID NO: 1390574 - DNA, 25 bp, Homo sapien
gcttggctgtttggctaatctctac

SEQ ID NO: 1390575 - DNA, 25 bp, Homo sapien
gggttcttatagtctcgactgtgga

SEQ ID NO: 1390576 - DNA, 25 bp, Homo sapien
tctctttccagtgaatccctctggg

SEQ ID NO: 1390577 - DNA, 25 bp, Homo sapien
gtgtgatggccagtgcaaaccatga

SEQ ID NO: 1390578 - DNA, 25 bp, Homo sapien
tccagaggtagatgagcattggtgt

SEQ ID NO: 1390579 - DNA, 25 bp, Homo sapien
ccatgactccatcaaagacattcat

SEQ ID NO: 1390580 - DNA, 25 bp, Homo sapien
tagatgagcattggtgtgatggcca

SEQ ID NO: 1390581 - DNA, 25 bp, Homo sapien
gaaaagtgcaagtcactaggtctct

SEQ ID NO: 1390582 - DNA, 25 bp, Homo sapien
tgacccctatatgtcctgagacctt

SEQ ID NO: 1390583 - DNA, 25 bp, Homo sapien
ttggcaggctaatgtaccctcctct

SEQ ID NO: 1390584 - DNA, 25 bp, Homo sapien
tatcacataataggacccatgcagg

SEQ ID NO: 1390585 - DNA, 25 bp, Homo sapien
tgactgagctatagggctccttttc

SEQ ID NO: 1390586 - DNA, 25 bp, Homo sapien
agtgactgagctatagggctccttt

SEQ ID NO: 1390587 - DNA, 25 bp, Homo sapien
ataagtgactgagctatagggctcc

SEQ ID NO: 1390588 - DNA, 25 bp, Homo sapien
taagtgactgagctatagggctcct

SEQ ID NO: 1390589 - DNA, 25 bp, Homo sapien
aacactatgtgcttctacgggccca

SEQ ID NO: 1390590 - DNA, 25 bp, Homo sapien
tagggtagaaaaacacctcagtggc

SEQ ID NO: 1390591 - DNA, 25 bp, Homo sapien
aatgaatctccctttggctcccata

SEQ ID NO: 1390592 - DNA, 25 bp, Homo sapien
caaagaactataaagaaagaggctg

SEQ ID NO: 1390593 - DNA, 25 bp, Homo sapien
cttagcaggatgatcagaaggcaga

SEQ ID NO: 1390594 - DNA, 25 bp, Homo sapien
cctgggtaggataaatacatgtgca

SEQ ID NO: 1390595 - DNA, 25 bp, Homo sapien
caaaagggctaagcagtaatggaca

SEQ ID NO: 1390596 - DNA, 25 bp, Homo sapien
tagttagtggtagggcaagcaccag

SEQ ID NO: 1390597 - DNA, 25 bp, Homo sapien
caacttcaaacacaaagatacccac

SEQ ID NO: 1390598 - DNA, 25 bp, Homo sapien
ttggcaaacaacttcaaacacaaag

SEQ ID NO: 1390599 - DNA, 25 bp, Homo sapien
ggcaaacaacttcaaacacaaagat

SEQ ID NO: 1390600 - DNA, 25 bp, Homo sapien
caaacacaaagatacccacacaatt

SEQ ID NO: 1390601 - DNA, 25 bp, Homo sapien
taatgatctgggattggatagtcac

SEQ ID NO: 1390602 - DNA, 25 bp, Homo sapien
taaatcgaatatactttagaaggtc

SEQ ID NO: 1390603 - DNA, 25 bp, Homo sapien
caggacctgggcattatgcatgaag

SEQ ID NO: 1390604 - DNA, 25 bp, Homo sapien
tgatttgtaaatactggcccttcct

SEQ ID NO: 1390605 - DNA, 25 bp, Homo sapien
agccattgcacccagtcatttgctt

SEQ ID NO: 1390606 - DNA, 25 bp, Homo sapien
tttgcttttttatatactagaatga

SEQ ID NO: 1390607 - DNA, 25 bp, Homo sapien
ttgcttttttatatactagaatgaa

SEQ ID NO: 1390608 - DNA, 25 bp, Homo sapien
cattgcacccagtcatttgcttttt

SEQ ID NO: 1390609 - DNA, 25 bp, Homo sapien
catatatggcaaaaggaagggatcc

SEQ ID NO: 1390610 - DNA, 25 bp, Homo sapien
tatggctagcagttataccagcccc

SEQ ID NO: 1390611 - DNA, 25 bp, Homo sapien
gagggatattctacagcatacctgg

SEQ ID NO: 1390612 - DNA, 25 bp, Homo sapien
cataaccccaatttaaccatgagaa

SEQ ID NO: 1390613 - DNA, 25 bp, Homo sapien
aacagctactgactgcttacgcggg

SEQ ID NO: 1390614 - DNA, 25 bp, Homo sapien
aagctgctagcaaaggggatacccc

SEQ ID NO: 1390615 - DNA, 25 bp, Homo sapien
cacacgatgcggatcccatcgagct

SEQ ID NO: 1390616 - DNA, 25 bp, Homo sapien
agacaccacccgtctttccagcagg

SEQ ID NO: 1390617 - DNA, 25 bp, Homo sapien
aagccttcttctacgcagcacttga

SEQ ID NO: 1390618 - DNA, 25 bp, Homo sapien
gcacttgatggaagagagcccgctc

SEQ ID NO: 1390619 - DNA, 25 bp, Homo sapien
ctccgatgtcatcagtcctttcaaa

SEQ ID NO: 1390620 - DNA, 25 bp, Homo sapien
tttcaaagcagacaggttccaagcc

SEQ ID NO: 1390621 - DNA, 25 bp, Homo sapien
tcccgagatcttcacctgttagtgt

SEQ ID NO: 1390622 - DNA, 25 bp, Homo sapien
ggtctcccgagatcttcacctgtta

SEQ ID NO: 1390623 - DNA, 25 bp, Homo sapien
gtctcccgagatcttcacctgttag

SEQ ID NO: 1390624 - DNA, 25 bp, Homo sapien
cgagatcttcacctgttagtgtcgc

SEQ ID NO: 1390625 - DNA, 25 bp, Homo sapien
cttgaggaggacagattcgacggtc

SEQ ID NO: 1390626 - DNA, 25 bp, Homo sapien
tttcaaggaagaccttggccgtggc

SEQ ID NO: 1390627 - DNA, 25 bp, Homo sapien
tgctctgctgcggtaccggatctca

SEQ ID NO: 1390628 - DNA, 25 bp, Homo sapien
tggccgtggcattcgaataaattct

SEQ ID NO: 1390629 - DNA, 25 bp, Homo sapien
gcctttcctgaagcgctcaacagat

SEQ ID NO: 1390630 - DNA, 25 bp, Homo sapien
cctcgatgggaataaaacgtgggct

SEQ ID NO: 1390631 - DNA, 25 bp, Homo sapien
aacaacggacaaacagcgagagcca

SEQ ID NO: 1390632 - DNA, 25 bp, Homo sapien
gatccttcagctgcgatctggagga

SEQ ID NO: 1390633 - DNA, 25 bp, Homo sapien
tcactggagggcacggaacaagtct

SEQ ID NO: 1390634 - DNA, 25 bp, Homo sapien
gagatacccactgccacaatgacgt

SEQ ID NO: 1390635 - DNA, 25 bp, Homo sapien
tattcagaggttcccaattttggcc

SEQ ID NO: 1390636 - DNA, 25 bp, Homo sapien
gacgggcagttcaggcaatcagacg

SEQ ID NO: 1390637 - DNA, 25 bp, Homo sapien
ttgggactgcctcttgcgggccggg

SEQ ID NO: 1390638 - DNA, 25 bp, Homo sapien
gcggacttcggccaggcgggccaac

SEQ ID NO: 1390639 - DNA, 25 bp, Homo sapien
ggctgacaggtgagcgggctccggg

SEQ ID NO: 1390640 - DNA, 25 bp, Homo sapien
ttccttcgctcctgccgtgggcgga

SEQ ID NO: 1390641 - DNA, 25 bp, Homo sapien
taaacgtgacttggctttagccagg

SEQ ID NO: 1390642 - DNA, 25 bp, Homo sapien
cagaccccactgtagtttggttgta

SEQ ID NO: 1390643 - DNA, 25 bp, Homo sapien
ctgacagaagggcaaaagaatctac

SEQ ID NO: 1390644 - DNA, 25 bp, Homo sapien
tagccaggcacgtgactgggagatt

SEQ ID NO: 1390645 - DNA, 25 bp, Homo sapien
gctgtaatacagaaggagaaccatt

SEQ ID NO: 1390646 - DNA, 25 bp, Homo sapien
tactagaggctaggtcatagatttc

SEQ ID NO: 1390647 - DNA, 25 bp, Homo sapien
taaaatagcaatcagtgccgtggaa

SEQ ID NO: 1390648 - DNA, 25 bp, Homo sapien
ttagttaacctcatattggcccatg

SEQ ID NO: 1390649 - DNA, 25 bp, Homo sapien
tatgcacatgtagcctctcaggaag

SEQ ID NO: 1390650 - DNA, 25 bp, Homo sapien
cgagttcgatttctgcagggctaaa

SEQ ID NO: 1390651 - DNA, 25 bp, Homo sapien
ccttttttccgaggagtcagtgcga

SEQ ID NO: 1390652 - DNA, 25 bp, Homo sapien
gctacaaaatgtgctctggcaacag

SEQ ID NO: 1390653 - DNA, 25 bp, Homo sapien
aatttatgcgacattcatgcagtgc

SEQ ID NO: 1390654 - DNA, 25 bp, Homo sapien
gcatttgcaaaaggtaaggctacca

SEQ ID NO: 1390655 - DNA, 25 bp, Homo sapien
tacctgtagcgactagcagccttgg

SEQ ID NO: 1390656 - DNA, 25 bp, Homo sapien
cagctctttacttggtgaacacata

SEQ ID NO: 1390657 - DNA, 25 bp, Homo sapien
acaggctgtaattacaggctcacac

SEQ ID NO: 1390658 - DNA, 25 bp, Homo sapien
tgtatatatacgtttacatactatg

SEQ ID NO: 1390659 - DNA, 25 bp, Homo sapien
tatgtgcatagatacacttacatac

SEQ ID NO: 1390660 - DNA, 25 bp, Homo sapien
tacgtttacatactatgttttgaca

SEQ ID NO: 1390661 - DNA, 25 bp, Homo sapien
ggagcaagctgaccttagttttcaa

SEQ ID NO: 1390662 - DNA, 25 bp, Homo sapien
tctaaatgcctgctgctataagggt

SEQ ID NO: 1390663 - DNA, 25 bp, Homo sapien
tcttgatggagtacatgcaggaaca

SEQ ID NO: 1390664 - DNA, 25 bp, Homo sapien
tagttttcaactcataggatcctag

SEQ ID NO: 1390665 - DNA, 25 bp, Homo sapien
caactactcaacttcccgacagggt

SEQ ID NO: 1390666 - DNA, 25 bp, Homo sapien
tctaggcttgcaacttcagagaagt

SEQ ID NO: 1390667 - DNA, 25 bp, Homo sapien
tgcctggcaagtagtaagcacagcg

SEQ ID NO: 1390668 - DNA, 25 bp, Homo sapien
tctggaccaagactgcaagggaatg

SEQ ID NO: 1390669 - DNA, 25 bp, Homo sapien
ccaggaggtgagcataagtacaagg

SEQ ID NO: 1390670 - DNA, 25 bp, Homo sapien
tgagcaataacaagggagagccagg

SEQ ID NO: 1390671 - DNA, 25 bp, Homo sapien
gactaagacacattgcaagtgagca

SEQ ID NO: 1390672 - DNA, 25 bp, Homo sapien
taacagcaggatgagatagacacta

SEQ ID NO: 1390673 - DNA, 25 bp, Homo sapien
tgttcgctgctgtgactgtggtgcc

SEQ ID NO: 1390674 - DNA, 25 bp, Homo sapien
gatgcaccacagagattttgctcat

SEQ ID NO: 1390675 - DNA, 25 bp, Homo sapien
tgcctagaacgatgccttacgtgta

SEQ ID NO: 1390676 - DNA, 25 bp, Homo sapien
gaagtccaacctgtgatattcctag

SEQ ID NO: 1390677 - DNA, 25 bp, Homo sapien
tagcaaccagctaatatttacccag

SEQ ID NO: 1390678 - DNA, 25 bp, Homo sapien
gtgggcctcagaaattgtctctttt

SEQ ID NO: 1390679 - DNA, 25 bp, Homo sapien
tcagatcctgtctttagcaaccagc

SEQ ID NO: 1390680 - DNA, 25 bp, Homo sapien
acccagaggtactgcaatagagtat

SEQ ID NO: 1390681 - DNA, 25 bp, Homo sapien
gatgtagtccctgaaccatgaacct

SEQ ID NO: 1390682 - DNA, 25 bp, Homo sapien
tgcttctaaagggaacgtcgctgac

SEQ ID NO: 1390683 - DNA, 25 bp, Homo sapien
gctgacctttcagggacagttgtct

SEQ ID NO: 1390684 - DNA, 25 bp, Homo sapien
tcaaccatggtccagtcgtgggatt

SEQ ID NO: 1390685 - DNA, 25 bp, Homo sapien
cgtctactgactgaagtacagttgt

SEQ ID NO: 1390686 - DNA, 25 bp, Homo sapien
cagttggcttaatccatagatgtag

SEQ ID NO: 1390687 - DNA, 25 bp, Homo sapien
tacagaggtctgactgtgtaaactc

SEQ ID NO: 1390688 - DNA, 25 bp, Homo sapien
tatagcttgagtcagccatttttga

SEQ ID NO: 1390689 - DNA, 25 bp, Homo sapien
tccaaaagacatctgcagtttctca

SEQ ID NO: 1390690 - DNA, 25 bp, Homo sapien
ctgccttcttgtttccaaaagacat

SEQ ID NO: 1390691 - DNA, 25 bp, Homo sapien
ccaaaagacatctgcagtttctcac

SEQ ID NO: 1390692 - DNA, 25 bp, Homo sapien
ttcttgtttccaaaagacatctgca

SEQ ID NO: 1390693 - DNA, 25 bp, Homo sapien
tgttaggtgtcaattttggatcttt

SEQ ID NO: 1390694 - DNA, 25 bp, Homo sapien
ggtttttgtgtctctacttcctgca

SEQ ID NO: 1390695 - DNA, 25 bp, Homo sapien
gtttttgtgtctctacttcctgcag

SEQ ID NO: 1390696 - DNA, 25 bp, Homo sapien
gaggaaatgaaccaaagccggcagt

SEQ ID NO: 1390697 - DNA, 25 bp, Homo sapien
ttcctcaattcagctatctctgcca

SEQ ID NO: 1390698 - DNA, 25 bp, Homo sapien
tcagtatcaagagctcccaaaattt

SEQ ID NO: 1390699 - DNA, 25 bp, Homo sapien
caaagccggcagtggttgctatggt

SEQ ID NO: 1390700 - DNA, 25 bp, Homo sapien
catagtacagatcatatagaaaaac

SEQ ID NO: 1390701 - DNA, 25 bp, Homo sapien
ccattctggatcatagtacagatca

SEQ ID NO: 1390702 - DNA, 25 bp, Homo sapien
tctggatcatagtacagatcatata

SEQ ID NO: 1390703 - DNA, 25 bp, Homo sapien
tacagatcatatagaaaaactgagg

SEQ ID NO: 1390704 - DNA, 25 bp, Homo sapien
ccaggcagtgtgacagaagctagca

SEQ ID NO: 1390705 - DNA, 25 bp, Homo sapien
ctgaggcactgacagacccagccaa

SEQ ID NO: 1390706 - DNA, 25 bp, Homo sapien
caggcagtgtgacagaagctagcat

SEQ ID NO: 1390707 - DNA, 25 bp, Homo sapien
cagacccagccaatgtccaggcagt

SEQ ID NO: 1390708 - DNA, 25 bp, Homo sapien
cagactgatgaacctccctccttgc

SEQ ID NO: 1390709 - DNA, 25 bp, Homo sapien
ccagactgatgaacctccctccttg

SEQ ID NO: 1390710 - DNA, 25 bp, Homo sapien
ctctacttttcctcctgtgtggatc

SEQ ID NO: 1390711 - DNA, 25 bp, Homo sapien
cttttcctcctgtgtggatcttcat

SEQ ID NO: 1390712 - DNA, 25 bp, Homo sapien
gagttttcacatgagacccaggtcc

SEQ ID NO: 1390713 - DNA, 25 bp, Homo sapien
gcatgtggacagatcttgaccttgg

SEQ ID NO: 1390714 - DNA, 25 bp, Homo sapien
gactgacacctgtggcttgagaagc

SEQ ID NO: 1390715 - DNA, 25 bp, Homo sapien
gtaacaaggtgctccgcaggctcat

SEQ ID NO: 1390716 - DNA, 25 bp, Homo sapien
ttcaacctagaaagacagtgcaggc

SEQ ID NO: 1390717 - DNA, 25 bp, Homo sapien
tgctgctatgcctcaaaaccaagtt

SEQ ID NO: 1390718 - DNA, 25 bp, Homo sapien
gattcgtgtcaatgggcagagcctt

SEQ ID NO: 1390719 - DNA, 25 bp, Homo sapien
caggtgaggcccactggtgaatctc

SEQ ID NO: 1390720 - DNA, 25 bp, Homo sapien
gaggtcaggactctccagcaattct

SEQ ID NO: 1390721 - DNA, 25 bp, Homo sapien
tcaaggaagttgaatacccagtaca

SEQ ID NO: 1390722 - DNA, 25 bp, Homo sapien
gacaaaccttcagtagtgaacgctt

SEQ ID NO: 1390723 - DNA, 25 bp, Homo sapien
taatccattcagcataccacttttt

SEQ ID NO: 1390724 - DNA, 25 bp, Homo sapien
cacatggcccttgtacaccagctcc

SEQ ID NO: 1390725 - DNA, 25 bp, Homo sapien
acatggcccttgtacaccagctcct

SEQ ID NO: 1390726 - DNA, 25 bp, Homo sapien
tggcccttgtacaccagctcctccc

SEQ ID NO: 1390727 - DNA, 25 bp, Homo sapien
atggcccttgtacaccagctcctcc

SEQ ID NO: 1390728 - DNA, 25 bp, Homo sapien
aggaacacagctcctcaccagcaat

SEQ ID NO: 1390729 - DNA, 25 bp, Homo sapien
aacacagctcctcaccagcaatgga

SEQ ID NO: 1390730 - DNA, 25 bp, Homo sapien
acaaagatgggagaaaaacagagca

SEQ ID NO: 1390731 - DNA, 25 bp, Homo sapien
ggaaactctaaaaatcagagcacct

SEQ ID NO: 1390732 - DNA, 25 bp, Homo sapien
agatgttggtgccacgtttatacag

SEQ ID NO: 1390733 - DNA, 25 bp, Homo sapien
gatgttggtgccacgtttatacagc

SEQ ID NO: 1390734 - DNA, 25 bp, Homo sapien
cagatgttggtgccacgtttataca

SEQ ID NO: 1390735 - DNA, 25 bp, Homo sapien
tcctggatatctgctacatgtctac

SEQ ID NO: 1390736 - DNA, 25 bp, Homo sapien
gctggtgaacttcttccaggagagt

SEQ ID NO: 1390737 - DNA, 25 bp, Homo sapien
aagcttcctggatatctgctacatg

SEQ ID NO: 1390738 - DNA, 25 bp, Homo sapien
ttaagcttcctggatatctgctaca

SEQ ID NO: 1390739 - DNA, 25 bp, Homo sapien
tctgtgccatcccattgctcctgaa

SEQ ID NO: 1390740 - DNA, 25 bp, Homo sapien
tctctgtgccatcccattgctcctg

SEQ ID NO: 1390741 - DNA, 25 bp, Homo sapien
ctgtgccatcccattgctcctgaag

SEQ ID NO: 1390742 - DNA, 25 bp, Homo sapien
ctctgtgccatcccattgctcctga

SEQ ID NO: 1390743 - DNA, 25 bp, Homo sapien
tgagcccctgcctgtttatggcaat

SEQ ID NO: 1390744 - DNA, 25 bp, Homo sapien
agcccctgcctgtttatggcaatgt

SEQ ID NO: 1390745 - DNA, 25 bp, Homo sapien
gagcccctgcctgtttatggcaatg

SEQ ID NO: 1390746 - DNA, 25 bp, Homo sapien
cagtgttgaaccccatcacctacag

SEQ ID NO: 1390747 - DNA, 25 bp, Homo sapien
catctttggaacagaccacttcaac

SEQ ID NO: 1390748 - DNA, 25 bp, Homo sapien
tcttttgtgttgtgaccccagtgtt

SEQ ID NO: 1390749 - DNA, 25 bp, Homo sapien
gaacagaccacttcaactatgacag

SEQ ID NO: 1390750 - DNA, 25 bp, Homo sapien
tctctacctggttgtgatcaagtag

SEQ ID NO: 1390751 - DNA, 25 bp, Homo sapien
cctggttgtgatcaagtagttataa

SEQ ID NO: 1390752 - DNA, 25 bp, Homo sapien
aaatctctacctggttgtgatcaag

SEQ ID NO: 1390753 - DNA, 25 bp, Homo sapien
ctacctggttgtgatcaagtagtta

SEQ ID NO: 1390754 - DNA, 25 bp, Homo sapien
tccccttcagtaactccacagcaag

SEQ ID NO: 1390755 - DNA, 25 bp, Homo sapien
ggaccagaaatcaggggccacgaaa

SEQ ID NO: 1390756 - DNA, 25 bp, Homo sapien
aatcaggggccacgaaagtctaagg

SEQ ID NO: 1390757 - DNA, 25 bp, Homo sapien
catcagcaggtcatgagcaatggca

SEQ ID NO: 1390758 - DNA, 25 bp, Homo sapien
attcagttagtgaaccagaagtttc

SEQ ID NO: 1390759 - DNA, 25 bp, Homo sapien
tcagttagtgaaccagaagtttcaa

SEQ ID NO: 1390760 - DNA, 25 bp, Homo sapien
agttagtgaaccagaagtttcaagg

SEQ ID NO: 1390761 - DNA, 25 bp, Homo sapien
cagttagtgaaccagaagtttcaag

SEQ ID NO: 1390762 - DNA, 25 bp, Homo sapien
tcactgatactctgcagtcatcctg

SEQ ID NO: 1390763 - DNA, 25 bp, Homo sapien
tacgggccatcactgatactctgca

SEQ ID NO: 1390764 - DNA, 25 bp, Homo sapien
ctaaaatgtaatttacgggccatca

SEQ ID NO: 1390765 - DNA, 25 bp, Homo sapien
taatttacgggccatcactgatact

SEQ ID NO: 1390766 - DNA, 25 bp, Homo sapien
tctaagatgtttgcaccagaacggt

SEQ ID NO: 1390767 - DNA, 25 bp, Homo sapien
tttgggtccccgttcagcttggatg

SEQ ID NO: 1390768 - DNA, 25 bp, Homo sapien
tctgtaggtctgactaaactgctgg

SEQ ID NO: 1390769 - DNA, 25 bp, Homo sapien
tccacctgagttgttcgtgaacagt

SEQ ID NO: 1390770 - DNA, 25 bp, Homo sapien
ttgaagtggccttgactggctaatc

SEQ ID NO: 1390771 - DNA, 25 bp, Homo sapien
tttgaagtggccttgactggctaat

SEQ ID NO: 1390772 - DNA, 25 bp, Homo sapien
taactttgccctgaagagctgcttg

SEQ ID NO: 1390773 - DNA, 25 bp, Homo sapien
tggaggcataactttgccctgaaga

SEQ ID NO: 1390774 - DNA, 25 bp, Homo sapien
aattgctgttagtaccaggtcttgg

SEQ ID NO: 1390775 - DNA, 25 bp, Homo sapien
tcttgtattccagaggcaattgctg

SEQ ID NO: 1390776 - DNA, 25 bp, Homo sapien
ggacaccagcccaaatggaggaaaa

SEQ ID NO: 1390777 - DNA, 25 bp, Homo sapien
caagaaggtctgtgtccaaggacac

SEQ ID NO: 1390778 - DNA, 25 bp, Homo sapien
ggaaaaagtccatgtgtgaagtcta

SEQ ID NO: 1390779 - DNA, 25 bp, Homo sapien
caggtcagtgtaggttggtaagtca

SEQ ID NO: 1390780 - DNA, 25 bp, Homo sapien
taatcacgaccctcaatcttttggc

SEQ ID NO: 1390781 - DNA, 25 bp, Homo sapien
taacaagagcaaggaggcggcagta

SEQ ID NO: 1390782 - DNA, 25 bp, Homo sapien
tttgccaacattccgcatttatgag

SEQ ID NO: 1390783 - DNA, 25 bp, Homo sapien
ctggccacagtgtagtcatcctttg

SEQ ID NO: 1390784 - DNA, 25 bp, Homo sapien
ataagatgtctggaatagctttaac

SEQ ID NO: 1390785 - DNA, 25 bp, Homo sapien
taagatgtctggaatagctttaacc

SEQ ID NO: 1390786 - DNA, 25 bp, Homo sapien
aagatgtctggaatagctttaacct

SEQ ID NO: 1390787 - DNA, 25 bp, Homo sapien
aaataagatgtctggaatagcttta

SEQ ID NO: 1390788 - DNA, 25 bp, Homo sapien
gactactcttctggggaacagccat

SEQ ID NO: 1390789 - DNA, 25 bp, Homo sapien
tgactactcttctggggaacagcca

SEQ ID NO: 1390790 - DNA, 25 bp, Homo sapien
ctgactactcttctggggaacagcc

SEQ ID NO: 1390791 - DNA, 25 bp, Homo sapien
ctgcattccaccaatcagagctcca

SEQ ID NO: 1390792 - DNA, 25 bp, Homo sapien
cattccaccaatcagagctccagct

SEQ ID NO: 1390793 - DNA, 25 bp, Homo sapien
ttccaccaatcagagctccagcttc

SEQ ID NO: 1390794 - DNA, 25 bp, Homo sapien
tgcattccaccaatcagagctccag

SEQ ID NO: 1390795 - DNA, 25 bp, Homo sapien
tgaataactgccctggaaaggttag

SEQ ID NO: 1390796 - DNA, 25 bp, Homo sapien
tggcagtctgcatcaacgctttgtg

SEQ ID NO: 1390797 - DNA, 25 bp, Homo sapien
ctgcagacactagcagtggctggta

SEQ ID NO: 1390798 - DNA, 25 bp, Homo sapien
taccacttggttcctgcaaagcacc

SEQ ID NO: 1390799 - DNA, 25 bp, Homo sapien
tggcacactgccacttagaaatact

SEQ ID NO: 1390800 - DNA, 25 bp, Homo sapien
cacactgccacttagaaatactaac

SEQ ID NO: 1390801 - DNA, 25 bp, Homo sapien
ggcctggcacactgccacttagaaa

SEQ ID NO: 1390802 - DNA, 25 bp, Homo sapien
ccaaggcctggcacactgccactta

SEQ ID NO: 1390803 - DNA, 25 bp, Homo sapien
tgtccagatgctcttccaaagcagt

SEQ ID NO: 1390804 - DNA, 25 bp, Homo sapien
tgtttgtcattgtgagcatcttctg

SEQ ID NO: 1390805 - DNA, 25 bp, Homo sapien
tggccccttgaggtgctgcccacca

SEQ ID NO: 1390806 - DNA, 25 bp, Homo sapien
ttctgaacatgaatgtccagatgct

SEQ ID NO: 1390807 - DNA, 25 bp, Homo sapien
tgctcataacaaaaactgtccatgt

SEQ ID NO: 1390808 - DNA, 25 bp, Homo sapien
atgttggtcctttgccccagacctg

SEQ ID NO: 1390809 - DNA, 25 bp, Homo sapien
cttgctcataacaaaaactgtccat

SEQ ID NO: 1390810 - DNA, 25 bp, Homo sapien
ctgtccatgttggtcctttgcccca

SEQ ID NO: 1390811 - DNA, 25 bp, Homo sapien
actaaggtagcctgagggagtgtca

SEQ ID NO: 1390812 - DNA, 25 bp, Homo sapien
ccacaggtatgctgcagtaagcccc

SEQ ID NO: 1390813 - DNA, 25 bp, Homo sapien
ccactggtgccagatgctcctgtga

SEQ ID NO: 1390814 - DNA, 25 bp, Homo sapien
tctctcatcgccacaggtatgctgc

SEQ ID NO: 1390815 - DNA, 25 bp, Homo sapien
cctggatccctagcaaggcagaggg

SEQ ID NO: 1390816 - DNA, 25 bp, Homo sapien
aatgggatacctcaacaggaaggca

SEQ ID NO: 1390817 - DNA, 25 bp, Homo sapien
agctttcatgcatcaggtggcagtg

SEQ ID NO: 1390818 - DNA, 25 bp, Homo sapien
ttaacgtaggtcacagtagagcttt

SEQ ID NO: 1390819 - DNA, 25 bp, Homo sapien
ggtttcaactcctccactatggtgg

SEQ ID NO: 1390820 - DNA, 25 bp, Homo sapien
actctggtttagtagggtgtctgct

SEQ ID NO: 1390821 - DNA, 25 bp, Homo sapien
actatggtggcctctaattataggg

SEQ ID NO: 1390822 - DNA, 25 bp, Homo sapien
tgtgaggattccaagatagcacggt

SEQ ID NO: 1390823 - DNA, 25 bp, Homo sapien
agaatttagtccgtctctccaacgc

SEQ ID NO: 1390824 - DNA, 25 bp, Homo sapien
tctccaacgccaatactctagccct

SEQ ID NO: 1390825 - DNA, 25 bp, Homo sapien
ccaagctggtaagggttggagctga

SEQ ID NO: 1390826 - DNA, 25 bp, Homo sapien
tctagcccttacctataatacaaca

SEQ ID NO: 1390827 - DNA, 25 bp, Homo sapien
gcaagacttattacgagagtgaaag

SEQ ID NO: 1390828 - DNA, 25 bp, Homo sapien
tctccctgacttaaagaacgaaggc

SEQ ID NO: 1390829 - DNA, 25 bp, Homo sapien
gaagccacggagactcccggtgagt

SEQ ID NO: 1390830 - DNA, 25 bp, Homo sapien
taaagatggcgcatcacagttgttt

SEQ ID NO: 1390831 - DNA, 25 bp, Homo sapien
ctgcttccaatcataacacattgag

SEQ ID NO: 1390832 - DNA, 25 bp, Homo sapien
cataacacattgagccttctgcaag

SEQ ID NO: 1390833 - DNA, 25 bp, Homo sapien
gatcccactgggaaacaagtctgca

SEQ ID NO: 1390834 - DNA, 25 bp, Homo sapien
cctaaacgtgcatttggaggctctg

SEQ ID NO: 1390835 - DNA, 25 bp, Homo sapien
gggtcctgcgattggagctcctgcg

SEQ ID NO: 1390836 - DNA, 25 bp, Homo sapien
ggtctcattcctgcgctgctctgga

SEQ ID NO: 1390837 - DNA, 25 bp, Homo sapien
aggcttgttcgcctgtgcctggaag

SEQ ID NO: 1390838 - DNA, 25 bp, Homo sapien
gtggcaggcttgttcgcctgtgcct

SEQ ID NO: 1390839 - DNA, 25 bp, Homo sapien
tataggaagagaatgctactctggc

SEQ ID NO: 1390840 - DNA, 25 bp, Homo sapien
gaaagacaaaatggaacccagtcat

SEQ ID NO: 1390841 - DNA, 25 bp, Homo sapien
gagtcgacatttccacacatacttg

SEQ ID NO: 1390842 - DNA, 25 bp, Homo sapien
cgagtgaattcgtggactgtacaga

SEQ ID NO: 1390843 - DNA, 25 bp, Homo sapien
caattctgatttggcgggtctgctc

SEQ ID NO: 1390844 - DNA, 25 bp, Homo sapien
tgaacaactttactgcgcatcaaga

SEQ ID NO: 1390845 - DNA, 25 bp, Homo sapien
tcaagagcttggctagcaggcgcct

SEQ ID NO: 1390846 - DNA, 25 bp, Homo sapien
tctcgcctactaagccactgaacaa

SEQ ID NO: 1390847 - DNA, 25 bp, Homo sapien
tttacattgccctacctggatctgc

SEQ ID NO: 1390848 - DNA, 25 bp, Homo sapien
ttacattgccctacctggatctgca

SEQ ID NO: 1390849 - DNA, 25 bp, Homo sapien
ctttacattgccctacctggatctg

SEQ ID NO: 1390850 - DNA, 25 bp, Homo sapien
tacattgccctacctggatctgcat

SEQ ID NO: 1390851 - DNA, 25 bp, Homo sapien
cagcgggactcctgcacttcgcaga

SEQ ID NO: 1390852 - DNA, 25 bp, Homo sapien
agtgagggaaagaccggctcttcaa

SEQ ID NO: 1390853 - DNA, 25 bp, Homo sapien
aaaagatggccaaattccacgctgc

SEQ ID NO: 1390854 - DNA, 25 bp, Homo sapien
gaagaggagaccctcccgtgccgaa

SEQ ID NO: 1390855 - DNA, 25 bp, Homo sapien
caagccagtagctctagtttgtctg

SEQ ID NO: 1390856 - DNA, 25 bp, Homo sapien
tagctctagtttgtctgtgccagtg

SEQ ID NO: 1390857 - DNA, 25 bp, Homo sapien
tctggcctctatgctgtttgtactt

SEQ ID NO: 1390858 - DNA, 25 bp, Homo sapien
acaggcctatccctgttcgtacacg

SEQ ID NO: 1390859 - DNA, 25 bp, Homo sapien
gcaccaaaatggagtgagccaagaa

SEQ ID NO: 1390860 - DNA, 25 bp, Homo sapien
ctgtaggccagaacatgaagttagt

SEQ ID NO: 1390861 - DNA, 25 bp, Homo sapien
gtagagatttggcaggcaccaaaat

SEQ ID NO: 1390862 - DNA, 25 bp, Homo sapien
tggaagtatgattttccaacccaaa

SEQ ID NO: 1390863 - DNA, 25 bp, Homo sapien
gaaataaatctagcaaagcctcgcc

SEQ ID NO: 1390864 - DNA, 25 bp, Homo sapien
tttggcagctgcaatacacagtgtt

SEQ ID NO: 1390865 - DNA, 25 bp, Homo sapien
ggtacaaaaccactcgccagagctg

SEQ ID NO: 1390866 - DNA, 25 bp, Homo sapien
cgtaagacgttctgtgtaacctcca

SEQ ID NO: 1390867 - DNA, 25 bp, Homo sapien
tagttataagcagaagagcaaccct

SEQ ID NO: 1390868 - DNA, 25 bp, Homo sapien
ggcataccggttgccatgtgaccca

SEQ ID NO: 1390869 - DNA, 25 bp, Homo sapien
cattgctgaactttacctttagggc

SEQ ID NO: 1390870 - DNA, 25 bp, Homo sapien
tgtgacccagaagcgtagactcttt

SEQ ID NO: 1390871 - DNA, 25 bp, Homo sapien
tcatttccttttccttttctgagta

SEQ ID NO: 1390872 - DNA, 25 bp, Homo sapien
cttttccttttctgagtaatttcag

SEQ ID NO: 1390873 - DNA, 25 bp, Homo sapien
tccttttctgagtaatttcagggtg

SEQ ID NO: 1390874 - DNA, 25 bp, Homo sapien
acatttcctattggagggagctaaa

SEQ ID NO: 1390875 - DNA, 25 bp, Homo sapien
tattttctgcctataggtgacccca

SEQ ID NO: 1390876 - DNA, 25 bp, Homo sapien
tataaagcacaaaaccagtgggtgg

SEQ ID NO: 1390877 - DNA, 25 bp, Homo sapien
gaagacggtgagtgtatgtatgacc

SEQ ID NO: 1390878 - DNA, 25 bp, Homo sapien
ctaaggccacgcttttggcggtgct

SEQ ID NO: 1390879 - DNA, 25 bp, Homo sapien
tctggctgctcggttctcagcgtca

SEQ ID NO: 1390880 - DNA, 25 bp, Homo sapien
ggctgctcggttctcagcgtcaaat

SEQ ID NO: 1390881 - DNA, 25 bp, Homo sapien
ttttggcggtgctttacgggctctg

SEQ ID NO: 1390882 - DNA, 25 bp, Homo sapien
taaaagtgtgataataccaatgagg

SEQ ID NO: 1390883 - DNA, 25 bp, Homo sapien
ctagttttcatatcagacacctggg

SEQ ID NO: 1390884 - DNA, 25 bp, Homo sapien
tgaggaaatacaaggatcacttcca

SEQ ID NO: 1390885 - DNA, 25 bp, Homo sapien
tgttatgcttggtacctgcaagtcc

SEQ ID NO: 1390886 - DNA, 25 bp, Homo sapien
aaaaagtatgaattggctggacact

SEQ ID NO: 1390887 - DNA, 25 bp, Homo sapien
aaaagtatgaattggctggacactg

SEQ ID NO: 1390888 - DNA, 25 bp, Homo sapien
aaagtatgaattggctggacactgt

SEQ ID NO: 1390889 - DNA, 25 bp, Homo sapien
agtatgaattggctggacactgtgg

SEQ ID NO: 1390890 - DNA, 25 bp, Homo sapien
cacttgagccgtccgataatgggag

SEQ ID NO: 1390891 - DNA, 25 bp, Homo sapien
ttttcccaagctaaatgccctggtc

SEQ ID NO: 1390892 - DNA, 25 bp, Homo sapien
aattctgccgcctaatgaatcaggc

SEQ ID NO: 1390893 - DNA, 25 bp, Homo sapien
taaagtgtttggtgccccagtacta

SEQ ID NO: 1390894 - DNA, 25 bp, Homo sapien
ctttagagtgacatcaattcagaaa

SEQ ID NO: 1390895 - DNA, 25 bp, Homo sapien
taattggctctttgattgattcatc

SEQ ID NO: 1390896 - DNA, 25 bp, Homo sapien
cactgtgaaatataatgtcataaag

SEQ ID NO: 1390897 - DNA, 25 bp, Homo sapien
taattctacctcttatcatccagct

SEQ ID NO: 1390898 - DNA, 25 bp, Homo sapien
gtttagcttgcctatgtgccagcca

SEQ ID NO: 1390899 - DNA, 25 bp, Homo sapien
ggatggagcatcaacctgggtagtc

SEQ ID NO: 1390900 - DNA, 25 bp, Homo sapien
gggcaaaggcctatcatacaacatg

SEQ ID NO: 1390901 - DNA, 25 bp, Homo sapien
gatctacagatagcatccagcatgt

SEQ ID NO: 1390902 - DNA, 25 bp, Homo sapien
ccatggtacccagagttgaaagcct

SEQ ID NO: 1390903 - DNA, 25 bp, Homo sapien
aagccctgctggtttgaccccatca

SEQ ID NO: 1390904 - DNA, 25 bp, Homo sapien
tgcttttccggaggtagctcccagg

SEQ ID NO: 1390905 - DNA, 25 bp, Homo sapien
ttcagttactaacagctccagggac

SEQ ID NO: 1390906 - DNA, 25 bp, Homo sapien
ctgaggaatgctccggaggagccac

SEQ ID NO: 1390907 - DNA, 25 bp, Homo sapien
gcaagccatctaggtccgcaggcac

SEQ ID NO: 1390908 - DNA, 25 bp, Homo sapien
aatgctccggaggagccacaaagag

SEQ ID NO: 1390909 - DNA, 25 bp, Homo sapien
cacccaggggcaagccatctaggtc

SEQ ID NO: 1390910 - DNA, 25 bp, Homo sapien
gacaaacagaaacacgggaggccta

SEQ ID NO: 1390911 - DNA, 25 bp, Homo sapien
cggtaaatctttgctgaggtccact

SEQ ID NO: 1390912 - DNA, 25 bp, Homo sapien
aattcagcccatgacagaaggtggc

SEQ ID NO: 1390913 - DNA, 25 bp, Homo sapien
gctcatcagtgttacaaggcaacga

SEQ ID NO: 1390914 - DNA, 25 bp, Homo sapien
tataaaagcaccaatgcaactgggt

SEQ ID NO: 1390915 - DNA, 25 bp, Homo sapien
caatgtaaagctagagggttgggct

SEQ ID NO: 1390916 - DNA, 25 bp, Homo sapien
caactgggttagcagatttggtggt

SEQ ID NO: 1390917 - DNA, 25 bp, Homo sapien
gaattagaggtagcaactcttttga

SEQ ID NO: 1390918 - DNA, 25 bp, Homo sapien
tgagcctccacatcagggttccatc

SEQ ID NO: 1390919 - DNA, 25 bp, Homo sapien
tatgttgagtagttccagccttacc

SEQ ID NO: 1390920 - DNA, 25 bp, Homo sapien
caacgttccctgaccttgaagccta

SEQ ID NO: 1390921 - DNA, 25 bp, Homo sapien
ggcacagttaaaggtggagctctta

SEQ ID NO: 1390922 - DNA, 25 bp, Homo sapien
tccttttggtctcaatattataccc

SEQ ID NO: 1390923 - DNA, 25 bp, Homo sapien
cttttggtctcaatattatacccct

SEQ ID NO: 1390924 - DNA, 25 bp, Homo sapien
tcaacacatcctgcttttataaatc

SEQ ID NO: 1390925 - DNA, 25 bp, Homo sapien
aacacatcctgcttttataaatcag

SEQ ID NO: 1390926 - DNA, 25 bp, Homo sapien
taaaatcaacacatcctgcttttat

SEQ ID NO: 1390927 - DNA, 25 bp, Homo sapien
aaatcaacacatcctgcttttataa

SEQ ID NO: 1390928 - DNA, 25 bp, Homo sapien
aagaacatgtccagcgggcagagcc

SEQ ID NO: 1390929 - DNA, 25 bp, Homo sapien
ggtataaactgacatggcattcaag

SEQ ID NO: 1390930 - DNA, 25 bp, Homo sapien
gagcagagtgcgtggtatttttctg

SEQ ID NO: 1390931 - DNA, 25 bp, Homo sapien
agagcccatcagggcaacctctcgg

SEQ ID NO: 1390932 - DNA, 25 bp, Homo sapien
gaaagagtcgagttacatccccgag

SEQ ID NO: 1390933 - DNA, 25 bp, Homo sapien
aacaccacgggtgctaacagcagca

SEQ ID NO: 1390934 - DNA, 25 bp, Homo sapien
gagaggctctgatccatgtggtata

SEQ ID NO: 1390935 - DNA, 25 bp, Homo sapien
cactacccggtgagcttccagaata

SEQ ID NO: 1390936 - DNA, 25 bp, Homo sapien
tagagctgcacaaaccactccttag

SEQ ID NO: 1390937 - DNA, 25 bp, Homo sapien
tgcacaaaccactccttagattcca

SEQ ID NO: 1390938 - DNA, 25 bp, Homo sapien
ttcccgtggtaatagagctgcacaa

SEQ ID NO: 1390939 - DNA, 25 bp, Homo sapien
cttcccgtggtaatagagctgcaca

SEQ ID NO: 1390940 - DNA, 25 bp, Homo sapien
aaatccccagggtcattaagagcgg

SEQ ID NO: 1390941 - DNA, 25 bp, Homo sapien
catggtcaggtcaacagcaaacggt

SEQ ID NO: 1390942 - DNA, 25 bp, Homo sapien
gaaggtcacatcatgagccgcatag

SEQ ID NO: 1390943 - DNA, 25 bp, Homo sapien
cggtggccatttgtggtcaaaaatc

SEQ ID NO: 1390944 - DNA, 25 bp, Homo sapien
tgttttcctgcagaacgcacttagc

SEQ ID NO: 1390945 - DNA, 25 bp, Homo sapien
tagaagactagcattggatcctgtg

SEQ ID NO: 1390946 - DNA, 25 bp, Homo sapien
taatattccacagccgtagtcccaa

SEQ ID NO: 1390947 - DNA, 25 bp, Homo sapien
ggattcaaggctccaaaagtggcaa

SEQ ID NO: 1390948 - DNA, 25 bp, Homo sapien
gacacttgaggcctgttaaacatct

SEQ ID NO: 1390949 - DNA, 25 bp, Homo sapien
gacagcctggttcttgcctcactaa

SEQ ID NO: 1390950 - DNA, 25 bp, Homo sapien
tcagtgtgacatcataattggctac

SEQ ID NO: 1390951 - DNA, 25 bp, Homo sapien
ttagctgcacaaagcagagttgctg

SEQ ID NO: 1390952 - DNA, 25 bp, Homo sapien
tttcagcaggttgctctctaggatg

SEQ ID NO: 1390953 - DNA, 25 bp, Homo sapien
cagtggcagagtccacggctttcag

SEQ ID NO: 1390954 - DNA, 25 bp, Homo sapien
atgtggaggaatgggcctactgcca

SEQ ID NO: 1390955 - DNA, 25 bp, Homo sapien
tgggcctactgccatctgaagactt

SEQ ID NO: 1390956 - DNA, 25 bp, Homo sapien
tggataagccgtgaccaactaggcc

SEQ ID NO: 1390957 - DNA, 25 bp, Homo sapien
gaagttcagtggtcgtgctcccagg

SEQ ID NO: 1390958 - DNA, 25 bp, Homo sapien
gacctcatgagtccagacagagctg

SEQ ID NO: 1390959 - DNA, 25 bp, Homo sapien
tttaagcacctagagggcactcagc

SEQ ID NO: 1390960 - DNA, 25 bp, Homo sapien
gtcaggaaacagaaccctaactgct

SEQ ID NO: 1390961 - DNA, 25 bp, Homo sapien
tcacttgctagctgggcctagacca

SEQ ID NO: 1390962 - DNA, 25 bp, Homo sapien
tctttatctataaagccagggagaa

SEQ ID NO: 1390963 - DNA, 25 bp, Homo sapien
tagcgaaaacacagaataggcagtc

SEQ ID NO: 1390964 - DNA, 25 bp, Homo sapien
cagctctctgttcgatcatccttgc

SEQ ID NO: 1390965 - DNA, 25 bp, Homo sapien
gtccacagctctctgttcgatcatc

SEQ ID NO: 1390966 - DNA, 25 bp, Homo sapien
gttcgatcatccttgcaaatctctt

SEQ ID NO: 1390967 - DNA, 25 bp, Homo sapien
ctgttcgatcatccttgcaaatctc

SEQ ID NO: 1390968 - DNA, 25 bp, Homo sapien
gctgatcagcttccatggaacctgc

SEQ ID NO: 1390969 - DNA, 25 bp, Homo sapien
cttccatggaacctgcaggagccca

SEQ ID NO: 1390970 - DNA, 25 bp, Homo sapien
gatcagcttccatggaacctgcagg

SEQ ID NO: 1390971 - DNA, 25 bp, Homo sapien
tcagcttccatggaacctgcaggag

SEQ ID NO: 1390972 - DNA, 25 bp, Homo sapien
tgctcggcagccacgttgtccagga

SEQ ID NO: 1390973 - DNA, 25 bp, Homo sapien
cggcagccacgttgtccaggaggat

SEQ ID NO: 1390974 - DNA, 25 bp, Homo sapien
gaagaagtccactttatcactactg

SEQ ID NO: 1390975 - DNA, 25 bp, Homo sapien
tcactactgtcaatgcccatcctgt

SEQ ID NO: 1390976 - DNA, 25 bp, Homo sapien
cctttttcaaatcctctgagattcc

SEQ ID NO: 1390977 - DNA, 25 bp, Homo sapien
acctttttcaaatcctctgagattc

SEQ ID NO: 1390978 - DNA, 25 bp, Homo sapien
gatacaagacttctgaatctgcttc

SEQ ID NO: 1390979 - DNA, 25 bp, Homo sapien
ggtagttgggatacaagacttctga

SEQ ID NO: 1390980 - DNA, 25 bp, Homo sapien
agcagctttggtagttgggatacaa

SEQ ID NO: 1390981 - DNA, 25 bp, Homo sapien
tgggatacaagacttctgaatctgc

SEQ ID NO: 1390982 - DNA, 25 bp, Homo sapien
gggcagaccaacaatctccagcttt

SEQ ID NO: 1390983 - DNA, 25 bp, Homo sapien
ccatctggagtctgatattggtgtc

SEQ ID NO: 1390984 - DNA, 25 bp, Homo sapien
gtttgctgcatacaattggtcctcc

SEQ ID NO: 1390985 - DNA, 25 bp, Homo sapien
taaggcacacttgagtagacaaatg

SEQ ID NO: 1390986 - DNA, 25 bp, Homo sapien
ccagattccgaaaaatgttagtgga

SEQ ID NO: 1390987 - DNA, 25 bp, Homo sapien
ggtggactccagattccgaaaaatg

SEQ ID NO: 1390988 - DNA, 25 bp, Homo sapien
ccagccagcaaacaacgggtggact

SEQ ID NO: 1390989 - DNA, 25 bp, Homo sapien
agcaaacaacgggtggactccagat

SEQ ID NO: 1390990 - DNA, 25 bp, Homo sapien
caatgaatgcgacctccaggaacga

SEQ ID NO: 1390991 - DNA, 25 bp, Homo sapien
tcacttttctgtgggatgtcagccc

SEQ ID NO: 1390992 - DNA, 25 bp, Homo sapien
cctgagagactcgaagtgcaatgaa

SEQ ID NO: 1390993 - DNA, 25 bp, Homo sapien
attttattccacatacgctccaggg

SEQ ID NO: 1390994 - DNA, 25 bp, Homo sapien
tccacatagttcttcctcagtctct

SEQ ID NO: 1390995 - DNA, 25 bp, Homo sapien
ggtgaaagaaagggaatgtcttcca

SEQ ID NO: 1390996 - DNA, 25 bp, Homo sapien
aaagaaagggaatgtcttccacata

SEQ ID NO: 1390997 - DNA, 25 bp, Homo sapien
cctcctgtgggttgaaggttggtga

SEQ ID NO: 1390998 - DNA, 25 bp, Homo sapien
tgagagtcgtaaggagaatatggtt

SEQ ID NO: 1390999 - DNA, 25 bp, Homo sapien
cagctagattggtgactgtgtaatc

SEQ ID NO: 1391000 - DNA, 25 bp, Homo sapien
tcagggtggtctcatggtattgaga

SEQ ID NO: 1391001 - DNA, 25 bp, Homo sapien
ggtttcggaccaccagctagattgg

SEQ ID NO: 1391002 - DNA, 25 bp, Homo sapien
acccttcgagggttcatggctcatg

SEQ ID NO: 1391003 - DNA, 25 bp, Homo sapien
tgctgcaagaaaccatatgaaggcc

SEQ ID NO: 1391004 - DNA, 25 bp, Homo sapien
gctttcacagtagcttcagtggctc

SEQ ID NO: 1391005 - DNA, 25 bp, Homo sapien
ccatagcagttcaaaggcaagacag

SEQ ID NO: 1391006 - DNA, 25 bp, Homo sapien
ggaaaatttagtgatctaatataaa

SEQ ID NO: 1391007 - DNA, 25 bp, Homo sapien
gagtatacctaacatcaattttgga

SEQ ID NO: 1391008 - DNA, 25 bp, Homo sapien
aagccagagtaaggctaactagaaa

SEQ ID NO: 1391009 - DNA, 25 bp, Homo sapien
ttaatttcatgtgcggccaaccttg

SEQ ID NO: 1391010 - DNA, 25 bp, Homo sapien
gacacaatcctgaaggtttctagaa

SEQ ID NO: 1391011 - DNA, 25 bp, Homo sapien
cctttctgctataaaaagtcacatc

SEQ ID NO: 1391012 - DNA, 25 bp, Homo sapien
tcactaggcctttctgctataaaaa

SEQ ID NO: 1391013 - DNA, 25 bp, Homo sapien
agtttggggatttcaggttgcctgt

SEQ ID NO: 1391014 - DNA, 25 bp, Homo sapien
gtgctttagtcataattatcctgac

SEQ ID NO: 1391015 - DNA, 25 bp, Homo sapien
taaatttgttccgacctcagatccc

SEQ ID NO: 1391016 - DNA, 25 bp, Homo sapien
ggagaaccctagaatacaacacttg

SEQ ID NO: 1391017 - DNA, 25 bp, Homo sapien
ggcaacgacctcttatccactgtaa

SEQ ID NO: 1391018 - DNA, 25 bp, Homo sapien
gaagtgcactgcacccttgtattca

SEQ ID NO: 1391019 - DNA, 25 bp, Homo sapien
cgctccgcgcgagtaaagctctgaa

SEQ ID NO: 1391020 - DNA, 25 bp, Homo sapien
agatgtgtgtcagggcgagactcct

SEQ ID NO: 1391021 - DNA, 25 bp, Homo sapien
tcccatgcgtcttaagcagcgctta

SEQ ID NO: 1391022 - DNA, 25 bp, Homo sapien
gctgcgccatcagggcaaaactgga

SEQ ID NO: 1391023 - DNA, 25 bp, Homo sapien
tcaacttcagcaggctgcggtcgac

SEQ ID NO: 1391024 - DNA, 25 bp, Homo sapien
cagtacgccagcgaggtcaggacgc

SEQ ID NO: 1391025 - DNA, 25 bp, Homo sapien
agcggcttgagaggactccgagccc

SEQ ID NO: 1391026 - DNA, 25 bp, Homo sapien
gagccccgtgtcgaaacacgacctg

SEQ ID NO: 1391027 - DNA, 25 bp, Homo sapien
ggtggtaggccctcgctgccctccg

SEQ ID NO: 1391028 - DNA, 25 bp, Homo sapien
tggtaggccctcgctgccctccggg

SEQ ID NO: 1391029 - DNA, 25 bp, Homo sapien
taggccctcgctgccctccgggttg

SEQ ID NO: 1391030 - DNA, 25 bp, Homo sapien
gccctcgctgccctccgggttgagg

SEQ ID NO: 1391031 - DNA, 25 bp, Homo sapien
cggggctcagcgggcgcccccaagt

SEQ ID NO: 1391032 - DNA, 25 bp, Homo sapien
gggctcagcgggcgcccccaagtcc

SEQ ID NO: 1391033 - DNA, 25 bp, Homo sapien
tcagcgggcgcccccaagtccgcgg

SEQ ID NO: 1391034 - DNA, 25 bp, Homo sapien
ggctcagcgggcgcccccaagtccg

SEQ ID NO: 1391035 - DNA, 25 bp, Homo sapien
gctccaccagcaaggactactcgat

SEQ ID NO: 1391036 - DNA, 25 bp, Homo sapien
cagcagcgaagagtccctgggagtt

SEQ ID NO: 1391037 - DNA, 25 bp, Homo sapien
ggatccttatcttttgcccgacgag

SEQ ID NO: 1391038 - DNA, 25 bp, Homo sapien
cactcttgaaggaacaggagccggc

SEQ ID NO: 1391039 - DNA, 25 bp, Homo sapien
gacccgtcccaagtggacccgcgca

SEQ ID NO: 1391040 - DNA, 25 bp, Homo sapien
aggagcacgggaaaacgagtcctgt

SEQ ID NO: 1391041 - DNA, 25 bp, Homo sapien
gagcacgggaaaacgagtcctgtgg

SEQ ID NO: 1391042 - DNA, 25 bp, Homo sapien
agcacgggaaaacgagtcctgtggt

SEQ ID NO: 1391043 - DNA, 25 bp, Homo sapien
cacgggaaaacgagtcctgtggtga

SEQ ID NO: 1391044 - DNA, 25 bp, Homo sapien
agtggtagtgaatctgtcgggccat

SEQ ID NO: 1391045 - DNA, 25 bp, Homo sapien
tcagagctgcggaaactacaactcc

SEQ ID NO: 1391046 - DNA, 25 bp, Homo sapien
gatggcccacggacgtgcctggtcc

SEQ ID NO: 1391047 - DNA, 25 bp, Homo sapien
cgcgtaccgcggctcccaagaagtg

SEQ ID NO: 1391048 - DNA, 25 bp, Homo sapien
cttttaaagttccacactgaaacat

SEQ ID NO: 1391049 - DNA, 25 bp, Homo sapien
gaaccgtcgttctgagagatgcctt

SEQ ID NO: 1391050 - DNA, 25 bp, Homo sapien
tctgaaccgtcgttctgagagatgc

SEQ ID NO: 1391051 - DNA, 25 bp, Homo sapien
tcattctgaaccgtcgttctgagag

SEQ ID NO: 1391052 - DNA, 25 bp, Homo sapien
ctgagatggtaataggtgtgctgat

SEQ ID NO: 1391053 - DNA, 25 bp, Homo sapien
tggtaataggtgtgctgatgcctga

SEQ ID NO: 1391054 - DNA, 25 bp, Homo sapien
gggagtggtcaagcgctggcagcag

SEQ ID NO: 1391055 - DNA, 25 bp, Homo sapien
gagggagtggtcaagcgctggcagc

SEQ ID NO: 1391056 - DNA, 25 bp, Homo sapien
tgctgttctattggctgcccagtga

SEQ ID NO: 1391057 - DNA, 25 bp, Homo sapien
agtccttgctgttctattggctgcc

SEQ ID NO: 1391058 - DNA, 25 bp, Homo sapien
tattggctgcccagtgagtggagaa

SEQ ID NO: 1391059 - DNA, 25 bp, Homo sapien
tgttctattggctgcccagtgagtg

SEQ ID NO: 1391060 - DNA, 25 bp, Homo sapien
taaatatatcaagtcagagccgagg

SEQ ID NO: 1391061 - DNA, 25 bp, Homo sapien
caatcgctgtcaattttgtgagtgc

SEQ ID NO: 1391062 - DNA, 25 bp, Homo sapien
tacatgaagcatgcataagtgtcta

SEQ ID NO: 1391063 - DNA, 25 bp, Homo sapien
taagtgtctatagtacatgcagtac

SEQ ID NO: 1391064 - DNA, 25 bp, Homo sapien
gttcatggctccctatgattgttgt

SEQ ID NO: 1391065 - DNA, 25 bp, Homo sapien
ggctccctatgattgttgtcttatt

SEQ ID NO: 1391066 - DNA, 25 bp, Homo sapien
gagtacactcctcagttcatggctc

SEQ ID NO: 1391067 - DNA, 25 bp, Homo sapien
actcctcagttcatggctccctatg

SEQ ID NO: 1391068 - DNA, 25 bp, Homo sapien
cccagattgttatcataatggtccc

SEQ ID NO: 1391069 - DNA, 25 bp, Homo sapien
caccatcacccaataagacagctgg

SEQ ID NO: 1391070 - DNA, 25 bp, Homo sapien
gagctgaactgtaacctcaaaggag

SEQ ID NO: 1391071 - DNA, 25 bp, Homo sapien
gtgctttagacactctcagccctat

SEQ ID NO: 1391072 - DNA, 25 bp, Homo sapien
gatcaccccataatctgtgtaacat

SEQ ID NO: 1391073 - DNA, 25 bp, Homo sapien
tgactaaaggcatgtgatcacccca

SEQ ID NO: 1391074 - DNA, 25 bp, Homo sapien
tatttaataagactcaaagcttgac

SEQ ID NO: 1391075 - DNA, 25 bp, Homo sapien
taacatgagcctatgatctcctggg

SEQ ID NO: 1391076 - DNA, 25 bp, Homo sapien
ttctggcactgaacctacaagtagc

SEQ ID NO: 1391077 - DNA, 25 bp, Homo sapien
tttcagctctatcaacattccaggg

SEQ ID NO: 1391078 - DNA, 25 bp, Homo sapien
taaatacagaagtgacttgggcagg

SEQ ID NO: 1391079 - DNA, 25 bp, Homo sapien
ctttgactcttggaaactaggctga

SEQ ID NO: 1391080 - DNA, 25 bp, Homo sapien
gggtacctccgactgtcctacagaa

SEQ ID NO: 1391081 - DNA, 25 bp, Homo sapien
tgttcagagtcatgtaatgctgggt

SEQ ID NO: 1391082 - DNA, 25 bp, Homo sapien
tacatgcaaggtcctctctgtacca

SEQ ID NO: 1391083 - DNA, 25 bp, Homo sapien
cagaacttagtaaccatctatggcc

SEQ ID NO: 1391084 - DNA, 25 bp, Homo sapien
gtttctcgtgctgtcccatgcaagc

SEQ ID NO: 1391085 - DNA, 25 bp, Homo sapien
tgctgtcccatgcaagcacgtcttc

SEQ ID NO: 1391086 - DNA, 25 bp, Homo sapien
tcttctttgaagcttgtaaacattt

SEQ ID NO: 1391087 - DNA, 25 bp, Homo sapien
ctcttgcttgagtaagaagagcaag

SEQ ID NO: 1391088 - DNA, 25 bp, Homo sapien
cttcaagggcccattaactggatcc

SEQ ID NO: 1391089 - DNA, 25 bp, Homo sapien
caagggcccattaactggatccttc

SEQ ID NO: 1391090 - DNA, 25 bp, Homo sapien
gggcccattaactggatccttcatg

SEQ ID NO: 1391091 - DNA, 25 bp, Homo sapien
ccattaactggatccttcatggttt

SEQ ID NO: 1391092 - DNA, 25 bp, Homo sapien
ttcttttcgatgcaaaaatggaaaa

SEQ ID NO: 1391093 - DNA, 25 bp, Homo sapien
acttcttttcgatgcaaaaatggaa

SEQ ID NO: 1391094 - DNA, 25 bp, Homo sapien
gaccaacttcttttcgatgcaaaaa

SEQ ID NO: 1391095 - DNA, 25 bp, Homo sapien
caacttcttttcgatgcaaaaatgg

SEQ ID NO: 1391096 - DNA, 25 bp, Homo sapien
tgttagcaagtacatgcacgcagtc

SEQ ID NO: 1391097 - DNA, 25 bp, Homo sapien
gggcttgagtcttgttgccaagcga

SEQ ID NO: 1391098 - DNA, 25 bp, Homo sapien
taagggccttgaatcagggtaatgg

SEQ ID NO: 1391099 - DNA, 25 bp, Homo sapien
aaattctgtcaggttgaagggactg

SEQ ID NO: 1391100 - DNA, 25 bp, Homo sapien
taacagctcagttaacagccccatg

SEQ ID NO: 1391101 - DNA, 25 bp, Homo sapien
tactgatgggtatagtccaagcgct

SEQ ID NO: 1391102 - DNA, 25 bp, Homo sapien
gctggagtccagatgtaagttaaca

SEQ ID NO: 1391103 - DNA, 25 bp, Homo sapien
gaattttaaccattgcatgcctgac

SEQ ID NO: 1391104 - DNA, 25 bp, Homo sapien
tagtcacagtatgaagtggacaaca

SEQ ID NO: 1391105 - DNA, 25 bp, Homo sapien
gtagtcacagtatgaagtggacaac

SEQ ID NO: 1391106 - DNA, 25 bp, Homo sapien
ttgtagtcacagtatgaagtggaca

SEQ ID NO: 1391107 - DNA, 25 bp, Homo sapien
gtcacagtatgaagtggacaacaaa

SEQ ID NO: 1391108 - DNA, 25 bp, Homo sapien
gacataggaatctctgcgctcttta

SEQ ID NO: 1391109 - DNA, 25 bp, Homo sapien
cagggacccgggatgatcagacatt

SEQ ID NO: 1391110 - DNA, 25 bp, Homo sapien
cttggcactaagttggcagtcagca

SEQ ID NO: 1391111 - DNA, 25 bp, Homo sapien
gatccagtgaatacagagaccaggc

SEQ ID NO: 1391112 - DNA, 25 bp, Homo sapien
gaatctgagaggtacaatgctttct

SEQ ID NO: 1391113 - DNA, 25 bp, Homo sapien
tgtacagtgactccctagcagggct

SEQ ID NO: 1391114 - DNA, 25 bp, Homo sapien
taggtgtacaccctagcagaaggaa

SEQ ID NO: 1391115 - DNA, 25 bp, Homo sapien
cattggattgaactgtaaaggagct

SEQ ID NO: 1391116 - DNA, 25 bp, Homo sapien
caaggcatttgtaaagctgaggctg

SEQ ID NO: 1391117 - DNA, 25 bp, Homo sapien
cactactccgaggaatggtccatgg

SEQ ID NO: 1391118 - DNA, 25 bp, Homo sapien
tggtcctgatcctcccataaaggag

SEQ ID NO: 1391119 - DNA, 25 bp, Homo sapien
aatgagcaacgtcattgagacccgg

SEQ ID NO: 1391120 - DNA, 25 bp, Homo sapien
tctgaaaggcttcgtatactgggta

SEQ ID NO: 1391121 - DNA, 25 bp, Homo sapien
ggcttctggccataacgaacctgga

SEQ ID NO: 1391122 - DNA, 25 bp, Homo sapien
caggctgaatcgtatcacaccggaa

SEQ ID NO: 1391123 - DNA, 25 bp, Homo sapien
gattccgtagatgaagtactggccc

SEQ ID NO: 1391124 - DNA, 25 bp, Homo sapien
tgtgctgccgcggtttgacaaatcg

SEQ ID NO: 1391125 - DNA, 25 bp, Homo sapien
cagccagggaacagatgccaaaact

SEQ ID NO: 1391126 - DNA, 25 bp, Homo sapien
agccagggaacagatgccaaaactt

SEQ ID NO: 1391127 - DNA, 25 bp, Homo sapien
agtgcttgctgccttgtgttgtaat

SEQ ID NO: 1391128 - DNA, 25 bp, Homo sapien
tgctgccttgtgttgtaatcctctg

SEQ ID NO: 1391129 - DNA, 25 bp, Homo sapien
gctgccttgtgttgtaatcctctgc

SEQ ID NO: 1391130 - DNA, 25 bp, Homo sapien
caaagaatgtgaccctttggtctag

SEQ ID NO: 1391131 - DNA, 25 bp, Homo sapien
gaagtataaaaatagttccaggcaa

SEQ ID NO: 1391132 - DNA, 25 bp, Homo sapien
tgtcactcattccttgcaagtcccc

SEQ ID NO: 1391133 - DNA, 25 bp, Homo sapien
gcaagttttccacactcagtccctg

SEQ ID NO: 1391134 - DNA, 25 bp, Homo sapien
cagatgctcagtttataatgtgaaa

SEQ ID NO: 1391135 - DNA, 25 bp, Homo sapien
tgtagttacttttccagctacgttg

SEQ ID NO: 1391136 - DNA, 25 bp, Homo sapien
tttccagctacgttggctccctttg

SEQ ID NO: 1391137 - DNA, 25 bp, Homo sapien
tgctcagtttataatgtgaaaggtc

SEQ ID NO: 1391138 - DNA, 25 bp, Homo sapien
aaagaatttggatctaggtgataat

SEQ ID NO: 1391139 - DNA, 25 bp, Homo sapien
tagtttacccagttacacacacaaa

SEQ ID NO: 1391140 - DNA, 25 bp, Homo sapien
gatattcccaactacgtcttctagt

SEQ ID NO: 1391141 - DNA, 25 bp, Homo sapien
tcactgacacctttctatgtgccag

SEQ ID NO: 1391142 - DNA, 25 bp, Homo sapien
actcttgggctcagacgatctaccc

SEQ ID NO: 1391143 - DNA, 25 bp, Homo sapien
cttgggctcagacgatctacccact

SEQ ID NO: 1391144 - DNA, 25 bp, Homo sapien
ggaaccttgacctcctgaactcagg

SEQ ID NO: 1391145 - DNA, 25 bp, Homo sapien
aactcttgggctcagacgatctacc

SEQ ID NO: 1391146 - DNA, 25 bp, Homo sapien
tcacactgctagtaagagctcccag

SEQ ID NO: 1391147 - DNA, 25 bp, Homo sapien
gctcagagagggtaacttgagcaag

SEQ ID NO: 1391148 - DNA, 25 bp, Homo sapien
tcagagagggtaacttgagcaagat

SEQ ID NO: 1391149 - DNA, 25 bp, Homo sapien
actgctagtaagagctcccagctca

SEQ ID NO: 1391150 - DNA, 25 bp, Homo sapien
gttcggtgctctttgcactgccctg

SEQ ID NO: 1391151 - DNA, 25 bp, Homo sapien
tccctgttcggtgctctttgcactg

SEQ ID NO: 1391152 - DNA, 25 bp, Homo sapien
ggtcttctgactccctgttcggtgc

SEQ ID NO: 1391153 - DNA, 25 bp, Homo sapien
cctgttcggtgctctttgcactgcc

SEQ ID NO: 1391154 - DNA, 25 bp, Homo sapien
tgtttttatccagcctagaatccaa

SEQ ID NO: 1391155 - DNA, 25 bp, Homo sapien
aaggaataaactcacaggtagaaag

SEQ ID NO: 1391156 - DNA, 25 bp, Homo sapien
tgctgcttcgctaaaccttcctttt

SEQ ID NO: 1391157 - DNA, 25 bp, Homo sapien
cactatcacaggaaatagcgggagg

SEQ ID NO: 1391158 - DNA, 25 bp, Homo sapien
tgctcttgagcctgtcagttgttcc

SEQ ID NO: 1391159 - DNA, 25 bp, Homo sapien
tgcccacgctttttgctcttgagcc

SEQ ID NO: 1391160 - DNA, 25 bp, Homo sapien
caactgcccacgctttttgctcttg

SEQ ID NO: 1391161 - DNA, 25 bp, Homo sapien
cagttgttcctcttccaccgtcttt

SEQ ID NO: 1391162 - DNA, 25 bp, Homo sapien
ttgtgctcttagagtctttgctcta

SEQ ID NO: 1391163 - DNA, 25 bp, Homo sapien
tgctctaaaagtcttcttccctcca

SEQ ID NO: 1391164 - DNA, 25 bp, Homo sapien
cctcgtagcctcagctcactgtgct

SEQ ID NO: 1391165 - DNA, 25 bp, Homo sapien
tccacctcctcgtagcctcagctca

SEQ ID NO: 1391166 - DNA, 25 bp, Homo sapien
gcaagaacggtgagtcctccgtgcc

SEQ ID NO: 1391167 - DNA, 25 bp, Homo sapien
tgtcagcatctaattgcaagaacgg

SEQ ID NO: 1391168 - DNA, 25 bp, Homo sapien
caggcataagccgtcccctttaaga

SEQ ID NO: 1391169 - DNA, 25 bp, Homo sapien
taaaaagggcaagaacactctgttc

SEQ ID NO: 1391170 - DNA, 25 bp, Homo sapien
caccacaagcctgttaccccagaac

SEQ ID NO: 1391171 - DNA, 25 bp, Homo sapien
ccacaagcctgttaccccagaacag

SEQ ID NO: 1391172 - DNA, 25 bp, Homo sapien
acaagcctgttaccccagaacagcc

SEQ ID NO: 1391173 - DNA, 25 bp, Homo sapien
aagcctgttaccccagaacagccag

SEQ ID NO: 1391174 - DNA, 25 bp, Homo sapien
caactgatgattaagggcagacacg

SEQ ID NO: 1391175 - DNA, 25 bp, Homo sapien
tgctggcagagaccggattgacaag

SEQ ID NO: 1391176 - DNA, 25 bp, Homo sapien
tcaagtagctgggtcgccgattcag

SEQ ID NO: 1391177 - DNA, 25 bp, Homo sapien
tcccggcaacaggaacatcttgggc

SEQ ID NO: 1391178 - DNA, 25 bp, Homo sapien
ccatcctgtgcctccgtaagagttt

SEQ ID NO: 1391179 - DNA, 25 bp, Homo sapien
atcctgaaccatcctgtgcctccgt

SEQ ID NO: 1391180 - DNA, 25 bp, Homo sapien
gagttttgttctctggagtaaggtg

SEQ ID NO: 1391181 - DNA, 25 bp, Homo sapien
tctggagtaaggtgttgggccttat

SEQ ID NO: 1391182 - DNA, 25 bp, Homo sapien
aaggtcaaaagcaactgctcccctc

SEQ ID NO: 1391183 - DNA, 25 bp, Homo sapien
aggtcaaaagcaactgctcccctcc

SEQ ID NO: 1391184 - DNA, 25 bp, Homo sapien
cctccggtgcagatagcactttata

SEQ ID NO: 1391185 - DNA, 25 bp, Homo sapien
agcaatgacacctccggtgcagata

SEQ ID NO: 1391186 - DNA, 25 bp, Homo sapien
tgacacctccggtgcagatagcact

SEQ ID NO: 1391187 - DNA, 25 bp, Homo sapien
gcagatagcactttataaggtgctt

SEQ ID NO: 1391188 - DNA, 25 bp, Homo sapien
tgttaccaaactcttgaagtccagc

SEQ ID NO: 1391189 - DNA, 25 bp, Homo sapien
gactttcatttcaaggccaacccaa

SEQ ID NO: 1391190 - DNA, 25 bp, Homo sapien
taaacttcaaatttgggcctggata

SEQ ID NO: 1391191 - DNA, 25 bp, Homo sapien
tgtgaaagtacaggatcttccaccc

SEQ ID NO: 1391192 - DNA, 25 bp, Homo sapien
taattctgtccaaggtgatgcggca

SEQ ID NO: 1391193 - DNA, 25 bp, Homo sapien
cctggttttacccatggccagtggc

SEQ ID NO: 1391194 - DNA, 25 bp, Homo sapien
cctagttctggagatgcttcctctg

SEQ ID NO: 1391195 - DNA, 25 bp, Homo sapien
cagcctgtgctaattctgtccaagg

SEQ ID NO: 1391196 - DNA, 25 bp, Homo sapien
acattggtaccatcctccttcaaac

SEQ ID NO: 1391197 - DNA, 25 bp, Homo sapien
attggtaccatcctccttcaaactg

SEQ ID NO: 1391198 - DNA, 25 bp, Homo sapien
aacattggtaccatcctccttcaaa

SEQ ID NO: 1391199 - DNA, 25 bp, Homo sapien
ttggtaccatcctccttcaaactgc

SEQ ID NO: 1391200 - DNA, 25 bp, Homo sapien
gcagctctcagacatgatcaaaggg

SEQ ID NO: 1391201 - DNA, 25 bp, Homo sapien
agagggagcctctcacaaagtgggt

SEQ ID NO: 1391202 - DNA, 25 bp, Homo sapien
gatcaaagggccatcagggtggcac

SEQ ID NO: 1391203 - DNA, 25 bp, Homo sapien
tagaagcaagcccagtttcgagctg

SEQ ID NO: 1391204 - DNA, 25 bp, Homo sapien
ggagacccaggtttgtactatgcaa

SEQ ID NO: 1391205 - DNA, 25 bp, Homo sapien
gatttatcggttacggtacctagca

SEQ ID NO: 1391206 - DNA, 25 bp, Homo sapien
tcaggaatcctagagcagcttgggt

SEQ ID NO: 1391207 - DNA, 25 bp, Homo sapien
tcaaagcctacaaagatggagaccc

SEQ ID NO: 1391208 - DNA, 25 bp, Homo sapien
taaccttggaagtcgcataccatcg

SEQ ID NO: 1391209 - DNA, 25 bp, Homo sapien
gattccaccgtattctctcagactg

SEQ ID NO: 1391210 - DNA, 25 bp, Homo sapien
tcaattgtcaccataaaggaagccc

SEQ ID NO: 1391211 - DNA, 25 bp, Homo sapien
tcatccaaggataatgtgtggtcat

SEQ ID NO: 1391212 - DNA, 25 bp, Homo sapien
ctattggtctgcagaagttcacagg

SEQ ID NO: 1391213 - DNA, 25 bp, Homo sapien
tagtggcctattggtctgcagaagt

SEQ ID NO: 1391214 - DNA, 25 bp, Homo sapien
tctttctcactagtcattagtggcc

SEQ ID NO: 1391215 - DNA, 25 bp, Homo sapien
actagtcattagtggcctattggtc

SEQ ID NO: 1391216 - DNA, 25 bp, Homo sapien
ccaagcttgcaggaccttgatgtgt

SEQ ID NO: 1391217 - DNA, 25 bp, Homo sapien
cagaatttgctggaacatagacaca

SEQ ID NO: 1391218 - DNA, 25 bp, Homo sapien
cagggaaaattggaggcttgaataa

SEQ ID NO: 1391219 - DNA, 25 bp, Homo sapien
acacagtgaccttcccttgcccagg

SEQ ID NO: 1391220 - DNA, 25 bp, Homo sapien
tactcatgagataaccatatgatgg

SEQ ID NO: 1391221 - DNA, 25 bp, Homo sapien
ggtagattggttaacttactcatga

SEQ ID NO: 1391222 - DNA, 25 bp, Homo sapien
gataaccatatgatggaatgttact

SEQ ID NO: 1391223 - DNA, 25 bp, Homo sapien
aaggtagattggttaacttactcat

SEQ ID NO: 1391224 - DNA, 25 bp, Homo sapien
ttagctgtcagtatgtggatggtgc

SEQ ID NO: 1391225 - DNA, 25 bp, Homo sapien
tagtgttagtgtcaactcctgggcc

SEQ ID NO: 1391226 - DNA, 25 bp, Homo sapien
agagtaccgtaggtatgaacattgc

SEQ ID NO: 1391227 - DNA, 25 bp, Homo sapien
gggcccagtcctttgcattaatttg

SEQ ID NO: 1391228 - DNA, 25 bp, Homo sapien
cttgatagtctctttcagcactctg

SEQ ID NO: 1391229 - DNA, 25 bp, Homo sapien
tcagcactctgcactctacacactc

SEQ ID NO: 1391230 - DNA, 25 bp, Homo sapien
tgatagtctctttcagcactctgca

SEQ ID NO: 1391231 - DNA, 25 bp, Homo sapien
ttcagcactctgcactctacacact

SEQ ID NO: 1391232 - DNA, 25 bp, Homo sapien
cggcccggcctgtaaaatctcttca

SEQ ID NO: 1391233 - DNA, 25 bp, Homo sapien
caaagtgtggtacatggagtgcagt

SEQ ID NO: 1391234 - DNA, 25 bp, Homo sapien
tacagtcatatttgccgagtcaagt

SEQ ID NO: 1391235 - DNA, 25 bp, Homo sapien
tataacatttaggacacaatgcccg

SEQ ID NO: 1391236 - DNA, 25 bp, Homo sapien
tcagcctcagaaacgttaacgctac

SEQ ID NO: 1391237 - DNA, 25 bp, Homo sapien
ctccttcagcctcagaaacgttaac

SEQ ID NO: 1391238 - DNA, 25 bp, Homo sapien
cctcagaaacgttaacgctaccttg

SEQ ID NO: 1391239 - DNA, 25 bp, Homo sapien
gaaacgttaacgctaccttgcattg

SEQ ID NO: 1391240 - DNA, 25 bp, Homo sapien
ctgactggggcgcagcttgacggcg

SEQ ID NO: 1391241 - DNA, 25 bp, Homo sapien
ggcgtcgggctggagagccgcagtc

SEQ ID NO: 1391242 - DNA, 25 bp, Homo sapien
gcttgacggcgtcgggctggagagc

SEQ ID NO: 1391243 - DNA, 25 bp, Homo sapien
gagagccgcagtcccggctgcagca

SEQ ID NO: 1391244 - DNA, 25 bp, Homo sapien
aggagccttccttacacttcgccat

SEQ ID NO: 1391245 - DNA, 25 bp, Homo sapien
agtttcctgatcgactccagcatca

SEQ ID NO: 1391246 - DNA, 25 bp, Homo sapien
cacttcgccatgagtttcctgatcg

SEQ ID NO: 1391247 - DNA, 25 bp, Homo sapien
cgtgctgtggcctccgggagtggga

SEQ ID NO: 1391248 - DNA, 25 bp, Homo sapien
agagggtgtgcgatttgctgcggcc

SEQ ID NO: 1391249 - DNA, 25 bp, Homo sapien
tccacttttggaagcggtccgccga

SEQ ID NO: 1391250 - DNA, 25 bp, Homo sapien
ctcagccccggctgtcaggaggctg

SEQ ID NO: 1391251 - DNA, 25 bp, Homo sapien
cggcatccatccccggaatttcggt

SEQ ID NO: 1391252 - DNA, 25 bp, Homo sapien
tgaggacacgtcagtgcaggctttg

SEQ ID NO: 1391253 - DNA, 25 bp, Homo sapien
tgtcaaatcctgaatccgggtgtgg

SEQ ID NO: 1391254 - DNA, 25 bp, Homo sapien
tgtgcgacgcgccaatactggatac

SEQ ID NO: 1391255 - DNA, 25 bp, Homo sapien
taaggcggcggttctaggagctcct

SEQ ID NO: 1391256 - DNA, 25 bp, Homo sapien
aggtttcgtttttgcactgacacct

SEQ ID NO: 1391257 - DNA, 25 bp, Homo sapien
tgcactgacacctcgtcctttatcc

SEQ ID NO: 1391258 - DNA, 25 bp, Homo sapien
tgacacctcgtcctttatcctctgc

SEQ ID NO: 1391259 - DNA, 25 bp, Homo sapien
actgacacctcgtcctttatcctct

SEQ ID NO: 1391260 - DNA, 25 bp, Homo sapien
gtttttctgaccctcatttcttctc

SEQ ID NO: 1391261 - DNA, 25 bp, Homo sapien
tttttctgaccctcatttcttctcc

SEQ ID NO: 1391262 - DNA, 25 bp, Homo sapien
ttttctgaccctcatttcttctcca

SEQ ID NO: 1391263 - DNA, 25 bp, Homo sapien
tttatcgaccattatataaagctct

SEQ ID NO: 1391264 - DNA, 25 bp, Homo sapien
gctctgagcgtaaaaacatgtaaga

SEQ ID NO: 1391265 - DNA, 25 bp, Homo sapien
tataaagctctgagcgtaaaaacat

SEQ ID NO: 1391266 - DNA, 25 bp, Homo sapien
ttatcgaccattatataaagctctg

SEQ ID NO: 1391267 - DNA, 25 bp, Homo sapien
caaagtgtcaaagttggtaaatggc

SEQ ID NO: 1391268 - DNA, 25 bp, Homo sapien
ccaagctcatttgtgcctgcagaaa

SEQ ID NO: 1391269 - DNA, 25 bp, Homo sapien
tccaaagtctatatagtccggcgtg

SEQ ID NO: 1391270 - DNA, 25 bp, Homo sapien
tccggcgtgatcattaaaggaattc

SEQ ID NO: 1391271 - DNA, 25 bp, Homo sapien
tctgggactcctggaatccggaaac

SEQ ID NO: 1391272 - DNA, 25 bp, Homo sapien
acctaaaggattgaagcagttgacc

SEQ ID NO: 1391273 - DNA, 25 bp, Homo sapien
gaaatctgatgtctcaagctaggaa

SEQ ID NO: 1391274 - DNA, 25 bp, Homo sapien
gatgatctgtggctcaaagtgtgaa

SEQ ID NO: 1391275 - DNA, 25 bp, Homo sapien
tggtgtcattgaggccctgaatctc

SEQ ID NO: 1391276 - DNA, 25 bp, Homo sapien
agcaaggcctcaactatggtgtcat

SEQ ID NO: 1391277 - DNA, 25 bp, Homo sapien
caaggcctcaactatggtgtcattg

SEQ ID NO: 1391278 - DNA, 25 bp, Homo sapien
tgaggccctgaatctccgcagccag

SEQ ID NO: 1391279 - DNA, 25 bp, Homo sapien
atgggaggcgataggagccaatgag

SEQ ID NO: 1391280 - DNA, 25 bp, Homo sapien
gaggcgataggagccaatgagggct

SEQ ID NO: 1391281 - DNA, 25 bp, Homo sapien
tcaggtgtcgtgatgccctcttcat

SEQ ID NO: 1391282 - DNA, 25 bp, Homo sapien
taattttgacaggacatgcatagga

SEQ ID NO: 1391283 - DNA, 25 bp, Homo sapien
ttattgttacctctctgcagggtgc

SEQ ID NO: 1391284 - DNA, 25 bp, Homo sapien
tgttttagggcttatagtccaccaa

SEQ ID NO: 1391285 - DNA, 25 bp, Homo sapien
gagttgtttgaaatcagcacccttc

SEQ ID NO: 1391286 - DNA, 25 bp, Homo sapien
tgtggctaatgccattggattggca

SEQ ID NO: 1391287 - DNA, 25 bp, Homo sapien
ctcttggtaaaggaaatcgatggcc

SEQ ID NO: 1391288 - DNA, 25 bp, Homo sapien
tggattggcagctcttggtaaagga

SEQ ID NO: 1391289 - DNA, 25 bp, Homo sapien
aatcgatggccatgtataaacaatg

SEQ ID NO: 1391290 - DNA, 25 bp, Homo sapien
tgctctgggcatactccgtcacaaa

SEQ ID NO: 1391291 - DNA, 25 bp, Homo sapien
caaactacgttgtgtgaatctgagg

SEQ ID NO: 1391292 - DNA, 25 bp, Homo sapien
cgttgtgtgaatctgaggactgctt

SEQ ID NO: 1391293 - DNA, 25 bp, Homo sapien
gaaatgagttcccaaattgctcaag

SEQ ID NO: 1391294 - DNA, 25 bp, Homo sapien
gcagcgaagagactttcaattctta

SEQ ID NO: 1391295 - DNA, 25 bp, Homo sapien
tcacctctgaggagtgagattagag

SEQ ID NO: 1391296 - DNA, 25 bp, Homo sapien
cacctctgaggagtgagattagagc

SEQ ID NO: 1391297 - DNA, 25 bp, Homo sapien
tgagattagagcagcgaagagactt

SEQ ID NO: 1391298 - DNA, 25 bp, Homo sapien
tagttaatcgaataagaaactgccc

SEQ ID NO: 1391299 - DNA, 25 bp, Homo sapien
ttaatcgaataagaaactgcccagt

SEQ ID NO: 1391300 - DNA, 25 bp, Homo sapien
gcaccaaatagttaatcgaataaga

SEQ ID NO: 1391301 - DNA, 25 bp, Homo sapien
tccaaaagcaccaaatagttaatcg

SEQ ID NO: 1391302 - DNA, 25 bp, Homo sapien
ctgctgtcctgagagtccttctcac

SEQ ID NO: 1391303 - DNA, 25 bp, Homo sapien
agagcccagcctccttgtctccctc

SEQ ID NO: 1391304 - DNA, 25 bp, Homo sapien
ggcccttctggtcctcatcacctgt

SEQ ID NO: 1391305 - DNA, 25 bp, Homo sapien
gtgtcccatgggctgccaccctgcc

SEQ ID NO: 1391306 - DNA, 25 bp, Homo sapien
ttgtttttaaggtacctgcatgacc

SEQ ID NO: 1391307 - DNA, 25 bp, Homo sapien
catgttcaattatagccagagaagg

SEQ ID NO: 1391308 - DNA, 25 bp, Homo sapien
tgcatgacccatgaagcatcataac

SEQ ID NO: 1391309 - DNA, 25 bp, Homo sapien
catataaccgtctgtcaaaataaga

SEQ ID NO: 1391310 - DNA, 25 bp, Homo sapien
tccgcaaatctccagaggtaatgat

SEQ ID NO: 1391311 - DNA, 25 bp, Homo sapien
ttaatccaccagtgacgcagctgcg

SEQ ID NO: 1391312 - DNA, 25 bp, Homo sapien
gcgactcctggacacaatataagct

SEQ ID NO: 1391313 - DNA, 25 bp, Homo sapien
ttgtcatggcctctccagcacgatg

SEQ ID NO: 1391314 - DNA, 25 bp, Homo sapien
gaagatccgaggtccctctctgcag

SEQ ID NO: 1391315 - DNA, 25 bp, Homo sapien
agttttggggacgtgctgctctcca

SEQ ID NO: 1391316 - DNA, 25 bp, Homo sapien
gggcccatccttcattttgccgata

SEQ ID NO: 1391317 - DNA, 25 bp, Homo sapien
gaagatttgcttggtggagtataaa

SEQ ID NO: 1391318 - DNA, 25 bp, Homo sapien
ccaggagttgaacacggatctcgtg

SEQ ID NO: 1391319 - DNA, 25 bp, Homo sapien
attccaccactaaaaccactgacgc

SEQ ID NO: 1391320 - DNA, 25 bp, Homo sapien
tgcaccaaccaggagttgaacacgg

SEQ ID NO: 1391321 - DNA, 25 bp, Homo sapien
acacggatctcgtgcatgggaggca

SEQ ID NO: 1391322 - DNA, 25 bp, Homo sapien
tcagtttcttgtctccggtgctgta

SEQ ID NO: 1391323 - DNA, 25 bp, Homo sapien
ccaacgtgaacctgtggaaagttct

SEQ ID NO: 1391324 - DNA, 25 bp, Homo sapien
tgctgtatccaacgtgaacctgtgg

SEQ ID NO: 1391325 - DNA, 25 bp, Homo sapien
tcttgtctccggtgctgtatccaac

SEQ ID NO: 1391326 - DNA, 25 bp, Homo sapien
caaccttgacacgaacatcagtact

SEQ ID NO: 1391327 - DNA, 25 bp, Homo sapien
ccaaccttgacacgaacatcagtac

SEQ ID NO: 1391328 - DNA, 25 bp, Homo sapien
ccttgacacgaacatcagtactttc

SEQ ID NO: 1391329 - DNA, 25 bp, Homo sapien
tcccaaccttgacacgaacatcagt

SEQ ID NO: 1391330 - DNA, 25 bp, Homo sapien
ctgggtaataattgagcttctctcc

SEQ ID NO: 1391331 - DNA, 25 bp, Homo sapien
tgggtaataattgagcttctctcct

SEQ ID NO: 1391332 - DNA, 25 bp, Homo sapien
taattgagcttctctcctcatgtac

SEQ ID NO: 1391333 - DNA, 25 bp, Homo sapien
taataattgagcttctctcctcatg

SEQ ID NO: 1391334 - DNA, 25 bp, Homo sapien
ccctccgtgcgggacacagcatccg

SEQ ID NO: 1391335 - DNA, 25 bp, Homo sapien
ggaccctccgtgcgggacacagcat

SEQ ID NO: 1391336 - DNA, 25 bp, Homo sapien
gctcctcagcgccccgaaagcgact

SEQ ID NO: 1391337 - DNA, 25 bp, Homo sapien
gtggaccctccgtgcgggacacagc

SEQ ID NO: 1391338 - DNA, 25 bp, Homo sapien
gctgctcgggcccggatcgcggacc

SEQ ID NO: 1391339 - DNA, 25 bp, Homo sapien
tggctgctcgggcccggatcgcgga

SEQ ID NO: 1391340 - DNA, 25 bp, Homo sapien
tgctcgggcccggatcgcggaccgg

SEQ ID NO: 1391341 - DNA, 25 bp, Homo sapien
ggctgctcgggcccggatcgcggac

SEQ ID NO: 1391342 - DNA, 25 bp, Homo sapien
cgctctaatcgctccgattttccaa

SEQ ID NO: 1391343 - DNA, 25 bp, Homo sapien
taatcgctccgattttccaaggcct

SEQ ID NO: 1391344 - DNA, 25 bp, Homo sapien
gtagtcctgccaggcgggctctgag

SEQ ID NO: 1391345 - DNA, 25 bp, Homo sapien
aggccttgctcagtagtcctgccag

SEQ ID NO: 1391346 - DNA, 25 bp, Homo sapien
tttagagctattggctcttgttccc

SEQ ID NO: 1391347 - DNA, 25 bp, Homo sapien
ctttagagctattggctcttgttcc

SEQ ID NO: 1391348 - DNA, 25 bp, Homo sapien
cttgttcccgcagttcttctgtttt

SEQ ID NO: 1391349 - DNA, 25 bp, Homo sapien
ggctcttgttcccgcagttcttctg

SEQ ID NO: 1391350 - DNA, 25 bp, Homo sapien
caaaccacgggtagctattgaacac

SEQ ID NO: 1391351 - DNA, 25 bp, Homo sapien
caacctaaacatgctgcactggaca

SEQ ID NO: 1391352 - DNA, 25 bp, Homo sapien
taaaagtacgtatatgcctggcatt

SEQ ID NO: 1391353 - DNA, 25 bp, Homo sapien
tatgtccctgttttgaagccgtgta

SEQ ID NO: 1391354 - DNA, 25 bp, Homo sapien
gcacggaggtactttctccagccct

SEQ ID NO: 1391355 - DNA, 25 bp, Homo sapien
gaaaatgcacggaggtactttctcc

SEQ ID NO: 1391356 - DNA, 25 bp, Homo sapien
tctgctcccgatgaccctttcaggg

SEQ ID NO: 1391357 - DNA, 25 bp, Homo sapien
aagaagtgatctgctcccgatgacc

SEQ ID NO: 1391358 - DNA, 25 bp, Homo sapien
cagaagaacgtctttatgaatcccc

SEQ ID NO: 1391359 - DNA, 25 bp, Homo sapien
gtatatgagcgatgggtcccccaga

SEQ ID NO: 1391360 - DNA, 25 bp, Homo sapien
tgaaggcggcctcgtagagcattcc

SEQ ID NO: 1391361 - DNA, 25 bp, Homo sapien
tcctgctcttatgggagggtatatg

SEQ ID NO: 1391362 - DNA, 25 bp, Homo sapien
ccccttccctgaaagttctgttctg

SEQ ID NO: 1391363 - DNA, 25 bp, Homo sapien
ctggccccttccctgaaagttctgt

SEQ ID NO: 1391364 - DNA, 25 bp, Homo sapien
ccttccctgaaagttctgttctggc

SEQ ID NO: 1391365 - DNA, 25 bp, Homo sapien
ttccctgaaagttctgttctggcag

SEQ ID NO: 1391366 - DNA, 25 bp, Homo sapien
gttgtgcaccagcatttattttgtc

SEQ ID NO: 1391367 - DNA, 25 bp, Homo sapien
accagcatttattttgtctctggag

SEQ ID NO: 1391368 - DNA, 25 bp, Homo sapien
gtctctggaggagatcaccatccat

SEQ ID NO: 1391369 - DNA, 25 bp, Homo sapien
ctgttgtgcaccagcatttattttg

SEQ ID NO: 1391370 - DNA, 25 bp, Homo sapien
tcatagaaggaattgtacattgtca

SEQ ID NO: 1391371 - DNA, 25 bp, Homo sapien
agttcatagaaggaattgtacattg

SEQ ID NO: 1391372 - DNA, 25 bp, Homo sapien
catagaaggaattgtacattgtcaa

SEQ ID NO: 1391373 - DNA, 25 bp, Homo sapien
ttcatagaaggaattgtacattgtc

SEQ ID NO: 1391374 - DNA, 25 bp, Homo sapien
ctccgcagcccgctttagatgatag

SEQ ID NO: 1391375 - DNA, 25 bp, Homo sapien
agcctccgcagcccgctttagatga

SEQ ID NO: 1391376 - DNA, 25 bp, Homo sapien
cagcctccgcagcccgctttagatg

SEQ ID NO: 1391377 - DNA, 25 bp, Homo sapien
gcctccgcagcccgctttagatgat

SEQ ID NO: 1391378 - DNA, 25 bp, Homo sapien
gcagcccccgcagtagtttgtagga

SEQ ID NO: 1391379 - DNA, 25 bp, Homo sapien
cagggaatgtgttctcacctcctag

SEQ ID NO: 1391380 - DNA, 25 bp, Homo sapien
catggtctccagtctcttgggttct

SEQ ID NO: 1391381 - DNA, 25 bp, Homo sapien
tcgtgttttttcgtagcctccagag

SEQ ID NO: 1391382 - DNA, 25 bp, Homo sapien
atacattcttctctctgtagatata

SEQ ID NO: 1391383 - DNA, 25 bp, Homo sapien
atatacattcttctctctgtagata

SEQ ID NO: 1391384 - DNA, 25 bp, Homo sapien
tacattcttctctctgtagatatac

SEQ ID NO: 1391385 - DNA, 25 bp, Homo sapien
tatacattcttctctctgtagatat

SEQ ID NO: 1391386 - DNA, 25 bp, Homo sapien
gagacgaagagggtgacatcgcgag

SEQ ID NO: 1391387 - DNA, 25 bp, Homo sapien
ttgcccgaatgtccgaggcccaggt

SEQ ID NO: 1391388 - DNA, 25 bp, Homo sapien
cacaagaccatgagtcaagtgttgc

SEQ ID NO: 1391389 - DNA, 25 bp, Homo sapien
caagtgttgcccgaatgtccgaggc

SEQ ID NO: 1391390 - DNA, 25 bp, Homo sapien
agcttctgaacatcagcggaatctc

SEQ ID NO: 1391391 - DNA, 25 bp, Homo sapien
cttctgaacatcagcggaatctcca

SEQ ID NO: 1391392 - DNA, 25 bp, Homo sapien
agcagaagggacaccgagacctgca

SEQ ID NO: 1391393 - DNA, 25 bp, Homo sapien
gagcagaagggacaccgagacctgc

SEQ ID NO: 1391394 - DNA, 25 bp, Homo sapien
tcgaactcggatcgctggattcaga

SEQ ID NO: 1391395 - DNA, 25 bp, Homo sapien
ggattcagagtccagagtgcttacc

SEQ ID NO: 1391396 - DNA, 25 bp, Homo sapien
gagtgcttaccattacaccatggaa

SEQ ID NO: 1391397 - DNA, 25 bp, Homo sapien
aaggttccaccgagactcgaactcg

SEQ ID NO: 1391398 - DNA, 25 bp, Homo sapien
aggccaaaagtcaaagatcgatgag

SEQ ID NO: 1391399 - DNA, 25 bp, Homo sapien
gccaaaagtcaaagatcgatgagct

SEQ ID NO: 1391400 - DNA, 25 bp, Homo sapien
aaaagtcaaagatcgatgagctcac

SEQ ID NO: 1391401 - DNA, 25 bp, Homo sapien
caaaagtcaaagatcgatgagctca

SEQ ID NO: 1391402 - DNA, 25 bp, Homo sapien
tcagggtagtaggtcttaggtatgg

SEQ ID NO: 1391403 - DNA, 25 bp, Homo sapien
aaaggtgatctgagcagtagctgga

SEQ ID NO: 1391404 - DNA, 25 bp, Homo sapien
gtgggaggtgtaatttctaccactg

SEQ ID NO: 1391405 - DNA, 25 bp, Homo sapien
gggaggtgtaatttctaccactgaa

SEQ ID NO: 1391406 - DNA, 25 bp, Homo sapien
ggaggtgtaatttctaccactgaac

SEQ ID NO: 1391407 - DNA, 25 bp, Homo sapien
tgggaggtgtaatttctaccactga

SEQ ID NO: 1391408 - DNA, 25 bp, Homo sapien
cacagcagttagtgttacattggag

SEQ ID NO: 1391409 - DNA, 25 bp, Homo sapien
ttggagatgacaggcacagttagtc

SEQ ID NO: 1391410 - DNA, 25 bp, Homo sapien
tgcccattaaaccattagagctggc

SEQ ID NO: 1391411 - DNA, 25 bp, Homo sapien
tatccaatctgagagacttaaatcc

SEQ ID NO: 1391412 - DNA, 25 bp, Homo sapien
cacgttctgaggagtttagtatatg

SEQ ID NO: 1391413 - DNA, 25 bp, Homo sapien
gttctgaggagtttagtatatgctc

SEQ ID NO: 1391414 - DNA, 25 bp, Homo sapien
aacacgttctgaggagtttagtata

SEQ ID NO: 1391415 - DNA, 25 bp, Homo sapien
cgttctgaggagtttagtatatgct

SEQ ID NO: 1391416 - DNA, 25 bp, Homo sapien
cccatccaacgttaggaggagccac

SEQ ID NO: 1391417 - DNA, 25 bp, Homo sapien
atgcagagcaagagcccatccaacg

SEQ ID NO: 1391418 - DNA, 25 bp, Homo sapien
agagcaagagcccatccaacgttag

SEQ ID NO: 1391419 - DNA, 25 bp, Homo sapien
gcaagagcccatccaacgttaggag

SEQ ID NO: 1391420 - DNA, 25 bp, Homo sapien
tcagacttggtgtgtacccctttgt

SEQ ID NO: 1391421 - DNA, 25 bp, Homo sapien
ccgatcagacttggtgtgtacccct

SEQ ID NO: 1391422 - DNA, 25 bp, Homo sapien
agaaatgtattctgctacattctct

SEQ ID NO: 1391423 - DNA, 25 bp, Homo sapien
gtctgtggctcaccttctcactttc

SEQ ID NO: 1391424 - DNA, 25 bp, Homo sapien
cctgttatctcttaaggcagaaatg

SEQ ID NO: 1391425 - DNA, 25 bp, Homo sapien
ccttctcactttctcatggtgattc

SEQ ID NO: 1391426 - DNA, 25 bp, Homo sapien
cgaagtggtccctaaagctcctctg

SEQ ID NO: 1391427 - DNA, 25 bp, Homo sapien
aagtggtccctaaagctcctctgca

SEQ ID NO: 1391428 - DNA, 25 bp, Homo sapien
acgaagtggtccctaaagctcctct

SEQ ID NO: 1391429 - DNA, 25 bp, Homo sapien
gtccctaaagctcctctgcaggccc

SEQ ID NO: 1391430 - DNA, 25 bp, Homo sapien
cagaaccaacaattgactcatgtga

SEQ ID NO: 1391431 - DNA, 25 bp, Homo sapien
gaaggagctctctcttactcatggg

SEQ ID NO: 1391432 - DNA, 25 bp, Homo sapien
cagttggcaagcttgagacacagga

SEQ ID NO: 1391433 - DNA, 25 bp, Homo sapien
tactcatgggcaggtcagacttttg

SEQ ID NO: 1391434 - DNA, 25 bp, Homo sapien
ggctgtgacccttctgcagacaaca

SEQ ID NO: 1391435 - DNA, 25 bp, Homo sapien
cagacaacagcatcactatgctagg

SEQ ID NO: 1391436 - DNA, 25 bp, Homo sapien
cactatgctaggcacaaatgtgtca

SEQ ID NO: 1391437 - DNA, 25 bp, Homo sapien
tgaaggctgtgacccttctgcagac

SEQ ID NO: 1391438 - DNA, 25 bp, Homo sapien
catctgtgctactgtttcagcataa

SEQ ID NO: 1391439 - DNA, 25 bp, Homo sapien
ggcaatggcattaaactgtctcacc

SEQ ID NO: 1391440 - DNA, 25 bp, Homo sapien
caacgatgctgttatcaggaggtaa

SEQ ID NO: 1391441 - DNA, 25 bp, Homo sapien
catggagtgctgacatgtcaacgat

SEQ ID NO: 1391442 - DNA, 25 bp, Homo sapien
aagaggatcctctcgcccatcctgg

SEQ ID NO: 1391443 - DNA, 25 bp, Homo sapien
aaagaggatcctctcgcccatcctg

SEQ ID NO: 1391444 - DNA, 25 bp, Homo sapien
agaggatcctctcgcccatcctgga

SEQ ID NO: 1391445 - DNA, 25 bp, Homo sapien
gtagttaggtctcctgtcagcctga

SEQ ID NO: 1391446 - DNA, 25 bp, Homo sapien
aggtgcgcggtacagggaagaagag

SEQ ID NO: 1391447 - DNA, 25 bp, Homo sapien
gggcaggtgcgcggtacagggaaga

SEQ ID NO: 1391448 - DNA, 25 bp, Homo sapien
cctgctggtctcagtcgccggtagt

SEQ ID NO: 1391449 - DNA, 25 bp, Homo sapien
gcaagggatccctttctgacgggaa

SEQ ID NO: 1391450 - DNA, 25 bp, Homo sapien
cgcaagggatccctttctgacggga

SEQ ID NO: 1391451 - DNA, 25 bp, Homo sapien
ttgagtaagcggaagagagatcaag

SEQ ID NO: 1391452 - DNA, 25 bp, Homo sapien
tgaggtttcaagatctaaagttacc

SEQ ID NO: 1391453 - DNA, 25 bp, Homo sapien
ctgttgagtaagcggaagagagatc

SEQ ID NO: 1391454 - DNA, 25 bp, Homo sapien
aaaatcctgtgaggtttcaagatct

SEQ ID NO: 1391455 - DNA, 25 bp, Homo sapien
aacagcttttgttgttccaactgct

SEQ ID NO: 1391456 - DNA, 25 bp, Homo sapien
agcttttgttgttccaactgctctt

SEQ ID NO: 1391457 - DNA, 25 bp, Homo sapien
cagcttttgttgttccaactgctct

SEQ ID NO: 1391458 - DNA, 25 bp, Homo sapien
ttgcaacatcccacatgaagaatgc

SEQ ID NO: 1391459 - DNA, 25 bp, Homo sapien
atcaaaaattagacaccctccaggg

SEQ ID NO: 1391460 - DNA, 25 bp, Homo sapien
cagcatcaaaaattagacaccctcc

SEQ ID NO: 1391461 - DNA, 25 bp, Homo sapien
tcagtttctaatttgcaacatccca

SEQ ID NO: 1391462 - DNA, 25 bp, Homo sapien
catggtagggttatggtgaggaacc

SEQ ID NO: 1391463 - DNA, 25 bp, Homo sapien
ataaactgggtagctgatccacaac

SEQ ID NO: 1391464 - DNA, 25 bp, Homo sapien
tagctgatccacaacagacatttct

SEQ ID NO: 1391465 - DNA, 25 bp, Homo sapien
actgggtagctgatccacaacagac

SEQ ID NO: 1391466 - DNA, 25 bp, Homo sapien
cagggagaaaatagtcacgaaactt

SEQ ID NO: 1391467 - DNA, 25 bp, Homo sapien
caagtatgctagatgggtaaaagac

SEQ ID NO: 1391468 - DNA, 25 bp, Homo sapien
gaagaaatgagacagcctcagacag

SEQ ID NO: 1391469 - DNA, 25 bp, Homo sapien
aagtatgctgagatcttcttacctg

SEQ ID NO: 1391470 - DNA, 25 bp, Homo sapien
agacctatacaagaagaattttcgt

SEQ ID NO: 1391471 - DNA, 25 bp, Homo sapien
cttggtattcctcaagggaaatgaa

SEQ ID NO: 1391472 - DNA, 25 bp, Homo sapien
gaatgcacgtgtccacaaaaagacc

SEQ ID NO: 1391473 - DNA, 25 bp, Homo sapien
acaattccagtacttggtattcctc

SEQ ID NO: 1391474 - DNA, 25 bp, Homo sapien
ttgtcgtttcgtgtgtaacagcccc

SEQ ID NO: 1391475 - DNA, 25 bp, Homo sapien
gagacaagccattgtaggccacaac

SEQ ID NO: 1391476 - DNA, 25 bp, Homo sapien
ttggcatacaaacttggtgacgggc

SEQ ID NO: 1391477 - DNA, 25 bp, Homo sapien
gtggaaagacccctggcaccagatt

SEQ ID NO: 1391478 - DNA, 25 bp, Homo sapien
ttcgaaccgaggttgctgcggccac

SEQ ID NO: 1391479 - DNA, 25 bp, Homo sapien
tgactcggattcgaaccgaggttgc

SEQ ID NO: 1391480 - DNA, 25 bp, Homo sapien
ctcggattcgaaccgaggttgctgc

SEQ ID NO: 1391481 - DNA, 25 bp, Homo sapien
tgccgtgactcggattcgaaccgag

SEQ ID NO: 1391482 - DNA, 25 bp, Homo sapien
caatggatttcgattattaggcgga

SEQ ID NO: 1391483 - DNA, 25 bp, Homo sapien
cgcgatggcggagcttgctctagcc

SEQ ID NO: 1391484 - DNA, 25 bp, Homo sapien
gctctagcccttttgacgtcaatgg

SEQ ID NO: 1391485 - DNA, 25 bp, Homo sapien
gagccacaggctaagccgcgatggc

SEQ ID NO: 1391486 - DNA, 25 bp, Homo sapien
caatgcacggcaagatgtgccggca

SEQ ID NO: 1391487 - DNA, 25 bp, Homo sapien
tacaaaaggcagtagctccgccgaa

SEQ ID NO: 1391488 - DNA, 25 bp, Homo sapien
cgccgaacgttggatcgtcccttgg

SEQ ID NO: 1391489 - DNA, 25 bp, Homo sapien
tgccggcaagatgtgcctctcaggt

SEQ ID NO: 1391490 - DNA, 25 bp, Homo sapien
attccttcatcgggaattgaacccg

SEQ ID NO: 1391491 - DNA, 25 bp, Homo sapien
cacaggtgaaagcaccgaatcctag

SEQ ID NO: 1391492 - DNA, 25 bp, Homo sapien
aattgaacccgggccgcacaggtga

SEQ ID NO: 1391493 - DNA, 25 bp, Homo sapien
acccgggccgcacaggtgaaagcac

SEQ ID NO: 1391494 - DNA, 25 bp, Homo sapien
actggaaatttctggatctaaagct

SEQ ID NO: 1391495 - DNA, 25 bp, Homo sapien
tggatctaaagctaacatgaagtcc

SEQ ID NO: 1391496 - DNA, 25 bp, Homo sapien
ggtttcagagacattgtagctgtca

SEQ ID NO: 1391497 - DNA, 25 bp, Homo sapien
ccttggtttcagagacattgtagct

SEQ ID NO: 1391498 - DNA, 25 bp, Homo sapien
aagactgctgatcgcaataggcccg

SEQ ID NO: 1391499 - DNA, 25 bp, Homo sapien
cagccggcgggttttgagcttccga

SEQ ID NO: 1391500 - DNA, 25 bp, Homo sapien
gatccctcaggtaagaagactgctg

SEQ ID NO: 1391501 - DNA, 25 bp, Homo sapien
catgtgcgggattcgcctggctaac

SEQ ID NO: 1391502 - DNA, 25 bp, Homo sapien
aacgcgctgattgcgcaacagagac

SEQ ID NO: 1391503 - DNA, 25 bp, Homo sapien
cagcctttctgttaacagccaaacg

SEQ ID NO: 1391504 - DNA, 25 bp, Homo sapien
ccaaacgcgctgattgcgcaacaga

SEQ ID NO: 1391505 - DNA, 25 bp, Homo sapien
tccctggttgggctcggaccaccag

SEQ ID NO: 1391506 - DNA, 25 bp, Homo sapien
tcaggagggaaaaccggagacatta

SEQ ID NO: 1391507 - DNA, 25 bp, Homo sapien
gtgagtcgcgctgatcacgttgcac

SEQ ID NO: 1391508 - DNA, 25 bp, Homo sapien
tcacgttgcacacccgcgggttggg

SEQ ID NO: 1391509 - DNA, 25 bp, Homo sapien
tgatcacgttgcacacccgcgggtt

SEQ ID NO: 1391510 - DNA, 25 bp, Homo sapien
cccacactgcccagtcgctttaggg

SEQ ID NO: 1391511 - DNA, 25 bp, Homo sapien
ccacactgcccagtcgctttagggg

SEQ ID NO: 1391512 - DNA, 25 bp, Homo sapien
cacactgcccagtcgctttaggggc

SEQ ID NO: 1391513 - DNA, 25 bp, Homo sapien
gcccacactgcccagtcgctttagg

SEQ ID NO: 1391514 - DNA, 25 bp, Homo sapien
tgagagttcctcgtggtcccctcgc

SEQ ID NO: 1391515 - DNA, 25 bp, Homo sapien
agagttcctcgtggtcccctcgcgg

SEQ ID NO: 1391516 - DNA, 25 bp, Homo sapien
ggatggtggtgagagttcctcgtgg

SEQ ID NO: 1391517 - DNA, 25 bp, Homo sapien
tggtgagagttcctcgtggtcccct

SEQ ID NO: 1391518 - DNA, 25 bp, Homo sapien
gagtgaatccattgtcgcctttaac

SEQ ID NO: 1391519 - DNA, 25 bp, Homo sapien
ggcgcaggactaagactcgtcgagt

SEQ ID NO: 1391520 - DNA, 25 bp, Homo sapien
gactcgtcgagtgaatccattgtcg

SEQ ID NO: 1391521 - DNA, 25 bp, Homo sapien
gactaagactcgtcgagtgaatcca

SEQ ID NO: 1391522 - DNA, 25 bp, Homo sapien
tgaacttaactgcagacaaagagac

SEQ ID NO: 1391523 - DNA, 25 bp, Homo sapien
agttgcctatggtacaatgcatcca

SEQ ID NO: 1391524 - DNA, 25 bp, Homo sapien
tgtctaaacgactcctctaagggca

SEQ ID NO: 1391525 - DNA, 25 bp, Homo sapien
ccaagttaaggtgtgagttgcctat

SEQ ID NO: 1391526 - DNA, 25 bp, Homo sapien
tcagcggaaagcactaacgcagttc

SEQ ID NO: 1391527 - DNA, 25 bp, Homo sapien
aaccttcataacgtcctctgcgatg

SEQ ID NO: 1391528 - DNA, 25 bp, Homo sapien
caatggaaaagcaacgccctgggaa

SEQ ID NO: 1391529 - DNA, 25 bp, Homo sapien
ttaatcgcaggatcagcacgtccac

SEQ ID NO: 1391530 - DNA, 25 bp, Homo sapien
ttacacacggtcacttgccccgcgc

SEQ ID NO: 1391531 - DNA, 25 bp, Homo sapien
acacacggtcacttgccccgcgcac

SEQ ID NO: 1391532 - DNA, 25 bp, Homo sapien
tacacacggtcacttgccccgcgca

SEQ ID NO: 1391533 - DNA, 25 bp, Homo sapien
tccttcgtagcgaagcagccggtgg

SEQ ID NO: 1391534 - DNA, 25 bp, Homo sapien
gaacagcggtcctggacttgctccc

SEQ ID NO: 1391535 - DNA, 25 bp, Homo sapien
aactccttcgtagcgaagcagccgg

SEQ ID NO: 1391536 - DNA, 25 bp, Homo sapien
agctgggactttcaggtctgaacag

SEQ ID NO: 1391537 - DNA, 25 bp, Homo sapien
gccaacgtgtccctctttgccagga

SEQ ID NO: 1391538 - DNA, 25 bp, Homo sapien
aagcccaattgaaagggtgacaccg

SEQ ID NO: 1391539 - DNA, 25 bp, Homo sapien
ccagatagtctttcccacggtgagg

SEQ ID NO: 1391540 - DNA, 25 bp, Homo sapien
tagggagccaacgaaaaacatcagg

SEQ ID NO: 1391541 - DNA, 25 bp, Homo sapien
ttcacaagatcacattcccaatgca

SEQ ID NO: 1391542 - DNA, 25 bp, Homo sapien
attcacaagatcacattcccaatgc

SEQ ID NO: 1391543 - DNA, 25 bp, Homo sapien
gagattctgacatctggttgaagtc

SEQ ID NO: 1391544 - DNA, 25 bp, Homo sapien
ttgagattctgacatctggttgaag

SEQ ID NO: 1391545 - DNA, 25 bp, Homo sapien
tctggttgaagtccaggttcactgg

SEQ ID NO: 1391546 - DNA, 25 bp, Homo sapien
aagtccaggttcactggcccaggac

SEQ ID NO: 1391547 - DNA, 25 bp, Homo sapien
tttgtgggttgttctcatcccctaa

SEQ ID NO: 1391548 - DNA, 25 bp, Homo sapien
ttgtgggttgttctcatcccctaaa

SEQ ID NO: 1391549 - DNA, 25 bp, Homo sapien
cttgtcctttgtgggttgttctcat

SEQ ID NO: 1391550 - DNA, 25 bp, Homo sapien
caatggcttgtcctttgtgggttgt

SEQ ID NO: 1391551 - DNA, 25 bp, Homo sapien
catctgttccctcagttctgggctt

SEQ ID NO: 1391552 - DNA, 25 bp, Homo sapien
gctgcaggtcctgggtggcattaaa

SEQ ID NO: 1391553 - DNA, 25 bp, Homo sapien
acacagagtcaggtctcagctgcag

SEQ ID NO: 1391554 - DNA, 25 bp, Homo sapien
gcaggtcctgggtggcattaaaaac

SEQ ID NO: 1391555 - DNA, 25 bp, Homo sapien
cacacagagtcaggtctcagctgca

SEQ ID NO: 1391556 - DNA, 25 bp, Homo sapien
cacctttatgtcactattctggagc

SEQ ID NO: 1391557 - DNA, 25 bp, Homo sapien
taatgagaggcattccaagcatgtg

SEQ ID NO: 1391558 - DNA, 25 bp, Homo sapien
tgaggagtatctctaatgttaccaa

SEQ ID NO: 1391559 - DNA, 25 bp, Homo sapien
cactattctggagcccttgcaacct

SEQ ID NO: 1391560 - DNA, 25 bp, Homo sapien
gacgatggctcctactgctttcaat

SEQ ID NO: 1391561 - DNA, 25 bp, Homo sapien
gctttcaatttccttggactttcgc

SEQ ID NO: 1391562 - DNA, 25 bp, Homo sapien
ttggaactggacttgcaaagacgat

SEQ ID NO: 1391563 - DNA, 25 bp, Homo sapien
ggactttcgcaatcagatttagcct

SEQ ID NO: 1391564 - DNA, 25 bp, Homo sapien
ctaaatatagctcttctctgttcct

SEQ ID NO: 1391565 - DNA, 25 bp, Homo sapien
aaaggtgcttaatctcattctctga

SEQ ID NO: 1391566 - DNA, 25 bp, Homo sapien
tatagctcttctctgttcctaatcc

SEQ ID NO: 1391567 - DNA, 25 bp, Homo sapien
cctaatcctgaaaggtgcttaatct

SEQ ID NO: 1391568 - DNA, 25 bp, Homo sapien
aacactgttttattcggatggccca

SEQ ID NO: 1391569 - DNA, 25 bp, Homo sapien
cttggcggaacactttggatgcggc

SEQ ID NO: 1391570 - DNA, 25 bp, Homo sapien
tttcctacactaaaagggctgcggc

SEQ ID NO: 1391571 - DNA, 25 bp, Homo sapien
taagctttggaacccgactccagga

SEQ ID NO: 1391572 - DNA, 25 bp, Homo sapien
gaggaggaataatatgacaggcaac

SEQ ID NO: 1391573 - DNA, 25 bp, Homo sapien
caatcctgccagaactaggtttgtc

SEQ ID NO: 1391574 - DNA, 25 bp, Homo sapien
aacctccaacttaaacacaatcctg

SEQ ID NO: 1391575 - DNA, 25 bp, Homo sapien
tccttcttatcccaacaactgctcc

SEQ ID NO: 1391576 - DNA, 25 bp, Homo sapien
tactactccagaaggtcctcttgtg

SEQ ID NO: 1391577 - DNA, 25 bp, Homo sapien
gaatgcactcttttgagattcaccc

SEQ ID NO: 1391578 - DNA, 25 bp, Homo sapien
gtttgatgacatgtctactactcca

SEQ ID NO: 1391579 - DNA, 25 bp, Homo sapien
cattggttgaatatggtacaataca

SEQ ID NO: 1391580 - DNA, 25 bp, Homo sapien
tgcaccgcaccctagtcgggatggc

SEQ ID NO: 1391581 - DNA, 25 bp, Homo sapien
gggtttctgcaccgcaccctagtcg

SEQ ID NO: 1391582 - DNA, 25 bp, Homo sapien
ttctgcaccgcaccctagtcgggat

SEQ ID NO: 1391583 - DNA, 25 bp, Homo sapien
ccgcaccctagtcgggatggcagag

SEQ ID NO: 1391584 - DNA, 25 bp, Homo sapien
ttcatcccaaagaagagtgcctgtc

SEQ ID NO: 1391585 - DNA, 25 bp, Homo sapien
gcctgtctgcgtagtttccacctgg

SEQ ID NO: 1391586 - DNA, 25 bp, Homo sapien
gagccgttctcctacacaaagcaag

SEQ ID NO: 1391587 - DNA, 25 bp, Homo sapien
gagaactgattcctcgctagcacag

SEQ ID NO: 1391588 - DNA, 25 bp, Homo sapien
agaggacagcgcgaacgcagtcccc

SEQ ID NO: 1391589 - DNA, 25 bp, Homo sapien
aggacagcgcgaacgcagtccccca

SEQ ID NO: 1391590 - DNA, 25 bp, Homo sapien
tcagaggacagcgcgaacgcagtcc

SEQ ID NO: 1391591 - DNA, 25 bp, Homo sapien
ggggaaacggcaggggtcagcacat

SEQ ID NO: 1391592 - DNA, 25 bp, Homo sapien
tcagatgactacaaaccagccattc

SEQ ID NO: 1391593 - DNA, 25 bp, Homo sapien
gacacgcagacatggtgccggagtt

SEQ ID NO: 1391594 - DNA, 25 bp, Homo sapien
ccgcttgacattggaagtcgttcga

SEQ ID NO: 1391595 - DNA, 25 bp, Homo sapien
taatgcgcaaactagaaagttcagg

SEQ ID NO: 1391596 - DNA, 25 bp, Homo sapien
gtgtaaatgttaggctgaggtggaa

SEQ ID NO: 1391597 - DNA, 25 bp, Homo sapien
tgcatctctgctcccagtgtaaatg

SEQ ID NO: 1391598 - DNA, 25 bp, Homo sapien
aatgcatctctgctcccagtgtaaa

SEQ ID NO: 1391599 - DNA, 25 bp, Homo sapien
tctctgctcccagtgtaaatgttag

SEQ ID NO: 1391600 - DNA, 25 bp, Homo sapien
actgtttctaaccaccaggtggcca

SEQ ID NO: 1391601 - DNA, 25 bp, Homo sapien
tcctacagataacaccggagttgtg

SEQ ID NO: 1391602 - DNA, 25 bp, Homo sapien
cacagtgtggtgcttatgaagtcac

SEQ ID NO: 1391603 - DNA, 25 bp, Homo sapien
tttcagatgaccaaggcctgcgatg

SEQ ID NO: 1391604 - DNA, 25 bp, Homo sapien
ctgccaataccttgacccagaactt

SEQ ID NO: 1391605 - DNA, 25 bp, Homo sapien
caataccttgacccagaacttcctg

SEQ ID NO: 1391606 - DNA, 25 bp, Homo sapien
tgccaataccttgacccagaacttc

SEQ ID NO: 1391607 - DNA, 25 bp, Homo sapien
gccaataccttgacccagaacttcc

SEQ ID NO: 1391608 - DNA, 25 bp, Homo sapien
tgcctgactgtgacccaaaccttct

SEQ ID NO: 1391609 - DNA, 25 bp, Homo sapien
ttgcctgactgtgacccaaaccttc

SEQ ID NO: 1391610 - DNA, 25 bp, Homo sapien
gcctgactgtgacccaaaccttctg

SEQ ID NO: 1391611 - DNA, 25 bp, Homo sapien
ccccttatagactaagacagactgt

SEQ ID NO: 1391612 - DNA, 25 bp, Homo sapien
gagtcagtactcgaaggcttcagag

SEQ ID NO: 1391613 - DNA, 25 bp, Homo sapien
tgaaaaggacactcaagcaaactcc

SEQ ID NO: 1391614 - DNA, 25 bp, Homo sapien
cctctgttctagaaagggagagctg

SEQ ID NO: 1391615 - DNA, 25 bp, Homo sapien
tagctaggccttttggatgcgacaa

SEQ ID NO: 1391616 - DNA, 25 bp, Homo sapien
gatttggtacctctcccgcagaaga

SEQ ID NO: 1391617 - DNA, 25 bp, Homo sapien
gctcttctggaggatcactagtgcc

SEQ ID NO: 1391618 - DNA, 25 bp, Homo sapien
tagaagcattgtataaggccctgtg

SEQ ID NO: 1391619 - DNA, 25 bp, Homo sapien
tgggctctaaccaccaacctctaga

SEQ ID NO: 1391620 - DNA, 25 bp, Homo sapien
caacctctagattaacagccgaaca

SEQ ID NO: 1391621 - DNA, 25 bp, Homo sapien
gcatccctcagtgggctctaaccac

SEQ ID NO: 1391622 - DNA, 25 bp, Homo sapien
gccgaacaagctaaccgattgtgcc

SEQ ID NO: 1391623 - DNA, 25 bp, Homo sapien
tcttctgggcactataggaagggtg

SEQ ID NO: 1391624 - DNA, 25 bp, Homo sapien
gcactataggaagggtgcactcacc

SEQ ID NO: 1391625 - DNA, 25 bp, Homo sapien
aggtattgtaccttcttctgggcac

SEQ ID NO: 1391626 - DNA, 25 bp, Homo sapien
agggtgcactcaccaaacactcccc

SEQ ID NO: 1391627 - DNA, 25 bp, Homo sapien
tggtgaatcgtgttagtctcattgg

SEQ ID NO: 1391628 - DNA, 25 bp, Homo sapien
agattctggaaccaggacgaccttg

SEQ ID NO: 1391629 - DNA, 25 bp, Homo sapien
tcatcaaaagctgccggaaacgccc

SEQ ID NO: 1391630 - DNA, 25 bp, Homo sapien
cagacagtacaactgtgcaaggctt

SEQ ID NO: 1391631 - DNA, 25 bp, Homo sapien
tttgaggccgctgaggaacttccgc

SEQ ID NO: 1391632 - DNA, 25 bp, Homo sapien
gttgaattaatccatcctcgccttt

SEQ ID NO: 1391633 - DNA, 25 bp, Homo sapien
ttgttgaattaatccatcctcgcct

SEQ ID NO: 1391634 - DNA, 25 bp, Homo sapien
tctgcccagtcacttttgaggccgc

SEQ ID NO: 1391635 - DNA, 25 bp, Homo sapien
ggatctgagcaaattgaataaacgc

SEQ ID NO: 1391636 - DNA, 25 bp, Homo sapien
gatctgagcaaattgaataaacgcc

SEQ ID NO: 1391637 - DNA, 25 bp, Homo sapien
tctgagcaaattgaataaacgcccc

SEQ ID NO: 1391638 - DNA, 25 bp, Homo sapien
ctgtgcctcgtgggatctgagcaaa

SEQ ID NO: 1391639 - DNA, 25 bp, Homo sapien
tcgttctgacatgttttgccctgga

SEQ ID NO: 1391640 - DNA, 25 bp, Homo sapien
tatttctaggtcagtggtgaggcac

SEQ ID NO: 1391641 - DNA, 25 bp, Homo sapien
ctggaaggccttgagcactgcggtc

SEQ ID NO: 1391642 - DNA, 25 bp, Homo sapien
ggcaggacagggcaactcgttctga

SEQ ID NO: 1391643 - DNA, 25 bp, Homo sapien
caagcttcagggaaattagtcgtct

SEQ ID NO: 1391644 - DNA, 25 bp, Homo sapien
tcgtcttacttgtaagaaccttaca

SEQ ID NO: 1391645 - DNA, 25 bp, Homo sapien
caagaggttgggctgttattattaa

SEQ ID NO: 1391646 - DNA, 25 bp, Homo sapien
tccagtctgtaaatgtaaaggacat

SEQ ID NO: 1391647 - DNA, 25 bp, Homo sapien
ctgcgtattacatgaacacataggt

SEQ ID NO: 1391648 - DNA, 25 bp, Homo sapien
cgtattacatgaacacataggtgag

SEQ ID NO: 1391649 - DNA, 25 bp, Homo sapien
cacataggtgagactgctgttctga

SEQ ID NO: 1391650 - DNA, 25 bp, Homo sapien
aacacataggtgagactgctgttct

SEQ ID NO: 1391651 - DNA, 25 bp, Homo sapien
catcggcaccagttccaagtacaat

SEQ ID NO: 1391652 - DNA, 25 bp, Homo sapien
tcccatacaaagagcaaggatgtta

SEQ ID NO: 1391653 - DNA, 25 bp, Homo sapien
tgtctacaacccatcggcaccagtt

SEQ ID NO: 1391654 - DNA, 25 bp, Homo sapien
gcaggacttgatgccctggcgcagg

SEQ ID NO: 1391655 - DNA, 25 bp, Homo sapien
gatgagcctcaaccttaggatgaac

SEQ ID NO: 1391656 - DNA, 25 bp, Homo sapien
caaccttaggatgaaccactattgg

SEQ ID NO: 1391657 - DNA, 25 bp, Homo sapien
tgaaccactattggtgaccatagga

SEQ ID NO: 1391658 - DNA, 25 bp, Homo sapien
taggggagataacagagaacagcac

SEQ ID NO: 1391659 - DNA, 25 bp, Homo sapien
tccatatgcctcacctttacacgca

SEQ ID NO: 1391660 - DNA, 25 bp, Homo sapien
cacagctccatatgcctcaccttta

SEQ ID NO: 1391661 - DNA, 25 bp, Homo sapien
cccaccacagctccatatgcctcac

SEQ ID NO: 1391662 - DNA, 25 bp, Homo sapien
ctccatatgcctcacctttacacgc

SEQ ID NO: 1391663 - DNA, 25 bp, Homo sapien
tcctcagtgggagaagcgacatctt

SEQ ID NO: 1391664 - DNA, 25 bp, Homo sapien
gctgtacggccttcgcgctagtttg

SEQ ID NO: 1391665 - DNA, 25 bp, Homo sapien
tgtttgtgttaaggctgacgctccc

SEQ ID NO: 1391666 - DNA, 25 bp, Homo sapien
aaaaagtagcccttagagtacagcg

SEQ ID NO: 1391667 - DNA, 25 bp, Homo sapien
gggaaagcgcgaacgcagtaccact

SEQ ID NO: 1391668 - DNA, 25 bp, Homo sapien
gttatctcccctgccaagtaaatat

SEQ ID NO: 1391669 - DNA, 25 bp, Homo sapien
ggaaagcgcgaacgcagtaccacta

SEQ ID NO: 1391670 - DNA, 25 bp, Homo sapien
catgttatctcccctgccaagtaaa

SEQ ID NO: 1391671 - DNA, 25 bp, Homo sapien
cacctggccaggagtttattaagta

SEQ ID NO: 1391672 - DNA, 25 bp, Homo sapien
acacctggccaggagtttattaagt

SEQ ID NO: 1391673 - DNA, 25 bp, Homo sapien
ctcccgcctctgcgtctctgagagc

SEQ ID NO: 1391674 - DNA, 25 bp, Homo sapien
ccgcctctgcgtctctgagagctgg

SEQ ID NO: 1391675 - DNA, 25 bp, Homo sapien
gctctagtggctgcacttagctgat

SEQ ID NO: 1391676 - DNA, 25 bp, Homo sapien
gtagcctgcctaaacctataccaag

SEQ ID NO: 1391677 - DNA, 25 bp, Homo sapien
cacgatgcattatgactctcaggat

SEQ ID NO: 1391678 - DNA, 25 bp, Homo sapien
tgagtactagccttccacaatcttc

SEQ ID NO: 1391679 - DNA, 25 bp, Homo sapien
cctggctcatagttcactattgaaa

SEQ ID NO: 1391680 - DNA, 25 bp, Homo sapien
agccaccaccctggctcatagttca

SEQ ID NO: 1391681 - DNA, 25 bp, Homo sapien
ccaccctggctcatagttcactatt

SEQ ID NO: 1391682 - DNA, 25 bp, Homo sapien
ggctcatagttcactattgaaacaa

SEQ ID NO: 1391683 - DNA, 25 bp, Homo sapien
accggagagtcgcagctgtgtgtta

SEQ ID NO: 1391684 - DNA, 25 bp, Homo sapien
gaccggagagtcgcagctgtgtgtt

SEQ ID NO: 1391685 - DNA, 25 bp, Homo sapien
tgtgtgttagggctaggatggctcc

SEQ ID NO: 1391686 - DNA, 25 bp, Homo sapien
gatcatgcctgagctgtaacaacgc

SEQ ID NO: 1391687 - DNA, 25 bp, Homo sapien
tgtaacagccactcgaattctatct

SEQ ID NO: 1391688 - DNA, 25 bp, Homo sapien
gggaaatgtgcattcagcttggcaa

SEQ ID NO: 1391689 - DNA, 25 bp, Homo sapien
taacctagagctatctaaagatggc

SEQ ID NO: 1391690 - DNA, 25 bp, Homo sapien
tcactggccctagctggtatttgta

SEQ ID NO: 1391691 - DNA, 25 bp, Homo sapien
tatgatagcgaggatgatggaagac

SEQ ID NO: 1391692 - DNA, 25 bp, Homo sapien
tcatttctgcaactgtcactggccc

SEQ ID NO: 1391693 - DNA, 25 bp, Homo sapien
gatggaagacgagaattctcaagaa

SEQ ID NO: 1391694 - DNA, 25 bp, Homo sapien
gcagtgaagagcagacggtgaggag

SEQ ID NO: 1391695 - DNA, 25 bp, Homo sapien
agtgaagagcagacggtgaggagca

SEQ ID NO: 1391696 - DNA, 25 bp, Homo sapien
gcgacttttgagacggtgaagagca

SEQ ID NO: 1391697 - DNA, 25 bp, Homo sapien
agaggggccggcgacttttgagacg

SEQ ID NO: 1391698 - DNA, 25 bp, Homo sapien
gtagaacgtccaaagtgcccaaaga

SEQ ID NO: 1391699 - DNA, 25 bp, Homo sapien
tttggccgttggagtcccccagctg

SEQ ID NO: 1391700 - DNA, 25 bp, Homo sapien
gtgcccaaagactcgactcttggct

SEQ ID NO: 1391701 - DNA, 25 bp, Homo sapien
tccaaagtgcccaaagactcgactc

SEQ ID NO: 1391702 - DNA, 25 bp, Homo sapien
tgcacctatttcatcacctcctgaa

SEQ ID NO: 1391703 - DNA, 25 bp, Homo sapien
gaagctgggtttttacaattgcaca

SEQ ID NO: 1391704 - DNA, 25 bp, Homo sapien
cctgaagctgggtttttacaattgc

SEQ ID NO: 1391705 - DNA, 25 bp, Homo sapien
tttcatcacctcctgaagctgggtt

SEQ ID NO: 1391706 - DNA, 25 bp, Homo sapien
ttagtcttgcaaccatttctctcac

SEQ ID NO: 1391707 - DNA, 25 bp, Homo sapien
tctagataaaaatatcgagattccc

SEQ ID NO: 1391708 - DNA, 25 bp, Homo sapien
gactgttgattctttaccaattatg

SEQ ID NO: 1391709 - DNA, 25 bp, Homo sapien
taaaaatatcgagattcccaaagga

SEQ ID NO: 1391710 - DNA, 25 bp, Homo sapien
tactcaggtttgactataggtttgt

SEQ ID NO: 1391711 - DNA, 25 bp, Homo sapien
tgagccaatatactcaggtttgact

SEQ ID NO: 1391712 - DNA, 25 bp, Homo sapien
ttcctgatggttacacactggagca

SEQ ID NO: 1391713 - DNA, 25 bp, Homo sapien
tttgttcctgatggttacacactgg

SEQ ID NO: 1391714 - DNA, 25 bp, Homo sapien
catagagaagatggatgccgttctg

SEQ ID NO: 1391715 - DNA, 25 bp, Homo sapien
ggatgccgttctgattctttgttat

SEQ ID NO: 1391716 - DNA, 25 bp, Homo sapien
agatggatgccgttctgattctttg

SEQ ID NO: 1391717 - DNA, 25 bp, Homo sapien
gagaagatggatgccgttctgattc

SEQ ID NO: 1391718 - DNA, 25 bp, Homo sapien
catgatctatttccatccaccatgc

SEQ ID NO: 1391719 - DNA, 25 bp, Homo sapien
catgctgggtactcagtgtgctctt

SEQ ID NO: 1391720 - DNA, 25 bp, Homo sapien
cccaaaagcctatagaatcttctac

SEQ ID NO: 1391721 - DNA, 25 bp, Homo sapien
tgctctttcaatatgggaatttgta

SEQ ID NO: 1391722 - DNA, 25 bp, Homo sapien
catggcctcaggatttcaagtgaag

SEQ ID NO: 1391723 - DNA, 25 bp, Homo sapien
tctgccaggtttgcgaaggcaccaa

SEQ ID NO: 1391724 - DNA, 25 bp, Homo sapien
tcttcatgtgatctctctagcaggc

SEQ ID NO: 1391725 - DNA, 25 bp, Homo sapien
ggtaatcctcccatgtgcaagcctc

SEQ ID NO: 1391726 - DNA, 25 bp, Homo sapien
taagcaatagcttggcaactttggg

SEQ ID NO: 1391727 - DNA, 25 bp, Homo sapien
tatagcagccaggtgcaaattgtgg

SEQ ID NO: 1391728 - DNA, 25 bp, Homo sapien
tagtcttcatagaggtatagcagcc

SEQ ID NO: 1391729 - DNA, 25 bp, Homo sapien
ggagccaagttgtaatcctggaaag

SEQ ID NO: 1391730 - DNA, 25 bp, Homo sapien
ccctgaattttcattggtcaggaag

SEQ ID NO: 1391731 - DNA, 25 bp, Homo sapien
gatctcccatctcctaagttgtagt

SEQ ID NO: 1391732 - DNA, 25 bp, Homo sapien
gttgtagtacctgatgaaagccttc

SEQ ID NO: 1391733 - DNA, 25 bp, Homo sapien
aatgctagttggctcagtgattggc

SEQ ID NO: 1391734 - DNA, 25 bp, Homo sapien
ccacagacagtaccttagagtctaa

SEQ ID NO: 1391735 - DNA, 25 bp, Homo sapien
tcagagttgcgggatgctgatgaaa

SEQ ID NO: 1391736 - DNA, 25 bp, Homo sapien
tcttttgactcatttaaatcctttg

SEQ ID NO: 1391737 - DNA, 25 bp, Homo sapien
tctaagcttaggtacctttgtcttg

SEQ ID NO: 1391738 - DNA, 25 bp, Homo sapien
gcagaaatatagtaggtcccaaagg

SEQ ID NO: 1391739 - DNA, 25 bp, Homo sapien
tagtataccctatctgccttgaagg

SEQ ID NO: 1391740 - DNA, 25 bp, Homo sapien
cacttgttttggtccaagggcagaa

SEQ ID NO: 1391741 - DNA, 25 bp, Homo sapien
caaacttcaatagcagacacggaga

SEQ ID NO: 1391742 - DNA, 25 bp, Homo sapien
actacctctttggatggtggtgacg

SEQ ID NO: 1391743 - DNA, 25 bp, Homo sapien
tggtaatagagtaggaactacctct

SEQ ID NO: 1391744 - DNA, 25 bp, Homo sapien
tgcagtgattaaagagcatataccc

SEQ ID NO: 1391745 - DNA, 25 bp, Homo sapien
gcatataccctagggccaaatttcc

SEQ ID NO: 1391746 - DNA, 25 bp, Homo sapien
aaattggccttaagatttgaagtca

SEQ ID NO: 1391747 - DNA, 25 bp, Homo sapien
ggtgcattggctcacttactgcaat

SEQ ID NO: 1391748 - DNA, 25 bp, Homo sapien
gctgtaaggcttggtaaattggcct

SEQ ID NO: 1391749 - DNA, 25 bp, Homo sapien
ttcttagtatcttcccaaacacaca

SEQ ID NO: 1391750 - DNA, 25 bp, Homo sapien
aacaccaagtgttgcaagctctgtg

SEQ ID NO: 1391751 - DNA, 25 bp, Homo sapien
taaggtggaggacaaatctagtccc

SEQ ID NO: 1391752 - DNA, 25 bp, Homo sapien
cacactagctgatggaaacaccaag

SEQ ID NO: 1391753 - DNA, 25 bp, Homo sapien
gattctaagccagtgatctcccaca

SEQ ID NO: 1391754 - DNA, 25 bp, Homo sapien
catggtctggcaaacagcctgtggc

SEQ ID NO: 1391755 - DNA, 25 bp, Homo sapien
gaaggttacaactggagaagtccaa

SEQ ID NO: 1391756 - DNA, 25 bp, Homo sapien
tcctctcagagactggagcaggttc

SEQ ID NO: 1391757 - DNA, 25 bp, Homo sapien
caacagggacagacttgaaggtacc

SEQ ID NO: 1391758 - DNA, 25 bp, Homo sapien
tctattagaatgtcaagtcgccaac

SEQ ID NO: 1391759 - DNA, 25 bp, Homo sapien
gaagtgtcccaaatgtacagctacc

SEQ ID NO: 1391760 - DNA, 25 bp, Homo sapien
tatctgaccacaagatgcagtgaga

SEQ ID NO: 1391761 - DNA, 25 bp, Homo sapien
taacacaagtgcctggactctacac

SEQ ID NO: 1391762 - DNA, 25 bp, Homo sapien
tgaggctaagcaaatcccttcctgg

SEQ ID NO: 1391763 - DNA, 25 bp, Homo sapien
ggtggtagagacctagctaactcat

SEQ ID NO: 1391764 - DNA, 25 bp, Homo sapien
gctaactcatctgcagcggctttga

SEQ ID NO: 1391765 - DNA, 25 bp, Homo sapien
ggctttgacattctagggctcttcc

SEQ ID NO: 1391766 - DNA, 25 bp, Homo sapien
tcacacatgtacactcctgtgaaat

SEQ ID NO: 1391767 - DNA, 25 bp, Homo sapien
tttgtagcgtgggaaatttctccca

SEQ ID NO: 1391768 - DNA, 25 bp, Homo sapien
cacatgtacactcctgtgaaatcca

SEQ ID NO: 1391769 - DNA, 25 bp, Homo sapien
ctcccagactgtagtctccttggct

SEQ ID NO: 1391770 - DNA, 25 bp, Homo sapien
taacttccaggccattgccaaggtg

SEQ ID NO: 1391771 - DNA, 25 bp, Homo sapien
catttgtaaactggccatggtccca

SEQ ID NO: 1391772 - DNA, 25 bp, Homo sapien
cagagttggtgcctgtgggctacta

SEQ ID NO: 1391773 - DNA, 25 bp, Homo sapien
tagaccctgcctagcactggagagg

SEQ ID NO: 1391774 - DNA, 25 bp, Homo sapien
ccaagtgtctgctggtagagattcc

SEQ ID NO: 1391775 - DNA, 25 bp, Homo sapien
ctcataacaatctttgagggccggg

SEQ ID NO: 1391776 - DNA, 25 bp, Homo sapien
tcttccgggcgtttgcaaatatagg

SEQ ID NO: 1391777 - DNA, 25 bp, Homo sapien
cagggcaaagcagtaagagggaaaa

SEQ ID NO: 1391778 - DNA, 25 bp, Homo sapien
tggccgccgcatcatgaacatagat

SEQ ID NO: 1391779 - DNA, 25 bp, Homo sapien
caggcgggaggcctagtgtgggtcg

SEQ ID NO: 1391780 - DNA, 25 bp, Homo sapien
catgaacatagatgtggagttccac

SEQ ID NO: 1391781 - DNA, 25 bp, Homo sapien
tgtgggtcgcggtcgtggcccccgc

SEQ ID NO: 1391782 - DNA, 25 bp, Homo sapien
acagtcattaagtggagatggctca

SEQ ID NO: 1391783 - DNA, 25 bp, Homo sapien
gccggccaatgtgagacagtcatta

SEQ ID NO: 1391784 - DNA, 25 bp, Homo sapien
tggagatggctcatcatggaggtct

SEQ ID NO: 1391785 - DNA, 25 bp, Homo sapien
ctggaacaagttgccggccaatgtg

SEQ ID NO: 1391786 - DNA, 25 bp, Homo sapien
tgaaaagcaggttgtcctgtacagt

SEQ ID NO: 1391787 - DNA, 25 bp, Homo sapien
gaagaaaatcccagtcgtctttgaa

SEQ ID NO: 1391788 - DNA, 25 bp, Homo sapien
aggaagaaaatcccagtcgtctttg

SEQ ID NO: 1391789 - DNA, 25 bp, Homo sapien
aaaagcaggttgtcctgtacagtat

SEQ ID NO: 1391790 - DNA, 25 bp, Homo sapien
cacgatgttgaatgatgctttaaca

SEQ ID NO: 1391791 - DNA, 25 bp, Homo sapien
taattcaggagcatggtctgcatgg

SEQ ID NO: 1391792 - DNA, 25 bp, Homo sapien
ctcaaatgtgctcacgatgttgaat

SEQ ID NO: 1391793 - DNA, 25 bp, Homo sapien
tttaattcaggagcatggtctgcat

SEQ ID NO: 1391794 - DNA, 25 bp, Homo sapien
ggttctggagaggatgtggagaaat

SEQ ID NO: 1391795 - DNA, 25 bp, Homo sapien
atcattaaaaagtcaggaaacaaca

SEQ ID NO: 1391796 - DNA, 25 bp, Homo sapien
aggaacacttttacactgttggtgg

SEQ ID NO: 1391797 - DNA, 25 bp, Homo sapien
ccatctcacaccggttggaatggca

SEQ ID NO: 1391798 - DNA, 25 bp, Homo sapien
tctggtccacagctaagcaatcagt

SEQ ID NO: 1391799 - DNA, 25 bp, Homo sapien
taaatcatttcctaggtagagggct

SEQ ID NO: 1391800 - DNA, 25 bp, Homo sapien
tgctgcattaaccatgggaactcat

SEQ ID NO: 1391801 - DNA, 25 bp, Homo sapien
gctttcaattagagcccctgctgca

SEQ ID NO: 1391802 - DNA, 25 bp, Homo sapien
gaaaacaagtttccgatggcacagc

SEQ ID NO: 1391803 - DNA, 25 bp, Homo sapien
gaaaagaggagaatgtacccatact

SEQ ID NO: 1391804 - DNA, 25 bp, Homo sapien
aatggcatcaaatatttgacaccct

SEQ ID NO: 1391805 - DNA, 25 bp, Homo sapien
gcctcccaaggtgtattgattcatg

SEQ ID NO: 1391806 - DNA, 25 bp, Homo sapien
tctcaggtcttttgtgtcgttatga

SEQ ID NO: 1391807 - DNA, 25 bp, Homo sapien
tttgtgtcgttatgaacacaattct

SEQ ID NO: 1391808 - DNA, 25 bp, Homo sapien
tgtgtcgttatgaacacaattctaa

SEQ ID NO: 1391809 - DNA, 25 bp, Homo sapien
ggtcttttgtgtcgttatgaacaca

SEQ ID NO: 1391810 - DNA, 25 bp, Homo sapien
ggatcaaatgctccacaactagttg

SEQ ID NO: 1391811 - DNA, 25 bp, Homo sapien
cattcacatattacaggcaacaagc

SEQ ID NO: 1391812 - DNA, 25 bp, Homo sapien
cagtcgacagcaaccacatggaata

SEQ ID NO: 1391813 - DNA, 25 bp, Homo sapien
tagggcttgaagtgcccctgaccag

SEQ ID NO: 1391814 - DNA, 25 bp, Homo sapien
gactttcaaatcagttagggtggtc

SEQ ID NO: 1391815 - DNA, 25 bp, Homo sapien
taactcagcaggtcttgtttgccca

SEQ ID NO: 1391816 - DNA, 25 bp, Homo sapien
aggccctgtgctgaataccgtctgc

SEQ ID NO: 1391817 - DNA, 25 bp, Homo sapien
taccgtctgcatatgtataggaaag

SEQ ID NO: 1391818 - DNA, 25 bp, Homo sapien
tgctgatgacttacagctggaaagg

SEQ ID NO: 1391819 - DNA, 25 bp, Homo sapien
catcaaatattgaggatactggaac

SEQ ID NO: 1391820 - DNA, 25 bp, Homo sapien
tatcccaaaatgcaacccagaggct

SEQ ID NO: 1391821 - DNA, 25 bp, Homo sapien
acctttgaaatgtagcatatcccaa

SEQ ID NO: 1391822 - DNA, 25 bp, Homo sapien
ccctatgagacggaagacggacttc

SEQ ID NO: 1391823 - DNA, 25 bp, Homo sapien
gggtttgcttcccaactaatgtgga

SEQ ID NO: 1391824 - DNA, 25 bp, Homo sapien
gaagctctactgcagtcaaagtgac

SEQ ID NO: 1391825 - DNA, 25 bp, Homo sapien
cagttggctagcagttggagttcta

SEQ ID NO: 1391826 - DNA, 25 bp, Homo sapien
cagagataccattcgtgggcaagga

SEQ ID NO: 1391827 - DNA, 25 bp, Homo sapien
gctgtggtcacattcgaaggcttct

SEQ ID NO: 1391828 - DNA, 25 bp, Homo sapien
ttaggaagcacgagaaacatatatc

SEQ ID NO: 1391829 - DNA, 25 bp, Homo sapien
tggtcactaagcaaacagaagcatg

SEQ ID NO: 1391830 - DNA, 25 bp, Homo sapien
gacatcttgaagaatgctgaatggc

SEQ ID NO: 1391831 - DNA, 25 bp, Homo sapien
gttatggaattacatactgcaggcc

SEQ ID NO: 1391832 - DNA, 25 bp, Homo sapien
aaaggccctttagcaatcaagtaga

SEQ ID NO: 1391833 - DNA, 25 bp, Homo sapien
tctggagtgggcacgtttgatcttc

SEQ ID NO: 1391834 - DNA, 25 bp, Homo sapien
gtttcttctaccactaactccatgt

SEQ ID NO: 1391835 - DNA, 25 bp, Homo sapien
actccatgtctgactgcaagtgaaa

SEQ ID NO: 1391836 - DNA, 25 bp, Homo sapien
taatattttcacactaccttcttgg

SEQ ID NO: 1391837 - DNA, 25 bp, Homo sapien
tcccctcagtagctgtcaccatgca

SEQ ID NO: 1391838 - DNA, 25 bp, Homo sapien
gcatgacaaaatatagggaagaaat

SEQ ID NO: 1391839 - DNA, 25 bp, Homo sapien
aggagataagcatgacaaaatatag

SEQ ID NO: 1391840 - DNA, 25 bp, Homo sapien
tgacaaaatatagggaagaaatgac

SEQ ID NO: 1391841 - DNA, 25 bp, Homo sapien
taagcatgacaaaatatagggaaga

SEQ ID NO: 1391842 - DNA, 25 bp, Homo sapien
gacaatttattaggccacttgccag

SEQ ID NO: 1391843 - DNA, 25 bp, Homo sapien
gatggtagtgtctgcatgctcaaaa

SEQ ID NO: 1391844 - DNA, 25 bp, Homo sapien
cactactggagaagaaggtctcggg

SEQ ID NO: 1391845 - DNA, 25 bp, Homo sapien
gcatggacacaatcgactcttggca

SEQ ID NO: 1391846 - DNA, 25 bp, Homo sapien
agagttctgctcatcgcctgtggcg

SEQ ID NO: 1391847 - DNA, 25 bp, Homo sapien
tattccagttttgcaccggcttgcc

SEQ ID NO: 1391848 - DNA, 25 bp, Homo sapien
tgctatttaaaaccgagggacgtca

SEQ ID NO: 1391849 - DNA, 25 bp, Homo sapien
tgtatcaaccccaaatcgcctgaga

SEQ ID NO: 1391850 - DNA, 25 bp, Homo sapien
cttctggggccgccaacataggtaa

SEQ ID NO: 1391851 - DNA, 25 bp, Homo sapien
taaaagtaaaggtggagtctgagta

SEQ ID NO: 1391852 - DNA, 25 bp, Homo sapien
ctggggccgccaacataggtaaaag

SEQ ID NO: 1391853 - DNA, 25 bp, Homo sapien
aaggtggagtctgagtatctgaaat

SEQ ID NO: 1391854 - DNA, 25 bp, Homo sapien
tgaaacagaaagtcctgtcaaaagc

SEQ ID NO: 1391855 - DNA, 25 bp, Homo sapien
ctgaaacagaaagtcctgtcaaaag

SEQ ID NO: 1391856 - DNA, 25 bp, Homo sapien
ggcgctgggtgccttgggaatccga

SEQ ID NO: 1391857 - DNA, 25 bp, Homo sapien
tgccttgggaatccgaggaatccct

SEQ ID NO: 1391858 - DNA, 25 bp, Homo sapien
gagcaaaatggacgaaaggcgaccc

SEQ ID NO: 1391859 - DNA, 25 bp, Homo sapien
tctctttgccagtcggaggggacta

SEQ ID NO: 1391860 - DNA, 25 bp, Homo sapien
cggggctggaaataccacgcactgc

SEQ ID NO: 1391861 - DNA, 25 bp, Homo sapien
aggcttcgggcactacgcggggctg

SEQ ID NO: 1391862 - DNA, 25 bp, Homo sapien
acgcactgccccttcgcctagaccc

SEQ ID NO: 1391863 - DNA, 25 bp, Homo sapien
gcttcgggcactacgcggggctgga

SEQ ID NO: 1391864 - DNA, 25 bp, Homo sapien
cgacgtcgatatccttctgaattcg

SEQ ID NO: 1391865 - DNA, 25 bp, Homo sapien
gatcacgacgtcgatatccttctga

SEQ ID NO: 1391866 - DNA, 25 bp, Homo sapien
ggacttctggatcacgacgtcgata

SEQ ID NO: 1391867 - DNA, 25 bp, Homo sapien
ctcagctctggacttctggatcacg

SEQ ID NO: 1391868 - DNA, 25 bp, Homo sapien
cagctttcgtaaatattcagttaaa

SEQ ID NO: 1391869 - DNA, 25 bp, Homo sapien
aatgaaacctctggccgaggcaggg

SEQ ID NO: 1391870 - DNA, 25 bp, Homo sapien
ggaaaagaagcagccgctatttcca

SEQ ID NO: 1391871 - DNA, 25 bp, Homo sapien
aaaatgaaacctctggccgaggcag

SEQ ID NO: 1391872 - DNA, 25 bp, Homo sapien
tcctccccttctggcgatggattgg

SEQ ID NO: 1391873 - DNA, 25 bp, Homo sapien
gatggattggtgatgaaaccgagtc

SEQ ID NO: 1391874 - DNA, 25 bp, Homo sapien
ctcgccgctgctggattccaatttc

SEQ ID NO: 1391875 - DNA, 25 bp, Homo sapien
ccccttctggcgatggattggtgat

SEQ ID NO: 1391876 - DNA, 25 bp, Homo sapien
ggccggagagcgatcaccggctggg

SEQ ID NO: 1391877 - DNA, 25 bp, Homo sapien
gcggcggcagccgtgcccaggctgc

SEQ ID NO: 1391878 - DNA, 25 bp, Homo sapien
ccaggctgctgcagcgccacccgcc

SEQ ID NO: 1391879 - DNA, 25 bp, Homo sapien
cccaggctgctgcagcgccacccgc

SEQ ID NO: 1391880 - DNA, 25 bp, Homo sapien
cgcgggcggcggcagccgtgcccag

SEQ ID NO: 1391881 - DNA, 25 bp, Homo sapien
tcagcacggtaggaatgactgccat

SEQ ID NO: 1391882 - DNA, 25 bp, Homo sapien
caacatgatgttcagcacggtagga

SEQ ID NO: 1391883 - DNA, 25 bp, Homo sapien
cgtgacaacatgatgttcagcacgg

SEQ ID NO: 1391884 - DNA, 25 bp, Homo sapien
tgatgttcagcacggtaggaatgac

SEQ ID NO: 1391885 - DNA, 25 bp, Homo sapien
ggaatgggtctggtggtgaaaataa

SEQ ID NO: 1391886 - DNA, 25 bp, Homo sapien
gaatgggtctggtggtgaaaataaa

SEQ ID NO: 1391887 - DNA, 25 bp, Homo sapien
cgacggtgatgtcaaaaaagacgac

SEQ ID NO: 1391888 - DNA, 25 bp, Homo sapien
gacggtgatgtcaaaaaagacgacg

SEQ ID NO: 1391889 - DNA, 25 bp, Homo sapien
cagtgatggtggcatctgcaaagat

SEQ ID NO: 1391890 - DNA, 25 bp, Homo sapien
gatagtacagggctcacagtgatgg

SEQ ID NO: 1391891 - DNA, 25 bp, Homo sapien
cagggctcacagtgatggtggcatc

SEQ ID NO: 1391892 - DNA, 25 bp, Homo sapien
catctgcaaagataaccactgatct

SEQ ID NO: 1391893 - DNA, 25 bp, Homo sapien
gtagcactgcaattcctataaagag

SEQ ID NO: 1391894 - DNA, 25 bp, Homo sapien
taagggctaggatagatgaggcaca

SEQ ID NO: 1391895 - DNA, 25 bp, Homo sapien
caaatgtttggtcctgcttaagggc

SEQ ID NO: 1391896 - DNA, 25 bp, Homo sapien
gctatcagttgtaaggaattggact

SEQ ID NO: 1391897 - DNA, 25 bp, Homo sapien
tagcgccagaactctgtgactgttt

SEQ ID NO: 1391898 - DNA, 25 bp, Homo sapien
gcttaggaagtattgctgcctaatt

SEQ ID NO: 1391899 - DNA, 25 bp, Homo sapien
gcaccacatcaactttaaacagaat

SEQ ID NO: 1391900 - DNA, 25 bp, Homo sapien
ttatagtatttattagcgccagaac

SEQ ID NO: 1391901 - DNA, 25 bp, Homo sapien
gcagcgggttgatcggctgagtcgg

SEQ ID NO: 1391902 - DNA, 25 bp, Homo sapien
cagcgggttgatcggctgagtcggc

SEQ ID NO: 1391903 - DNA, 25 bp, Homo sapien
cgggttgatcggctgagtcggcgga

SEQ ID NO: 1391904 - DNA, 25 bp, Homo sapien
ggttgatcggctgagtcggcggagg

SEQ ID NO: 1391905 - DNA, 25 bp, Homo sapien
ctgagagtcccagctgtgtgtcagg

SEQ ID NO: 1391906 - DNA, 25 bp, Homo sapien
gtcccagctgtgtgtcagggctagg

SEQ ID NO: 1391907 - DNA, 25 bp, Homo sapien
ccagctgtgtgtcagggctaggagg

SEQ ID NO: 1391908 - DNA, 25 bp, Homo sapien
tgagagtcccagctgtgtgtcaggg

SEQ ID NO: 1391909 - DNA, 25 bp, Homo sapien
cgtgtaaagggtgaagcgtgtgagg

SEQ ID NO: 1391910 - DNA, 25 bp, Homo sapien
gcgtgtaaagggtgaagcgtgtgag

SEQ ID NO: 1391911 - DNA, 25 bp, Homo sapien
tcttgggaggcgaatttcagtctct

SEQ ID NO: 1391912 - DNA, 25 bp, Homo sapien
gggagctttctggtttgttcagtgc

SEQ ID NO: 1391913 - DNA, 25 bp, Homo sapien
tacttgctaggtggagctcagggat

SEQ ID NO: 1391914 - DNA, 25 bp, Homo sapien
ctcagggatcaagggtcgggagctt

SEQ ID NO: 1391915 - DNA, 25 bp, Homo sapien
caataaacagtactgtaggctggtc

SEQ ID NO: 1391916 - DNA, 25 bp, Homo sapien
gcttaatcccatttcgctggtgcaa

SEQ ID NO: 1391917 - DNA, 25 bp, Homo sapien
gctggtgcaacttcatccttccgta

SEQ ID NO: 1391918 - DNA, 25 bp, Homo sapien
taaccgcagactttgatatgcacac

SEQ ID NO: 1391919 - DNA, 25 bp, Homo sapien
tgagctagggctccgaagacagcag

SEQ ID NO: 1391920 - DNA, 25 bp, Homo sapien
ttcaatttgcgaggagcccgcgagg

SEQ ID NO: 1391921 - DNA, 25 bp, Homo sapien
gggcagtaacgttccgggtgagcta

SEQ ID NO: 1391922 - DNA, 25 bp, Homo sapien
ggcgtttattcaatttgcgaggagc

SEQ ID NO: 1391923 - DNA, 25 bp, Homo sapien
ggagctacaggttctggcgtttggg

SEQ ID NO: 1391924 - DNA, 25 bp, Homo sapien
gggtcatgcggatgttgctcctcca

SEQ ID NO: 1391925 - DNA, 25 bp, Homo sapien
catgcggatgttgctcctccaagga

SEQ ID NO: 1391926 - DNA, 25 bp, Homo sapien
acacagagggtcatgcggatgttgc

SEQ ID NO: 1391927 - DNA, 25 bp, Homo sapien
agctccgcagcggccccaaaagcga

SEQ ID NO: 1391928 - DNA, 25 bp, Homo sapien
ctctggtggagcccccgtgcggaac

SEQ ID NO: 1391929 - DNA, 25 bp, Homo sapien
cggaagctccgcagcggccccaaaa

SEQ ID NO: 1391930 - DNA, 25 bp, Homo sapien
gcagcggccccaaaagcgactgggc

SEQ ID NO: 1391931 - DNA, 25 bp, Homo sapien
ctgggtgaagtcggcgcaaagaacg

SEQ ID NO: 1391932 - DNA, 25 bp, Homo sapien
gggaagagccatcccgggagccacc

SEQ ID NO: 1391933 - DNA, 25 bp, Homo sapien
tcggcgcaaagaacgggaagagcca

SEQ ID NO: 1391934 - DNA, 25 bp, Homo sapien
tcccgggagccaccgggcgttcagc

SEQ ID NO: 1391935 - DNA, 25 bp, Homo sapien
cactccaatctctccggtcttccaa

SEQ ID NO: 1391936 - DNA, 25 bp, Homo sapien
actccaatctctccggtcttccaag

SEQ ID NO: 1391937 - DNA, 25 bp, Homo sapien
tcttccaaggccttgctcagtcgtc

SEQ ID NO: 1391938 - DNA, 25 bp, Homo sapien
cggtcttccaaggccttgctcagtc

SEQ ID NO: 1391939 - DNA, 25 bp, Homo sapien
gaggaagtttcgtgcgtgcgccctt

SEQ ID NO: 1391940 - DNA, 25 bp, Homo sapien
aggaagtttcgtgcgtgcgcccttc

SEQ ID NO: 1391941 - DNA, 25 bp, Homo sapien
cggaggaagtttcgtgcgtgcgccc

SEQ ID NO: 1391942 - DNA, 25 bp, Homo sapien
ggacggaggaagtttcgtgcgtgcg

SEQ ID NO: 1391943 - DNA, 25 bp, Homo sapien
atcagtacccaccaaaaccaatcag

SEQ ID NO: 1391944 - DNA, 25 bp, Homo sapien
catcagtacccaccaaaaccaatca

SEQ ID NO: 1391945 - DNA, 25 bp, Homo sapien
agtaaggtgtctctaaaagggacag

SEQ ID NO: 1391946 - DNA, 25 bp, Homo sapien
aaccaagtaaccagtcctgatatca

SEQ ID NO: 1391947 - DNA, 25 bp, Homo sapien
accaagtaaccagtcctgatatcat

SEQ ID NO: 1391948 - DNA, 25 bp, Homo sapien
tggacaaactagaccttctctgccc

SEQ ID NO: 1391949 - DNA, 25 bp, Homo sapien
gcaccggcagagtcctgggtgacat

SEQ ID NO: 1391950 - DNA, 25 bp, Homo sapien
taagtactgacaccaattggaggct

SEQ ID NO: 1391951 - DNA, 25 bp, Homo sapien
ccggcagagtcctgggtgacatgct

SEQ ID NO: 1391952 - DNA, 25 bp, Homo sapien
cttcctaagtactgacaccaattgg

SEQ ID NO: 1391953 - DNA, 25 bp, Homo sapien
tgagtcaggtagttcaaagtacatt

SEQ ID NO: 1391954 - DNA, 25 bp, Homo sapien
gagtcaggtagttcaaagtacattg

SEQ ID NO: 1391955 - DNA, 25 bp, Homo sapien
aatgagtcaggtagttcaaagtaca

SEQ ID NO: 1391956 - DNA, 25 bp, Homo sapien
agtcaggtagttcaaagtacattga

SEQ ID NO: 1391957 - DNA, 25 bp, Homo sapien
cagagagaaagtgacctagtgaatt

SEQ ID NO: 1391958 - DNA, 25 bp, Homo sapien
tccttctttgatcttcttccccttc

SEQ ID NO: 1391959 - DNA, 25 bp, Homo sapien
ctggggcatggtgggttttgatctt

SEQ ID NO: 1391960 - DNA, 25 bp, Homo sapien
gggcatggtgggttttgatcttctt

SEQ ID NO: 1391961 - DNA, 25 bp, Homo sapien
tcttctttccttctttgatcttctt

SEQ ID NO: 1391962 - DNA, 25 bp, Homo sapien
ttcccctacacacataacaatccac

SEQ ID NO: 1391963 - DNA, 25 bp, Homo sapien
gctgattcccctacacacataacaa

SEQ ID NO: 1391964 - DNA, 25 bp, Homo sapien
tcccctacacacataacaatccact

SEQ ID NO: 1391965 - DNA, 25 bp, Homo sapien
tgattcccctacacacataacaatc

SEQ ID NO: 1391966 - DNA, 25 bp, Homo sapien
caggctcctcagcataagaatagga

SEQ ID NO: 1391967 - DNA, 25 bp, Homo sapien
cctcaggctcctcagcataagaata

SEQ ID NO: 1391968 - DNA, 25 bp, Homo sapien
ggctcctcagcataagaataggaca

SEQ ID NO: 1391969 - DNA, 25 bp, Homo sapien
tcaggctcctcagcataagaatagg

SEQ ID NO: 1391970 - DNA, 25 bp, Homo sapien
tcatgatagaaattcctcggttttt

SEQ ID NO: 1391971 - DNA, 25 bp, Homo sapien
gctggtcatgatagaaattcctcgg

SEQ ID NO: 1391972 - DNA, 25 bp, Homo sapien
tgatagaaattcctcggtttttctc

SEQ ID NO: 1391973 - DNA, 25 bp, Homo sapien
tggtcatgatagaaattcctcggtt

SEQ ID NO: 1391974 - DNA, 25 bp, Homo sapien
aataacatctatccagtgagtcctg

SEQ ID NO: 1391975 - DNA, 25 bp, Homo sapien
taacatctatccagtgagtcctgca

SEQ ID NO: 1391976 - DNA, 25 bp, Homo sapien
ataacatctatccagtgagtcctgc

SEQ ID NO: 1391977 - DNA, 25 bp, Homo sapien
acacaacagagccccaactaggttt

SEQ ID NO: 1391978 - DNA, 25 bp, Homo sapien
agccccaactaggtttcatgggtag

SEQ ID NO: 1391979 - DNA, 25 bp, Homo sapien
aacagagccccaactaggtttcatg

SEQ ID NO: 1391980 - DNA, 25 bp, Homo sapien
cagagccccaactaggtttcatggg

SEQ ID NO: 1391981 - DNA, 25 bp, Homo sapien
tagctgttcacaattgctcagttac

SEQ ID NO: 1391982 - DNA, 25 bp, Homo sapien
aagtagctgttcacaattgctcagt

SEQ ID NO: 1391983 - DNA, 25 bp, Homo sapien
agtagctgttcacaattgctcagtt

SEQ ID NO: 1391984 - DNA, 25 bp, Homo sapien
gtagctgttcacaattgctcagtta

SEQ ID NO: 1391985 - DNA, 25 bp, Homo sapien
tggggcatggtgggccttggtcttc

SEQ ID NO: 1391986 - DNA, 25 bp, Homo sapien
ctggggcatggtgggccttggtctt

SEQ ID NO: 1391987 - DNA, 25 bp, Homo sapien
gcatggtgggccttggtcttcttcc

SEQ ID NO: 1391988 - DNA, 25 bp, Homo sapien
gggcatggtgggccttggtcttctt

SEQ ID NO: 1391989 - DNA, 25 bp, Homo sapien
cctccaatgagtaaacagcactgct

SEQ ID NO: 1391990 - DNA, 25 bp, Homo sapien
gccaaggtactgttcctccaatgag

SEQ ID NO: 1391991 - DNA, 25 bp, Homo sapien
cctaagtcaggcagttcaagataac

SEQ ID NO: 1391992 - DNA, 25 bp, Homo sapien
gtaaacagcactgctgtagggctgg

SEQ ID NO: 1391993 - DNA, 25 bp, Homo sapien
ccagtgagtcctgcaagacttcagg

SEQ ID NO: 1391994 - DNA, 25 bp, Homo sapien
agacttcaggctctttctcatccag

SEQ ID NO: 1391995 - DNA, 25 bp, Homo sapien
gacttcaggctctttctcatccagc

SEQ ID NO: 1391996 - DNA, 25 bp, Homo sapien
gtcctgcaagacttcaggctctttc

SEQ ID NO: 1391997 - DNA, 25 bp, Homo sapien
gggcatgatgggtcttggtcttctt

SEQ ID NO: 1391998 - DNA, 25 bp, Homo sapien
catgatgggtcttggtcttcttcca

SEQ ID NO: 1391999 - DNA, 25 bp, Homo sapien
gcatgatgggtcttggtcttcttcc

SEQ ID NO: 1392000 - DNA, 25 bp, Homo sapien
tgatgggtcttggtcttcttccact

SEQ ID NO: 1392001 - DNA, 25 bp, Homo sapien
gagtcagtcagttcaagacaacctg

SEQ ID NO: 1392002 - DNA, 25 bp, Homo sapien
cacgctgttgctccaatatgtaaaa

SEQ ID NO: 1392003 - DNA, 25 bp, Homo sapien
caacctgaaggagttgaatagcatc

SEQ ID NO: 1392004 - DNA, 25 bp, Homo sapien
agacaacctgaaggagttgaatagc

SEQ ID NO: 1392005 - DNA, 25 bp, Homo sapien
tgatgggtcttggtcttcttccact

SEQ ID NO: 1392006 - DNA, 25 bp, Homo sapien
gggcatgatgggtcttggtcttctt

SEQ ID NO: 1392007 - DNA, 25 bp, Homo sapien
catgatgggtcttggtcttcttcca

SEQ ID NO: 1392008 - DNA, 25 bp, Homo sapien
gcatgatgggtcttggtcttcttcc

SEQ ID NO: 1392009 - DNA, 25 bp, Homo sapien
tgttgctccaatatgtaaaaggcac

SEQ ID NO: 1392010 - DNA, 25 bp, Homo sapien
gccaacacgctgttgctccaatatg

SEQ ID NO: 1392011 - DNA, 25 bp, Homo sapien
cacgctgttgctccaatatgtaaaa

SEQ ID NO: 1392012 - DNA, 25 bp, Homo sapien
catgagtcagtcagttcaagacaac

SEQ ID NO: 1392013 - DNA, 25 bp, Homo sapien
aataacatctatccagtgagtcctg

SEQ ID NO: 1392014 - DNA, 25 bp, Homo sapien
ataacatctatccagtgagtcctgc

SEQ ID NO: 1392015 - DNA, 25 bp, Homo sapien
taacatctatccagtgagtcctgca

SEQ ID NO: 1392016 - DNA, 25 bp, Homo sapien
ctggggcatggtgggttttgatctt

SEQ ID NO: 1392017 - DNA, 25 bp, Homo sapien
tccttctttgatcttcttccccttc

SEQ ID NO: 1392018 - DNA, 25 bp, Homo sapien
tcttctttccttctttgatcttctt

SEQ ID NO: 1392019 - DNA, 25 bp, Homo sapien
gggcatggtgggttttgatcttctt

SEQ ID NO: 1392020 - DNA, 25 bp, Homo sapien
ggctcctcagcataagaataggaca

SEQ ID NO: 1392021 - DNA, 25 bp, Homo sapien
cctcaggctcctcagcataagaata

SEQ ID NO: 1392022 - DNA, 25 bp, Homo sapien
tcaggctcctcagcataagaatagg

SEQ ID NO: 1392023 - DNA, 25 bp, Homo sapien
caggctcctcagcataagaatagga

SEQ ID NO: 1392024 - DNA, 25 bp, Homo sapien
aataacatctatccagtgagtcctg

SEQ ID NO: 1392025 - DNA, 25 bp, Homo sapien
taacatctatccagtgagtcctgca

SEQ ID NO: 1392026 - DNA, 25 bp, Homo sapien
ataacatctatccagtgagtcctgc

SEQ ID NO: 1392027 - DNA, 25 bp, Homo sapien
aacagagccccaactaggtttcatg

SEQ ID NO: 1392028 - DNA, 25 bp, Homo sapien
agccccaactaggtttcatgggtag

SEQ ID NO: 1392029 - DNA, 25 bp, Homo sapien
acacaacagagccccaactaggttt

SEQ ID NO: 1392030 - DNA, 25 bp, Homo sapien
cagagccccaactaggtttcatggg

SEQ ID NO: 1392031 - DNA, 25 bp, Homo sapien
gcatggtgggccttggtcttcttcc

SEQ ID NO: 1392032 - DNA, 25 bp, Homo sapien
tggggcatggtgggccttggtcttc

SEQ ID NO: 1392033 - DNA, 25 bp, Homo sapien
ctggggcatggtgggccttggtctt

SEQ ID NO: 1392034 - DNA, 25 bp, Homo sapien
gggcatggtgggccttggtcttctt

SEQ ID NO: 1392035 - DNA, 25 bp, Homo sapien
gtaaacagcactgctgtagggctgg

SEQ ID NO: 1392036 - DNA, 25 bp, Homo sapien
gccaaggtactgttcctccaatgag

SEQ ID NO: 1392037 - DNA, 25 bp, Homo sapien
cctccaatgagtaaacagcactgct

SEQ ID NO: 1392038 - DNA, 25 bp, Homo sapien
cctaagtcaggcagttcaagataac

SEQ ID NO: 1392039 - DNA, 25 bp, Homo sapien
catgatgggtcttggtcttcttcca

SEQ ID NO: 1392040 - DNA, 25 bp, Homo sapien
gggcatgatgggtcttggtcttctt

SEQ ID NO: 1392041 - DNA, 25 bp, Homo sapien
tgatgggtcttggtcttcttccact

SEQ ID NO: 1392042 - DNA, 25 bp, Homo sapien
gcatgatgggtcttggtcttcttcc

SEQ ID NO: 1392043 - DNA, 25 bp, Homo sapien
ataacatctatccagtgagtcctgc

SEQ ID NO: 1392044 - DNA, 25 bp, Homo sapien
taacatctatccagtgagtcctgca

SEQ ID NO: 1392045 - DNA, 25 bp, Homo sapien
aataacatctatccagtgagtcctg

SEQ ID NO: 1392046 - DNA, 25 bp, Homo sapien
ctgggacctgttgcctcgtggtcct

SEQ ID NO: 1392047 - DNA, 25 bp, Homo sapien
gggacctgttgcctcgtggtcctcc

SEQ ID NO: 1392048 - DNA, 25 bp, Homo sapien
tttttcacttgatcccaccgatgtc

SEQ ID NO: 1392049 - DNA, 25 bp, Homo sapien
acctgttgcctcgtggtcctccttt

SEQ ID NO: 1392050 - DNA, 25 bp, Homo sapien
gagctaaaacaagcgaacttagaag

SEQ ID NO: 1392051 - DNA, 25 bp, Homo sapien
ggacagatgagctaaaacaagcgaa

SEQ ID NO: 1392052 - DNA, 25 bp, Homo sapien
gatgagctaaaacaagcgaacttag

SEQ ID NO: 1392053 - DNA, 25 bp, Homo sapien
ctaaaacaagcgaacttagaagaca

SEQ ID NO: 1392054 - DNA, 25 bp, Homo sapien
agaggtagacaagggtgacactggc

SEQ ID NO: 1392055 - DNA, 25 bp, Homo sapien
gttcaatgtcgtgacagtcagtcca

SEQ ID NO: 1392056 - DNA, 25 bp, Homo sapien
tgccttgagttcaatgtcgtgacag

SEQ ID NO: 1392057 - DNA, 25 bp, Homo sapien
gtgacagtcagtccaggttggcacg

SEQ ID NO: 1392058 - DNA, 25 bp, Homo sapien
caatgtcgtgacagtcagtccaggt

SEQ ID NO: 1392059 - DNA, 25 bp, Homo sapien
gaaatctacattgatatataggttc

SEQ ID NO: 1392060 - DNA, 25 bp, Homo sapien
actggagctttatcaccttcacaat

SEQ ID NO: 1392061 - DNA, 25 bp, Homo sapien
ctgggccatgaactggagctttatc

SEQ ID NO: 1392062 - DNA, 25 bp, Homo sapien
gaactggagctttatcaccttcaca

SEQ ID NO: 1392063 - DNA, 25 bp, Homo sapien
ggagctttatcaccttcacaatgga

SEQ ID NO: 1392064 - DNA, 25 bp, Homo sapien
agacttgtacgaggccaacatttca

SEQ ID NO: 1392065 - DNA, 25 bp, Homo sapien
ctgctgtaagacttgtacgaggcca

SEQ ID NO: 1392066 - DNA, 25 bp, Homo sapien
tgtaagacttgtacgaggccaacat

SEQ ID NO: 1392067 - DNA, 25 bp, Homo sapien
tgcctatgtcaacagccatgcagac

SEQ ID NO: 1392068 - DNA, 25 bp, Homo sapien
ctgggagacactggtcctttttctt

SEQ ID NO: 1392069 - DNA, 25 bp, Homo sapien
tgggagacactggtcctttttcttc

SEQ ID NO: 1392070 - DNA, 25 bp, Homo sapien
tcttcctcatcatcactttcatttt

SEQ ID NO: 1392071 - DNA, 25 bp, Homo sapien
tcctcttcctcatcatcactttcat

SEQ ID NO: 1392072 - DNA, 25 bp, Homo sapien
tggctggttggagtcataagggcca

SEQ ID NO: 1392073 - DNA, 25 bp, Homo sapien
tatttcacatactgtggccaagcga

SEQ ID NO: 1392074 - DNA, 25 bp, Homo sapien
ctgtgtctaagctgggttatatttc

SEQ ID NO: 1392075 - DNA, 25 bp, Homo sapien
gcgaatgcgggtttttggcccatca

SEQ ID NO: 1392076 - DNA, 25 bp, Homo sapien
ccagagagggtgtgcctcctagata

SEQ ID NO: 1392077 - DNA, 25 bp, Homo sapien
ctgggggcagacgatttctgcactt

SEQ ID NO: 1392078 - DNA, 25 bp, Homo sapien
gggggcagacgatttctgcactttc

SEQ ID NO: 1392079 - DNA, 25 bp, Homo sapien
gggcagacgatttctgcactttctc

SEQ ID NO: 1392080 - DNA, 25 bp, Homo sapien
agccacctcaacttgaacatcttca

SEQ ID NO: 1392081 - DNA, 25 bp, Homo sapien
aaggtgctgtgccagtctacacccc

SEQ ID NO: 1392082 - DNA, 25 bp, Homo sapien
ttcttggaggtcctgcccctgggac

SEQ ID NO: 1392083 - DNA, 25 bp, Homo sapien
agctctcgttcctgagcgtgaacca

SEQ ID NO: 1392084 - DNA, 25 bp, Homo sapien
ctcattcaatgagcgggaggcatct

SEQ ID NO: 1392085 - DNA, 25 bp, Homo sapien
tgaactgtcgctcattcctcagcat

SEQ ID NO: 1392086 - DNA, 25 bp, Homo sapien
agattttatgagatctttgcactct

SEQ ID NO: 1392087 - DNA, 25 bp, Homo sapien
tttatgagatctttgcactcttcat

SEQ ID NO: 1392088 - DNA, 25 bp, Homo sapien
atgagatctttgcactcttcatatt

SEQ ID NO: 1392089 - DNA, 25 bp, Homo sapien
gattttatgagatctttgcactctt

SEQ ID NO: 1392090 - DNA, 25 bp, Homo sapien
cactatctttcttcacctttgacat

SEQ ID NO: 1392091 - DNA, 25 bp, Homo sapien
tcactatctttcttcacctttgaca

SEQ ID NO: 1392092 - DNA, 25 bp, Homo sapien
cttcactatctttcttcacctttga

SEQ ID NO: 1392093 - DNA, 25 bp, Homo sapien
ttcactatctttcttcacctttgac

SEQ ID NO: 1392094 - DNA, 25 bp, Homo sapien
gatgggaagttacggtttacagcga

SEQ ID NO: 1392095 - DNA, 25 bp, Homo sapien
cgggcgacctgtggcgccaggagcg

SEQ ID NO: 1392096 - DNA, 25 bp, Homo sapien
ctgggtcgagctgcggctgtcgcaa

SEQ ID NO: 1392097 - DNA, 25 bp, Homo sapien
tgccgtctggatgggaagttacggt

SEQ ID NO: 1392098 - DNA, 25 bp, Homo sapien
gcgttggattcctcgcttgccgctg

SEQ ID NO: 1392099 - DNA, 25 bp, Homo sapien
gaagaaactcgctggcgggtgttct

SEQ ID NO: 1392100 - DNA, 25 bp, Homo sapien
cttcgggggcacgtcctcgtgtatc

SEQ ID NO: 1392101 - DNA, 25 bp, Homo sapien
gggtggagggacgagcagcttcggg

SEQ ID NO: 1392102 - DNA, 25 bp, Homo sapien
ctgtggaggaccctgaccccgcacc

SEQ ID NO: 1392103 - DNA, 25 bp, Homo sapien
cgaggccagaaatcggttgcctctg

SEQ ID NO: 1392104 - DNA, 25 bp, Homo sapien
gaggccagaaatcggttgcctctgg

SEQ ID NO: 1392105 - DNA, 25 bp, Homo sapien
tcgaggccagaaatcggttgcctct

SEQ ID NO: 1392106 - DNA, 25 bp, Homo sapien
ccagggcttccagtggactctccga

SEQ ID NO: 1392107 - DNA, 25 bp, Homo sapien
tgtgggctgaatgaagagctgccag

SEQ ID NO: 1392108 - DNA, 25 bp, Homo sapien
caagagcaacctcacacggtgtggg

SEQ ID NO: 1392109 - DNA, 25 bp, Homo sapien
agaaacttccccattcggtgcacca

SEQ ID NO: 1392110 - DNA, 25 bp, Homo sapien
gtctcttgtttccaccctgccgtcc

SEQ ID NO: 1392111 - DNA, 25 bp, Homo sapien
tctcttgtttccaccctgccgtccc

SEQ ID NO: 1392112 - DNA, 25 bp, Homo sapien
gatactcacatgtatgtctaattga

SEQ ID NO: 1392113 - DNA, 25 bp, Homo sapien
gtctaattgattcttaggacatata

SEQ ID NO: 1392114 - DNA, 25 bp, Homo sapien
ggcgaatgaattcactacctatttc

SEQ ID NO: 1392115 - DNA, 25 bp, Homo sapien
tataaaagaataatggcgaatgaat

SEQ ID NO: 1392116 - DNA, 25 bp, Homo sapien
acatacatattgcagtctgataaga

SEQ ID NO: 1392117 - DNA, 25 bp, Homo sapien
atacatattgcagtctgataagata

SEQ ID NO: 1392118 - DNA, 25 bp, Homo sapien
catacatattgcagtctgataagat

SEQ ID NO: 1392119 - DNA, 25 bp, Homo sapien
tacttgttgatgaaattgccatgaa

SEQ ID NO: 1392120 - DNA, 25 bp, Homo sapien
ttgttgatgaaattgccatgaatac

SEQ ID NO: 1392121 - DNA, 25 bp, Homo sapien
ttacttgttgatgaaattgccatga

SEQ ID NO: 1392122 - DNA, 25 bp, Homo sapien
acttgttgatgaaattgccatgaat

SEQ ID NO: 1392123 - DNA, 25 bp, Homo sapien
tgctcttcatatgaagatccacggt

SEQ ID NO: 1392124 - DNA, 25 bp, Homo sapien
tccattcatgacaaagtttgaccag

SEQ ID NO: 1392125 - DNA, 25 bp, Homo sapien
atatgaagatccacggtcaattccc

SEQ ID NO: 1392126 - DNA, 25 bp, Homo sapien
gtgtcagtccattcatgacaaagtt

SEQ ID NO: 1392127 - DNA, 25 bp, Homo sapien
gtccttgttgccaacaatggccgtg

SEQ ID NO: 1392128 - DNA, 25 bp, Homo sapien
gatggaaggtgggtccttgttgcca

SEQ ID NO: 1392129 - DNA, 25 bp, Homo sapien
ggatggcggcccagatggaaggtgg

SEQ ID NO: 1392130 - DNA, 25 bp, Homo sapien
ccttgttgccaacaatggccgtgtc

SEQ ID NO: 1392131 - DNA, 25 bp, Homo sapien
tgtcctcctcgccacgactctgcta

SEQ ID NO: 1392132 - DNA, 25 bp, Homo sapien
ctcgccacgactctgctagctgtgc

SEQ ID NO: 1392133 - DNA, 25 bp, Homo sapien
ctcctcgccacgactctgctagctg

SEQ ID NO: 1392134 - DNA, 25 bp, Homo sapien
gtcctcctcgccacgactctgctag

SEQ ID NO: 1392135 - DNA, 25 bp, Homo sapien
ttgtacagacaagagataaacagtg

SEQ ID NO: 1392136 - DNA, 25 bp, Homo sapien
tgggaaactgtttctgccttgatga

SEQ ID NO: 1392137 - DNA, 25 bp, Homo sapien
ccttgatgatgttgtacagacaaga

SEQ ID NO: 1392138 - DNA, 25 bp, Homo sapien
gaatatgcttagatgtattgggaaa

SEQ ID NO: 1392139 - DNA, 25 bp, Homo sapien
aggcacctcgaaccttgtttttgtg

SEQ ID NO: 1392140 - DNA, 25 bp, Homo sapien
cacctcgaaccttgtttttgtggtg

SEQ ID NO: 1392141 - DNA, 25 bp, Homo sapien
aatgccatgttcttgcagaaaacgc

SEQ ID NO: 1392142 - DNA, 25 bp, Homo sapien
acccaggactctgccggtgcagaat

SEQ ID NO: 1392143 - DNA, 25 bp, Homo sapien
cttagcctgagtttcataggaggta

SEQ ID NO: 1392144 - DNA, 25 bp, Homo sapien
acagcattgggaggccttagccctg

SEQ ID NO: 1392145 - DNA, 25 bp, Homo sapien
catcaccattatgatatcaggactg

SEQ ID NO: 1392146 - DNA, 25 bp, Homo sapien
aatatcctgtattctaatgatcatc

SEQ ID NO: 1392147 - DNA, 25 bp, Homo sapien
tattctaatgatcatcctctaaaca

SEQ ID NO: 1392148 - DNA, 25 bp, Homo sapien
tccatcaccattatgatatcaggac

SEQ ID NO: 1392149 - DNA, 25 bp, Homo sapien
catcctcgggatattactgacctcc

SEQ ID NO: 1392150 - DNA, 25 bp, Homo sapien
catggataagtcacaaattagtggc

SEQ ID NO: 1392151 - DNA, 25 bp, Homo sapien
caggatttcaggagatacccggtta

SEQ ID NO: 1392152 - DNA, 25 bp, Homo sapien
tatcacaccagaagtgggttcctag

SEQ ID NO: 1392153 - DNA, 25 bp, Homo sapien
cctttcggttaacagccgaatgcgc

SEQ ID NO: 1392154 - DNA, 25 bp, Homo sapien
gcgtccctgggtgggctcgaaccac

SEQ ID NO: 1392155 - DNA, 25 bp, Homo sapien
caacctttcggttaacagccgaatg

SEQ ID NO: 1392156 - DNA, 25 bp, Homo sapien
ccgaatgcgctaaccgattgcgcca

SEQ ID NO: 1392157 - DNA, 25 bp, Homo sapien
ttctactgggcgctataggaagggc

SEQ ID NO: 1392158 - DNA, 25 bp, Homo sapien
ataggaagggcgcacgcacgaaact

SEQ ID NO: 1392159 - DNA, 25 bp, Homo sapien
aggtactgtcagttctactgggcgc

SEQ ID NO: 1392160 - DNA, 25 bp, Homo sapien
gaagggcgcacgcacgaaacttcct

SEQ ID NO: 1392161 - DNA, 25 bp, Homo sapien
gaaaaccggagagattggagcggta

SEQ ID NO: 1392162 - DNA, 25 bp, Homo sapien
cggagagattggagcggtaagtcgc

SEQ ID NO: 1392163 - DNA, 25 bp, Homo sapien
ggagcggtaagtcgcgctggtcacg

SEQ ID NO: 1392164 - DNA, 25 bp, Homo sapien
cgcctgggggccctagggaggctga

SEQ ID NO: 1392165 - DNA, 25 bp, Homo sapien
cgaatgaatccatccttttagcttt

SEQ ID NO: 1392166 - DNA, 25 bp, Homo sapien
ttgtcgaatgaatccatccttttag

SEQ ID NO: 1392167 - DNA, 25 bp, Homo sapien
gtcgaatgaatccatccttttagct

SEQ ID NO: 1392168 - DNA, 25 bp, Homo sapien
tgtcgaatgaatccatccttttagc

SEQ ID NO: 1392169 - DNA, 25 bp, Homo sapien
tggacttcttggcaccccgcggggc

SEQ ID NO: 1392170 - DNA, 25 bp, Homo sapien
agtgccccttctgcgccgtggagcc

SEQ ID NO: 1392171 - DNA, 25 bp, Homo sapien
ctccagtgccccttctgcgccgtgg

SEQ ID NO: 1392172 - DNA, 25 bp, Homo sapien
cgcggggcggcaacgggcagggcct

SEQ ID NO: 1392173 - DNA, 25 bp, Homo sapien
ctgcaacgggaggacctggcccaga

SEQ ID NO: 1392174 - DNA, 25 bp, Homo sapien
caacgggaggacctggcccagaaga

SEQ ID NO: 1392175 - DNA, 25 bp, Homo sapien
ggcccagaagaggtggccttcatct

SEQ ID NO: 1392176 - DNA, 25 bp, Homo sapien
aggacctggcccagaagaggtggcc

SEQ ID NO: 1392177 - DNA, 25 bp, Homo sapien
gcagctcgctccgagatttttggct

SEQ ID NO: 1392178 - DNA, 25 bp, Homo sapien
gatttttggctctcgaaggccttga

SEQ ID NO: 1392179 - DNA, 25 bp, Homo sapien
tcagtcgtgaggtacagccaggaca

SEQ ID NO: 1392180 - DNA, 25 bp, Homo sapien
aggccttgagcgctgtggttctgca

SEQ ID NO: 1392181 - DNA, 25 bp, Homo sapien
cccgtgaatgctgtggtgaaaagca

SEQ ID NO: 1392182 - DNA, 25 bp, Homo sapien
tggctctattaactgagtacacgtt

SEQ ID NO: 1392183 - DNA, 25 bp, Homo sapien
gagtacacgtttccccagcacagaa

SEQ ID NO: 1392184 - DNA, 25 bp, Homo sapien
aatcctacaaactcccgtgaatgct

SEQ ID NO: 1392185 - DNA, 25 bp, Homo sapien
tatgcagtcgagttcctcacattgg

SEQ ID NO: 1392186 - DNA, 25 bp, Homo sapien
tggcaggggtcagtacacccggaac

SEQ ID NO: 1392187 - DNA, 25 bp, Homo sapien
cacccggaacataacggataagcct

SEQ ID NO: 1392188 - DNA, 25 bp, Homo sapien
tatcacaagttatgcagtcgagttc

SEQ ID NO: 1392189 - DNA, 25 bp, Homo sapien
aggaagtgacgtctgtctctttctc

SEQ ID NO: 1392190 - DNA, 25 bp, Homo sapien
taatgcgcagacttgaacgtttagg

SEQ ID NO: 1392191 - DNA, 25 bp, Homo sapien
gcttgtgcacccttcttcagataat

SEQ ID NO: 1392192 - DNA, 25 bp, Homo sapien
tgctcagatgggttgcaaactagcc

SEQ ID NO: 1392193 - DNA, 25 bp, Homo sapien
tggcggccaacaggaagcttgtgca

SEQ ID NO: 1392194 - DNA, 25 bp, Homo sapien
tccaagcctgagattgcatagtcca

SEQ ID NO: 1392195 - DNA, 25 bp, Homo sapien
ctccaagcctgagattgcatagtcc

SEQ ID NO: 1392196 - DNA, 25 bp, Homo sapien
ccaagcctgagattgcatagtccat

SEQ ID NO: 1392197 - DNA, 25 bp, Homo sapien
caatatatatcaatccaactggctc

SEQ ID NO: 1392198 - DNA, 25 bp, Homo sapien
tgactcagtctgtatgcgtgtatgt

SEQ ID NO: 1392199 - DNA, 25 bp, Homo sapien
agtttcaaatgcctagtgcaattgc

SEQ ID NO: 1392200 - DNA, 25 bp, Homo sapien
tctctttaaatggtgtgccttgaaa

SEQ ID NO: 1392201 - DNA, 25 bp, Homo sapien
acatagggtatatgtttacatgttc

SEQ ID NO: 1392202 - DNA, 25 bp, Homo sapien
agacatagggtatatgtttacatgt

SEQ ID NO: 1392203 - DNA, 25 bp, Homo sapien
cctcaataatttgtaacgttttatg

SEQ ID NO: 1392204 - DNA, 25 bp, Homo sapien
catagggtatatgtttacatgttca

SEQ ID NO: 1392205 - DNA, 25 bp, Homo sapien
gtgggaacatatttggtcaataaaa

SEQ ID NO: 1392206 - DNA, 25 bp, Homo sapien
tgggaacatatttggtcaataaaac

SEQ ID NO: 1392207 - DNA, 25 bp, Homo sapien
tgtgggaacatatttggtcaataaa

SEQ ID NO: 1392208 - DNA, 25 bp, Homo sapien
gaaaatgtcatccataccagtaatg

SEQ ID NO: 1392209 - DNA, 25 bp, Homo sapien
tttatggcagtgtagtatatactaa

SEQ ID NO: 1392210 - DNA, 25 bp, Homo sapien
atgtcatccataccagtaatgtgtg

SEQ ID NO: 1392211 - DNA, 25 bp, Homo sapien
gatagtatttaaggagatctagaaa

SEQ ID NO: 1392212 - DNA, 25 bp, Homo sapien
tacttgttgatgaaattgccatgga

SEQ ID NO: 1392213 - DNA, 25 bp, Homo sapien
acttgttgatgaaattgccatggat

SEQ ID NO: 1392214 - DNA, 25 bp, Homo sapien
ttacttgttgatgaaattgccatgg

SEQ ID NO: 1392215 - DNA, 25 bp, Homo sapien
ttgttgatgaaattgccatggatac

SEQ ID NO: 1392216 - DNA, 25 bp, Homo sapien
tgctcttcatatgaagatccacggt

SEQ ID NO: 1392217 - DNA, 25 bp, Homo sapien
gtgtcagtccattcatgacaaagtt

SEQ ID NO: 1392218 - DNA, 25 bp, Homo sapien
tccattcatgacaaagtttgaccag

SEQ ID NO: 1392219 - DNA, 25 bp, Homo sapien
atatgaagatccacggtcaattccc

SEQ ID NO: 1392220 - DNA, 25 bp, Homo sapien
ggatggcggcccagatggaaggtgg

SEQ ID NO: 1392221 - DNA, 25 bp, Homo sapien
gtccttgttgccaacaatggccgtg

SEQ ID NO: 1392222 - DNA, 25 bp, Homo sapien
gatggaaggtgggtccttgttgcca

SEQ ID NO: 1392223 - DNA, 25 bp, Homo sapien
ccttgttgccaacaatggccgtgtc

SEQ ID NO: 1392224 - DNA, 25 bp, Homo sapien
tgtcctcctcgccacgactctgcta

SEQ ID NO: 1392225 - DNA, 25 bp, Homo sapien
gtcctcctcgccacgactctgctag

SEQ ID NO: 1392226 - DNA, 25 bp, Homo sapien
ctcctcgccacgactctgctagctg

SEQ ID NO: 1392227 - DNA, 25 bp, Homo sapien
ctcgccacgactctgctagctgtgc

SEQ ID NO: 1392228 - DNA, 25 bp, Homo sapien
acccaggactctgccggtgcagaat

SEQ ID NO: 1392229 - DNA, 25 bp, Homo sapien
cttagcctgagtttcataggaggta

SEQ ID NO: 1392230 - DNA, 25 bp, Homo sapien
aatgccatgttcttgcagaaaacgc

SEQ ID NO: 1392231 - DNA, 25 bp, Homo sapien
acagcattgggaggccttagccctg

SEQ ID NO: 1392232 - DNA, 25 bp, Homo sapien
caacctttcggttaacagccgaatg

SEQ ID NO: 1392233 - DNA, 25 bp, Homo sapien
ccgaatgcgctaaccgattgcgcca

SEQ ID NO: 1392234 - DNA, 25 bp, Homo sapien
cctttcggttaacagccgaatgcgc

SEQ ID NO: 1392235 - DNA, 25 bp, Homo sapien
gcgtccctgggtgggctcgaaccac

SEQ ID NO: 1392236 - DNA, 25 bp, Homo sapien
aggtactgtcagttctactgggcgc

SEQ ID NO: 1392237 - DNA, 25 bp, Homo sapien
ataggaagggcgcacgcacgaaact

SEQ ID NO: 1392238 - DNA, 25 bp, Homo sapien
gaaaaccggagagattggagcggta

SEQ ID NO: 1392239 - DNA, 25 bp, Homo sapien
tggagcggtaagtcgcgctggtcac

SEQ ID NO: 1392240 - DNA, 25 bp, Homo sapien
ctgcaacgggaggacctggcccaga

SEQ ID NO: 1392241 - DNA, 25 bp, Homo sapien
ggcccagaagaggtggccttcatct

SEQ ID NO: 1392242 - DNA, 25 bp, Homo sapien
caacgggaggacctggcccagaaga

SEQ ID NO: 1392243 - DNA, 25 bp, Homo sapien
aggacctggcccagaagaggtggcc

SEQ ID NO: 1392244 - DNA, 25 bp, Homo sapien
tcagtcgtgaggtacagccaggaca

SEQ ID NO: 1392245 - DNA, 25 bp, Homo sapien
aggccttgagcgctgtggttctgca

SEQ ID NO: 1392246 - DNA, 25 bp, Homo sapien
gatttttggctctcgaaggccttga

SEQ ID NO: 1392247 - DNA, 25 bp, Homo sapien
gcagctcgctccgagatttttggct

SEQ ID NO: 1392248 - DNA, 25 bp, Homo sapien
gaatggtgaaactgctacgaaaaaa

SEQ ID NO: 1392249 - DNA, 25 bp, Homo sapien
gcctgagcagaatggtgaaactgct

SEQ ID NO: 1392250 - DNA, 25 bp, Homo sapien
tggtgaaactgctacgaaaaaagaa

SEQ ID NO: 1392251 - DNA, 25 bp, Homo sapien
gcagaatggtgaaactgctacgaaa

SEQ ID NO: 1392252 - DNA, 25 bp, Homo sapien
gagactgaaattcgcctcccaagag

SEQ ID NO: 1392253 - DNA, 25 bp, Homo sapien
gagatgttagaagccctgggagcac

SEQ ID NO: 1392254 - DNA, 25 bp, Homo sapien
gcctggacggtacagcgagacttgt

SEQ ID NO: 1392255 - DNA, 25 bp, Homo sapien
gagcccgcaccctgagttacaaaaa

SEQ ID NO: 1392256 - DNA, 25 bp, Homo sapien
tatgcagtcgagttcctcacattgg

SEQ ID NO: 1392257 - DNA, 25 bp, Homo sapien
tggcaggggtcagtacacccggaac

SEQ ID NO: 1392258 - DNA, 25 bp, Homo sapien
tatcacaagttatgcagtcgagttc

SEQ ID NO: 1392259 - DNA, 25 bp, Homo sapien
cacccggaacataacggataagcct

SEQ ID NO: 1392260 - DNA, 25 bp, Homo sapien
aggaagtgacgtctgtctctttctc

SEQ ID NO: 1392261 - DNA, 25 bp, Homo sapien
tgctcagatgggttgcaaactagcc

SEQ ID NO: 1392262 - DNA, 25 bp, Homo sapien
taatgcgcagacttgaacgtttagg

SEQ ID NO: 1392263 - DNA, 25 bp, Homo sapien
tggcggccaacaggaagcttgtgca

SEQ ID NO: 1392264 - DNA, 25 bp, Homo sapien
gcttgtgcacccttcttcagataat

SEQ ID NO: 1392265 - DNA, 25 bp, Homo sapien
catgggaagttctctatggccagtt

SEQ ID NO: 1392266 - DNA, 25 bp, Homo sapien
cagcctatgtaattggttgtccacg

SEQ ID NO: 1392267 - DNA, 25 bp, Homo sapien
gataattagggactcggaaagacaa

SEQ ID NO: 1392268 - DNA, 25 bp, Homo sapien
ttgtccacgatgtctagaaggagag

SEQ ID NO: 1392269 - DNA, 25 bp, Homo sapien
agacatagggtatatgtttacatgt

SEQ ID NO: 1392270 - DNA, 25 bp, Homo sapien
catagggtatatgtttacatgttca

SEQ ID NO: 1392271 - DNA, 25 bp, Homo sapien
cctcaataatttgtaacgttttatg

SEQ ID NO: 1392272 - DNA, 25 bp, Homo sapien
acatagggtatatgtttacatgttc

SEQ ID NO: 1392273 - DNA, 25 bp, Homo sapien
caaccatgatggggtatattgaaaa

SEQ ID NO: 1392274 - DNA, 25 bp, Homo sapien
ccatgatggggtatattgaaaagaa

SEQ ID NO: 1392275 - DNA, 25 bp, Homo sapien
atttttgagttcaaccatgatgggg

SEQ ID NO: 1392276 - DNA, 25 bp, Homo sapien
gatttttgagttcaaccatgatggg

SEQ ID NO: 1392277 - DNA, 25 bp, Homo sapien
agctcagtgcaggatcaagtgctcc

SEQ ID NO: 1392278 - DNA, 25 bp, Homo sapien
gagtacactggtgagatcagagctc

SEQ ID NO: 1392279 - DNA, 25 bp, Homo sapien
caggaaaggataacaggtgggagcc

SEQ ID NO: 1392280 - DNA, 25 bp, Homo sapien
cacacctggctatgtgcatgaactt

SEQ ID NO: 1392281 - DNA, 25 bp, Homo sapien
gcacaggctgccaatgaagatgacg

SEQ ID NO: 1392282 - DNA, 25 bp, Homo sapien
gtgccaccctccgtggccgccgcat

SEQ ID NO: 1392283 - DNA, 25 bp, Homo sapien
cgcagcccctgtgccaccctccgtg

SEQ ID NO: 1392284 - DNA, 25 bp, Homo sapien
acaggctgccaatgaagatgacgat

SEQ ID NO: 1392285 - DNA, 25 bp, Homo sapien
gcctaggcaaggaatccctgagcca

SEQ ID NO: 1392286 - DNA, 25 bp, Homo sapien
acccctcagagctgcccttgccagg

SEQ ID NO: 1392287 - DNA, 25 bp, Homo sapien
agctggaccaggagcacccctcaga

SEQ ID NO: 1392288 - DNA, 25 bp, Homo sapien
ccacaggggcctaggcaaggagcct

SEQ ID NO: 1392289 - DNA, 25 bp, Homo sapien
tccagtaacgtattccataaatatt

SEQ ID NO: 1392290 - DNA, 25 bp, Homo sapien
gagcgtgtggcacccgcgtactcgc

SEQ ID NO: 1392291 - DNA, 25 bp, Homo sapien
gcgctgccaccagttgcaggcagca

SEQ ID NO: 1392292 - DNA, 25 bp, Homo sapien
aaggcgaggagcgtgtggcacccgc

SEQ ID NO: 1392293 - DNA, 25 bp, Homo sapien
taggcggccctggaagtcaaagatc

SEQ ID NO: 1392294 - DNA, 25 bp, Homo sapien
agtactaatcaggtctgaccctttt

SEQ ID NO: 1392295 - DNA, 25 bp, Homo sapien
atgttcagggtatatggctgtagcc

SEQ ID NO: 1392296 - DNA, 25 bp, Homo sapien
caagtactaatcaggtctgaccctt

SEQ ID NO: 1392297 - DNA, 25 bp, Homo sapien
actaatcaggtctgaccctttttag

SEQ ID NO: 1392298 - DNA, 25 bp, Homo sapien
aagtgttaacttgctgactcgtaag

SEQ ID NO: 1392299 - DNA, 25 bp, Homo sapien
tatattgacctggacaattctgcca

SEQ ID NO: 1392300 - DNA, 25 bp, Homo sapien
gaagaaagcctgtaatctgtttcag

SEQ ID NO: 1392301 - DNA, 25 bp, Homo sapien
tcttccccagcttgagtctgggtcc

SEQ ID NO: 1392302 - DNA, 25 bp, Homo sapien
aaaacattaaatagagacatgggag

SEQ ID NO: 1392303 - DNA, 25 bp, Homo sapien
ttagcagaggaggacattaaaactg

SEQ ID NO: 1392304 - DNA, 25 bp, Homo sapien
tagagacatgggagataaacaagaa

SEQ ID NO: 1392305 - DNA, 25 bp, Homo sapien
tacattggatgaactaaggcagatt

SEQ ID NO: 1392306 - DNA, 25 bp, Homo sapien
attctagcttggcttttgtgataga

SEQ ID NO: 1392307 - DNA, 25 bp, Homo sapien
ttctagcttggcttttgtgatagag

SEQ ID NO: 1392308 - DNA, 25 bp, Homo sapien
ttcagctagggattctactgcaact

SEQ ID NO: 1392309 - DNA, 25 bp, Homo sapien
ttttgggcttatattattgaggaga

SEQ ID NO: 1392310 - DNA, 25 bp, Homo sapien
cttgtcttttttgggcttatattat

SEQ ID NO: 1392311 - DNA, 25 bp, Homo sapien
gattctactgcaactatctcccaga

SEQ ID NO: 1392312 - DNA, 25 bp, Homo sapien
tttctggtctagagcacaactgagc

SEQ ID NO: 1392313 - DNA, 25 bp, Homo sapien
caccgaggtgtggaagcatgtctca

SEQ ID NO: 1392314 - DNA, 25 bp, Homo sapien
gcatgtctcacaagggtcagatgga

SEQ ID NO: 1392315 - DNA, 25 bp, Homo sapien
tcaccttagctacagggaaggccca

SEQ ID NO: 1392316 - DNA, 25 bp, Homo sapien
aagactccagggtagtagtcaccat

SEQ ID NO: 1392317 - DNA, 25 bp, Homo sapien
agtagtcaccatctgtatttctgca

SEQ ID NO: 1392318 - DNA, 25 bp, Homo sapien
tagtagtcaccatctgtatttctgc

SEQ ID NO: 1392319 - DNA, 25 bp, Homo sapien
gtagtcaccatctgtatttctgcag

SEQ ID NO: 1392320 - DNA, 25 bp, Homo sapien
tgaatgatctgttcgatcggtgccg

SEQ ID NO: 1392321 - DNA, 25 bp, Homo sapien
cactgaagtgaatgatctgttcgat

SEQ ID NO: 1392322 - DNA, 25 bp, Homo sapien
cgatcggtgccgacttgcctttctt

SEQ ID NO: 1392323 - DNA, 25 bp, Homo sapien
tagcacagctcgacagcccactgaa

SEQ ID NO: 1392324 - DNA, 25 bp, Homo sapien
tgcaaaccacccaaggtgaagtcat

SEQ ID NO: 1392325 - DNA, 25 bp, Homo sapien
ctgcaaaccacccaaggtgaagtca

SEQ ID NO: 1392326 - DNA, 25 bp, Homo sapien
taattattgatctcctcttctacca

SEQ ID NO: 1392327 - DNA, 25 bp, Homo sapien
tgggcaacgtaaaaatagcccatct

SEQ ID NO: 1392328 - DNA, 25 bp, Homo sapien
cgagtctgggcaacgtaaaaatagc

SEQ ID NO: 1392329 - DNA, 25 bp, Homo sapien
catagaggtggatgcatgtagttcc

SEQ ID NO: 1392330 - DNA, 25 bp, Homo sapien
gccttgaaacactaatgtcaccttg

SEQ ID NO: 1392331 - DNA, 25 bp, Homo sapien
gtcaccttgatgtctgccttttctc

SEQ ID NO: 1392332 - DNA, 25 bp, Homo sapien
caccttgatgtctgccttttctctc

SEQ ID NO: 1392333 - DNA, 25 bp, Homo sapien
atagccttgaaacactaatgtcacc

SEQ ID NO: 1392334 - DNA, 25 bp, Homo sapien
gagtctgtacctcttatcaagggag

SEQ ID NO: 1392335 - DNA, 25 bp, Homo sapien
tagctgagcatctgaagaccgccaa

SEQ ID NO: 1392336 - DNA, 25 bp, Homo sapien
ggctccttcaaagcatagctgagca

SEQ ID NO: 1392337 - DNA, 25 bp, Homo sapien
caaagtatccaaacaggagtggctc

SEQ ID NO: 1392338 - DNA, 25 bp, Homo sapien
aatgagtcaggcagttcaaagtaag

SEQ ID NO: 1392339 - DNA, 25 bp, Homo sapien
tgtccacttcaagggcaaagctgct

SEQ ID NO: 1392340 - DNA, 25 bp, Homo sapien
gcagttcaaagtaagttggaggagt

SEQ ID NO: 1392341 - DNA, 25 bp, Homo sapien
caaagtaagttggaggagtcgaata

SEQ ID NO: 1392342 - DNA, 25 bp, Homo sapien
ctggggcatggtgggttctgatctt

SEQ ID NO: 1392343 - DNA, 25 bp, Homo sapien
ggggcatggtgggttctgatcttct

SEQ ID NO: 1392344 - DNA, 25 bp, Homo sapien
ggcatggtgggttctgatcttcttc

SEQ ID NO: 1392345 - DNA, 25 bp, Homo sapien
gcatggtgggttctgatcttcttcc

SEQ ID NO: 1392346 - DNA, 25 bp, Homo sapien
cctcaggctcctcagtataagaata

SEQ ID NO: 1392347 - DNA, 25 bp, Homo sapien
tcaggctcctcagtataagaatagg

SEQ ID NO: 1392348 - DNA, 25 bp, Homo sapien
caggctcctcagtataagaatagga

SEQ ID NO: 1392349 - DNA, 25 bp, Homo sapien
ggctcctcagtataagaataggaca

SEQ ID NO: 1392350 - DNA, 25 bp, Homo sapien
gataactggaaggagtcaaataaca

SEQ ID NO: 1392351 - DNA, 25 bp, Homo sapien
catgatgggttttggtcttcttcta

SEQ ID NO: 1392352 - DNA, 25 bp, Homo sapien
ggcatgatgggttttggtcttcttc

SEQ ID NO: 1392353 - DNA, 25 bp, Homo sapien
gggcatgatgggttttggtcttctt

SEQ ID NO: 1392354 - DNA, 25 bp, Homo sapien
tgatgggttttggtcttcttctact

SEQ ID NO: 1392355 - DNA, 25 bp, Homo sapien
aactagaaggagtcaaatatctatc

SEQ ID NO: 1392356 - DNA, 25 bp, Homo sapien
taactagaaggagtcaaatatctat

SEQ ID NO: 1392357 - DNA, 25 bp, Homo sapien
agggcatgatgggccttggtcttct

SEQ ID NO: 1392358 - DNA, 25 bp, Homo sapien
ggcatgatgggccttggtcttcttc

SEQ ID NO: 1392359 - DNA, 25 bp, Homo sapien
ctagggcatgatgggccttggtctt

SEQ ID NO: 1392360 - DNA, 25 bp, Homo sapien
gcatgatgggccttggtcttcttcc

SEQ ID NO: 1392361 - DNA, 25 bp, Homo sapien
aagacttcaggctccttcttgtcca

SEQ ID NO: 1392362 - DNA, 25 bp, Homo sapien
gagtcagacagttcaagataaccag

SEQ ID NO: 1392363 - DNA, 25 bp, Homo sapien
atgtagagctggcatgagtcagaca

SEQ ID NO: 1392364 - DNA, 25 bp, Homo sapien
cctccaatgagtaaaaggcacttat

SEQ ID NO: 1392365 - DNA, 25 bp, Homo sapien
agaaaccttcctctgtccaatccga

SEQ ID NO: 1392366 - DNA, 25 bp, Homo sapien
gtccaatccgaacacagggacatca

SEQ ID NO: 1392367 - DNA, 25 bp, Homo sapien
gtcttctcagtgtgagaacaggaga

SEQ ID NO: 1392368 - DNA, 25 bp, Homo sapien
ggacatcagtcttctcagtgtgaga

SEQ ID NO: 1392369 - DNA, 25 bp, Homo sapien
ctttgagagaagtataccaggaggc

SEQ ID NO: 1392370 - DNA, 25 bp, Homo sapien
ttgaaccagcgtgccacgggcatgg

SEQ ID NO: 1392371 - DNA, 25 bp, Homo sapien
caatgtcctgacagttgaaccagcg

SEQ ID NO: 1392372 - DNA, 25 bp, Homo sapien
cttgagttcaatgtcctgacagttg

SEQ ID NO: 1392373 - DNA, 25 bp, Homo sapien
ctgacagttgaaccagcgtgccacg

SEQ ID NO: 1392374 - DNA, 25 bp, Homo sapien
gaaatctacattgatatataggttc

SEQ ID NO: 1392375 - DNA, 25 bp, Homo sapien
agactggtacgaggctgacttgtca

SEQ ID NO: 1392376 - DNA, 25 bp, Homo sapien
actggtacgaggctgacttgtcagg

SEQ ID NO: 1392377 - DNA, 25 bp, Homo sapien
tggtacgaggctgacttgtcaggag

SEQ ID NO: 1392378 - DNA, 25 bp, Homo sapien
ctggtacgaggctgacttgtcagga

SEQ ID NO: 1392379 - DNA, 25 bp, Homo sapien
tcttcctcatcatcactttcatttt

SEQ ID NO: 1392380 - DNA, 25 bp, Homo sapien
tcctcttcctcatcatcactttcat

SEQ ID NO: 1392381 - DNA, 25 bp, Homo sapien
cctcttcctcatcatcactttcatt

SEQ ID NO: 1392382 - DNA, 25 bp, Homo sapien
ctcttcctcatcatcactttcattt

SEQ ID NO: 1392383 - DNA, 25 bp, Homo sapien
gagttggatcgactttatcttcctc

SEQ ID NO: 1392384 - DNA, 25 bp, Homo sapien
aatgagagttggatcgactttatct

SEQ ID NO: 1392385 - DNA, 25 bp, Homo sapien
gttggatcgactttatcttcctcaa

SEQ ID NO: 1392386 - DNA, 25 bp, Homo sapien
gagagttggatcgactttatcttcc

SEQ ID NO: 1392387 - DNA, 25 bp, Homo sapien
cttttcttcagccttctgcacctcc

SEQ ID NO: 1392388 - DNA, 25 bp, Homo sapien
tccttttcttcagccttctgcacct

SEQ ID NO: 1392389 - DNA, 25 bp, Homo sapien
gttcctccagtgagtcctcagggac

SEQ ID NO: 1392390 - DNA, 25 bp, Homo sapien
cctcagggacttccttttcttcagc

SEQ ID NO: 1392391 - DNA, 25 bp, Homo sapien
catgattcctgtactttctcagcct

SEQ ID NO: 1392392 - DNA, 25 bp, Homo sapien
acttcaacatctttatcctcatctt

SEQ ID NO: 1392393 - DNA, 25 bp, Homo sapien
gcacatgattcctgtactttctcag

SEQ ID NO: 1392394 - DNA, 25 bp, Homo sapien
cttcaacatctttatcctcatcttc

SEQ ID NO: 1392395 - DNA, 25 bp, Homo sapien
gagctgctgtacttcagagcctgcc

SEQ ID NO: 1392396 - DNA, 25 bp, Homo sapien
tgctgtacttcagagcctgcctgcc

SEQ ID NO: 1392397 - DNA, 25 bp, Homo sapien
gctgctgtacttcagagcctgcctg

SEQ ID NO: 1392398 - DNA, 25 bp, Homo sapien
cgagctgctgtacttcagagcctgc

SEQ ID NO: 1392399 - DNA, 25 bp, Homo sapien
caaagattttatgaggtctttgcac

SEQ ID NO: 1392400 - DNA, 25 bp, Homo sapien
ctcagcaaagattttatgaggtctt

SEQ ID NO: 1392401 - DNA, 25 bp, Homo sapien
aactgcagctcattcctcagcaaag

SEQ ID NO: 1392402 - DNA, 25 bp, Homo sapien
ttctccttgaactgcagctcattcc

SEQ ID NO: 1392403 - DNA, 25 bp, Homo sapien
agtcgtcatgggtgttccattggga

SEQ ID NO: 1392404 - DNA, 25 bp, Homo sapien
catgagtcgtcatgggtgttccatt

SEQ ID NO: 1392405 - DNA, 25 bp, Homo sapien
atgagtcgtcatgggtgttccattg

SEQ ID NO: 1392406 - DNA, 25 bp, Homo sapien
cctcatgagtcgtcatgggtgttcc

SEQ ID NO: 1392407 - DNA, 25 bp, Homo sapien
gtggctgttccagagcccttgccac

SEQ ID NO: 1392408 - DNA, 25 bp, Homo sapien
ctttatgtggctgttccagagccct

SEQ ID NO: 1392409 - DNA, 25 bp, Homo sapien
tgtggctgttccagagcccttgcca

SEQ ID NO: 1392410 - DNA, 25 bp, Homo sapien
tatgtggctgttccagagcccttgc

SEQ ID NO: 1392411 - DNA, 25 bp, Homo sapien
gaggtctagagttagagaccaaatt

SEQ ID NO: 1392412 - DNA, 25 bp, Homo sapien
tagagaccaaattggccaattggag

SEQ ID NO: 1392413 - DNA, 25 bp, Homo sapien
ctagagttagagaccaaattggcca

SEQ ID NO: 1392414 - DNA, 25 bp, Homo sapien
gttagagaccaaattggccaattgg

SEQ ID NO: 1392415 - DNA, 25 bp, Homo sapien
gtacttggcattgaagtgcaccaac

SEQ ID NO: 1392416 - DNA, 25 bp, Homo sapien
agtacttggcattgaagtgcaccaa

SEQ ID NO: 1392417 - DNA, 25 bp, Homo sapien
ttagtacttggcattgaagtgcacc

SEQ ID NO: 1392418 - DNA, 25 bp, Homo sapien
tagtacttggcattgaagtgcacca

SEQ ID NO: 1392419 - DNA, 25 bp, Homo sapien
gtctgacataatccatttgccattc

SEQ ID NO: 1392420 - DNA, 25 bp, Homo sapien
gggtctgacataatccatttgccat

SEQ ID NO: 1392421 - DNA, 25 bp, Homo sapien
ggtctgacataatccatttgccatt

SEQ ID NO: 1392422 - DNA, 25 bp, Homo sapien
tcatgtcggcccacaccatgtgagg

SEQ ID NO: 1392423 - DNA, 25 bp, Homo sapien
atctagcagctcttcatgtcggccc

SEQ ID NO: 1392424 - DNA, 25 bp, Homo sapien
gatctagcagctcttcatgtcggcc

SEQ ID NO: 1392425 - DNA, 25 bp, Homo sapien
ttggatctagcagctcttcatgtcg

SEQ ID NO: 1392426 - DNA, 25 bp, Homo sapien
ggacggtaagggactatcagctggt

SEQ ID NO: 1392427 - DNA, 25 bp, Homo sapien
agtcggtggcaccccaagggtggag

SEQ ID NO: 1392428 - DNA, 25 bp, Homo sapien
gagtcggtggcaccccaagggtgga

SEQ ID NO: 1392429 - DNA, 25 bp, Homo sapien
aggacggtaagggactatcagctgg

SEQ ID NO: 1392430 - DNA, 25 bp, Homo sapien
gagtgtttccagtaggttgctgtag

SEQ ID NO: 1392431 - DNA, 25 bp, Homo sapien
gcattctctgtgctcgaactaatcc

SEQ ID NO: 1392432 - DNA, 25 bp, Homo sapien
ctaatcccgggatttacagttcctg

SEQ ID NO: 1392433 - DNA, 25 bp, Homo sapien
tgctgtagttttgaatactgggaat

SEQ ID NO: 1392434 - DNA, 25 bp, Homo sapien
tggagcgaagatcaagaaggtcccg

SEQ ID NO: 1392435 - DNA, 25 bp, Homo sapien
cttaggccacgtgtcactatggagc

SEQ ID NO: 1392436 - DNA, 25 bp, Homo sapien
agaaggtcccggaaggagagaagct

SEQ ID NO: 1392437 - DNA, 25 bp, Homo sapien
tgtcactatggagcgaagatcaaga

SEQ ID NO: 1392438 - DNA, 25 bp, Homo sapien
aaatctttggcggattcccttgctc

SEQ ID NO: 1392439 - DNA, 25 bp, Homo sapien
tgtgactatggtagacaaggagtgg

SEQ ID NO: 1392440 - DNA, 25 bp, Homo sapien
cttccaaaggattccgatctgaggg

SEQ ID NO: 1392441 - DNA, 25 bp, Homo sapien
ctcttggattctccttccaaaggat

SEQ ID NO: 1392442 - DNA, 25 bp, Homo sapien
ttgccaaattcagcgtgtaaaacag

SEQ ID NO: 1392443 - DNA, 25 bp, Homo sapien
acatctgtctgtttgtaagcttcgg

SEQ ID NO: 1392444 - DNA, 25 bp, Homo sapien
attgccaaattcagcgtgtaaaaca

SEQ ID NO: 1392445 - DNA, 25 bp, Homo sapien
gtgcagccgcagtgcggtggactag

SEQ ID NO: 1392446 - DNA, 25 bp, Homo sapien
ccagtgcagccgcagtgcggtggac

SEQ ID NO: 1392447 - DNA, 25 bp, Homo sapien
tcaggagagagtgcgaacccagccc

SEQ ID NO: 1392448 - DNA, 25 bp, Homo sapien
ggagagagtgcgaacccagcccccg

SEQ ID NO: 1392449 - DNA, 25 bp, Homo sapien
tcgtaaggcctaagaagcacgttag

SEQ ID NO: 1392450 - DNA, 25 bp, Homo sapien
aaccttgcggacatcgcctccggtc

SEQ ID NO: 1392451 - DNA, 25 bp, Homo sapien
cctcttcgtaaggcctaagaagcac

SEQ ID NO: 1392452 - DNA, 25 bp, Homo sapien
tcttcgtaaggcctaagaagcacgt

SEQ ID NO: 1392453 - DNA, 25 bp, Homo sapien
tctctgaccgataattgaacccggg

SEQ ID NO: 1392454 - DNA, 25 bp, Homo sapien
ttctctgaccgataattgaacccgg

SEQ ID NO: 1392455 - DNA, 25 bp, Homo sapien
attctctgaccgataattgaacccg

SEQ ID NO: 1392456 - DNA, 25 bp, Homo sapien
ggttttaacatctcgacatcatgag

SEQ ID NO: 1392457 - DNA, 25 bp, Homo sapien
attggagggttttaacatctcgaca

SEQ ID NO: 1392458 - DNA, 25 bp, Homo sapien
acatctcgacatcatgagattctac

SEQ ID NO: 1392459 - DNA, 25 bp, Homo sapien
gagggttttaacatctcgacatcat

SEQ ID NO: 1392460 - DNA, 25 bp, Homo sapien
aggctggtttcgctcaaagaggatc

SEQ ID NO: 1392461 - DNA, 25 bp, Homo sapien
ggctggtttcgctcaaagaggatcc

SEQ ID NO: 1392462 - DNA, 25 bp, Homo sapien
aaggctggtttcgctcaaagaggat

SEQ ID NO: 1392463 - DNA, 25 bp, Homo sapien
aagcagctattcacttcggtcctgt

SEQ ID NO: 1392464 - DNA, 25 bp, Homo sapien
tggcgagtcccgttctgttgagtaa

SEQ ID NO: 1392465 - DNA, 25 bp, Homo sapien
ccagaaggacacgtaagggaaagca

SEQ ID NO: 1392466 - DNA, 25 bp, Homo sapien
ggtaattaggtctccggtcagcctc

SEQ ID NO: 1392467 - DNA, 25 bp, Homo sapien
aagcctacgacaactgccagtacca

SEQ ID NO: 1392468 - DNA, 25 bp, Homo sapien
cccgtggctggcgaaggtgagtcga

SEQ ID NO: 1392469 - DNA, 25 bp, Homo sapien
caaagtggacaaagcctacgacaac

SEQ ID NO: 1392470 - DNA, 25 bp, Homo sapien
gagtctccgtcttcagtttgtcaaa

SEQ ID NO: 1392471 - DNA, 25 bp, Homo sapien
aacagcttttgttgttccaactgct

SEQ ID NO: 1392472 - DNA, 25 bp, Homo sapien
agcttttgttgttccaactgctctt

SEQ ID NO: 1392473 - DNA, 25 bp, Homo sapien
cagcttttgttgttccaactgctct

SEQ ID NO: 1392474 - DNA, 25 bp, Homo sapien
ttcgaaccgaggttgctgcggccac

SEQ ID NO: 1392475 - DNA, 25 bp, Homo sapien
tgactcggattcgaaccgaggttgc

SEQ ID NO: 1392476 - DNA, 25 bp, Homo sapien
ctcggattcgaaccgaggttgctgc

SEQ ID NO: 1392477 - DNA, 25 bp, Homo sapien
tgccgtgactcggattcgaaccgag

SEQ ID NO: 1392478 - DNA, 25 bp, Homo sapien
cggagccaagaactgcgagagctgt

SEQ ID NO: 1392479 - DNA, 25 bp, Homo sapien
gcggagccaagaactgcgagagctg

SEQ ID NO: 1392480 - DNA, 25 bp, Homo sapien
ggagccaagaactgcgagagctgtc

SEQ ID NO: 1392481 - DNA, 25 bp, Homo sapien
gacccacgcgattcaggctcaggga

SEQ ID NO: 1392482 - DNA, 25 bp, Homo sapien
tgcttcccttcggacccacgcgatt

SEQ ID NO: 1392483 - DNA, 25 bp, Homo sapien
acgcgattcaggctcagggagtcgc

SEQ ID NO: 1392484 - DNA, 25 bp, Homo sapien
tcggacccacgcgattcaggctcag

SEQ ID NO: 1392485 - DNA, 25 bp, Homo sapien
caagaggctactgtggtcatgtgca

SEQ ID NO: 1392486 - DNA, 25 bp, Homo sapien
ggagaatgtcgtggatctggcattc

SEQ ID NO: 1392487 - DNA, 25 bp, Homo sapien
cagataaagcatagcgaaggatggg

SEQ ID NO: 1392488 - DNA, 25 bp, Homo sapien
cacagggaacacaagcggtaagcat

SEQ ID NO: 1392489 - DNA, 25 bp, Homo sapien
gcgggccgcggcagtgaaagcgcca

SEQ ID NO: 1392490 - DNA, 25 bp, Homo sapien
aggaagccaagtgggcttcacagga

SEQ ID NO: 1392491 - DNA, 25 bp, Homo sapien
ttccgcaactgagctcgggtcgcga

SEQ ID NO: 1392492 - DNA, 25 bp, Homo sapien
tcgcgaggaagccaagtgggcttca

SEQ ID NO: 1392493 - DNA, 25 bp, Homo sapien
ctcgggtcgcgaggaagccaagtgg

SEQ ID NO: 1392494 - DNA, 25 bp, Homo sapien
tgtttccaaggctgcagagctcggg

SEQ ID NO: 1392495 - DNA, 25 bp, Homo sapien
gaagacatcaacaagcgaggcaaga

SEQ ID NO: 1392496 - DNA, 25 bp, Homo sapien
tacagtggcagaattctcgcctccc

SEQ ID NO: 1392497 - DNA, 25 bp, Homo sapien
caagaactttccacaggctgacact

SEQ ID NO: 1392498 - DNA, 25 bp, Homo sapien
tgaaaggtagagttccaccactccc

SEQ ID NO: 1392499 - DNA, 25 bp, Homo sapien
tggcctgaggtttggtacacattca

SEQ ID NO: 1392500 - DNA, 25 bp, Homo sapien
caaaagctgtctatactggacaagg

SEQ ID NO: 1392501 - DNA, 25 bp, Homo sapien
tcataggaacactaggactcaggca

SEQ ID NO: 1392502 - DNA, 25 bp, Homo sapien
accgcgcccgggttgggatggcaga

SEQ ID NO: 1392503 - DNA, 25 bp, Homo sapien
aggcttctcgggacgtgcggatcta

SEQ ID NO: 1392504 - DNA, 25 bp, Homo sapien
gacgccataggccttccttccgtgg

SEQ ID NO: 1392505 - DNA, 25 bp, Homo sapien
tagatcagtccgtaagaagtacggc

SEQ ID NO: 1392506 - DNA, 25 bp, Homo sapien
cactttcatgatcatactatctccc

SEQ ID NO: 1392507 - DNA, 25 bp, Homo sapien
tcagtgggttctagccaccaacctt

SEQ ID NO: 1392508 - DNA, 25 bp, Homo sapien
cgtccctcagtgggttctagccacc

SEQ ID NO: 1392509 - DNA, 25 bp, Homo sapien
gtccctcagtgggttctagccacca

SEQ ID NO: 1392510 - DNA, 25 bp, Homo sapien
ccgtccctcagtgggttctagccac

SEQ ID NO: 1392511 - DNA, 25 bp, Homo sapien
gacgaatcactttggtaaccatagg

SEQ ID NO: 1392512 - DNA, 25 bp, Homo sapien
caaacttaggacgaatcactttggt

SEQ ID NO: 1392513 - DNA, 25 bp, Homo sapien
tcactttggtaaccataggatttcc

SEQ ID NO: 1392514 - DNA, 25 bp, Homo sapien
gagcctcaaacttaggacgaatcac

SEQ ID NO: 1392515 - DNA, 25 bp, Homo sapien
aggcagataattctcaggttttgcc

SEQ ID NO: 1392516 - DNA, 25 bp, Homo sapien
taattctcaggttttgccccacaga

SEQ ID NO: 1392517 - DNA, 25 bp, Homo sapien
ttctcaggttttgccccacagaatc

SEQ ID NO: 1392518 - DNA, 25 bp, Homo sapien
agatttgtaatcctgggaggaaaca

SEQ ID NO: 1392519 - DNA, 25 bp, Homo sapien
gattccattgcttatatgtgatcat

SEQ ID NO: 1392520 - DNA, 25 bp, Homo sapien
tgctgattccattgcttatatgtga

SEQ ID NO: 1392521 - DNA, 25 bp, Homo sapien
tctgtagtgtggtttaaacttaatc

SEQ ID NO: 1392522 - DNA, 25 bp, Homo sapien
taagggctgaacttccttaatgttc

SEQ ID NO: 1392523 - DNA, 25 bp, Homo sapien
taaaggaagagctgtgcggccttcg

SEQ ID NO: 1392524 - DNA, 25 bp, Homo sapien
gcagccccgcctagataaaggaaga

SEQ ID NO: 1392525 - DNA, 25 bp, Homo sapien
ccttatatttcagggaggatcgcag

SEQ ID NO: 1392526 - DNA, 25 bp, Homo sapien
cctgcgtagtttgtagccggctcta

SEQ ID NO: 1392527 - DNA, 25 bp, Homo sapien
catccggagtgcaatggataagcct

SEQ ID NO: 1392528 - DNA, 25 bp, Homo sapien
tcaggggaaagcgcgaacgcagtcc

SEQ ID NO: 1392529 - DNA, 25 bp, Homo sapien
cggagtgcaatggataagcctcgcc

SEQ ID NO: 1392530 - DNA, 25 bp, Homo sapien
tccggagtgcaatggataagcctcg

SEQ ID NO: 1392531 - DNA, 25 bp, Homo sapien
taatgttataaagacagttgtccag

SEQ ID NO: 1392532 - DNA, 25 bp, Homo sapien
ccagaccttagtgtttacctcacgt

SEQ ID NO: 1392533 - DNA, 25 bp, Homo sapien
acactctccagcgtggtgttggact

SEQ ID NO: 1392534 - DNA, 25 bp, Homo sapien
ccagaagagatgattggacactctc

SEQ ID NO: 1392535 - DNA, 25 bp, Homo sapien
tttcggttaacagccgaacgcgcta

SEQ ID NO: 1392536 - DNA, 25 bp, Homo sapien
gcgtccctggatgggctcgaaccac

SEQ ID NO: 1392537 - DNA, 25 bp, Homo sapien
agccgaacgcgctaacccattgcgc

SEQ ID NO: 1392538 - DNA, 25 bp, Homo sapien
ttaacagccgaacgcgctaacccat

SEQ ID NO: 1392539 - DNA, 25 bp, Homo sapien
taagtggagatagctcatcatggag

SEQ ID NO: 1392540 - DNA, 25 bp, Homo sapien
ccgtcttggaaattcacagagagaa

SEQ ID NO: 1392541 - DNA, 25 bp, Homo sapien
gccggccaacgtgaggcagtcatta

SEQ ID NO: 1392542 - DNA, 25 bp, Homo sapien
gaagtattggtcttgctgttcagag

SEQ ID NO: 1392543 - DNA, 25 bp, Homo sapien
taactgccctaagatcctgaacaaa

SEQ ID NO: 1392544 - DNA, 25 bp, Homo sapien
tatgaaccaataagcatcttcaggg

SEQ ID NO: 1392545 - DNA, 25 bp, Homo sapien
cagcatgagtgtctggattagtcca

SEQ ID NO: 1392546 - DNA, 25 bp, Homo sapien
tacgttgggactgataggattgcaa

SEQ ID NO: 1392547 - DNA, 25 bp, Homo sapien
tagatgctaattaggaagtgggcta

SEQ ID NO: 1392548 - DNA, 25 bp, Homo sapien
cctgctctgatcaactgggccacaa

SEQ ID NO: 1392549 - DNA, 25 bp, Homo sapien
gggccacaaccgcaaataagtcctg

SEQ ID NO: 1392550 - DNA, 25 bp, Homo sapien
taatgagcagtgagagcaactagag

SEQ ID NO: 1392551 - DNA, 25 bp, Homo sapien
accaggaatcgaactcgagctgcag

SEQ ID NO: 1392552 - DNA, 25 bp, Homo sapien
ccaggaatcgaactcgagctgcagg

SEQ ID NO: 1392553 - DNA, 25 bp, Homo sapien
gaccaggaatcgaactcgagctgca

SEQ ID NO: 1392554 - DNA, 25 bp, Homo sapien
caggaatcgaactcgagctgcaggc

SEQ ID NO: 1392555 - DNA, 25 bp, Homo sapien
agtggtggcaccatcaaaggcagga

SEQ ID NO: 1392556 - DNA, 25 bp, Homo sapien
tgcagggcacaatggaagtaaacac

SEQ ID NO: 1392557 - DNA, 25 bp, Homo sapien
cacacatgttgaccgaagggtttcc

SEQ ID NO: 1392558 - DNA, 25 bp, Homo sapien
tgtttagtttatgtccaagcgccat

SEQ ID NO: 1392559 - DNA, 25 bp, Homo sapien
cgcgctaaccaattgctccacggag

SEQ ID NO: 1392560 - DNA, 25 bp, Homo sapien
gaacgcgctaaccaattgctccacg

SEQ ID NO: 1392561 - DNA, 25 bp, Homo sapien
aacgcgctaaccaattgctccacgg

SEQ ID NO: 1392562 - DNA, 25 bp, Homo sapien
cgctaaccaattgctccacggagat

SEQ ID NO: 1392563 - DNA, 25 bp, Homo sapien
ggtaggcgtgaggcgatgtcagttt

SEQ ID NO: 1392564 - DNA, 25 bp, Homo sapien
taggcgtgaggcgatgtcagttttg

SEQ ID NO: 1392565 - DNA, 25 bp, Homo sapien
gggtaggcgtgaggcgatgtcagtt

SEQ ID NO: 1392566 - DNA, 25 bp, Homo sapien
aggcgtgaggcgatgtcagttttga

SEQ ID NO: 1392567 - DNA, 25 bp, Homo sapien
gatgaagaagcttcactctgggaga

SEQ ID NO: 1392568 - DNA, 25 bp, Homo sapien
aagattccaccgacagtcaccccac

SEQ ID NO: 1392569 - DNA, 25 bp, Homo sapien
agattccaccgacagtcaccccaca

SEQ ID NO: 1392570 - DNA, 25 bp, Homo sapien
tggctctttcagcaccgaatcctag

SEQ ID NO: 1392571 - DNA, 25 bp, Homo sapien
cgaacccgggccgtggctctttcag

SEQ ID NO: 1392572 - DNA, 25 bp, Homo sapien
aacccgggccgtggctctttcagca

SEQ ID NO: 1392573 - DNA, 25 bp, Homo sapien
ggccgtggctctttcagcaccgaat

SEQ ID NO: 1392574 - DNA, 25 bp, Homo sapien
caattcgtgatttccgtcggccaag

SEQ ID NO: 1392575 - DNA, 25 bp, Homo sapien
actgacaagatggtcgcgggtcgcc

SEQ ID NO: 1392576 - DNA, 25 bp, Homo sapien
cccgccgtggattgcaaggtgttta

SEQ ID NO: 1392577 - DNA, 25 bp, Homo sapien
tagagatgccctttgcgaggcggca

SEQ ID NO: 1392578 - DNA, 25 bp, Homo sapien
tgagataccactaaccaatcaccag

SEQ ID NO: 1392579 - DNA, 25 bp, Homo sapien
taaacttgtactcaggtcgtgaccc

SEQ ID NO: 1392580 - DNA, 25 bp, Homo sapien
gagaatttcttatatgctggaagcc

SEQ ID NO: 1392581 - DNA, 25 bp, Homo sapien
tcgggcaaaatattcgaataggcct

SEQ ID NO: 1392582 - DNA, 25 bp, Homo sapien
gagtccaacaactgcgtgggtcccg

SEQ ID NO: 1392583 - DNA, 25 bp, Homo sapien
caaggtccagcacacgaatcaggaa

SEQ ID NO: 1392584 - DNA, 25 bp, Homo sapien
ggtttgcaggaatccgcccagagaa

SEQ ID NO: 1392585 - DNA, 25 bp, Homo sapien
cagtttaccttgtggtggccaagcc

SEQ ID NO: 1392586 - DNA, 25 bp, Homo sapien
gtgtcccgcgtgtgaggcgagaatt

SEQ ID NO: 1392587 - DNA, 25 bp, Homo sapien
attgaacccgggtgtcccgcgtgtg

SEQ ID NO: 1392588 - DNA, 25 bp, Homo sapien
cgggtgtcccgcgtgtgaggcgaga

SEQ ID NO: 1392589 - DNA, 25 bp, Homo sapien
ttgaacccgggtgtcccgcgtgtga

SEQ ID NO: 1392590 - DNA, 25 bp, Homo sapien
ggcttccagctgcactagtgccggc

SEQ ID NO: 1392591 - DNA, 25 bp, Homo sapien
ggcttttcgcctgggtaaagtgcag

SEQ ID NO: 1392592 - DNA, 25 bp, Homo sapien
cacctggcgcaatggtgctgaagcg

SEQ ID NO: 1392593 - DNA, 25 bp, Homo sapien
tgtagagggatgttgggaagctgtg

SEQ ID NO: 1392594 - DNA, 25 bp, Homo sapien
aggcaaagcgagagtcggtggctat

SEQ ID NO: 1392595 - DNA, 25 bp, Homo sapien
caaagcgagagtcggtggctatggc

SEQ ID NO: 1392596 - DNA, 25 bp, Homo sapien
ctgccgagaggccagaaggcaaagc

SEQ ID NO: 1392597 - DNA, 25 bp, Homo sapien
aaggcaaagcgagagtcggtggcta

SEQ ID NO: 1392598 - DNA, 25 bp, Homo sapien
ctttcgcgtgtgaggcgaacgtgat

SEQ ID NO: 1392599 - DNA, 25 bp, Homo sapien
ccggggacctttcgcgtgtgaggcg

SEQ ID NO: 1392600 - DNA, 25 bp, Homo sapien
gggacctttcgcgtgtgaggcgaac

SEQ ID NO: 1392601 - DNA, 25 bp, Homo sapien
gaacgtgataaccactacactacgg

SEQ ID NO: 1392602 - DNA, 25 bp, Homo sapien
tagatcagccgtttctattatagtt

SEQ ID NO: 1392603 - DNA, 25 bp, Homo sapien
cacacgcggaacctgcgcggcaaaa

SEQ ID NO: 1392604 - DNA, 25 bp, Homo sapien
gaacctgcgcggcaaaacataacca

SEQ ID NO: 1392605 - DNA, 25 bp, Homo sapien
aacataaccatgaaaatcttagatc

SEQ ID NO: 1392606 - DNA, 25 bp, Homo sapien
cacacctgaagtccaagtgtttgca

SEQ ID NO: 1392607 - DNA, 25 bp, Homo sapien
cttcacacctgaagtccaagtgttt

SEQ ID NO: 1392608 - DNA, 25 bp, Homo sapien
cacctgaagtccaagtgtttgcacc

SEQ ID NO: 1392609 - DNA, 25 bp, Homo sapien
tgcggtggtgaccgcattgccttca

SEQ ID NO: 1392610 - DNA, 25 bp, Homo sapien
gactggtgggctgttacccttacca

SEQ ID NO: 1392611 - DNA, 25 bp, Homo sapien
ttaccagcgactggagggccaacct

SEQ ID NO: 1392612 - DNA, 25 bp, Homo sapien
ggacgcgactggatctcaccagaga

SEQ ID NO: 1392613 - DNA, 25 bp, Homo sapien
gaggcctacttcatgatcgccttaa

SEQ ID NO: 1392614 - DNA, 25 bp, Homo sapien
aagataatatccaatgcctccaagt

SEQ ID NO: 1392615 - DNA, 25 bp, Homo sapien
caagttcccacccaagaattctgtt

SEQ ID NO: 1392616 - DNA, 25 bp, Homo sapien
gttcccacccaagaattctgttgga

SEQ ID NO: 1392617 - DNA, 25 bp, Homo sapien
acccaagaattctgttggatagggc

SEQ ID NO: 1392618 - DNA, 25 bp, Homo sapien
tgaatgaggggctacagtggactgt

SEQ ID NO: 1392619 - DNA, 25 bp, Homo sapien
gaagagtgactctgagtatatgaat

SEQ ID NO: 1392620 - DNA, 25 bp, Homo sapien
gtgactctgagtatatgaatgaggg

SEQ ID NO: 1392621 - DNA, 25 bp, Homo sapien
gagtgactctgagtatatgaatgag

SEQ ID NO: 1392622 - DNA, 25 bp, Homo sapien
accattgctaagcacatgctgcagc

SEQ ID NO: 1392623 - DNA, 25 bp, Homo sapien
cgctggcgcaggttctgtatctcag

SEQ ID NO: 1392624 - DNA, 25 bp, Homo sapien
gagttgggttggtacaaagaggaga

SEQ ID NO: 1392625 - DNA, 25 bp, Homo sapien
aggctaggtctccagatgcattcat

SEQ ID NO: 1392626 - DNA, 25 bp, Homo sapien
cagtcactgaaggatgcacttcctc

SEQ ID NO: 1392627 - DNA, 25 bp, Homo sapien
tgactacagtcactgaaggatgcac

SEQ ID NO: 1392628 - DNA, 25 bp, Homo sapien
gacttctgtcactttactcatatta

SEQ ID NO: 1392629 - DNA, 25 bp, Homo sapien
ggggctgagtctgggaccgggcatc

SEQ ID NO: 1392630 - DNA, 25 bp, Homo sapien
aggccttgagcgctgtggttctgca

SEQ ID NO: 1392631 - DNA, 25 bp, Homo sapien
gcagctcgctccgagatttttggct

SEQ ID NO: 1392632 - DNA, 25 bp, Homo sapien
tcagtcgtgaggtacagccaggaca

SEQ ID NO: 1392633 - DNA, 25 bp, Homo sapien
gatttttggctctcgaaggccttga

SEQ ID NO: 1392634 - DNA, 25 bp, Homo sapien
gtcagcacatccggaacacaatgga

SEQ ID NO: 1392635 - DNA, 25 bp, Homo sapien
aaccaccttcgtttgataatagtat

SEQ ID NO: 1392636 - DNA, 25 bp, Homo sapien
ccttcgtttgataatagtatctccc

SEQ ID NO: 1392637 - DNA, 25 bp, Homo sapien
tcgtttgataatagtatctcccctg

SEQ ID NO: 1392638 - DNA, 25 bp, Homo sapien
aggaagtgacgtctgtctctttctc

SEQ ID NO: 1392639 - DNA, 25 bp, Homo sapien
tacgtttgtttgtagcccaggtgcc

SEQ ID NO: 1392640 - DNA, 25 bp, Homo sapien
cttacgtttgtttgtagcccaggtg

SEQ ID NO: 1392641 - DNA, 25 bp, Homo sapien
gtttccagcaggagtattagcagta

SEQ ID NO: 1392642 - DNA, 25 bp, Homo sapien
gcaggagtattagcagtaccaggca

SEQ ID NO: 1392643 - DNA, 25 bp, Homo sapien
gagcctctatgttcgggtttcacca

SEQ ID NO: 1392644 - DNA, 25 bp, Homo sapien
aagcatctttgaactagagcctcta

SEQ ID NO: 1392645 - DNA, 25 bp, Homo sapien
aattaatatcctattcagcttgctg

SEQ ID NO: 1392646 - DNA, 25 bp, Homo sapien
gcagttttcatggtactatataaca

SEQ ID NO: 1392647 - DNA, 25 bp, Homo sapien
tagaaatcttattgatcagctgccc

SEQ ID NO: 1392648 - DNA, 25 bp, Homo sapien
tactaacaaagattccttgcttggc

SEQ ID NO: 1392649 - DNA, 25 bp, Homo sapien
tcccacattaaaggcctgatagctc

SEQ ID NO: 1392650 - DNA, 25 bp, Homo sapien
cctctgggctcagaaactgtcttta

SEQ ID NO: 1392651 - DNA, 25 bp, Homo sapien
caaacagcgccccaaaagggctgaa

SEQ ID NO: 1392652 - DNA, 25 bp, Homo sapien
tgtttcgcaaacagcgccccaaaag

SEQ ID NO: 1392653 - DNA, 25 bp, Homo sapien
aaaggggctgtgtttcgcaaacagc

SEQ ID NO: 1392654 - DNA, 25 bp, Homo sapien
ggctgtgtttcgcaaacagcgcccc

SEQ ID NO: 1392655 - DNA, 25 bp, Homo sapien
ataattcctttagaaagtggagtcg

SEQ ID NO: 1392656 - DNA, 25 bp, Homo sapien
ggagtcgaattcataaaagtgatgg

SEQ ID NO: 1392657 - DNA, 25 bp, Homo sapien
agctcccggcgcgagtggaggtcgg

SEQ ID NO: 1392658 - DNA, 25 bp, Homo sapien
gaaagtggagtcgaattcataaaag

SEQ ID NO: 1392659 - DNA, 25 bp, Homo sapien
agccggtgatcgctctccggccgtc

SEQ ID NO: 1392660 - DNA, 25 bp, Homo sapien
cccagccggtgatcgctctccggcc

SEQ ID NO: 1392661 - DNA, 25 bp, Homo sapien
gccggtgatcgctctccggccgtcc

SEQ ID NO: 1392662 - DNA, 25 bp, Homo sapien
ggtgatcgctctccggccgtccccg

SEQ ID NO: 1392663 - DNA, 25 bp, Homo sapien
ttaactgaatatttacgaaagctga

SEQ ID NO: 1392664 - DNA, 25 bp, Homo sapien
gatcacttccgaaaccacttggcct

SEQ ID NO: 1392665 - DNA, 25 bp, Homo sapien
ttacgaaagctgaaagcgtgcgagg

SEQ ID NO: 1392666 - DNA, 25 bp, Homo sapien
ccaggatcacttccgaaaccacttg

SEQ ID NO: 1392667 - DNA, 25 bp, Homo sapien
gaattcagaaggatatcgacgtcgt

SEQ ID NO: 1392668 - DNA, 25 bp, Homo sapien
taatggggatgtgttcaaggcaaga

SEQ ID NO: 1392669 - DNA, 25 bp, Homo sapien
cgtgatccagaagtccagagctgag

SEQ ID NO: 1392670 - DNA, 25 bp, Homo sapien
tatcgacgtcgtgatccagaagtcc

SEQ ID NO: 1392671 - DNA, 25 bp, Homo sapien
cgaaggggcagtgcgtggtatttcc

SEQ ID NO: 1392672 - DNA, 25 bp, Homo sapien
gagcgggggtctaggcgaaggggca

SEQ ID NO: 1392673 - DNA, 25 bp, Homo sapien
gggtctaggcgaaggggcagtgcgt

SEQ ID NO: 1392674 - DNA, 25 bp, Homo sapien
ggcagtgcgtggtatttccagcccc

SEQ ID NO: 1392675 - DNA, 25 bp, Homo sapien
gaatggagcctgctgcgctgcgctc

SEQ ID NO: 1392676 - DNA, 25 bp, Homo sapien
ttgcgtaatgggctgagcggcggcg

SEQ ID NO: 1392677 - DNA, 25 bp, Homo sapien
gctgcgctgcgctcgtaagctgcgc

SEQ ID NO: 1392678 - DNA, 25 bp, Homo sapien
caggtttgcgtaatgggctgagcgg

SEQ ID NO: 1392679 - DNA, 25 bp, Homo sapien
cgggggcggcctgccgctgcaccca

SEQ ID NO: 1392680 - DNA, 25 bp, Homo sapien
tgcacccagtcgggggcgcgccgca

SEQ ID NO: 1392681 - DNA, 25 bp, Homo sapien
atggcacccggcacttgctgccggg

SEQ ID NO: 1392682 - DNA, 25 bp, Homo sapien
ccatggcacccggcacttgctgccg

SEQ ID NO: 1392683 - DNA, 25 bp, Homo sapien
ggtcctacacattatatctaaagga

SEQ ID NO: 1392684 - DNA, 25 bp, Homo sapien
taaaggatcttcgtatatgactact

SEQ ID NO: 1392685 - DNA, 25 bp, Homo sapien
ttaacaattcaatgagaggagactt

SEQ ID NO: 1392686 - DNA, 25 bp, Homo sapien
taaattaatgctggtcctacacatt

SEQ ID NO: 1392687 - DNA, 25 bp, Homo sapien
ggccagtggttaccaaagccaagga

SEQ ID NO: 1392688 - DNA, 25 bp, Homo sapien
tggactgctctggaattccgagtgt

SEQ ID NO: 1392689 - DNA, 25 bp, Homo sapien
ctggccatggactgctctggaattc

SEQ ID NO: 1392690 - DNA, 25 bp, Homo sapien
actttcagccaagaaggtagtgtga

SEQ ID NO: 1392691 - DNA, 25 bp, Homo sapien
gctgcttaaaagagtgatgtcacat

SEQ ID NO: 1392692 - DNA, 25 bp, Homo sapien
tagaactccaactgctagccaactg

SEQ ID NO: 1392693 - DNA, 25 bp, Homo sapien
gtcgagacgagaactcaccatattg

SEQ ID NO: 1392694 - DNA, 25 bp, Homo sapien
tatttgaagtgtagaactgaggcag

SEQ ID NO: 1392695 - DNA, 25 bp, Homo sapien
agataagtacatgagagtaaatcac

SEQ ID NO: 1392696 - DNA, 25 bp, Homo sapien
taagtacatgagagtaaatcacatt

SEQ ID NO: 1392697 - DNA, 25 bp, Homo sapien
gataagtacatgagagtaaatcaca

SEQ ID NO: 1392698 - DNA, 25 bp, Homo sapien
tgtagataagtacatgagagtaaat

SEQ ID NO: 1392699 - DNA, 25 bp, Homo sapien
ctgcctactaattttcaatcaccat

SEQ ID NO: 1392700 - DNA, 25 bp, Homo sapien
gcctactaattttcaatcaccatag

SEQ ID NO: 1392701 - DNA, 25 bp, Homo sapien
gtttgaatattgagcttaaacataa

SEQ ID NO: 1392702 - DNA, 25 bp, Homo sapien
cataacatgtacatacctgaaactc

SEQ ID NO: 1392703 - DNA, 25 bp, Homo sapien
caaggaccagtcctaaaggcagacc

SEQ ID NO: 1392704 - DNA, 25 bp, Homo sapien
gcagacggtattcagcacagggcct

SEQ ID NO: 1392705 - DNA, 25 bp, Homo sapien
tgggcaaacaagacctgctgagtta

SEQ ID NO: 1392706 - DNA, 25 bp, Homo sapien
tggcccaagacctgagacatgcaaa

SEQ ID NO: 1392707 - DNA, 25 bp, Homo sapien
cagtgtacaaagtccaagtctaaac

SEQ ID NO: 1392708 - DNA, 25 bp, Homo sapien
ttttcgttgttatcagatgccagcg

SEQ ID NO: 1392709 - DNA, 25 bp, Homo sapien
gcagcaatagtgtacattggtcagt

SEQ ID NO: 1392710 - DNA, 25 bp, Homo sapien
ttttagagtctagcgattctccaga

SEQ ID NO: 1392711 - DNA, 25 bp, Homo sapien
ttttgatatctgtagcagcaagttt

SEQ ID NO: 1392712 - DNA, 25 bp, Homo sapien
gatggtaacattcctttttgatatc

SEQ ID NO: 1392713 - DNA, 25 bp, Homo sapien
ggctccatcatgaagagagtgagat

SEQ ID NO: 1392714 - DNA, 25 bp, Homo sapien
tgaaagccctctacctaggaaatga

SEQ ID NO: 1392715 - DNA, 25 bp, Homo sapien
ggtagagtacagattagcagcaaca

SEQ ID NO: 1392716 - DNA, 25 bp, Homo sapien
tcctagctggattgtgaacatttta

SEQ ID NO: 1392717 - DNA, 25 bp, Homo sapien
accggagagtcgcagctgtgtgtta

SEQ ID NO: 1392718 - DNA, 25 bp, Homo sapien
gaccggagagtcgcagctgtgtgtt

SEQ ID NO: 1392719 - DNA, 25 bp, Homo sapien
cgcaagtgaccttgcgtgtaaaggg

SEQ ID NO: 1392720 - DNA, 25 bp, Homo sapien
atggctcctggatgcgcgtgacgca

SEQ ID NO: 1392721 - DNA, 25 bp, Homo sapien
ccttgcgtgtaaagggtgaggcata

SEQ ID NO: 1392722 - DNA, 25 bp, Homo sapien
cctggatgcgcgtgacgcaagtgac

SEQ ID NO: 1392723 - DNA, 25 bp, Homo sapien
tccactggagtgcatggcgggatcc

SEQ ID NO: 1392724 - DNA, 25 bp, Homo sapien
cctacgggagcccattgtaaacatt

SEQ ID NO: 1392725 - DNA, 25 bp, Homo sapien
gaatactcgatctcctaagtaactg

SEQ ID NO: 1392726 - DNA, 25 bp, Homo sapien
caagcgcaggccactaaaaaattag

SEQ ID NO: 1392727 - DNA, 25 bp, Homo sapien
tggcctgtttacagactttacagac

SEQ ID NO: 1392728 - DNA, 25 bp, Homo sapien
tgtatattatgctgggcccaagaca

SEQ ID NO: 1392729 - DNA, 25 bp, Homo sapien
tacaagctttacacgcacggttcag

SEQ ID NO: 1392730 - DNA, 25 bp, Homo sapien
acggttcagttgcagttagtgtata

SEQ ID NO: 1392731 - DNA, 25 bp, Homo sapien
gcagtgaagagcagacggtgaggag

SEQ ID NO: 1392732 - DNA, 25 bp, Homo sapien
agaggggccggcgacttttgagacg

SEQ ID NO: 1392733 - DNA, 25 bp, Homo sapien
gcgacttttgagacggtgaagagca

SEQ ID NO: 1392734 - DNA, 25 bp, Homo sapien
agtgaagagcagacggtgaggagca

SEQ ID NO: 1392735 - DNA, 25 bp, Homo sapien
ggatggcaccttttgcttaggcaag

SEQ ID NO: 1392736 - DNA, 25 bp, Homo sapien
tcgtctataaaaaagagcagccggg

SEQ ID NO: 1392737 - DNA, 25 bp, Homo sapien
ccaaaatatgctgcgtgaaggctca

SEQ ID NO: 1392738 - DNA, 25 bp, Homo sapien
actgaaaggttggtggtgcaagccc

SEQ ID NO: 1392739 - DNA, 25 bp, Homo sapien
accaccaagctttcggttaacagcg

SEQ ID NO: 1392740 - DNA, 25 bp, Homo sapien
agctttcggttaacagcggaacgcg

SEQ ID NO: 1392741 - DNA, 25 bp, Homo sapien
gctcgaaccaccaagctttcggtta

SEQ ID NO: 1392742 - DNA, 25 bp, Homo sapien
gtgggctcgaaccaccaagctttcg

SEQ ID NO: 1392743 - DNA, 25 bp, Homo sapien
ctgcccagtcgctgttgggctgctg

SEQ ID NO: 1392744 - DNA, 25 bp, Homo sapien
cctgcccagtcgctgttgggctgct

SEQ ID NO: 1392745 - DNA, 25 bp, Homo sapien
taagtggagatagctcatcatggag

SEQ ID NO: 1392746 - DNA, 25 bp, Homo sapien
ccgtcttggaaattcacagagagaa

SEQ ID NO: 1392747 - DNA, 25 bp, Homo sapien
gccggccaacgtgaggcagtcatta

SEQ ID NO: 1392748 - DNA, 25 bp, Homo sapien
gaagtattggtcttgctgttcagag

SEQ ID NO: 1392749 - DNA, 25 bp, Homo sapien
tggactgggagaacatttgcagttc

SEQ ID NO: 1392750 - DNA, 25 bp, Homo sapien
catgtcacaagcagacgggtctact

SEQ ID NO: 1392751 - DNA, 25 bp, Homo sapien
tgcggcggcgcaaggctcactgcta

SEQ ID NO: 1392752 - DNA, 25 bp, Homo sapien
tttcccatagataattaacactggg

SEQ ID NO: 1392753 - DNA, 25 bp, Homo sapien
caggaatcgaactcgagctgcaggc

SEQ ID NO: 1392754 - DNA, 25 bp, Homo sapien
accaggaatcgaactcgagctgcag

SEQ ID NO: 1392755 - DNA, 25 bp, Homo sapien
ccaggaatcgaactcgagctgcagg

SEQ ID NO: 1392756 - DNA, 25 bp, Homo sapien
gaccaggaatcgaactcgagctgca

SEQ ID NO: 1392757 - DNA, 25 bp, Homo sapien
gaacgcgctaaccaattgctccacg

SEQ ID NO: 1392758 - DNA, 25 bp, Homo sapien
aacgcgctaaccaattgctccacgg

SEQ ID NO: 1392759 - DNA, 25 bp, Homo sapien
cgctaaccaattgctccacggagat

SEQ ID NO: 1392760 - DNA, 25 bp, Homo sapien
cgcgctaaccaattgctccacggag

SEQ ID NO: 1392761 - DNA, 25 bp, Homo sapien
gcgggaaagaagcaggggagtcaaa

SEQ ID NO: 1392762 - DNA, 25 bp, Homo sapien
agcgggaaagaagcaggggagtcaa

SEQ ID NO: 1392763 - DNA, 25 bp, Homo sapien
gagcgggaaagaagcaggggagtca

SEQ ID NO: 1392764 - DNA, 25 bp, Homo sapien
ggagcgggaaagaagcaggggagtc

SEQ ID NO: 1392765 - DNA, 25 bp, Homo sapien
tgcctttaattcctgcaccagctgc

SEQ ID NO: 1392766 - DNA, 25 bp, Homo sapien
cgctggtcccacagcgccatacggt

SEQ ID NO: 1392767 - DNA, 25 bp, Homo sapien
agcaggttttaccgctggtcccaca

SEQ ID NO: 1392768 - DNA, 25 bp, Homo sapien
gcggcctttatctgcagccagaaag

SEQ ID NO: 1392769 - DNA, 25 bp, Homo sapien
gatgaagaagcttcactctgggaga

SEQ ID NO: 1392770 - DNA, 25 bp, Homo sapien
gggccgtgacgctttcagcaccgaa

SEQ ID NO: 1392771 - DNA, 25 bp, Homo sapien
tgacgctttcagcaccgaatcctag

SEQ ID NO: 1392772 - DNA, 25 bp, Homo sapien
cgaacccgggccgtgacgctttcag

SEQ ID NO: 1392773 - DNA, 25 bp, Homo sapien
aacccgggccgtgacgctttcagca

SEQ ID NO: 1392774 - DNA, 25 bp, Homo sapien
cgtgggaggcgagaattctaccact

SEQ ID NO: 1392775 - DNA, 25 bp, Homo sapien
ccgggtctcccgcgtgggaggcgag

SEQ ID NO: 1392776 - DNA, 25 bp, Homo sapien
agaattctaccactgaaccaccagt

SEQ ID NO: 1392777 - DNA, 25 bp, Homo sapien
aattctaccactgaaccaccagtgc

SEQ ID NO: 1392778 - DNA, 25 bp, Homo sapien
ctgcatttgcaatccagcctctggg

SEQ ID NO: 1392779 - DNA, 25 bp, Homo sapien
cagtagggtgatacatcctttagca

SEQ ID NO: 1392780 - DNA, 25 bp, Homo sapien
ggcttagcagtgtagagcccaaggc

SEQ ID NO: 1392781 - DNA, 25 bp, Homo sapien
tccagaagcttctagaaccagtagg

SEQ ID NO: 1392782 - DNA, 25 bp, Homo sapien
tttacgcgtgtgaggcgaacgtgat

SEQ ID NO: 1392783 - DNA, 25 bp, Homo sapien
ggacctttacgcgtgtgaggcgaac

SEQ ID NO: 1392784 - DNA, 25 bp, Homo sapien
gacctttacgcgtgtgaggcgaacg

SEQ ID NO: 1392785 - DNA, 25 bp, Homo sapien
cctttacgcgtgtgaggcgaacgtg

SEQ ID NO: 1392786 - DNA, 25 bp, Homo sapien
gtgactctgagtatatgaatgaggg

SEQ ID NO: 1392787 - DNA, 25 bp, Homo sapien
caagttcccacccaagaattctgtt

SEQ ID NO: 1392788 - DNA, 25 bp, Homo sapien
aagataatatccaatgcctccaagt

SEQ ID NO: 1392789 - DNA, 25 bp, Homo sapien
gactctctaggcatcatgtcacagg

SEQ ID NO: 1392790 - DNA, 25 bp, Homo sapien
agggctgcaatgaagtctggaggga

SEQ ID NO: 1392791 - DNA, 25 bp, Homo sapien
ggctgcaatgaagtctggagggatt

SEQ ID NO: 1392792 - DNA, 25 bp, Homo sapien
gggctgcaatgaagtctggagggat

SEQ ID NO: 1392793 - DNA, 25 bp, Homo sapien
gctgcaatgaagtctggagggattt

SEQ ID NO: 1392794 - DNA, 25 bp, Homo sapien
gaagagagacaccaagctttctagt

SEQ ID NO: 1392795 - DNA, 25 bp, Homo sapien
ctttctagttgacagctagtgactc

SEQ ID NO: 1392796 - DNA, 25 bp, Homo sapien
ctattccgtacccaggtgaaagtgg

SEQ ID NO: 1392797 - DNA, 25 bp, Homo sapien
ctctcctattccgtacccaggtgaa

SEQ ID NO: 1392798 - DNA, 25 bp, Homo sapien
gggaaaggaacttaaacatgacatg

SEQ ID NO: 1392799 - DNA, 25 bp, Homo sapien
tgcaaagattgggaaaggaacttaa

SEQ ID NO: 1392800 - DNA, 25 bp, Homo sapien
ttgggaaaggaacttaaacatgaca

SEQ ID NO: 1392801 - DNA, 25 bp, Homo sapien
agattgggaaaggaacttaaacatg

SEQ ID NO: 1392802 - DNA, 25 bp, Homo sapien
ctccctcaggcggtcattgagactg

SEQ ID NO: 1392803 - DNA, 25 bp, Homo sapien
cggtcattgagactgatggactcct

SEQ ID NO: 1392804 - DNA, 25 bp, Homo sapien
caggcggtcattgagactgatggac

SEQ ID NO: 1392805 - DNA, 25 bp, Homo sapien
gtcattgagactgatggactcctcc

SEQ ID NO: 1392806 - DNA, 25 bp, Homo sapien
cagtcactgaaggatgcacttcctc

SEQ ID NO: 1392807 - DNA, 25 bp, Homo sapien
tactcatattatgcatcttcctcaa

SEQ ID NO: 1392808 - DNA, 25 bp, Homo sapien
ggggctgagtctgggaccgggcatc

SEQ ID NO: 1392809 - DNA, 25 bp, Homo sapien
gacttctgtcactttactcatatta

SEQ ID NO: 1392810 - DNA, 25 bp, Homo sapien
tgattcttcttacttgtacagtcat

SEQ ID NO: 1392811 - DNA, 25 bp, Homo sapien
ctgagagtcgaagacacctgtccta

SEQ ID NO: 1392812 - DNA, 25 bp, Homo sapien
tgtcctacttgattcttcttacttg

SEQ ID NO: 1392813 - DNA, 25 bp, Homo sapien
gaagacacctgtcctacttgattct

SEQ ID NO: 1392814 - DNA, 25 bp, Homo sapien
ggagtagctcctcaaaggtctttag

SEQ ID NO: 1392815 - DNA, 25 bp, Homo sapien
tgaattttctggcaaggctctctgc

SEQ ID NO: 1392816 - DNA, 25 bp, Homo sapien
catcttctgccgtaggtgggttaac

SEQ ID NO: 1392817 - DNA, 25 bp, Homo sapien
gtagtgctgctccatatagtggtca

SEQ ID NO: 1392818 - DNA, 25 bp, Homo sapien
ggactcccagtttgagaggcgccat

SEQ ID NO: 1392819 - DNA, 25 bp, Homo sapien
aggactcccagtttgagaggcgcca

SEQ ID NO: 1392820 - DNA, 25 bp, Homo sapien
cttttagttaacagccaaacgcgct

SEQ ID NO: 1392821 - DNA, 25 bp, Homo sapien
gcctctgggtgggttcgaaccacca

SEQ ID NO: 1392822 - DNA, 25 bp, Homo sapien
tagttaacagccaaacgcgctagcc

SEQ ID NO: 1392823 - DNA, 25 bp, Homo sapien
ttagttaacagccaaacgcgctagc

SEQ ID NO: 1392824 - DNA, 25 bp, Homo sapien
tctggctctcgtgaacaaagctgct

SEQ ID NO: 1392825 - DNA, 25 bp, Homo sapien
aacaaagctgctatattctagtaca

SEQ ID NO: 1392826 - DNA, 25 bp, Homo sapien
gaacaaagctgctatattctagtac

SEQ ID NO: 1392827 - DNA, 25 bp, Homo sapien
tccaattctggctctcgtgaacaaa

SEQ ID NO: 1392828 - DNA, 25 bp, Homo sapien
ggaaactccattcaacagcgactgg

SEQ ID NO: 1392829 - DNA, 25 bp, Homo sapien
ccttggcgccttcggagttcggact

SEQ ID NO: 1392830 - DNA, 25 bp, Homo sapien
tgctactggcctccgagaagacagg

SEQ ID NO: 1392831 - DNA, 25 bp, Homo sapien
cacttaaaataggatgagcccaacc

SEQ ID NO: 1392832 - DNA, 25 bp, Homo sapien
ggcaggtgtagtacgttttagagaa

SEQ ID NO: 1392833 - DNA, 25 bp, Homo sapien
gcaggtgtagtacgttttagagaaa

SEQ ID NO: 1392834 - DNA, 25 bp, Homo sapien
aaggcaggtgtagtacgttttagag

SEQ ID NO: 1392835 - DNA, 25 bp, Homo sapien
atccggaattccgttcagggccctg

SEQ ID NO: 1392836 - DNA, 25 bp, Homo sapien
gggtatctctagcaccagaggatca

SEQ ID NO: 1392837 - DNA, 25 bp, Homo sapien
tatctctagcaccagaggatcattg

SEQ ID NO: 1392838 - DNA, 25 bp, Homo sapien
tgtaggtgtggggtatctctagcac

SEQ ID NO: 1392839 - DNA, 25 bp, Homo sapien
tagcaccagaggatcattgaggttg

SEQ ID NO: 1392840 - DNA, 25 bp, Homo sapien
ggcaggaggattcgtctgcaagttg

SEQ ID NO: 1392841 - DNA, 25 bp, Homo sapien
caggaggattcgtctgcaagttggt

SEQ ID NO: 1392842 - DNA, 25 bp, Homo sapien
gaggattcgtctgcaagttggttaa

SEQ ID NO: 1392843 - DNA, 25 bp, Homo sapien
gattcgtctgcaagttggttaattc

SEQ ID NO: 1392844 - DNA, 25 bp, Homo sapien
tctagggcctgcctgattctagcac

SEQ ID NO: 1392845 - DNA, 25 bp, Homo sapien
ccaaggagagagatatgagtagacc

SEQ ID NO: 1392846 - DNA, 25 bp, Homo sapien
tacactaagacagcagtttgcaaca

SEQ ID NO: 1392847 - DNA, 25 bp, Homo sapien
ttcaggagaactataatctagggcc

SEQ ID NO: 1392848 - DNA, 25 bp, Homo sapien
tctagcatgcgaatcagggacgtga

SEQ ID NO: 1392849 - DNA, 25 bp, Homo sapien
gacgtgatggttctttgggattcta

SEQ ID NO: 1392850 - DNA, 25 bp, Homo sapien
atagtgaggcgtgacccagcggtca

SEQ ID NO: 1392851 - DNA, 25 bp, Homo sapien
cacttcttgttcctcgctccatagt

SEQ ID NO: 1392852 - DNA, 25 bp, Homo sapien
caggaattaaaccagggtctcctat

SEQ ID NO: 1392853 - DNA, 25 bp, Homo sapien
ggtctcctatgcaggcggtgagaat

SEQ ID NO: 1392854 - DNA, 25 bp, Homo sapien
ggaattaaaccagggtctcctatgc

SEQ ID NO: 1392855 - DNA, 25 bp, Homo sapien
tgcaggcggtgagaattctaccact

SEQ ID NO: 1392856 - DNA, 25 bp, Homo sapien
ttttccgaatttctgtttgcctctc

SEQ ID NO: 1392857 - DNA, 25 bp, Homo sapien
aataaagtagactttctcactctat

SEQ ID NO: 1392858 - DNA, 25 bp, Homo sapien
catctcccactttactagttctctt

SEQ ID NO: 1392859 - DNA, 25 bp, Homo sapien
cgcactgtggctgactagctaaaaa

SEQ ID NO: 1392860 - DNA, 25 bp, Homo sapien
catttcgctggccaatgaaagtctc

SEQ ID NO: 1392861 - DNA, 25 bp, Homo sapien
gagtcagagacataccctcatgagg

SEQ ID NO: 1392862 - DNA, 25 bp, Homo sapien
gatgagccacagtcaagagtcagag

SEQ ID NO: 1392863 - DNA, 25 bp, Homo sapien
tgataaccacctgtagcttgttcag

SEQ ID NO: 1392864 - DNA, 25 bp, Homo sapien
gacgcaccgcagtgaagtttccttg

SEQ ID NO: 1392865 - DNA, 25 bp, Homo sapien
tcaagagatctgagttgatccctca

SEQ ID NO: 1392866 - DNA, 25 bp, Homo sapien
gtagcattaagcctggacgcaccgc

SEQ ID NO: 1392867 - DNA, 25 bp, Homo sapien
tataaagggctacggtatgggacag

SEQ ID NO: 1392868 - DNA, 25 bp, Homo sapien
tggtggacccgagccctaatcatat

SEQ ID NO: 1392869 - DNA, 25 bp, Homo sapien
ggaggagactttccatccagactgc

SEQ ID NO: 1392870 - DNA, 25 bp, Homo sapien
gtatgtcgaaaggaaaagcccattg

SEQ ID NO: 1392871 - DNA, 25 bp, Homo sapien
gaccactggtatagaggtatcctca

SEQ ID NO: 1392872 - DNA, 25 bp, Homo sapien
gatgcattttctagggccaggtttc

SEQ ID NO: 1392873 - DNA, 25 bp, Homo sapien
tcttcatgagccagcattacggcct

SEQ ID NO: 1392874 - DNA, 25 bp, Homo sapien
tggatgctaaacaggcaaccttgtc

SEQ ID NO: 1392875 - DNA, 25 bp, Homo sapien
cgtgagcactgcgtacaaacatcca

SEQ ID NO: 1392876 - DNA, 25 bp, Homo sapien
gaggacaggcacatcaggtctcagc

SEQ ID NO: 1392877 - DNA, 25 bp, Homo sapien
cctgaaatgaccagtgcctccctga

SEQ ID NO: 1392878 - DNA, 25 bp, Homo sapien
tagggagtaagtccactgacagggc

SEQ ID NO: 1392879 - DNA, 25 bp, Homo sapien
agggagacaagagggaatagtatag

SEQ ID NO: 1392880 - DNA, 25 bp, Homo sapien
gcatatgtacagaagattaagacag

SEQ ID NO: 1392881 - DNA, 25 bp, Homo sapien
agagggaatagtatagacaataagg

SEQ ID NO: 1392882 - DNA, 25 bp, Homo sapien
agtgggtagatttcagggagacaag

SEQ ID NO: 1392883 - DNA, 25 bp, Homo sapien
ggttccctcaccgtcaaaagcagga

SEQ ID NO: 1392884 - DNA, 25 bp, Homo sapien
gaagcggcgataccatagagtccag

SEQ ID NO: 1392885 - DNA, 25 bp, Homo sapien
gaatgtctccatacgcgttctaggc

SEQ ID NO: 1392886 - DNA, 25 bp, Homo sapien
gatacgctgctctcatacttgggct

SEQ ID NO: 1392887 - DNA, 25 bp, Homo sapien
taaattcatcctagggccacaagag

SEQ ID NO: 1392888 - DNA, 25 bp, Homo sapien
gacaagtggagcagaaccggcatta

SEQ ID NO: 1392889 - DNA, 25 bp, Homo sapien
ttgggcccatccttcaatccgagag

SEQ ID NO: 1392890 - DNA, 25 bp, Homo sapien
gattacaggactgacaatgaggccc

SEQ ID NO: 1392891 - DNA, 25 bp, Homo sapien
tctccatatcctcagtaagtttcag

SEQ ID NO: 1392892 - DNA, 25 bp, Homo sapien
gatctgtcaattcctaagaaaggta

SEQ ID NO: 1392893 - DNA, 25 bp, Homo sapien
tgtgacccaccatgtaagcccacat

SEQ ID NO: 1392894 - DNA, 25 bp, Homo sapien
tcatggtcattccttaatggagcac

SEQ ID NO: 1392895 - DNA, 25 bp, Homo sapien
actggatggtgccaacccacattga

SEQ ID NO: 1392896 - DNA, 25 bp, Homo sapien
taagaacactgaatgacccttgccc

SEQ ID NO: 1392897 - DNA, 25 bp, Homo sapien
ctttgttgtagctaccctggcagcc

SEQ ID NO: 1392898 - DNA, 25 bp, Homo sapien
acccttgcccaggatcgtatctgtg

SEQ ID NO: 1392899 - DNA, 25 bp, Homo sapien
ttagtaggaccacctaagatgtatc

SEQ ID NO: 1392900 - DNA, 25 bp, Homo sapien
tttggccatctaaagcaaagttcct

SEQ ID NO: 1392901 - DNA, 25 bp, Homo sapien
gaaatcttaaggtcttcggactctg

SEQ ID NO: 1392902 - DNA, 25 bp, Homo sapien
tggatgctgagtagttgacaacaac

SEQ ID NO: 1392903 - DNA, 25 bp, Homo sapien
gatcatgtgagagccacgttatgtg

SEQ ID NO: 1392904 - DNA, 25 bp, Homo sapien
caaggtggtaagagccagaatatct

SEQ ID NO: 1392905 - DNA, 25 bp, Homo sapien
gatgttcatcgccactacaggctag

SEQ ID NO: 1392906 - DNA, 25 bp, Homo sapien
tgagagccttcagcatgatatgtga

SEQ ID NO: 1392907 - DNA, 25 bp, Homo sapien
tatccatctggagatagttctcttt

SEQ ID NO: 1392908 - DNA, 25 bp, Homo sapien
catctggagatagttctcttttctg

SEQ ID NO: 1392909 - DNA, 25 bp, Homo sapien
tctgtatccatctggagatagttct

SEQ ID NO: 1392910 - DNA, 25 bp, Homo sapien
tgtatccatctggagatagttctct

SEQ ID NO: 1392911 - DNA, 25 bp, Homo sapien
tacccaatgacttatactctgaggc

SEQ ID NO: 1392912 - DNA, 25 bp, Homo sapien
cagagctaagttcgtggaccactgg

SEQ ID NO: 1392913 - DNA, 25 bp, Homo sapien
ggagatcttagcagaaccaaagcag

SEQ ID NO: 1392914 - DNA, 25 bp, Homo sapien
tctaaactggtatgtggacctcggt

SEQ ID NO: 1392915 - DNA, 25 bp, Homo sapien
tggacaaacccagatgcaagagaag

SEQ ID NO: 1392916 - DNA, 25 bp, Homo sapien
caaacatcctgagatagaagggcct

SEQ ID NO: 1392917 - DNA, 25 bp, Homo sapien
catgcaagtatctagggatgagcct

SEQ ID NO: 1392918 - DNA, 25 bp, Homo sapien
cagtccagggctaacagagcagttc

SEQ ID NO: 1392919 - DNA, 25 bp, Homo sapien
tggcaccatgtaagttctcacagaa

SEQ ID NO: 1392920 - DNA, 25 bp, Homo sapien
ggaaatgttacaacctggatgaggg

SEQ ID NO: 1392921 - DNA, 25 bp, Homo sapien
caatgctccaagagtgttctgatgc

SEQ ID NO: 1392922 - DNA, 25 bp, Homo sapien
aaatcaagctaggaccatggtgagc

SEQ ID NO: 1392923 - DNA, 25 bp, Homo sapien
tatgtaaccaatctcaatgccctga

SEQ ID NO: 1392924 - DNA, 25 bp, Homo sapien
taatacatactgagaaaacacggtc

SEQ ID NO: 1392925 - DNA, 25 bp, Homo sapien
tagaacagctttaggaactgcaccc

SEQ ID NO: 1392926 - DNA, 25 bp, Homo sapien
cacagaggtcatgtacttatttccc

SEQ ID NO: 1392927 - DNA, 25 bp, Homo sapien
gtcttctggaatgcacctctcttct

SEQ ID NO: 1392928 - DNA, 25 bp, Homo sapien
tcaaggcactagaaaagcagaccat

SEQ ID NO: 1392929 - DNA, 25 bp, Homo sapien
tcttctcatcctttttcaaggcact

SEQ ID NO: 1392930 - DNA, 25 bp, Homo sapien
cttttgtcttctggaatgcacctct

SEQ ID NO: 1392931 - DNA, 25 bp, Homo sapien
caactgggccaataattatgaaggg

SEQ ID NO: 1392932 - DNA, 25 bp, Homo sapien
tacatagatacatcggctcaaggga

SEQ ID NO: 1392933 - DNA, 25 bp, Homo sapien
ttctgcagcacctcaaaccagggtg

SEQ ID NO: 1392934 - DNA, 25 bp, Homo sapien
gctcaagggaagatgccaagtgtag

SEQ ID NO: 1392935 - DNA, 25 bp, Homo sapien
taataggtggcctttagtgtcagga

SEQ ID NO: 1392936 - DNA, 25 bp, Homo sapien
gtagttgagccagttgacaatgctt

SEQ ID NO: 1392937 - DNA, 25 bp, Homo sapien
gacttcaggaccctaagctaggagg

SEQ ID NO: 1392938 - DNA, 25 bp, Homo sapien
tatggcccaactgtatagaaaatag

SEQ ID NO: 1392939 - DNA, 25 bp, Homo sapien
tattaaaacatccacactcctgaga

SEQ ID NO: 1392940 - DNA, 25 bp, Homo sapien
tcaggaaacctcaggagaagcacct

SEQ ID NO: 1392941 - DNA, 25 bp, Homo sapien
gtttaacaagcgcaaaggtgactct

SEQ ID NO: 1392942 - DNA, 25 bp, Homo sapien
acccacaggtcgattaacatgagga

SEQ ID NO: 1392943 - DNA, 25 bp, Homo sapien
tcaggacttgcaaaaaggctaaggg

SEQ ID NO: 1392944 - DNA, 25 bp, Homo sapien
tgtgccttatgcttagcactcctgg

SEQ ID NO: 1392945 - DNA, 25 bp, Homo sapien
gcctctgcccattggatacttctag

SEQ ID NO: 1392946 - DNA, 25 bp, Homo sapien
tatatctccctgtttgaagtcactg

SEQ ID NO: 1392947 - DNA, 25 bp, Homo sapien
ggaccgagggtttctcatctgtatg

SEQ ID NO: 1392948 - DNA, 25 bp, Homo sapien
tgggaaatctcatctcgttcattac

SEQ ID NO: 1392949 - DNA, 25 bp, Homo sapien
tcccaaatatcccagaacgagtcaa

SEQ ID NO: 1392950 - DNA, 25 bp, Homo sapien
agaaatagtaagaggtcggaccgag

SEQ ID NO: 1392951 - DNA, 25 bp, Homo sapien
taaacccgaatgcatccgtgaccat

SEQ ID NO: 1392952 - DNA, 25 bp, Homo sapien
gctatcaaacgctctgacaagtgtt

SEQ ID NO: 1392953 - DNA, 25 bp, Homo sapien
ggccaactcattacaggactacagg

SEQ ID NO: 1392954 - DNA, 25 bp, Homo sapien
gctttctcgattactgaagtggctc

SEQ ID NO: 1392955 - DNA, 25 bp, Homo sapien
ttcttgggagcaggagcggatttcg

SEQ ID NO: 1392956 - DNA, 25 bp, Homo sapien
ttcttctgcactttcgtaacagcct

SEQ ID NO: 1392957 - DNA, 25 bp, Homo sapien
tggcgcacaggttcgtgtcttcgaa

SEQ ID NO: 1392958 - DNA, 25 bp, Homo sapien
gcgcacaggttcgtgtcttcgaaca

SEQ ID NO: 1392959 - DNA, 25 bp, Homo sapien
cacaggttcgtgtcttcgaacagcc

SEQ ID NO: 1392960 - DNA, 25 bp, Homo sapien
gatggcgcacaggttcgtgtcttcg

SEQ ID NO: 1392961 - DNA, 25 bp, Homo sapien
ctgtgatgcgcagtggaaccgttca

SEQ ID NO: 1392962 - DNA, 25 bp, Homo sapien
accaggtggatctacgtgtctcgag

SEQ ID NO: 1392963 - DNA, 25 bp, Homo sapien
gaaccgttcaatgagcagacaggag

SEQ ID NO: 1392964 - DNA, 25 bp, Homo sapien
ccagtagggaacacacagccaagat

SEQ ID NO: 1392965 - DNA, 25 bp, Homo sapien
tctatgagagacttgagcaacctgg

SEQ ID NO: 1392966 - DNA, 25 bp, Homo sapien
tagcaggccctccatatacgcgggt

SEQ ID NO: 1392967 - DNA, 25 bp, Homo sapien
gacacagctgggcactaaatcctgg

SEQ ID NO: 1392968 - DNA, 25 bp, Homo sapien
ggattaaatcctgcgctggcgcgct

SEQ ID NO: 1392969 - DNA, 25 bp, Homo sapien
tagagggccacgtcagtctttgcga

SEQ ID NO: 1392970 - DNA, 25 bp, Homo sapien
gaagcttaccagtcgggttgccagc

SEQ ID NO: 1392971 - DNA, 25 bp, Homo sapien
aaagcagtggatgcaagacttgccc

SEQ ID NO: 1392972 - DNA, 25 bp, Homo sapien
taacaagcgggtggactagatgcct

SEQ ID NO: 1392973 - DNA, 25 bp, Homo sapien
ctcctggctttaggtgatccaccct

SEQ ID NO: 1392974 - DNA, 25 bp, Homo sapien
tcctggctttaggtgatccaccctc

SEQ ID NO: 1392975 - DNA, 25 bp, Homo sapien
tgtcttcccaaggatctgaactcgg

SEQ ID NO: 1392976 - DNA, 25 bp, Homo sapien
ttttggatacgatggaacctccggc

SEQ ID NO: 1392977 - DNA, 25 bp, Homo sapien
gacataccatgcagcttctaagagg

SEQ ID NO: 1392978 - DNA, 25 bp, Homo sapien
taagaggaccgagtgccttcactgg

SEQ ID NO: 1392979 - DNA, 25 bp, Homo sapien
tggcgcacaggttcgtgtcttcgaa

SEQ ID NO: 1392980 - DNA, 25 bp, Homo sapien
gcgcacaggttcgtgtcttcgaaca

SEQ ID NO: 1392981 - DNA, 25 bp, Homo sapien
cacaggttcgtgtcttcgaacagcc

SEQ ID NO: 1392982 - DNA, 25 bp, Homo sapien
gatggcgcacaggttcgtgtcttcg

SEQ ID NO: 1392983 - DNA, 25 bp, Homo sapien
taagcacagtcttttcccgattggg

SEQ ID NO: 1392984 - DNA, 25 bp, Homo sapien
gccgcagccgtctttataagcacag

SEQ ID NO: 1392985 - DNA, 25 bp, Homo sapien
cccgattgggcggaacaataattga

SEQ ID NO: 1392986 - DNA, 25 bp, Homo sapien
gagaaaaacgagctcctagccccgc

SEQ ID NO: 1392987 - DNA, 25 bp, Homo sapien
cagttggcgaagtttcgcaagcttg

SEQ ID NO: 1392988 - DNA, 25 bp, Homo sapien
ttggcgaagtttcgcaagcttgttt

SEQ ID NO: 1392989 - DNA, 25 bp, Homo sapien
ccctttccttcagggtgaaagtcat

SEQ ID NO: 1392990 - DNA, 25 bp, Homo sapien
gcgaagtttcgcaagcttgtttttc

SEQ ID NO: 1392991 - DNA, 25 bp, Homo sapien
ttccattgcagctttgtcagattgt

SEQ ID NO: 1392992 - DNA, 25 bp, Homo sapien
tccattgcagctttgtcagattgtt

SEQ ID NO: 1392993 - DNA, 25 bp, Homo sapien
gccaaggcagttacgtgctccagat

SEQ ID NO: 1392994 - DNA, 25 bp, Homo sapien
ggacccactcatcgaagagccaagg

SEQ ID NO: 1392995 - DNA, 25 bp, Homo sapien
tattcactactgaggaacgctggac

SEQ ID NO: 1392996 - DNA, 25 bp, Homo sapien
ccaggacgtttggtgcctgcacctg

SEQ ID NO: 1392997 - DNA, 25 bp, Homo sapien
atttgaaaacgtgggtggctctgaa

SEQ ID NO: 1392998 - DNA, 25 bp, Homo sapien
tatttgaaaacgtgggtggctctga

SEQ ID NO: 1392999 - DNA, 25 bp, Homo sapien
ttatttgaaaacgtgggtggctctg

SEQ ID NO: 1393000 - DNA, 25 bp, Homo sapien
ggcccacttgggccggacgtcagcc

SEQ ID NO: 1393001 - DNA, 25 bp, Homo sapien
tgggcccacttgggccggacgtcag

SEQ ID NO: 1393002 - DNA, 25 bp, Homo sapien
gggcccacttgggccggacgtcagc

SEQ ID NO: 1393003 - DNA, 25 bp, Homo sapien
cgtagttgcctttgcgcagcaagcg

SEQ ID NO: 1393004 - DNA, 25 bp, Homo sapien
agtagtcaccgagagaaactcctgc

SEQ ID NO: 1393005 - DNA, 25 bp, Homo sapien
cgatagtagtcaccgagagaaactc

SEQ ID NO: 1393006 - DNA, 25 bp, Homo sapien
cagcgatagtagtcaccgagagaaa

SEQ ID NO: 1393007 - DNA, 25 bp, Homo sapien
gacagcgatagtagtcaccgagaga

SEQ ID NO: 1393008 - DNA, 25 bp, Homo sapien
tcaagcaaattttgtcccgatagcc

SEQ ID NO: 1393009 - DNA, 25 bp, Homo sapien
gatagccaataggatagctcagcca

SEQ ID NO: 1393010 - DNA, 25 bp, Homo sapien
gacagaacggcgattgtccacggag

SEQ ID NO: 1393011 - DNA, 25 bp, Homo sapien
ccacggagcactttgattggctcaa

SEQ ID NO: 1393012 - DNA, 25 bp, Homo sapien
cgacaccggcatctggtgcaaggcc

SEQ ID NO: 1393013 - DNA, 25 bp, Homo sapien
cccgacaccggcatctggtgcaagg

SEQ ID NO: 1393014 - DNA, 25 bp, Homo sapien
tcctcaacgacatcttcgagcgcat

SEQ ID NO: 1393015 - DNA, 25 bp, Homo sapien
gcaaggccatgggcatcatgaactc

SEQ ID NO: 1393016 - DNA, 25 bp, Homo sapien
tgcgaccaagcctcaccatataaac

SEQ ID NO: 1393017 - DNA, 25 bp, Homo sapien
taaactttccttccgcacctgtaga

SEQ ID NO: 1393018 - DNA, 25 bp, Homo sapien
attcctaatagttttgcgaccaagc

SEQ ID NO: 1393019 - DNA, 25 bp, Homo sapien
catataaactttccttccgcacctg

SEQ ID NO: 1393020 - DNA, 25 bp, Homo sapien
tgcacatcacttcccacgataaggg

SEQ ID NO: 1393021 - DNA, 25 bp, Homo sapien
gttttacagagatcacggaggtgct

SEQ ID NO: 1393022 - DNA, 25 bp, Homo sapien
tttactcggtagaaatcaaggctgc

SEQ ID NO: 1393023 - DNA, 25 bp, Homo sapien
tgttaagcatactgcggcgtcctgg

SEQ ID NO: 1393024 - DNA, 25 bp, Homo sapien
ggatctcccttcagtgtcccaacga

SEQ ID NO: 1393025 - DNA, 25 bp, Homo sapien
tcaggccaaccctaagaactgtggg

SEQ ID NO: 1393026 - DNA, 25 bp, Homo sapien
cagtaagaagcaggttcagacagca

SEQ ID NO: 1393027 - DNA, 25 bp, Homo sapien
cgtttctgggaaacacatgtggcag

SEQ ID NO: 1393028 - DNA, 25 bp, Homo sapien
agacgtgaagccaaaaacatcaact

SEQ ID NO: 1393029 - DNA, 25 bp, Homo sapien
cgtgaagccaaaaacatcaactggg

SEQ ID NO: 1393030 - DNA, 25 bp, Homo sapien
ttaaccagacgtgaagccaaaaaca

SEQ ID NO: 1393031 - DNA, 25 bp, Homo sapien
gtgaagccaaaaacatcaactggga

SEQ ID NO: 1393032 - DNA, 25 bp, Homo sapien
aactgaggtggttaaatggccctga

SEQ ID NO: 1393033 - DNA, 25 bp, Homo sapien
taactgaggtggttaaatggccctg

SEQ ID NO: 1393034 - DNA, 25 bp, Homo sapien
actgaggtggttaaatggccctgaa

SEQ ID NO: 1393035 - DNA, 25 bp, Homo sapien
tgaggtggttaaatggccctgaaaa

SEQ ID NO: 1393036 - DNA, 25 bp, Homo sapien
ttggagctggcgtacttggtgaccg

SEQ ID NO: 1393037 - DNA, 25 bp, Homo sapien
gagctggcgtacttggtgaccgcct

SEQ ID NO: 1393038 - DNA, 25 bp, Homo sapien
gctggcgtacttggtgaccgccttg

SEQ ID NO: 1393039 - DNA, 25 bp, Homo sapien
tggagctggcgtacttggtgaccgc

SEQ ID NO: 1393040 - DNA, 25 bp, Homo sapien
ggacgcctctcccgcgatgcgctcg

SEQ ID NO: 1393041 - DNA, 25 bp, Homo sapien
tctaccggaaacgactgtgtactta

SEQ ID NO: 1393042 - DNA, 25 bp, Homo sapien
cccgagaacgcaagcagagcggtag

SEQ ID NO: 1393043 - DNA, 25 bp, Homo sapien
agccggcgcgaactttgcaggctca

SEQ ID NO: 1393044 - DNA, 25 bp, Homo sapien
tgtgtacttacagaggctgtgcgca

SEQ ID NO: 1393045 - DNA, 25 bp, Homo sapien
cagttcccggtagggcgagtgcatc

SEQ ID NO: 1393046 - DNA, 25 bp, Homo sapien
gcacctgtgaactcaaaaggctctt

SEQ ID NO: 1393047 - DNA, 25 bp, Homo sapien
tcatgtctggtcgtggcaagcaagg

SEQ ID NO: 1393048 - DNA, 25 bp, Homo sapien
caaagggcaagtgaggctgacgtcc

SEQ ID NO: 1393049 - DNA, 25 bp, Homo sapien
aatggacagccagcgcgggattttc

SEQ ID NO: 1393050 - DNA, 25 bp, Homo sapien
tgtgcttataaagacggctgcggcg

SEQ ID NO: 1393051 - DNA, 25 bp, Homo sapien
gctatggcccgtactaagcagactg

SEQ ID NO: 1393052 - DNA, 25 bp, Homo sapien
gcccaatcgggaaaagactgtgctt

SEQ ID NO: 1393053 - DNA, 25 bp, Homo sapien
tgttttcgtcggacatgtgggcaga

SEQ ID NO: 1393054 - DNA, 25 bp, Homo sapien
actcggtcctcttagaagctgcatg

SEQ ID NO: 1393055 - DNA, 25 bp, Homo sapien
cagaaggagattcactattccagtg

SEQ ID NO: 1393056 - DNA, 25 bp, Homo sapien
tattccagtgaaggcactcggtcct

SEQ ID NO: 1393057 - DNA, 25 bp, Homo sapien
ggttaaaagcattcactgcagcgat

SEQ ID NO: 1393058 - DNA, 25 bp, Homo sapien
catcacagttgacaggttaaaagca

SEQ ID NO: 1393059 - DNA, 25 bp, Homo sapien
tttcatcacagttgacaggttaaaa

SEQ ID NO: 1393060 - DNA, 25 bp, Homo sapien
cacagttgacaggttaaaagcattc

SEQ ID NO: 1393061 - DNA, 25 bp, Homo sapien
ttaattactaggaaggactctggag

SEQ ID NO: 1393062 - DNA, 25 bp, Homo sapien
gagcaccggaggttaattactagga

SEQ ID NO: 1393063 - DNA, 25 bp, Homo sapien
ttgcatggcagttcagagcaccgga

SEQ ID NO: 1393064 - DNA, 25 bp, Homo sapien
tggcctaccgggcccatgcgattct

SEQ ID NO: 1393065 - DNA, 25 bp, Homo sapien
ccaagtacacaatatcttcacacat

SEQ ID NO: 1393066 - DNA, 25 bp, Homo sapien
caagaatgtttagccccacacgaca

SEQ ID NO: 1393067 - DNA, 25 bp, Homo sapien
tccatttctgtccagaatgtcctcc

SEQ ID NO: 1393068 - DNA, 25 bp, Homo sapien
cattcttcaagattcagccctgtga

SEQ ID NO: 1393069 - DNA, 25 bp, Homo sapien
aaataatcctgtgaaaaaggcagga

SEQ ID NO: 1393070 - DNA, 25 bp, Homo sapien
attctcagtaattggccgggcaccg

SEQ ID NO: 1393071 - DNA, 25 bp, Homo sapien
ttctcagtaattggccgggcaccgt

SEQ ID NO: 1393072 - DNA, 25 bp, Homo sapien
ctggaaatcacaggtcagatttaaa

SEQ ID NO: 1393073 - DNA, 25 bp, Homo sapien
aatgttattcttgccacttcctccc

SEQ ID NO: 1393074 - DNA, 25 bp, Homo sapien
gatattcgaaatagcaatgctggaa

SEQ ID NO: 1393075 - DNA, 25 bp, Homo sapien
acatcttgagcattaaaacctctat

SEQ ID NO: 1393076 - DNA, 25 bp, Homo sapien
tgtactgcctcttactactggactg

SEQ ID NO: 1393077 - DNA, 25 bp, Homo sapien
tcttcgttgtgatggtaagctcctg

SEQ ID NO: 1393078 - DNA, 25 bp, Homo sapien
tttattcagagtccgacacaagccc

SEQ ID NO: 1393079 - DNA, 25 bp, Homo sapien
ccgactggtaagcttctggaaggca

SEQ ID NO: 1393080 - DNA, 25 bp, Homo sapien
gctggtttatcctttgggagctgac

SEQ ID NO: 1393081 - DNA, 25 bp, Homo sapien
tctgaagaccaataaagcaactgct

SEQ ID NO: 1393082 - DNA, 25 bp, Homo sapien
gttttaagcttagttcagtctcaag

SEQ ID NO: 1393083 - DNA, 25 bp, Homo sapien
gtgtttgcagccacatctgaagacc

SEQ ID NO: 1393084 - DNA, 25 bp, Homo sapien
aactaaaagacagttatctcatagg

SEQ ID NO: 1393085 - DNA, 25 bp, Homo sapien
gttgctttcagatcatatcgttggt

SEQ ID NO: 1393086 - DNA, 25 bp, Homo sapien
tttgtatccttgcaatgccacaact

SEQ ID NO: 1393087 - DNA, 25 bp, Homo sapien
cactcttacagaaggatcactttaa

SEQ ID NO: 1393088 - DNA, 25 bp, Homo sapien
agtccacccgcttgttatgtagagg

SEQ ID NO: 1393089 - DNA, 25 bp, Homo sapien
tatactgcaccagaagagcaagccg

SEQ ID NO: 1393090 - DNA, 25 bp, Homo sapien
gaactctaagccgatcaggtgggaa

SEQ ID NO: 1393091 - DNA, 25 bp, Homo sapien
tgatcgcaaagactgacgtggccct

SEQ ID NO: 1393092 - DNA, 25 bp, Homo sapien
tcctcagatgagcaagtggtcggcc

SEQ ID NO: 1393093 - DNA, 25 bp, Homo sapien
catcgttactgttgcactttacgca

SEQ ID NO: 1393094 - DNA, 25 bp, Homo sapien
tttacgcagtcaagtgtccaactcc

SEQ ID NO: 1393095 - DNA, 25 bp, Homo sapien
tcgaaacgtgcaaagctggagcggc

SEQ ID NO: 1393096 - DNA, 25 bp, Homo sapien
ctagacgccgaatggcaggcttggt

SEQ ID NO: 1393097 - DNA, 25 bp, Homo sapien
taaatgaggccagagatccgcttaa

SEQ ID NO: 1393098 - DNA, 25 bp, Homo sapien
tgtctctcaagaccttgcggtggcg

SEQ ID NO: 1393099 - DNA, 25 bp, Homo sapien
tgctcggtgtaggtgactgcgtccc

SEQ ID NO: 1393100 - DNA, 25 bp, Homo sapien
tagacagcttctgtcaaggcgagca

SEQ ID NO: 1393101 - DNA, 25 bp, Homo sapien
ccgctggagcccgatagacagcttc

SEQ ID NO: 1393102 - DNA, 25 bp, Homo sapien
ccgatagacagcttctgtcaaggcg

SEQ ID NO: 1393103 - DNA, 25 bp, Homo sapien
tggagcccgatagacagcttctgtc

SEQ ID NO: 1393104 - DNA, 25 bp, Homo sapien
agcgcgccagcgcaggatttaatcc

SEQ ID NO: 1393105 - DNA, 25 bp, Homo sapien
tgaggacgcccggaaggcattgcac

SEQ ID NO: 1393106 - DNA, 25 bp, Homo sapien
tgcactgaggctaagggaaaggtct

SEQ ID NO: 1393107 - DNA, 25 bp, Homo sapien
gggcttccggattctgtagtggctt

SEQ ID NO: 1393108 - DNA, 25 bp, Homo sapien
tcagcgaatcccaacacactgtcgg

SEQ ID NO: 1393109 - DNA, 25 bp, Homo sapien
aagctttctcatggacgtcagcgaa

SEQ ID NO: 1393110 - DNA, 25 bp, Homo sapien
tctgttttgttggaccgagccactg

SEQ ID NO: 1393111 - DNA, 25 bp, Homo sapien
gagggagcaggttcgccataattcc

SEQ ID NO: 1393112 - DNA, 25 bp, Homo sapien
gttctccctcggtagaactgagagg

SEQ ID NO: 1393113 - DNA, 25 bp, Homo sapien
atttgcacataactatgcacatcct

SEQ ID NO: 1393114 - DNA, 25 bp, Homo sapien
tcaagtctctcatagaaagtggcgt

SEQ ID NO: 1393115 - DNA, 25 bp, Homo sapien
tctctaaattacttcgtaacaccta

SEQ ID NO: 1393116 - DNA, 25 bp, Homo sapien
cattgaacggttccactgcgcatca

SEQ ID NO: 1393117 - DNA, 25 bp, Homo sapien
gactctttagtaactctggccgaat

SEQ ID NO: 1393118 - DNA, 25 bp, Homo sapien
tccccgcataaagctggttctcctg

SEQ ID NO: 1393119 - DNA, 25 bp, Homo sapien
taatctccagggtgtgactcacggg

SEQ ID NO: 1393120 - DNA, 25 bp, Homo sapien
gggtttccgatactgacacagacaa

SEQ ID NO: 1393121 - DNA, 25 bp, Homo sapien
cacactgggtgaggaaacgataggc

SEQ ID NO: 1393122 - DNA, 25 bp, Homo sapien
tagtaacagctttgacaccttttgg

SEQ ID NO: 1393123 - DNA, 25 bp, Homo sapien
tcatttcaggtacacagagttccgc

SEQ ID NO: 1393124 - DNA, 25 bp, Homo sapien
catgaaagtggtattgttacttaga

SEQ ID NO: 1393125 - DNA, 25 bp, Homo sapien
tgatgatgtcctcagctaagtcagt

SEQ ID NO: 1393126 - DNA, 25 bp, Homo sapien
aattgatgatgtcctcagctaagtc

SEQ ID NO: 1393127 - DNA, 25 bp, Homo sapien
acttagggtcctttgatcagaattg

SEQ ID NO: 1393128 - DNA, 25 bp, Homo sapien
ttggacagctggcagactgtggcct

SEQ ID NO: 1393129 - DNA, 25 bp, Homo sapien
agcctgaatggttggacagctggca

SEQ ID NO: 1393130 - DNA, 25 bp, Homo sapien
aagcctgaatggttggacagctggc

SEQ ID NO: 1393131 - DNA, 25 bp, Homo sapien
cgcgcccggcctacaacttacagtt

SEQ ID NO: 1393132 - DNA, 25 bp, Homo sapien
ttaaaactggctagagaaaactaca

SEQ ID NO: 1393133 - DNA, 25 bp, Homo sapien
tacagtttttaaaactggctagaga

SEQ ID NO: 1393134 - DNA, 25 bp, Homo sapien
tacaaagaagaaagttaaaatcatc

SEQ ID NO: 1393135 - DNA, 25 bp, Homo sapien
tatgcacatacaacctgtctgtctt

SEQ ID NO: 1393136 - DNA, 25 bp, Homo sapien
gtgtatgcacatacaacctgtctgt

SEQ ID NO: 1393137 - DNA, 25 bp, Homo sapien
caacctgtctgtctttgtgaggagg

SEQ ID NO: 1393138 - DNA, 25 bp, Homo sapien
tacaacctgtctgtctttgtgagga

SEQ ID NO: 1393139 - DNA, 25 bp, Homo sapien
tggtggcttataaatagtcatcccc

SEQ ID NO: 1393140 - DNA, 25 bp, Homo sapien
gaggcacccacgcttttctacagac

SEQ ID NO: 1393141 - DNA, 25 bp, Homo sapien
taacagactatttcagccccagtgc

SEQ ID NO: 1393142 - DNA, 25 bp, Homo sapien
ttaacagtggccttgtaacagacta

SEQ ID NO: 1393143 - DNA, 25 bp, Homo sapien
tgtcgcccaatcaggacaaggctgg

SEQ ID NO: 1393144 - DNA, 25 bp, Homo sapien
tgcgcggccttcgtccaaaatacac

SEQ ID NO: 1393145 - DNA, 25 bp, Homo sapien
tatctacatggtaagtgcctcgcag

SEQ ID NO: 1393146 - DNA, 25 bp, Homo sapien
taattgagaaccgactcctgggaag

SEQ ID NO: 1393147 - DNA, 25 bp, Homo sapien
tggatctcgcgggatgtgatggtgg

SEQ ID NO: 1393148 - DNA, 25 bp, Homo sapien
ggccgtctggatctcgcgggatgtg

SEQ ID NO: 1393149 - DNA, 25 bp, Homo sapien
ggatctcgcgggatgtgatggtgga

SEQ ID NO: 1393150 - DNA, 25 bp, Homo sapien
ccgtctggatctcgcgggatgtgat

SEQ ID NO: 1393151 - DNA, 25 bp, Homo sapien
cacagtacaaacgcggcttagccaa

SEQ ID NO: 1393152 - DNA, 25 bp, Homo sapien
gacacagtacaaacgcggcttagcc

SEQ ID NO: 1393153 - DNA, 25 bp, Homo sapien
acacagtacaaacgcggcttagcca

SEQ ID NO: 1393154 - DNA, 25 bp, Homo sapien
gcgcgcccgtctacatggcggcggt

SEQ ID NO: 1393155 - DNA, 25 bp, Homo sapien
catgtctggtcgtggcaaacaagga

SEQ ID NO: 1393156 - DNA, 25 bp, Homo sapien
tcccggtagggcgagtgcaccgctt

SEQ ID NO: 1393157 - DNA, 25 bp, Homo sapien
atggcggcggtcctcgagtacctga

SEQ ID NO: 1393158 - DNA, 25 bp, Homo sapien
ggtgaatgagtatggtgtcaagcct

SEQ ID NO: 1393159 - DNA, 25 bp, Homo sapien
ctttggggtgaatgagtatggtgtc

SEQ ID NO: 1393160 - DNA, 25 bp, Homo sapien
agcctttggggtgaatgagtatggt

SEQ ID NO: 1393161 - DNA, 25 bp, Homo sapien
tgaatgagtatggtgtcaagcctct

SEQ ID NO: 1393162 - DNA, 25 bp, Homo sapien
tttcttgggcaacaggacagcctgg

SEQ ID NO: 1393163 - DNA, 25 bp, Homo sapien
ttgccaggcttgtgactctccgttt

SEQ ID NO: 1393164 - DNA, 25 bp, Homo sapien
tgagctcttcgtcattcctcacggc

SEQ ID NO: 1393165 - DNA, 25 bp, Homo sapien
tcctcacggctagttgcagatggcg

SEQ ID NO: 1393166 - DNA, 25 bp, Homo sapien
ggacgagcgcgacttggccttagcg

SEQ ID NO: 1393167 - DNA, 25 bp, Homo sapien
cctccctgctttccgcgtcctgaca

SEQ ID NO: 1393168 - DNA, 25 bp, Homo sapien
gcgggccttgcctccctgctttccg

SEQ ID NO: 1393169 - DNA, 25 bp, Homo sapien
agaccagcgcgggacgagcgcgact

SEQ ID NO: 1393170 - DNA, 25 bp, Homo sapien
tacggctaaaattgcagttacagct

SEQ ID NO: 1393171 - DNA, 25 bp, Homo sapien
acggctaaaattgcagttacagctt

SEQ ID NO: 1393172 - DNA, 25 bp, Homo sapien
ctcgccgacttttcttatcctgctc

SEQ ID NO: 1393173 - DNA, 25 bp, Homo sapien
tcgccgacttttcttatcctgctcc

SEQ ID NO: 1393174 - DNA, 25 bp, Homo sapien
tttcaactggttggatgggacccac

SEQ ID NO: 1393175 - DNA, 25 bp, Homo sapien
gtctaagacccagatggagccagtg

SEQ ID NO: 1393176 - DNA, 25 bp, Homo sapien
tctcttactccggagtgggtcagtc

SEQ ID NO: 1393177 - DNA, 25 bp, Homo sapien
tccccaagatcttcagggtaagttg

SEQ ID NO: 1393178 - DNA, 25 bp, Homo sapien
ttgttagtcttcagtgctctgttgt

SEQ ID NO: 1393179 - DNA, 25 bp, Homo sapien
gctctgttgtctccttgaaaacagg

SEQ ID NO: 1393180 - DNA, 25 bp, Homo sapien
tctgttgtctccttgaaaacagggc

SEQ ID NO: 1393181 - DNA, 25 bp, Homo sapien
gtgctctgttgtctccttgaaaaca

SEQ ID NO: 1393182 - DNA, 25 bp, Homo sapien
tacaacacgtcacagctacagtggg

SEQ ID NO: 1393183 - DNA, 25 bp, Homo sapien
tgcatccgctgaaattacccttggc

SEQ ID NO: 1393184 - DNA, 25 bp, Homo sapien
gaagcctattctggaacccctggaa

SEQ ID NO: 1393185 - DNA, 25 bp, Homo sapien
tcaaaactgggatgaaggagccttc

SEQ ID NO: 1393186 - DNA, 25 bp, Homo sapien
gattcccacgaaggatgtgaagatg

SEQ ID NO: 1393187 - DNA, 25 bp, Homo sapien
tgcccccgggtctcaggcagcttca

SEQ ID NO: 1393188 - DNA, 25 bp, Homo sapien
cttggtgattcccacgaaggatgtg

SEQ ID NO: 1393189 - DNA, 25 bp, Homo sapien
cccacgaaggatgtgaagatgctga

SEQ ID NO: 1393190 - DNA, 25 bp, Homo sapien
gccaaagctaccagattttagagga

SEQ ID NO: 1393191 - DNA, 25 bp, Homo sapien
aatggaaatgtatatcctctcaccc

SEQ ID NO: 1393192 - DNA, 25 bp, Homo sapien
tatatcctctcacccctaaggatgc

SEQ ID NO: 1393193 - DNA, 25 bp, Homo sapien
gtgcccggccaaagctaccagattt

SEQ ID NO: 1393194 - DNA, 25 bp, Homo sapien
agacacaggacatcacgctggagcc

SEQ ID NO: 1393195 - DNA, 25 bp, Homo sapien
gagttcaacagtcaacacgtccagc

SEQ ID NO: 1393196 - DNA, 25 bp, Homo sapien
gagcagagcgatcatggccgactca

SEQ ID NO: 1393197 - DNA, 25 bp, Homo sapien
cattccaggatgcaatgctgacccc

SEQ ID NO: 1393198 - DNA, 25 bp, Homo sapien
gagaagcttctgtgccagtccccac

SEQ ID NO: 1393199 - DNA, 25 bp, Homo sapien
tcctttacccccagagaagcttctg

SEQ ID NO: 1393200 - DNA, 25 bp, Homo sapien
cccagagaagcttctgtgccagtcc

SEQ ID NO: 1393201 - DNA, 25 bp, Homo sapien
cagagaagcttctgtgccagtcccc

SEQ ID NO: 1393202 - DNA, 25 bp, Homo sapien
cagacggctgttcacaaacttgtac

SEQ ID NO: 1393203 - DNA, 25 bp, Homo sapien
agtataccatgtaggcaccttcgcc

SEQ ID NO: 1393204 - DNA, 25 bp, Homo sapien
tctgagcctgccgatcttgtccatg

SEQ ID NO: 1393205 - DNA, 25 bp, Homo sapien
ggcagacacgatattcccaggaagc

SEQ ID NO: 1393206 - DNA, 25 bp, Homo sapien
ctataagcagtagcgatgccgtgga

SEQ ID NO: 1393207 - DNA, 25 bp, Homo sapien
caccatgggaactagggatctttag

SEQ ID NO: 1393208 - DNA, 25 bp, Homo sapien
tcctgcaacatggaaaaagctcgcc

SEQ ID NO: 1393209 - DNA, 25 bp, Homo sapien
tacggcttatggctcagggctctgc

SEQ ID NO: 1393210 - DNA, 25 bp, Homo sapien
gggaatcctcaaaggacactgactt

SEQ ID NO: 1393211 - DNA, 25 bp, Homo sapien
gtgttatagaacacagtgttgatga

SEQ ID NO: 1393212 - DNA, 25 bp, Homo sapien
tgcggaaaaacgtgttgctggatgt

SEQ ID NO: 1393213 - DNA, 25 bp, Homo sapien
tgttgatgaatgtgcagttgcggaa

SEQ ID NO: 1393214 - DNA, 25 bp, Homo sapien
taaaagttacatgctctacgcgctc

SEQ ID NO: 1393215 - DNA, 25 bp, Homo sapien
tgtcaggaaaccagacggtcaggcc

SEQ ID NO: 1393216 - DNA, 25 bp, Homo sapien
actttggtgcgggatgcgtagtcca

SEQ ID NO: 1393217 - DNA, 25 bp, Homo sapien
ttgtcattgaagtactgcccgcctc

SEQ ID NO: 1393218 - DNA, 25 bp, Homo sapien
cgatattcgggaccaaaacaggaga

SEQ ID NO: 1393219 - DNA, 25 bp, Homo sapien
gatgcgccgatattcgggaccaaaa

SEQ ID NO: 1393220 - DNA, 25 bp, Homo sapien
catcagagtgatgcgccgatattcg

SEQ ID NO: 1393221 - DNA, 25 bp, Homo sapien
cccatcatcatcagagtgatgcgcc

SEQ ID NO: 1393222 - DNA, 25 bp, Homo sapien
tgtccgactggatctcaatcaattc

SEQ ID NO: 1393223 - DNA, 25 bp, Homo sapien
aattcatcctcctgatgaatcgtct

SEQ ID NO: 1393224 - DNA, 25 bp, Homo sapien
cctgtgtccgactggatctcaatca

SEQ ID NO: 1393225 - DNA, 25 bp, Homo sapien
gatgaatcgtcttaatgtgggttac

SEQ ID NO: 1393226 - DNA, 25 bp, Homo sapien
tgagaacactcgctcaggatgtcct

SEQ ID NO: 1393227 - DNA, 25 bp, Homo sapien
tcctttggctcgcatgttggtatca

SEQ ID NO: 1393228 - DNA, 25 bp, Homo sapien
ctcaggatgtcctttggctcgcatg

SEQ ID NO: 1393229 - DNA, 25 bp, Homo sapien
gagaacactcgctcaggatgtcctt

SEQ ID NO: 1393230 - DNA, 25 bp, Homo sapien
aggaaaggcgcagacgaggacgaag

SEQ ID NO: 1393231 - DNA, 25 bp, Homo sapien
gggctctcaggctgcgtggtcagag

SEQ ID NO: 1393232 - DNA, 25 bp, Homo sapien
cagctgtggaactggtaggcagaac

SEQ ID NO: 1393233 - DNA, 25 bp, Homo sapien
cgaggacgaagaccctccagctgtg

SEQ ID NO: 1393234 - DNA, 25 bp, Homo sapien
ctggggtggatttccgggggctgct

SEQ ID NO: 1393235 - DNA, 25 bp, Homo sapien
tcctgggccagaaactcggagaaat

SEQ ID NO: 1393236 - DNA, 25 bp, Homo sapien
gacaatggggatggaccctccaatc

SEQ ID NO: 1393237 - DNA, 25 bp, Homo sapien
ccagctcaaatgctcccctcgtttc

SEQ ID NO: 1393238 - DNA, 25 bp, Homo sapien
atagcagctgcgtacacgccaccaa

SEQ ID NO: 1393239 - DNA, 25 bp, Homo sapien
aaggcgaagacgctgttgactgaga

SEQ ID NO: 1393240 - DNA, 25 bp, Homo sapien
tgagagcgagatgagcagacactgc

SEQ ID NO: 1393241 - DNA, 25 bp, Homo sapien
caaccccagaaagtaggcggcagaa

SEQ ID NO: 1393242 - DNA, 25 bp, Homo sapien
gaggaaagtgccgtaaccctggaca

SEQ ID NO: 1393243 - DNA, 25 bp, Homo sapien
ggtaataaccatcactgggagcagg

SEQ ID NO: 1393244 - DNA, 25 bp, Homo sapien
tcaaagcgggagtacgatcttcggg

SEQ ID NO: 1393245 - DNA, 25 bp, Homo sapien
cctttgttggagtcggacaggcaca

SEQ ID NO: 1393246 - DNA, 25 bp, Homo sapien
cacactcccgtaggatggcttcata

SEQ ID NO: 1393247 - DNA, 25 bp, Homo sapien
ccaggataactcaggaagggtcgcc

SEQ ID NO: 1393248 - DNA, 25 bp, Homo sapien
tagccaatgagtgcctaggaaggaa

SEQ ID NO: 1393249 - DNA, 25 bp, Homo sapien
gagaggagctttgacctatacccag

SEQ ID NO: 1393250 - DNA, 25 bp, Homo sapien
aaaaagagcaaacaggtcctagcca

SEQ ID NO: 1393251 - DNA, 25 bp, Homo sapien
ctcccggcaccagggaagcggcaat

SEQ ID NO: 1393252 - DNA, 25 bp, Homo sapien
ccggcaccagggaagcggcaatgca

SEQ ID NO: 1393253 - DNA, 25 bp, Homo sapien
agggaagcggcaatgcagacctgcc

SEQ ID NO: 1393254 - DNA, 25 bp, Homo sapien
ccagggaagcggcaatgcagacctg

SEQ ID NO: 1393255 - DNA, 25 bp, Homo sapien
gataagctctacgtaaggaaacaat

SEQ ID NO: 1393256 - DNA, 25 bp, Homo sapien
gaagataagctctacgtaaggaaac

SEQ ID NO: 1393257 - DNA, 25 bp, Homo sapien
agaagataagctctacgtaaggaaa

SEQ ID NO: 1393258 - DNA, 25 bp, Homo sapien
agctctacgtaaggaaacaattact

SEQ ID NO: 1393259 - DNA, 25 bp, Homo sapien
gagaaaagttactgttgtcaaggaa

SEQ ID NO: 1393260 - DNA, 25 bp, Homo sapien
ttaaaatgtggagtaagcacccttg

SEQ ID NO: 1393261 - DNA, 25 bp, Homo sapien
aatgtggagtaagcacccttgctcc

SEQ ID NO: 1393262 - DNA, 25 bp, Homo sapien
ggagtaagcacccttgctcctactc

SEQ ID NO: 1393263 - DNA, 25 bp, Homo sapien
gctacagcatctctgattggtccaa

SEQ ID NO: 1393264 - DNA, 25 bp, Homo sapien
gcaaaatactcaggaccaacataaa

SEQ ID NO: 1393265 - DNA, 25 bp, Homo sapien
gcatttgcaaaatactcaggaccaa

SEQ ID NO: 1393266 - DNA, 25 bp, Homo sapien
tttgcaaaatactcaggaccaacat

SEQ ID NO: 1393267 - DNA, 25 bp, Homo sapien
gagaggcccccgctggtagccatag

SEQ ID NO: 1393268 - DNA, 25 bp, Homo sapien
agaggcccccgctggtagccatagg

SEQ ID NO: 1393269 - DNA, 25 bp, Homo sapien
cgaagtgggcctcgagggggaactg

SEQ ID NO: 1393270 - DNA, 25 bp, Homo sapien
actgagggagagggcctcgaagtgg

SEQ ID NO: 1393271 - DNA, 25 bp, Homo sapien
gtgtgcaagctgcatctgagacatc

SEQ ID NO: 1393272 - DNA, 25 bp, Homo sapien
gatgaggcattccaggtggtggtcg

SEQ ID NO: 1393273 - DNA, 25 bp, Homo sapien
catgggagatccgaatggaggccct

SEQ ID NO: 1393274 - DNA, 25 bp, Homo sapien
gatgtcctaagccatgagggccatg

SEQ ID NO: 1393275 - DNA, 25 bp, Homo sapien
ccagatcataaagagctgtgaatgc

SEQ ID NO: 1393276 - DNA, 25 bp, Homo sapien
cagttaactcagtaatcaggagcaa

SEQ ID NO: 1393277 - DNA, 25 bp, Homo sapien
cagaaagattaccatgtgcaagtca

SEQ ID NO: 1393278 - DNA, 25 bp, Homo sapien
ggaattctgagcaagtgtgtgcaca

SEQ ID NO: 1393279 - DNA, 25 bp, Homo sapien
tgggaatgggtgaggatgtgagtgt

SEQ ID NO: 1393280 - DNA, 25 bp, Homo sapien
gggtgaggatgtgagtgtccatgac

SEQ ID NO: 1393281 - DNA, 25 bp, Homo sapien
gaatgggtgaggatgtgagtgtcca

SEQ ID NO: 1393282 - DNA, 25 bp, Homo sapien
gtgaggatgtgagtgtccatgacca

SEQ ID NO: 1393283 - DNA, 25 bp, Homo sapien
gctgccagaagtcgttcggctgctg

SEQ ID NO: 1393284 - DNA, 25 bp, Homo sapien
gaagtcgttcggctgctgagccatg

SEQ ID NO: 1393285 - DNA, 25 bp, Homo sapien
ccagaagtcgttcggctgctgagcc

SEQ ID NO: 1393286 - DNA, 25 bp, Homo sapien
tgccagaagtcgttcggctgctgag

SEQ ID NO: 1393287 - DNA, 25 bp, Homo sapien
gcatgtgggtgttgactactggtcc

SEQ ID NO: 1393288 - DNA, 25 bp, Homo sapien
ctggccagtgactctatcctttggc

SEQ ID NO: 1393289 - DNA, 25 bp, Homo sapien
gtgttgactactggtccagcctgga

SEQ ID NO: 1393290 - DNA, 25 bp, Homo sapien
tgactctatcctttggcatgtgggt

SEQ ID NO: 1393291 - DNA, 25 bp, Homo sapien
gtgagagtgtaacgggaaggaagga

SEQ ID NO: 1393292 - DNA, 25 bp, Homo sapien
gagcaagcgtgagagtgtaacggga

SEQ ID NO: 1393293 - DNA, 25 bp, Homo sapien
caagcgtgagagtgtaacgggaagg

SEQ ID NO: 1393294 - DNA, 25 bp, Homo sapien
cgtgagagtgtaacgggaaggaagg

SEQ ID NO: 1393295 - DNA, 25 bp, Homo sapien
cactgctggctgtagtcggggcctc

SEQ ID NO: 1393296 - DNA, 25 bp, Homo sapien
gtagtcggggcctcctagccacgct

SEQ ID NO: 1393297 - DNA, 25 bp, Homo sapien
gctgagcccattccagactttcccc

SEQ ID NO: 1393298 - DNA, 25 bp, Homo sapien
gcctcctagccacgctgagcccatt

SEQ ID NO: 1393299 - DNA, 25 bp, Homo sapien
tgattccgctcggagatcggcccgg

SEQ ID NO: 1393300 - DNA, 25 bp, Homo sapien
ttccgctcggagatcggcccggcag

SEQ ID NO: 1393301 - DNA, 25 bp, Homo sapien
cctgattccgctcggagatcggccc

SEQ ID NO: 1393302 - DNA, 25 bp, Homo sapien
attccgctcggagatcggcccggca

SEQ ID NO: 1393303 - DNA, 25 bp, Homo sapien
ggcgaaagagatcccgccgtctccc

SEQ ID NO: 1393304 - DNA, 25 bp, Homo sapien
gccttctgacctcagcacgacttcc

SEQ ID NO: 1393305 - DNA, 25 bp, Homo sapien
tcccagcagcggttccgccttctga

SEQ ID NO: 1393306 - DNA, 25 bp, Homo sapien
ggcgaagacggacgtagcggtgggc

SEQ ID NO: 1393307 - DNA, 25 bp, Homo sapien
ggtcgggcggtagagtcctcggctc

SEQ ID NO: 1393308 - DNA, 25 bp, Homo sapien
tcggctcgcgtcctgaggtgccgct

SEQ ID NO: 1393309 - DNA, 25 bp, Homo sapien
ctgggtcgggcggtagagtcctcgg

SEQ ID NO: 1393310 - DNA, 25 bp, Homo sapien
gcggtagagtcctcggctcgcgtcc

SEQ ID NO: 1393311 - DNA, 25 bp, Homo sapien
taatgcactgctagacttgaaagaa

SEQ ID NO: 1393312 - DNA, 25 bp, Homo sapien
cggaaacgctcaggccctcttaatg

SEQ ID NO: 1393313 - DNA, 25 bp, Homo sapien
caggccctcttaatgcactgctaga

SEQ ID NO: 1393314 - DNA, 25 bp, Homo sapien
gcggaacggaaacgctcaggccctc

SEQ ID NO: 1393315 - DNA, 25 bp, Homo sapien
tgcagccttcttgcagatttggcct

SEQ ID NO: 1393316 - DNA, 25 bp, Homo sapien
gaaggatgtgctgaagagttccccc

SEQ ID NO: 1393317 - DNA, 25 bp, Homo sapien
tctgagcttagagtgacgtctgcgc

SEQ ID NO: 1393318 - DNA, 25 bp, Homo sapien
gatttggcctcacaaccctgatttg

SEQ ID NO: 1393319 - DNA, 25 bp, Homo sapien
tctggatctctagaacactctggcc

SEQ ID NO: 1393320 - DNA, 25 bp, Homo sapien
gcaataatatggtggatgccttcct

SEQ ID NO: 1393321 - DNA, 25 bp, Homo sapien
tgctccgcgttggtgtgtgaccaca

SEQ ID NO: 1393322 - DNA, 25 bp, Homo sapien
catctgcctctaaatgggagacaca

SEQ ID NO: 1393323 - DNA, 25 bp, Homo sapien
tgttgggactgatgaacagcatctc

SEQ ID NO: 1393324 - DNA, 25 bp, Homo sapien
caaggcgaggtgagaatgcgatttc

SEQ ID NO: 1393325 - DNA, 25 bp, Homo sapien
taaatactatgctttaatgagcccc

SEQ ID NO: 1393326 - DNA, 25 bp, Homo sapien
cgatttctaggccatcttgttggga

SEQ ID NO: 1393327 - DNA, 25 bp, Homo sapien
acatctggttatccagaagggatgg

SEQ ID NO: 1393328 - DNA, 25 bp, Homo sapien
ttaacatctggttatccagaaggga

SEQ ID NO: 1393329 - DNA, 25 bp, Homo sapien
gttatccagaagggatgggattggc

SEQ ID NO: 1393330 - DNA, 25 bp, Homo sapien
ggttatccagaagggatgggattgg

SEQ ID NO: 1393331 - DNA, 25 bp, Homo sapien
aaaaaaccgatcaatttctggattg

SEQ ID NO: 1393332 - DNA, 25 bp, Homo sapien
tcttaatccttcaaatgacaagaag

SEQ ID NO: 1393333 - DNA, 25 bp, Homo sapien
ttggagcagttaacaccactatctg

SEQ ID NO: 1393334 - DNA, 25 bp, Homo sapien
gaaactaagcaagacaagagttgga

SEQ ID NO: 1393335 - DNA, 25 bp, Homo sapien
gattgagaatggtatgtggatctct

SEQ ID NO: 1393336 - DNA, 25 bp, Homo sapien
tccgtaataactcctgaagatggga

SEQ ID NO: 1393337 - DNA, 25 bp, Homo sapien
cttttcttggagtgatcctcaggag

SEQ ID NO: 1393338 - DNA, 25 bp, Homo sapien
gagaatgccagcaatttcagtggga

SEQ ID NO: 1393339 - DNA, 25 bp, Homo sapien
agaatactgttgtagctctggcccc

SEQ ID NO: 1393340 - DNA, 25 bp, Homo sapien
aatctaagccacaagcactttcccg

SEQ ID NO: 1393341 - DNA, 25 bp, Homo sapien
tggttcagcagagtcaagtcccttg

SEQ ID NO: 1393342 - DNA, 25 bp, Homo sapien
gtttcccctttcagctatgccctaa

SEQ ID NO: 1393343 - DNA, 25 bp, Homo sapien
tccccaatgtgaggggagaccccat

SEQ ID NO: 1393344 - DNA, 25 bp, Homo sapien
gaggggagaccccattcctggtcag

SEQ ID NO: 1393345 - DNA, 25 bp, Homo sapien
cctgatctggggtcccagataccca

SEQ ID NO: 1393346 - DNA, 25 bp, Homo sapien
cctcaggtagcagcgtctccagagc

SEQ ID NO: 1393347 - DNA, 25 bp, Homo sapien
gactgtcccgccaaggacagagctg

SEQ ID NO: 1393348 - DNA, 25 bp, Homo sapien
tcagaggagatagcaggtcgaggga

SEQ ID NO: 1393349 - DNA, 25 bp, Homo sapien
gggagccaacgagaagagactgcca

SEQ ID NO: 1393350 - DNA, 25 bp, Homo sapien
gggaaggactgtcccgccaaggaca

SEQ ID NO: 1393351 - DNA, 25 bp, Homo sapien
ggggtccaggaaccatgaagcttgg

SEQ ID NO: 1393352 - DNA, 25 bp, Homo sapien
tagcatgagcctgtgggaacgtcaa

SEQ ID NO: 1393353 - DNA, 25 bp, Homo sapien
cattaggcttcaactaggcctcggg

SEQ ID NO: 1393354 - DNA, 25 bp, Homo sapien
gacacccagggactataagtgacag

SEQ ID NO: 1393355 - DNA, 25 bp, Homo sapien
caccttatgtgtgcacgagacagga

SEQ ID NO: 1393356 - DNA, 25 bp, Homo sapien
cagctgcaggttaaaagagttccca

SEQ ID NO: 1393357 - DNA, 25 bp, Homo sapien
ctataacgtaaatcccagtcccaga

SEQ ID NO: 1393358 - DNA, 25 bp, Homo sapien
gattctggaattgtagtatctgtgc

SEQ ID NO: 1393359 - DNA, 25 bp, Homo sapien
tgttctgggtcatagccaggattct

SEQ ID NO: 1393360 - DNA, 25 bp, Homo sapien
gggcaaaagtctcgtcctgaaaatg

SEQ ID NO: 1393361 - DNA, 25 bp, Homo sapien
cttattctaggaaagatgtagggca

SEQ ID NO: 1393362 - DNA, 25 bp, Homo sapien
cccacatctagagacaaatcatgag

SEQ ID NO: 1393363 - DNA, 25 bp, Homo sapien
tcaagaccaaacttcagagagtaca

SEQ ID NO: 1393364 - DNA, 25 bp, Homo sapien
tcaggaaggtaagggtgtcaggaac

SEQ ID NO: 1393365 - DNA, 25 bp, Homo sapien
ggtaagggtgtcaggaaccctgaca

SEQ ID NO: 1393366 - DNA, 25 bp, Homo sapien
gaattcaaaatcagctggaaactgc

SEQ ID NO: 1393367 - DNA, 25 bp, Homo sapien
tgccagacacaatcaaggaagagga

SEQ ID NO: 1393368 - DNA, 25 bp, Homo sapien
tcagctggaaactgctggaggagct

SEQ ID NO: 1393369 - DNA, 25 bp, Homo sapien
ctgtcatgaagagcaagaaggaaaa

SEQ ID NO: 1393370 - DNA, 25 bp, Homo sapien
gaaaatctgaattgagggtagcagg

SEQ ID NO: 1393371 - DNA, 25 bp, Homo sapien
catcaggatcttcgtcccagcctaa

SEQ ID NO: 1393372 - DNA, 25 bp, Homo sapien
gcttgtaaggcctcactcatcagga

SEQ ID NO: 1393373 - DNA, 25 bp, Homo sapien
ccggattcacctccaatggattata

SEQ ID NO: 1393374 - DNA, 25 bp, Homo sapien
gcccccgatgccatcccgaatcatt

SEQ ID NO: 1393375 - DNA, 25 bp, Homo sapien
ccttagtaatatgcccccgatgcca

SEQ ID NO: 1393376 - DNA, 25 bp, Homo sapien
cgatgccatcccgaatcattctcac

SEQ ID NO: 1393377 - DNA, 25 bp, Homo sapien
ttccttagtaatatgcccccgatgc

SEQ ID NO: 1393378 - DNA, 25 bp, Homo sapien
agtcaggaagggatgtccagctgcc

SEQ ID NO: 1393379 - DNA, 25 bp, Homo sapien
ctgtactagtgattggaagccaaac

SEQ ID NO: 1393380 - DNA, 25 bp, Homo sapien
agccaaacagtgttcgggcttcggg

SEQ ID NO: 1393381 - DNA, 25 bp, Homo sapien
cagttcccccaagccgagtcaggaa

SEQ ID NO: 1393382 - DNA, 25 bp, Homo sapien
ggccattgagatcacgatcaccgcg

SEQ ID NO: 1393383 - DNA, 25 bp, Homo sapien
gaggaggccattgagatcacgatca

SEQ ID NO: 1393384 - DNA, 25 bp, Homo sapien
ccattgagatcacgatcaccgcgct

SEQ ID NO: 1393385 - DNA, 25 bp, Homo sapien
ggaggccattgagatcacgatcacc

SEQ ID NO: 1393386 - DNA, 25 bp, Homo sapien
gagaaatacggcaaggagaagtgag

SEQ ID NO: 1393387 - DNA, 25 bp, Homo sapien
ggaggattgagaaagcacatagaag

SEQ ID NO: 1393388 - DNA, 25 bp, Homo sapien
agaggggtccaagaaactagggcag

SEQ ID NO: 1393389 - DNA, 25 bp, Homo sapien
gatgtcactaatactgaaatgtcac

SEQ ID NO: 1393390 - DNA, 25 bp, Homo sapien
cttgaagtattacagaacgaaccct

SEQ ID NO: 1393391 - DNA, 25 bp, Homo sapien
gtcactggcctttcgaagacaagcc

SEQ ID NO: 1393392 - DNA, 25 bp, Homo sapien
aatgtcactggcctttcgaagacaa

SEQ ID NO: 1393393 - DNA, 25 bp, Homo sapien
ctgacatagtccagccatcgtgttc

SEQ ID NO: 1393394 - DNA, 25 bp, Homo sapien
agggctgaaagccatttatcctcag

SEQ ID NO: 1393395 - DNA, 25 bp, Homo sapien
ccagggctgaaagccatttatcctc

SEQ ID NO: 1393396 - DNA, 25 bp, Homo sapien
gccatcgtgttccttccagggctga

SEQ ID NO: 1393397 - DNA, 25 bp, Homo sapien
cagcctagtctaacacggggaacat

SEQ ID NO: 1393398 - DNA, 25 bp, Homo sapien
acaggaaaccagtgagtctgtggga

SEQ ID NO: 1393399 - DNA, 25 bp, Homo sapien
aacagtctcactggccgggcacgac

SEQ ID NO: 1393400 - DNA, 25 bp, Homo sapien
tgaattgtatacttcagtgaagggt

SEQ ID NO: 1393401 - DNA, 25 bp, Homo sapien
tagtgtctaccaggacaacatctga

SEQ ID NO: 1393402 - DNA, 25 bp, Homo sapien
atccatagtgtctaccaggacaaca

SEQ ID NO: 1393403 - DNA, 25 bp, Homo sapien
cagctcatccatagtgtctaccagg

SEQ ID NO: 1393404 - DNA, 25 bp, Homo sapien
tgggcagctcatccatagtgtctac

SEQ ID NO: 1393405 - DNA, 25 bp, Homo sapien
gaagcctccacagcggagaagatca

SEQ ID NO: 1393406 - DNA, 25 bp, Homo sapien
cactggctgtatagaagcctccaca

SEQ ID NO: 1393407 - DNA, 25 bp, Homo sapien
tagggtcactggctgtatagaagcc

SEQ ID NO: 1393408 - DNA, 25 bp, Homo sapien
ctccttgttagggtcactggctgta

SEQ ID NO: 1393409 - DNA, 25 bp, Homo sapien
ccccagggtgatgccaggacaagcg

SEQ ID NO: 1393410 - DNA, 25 bp, Homo sapien
gcccccagggtgatgccaggacaag

SEQ ID NO: 1393411 - DNA, 25 bp, Homo sapien
tgcccccagggtgatgccaggacaa

SEQ ID NO: 1393412 - DNA, 25 bp, Homo sapien
ctgcccccagggtgatgccaggaca

SEQ ID NO: 1393413 - DNA, 25 bp, Homo sapien
gagaaatgcctagctccacgctacc

SEQ ID NO: 1393414 - DNA, 25 bp, Homo sapien
ggtcattgtgggagaaatgcctagc

SEQ ID NO: 1393415 - DNA, 25 bp, Homo sapien
agaggttcctccctccacgatgtcc

SEQ ID NO: 1393416 - DNA, 25 bp, Homo sapien
tgtgggagaaatgcctagctccacg

SEQ ID NO: 1393417 - DNA, 25 bp, Homo sapien
aaagtggccaaatgctctcctgacc

SEQ ID NO: 1393418 - DNA, 25 bp, Homo sapien
ggtccacggccctgatgaaagtggc

SEQ ID NO: 1393419 - DNA, 25 bp, Homo sapien
gacctcactgtccagaattcggtta

SEQ ID NO: 1393420 - DNA, 25 bp, Homo sapien
tccagaattcggttagggacccaga

SEQ ID NO: 1393421 - DNA, 25 bp, Homo sapien
ctggtggctacgtcgaacctctcgt

SEQ ID NO: 1393422 - DNA, 25 bp, Homo sapien
tgcttcttccgctcagtctcccagt

SEQ ID NO: 1393423 - DNA, 25 bp, Homo sapien
cgaacctctcgttgaccgtgctgac

SEQ ID NO: 1393424 - DNA, 25 bp, Homo sapien
tcagtctcccagtcttccgctgtct

SEQ ID NO: 1393425 - DNA, 25 bp, Homo sapien
ttatccccgaatactgttgggcttg

SEQ ID NO: 1393426 - DNA, 25 bp, Homo sapien
tgagctctggcttggacaatggcca

SEQ ID NO: 1393427 - DNA, 25 bp, Homo sapien
ccgaatactgttgggcttgattgct

SEQ ID NO: 1393428 - DNA, 25 bp, Homo sapien
gccttgctcagggttatccccgaat

SEQ ID NO: 1393429 - DNA, 25 bp, Homo sapien
ggaagtctcggccatgaatcagaat

SEQ ID NO: 1393430 - DNA, 25 bp, Homo sapien
agaatctcctcagggataaatttat

SEQ ID NO: 1393431 - DNA, 25 bp, Homo sapien
tcaaaaccaactctgagcagccgga

SEQ ID NO: 1393432 - DNA, 25 bp, Homo sapien
tcagggataaatttatgcagggacc

SEQ ID NO: 1393433 - DNA, 25 bp, Homo sapien
gagctggactcgggacaagccgctc

SEQ ID NO: 1393434 - DNA, 25 bp, Homo sapien
agaacagtgtaaccatggaccagag

SEQ ID NO: 1393435 - DNA, 25 bp, Homo sapien
tgaagtcaagaggtacagaacagtg

SEQ ID NO: 1393436 - DNA, 25 bp, Homo sapien
gtctctccagaagggactcttgcag

SEQ ID NO: 1393437 - DNA, 25 bp, Homo sapien
actcttgcagcccatcccactccat

SEQ ID NO: 1393438 - DNA, 25 bp, Homo sapien
tgaccagggcaaaatcgtattcact

SEQ ID NO: 1393439 - DNA, 25 bp, Homo sapien
taatcgtccaatgttgaccagggca

SEQ ID NO: 1393440 - DNA, 25 bp, Homo sapien
cagcctctaatcgtccaatgttgac

SEQ ID NO: 1393441 - DNA, 25 bp, Homo sapien
cgtattcactgttcaagggagtgtc

SEQ ID NO: 1393442 - DNA, 25 bp, Homo sapien
ctgattccactgccatccacagggc

SEQ ID NO: 1393443 - DNA, 25 bp, Homo sapien
actgccatccacagggctggaaggt

SEQ ID NO: 1393444 - DNA, 25 bp, Homo sapien
tgattccactgccatccacagggct

SEQ ID NO: 1393445 - DNA, 25 bp, Homo sapien
ccatccacagggctggaaggtgacc

SEQ ID NO: 1393446 - DNA, 25 bp, Homo sapien
ctaaagttggtacagatcagggttc

SEQ ID NO: 1393447 - DNA, 25 bp, Homo sapien
cagacaattctggttccaggccctt

SEQ ID NO: 1393448 - DNA, 25 bp, Homo sapien
tacagatcagggttccagacaattc

SEQ ID NO: 1393449 - DNA, 25 bp, Homo sapien
tggggcccatgctaggatctgctcc

SEQ ID NO: 1393450 - DNA, 25 bp, Homo sapien
gcaactgctaggctgacgactcctg

SEQ ID NO: 1393451 - DNA, 25 bp, Homo sapien
gaggccaggcaactgctaggctgac

SEQ ID NO: 1393452 - DNA, 25 bp, Homo sapien
ccaggcaactgctaggctgacgact

SEQ ID NO: 1393453 - DNA, 25 bp, Homo sapien
aactgctaggctgacgactcctggg

SEQ ID NO: 1393454 - DNA, 25 bp, Homo sapien
cagctgcctgtagaggcctacactc

SEQ ID NO: 1393455 - DNA, 25 bp, Homo sapien
cactctcgggggaaactgagatcag

SEQ ID NO: 1393456 - DNA, 25 bp, Homo sapien
agaggcctacactcacactctcggg

SEQ ID NO: 1393457 - DNA, 25 bp, Homo sapien
tgtggggagctccagacctaacagg

SEQ ID NO: 1393458 - DNA, 25 bp, Homo sapien
tctctggctccatccggggacacag

SEQ ID NO: 1393459 - DNA, 25 bp, Homo sapien
agggtgggaaacctcaaggatgctc

SEQ ID NO: 1393460 - DNA, 25 bp, Homo sapien
taagggtgggaaacctcaaggatgc

SEQ ID NO: 1393461 - DNA, 25 bp, Homo sapien
tctggctccatccggggacacagca

SEQ ID NO: 1393462 - DNA, 25 bp, Homo sapien
ggtccttggaaaggtgtgtccagcc

SEQ ID NO: 1393463 - DNA, 25 bp, Homo sapien
catttgacgtgcacggagcagagtt

SEQ ID NO: 1393464 - DNA, 25 bp, Homo sapien
gacacaagggaaaggagcatttgac

SEQ ID NO: 1393465 - DNA, 25 bp, Homo sapien
ttggaaaggtgtgtccagcccagcc

SEQ ID NO: 1393466 - DNA, 25 bp, Homo sapien
tgtgggtgggacaaaaagatcttac

SEQ ID NO: 1393467 - DNA, 25 bp, Homo sapien
cccaagaattaggtgaggaagcagg

SEQ ID NO: 1393468 - DNA, 25 bp, Homo sapien
aataagtgcccattcccgtatgtga

SEQ ID NO: 1393469 - DNA, 25 bp, Homo sapien
cgtagatacacaaccaataggcaat

SEQ ID NO: 1393470 - DNA, 25 bp, Homo sapien
ctttatttagacatgaaaaagacag

SEQ ID NO: 1393471 - DNA, 25 bp, Homo sapien
aaatctttatttagacatgaaaaag

SEQ ID NO: 1393472 - DNA, 25 bp, Homo sapien
ttatttagacatgaaaaagacagaa

SEQ ID NO: 1393473 - DNA, 25 bp, Homo sapien
atttagacatgaaaaagacagaaaa

SEQ ID NO: 1393474 - DNA, 25 bp, Homo sapien
tgaatctacagaggcagcaatcctt

SEQ ID NO: 1393475 - DNA, 25 bp, Homo sapien
tggaacaaagaggtatacacctgct

SEQ ID NO: 1393476 - DNA, 25 bp, Homo sapien
gtcctaaaggctacagagcaccacc

SEQ ID NO: 1393477 - DNA, 25 bp, Homo sapien
tacacctgctaagaaggtggcccag

SEQ ID NO: 1393478 - DNA, 25 bp, Homo sapien
gaagaggtgtgtaccataactttta

SEQ ID NO: 1393479 - DNA, 25 bp, Homo sapien
caccaccatccttcattcaagagcc

SEQ ID NO: 1393480 - DNA, 25 bp, Homo sapien
taaatcccattatccactttccttc

SEQ ID NO: 1393481 - DNA, 25 bp, Homo sapien
gcataggaagaggtgtgtaccataa

SEQ ID NO: 1393482 - DNA, 25 bp, Homo sapien
ggatcaatacttaaccaggaatgga

SEQ ID NO: 1393483 - DNA, 25 bp, Homo sapien
gcttccgttgctcttttgtactgcc

SEQ ID NO: 1393484 - DNA, 25 bp, Homo sapien
gctgcaggtttgtgccaggagtaaa

SEQ ID NO: 1393485 - DNA, 25 bp, Homo sapien
gagctgagggttaaggctgcctctc

SEQ ID NO: 1393486 - DNA, 25 bp, Homo sapien
gttacccaactgatgtatggtggca

SEQ ID NO: 1393487 - DNA, 25 bp, Homo sapien
gaagagacagaatgcctgcatgact

SEQ ID NO: 1393488 - DNA, 25 bp, Homo sapien
tcatccagatctatagttgaaaggc

SEQ ID NO: 1393489 - DNA, 25 bp, Homo sapien
tggtggcaaaataccctgtgatttg

SEQ ID NO: 1393490 - DNA, 25 bp, Homo sapien
ggaaattagaaaaatctggagtgca

SEQ ID NO: 1393491 - DNA, 25 bp, Homo sapien
tgattccaggccgggaaggggcttc

SEQ ID NO: 1393492 - DNA, 25 bp, Homo sapien
ctgtggctatatgtctggggcactg

SEQ ID NO: 1393493 - DNA, 25 bp, Homo sapien
atggcaaaagctaggttctcagaac

SEQ ID NO: 1393494 - DNA, 25 bp, Homo sapien
aaaggagttaagaatggcaaaagct

SEQ ID NO: 1393495 - DNA, 25 bp, Homo sapien
ggaaccttggacacatggctaaaag

SEQ ID NO: 1393496 - DNA, 25 bp, Homo sapien
cagaggtgtctgagtaattcagaga

SEQ ID NO: 1393497 - DNA, 25 bp, Homo sapien
cagtaggtaccccagttgccctgga

SEQ ID NO: 1393498 - DNA, 25 bp, Homo sapien
gaagcggaggcctatcctacagtaa

SEQ ID NO: 1393499 - DNA, 25 bp, Homo sapien
catttcgagtgcaggccatatgccc

SEQ ID NO: 1393500 - DNA, 25 bp, Homo sapien
cagtaacgacatgggcttgcctctt

SEQ ID NO: 1393501 - DNA, 25 bp, Homo sapien
atggagaggtttttcaatgcctcaa

SEQ ID NO: 1393502 - DNA, 25 bp, Homo sapien
ttttcaatgcctcaataaatagtta

SEQ ID NO: 1393503 - DNA, 25 bp, Homo sapien
acaaacttcactatctcctataaaa

SEQ ID NO: 1393504 - DNA, 25 bp, Homo sapien
ttaccatattcacccctagaccacc

SEQ ID NO: 1393505 - DNA, 25 bp, Homo sapien
catgatacaaggttttttgttcatt

SEQ ID NO: 1393506 - DNA, 25 bp, Homo sapien
gcaaacggaattgggattggctaac

SEQ ID NO: 1393507 - DNA, 25 bp, Homo sapien
ataaaaacaaacatgatacaaggtt

SEQ ID NO: 1393508 - DNA, 25 bp, Homo sapien
caaaagtgttaactagaatctaaca

SEQ ID NO: 1393509 - DNA, 25 bp, Homo sapien
taaaccgtgagcatttccaacaagg

SEQ ID NO: 1393510 - DNA, 25 bp, Homo sapien
aatcttgactggctaccgaggagga

SEQ ID NO: 1393511 - DNA, 25 bp, Homo sapien
tgtgcaaaatgcgaaggagctcccc

SEQ ID NO: 1393512 - DNA, 25 bp, Homo sapien
aattggcccaggataggtcttccgg

SEQ ID NO: 1393513 - DNA, 25 bp, Homo sapien
ggtgcactcaaaccccaacgtatgg

SEQ ID NO: 1393514 - DNA, 25 bp, Homo sapien
gaaaatgcaacacacatgacggctg

SEQ ID NO: 1393515 - DNA, 25 bp, Homo sapien
ggcacccatgaggacacattactgc

SEQ ID NO: 1393516 - DNA, 25 bp, Homo sapien
tttctacagaaacgcagcagccaca

SEQ ID NO: 1393517 - DNA, 25 bp, Homo sapien
tctgcagaggaatagtacagcccct

SEQ ID NO: 1393518 - DNA, 25 bp, Homo sapien
tgctactttctcttaggtccctgga

SEQ ID NO: 1393519 - DNA, 25 bp, Homo sapien
caggaggttataagacagaatcgcc

SEQ ID NO: 1393520 - DNA, 25 bp, Homo sapien
tcaaacctcatcaagtcaagctctg

SEQ ID NO: 1393521 - DNA, 25 bp, Homo sapien
ttgctataggaatcagccactcggt

SEQ ID NO: 1393522 - DNA, 25 bp, Homo sapien
cagggtgtccatagaagctgcagtt

SEQ ID NO: 1393523 - DNA, 25 bp, Homo sapien
catggcagtcctcagaatgctcagg

SEQ ID NO: 1393524 - DNA, 25 bp, Homo sapien
tcctgatactggtgacggtgaccca

SEQ ID NO: 1393525 - DNA, 25 bp, Homo sapien
gggtagatgtgggagaagtcttcac

SEQ ID NO: 1393526 - DNA, 25 bp, Homo sapien
agggtagatgtgggagaagtcttca

SEQ ID NO: 1393527 - DNA, 25 bp, Homo sapien
cagggtagatgtgggagaagtcttc

SEQ ID NO: 1393528 - DNA, 25 bp, Homo sapien
acattcatgtagctatgcagcagat

SEQ ID NO: 1393529 - DNA, 25 bp, Homo sapien
atgcaatttgacctctagggacaga

SEQ ID NO: 1393530 - DNA, 25 bp, Homo sapien
gcagatgcaatttgacctctaggga

SEQ ID NO: 1393531 - DNA, 25 bp, Homo sapien
agatgcaatttgacctctagggaca

SEQ ID NO: 1393532 - DNA, 25 bp, Homo sapien
taaaactcctctcacttgggctaag

SEQ ID NO: 1393533 - DNA, 25 bp, Homo sapien
tgcctgcctcggttgcctgttcact

SEQ ID NO: 1393534 - DNA, 25 bp, Homo sapien
gatggtggtttctcccaacatgctg

SEQ ID NO: 1393535 - DNA, 25 bp, Homo sapien
gaacaagttgagatgctaggattcc

SEQ ID NO: 1393536 - DNA, 25 bp, Homo sapien
gggcagcagcttatactctgaatct

SEQ ID NO: 1393537 - DNA, 25 bp, Homo sapien
ggccaatcggacattgtcactatca

SEQ ID NO: 1393538 - DNA, 25 bp, Homo sapien
tctgaatctgtaagtgggatcacag

SEQ ID NO: 1393539 - DNA, 25 bp, Homo sapien
ccacagcaaagtgcaagggcagcag

SEQ ID NO: 1393540 - DNA, 25 bp, Homo sapien
cctcctacattagatctcattcaat

SEQ ID NO: 1393541 - DNA, 25 bp, Homo sapien
gggcttgcatgtcacttaattcttt

SEQ ID NO: 1393542 - DNA, 25 bp, Homo sapien
gctgtctgggcttgcatgtcactta

SEQ ID NO: 1393543 - DNA, 25 bp, Homo sapien
tctgggcttgcatgtcacttaattc

SEQ ID NO: 1393544 - DNA, 25 bp, Homo sapien
gacacgagtgcagaaaagtgggcct

SEQ ID NO: 1393545 - DNA, 25 bp, Homo sapien
ggctgggacctccaaaggcagatag

SEQ ID NO: 1393546 - DNA, 25 bp, Homo sapien
ctgatcataggcgagcaccagaggg

SEQ ID NO: 1393547 - DNA, 25 bp, Homo sapien
aggcagatagattcctccaaaggga

SEQ ID NO: 1393548 - DNA, 25 bp, Homo sapien
tgcaggaagccatgaagattattat

SEQ ID NO: 1393549 - DNA, 25 bp, Homo sapien
aagattattatgaaggctgtgtttc

SEQ ID NO: 1393550 - DNA, 25 bp, Homo sapien
tgccaactgagtccctccctgcttt

SEQ ID NO: 1393551 - DNA, 25 bp, Homo sapien
gtttctgcctagtggacaatcccta

SEQ ID NO: 1393552 - DNA, 25 bp, Homo sapien
ggctctcatatacaggctcctcaga

SEQ ID NO: 1393553 - DNA, 25 bp, Homo sapien
cctcctaagcacatgagcaaggaca

SEQ ID NO: 1393554 - DNA, 25 bp, Homo sapien
tgccacgacgactatgggcctccta

SEQ ID NO: 1393555 - DNA, 25 bp, Homo sapien
gacaaagacgtgaaactcttcaagg

SEQ ID NO: 1393556 - DNA, 25 bp, Homo sapien
tgcactttcaggaatgcacccaaag

SEQ ID NO: 1393557 - DNA, 25 bp, Homo sapien
ccaaagctactcctcagatctagag

SEQ ID NO: 1393558 - DNA, 25 bp, Homo sapien
gatctagagtagcatgggaactgct

SEQ ID NO: 1393559 - DNA, 25 bp, Homo sapien
tattacaggcttgtgtcagtactaa

SEQ ID NO: 1393560 - DNA, 25 bp, Homo sapien
tggtggtttgatggggatggcactg

SEQ ID NO: 1393561 - DNA, 25 bp, Homo sapien
gagtcttcctatccaagagcatgaa

SEQ ID NO: 1393562 - DNA, 25 bp, Homo sapien
tttgatggggatggcactgagtcta

SEQ ID NO: 1393563 - DNA, 25 bp, Homo sapien
ctgagtcttcctatccaagagcatg

SEQ ID NO: 1393564 - DNA, 25 bp, Homo sapien
tgcacgcgtcacatagttcttatgc

SEQ ID NO: 1393565 - DNA, 25 bp, Homo sapien
gtgcacgcgtcacatagttcttatg

SEQ ID NO: 1393566 - DNA, 25 bp, Homo sapien
ttgtgcacgcgtcacatagttctta

SEQ ID NO: 1393567 - DNA, 25 bp, Homo sapien
cacgcgtcacatagttcttatgcca

SEQ ID NO: 1393568 - DNA, 25 bp, Homo sapien
aacaaccactataccattaatatca

SEQ ID NO: 1393569 - DNA, 25 bp, Homo sapien
acaaccactataccattaatatcac

SEQ ID NO: 1393570 - DNA, 25 bp, Homo sapien
cattcggggttcacttgaggcaagc

SEQ ID NO: 1393571 - DNA, 25 bp, Homo sapien
ccattggtacctagatgcattcggg

SEQ ID NO: 1393572 - DNA, 25 bp, Homo sapien
tcacttgaggcaagcttgatcagtt

SEQ ID NO: 1393573 - DNA, 25 bp, Homo sapien
cacagttggctccattggtacctag

SEQ ID NO: 1393574 - DNA, 25 bp, Homo sapien
tagaagtgctgcatacaaagcctac

SEQ ID NO: 1393575 - DNA, 25 bp, Homo sapien
cccaggttctatatggagtgctgca

SEQ ID NO: 1393576 - DNA, 25 bp, Homo sapien
ggcttaaccgcacactgacagagta

SEQ ID NO: 1393577 - DNA, 25 bp, Homo sapien
tgcgcaacccgttttggagagggca

SEQ ID NO: 1393578 - DNA, 25 bp, Homo sapien
tcagtgcatacaaagctttccgcag

SEQ ID NO: 1393579 - DNA, 25 bp, Homo sapien
tccgcagcatcaagtcccgatcatg

SEQ ID NO: 1393580 - DNA, 25 bp, Homo sapien
tccagcgccttttcaacgcttcctt

SEQ ID NO: 1393581 - DNA, 25 bp, Homo sapien
caaagctttccgcagcatcaagtcc

SEQ ID NO: 1393582 - DNA, 25 bp, Homo sapien
aggtgaatggaggactgctttcaag

SEQ ID NO: 1393583 - DNA, 25 bp, Homo sapien
caggtgaatggaggactgctttcaa

SEQ ID NO: 1393584 - DNA, 25 bp, Homo sapien
acactcacccaccagttcaaacgcc

SEQ ID NO: 1393585 - DNA, 25 bp, Homo sapien
tctccagtagttgccaaaggaagca

SEQ ID NO: 1393586 - DNA, 25 bp, Homo sapien
aggtgggatccacactcacccacca

SEQ ID NO: 1393587 - DNA, 25 bp, Homo sapien
gaggtgggatccacactcacccacc

SEQ ID NO: 1393588 - DNA, 25 bp, Homo sapien
tctctatgaagctgcggaagtcttc

SEQ ID NO: 1393589 - DNA, 25 bp, Homo sapien
tgcctgttccaaggcaaccagcatg

SEQ ID NO: 1393590 - DNA, 25 bp, Homo sapien
tatgaagctgcggaagtcttcattg

SEQ ID NO: 1393591 - DNA, 25 bp, Homo sapien
gtctctctctatgaagctgcggaag

SEQ ID NO: 1393592 - DNA, 25 bp, Homo sapien
ctggcgtgggagatgcccctagaca

SEQ ID NO: 1393593 - DNA, 25 bp, Homo sapien
catttccagggggtgctcattgctc

SEQ ID NO: 1393594 - DNA, 25 bp, Homo sapien
gagatgcccctagacaggcgttttt

SEQ ID NO: 1393595 - DNA, 25 bp, Homo sapien
tgggcatttccagggggtgctcatt

SEQ ID NO: 1393596 - DNA, 25 bp, Homo sapien
tgaacgatgtcatcctgccgctgga

SEQ ID NO: 1393597 - DNA, 25 bp, Homo sapien
tgagggcggcattcacatcccaatt

SEQ ID NO: 1393598 - DNA, 25 bp, Homo sapien
ttccagcatggacttgacgtagctg

SEQ ID NO: 1393599 - DNA, 25 bp, Homo sapien
gagtaggctctctgtcagaaaaccc

SEQ ID NO: 1393600 - DNA, 25 bp, Homo sapien
tgctgctcctacttgtccttcaggg

SEQ ID NO: 1393601 - DNA, 25 bp, Homo sapien
tgggcttaattaagcgaccgtccca

SEQ ID NO: 1393602 - DNA, 25 bp, Homo sapien
tgccaaactctcttgcaccttaggg

SEQ ID NO: 1393603 - DNA, 25 bp, Homo sapien
ccttagggcccttgcataaactgtt

SEQ ID NO: 1393604 - DNA, 25 bp, Homo sapien
ggagatctcgcgctagccctggctc

SEQ ID NO: 1393605 - DNA, 25 bp, Homo sapien
tctaggagatctcgcgctagccctg

SEQ ID NO: 1393606 - DNA, 25 bp, Homo sapien
cttctaggagatctcgcgctagccc

SEQ ID NO: 1393607 - DNA, 25 bp, Homo sapien
agatctcgcgctagccctggctctg

SEQ ID NO: 1393608 - DNA, 25 bp, Homo sapien
ctgtggaacggacaaaatctgacag

SEQ ID NO: 1393609 - DNA, 25 bp, Homo sapien
gtgatcctcaagtactttcagccag

SEQ ID NO: 1393610 - DNA, 25 bp, Homo sapien
aggtagaacatagatcaaaattcag

SEQ ID NO: 1393611 - DNA, 25 bp, Homo sapien
gtagaacatagatcaaaattcaggc

SEQ ID NO: 1393612 - DNA, 25 bp, Homo sapien
ggtagaacatagatcaaaattcagg

SEQ ID NO: 1393613 - DNA, 25 bp, Homo sapien
tcccataccttcaccatgctccttg

SEQ ID NO: 1393614 - DNA, 25 bp, Homo sapien
tctgagctactatcccataccttca

SEQ ID NO: 1393615 - DNA, 25 bp, Homo sapien
acatcacctccccttactcctgtca

SEQ ID NO: 1393616 - DNA, 25 bp, Homo sapien
ctttagtacctcaatcaatcttctg

SEQ ID NO: 1393617 - DNA, 25 bp, Homo sapien
aaaatctatacaggacaaacaaggc

SEQ ID NO: 1393618 - DNA, 25 bp, Homo sapien
tcctaggtgtagcaggtgaattctc

SEQ ID NO: 1393619 - DNA, 25 bp, Homo sapien
ggagttcccgaagtgtactatgtgc

SEQ ID NO: 1393620 - DNA, 25 bp, Homo sapien
tattgttccctctaactggagtaac

SEQ ID NO: 1393621 - DNA, 25 bp, Homo sapien
aatgccagagaaactactgaccgta

SEQ ID NO: 1393622 - DNA, 25 bp, Homo sapien
gacagaggcacttagaactttcaca

SEQ ID NO: 1393623 - DNA, 25 bp, Homo sapien
tcagtctgcatattccaagtgtcca

SEQ ID NO: 1393624 - DNA, 25 bp, Homo sapien
gaagtatatttgtatggtaccccat

SEQ ID NO: 1393625 - DNA, 25 bp, Homo sapien
aggatttttatcaacccagcccagc

SEQ ID NO: 1393626 - DNA, 25 bp, Homo sapien
taacatacgtgaagccttagggcag

SEQ ID NO: 1393627 - DNA, 25 bp, Homo sapien
cacagaggttaggtaatatgcccaa

SEQ ID NO: 1393628 - DNA, 25 bp, Homo sapien
caatgccacattttgtccagggagg

SEQ ID NO: 1393629 - DNA, 25 bp, Homo sapien
tgtatcataaagacggggtttggcc

SEQ ID NO: 1393630 - DNA, 25 bp, Homo sapien
aacatactgtattacttctccttag

SEQ ID NO: 1393631 - DNA, 25 bp, Homo sapien
ctatagctaaattttgaacaggaca

SEQ ID NO: 1393632 - DNA, 25 bp, Homo sapien
ctgtattacttctccttagccaaaa

SEQ ID NO: 1393633 - DNA, 25 bp, Homo sapien
gcctctagggtcaaacatgtaaatc

SEQ ID NO: 1393634 - DNA, 25 bp, Homo sapien
tatgggcaatgcttcacaatgacca

SEQ ID NO: 1393635 - DNA, 25 bp, Homo sapien
tagaatgtactctaagcctctaggg

SEQ ID NO: 1393636 - DNA, 25 bp, Homo sapien
tgtgcagacagatgcttccaataga

SEQ ID NO: 1393637 - DNA, 25 bp, Homo sapien
tgtggtcttcaacttcccattttgt

SEQ ID NO: 1393638 - DNA, 25 bp, Homo sapien
ccaggcattgttctgtttttaacca

SEQ ID NO: 1393639 - DNA, 25 bp, Homo sapien
cataatgtggtcttcaacttcccat

SEQ ID NO: 1393640 - DNA, 25 bp, Homo sapien
taatgtggtcttcaacttcccattt

SEQ ID NO: 1393641 - DNA, 25 bp, Homo sapien
cttaaagggagcttagtggcagaga

SEQ ID NO: 1393642 - DNA, 25 bp, Homo sapien
gtggcagagataaagacatgcaaca

SEQ ID NO: 1393643 - DNA, 25 bp, Homo sapien
taatcagtgcccaatttatcatagc

SEQ ID NO: 1393644 - DNA, 25 bp, Homo sapien
ttaacaagtttcagtggcacaaata

SEQ ID NO: 1393645 - DNA, 25 bp, Homo sapien
gaaccacttctgtgatcctgagtaa

SEQ ID NO: 1393646 - DNA, 25 bp, Homo sapien
gaaaactaagaaagcatcgcagccc

SEQ ID NO: 1393647 - DNA, 25 bp, Homo sapien
tctgctagtacaatgcaatgtggca

SEQ ID NO: 1393648 - DNA, 25 bp, Homo sapien
aatacctctattcactttggactgg

SEQ ID NO: 1393649 - DNA, 25 bp, Homo sapien
gcatacttctatcacagcatctatc

SEQ ID NO: 1393650 - DNA, 25 bp, Homo sapien
tctcctcccactagacccatacgct

SEQ ID NO: 1393651 - DNA, 25 bp, Homo sapien
gcatctatcacacttcattctatct

SEQ ID NO: 1393652 - DNA, 25 bp, Homo sapien
taaaagttacctgaagaagtctggc

SEQ ID NO: 1393653 - DNA, 25 bp, Homo sapien
ggaagagcctctacaaagcacaagt

SEQ ID NO: 1393654 - DNA, 25 bp, Homo sapien
gacataagacagacagcctaggagg

SEQ ID NO: 1393655 - DNA, 25 bp, Homo sapien
gcctaggaggccacattggatccat

SEQ ID NO: 1393656 - DNA, 25 bp, Homo sapien
tgaaggctcattctggctggaacac

SEQ ID NO: 1393657 - DNA, 25 bp, Homo sapien
aattaaactcatagtgggtcactac

SEQ ID NO: 1393658 - DNA, 25 bp, Homo sapien
ctcatagtgggtcactacaaataac

SEQ ID NO: 1393659 - DNA, 25 bp, Homo sapien
aagaattaaactcatagtgggtcac

SEQ ID NO: 1393660 - DNA, 25 bp, Homo sapien
taaactcatagtgggtcactacaaa

SEQ ID NO: 1393661 - DNA, 25 bp, Homo sapien
tgagacttccccacaggttggtgca

SEQ ID NO: 1393662 - DNA, 25 bp, Homo sapien
ggagaatccggccatagtcttgaga

SEQ ID NO: 1393663 - DNA, 25 bp, Homo sapien
tataagctcttgaggagaatccggc

SEQ ID NO: 1393664 - DNA, 25 bp, Homo sapien
catagtcttgagacttccccacagg

SEQ ID NO: 1393665 - DNA, 25 bp, Homo sapien
tcccccgacggcgatggaggtggag

SEQ ID NO: 1393666 - DNA, 25 bp, Homo sapien
ggcccggccgcctctcttcattcct

SEQ ID NO: 1393667 - DNA, 25 bp, Homo sapien
ccgacggcgatggaggtggaggcgg

SEQ ID NO: 1393668 - DNA, 25 bp, Homo sapien
ccggccgcctctcttcattcctcgg

SEQ ID NO: 1393669 - DNA, 25 bp, Homo sapien
gcagctgttgctccgcacgggatct

SEQ ID NO: 1393670 - DNA, 25 bp, Homo sapien
ctgttgctccgcacgggatctggag

SEQ ID NO: 1393671 - DNA, 25 bp, Homo sapien
agctgttgctccgcacgggatctgg

SEQ ID NO: 1393672 - DNA, 25 bp, Homo sapien
gctgttgctccgcacgggatctgga

SEQ ID NO: 1393673 - DNA, 25 bp, Homo sapien
agccagaaaggactgatcgggactg

SEQ ID NO: 1393674 - DNA, 25 bp, Homo sapien
aaggactgatcgggactggcctccc

SEQ ID NO: 1393675 - DNA, 25 bp, Homo sapien
cagtggctttttgcccactccgcac

SEQ ID NO: 1393676 - DNA, 25 bp, Homo sapien
cagaaaggactgatcgggactggcc

SEQ ID NO: 1393677 - DNA, 25 bp, Homo sapien
ggctttctgctgtccggccggaaac

SEQ ID NO: 1393678 - DNA, 25 bp, Homo sapien
aacaggcgccagtttccggccggag

SEQ ID NO: 1393679 - DNA, 25 bp, Homo sapien
gttggtggtgacacccaggccgccc

SEQ ID NO: 1393680 - DNA, 25 bp, Homo sapien
gctggttcaggatcggtggctttct

SEQ ID NO: 1393681 - DNA, 25 bp, Homo sapien
tgatcattaaacacaacaatatgaa

SEQ ID NO: 1393682 - DNA, 25 bp, Homo sapien
gaaattcaggaacaggcgaacgtaa

SEQ ID NO: 1393683 - DNA, 25 bp, Homo sapien
tctgtgtcttgataaggatggctgt

SEQ ID NO: 1393684 - DNA, 25 bp, Homo sapien
tggttacctattagagggaggtgaa

SEQ ID NO: 1393685 - DNA, 25 bp, Homo sapien
gccagtgcttgatctaggcatgtga

SEQ ID NO: 1393686 - DNA, 25 bp, Homo sapien
ctaggcatgtgatagagttctgacc

SEQ ID NO: 1393687 - DNA, 25 bp, Homo sapien
gagttctgaccaattcgagatgtga

SEQ ID NO: 1393688 - DNA, 25 bp, Homo sapien
agaaaatccgctggaggcttttggg

SEQ ID NO: 1393689 - DNA, 25 bp, Homo sapien
taacactcagcaagacagtatggtg

SEQ ID NO: 1393690 - DNA, 25 bp, Homo sapien
tggaataccccgatctagacataca

SEQ ID NO: 1393691 - DNA, 25 bp, Homo sapien
tgcaggcctttatgcagcaaacagc

SEQ ID NO: 1393692 - DNA, 25 bp, Homo sapien
caataattaggttacactgtggaca

SEQ ID NO: 1393693 - DNA, 25 bp, Homo sapien
aatagcaaatacattggcccttttc

SEQ ID NO: 1393694 - DNA, 25 bp, Homo sapien
ccccttcgggtcatatacttctagt

SEQ ID NO: 1393695 - DNA, 25 bp, Homo sapien
gttccattttgctatatcagacagt

SEQ ID NO: 1393696 - DNA, 25 bp, Homo sapien
ggagtcaggttttcacacacagcag

SEQ ID NO: 1393697 - DNA, 25 bp, Homo sapien
tgagaaagtgcatgacccttcagtt

SEQ ID NO: 1393698 - DNA, 25 bp, Homo sapien
ttggcgaacaggacaagtgactacc

SEQ ID NO: 1393699 - DNA, 25 bp, Homo sapien
cttgaatggccttgagtgagggcac

SEQ ID NO: 1393700 - DNA, 25 bp, Homo sapien
tatggagaaataggccttccagtgt

SEQ ID NO: 1393701 - DNA, 25 bp, Homo sapien
ttgctttatgtactttgtgcttttt

SEQ ID NO: 1393702 - DNA, 25 bp, Homo sapien
tttattgctttatgtactttgtgct

SEQ ID NO: 1393703 - DNA, 25 bp, Homo sapien
tattgctttatgtactttgtgcttt

SEQ ID NO: 1393704 - DNA, 25 bp, Homo sapien
gcacatcaatattgttgtgcaatca

SEQ ID NO: 1393705 - DNA, 25 bp, Homo sapien
gatatcagcaggctatggaacacca

SEQ ID NO: 1393706 - DNA, 25 bp, Homo sapien
tagaagacttatgtttggcacataa

SEQ ID NO: 1393707 - DNA, 25 bp, Homo sapien
tgcttgattaaacccattgtccagg

SEQ ID NO: 1393708 - DNA, 25 bp, Homo sapien
aattgtgattcaagcgaggtcattc

SEQ ID NO: 1393709 - DNA, 25 bp, Homo sapien
gggattgacccagggcctcatgcat

SEQ ID NO: 1393710 - DNA, 25 bp, Homo sapien
taagcgtgcgccctaccactgatct

SEQ ID NO: 1393711 - DNA, 25 bp, Homo sapien
tcatgcatgctaagcgtgcgcccta

SEQ ID NO: 1393712 - DNA, 25 bp, Homo sapien
gggcctcatgcatgctaagcgtgcg

SEQ ID NO: 1393713 - DNA, 25 bp, Homo sapien
ttttctagacagaactctgctagta

SEQ ID NO: 1393714 - DNA, 25 bp, Homo sapien
tttctagacagaactctgctagtat

SEQ ID NO: 1393715 - DNA, 25 bp, Homo sapien
attttctagacagaactctgctagt

SEQ ID NO: 1393716 - DNA, 25 bp, Homo sapien
gataaggaagaagctaaaaattggc

SEQ ID NO: 1393717 - DNA, 25 bp, Homo sapien
tggcctacaggatggcttagataag

SEQ ID NO: 1393718 - DNA, 25 bp, Homo sapien
gattaattcccaacccagtagccag

SEQ ID NO: 1393719 - DNA, 25 bp, Homo sapien
gcatatgggtgatctacgtaactga

SEQ ID NO: 1393720 - DNA, 25 bp, Homo sapien
tggtaatcctgaatctattgacctc

SEQ ID NO: 1393721 - DNA, 25 bp, Homo sapien
cctccttttcgacaaatgccatgat

SEQ ID NO: 1393722 - DNA, 25 bp, Homo sapien
cacgctagttttagttctaccggat

SEQ ID NO: 1393723 - DNA, 25 bp, Homo sapien
tattgacctcacaaacactggtcat

SEQ ID NO: 1393724 - DNA, 25 bp, Homo sapien
ccggagttagagctggcagagtcca

SEQ ID NO: 1393725 - DNA, 25 bp, Homo sapien
agtcccgccggagttagagctggca

SEQ ID NO: 1393726 - DNA, 25 bp, Homo sapien
gctggcagagtccaattgctcagag

SEQ ID NO: 1393727 - DNA, 25 bp, Homo sapien
cctgagtttcagagtcccgccggag

SEQ ID NO: 1393728 - DNA, 25 bp, Homo sapien
tttcgcgaggctccactctcttggg

SEQ ID NO: 1393729 - DNA, 25 bp, Homo sapien
ggcaaatagggcacgtagccacact

SEQ ID NO: 1393730 - DNA, 25 bp, Homo sapien
tctcactgccatgcaagaaagcgtt

SEQ ID NO: 1393731 - DNA, 25 bp, Homo sapien
tattaaatgccgtctctccgagtcc

SEQ ID NO: 1393732 - DNA, 25 bp, Homo sapien
tttaattctcccacgttgactgttg

SEQ ID NO: 1393733 - DNA, 25 bp, Homo sapien
tatctgagtagaacattgtatctcc

SEQ ID NO: 1393734 - DNA, 25 bp, Homo sapien
tctcatgacaacacattggacagca

SEQ ID NO: 1393735 - DNA, 25 bp, Homo sapien
gataagtatgcatagaggtctccag

SEQ ID NO: 1393736 - DNA, 25 bp, Homo sapien
gaccctgagagatccatgctgagcc

SEQ ID NO: 1393737 - DNA, 25 bp, Homo sapien
gaaagggatctcatcgtacattctg

SEQ ID NO: 1393738 - DNA, 25 bp, Homo sapien
gcagtctgatgtaaacgtcttctag

SEQ ID NO: 1393739 - DNA, 25 bp, Homo sapien
ggagaaccgtgacatgattgttgaa

SEQ ID NO: 1393740 - DNA, 25 bp, Homo sapien
tttcaagagtacagataacaggtgc

SEQ ID NO: 1393741 - DNA, 25 bp, Homo sapien
aacaggtgctgatgtaacatggtac

SEQ ID NO: 1393742 - DNA, 25 bp, Homo sapien
aagtaactctggtgccactctggag

SEQ ID NO: 1393743 - DNA, 25 bp, Homo sapien
tgagttaatatagtggccttgccct

SEQ ID NO: 1393744 - DNA, 25 bp, Homo sapien
tctccgccggattctgagtcagagc

SEQ ID NO: 1393745 - DNA, 25 bp, Homo sapien
tgtacagacagatggacctgcagac

SEQ ID NO: 1393746 - DNA, 25 bp, Homo sapien
cgcacagtcagtaccggaagagcct

SEQ ID NO: 1393747 - DNA, 25 bp, Homo sapien
catcatcgaattggagccaggcaaa

SEQ ID NO: 1393748 - DNA, 25 bp, Homo sapien
tagtgtgctataccgatcgcgtgtc

SEQ ID NO: 1393749 - DNA, 25 bp, Homo sapien
ttggttgcacaagaaaaagtgaagc

SEQ ID NO: 1393750 - DNA, 25 bp, Homo sapien
ttcaccatgtgttggcgcgcgcctg

SEQ ID NO: 1393751 - DNA, 25 bp, Homo sapien
aactcccgtgcggatcagtagcagg

SEQ ID NO: 1393752 - DNA, 25 bp, Homo sapien
caaaaactttaagttacagcagtca

SEQ ID NO: 1393753 - DNA, 25 bp, Homo sapien
gacttttgaggaacactaacactgc

SEQ ID NO: 1393754 - DNA, 25 bp, Homo sapien
tttgcagcctgacaaaagggctcac

SEQ ID NO: 1393755 - DNA, 25 bp, Homo sapien
tcaaatacttttccagctgcctagt

SEQ ID NO: 1393756 - DNA, 25 bp, Homo sapien
ttacattgtagaagcagtagcagca

SEQ ID NO: 1393757 - DNA, 25 bp, Homo sapien
tgatcactctattgcacacccagaa

SEQ ID NO: 1393758 - DNA, 25 bp, Homo sapien
aattgctagggaattccacaatggg

SEQ ID NO: 1393759 - DNA, 25 bp, Homo sapien
ggatagctatcgtacatgaagaaac

SEQ ID NO: 1393760 - DNA, 25 bp, Homo sapien
gaagaaacaaagatgtgatcactct

SEQ ID NO: 1393761 - DNA, 25 bp, Homo sapien
tcgtcttcagcatctcgtttcctct

SEQ ID NO: 1393762 - DNA, 25 bp, Homo sapien
ttcctctccatcgtcttcagcatct

SEQ ID NO: 1393763 - DNA, 25 bp, Homo sapien
tccatcgtcttcagcatctcgtttc

SEQ ID NO: 1393764 - DNA, 25 bp, Homo sapien
tctccatcgtcttcagcatctcgtt

SEQ ID NO: 1393765 - DNA, 25 bp, Homo sapien
ttccccttcttcaacatagtcatca

SEQ ID NO: 1393766 - DNA, 25 bp, Homo sapien
cttcttccccttcttcaacatagtc

SEQ ID NO: 1393767 - DNA, 25 bp, Homo sapien
cccttcttcaacatagtcatcatca

SEQ ID NO: 1393768 - DNA, 25 bp, Homo sapien
tcttccccttcttcaacatagtcat

SEQ ID NO: 1393769 - DNA, 25 bp, Homo sapien
aatattcagtttgaagattgaaaaa

SEQ ID NO: 1393770 - DNA, 25 bp, Homo sapien
tagaaacaactctcagattgctaca

SEQ ID NO: 1393771 - DNA, 25 bp, Homo sapien
ccatgccattgaggctgtaacagat

SEQ ID NO: 1393772 - DNA, 25 bp, Homo sapien
tagtacttactcctatgcctagaaa

SEQ ID NO: 1393773 - DNA, 25 bp, Homo sapien
tatgcacacccacaacttagaaaca

SEQ ID NO: 1393774 - DNA, 25 bp, Homo sapien
cattaagtatgagaggcccacttcc

SEQ ID NO: 1393775 - DNA, 25 bp, Homo sapien
agtatgagaggcccacttcctcttc

SEQ ID NO: 1393776 - DNA, 25 bp, Homo sapien
ttaagtatgagaggcccacttcctc

SEQ ID NO: 1393777 - DNA, 25 bp, Homo sapien
taagtatgagaggcccacttcctct

SEQ ID NO: 1393778 - DNA, 25 bp, Homo sapien
cttccggtggaccagcttcattttc

SEQ ID NO: 1393779 - DNA, 25 bp, Homo sapien
ttccggtggaccagcttcattttcc

SEQ ID NO: 1393780 - DNA, 25 bp, Homo sapien
tccggtggaccagcttcattttcct

SEQ ID NO: 1393781 - DNA, 25 bp, Homo sapien
caatatatatctagattctcatgaa

SEQ ID NO: 1393782 - DNA, 25 bp, Homo sapien
tgcgagaagtatggcttctaaatac

SEQ ID NO: 1393783 - DNA, 25 bp, Homo sapien
tttgtgaacacttcaaaactttgct

SEQ ID NO: 1393784 - DNA, 25 bp, Homo sapien
tagttattcctacaaaccaaatgcg

SEQ ID NO: 1393785 - DNA, 25 bp, Homo sapien
tccaggtttgtgatctcacagttaa

SEQ ID NO: 1393786 - DNA, 25 bp, Homo sapien
agagtccggcgcttcattatcctcc

SEQ ID NO: 1393787 - DNA, 25 bp, Homo sapien
tcacagttaaacaggtcaagacttt

SEQ ID NO: 1393788 - DNA, 25 bp, Homo sapien
tccatctaagtatgtgatttgctgc

SEQ ID NO: 1393789 - DNA, 25 bp, Homo sapien
ttgtttccactcagattgaggtagg

SEQ ID NO: 1393790 - DNA, 25 bp, Homo sapien
gaggtaggtaagatttggacatttc

SEQ ID NO: 1393791 - DNA, 25 bp, Homo sapien
cactcagattgaggtaggtaagatt

SEQ ID NO: 1393792 - DNA, 25 bp, Homo sapien
tttctctgccaggacttccaagcct

SEQ ID NO: 1393793 - DNA, 25 bp, Homo sapien
tcgaagtttatttaagctgggaagc

SEQ ID NO: 1393794 - DNA, 25 bp, Homo sapien
agccgggccagcgaacttagttcca

SEQ ID NO: 1393795 - DNA, 25 bp, Homo sapien
cattagccatactcagaaattctag

SEQ ID NO: 1393796 - DNA, 25 bp, Homo sapien
tctttgaaagtatcattcaggcctt

SEQ ID NO: 1393797 - DNA, 25 bp, Homo sapien
tatctccgggatgaccctgatagca

SEQ ID NO: 1393798 - DNA, 25 bp, Homo sapien
gattcagctacagacaactccctta

SEQ ID NO: 1393799 - DNA, 25 bp, Homo sapien
aaaatcttagttgccactccacacg

SEQ ID NO: 1393800 - DNA, 25 bp, Homo sapien
gttatatccttctatcgatcggtcg

SEQ ID NO: 1393801 - DNA, 25 bp, Homo sapien
ccaattctaggcttatttcagcaag

SEQ ID NO: 1393802 - DNA, 25 bp, Homo sapien
acctgccgctccgactgacgggaaa

SEQ ID NO: 1393803 - DNA, 25 bp, Homo sapien
tgatgctttcctctgcgaggctccc

SEQ ID NO: 1393804 - DNA, 25 bp, Homo sapien
ttcagcaagactgatgctttcctct

SEQ ID NO: 1393805 - DNA, 25 bp, Homo sapien
cggggatctgttccttaactccagg

SEQ ID NO: 1393806 - DNA, 25 bp, Homo sapien
ctgttccttaactccaggttaatct

SEQ ID NO: 1393807 - DNA, 25 bp, Homo sapien
ggatctgttccttaactccaggtta

SEQ ID NO: 1393808 - DNA, 25 bp, Homo sapien
tccggggatctgttccttaactcca

SEQ ID NO: 1393809 - DNA, 25 bp, Homo sapien
caagagttgggactctaactcagct

SEQ ID NO: 1393810 - DNA, 25 bp, Homo sapien
ttccccttcaatggctgctcagaga

SEQ ID NO: 1393811 - DNA, 25 bp, Homo sapien
ggaacgcaaatataaacgcccacta

SEQ ID NO: 1393812 - DNA, 25 bp, Homo sapien
agactgagcctccatgacacggcac

SEQ ID NO: 1393813 - DNA, 25 bp, Homo sapien
gaaccaccagaaatcattcccactc

SEQ ID NO: 1393814 - DNA, 25 bp, Homo sapien
accaccagaaatcattcccactcat

SEQ ID NO: 1393815 - DNA, 25 bp, Homo sapien
ggaaccaccagaaatcattcccact

SEQ ID NO: 1393816 - DNA, 25 bp, Homo sapien
ttggaaccaccagaaatcattccca

SEQ ID NO: 1393817 - DNA, 25 bp, Homo sapien
cacatttgcagaggtaccagggaac

SEQ ID NO: 1393818 - DNA, 25 bp, Homo sapien
gatgtgccgccctcaaatcttgtca

SEQ ID NO: 1393819 - DNA, 25 bp, Homo sapien
cctgtagccaaagcgggaatcgaaa

SEQ ID NO: 1393820 - DNA, 25 bp, Homo sapien
ggataaggccaatctctgagggaca

SEQ ID NO: 1393821 - DNA, 25 bp, Homo sapien
aatccctcaggtggtaaagatgggc

SEQ ID NO: 1393822 - DNA, 25 bp, Homo sapien
atctcctagagaggaatggacccag

SEQ ID NO: 1393823 - DNA, 25 bp, Homo sapien
tatactgcgggatctctccttagga

SEQ ID NO: 1393824 - DNA, 25 bp, Homo sapien
gatctggccagaaacactgtaggag

SEQ ID NO: 1393825 - DNA, 25 bp, Homo sapien
ccagccatgaggagcaactcgagga

SEQ ID NO: 1393826 - DNA, 25 bp, Homo sapien
ccagggcaatggctaaactaggtcc

SEQ ID NO: 1393827 - DNA, 25 bp, Homo sapien
gattaaaaggatgggacactccacc

SEQ ID NO: 1393828 - DNA, 25 bp, Homo sapien
tagcccaaggaggttagaagagttc

SEQ ID NO: 1393829 - DNA, 25 bp, Homo sapien
ggatgcgcagggcagaatacaccat

SEQ ID NO: 1393830 - DNA, 25 bp, Homo sapien
gcagggcagaatacaccatcacccg

SEQ ID NO: 1393831 - DNA, 25 bp, Homo sapien
gcagaatacaccatcacccgactgt

SEQ ID NO: 1393832 - DNA, 25 bp, Homo sapien
tcagtcctcgggtgggatgcgcagg

SEQ ID NO: 1393833 - DNA, 25 bp, Homo sapien
gaggtgagtcttgggcagggtgaga

SEQ ID NO: 1393834 - DNA, 25 bp, Homo sapien
tgcagattcaaacccaccagtcact

SEQ ID NO: 1393835 - DNA, 25 bp, Homo sapien
caggctgctcctggtaaagcttaga

SEQ ID NO: 1393836 - DNA, 25 bp, Homo sapien
cagagcactgacacagggggagtcc

SEQ ID NO: 1393837 - DNA, 25 bp, Homo sapien
ggtagaccgacgagaaggagacaga

SEQ ID NO: 1393838 - DNA, 25 bp, Homo sapien
agagaatgtgggcaatggacccggg

SEQ ID NO: 1393839 - DNA, 25 bp, Homo sapien
caaagcaaaaccctggaggtagtgg

SEQ ID NO: 1393840 - DNA, 25 bp, Homo sapien
aatgtgggcaatggacccgggctgg

SEQ ID NO: 1393841 - DNA, 25 bp, Homo sapien
aagaggctgcgctgaatacttcgga

SEQ ID NO: 1393842 - DNA, 25 bp, Homo sapien
acagtgactgcatagatgggcagca

SEQ ID NO: 1393843 - DNA, 25 bp, Homo sapien
cgctgaatacttcggagggaccctc

SEQ ID NO: 1393844 - DNA, 25 bp, Homo sapien
tacttcggagggaccctccagctgt

SEQ ID NO: 1393845 - DNA, 25 bp, Homo sapien
cctaactcaggcccctgtctccaac

SEQ ID NO: 1393846 - DNA, 25 bp, Homo sapien
tgcttttctccctaactcaggcccc

SEQ ID NO: 1393847 - DNA, 25 bp, Homo sapien
ctccctaactcaggcccctgtctcc

SEQ ID NO: 1393848 - DNA, 25 bp, Homo sapien
tttctccctaactcaggcccctgtc

SEQ ID NO: 1393849 - DNA, 25 bp, Homo sapien
ccagtaccgtctcctctcacaggca

SEQ ID NO: 1393850 - DNA, 25 bp, Homo sapien
tatggagcaggataatggctgctgt

SEQ ID NO: 1393851 - DNA, 25 bp, Homo sapien
tcagtaggtgactcccaaccaccag

SEQ ID NO: 1393852 - DNA, 25 bp, Homo sapien
acaactccccaaaaggtatggagca

SEQ ID NO: 1393853 - DNA, 25 bp, Homo sapien
gtctctcagggaaggccaataaatc

SEQ ID NO: 1393854 - DNA, 25 bp, Homo sapien
gggaggagatacatccctgatcttc

SEQ ID NO: 1393855 - DNA, 25 bp, Homo sapien
cagggaaggccaataaatcagatca

SEQ ID NO: 1393856 - DNA, 25 bp, Homo sapien
gatacatccctgatcttctcccagg

SEQ ID NO: 1393857 - DNA, 25 bp, Homo sapien
caggaagtaatagggtgagtctcca

SEQ ID NO: 1393858 - DNA, 25 bp, Homo sapien
agtaatagggtgagtctccatggat

SEQ ID NO: 1393859 - DNA, 25 bp, Homo sapien
aagtcaggaagtaatagggtgagtc

SEQ ID NO: 1393860 - DNA, 25 bp, Homo sapien
gaagtaatagggtgagtctccatgg

SEQ ID NO: 1393861 - DNA, 25 bp, Homo sapien
ccactgatgataccgaaggagagac

SEQ ID NO: 1393862 - DNA, 25 bp, Homo sapien
gatgataccgaaggagagaccagaa

SEQ ID NO: 1393863 - DNA, 25 bp, Homo sapien
tgatgataccgaaggagagaccaga

SEQ ID NO: 1393864 - DNA, 25 bp, Homo sapien
actgatgataccgaaggagagacca

SEQ ID NO: 1393865 - DNA, 25 bp, Homo sapien
ggaagggaggatctcatcaatgtca

SEQ ID NO: 1393866 - DNA, 25 bp, Homo sapien
taagaagccacttagaacatgtgga

SEQ ID NO: 1393867 - DNA, 25 bp, Homo sapien
cacactattgcctgttcaccactga

SEQ ID NO: 1393868 - DNA, 25 bp, Homo sapien
tctttggaagtgacggatgaaggaa

SEQ ID NO: 1393869 - DNA, 25 bp, Homo sapien
gatgggtgatcttccgtcctcactc

SEQ ID NO: 1393870 - DNA, 25 bp, Homo sapien
tcagcgatgctaacccctcatctgc

SEQ ID NO: 1393871 - DNA, 25 bp, Homo sapien
cataggccatctggcggatggagat

SEQ ID NO: 1393872 - DNA, 25 bp, Homo sapien
tcactcagcgatgctaacccctcat

SEQ ID NO: 1393873 - DNA, 25 bp, Homo sapien
ttaagcagcttgtagtaggcaaagc

SEQ ID NO: 1393874 - DNA, 25 bp, Homo sapien
agcagcttgtagtaggcaaagcgga

SEQ ID NO: 1393875 - DNA, 25 bp, Homo sapien
gcttgtagtaggcaaagcggaacac

SEQ ID NO: 1393876 - DNA, 25 bp, Homo sapien
tgtagtaggcaaagcggaacacctc

SEQ ID NO: 1393877 - DNA, 25 bp, Homo sapien
caaaaatcaggaggccgtactggag

SEQ ID NO: 1393878 - DNA, 25 bp, Homo sapien
tactggagccgggcatctgaccggt

SEQ ID NO: 1393879 - DNA, 25 bp, Homo sapien
accaaaaatcaggaggccgtactgg

SEQ ID NO: 1393880 - DNA, 25 bp, Homo sapien
ggtcacatggaccaagatgaaccag

SEQ ID NO: 1393881 - DNA, 25 bp, Homo sapien
tcttcagagcgatgacagccagagt

SEQ ID NO: 1393882 - DNA, 25 bp, Homo sapien
gaccaggtagggtaactgtctccac

SEQ ID NO: 1393883 - DNA, 25 bp, Homo sapien
ccttctctgacgtcgctgggaggaa

SEQ ID NO: 1393884 - DNA, 25 bp, Homo sapien
tggaaaccaactgcgggaaaggaca

SEQ ID NO: 1393885 - DNA, 25 bp, Homo sapien
ggccgaacgcgacgaaagtgcagcc

SEQ ID NO: 1393886 - DNA, 25 bp, Homo sapien
gtgatcaagaaaagcgcgaaggccg

SEQ ID NO: 1393887 - DNA, 25 bp, Homo sapien
ggatgataacgcgaagcgggtcccc

SEQ ID NO: 1393888 - DNA, 25 bp, Homo sapien
aaagtgcagccgaaaaacaccgcag

SEQ ID NO: 1393889 - DNA, 25 bp, Homo sapien
agtccgcgtggggtggcaacgcgac

SEQ ID NO: 1393890 - DNA, 25 bp, Homo sapien
gggagtccgcgtggggtggcaacgc

SEQ ID NO: 1393891 - DNA, 25 bp, Homo sapien
ggcgcgccagctggggagtccgcgt

SEQ ID NO: 1393892 - DNA, 25 bp, Homo sapien
aggggcgcgccagctggggagtccg

SEQ ID NO: 1393893 - DNA, 25 bp, Homo sapien
atgaaggtccgcgccacttcctcta

SEQ ID NO: 1393894 - DNA, 25 bp, Homo sapien
cttcctctacggaagccgaagaggg

SEQ ID NO: 1393895 - DNA, 25 bp, Homo sapien
accccaaatgaaggtccgcgccact

SEQ ID NO: 1393896 - DNA, 25 bp, Homo sapien
acgaggggcgcggtgcaatgtcacc

SEQ ID NO: 1393897 - DNA, 25 bp, Homo sapien
ggaatggaccagtcgagacaccaat

SEQ ID NO: 1393898 - DNA, 25 bp, Homo sapien
acttcgtcctgggagtggctcgagc

SEQ ID NO: 1393899 - DNA, 25 bp, Homo sapien
caattccagggttcggttgcgcttc

SEQ ID NO: 1393900 - DNA, 25 bp, Homo sapien
gggaaaagtggtagcaatcatacct

SEQ ID NO: 1393901 - DNA, 25 bp, Homo sapien
tgcagagggggtagatcctgtttga

SEQ ID NO: 1393902 - DNA, 25 bp, Homo sapien
gcagagggggtagatcctgtttgaa

SEQ ID NO: 1393903 - DNA, 25 bp, Homo sapien
ctgcagagggggtagatcctgtttg

SEQ ID NO: 1393904 - DNA, 25 bp, Homo sapien
cagagggggtagatcctgtttgaat

SEQ ID NO: 1393905 - DNA, 25 bp, Homo sapien
taaaaagtaggagctcttcggacag

SEQ ID NO: 1393906 - DNA, 25 bp, Homo sapien
cagtatatcgctaatgaagccttca

SEQ ID NO: 1393907 - DNA, 25 bp, Homo sapien
gagctgctgcctaagagatgaagat

SEQ ID NO: 1393908 - DNA, 25 bp, Homo sapien
cttcggacagactagtataataaac

SEQ ID NO: 1393909 - DNA, 25 bp, Homo sapien
agaggttagtccttagggaagatgt

SEQ ID NO: 1393910 - DNA, 25 bp, Homo sapien
gaggagggtattgtaatctcatttg

SEQ ID NO: 1393911 - DNA, 25 bp, Homo sapien
gttttacatgtcttccaggatattc

SEQ ID NO: 1393912 - DNA, 25 bp, Homo sapien
agattgtatagatttacacggaggc

SEQ ID NO: 1393913 - DNA, 25 bp, Homo sapien
gaggtggaggttacagtgagctgag

SEQ ID NO: 1393914 - DNA, 25 bp, Homo sapien
gctgagccacgagaatagcttgaat

SEQ ID NO: 1393915 - DNA, 25 bp, Homo sapien
atcccaccactgcactccaacctgg

SEQ ID NO: 1393916 - DNA, 25 bp, Homo sapien
agccacgagaatagcttgaatctga

SEQ ID NO: 1393917 - DNA, 25 bp, Homo sapien
tccagcctggtcaattatcagccac

SEQ ID NO: 1393918 - DNA, 25 bp, Homo sapien
gcctggtcaattatcagccactgaa

SEQ ID NO: 1393919 - DNA, 25 bp, Homo sapien
cagtatctctagttagtgtttccag

SEQ ID NO: 1393920 - DNA, 25 bp, Homo sapien
ctagttagtgtttccagcctggtca

SEQ ID NO: 1393921 - DNA, 25 bp, Homo sapien
tcactgacggtttccacgtgctgcg

SEQ ID NO: 1393922 - DNA, 25 bp, Homo sapien
catcctatttaaggccacgggctcc

SEQ ID NO: 1393923 - DNA, 25 bp, Homo sapien
cgttgcagacacaaatcactgacgg

SEQ ID NO: 1393924 - DNA, 25 bp, Homo sapien
aatctctgaacactcaaaccgcgca

SEQ ID NO: 1393925 - DNA, 25 bp, Homo sapien
ttttccttgagtcaaggtgtcactc

SEQ ID NO: 1393926 - DNA, 25 bp, Homo sapien
tttttttccttgagtcaaggtgtca

SEQ ID NO: 1393927 - DNA, 25 bp, Homo sapien
caaacacttctcctgcctgcctcct

SEQ ID NO: 1393928 - DNA, 25 bp, Homo sapien
gttcaaacacttctcctgcctgcct

SEQ ID NO: 1393929 - DNA, 25 bp, Homo sapien
aaagaatcgggcagatccgtggcag

SEQ ID NO: 1393930 - DNA, 25 bp, Homo sapien
catggaaatggctcgcaagatcaac

SEQ ID NO: 1393931 - DNA, 25 bp, Homo sapien
aggtgccggcggatctacaacatgg

SEQ ID NO: 1393932 - DNA, 25 bp, Homo sapien
taaactcaaatcacatgtctgcaag

SEQ ID NO: 1393933 - DNA, 25 bp, Homo sapien
cagggacacaatctacaaaagcaaa

SEQ ID NO: 1393934 - DNA, 25 bp, Homo sapien
aagatctcattgtgatagagcaagg

SEQ ID NO: 1393935 - DNA, 25 bp, Homo sapien
ttaatgtaggataaccagggacaca

SEQ ID NO: 1393936 - DNA, 25 bp, Homo sapien
tccttaattacattcttttgctacg

SEQ ID NO: 1393937 - DNA, 25 bp, Homo sapien
acatggctttagtagattttgtctt

SEQ ID NO: 1393938 - DNA, 25 bp, Homo sapien
gcctttcgttgccccttctttgtca

SEQ ID NO: 1393939 - DNA, 25 bp, Homo sapien
tagtagattttgtcttagcctttcg

SEQ ID NO: 1393940 - DNA, 25 bp, Homo sapien
ctttcgttgccccttctttgtcagc

SEQ ID NO: 1393941 - DNA, 25 bp, Homo sapien
ccaacatccatggaagcattacaaa

SEQ ID NO: 1393942 - DNA, 25 bp, Homo sapien
tctgatcccttagaaccactctctt

SEQ ID NO: 1393943 - DNA, 25 bp, Homo sapien
tccttaccctgatgtattgctgtgt

SEQ ID NO: 1393944 - DNA, 25 bp, Homo sapien
tgttcaggccaagatgtgaactaaa

SEQ ID NO: 1393945 - DNA, 25 bp, Homo sapien
taatggttaatgtaaagtgctagac

SEQ ID NO: 1393946 - DNA, 25 bp, Homo sapien
gagtctaagggtctagaggacaaaa

SEQ ID NO: 1393947 - DNA, 25 bp, Homo sapien
gatgatagtaaatacctctccctga

SEQ ID NO: 1393948 - DNA, 25 bp, Homo sapien
ccctgactcttagagtaaactttgg

SEQ ID NO: 1393949 - DNA, 25 bp, Homo sapien
ggttagttccaataaacctgagata

SEQ ID NO: 1393950 - DNA, 25 bp, Homo sapien
aaaagatcttcaggtcaaaaaagct

SEQ ID NO: 1393951 - DNA, 25 bp, Homo sapien
cacacatatgctcttcaacttaatg

SEQ ID NO: 1393952 - DNA, 25 bp, Homo sapien
ccaataaacctgagataaattgaaa

SEQ ID NO: 1393953 - DNA, 25 bp, Homo sapien
ttctagggtacagccaaagaccgga

SEQ ID NO: 1393954 - DNA, 25 bp, Homo sapien
tacagagaacatggctcgtgagcat

SEQ ID NO: 1393955 - DNA, 25 bp, Homo sapien
tactgggaccttgcgctgagtgaat

SEQ ID NO: 1393956 - DNA, 25 bp, Homo sapien
gattgagactactgcaagcccttgc

SEQ ID NO: 1393957 - DNA, 25 bp, Homo sapien
tcatagctggcgaaaatgaggtcac

SEQ ID NO: 1393958 - DNA, 25 bp, Homo sapien
tgtaacctaaatggtcaagcggctg

SEQ ID NO: 1393959 - DNA, 25 bp, Homo sapien
aatacggtttggtgtcggagtctgc

SEQ ID NO: 1393960 - DNA, 25 bp, Homo sapien
ttgtggtgccgcaagatggctgcca

SEQ ID NO: 1393961 - DNA, 25 bp, Homo sapien
caatattgataaaacctccgagacc

SEQ ID NO: 1393962 - DNA, 25 bp, Homo sapien
tccttgcagcgtgtaggagctgcca

SEQ ID NO: 1393963 - DNA, 25 bp, Homo sapien
aaacgattagtttcggcgtcaggcg

SEQ ID NO: 1393964 - DNA, 25 bp, Homo sapien
ttagcactgagagccgaaaagtata

SEQ ID NO: 1393965 - DNA, 25 bp, Homo sapien
gcggaggcagcagtaaggcctcctc

SEQ ID NO: 1393966 - DNA, 25 bp, Homo sapien
tcctcgttggatcgaaaattccagt

SEQ ID NO: 1393967 - DNA, 25 bp, Homo sapien
aattccagtcggtaaccaacaccat

SEQ ID NO: 1393968 - DNA, 25 bp, Homo sapien
ggctctggagtcctcgttggatcga

SEQ ID NO: 1393969 - DNA, 25 bp, Homo sapien
gagaaggctatggtattatgaaatc

SEQ ID NO: 1393970 - DNA, 25 bp, Homo sapien
tatatggattgtttttagagccagg

SEQ ID NO: 1393971 - DNA, 25 bp, Homo sapien
gatagagcagcaagtacagatatag

SEQ ID NO: 1393972 - DNA, 25 bp, Homo sapien
gcaatcaccatagcgtgtctagtat

SEQ ID NO: 1393973 - DNA, 25 bp, Homo sapien
ttaaaaggacatcagtattcttggt

SEQ ID NO: 1393974 - DNA, 25 bp, Homo sapien
taaaaggacatcagtattcttggtg

SEQ ID NO: 1393975 - DNA, 25 bp, Homo sapien
tttaaaaggacatcagtattcttgg

SEQ ID NO: 1393976 - DNA, 25 bp, Homo sapien
ttcttggtgtcactggatttttaaa

SEQ ID NO: 1393977 - DNA, 25 bp, Homo sapien
cccaaggagaaatcctttgttatag

SEQ ID NO: 1393978 - DNA, 25 bp, Homo sapien
tttaactcccctgagtagtgctttc

SEQ ID NO: 1393979 - DNA, 25 bp, Homo sapien
tggacttcagtatcatcttgccatg

SEQ ID NO: 1393980 - DNA, 25 bp, Homo sapien
tcttggccaacttgactaagatgcc

SEQ ID NO: 1393981 - DNA, 25 bp, Homo sapien
tctaggaaacagtacgtagtggaag

SEQ ID NO: 1393982 - DNA, 25 bp, Homo sapien
tctcaaggtgtgaatagagtctagg

SEQ ID NO: 1393983 - DNA, 25 bp, Homo sapien
gattcgggcctgacaagtggttaaa

SEQ ID NO: 1393984 - DNA, 25 bp, Homo sapien
taatggagcataaggttctcaaggt

SEQ ID NO: 1393985 - DNA, 25 bp, Homo sapien
ggtagttggatccagcacttcccac

SEQ ID NO: 1393986 - DNA, 25 bp, Homo sapien
tcatttttagcggtagttggatcca

SEQ ID NO: 1393987 - DNA, 25 bp, Homo sapien
tactcccaactccatgttgatttaa

SEQ ID NO: 1393988 - DNA, 25 bp, Homo sapien
atctgtaaagagaaacggaaattat

SEQ ID NO: 1393989 - DNA, 25 bp, Homo sapien
tctccatatggtttggtggattcac

SEQ ID NO: 1393990 - DNA, 25 bp, Homo sapien
gagaggttacattcctgttttgtct

SEQ ID NO: 1393991 - DNA, 25 bp, Homo sapien
gttctttggcagatctgctagaata

SEQ ID NO: 1393992 - DNA, 25 bp, Homo sapien
tggtggattcacttaaggagaggtt

SEQ ID NO: 1393993 - DNA, 25 bp, Homo sapien
ttcacagtttaaagagacccaggcc

SEQ ID NO: 1393994 - DNA, 25 bp, Homo sapien
gcctagggaaccttttctcagcaga

SEQ ID NO: 1393995 - DNA, 25 bp, Homo sapien
tataatcttacggagtccccggcca

SEQ ID NO: 1393996 - DNA, 25 bp, Homo sapien
catcagccggagtggtataatctta

SEQ ID NO: 1393997 - DNA, 25 bp, Homo sapien
ttactattcaattcaatcctccctc

SEQ ID NO: 1393998 - DNA, 25 bp, Homo sapien
catacgcttacgttttactattcaa

SEQ ID NO: 1393999 - DNA, 25 bp, Homo sapien
caaagtaagaaatcacatacgctta

SEQ ID NO: 1394000 - DNA, 25 bp, Homo sapien
gcacttatctaccttccccaagttg

SEQ ID NO: 1394001 - DNA, 25 bp, Homo sapien
aggaaagtggcttcctgaacgttgg

SEQ ID NO: 1394002 - DNA, 25 bp, Homo sapien
ggcgggataattgtcctcaaaagta

SEQ ID NO: 1394003 - DNA, 25 bp, Homo sapien
tacttgataaggctctctgaccatt

SEQ ID NO: 1394004 - DNA, 25 bp, Homo sapien
ctttgttggacagtttcgaaggtgg

SEQ ID NO: 1394005 - DNA, 25 bp, Homo sapien
cctaatggcaggatattcactctca

SEQ ID NO: 1394006 - DNA, 25 bp, Homo sapien
gatattctcacgtgttcggtgtgga

SEQ ID NO: 1394007 - DNA, 25 bp, Homo sapien
gaagttaccggttcctgcagaattg

SEQ ID NO: 1394008 - DNA, 25 bp, Homo sapien
taaaactccgtgaccatgctctgac

SEQ ID NO: 1394009 - DNA, 25 bp, Homo sapien
ctgtgaaccatatctgggctctgct

SEQ ID NO: 1394010 - DNA, 25 bp, Homo sapien
gggactgaagcacttccttgtctcc

SEQ ID NO: 1394011 - DNA, 25 bp, Homo sapien
gcaaaagaaactgttccatgtgggt

SEQ ID NO: 1394012 - DNA, 25 bp, Homo sapien
gactggtcatttagtattagcagac

SEQ ID NO: 1394013 - DNA, 25 bp, Homo sapien
tcatgagttggcagatcccctctcc

SEQ ID NO: 1394014 - DNA, 25 bp, Homo sapien
ttctcaatcctctgaggaggcttca

SEQ ID NO: 1394015 - DNA, 25 bp, Homo sapien
gagatcccttggataggtttcctgc

SEQ ID NO: 1394016 - DNA, 25 bp, Homo sapien
cttgaaggtcataagaatgttctcc

SEQ ID NO: 1394017 - DNA, 25 bp, Homo sapien
tcccaccaggccttgccccgcactg

SEQ ID NO: 1394018 - DNA, 25 bp, Homo sapien
caggccttgccccgcactgaagccg

SEQ ID NO: 1394019 - DNA, 25 bp, Homo sapien
tcatcttgataagaaaggctcttcc

SEQ ID NO: 1394020 - DNA, 25 bp, Homo sapien
tcttgataagaaaggctcttcccac

SEQ ID NO: 1394021 - DNA, 25 bp, Homo sapien
tccagtggctctacgggccgaagca

SEQ ID NO: 1394022 - DNA, 25 bp, Homo sapien
gtccagtggctctacgggccgaagc

SEQ ID NO: 1394023 - DNA, 25 bp, Homo sapien
taaaatctggcgtaaaggactaaca

SEQ ID NO: 1394024 - DNA, 25 bp, Homo sapien
gaacagagttgactggtgatgacag

SEQ ID NO: 1394025 - DNA, 25 bp, Homo sapien
ctcctggtgttcagatccccagtaa

SEQ ID NO: 1394026 - DNA, 25 bp, Homo sapien
ggaacagagttgactggtgatgaca

SEQ ID NO: 1394027 - DNA, 25 bp, Homo sapien
ccagtaatctgggtccacgagccgg

SEQ ID NO: 1394028 - DNA, 25 bp, Homo sapien
ccagcaactggagaacgaaagtcca

SEQ ID NO: 1394029 - DNA, 25 bp, Homo sapien
agcaactggagaacgaaagtccaca

SEQ ID NO: 1394030 - DNA, 25 bp, Homo sapien
ctggggcttagagcacatagcaagg

SEQ ID NO: 1394031 - DNA, 25 bp, Homo sapien
cacctggggcttagagcacatagca

SEQ ID NO: 1394032 - DNA, 25 bp, Homo sapien
tgctgaggcataggaaactcttttc

SEQ ID NO: 1394033 - DNA, 25 bp, Homo sapien
gacagtgtccacaaacttaatctgg

SEQ ID NO: 1394034 - DNA, 25 bp, Homo sapien
tttcagaccaccaagccatgagagg

SEQ ID NO: 1394035 - DNA, 25 bp, Homo sapien
tcatgagctcttcggtgagcagcca

SEQ ID NO: 1394036 - DNA, 25 bp, Homo sapien
cccagaggcgcaggtcaatctgacc

SEQ ID NO: 1394037 - DNA, 25 bp, Homo sapien
tcccagaggcgcaggtcaatctgac

SEQ ID NO: 1394038 - DNA, 25 bp, Homo sapien
caattgtacccagctcgggacacaa

SEQ ID NO: 1394039 - DNA, 25 bp, Homo sapien
gcctgcaattgtacccagctcggga

SEQ ID NO: 1394040 - DNA, 25 bp, Homo sapien
tacaggtgcctgcaattgtacccag

SEQ ID NO: 1394041 - DNA, 25 bp, Homo sapien
cagctcgggacacaattcttacatt

SEQ ID NO: 1394042 - DNA, 25 bp, Homo sapien
ctgagcccagtattaaccttcgcat

SEQ ID NO: 1394043 - DNA, 25 bp, Homo sapien
ttcagctgagcccagtattaacctt

SEQ ID NO: 1394044 - DNA, 25 bp, Homo sapien
gctgagcccagtattaaccttcgca

SEQ ID NO: 1394045 - DNA, 25 bp, Homo sapien
cagctgagcccagtattaaccttcg

SEQ ID NO: 1394046 - DNA, 25 bp, Homo sapien
gtattcgtcgaagaccacatagctg

SEQ ID NO: 1394047 - DNA, 25 bp, Homo sapien
gctgtcctttcgctgagtcccgagt

SEQ ID NO: 1394048 - DNA, 25 bp, Homo sapien
gctgagtcccgagtgtaaaacctta

SEQ ID NO: 1394049 - DNA, 25 bp, Homo sapien
actcagaagtcagcacgctgtcctt

SEQ ID NO: 1394050 - DNA, 25 bp, Homo sapien
ggagacacgctttgtccggactccc

SEQ ID NO: 1394051 - DNA, 25 bp, Homo sapien
cccagccctgaatgacttccagccc

SEQ ID NO: 1394052 - DNA, 25 bp, Homo sapien
gtgggagacacgctttgtccggact

SEQ ID NO: 1394053 - DNA, 25 bp, Homo sapien
gaggtgtgggagacacgctttgtcc

SEQ ID NO: 1394054 - DNA, 25 bp, Homo sapien
gcctgaaggatctgatcgggcacct

SEQ ID NO: 1394055 - DNA, 25 bp, Homo sapien
gaaggatctgatcgggcacctgtcc

SEQ ID NO: 1394056 - DNA, 25 bp, Homo sapien
tgatcgggcacctgtccatgtccct

SEQ ID NO: 1394057 - DNA, 25 bp, Homo sapien
gatctgatcgggcacctgtccatgt

SEQ ID NO: 1394058 - DNA, 25 bp, Homo sapien
ctgtgatgggatccttggctctggc

SEQ ID NO: 1394059 - DNA, 25 bp, Homo sapien
gctgtgatgggatccttggctctgg

SEQ ID NO: 1394060 - DNA, 25 bp, Homo sapien
cctgggggccggtccatcatcaatg

SEQ ID NO: 1394061 - DNA, 25 bp, Homo sapien
tgggaactgggctgtggatccccct

SEQ ID NO: 1394062 - DNA, 25 bp, Homo sapien
ctctgacccgcagcacttcgtggcc

SEQ ID NO: 1394063 - DNA, 25 bp, Homo sapien
acccgcagcacttcgtggccctggg

SEQ ID NO: 1394064 - DNA, 25 bp, Homo sapien
tgaactctgcactcaacgcaacatc

SEQ ID NO: 1394065 - DNA, 25 bp, Homo sapien
ctctgcactcaacgcaacatctcct

SEQ ID NO: 1394066 - DNA, 25 bp, Homo sapien
aactctgcactcaacgcaacatctc

SEQ ID NO: 1394067 - DNA, 25 bp, Homo sapien
gaactctgcactcaacgcaacatct

SEQ ID NO: 1394068 - DNA, 25 bp, Homo sapien
gctggcgagtggacatcctgcagcc

SEQ ID NO: 1394069 - DNA, 25 bp, Homo sapien
ggcagccccacacatctcatctatg

SEQ ID NO: 1394070 - DNA, 25 bp, Homo sapien
tctcatctatgtctccgcctcttcc

SEQ ID NO: 1394071 - DNA, 25 bp, Homo sapien
gctgcgcctctgtggccattgggaa

SEQ ID NO: 1394072 - DNA, 25 bp, Homo sapien
ggaagtctccgggtatctgcgcctt

SEQ ID NO: 1394073 - DNA, 25 bp, Homo sapien
tggtcatgggccactagaggtcacc

SEQ ID NO: 1394074 - DNA, 25 bp, Homo sapien
gctacttagagtgtggtctccccac

SEQ ID NO: 1394075 - DNA, 25 bp, Homo sapien
gagtttgggtcagagaatccccgcc

SEQ ID NO: 1394076 - DNA, 25 bp, Homo sapien
gcactggatgtcctgccaaagccac

SEQ ID NO: 1394077 - DNA, 25 bp, Homo sapien
gacccctgccattcggagactgagg

SEQ ID NO: 1394078 - DNA, 25 bp, Homo sapien
tttggacatcttaagaggagagcga

SEQ ID NO: 1394079 - DNA, 25 bp, Homo sapien
gactgaggccgagtctctcctggaa

SEQ ID NO: 1394080 - DNA, 25 bp, Homo sapien
ctttctggtaactaggagtgaagca

SEQ ID NO: 1394081 - DNA, 25 bp, Homo sapien
tccagattccacctttctggtaact

SEQ ID NO: 1394082 - DNA, 25 bp, Homo sapien
tggcccagggcataagtgtctcagc

SEQ ID NO: 1394083 - DNA, 25 bp, Homo sapien
gctggcccagggcataagtgtctca

SEQ ID NO: 1394084 - DNA, 25 bp, Homo sapien
tcaacatactctactgatgcctggt

SEQ ID NO: 1394085 - DNA, 25 bp, Homo sapien
tccaggcctcaaaatacagctgtag

SEQ ID NO: 1394086 - DNA, 25 bp, Homo sapien
tgacttctgctctgcctagccatag

SEQ ID NO: 1394087 - DNA, 25 bp, Homo sapien
tatttttggttagacacggtggctc

SEQ ID NO: 1394088 - DNA, 25 bp, Homo sapien
gtgtcatttatacccaatccagact

SEQ ID NO: 1394089 - DNA, 25 bp, Homo sapien
tactggccatgagccttctattact

SEQ ID NO: 1394090 - DNA, 25 bp, Homo sapien
ccctagtagctacgactactggcca

SEQ ID NO: 1394091 - DNA, 25 bp, Homo sapien
tggcctcaatgatccaaaccttgaa

SEQ ID NO: 1394092 - DNA, 25 bp, Homo sapien
ccagctctatttccaacgtaggcag

SEQ ID NO: 1394093 - DNA, 25 bp, Homo sapien
gtgcaattctactactgatgagcac

SEQ ID NO: 1394094 - DNA, 25 bp, Homo sapien
accagctctatttccaacgtaggca

SEQ ID NO: 1394095 - DNA, 25 bp, Homo sapien
actacaagcgcgtgcaactgcgcct

SEQ ID NO: 1394096 - DNA, 25 bp, Homo sapien
gcgtgaacaccagatcaacgtagca

SEQ ID NO: 1394097 - DNA, 25 bp, Homo sapien
tataggtacgtacaactgtgcctgg

SEQ ID NO: 1394098 - DNA, 25 bp, Homo sapien
aggtgcaattctactactgaggagc

SEQ ID NO: 1394099 - DNA, 25 bp, Homo sapien
tgcaattctactactgaggagcaca

SEQ ID NO: 1394100 - DNA, 25 bp, Homo sapien
tcccaattccatgctttggtacgtg

SEQ ID NO: 1394101 - DNA, 25 bp, Homo sapien
tcactgaccaagagcggcgagcaga

SEQ ID NO: 1394102 - DNA, 25 bp, Homo sapien
gcccagcctcgttactcatgtttta

SEQ ID NO: 1394103 - DNA, 25 bp, Homo sapien
gaagtcatacagtattcactgacca

SEQ ID NO: 1394104 - DNA, 25 bp, Homo sapien
tgcacccagctagatcacaaacttt

SEQ ID NO: 1394105 - DNA, 25 bp, Homo sapien
gcaacctcgacttcgtaagctcaag

SEQ ID NO: 1394106 - DNA, 25 bp, Homo sapien
gaaatttaacatcgatacagtagta

SEQ ID NO: 1394107 - DNA, 25 bp, Homo sapien
actttaacatctagccacatttgca

SEQ ID NO: 1394108 - DNA, 25 bp, Homo sapien
gagccacctcactagagaggtattt

SEQ ID NO: 1394109 - DNA, 25 bp, Homo sapien
tagtgcccgccaccagtagtggcgt

SEQ ID NO: 1394110 - DNA, 25 bp, Homo sapien
cgtgagccacctcactagagaggta

SEQ ID NO: 1394111 - DNA, 25 bp, Homo sapien
tagtggcgtttaaccgtgttggcca

SEQ ID NO: 1394112 - DNA, 25 bp, Homo sapien
gagtggcagcgttctagaaagttcc

SEQ ID NO: 1394113 - DNA, 25 bp, Homo sapien
gaactccaggaattaatagccagtg

SEQ ID NO: 1394114 - DNA, 25 bp, Homo sapien
ggatagactcaactgaccatctgaa

SEQ ID NO: 1394115 - DNA, 25 bp, Homo sapien
tctggctggagccatggtacgcacc

SEQ ID NO: 1394116 - DNA, 25 bp, Homo sapien
catatggtgctcagggcttaaaacc

SEQ ID NO: 1394117 - DNA, 25 bp, Homo sapien
cctttgcttgggagtgcacttacac

SEQ ID NO: 1394118 - DNA, 25 bp, Homo sapien
catcatagcacgtcaatgggagcaa

SEQ ID NO: 1394119 - DNA, 25 bp, Homo sapien
taacttaactcaggccaagacttgg

SEQ ID NO: 1394120 - DNA, 25 bp, Homo sapien
ttaggtgttatgatagagtaactgc

SEQ ID NO: 1394121 - DNA, 25 bp, Homo sapien
gatagagtaactgctgtacagtacc

SEQ ID NO: 1394122 - DNA, 25 bp, Homo sapien
ctttaggtattatttaggtgttatg

SEQ ID NO: 1394123 - DNA, 25 bp, Homo sapien
taactgctgtacagtaccctcttac

SEQ ID NO: 1394124 - DNA, 25 bp, Homo sapien
cacttcggctgaggcgagtggatca

SEQ ID NO: 1394125 - DNA, 25 bp, Homo sapien
gatcactgaggtcaggacttcaaga

SEQ ID NO: 1394126 - DNA, 25 bp, Homo sapien
ctcaagatcaaggctgggcgcagtg

SEQ ID NO: 1394127 - DNA, 25 bp, Homo sapien
gtaatcgcagcacttcggctgaggc

SEQ ID NO: 1394128 - DNA, 25 bp, Homo sapien
aagaactcctctaagtacagcagta

SEQ ID NO: 1394129 - DNA, 25 bp, Homo sapien
tgtcctttgctctaaggcaaatcaa

SEQ ID NO: 1394130 - DNA, 25 bp, Homo sapien
cacctctaattagaattgaagaaag

SEQ ID NO: 1394131 - DNA, 25 bp, Homo sapien
tgctctaaggcaaatcaactttgtg

SEQ ID NO: 1394132 - DNA, 25 bp, Homo sapien
tcagctgacttctctaaaaggtttg

SEQ ID NO: 1394133 - DNA, 25 bp, Homo sapien
cagctgacttctctaaaaggtttgc

SEQ ID NO: 1394134 - DNA, 25 bp, Homo sapien
ggaaggaaaaagaggcgtcgatgag

SEQ ID NO: 1394135 - DNA, 25 bp, Homo sapien
gaggatttgcccgaactacgtagcc

SEQ ID NO: 1394136 - DNA, 25 bp, Homo sapien
aaaagtagtcactgggagcgccatc

SEQ ID NO: 1394137 - DNA, 25 bp, Homo sapien
tacgtagccagtcagcacttagacc

SEQ ID NO: 1394138 - DNA, 25 bp, Homo sapien
cactagaggactgcatgtttttccc

SEQ ID NO: 1394139 - DNA, 25 bp, Homo sapien
tgttagtgtcacagcacccatggta

SEQ ID NO: 1394140 - DNA, 25 bp, Homo sapien
taagcggcttatgatcaagaacgat

SEQ ID NO: 1394141 - DNA, 25 bp, Homo sapien
gctctagcaaagatgaccttatggc

SEQ ID NO: 1394142 - DNA, 25 bp, Homo sapien
catgttccgagactgaagctttcaa

SEQ ID NO: 1394143 - DNA, 25 bp, Homo sapien
cttgcaacaaggtttgggaatcatt

SEQ ID NO: 1394144 - DNA, 25 bp, Homo sapien
agggagggtcactcaggtttccagc

SEQ ID NO: 1394145 - DNA, 25 bp, Homo sapien
tagagggagcagaacaatcagcaat

SEQ ID NO: 1394146 - DNA, 25 bp, Homo sapien
ctgctaacaggatcaagttcgtgaa

SEQ ID NO: 1394147 - DNA, 25 bp, Homo sapien
gacctgtgtgtgtaacaagcaagcc

SEQ ID NO: 1394148 - DNA, 25 bp, Homo sapien
ttgctttattgacatactaggctta

SEQ ID NO: 1394149 - DNA, 25 bp, Homo sapien
tagcaccatggttagactagcctgc

SEQ ID NO: 1394150 - DNA, 25 bp, Homo sapien
gtgtgtgtaacaagcaagcctaata

SEQ ID NO: 1394151 - DNA, 25 bp, Homo sapien
caaacaagggatcaaatgtctctcc

SEQ ID NO: 1394152 - DNA, 25 bp, Homo sapien
taaaagctttaaagatgagcccatg

SEQ ID NO: 1394153 - DNA, 25 bp, Homo sapien
tggagtccaactgcataaactggtt

SEQ ID NO: 1394154 - DNA, 25 bp, Homo sapien
taatcaattctatgacttgcctggc

SEQ ID NO: 1394155 - DNA, 25 bp, Homo sapien
atcttattagatatgccaaaccagc

SEQ ID NO: 1394156 - DNA, 25 bp, Homo sapien
tcttattagatatgccaaaccagct

SEQ ID NO: 1394157 - DNA, 25 bp, Homo sapien
tatcttattagatatgccaaaccag

SEQ ID NO: 1394158 - DNA, 25 bp, Homo sapien
ctatcttattagatatgccaaacca

SEQ ID NO: 1394159 - DNA, 25 bp, Homo sapien
taggtcctctacatggaagaactcc

SEQ ID NO: 1394160 - DNA, 25 bp, Homo sapien
caccttctaggtcctctacatggaa

SEQ ID NO: 1394161 - DNA, 25 bp, Homo sapien
cattcctgatgccaccttctaggtc

SEQ ID NO: 1394162 - DNA, 25 bp, Homo sapien
catggaagaactccacaaacccatc

SEQ ID NO: 1394163 - DNA, 25 bp, Homo sapien
cagtactatcttggtcttattagga

SEQ ID NO: 1394164 - DNA, 25 bp, Homo sapien
ttatcctaacaaaaggacttccaga

SEQ ID NO: 1394165 - DNA, 25 bp, Homo sapien
cactactatccagagagaaggtaaa

SEQ ID NO: 1394166 - DNA, 25 bp, Homo sapien
gagttcccatgaggtaaaagacgaa

SEQ ID NO: 1394167 - DNA, 25 bp, Homo sapien
cagcctctttgtttaactagccagt

SEQ ID NO: 1394168 - DNA, 25 bp, Homo sapien
ctctttgtttaactagccagtcccg

SEQ ID NO: 1394169 - DNA, 25 bp, Homo sapien
gcctctttgtttaactagccagtcc

SEQ ID NO: 1394170 - DNA, 25 bp, Homo sapien
agcctctttgtttaactagccagtc

SEQ ID NO: 1394171 - DNA, 25 bp, Homo sapien
ttcaagtgtttagccacaaaggcac

SEQ ID NO: 1394172 - DNA, 25 bp, Homo sapien
tacgccgtcgctgaaaacatggatc

SEQ ID NO: 1394173 - DNA, 25 bp, Homo sapien
taatggttcgatgcagctttcttgg

SEQ ID NO: 1394174 - DNA, 25 bp, Homo sapien
catggatcatcactcgagacaacga

SEQ ID NO: 1394175 - DNA, 25 bp, Homo sapien
ggcctcctttgtctaaaccggcgca

SEQ ID NO: 1394176 - DNA, 25 bp, Homo sapien
taaaccggcgcaagattcgcctgcc

SEQ ID NO: 1394177 - DNA, 25 bp, Homo sapien
aaaagcatgcaggtcctcacggcct

SEQ ID NO: 1394178 - DNA, 25 bp, Homo sapien
aaagaaaagcatgcaggtcctcacg

SEQ ID NO: 1394179 - DNA, 25 bp, Homo sapien
ggtaccgagagataatctccagcga

SEQ ID NO: 1394180 - DNA, 25 bp, Homo sapien
cgccggtggcctgctcccgaaggta

SEQ ID NO: 1394181 - DNA, 25 bp, Homo sapien
ccgtcgtaaggtctccagcgccttc

SEQ ID NO: 1394182 - DNA, 25 bp, Homo sapien
gtggttgcgctgcacgccatcccca

SEQ ID NO: 1394183 - DNA, 25 bp, Homo sapien
tgttattaccagattccccgaccaa

SEQ ID NO: 1394184 - DNA, 25 bp, Homo sapien
cgagggtagtgacccgtccgtactg

SEQ ID NO: 1394185 - DNA, 25 bp, Homo sapien
cgacatgatggcgtcagcggccggg

SEQ ID NO: 1394186 - DNA, 25 bp, Homo sapien
ccagctcctcttcgggcgacatgat

SEQ ID NO: 1394187 - DNA, 25 bp, Homo sapien
ccgcgtttcttttgaggccaaacat

SEQ ID NO: 1394188 - DNA, 25 bp, Homo sapien
ccccacagtagaggttgagtccgat

SEQ ID NO: 1394189 - DNA, 25 bp, Homo sapien
tagaggttgagtccgattaccgcgt

SEQ ID NO: 1394190 - DNA, 25 bp, Homo sapien
tccttctccgtagccaaaagtcgcc

SEQ ID NO: 1394191 - DNA, 25 bp, Homo sapien
gccgccgcctggctgagaaaactgg

SEQ ID NO: 1394192 - DNA, 25 bp, Homo sapien
ccgccgcctggctgagaaaactggg

SEQ ID NO: 1394193 - DNA, 25 bp, Homo sapien
ccgccgccgcctggctgagaaaact

SEQ ID NO: 1394194 - DNA, 25 bp, Homo sapien
cgccgccgccgcctggctgagaaaa

SEQ ID NO: 1394195 - DNA, 25 bp, Homo sapien
tatcacggttttagggcggccagtc

SEQ ID NO: 1394196 - DNA, 25 bp, Homo sapien
cggggtggcgccagcgaactctttt

SEQ ID NO: 1394197 - DNA, 25 bp, Homo sapien
cggcagcttccggagggttgcgcac

SEQ ID NO: 1394198 - DNA, 25 bp, Homo sapien
gaagtgagaagtggcgagcagctcc

SEQ ID NO: 1394199 - DNA, 25 bp, Homo sapien
aaaaattagccaagcgtgtggcagg

SEQ ID NO: 1394200 - DNA, 25 bp, Homo sapien
gaccaatatggtgaactaaaaatac

SEQ ID NO: 1394201 - DNA, 25 bp, Homo sapien
ggcgcctgtaatcccagctactcag

SEQ ID NO: 1394202 - DNA, 25 bp, Homo sapien
ttagccaagcgtgtggcaggcgcct

SEQ ID NO: 1394203 - DNA, 25 bp, Homo sapien
aagatttctataatgggaggcaggg

SEQ ID NO: 1394204 - DNA, 25 bp, Homo sapien
caggatttgatgaccagttggatgt

SEQ ID NO: 1394205 - DNA, 25 bp, Homo sapien
cttgctgtctcacataggctggtgt

SEQ ID NO: 1394206 - DNA, 25 bp, Homo sapien
cagggtaagtagtgatgctttttca

SEQ ID NO: 1394207 - DNA, 25 bp, Homo sapien
tccagcctaggcaataagggcaaaa

SEQ ID NO: 1394208 - DNA, 25 bp, Homo sapien
ccagcctaggcaataagggcaaaac

SEQ ID NO: 1394209 - DNA, 25 bp, Homo sapien
cagcctaggcaataagggcaaaact

SEQ ID NO: 1394210 - DNA, 25 bp, Homo sapien
gcctaggcaataagggcaaaactct

SEQ ID NO: 1394211 - DNA, 25 bp, Homo sapien
ttattttttctgtccggtgcttgaa

SEQ ID NO: 1394212 - DNA, 25 bp, Homo sapien
gatttattccctagtgatacattat

SEQ ID NO: 1394213 - DNA, 25 bp, Homo sapien
tctgtccggtgcttgaatcaggctt

SEQ ID NO: 1394214 - DNA, 25 bp, Homo sapien
gtgatttattccctagtgatacatt

SEQ ID NO: 1394215 - DNA, 25 bp, Homo sapien
gggaggtcttcacaatcctcgactt

SEQ ID NO: 1394216 - DNA, 25 bp, Homo sapien
gactataaactcatgaagactagcc

SEQ ID NO: 1394217 - DNA, 25 bp, Homo sapien
aagactagcctgtgaatactcaggg

SEQ ID NO: 1394218 - DNA, 25 bp, Homo sapien
gaagtgtttctgtctattcaggtag

SEQ ID NO: 1394219 - DNA, 25 bp, Homo sapien
tcaaaaggaggaatacggccgggca

SEQ ID NO: 1394220 - DNA, 25 bp, Homo sapien
gccctcacagtttagaggtcaaaag

SEQ ID NO: 1394221 - DNA, 25 bp, Homo sapien
gatacatacagatgggtgccctcac

SEQ ID NO: 1394222 - DNA, 25 bp, Homo sapien
tcagccaggcaggaagatacataca

SEQ ID NO: 1394223 - DNA, 25 bp, Homo sapien
aaagaagcagatctttagaggaaat

SEQ ID NO: 1394224 - DNA, 25 bp, Homo sapien
gacccagatgacttaagcctaagaa

SEQ ID NO: 1394225 - DNA, 25 bp, Homo sapien
gacccagtgacccagatgacttaag

SEQ ID NO: 1394226 - DNA, 25 bp, Homo sapien
tagaggaaatgacccagtgacccag

SEQ ID NO: 1394227 - DNA, 25 bp, Homo sapien
tacctataatctctacacacgcatg

SEQ ID NO: 1394228 - DNA, 25 bp, Homo sapien
acttgagagaaactaagatgggagg

SEQ ID NO: 1394229 - DNA, 25 bp, Homo sapien
gatctcacccatgtataccagcctg

SEQ ID NO: 1394230 - DNA, 25 bp, Homo sapien
taaggagttaaaatggaggacaata

SEQ ID NO: 1394231 - DNA, 25 bp, Homo sapien
gggatctgccaggttatcaatttga

SEQ ID NO: 1394232 - DNA, 25 bp, Homo sapien
agggtcctttatactgtcggtcgtg

SEQ ID NO: 1394233 - DNA, 25 bp, Homo sapien
acaaggtctttgttacgaaggctgg

SEQ ID NO: 1394234 - DNA, 25 bp, Homo sapien
caaaaagccatcgtatgtctcatca

SEQ ID NO: 1394235 - DNA, 25 bp, Homo sapien
gagttctgggttgcaaaaagtacat

SEQ ID NO: 1394236 - DNA, 25 bp, Homo sapien
ataatatcccttcttatatgtatca

SEQ ID NO: 1394237 - DNA, 25 bp, Homo sapien
tgagttctgggttgcaaaaagtaca

SEQ ID NO: 1394238 - DNA, 25 bp, Homo sapien
ttctgggttgcaaaaagtacatatt

SEQ ID NO: 1394239 - DNA, 25 bp, Homo sapien
gcaactttcaatatttaccgtagag

SEQ ID NO: 1394240 - DNA, 25 bp, Homo sapien
aactttcaatatttaccgtagagag

SEQ ID NO: 1394241 - DNA, 25 bp, Homo sapien
tttcaatatttaccgtagagaggcc

SEQ ID NO: 1394242 - DNA, 25 bp, Homo sapien
tcaatatttaccgtagagaggccag

SEQ ID NO: 1394243 - DNA, 25 bp, Homo sapien
catgtgccatgcgaccggctttttt

SEQ ID NO: 1394244 - DNA, 25 bp, Homo sapien
gccatgcgaccggctttttttgttg

SEQ ID NO: 1394245 - DNA, 25 bp, Homo sapien
ccatgcgaccggctttttttgttgt

SEQ ID NO: 1394246 - DNA, 25 bp, Homo sapien
atacatgtgccatgcgaccggcttt

SEQ ID NO: 1394247 - DNA, 25 bp, Homo sapien
ttctatttggcttggtgaggccaca

SEQ ID NO: 1394248 - DNA, 25 bp, Homo sapien
tccagcttaggtgtcagtttgatat

SEQ ID NO: 1394249 - DNA, 25 bp, Homo sapien
gtcagttgtcagatgggcatcttgc

SEQ ID NO: 1394250 - DNA, 25 bp, Homo sapien
ggtccaggtctacaagcaagcaggt

SEQ ID NO: 1394251 - DNA, 25 bp, Homo sapien
caaaggtgaccataactggaatgct

SEQ ID NO: 1394252 - DNA, 25 bp, Homo sapien
tcctcagatgtggatcacctttagg

SEQ ID NO: 1394253 - DNA, 25 bp, Homo sapien
aggttacatactacaatctggaagg

SEQ ID NO: 1394254 - DNA, 25 bp, Homo sapien
ggaatgcttaacaagtaccaactga

SEQ ID NO: 1394255 - DNA, 25 bp, Homo sapien
ctatattgtaagttaccacagtggg

SEQ ID NO: 1394256 - DNA, 25 bp, Homo sapien
tgtaagttaccacagtgggatatgt

SEQ ID NO: 1394257 - DNA, 25 bp, Homo sapien
ccaactatattgtaagttaccacag

SEQ ID NO: 1394258 - DNA, 25 bp, Homo sapien
ccacagtgggatatgtgaaaattct

SEQ ID NO: 1394259 - DNA, 25 bp, Homo sapien
gacggggtctctctaagttgcctaa

SEQ ID NO: 1394260 - DNA, 25 bp, Homo sapien
ctgggcctggcccaacagaaacctt

SEQ ID NO: 1394261 - DNA, 25 bp, Homo sapien
aagtgagccttccatggcatgtgcc

SEQ ID NO: 1394262 - DNA, 25 bp, Homo sapien
agagtctcaactctggagtctcact

SEQ ID NO: 1394263 - DNA, 25 bp, Homo sapien
gtacattggacaaacctcattggct

SEQ ID NO: 1394264 - DNA, 25 bp, Homo sapien
attagcaataattgtacattggaca

SEQ ID NO: 1394265 - DNA, 25 bp, Homo sapien
taattgtacattggacaaacctcat

SEQ ID NO: 1394266 - DNA, 25 bp, Homo sapien
gcaataattgtacattggacaaacc

SEQ ID NO: 1394267 - DNA, 25 bp, Homo sapien
ttctcagtttagcagttatccttcc

SEQ ID NO: 1394268 - DNA, 25 bp, Homo sapien
tcaacgtgcctggatgtaacagttc

SEQ ID NO: 1394269 - DNA, 25 bp, Homo sapien
tttctggaagtgaccacaattcttt

SEQ ID NO: 1394270 - DNA, 25 bp, Homo sapien
tagatgacacaaaagttcctatgat

SEQ ID NO: 1394271 - DNA, 25 bp, Homo sapien
gccagaggagggtagcaaaagccaa

SEQ ID NO: 1394272 - DNA, 25 bp, Homo sapien
tttacagtaggtacaagctctagcc

SEQ ID NO: 1394273 - DNA, 25 bp, Homo sapien
ttttagccaggcaaggagcattctg

SEQ ID NO: 1394274 - DNA, 25 bp, Homo sapien
tactgtcagagaggaagcataaacc

SEQ ID NO: 1394275 - DNA, 25 bp, Homo sapien
gccatgatacaagtttctttttgag

SEQ ID NO: 1394276 - DNA, 25 bp, Homo sapien
tagccatgatacaagtttctttttg

SEQ ID NO: 1394277 - DNA, 25 bp, Homo sapien
agccatgatacaagtttctttttga

SEQ ID NO: 1394278 - DNA, 25 bp, Homo sapien
ccatgatacaagtttctttttgaga

SEQ ID NO: 1394279 - DNA, 25 bp, Homo sapien
tgaagggactaaggctcaaagggta

SEQ ID NO: 1394280 - DNA, 25 bp, Homo sapien
tagcaagaatagaaaagggtgggaa

SEQ ID NO: 1394281 - DNA, 25 bp, Homo sapien
taagaacagtactggtaggtgggaa

SEQ ID NO: 1394282 - DNA, 25 bp, Homo sapien
cacctggccccatatagagttttta

SEQ ID NO: 1394283 - DNA, 25 bp, Homo sapien
aacctgagtaaagagatgctggtcc

SEQ ID NO: 1394284 - DNA, 25 bp, Homo sapien
catctgataaaggtgtggtagcccc

SEQ ID NO: 1394285 - DNA, 25 bp, Homo sapien
tgggattacaacaagagcccctttc

SEQ ID NO: 1394286 - DNA, 25 bp, Homo sapien
taagaatagatactgccatgaggac

SEQ ID NO: 1394287 - DNA, 25 bp, Homo sapien
catggaccttaacgtcaaaccagga

SEQ ID NO: 1394288 - DNA, 25 bp, Homo sapien
tatcctgggctgtacagtttgggtc

SEQ ID NO: 1394289 - DNA, 25 bp, Homo sapien
taagttgcctctgccaaaaaacgcc

SEQ ID NO: 1394290 - DNA, 25 bp, Homo sapien
tgcaatcaggcaaaggcatgctcct

SEQ ID NO: 1394291 - DNA, 25 bp, Homo sapien
tggctagtcacaagcacgataattg

SEQ ID NO: 1394292 - DNA, 25 bp, Homo sapien
taatgtcgtccctgctcttgtaccc

SEQ ID NO: 1394293 - DNA, 25 bp, Homo sapien
tataggcgcctgagtcattgggctc

SEQ ID NO: 1394294 - DNA, 25 bp, Homo sapien
gataattgtgcactgcagtctcgtc

SEQ ID NO: 1394295 - DNA, 25 bp, Homo sapien
caaacgtctgcagaagtagaccatg

SEQ ID NO: 1394296 - DNA, 25 bp, Homo sapien
ttgccccttggatgcttactacagt

SEQ ID NO: 1394297 - DNA, 25 bp, Homo sapien
accacctagtagagtggctggcaca

SEQ ID NO: 1394298 - DNA, 25 bp, Homo sapien
tatattttcgccttgagtctccagc

SEQ ID NO: 1394299 - DNA, 25 bp, Homo sapien
taaagtgctgtagcttgatctcggc

SEQ ID NO: 1394300 - DNA, 25 bp, Homo sapien
ctgccttagcttgcggagtatctgg

SEQ ID NO: 1394301 - DNA, 25 bp, Homo sapien
cttagcttgcggagtatctgggatt

SEQ ID NO: 1394302 - DNA, 25 bp, Homo sapien
ctcctgccttagcttgcggagtatc

SEQ ID NO: 1394303 - DNA, 25 bp, Homo sapien
gtggctcacatctgtaatcctagca

SEQ ID NO: 1394304 - DNA, 25 bp, Homo sapien
aaaaaaccaacaggccaggagcagt

SEQ ID NO: 1394305 - DNA, 25 bp, Homo sapien
ctttgggaggctgaggcaggtggat

SEQ ID NO: 1394306 - DNA, 25 bp, Homo sapien
aaacaaaaaaccacagccaggcgcg

SEQ ID NO: 1394307 - DNA, 25 bp, Homo sapien
gagcagcctacacaacaaaacgaga

SEQ ID NO: 1394308 - DNA, 25 bp, Homo sapien
tagagggcattatacagacgagggc

SEQ ID NO: 1394309 - DNA, 25 bp, Homo sapien
tcagcttagtggcttgtcagcacaa

SEQ ID NO: 1394310 - DNA, 25 bp, Homo sapien
tttggcaccccaggcttcttaaggc

SEQ ID NO: 1394311 - DNA, 25 bp, Homo sapien
tggccaccagcagaaagacttgagt

SEQ ID NO: 1394312 - DNA, 25 bp, Homo sapien
gactaggcttaggtgtcaagaaacc

SEQ ID NO: 1394313 - DNA, 25 bp, Homo sapien
caggtttccagcaatgcagattggc

SEQ ID NO: 1394314 - DNA, 25 bp, Homo sapien
tttgtacgttacattcacaggcagc

SEQ ID NO: 1394315 - DNA, 25 bp, Homo sapien
ggagtttcttttatctgacaccagg

SEQ ID NO: 1394316 - DNA, 25 bp, Homo sapien
gttgagttctcaactagctctgcag

SEQ ID NO: 1394317 - DNA, 25 bp, Homo sapien
catcagccacgtggttaagaaggat

SEQ ID NO: 1394318 - DNA, 25 bp, Homo sapien
aaaaggttcaaggtcttggtgctca

SEQ ID NO: 1394319 - DNA, 25 bp, Homo sapien
tgtgtggaggccagaaccagaccac

SEQ ID NO: 1394320 - DNA, 25 bp, Homo sapien
ggcatggccacagctacttgcaaag

SEQ ID NO: 1394321 - DNA, 25 bp, Homo sapien
gtgactgtgtggaggccagaaccag

SEQ ID NO: 1394322 - DNA, 25 bp, Homo sapien
agatcaaaataactggaggtttcca

SEQ ID NO: 1394323 - DNA, 25 bp, Homo sapien
tggattttggaatgaccactccttg

SEQ ID NO: 1394324 - DNA, 25 bp, Homo sapien
ggagaaaggcatatacacacctcat

SEQ ID NO: 1394325 - DNA, 25 bp, Homo sapien
tgctggtgacgagcgaggactttct

SEQ ID NO: 1394326 - DNA, 25 bp, Homo sapien
agcttgctggtgacgagcgaggact

SEQ ID NO: 1394327 - DNA, 25 bp, Homo sapien
caagcttgctggtgacgagcgagga

SEQ ID NO: 1394328 - DNA, 25 bp, Homo sapien
tggtgacgagcgaggactttctctg

SEQ ID NO: 1394329 - DNA, 25 bp, Homo sapien
gagaagcacactccaatgtaatgat

SEQ ID NO: 1394330 - DNA, 25 bp, Homo sapien
agagaagcacactccaatgtaatga

SEQ ID NO: 1394331 - DNA, 25 bp, Homo sapien
gaagcacactccaatgtaatgattt

SEQ ID NO: 1394332 - DNA, 25 bp, Homo sapien
gcacactccaatgtaatgatttata

SEQ ID NO: 1394333 - DNA, 25 bp, Homo sapien
gatcaggagctacatggctatgaaa

SEQ ID NO: 1394334 - DNA, 25 bp, Homo sapien
atataatccctcagtcagctttagg

SEQ ID NO: 1394335 - DNA, 25 bp, Homo sapien
ttgggaactaaaaatctgatcagga

SEQ ID NO: 1394336 - DNA, 25 bp, Homo sapien
ataatataatccctcagtcagcttt

SEQ ID NO: 1394337 - DNA, 25 bp, Homo sapien
tatctctaatgcttaaaaagtgcac

SEQ ID NO: 1394338 - DNA, 25 bp, Homo sapien
taggccttaatttcctacatgggaa

SEQ ID NO: 1394339 - DNA, 25 bp, Homo sapien
gaaatcaggagggaattgataccac

SEQ ID NO: 1394340 - DNA, 25 bp, Homo sapien
aaagtgcacaatcctaaaacctcca

SEQ ID NO: 1394341 - DNA, 25 bp, Homo sapien
gagggtaagagactatgccccatac

SEQ ID NO: 1394342 - DNA, 25 bp, Homo sapien
aaattcgcctctacttctgttcaac

SEQ ID NO: 1394343 - DNA, 25 bp, Homo sapien
cattcgaagaacctcctttagctcc

SEQ ID NO: 1394344 - DNA, 25 bp, Homo sapien
aaaggatccagtagaacctctacag

SEQ ID NO: 1394345 - DNA, 25 bp, Homo sapien
ttcagctctctcaggcagaatacct

SEQ ID NO: 1394346 - DNA, 25 bp, Homo sapien
tctggagtctcttcatgaggaagtc

SEQ ID NO: 1394347 - DNA, 25 bp, Homo sapien
tgaggaagtcggagcctccaggctt

SEQ ID NO: 1394348 - DNA, 25 bp, Homo sapien
caggcttttgtcctaggcttgggta

SEQ ID NO: 1394349 - DNA, 25 bp, Homo sapien
cacctgttaggtctccctgtggagg

SEQ ID NO: 1394350 - DNA, 25 bp, Homo sapien
ctcatgaattcactacccgcctggg

SEQ ID NO: 1394351 - DNA, 25 bp, Homo sapien
ccagggacctgtgcgtattgggcta

SEQ ID NO: 1394352 - DNA, 25 bp, Homo sapien
gatctccacctgagtaatggcacag

SEQ ID NO: 1394353 - DNA, 25 bp, Homo sapien
ctacaaaccaataacacacatcaca

SEQ ID NO: 1394354 - DNA, 25 bp, Homo sapien
aaaccaataacacacatcacaccca

SEQ ID NO: 1394355 - DNA, 25 bp, Homo sapien
taacacacatcacacccaagaccac

SEQ ID NO: 1394356 - DNA, 25 bp, Homo sapien
catcacacccaagaccaccagccat

SEQ ID NO: 1394357 - DNA, 25 bp, Homo sapien
acagcgtccaaggtttgagcggtag

SEQ ID NO: 1394358 - DNA, 25 bp, Homo sapien
tattggccaatcaggaagagtacag

SEQ ID NO: 1394359 - DNA, 25 bp, Homo sapien
gagcggtaggcctattggccaatca

SEQ ID NO: 1394360 - DNA, 25 bp, Homo sapien
cacgtccatgctcggccaattatag

SEQ ID NO: 1394361 - DNA, 25 bp, Homo sapien
ggtctcctccgcagggttctcttct

SEQ ID NO: 1394362 - DNA, 25 bp, Homo sapien
tccgcagggttctcttcttcttgtt

SEQ ID NO: 1394363 - DNA, 25 bp, Homo sapien
ttctcctcgccggtctcctccgcag

SEQ ID NO: 1394364 - DNA, 25 bp, Homo sapien
tcgccggtctcctccgcagggttct

SEQ ID NO: 1394365 - DNA, 25 bp, Homo sapien
caacctgcgctgctgcttcggctcc

SEQ ID NO: 1394366 - DNA, 25 bp, Homo sapien
gggaaacggggacaacctgcgctgc

SEQ ID NO: 1394367 - DNA, 25 bp, Homo sapien
acctgcgctgctgcttcggctcctg

SEQ ID NO: 1394368 - DNA, 25 bp, Homo sapien
gaaacggggacaacctgcgctgctg

SEQ ID NO: 1394369 - DNA, 25 bp, Homo sapien
cagtcaaaatggcggcccttgcccg

SEQ ID NO: 1394370 - DNA, 25 bp, Homo sapien
ctcagtcaaaatggcggcccttgcc

SEQ ID NO: 1394371 - DNA, 25 bp, Homo sapien
tcagtcaaaatggcggcccttgccc

SEQ ID NO: 1394372 - DNA, 25 bp, Homo sapien
agtcaaaatggcggcccttgcccgt

SEQ ID NO: 1394373 - DNA, 25 bp, Homo sapien
tgaaggtatcctcgtcttactgaga

SEQ ID NO: 1394374 - DNA, 25 bp, Homo sapien
gttagagacaacacatggactggct

SEQ ID NO: 1394375 - DNA, 25 bp, Homo sapien
tcctattagagagccagactgaagc

SEQ ID NO: 1394376 - DNA, 25 bp, Homo sapien
tataatggtcaagaagcactatccc

SEQ ID NO: 1394377 - DNA, 25 bp, Homo sapien
taaggtctgcttataatggtcaagg

SEQ ID NO: 1394378 - DNA, 25 bp, Homo sapien
tagcaggatatgcaattccagagac

SEQ ID NO: 1394379 - DNA, 25 bp, Homo sapien
tgctgattgcatgaacgaggtgttg

SEQ ID NO: 1394380 - DNA, 25 bp, Homo sapien
caaggtctatggagaagccctgaag

SEQ ID NO: 1394381 - DNA, 25 bp, Homo sapien
taagatttattgaaggctgccagca

SEQ ID NO: 1394382 - DNA, 25 bp, Homo sapien
tctactaggttctttgcgatgcgct

SEQ ID NO: 1394383 - DNA, 25 bp, Homo sapien
cacatcagaggagtgggctagcacc

SEQ ID NO: 1394384 - DNA, 25 bp, Homo sapien
tcgcttgtccatacgctgagggtca

SEQ ID NO: 1394385 - DNA, 25 bp, Homo sapien
cagtgagtagctctatccatgtttg

SEQ ID NO: 1394386 - DNA, 25 bp, Homo sapien
ttgggctgtctgactttagcagtac

SEQ ID NO: 1394387 - DNA, 25 bp, Homo sapien
ccagtaaaacatcacctgttgggct

SEQ ID NO: 1394388 - DNA, 25 bp, Homo sapien
gtgtttcagagtttcatccagtaaa

SEQ ID NO: 1394389 - DNA, 25 bp, Homo sapien
cagtcattccagaaagatgtgtacc

SEQ ID NO: 1394390 - DNA, 25 bp, Homo sapien
tagtcgcttcttacgcatggtcggg

SEQ ID NO: 1394391 - DNA, 25 bp, Homo sapien
ccctcgcaggcctgatgatatgcag

SEQ ID NO: 1394392 - DNA, 25 bp, Homo sapien
gttccagatagattcgaccccgcat

SEQ ID NO: 1394393 - DNA, 25 bp, Homo sapien
tcctcctagatatgtattaatttga

SEQ ID NO: 1394394 - DNA, 25 bp, Homo sapien
cctcctagatatgtattaatttgaa

SEQ ID NO: 1394395 - DNA, 25 bp, Homo sapien
tttgagcttttaatcctcctagata

SEQ ID NO: 1394396 - DNA, 25 bp, Homo sapien
gcttttaatcctcctagatatgtat

SEQ ID NO: 1394397 - DNA, 25 bp, Homo sapien
aatatccggcttcctatttactaat

SEQ ID NO: 1394398 - DNA, 25 bp, Homo sapien
tccggcttcctatttactaattcaa

SEQ ID NO: 1394399 - DNA, 25 bp, Homo sapien
atccggcttcctatttactaattca

SEQ ID NO: 1394400 - DNA, 25 bp, Homo sapien
tatccggcttcctatttactaattc

SEQ ID NO: 1394401 - DNA, 25 bp, Homo sapien
caaaactcctctttgtagttaagcg

SEQ ID NO: 1394402 - DNA, 25 bp, Homo sapien
cactgctctgttgaaaagaaccaat

SEQ ID NO: 1394403 - DNA, 25 bp, Homo sapien
taacattgtttacttctccactcca

SEQ ID NO: 1394404 - DNA, 25 bp, Homo sapien
ggttctgcacctgggtgtgcccata

SEQ ID NO: 1394405 - DNA, 25 bp, Homo sapien
tcccctgtactgtgggtacatatga

SEQ ID NO: 1394406 - DNA, 25 bp, Homo sapien
aaacaaacacctgtataactacaag

SEQ ID NO: 1394407 - DNA, 25 bp, Homo sapien
tattgtcatctatagtaatatttag

SEQ ID NO: 1394408 - DNA, 25 bp, Homo sapien
actacaagaaagagactggatttag

SEQ ID NO: 1394409 - DNA, 25 bp, Homo sapien
agttaagagttattacctcctggcg

SEQ ID NO: 1394410 - DNA, 25 bp, Homo sapien
ggttattccagttgcacatcactga

SEQ ID NO: 1394411 - DNA, 25 bp, Homo sapien
catgactgttggctttcaaactact

SEQ ID NO: 1394412 - DNA, 25 bp, Homo sapien
catgtaactggatgttcagctctca

SEQ ID NO: 1394413 - DNA, 25 bp, Homo sapien
cctaagcacataatgggtgtcctca

SEQ ID NO: 1394414 - DNA, 25 bp, Homo sapien
tgtaactggccttttgtaactacta

SEQ ID NO: 1394415 - DNA, 25 bp, Homo sapien
tgctgttgatggaccttcgggttac

SEQ ID NO: 1394416 - DNA, 25 bp, Homo sapien
tgtctctccagctagaatgcaagtt

SEQ ID NO: 1394417 - DNA, 25 bp, Homo sapien
gagccaccgcgtaatccaactgttg

SEQ ID NO: 1394418 - DNA, 25 bp, Homo sapien
gcgtaatccaactgttgatatttgc

SEQ ID NO: 1394419 - DNA, 25 bp, Homo sapien
gccaccgcgtaatccaactgttgat

SEQ ID NO: 1394420 - DNA, 25 bp, Homo sapien
caccgcgtaatccaactgttgatat

SEQ ID NO: 1394421 - DNA, 25 bp, Homo sapien
tagagcacaattctaagaccaattt

SEQ ID NO: 1394422 - DNA, 25 bp, Homo sapien
gatagcctagcaaacctaactgcat

SEQ ID NO: 1394423 - DNA, 25 bp, Homo sapien
gatggttagagcacaattctaagac

SEQ ID NO: 1394424 - DNA, 25 bp, Homo sapien
taatagtctttgagatagcctagca

SEQ ID NO: 1394425 - DNA, 25 bp, Homo sapien
gtaaggcggatatccttagagtctc

SEQ ID NO: 1394426 - DNA, 25 bp, Homo sapien
tatttcagtgcgacgggcccggtga

SEQ ID NO: 1394427 - DNA, 25 bp, Homo sapien
tacttcttccataagagtaaggcgg

SEQ ID NO: 1394428 - DNA, 25 bp, Homo sapien
tcttgcttatttcagtgcgacgggc

SEQ ID NO: 1394429 - DNA, 25 bp, Homo sapien
tactaaacatccatacaaataggaa

SEQ ID NO: 1394430 - DNA, 25 bp, Homo sapien
caaatgagtaattctaaagtccagt

SEQ ID NO: 1394431 - DNA, 25 bp, Homo sapien
ttggacttcacagatggcactgaca

SEQ ID NO: 1394432 - DNA, 25 bp, Homo sapien
ggcactgacaaaagatcaaatgagt

SEQ ID NO: 1394433 - DNA, 25 bp, Homo sapien
tcctgatccttcgatgcagagaagg

SEQ ID NO: 1394434 - DNA, 25 bp, Homo sapien
aacttagccacgcagagagcacaaa

SEQ ID NO: 1394435 - DNA, 25 bp, Homo sapien
tactcctgggttatggctggacgca

SEQ ID NO: 1394436 - DNA, 25 bp, Homo sapien
gacgcaggctgtagcttgtgctgta

SEQ ID NO: 1394437 - DNA, 25 bp, Homo sapien
tatgtaccagcattccctatagcgc

SEQ ID NO: 1394438 - DNA, 25 bp, Homo sapien
tccctatagcgcttattactgacaa

SEQ ID NO: 1394439 - DNA, 25 bp, Homo sapien
gaatacatttctaccatcgcatatg

SEQ ID NO: 1394440 - DNA, 25 bp, Homo sapien
tgacaaacccatggatgtgtatgtt

SEQ ID NO: 1394441 - DNA, 25 bp, Homo sapien
taaggaccacaatatgacagtcagc

SEQ ID NO: 1394442 - DNA, 25 bp, Homo sapien
gaaaaatggcattagagggccttaa

SEQ ID NO: 1394443 - DNA, 25 bp, Homo sapien
cagcacaatgacaaaagagccagtt

SEQ ID NO: 1394444 - DNA, 25 bp, Homo sapien
aaagcatagtaaaggtaaagcacca

SEQ ID NO: 1394445 - DNA, 25 bp, Homo sapien
atatatgttcctttggttcactaaa

SEQ ID NO: 1394446 - DNA, 25 bp, Homo sapien
tatatgttcctttggttcactaaac

SEQ ID NO: 1394447 - DNA, 25 bp, Homo sapien
atatgttcctttggttcactaaact

SEQ ID NO: 1394448 - DNA, 25 bp, Homo sapien
atatctgggtttcttaaaagtagag

SEQ ID NO: 1394449 - DNA, 25 bp, Homo sapien
ctagcataactatatctgggtttct

SEQ ID NO: 1394450 - DNA, 25 bp, Homo sapien
tatatctgggtttcttaaaagtaga

SEQ ID NO: 1394451 - DNA, 25 bp, Homo sapien
gcataactatatctgggtttcttaa

SEQ ID NO: 1394452 - DNA, 25 bp, Homo sapien
ggctgctgaaagtatgtacttgcaa

SEQ ID NO: 1394453 - DNA, 25 bp, Homo sapien
caaaatgtataatcttcagtagggc

SEQ ID NO: 1394454 - DNA, 25 bp, Homo sapien
ttaacatcttccaatggctgctgaa

SEQ ID NO: 1394455 - DNA, 25 bp, Homo sapien
atcttccaatggctgctgaaagtat

SEQ ID NO: 1394456 - DNA, 25 bp, Homo sapien
tctttggaagattttactggttgat

SEQ ID NO: 1394457 - DNA, 25 bp, Homo sapien
gacttctcttccgattttctttgga

SEQ ID NO: 1394458 - DNA, 25 bp, Homo sapien
catgttgacttctcttccgattttc

SEQ ID NO: 1394459 - DNA, 25 bp, Homo sapien
tcccagattcatgttgacttctctt

SEQ ID NO: 1394460 - DNA, 25 bp, Homo sapien
acatatcaagttcagatgttttatt

SEQ ID NO: 1394461 - DNA, 25 bp, Homo sapien
tgttttgctttcagacatatcaagt

SEQ ID NO: 1394462 - DNA, 25 bp, Homo sapien
cagatgttttattgactaactgctc

SEQ ID NO: 1394463 - DNA, 25 bp, Homo sapien
atgttttattgactaactgctcaac

SEQ ID NO: 1394464 - DNA, 25 bp, Homo sapien
tggactttctttagacctcataatt

SEQ ID NO: 1394465 - DNA, 25 bp, Homo sapien
ctggactttctttagacctcataat

SEQ ID NO: 1394466 - DNA, 25 bp, Homo sapien
ccattttagtttcaatgtccaaatc

SEQ ID NO: 1394467 - DNA, 25 bp, Homo sapien
tccattttagtttcaatgtccaaat

SEQ ID NO: 1394468 - DNA, 25 bp, Homo sapien
cttccattttagtttcaatgtccaa

SEQ ID NO: 1394469 - DNA, 25 bp, Homo sapien
tcttccattttagtttcaatgtcca

SEQ ID NO: 1394470 - DNA, 25 bp, Homo sapien
caaatataactccttcacaatcacc

SEQ ID NO: 1394471 - DNA, 25 bp, Homo sapien
ggaggctggtaatctgggggtgtaa

SEQ ID NO: 1394472 - DNA, 25 bp, Homo sapien
aatattttccattcgttctctctca

SEQ ID NO: 1394473 - DNA, 25 bp, Homo sapien
ttttccattcgttctctctcagtgg

SEQ ID NO: 1394474 - DNA, 25 bp, Homo sapien
catggtcaaacaaacatcattaggt

SEQ ID NO: 1394475 - DNA, 25 bp, Homo sapien
gctagattcgttgctttggttttta

SEQ ID NO: 1394476 - DNA, 25 bp, Homo sapien
cttatgaagtccatgagtggtccat

SEQ ID NO: 1394477 - DNA, 25 bp, Homo sapien
catgagtggtccattattggtgtat

SEQ ID NO: 1394478 - DNA, 25 bp, Homo sapien
gtccatgagtggtccattattggtg

SEQ ID NO: 1394479 - DNA, 25 bp, Homo sapien
gaagtccatgagtggtccattattg

SEQ ID NO: 1394480 - DNA, 25 bp, Homo sapien
taagggaggcaacatacctcagcag

SEQ ID NO: 1394481 - DNA, 25 bp, Homo sapien
gaaggaactccttagcaggcagata

SEQ ID NO: 1394482 - DNA, 25 bp, Homo sapien
taaccacaggcaagccacttaagcc

SEQ ID NO: 1394483 - DNA, 25 bp, Homo sapien
tcagcagagtggctaacacagggca

SEQ ID NO: 1394484 - DNA, 25 bp, Homo sapien
gaggatcttctgggtttgtgtatac

SEQ ID NO: 1394485 - DNA, 25 bp, Homo sapien
ctgaggatcttctgggtttgtgtat

SEQ ID NO: 1394486 - DNA, 25 bp, Homo sapien
tgaggatcttctgggtttgtgtata

SEQ ID NO: 1394487 - DNA, 25 bp, Homo sapien
tagaaggcatgtgaaactaatgaat

SEQ ID NO: 1394488 - DNA, 25 bp, Homo sapien
taagttaacacgtgttattaataca

SEQ ID NO: 1394489 - DNA, 25 bp, Homo sapien
cagactgacctacactcaagttagt

SEQ ID NO: 1394490 - DNA, 25 bp, Homo sapien
tgttttactacatcataactccagt

SEQ ID NO: 1394491 - DNA, 25 bp, Homo sapien
tgtaaagcatcataacatcctagca

SEQ ID NO: 1394492 - DNA, 25 bp, Homo sapien
ttctgtaaagcatcataacatccta

SEQ ID NO: 1394493 - DNA, 25 bp, Homo sapien
tttttctgtaaagcatcataacatc

SEQ ID NO: 1394494 - DNA, 25 bp, Homo sapien
taaagcatcataacatcctagcatc

SEQ ID NO: 1394495 - DNA, 25 bp, Homo sapien
ataattttctctctttaggtattct

SEQ ID NO: 1394496 - DNA, 25 bp, Homo sapien
ctctctttaggtattcttttacttg

SEQ ID NO: 1394497 - DNA, 25 bp, Homo sapien
tctctttaggtattcttttacttgc

SEQ ID NO: 1394498 - DNA, 25 bp, Homo sapien
gtagatcctgggcaatttttatctt

SEQ ID NO: 1394499 - DNA, 25 bp, Homo sapien
tctctcagtattttgacacaaagat

SEQ ID NO: 1394500 - DNA, 25 bp, Homo sapien
atttcactaactgtgtagatcctgg

SEQ ID NO: 1394501 - DNA, 25 bp, Homo sapien
actgtgtagatcctgggcaattttt

SEQ ID NO: 1394502 - DNA, 25 bp, Homo sapien
tatcttgttccataagcgcattctg

SEQ ID NO: 1394503 - DNA, 25 bp, Homo sapien
cttgttccataagcgcattctggga

SEQ ID NO: 1394504 - DNA, 25 bp, Homo sapien
gttgatatcttattgggaaatacca

SEQ ID NO: 1394505 - DNA, 25 bp, Homo sapien
agatatcttgttccataagcgcatt

SEQ ID NO: 1394506 - DNA, 25 bp, Homo sapien
agtcctctgcaactgggcagtggcc

SEQ ID NO: 1394507 - DNA, 25 bp, Homo sapien
tcctctgcaactgggcagtggccat

SEQ ID NO: 1394508 - DNA, 25 bp, Homo sapien
gtcctctgcaactgggcagtggcca

SEQ ID NO: 1394509 - DNA, 25 bp, Homo sapien
tctgataaagtattttctttaattc

SEQ ID NO: 1394510 - DNA, 25 bp, Homo sapien
cttcttctgataaagtattttcttt

SEQ ID NO: 1394511 - DNA, 25 bp, Homo sapien
tcttctgataaagtattttctttaa

SEQ ID NO: 1394512 - DNA, 25 bp, Homo sapien
ctgataaagtattttctttaattca

SEQ ID NO: 1394513 - DNA, 25 bp, Homo sapien
gcgggcgccggagaccagaagagct

SEQ ID NO: 1394514 - DNA, 25 bp, Homo sapien
gggcgggcgccggagaccagaagag

SEQ ID NO: 1394515 - DNA, 25 bp, Homo sapien
gagaccagaagagctgcacgaggct

SEQ ID NO: 1394516 - DNA, 25 bp, Homo sapien
agctgcacgaggctgcacgcgctgt

SEQ ID NO: 1394517 - DNA, 25 bp, Homo sapien
gttgggaaacggcactgacagactt

SEQ ID NO: 1394518 - DNA, 25 bp, Homo sapien
ggagaaaacagccactagatatgaa

SEQ ID NO: 1394519 - DNA, 25 bp, Homo sapien
tctgggttgctacaaacctgcaatt

SEQ ID NO: 1394520 - DNA, 25 bp, Homo sapien
catgggtgcggcttttgacatccta

SEQ ID NO: 1394521 - DNA, 25 bp, Homo sapien
ttctggtaacttagagtatgcatac

SEQ ID NO: 1394522 - DNA, 25 bp, Homo sapien
tttctggtaacttagagtatgcata

SEQ ID NO: 1394523 - DNA, 25 bp, Homo sapien
ctttctggtaacttagagtatgcat

SEQ ID NO: 1394524 - DNA, 25 bp, Homo sapien
tcaccacacatatagactactagaa

SEQ ID NO: 1394525 - DNA, 25 bp, Homo sapien
ttagtttagggctttatcaccacac

SEQ ID NO: 1394526 - DNA, 25 bp, Homo sapien
tttatcaccacacatatagactact

SEQ ID NO: 1394527 - DNA, 25 bp, Homo sapien
gactactagaatatcttttagattg

SEQ ID NO: 1394528 - DNA, 25 bp, Homo sapien
ctaatgtaggggagaacatatgttt

SEQ ID NO: 1394529 - DNA, 25 bp, Homo sapien
ttttactaatgtaggggagaacata

SEQ ID NO: 1394530 - DNA, 25 bp, Homo sapien
gggctgagatctctataacaaaaga

SEQ ID NO: 1394531 - DNA, 25 bp, Homo sapien
ggctgagatctctataacaaaagag

SEQ ID NO: 1394532 - DNA, 25 bp, Homo sapien
tagggtgtcctgaaccccgtcacta

SEQ ID NO: 1394533 - DNA, 25 bp, Homo sapien
acagcaggcagaaggtcagagtcac

SEQ ID NO: 1394534 - DNA, 25 bp, Homo sapien
tcatagggcaaagtgtgaacaagct

SEQ ID NO: 1394535 - DNA, 25 bp, Homo sapien
atataagttttacacgacacgaggg

SEQ ID NO: 1394536 - DNA, 25 bp, Homo sapien
tcttagacatctgcatagcagggac

SEQ ID NO: 1394537 - DNA, 25 bp, Homo sapien
ctagagcagttgtaaggaagatcca

SEQ ID NO: 1394538 - DNA, 25 bp, Homo sapien
agatacaatctgagtccttaggaca

SEQ ID NO: 1394539 - DNA, 25 bp, Homo sapien
tacacgtggcgttttgaatcctctt

SEQ ID NO: 1394540 - DNA, 25 bp, Homo sapien
gtatttttaagccatcaagttacaa

SEQ ID NO: 1394541 - DNA, 25 bp, Homo sapien
taagtatttttaagccatcaagtta

SEQ ID NO: 1394542 - DNA, 25 bp, Homo sapien
agtatttttaagccatcaagttaca

SEQ ID NO: 1394543 - DNA, 25 bp, Homo sapien
tatttttaagccatcaagttacaaa

SEQ ID NO: 1394544 - DNA, 25 bp, Homo sapien
cagattgttttaggttgaacaattt

SEQ ID NO: 1394545 - DNA, 25 bp, Homo sapien
tacagttatatctatagtacattac

SEQ ID NO: 1394546 - DNA, 25 bp, Homo sapien
tttacttagcaaactttatcctgag

SEQ ID NO: 1394547 - DNA, 25 bp, Homo sapien
ttttgtacagttatatctatagtac

SEQ ID NO: 1394548 - DNA, 25 bp, Homo sapien
tcctggcctcaagttgatatgcctg

SEQ ID NO: 1394549 - DNA, 25 bp, Homo sapien
tggcctcaagttgatatgcctgcct

SEQ ID NO: 1394550 - DNA, 25 bp, Homo sapien
gccttggcctcccaagtactgggat

SEQ ID NO: 1394551 - DNA, 25 bp, Homo sapien
ggcctcaagttgatatgcctgcctt

SEQ ID NO: 1394552 - DNA, 25 bp, Homo sapien
cagtaaatacacattaatcatgaca

SEQ ID NO: 1394553 - DNA, 25 bp, Homo sapien
aattaagttaagagaaagtgcttca

SEQ ID NO: 1394554 - DNA, 25 bp, Homo sapien
taagttaagagaaagtgcttcatat

SEQ ID NO: 1394555 - DNA, 25 bp, Homo sapien
agtaaatacacattaatcatgacac

SEQ ID NO: 1394556 - DNA, 25 bp, Homo sapien
tgggtaagagggaaagctagcaatc

SEQ ID NO: 1394557 - DNA, 25 bp, Homo sapien
ttctgggtaagagggaaagctagca

SEQ ID NO: 1394558 - DNA, 25 bp, Homo sapien
taagagggaaagctagcaatcccac

SEQ ID NO: 1394559 - DNA, 25 bp, Homo sapien
ggtaagagggaaagctagcaatccc

SEQ ID NO: 1394560 - DNA, 25 bp, Homo sapien
cttgccatccgaatatatccttctt

SEQ ID NO: 1394561 - DNA, 25 bp, Homo sapien
ttcttgccatccgaatatatccttc

SEQ ID NO: 1394562 - DNA, 25 bp, Homo sapien
ttatttcttgccatccgaatatatc

SEQ ID NO: 1394563 - DNA, 25 bp, Homo sapien
atttcttgccatccgaatatatcct

SEQ ID NO: 1394564 - DNA, 25 bp, Homo sapien
tcagccctcattggacattttgcag

SEQ ID NO: 1394565 - DNA, 25 bp, Homo sapien
gaaaatgcctagtgtgtctggagag

SEQ ID NO: 1394566 - DNA, 25 bp, Homo sapien
tttttgcatgcagtggagaacctaa

SEQ ID NO: 1394567 - DNA, 25 bp, Homo sapien
gaaattgtcaatggctctccatgcc

SEQ ID NO: 1394568 - DNA, 25 bp, Homo sapien
cttaactgataagtggtgtgtgttc

SEQ ID NO: 1394569 - DNA, 25 bp, Homo sapien
gccatgagccacgtgcatataagat

SEQ ID NO: 1394570 - DNA, 25 bp, Homo sapien
gcccaagctgggatcagtgatcttt

SEQ ID NO: 1394571 - DNA, 25 bp, Homo sapien
ggaccacaaatatgcaccagcatgc

SEQ ID NO: 1394572 - DNA, 25 bp, Homo sapien
ctgaagctagagttgagtgatgtga

SEQ ID NO: 1394573 - DNA, 25 bp, Homo sapien
ccactaagcctggttggacatacta

SEQ ID NO: 1394574 - DNA, 25 bp, Homo sapien
tctgtcactgaagctagagttgagt

SEQ ID NO: 1394575 - DNA, 25 bp, Homo sapien
taagcctggttggacatactatgtt

SEQ ID NO: 1394576 - DNA, 25 bp, Homo sapien
ccgtgctgtacctttgattcccaga

SEQ ID NO: 1394577 - DNA, 25 bp, Homo sapien
gatgacttgatgtatgtgcacattg

SEQ ID NO: 1394578 - DNA, 25 bp, Homo sapien
cagaatctgttcatcttatacctga

SEQ ID NO: 1394579 - DNA, 25 bp, Homo sapien
aagtttacactctttgatcagcatc

SEQ ID NO: 1394580 - DNA, 25 bp, Homo sapien
tgtttttcacaagccagtattcttt

SEQ ID NO: 1394581 - DNA, 25 bp, Homo sapien
gatcaccatagccaaccacaagtac

SEQ ID NO: 1394582 - DNA, 25 bp, Homo sapien
caagtacaccatgattcacattctg

SEQ ID NO: 1394583 - DNA, 25 bp, Homo sapien
gagtacaggatggttcatagtagac

SEQ ID NO: 1394584 - DNA, 25 bp, Homo sapien
aaagcatgtgctcacattgtgtcct

SEQ ID NO: 1394585 - DNA, 25 bp, Homo sapien
gctaattgtaacctcaatctcctag

SEQ ID NO: 1394586 - DNA, 25 bp, Homo sapien
gcaactctacattcagcaagtctat

SEQ ID NO: 1394587 - DNA, 25 bp, Homo sapien
tcataattttgagggtgagctacaa

SEQ ID NO: 1394588 - DNA, 25 bp, Homo sapien
gagataagggtctcgcgatgttgct

SEQ ID NO: 1394589 - DNA, 25 bp, Homo sapien
gaaccaccgtgctcagccaatatcc

SEQ ID NO: 1394590 - DNA, 25 bp, Homo sapien
ccgtgctcagccaatatcctttctt

SEQ ID NO: 1394591 - DNA, 25 bp, Homo sapien
agagataagggtctcgcgatgttgc

SEQ ID NO: 1394592 - DNA, 25 bp, Homo sapien
cacgatattttgagtcatattgaca

SEQ ID NO: 1394593 - DNA, 25 bp, Homo sapien
tattggccacagcttctttcaggac

SEQ ID NO: 1394594 - DNA, 25 bp, Homo sapien
cagtgtactttgaacatgtggcagc

SEQ ID NO: 1394595 - DNA, 25 bp, Homo sapien
ggatgacgcgcatctacaccaacag

SEQ ID NO: 1394596 - DNA, 25 bp, Homo sapien
gctacttccttatttgtactactga

SEQ ID NO: 1394597 - DNA, 25 bp, Homo sapien
aacagaactcttgagaatttaagaa

SEQ ID NO: 1394598 - DNA, 25 bp, Homo sapien
cagtcagtcagtggataacatgaga

SEQ ID NO: 1394599 - DNA, 25 bp, Homo sapien
gtttttaagcatgaatgctacttcc

SEQ ID NO: 1394600 - DNA, 25 bp, Homo sapien
tcagttgagcaatccaccaggttct

SEQ ID NO: 1394601 - DNA, 25 bp, Homo sapien
ggaaagccgttgtcatgaagccacc

SEQ ID NO: 1394602 - DNA, 25 bp, Homo sapien
ctttgtagggataggaagcgtctga

SEQ ID NO: 1394603 - DNA, 25 bp, Homo sapien
gagtcgatgcccttgttatcaatga

SEQ ID NO: 1394604 - DNA, 25 bp, Homo sapien
ccgattagggtttgacttatatgtg

SEQ ID NO: 1394605 - DNA, 25 bp, Homo sapien
gacttatatgtgatatttctctgcc

SEQ ID NO: 1394606 - DNA, 25 bp, Homo sapien
ctgccactggctgggaactctcagg

SEQ ID NO: 1394607 - DNA, 25 bp, Homo sapien
cagaatcaggcaatatccgattagg

SEQ ID NO: 1394608 - DNA, 25 bp, Homo sapien
tccaggttgtgaagcatcacaaact

SEQ ID NO: 1394609 - DNA, 25 bp, Homo sapien
cccagatcgtatgagtgcattccca

SEQ ID NO: 1394610 - DNA, 25 bp, Homo sapien
tcccaggtggttcatgcccagatcg

SEQ ID NO: 1394611 - DNA, 25 bp, Homo sapien
tttcccagatgagacgtcgtactgc

SEQ ID NO: 1394612 - DNA, 25 bp, Homo sapien
tccacaacattggtccgggcaacgg

SEQ ID NO: 1394613 - DNA, 25 bp, Homo sapien
taaagcacaaacataaggcctgaaa

SEQ ID NO: 1394614 - DNA, 25 bp, Homo sapien
taccaatggaataggatatagagcc

SEQ ID NO: 1394615 - DNA, 25 bp, Homo sapien
ttcatgcggaactacaaaagtcctt

SEQ ID NO: 1394616 - DNA, 25 bp, Homo sapien
tgatccagggtaggatctttatgca

SEQ ID NO: 1394617 - DNA, 25 bp, Homo sapien
tggtgatccagggtaggatctttat

SEQ ID NO: 1394618 - DNA, 25 bp, Homo sapien
atgccagtggtgatccagggtagga

SEQ ID NO: 1394619 - DNA, 25 bp, Homo sapien
ccagtggtgatccagggtaggatct

SEQ ID NO: 1394620 - DNA, 25 bp, Homo sapien
agagcacacaaaccagccgtttcat

SEQ ID NO: 1394621 - DNA, 25 bp, Homo sapien
aagagcacacaaaccagccgtttca

SEQ ID NO: 1394622 - DNA, 25 bp, Homo sapien
caagagcacacaaaccagccgtttc

SEQ ID NO: 1394623 - DNA, 25 bp, Homo sapien
gttgctcccacagtaagagtccttg

SEQ ID NO: 1394624 - DNA, 25 bp, Homo sapien
gtgatagaaccagcagttgctccca

SEQ ID NO: 1394625 - DNA, 25 bp, Homo sapien
gaacttgtcacatgaggtactcaaa

SEQ ID NO: 1394626 - DNA, 25 bp, Homo sapien
gagtccttgaattagtgggctctct

SEQ ID NO: 1394627 - DNA, 25 bp, Homo sapien
ttccaactcatacttgaagatctct

SEQ ID NO: 1394628 - DNA, 25 bp, Homo sapien
gtgtggaaattccaactcatacttg

SEQ ID NO: 1394629 - DNA, 25 bp, Homo sapien
ctagaggaaaacaacacgacttatt

SEQ ID NO: 1394630 - DNA, 25 bp, Homo sapien
cacgacttattaatcaagtgtggaa

SEQ ID NO: 1394631 - DNA, 25 bp, Homo sapien
ggaaagaattggtttcacatttgta

SEQ ID NO: 1394632 - DNA, 25 bp, Homo sapien
ctcgaaggaaagaattggtttcaca

SEQ ID NO: 1394633 - DNA, 25 bp, Homo sapien
tcctcgaaggaaagaattggtttca

SEQ ID NO: 1394634 - DNA, 25 bp, Homo sapien
cgaaggaaagaattggtttcacatt

SEQ ID NO: 1394635 - DNA, 25 bp, Homo sapien
ttgaagtaaccatctcttagcttca

SEQ ID NO: 1394636 - DNA, 25 bp, Homo sapien
tataagcgaatctggccacttctct

SEQ ID NO: 1394637 - DNA, 25 bp, Homo sapien
ggagccatatccaaatttgagaagg

SEQ ID NO: 1394638 - DNA, 25 bp, Homo sapien
tacagatcaacaataactgtgtgct

SEQ ID NO: 1394639 - DNA, 25 bp, Homo sapien
cactagacttacgtaacagccctct

SEQ ID NO: 1394640 - DNA, 25 bp, Homo sapien
accagactgtgagcgcatcaagtac

SEQ ID NO: 1394641 - DNA, 25 bp, Homo sapien
aaccagactgtgagcgcatcaagta

SEQ ID NO: 1394642 - DNA, 25 bp, Homo sapien
tatgtgaaaatctccagcctgtacc

SEQ ID NO: 1394643 - DNA, 25 bp, Homo sapien
tgagaagtcagattaccctagtcct

SEQ ID NO: 1394644 - DNA, 25 bp, Homo sapien
tacactgcaccatcgtggaagaaat

SEQ ID NO: 1394645 - DNA, 25 bp, Homo sapien
tgtacctgtacagcatcagccctgg

SEQ ID NO: 1394646 - DNA, 25 bp, Homo sapien
ggttggcaatgccacaggcgttgtt

SEQ ID NO: 1394647 - DNA, 25 bp, Homo sapien
tgttcttatttcgagccatgaggat

SEQ ID NO: 1394648 - DNA, 25 bp, Homo sapien
cacaggcgttgttcttatttcgagc

SEQ ID NO: 1394649 - DNA, 25 bp, Homo sapien
cgagccatgaggatatatcctttgt

SEQ ID NO: 1394650 - DNA, 25 bp, Homo sapien
gactagaagacaagagagacgacgt

SEQ ID NO: 1394651 - DNA, 25 bp, Homo sapien
tcatgtagctgaaaagcagtgtgcc

SEQ ID NO: 1394652 - DNA, 25 bp, Homo sapien
gacccatcatcgtgaggagccagtg

SEQ ID NO: 1394653 - DNA, 25 bp, Homo sapien
tggaagctatctccacacatggtac

SEQ ID NO: 1394654 - DNA, 25 bp, Homo sapien
cagattatcgctattgcagctttca

SEQ ID NO: 1394655 - DNA, 25 bp, Homo sapien
aaactgcatggttcagattatcgct

SEQ ID NO: 1394656 - DNA, 25 bp, Homo sapien
catggttcagattatcgctattgca

SEQ ID NO: 1394657 - DNA, 25 bp, Homo sapien
ggttcagattatcgctattgcagct

SEQ ID NO: 1394658 - DNA, 25 bp, Homo sapien
aaggaggtcaggcttgcatcaatgg

SEQ ID NO: 1394659 - DNA, 25 bp, Homo sapien
cttgcctgttgggttgtacatacaa

SEQ ID NO: 1394660 - DNA, 25 bp, Homo sapien
cctgttgggttgtacatacaactct

SEQ ID NO: 1394661 - DNA, 25 bp, Homo sapien
gcttgcatcaatggccacagagaca

SEQ ID NO: 1394662 - DNA, 25 bp, Homo sapien
aattgcaaaggaaaattaatcattt

SEQ ID NO: 1394663 - DNA, 25 bp, Homo sapien
ttttgaaacgcagtcttgctcagtt

SEQ ID NO: 1394664 - DNA, 25 bp, Homo sapien
aaaattgcaaaggaaaattaatcat

SEQ ID NO: 1394665 - DNA, 25 bp, Homo sapien
ttttttgaaacgcagtcttgctcag

SEQ ID NO: 1394666 - DNA, 25 bp, Homo sapien
cagggcacccacagagctaaaagcc

SEQ ID NO: 1394667 - DNA, 25 bp, Homo sapien
tgtcccacatatgggtaggcatctt

SEQ ID NO: 1394668 - DNA, 25 bp, Homo sapien
tggaaggcattggtcatgtagcccc

SEQ ID NO: 1394669 - DNA, 25 bp, Homo sapien
agatttaagagtttgccagttttct

SEQ ID NO: 1394670 - DNA, 25 bp, Homo sapien
tctttcgatagtcgacagagtctgg

SEQ ID NO: 1394671 - DNA, 25 bp, Homo sapien
tcattactgcgggaatgagacaggg

SEQ ID NO: 1394672 - DNA, 25 bp, Homo sapien
gacaggagtaacatatcctttcttt

SEQ ID NO: 1394673 - DNA, 25 bp, Homo sapien
cattctgggatataaagggtgtcat

SEQ ID NO: 1394674 - DNA, 25 bp, Homo sapien
ctaaagcaaatggtgcaggtgggac

SEQ ID NO: 1394675 - DNA, 25 bp, Homo sapien
gaactaaagcaaatggtgcaggtgg

SEQ ID NO: 1394676 - DNA, 25 bp, Homo sapien
gggaactaaagcaaatggtgcaggt

SEQ ID NO: 1394677 - DNA, 25 bp, Homo sapien
cagggaactaaagcaaatggtgcag

SEQ ID NO: 1394678 - DNA, 25 bp, Homo sapien
gagaagcctcaaggttatggatgga

SEQ ID NO: 1394679 - DNA, 25 bp, Homo sapien
atatgtatggacaccaagagaagcc

SEQ ID NO: 1394680 - DNA, 25 bp, Homo sapien
ccccaggtggttcatagccagttca

SEQ ID NO: 1394681 - DNA, 25 bp, Homo sapien
ttaaacgccgagagatttcatccac

SEQ ID NO: 1394682 - DNA, 25 bp, Homo sapien
tgtatagactgtctacagttacata

SEQ ID NO: 1394683 - DNA, 25 bp, Homo sapien
cagtacttgtatagactgtctacag

SEQ ID NO: 1394684 - DNA, 25 bp, Homo sapien
tagtcagtacttgtatagactgtct

SEQ ID NO: 1394685 - DNA, 25 bp, Homo sapien
agcatagtcagtacttgtatagact

SEQ ID NO: 1394686 - DNA, 25 bp, Homo sapien
agtgggtgtccagtatctcctcagg

SEQ ID NO: 1394687 - DNA, 25 bp, Homo sapien
tctcctcagggtacagagcaaagct

SEQ ID NO: 1394688 - DNA, 25 bp, Homo sapien
tgttgttatattgcttcctgtgggt

SEQ ID NO: 1394689 - DNA, 25 bp, Homo sapien
cctgtgggtcttcttccatagctcc

SEQ ID NO: 1394690 - DNA, 25 bp, Homo sapien
cagaagaatgtagttagggaaaact

SEQ ID NO: 1394691 - DNA, 25 bp, Homo sapien
gcagaagaatgtagttagggaaaac

SEQ ID NO: 1394692 - DNA, 25 bp, Homo sapien
ctgcagaagaatgtagttagggaaa

SEQ ID NO: 1394693 - DNA, 25 bp, Homo sapien
tgcagaagaatgtagttagggaaaa

SEQ ID NO: 1394694 - DNA, 25 bp, Homo sapien
cctgtgtttagataggatgctggta

SEQ ID NO: 1394695 - DNA, 25 bp, Homo sapien
aaaacaatgatagtcaggaggggcc

SEQ ID NO: 1394696 - DNA, 25 bp, Homo sapien
gagatttaggcaacacacactctct

SEQ ID NO: 1394697 - DNA, 25 bp, Homo sapien
aggatgctggtacatctggttccaa

SEQ ID NO: 1394698 - DNA, 25 bp, Homo sapien
cagacaaatagcaaggtggtagtgg

SEQ ID NO: 1394699 - DNA, 25 bp, Homo sapien
tcagtgcgtttcctccagggtccct

SEQ ID NO: 1394700 - DNA, 25 bp, Homo sapien
atcagaatgggctcagtgcgtttcc

SEQ ID NO: 1394701 - DNA, 25 bp, Homo sapien
gcttggagacagacaaatagcaagg

SEQ ID NO: 1394702 - DNA, 25 bp, Homo sapien
gccagggaatgacctaagaagtgca

SEQ ID NO: 1394703 - DNA, 25 bp, Homo sapien
tgagatgtctcagtgaacaggaagc

SEQ ID NO: 1394704 - DNA, 25 bp, Homo sapien
ttaagaacaatttgcagcctgcagc

SEQ ID NO: 1394705 - DNA, 25 bp, Homo sapien
tgatcatttcttcgaggcgttcttc

SEQ ID NO: 1394706 - DNA, 25 bp, Homo sapien
tttcggcagcaaagtgtgggcacac

SEQ ID NO: 1394707 - DNA, 25 bp, Homo sapien
aatctgttgtctggcttcgtttcgg

SEQ ID NO: 1394708 - DNA, 25 bp, Homo sapien
gggtgctagatttattccatcggga

SEQ ID NO: 1394709 - DNA, 25 bp, Homo sapien
tccatcgggattgcggaagtcagct

SEQ ID NO: 1394710 - DNA, 25 bp, Homo sapien
agaggaggaggcggggatagaaatg

SEQ ID NO: 1394711 - DNA, 25 bp, Homo sapien
ggtaagaggaggaggcggggataga

SEQ ID NO: 1394712 - DNA, 25 bp, Homo sapien
tgggtaagaggaggaggcggggata

SEQ ID NO: 1394713 - DNA, 25 bp, Homo sapien
taagaggaggaggcggggatagaaa

SEQ ID NO: 1394714 - DNA, 25 bp, Homo sapien
aatatctattgactcaaataggagc

SEQ ID NO: 1394715 - DNA, 25 bp, Homo sapien
tactagctatttagtctcacaagac

SEQ ID NO: 1394716 - DNA, 25 bp, Homo sapien
tgtgtgccagggtagggaattacta

SEQ ID NO: 1394717 - DNA, 25 bp, Homo sapien
gcaaataacaagacctcaatatcta

SEQ ID NO: 1394718 - DNA, 25 bp, Homo sapien
ctcacctctgggatgcggtaatgaa

SEQ ID NO: 1394719 - DNA, 25 bp, Homo sapien
gggatgcggtaatgaacataaaagg

SEQ ID NO: 1394720 - DNA, 25 bp, Homo sapien
tctgggatgcggtaatgaacataaa

SEQ ID NO: 1394721 - DNA, 25 bp, Homo sapien
tccaacattgaaacctattttcata

SEQ ID NO: 1394722 - DNA, 25 bp, Homo sapien
tgttgctaaaactctcaggtggtgg

SEQ ID NO: 1394723 - DNA, 25 bp, Homo sapien
taatgtaatggaagccataggctcc

SEQ ID NO: 1394724 - DNA, 25 bp, Homo sapien
caagttgtcattacttccaggcaga

SEQ ID NO: 1394725 - DNA, 25 bp, Homo sapien
caatgccgtaagttctgatggactc

SEQ ID NO: 1394726 - DNA, 25 bp, Homo sapien
tgccctagtggttttcaagtcccga

SEQ ID NO: 1394727 - DNA, 25 bp, Homo sapien
caatgaggattttcactgggacggc

SEQ ID NO: 1394728 - DNA, 25 bp, Homo sapien
gaggcgtgcaatgtgatcagaaccc

SEQ ID NO: 1394729 - DNA, 25 bp, Homo sapien
taacagacaatcgtatcaacagccg

SEQ ID NO: 1394730 - DNA, 25 bp, Homo sapien
ctgttgctctgatctcccagcatgg

SEQ ID NO: 1394731 - DNA, 25 bp, Homo sapien
gggaaacatagttagatcagggaat

SEQ ID NO: 1394732 - DNA, 25 bp, Homo sapien
gttagatcagggaattcttcattgt

SEQ ID NO: 1394733 - DNA, 25 bp, Homo sapien
gctctgatctcccagcatggacagc

SEQ ID NO: 1394734 - DNA, 25 bp, Homo sapien
gtatatatgctgctgaagcgagcac

SEQ ID NO: 1394735 - DNA, 25 bp, Homo sapien
atgctaatcttctctatattcattc

SEQ ID NO: 1394736 - DNA, 25 bp, Homo sapien
tttagtatatatgctgctgaagcga

SEQ ID NO: 1394737 - DNA, 25 bp, Homo sapien
taatcttctctatattcattccaat

SEQ ID NO: 1394738 - DNA, 25 bp, Homo sapien
ttgctgtgctggcggttgttgaaca

SEQ ID NO: 1394739 - DNA, 25 bp, Homo sapien
gccaggttgctgtgctggcggttgt

SEQ ID NO: 1394740 - DNA, 25 bp, Homo sapien
caggttgctgtgctggcggttgttg

SEQ ID NO: 1394741 - DNA, 25 bp, Homo sapien
ggttgctgtgctggcggttgttgaa

SEQ ID NO: 1394742 - DNA, 25 bp, Homo sapien
ctagaacttgaacgatgatgaggct

SEQ ID NO: 1394743 - DNA, 25 bp, Homo sapien
gtctggaattgtcctgcagtctgtc

SEQ ID NO: 1394744 - DNA, 25 bp, Homo sapien
cttgaacgatgatgaggctgctggc

SEQ ID NO: 1394745 - DNA, 25 bp, Homo sapien
cctctgctgtccgtgtctggaattg

SEQ ID NO: 1394746 - DNA, 25 bp, Homo sapien
caaagttagatccacgattggtgag

SEQ ID NO: 1394747 - DNA, 25 bp, Homo sapien
tccacgattggtgagactagggtag

SEQ ID NO: 1394748 - DNA, 25 bp, Homo sapien
tagatccacgattggtgagactagg

SEQ ID NO: 1394749 - DNA, 25 bp, Homo sapien
aagttagatccacgattggtgagac

SEQ ID NO: 1394750 - DNA, 25 bp, Homo sapien
gtacgagtcttagcagtagcctggg

SEQ ID NO: 1394751 - DNA, 25 bp, Homo sapien
caccaaactgggaagtacgagtctt

SEQ ID NO: 1394752 - DNA, 25 bp, Homo sapien
ggaagtacgagtcttagcagtagcc

SEQ ID NO: 1394753 - DNA, 25 bp, Homo sapien
gtcttagcagtagcctgggtagcca

SEQ ID NO: 1394754 - DNA, 25 bp, Homo sapien
acagtgtatttattgtgcgttatat

SEQ ID NO: 1394755 - DNA, 25 bp, Homo sapien
cagtgtatttattgtgcgttatatt

SEQ ID NO: 1394756 - DNA, 25 bp, Homo sapien
gatggaaattggaaaccggagaaca

SEQ ID NO: 1394757 - DNA, 25 bp, Homo sapien
aaatcagacgtgctcaaaacgttcc

SEQ ID NO: 1394758 - DNA, 25 bp, Homo sapien
ggtgaaaaccacagactctactgag

SEQ ID NO: 1394759 - DNA, 25 bp, Homo sapien
aaacgttccaagtgagcaattctga

SEQ ID NO: 1394760 - DNA, 25 bp, Homo sapien
tggctggacaatggttacaggaggg

SEQ ID NO: 1394761 - DNA, 25 bp, Homo sapien
tggcgggaaatctgggccaacatct

SEQ ID NO: 1394762 - DNA, 25 bp, Homo sapien
caagttggggttgctccttgggtgg

SEQ ID NO: 1394763 - DNA, 25 bp, Homo sapien
cagaaaagcctgagcgggtagtagg

SEQ ID NO: 1394764 - DNA, 25 bp, Homo sapien
taggagggaatgtgttgccctggga

SEQ ID NO: 1394765 - DNA, 25 bp, Homo sapien
ctgggagaatagctgttgggtggca

SEQ ID NO: 1394766 - DNA, 25 bp, Homo sapien
gagaatagctgttgggtggcaggga

SEQ ID NO: 1394767 - DNA, 25 bp, Homo sapien
ctgaaattctctgccggccgggggg

SEQ ID NO: 1394768 - DNA, 25 bp, Homo sapien
ttggatctctatcctgggcaaataa

SEQ ID NO: 1394769 - DNA, 25 bp, Homo sapien
ccgcattgatgttgtgatagatttc

SEQ ID NO: 1394770 - DNA, 25 bp, Homo sapien
gatctctatcctgggcaaataaacc

SEQ ID NO: 1394771 - DNA, 25 bp, Homo sapien
cattgatgttgtgatagatttctga

SEQ ID NO: 1394772 - DNA, 25 bp, Homo sapien
gattgtagctggccagtccatctct

SEQ ID NO: 1394773 - DNA, 25 bp, Homo sapien
attgtagctggccagtccatctctt

SEQ ID NO: 1394774 - DNA, 25 bp, Homo sapien
ttgtagctggccagtccatctcttc

SEQ ID NO: 1394775 - DNA, 25 bp, Homo sapien
ccaattctgtttgctgttgctgctg

SEQ ID NO: 1394776 - DNA, 25 bp, Homo sapien
gtccaattctgtttgctgttgctgc

SEQ ID NO: 1394777 - DNA, 25 bp, Homo sapien
tccaattctgtttgctgttgctgct

SEQ ID NO: 1394778 - DNA, 25 bp, Homo sapien
caattctgtttgctgttgctgctgc

SEQ ID NO: 1394779 - DNA, 25 bp, Homo sapien
ggcctctggattgtgttggagagtg

SEQ ID NO: 1394780 - DNA, 25 bp, Homo sapien
catctccaggggtaaattagctgtg

SEQ ID NO: 1394781 - DNA, 25 bp, Homo sapien
ttggagagtgtaggccgtggttctt

SEQ ID NO: 1394782 - DNA, 25 bp, Homo sapien
tccaggggtaaattagctgtgggac

SEQ ID NO: 1394783 - DNA, 25 bp, Homo sapien
gaaagtaaaggagctggttctcatc

SEQ ID NO: 1394784 - DNA, 25 bp, Homo sapien
agaccggaaccggaacatgacagac

SEQ ID NO: 1394785 - DNA, 25 bp, Homo sapien
ggttctcatccagagccattcttgg

SEQ ID NO: 1394786 - DNA, 25 bp, Homo sapien
ttcatctgagtaagggttctggaaa

SEQ ID NO: 1394787 - DNA, 25 bp, Homo sapien
gtcttcaggatgacagaattctaca

SEQ ID NO: 1394788 - DNA, 25 bp, Homo sapien
ggtcttcaggatgacagaattctac

SEQ ID NO: 1394789 - DNA, 25 bp, Homo sapien
tggtcttcaggatgacagaattcta

SEQ ID NO: 1394790 - DNA, 25 bp, Homo sapien
atggtcatctaactggcctggtcca

SEQ ID NO: 1394791 - DNA, 25 bp, Homo sapien
tatggtcatctaactggcctggtcc

SEQ ID NO: 1394792 - DNA, 25 bp, Homo sapien
tttatggtcatctaactggcctggt

SEQ ID NO: 1394793 - DNA, 25 bp, Homo sapien
ttatggtcatctaactggcctggtc

SEQ ID NO: 1394794 - DNA, 25 bp, Homo sapien
ctcttaggtagatactcaggaataa

SEQ ID NO: 1394795 - DNA, 25 bp, Homo sapien
tgaactgtgtacaaatctatgggtg

SEQ ID NO: 1394796 - DNA, 25 bp, Homo sapien
ttctcacatggatacaacacagttg

SEQ ID NO: 1394797 - DNA, 25 bp, Homo sapien
taaaattgctaggttataggctaag

SEQ ID NO: 1394798 - DNA, 25 bp, Homo sapien
aacaccacagtgtcttggtaatagc

SEQ ID NO: 1394799 - DNA, 25 bp, Homo sapien
cagagatggctaactggtctgttgc

SEQ ID NO: 1394800 - DNA, 25 bp, Homo sapien
tataataactggtgctaaatctgca

SEQ ID NO: 1394801 - DNA, 25 bp, Homo sapien
tatgatgcgtcaattcagagatggc

SEQ ID NO: 1394802 - DNA, 25 bp, Homo sapien
gccacacagcggtgatccacaaaag

SEQ ID NO: 1394803 - DNA, 25 bp, Homo sapien
ccctcaatgttgtgtcgggagatga

SEQ ID NO: 1394804 - DNA, 25 bp, Homo sapien
gctggtagccaacagtagccacaca

SEQ ID NO: 1394805 - DNA, 25 bp, Homo sapien
tccacaaaagtgaagataccctcaa

SEQ ID NO: 1394806 - DNA, 25 bp, Homo sapien
caaaacttgcttccctggccagcct

SEQ ID NO: 1394807 - DNA, 25 bp, Homo sapien
aggcaaaacttgcttccctggccag

SEQ ID NO: 1394808 - DNA, 25 bp, Homo sapien
taggcaaaacttgcttccctggcca

SEQ ID NO: 1394809 - DNA, 25 bp, Homo sapien
ggcaaaacttgcttccctggccagc

SEQ ID NO: 1394810 - DNA, 25 bp, Homo sapien
gacaagtaaagattcaaaatagacc

SEQ ID NO: 1394811 - DNA, 25 bp, Homo sapien
cggggacctccaactcaaatgcctt

SEQ ID NO: 1394812 - DNA, 25 bp, Homo sapien
caaaactcagacaagtaaagattca

SEQ ID NO: 1394813 - DNA, 25 bp, Homo sapien
taacggggacctccaactcaaatgc

SEQ ID NO: 1394814 - DNA, 25 bp, Homo sapien
taacaatgacaggaatcacatccag

SEQ ID NO: 1394815 - DNA, 25 bp, Homo sapien
tactttccaataatacccaggcagc

SEQ ID NO: 1394816 - DNA, 25 bp, Homo sapien
tattgggttacctgccatatgccag

SEQ ID NO: 1394817 - DNA, 25 bp, Homo sapien
caacttaccctaggtgatgccacta

SEQ ID NO: 1394818 - DNA, 25 bp, Homo sapien
tgtgaggaaccaactgtaccaaggg

SEQ ID NO: 1394819 - DNA, 25 bp, Homo sapien
aagctcaataatggaagggaaggat

SEQ ID NO: 1394820 - DNA, 25 bp, Homo sapien
aagtacatttcatataccaggtata

SEQ ID NO: 1394821 - DNA, 25 bp, Homo sapien
ataaaagctcaataatggaagggaa

SEQ ID NO: 1394822 - DNA, 25 bp, Homo sapien
cacgaagtgaggttccccatccttt

SEQ ID NO: 1394823 - DNA, 25 bp, Homo sapien
tggaccaccacgaagtgaggttccc

SEQ ID NO: 1394824 - DNA, 25 bp, Homo sapien
catcctttacagagccaagtccatt

SEQ ID NO: 1394825 - DNA, 25 bp, Homo sapien
gcctgtgcagtggaccaccacgaag

SEQ ID NO: 1394826 - DNA, 25 bp, Homo sapien
gctcagcctattcacagaaactggg

SEQ ID NO: 1394827 - DNA, 25 bp, Homo sapien
acaaagctcagcctattcacagaaa

SEQ ID NO: 1394828 - DNA, 25 bp, Homo sapien
aagctcagcctattcacagaaactg

SEQ ID NO: 1394829 - DNA, 25 bp, Homo sapien
ctcagcctattcacagaaactgggt

SEQ ID NO: 1394830 - DNA, 25 bp, Homo sapien
tcggcaaataaacgatctccttgag

SEQ ID NO: 1394831 - DNA, 25 bp, Homo sapien
ggaagactgctgaccttcctttttc

SEQ ID NO: 1394832 - DNA, 25 bp, Homo sapien
tccagtctttagatccaggatacgc

SEQ ID NO: 1394833 - DNA, 25 bp, Homo sapien
tccttgagcccatacacattctcat

SEQ ID NO: 1394834 - DNA, 25 bp, Homo sapien
gaaagctgctcacgaagtttatcca

SEQ ID NO: 1394835 - DNA, 25 bp, Homo sapien
cgaagtttatccacatcatctgggt

SEQ ID NO: 1394836 - DNA, 25 bp, Homo sapien
gatcatagagtgtgctgccaaacca

SEQ ID NO: 1394837 - DNA, 25 bp, Homo sapien
tctgggtgcacctgatcatagagtg

SEQ ID NO: 1394838 - DNA, 25 bp, Homo sapien
tggttcaaaacaggagtcacggagt

SEQ ID NO: 1394839 - DNA, 25 bp, Homo sapien
aaaacaggagtcacggagtcagaca

SEQ ID NO: 1394840 - DNA, 25 bp, Homo sapien
gtctcacatgagacaataaacagaa

SEQ ID NO: 1394841 - DNA, 25 bp, Homo sapien
tctcacatgagacaataaacagaaa

SEQ ID NO: 1394842 - DNA, 25 bp, Homo sapien
caaggattgaaattcgttttcccat

SEQ ID NO: 1394843 - DNA, 25 bp, Homo sapien
cagttcttctatcaccaaaggtggg

SEQ ID NO: 1394844 - DNA, 25 bp, Homo sapien
gaaaattggttccatggacatagtc

SEQ ID NO: 1394845 - DNA, 25 bp, Homo sapien
cctaagcaacaattagactctcagt

SEQ ID NO: 1394846 - DNA, 25 bp, Homo sapien
tctcagaactataagtcccagagac

SEQ ID NO: 1394847 - DNA, 25 bp, Homo sapien
ggttttcgagccagggcactacagg

SEQ ID NO: 1394848 - DNA, 25 bp, Homo sapien
gaaagacggcttataggagccatca

SEQ ID NO: 1394849 - DNA, 25 bp, Homo sapien
gttccccgcaaggacttcatgtgag

SEQ ID NO: 1394850 - DNA, 25 bp, Homo sapien
catcagtggatgtgttgccagttcc

SEQ ID NO: 1394851 - DNA, 25 bp, Homo sapien
tagcagggagagtgatatggatacc

SEQ ID NO: 1394852 - DNA, 25 bp, Homo sapien
tcacatctggtcatttggtagcagg

SEQ ID NO: 1394853 - DNA, 25 bp, Homo sapien
gatttagtgatgcttaagtctcagc

SEQ ID NO: 1394854 - DNA, 25 bp, Homo sapien
tatggataccaagtgtgctgctgaa

SEQ ID NO: 1394855 - DNA, 25 bp, Homo sapien
tgctgaggcctaaatactgggaact

SEQ ID NO: 1394856 - DNA, 25 bp, Homo sapien
gattcggtcaccaaagcaacactag

SEQ ID NO: 1394857 - DNA, 25 bp, Homo sapien
taaatggcaaaaagggtctcaccac

SEQ ID NO: 1394858 - DNA, 25 bp, Homo sapien
tgttaaagcaccaactggcacggtt

SEQ ID NO: 1394859 - DNA, 25 bp, Homo sapien
gcaagtctctctttatccgcagagc

SEQ ID NO: 1394860 - DNA, 25 bp, Homo sapien
ctggcaagtctctctttatccgcag

SEQ ID NO: 1394861 - DNA, 25 bp, Homo sapien
tctctttatccgcagagctctgctc

SEQ ID NO: 1394862 - DNA, 25 bp, Homo sapien
gtctctctttatccgcagagctctg

SEQ ID NO: 1394863 - DNA, 25 bp, Homo sapien
caatcgatctctgtagggaccaaag

SEQ ID NO: 1394864 - DNA, 25 bp, Homo sapien
ttttcatgcactgctcccaatctgg

SEQ ID NO: 1394865 - DNA, 25 bp, Homo sapien
gatatagaactaaacagatgcagag

SEQ ID NO: 1394866 - DNA, 25 bp, Homo sapien
ggaaccttgcctgtaactctacaaa

SEQ ID NO: 1394867 - DNA, 25 bp, Homo sapien
tcattcatgcgatgttttcatggct

SEQ ID NO: 1394868 - DNA, 25 bp, Homo sapien
tagagatggttcacatcctaaagac

SEQ ID NO: 1394869 - DNA, 25 bp, Homo sapien
tactactactacagatccacaatcc

SEQ ID NO: 1394870 - DNA, 25 bp, Homo sapien
gaaatatatgcacattaagcaggac

SEQ ID NO: 1394871 - DNA, 25 bp, Homo sapien
tatgagtgcccaccatgatgcccgg

SEQ ID NO: 1394872 - DNA, 25 bp, Homo sapien
tatgccaccactccccgcctcttac

SEQ ID NO: 1394873 - DNA, 25 bp, Homo sapien
ctgggattatgagtgcccaccatga

SEQ ID NO: 1394874 - DNA, 25 bp, Homo sapien
attatgagtgcccaccatgatgccc

SEQ ID NO: 1394875 - DNA, 25 bp, Homo sapien
ctggcaaaccgctccttatcgttag

SEQ ID NO: 1394876 - DNA, 25 bp, Homo sapien
ccgctccttatcgttagacatctga

SEQ ID NO: 1394877 - DNA, 25 bp, Homo sapien
cgttagacatctgatcatcatcaca

SEQ ID NO: 1394878 - DNA, 25 bp, Homo sapien
ccttatcgttagacatctgatcatc

SEQ ID NO: 1394879 - DNA, 25 bp, Homo sapien
ttctccatcatcatcaaaatccagc

SEQ ID NO: 1394880 - DNA, 25 bp, Homo sapien
aatttactgttcccttctccatcat

SEQ ID NO: 1394881 - DNA, 25 bp, Homo sapien
aaatttactgttcccttctccatca

SEQ ID NO: 1394882 - DNA, 25 bp, Homo sapien
cccttctccatcatcatcaaaatcc

SEQ ID NO: 1394883 - DNA, 25 bp, Homo sapien
tctgattaccaatcatacatgttca

SEQ ID NO: 1394884 - DNA, 25 bp, Homo sapien
gattaccaatcatacatgttcattt

SEQ ID NO: 1394885 - DNA, 25 bp, Homo sapien
tttctgattaccaatcatacatgtt

SEQ ID NO: 1394886 - DNA, 25 bp, Homo sapien
tgattaccaatcatacatgttcatt

SEQ ID NO: 1394887 - DNA, 25 bp, Homo sapien
ttaatagccctctggacaatggctc

SEQ ID NO: 1394888 - DNA, 25 bp, Homo sapien
cgccgcttaatagccctctggacaa

SEQ ID NO: 1394889 - DNA, 25 bp, Homo sapien
cgcttaatagccctctggacaatgg

SEQ ID NO: 1394890 - DNA, 25 bp, Homo sapien
ctggtcgccgcttaatagccctctg

SEQ ID NO: 1394891 - DNA, 25 bp, Homo sapien
ccccatgtcatagagtttggaagaa

SEQ ID NO: 1394892 - DNA, 25 bp, Homo sapien
taatcactggtataggtcactacag

SEQ ID NO: 1394893 - DNA, 25 bp, Homo sapien
ggtacaagatatccccatacttcag

SEQ ID NO: 1394894 - DNA, 25 bp, Homo sapien
cgcctagctccaagagatcatcctg

SEQ ID NO: 1394895 - DNA, 25 bp, Homo sapien
ggagaatcttgagtccaagatcagg

SEQ ID NO: 1394896 - DNA, 25 bp, Homo sapien
caggagaatcttgagtccaagatca

SEQ ID NO: 1394897 - DNA, 25 bp, Homo sapien
ggcaggagaatcttgagtccaagat

SEQ ID NO: 1394898 - DNA, 25 bp, Homo sapien
gcaggagaatcttgagtccaagatc

SEQ ID NO: 1394899 - DNA, 25 bp, Homo sapien
cacacacatttaaggtagtctaggc

SEQ ID NO: 1394900 - DNA, 25 bp, Homo sapien
gggtcatactatacaaacagtcctg

SEQ ID NO: 1394901 - DNA, 25 bp, Homo sapien
aatggttccatgtagggcttttcac

SEQ ID NO: 1394902 - DNA, 25 bp, Homo sapien
cacctttatgatagtgggaaaccat

SEQ ID NO: 1394903 - DNA, 25 bp, Homo sapien
cggggttggcagtagtcgccgccat

SEQ ID NO: 1394904 - DNA, 25 bp, Homo sapien
cagaagcggcgcctgaccgccgcct

SEQ ID NO: 1394905 - DNA, 25 bp, Homo sapien
gctaccgcggaatccaagatggcgg

SEQ ID NO: 1394906 - DNA, 25 bp, Homo sapien
tccgctaccgcggaatccaagatgg

SEQ ID NO: 1394907 - DNA, 25 bp, Homo sapien
ccgcctccgctaccgcggaatccaa

SEQ ID NO: 1394908 - DNA, 25 bp, Homo sapien
cactcacaacaaaggcaactagttt

SEQ ID NO: 1394909 - DNA, 25 bp, Homo sapien
tcacaacaaaggcaactagttttgc

SEQ ID NO: 1394910 - DNA, 25 bp, Homo sapien
agggcactcacaacaaaggcaacta

SEQ ID NO: 1394911 - DNA, 25 bp, Homo sapien
tgccattcttgtccaccttgtaata

SEQ ID NO: 1394912 - DNA, 25 bp, Homo sapien
gttgtaaacaccaaggcactcagac

SEQ ID NO: 1394913 - DNA, 25 bp, Homo sapien
taaacaccaaggcactcagaccagc

SEQ ID NO: 1394914 - DNA, 25 bp, Homo sapien
tgtaaacaccaaggcactcagacca

SEQ ID NO: 1394915 - DNA, 25 bp, Homo sapien
aaacaccaaggcactcagaccagcc

SEQ ID NO: 1394916 - DNA, 25 bp, Homo sapien
atcagagtgtatttacaggaggctg

SEQ ID NO: 1394917 - DNA, 25 bp, Homo sapien
cagagtgtatttacaggaggctggc

SEQ ID NO: 1394918 - DNA, 25 bp, Homo sapien
atttacaggaggctggcatttgatg

SEQ ID NO: 1394919 - DNA, 25 bp, Homo sapien
agtgtatttacaggaggctggcatt

SEQ ID NO: 1394920 - DNA, 25 bp, Homo sapien
tggaaggaagaaagtccagacgcat

SEQ ID NO: 1394921 - DNA, 25 bp, Homo sapien
cctaaagtcaagcaagaccacaaac

SEQ ID NO: 1394922 - DNA, 25 bp, Homo sapien
gcggcttcactcctaaagtcaagca

SEQ ID NO: 1394923 - DNA, 25 bp, Homo sapien
ggaacgaacaactccggactgccac

SEQ ID NO: 1394924 - DNA, 25 bp, Homo sapien
agaaggcagaaaaggccgacttgac

SEQ ID NO: 1394925 - DNA, 25 bp, Homo sapien
gaaaaggccgacttgacagcttatc

SEQ ID NO: 1394926 - DNA, 25 bp, Homo sapien
attggccactgccttatttattaca

SEQ ID NO: 1394927 - DNA, 25 bp, Homo sapien
tactaatgagtaataattggccact

SEQ ID NO: 1394928 - DNA, 25 bp, Homo sapien
cttcctgatcctgtacaatgcagaa

SEQ ID NO: 1394929 - DNA, 25 bp, Homo sapien
tcttcctgatcctgtacaatgcaga

SEQ ID NO: 1394930 - DNA, 25 bp, Homo sapien
cacagctgattcattaaatagagaa

SEQ ID NO: 1394931 - DNA, 25 bp, Homo sapien
cattaaatagagaaacacttcacat

SEQ ID NO: 1394932 - DNA, 25 bp, Homo sapien
gtacagtgttgaataagttttaaga

SEQ ID NO: 1394933 - DNA, 25 bp, Homo sapien
aaggatctcttaagcataggaagtt

SEQ ID NO: 1394934 - DNA, 25 bp, Homo sapien
agtgttgaataagttttaagagcag

SEQ ID NO: 1394935 - DNA, 25 bp, Homo sapien
acagtgttgaataagttttaagagc

SEQ ID NO: 1394936 - DNA, 25 bp, Homo sapien
ttacatagggctttgtaaatcagaa

SEQ ID NO: 1394937 - DNA, 25 bp, Homo sapien
gagaagtaggcagggacctgattac

SEQ ID NO: 1394938 - DNA, 25 bp, Homo sapien
gtcttaacagattgtgatttacact

SEQ ID NO: 1394939 - DNA, 25 bp, Homo sapien
gacatagaatgattgaatagtatct

SEQ ID NO: 1394940 - DNA, 25 bp, Homo sapien
gttcctggatccagttcaaccagtg

SEQ ID NO: 1394941 - DNA, 25 bp, Homo sapien
gcctctggagacttgcacatgctgt

SEQ ID NO: 1394942 - DNA, 25 bp, Homo sapien
caaagtcattccaaccacactgata

SEQ ID NO: 1394943 - DNA, 25 bp, Homo sapien
tagatttgataatgctgggtggtac

SEQ ID NO: 1394944 - DNA, 25 bp, Homo sapien
tcggctacagctattcaagacacag

SEQ ID NO: 1394945 - DNA, 25 bp, Homo sapien
tgacccaaacatgtgcacaaaccgg

SEQ ID NO: 1394946 - DNA, 25 bp, Homo sapien
caaaccggttggtgcaacatggact

SEQ ID NO: 1394947 - DNA, 25 bp, Homo sapien
tctagctagaccagagagggacaca

SEQ ID NO: 1394948 - DNA, 25 bp, Homo sapien
aagaaggatatgagagtgatgcccc

SEQ ID NO: 1394949 - DNA, 25 bp, Homo sapien
ttgcaaatctggaccatatcgagag

SEQ ID NO: 1394950 - DNA, 25 bp, Homo sapien
aggaagatggcaacagcggtacaga

SEQ ID NO: 1394951 - DNA, 25 bp, Homo sapien
tatcgagagcgtggagaacttcaaa

SEQ ID NO: 1394952 - DNA, 25 bp, Homo sapien
cagacttcggctacagcggttgaca

SEQ ID NO: 1394953 - DNA, 25 bp, Homo sapien
cactgctggtcagacttcggctaca

SEQ ID NO: 1394954 - DNA, 25 bp, Homo sapien
gaaagtgggaccagccgaaagccca

SEQ ID NO: 1394955 - DNA, 25 bp, Homo sapien
gacagtgatgatatccagaccatat

SEQ ID NO: 1394956 - DNA, 25 bp, Homo sapien
gaagaatccgggctgggacagaact

SEQ ID NO: 1394957 - DNA, 25 bp, Homo sapien
cagatgatcccttccaatgtggtgc

SEQ ID NO: 1394958 - DNA, 25 bp, Homo sapien
gccattgaatgcagaggacgtcttc

SEQ ID NO: 1394959 - DNA, 25 bp, Homo sapien
ttgggactacaactacgaggtgggc

SEQ ID NO: 1394960 - DNA, 25 bp, Homo sapien
ctcaattcctaatagtctgacactt

SEQ ID NO: 1394961 - DNA, 25 bp, Homo sapien
tctcaattcctaatagtctgacact

SEQ ID NO: 1394962 - DNA, 25 bp, Homo sapien
tctcttcgtttatttagttgatccc

SEQ ID NO: 1394963 - DNA, 25 bp, Homo sapien
gactctcttcgtttatttagttgat

SEQ ID NO: 1394964 - DNA, 25 bp, Homo sapien
cccattaacagtacattttggtcta

SEQ ID NO: 1394965 - DNA, 25 bp, Homo sapien
tgctaggtgctagccgtaattctgg

SEQ ID NO: 1394966 - DNA, 25 bp, Homo sapien
ggtgctagccgtaattctggcttta

SEQ ID NO: 1394967 - DNA, 25 bp, Homo sapien
cctctgctgaaatgctaggtgctag

SEQ ID NO: 1394968 - DNA, 25 bp, Homo sapien
tagccttggtccagctttggcagaa

SEQ ID NO: 1394969 - DNA, 25 bp, Homo sapien
taagaaagatcatccgagcagtccc

SEQ ID NO: 1394970 - DNA, 25 bp, Homo sapien
tacagggacagctgaaagaagtagc

SEQ ID NO: 1394971 - DNA, 25 bp, Homo sapien
tcttagacctgtcgctacagggaca

SEQ ID NO: 1394972 - DNA, 25 bp, Homo sapien
aaggcaaacagctggggccaaattc

SEQ ID NO: 1394973 - DNA, 25 bp, Homo sapien
gctctggaggtcagggagtcaaagg

SEQ ID NO: 1394974 - DNA, 25 bp, Homo sapien
gcacaaccctggctctggaggtcag

SEQ ID NO: 1394975 - DNA, 25 bp, Homo sapien
agggagtcaaaggcaaacagctggg

SEQ ID NO: 1394976 - DNA, 25 bp, Homo sapien
ttgtaacccctacccacagagagct

SEQ ID NO: 1394977 - DNA, 25 bp, Homo sapien
taaagtgaccctatagcgcagggag

SEQ ID NO: 1394978 - DNA, 25 bp, Homo sapien
ttaaaggcaactgggtgacaagcaa

SEQ ID NO: 1394979 - DNA, 25 bp, Homo sapien
gggagggcctcaaaagcagtagaaa

SEQ ID NO: 1394980 - DNA, 25 bp, Homo sapien
ggtggccattggctaggggccggct

SEQ ID NO: 1394981 - DNA, 25 bp, Homo sapien
tttcttcccggtcactgcgttcatc

SEQ ID NO: 1394982 - DNA, 25 bp, Homo sapien
ggtcactgcgttcatcttctaccag

SEQ ID NO: 1394983 - DNA, 25 bp, Homo sapien
gctaggggccggctctttgctcctc

SEQ ID NO: 1394984 - DNA, 25 bp, Homo sapien
taggcccagaagatatgcagcagct

SEQ ID NO: 1394985 - DNA, 25 bp, Homo sapien
gatagagctccagtgggtacaccag

SEQ ID NO: 1394986 - DNA, 25 bp, Homo sapien
ccagttatgaacttgtgggccatgc

SEQ ID NO: 1394987 - DNA, 25 bp, Homo sapien
ggtacaccagggtgcaatgcaggat

SEQ ID NO: 1394988 - DNA, 25 bp, Homo sapien
caggatgaccagtcgggtgatgata

SEQ ID NO: 1394989 - DNA, 25 bp, Homo sapien
gatgataaaaacaatggcgaagacg

SEQ ID NO: 1394990 - DNA, 25 bp, Homo sapien
caggtgttcttccatcccgcgtagt

SEQ ID NO: 1394991 - DNA, 25 bp, Homo sapien
cgaagacgatgaagatgttgttgca

SEQ ID NO: 1394992 - DNA, 25 bp, Homo sapien
gactccctcgagtacattcatatgt

SEQ ID NO: 1394993 - DNA, 25 bp, Homo sapien
tgtacactccagttaggagcactga

SEQ ID NO: 1394994 - DNA, 25 bp, Homo sapien
taggagcactgactctgtgccctcc

SEQ ID NO: 1394995 - DNA, 25 bp, Homo sapien
attcatatgtacactccagttagga

SEQ ID NO: 1394996 - DNA, 25 bp, Homo sapien
taatcggaagagtcatgcagagcca

SEQ ID NO: 1394997 - DNA, 25 bp, Homo sapien
agagtcccagctcggatgtaattgg

SEQ ID NO: 1394998 - DNA, 25 bp, Homo sapien
taattggcaaaccaggaaaagctga

SEQ ID NO: 1394999 - DNA, 25 bp, Homo sapien
tgcagagccatgattagagtcccag

SEQ ID NO: 1395000 - DNA, 25 bp, Homo sapien
gagcagggaccagtagaaggaaagt

SEQ ID NO: 1395001 - DNA, 25 bp, Homo sapien
gcttgacatcagaggcaatgctgaa

SEQ ID NO: 1395002 - DNA, 25 bp, Homo sapien
caatcatgtagtaccaatactggga

SEQ ID NO: 1395003 - DNA, 25 bp, Homo sapien
ctttcgcttgacatcagaggcaatg

SEQ ID NO: 1395004 - DNA, 25 bp, Homo sapien
gagagagaggtaagagcaaccagcc

SEQ ID NO: 1395005 - DNA, 25 bp, Homo sapien
tccacaaaccgtctcttcactaggg

SEQ ID NO: 1395006 - DNA, 25 bp, Homo sapien
ctcttcactagggtgtgtcttagtc

SEQ ID NO: 1395007 - DNA, 25 bp, Homo sapien
taagagcaaccagccgcaagggtgt

SEQ ID NO: 1395008 - DNA, 25 bp, Homo sapien
tatgggatatccctcccaaactttc

SEQ ID NO: 1395009 - DNA, 25 bp, Homo sapien
atgggatatccctcccaaactttct

SEQ ID NO: 1395010 - DNA, 25 bp, Homo sapien
gccggcaatgaaggcaatcaggtaa

SEQ ID NO: 1395011 - DNA, 25 bp, Homo sapien
cggcaatgaaggcaatcaggtaaaa

SEQ ID NO: 1395012 - DNA, 25 bp, Homo sapien
ggcaatgaaggcaatcaggtaaaat

SEQ ID NO: 1395013 - DNA, 25 bp, Homo sapien
ccggcaatgaaggcaatcaggtaaa

SEQ ID NO: 1395014 - DNA, 25 bp, Homo sapien
aacgctctacctggcggccagagag

SEQ ID NO: 1395015 - DNA, 25 bp, Homo sapien
agagcccgctctgccgggacaaaag

SEQ ID NO: 1395016 - DNA, 25 bp, Homo sapien
ttgcggcggcgacggaaccaacgct

SEQ ID NO: 1395017 - DNA, 25 bp, Homo sapien
cggaacttcttgaggagactgggcc

SEQ ID NO: 1395018 - DNA, 25 bp, Homo sapien
ggcagccagtggtgtagccacgtac

SEQ ID NO: 1395019 - DNA, 25 bp, Homo sapien
cactggtcaggtagaaatgttccaa

SEQ ID NO: 1395020 - DNA, 25 bp, Homo sapien
ctgcttgggctgcttgccactggtc

SEQ ID NO: 1395021 - DNA, 25 bp, Homo sapien
tctcctttatgttcaagagggcagc

SEQ ID NO: 1395022 - DNA, 25 bp, Homo sapien
gaagtaatcatacaaggtctggagc

SEQ ID NO: 1395023 - DNA, 25 bp, Homo sapien
agatcggcccaggtcaagttcacag

SEQ ID NO: 1395024 - DNA, 25 bp, Homo sapien
gtatcgaacgatgaggaagagcaag

SEQ ID NO: 1395025 - DNA, 25 bp, Homo sapien
gatctgaggctttggcgtagacacg

SEQ ID NO: 1395026 - DNA, 25 bp, Homo sapien
gggcaaaggggagggcatcaagagg

SEQ ID NO: 1395027 - DNA, 25 bp, Homo sapien
aggggagggcatcaagagggagtag

SEQ ID NO: 1395028 - DNA, 25 bp, Homo sapien
ctgagtgaggggcaaaggggagggc

SEQ ID NO: 1395029 - DNA, 25 bp, Homo sapien
gagtgaggggcaaaggggagggcat

SEQ ID NO: 1395030 - DNA, 25 bp, Homo sapien
aaatgtaaagccaaaggtaccatgt

SEQ ID NO: 1395031 - DNA, 25 bp, Homo sapien
cttctccagggaaatgtaaagccaa

SEQ ID NO: 1395032 - DNA, 25 bp, Homo sapien
aagccaaaggtaccatgttgccctg

SEQ ID NO: 1395033 - DNA, 25 bp, Homo sapien
tctccagggaaatgtaaagccaaag

SEQ ID NO: 1395034 - DNA, 25 bp, Homo sapien
gtatgcggcagcaaccgccacccac

SEQ ID NO: 1395035 - DNA, 25 bp, Homo sapien
cggtgcggtcatcccgactccggta

SEQ ID NO: 1395036 - DNA, 25 bp, Homo sapien
gtcatcccgactccggtatgcggca

SEQ ID NO: 1395037 - DNA, 25 bp, Homo sapien
atcccgactccggtatgcggcagca

SEQ ID NO: 1395038 - DNA, 25 bp, Homo sapien
ctgtttcccgttaagcacatggaag

SEQ ID NO: 1395039 - DNA, 25 bp, Homo sapien
tttcccgttaagcacatggaagctc

SEQ ID NO: 1395040 - DNA, 25 bp, Homo sapien
ttcccgttaagcacatggaagctct

SEQ ID NO: 1395041 - DNA, 25 bp, Homo sapien
tgtttcccgttaagcacatggaagc

SEQ ID NO: 1395042 - DNA, 25 bp, Homo sapien
ccttgaggcgctgcgcccgccttac

SEQ ID NO: 1395043 - DNA, 25 bp, Homo sapien
cgggaaagcttctccggctcagggc

SEQ ID NO: 1395044 - DNA, 25 bp, Homo sapien
ctgttgcccgggaaagcttctccgg

SEQ ID NO: 1395045 - DNA, 25 bp, Homo sapien
gccccggccgctcccttgaggcgct

SEQ ID NO: 1395046 - DNA, 25 bp, Homo sapien
tcgggtggttgctccgaggccccga

SEQ ID NO: 1395047 - DNA, 25 bp, Homo sapien
tactccgtctgctcgggtggttgct

SEQ ID NO: 1395048 - DNA, 25 bp, Homo sapien
tgctccgtgtactccgtctgctcgg

SEQ ID NO: 1395049 - DNA, 25 bp, Homo sapien
tccgtgtactccgtctgctcgggtg

SEQ ID NO: 1395050 - DNA, 25 bp, Homo sapien
gagcccagtcgagctgagcccgagc

SEQ ID NO: 1395051 - DNA, 25 bp, Homo sapien
agcccagtcgagctgagcccgagcc

SEQ ID NO: 1395052 - DNA, 25 bp, Homo sapien
cccagtcgagctgagcccgagccca

SEQ ID NO: 1395053 - DNA, 25 bp, Homo sapien
cgagcccagtcgagctgagcccgag

SEQ ID NO: 1395054 - DNA, 25 bp, Homo sapien
gagcagcccaagggccgggaggctg

SEQ ID NO: 1395055 - DNA, 25 bp, Homo sapien
cggggcgggcctctgcgctgcggct

SEQ ID NO: 1395056 - DNA, 25 bp, Homo sapien
gaggccagaccccaaccctccgctc

SEQ ID NO: 1395057 - DNA, 25 bp, Homo sapien
cggctgccccttcgccccggcgcgg

SEQ ID NO: 1395058 - DNA, 25 bp, Homo sapien
actctccacacctccgtcctattca

SEQ ID NO: 1395059 - DNA, 25 bp, Homo sapien
aacactctccacacctccgtcctat

SEQ ID NO: 1395060 - DNA, 25 bp, Homo sapien
ctctccacacctccgtcctattcat

SEQ ID NO: 1395061 - DNA, 25 bp, Homo sapien
acactctccacacctccgtcctatt

SEQ ID NO: 1395062 - DNA, 25 bp, Homo sapien
atcaattataattcaggattttgat

SEQ ID NO: 1395063 - DNA, 25 bp, Homo sapien
cataacaacacattacttagtataa

SEQ ID NO: 1395064 - DNA, 25 bp, Homo sapien
taacaacacattacttagtataatc

SEQ ID NO: 1395065 - DNA, 25 bp, Homo sapien
aattataattcaggattttgatgac

SEQ ID NO: 1395066 - DNA, 25 bp, Homo sapien
tagaaaacccagtagttagccaggc

SEQ ID NO: 1395067 - DNA, 25 bp, Homo sapien
caatgtttcagcctaagggtccaac

SEQ ID NO: 1395068 - DNA, 25 bp, Homo sapien
ggtccaaccggagaaactaatatgc

SEQ ID NO: 1395069 - DNA, 25 bp, Homo sapien
tcagctcagtttagggatagggcag

SEQ ID NO: 1395070 - DNA, 25 bp, Homo sapien
tgtgcacttggctattccgcaggaa

SEQ ID NO: 1395071 - DNA, 25 bp, Homo sapien
caaaggaccatctgtatgaactggg

SEQ ID NO: 1395072 - DNA, 25 bp, Homo sapien
tgagatttccgtgtttggctgaacc

SEQ ID NO: 1395073 - DNA, 25 bp, Homo sapien
ggttagtggagagcacaaccctcaa

SEQ ID NO: 1395074 - DNA, 25 bp, Homo sapien
attacaggcgcccaccatgacgccc

SEQ ID NO: 1395075 - DNA, 25 bp, Homo sapien
tacaggcgcccaccatgacgcccag

SEQ ID NO: 1395076 - DNA, 25 bp, Homo sapien
ttttagacagttttgctcttgtcgc

SEQ ID NO: 1395077 - DNA, 25 bp, Homo sapien
ggattacaggcgcccaccatgacgc

SEQ ID NO: 1395078 - DNA, 25 bp, Homo sapien
gcctctcaaattgttgagattacag

SEQ ID NO: 1395079 - DNA, 25 bp, Homo sapien
tctcaaattgttgagattacaggag

SEQ ID NO: 1395080 - DNA, 25 bp, Homo sapien
tggcctctcaaattgttgagattac

SEQ ID NO: 1395081 - DNA, 25 bp, Homo sapien
ctctcaaattgttgagattacagga

SEQ ID NO: 1395082 - DNA, 25 bp, Homo sapien
ctgcctaggtgatcaggagcatcca

SEQ ID NO: 1395083 - DNA, 25 bp, Homo sapien
tacgtgtgactattcagggaccggg

SEQ ID NO: 1395084 - DNA, 25 bp, Homo sapien
gaaacccaccaatcctagtgttgcc

SEQ ID NO: 1395085 - DNA, 25 bp, Homo sapien
ccccaggaaggcattacaaataaga

SEQ ID NO: 1395086 - DNA, 25 bp, Homo sapien
tgctctcatccccaacagtccataa

SEQ ID NO: 1395087 - DNA, 25 bp, Homo sapien
ctagccatagcctctggaagaaggg

SEQ ID NO: 1395088 - DNA, 25 bp, Homo sapien
caagtctgaccttggcatttgttgc

SEQ ID NO: 1395089 - DNA, 25 bp, Homo sapien
gtccataaataagttatccagcaca

SEQ ID NO: 1395090 - DNA, 25 bp, Homo sapien
tgactcgtgcttcggcctctgccga

SEQ ID NO: 1395091 - DNA, 25 bp, Homo sapien
aatgcagtctgactcgtgcttcggc

SEQ ID NO: 1395092 - DNA, 25 bp, Homo sapien
ggctgggcgtccagatgtggctcct

SEQ ID NO: 1395093 - DNA, 25 bp, Homo sapien
tctgccgacgctccccggctgggcg

SEQ ID NO: 1395094 - DNA, 25 bp, Homo sapien
ctgaacttccttggaagagcacaag

SEQ ID NO: 1395095 - DNA, 25 bp, Homo sapien
ccttggaagagcacaagaagagatt

SEQ ID NO: 1395096 - DNA, 25 bp, Homo sapien
tccttggaagagcacaagaagagat

SEQ ID NO: 1395097 - DNA, 25 bp, Homo sapien
tcactgaacttccttggaagagcac

SEQ ID NO: 1395098 - DNA, 25 bp, Homo sapien
gcaggaataacaggtgttctggacc

SEQ ID NO: 1395099 - DNA, 25 bp, Homo sapien
gacccggcaaagcatgaggtggaaa

SEQ ID NO: 1395100 - DNA, 25 bp, Homo sapien
cccggcaaagcatgaggtggaaacc

SEQ ID NO: 1395101 - DNA, 25 bp, Homo sapien
ccttgaagagaccagtgcaggaata

SEQ ID NO: 1395102 - DNA, 25 bp, Homo sapien
agctccaagtcggtaagccccagcg

SEQ ID NO: 1395103 - DNA, 25 bp, Homo sapien
gccccagcgggcctcgtggctgttg

SEQ ID NO: 1395104 - DNA, 25 bp, Homo sapien
gcagtgacaggacccgcgtccgcat

SEQ ID NO: 1395105 - DNA, 25 bp, Homo sapien
gctgttgatactcctcttgctgaag

SEQ ID NO: 1395106 - DNA, 25 bp, Homo sapien
acattgtgcaggctctcccatacga

SEQ ID NO: 1395107 - DNA, 25 bp, Homo sapien
cccagggaatgactcaggtgaaagt

SEQ ID NO: 1395108 - DNA, 25 bp, Homo sapien
cagtgaccagtaggtataagtgact

SEQ ID NO: 1395109 - DNA, 25 bp, Homo sapien
gaaagccctggtcagtgaccagtag

SEQ ID NO: 1395110 - DNA, 25 bp, Homo sapien
gtcatggtgctaaagtggttgtttc

SEQ ID NO: 1395111 - DNA, 25 bp, Homo sapien
cttatgcttagtcatggtgctaaag

SEQ ID NO: 1395112 - DNA, 25 bp, Homo sapien
cacacagtccgtggtaggtcagctg

SEQ ID NO: 1395113 - DNA, 25 bp, Homo sapien
tgtcagctcacacagtccgtggtag

SEQ ID NO: 1395114 - DNA, 25 bp, Homo sapien
tgccagaaagggacgagtcggggga

SEQ ID NO: 1395115 - DNA, 25 bp, Homo sapien
ctgccagaaagggacgagtcggggg

SEQ ID NO: 1395116 - DNA, 25 bp, Homo sapien
tatccatgagaaggggaggaatgtc

SEQ ID NO: 1395117 - DNA, 25 bp, Homo sapien
atccatgagaaggggaggaatgtca

SEQ ID NO: 1395118 - DNA, 25 bp, Homo sapien
tccatgagaaggggaggaatgtcac

SEQ ID NO: 1395119 - DNA, 25 bp, Homo sapien
ctccaccagctggttgtaactcagt

SEQ ID NO: 1395120 - DNA, 25 bp, Homo sapien
agtgtttgcaggtgatgatcctctc

SEQ ID NO: 1395121 - DNA, 25 bp, Homo sapien
cgaggttggtgtcactggagtgttt

SEQ ID NO: 1395122 - DNA, 25 bp, Homo sapien
tgtcactggagtgtttgcaggtgat

SEQ ID NO: 1395123 - DNA, 25 bp, Homo sapien
ggtcaaagacactgcactcgggtgt

SEQ ID NO: 1395124 - DNA, 25 bp, Homo sapien
tcagagacgcctgtgaatcgcacat

SEQ ID NO: 1395125 - DNA, 25 bp, Homo sapien
gtacagaggtatgcctagcaggtca

SEQ ID NO: 1395126 - DNA, 25 bp, Homo sapien
tgtggatcaacaagccagccatggt

SEQ ID NO: 1395127 - DNA, 25 bp, Homo sapien
tgctgaaaattaagctgaagtccct

SEQ ID NO: 1395128 - DNA, 25 bp, Homo sapien
ctgacttctcctggggcttgatgga

SEQ ID NO: 1395129 - DNA, 25 bp, Homo sapien
aaattaagctgaagtccctctgact

SEQ ID NO: 1395130 - DNA, 25 bp, Homo sapien
ggcttgatggacaggaggcagtttc

SEQ ID NO: 1395131 - DNA, 25 bp, Homo sapien
gatcacttccttctgcggggggagc

SEQ ID NO: 1395132 - DNA, 25 bp, Homo sapien
atgagctcatccgatgtgatcactt

SEQ ID NO: 1395133 - DNA, 25 bp, Homo sapien
atgtgatcacttccttctgcggggg

SEQ ID NO: 1395134 - DNA, 25 bp, Homo sapien
gagctcatccgatgtgatcacttcc

SEQ ID NO: 1395135 - DNA, 25 bp, Homo sapien
ggtgatgatgggtgtctgttctcct

SEQ ID NO: 1395136 - DNA, 25 bp, Homo sapien
aagaggatgttcatgatggcaagga

SEQ ID NO: 1395137 - DNA, 25 bp, Homo sapien
tgttctcctttccaagggatccact

SEQ ID NO: 1395138 - DNA, 25 bp, Homo sapien
caagggccgttagtgctctgggtga

SEQ ID NO: 1395139 - DNA, 25 bp, Homo sapien
ctacttcaggcagtgtcccaagggt

SEQ ID NO: 1395140 - DNA, 25 bp, Homo sapien
ggactcaaggttgtccccacactgg

SEQ ID NO: 1395141 - DNA, 25 bp, Homo sapien
gatgactgcttctgcagtcccggcc

SEQ ID NO: 1395142 - DNA, 25 bp, Homo sapien
cccacactggctaggcagcaaagct

SEQ ID NO: 1395143 - DNA, 25 bp, Homo sapien
cctcagggacttgcctaagccaggc

SEQ ID NO: 1395144 - DNA, 25 bp, Homo sapien
cctaagccaggcttgggatgcaaaa

SEQ ID NO: 1395145 - DNA, 25 bp, Homo sapien
tgtttactaacctcagggacttgcc

SEQ ID NO: 1395146 - DNA, 25 bp, Homo sapien
ggcactgaaggtgtttactaacctc

SEQ ID NO: 1395147 - DNA, 25 bp, Homo sapien
tagtgtttgtgcagtaactcctggc

SEQ ID NO: 1395148 - DNA, 25 bp, Homo sapien
cagtgggctggaaagcaaactaacc

SEQ ID NO: 1395149 - DNA, 25 bp, Homo sapien
gctgtgaccagatgagaccaagagg

SEQ ID NO: 1395150 - DNA, 25 bp, Homo sapien
atgtgtaaacagaagggccccgtgc

SEQ ID NO: 1395151 - DNA, 25 bp, Homo sapien
gacagctagcattgagacagcaact

SEQ ID NO: 1395152 - DNA, 25 bp, Homo sapien
cagtaagcatctcttgacagctagc

SEQ ID NO: 1395153 - DNA, 25 bp, Homo sapien
tgcccctaaaggtgaaatgctggtg

SEQ ID NO: 1395154 - DNA, 25 bp, Homo sapien
tctaataggcatcacatcagtaacc

SEQ ID NO: 1395155 - DNA, 25 bp, Homo sapien
gaatatgtcaaccatggccacagtg

SEQ ID NO: 1395156 - DNA, 25 bp, Homo sapien
cagtagagagccgaaagttggaaga

SEQ ID NO: 1395157 - DNA, 25 bp, Homo sapien
cgtaaaacaggtatgtagcttcaag

SEQ ID NO: 1395158 - DNA, 25 bp, Homo sapien
tggctcctccctaatcaatggcagt

SEQ ID NO: 1395159 - DNA, 25 bp, Homo sapien
gaccaagcagcatcccctttacatg

SEQ ID NO: 1395160 - DNA, 25 bp, Homo sapien
gctcctctaagcaatccagacttgc

SEQ ID NO: 1395161 - DNA, 25 bp, Homo sapien
gacttagctcctctaagcaatccag

SEQ ID NO: 1395162 - DNA, 25 bp, Homo sapien
atgtctctcctgacttagctcctct

SEQ ID NO: 1395163 - DNA, 25 bp, Homo sapien
caagattgagaaggagggttcagcc

SEQ ID NO: 1395164 - DNA, 25 bp, Homo sapien
cctctagaagggacggagcgcttgt

SEQ ID NO: 1395165 - DNA, 25 bp, Homo sapien
gaaaaattaggcaaggacaagctcc

SEQ ID NO: 1395166 - DNA, 25 bp, Homo sapien
tccaggtcgctcagagagtcttcag

SEQ ID NO: 1395167 - DNA, 25 bp, Homo sapien
ctgcactactctgcggctggaaagt

SEQ ID NO: 1395168 - DNA, 25 bp, Homo sapien
cctcggttgctagggacattgcgga

SEQ ID NO: 1395169 - DNA, 25 bp, Homo sapien
ccagatgctcggtgtgatatatgta

SEQ ID NO: 1395170 - DNA, 25 bp, Homo sapien
gtttaccgaacgactgatccctcag

SEQ ID NO: 1395171 - DNA, 25 bp, Homo sapien
cattgcggagttgcgggactacgtt

SEQ ID NO: 1395172 - DNA, 25 bp, Homo sapien
tgtcatccttgctcagcggccatgc

SEQ ID NO: 1395173 - DNA, 25 bp, Homo sapien
tgtcattccaattttagcgcatgtg

SEQ ID NO: 1395174 - DNA, 25 bp, Homo sapien
ttatggaacagttcacaaatgtgca

SEQ ID NO: 1395175 - DNA, 25 bp, Homo sapien
attttagcgcatgtgctgctgaagt

SEQ ID NO: 1395176 - DNA, 25 bp, Homo sapien
cacgatgtgacatatctgcagtccc

SEQ ID NO: 1395177 - DNA, 25 bp, Homo sapien
ctagtttgggaacagattagaggcc

SEQ ID NO: 1395178 - DNA, 25 bp, Homo sapien
tgaatacctgcctcaagctagagag

SEQ ID NO: 1395179 - DNA, 25 bp, Homo sapien
tgtcctcggcatggatcttgaacag

SEQ ID NO: 1395180 - DNA, 25 bp, Homo sapien
tcagcctcatgtagcacgaataggg

SEQ ID NO: 1395181 - DNA, 25 bp, Homo sapien
tctgtgtggttgtagcaaggactca

SEQ ID NO: 1395182 - DNA, 25 bp, Homo sapien
tctgcatgtgtagagtctccccatt

SEQ ID NO: 1395183 - DNA, 25 bp, Homo sapien
tcatggcgtgttgacccagcagagc

SEQ ID NO: 1395184 - DNA, 25 bp, Homo sapien
taatgccggaaaggatagcaccagc

SEQ ID NO: 1395185 - DNA, 25 bp, Homo sapien
gttccagcacgaggtttatagccaa

SEQ ID NO: 1395186 - DNA, 25 bp, Homo sapien
caaaccttcggttctggcagagttc

SEQ ID NO: 1395187 - DNA, 25 bp, Homo sapien
tcctagaggacgagaatgatgccat

SEQ ID NO: 1395188 - DNA, 25 bp, Homo sapien
gcagagccacgagatttaaaccagg

SEQ ID NO: 1395189 - DNA, 25 bp, Homo sapien
tactgtgcccctgaccataagactt

SEQ ID NO: 1395190 - DNA, 25 bp, Homo sapien
taccatttgggagtactgtccttcc

SEQ ID NO: 1395191 - DNA, 25 bp, Homo sapien
tgcctggctaacaagatctcgctat

SEQ ID NO: 1395192 - DNA, 25 bp, Homo sapien
gaactatgtaactagcagcctctgg

SEQ ID NO: 1395193 - DNA, 25 bp, Homo sapien
catctcagccactttcgaggagtta

SEQ ID NO: 1395194 - DNA, 25 bp, Homo sapien
tctttacagaggtacctgagggagg

SEQ ID NO: 1395195 - DNA, 25 bp, Homo sapien
gatgtcagtatctcaacctctcttg

SEQ ID NO: 1395196 - DNA, 25 bp, Homo sapien
gttactttcagagcaaccagcttga

SEQ ID NO: 1395197 - DNA, 25 bp, Homo sapien
gaacaggtattagaatgaggccgaa

SEQ ID NO: 1395198 - DNA, 25 bp, Homo sapien
caggctactgaggtattttagagca

SEQ ID NO: 1395199 - DNA, 25 bp, Homo sapien
gatcacggtgaccagagatttctag

SEQ ID NO: 1395200 - DNA, 25 bp, Homo sapien
tcaaaggcatctcggttgtgaaacc

SEQ ID NO: 1395201 - DNA, 25 bp, Homo sapien
tcctagttgatccatggctcgggct

SEQ ID NO: 1395202 - DNA, 25 bp, Homo sapien
tagcgtgccaagcagaaatcacttc

SEQ ID NO: 1395203 - DNA, 25 bp, Homo sapien
tgtcataactagagtgggccagggt

SEQ ID NO: 1395204 - DNA, 25 bp, Homo sapien
tccaccttgagatggacttactcct

SEQ ID NO: 1395205 - DNA, 25 bp, Homo sapien
tcctcaatgatcagaagtccacctt

SEQ ID NO: 1395206 - DNA, 25 bp, Homo sapien
caatgatcagaagtccaccttgaga

SEQ ID NO: 1395207 - DNA, 25 bp, Homo sapien
agatggacttactcctagttctgcc

SEQ ID NO: 1395208 - DNA, 25 bp, Homo sapien
tcctaatagggatagagttaagggc

SEQ ID NO: 1395209 - DNA, 25 bp, Homo sapien
ctcttaccttaactcttattcggtg

SEQ ID NO: 1395210 - DNA, 25 bp, Homo sapien
ggatagagttaagggcggaggcaac

SEQ ID NO: 1395211 - DNA, 25 bp, Homo sapien
catcaggtgaagagctacctcttac

SEQ ID NO: 1395212 - DNA, 25 bp, Homo sapien
aaagttgctgggaagctggtaaaca

SEQ ID NO: 1395213 - DNA, 25 bp, Homo sapien
ggctgtaagcctaaggtttgaaatc

SEQ ID NO: 1395214 - DNA, 25 bp, Homo sapien
gcccctgcttgacatctgctttagt

SEQ ID NO: 1395215 - DNA, 25 bp, Homo sapien
cctaactagaaagagacactggtgt

SEQ ID NO: 1395216 - DNA, 25 bp, Homo sapien
gtagggagcttctcagcaaagccag

SEQ ID NO: 1395217 - DNA, 25 bp, Homo sapien
gaggtagggagcttctcagcaaagc

SEQ ID NO: 1395218 - DNA, 25 bp, Homo sapien
agggaggtagggagcttctcagcaa

SEQ ID NO: 1395219 - DNA, 25 bp, Homo sapien
ggtagggagcttctcagcaaagcca

SEQ ID NO: 1395220 - DNA, 25 bp, Homo sapien
tagtcacttgatcagtcctgctgcc

SEQ ID NO: 1395221 - DNA, 25 bp, Homo sapien
aaaacaggtggcacccagaccatca

SEQ ID NO: 1395222 - DNA, 25 bp, Homo sapien
cattcaggagacaggaactcattcc

SEQ ID NO: 1395223 - DNA, 25 bp, Homo sapien
cttagatcactggttcaaggaggga

SEQ ID NO: 1395224 - DNA, 25 bp, Homo sapien
ctataagcccctagaattgctccat

SEQ ID NO: 1395225 - DNA, 25 bp, Homo sapien
gtttcccttggatctcatctgctcc

SEQ ID NO: 1395226 - DNA, 25 bp, Homo sapien
ataagcccctagaattgctccatgg

SEQ ID NO: 1395227 - DNA, 25 bp, Homo sapien
tgctccatggcctatctcggtttcc

SEQ ID NO: 1395228 - DNA, 25 bp, Homo sapien
tatcaacctctccccatttccttgt

SEQ ID NO: 1395229 - DNA, 25 bp, Homo sapien
tcaacctctccccatttccttgtta

SEQ ID NO: 1395230 - DNA, 25 bp, Homo sapien
ccctgtatcaacctctccccatttc

SEQ ID NO: 1395231 - DNA, 25 bp, Homo sapien
tgtatcaacctctccccatttcctt

SEQ ID NO: 1395232 - DNA, 25 bp, Homo sapien
tcattggttccccaatcatggtccg

SEQ ID NO: 1395233 - DNA, 25 bp, Homo sapien
tggtccggtcaatccgtcttctctt

SEQ ID NO: 1395234 - DNA, 25 bp, Homo sapien
gagtcaggtgaacaaaattcattgg

SEQ ID NO: 1395235 - DNA, 25 bp, Homo sapien
cccaatcatggtccggtcaatccgt

SEQ ID NO: 1395236 - DNA, 25 bp, Homo sapien
tggacaggaacaggaggtaatagct

SEQ ID NO: 1395237 - DNA, 25 bp, Homo sapien
tggcctgcagagtgaacactggaca

SEQ ID NO: 1395238 - DNA, 25 bp, Homo sapien
gataaggagtcatgtcttaaggccc

SEQ ID NO: 1395239 - DNA, 25 bp, Homo sapien
tgaccatagaagctcctgacacaga

SEQ ID NO: 1395240 - DNA, 25 bp, Homo sapien
acagtaactgactgctctttgggtt

SEQ ID NO: 1395241 - DNA, 25 bp, Homo sapien
ctgactgctctttgggttaggatgg

SEQ ID NO: 1395242 - DNA, 25 bp, Homo sapien
taactgactgctctttgggttagga

SEQ ID NO: 1395243 - DNA, 25 bp, Homo sapien
cagtaactgactgctctttgggtta

SEQ ID NO: 1395244 - DNA, 25 bp, Homo sapien
agcccagtttgtgccaaaattcact

SEQ ID NO: 1395245 - DNA, 25 bp, Homo sapien
cggctggggtttctctaccacacag

SEQ ID NO: 1395246 - DNA, 25 bp, Homo sapien
ctggggtttctctaccacacagcag

SEQ ID NO: 1395247 - DNA, 25 bp, Homo sapien
cagcagcccagtttgtgccaaaatt

SEQ ID NO: 1395248 - DNA, 25 bp, Homo sapien
gttccctgatggttccagcttcact

SEQ ID NO: 1395249 - DNA, 25 bp, Homo sapien
ttccctgatggttccagcttcactc

SEQ ID NO: 1395250 - DNA, 25 bp, Homo sapien
ccctgatggttccagcttcactccg

SEQ ID NO: 1395251 - DNA, 25 bp, Homo sapien
tccctgatggttccagcttcactcc

SEQ ID NO: 1395252 - DNA, 25 bp, Homo sapien
gtctgaggccccaaagggctctttc

SEQ ID NO: 1395253 - DNA, 25 bp, Homo sapien
ctgtctgaggccccaaagggctctt

SEQ ID NO: 1395254 - DNA, 25 bp, Homo sapien
tgtctgaggccccaaagggctcttt

SEQ ID NO: 1395255 - DNA, 25 bp, Homo sapien
tctgaggccccaaagggctctttcc

SEQ ID NO: 1395256 - DNA, 25 bp, Homo sapien
tggatgggtccagacaaagtggaat

SEQ ID NO: 1395257 - DNA, 25 bp, Homo sapien
gggtccagacaaagtggaatccctg

SEQ ID NO: 1395258 - DNA, 25 bp, Homo sapien
ggtgtttggacaacccactcctcac

SEQ ID NO: 1395259 - DNA, 25 bp, Homo sapien
ctcagagcctgagagatgaacagga

SEQ ID NO: 1395260 - DNA, 25 bp, Homo sapien
tgagaggccctagacctgtacacca

SEQ ID NO: 1395261 - DNA, 25 bp, Homo sapien
cattcccaaacactatgaacctcag

SEQ ID NO: 1395262 - DNA, 25 bp, Homo sapien
ccttgagaaacctcctgatgagcct

SEQ ID NO: 1395263 - DNA, 25 bp, Homo sapien
gctagaagcacttagagttaagagg

SEQ ID NO: 1395264 - DNA, 25 bp, Homo sapien
tgtttatctgtgtcctgtatcactg

SEQ ID NO: 1395265 - DNA, 25 bp, Homo sapien
cctctgtttgcacatgcgtggcatg

SEQ ID NO: 1395266 - DNA, 25 bp, Homo sapien
ggcatggccatatctccacgtgtgt

SEQ ID NO: 1395267 - DNA, 25 bp, Homo sapien
gcactcctgtgtgtacacctctgtt

SEQ ID NO: 1395268 - DNA, 25 bp, Homo sapien
cagggtaggacacatctgggtttct

SEQ ID NO: 1395269 - DNA, 25 bp, Homo sapien
gcatttccccagtcctatagtacag

SEQ ID NO: 1395270 - DNA, 25 bp, Homo sapien
gctttggcaccctagactgatttaa

SEQ ID NO: 1395271 - DNA, 25 bp, Homo sapien
tactagtgtccaaggaagaacttcc

SEQ ID NO: 1395272 - DNA, 25 bp, Homo sapien
gagtaaccagaaggagcggaagcta

SEQ ID NO: 1395273 - DNA, 25 bp, Homo sapien
gctgtactgtgactggactctccct

SEQ ID NO: 1395274 - DNA, 25 bp, Homo sapien
tgaccaatgatgacgagaagtgacc

SEQ ID NO: 1395275 - DNA, 25 bp, Homo sapien
tcaccactggaagggaggagtaacc

SEQ ID NO: 1395276 - DNA, 25 bp, Homo sapien
tgaaatatggaaccgggaaagccac

SEQ ID NO: 1395277 - DNA, 25 bp, Homo sapien
gccaagtggtgctcagaactcgacc

SEQ ID NO: 1395278 - DNA, 25 bp, Homo sapien
taaggccacgtcctgagagccaagt

SEQ ID NO: 1395279 - DNA, 25 bp, Homo sapien
tcatactaggacttgagggtctcag

SEQ ID NO: 1395280 - DNA, 25 bp, Homo sapien
ccatccagacgttcagctacagctg

SEQ ID NO: 1395281 - DNA, 25 bp, Homo sapien
tctggactgcggaggcactgcactg

SEQ ID NO: 1395282 - DNA, 25 bp, Homo sapien
aagcggcggcgacgcgattacgaaa

SEQ ID NO: 1395283 - DNA, 25 bp, Homo sapien
gacgtgggagggtgcctctgcagcc

SEQ ID NO: 1395284 - DNA, 25 bp, Homo sapien
taacagaggatataccactgctggg

SEQ ID NO: 1395285 - DNA, 25 bp, Homo sapien
caagctctgactgaggcacgcatgg

SEQ ID NO: 1395286 - DNA, 25 bp, Homo sapien
cacctggctgaaatgcggaaagtat

SEQ ID NO: 1395287 - DNA, 25 bp, Homo sapien
tattgtggtacaaggcactgtcaac

SEQ ID NO: 1395288 - DNA, 25 bp, Homo sapien
aaatgatcgggcaagcaactgcagc

SEQ ID NO: 1395289 - DNA, 25 bp, Homo sapien
tctaggaagctatgagggaccctgt

SEQ ID NO: 1395290 - DNA, 25 bp, Homo sapien
ccatgggccacaaagaagttgctgt

SEQ ID NO: 1395291 - DNA, 25 bp, Homo sapien
ttcgaactggacttgctctaaggcc

SEQ ID NO: 1395292 - DNA, 25 bp, Homo sapien
cctgcatttgcaatacgtaatactg

SEQ ID NO: 1395293 - DNA, 25 bp, Homo sapien
taatactgatcagtgggcacagttc

SEQ ID NO: 1395294 - DNA, 25 bp, Homo sapien
cagctacattgagaccctgaaatga

SEQ ID NO: 1395295 - DNA, 25 bp, Homo sapien
tcaatcttctgaacggcataagtcc

SEQ ID NO: 1395296 - DNA, 25 bp, Homo sapien
gaactattcagacgcgcaagatacg

SEQ ID NO: 1395297 - DNA, 25 bp, Homo sapien
aagatacgtaaccagcagtcctccg

SEQ ID NO: 1395298 - DNA, 25 bp, Homo sapien
gacggtcccagtctaacgaagaatg

SEQ ID NO: 1395299 - DNA, 25 bp, Homo sapien
aatagtcctgcctagcatgcctcgg

SEQ ID NO: 1395300 - DNA, 25 bp, Homo sapien
tattgtaactgtgcaagatggacag

SEQ ID NO: 1395301 - DNA, 25 bp, Homo sapien
ccagactggcaaaagctaattgcct

SEQ ID NO: 1395302 - DNA, 25 bp, Homo sapien
aatccctactggaggcattggccag

SEQ ID NO: 1395303 - DNA, 25 bp, Homo sapien
caaggtgagttatctcttgtagaca

SEQ ID NO: 1395304 - DNA, 25 bp, Homo sapien
ggccaaatttttgtgggtggctcca

SEQ ID NO: 1395305 - DNA, 25 bp, Homo sapien
cctggccaaatttttgtgggtggct

SEQ ID NO: 1395306 - DNA, 25 bp, Homo sapien
acaagagcaagaaccctggccaaat

SEQ ID NO: 1395307 - DNA, 25 bp, Homo sapien
caagaaccctggccaaatttttgtg

SEQ ID NO: 1395308 - DNA, 25 bp, Homo sapien
agttaacatggttctgtttaccttg

SEQ ID NO: 1395309 - DNA, 25 bp, Homo sapien
ggttctgtttaccttgattagtgaa

SEQ ID NO: 1395310 - DNA, 25 bp, Homo sapien
tctgtttaccttgattagtgaagta

SEQ ID NO: 1395311 - DNA, 25 bp, Homo sapien
acatggttctgtttaccttgattag

SEQ ID NO: 1395312 - DNA, 25 bp, Homo sapien
tatgtgtgggatttcggagccttac

SEQ ID NO: 1395313 - DNA, 25 bp, Homo sapien
gagaatgtccatccaacatgccctt

SEQ ID NO: 1395314 - DNA, 25 bp, Homo sapien
ggaaccaggtgctaacaagaagctg

SEQ ID NO: 1395315 - DNA, 25 bp, Homo sapien
gcagatgatattcaggcccaaccag

SEQ ID NO: 1395316 - DNA, 25 bp, Homo sapien
cctccagagctggaaaatttgatgc

SEQ ID NO: 1395317 - DNA, 25 bp, Homo sapien
ggactatatgtgatgaccacctgta

SEQ ID NO: 1395318 - DNA, 25 bp, Homo sapien
gaggtgacattcctagactctacag

SEQ ID NO: 1395319 - DNA, 25 bp, Homo sapien
tgtgcaaacccatctctggatagct

SEQ ID NO: 1395320 - DNA, 25 bp, Homo sapien
aacaatgatggtagcagctctctcc

SEQ ID NO: 1395321 - DNA, 25 bp, Homo sapien
tagacatcttgttctagcaacaatg

SEQ ID NO: 1395322 - DNA, 25 bp, Homo sapien
ttctgaaagttaatctaggtcacct

SEQ ID NO: 1395323 - DNA, 25 bp, Homo sapien
taggtcaccttctatatcctgtgct

SEQ ID NO: 1395324 - DNA, 25 bp, Homo sapien
catagaaaacaagaggtagagaccc

SEQ ID NO: 1395325 - DNA, 25 bp, Homo sapien
tagttacttctgttagctctgagag

SEQ ID NO: 1395326 - DNA, 25 bp, Homo sapien
tggctaaagaagtcaccatagtgat

SEQ ID NO: 1395327 - DNA, 25 bp, Homo sapien
gctctcactgcaacatagttacttc

SEQ ID NO: 1395328 - DNA, 25 bp, Homo sapien
gaaacgtcctgaagagcgtccagct

SEQ ID NO: 1395329 - DNA, 25 bp, Homo sapien
cgatctggaaacgagctccgagggc

SEQ ID NO: 1395330 - DNA, 25 bp, Homo sapien
gaaagtccctcttacctcgatctgg

SEQ ID NO: 1395331 - DNA, 25 bp, Homo sapien
cctacacagtaggagaggcacgtcc

SEQ ID NO: 1395332 - DNA, 25 bp, Homo sapien
cctggcgggaggagggcccgacgag

SEQ ID NO: 1395333 - DNA, 25 bp, Homo sapien
ctggcgggaggagggcccgacgagg

SEQ ID NO: 1395334 - DNA, 25 bp, Homo sapien
gcctggcgggaggagggcccgacga

SEQ ID NO: 1395335 - DNA, 25 bp, Homo sapien
gacaactggggcttctcgacgtcca

SEQ ID NO: 1395336 - DNA, 25 bp, Homo sapien
ggcccaggtacaggaggtgcttccc

SEQ ID NO: 1395337 - DNA, 25 bp, Homo sapien
cggcccaggtacaggaggtgcttcc

SEQ ID NO: 1395338 - DNA, 25 bp, Homo sapien
cgacgtccacccttttcagggcgcg

SEQ ID NO: 1395339 - DNA, 25 bp, Homo sapien
tggccggagaaaggcaacctccggc

SEQ ID NO: 1395340 - DNA, 25 bp, Homo sapien
acctccggcctccgccgacgcccag

SEQ ID NO: 1395341 - DNA, 25 bp, Homo sapien
acctcccgaggggactcgagtgagc

SEQ ID NO: 1395342 - DNA, 25 bp, Homo sapien
ggacctcccgaggggactcgagtga

SEQ ID NO: 1395343 - DNA, 25 bp, Homo sapien
ggcacgtccagcctcagcggcgagg

SEQ ID NO: 1395344 - DNA, 25 bp, Homo sapien
agcctcagcggcgaggcgcactcgt

SEQ ID NO: 1395345 - DNA, 25 bp, Homo sapien
cgtccagcctcagcggcgaggcgca

SEQ ID NO: 1395346 - DNA, 25 bp, Homo sapien
ctgccctcggggggcacgtccagcc

SEQ ID NO: 1395347 - DNA, 25 bp, Homo sapien
gtggcctcaccagcacgcggggcgc

SEQ ID NO: 1395348 - DNA, 25 bp, Homo sapien
cctccttggcgttgttcctgttctg

SEQ ID NO: 1395349 - DNA, 25 bp, Homo sapien
gggcgcgggcccgcccgccgcgtgc

SEQ ID NO: 1395350 - DNA, 25 bp, Homo sapien
ccgcgtgcccgccccgtgagcggcc

SEQ ID NO: 1395351 - DNA, 25 bp, Homo sapien
ctgcaccgcgtccccgtccttggag

SEQ ID NO: 1395352 - DNA, 25 bp, Homo sapien
gaaggtggtgtagagctgcggcgtc

SEQ ID NO: 1395353 - DNA, 25 bp, Homo sapien
ggggcacgccctccggaggcggcag

SEQ ID NO: 1395354 - DNA, 25 bp, Homo sapien
agagctgcggcgtctgcaccgcgtc

SEQ ID NO: 1395355 - DNA, 25 bp, Homo sapien
ctgaggcgcccagggcaaaagctgc

SEQ ID NO: 1395356 - DNA, 25 bp, Homo sapien
tgtccttgccccgacgtcggtgggc

SEQ ID NO: 1395357 - DNA, 25 bp, Homo sapien
gagccccggagtctcgatgtccttg

SEQ ID NO: 1395358 - DNA, 25 bp, Homo sapien
actgaggcgcccagggcaaaagctg

SEQ ID NO: 1395359 - DNA, 25 bp, Homo sapien
gggtgggcatcactgggaggactgg

SEQ ID NO: 1395360 - DNA, 25 bp, Homo sapien
gggccgggggtgggcatcactggga

SEQ ID NO: 1395361 - DNA, 25 bp, Homo sapien
cgggggtgggcatcactgggaggac

SEQ ID NO: 1395362 - DNA, 25 bp, Homo sapien
ggtgggcatcactgggaggactggg

SEQ ID NO: 1395363 - DNA, 25 bp, Homo sapien
ggaggatgccgacccttttccgata

SEQ ID NO: 1395364 - DNA, 25 bp, Homo sapien
ttttccgatactcccagggtattca

SEQ ID NO: 1395365 - DNA, 25 bp, Homo sapien
gccaagtactgagctacatgctggg

SEQ ID NO: 1395366 - DNA, 25 bp, Homo sapien
tcatgcaggacattgatttatttgt

SEQ ID NO: 1395367 - DNA, 25 bp, Homo sapien
tccccagggccagactgactcccag

SEQ ID NO: 1395368 - DNA, 25 bp, Homo sapien
cccagggccagactgactcccagta

SEQ ID NO: 1395369 - DNA, 25 bp, Homo sapien
cagggccagactgactcccagtagc

SEQ ID NO: 1395370 - DNA, 25 bp, Homo sapien
gggccagactgactcccagtagctc

SEQ ID NO: 1395371 - DNA, 25 bp, Homo sapien
cagaaggagagaaggacaaaaggcc

SEQ ID NO: 1395372 - DNA, 25 bp, Homo sapien
agaaggacaaaaggccaagcctggg

SEQ ID NO: 1395373 - DNA, 25 bp, Homo sapien
gagaaggacaaaaggccaagcctgg

SEQ ID NO: 1395374 - DNA, 25 bp, Homo sapien
ggttcccagcctgatccacatcagt

SEQ ID NO: 1395375 - DNA, 25 bp, Homo sapien
agtcaccatgctccatggattcctg

SEQ ID NO: 1395376 - DNA, 25 bp, Homo sapien
tggttcccagcctgatccacatcag

SEQ ID NO: 1395377 - DNA, 25 bp, Homo sapien
tgctccatggattcctggttcccag

SEQ ID NO: 1395378 - DNA, 25 bp, Homo sapien
ccaccagatcccctgatatccacac

SEQ ID NO: 1395379 - DNA, 25 bp, Homo sapien
gagctatgccatccacagtatgggt

SEQ ID NO: 1395380 - DNA, 25 bp, Homo sapien
acagcccctggagctatgccatcca

SEQ ID NO: 1395381 - DNA, 25 bp, Homo sapien
ccctggagctatgccatccacagta

SEQ ID NO: 1395382 - DNA, 25 bp, Homo sapien
ctgacaggccccatgccgggcacac

SEQ ID NO: 1395383 - DNA, 25 bp, Homo sapien
tctgacaggccccatgccgggcaca

SEQ ID NO: 1395384 - DNA, 25 bp, Homo sapien
ctctgacaggccccatgccgggcac

SEQ ID NO: 1395385 - DNA, 25 bp, Homo sapien
tgagagggaggtagacaatacagcc

SEQ ID NO: 1395386 - DNA, 25 bp, Homo sapien
agctccagccctatgatccgtcgtg

SEQ ID NO: 1395387 - DNA, 25 bp, Homo sapien
ggtagacaatacagccagaaaaagc

SEQ ID NO: 1395388 - DNA, 25 bp, Homo sapien
gtgctgtttgggctgtccgcttccc

SEQ ID NO: 1395389 - DNA, 25 bp, Homo sapien
gcagggctgtaggcatcaatctctt

SEQ ID NO: 1395390 - DNA, 25 bp, Homo sapien
aaggaacatgactgtgatgttactg

SEQ ID NO: 1395391 - DNA, 25 bp, Homo sapien
aacatgactgtgatgttactgtggg

SEQ ID NO: 1395392 - DNA, 25 bp, Homo sapien
ggaacatgactgtgatgttactgtg

SEQ ID NO: 1395393 - DNA, 25 bp, Homo sapien
ctgctagtgagagtgagtagaggct

SEQ ID NO: 1395394 - DNA, 25 bp, Homo sapien
gatgggtgacaggtggtacagcggg

SEQ ID NO: 1395395 - DNA, 25 bp, Homo sapien
ctagtgagagtgagtagaggctgat

SEQ ID NO: 1395396 - DNA, 25 bp, Homo sapien
ccttgatgaaggtcaggacatcatc

SEQ ID NO: 1395397 - DNA, 25 bp, Homo sapien
caaggcagctccccctactcctgca

SEQ ID NO: 1395398 - DNA, 25 bp, Homo sapien
aacaaggcagctccccctactcctg

SEQ ID NO: 1395399 - DNA, 25 bp, Homo sapien
agaacaaggcagctccccctactcc

SEQ ID NO: 1395400 - DNA, 25 bp, Homo sapien
ggaagaggagaacaaggcagctccc

SEQ ID NO: 1395401 - DNA, 25 bp, Homo sapien
tggtgggtgaatgggaaggggctgc

SEQ ID NO: 1395402 - DNA, 25 bp, Homo sapien
ctggtgggtgaatgggaaggggctg

SEQ ID NO: 1395403 - DNA, 25 bp, Homo sapien
gggtgagggaactctgtcctcagac

SEQ ID NO: 1395404 - DNA, 25 bp, Homo sapien
ggtgagggaactctgtcctcagaca

SEQ ID NO: 1395405 - DNA, 25 bp, Homo sapien
gtgagggaactctgtcctcagacac

SEQ ID NO: 1395406 - DNA, 25 bp, Homo sapien
ctcaatctcatccaggtagaaggcg

SEQ ID NO: 1395407 - DNA, 25 bp, Homo sapien
atccaggtagaaggcgcagacggca

SEQ ID NO: 1395408 - DNA, 25 bp, Homo sapien
gctcaatctcatccaggtagaaggc

SEQ ID NO: 1395409 - DNA, 25 bp, Homo sapien
gtagaaggcgcagacggcagagcca

SEQ ID NO: 1395410 - DNA, 25 bp, Homo sapien
atgcaggataggtgctgaaaggaac

SEQ ID NO: 1395411 - DNA, 25 bp, Homo sapien
caggataggtgctgaaaggaactgc

SEQ ID NO: 1395412 - DNA, 25 bp, Homo sapien
gaaaagatgcaggataggtgctgaa

SEQ ID NO: 1395413 - DNA, 25 bp, Homo sapien
gagccagaaaagatgcaggataggt

SEQ ID NO: 1395414 - DNA, 25 bp, Homo sapien
ggccatgcaggttcacaggcccagt

SEQ ID NO: 1395415 - DNA, 25 bp, Homo sapien
ccagtcaaggcctgtaaaacatcaa

SEQ ID NO: 1395416 - DNA, 25 bp, Homo sapien
aggcgagccgcccatgtcacgttta

SEQ ID NO: 1395417 - DNA, 25 bp, Homo sapien
caaagagagcagagcggccatgcag

SEQ ID NO: 1395418 - DNA, 25 bp, Homo sapien
ccacagagacctcgcggaagaagaa

SEQ ID NO: 1395419 - DNA, 25 bp, Homo sapien
agagacctcgcggaagaagaagtag

SEQ ID NO: 1395420 - DNA, 25 bp, Homo sapien
atcctccacagagacctcgcggaag

SEQ ID NO: 1395421 - DNA, 25 bp, Homo sapien
cccagccgagcatcctccacagaga

SEQ ID NO: 1395422 - DNA, 25 bp, Homo sapien
tggagtcatacttggcggagcggag

SEQ ID NO: 1395423 - DNA, 25 bp, Homo sapien
gctgtggctgagtacaggctgccct

SEQ ID NO: 1395424 - DNA, 25 bp, Homo sapien
ggcttctgtaaactacagcatcact

SEQ ID NO: 1395425 - DNA, 25 bp, Homo sapien
ctcggagccacttggagtcatactt

SEQ ID NO: 1395426 - DNA, 25 bp, Homo sapien
caaagatggccacgttggactgggt

SEQ ID NO: 1395427 - DNA, 25 bp, Homo sapien
ctgcaaagatggccacgttggactg

SEQ ID NO: 1395428 - DNA, 25 bp, Homo sapien
aaggggcatcgagcctgcccactca

SEQ ID NO: 1395429 - DNA, 25 bp, Homo sapien
catcaaaggggcatcgagcctgccc

SEQ ID NO: 1395430 - DNA, 25 bp, Homo sapien
cagggctgaatgagttcgttccaca

SEQ ID NO: 1395431 - DNA, 25 bp, Homo sapien
tcgttccacaggcaaggagcgtctg

SEQ ID NO: 1395432 - DNA, 25 bp, Homo sapien
cccagggaacaagaacacgaatata

SEQ ID NO: 1395433 - DNA, 25 bp, Homo sapien
cacgaatatagttgtagcactcatc

SEQ ID NO: 1395434 - DNA, 25 bp, Homo sapien
tccacattctcgtctcactccttac

SEQ ID NO: 1395435 - DNA, 25 bp, Homo sapien
cctccacattctcgtctcactcctt

SEQ ID NO: 1395436 - DNA, 25 bp, Homo sapien
ctccacattctcgtctcactcctta

SEQ ID NO: 1395437 - DNA, 25 bp, Homo sapien
ttccccgtacagcacagttctccac

SEQ ID NO: 1395438 - DNA, 25 bp, Homo sapien
agctttccccgtacagcacagttct

SEQ ID NO: 1395439 - DNA, 25 bp, Homo sapien
cgtcagctttccccgtacagcacag

SEQ ID NO: 1395440 - DNA, 25 bp, Homo sapien
tcagctttccccgtacagcacagtt

SEQ ID NO: 1395441 - DNA, 25 bp, Homo sapien
gggataagttgaagagggaaaatca

SEQ ID NO: 1395442 - DNA, 25 bp, Homo sapien
ctgaagggataagttgaagagggaa

SEQ ID NO: 1395443 - DNA, 25 bp, Homo sapien
tgaagggataagttgaagagggaaa

SEQ ID NO: 1395444 - DNA, 25 bp, Homo sapien
ggataagttgaagagggaaaatcat

SEQ ID NO: 1395445 - DNA, 25 bp, Homo sapien
cttcttcttcggcttgaagatcgaa

SEQ ID NO: 1395446 - DNA, 25 bp, Homo sapien
cttgaagatcgaaggagaaaacgtg

SEQ ID NO: 1395447 - DNA, 25 bp, Homo sapien
ctccccttcttcttcggcttgaaga

SEQ ID NO: 1395448 - DNA, 25 bp, Homo sapien
tcttcggcttgaagatcgaaggaga

SEQ ID NO: 1395449 - DNA, 25 bp, Homo sapien
cactagcaaggtccggttcaaggtc

SEQ ID NO: 1395450 - DNA, 25 bp, Homo sapien
ccactagcaaggtccggttcaaggt

SEQ ID NO: 1395451 - DNA, 25 bp, Homo sapien
gccactagcaaggtccggttcaagg

SEQ ID NO: 1395452 - DNA, 25 bp, Homo sapien
agccactagcaaggtccggttcaag

SEQ ID NO: 1395453 - DNA, 25 bp, Homo sapien
agagatggggcaaggtaggtactgg

SEQ ID NO: 1395454 - DNA, 25 bp, Homo sapien
ggcaaggtaggtactgggcactcac

SEQ ID NO: 1395455 - DNA, 25 bp, Homo sapien
agtctctaattgttcacagagatgg

SEQ ID NO: 1395456 - DNA, 25 bp, Homo sapien
gtctctaattgttcacagagatggg

SEQ ID NO: 1395457 - DNA, 25 bp, Homo sapien
cagcagtagcagcaagggcatgaag

SEQ ID NO: 1395458 - DNA, 25 bp, Homo sapien
gaaaggcggcctgagtatggggaag

SEQ ID NO: 1395459 - DNA, 25 bp, Homo sapien
cttgaaggtcagagatcaacagagg

SEQ ID NO: 1395460 - DNA, 25 bp, Homo sapien
aggtcagagatcaacagagggaggg

SEQ ID NO: 1395461 - DNA, 25 bp, Homo sapien
ggtgccccctcacccataagccggc

SEQ ID NO: 1395462 - DNA, 25 bp, Homo sapien
cctgtgcggggcagctcaggcccca

SEQ ID NO: 1395463 - DNA, 25 bp, Homo sapien
cagggggtgccccctcacccataag

SEQ ID NO: 1395464 - DNA, 25 bp, Homo sapien
cagctcaggccccagggggtgcccc

SEQ ID NO: 1395465 - DNA, 25 bp, Homo sapien
aaaatggctaaacgtgcgcctctct

SEQ ID NO: 1395466 - DNA, 25 bp, Homo sapien
aatggctaaacgtgcgcctctctcc

SEQ ID NO: 1395467 - DNA, 25 bp, Homo sapien
caagggactagtgaagcaaaatggc

SEQ ID NO: 1395468 - DNA, 25 bp, Homo sapien
tacaagggactagtgaagcaaaatg

SEQ ID NO: 1395469 - DNA, 25 bp, Homo sapien
tgtgggggcttgagggggataggaa

SEQ ID NO: 1395470 - DNA, 25 bp, Homo sapien
ggttggtgactcctgtgggggcttg

SEQ ID NO: 1395471 - DNA, 25 bp, Homo sapien
gttggtgactcctgtgggggcttga

SEQ ID NO: 1395472 - DNA, 25 bp, Homo sapien
tggattagtccagcctctacaaaca

SEQ ID NO: 1395473 - DNA, 25 bp, Homo sapien
tctacaaacacttggctggcctttg

SEQ ID NO: 1395474 - DNA, 25 bp, Homo sapien
cactttaggctggattagtccagcc

SEQ ID NO: 1395475 - DNA, 25 bp, Homo sapien
ggccttctagactcaactatgatac

SEQ ID NO: 1395476 - DNA, 25 bp, Homo sapien
tctgccctggaagaatccgagctgc

SEQ ID NO: 1395477 - DNA, 25 bp, Homo sapien
tctaaagcctcgaaaagaggtgggc

SEQ ID NO: 1395478 - DNA, 25 bp, Homo sapien
caccccatctgaagcacatgggaga

SEQ ID NO: 1395479 - DNA, 25 bp, Homo sapien
caaggagcctgtggaaccggagctt

SEQ ID NO: 1395480 - DNA, 25 bp, Homo sapien
tcaggaggcagttgccagctcggat

SEQ ID NO: 1395481 - DNA, 25 bp, Homo sapien
ataggcgctgggaccgatgttgctc

SEQ ID NO: 1395482 - DNA, 25 bp, Homo sapien
gagacctcagtctaacaaagccccg

SEQ ID NO: 1395483 - DNA, 25 bp, Homo sapien
gtcccagagccacgttagcgagagg

SEQ ID NO: 1395484 - DNA, 25 bp, Homo sapien
gagcacccgtgacacaaagtccgga

SEQ ID NO: 1395485 - DNA, 25 bp, Homo sapien
tacggagcgcgcctcaaataatccc

SEQ ID NO: 1395486 - DNA, 25 bp, Homo sapien
gaaagcccaattgaacgaggtgccc

SEQ ID NO: 1395487 - DNA, 25 bp, Homo sapien
ccttcagagggtgctcagattccgg

SEQ ID NO: 1395488 - DNA, 25 bp, Homo sapien
caatccgtggttgtgctcaggcgag

SEQ ID NO: 1395489 - DNA, 25 bp, Homo sapien
ggatggtgcttgaatttgggttcca

SEQ ID NO: 1395490 - DNA, 25 bp, Homo sapien
gctgcgctgagttcgcaatccgtgg

SEQ ID NO: 1395491 - DNA, 25 bp, Homo sapien
ctcaggcgagatgcgatgagcgtcc

SEQ ID NO: 1395492 - DNA, 25 bp, Homo sapien
tgcagtagcataatcttggctcact

SEQ ID NO: 1395493 - DNA, 25 bp, Homo sapien
gacagagactcactctgtcgcccca

SEQ ID NO: 1395494 - DNA, 25 bp, Homo sapien
tggagtgcagtagcataatcttggc

SEQ ID NO: 1395495 - DNA, 25 bp, Homo sapien
agagactcactctgtcgccccaggc

SEQ ID NO: 1395496 - DNA, 25 bp, Homo sapien
ctaaaacaaacatcggactgttcca

SEQ ID NO: 1395497 - DNA, 25 bp, Homo sapien
taaaacaaacatcggactgttccat

SEQ ID NO: 1395498 - DNA, 25 bp, Homo sapien
aaagacttccccatgaatgaagtaa

SEQ ID NO: 1395499 - DNA, 25 bp, Homo sapien
agacttccccatgaatgaagtaaat

SEQ ID NO: 1395500 - DNA, 25 bp, Homo sapien
aaatgaacattataacatgtgactc

SEQ ID NO: 1395501 - DNA, 25 bp, Homo sapien
taaaagacttccccatgaatgaagt

SEQ ID NO: 1395502 - DNA, 25 bp, Homo sapien
gaattggtttgtcaagactgagccc

SEQ ID NO: 1395503 - DNA, 25 bp, Homo sapien
gaatggagagttcaggtccctacag

SEQ ID NO: 1395504 - DNA, 25 bp, Homo sapien
cattctctgtggtgggctatatcac

SEQ ID NO: 1395505 - DNA, 25 bp, Homo sapien
tcaccccagggctatagaaattcca

SEQ ID NO: 1395506 - DNA, 25 bp, Homo sapien
gactgctcgttgctgcatccaaggg

SEQ ID NO: 1395507 - DNA, 25 bp, Homo sapien
aggacctaggactgctcgttgctgc

SEQ ID NO: 1395508 - DNA, 25 bp, Homo sapien
ggcacaggacctaggactgctcgtt

SEQ ID NO: 1395509 - DNA, 25 bp, Homo sapien
gtacgggtcagcggcacaggaccta

SEQ ID NO: 1395510 - DNA, 25 bp, Homo sapien
gtgaatcaagcttcttaaggaaatc

SEQ ID NO: 1395511 - DNA, 25 bp, Homo sapien
cagagaggtcatggatgggcgtggg

SEQ ID NO: 1395512 - DNA, 25 bp, Homo sapien
ggacaggctgatctgtgaatcaagc

SEQ ID NO: 1395513 - DNA, 25 bp, Homo sapien
agcagccttcttggacaggctgatc

SEQ ID NO: 1395514 - DNA, 25 bp, Homo sapien
cagttgagtgtggccaaacttcact

SEQ ID NO: 1395515 - DNA, 25 bp, Homo sapien
agttgagtgtggccaaacttcactg

SEQ ID NO: 1395516 - DNA, 25 bp, Homo sapien
gttgagtgtggccaaacttcactgt

SEQ ID NO: 1395517 - DNA, 25 bp, Homo sapien
ctcagttgagtgtggccaaacttca

SEQ ID NO: 1395518 - DNA, 25 bp, Homo sapien
cggtttgcacgtttaatctgttcca

SEQ ID NO: 1395519 - DNA, 25 bp, Homo sapien
cattagtataaaggcggtttgcacg

SEQ ID NO: 1395520 - DNA, 25 bp, Homo sapien
cttcctcagagtccaaaccattgaa

SEQ ID NO: 1395521 - DNA, 25 bp, Homo sapien
aaaccattgaacaggtctctgggct

SEQ ID NO: 1395522 - DNA, 25 bp, Homo sapien
taaatatctgctttgcctaaaccct

SEQ ID NO: 1395523 - DNA, 25 bp, Homo sapien
agggctcccaatgcatactgtaaat

SEQ ID NO: 1395524 - DNA, 25 bp, Homo sapien
ttagcatcctacagaccttgacaca

SEQ ID NO: 1395525 - DNA, 25 bp, Homo sapien
cctttaagggcaaggattgtgactt

SEQ ID NO: 1395526 - DNA, 25 bp, Homo sapien
gcttccatatgaacgagcccggctc

SEQ ID NO: 1395527 - DNA, 25 bp, Homo sapien
gtgtctccgggctccaactgatgct

SEQ ID NO: 1395528 - DNA, 25 bp, Homo sapien
accccatatttgagtgctagtccag

SEQ ID NO: 1395529 - DNA, 25 bp, Homo sapien
ggagcaggccgattgcaccaggctt

SEQ ID NO: 1395530 - DNA, 25 bp, Homo sapien
ggtccgctccgcataagataggtca

SEQ ID NO: 1395531 - DNA, 25 bp, Homo sapien
aggtacgaccgagactgcgactgac

SEQ ID NO: 1395532 - DNA, 25 bp, Homo sapien
ctgtcgccgcagacgaagagcgtga

SEQ ID NO: 1395533 - DNA, 25 bp, Homo sapien
ctggatccagttgagcggcaaggtc

SEQ ID NO: 1395534 - DNA, 25 bp, Homo sapien
gatagaagggcttttatttacagga

SEQ ID NO: 1395535 - DNA, 25 bp, Homo sapien
tggatagaagggcttttatttacag

SEQ ID NO: 1395536 - DNA, 25 bp, Homo sapien
ccagtgctcccagcgctagttggta

SEQ ID NO: 1395537 - DNA, 25 bp, Homo sapien
gctcccagcgctagttggtaaaggg

SEQ ID NO: 1395538 - DNA, 25 bp, Homo sapien
tccagtgctcccagcgctagttggt

SEQ ID NO: 1395539 - DNA, 25 bp, Homo sapien
agtgctcccagcgctagttggtaaa

SEQ ID NO: 1395540 - DNA, 25 bp, Homo sapien
tgctttcaggaggatccaccaattt

SEQ ID NO: 1395541 - DNA, 25 bp, Homo sapien
ttggtagtgtcttaggccaccttac

SEQ ID NO: 1395542 - DNA, 25 bp, Homo sapien
agcaccctgggctgttagtcattag

SEQ ID NO: 1395543 - DNA, 25 bp, Homo sapien
gaatagctctttggtagcaccctgg

SEQ ID NO: 1395544 - DNA, 25 bp, Homo sapien
aaagcggacaatagagggacactgc

SEQ ID NO: 1395545 - DNA, 25 bp, Homo sapien
agttcattgtttcgggtcatggcct

SEQ ID NO: 1395546 - DNA, 25 bp, Homo sapien
cccctgctgtgtaaagtggtagcca

SEQ ID NO: 1395547 - DNA, 25 bp, Homo sapien
tcattgtttcgggtcatggcctggg

SEQ ID NO: 1395548 - DNA, 25 bp, Homo sapien
caatgaagaggagaattcaagcaag

SEQ ID NO: 1395549 - DNA, 25 bp, Homo sapien
aagtaagatagctgccccactggct

SEQ ID NO: 1395550 - DNA, 25 bp, Homo sapien
tcaatgagactgaatgctaacatca

SEQ ID NO: 1395551 - DNA, 25 bp, Homo sapien
caagattaagtaagatagctgcccc

SEQ ID NO: 1395552 - DNA, 25 bp, Homo sapien
gctgctaatgaagttggattcgatg

SEQ ID NO: 1395553 - DNA, 25 bp, Homo sapien
gctcagtgagtgtggcattttcccg

SEQ ID NO: 1395554 - DNA, 25 bp, Homo sapien
cgattctcacgcaacatgtcagcca

SEQ ID NO: 1395555 - DNA, 25 bp, Homo sapien
gattcgatgtttaggctctggaggc

SEQ ID NO: 1395556 - DNA, 25 bp, Homo sapien
cacttagcatgggtattgggatgtc

SEQ ID NO: 1395557 - DNA, 25 bp, Homo sapien
cactcctcgtggctaccagactgaa

SEQ ID NO: 1395558 - DNA, 25 bp, Homo sapien
cagactgaagctccgcacataggta

SEQ ID NO: 1395559 - DNA, 25 bp, Homo sapien
cgcacataggtatttgccttcattg

SEQ ID NO: 1395560 - DNA, 25 bp, Homo sapien
atttgggggttcatccggcactggc

SEQ ID NO: 1395561 - DNA, 25 bp, Homo sapien
tcattgcttcggaccctctttagta

SEQ ID NO: 1395562 - DNA, 25 bp, Homo sapien
gaccctctttagtatctcctcaatg

SEQ ID NO: 1395563 - DNA, 25 bp, Homo sapien
cggcactggcttatacttgtcaggc

SEQ ID NO: 1395564 - DNA, 25 bp, Homo sapien
ctcatcagtgtgtacatgtccagaa

SEQ ID NO: 1395565 - DNA, 25 bp, Homo sapien
tccactgcagagggcatcatagtat

SEQ ID NO: 1395566 - DNA, 25 bp, Homo sapien
tgcttgttactcatcagtgtgtaca

SEQ ID NO: 1395567 - DNA, 25 bp, Homo sapien
catagtattgcttgttactcatcag

SEQ ID NO: 1395568 - DNA, 25 bp, Homo sapien
tccctcttgggctgaatatagggtt

SEQ ID NO: 1395569 - DNA, 25 bp, Homo sapien
gcatctgtggcatgtgccagtgcct

SEQ ID NO: 1395570 - DNA, 25 bp, Homo sapien
agcatctgtggcatgtgccagtgcc

SEQ ID NO: 1395571 - DNA, 25 bp, Homo sapien
ccctcttgggctgaatatagggttt

SEQ ID NO: 1395572 - DNA, 25 bp, Homo sapien
tcaagagtccttagccccctgatct

SEQ ID NO: 1395573 - DNA, 25 bp, Homo sapien
aagaactgaagagtgcggggctggg

SEQ ID NO: 1395574 - DNA, 25 bp, Homo sapien
gtcctctacaaactcaagagtcctt

SEQ ID NO: 1395575 - DNA, 25 bp, Homo sapien
ctgagtcctctacaaactcaagagt

SEQ ID NO: 1395576 - DNA, 25 bp, Homo sapien
catcacgctctttgacttctagtgc

SEQ ID NO: 1395577 - DNA, 25 bp, Homo sapien
ccttcttctcgcctgtgaagggcac

SEQ ID NO: 1395578 - DNA, 25 bp, Homo sapien
ctctttgacttctagtgcctgttgc

SEQ ID NO: 1395579 - DNA, 25 bp, Homo sapien
tgaagggcaccaagtcatcacgctc

SEQ ID NO: 1395580 - DNA, 25 bp, Homo sapien
caagtactgcaaaagggcctctcgg

SEQ ID NO: 1395581 - DNA, 25 bp, Homo sapien
tgtctggtcacgttgtcttagtcca

SEQ ID NO: 1395582 - DNA, 25 bp, Homo sapien
tccagtggccccgttgggctcttct

SEQ ID NO: 1395583 - DNA, 25 bp, Homo sapien
gcaaaagggcctctcggtccagtgg

SEQ ID NO: 1395584 - DNA, 25 bp, Homo sapien
aggatccatctcctgtagttcgcag

SEQ ID NO: 1395585 - DNA, 25 bp, Homo sapien
tccatctcctgtagttcgcagtcca

SEQ ID NO: 1395586 - DNA, 25 bp, Homo sapien
tcctgtagttcgcagtccagctgct

SEQ ID NO: 1395587 - DNA, 25 bp, Homo sapien
tctcctgtagttcgcagtccagctg

SEQ ID NO: 1395588 - DNA, 25 bp, Homo sapien
cctccccactgtgtggtactcacag

SEQ ID NO: 1395589 - DNA, 25 bp, Homo sapien
ccccactgtgtggtactcacagagc

SEQ ID NO: 1395590 - DNA, 25 bp, Homo sapien
tccccactgtgtggtactcacagag

SEQ ID NO: 1395591 - DNA, 25 bp, Homo sapien
cccctccccactgtgtggtactcac

SEQ ID NO: 1395592 - DNA, 25 bp, Homo sapien
gaaagatccagaaagtatgtgagac

SEQ ID NO: 1395593 - DNA, 25 bp, Homo sapien
caatataagatacgcataaggagct

SEQ ID NO: 1395594 - DNA, 25 bp, Homo sapien
aacagtgggaatattaaactcgcac

SEQ ID NO: 1395595 - DNA, 25 bp, Homo sapien
taaggagctatgcatacacaccatg

SEQ ID NO: 1395596 - DNA, 25 bp, Homo sapien
gtcctggtggtcacctcccttctca

SEQ ID NO: 1395597 - DNA, 25 bp, Homo sapien
tcctggtggtcacctcccttctcac

SEQ ID NO: 1395598 - DNA, 25 bp, Homo sapien
agtcctggtggtcacctcccttctc

SEQ ID NO: 1395599 - DNA, 25 bp, Homo sapien
cagtcctggtggtcacctcccttct

SEQ ID NO: 1395600 - DNA, 25 bp, Homo sapien
tagtgggagatcacatatacacagc

SEQ ID NO: 1395601 - DNA, 25 bp, Homo sapien
tgttctactagagcactgtcccagc

SEQ ID NO: 1395602 - DNA, 25 bp, Homo sapien
cccagtctgagacatatgagttcga

SEQ ID NO: 1395603 - DNA, 25 bp, Homo sapien
tgagttcgactagaatcagccagtt

SEQ ID NO: 1395604 - DNA, 25 bp, Homo sapien
ttcttgctcccaaccctagactgga

SEQ ID NO: 1395605 - DNA, 25 bp, Homo sapien
taaatgctatcgaataaagacccaa

SEQ ID NO: 1395606 - DNA, 25 bp, Homo sapien
aatacttcttgctcccaaccctaga

SEQ ID NO: 1395607 - DNA, 25 bp, Homo sapien
aatacaatttagaaaggacagctca

SEQ ID NO: 1395608 - DNA, 25 bp, Homo sapien
ggaacagcaagagccccaatcaggg

SEQ ID NO: 1395609 - DNA, 25 bp, Homo sapien
aagaaacagattaggcaaagatcag

SEQ ID NO: 1395610 - DNA, 25 bp, Homo sapien
agaagcagggagaagaaacggaaca

SEQ ID NO: 1395611 - DNA, 25 bp, Homo sapien
gaagtttctgaggactagacatctc

SEQ ID NO: 1395612 - DNA, 25 bp, Homo sapien
tggacagacctcacgaacagggact

SEQ ID NO: 1395613 - DNA, 25 bp, Homo sapien
tcttgaaggctcgagcagtggcata

SEQ ID NO: 1395614 - DNA, 25 bp, Homo sapien
gggaaccattcctcgaaagttgcat

SEQ ID NO: 1395615 - DNA, 25 bp, Homo sapien
gcggcagtccatgggcagtaatgta

SEQ ID NO: 1395616 - DNA, 25 bp, Homo sapien
gggttgacgggtccagtcccagcat

SEQ ID NO: 1395617 - DNA, 25 bp, Homo sapien
tgaggagtcaatgcagacaccgagg

SEQ ID NO: 1395618 - DNA, 25 bp, Homo sapien
tgatgaaggtacgtgagcagcgagc

SEQ ID NO: 1395619 - DNA, 25 bp, Homo sapien
tgacgggtccagtcccagcatgagg

SEQ ID NO: 1395620 - DNA, 25 bp, Homo sapien
agctaggctagaaggaaaaacagga

SEQ ID NO: 1395621 - DNA, 25 bp, Homo sapien
cattctgaggaacgtactaagtgac

SEQ ID NO: 1395622 - DNA, 25 bp, Homo sapien
gatgggaaaagaaagctaggctaga

SEQ ID NO: 1395623 - DNA, 25 bp, Homo sapien
tctgaggaacgtactaagtgactga

SEQ ID NO: 1395624 - DNA, 25 bp, Homo sapien
ctggctccccaacaagtggcactgt

SEQ ID NO: 1395625 - DNA, 25 bp, Homo sapien
aatgataggtgattatgggcccggg

SEQ ID NO: 1395626 - DNA, 25 bp, Homo sapien
ctatgtcaacgttctcttccttggg

SEQ ID NO: 1395627 - DNA, 25 bp, Homo sapien
gggcacttccgcttcttatgaacct

SEQ ID NO: 1395628 - DNA, 25 bp, Homo sapien
tgggccctctatagtacctcagagt

SEQ ID NO: 1395629 - DNA, 25 bp, Homo sapien
tgccaactaccagagacaactatgg

SEQ ID NO: 1395630 - DNA, 25 bp, Homo sapien
cctcagagttggaaggtaccctttg

SEQ ID NO: 1395631 - DNA, 25 bp, Homo sapien
tatggaagtcccctaaggccgtctg

SEQ ID NO: 1395632 - DNA, 25 bp, Homo sapien
aattcatggtcctagccttcagcag

SEQ ID NO: 1395633 - DNA, 25 bp, Homo sapien
aagacatcaggtgagaacctccgcc

SEQ ID NO: 1395634 - DNA, 25 bp, Homo sapien
ccagctgtatccttaatgtttgaca

SEQ ID NO: 1395635 - DNA, 25 bp, Homo sapien
catgcttaggttgctcactgtatca

SEQ ID NO: 1395636 - DNA, 25 bp, Homo sapien
tcagttctactaatcatcgtctcag

SEQ ID NO: 1395637 - DNA, 25 bp, Homo sapien
cccaaaaagtgctaaggtaatgtct

SEQ ID NO: 1395638 - DNA, 25 bp, Homo sapien
gacctctatctcaccaaaaccaatg

SEQ ID NO: 1395639 - DNA, 25 bp, Homo sapien
aaaaccaatgggcacttctcagttc

SEQ ID NO: 1395640 - DNA, 25 bp, Homo sapien
gcccctctactcactttttctgaaa

SEQ ID NO: 1395641 - DNA, 25 bp, Homo sapien
gcccctcagcccctctactcacttt

SEQ ID NO: 1395642 - DNA, 25 bp, Homo sapien
tcagcccctctactcactttttctg

SEQ ID NO: 1395643 - DNA, 25 bp, Homo sapien
ctctactcactttttctgaaaccac

SEQ ID NO: 1395644 - DNA, 25 bp, Homo sapien
ccagtgaccgtaaattaagctcttc

SEQ ID NO: 1395645 - DNA, 25 bp, Homo sapien
ggaacgtttgtcgtgtatgctcagc

SEQ ID NO: 1395646 - DNA, 25 bp, Homo sapien
tgcctctcctgtacccgaaggaacg

SEQ ID NO: 1395647 - DNA, 25 bp, Homo sapien
tcctgggttagtggccgctcacagt

SEQ ID NO: 1395648 - DNA, 25 bp, Homo sapien
aagaatagtacaaggaatactcatg

SEQ ID NO: 1395649 - DNA, 25 bp, Homo sapien
atcttttaccccatcacctattggt

SEQ ID NO: 1395650 - DNA, 25 bp, Homo sapien
accccatcacctattggtaatattt

SEQ ID NO: 1395651 - DNA, 25 bp, Homo sapien
caagaatagtacaaggaatactcat

SEQ ID NO: 1395652 - DNA, 25 bp, Homo sapien
ttctgagagctaccagccggggtgt

SEQ ID NO: 1395653 - DNA, 25 bp, Homo sapien
cagagccgtcatcttgtagttctaa

SEQ ID NO: 1395654 - DNA, 25 bp, Homo sapien
gtgttgacctttcgaggccttaagc

SEQ ID NO: 1395655 - DNA, 25 bp, Homo sapien
tgtagttctaatggcagtagtgcct

SEQ ID NO: 1395656 - DNA, 25 bp, Homo sapien
tccatcactggatggttcatcccct

SEQ ID NO: 1395657 - DNA, 25 bp, Homo sapien
tataggccttggtgactactcggcg

SEQ ID NO: 1395658 - DNA, 25 bp, Homo sapien
aaagtcagagtccacttcgtcctct

SEQ ID NO: 1395659 - DNA, 25 bp, Homo sapien
gactggtccccttgatactcatcat

SEQ ID NO: 1395660 - DNA, 25 bp, Homo sapien
ctcctctttgcctcctcccctccct

SEQ ID NO: 1395661 - DNA, 25 bp, Homo sapien
cccttcagggctcctctttgcctcc

SEQ ID NO: 1395662 - DNA, 25 bp, Homo sapien
tctcccttcagggctcctctttgcc

SEQ ID NO: 1395663 - DNA, 25 bp, Homo sapien
tcccttcagggctcctctttgcctc

SEQ ID NO: 1395664 - DNA, 25 bp, Homo sapien
tgaaacccccataagtcgtctggta

SEQ ID NO: 1395665 - DNA, 25 bp, Homo sapien
cccataagtcgtctggtagaactca

SEQ ID NO: 1395666 - DNA, 25 bp, Homo sapien
cccccataagtcgtctggtagaact

SEQ ID NO: 1395667 - DNA, 25 bp, Homo sapien
ctgtgaaacccccataagtcgtctg

SEQ ID NO: 1395668 - DNA, 25 bp, Homo sapien
cgagactgcgccgccacctgcagcc

SEQ ID NO: 1395669 - DNA, 25 bp, Homo sapien
gagactgcgccgccacctgcagccc

SEQ ID NO: 1395670 - DNA, 25 bp, Homo sapien
cagctcggttttgggagctcgacgc

SEQ ID NO: 1395671 - DNA, 25 bp, Homo sapien
ggagctcgacgctcgacatcactac

SEQ ID NO: 1395672 - DNA, 25 bp, Homo sapien
tcggttttgggagctcgacgctcga

SEQ ID NO: 1395673 - DNA, 25 bp, Homo sapien
tttgggagctcgacgctcgacatca

SEQ ID NO: 1395674 - DNA, 25 bp, Homo sapien
tcctctgtttgactgcgttggtcat

SEQ ID NO: 1395675 - DNA, 25 bp, Homo sapien
gttactacgaagactacaatgggag

SEQ ID NO: 1395676 - DNA, 25 bp, Homo sapien
cctactatgtacgaagtcactggag

SEQ ID NO: 1395677 - DNA, 25 bp, Homo sapien
gtgataagtccctgatagcctcccg

SEQ ID NO: 1395678 - DNA, 25 bp, Homo sapien
cacagataattatggagcccctact

SEQ ID NO: 1395679 - DNA, 25 bp, Homo sapien
gaactgaacctaagaggacctgccg

SEQ ID NO: 1395680 - DNA, 25 bp, Homo sapien
tcgacccagtcctagcaaagaactg

SEQ ID NO: 1395681 - DNA, 25 bp, Homo sapien
taacgtctctgacttgacaccagta

SEQ ID NO: 1395682 - DNA, 25 bp, Homo sapien
gaggacttggcggaccgactcttgt

SEQ ID NO: 1395683 - DNA, 25 bp, Homo sapien
ggtgcgggacgtgagttcttcccca

SEQ ID NO: 1395684 - DNA, 25 bp, Homo sapien
tccaggagccggctcgacgtgtctg

SEQ ID NO: 1395685 - DNA, 25 bp, Homo sapien
ttgggcgattaacaggccgtggtta

SEQ ID NO: 1395686 - DNA, 25 bp, Homo sapien
ccatgccaggcgaatggtgtggcct

SEQ ID NO: 1395687 - DNA, 25 bp, Homo sapien
ttctgtaaagagacgttgggaagat

SEQ ID NO: 1395688 - DNA, 25 bp, Homo sapien
gagaagaggaagaaccggattgaaa

SEQ ID NO: 1395689 - DNA, 25 bp, Homo sapien
tcctcaggtaagcccggcagggcgt

SEQ ID NO: 1395690 - DNA, 25 bp, Homo sapien
gagacgttgggaagattcgattccg

SEQ ID NO: 1395691 - DNA, 25 bp, Homo sapien
gatggagaccatcctaaccaacgtg

SEQ ID NO: 1395692 - DNA, 25 bp, Homo sapien
tagctagtcatggtggcacactcct

SEQ ID NO: 1395693 - DNA, 25 bp, Homo sapien
attagctagtcatggtggcacactc

SEQ ID NO: 1395694 - DNA, 25 bp, Homo sapien
aaaaaaaggccaggagcagtagctc

SEQ ID NO: 1395695 - DNA, 25 bp, Homo sapien
tttgagcccattccttaacctcttc

SEQ ID NO: 1395696 - DNA, 25 bp, Homo sapien
tgaatgtgggctctagttttgcctg

SEQ ID NO: 1395697 - DNA, 25 bp, Homo sapien
ttgcctgtcactgcctatgctttga

SEQ ID NO: 1395698 - DNA, 25 bp, Homo sapien
gaaagtattgaattagggatcatga

SEQ ID NO: 1395699 - DNA, 25 bp, Homo sapien
tgagagaatgtagagatgcctgagt

SEQ ID NO: 1395700 - DNA, 25 bp, Homo sapien
gcctgagtgatggagaaaaaagcag

SEQ ID NO: 1395701 - DNA, 25 bp, Homo sapien
tcctctcttatagtacgtgccacac

SEQ ID NO: 1395702 - DNA, 25 bp, Homo sapien
taaaattgagccagtgtggagaagc

SEQ ID NO: 1395703 - DNA, 25 bp, Homo sapien
tgagtaccaaaccagagcgtgatgt

SEQ ID NO: 1395704 - DNA, 25 bp, Homo sapien
taacctggttacaatcagggcgatg

SEQ ID NO: 1395705 - DNA, 25 bp, Homo sapien
ggccttttcaaatcagcccagggca

SEQ ID NO: 1395706 - DNA, 25 bp, Homo sapien
gatgtcctcatgcaagatttctacg

SEQ ID NO: 1395707 - DNA, 25 bp, Homo sapien
tacagaagattttgtgggcctcctg

SEQ ID NO: 1395708 - DNA, 25 bp, Homo sapien
tcctttttgatccaagatggcagtg

SEQ ID NO: 1395709 - DNA, 25 bp, Homo sapien
tgaaaatacttgagagcctggtgtg

SEQ ID NO: 1395710 - DNA, 25 bp, Homo sapien
gccttttgtatgactgaatagcaca

SEQ ID NO: 1395711 - DNA, 25 bp, Homo sapien
gagtagtgattgctctgccagaagc

SEQ ID NO: 1395712 - DNA, 25 bp, Homo sapien
caagatgcctattcgtagagttccc

SEQ ID NO: 1395713 - DNA, 25 bp, Homo sapien
tctttgactaggaaccggactctta

SEQ ID NO: 1395714 - DNA, 25 bp, Homo sapien
cagtccatatctgtgaggccagcaa

SEQ ID NO: 1395715 - DNA, 25 bp, Homo sapien
gcatgggaagcacggaatatagggt

SEQ ID NO: 1395716 - DNA, 25 bp, Homo sapien
ctgcatgggaagcacggaatatagg

SEQ ID NO: 1395717 - DNA, 25 bp, Homo sapien
atgggaagcacggaatatagggtta

SEQ ID NO: 1395718 - DNA, 25 bp, Homo sapien
gggaagcacggaatatagggttaga

SEQ ID NO: 1395719 - DNA, 25 bp, Homo sapien
caactgccaattactttacaaagcg

SEQ ID NO: 1395720 - DNA, 25 bp, Homo sapien
ctccgggagaaagggcacactaatc

SEQ ID NO: 1395721 - DNA, 25 bp, Homo sapien
cacaggatgcaaggctccgggagaa

SEQ ID NO: 1395722 - DNA, 25 bp, Homo sapien
cccaactgccaattactttacaaag

SEQ ID NO: 1395723 - DNA, 25 bp, Homo sapien
tcatacttcaaaggagctcggaaac

SEQ ID NO: 1395724 - DNA, 25 bp, Homo sapien
cattgcgaccatagggcaagtggtg

SEQ ID NO: 1395725 - DNA, 25 bp, Homo sapien
aggttgagcgacttgcccattgcga

SEQ ID NO: 1395726 - DNA, 25 bp, Homo sapien
tactcatgagaaaacaggatctggg

SEQ ID NO: 1395727 - DNA, 25 bp, Homo sapien
tctgtacggcatcagtgacacgggt

SEQ ID NO: 1395728 - DNA, 25 bp, Homo sapien
caaggaaatggtcagcggatgacgt

SEQ ID NO: 1395729 - DNA, 25 bp, Homo sapien
cttgaaacagcgcaaaaggacctac

SEQ ID NO: 1395730 - DNA, 25 bp, Homo sapien
cgatttagacggtgggaagaccgca

SEQ ID NO: 1395731 - DNA, 25 bp, Homo sapien
ttctgtgctccactccgactcaatg

SEQ ID NO: 1395732 - DNA, 25 bp, Homo sapien
accacacagaagctgggttccttac

SEQ ID NO: 1395733 - DNA, 25 bp, Homo sapien
cattcgcgaaagtgaactgcagctt

SEQ ID NO: 1395734 - DNA, 25 bp, Homo sapien
tccactccgactcaatgcggttctg

SEQ ID NO: 1395735 - DNA, 25 bp, Homo sapien
agacctggagcgcggagggaggaga

SEQ ID NO: 1395736 - DNA, 25 bp, Homo sapien
ggaggccgaaccggagagaagcagg

SEQ ID NO: 1395737 - DNA, 25 bp, Homo sapien
ccaatggcgagtgcgaaaacgggca

SEQ ID NO: 1395738 - DNA, 25 bp, Homo sapien
gagaagcaggaagtagcggcggccg

SEQ ID NO: 1395739 - DNA, 25 bp, Homo sapien
cccatgtcagctgggaggcatagct

SEQ ID NO: 1395740 - DNA, 25 bp, Homo sapien
cctcccatgtcagctgggaggcata

SEQ ID NO: 1395741 - DNA, 25 bp, Homo sapien
ccatcatgcctggggagtttcacca

SEQ ID NO: 1395742 - DNA, 25 bp, Homo sapien
atgatcatggcccatcacagcctcg

SEQ ID NO: 1395743 - DNA, 25 bp, Homo sapien
tggggtgcccttcttcaagcagtct

SEQ ID NO: 1395744 - DNA, 25 bp, Homo sapien
caggtcctagcccaacaaggctcag

SEQ ID NO: 1395745 - DNA, 25 bp, Homo sapien
gcaaaactcccttggacctgtttgc

SEQ ID NO: 1395746 - DNA, 25 bp, Homo sapien
gctccagccctaaggccacggacat

SEQ ID NO: 1395747 - DNA, 25 bp, Homo sapien
ggtgtcatggatggacacacctctc

SEQ ID NO: 1395748 - DNA, 25 bp, Homo sapien
cacaattccttcaggcatggactgg

SEQ ID NO: 1395749 - DNA, 25 bp, Homo sapien
tatgcctgctagacaggttcaggga

SEQ ID NO: 1395750 - DNA, 25 bp, Homo sapien
ggatgggacttaggtatgcctgcta

SEQ ID NO: 1395751 - DNA, 25 bp, Homo sapien
taaaactgtttgtggtcgaatctcc

SEQ ID NO: 1395752 - DNA, 25 bp, Homo sapien
acttggacaatgtggagttgaagcg

SEQ ID NO: 1395753 - DNA, 25 bp, Homo sapien
aaaagcaaacttctatgtagtgcct

SEQ ID NO: 1395754 - DNA, 25 bp, Homo sapien
gacactgaggcatccgttcatacct

SEQ ID NO: 1395755 - DNA, 25 bp, Homo sapien
gatcaagtcctaagtaccgagaacc

SEQ ID NO: 1395756 - DNA, 25 bp, Homo sapien
tctgagagacccctacaaggagaag

SEQ ID NO: 1395757 - DNA, 25 bp, Homo sapien
ggtttctcagacaagggccctctag

SEQ ID NO: 1395758 - DNA, 25 bp, Homo sapien
cccagaacggaataagaggatggcc

SEQ ID NO: 1395759 - DNA, 25 bp, Homo sapien
catgctcatgtggaacctctctttg

SEQ ID NO: 1395760 - DNA, 25 bp, Homo sapien
ggtggtgatagaccgcatactgcca

SEQ ID NO: 1395761 - DNA, 25 bp, Homo sapien
tactggaagccgtcatagagtttgg

SEQ ID NO: 1395762 - DNA, 25 bp, Homo sapien
cacatgatgccgttggtgaggtact

SEQ ID NO: 1395763 - DNA, 25 bp, Homo sapien
tgtcagccatagcaaatacagagct

SEQ ID NO: 1395764 - DNA, 25 bp, Homo sapien
tcaggtccttgatgatgtgggtgca

SEQ ID NO: 1395765 - DNA, 25 bp, Homo sapien
ggcacttatctggttgcagacctct

SEQ ID NO: 1395766 - DNA, 25 bp, Homo sapien
cacatctccctcagtaagggtggag

SEQ ID NO: 1395767 - DNA, 25 bp, Homo sapien
gccaccgtcatcatggggccagatg

SEQ ID NO: 1395768 - DNA, 25 bp, Homo sapien
atgacctgggccaccgtcatcatgg

SEQ ID NO: 1395769 - DNA, 25 bp, Homo sapien
ccagatggggatgatcctgagcaac

SEQ ID NO: 1395770 - DNA, 25 bp, Homo sapien
caccgtcatcatggggccagatggg

SEQ ID NO: 1395771 - DNA, 25 bp, Homo sapien
tcagacctggtatacacctggagcc

SEQ ID NO: 1395772 - DNA, 25 bp, Homo sapien
cagggcaatcagaggtcatagtgga

SEQ ID NO: 1395773 - DNA, 25 bp, Homo sapien
ccaggaggctgtaaatgggcctgtt

SEQ ID NO: 1395774 - DNA, 25 bp, Homo sapien
tcatagtggaatggagaagacagat

SEQ ID NO: 1395775 - DNA, 25 bp, Homo sapien
tcaaccgagtctcgtgggatcagct

SEQ ID NO: 1395776 - DNA, 25 bp, Homo sapien
tgctccagggctccgacttaaaggg

SEQ ID NO: 1395777 - DNA, 25 bp, Homo sapien
gaagcctgaggcactatagcacctg

SEQ ID NO: 1395778 - DNA, 25 bp, Homo sapien
gagaaacaaggcactggaccagagc

SEQ ID NO: 1395779 - DNA, 25 bp, Homo sapien
ctgcatgatctccacgatctgcacc

SEQ ID NO: 1395780 - DNA, 25 bp, Homo sapien
tgcatgatctccacgatctgcacca

SEQ ID NO: 1395781 - DNA, 25 bp, Homo sapien
gcatgatctccacgatctgcaccac

SEQ ID NO: 1395782 - DNA, 25 bp, Homo sapien
gctgcatgatctccacgatctgcac

SEQ ID NO: 1395783 - DNA, 25 bp, Homo sapien
gcaatcagcccttgcagcatcagca

SEQ ID NO: 1395784 - DNA, 25 bp, Homo sapien
cttgtccatgtgtttccgagcggca

SEQ ID NO: 1395785 - DNA, 25 bp, Homo sapien
tagttgaacatgtcgccatccaggc

SEQ ID NO: 1395786 - DNA, 25 bp, Homo sapien
catcagcatcttatagtagttgaac

SEQ ID NO: 1395787 - DNA, 25 bp, Homo sapien
gatgtggccttctgcgtccaaaagg

SEQ ID NO: 1395788 - DNA, 25 bp, Homo sapien
aaactctgtggtcagcttaaaggct

SEQ ID NO: 1395789 - DNA, 25 bp, Homo sapien
ttctgcgtccaaaaggatattccca

SEQ ID NO: 1395790 - DNA, 25 bp, Homo sapien
ttaaaggctgacgtctcaaagccca

SEQ ID NO: 1395791 - DNA, 25 bp, Homo sapien
tagctagatcttaatgggccaccat

SEQ ID NO: 1395792 - DNA, 25 bp, Homo sapien
gaatttcacccttgtcgtccagtct

SEQ ID NO: 1395793 - DNA, 25 bp, Homo sapien
ccacagctgtataccaccatgcttg

SEQ ID NO: 1395794 - DNA, 25 bp, Homo sapien
tgcccagactaaagtactgtggcat

SEQ ID NO: 1395795 - DNA, 25 bp, Homo sapien
tcttcacctgatggatggacacagc

SEQ ID NO: 1395796 - DNA, 25 bp, Homo sapien
taggaagtaatcgagcaaggagagc

SEQ ID NO: 1395797 - DNA, 25 bp, Homo sapien
ggtgtaactgccgtgctcctgtagg

SEQ ID NO: 1395798 - DNA, 25 bp, Homo sapien
acaaaattgcgctgtgcactgagga

SEQ ID NO: 1395799 - DNA, 25 bp, Homo sapien
caaagtcagaaactacactcaggta

SEQ ID NO: 1395800 - DNA, 25 bp, Homo sapien
ttggaaaggaagtctagggcctgac

SEQ ID NO: 1395801 - DNA, 25 bp, Homo sapien
tatcacctaagtagaaagcccaaga

SEQ ID NO: 1395802 - DNA, 25 bp, Homo sapien
tcccctctcaagcagggagaatggg

SEQ ID NO: 1395803 - DNA, 25 bp, Homo sapien
agtctcgatcctgttactgatgagc

SEQ ID NO: 1395804 - DNA, 25 bp, Homo sapien
acagtctcgatcctgttactgatga

SEQ ID NO: 1395805 - DNA, 25 bp, Homo sapien
cctgatggtcccctattcctaggag

SEQ ID NO: 1395806 - DNA, 25 bp, Homo sapien
acctgatggtcccctattcctagga

SEQ ID NO: 1395807 - DNA, 25 bp, Homo sapien
aaggccagaagctcttgccgaaggt

SEQ ID NO: 1395808 - DNA, 25 bp, Homo sapien
caatgactgacaggagccgccaatt

SEQ ID NO: 1395809 - DNA, 25 bp, Homo sapien
cctgaaaggccagaagctcttgccg

SEQ ID NO: 1395810 - DNA, 25 bp, Homo sapien
catccccacacttgacaatgactga

SEQ ID NO: 1395811 - DNA, 25 bp, Homo sapien
gatcttctgggtctcgtttgaaggc

SEQ ID NO: 1395812 - DNA, 25 bp, Homo sapien
ttctgggtctcgtttgaaggctgtc

SEQ ID NO: 1395813 - DNA, 25 bp, Homo sapien
tctgggtctcgtttgaaggctgtcg

SEQ ID NO: 1395814 - DNA, 25 bp, Homo sapien
gaaggatcttctgggtctcgtttga

SEQ ID NO: 1395815 - DNA, 25 bp, Homo sapien
tttggtggccccaaacaaggacaga

SEQ ID NO: 1395816 - DNA, 25 bp, Homo sapien
caacagatgattgagatggagagga

SEQ ID NO: 1395817 - DNA, 25 bp, Homo sapien
agagggaaagacacaggccaacaac

SEQ ID NO: 1395818 - DNA, 25 bp, Homo sapien
ggaagttcctgaaagagggatgaaa

SEQ ID NO: 1395819 - DNA, 25 bp, Homo sapien
gtcacagctgttggtatgcacttcg

SEQ ID NO: 1395820 - DNA, 25 bp, Homo sapien
agctgttggtatgcacttcggggag

SEQ ID NO: 1395821 - DNA, 25 bp, Homo sapien
cagctgttggtatgcacttcgggga

SEQ ID NO: 1395822 - DNA, 25 bp, Homo sapien
cacagctgttggtatgcacttcggg

SEQ ID NO: 1395823 - DNA, 25 bp, Homo sapien
cgcctcctgggttcgaataattcta

SEQ ID NO: 1395824 - DNA, 25 bp, Homo sapien
ggtgatctgctcgccctgtcctccc

SEQ ID NO: 1395825 - DNA, 25 bp, Homo sapien
cggcataatttttctagttttagtg

SEQ ID NO: 1395826 - DNA, 25 bp, Homo sapien
tgggttcgaataattctactgcctc

SEQ ID NO: 1395827 - DNA, 25 bp, Homo sapien
tcatagttgggcacagtgctgaagc

SEQ ID NO: 1395828 - DNA, 25 bp, Homo sapien
cgctgctcatgggtaataccacatt

SEQ ID NO: 1395829 - DNA, 25 bp, Homo sapien
cacattcgggcaagttttctacgga

SEQ ID NO: 1395830 - DNA, 25 bp, Homo sapien
tccacttgcagctcgcctatgtcat

SEQ ID NO: 1395831 - DNA, 25 bp, Homo sapien
tgggggaagagtgagacagtatttg

SEQ ID NO: 1395832 - DNA, 25 bp, Homo sapien
aagagtgagacagtatttgcaactt

SEQ ID NO: 1395833 - DNA, 25 bp, Homo sapien
gagtgagacagtatttgcaacttac

SEQ ID NO: 1395834 - DNA, 25 bp, Homo sapien
ggaagagtgagacagtatttgcaac

SEQ ID NO: 1395835 - DNA, 25 bp, Homo sapien
tccaatagtcctctgaaactatgaa

SEQ ID NO: 1395836 - DNA, 25 bp, Homo sapien
gggcagatacttgtcctatgatcac

SEQ ID NO: 1395837 - DNA, 25 bp, Homo sapien
tgaacactatatttagggcagatac

SEQ ID NO: 1395838 - DNA, 25 bp, Homo sapien
aaatctcaactctgttagcaaggtt

SEQ ID NO: 1395839 - DNA, 25 bp, Homo sapien
tacacggaccacgtggtggtcaaag

SEQ ID NO: 1395840 - DNA, 25 bp, Homo sapien
cttgccgatcgccatcagggacttg

SEQ ID NO: 1395841 - DNA, 25 bp, Homo sapien
ttggagttgaggacaacagcctgtg

SEQ ID NO: 1395842 - DNA, 25 bp, Homo sapien
cagggacttgatgaattctctctca

SEQ ID NO: 1395843 - DNA, 25 bp, Homo sapien
aaagagggactcagctagacacgaa

SEQ ID NO: 1395844 - DNA, 25 bp, Homo sapien
gatgagccgatgagcagactttgca

SEQ ID NO: 1395845 - DNA, 25 bp, Homo sapien
tcaagtcccgcaaggctagagaagg

SEQ ID NO: 1395846 - DNA, 25 bp, Homo sapien
taaggactgtaccaaggcttcagag

SEQ ID NO: 1395847 - DNA, 25 bp, Homo sapien
tctccctttccgtgtgtcttgctta

SEQ ID NO: 1395848 - DNA, 25 bp, Homo sapien
ctccctttccgtgtgtcttgcttag

SEQ ID NO: 1395849 - DNA, 25 bp, Homo sapien
aaactggggagtatcaggcctacct

SEQ ID NO: 1395850 - DNA, 25 bp, Homo sapien
ttttgaaaactggggagtatcaggc

SEQ ID NO: 1395851 - DNA, 25 bp, Homo sapien
tgccacatagggactgaaagagggt

SEQ ID NO: 1395852 - DNA, 25 bp, Homo sapien
tggcaactgatctctgtcccaagga

SEQ ID NO: 1395853 - DNA, 25 bp, Homo sapien
gggagatggttcagagtgccacata

SEQ ID NO: 1395854 - DNA, 25 bp, Homo sapien
tctgaatccactcagatggcaactg

SEQ ID NO: 1395855 - DNA, 25 bp, Homo sapien
ttgcccagcaacaaggtccaagacc

SEQ ID NO: 1395856 - DNA, 25 bp, Homo sapien
ctttgcccagcaacaaggtccaaga

SEQ ID NO: 1395857 - DNA, 25 bp, Homo sapien
tttgcccagcaacaaggtccaagac

SEQ ID NO: 1395858 - DNA, 25 bp, Homo sapien
tgaattatcaatactctcggtgctg

SEQ ID NO: 1395859 - DNA, 25 bp, Homo sapien
aattatcaatactctcggtgctgga

SEQ ID NO: 1395860 - DNA, 25 bp, Homo sapien
aatgaattatcaatactctcggtgc

SEQ ID NO: 1395861 - DNA, 25 bp, Homo sapien
actgaatgaattatcaatactctcg

SEQ ID NO: 1395862 - DNA, 25 bp, Homo sapien
gctcccatactggaaaccccatgtt

SEQ ID NO: 1395863 - DNA, 25 bp, Homo sapien
taataagctgcatggctcccatact

SEQ ID NO: 1395864 - DNA, 25 bp, Homo sapien
taagctgcatggctcccatactgga

SEQ ID NO: 1395865 - DNA, 25 bp, Homo sapien
tgcatggctcccatactggaaaccc

SEQ ID NO: 1395866 - DNA, 25 bp, Homo sapien
gggcttccagtgtgacatgcggcag

SEQ ID NO: 1395867 - DNA, 25 bp, Homo sapien
gctagaaggcctactggggcttcca

SEQ ID NO: 1395868 - DNA, 25 bp, Homo sapien
actgagtcagctccggggagtaaag

SEQ ID NO: 1395869 - DNA, 25 bp, Homo sapien
tgaagcaagaagctgacatcacacc

SEQ ID NO: 1395870 - DNA, 25 bp, Homo sapien
tctcagtgccatccataatcttatc

SEQ ID NO: 1395871 - DNA, 25 bp, Homo sapien
ctgcctctcagtgccatccataatc

SEQ ID NO: 1395872 - DNA, 25 bp, Homo sapien
cctctcagtgccatccataatctta

SEQ ID NO: 1395873 - DNA, 25 bp, Homo sapien
gcctctcagtgccatccataatctt

SEQ ID NO: 1395874 - DNA, 25 bp, Homo sapien
tgctgccaagctcaaccagatatga

SEQ ID NO: 1395875 - DNA, 25 bp, Homo sapien
tggaagctcagatggccatagcctg

SEQ ID NO: 1395876 - DNA, 25 bp, Homo sapien
cattcactagttgagggaccttggg

SEQ ID NO: 1395877 - DNA, 25 bp, Homo sapien
gagaaaagccaagcctgacaagagg

SEQ ID NO: 1395878 - DNA, 25 bp, Homo sapien
gaaaagttaatgctctggcggcaac

SEQ ID NO: 1395879 - DNA, 25 bp, Homo sapien
tatgtagggcttaatggcatcaccc

SEQ ID NO: 1395880 - DNA, 25 bp, Homo sapien
tcctcgttgcgaaagcagaagagcc

SEQ ID NO: 1395881 - DNA, 25 bp, Homo sapien
catgtctgaagaataggccccaagc

SEQ ID NO: 1395882 - DNA, 25 bp, Homo sapien
cacagccagacttcgagcttccaag

SEQ ID NO: 1395883 - DNA, 25 bp, Homo sapien
gacatatcctaggaagctttcctga

SEQ ID NO: 1395884 - DNA, 25 bp, Homo sapien
tgactacctccacttctgattacat

SEQ ID NO: 1395885 - DNA, 25 bp, Homo sapien
gataagaagacatatcctaggaagc

SEQ ID NO: 1395886 - DNA, 25 bp, Homo sapien
ccacttctgattacattactcgtca

SEQ ID NO: 1395887 - DNA, 25 bp, Homo sapien
tccccaaatcaaggaatctcaattt

SEQ ID NO: 1395888 - DNA, 25 bp, Homo sapien
tccctactgcgagtcccaaatacac

SEQ ID NO: 1395889 - DNA, 25 bp, Homo sapien
ctgaattgttcctccctactgcgag

SEQ ID NO: 1395890 - DNA, 25 bp, Homo sapien
aattgttcctccctactgcgagtcc

SEQ ID NO: 1395891 - DNA, 25 bp, Homo sapien
gaatggaatctcacgtgccctttcg

SEQ ID NO: 1395892 - DNA, 25 bp, Homo sapien
tcaaaatgacttacacccctggttg

SEQ ID NO: 1395893 - DNA, 25 bp, Homo sapien
gactgcaccatgactaacgacaagg

SEQ ID NO: 1395894 - DNA, 25 bp, Homo sapien
gccctttcgctatcacaggctgaga

SEQ ID NO: 1395895 - DNA, 25 bp, Homo sapien
gctgctccggagtagtcaaccaagt

SEQ ID NO: 1395896 - DNA, 25 bp, Homo sapien
tcaaaacttgctccggccttcagaa

SEQ ID NO: 1395897 - DNA, 25 bp, Homo sapien
ttctgtcctgaacggcctgaggcag

SEQ ID NO: 1395898 - DNA, 25 bp, Homo sapien
tcatccctcttagtggctgctccgg

SEQ ID NO: 1395899 - DNA, 25 bp, Homo sapien
cctgaaactcgagggaggtgtcaaa

SEQ ID NO: 1395900 - DNA, 25 bp, Homo sapien
ggaagggcactgtcaaatctctccc

SEQ ID NO: 1395901 - DNA, 25 bp, Homo sapien
cacatgaagcccacgggaaaaacag

SEQ ID NO: 1395902 - DNA, 25 bp, Homo sapien
cagacagaaacctctagaaagttgg

SEQ ID NO: 1395903 - DNA, 25 bp, Homo sapien
agggcaaaggtgactcatgaaggag

SEQ ID NO: 1395904 - DNA, 25 bp, Homo sapien
ccaacagggcaaaggtgactcatga

SEQ ID NO: 1395905 - DNA, 25 bp, Homo sapien
gtgactcatgaaggaggagtagctt

SEQ ID NO: 1395906 - DNA, 25 bp, Homo sapien
gactcatgaaggaggagtagcttac

SEQ ID NO: 1395907 - DNA, 25 bp, Homo sapien
agcgaccgctcccgggttccattgg

SEQ ID NO: 1395908 - DNA, 25 bp, Homo sapien
ggttggactgccgacactgccgcct

SEQ ID NO: 1395909 - DNA, 25 bp, Homo sapien
gggttccattggccgcctgcgcttc

SEQ ID NO: 1395910 - DNA, 25 bp, Homo sapien
gggtgcgggcagtcgcggttggact

SEQ ID NO: 1395911 - DNA, 25 bp, Homo sapien
ggaggctgcaccaggccccggctgc

SEQ ID NO: 1395912 - DNA, 25 bp, Homo sapien
agcggccgcggaggctgcaccaggc

SEQ ID NO: 1395913 - DNA, 25 bp, Homo sapien
ggccgcggaggctgcaccaggcccc

SEQ ID NO: 1395914 - DNA, 25 bp, Homo sapien
cgcggaggctgcaccaggccccggc

SEQ ID NO: 1395915 - DNA, 25 bp, Homo sapien
taatctaaggagtcgggtgagctgc

SEQ ID NO: 1395916 - DNA, 25 bp, Homo sapien
gagctgcctggaacatgcctgttca

SEQ ID NO: 1395917 - DNA, 25 bp, Homo sapien
ggccttcaggctgccacaagttcga

SEQ ID NO: 1395918 - DNA, 25 bp, Homo sapien
ggtcaggaccctaccgattccatag

SEQ ID NO: 1395919 - DNA, 25 bp, Homo sapien
cacgccatgcaaatgggcctctggt

SEQ ID NO: 1395920 - DNA, 25 bp, Homo sapien
gacaaaggcttggagggcacaatcc

SEQ ID NO: 1395921 - DNA, 25 bp, Homo sapien
cgtcagtcttttcgccgttagaggc

SEQ ID NO: 1395922 - DNA, 25 bp, Homo sapien
ccgacctcgcccagcaagttttttg

SEQ ID NO: 1395923 - DNA, 25 bp, Homo sapien
gaagcctctttagaaatcttactga

SEQ ID NO: 1395924 - DNA, 25 bp, Homo sapien
ccaaaggaccatggtagaagcctct

SEQ ID NO: 1395925 - DNA, 25 bp, Homo sapien
taagacaagagggaacagttcccaa

SEQ ID NO: 1395926 - DNA, 25 bp, Homo sapien
gaatgaatcatagctatctacaaca

SEQ ID NO: 1395927 - DNA, 25 bp, Homo sapien
attaaggacagtggttaccgctaag

SEQ ID NO: 1395928 - DNA, 25 bp, Homo sapien
gataatagacacgaaaattaaggac

SEQ ID NO: 1395929 - DNA, 25 bp, Homo sapien
tatctatagcagataatagacacga

SEQ ID NO: 1395930 - DNA, 25 bp, Homo sapien
cagtggttaccgctaagaagaggcg

SEQ ID NO: 1395931 - DNA, 25 bp, Homo sapien
atgtgttatgggtcataggtactca

SEQ ID NO: 1395932 - DNA, 25 bp, Homo sapien
ttaatgtatatgtgttatgggtcat

SEQ ID NO: 1395933 - DNA, 25 bp, Homo sapien
tatatgtgttatgggtcataggtac

SEQ ID NO: 1395934 - DNA, 25 bp, Homo sapien
aatgtatatgtgttatgggtcatag

SEQ ID NO: 1395935 - DNA, 25 bp, Homo sapien
taagtggcccagacttaaatggtcc

SEQ ID NO: 1395936 - DNA, 25 bp, Homo sapien
taccttcccacaggatagcacaggg

SEQ ID NO: 1395937 - DNA, 25 bp, Homo sapien
ggtcctacagaagatgcaacagtga

SEQ ID NO: 1395938 - DNA, 25 bp, Homo sapien
tcctgacacgtatgacaagatgctg

SEQ ID NO: 1395939 - DNA, 25 bp, Homo sapien
taagtagactgggtgactcagctgt

SEQ ID NO: 1395940 - DNA, 25 bp, Homo sapien
gatttattggttacactaaagccca

SEQ ID NO: 1395941 - DNA, 25 bp, Homo sapien
gaggcagcaaccaggtactaagtag

SEQ ID NO: 1395942 - DNA, 25 bp, Homo sapien
ggttacactaaagcccagggtatca

SEQ ID NO: 1395943 - DNA, 25 bp, Homo sapien
ctaggcaaagttaacgtagggatat

SEQ ID NO: 1395944 - DNA, 25 bp, Homo sapien
gcaaagaagggcctctactaggcaa

SEQ ID NO: 1395945 - DNA, 25 bp, Homo sapien
taggcaaagttaacgtagggatata

SEQ ID NO: 1395946 - DNA, 25 bp, Homo sapien
gaagggcctctactaggcaaagtta

SEQ ID NO: 1395947 - DNA, 25 bp, Homo sapien
gtctttattaccctgtggtgcagtg

SEQ ID NO: 1395948 - DNA, 25 bp, Homo sapien
gataaggaactttgaagcacatgct

SEQ ID NO: 1395949 - DNA, 25 bp, Homo sapien
atgctcctgggataaggaactttga

SEQ ID NO: 1395950 - DNA, 25 bp, Homo sapien
ctttattaccctgtggtgcagtgtc

SEQ ID NO: 1395951 - DNA, 25 bp, Homo sapien
ttctgctgcccttgatgacactcac

SEQ ID NO: 1395952 - DNA, 25 bp, Homo sapien
aggaaaagcctccttttggcttctg

SEQ ID NO: 1395953 - DNA, 25 bp, Homo sapien
gcttctgctgcccttgatgacactc

SEQ ID NO: 1395954 - DNA, 25 bp, Homo sapien
aaaagcctccttttggcttctgctg

SEQ ID NO: 1395955 - DNA, 25 bp, Homo sapien
tgcccctccagctgagttgccttcc

SEQ ID NO: 1395956 - DNA, 25 bp, Homo sapien
cctcctttggaaacagtaccatctc

SEQ ID NO: 1395957 - DNA, 25 bp, Homo sapien
tgggcaagtactgcccccttttcag

SEQ ID NO: 1395958 - DNA, 25 bp, Homo sapien
gaccaagggaattttatcttctgct

SEQ ID NO: 1395959 - DNA, 25 bp, Homo sapien
gctgacttgagaggggtagaattcc

SEQ ID NO: 1395960 - DNA, 25 bp, Homo sapien
catgtctcccatggtaaccttgagg

SEQ ID NO: 1395961 - DNA, 25 bp, Homo sapien
cccatggtaaccttgaggactgggc

SEQ ID NO: 1395962 - DNA, 25 bp, Homo sapien
ggactgggcagattccatggcagct

SEQ ID NO: 1395963 - DNA, 25 bp, Homo sapien
ccttggtcaccacctatgcctacct

SEQ ID NO: 1395964 - DNA, 25 bp, Homo sapien
gtatcctctatatcctgctttgctg

SEQ ID NO: 1395965 - DNA, 25 bp, Homo sapien
cttttggcatcacttgctgtatcct

SEQ ID NO: 1395966 - DNA, 25 bp, Homo sapien
ttgctgctttagctggtggagcctg

SEQ ID NO: 1395967 - DNA, 25 bp, Homo sapien
gtcccccaggtggagctcgcccagg

SEQ ID NO: 1395968 - DNA, 25 bp, Homo sapien
ggcagccgagccactagggcattaa

SEQ ID NO: 1395969 - DNA, 25 bp, Homo sapien
agatcatgttaatgatgggcacagc

SEQ ID NO: 1395970 - DNA, 25 bp, Homo sapien
tgggattggcggaattagtgagcga

SEQ ID NO: 1395971 - DNA, 25 bp, Homo sapien
gagagactgggattggcggaattag

SEQ ID NO: 1395972 - DNA, 25 bp, Homo sapien
gggccgagctctcaactacactctt

SEQ ID NO: 1395973 - DNA, 25 bp, Homo sapien
actcttcttccgctctccacgtgcg

SEQ ID NO: 1395974 - DNA, 25 bp, Homo sapien
cccagttcgggcttccagatcctta

SEQ ID NO: 1395975 - DNA, 25 bp, Homo sapien
ttccgctctccacgtgcgagaggac

SEQ ID NO: 1395976 - DNA, 25 bp, Homo sapien
cgttcccgaggtgcatgttcgtcct

SEQ ID NO: 1395977 - DNA, 25 bp, Homo sapien
gtttagatgaccgttcccgaggtgc

SEQ ID NO: 1395978 - DNA, 25 bp, Homo sapien
aaccattctttggtttagatgaccg

SEQ ID NO: 1395979 - DNA, 25 bp, Homo sapien
caccctctgggttctctaaaccatt

SEQ ID NO: 1395980 - DNA, 25 bp, Homo sapien
aggtaatagagtgaaggtgaggagg

SEQ ID NO: 1395981 - DNA, 25 bp, Homo sapien
ccaaaaaggtaatagagtgaaggtg

SEQ ID NO: 1395982 - DNA, 25 bp, Homo sapien
aaaggtaatagagtgaaggtgagga

SEQ ID NO: 1395983 - DNA, 25 bp, Homo sapien
aaaaaggtaatagagtgaaggtgag

SEQ ID NO: 1395984 - DNA, 25 bp, Homo sapien
gggcgacctcaacgatggaactgaa

SEQ ID NO: 1395985 - DNA, 25 bp, Homo sapien
gaaggaccgtttcaggatccgctct

SEQ ID NO: 1395986 - DNA, 25 bp, Homo sapien
catggccttaagcacatgggcatgt

SEQ ID NO: 1395987 - DNA, 25 bp, Homo sapien
ctccaccagttcatctcgaggtgct

SEQ ID NO: 1395988 - DNA, 25 bp, Homo sapien
agtggaattggaaggtgatttggta

SEQ ID NO: 1395989 - DNA, 25 bp, Homo sapien
agagtggaattggaaggtgatttgg

SEQ ID NO: 1395990 - DNA, 25 bp, Homo sapien
gaattggaaggtgatttggtactta

SEQ ID NO: 1395991 - DNA, 25 bp, Homo sapien
tggaattggaaggtgatttggtact

SEQ ID NO: 1395992 - DNA, 25 bp, Homo sapien
actctcagaaccctttaggtcaagt

SEQ ID NO: 1395993 - DNA, 25 bp, Homo sapien
ggggtggcatagacaccaaggtctt

SEQ ID NO: 1395994 - DNA, 25 bp, Homo sapien
ctcagaaccctttaggtcaagtcca

SEQ ID NO: 1395995 - DNA, 25 bp, Homo sapien
caaggtcttcctccttatgccactg

SEQ ID NO: 1395996 - DNA, 25 bp, Homo sapien
tgctctccacatcctaagtcttcct

SEQ ID NO: 1395997 - DNA, 25 bp, Homo sapien
gagcaagttaagctgttccactcct

SEQ ID NO: 1395998 - DNA, 25 bp, Homo sapien
atctccaagcccctcgagcaagtta

SEQ ID NO: 1395999 - DNA, 25 bp, Homo sapien
gcagccaacacatggcgatctccaa

SEQ ID NO: 1396000 - DNA, 25 bp, Homo sapien
agtgggcggcaacaggcaagactct

SEQ ID NO: 1396001 - DNA, 25 bp, Homo sapien
ggccaccaagccttcgagctttgat

SEQ ID NO: 1396002 - DNA, 25 bp, Homo sapien
ccaagccttcgagctttgatgtcag

SEQ ID NO: 1396003 - DNA, 25 bp, Homo sapien
acaggcaagactctcacagtacttc

SEQ ID NO: 1396004 - DNA, 25 bp, Homo sapien
gaaggaggccatgggtaggctcgaa

SEQ ID NO: 1396005 - DNA, 25 bp, Homo sapien
taggctcgaagagtccctagggatc

SEQ ID NO: 1396006 - DNA, 25 bp, Homo sapien
agtccctagggatcaagtgtgagga

SEQ ID NO: 1396007 - DNA, 25 bp, Homo sapien
gtgtgaggaaccctttaagaaggca

SEQ ID NO: 1396008 - DNA, 25 bp, Homo sapien
acactttgctttggcagacaggtgt

SEQ ID NO: 1396009 - DNA, 25 bp, Homo sapien
tttggcagacaggtgtcagtgtgct

SEQ ID NO: 1396010 - DNA, 25 bp, Homo sapien
tgctttggcagacaggtgtcagtgt

SEQ ID NO: 1396011 - DNA, 25 bp, Homo sapien
actttgctttggcagacaggtgtca

SEQ ID NO: 1396012 - DNA, 25 bp, Homo sapien
actcctcattgctcagtgtacttgg

SEQ ID NO: 1396013 - DNA, 25 bp, Homo sapien
tacatgtactcctcattgctcagtg

SEQ ID NO: 1396014 - DNA, 25 bp, Homo sapien
taggcatacatgtactcctcattgc

SEQ ID NO: 1396015 - DNA, 25 bp, Homo sapien
ctataggcatacatgtactcctcat

SEQ ID NO: 1396016 - DNA, 25 bp, Homo sapien
caagtcagggcgaggacctttcctc

SEQ ID NO: 1396017 - DNA, 25 bp, Homo sapien
actaagaccctaacagttgtcctgg

SEQ ID NO: 1396018 - DNA, 25 bp, Homo sapien
tccctggtaaaccaagtcagggcga

SEQ ID NO: 1396019 - DNA, 25 bp, Homo sapien
tcacccagaatctaactttccctgg

SEQ ID NO: 1396020 - DNA, 25 bp, Homo sapien
gtagagatacagcttgtcattgtca

SEQ ID NO: 1396021 - DNA, 25 bp, Homo sapien
ctgaaggtagagatacagcttgtca

SEQ ID NO: 1396022 - DNA, 25 bp, Homo sapien
gaaggtagagatacagcttgtcatt

SEQ ID NO: 1396023 - DNA, 25 bp, Homo sapien
agctgaaggtagagatacagcttgt

SEQ ID NO: 1396024 - DNA, 25 bp, Homo sapien
ctctactttgttctgcacggccttg

SEQ ID NO: 1396025 - DNA, 25 bp, Homo sapien
gaaatggtacctcggagcctctgaa

SEQ ID NO: 1396026 - DNA, 25 bp, Homo sapien
ccccagtcttggggctcttagcatc

SEQ ID NO: 1396027 - DNA, 25 bp, Homo sapien
gggctcttagcatcaggctcatctt

SEQ ID NO: 1396028 - DNA, 25 bp, Homo sapien
atggtacctcggagcctctgaagaa

SEQ ID NO: 1396029 - DNA, 25 bp, Homo sapien
aagatgtaactcacactggccttcc

SEQ ID NO: 1396030 - DNA, 25 bp, Homo sapien
taaagatgtaactcacactggcctt

SEQ ID NO: 1396031 - DNA, 25 bp, Homo sapien
cataaagatgtaactcacactggcc

SEQ ID NO: 1396032 - DNA, 25 bp, Homo sapien
aaagatgtaactcacactggccttc

SEQ ID NO: 1396033 - DNA, 25 bp, Homo sapien
tctgaagtctcctaaatctggaaaa

SEQ ID NO: 1396034 - DNA, 25 bp, Homo sapien
tttctgaagtctcctaaatctggaa

SEQ ID NO: 1396035 - DNA, 25 bp, Homo sapien
aaattattccattacttcgccaggc

SEQ ID NO: 1396036 - DNA, 25 bp, Homo sapien
ttcgccaggcccatatatgcccaaa

SEQ ID NO: 1396037 - DNA, 25 bp, Homo sapien
cctgggaggtcagaaaggatacgaa

SEQ ID NO: 1396038 - DNA, 25 bp, Homo sapien
ggcccaagttctcattacttaatct

SEQ ID NO: 1396039 - DNA, 25 bp, Homo sapien
acatattctgcccttctaggcttgg

SEQ ID NO: 1396040 - DNA, 25 bp, Homo sapien
gaaaggatacgaacatattctgccc

SEQ ID NO: 1396041 - DNA, 25 bp, Homo sapien
caagcaacaataaaggtaagggaga

SEQ ID NO: 1396042 - DNA, 25 bp, Homo sapien
gtcgccttccaacacaagcaacaat

SEQ ID NO: 1396043 - DNA, 25 bp, Homo sapien
acaagcaacaataaaggtaagggag

SEQ ID NO: 1396044 - DNA, 25 bp, Homo sapien
ctgaacagtcgccttccaacacaag

SEQ ID NO: 1396045 - DNA, 25 bp, Homo sapien
tggcccagccggctcgtgcgttgct

SEQ ID NO: 1396046 - DNA, 25 bp, Homo sapien
tatatgactcaacacattgccacag

SEQ ID NO: 1396047 - DNA, 25 bp, Homo sapien
ccaagagctcatggaaaagcagcac

SEQ ID NO: 1396048 - DNA, 25 bp, Homo sapien
tacatgctgccaagggtcgggtgcc

SEQ ID NO: 1396049 - DNA, 25 bp, Homo sapien
gcagcacagtgagcaacaagcaaca

SEQ ID NO: 1396050 - DNA, 25 bp, Homo sapien
tccagatgtcagagctacaatcgcc

SEQ ID NO: 1396051 - DNA, 25 bp, Homo sapien
aacttcagccctccttttactgtgt

SEQ ID NO: 1396052 - DNA, 25 bp, Homo sapien
cttcccgaagtccaccaggaagttg

SEQ ID NO: 1396053 - DNA, 25 bp, Homo sapien
tactgtgtctacatcaacctgcagc

SEQ ID NO: 1396054 - DNA, 25 bp, Homo sapien
cagggtaaaactgcttgtcccaggc

SEQ ID NO: 1396055 - DNA, 25 bp, Homo sapien
caggcactgtacagcgacgtggtga

SEQ ID NO: 1396056 - DNA, 25 bp, Homo sapien
acgtggtgatgtagaggcgcttccc

SEQ ID NO: 1396057 - DNA, 25 bp, Homo sapien
tgagggcctccagccacccgttttc

SEQ ID NO: 1396058 - DNA, 25 bp, Homo sapien
gctgggactttagttcctcgtcctc

SEQ ID NO: 1396059 - DNA, 25 bp, Homo sapien
tgggactttagttcctcgtcctcca

SEQ ID NO: 1396060 - DNA, 25 bp, Homo sapien
ggactttagttcctcgtcctccagc

SEQ ID NO: 1396061 - DNA, 25 bp, Homo sapien
agtgggaggcgcaaacattgcagga

SEQ ID NO: 1396062 - DNA, 25 bp, Homo sapien
agtataaggaggaccatagtgggag

SEQ ID NO: 1396063 - DNA, 25 bp, Homo sapien
accatagtgggaggcgcaaacattg

SEQ ID NO: 1396064 - DNA, 25 bp, Homo sapien
agagtataaggaggaccatagtggg

SEQ ID NO: 1396065 - DNA, 25 bp, Homo sapien
agcacacatgtctgcttttcctgca

SEQ ID NO: 1396066 - DNA, 25 bp, Homo sapien
gcacacatgtctgcttttcctgcac

SEQ ID NO: 1396067 - DNA, 25 bp, Homo sapien
tgcagctgcttcagatcatccaccc

SEQ ID NO: 1396068 - DNA, 25 bp, Homo sapien
gctgcttcagatcatccaccccatc

SEQ ID NO: 1396069 - DNA, 25 bp, Homo sapien
gcagctgcttcagatcatccacccc

SEQ ID NO: 1396070 - DNA, 25 bp, Homo sapien
agctgcttcagatcatccaccccat

SEQ ID NO: 1396071 - DNA, 25 bp, Homo sapien
gggtcagagatgtcatactgcctca

SEQ ID NO: 1396072 - DNA, 25 bp, Homo sapien
cagagatgtcatactgcctcaggtc

SEQ ID NO: 1396073 - DNA, 25 bp, Homo sapien
agatgtcatactgcctcaggtcccc

SEQ ID NO: 1396074 - DNA, 25 bp, Homo sapien
tctgtgggtcagagatgtcatactg

SEQ ID NO: 1396075 - DNA, 25 bp, Homo sapien
gagagcaggatgtcggtgatcaggc

SEQ ID NO: 1396076 - DNA, 25 bp, Homo sapien
gggagagcaggatgtcggtgatcag

SEQ ID NO: 1396077 - DNA, 25 bp, Homo sapien
agggagagcaggatgtcggtgatca

SEQ ID NO: 1396078 - DNA, 25 bp, Homo sapien
ggagagcaggatgtcggtgatcagg

SEQ ID NO: 1396079 - DNA, 25 bp, Homo sapien
cagcccttcactttcttggggggca

SEQ ID NO: 1396080 - DNA, 25 bp, Homo sapien
tggcatttcgggcagcagccagccc

SEQ ID NO: 1396081 - DNA, 25 bp, Homo sapien
ttggggggcacctggatcaccttct

SEQ ID NO: 1396082 - DNA, 25 bp, Homo sapien
ctggcatttcgggcagcagccagcc

SEQ ID NO: 1396083 - DNA, 25 bp, Homo sapien
gataaatacggccagttagggttca

SEQ ID NO: 1396084 - DNA, 25 bp, Homo sapien
cagaagttgccctagcactgagaga

SEQ ID NO: 1396085 - DNA, 25 bp, Homo sapien
ggagagaatagatgcccggccttct

SEQ ID NO: 1396086 - DNA, 25 bp, Homo sapien
ggatctaactccatgcaagcccctt

SEQ ID NO: 1396087 - DNA, 25 bp, Homo sapien
gcgtctgggttgtgcaggaagcgga

SEQ ID NO: 1396088 - DNA, 25 bp, Homo sapien
gagctgagtgcgcagcccacaaagc

SEQ ID NO: 1396089 - DNA, 25 bp, Homo sapien
gcggatctccaagggaataagccca

SEQ ID NO: 1396090 - DNA, 25 bp, Homo sapien
ttgtagaagcgctggatggtggagc

SEQ ID NO: 1396091 - DNA, 25 bp, Homo sapien
tgccagtcccatacatataagtggc

SEQ ID NO: 1396092 - DNA, 25 bp, Homo sapien
cagtcccatacatataagtggctcc

SEQ ID NO: 1396093 - DNA, 25 bp, Homo sapien
cccatacatataagtggctcccgta

SEQ ID NO: 1396094 - DNA, 25 bp, Homo sapien
acatataagtggctcccgtacagtc

SEQ ID NO: 1396095 - DNA, 25 bp, Homo sapien
ccggaggataggctcagcatcagag

SEQ ID NO: 1396096 - DNA, 25 bp, Homo sapien
ggaagacgcttgagcaatctgagca

SEQ ID NO: 1396097 - DNA, 25 bp, Homo sapien
gagcatgcggtacatcctatgccat

SEQ ID NO: 1396098 - DNA, 25 bp, Homo sapien
ttaagaaatggattggagggatcag

SEQ ID NO: 1396099 - DNA, 25 bp, Homo sapien
aagtcatagcccaacggtgcagcac

SEQ ID NO: 1396100 - DNA, 25 bp, Homo sapien
tgcccactcagtgctgatcatgaca

SEQ ID NO: 1396101 - DNA, 25 bp, Homo sapien
gacattgtgtcgaggctggtaccag

SEQ ID NO: 1396102 - DNA, 25 bp, Homo sapien
ccatctcgtaagacattgggagctg

SEQ ID NO: 1396103 - DNA, 25 bp, Homo sapien
tgctggatttgccagttccttaaat

SEQ ID NO: 1396104 - DNA, 25 bp, Homo sapien
caggataatctcttgaaccagtgag

SEQ ID NO: 1396105 - DNA, 25 bp, Homo sapien
ggataatctcttgaaccagtgaggc

SEQ ID NO: 1396106 - DNA, 25 bp, Homo sapien
attacccaggcatggcgtcacatgc

SEQ ID NO: 1396107 - DNA, 25 bp, Homo sapien
ataatctcttgaaccagtgaggcgg

SEQ ID NO: 1396108 - DNA, 25 bp, Homo sapien
ggaagttttcatgagcacacagtgc

SEQ ID NO: 1396109 - DNA, 25 bp, Homo sapien
tgtggaagttttcatgagcacacag

SEQ ID NO: 1396110 - DNA, 25 bp, Homo sapien
tcacagctgtggaagttttcatgag

SEQ ID NO: 1396111 - DNA, 25 bp, Homo sapien
cagctgtggaagttttcatgagcac

SEQ ID NO: 1396112 - DNA, 25 bp, Homo sapien
cagttcgcacttggcatggatgtcc

SEQ ID NO: 1396113 - DNA, 25 bp, Homo sapien
tggagaaaggccagttcgcacttgg

SEQ ID NO: 1396114 - DNA, 25 bp, Homo sapien
cattgcccttgacgtctcccaggga

SEQ ID NO: 1396115 - DNA, 25 bp, Homo sapien
gagctgatcatcacttccccgctgg

SEQ ID NO: 1396116 - DNA, 25 bp, Homo sapien
ggggaatggtgtcagaatcatacag

SEQ ID NO: 1396117 - DNA, 25 bp, Homo sapien
tggggaatggtgtcagaatcataca

SEQ ID NO: 1396118 - DNA, 25 bp, Homo sapien
ggaatggtgtcagaatcatacagga

SEQ ID NO: 1396119 - DNA, 25 bp, Homo sapien
gggaatggtgtcagaatcatacagg

SEQ ID NO: 1396120 - DNA, 25 bp, Homo sapien
tttttaagagaaccctgagctccta

SEQ ID NO: 1396121 - DNA, 25 bp, Homo sapien
gagattgctaataactccccaggca

SEQ ID NO: 1396122 - DNA, 25 bp, Homo sapien
gcagccctgtgaaaccataagctcc

SEQ ID NO: 1396123 - DNA, 25 bp, Homo sapien
ccccaggcagaaagcgctgaccttt

SEQ ID NO: 1396124 - DNA, 25 bp, Homo sapien
cagctttggggcccggggctcagag

SEQ ID NO: 1396125 - DNA, 25 bp, Homo sapien
agctttggggcccggggctcagagc

SEQ ID NO: 1396126 - DNA, 25 bp, Homo sapien
tgcagctttggggcccggggctcag

SEQ ID NO: 1396127 - DNA, 25 bp, Homo sapien
tgtgcagctttggggcccggggctc

SEQ ID NO: 1396128 - DNA, 25 bp, Homo sapien
gagtgatgcagctcgtccttcaggt

SEQ ID NO: 1396129 - DNA, 25 bp, Homo sapien
ccaccacatagatgcgagaggagat

SEQ ID NO: 1396130 - DNA, 25 bp, Homo sapien
gcttggtgcgcgacttggtgctatc

SEQ ID NO: 1396131 - DNA, 25 bp, Homo sapien
caggtgttccatcctgagtgatgca

SEQ ID NO: 1396132 - DNA, 25 bp, Homo sapien
tgagggcagctatggtctcaaagta

SEQ ID NO: 1396133 - DNA, 25 bp, Homo sapien
caggttgagcgtgcacaagcatccc

SEQ ID NO: 1396134 - DNA, 25 bp, Homo sapien
tggtctcaaagtagctggcgcccaa

SEQ ID NO: 1396135 - DNA, 25 bp, Homo sapien
gctggatttcagcactccccttgtc

SEQ ID NO: 1396136 - DNA, 25 bp, Homo sapien
gagacttggggtcaacatccacagt

SEQ ID NO: 1396137 - DNA, 25 bp, Homo sapien
ggagacttggggtcaacatccacag

SEQ ID NO: 1396138 - DNA, 25 bp, Homo sapien
gacttggggtcaacatccacagtgg

SEQ ID NO: 1396139 - DNA, 25 bp, Homo sapien
agacttggggtcaacatccacagtg

SEQ ID NO: 1396140 - DNA, 25 bp, Homo sapien
gcagggcaggtagacgatctcttcc

SEQ ID NO: 1396141 - DNA, 25 bp, Homo sapien
aggtagacgatctcttccctgggtc

SEQ ID NO: 1396142 - DNA, 25 bp, Homo sapien
taaatgcagggcaggtagacgatct

SEQ ID NO: 1396143 - DNA, 25 bp, Homo sapien
tttcggtaaatgcagggcaggtaga

SEQ ID NO: 1396144 - DNA, 25 bp, Homo sapien
tggaatcagtagtagggcgctggct

SEQ ID NO: 1396145 - DNA, 25 bp, Homo sapien
gaatcagtagtagggcgctggctct

SEQ ID NO: 1396146 - DNA, 25 bp, Homo sapien
gtggaatcagtagtagggcgctggc

SEQ ID NO: 1396147 - DNA, 25 bp, Homo sapien
aatcagtagtagggcgctggctctc

SEQ ID NO: 1396148 - DNA, 25 bp, Homo sapien
agtagccgggtccacaattcccaca

SEQ ID NO: 1396149 - DNA, 25 bp, Homo sapien
ggtggagtagccgggtccacaattc

SEQ ID NO: 1396150 - DNA, 25 bp, Homo sapien
ggagtagccgggtccacaattccca

SEQ ID NO: 1396151 - DNA, 25 bp, Homo sapien
tggagtagccgggtccacaattccc

SEQ ID NO: 1396152 - DNA, 25 bp, Homo sapien
ccagcgggccacggcagtgcggctg

SEQ ID NO: 1396153 - DNA, 25 bp, Homo sapien
gtgaaggctccctccgcacgttctg

SEQ ID NO: 1396154 - DNA, 25 bp, Homo sapien
caatggggcgcattggctgggccac

SEQ ID NO: 1396155 - DNA, 25 bp, Homo sapien
cactccagcctcatcgctctggcct

SEQ ID NO: 1396156 - DNA, 25 bp, Homo sapien
tttgtctggtcgaagcccaggcacc

SEQ ID NO: 1396157 - DNA, 25 bp, Homo sapien
cagtaggtgtgcagctctgtgtttg

SEQ ID NO: 1396158 - DNA, 25 bp, Homo sapien
tgtagtgaatatgacacggactcgg

SEQ ID NO: 1396159 - DNA, 25 bp, Homo sapien
ttacgagaagtaaacacgagggtgc

SEQ ID NO: 1396160 - DNA, 25 bp, Homo sapien
tcgcagcagccaagagacttaggaa

SEQ ID NO: 1396161 - DNA, 25 bp, Homo sapien
gaggcagcaacagcgttcagagtct

SEQ ID NO: 1396162 - DNA, 25 bp, Homo sapien
cctcttcatttacgaaaagtgggca

SEQ ID NO: 1396163 - DNA, 25 bp, Homo sapien
taatctccaggatgtaagtcagcag

SEQ ID NO: 1396164 - DNA, 25 bp, Homo sapien
tttgatcccggcgggtttgctgtgc

SEQ ID NO: 1396165 - DNA, 25 bp, Homo sapien
cccggcgggtttgctgtgctggtgt

SEQ ID NO: 1396166 - DNA, 25 bp, Homo sapien
ctggtacactttgatcccggcgggt

SEQ ID NO: 1396167 - DNA, 25 bp, Homo sapien
gatcccggcgggtttgctgtgctgg

SEQ ID NO: 1396168 - DNA, 25 bp, Homo sapien
cccaggacagttttaccgcattccg

SEQ ID NO: 1396169 - DNA, 25 bp, Homo sapien
gatccggcgtctgcactttacagag

SEQ ID NO: 1396170 - DNA, 25 bp, Homo sapien
gtccactcccgattccttcatggat

SEQ ID NO: 1396171 - DNA, 25 bp, Homo sapien
tttacagaggtccaatcacgcggac

SEQ ID NO: 1396172 - DNA, 25 bp, Homo sapien
catggtgaccgggacctcagtcctc

SEQ ID NO: 1396173 - DNA, 25 bp, Homo sapien
tgaccgggacctcagtcctcggcgt

SEQ ID NO: 1396174 - DNA, 25 bp, Homo sapien
ctcggcgttaagttcgagggcggag

SEQ ID NO: 1396175 - DNA, 25 bp, Homo sapien
cgttaagttcgagggcggagtggtg

SEQ ID NO: 1396176 - DNA, 25 bp, Homo sapien
tcgcattatgcgagtcaacaacagt

SEQ ID NO: 1396177 - DNA, 25 bp, Homo sapien
cagtatttgaagcaagttctcggcc

SEQ ID NO: 1396178 - DNA, 25 bp, Homo sapien
ggtgcctctggcgactacgctgatt

SEQ ID NO: 1396179 - DNA, 25 bp, Homo sapien
caacaacagtaccatgctgggtgcc

SEQ ID NO: 1396180 - DNA, 25 bp, Homo sapien
tagagctattcattcatggctgacc

SEQ ID NO: 1396181 - DNA, 25 bp, Homo sapien
gtacagccggcgctcgaagatgaac

SEQ ID NO: 1396182 - DNA, 25 bp, Homo sapien
gaacaccatggtcatcggaggctat

SEQ ID NO: 1396183 - DNA, 25 bp, Homo sapien
gaagatgaaccctttgtggaacacc

SEQ ID NO: 1396184 - DNA, 25 bp, Homo sapien
acatgcttggtgtagcctatgaagc

SEQ ID NO: 1396185 - DNA, 25 bp, Homo sapien
gacatgcttggtgtagcctatgaag

SEQ ID NO: 1396186 - DNA, 25 bp, Homo sapien
atgaagccccttcgctggccactgg

SEQ ID NO: 1396187 - DNA, 25 bp, Homo sapien
cctatgaagccccttcgctggccac

SEQ ID NO: 1396188 - DNA, 25 bp, Homo sapien
tgtagatagacgtgaccaaccatag

SEQ ID NO: 1396189 - DNA, 25 bp, Homo sapien
gaaccccagctctgctaaggctgtg

SEQ ID NO: 1396190 - DNA, 25 bp, Homo sapien
tcaaaggttcacaaagctggccaag

SEQ ID NO: 1396191 - DNA, 25 bp, Homo sapien
caagaaagtcaatcgtgtgcagaag

SEQ ID NO: 1396192 - DNA, 25 bp, Homo sapien
atagtgtgctgggggatgaaaaaac

SEQ ID NO: 1396193 - DNA, 25 bp, Homo sapien
agtgtgctgggggatgaaaaaacaa

SEQ ID NO: 1396194 - DNA, 25 bp, Homo sapien
ttatagtgtgctgggggatgaaaaa

SEQ ID NO: 1396195 - DNA, 25 bp, Homo sapien
gtgtgctgggggatgaaaaaacaaa

SEQ ID NO: 1396196 - DNA, 25 bp, Homo sapien
caccaggcccatcacatcttgagca

SEQ ID NO: 1396197 - DNA, 25 bp, Homo sapien
agaaatgggtggtaacaaatgtcac

SEQ ID NO: 1396198 - DNA, 25 bp, Homo sapien
aaatgtcacacctgtaccaccaggc

SEQ ID NO: 1396199 - DNA, 25 bp, Homo sapien
tgtgaaagcctattaaacagggtca

SEQ ID NO: 1396200 - DNA, 25 bp, Homo sapien
ggctgtaggaccagtaatcccttaa

SEQ ID NO: 1396201 - DNA, 25 bp, Homo sapien
cagagcacgctggatttcaacaagt

SEQ ID NO: 1396202 - DNA, 25 bp, Homo sapien
gatgaagactcaaactgggaatggc

SEQ ID NO: 1396203 - DNA, 25 bp, Homo sapien
tacaagcttgtgcagtttgcctcct

SEQ ID NO: 1396204 - DNA, 25 bp, Homo sapien
caatagccacaatcatagacaaggg

SEQ ID NO: 1396205 - DNA, 25 bp, Homo sapien
tatggagtctggcatgttagcaggc

SEQ ID NO: 1396206 - DNA, 25 bp, Homo sapien
taagtcctggttgtgaatctgccgt

SEQ ID NO: 1396207 - DNA, 25 bp, Homo sapien
acaagtgagtgcgatgacagtccat

SEQ ID NO: 1396208 - DNA, 25 bp, Homo sapien
tgttgttcgcgctgggttagcaccc

SEQ ID NO: 1396209 - DNA, 25 bp, Homo sapien
aggtggtgccgcagcatgaaacgca

SEQ ID NO: 1396210 - DNA, 25 bp, Homo sapien
ggaggcctggaaacgtcgaagccaa

SEQ ID NO: 1396211 - DNA, 25 bp, Homo sapien
gaagccaacggcgaatacgtcgctg

SEQ ID NO: 1396212 - DNA, 25 bp, Homo sapien
ctgcgggtgagtgggggttggtggt

SEQ ID NO: 1396213 - DNA, 25 bp, Homo sapien
gttggtggtggggttgcagttgagg

SEQ ID NO: 1396214 - DNA, 25 bp, Homo sapien
gggttggtggtggggttgcagttga

SEQ ID NO: 1396215 - DNA, 25 bp, Homo sapien
tgcgggtgagtgggggttggtggtg

SEQ ID NO: 1396216 - DNA, 25 bp, Homo sapien
agggagttagtagctcttcaggctc

SEQ ID NO: 1396217 - DNA, 25 bp, Homo sapien
gggctaagggagttagtagctcttc

SEQ ID NO: 1396218 - DNA, 25 bp, Homo sapien
gggtggcccccgcagatttcacagt

SEQ ID NO: 1396219 - DNA, 25 bp, Homo sapien
gtggcccccgcagatttcacagtgg

SEQ ID NO: 1396220 - DNA, 25 bp, Homo sapien
gttccggtcatgcactcggtcacga

SEQ ID NO: 1396221 - DNA, 25 bp, Homo sapien
cggtcatgcactcggtcacgagtct

SEQ ID NO: 1396222 - DNA, 25 bp, Homo sapien
cactcggtcacgagtctggccatgc

SEQ ID NO: 1396223 - DNA, 25 bp, Homo sapien
tcatgcactcggtcacgagtctggc

SEQ ID NO: 1396224 - DNA, 25 bp, Homo sapien
cttgagtgagctatccaagtgagtc

SEQ ID NO: 1396225 - DNA, 25 bp, Homo sapien
gaaggtttctaattaggtccagcac

SEQ ID NO: 1396226 - DNA, 25 bp, Homo sapien
aaataagccctccaaagacagtgcc

SEQ ID NO: 1396227 - DNA, 25 bp, Homo sapien
tcaacagtgaatgagtgaggccaag

SEQ ID NO: 1396228 - DNA, 25 bp, Homo sapien
tcctgatgcatacagtacgaacctg

SEQ ID NO: 1396229 - DNA, 25 bp, Homo sapien
caaatgcttggccatagcatcgccc

SEQ ID NO: 1396230 - DNA, 25 bp, Homo sapien
tggccatagcatcgcccacagaggt

SEQ ID NO: 1396231 - DNA, 25 bp, Homo sapien
gtaacaaaggtacatgaagtgcagg

SEQ ID NO: 1396232 - DNA, 25 bp, Homo sapien
tgagaggggttgaataccaaatgct

SEQ ID NO: 1396233 - DNA, 25 bp, Homo sapien
gacaaacacagcagtgacacttgag

SEQ ID NO: 1396234 - DNA, 25 bp, Homo sapien
taattcacataaccacctctccaaa

SEQ ID NO: 1396235 - DNA, 25 bp, Homo sapien
aaaagagaattgagactatgtaaga

SEQ ID NO: 1396236 - DNA, 25 bp, Homo sapien
gaccattaagctttgaggcttaaga

SEQ ID NO: 1396237 - DNA, 25 bp, Homo sapien
ggggctcttccgtggaacatgattg

SEQ ID NO: 1396238 - DNA, 25 bp, Homo sapien
caaatacttggggctcttccgtgga

SEQ ID NO: 1396239 - DNA, 25 bp, Homo sapien
cttggggctcttccgtggaacatga

SEQ ID NO: 1396240 - DNA, 25 bp, Homo sapien
atacttggggctcttccgtggaaca

SEQ ID NO: 1396241 - DNA, 25 bp, Homo sapien
agtagggaaatgattagggaagtct

SEQ ID NO: 1396242 - DNA, 25 bp, Homo sapien
tgatcatgtggttggcataagctcg

SEQ ID NO: 1396243 - DNA, 25 bp, Homo sapien
tatagcgacacagagagcagtgtac

SEQ ID NO: 1396244 - DNA, 25 bp, Homo sapien
cataagctcgagaacagcaggtgct

SEQ ID NO: 1396245 - DNA, 25 bp, Homo sapien
cattagaggatacaggaacagttcg

SEQ ID NO: 1396246 - DNA, 25 bp, Homo sapien
aggtcagcggtgctgcctcctgcaa

SEQ ID NO: 1396247 - DNA, 25 bp, Homo sapien
ctgggaggtgtatcattagaggata

SEQ ID NO: 1396248 - DNA, 25 bp, Homo sapien
tacaggaacagttcgtggctgccct

SEQ ID NO: 1396249 - DNA, 25 bp, Homo sapien
tatggtgttgaagcttgtgttcaat

SEQ ID NO: 1396250 - DNA, 25 bp, Homo sapien
aactgcagccggcatttgttgcagt

SEQ ID NO: 1396251 - DNA, 25 bp, Homo sapien
tttatggtgttgaagcttgtgttca

SEQ ID NO: 1396252 - DNA, 25 bp, Homo sapien
ccagctgcttgggtttacggaaggt

SEQ ID NO: 1396253 - DNA, 25 bp, Homo sapien
tatacagatatgtctcctggtgaga

SEQ ID NO: 1396254 - DNA, 25 bp, Homo sapien
tcactactgtgcaaaggagactatg

SEQ ID NO: 1396255 - DNA, 25 bp, Homo sapien
cctggtgagaccactttgaggattc

SEQ ID NO: 1396256 - DNA, 25 bp, Homo sapien
cagtctgcctagtattgaagtcctt

SEQ ID NO: 1396257 - DNA, 25 bp, Homo sapien
agagtgaggagcgatattgacacac

SEQ ID NO: 1396258 - DNA, 25 bp, Homo sapien
gaaaatggacatctacctcagagta

SEQ ID NO: 1396259 - DNA, 25 bp, Homo sapien
ttcaggcaataagggcagagcagat

SEQ ID NO: 1396260 - DNA, 25 bp, Homo sapien
gcagatgccgggtatcctcatggat

SEQ ID NO: 1396261 - DNA, 25 bp, Homo sapien
gagtcacataggagggaaaataagg

SEQ ID NO: 1396262 - DNA, 25 bp, Homo sapien
tgagtcacataggagggaaaataag

SEQ ID NO: 1396263 - DNA, 25 bp, Homo sapien
ctgagtcacataggagggaaaataa

SEQ ID NO: 1396264 - DNA, 25 bp, Homo sapien
tgagtatccttcatatgctggagaa

SEQ ID NO: 1396265 - DNA, 25 bp, Homo sapien
ctggagaaatagtggctcactttca

SEQ ID NO: 1396266 - DNA, 25 bp, Homo sapien
ctttcaaacgcccattcacagatct

SEQ ID NO: 1396267 - DNA, 25 bp, Homo sapien
ggcatctctccaggcttatgagtat

SEQ ID NO: 1396268 - DNA, 25 bp, Homo sapien
gctaggactatcctttgagctcaag

SEQ ID NO: 1396269 - DNA, 25 bp, Homo sapien
tgagccagtgcaccggccaattttg

SEQ ID NO: 1396270 - DNA, 25 bp, Homo sapien
tccttttgtcaatccacttcagtct

SEQ ID NO: 1396271 - DNA, 25 bp, Homo sapien
ggtaagacttttaactgctacatat

SEQ ID NO: 1396272 - DNA, 25 bp, Homo sapien
tgtctcgcacgctagagcgcagtgg

SEQ ID NO: 1396273 - DNA, 25 bp, Homo sapien
atctggggtctatggaacaggcctc

SEQ ID NO: 1396274 - DNA, 25 bp, Homo sapien
ggtctatggaacaggcctctaggaa

SEQ ID NO: 1396275 - DNA, 25 bp, Homo sapien
gtctcgttctgtctcgcacgctaga

SEQ ID NO: 1396276 - DNA, 25 bp, Homo sapien
tatctcactgctggctcgacttgct

SEQ ID NO: 1396277 - DNA, 25 bp, Homo sapien
gctggctcgacttgctgggctcaaa

SEQ ID NO: 1396278 - DNA, 25 bp, Homo sapien
atcatatctcactgctggctcgact

SEQ ID NO: 1396279 - DNA, 25 bp, Homo sapien
tcactgctggctcgacttgctgggc

SEQ ID NO: 1396280 - DNA, 25 bp, Homo sapien
cattttccaagtggcactgaagctg

SEQ ID NO: 1396281 - DNA, 25 bp, Homo sapien
tgtgaccatctacctcaccgttctg

SEQ ID NO: 1396282 - DNA, 25 bp, Homo sapien
cagtgctggcagatagtgtgaccat

SEQ ID NO: 1396283 - DNA, 25 bp, Homo sapien
tctacgtggtgtttcatatggttca

SEQ ID NO: 1396284 - DNA, 25 bp, Homo sapien
tgctgatgggacactgggttctgaa

SEQ ID NO: 1396285 - DNA, 25 bp, Homo sapien
gagtttggtctggacggcatcgccc

SEQ ID NO: 1396286 - DNA, 25 bp, Homo sapien
gcatcggaaagatgtggcgacctta

SEQ ID NO: 1396287 - DNA, 25 bp, Homo sapien
tctggtactttggtaggcggtgaca

SEQ ID NO: 1396288 - DNA, 25 bp, Homo sapien
gaagtaagagctcccgattcatcca

SEQ ID NO: 1396289 - DNA, 25 bp, Homo sapien
tatgccacccaagcgctatactttg

SEQ ID NO: 1396290 - DNA, 25 bp, Homo sapien
gggctagaatgtgctaactccttaa

SEQ ID NO: 1396291 - DNA, 25 bp, Homo sapien
attagtataacttggctctgagctc

SEQ ID NO: 1396292 - DNA, 25 bp, Homo sapien
atattttccgtccaccatcctggag

SEQ ID NO: 1396293 - DNA, 25 bp, Homo sapien
ttcagtaacacgaaattgagcatta

SEQ ID NO: 1396294 - DNA, 25 bp, Homo sapien
tggacatattttccgtccaccatcc

SEQ ID NO: 1396295 - DNA, 25 bp, Homo sapien
gaaattgagcattacatcgtggaca

SEQ ID NO: 1396296 - DNA, 25 bp, Homo sapien
gcaagcatgagagatcactatggtt

SEQ ID NO: 1396297 - DNA, 25 bp, Homo sapien
tatataaaagggtaagcaagcatga

SEQ ID NO: 1396298 - DNA, 25 bp, Homo sapien
aacactccctgagaagtatataaaa

SEQ ID NO: 1396299 - DNA, 25 bp, Homo sapien
taagattaatacaatgacactggaa

SEQ ID NO: 1396300 - DNA, 25 bp, Homo sapien
tctagaccactgaaaaccctcatgc

SEQ ID NO: 1396301 - DNA, 25 bp, Homo sapien
cagaggctatatattgtgcacaaag

SEQ ID NO: 1396302 - DNA, 25 bp, Homo sapien
taaatagtttttagtggagcacagc

SEQ ID NO: 1396303 - DNA, 25 bp, Homo sapien
gttgacaacgtcctgcacaaaagtt

SEQ ID NO: 1396304 - DNA, 25 bp, Homo sapien
tctgagtataaagctctgatacaac

SEQ ID NO: 1396305 - DNA, 25 bp, Homo sapien
ttctatttctgagtataaagctctg

SEQ ID NO: 1396306 - DNA, 25 bp, Homo sapien
taaagctctgatacaacaaacactt

SEQ ID NO: 1396307 - DNA, 25 bp, Homo sapien
gctctgatacaacaaacactttatt

SEQ ID NO: 1396308 - DNA, 25 bp, Homo sapien
tgttaagggtattcaccaatttggc

SEQ ID NO: 1396309 - DNA, 25 bp, Homo sapien
ttcattgaagactcaggtccgctgg

SEQ ID NO: 1396310 - DNA, 25 bp, Homo sapien
gccacttcattgctattttcgcctg

SEQ ID NO: 1396311 - DNA, 25 bp, Homo sapien
gtaacaccaggtcgcttcacagtga

SEQ ID NO: 1396312 - DNA, 25 bp, Homo sapien
gcaggtggagaggggaaggagggag

SEQ ID NO: 1396313 - DNA, 25 bp, Homo sapien
ctgcaggtggagaggggaaggaggg

SEQ ID NO: 1396314 - DNA, 25 bp, Homo sapien
tgcaggtggagaggggaaggaggga

SEQ ID NO: 1396315 - DNA, 25 bp, Homo sapien
tgccatctcctcttccgaagcctta

SEQ ID NO: 1396316 - DNA, 25 bp, Homo sapien
ctacggtgaccaagtgataatcatc

SEQ ID NO: 1396317 - DNA, 25 bp, Homo sapien
gaccaagtgataatcatctgttctc

SEQ ID NO: 1396318 - DNA, 25 bp, Homo sapien
ggtgaccaagtgataatcatctgtt

SEQ ID NO: 1396319 - DNA, 25 bp, Homo sapien
tctggtttgactggcctggagactg

SEQ ID NO: 1396320 - DNA, 25 bp, Homo sapien
caactgtcggcttaacaaactgggt

SEQ ID NO: 1396321 - DNA, 25 bp, Homo sapien
gagactgaacagctagttgccccag

SEQ ID NO: 1396322 - DNA, 25 bp, Homo sapien
gagaacacttgtggaactccaactg

SEQ ID NO: 1396323 - DNA, 25 bp, Homo sapien
tgttgacaaaataacctgggcagcc

SEQ ID NO: 1396324 - DNA, 25 bp, Homo sapien
tggtcagacttaaacccctatgggc

SEQ ID NO: 1396325 - DNA, 25 bp, Homo sapien
cagtggcttgacctcggtactggaa

SEQ ID NO: 1396326 - DNA, 25 bp, Homo sapien
ccagatcttggtcagtgagctcacc

SEQ ID NO: 1396327 - DNA, 25 bp, Homo sapien
gcattttgtacaggccggacattcc

SEQ ID NO: 1396328 - DNA, 25 bp, Homo sapien
ggccttgctgtacgttcagcacaat

SEQ ID NO: 1396329 - DNA, 25 bp, Homo sapien
ctggaactagtgtaattggtctaac

SEQ ID NO: 1396330 - DNA, 25 bp, Homo sapien
acaggccggacattccttacaggaa

SEQ ID NO: 1396331 - DNA, 25 bp, Homo sapien
taaatattggttgtgaggccacagg

SEQ ID NO: 1396332 - DNA, 25 bp, Homo sapien
tggcattctgcatgacctgaacagg

SEQ ID NO: 1396333 - DNA, 25 bp, Homo sapien
tgagtaaccattgtgcccagacctg

SEQ ID NO: 1396334 - DNA, 25 bp, Homo sapien
cctgaacaggcctcaatactggttg

SEQ ID NO: 1396335 - DNA, 25 bp, Homo sapien
cacacagaatctaaggaatggtttc

SEQ ID NO: 1396336 - DNA, 25 bp, Homo sapien
tatgtggctagcaccctgactctca

SEQ ID NO: 1396337 - DNA, 25 bp, Homo sapien
gactctcatgatttaagtgaccaca

SEQ ID NO: 1396338 - DNA, 25 bp, Homo sapien
gagactgacaggctacctaccgtag

SEQ ID NO: 1396339 - DNA, 25 bp, Homo sapien
tatgggaaatcagtcagcattagca

SEQ ID NO: 1396340 - DNA, 25 bp, Homo sapien
tgcaaagtgcaactgatgaactaac

SEQ ID NO: 1396341 - DNA, 25 bp, Homo sapien
gataattactagctcaacatcccaa

SEQ ID NO: 1396342 - DNA, 25 bp, Homo sapien
tattttctcttatatcagggtcaag

SEQ ID NO: 1396343 - DNA, 25 bp, Homo sapien
atgggcagcgatgggcactggagcc

SEQ ID NO: 1396344 - DNA, 25 bp, Homo sapien
gcaattagtgtgacaagagtcttct

SEQ ID NO: 1396345 - DNA, 25 bp, Homo sapien
gtactgtcgctgttctgtgccccgc

SEQ ID NO: 1396346 - DNA, 25 bp, Homo sapien
cccgctgctactaacggtggtggat

SEQ ID NO: 1396347 - DNA, 25 bp, Homo sapien
tacagagtcctcaatgacatcactg

SEQ ID NO: 1396348 - DNA, 25 bp, Homo sapien
cactgaattataatcttcaactaca

SEQ ID NO: 1396349 - DNA, 25 bp, Homo sapien
ttccatgaacaggtcggtgtccgcc

SEQ ID NO: 1396350 - DNA, 25 bp, Homo sapien
tgtggtagttttatccactgaatta

SEQ ID NO: 1396351 - DNA, 25 bp, Homo sapien
ggactcctttatcatatcctctagc

SEQ ID NO: 1396352 - DNA, 25 bp, Homo sapien
ataattagggttacaggccgggcat

SEQ ID NO: 1396353 - DNA, 25 bp, Homo sapien
cctccatttccaagggttcagaatt

SEQ ID NO: 1396354 - DNA, 25 bp, Homo sapien
gaatattagaatccattccacagca

SEQ ID NO: 1396355 - DNA, 25 bp, Homo sapien
aaaattaaagtctgagccgggtgca

SEQ ID NO: 1396356 - DNA, 25 bp, Homo sapien
ggaacgggagtactattactgctca

SEQ ID NO: 1396357 - DNA, 25 bp, Homo sapien
tagttagggctatacatcctgacag

SEQ ID NO: 1396358 - DNA, 25 bp, Homo sapien
gagttaatgctattctgccctccaa

SEQ ID NO: 1396359 - DNA, 25 bp, Homo sapien
taatagcatacccaaaagggtgttc

SEQ ID NO: 1396360 - DNA, 25 bp, Homo sapien
ttacagtaactgcagtggtgccact

SEQ ID NO: 1396361 - DNA, 25 bp, Homo sapien
caatgtcatgcctgtggttatttta

SEQ ID NO: 1396362 - DNA, 25 bp, Homo sapien
gctcgaggttacagtaactgcagtg

SEQ ID NO: 1396363 - DNA, 25 bp, Homo sapien
tttcagcatctataactcagggtct

SEQ ID NO: 1396364 - DNA, 25 bp, Homo sapien
actgtccttgattttgacctacact

SEQ ID NO: 1396365 - DNA, 25 bp, Homo sapien
gatacaacagagatatatcaaccta

SEQ ID NO: 1396366 - DNA, 25 bp, Homo sapien
ctctgctatctcaggatgtgatcaa

SEQ ID NO: 1396367 - DNA, 25 bp, Homo sapien
caggcaaattttcatacgagtctct

SEQ ID NO: 1396368 - DNA, 25 bp, Homo sapien
tatttaaagccagcccatagtgaat

SEQ ID NO: 1396369 - DNA, 25 bp, Homo sapien
ttagccccgatcatgggcaagggca

SEQ ID NO: 1396370 - DNA, 25 bp, Homo sapien
tgctacatcaagaggaaaacggccg

SEQ ID NO: 1396371 - DNA, 25 bp, Homo sapien
tctgacacaaccctagcatcgtttg

SEQ ID NO: 1396372 - DNA, 25 bp, Homo sapien
aactttgctcttacgtcatctgaca

SEQ ID NO: 1396373 - DNA, 25 bp, Homo sapien
caatgtgccctattttggccagtgg

SEQ ID NO: 1396374 - DNA, 25 bp, Homo sapien
tgggaacgtcttcagttggctgctg

SEQ ID NO: 1396375 - DNA, 25 bp, Homo sapien
atgcagcttgcagactgcaccactg

SEQ ID NO: 1396376 - DNA, 25 bp, Homo sapien
gagatgcagcttgcagactgcacca

SEQ ID NO: 1396377 - DNA, 25 bp, Homo sapien
ctgggagatgcagcttgcagactgc

SEQ ID NO: 1396378 - DNA, 25 bp, Homo sapien
gggagatgcagcttgcagactgcac

SEQ ID NO: 1396379 - DNA, 25 bp, Homo sapien
ctgtttcagtctcccaagtagctgg

SEQ ID NO: 1396380 - DNA, 25 bp, Homo sapien
ctaccgggtacaagtaattctcctg

SEQ ID NO: 1396381 - DNA, 25 bp, Homo sapien
gctgcagcgcagaggcacgatctcg

SEQ ID NO: 1396382 - DNA, 25 bp, Homo sapien
gtacaagtaattctcctgtttcagt

SEQ ID NO: 1396383 - DNA, 25 bp, Homo sapien
gaccatgaccagagatgtggtgaaa

SEQ ID NO: 1396384 - DNA, 25 bp, Homo sapien
ctggccatgaccatgaccagagatg

SEQ ID NO: 1396385 - DNA, 25 bp, Homo sapien
ccagcctggccatgaccatgaccag

SEQ ID NO: 1396386 - DNA, 25 bp, Homo sapien
atgaccagagatgtggtgaaacccc

SEQ ID NO: 1396387 - DNA, 25 bp, Homo sapien
taaatgtaactttgcgtttacaaga

SEQ ID NO: 1396388 - DNA, 25 bp, Homo sapien
tgggacattctagaaggaaataatc

SEQ ID NO: 1396389 - DNA, 25 bp, Homo sapien
taatcaaatgcagaatatggaacat

SEQ ID NO: 1396390 - DNA, 25 bp, Homo sapien
aatgtcaatgttcggctggacgcgg

SEQ ID NO: 1396391 - DNA, 25 bp, Homo sapien
tagatactagtatgccaactttcaa

SEQ ID NO: 1396392 - DNA, 25 bp, Homo sapien
caggtgggctattttgatattttct

SEQ ID NO: 1396393 - DNA, 25 bp, Homo sapien
tcttatagatactagtatgccaact

SEQ ID NO: 1396394 - DNA, 25 bp, Homo sapien
caagtagttgtcactacaggtgggc

SEQ ID NO: 1396395 - DNA, 25 bp, Homo sapien
taggagggagtggaactacctactc

SEQ ID NO: 1396396 - DNA, 25 bp, Homo sapien
taggctaccaaggaggtacattact

SEQ ID NO: 1396397 - DNA, 25 bp, Homo sapien
taaatgctggcgaatatggtagtct

SEQ ID NO: 1396398 - DNA, 25 bp, Homo sapien
ggccctatatgatcagctagtcaat

SEQ ID NO: 1396399 - DNA, 25 bp, Homo sapien
aaaaagacaagtttttgtgaatatg

SEQ ID NO: 1396400 - DNA, 25 bp, Homo sapien
ttttgtgaatatggcttaatatcac

SEQ ID NO: 1396401 - DNA, 25 bp, Homo sapien
gcctagatttactgagttatgccca

SEQ ID NO: 1396402 - DNA, 25 bp, Homo sapien
ccacgctaggccaaatagtagtttc

SEQ ID NO: 1396403 - DNA, 25 bp, Homo sapien
gtgaaaaaccatagtctgctagtcg

SEQ ID NO: 1396404 - DNA, 25 bp, Homo sapien
taagtactaggaagctgtcaaactc

SEQ ID NO: 1396405 - DNA, 25 bp, Homo sapien
tatgcaccccgaagttgagaacgat

SEQ ID NO: 1396406 - DNA, 25 bp, Homo sapien
gaaatcaacggcacaaggtgtcact

SEQ ID NO: 1396407 - DNA, 25 bp, Homo sapien
taaatcaggttcgtcccaagagtcc

SEQ ID NO: 1396408 - DNA, 25 bp, Homo sapien
ggtaagaggagatccccatgggtca

SEQ ID NO: 1396409 - DNA, 25 bp, Homo sapien
aaggacgggctacaccgcttgcatc

SEQ ID NO: 1396410 - DNA, 25 bp, Homo sapien
gcttgcatcaagacggcggctgctg

SEQ ID NO: 1396411 - DNA, 25 bp, Homo sapien
tctgtggagttttgagcggcggtaa

SEQ ID NO: 1396412 - DNA, 25 bp, Homo sapien
tgtctacgggcttggaaggacgggc

SEQ ID NO: 1396413 - DNA, 25 bp, Homo sapien
agtgctactagcagtttgagagaat

SEQ ID NO: 1396414 - DNA, 25 bp, Homo sapien
tctgaactaagaatgtctaagacaa

SEQ ID NO: 1396415 - DNA, 25 bp, Homo sapien
catttcgaaaatgagactggccact

SEQ ID NO: 1396416 - DNA, 25 bp, Homo sapien
gactctaaggactcatcagcactac

SEQ ID NO: 1396417 - DNA, 25 bp, Homo sapien
gaggagacttcgtaaactagctgca

SEQ ID NO: 1396418 - DNA, 25 bp, Homo sapien
cattttataaatcacggcgccatcc

SEQ ID NO: 1396419 - DNA, 25 bp, Homo sapien
tagctgcagtgcactaaggcttagg

SEQ ID NO: 1396420 - DNA, 25 bp, Homo sapien
tacataacacaagggatcggctcag

SEQ ID NO: 1396421 - DNA, 25 bp, Homo sapien
ctcctgtggtcgtcgccgccggtag

SEQ ID NO: 1396422 - DNA, 25 bp, Homo sapien
tcctgtggtcgtcgccgccggtagt

SEQ ID NO: 1396423 - DNA, 25 bp, Homo sapien
gggccaaggaatgcggctccgtgta

SEQ ID NO: 1396424 - DNA, 25 bp, Homo sapien
gaatgcggctccgtgtacgggagct

SEQ ID NO: 1396425 - DNA, 25 bp, Homo sapien
gagacgaagaagaggtaaccgttga

SEQ ID NO: 1396426 - DNA, 25 bp, Homo sapien
accgttgaaagctcgtctccccaag

SEQ ID NO: 1396427 - DNA, 25 bp, Homo sapien
tgagaaggtggatttatgaccctct

SEQ ID NO: 1396428 - DNA, 25 bp, Homo sapien
tgtctctgacatagacaactctgcc

SEQ ID NO: 1396429 - DNA, 25 bp, Homo sapien
gagaaggtggatttatgaccctctg

SEQ ID NO: 1396430 - DNA, 25 bp, Homo sapien
tgacatagacaactctgccaggtgc

SEQ ID NO: 1396431 - DNA, 25 bp, Homo sapien
ccatgtagcctgtgactctcaccat

SEQ ID NO: 1396432 - DNA, 25 bp, Homo sapien
acctccatgtagcctgtgactctca

SEQ ID NO: 1396433 - DNA, 25 bp, Homo sapien
cctccatgtagcctgtgactctcac

SEQ ID NO: 1396434 - DNA, 25 bp, Homo sapien
tccatgtagcctgtgactctcacca

SEQ ID NO: 1396435 - DNA, 25 bp, Homo sapien
ccctggccggcgattcccttggagt

SEQ ID NO: 1396436 - DNA, 25 bp, Homo sapien
tgcggaggccacaagataaaagaga

SEQ ID NO: 1396437 - DNA, 25 bp, Homo sapien
gaaagtgacgaaagagcattctggt

SEQ ID NO: 1396438 - DNA, 25 bp, Homo sapien
ggacaacggagatattttctgcaga

SEQ ID NO: 1396439 - DNA, 25 bp, Homo sapien
gaaaccagatgcatatggctgggcc

SEQ ID NO: 1396440 - DNA, 25 bp, Homo sapien
tggtacaggtgtagagtgttctccc

SEQ ID NO: 1396441 - DNA, 25 bp, Homo sapien
cagatgcacctgaatcaacttgtgg

SEQ ID NO: 1396442 - DNA, 25 bp, Homo sapien
gataccctgtcactcctagttggaa

SEQ ID NO: 1396443 - DNA, 25 bp, Homo sapien
acctgttctgtcaaagtctctccag

SEQ ID NO: 1396444 - DNA, 25 bp, Homo sapien
cacacgaaagacaagtggcagctgc

SEQ ID NO: 1396445 - DNA, 25 bp, Homo sapien
tgacctgttctgtcaaagtctctcc

SEQ ID NO: 1396446 - DNA, 25 bp, Homo sapien
acacgaaagacaagtggcagctgca

SEQ ID NO: 1396447 - DNA, 25 bp, Homo sapien
tattatattaacaaagttgtacaac

SEQ ID NO: 1396448 - DNA, 25 bp, Homo sapien
ctggcgcctggcccccagtggtttt

SEQ ID NO: 1396449 - DNA, 25 bp, Homo sapien
gccactggcgcctggcccccagtgg

SEQ ID NO: 1396450 - DNA, 25 bp, Homo sapien
tttattatattaacaaagttgtaca

SEQ ID NO: 1396451 - DNA, 25 bp, Homo sapien
gttctgcattcctatgggtgaccca

SEQ ID NO: 1396452 - DNA, 25 bp, Homo sapien
tggacatttcaagccaactgagcct

SEQ ID NO: 1396453 - DNA, 25 bp, Homo sapien
tgttagctcgtggtcctcaaggact

SEQ ID NO: 1396454 - DNA, 25 bp, Homo sapien
ttattcagacctaagacagggaggg

SEQ ID NO: 1396455 - DNA, 25 bp, Homo sapien
gatatggttataaggtggttgcacc

SEQ ID NO: 1396456 - DNA, 25 bp, Homo sapien
tgggagccctgacaactggctgcac

SEQ ID NO: 1396457 - DNA, 25 bp, Homo sapien
tgtgcccaacttcaataagagaacc

SEQ ID NO: 1396458 - DNA, 25 bp, Homo sapien
gagaaccaagccctggtagggaaga

SEQ ID NO: 1396459 - DNA, 25 bp, Homo sapien
agttgcggaaataggtatgtgccag

SEQ ID NO: 1396460 - DNA, 25 bp, Homo sapien
cagttgcggaaataggtatgtgcca

SEQ ID NO: 1396461 - DNA, 25 bp, Homo sapien
ttgcggaaataggtatgtgccagga

SEQ ID NO: 1396462 - DNA, 25 bp, Homo sapien
tcagttgcggaaataggtatgtgcc

SEQ ID NO: 1396463 - DNA, 25 bp, Homo sapien
cttgtgattagtactgctccttttt

SEQ ID NO: 1396464 - DNA, 25 bp, Homo sapien
cataacaatgctctgggatttcagg

SEQ ID NO: 1396465 - DNA, 25 bp, Homo sapien
ttaggctctatgtggctcacgcagc

SEQ ID NO: 1396466 - DNA, 25 bp, Homo sapien
tagataggcatcagagtatggtact

SEQ ID NO: 1396467 - DNA, 25 bp, Homo sapien
tagggctcttcctacaaccttgaga

SEQ ID NO: 1396468 - DNA, 25 bp, Homo sapien
tcccatattttgtgagatctcatct

SEQ ID NO: 1396469 - DNA, 25 bp, Homo sapien
aattataatgactttgagtcctcat

SEQ ID NO: 1396470 - DNA, 25 bp, Homo sapien
tgtgtaactagtcaagatccttctt

SEQ ID NO: 1396471 - DNA, 25 bp, Homo sapien
ttagcttggttgtaaaataaggtca

SEQ ID NO: 1396472 - DNA, 25 bp, Homo sapien
gtgcttcttgggcaatccagtaaga

SEQ ID NO: 1396473 - DNA, 25 bp, Homo sapien
ttccacctcagctatacagatgttt

SEQ ID NO: 1396474 - DNA, 25 bp, Homo sapien
aatccagtaagagcccatggatggg

SEQ ID NO: 1396475 - DNA, 25 bp, Homo sapien
tggatgggttggtacagttcagccc

SEQ ID NO: 1396476 - DNA, 25 bp, Homo sapien
tccacttttaggcagcattggctca

SEQ ID NO: 1396477 - DNA, 25 bp, Homo sapien
catgattgctttctagtttgttaaa

SEQ ID NO: 1396478 - DNA, 25 bp, Homo sapien
tctcattgccaaccccctagatttt

SEQ ID NO: 1396479 - DNA, 25 bp, Homo sapien
ttggtgttgtagctgagatctcatt

SEQ ID NO: 1396480 - DNA, 25 bp, Homo sapien
tagtgaacagcagatcggtcagcac

SEQ ID NO: 1396481 - DNA, 25 bp, Homo sapien
tgtgaaacaggaagactgaaccacg

SEQ ID NO: 1396482 - DNA, 25 bp, Homo sapien
gcagagagatgtggccacctagcct

SEQ ID NO: 1396483 - DNA, 25 bp, Homo sapien
caccagaagtcaactgagttaaggc

SEQ ID NO: 1396484 - DNA, 25 bp, Homo sapien
taagctgataccttaggcacacagg

SEQ ID NO: 1396485 - DNA, 25 bp, Homo sapien
ggcacacaggttggacttacataga

SEQ ID NO: 1396486 - DNA, 25 bp, Homo sapien
tgcagcagggatagtactcaggacc

SEQ ID NO: 1396487 - DNA, 25 bp, Homo sapien
cagcagtgatgggaagggatccaat

SEQ ID NO: 1396488 - DNA, 25 bp, Homo sapien
ctgggattccatgcgacagcttgaa

SEQ ID NO: 1396489 - DNA, 25 bp, Homo sapien
catttgcccctgcatggtatgggat

SEQ ID NO: 1396490 - DNA, 25 bp, Homo sapien
gatttcccactcctagatgctaaag

SEQ ID NO: 1396491 - DNA, 25 bp, Homo sapien
tgagacatagggatttggaggcccc

SEQ ID NO: 1396492 - DNA, 25 bp, Homo sapien
cacttggagcagcaaaatagggcac

SEQ ID NO: 1396493 - DNA, 25 bp, Homo sapien
gcctggcccatttagtttcatcctt

SEQ ID NO: 1396494 - DNA, 25 bp, Homo sapien
caggccagtagctttgggttatccc

SEQ ID NO: 1396495 - DNA, 25 bp, Homo sapien
gctgggctcctaggaggtagttttc

SEQ ID NO: 1396496 - DNA, 25 bp, Homo sapien
gttgaccccagcatactgctgtttc

SEQ ID NO: 1396497 - DNA, 25 bp, Homo sapien
ttgaccccagcatactgctgtttct

SEQ ID NO: 1396498 - DNA, 25 bp, Homo sapien
tgctcccacactcctgagaagaagg

SEQ ID NO: 1396499 - DNA, 25 bp, Homo sapien
tgcagatagagcctggcagagcctt

SEQ ID NO: 1396500 - DNA, 25 bp, Homo sapien
ggatctggactgaaaggaacacatt

SEQ ID NO: 1396501 - DNA, 25 bp, Homo sapien
cacttggccgcctgctaaacttgga

SEQ ID NO: 1396502 - DNA, 25 bp, Homo sapien
gagatactgcaacagacacaaaagc

SEQ ID NO: 1396503 - DNA, 25 bp, Homo sapien
gaaagttttagcattggccctatga

SEQ ID NO: 1396504 - DNA, 25 bp, Homo sapien
cagatgagagcaatgtgacgtggac

SEQ ID NO: 1396505 - DNA, 25 bp, Homo sapien
cactgtttagggtgaccaggataca

SEQ ID NO: 1396506 - DNA, 25 bp, Homo sapien
gaagtccagtatagatgtccaacag

SEQ ID NO: 1396507 - DNA, 25 bp, Homo sapien
taccctcaaccttccaagactctta

SEQ ID NO: 1396508 - DNA, 25 bp, Homo sapien
gttaagcatagagaactgtctgaaa

SEQ ID NO: 1396509 - DNA, 25 bp, Homo sapien
taagttaagcatagagaactgtctg

SEQ ID NO: 1396510 - DNA, 25 bp, Homo sapien
aaataagttaagcatagagaactgt

SEQ ID NO: 1396511 - DNA, 25 bp, Homo sapien
aagttaagcatagagaactgtctga

SEQ ID NO: 1396512 - DNA, 25 bp, Homo sapien
cccagaaagagagatggcagcgtcc

SEQ ID NO: 1396513 - DNA, 25 bp, Homo sapien
gagggaaccagcagagactgtaaac

SEQ ID NO: 1396514 - DNA, 25 bp, Homo sapien
tgatcaggtaataaaccccttgacc

SEQ ID NO: 1396515 - DNA, 25 bp, Homo sapien
cacgggtggtagtggtatttacaca

SEQ ID NO: 1396516 - DNA, 25 bp, Homo sapien
agtgagttttaaggctgggagccca

SEQ ID NO: 1396517 - DNA, 25 bp, Homo sapien
tacaaacgctgggtacagaaggcct

SEQ ID NO: 1396518 - DNA, 25 bp, Homo sapien
agggatatcctacctctagctgagg

SEQ ID NO: 1396519 - DNA, 25 bp, Homo sapien
cttggagccagggaagcatagccat

SEQ ID NO: 1396520 - DNA, 25 bp, Homo sapien
gaagcagcgtttgccccagaaccca

SEQ ID NO: 1396521 - DNA, 25 bp, Homo sapien
agcgtttgccccagaacccagtcaa

SEQ ID NO: 1396522 - DNA, 25 bp, Homo sapien
gggccacgaagcagcgtttgcccca

SEQ ID NO: 1396523 - DNA, 25 bp, Homo sapien
gtttgccccagaacccagtcaaggc

SEQ ID NO: 1396524 - DNA, 25 bp, Homo sapien
tgcgaaagtaaccaaggctcacagc

SEQ ID NO: 1396525 - DNA, 25 bp, Homo sapien
tggaggagacctaagtaaacttcac

SEQ ID NO: 1396526 - DNA, 25 bp, Homo sapien
ttcggccgacaatggacacgggccc

SEQ ID NO: 1396527 - DNA, 25 bp, Homo sapien
tccaaaggagattaaacagtgcgaa

SEQ ID NO: 1396528 - DNA, 25 bp, Homo sapien
gtgtagtccaatcgagggccctggc

SEQ ID NO: 1396529 - DNA, 25 bp, Homo sapien
gacaacagagattctaggagccaag

SEQ ID NO: 1396530 - DNA, 25 bp, Homo sapien
gaaaccagggctgatgtcctcactt

SEQ ID NO: 1396531 - DNA, 25 bp, Homo sapien
gctgctacatgggaaaaatcacctg

SEQ ID NO: 1396532 - DNA, 25 bp, Homo sapien
tgggcactggccggattgtcgaaac

SEQ ID NO: 1396533 - DNA, 25 bp, Homo sapien
cctgggcactggccggattgtcgaa

SEQ ID NO: 1396534 - DNA, 25 bp, Homo sapien
ctgggcactggccggattgtcgaaa

SEQ ID NO: 1396535 - DNA, 25 bp, Homo sapien
caaaacatttgctttgattggtggc

SEQ ID NO: 1396536 - DNA, 25 bp, Homo sapien
tggctcggtcaacaaagactttggc

SEQ ID NO: 1396537 - DNA, 25 bp, Homo sapien
atctctgagtcagtgaactcctggg

SEQ ID NO: 1396538 - DNA, 25 bp, Homo sapien
tttggctgagatgacgtggccaaag

SEQ ID NO: 1396539 - DNA, 25 bp, Homo sapien
ctgggtggcgacagagacagaagaa

SEQ ID NO: 1396540 - DNA, 25 bp, Homo sapien
cgacagagacagaagaaagagctca

SEQ ID NO: 1396541 - DNA, 25 bp, Homo sapien
agagacagaagaaagagctcagtga

SEQ ID NO: 1396542 - DNA, 25 bp, Homo sapien
gacagagacagaagaaagagctcag

SEQ ID NO: 1396543 - DNA, 25 bp, Homo sapien
cttgctttcatcctgacacgtgggc

SEQ ID NO: 1396544 - DNA, 25 bp, Homo sapien
gaaagcagatcctgggagtgccctc

SEQ ID NO: 1396545 - DNA, 25 bp, Homo sapien
gtgacagggagtccccaagcccata

SEQ ID NO: 1396546 - DNA, 25 bp, Homo sapien
aagcccataacgagggcattcctgt

SEQ ID NO: 1396547 - DNA, 25 bp, Homo sapien
gtggtggtgggggctgctgggcgac

SEQ ID NO: 1396548 - DNA, 25 bp, Homo sapien
tgaggtggtggtgggggctgctggg

SEQ ID NO: 1396549 - DNA, 25 bp, Homo sapien
ctgctgttgaggtggtggtgggggc

SEQ ID NO: 1396550 - DNA, 25 bp, Homo sapien
aggtggtggtgggggctgctgggcg

SEQ ID NO: 1396551 - DNA, 25 bp, Homo sapien
gaggctgcgggaacgcaggtgcaac

SEQ ID NO: 1396552 - DNA, 25 bp, Homo sapien
ctgcgggaacgcaggtgcaaccagg

SEQ ID NO: 1396553 - DNA, 25 bp, Homo sapien
gctgcgggaacgcaggtgcaaccag

SEQ ID NO: 1396554 - DNA, 25 bp, Homo sapien
tggaggctgcgggaacgcaggtgca

SEQ ID NO: 1396555 - DNA, 25 bp, Homo sapien
tgtagtgctgcatccccgcgtaggc

SEQ ID NO: 1396556 - DNA, 25 bp, Homo sapien
agagcagcacagactatgagcgtgg

SEQ ID NO: 1396557 - DNA, 25 bp, Homo sapien
cagactatgagcgtggacctggcac

SEQ ID NO: 1396558 - DNA, 25 bp, Homo sapien
actatgagcgtggacctggcacaca

SEQ ID NO: 1396559 - DNA, 25 bp, Homo sapien
gcacagactatgagcgtggacctgg

SEQ ID NO: 1396560 - DNA, 25 bp, Homo sapien
ctgcctccctaatgggagtggtggt

SEQ ID NO: 1396561 - DNA, 25 bp, Homo sapien
tagatggttgctgggacggagtggg

SEQ ID NO: 1396562 - DNA, 25 bp, Homo sapien
gtttagatggttgctgggacggagt

SEQ ID NO: 1396563 - DNA, 25 bp, Homo sapien
tgtgtcctgcctccctaatgggagt

SEQ ID NO: 1396564 - DNA, 25 bp, Homo sapien
ccccgttgggatacagagcatcagg

SEQ ID NO: 1396565 - DNA, 25 bp, Homo sapien
gctgtagccgttgacgcccagggca

SEQ ID NO: 1396566 - DNA, 25 bp, Homo sapien
cagggcagccggaatggcagagaca

SEQ ID NO: 1396567 - DNA, 25 bp, Homo sapien
agagacaggcgtggcagcgatggca

SEQ ID NO: 1396568 - DNA, 25 bp, Homo sapien
taccatgcttagctcccttgcccgg

SEQ ID NO: 1396569 - DNA, 25 bp, Homo sapien
tgcttagctcccttgcccggccttg

SEQ ID NO: 1396570 - DNA, 25 bp, Homo sapien
ggggaggagaaagcgacagggagag

SEQ ID NO: 1396571 - DNA, 25 bp, Homo sapien
tccctacccctaccatgcttagctc

SEQ ID NO: 1396572 - DNA, 25 bp, Homo sapien
gtgatgggggtggcgatgaggccat

SEQ ID NO: 1396573 - DNA, 25 bp, Homo sapien
tgggggtggcgatgaggccattggc

SEQ ID NO: 1396574 - DNA, 25 bp, Homo sapien
ggggtggcgatgaggccattggcat

SEQ ID NO: 1396575 - DNA, 25 bp, Homo sapien
gatgggggtggcgatgaggccattg

SEQ ID NO: 1396576 - DNA, 25 bp, Homo sapien
ggctgaggtaggcactgtgagccgc

SEQ ID NO: 1396577 - DNA, 25 bp, Homo sapien
aggtaggcactgtgagccgctacca

SEQ ID NO: 1396578 - DNA, 25 bp, Homo sapien
taggcactgtgagccgctaccaggg

SEQ ID NO: 1396579 - DNA, 25 bp, Homo sapien
tgaggtaggcactgtgagccgctac

SEQ ID NO: 1396580 - DNA, 25 bp, Homo sapien
tgtaggctccaaactggagggcgat

SEQ ID NO: 1396581 - DNA, 25 bp, Homo sapien
ggtgtaggcgctgtaggctccaaac

SEQ ID NO: 1396582 - DNA, 25 bp, Homo sapien
atgcggcggagacctcgctccttct

SEQ ID NO: 1396583 - DNA, 25 bp, Homo sapien
aacatgcccaactgggtggccacct

SEQ ID NO: 1396584 - DNA, 25 bp, Homo sapien
ctgtgaagggtgttgatggccgcct

SEQ ID NO: 1396585 - DNA, 25 bp, Homo sapien
tgaagggtgttgatggccgcctggg

SEQ ID NO: 1396586 - DNA, 25 bp, Homo sapien
aagggtgttgatggccgcctgggcc

SEQ ID NO: 1396587 - DNA, 25 bp, Homo sapien
ctgctgtgaagggtgttgatggccg

SEQ ID NO: 1396588 - DNA, 25 bp, Homo sapien
ggctcaaacatcttccggacgtcct

SEQ ID NO: 1396589 - DNA, 25 bp, Homo sapien
acagtgcactcgtcgatggtcccga

SEQ ID NO: 1396590 - DNA, 25 bp, Homo sapien
gatggtcccgaagggctcaaacatc

SEQ ID NO: 1396591 - DNA, 25 bp, Homo sapien
cggagcacagtgcactcgtcgatgg

SEQ ID NO: 1396592 - DNA, 25 bp, Homo sapien
gctacccttagggtccaatggctgt

SEQ ID NO: 1396593 - DNA, 25 bp, Homo sapien
acttctgctacccttagggtccaat

SEQ ID NO: 1396594 - DNA, 25 bp, Homo sapien
ttccctggagctcctaacactactt

SEQ ID NO: 1396595 - DNA, 25 bp, Homo sapien
acccttagggtccaatggctgtagg

SEQ ID NO: 1396596 - DNA, 25 bp, Homo sapien
tcggctggcttgacctggatcggcc

SEQ ID NO: 1396597 - DNA, 25 bp, Homo sapien
tcggctctcgctgtcggctggcttg

SEQ ID NO: 1396598 - DNA, 25 bp, Homo sapien
gctgtcggctggcttgacctggatc

SEQ ID NO: 1396599 - DNA, 25 bp, Homo sapien
tctcgctgtcggctggcttgacctg

SEQ ID NO: 1396600 - DNA, 25 bp, Homo sapien
ctgctggggacctcctctgaacacc

SEQ ID NO: 1396601 - DNA, 25 bp, Homo sapien
ggcagctgctggggacctcctctga

SEQ ID NO: 1396602 - DNA, 25 bp, Homo sapien
gcagctgctggggacctcctctgaa

SEQ ID NO: 1396603 - DNA, 25 bp, Homo sapien
agctgctggggacctcctctgaaca

SEQ ID NO: 1396604 - DNA, 25 bp, Homo sapien
gagagcccgaccaaggagttattta

SEQ ID NO: 1396605 - DNA, 25 bp, Homo sapien
ctaatactgttcaggatgaaggcct

SEQ ID NO: 1396606 - DNA, 25 bp, Homo sapien
caattctacaaagtgggcgcaacag

SEQ ID NO: 1396607 - DNA, 25 bp, Homo sapien
ggttgggctcctgatgacttggcca

SEQ ID NO: 1396608 - DNA, 25 bp, Homo sapien
cgggcagcacaaagggagcagatgc

SEQ ID NO: 1396609 - DNA, 25 bp, Homo sapien
gggagaatgcgcaccatggcaaccg

SEQ ID NO: 1396610 - DNA, 25 bp, Homo sapien
tcagcctgatttatccgtccccgtc

SEQ ID NO: 1396611 - DNA, 25 bp, Homo sapien
gagcagatgcccagtctccgtggca

SEQ ID NO: 1396612 - DNA, 25 bp, Homo sapien
tacagaccacagcaaggaccgtgct

SEQ ID NO: 1396613 - DNA, 25 bp, Homo sapien
aaagagacacacaagtgtacagacc

SEQ ID NO: 1396614 - DNA, 25 bp, Homo sapien
gagacacacaagtgtacagaccaca

SEQ ID NO: 1396615 - DNA, 25 bp, Homo sapien
ggaccgtgctgacggtaggctcccc

SEQ ID NO: 1396616 - DNA, 25 bp, Homo sapien
gcacagtatgtcaggaaggcacatc

SEQ ID NO: 1396617 - DNA, 25 bp, Homo sapien
gaagcgtcttctgttcgtgcagggc

SEQ ID NO: 1396618 - DNA, 25 bp, Homo sapien
gcgtcttctgttcgtgcagggcgct

SEQ ID NO: 1396619 - DNA, 25 bp, Homo sapien
ccctggaagcgtcttctgttcgtgc

SEQ ID NO: 1396620 - DNA, 25 bp, Homo sapien
gatcactctagctgagttctttttc

SEQ ID NO: 1396621 - DNA, 25 bp, Homo sapien
ttcctgatcactctagctgagttct

SEQ ID NO: 1396622 - DNA, 25 bp, Homo sapien
tgacaactcttcagccaaaagaggc

SEQ ID NO: 1396623 - DNA, 25 bp, Homo sapien
ccaccccgaagcctcttcagcctgc

SEQ ID NO: 1396624 - DNA, 25 bp, Homo sapien
aaagatccgaccaaactgttcgaag

SEQ ID NO: 1396625 - DNA, 25 bp, Homo sapien
gcagcccggtgtacttgtccttgat

SEQ ID NO: 1396626 - DNA, 25 bp, Homo sapien
caaactgttcgaagatgggcttcag

SEQ ID NO: 1396627 - DNA, 25 bp, Homo sapien
gatgacagtcagctcaaagatccga

SEQ ID NO: 1396628 - DNA, 25 bp, Homo sapien
agcttgatggcatccggctccttca

SEQ ID NO: 1396629 - DNA, 25 bp, Homo sapien
cagcttgatggcatccggctccttc

SEQ ID NO: 1396630 - DNA, 25 bp, Homo sapien
aggcggcccaggaggaggggccgag

SEQ ID NO: 1396631 - DNA, 25 bp, Homo sapien
aggaggggccgaggggagcagggag

SEQ ID NO: 1396632 - DNA, 25 bp, Homo sapien
cagggagaggcccaaaggccaaggg

SEQ ID NO: 1396633 - DNA, 25 bp, Homo sapien
gagcagggagaggcccaaaggccaa

SEQ ID NO: 1396634 - DNA, 25 bp, Homo sapien
gaatctctcgttggcttccctggga

SEQ ID NO: 1396635 - DNA, 25 bp, Homo sapien
tccgaagatccctgatgccagatgc

SEQ ID NO: 1396636 - DNA, 25 bp, Homo sapien
gggcggctcttcacacaaaggaggc

SEQ ID NO: 1396637 - DNA, 25 bp, Homo sapien
cttgatctctgatggcggcagggct

SEQ ID NO: 1396638 - DNA, 25 bp, Homo sapien
ggccgcgctctcctcaacaaaaacc

SEQ ID NO: 1396639 - DNA, 25 bp, Homo sapien
ctgggtcccggagctctgctctccg

SEQ ID NO: 1396640 - DNA, 25 bp, Homo sapien
caggagttgggcaaagcactaagat

SEQ ID NO: 1396641 - DNA, 25 bp, Homo sapien
aagcactaagatggagaatttatag

SEQ ID NO: 1396642 - DNA, 25 bp, Homo sapien
gagttgggcaaagcactaagatgga

SEQ ID NO: 1396643 - DNA, 25 bp, Homo sapien
cactaagatggagaatttatagagg

SEQ ID NO: 1396644 - DNA, 25 bp, Homo sapien
tgcccatgaaggtgccagtagtcac

SEQ ID NO: 1396645 - DNA, 25 bp, Homo sapien
ccaatgtatgcctgctatgagactc

SEQ ID NO: 1396646 - DNA, 25 bp, Homo sapien
caaggcaccaaagcgagtatgcagg

SEQ ID NO: 1396647 - DNA, 25 bp, Homo sapien
tgctccaagagtgaagtggtaccct

SEQ ID NO: 1396648 - DNA, 25 bp, Homo sapien
taatgtatgtattgctgaagtgagc

SEQ ID NO: 1396649 - DNA, 25 bp, Homo sapien
gcatgttatccttacacaaaggcca

SEQ ID NO: 1396650 - DNA, 25 bp, Homo sapien
atttgcatgttatccttacacaaag

SEQ ID NO: 1396651 - DNA, 25 bp, Homo sapien
ttaatgtatgtattgctgaagtgag

SEQ ID NO: 1396652 - DNA, 25 bp, Homo sapien
atcactatgttttgtctcttgacaa

SEQ ID NO: 1396653 - DNA, 25 bp, Homo sapien
tccgttgttcagactgagtagtttc

SEQ ID NO: 1396654 - DNA, 25 bp, Homo sapien
agtgacaggaatgttagatctcttg

SEQ ID NO: 1396655 - DNA, 25 bp, Homo sapien
agatctcttgttaccatctctcagg

SEQ ID NO: 1396656 - DNA, 25 bp, Homo sapien
gatttcccactgtacctctgttgac

SEQ ID NO: 1396657 - DNA, 25 bp, Homo sapien
tgttgacactcaagcgggacaggtc

SEQ ID NO: 1396658 - DNA, 25 bp, Homo sapien
tttgtctgtcactgcattggcatga

SEQ ID NO: 1396659 - DNA, 25 bp, Homo sapien
cgggacaggtctcctccttactgct

SEQ ID NO: 1396660 - DNA, 25 bp, Homo sapien
tcaaggaaatctcagttggatgtcc

SEQ ID NO: 1396661 - DNA, 25 bp, Homo sapien
ctgtctcatctactcaagaccagta

SEQ ID NO: 1396662 - DNA, 25 bp, Homo sapien
aatctcagttggatgtcctgtctca

SEQ ID NO: 1396663 - DNA, 25 bp, Homo sapien
cagttggatgtcctgtctcatctac

SEQ ID NO: 1396664 - DNA, 25 bp, Homo sapien
tcaacatgtatacgcagtgcagtct

SEQ ID NO: 1396665 - DNA, 25 bp, Homo sapien
tgaggcaagtactggagacaatggc

SEQ ID NO: 1396666 - DNA, 25 bp, Homo sapien
tacttctggaacaggacttccctgc

SEQ ID NO: 1396667 - DNA, 25 bp, Homo sapien
tggtttcggtctactgcatctagct

SEQ ID NO: 1396668 - DNA, 25 bp, Homo sapien
taaccagtacttatatcttttggtc

SEQ ID NO: 1396669 - DNA, 25 bp, Homo sapien
ccatagccttggcagcttgctgggc

SEQ ID NO: 1396670 - DNA, 25 bp, Homo sapien
caaagttcacgacagacataggcac

SEQ ID NO: 1396671 - DNA, 25 bp, Homo sapien
gtacttatatcttttggtcttgggc

SEQ ID NO: 1396672 - DNA, 25 bp, Homo sapien
tcgccccaccgtgtgataggctctt

SEQ ID NO: 1396673 - DNA, 25 bp, Homo sapien
tgtgataggctcttctggtaacttt

SEQ ID NO: 1396674 - DNA, 25 bp, Homo sapien
ttctggtaactttaatgtatgtggg

SEQ ID NO: 1396675 - DNA, 25 bp, Homo sapien
caatactcgccccaccgtgtgatag

SEQ ID NO: 1396676 - DNA, 25 bp, Homo sapien
ctcagaaagggaggtagattcacaa

SEQ ID NO: 1396677 - DNA, 25 bp, Homo sapien
cagtgagtcacaaatccccagcatt

SEQ ID NO: 1396678 - DNA, 25 bp, Homo sapien
tcatagacggtagtagagaaattca

SEQ ID NO: 1396679 - DNA, 25 bp, Homo sapien
gaagggcatacaccttcatagacgg

SEQ ID NO: 1396680 - DNA, 25 bp, Homo sapien
aaagggatcaatcccaggcctcctt

SEQ ID NO: 1396681 - DNA, 25 bp, Homo sapien
cttcctaacaaagggatcaatccca

SEQ ID NO: 1396682 - DNA, 25 bp, Homo sapien
tagagtggtttttgggaacactcac

SEQ ID NO: 1396683 - DNA, 25 bp, Homo sapien
cacctcaggggtagagtggtttttg

SEQ ID NO: 1396684 - DNA, 25 bp, Homo sapien
ttcttaaagaagtggcgggcaacta

SEQ ID NO: 1396685 - DNA, 25 bp, Homo sapien
tccaggcgacagctttttagaaatt

SEQ ID NO: 1396686 - DNA, 25 bp, Homo sapien
cttaaagaagtggcgggcaactatt

SEQ ID NO: 1396687 - DNA, 25 bp, Homo sapien
aaagaagtggcgggcaactatttca

SEQ ID NO: 1396688 - DNA, 25 bp, Homo sapien
ttgtggggcagccacaacacttccc

SEQ ID NO: 1396689 - DNA, 25 bp, Homo sapien
gggcagccacaacacttcccctttc

SEQ ID NO: 1396690 - DNA, 25 bp, Homo sapien
gcagccacaacacttcccctttctc

SEQ ID NO: 1396691 - DNA, 25 bp, Homo sapien
gtggggcagccacaacacttcccct

SEQ ID NO: 1396692 - DNA, 25 bp, Homo sapien
tctggatcttctctaattttccttc

SEQ ID NO: 1396693 - DNA, 25 bp, Homo sapien
ttggtctggatcttctctaattttc

SEQ ID NO: 1396694 - DNA, 25 bp, Homo sapien
tgccttggtctggatcttctctaat

SEQ ID NO: 1396695 - DNA, 25 bp, Homo sapien
ctgccttggtctggatcttctctaa

SEQ ID NO: 1396696 - DNA, 25 bp, Homo sapien
tatctccccaagtctctctgtcctt

SEQ ID NO: 1396697 - DNA, 25 bp, Homo sapien
gaggaaggagtcgattccggcctaa

SEQ ID NO: 1396698 - DNA, 25 bp, Homo sapien
ccctgaggaaggagtcgattccggc

SEQ ID NO: 1396699 - DNA, 25 bp, Homo sapien
tcactgagaccaggtcaccccggac

SEQ ID NO: 1396700 - DNA, 25 bp, Homo sapien
aaggagtcgattccggcctaaagat

SEQ ID NO: 1396701 - DNA, 25 bp, Homo sapien
atagagggagttgtcgtcccatgga

SEQ ID NO: 1396702 - DNA, 25 bp, Homo sapien
taaatttaatatcccctgtatagag

SEQ ID NO: 1396703 - DNA, 25 bp, Homo sapien
cagtatctgtggcacaaattgtcag

SEQ ID NO: 1396704 - DNA, 25 bp, Homo sapien
taagagactgctaattagtttcttt

SEQ ID NO: 1396705 - DNA, 25 bp, Homo sapien
gcaaatagttgagggggacgggcta

SEQ ID NO: 1396706 - DNA, 25 bp, Homo sapien
gcttcctcttctcacatatagagtt

SEQ ID NO: 1396707 - DNA, 25 bp, Homo sapien
agtgtcacaatcacaatagttttta

SEQ ID NO: 1396708 - DNA, 25 bp, Homo sapien
cacatatagagttggattgtttcca

SEQ ID NO: 1396709 - DNA, 25 bp, Homo sapien
agcctgagaggaagcgcctcggccc

SEQ ID NO: 1396710 - DNA, 25 bp, Homo sapien
ccagcttatagacgcgatgtcgccg

SEQ ID NO: 1396711 - DNA, 25 bp, Homo sapien
agcggtaccttccaccagcgctcca

SEQ ID NO: 1396712 - DNA, 25 bp, Homo sapien
tatagacgcgatgtcgccggtgcag

SEQ ID NO: 1396713 - DNA, 25 bp, Homo sapien
tttctttgggccgatgcttcgtgtc

SEQ ID NO: 1396714 - DNA, 25 bp, Homo sapien
cggccgcagtagctcctggacgcct

SEQ ID NO: 1396715 - DNA, 25 bp, Homo sapien
caggccaggtcaggggcgttccctt

SEQ ID NO: 1396716 - DNA, 25 bp, Homo sapien
gggccgtgacaacgggcgccgccat

SEQ ID NO: 1396717 - DNA, 25 bp, Homo sapien
ttcccttcatgtcgcggccgcagta

SEQ ID NO: 1396718 - DNA, 25 bp, Homo sapien
tctgtgatgactggatactgaccgg

SEQ ID NO: 1396719 - DNA, 25 bp, Homo sapien
aaaagcaactatggtaaggccgcga

SEQ ID NO: 1396720 - DNA, 25 bp, Homo sapien
tactgaccggagaatgaatgatgct

SEQ ID NO: 1396721 - DNA, 25 bp, Homo sapien
gacggacgcctagaattactgactg

SEQ ID NO: 1396722 - DNA, 25 bp, Homo sapien
ggtctacaaggccatacatactctg

SEQ ID NO: 1396723 - DNA, 25 bp, Homo sapien
tagatgattttacccaactgtcgga

SEQ ID NO: 1396724 - DNA, 25 bp, Homo sapien
gatgctggcttggttaacaacctca

SEQ ID NO: 1396725 - DNA, 25 bp, Homo sapien
ttgaaaacaccaggcacgtttcctg

SEQ ID NO: 1396726 - DNA, 25 bp, Homo sapien
aactgccttgtaagaggtgtcgccc

SEQ ID NO: 1396727 - DNA, 25 bp, Homo sapien
ttcactttgccacagggaggcactg

SEQ ID NO: 1396728 - DNA, 25 bp, Homo sapien
tactagtcgaatatgagccttggat

SEQ ID NO: 1396729 - DNA, 25 bp, Homo sapien
gaagatgctgcctcgttgttataaa

SEQ ID NO: 1396730 - DNA, 25 bp, Homo sapien
caaggcaaccgggaaaggtgactga

SEQ ID NO: 1396731 - DNA, 25 bp, Homo sapien
tctgtgaccgtcgactcttcttgga

SEQ ID NO: 1396732 - DNA, 25 bp, Homo sapien
ggatatcccatatcaggccttggat

SEQ ID NO: 1396733 - DNA, 25 bp, Homo sapien
agacctctgcccattggcacggcct

SEQ ID NO: 1396734 - DNA, 25 bp, Homo sapien
tacacagacacagcaacaatctgat

SEQ ID NO: 1396735 - DNA, 25 bp, Homo sapien
cacagacacagcaacaatctgattt

SEQ ID NO: 1396736 - DNA, 25 bp, Homo sapien
agcacgtttcagagagcatggggtt

SEQ ID NO: 1396737 - DNA, 25 bp, Homo sapien
acagcacgtttcagagagcatgggg

SEQ ID NO: 1396738 - DNA, 25 bp, Homo sapien
tcacctcccagatggggtcgcggct

SEQ ID NO: 1396739 - DNA, 25 bp, Homo sapien
agacagggcggacgggcagagatgc

SEQ ID NO: 1396740 - DNA, 25 bp, Homo sapien
tcagacagggcggacgggcagagat

SEQ ID NO: 1396741 - DNA, 25 bp, Homo sapien
tcctcacctcccagatggggtcgcg

SEQ ID NO: 1396742 - DNA, 25 bp, Homo sapien
ggccagcaggacaaaatggatctca

SEQ ID NO: 1396743 - DNA, 25 bp, Homo sapien
ccagaatgatcggaacgacagaggt

SEQ ID NO: 1396744 - DNA, 25 bp, Homo sapien
tgtggctcctagtttgactgcaacc

SEQ ID NO: 1396745 - DNA, 25 bp, Homo sapien
gactgcaaccctggagtacgtggaa

SEQ ID NO: 1396746 - DNA, 25 bp, Homo sapien
ggatctcaacggacagaataggtaa

SEQ ID NO: 1396747 - DNA, 25 bp, Homo sapien
gaatgacaaagaacccatcagaatg

SEQ ID NO: 1396748 - DNA, 25 bp, Homo sapien
taggtaacatagaagagggcattcc

SEQ ID NO: 1396749 - DNA, 25 bp, Homo sapien
gagaaggcacatagatctcttggct

SEQ ID NO: 1396750 - DNA, 25 bp, Homo sapien
cctacggaactctggtagcaccagt

SEQ ID NO: 1396751 - DNA, 25 bp, Homo sapien
ggttccctacggaactctggtagca

SEQ ID NO: 1396752 - DNA, 25 bp, Homo sapien
cagttccagggctgagcatgcttca

SEQ ID NO: 1396753 - DNA, 25 bp, Homo sapien
catgcttcagcgagttcattgcagg

SEQ ID NO: 1396754 - DNA, 25 bp, Homo sapien
tgaactactcaccagaactgttcct

SEQ ID NO: 1396755 - DNA, 25 bp, Homo sapien
gaagctccttaaagattcctccaag

SEQ ID NO: 1396756 - DNA, 25 bp, Homo sapien
tcctccaagagtacctgaactactc

SEQ ID NO: 1396757 - DNA, 25 bp, Homo sapien
tgttccttcactagagcctttctgc

SEQ ID NO: 1396758 - DNA, 25 bp, Homo sapien
tgaacggcctggaagtaacacagca

SEQ ID NO: 1396759 - DNA, 25 bp, Homo sapien
gacacacttgtagcgtggtagtcca

SEQ ID NO: 1396760 - DNA, 25 bp, Homo sapien
ttagaaaatttcctgagcctcctgt

SEQ ID NO: 1396761 - DNA, 25 bp, Homo sapien
gactgagcctgacgttgaacggcct

SEQ ID NO: 1396762 - DNA, 25 bp, Homo sapien
acagaaatacacaaaaagcttgaaa

SEQ ID NO: 1396763 - DNA, 25 bp, Homo sapien
gaaatacacaaaaagcttgaaagtg

SEQ ID NO: 1396764 - DNA, 25 bp, Homo sapien
aaatacacaaaaagcttgaaagtgc

SEQ ID NO: 1396765 - DNA, 25 bp, Homo sapien
ctgccaaagacagaaatacacaaaa

SEQ ID NO: 1396766 - DNA, 25 bp, Homo sapien
caatctgagagcaagttaagctgca

SEQ ID NO: 1396767 - DNA, 25 bp, Homo sapien
tcaatctgagagcaagttaagctgc

SEQ ID NO: 1396768 - DNA, 25 bp, Homo sapien
aatctgagagcaagttaagctgcag

SEQ ID NO: 1396769 - DNA, 25 bp, Homo sapien
tctgagagcaagttaagctgcagga

SEQ ID NO: 1396770 - DNA, 25 bp, Homo sapien
actgtcgccctcattactttcctgt

SEQ ID NO: 1396771 - DNA, 25 bp, Homo sapien
gagggaatcaaagcaagtgccccac

SEQ ID NO: 1396772 - DNA, 25 bp, Homo sapien
agagaagtatattaagacagggcat

SEQ ID NO: 1396773 - DNA, 25 bp, Homo sapien
tacagatagatgatagctgcactca

SEQ ID NO: 1396774 - DNA, 25 bp, Homo sapien
acagcaaagcagatggctgagcaaa

SEQ ID NO: 1396775 - DNA, 25 bp, Homo sapien
gcagatggctgagcaaactgaagcc

SEQ ID NO: 1396776 - DNA, 25 bp, Homo sapien
cagatggctgagcaaactgaagccc

SEQ ID NO: 1396777 - DNA, 25 bp, Homo sapien
caaagcagatggctgagcaaactga

SEQ ID NO: 1396778 - DNA, 25 bp, Homo sapien
ttatcatcaccagacatggaagcag

SEQ ID NO: 1396779 - DNA, 25 bp, Homo sapien
cagagtaagtagtcatcttcaaggt

SEQ ID NO: 1396780 - DNA, 25 bp, Homo sapien
tcagagtaagtagtcatcttcaagg

SEQ ID NO: 1396781 - DNA, 25 bp, Homo sapien
aaggttatcatcaccagacatggaa

SEQ ID NO: 1396782 - DNA, 25 bp, Homo sapien
gacagggtatgtgttatctctccag

SEQ ID NO: 1396783 - DNA, 25 bp, Homo sapien
ctcagtgagcaacgtgctgagagag

SEQ ID NO: 1396784 - DNA, 25 bp, Homo sapien
cagtgagcaacgtgctgagagaggc

SEQ ID NO: 1396785 - DNA, 25 bp, Homo sapien
acagggtatgtgttatctctccaga

SEQ ID NO: 1396786 - DNA, 25 bp, Homo sapien
caattgcgtatcctttgtgtactaa

SEQ ID NO: 1396787 - DNA, 25 bp, Homo sapien
gtactaattctagcccaatatcaag

SEQ ID NO: 1396788 - DNA, 25 bp, Homo sapien
tatcctttgtgtactaattctagcc

SEQ ID NO: 1396789 - DNA, 25 bp, Homo sapien
cttcaggaagctcaattgcgtatcc

SEQ ID NO: 1396790 - DNA, 25 bp, Homo sapien
tcatataagtagatctttggccaag

SEQ ID NO: 1396791 - DNA, 25 bp, Homo sapien
gctagagatcttggctaccagaggc

SEQ ID NO: 1396792 - DNA, 25 bp, Homo sapien
agaggcttccagtcagcacaatgag

SEQ ID NO: 1396793 - DNA, 25 bp, Homo sapien
ggccaagttgagatcccagtctgga

SEQ ID NO: 1396794 - DNA, 25 bp, Homo sapien
ccagactacattctattgcttgaaa

SEQ ID NO: 1396795 - DNA, 25 bp, Homo sapien
ggagcaatccgtgccagactacatt

SEQ ID NO: 1396796 - DNA, 25 bp, Homo sapien
ctattgcttgaaatggaaggcttag

SEQ ID NO: 1396797 - DNA, 25 bp, Homo sapien
ctgagggagcaatccgtgccagact

SEQ ID NO: 1396798 - DNA, 25 bp, Homo sapien
attctccaaggtgccgaggacccgg

SEQ ID NO: 1396799 - DNA, 25 bp, Homo sapien
catttgtaggtaaaggtgctgctac

SEQ ID NO: 1396800 - DNA, 25 bp, Homo sapien
tgagagccctgaggtccttcagtgg

SEQ ID NO: 1396801 - DNA, 25 bp, Homo sapien
ctacatgcacagtcaagtcttcagg

SEQ ID NO: 1396802 - DNA, 25 bp, Homo sapien
tgcgggagccaacgatctggatcca

SEQ ID NO: 1396803 - DNA, 25 bp, Homo sapien
ccagaagtggttagggtgctcagaa

SEQ ID NO: 1396804 - DNA, 25 bp, Homo sapien
gcttatccaattgcaggctgcggga

SEQ ID NO: 1396805 - DNA, 25 bp, Homo sapien
gacttctaggtactcatcagcatga

SEQ ID NO: 1396806 - DNA, 25 bp, Homo sapien
atgtgctacatagtcaaatcggtca

SEQ ID NO: 1396807 - DNA, 25 bp, Homo sapien
aatcggtcaccaattatacagaagg

SEQ ID NO: 1396808 - DNA, 25 bp, Homo sapien
cagaaggtaaacctccatatgctag

SEQ ID NO: 1396809 - DNA, 25 bp, Homo sapien
caccaattatacagaaggtaaacct

SEQ ID NO: 1396810 - DNA, 25 bp, Homo sapien
tattattaccagtaaggaatatctg

SEQ ID NO: 1396811 - DNA, 25 bp, Homo sapien
attgcttcctattttgggtaatcta

SEQ ID NO: 1396812 - DNA, 25 bp, Homo sapien
ctgtgatgatagacataagtgtatt

SEQ ID NO: 1396813 - DNA, 25 bp, Homo sapien
aatccaattatttgatgtattactc

SEQ ID NO: 1396814 - DNA, 25 bp, Homo sapien
acagagcgggctggtaaaacatggc

SEQ ID NO: 1396815 - DNA, 25 bp, Homo sapien
gtctatttatacctccaagctcctg

SEQ ID NO: 1396816 - DNA, 25 bp, Homo sapien
tcttcaatgattaatgggctccctc

SEQ ID NO: 1396817 - DNA, 25 bp, Homo sapien
cttttgctggtaacaacttgtctca

SEQ ID NO: 1396818 - DNA, 25 bp, Homo sapien
ctgattggctgtttgcgtgggaccc

SEQ ID NO: 1396819 - DNA, 25 bp, Homo sapien
agtcggctccatgctagaactggtg

SEQ ID NO: 1396820 - DNA, 25 bp, Homo sapien
tttgacactaccacagccatgtcgc

SEQ ID NO: 1396821 - DNA, 25 bp, Homo sapien
catgtcgcctcctcctttgggtgga

SEQ ID NO: 1396822 - DNA, 25 bp, Homo sapien
ggaaaacaagagaaaggatgatatt

SEQ ID NO: 1396823 - DNA, 25 bp, Homo sapien
tggaaaacaagagaaaggatgatat

SEQ ID NO: 1396824 - DNA, 25 bp, Homo sapien
ctgtggaaaacaagagaaaggatga

SEQ ID NO: 1396825 - DNA, 25 bp, Homo sapien
tgtggaaaacaagagaaaggatgat

SEQ ID NO: 1396826 - DNA, 25 bp, Homo sapien
ctgagatttttataagtcttgatag

SEQ ID NO: 1396827 - DNA, 25 bp, Homo sapien
tctttgtcacaggtaattttggctc

SEQ ID NO: 1396828 - DNA, 25 bp, Homo sapien
tgatagtagtaatgtcccttctgat

SEQ ID NO: 1396829 - DNA, 25 bp, Homo sapien
tgtcacaggtaattttggctccaga

SEQ ID NO: 1396830 - DNA, 25 bp, Homo sapien
cagatagaacgaattgtctcgccgc

SEQ ID NO: 1396831 - DNA, 25 bp, Homo sapien
gatagaacgaattgtctcgccgcct

SEQ ID NO: 1396832 - DNA, 25 bp, Homo sapien
cttacagatagaacgaattgtctcg

SEQ ID NO: 1396833 - DNA, 25 bp, Homo sapien
tagaacgaattgtctcgccgcctct

SEQ ID NO: 1396834 - DNA, 25 bp, Homo sapien
gggaactgaaagctgctcagacact

SEQ ID NO: 1396835 - DNA, 25 bp, Homo sapien
tgatggattgctgctttggccttgc

SEQ ID NO: 1396836 - DNA, 25 bp, Homo sapien
ctggggaactgaaagctgctcagac

SEQ ID NO: 1396837 - DNA, 25 bp, Homo sapien
ggattgctgctttggccttgcacac

SEQ ID NO: 1396838 - DNA, 25 bp, Homo sapien
tgaacaggaaaaccactgataagca

SEQ ID NO: 1396839 - DNA, 25 bp, Homo sapien
tcatcgcctacatcctctgtgtcca

SEQ ID NO: 1396840 - DNA, 25 bp, Homo sapien
gaaaaccactgataagcagcactcg

SEQ ID NO: 1396841 - DNA, 25 bp, Homo sapien
ataagcagcactcgctcatcgccta

SEQ ID NO: 1396842 - DNA, 25 bp, Homo sapien
tgatgagtttcacagcctcctgggg

SEQ ID NO: 1396843 - DNA, 25 bp, Homo sapien
gtcatcttccccaacaaatgtcagc

SEQ ID NO: 1396844 - DNA, 25 bp, Homo sapien
taatattggctccttgccggccaat

SEQ ID NO: 1396845 - DNA, 25 bp, Homo sapien
gggaacccgcatctctatctcaatg

SEQ ID NO: 1396846 - DNA, 25 bp, Homo sapien
tttttcaatttaacaaggcaggagc

SEQ ID NO: 1396847 - DNA, 25 bp, Homo sapien
acaatacctggcaaggaaagagttt

SEQ ID NO: 1396848 - DNA, 25 bp, Homo sapien
tcaatttaacaaggcaggagcatgt

SEQ ID NO: 1396849 - DNA, 25 bp, Homo sapien
caatacctggcaaggaaagagtttt

SEQ ID NO: 1396850 - DNA, 25 bp, Homo sapien
ctattttctgaatggtggacaggct

SEQ ID NO: 1396851 - DNA, 25 bp, Homo sapien
cctgcggtataggatataggcaact

SEQ ID NO: 1396852 - DNA, 25 bp, Homo sapien
gacaggcttgtccaagaagtccgtt

SEQ ID NO: 1396853 - DNA, 25 bp, Homo sapien
tctgctttccctatacctgcggtat

SEQ ID NO: 1396854 - DNA, 25 bp, Homo sapien
ctgctccagtcagccgtcgagtgcg

SEQ ID NO: 1396855 - DNA, 25 bp, Homo sapien
gtcagccgtcgagtgcgccgcctcg

SEQ ID NO: 1396856 - DNA, 25 bp, Homo sapien
cgctgctccagtcagccgtcgagtg

SEQ ID NO: 1396857 - DNA, 25 bp, Homo sapien
cagtcagccgtcgagtgcgccgcct

SEQ ID NO: 1396858 - DNA, 25 bp, Homo sapien
aatcaacaccctgctcgcagtccga

SEQ ID NO: 1396859 - DNA, 25 bp, Homo sapien
ctgcccctgagcgacgtggctgctg

SEQ ID NO: 1396860 - DNA, 25 bp, Homo sapien
gtcacaaccaatccttccgcgggct

SEQ ID NO: 1396861 - DNA, 25 bp, Homo sapien
gccgctgcccaattacccggatgga

SEQ ID NO: 1396862 - DNA, 25 bp, Homo sapien
tgttgttaactgagaccgcacctgc

SEQ ID NO: 1396863 - DNA, 25 bp, Homo sapien
gagtggcaccgttcgcaaaaattgg

SEQ ID NO: 1396864 - DNA, 25 bp, Homo sapien
ggaggaaaatctgcgctccagcagc

SEQ ID NO: 1396865 - DNA, 25 bp, Homo sapien
gacagtgccacaacacaactcagtg

SEQ ID NO: 1396866 - DNA, 25 bp, Homo sapien
ccgaaacagcggcaggagagtgaga

SEQ ID NO: 1396867 - DNA, 25 bp, Homo sapien
ggtgtggcccgaaacagcggcagga

SEQ ID NO: 1396868 - DNA, 25 bp, Homo sapien
tggcccgaaacagcggcaggagagt

SEQ ID NO: 1396869 - DNA, 25 bp, Homo sapien
aaacagcggcaggagagtgagaccc

SEQ ID NO: 1396870 - DNA, 25 bp, Homo sapien
tgacgcaaaaatgatgaggagctcc

SEQ ID NO: 1396871 - DNA, 25 bp, Homo sapien
gatctgtgacgcaaaaatgatgagg

SEQ ID NO: 1396872 - DNA, 25 bp, Homo sapien
ccaagggcactagggatctgtgacg

SEQ ID NO: 1396873 - DNA, 25 bp, Homo sapien
gcactagggatctgtgacgcaaaaa

SEQ ID NO: 1396874 - DNA, 25 bp, Homo sapien
gctaggagtgctgatccctccgggc

SEQ ID NO: 1396875 - DNA, 25 bp, Homo sapien
aggagtgctgatccctccgggcatg

SEQ ID NO: 1396876 - DNA, 25 bp, Homo sapien
agggaaaggattgaggctgaaaccg

SEQ ID NO: 1396877 - DNA, 25 bp, Homo sapien
cctggaaggtagaggatcgctcctt

SEQ ID NO: 1396878 - DNA, 25 bp, Homo sapien
caggttagatggaggcaatgccatt

SEQ ID NO: 1396879 - DNA, 25 bp, Homo sapien
tcaggcaggttagatggaggcaatg

SEQ ID NO: 1396880 - DNA, 25 bp, Homo sapien
caatgccattgggacacataatcaa

SEQ ID NO: 1396881 - DNA, 25 bp, Homo sapien
cctgtttgtcaggcaggttagatgg

SEQ ID NO: 1396882 - DNA, 25 bp, Homo sapien
tgaagcggacttggtgggttcccca

SEQ ID NO: 1396883 - DNA, 25 bp, Homo sapien
gggactctgcctggttgacaaacag

SEQ ID NO: 1396884 - DNA, 25 bp, Homo sapien
tagaggctcatgcaaacacagtgca

SEQ ID NO: 1396885 - DNA, 25 bp, Homo sapien
tcgggactaggttctggttcaagca

SEQ ID NO: 1396886 - DNA, 25 bp, Homo sapien
aacaatctggttgaggcggaggtcc

SEQ ID NO: 1396887 - DNA, 25 bp, Homo sapien
tgattctgagccgattgccctgcag

SEQ ID NO: 1396888 - DNA, 25 bp, Homo sapien
gaagagcttggcagtgacccggtta

SEQ ID NO: 1396889 - DNA, 25 bp, Homo sapien
gggttgccagacagcctcaaggtga

SEQ ID NO: 1396890 - DNA, 25 bp, Homo sapien
ctgggaggtgcagtcacacacagca

SEQ ID NO: 1396891 - DNA, 25 bp, Homo sapien
gctgggaggtgcagtcacacacagc

SEQ ID NO: 1396892 - DNA, 25 bp, Homo sapien
gggctgggaggtgcagtcacacaca

SEQ ID NO: 1396893 - DNA, 25 bp, Homo sapien
ctggggctgggaggtgcagtcacac

SEQ ID NO: 1396894 - DNA, 25 bp, Homo sapien
aggaggaaaaggagcgggggccatg

SEQ ID NO: 1396895 - DNA, 25 bp, Homo sapien
aacagcaggttctagaggatctctc

SEQ ID NO: 1396896 - DNA, 25 bp, Homo sapien
tgatcttgccttccgactgaccagt

SEQ ID NO: 1396897 - DNA, 25 bp, Homo sapien
tgcattctattcatccagggagccc

SEQ ID NO: 1396898 - DNA, 25 bp, Homo sapien
cagatgaacccgtccccttagagga

SEQ ID NO: 1396899 - DNA, 25 bp, Homo sapien
ccaccctccagggttcatgggaaag

SEQ ID NO: 1396900 - DNA, 25 bp, Homo sapien
cacttccaaagagctggtggggacc

SEQ ID NO: 1396901 - DNA, 25 bp, Homo sapien
tgggccagcaggccatagggagagg

SEQ ID NO: 1396902 - DNA, 25 bp, Homo sapien
ggagaggcaaggagtccctcttcca

SEQ ID NO: 1396903 - DNA, 25 bp, Homo sapien
caggtgactcggtttcagtgctgaa

SEQ ID NO: 1396904 - DNA, 25 bp, Homo sapien
cagccccacaggtgactcggtttca

SEQ ID NO: 1396905 - DNA, 25 bp, Homo sapien
cacatgctggctacacaggctccga

SEQ ID NO: 1396906 - DNA, 25 bp, Homo sapien
gagggaaagcggcttggaccacgat

SEQ ID NO: 1396907 - DNA, 25 bp, Homo sapien
tcctgatagctacaaggagattttt

SEQ ID NO: 1396908 - DNA, 25 bp, Homo sapien
gcactgggattcaatcttgcattta

SEQ ID NO: 1396909 - DNA, 25 bp, Homo sapien
taaaatcttacatcattcatggcct

SEQ ID NO: 1396910 - DNA, 25 bp, Homo sapien
acacagggatagaaagagcgcaaag

SEQ ID NO: 1396911 - DNA, 25 bp, Homo sapien
ctttgccaggatgctttggcgatga

SEQ ID NO: 1396912 - DNA, 25 bp, Homo sapien
aaggccagctccagattgtactgca

SEQ ID NO: 1396913 - DNA, 25 bp, Homo sapien
ccaggatgctttggcgatgagtctt

SEQ ID NO: 1396914 - DNA, 25 bp, Homo sapien
tggcgatgagtcttgcagagatgat

SEQ ID NO: 1396915 - DNA, 25 bp, Homo sapien
taatggtaagctctggacgttgggc

SEQ ID NO: 1396916 - DNA, 25 bp, Homo sapien
gatagtctcgatctgcaaactcagg

SEQ ID NO: 1396917 - DNA, 25 bp, Homo sapien
gctcattcaatgctaggcactagga

SEQ ID NO: 1396918 - DNA, 25 bp, Homo sapien
tagaggtcttctaagctgagcgcgt

SEQ ID NO: 1396919 - DNA, 25 bp, Homo sapien
tgcaaggcacttagggagtgggaga

SEQ ID NO: 1396920 - DNA, 25 bp, Homo sapien
ttgatgagaacaagggctgtgtaga

SEQ ID NO: 1396921 - DNA, 25 bp, Homo sapien
catcctcggaaaagtgcaaggcact

SEQ ID NO: 1396922 - DNA, 25 bp, Homo sapien
agagggcaatctcatcctcggaaaa

SEQ ID NO: 1396923 - DNA, 25 bp, Homo sapien
gatggtgcccgaggacaccgccctt

SEQ ID NO: 1396924 - DNA, 25 bp, Homo sapien
cccttattgtgtttagagcagaggg

SEQ ID NO: 1396925 - DNA, 25 bp, Homo sapien
aaagagggtgccctgggtcacaaag

SEQ ID NO: 1396926 - DNA, 25 bp, Homo sapien
gcagagggggcaattcgccctgaaa

SEQ ID NO: 1396927 - DNA, 25 bp, Homo sapien
tcaaaaaagaccgtgcggttgtcag

SEQ ID NO: 1396928 - DNA, 25 bp, Homo sapien
ttgtcagcattgtaggcccggcaca

SEQ ID NO: 1396929 - DNA, 25 bp, Homo sapien
gaacagctccatgccaccgtatttg

SEQ ID NO: 1396930 - DNA, 25 bp, Homo sapien
ccatgccaccgtatttgccttcaaa

SEQ ID NO: 1396931 - DNA, 25 bp, Homo sapien
gggacagtgtcaagcaaagccagga

SEQ ID NO: 1396932 - DNA, 25 bp, Homo sapien
agggacagtgtcaagcaaagccagg

SEQ ID NO: 1396933 - DNA, 25 bp, Homo sapien
cagggacagtgtcaagcaaagccag

SEQ ID NO: 1396934 - DNA, 25 bp, Homo sapien
ctccctccacttggctctgtcccct

SEQ ID NO: 1396935 - DNA, 25 bp, Homo sapien
ttgtccccaggcctgcccacccatc

SEQ ID NO: 1396936 - DNA, 25 bp, Homo sapien
ccctccacttggctctgtccccttg

SEQ ID NO: 1396937 - DNA, 25 bp, Homo sapien
tccacttggctctgtccccttgtcc

SEQ ID NO: 1396938 - DNA, 25 bp, Homo sapien
cacgtactgaatggcctcggtgagg

SEQ ID NO: 1396939 - DNA, 25 bp, Homo sapien
ggtggtgggcacaccgttcccacat

SEQ ID NO: 1396940 - DNA, 25 bp, Homo sapien
ctgagagcctcttggcgaactccac

SEQ ID NO: 1396941 - DNA, 25 bp, Homo sapien
cacaatctggtcattctggcagagc

SEQ ID NO: 1396942 - DNA, 25 bp, Homo sapien
agggtcccgctgtagcgctctgtgt

SEQ ID NO: 1396943 - DNA, 25 bp, Homo sapien
tctcaactagcattttcaaaagcct

SEQ ID NO: 1396944 - DNA, 25 bp, Homo sapien
acagattcctgccagtgagtcccac

SEQ ID NO: 1396945 - DNA, 25 bp, Homo sapien
caaaagcctggtcttagcacaaatg

SEQ ID NO: 1396946 - DNA, 25 bp, Homo sapien
tgaacaggacatacagctgcccctt

SEQ ID NO: 1396947 - DNA, 25 bp, Homo sapien
tatatctcgttgaggtgaacaggac

SEQ ID NO: 1396948 - DNA, 25 bp, Homo sapien
gtatgagatacagctttgccctcca

SEQ ID NO: 1396949 - DNA, 25 bp, Homo sapien
ccacaaaggttatgcccaaggtctc

SEQ ID NO: 1396950 - DNA, 25 bp, Homo sapien
tgtgatcgaaaaggcagcataaact

SEQ ID NO: 1396951 - DNA, 25 bp, Homo sapien
tcgtgcgcaggtagccatctctgaa

SEQ ID NO: 1396952 - DNA, 25 bp, Homo sapien
gaaaagcgctcatccatctgctggg

SEQ ID NO: 1396953 - DNA, 25 bp, Homo sapien
tacataaagcgtttagcacaatgcc

SEQ ID NO: 1396954 - DNA, 25 bp, Homo sapien
tccagccgcagctggcatgtctccc

SEQ ID NO: 1396955 - DNA, 25 bp, Homo sapien
gtctccctgtaggacttgcagacgc

SEQ ID NO: 1396956 - DNA, 25 bp, Homo sapien
cagtcacttcctcccgggagaagat

SEQ ID NO: 1396957 - DNA, 25 bp, Homo sapien
cctgtaggacttgcagacgctctgc

SEQ ID NO: 1396958 - DNA, 25 bp, Homo sapien
tacgcctacccatgcaagggcactt

SEQ ID NO: 1396959 - DNA, 25 bp, Homo sapien
cagctcctacgcctacccatgcaag

SEQ ID NO: 1396960 - DNA, 25 bp, Homo sapien
ctacccatgcaagggcacttctcag

SEQ ID NO: 1396961 - DNA, 25 bp, Homo sapien
ctggggccggagaaggaaggcatgg

SEQ ID NO: 1396962 - DNA, 25 bp, Homo sapien
aaaacgaagtccacatcggtcaggg

SEQ ID NO: 1396963 - DNA, 25 bp, Homo sapien
gctgtattcaaggtggcatgaggcc

SEQ ID NO: 1396964 - DNA, 25 bp, Homo sapien
gcctgtgctatagaagctctctctg

SEQ ID NO: 1396965 - DNA, 25 bp, Homo sapien
tgcctccggtgtgctgcggaaactg

SEQ ID NO: 1396966 - DNA, 25 bp, Homo sapien
cctcaggcaggtcaggcgaggagcc

SEQ ID NO: 1396967 - DNA, 25 bp, Homo sapien
cagggggacaggcagaagcctcagg

SEQ ID NO: 1396968 - DNA, 25 bp, Homo sapien
tcaggcaggtcaggcgaggagccca

SEQ ID NO: 1396969 - DNA, 25 bp, Homo sapien
agcctcaggcaggtcaggcgaggag

SEQ ID NO: 1396970 - DNA, 25 bp, Homo sapien
ctgggagccccaaggtgtaggtgag

SEQ ID NO: 1396971 - DNA, 25 bp, Homo sapien
gtgtaggtgagggtatctgctcctt

SEQ ID NO: 1396972 - DNA, 25 bp, Homo sapien
ccccaaggtgtaggtgagggtatct

SEQ ID NO: 1396973 - DNA, 25 bp, Homo sapien
gtgagggtatctgctccttgggccc

SEQ ID NO: 1396974 - DNA, 25 bp, Homo sapien
ctgcttcttggacatgcggccgaac

SEQ ID NO: 1396975 - DNA, 25 bp, Homo sapien
cttggacatgcggccgaacttgaca

SEQ ID NO: 1396976 - DNA, 25 bp, Homo sapien
cttcttggacatgcggccgaacttg

SEQ ID NO: 1396977 - DNA, 25 bp, Homo sapien
ttggacatgcggccgaacttgacag

SEQ ID NO: 1396978 - DNA, 25 bp, Homo sapien
catcggtttcggctggtgcggtcga

SEQ ID NO: 1396979 - DNA, 25 bp, Homo sapien
caggcggcagtgctggcatcggttt

SEQ ID NO: 1396980 - DNA, 25 bp, Homo sapien
atctcgggacatgcccagcgccagg

SEQ ID NO: 1396981 - DNA, 25 bp, Homo sapien
agtaggccgcgttacagcgctggct

SEQ ID NO: 1396982 - DNA, 25 bp, Homo sapien
ggtgataaccccgtagtggatccca

SEQ ID NO: 1396983 - DNA, 25 bp, Homo sapien
gtagtggatcccagacgacttgtcc

SEQ ID NO: 1396984 - DNA, 25 bp, Homo sapien
ctcacaggtgataaccccgtagtgg

SEQ ID NO: 1396985 - DNA, 25 bp, Homo sapien
gtggatcccagacgacttgtcccca

SEQ ID NO: 1396986 - DNA, 25 bp, Homo sapien
gtgcttccactacttctccaaccag

SEQ ID NO: 1396987 - DNA, 25 bp, Homo sapien
tccaaccagctccagcttgctgttt

SEQ ID NO: 1396988 - DNA, 25 bp, Homo sapien
ctggtgcttccactacttctccaac

SEQ ID NO: 1396989 - DNA, 25 bp, Homo sapien
gcttccactacttctccaaccagct

SEQ ID NO: 1396990 - DNA, 25 bp, Homo sapien
cttcaaaagctacccctgggagaca

SEQ ID NO: 1396991 - DNA, 25 bp, Homo sapien
ttcaaaagctacccctgggagacac

SEQ ID NO: 1396992 - DNA, 25 bp, Homo sapien
tcaaaagctacccctgggagacacg

SEQ ID NO: 1396993 - DNA, 25 bp, Homo sapien
caaaagctacccctgggagacacgt

SEQ ID NO: 1396994 - DNA, 25 bp, Homo sapien
gccttggctctgccggccttggctc

SEQ ID NO: 1396995 - DNA, 25 bp, Homo sapien
gcgacagccacacgcggtaaaagct

SEQ ID NO: 1396996 - DNA, 25 bp, Homo sapien
cacacgcggtaaaagctgtttccac

SEQ ID NO: 1396997 - DNA, 25 bp, Homo sapien
acatgcgacagccacacgcggtaaa

SEQ ID NO: 1396998 - DNA, 25 bp, Homo sapien
tccaaaaccacatgcgacagccaca

SEQ ID NO: 1396999 - DNA, 25 bp, Homo sapien
ggtgtgggtcttctttgcagccagc

SEQ ID NO: 1397000 - DNA, 25 bp, Homo sapien
tgtgggtcttctttgcagccagcag

SEQ ID NO: 1397001 - DNA, 25 bp, Homo sapien
aggtgtgggtcttctttgcagccag

SEQ ID NO: 1397002 - DNA, 25 bp, Homo sapien
tgggtcttctttgcagccagcagct

SEQ ID NO: 1397003 - DNA, 25 bp, Homo sapien
tgctgctgcgtggccgggtctgggt

SEQ ID NO: 1397004 - DNA, 25 bp, Homo sapien
cacatggatactcggacctccaggg

SEQ ID NO: 1397005 - DNA, 25 bp, Homo sapien
tcgatgggggtcacatggatactcg

SEQ ID NO: 1397006 - DNA, 25 bp, Homo sapien
gagattgggcagtagggagcatgag

SEQ ID NO: 1397007 - DNA, 25 bp, Homo sapien
ctggagcttggtggctctggccctc

SEQ ID NO: 1397008 - DNA, 25 bp, Homo sapien
gctctggccctcaaactttcctcct

SEQ ID NO: 1397009 - DNA, 25 bp, Homo sapien
ggtggccctggagcttggtggctct

SEQ ID NO: 1397010 - DNA, 25 bp, Homo sapien
tggccctcaaactttcctcctccat

SEQ ID NO: 1397011 - DNA, 25 bp, Homo sapien
gatcctgctctgagggggttcctga

SEQ ID NO: 1397012 - DNA, 25 bp, Homo sapien
tgcgatcctgctctgagggggttcc

SEQ ID NO: 1397013 - DNA, 25 bp, Homo sapien
ccctgcgatcctgctctgagggggt

SEQ ID NO: 1397014 - DNA, 25 bp, Homo sapien
cctgcgatcctgctctgagggggtt

SEQ ID NO: 1397015 - DNA, 25 bp, Homo sapien
ggacggcctgacattctgtccttcc

SEQ ID NO: 1397016 - DNA, 25 bp, Homo sapien
tggggccaaggacggcctgacattc

SEQ ID NO: 1397017 - DNA, 25 bp, Homo sapien
caaggacggcctgacattctgtcct

SEQ ID NO: 1397018 - DNA, 25 bp, Homo sapien
gccaaggacggcctgacattctgtc

SEQ ID NO: 1397019 - DNA, 25 bp, Homo sapien
cgtgaggctcggtgctgtctctgtg

SEQ ID NO: 1397020 - DNA, 25 bp, Homo sapien
ccgtgaggctcggtgctgtctctgt

SEQ ID NO: 1397021 - DNA, 25 bp, Homo sapien
tcccttggtgccgtcctggctgccc

SEQ ID NO: 1397022 - DNA, 25 bp, Homo sapien
ggggcagctcccttggtgccgtcct

SEQ ID NO: 1397023 - DNA, 25 bp, Homo sapien
agctcccttggtgccgtcctggctg

SEQ ID NO: 1397024 - DNA, 25 bp, Homo sapien
cttggtgccgtcctggctgccctgg

SEQ ID NO: 1397025 - DNA, 25 bp, Homo sapien
agaccagtggaccagtgcatggagc

SEQ ID NO: 1397026 - DNA, 25 bp, Homo sapien
ggtggaaggcgggagcacctggccc

SEQ ID NO: 1397027 - DNA, 25 bp, Homo sapien
ggagggtggaaggcgggagcacctg

SEQ ID NO: 1397028 - DNA, 25 bp, Homo sapien
ggaggggacatgaggagagaccagt

SEQ ID NO: 1397029 - DNA, 25 bp, Homo sapien
gctgctcttgccaggactccctgac

SEQ ID NO: 1397030 - DNA, 25 bp, Homo sapien
tgctgctcttgccaggactccctga

SEQ ID NO: 1397031 - DNA, 25 bp, Homo sapien
ttgctgctcttgccaggactccctg

SEQ ID NO: 1397032 - DNA, 25 bp, Homo sapien
tctacgtgctcctcatctgttgggg

SEQ ID NO: 1397033 - DNA, 25 bp, Homo sapien
tgctcctcatctgttggggcaaggg

SEQ ID NO: 1397034 - DNA, 25 bp, Homo sapien
cgtgctcctcatctgttggggcaag

SEQ ID NO: 1397035 - DNA, 25 bp, Homo sapien
tacgtgctcctcatctgttggggca

SEQ ID NO: 1397036 - DNA, 25 bp, Homo sapien
ggaagatcggtaggctctatgcccg

SEQ ID NO: 1397037 - DNA, 25 bp, Homo sapien
tatggccgggatagagggaagatcg

SEQ ID NO: 1397038 - DNA, 25 bp, Homo sapien
aatgagcatcttccccccgcgtatg

SEQ ID NO: 1397039 - DNA, 25 bp, Homo sapien
cccgagcgtgtaaggtgccagtaag

SEQ ID NO: 1397040 - DNA, 25 bp, Homo sapien
cgccagggatgacccgggacctagt

SEQ ID NO: 1397041 - DNA, 25 bp, Homo sapien
gctgagatgggtgggcgccagggat

SEQ ID NO: 1397042 - DNA, 25 bp, Homo sapien
tgggcgccagggatgacccgggacc

SEQ ID NO: 1397043 - DNA, 25 bp, Homo sapien
atgggtgggcgccagggatgacccg

SEQ ID NO: 1397044 - DNA, 25 bp, Homo sapien
accttggctctcaggctgcgggcgg

SEQ ID NO: 1397045 - DNA, 25 bp, Homo sapien
gcaatgaggggcgtctcgcactccc

SEQ ID NO: 1397046 - DNA, 25 bp, Homo sapien
gggttggcgctgcacttgaccacgc

SEQ ID NO: 1397047 - DNA, 25 bp, Homo sapien
agcagcacatccctgcgaagtcccg

SEQ ID NO: 1397048 - DNA, 25 bp, Homo sapien
tcccgcggccggacgcggggccgca

SEQ ID NO: 1397049 - DNA, 25 bp, Homo sapien
ccgcagcctcagcaccacacagcag

SEQ ID NO: 1397050 - DNA, 25 bp, Homo sapien
gggccgcagcctcagcaccacacag

SEQ ID NO: 1397051 - DNA, 25 bp, Homo sapien
ggccggggcaggccctcggcgctca

SEQ ID NO: 1397052 - DNA, 25 bp, Homo sapien
atattcggtggagagccgcagctgc

SEQ ID NO: 1397053 - DNA, 25 bp, Homo sapien
gcctgatattcggtggagagccgca

SEQ ID NO: 1397054 - DNA, 25 bp, Homo sapien
ccgggcccggcctgatattcggtgg

SEQ ID NO: 1397055 - DNA, 25 bp, Homo sapien
aggcgcagcacgctctcgcgcgtgg

SEQ ID NO: 1397056 - DNA, 25 bp, Homo sapien
cggcgagtgcgggctggtatcggcc

SEQ ID NO: 1397057 - DNA, 25 bp, Homo sapien
cgagtgcgggctggtatcggccgag

SEQ ID NO: 1397058 - DNA, 25 bp, Homo sapien
cggcgcggcgagtgcgggctggtat

SEQ ID NO: 1397059 - DNA, 25 bp, Homo sapien
ggcgcggcgagtgcgggctggtatc

SEQ ID NO: 1397060 - DNA, 25 bp, Homo sapien
ccgcggggagccgaagggcgacgag

SEQ ID NO: 1397061 - DNA, 25 bp, Homo sapien
gccgaagggcgacgagtccggcgac

SEQ ID NO: 1397062 - DNA, 25 bp, Homo sapien
ggagccgaagggcgacgagtccggc

SEQ ID NO: 1397063 - DNA, 25 bp, Homo sapien
cgcggggagccgaagggcgacgagt

SEQ ID NO: 1397064 - DNA, 25 bp, Homo sapien
ccgtgtcgctgtcgggggcccggca

SEQ ID NO: 1397065 - DNA, 25 bp, Homo sapien
ggattcccgccggcgcgtgtgcggg

SEQ ID NO: 1397066 - DNA, 25 bp, Homo sapien
gccggggcaggtggcggcccgtgga

SEQ ID NO: 1397067 - DNA, 25 bp, Homo sapien
ggggcggagacgtgcagccgggact

SEQ ID NO: 1397068 - DNA, 25 bp, Homo sapien
aggtgaggcagcgagcaggtcgcgg

SEQ ID NO: 1397069 - DNA, 25 bp, Homo sapien
gggcaggcgcttgtgggcgggcccg

SEQ ID NO: 1397070 - DNA, 25 bp, Homo sapien
gaaggcgcccaacgggccgcaggct

SEQ ID NO: 1397071 - DNA, 25 bp, Homo sapien
agccgaggcgggatgaagaactgcg

SEQ ID NO: 1397072 - DNA, 25 bp, Homo sapien
tatagccagctttttccaagagcca

SEQ ID NO: 1397073 - DNA, 25 bp, Homo sapien
cttatagccagctttttccaagagc

SEQ ID NO: 1397074 - DNA, 25 bp, Homo sapien
agccagctttttccaagagccacat

SEQ ID NO: 1397075 - DNA, 25 bp, Homo sapien
tagccagctttttccaagagccaca

SEQ ID NO: 1397076 - DNA, 25 bp, Homo sapien
cccgtctcagatgggagtgctcggc

SEQ ID NO: 1397077 - DNA, 25 bp, Homo sapien
ggaattccgaattccgcagggccga

SEQ ID NO: 1397078 - DNA, 25 bp, Homo sapien
gccgagagggtccaaatcccgtctc

SEQ ID NO: 1397079 - DNA, 25 bp, Homo sapien
atggaattccgaattccgcagggcc

SEQ ID NO: 1397080 - DNA, 25 bp, Homo sapien
gacaccctgggctggtccaaggaga

SEQ ID NO: 1397081 - DNA, 25 bp, Homo sapien
aagagcaccgtgttccgaccctctg

SEQ ID NO: 1397082 - DNA, 25 bp, Homo sapien
cctcagagcggtctccggaaggctc

SEQ ID NO: 1397083 - DNA, 25 bp, Homo sapien
tcggaaaccaccgagcacaaaggca

SEQ ID NO: 1397084 - DNA, 25 bp, Homo sapien
catcagcccggtcttctgacttcct

SEQ ID NO: 1397085 - DNA, 25 bp, Homo sapien
ttctagcaacaatccattcctgtgc

SEQ ID NO: 1397086 - DNA, 25 bp, Homo sapien
tgtctgcgcggccatcagcccggtc

SEQ ID NO: 1397087 - DNA, 25 bp, Homo sapien
agccaggtttctagcaacaatccat

SEQ ID NO: 1397088 - DNA, 25 bp, Homo sapien
taaacactactgcacttggaccaac

SEQ ID NO: 1397089 - DNA, 25 bp, Homo sapien
gtaaacactactgcacttggaccaa

SEQ ID NO: 1397090 - DNA, 25 bp, Homo sapien
aaacactactgcacttggaccaacc

SEQ ID NO: 1397091 - DNA, 25 bp, Homo sapien
cctggttccatgtcacaaagggttt

SEQ ID NO: 1397092 - DNA, 25 bp, Homo sapien
tggttccatgtcacaaagggtttca

SEQ ID NO: 1397093 - DNA, 25 bp, Homo sapien
ctggttccatgtcacaaagggtttc

SEQ ID NO: 1397094 - DNA, 25 bp, Homo sapien
ggttccatgtcacaaagggtttcat

SEQ ID NO: 1397095 - DNA, 25 bp, Homo sapien
ctgatccctacagcggtttttccaa

SEQ ID NO: 1397096 - DNA, 25 bp, Homo sapien
tggtcacacatgtacctggtacctg

SEQ ID NO: 1397097 - DNA, 25 bp, Homo sapien
ctgggcgctcaggatgtcttggtca

SEQ ID NO: 1397098 - DNA, 25 bp, Homo sapien
tccagacctctttccccactaatgg

SEQ ID NO: 1397099 - DNA, 25 bp, Homo sapien
gaaacttggagctcgtcttcacaga

SEQ ID NO: 1397100 - DNA, 25 bp, Homo sapien
tgctgacgccttactgccactgagt

SEQ ID NO: 1397101 - DNA, 25 bp, Homo sapien
tataactagtggcacagtcctgcac

SEQ ID NO: 1397102 - DNA, 25 bp, Homo sapien
tgatagggcactctgacttggcacc

SEQ ID NO: 1397103 - DNA, 25 bp, Homo sapien
aggggaggcagtggctctcctgcag

SEQ ID NO: 1397104 - DNA, 25 bp, Homo sapien
gggaggcagtggctctcctgcaggc

SEQ ID NO: 1397105 - DNA, 25 bp, Homo sapien
aggcagtggctctcctgcaggcaca

SEQ ID NO: 1397106 - DNA, 25 bp, Homo sapien
ggctctcctgcaggcacagtgactg

SEQ ID NO: 1397107 - DNA, 25 bp, Homo sapien
ttactggggagactcttcttccaac

SEQ ID NO: 1397108 - DNA, 25 bp, Homo sapien
actggggagactcttcttccaactg

SEQ ID NO: 1397109 - DNA, 25 bp, Homo sapien
tccaactgcagctgaaggaaaacac

SEQ ID NO: 1397110 - DNA, 25 bp, Homo sapien
cttccaactgcagctgaaggaaaac

SEQ ID NO: 1397111 - DNA, 25 bp, Homo sapien
tcatctgtgtccctagtaggtgccc

SEQ ID NO: 1397112 - DNA, 25 bp, Homo sapien
cctgggtcctgtcctttcgttacag

SEQ ID NO: 1397113 - DNA, 25 bp, Homo sapien
tgcaaattacccattacctgggtcc

SEQ ID NO: 1397114 - DNA, 25 bp, Homo sapien
tacaggttggataactcatatatag

SEQ ID NO: 1397115 - DNA, 25 bp, Homo sapien
ggatgaatcattggcatcttttctt

SEQ ID NO: 1397116 - DNA, 25 bp, Homo sapien
ccgcagcttgggatgaatcattggc

SEQ ID NO: 1397117 - DNA, 25 bp, Homo sapien
ctaaagaagctggaccgcagcttgg

SEQ ID NO: 1397118 - DNA, 25 bp, Homo sapien
taaagaagctggaccgcagcttggg

SEQ ID NO: 1397119 - DNA, 25 bp, Homo sapien
tggggctgggctgggggctccttta

SEQ ID NO: 1397120 - DNA, 25 bp, Homo sapien
ctggggctgggctgggggctccttt

SEQ ID NO: 1397121 - DNA, 25 bp, Homo sapien
tacaaccagagagtccacggggatc

SEQ ID NO: 1397122 - DNA, 25 bp, Homo sapien
agttctacgtccattacaaccagag

SEQ ID NO: 1397123 - DNA, 25 bp, Homo sapien
gcgatgcaggacatgtaaagcttct

SEQ ID NO: 1397124 - DNA, 25 bp, Homo sapien
ggacttggcataaactgtctgctgg

SEQ ID NO: 1397125 - DNA, 25 bp, Homo sapien
gtcctggccagggactagaggaatt

SEQ ID NO: 1397126 - DNA, 25 bp, Homo sapien
gggagacgaggcagcttagcccatc

SEQ ID NO: 1397127 - DNA, 25 bp, Homo sapien
tctctcatgtgaacccggttcccca

SEQ ID NO: 1397128 - DNA, 25 bp, Homo sapien
gttccccatcccttcactctctgtg

SEQ ID NO: 1397129 - DNA, 25 bp, Homo sapien
aacctgatgttgagacttagtgtga

SEQ ID NO: 1397130 - DNA, 25 bp, Homo sapien
gagacttagtgtgaacagcccctct

SEQ ID NO: 1397131 - DNA, 25 bp, Homo sapien
aaaaggtctcgtccatcatggctgc

SEQ ID NO: 1397132 - DNA, 25 bp, Homo sapien
ttttagaaaaggtctcgtccatcat

SEQ ID NO: 1397133 - DNA, 25 bp, Homo sapien
ctgggttggctggaaaaagatgaca

SEQ ID NO: 1397134 - DNA, 25 bp, Homo sapien
ggaaaagacagaccgacttcttctg

SEQ ID NO: 1397135 - DNA, 25 bp, Homo sapien
ctccaggtaggagcctggttggaaa

SEQ ID NO: 1397136 - DNA, 25 bp, Homo sapien
gtgaagatgcgacagtcacctttgt

SEQ ID NO: 1397137 - DNA, 25 bp, Homo sapien
tgtccgaacaccagctggcattggg

SEQ ID NO: 1397138 - DNA, 25 bp, Homo sapien
ggaaactgccagtccagatgggagc

SEQ ID NO: 1397139 - DNA, 25 bp, Homo sapien
ggcagcttgatccagccgctagact

SEQ ID NO: 1397140 - DNA, 25 bp, Homo sapien
ccagaaattcttggtacaggctcag

SEQ ID NO: 1397141 - DNA, 25 bp, Homo sapien
tcttctctggcaagaatcttgagaa

SEQ ID NO: 1397142 - DNA, 25 bp, Homo sapien
gtcttctctggcaagaatcttgaga

SEQ ID NO: 1397143 - DNA, 25 bp, Homo sapien
ctgtcttctctggcaagaatcttga

SEQ ID NO: 1397144 - DNA, 25 bp, Homo sapien
tgtcttctctggcaagaatcttgag

SEQ ID NO: 1397145 - DNA, 25 bp, Homo sapien
gcagggttgagtctgggcaggatac

SEQ ID NO: 1397146 - DNA, 25 bp, Homo sapien
gccacctggaagcatctccttatca

SEQ ID NO: 1397147 - DNA, 25 bp, Homo sapien
tcaagaaggcctctgtggtggccaa

SEQ ID NO: 1397148 - DNA, 25 bp, Homo sapien
caggatacggggggcctcaagaagg

SEQ ID NO: 1397149 - DNA, 25 bp, Homo sapien
agctgcacttggggccgcttctctc

SEQ ID NO: 1397150 - DNA, 25 bp, Homo sapien
aggatccagccctgcttggatggag

SEQ ID NO: 1397151 - DNA, 25 bp, Homo sapien
ttctttcagagagctaggcgaggct

SEQ ID NO: 1397152 - DNA, 25 bp, Homo sapien
ttggatggagggtcttggctgactc

SEQ ID NO: 1397153 - DNA, 25 bp, Homo sapien
tcgagaagtcgaaaccaaaggaata

SEQ ID NO: 1397154 - DNA, 25 bp, Homo sapien
gagttggttgccatccccagataag

SEQ ID NO: 1397155 - DNA, 25 bp, Homo sapien
cccagaatgtggcaaggcaaaggtt

SEQ ID NO: 1397156 - DNA, 25 bp, Homo sapien
taagtgagaatatctggcagcactc

SEQ ID NO: 1397157 - DNA, 25 bp, Homo sapien
ctggctccccatgggatcgtggtac

SEQ ID NO: 1397158 - DNA, 25 bp, Homo sapien
cagcacgttggagtggtgccgtcca

SEQ ID NO: 1397159 - DNA, 25 bp, Homo sapien
cttggacatgtgctgagctcccctg

SEQ ID NO: 1397160 - DNA, 25 bp, Homo sapien
gacatgtgctgagctcccctgatgt

SEQ ID NO: 1397161 - DNA, 25 bp, Homo sapien
cacggcctaattatgtttacactga

SEQ ID NO: 1397162 - DNA, 25 bp, Homo sapien
tggagctggcaattctgatagcatc

SEQ ID NO: 1397163 - DNA, 25 bp, Homo sapien
gaatagttccattaggtcacacagc

SEQ ID NO: 1397164 - DNA, 25 bp, Homo sapien
gagtaagagcaaaaactcacggcct

SEQ ID NO: 1397165 - DNA, 25 bp, Homo sapien
gaaactagctaaatgagcagcgctg

SEQ ID NO: 1397166 - DNA, 25 bp, Homo sapien
gcagcgctggcttattccttcggag

SEQ ID NO: 1397167 - DNA, 25 bp, Homo sapien
tgccagacctgtaacttgtagagct

SEQ ID NO: 1397168 - DNA, 25 bp, Homo sapien
gatacgaagggaggcaggcatactt

SEQ ID NO: 1397169 - DNA, 25 bp, Homo sapien
tgggcccttgcaacttgagaactgg

SEQ ID NO: 1397170 - DNA, 25 bp, Homo sapien
tttctgggagaaggaactgccagct

SEQ ID NO: 1397171 - DNA, 25 bp, Homo sapien
atggagggctccagctgatcttttg

SEQ ID NO: 1397172 - DNA, 25 bp, Homo sapien
ggccatcccaggtcagtcagctctg

SEQ ID NO: 1397173 - DNA, 25 bp, Homo sapien
tgggtagggtaccacaaggctgtcc

SEQ ID NO: 1397174 - DNA, 25 bp, Homo sapien
aatctggcctacgtacacatctggg

SEQ ID NO: 1397175 - DNA, 25 bp, Homo sapien
tgcaggacgtgcctcattaacagta

SEQ ID NO: 1397176 - DNA, 25 bp, Homo sapien
tacgctggcggcaatgctgctgtta

SEQ ID NO: 1397177 - DNA, 25 bp, Homo sapien
cagagatagatctgcacagagggaa

SEQ ID NO: 1397178 - DNA, 25 bp, Homo sapien
ttataaaaagaggagacttggacac

SEQ ID NO: 1397179 - DNA, 25 bp, Homo sapien
gaagatggaggactggaatgatgca

SEQ ID NO: 1397180 - DNA, 25 bp, Homo sapien
ggtgggtccattatgactggtttcc

SEQ ID NO: 1397181 - DNA, 25 bp, Homo sapien
tccctagcactttcaggagaatggc

SEQ ID NO: 1397182 - DNA, 25 bp, Homo sapien
ttccctagcactttcaggagaatgg

SEQ ID NO: 1397183 - DNA, 25 bp, Homo sapien
cctagcactttcaggagaatggcct

SEQ ID NO: 1397184 - DNA, 25 bp, Homo sapien
ccctagcactttcaggagaatggcc

SEQ ID NO: 1397185 - DNA, 25 bp, Homo sapien
cagtttgtactactttgctacagca

SEQ ID NO: 1397186 - DNA, 25 bp, Homo sapien
actactttgctacagcagccctagg

SEQ ID NO: 1397187 - DNA, 25 bp, Homo sapien
tgtactactttgctacagcagccct

SEQ ID NO: 1397188 - DNA, 25 bp, Homo sapien
ttgtactactttgctacagcagccc

SEQ ID NO: 1397189 - DNA, 25 bp, Homo sapien
tggctgtgcttcctacactgaccaa

SEQ ID NO: 1397190 - DNA, 25 bp, Homo sapien
aatggcacagtggtttaatctctag

SEQ ID NO: 1397191 - DNA, 25 bp, Homo sapien
tatatgcatatgcacatgcctgtgt

SEQ ID NO: 1397192 - DNA, 25 bp, Homo sapien
tgtgttcagatacaacaaagctagc

SEQ ID NO: 1397193 - DNA, 25 bp, Homo sapien
tatttctctagtctgcagtggagca

SEQ ID NO: 1397194 - DNA, 25 bp, Homo sapien
caagtttgcagtaaaaggttcaata

SEQ ID NO: 1397195 - DNA, 25 bp, Homo sapien
caggtaacatatcctaaggagacaa

SEQ ID NO: 1397196 - DNA, 25 bp, Homo sapien
taacatatcctaaggagacaagagt

SEQ ID NO: 1397197 - DNA, 25 bp, Homo sapien
gtttgtttgagatgggttcttgttc

SEQ ID NO: 1397198 - DNA, 25 bp, Homo sapien
tgcccaggttggagtgatgtggcat

SEQ ID NO: 1397199 - DNA, 25 bp, Homo sapien
tgtttgagatgggttcttgttctgt

SEQ ID NO: 1397200 - DNA, 25 bp, Homo sapien
ttggagtgatgtggcatgatcttgg

SEQ ID NO: 1397201 - DNA, 25 bp, Homo sapien
gctcgcaggaagtatttctgtgtta

SEQ ID NO: 1397202 - DNA, 25 bp, Homo sapien
gagttgtcgatatgctcgcaggaag

SEQ ID NO: 1397203 - DNA, 25 bp, Homo sapien
gatatgctcgcaggaagtatttctg

SEQ ID NO: 1397204 - DNA, 25 bp, Homo sapien
cctggcccgagagttgtcgatatgc

SEQ ID NO: 1397205 - DNA, 25 bp, Homo sapien
gacttttagcaggattcagctttat

SEQ ID NO: 1397206 - DNA, 25 bp, Homo sapien
tatgtcagacttttagcaggattca

SEQ ID NO: 1397207 - DNA, 25 bp, Homo sapien
tgtcagacttttagcaggattcagc

SEQ ID NO: 1397208 - DNA, 25 bp, Homo sapien
tcagacttttagcaggattcagctt

SEQ ID NO: 1397209 - DNA, 25 bp, Homo sapien
gagtatagggtcttctcatcaacac

SEQ ID NO: 1397210 - DNA, 25 bp, Homo sapien
ttgtcgcctctgagtatagggtctt

SEQ ID NO: 1397211 - DNA, 25 bp, Homo sapien
tgtcgcctctgagtatagggtcttc

SEQ ID NO: 1397212 - DNA, 25 bp, Homo sapien
tctgagtatagggtcttctcatcaa

SEQ ID NO: 1397213 - DNA, 25 bp, Homo sapien
ttccttcaactttatcaagttggct

SEQ ID NO: 1397214 - DNA, 25 bp, Homo sapien
ccttcaactttatcaagttggctat

SEQ ID NO: 1397215 - DNA, 25 bp, Homo sapien
tatcaagttggctatttatcataac

SEQ ID NO: 1397216 - DNA, 25 bp, Homo sapien
aactttatcaagttggctatttatc

SEQ ID NO: 1397217 - DNA, 25 bp, Homo sapien
tgctgaatggtaaaagactaaaacc

SEQ ID NO: 1397218 - DNA, 25 bp, Homo sapien
tgggtgggacaaacactaagcatag

SEQ ID NO: 1397219 - DNA, 25 bp, Homo sapien
taagcatagagtttggcaggttctg

SEQ ID NO: 1397220 - DNA, 25 bp, Homo sapien
taaaaggaggtacaatgacaatctg

SEQ ID NO: 1397221 - DNA, 25 bp, Homo sapien
ttgcacacataccaacagtagcatc

SEQ ID NO: 1397222 - DNA, 25 bp, Homo sapien
cacacataccaacagtagcatcaat

SEQ ID NO: 1397223 - DNA, 25 bp, Homo sapien
cacataccaacagtagcatcaatca

SEQ ID NO: 1397224 - DNA, 25 bp, Homo sapien
tgatgttgagattggcagtcatgac

SEQ ID NO: 1397225 - DNA, 25 bp, Homo sapien
gcccaggccatcatcaaagcttctg

SEQ ID NO: 1397226 - DNA, 25 bp, Homo sapien
acatcacgtattcaaagcccaggcc

SEQ ID NO: 1397227 - DNA, 25 bp, Homo sapien
aaagcttctggtgaagagctgggcc

SEQ ID NO: 1397228 - DNA, 25 bp, Homo sapien
gtcattgtagaacatcacgtattca

SEQ ID NO: 1397229 - DNA, 25 bp, Homo sapien
gaatgggagcgtctcaatgaaacag

SEQ ID NO: 1397230 - DNA, 25 bp, Homo sapien
gaaaggaggtttccctggcagacat

SEQ ID NO: 1397231 - DNA, 25 bp, Homo sapien
gcaacagggtcagttcagcccaaca

SEQ ID NO: 1397232 - DNA, 25 bp, Homo sapien
tttgcccttgtggaattaacagtcc

SEQ ID NO: 1397233 - DNA, 25 bp, Homo sapien
cttgaactcccgaactcagggatcc

SEQ ID NO: 1397234 - DNA, 25 bp, Homo sapien
tgaactcccgaactcagggatccgc

SEQ ID NO: 1397235 - DNA, 25 bp, Homo sapien
ctcccgaactcagggatccgcctgc

SEQ ID NO: 1397236 - DNA, 25 bp, Homo sapien
aactcccgaactcagggatccgcct

SEQ ID NO: 1397237 - DNA, 25 bp, Homo sapien
ccacagcgcccggccattaaccagg

SEQ ID NO: 1397238 - DNA, 25 bp, Homo sapien
aattaaattattggcctacctctgg

SEQ ID NO: 1397239 - DNA, 25 bp, Homo sapien
tactctcaagaggatgtgtttgtcc

SEQ ID NO: 1397240 - DNA, 25 bp, Homo sapien
ggatagcactgaaaatagcattgga

SEQ ID NO: 1397241 - DNA, 25 bp, Homo sapien
ccaggacttcaggataagataggtg

SEQ ID NO: 1397242 - DNA, 25 bp, Homo sapien
caaaagctgagaggttagcggactc

SEQ ID NO: 1397243 - DNA, 25 bp, Homo sapien
tagtgagataggaagcgagaccaac

SEQ ID NO: 1397244 - DNA, 25 bp, Homo sapien
gaaaggagtcaacagctgtgccaaa

SEQ ID NO: 1397245 - DNA, 25 bp, Homo sapien
cgcacaaatggaaggcttggtctcc

SEQ ID NO: 1397246 - DNA, 25 bp, Homo sapien
aaacacagaaggataggaattgcta

SEQ ID NO: 1397247 - DNA, 25 bp, Homo sapien
gatgacagcctcaagacggagaggt

SEQ ID NO: 1397248 - DNA, 25 bp, Homo sapien
tactgggagatgtgggtataacctg

SEQ ID NO: 1397249 - DNA, 25 bp, Homo sapien
tataacctgagtgttctaagcttct

SEQ ID NO: 1397250 - DNA, 25 bp, Homo sapien
ctccaatctgcaaaatttattgtga

SEQ ID NO: 1397251 - DNA, 25 bp, Homo sapien
gtgactatagaaccataatcctgca

SEQ ID NO: 1397252 - DNA, 25 bp, Homo sapien
tgatgctcagatatattaatgggaa

SEQ ID NO: 1397253 - DNA, 25 bp, Homo sapien
ggtagtaactagtacttcaatctgt

SEQ ID NO: 1397254 - DNA, 25 bp, Homo sapien
tcttgaatccattcagtaggtgtac

SEQ ID NO: 1397255 - DNA, 25 bp, Homo sapien
gaagtcttgaatccattcagtaggt

SEQ ID NO: 1397256 - DNA, 25 bp, Homo sapien
caagaaaatgggttttgaagtcttg

SEQ ID NO: 1397257 - DNA, 25 bp, Homo sapien
aagtcttgaatccattcagtaggtg

SEQ ID NO: 1397258 - DNA, 25 bp, Homo sapien
gagcagtcttaggtccttgttccag

SEQ ID NO: 1397259 - DNA, 25 bp, Homo sapien
aaagagcagtcttaggtccttgttc

SEQ ID NO: 1397260 - DNA, 25 bp, Homo sapien
agagcagtcttaggtccttgttcca

SEQ ID NO: 1397261 - DNA, 25 bp, Homo sapien
gtcaaagagcagtcttaggtccttg

SEQ ID NO: 1397262 - DNA, 25 bp, Homo sapien
cttaagaatgacttcctcagaagaa

SEQ ID NO: 1397263 - DNA, 25 bp, Homo sapien
gaatgacttcctcagaagaaaatga

SEQ ID NO: 1397264 - DNA, 25 bp, Homo sapien
taagaatgacttcctcagaagaaaa

SEQ ID NO: 1397265 - DNA, 25 bp, Homo sapien
atgacttcctcagaagaaaatgacc

SEQ ID NO: 1397266 - DNA, 25 bp, Homo sapien
cctagaggacctggaagacaaagtg

SEQ ID NO: 1397267 - DNA, 25 bp, Homo sapien
gagcagaacaaagtgtatgcccaca

SEQ ID NO: 1397268 - DNA, 25 bp, Homo sapien
tttctgtagcaccaagcactgctat

SEQ ID NO: 1397269 - DNA, 25 bp, Homo sapien
ggactgctgcagttatcttggaaca

SEQ ID NO: 1397270 - DNA, 25 bp, Homo sapien
acaaacagacaaaaccacaatgcga

SEQ ID NO: 1397271 - DNA, 25 bp, Homo sapien
atgttgctgtggatgcagtgatcaa

SEQ ID NO: 1397272 - DNA, 25 bp, Homo sapien
gtggatgcagtgatcaaggaacatt

SEQ ID NO: 1397273 - DNA, 25 bp, Homo sapien
cagacaaaaccacaatgcgatacca

SEQ ID NO: 1397274 - DNA, 25 bp, Homo sapien
gcaccaatatctcacaaatcactag

SEQ ID NO: 1397275 - DNA, 25 bp, Homo sapien
aattatatgggagagctaagctatg

SEQ ID NO: 1397276 - DNA, 25 bp, Homo sapien
atgttctcaattatatgggagagct

SEQ ID NO: 1397277 - DNA, 25 bp, Homo sapien
tctcaattatatgggagagctaagc

SEQ ID NO: 1397278 - DNA, 25 bp, Homo sapien
gaacccatcaattccgacacagtat

SEQ ID NO: 1397279 - DNA, 25 bp, Homo sapien
caagaacccatcaattccgacacag

SEQ ID NO: 1397280 - DNA, 25 bp, Homo sapien
aagaacccatcaattccgacacagt

SEQ ID NO: 1397281 - DNA, 25 bp, Homo sapien
ccaagaacccatcaattccgacaca

SEQ ID NO: 1397282 - DNA, 25 bp, Homo sapien
tggtcaccagtgcactcacaagaca

SEQ ID NO: 1397283 - DNA, 25 bp, Homo sapien
ggacagcaacggcacctatttttct

SEQ ID NO: 1397284 - DNA, 25 bp, Homo sapien
gagccttttggtcttatggcattcc

SEQ ID NO: 1397285 - DNA, 25 bp, Homo sapien
tctttttacgatactggaggtggtc

SEQ ID NO: 1397286 - DNA, 25 bp, Homo sapien
cagctcgggtcgcggctcgcttccc

SEQ ID NO: 1397287 - DNA, 25 bp, Homo sapien
acagagcccccagcgtgcggaggcg

SEQ ID NO: 1397288 - DNA, 25 bp, Homo sapien
ccagcgtgcggaggcgcgcggcgca

SEQ ID NO: 1397289 - DNA, 25 bp, Homo sapien
tggcggcaggcacagagcccccagc

SEQ ID NO: 1397290 - DNA, 25 bp, Homo sapien
agcccccagcgtgcggaggcgcgcg

SEQ ID NO: 1397291 - DNA, 25 bp, Homo sapien
acaagagcgcgcgtgcgagttaacc

SEQ ID NO: 1397292 - DNA, 25 bp, Homo sapien
gccggagcggatcccggttatcgcc

SEQ ID NO: 1397293 - DNA, 25 bp, Homo sapien
tagggcatcgctgttgagtctatct

SEQ ID NO: 1397294 - DNA, 25 bp, Homo sapien
ttgctctagccctggacggcgcact

SEQ ID NO: 1397295 - DNA, 25 bp, Homo sapien
ttgtgtttggcatccactcatagca

SEQ ID NO: 1397296 - DNA, 25 bp, Homo sapien
gcccacactcctcctttgtgtttgg

SEQ ID NO: 1397297 - DNA, 25 bp, Homo sapien
tctgcaagttaggaattcgaaccca

SEQ ID NO: 1397298 - DNA, 25 bp, Homo sapien
atccactcatagcactcttttgcca

SEQ ID NO: 1397299 - DNA, 25 bp, Homo sapien
ttgagtctcaaacaacagctctgga

SEQ ID NO: 1397300 - DNA, 25 bp, Homo sapien
gaaggacttaagttgatgggcacca

SEQ ID NO: 1397301 - DNA, 25 bp, Homo sapien
taatgagacgcctggccaaagtggc

SEQ ID NO: 1397302 - DNA, 25 bp, Homo sapien
tcacgttggtgggtttgtgctgacc

SEQ ID NO: 1397303 - DNA, 25 bp, Homo sapien
tatggaacacgctgtctatgttgct

SEQ ID NO: 1397304 - DNA, 25 bp, Homo sapien
gatgtagctatggaacacgctgtct

SEQ ID NO: 1397305 - DNA, 25 bp, Homo sapien
ttgttgatgtagctatggaacacgc

SEQ ID NO: 1397306 - DNA, 25 bp, Homo sapien
tgtctatgttgcttccagcctcctc

SEQ ID NO: 1397307 - DNA, 25 bp, Homo sapien
aggcaaacttgttgagggtgttgat

SEQ ID NO: 1397308 - DNA, 25 bp, Homo sapien
ccttctcctgggtgctcacggcttg

SEQ ID NO: 1397309 - DNA, 25 bp, Homo sapien
cttggatgttggggtccacctccag

SEQ ID NO: 1397310 - DNA, 25 bp, Homo sapien
tcacggcttggatgttggggtccac

SEQ ID NO: 1397311 - DNA, 25 bp, Homo sapien
atggcggctgtgatgcctcccatac

SEQ ID NO: 1397312 - DNA, 25 bp, Homo sapien
catggcggctgtgatgcctcccata

SEQ ID NO: 1397313 - DNA, 25 bp, Homo sapien
gcaggcaccagcccattcttgtagg

SEQ ID NO: 1397314 - DNA, 25 bp, Homo sapien
gacaccccgtaggacttccaggtca

SEQ ID NO: 1397315 - DNA, 25 bp, Homo sapien
caggcaccagcccattcttgtagga

SEQ ID NO: 1397316 - DNA, 25 bp, Homo sapien
gacatgctggattctacgtggcctc

SEQ ID NO: 1397317 - DNA, 25 bp, Homo sapien
tcattactacgtccagggatgcagc

SEQ ID NO: 1397318 - DNA, 25 bp, Homo sapien
cttgtgaagcactagaacagagcct

SEQ ID NO: 1397319 - DNA, 25 bp, Homo sapien
ggctaaaatcttagaccacctgtgt

SEQ ID NO: 1397320 - DNA, 25 bp, Homo sapien
ttacaactcagccatgtagcagaat

SEQ ID NO: 1397321 - DNA, 25 bp, Homo sapien
gatgactgttggcataatggcagtt

SEQ ID NO: 1397322 - DNA, 25 bp, Homo sapien
tgttggcataatggcagttttgccc

SEQ ID NO: 1397323 - DNA, 25 bp, Homo sapien
gccatgtagcagaatgagtggaatt

SEQ ID NO: 1397324 - DNA, 25 bp, Homo sapien
gagccttctcctaatccttcaagtt

SEQ ID NO: 1397325 - DNA, 25 bp, Homo sapien
cttctcctaatccttcaagtttgag

SEQ ID NO: 1397326 - DNA, 25 bp, Homo sapien
tagagccttctcctaatccttcaag

SEQ ID NO: 1397327 - DNA, 25 bp, Homo sapien
tgtagagccttctcctaatccttca

SEQ ID NO: 1397328 - DNA, 25 bp, Homo sapien
ggaggagcgaactgctcatttctgc

SEQ ID NO: 1397329 - DNA, 25 bp, Homo sapien
gcagattccttaagcgaccctttgg

SEQ ID NO: 1397330 - DNA, 25 bp, Homo sapien
tacatttgctaagtgtcctgatctg

SEQ ID NO: 1397331 - DNA, 25 bp, Homo sapien
gaccctttgggacaactcttatcag

SEQ ID NO: 1397332 - DNA, 25 bp, Homo sapien
gtgaggcccgcaattagggaaaaga

SEQ ID NO: 1397333 - DNA, 25 bp, Homo sapien
atgcaatggtgaggcccgcaattag

SEQ ID NO: 1397334 - DNA, 25 bp, Homo sapien
tgcatgcaatggtgaggcccgcaat

SEQ ID NO: 1397335 - DNA, 25 bp, Homo sapien
tggtgaggcccgcaattagggaaaa

SEQ ID NO: 1397336 - DNA, 25 bp, Homo sapien
ctggtccaggtccttcattattttg

SEQ ID NO: 1397337 - DNA, 25 bp, Homo sapien
tttgccatctctacactggtccagg

SEQ ID NO: 1397338 - DNA, 25 bp, Homo sapien
attattttgtccacagccagagggt

SEQ ID NO: 1397339 - DNA, 25 bp, Homo sapien
cttcattattttgtccacagccaga

SEQ ID NO: 1397340 - DNA, 25 bp, Homo sapien
gaaatagaagtcaaaggttgcaatg

SEQ ID NO: 1397341 - DNA, 25 bp, Homo sapien
gatttgtactgctgagaactgtgta

SEQ ID NO: 1397342 - DNA, 25 bp, Homo sapien
gaggagcttatttgatttgtactgc

SEQ ID NO: 1397343 - DNA, 25 bp, Homo sapien
aggcaagaaatagaagtcaaaggtt

SEQ ID NO: 1397344 - DNA, 25 bp, Homo sapien
catattagccacgtgatgctgagtg

SEQ ID NO: 1397345 - DNA, 25 bp, Homo sapien
taatggcatggtcaaatcccttaca

SEQ ID NO: 1397346 - DNA, 25 bp, Homo sapien
tacactggaccagtttcaaaaggag

SEQ ID NO: 1397347 - DNA, 25 bp, Homo sapien
tgggcctttgtgtatcaacgatgaa

SEQ ID NO: 1397348 - DNA, 25 bp, Homo sapien
gacaggcaggcttacaatgagcaca

SEQ ID NO: 1397349 - DNA, 25 bp, Homo sapien
gcagtgagtctagatgtttccagaa

SEQ ID NO: 1397350 - DNA, 25 bp, Homo sapien
cattgttagttaaggcagagccaga

SEQ ID NO: 1397351 - DNA, 25 bp, Homo sapien
tcacaggactctacaaaagcagagg

SEQ ID NO: 1397352 - DNA, 25 bp, Homo sapien
gactaatgtgccgtttaccagtcag

SEQ ID NO: 1397353 - DNA, 25 bp, Homo sapien
tgcaatgttgcaccttcagttgaat

SEQ ID NO: 1397354 - DNA, 25 bp, Homo sapien
gaagggcttgcatttcagtctacta

SEQ ID NO: 1397355 - DNA, 25 bp, Homo sapien
taccagtcagatgacaagaggcagg

SEQ ID NO: 1397356 - DNA, 25 bp, Homo sapien
gtcttcatgcatctctcagtctgtc

SEQ ID NO: 1397357 - DNA, 25 bp, Homo sapien
ggtcttcatgcatctctcagtctgt

SEQ ID NO: 1397358 - DNA, 25 bp, Homo sapien
cagacacagataacccgatggaatt

SEQ ID NO: 1397359 - DNA, 25 bp, Homo sapien
tattcactagtggtgacctccacag

SEQ ID NO: 1397360 - DNA, 25 bp, Homo sapien
tccttcaggtgactacattcattta

SEQ ID NO: 1397361 - DNA, 25 bp, Homo sapien
tatgcagtcttatttcacctgcaga

SEQ ID NO: 1397362 - DNA, 25 bp, Homo sapien
agcctttatccccagcgaatttgtg

SEQ ID NO: 1397363 - DNA, 25 bp, Homo sapien
ccagcgaatttgtgaaatgtaaaca

SEQ ID NO: 1397364 - DNA, 25 bp, Homo sapien
tcaggtcctcctttgttaagtagcc

SEQ ID NO: 1397365 - DNA, 25 bp, Homo sapien
tccttttccatgagtactctcaggt

SEQ ID NO: 1397366 - DNA, 25 bp, Homo sapien
taaagacagttgcatctctggcagt

SEQ ID NO: 1397367 - DNA, 25 bp, Homo sapien
aaagacagttgcatctctggcagta

SEQ ID NO: 1397368 - DNA, 25 bp, Homo sapien
cattgtctagttcacttgagaagca

SEQ ID NO: 1397369 - DNA, 25 bp, Homo sapien
ccattgtctagttcacttgagaagc

SEQ ID NO: 1397370 - DNA, 25 bp, Homo sapien
gcagcagagcacttcaggatcaatt

SEQ ID NO: 1397371 - DNA, 25 bp, Homo sapien
gccttgcctggactggtactccaag

SEQ ID NO: 1397372 - DNA, 25 bp, Homo sapien
actgaactgggcgagtcacctctgg

SEQ ID NO: 1397373 - DNA, 25 bp, Homo sapien
agaaggacgtgggatcccaccccag

SEQ ID NO: 1397374 - DNA, 25 bp, Homo sapien
tggttgcccaactgagtcagccctg

SEQ ID NO: 1397375 - DNA, 25 bp, Homo sapien
taacgtactcttgcacctgaaacat

SEQ ID NO: 1397376 - DNA, 25 bp, Homo sapien
gacagatgtgggcttcctgcatcct

SEQ ID NO: 1397377 - DNA, 25 bp, Homo sapien
tgtctgagtgcagccaatggttgcc

SEQ ID NO: 1397378 - DNA, 25 bp, Homo sapien
taaagaatgcttaggcatcagccta

SEQ ID NO: 1397379 - DNA, 25 bp, Homo sapien
gaactgggcagcaaaggaacgtttc

SEQ ID NO: 1397380 - DNA, 25 bp, Homo sapien
ccagaaaataaacggcagggtgtca

SEQ ID NO: 1397381 - DNA, 25 bp, Homo sapien
gagttgaagcaatggatctggatcc

SEQ ID NO: 1397382 - DNA, 25 bp, Homo sapien
ggcagttcagtcgagaaacctctcc

SEQ ID NO: 1397383 - DNA, 25 bp, Homo sapien
gttcagtcgagaaacctctcctgca

SEQ ID NO: 1397384 - DNA, 25 bp, Homo sapien
cggcagttcagtcgagaaacctctc

SEQ ID NO: 1397385 - DNA, 25 bp, Homo sapien
cagttcagtcgagaaacctctcctg

SEQ ID NO: 1397386 - DNA, 25 bp, Homo sapien
cacgtggagtcctatcgacctcaga

SEQ ID NO: 1397387 - DNA, 25 bp, Homo sapien
tctcttcagtagaaacggtcctgct

SEQ ID NO: 1397388 - DNA, 25 bp, Homo sapien
gattagccctaggaggtccgtctgg

SEQ ID NO: 1397389 - DNA, 25 bp, Homo sapien
gaattacttgctggatgaccctgca

SEQ ID NO: 1397390 - DNA, 25 bp, Homo sapien
ctttgcggttattttctaatccctg

SEQ ID NO: 1397391 - DNA, 25 bp, Homo sapien
taatccctggtcaccatgatggagc

SEQ ID NO: 1397392 - DNA, 25 bp, Homo sapien
ttctccagagcctctttgcggttat

SEQ ID NO: 1397393 - DNA, 25 bp, Homo sapien
gttattttctaatccctggtcacca

SEQ ID NO: 1397394 - DNA, 25 bp, Homo sapien
atcacaaaagtgaggaatgatgtcc

SEQ ID NO: 1397395 - DNA, 25 bp, Homo sapien
aaaataatttcatctttcccgtgct

SEQ ID NO: 1397396 - DNA, 25 bp, Homo sapien
gaaactaaatgctctctccatcaaa

SEQ ID NO: 1397397 - DNA, 25 bp, Homo sapien
ctctctgagaaactaaatgctctct

SEQ ID NO: 1397398 - DNA, 25 bp, Homo sapien
tccagctccacttttggtgcttctc

SEQ ID NO: 1397399 - DNA, 25 bp, Homo sapien
cagacttccagtagggtggaccaac

SEQ ID NO: 1397400 - DNA, 25 bp, Homo sapien
caggagtagccatgcggtagaagaa

SEQ ID NO: 1397401 - DNA, 25 bp, Homo sapien
gctttctgcagtgtgctggatattc

SEQ ID NO: 1397402 - DNA, 25 bp, Homo sapien
cattgctttattactattggcaggt

SEQ ID NO: 1397403 - DNA, 25 bp, Homo sapien
ttgctttattactattggcaggtgg

SEQ ID NO: 1397404 - DNA, 25 bp, Homo sapien
tttattactattggcaggtggggcc

SEQ ID NO: 1397405 - DNA, 25 bp, Homo sapien
tgctttattactattggcaggtggg

SEQ ID NO: 1397406 - DNA, 25 bp, Homo sapien
ggaaggagtcatggcaagccatagc

SEQ ID NO: 1397407 - DNA, 25 bp, Homo sapien
tctgggaagggacagccttgaggaa

SEQ ID NO: 1397408 - DNA, 25 bp, Homo sapien
gtcatggcaagccatagctaggcca

SEQ ID NO: 1397409 - DNA, 25 bp, Homo sapien
tggcaagccatagctaggccaccaa

SEQ ID NO: 1397410 - DNA, 25 bp, Homo sapien
ttctgagaaatctagctgaccatca

SEQ ID NO: 1397411 - DNA, 25 bp, Homo sapien
aaattctgagaaatctagctgacca

SEQ ID NO: 1397412 - DNA, 25 bp, Homo sapien
agaaattctgagaaatctagctgac

SEQ ID NO: 1397413 - DNA, 25 bp, Homo sapien
tctgagaaatctagctgaccatcac

SEQ ID NO: 1397414 - DNA, 25 bp, Homo sapien
agtttcttcatcatgcggtcaagga

SEQ ID NO: 1397415 - DNA, 25 bp, Homo sapien
tcttcatcatgcggtcaaggacacc

SEQ ID NO: 1397416 - DNA, 25 bp, Homo sapien
catcatgcggtcaaggacaccaggg

SEQ ID NO: 1397417 - DNA, 25 bp, Homo sapien
ttcatcatgcggtcaaggacaccag

SEQ ID NO: 1397418 - DNA, 25 bp, Homo sapien
gacagggctgccatagaacctctgg

SEQ ID NO: 1397419 - DNA, 25 bp, Homo sapien
tatataaaagtacagcgggttcagg

SEQ ID NO: 1397420 - DNA, 25 bp, Homo sapien
tcaagcactcagcagacacatgtgg

SEQ ID NO: 1397421 - DNA, 25 bp, Homo sapien
cagatacagacttagagccactggt

SEQ ID NO: 1397422 - DNA, 25 bp, Homo sapien
ctttgtgaaggcagctagttctgta

SEQ ID NO: 1397423 - DNA, 25 bp, Homo sapien
gaactctgtcttggagagagtgtag

SEQ ID NO: 1397424 - DNA, 25 bp, Homo sapien
tcagggactcgatgcaccgctcagt

SEQ ID NO: 1397425 - DNA, 25 bp, Homo sapien
gagagtgtagttataaccatccttt

SEQ ID NO: 1397426 - DNA, 25 bp, Homo sapien
tggctgggagcggcgctgagagctc

SEQ ID NO: 1397427 - DNA, 25 bp, Homo sapien
gtggctgggagcggcgctgagagct

SEQ ID NO: 1397428 - DNA, 25 bp, Homo sapien
gggtctggagcctctcctcaaccca

SEQ ID NO: 1397429 - DNA, 25 bp, Homo sapien
ggcatgggtgagaaaggaattcact

SEQ ID NO: 1397430 - DNA, 25 bp, Homo sapien
tccaggtgtgcttcgaagtttagtc

SEQ ID NO: 1397431 - DNA, 25 bp, Homo sapien
cacatggttgtgtgattgtgtggct

SEQ ID NO: 1397432 - DNA, 25 bp, Homo sapien
tcatcagatccaagagaacgggctg

SEQ ID NO: 1397433 - DNA, 25 bp, Homo sapien
tactttgggtgtagggcaaggacat

SEQ ID NO: 1397434 - DNA, 25 bp, Homo sapien
tagagggcatttaacgaccttcttc

SEQ ID NO: 1397435 - DNA, 25 bp, Homo sapien
tcatactttgggtgtagggcaagga

SEQ ID NO: 1397436 - DNA, 25 bp, Homo sapien
cttctagagggcatttaacgacctt

SEQ ID NO: 1397437 - DNA, 25 bp, Homo sapien
gccagaacggtctgtgactttccag

SEQ ID NO: 1397438 - DNA, 25 bp, Homo sapien
tgccatccagtgtggtttcaagtct

SEQ ID NO: 1397439 - DNA, 25 bp, Homo sapien
caatgcaggttgatatattttactc

SEQ ID NO: 1397440 - DNA, 25 bp, Homo sapien
tattttactccgttgtcacacatgt

SEQ ID NO: 1397441 - DNA, 25 bp, Homo sapien
tctcagggcgactcgggtgtttttc

SEQ ID NO: 1397442 - DNA, 25 bp, Homo sapien
cataattgctgggatcaggattcgg

SEQ ID NO: 1397443 - DNA, 25 bp, Homo sapien
tgagcttctggaccctatgttggga

SEQ ID NO: 1397444 - DNA, 25 bp, Homo sapien
agttggtatctcacatcgttcctgg

SEQ ID NO: 1397445 - DNA, 25 bp, Homo sapien
caggattcgggtctctcacttggct

SEQ ID NO: 1397446 - DNA, 25 bp, Homo sapien
cttggtatctcctatcattcctggg

SEQ ID NO: 1397447 - DNA, 25 bp, Homo sapien
cattcatggtttgtaggctcaggtc

SEQ ID NO: 1397448 - DNA, 25 bp, Homo sapien
gagctgatctctgatccccaacttg

SEQ ID NO: 1397449 - DNA, 25 bp, Homo sapien
gcgggctcatgtctcttacctctta

SEQ ID NO: 1397450 - DNA, 25 bp, Homo sapien
gttctgggctcatatctctgacttg

SEQ ID NO: 1397451 - DNA, 25 bp, Homo sapien
gaggtctgagcactcatctgttgtc

SEQ ID NO: 1397452 - DNA, 25 bp, Homo sapien
tcctgtagcattggtgtctgatcac

SEQ ID NO: 1397453 - DNA, 25 bp, Homo sapien
gatgtctctcttcatccattggtgc

SEQ ID NO: 1397454 - DNA, 25 bp, Homo sapien
tatgcatgcatgataggcttttgtc

SEQ ID NO: 1397455 - DNA, 25 bp, Homo sapien
tcggctctgatctgtctgctgacgt

SEQ ID NO: 1397456 - DNA, 25 bp, Homo sapien
aatatcctgggactctcggctctga

SEQ ID NO: 1397457 - DNA, 25 bp, Homo sapien
tgtctggttgcctgcctttgagtcc

SEQ ID NO: 1397458 - DNA, 25 bp, Homo sapien
gacttctttgactactactgtctct

SEQ ID NO: 1397459 - DNA, 25 bp, Homo sapien
tcagaggcaatgaccattatcagtt

SEQ ID NO: 1397460 - DNA, 25 bp, Homo sapien
gcaatgaccattatcagtttggtgt

SEQ ID NO: 1397461 - DNA, 25 bp, Homo sapien
ttacttgatgacatctaagacttct

SEQ ID NO: 1397462 - DNA, 25 bp, Homo sapien
tacttaacaccctcatgttcttaca

SEQ ID NO: 1397463 - DNA, 25 bp, Homo sapien
caccctcatgttcttacacatgttg

SEQ ID NO: 1397464 - DNA, 25 bp, Homo sapien
tcctcctaagcagctctcttagtct

SEQ ID NO: 1397465 - DNA, 25 bp, Homo sapien
ttaacaccctcatgttcttacacat

SEQ ID NO: 1397466 - DNA, 25 bp, Homo sapien
tttcttttgtgggaactgtggctgg

SEQ ID NO: 1397467 - DNA, 25 bp, Homo sapien
aactgtggctggcagctctggatgg

SEQ ID NO: 1397468 - DNA, 25 bp, Homo sapien
gggcccctcgtctctatcccacttc

SEQ ID NO: 1397469 - DNA, 25 bp, Homo sapien
gatagacatggaaacttagccggtg

SEQ ID NO: 1397470 - DNA, 25 bp, Homo sapien
tccaggagactagaggtggaggctg

SEQ ID NO: 1397471 - DNA, 25 bp, Homo sapien
gttcttttctatcaagctcttgagg

SEQ ID NO: 1397472 - DNA, 25 bp, Homo sapien
tgtgaactggcgacttcatggtcct

SEQ ID NO: 1397473 - DNA, 25 bp, Homo sapien
tcccaaaagaaaggatgcctccagc

SEQ ID NO: 1397474 - DNA, 25 bp, Homo sapien
gtccaaacatcatggagttgcaagc

SEQ ID NO: 1397475 - DNA, 25 bp, Homo sapien
tcagatgagggatcctcacggggct

SEQ ID NO: 1397476 - DNA, 25 bp, Homo sapien
atggagttgcaagcagacagcatgg

SEQ ID NO: 1397477 - DNA, 25 bp, Homo sapien
tgcctctcagatgagggatcctcac

SEQ ID NO: 1397478 - DNA, 25 bp, Homo sapien
agaggagtgggaaacggcccacgat

SEQ ID NO: 1397479 - DNA, 25 bp, Homo sapien
caagacaagcaggttgccgatggca

SEQ ID NO: 1397480 - DNA, 25 bp, Homo sapien
tgcaggagccgctgggtgagcccgg

SEQ ID NO: 1397481 - DNA, 25 bp, Homo sapien
gaaggcccaagatgtcgctgacggt

SEQ ID NO: 1397482 - DNA, 25 bp, Homo sapien
acaagttgaccatggcatgctctgg

SEQ ID NO: 1397483 - DNA, 25 bp, Homo sapien
gcatacaagttgaccatggcatgct

SEQ ID NO: 1397484 - DNA, 25 bp, Homo sapien
tcagcatacaagttgaccatggcat

SEQ ID NO: 1397485 - DNA, 25 bp, Homo sapien
catacaagttgaccatggcatgctc

SEQ ID NO: 1397486 - DNA, 25 bp, Homo sapien
catataggtaaacacttagtagact

SEQ ID NO: 1397487 - DNA, 25 bp, Homo sapien
aatttaataccctcatcaaaccata

SEQ ID NO: 1397488 - DNA, 25 bp, Homo sapien
cctcatcaaaccatataggtaaaca

SEQ ID NO: 1397489 - DNA, 25 bp, Homo sapien
ggtaaacacttagtagactcactgg

SEQ ID NO: 1397490 - DNA, 25 bp, Homo sapien
tccctttgtagtaccagcctctctc

SEQ ID NO: 1397491 - DNA, 25 bp, Homo sapien
ctccctttgtagtaccagcctctct

SEQ ID NO: 1397492 - DNA, 25 bp, Homo sapien
cctccctttgtagtaccagcctctc

SEQ ID NO: 1397493 - DNA, 25 bp, Homo sapien
gaagacccctcatcactctgtgtga

SEQ ID NO: 1397494 - DNA, 25 bp, Homo sapien
tgggagtccccttgcacaggcagtt

SEQ ID NO: 1397495 - DNA, 25 bp, Homo sapien
cagtgaagtcttcatccagggcacc

SEQ ID NO: 1397496 - DNA, 25 bp, Homo sapien
cagcaggactctcatcaagtggaag

SEQ ID NO: 1397497 - DNA, 25 bp, Homo sapien
tctgccagtcagtgttgccccgtta

SEQ ID NO: 1397498 - DNA, 25 bp, Homo sapien
aagtccccaaactcgccctggatga

SEQ ID NO: 1397499 - DNA, 25 bp, Homo sapien
ggaatgtctcaattacacagaggac

SEQ ID NO: 1397500 - DNA, 25 bp, Homo sapien
gatgagttgtttcagctctctgcca

SEQ ID NO: 1397501 - DNA, 25 bp, Homo sapien
ctagttcacaagcgagagcaggtag

SEQ ID NO: 1397502 - DNA, 25 bp, Homo sapien
agttcacaagcgagagcaggtagaa

SEQ ID NO: 1397503 - DNA, 25 bp, Homo sapien
ttcacaagcgagagcaggtagaacg

SEQ ID NO: 1397504 - DNA, 25 bp, Homo sapien
cacaagcgagagcaggtagaacgtg

SEQ ID NO: 1397505 - DNA, 25 bp, Homo sapien
tattggccctagagtaagacagatg

SEQ ID NO: 1397506 - DNA, 25 bp, Homo sapien
ggtcttgtcaaagggcctctagaaa

SEQ ID NO: 1397507 - DNA, 25 bp, Homo sapien
gctctatgtgatctcttattggccc

SEQ ID NO: 1397508 - DNA, 25 bp, Homo sapien
tcaaatgattgtgggcaaatgggtc

SEQ ID NO: 1397509 - DNA, 25 bp, Homo sapien
tacctggaatttgtgctaactatgc

SEQ ID NO: 1397510 - DNA, 25 bp, Homo sapien
tatcagagagttttcccacaaccag

SEQ ID NO: 1397511 - DNA, 25 bp, Homo sapien
tggcaggtgtcaagatattggcaac

SEQ ID NO: 1397512 - DNA, 25 bp, Homo sapien
cattttcccgtgctcgaagctttgg

SEQ ID NO: 1397513 - DNA, 25 bp, Homo sapien
gacactggcaaactgatgagtgccg

SEQ ID NO: 1397514 - DNA, 25 bp, Homo sapien
tgtcagactcttggctgcgcagctg

SEQ ID NO: 1397515 - DNA, 25 bp, Homo sapien
tactcatagagagggctggagcgca

SEQ ID NO: 1397516 - DNA, 25 bp, Homo sapien
taagggcggtattgagatctctgct

SEQ ID NO: 1397517 - DNA, 25 bp, Homo sapien
tctgtagcgttcttggcggcgcagc

SEQ ID NO: 1397518 - DNA, 25 bp, Homo sapien
ttcacggaattttctgtcgcggtcg

SEQ ID NO: 1397519 - DNA, 25 bp, Homo sapien
gctccgtttcttggcgcagctgttc

SEQ ID NO: 1397520 - DNA, 25 bp, Homo sapien
tctctcgttcctgacggcggagctg

SEQ ID NO: 1397521 - DNA, 25 bp, Homo sapien
gcagctgttcgtcttcgcggaattt

SEQ ID NO: 1397522 - DNA, 25 bp, Homo sapien
cagctgttcgtcttcgcggaatttt

SEQ ID NO: 1397523 - DNA, 25 bp, Homo sapien
gagcagctgttcgtcttcgcggaat

SEQ ID NO: 1397524 - DNA, 25 bp, Homo sapien
tggagcagctgttcgtcttcgcgga

SEQ ID NO: 1397525 - DNA, 25 bp, Homo sapien
cccttgttcctgatggcgcagttcc

SEQ ID NO: 1397526 - DNA, 25 bp, Homo sapien
tctgtctgtctcttgacggcgtctc

SEQ ID NO: 1397527 - DNA, 25 bp, Homo sapien
actgcgcagttcctgttcgcggaat

SEQ ID NO: 1397528 - DNA, 25 bp, Homo sapien
ctctctggttcctgactgcgcagtt

SEQ ID NO: 1397529 - DNA, 25 bp, Homo sapien
gctgggaatcttccaactgccggaa

SEQ ID NO: 1397530 - DNA, 25 bp, Homo sapien
tgggaaatgcctgtcgcgctgctgc

SEQ ID NO: 1397531 - DNA, 25 bp, Homo sapien
tcctgtcgcgccttttggcttcctt

SEQ ID NO: 1397532 - DNA, 25 bp, Homo sapien
tcacgatctcgctcttgctgttcac

SEQ ID NO: 1397533 - DNA, 25 bp, Homo sapien
tgttatcacgaactgcattttcttt

SEQ ID NO: 1397534 - DNA, 25 bp, Homo sapien
taaaccttgttatcacgaactgcat

SEQ ID NO: 1397535 - DNA, 25 bp, Homo sapien
ctttgcagtaaaccttgttatcacg

SEQ ID NO: 1397536 - DNA, 25 bp, Homo sapien
tgcagtaaaccttgttatcacgaac

SEQ ID NO: 1397537 - DNA, 25 bp, Homo sapien
gccatttcagatcactgcgctgatc

SEQ ID NO: 1397538 - DNA, 25 bp, Homo sapien
tttcagatcactgcgctgatcctca

SEQ ID NO: 1397539 - DNA, 25 bp, Homo sapien
catttcagatcactgcgctgatcct

SEQ ID NO: 1397540 - DNA, 25 bp, Homo sapien
ggttcccactgccatttcagatcac

SEQ ID NO: 1397541 - DNA, 25 bp, Homo sapien
cccgctcctggcgccttttctcctg

SEQ ID NO: 1397542 - DNA, 25 bp, Homo sapien
ccgctcctggcgccttttctcctgt

SEQ ID NO: 1397543 - DNA, 25 bp, Homo sapien
gctgcagctcgtcttttttgcggta

SEQ ID NO: 1397544 - DNA, 25 bp, Homo sapien
tcttcctcgcggtattgtctctcct

SEQ ID NO: 1397545 - DNA, 25 bp, Homo sapien
ctcttgtagggctggcttggcgtac

SEQ ID NO: 1397546 - DNA, 25 bp, Homo sapien
tatccttccgatattgcctttcccg

SEQ ID NO: 1397547 - DNA, 25 bp, Homo sapien
cgtgtggcggcgtctcttcctttct

SEQ ID NO: 1397548 - DNA, 25 bp, Homo sapien
agcgtgtggcggcgtctcttccttt

SEQ ID NO: 1397549 - DNA, 25 bp, Homo sapien
tgtggcggcgtctcttcctttcttc

SEQ ID NO: 1397550 - DNA, 25 bp, Homo sapien
gcgtgtggcggcgtctcttcctttc

SEQ ID NO: 1397551 - DNA, 25 bp, Homo sapien
cctggagctgttgggcacgctcccg

SEQ ID NO: 1397552 - DNA, 25 bp, Homo sapien
actgccatgtgaagtcccggcgctg

SEQ ID NO: 1397553 - DNA, 25 bp, Homo sapien
ctccatttttggtcgcggcgctgct

SEQ ID NO: 1397554 - DNA, 25 bp, Homo sapien
ggagaaaccgttgttcccgctgctg

SEQ ID NO: 1397555 - DNA, 25 bp, Homo sapien
cctgctcgcgtcttagttgttgctc

SEQ ID NO: 1397556 - DNA, 25 bp, Homo sapien
ttcgggatgcggctcttaatccgct

SEQ ID NO: 1397557 - DNA, 25 bp, Homo sapien
gttgttgctcgctcctcaaccgctg

SEQ ID NO: 1397558 - DNA, 25 bp, Homo sapien
tagactttgctttgccgtgcgtcgg

SEQ ID NO: 1397559 - DNA, 25 bp, Homo sapien
agctcttgccgctccagcttccgta

SEQ ID NO: 1397560 - DNA, 25 bp, Homo sapien
tggagctctctttgccgctgcggct

SEQ ID NO: 1397561 - DNA, 25 bp, Homo sapien
ttagttgctgctcgcgcctcagcct

SEQ ID NO: 1397562 - DNA, 25 bp, Homo sapien
tgctcgtgcttctgctcgtgcctct

SEQ ID NO: 1397563 - DNA, 25 bp, Homo sapien
ttcttccttccggagcactgtctcg

SEQ ID NO: 1397564 - DNA, 25 bp, Homo sapien
tggaacactctgtcttgccgctctc

SEQ ID NO: 1397565 - DNA, 25 bp, Homo sapien
tgctcttcgtctggaaactcctcag

SEQ ID NO: 1397566 - DNA, 25 bp, Homo sapien
ctgctgtttctcctcgcggcccttc

SEQ ID NO: 1397567 - DNA, 25 bp, Homo sapien
tgtcgcgctgttcaagtcgctcttg

SEQ ID NO: 1397568 - DNA, 25 bp, Homo sapien
tccagttgtctgtcccggggctcga

SEQ ID NO: 1397569 - DNA, 25 bp, Homo sapien
ttgtaacaggctctcctttccgtca

SEQ ID NO: 1397570 - DNA, 25 bp, Homo sapien
ttcttgcctgcgatcttgtaacagg

SEQ ID NO: 1397571 - DNA, 25 bp, Homo sapien
tggcctggccgagagcatagtaaca

SEQ ID NO: 1397572 - DNA, 25 bp, Homo sapien
gaagttccaggatcagatctaccgt

SEQ ID NO: 1397573 - DNA, 25 bp, Homo sapien
tctaccgtcttagggtcatgtggtc

SEQ ID NO: 1397574 - DNA, 25 bp, Homo sapien
ttgaaatcgacacgcccattactgt

SEQ ID NO: 1397575 - DNA, 25 bp, Homo sapien
ctttcttagttaatgctgctccatc

SEQ ID NO: 1397576 - DNA, 25 bp, Homo sapien
catgagagacatactgattgaaaat

SEQ ID NO: 1397577 - DNA, 25 bp, Homo sapien
atcatgagagacatactgattgaaa

SEQ ID NO: 1397578 - DNA, 25 bp, Homo sapien
tttcttagttaatgctgctccatca

SEQ ID NO: 1397579 - DNA, 25 bp, Homo sapien
tgacaccacaggcaagtgtactggg

SEQ ID NO: 1397580 - DNA, 25 bp, Homo sapien
tcgacagtgcttgctgacaccacag

SEQ ID NO: 1397581 - DNA, 25 bp, Homo sapien
caccacaggcaagtgtactgggtaa

SEQ ID NO: 1397582 - DNA, 25 bp, Homo sapien
agaggaagaagtcgacagtgcttgc

SEQ ID NO: 1397583 - DNA, 25 bp, Homo sapien
cgatgagtgaaaatccagagatatt

SEQ ID NO: 1397584 - DNA, 25 bp, Homo sapien
gtcgatgagtgaaaatccagagata

SEQ ID NO: 1397585 - DNA, 25 bp, Homo sapien
tcagtcgatgagtgaaaatccagag

SEQ ID NO: 1397586 - DNA, 25 bp, Homo sapien
cagtcgatgagtgaaaatccagaga

SEQ ID NO: 1397587 - DNA, 25 bp, Homo sapien
cacctctccataggaggacagggag

SEQ ID NO: 1397588 - DNA, 25 bp, Homo sapien
ctggcttgctgtgctgtacttcggg

SEQ ID NO: 1397589 - DNA, 25 bp, Homo sapien
caaggcacctctccataggaggaca

SEQ ID NO: 1397590 - DNA, 25 bp, Homo sapien
tgttggcacaagctgggaggatgtt

SEQ ID NO: 1397591 - DNA, 25 bp, Homo sapien
gacgatgagattctcagcccctggc

SEQ ID NO: 1397592 - DNA, 25 bp, Homo sapien
caggtggacgatgagattctcagcc

SEQ ID NO: 1397593 - DNA, 25 bp, Homo sapien
cttcatctccaatgaggcagaccct

SEQ ID NO: 1397594 - DNA, 25 bp, Homo sapien
tcatctccaatgaggcagaccctga

SEQ ID NO: 1397595 - DNA, 25 bp, Homo sapien
caggagctgcaagatgtctattata

SEQ ID NO: 1397596 - DNA, 25 bp, Homo sapien
ctattataatctgtgctgcctctaa

SEQ ID NO: 1397597 - DNA, 25 bp, Homo sapien
gtctattataatctgtgctgcctct

SEQ ID NO: 1397598 - DNA, 25 bp, Homo sapien
ttataatctgtgctgcctctaatgc

SEQ ID NO: 1397599 - DNA, 25 bp, Homo sapien
ttgaaacagcactgaatatagccat

SEQ ID NO: 1397600 - DNA, 25 bp, Homo sapien
tagccattcagtatccagaagaagg

SEQ ID NO: 1397601 - DNA, 25 bp, Homo sapien
gaagaaggccatccatgtcaaagat

SEQ ID NO: 1397602 - DNA, 25 bp, Homo sapien
cagggactttacaacccagctgtat

SEQ ID NO: 1397603 - DNA, 25 bp, Homo sapien
tatgttctcggctcttgtagcagcc

SEQ ID NO: 1397604 - DNA, 25 bp, Homo sapien
tctggtgtggaataagagcctggca

SEQ ID NO: 1397605 - DNA, 25 bp, Homo sapien
tctagactatgaggcttgaaattcc

SEQ ID NO: 1397606 - DNA, 25 bp, Homo sapien
tgggtccattcagctctagtgatag

SEQ ID NO: 1397607 - DNA, 25 bp, Homo sapien
aggtctcatctacacagagggcaaa

SEQ ID NO: 1397608 - DNA, 25 bp, Homo sapien
caatttaccacctagatttcactga

SEQ ID NO: 1397609 - DNA, 25 bp, Homo sapien
tagggagaagtgttctacctttcaa

SEQ ID NO: 1397610 - DNA, 25 bp, Homo sapien
aatcagaaaaccctagaattgctgc

SEQ ID NO: 1397611 - DNA, 25 bp, Homo sapien
gcagggtgaccacgctgttctctgg

SEQ ID NO: 1397612 - DNA, 25 bp, Homo sapien
caaaagcccttacgtgaatgctagt

SEQ ID NO: 1397613 - DNA, 25 bp, Homo sapien
ggtgctcacatagcctagtatgggt

SEQ ID NO: 1397614 - DNA, 25 bp, Homo sapien
ggaacagtagctcccttggcagggt

SEQ ID NO: 1397615 - DNA, 25 bp, Homo sapien
tctgctcatctttatgggttcgcct

SEQ ID NO: 1397616 - DNA, 25 bp, Homo sapien
gtctcgtctctgacggttctgcttg

SEQ ID NO: 1397617 - DNA, 25 bp, Homo sapien
gctcatctttatgggttcgcctgtc

SEQ ID NO: 1397618 - DNA, 25 bp, Homo sapien
gtctctgacggttctgcttgtcttc

SEQ ID NO: 1397619 - DNA, 25 bp, Homo sapien
ggtgatgttggctatcctcttcagg

SEQ ID NO: 1397620 - DNA, 25 bp, Homo sapien
caaagtggtctttcttgttggattt

SEQ ID NO: 1397621 - DNA, 25 bp, Homo sapien
tgctcactactgcatgattgccagt

SEQ ID NO: 1397622 - DNA, 25 bp, Homo sapien
tgtctatcccaagtttgatggccct

SEQ ID NO: 1397623 - DNA, 25 bp, Homo sapien
gagaaccctggccttgtcggtccat

SEQ ID NO: 1397624 - DNA, 25 bp, Homo sapien
tgatcataatgataacactggcctt

SEQ ID NO: 1397625 - DNA, 25 bp, Homo sapien
tgtcctggagtctgttgacttagcc

SEQ ID NO: 1397626 - DNA, 25 bp, Homo sapien
tgctgtgagtccctagactggaatc

SEQ ID NO: 1397627 - DNA, 25 bp, Homo sapien
gactgtccacaataagagcctgatt

SEQ ID NO: 1397628 - DNA, 25 bp, Homo sapien
gtctctctgactgatcaaagctgaa

SEQ ID NO: 1397629 - DNA, 25 bp, Homo sapien
taccagagctggagtcttgactttg

SEQ ID NO: 1397630 - DNA, 25 bp, Homo sapien
aaagatatgtccctgccatttagcc

SEQ ID NO: 1397631 - DNA, 25 bp, Homo sapien
ccctttcttgctgtgaggtcctgcc

SEQ ID NO: 1397632 - DNA, 25 bp, Homo sapien
tgccccctttcttgctgtgaggtcc

SEQ ID NO: 1397633 - DNA, 25 bp, Homo sapien
tcctgccccctttcttgctgtgagg

SEQ ID NO: 1397634 - DNA, 25 bp, Homo sapien
ccccctttcttgctgtgaggtcctg

SEQ ID NO: 1397635 - DNA, 25 bp, Homo sapien
tattgtctagcttatgatagcaggc

SEQ ID NO: 1397636 - DNA, 25 bp, Homo sapien
tgtctagcttatgatagcaggcttg

SEQ ID NO: 1397637 - DNA, 25 bp, Homo sapien
ctagcttatgatagcaggcttggac

SEQ ID NO: 1397638 - DNA, 25 bp, Homo sapien
ttattgtctagcttatgatagcagg

SEQ ID NO: 1397639 - DNA, 25 bp, Homo sapien
atctaagaggttcaagatggtttcc

SEQ ID NO: 1397640 - DNA, 25 bp, Homo sapien
gatggtttccacagtctctgggtca

SEQ ID NO: 1397641 - DNA, 25 bp, Homo sapien
caactggaacaccaacaagaggtac

SEQ ID NO: 1397642 - DNA, 25 bp, Homo sapien
tccatctcggtcttgatctaagagg

SEQ ID NO: 1397643 - DNA, 25 bp, Homo sapien
aactcagccaagagcagttgtttca

SEQ ID NO: 1397644 - DNA, 25 bp, Homo sapien
caaactcagccaagagcagttgttt

SEQ ID NO: 1397645 - DNA, 25 bp, Homo sapien
aaactcagccaagagcagttgtttc

SEQ ID NO: 1397646 - DNA, 25 bp, Homo sapien
cttgcatagtaaggcacagtcccca

SEQ ID NO: 1397647 - DNA, 25 bp, Homo sapien
tcacactgagtatgctattcaggag

SEQ ID NO: 1397648 - DNA, 25 bp, Homo sapien
gcatatttgtggaatacgtcaatca

SEQ ID NO: 1397649 - DNA, 25 bp, Homo sapien
acagtccccattccctttggcatat

SEQ ID NO: 1397650 - DNA, 25 bp, Homo sapien
taatcagttaggtccacattggcca

SEQ ID NO: 1397651 - DNA, 25 bp, Homo sapien
aagtttaagaagtgagagagcccct

SEQ ID NO: 1397652 - DNA, 25 bp, Homo sapien
gagacttgagcattgctgggcccat

SEQ ID NO: 1397653 - DNA, 25 bp, Homo sapien
gaaagtctctcttcacggtctaagg

SEQ ID NO: 1397654 - DNA, 25 bp, Homo sapien
tccactatgggagactaagctattc

SEQ ID NO: 1397655 - DNA, 25 bp, Homo sapien
tcttgagagccttgtagatactacc

SEQ ID NO: 1397656 - DNA, 25 bp, Homo sapien
ggaattaagtctcagacctccccag

SEQ ID NO: 1397657 - DNA, 25 bp, Homo sapien
tgggatgcctaggacacattgaagt

SEQ ID NO: 1397658 - DNA, 25 bp, Homo sapien
gattcatcagggcttctaaagatca

SEQ ID NO: 1397659 - DNA, 25 bp, Homo sapien
aatgtggtcatgtgtaccgggagca

SEQ ID NO: 1397660 - DNA, 25 bp, Homo sapien
agaagcagattcatcagggcttcta

SEQ ID NO: 1397661 - DNA, 25 bp, Homo sapien
gcagattcatcagggcttctaaaga

SEQ ID NO: 1397662 - DNA, 25 bp, Homo sapien
caggcatagtaggatgccagatcca

SEQ ID NO: 1397663 - DNA, 25 bp, Homo sapien
gcatagtaggatgccagatccaggc

SEQ ID NO: 1397664 - DNA, 25 bp, Homo sapien
tcaggcatagtaggatgccagatcc

SEQ ID NO: 1397665 - DNA, 25 bp, Homo sapien
atagtaggatgccagatccaggcat

SEQ ID NO: 1397666 - DNA, 25 bp, Homo sapien
cctctgcagggtgttcatgccccat

SEQ ID NO: 1397667 - DNA, 25 bp, Homo sapien
tctcagtagttctcttgttcttgtg

SEQ ID NO: 1397668 - DNA, 25 bp, Homo sapien
ggaagcttgatgattgtcagccaca

SEQ ID NO: 1397669 - DNA, 25 bp, Homo sapien
cagggaagcttgatgattgtcagcc

SEQ ID NO: 1397670 - DNA, 25 bp, Homo sapien
tcagggaagcttgatgattgtcagc

SEQ ID NO: 1397671 - DNA, 25 bp, Homo sapien
cttcataatctgtcctgtcttctat

SEQ ID NO: 1397672 - DNA, 25 bp, Homo sapien
tcttcataatctgtcctgtcttcta

SEQ ID NO: 1397673 - DNA, 25 bp, Homo sapien
ggtcgcggacctcggccagaacatc

SEQ ID NO: 1397674 - DNA, 25 bp, Homo sapien
cctacaatacgaggagcccttggag

SEQ ID NO: 1397675 - DNA, 25 bp, Homo sapien
gccccgttctctgttaggatcacgg

SEQ ID NO: 1397676 - DNA, 25 bp, Homo sapien
caccaaagggtcccagcgcctagag

SEQ ID NO: 1397677 - DNA, 25 bp, Homo sapien
taacggagcggactttgggatccag

SEQ ID NO: 1397678 - DNA, 25 bp, Homo sapien
cccggactgaggttgtgcttggctt

SEQ ID NO: 1397679 - DNA, 25 bp, Homo sapien
tcccgtcgcgccaagggaagtagga

SEQ ID NO: 1397680 - DNA, 25 bp, Homo sapien
tcagccggagcactggtgaacacag

SEQ ID NO: 1397681 - DNA, 25 bp, Homo sapien
gtgccttggtactccccaaaagtca

SEQ ID NO: 1397682 - DNA, 25 bp, Homo sapien
aaaagttgctactgctaacaaggcc

SEQ ID NO: 1397683 - DNA, 25 bp, Homo sapien
aaagttgctactgctaacaaggccc

SEQ ID NO: 1397684 - DNA, 25 bp, Homo sapien
agttgctactgctaacaaggcccat

SEQ ID NO: 1397685 - DNA, 25 bp, Homo sapien
aagttgctactgctaacaaggccca

SEQ ID NO: 1397686 - DNA, 25 bp, Homo sapien
ctacagtagtaggtggaaagcattg

SEQ ID NO: 1397687 - DNA, 25 bp, Homo sapien
tcaggtggaaacgttattgaactac

SEQ ID NO: 1397688 - DNA, 25 bp, Homo sapien
tatttcccaatattgagcagcctct

SEQ ID NO: 1397689 - DNA, 25 bp, Homo sapien
taaggaactatgtagcagtgacaga

SEQ ID NO: 1397690 - DNA, 25 bp, Homo sapien
ttgctcactggcttgggaaaagacc

SEQ ID NO: 1397691 - DNA, 25 bp, Homo sapien
cactggcttgggaaaagaccctgat

SEQ ID NO: 1397692 - DNA, 25 bp, Homo sapien
cttgatggttttgataagtaaagac

SEQ ID NO: 1397693 - DNA, 25 bp, Homo sapien
taagtaaagacactaccgctgctgc

SEQ ID NO: 1397694 - DNA, 25 bp, Homo sapien
tgcctaacagtctttggaaggaacc

SEQ ID NO: 1397695 - DNA, 25 bp, Homo sapien
ggaaggaaccccataacaagatata

SEQ ID NO: 1397696 - DNA, 25 bp, Homo sapien
caaagctttgtatctaggactggta

SEQ ID NO: 1397697 - DNA, 25 bp, Homo sapien
gaaatgtaaggttagctttggcacc

SEQ ID NO: 1397698 - DNA, 25 bp, Homo sapien
tagggtgaagtgctactaggaaaac

SEQ ID NO: 1397699 - DNA, 25 bp, Homo sapien
gccacttccatgctgactataacca

SEQ ID NO: 1397700 - DNA, 25 bp, Homo sapien
taaaagtagcacctctgctcttgga

SEQ ID NO: 1397701 - DNA, 25 bp, Homo sapien
cccgtgtcggccgtggctaagagac

SEQ ID NO: 1397702 - DNA, 25 bp, Homo sapien
tgagctagactcgtggtgaccaaag

SEQ ID NO: 1397703 - DNA, 25 bp, Homo sapien
tgactgtaactagaggactgccctg

SEQ ID NO: 1397704 - DNA, 25 bp, Homo sapien
gccagacccatgctgactgtaacta

SEQ ID NO: 1397705 - DNA, 25 bp, Homo sapien
ggactgccctgagctagactcgtgg

SEQ ID NO: 1397706 - DNA, 25 bp, Homo sapien
cagacccatgttggccactgctgga

SEQ ID NO: 1397707 - DNA, 25 bp, Homo sapien
catgttggccactgctggaagaccg

SEQ ID NO: 1397708 - DNA, 25 bp, Homo sapien
acccatgttggccactgctggaaga

SEQ ID NO: 1397709 - DNA, 25 bp, Homo sapien
tgttggccactgctggaagaccgac

SEQ ID NO: 1397710 - DNA, 25 bp, Homo sapien
tgcccatgggtagaggaatgacctg

SEQ ID NO: 1397711 - DNA, 25 bp, Homo sapien
tgctgaccgtggctggaagactgac

SEQ ID NO: 1397712 - DNA, 25 bp, Homo sapien
ccatgtcggccgtagctgggagact

SEQ ID NO: 1397713 - DNA, 25 bp, Homo sapien
gatccatgttgaccgtagccagagg

SEQ ID NO: 1397714 - DNA, 25 bp, Homo sapien
tgctgaccgtggctggaagactgac

SEQ ID NO: 1397715 - DNA, 25 bp, Homo sapien
gactgtcctgacctagagccgtgtt

SEQ ID NO: 1397716 - DNA, 25 bp, Homo sapien
catgctgaccatagcgggaagacga

SEQ ID NO: 1397717 - DNA, 25 bp, Homo sapien
tagagccgtgttgtccgtagccaga

SEQ ID NO: 1397718 - DNA, 25 bp, Homo sapien
tgagctagactcgtggtgaccaaag

SEQ ID NO: 1397719 - DNA, 25 bp, Homo sapien
tgactgtaactagaggactgccctg

SEQ ID NO: 1397720 - DNA, 25 bp, Homo sapien
gccagacccatgctgactgtaacta

SEQ ID NO: 1397721 - DNA, 25 bp, Homo sapien
ggactgccctgagctagactcgtgg

SEQ ID NO: 1397722 - DNA, 25 bp, Homo sapien
gcccatgttggccactgctggaaga

SEQ ID NO: 1397723 - DNA, 25 bp, Homo sapien
ctaagccaggcccatgttggccact

SEQ ID NO: 1397724 - DNA, 25 bp, Homo sapien
taagccaggcccatgttggccactg

SEQ ID NO: 1397725 - DNA, 25 bp, Homo sapien
tgttggccactgctggaagaccgac

SEQ ID NO: 1397726 - DNA, 25 bp, Homo sapien
cagctcgatgactgtcctgatgcag

SEQ ID NO: 1397727 - DNA, 25 bp, Homo sapien
cacagctcgatgactgtcctgatgc

SEQ ID NO: 1397728 - DNA, 25 bp, Homo sapien
gctcgatgactgtcctgatgcagaa

SEQ ID NO: 1397729 - DNA, 25 bp, Homo sapien
ctcgatgactgtcctgatgcagaac

SEQ ID NO: 1397730 - DNA, 25 bp, Homo sapien
tgctgaccgtggctggaagactgac

SEQ ID NO: 1397731 - DNA, 25 bp, Homo sapien
tagagccgtgttgtccgtagccaga

SEQ ID NO: 1397732 - DNA, 25 bp, Homo sapien
catgctgaccatagcgggaagacga

SEQ ID NO: 1397733 - DNA, 25 bp, Homo sapien
gactgtcctgacctagagccgtgtt

SEQ ID NO: 1397734 - DNA, 25 bp, Homo sapien
tgagctagactcgtggtgaccaaag

SEQ ID NO: 1397735 - DNA, 25 bp, Homo sapien
tgactgtaactagaggactgccctg

SEQ ID NO: 1397736 - DNA, 25 bp, Homo sapien
gccagacccatgctgactgtaacta

SEQ ID NO: 1397737 - DNA, 25 bp, Homo sapien
ggactgccctgagctagactcgtgg

SEQ ID NO: 1397738 - DNA, 25 bp, Homo sapien
catgttggccactgctggaagaccg

SEQ ID NO: 1397739 - DNA, 25 bp, Homo sapien
cagacccatgttggccactgctgga

SEQ ID NO: 1397740 - DNA, 25 bp, Homo sapien
acccatgttggccactgctggaaga

SEQ ID NO: 1397741 - DNA, 25 bp, Homo sapien
tgttggccactgctggaagaccgac

SEQ ID NO: 1397742 - DNA, 25 bp, Homo sapien
tgctgaccgtggctggaagactgac

SEQ ID NO: 1397743 - DNA, 25 bp, Homo sapien
ccatgtcggccgtagctgggagact

SEQ ID NO: 1397744 - DNA, 25 bp, Homo sapien
tgcccatgggtagaggaatgacctg

SEQ ID NO: 1397745 - DNA, 25 bp, Homo sapien
gatccatgttgaccgtagccagagg

SEQ ID NO: 1397746 - DNA, 25 bp, Homo sapien
tatgggccacggctggaagaccacc

SEQ ID NO: 1397747 - DNA, 25 bp, Homo sapien
actcatatgggccacggctggaaga

SEQ ID NO: 1397748 - DNA, 25 bp, Homo sapien
gccagactcatatgggccacggctg

SEQ ID NO: 1397749 - DNA, 25 bp, Homo sapien
ggagccagactcatatgggccacgg

SEQ ID NO: 1397750 - DNA, 25 bp, Homo sapien
catagctggaagactggcctgtgct

SEQ ID NO: 1397751 - DNA, 25 bp, Homo sapien
gaccatagctggaagatgaacctga

SEQ ID NO: 1397752 - DNA, 25 bp, Homo sapien
gactgtcctgacctagagccgtgtt

SEQ ID NO: 1397753 - DNA, 25 bp, Homo sapien
catgagctagactcgtggtgaccaa

SEQ ID NO: 1397754 - DNA, 25 bp, Homo sapien
gatgactgtcctgatctagagccgt

SEQ ID NO: 1397755 - DNA, 25 bp, Homo sapien
catagtgggaagacgaacctgagct

SEQ ID NO: 1397756 - DNA, 25 bp, Homo sapien
ggaatggccagatccagacccttgt

SEQ ID NO: 1397757 - DNA, 25 bp, Homo sapien
tagagccgtgttgtccgtagccaga

SEQ ID NO: 1397758 - DNA, 25 bp, Homo sapien
tgagctagactcgtggtgaccaaag

SEQ ID NO: 1397759 - DNA, 25 bp, Homo sapien
gccagacccatgctgactgtaacta

SEQ ID NO: 1397760 - DNA, 25 bp, Homo sapien
tgactgtaactagaggactgccctg

SEQ ID NO: 1397761 - DNA, 25 bp, Homo sapien
ggactgccctgagctagactcgtgg

SEQ ID NO: 1397762 - DNA, 25 bp, Homo sapien
cagacccatgttggccactgctgga

SEQ ID NO: 1397763 - DNA, 25 bp, Homo sapien
catgttggccactgctggaagaccg

SEQ ID NO: 1397764 - DNA, 25 bp, Homo sapien
acccatgttggccactgctggaaga

SEQ ID NO: 1397765 - DNA, 25 bp, Homo sapien
tgttggccactgctggaagaccgac

SEQ ID NO: 1397766 - DNA, 25 bp, Homo sapien
tgcccatgggtagaggaatgacctg

SEQ ID NO: 1397767 - DNA, 25 bp, Homo sapien
ccatgtcggccgtagctgggagact

SEQ ID NO: 1397768 - DNA, 25 bp, Homo sapien
tgctgaccgtggctggaagactgac

SEQ ID NO: 1397769 - DNA, 25 bp, Homo sapien
gatccatgttgaccgtagccagagg

SEQ ID NO: 1397770 - DNA, 25 bp, Homo sapien
ccaccctgagccagacctatatggg

SEQ ID NO: 1397771 - DNA, 25 bp, Homo sapien
tgcccatgggtagaggaatgacccg

SEQ ID NO: 1397772 - DNA, 25 bp, Homo sapien
ccatgtcggacacggctaggagagt

SEQ ID NO: 1397773 - DNA, 25 bp, Homo sapien
gcccgaagattgatgggagcccgac

SEQ ID NO: 1397774 - DNA, 25 bp, Homo sapien
gaagaacaacttgtgccagacccgt

SEQ ID NO: 1397775 - DNA, 25 bp, Homo sapien
tgtcctgagcgagactcttggtgac

SEQ ID NO: 1397776 - DNA, 25 bp, Homo sapien
ctgtcctgagcgagactcttggtga

SEQ ID NO: 1397777 - DNA, 25 bp, Homo sapien
tgtgtcccaaagattgacgggagcc

SEQ ID NO: 1397778 - DNA, 25 bp, Homo sapien
ggaagatgaacctgcactagatcct

SEQ ID NO: 1397779 - DNA, 25 bp, Homo sapien
catacccatgtgggccatagctgga

SEQ ID NO: 1397780 - DNA, 25 bp, Homo sapien
agacccatgtcggctgtgtcccaaa

SEQ ID NO: 1397781 - DNA, 25 bp, Homo sapien
gccactgctggaagatcgaccaaag

SEQ ID NO: 1397782 - DNA, 25 bp, Homo sapien
ccatgtcggacgtggctaggagact

SEQ ID NO: 1397783 - DNA, 25 bp, Homo sapien
tgaaccagacacatatgggccactg

SEQ ID NO: 1397784 - DNA, 25 bp, Homo sapien
taagagtaacttgagccagacccgt

SEQ ID NO: 1397785 - DNA, 25 bp, Homo sapien
gagccagacccatgtgtgtcattgc

SEQ ID NO: 1397786 - DNA, 25 bp, Homo sapien
actgatgggagtcggagttttgctc

SEQ ID NO: 1397787 - DNA, 25 bp, Homo sapien
tccggagccagagccgtgttggcca

SEQ ID NO: 1397788 - DNA, 25 bp, Homo sapien
cattggccgcggcctgaagactgat

SEQ ID NO: 1397789 - DNA, 25 bp, Homo sapien
gagtaggagttatgttggccagaaa

SEQ ID NO: 1397790 - DNA, 25 bp, Homo sapien
gtaggagttatgttggccagaaaag

SEQ ID NO: 1397791 - DNA, 25 bp, Homo sapien
tggattcagtcccaggtttaagact

SEQ ID NO: 1397792 - DNA, 25 bp, Homo sapien
gattcagtcccaggtttaagacttc

SEQ ID NO: 1397793 - DNA, 25 bp, Homo sapien
aataggaatcattctctcctgcact

SEQ ID NO: 1397794 - DNA, 25 bp, Homo sapien
aatgactaaaagaggattcttgccg

SEQ ID NO: 1397795 - DNA, 25 bp, Homo sapien
actccaacttgaatgactaaaagag

SEQ ID NO: 1397796 - DNA, 25 bp, Homo sapien
gattcttgccgtttgttctcctctt

SEQ ID NO: 1397797 - DNA, 25 bp, Homo sapien
cactttcttgttatggtctcgatcc

SEQ ID NO: 1397798 - DNA, 25 bp, Homo sapien
gactttgcaagatgatatccacagt

SEQ ID NO: 1397799 - DNA, 25 bp, Homo sapien
cgagcctgaaccagcttgaatatca

SEQ ID NO: 1397800 - DNA, 25 bp, Homo sapien
ccacagtatctggatcgtttggatt

SEQ ID NO: 1397801 - DNA, 25 bp, Homo sapien
gtcctttaggctgcatttctgtatc

SEQ ID NO: 1397802 - DNA, 25 bp, Homo sapien
ttcacacagtcctttaggctgcatt

SEQ ID NO: 1397803 - DNA, 25 bp, Homo sapien
agtcctttaggctgcatttctgtat

SEQ ID NO: 1397804 - DNA, 25 bp, Homo sapien
tcattcacacagtcctttaggctgc

SEQ ID NO: 1397805 - DNA, 25 bp, Homo sapien
cagtgatgacgccttgtaggagttt

SEQ ID NO: 1397806 - DNA, 25 bp, Homo sapien
aacgtatcatactccccatgctggg

SEQ ID NO: 1397807 - DNA, 25 bp, Homo sapien
tggcatattggtagaaaacatcgat

SEQ ID NO: 1397808 - DNA, 25 bp, Homo sapien
gctctgccttgttcaacgtatcata

SEQ ID NO: 1397809 - DNA, 25 bp, Homo sapien
caccagaggaacaagtagggtagag

SEQ ID NO: 1397810 - DNA, 25 bp, Homo sapien
aggaacaagtagggtagagacagaa

SEQ ID NO: 1397811 - DNA, 25 bp, Homo sapien
cagaggaacaagtagggtagagaca

SEQ ID NO: 1397812 - DNA, 25 bp, Homo sapien
ggaacaagtagggtagagacagaaa

SEQ ID NO: 1397813 - DNA, 25 bp, Homo sapien
ggaatatattctgcttcagtactgg

SEQ ID NO: 1397814 - DNA, 25 bp, Homo sapien
actggtctgcctattgagttgtttc

SEQ ID NO: 1397815 - DNA, 25 bp, Homo sapien
gcttagtatatattccctggggatg

SEQ ID NO: 1397816 - DNA, 25 bp, Homo sapien
agcttcagacccacaccctggaata

SEQ ID NO: 1397817 - DNA, 25 bp, Homo sapien
ttatatttttggctccttcgatatt

SEQ ID NO: 1397818 - DNA, 25 bp, Homo sapien
tatatttttggctccttcgatattt

SEQ ID NO: 1397819 - DNA, 25 bp, Homo sapien
catgactggctgtatcgcggtgaga

SEQ ID NO: 1397820 - DNA, 25 bp, Homo sapien
gactgccacgtgactgtattcctga

SEQ ID NO: 1397821 - DNA, 25 bp, Homo sapien
gaactagaactgtgaggactgccac

SEQ ID NO: 1397822 - DNA, 25 bp, Homo sapien
cgtgctgagagtgtctaaacccgga

SEQ ID NO: 1397823 - DNA, 25 bp, Homo sapien
cccgggtgtccacgaatggtgtcct

SEQ ID NO: 1397824 - DNA, 25 bp, Homo sapien
ccatgggcagactcagactgttcat

SEQ ID NO: 1397825 - DNA, 25 bp, Homo sapien
tctggatcctgactgcccatgggag

SEQ ID NO: 1397826 - DNA, 25 bp, Homo sapien
tctcgtgcctgctcgtggcgggatc

SEQ ID NO: 1397827 - DNA, 25 bp, Homo sapien
tgctgaccggccacgtgtggactct

SEQ ID NO: 1397828 - DNA, 25 bp, Homo sapien
cagatgaagcttgtccgtgcccaat

SEQ ID NO: 1397829 - DNA, 25 bp, Homo sapien
tggtagaggaaagaccctgaacgtc

SEQ ID NO: 1397830 - DNA, 25 bp, Homo sapien
cgtgcccaatgcctgagtgtctgga

SEQ ID NO: 1397831 - DNA, 25 bp, Homo sapien
ggccccgctgattgtccctggccgg

SEQ ID NO: 1397832 - DNA, 25 bp, Homo sapien
tgatgcgaccatgagtgcctggagc

SEQ ID NO: 1397833 - DNA, 25 bp, Homo sapien
tgagtgtctagagctgtccgcctga

SEQ ID NO: 1397834 - DNA, 25 bp, Homo sapien
cgtcattacgagtttgtctgctggc

SEQ ID NO: 1397835 - DNA, 25 bp, Homo sapien
ctgcccacgggaggcatcagacctt

SEQ ID NO: 1397836 - DNA, 25 bp, Homo sapien
agtgtccagacctatctaccgattg

SEQ ID NO: 1397837 - DNA, 25 bp, Homo sapien
ccagacctatctaccgattgctcgt

SEQ ID NO: 1397838 - DNA, 25 bp, Homo sapien
tgtccagacctatctaccgattgct

SEQ ID NO: 1397839 - DNA, 25 bp, Homo sapien
tccagacctatctaccgattgctcg

SEQ ID NO: 1397840 - DNA, 25 bp, Homo sapien
cgggtgtccacgaatggtgtcctga

SEQ ID NO: 1397841 - DNA, 25 bp, Homo sapien
cccatgggcagactcagactgttca

SEQ ID NO: 1397842 - DNA, 25 bp, Homo sapien
tggagctgtctcgtgcctgctcgtg

SEQ ID NO: 1397843 - DNA, 25 bp, Homo sapien
cctgctcgtggtgggatccttgtct

SEQ ID NO: 1397844 - DNA, 25 bp, Homo sapien
tggtagaggaaagaccctgaacgtc

SEQ ID NO: 1397845 - DNA, 25 bp, Homo sapien
gaagtctctgcgtgacgagtgcctg

SEQ ID NO: 1397846 - DNA, 25 bp, Homo sapien
tctgaatgtccctcactatcactgg

SEQ ID NO: 1397847 - DNA, 25 bp, Homo sapien
tgaccggtcacgtgcggactcttgg

SEQ ID NO: 1397848 - DNA, 25 bp, Homo sapien
ctgcccacgggaggcatcagacctt

SEQ ID NO: 1397849 - DNA, 25 bp, Homo sapien
tgagtgtccagagctatctaccgaa

SEQ ID NO: 1397850 - DNA, 25 bp, Homo sapien
cctgtgagtgtctagagatgtcggc

SEQ ID NO: 1397851 - DNA, 25 bp, Homo sapien
acttctggatcctgactgcccacgg

SEQ ID NO: 1397852 - DNA, 25 bp, Homo sapien
ccttgtcttcctctagtgctgggcc

SEQ ID NO: 1397853 - DNA, 25 bp, Homo sapien
tgcctggagctgtcttgtgcctgct

SEQ ID NO: 1397854 - DNA, 25 bp, Homo sapien
tgctcatggcgggatccttgtcttc

SEQ ID NO: 1397855 - DNA, 25 bp, Homo sapien
tgtccacgaatggtgtcctgaccgt

SEQ ID NO: 1397856 - DNA, 25 bp, Homo sapien
tcctgaatgtccagacgtttcccct

SEQ ID NO: 1397857 - DNA, 25 bp, Homo sapien
cctgaatgtccagacgtttcccctg

SEQ ID NO: 1397858 - DNA, 25 bp, Homo sapien
atcctgaatgtccagacgtttcccc

SEQ ID NO: 1397859 - DNA, 25 bp, Homo sapien
gtcactggcctgactaccactgtac

SEQ ID NO: 1397860 - DNA, 25 bp, Homo sapien
cggccacgtgcggactcttggtggc

SEQ ID NO: 1397861 - DNA, 25 bp, Homo sapien
ggccacgtgcggactcttggtggct

SEQ ID NO: 1397862 - DNA, 25 bp, Homo sapien
ctgctggtggtgggatccatgtctt

SEQ ID NO: 1397863 - DNA, 25 bp, Homo sapien
tgatcttgcctgttcatgggatgat

SEQ ID NO: 1397864 - DNA, 25 bp, Homo sapien
tgcccaatgcctgagtgtctggagc

SEQ ID NO: 1397865 - DNA, 25 bp, Homo sapien
cagatgaagcttgtccgtgcccaat

SEQ ID NO: 1397866 - DNA, 25 bp, Homo sapien
taccgaatgctcgtggtggtacccc

SEQ ID NO: 1397867 - DNA, 25 bp, Homo sapien
aagcttcatggtgacgcgaccctga

SEQ ID NO: 1397868 - DNA, 25 bp, Homo sapien
tgtccacgaatggtgtcctgaccgt

SEQ ID NO: 1397869 - DNA, 25 bp, Homo sapien
tgagtgtccagagctatctaccgaa

SEQ ID NO: 1397870 - DNA, 25 bp, Homo sapien
gaccggccacgtgcggactcttggt

SEQ ID NO: 1397871 - DNA, 25 bp, Homo sapien
cgtttcccctgaccggccacgtgcg

SEQ ID NO: 1397872 - DNA, 25 bp, Homo sapien
gtcactggcctgactaccactgtac

SEQ ID NO: 1397873 - DNA, 25 bp, Homo sapien
atcctgaatgtccagacgtttcccc

SEQ ID NO: 1397874 - DNA, 25 bp, Homo sapien
tgcccaatgcctgagtgtctggagc

SEQ ID NO: 1397875 - DNA, 25 bp, Homo sapien
ctgctggtggtgggatccatgtctt

SEQ ID NO: 1397876 - DNA, 25 bp, Homo sapien
tgatcttgcctgttcatgggatgat

SEQ ID NO: 1397877 - DNA, 25 bp, Homo sapien
cagatgaagcttgtccgtgcccaat

SEQ ID NO: 1397878 - DNA, 25 bp, Homo sapien
tggctaaaactggatccccagttcc

SEQ ID NO: 1397879 - DNA, 25 bp, Homo sapien
ctggctaaaactggatccccagttc

SEQ ID NO: 1397880 - DNA, 25 bp, Homo sapien
gtctcctgattgttcatcgttacga

SEQ ID NO: 1397881 - DNA, 25 bp, Homo sapien
tggagctgtctcgtgcctgcttgtg

SEQ ID NO: 1397882 - DNA, 25 bp, Homo sapien
ctggagctgtctcgtgcctgcttgt

SEQ ID NO: 1397883 - DNA, 25 bp, Homo sapien
cctggagctgtctcgtgcctgcttg

SEQ ID NO: 1397884 - DNA, 25 bp, Homo sapien
ggagctgtctcgtgcctgcttgtgg

SEQ ID NO: 1397885 - DNA, 25 bp, Homo sapien
tgctgaccggccacgtgtggactct

SEQ ID NO: 1397886 - DNA, 25 bp, Homo sapien
tggtagaggaaagaccctgaacgtc

SEQ ID NO: 1397887 - DNA, 25 bp, Homo sapien
cgtgcccaatgcctgagtgtctgga

SEQ ID NO: 1397888 - DNA, 25 bp, Homo sapien
cagatgaagcttgtccgtgcccaat

SEQ ID NO: 1397889 - DNA, 25 bp, Homo sapien
tagagccatctcctgattgttcctt

SEQ ID NO: 1397890 - DNA, 25 bp, Homo sapien
cgcagacccagaccgcctctcagaa

SEQ ID NO: 1397891 - DNA, 25 bp, Homo sapien
cctgatcataatgggatccttgtct

SEQ ID NO: 1397892 - DNA, 25 bp, Homo sapien
cctggagctgtcttgtgcctgatca

SEQ ID NO: 1397893 - DNA, 25 bp, Homo sapien
cagtgctgggcgcagactgtccatg

SEQ ID NO: 1397894 - DNA, 25 bp, Homo sapien
tgtcttgtgcctgatcataatggga

SEQ ID NO: 1397895 - DNA, 25 bp, Homo sapien
tggtagaggaaagaccctgaacgtc

SEQ ID NO: 1397896 - DNA, 25 bp, Homo sapien
tgttcatgggatgacgcagcctgtc

SEQ ID NO: 1397897 - DNA, 25 bp, Homo sapien
tgcccaatgcctgagtgtctggagc

SEQ ID NO: 1397898 - DNA, 25 bp, Homo sapien
gactggccacgtgcggactctttgt

SEQ ID NO: 1397899 - DNA, 25 bp, Homo sapien
ggatccctggttcctgcttgtcctg

SEQ ID NO: 1397900 - DNA, 25 bp, Homo sapien
ggaagcagacccagaccacctctca

SEQ ID NO: 1397901 - DNA, 25 bp, Homo sapien
tggaagcagacccagaccacctctc

SEQ ID NO: 1397902 - DNA, 25 bp, Homo sapien
atggtgacgcgaccctgagtgcctg

SEQ ID NO: 1397903 - DNA, 25 bp, Homo sapien
gcctggagccgtctcctgattgttt

SEQ ID NO: 1397904 - DNA, 25 bp, Homo sapien
acttctggatcctgactgcccacgg

SEQ ID NO: 1397905 - DNA, 25 bp, Homo sapien
ggaagcttcatggtgacgcgaccct

SEQ ID NO: 1397906 - DNA, 25 bp, Homo sapien
tatctaccgattgctcatagtggga

SEQ ID NO: 1397907 - DNA, 25 bp, Homo sapien
cctgagtgtccagaactatctaccg

SEQ ID NO: 1397908 - DNA, 25 bp, Homo sapien
gattgctcatagtgggatccctgcc

SEQ ID NO: 1397909 - DNA, 25 bp, Homo sapien
tggctgtgatgagaccctgagtgtc

SEQ ID NO: 1397910 - DNA, 25 bp, Homo sapien
tgaatcttgtctgcgcccagtgcct

SEQ ID NO: 1397911 - DNA, 25 bp, Homo sapien
tcggtttccactgtctccgactaca

SEQ ID NO: 1397912 - DNA, 25 bp, Homo sapien
tgtctccgactacagatgaatcttg

SEQ ID NO: 1397913 - DNA, 25 bp, Homo sapien
gcttgtcttggaccccgctgattct

SEQ ID NO: 1397914 - DNA, 25 bp, Homo sapien
tagagctgtttcgtgcctgctcatg

SEQ ID NO: 1397915 - DNA, 25 bp, Homo sapien
gggtgcagtctgtccgtgtgtggac

SEQ ID NO: 1397916 - DNA, 25 bp, Homo sapien
tctgtccgtgtgtggactcagactg

SEQ ID NO: 1397917 - DNA, 25 bp, Homo sapien
ctgccggcccgagtggaaggttcat

SEQ ID NO: 1397918 - DNA, 25 bp, Homo sapien
tgcccaatgcctgagtgtctggagc

SEQ ID NO: 1397919 - DNA, 25 bp, Homo sapien
tggtggcgggatccatgtctttctc

SEQ ID NO: 1397920 - DNA, 25 bp, Homo sapien
tgatcttgcctgttcatgggatgac

SEQ ID NO: 1397921 - DNA, 25 bp, Homo sapien
gactggccacgtgcggactctttgt

SEQ ID NO: 1397922 - DNA, 25 bp, Homo sapien
gaccccgatgattgttcctgtccca

SEQ ID NO: 1397923 - DNA, 25 bp, Homo sapien
tggaagcagacccagacaacctctc

SEQ ID NO: 1397924 - DNA, 25 bp, Homo sapien
cctggaccccgatgattgttcctgt

SEQ ID NO: 1397925 - DNA, 25 bp, Homo sapien
gtcgtctgagtgtctctcactgtca

SEQ ID NO: 1397926 - DNA, 25 bp, Homo sapien
tctggatcctgactgcccatgggag

SEQ ID NO: 1397927 - DNA, 25 bp, Homo sapien
agcttcatggtgacgtgaccctgag

SEQ ID NO: 1397928 - DNA, 25 bp, Homo sapien
ttacgagtttgtctgcttgcacttc

SEQ ID NO: 1397929 - DNA, 25 bp, Homo sapien
tgcctggagccgtctcctgattgtt

SEQ ID NO: 1397930 - DNA, 25 bp, Homo sapien
tcgtggtgggatccttgtcttcgtc

SEQ ID NO: 1397931 - DNA, 25 bp, Homo sapien
cccatgggcagactcagactgttca

SEQ ID NO: 1397932 - DNA, 25 bp, Homo sapien
tggagctgtctcgtgcctgctcgtg

SEQ ID NO: 1397933 - DNA, 25 bp, Homo sapien
agtgctggtcctggtccgcccatgg

SEQ ID NO: 1397934 - DNA, 25 bp, Homo sapien
tgttcatgggatgacgcagcctgtc

SEQ ID NO: 1397935 - DNA, 25 bp, Homo sapien
tttctcctggacttgatcttgcctg

SEQ ID NO: 1397936 - DNA, 25 bp, Homo sapien
tggctaacactggatccctggcgcc

SEQ ID NO: 1397937 - DNA, 25 bp, Homo sapien
tctgaatgtccctcactatcactgg

SEQ ID NO: 1397938 - DNA, 25 bp, Homo sapien
ctgtgagtgtctagagatgtcggca

SEQ ID NO: 1397939 - DNA, 25 bp, Homo sapien
cattacgtgttgttctgcttgcact

SEQ ID NO: 1397940 - DNA, 25 bp, Homo sapien
gtgaccctgagtgcctggagccgtc

SEQ ID NO: 1397941 - DNA, 25 bp, Homo sapien
agcttcatggtgacgtgaccctgag

SEQ ID NO: 1397942 - DNA, 25 bp, Homo sapien
ctgcccacgggaggcatcagacctt

SEQ ID NO: 1397943 - DNA, 25 bp, Homo sapien
tcttctgcttgaccccgggtgtcca

SEQ ID NO: 1397944 - DNA, 25 bp, Homo sapien
agtgtccagacctatctaccgattg

SEQ ID NO: 1397945 - DNA, 25 bp, Homo sapien
gacctatctaccgattgctcgtggt

SEQ ID NO: 1397946 - DNA, 25 bp, Homo sapien
ggtgtccacgaatggtgtcctgacc

SEQ ID NO: 1397947 - DNA, 25 bp, Homo sapien
tctgtgtgtgacgagtgcctgattt

SEQ ID NO: 1397948 - DNA, 25 bp, Homo sapien
gatgacgtgaccctgagtgcctggt

SEQ ID NO: 1397949 - DNA, 25 bp, Homo sapien
ggtgccgtctcctgattgttcctca

SEQ ID NO: 1397950 - DNA, 25 bp, Homo sapien
cacctgtgagtgtctagagctgtca

SEQ ID NO: 1397951 - DNA, 25 bp, Homo sapien
gatccctggttcctacttgtcctgg

SEQ ID NO: 1397952 - DNA, 25 bp, Homo sapien
tgtctgcttgcacttctggatcctg

SEQ ID NO: 1397953 - DNA, 25 bp, Homo sapien
ttgtctgcttgcacttctggatcct

SEQ ID NO: 1397954 - DNA, 25 bp, Homo sapien
tttaccgattgctcgtggtgggatc

SEQ ID NO: 1397955 - DNA, 25 bp, Homo sapien
tgatgggaacctgagtgtccagacc

SEQ ID NO: 1397956 - DNA, 25 bp, Homo sapien
agtgtccagacctatttaccgattg

SEQ ID NO: 1397957 - DNA, 25 bp, Homo sapien
tcgtggtgggatccctgccttcctc

SEQ ID NO: 1397958 - DNA, 25 bp, Homo sapien
cccgggtgtccacgaatggtgtcct

SEQ ID NO: 1397959 - DNA, 25 bp, Homo sapien
tgctggtcccggtccgtccatgggc

SEQ ID NO: 1397960 - DNA, 25 bp, Homo sapien
gagctgtctcgtgcctgctcgtggt

SEQ ID NO: 1397961 - DNA, 25 bp, Homo sapien
gtgtccacgaatggtgtcctgaccc

SEQ ID NO: 1397962 - DNA, 25 bp, Homo sapien
gaccggccacgtgtggactcttggt

SEQ ID NO: 1397963 - DNA, 25 bp, Homo sapien
tgaccggccacgtgtggactcttgg

SEQ ID NO: 1397964 - DNA, 25 bp, Homo sapien
accggccacgtgtggactcttggtg

SEQ ID NO: 1397965 - DNA, 25 bp, Homo sapien
ctgaccggccacgtgtggactcttg

SEQ ID NO: 1397966 - DNA, 25 bp, Homo sapien
gatgaagcttgcccgcgcccagtgg

SEQ ID NO: 1397967 - DNA, 25 bp, Homo sapien
ccggtgtccacgatcgctgactgca

SEQ ID NO: 1397968 - DNA, 25 bp, Homo sapien
ctgactaccgctagacccccggtgt

SEQ ID NO: 1397969 - DNA, 25 bp, Homo sapien
agcccagcctttccgtggcctgaca

SEQ ID NO: 1397970 - DNA, 25 bp, Homo sapien
agagtgcctctcagagtcttctgag

SEQ ID NO: 1397971 - DNA, 25 bp, Homo sapien
cccagagtgcctctcagagtcttct

SEQ ID NO: 1397972 - DNA, 25 bp, Homo sapien
tggaagccgacccagagtgcctctc

SEQ ID NO: 1397973 - DNA, 25 bp, Homo sapien
ctggaagccgacccagagtgcctct

SEQ ID NO: 1397974 - DNA, 25 bp, Homo sapien
actctggatcccctacgctttcttg

SEQ ID NO: 1397975 - DNA, 25 bp, Homo sapien
ggctaactctggatcccctacgctt

SEQ ID NO: 1397976 - DNA, 25 bp, Homo sapien
gatcccctacgctttcttgtcctgg

SEQ ID NO: 1397977 - DNA, 25 bp, Homo sapien
gtcctggctaactctggatccccta

SEQ ID NO: 1397978 - DNA, 25 bp, Homo sapien
ctggcttgtattttcatgtcttgac

SEQ ID NO: 1397979 - DNA, 25 bp, Homo sapien
gactcataatatgcttgagccaact

SEQ ID NO: 1397980 - DNA, 25 bp, Homo sapien
tatcagtggtgtcataggcttcatc

SEQ ID NO: 1397981 - DNA, 25 bp, Homo sapien
gagccaacttgaataccatcagaag

SEQ ID NO: 1397982 - DNA, 25 bp, Homo sapien
tatatccaagtgatccatgaagaca

SEQ ID NO: 1397983 - DNA, 25 bp, Homo sapien
ccttgcttagattattgatgagaaa

SEQ ID NO: 1397984 - DNA, 25 bp, Homo sapien
tctttggtcttgtcagagactctta

SEQ ID NO: 1397985 - DNA, 25 bp, Homo sapien
aaataacccttgcttagattattga

SEQ ID NO: 1397986 - DNA, 25 bp, Homo sapien
ctttggtcttgtcagagactcttac

SEQ ID NO: 1397987 - DNA, 25 bp, Homo sapien
tcttttttactcaatgtgtcagtgt

SEQ ID NO: 1397988 - DNA, 25 bp, Homo sapien
gattaattatggcaaagatgttttc

SEQ ID NO: 1397989 - DNA, 25 bp, Homo sapien
tcaggatttgccgaaattccttttc

SEQ ID NO: 1397990 - DNA, 25 bp, Homo sapien
ttgaatattgcttgaaaagattaat

SEQ ID NO: 1397991 - DNA, 25 bp, Homo sapien
gtacaagcccctttacaataggcat

SEQ ID NO: 1397992 - DNA, 25 bp, Homo sapien
taatacctatctggcaaaacctgtg

SEQ ID NO: 1397993 - DNA, 25 bp, Homo sapien
tttgtatggtaaccgctggcctcag

SEQ ID NO: 1397994 - DNA, 25 bp, Homo sapien
tgtggagccttacaaaaacacctgg

SEQ ID NO: 1397995 - DNA, 25 bp, Homo sapien
tagttctgaatatagccccaaatgg

SEQ ID NO: 1397996 - DNA, 25 bp, Homo sapien
gcccatgaaaagttgtatctccgaa

SEQ ID NO: 1397997 - DNA, 25 bp, Homo sapien
taggtcgagactgatactgagaatc

SEQ ID NO: 1397998 - DNA, 25 bp, Homo sapien
tccgaaatgttgctggctagatcca

SEQ ID NO: 1397999 - DNA, 25 bp, Homo sapien
gaatgtccatgactagattcctgac

SEQ ID NO: 1398000 - DNA, 25 bp, Homo sapien
gtcaatgtctagacagttgcttgtt

SEQ ID NO: 1398001 - DNA, 25 bp, Homo sapien
taactgtcaatgtctagacagttgc

SEQ ID NO: 1398002 - DNA, 25 bp, Homo sapien
tgcttgtttgcagtgctgtctgttg

SEQ ID NO: 1398003 - DNA, 25 bp, Homo sapien
aataactgtcaatgtctagacagtt

SEQ ID NO: 1398004 - DNA, 25 bp, Homo sapien
cagcttggccctgaatgtgtcctga

SEQ ID NO: 1398005 - DNA, 25 bp, Homo sapien
tggattgtccataaccagaatggcc

SEQ ID NO: 1398006 - DNA, 25 bp, Homo sapien
gtccatgtcgagatccggcttggct

SEQ ID NO: 1398007 - DNA, 25 bp, Homo sapien
tagtcatattctgcaggtccatagc

SEQ ID NO: 1398008 - DNA, 25 bp, Homo sapien
ctgaatgtgtgggtgaggcctctga

SEQ ID NO: 1398009 - DNA, 25 bp, Homo sapien
aggcctctgagtgcacttcactatc

SEQ ID NO: 1398010 - DNA, 25 bp, Homo sapien
ctgagtgcacttcactatcactgga

SEQ ID NO: 1398011 - DNA, 25 bp, Homo sapien
ctctgagtgcacttcactatcactg

SEQ ID NO: 1398012 - DNA, 25 bp, Homo sapien
ctggcttggccataagtgtgtcctg

SEQ ID NO: 1398013 - DNA, 25 bp, Homo sapien
tgtctcccgtgaatggcagatcctg

SEQ ID NO: 1398014 - DNA, 25 bp, Homo sapien
atctggcttggccataagtgtgtcc

SEQ ID NO: 1398015 - DNA, 25 bp, Homo sapien
agttccctgtctcccgtgaatggca

SEQ ID NO: 1398016 - DNA, 25 bp, Homo sapien
tgtcctggaccctgtctgtatggtt

SEQ ID NO: 1398017 - DNA, 25 bp, Homo sapien
gatagtgagatccagcttgaccgtg

SEQ ID NO: 1398018 - DNA, 25 bp, Homo sapien
gtccatgaccagattgagaatgtcc

SEQ ID NO: 1398019 - DNA, 25 bp, Homo sapien
gaggatcctgactctggatagtgag

SEQ ID NO: 1398020 - DNA, 25 bp, Homo sapien
ttccatgatgatagtgggcatgtct

SEQ ID NO: 1398021 - DNA, 25 bp, Homo sapien
tccactttggccgtgagtgtgtcct

SEQ ID NO: 1398022 - DNA, 25 bp, Homo sapien
gagtgtggtctatgtgagacccctg

SEQ ID NO: 1398023 - DNA, 25 bp, Homo sapien
gcacttcactgtcagtggcatcact

SEQ ID NO: 1398024 - DNA, 25 bp, Homo sapien
gttccttgtcttctgcgaactgtgg

SEQ ID NO: 1398025 - DNA, 25 bp, Homo sapien
tccttgtcttctgcgaactgtggat

SEQ ID NO: 1398026 - DNA, 25 bp, Homo sapien
ttccttgtcttctgcgaactgtgga

SEQ ID NO: 1398027 - DNA, 25 bp, Homo sapien
ccttgtcttctgcgaactgtggatc

SEQ ID NO: 1398028 - DNA, 25 bp, Homo sapien
ctacttgttgagattcaccctggcc

SEQ ID NO: 1398029 - DNA, 25 bp, Homo sapien
cctggcccaagccagttgattgacc

SEQ ID NO: 1398030 - DNA, 25 bp, Homo sapien
gagattcaccctggcccaagccagt

SEQ ID NO: 1398031 - DNA, 25 bp, Homo sapien
ttgttgagattcaccctggcccaag

SEQ ID NO: 1398032 - DNA, 25 bp, Homo sapien
gagtcagatatatgttgtccagaac

SEQ ID NO: 1398033 - DNA, 25 bp, Homo sapien
caaaacttgtggttggacctgagcc

SEQ ID NO: 1398034 - DNA, 25 bp, Homo sapien
tccagatgtctgtcctgaatttgac

SEQ ID NO: 1398035 - DNA, 25 bp, Homo sapien
gactgacctgatctgtactcatgct

SEQ ID NO: 1398036 - DNA, 25 bp, Homo sapien
atagccagatgactgacttgagcca

SEQ ID NO: 1398037 - DNA, 25 bp, Homo sapien
ttggccatagccagatgactgactt

SEQ ID NO: 1398038 - DNA, 25 bp, Homo sapien
gccagatgactgacttgagccagaa

SEQ ID NO: 1398039 - DNA, 25 bp, Homo sapien
gttggccatagccagatgactgact

SEQ ID NO: 1398040 - DNA, 25 bp, Homo sapien
ctagactgacctgatctagactcat

SEQ ID NO: 1398041 - DNA, 25 bp, Homo sapien
tccaaatccagatgtctgtcctgaa

SEQ ID NO: 1398042 - DNA, 25 bp, Homo sapien
gacctgatctagactcatgttgtcc

SEQ ID NO: 1398043 - DNA, 25 bp, Homo sapien
gaccatagccagatgattgacttga

SEQ ID NO: 1398044 - DNA, 25 bp, Homo sapien
gaacttgacccatgttgaccatagc

SEQ ID NO: 1398045 - DNA, 25 bp, Homo sapien
ccagtggattgacctgagcccaacc

SEQ ID NO: 1398046 - DNA, 25 bp, Homo sapien
agtggattgacctgagcccaaccca

SEQ ID NO: 1398047 - DNA, 25 bp, Homo sapien
cagtggattgacctgagcccaaccc

SEQ ID NO: 1398048 - DNA, 25 bp, Homo sapien
gaactgtgttggccataactagact

SEQ ID NO: 1398049 - DNA, 25 bp, Homo sapien
gagacagacccatgctgtccaaaac

SEQ ID NO: 1398050 - DNA, 25 bp, Homo sapien
ctgagacagacccatgctgtccaaa

SEQ ID NO: 1398051 - DNA, 25 bp, Homo sapien
tgctgtccaaaaccagaggattgtc

SEQ ID NO: 1398052 - DNA, 25 bp, Homo sapien
gacagacccatgctgtccaaaacca

SEQ ID NO: 1398053 - DNA, 25 bp, Homo sapien
agaggactgacctgagcctgaccca

SEQ ID NO: 1398054 - DNA, 25 bp, Homo sapien
tgagcctgacccacattgtccaaag

SEQ ID NO: 1398055 - DNA, 25 bp, Homo sapien
tgagacagacccatgctgtccaaag

SEQ ID NO: 1398056 - DNA, 25 bp, Homo sapien
agacccatgctgtccaaagccagag

SEQ ID NO: 1398057 - DNA, 25 bp, Homo sapien
agacccatgttgtccaaagccagat

SEQ ID NO: 1398058 - DNA, 25 bp, Homo sapien
gccagacccatgttgtccaaagcca

SEQ ID NO: 1398059 - DNA, 25 bp, Homo sapien
gagccagacccatgttgtccaaagc

SEQ ID NO: 1398060 - DNA, 25 bp, Homo sapien
ctgagccagacccatgttgtccaaa

SEQ ID NO: 1398061 - DNA, 25 bp, Homo sapien
gactcatgctggccacaagtttgac

SEQ ID NO: 1398062 - DNA, 25 bp, Homo sapien
tgttgttcaaagctagtagactgac

SEQ ID NO: 1398063 - DNA, 25 bp, Homo sapien
tacatgttgttcgaacccagaggac

SEQ ID NO: 1398064 - DNA, 25 bp, Homo sapien
ccatgttgttcaaagctagtagact

SEQ ID NO: 1398065 - DNA, 25 bp, Homo sapien
gagccacatacatgttgttcgaacc

SEQ ID NO: 1398066 - DNA, 25 bp, Homo sapien
tgttgaccattactacaagactggc

SEQ ID NO: 1398067 - DNA, 25 bp, Homo sapien
cagacccatattgatcacatttgga

SEQ ID NO: 1398068 - DNA, 25 bp, Homo sapien
gcggccacaggaaccatattcatgt

SEQ ID NO: 1398069 - DNA, 25 bp, Homo sapien
ttgaaccagacccatattgatcaca

SEQ ID NO: 1398070 - DNA, 25 bp, Homo sapien
atatcctctctgactataggactga

SEQ ID NO: 1398071 - DNA, 25 bp, Homo sapien
cacagttctgtggttgaccattttc

SEQ ID NO: 1398072 - DNA, 25 bp, Homo sapien
cccttaattcctgactgacagcctg

SEQ ID NO: 1398073 - DNA, 25 bp, Homo sapien
aatatagctaaattgatttccttgc

SEQ ID NO: 1398074 - DNA, 25 bp, Homo sapien
tggccttgtcctcccttaattcctg

SEQ ID NO: 1398075 - DNA, 25 bp, Homo sapien
ctacaggggttagactcaggttgac

SEQ ID NO: 1398076 - DNA, 25 bp, Homo sapien
tataaccacatgcatgacttcgcct

SEQ ID NO: 1398077 - DNA, 25 bp, Homo sapien
tggccttccacacccacttgaattg

SEQ ID NO: 1398078 - DNA, 25 bp, Homo sapien
gctagacccaagcttttgttctcta

SEQ ID NO: 1398079 - DNA, 25 bp, Homo sapien
tgaacctgaacagctagacccaagc

SEQ ID NO: 1398080 - DNA, 25 bp, Homo sapien
tgagtagagtttgattcatgcccac

SEQ ID NO: 1398081 - DNA, 25 bp, Homo sapien
tgattcatgcccactagtctccaat

SEQ ID NO: 1398082 - DNA, 25 bp, Homo sapien
caatccacatgacagaccaccatga

SEQ ID NO: 1398083 - DNA, 25 bp, Homo sapien
cttgactgagtagagtttgattcat

SEQ ID NO: 1398084 - DNA, 25 bp, Homo sapien
ctggacctgtggtatcttttctgag

SEQ ID NO: 1398085 - DNA, 25 bp, Homo sapien
cttttctgagatccctcttggttcc

SEQ ID NO: 1398086 - DNA, 25 bp, Homo sapien
gccaccactccatgaatgaccacag

SEQ ID NO: 1398087 - DNA, 25 bp, Homo sapien
ctagaagggctaatgtgtgacttgt

SEQ ID NO: 1398088 - DNA, 25 bp, Homo sapien
gagttggacccatgtctacatttca

SEQ ID NO: 1398089 - DNA, 25 bp, Homo sapien
tggagttggacccatgtctacattt

SEQ ID NO: 1398090 - DNA, 25 bp, Homo sapien
ggacccatgtctacatttcacagtt

SEQ ID NO: 1398091 - DNA, 25 bp, Homo sapien
catgtctacatttcacagttcccct

SEQ ID NO: 1398092 - DNA, 25 bp, Homo sapien
gctgaggaccttgttgcaggccata

SEQ ID NO: 1398093 - DNA, 25 bp, Homo sapien
tgatctcgatccagcatatgcatga

SEQ ID NO: 1398094 - DNA, 25 bp, Homo sapien
tccactgtgtctggatcatctgggt

SEQ ID NO: 1398095 - DNA, 25 bp, Homo sapien
tcttcttggtgtcggtgaccacgcc

SEQ ID NO: 1398096 - DNA, 25 bp, Homo sapien
ttacggtgacaacacttctcaagag

SEQ ID NO: 1398097 - DNA, 25 bp, Homo sapien
acatcaattacggtgacaacacttc

SEQ ID NO: 1398098 - DNA, 25 bp, Homo sapien
tcaattacggtgacaacacttctca

SEQ ID NO: 1398099 - DNA, 25 bp, Homo sapien
gaaaacatcaattacggtgacaaca

SEQ ID NO: 1398100 - DNA, 25 bp, Homo sapien
aaaaattatatctcgggctgcctca

SEQ ID NO: 1398101 - DNA, 25 bp, Homo sapien
tctataacatggaatgcctagtgct

SEQ ID NO: 1398102 - DNA, 25 bp, Homo sapien
tattgaccagggtgtattgtgcaca

SEQ ID NO: 1398103 - DNA, 25 bp, Homo sapien
gatttgctccacattactcggtagg

SEQ ID NO: 1398104 - DNA, 25 bp, Homo sapien
cttcagactagtgtagtcaactgtc

SEQ ID NO: 1398105 - DNA, 25 bp, Homo sapien
tcttgaacttcagactagtgtagtc

SEQ ID NO: 1398106 - DNA, 25 bp, Homo sapien
agtgtagtcaactgtccatatctcc

SEQ ID NO: 1398107 - DNA, 25 bp, Homo sapien
gactagtgtagtcaactgtccatat

SEQ ID NO: 1398108 - DNA, 25 bp, Homo sapien
tgcagcgacactgcactgtactggg

SEQ ID NO: 1398109 - DNA, 25 bp, Homo sapien
cgtgtaaactgcagcgacactgcac

SEQ ID NO: 1398110 - DNA, 25 bp, Homo sapien
taaactgcagcgacactgcactgta

SEQ ID NO: 1398111 - DNA, 25 bp, Homo sapien
actgcagcgacactgcactgtactg

SEQ ID NO: 1398112 - DNA, 25 bp, Homo sapien
agggtgaccattgtaatgacagact

SEQ ID NO: 1398113 - DNA, 25 bp, Homo sapien
tcagggtgaccattgtaatgacaga

SEQ ID NO: 1398114 - DNA, 25 bp, Homo sapien
cagggtgaccattgtaatgacagac

SEQ ID NO: 1398115 - DNA, 25 bp, Homo sapien
cttcagggtgaccattgtaatgaca

SEQ ID NO: 1398116 - DNA, 25 bp, Homo sapien
tctgctaagaaagaacctggagcaa

SEQ ID NO: 1398117 - DNA, 25 bp, Homo sapien
gcccacaagatggtctcccagattg

SEQ ID NO: 1398118 - DNA, 25 bp, Homo sapien
gatggctccaaagtaactaaacagg

SEQ ID NO: 1398119 - DNA, 25 bp, Homo sapien
tagccactatgcagaagagaaagtc

SEQ ID NO: 1398120 - DNA, 25 bp, Homo sapien
tgagagggtctgcaccgcaaagcag

SEQ ID NO: 1398121 - DNA, 25 bp, Homo sapien
ggccatgcaggacaagccaaactct

SEQ ID NO: 1398122 - DNA, 25 bp, Homo sapien
gacctaaaagggaagctgcataatg

SEQ ID NO: 1398123 - DNA, 25 bp, Homo sapien
gatgcacccactggattggccatgc

SEQ ID NO: 1398124 - DNA, 25 bp, Homo sapien
ggaaacactggtatgcaagttgccc

SEQ ID NO: 1398125 - DNA, 25 bp, Homo sapien
ggtatgcaagttgccctggtccagc

SEQ ID NO: 1398126 - DNA, 25 bp, Homo sapien
ctgtctcccttgagtggtcatcaac

SEQ ID NO: 1398127 - DNA, 25 bp, Homo sapien
tctcccttgagtggtcatcaaccca

SEQ ID NO: 1398128 - DNA, 25 bp, Homo sapien
gctcctgccttgaccgtggatctca

SEQ ID NO: 1398129 - DNA, 25 bp, Homo sapien
tgtgaccctgcctgtatctgagtgt

SEQ ID NO: 1398130 - DNA, 25 bp, Homo sapien
gtgtccctgcctgtatctgagcatg

SEQ ID NO: 1398131 - DNA, 25 bp, Homo sapien
tcacacagcgccttgggtgagtgct

SEQ ID NO: 1398132 - DNA, 25 bp, Homo sapien
tctgcccagagagttgtatctgcgg

SEQ ID NO: 1398133 - DNA, 25 bp, Homo sapien
tgctgacccacgcagagccagtggc

SEQ ID NO: 1398134 - DNA, 25 bp, Homo sapien
agtggaggcttccagactcttgaga

SEQ ID NO: 1398135 - DNA, 25 bp, Homo sapien
cgggcttattctttcctggctctgg

SEQ ID NO: 1398136 - DNA, 25 bp, Homo sapien
ttcatccagcagacgcaggacctca

SEQ ID NO: 1398137 - DNA, 25 bp, Homo sapien
gtgtcttgaaacaggcctgggcaac

SEQ ID NO: 1398138 - DNA, 25 bp, Homo sapien
cactaagaccaggaattccttgaat

SEQ ID NO: 1398139 - DNA, 25 bp, Homo sapien
gcctgggcaactttaaacactaaga

SEQ ID NO: 1398140 - DNA, 25 bp, Homo sapien
agttgccctccgtccttgcatagcg

SEQ ID NO: 1398141 - DNA, 25 bp, Homo sapien
caatcacatcggcaaactcttgctc

SEQ ID NO: 1398142 - DNA, 25 bp, Homo sapien
ttgcatagcgcctgaaggcctcgat

SEQ ID NO: 1398143 - DNA, 25 bp, Homo sapien
cccctcgggtgagcgctgtgcagtt

SEQ ID NO: 1398144 - DNA, 25 bp, Homo sapien
atgaaaagttcccttggaggctcca

SEQ ID NO: 1398145 - DNA, 25 bp, Homo sapien
ctggaaaagatgaaaagttcccttg

SEQ ID NO: 1398146 - DNA, 25 bp, Homo sapien
tgaaaagttcccttggaggctccat

SEQ ID NO: 1398147 - DNA, 25 bp, Homo sapien
aagatgaaaagttcccttggaggct

SEQ ID NO: 1398148 - DNA, 25 bp, Homo sapien
tcagcactgcaaagaagcttccaga

SEQ ID NO: 1398149 - DNA, 25 bp, Homo sapien
tagcgttggtttgcccagtgctcac

SEQ ID NO: 1398150 - DNA, 25 bp, Homo sapien
aaacctttgctgatccaggaaggca

SEQ ID NO: 1398151 - DNA, 25 bp, Homo sapien
tcaggagagcatgtttcccaacggt

SEQ ID NO: 1398152 - DNA, 25 bp, Homo sapien
aaacaagtggctgttaagtggtgtg

SEQ ID NO: 1398153 - DNA, 25 bp, Homo sapien
gtggctgttaagtggtgtgaggagt

SEQ ID NO: 1398154 - DNA, 25 bp, Homo sapien
gcccaggtgggatgaaacaagtggc

SEQ ID NO: 1398155 - DNA, 25 bp, Homo sapien
caagtggctgttaagtggtgtgagg

SEQ ID NO: 1398156 - DNA, 25 bp, Homo sapien
atagcccctgatcataaaatcccgg

SEQ ID NO: 1398157 - DNA, 25 bp, Homo sapien
taaaatcccggaagcccagatgctc

SEQ ID NO: 1398158 - DNA, 25 bp, Homo sapien
gcccctgatcataaaatcccggaag

SEQ ID NO: 1398159 - DNA, 25 bp, Homo sapien
tgatcataaaatcccggaagcccag

SEQ ID NO: 1398160 - DNA, 25 bp, Homo sapien
cgattgttgactggtgctctgtgag

SEQ ID NO: 1398161 - DNA, 25 bp, Homo sapien
ggccgattgttgactggtgctctgt

SEQ ID NO: 1398162 - DNA, 25 bp, Homo sapien
tgggtggccgattgttgactggtgc

SEQ ID NO: 1398163 - DNA, 25 bp, Homo sapien
tcagcccatgctcgctgggtggccg

SEQ ID NO: 1398164 - DNA, 25 bp, Homo sapien
tgtgaagaactgcaatgatactcat

SEQ ID NO: 1398165 - DNA, 25 bp, Homo sapien
gttgtgaagaactgcaatgatactc

SEQ ID NO: 1398166 - DNA, 25 bp, Homo sapien
tttgttgtgaagaactgcaatgata

SEQ ID NO: 1398167 - DNA, 25 bp, Homo sapien
tgttgtgaagaactgcaatgatact

SEQ ID NO: 1398168 - DNA, 25 bp, Homo sapien
ctaagagtagaagcggtgccctact

SEQ ID NO: 1398169 - DNA, 25 bp, Homo sapien
agtagaagcggtgccctactagaag

SEQ ID NO: 1398170 - DNA, 25 bp, Homo sapien
ctactagaaggaggggtgcctccac

SEQ ID NO: 1398171 - DNA, 25 bp, Homo sapien
agaagcggtgccctactagaaggag

SEQ ID NO: 1398172 - DNA, 25 bp, Homo sapien
ttgcttctctcgttgcacaacggac

SEQ ID NO: 1398173 - DNA, 25 bp, Homo sapien
gtattttgcttctctcgttgcacaa

SEQ ID NO: 1398174 - DNA, 25 bp, Homo sapien
tttgcttctctcgttgcacaacgga

SEQ ID NO: 1398175 - DNA, 25 bp, Homo sapien
tctgtattttgcttctctcgttgca

SEQ ID NO: 1398176 - DNA, 25 bp, Homo sapien
cagtccaatggaccaagtttgggca

SEQ ID NO: 1398177 - DNA, 25 bp, Homo sapien
ctgctttgggccagtccaatggacc

SEQ ID NO: 1398178 - DNA, 25 bp, Homo sapien
tgggcaggcaatggcagtcagcctt

SEQ ID NO: 1398179 - DNA, 25 bp, Homo sapien
caagtttgggcaggcaatggcagtc

SEQ ID NO: 1398180 - DNA, 25 bp, Homo sapien
agacaaggataaagaaggattttgg

SEQ ID NO: 1398181 - DNA, 25 bp, Homo sapien
tggaggttgaggccattcttgaaga

SEQ ID NO: 1398182 - DNA, 25 bp, Homo sapien
caggatgaactcttggtgctggtgt

SEQ ID NO: 1398183 - DNA, 25 bp, Homo sapien
gtgttttgggcagaaagagcccctg

SEQ ID NO: 1398184 - DNA, 25 bp, Homo sapien
ccacaggccccgccagtccctccga

SEQ ID NO: 1398185 - DNA, 25 bp, Homo sapien
ccaccacaggccccgccagtccctc

SEQ ID NO: 1398186 - DNA, 25 bp, Homo sapien
cttcctgctgtggttccagctctgg

SEQ ID NO: 1398187 - DNA, 25 bp, Homo sapien
acaggccccgccagtccctccgacg

SEQ ID NO: 1398188 - DNA, 25 bp, Homo sapien
tcagagttccagctgctgtggcagt

SEQ ID NO: 1398189 - DNA, 25 bp, Homo sapien
ggcagtggcagtggccagcagtctg

SEQ ID NO: 1398190 - DNA, 25 bp, Homo sapien
tggccagcagtctgggggctccagc

SEQ ID NO: 1398191 - DNA, 25 bp, Homo sapien
gcagtggccagcagtctgggggctc

SEQ ID NO: 1398192 - DNA, 25 bp, Homo sapien
tgagtgtcagctgagcacgtctgtt

SEQ ID NO: 1398193 - DNA, 25 bp, Homo sapien
gatgtgagtgtcagctgagcacgtc

SEQ ID NO: 1398194 - DNA, 25 bp, Homo sapien
cacgtctgttgggaaatgggcccct

SEQ ID NO: 1398195 - DNA, 25 bp, Homo sapien
cagctgagcacgtctgttgggaaat

SEQ ID NO: 1398196 - DNA, 25 bp, Homo sapien
tccagttggagaacgtagtgagtct

SEQ ID NO: 1398197 - DNA, 25 bp, Homo sapien
tagtgagtctttcagtggagccagg

SEQ ID NO: 1398198 - DNA, 25 bp, Homo sapien
tagcaggtggcccattccagttgga

SEQ ID NO: 1398199 - DNA, 25 bp, Homo sapien
gagccagggtctggtaagtctccta

SEQ ID NO: 1398200 - DNA, 25 bp, Homo sapien
caacaaccggagctcaggatgctgc

SEQ ID NO: 1398201 - DNA, 25 bp, Homo sapien
cgccgacagcggagtagtggttgct

SEQ ID NO: 1398202 - DNA, 25 bp, Homo sapien
aggtcccagcgctccaacaaccgga

SEQ ID NO: 1398203 - DNA, 25 bp, Homo sapien
gagacgccgccgacagcggagtagt

SEQ ID NO: 1398204 - DNA, 25 bp, Homo sapien
ggctctcagaaaattgcagctcggc

SEQ ID NO: 1398205 - DNA, 25 bp, Homo sapien
gtgacccaatgagtggggagctctg

SEQ ID NO: 1398206 - DNA, 25 bp, Homo sapien
tggtgacccaatgagtggggagctc

SEQ ID NO: 1398207 - DNA, 25 bp, Homo sapien
tctcagaaaattgcagctcggcttc

SEQ ID NO: 1398208 - DNA, 25 bp, Homo sapien
aaatggctggccctgatggtggtgg

SEQ ID NO: 1398209 - DNA, 25 bp, Homo sapien
gtccaaataggagcacatgccctgt

SEQ ID NO: 1398210 - DNA, 25 bp, Homo sapien
atggtggtggtacctccaggcccac

SEQ ID NO: 1398211 - DNA, 25 bp, Homo sapien
ccaggcatttgggtctcatgtcaaa

SEQ ID NO: 1398212 - DNA, 25 bp, Homo sapien
gcatctcttgtaatgaagctgacct

SEQ ID NO: 1398213 - DNA, 25 bp, Homo sapien
tacgtgttgctgcttatgaggttga

SEQ ID NO: 1398214 - DNA, 25 bp, Homo sapien
catctgcttggactcggtaaggaag

SEQ ID NO: 1398215 - DNA, 25 bp, Homo sapien
ctgcttatgaggttgatggtagtgc

SEQ ID NO: 1398216 - DNA, 25 bp, Homo sapien
gagactgtgaaatgcccagtgggac

SEQ ID NO: 1398217 - DNA, 25 bp, Homo sapien
tacgaggttgggcacaagcactgcc

SEQ ID NO: 1398218 - DNA, 25 bp, Homo sapien
ctgtgaaatgcccagtgggacgctg

SEQ ID NO: 1398219 - DNA, 25 bp, Homo sapien
tatcttttttacgaggttgggcaca

SEQ ID NO: 1398220 - DNA, 25 bp, Homo sapien
tggggagagctcagatcccccacag

SEQ ID NO: 1398221 - DNA, 25 bp, Homo sapien
ctgtacataaaacaagaagtgcctt

SEQ ID NO: 1398222 - DNA, 25 bp, Homo sapien
cataaaacaagaagtgccttctggg

SEQ ID NO: 1398223 - DNA, 25 bp, Homo sapien
agagctcagatcccccacaggaaaa

SEQ ID NO: 1398224 - DNA, 25 bp, Homo sapien
gagggtatatgggaaggcatgcgtc

SEQ ID NO: 1398225 - DNA, 25 bp, Homo sapien
ggtatatgggaaggcatgcgtcaga

SEQ ID NO: 1398226 - DNA, 25 bp, Homo sapien
tatatgggaaggcatgcgtcagatg

SEQ ID NO: 1398227 - DNA, 25 bp, Homo sapien
agggtatatgggaaggcatgcgtca

SEQ ID NO: 1398228 - DNA, 25 bp, Homo sapien
agcagcagcccccagaaccgtggca

SEQ ID NO: 1398229 - DNA, 25 bp, Homo sapien
agcagcccccagaaccgtggcagca

SEQ ID NO: 1398230 - DNA, 25 bp, Homo sapien
ccccagaaccgtggcagcagccaga

SEQ ID NO: 1398231 - DNA, 25 bp, Homo sapien
cagcccccagaaccgtggcagcagc

SEQ ID NO: 1398232 - DNA, 25 bp, Homo sapien
actgcccctgtcacaggagttggac

SEQ ID NO: 1398233 - DNA, 25 bp, Homo sapien
cactgcccctgtcacaggagttgga

SEQ ID NO: 1398234 - DNA, 25 bp, Homo sapien
cgccggcatcggtggtggcgcctgt

SEQ ID NO: 1398235 - DNA, 25 bp, Homo sapien
aagcagccgccctcggagctagggc

SEQ ID NO: 1398236 - DNA, 25 bp, Homo sapien
ccggcatcggtggtggcgcctgtgg

SEQ ID NO: 1398237 - DNA, 25 bp, Homo sapien
gccgccctcggagctagggccacag

SEQ ID NO: 1398238 - DNA, 25 bp, Homo sapien
cagcctgtgaaagccagaagagggt

SEQ ID NO: 1398239 - DNA, 25 bp, Homo sapien
tcctggacatcagacaggaagtgcc

SEQ ID NO: 1398240 - DNA, 25 bp, Homo sapien
tctgggaactcatgcatcaagatgg

SEQ ID NO: 1398241 - DNA, 25 bp, Homo sapien
ggaaaacccctagctcagcctgtga

SEQ ID NO: 1398242 - DNA, 25 bp, Homo sapien
aagcagccgccctcggagctagggc

SEQ ID NO: 1398243 - DNA, 25 bp, Homo sapien
ccggcatcggtggtggcgcctgtgg

SEQ ID NO: 1398244 - DNA, 25 bp, Homo sapien
gccgccctcggagctagggccacag

SEQ ID NO: 1398245 - DNA, 25 bp, Homo sapien
cgccggcatcggtggtggcgcctgt

SEQ ID NO: 1398246 - DNA, 25 bp, Homo sapien
aggcaggagaaggctgttcctgagg

SEQ ID NO: 1398247 - DNA, 25 bp, Homo sapien
ggaggcaggagaaggctgttcctga

SEQ ID NO: 1398248 - DNA, 25 bp, Homo sapien
gaggcaggagaaggctgttcctgag

SEQ ID NO: 1398249 - DNA, 25 bp, Homo sapien
acttcaggtcccatcaatgccggcg

SEQ ID NO: 1398250 - DNA, 25 bp, Homo sapien
aggtcccatcaatgccggcgccaga

SEQ ID NO: 1398251 - DNA, 25 bp, Homo sapien
aatgccggcgccagagatccaactc

SEQ ID NO: 1398252 - DNA, 25 bp, Homo sapien
cacaggcacttcaggtcccatcaat

SEQ ID NO: 1398253 - DNA, 25 bp, Homo sapien
ctgcagctgttgccagagctttggg

SEQ ID NO: 1398254 - DNA, 25 bp, Homo sapien
gctgtgagtttacccactggcagct

SEQ ID NO: 1398255 - DNA, 25 bp, Homo sapien
ctgtgagtttacccactggcagctg

SEQ ID NO: 1398256 - DNA, 25 bp, Homo sapien
tgcagctgttgccagagctttgggc

SEQ ID NO: 1398257 - DNA, 25 bp, Homo sapien
gggcccacagatcccactgacatgc

SEQ ID NO: 1398258 - DNA, 25 bp, Homo sapien
tgctaccggagtcaccatgggccca

SEQ ID NO: 1398259 - DNA, 25 bp, Homo sapien
caggaagctgctaccggagtcacca

SEQ ID NO: 1398260 - DNA, 25 bp, Homo sapien
ctcaagtatccttttggttgtttgc

SEQ ID NO: 1398261 - DNA, 25 bp, Homo sapien
agcagcagcccgcagaactgtggcc

SEQ ID NO: 1398262 - DNA, 25 bp, Homo sapien
agcagcccgcagaactgtggccaca

SEQ ID NO: 1398263 - DNA, 25 bp, Homo sapien
gcagcccgcagaactgtggccacag

SEQ ID NO: 1398264 - DNA, 25 bp, Homo sapien
acagctggagctcccgccttgctga

SEQ ID NO: 1398265 - DNA, 25 bp, Homo sapien
tgggctctttgcagggcacttgggc

SEQ ID NO: 1398266 - DNA, 25 bp, Homo sapien
caacggtgagacctgcggcatctgt

SEQ ID NO: 1398267 - DNA, 25 bp, Homo sapien
gacctgcggcatctgtggtgactca

SEQ ID NO: 1398268 - DNA, 25 bp, Homo sapien
ttggagctctggcaacggcaacggt

SEQ ID NO: 1398269 - DNA, 25 bp, Homo sapien
acaacgcccatgaccctccagggtg

SEQ ID NO: 1398270 - DNA, 25 bp, Homo sapien
tgcaggcgtcccgtgaacacaacgc

SEQ ID NO: 1398271 - DNA, 25 bp, Homo sapien
tctggacgcctgtgagcgcagggtg

SEQ ID NO: 1398272 - DNA, 25 bp, Homo sapien
ctccggacccgatgcgaacagctcc

SEQ ID NO: 1398273 - DNA, 25 bp, Homo sapien
tgtttgcgcagccctttcagcccag

SEQ ID NO: 1398274 - DNA, 25 bp, Homo sapien
tttgcgcagccctttcagcccaggt

SEQ ID NO: 1398275 - DNA, 25 bp, Homo sapien
tctctgccgcctccaccgtgtctgc

SEQ ID NO: 1398276 - DNA, 25 bp, Homo sapien
agcccaggtcctctcgccagctgga

SEQ ID NO: 1398277 - DNA, 25 bp, Homo sapien
gtttggtggaggcaggagaaggttc

SEQ ID NO: 1398278 - DNA, 25 bp, Homo sapien
ttggtggaggcaggagaaggttctt

SEQ ID NO: 1398279 - DNA, 25 bp, Homo sapien
ctggtttggtggaggcaggagaagg

SEQ ID NO: 1398280 - DNA, 25 bp, Homo sapien
tggtggaggcaggagaaggttcttc

SEQ ID NO: 1398281 - DNA, 25 bp, Homo sapien
ctgtggcagcaacggaagctcccac

SEQ ID NO: 1398282 - DNA, 25 bp, Homo sapien
tgtggcagcaacggaagctcccacc

SEQ ID NO: 1398283 - DNA, 25 bp, Homo sapien
ataggtagtaacactggtgggatca

SEQ ID NO: 1398284 - DNA, 25 bp, Homo sapien
catgaccataggtagtaacactggt

SEQ ID NO: 1398285 - DNA, 25 bp, Homo sapien
gcaataccatgaccataggtagtaa

SEQ ID NO: 1398286 - DNA, 25 bp, Homo sapien
aggtagtaacactggtgggatcagc

SEQ ID NO: 1398287 - DNA, 25 bp, Homo sapien
gccacggcagcccccagagctagag

SEQ ID NO: 1398288 - DNA, 25 bp, Homo sapien
accacctcctgagctgcagcagccc

SEQ ID NO: 1398289 - DNA, 25 bp, Homo sapien
ggagccacggcagcccccagagcta

SEQ ID NO: 1398290 - DNA, 25 bp, Homo sapien
cagagctggagccacggcagccccc

SEQ ID NO: 1398291 - DNA, 25 bp, Homo sapien
cctgagaagggcttgccatcctggg

SEQ ID NO: 1398292 - DNA, 25 bp, Homo sapien
ggagcttctaaatctggagtccagt

SEQ ID NO: 1398293 - DNA, 25 bp, Homo sapien
gcttatccctaaactctaacaagtg

SEQ ID NO: 1398294 - DNA, 25 bp, Homo sapien
actctaacaagtggcctgagaaggg

SEQ ID NO: 1398295 - DNA, 25 bp, Homo sapien
taggggaaaactaggtgtgcacttg

SEQ ID NO: 1398296 - DNA, 25 bp, Homo sapien
aaaactaggtgtgcacttgagggcc

SEQ ID NO: 1398297 - DNA, 25 bp, Homo sapien
gggaaaactaggtgtgcacttgagg

SEQ ID NO: 1398298 - DNA, 25 bp, Homo sapien
cttaggggaaaactaggtgtgcact

SEQ ID NO: 1398299 - DNA, 25 bp, Homo sapien
gttctgtcgagagccagttcaatgg

SEQ ID NO: 1398300 - DNA, 25 bp, Homo sapien
tagactcccacatggttctgtcgag

SEQ ID NO: 1398301 - DNA, 25 bp, Homo sapien
ccagtggtaaactcactctggcaac

SEQ ID NO: 1398302 - DNA, 25 bp, Homo sapien
catactcctggtgttgctctttaga

SEQ ID NO: 1398303 - DNA, 25 bp, Homo sapien
ctctatatccgtatgtttggacata

SEQ ID NO: 1398304 - DNA, 25 bp, Homo sapien
tgttgtaggctttcaaagaatgcct

SEQ ID NO: 1398305 - DNA, 25 bp, Homo sapien
tatgtttggacatacatgatccaag

SEQ ID NO: 1398306 - DNA, 25 bp, Homo sapien
tacatgatccaagaatgttgtaggc

SEQ ID NO: 1398307 - DNA, 25 bp, Homo sapien
accagagccccgattgctgtgagag

SEQ ID NO: 1398308 - DNA, 25 bp, Homo sapien
tgttcccctgcagtctcttcctgct

SEQ ID NO: 1398309 - DNA, 25 bp, Homo sapien
ctgtgagagtgaaccttctggggcc

SEQ ID NO: 1398310 - DNA, 25 bp, Homo sapien
ccgattgctgtgagagtgaaccttc

SEQ ID NO: 1398311 - DNA, 25 bp, Homo sapien
cccttccccagtgggcctgctatct

SEQ ID NO: 1398312 - DNA, 25 bp, Homo sapien
tcccttccccagtgggcctgctatc

SEQ ID NO: 1398313 - DNA, 25 bp, Homo sapien
gagaaacagttggtgatctcaagat

SEQ ID NO: 1398314 - DNA, 25 bp, Homo sapien
gatgcctgatggagttctgatctgc

SEQ ID NO: 1398315 - DNA, 25 bp, Homo sapien
tgatctgcaacgctgtacttcaggt

SEQ ID NO: 1398316 - DNA, 25 bp, Homo sapien
tttcctgagaaacagttggtgatct

SEQ ID NO: 1398317 - DNA, 25 bp, Homo sapien
acgtttccacctttatggtctctgc

SEQ ID NO: 1398318 - DNA, 25 bp, Homo sapien
ttcaggaacgtcctgcccacgtttc

SEQ ID NO: 1398319 - DNA, 25 bp, Homo sapien
taatgcaacattcaggaacgtcctg

SEQ ID NO: 1398320 - DNA, 25 bp, Homo sapien
tctgctgtatgcactgaggcaaatc

SEQ ID NO: 1398321 - DNA, 25 bp, Homo sapien
tgactgtgttttgcctgtgctaact

SEQ ID NO: 1398322 - DNA, 25 bp, Homo sapien
tgtgttttgcctgtgctaactccag

SEQ ID NO: 1398323 - DNA, 25 bp, Homo sapien
actgtgttttgcctgtgctaactcc

SEQ ID NO: 1398324 - DNA, 25 bp, Homo sapien
gccaaggtctgctgactgtgttttg

SEQ ID NO: 1398325 - DNA, 25 bp, Homo sapien
gagccccgattgttgtgagtgtgaa

SEQ ID NO: 1398326 - DNA, 25 bp, Homo sapien
caccagagccccgattgttgtgagt

SEQ ID NO: 1398327 - DNA, 25 bp, Homo sapien
cgattgttgtgagtgtgaaccttct

SEQ ID NO: 1398328 - DNA, 25 bp, Homo sapien
acaggccccgtctcttccaccggca

SEQ ID NO: 1398329 - DNA, 25 bp, Homo sapien
gtctgttgtcatggcccaagagccc

SEQ ID NO: 1398330 - DNA, 25 bp, Homo sapien
cttcgtgaagtaccctggccattgt

SEQ ID NO: 1398331 - DNA, 25 bp, Homo sapien
gcctcttcgtgaagtaccctggcca

SEQ ID NO: 1398332 - DNA, 25 bp, Homo sapien
ctcttcgtgaagtaccctggccatt

SEQ ID NO: 1398333 - DNA, 25 bp, Homo sapien
ttgcctcttcgtgaagtaccctggc

SEQ ID NO: 1398334 - DNA, 25 bp, Homo sapien
cagagctctaactgctgtggcagtg

SEQ ID NO: 1398335 - DNA, 25 bp, Homo sapien
tcagagctctaactgctgtggcagt

SEQ ID NO: 1398336 - DNA, 25 bp, Homo sapien
tcaattattactgacagctcctgca

SEQ ID NO: 1398337 - DNA, 25 bp, Homo sapien
gagtgcttggcaaagacggctccag

SEQ ID NO: 1398338 - DNA, 25 bp, Homo sapien
aattattactgacagctcctgcatc

SEQ ID NO: 1398339 - DNA, 25 bp, Homo sapien
tcctccactgagccatgtgagtgct

SEQ ID NO: 1398340 - DNA, 25 bp, Homo sapien
ctccagtcttgttctgccgcagtgt

SEQ ID NO: 1398341 - DNA, 25 bp, Homo sapien
ttgttctgccgcagtgtcagctccg

SEQ ID NO: 1398342 - DNA, 25 bp, Homo sapien
tgataccagacctagaaccctgact

SEQ ID NO: 1398343 - DNA, 25 bp, Homo sapien
agctccggggattgttgtggcccca

SEQ ID NO: 1398344 - DNA, 25 bp, Homo sapien
agggtacatatgagagctggaacct

SEQ ID NO: 1398345 - DNA, 25 bp, Homo sapien
gctggaaccttagcctgaagctcca

SEQ ID NO: 1398346 - DNA, 25 bp, Homo sapien
tggagggtacatatgagagctggaa

SEQ ID NO: 1398347 - DNA, 25 bp, Homo sapien
agctggaaccttagcctgaagctcc

SEQ ID NO: 1398348 - DNA, 25 bp, Homo sapien
cttcctcttttatgtcactctggta

SEQ ID NO: 1398349 - DNA, 25 bp, Homo sapien
cctcttttatgtcactctggtaaga

SEQ ID NO: 1398350 - DNA, 25 bp, Homo sapien
tcctcttttatgtcactctggtaag

SEQ ID NO: 1398351 - DNA, 25 bp, Homo sapien
acttcctcttttatgtcactctggt

SEQ ID NO: 1398352 - DNA, 25 bp, Homo sapien
agctgtggcccgcagccctcctggg

SEQ ID NO: 1398353 - DNA, 25 bp, Homo sapien
agagctgtggcccgcagccctcctg

SEQ ID NO: 1398354 - DNA, 25 bp, Homo sapien
tcagacgccgctcccagagctgtgg

SEQ ID NO: 1398355 - DNA, 25 bp, Homo sapien
ctcctggggcgcctcctgccctgag

SEQ ID NO: 1398356 - DNA, 25 bp, Homo sapien
tgtttgtatccagaaccacttccag

SEQ ID NO: 1398357 - DNA, 25 bp, Homo sapien
agagtcaccactgcagcgatgtcca

SEQ ID NO: 1398358 - DNA, 25 bp, Homo sapien
cacggcgtcttgaccagtgtccaga

SEQ ID NO: 1398359 - DNA, 25 bp, Homo sapien
atgcataagtctagaaccacgcccg

SEQ ID NO: 1398360 - DNA, 25 bp, Homo sapien
gattccattaggcatgggtggtctt

SEQ ID NO: 1398361 - DNA, 25 bp, Homo sapien
tgactctgcattcctcaactggtcc

SEQ ID NO: 1398362 - DNA, 25 bp, Homo sapien
catgggtggtcttggcagcatgaag

SEQ ID NO: 1398363 - DNA, 25 bp, Homo sapien
tggaaccatttgagtctgactctgc

SEQ ID NO: 1398364 - DNA, 25 bp, Homo sapien
ctgcttttctgggtgcccatgactg

SEQ ID NO: 1398365 - DNA, 25 bp, Homo sapien
atgactgctcttctgggtacccact

SEQ ID NO: 1398366 - DNA, 25 bp, Homo sapien
catgactgctcttctgggtacccac

SEQ ID NO: 1398367 - DNA, 25 bp, Homo sapien
tcccaagtgcactcccaagtgccct

SEQ ID NO: 1398368 - DNA, 25 bp, Homo sapien
cctcccaagtgcactcccaagtgcc

SEQ ID NO: 1398369 - DNA, 25 bp, Homo sapien
cccaagtgcactcccaagtgccctc

SEQ ID NO: 1398370 - DNA, 25 bp, Homo sapien
caagtgcactcccaagtgccctccc

SEQ ID NO: 1398371 - DNA, 25 bp, Homo sapien
tgcagcgtcagctccggaggctgct

SEQ ID NO: 1398372 - DNA, 25 bp, Homo sapien
gtctcttcctgctgcagcgtcagct

SEQ ID NO: 1398373 - DNA, 25 bp, Homo sapien
tgctgcagcgtcagctccggaggct

SEQ ID NO: 1398374 - DNA, 25 bp, Homo sapien
tcctgctgcagcgtcagctccggag

SEQ ID NO: 1398375 - DNA, 25 bp, Homo sapien
acagacggcgtaggtcccaccgcca

SEQ ID NO: 1398376 - DNA, 25 bp, Homo sapien
caccacagacggcgtaggtcccacc

SEQ ID NO: 1398377 - DNA, 25 bp, Homo sapien
gacggcgtaggtcccaccgccacag

SEQ ID NO: 1398378 - DNA, 25 bp, Homo sapien
accacagacggcgtaggtcccaccg

SEQ ID NO: 1398379 - DNA, 25 bp, Homo sapien
cgcctggcctgggaataccaaatag

SEQ ID NO: 1398380 - DNA, 25 bp, Homo sapien
gcctggcctgggaataccaaataga

SEQ ID NO: 1398381 - DNA, 25 bp, Homo sapien
ctcccaagtgcactcccaagtgccc

SEQ ID NO: 1398382 - DNA, 25 bp, Homo sapien
tcccaagtgccctcccaagtgtccc

SEQ ID NO: 1398383 - DNA, 25 bp, Homo sapien
ctactgccgagatgtcctgccagca

SEQ ID NO: 1398384 - DNA, 25 bp, Homo sapien
caagtgcactcccaagtgccctccc

SEQ ID NO: 1398385 - DNA, 25 bp, Homo sapien
aagtgtccccctaagtgccctccag

SEQ ID NO: 1398386 - DNA, 25 bp, Homo sapien
tcttcctgctgcagtgtcagctccg

SEQ ID NO: 1398387 - DNA, 25 bp, Homo sapien
caaatgccctccaaagtgtccccct

SEQ ID NO: 1398388 - DNA, 25 bp, Homo sapien
tgcagtgtcagctccggaggctgct

SEQ ID NO: 1398389 - DNA, 25 bp, Homo sapien
tgaagtggaccttgacttcctcttc

SEQ ID NO: 1398390 - DNA, 25 bp, Homo sapien
gaagtggaccttgacttcctcttcc

SEQ ID NO: 1398391 - DNA, 25 bp, Homo sapien
ctgtattctgtgctgcctgaactga

SEQ ID NO: 1398392 - DNA, 25 bp, Homo sapien
aataaaatccagaatctgcccccca

SEQ ID NO: 1398393 - DNA, 25 bp, Homo sapien
ctgtgctgcctgaactgaagaaata

SEQ ID NO: 1398394 - DNA, 25 bp, Homo sapien
attctgtgctgcctgaactgaagaa

SEQ ID NO: 1398395 - DNA, 25 bp, Homo sapien
gctcccctgtgtctgctggtggctg

SEQ ID NO: 1398396 - DNA, 25 bp, Homo sapien
tcatccttgttctgctcccctgtgt

SEQ ID NO: 1398397 - DNA, 25 bp, Homo sapien
gtgtcatccttgttctgctcccctg

SEQ ID NO: 1398398 - DNA, 25 bp, Homo sapien
ttgtgtcatccttgttctgctcccc

SEQ ID NO: 1398399 - DNA, 25 bp, Homo sapien
caaggggactgcagacttgcaagtg

SEQ ID NO: 1398400 - DNA, 25 bp, Homo sapien
catattctggatattcggttgaagg

SEQ ID NO: 1398401 - DNA, 25 bp, Homo sapien
gatattcggttgaaggctgctgaaa

SEQ ID NO: 1398402 - DNA, 25 bp, Homo sapien
tttagagcaccaatgagtcagtggc

SEQ ID NO: 1398403 - DNA, 25 bp, Homo sapien
ggtgctaaagaaccctgtgctgcct

SEQ ID NO: 1398404 - DNA, 25 bp, Homo sapien
ctcctgaggtgctaaagaaccctgt

SEQ ID NO: 1398405 - DNA, 25 bp, Homo sapien
gtgctgcctgtgactccggtaagaa

SEQ ID NO: 1398406 - DNA, 25 bp, Homo sapien
tgactccggtaagaacagagcaggg

SEQ ID NO: 1398407 - DNA, 25 bp, Homo sapien
tgaagtggaccttgacttcctcttc

SEQ ID NO: 1398408 - DNA, 25 bp, Homo sapien
gaagtggaccttgacttcctcttcc

SEQ ID NO: 1398409 - DNA, 25 bp, Homo sapien
gctcccctgtgtctgctggtggctg

SEQ ID NO: 1398410 - DNA, 25 bp, Homo sapien
gtgtcatccttgttctgctcccctg

SEQ ID NO: 1398411 - DNA, 25 bp, Homo sapien
tcatccttgttctgctcccctgtgt

SEQ ID NO: 1398412 - DNA, 25 bp, Homo sapien
ttgtgtcatccttgttctgctcccc

SEQ ID NO: 1398413 - DNA, 25 bp, Homo sapien
gcaaatgacattgagtaagctaggg

SEQ ID NO: 1398414 - DNA, 25 bp, Homo sapien
ccagggaaaagatatgctcttggca

SEQ ID NO: 1398415 - DNA, 25 bp, Homo sapien
aatcagcagatgcacgctgcaaatg

SEQ ID NO: 1398416 - DNA, 25 bp, Homo sapien
gaggatctgagtttctggactccag

SEQ ID NO: 1398417 - DNA, 25 bp, Homo sapien
tggcagtttgcggtcctggattctg

SEQ ID NO: 1398418 - DNA, 25 bp, Homo sapien
tctgctcttctaggctcagggtcca

SEQ ID NO: 1398419 - DNA, 25 bp, Homo sapien
tctcaggcaggcctagtaggagaag

SEQ ID NO: 1398420 - DNA, 25 bp, Homo sapien
atgtccttggcagtttgcggtcctg

SEQ ID NO: 1398421 - DNA, 25 bp, Homo sapien
agtgctggccactccccccgccaca

SEQ ID NO: 1398422 - DNA, 25 bp, Homo sapien
tggagccccccgagggctggctgca

SEQ ID NO: 1398423 - DNA, 25 bp, Homo sapien
agagtgctggccactccccccgcca

SEQ ID NO: 1398424 - DNA, 25 bp, Homo sapien
ccagagtgctggccactccccccgc

SEQ ID NO: 1398425 - DNA, 25 bp, Homo sapien
tgtggcagtgggacctacggcgcct

SEQ ID NO: 1398426 - DNA, 25 bp, Homo sapien
cagtgggacctacggcgcctgtggt

SEQ ID NO: 1398427 - DNA, 25 bp, Homo sapien
ctgtggcagtgggacctacggcgcc

SEQ ID NO: 1398428 - DNA, 25 bp, Homo sapien
tggcagtgggacctacggcgcctgt

SEQ ID NO: 1398429 - DNA, 25 bp, Homo sapien
acaggagggcacttagggggacact

SEQ ID NO: 1398430 - DNA, 25 bp, Homo sapien
agacaggagggcacttagggggaca

SEQ ID NO: 1398431 - DNA, 25 bp, Homo sapien
gacaggagggcacttagggggacac

SEQ ID NO: 1398432 - DNA, 25 bp, Homo sapien
agagacaggagggcacttaggggga

SEQ ID NO: 1398433 - DNA, 25 bp, Homo sapien
cactgctgctggctctgctggcagg

SEQ ID NO: 1398434 - DNA, 25 bp, Homo sapien
gctgctggctctgctggcaggacat

SEQ ID NO: 1398435 - DNA, 25 bp, Homo sapien
tgctgctggctctgctggcaggaca

SEQ ID NO: 1398436 - DNA, 25 bp, Homo sapien
ttgggagggggctggcactgctgct

SEQ ID NO: 1398437 - DNA, 25 bp, Homo sapien
gagagtcaaacagcaagtcagacct

SEQ ID NO: 1398438 - DNA, 25 bp, Homo sapien
tcaaacagcaagtcagacctaggca

SEQ ID NO: 1398439 - DNA, 25 bp, Homo sapien
ctgaaagagagtcaaacagcaagtc

SEQ ID NO: 1398440 - DNA, 25 bp, Homo sapien
gaaagagagtcaaacagcaagtcag

SEQ ID NO: 1398441 - DNA, 25 bp, Homo sapien
gtcacaggcagcacagggtccttca

SEQ ID NO: 1398442 - DNA, 25 bp, Homo sapien
tcacaggcagcacagggtccttcag

SEQ ID NO: 1398443 - DNA, 25 bp, Homo sapien
gggtcacaggcagcacagggtcctt

SEQ ID NO: 1398444 - DNA, 25 bp, Homo sapien
caggcagcacagggtccttcagcac

SEQ ID NO: 1398445 - DNA, 25 bp, Homo sapien
tacccacgaaggcagacatgtgcag

SEQ ID NO: 1398446 - DNA, 25 bp, Homo sapien
ctaagtggccatattccatactggc

SEQ ID NO: 1398447 - DNA, 25 bp, Homo sapien
gccatattccatactggcagcagct

SEQ ID NO: 1398448 - DNA, 25 bp, Homo sapien
agcagctctcctgaatacccacgaa

SEQ ID NO: 1398449 - DNA, 25 bp, Homo sapien
tgacctcagtaagtgttccctgggt

SEQ ID NO: 1398450 - DNA, 25 bp, Homo sapien
tgcttgtgacctcagtaagtgttcc

SEQ ID NO: 1398451 - DNA, 25 bp, Homo sapien
tcctgtgctgcttgtgacctcagta

SEQ ID NO: 1398452 - DNA, 25 bp, Homo sapien
agtgttccctgggtactgaagcagg

SEQ ID NO: 1398453 - DNA, 25 bp, Homo sapien
ccctcccaagtgcatccccaagtgc

SEQ ID NO: 1398454 - DNA, 25 bp, Homo sapien
agccccctcccaagtgcatccccaa

SEQ ID NO: 1398455 - DNA, 25 bp, Homo sapien
tcccaagtgcatccccaagtgccct

SEQ ID NO: 1398456 - DNA, 25 bp, Homo sapien
tccccaagtgccctcccaagtgcct

SEQ ID NO: 1398457 - DNA, 25 bp, Homo sapien
caccacaggcgccgtaggtcccact

SEQ ID NO: 1398458 - DNA, 25 bp, Homo sapien
gcagccagccctccgggggctccag

SEQ ID NO: 1398459 - DNA, 25 bp, Homo sapien
ctggctgctgcagccagccctccgg

SEQ ID NO: 1398460 - DNA, 25 bp, Homo sapien
tgcagccagccctccgggggctcca

SEQ ID NO: 1398461 - DNA, 25 bp, Homo sapien
ctgctgcagccagccctccgggggc

SEQ ID NO: 1398462 - DNA, 25 bp, Homo sapien
ggctgctgctgaagcggactctgca

SEQ ID NO: 1398463 - DNA, 25 bp, Homo sapien
gctgctgctgaagcggactctgcac

SEQ ID NO: 1398464 - DNA, 25 bp, Homo sapien
gaggaaagaggtaggaccagatctc

SEQ ID NO: 1398465 - DNA, 25 bp, Homo sapien
gaaagaggtaggaccagatctcttg

SEQ ID NO: 1398466 - DNA, 25 bp, Homo sapien
gaggtaggaccagatctcttggcct

SEQ ID NO: 1398467 - DNA, 25 bp, Homo sapien
ggaccagatctcttggcctttcttc

SEQ ID NO: 1398468 - DNA, 25 bp, Homo sapien
ctctacagatctgggcttcagtggc

SEQ ID NO: 1398469 - DNA, 25 bp, Homo sapien
tcattgatgggtattagaccaacac

SEQ ID NO: 1398470 - DNA, 25 bp, Homo sapien
tatactctgctttggcacaacaagg

SEQ ID NO: 1398471 - DNA, 25 bp, Homo sapien
gaatagactgtatggagttcctccc

SEQ ID NO: 1398472 - DNA, 25 bp, Homo sapien
cccagcattctgactgctgtgagca

SEQ ID NO: 1398473 - DNA, 25 bp, Homo sapien
tctgactgctgtgagcacgagtctt

SEQ ID NO: 1398474 - DNA, 25 bp, Homo sapien
tgagcacgagtcttctagatgttcc

SEQ ID NO: 1398475 - DNA, 25 bp, Homo sapien
gctgtgagcacgagtcttctagatg

SEQ ID NO: 1398476 - DNA, 25 bp, Homo sapien
acctccatacagctgatatgggcag

SEQ ID NO: 1398477 - DNA, 25 bp, Homo sapien
gggcagcaagcaggcttgcaaaggg

SEQ ID NO: 1398478 - DNA, 25 bp, Homo sapien
caggcttgcaaagggggccgcagct

SEQ ID NO: 1398479 - DNA, 25 bp, Homo sapien
cccacctccatacagctgatatggg

SEQ ID NO: 1398480 - DNA, 25 bp, Homo sapien
ggccatggaggggctttggtttcag

SEQ ID NO: 1398481 - DNA, 25 bp, Homo sapien
aggccatggaggggctttggtttca

SEQ ID NO: 1398482 - DNA, 25 bp, Homo sapien
gccatggaggggctttggtttcagg

SEQ ID NO: 1398483 - DNA, 25 bp, Homo sapien
gatgggtattcttatattgatcacc

SEQ ID NO: 1398484 - DNA, 25 bp, Homo sapien
cttatattgatcaccttgatcatgc

SEQ ID NO: 1398485 - DNA, 25 bp, Homo sapien
cttatcaccttgatgggtattctta

SEQ ID NO: 1398486 - DNA, 25 bp, Homo sapien
aagattcttatacttatcaccttga

SEQ ID NO: 1398487 - DNA, 25 bp, Homo sapien
tttccttagattattcagtgacagt

SEQ ID NO: 1398488 - DNA, 25 bp, Homo sapien
ggaaaacaagtgttcctcaggtcta

SEQ ID NO: 1398489 - DNA, 25 bp, Homo sapien
cctgaagagacagcacccgggaaaa

SEQ ID NO: 1398490 - DNA, 25 bp, Homo sapien
caagtgttcctcaggtctaaggccc

SEQ ID NO: 1398491 - DNA, 25 bp, Homo sapien
gaagagacagcacccgggaaaacaa

SEQ ID NO: 1398492 - DNA, 25 bp, Homo sapien
gccataggagggaccagggcggaaa

SEQ ID NO: 1398493 - DNA, 25 bp, Homo sapien
tgggaccacaacagtggcgttcatc

SEQ ID NO: 1398494 - DNA, 25 bp, Homo sapien
ggccacttctagaccctctattctg

SEQ ID NO: 1398495 - DNA, 25 bp, Homo sapien
ctgctctgggaccacaacagtggcg

SEQ ID NO: 1398496 - DNA, 25 bp, Homo sapien
cagggacgttcccagaagagcttgg

SEQ ID NO: 1398497 - DNA, 25 bp, Homo sapien
ggcccagggacgttcccagaagagc

SEQ ID NO: 1398498 - DNA, 25 bp, Homo sapien
cccagggacgttcccagaagagctt

SEQ ID NO: 1398499 - DNA, 25 bp, Homo sapien
tgaggcccagggacgttcccagaag

SEQ ID NO: 1398500 - DNA, 25 bp, Homo sapien
aggaagatgggtagatagaagtaaa

SEQ ID NO: 1398501 - DNA, 25 bp, Homo sapien
gaagatgggtagatagaagtaaagc

SEQ ID NO: 1398502 - DNA, 25 bp, Homo sapien
tgggtagatagaagtaaagcaagag

SEQ ID NO: 1398503 - DNA, 25 bp, Homo sapien
gatgggtagatagaagtaaagcaag

SEQ ID NO: 1398504 - DNA, 25 bp, Homo sapien
ctgtcaaacccagcagcagccccat

SEQ ID NO: 1398505 - DNA, 25 bp, Homo sapien
ggctgtcaaacccagcagcagcccc

SEQ ID NO: 1398506 - DNA, 25 bp, Homo sapien
caggacaagggctgtcaaacccagc

SEQ ID NO: 1398507 - DNA, 25 bp, Homo sapien
ggacaagggctgtcaaacccagcag

SEQ ID NO: 1398508 - DNA, 25 bp, Homo sapien
tagtactcagttgaagactcaagaa

SEQ ID NO: 1398509 - DNA, 25 bp, Homo sapien
ccctataaatatacttaagctctgt

SEQ ID NO: 1398510 - DNA, 25 bp, Homo sapien
ctaaattgtacccactactgaagca

SEQ ID NO: 1398511 - DNA, 25 bp, Homo sapien
ccttctgagtatcctatctgaagcc

SEQ ID NO: 1398512 - DNA, 25 bp, Homo sapien
tgggaacaaggaggctcctaggagg

SEQ ID NO: 1398513 - DNA, 25 bp, Homo sapien
gaaatgatagtccagaggtggtaga

SEQ ID NO: 1398514 - DNA, 25 bp, Homo sapien
ggaaatgatagtccagaggtggtag

SEQ ID NO: 1398515 - DNA, 25 bp, Homo sapien
gctccacttatttcgggtccgctag

SEQ ID NO: 1398516 - DNA, 25 bp, Homo sapien
ctcagatcgtctcatacaagggaag

SEQ ID NO: 1398517 - DNA, 25 bp, Homo sapien
ggtaggacagccaaagcacctggaa

SEQ ID NO: 1398518 - DNA, 25 bp, Homo sapien
ggtccaagacattcaaccagccctg

SEQ ID NO: 1398519 - DNA, 25 bp, Homo sapien
cagttccagtggtagaagcctatca

SEQ ID NO: 1398520 - DNA, 25 bp, Homo sapien
tgcaatactggctgatagcactggt

SEQ ID NO: 1398521 - DNA, 25 bp, Homo sapien
gactgtccacttgctaaaggtggca

SEQ ID NO: 1398522 - DNA, 25 bp, Homo sapien
tgagcaactacaaggaaggacttcc

SEQ ID NO: 1398523 - DNA, 25 bp, Homo sapien
tcattccatagcatgaggccataca

SEQ ID NO: 1398524 - DNA, 25 bp, Homo sapien
tacaggatgagggtatgtcttggtc

SEQ ID NO: 1398525 - DNA, 25 bp, Homo sapien
ggtactcctctctcacgatggtcaa

SEQ ID NO: 1398526 - DNA, 25 bp, Homo sapien
tctcacgatggtcaagtcactgggt

SEQ ID NO: 1398527 - DNA, 25 bp, Homo sapien
ggtcctggctcacaatgctggctgc

SEQ ID NO: 1398528 - DNA, 25 bp, Homo sapien
cctggctcacaatgctggctgccag

SEQ ID NO: 1398529 - DNA, 25 bp, Homo sapien
aggtcctggctcacaatgctggctg

SEQ ID NO: 1398530 - DNA, 25 bp, Homo sapien
tcctggctcacaatgctggctgcca

SEQ ID NO: 1398531 - DNA, 25 bp, Homo sapien
caaggatctggttctaaactatcta

SEQ ID NO: 1398532 - DNA, 25 bp, Homo sapien
gctgcagtttccatctcagacaagg

SEQ ID NO: 1398533 - DNA, 25 bp, Homo sapien
gcagccacacttcacacttgcagga

SEQ ID NO: 1398534 - DNA, 25 bp, Homo sapien
tacattgccctgctggaaacatgag

SEQ ID NO: 1398535 - DNA, 25 bp, Homo sapien
tcaagtatgtaattaggagacagtc

SEQ ID NO: 1398536 - DNA, 25 bp, Homo sapien
acacacacccgacagtaaatatttg

SEQ ID NO: 1398537 - DNA, 25 bp, Homo sapien
tgcagacccacagggaatccaaact

SEQ ID NO: 1398538 - DNA, 25 bp, Homo sapien
gattgaagtgaccaaataatgcaga

SEQ ID NO: 1398539 - DNA, 25 bp, Homo sapien
ttccctttggccagtgtcaagcaaa

SEQ ID NO: 1398540 - DNA, 25 bp, Homo sapien
tccctttggccagtgtcaagcaaaa

SEQ ID NO: 1398541 - DNA, 25 bp, Homo sapien
ccctttggccagtgtcaagcaaaac

SEQ ID NO: 1398542 - DNA, 25 bp, Homo sapien
cctttggccagtgtcaagcaaaact

SEQ ID NO: 1398543 - DNA, 25 bp, Homo sapien
gaatgcagttttttcctcttggaag

SEQ ID NO: 1398544 - DNA, 25 bp, Homo sapien
atgcagttttttcctcttggaagtt

SEQ ID NO: 1398545 - DNA, 25 bp, Homo sapien
tgaatgcagttttttcctcttggaa

SEQ ID NO: 1398546 - DNA, 25 bp, Homo sapien
gatgaatgcagttttttcctcttgg

SEQ ID NO: 1398547 - DNA, 25 bp, Homo sapien
tattgaccctgcagttagcatgctg

SEQ ID NO: 1398548 - DNA, 25 bp, Homo sapien
tctgcgtaaggctgaacgtctcact

SEQ ID NO: 1398549 - DNA, 25 bp, Homo sapien
ctagtcttcttgttgctcgggtgca

SEQ ID NO: 1398550 - DNA, 25 bp, Homo sapien
gatcaagtgaaccatccctagtctt

SEQ ID NO: 1398551 - DNA, 25 bp, Homo sapien
aattctacctgcaaggtcccctcca

SEQ ID NO: 1398552 - DNA, 25 bp, Homo sapien
ttctacctgcaaggtcccctccaat

SEQ ID NO: 1398553 - DNA, 25 bp, Homo sapien
tctacctgcaaggtcccctccaatg

SEQ ID NO: 1398554 - DNA, 25 bp, Homo sapien
tacctgcaaggtcccctccaatgct

SEQ ID NO: 1398555 - DNA, 25 bp, Homo sapien
cctgtgcatccatggaaggctttgg

SEQ ID NO: 1398556 - DNA, 25 bp, Homo sapien
tcttttgctgtcacagatcatcaca

SEQ ID NO: 1398557 - DNA, 25 bp, Homo sapien
agaacacatcaacagaattgtctga

SEQ ID NO: 1398558 - DNA, 25 bp, Homo sapien
caggccacaggttaaggagaaagaa

SEQ ID NO: 1398559 - DNA, 25 bp, Homo sapien
ggtggacactttggctggcagggtg

SEQ ID NO: 1398560 - DNA, 25 bp, Homo sapien
ggaaggtgtcacaggaggatatttc

SEQ ID NO: 1398561 - DNA, 25 bp, Homo sapien
gggaaggtgtcacaggaggatattt

SEQ ID NO: 1398562 - DNA, 25 bp, Homo sapien
cttgggtggacactttggctggcag

SEQ ID NO: 1398563 - DNA, 25 bp, Homo sapien
ttgcactgctgctgttgataagaca

SEQ ID NO: 1398564 - DNA, 25 bp, Homo sapien
ctgcttgcactgctgctgttgataa

SEQ ID NO: 1398565 - DNA, 25 bp, Homo sapien
gcttgcactgctgctgttgataaga

SEQ ID NO: 1398566 - DNA, 25 bp, Homo sapien
tgcactgctgctgttgataagacat

SEQ ID NO: 1398567 - DNA, 25 bp, Homo sapien
aagtcccagtgggttgacttgagca

SEQ ID NO: 1398568 - DNA, 25 bp, Homo sapien
gctgtttgggaaggattgcaggctc

SEQ ID NO: 1398569 - DNA, 25 bp, Homo sapien
tcacaagccatttctcttatcatta

SEQ ID NO: 1398570 - DNA, 25 bp, Homo sapien
tatcattatctgtagtaaagtccca

SEQ ID NO: 1398571 - DNA, 25 bp, Homo sapien
caaagcagatcggtgctagagtacc

SEQ ID NO: 1398572 - DNA, 25 bp, Homo sapien
ttctccaaagcagatcggtgctaga

SEQ ID NO: 1398573 - DNA, 25 bp, Homo sapien
gatcggtgctagagtaccaggagtt

SEQ ID NO: 1398574 - DNA, 25 bp, Homo sapien
gcagatcggtgctagagtaccagga

SEQ ID NO: 1398575 - DNA, 25 bp, Homo sapien
acagcacgtttgctacttggtgcca

SEQ ID NO: 1398576 - DNA, 25 bp, Homo sapien
gcatcccaggacagatttgagagtg

SEQ ID NO: 1398577 - DNA, 25 bp, Homo sapien
cacattcgtagaggcacttgcatcc

SEQ ID NO: 1398578 - DNA, 25 bp, Homo sapien
tctgcaccacatttgtagcttctgc

SEQ ID NO: 1398579 - DNA, 25 bp, Homo sapien
cagctgagttgaaccgacagggaac

SEQ ID NO: 1398580 - DNA, 25 bp, Homo sapien
gggacactacacaccaagattggtt

SEQ ID NO: 1398581 - DNA, 25 bp, Homo sapien
ttgcataggagacttcagcccctgg

SEQ ID NO: 1398582 - DNA, 25 bp, Homo sapien
acagctgccactaagggaccgagat

SEQ ID NO: 1398583 - DNA, 25 bp, Homo sapien
tgggcagattactggctaaggagaa

SEQ ID NO: 1398584 - DNA, 25 bp, Homo sapien
tcatgggcagattactggctaagga

SEQ ID NO: 1398585 - DNA, 25 bp, Homo sapien
caaaggtggtagaagctcgtgacca

SEQ ID NO: 1398586 - DNA, 25 bp, Homo sapien
agaaactttttgctgtcagggatca

SEQ ID NO: 1398587 - DNA, 25 bp, Homo sapien
tcttcggtggatactttgactggca

SEQ ID NO: 1398588 - DNA, 25 bp, Homo sapien
acttgctcttcggtggatactttga

SEQ ID NO: 1398589 - DNA, 25 bp, Homo sapien
cttcggtggatactttgactggcag

SEQ ID NO: 1398590 - DNA, 25 bp, Homo sapien
tgctcttcggtggatactttgactg

SEQ ID NO: 1398591 - DNA, 25 bp, Homo sapien
ctcagggcacttcgggggtggacat

SEQ ID NO: 1398592 - DNA, 25 bp, Homo sapien
gctcagggcacttcgggggtggaca

SEQ ID NO: 1398593 - DNA, 25 bp, Homo sapien
atggctctgggcactttggcgtggg

SEQ ID NO: 1398594 - DNA, 25 bp, Homo sapien
tccaaggcagatcagtgctcaggta

SEQ ID NO: 1398595 - DNA, 25 bp, Homo sapien
caggttctccaaggcagatcagtgc

SEQ ID NO: 1398596 - DNA, 25 bp, Homo sapien
tctccaaggcagatcagtgctcagg

SEQ ID NO: 1398597 - DNA, 25 bp, Homo sapien
gttctccaaggcagatcagtgctca

SEQ ID NO: 1398598 - DNA, 25 bp, Homo sapien
ggaaaccttttgctatcagggaaca

SEQ ID NO: 1398599 - DNA, 25 bp, Homo sapien
ccttttgctatcagggaacatcatg

SEQ ID NO: 1398600 - DNA, 25 bp, Homo sapien
gggaaagaagctccctatgaatcca

SEQ ID NO: 1398601 - DNA, 25 bp, Homo sapien
gaatccatgataagctttgatgaga

SEQ ID NO: 1398602 - DNA, 25 bp, Homo sapien
ggaaggtgtcacaggaggatatttc

SEQ ID NO: 1398603 - DNA, 25 bp, Homo sapien
tacttgctcttcggtggatactttg

SEQ ID NO: 1398604 - DNA, 25 bp, Homo sapien
gggaaggtgtcacaggaggatattt

SEQ ID NO: 1398605 - DNA, 25 bp, Homo sapien
ggggaaggtgtcacaggaggatatt

SEQ ID NO: 1398606 - DNA, 25 bp, Homo sapien
ctcagggcacttcgggggtggacat

SEQ ID NO: 1398607 - DNA, 25 bp, Homo sapien
gctcagggcacttcgggggtggaca

SEQ ID NO: 1398608 - DNA, 25 bp, Homo sapien
ttgcactgctgctgttgataagaca

SEQ ID NO: 1398609 - DNA, 25 bp, Homo sapien
tgcactgctgctgttgataagacat

SEQ ID NO: 1398610 - DNA, 25 bp, Homo sapien
ctgcttgcactgctgctgttgataa

SEQ ID NO: 1398611 - DNA, 25 bp, Homo sapien
gcttgcactgctgctgttgataaga

SEQ ID NO: 1398612 - DNA, 25 bp, Homo sapien
cagtttctccaaagcagatcggtgc

SEQ ID NO: 1398613 - DNA, 25 bp, Homo sapien
tccaaagcagatcggtgctcgagta

SEQ ID NO: 1398614 - DNA, 25 bp, Homo sapien
gtttctccaaagcagatcggtgctc

SEQ ID NO: 1398615 - DNA, 25 bp, Homo sapien
ttctccaaagcagatcggtgctcga

SEQ ID NO: 1398616 - DNA, 25 bp, Homo sapien
gaaaagtgacaattgcacaggtgtt

SEQ ID NO: 1398617 - DNA, 25 bp, Homo sapien
aaagtgacaattgcacaggtgttag

SEQ ID NO: 1398618 - DNA, 25 bp, Homo sapien
ctggtccttcttccaaagctctggg

SEQ ID NO: 1398619 - DNA, 25 bp, Homo sapien
agaaaagtgacaattgcacaggtgt

SEQ ID NO: 1398620 - DNA, 25 bp, Homo sapien
ggtggacactttggctggcagggtg

SEQ ID NO: 1398621 - DNA, 25 bp, Homo sapien
tgggtggacactttggctggcaggg

SEQ ID NO: 1398622 - DNA, 25 bp, Homo sapien
ttgggtggacactttggctggcagg

SEQ ID NO: 1398623 - DNA, 25 bp, Homo sapien
cttgggtggacactttggctggcag

SEQ ID NO: 1398624 - DNA, 25 bp, Homo sapien
ctgctgttgataagacatcctgctg

SEQ ID NO: 1398625 - DNA, 25 bp, Homo sapien
tgctgttgataagacatcctgctgg

SEQ ID NO: 1398626 - DNA, 25 bp, Homo sapien
agacatcctgctggagtctcagaat

SEQ ID NO: 1398627 - DNA, 25 bp, Homo sapien
tctccaaagcagatcagtgctcaag

SEQ ID NO: 1398628 - DNA, 25 bp, Homo sapien
ggttctccaaagcagatcagtgctc

SEQ ID NO: 1398629 - DNA, 25 bp, Homo sapien
tccaaagcagatcagtgctcaagta

SEQ ID NO: 1398630 - DNA, 25 bp, Homo sapien
caggttctccaaagcagatcagtgc

SEQ ID NO: 1398631 - DNA, 25 bp, Homo sapien
tttgaaaagtgaacaaaagacaaga

SEQ ID NO: 1398632 - DNA, 25 bp, Homo sapien
ctttgaaaagtgaacaaaagacaag

SEQ ID NO: 1398633 - DNA, 25 bp, Homo sapien
tgaaaagtgaacaaaagacaagaac

SEQ ID NO: 1398634 - DNA, 25 bp, Homo sapien
ttgaaaagtgaacaaaagacaagaa

SEQ ID NO: 1398635 - DNA, 25 bp, Homo sapien
tcacaggccgatcacaggctaagag

SEQ ID NO: 1398636 - DNA, 25 bp, Homo sapien
ccttttgctatcagagatcatcaca

SEQ ID NO: 1398637 - DNA, 25 bp, Homo sapien
aggccgatcacaggctaagaggaaa

SEQ ID NO: 1398638 - DNA, 25 bp, Homo sapien
gatcatcacaggccgatcacaggct

SEQ ID NO: 1398639 - DNA, 25 bp, Homo sapien
ctgctgctgttgataagacatcctg

SEQ ID NO: 1398640 - DNA, 25 bp, Homo sapien
gctctgggcactttggcgcggggca

SEQ ID NO: 1398641 - DNA, 25 bp, Homo sapien
atggctctgggcactttggcgcggg

SEQ ID NO: 1398642 - DNA, 25 bp, Homo sapien
gcttgcactgctgctgttgataaga

SEQ ID NO: 1398643 - DNA, 25 bp, Homo sapien
caattatccctatcctttcgtggtc

SEQ ID NO: 1398644 - DNA, 25 bp, Homo sapien
tgatggcacccaaagagaagctctg

SEQ ID NO: 1398645 - DNA, 25 bp, Homo sapien
cagatagtagaagctcatgccaggt

SEQ ID NO: 1398646 - DNA, 25 bp, Homo sapien
tctgaaaggccggtacagctgagga

SEQ ID NO: 1398647 - DNA, 25 bp, Homo sapien
ggacatggctctggacgctttggca

SEQ ID NO: 1398648 - DNA, 25 bp, Homo sapien
gacgctttggcaggcggcacacagg

SEQ ID NO: 1398649 - DNA, 25 bp, Homo sapien
tacattgctactgttgataagacat

SEQ ID NO: 1398650 - DNA, 25 bp, Homo sapien
ctggcagggctgcttacattgctac

SEQ ID NO: 1398651 - DNA, 25 bp, Homo sapien
cggtgctcaagtaccaggagtttag

SEQ ID NO: 1398652 - DNA, 25 bp, Homo sapien
atcggtgctcaagtaccaggagttt

SEQ ID NO: 1398653 - DNA, 25 bp, Homo sapien
tcggtgctcaagtaccaggagttta

SEQ ID NO: 1398654 - DNA, 25 bp, Homo sapien
ccaggagtttaggagtcatgaggct

SEQ ID NO: 1398655 - DNA, 25 bp, Homo sapien
tgtcaacgctcaagccagacagagg

SEQ ID NO: 1398656 - DNA, 25 bp, Homo sapien
tggttgcacaggagggcatttatcc

SEQ ID NO: 1398657 - DNA, 25 bp, Homo sapien
taaacacacttgctctcaggatagg

SEQ ID NO: 1398658 - DNA, 25 bp, Homo sapien
aggttagggaagatgcagcctccca

SEQ ID NO: 1398659 - DNA, 25 bp, Homo sapien
cagtctctttccttgtacctatata

SEQ ID NO: 1398660 - DNA, 25 bp, Homo sapien
gcctcacatgacacaattcctagct

SEQ ID NO: 1398661 - DNA, 25 bp, Homo sapien
ccagtctctttccttgtacctatat

SEQ ID NO: 1398662 - DNA, 25 bp, Homo sapien
tcattgtcatttggaccaaaagtca

SEQ ID NO: 1398663 - DNA, 25 bp, Homo sapien
cattgtcatttggaccaaaagtcat

SEQ ID NO: 1398664 - DNA, 25 bp, Homo sapien
cagctgccaacagatggtggtccca

SEQ ID NO: 1398665 - DNA, 25 bp, Homo sapien
gactggaaaccctgtgtattcatct

SEQ ID NO: 1398666 - DNA, 25 bp, Homo sapien
ctggcacagatagtgaagtctcttt

SEQ ID NO: 1398667 - DNA, 25 bp, Homo sapien
ggaaaccctgtgtattcatctctgg

SEQ ID NO: 1398668 - DNA, 25 bp, Homo sapien
aactttcttggatcccatgctttgc

SEQ ID NO: 1398669 - DNA, 25 bp, Homo sapien
catgctccagcccacaagatgacag

SEQ ID NO: 1398670 - DNA, 25 bp, Homo sapien
cagacatgattctcttcgacctgag

SEQ ID NO: 1398671 - DNA, 25 bp, Homo sapien
tcaggtctatgagggctgcatggac

SEQ ID NO: 1398672 - DNA, 25 bp, Homo sapien
attgatttttgaggactcaggcccc

SEQ ID NO: 1398673 - DNA, 25 bp, Homo sapien
ccagatactgggccaccaagattga

SEQ ID NO: 1398674 - DNA, 25 bp, Homo sapien
agattgatttttgaggactcaggcc

SEQ ID NO: 1398675 - DNA, 25 bp, Homo sapien
agatactgggccaccaagattgatt

SEQ ID NO: 1398676 - DNA, 25 bp, Homo sapien
ccatattctccatggaactgtgagt

SEQ ID NO: 1398677 - DNA, 25 bp, Homo sapien
ctctggccatattctccatggaact

SEQ ID NO: 1398678 - DNA, 25 bp, Homo sapien
ggccatattctccatggaactgtga

SEQ ID NO: 1398679 - DNA, 25 bp, Homo sapien
ctggccatattctccatggaactgt

SEQ ID NO: 1398680 - DNA, 25 bp, Homo sapien
ggaaatgcatcgacatcacataggg

SEQ ID NO: 1398681 - DNA, 25 bp, Homo sapien
aatgcatcgacatcacataggggcc

SEQ ID NO: 1398682 - DNA, 25 bp, Homo sapien
agggaaatgcatcgacatcacatag

SEQ ID NO: 1398683 - DNA, 25 bp, Homo sapien
gaagggaaatgcatcgacatcacat

SEQ ID NO: 1398684 - DNA, 25 bp, Homo sapien
gaagggtgactttctaggcttgatg

SEQ ID NO: 1398685 - DNA, 25 bp, Homo sapien
ttggaaccacaggacgagccttcat

SEQ ID NO: 1398686 - DNA, 25 bp, Homo sapien
gctgaaagccctttgttcgcttgga

SEQ ID NO: 1398687 - DNA, 25 bp, Homo sapien
aggacgagccttcatccttgcatct

SEQ ID NO: 1398688 - DNA, 25 bp, Homo sapien
gttgaagatcaggtaagtggggcat

SEQ ID NO: 1398689 - DNA, 25 bp, Homo sapien
cacagcctttgttgagtcttgttga

SEQ ID NO: 1398690 - DNA, 25 bp, Homo sapien
tgttgaagatcaggtaagtggggca

SEQ ID NO: 1398691 - DNA, 25 bp, Homo sapien
ttgttgagtcttgttgaagatcagg

SEQ ID NO: 1398692 - DNA, 25 bp, Homo sapien
ttctccctggtgaaggtaaaataca

SEQ ID NO: 1398693 - DNA, 25 bp, Homo sapien
caaacccctcattgtccttgtgaca

SEQ ID NO: 1398694 - DNA, 25 bp, Homo sapien
taaggctgatatctgacttgacgtg

SEQ ID NO: 1398695 - DNA, 25 bp, Homo sapien
taataaagctgatcctaaggctgat

SEQ ID NO: 1398696 - DNA, 25 bp, Homo sapien
tcaaaggcatgcacagattggagtc

SEQ ID NO: 1398697 - DNA, 25 bp, Homo sapien
gattggagtccaagatcagacaccc

SEQ ID NO: 1398698 - DNA, 25 bp, Homo sapien
gccagagaggccttcctatcagtga

SEQ ID NO: 1398699 - DNA, 25 bp, Homo sapien
gacacccaggcattaaaggaagcac

SEQ ID NO: 1398700 - DNA, 25 bp, Homo sapien
ggtctcttaagacacagaccaggtc

SEQ ID NO: 1398701 - DNA, 25 bp, Homo sapien
gggacagctaggacacagcattcag

SEQ ID NO: 1398702 - DNA, 25 bp, Homo sapien
acagggacagctaggacacagcatt

SEQ ID NO: 1398703 - DNA, 25 bp, Homo sapien
gcctggtctcttaagacacagacca

SEQ ID NO: 1398704 - DNA, 25 bp, Homo sapien
gaccagcagaatgtgtgaccatggc

SEQ ID NO: 1398705 - DNA, 25 bp, Homo sapien
gggaccagcagaatgtgtgaccatg

SEQ ID NO: 1398706 - DNA, 25 bp, Homo sapien
cagaatgtgtgaccatggcttgaaa

SEQ ID NO: 1398707 - DNA, 25 bp, Homo sapien
ccagcagaatgtgtgaccatggctt

SEQ ID NO: 1398708 - DNA, 25 bp, Homo sapien
cttggtgttctggagttgtcggtca

SEQ ID NO: 1398709 - DNA, 25 bp, Homo sapien
atggtggtgactgtggtatcgtggg

SEQ ID NO: 1398710 - DNA, 25 bp, Homo sapien
ctgtggtatcgtgggggccaccacc

SEQ ID NO: 1398711 - DNA, 25 bp, Homo sapien
tcgccctgtagggccagctcagagg

SEQ ID NO: 1398712 - DNA, 25 bp, Homo sapien
cactgctgctgtaacgggcttgtgg

SEQ ID NO: 1398713 - DNA, 25 bp, Homo sapien
tgtaacgggcttgtggccgtactcc

SEQ ID NO: 1398714 - DNA, 25 bp, Homo sapien
tgctgtaacgggcttgtggccgtac

SEQ ID NO: 1398715 - DNA, 25 bp, Homo sapien
ctgctgctgtaacgggcttgtggcc

SEQ ID NO: 1398716 - DNA, 25 bp, Homo sapien
tcaaggtcttgatgtggcgggaagc

SEQ ID NO: 1398717 - DNA, 25 bp, Homo sapien
ctgtggctgctgaagagttcttgaa

SEQ ID NO: 1398718 - DNA, 25 bp, Homo sapien
gatgtggcgggaagccttgcagggt

SEQ ID NO: 1398719 - DNA, 25 bp, Homo sapien
ttcctgaacttgcaggctgtggctg

SEQ ID NO: 1398720 - DNA, 25 bp, Homo sapien
tcaagcatcagtgagggattggaca

SEQ ID NO: 1398721 - DNA, 25 bp, Homo sapien
caagcatcagtgagggattggacag

SEQ ID NO: 1398722 - DNA, 25 bp, Homo sapien
atcagtgagggattggacaggaaaa

SEQ ID NO: 1398723 - DNA, 25 bp, Homo sapien
cctttaataatgtgaagatggctat

SEQ ID NO: 1398724 - DNA, 25 bp, Homo sapien
catgctcccaattaaactcagtatc

SEQ ID NO: 1398725 - DNA, 25 bp, Homo sapien
cattgcttacatttacccagtgtaa

SEQ ID NO: 1398726 - DNA, 25 bp, Homo sapien
ctcctagttccataagacattgctt

SEQ ID NO: 1398727 - DNA, 25 bp, Homo sapien
ggtggtgctgataagaactagtggt

SEQ ID NO: 1398728 - DNA, 25 bp, Homo sapien
tggtgctgataagaactagtggtaa

SEQ ID NO: 1398729 - DNA, 25 bp, Homo sapien
gtggtgctgataagaactagtggta

SEQ ID NO: 1398730 - DNA, 25 bp, Homo sapien
tggtggtgctgataagaactagtgg

SEQ ID NO: 1398731 - DNA, 25 bp, Homo sapien
tagcaatgtgatagattggtgctgg

SEQ ID NO: 1398732 - DNA, 25 bp, Homo sapien
gagaatgaatcaaggtagcaatgtg

SEQ ID NO: 1398733 - DNA, 25 bp, Homo sapien
tggtggtggtgataattgtagtgga

SEQ ID NO: 1398734 - DNA, 25 bp, Homo sapien
tcaaggtagcaatgtgatagattgg

SEQ ID NO: 1398735 - DNA, 25 bp, Homo sapien
cgcagcacgttgacatggcagtgat

SEQ ID NO: 1398736 - DNA, 25 bp, Homo sapien
ggtagtgatggtgcaaaaggtagtg

SEQ ID NO: 1398737 - DNA, 25 bp, Homo sapien
tgtgcctacaacacagcgcagcacg

SEQ ID NO: 1398738 - DNA, 25 bp, Homo sapien
tggtggaggtcacaaaggaataaga

SEQ ID NO: 1398739 - DNA, 25 bp, Homo sapien
gtccttgtgattgtgatggcgatgg

SEQ ID NO: 1398740 - DNA, 25 bp, Homo sapien
cagtccttgtgattgtgatggcgat

SEQ ID NO: 1398741 - DNA, 25 bp, Homo sapien
gcagtccttgtgattgtgatggcga

SEQ ID NO: 1398742 - DNA, 25 bp, Homo sapien
ggcagtccttgtgattgtgatggcg

SEQ ID NO: 1398743 - DNA, 25 bp, Homo sapien
acaaaagcagctctagatctaggtc

SEQ ID NO: 1398744 - DNA, 25 bp, Homo sapien
gatctaggtctgatacctggatact

SEQ ID NO: 1398745 - DNA, 25 bp, Homo sapien
aacagaggtgtttagttcaagcagg

SEQ ID NO: 1398746 - DNA, 25 bp, Homo sapien
aagtgttaggcatttggcacagaac

SEQ ID NO: 1398747 - DNA, 25 bp, Homo sapien
gaaagtagactaagatgaggacagt

SEQ ID NO: 1398748 - DNA, 25 bp, Homo sapien
gggcctataggacctcatgtgctcc

SEQ ID NO: 1398749 - DNA, 25 bp, Homo sapien
agtaaatagaatgtcactacccaag

SEQ ID NO: 1398750 - DNA, 25 bp, Homo sapien
tacccaagctatggggcctatagga

SEQ ID NO: 1398751 - DNA, 25 bp, Homo sapien
caagtgcaccaaggcagtatcctgg

SEQ ID NO: 1398752 - DNA, 25 bp, Homo sapien
taaacaatttggagttgaaccaggc

SEQ ID NO: 1398753 - DNA, 25 bp, Homo sapien
acagcaaggtgagcaattaggccca

SEQ ID NO: 1398754 - DNA, 25 bp, Homo sapien
taattgctacttccatgtcgggagg

SEQ ID NO: 1398755 - DNA, 25 bp, Homo sapien
agttttgtttaactcacacttacag

SEQ ID NO: 1398756 - DNA, 25 bp, Homo sapien
tttgtttaactcacacttacagggc

SEQ ID NO: 1398757 - DNA, 25 bp, Homo sapien
ttgtttaactcacacttacagggca

SEQ ID NO: 1398758 - DNA, 25 bp, Homo sapien
tagttttgtttaactcacacttaca

SEQ ID NO: 1398759 - DNA, 25 bp, Homo sapien
aactcaaggagttcttagtccagca

SEQ ID NO: 1398760 - DNA, 25 bp, Homo sapien
gagttcttagtccagcaagggagat

SEQ ID NO: 1398761 - DNA, 25 bp, Homo sapien
tttacagaactcaaggagttcttag

SEQ ID NO: 1398762 - DNA, 25 bp, Homo sapien
caaggagttcttagtccagcaaggg

SEQ ID NO: 1398763 - DNA, 25 bp, Homo sapien
taagagggcacataacctagtgttg

SEQ ID NO: 1398764 - DNA, 25 bp, Homo sapien
gggcacataacctagtgttggacaa

SEQ ID NO: 1398765 - DNA, 25 bp, Homo sapien
cacataacctagtgttggacaaggc

SEQ ID NO: 1398766 - DNA, 25 bp, Homo sapien
gagggcacataacctagtgttggac

SEQ ID NO: 1398767 - DNA, 25 bp, Homo sapien
cctcaacccactgccagcggcataa

SEQ ID NO: 1398768 - DNA, 25 bp, Homo sapien
aaggttctggattcctcagcaatct

SEQ ID NO: 1398769 - DNA, 25 bp, Homo sapien
ggttctggattcctcagcaatctct

SEQ ID NO: 1398770 - DNA, 25 bp, Homo sapien
ttctggattcctcagcaatctcttc

SEQ ID NO: 1398771 - DNA, 25 bp, Homo sapien
tgcattggtgcaggttatctgagat

SEQ ID NO: 1398772 - DNA, 25 bp, Homo sapien
tttgcttctcaatggtgcccagcga

SEQ ID NO: 1398773 - DNA, 25 bp, Homo sapien
ggtaagacagaggtcacactcaaag

SEQ ID NO: 1398774 - DNA, 25 bp, Homo sapien
cctattaacagtctgggtaagacag

SEQ ID NO: 1398775 - DNA, 25 bp, Homo sapien
gcgggggcggcattggaggctgcgg

SEQ ID NO: 1398776 - DNA, 25 bp, Homo sapien
gggcggcattggaggctgcggaggg

SEQ ID NO: 1398777 - DNA, 25 bp, Homo sapien
gggggcggcattggaggctgcggag

SEQ ID NO: 1398778 - DNA, 25 bp, Homo sapien
cgggggcggcattggaggctgcgga

SEQ ID NO: 1398779 - DNA, 25 bp, Homo sapien
ggctgcttctcctccggtggcggcg

SEQ ID NO: 1398780 - DNA, 25 bp, Homo sapien
ggctccggctgcttctcctccggtg

SEQ ID NO: 1398781 - DNA, 25 bp, Homo sapien
tccggctgcttctcctccggtggcg

SEQ ID NO: 1398782 - DNA, 25 bp, Homo sapien
gctcctccgggggcggctccggctg

SEQ ID NO: 1398783 - DNA, 25 bp, Homo sapien
gaggcgtctctagcggcggctcctc

SEQ ID NO: 1398784 - DNA, 25 bp, Homo sapien
ggaggcgtctctagcggcggctcct

SEQ ID NO: 1398785 - DNA, 25 bp, Homo sapien
aggcgtctctagcggcggctcctcc

SEQ ID NO: 1398786 - DNA, 25 bp, Homo sapien
ctactctggcggcggctctggctgc

SEQ ID NO: 1398787 - DNA, 25 bp, Homo sapien
ctctggctgcggcggaggctcctct

SEQ ID NO: 1398788 - DNA, 25 bp, Homo sapien
gctgcggcggaggctcctctggcgg

SEQ ID NO: 1398789 - DNA, 25 bp, Homo sapien
ggcggaggctcctctggcggcagcg

SEQ ID NO: 1398790 - DNA, 25 bp, Homo sapien
tggaggtgttttccaggggcaccga

SEQ ID NO: 1398791 - DNA, 25 bp, Homo sapien
ccagggtaccacggaggcgaaggag

SEQ ID NO: 1398792 - DNA, 25 bp, Homo sapien
ctggccgtccaaatagatcccccag

SEQ ID NO: 1398793 - DNA, 25 bp, Homo sapien
gtaccacggaggcgaaggagttgga

SEQ ID NO: 1398794 - DNA, 25 bp, Homo sapien
gctacccgaggtttgcaaatccttc

SEQ ID NO: 1398795 - DNA, 25 bp, Homo sapien
gatgctacccgaggtttgcaaatcc

SEQ ID NO: 1398796 - DNA, 25 bp, Homo sapien
ctacccgaggtttgcaaatccttca

SEQ ID NO: 1398797 - DNA, 25 bp, Homo sapien
tgctacccgaggtttgcaaatcctt

SEQ ID NO: 1398798 - DNA, 25 bp, Homo sapien
gagggagggcagtctcaaagggagt

SEQ ID NO: 1398799 - DNA, 25 bp, Homo sapien
ggcagtctcaaagggagtggggcct

SEQ ID NO: 1398800 - DNA, 25 bp, Homo sapien
gggcagtctcaaagggagtggggcc

SEQ ID NO: 1398801 - DNA, 25 bp, Homo sapien
ggagggcagtctcaaagggagtggg

SEQ ID NO: 1398802 - DNA, 25 bp, Homo sapien
gtacccctcaaccacggcacactgg

SEQ ID NO: 1398803 - DNA, 25 bp, Homo sapien
tttggagtcaggtacccctcaacca

SEQ ID NO: 1398804 - DNA, 25 bp, Homo sapien
tggagtcaggtacccctcaaccacg

SEQ ID NO: 1398805 - DNA, 25 bp, Homo sapien
cctcaaccacggcacactggatcag

SEQ ID NO: 1398806 - DNA, 25 bp, Homo sapien
tacaaagtagccgatgaaggcaatt

SEQ ID NO: 1398807 - DNA, 25 bp, Homo sapien
gtagccgatgaaggcaattcctagg

SEQ ID NO: 1398808 - DNA, 25 bp, Homo sapien
ataagtgtgagagccttggatgtgc

SEQ ID NO: 1398809 - DNA, 25 bp, Homo sapien
tcctagggcaatatcgttgaatcca

SEQ ID NO: 1398810 - DNA, 25 bp, Homo sapien
caatgtcacaaaagttccgtgtgtc

SEQ ID NO: 1398811 - DNA, 25 bp, Homo sapien
aaaggactgtatgtttcggacgaca

SEQ ID NO: 1398812 - DNA, 25 bp, Homo sapien
ttcattttagggcagtgtgtctctc

SEQ ID NO: 1398813 - DNA, 25 bp, Homo sapien
cagtctggcagtctgtggatacagt

SEQ ID NO: 1398814 - DNA, 25 bp, Homo sapien
tgacccttctggatggcataggaga

SEQ ID NO: 1398815 - DNA, 25 bp, Homo sapien
tcactggatgttgagggtccaggca

SEQ ID NO: 1398816 - DNA, 25 bp, Homo sapien
cataggagatcagaccctctgcagc

SEQ ID NO: 1398817 - DNA, 25 bp, Homo sapien
tacctgggcgacaggtgacccttct

SEQ ID NO: 1398818 - DNA, 25 bp, Homo sapien
tcttattgccaaagaaggcgatgcc

SEQ ID NO: 1398819 - DNA, 25 bp, Homo sapien
gtgtgcaagccttggatgttccagc

SEQ ID NO: 1398820 - DNA, 25 bp, Homo sapien
ttgttgtagccctgggtgtgcaagc

SEQ ID NO: 1398821 - DNA, 25 bp, Homo sapien
cttattgccaaagaaggcgatgccc

SEQ ID NO: 1398822 - DNA, 25 bp, Homo sapien
ggccctgcaggcgagcggtcttgcc

SEQ ID NO: 1398823 - DNA, 25 bp, Homo sapien
tgtagacggaatgggactgcaaccc

SEQ ID NO: 1398824 - DNA, 25 bp, Homo sapien
ccttgcgggagacgatggtgggagt

SEQ ID NO: 1398825 - DNA, 25 bp, Homo sapien
cctatggtgtagacggaatgggact

SEQ ID NO: 1398826 - DNA, 25 bp, Homo sapien
cattctcatcatgggagccccagga

SEQ ID NO: 1398827 - DNA, 25 bp, Homo sapien
tctcatcatgggagccccaggagcg

SEQ ID NO: 1398828 - DNA, 25 bp, Homo sapien
ttctccattctcatcatgggagccc

SEQ ID NO: 1398829 - DNA, 25 bp, Homo sapien
ccattctcatcatgggagccccagg

SEQ ID NO: 1398830 - DNA, 25 bp, Homo sapien
cattgcgacccttgtgaatgaactg

SEQ ID NO: 1398831 - DNA, 25 bp, Homo sapien
ctccaggagaactgtggaaaatccc

SEQ ID NO: 1398832 - DNA, 25 bp, Homo sapien
ccttgtgaatgaactgtgagatgct

SEQ ID NO: 1398833 - DNA, 25 bp, Homo sapien
agcctctgggacaagcctctggctt

SEQ ID NO: 1398834 - DNA, 25 bp, Homo sapien
ctggagacccagaatgaagaaggca

SEQ ID NO: 1398835 - DNA, 25 bp, Homo sapien
caagcctggagacccagaatgaaga

SEQ ID NO: 1398836 - DNA, 25 bp, Homo sapien
gaaggcaagaagccatggcagcgtc

SEQ ID NO: 1398837 - DNA, 25 bp, Homo sapien
agcctggagacccagaatgaagaag

SEQ ID NO: 1398838 - DNA, 25 bp, Homo sapien
cccaggactctgaccgggagagtgt

SEQ ID NO: 1398839 - DNA, 25 bp, Homo sapien
tcccaggactctgaccgggagagtg

SEQ ID NO: 1398840 - DNA, 25 bp, Homo sapien
gaaagcagtctcagaaggacctggg

SEQ ID NO: 1398841 - DNA, 25 bp, Homo sapien
gatcatcccaacctgaaaaaggagg

SEQ ID NO: 1398842 - DNA, 25 bp, Homo sapien
cagctatgaggtttggaggcccttg

SEQ ID NO: 1398843 - DNA, 25 bp, Homo sapien
caaaaggtgttgagccaagctggat

SEQ ID NO: 1398844 - DNA, 25 bp, Homo sapien
aggagacaaggttcgggccacatca

SEQ ID NO: 1398845 - DNA, 25 bp, Homo sapien
caggagacaaggttcgggccacatc

SEQ ID NO: 1398846 - DNA, 25 bp, Homo sapien
caaagcctgcccaggagacaaggtt

SEQ ID NO: 1398847 - DNA, 25 bp, Homo sapien
ttgggctgcctctagtgctgcagca

SEQ ID NO: 1398848 - DNA, 25 bp, Homo sapien
gtcttgggctgcctctagtgctgca

SEQ ID NO: 1398849 - DNA, 25 bp, Homo sapien
ctttgaccatggcacactggatcag

SEQ ID NO: 1398850 - DNA, 25 bp, Homo sapien
tagttgggagtcaggtaccctttga

SEQ ID NO: 1398851 - DNA, 25 bp, Homo sapien
aaggtgcccatgaaggtaatgccca

SEQ ID NO: 1398852 - DNA, 25 bp, Homo sapien
ccatgaaggtaatgcccagggcaat

SEQ ID NO: 1398853 - DNA, 25 bp, Homo sapien
cagggcaatgtcatcgtagccaggg

SEQ ID NO: 1398854 - DNA, 25 bp, Homo sapien
cccttcataaatggcgccatcctgg

SEQ ID NO: 1398855 - DNA, 25 bp, Homo sapien
aggtcctcccggcagtgtggataat

SEQ ID NO: 1398856 - DNA, 25 bp, Homo sapien
tataaccaatgtcgcatgacttgag

SEQ ID NO: 1398857 - DNA, 25 bp, Homo sapien
catcagaaatgttgcaggtcctccc

SEQ ID NO: 1398858 - DNA, 25 bp, Homo sapien
aaagactggatgtcccggaccagca

SEQ ID NO: 1398859 - DNA, 25 bp, Homo sapien
gctccccacacagaccgtgggacaa

SEQ ID NO: 1398860 - DNA, 25 bp, Homo sapien
tccccacacagaccgtgggacaacg

SEQ ID NO: 1398861 - DNA, 25 bp, Homo sapien
cacacagaccgtgggacaacgccgg

SEQ ID NO: 1398862 - DNA, 25 bp, Homo sapien
tggctccccacacagaccgtgggac

SEQ ID NO: 1398863 - DNA, 25 bp, Homo sapien
gattaggttttccatggccgacagg

SEQ ID NO: 1398864 - DNA, 25 bp, Homo sapien
aggtggcccttctggacagcatagg

SEQ ID NO: 1398865 - DNA, 25 bp, Homo sapien
tcgcctttcccaagaagtggctgaa

SEQ ID NO: 1398866 - DNA, 25 bp, Homo sapien
gaacataactggatgacaggtggcc

SEQ ID NO: 1398867 - DNA, 25 bp, Homo sapien
ttgttgtagccttgggtgtgcactc

SEQ ID NO: 1398868 - DNA, 25 bp, Homo sapien
tagccttgggtgtgcactccttgga

SEQ ID NO: 1398869 - DNA, 25 bp, Homo sapien
tgggtgtgcactccttggatattcc

SEQ ID NO: 1398870 - DNA, 25 bp, Homo sapien
tgcactccttggatattccagccaa

SEQ ID NO: 1398871 - DNA, 25 bp, Homo sapien
taaagccctcatgtatgaggaagtc

SEQ ID NO: 1398872 - DNA, 25 bp, Homo sapien
gaagtcgtttgcaatctgtagtgtg

SEQ ID NO: 1398873 - DNA, 25 bp, Homo sapien
cagtcgggagagctaaagccctcat

SEQ ID NO: 1398874 - DNA, 25 bp, Homo sapien
ctcatgtatgaggaagtcgtttgca

SEQ ID NO: 1398875 - DNA, 25 bp, Homo sapien
aacactgaccatgtgccgtgggacc

SEQ ID NO: 1398876 - DNA, 25 bp, Homo sapien
tataaaacatataggaccacaaccc

SEQ ID NO: 1398877 - DNA, 25 bp, Homo sapien
aacatataggaccacaacccagaaa

SEQ ID NO: 1398878 - DNA, 25 bp, Homo sapien
cccagggaagcaacactgaccatgt

SEQ ID NO: 1398879 - DNA, 25 bp, Homo sapien
ccatgccttgcgagagaccgtggtg

SEQ ID NO: 1398880 - DNA, 25 bp, Homo sapien
cacccactgttgttgtggacatgat

SEQ ID NO: 1398881 - DNA, 25 bp, Homo sapien
ccagtccagggacatggtgtataac

SEQ ID NO: 1398882 - DNA, 25 bp, Homo sapien
tgcagactgtctggtcgtgacactc

SEQ ID NO: 1398883 - DNA, 25 bp, Homo sapien
caaataggtactggagcccctctga

SEQ ID NO: 1398884 - DNA, 25 bp, Homo sapien
tgttctcaaataggtactggagccc

SEQ ID NO: 1398885 - DNA, 25 bp, Homo sapien
ccctctgatacctgtttagcttgtg

SEQ ID NO: 1398886 - DNA, 25 bp, Homo sapien
tactggagcccctctgatacctgtt

SEQ ID NO: 1398887 - DNA, 25 bp, Homo sapien
cgcccggccaagagagaatgggttt

SEQ ID NO: 1398888 - DNA, 25 bp, Homo sapien
ccggccaagagagaatgggtttgtt

SEQ ID NO: 1398889 - DNA, 25 bp, Homo sapien
cccggccaagagagaatgggtttgt

SEQ ID NO: 1398890 - DNA, 25 bp, Homo sapien
tacaggagcgcgccagatggagttt

SEQ ID NO: 1398891 - DNA, 25 bp, Homo sapien
gagaagacaagaagccacggcagca

SEQ ID NO: 1398892 - DNA, 25 bp, Homo sapien
agaagacaagaagccacggcagcat

SEQ ID NO: 1398893 - DNA, 25 bp, Homo sapien
cccacgtggtcccaggacaccaatc

SEQ ID NO: 1398894 - DNA, 25 bp, Homo sapien
ccccacgtggtcccaggacaccaat

SEQ ID NO: 1398895 - DNA, 25 bp, Homo sapien
caatctggagagtgtggatggcagc

SEQ ID NO: 1398896 - DNA, 25 bp, Homo sapien
caggacaccaatctggagagtgtgg

SEQ ID NO: 1398897 - DNA, 25 bp, Homo sapien
tccctgggaatggagcactcgggct

SEQ ID NO: 1398898 - DNA, 25 bp, Homo sapien
actcgggctctagcttcccagagag

SEQ ID NO: 1398899 - DNA, 25 bp, Homo sapien
tcactctccctagccctagagggca

SEQ ID NO: 1398900 - DNA, 25 bp, Homo sapien
ggtgcagtcagcttgcccctgattg

SEQ ID NO: 1398901 - DNA, 25 bp, Homo sapien
gagttggagatccttggtcctgagt

SEQ ID NO: 1398902 - DNA, 25 bp, Homo sapien
gagatccttggtcctgagtgagaag

SEQ ID NO: 1398903 - DNA, 25 bp, Homo sapien
tcccgcaagggtgagttggagatcc

SEQ ID NO: 1398904 - DNA, 25 bp, Homo sapien
gtctggttcccgcaagggtgagttg

SEQ ID NO: 1398905 - DNA, 25 bp, Homo sapien
ccccggggcctgttatgtcaaactg

SEQ ID NO: 1398906 - DNA, 25 bp, Homo sapien
acggccacagccactaatcaggagg

SEQ ID NO: 1398907 - DNA, 25 bp, Homo sapien
ttatgtcaaactgtcttggctgtgg

SEQ ID NO: 1398908 - DNA, 25 bp, Homo sapien
ctgcctctacccaaccagggccccg

SEQ ID NO: 1398909 - DNA, 25 bp, Homo sapien
aaagaaaagaccctcattgaggaca

SEQ ID NO: 1398910 - DNA, 25 bp, Homo sapien
tattaactcttactccccacgggca

SEQ ID NO: 1398911 - DNA, 25 bp, Homo sapien
cacgggcaaggctgggttttggtga

SEQ ID NO: 1398912 - DNA, 25 bp, Homo sapien
tgagggaaagaaaagaccctcattg

SEQ ID NO: 1398913 - DNA, 25 bp, Homo sapien
gaattcttgaaagtcgacctgttca

SEQ ID NO: 1398914 - DNA, 25 bp, Homo sapien
gacctgttcatcttgattagcatcc

SEQ ID NO: 1398915 - DNA, 25 bp, Homo sapien
caatggctaccagggatatgaattc

SEQ ID NO: 1398916 - DNA, 25 bp, Homo sapien
gtggtaatgggcagccttcagcgca

SEQ ID NO: 1398917 - DNA, 25 bp, Homo sapien
ctccagatgctcttcaagttttgtc

SEQ ID NO: 1398918 - DNA, 25 bp, Homo sapien
gtcaaaatgccccttccgaactgag

SEQ ID NO: 1398919 - DNA, 25 bp, Homo sapien
tcagctcacccttagagagggtgtc

SEQ ID NO: 1398920 - DNA, 25 bp, Homo sapien
gatattgacaattccctccagatgc

SEQ ID NO: 1398921 - DNA, 25 bp, Homo sapien
cacaggaatgtggagctacagcaaa

SEQ ID NO: 1398922 - DNA, 25 bp, Homo sapien
caggaatgtggagctacagcaaaaa

SEQ ID NO: 1398923 - DNA, 25 bp, Homo sapien
aatgcacaggaatgtggagctacag

SEQ ID NO: 1398924 - DNA, 25 bp, Homo sapien
tggtgaagggcactgagccaaggaa

SEQ ID NO: 1398925 - DNA, 25 bp, Homo sapien
agtggtatcatcataccggggtagg

SEQ ID NO: 1398926 - DNA, 25 bp, Homo sapien
catcggaggagttcctgccgttcat

SEQ ID NO: 1398927 - DNA, 25 bp, Homo sapien
cataccggggtaggagcaccttagt

SEQ ID NO: 1398928 - DNA, 25 bp, Homo sapien
aggacatcggaggagttcctgccgt

SEQ ID NO: 1398929 - DNA, 25 bp, Homo sapien
aggcagttgtcgtatgtattcctga

SEQ ID NO: 1398930 - DNA, 25 bp, Homo sapien
ggaggcagttgtcgtatgtattcct

SEQ ID NO: 1398931 - DNA, 25 bp, Homo sapien
ccaaggtgttcagagcaaaatcaaa

SEQ ID NO: 1398932 - DNA, 25 bp, Homo sapien
tgcaaccaaggtgttcagagcaaaa

SEQ ID NO: 1398933 - DNA, 25 bp, Homo sapien
cagacacctaacaggatggtgctgg

SEQ ID NO: 1398934 - DNA, 25 bp, Homo sapien
caaaatcaggagtaccacggcgttg

SEQ ID NO: 1398935 - DNA, 25 bp, Homo sapien
caatggcaatgcacgtattggcgtc

SEQ ID NO: 1398936 - DNA, 25 bp, Homo sapien
cgaccagggcgtgaccatcgtcatt

SEQ ID NO: 1398937 - DNA, 25 bp, Homo sapien
cagactccgccacgcggctgctgca

SEQ ID NO: 1398938 - DNA, 25 bp, Homo sapien
gctgctccggcttccggcccgctca

SEQ ID NO: 1398939 - DNA, 25 bp, Homo sapien
aggcgcgaggacgagcccaagtttc

SEQ ID NO: 1398940 - DNA, 25 bp, Homo sapien
caagtttccaggagcgttgacctcc

SEQ ID NO: 1398941 - DNA, 25 bp, Homo sapien
gtcaggacacttgggcgaagaactt

SEQ ID NO: 1398942 - DNA, 25 bp, Homo sapien
gaaggaaaagcaagacttcaaacag

SEQ ID NO: 1398943 - DNA, 25 bp, Homo sapien
gacacttgggcgaagaacttggaag

SEQ ID NO: 1398944 - DNA, 25 bp, Homo sapien
caggtcatccttataggacccagaa

SEQ ID NO: 1398945 - DNA, 25 bp, Homo sapien
ccagcctctgggcccagtaactcag

SEQ ID NO: 1398946 - DNA, 25 bp, Homo sapien
ggcccagcctctgggcccagtaact

SEQ ID NO: 1398947 - DNA, 25 bp, Homo sapien
gggcccagcctctgggcccagtaac

SEQ ID NO: 1398948 - DNA, 25 bp, Homo sapien
acatgtccaggggcccagcctctgg

SEQ ID NO: 1398949 - DNA, 25 bp, Homo sapien
gcaccatcagtgttgatatccaact

SEQ ID NO: 1398950 - DNA, 25 bp, Homo sapien
gaactcctggaagttaactgcacca

SEQ ID NO: 1398951 - DNA, 25 bp, Homo sapien
ctgccacgcccatctttatcaccag

SEQ ID NO: 1398952 - DNA, 25 bp, Homo sapien
tggaagttaactgcaccatcagtgt

SEQ ID NO: 1398953 - DNA, 25 bp, Homo sapien
tgaaccagacgtctgcacccttttt

SEQ ID NO: 1398954 - DNA, 25 bp, Homo sapien
ctttgaaccagacgtctgcaccctt

SEQ ID NO: 1398955 - DNA, 25 bp, Homo sapien
ttgaaccagacgtctgcaccctttt

SEQ ID NO: 1398956 - DNA, 25 bp, Homo sapien
tttgaaccagacgtctgcacccttt

SEQ ID NO: 1398957 - DNA, 25 bp, Homo sapien
gatctcagagagagccgaggcatag

SEQ ID NO: 1398958 - DNA, 25 bp, Homo sapien
gggtggcagggaggaccgctggccc

SEQ ID NO: 1398959 - DNA, 25 bp, Homo sapien
catagccatctatgaagggtggcag

SEQ ID NO: 1398960 - DNA, 25 bp, Homo sapien
aagccagagtttaaagatctcagag

SEQ ID NO: 1398961 - DNA, 25 bp, Homo sapien
ctgtagacggcatggaaattcccct

SEQ ID NO: 1398962 - DNA, 25 bp, Homo sapien
gacgtcgatgatagagttcaaggct

SEQ ID NO: 1398963 - DNA, 25 bp, Homo sapien
gatatactgaggacactcggtctct

SEQ ID NO: 1398964 - DNA, 25 bp, Homo sapien
ctcggtctctagcaatttcttcagg

SEQ ID NO: 1398965 - DNA, 25 bp, Homo sapien
tctggggaatcccatggcagggaat

SEQ ID NO: 1398966 - DNA, 25 bp, Homo sapien
acagaaccttctggggaatcccatg

SEQ ID NO: 1398967 - DNA, 25 bp, Homo sapien
gaatcccatggcagggaatttgcat

SEQ ID NO: 1398968 - DNA, 25 bp, Homo sapien
aaccttctggggaatcccatggcag

SEQ ID NO: 1398969 - DNA, 25 bp, Homo sapien
ccaaaccagcagatggctatggctc

SEQ ID NO: 1398970 - DNA, 25 bp, Homo sapien
ggaagggtccattcacacagagaca

SEQ ID NO: 1398971 - DNA, 25 bp, Homo sapien
gccagggcagtacgcagaggattca

SEQ ID NO: 1398972 - DNA, 25 bp, Homo sapien
tgccccaagcgatggccttgtcctg

SEQ ID NO: 1398973 - DNA, 25 bp, Homo sapien
aaagtgcggggccaacccagacagt

SEQ ID NO: 1398974 - DNA, 25 bp, Homo sapien
ccaggagtatctttgctccagacct

SEQ ID NO: 1398975 - DNA, 25 bp, Homo sapien
tccccaagagaagcccaaagtgcgg

SEQ ID NO: 1398976 - DNA, 25 bp, Homo sapien
ctccttccttatccctgcctcactc

SEQ ID NO: 1398977 - DNA, 25 bp, Homo sapien
ctcctttttatagcggttaggcttg

SEQ ID NO: 1398978 - DNA, 25 bp, Homo sapien
tttttatagcggttaggcttggcca

SEQ ID NO: 1398979 - DNA, 25 bp, Homo sapien
ttttatagcggttaggcttggccag

SEQ ID NO: 1398980 - DNA, 25 bp, Homo sapien
agctcctttttatagcggttaggct

SEQ ID NO: 1398981 - DNA, 25 bp, Homo sapien
tcagagacagcttctccctgccaga

SEQ ID NO: 1398982 - DNA, 25 bp, Homo sapien
cacagcttcaggccatcagagacag

SEQ ID NO: 1398983 - DNA, 25 bp, Homo sapien
agagacagcttctccctgccagagt

SEQ ID NO: 1398984 - DNA, 25 bp, Homo sapien
tgcccacagcttcaggccatcagag

SEQ ID NO: 1398985 - DNA, 25 bp, Homo sapien
ctagtagaggctgtgttgggcacag

SEQ ID NO: 1398986 - DNA, 25 bp, Homo sapien
ggctgtgttgggcacagtagcgggc

SEQ ID NO: 1398987 - DNA, 25 bp, Homo sapien
gtgttgggcacagtagcgggcacac

SEQ ID NO: 1398988 - DNA, 25 bp, Homo sapien
ctgtgttgggcacagtagcgggcac

SEQ ID NO: 1398989 - DNA, 25 bp, Homo sapien
tgtgatatagtatggctccttccgg

SEQ ID NO: 1398990 - DNA, 25 bp, Homo sapien
cttgcccaagatgtagaggaactca

SEQ ID NO: 1398991 - DNA, 25 bp, Homo sapien
ctgcggcctggaacaactctgtgat

SEQ ID NO: 1398992 - DNA, 25 bp, Homo sapien
gaggaactcatcgaagcagatctgg

SEQ ID NO: 1398993 - DNA, 25 bp, Homo sapien
gtccaggttctatccccgcaagggc

SEQ ID NO: 1398994 - DNA, 25 bp, Homo sapien
tccaggttctatccccgcaagggcc

SEQ ID NO: 1398995 - DNA, 25 bp, Homo sapien
gtgtccaggttctatccccgcaagg

SEQ ID NO: 1398996 - DNA, 25 bp, Homo sapien
tgtccaggttctatccccgcaaggg

SEQ ID NO: 1398997 - DNA, 25 bp, Homo sapien
tgcagggtccgggccatcctggtac

SEQ ID NO: 1398998 - DNA, 25 bp, Homo sapien
agggtccgggccatcctggtacagt

SEQ ID NO: 1398999 - DNA, 25 bp, Homo sapien
gagtgcagggtccgggccatcctgg

SEQ ID NO: 1399000 - DNA, 25 bp, Homo sapien
cagggtccgggccatcctggtacag

SEQ ID NO: 1399001 - DNA, 25 bp, Homo sapien
ttgcaggccccaaggagcccagtaa

SEQ ID NO: 1399002 - DNA, 25 bp, Homo sapien
tcatgggtctacgtttgatgacaaa

SEQ ID NO: 1399003 - DNA, 25 bp, Homo sapien
tgagggctgtctaagcccggatttg

SEQ ID NO: 1399004 - DNA, 25 bp, Homo sapien
gcctgagggctgtctaagcccggat

SEQ ID NO: 1399005 - DNA, 25 bp, Homo sapien
ctctccagagggagtccccatgcca

SEQ ID NO: 1399006 - DNA, 25 bp, Homo sapien
ccaccacactgtgccaccctctcca

SEQ ID NO: 1399007 - DNA, 25 bp, Homo sapien
tgtgccaccctctccagagggagtc

SEQ ID NO: 1399008 - DNA, 25 bp, Homo sapien
tccagagggagtccccatgccatca

SEQ ID NO: 1399009 - DNA, 25 bp, Homo sapien
cgaaactggccctgaagcaccccca

SEQ ID NO: 1399010 - DNA, 25 bp, Homo sapien
ctcctgtcgaaatctgacacgactc

SEQ ID NO: 1399011 - DNA, 25 bp, Homo sapien
tcctgagttccgtggccttgtctca

SEQ ID NO: 1399012 - DNA, 25 bp, Homo sapien
tcgaaatctgacacgactcttgctc

SEQ ID NO: 1399013 - DNA, 25 bp, Homo sapien
tgtttcctgagttccgtggccttgt

SEQ ID NO: 1399014 - DNA, 25 bp, Homo sapien
gatggcaagattgagaagccaagcc

SEQ ID NO: 1399015 - DNA, 25 bp, Homo sapien
gctgagaggtccataataggcatga

SEQ ID NO: 1399016 - DNA, 25 bp, Homo sapien
caaatacaccggacgtgatggcaag

SEQ ID NO: 1399017 - DNA, 25 bp, Homo sapien
tagcttctcaatgttggttggaccc

SEQ ID NO: 1399018 - DNA, 25 bp, Homo sapien
ctgatgtgaaagagattctggaaat

SEQ ID NO: 1399019 - DNA, 25 bp, Homo sapien
cagctgatgtgaaagagattctgga

SEQ ID NO: 1399020 - DNA, 25 bp, Homo sapien
acagctgatgtgaaagagattctgg

SEQ ID NO: 1399021 - DNA, 25 bp, Homo sapien
gattctggaaatccaaatgttcccc

SEQ ID NO: 1399022 - DNA, 25 bp, Homo sapien
gatcttctcctcatgattcttgtcc

SEQ ID NO: 1399023 - DNA, 25 bp, Homo sapien
tagcaactgcagcaacactggagac

SEQ ID NO: 1399024 - DNA, 25 bp, Homo sapien
catgattcttgtccttcttaaacaa

SEQ ID NO: 1399025 - DNA, 25 bp, Homo sapien
tttagaacagggcttctggccatgg

SEQ ID NO: 1399026 - DNA, 25 bp, Homo sapien
ggacatccagatctgcccatggcat

SEQ ID NO: 1399027 - DNA, 25 bp, Homo sapien
gaaatgcatgacgttggacatccag

SEQ ID NO: 1399028 - DNA, 25 bp, Homo sapien
tgacataggttgagcaagcccttca

SEQ ID NO: 1399029 - DNA, 25 bp, Homo sapien
tctgaatctcgggtgtatttgtgac

SEQ ID NO: 1399030 - DNA, 25 bp, Homo sapien
ggacaagtaatccatgtcgcttttt

SEQ ID NO: 1399031 - DNA, 25 bp, Homo sapien
ctcaagggcattggacaagtaatcc

SEQ ID NO: 1399032 - DNA, 25 bp, Homo sapien
ttttctcaagggcattggacaagta

SEQ ID NO: 1399033 - DNA, 25 bp, Homo sapien
ggcattggacaagtaatccatgtcg

SEQ ID NO: 1399034 - DNA, 25 bp, Homo sapien
caagttcaccagacctggcatgtcc

SEQ ID NO: 1399035 - DNA, 25 bp, Homo sapien
gttcaccagacctggcatgtccatc

SEQ ID NO: 1399036 - DNA, 25 bp, Homo sapien
tcaagttcaccagacctggcatgtc

SEQ ID NO: 1399037 - DNA, 25 bp, Homo sapien
aagttcaccagacctggcatgtcca

SEQ ID NO: 1399038 - DNA, 25 bp, Homo sapien
tcgcgactatgtccaacatgacttt

SEQ ID NO: 1399039 - DNA, 25 bp, Homo sapien
catctccactgtattggcgaaacat

SEQ ID NO: 1399040 - DNA, 25 bp, Homo sapien
tattggcgaaacatcgcgactatgt

SEQ ID NO: 1399041 - DNA, 25 bp, Homo sapien
gaaacatcgcgactatgtccaacat

SEQ ID NO: 1399042 - DNA, 25 bp, Homo sapien
ggtctctggaggcccattggtgggg

SEQ ID NO: 1399043 - DNA, 25 bp, Homo sapien
tttattgttcctggggtctctggag

SEQ ID NO: 1399044 - DNA, 25 bp, Homo sapien
gggtctctggaggcccattggtggg

SEQ ID NO: 1399045 - DNA, 25 bp, Homo sapien
gacattttattgttcctggggtctc

SEQ ID NO: 1399046 - DNA, 25 bp, Homo sapien
ctgcccccggaacagggcgctgctc

SEQ ID NO: 1399047 - DNA, 25 bp, Homo sapien
aagacatcggcgaggtaatttgtgc

SEQ ID NO: 1399048 - DNA, 25 bp, Homo sapien
tctcaaagacatcggcgaggtaatt

SEQ ID NO: 1399049 - DNA, 25 bp, Homo sapien
catcggcgaggtaatttgtgccctt

SEQ ID NO: 1399050 - DNA, 25 bp, Homo sapien
ggtatcctactcttggtcatctaga

SEQ ID NO: 1399051 - DNA, 25 bp, Homo sapien
caaactcatcttctgggtatcctac

SEQ ID NO: 1399052 - DNA, 25 bp, Homo sapien
tttttgtctcacacctcaggatggg

SEQ ID NO: 1399053 - DNA, 25 bp, Homo sapien
tcccaaggtgctctgttaagtgacc

SEQ ID NO: 1399054 - DNA, 25 bp, Homo sapien
tatttgtgaaacatgtcgatcatgc

SEQ ID NO: 1399055 - DNA, 25 bp, Homo sapien
catcatcgtcagcaggcttggcttc

SEQ ID NO: 1399056 - DNA, 25 bp, Homo sapien
ggaagttctccttcatcatcgtcag

SEQ ID NO: 1399057 - DNA, 25 bp, Homo sapien
ggacctctcagcttgagtgttgctc

SEQ ID NO: 1399058 - DNA, 25 bp, Homo sapien
aaagcagatctttcagccagtagtc

SEQ ID NO: 1399059 - DNA, 25 bp, Homo sapien
gcagatctttcagccagtagtcagt

SEQ ID NO: 1399060 - DNA, 25 bp, Homo sapien
cccaaagcagatctttcagccagta

SEQ ID NO: 1399061 - DNA, 25 bp, Homo sapien
gatctttcagccagtagtcagtctg

SEQ ID NO: 1399062 - DNA, 25 bp, Homo sapien
aaggatgagtgagatgtgtgtgttt

SEQ ID NO: 1399063 - DNA, 25 bp, Homo sapien
tggacaaagagcagtcctttataag

SEQ ID NO: 1399064 - DNA, 25 bp, Homo sapien
aagcgtcacgagtagaaggatgagt

SEQ ID NO: 1399065 - DNA, 25 bp, Homo sapien
cagagctgggaagcgtcacgagtag

SEQ ID NO: 1399066 - DNA, 25 bp, Homo sapien
cccaaggagtgtgatttctggatcc

SEQ ID NO: 1399067 - DNA, 25 bp, Homo sapien
gctaccatctaggagttttgtaaca

SEQ ID NO: 1399068 - DNA, 25 bp, Homo sapien
tggtgttgccatctaaaagtcatca

SEQ ID NO: 1399069 - DNA, 25 bp, Homo sapien
ccagattttgggcattctcataagt

SEQ ID NO: 1399070 - DNA, 25 bp, Homo sapien
tctctggactcgtgcagcagttggg

SEQ ID NO: 1399071 - DNA, 25 bp, Homo sapien
gcagagggagccacgggaatgttcc

SEQ ID NO: 1399072 - DNA, 25 bp, Homo sapien
ccaggagccacggtgagagggacag

SEQ ID NO: 1399073 - DNA, 25 bp, Homo sapien
ctttcaataggccatagagcacttc

SEQ ID NO: 1399074 - DNA, 25 bp, Homo sapien
gctgggccgtccttgccggttctcg

SEQ ID NO: 1399075 - DNA, 25 bp, Homo sapien
ttctcgcccttatttaggttgtgtg

SEQ ID NO: 1399076 - DNA, 25 bp, Homo sapien
ggttgtgtgtcccacttcgggcagc

SEQ ID NO: 1399077 - DNA, 25 bp, Homo sapien
cgccagagttgcgaggcggttccac

SEQ ID NO: 1399078 - DNA, 25 bp, Homo sapien
agcacttgctaatcacaggtcttac

SEQ ID NO: 1399079 - DNA, 25 bp, Homo sapien
caagctatgggatgtaaaagctaga

SEQ ID NO: 1399080 - DNA, 25 bp, Homo sapien
aagctagaaagcacatcctcttccc

SEQ ID NO: 1399081 - DNA, 25 bp, Homo sapien
ttccctaaaggcaagcacttgctaa

SEQ ID NO: 1399082 - DNA, 25 bp, Homo sapien
ttggatgttattgtgaaatagatca

SEQ ID NO: 1399083 - DNA, 25 bp, Homo sapien
gacagacctgacttatctagtgtat

SEQ ID NO: 1399084 - DNA, 25 bp, Homo sapien
gacctgacttatctagtgtatcatc

SEQ ID NO: 1399085 - DNA, 25 bp, Homo sapien
ctttgacagacctgacttatctagt

SEQ ID NO: 1399086 - DNA, 25 bp, Homo sapien
ctgatggatgataagatgtgttgga

SEQ ID NO: 1399087 - DNA, 25 bp, Homo sapien
aggaagctgatggatgataagatgt

SEQ ID NO: 1399088 - DNA, 25 bp, Homo sapien
gatgataagatgtgttggaaaggct

SEQ ID NO: 1399089 - DNA, 25 bp, Homo sapien
gaagctgatggatgataagatgtgt

SEQ ID NO: 1399090 - DNA, 25 bp, Homo sapien
cggtgcccacgctcagctacttcca

SEQ ID NO: 1399091 - DNA, 25 bp, Homo sapien
ggtgcccacgctcagctacttccag

SEQ ID NO: 1399092 - DNA, 25 bp, Homo sapien
ccggtgcccacgctcagctacttcc

SEQ ID NO: 1399093 - DNA, 25 bp, Homo sapien
cccggtgcccacgctcagctacttc

SEQ ID NO: 1399094 - DNA, 25 bp, Homo sapien
cagccgtggcctcagtgagatctgc

SEQ ID NO: 1399095 - DNA, 25 bp, Homo sapien
agcagccgtggcctcagtgagatct

SEQ ID NO: 1399096 - DNA, 25 bp, Homo sapien
ctcccaaggctctggtggaaccaac

SEQ ID NO: 1399097 - DNA, 25 bp, Homo sapien
ctgagttccaactcccaaggctctg

SEQ ID NO: 1399098 - DNA, 25 bp, Homo sapien
ccaggactcataggcccaagagatc

SEQ ID NO: 1399099 - DNA, 25 bp, Homo sapien
tgcagcccaggactcataggcccaa

SEQ ID NO: 1399100 - DNA, 25 bp, Homo sapien
agcgtggacacccaattaattggca

SEQ ID NO: 1399101 - DNA, 25 bp, Homo sapien
ttagcgtggacacccaattaattgg

SEQ ID NO: 1399102 - DNA, 25 bp, Homo sapien
actggatttgactcagagaggaccc

SEQ ID NO: 1399103 - DNA, 25 bp, Homo sapien
tttgactcagagaggacccccagag

SEQ ID NO: 1399104 - DNA, 25 bp, Homo sapien
gagaggacccccagagggtgtctcc

SEQ ID NO: 1399105 - DNA, 25 bp, Homo sapien
agagaggacccccagagggtgtctc

SEQ ID NO: 1399106 - DNA, 25 bp, Homo sapien
agggcttcattgtagatcaaagcca

SEQ ID NO: 1399107 - DNA, 25 bp, Homo sapien
cttgttccggtccaagtcttccatc

SEQ ID NO: 1399108 - DNA, 25 bp, Homo sapien
tgttccggtccaagtcttccatcag

SEQ ID NO: 1399109 - DNA, 25 bp, Homo sapien
ttgttccggtccaagtcttccatca

SEQ ID NO: 1399110 - DNA, 25 bp, Homo sapien
ccttgttccggtccaagtcttccat

SEQ ID NO: 1399111 - DNA, 25 bp, Homo sapien
tcagggtctacatgtggaccagggc

SEQ ID NO: 1399112 - DNA, 25 bp, Homo sapien
taatcctgcttccaaaggacaaggg

SEQ ID NO: 1399113 - DNA, 25 bp, Homo sapien
tggtgatgacaaccctggattcttc

SEQ ID NO: 1399114 - DNA, 25 bp, Homo sapien
gaatgtgaaatccatactcagtggt

SEQ ID NO: 1399115 - DNA, 25 bp, Homo sapien
gagtacttgtggaagatggccacga

SEQ ID NO: 1399116 - DNA, 25 bp, Homo sapien
caatggcctgatccagggggcatgc

SEQ ID NO: 1399117 - DNA, 25 bp, Homo sapien
agggtgtgcttgtcaccctccctgc

SEQ ID NO: 1399118 - DNA, 25 bp, Homo sapien
gatggccacgaggaggccaatggcc

SEQ ID NO: 1399119 - DNA, 25 bp, Homo sapien
tcctttggaaccacccagtctcagg

SEQ ID NO: 1399120 - DNA, 25 bp, Homo sapien
gcagcttaaacacagcttcacaggg

SEQ ID NO: 1399121 - DNA, 25 bp, Homo sapien
catggtggcaatgacacacccaggg

SEQ ID NO: 1399122 - DNA, 25 bp, Homo sapien
catgggagcaaggacttctcaccca

SEQ ID NO: 1399123 - DNA, 25 bp, Homo sapien
tgctcctgactatccctccagcggg

SEQ ID NO: 1399124 - DNA, 25 bp, Homo sapien
ggacccccagcgtgagggcagctgg

SEQ ID NO: 1399125 - DNA, 25 bp, Homo sapien
gggggagcgccacagatggccccag

SEQ ID NO: 1399126 - DNA, 25 bp, Homo sapien
cagtctggatccagcggctgaactg

SEQ ID NO: 1399127 - DNA, 25 bp, Homo sapien
ccttatagcggtcggtgccccggag

SEQ ID NO: 1399128 - DNA, 25 bp, Homo sapien
tagggaggcggccaaatgcgacgcg

SEQ ID NO: 1399129 - DNA, 25 bp, Homo sapien
caaatgcgacgcgagcggtcgaggg

SEQ ID NO: 1399130 - DNA, 25 bp, Homo sapien
ggctgtgtcgcagtccgactggcct

SEQ ID NO: 1399131 - DNA, 25 bp, Homo sapien
gcctggtgacgagtctcccctcatc

SEQ ID NO: 1399132 - DNA, 25 bp, Homo sapien
cagtgcccactgcacgcctggtgac

SEQ ID NO: 1399133 - DNA, 25 bp, Homo sapien
cacgcctggtgacgagtctcccctc

SEQ ID NO: 1399134 - DNA, 25 bp, Homo sapien
actgcacgcctggtgacgagtctcc

SEQ ID NO: 1399135 - DNA, 25 bp, Homo sapien
aggatgccggtgtcccacagaggat

SEQ ID NO: 1399136 - DNA, 25 bp, Homo sapien
ccagccctgtaagcaccattcgtta

SEQ ID NO: 1399137 - DNA, 25 bp, Homo sapien
tgtaaaggatatctacggcgcccat

SEQ ID NO: 1399138 - DNA, 25 bp, Homo sapien
cacctttggtgttaatgtgcatgca

SEQ ID NO: 1399139 - DNA, 25 bp, Homo sapien
tatttcctcccatggaagggtccat

SEQ ID NO: 1399140 - DNA, 25 bp, Homo sapien
ttatttcctcccatggaagggtcca

SEQ ID NO: 1399141 - DNA, 25 bp, Homo sapien
ggtctgtgagaggagcagccgaggt

SEQ ID NO: 1399142 - DNA, 25 bp, Homo sapien
aggagcagccgaggtcagcagcaaa

SEQ ID NO: 1399143 - DNA, 25 bp, Homo sapien
agggggccaaagagggtctgtgaga

SEQ ID NO: 1399144 - DNA, 25 bp, Homo sapien
gtgagaggagcagccgaggtcagca

SEQ ID NO: 1399145 - DNA, 25 bp, Homo sapien
ggaacaccgagtactccttgaagtc

SEQ ID NO: 1399146 - DNA, 25 bp, Homo sapien
aagtcgatctcctggtcgctgttct

SEQ ID NO: 1399147 - DNA, 25 bp, Homo sapien
aagtcatcgatgctgctctccttca

SEQ ID NO: 1399148 - DNA, 25 bp, Homo sapien
ttgtccaggctcttcatcaagtcat

SEQ ID NO: 1399149 - DNA, 25 bp, Homo sapien
ccctctctccccgaatatttgtgaa

SEQ ID NO: 1399150 - DNA, 25 bp, Homo sapien
accatagtggtcagggccttctcca

SEQ ID NO: 1399151 - DNA, 25 bp, Homo sapien
tactcagggtcagtttgctaccctc

SEQ ID NO: 1399152 - DNA, 25 bp, Homo sapien
gaatatttgtgaaacgtggtcacca

SEQ ID NO: 1399153 - DNA, 25 bp, Homo sapien
gagcgcccatctatatcagtacagg

SEQ ID NO: 1399154 - DNA, 25 bp, Homo sapien
tgaaatccactaacaagagcgccca

SEQ ID NO: 1399155 - DNA, 25 bp, Homo sapien
gagaagacgacctcctcaaaaggcc

SEQ ID NO: 1399156 - DNA, 25 bp, Homo sapien
tgttgaaaagtaggcctgaggcaga

SEQ ID NO: 1399157 - DNA, 25 bp, Homo sapien
ctgatatcgaggagtgtcccattat

SEQ ID NO: 1399158 - DNA, 25 bp, Homo sapien
aggagtgtcccattattaaagtcgg

SEQ ID NO: 1399159 - DNA, 25 bp, Homo sapien
tatcgaggagtgtcccattattaaa

SEQ ID NO: 1399160 - DNA, 25 bp, Homo sapien
cattattaaagtcggggacagggca

SEQ ID NO: 1399161 - DNA, 25 bp, Homo sapien
gtgggagtgagcccagagaatccaa

SEQ ID NO: 1399162 - DNA, 25 bp, Homo sapien
gccttctgcctttatttccctgatc

SEQ ID NO: 1399163 - DNA, 25 bp, Homo sapien
ctccctctcactgccttctgccttt

SEQ ID NO: 1399164 - DNA, 25 bp, Homo sapien
actgccttctgcctttatttccctg

SEQ ID NO: 1399165 - DNA, 25 bp, Homo sapien
tctcactgccttctgcctttatttc

SEQ ID NO: 1399166 - DNA, 25 bp, Homo sapien
gatggaacaataagccgaagaaggg

SEQ ID NO: 1399167 - DNA, 25 bp, Homo sapien
acacacgtccccaatcccagaaact

SEQ ID NO: 1399168 - DNA, 25 bp, Homo sapien
tgaccaaaaatcagaactcaaaatc

SEQ ID NO: 1399169 - DNA, 25 bp, Homo sapien
gggctggggacacactgagttccca

SEQ ID NO: 1399170 - DNA, 25 bp, Homo sapien
atcaagcacgtgtctgaaggagcca

SEQ ID NO: 1399171 - DNA, 25 bp, Homo sapien
aaaaagtgcccactggcgacaggga

SEQ ID NO: 1399172 - DNA, 25 bp, Homo sapien
gaacttgctcagcatcaagcacgtg

SEQ ID NO: 1399173 - DNA, 25 bp, Homo sapien
aaaaaagtgcccactggcgacaggg

SEQ ID NO: 1399174 - DNA, 25 bp, Homo sapien
gaagtccacctcgttgtccctgttg

SEQ ID NO: 1399175 - DNA, 25 bp, Homo sapien
tgggctgcttatctgggaagccttc

SEQ ID NO: 1399176 - DNA, 25 bp, Homo sapien
gttgctgtccaagttgctcatcagc

SEQ ID NO: 1399177 - DNA, 25 bp, Homo sapien
agacacagtactcttggaagtccac

SEQ ID NO: 1399178 - DNA, 25 bp, Homo sapien
tacctggtgcaatggaaaaatgacg

SEQ ID NO: 1399179 - DNA, 25 bp, Homo sapien
gctcctttgggaggtccagtttgga

SEQ ID NO: 1399180 - DNA, 25 bp, Homo sapien
tccaaccctcaaggctaagctaggg

SEQ ID NO: 1399181 - DNA, 25 bp, Homo sapien
tgtttgaagggaacgtctgcaggcc

SEQ ID NO: 1399182 - DNA, 25 bp, Homo sapien
aatgctctagagcaagactgctgcc

SEQ ID NO: 1399183 - DNA, 25 bp, Homo sapien
gtgttcaatgtgtttccaccccagg

SEQ ID NO: 1399184 - DNA, 25 bp, Homo sapien
gatagatgccctctgtagctaatgc

SEQ ID NO: 1399185 - DNA, 25 bp, Homo sapien
cttcagttaagttgtgcaaagcacc

SEQ ID NO: 1399186 - DNA, 25 bp, Homo sapien
gagcttgaacttgtcaccctctttg

SEQ ID NO: 1399187 - DNA, 25 bp, Homo sapien
ctctttgcccgagtacttgtggaag

SEQ ID NO: 1399188 - DNA, 25 bp, Homo sapien
gttgagcttgaacttgtcaccctct

SEQ ID NO: 1399189 - DNA, 25 bp, Homo sapien
tacttgtggaaggtggacaccatca

SEQ ID NO: 1399190 - DNA, 25 bp, Homo sapien
ttcagaatgccaggctccactccca

SEQ ID NO: 1399191 - DNA, 25 bp, Homo sapien
gagcacttggcgagactctgctccc

SEQ ID NO: 1399192 - DNA, 25 bp, Homo sapien
gcaggaggcacagagaccgtcttat

SEQ ID NO: 1399193 - DNA, 25 bp, Homo sapien
cagagaccgtcttattaatcccacc

SEQ ID NO: 1399194 - DNA, 25 bp, Homo sapien
ggaaaaaaccagcacagccgcttag

SEQ ID NO: 1399195 - DNA, 25 bp, Homo sapien
tgaacatttgcaagatccgctgcgc

SEQ ID NO: 1399196 - DNA, 25 bp, Homo sapien
agattcgggcagcaaactcccaggg

SEQ ID NO: 1399197 - DNA, 25 bp, Homo sapien
gaggccatgcaccttctcgagctgg

SEQ ID NO: 1399198 - DNA, 25 bp, Homo sapien
cagcgtgtgcaagcccacatctcag

SEQ ID NO: 1399199 - DNA, 25 bp, Homo sapien
gcgtgtgcaagcccacatctcagaa

SEQ ID NO: 1399200 - DNA, 25 bp, Homo sapien
gtgtgcaagcccacatctcagaagc

SEQ ID NO: 1399201 - DNA, 25 bp, Homo sapien
aacagcgtgtgcaagcccacatctc

SEQ ID NO: 1399202 - DNA, 25 bp, Homo sapien
tcctccgtcttacgtgcatgtgtgt

SEQ ID NO: 1399203 - DNA, 25 bp, Homo sapien
gcatgccagtcaggccaacacaact

SEQ ID NO: 1399204 - DNA, 25 bp, Homo sapien
tgtgtgtgtgccatgcacacccacg

SEQ ID NO: 1399205 - DNA, 25 bp, Homo sapien
tggagagctcaaattcagtcacttg

SEQ ID NO: 1399206 - DNA, 25 bp, Homo sapien
gacggcccagaggtctgacctattt

SEQ ID NO: 1399207 - DNA, 25 bp, Homo sapien
ggtctgacctatttataccccagcc

SEQ ID NO: 1399208 - DNA, 25 bp, Homo sapien
tgacctatttataccccagccaggc

SEQ ID NO: 1399209 - DNA, 25 bp, Homo sapien
gggacggcccagaggtctgacctat

SEQ ID NO: 1399210 - DNA, 25 bp, Homo sapien
cagtccttgaagtactcgtggcagt

SEQ ID NO: 1399211 - DNA, 25 bp, Homo sapien
tggtctcattggtgcacgctctgct

SEQ ID NO: 1399212 - DNA, 25 bp, Homo sapien
ttaactgatcgcagaagacctgggc

SEQ ID NO: 1399213 - DNA, 25 bp, Homo sapien
cattcgctgggcatcctgaggaagg

SEQ ID NO: 1399214 - DNA, 25 bp, Homo sapien
gttggtgtccagaacactcatgaat

SEQ ID NO: 1399215 - DNA, 25 bp, Homo sapien
cttgttggtgtccagaacactcatg

SEQ ID NO: 1399216 - DNA, 25 bp, Homo sapien
tgtagtcacattcccgaaactcagt

SEQ ID NO: 1399217 - DNA, 25 bp, Homo sapien
tgaatttgttgtagtcacattcccg

SEQ ID NO: 1399218 - DNA, 25 bp, Homo sapien
agcttgtatttgtccccacagcgcc

SEQ ID NO: 1399219 - DNA, 25 bp, Homo sapien
acagcgccctgcgtattcctggaag

SEQ ID NO: 1399220 - DNA, 25 bp, Homo sapien
aaggtgcacacgatggcagctaccg

SEQ ID NO: 1399221 - DNA, 25 bp, Homo sapien
cttgagctccgcctggcagagcttg

SEQ ID NO: 1399222 - DNA, 25 bp, Homo sapien
tcgctggcccagtcaggaacctgaa

SEQ ID NO: 1399223 - DNA, 25 bp, Homo sapien
ttcgggtgtttaccaatctgagact

SEQ ID NO: 1399224 - DNA, 25 bp, Homo sapien
tctcttgagagttgaccagttcggg

SEQ ID NO: 1399225 - DNA, 25 bp, Homo sapien
tcaggaacctgaaccagatggtctc

SEQ ID NO: 1399226 - DNA, 25 bp, Homo sapien
cgtttcagctgtaggagcttagaga

SEQ ID NO: 1399227 - DNA, 25 bp, Homo sapien
ctggcgtttcagctgtaggagctta

SEQ ID NO: 1399228 - DNA, 25 bp, Homo sapien
ttcagctgtaggagcttagagacag

SEQ ID NO: 1399229 - DNA, 25 bp, Homo sapien
ggcgtttcagctgtaggagcttaga

SEQ ID NO: 1399230 - DNA, 25 bp, Homo sapien
taagcttgagatttctggcccttcc

SEQ ID NO: 1399231 - DNA, 25 bp, Homo sapien
tttgggctagagtcacatgaaggct

SEQ ID NO: 1399232 - DNA, 25 bp, Homo sapien
ggcacttccagagtctaagcttgag

SEQ ID NO: 1399233 - DNA, 25 bp, Homo sapien
gggaatgaatttgggctagagtcac

SEQ ID NO: 1399234 - DNA, 25 bp, Homo sapien
aaggagattgactcccaggccggca

SEQ ID NO: 1399235 - DNA, 25 bp, Homo sapien
ccagaaacagacatactttcatgta

SEQ ID NO: 1399236 - DNA, 25 bp, Homo sapien
caggccggcaaagaagccttcctgc

SEQ ID NO: 1399237 - DNA, 25 bp, Homo sapien
caaaacctagaagagcgtgagaggg

SEQ ID NO: 1399238 - DNA, 25 bp, Homo sapien
gcacccaagccttgcctgtgccgtc

SEQ ID NO: 1399239 - DNA, 25 bp, Homo sapien
ccagcacccaagccttgcctgtgcc

SEQ ID NO: 1399240 - DNA, 25 bp, Homo sapien
cagcacccaagccttgcctgtgccg

SEQ ID NO: 1399241 - DNA, 25 bp, Homo sapien
agcacccaagccttgcctgtgccgt

SEQ ID NO: 1399242 - DNA, 25 bp, Homo sapien
aaaagaggagctgtgattagccctg

SEQ ID NO: 1399243 - DNA, 25 bp, Homo sapien
taagcagcctacctctgctctcggg

SEQ ID NO: 1399244 - DNA, 25 bp, Homo sapien
cctgttttataatgggctacatagc

SEQ ID NO: 1399245 - DNA, 25 bp, Homo sapien
taactacctcataggtttgtgcggg

SEQ ID NO: 1399246 - DNA, 25 bp, Homo sapien
cagatgtggagctgaccactgagaa

SEQ ID NO: 1399247 - DNA, 25 bp, Homo sapien
tgtggagctgaccactgagaaatgc

SEQ ID NO: 1399248 - DNA, 25 bp, Homo sapien
gagctgaccactgagaaatgcacca

SEQ ID NO: 1399249 - DNA, 25 bp, Homo sapien
tgcagatgtggagctgaccactgag

SEQ ID NO: 1399250 - DNA, 25 bp, Homo sapien
cctatctcgatttccaattttttgc

SEQ ID NO: 1399251 - DNA, 25 bp, Homo sapien
cgggttatggaacatcactgagcaa

SEQ ID NO: 1399252 - DNA, 25 bp, Homo sapien
tgacaaaataaaagtcagcaaccta

SEQ ID NO: 1399253 - DNA, 25 bp, Homo sapien
taaagcatagctctggccttggaga

SEQ ID NO: 1399254 - DNA, 25 bp, Homo sapien
ggcatcaacagtcctgggcccaaga

SEQ ID NO: 1399255 - DNA, 25 bp, Homo sapien
gcatcaacagtcctgggcccaagag

SEQ ID NO: 1399256 - DNA, 25 bp, Homo sapien
aaggcatcaacagtcctgggcccaa

SEQ ID NO: 1399257 - DNA, 25 bp, Homo sapien
caaaggcatcaacagtcctgggccc

SEQ ID NO: 1399258 - DNA, 25 bp, Homo sapien
agaagtcattgcacatgacagtgat

SEQ ID NO: 1399259 - DNA, 25 bp, Homo sapien
gaagtcattgcacatgacagtgatg

SEQ ID NO: 1399260 - DNA, 25 bp, Homo sapien
aagaagtcattgcacatgacagtga

SEQ ID NO: 1399261 - DNA, 25 bp, Homo sapien
tgatcttgggacaatcacttttccc

SEQ ID NO: 1399262 - DNA, 25 bp, Homo sapien
taaacagatggactcggaaggccct

SEQ ID NO: 1399263 - DNA, 25 bp, Homo sapien
caatgacaggattaaacagatggac

SEQ ID NO: 1399264 - DNA, 25 bp, Homo sapien
ggtttctcaagtctccaatgacagg

SEQ ID NO: 1399265 - DNA, 25 bp, Homo sapien
gcagctccttgtgcagaagttcctt

SEQ ID NO: 1399266 - DNA, 25 bp, Homo sapien
gctccttgtgcagaagttccttcat

SEQ ID NO: 1399267 - DNA, 25 bp, Homo sapien
ccccttactcagcttgaacttgtcg

SEQ ID NO: 1399268 - DNA, 25 bp, Homo sapien
gaacttgtcgccctcttggcaggag

SEQ ID NO: 1399269 - DNA, 25 bp, Homo sapien
gggccttagctcagcctgtaggatc

SEQ ID NO: 1399270 - DNA, 25 bp, Homo sapien
tcctctgatggcacttgggacaccc

SEQ ID NO: 1399271 - DNA, 25 bp, Homo sapien
tgtaggatccacttctgccctatgc

SEQ ID NO: 1399272 - DNA, 25 bp, Homo sapien
ggcagacgctaaagcttcccttgtg

SEQ ID NO: 1399273 - DNA, 25 bp, Homo sapien
gctctaggccaggtcaagggcagcc

SEQ ID NO: 1399274 - DNA, 25 bp, Homo sapien
gaaaccaaacctgcctcaacctgat

SEQ ID NO: 1399275 - DNA, 25 bp, Homo sapien
cactggcccccaacttggcatttta

SEQ ID NO: 1399276 - DNA, 25 bp, Homo sapien
tgaggatttatatgtgggccccact

SEQ ID NO: 1399277 - DNA, 25 bp, Homo sapien
cccagagcagtaggtggaagcccca

SEQ ID NO: 1399278 - DNA, 25 bp, Homo sapien
tcccagagcagtaggtggaagcccc

SEQ ID NO: 1399279 - DNA, 25 bp, Homo sapien
agtcccagagcagtaggtggaagcc

SEQ ID NO: 1399280 - DNA, 25 bp, Homo sapien
gcagtcccagagcagtaggtggaag

SEQ ID NO: 1399281 - DNA, 25 bp, Homo sapien
aagcactggcacagagaccccaaac

SEQ ID NO: 1399282 - DNA, 25 bp, Homo sapien
gcagggaaagcactggcacagagac

SEQ ID NO: 1399283 - DNA, 25 bp, Homo sapien
ctggcagggaaagcactggcacaga

SEQ ID NO: 1399284 - DNA, 25 bp, Homo sapien
agggaaagcactggcacagagaccc

SEQ ID NO: 1399285 - DNA, 25 bp, Homo sapien
gtgtacttgttttctctcagcctca

SEQ ID NO: 1399286 - DNA, 25 bp, Homo sapien
ctgtgtacttgttttctctcagcct

SEQ ID NO: 1399287 - DNA, 25 bp, Homo sapien
tgtgtacttgttttctctcagcctc

SEQ ID NO: 1399288 - DNA, 25 bp, Homo sapien
cacaccaggtgccaaccagtgctta

SEQ ID NO: 1399289 - DNA, 25 bp, Homo sapien
cggtcttactcatttctgcatgagg

SEQ ID NO: 1399290 - DNA, 25 bp, Homo sapien
tgcatgaggtaagggtctcgcccac

SEQ ID NO: 1399291 - DNA, 25 bp, Homo sapien
tgcttacggctaccacatggcaaca

SEQ ID NO: 1399292 - DNA, 25 bp, Homo sapien
tcctgaacttctcagtgagtaaact

SEQ ID NO: 1399293 - DNA, 25 bp, Homo sapien
gaacttctcagtgagtaaacttctc

SEQ ID NO: 1399294 - DNA, 25 bp, Homo sapien
tcgaagtcctgaacttctcagtgag

SEQ ID NO: 1399295 - DNA, 25 bp, Homo sapien
tctcagtgagtaaacttctcaggaa

SEQ ID NO: 1399296 - DNA, 25 bp, Homo sapien
gatgaaatttaagacctgactccag

SEQ ID NO: 1399297 - DNA, 25 bp, Homo sapien
tgagtgcgagagaaggaatgactct

SEQ ID NO: 1399298 - DNA, 25 bp, Homo sapien
acttcaacgtgcctgtggattttca

SEQ ID NO: 1399299 - DNA, 25 bp, Homo sapien
gtccatattcacacacttcaacgtg

SEQ ID NO: 1399300 - DNA, 25 bp, Homo sapien
ggtaaccagctctttgaactcgttg

SEQ ID NO: 1399301 - DNA, 25 bp, Homo sapien
tggtgaccacggtctcaatggactc

SEQ ID NO: 1399302 - DNA, 25 bp, Homo sapien
aactcgttgacgctgaggctatcct

SEQ ID NO: 1399303 - DNA, 25 bp, Homo sapien
ggcaactgctgggtaaccagctctt

SEQ ID NO: 1399304 - DNA, 25 bp, Homo sapien
ccattaggaccctgaggccaaagct

SEQ ID NO: 1399305 - DNA, 25 bp, Homo sapien
aaagctgatgtcctcaaggggctag

SEQ ID NO: 1399306 - DNA, 25 bp, Homo sapien
accctgaggccaaagctgatgtcct

SEQ ID NO: 1399307 - DNA, 25 bp, Homo sapien
ctgccattaggaccctgaggccaaa

SEQ ID NO: 1399308 - DNA, 25 bp, Homo sapien
tgtggcgtgtctgtctcaagaatcc

SEQ ID NO: 1399309 - DNA, 25 bp, Homo sapien
tgtctgtggcttagggacccctctg

SEQ ID NO: 1399310 - DNA, 25 bp, Homo sapien
ctgtaggtctcacaatccgggatcc

SEQ ID NO: 1399311 - DNA, 25 bp, Homo sapien
gagtccttcaagtctggtggcccct

SEQ ID NO: 1399312 - DNA, 25 bp, Homo sapien
gagctggctccgtctgaacagaccc

SEQ ID NO: 1399313 - DNA, 25 bp, Homo sapien
tgtctcccggtgacaagggtcctgg

SEQ ID NO: 1399314 - DNA, 25 bp, Homo sapien
tccaggacgggtttagtacaggcac

SEQ ID NO: 1399315 - DNA, 25 bp, Homo sapien
cacgcgctgttgctcgatcatccaa

SEQ ID NO: 1399316 - DNA, 25 bp, Homo sapien
gaggtgtcaaatttccgtggtcgat

SEQ ID NO: 1399317 - DNA, 25 bp, Homo sapien
cttccaagcccggaggtgtcaaatt

SEQ ID NO: 1399318 - DNA, 25 bp, Homo sapien
agcccggaggtgtcaaatttccgtg

SEQ ID NO: 1399319 - DNA, 25 bp, Homo sapien
tccaagcccggaggtgtcaaatttc

SEQ ID NO: 1399320 - DNA, 25 bp, Homo sapien
caaggcccagcttggggtaagacat

SEQ ID NO: 1399321 - DNA, 25 bp, Homo sapien
agccagccacaggtactgcaaggcc

SEQ ID NO: 1399322 - DNA, 25 bp, Homo sapien
acagccagccacaggtactgcaagg

SEQ ID NO: 1399323 - DNA, 25 bp, Homo sapien
aagacatccagtgtccctcccagga

SEQ ID NO: 1399324 - DNA, 25 bp, Homo sapien
ctgggatgtcattcgatcaggggcc

SEQ ID NO: 1399325 - DNA, 25 bp, Homo sapien
gggccccattgaagaactgggatgt

SEQ ID NO: 1399326 - DNA, 25 bp, Homo sapien
gccccattgaagaactgggatgtca

SEQ ID NO: 1399327 - DNA, 25 bp, Homo sapien
aagggccccattgaagaactgggat

SEQ ID NO: 1399328 - DNA, 25 bp, Homo sapien
gaaccatggatttccattggaagat

SEQ ID NO: 1399329 - DNA, 25 bp, Homo sapien
cagatggctttcctgaagaggtggc

SEQ ID NO: 1399330 - DNA, 25 bp, Homo sapien
ggtggcacttgaaccatggatttcc

SEQ ID NO: 1399331 - DNA, 25 bp, Homo sapien
agtcagatggctttcctgaagaggt

SEQ ID NO: 1399332 - DNA, 25 bp, Homo sapien
gggtaaatgcagacattttaggagg

SEQ ID NO: 1399333 - DNA, 25 bp, Homo sapien
aatgcagacattttaggaggaggta

SEQ ID NO: 1399334 - DNA, 25 bp, Homo sapien
taaatgcagacattttaggaggagg

SEQ ID NO: 1399335 - DNA, 25 bp, Homo sapien
ctgggtaaatgcagacattttagga

SEQ ID NO: 1399336 - DNA, 25 bp, Homo sapien
ggcactgaacatacggtaactggtg

SEQ ID NO: 1399337 - DNA, 25 bp, Homo sapien
ggcctgtaacaatttcttctgggag

SEQ ID NO: 1399338 - DNA, 25 bp, Homo sapien
ttctgccaggtgaaagagcttatgc

SEQ ID NO: 1399339 - DNA, 25 bp, Homo sapien
gaagagtcccataattcaatgcagt

SEQ ID NO: 1399340 - DNA, 25 bp, Homo sapien
caagagtagcggtccaagcctgcaa

SEQ ID NO: 1399341 - DNA, 25 bp, Homo sapien
gcggtccaagcctgcaactcatctt

SEQ ID NO: 1399342 - DNA, 25 bp, Homo sapien
tgcaactcatctttcattaaaggct

SEQ ID NO: 1399343 - DNA, 25 bp, Homo sapien
gcctgcaactcatctttcattaaag

SEQ ID NO: 1399344 - DNA, 25 bp, Homo sapien
cagccatccgatgtctgtctcctct

SEQ ID NO: 1399345 - DNA, 25 bp, Homo sapien
agccatccgatgtctgtctcctctg

SEQ ID NO: 1399346 - DNA, 25 bp, Homo sapien
atccgatgtctgtctcctctgggat

SEQ ID NO: 1399347 - DNA, 25 bp, Homo sapien
ccatccgatgtctgtctcctctggg

SEQ ID NO: 1399348 - DNA, 25 bp, Homo sapien
ggtggagacgtgaagactgttcact

SEQ ID NO: 1399349 - DNA, 25 bp, Homo sapien
gacgtgaagactgttcactctcaac

SEQ ID NO: 1399350 - DNA, 25 bp, Homo sapien
tatttggggaagtgtcttatttaga

SEQ ID NO: 1399351 - DNA, 25 bp, Homo sapien
ttagaaagaggtcaaggtgcattac

SEQ ID NO: 1399352 - DNA, 25 bp, Homo sapien
gttcaaggttccagttggaagtcga

SEQ ID NO: 1399353 - DNA, 25 bp, Homo sapien
tggaagtcgaggagacatcagcttc

SEQ ID NO: 1399354 - DNA, 25 bp, Homo sapien
tccagttggaagtcgaggagacatc

SEQ ID NO: 1399355 - DNA, 25 bp, Homo sapien
caaggttccagttggaagtcgagga

SEQ ID NO: 1399356 - DNA, 25 bp, Homo sapien
ctactggaacgtgaagtccccggca

SEQ ID NO: 1399357 - DNA, 25 bp, Homo sapien
tagacggtgtaccttggctagggaa

SEQ ID NO: 1399358 - DNA, 25 bp, Homo sapien
caattgtccggaagaagacgaggca

SEQ ID NO: 1399359 - DNA, 25 bp, Homo sapien
gacgaggcaagtccgcgtaaagatt

SEQ ID NO: 1399360 - DNA, 25 bp, Homo sapien
cctgacgtaattgcgtagacgccat

SEQ ID NO: 1399361 - DNA, 25 bp, Homo sapien
tgcgcaggcgtagctcaaatctttc

SEQ ID NO: 1399362 - DNA, 25 bp, Homo sapien
cattttgttttggacaccgagcagg

SEQ ID NO: 1399363 - DNA, 25 bp, Homo sapien
tagacgccattttagccggtcagac

SEQ ID NO: 1399364 - DNA, 25 bp, Homo sapien
atcggccgactagacagccaaccag

SEQ ID NO: 1399365 - DNA, 25 bp, Homo sapien
gagcagacggatcggccgactagac

SEQ ID NO: 1399366 - DNA, 25 bp, Homo sapien
tactaccgcttacgcatctaaccaa

SEQ ID NO: 1399367 - DNA, 25 bp, Homo sapien
ccaaccagcaacaacgaactgagct

SEQ ID NO: 1399368 - DNA, 25 bp, Homo sapien
ggaggagcactggcgtctgtttcct

SEQ ID NO: 1399369 - DNA, 25 bp, Homo sapien
cggcccgcctgccggagccgtggtg

SEQ ID NO: 1399370 - DNA, 25 bp, Homo sapien
gcccgcctgccggagccgtggtggc

SEQ ID NO: 1399371 - DNA, 25 bp, Homo sapien
ccgagcccctccaccgtcaactcag

SEQ ID NO: 1399372 - DNA, 25 bp, Homo sapien
ggctgcacagtcagcgccgaaagtt

SEQ ID NO: 1399373 - DNA, 25 bp, Homo sapien
tagattctcgggattcgaagatggc

SEQ ID NO: 1399374 - DNA, 25 bp, Homo sapien
tcgggattcgaagatggctgcacag

SEQ ID NO: 1399375 - DNA, 25 bp, Homo sapien
gcgccgaaagttgtgctaaaaagca

SEQ ID NO: 1399376 - DNA, 25 bp, Homo sapien
tctctaaaagccgttacctgagccc

SEQ ID NO: 1399377 - DNA, 25 bp, Homo sapien
tggccttagaatgcacctcggatcc

SEQ ID NO: 1399378 - DNA, 25 bp, Homo sapien
gagccctcgttatcacttttggttg

SEQ ID NO: 1399379 - DNA, 25 bp, Homo sapien
gttgaatgtgctgcacttagctgca

SEQ ID NO: 1399380 - DNA, 25 bp, Homo sapien
tgctgaagaacaaacagccgacgcc

SEQ ID NO: 1399381 - DNA, 25 bp, Homo sapien
tgatctctgtgagggagtccactga

SEQ ID NO: 1399382 - DNA, 25 bp, Homo sapien
gaatgggtcttaatgctccagaagc

SEQ ID NO: 1399383 - DNA, 25 bp, Homo sapien
tattcgggcttcgatgcagcaacaa

SEQ ID NO: 1399384 - DNA, 25 bp, Homo sapien
ttagtcagctaccaacttcagagag

SEQ ID NO: 1399385 - DNA, 25 bp, Homo sapien
gtagctccccgaatgggcttaagaa

SEQ ID NO: 1399386 - DNA, 25 bp, Homo sapien
ttctgcacagcttcaagtcataggc

SEQ ID NO: 1399387 - DNA, 25 bp, Homo sapien
taaggtcaaaacctgctccgaggtg

SEQ ID NO: 1399388 - DNA, 25 bp, Homo sapien
tggatgcctacatggcgcagacaga

SEQ ID NO: 1399389 - DNA, 25 bp, Homo sapien
ggtgcccttgctcgccctgtattga

SEQ ID NO: 1399390 - DNA, 25 bp, Homo sapien
caataggctgtggacttacttgcca

SEQ ID NO: 1399391 - DNA, 25 bp, Homo sapien
cacctggatgctgagttggatgcct

SEQ ID NO: 1399392 - DNA, 25 bp, Homo sapien
gacatcactacagggcagcataaga

SEQ ID NO: 1399393 - DNA, 25 bp, Homo sapien
gaaggtctggagctcaaaaatgcgt

SEQ ID NO: 1399394 - DNA, 25 bp, Homo sapien
catataccataaccagcgtgttggg

SEQ ID NO: 1399395 - DNA, 25 bp, Homo sapien
catcccagaaaaaccggtcagtgtt

SEQ ID NO: 1399396 - DNA, 25 bp, Homo sapien
tgcttcaaacaaactgtacggctcc

SEQ ID NO: 1399397 - DNA, 25 bp, Homo sapien
taactagtcctgaagaaggtaagcc

SEQ ID NO: 1399398 - DNA, 25 bp, Homo sapien
gaaggtaagcctcacgtatgcagct

SEQ ID NO: 1399399 - DNA, 25 bp, Homo sapien
catgtaacatacaaaggaagcccct

SEQ ID NO: 1399400 - DNA, 25 bp, Homo sapien
tgtccaggcccatgtaaccaggcat

SEQ ID NO: 1399401 - DNA, 25 bp, Homo sapien
ggaacctcattctggctgtgtgtag

SEQ ID NO: 1399402 - DNA, 25 bp, Homo sapien
ggagacagtccccatagaccttcag

SEQ ID NO: 1399403 - DNA, 25 bp, Homo sapien
ggctccccaggcaaataacagatga

SEQ ID NO: 1399404 - DNA, 25 bp, Homo sapien
tagcacaagtactgttccccagctg

SEQ ID NO: 1399405 - DNA, 25 bp, Homo sapien
tacatgcctggttacatgggcctgg

SEQ ID NO: 1399406 - DNA, 25 bp, Homo sapien
tacacacagccagaatgaggttccc

SEQ ID NO: 1399407 - DNA, 25 bp, Homo sapien
cagacatgcaaagatcctaggagac

SEQ ID NO: 1399408 - DNA, 25 bp, Homo sapien
taccagagtaaactagaatatcatt

SEQ ID NO: 1399409 - DNA, 25 bp, Homo sapien
tgttgaaaatgataattgagtcatt

SEQ ID NO: 1399410 - DNA, 25 bp, Homo sapien
cagatcacaatttgaagctgtcttt

SEQ ID NO: 1399411 - DNA, 25 bp, Homo sapien
aatactcagatcacaatttgaagct

SEQ ID NO: 1399412 - DNA, 25 bp, Homo sapien
ctcctggaacctttccatataccag

SEQ ID NO: 1399413 - DNA, 25 bp, Homo sapien
gagtaaactagaatatcattttaag

SEQ ID NO: 1399414 - DNA, 25 bp, Homo sapien
gacagcttcaaattgtgatctgagt

SEQ ID NO: 1399415 - DNA, 25 bp, Homo sapien
ctggtatatggaaaggttccaggag

SEQ ID NO: 1399416 - DNA, 25 bp, Homo sapien
aaaatgatattctagtttactctgg

SEQ ID NO: 1399417 - DNA, 25 bp, Homo sapien
caaattgtgatctgagtatttataa

SEQ ID NO: 1399418 - DNA, 25 bp, Homo sapien
aaagacagcttcaaattgtgatctg

SEQ ID NO: 1399419 - DNA, 25 bp, Homo sapien
aatgactcaattatcattttcaaca

SEQ ID NO: 1399420 - DNA, 25 bp, Homo sapien
gatattggcttagctgccagtctcc

SEQ ID NO: 1399421 - DNA, 25 bp, Homo sapien
tccatagaagtgtcattccactggg

SEQ ID NO: 1399422 - DNA, 25 bp, Homo sapien
aaactccatagaagtgtcattccac

SEQ ID NO: 1399423 - DNA, 25 bp, Homo sapien
tagaagtgtcattccactgggtttt

SEQ ID NO: 1399424 - DNA, 25 bp, Homo sapien
tgtgaaatgttaagtgtctggaaat

SEQ ID NO: 1399425 - DNA, 25 bp, Homo sapien
attggcttagctgccagtctcccat

SEQ ID NO: 1399426 - DNA, 25 bp, Homo sapien
atgggagactggcagctaagccaat

SEQ ID NO: 1399427 - DNA, 25 bp, Homo sapien
cccagtggaatgacacttctatgga

SEQ ID NO: 1399428 - DNA, 25 bp, Homo sapien
aaaacccagtggaatgacacttcta

SEQ ID NO: 1399429 - DNA, 25 bp, Homo sapien
gtggaatgacacttctatggagttt

SEQ ID NO: 1399430 - DNA, 25 bp, Homo sapien
gagactggcagctaagccaatatca

SEQ ID NO: 1399431 - DNA, 25 bp, Homo sapien
aatttccagacacttaacatttcac

SEQ ID NO: 1399432 - DNA, 25 bp, Homo sapien
cagacatttccgtgggatagggaag

SEQ ID NO: 1399433 - DNA, 25 bp, Homo sapien
tggtgacagacatttccgtgggata

SEQ ID NO: 1399434 - DNA, 25 bp, Homo sapien
gggctttacatggtgacagacattt

SEQ ID NO: 1399435 - DNA, 25 bp, Homo sapien
tgacagacatttccgtgggataggg

SEQ ID NO: 1399436 - DNA, 25 bp, Homo sapien
tacatggtgacagacatttccgtgg

SEQ ID NO: 1399437 - DNA, 25 bp, Homo sapien
catggtgacagacatttccgtggga

SEQ ID NO: 1399438 - DNA, 25 bp, Homo sapien
ccctatcccacggaaatgtctgtca

SEQ ID NO: 1399439 - DNA, 25 bp, Homo sapien
ggaaatgtctgtcaccatgtaaagc

SEQ ID NO: 1399440 - DNA, 25 bp, Homo sapien
tcttccctatcccacggaaatgtct

SEQ ID NO: 1399441 - DNA, 25 bp, Homo sapien
cacggaaatgtctgtcaccatgtaa

SEQ ID NO: 1399442 - DNA, 25 bp, Homo sapien
tatcccacggaaatgtctgtcacca

SEQ ID NO: 1399443 - DNA, 25 bp, Homo sapien
aaatgtctgtcaccatgtaaagccc

SEQ ID NO: 1399444 - DNA, 25 bp, Homo sapien
aaaggcttatgagaagccaccagag

SEQ ID NO: 1399445 - DNA, 25 bp, Homo sapien
agaaaaggcttatgagaagccacca

SEQ ID NO: 1399446 - DNA, 25 bp, Homo sapien
gaaaaggcttatgagaagccaccag

SEQ ID NO: 1399447 - DNA, 25 bp, Homo sapien
aaaaggcttatgagaagccaccaga

SEQ ID NO: 1399448 - DNA, 25 bp, Homo sapien
gggatggagtgatagtaacaccttc

SEQ ID NO: 1399449 - DNA, 25 bp, Homo sapien
ctgggatggagtgatagtaacacct

SEQ ID NO: 1399450 - DNA, 25 bp, Homo sapien
ggagtgatagtaacaccttcagaaa

SEQ ID NO: 1399451 - DNA, 25 bp, Homo sapien
cctgggatggagtgatagtaacacc

SEQ ID NO: 1399452 - DNA, 25 bp, Homo sapien
ctacctgggatggagtgatagtaac

SEQ ID NO: 1399453 - DNA, 25 bp, Homo sapien
gatggagtgatagtaacaccttcag

SEQ ID NO: 1399454 - DNA, 25 bp, Homo sapien
tctgaaggtgttactatcactccat

SEQ ID NO: 1399455 - DNA, 25 bp, Homo sapien
ggtgttactatcactccatcccagg

SEQ ID NO: 1399456 - DNA, 25 bp, Homo sapien
aaggtgttactatcactccatccca

SEQ ID NO: 1399457 - DNA, 25 bp, Homo sapien
tgaaggtgttactatcactccatcc

SEQ ID NO: 1399458 - DNA, 25 bp, Homo sapien
gttactatcactccatcccaggtag

SEQ ID NO: 1399459 - DNA, 25 bp, Homo sapien
tttctgaaggtgttactatcactcc

SEQ ID NO: 1399460 - DNA, 25 bp, Homo sapien
tggtggcttctcataagccttttct

SEQ ID NO: 1399461 - DNA, 25 bp, Homo sapien
ctctggtggcttctcataagccttt

SEQ ID NO: 1399462 - DNA, 25 bp, Homo sapien
ctggtggcttctcataagccttttc

SEQ ID NO: 1399463 - DNA, 25 bp, Homo sapien
tctggtggcttctcataagcctttt

SEQ ID NO: 1399464 - DNA, 25 bp, Homo sapien
tactcgtctaaatcacctttttctc

SEQ ID NO: 1399465 - DNA, 25 bp, Homo sapien
ctcgtctaaatcacctttttctctt

SEQ ID NO: 1399466 - DNA, 25 bp, Homo sapien
ctactcgtctaaatcacctttttct

SEQ ID NO: 1399467 - DNA, 25 bp, Homo sapien
actcgtctaaatcacctttttctct

SEQ ID NO: 1399468 - DNA, 25 bp, Homo sapien
agagaaaaaggtgatttagacgagt

SEQ ID NO: 1399469 - DNA, 25 bp, Homo sapien
gagaaaaaggtgatttagacgagta

SEQ ID NO: 1399470 - DNA, 25 bp, Homo sapien
agaaaaaggtgatttagacgagtag

SEQ ID NO: 1399471 - DNA, 25 bp, Homo sapien
aagagaaaaaggtgatttagacgag

SEQ ID NO: 1399472 - DNA, 25 bp, Homo sapien
gtccgaatcctctcacatggtggct

SEQ ID NO: 1399473 - DNA, 25 bp, Homo sapien
gacatggtctgctatacagctcaga

SEQ ID NO: 1399474 - DNA, 25 bp, Homo sapien
tatacagctcagactctcgtccgaa

SEQ ID NO: 1399475 - DNA, 25 bp, Homo sapien
tgctatacagctcagactctcgtcc

SEQ ID NO: 1399476 - DNA, 25 bp, Homo sapien
tcgtccgaatcctctcacatggtgg

SEQ ID NO: 1399477 - DNA, 25 bp, Homo sapien
tacagctcagactctcgtccgaatc

SEQ ID NO: 1399478 - DNA, 25 bp, Homo sapien
gtggctttaggaagatccttggcca

SEQ ID NO: 1399479 - DNA, 25 bp, Homo sapien
ggtggctttaggaagatccttggcc

SEQ ID NO: 1399480 - DNA, 25 bp, Homo sapien
tggtggctttaggaagatccttggc

SEQ ID NO: 1399481 - DNA, 25 bp, Homo sapien
tggctttaggaagatccttggccag

SEQ ID NO: 1399482 - DNA, 25 bp, Homo sapien
tggccaaggatcttcctaaagccac

SEQ ID NO: 1399483 - DNA, 25 bp, Homo sapien
gccaaggatcttcctaaagccacca

SEQ ID NO: 1399484 - DNA, 25 bp, Homo sapien
ctggccaaggatcttcctaaagcca

SEQ ID NO: 1399485 - DNA, 25 bp, Homo sapien
ggccaaggatcttcctaaagccacc

SEQ ID NO: 1399486 - DNA, 25 bp, Homo sapien
caccatgtgagaggattcggacgag

SEQ ID NO: 1399487 - DNA, 25 bp, Homo sapien
agccaccatgtgagaggattcggac

SEQ ID NO: 1399488 - DNA, 25 bp, Homo sapien
gattcggacgagagtctgagctgta

SEQ ID NO: 1399489 - DNA, 25 bp, Homo sapien
tctgagctgtatagcagaccatgtc

SEQ ID NO: 1399490 - DNA, 25 bp, Homo sapien
gagagtctgagctgtatagcagacc

SEQ ID NO: 1399491 - DNA, 25 bp, Homo sapien
ggacgagagtctgagctgtatagca

SEQ ID NO: 1399492 - DNA, 25 bp, Homo sapien
tatgaactgagttgttttgccccac

SEQ ID NO: 1399493 - DNA, 25 bp, Homo sapien
gattttccttgcttactctcacttt

SEQ ID NO: 1399494 - DNA, 25 bp, Homo sapien
gaatatggtctttacgggtcaggaa

SEQ ID NO: 1399495 - DNA, 25 bp, Homo sapien
gaaagactttggtcctgagatttaa

SEQ ID NO: 1399496 - DNA, 25 bp, Homo sapien
gcaggcaaagcggaatatggtcttt

SEQ ID NO: 1399497 - DNA, 25 bp, Homo sapien
tgccccactcttttgaatactgctg

SEQ ID NO: 1399498 - DNA, 25 bp, Homo sapien
ttaaatctcaggaccaaagtctttc

SEQ ID NO: 1399499 - DNA, 25 bp, Homo sapien
aattcctgacccgtaaagaccatat

SEQ ID NO: 1399500 - DNA, 25 bp, Homo sapien
taaagaccatattccgctttgcctg

SEQ ID NO: 1399501 - DNA, 25 bp, Homo sapien
ttatttgagtaatacccttctgaaa

SEQ ID NO: 1399502 - DNA, 25 bp, Homo sapien
caaagtgagagtaagcaaggaaaat

SEQ ID NO: 1399503 - DNA, 25 bp, Homo sapien
gggcaaaacaactcagttcatatct

SEQ ID NO: 1399504 - DNA, 25 bp, Homo sapien
acacagtcatgaccctagaacagca

SEQ ID NO: 1399505 - DNA, 25 bp, Homo sapien
tgctgttctagggtcatgactgtgt

SEQ ID NO: 1399506 - DNA, 25 bp, Homo sapien
gacccctgtgagagtggcaacttta

SEQ ID NO: 1399507 - DNA, 25 bp, Homo sapien
acacagtcatgaccctagaacagca

SEQ ID NO: 1399508 - DNA, 25 bp, Homo sapien
tggcaactttagagtacacacagtc

SEQ ID NO: 1399509 - DNA, 25 bp, Homo sapien
cagattctggctgcaggactgttcc

SEQ ID NO: 1399510 - DNA, 25 bp, Homo sapien
gcgctgcttgcagattctggctgca

SEQ ID NO: 1399511 - DNA, 25 bp, Homo sapien
tcctgccaggttcagtgggtatcac

SEQ ID NO: 1399512 - DNA, 25 bp, Homo sapien
gactgtgtgtactctaaagttgcca

SEQ ID NO: 1399513 - DNA, 25 bp, Homo sapien
gtgatacccactgaacctggcagga

SEQ ID NO: 1399514 - DNA, 25 bp, Homo sapien
tgcagccagaatctgcaagcagcgc

SEQ ID NO: 1399515 - DNA, 25 bp, Homo sapien
ctctaaagttgccactctcacaggg

SEQ ID NO: 1399516 - DNA, 25 bp, Homo sapien
tgctgttctagggtcatgactgtgt

SEQ ID NO: 1399517 - DNA, 25 bp, Homo sapien
ggaacagtcctgcagccagaatctg

SEQ ID NO: 1399518 - DNA, 25 bp, Homo sapien
tttaatacctcatacctccctgtgt

SEQ ID NO: 1399519 - DNA, 25 bp, Homo sapien
gcattcctttaatacctcatacctc

SEQ ID NO: 1399520 - DNA, 25 bp, Homo sapien
tgtgcattcctttaatacctcatac

SEQ ID NO: 1399521 - DNA, 25 bp, Homo sapien
gtgcattcctttaatacctcatacc

SEQ ID NO: 1399522 - DNA, 25 bp, Homo sapien
ctattttgtgcattcctttaatacc

SEQ ID NO: 1399523 - DNA, 25 bp, Homo sapien
ttttgtgcattcctttaatacctca

SEQ ID NO: 1399524 - DNA, 25 bp, Homo sapien
acacagggaggtatgaggtattaaa

SEQ ID NO: 1399525 - DNA, 25 bp, Homo sapien
tatgaggtattaaaggaatgcacaa

SEQ ID NO: 1399526 - DNA, 25 bp, Homo sapien
ggtatgaggtattaaaggaatgcac

SEQ ID NO: 1399527 - DNA, 25 bp, Homo sapien
ggtattaaaggaatgcacaaaatag

SEQ ID NO: 1399528 - DNA, 25 bp, Homo sapien
tgaggtattaaaggaatgcacaaaa

SEQ ID NO: 1399529 - DNA, 25 bp, Homo sapien
gaggtatgaggtattaaaggaatgc

SEQ ID NO: 1399530 - DNA, 25 bp, Homo sapien
tgtgatgaacaaccccaccagacag

SEQ ID NO: 1399531 - DNA, 25 bp, Homo sapien
cagcctttggccctaaacgttgcat

SEQ ID NO: 1399532 - DNA, 25 bp, Homo sapien
ttatgctgtgatgaacaaccccacc

SEQ ID NO: 1399533 - DNA, 25 bp, Homo sapien
accagacagcctttggccctaaacg

SEQ ID NO: 1399534 - DNA, 25 bp, Homo sapien
ctttggccctaaacgttgcatacag

SEQ ID NO: 1399535 - DNA, 25 bp, Homo sapien
gccattatgctgtgatgaacaaccc

SEQ ID NO: 1399536 - DNA, 25 bp, Homo sapien
tatgcaacgtttagggccaaaggct

SEQ ID NO: 1399537 - DNA, 25 bp, Homo sapien
ctgtatgcaacgtttagggccaaag

SEQ ID NO: 1399538 - DNA, 25 bp, Homo sapien
cgtttagggccaaaggctgtctggt

SEQ ID NO: 1399539 - DNA, 25 bp, Homo sapien
tctggtggggttgttcatcacagca

SEQ ID NO: 1399540 - DNA, 25 bp, Homo sapien
gggttgttcatcacagcataatggc

SEQ ID NO: 1399541 - DNA, 25 bp, Homo sapien
ggttgttcatcacagcataatggcc

SEQ ID NO: 1399542 - DNA, 25 bp, Homo sapien
gctagacttagaccttaatgaccag

SEQ ID NO: 1399543 - DNA, 25 bp, Homo sapien
tgaaaattttggctagacttagacc

SEQ ID NO: 1399544 - DNA, 25 bp, Homo sapien
gaccagttttcctcgtgatcattta

SEQ ID NO: 1399545 - DNA, 25 bp, Homo sapien
taaagatgggcaattggagttcctc

SEQ ID NO: 1399546 - DNA, 25 bp, Homo sapien
tcaacatttacatgactcagagaca

SEQ ID NO: 1399547 - DNA, 25 bp, Homo sapien
tactgagttatagtgtcccgttttc

SEQ ID NO: 1399548 - DNA, 25 bp, Homo sapien
taaatgatcacgaggaaaactggtc

SEQ ID NO: 1399549 - DNA, 25 bp, Homo sapien
gaggaactccaattgcccatcttta

SEQ ID NO: 1399550 - DNA, 25 bp, Homo sapien
gaaaacgggacactataactcagta

SEQ ID NO: 1399551 - DNA, 25 bp, Homo sapien
ttaaatggtagcagtcatgagaaga

SEQ ID NO: 1399552 - DNA, 25 bp, Homo sapien
tggtcattaaggtctaagtctagcc

SEQ ID NO: 1399553 - DNA, 25 bp, Homo sapien
tgtctctgagtcatgtaaatgttga

SEQ ID NO: 1399554 - DNA, 25 bp, Homo sapien
ctggctttgagcccctcacaccctg

SEQ ID NO: 1399555 - DNA, 25 bp, Homo sapien
ggctttgagcccctcacaccctgga

SEQ ID NO: 1399556 - DNA, 25 bp, Homo sapien
gctttgagcccctcacaccctggat

SEQ ID NO: 1399557 - DNA, 25 bp, Homo sapien
cctggctttgagcccctcacaccct

SEQ ID NO: 1399558 - DNA, 25 bp, Homo sapien
tcctggctttgagcccctcacaccc

SEQ ID NO: 1399559 - DNA, 25 bp, Homo sapien
ctttgagcccctcacaccctggatc

SEQ ID NO: 1399560 - DNA, 25 bp, Homo sapien
agggtgtgaggggctcaaagccagg

SEQ ID NO: 1399561 - DNA, 25 bp, Homo sapien
cagggtgtgaggggctcaaagccag

SEQ ID NO: 1399562 - DNA, 25 bp, Homo sapien
gatccagggtgtgaggggctcaaag

SEQ ID NO: 1399563 - DNA, 25 bp, Homo sapien
tccagggtgtgaggggctcaaagcc

SEQ ID NO: 1399564 - DNA, 25 bp, Homo sapien
atccagggtgtgaggggctcaaagc

SEQ ID NO: 1399565 - DNA, 25 bp, Homo sapien
gggtgtgaggggctcaaagccagga

SEQ ID NO: 1399566 - DNA, 25 bp, Homo sapien
tgaaggacttgaggattcgttttcc

SEQ ID NO: 1399567 - DNA, 25 bp, Homo sapien
ctactgaaggacttgaggattcgtt

SEQ ID NO: 1399568 - DNA, 25 bp, Homo sapien
gattcgttttcctggctttgagccc

SEQ ID NO: 1399569 - DNA, 25 bp, Homo sapien
ttttcctggctttgagcccctcaca

SEQ ID NO: 1399570 - DNA, 25 bp, Homo sapien
aaagttctcatcagactactgaagg

SEQ ID NO: 1399571 - DNA, 25 bp, Homo sapien
ccctcacaccctggatccttgacct

SEQ ID NO: 1399572 - DNA, 25 bp, Homo sapien
aacgaatcctcaagtccttcagtag

SEQ ID NO: 1399573 - DNA, 25 bp, Homo sapien
cagtagtctgatgagaactttaact

SEQ ID NO: 1399574 - DNA, 25 bp, Homo sapien
aggtcaaggatccagggtgtgaggg

SEQ ID NO: 1399575 - DNA, 25 bp, Homo sapien
ggaaaacgaatcctcaagtccttca

SEQ ID NO: 1399576 - DNA, 25 bp, Homo sapien
gggctcaaagccaggaaaacgaatc

SEQ ID NO: 1399577 - DNA, 25 bp, Homo sapien
caagtccttcagtagtctgatgaga

SEQ ID NO: 1399578 - DNA, 25 bp, Homo sapien
atgtttgggtcactattactttcag

SEQ ID NO: 1399579 - DNA, 25 bp, Homo sapien
agtcagcttcaattctaccttaggc

SEQ ID NO: 1399580 - DNA, 25 bp, Homo sapien
tctaccttaggcatggaaatacatg

SEQ ID NO: 1399581 - DNA, 25 bp, Homo sapien
gaactattttgcctgtgacctcgtg

SEQ ID NO: 1399582 - DNA, 25 bp, Homo sapien
gcctgtgacctcgtgtctggatttt

SEQ ID NO: 1399583 - DNA, 25 bp, Homo sapien
actgcagtgaatagcaggatacccc

SEQ ID NO: 1399584 - DNA, 25 bp, Homo sapien
taaaaatccagacacgaggtcacag

SEQ ID NO: 1399585 - DNA, 25 bp, Homo sapien
gcctaaggtagaattgaagctgact

SEQ ID NO: 1399586 - DNA, 25 bp, Homo sapien
gggtatcctgctattcactgcagtt

SEQ ID NO: 1399587 - DNA, 25 bp, Homo sapien
catgtatttccatgcctaaggtaga

SEQ ID NO: 1399588 - DNA, 25 bp, Homo sapien
cacgaggtcacaggcaaaatagttc

SEQ ID NO: 1399589 - DNA, 25 bp, Homo sapien
ctgaaagtaatagtgacccaaacat

SEQ ID NO: 1399590 - DNA, 25 bp, Homo sapien
tcgaggaaaatgcttctcagtccac

SEQ ID NO: 1399591 - DNA, 25 bp, Homo sapien
ggttcgaggaaaatgcttctcagtc

SEQ ID NO: 1399592 - DNA, 25 bp, Homo sapien
cgctggttcgaggaaaatgcttctc

SEQ ID NO: 1399593 - DNA, 25 bp, Homo sapien
cccgctggttcgaggaaaatgcttc

SEQ ID NO: 1399594 - DNA, 25 bp, Homo sapien
ccgacatgcccgctggttcgaggaa

SEQ ID NO: 1399595 - DNA, 25 bp, Homo sapien
gctggttcgaggaaaatgcttctca

SEQ ID NO: 1399596 - DNA, 25 bp, Homo sapien
ttcctcgaaccagcgggcatgtcgg

SEQ ID NO: 1399597 - DNA, 25 bp, Homo sapien
gaagcattttcctcgaaccagcggg

SEQ ID NO: 1399598 - DNA, 25 bp, Homo sapien
tgagaagcattttcctcgaaccagc

SEQ ID NO: 1399599 - DNA, 25 bp, Homo sapien
gtggactgagaagcattttcctcga

SEQ ID NO: 1399600 - DNA, 25 bp, Homo sapien
gagaagcattttcctcgaaccagcg

SEQ ID NO: 1399601 - DNA, 25 bp, Homo sapien
gactgagaagcattttcctcgaacc

SEQ ID NO: 1399602 - DNA, 25 bp, Homo sapien
agtttttaagactgtagcagtggta

SEQ ID NO: 1399603 - DNA, 25 bp, Homo sapien
tggcatatcatgcttgtctttttag

SEQ ID NO: 1399604 - DNA, 25 bp, Homo sapien
gcagtggtaatgagtagcttgttta

SEQ ID NO: 1399605 - DNA, 25 bp, Homo sapien
tggtaatgagtagcttgtttaatga

SEQ ID NO: 1399606 - DNA, 25 bp, Homo sapien
tcctggcatatcatgcttgtctttt

SEQ ID NO: 1399607 - DNA, 25 bp, Homo sapien
gactgtagcagtggtaatgagtagc

SEQ ID NO: 1399608 - DNA, 25 bp, Homo sapien
tcattaaacaagctactcattacca

SEQ ID NO: 1399609 - DNA, 25 bp, Homo sapien
ctaaaaagacaagcatgatatgcca

SEQ ID NO: 1399610 - DNA, 25 bp, Homo sapien
taccactgctacagtcttaaaaact

SEQ ID NO: 1399611 - DNA, 25 bp, Homo sapien
taaacaagctactcattaccactgc

SEQ ID NO: 1399612 - DNA, 25 bp, Homo sapien
aagctactcattaccactgctacag

SEQ ID NO: 1399613 - DNA, 25 bp, Homo sapien
aaagacaagcatgatatgccaggat

SEQ ID NO: 1399614 - DNA, 25 bp, Homo sapien
ctgaccaacgaaactggctttgaaa

SEQ ID NO: 1399615 - DNA, 25 bp, Homo sapien
gctgaccaacgaaactggctttgaa

SEQ ID NO: 1399616 - DNA, 25 bp, Homo sapien
tgctgaccaacgaaactggctttga

SEQ ID NO: 1399617 - DNA, 25 bp, Homo sapien
atgctgaccaacgaaactggctttg

SEQ ID NO: 1399618 - DNA, 25 bp, Homo sapien
ttcgaaaactggatccagaactcca

SEQ ID NO: 1399619 - DNA, 25 bp, Homo sapien
tggagttctggatccagttttcgaa

SEQ ID NO: 1399620 - DNA, 25 bp, Homo sapien
ttcaaagccagtttcgttggtcagc

SEQ ID NO: 1399621 - DNA, 25 bp, Homo sapien
tttcaaagccagtttcgttggtcag

SEQ ID NO: 1399622 - DNA, 25 bp, Homo sapien
tcaaagccagtttcgttggtcagca

SEQ ID NO: 1399623 - DNA, 25 bp, Homo sapien
caaagccagtttcgttggtcagcat

SEQ ID NO: 1399624 - DNA, 25 bp, Homo sapien
accaacgaaactggctttgaaatca

SEQ ID NO: 1399625 - DNA, 25 bp, Homo sapien
taaccatgctgaccaacgaaactgg

SEQ ID NO: 1399626 - DNA, 25 bp, Homo sapien
ctgaccaacgaaactggctttgaaa

SEQ ID NO: 1399627 - DNA, 25 bp, Homo sapien
ttttaaccatgctgaccaacgaaac

SEQ ID NO: 1399628 - DNA, 25 bp, Homo sapien
gctgaccaacgaaactggctttgaa

SEQ ID NO: 1399629 - DNA, 25 bp, Homo sapien
atgctgaccaacgaaactggctttg

SEQ ID NO: 1399630 - DNA, 25 bp, Homo sapien
gaccagatggaagagtaaatgcaga

SEQ ID NO: 1399631 - DNA, 25 bp, Homo sapien
accagatggaagagtaaatgcagag

SEQ ID NO: 1399632 - DNA, 25 bp, Homo sapien
ccagatggaagagtaaatgcagagt

SEQ ID NO: 1399633 - DNA, 25 bp, Homo sapien
agaccagatggaagagtaaatgcag

SEQ ID NO: 1399634 - DNA, 25 bp, Homo sapien
atggaagagtaaatgcagagtttta

SEQ ID NO: 1399635 - DNA, 25 bp, Homo sapien
ctgcatttactcttccatctggtct

SEQ ID NO: 1399636 - DNA, 25 bp, Homo sapien
tctgcatttactcttccatctggtc

SEQ ID NO: 1399637 - DNA, 25 bp, Homo sapien
actctgcatttactcttccatctgg

SEQ ID NO: 1399638 - DNA, 25 bp, Homo sapien
ctctgcatttactcttccatctggt

SEQ ID NO: 1399639 - DNA, 25 bp, Homo sapien
taaaactctgcatttactcttccat

SEQ ID NO: 1399640 - DNA, 25 bp, Homo sapien
tctgcatttactcttccatctggtc

SEQ ID NO: 1399641 - DNA, 25 bp, Homo sapien
ctgattttgttgaaagtgtacttac

SEQ ID NO: 1399642 - DNA, 25 bp, Homo sapien
tccatctggtctgatctgattttgt

SEQ ID NO: 1399643 - DNA, 25 bp, Homo sapien
acaacataaaactctgcatttactc

SEQ ID NO: 1399644 - DNA, 25 bp, Homo sapien
actctgcatttactcttccatctgg

SEQ ID NO: 1399645 - DNA, 25 bp, Homo sapien
taaaactctgcatttactcttccat

SEQ ID NO: 1399646 - DNA, 25 bp, Homo sapien
tatttagtagccataggaaccaggt

SEQ ID NO: 1399647 - DNA, 25 bp, Homo sapien
tagtagccataggaaccaggtcttg

SEQ ID NO: 1399648 - DNA, 25 bp, Homo sapien
gccataggaaccaggtcttgtaatt

SEQ ID NO: 1399649 - DNA, 25 bp, Homo sapien
tttagtagccataggaaccaggtct

SEQ ID NO: 1399650 - DNA, 25 bp, Homo sapien
tagccataggaaccaggtcttgtaa

SEQ ID NO: 1399651 - DNA, 25 bp, Homo sapien
tctgtatttagtagccataggaacc

SEQ ID NO: 1399652 - DNA, 25 bp, Homo sapien
cctggttcctatggctactaaatac

SEQ ID NO: 1399653 - DNA, 25 bp, Homo sapien
caagacctggttcctatggctacta

SEQ ID NO: 1399654 - DNA, 25 bp, Homo sapien
tacaagacctggttcctatggctac

SEQ ID NO: 1399655 - DNA, 25 bp, Homo sapien
gacctggttcctatggctactaaat

SEQ ID NO: 1399656 - DNA, 25 bp, Homo sapien
aattacaagacctggttcctatggc

SEQ ID NO: 1399657 - DNA, 25 bp, Homo sapien
ggttcctatggctactaaatacaga

SEQ ID NO: 1399658 - DNA, 25 bp, Homo sapien
aaagcctaagagcacaggatccttc

SEQ ID NO: 1399659 - DNA, 25 bp, Homo sapien
tcgtggaaagcctaagagcacagga

SEQ ID NO: 1399660 - DNA, 25 bp, Homo sapien
aacaaagtcgtggaaagcctaagag

SEQ ID NO: 1399661 - DNA, 25 bp, Homo sapien
tggaaagcctaagagcacaggatcc

SEQ ID NO: 1399662 - DNA, 25 bp, Homo sapien
aagtcgtggaaagcctaagagcaca

SEQ ID NO: 1399663 - DNA, 25 bp, Homo sapien
caaagtcgtggaaagcctaagagca

SEQ ID NO: 1399664 - DNA, 25 bp, Homo sapien
ggatcctgtgctcttaggctttcca

SEQ ID NO: 1399665 - DNA, 25 bp, Homo sapien
tgctcttaggctttccacgactttg

SEQ ID NO: 1399666 - DNA, 25 bp, Homo sapien
gaaggatcctgtgctcttaggcttt

SEQ ID NO: 1399667 - DNA, 25 bp, Homo sapien
tcctgtgctcttaggctttccacga

SEQ ID NO: 1399668 - DNA, 25 bp, Homo sapien
tgtgctcttaggctttccacgactt

SEQ ID NO: 1399669 - DNA, 25 bp, Homo sapien
gctcttaggctttccacgactttgt

SEQ ID NO: 1399670 - DNA, 25 bp, Homo sapien
caccccaaagatttgtctagcccaa

SEQ ID NO: 1399671 - DNA, 25 bp, Homo sapien
gtagcttagagatacatagaaagtc

SEQ ID NO: 1399672 - DNA, 25 bp, Homo sapien
aatgttattaactgccactgacctg

SEQ ID NO: 1399673 - DNA, 25 bp, Homo sapien
aagaaaaaggatagaggccgtggat

SEQ ID NO: 1399674 - DNA, 25 bp, Homo sapien
cctgctgtagaaagaggatatgagt

SEQ ID NO: 1399675 - DNA, 25 bp, Homo sapien
atgagagtgcaaagtagcttagaga

SEQ ID NO: 1399676 - DNA, 25 bp, Homo sapien
gactttctatgtatctctaagctac

SEQ ID NO: 1399677 - DNA, 25 bp, Homo sapien
ggaacaggacccctcctgtactcat

SEQ ID NO: 1399678 - DNA, 25 bp, Homo sapien
tactcatatcctctttctacagcag

SEQ ID NO: 1399679 - DNA, 25 bp, Homo sapien
tcaggtcagtggcagttaataacat

SEQ ID NO: 1399680 - DNA, 25 bp, Homo sapien
tctctaagctactttgcactctcat

SEQ ID NO: 1399681 - DNA, 25 bp, Homo sapien
tatacttttataagagaaagccaag

SEQ ID NO: 1399682 - DNA, 25 bp, Homo sapien
atgggaacagaacatagcacttgga

SEQ ID NO: 1399683 - DNA, 25 bp, Homo sapien
ccttgacctccactacagcaagtga

SEQ ID NO: 1399684 - DNA, 25 bp, Homo sapien
tgggaacagaacatagcacttggat

SEQ ID NO: 1399685 - DNA, 25 bp, Homo sapien
acagaacatagcacttggattaggg

SEQ ID NO: 1399686 - DNA, 25 bp, Homo sapien
catagcacttggattaggggtttag

SEQ ID NO: 1399687 - DNA, 25 bp, Homo sapien
gccttgacctccactacagcaagtg

SEQ ID NO: 1399688 - DNA, 25 bp, Homo sapien
tcacttgctgtagtggaggtcaagg

SEQ ID NO: 1399689 - DNA, 25 bp, Homo sapien
cacttgctgtagtggaggtcaaggc

SEQ ID NO: 1399690 - DNA, 25 bp, Homo sapien
cctaaacccctaatccaagtgctat

SEQ ID NO: 1399691 - DNA, 25 bp, Homo sapien
taaacccctaatccaagtgctatgt

SEQ ID NO: 1399692 - DNA, 25 bp, Homo sapien
tccaagtgctatgttctgttcccat

SEQ ID NO: 1399693 - DNA, 25 bp, Homo sapien
ccctaatccaagtgctatgttctgt

SEQ ID NO: 1399694 - DNA, 25 bp, Homo sapien
tggtggtgatactcaagattctgcc

SEQ ID NO: 1399695 - DNA, 25 bp, Homo sapien
gtgatactcaagattctgccaacgt

SEQ ID NO: 1399696 - DNA, 25 bp, Homo sapien
ctacaggacacaatgtggctgacct

SEQ ID NO: 1399697 - DNA, 25 bp, Homo sapien
gacctggtggtgatactcaagattc

SEQ ID NO: 1399698 - DNA, 25 bp, Homo sapien
ggtgatactcaagattctgccaacg

SEQ ID NO: 1399699 - DNA, 25 bp, Homo sapien
gctgacctggtggtgatactcaaga

SEQ ID NO: 1399700 - DNA, 25 bp, Homo sapien
tcttgagtatcaccaccaggtcagc

SEQ ID NO: 1399701 - DNA, 25 bp, Homo sapien
aggtcagccacattgtgtcctgtag

SEQ ID NO: 1399702 - DNA, 25 bp, Homo sapien
gcagaatcttgagtatcaccaccag

SEQ ID NO: 1399703 - DNA, 25 bp, Homo sapien
cgttggcagaatcttgagtatcacc

SEQ ID NO: 1399704 - DNA, 25 bp, Homo sapien
acgttggcagaatcttgagtatcac

SEQ ID NO: 1399705 - DNA, 25 bp, Homo sapien
gaatcttgagtatcaccaccaggtc

SEQ ID NO: 1399706 - DNA, 25 bp, Homo sapien
aatgtgattgataatctgattgtgg

SEQ ID NO: 1399707 - DNA, 25 bp, Homo sapien
atgtgattgataatctgattgtggc

SEQ ID NO: 1399708 - DNA, 25 bp, Homo sapien
gattgataatctgattgtggctcca

SEQ ID NO: 1399709 - DNA, 25 bp, Homo sapien
caatgtgattgataatctgattgtg

SEQ ID NO: 1399710 - DNA, 25 bp, Homo sapien
tgattgataatctgattgtggctcc

SEQ ID NO: 1399711 - DNA, 25 bp, Homo sapien
tgtgattgataatctgattgtggct

SEQ ID NO: 1399712 - DNA, 25 bp, Homo sapien
ggagccacaatcagattatcaatca

SEQ ID NO: 1399713 - DNA, 25 bp, Homo sapien
agccacaatcagattatcaatcaca

SEQ ID NO: 1399714 - DNA, 25 bp, Homo sapien
ccacaatcagattatcaatcacatt

SEQ ID NO: 1399715 - DNA, 25 bp, Homo sapien
tggagccacaatcagattatcaatc

SEQ ID NO: 1399716 - DNA, 25 bp, Homo sapien
gccacaatcagattatcaatcacat

SEQ ID NO: 1399717 - DNA, 25 bp, Homo sapien
cacaatcagattatcaatcacattg

SEQ ID NO: 1399718 - DNA, 25 bp, Homo sapien
ataatctgattgtggctccagggac

SEQ ID NO: 1399719 - DNA, 25 bp, Homo sapien
gcatctatcctttctctggtgacaa

SEQ ID NO: 1399720 - DNA, 25 bp, Homo sapien
gattgataatctgattgtggctcca

SEQ ID NO: 1399721 - DNA, 25 bp, Homo sapien
tatcctttctctggtgacaaaaata

SEQ ID NO: 1399722 - DNA, 25 bp, Homo sapien
caatgtgattgataatctgattgtg

SEQ ID NO: 1399723 - DNA, 25 bp, Homo sapien
tgtggctccagggacatttgaagtg

SEQ ID NO: 1399724 - DNA, 25 bp, Homo sapien
ttgtcaccagagaaaggatagatgc

SEQ ID NO: 1399725 - DNA, 25 bp, Homo sapien
gtccctggagccacaatcagattat

SEQ ID NO: 1399726 - DNA, 25 bp, Homo sapien
cacttcaaatgtccctggagccaca

SEQ ID NO: 1399727 - DNA, 25 bp, Homo sapien
tggagccacaatcagattatcaatc

SEQ ID NO: 1399728 - DNA, 25 bp, Homo sapien
gccacaatcagattatcaatcacat

SEQ ID NO: 1399729 - DNA, 25 bp, Homo sapien
tatttttgtcaccagagaaaggata

SEQ ID NO: 1399730 - DNA, 25 bp, Homo sapien
gcctttccccgggtcaagccagcac

SEQ ID NO: 1399731 - DNA, 25 bp, Homo sapien
tggcctttccccgggtcaagccagc

SEQ ID NO: 1399732 - DNA, 25 bp, Homo sapien
ggcctttccccgggtcaagccagca

SEQ ID NO: 1399733 - DNA, 25 bp, Homo sapien
gaagaggaatcaggacctggctccc

SEQ ID NO: 1399734 - DNA, 25 bp, Homo sapien
tgaagaggaatcaggacctggctcc

SEQ ID NO: 1399735 - DNA, 25 bp, Homo sapien
ctgaagaggaatcaggacctggctc

SEQ ID NO: 1399736 - DNA, 25 bp, Homo sapien
gagccaggtcctgattcctcttcag

SEQ ID NO: 1399737 - DNA, 25 bp, Homo sapien
ggagccaggtcctgattcctcttca

SEQ ID NO: 1399738 - DNA, 25 bp, Homo sapien
gggagccaggtcctgattcctcttc

SEQ ID NO: 1399739 - DNA, 25 bp, Homo sapien
tgctggcttgacccggggaaaggcc

SEQ ID NO: 1399740 - DNA, 25 bp, Homo sapien
gtgctggcttgacccggggaaaggc

SEQ ID NO: 1399741 - DNA, 25 bp, Homo sapien
gctggcttgacccggggaaaggcca

SEQ ID NO: 1399742 - DNA, 25 bp, Homo sapien
gcctttccccgggtcaagccagcac

SEQ ID NO: 1399743 - DNA, 25 bp, Homo sapien
gaaacttccttcagtgaggccttgc

SEQ ID NO: 1399744 - DNA, 25 bp, Homo sapien
gaagaggaatcaggacctggctccc

SEQ ID NO: 1399745 - DNA, 25 bp, Homo sapien
tgtgaaatggcctttccccgggtca

SEQ ID NO: 1399746 - DNA, 25 bp, Homo sapien
tgatgaaacttccttcagtgaggcc

SEQ ID NO: 1399747 - DNA, 25 bp, Homo sapien
cgggtcaagccagcacctgatgaaa

SEQ ID NO: 1399748 - DNA, 25 bp, Homo sapien
gaattgggagccaggtcctgattcc

SEQ ID NO: 1399749 - DNA, 25 bp, Homo sapien
aggtcctgattcctcttcagcaagg

SEQ ID NO: 1399750 - DNA, 25 bp, Homo sapien
caaggcctcactgaaggaagtttca

SEQ ID NO: 1399751 - DNA, 25 bp, Homo sapien
tgacccggggaaaggccatttcaca

SEQ ID NO: 1399752 - DNA, 25 bp, Homo sapien
gaaggaagtttcatcaggtgctggc

SEQ ID NO: 1399753 - DNA, 25 bp, Homo sapien
ttcatcaggtgctggcttgacccgg

SEQ ID NO: 1399754 - DNA, 25 bp, Homo sapien
acatatcccatttgacttctatttg

SEQ ID NO: 1399755 - DNA, 25 bp, Homo sapien
caaatagaagtcaaatgggatatgt

SEQ ID NO: 1399756 - DNA, 25 bp, Homo sapien
ttcaggccctttgtaccacatatcc

SEQ ID NO: 1399757 - DNA, 25 bp, Homo sapien
cctttgtaccacatatcccatttga

SEQ ID NO: 1399758 - DNA, 25 bp, Homo sapien
ggccctttgtaccacatatcccatt

SEQ ID NO: 1399759 - DNA, 25 bp, Homo sapien
acatatcccatttgacttctatttg

SEQ ID NO: 1399760 - DNA, 25 bp, Homo sapien
gttcaggccctttgtaccacatatc

SEQ ID NO: 1399761 - DNA, 25 bp, Homo sapien
tttgtaccacatatcccatttgact

SEQ ID NO: 1399762 - DNA, 25 bp, Homo sapien
aatgggatatgtggtacaaagggcc

SEQ ID NO: 1399763 - DNA, 25 bp, Homo sapien
caaatagaagtcaaatgggatatgt

SEQ ID NO: 1399764 - DNA, 25 bp, Homo sapien
tcaaatgggatatgtggtacaaagg

SEQ ID NO: 1399765 - DNA, 25 bp, Homo sapien
gatatgtggtacaaagggcctgaac

SEQ ID NO: 1399766 - DNA, 25 bp, Homo sapien
ggatatgtggtacaaagggcctgaa

SEQ ID NO: 1399767 - DNA, 25 bp, Homo sapien
aaatgggatatgtggtacaaagggc

SEQ ID NO: 1399768 - DNA, 25 bp, Homo sapien
tcgtggtgggcgctttggttccaga

SEQ ID NO: 1399769 - DNA, 25 bp, Homo sapien
tctggaaccaaagcgcccaccacga

SEQ ID NO: 1399770 - DNA, 25 bp, Homo sapien
gccgtggtcgtggtgggcgctttgg

SEQ ID NO: 1399771 - DNA, 25 bp, Homo sapien
ctttggttccagaggaggcccagga

SEQ ID NO: 1399772 - DNA, 25 bp, Homo sapien
gcgctttggttccagaggaggccca

SEQ ID NO: 1399773 - DNA, 25 bp, Homo sapien
cgctttggttccagaggaggcccag

SEQ ID NO: 1399774 - DNA, 25 bp, Homo sapien
gtgacagaggccgtggtcgtggtgg

SEQ ID NO: 1399775 - DNA, 25 bp, Homo sapien
ttggttccagaggaggcccaggagg

SEQ ID NO: 1399776 - DNA, 25 bp, Homo sapien
ccaccacgaccacggcctctgtcac

SEQ ID NO: 1399777 - DNA, 25 bp, Homo sapien
ctcctgggcctcctctggaaccaaa

SEQ ID NO: 1399778 - DNA, 25 bp, Homo sapien
tcctgggcctcctctggaaccaaag

SEQ ID NO: 1399779 - DNA, 25 bp, Homo sapien
ctgggcctcctctggaaccaaagcg

SEQ ID NO: 1399780 - DNA, 25 bp, Homo sapien
aaagcgcccaccacgaccacggcct

SEQ ID NO: 1399781 - DNA, 25 bp, Homo sapien
tgggcctcctctggaaccaaagcgc

SEQ ID NO: 1399782 - DNA, 25 bp, Homo sapien
ctttgtgaacgtgggccgaaagaag

SEQ ID NO: 1399783 - DNA, 25 bp, Homo sapien
agaagtcggagtatcagaaagggcc

SEQ ID NO: 1399784 - DNA, 25 bp, Homo sapien
tgggccgaaagaagtcggagtatca

SEQ ID NO: 1399785 - DNA, 25 bp, Homo sapien
ccaaaaacctgagaactcctggtct

SEQ ID NO: 1399786 - DNA, 25 bp, Homo sapien
gagtatcagaaagggccatgtatcc

SEQ ID NO: 1399787 - DNA, 25 bp, Homo sapien
cctgagaactcctggtctaggatag

SEQ ID NO: 1399788 - DNA, 25 bp, Homo sapien
tagaccaggagttctcaggtttttg

SEQ ID NO: 1399789 - DNA, 25 bp, Homo sapien
ggccctttctgatactccgacttct

SEQ ID NO: 1399790 - DNA, 25 bp, Homo sapien
tgatactccgacttctttcggccca

SEQ ID NO: 1399791 - DNA, 25 bp, Homo sapien
ccccggatacatggccctttctgat

SEQ ID NO: 1399792 - DNA, 25 bp, Homo sapien
cttctttcggcccacgttcacaaag

SEQ ID NO: 1399793 - DNA, 25 bp, Homo sapien
ctatcctagaccaggagttctcagg

SEQ ID NO: 1399794 - DNA, 25 bp, Homo sapien
ttgtctgctactcagaggaaggggc

SEQ ID NO: 1399795 - DNA, 25 bp, Homo sapien
gcaagacgcctcttcagttgtctgc

SEQ ID NO: 1399796 - DNA, 25 bp, Homo sapien
gcggcctccattgttcgtgttttaa

SEQ ID NO: 1399797 - DNA, 25 bp, Homo sapien
ggttggtgcggcctccattgttcgt

SEQ ID NO: 1399798 - DNA, 25 bp, Homo sapien
ggcaagacgcctcttcagttgtctg

SEQ ID NO: 1399799 - DNA, 25 bp, Homo sapien
ggtgcggcctccattgttcgtgttt

SEQ ID NO: 1399800 - DNA, 25 bp, Homo sapien
gcagacaactgaagaggcgtcttgc

SEQ ID NO: 1399801 - DNA, 25 bp, Homo sapien
gccccttcctctgagtagcagacaa

SEQ ID NO: 1399802 - DNA, 25 bp, Homo sapien
aaaacacgaacaatggaggccgcac

SEQ ID NO: 1399803 - DNA, 25 bp, Homo sapien
acgaacaatggaggccgcaccaacc

SEQ ID NO: 1399804 - DNA, 25 bp, Homo sapien
cagacaactgaagaggcgtcttgcc

SEQ ID NO: 1399805 - DNA, 25 bp, Homo sapien
ttaaaacacgaacaatggaggccgc

SEQ ID NO: 1399806 - DNA, 25 bp, Homo sapien
gaggaggataaagtcccacagcctg

SEQ ID NO: 1399807 - DNA, 25 bp, Homo sapien
cactgggaattaggcaatgaagggc

SEQ ID NO: 1399808 - DNA, 25 bp, Homo sapien
aagaaaatgggcttgaggcgggagg

SEQ ID NO: 1399809 - DNA, 25 bp, Homo sapien
aggggcgcttcgccaccagcaggct

SEQ ID NO: 1399810 - DNA, 25 bp, Homo sapien
ttccacgacgggctcctgctctata

SEQ ID NO: 1399811 - DNA, 25 bp, Homo sapien
tctatatccaggcagtgacggagac

SEQ ID NO: 1399812 - DNA, 25 bp, Homo sapien
tctgtttgcccctacaggtgaacac

SEQ ID NO: 1399813 - DNA, 25 bp, Homo sapien
tttaaatagtaaaatctccctgtga

SEQ ID NO: 1399814 - DNA, 25 bp, Homo sapien
ttgtaaacactactgcactaggaca

SEQ ID NO: 1399815 - DNA, 25 bp, Homo sapien
aaacactactgcactaggacaagcc

SEQ ID NO: 1399816 - DNA, 25 bp, Homo sapien
taaaggctacccaagtgaagcagtg

SEQ ID NO: 1399817 - DNA, 25 bp, Homo sapien
gtaaacactactgcactaggacaag

SEQ ID NO: 1399818 - DNA, 25 bp, Homo sapien
gggtgaggaccttatcctcagcttg

SEQ ID NO: 1399819 - DNA, 25 bp, Homo sapien
tgttaccgggacttagctctggtga

SEQ ID NO: 1399820 - DNA, 25 bp, Homo sapien
ctttacttctcacagtgttaccggg

SEQ ID NO: 1399821 - DNA, 25 bp, Homo sapien
ctggtgagtcgtgatggcatgaata

SEQ ID NO: 1399822 - DNA, 25 bp, Homo sapien
tctgccccacagagtttcatagcaa

SEQ ID NO: 1399823 - DNA, 25 bp, Homo sapien
ctatgtgatatgtgactttgtgaac

SEQ ID NO: 1399824 - DNA, 25 bp, Homo sapien
tcccaagactggtatggcattgctg

SEQ ID NO: 1399825 - DNA, 25 bp, Homo sapien
gcaagcactaaagactgttacctgg

SEQ ID NO: 1399826 - DNA, 25 bp, Homo sapien
attgggagggtgaatagttctagac

SEQ ID NO: 1399827 - DNA, 25 bp, Homo sapien
gttctagacagagcataggagccag

SEQ ID NO: 1399828 - DNA, 25 bp, Homo sapien
caagaagcgtgaattgggagggtga

SEQ ID NO: 1399829 - DNA, 25 bp, Homo sapien
gacagagcataggagccagtgtgtt

SEQ ID NO: 1399830 - DNA, 25 bp, Homo sapien
tcatcgtggaccaccatgggactgc

SEQ ID NO: 1399831 - DNA, 25 bp, Homo sapien
cctcatcgtggaccaccatgggact

SEQ ID NO: 1399832 - DNA, 25 bp, Homo sapien
cgcctcatcgtggaccaccatggga

SEQ ID NO: 1399833 - DNA, 25 bp, Homo sapien
ctccgcctcatcgtggaccaccatg

SEQ ID NO: 1399834 - DNA, 25 bp, Homo sapien
gaacagctaggagccaatcctttgg

SEQ ID NO: 1399835 - DNA, 25 bp, Homo sapien
aacagctaggagccaatcctttggt

SEQ ID NO: 1399836 - DNA, 25 bp, Homo sapien
cctgaacagctaggagccaatcctt

SEQ ID NO: 1399837 - DNA, 25 bp, Homo sapien
tgaacagctaggagccaatcctttg

SEQ ID NO: 1399838 - DNA, 25 bp, Homo sapien
tctcacgcatgagtgtgaaaaacca

SEQ ID NO: 1399839 - DNA, 25 bp, Homo sapien
taatgtggggacatggtaacaaggt

SEQ ID NO: 1399840 - DNA, 25 bp, Homo sapien
cgcatgagtgtgaaaaaccaataat

SEQ ID NO: 1399841 - DNA, 25 bp, Homo sapien
ggcaggtaatgtggggacatggtaa

SEQ ID NO: 1399842 - DNA, 25 bp, Homo sapien
ttccatcacctgtgtcaaaagaggg

SEQ ID NO: 1399843 - DNA, 25 bp, Homo sapien
cacctgtggaaggtatgaggcccgc

SEQ ID NO: 1399844 - DNA, 25 bp, Homo sapien
ccctaagttggataaggagctgcgg

SEQ ID NO: 1399845 - DNA, 25 bp, Homo sapien
tagctcccctgtttgacaaccctaa

SEQ ID NO: 1399846 - DNA, 25 bp, Homo sapien
tttactcccaagtcaaaattgagga

SEQ ID NO: 1399847 - DNA, 25 bp, Homo sapien
tcccagggtcagtattccatttaga

SEQ ID NO: 1399848 - DNA, 25 bp, Homo sapien
gagttgctatgacaatgcagaggca

SEQ ID NO: 1399849 - DNA, 25 bp, Homo sapien
gaggacccaggaggccattaaatgc

SEQ ID NO: 1399850 - DNA, 25 bp, Homo sapien
tttcccctactctgagtaagccttg

SEQ ID NO: 1399851 - DNA, 25 bp, Homo sapien
cctactctgagtaagccttgtgtac

SEQ ID NO: 1399852 - DNA, 25 bp, Homo sapien
gagtaagccttgtgtactcctaagg

SEQ ID NO: 1399853 - DNA, 25 bp, Homo sapien
catcacgcccagttattggttttgg

SEQ ID NO: 1399854 - DNA, 25 bp, Homo sapien
ttaatagaggctgaggagattgcag

SEQ ID NO: 1399855 - DNA, 25 bp, Homo sapien
gaagaggaagacacgaaaccgaagc

SEQ ID NO: 1399856 - DNA, 25 bp, Homo sapien
tcagaccatagtggaagtcctcagc

SEQ ID NO: 1399857 - DNA, 25 bp, Homo sapien
tatttgggatctgactgaagccaga

SEQ ID NO: 1399858 - DNA, 25 bp, Homo sapien
aaaggagtctgaaagggtggccaca

SEQ ID NO: 1399859 - DNA, 25 bp, Homo sapien
gatttgattggcacccctacttgta

SEQ ID NO: 1399860 - DNA, 25 bp, Homo sapien
gccatgtgaaccagcagaggagagt

SEQ ID NO: 1399861 - DNA, 25 bp, Homo sapien
cagggagtcccagaggcaagtttca

SEQ ID NO: 1399862 - DNA, 25 bp, Homo sapien
tggagcaactgtggcgctgctcctc

SEQ ID NO: 1399863 - DNA, 25 bp, Homo sapien
tggccaaggccggcctgcgcactgc

SEQ ID NO: 1399864 - DNA, 25 bp, Homo sapien
gcaactgtggcgctgctcctccccg

SEQ ID NO: 1399865 - DNA, 25 bp, Homo sapien
ccaaggccggcctgcgcactgcctt

SEQ ID NO: 1399866 - DNA, 25 bp, Homo sapien
gtaactggttgtgatcaatgagttg

SEQ ID NO: 1399867 - DNA, 25 bp, Homo sapien
taagactagtcaaatgaagcagtgg

SEQ ID NO: 1399868 - DNA, 25 bp, Homo sapien
gtaaacaccactgcactcagaccag

SEQ ID NO: 1399869 - DNA, 25 bp, Homo sapien
gagtggagaaggaacaaagaaatct

SEQ ID NO: 1399870 - DNA, 25 bp, Homo sapien
tatagcaagttagtaggagacccca

SEQ ID NO: 1399871 - DNA, 25 bp, Homo sapien
aatagacttccgtgttcccaatggg

SEQ ID NO: 1399872 - DNA, 25 bp, Homo sapien
ctttagaaacacacatcggagggct

SEQ ID NO: 1399873 - DNA, 25 bp, Homo sapien
gatgtcactggtctgatgccctgga

SEQ ID NO: 1399874 - DNA, 25 bp, Homo sapien
gccagtattcaagtatgcaatgttg

SEQ ID NO: 1399875 - DNA, 25 bp, Homo sapien
ttcacgctgtcggtctgccaaactg

SEQ ID NO: 1399876 - DNA, 25 bp, Homo sapien
ctgatggactgcgatatagaccggg

SEQ ID NO: 1399877 - DNA, 25 bp, Homo sapien
gagggatcatgtctaaaaggtattc

SEQ ID NO: 1399878 - DNA, 25 bp, Homo sapien
ttgtttgcttatttatctgagacag

SEQ ID NO: 1399879 - DNA, 25 bp, Homo sapien
acccagccaattaattttgtttgct

SEQ ID NO: 1399880 - DNA, 25 bp, Homo sapien
ataggcgcgtgccactactgcccgg

SEQ ID NO: 1399881 - DNA, 25 bp, Homo sapien
tgcttatttatctgagacagaattt

SEQ ID NO: 1399882 - DNA, 25 bp, Homo sapien
cccttaaaggggctgctacagaact

SEQ ID NO: 1399883 - DNA, 25 bp, Homo sapien
gggctgctacagaactgtatactaa

SEQ ID NO: 1399884 - DNA, 25 bp, Homo sapien
gctgctacagaactgtatactaact

SEQ ID NO: 1399885 - DNA, 25 bp, Homo sapien
taaaggggctgctacagaactgtat

SEQ ID NO: 1399886 - DNA, 25 bp, Homo sapien
gagaaacattttcagattaatcctt

SEQ ID NO: 1399887 - DNA, 25 bp, Homo sapien
gaaacattttcagattaatccttct

SEQ ID NO: 1399888 - DNA, 25 bp, Homo sapien
aacattttcagattaatccttctta

SEQ ID NO: 1399889 - DNA, 25 bp, Homo sapien
acattttcagattaatccttcttac

SEQ ID NO: 1399890 - DNA, 25 bp, Homo sapien
cagatgtgggtatgccacgctggag

SEQ ID NO: 1399891 - DNA, 25 bp, Homo sapien
aaagtttgaaagcatggagcgggca

SEQ ID NO: 1399892 - DNA, 25 bp, Homo sapien
agcgggcagatgtgggtatgccacg

SEQ ID NO: 1399893 - DNA, 25 bp, Homo sapien
gggcagatgtgggtatgccacgctg

SEQ ID NO: 1399894 - DNA, 25 bp, Homo sapien
ctgccgaagcgtatgatgtctcatg

SEQ ID NO: 1399895 - DNA, 25 bp, Homo sapien
tggacacagctggagccgtagtggg

SEQ ID NO: 1399896 - DNA, 25 bp, Homo sapien
cctgctgctgtaatcgctgttcaat

SEQ ID NO: 1399897 - DNA, 25 bp, Homo sapien
cgaagcgtatgatgtctcatgatgg

SEQ ID NO: 1399898 - DNA, 25 bp, Homo sapien
gatgctactcaaacaagggactctg

SEQ ID NO: 1399899 - DNA, 25 bp, Homo sapien
gacctgtagggatcacatgaaccac

SEQ ID NO: 1399900 - DNA, 25 bp, Homo sapien
ctgcaaactagaaggcgcgaccctt

SEQ ID NO: 1399901 - DNA, 25 bp, Homo sapien
taccaccagtcctagagcataaatg

SEQ ID NO: 1399902 - DNA, 25 bp, Homo sapien
ggttcaacccgcagaagtgaggcac

SEQ ID NO: 1399903 - DNA, 25 bp, Homo sapien
caaatgcatttttcagccggttggt

SEQ ID NO: 1399904 - DNA, 25 bp, Homo sapien
tctggttggaggtcatacactgctc

SEQ ID NO: 1399905 - DNA, 25 bp, Homo sapien
ctgggcacatacaaagggttcaacc

SEQ ID NO: 1399906 - DNA, 25 bp, Homo sapien
tgagaacttactgtcctacaaaaaa

SEQ ID NO: 1399907 - DNA, 25 bp, Homo sapien
acaagccgaaagatagatgatagat

SEQ ID NO: 1399908 - DNA, 25 bp, Homo sapien
gatagctgacctgctgaagggaaaa

SEQ ID NO: 1399909 - DNA, 25 bp, Homo sapien
ccggccggctgacggggtacagtgg

SEQ ID NO: 1399910 - DNA, 25 bp, Homo sapien
gacactctgtacgacttcttccaag

SEQ ID NO: 1399911 - DNA, 25 bp, Homo sapien
tttccagctgtttgcgaagagccaa

SEQ ID NO: 1399912 - DNA, 25 bp, Homo sapien
gcctaccatgtagatgaactcgcta

SEQ ID NO: 1399913 - DNA, 25 bp, Homo sapien
gaactcgctattggctgcactaggc

SEQ ID NO: 1399914 - DNA, 25 bp, Homo sapien
caaggttcatatagatggcagagga

SEQ ID NO: 1399915 - DNA, 25 bp, Homo sapien
gcaaggttcatatagatggcagagg

SEQ ID NO: 1399916 - DNA, 25 bp, Homo sapien
agcaaggttcatatagatggcagag

SEQ ID NO: 1399917 - DNA, 25 bp, Homo sapien
aggttcatatagatggcagaggatg

SEQ ID NO: 1399918 - DNA, 25 bp, Homo sapien
tgacatggaacagaagaacttgact

SEQ ID NO: 1399919 - DNA, 25 bp, Homo sapien
ctgacatggaacagaagaacttgac

SEQ ID NO: 1399920 - DNA, 25 bp, Homo sapien
gacatggaacagaagaacttgactg

SEQ ID NO: 1399921 - DNA, 25 bp, Homo sapien
gctgggtttggtgcaataacacgtt

SEQ ID NO: 1399922 - DNA, 25 bp, Homo sapien
cccgctgaccctgtagctgggctgg

SEQ ID NO: 1399923 - DNA, 25 bp, Homo sapien
tgtggtgcgtacaaggccaggctta

SEQ ID NO: 1399924 - DNA, 25 bp, Homo sapien
tggtattggtagctgaacggatgac

SEQ ID NO: 1399925 - DNA, 25 bp, Homo sapien
gagatggctgaacaatagatgctgc

SEQ ID NO: 1399926 - DNA, 25 bp, Homo sapien
gaagcttagataggccctgctgtcc

SEQ ID NO: 1399927 - DNA, 25 bp, Homo sapien
tgttctcaaattttgaggttcaacc

SEQ ID NO: 1399928 - DNA, 25 bp, Homo sapien
ccccaggccgagagggaagcttaga

SEQ ID NO: 1399929 - DNA, 25 bp, Homo sapien
aaactacggacccagagaagaaatg

SEQ ID NO: 1399930 - DNA, 25 bp, Homo sapien
gagaagaaatgagccacccaactga

SEQ ID NO: 1399931 - DNA, 25 bp, Homo sapien
tagtcccttatttctagggcacatt

SEQ ID NO: 1399932 - DNA, 25 bp, Homo sapien
cactactactacagactaaaaaact

SEQ ID NO: 1399933 - DNA, 25 bp, Homo sapien
tctctttctgtagctgactctgtct

SEQ ID NO: 1399934 - DNA, 25 bp, Homo sapien
ctgcttgataagctgctgccgctcc

SEQ ID NO: 1399935 - DNA, 25 bp, Homo sapien
tctttaacaggaccagtcgggcttc

SEQ ID NO: 1399936 - DNA, 25 bp, Homo sapien
ggcttcttccaatcgtagctcatcc

SEQ ID NO: 1399937 - DNA, 25 bp, Homo sapien
ggaagcctcattgtcagacaaaaca

SEQ ID NO: 1399938 - DNA, 25 bp, Homo sapien
actggaacggggactggaagcctca

SEQ ID NO: 1399939 - DNA, 25 bp, Homo sapien
tgtctggtgagggagttagccttcc

SEQ ID NO: 1399940 - DNA, 25 bp, Homo sapien
tctaagttggctgctttgagtcttt

SEQ ID NO: 1399941 - DNA, 25 bp, Homo sapien
gagtgtagtggtgcttgctacattc

SEQ ID NO: 1399942 - DNA, 25 bp, Homo sapien
gtgtagtggtgcttgctacattctc

SEQ ID NO: 1399943 - DNA, 25 bp, Homo sapien
ggacatggatacttttgaacaggga

SEQ ID NO: 1399944 - DNA, 25 bp, Homo sapien
gacatggatacttttgaacagggaa

SEQ ID NO: 1399945 - DNA, 25 bp, Homo sapien
tgaacagccaatgtacgtcagcctg

SEQ ID NO: 1399946 - DNA, 25 bp, Homo sapien
tgtcagtatatctggagtcccaagc

SEQ ID NO: 1399947 - DNA, 25 bp, Homo sapien
tacagcggcccatgcctaatagtcc

SEQ ID NO: 1399948 - DNA, 25 bp, Homo sapien
tcaccccatgttgggtacagcggcc

SEQ ID NO: 1399949 - DNA, 25 bp, Homo sapien
tacttaggggagtagagaggcaaga

SEQ ID NO: 1399950 - DNA, 25 bp, Homo sapien
gctacttaggggagtagagaggcaa

SEQ ID NO: 1399951 - DNA, 25 bp, Homo sapien
taggggagtagagaggcaagagaat

SEQ ID NO: 1399952 - DNA, 25 bp, Homo sapien
tcagctacttaggggagtagagagg

SEQ ID NO: 1399953 - DNA, 25 bp, Homo sapien
taggatgaaaaacaccctcctctca

SEQ ID NO: 1399954 - DNA, 25 bp, Homo sapien
cctcctctcattggaattcattcca

SEQ ID NO: 1399955 - DNA, 25 bp, Homo sapien
ggtcaaactcgatgatatatcttct

SEQ ID NO: 1399956 - DNA, 25 bp, Homo sapien
tatgagacgaccctatccctggagg

SEQ ID NO: 1399957 - DNA, 25 bp, Homo sapien
cattttcagacgttccatggcctca

SEQ ID NO: 1399958 - DNA, 25 bp, Homo sapien
gggtaactcatgtggcacctcaaga

SEQ ID NO: 1399959 - DNA, 25 bp, Homo sapien
cattttgagtcgctttgccaggaca

SEQ ID NO: 1399960 - DNA, 25 bp, Homo sapien
gacatcatctcgctcatctgctggg

SEQ ID NO: 1399961 - DNA, 25 bp, Homo sapien
ctgcgtctggcctaaacataacttt

SEQ ID NO: 1399962 - DNA, 25 bp, Homo sapien
gcgtctggcctaaacataactttta

SEQ ID NO: 1399963 - DNA, 25 bp, Homo sapien
tcttagacataatcctattgcactt

SEQ ID NO: 1399964 - DNA, 25 bp, Homo sapien
cacatggaggcaagacactctacca

SEQ ID NO: 1399965 - DNA, 25 bp, Homo sapien
gccattgaactcatgcagctatcct

SEQ ID NO: 1399966 - DNA, 25 bp, Homo sapien
taatttgactgatctgctccaaagc

SEQ ID NO: 1399967 - DNA, 25 bp, Homo sapien
ttcctgtcgtattccagtcactgcc

SEQ ID NO: 1399968 - DNA, 25 bp, Homo sapien
tcttctggcttaaaaccacttcagt

SEQ ID NO: 1399969 - DNA, 25 bp, Homo sapien
ctgcagctgccccttgctagaagtg

SEQ ID NO: 1399970 - DNA, 25 bp, Homo sapien
cagtgagagggaggtactgtcctac

SEQ ID NO: 1399971 - DNA, 25 bp, Homo sapien
tccccagtgagagggaggtactgtc

SEQ ID NO: 1399972 - DNA, 25 bp, Homo sapien
tcttccccagtgagagggaggtact

SEQ ID NO: 1399973 - DNA, 25 bp, Homo sapien
cccagtgagagggaggtactgtcct

SEQ ID NO: 1399974 - DNA, 25 bp, Homo sapien
ctctgatttggtgagcgcatgttcc

SEQ ID NO: 1399975 - DNA, 25 bp, Homo sapien
gacttcctaagcttgtgttaatgct

SEQ ID NO: 1399976 - DNA, 25 bp, Homo sapien
tgagcgcatgttccaagccactgct

SEQ ID NO: 1399977 - DNA, 25 bp, Homo sapien
actgctcatgagctgcattatctga

SEQ ID NO: 1399978 - DNA, 25 bp, Homo sapien
agtagtcgtcacagcatcttttgcc

SEQ ID NO: 1399979 - DNA, 25 bp, Homo sapien
tcgtcacagcatcttttgccccagt

SEQ ID NO: 1399980 - DNA, 25 bp, Homo sapien
cttggccccagtcacagtagtcgtc

SEQ ID NO: 1399981 - DNA, 25 bp, Homo sapien
cagtcacagtagtcgtcacagcatc

SEQ ID NO: 1399982 - DNA, 25 bp, Homo sapien
tctagccccttacagacacggatat

SEQ ID NO: 1399983 - DNA, 25 bp, Homo sapien
ccccttacagacacggatattggca

SEQ ID NO: 1399984 - DNA, 25 bp, Homo sapien
cagacacggatattggcaactgcaa

SEQ ID NO: 1399985 - DNA, 25 bp, Homo sapien
cttacagacacggatattggcaact

SEQ ID NO: 1399986 - DNA, 25 bp, Homo sapien
cacacacagacttcaagtaggacac

SEQ ID NO: 1399987 - DNA, 25 bp, Homo sapien
ttcaagtaggacactggtcctttgt

SEQ ID NO: 1399988 - DNA, 25 bp, Homo sapien
caagtaggacactggtcctttgtac

SEQ ID NO: 1399989 - DNA, 25 bp, Homo sapien
tcaagtaggacactggtcctttgta

SEQ ID NO: 1399990 - DNA, 25 bp, Homo sapien
gggtcatatgtggagctcatcaagg

SEQ ID NO: 1399991 - DNA, 25 bp, Homo sapien
catcacactcagttgtggatcaact

SEQ ID NO: 1399992 - DNA, 25 bp, Homo sapien
acatggggtcatatgtggagctcat

SEQ ID NO: 1399993 - DNA, 25 bp, Homo sapien
atcacactcagttgtggatcaactg

SEQ ID NO: 1399994 - DNA, 25 bp, Homo sapien
ccttcatagaaaacggatgcccttt

SEQ ID NO: 1399995 - DNA, 25 bp, Homo sapien
taacttgcctttgatatagtgtccc

SEQ ID NO: 1399996 - DNA, 25 bp, Homo sapien
aaacggatgcccttttctactgtag

SEQ ID NO: 1399997 - DNA, 25 bp, Homo sapien
tatagtgtcccttcatagaaaacgg

SEQ ID NO: 1399998 - DNA, 25 bp, Homo sapien
agtagagacgaagccaagatactta

SEQ ID NO: 1399999 - DNA, 25 bp, Homo sapien
gtagagacgaagccaagatacttag

SEQ ID NO: 1400000 - DNA, 25 bp, Homo sapien
tagtagagacgaagccaagatactt

SEQ ID NO: 1400001 - DNA, 25 bp, Homo sapien
tagagacgaagccaagatacttaga

SEQ ID NO: 1400002 - DNA, 25 bp, Homo sapien
aaatgctgtcaaatgcagtcaaaac

SEQ ID NO: 1400003 - DNA, 25 bp, Homo sapien
aaattccacatcaaaatgctgtcaa

SEQ ID NO: 1400004 - DNA, 25 bp, Homo sapien
aattccacatcaaaatgctgtcaaa

SEQ ID NO: 1400005 - DNA, 25 bp, Homo sapien
aaaatccaaagtacttcaaaatgtg

SEQ ID NO: 1400006 - DNA, 25 bp, Homo sapien
agcgaccacacccggccacttgttt

SEQ ID NO: 1400007 - DNA, 25 bp, Homo sapien
gtgagcgaccacacccggccacttg

SEQ ID NO: 1400008 - DNA, 25 bp, Homo sapien
tgagcgaccacacccggccacttgt

SEQ ID NO: 1400009 - DNA, 25 bp, Homo sapien
gcgtgagcgaccacacccggccact

SEQ ID NO: 1400010 - DNA, 25 bp, Homo sapien
tgtacttcgctttaataccccgcaa

SEQ ID NO: 1400011 - DNA, 25 bp, Homo sapien
caatgcctgctactagtttggtgct

SEQ ID NO: 1400012 - DNA, 25 bp, Homo sapien
tgctaggctactctaacacacttgt

SEQ ID NO: 1400013 - DNA, 25 bp, Homo sapien
taccccgcaacgatttgaatgtgtc

SEQ ID NO: 1400014 - DNA, 25 bp, Homo sapien
ccaaggtggatatattgcttgagta

SEQ ID NO: 1400015 - DNA, 25 bp, Homo sapien
aggtggatatattgcttgagtacag

SEQ ID NO: 1400016 - DNA, 25 bp, Homo sapien
aaataaatttcttggggctggtcat

SEQ ID NO: 1400017 - DNA, 25 bp, Homo sapien
caaggtggatatattgcttgagtac

SEQ ID NO: 1400018 - DNA, 25 bp, Homo sapien
caaaaatatacaagttcccaatcaa

SEQ ID NO: 1400019 - DNA, 25 bp, Homo sapien
agcaattctgcgatggtctcccaag

SEQ ID NO: 1400020 - DNA, 25 bp, Homo sapien
gaccagctcatcctacaatccttaa

SEQ ID NO: 1400021 - DNA, 25 bp, Homo sapien
gactattgcttgtaaagatgtggca

SEQ ID NO: 1400022 - DNA, 25 bp, Homo sapien
gaactatatagtgggcagagaccct

SEQ ID NO: 1400023 - DNA, 25 bp, Homo sapien
gctgaatacatctgactgcactggt

SEQ ID NO: 1400024 - DNA, 25 bp, Homo sapien
tcttcaacattgtagaggctgaggc

SEQ ID NO: 1400025 - DNA, 25 bp, Homo sapien
tcagaggtatccagatctagacact

SEQ ID NO: 1400026 - DNA, 25 bp, Homo sapien
gccacagacgaaagagaaagtagtt

SEQ ID NO: 1400027 - DNA, 25 bp, Homo sapien
aacagtttcacttagagcttcagac

SEQ ID NO: 1400028 - DNA, 25 bp, Homo sapien
gcagcatgctattgattcccagtga

SEQ ID NO: 1400029 - DNA, 25 bp, Homo sapien
cgttccaagagtagaaatcccagct

SEQ ID NO: 1400030 - DNA, 25 bp, Homo sapien
gttcgggcaattatcctacctccgc

SEQ ID NO: 1400031 - DNA, 25 bp, Homo sapien
tgcctcccgggttcgggcaattatc

SEQ ID NO: 1400032 - DNA, 25 bp, Homo sapien
cagttgtgccatcttggcttattgc

SEQ ID NO: 1400033 - DNA, 25 bp, Homo sapien
gtgcagttgtgccatcttggcttat

SEQ ID NO: 1400034 - DNA, 25 bp, Homo sapien
cttctatatctctatctgggtggtc

SEQ ID NO: 1400035 - DNA, 25 bp, Homo sapien
tatatctctatctgggtggtcacct

SEQ ID NO: 1400036 - DNA, 25 bp, Homo sapien
tctctatctgggtggtcaccttaca

SEQ ID NO: 1400037 - DNA, 25 bp, Homo sapien
tctgggtggtcaccttacaattaaa

SEQ ID NO: 1400038 - DNA, 25 bp, Homo sapien
gaagcaactcctaatactgactgaa

SEQ ID NO: 1400039 - DNA, 25 bp, Homo sapien
gctttgggaactaaaatagctctta

SEQ ID NO: 1400040 - DNA, 25 bp, Homo sapien
tgtgcccaaccatgaacaagaaaat

SEQ ID NO: 1400041 - DNA, 25 bp, Homo sapien
tatccaaggcaacattagtaagacc

SEQ ID NO: 1400042 - DNA, 25 bp, Homo sapien
tgaacaaaacctaaatctattgaat

SEQ ID NO: 1400043 - DNA, 25 bp, Homo sapien
gagcaagtgaaagcctcccagtaag

SEQ ID NO: 1400044 - DNA, 25 bp, Homo sapien
gataaccttcctactctgaccctat

SEQ ID NO: 1400045 - DNA, 25 bp, Homo sapien
gcctcccagtaagttctaaattcat

SEQ ID NO: 1400046 - DNA, 25 bp, Homo sapien
tggtgaaaccccatctctacttaaa

SEQ ID NO: 1400047 - DNA, 25 bp, Homo sapien
gtggcacgcacctgtaatcccagct

SEQ ID NO: 1400048 - DNA, 25 bp, Homo sapien
aaaatacaaaaattagctggacgtg

SEQ ID NO: 1400049 - DNA, 25 bp, Homo sapien
tcaggaattcgagacaaatctggcc

SEQ ID NO: 1400050 - DNA, 25 bp, Homo sapien
aagcagatatctgcccagtcatgtt

SEQ ID NO: 1400051 - DNA, 25 bp, Homo sapien
cttgtttgcaacagccgaaggcgga

SEQ ID NO: 1400052 - DNA, 25 bp, Homo sapien
caatccagatatccaccaaccgatg

SEQ ID NO: 1400053 - DNA, 25 bp, Homo sapien
gcaaaacaatcgaaagcagggactc

SEQ ID NO: 1400054 - DNA, 25 bp, Homo sapien
actctgttgaccaggctagagcaca

SEQ ID NO: 1400055 - DNA, 25 bp, Homo sapien
gaccaggctagagcacagtggcaca

SEQ ID NO: 1400056 - DNA, 25 bp, Homo sapien
ctcactctgttgaccaggctagagc

SEQ ID NO: 1400057 - DNA, 25 bp, Homo sapien
tgaccaggctagagcacagtggcac

SEQ ID NO: 1400058 - DNA, 25 bp, Homo sapien
gcaggcaaggataagcatgagggat

SEQ ID NO: 1400059 - DNA, 25 bp, Homo sapien
caaagacgttaaggaggtgaggcaa

SEQ ID NO: 1400060 - DNA, 25 bp, Homo sapien
gaaaggaaggataagacttcattaa

SEQ ID NO: 1400061 - DNA, 25 bp, Homo sapien
gatgggaactgacaatacaatttta

SEQ ID NO: 1400062 - DNA, 25 bp, Homo sapien
ggcggtgtaactcccggctagctcg

SEQ ID NO: 1400063 - DNA, 25 bp, Homo sapien
ggctagctcgcctcctcaggcggcg

SEQ ID NO: 1400064 - DNA, 25 bp, Homo sapien
ctggcggtggcggtgtaactcccgg

SEQ ID NO: 1400065 - DNA, 25 bp, Homo sapien
tcgaaaaaggaagaggcgacggcac

SEQ ID NO: 1400066 - DNA, 25 bp, Homo sapien
agacactgcggtacagacgggggca

SEQ ID NO: 1400067 - DNA, 25 bp, Homo sapien
gcagacactgcggtacagacggggg

SEQ ID NO: 1400068 - DNA, 25 bp, Homo sapien
agcagacactgcggtacagacgggg

SEQ ID NO: 1400069 - DNA, 25 bp, Homo sapien
cagacactgcggtacagacgggggc

SEQ ID NO: 1400070 - DNA, 25 bp, Homo sapien
catcttctcggccatgccagtagaa

SEQ ID NO: 1400071 - DNA, 25 bp, Homo sapien
cacgacgcccattgggcgacctaag

SEQ ID NO: 1400072 - DNA, 25 bp, Homo sapien
tgaagaatgagtggccggagaagtg

SEQ ID NO: 1400073 - DNA, 25 bp, Homo sapien
tagaagactagatgccgggacttca

SEQ ID NO: 1400074 - DNA, 25 bp, Homo sapien
agagacgttttggtccccaggcagc

SEQ ID NO: 1400075 - DNA, 25 bp, Homo sapien
agccgccgtaccccagtctctccaa

SEQ ID NO: 1400076 - DNA, 25 bp, Homo sapien
cccaggcagccgccgtaccccagtc

SEQ ID NO: 1400077 - DNA, 25 bp, Homo sapien
ttagagacgttttggtccccaggca

SEQ ID NO: 1400078 - DNA, 25 bp, Homo sapien
catgaaggcaacagggaagcagttt

SEQ ID NO: 1400079 - DNA, 25 bp, Homo sapien
tcagcacgaacaaactgggtaggtt

SEQ ID NO: 1400080 - DNA, 25 bp, Homo sapien
ttacatccaacaaaacttcgcaggg

SEQ ID NO: 1400081 - DNA, 25 bp, Homo sapien
tcagggcaaaggctcagtagctctg

SEQ ID NO: 1400082 - DNA, 25 bp, Homo sapien
ggccttgggagtgggcatctgcgcc

SEQ ID NO: 1400083 - DNA, 25 bp, Homo sapien
ttcggcagtcaatggccttgggagt

SEQ ID NO: 1400084 - DNA, 25 bp, Homo sapien
aacattttcggcagtcaatggcctt

SEQ ID NO: 1400085 - DNA, 25 bp, Homo sapien
gagtgggcatctgcgcccgccggtg

SEQ ID NO: 1400086 - DNA, 25 bp, Homo sapien
agagcagccattgtcaggaataata

SEQ ID NO: 1400087 - DNA, 25 bp, Homo sapien
gaataatatctcacggtagattccc

SEQ ID NO: 1400088 - DNA, 25 bp, Homo sapien
atgtccacgtggtccttgcccagag

SEQ ID NO: 1400089 - DNA, 25 bp, Homo sapien
ctatgtccacgtggtccttgcccag

SEQ ID NO: 1400090 - DNA, 25 bp, Homo sapien
tagtggaggcagaagtgtatgagtg

SEQ ID NO: 1400091 - DNA, 25 bp, Homo sapien
gatcacccagatggtagcaccatac

SEQ ID NO: 1400092 - DNA, 25 bp, Homo sapien
agggatcacccagatggtagcacca

SEQ ID NO: 1400093 - DNA, 25 bp, Homo sapien
gggatcacccagatggtagcaccat

SEQ ID NO: 1400094 - DNA, 25 bp, Homo sapien
cagggatcacccagatggtagcacc

SEQ ID NO: 1400095 - DNA, 25 bp, Homo sapien
gcacttcattgagtccaacatggcg

SEQ ID NO: 1400096 - DNA, 25 bp, Homo sapien
cccacagccttgtgcacttcattga

SEQ ID NO: 1400097 - DNA, 25 bp, Homo sapien
aactaagggatgcaggtacagggcc

SEQ ID NO: 1400098 - DNA, 25 bp, Homo sapien
tggcgcagcactgactccaacagtg

SEQ ID NO: 1400099 - DNA, 25 bp, Homo sapien
actgagccctctgggtatgggaccc

SEQ ID NO: 1400100 - DNA, 25 bp, Homo sapien
atcactgagccctctgggtatggga

SEQ ID NO: 1400101 - DNA, 25 bp, Homo sapien
gagccctctgggtatgggacccacc

SEQ ID NO: 1400102 - DNA, 25 bp, Homo sapien
cactgagccctctgggtatgggacc

SEQ ID NO: 1400103 - DNA, 25 bp, Homo sapien
gtcagtacatcccacagcagccgta

SEQ ID NO: 1400104 - DNA, 25 bp, Homo sapien
agcacatagagaggtgggcagctat

SEQ ID NO: 1400105 - DNA, 25 bp, Homo sapien
gtcaggggtcagtacatcccacagc

SEQ ID NO: 1400106 - DNA, 25 bp, Homo sapien
tgtggaccctccagagcacatagag

SEQ ID NO: 1400107 - DNA, 25 bp, Homo sapien
gctggatcaggggttagccaaggag

SEQ ID NO: 1400108 - DNA, 25 bp, Homo sapien
gatcaggggttagccaaggagatgg

SEQ ID NO: 1400109 - DNA, 25 bp, Homo sapien
gaggctggatcaggggttagccaag

SEQ ID NO: 1400110 - DNA, 25 bp, Homo sapien
ggatcaggggttagccaaggagatg

SEQ ID NO: 1400111 - DNA, 25 bp, Homo sapien
ggacaaatggctgagagatgaggga

SEQ ID NO: 1400112 - DNA, 25 bp, Homo sapien
tggacaaatggctgagagatgaggg

SEQ ID NO: 1400113 - DNA, 25 bp, Homo sapien
ggcacttaggaaacaggggccacat

SEQ ID NO: 1400114 - DNA, 25 bp, Homo sapien
gcacttaggaaacaggggccacatg

SEQ ID NO: 1400115 - DNA, 25 bp, Homo sapien
tagaatactgggcaggcgtagccgt

SEQ ID NO: 1400116 - DNA, 25 bp, Homo sapien
ggcagttcaggcaacgccagcacct

SEQ ID NO: 1400117 - DNA, 25 bp, Homo sapien
ctgggagtgcgaaggcccatcacag

SEQ ID NO: 1400118 - DNA, 25 bp, Homo sapien
cagcaccaggcctggtagaatactg

SEQ ID NO: 1400119 - DNA, 25 bp, Homo sapien
gggcatgtacatccccagagccttg

SEQ ID NO: 1400120 - DNA, 25 bp, Homo sapien
ggcagtagagggcatgtacatcccc

SEQ ID NO: 1400121 - DNA, 25 bp, Homo sapien
gtagagggcatgtacatccccagag

SEQ ID NO: 1400122 - DNA, 25 bp, Homo sapien
cagggcaacattcccgttcctcatg

SEQ ID NO: 1400123 - DNA, 25 bp, Homo sapien
agagcaaggcagagccttcggtcac

SEQ ID NO: 1400124 - DNA, 25 bp, Homo sapien
agccttcggtcactgagcacagggc

SEQ ID NO: 1400125 - DNA, 25 bp, Homo sapien
gagcaaggcagagccttcggtcact

SEQ ID NO: 1400126 - DNA, 25 bp, Homo sapien
cagcaggggtcagcttttggacctt

SEQ ID NO: 1400127 - DNA, 25 bp, Homo sapien
ggggatagcagcaggggtcagcttt

SEQ ID NO: 1400128 - DNA, 25 bp, Homo sapien
gggtcagcttttggaccttcacctc

SEQ ID NO: 1400129 - DNA, 25 bp, Homo sapien
tggaccttcacctccctattcccac

SEQ ID NO: 1400130 - DNA, 25 bp, Homo sapien
tcatacaccagcgaatcacaggcac

SEQ ID NO: 1400131 - DNA, 25 bp, Homo sapien
gccgggaatcaagggtctggacact

SEQ ID NO: 1400132 - DNA, 25 bp, Homo sapien
caggttgtgttgaggttagagtcat

SEQ ID NO: 1400133 - DNA, 25 bp, Homo sapien
gcgaatcacaggcacggcacaggga

SEQ ID NO: 1400134 - DNA, 25 bp, Homo sapien
ggagagtcgggaagtaggtgctgtc

SEQ ID NO: 1400135 - DNA, 25 bp, Homo sapien
gctatgtgtgttcaagcacatctgt

SEQ ID NO: 1400136 - DNA, 25 bp, Homo sapien
tgtctggccgccagcactctggagc

SEQ ID NO: 1400137 - DNA, 25 bp, Homo sapien
cctgccttggacagggtgagtgtgt

SEQ ID NO: 1400138 - DNA, 25 bp, Homo sapien
gatccaggggtgtcactgaggcgct

SEQ ID NO: 1400139 - DNA, 25 bp, Homo sapien
agggaaggtgactggaaggatccag

SEQ ID NO: 1400140 - DNA, 25 bp, Homo sapien
gggaaggtgactggaaggatccagg

SEQ ID NO: 1400141 - DNA, 25 bp, Homo sapien
gactggaaggatccaggggtgtcac

SEQ ID NO: 1400142 - DNA, 25 bp, Homo sapien
aggaacggcgaagactcaggttgct

SEQ ID NO: 1400143 - DNA, 25 bp, Homo sapien
gaggaacggcgaagactcaggttgc

SEQ ID NO: 1400144 - DNA, 25 bp, Homo sapien
ctgaggaacggcgaagactcaggtt

SEQ ID NO: 1400145 - DNA, 25 bp, Homo sapien
gaacggcgaagactcaggttgctga

SEQ ID NO: 1400146 - DNA, 25 bp, Homo sapien
aggcagtggatccagggcgctcccg

SEQ ID NO: 1400147 - DNA, 25 bp, Homo sapien
ggaggcagtggatccagggcgctcc

SEQ ID NO: 1400148 - DNA, 25 bp, Homo sapien
gcagtggatccagggcgctcccggg

SEQ ID NO: 1400149 - DNA, 25 bp, Homo sapien
ctcggaggcagtggatccagggcgc

SEQ ID NO: 1400150 - DNA, 25 bp, Homo sapien
ctgggggtggcaggtcaggaggcag

SEQ ID NO: 1400151 - DNA, 25 bp, Homo sapien
gcacccagccctcgtcggggggtgc

SEQ ID NO: 1400152 - DNA, 25 bp, Homo sapien
cagccctcgtcggggggtgcctgcc

SEQ ID NO: 1400153 - DNA, 25 bp, Homo sapien
gaggcgggcacccagccctcgtcgg

SEQ ID NO: 1400154 - DNA, 25 bp, Homo sapien
ggagtggcgggaaggagtgagcagc

SEQ ID NO: 1400155 - DNA, 25 bp, Homo sapien
cagggcacaggtgatccccggggtt

SEQ ID NO: 1400156 - DNA, 25 bp, Homo sapien
cttccatcgtgccagggcacaggtg

SEQ ID NO: 1400157 - DNA, 25 bp, Homo sapien
aggtctgagagacttccatcgtgcc

SEQ ID NO: 1400158 - DNA, 25 bp, Homo sapien
ccagggcacaggtgatccccggggt

SEQ ID NO: 1400159 - DNA, 25 bp, Homo sapien
caccaggcgtccagggggtgaggct

SEQ ID NO: 1400160 - DNA, 25 bp, Homo sapien
acagtgggctgtgcccctcgggcac

SEQ ID NO: 1400161 - DNA, 25 bp, Homo sapien
tgcccaggctaccactcttcaccag

SEQ ID NO: 1400162 - DNA, 25 bp, Homo sapien
ggtctctcagacttcgcccagccca

SEQ ID NO: 1400163 - DNA, 25 bp, Homo sapien
cgagtaggggaagggcgctccaaat

SEQ ID NO: 1400164 - DNA, 25 bp, Homo sapien
gcgagtaggggaagggcgctccaaa

SEQ ID NO: 1400165 - DNA, 25 bp, Homo sapien
agtaggggaagggcgctccaaatag

SEQ ID NO: 1400166 - DNA, 25 bp, Homo sapien
ggcgagtaggggaagggcgctccaa

SEQ ID NO: 1400167 - DNA, 25 bp, Homo sapien
cctgcctcttgatgtgctgacacct

SEQ ID NO: 1400168 - DNA, 25 bp, Homo sapien
tgcctcttgatgtgctgacacctgc

SEQ ID NO: 1400169 - DNA, 25 bp, Homo sapien
ctgcctcttgatgtgctgacacctg

SEQ ID NO: 1400170 - DNA, 25 bp, Homo sapien
ttgccgttctctcaagggctggcgg

SEQ ID NO: 1400171 - DNA, 25 bp, Homo sapien
gctgttgccgttctctcaagggctg

SEQ ID NO: 1400172 - DNA, 25 bp, Homo sapien
ccgttctctcaagggctggcggaac

SEQ ID NO: 1400173 - DNA, 25 bp, Homo sapien
ctgctgttgccgttctctcaagggc

SEQ ID NO: 1400174 - DNA, 25 bp, Homo sapien
cagcccccaggacaacattccggag

SEQ ID NO: 1400175 - DNA, 25 bp, Homo sapien
caggacaacattccggagcttggcc

SEQ ID NO: 1400176 - DNA, 25 bp, Homo sapien
gcccccaggacaacattccggagct

SEQ ID NO: 1400177 - DNA, 25 bp, Homo sapien
ccccaggacaacattccggagcttg

SEQ ID NO: 1400178 - DNA, 25 bp, Homo sapien
tgccagacggccacttgctttccaa

SEQ ID NO: 1400179 - DNA, 25 bp, Homo sapien
tggtgtgccagacggccacttgctt

SEQ ID NO: 1400180 - DNA, 25 bp, Homo sapien
ctggtgtgccagacggccacttgct

SEQ ID NO: 1400181 - DNA, 25 bp, Homo sapien
gtgtgccagacggccacttgctttc

SEQ ID NO: 1400182 - DNA, 25 bp, Homo sapien
cagtttagtatcatggctaagggcc

SEQ ID NO: 1400183 - DNA, 25 bp, Homo sapien
gctaagggcctgaattcgggagata

SEQ ID NO: 1400184 - DNA, 25 bp, Homo sapien
ccaggaacaagagcccagaagagac

SEQ ID NO: 1400185 - DNA, 25 bp, Homo sapien
tgtctaggactgtccggccaatggc

SEQ ID NO: 1400186 - DNA, 25 bp, Homo sapien
ctcgtctgagaaactgtaggtgcta

SEQ ID NO: 1400187 - DNA, 25 bp, Homo sapien
taggcaaacagtaccagcccaatct

SEQ ID NO: 1400188 - DNA, 25 bp, Homo sapien
gtgggaatcaaagcagcctcgtctg

SEQ ID NO: 1400189 - DNA, 25 bp, Homo sapien
gatgacagtggttccaggacctagg

SEQ ID NO: 1400190 - DNA, 25 bp, Homo sapien
ccataggtgatggtgttgggcacaa

SEQ ID NO: 1400191 - DNA, 25 bp, Homo sapien
tgcctgacgcatctccagcatgacc

SEQ ID NO: 1400192 - DNA, 25 bp, Homo sapien
ggctgcccatagtgtgagcagagct

SEQ ID NO: 1400193 - DNA, 25 bp, Homo sapien
gagctgcatcagtacccggtaacac

SEQ ID NO: 1400194 - DNA, 25 bp, Homo sapien
tccatctggcgcagcacatggtagg

SEQ ID NO: 1400195 - DNA, 25 bp, Homo sapien
aggaaccacagcccatagcagtgcc

SEQ ID NO: 1400196 - DNA, 25 bp, Homo sapien
gtgccgaccgcacataggcaggcag

SEQ ID NO: 1400197 - DNA, 25 bp, Homo sapien
ttctgtgccatccgctgtgcaactt

SEQ ID NO: 1400198 - DNA, 25 bp, Homo sapien
tggtacggcgaggagcaggactgct

SEQ ID NO: 1400199 - DNA, 25 bp, Homo sapien
gtttggtacggcgaggagcaggact

SEQ ID NO: 1400200 - DNA, 25 bp, Homo sapien
ccgtagctctgggaatccatcatag

SEQ ID NO: 1400201 - DNA, 25 bp, Homo sapien
gactcaaacaactcagcccgtagct

SEQ ID NO: 1400202 - DNA, 25 bp, Homo sapien
tgtgataaagacagtgagctcactt

SEQ ID NO: 1400203 - DNA, 25 bp, Homo sapien
ctgccctctggtaaggcaggctcct

SEQ ID NO: 1400204 - DNA, 25 bp, Homo sapien
gctcctctagctccactaagggtgt

SEQ ID NO: 1400205 - DNA, 25 bp, Homo sapien
taagggtgtcggctcaggcttctcc

SEQ ID NO: 1400206 - DNA, 25 bp, Homo sapien
cacaagagtcaaagaattcaagggc

SEQ ID NO: 1400207 - DNA, 25 bp, Homo sapien
aagagcactcctcaatgaactgtga

SEQ ID NO: 1400208 - DNA, 25 bp, Homo sapien
ggcgagcagagccaaaagagcactc

SEQ ID NO: 1400209 - DNA, 25 bp, Homo sapien
taaagtttgtggctggagcgttccc

SEQ ID NO: 1400210 - DNA, 25 bp, Homo sapien
gaaggctccttggacttcgcgctcc

SEQ ID NO: 1400211 - DNA, 25 bp, Homo sapien
aggaagacccggtagcccttgagca

SEQ ID NO: 1400212 - DNA, 25 bp, Homo sapien
aaaggttgtcaacatcacgagctcc

SEQ ID NO: 1400213 - DNA, 25 bp, Homo sapien
tcgtagtctgtcagtaggaactcca

SEQ ID NO: 1400214 - DNA, 25 bp, Homo sapien
ggttcaagcttgatatttcccacat

SEQ ID NO: 1400215 - DNA, 25 bp, Homo sapien
gcttcagttggaattggaatctccc

SEQ ID NO: 1400216 - DNA, 25 bp, Homo sapien
acatgttcaggaatactgtctgccc

SEQ ID NO: 1400217 - DNA, 25 bp, Homo sapien
tggcagaccttgcaccagtagcaac

SEQ ID NO: 1400218 - DNA, 25 bp, Homo sapien
tacaggtttgtcagtgtggccagca

SEQ ID NO: 1400219 - DNA, 25 bp, Homo sapien
gaaccttgtagggtctgcggggcag

SEQ ID NO: 1400220 - DNA, 25 bp, Homo sapien
agtgtggccagcagaaccttgtagg

SEQ ID NO: 1400221 - DNA, 25 bp, Homo sapien
cagctgctggtacaggtttgtcagt

SEQ ID NO: 1400222 - DNA, 25 bp, Homo sapien
ggatacccacaatgaagggcactgg

SEQ ID NO: 1400223 - DNA, 25 bp, Homo sapien
tcagcaggcgggtcatgcagatcaa

SEQ ID NO: 1400224 - DNA, 25 bp, Homo sapien
tggtatcaaggtctacacagatgac

SEQ ID NO: 1400225 - DNA, 25 bp, Homo sapien
caaagtagctggagtggatacccac

SEQ ID NO: 1400226 - DNA, 25 bp, Homo sapien
ctgaagcaccaggcagtgagaacca

SEQ ID NO: 1400227 - DNA, 25 bp, Homo sapien
tctggccgcagcgagtggactagca

SEQ ID NO: 1400228 - DNA, 25 bp, Homo sapien
gcttgtgctctgtgagcacagccag

SEQ ID NO: 1400229 - DNA, 25 bp, Homo sapien
agggcctcacagacgctggtgagca

SEQ ID NO: 1400230 - DNA, 25 bp, Homo sapien
cctcacagacgctggtgagcaggtc

SEQ ID NO: 1400231 - DNA, 25 bp, Homo sapien
ccagcacctaccatgtccttggtca

SEQ ID NO: 1400232 - DNA, 25 bp, Homo sapien
ggacccagcctgcataaacctcaac

SEQ ID NO: 1400233 - DNA, 25 bp, Homo sapien
tgcaggcaatgccgaggtggggaaa

SEQ ID NO: 1400234 - DNA, 25 bp, Homo sapien
caggcaatgccgaggtggggaaagg

SEQ ID NO: 1400235 - DNA, 25 bp, Homo sapien
ggggtgaggatacaggctgacagag

SEQ ID NO: 1400236 - DNA, 25 bp, Homo sapien
gggtgaggatacaggctgacagagg

SEQ ID NO: 1400237 - DNA, 25 bp, Homo sapien
agggaacgttgtgaatgaagtggga

SEQ ID NO: 1400238 - DNA, 25 bp, Homo sapien
ctgcactaggatgcggggtctctgt

SEQ ID NO: 1400239 - DNA, 25 bp, Homo sapien
gttgtgaatgaagtgggagatgtgc

SEQ ID NO: 1400240 - DNA, 25 bp, Homo sapien
gaacgttgtgaatgaagtgggagat

SEQ ID NO: 1400241 - DNA, 25 bp, Homo sapien
tggcccttgggaacgcctcgtagaa

SEQ ID NO: 1400242 - DNA, 25 bp, Homo sapien
cgggacagcacagcgatggcacgcc

SEQ ID NO: 1400243 - DNA, 25 bp, Homo sapien
ggcctgagacggagtagcggtaaag

SEQ ID NO: 1400244 - DNA, 25 bp, Homo sapien
tgtcgctctgatagcctggcccttg

SEQ ID NO: 1400245 - DNA, 25 bp, Homo sapien
gcaggccagcactcgatagtggccc

SEQ ID NO: 1400246 - DNA, 25 bp, Homo sapien
tcattgtcctcctccgggtagcggc

SEQ ID NO: 1400247 - DNA, 25 bp, Homo sapien
gcaggcagaagacgggcactgactc

SEQ ID NO: 1400248 - DNA, 25 bp, Homo sapien
acccgtgagcacaaaggtggagaag

SEQ ID NO: 1400249 - DNA, 25 bp, Homo sapien
gggacacttaaggtgcctgccaaga

SEQ ID NO: 1400250 - DNA, 25 bp, Homo sapien
aggcccgagtagcaaagagaaagta

SEQ ID NO: 1400251 - DNA, 25 bp, Homo sapien
ggatcccagagaaggcccgagtagc

SEQ ID NO: 1400252 - DNA, 25 bp, Homo sapien
caaagggatgtagggtcacaggatt

SEQ ID NO: 1400253 - DNA, 25 bp, Homo sapien
ttcgccaggcccaccttatagcaca

SEQ ID NO: 1400254 - DNA, 25 bp, Homo sapien
cccaccttatagcacaggtacactg

SEQ ID NO: 1400255 - DNA, 25 bp, Homo sapien
caggcccaccttatagcacaggtac

SEQ ID NO: 1400256 - DNA, 25 bp, Homo sapien
accagcgtgttggccttcgccaggc

SEQ ID NO: 1400257 - DNA, 25 bp, Homo sapien
gaggagtgccctcgcccttactggg

SEQ ID NO: 1400258 - DNA, 25 bp, Homo sapien
ccggcagtaagtatgaggagtgccc

SEQ ID NO: 1400259 - DNA, 25 bp, Homo sapien
tctgctgcccgccggtaagtgaggt

SEQ ID NO: 1400260 - DNA, 25 bp, Homo sapien
gctgtagggtgtcgtgtcaagcact

SEQ ID NO: 1400261 - DNA, 25 bp, Homo sapien
ttgggacgttccttcccctcataca

SEQ ID NO: 1400262 - DNA, 25 bp, Homo sapien
gacgttccttcccctcatacaacac

SEQ ID NO: 1400263 - DNA, 25 bp, Homo sapien
tgggacgttccttcccctcatacaa

SEQ ID NO: 1400264 - DNA, 25 bp, Homo sapien
ggacgttccttcccctcatacaaca

SEQ ID NO: 1400265 - DNA, 25 bp, Homo sapien
ttgtcacggcccctgcggtagcaga

SEQ ID NO: 1400266 - DNA, 25 bp, Homo sapien
cagatgacgggttgagttccaccca

SEQ ID NO: 1400267 - DNA, 25 bp, Homo sapien
tcgcccagtgccctagcgatgactg

SEQ ID NO: 1400268 - DNA, 25 bp, Homo sapien
agtgccctagcgatgactgccacat

SEQ ID NO: 1400269 - DNA, 25 bp, Homo sapien
cagctaccacgaagtaatccaccag

SEQ ID NO: 1400270 - DNA, 25 bp, Homo sapien
ttcctcagggatgggtgctccgttc

SEQ ID NO: 1400271 - DNA, 25 bp, Homo sapien
tcaggaacccacgtttcctcaggga

SEQ ID NO: 1400272 - DNA, 25 bp, Homo sapien
tgcaagcccagctaccacgaagtaa

SEQ ID NO: 1400273 - DNA, 25 bp, Homo sapien
cagttataacatcacagagatcaca

SEQ ID NO: 1400274 - DNA, 25 bp, Homo sapien
catcacagagatcacaatctttttt

SEQ ID NO: 1400275 - DNA, 25 bp, Homo sapien
ttgtaatagccttccatgacatcat

SEQ ID NO: 1400276 - DNA, 25 bp, Homo sapien
ttttgtaatagccttccatgacatc

SEQ ID NO: 1400277 - DNA, 25 bp, Homo sapien
cagtggaaggagatccgggcggtcc

SEQ ID NO: 1400278 - DNA, 25 bp, Homo sapien
gctacccggccccagacatggcgca

SEQ ID NO: 1400279 - DNA, 25 bp, Homo sapien
agacatggcgcacccgacttgggcg

SEQ ID NO: 1400280 - DNA, 25 bp, Homo sapien
gctcggagggcgagctggcgggccg

SEQ ID NO: 1400281 - DNA, 25 bp, Homo sapien
cagccatgccccaaataactaacca

SEQ ID NO: 1400282 - DNA, 25 bp, Homo sapien
tccacaaagcacagtggtgctaaga

SEQ ID NO: 1400283 - DNA, 25 bp, Homo sapien
agaagatgcaaaaagcctaatagat

SEQ ID NO: 1400284 - DNA, 25 bp, Homo sapien
catggccctataactccctagatcc

SEQ ID NO: 1400285 - DNA, 25 bp, Homo sapien
gacagacggttcaaagttacaagtg

SEQ ID NO: 1400286 - DNA, 25 bp, Homo sapien
ttcattcatgctagaaagaggatct

SEQ ID NO: 1400287 - DNA, 25 bp, Homo sapien
ggcccatcccttgcgcagaattcag

SEQ ID NO: 1400288 - DNA, 25 bp, Homo sapien
aataaaaaatagtatccactctggc

SEQ ID NO: 1400289 - DNA, 25 bp, Homo sapien
tcattggagccggtcactgcggaat

SEQ ID NO: 1400290 - DNA, 25 bp, Homo sapien
ttggagccggtcactgcggaatgac

SEQ ID NO: 1400291 - DNA, 25 bp, Homo sapien
attggagccggtcactgcggaatga

SEQ ID NO: 1400292 - DNA, 25 bp, Homo sapien
cattggagccggtcactgcggaatg

SEQ ID NO: 1400293 - DNA, 25 bp, Homo sapien
aggggtcactcagcatgtttagccc

SEQ ID NO: 1400294 - DNA, 25 bp, Homo sapien
tagcccaagccctagctccaatcca

SEQ ID NO: 1400295 - DNA, 25 bp, Homo sapien
aatccagctgctgacacctcaaagc

SEQ ID NO: 1400296 - DNA, 25 bp, Homo sapien
ggggtcactcagcatgtttagccct

SEQ ID NO: 1400297 - DNA, 25 bp, Homo sapien
agccagggggatccagcaccaggct

SEQ ID NO: 1400298 - DNA, 25 bp, Homo sapien
gaggatgatgttaggccctgagcca

SEQ ID NO: 1400299 - DNA, 25 bp, Homo sapien
ccatggcgggaacagtgggtcaagt

SEQ ID NO: 1400300 - DNA, 25 bp, Homo sapien
ggatcctgggggccacccattggcc

SEQ ID NO: 1400301 - DNA, 25 bp, Homo sapien
agagaacgggtcaaggcagaagtca

SEQ ID NO: 1400302 - DNA, 25 bp, Homo sapien
ggaagagaacgggtcaaggcagaag

SEQ ID NO: 1400303 - DNA, 25 bp, Homo sapien
agaacgggtcaaggcagaagtcatc

SEQ ID NO: 1400304 - DNA, 25 bp, Homo sapien
tgccaggaagagaacgggtcaaggc

SEQ ID NO: 1400305 - DNA, 25 bp, Homo sapien
tagggtcaaacgcaggaagagagga

SEQ ID NO: 1400306 - DNA, 25 bp, Homo sapien
ggcaggagtagggtcaaacgcagga

SEQ ID NO: 1400307 - DNA, 25 bp, Homo sapien
gagtagggtcaaacgcaggaagaga

SEQ ID NO: 1400308 - DNA, 25 bp, Homo sapien
gtcaaacgcaggaagagaggagccc

SEQ ID NO: 1400309 - DNA, 25 bp, Homo sapien
cccataatgagactgcctgcctggg

SEQ ID NO: 1400310 - DNA, 25 bp, Homo sapien
cccaggttgaagtcactcattggcc

SEQ ID NO: 1400311 - DNA, 25 bp, Homo sapien
gcccaggtgggtacggtgtcccata

SEQ ID NO: 1400312 - DNA, 25 bp, Homo sapien
cattggccggtggtaagactgttgc

SEQ ID NO: 1400313 - DNA, 25 bp, Homo sapien
gactgcactgaacaagactgagagg

SEQ ID NO: 1400314 - DNA, 25 bp, Homo sapien
tgaacaagactgagagggcagccct

SEQ ID NO: 1400315 - DNA, 25 bp, Homo sapien
acaagactgagagggcagccctggc

SEQ ID NO: 1400316 - DNA, 25 bp, Homo sapien
cactgaacaagactgagagggcagc

SEQ ID NO: 1400317 - DNA, 25 bp, Homo sapien
tcagtggacagtttactggtatcca

SEQ ID NO: 1400318 - DNA, 25 bp, Homo sapien
tgggggtaaccgctggtcagtggac

SEQ ID NO: 1400319 - DNA, 25 bp, Homo sapien
ggagctgtatgggtatgggggtaac

SEQ ID NO: 1400320 - DNA, 25 bp, Homo sapien
gtggacagtttactggtatccaggg

SEQ ID NO: 1400321 - DNA, 25 bp, Homo sapien
ggaagacaaggtgggtgacattgtt

SEQ ID NO: 1400322 - DNA, 25 bp, Homo sapien
ttggcgaaaactgtttgggcagctg

SEQ ID NO: 1400323 - DNA, 25 bp, Homo sapien
gtgggtgacattgttggcgaaaact

SEQ ID NO: 1400324 - DNA, 25 bp, Homo sapien
cattgttggcgaaaactgtttgggc

SEQ ID NO: 1400325 - DNA, 25 bp, Homo sapien
ctgggcccgcgagcaaactcagggg

SEQ ID NO: 1400326 - DNA, 25 bp, Homo sapien
tgggcccgcgagcaaactcaggggg

SEQ ID NO: 1400327 - DNA, 25 bp, Homo sapien
aggagagagccggagcactgagtga

SEQ ID NO: 1400328 - DNA, 25 bp, Homo sapien
gggcgcccaaaacaggagatgaagt

SEQ ID NO: 1400329 - DNA, 25 bp, Homo sapien
tgggcagtacatggcgggccaagga

SEQ ID NO: 1400330 - DNA, 25 bp, Homo sapien
cccaggggtagaagcagggtaagag

SEQ ID NO: 1400331 - DNA, 25 bp, Homo sapien
tgcagggatgggtggctgagaggtg

SEQ ID NO: 1400332 - DNA, 25 bp, Homo sapien
cttagggaggactgcagggatgggt

SEQ ID NO: 1400333 - DNA, 25 bp, Homo sapien
gattgcttagggaggactgcaggga

SEQ ID NO: 1400334 - DNA, 25 bp, Homo sapien
ctggaggttgggattgcttagggag

SEQ ID NO: 1400335 - DNA, 25 bp, Homo sapien
gatgccaacattactgatgggaact

SEQ ID NO: 1400336 - DNA, 25 bp, Homo sapien
cccagaatgggtggcagtgaccaga

SEQ ID NO: 1400337 - DNA, 25 bp, Homo sapien
tatgaaagcggcaacacaacgtcct

SEQ ID NO: 1400338 - DNA, 25 bp, Homo sapien
gcaggcacagacaaaaaaccagaga

SEQ ID NO: 1400339 - DNA, 25 bp, Homo sapien
tggctgagaactgccgtgagggaat

SEQ ID NO: 1400340 - DNA, 25 bp, Homo sapien
ggctgagaactgccgtgagggaatc

SEQ ID NO: 1400341 - DNA, 25 bp, Homo sapien
caggatctcaggtgctcaaacctac

SEQ ID NO: 1400342 - DNA, 25 bp, Homo sapien
tccagtcaggcagcacccagtgggc

SEQ ID NO: 1400343 - DNA, 25 bp, Homo sapien
gacaggcggtgtgggtgatcacagc

SEQ ID NO: 1400344 - DNA, 25 bp, Homo sapien
tgtgggtgatcacagcaggatctca

SEQ ID NO: 1400345 - DNA, 25 bp, Homo sapien
agccccccgtgttcatggcaggtgg

SEQ ID NO: 1400346 - DNA, 25 bp, Homo sapien
ccactcaggctagggtaggctgtct

SEQ ID NO: 1400347 - DNA, 25 bp, Homo sapien
tggtgcatcatagcctgggcccagg

SEQ ID NO: 1400348 - DNA, 25 bp, Homo sapien
tgttgcccccactcaggctagggta

SEQ ID NO: 1400349 - DNA, 25 bp, Homo sapien
ggacttcacaggaccgaggtcggga

SEQ ID NO: 1400350 - DNA, 25 bp, Homo sapien
gacttcacaggaccgaggtcgggaa

SEQ ID NO: 1400351 - DNA, 25 bp, Homo sapien
aggagagaagggagaatatggaaaa

SEQ ID NO: 1400352 - DNA, 25 bp, Homo sapien
ggagagaagggagaatatggaaaat

SEQ ID NO: 1400353 - DNA, 25 bp, Homo sapien
gaggagagaagggagaatatggaaa

SEQ ID NO: 1400354 - DNA, 25 bp, Homo sapien
ctgaggagagaagggagaatatgga

SEQ ID NO: 1400355 - DNA, 25 bp, Homo sapien
agcaaatgcttgtcatctagcaagt

SEQ ID NO: 1400356 - DNA, 25 bp, Homo sapien
gcttgtcatctagcaagttctcctc

SEQ ID NO: 1400357 - DNA, 25 bp, Homo sapien
aatgcttgtcatctagcaagttctc

SEQ ID NO: 1400358 - DNA, 25 bp, Homo sapien
caaatgcttgtcatctagcaagttc

SEQ ID NO: 1400359 - DNA, 25 bp, Homo sapien
gttggagaaagagccagtaaggcag

SEQ ID NO: 1400360 - DNA, 25 bp, Homo sapien
ctccctgaacctgcacacaatccca

SEQ ID NO: 1400361 - DNA, 25 bp, Homo sapien
gagaaagagccagtaaggcaggaca

SEQ ID NO: 1400362 - DNA, 25 bp, Homo sapien
tttggcattcagtacccacagcagt

SEQ ID NO: 1400363 - DNA, 25 bp, Homo sapien
tggggtccatttcaccatccagaat

SEQ ID NO: 1400364 - DNA, 25 bp, Homo sapien
ggggtccatttcaccatccagaata

SEQ ID NO: 1400365 - DNA, 25 bp, Homo sapien
ttggggtccatttcaccatccagaa

SEQ ID NO: 1400366 - DNA, 25 bp, Homo sapien
ctgcaagggatacagtggcattggc

SEQ ID NO: 1400367 - DNA, 25 bp, Homo sapien
tacagtggcattggctgcagtgctc

SEQ ID NO: 1400368 - DNA, 25 bp, Homo sapien
tgctttaaatagctccatggaggcc

SEQ ID NO: 1400369 - DNA, 25 bp, Homo sapien
tgctcacttgcctacctgctttaaa

SEQ ID NO: 1400370 - DNA, 25 bp, Homo sapien
catcacacttgtatgaagggcagag

SEQ ID NO: 1400371 - DNA, 25 bp, Homo sapien
atcacacttgtatgaagggcagagt

SEQ ID NO: 1400372 - DNA, 25 bp, Homo sapien
gacagtcttcctggtccctaagccc

SEQ ID NO: 1400373 - DNA, 25 bp, Homo sapien
agcagggccccagaaactacagata

SEQ ID NO: 1400374 - DNA, 25 bp, Homo sapien
gatctggcctaaagaaggcaaaagc

SEQ ID NO: 1400375 - DNA, 25 bp, Homo sapien
caagggaaaacactagctggtctgg

SEQ ID NO: 1400376 - DNA, 25 bp, Homo sapien
tggtagtcgaaacaactgccccttc

SEQ ID NO: 1400377 - DNA, 25 bp, Homo sapien
tgttaagtgcagatggtagtcgaaa

SEQ ID NO: 1400378 - DNA, 25 bp, Homo sapien
tctctgcagggaaattgccccaggc

SEQ ID NO: 1400379 - DNA, 25 bp, Homo sapien
cagatggtagtcgaaacaactgccc

SEQ ID NO: 1400380 - DNA, 25 bp, Homo sapien
tagtgtcaacatggccaaggctgga

SEQ ID NO: 1400381 - DNA, 25 bp, Homo sapien
cacgtcagagagtaggcaggagctt

SEQ ID NO: 1400382 - DNA, 25 bp, Homo sapien
tcagccctggcgttataggaagagg

SEQ ID NO: 1400383 - DNA, 25 bp, Homo sapien
gctggactgggaggcttgaccacta

SEQ ID NO: 1400384 - DNA, 25 bp, Homo sapien
cagctagactctgggggaggagata

SEQ ID NO: 1400385 - DNA, 25 bp, Homo sapien
cttcgccagctagactctgggggag

SEQ ID NO: 1400386 - DNA, 25 bp, Homo sapien
gaggagataagtaggcaggactata

SEQ ID NO: 1400387 - DNA, 25 bp, Homo sapien
ataagtaggcaggactatagggaga

SEQ ID NO: 1400388 - DNA, 25 bp, Homo sapien
tgtgaacagcaccagttaaggaaaa

SEQ ID NO: 1400389 - DNA, 25 bp, Homo sapien
cagcaccagttaaggaaaaaagtag

SEQ ID NO: 1400390 - DNA, 25 bp, Homo sapien
atgtgaacagcaccagttaaggaaa

SEQ ID NO: 1400391 - DNA, 25 bp, Homo sapien
tgaacagcaccagttaaggaaaaaa

SEQ ID NO: 1400392 - DNA, 25 bp, Homo sapien
agacactcccaagtcccctgtgaag

SEQ ID NO: 1400393 - DNA, 25 bp, Homo sapien
acactcccaagtcccctgtgaagga

SEQ ID NO: 1400394 - DNA, 25 bp, Homo sapien
tcagacactcccaagtcccctgtga

SEQ ID NO: 1400395 - DNA, 25 bp, Homo sapien
ctttcagacactcccaagtcccctg

SEQ ID NO: 1400396 - DNA, 25 bp, Homo sapien
tgtggcgggtgtatcggcgaagtgg

SEQ ID NO: 1400397 - DNA, 25 bp, Homo sapien
gcccatggtgccgagtgctccgaga

SEQ ID NO: 1400398 - DNA, 25 bp, Homo sapien
gggacaccattcttcgaggatctcg

SEQ ID NO: 1400399 - DNA, 25 bp, Homo sapien
cgagtgctccgagatgaatccaaag

SEQ ID NO: 1400400 - DNA, 25 bp, Homo sapien
gcagaggaagcagcctaagaaactc

SEQ ID NO: 1400401 - DNA, 25 bp, Homo sapien
tcctccctggctggggtctactcac

SEQ ID NO: 1400402 - DNA, 25 bp, Homo sapien
gaagcagcctaagaaactccactcc

SEQ ID NO: 1400403 - DNA, 25 bp, Homo sapien
ctgccaaaaaggacagaagtcagca

SEQ ID NO: 1400404 - DNA, 25 bp, Homo sapien
tgtatgccagtcgcagtttttgggc

SEQ ID NO: 1400405 - DNA, 25 bp, Homo sapien
gacccaccataatgagagctccttg

SEQ ID NO: 1400406 - DNA, 25 bp, Homo sapien
gttaacattgggcagagacccacca

SEQ ID NO: 1400407 - DNA, 25 bp, Homo sapien
caggccagagccaatctggttaaca

SEQ ID NO: 1400408 - DNA, 25 bp, Homo sapien
ttcattcacgtcaggaaaccacaag

SEQ ID NO: 1400409 - DNA, 25 bp, Homo sapien
gcatgcttcagtagcgtcctcgagg

SEQ ID NO: 1400410 - DNA, 25 bp, Homo sapien
gaggagccaggttacagacaagcag

SEQ ID NO: 1400411 - DNA, 25 bp, Homo sapien
ccgtcagggatgcacaaggaccact

SEQ ID NO: 1400412 - DNA, 25 bp, Homo sapien
ccgggtggagccgatgtccatcatc

SEQ ID NO: 1400413 - DNA, 25 bp, Homo sapien
ggtggagccgatgtccatcatcacc

SEQ ID NO: 1400414 - DNA, 25 bp, Homo sapien
tggagccgatgtccatcatcacctc

SEQ ID NO: 1400415 - DNA, 25 bp, Homo sapien
cgggtggagccgatgtccatcatca

SEQ ID NO: 1400416 - DNA, 25 bp, Homo sapien
tgacgctgcttctgcagcgcaatct

SEQ ID NO: 1400417 - DNA, 25 bp, Homo sapien
taaatttgcgcggattggaagccga

SEQ ID NO: 1400418 - DNA, 25 bp, Homo sapien
aagccgaggccgtggccgaaccagg

SEQ ID NO: 1400419 - DNA, 25 bp, Homo sapien
tctgcagcgcaatcttctcactaaa

SEQ ID NO: 1400420 - DNA, 25 bp, Homo sapien
ctcccagtaccagccgcggcctccg

SEQ ID NO: 1400421 - DNA, 25 bp, Homo sapien
ccctcccagtaccagccgcggcctc

SEQ ID NO: 1400422 - DNA, 25 bp, Homo sapien
ctgccaccctcccagtaccagccgc

SEQ ID NO: 1400423 - DNA, 25 bp, Homo sapien
caccctcccagtaccagccgcggcc

SEQ ID NO: 1400424 - DNA, 25 bp, Homo sapien
agcgagcaccgcgaacccggcccca

SEQ ID NO: 1400425 - DNA, 25 bp, Homo sapien
cctcagcgagcaccgcgaacccggc

SEQ ID NO: 1400426 - DNA, 25 bp, Homo sapien
gccgcctcagcgagcaccgcgaacc

SEQ ID NO: 1400427 - DNA, 25 bp, Homo sapien
gcgagcaccgcgaacccggccccag

SEQ ID NO: 1400428 - DNA, 25 bp, Homo sapien
ttatcatctgggcatgggacaccat

SEQ ID NO: 1400429 - DNA, 25 bp, Homo sapien
tagatggctgcaacaaccttcctcc

SEQ ID NO: 1400430 - DNA, 25 bp, Homo sapien
cccatattcctagggtacagcagca

SEQ ID NO: 1400431 - DNA, 25 bp, Homo sapien
taggtttatgacctgtccatacccg

SEQ ID NO: 1400432 - DNA, 25 bp, Homo sapien
cttccccaatcctaatgtcccctga

SEQ ID NO: 1400433 - DNA, 25 bp, Homo sapien
tccccaatcctaatgtcccctgata

SEQ ID NO: 1400434 - DNA, 25 bp, Homo sapien
ttccccaatcctaatgtcccctgat

SEQ ID NO: 1400435 - DNA, 25 bp, Homo sapien
ccccaatcctaatgtcccctgatat

SEQ ID NO: 1400436 - DNA, 25 bp, Homo sapien
tcagatagccccaaaggctctatct

SEQ ID NO: 1400437 - DNA, 25 bp, Homo sapien
tcattagtcagatagccccaaaggc

SEQ ID NO: 1400438 - DNA, 25 bp, Homo sapien
tagcgacttgaccatctcttgttcc

SEQ ID NO: 1400439 - DNA, 25 bp, Homo sapien
tctttagctcccagagaactttttg

SEQ ID NO: 1400440 - DNA, 25 bp, Homo sapien
tgatatagagaaaggtgccagctgc

SEQ ID NO: 1400441 - DNA, 25 bp, Homo sapien
ggtgatatagagaaaggtgccagct

SEQ ID NO: 1400442 - DNA, 25 bp, Homo sapien
agaggtcctgccgactctgccagag

SEQ ID NO: 1400443 - DNA, 25 bp, Homo sapien
gctggtgcagaggtcctgccgactc

SEQ ID NO: 1400444 - DNA, 25 bp, Homo sapien
gtgtcatgcatgagaagaggatccc

SEQ ID NO: 1400445 - DNA, 25 bp, Homo sapien
ctgcacccagcccgatgcctagagg

SEQ ID NO: 1400446 - DNA, 25 bp, Homo sapien
ctagaggtgtcatgcatgagaagag

SEQ ID NO: 1400447 - DNA, 25 bp, Homo sapien
tgcacccagcccgatgcctagaggt

SEQ ID NO: 1400448 - DNA, 25 bp, Homo sapien
ctccttgtaagccagtgtgatctgc

SEQ ID NO: 1400449 - DNA, 25 bp, Homo sapien
tgacggccctgactgctccttgtaa

SEQ ID NO: 1400450 - DNA, 25 bp, Homo sapien
tgtgccctaaggtggctctgcaaca

SEQ ID NO: 1400451 - DNA, 25 bp, Homo sapien
agtacacaggcacgcaaggctgagg

SEQ ID NO: 1400452 - DNA, 25 bp, Homo sapien
cgtcacgtgcaaggctgccagggcc

SEQ ID NO: 1400453 - DNA, 25 bp, Homo sapien
gcaggtccaggagacaagtggccaa

SEQ ID NO: 1400454 - DNA, 25 bp, Homo sapien
atctatggcagccaggtagtcaggc

SEQ ID NO: 1400455 - DNA, 25 bp, Homo sapien
cccgcgaaacagcttactaggctca

SEQ ID NO: 1400456 - DNA, 25 bp, Homo sapien
ggaggctctgaagctaccgcctcgg

SEQ ID NO: 1400457 - DNA, 25 bp, Homo sapien
gcactggaggctctgaagctaccgc

SEQ ID NO: 1400458 - DNA, 25 bp, Homo sapien
ctcctggccggcgcagcacacagat

SEQ ID NO: 1400459 - DNA, 25 bp, Homo sapien
gggcgccacaccaggagctctggct

SEQ ID NO: 1400460 - DNA, 25 bp, Homo sapien
ttctggtagctccagtgactctcag

SEQ ID NO: 1400461 - DNA, 25 bp, Homo sapien
ctggtagctccagtgactctcagac

SEQ ID NO: 1400462 - DNA, 25 bp, Homo sapien
gcttctggtagctccagtgactctc

SEQ ID NO: 1400463 - DNA, 25 bp, Homo sapien
tgcttctggtagctccagtgactct

SEQ ID NO: 1400464 - DNA, 25 bp, Homo sapien
ggaatggggaagcttggtcagcaga

SEQ ID NO: 1400465 - DNA, 25 bp, Homo sapien
cagaccagagtggttgggaaaaatc

SEQ ID NO: 1400466 - DNA, 25 bp, Homo sapien
acagaccagagtggttgggaaaaat

SEQ ID NO: 1400467 - DNA, 25 bp, Homo sapien
aaaccgaggcatgagaaaggctgta

SEQ ID NO: 1400468 - DNA, 25 bp, Homo sapien
gggaaaccgaggcatgagaaaggct

SEQ ID NO: 1400469 - DNA, 25 bp, Homo sapien
gaaaccgaggcatgagaaaggctgt

SEQ ID NO: 1400470 - DNA, 25 bp, Homo sapien
aaccgaggcatgagaaaggctgtat

SEQ ID NO: 1400471 - DNA, 25 bp, Homo sapien
ctaggaaactaggagccgcctccaa

SEQ ID NO: 1400472 - DNA, 25 bp, Homo sapien
tgtcttgggtagcttcgtgggccac

SEQ ID NO: 1400473 - DNA, 25 bp, Homo sapien
tcccgaacggagtgggtgaagccaa

SEQ ID NO: 1400474 - DNA, 25 bp, Homo sapien
ctgtgcagagatgtcttgggtagct

SEQ ID NO: 1400475 - DNA, 25 bp, Homo sapien
tggagctggagttcccctaaggaat

SEQ ID NO: 1400476 - DNA, 25 bp, Homo sapien
gcggtgcctgaaagtccgggctcca

SEQ ID NO: 1400477 - DNA, 25 bp, Homo sapien
tgaagaatgcgtgagctgggactcc

SEQ ID NO: 1400478 - DNA, 25 bp, Homo sapien
taagtttgggtgctggatcgctcca

SEQ ID NO: 1400479 - DNA, 25 bp, Homo sapien
cgcagagaacaagcgcttcaggccc

SEQ ID NO: 1400480 - DNA, 25 bp, Homo sapien
ctcgcgagggtctcactacatggtc

SEQ ID NO: 1400481 - DNA, 25 bp, Homo sapien
cgcgcttccggcctagagtcgggaa

SEQ ID NO: 1400482 - DNA, 25 bp, Homo sapien
gcttccggcctagagtcgggaattc

SEQ ID NO: 1400483 - DNA, 25 bp, Homo sapien
actacatggtctccgcgcgcttccg

SEQ ID NO: 1400484 - DNA, 25 bp, Homo sapien
ccacgaccgactgccaatggcagca

SEQ ID NO: 1400485 - DNA, 25 bp, Homo sapien
ttaggagcaatcagagatcgggagc

SEQ ID NO: 1400486 - DNA, 25 bp, Homo sapien
gacagaccgggagtgacgtcagtta

SEQ ID NO: 1400487 - DNA, 25 bp, Homo sapien
ggagtgacgtcagttaggagcaatc

SEQ ID NO: 1400488 - DNA, 25 bp, Homo sapien
taatgttcccggtaactgtatgcaa

SEQ ID NO: 1400489 - DNA, 25 bp, Homo sapien
tccgtgaatgagcagcgtgcagcga

SEQ ID NO: 1400490 - DNA, 25 bp, Homo sapien
caataagacaacaaacgcaaaaggc

SEQ ID NO: 1400491 - DNA, 25 bp, Homo sapien
gctgctgttctccattaacgccaca

SEQ ID NO: 1400492 - DNA, 25 bp, Homo sapien
tgctcggcttgcggacggggaaacc

SEQ ID NO: 1400493 - DNA, 25 bp, Homo sapien
gaactgcggccccattggcctgact

SEQ ID NO: 1400494 - DNA, 25 bp, Homo sapien
taggctggcggaacccaatccccgc

SEQ ID NO: 1400495 - DNA, 25 bp, Homo sapien
gattcatattctggcgcttacccct

SEQ ID NO: 1400496 - DNA, 25 bp, Homo sapien
ctgacaaataagtcccgccggccgg

SEQ ID NO: 1400497 - DNA, 25 bp, Homo sapien
ttactatagctaagagaaaactgca

SEQ ID NO: 1400498 - DNA, 25 bp, Homo sapien
tcttcagctaggagacaccaaaccc

SEQ ID NO: 1400499 - DNA, 25 bp, Homo sapien
tttgtggaccctcagactcttagtc

SEQ ID NO: 1400500 - DNA, 25 bp, Homo sapien
agaaagggcgcggctacctacttct

SEQ ID NO: 1400501 - DNA, 25 bp, Homo sapien
atccctgacctgctggacgcgtggc

SEQ ID NO: 1400502 - DNA, 25 bp, Homo sapien
aatccctgacctgctggacgcgtgg

SEQ ID NO: 1400503 - DNA, 25 bp, Homo sapien
tccctgacctgctggacgcgtggct

SEQ ID NO: 1400504 - DNA, 25 bp, Homo sapien
cctgacctgctggacgcgtggctgg

SEQ ID NO: 1400505 - DNA, 25 bp, Homo sapien
tctgtaacttggagcaggaagtcat

SEQ ID NO: 1400506 - DNA, 25 bp, Homo sapien
cttaaggccccaatctaccaagtct

SEQ ID NO: 1400507 - DNA, 25 bp, Homo sapien
tgtaacttggagcaggaagtcatgg

SEQ ID NO: 1400508 - DNA, 25 bp, Homo sapien
tatttctcactcaaaacttatttcc

SEQ ID NO: 1400509 - DNA, 25 bp, Homo sapien
ctgtaacttggagcaggaagtcatg

SEQ ID NO: 1400510 - DNA, 25 bp, Homo sapien
taaggccccaatctaccaagtcttc

SEQ ID NO: 1400511 - DNA, 25 bp, Homo sapien
gaagacttggtagattggggcctta

SEQ ID NO: 1400512 - DNA, 25 bp, Homo sapien
cccatgacttcctgctccaagttac

SEQ ID NO: 1400513 - DNA, 25 bp, Homo sapien
ggaaataagttttgagtgagaaata

SEQ ID NO: 1400514 - DNA, 25 bp, Homo sapien
catgacttcctgctccaagttacag

SEQ ID NO: 1400515 - DNA, 25 bp, Homo sapien
ccatgacttcctgctccaagttaca

SEQ ID NO: 1400516 - DNA, 25 bp, Homo sapien
atgacttcctgctccaagttacaga

SEQ ID NO: 1400517 - DNA, 25 bp, Homo sapien
cccttgtatcctgggtcttagagac

SEQ ID NO: 1400518 - DNA, 25 bp, Homo sapien
cattccacccttgtatcctgggtct

SEQ ID NO: 1400519 - DNA, 25 bp, Homo sapien
gacagtgaaagtgaaatggactgat

SEQ ID NO: 1400520 - DNA, 25 bp, Homo sapien
ttcttctttcagatcattaatgagc

SEQ ID NO: 1400521 - DNA, 25 bp, Homo sapien
tatcctgggtcttagagaccctatc

SEQ ID NO: 1400522 - DNA, 25 bp, Homo sapien
ccacccttgtatcctgggtcttaga

SEQ ID NO: 1400523 - DNA, 25 bp, Homo sapien
gatagggtctctaagacccaggata

SEQ ID NO: 1400524 - DNA, 25 bp, Homo sapien
aatcagtccatttcactttcactgt

SEQ ID NO: 1400525 - DNA, 25 bp, Homo sapien
tctaagacccaggatacaagggtgg

SEQ ID NO: 1400526 - DNA, 25 bp, Homo sapien
gctcattaatgatctgaaagaagaa

SEQ ID NO: 1400527 - DNA, 25 bp, Homo sapien
taagacccaggatacaagggtggaa

SEQ ID NO: 1400528 - DNA, 25 bp, Homo sapien
gtctctaagacccaggatacaaggg

SEQ ID NO: 1400529 - DNA, 25 bp, Homo sapien
cgcttgtcttgtcatcattcgtcag

SEQ ID NO: 1400530 - DNA, 25 bp, Homo sapien
tcattcgtcagcgacaattggacag

SEQ ID NO: 1400531 - DNA, 25 bp, Homo sapien
ggctctggaaaaggtccggaagcaa

SEQ ID NO: 1400532 - DNA, 25 bp, Homo sapien
cgtcagcgacaattggacagaaagg

SEQ ID NO: 1400533 - DNA, 25 bp, Homo sapien
tgtgtggccctgatcttcgcttgtc

SEQ ID NO: 1400534 - DNA, 25 bp, Homo sapien
ccggaagcaaatcgagtccatatag

SEQ ID NO: 1400535 - DNA, 25 bp, Homo sapien
tatatggactcgatttgcttccgga

SEQ ID NO: 1400536 - DNA, 25 bp, Homo sapien
tgcttccggaccttttccagagcct

SEQ ID NO: 1400537 - DNA, 25 bp, Homo sapien
gacgaatgatgacaagacaagcgaa

SEQ ID NO: 1400538 - DNA, 25 bp, Homo sapien
ccaattgtcgctgacgaatgatgac

SEQ ID NO: 1400539 - DNA, 25 bp, Homo sapien
gacaagcgaagatcagggccacaca

SEQ ID NO: 1400540 - DNA, 25 bp, Homo sapien
cctttctgtccaattgtcgctgacg

SEQ ID NO: 1400541 - DNA, 25 bp, Homo sapien
caacgcttattttggaagttcgaag

SEQ ID NO: 1400542 - DNA, 25 bp, Homo sapien
gctttgatggaacaacgcttatttt

SEQ ID NO: 1400543 - DNA, 25 bp, Homo sapien
ttgatggaacaacgcttattttgga

SEQ ID NO: 1400544 - DNA, 25 bp, Homo sapien
tttgatggaacaacgcttattttgg

SEQ ID NO: 1400545 - DNA, 25 bp, Homo sapien
gatggaacaacgcttattttggaag

SEQ ID NO: 1400546 - DNA, 25 bp, Homo sapien
cagctttgatggaacaacgcttatt

SEQ ID NO: 1400547 - DNA, 25 bp, Homo sapien
cttccaaaataagcgttgttccatc

SEQ ID NO: 1400548 - DNA, 25 bp, Homo sapien
aataagcgttgttccatcaaagctg

SEQ ID NO: 1400549 - DNA, 25 bp, Homo sapien
tccaaaataagcgttgttccatcaa

SEQ ID NO: 1400550 - DNA, 25 bp, Homo sapien
caaaataagcgttgttccatcaaag

SEQ ID NO: 1400551 - DNA, 25 bp, Homo sapien
aaaataagcgttgttccatcaaagc

SEQ ID NO: 1400552 - DNA, 25 bp, Homo sapien
cttcgaacttccaaaataagcgttg

SEQ ID NO: 1400553 - DNA, 25 bp, Homo sapien
cagcactatgttattggccatattt

SEQ ID NO: 1400554 - DNA, 25 bp, Homo sapien
tgtatcctggctaggctgaagtaga

SEQ ID NO: 1400555 - DNA, 25 bp, Homo sapien
taaaattggttaatactagctctgc

SEQ ID NO: 1400556 - DNA, 25 bp, Homo sapien
ccttgggaataactattccttcctg

SEQ ID NO: 1400557 - DNA, 25 bp, Homo sapien
tacacacaatagaagcctggctctg

SEQ ID NO: 1400558 - DNA, 25 bp, Homo sapien
gttaatactagctctgcttatccag

SEQ ID NO: 1400559 - DNA, 25 bp, Homo sapien
aaatatggccaataacatagtgctg

SEQ ID NO: 1400560 - DNA, 25 bp, Homo sapien
cagagccaggcttctattgtgtgta

SEQ ID NO: 1400561 - DNA, 25 bp, Homo sapien
ctggataagcagagctagtattaac

SEQ ID NO: 1400562 - DNA, 25 bp, Homo sapien
tacttcagcctagccaggatacact

SEQ ID NO: 1400563 - DNA, 25 bp, Homo sapien
gcagagctagtattaaccaatttta

SEQ ID NO: 1400564 - DNA, 25 bp, Homo sapien
caggaaggaatagttattcccaagg

SEQ ID NO: 1400565 - DNA, 25 bp, Homo sapien
agtgtggtcccacaggatatgtaga

SEQ ID NO: 1400566 - DNA, 25 bp, Homo sapien
atgcagctcatctaagagaaatgag

SEQ ID NO: 1400567 - DNA, 25 bp, Homo sapien
aaatcacatgcagctcatctaagag

SEQ ID NO: 1400568 - DNA, 25 bp, Homo sapien
tgagtgtggtcccacaggatatgta

SEQ ID NO: 1400569 - DNA, 25 bp, Homo sapien
tcacatgcagctcatctaagagaaa

SEQ ID NO: 1400570 - DNA, 25 bp, Homo sapien
catgcagctcatctaagagaaatga

SEQ ID NO: 1400571 - DNA, 25 bp, Homo sapien
tctacatatcctgtgggaccacact

SEQ ID NO: 1400572 - DNA, 25 bp, Homo sapien
tttctcttagatgagctgcatgtga

SEQ ID NO: 1400573 - DNA, 25 bp, Homo sapien
tacatatcctgtgggaccacactca

SEQ ID NO: 1400574 - DNA, 25 bp, Homo sapien
ctcatttctcttagatgagctgcat

SEQ ID NO: 1400575 - DNA, 25 bp, Homo sapien
tcatttctcttagatgagctgcatg

SEQ ID NO: 1400576 - DNA, 25 bp, Homo sapien
ctcttagatgagctgcatgtgattt

SEQ ID NO: 1400577 - DNA, 25 bp, Homo sapien
ggaagagtttgtggtagcagaagag

SEQ ID NO: 1400578 - DNA, 25 bp, Homo sapien
gaagagtttgtggtagcagaagagt

SEQ ID NO: 1400579 - DNA, 25 bp, Homo sapien
gaagagtgctctccatgctctaatt

SEQ ID NO: 1400580 - DNA, 25 bp, Homo sapien
ctctccatgctctaatttccgggct

SEQ ID NO: 1400581 - DNA, 25 bp, Homo sapien
cagaagagtgctctccatgctctaa

SEQ ID NO: 1400582 - DNA, 25 bp, Homo sapien
gtagcagaagagtgctctccatgct

SEQ ID NO: 1400583 - DNA, 25 bp, Homo sapien
tggtagcagaagagtgctctccatg

SEQ ID NO: 1400584 - DNA, 25 bp, Homo sapien
tgctctccatgctctaatttccggg

SEQ ID NO: 1400585 - DNA, 25 bp, Homo sapien
cccggaaattagagcatggagagca

SEQ ID NO: 1400586 - DNA, 25 bp, Homo sapien
tagagcatggagagcactcttctgc

SEQ ID NO: 1400587 - DNA, 25 bp, Homo sapien
agcccggaaattagagcatggagag

SEQ ID NO: 1400588 - DNA, 25 bp, Homo sapien
aattagagcatggagagcactcttc

SEQ ID NO: 1400589 - DNA, 25 bp, Homo sapien
ggaaattagagcatggagagcactc

SEQ ID NO: 1400590 - DNA, 25 bp, Homo sapien
catggagagcactcttctgctacca

SEQ ID NO: 1400591 - DNA, 25 bp, Homo sapien
actcttctgctaccacaaactcttc

SEQ ID NO: 1400592 - DNA, 25 bp, Homo sapien
ctcttctgctaccacaaactcttcc

SEQ ID NO: 1400593 - DNA, 25 bp, Homo sapien
ctcaaatttgccatgctggctggtg

SEQ ID NO: 1400594 - DNA, 25 bp, Homo sapien
aagcacctcaaatttgccatgctgg

SEQ ID NO: 1400595 - DNA, 25 bp, Homo sapien
tgtggtagcagaagagtgctctcca

SEQ ID NO: 1400596 - DNA, 25 bp, Homo sapien
gaagagtttgtggtagcagaagagt

SEQ ID NO: 1400597 - DNA, 25 bp, Homo sapien
aaatttgccatgctggctggtggaa

SEQ ID NO: 1400598 - DNA, 25 bp, Homo sapien
tgctctccatgctctaatttccggg

SEQ ID NO: 1400599 - DNA, 25 bp, Homo sapien
cccggaaattagagcatggagagca

SEQ ID NO: 1400600 - DNA, 25 bp, Homo sapien
ccagcatggcaaatttgaggtgctt

SEQ ID NO: 1400601 - DNA, 25 bp, Homo sapien
tcttccaccagccagcatggcaaat

SEQ ID NO: 1400602 - DNA, 25 bp, Homo sapien
caccagccagcatggcaaatttgag

SEQ ID NO: 1400603 - DNA, 25 bp, Homo sapien
actcttctgctaccacaaactcttc

SEQ ID NO: 1400604 - DNA, 25 bp, Homo sapien
tggagagcactcttctgctaccaca

SEQ ID NO: 1400605 - DNA, 25 bp, Homo sapien
ggctggcatttatctttcctttcag

SEQ ID NO: 1400606 - DNA, 25 bp, Homo sapien
ggggctggcatttatctttcctttc

SEQ ID NO: 1400607 - DNA, 25 bp, Homo sapien
ctggggctggcatttatctttcctt

SEQ ID NO: 1400608 - DNA, 25 bp, Homo sapien
cctggggctggcatttatctttcct

SEQ ID NO: 1400609 - DNA, 25 bp, Homo sapien
tggcctggggctggcatttatcttt

SEQ ID NO: 1400610 - DNA, 25 bp, Homo sapien
gcctggggctggcatttatctttcc

SEQ ID NO: 1400611 - DNA, 25 bp, Homo sapien
aagataaatgccagccccaggccat

SEQ ID NO: 1400612 - DNA, 25 bp, Homo sapien
gaaaggaaagataaatgccagcccc

SEQ ID NO: 1400613 - DNA, 25 bp, Homo sapien
aaggaaagataaatgccagccccag

SEQ ID NO: 1400614 - DNA, 25 bp, Homo sapien
ggaaagataaatgccagccccaggc

SEQ ID NO: 1400615 - DNA, 25 bp, Homo sapien
aggaaagataaatgccagccccagg

SEQ ID NO: 1400616 - DNA, 25 bp, Homo sapien
aaagataaatgccagccccaggcca

SEQ ID NO: 1400617 - DNA, 25 bp, Homo sapien
gccgggaagttggatgggcagagcc

SEQ ID NO: 1400618 - DNA, 25 bp, Homo sapien
cgctgtgccgggaagttggatgggc

SEQ ID NO: 1400619 - DNA, 25 bp, Homo sapien
gaaaaggccggcaccacatggaatg

SEQ ID NO: 1400620 - DNA, 25 bp, Homo sapien
tggaatgagggcaagcgctgtgccg

SEQ ID NO: 1400621 - DNA, 25 bp, Homo sapien
ggaaaaggccggcaccacatggaat

SEQ ID NO: 1400622 - DNA, 25 bp, Homo sapien
gagggcaagcgctgtgccgggaagt

SEQ ID NO: 1400623 - DNA, 25 bp, Homo sapien
ggcacagcgcttgccctcattccat

SEQ ID NO: 1400624 - DNA, 25 bp, Homo sapien
cattccatgtggtgccggccttttc

SEQ ID NO: 1400625 - DNA, 25 bp, Homo sapien
aacttcccggcacagcgcttgccct

SEQ ID NO: 1400626 - DNA, 25 bp, Homo sapien
tgcccatccaacttcccggcacagc

SEQ ID NO: 1400627 - DNA, 25 bp, Homo sapien
ggctctgcccatccaacttcccggc

SEQ ID NO: 1400628 - DNA, 25 bp, Homo sapien
attccatgtggtgccggccttttcc

SEQ ID NO: 1400629 - DNA, 25 bp, Homo sapien
gggtgattgtctgggaacccgacac

SEQ ID NO: 1400630 - DNA, 25 bp, Homo sapien
gtgattgtctgggaacccgacacgt

SEQ ID NO: 1400631 - DNA, 25 bp, Homo sapien
tgggtgattgtctgggaacccgaca

SEQ ID NO: 1400632 - DNA, 25 bp, Homo sapien
gattgtctgggaacccgacacgtcc

SEQ ID NO: 1400633 - DNA, 25 bp, Homo sapien
tgattgtctgggaacccgacacgtc

SEQ ID NO: 1400634 - DNA, 25 bp, Homo sapien
ggtgattgtctgggaacccgacacg

SEQ ID NO: 1400635 - DNA, 25 bp, Homo sapien
acgtgtcgggttcccagacaatcac

SEQ ID NO: 1400636 - DNA, 25 bp, Homo sapien
gacgtgtcgggttcccagacaatca

SEQ ID NO: 1400637 - DNA, 25 bp, Homo sapien
tgtcgggttcccagacaatcaccca

SEQ ID NO: 1400638 - DNA, 25 bp, Homo sapien
cgtgtcgggttcccagacaatcacc

SEQ ID NO: 1400639 - DNA, 25 bp, Homo sapien
ggacgtgtcgggttcccagacaatc

SEQ ID NO: 1400640 - DNA, 25 bp, Homo sapien
gtgtcgggttcccagacaatcaccc

SEQ ID NO: 1400641 - DNA, 25 bp, Homo sapien
aggctcccgtgcaggaagagaagct

SEQ ID NO: 1400642 - DNA, 25 bp, Homo sapien
cccgtgcaggaagagaagctgtcag

SEQ ID NO: 1400643 - DNA, 25 bp, Homo sapien
cagaggctcccgtgcaggaagagaa

SEQ ID NO: 1400644 - DNA, 25 bp, Homo sapien
gctcccgtgcaggaagagaagctgt

SEQ ID NO: 1400645 - DNA, 25 bp, Homo sapien
caagcagaggctcccgtgcaggaag

SEQ ID NO: 1400646 - DNA, 25 bp, Homo sapien
ccaagcagaggctcccgtgcaggaa

SEQ ID NO: 1400647 - DNA, 25 bp, Homo sapien
agcttctcttcctgcacgggagcct

SEQ ID NO: 1400648 - DNA, 25 bp, Homo sapien
ttcctgcacgggagcctctgcttgg

SEQ ID NO: 1400649 - DNA, 25 bp, Homo sapien
gacagcttctcttcctgcacgggag

SEQ ID NO: 1400650 - DNA, 25 bp, Homo sapien
cttcctgcacgggagcctctgcttg

SEQ ID NO: 1400651 - DNA, 25 bp, Homo sapien
ctgacagcttctcttcctgcacggg

SEQ ID NO: 1400652 - DNA, 25 bp, Homo sapien
ttctcttcctgcacgggagcctctg

SEQ ID NO: 1400653 - DNA, 25 bp, Homo sapien
cgcaggagggggtgccctattttct

SEQ ID NO: 1400654 - DNA, 25 bp, Homo sapien
caggagggggtgccctattttctgg

SEQ ID NO: 1400655 - DNA, 25 bp, Homo sapien
tgtcccttcccccaactccgctaca

SEQ ID NO: 1400656 - DNA, 25 bp, Homo sapien
gcaggagggggtgccctattttctg

SEQ ID NO: 1400657 - DNA, 25 bp, Homo sapien
cagaaaatagggcaccccctcctgc

SEQ ID NO: 1400658 - DNA, 25 bp, Homo sapien
ccagaaaatagggcaccccctcctg

SEQ ID NO: 1400659 - DNA, 25 bp, Homo sapien
tgtagcggagttgggggaagggaca

SEQ ID NO: 1400660 - DNA, 25 bp, Homo sapien
agaaaatagggcaccccctcctgcg

SEQ ID NO: 1400661 - DNA, 25 bp, Homo sapien
ggaggacaggatcgttcccggcctc

SEQ ID NO: 1400662 - DNA, 25 bp, Homo sapien
caggatcgttcccggcctcggggct

SEQ ID NO: 1400663 - DNA, 25 bp, Homo sapien
aggatcgttcccggcctcggggctg

SEQ ID NO: 1400664 - DNA, 25 bp, Homo sapien
gaggacaggatcgttcccggcctcg

SEQ ID NO: 1400665 - DNA, 25 bp, Homo sapien
tggaggacaggatcgttcccggcct

SEQ ID NO: 1400666 - DNA, 25 bp, Homo sapien
aggacaggatcgttcccggcctcgg

SEQ ID NO: 1400667 - DNA, 25 bp, Homo sapien
ccgaggccgggaacgatcctgtcct

SEQ ID NO: 1400668 - DNA, 25 bp, Homo sapien
agccccgaggccgggaacgatcctg

SEQ ID NO: 1400669 - DNA, 25 bp, Homo sapien
cagccccgaggccgggaacgatcct

SEQ ID NO: 1400670 - DNA, 25 bp, Homo sapien
cgaggccgggaacgatcctgtcctc

SEQ ID NO: 1400671 - DNA, 25 bp, Homo sapien
aggccgggaacgatcctgtcctcca

SEQ ID NO: 1400672 - DNA, 25 bp, Homo sapien
gaggccgggaacgatcctgtcctcc

SEQ ID NO: 1400673 - DNA, 25 bp, Homo sapien
ggaggacaggatcgttcccggcctc

SEQ ID NO: 1400674 - DNA, 25 bp, Homo sapien
ctgggggagatcttatccatggaca

SEQ ID NO: 1400675 - DNA, 25 bp, Homo sapien
gaggacaggatcgttcccggcctcg

SEQ ID NO: 1400676 - DNA, 25 bp, Homo sapien
tggaggacaggatcgttcccggcct

SEQ ID NO: 1400677 - DNA, 25 bp, Homo sapien
ggaaaaggaggtcactggaggacag

SEQ ID NO: 1400678 - DNA, 25 bp, Homo sapien
aggacaggatcgttcccggcctcgg

SEQ ID NO: 1400679 - DNA, 25 bp, Homo sapien
tgtccatggataagatctcccccag

SEQ ID NO: 1400680 - DNA, 25 bp, Homo sapien
ccgaggccgggaacgatcctgtcct

SEQ ID NO: 1400681 - DNA, 25 bp, Homo sapien
agccccgaggccgggaacgatcctg

SEQ ID NO: 1400682 - DNA, 25 bp, Homo sapien
cgaggccgggaacgatcctgtcctc

SEQ ID NO: 1400683 - DNA, 25 bp, Homo sapien
aggccgggaacgatcctgtcctcca

SEQ ID NO: 1400684 - DNA, 25 bp, Homo sapien
tgtcctccagtgacctccttttccc

SEQ ID NO: 1400685 - DNA, 25 bp, Homo sapien
tctgctggttgctctgtgctttcac

SEQ ID NO: 1400686 - DNA, 25 bp, Homo sapien
ccacctctgctggttgctctgtgct

SEQ ID NO: 1400687 - DNA, 25 bp, Homo sapien
cgccacctctgctggttgctctgtg

SEQ ID NO: 1400688 - DNA, 25 bp, Homo sapien
ctctgctggttgctctgtgctttca

SEQ ID NO: 1400689 - DNA, 25 bp, Homo sapien
gccacctctgctggttgctctgtgc

SEQ ID NO: 1400690 - DNA, 25 bp, Homo sapien
ctgctggttgctctgtgctttcacc

SEQ ID NO: 1400691 - DNA, 25 bp, Homo sapien
gcacagagcaaccagcagaggtggc

SEQ ID NO: 1400692 - DNA, 25 bp, Homo sapien
ggtgaaagcacagagcaaccagcag

SEQ ID NO: 1400693 - DNA, 25 bp, Homo sapien
gtgaaagcacagagcaaccagcaga

SEQ ID NO: 1400694 - DNA, 25 bp, Homo sapien
cacagagcaaccagcagaggtggcg

SEQ ID NO: 1400695 - DNA, 25 bp, Homo sapien
agcacagagcaaccagcagaggtgg

SEQ ID NO: 1400696 - DNA, 25 bp, Homo sapien
tgaaagcacagagcaaccagcagag

SEQ ID NO: 1400697 - DNA, 25 bp, Homo sapien
gcctgtggagtaggtccctctgttc

SEQ ID NO: 1400698 - DNA, 25 bp, Homo sapien
gtaagtgccgcctctgcgctccgac

SEQ ID NO: 1400699 - DNA, 25 bp, Homo sapien
tgtggagtaggtccctctgttccga

SEQ ID NO: 1400700 - DNA, 25 bp, Homo sapien
ggagtaggtccctctgttccgacag

SEQ ID NO: 1400701 - DNA, 25 bp, Homo sapien
aggcctgtggagtaggtccctctgt

SEQ ID NO: 1400702 - DNA, 25 bp, Homo sapien
ctctgcgctccgacggaggcacgag

SEQ ID NO: 1400703 - DNA, 25 bp, Homo sapien
ctgtcggaacagagggacctactcc

SEQ ID NO: 1400704 - DNA, 25 bp, Homo sapien
ggaacagagggacctactccacagg

SEQ ID NO: 1400705 - DNA, 25 bp, Homo sapien
acagagggacctactccacaggcct

SEQ ID NO: 1400706 - DNA, 25 bp, Homo sapien
tgtcggaacagagggacctactcca

SEQ ID NO: 1400707 - DNA, 25 bp, Homo sapien
ctcgtgcctccgtcggagcgcagag

SEQ ID NO: 1400708 - DNA, 25 bp, Homo sapien
gtcggagcgcagaggcggcacttac

SEQ ID NO: 1400709 - DNA, 25 bp, Homo sapien
gcaactccggccttccctgccctga

SEQ ID NO: 1400710 - DNA, 25 bp, Homo sapien
gccctgacctggaacctctgggagg

SEQ ID NO: 1400711 - DNA, 25 bp, Homo sapien
acctggaacctctgggagggctgca

SEQ ID NO: 1400712 - DNA, 25 bp, Homo sapien
ctgccctgacctggaacctctggga

SEQ ID NO: 1400713 - DNA, 25 bp, Homo sapien
cctggaacctctgggagggctgcag

SEQ ID NO: 1400714 - DNA, 25 bp, Homo sapien
tgccctgacctggaacctctgggag

SEQ ID NO: 1400715 - DNA, 25 bp, Homo sapien
ctcccagaggttccaggtcagggca

SEQ ID NO: 1400716 - DNA, 25 bp, Homo sapien
tgcagccctcccagaggttccaggt

SEQ ID NO: 1400717 - DNA, 25 bp, Homo sapien
tcagggcagggaaggccggagttgc

SEQ ID NO: 1400718 - DNA, 25 bp, Homo sapien
tcccagaggttccaggtcagggcag

SEQ ID NO: 1400719 - DNA, 25 bp, Homo sapien
ctgcagccctcccagaggttccagg

SEQ ID NO: 1400720 - DNA, 25 bp, Homo sapien
gtcagggcagggaaggccggagttg

SEQ ID NO: 1400721 - DNA, 25 bp, Homo sapien
gtgagcgggcgctagggccgcgagc

SEQ ID NO: 1400722 - DNA, 25 bp, Homo sapien
ctagcccgcaaaaacatatcgattt

SEQ ID NO: 1400723 - DNA, 25 bp, Homo sapien
tccctagcccgcaaaaacatatcga

SEQ ID NO: 1400724 - DNA, 25 bp, Homo sapien
ggcaacggggacgtcctgatagatc

SEQ ID NO: 1400725 - DNA, 25 bp, Homo sapien
cctgatagatcctctgctccaatag

SEQ ID NO: 1400726 - DNA, 25 bp, Homo sapien
acatatcgatttttctcgctgtggc

SEQ ID NO: 1400727 - DNA, 25 bp, Homo sapien
aaatcgatatgtttttgcgggctag

SEQ ID NO: 1400728 - DNA, 25 bp, Homo sapien
ctagggaggcgagcgccttctgcgg

SEQ ID NO: 1400729 - DNA, 25 bp, Homo sapien
ggatctatcaggacgtccccgttgc

SEQ ID NO: 1400730 - DNA, 25 bp, Homo sapien
ctattggagcagaggatctatcagg

SEQ ID NO: 1400731 - DNA, 25 bp, Homo sapien
gccacagcgagaaaaatcgatatgt

SEQ ID NO: 1400732 - DNA, 25 bp, Homo sapien
tcgatatgtttttgcgggctaggga

SEQ ID NO: 1400733 - DNA, 25 bp, Homo sapien
cgcggaagactataagccccagcgg

SEQ ID NO: 1400734 - DNA, 25 bp, Homo sapien
ctccacggggctagatggctgcgtc

SEQ ID NO: 1400735 - DNA, 25 bp, Homo sapien
ccaccgacgcggaagactataagcc

SEQ ID NO: 1400736 - DNA, 25 bp, Homo sapien
aggcgccaccgacgcggaagactat

SEQ ID NO: 1400737 - DNA, 25 bp, Homo sapien
ggaagactataagccccagcgggcg

SEQ ID NO: 1400738 - DNA, 25 bp, Homo sapien
actataagccccagcgggcgacgac

SEQ ID NO: 1400739 - DNA, 25 bp, Homo sapien
acgcagccatctagccccgtggagg

SEQ ID NO: 1400740 - DNA, 25 bp, Homo sapien
gggcttatagtcttccgcgtcggtg

SEQ ID NO: 1400741 - DNA, 25 bp, Homo sapien
cgtggaggatcctcgggcgcgggac

SEQ ID NO: 1400742 - DNA, 25 bp, Homo sapien
tcggtggcgcctcgcctgctgctca

SEQ ID NO: 1400743 - DNA, 25 bp, Homo sapien
atagtcttccgcgtcggtggcgcct

SEQ ID NO: 1400744 - DNA, 25 bp, Homo sapien
gcccgctggggcttatagtcttccg

SEQ ID NO: 1400745 - DNA, 25 bp, Homo sapien
tagcccagaatgaacaaacacgcgc

SEQ ID NO: 1400746 - DNA, 25 bp, Homo sapien
tcctcgggttttaaggagagagcaa

SEQ ID NO: 1400747 - DNA, 25 bp, Homo sapien
cgagaattcggacgagcctctgcaa

SEQ ID NO: 1400748 - DNA, 25 bp, Homo sapien
gacgagcctctgcaaccgccatttg

SEQ ID NO: 1400749 - DNA, 25 bp, Homo sapien
gccgttctcgcaaagactaccaaga

SEQ ID NO: 1400750 - DNA, 25 bp, Homo sapien
tcctgagagggcgacgtattgtccc

SEQ ID NO: 1400751 - DNA, 25 bp, Homo sapien
tcttggtagtctttgcgagaacggc

SEQ ID NO: 1400752 - DNA, 25 bp, Homo sapien
tcggcgccccgttgcattgtggtct

SEQ ID NO: 1400753 - DNA, 25 bp, Homo sapien
tgcagaggctcgtccgaattctcgg

SEQ ID NO: 1400754 - DNA, 25 bp, Homo sapien
tgctccctggctggcgcgtgtttgt

SEQ ID NO: 1400755 - DNA, 25 bp, Homo sapien
agggacaatacgtcgccctctcagg

SEQ ID NO: 1400756 - DNA, 25 bp, Homo sapien
caaatggcggttgcagaggctcgtc

SEQ ID NO: 1400757 - DNA, 25 bp, Homo sapien
gacgagaacgcgcagtttcgcctcc

SEQ ID NO: 1400758 - DNA, 25 bp, Homo sapien
gagaacgcgcagtttcgcctccatc

SEQ ID NO: 1400759 - DNA, 25 bp, Homo sapien
tctccactggatcatcggtggcgat

SEQ ID NO: 1400760 - DNA, 25 bp, Homo sapien
tcccttgacctccaacacagcttct

SEQ ID NO: 1400761 - DNA, 25 bp, Homo sapien
ccactggatcatcggtggcgatgaa

SEQ ID NO: 1400762 - DNA, 25 bp, Homo sapien
agcttctccactggatcatcggtgg

SEQ ID NO: 1400763 - DNA, 25 bp, Homo sapien
gagaagctgtgttggaggtcaaggg

SEQ ID NO: 1400764 - DNA, 25 bp, Homo sapien
ccaccgatgatccagtggagaagct

SEQ ID NO: 1400765 - DNA, 25 bp, Homo sapien
ggaggcgaaactgcgcgttctcgtc

SEQ ID NO: 1400766 - DNA, 25 bp, Homo sapien
gatggaggcgaaactgcgcgttctc

SEQ ID NO: 1400767 - DNA, 25 bp, Homo sapien
ttcatcgccaccgatgatccagtgg

SEQ ID NO: 1400768 - DNA, 25 bp, Homo sapien
tgttggaggtcaagggatggaggcg

SEQ ID NO: 1400769 - DNA, 25 bp, Homo sapien
tcgtcatgtgtctcggatattccgg

SEQ ID NO: 1400770 - DNA, 25 bp, Homo sapien
gaacctagactcaatacttatggaa

SEQ ID NO: 1400771 - DNA, 25 bp, Homo sapien
cagctctgaggagtaggcttagcaa

SEQ ID NO: 1400772 - DNA, 25 bp, Homo sapien
agtaacatgagggaaggtaacaccg

SEQ ID NO: 1400773 - DNA, 25 bp, Homo sapien
taacaccgttcatctgtgtagcgga

SEQ ID NO: 1400774 - DNA, 25 bp, Homo sapien
ggttatgcaaaggaccagctctgag

SEQ ID NO: 1400775 - DNA, 25 bp, Homo sapien
cctcagagctggtcctttgcataac

SEQ ID NO: 1400776 - DNA, 25 bp, Homo sapien
ggaatatccgagacacatgacgaac

SEQ ID NO: 1400777 - DNA, 25 bp, Homo sapien
gaagttccataagtattgagtctag

SEQ ID NO: 1400778 - DNA, 25 bp, Homo sapien
tgaacggtgttaccttccctcatgt

SEQ ID NO: 1400779 - DNA, 25 bp, Homo sapien
cactccgctacacagatgaacggtg

SEQ ID NO: 1400780 - DNA, 25 bp, Homo sapien
tttgctaagcctactcctcagagct

SEQ ID NO: 1400781 - DNA, 25 bp, Homo sapien
gtcacaggagccatcatagcgcatt

SEQ ID NO: 1400782 - DNA, 25 bp, Homo sapien
gaacttctcgtcttcagggatcctc

SEQ ID NO: 1400783 - DNA, 25 bp, Homo sapien
tttttgaacgagatggactctggct

SEQ ID NO: 1400784 - DNA, 25 bp, Homo sapien
tgagggctgagccttcatttcgccg

SEQ ID NO: 1400785 - DNA, 25 bp, Homo sapien
ttaagcataagccacaaataaggtt

SEQ ID NO: 1400786 - DNA, 25 bp, Homo sapien
atgtatggtgaaagggggatatata

SEQ ID NO: 1400787 - DNA, 25 bp, Homo sapien
tctcgctgggaatttcctgtgctca

SEQ ID NO: 1400788 - DNA, 25 bp, Homo sapien
gactgttagagttcttctcgctggg

SEQ ID NO: 1400789 - DNA, 25 bp, Homo sapien
ttccttaccaacagaacagctaggg

SEQ ID NO: 1400790 - DNA, 25 bp, Homo sapien
ccccatggcggaaagaggatatcca

SEQ ID NO: 1400791 - DNA, 25 bp, Homo sapien
gagtggagaacaattctgacaataa

SEQ ID NO: 1400792 - DNA, 25 bp, Homo sapien
gcctgatttgggtaaatcaatcact

SEQ ID NO: 1400793 - DNA, 25 bp, Homo sapien
tgacaataatccaagttacccaaaa

SEQ ID NO: 1400794 - DNA, 25 bp, Homo sapien
aaccgagcctgatttgggtaaatca

SEQ ID NO: 1400795 - DNA, 25 bp, Homo sapien
tccctagtgtagtgccgagctagcc

SEQ ID NO: 1400796 - DNA, 25 bp, Homo sapien
gaccctaaaacctgatctagtaaca

SEQ ID NO: 1400797 - DNA, 25 bp, Homo sapien
aagcccctctgctatttctcccctg

SEQ ID NO: 1400798 - DNA, 25 bp, Homo sapien
tgaaaacccaggtaaggtctgaagc

SEQ ID NO: 1400799 - DNA, 25 bp, Homo sapien
cgttgtctccctcaggttcagcttc

SEQ ID NO: 1400800 - DNA, 25 bp, Homo sapien
ctgccgttgtctccctcaggttcag

SEQ ID NO: 1400801 - DNA, 25 bp, Homo sapien
gccgttgtctccctcaggttcagct

SEQ ID NO: 1400802 - DNA, 25 bp, Homo sapien
ctctgccgttgtctccctcaggttc

SEQ ID NO: 1400803 - DNA, 25 bp, Homo sapien
gtactgggaggcttgttgccgtttc

SEQ ID NO: 1400804 - DNA, 25 bp, Homo sapien
agtactgggaggcttgttgccgttt

SEQ ID NO: 1400805 - DNA, 25 bp, Homo sapien
tactgggaggcttgttgccgtttcc

SEQ ID NO: 1400806 - DNA, 25 bp, Homo sapien
tgtttaaagtaaatccaccctcatg

SEQ ID NO: 1400807 - DNA, 25 bp, Homo sapien
catgagaaatcttagcattgctccc

SEQ ID NO: 1400808 - DNA, 25 bp, Homo sapien
gcattgctccccgtttttatcaaca

SEQ ID NO: 1400809 - DNA, 25 bp, Homo sapien
gttgtacctagtccagcaaaaccaa

SEQ ID NO: 1400810 - DNA, 25 bp, Homo sapien
cttgagcaagatgtcccgggccagg

SEQ ID NO: 1400811 - DNA, 25 bp, Homo sapien
gacttgagcaagatgtcccgggcca

SEQ ID NO: 1400812 - DNA, 25 bp, Homo sapien
acttgagcaagatgtcccgggccag

SEQ ID NO: 1400813 - DNA, 25 bp, Homo sapien
ggaggagaatctaccttctaatact

SEQ ID NO: 1400814 - DNA, 25 bp, Homo sapien
gggaggagaatctaccttctaatac

SEQ ID NO: 1400815 - DNA, 25 bp, Homo sapien
tactggatttagcactagtttcgaa

SEQ ID NO: 1400816 - DNA, 25 bp, Homo sapien
atcggattccatgctctcgagccaa

SEQ ID NO: 1400817 - DNA, 25 bp, Homo sapien
cattcatactggatttagcactagt

SEQ ID NO: 1400818 - DNA, 25 bp, Homo sapien
tagtttcgaaaaatcggattccatg

SEQ ID NO: 1400819 - DNA, 25 bp, Homo sapien
gaagagaattgaattaaggacagca

SEQ ID NO: 1400820 - DNA, 25 bp, Homo sapien
tctagaacattgctcagcctggccc

SEQ ID NO: 1400821 - DNA, 25 bp, Homo sapien
tgcaatgcaacctatcttggccctc

SEQ ID NO: 1400822 - DNA, 25 bp, Homo sapien
agccaagtcctctgcaatgcaacct

SEQ ID NO: 1400823 - DNA, 25 bp, Homo sapien
acatttgttccccagcaagaggcgc

SEQ ID NO: 1400824 - DNA, 25 bp, Homo sapien
atttgttccccagcaagaggcgctc

SEQ ID NO: 1400825 - DNA, 25 bp, Homo sapien
tgtcacatttgttccccagcaagag

SEQ ID NO: 1400826 - DNA, 25 bp, Homo sapien
ccatgtcacatttgttccccagcaa

SEQ ID NO: 1400827 - DNA, 25 bp, Homo sapien
agtaaaagttaggtcctgccggctg

SEQ ID NO: 1400828 - DNA, 25 bp, Homo sapien
ttgcctatcctgatggaccccttca

SEQ ID NO: 1400829 - DNA, 25 bp, Homo sapien
aaaaagttaggtcttgcctatcctg

SEQ ID NO: 1400830 - DNA, 25 bp, Homo sapien
tatcctgatggaccccttcattctc

SEQ ID NO: 1400831 - DNA, 25 bp, Homo sapien
ttctcgaaagatttctcatccgtga

SEQ ID NO: 1400832 - DNA, 25 bp, Homo sapien
tctgaatattctcgaaagatttctc

SEQ ID NO: 1400833 - DNA, 25 bp, Homo sapien
gaaagatttctcatccgtgatgtcg

SEQ ID NO: 1400834 - DNA, 25 bp, Homo sapien
tttcatccagttctgaatattctcg

SEQ ID NO: 1400835 - DNA, 25 bp, Homo sapien
caacccctgaccctttgtattcata

SEQ ID NO: 1400836 - DNA, 25 bp, Homo sapien
taagtgaccccgcatccatgggtct

SEQ ID NO: 1400837 - DNA, 25 bp, Homo sapien
catccatgggtctaaacactaggcc

SEQ ID NO: 1400838 - DNA, 25 bp, Homo sapien
tgttcccattgaggcttcccactgc

SEQ ID NO: 1400839 - DNA, 25 bp, Homo sapien
agttattgtcttgaaccgctcttgg

SEQ ID NO: 1400840 - DNA, 25 bp, Homo sapien
catggctccacggtagtaggcagta

SEQ ID NO: 1400841 - DNA, 25 bp, Homo sapien
tattgtcttgaaccgctcttggcca

SEQ ID NO: 1400842 - DNA, 25 bp, Homo sapien
gctccacggtagtaggcagtagtta

SEQ ID NO: 1400843 - DNA, 25 bp, Homo sapien
tatatccacagtgcggatcttgaaa

SEQ ID NO: 1400844 - DNA, 25 bp, Homo sapien
acagtgcggatcttgaaatcaattc

SEQ ID NO: 1400845 - DNA, 25 bp, Homo sapien
tccacagtgcggatcttgaaatcaa

SEQ ID NO: 1400846 - DNA, 25 bp, Homo sapien
tcccctctatatccacagtgcggat

SEQ ID NO: 1400847 - DNA, 25 bp, Homo sapien
gctgaagccagtctatgtgaattaa

SEQ ID NO: 1400848 - DNA, 25 bp, Homo sapien
tgtgaattaactagtgggccaaact

SEQ ID NO: 1400849 - DNA, 25 bp, Homo sapien
acttggcactaggaaagtctgaggc

SEQ ID NO: 1400850 - DNA, 25 bp, Homo sapien
tcttgggtccattcagttataccag

SEQ ID NO: 1400851 - DNA, 25 bp, Homo sapien
ggactgaaaagtggggtcactagta

SEQ ID NO: 1400852 - DNA, 25 bp, Homo sapien
tgaaaagtggggtcactagtaatcc

SEQ ID NO: 1400853 - DNA, 25 bp, Homo sapien
ggtcactagtaatccgggagccgga

SEQ ID NO: 1400854 - DNA, 25 bp, Homo sapien
ggaggtcacaggagagtcggggtct

SEQ ID NO: 1400855 - DNA, 25 bp, Homo sapien
aagaggtggtcgtaggctttggcca

SEQ ID NO: 1400856 - DNA, 25 bp, Homo sapien
tgcaaagcgaatgatcagacaagtc

SEQ ID NO: 1400857 - DNA, 25 bp, Homo sapien
gacaagtcttgcccacccccgagtc

SEQ ID NO: 1400858 - DNA, 25 bp, Homo sapien
tctgcaaagcgaatgatcagacaag

SEQ ID NO: 1400859 - DNA, 25 bp, Homo sapien
taggcgggactggacggttggcaaa

SEQ ID NO: 1400860 - DNA, 25 bp, Homo sapien
caaacagagcggcacggagcccagg

SEQ ID NO: 1400861 - DNA, 25 bp, Homo sapien
tggacggttggcaaacagagcggca

SEQ ID NO: 1400862 - DNA, 25 bp, Homo sapien
gggagcgcccggcactggtaggcgg

SEQ ID NO: 1400863 - DNA, 25 bp, Homo sapien
taaagaccttccgaaaatggcagct

SEQ ID NO: 1400864 - DNA, 25 bp, Homo sapien
ttgtctccccactgcggcggatcaa

SEQ ID NO: 1400865 - DNA, 25 bp, Homo sapien
tgcggcggatcaaagtaagacgttc

SEQ ID NO: 1400866 - DNA, 25 bp, Homo sapien
catggtgacgcatatgtgtcacaac

SEQ ID NO: 1400867 - DNA, 25 bp, Homo sapien
tgcacaaacggtagttttgtgtgtt

SEQ ID NO: 1400868 - DNA, 25 bp, Homo sapien
aaatcaccacggtctttagccatgc

SEQ ID NO: 1400869 - DNA, 25 bp, Homo sapien
taaaatcaccacggtctttagccat

SEQ ID NO: 1400870 - DNA, 25 bp, Homo sapien
tttagccatgcacaaacggtagttt

SEQ ID NO: 1400871 - DNA, 25 bp, Homo sapien
tcaggaggaagcagcactaaaagca

SEQ ID NO: 1400872 - DNA, 25 bp, Homo sapien
aaaagcactctgagtcaagatgagt

SEQ ID NO: 1400873 - DNA, 25 bp, Homo sapien
gcagcactaaaagcactctgagtca

SEQ ID NO: 1400874 - DNA, 25 bp, Homo sapien
tctgagtcaagatgagtgggaaacc

SEQ ID NO: 1400875 - DNA, 25 bp, Homo sapien
gcagaggttagtgccttatactcca

SEQ ID NO: 1400876 - DNA, 25 bp, Homo sapien
tgctgttaggcttcttgtcgaggac

SEQ ID NO: 1400877 - DNA, 25 bp, Homo sapien
tcagaagccttatctggaaacttaa

SEQ ID NO: 1400878 - DNA, 25 bp, Homo sapien
ggactagaaatcttcattcccctgc

SEQ ID NO: 1400879 - DNA, 25 bp, Homo sapien
ctttgggccaatggaggttgtagac

SEQ ID NO: 1400880 - DNA, 25 bp, Homo sapien
agtgagggggagaacttgtggagtt

SEQ ID NO: 1400881 - DNA, 25 bp, Homo sapien
gtgagggggagaacttgtggagtta

SEQ ID NO: 1400882 - DNA, 25 bp, Homo sapien
gaagtgagggggagaacttgtggag

SEQ ID NO: 1400883 - DNA, 25 bp, Homo sapien
tgagggggagaacttgtggagttaa

SEQ ID NO: 1400884 - DNA, 25 bp, Homo sapien
gctgtggtgttcctagagttggtac

SEQ ID NO: 1400885 - DNA, 25 bp, Homo sapien
ctagagttggtacatacacaactgg

SEQ ID NO: 1400886 - DNA, 25 bp, Homo sapien
ggtgttcctagagttggtacataca

SEQ ID NO: 1400887 - DNA, 25 bp, Homo sapien
gttcctagagttggtacatacacaa

SEQ ID NO: 1400888 - DNA, 25 bp, Homo sapien
taggaagatggaagctgttgatgcc

SEQ ID NO: 1400889 - DNA, 25 bp, Homo sapien
gtaagagccagtgaaccgcttgagg

SEQ ID NO: 1400890 - DNA, 25 bp, Homo sapien
gaggatggcggaatcttcacagtga

SEQ ID NO: 1400891 - DNA, 25 bp, Homo sapien
gcaaagagggtcaagagcaggatct

SEQ ID NO: 1400892 - DNA, 25 bp, Homo sapien
taccaagatggatgggaaagcacca

SEQ ID NO: 1400893 - DNA, 25 bp, Homo sapien
accaagatggatgggaaagcaccaa

SEQ ID NO: 1400894 - DNA, 25 bp, Homo sapien
tataccaagatggatgggaaagcac

SEQ ID NO: 1400895 - DNA, 25 bp, Homo sapien
ctttataccaagatggatgggaaag

SEQ ID NO: 1400896 - DNA, 25 bp, Homo sapien
cttttttttctctatacattctgag

SEQ ID NO: 1400897 - DNA, 25 bp, Homo sapien
ctagtaatgaactatagaaatgatc

SEQ ID NO: 1400898 - DNA, 25 bp, Homo sapien
acttctctagtaatgaactatagaa

SEQ ID NO: 1400899 - DNA, 25 bp, Homo sapien
tttttttctctatacattctgagaa

SEQ ID NO: 1400900 - DNA, 25 bp, Homo sapien
tcttacagagtaaatggccaggcca

SEQ ID NO: 1400901 - DNA, 25 bp, Homo sapien
cactttgactggtgagtacacagga

SEQ ID NO: 1400902 - DNA, 25 bp, Homo sapien
gaagtgaagttgaccactcttacag

SEQ ID NO: 1400903 - DNA, 25 bp, Homo sapien
tatggccagcgaccactagaactgg

SEQ ID NO: 1400904 - DNA, 25 bp, Homo sapien
tggctaagaaccaattctgactggt

SEQ ID NO: 1400905 - DNA, 25 bp, Homo sapien
cccatagactgaggtgtcagccaca

SEQ ID NO: 1400906 - DNA, 25 bp, Homo sapien
tatctccccgatatcttgtttgtgg

SEQ ID NO: 1400907 - DNA, 25 bp, Homo sapien
cctctgactgcggtcgaaccttgat

SEQ ID NO: 1400908 - DNA, 25 bp, Homo sapien
tgtctagcaaagtattactgaactg

SEQ ID NO: 1400909 - DNA, 25 bp, Homo sapien
cacagcatgagggtcgctggaagaa

SEQ ID NO: 1400910 - DNA, 25 bp, Homo sapien
gactttacttgctggaatgtctagc

SEQ ID NO: 1400911 - DNA, 25 bp, Homo sapien
gacctgaaagactttacttgctgga

SEQ ID NO: 1400912 - DNA, 25 bp, Homo sapien
tgagggtattggtgagataagtctt

SEQ ID NO: 1400913 - DNA, 25 bp, Homo sapien
gcttgaatacagttgaattgagggt

SEQ ID NO: 1400914 - DNA, 25 bp, Homo sapien
gaggtcataactgagcattaatctt

SEQ ID NO: 1400915 - DNA, 25 bp, Homo sapien
aatcttgatgatgcattgaccacca

SEQ ID NO: 1400916 - DNA, 25 bp, Homo sapien
tactcctgggatgtcatgaaaaatc

SEQ ID NO: 1400917 - DNA, 25 bp, Homo sapien
tctcgatatgttttcactactcctg

SEQ ID NO: 1400918 - DNA, 25 bp, Homo sapien
actcctactccagtgacaatgtctg

SEQ ID NO: 1400919 - DNA, 25 bp, Homo sapien
gaaaaatcattgcagtccccggact

SEQ ID NO: 1400920 - DNA, 25 bp, Homo sapien
cagcctgggccatgtaagtatagtt

SEQ ID NO: 1400921 - DNA, 25 bp, Homo sapien
tccctggtccaatatgcagcaagtc

SEQ ID NO: 1400922 - DNA, 25 bp, Homo sapien
ggaatataatctgccatgcctggat

SEQ ID NO: 1400923 - DNA, 25 bp, Homo sapien
cttggtgtctggctcaatggcatgc

SEQ ID NO: 1400924 - DNA, 25 bp, Homo sapien
aacagtgaaggtaagagacatgccc

SEQ ID NO: 1400925 - DNA, 25 bp, Homo sapien
cactcgcaggtatgtcaccggtgct

SEQ ID NO: 1400926 - DNA, 25 bp, Homo sapien
tgcccaagggaaatgctgacagggt

SEQ ID NO: 1400927 - DNA, 25 bp, Homo sapien
tgtgtgtggaatttctctccgatac

SEQ ID NO: 1400928 - DNA, 25 bp, Homo sapien
gcagtacctgcaatggaaccagctt

SEQ ID NO: 1400929 - DNA, 25 bp, Homo sapien
cagttatggttgtttggttgactcc

SEQ ID NO: 1400930 - DNA, 25 bp, Homo sapien
caatgacggatgaattagggaaaca

SEQ ID NO: 1400931 - DNA, 25 bp, Homo sapien
gaacacgagaactcacgaaggcagc

SEQ ID NO: 1400932 - DNA, 25 bp, Homo sapien
gcactctggatagaagagttggagt

SEQ ID NO: 1400933 - DNA, 25 bp, Homo sapien
ggttggcactctggatagaagagtt

SEQ ID NO: 1400934 - DNA, 25 bp, Homo sapien
ctgttggtatggagtttgagctgag

SEQ ID NO: 1400935 - DNA, 25 bp, Homo sapien
gctctggttggcactctggatagaa

SEQ ID NO: 1400936 - DNA, 25 bp, Homo sapien
gagagttccaacaaattcccctcaa

SEQ ID NO: 1400937 - DNA, 25 bp, Homo sapien
tggcaaagttatgctctactgggag

SEQ ID NO: 1400938 - DNA, 25 bp, Homo sapien
cccagaggaactgttcatgcagtga

SEQ ID NO: 1400939 - DNA, 25 bp, Homo sapien
gtgaccttgatactggtcctgcctg

SEQ ID NO: 1400940 - DNA, 25 bp, Homo sapien
agctcactgcaacctctgcctccca

SEQ ID NO: 1400941 - DNA, 25 bp, Homo sapien
caccaccatgcctggctaatttttg

SEQ ID NO: 1400942 - DNA, 25 bp, Homo sapien
ccaggccagaatgcaatggcacaat

SEQ ID NO: 1400943 - DNA, 25 bp, Homo sapien
ttcagctcactgcaacctctgcctc

SEQ ID NO: 1400944 - DNA, 25 bp, Homo sapien
tttagtaggtatgttgccaaagtga

SEQ ID NO: 1400945 - DNA, 25 bp, Homo sapien
tagaacacttaacgaatttgcaggt

SEQ ID NO: 1400946 - DNA, 25 bp, Homo sapien
ttagtaggtatgttgccaaagtgag

SEQ ID NO: 1400947 - DNA, 25 bp, Homo sapien
taaatagaacacttaacgaatttgc

SEQ ID NO: 1400948 - DNA, 25 bp, Homo sapien
tggttccagatacagcaggtagtga

SEQ ID NO: 1400949 - DNA, 25 bp, Homo sapien
ggtgcctgacatgggaatccagttc

SEQ ID NO: 1400950 - DNA, 25 bp, Homo sapien
gataggcgactacagctccgtggta

SEQ ID NO: 1400951 - DNA, 25 bp, Homo sapien
aatcagctgcccagttgataggcga

SEQ ID NO: 1400952 - DNA, 25 bp, Homo sapien
ccagtggaatgtgagcccaggatta

SEQ ID NO: 1400953 - DNA, 25 bp, Homo sapien
tcccttttgctcatagaccagtgga

SEQ ID NO: 1400954 - DNA, 25 bp, Homo sapien
tggttactcccatgacataaactgg

SEQ ID NO: 1400955 - DNA, 25 bp, Homo sapien
tgggcactagatccaatacatccct

SEQ ID NO: 1400956 - DNA, 25 bp, Homo sapien
cttggtagctgtgatgagccgagtt

SEQ ID NO: 1400957 - DNA, 25 bp, Homo sapien
gctgcaaggatcctaacagccctta

SEQ ID NO: 1400958 - DNA, 25 bp, Homo sapien
cagcccttagctgaacaacttcaat

SEQ ID NO: 1400959 - DNA, 25 bp, Homo sapien
aggatcctaacagcccttagctgaa

SEQ ID NO: 1400960 - DNA, 25 bp, Homo sapien
tgactttgccagtatcttcatttac

SEQ ID NO: 1400961 - DNA, 25 bp, Homo sapien
ctgatggagaagtgaacgatggatt

SEQ ID NO: 1400962 - DNA, 25 bp, Homo sapien
tcctattaacaacagccacggtctg

SEQ ID NO: 1400963 - DNA, 25 bp, Homo sapien
gtgccatgaaccacagctgtgccaa

SEQ ID NO: 1400964 - DNA, 25 bp, Homo sapien
tggaatttaaatataccattgaatg

SEQ ID NO: 1400965 - DNA, 25 bp, Homo sapien
ggaatttaaatataccattgaatgc

SEQ ID NO: 1400966 - DNA, 25 bp, Homo sapien
ctggaatttaaatataccattgaat

SEQ ID NO: 1400967 - DNA, 25 bp, Homo sapien
attcattggaatcagtgtcattttc

SEQ ID NO: 1400968 - DNA, 25 bp, Homo sapien
cccatcttgtccttggcaatagcca

SEQ ID NO: 1400969 - DNA, 25 bp, Homo sapien
gccacaagtgtggtttgcccaatag

SEQ ID NO: 1400970 - DNA, 25 bp, Homo sapien
tcaatgtgccgaggagttgatgtgt

SEQ ID NO: 1400971 - DNA, 25 bp, Homo sapien
tgcccaatagtggtagctcgaagaa

SEQ ID NO: 1400972 - DNA, 25 bp, Homo sapien
gagccaagaaccctcacagtcacta

SEQ ID NO: 1400973 - DNA, 25 bp, Homo sapien
cagggtgacaatggcagaagccaac

SEQ ID NO: 1400974 - DNA, 25 bp, Homo sapien
tattttggaatgggcgtttggaaga

SEQ ID NO: 1400975 - DNA, 25 bp, Homo sapien
ggtgacaatggcagaagccaactgc

SEQ ID NO: 1400976 - DNA, 25 bp, Homo sapien
ttatcaatcagatcaagctccagct

SEQ ID NO: 1400977 - DNA, 25 bp, Homo sapien
tgaggtgggctgttgctggacccaa

SEQ ID NO: 1400978 - DNA, 25 bp, Homo sapien
cttgtatgtctgacaccctgaggtg

SEQ ID NO: 1400979 - DNA, 25 bp, Homo sapien
gatcatagacctccaaggtaaaaaa

SEQ ID NO: 1400980 - DNA, 25 bp, Homo sapien
ttctgcttccatgtaagtgatggtg

SEQ ID NO: 1400981 - DNA, 25 bp, Homo sapien
cagatccttccacaaggctaaatgt

SEQ ID NO: 1400982 - DNA, 25 bp, Homo sapien
tctgcttccatgtaagtgatggtga

SEQ ID NO: 1400983 - DNA, 25 bp, Homo sapien
taaccagatccttccacaaggctaa

SEQ ID NO: 1400984 - DNA, 25 bp, Homo sapien
acatcatctaccaggagcagttcca

SEQ ID NO: 1400985 - DNA, 25 bp, Homo sapien
ctttacatcagggtggttatagatg

SEQ ID NO: 1400986 - DNA, 25 bp, Homo sapien
tatagatggtggcattctcaggcac

SEQ ID NO: 1400987 - DNA, 25 bp, Homo sapien
tctcaggcactacagttacatcatc

SEQ ID NO: 1400988 - DNA, 25 bp, Homo sapien
caaaattgactccaatcagtacagt

SEQ ID NO: 1400989 - DNA, 25 bp, Homo sapien
gcccacaaaattgactccaatcagt

SEQ ID NO: 1400990 - DNA, 25 bp, Homo sapien
aatagcccacaaaattgactccaat

SEQ ID NO: 1400991 - DNA, 25 bp, Homo sapien
ttgactccaatcagtacagtccctt

SEQ ID NO: 1400992 - DNA, 25 bp, Homo sapien
gctagtgtttcattggaggatttcc

SEQ ID NO: 1400993 - DNA, 25 bp, Homo sapien
aatcttcgaaatgggctagtgtttc

SEQ ID NO: 1400994 - DNA, 25 bp, Homo sapien
ggctagtgtttcattggaggatttc

SEQ ID NO: 1400995 - DNA, 25 bp, Homo sapien
tgatttataatcttcgaaatgggct

SEQ ID NO: 1400996 - DNA, 25 bp, Homo sapien
tcaaactttctcctatgttgatcaa

SEQ ID NO: 1400997 - DNA, 25 bp, Homo sapien
ttctcctatgttgatcaaacactgc

SEQ ID NO: 1400998 - DNA, 25 bp, Homo sapien
tgaaattatcaaactttctcctatg

SEQ ID NO: 1400999 - DNA, 25 bp, Homo sapien
gttgatcaaacactgctagttccag

SEQ ID NO: 1401000 - DNA, 25 bp, Homo sapien
tgggcacaaatgaagcgaacctgca

SEQ ID NO: 1401001 - DNA, 25 bp, Homo sapien
tggactagggttcaggacacctgga

SEQ ID NO: 1401002 - DNA, 25 bp, Homo sapien
tactggagttactgacatactggca

SEQ ID NO: 1401003 - DNA, 25 bp, Homo sapien
caaaacctctacagctggactaggg

SEQ ID NO: 1401004 - DNA, 25 bp, Homo sapien
ggcagccacacttgtgctattccaa

SEQ ID NO: 1401005 - DNA, 25 bp, Homo sapien
ttcacagactgccatgtcaccaatg

SEQ ID NO: 1401006 - DNA, 25 bp, Homo sapien
caggcattggatccggtagatgtac

SEQ ID NO: 1401007 - DNA, 25 bp, Homo sapien
ttgttcccctaaatccaggcattgg

SEQ ID NO: 1401008 - DNA, 25 bp, Homo sapien
taattcctgataggttagggaattc

SEQ ID NO: 1401009 - DNA, 25 bp, Homo sapien
aagaaattaattcctgataggttag

SEQ ID NO: 1401010 - DNA, 25 bp, Homo sapien
cctgataggttagggaattcaataa

SEQ ID NO: 1401011 - DNA, 25 bp, Homo sapien
agaaattaattcctgataggttagg

SEQ ID NO: 1401012 - DNA, 25 bp, Homo sapien
ggaacaatgcattggtccaggtctt

SEQ ID NO: 1401013 - DNA, 25 bp, Homo sapien
ttagctgcgatatgtgtactggaac

SEQ ID NO: 1401014 - DNA, 25 bp, Homo sapien
gagtatggccaagagatttagctgc

SEQ ID NO: 1401015 - DNA, 25 bp, Homo sapien
cacttactgttaccagagtatggcc

SEQ ID NO: 1401016 - DNA, 25 bp, Homo sapien
caatgggtatttctataatctggcc

SEQ ID NO: 1401017 - DNA, 25 bp, Homo sapien
tcagcatgaaatggtaacagttcca

SEQ ID NO: 1401018 - DNA, 25 bp, Homo sapien
tccttgtttatccatgttcagatcc

SEQ ID NO: 1401019 - DNA, 25 bp, Homo sapien
tgtgaatgccatggcttctttggtc

SEQ ID NO: 1401020 - DNA, 25 bp, Homo sapien
gggattttgtacatctcgggccaaa

SEQ ID NO: 1401021 - DNA, 25 bp, Homo sapien
taatttctccatatcgaaagggatt

SEQ ID NO: 1401022 - DNA, 25 bp, Homo sapien
ctccatatcgaaagggattttgtac

SEQ ID NO: 1401023 - DNA, 25 bp, Homo sapien
tctcgggccaaaacagtactattcc

SEQ ID NO: 1401024 - DNA, 25 bp, Homo sapien
gtccaggtaaagttgccactgccac

SEQ ID NO: 1401025 - DNA, 25 bp, Homo sapien
cactcctttcgtggttactatgacc

SEQ ID NO: 1401026 - DNA, 25 bp, Homo sapien
ctgcagtcaccactcctttcgtggt

SEQ ID NO: 1401027 - DNA, 25 bp, Homo sapien
ggttactatgaccactgtttcatta

SEQ ID NO: 1401028 - DNA, 25 bp, Homo sapien
cgatataacattcccataggatgat

SEQ ID NO: 1401029 - DNA, 25 bp, Homo sapien
tactttataacgatataacattccc

SEQ ID NO: 1401030 - DNA, 25 bp, Homo sapien
tgccagaaatttgggtgtaagcatg

SEQ ID NO: 1401031 - DNA, 25 bp, Homo sapien
aatttgggtgtaagcatgatgggaa

SEQ ID NO: 1401032 - DNA, 25 bp, Homo sapien
gaatttgctgtttatctgtttattt

SEQ ID NO: 1401033 - DNA, 25 bp, Homo sapien
gatggaggtcagggatgcatttatt

SEQ ID NO: 1401034 - DNA, 25 bp, Homo sapien
tggaggtcagggatgcatttattac

SEQ ID NO: 1401035 - DNA, 25 bp, Homo sapien
ctggtaaatgatggaggtcagggat

SEQ ID NO: 1401036 - DNA, 25 bp, Homo sapien
ggtaaatgatggaggtcagggatgc

SEQ ID NO: 1401037 - DNA, 25 bp, Homo sapien
ctttcagggcttttactatatggta

SEQ ID NO: 1401038 - DNA, 25 bp, Homo sapien
tccattcacggtagttagttgctct

SEQ ID NO: 1401039 - DNA, 25 bp, Homo sapien
gaaagtcgtatgtaatcctgagatt

SEQ ID NO: 1401040 - DNA, 25 bp, Homo sapien
ccttaggaaagtcgtatgtaatcct

SEQ ID NO: 1401041 - DNA, 25 bp, Homo sapien
tgtgctgcttttatcaaagacgtct

SEQ ID NO: 1401042 - DNA, 25 bp, Homo sapien
caaagacgtctactgtaatgacata

SEQ ID NO: 1401043 - DNA, 25 bp, Homo sapien
tctagactccatcggtttccaggtt

SEQ ID NO: 1401044 - DNA, 25 bp, Homo sapien
gacatatacctgtcccacctctaga

SEQ ID NO: 1401045 - DNA, 25 bp, Homo sapien
tatatggtgcaatttgggagtccag

SEQ ID NO: 1401046 - DNA, 25 bp, Homo sapien
taaaaatccaggctctacaacatat

SEQ ID NO: 1401047 - DNA, 25 bp, Homo sapien
ggagtccagacacagatcgcatatg

SEQ ID NO: 1401048 - DNA, 25 bp, Homo sapien
ccagacacagatcgcatatgaacat

SEQ ID NO: 1401049 - DNA, 25 bp, Homo sapien
ttagtctggcccagttgtgaggcag

SEQ ID NO: 1401050 - DNA, 25 bp, Homo sapien
gacaagattagtctggcccagttgt

SEQ ID NO: 1401051 - DNA, 25 bp, Homo sapien
tggacaaagacaagattagtctggc

SEQ ID NO: 1401052 - DNA, 25 bp, Homo sapien
agtctggcccagttgtgaggcagtc

SEQ ID NO: 1401053 - DNA, 25 bp, Homo sapien
tggctgttttgtcatccagtatagc

SEQ ID NO: 1401054 - DNA, 25 bp, Homo sapien
ggctgttttgtcatccagtatagcc

SEQ ID NO: 1401055 - DNA, 25 bp, Homo sapien
catggctgttttgtcatccagtata

SEQ ID NO: 1401056 - DNA, 25 bp, Homo sapien
gctgttttgtcatccagtatagcca

SEQ ID NO: 1401057 - DNA, 25 bp, Homo sapien
caactctatggtcttgcaattccag

SEQ ID NO: 1401058 - DNA, 25 bp, Homo sapien
aattccagtatataatgttccaggg

SEQ ID NO: 1401059 - DNA, 25 bp, Homo sapien
gagacccgttaagtgcaactctatg

SEQ ID NO: 1401060 - DNA, 25 bp, Homo sapien
ctttctcagaatgagacccgttaag

SEQ ID NO: 1401061 - DNA, 25 bp, Homo sapien
tatcatgggatggtataagaaatat

SEQ ID NO: 1401062 - DNA, 25 bp, Homo sapien
taaatatcatgggatggtataagaa

SEQ ID NO: 1401063 - DNA, 25 bp, Homo sapien
tccaaaacaagcagacgtattaagg

SEQ ID NO: 1401064 - DNA, 25 bp, Homo sapien
aagcagacgtattaaggctgctgcc

SEQ ID NO: 1401065 - DNA, 25 bp, Homo sapien
tattgggggagcatattctgcttcg

SEQ ID NO: 1401066 - DNA, 25 bp, Homo sapien
catctcagctatatatattggggga

SEQ ID NO: 1401067 - DNA, 25 bp, Homo sapien
ttctgcttcggagtatttaagaatc

SEQ ID NO: 1401068 - DNA, 25 bp, Homo sapien
atcccagacactaaaatcacatctc

SEQ ID NO: 1401069 - DNA, 25 bp, Homo sapien
tcatccctgccaaactactaaaagt

SEQ ID NO: 1401070 - DNA, 25 bp, Homo sapien
gactcgttgtcctgggcaatgctcc

SEQ ID NO: 1401071 - DNA, 25 bp, Homo sapien
cttctcttgctgactcgttgtcctg

SEQ ID NO: 1401072 - DNA, 25 bp, Homo sapien
ctgggcaatgctccactcaaacatc

SEQ ID NO: 1401073 - DNA, 25 bp, Homo sapien
catcagttccagtggcgaatcatct

SEQ ID NO: 1401074 - DNA, 25 bp, Homo sapien
ttcccgggcccgagatacaatttca

SEQ ID NO: 1401075 - DNA, 25 bp, Homo sapien
tcaaccttaacatcacagcgtagct

SEQ ID NO: 1401076 - DNA, 25 bp, Homo sapien
tcaatgctgtttatcacatcaacct

SEQ ID NO: 1401077 - DNA, 25 bp, Homo sapien
ctttttgggaacacaaggtgccatt

SEQ ID NO: 1401078 - DNA, 25 bp, Homo sapien
cagtaactgcatcatgatgggtgga

SEQ ID NO: 1401079 - DNA, 25 bp, Homo sapien
tactgctgaggcgtatcggttgcgt

SEQ ID NO: 1401080 - DNA, 25 bp, Homo sapien
catataaaggctcaacagtaactgc

SEQ ID NO: 1401081 - DNA, 25 bp, Homo sapien
cctgtggcacgttaagtttgttggc

SEQ ID NO: 1401082 - DNA, 25 bp, Homo sapien
agaagaaaaagagcccgaagcctcg

SEQ ID NO: 1401083 - DNA, 25 bp, Homo sapien
tggctctcggccgaagggtagcaac

SEQ ID NO: 1401084 - DNA, 25 bp, Homo sapien
acaacaacaggaggcggtgtagacg

SEQ ID NO: 1401085 - DNA, 25 bp, Homo sapien
gcgactgccaggtctcgggttcccg

SEQ ID NO: 1401086 - DNA, 25 bp, Homo sapien
ttcccgctcaactacagccggctca

SEQ ID NO: 1401087 - DNA, 25 bp, Homo sapien
gtctcgggttcccgctcaactacag

SEQ ID NO: 1401088 - DNA, 25 bp, Homo sapien
ggcgactgccaggtctcgggttccc

SEQ ID NO: 1401089 - DNA, 25 bp, Homo sapien
gacactggcgtctcaaaagcagctt

SEQ ID NO: 1401090 - DNA, 25 bp, Homo sapien
tagaagtcagattcacgtccggcct

SEQ ID NO: 1401091 - DNA, 25 bp, Homo sapien
gctcgactttgtcaagggaaccgtg

SEQ ID NO: 1401092 - DNA, 25 bp, Homo sapien
tgcagtctctgggataaacagctcg

SEQ ID NO: 1401093 - DNA, 25 bp, Homo sapien
tgcaggatgtacacctaacagacct

SEQ ID NO: 1401094 - DNA, 25 bp, Homo sapien
taagctgcaggatgtacacctaaca

SEQ ID NO: 1401095 - DNA, 25 bp, Homo sapien
agccaataagctgcaggatgtacac

SEQ ID NO: 1401096 - DNA, 25 bp, Homo sapien
caataagctgcaggatgtacaccta

SEQ ID NO: 1401097 - DNA, 25 bp, Homo sapien
tcattcaggtcaagcagggtctggt

SEQ ID NO: 1401098 - DNA, 25 bp, Homo sapien
acatctcattcaggtcaagcagggt

SEQ ID NO: 1401099 - DNA, 25 bp, Homo sapien
attcaggtcaagcagggtctggtcc

SEQ ID NO: 1401100 - DNA, 25 bp, Homo sapien
tctcattcaggtcaagcagggtctg

SEQ ID NO: 1401101 - DNA, 25 bp, Homo sapien
taaaagggcgctcacagttaagtca

SEQ ID NO: 1401102 - DNA, 25 bp, Homo sapien
ggctcaccggagtttgaacattgca

SEQ ID NO: 1401103 - DNA, 25 bp, Homo sapien
caactcagagaaggtgatggcaaca

SEQ ID NO: 1401104 - DNA, 25 bp, Homo sapien
actgaagttgtaggtgttgctgcac

SEQ ID NO: 1401105 - DNA, 25 bp, Homo sapien
gaaatcaacattctaactgccccaa

SEQ ID NO: 1401106 - DNA, 25 bp, Homo sapien
gaaacttcacaatggtcaacttcac

SEQ ID NO: 1401107 - DNA, 25 bp, Homo sapien
cagtcagtgcccaagtgaaagagca

SEQ ID NO: 1401108 - DNA, 25 bp, Homo sapien
gttttctcactataatctctcaggc

SEQ ID NO: 1401109 - DNA, 25 bp, Homo sapien
tcagtcacacagatcatgcagcgtt

SEQ ID NO: 1401110 - DNA, 25 bp, Homo sapien
gcagcgttagcttcagctcattaga

SEQ ID NO: 1401111 - DNA, 25 bp, Homo sapien
cgctcaagttggctgtagagacgct

SEQ ID NO: 1401112 - DNA, 25 bp, Homo sapien
gaaagcaggcggtttcgctcaagtt

SEQ ID NO: 1401113 - DNA, 25 bp, Homo sapien
cagattgactgggaagctagagacc

SEQ ID NO: 1401114 - DNA, 25 bp, Homo sapien
caaatacatctgactagcacaggga

SEQ ID NO: 1401115 - DNA, 25 bp, Homo sapien
tcacagtgactagaaggcccataca

SEQ ID NO: 1401116 - DNA, 25 bp, Homo sapien
cattgacaaacactatacaggctga

SEQ ID NO: 1401117 - DNA, 25 bp, Homo sapien
cgcacccagccgcgttatcaggatc

SEQ ID NO: 1401118 - DNA, 25 bp, Homo sapien
gcacccagccgcgttatcaggatct

SEQ ID NO: 1401119 - DNA, 25 bp, Homo sapien
acccagccgcgttatcaggatcttt

SEQ ID NO: 1401120 - DNA, 25 bp, Homo sapien
accgcacccagccgcgttatcagga

SEQ ID NO: 1401121 - DNA, 25 bp, Homo sapien
tcaatgatggtaacaaggaagggca

SEQ ID NO: 1401122 - DNA, 25 bp, Homo sapien
caggctcaagtaacacaggatggct

SEQ ID NO: 1401123 - DNA, 25 bp, Homo sapien
ggctcacactagtcataccgcaagg

SEQ ID NO: 1401124 - DNA, 25 bp, Homo sapien
taaagctgccaaacagaataggtct

SEQ ID NO: 1401125 - DNA, 25 bp, Homo sapien
tcctcacatcaagtggccaggcctt

SEQ ID NO: 1401126 - DNA, 25 bp, Homo sapien
tctgaagaaaacaatgtaggcagca

SEQ ID NO: 1401127 - DNA, 25 bp, Homo sapien
tggcttcggccctccaagtagatag

SEQ ID NO: 1401128 - DNA, 25 bp, Homo sapien
tatttagtgctatctctcctgccac

SEQ ID NO: 1401129 - DNA, 25 bp, Homo sapien
cattcccactaggatcaatctcgtc

SEQ ID NO: 1401130 - DNA, 25 bp, Homo sapien
acttgagagtaggaatggtgcctcc

SEQ ID NO: 1401131 - DNA, 25 bp, Homo sapien
tagtagattctaagcaacttgagag

SEQ ID NO: 1401132 - DNA, 25 bp, Homo sapien
taatctcaaaggctatgcggcagta

SEQ ID NO: 1401133 - DNA, 25 bp, Homo sapien
catctgacctgcatagcacactaca

SEQ ID NO: 1401134 - DNA, 25 bp, Homo sapien
tcccaagaagctacaggcagtacag

SEQ ID NO: 1401135 - DNA, 25 bp, Homo sapien
gccaaatttagtgaggacatctgac

SEQ ID NO: 1401136 - DNA, 25 bp, Homo sapien
ggacatctgacctgcatagcacact

SEQ ID NO: 1401137 - DNA, 25 bp, Homo sapien
cctgctgggaaactaaagtactaag

SEQ ID NO: 1401138 - DNA, 25 bp, Homo sapien
tacataccctgctgggaaactaaag

SEQ ID NO: 1401139 - DNA, 25 bp, Homo sapien
gaacaacacttacgtgcttggatta

SEQ ID NO: 1401140 - DNA, 25 bp, Homo sapien
tacgtgcttggattagtataattca

SEQ ID NO: 1401141 - DNA, 25 bp, Homo sapien
tcaatgacacaaatgcagggtggca

SEQ ID NO: 1401142 - DNA, 25 bp, Homo sapien
tcttagggacagcaacagctttgtc

SEQ ID NO: 1401143 - DNA, 25 bp, Homo sapien
cacacacaaaagtggctttgattac

SEQ ID NO: 1401144 - DNA, 25 bp, Homo sapien
cactctggtagaatcagatcagctg

SEQ ID NO: 1401145 - DNA, 25 bp, Homo sapien
ccatcctaatgccttggggaccagc

SEQ ID NO: 1401146 - DNA, 25 bp, Homo sapien
ccaggctgacccaaatggaatccag

SEQ ID NO: 1401147 - DNA, 25 bp, Homo sapien
gaatccagagcgagagtggggcctt

SEQ ID NO: 1401148 - DNA, 25 bp, Homo sapien
taagttgctttttgctcccccatcc

SEQ ID NO: 1401149 - DNA, 25 bp, Homo sapien
catgtcattgagggcgtggtccagc

SEQ ID NO: 1401150 - DNA, 25 bp, Homo sapien
atgtcattgagggcgtggtccagct

SEQ ID NO: 1401151 - DNA, 25 bp, Homo sapien
gctaccgatctctcagcaaactcag

SEQ ID NO: 1401152 - DNA, 25 bp, Homo sapien
caggtcatcaattgtcttttccagc

SEQ ID NO: 1401153 - DNA, 25 bp, Homo sapien
tttccagcttggctaccgatctctc

SEQ ID NO: 1401154 - DNA, 25 bp, Homo sapien
gcttggctaccgatctctcagcaaa

SEQ ID NO: 1401155 - DNA, 25 bp, Homo sapien
ctccttgagtttatcagtaagaatc

SEQ ID NO: 1401156 - DNA, 25 bp, Homo sapien
taagaatcttgatttcttcctcata

SEQ ID NO: 1401157 - DNA, 25 bp, Homo sapien
gagtttatcagtaagaatcttgatt

SEQ ID NO: 1401158 - DNA, 25 bp, Homo sapien
tttatcagtaagaatcttgatttct

SEQ ID NO: 1401159 - DNA, 25 bp, Homo sapien
tattattcagatcaacccaaggagg

SEQ ID NO: 1401160 - DNA, 25 bp, Homo sapien
tgactgaaacacacccacatgatgg

SEQ ID NO: 1401161 - DNA, 25 bp, Homo sapien
tggtccaagagtaagagcaaggcct

SEQ ID NO: 1401162 - DNA, 25 bp, Homo sapien
tgatgagcaagagtagtagcacccc

SEQ ID NO: 1401163 - DNA, 25 bp, Homo sapien
gcctcaagagacttgaggttgttgg

SEQ ID NO: 1401164 - DNA, 25 bp, Homo sapien
tcaagagacttgaggttgttggtga

SEQ ID NO: 1401165 - DNA, 25 bp, Homo sapien
ctgagcctcaagagacttgaggttg

SEQ ID NO: 1401166 - DNA, 25 bp, Homo sapien
agagacttgaggttgttggtgacat

SEQ ID NO: 1401167 - DNA, 25 bp, Homo sapien
gaacaagtcataactgctacctggg

SEQ ID NO: 1401168 - DNA, 25 bp, Homo sapien
catagaacgtgtcaggagctagacc

SEQ ID NO: 1401169 - DNA, 25 bp, Homo sapien
cctgtggagaggcagtgaagcaact

SEQ ID NO: 1401170 - DNA, 25 bp, Homo sapien
gagatgttcccaagtaacctgagca

SEQ ID NO: 1401171 - DNA, 25 bp, Homo sapien
ttgctgtgggcttaatggttagtac

SEQ ID NO: 1401172 - DNA, 25 bp, Homo sapien
cttgctgtgggcttaatggttagta

SEQ ID NO: 1401173 - DNA, 25 bp, Homo sapien
tggtccatcagtctaatctgctcat

SEQ ID NO: 1401174 - DNA, 25 bp, Homo sapien
gtccatcagtctaatctgctcatcc

SEQ ID NO: 1401175 - DNA, 25 bp, Homo sapien
gttctggtccatcagtctaatctgc

SEQ ID NO: 1401176 - DNA, 25 bp, Homo sapien
ccatcagtctaatctgctcatccat

SEQ ID NO: 1401177 - DNA, 25 bp, Homo sapien
taaggttccctagcagattggcaaa

SEQ ID NO: 1401178 - DNA, 25 bp, Homo sapien
taatcaaggcccagaaggtaccgac

SEQ ID NO: 1401179 - DNA, 25 bp, Homo sapien
tgtcacttgtcactagtcaggagaa

SEQ ID NO: 1401180 - DNA, 25 bp, Homo sapien
taccgacgggagagcagttaatatc

SEQ ID NO: 1401181 - DNA, 25 bp, Homo sapien
cagctcagctcgttcctctgtgcgt

SEQ ID NO: 1401182 - DNA, 25 bp, Homo sapien
ctcgttcctctgtgcgttccaagtc

SEQ ID NO: 1401183 - DNA, 25 bp, Homo sapien
tcctctgtgcgttccaagtctcctt

SEQ ID NO: 1401184 - DNA, 25 bp, Homo sapien
tcaatgatcaccaacttacgagcca

SEQ ID NO: 1401185 - DNA, 25 bp, Homo sapien
tacgagagggactaacagaaggtca

SEQ ID NO: 1401186 - DNA, 25 bp, Homo sapien
gccgatacgagagggactaacagaa

SEQ ID NO: 1401187 - DNA, 25 bp, Homo sapien
gagggactaacagaaggtcacttac

SEQ ID NO: 1401188 - DNA, 25 bp, Homo sapien
taaaaggccgatacgagagggacta

SEQ ID NO: 1401189 - DNA, 25 bp, Homo sapien
tctgcaatgtgcttagcttctttga

SEQ ID NO: 1401190 - DNA, 25 bp, Homo sapien
cttctgcaatgtgcttagcttcttt

SEQ ID NO: 1401191 - DNA, 25 bp, Homo sapien
ctcttcatacttcctatctgcctct

SEQ ID NO: 1401192 - DNA, 25 bp, Homo sapien
tctgcctcttctgcaatgtgcttag

SEQ ID NO: 1401193 - DNA, 25 bp, Homo sapien
tgagccgagatcgagccattgcact

SEQ ID NO: 1401194 - DNA, 25 bp, Homo sapien
agccgagatcgagccattgcactcc

SEQ ID NO: 1401195 - DNA, 25 bp, Homo sapien
tgaactcagtaggtggaggttgcgg

SEQ ID NO: 1401196 - DNA, 25 bp, Homo sapien
cgagatcgagccattgcactccagc

SEQ ID NO: 1401197 - DNA, 25 bp, Homo sapien
cttcttccagcttttgcagggcagt

SEQ ID NO: 1401198 - DNA, 25 bp, Homo sapien
ttccagcttttgcagggcagtggcc

SEQ ID NO: 1401199 - DNA, 25 bp, Homo sapien
tcttccagcttttgcagggcagtgg

SEQ ID NO: 1401200 - DNA, 25 bp, Homo sapien
tttgcagggcagtggccaggcgctc

SEQ ID NO: 1401201 - DNA, 25 bp, Homo sapien
agctggatcctacggttcaaggagg

SEQ ID NO: 1401202 - DNA, 25 bp, Homo sapien
ttcttcaaccagctggatcctacgg

SEQ ID NO: 1401203 - DNA, 25 bp, Homo sapien
caaccagctggatcctacggttcaa

SEQ ID NO: 1401204 - DNA, 25 bp, Homo sapien
tggatcctacggttcaaggaggcca

SEQ ID NO: 1401205 - DNA, 25 bp, Homo sapien
cagacgaaaaatacaactagattta

SEQ ID NO: 1401206 - DNA, 25 bp, Homo sapien
cccctcagacgaaaaatacaactag

SEQ ID NO: 1401207 - DNA, 25 bp, Homo sapien
ctcagacgaaaaatacaactagatt

SEQ ID NO: 1401208 - DNA, 25 bp, Homo sapien
gacgaaaaatacaactagatttaga

SEQ ID NO: 1401209 - DNA, 25 bp, Homo sapien
gatggatcctagaacaccagtgtct

SEQ ID NO: 1401210 - DNA, 25 bp, Homo sapien
gaccaatttccaggccgagagcaga

SEQ ID NO: 1401211 - DNA, 25 bp, Homo sapien
tgctgaccttacactcccgcagttg

SEQ ID NO: 1401212 - DNA, 25 bp, Homo sapien
gatccacaggtggacctcagatcca

SEQ ID NO: 1401213 - DNA, 25 bp, Homo sapien
ccatcctccgagatcccaacttcat

SEQ ID NO: 1401214 - DNA, 25 bp, Homo sapien
catcctccgagatcccaacttcatc

SEQ ID NO: 1401215 - DNA, 25 bp, Homo sapien
ctcaacttctcgctggaggcgctca

SEQ ID NO: 1401216 - DNA, 25 bp, Homo sapien
ggatcttgcgcttcaccgcctcgat

SEQ ID NO: 1401217 - DNA, 25 bp, Homo sapien
cagaacctggatcttgcgcttcacc

SEQ ID NO: 1401218 - DNA, 25 bp, Homo sapien
tcttgcgcttcaccgcctcgatggt

SEQ ID NO: 1401219 - DNA, 25 bp, Homo sapien
tctcacccttacttccgcctgctac

SEQ ID NO: 1401220 - DNA, 25 bp, Homo sapien
cctctcacccttacttccgcctgct

SEQ ID NO: 1401221 - DNA, 25 bp, Homo sapien
ctctcacccttacttccgcctgcta

SEQ ID NO: 1401222 - DNA, 25 bp, Homo sapien
tagaagtctgatcaagatgtggcag

SEQ ID NO: 1401223 - DNA, 25 bp, Homo sapien
taccctgatggcctaagaatttttc

SEQ ID NO: 1401224 - DNA, 25 bp, Homo sapien
gtgacactttgtcatctgggtgctg

SEQ ID NO: 1401225 - DNA, 25 bp, Homo sapien
cagcagggggcactattgtacctcc

SEQ ID NO: 1401226 - DNA, 25 bp, Homo sapien
caaaaccaggctgttgcaagattta

SEQ ID NO: 1401227 - DNA, 25 bp, Homo sapien
tgcaagatttaacccacaggtggta

SEQ ID NO: 1401228 - DNA, 25 bp, Homo sapien
caggctgttgcaagatttaacccac

SEQ ID NO: 1401229 - DNA, 25 bp, Homo sapien
tctctgagggtactttctgacttgg

SEQ ID NO: 1401230 - DNA, 25 bp, Homo sapien
tgagtagaccacatctaggtgaggg

SEQ ID NO: 1401231 - DNA, 25 bp, Homo sapien
caagcccacatactagccgtttcag

SEQ ID NO: 1401232 - DNA, 25 bp, Homo sapien
gccgtttcagcctaagagcagaccc

SEQ ID NO: 1401233 - DNA, 25 bp, Homo sapien
agcagacccagattgatgttaccca

SEQ ID NO: 1401234 - DNA, 25 bp, Homo sapien
tagagtcccctctctttgtccaggt

SEQ ID NO: 1401235 - DNA, 25 bp, Homo sapien
ttagagtcccctctctttgtccagg

SEQ ID NO: 1401236 - DNA, 25 bp, Homo sapien
agagtcccctctctttgtccaggtc

SEQ ID NO: 1401237 - DNA, 25 bp, Homo sapien
tgtgtagattaaacccatcctccat

SEQ ID NO: 1401238 - DNA, 25 bp, Homo sapien
tatgtgtagattaaacccatcctcc

SEQ ID NO: 1401239 - DNA, 25 bp, Homo sapien
gtgtagattaaacccatcctccatc

SEQ ID NO: 1401240 - DNA, 25 bp, Homo sapien
ctatatgtgtagattaaacccatcc

SEQ ID NO: 1401241 - DNA, 25 bp, Homo sapien
atcagcagccttcttctctgccagt

SEQ ID NO: 1401242 - DNA, 25 bp, Homo sapien
gcagccttcttctctgccagttcca

SEQ ID NO: 1401243 - DNA, 25 bp, Homo sapien
cagccttcttctctgccagttccag

SEQ ID NO: 1401244 - DNA, 25 bp, Homo sapien
cagcagccttcttctctgccagttc

SEQ ID NO: 1401245 - DNA, 25 bp, Homo sapien
ggcatccttcaaagcttcagaatac

SEQ ID NO: 1401246 - DNA, 25 bp, Homo sapien
ctcctgggcatccttcaaagcttca

SEQ ID NO: 1401247 - DNA, 25 bp, Homo sapien
tgggcatccttcaaagcttcagaat

SEQ ID NO: 1401248 - DNA, 25 bp, Homo sapien
cttcaaagcttcagaatacttgtcc

SEQ ID NO: 1401249 - DNA, 25 bp, Homo sapien
tgcatggctgccagctcatcctcca

SEQ ID NO: 1401250 - DNA, 25 bp, Homo sapien
ttctgcatggctgccagctcatcct

SEQ ID NO: 1401251 - DNA, 25 bp, Homo sapien
tcttctgcatggctgccagctcatc

SEQ ID NO: 1401252 - DNA, 25 bp, Homo sapien
ttcttctgcatggctgccagctcat

SEQ ID NO: 1401253 - DNA, 25 bp, Homo sapien
cagacatactgtggctcactgactt

SEQ ID NO: 1401254 - DNA, 25 bp, Homo sapien
ccatttctacttaaattcagcagac

SEQ ID NO: 1401255 - DNA, 25 bp, Homo sapien
aagtcaagggttcttccaaaacatg

SEQ ID NO: 1401256 - DNA, 25 bp, Homo sapien
ttcctctagaagtcaagggttcttc

SEQ ID NO: 1401257 - DNA, 25 bp, Homo sapien
gatgagagagatcaatgccagtgcc

SEQ ID NO: 1401258 - DNA, 25 bp, Homo sapien
cagatgagagagatcaatgccagtg

SEQ ID NO: 1401259 - DNA, 25 bp, Homo sapien
gcagatgagagagatcaatgccagt

SEQ ID NO: 1401260 - DNA, 25 bp, Homo sapien
tagcagatgagagagatcaatgcca

SEQ ID NO: 1401261 - DNA, 25 bp, Homo sapien
tctgcccgatccagagcattctcct

SEQ ID NO: 1401262 - DNA, 25 bp, Homo sapien
gcccgatccagagcattctccttgt

SEQ ID NO: 1401263 - DNA, 25 bp, Homo sapien
ttcagcttgctctgcccgatccaga

SEQ ID NO: 1401264 - DNA, 25 bp, Homo sapien
cttcagcttgctctgcccgatccag

SEQ ID NO: 1401265 - DNA, 25 bp, Homo sapien
agcagtggctgttggtaggctcacc

SEQ ID NO: 1401266 - DNA, 25 bp, Homo sapien
tggctgttggtaggctcacctgtga

SEQ ID NO: 1401267 - DNA, 25 bp, Homo sapien
gcagtggctgttggtaggctcacct

SEQ ID NO: 1401268 - DNA, 25 bp, Homo sapien
agtggctgttggtaggctcacctgt

SEQ ID NO: 1401269 - DNA, 25 bp, Homo sapien
ctgtgctcatagctccaccttttgt

SEQ ID NO: 1401270 - DNA, 25 bp, Homo sapien
tccaccttttgttcctaatatggtc

SEQ ID NO: 1401271 - DNA, 25 bp, Homo sapien
tctgtgctcatagctccaccttttg

SEQ ID NO: 1401272 - DNA, 25 bp, Homo sapien
caccttttgttcctaatatggtctt

SEQ ID NO: 1401273 - DNA, 25 bp, Homo sapien
ttccctcacagggatccagccggat

SEQ ID NO: 1401274 - DNA, 25 bp, Homo sapien
aggctccatcgtgggctccagaaga

SEQ ID NO: 1401275 - DNA, 25 bp, Homo sapien
gaagagaagacttatagttccccac

SEQ ID NO: 1401276 - DNA, 25 bp, Homo sapien
caggctgcgttctccaagggtcttc

SEQ ID NO: 1401277 - DNA, 25 bp, Homo sapien
taagtccctgacagatagcaagatc

SEQ ID NO: 1401278 - DNA, 25 bp, Homo sapien
gagtggaagtgctgtcttaagtccc

SEQ ID NO: 1401279 - DNA, 25 bp, Homo sapien
taaatcccactatgaccacaaggcg

SEQ ID NO: 1401280 - DNA, 25 bp, Homo sapien
cccaaatagcggcaaaggattaacg

SEQ ID NO: 1401281 - DNA, 25 bp, Homo sapien
aaagctttgcccatctgatttagtt

SEQ ID NO: 1401282 - DNA, 25 bp, Homo sapien
aaaagctttgcccatctgatttagt

SEQ ID NO: 1401283 - DNA, 25 bp, Homo sapien
tggccagtgccaattcctgtaccat

SEQ ID NO: 1401284 - DNA, 25 bp, Homo sapien
gctttttggccagtgccaattcctg

SEQ ID NO: 1401285 - DNA, 25 bp, Homo sapien
ctttttggccagtgccaattcctgt

SEQ ID NO: 1401286 - DNA, 25 bp, Homo sapien
gacagtgagtatgtgaatttcgcca

SEQ ID NO: 1401287 - DNA, 25 bp, Homo sapien
tacgggtttcttctctggcccaatg

SEQ ID NO: 1401288 - DNA, 25 bp, Homo sapien
tgcatccttagggtggcatacgggt

SEQ ID NO: 1401289 - DNA, 25 bp, Homo sapien
tgccatttgccacagacagtgagta

SEQ ID NO: 1401290 - DNA, 25 bp, Homo sapien
gagcaagactccgtcccaaggaaaa

SEQ ID NO: 1401291 - DNA, 25 bp, Homo sapien
gtaaaaactttctgggtgcaatggc

SEQ ID NO: 1401292 - DNA, 25 bp, Homo sapien
tcatgcctgtaatcccagcacttcg

SEQ ID NO: 1401293 - DNA, 25 bp, Homo sapien
cagcacttcgggaggctgaggcggg

SEQ ID NO: 1401294 - DNA, 25 bp, Homo sapien
aagaggctgatctcatttgctttga

SEQ ID NO: 1401295 - DNA, 25 bp, Homo sapien
gtaggcactaagaggctgatctcat

SEQ ID NO: 1401296 - DNA, 25 bp, Homo sapien
taagaggctgatctcatttgctttg

SEQ ID NO: 1401297 - DNA, 25 bp, Homo sapien
ctagtaggcactaagaggctgatct

SEQ ID NO: 1401298 - DNA, 25 bp, Homo sapien
cgcatctgttttcctcttgatgagc

SEQ ID NO: 1401299 - DNA, 25 bp, Homo sapien
tccgcatctgttttcctcttgatga

SEQ ID NO: 1401300 - DNA, 25 bp, Homo sapien
cccttccgcatctgttttcctcttg

SEQ ID NO: 1401301 - DNA, 25 bp, Homo sapien
catctgttttcctcttgatgagccc

SEQ ID NO: 1401302 - DNA, 25 bp, Homo sapien
aggtcaagctcaaaggtaaagggag

SEQ ID NO: 1401303 - DNA, 25 bp, Homo sapien
aagacagcagagtggaaaggtcaag

SEQ ID NO: 1401304 - DNA, 25 bp, Homo sapien
tggaaaggtcaagctcaaaggtaaa

SEQ ID NO: 1401305 - DNA, 25 bp, Homo sapien
gcagagtggaaaggtcaagctcaaa

SEQ ID NO: 1401306 - DNA, 25 bp, Homo sapien
ctgtcgaccgtcttcttaagtccca

SEQ ID NO: 1401307 - DNA, 25 bp, Homo sapien
cgtcttcttaagtcccatggccttt

SEQ ID NO: 1401308 - DNA, 25 bp, Homo sapien
gaccgtcttcttaagtcccatggcc

SEQ ID NO: 1401309 - DNA, 25 bp, Homo sapien
tcgaccgtcttcttaagtcccatgg

SEQ ID NO: 1401310 - DNA, 25 bp, Homo sapien
ctgcaagaaaaggtagttctgttga

SEQ ID NO: 1401311 - DNA, 25 bp, Homo sapien
gcaagaaaaggtagttctgttgatc

SEQ ID NO: 1401312 - DNA, 25 bp, Homo sapien
caagaaaaggtagttctgttgatct

SEQ ID NO: 1401313 - DNA, 25 bp, Homo sapien
tgcaagaaaaggtagttctgttgat

SEQ ID NO: 1401314 - DNA, 25 bp, Homo sapien
aactacattatacccttgttacatc

SEQ ID NO: 1401315 - DNA, 25 bp, Homo sapien
ctttcccagtaaaagatgcacttat

SEQ ID NO: 1401316 - DNA, 25 bp, Homo sapien
gaacacatatttgaatacctactgt

SEQ ID NO: 1401317 - DNA, 25 bp, Homo sapien
tatagtaaattgatctggaaacttc

SEQ ID NO: 1401318 - DNA, 25 bp, Homo sapien
gtaaccaaggtttcagtagtcatag

SEQ ID NO: 1401319 - DNA, 25 bp, Homo sapien
ctaggagttgattggccacctggcc

SEQ ID NO: 1401320 - DNA, 25 bp, Homo sapien
cagtctgaggagactgacaggctcc

SEQ ID NO: 1401321 - DNA, 25 bp, Homo sapien
gacaggctcctctgtttagttcagt

SEQ ID NO: 1401322 - DNA, 25 bp, Homo sapien
gagtatgtgtatggtcgtaggtcca

SEQ ID NO: 1401323 - DNA, 25 bp, Homo sapien
tggaggcaaatcctcatgccctata

SEQ ID NO: 1401324 - DNA, 25 bp, Homo sapien
catctatgagcaagggccacagtcc

SEQ ID NO: 1401325 - DNA, 25 bp, Homo sapien
gggtatgcacacagtcccaccaatt

SEQ ID NO: 1401326 - DNA, 25 bp, Homo sapien
ttaaataatttataaagtcagacca

SEQ ID NO: 1401327 - DNA, 25 bp, Homo sapien
taaataatttataaagtcagaccag

SEQ ID NO: 1401328 - DNA, 25 bp, Homo sapien
aataatttataaagtcagaccagtg

SEQ ID NO: 1401329 - DNA, 25 bp, Homo sapien
taatttataaagtcagaccagtgca

SEQ ID NO: 1401330 - DNA, 25 bp, Homo sapien
tgcacattgcaactgactggcttaa

SEQ ID NO: 1401331 - DNA, 25 bp, Homo sapien
taagaactctggatacaacgggaac

SEQ ID NO: 1401332 - DNA, 25 bp, Homo sapien
cacatctggtttaagtggagcacaa

SEQ ID NO: 1401333 - DNA, 25 bp, Homo sapien
tggcttaatctacggcaagagtcct

SEQ ID NO: 1401334 - DNA, 25 bp, Homo sapien
ggcacgtttactcttctgactggag

SEQ ID NO: 1401335 - DNA, 25 bp, Homo sapien
cagagtactctccaatgtgttatag

SEQ ID NO: 1401336 - DNA, 25 bp, Homo sapien
tgtgttatagttatccttaaagctc

SEQ ID NO: 1401337 - DNA, 25 bp, Homo sapien
ttaaagctcttcaattcaaggaagt

SEQ ID NO: 1401338 - DNA, 25 bp, Homo sapien
tgactggtgatgtcgctgagagctc

SEQ ID NO: 1401339 - DNA, 25 bp, Homo sapien
ctgagttaggtctttggctgctgac

SEQ ID NO: 1401340 - DNA, 25 bp, Homo sapien
ctgctgactggtgatgtcgctgaga

SEQ ID NO: 1401341 - DNA, 25 bp, Homo sapien
gacctcaggggactgagttaggtct

SEQ ID NO: 1401342 - DNA, 25 bp, Homo sapien
cgtagctcatttttagggacagaga

SEQ ID NO: 1401343 - DNA, 25 bp, Homo sapien
tacaggtaggtggtcgccaccactc

SEQ ID NO: 1401344 - DNA, 25 bp, Homo sapien
gacaggagagacataccccttaagc

SEQ ID NO: 1401345 - DNA, 25 bp, Homo sapien
gattacaagtacgaaccactgcagc

SEQ ID NO: 1401346 - DNA, 25 bp, Homo sapien
gctttatgaaggtcactgcactgtg

SEQ ID NO: 1401347 - DNA, 25 bp, Homo sapien
ggccgcatctgctttctaatgtaag

SEQ ID NO: 1401348 - DNA, 25 bp, Homo sapien
tactagcttgtatagttgcatctgc

SEQ ID NO: 1401349 - DNA, 25 bp, Homo sapien
tgtggcaacagtccaacactactgt

SEQ ID NO: 1401350 - DNA, 25 bp, Homo sapien
agctccctctgacacgttcccctcc

SEQ ID NO: 1401351 - DNA, 25 bp, Homo sapien
tccctctgacacgttcccctccaaa

SEQ ID NO: 1401352 - DNA, 25 bp, Homo sapien
ctccctctgacacgttcccctccaa

SEQ ID NO: 1401353 - DNA, 25 bp, Homo sapien
gctccctctgacacgttcccctcca

SEQ ID NO: 1401354 - DNA, 25 bp, Homo sapien
gcctcctgatagcgtaggtactcat

SEQ ID NO: 1401355 - DNA, 25 bp, Homo sapien
cctcctgatagcgtaggtactcatt

SEQ ID NO: 1401356 - DNA, 25 bp, Homo sapien
tcctgatagcgtaggtactcattct

SEQ ID NO: 1401357 - DNA, 25 bp, Homo sapien
ctgatagcgtaggtactcattctgg

SEQ ID NO: 1401358 - DNA, 25 bp, Homo sapien
tcaatgagtgctttgcgtacaccct

SEQ ID NO: 1401359 - DNA, 25 bp, Homo sapien
tcatagccatccaaaagggtatcaa

SEQ ID NO: 1401360 - DNA, 25 bp, Homo sapien
actagtgtttcgcagatccagcagg

SEQ ID NO: 1401361 - DNA, 25 bp, Homo sapien
caggtaggagcggaaattcttgccc

SEQ ID NO: 1401362 - DNA, 25 bp, Homo sapien
gaaaacagcacaatgatatctcttc

SEQ ID NO: 1401363 - DNA, 25 bp, Homo sapien
tctcttctcattctttagtcttttt

SEQ ID NO: 1401364 - DNA, 25 bp, Homo sapien
aacagcacaatgatatctcttctca

SEQ ID NO: 1401365 - DNA, 25 bp, Homo sapien
tggagaaaacagcacaatgatatct

SEQ ID NO: 1401366 - DNA, 25 bp, Homo sapien
ccagagctttcatcctatacagata

SEQ ID NO: 1401367 - DNA, 25 bp, Homo sapien
ggcatccagagctttcatcctatac

SEQ ID NO: 1401368 - DNA, 25 bp, Homo sapien
cagaggtacgaatggcatccagagc

SEQ ID NO: 1401369 - DNA, 25 bp, Homo sapien
atcctatacagatagttgtagcaac

SEQ ID NO: 1401370 - DNA, 25 bp, Homo sapien
gggctcatacttgatatcctgaacc

SEQ ID NO: 1401371 - DNA, 25 bp, Homo sapien
gggtttccagttgtagtagtctagc

SEQ ID NO: 1401372 - DNA, 25 bp, Homo sapien
tgtagtagtctagcatcatcatctg

SEQ ID NO: 1401373 - DNA, 25 bp, Homo sapien
gaaccctggagagtcgaatatcaat

SEQ ID NO: 1401374 - DNA, 25 bp, Homo sapien
aaaaaagatgcttagctttgcctgg

SEQ ID NO: 1401375 - DNA, 25 bp, Homo sapien
tcactgttttatcgtgtcaccctaa

SEQ ID NO: 1401376 - DNA, 25 bp, Homo sapien
ggttttcaacttgatacaaatggaa

SEQ ID NO: 1401377 - DNA, 25 bp, Homo sapien
gtgtgcccatccctcattgaatgct

SEQ ID NO: 1401378 - DNA, 25 bp, Homo sapien
gaccttgtgatcttctcatgtgggc

SEQ ID NO: 1401379 - DNA, 25 bp, Homo sapien
gaactcctgagctgacgtgatcagc

SEQ ID NO: 1401380 - DNA, 25 bp, Homo sapien
ccttgtgatcttctcatgtgggcct

SEQ ID NO: 1401381 - DNA, 25 bp, Homo sapien
ttgtgatcttctcatgtgggcctcc

SEQ ID NO: 1401382 - DNA, 25 bp, Homo sapien
caccaccacgtcaatcaaagtaaag

SEQ ID NO: 1401383 - DNA, 25 bp, Homo sapien
ccacgtcaatcaaagtaaagaatat

SEQ ID NO: 1401384 - DNA, 25 bp, Homo sapien
cttcaccaccacgtcaatcaaagta

SEQ ID NO: 1401385 - DNA, 25 bp, Homo sapien
gtatataaattgatgagtttgacaa

SEQ ID NO: 1401386 - DNA, 25 bp, Homo sapien
tcgtgaacaaaactggcatggtgcc

SEQ ID NO: 1401387 - DNA, 25 bp, Homo sapien
ggtggaaaattcagccagtggagct

SEQ ID NO: 1401388 - DNA, 25 bp, Homo sapien
gaatgagctagccaattgaagacca

SEQ ID NO: 1401389 - DNA, 25 bp, Homo sapien
tgaagaccattccagatcacaggag

SEQ ID NO: 1401390 - DNA, 25 bp, Homo sapien
gagatttcattgcaaagcgcatgat

SEQ ID NO: 1401391 - DNA, 25 bp, Homo sapien
acatgaggtccccttcgagatttca

SEQ ID NO: 1401392 - DNA, 25 bp, Homo sapien
cattgcaaagcgcatgatttgcctc

SEQ ID NO: 1401393 - DNA, 25 bp, Homo sapien
ggtccccttcgagatttcattgcaa

SEQ ID NO: 1401394 - DNA, 25 bp, Homo sapien
actcccacctactcctggaataagg

SEQ ID NO: 1401395 - DNA, 25 bp, Homo sapien
tctactgggtaagatgcgacagcag

SEQ ID NO: 1401396 - DNA, 25 bp, Homo sapien
tgctctagcgttaaagggagggttc

SEQ ID NO: 1401397 - DNA, 25 bp, Homo sapien
tcaaagcccggataggcgcaggtga

SEQ ID NO: 1401398 - DNA, 25 bp, Homo sapien
agagccagttactgccggacgccat

SEQ ID NO: 1401399 - DNA, 25 bp, Homo sapien
cgtaggccatcaccagcacgacatt

SEQ ID NO: 1401400 - DNA, 25 bp, Homo sapien
accccggagagccagttactgccgg

SEQ ID NO: 1401401 - DNA, 25 bp, Homo sapien
gcacgacattcaccccggagagcca

SEQ ID NO: 1401402 - DNA, 25 bp, Homo sapien
tccgccgaagcgacggcgcctgggt

SEQ ID NO: 1401403 - DNA, 25 bp, Homo sapien
ggtcagcccaggctccgccgaagcg

SEQ ID NO: 1401404 - DNA, 25 bp, Homo sapien
ctcgcgcagaattgttcgggtttac

SEQ ID NO: 1401405 - DNA, 25 bp, Homo sapien
tcgcgcagaattgttcgggtttacc

SEQ ID NO: 1401406 - DNA, 25 bp, Homo sapien
gaaaggagaacgacgccttccagct

SEQ ID NO: 1401407 - DNA, 25 bp, Homo sapien
ccggcctgaaaacatggcggacagg

SEQ ID NO: 1401408 - DNA, 25 bp, Homo sapien
gtcgagcgctcagacgcggaactac

SEQ ID NO: 1401409 - DNA, 25 bp, Homo sapien
gcggaactacgacagtaagaggaag

SEQ ID NO: 1401410 - DNA, 25 bp, Homo sapien
ttatatcacgtgacaggggcggcgc

SEQ ID NO: 1401411 - DNA, 25 bp, Homo sapien
ggaaggcgcgagagcgagcgcgaga

SEQ ID NO: 1401412 - DNA, 25 bp, Homo sapien
agagcgagcgcgagagggaaaagga

SEQ ID NO: 1401413 - DNA, 25 bp, Homo sapien
gagggaatcttatatcacgtgacag

SEQ ID NO: 1401414 - DNA, 25 bp, Homo sapien
tgtttatggttgggttcgcggccta

SEQ ID NO: 1401415 - DNA, 25 bp, Homo sapien
ttatggttgggttcgcggcctagtg

SEQ ID NO: 1401416 - DNA, 25 bp, Homo sapien
tggttgggttcgcggcctagtgggc

SEQ ID NO: 1401417 - DNA, 25 bp, Homo sapien
tgggttcgcggcctagtgggccgcg

SEQ ID NO: 1401418 - DNA, 25 bp, Homo sapien
gcctcgatttgggagcgtggccggg

SEQ ID NO: 1401419 - DNA, 25 bp, Homo sapien
gagcagccgtaggaagggggggcca

SEQ ID NO: 1401420 - DNA, 25 bp, Homo sapien
cggggcctcgatttgggagcgtggc

SEQ ID NO: 1401421 - DNA, 25 bp, Homo sapien
agagccggggcctcgatttgggagc

SEQ ID NO: 1401422 - DNA, 25 bp, Homo sapien
cgcgagcgagcgaggcctgggcctt

SEQ ID NO: 1401423 - DNA, 25 bp, Homo sapien
gcgcgagcgagcgaggcctgggcct

SEQ ID NO: 1401424 - DNA, 25 bp, Homo sapien
gaatatgtttttgctgctgtcttta

SEQ ID NO: 1401425 - DNA, 25 bp, Homo sapien
tatgtttttgctgctgtctttagct

SEQ ID NO: 1401426 - DNA, 25 bp, Homo sapien
tggaatatgtttttgctgctgtctt

SEQ ID NO: 1401427 - DNA, 25 bp, Homo sapien
cttggaatatgtttttgctgctgtc

SEQ ID NO: 1401428 - DNA, 25 bp, Homo sapien
cctccgccgcatatcctgttttggg

SEQ ID NO: 1401429 - DNA, 25 bp, Homo sapien
gatacctgatgtgacttgctgggag

SEQ ID NO: 1401430 - DNA, 25 bp, Homo sapien
ctgttttggggatacctgatgtgac

SEQ ID NO: 1401431 - DNA, 25 bp, Homo sapien
tggggatacctgatgtgacttgctg

SEQ ID NO: 1401432 - DNA, 25 bp, Homo sapien
gaacaggactctgtggaaccacact

SEQ ID NO: 1401433 - DNA, 25 bp, Homo sapien
tagtgcattgagtaacagctgctgg

SEQ ID NO: 1401434 - DNA, 25 bp, Homo sapien
gcaagtgcacttgtgtaagtccaat

SEQ ID NO: 1401435 - DNA, 25 bp, Homo sapien
tatgttatatgaaggagactgggca

SEQ ID NO: 1401436 - DNA, 25 bp, Homo sapien
gttattccactagtagatctccacg

SEQ ID NO: 1401437 - DNA, 25 bp, Homo sapien
aattcttaattcagatctctggcgc

SEQ ID NO: 1401438 - DNA, 25 bp, Homo sapien
ccacgatttccttagtatgagtaga

SEQ ID NO: 1401439 - DNA, 25 bp, Homo sapien
tctctggcgctatagaaggtaggga

SEQ ID NO: 1401440 - DNA, 25 bp, Homo sapien
ccagtctcaatagtggcagtagcct

SEQ ID NO: 1401441 - DNA, 25 bp, Homo sapien
cctccagtctcaatagtggcagtag

SEQ ID NO: 1401442 - DNA, 25 bp, Homo sapien
tctcctccagtctcaatagtggcag

SEQ ID NO: 1401443 - DNA, 25 bp, Homo sapien
tccagtctcaatagtggcagtagcc

SEQ ID NO: 1401444 - DNA, 25 bp, Homo sapien
catttcaagttcaagcggtgcagca

SEQ ID NO: 1401445 - DNA, 25 bp, Homo sapien
ttgtggacactaggaaccaatgctg

SEQ ID NO: 1401446 - DNA, 25 bp, Homo sapien
tacaagcatttctggacggctgaga

SEQ ID NO: 1401447 - DNA, 25 bp, Homo sapien
ggtgcagcaccttcgaagcatcaat

SEQ ID NO: 1401448 - DNA, 25 bp, Homo sapien
tcgtctggcagaactaaatcttgga

SEQ ID NO: 1401449 - DNA, 25 bp, Homo sapien
tgctacatctacagccgatttcagg

SEQ ID NO: 1401450 - DNA, 25 bp, Homo sapien
taagtattactgtaccaactgggcc

SEQ ID NO: 1401451 - DNA, 25 bp, Homo sapien
tgaaggcaacatgtatcgtctggca

SEQ ID NO: 1401452 - DNA, 25 bp, Homo sapien
tagccttgttaaccctcagaggcct

SEQ ID NO: 1401453 - DNA, 25 bp, Homo sapien
ccggtagccttgttaaccctcagag

SEQ ID NO: 1401454 - DNA, 25 bp, Homo sapien
ttaaccctcagaggccttcaagtcc

SEQ ID NO: 1401455 - DNA, 25 bp, Homo sapien
ttgttaaccctcagaggccttcaag

SEQ ID NO: 1401456 - DNA, 25 bp, Homo sapien
tcattctgagtttgctgaacccaga

SEQ ID NO: 1401457 - DNA, 25 bp, Homo sapien
ttcattctgagtttgctgaacccag

SEQ ID NO: 1401458 - DNA, 25 bp, Homo sapien
gggcctctcggaatgtagttgctcg

SEQ ID NO: 1401459 - DNA, 25 bp, Homo sapien
gaggaggataaggtaccaggactca

SEQ ID NO: 1401460 - DNA, 25 bp, Homo sapien
ccgcaaagcggttttctgaccctca

SEQ ID NO: 1401461 - DNA, 25 bp, Homo sapien
ggtaaccgctagagggtgcgcacct

SEQ ID NO: 1401462 - DNA, 25 bp, Homo sapien
gccaagatttgggagctgcggccag

SEQ ID NO: 1401463 - DNA, 25 bp, Homo sapien
agagcggcgcgagtgccaaggagaa

SEQ ID NO: 1401464 - DNA, 25 bp, Homo sapien
agacccgcccagagagttgttgggc

SEQ ID NO: 1401465 - DNA, 25 bp, Homo sapien
gagaagctcgtgcagccttggccag

SEQ ID NO: 1401466 - DNA, 25 bp, Homo sapien
tgttggcttgtacctagcccaggtg

SEQ ID NO: 1401467 - DNA, 25 bp, Homo sapien
tagtgaacattaccgtggcttggca

SEQ ID NO: 1401468 - DNA, 25 bp, Homo sapien
tctgagctttttccactagagcagt

SEQ ID NO: 1401469 - DNA, 25 bp, Homo sapien
caaggtgccagattgagagctaatc

SEQ ID NO: 1401470 - DNA, 25 bp, Homo sapien
gcacttggttttgagggcttcctac

SEQ ID NO: 1401471 - DNA, 25 bp, Homo sapien
cattcagctgttaccaaaatctcat

SEQ ID NO: 1401472 - DNA, 25 bp, Homo sapien
tacatgtcagcctcgcctgtgcttc

SEQ ID NO: 1401473 - DNA, 25 bp, Homo sapien
caagcttgcactagagcatctgagc

SEQ ID NO: 1401474 - DNA, 25 bp, Homo sapien
gaagctgtgcacctgagatgaggct

SEQ ID NO: 1401475 - DNA, 25 bp, Homo sapien
ggctggaacgggaattggcctctct

SEQ ID NO: 1401476 - DNA, 25 bp, Homo sapien
tttattggcagactcccttttgacc

SEQ ID NO: 1401477 - DNA, 25 bp, Homo sapien
tgctttcttgcatctacaccccagg

SEQ ID NO: 1401478 - DNA, 25 bp, Homo sapien
ggtgaagtctgtccgataccgcagc

SEQ ID NO: 1401479 - DNA, 25 bp, Homo sapien
gtcgcgatatagacacacgcctcca

SEQ ID NO: 1401480 - DNA, 25 bp, Homo sapien
ccttttctgagtgcgtggaggtgaa

SEQ ID NO: 1401481 - DNA, 25 bp, Homo sapien
gggacgcgttttctccgtcgcgata

SEQ ID NO: 1401482 - DNA, 25 bp, Homo sapien
agcccggagcccgtggtctggtact

SEQ ID NO: 1401483 - DNA, 25 bp, Homo sapien
tttgccccggaacattccagccttg

SEQ ID NO: 1401484 - DNA, 25 bp, Homo sapien
tggtactcgtcgctttgccccggaa

SEQ ID NO: 1401485 - DNA, 25 bp, Homo sapien
gtcagcccagcgtctcccagggtga

SEQ ID NO: 1401486 - DNA, 25 bp, Homo sapien
gccagaaccttctgggcgcctgctg

SEQ ID NO: 1401487 - DNA, 25 bp, Homo sapien
ttctgccagaaccttctgggcgcct

SEQ ID NO: 1401488 - DNA, 25 bp, Homo sapien
gctcttctgccagaaccttctgggc

SEQ ID NO: 1401489 - DNA, 25 bp, Homo sapien
tgtgcctgggctccccacgcaggga

SEQ ID NO: 1401490 - DNA, 25 bp, Homo sapien
gctcctgagctcgaatgatcagcct

SEQ ID NO: 1401491 - DNA, 25 bp, Homo sapien
atgaaccattatacctgggtaattt

SEQ ID NO: 1401492 - DNA, 25 bp, Homo sapien
gaatgaaccattatacctgggtaat

SEQ ID NO: 1401493 - DNA, 25 bp, Homo sapien
agctcctgagctcgaatgatcagcc

SEQ ID NO: 1401494 - DNA, 25 bp, Homo sapien
ccatgttgcttaagagcccatgcaa

SEQ ID NO: 1401495 - DNA, 25 bp, Homo sapien
gcttaagagcccatgcaagaacagc

SEQ ID NO: 1401496 - DNA, 25 bp, Homo sapien
gaaactgatgtttatttattttcca

SEQ ID NO: 1401497 - DNA, 25 bp, Homo sapien
ccatcaaccatttttccatgttgct

SEQ ID NO: 1401498 - DNA, 25 bp, Homo sapien
ttaagaccattcagtggttgctcct

SEQ ID NO: 1401499 - DNA, 25 bp, Homo sapien
ctgagcgctccagtcttcagtaggg

SEQ ID NO: 1401500 - DNA, 25 bp, Homo sapien
gagcgctccagtcttcagtagggaa

SEQ ID NO: 1401501 - DNA, 25 bp, Homo sapien
cttccgtggcaggctgagcgctcca

SEQ ID NO: 1401502 - DNA, 25 bp, Homo sapien
attcctccttggtcactgcctcttc

SEQ ID NO: 1401503 - DNA, 25 bp, Homo sapien
tccttggtcactgcctcttcagcag

SEQ ID NO: 1401504 - DNA, 25 bp, Homo sapien
gggcacctgcagaccttcagaccag

SEQ ID NO: 1401505 - DNA, 25 bp, Homo sapien
gagggcacctgcagaccttcagacc

SEQ ID NO: 1401506 - DNA, 25 bp, Homo sapien
tcctgagccagcatccaccacatcc

SEQ ID NO: 1401507 - DNA, 25 bp, Homo sapien
acgggaaatggtgccacgcatgcgc

SEQ ID NO: 1401508 - DNA, 25 bp, Homo sapien
cctcccatgggtgttcacgggaaat

SEQ ID NO: 1401509 - DNA, 25 bp, Homo sapien
gccacgcatgcgcagaacttcctga

SEQ ID NO: 1401510 - DNA, 25 bp, Homo sapien
ccacaggaagctgtggctcccggaa

SEQ ID NO: 1401511 - DNA, 25 bp, Homo sapien
taagttaacataagatacctccgtg

SEQ ID NO: 1401512 - DNA, 25 bp, Homo sapien
gtcagtaaccacaggaagctgtggc

SEQ ID NO: 1401513 - DNA, 25 bp, Homo sapien
taaccacaggaagctgtggctcccg

SEQ ID NO: 1401514 - DNA, 25 bp, Homo sapien
aagattagtgccacctaagtgggtt

SEQ ID NO: 1401515 - DNA, 25 bp, Homo sapien
ctggaagtcaagattagtgccacct

SEQ ID NO: 1401516 - DNA, 25 bp, Homo sapien
ttagtgccacctaagtgggttcctg

SEQ ID NO: 1401517 - DNA, 25 bp, Homo sapien
gattagtgccacctaagtgggttcc

SEQ ID NO: 1401518 - DNA, 25 bp, Homo sapien
taagttacaacgggaatccagaaca

SEQ ID NO: 1401519 - DNA, 25 bp, Homo sapien
ttacaacgggaatccagaacaacac

SEQ ID NO: 1401520 - DNA, 25 bp, Homo sapien
agggctctggacattgtgaaaattt

SEQ ID NO: 1401521 - DNA, 25 bp, Homo sapien
ctctggacattgtgaaaatttccct

SEQ ID NO: 1401522 - DNA, 25 bp, Homo sapien
gctggggtgcaatgaattgatcata

SEQ ID NO: 1401523 - DNA, 25 bp, Homo sapien
gtgcaatgaattgatcatagccttg

SEQ ID NO: 1401524 - DNA, 25 bp, Homo sapien
cagccttttgagtaggtgtgccacc

SEQ ID NO: 1401525 - DNA, 25 bp, Homo sapien
agccttttgagtaggtgtgccacca

SEQ ID NO: 1401526 - DNA, 25 bp, Homo sapien
gcagggccctagctctgacaagaga

SEQ ID NO: 1401527 - DNA, 25 bp, Homo sapien
caataaccctgtgcagtagacactc

SEQ ID NO: 1401528 - DNA, 25 bp, Homo sapien
tctgtgtctacataaatagctcggc

SEQ ID NO: 1401529 - DNA, 25 bp, Homo sapien
tttatgggccagaaaattgtacagc

SEQ ID NO: 1401530 - DNA, 25 bp, Homo sapien
ggtgaggcaatggggagccagactg

SEQ ID NO: 1401531 - DNA, 25 bp, Homo sapien
ctggtgaggcaatggggagccagac

SEQ ID NO: 1401532 - DNA, 25 bp, Homo sapien
aggcaatggggagccagactgtcat

SEQ ID NO: 1401533 - DNA, 25 bp, Homo sapien
tgaggcaatggggagccagactgtc

SEQ ID NO: 1401534 - DNA, 25 bp, Homo sapien
cccatcgtgcggtggatcagtgcat

SEQ ID NO: 1401535 - DNA, 25 bp, Homo sapien
cctgtctgtgggcatggctaaagca

SEQ ID NO: 1401536 - DNA, 25 bp, Homo sapien
taaagctgggatctgcatgactaca

SEQ ID NO: 1401537 - DNA, 25 bp, Homo sapien
tgggagttccattaggccatgcctg

SEQ ID NO: 1401538 - DNA, 25 bp, Homo sapien
ccggtgcgcggggctgttgcgccat

SEQ ID NO: 1401539 - DNA, 25 bp, Homo sapien
ggccggtgcgcggggctgttgcgcc

SEQ ID NO: 1401540 - DNA, 25 bp, Homo sapien
gccggtgcgcggggctgttgcgcca

SEQ ID NO: 1401541 - DNA, 25 bp, Homo sapien
aagagttgggcaactggctctccag

SEQ ID NO: 1401542 - DNA, 25 bp, Homo sapien
tctcttctggaagagttgggcaact

SEQ ID NO: 1401543 - DNA, 25 bp, Homo sapien
tgtaatctgcccctggcaaaccagg

SEQ ID NO: 1401544 - DNA, 25 bp, Homo sapien
tctggaagagttgggcaactggctc

SEQ ID NO: 1401545 - DNA, 25 bp, Homo sapien
tgctggccggcaaaactatattagt

SEQ ID NO: 1401546 - DNA, 25 bp, Homo sapien
cgatgaagacggtgtagctcttggc

SEQ ID NO: 1401547 - DNA, 25 bp, Homo sapien
cacttcttggtgtagtcggtcatct

SEQ ID NO: 1401548 - DNA, 25 bp, Homo sapien
tcataggctttcttgatgcacccgg

SEQ ID NO: 1401549 - DNA, 25 bp, Homo sapien
gtagctgccctccattaggtattgc

SEQ ID NO: 1401550 - DNA, 25 bp, Homo sapien
gggaagctgttccttgtaatcaaag

SEQ ID NO: 1401551 - DNA, 25 bp, Homo sapien
cccaagagctggtgcatgtaggctg

SEQ ID NO: 1401552 - DNA, 25 bp, Homo sapien
ctggtgcatgtaggctgactgggga

SEQ ID NO: 1401553 - DNA, 25 bp, Homo sapien
agtagcagcatttgagctgggtcat

SEQ ID NO: 1401554 - DNA, 25 bp, Homo sapien
ggaggggatgtcctcgcataggatg

SEQ ID NO: 1401555 - DNA, 25 bp, Homo sapien
ctggaaggaggggatgtcctcgcat

SEQ ID NO: 1401556 - DNA, 25 bp, Homo sapien
aggggatgtcctcgcataggatgct

SEQ ID NO: 1401557 - DNA, 25 bp, Homo sapien
ggatgtcctcgcataggatgctcca

SEQ ID NO: 1401558 - DNA, 25 bp, Homo sapien
tggcaagaagttgagctccagaaga

SEQ ID NO: 1401559 - DNA, 25 bp, Homo sapien
agaagttgagctccagaagaactag

SEQ ID NO: 1401560 - DNA, 25 bp, Homo sapien
caagaagttgagctccagaagaact

SEQ ID NO: 1401561 - DNA, 25 bp, Homo sapien
ggcaagaagttgagctccagaagaa

SEQ ID NO: 1401562 - DNA, 25 bp, Homo sapien
cccttgagttgcttgtacttgccgt

SEQ ID NO: 1401563 - DNA, 25 bp, Homo sapien
cttgagttgcttgtacttgccgtcc

SEQ ID NO: 1401564 - DNA, 25 bp, Homo sapien
tgagttgcttgtacttgccgtcctc

SEQ ID NO: 1401565 - DNA, 25 bp, Homo sapien
gttgcttgtacttgccgtcctcagc

SEQ ID NO: 1401566 - DNA, 25 bp, Homo sapien
gctggcaagagctgcggcaagctgc

SEQ ID NO: 1401567 - DNA, 25 bp, Homo sapien
agaaatatgtgtctccgtgtgcgtg

SEQ ID NO: 1401568 - DNA, 25 bp, Homo sapien
ttttctctggttattgacatttgca

SEQ ID NO: 1401569 - DNA, 25 bp, Homo sapien
aagagctgcggcaagctgcaagaga

SEQ ID NO: 1401570 - DNA, 25 bp, Homo sapien
cgtcccgggcacttggaatataatg

SEQ ID NO: 1401571 - DNA, 25 bp, Homo sapien
ggtccctagagtaaacacagcattg

SEQ ID NO: 1401572 - DNA, 25 bp, Homo sapien
gcattctgccatgaataccctgcga

SEQ ID NO: 1401573 - DNA, 25 bp, Homo sapien
gatttggaaacctcctgtgtacgtg

SEQ ID NO: 1401574 - DNA, 25 bp, Homo sapien
tgtcccatgccttccatttctagtc

SEQ ID NO: 1401575 - DNA, 25 bp, Homo sapien
cctccttaactctaaacaacaagct

SEQ ID NO: 1401576 - DNA, 25 bp, Homo sapien
tctagttcctctgttggtgccctcc

SEQ ID NO: 1401577 - DNA, 25 bp, Homo sapien
cagcttataacactgagcagtggtc

SEQ ID NO: 1401578 - DNA, 25 bp, Homo sapien
taaatcagccgtgtaaccatggacc

SEQ ID NO: 1401579 - DNA, 25 bp, Homo sapien
tagtggttacccagttagctctcaa

SEQ ID NO: 1401580 - DNA, 25 bp, Homo sapien
aattgaagcaggactaaatgtctag

SEQ ID NO: 1401581 - DNA, 25 bp, Homo sapien
gctgacttttctgtccgagctttga

SEQ ID NO: 1401582 - DNA, 25 bp, Homo sapien
tgtgtctcaatgcacggggcatttc

SEQ ID NO: 1401583 - DNA, 25 bp, Homo sapien
cacaggtatacatcctaagctctct

SEQ ID NO: 1401584 - DNA, 25 bp, Homo sapien
ctaatctgtggtgactgaacatgtg

SEQ ID NO: 1401585 - DNA, 25 bp, Homo sapien
ctgtaggcctggctcagcgtacaca

SEQ ID NO: 1401586 - DNA, 25 bp, Homo sapien
tattatctcacagcacgtccagaag

SEQ ID NO: 1401587 - DNA, 25 bp, Homo sapien
ggcaacctgtgaccctttgaggcaa

SEQ ID NO: 1401588 - DNA, 25 bp, Homo sapien
agaaaggaaactggttgccgcggca

SEQ ID NO: 1401589 - DNA, 25 bp, Homo sapien
tagcactggctatgttgacgaggcc

SEQ ID NO: 1401590 - DNA, 25 bp, Homo sapien
gcttacatcacattaccaggtggtg

SEQ ID NO: 1401591 - DNA, 25 bp, Homo sapien
ggtgtgtgggattttgccacgctta

SEQ ID NO: 1401592 - DNA, 25 bp, Homo sapien
tcccacacgagtcctgggatttctg

SEQ ID NO: 1401593 - DNA, 25 bp, Homo sapien
ttatgacagtatttcccacacgagt

SEQ ID NO: 1401594 - DNA, 25 bp, Homo sapien
taggaaaaacttgggacacagccat

SEQ ID NO: 1401595 - DNA, 25 bp, Homo sapien
gggaccagatgtcacccaggtggcc

SEQ ID NO: 1401596 - DNA, 25 bp, Homo sapien
actcaaagctggactgagaggcgcc

SEQ ID NO: 1401597 - DNA, 25 bp, Homo sapien
gaagactgtttattggacctgggag

SEQ ID NO: 1401598 - DNA, 25 bp, Homo sapien
ccagaagaacttaggagagcagatg

SEQ ID NO: 1401599 - DNA, 25 bp, Homo sapien
cctccctttcttcatggcattgctg

SEQ ID NO: 1401600 - DNA, 25 bp, Homo sapien
gcattgctgttaggatgacatggtt

SEQ ID NO: 1401601 - DNA, 25 bp, Homo sapien
gacatggttacggtgctctttccag

SEQ ID NO: 1401602 - DNA, 25 bp, Homo sapien
aatatgcagttactggagcagcctt

SEQ ID NO: 1401603 - DNA, 25 bp, Homo sapien
gttactggagcagccttctaagaaa

SEQ ID NO: 1401604 - DNA, 25 bp, Homo sapien
tgcagttactggagcagccttctaa

SEQ ID NO: 1401605 - DNA, 25 bp, Homo sapien
tatgcagttactggagcagccttct

SEQ ID NO: 1401606 - DNA, 25 bp, Homo sapien
agcctggtgcacatagcatgaccct

SEQ ID NO: 1401607 - DNA, 25 bp, Homo sapien
aacactacccaatctctaatgtctt

SEQ ID NO: 1401608 - DNA, 25 bp, Homo sapien
taatgtctttatggaagttcccatc

SEQ ID NO: 1401609 - DNA, 25 bp, Homo sapien
gggcctgttgcaccatctttcaaac

SEQ ID NO: 1401610 - DNA, 25 bp, Homo sapien
tcctgcggcagaggctagtacacaa

SEQ ID NO: 1401611 - DNA, 25 bp, Homo sapien
taccaattctgcaaagtacggagac

SEQ ID NO: 1401612 - DNA, 25 bp, Homo sapien
taaagcccctgacaaactgaacggc

SEQ ID NO: 1401613 - DNA, 25 bp, Homo sapien
ccatggaggtttaacaaggaagcca

SEQ ID NO: 1401614 - DNA, 25 bp, Homo sapien
tccaggtaacaagtaggcacatttc

SEQ ID NO: 1401615 - DNA, 25 bp, Homo sapien
tcctctgagatgctggttgtgcgct

SEQ ID NO: 1401616 - DNA, 25 bp, Homo sapien
ttagcaaggaaacaagggacaggcc

SEQ ID NO: 1401617 - DNA, 25 bp, Homo sapien
cacactctgaagttgcggatttcca

SEQ ID NO: 1401618 - DNA, 25 bp, Homo sapien
cttgctgtgcactgggtagagtaaa

SEQ ID NO: 1401619 - DNA, 25 bp, Homo sapien
aaaggcaacttttcattggaataat

SEQ ID NO: 1401620 - DNA, 25 bp, Homo sapien
gcactgggtagagtaaagtcatgtg

SEQ ID NO: 1401621 - DNA, 25 bp, Homo sapien
tgtgttctgcccctttgaaaggcaa

SEQ ID NO: 1401622 - DNA, 25 bp, Homo sapien
gtgtatttgttgtctttggtctgag

SEQ ID NO: 1401623 - DNA, 25 bp, Homo sapien
gtctgagccactatgatgtggacac

SEQ ID NO: 1401624 - DNA, 25 bp, Homo sapien
tcaaacacagcgcttgtctgattca

SEQ ID NO: 1401625 - DNA, 25 bp, Homo sapien
tgtcaaacacagcgcttgtctgatt

SEQ ID NO: 1401626 - DNA, 25 bp, Homo sapien
ctcagcacggctgatggcaccatga

SEQ ID NO: 1401627 - DNA, 25 bp, Homo sapien
tctttgcagggctgtagtcgactct

SEQ ID NO: 1401628 - DNA, 25 bp, Homo sapien
tatttcgaaccaggtaaccagcttc

SEQ ID NO: 1401629 - DNA, 25 bp, Homo sapien
gtagtcgactctcagcctcagcacg

SEQ ID NO: 1401630 - DNA, 25 bp, Homo sapien
gcaggcccgggtccactttctctcc

SEQ ID NO: 1401631 - DNA, 25 bp, Homo sapien
tccctgaaggaaggtcgctcagctc

SEQ ID NO: 1401632 - DNA, 25 bp, Homo sapien
tgggtccagctcttctgccggtggt

SEQ ID NO: 1401633 - DNA, 25 bp, Homo sapien
ggtccagctcttctgccggtggtgc

SEQ ID NO: 1401634 - DNA, 25 bp, Homo sapien
caggaggtccttggaactccgtctt

SEQ ID NO: 1401635 - DNA, 25 bp, Homo sapien
gggcctctcgtcgttctcgggcagc

SEQ ID NO: 1401636 - DNA, 25 bp, Homo sapien
tcgtatagctgtggcggcttcccca

SEQ ID NO: 1401637 - DNA, 25 bp, Homo sapien
atggctgctcgtactctgccgcggg

SEQ ID NO: 1401638 - DNA, 25 bp, Homo sapien
cagggactgtcaagcagctggagag

SEQ ID NO: 1401639 - DNA, 25 bp, Homo sapien
cgggttcacagggactgtcaagcag

SEQ ID NO: 1401640 - DNA, 25 bp, Homo sapien
ctgcgggttcacagggactgtcaag

SEQ ID NO: 1401641 - DNA, 25 bp, Homo sapien
ttcacagggactgtcaagcagctgg

SEQ ID NO: 1401642 - DNA, 25 bp, Homo sapien
ttaacacctcataagctcccgactg

SEQ ID NO: 1401643 - DNA, 25 bp, Homo sapien
tacctggtcatagtcaaggaggaac

SEQ ID NO: 1401644 - DNA, 25 bp, Homo sapien
cactgagaacggcatgggaggctta

SEQ ID NO: 1401645 - DNA, 25 bp, Homo sapien
ggctcttctaaacgcccatcaggaa

SEQ ID NO: 1401646 - DNA, 25 bp, Homo sapien
taggtcactgtctttctccccaatt

SEQ ID NO: 1401647 - DNA, 25 bp, Homo sapien
tgagtaggtcactgtctttctcccc

SEQ ID NO: 1401648 - DNA, 25 bp, Homo sapien
agtaggtcactgtctttctccccaa

SEQ ID NO: 1401649 - DNA, 25 bp, Homo sapien
tctccccaatttctcaacactaccc

SEQ ID NO: 1401650 - DNA, 25 bp, Homo sapien
gatggtccgtggagaaatgccactg

SEQ ID NO: 1401651 - DNA, 25 bp, Homo sapien
gccactgactcattaagacctctat

SEQ ID NO: 1401652 - DNA, 25 bp, Homo sapien
ggttatagttctctgctgactaggg

SEQ ID NO: 1401653 - DNA, 25 bp, Homo sapien
gcaaaacttaggtataggctgaggt

SEQ ID NO: 1401654 - DNA, 25 bp, Homo sapien
gcaagccgacccttcctgcagggag

SEQ ID NO: 1401655 - DNA, 25 bp, Homo sapien
tagcccctgacgtgcagagctggct

SEQ ID NO: 1401656 - DNA, 25 bp, Homo sapien
cctgaggcgccatagaaacagaaac

SEQ ID NO: 1401657 - DNA, 25 bp, Homo sapien
agaaacaatcgtggggctgcaagcc

SEQ ID NO: 1401658 - DNA, 25 bp, Homo sapien
taatggagactcgaacagtgaggtt

SEQ ID NO: 1401659 - DNA, 25 bp, Homo sapien
tctcactatattggcaaggttggcc

SEQ ID NO: 1401660 - DNA, 25 bp, Homo sapien
ccgggcccggcagatggagtttata

SEQ ID NO: 1401661 - DNA, 25 bp, Homo sapien
ccctgaaatttagcgaggagaataa

SEQ ID NO: 1401662 - DNA, 25 bp, Homo sapien
tcctgttattctgtccagcttgtaa

SEQ ID NO: 1401663 - DNA, 25 bp, Homo sapien
cctgttattctgtccagcttgtaac

SEQ ID NO: 1401664 - DNA, 25 bp, Homo sapien
ttcctgttattctgtccagcttgta

SEQ ID NO: 1401665 - DNA, 25 bp, Homo sapien
tctattctgtagagcctgcttacaa

SEQ ID NO: 1401666 - DNA, 25 bp, Homo sapien
caggatctgggtaaattgctttatc

SEQ ID NO: 1401667 - DNA, 25 bp, Homo sapien
tccccaatagacaccggttactata

SEQ ID NO: 1401668 - DNA, 25 bp, Homo sapien
ttactatattacaacactcactgag

SEQ ID NO: 1401669 - DNA, 25 bp, Homo sapien
catttgctgtgcatcatatggttcc

SEQ ID NO: 1401670 - DNA, 25 bp, Homo sapien
gggtcagcatagtcttctaaaatga

SEQ ID NO: 1401671 - DNA, 25 bp, Homo sapien
tgtaaccgtcgttctctccgactct

SEQ ID NO: 1401672 - DNA, 25 bp, Homo sapien
gaccctttgtccgtttggcatcata

SEQ ID NO: 1401673 - DNA, 25 bp, Homo sapien
tcttgctgcttaataatcttgccct

SEQ ID NO: 1401674 - DNA, 25 bp, Homo sapien
ttgctgcttaataatcttgcccttg

SEQ ID NO: 1401675 - DNA, 25 bp, Homo sapien
ctgcttaataatcttgcccttgtcc

SEQ ID NO: 1401676 - DNA, 25 bp, Homo sapien
tgctgcttaataatcttgcccttgt

SEQ ID NO: 1401677 - DNA, 25 bp, Homo sapien
ctggggtagttgctcttcccgttct

SEQ ID NO: 1401678 - DNA, 25 bp, Homo sapien
ccgagctcttggttgcaccccggtg

SEQ ID NO: 1401679 - DNA, 25 bp, Homo sapien
ttgatgagcctgttgatgtaggtgc

SEQ ID NO: 1401680 - DNA, 25 bp, Homo sapien
cttgatgagcctgttgatgtaggtg

SEQ ID NO: 1401681 - DNA, 25 bp, Homo sapien
agctcttggttgcaccccggtgggg

SEQ ID NO: 1401682 - DNA, 25 bp, Homo sapien
cttgcccgcggcggcctgaatcaga

SEQ ID NO: 1401683 - DNA, 25 bp, Homo sapien
cggcccttgcccgcggcggcctgaa

SEQ ID NO: 1401684 - DNA, 25 bp, Homo sapien
cccttgcccgcggcggcctgaatca

SEQ ID NO: 1401685 - DNA, 25 bp, Homo sapien
ttgcccgcggcggcctgaatcagac

SEQ ID NO: 1401686 - DNA, 25 bp, Homo sapien
tccgacacggtcttcaggttcaggg

SEQ ID NO: 1401687 - DNA, 25 bp, Homo sapien
caggcgagcgaggaagcccagccca

SEQ ID NO: 1401688 - DNA, 25 bp, Homo sapien
gttcttgcgcaatttgccgccgccg

SEQ ID NO: 1401689 - DNA, 25 bp, Homo sapien
ggccgccgagttcttgcggcccttg

SEQ ID NO: 1401690 - DNA, 25 bp, Homo sapien
tggggcgctggaggccgcggcgagg

SEQ ID NO: 1401691 - DNA, 25 bp, Homo sapien
cgctggaggccgcggcgaggccccg

SEQ ID NO: 1401692 - DNA, 25 bp, Homo sapien
gggcgctggaggccgcggcgaggcc

SEQ ID NO: 1401693 - DNA, 25 bp, Homo sapien
ctggggcgctggaggccgcggcgag

SEQ ID NO: 1401694 - DNA, 25 bp, Homo sapien
gtggggttctcacggctcggggcgc

SEQ ID NO: 1401695 - DNA, 25 bp, Homo sapien
ggcagggtggggttctcacggctcg

SEQ ID NO: 1401696 - DNA, 25 bp, Homo sapien
ggttctcacggctcggggcgccgag

SEQ ID NO: 1401697 - DNA, 25 bp, Homo sapien
cagggtggggttctcacggctcggg

SEQ ID NO: 1401698 - DNA, 25 bp, Homo sapien
cgtcttcaacgcctgcccggcccga

SEQ ID NO: 1401699 - DNA, 25 bp, Homo sapien
ttcaacgcctgcccggcccgaggac

SEQ ID NO: 1401700 - DNA, 25 bp, Homo sapien
caacgcctgcccggcccgaggacac

SEQ ID NO: 1401701 - DNA, 25 bp, Homo sapien
tcttcaacgcctgcccggcccgagg

SEQ ID NO: 1401702 - DNA, 25 bp, Homo sapien
ttcacacgcgcccaggagtgtcacg

SEQ ID NO: 1401703 - DNA, 25 bp, Homo sapien
acggtcgccagctcctgcgctagtt

SEQ ID NO: 1401704 - DNA, 25 bp, Homo sapien
ttactcttcggtggcacacggtcct

SEQ ID NO: 1401705 - DNA, 25 bp, Homo sapien
tctgcagacgttatttttggcggta

SEQ ID NO: 1401706 - DNA, 25 bp, Homo sapien
gctgagattaccgagctgagcctcc

SEQ ID NO: 1401707 - DNA, 25 bp, Homo sapien
aaaatgtttgtcaggtagtgccagc

SEQ ID NO: 1401708 - DNA, 25 bp, Homo sapien
tgttgtagagtttacccactgagct

SEQ ID NO: 1401709 - DNA, 25 bp, Homo sapien
caccagtgtcgtcttggcattggca

SEQ ID NO: 1401710 - DNA, 25 bp, Homo sapien
tcaaaaggaattctacgaagcagcc

SEQ ID NO: 1401711 - DNA, 25 bp, Homo sapien
tgaacagcgaagagttgcagccaca

SEQ ID NO: 1401712 - DNA, 25 bp, Homo sapien
tccaggagaggaaccaatgaacagc

SEQ ID NO: 1401713 - DNA, 25 bp, Homo sapien
tagttcccaggcagttgtcccaagt

SEQ ID NO: 1401714 - DNA, 25 bp, Homo sapien
ggcagagctatcacgtccaggaaaa

SEQ ID NO: 1401715 - DNA, 25 bp, Homo sapien
tccatagcataggtaaggaggctct

SEQ ID NO: 1401716 - DNA, 25 bp, Homo sapien
ggcagcgtgagatccaaatacagca

SEQ ID NO: 1401717 - DNA, 25 bp, Homo sapien
gaatgcctgctagcaagggttccag

SEQ ID NO: 1401718 - DNA, 25 bp, Homo sapien
tcttcttttgggggtgtgtaccagc

SEQ ID NO: 1401719 - DNA, 25 bp, Homo sapien
ccaatccctgaagacgtctccagtg

SEQ ID NO: 1401720 - DNA, 25 bp, Homo sapien
gtggcagagataagaggatattggg

SEQ ID NO: 1401721 - DNA, 25 bp, Homo sapien
ctgccccaatccctgaagacgtctc

SEQ ID NO: 1401722 - DNA, 25 bp, Homo sapien
atccctgaagacgtctccagtggca

SEQ ID NO: 1401723 - DNA, 25 bp, Homo sapien
ttttttcgtggatctgcaccaagga

SEQ ID NO: 1401724 - DNA, 25 bp, Homo sapien
aaggacttgtaggactgctgtgctc

SEQ ID NO: 1401725 - DNA, 25 bp, Homo sapien
tgtgctcttgtcagactgtattgag

SEQ ID NO: 1401726 - DNA, 25 bp, Homo sapien
cgtttttttcgtggatctgcaccaa

SEQ ID NO: 1401727 - DNA, 25 bp, Homo sapien
tgctagtggccccaagtgtacttgg

SEQ ID NO: 1401728 - DNA, 25 bp, Homo sapien
ttccattgtgggcaccctaggccct

SEQ ID NO: 1401729 - DNA, 25 bp, Homo sapien
gccttatgctcattcctctaaagaa

SEQ ID NO: 1401730 - DNA, 25 bp, Homo sapien
gtgtacttggctccacccagcccca

SEQ ID NO: 1401731 - DNA, 25 bp, Homo sapien
tgcactcgtgctttccccttcacca

SEQ ID NO: 1401732 - DNA, 25 bp, Homo sapien
gatctgcatgatcactgactctatg

SEQ ID NO: 1401733 - DNA, 25 bp, Homo sapien
ccagtgtggcactgatctgcatgat

SEQ ID NO: 1401734 - DNA, 25 bp, Homo sapien
gatcactgactctatggagtaggca

SEQ ID NO: 1401735 - DNA, 25 bp, Homo sapien
cagatggcccctccgcccagaacat

SEQ ID NO: 1401736 - DNA, 25 bp, Homo sapien
gatggcccctccgcccagaacatac

SEQ ID NO: 1401737 - DNA, 25 bp, Homo sapien
agatggcccctccgcccagaacata

SEQ ID NO: 1401738 - DNA, 25 bp, Homo sapien
gcagatggcccctccgcccagaaca

SEQ ID NO: 1401739 - DNA, 25 bp, Homo sapien
cctgacaaatggtgggtcaaaggga

SEQ ID NO: 1401740 - DNA, 25 bp, Homo sapien
gagacacaaccctgacaaatggtgg

SEQ ID NO: 1401741 - DNA, 25 bp, Homo sapien
ggactggagacacaaccctgacaaa

SEQ ID NO: 1401742 - DNA, 25 bp, Homo sapien
cacaaccctgacaaatggtgggtca

SEQ ID NO: 1401743 - DNA, 25 bp, Homo sapien
gcctaggccagagggagagactgga

SEQ ID NO: 1401744 - DNA, 25 bp, Homo sapien
tcctccacaggactgtcaggcagac

SEQ ID NO: 1401745 - DNA, 25 bp, Homo sapien
agacgacaatcaggggagggaggcc

SEQ ID NO: 1401746 - DNA, 25 bp, Homo sapien
acaggactgtcaggcagactgggca

SEQ ID NO: 1401747 - DNA, 25 bp, Homo sapien
gaggatctggagatcgttgtgcaaa

SEQ ID NO: 1401748 - DNA, 25 bp, Homo sapien
aaagttaagtagaatgaagtcggct

SEQ ID NO: 1401749 - DNA, 25 bp, Homo sapien
tggagatcgttgtgcaaagcgctgt

SEQ ID NO: 1401750 - DNA, 25 bp, Homo sapien
gaatgaagtcggctccttctttctc

SEQ ID NO: 1401751 - DNA, 25 bp, Homo sapien
gttccacctcaggagcttcataagg

SEQ ID NO: 1401752 - DNA, 25 bp, Homo sapien
tccgggaccctgaatgaaaatgctg

SEQ ID NO: 1401753 - DNA, 25 bp, Homo sapien
ctgggctcagatgcctggttccacc

SEQ ID NO: 1401754 - DNA, 25 bp, Homo sapien
taagaagcaacaagcctgggctcag

SEQ ID NO: 1401755 - DNA, 25 bp, Homo sapien
ggagtttgacattccaatcatacag

SEQ ID NO: 1401756 - DNA, 25 bp, Homo sapien
ttcacgagttcgactgcatagtttc

SEQ ID NO: 1401757 - DNA, 25 bp, Homo sapien
cagactgtcattcacgagttcgact

SEQ ID NO: 1401758 - DNA, 25 bp, Homo sapien
ttgaggagtttgacattccaatcat

SEQ ID NO: 1401759 - DNA, 25 bp, Homo sapien
tctttatgggtgactcttgtgcagg

SEQ ID NO: 1401760 - DNA, 25 bp, Homo sapien
gatcaacagctctaggttcaccaca

SEQ ID NO: 1401761 - DNA, 25 bp, Homo sapien
cccagactgagagaaaaagatcaac

SEQ ID NO: 1401762 - DNA, 25 bp, Homo sapien
actggcttgaggagctccattcttg

SEQ ID NO: 1401763 - DNA, 25 bp, Homo sapien
ttcatcagccggtcagtggcctgca

SEQ ID NO: 1401764 - DNA, 25 bp, Homo sapien
cgcctttgaaactctgtgatcggta

SEQ ID NO: 1401765 - DNA, 25 bp, Homo sapien
gatcggtatatatccctgagctcct

SEQ ID NO: 1401766 - DNA, 25 bp, Homo sapien
gtggcctgcaccgagccagacactg

SEQ ID NO: 1401767 - DNA, 25 bp, Homo sapien
tctaggatggccaagttttcttttc

SEQ ID NO: 1401768 - DNA, 25 bp, Homo sapien
ttttaattttctctaggatggccaa

SEQ ID NO: 1401769 - DNA, 25 bp, Homo sapien
tccaatgccatcatcttcagatttc

SEQ ID NO: 1401770 - DNA, 25 bp, Homo sapien
atttaagtaatcttgcctctggttc

SEQ ID NO: 1401771 - DNA, 25 bp, Homo sapien
ctgaagacacgtcttcctgtgtgca

SEQ ID NO: 1401772 - DNA, 25 bp, Homo sapien
tcatcttctgaagacacgtcttcct

SEQ ID NO: 1401773 - DNA, 25 bp, Homo sapien
tcttctgaagacacgtcttcctgtg

SEQ ID NO: 1401774 - DNA, 25 bp, Homo sapien
ttctgaagacacgtcttcctgtgtg

SEQ ID NO: 1401775 - DNA, 25 bp, Homo sapien
caggtcggagatgatcctcttcaga

SEQ ID NO: 1401776 - DNA, 25 bp, Homo sapien
cacatctggatgctgagggaggtta

SEQ ID NO: 1401777 - DNA, 25 bp, Homo sapien
caagggttgatccagcatctccaca

SEQ ID NO: 1401778 - DNA, 25 bp, Homo sapien
gttatagagtttacacaggtcggag

SEQ ID NO: 1401779 - DNA, 25 bp, Homo sapien
tcatcagactccaccgaccagatgg

SEQ ID NO: 1401780 - DNA, 25 bp, Homo sapien
agacagcagccaagttagggtcatc

SEQ ID NO: 1401781 - DNA, 25 bp, Homo sapien
ccaagttagggtcatcagactccac

SEQ ID NO: 1401782 - DNA, 25 bp, Homo sapien
gcagccaagttagggtcatcagact

SEQ ID NO: 1401783 - DNA, 25 bp, Homo sapien
agtccaggcgtgggctgtagggctc

SEQ ID NO: 1401784 - DNA, 25 bp, Homo sapien
gtccaggcgtgggctgtagggctcc

SEQ ID NO: 1401785 - DNA, 25 bp, Homo sapien
ctactgggtatcttagcattgccat

SEQ ID NO: 1401786 - DNA, 25 bp, Homo sapien
ctctactgggtatcttagcattgcc

SEQ ID NO: 1401787 - DNA, 25 bp, Homo sapien
aagatggactcgagcagcttcagct

SEQ ID NO: 1401788 - DNA, 25 bp, Homo sapien
gcagtggatgcggacaggatcccca

SEQ ID NO: 1401789 - DNA, 25 bp, Homo sapien
agcttcagctctcgcctcaggcagg

SEQ ID NO: 1401790 - DNA, 25 bp, Homo sapien
agcaggaactcgcagctcagctcgt

SEQ ID NO: 1401791 - DNA, 25 bp, Homo sapien
ccgggagcctccggcctgcgctccg

SEQ ID NO: 1401792 - DNA, 25 bp, Homo sapien
cgggccgggagcctccggcctgcgc

SEQ ID NO: 1401793 - DNA, 25 bp, Homo sapien
ggcgggccgggagcctccggcctgc

SEQ ID NO: 1401794 - DNA, 25 bp, Homo sapien
ggccgggagcctccggcctgcgctc

SEQ ID NO: 1401795 - DNA, 25 bp, Homo sapien
tgatccccccttcgccaagatggcg

SEQ ID NO: 1401796 - DNA, 25 bp, Homo sapien
tccccccttcgccaagatggcgccg

SEQ ID NO: 1401797 - DNA, 25 bp, Homo sapien
cccccttcgccaagatggcgccgcc

SEQ ID NO: 1401798 - DNA, 25 bp, Homo sapien
cctgatccccccttcgccaagatgg

SEQ ID NO: 1401799 - DNA, 25 bp, Homo sapien
ctctcacgtgactcggtgccgcgtg

SEQ ID NO: 1401800 - DNA, 25 bp, Homo sapien
tcacgtgactcggtgccgcgtgctc

SEQ ID NO: 1401801 - DNA, 25 bp, Homo sapien
gcgcctcagtgcgagtttgcgtatg

SEQ ID NO: 1401802 - DNA, 25 bp, Homo sapien
tatgtcgtgcgtgcttgcgcgcgac

SEQ ID NO: 1401803 - DNA, 25 bp, Homo sapien
cccccgagccgtggcgagcgtgccc

SEQ ID NO: 1401804 - DNA, 25 bp, Homo sapien
gtggcgagcgtgcccggcactccat

SEQ ID NO: 1401805 - DNA, 25 bp, Homo sapien
gagccgtggcgagcgtgcccggcac

SEQ ID NO: 1401806 - DNA, 25 bp, Homo sapien
ccgcgcaggacgctgtttcctgccc

SEQ ID NO: 1401807 - DNA, 25 bp, Homo sapien
agtaggtagtgcctccggaccctcg

SEQ ID NO: 1401808 - DNA, 25 bp, Homo sapien
caggagtaggtagtgcctccggacc

SEQ ID NO: 1401809 - DNA, 25 bp, Homo sapien
gctgccaggagtaggtagtgcctcc

SEQ ID NO: 1401810 - DNA, 25 bp, Homo sapien
agtgcctccggaccctcgctaggtg

SEQ ID NO: 1401811 - DNA, 25 bp, Homo sapien
taggcagttgaaacccaataatatg

SEQ ID NO: 1401812 - DNA, 25 bp, Homo sapien
cgtgcccactagaattcctgcaatt

SEQ ID NO: 1401813 - DNA, 25 bp, Homo sapien
gactgagaagtcattacatggtaca

SEQ ID NO: 1401814 - DNA, 25 bp, Homo sapien
cagcagtgttcacgattctcactaa

SEQ ID NO: 1401815 - DNA, 25 bp, Homo sapien
cccaagtactgggaggtgttgccca

SEQ ID NO: 1401816 - DNA, 25 bp, Homo sapien
tccttaagcagagggactacacaca

SEQ ID NO: 1401817 - DNA, 25 bp, Homo sapien
tgcatctgttcatcaccctctgtgg

SEQ ID NO: 1401818 - DNA, 25 bp, Homo sapien
tgggagtgtctcaccaaaactttgc

SEQ ID NO: 1401819 - DNA, 25 bp, Homo sapien
gcgcatgccccggaacaagtcgtgc

SEQ ID NO: 1401820 - DNA, 25 bp, Homo sapien
acatgcgcatgccccggaacaagtc

SEQ ID NO: 1401821 - DNA, 25 bp, Homo sapien
cccggaacaagtcgtgcagatttac

SEQ ID NO: 1401822 - DNA, 25 bp, Homo sapien
catgccccggaacaagtcgtgcaga

SEQ ID NO: 1401823 - DNA, 25 bp, Homo sapien
ggtctgtagtccttctacttctcca

SEQ ID NO: 1401824 - DNA, 25 bp, Homo sapien
ccatgtgcatcatggggtctgtagt

SEQ ID NO: 1401825 - DNA, 25 bp, Homo sapien
ggggtctgtagtccttctacttctc

SEQ ID NO: 1401826 - DNA, 25 bp, Homo sapien
ccttaattccacgacctggggacat

SEQ ID NO: 1401827 - DNA, 25 bp, Homo sapien
caataagttgcttttagctgggctt

SEQ ID NO: 1401828 - DNA, 25 bp, Homo sapien
tcaataagttgcttttagctgggct

SEQ ID NO: 1401829 - DNA, 25 bp, Homo sapien
tccgcgtgacaatcctatgggaagg

SEQ ID NO: 1401830 - DNA, 25 bp, Homo sapien
ttctactgaggaaggctacggcaga

SEQ ID NO: 1401831 - DNA, 25 bp, Homo sapien
gccaggtcctcagcatgcgttgtct

SEQ ID NO: 1401832 - DNA, 25 bp, Homo sapien
gttactaagggtctgctctgcgcca

SEQ ID NO: 1401833 - DNA, 25 bp, Homo sapien
ttgactagacagcgaacagccacct

SEQ ID NO: 1401834 - DNA, 25 bp, Homo sapien
cttgactagacagcgaacagccacc

SEQ ID NO: 1401835 - DNA, 25 bp, Homo sapien
tgactagacagcgaacagccacctt

SEQ ID NO: 1401836 - DNA, 25 bp, Homo sapien
ggttctagacttcccagctgccgga

SEQ ID NO: 1401837 - DNA, 25 bp, Homo sapien
tggctcagcacgttcccagatgaag

SEQ ID NO: 1401838 - DNA, 25 bp, Homo sapien
ggtgacaaccctgtagcctgaagag

SEQ ID NO: 1401839 - DNA, 25 bp, Homo sapien
tatcgagggacacgtaaaagcagca

SEQ ID NO: 1401840 - DNA, 25 bp, Homo sapien
ccaatcacacttccgtggcactggg

SEQ ID NO: 1401841 - DNA, 25 bp, Homo sapien
aatcacacttccgtggcactgggaa

SEQ ID NO: 1401842 - DNA, 25 bp, Homo sapien
tccaatcacacttccgtggcactgg

SEQ ID NO: 1401843 - DNA, 25 bp, Homo sapien
tcacacttccgtggcactgggaact

SEQ ID NO: 1401844 - DNA, 25 bp, Homo sapien
ccatgtgatgaggaatgctacgacc

SEQ ID NO: 1401845 - DNA, 25 bp, Homo sapien
taatcaagaccgcaagaggtcagtg

SEQ ID NO: 1401846 - DNA, 25 bp, Homo sapien
catgatccagagttgactgaaacct

SEQ ID NO: 1401847 - DNA, 25 bp, Homo sapien
ttaagaggaaatggaccgcaggtgc

SEQ ID NO: 1401848 - DNA, 25 bp, Homo sapien
cggtaacggaaggagcagagcttct

SEQ ID NO: 1401849 - DNA, 25 bp, Homo sapien
tggcctcaccataggagagtctcag

SEQ ID NO: 1401850 - DNA, 25 bp, Homo sapien
gagtctcagtagatccctgcggtaa

SEQ ID NO: 1401851 - DNA, 25 bp, Homo sapien
gaagtagttcttggccgtctcgtag

SEQ ID NO: 1401852 - DNA, 25 bp, Homo sapien
ctagagaaacaaaagcactcattat

SEQ ID NO: 1401853 - DNA, 25 bp, Homo sapien
aacaaaagcactcattattcacctg

SEQ ID NO: 1401854 - DNA, 25 bp, Homo sapien
acaaaagcactcattattcacctgg

SEQ ID NO: 1401855 - DNA, 25 bp, Homo sapien
gagaaacaaaagcactcattattca

SEQ ID NO: 1401856 - DNA, 25 bp, Homo sapien
tagtcttcccggattgccttttgga

SEQ ID NO: 1401857 - DNA, 25 bp, Homo sapien
caggtcatagccatcagccagacac

SEQ ID NO: 1401858 - DNA, 25 bp, Homo sapien
cacagtgcctctggtaccgtccagg

SEQ ID NO: 1401859 - DNA, 25 bp, Homo sapien
cagttgacgcttgtctccttagtct

SEQ ID NO: 1401860 - DNA, 25 bp, Homo sapien
tcccagaagcaacgggagaaagatg

SEQ ID NO: 1401861 - DNA, 25 bp, Homo sapien
ctaggaatcccagaagcaacgggag

SEQ ID NO: 1401862 - DNA, 25 bp, Homo sapien
ggagaaagatggaaacctttcagga

SEQ ID NO: 1401863 - DNA, 25 bp, Homo sapien
gagaaagatggaaacctttcaggaa

SEQ ID NO: 1401864 - DNA, 25 bp, Homo sapien
gacagcaaatagcacgggtcagatg

SEQ ID NO: 1401865 - DNA, 25 bp, Homo sapien
gggatgtcgtagtccatcctcaaat

SEQ ID NO: 1401866 - DNA, 25 bp, Homo sapien
gtggttgacaataaagggatgtcgt

SEQ ID NO: 1401867 - DNA, 25 bp, Homo sapien
ccatctcttgtcacacgacagcaaa

SEQ ID NO: 1401868 - DNA, 25 bp, Homo sapien
cagatttgagataaatgggctgcag

SEQ ID NO: 1401869 - DNA, 25 bp, Homo sapien
gaatgccatcccacgtaggcacaat

SEQ ID NO: 1401870 - DNA, 25 bp, Homo sapien
gcccagcacgttccagcgtaggatt

SEQ ID NO: 1401871 - DNA, 25 bp, Homo sapien
cactacaggacatggtacggagtct

SEQ ID NO: 1401872 - DNA, 25 bp, Homo sapien
ggacttgtcaaagagggcgccatct

SEQ ID NO: 1401873 - DNA, 25 bp, Homo sapien
tttgggattctcgaagacagggtag

SEQ ID NO: 1401874 - DNA, 25 bp, Homo sapien
cacggtcgctgcaggacttgtcaaa

SEQ ID NO: 1401875 - DNA, 25 bp, Homo sapien
tgtgctttccatagcacggtcgctg

SEQ ID NO: 1401876 - DNA, 25 bp, Homo sapien
gggctccaaaacagtcagatgtgac

SEQ ID NO: 1401877 - DNA, 25 bp, Homo sapien
gaatatggacctcaaacccacagtg

SEQ ID NO: 1401878 - DNA, 25 bp, Homo sapien
tatcaggttcgatttacaggccagg

SEQ ID NO: 1401879 - DNA, 25 bp, Homo sapien
cagcagtacatgtgagtcatctaca

SEQ ID NO: 1401880 - DNA, 25 bp, Homo sapien
cctcccttagcaggttcaaatatac

SEQ ID NO: 1401881 - DNA, 25 bp, Homo sapien
tcctcccttagcaggttcaaatata

SEQ ID NO: 1401882 - DNA, 25 bp, Homo sapien
acagatggaatgacacagtcttttt

SEQ ID NO: 1401883 - DNA, 25 bp, Homo sapien
agtctgggagttgtatttcattaac

SEQ ID NO: 1401884 - DNA, 25 bp, Homo sapien
tttcattaactcactgtagagaaac

SEQ ID NO: 1401885 - DNA, 25 bp, Homo sapien
catggcagtcattgacagtttctcc

SEQ ID NO: 1401886 - DNA, 25 bp, Homo sapien
ctgatgaagcctctccgggagatta

SEQ ID NO: 1401887 - DNA, 25 bp, Homo sapien
tctccttttaggctgagagaatctc

SEQ ID NO: 1401888 - DNA, 25 bp, Homo sapien
taggctgagagaatctcctttcaca

SEQ ID NO: 1401889 - DNA, 25 bp, Homo sapien
ggacttacatgcatggactccaggg

SEQ ID NO: 1401890 - DNA, 25 bp, Homo sapien
gaggatgagaggcacccgctttcag

SEQ ID NO: 1401891 - DNA, 25 bp, Homo sapien
tctcctctaggaactaagaactcat

SEQ ID NO: 1401892 - DNA, 25 bp, Homo sapien
cactctgaattgactgtagctaaaa

SEQ ID NO: 1401893 - DNA, 25 bp, Homo sapien
tcagcatggctatctggtcatggaa

SEQ ID NO: 1401894 - DNA, 25 bp, Homo sapien
tcagagtgttgaagcaccggtggct

SEQ ID NO: 1401895 - DNA, 25 bp, Homo sapien
tttttcataatgatggcggccagaa

SEQ ID NO: 1401896 - DNA, 25 bp, Homo sapien
ggccagaatcttgcggccgagcaag

SEQ ID NO: 1401897 - DNA, 25 bp, Homo sapien
caagctctacttgtcgtgtgagtca

SEQ ID NO: 1401898 - DNA, 25 bp, Homo sapien
cagttactgctctctcgaggctaag

SEQ ID NO: 1401899 - DNA, 25 bp, Homo sapien
cgtgggcagggagatcaagctctac

SEQ ID NO: 1401900 - DNA, 25 bp, Homo sapien
gtaaagcctaggaataactcgcatg

SEQ ID NO: 1401901 - DNA, 25 bp, Homo sapien
aggagcatagttcttctgagactgg

SEQ ID NO: 1401902 - DNA, 25 bp, Homo sapien
tgagaggaggagcatagttcttctg

SEQ ID NO: 1401903 - DNA, 25 bp, Homo sapien
gagaggaggagcatagttcttctga

SEQ ID NO: 1401904 - DNA, 25 bp, Homo sapien
aggaggagcatagttcttctgagac

SEQ ID NO: 1401905 - DNA, 25 bp, Homo sapien
tctgtgaaacccatgcgttctgcct

SEQ ID NO: 1401906 - DNA, 25 bp, Homo sapien
gcagacggctgggaaccagcgaccc

SEQ ID NO: 1401907 - DNA, 25 bp, Homo sapien
ttgctgtgtgcgcagacggctggga

SEQ ID NO: 1401908 - DNA, 25 bp, Homo sapien
ccaatcaagacacggagagccgcat

SEQ ID NO: 1401909 - DNA, 25 bp, Homo sapien
ggagcgggcgtactccaaaaggcca

SEQ ID NO: 1401910 - DNA, 25 bp, Homo sapien
cacccacagggttggtgttcaggta

SEQ ID NO: 1401911 - DNA, 25 bp, Homo sapien
ggtatctcacgagctcgccaatctt

SEQ ID NO: 1401912 - DNA, 25 bp, Homo sapien
gactggtcgaccaacttgaattcag

SEQ ID NO: 1401913 - DNA, 25 bp, Homo sapien
tcatggattccaagttatcaagtga

SEQ ID NO: 1401914 - DNA, 25 bp, Homo sapien
tgggcatcatggattccaagttatc

SEQ ID NO: 1401915 - DNA, 25 bp, Homo sapien
gcatcatggattccaagttatcaag

SEQ ID NO: 1401916 - DNA, 25 bp, Homo sapien
catggattccaagttatcaagtgac

SEQ ID NO: 1401917 - DNA, 25 bp, Homo sapien
gccactttcttgctgggagcactca

SEQ ID NO: 1401918 - DNA, 25 bp, Homo sapien
ggagttggtcgcctccccatgcagg

SEQ ID NO: 1401919 - DNA, 25 bp, Homo sapien
tcagaagccatggagttggtcgcct

SEQ ID NO: 1401920 - DNA, 25 bp, Homo sapien
cactttcttgctgggagcactcaca

SEQ ID NO: 1401921 - DNA, 25 bp, Homo sapien
tcgcaggagttccccaatttgtgca

SEQ ID NO: 1401922 - DNA, 25 bp, Homo sapien
tggtgacggggctcttcccagaaaa

SEQ ID NO: 1401923 - DNA, 25 bp, Homo sapien
gtgcatacactcaagcagtgtggtg

SEQ ID NO: 1401924 - DNA, 25 bp, Homo sapien
gttccccaatttgtgcatacactca

SEQ ID NO: 1401925 - DNA, 25 bp, Homo sapien
tccactgtccttggctttggcttcc

SEQ ID NO: 1401926 - DNA, 25 bp, Homo sapien
cttcagctgggggaaactctcggcc

SEQ ID NO: 1401927 - DNA, 25 bp, Homo sapien
tttggcttcctctagcagaattgtc

SEQ ID NO: 1401928 - DNA, 25 bp, Homo sapien
gaaactctcggccattgatgacaac

SEQ ID NO: 1401929 - DNA, 25 bp, Homo sapien
cagtggcctgcttttgtccctagac

SEQ ID NO: 1401930 - DNA, 25 bp, Homo sapien
gctcagtgaagcaaacataggcaca

SEQ ID NO: 1401931 - DNA, 25 bp, Homo sapien
aagcatttgttctaggcctctggac

SEQ ID NO: 1401932 - DNA, 25 bp, Homo sapien
aagcaattgtggtagactggcctcc

SEQ ID NO: 1401933 - DNA, 25 bp, Homo sapien
cataaaggtcagtggaattctcccc

SEQ ID NO: 1401934 - DNA, 25 bp, Homo sapien
tattaggacctacagtgcagggcct

SEQ ID NO: 1401935 - DNA, 25 bp, Homo sapien
ctatctgagtgaggtaaaggctgac

SEQ ID NO: 1401936 - DNA, 25 bp, Homo sapien
tcagccaagactgcgtcaggagcaa

SEQ ID NO: 1401937 - DNA, 25 bp, Homo sapien
tgtagggtgaacaccgtggcaagcc

SEQ ID NO: 1401938 - DNA, 25 bp, Homo sapien
cacaggtttgactagcgaactgggc

SEQ ID NO: 1401939 - DNA, 25 bp, Homo sapien
gatggctcgaaactcacctggtgct

SEQ ID NO: 1401940 - DNA, 25 bp, Homo sapien
tggtgctgcgcggatactattcaag

SEQ ID NO: 1401941 - DNA, 25 bp, Homo sapien
gaactctgcgtttcttttggtctca

SEQ ID NO: 1401942 - DNA, 25 bp, Homo sapien
tctaactttatgacaggttcctgcc

SEQ ID NO: 1401943 - DNA, 25 bp, Homo sapien
ctgtggttaccatgttatttgaggc

SEQ ID NO: 1401944 - DNA, 25 bp, Homo sapien
tgggtatattacaggtgaggaactc

SEQ ID NO: 1401945 - DNA, 25 bp, Homo sapien
gagatagtcgcagattttctccttg

SEQ ID NO: 1401946 - DNA, 25 bp, Homo sapien
cagggcagaggagtcagacacattg

SEQ ID NO: 1401947 - DNA, 25 bp, Homo sapien
ttgtctatagacatccccctgcctt

SEQ ID NO: 1401948 - DNA, 25 bp, Homo sapien
acagcatttatatctcgggccttgg

SEQ ID NO: 1401949 - DNA, 25 bp, Homo sapien
tgatttctttcttcggagtcccaag

SEQ ID NO: 1401950 - DNA, 25 bp, Homo sapien
caagtttcccagacagatcatgtgc

SEQ ID NO: 1401951 - DNA, 25 bp, Homo sapien
cgctgtgctggttccaagcctgagt

SEQ ID NO: 1401952 - DNA, 25 bp, Homo sapien
tctttgccagggagtataaaactcg

SEQ ID NO: 1401953 - DNA, 25 bp, Homo sapien
aaggcaatcaacacctctctgtggc

SEQ ID NO: 1401954 - DNA, 25 bp, Homo sapien
tctgtggcagactcctgccacgtgg

SEQ ID NO: 1401955 - DNA, 25 bp, Homo sapien
atgctggaaccctctctggagcccc

SEQ ID NO: 1401956 - DNA, 25 bp, Homo sapien
ggaaatgtgaggaaaggcaatcaac

SEQ ID NO: 1401957 - DNA, 25 bp, Homo sapien
actggaggcaagtagtactggaaac

SEQ ID NO: 1401958 - DNA, 25 bp, Homo sapien
gcaagtagtactggaaaccttggcc

SEQ ID NO: 1401959 - DNA, 25 bp, Homo sapien
aggcaagtagtactggaaaccttgg

SEQ ID NO: 1401960 - DNA, 25 bp, Homo sapien
tggaggcaagtagtactggaaacct

SEQ ID NO: 1401961 - DNA, 25 bp, Homo sapien
tgtgctcatagccttgaaatggatg

SEQ ID NO: 1401962 - DNA, 25 bp, Homo sapien
aatggatgggtgtagtatccgctga

SEQ ID NO: 1401963 - DNA, 25 bp, Homo sapien
gcaggaaactactgggggaagatcc

SEQ ID NO: 1401964 - DNA, 25 bp, Homo sapien
tgtagtatccgctgagggaataccc

SEQ ID NO: 1401965 - DNA, 25 bp, Homo sapien
tctcctggaggctgcacaggtagag

SEQ ID NO: 1401966 - DNA, 25 bp, Homo sapien
cgccccctcctcagactctcctgga

SEQ ID NO: 1401967 - DNA, 25 bp, Homo sapien
cctggaggctgcacaggtagaggtg

SEQ ID NO: 1401968 - DNA, 25 bp, Homo sapien
ctctcctggaggctgcacaggtaga

SEQ ID NO: 1401969 - DNA, 25 bp, Homo sapien
gcagtgtgatctcagctcactgcaa

SEQ ID NO: 1401970 - DNA, 25 bp, Homo sapien
cggctcactgcaatcaggctggagt

SEQ ID NO: 1401971 - DNA, 25 bp, Homo sapien
tgatctcagctcactgcaatctccg

SEQ ID NO: 1401972 - DNA, 25 bp, Homo sapien
tggtgtcgatctcctgatccgccct

SEQ ID NO: 1401973 - DNA, 25 bp, Homo sapien
aagccaccgttgagtacagccattt

SEQ ID NO: 1401974 - DNA, 25 bp, Homo sapien
aacaccaagccaccgttgagtacag

SEQ ID NO: 1401975 - DNA, 25 bp, Homo sapien
cctaaacaccaagccaccgttgagt

SEQ ID NO: 1401976 - DNA, 25 bp, Homo sapien
accaagccaccgttgagtacagcca

SEQ ID NO: 1401977 - DNA, 25 bp, Homo sapien
ccgccggcggcacgaccctggcccg

SEQ ID NO: 1401978 - DNA, 25 bp, Homo sapien
cagcccctcgaggcccccacgcctc

SEQ ID NO: 1401979 - DNA, 25 bp, Homo sapien
cggcggcacgaccctggcccgaccg

SEQ ID NO: 1401980 - DNA, 25 bp, Homo sapien
gccggcggcacgaccctggcccgac

SEQ ID NO: 1401981 - DNA, 25 bp, Homo sapien
aaactccgcgggtctgcgcgccggg

SEQ ID NO: 1401982 - DNA, 25 bp, Homo sapien
cggcacgggaaactccgcgggtctg

SEQ ID NO: 1401983 - DNA, 25 bp, Homo sapien
cgccgggcccaagatggctccggtt

SEQ ID NO: 1401984 - DNA, 25 bp, Homo sapien
aagatggctccggttcaatttcgct

SEQ ID NO: 1401985 - DNA, 25 bp, Homo sapien
tacaccattactttcaaaaagataa

SEQ ID NO: 1401986 - DNA, 25 bp, Homo sapien
caccattactttcaaaaagataact

SEQ ID NO: 1401987 - DNA, 25 bp, Homo sapien
ttacaccattactttcaaaaagata

SEQ ID NO: 1401988 - DNA, 25 bp, Homo sapien
caagctctagctctataggtgcatt

SEQ ID NO: 1401989 - DNA, 25 bp, Homo sapien
ttccacatagcagtgccaagctcta

SEQ ID NO: 1401990 - DNA, 25 bp, Homo sapien
gctctagctctataggtgcattcag

SEQ ID NO: 1401991 - DNA, 25 bp, Homo sapien
tctagctctataggtgcattcaggg

SEQ ID NO: 1401992 - DNA, 25 bp, Homo sapien
tgttatatttactagctatggctgt

SEQ ID NO: 1401993 - DNA, 25 bp, Homo sapien
caaaggcgatgagatgcagtatgtt

SEQ ID NO: 1401994 - DNA, 25 bp, Homo sapien
cagagcgtggctgcgtttgggtgaa

SEQ ID NO: 1401995 - DNA, 25 bp, Homo sapien
gaagaccaaacaaaggcgatgagat

SEQ ID NO: 1401996 - DNA, 25 bp, Homo sapien
cattgctgggatactagtcactgag

SEQ ID NO: 1401997 - DNA, 25 bp, Homo sapien
ctctgggtgaaaaggccaaaccttg

SEQ ID NO: 1401998 - DNA, 25 bp, Homo sapien
aagactcaaaccacatagcctgatg

SEQ ID NO: 1401999 - DNA, 25 bp, Homo sapien
ccagcacagtgtacccatgagcctg

SEQ ID NO: 1402000 - DNA, 25 bp, Homo sapien
tccagctttgccgttaattaatgtc

SEQ ID NO: 1402001 - DNA, 25 bp, Homo sapien
ggataatatttagtgcactcagttg

SEQ ID NO: 1402002 - DNA, 25 bp, Homo sapien
cgtgtcaggtacatagcaagtgcta

SEQ ID NO: 1402003 - DNA, 25 bp, Homo sapien
ggaccttagccaagattcacttctg

SEQ ID NO: 1402004 - DNA, 25 bp, Homo sapien
tgaagtgtacagcagagagattatg

SEQ ID NO: 1402005 - DNA, 25 bp, Homo sapien
gaagtgtacagcagagagattatgg

SEQ ID NO: 1402006 - DNA, 25 bp, Homo sapien
tgcaaagtggcagacctgactccaa

SEQ ID NO: 1402007 - DNA, 25 bp, Homo sapien
cactgtgtaggcctctgtttgcaag

SEQ ID NO: 1402008 - DNA, 25 bp, Homo sapien
caagctcctgggtactgggccctta

SEQ ID NO: 1402009 - DNA, 25 bp, Homo sapien
tcgaattctgacacctcgggcaagg

SEQ ID NO: 1402010 - DNA, 25 bp, Homo sapien
ctgataccaacacgaaacacctggg

SEQ ID NO: 1402011 - DNA, 25 bp, Homo sapien
gcctcctacgccttccctgtggaag

SEQ ID NO: 1402012 - DNA, 25 bp, Homo sapien
cggccgtgaccccgcagtgagcttt

SEQ ID NO: 1402013 - DNA, 25 bp, Homo sapien
aagaggaggtgacgcaactaggcct

SEQ ID NO: 1402014 - DNA, 25 bp, Homo sapien
tacccagctgttgggcctttggtac

SEQ ID NO: 1402015 - DNA, 25 bp, Homo sapien
ctccagtcactctccgaggcggggg

SEQ ID NO: 1402016 - DNA, 25 bp, Homo sapien
gagccggcgagagggaaacaagggc

SEQ ID NO: 1402017 - DNA, 25 bp, Homo sapien
acgagcgccggagcatccgtgcgca

SEQ ID NO: 1402018 - DNA, 25 bp, Homo sapien
tgtgcccctaccagctgcgtcccca

SEQ ID NO: 1402019 - DNA, 25 bp, Homo sapien
gccactgtgcccctaccagctgcgt

SEQ ID NO: 1402020 - DNA, 25 bp, Homo sapien
actgtgcccctaccagctgcgtccc

SEQ ID NO: 1402021 - DNA, 25 bp, Homo sapien
aggctgccgagaccggccactgtgc

SEQ ID NO: 1402022 - DNA, 25 bp, Homo sapien
ccgcatgggccgcgcgttccagccc

SEQ ID NO: 1402023 - DNA, 25 bp, Homo sapien
catgggccgcgcgttccagcccagg

SEQ ID NO: 1402024 - DNA, 25 bp, Homo sapien
agccgagaaggacagaggctcttac

SEQ ID NO: 1402025 - DNA, 25 bp, Homo sapien
gcatgggccgcgcgttccagcccag

SEQ ID NO: 1402026 - DNA, 25 bp, Homo sapien
gggtcttgcacttcctcgggacacg

SEQ ID NO: 1402027 - DNA, 25 bp, Homo sapien
gtcttgcacttcctcgggacacggc

SEQ ID NO: 1402028 - DNA, 25 bp, Homo sapien
gacacccggagactgccagtgcggc

SEQ ID NO: 1402029 - DNA, 25 bp, Homo sapien
gacacggccggacacccggagactg

SEQ ID NO: 1402030 - DNA, 25 bp, Homo sapien
cgggaatcaatggtctggtcgcaga

SEQ ID NO: 1402031 - DNA, 25 bp, Homo sapien
caatggtctggtcgcagattggtga

SEQ ID NO: 1402032 - DNA, 25 bp, Homo sapien
cttcagtcgggaatcaatggtctgg

SEQ ID NO: 1402033 - DNA, 25 bp, Homo sapien
tggtctggtcgcagattggtgacat

SEQ ID NO: 1402034 - DNA, 25 bp, Homo sapien
taatatgtcatccaccttacagggt

SEQ ID NO: 1402035 - DNA, 25 bp, Homo sapien
ggccagcagtagaactgaagcctgt

SEQ ID NO: 1402036 - DNA, 25 bp, Homo sapien
gaaaatgcagtctcccatccagatc

SEQ ID NO: 1402037 - DNA, 25 bp, Homo sapien
ggatcttacaaatccaatggtggcc

SEQ ID NO: 1402038 - DNA, 25 bp, Homo sapien
ctgtgtgtgttaccaaaaggaagcc

SEQ ID NO: 1402039 - DNA, 25 bp, Homo sapien
tagtaaggaacacagtaacaacgcg

SEQ ID NO: 1402040 - DNA, 25 bp, Homo sapien
gaagccatatttggagctggtctaa

SEQ ID NO: 1402041 - DNA, 25 bp, Homo sapien
ggagagagacttcccactagtccac

SEQ ID NO: 1402042 - DNA, 25 bp, Homo sapien
taaccactcttatttatgcattacc

SEQ ID NO: 1402043 - DNA, 25 bp, Homo sapien
tagctattgccttatgggaaccaca

SEQ ID NO: 1402044 - DNA, 25 bp, Homo sapien
tatttatgcattaccaccaagggaa

SEQ ID NO: 1402045 - DNA, 25 bp, Homo sapien
ctattgccttatgggaaccacagaa

SEQ ID NO: 1402046 - DNA, 25 bp, Homo sapien
ccttggagtgtttcttgttggtgca

SEQ ID NO: 1402047 - DNA, 25 bp, Homo sapien
ccaaggcactttttacaatgaacag

SEQ ID NO: 1402048 - DNA, 25 bp, Homo sapien
tatggcgccaatatcagaattcacg

SEQ ID NO: 1402049 - DNA, 25 bp, Homo sapien
cctctttagattgaagtccaaggca

SEQ ID NO: 1402050 - DNA, 25 bp, Homo sapien
ggaagaacacaaggatcgagaaaca

SEQ ID NO: 1402051 - DNA, 25 bp, Homo sapien
tactggtgagatgctgagttcctca

SEQ ID NO: 1402052 - DNA, 25 bp, Homo sapien
agttcttactggtgagatgctgagt

SEQ ID NO: 1402053 - DNA, 25 bp, Homo sapien
gaaacacaacaatttctgtactatg

SEQ ID NO: 1402054 - DNA, 25 bp, Homo sapien
taaatgtaagtcttggtctgagcag

SEQ ID NO: 1402055 - DNA, 25 bp, Homo sapien
caagggttagcatatagccatggac

SEQ ID NO: 1402056 - DNA, 25 bp, Homo sapien
tatcactacggtgaggtgaggccag

SEQ ID NO: 1402057 - DNA, 25 bp, Homo sapien
gagactcaaggaagagatagcttca

SEQ ID NO: 1402058 - DNA, 25 bp, Homo sapien
taaaggacaatatctcaacgggaac

SEQ ID NO: 1402059 - DNA, 25 bp, Homo sapien
tgataaacatgtgggaaccttgctc

SEQ ID NO: 1402060 - DNA, 25 bp, Homo sapien
ggtgcccggcaatcactaacagtga

SEQ ID NO: 1402061 - DNA, 25 bp, Homo sapien
ggagctcggcctaacatataactga

SEQ ID NO: 1402062 - DNA, 25 bp, Homo sapien
ggcacaagctttctactaccacaag

SEQ ID NO: 1402063 - DNA, 25 bp, Homo sapien
taatttctattcatgcagcctggca

SEQ ID NO: 1402064 - DNA, 25 bp, Homo sapien
tccagtaatggcgtaagacaaaaag

SEQ ID NO: 1402065 - DNA, 25 bp, Homo sapien
ccagttcacgtttgggtgtttccag

SEQ ID NO: 1402066 - DNA, 25 bp, Homo sapien
ctatatataccagattcttgagcag

SEQ ID NO: 1402067 - DNA, 25 bp, Homo sapien
tataccagattcttgagcagataat

SEQ ID NO: 1402068 - DNA, 25 bp, Homo sapien
cagattcttgagcagataattaaac

SEQ ID NO: 1402069 - DNA, 25 bp, Homo sapien
cacctggctatatataccagattct

SEQ ID NO: 1402070 - DNA, 25 bp, Homo sapien
tctggactggcttcgctgttggcta

SEQ ID NO: 1402071 - DNA, 25 bp, Homo sapien
ccagaggcttccgtagacaaaagga

SEQ ID NO: 1402072 - DNA, 25 bp, Homo sapien
ctgattcgagtatatctgttttggc

SEQ ID NO: 1402073 - DNA, 25 bp, Homo sapien
tgttttggcaagttgtgggcagctc

SEQ ID NO: 1402074 - DNA, 25 bp, Homo sapien
agattgagcgtggatttctgttctc

SEQ ID NO: 1402075 - DNA, 25 bp, Homo sapien
tcttcccgctcccaagtagaggcac

SEQ ID NO: 1402076 - DNA, 25 bp, Homo sapien
aagggccctgccagaggcgtcgctt

SEQ ID NO: 1402077 - DNA, 25 bp, Homo sapien
ccagaggcgtcgcttcctgtcatct

SEQ ID NO: 1402078 - DNA, 25 bp, Homo sapien
cttgatggcaaagcgaccaggagag

SEQ ID NO: 1402079 - DNA, 25 bp, Homo sapien
ccaagcacgctgaatgaacatgagt

SEQ ID NO: 1402080 - DNA, 25 bp, Homo sapien
gtttcaaggcatgtcggaccaagca

SEQ ID NO: 1402081 - DNA, 25 bp, Homo sapien
tgatttgcatcttaagacctatggg

SEQ ID NO: 1402082 - DNA, 25 bp, Homo sapien
cggggtcgggaaggaggtggagctg

SEQ ID NO: 1402083 - DNA, 25 bp, Homo sapien
ctgcttgaacttgtgtacggggtcg

SEQ ID NO: 1402084 - DNA, 25 bp, Homo sapien
ttagcaactgcttgaacttgtgtac

SEQ ID NO: 1402085 - DNA, 25 bp, Homo sapien
gcaactgcttgaacttgtgtacggg

SEQ ID NO: 1402086 - DNA, 25 bp, Homo sapien
ggcggtgagatgctccagcttcgac

SEQ ID NO: 1402087 - DNA, 25 bp, Homo sapien
gctgctggcgcagggtgtcggcgat

SEQ ID NO: 1402088 - DNA, 25 bp, Homo sapien
tccaggtcttcgctccggtcattga

SEQ ID NO: 1402089 - DNA, 25 bp, Homo sapien
gagttctgtgattaagtcatacatg

SEQ ID NO: 1402090 - DNA, 25 bp, Homo sapien
ggatgctgaagtgtgcacatttttg

SEQ ID NO: 1402091 - DNA, 25 bp, Homo sapien
aatgaaacgccctccacagtatgac

SEQ ID NO: 1402092 - DNA, 25 bp, Homo sapien
caatgggagaaatgaaacgccctcc

SEQ ID NO: 1402093 - DNA, 25 bp, Homo sapien
tctggtcaaggaaggatacaggctt

SEQ ID NO: 1402094 - DNA, 25 bp, Homo sapien
cattatgataattgacatctgctgg

SEQ ID NO: 1402095 - DNA, 25 bp, Homo sapien
gggctgtacacttaatatacaattc

SEQ ID NO: 1402096 - DNA, 25 bp, Homo sapien
ccagggaatgtgttccattatgata

SEQ ID NO: 1402097 - DNA, 25 bp, Homo sapien
ctggccctgggctgtacacttaata

SEQ ID NO: 1402098 - DNA, 25 bp, Homo sapien
aaggtccaccagagtgttggcttgg

SEQ ID NO: 1402099 - DNA, 25 bp, Homo sapien
gttggcttggtcactcagcttcctc

SEQ ID NO: 1402100 - DNA, 25 bp, Homo sapien
tctgttccatcttgacgctcctcaa

SEQ ID NO: 1402101 - DNA, 25 bp, Homo sapien
cagagtgttggcttggtcactcagc

SEQ ID NO: 1402102 - DNA, 25 bp, Homo sapien
tttatagattaaccatgtttcccga

SEQ ID NO: 1402103 - DNA, 25 bp, Homo sapien
tagattaaccatgtttcccgaagga

SEQ ID NO: 1402104 - DNA, 25 bp, Homo sapien
ttcctctggtgtttcctcactttgg

SEQ ID NO: 1402105 - DNA, 25 bp, Homo sapien
tttggcatggtcaatcttctttagc

SEQ ID NO: 1402106 - DNA, 25 bp, Homo sapien
tccttgagctcttggccgcagcatc

SEQ ID NO: 1402107 - DNA, 25 bp, Homo sapien
ttgagctcttggccgcagcatccca

SEQ ID NO: 1402108 - DNA, 25 bp, Homo sapien
tcttccttgagctcttggccgcagc

SEQ ID NO: 1402109 - DNA, 25 bp, Homo sapien
tgagctcttggccgcagcatcccat

SEQ ID NO: 1402110 - DNA, 25 bp, Homo sapien
gtggatttgcatttaggtgtttcaa

SEQ ID NO: 1402111 - DNA, 25 bp, Homo sapien
tgaataatttcctcaatactgagca

SEQ ID NO: 1402112 - DNA, 25 bp, Homo sapien
gaataatttcctcaatactgagcat

SEQ ID NO: 1402113 - DNA, 25 bp, Homo sapien
cctgctgttattctggaaggcttgt

SEQ ID NO: 1402114 - DNA, 25 bp, Homo sapien
aatttggttgctcatgggtccctta

SEQ ID NO: 1402115 - DNA, 25 bp, Homo sapien
aattctgtctcgtctcagaaagagg

SEQ ID NO: 1402116 - DNA, 25 bp, Homo sapien
acagtcttgcaggaaatcatcttac

SEQ ID NO: 1402117 - DNA, 25 bp, Homo sapien
gtgagttccagctttcgggccacca

SEQ ID NO: 1402118 - DNA, 25 bp, Homo sapien
catgaagttatgaacgtgcttctcc

SEQ ID NO: 1402119 - DNA, 25 bp, Homo sapien
gttatgaacgtgcttctccgctttg

SEQ ID NO: 1402120 - DNA, 25 bp, Homo sapien
acggccaccacaagggcagtgcagc

SEQ ID NO: 1402121 - DNA, 25 bp, Homo sapien
tgaaagacaaacagcctccggaccc

SEQ ID NO: 1402122 - DNA, 25 bp, Homo sapien
caggagatgcggagtccaggaacca

SEQ ID NO: 1402123 - DNA, 25 bp, Homo sapien
ccagagtagagccaggagatgcgga

SEQ ID NO: 1402124 - DNA, 25 bp, Homo sapien
gggccagggtctcgcctgttccgct

SEQ ID NO: 1402125 - DNA, 25 bp, Homo sapien
ccacatggcacccagaaagttacta

SEQ ID NO: 1402126 - DNA, 25 bp, Homo sapien
catgtccccataaccaatggaaagg

SEQ ID NO: 1402127 - DNA, 25 bp, Homo sapien
gtgaggagacagacacctttcccac

SEQ ID NO: 1402128 - DNA, 25 bp, Homo sapien
tactagttacgtcctgctggtcatg

SEQ ID NO: 1402129 - DNA, 25 bp, Homo sapien
caggagttagtcgatgaacagccat

SEQ ID NO: 1402130 - DNA, 25 bp, Homo sapien
ggagttagtcgatgaacagccattc

SEQ ID NO: 1402131 - DNA, 25 bp, Homo sapien
gacaggagttagtcgatgaacagcc

SEQ ID NO: 1402132 - DNA, 25 bp, Homo sapien
ggaagacaggagttagtcgatgaac

SEQ ID NO: 1402133 - DNA, 25 bp, Homo sapien
acccaaacacatgagggtccacaga

SEQ ID NO: 1402134 - DNA, 25 bp, Homo sapien
tgacccaaacacatgagggtccaca

SEQ ID NO: 1402135 - DNA, 25 bp, Homo sapien
gacccaaacacatgagggtccacag

SEQ ID NO: 1402136 - DNA, 25 bp, Homo sapien
cttgacccaaacacatgagggtcca

SEQ ID NO: 1402137 - DNA, 25 bp, Homo sapien
ggtcaatcttcagagtcacacagtc

SEQ ID NO: 1402138 - DNA, 25 bp, Homo sapien
agccaaatggactgcttcgtccttg

SEQ ID NO: 1402139 - DNA, 25 bp, Homo sapien
tgttggaaatttgcaggcattgagc

SEQ ID NO: 1402140 - DNA, 25 bp, Homo sapien
cctgggtctgatttgtttgttggaa

SEQ ID NO: 1402141 - DNA, 25 bp, Homo sapien
caccgcttcagggttgctgtgctcc

SEQ ID NO: 1402142 - DNA, 25 bp, Homo sapien
tgcgaatttctccaatgaggaagcc

SEQ ID NO: 1402143 - DNA, 25 bp, Homo sapien
tgaggaagccaacaacacgtacctg

SEQ ID NO: 1402144 - DNA, 25 bp, Homo sapien
tgtgaaccctgtgcttgcgaatttc

SEQ ID NO: 1402145 - DNA, 25 bp, Homo sapien
tgttggctgatagaagagtcattcc

SEQ ID NO: 1402146 - DNA, 25 bp, Homo sapien
gaagtcggctgtctgaatatcatct

SEQ ID NO: 1402147 - DNA, 25 bp, Homo sapien
gagtcattccaaaatccttaggctg

SEQ ID NO: 1402148 - DNA, 25 bp, Homo sapien
tcctgtagcgttgagtgcactgccg

SEQ ID NO: 1402149 - DNA, 25 bp, Homo sapien
cagggttagtgtgggaaggacgtgg

SEQ ID NO: 1402150 - DNA, 25 bp, Homo sapien
gcagggttagtgtgggaaggacgtg

SEQ ID NO: 1402151 - DNA, 25 bp, Homo sapien
tctgactcttcataggactggaaac

SEQ ID NO: 1402152 - DNA, 25 bp, Homo sapien
ctgactcttcataggactggaaact

SEQ ID NO: 1402153 - DNA, 25 bp, Homo sapien
tgactcttcataggactggaaactg

SEQ ID NO: 1402154 - DNA, 25 bp, Homo sapien
ctctgactcttcataggactggaaa

SEQ ID NO: 1402155 - DNA, 25 bp, Homo sapien
gaaggagtgatgttcagtctggaca

SEQ ID NO: 1402156 - DNA, 25 bp, Homo sapien
ggacatcagcttgttagctgaagtg

SEQ ID NO: 1402157 - DNA, 25 bp, Homo sapien
ggagtgatgttcagtctggacagcc

SEQ ID NO: 1402158 - DNA, 25 bp, Homo sapien
gagtgatgttcagtctggacagcca

SEQ ID NO: 1402159 - DNA, 25 bp, Homo sapien
gaatacagcccgagcaacttttctg

SEQ ID NO: 1402160 - DNA, 25 bp, Homo sapien
tccactactggctcgaactcctagg

SEQ ID NO: 1402161 - DNA, 25 bp, Homo sapien
tcatctgagtacacctttggtcaca

SEQ ID NO: 1402162 - DNA, 25 bp, Homo sapien
gagtttttacgtacagggtcatcat

SEQ ID NO: 1402163 - DNA, 25 bp, Homo sapien
tcaaatggccttttcgcaagagaag

SEQ ID NO: 1402164 - DNA, 25 bp, Homo sapien
caaatggccttttcgcaagagaagg

SEQ ID NO: 1402165 - DNA, 25 bp, Homo sapien
ctgtgccttggtcttagcgggggct

SEQ ID NO: 1402166 - DNA, 25 bp, Homo sapien
gtcttagcgggggcttgtgacccat

SEQ ID NO: 1402167 - DNA, 25 bp, Homo sapien
actcagaaagccccatgtggaatac

SEQ ID NO: 1402168 - DNA, 25 bp, Homo sapien
agcacaggctctgtactcagaaagc

SEQ ID NO: 1402169 - DNA, 25 bp, Homo sapien
tactcagaaagccccatgtggaata

SEQ ID NO: 1402170 - DNA, 25 bp, Homo sapien
tgtcccagcacaggctctgtactca

SEQ ID NO: 1402171 - DNA, 25 bp, Homo sapien
tacaggatgcgctcgtaggtcatgg

SEQ ID NO: 1402172 - DNA, 25 bp, Homo sapien
ctttcacagacacggacggtccagg

SEQ ID NO: 1402173 - DNA, 25 bp, Homo sapien
gaagaacttgtactcgccaggaatg

SEQ ID NO: 1402174 - DNA, 25 bp, Homo sapien
cgatcaggtacaggcgcaggaacat

SEQ ID NO: 1402175 - DNA, 25 bp, Homo sapien
cagcatcagcacctcctggctggga

SEQ ID NO: 1402176 - DNA, 25 bp, Homo sapien
cctcctggctgggagagcaggccat

SEQ ID NO: 1402177 - DNA, 25 bp, Homo sapien
cacctcctggctgggagagcaggcc

SEQ ID NO: 1402178 - DNA, 25 bp, Homo sapien
gcatcagcacctcctggctgggaga

SEQ ID NO: 1402179 - DNA, 25 bp, Homo sapien
tcccactccactcagttatatttgc

SEQ ID NO: 1402180 - DNA, 25 bp, Homo sapien
cactcagttatatttgctggccagt

SEQ ID NO: 1402181 - DNA, 25 bp, Homo sapien
gttatatttgctggccagtccttct

SEQ ID NO: 1402182 - DNA, 25 bp, Homo sapien
cagtccttctcaagtaactgggtga

SEQ ID NO: 1402183 - DNA, 25 bp, Homo sapien
cagctaacctagaggccttggtcat

SEQ ID NO: 1402184 - DNA, 25 bp, Homo sapien
tgtcagctaacctagaggccttggt

SEQ ID NO: 1402185 - DNA, 25 bp, Homo sapien
aatgtcagctaacctagaggccttg

SEQ ID NO: 1402186 - DNA, 25 bp, Homo sapien
ccttgctccagatccatggaaatgt

SEQ ID NO: 1402187 - DNA, 25 bp, Homo sapien
tctggccgaaacctccttcttgatc

SEQ ID NO: 1402188 - DNA, 25 bp, Homo sapien
tgcttgtcagcaccctcactaaagc

SEQ ID NO: 1402189 - DNA, 25 bp, Homo sapien
ttcttgatcgtccatctgagccgca

SEQ ID NO: 1402190 - DNA, 25 bp, Homo sapien
tcgtccatctgagccgcattcctgt

SEQ ID NO: 1402191 - DNA, 25 bp, Homo sapien
gctctgaggcgccttctgccgagtg

SEQ ID NO: 1402192 - DNA, 25 bp, Homo sapien
ctgaggcgccttctgccgagtgctg

SEQ ID NO: 1402193 - DNA, 25 bp, Homo sapien
gcgccttctgccgagtgctggccat

SEQ ID NO: 1402194 - DNA, 25 bp, Homo sapien
cttgctctgaggcgccttctgccga

SEQ ID NO: 1402195 - DNA, 25 bp, Homo sapien
gctggctgtggctaacacttctaga

SEQ ID NO: 1402196 - DNA, 25 bp, Homo sapien
ctcaacagatgtctgcccgcgacag

SEQ ID NO: 1402197 - DNA, 25 bp, Homo sapien
tcaggtacattcttgcggctggtgc

SEQ ID NO: 1402198 - DNA, 25 bp, Homo sapien
tgagagctcttgcagagcaaagacc

SEQ ID NO: 1402199 - DNA, 25 bp, Homo sapien
gaagccctgtccaacttgagagtga

SEQ ID NO: 1402200 - DNA, 25 bp, Homo sapien
tcttccacagcttaaagtacctgga

SEQ ID NO: 1402201 - DNA, 25 bp, Homo sapien
tgcacaccggagagtaagcaaccag

SEQ ID NO: 1402202 - DNA, 25 bp, Homo sapien
tcaagaagaggtggctttcacccat

SEQ ID NO: 1402203 - DNA, 25 bp, Homo sapien
tttattcaggtaatatccaggagac

SEQ ID NO: 1402204 - DNA, 25 bp, Homo sapien
taagaggctctaactacagcaagag

SEQ ID NO: 1402205 - DNA, 25 bp, Homo sapien
ggaatcagaatgttccactggaaac

SEQ ID NO: 1402206 - DNA, 25 bp, Homo sapien
ggtgggacttgtcctccccatacag

SEQ ID NO: 1402207 - DNA, 25 bp, Homo sapien
atctcactcccaatgaagccagtct

SEQ ID NO: 1402208 - DNA, 25 bp, Homo sapien
agaccatctagaatatccacctcgt

SEQ ID NO: 1402209 - DNA, 25 bp, Homo sapien
agggtaagaccatctagaatatcca

SEQ ID NO: 1402210 - DNA, 25 bp, Homo sapien
agtgtcatctcactcccaatgaagc

SEQ ID NO: 1402211 - DNA, 25 bp, Homo sapien
tcctgggggcccattaagcaggagt

SEQ ID NO: 1402212 - DNA, 25 bp, Homo sapien
accagttctgatgccagccagcctg

SEQ ID NO: 1402213 - DNA, 25 bp, Homo sapien
gccagcctgagaaagtgacttcctg

SEQ ID NO: 1402214 - DNA, 25 bp, Homo sapien
ccagccagcctgagaaagtgacttc

SEQ ID NO: 1402215 - DNA, 25 bp, Homo sapien
ttgctgatgtcagcaccaagtcggg

SEQ ID NO: 1402216 - DNA, 25 bp, Homo sapien
gaagagcttgaagagctgacacccc

SEQ ID NO: 1402217 - DNA, 25 bp, Homo sapien
ttaagtgcgcttgcctgccaaaggg

SEQ ID NO: 1402218 - DNA, 25 bp, Homo sapien
tgcacaaccccggagtgaaagactc

SEQ ID NO: 1402219 - DNA, 25 bp, Homo sapien
tctgagcgagagatgtgtgaccatt

SEQ ID NO: 1402220 - DNA, 25 bp, Homo sapien
cagcaagctgttaatctgagcgaga

SEQ ID NO: 1402221 - DNA, 25 bp, Homo sapien
gttcccacagctgacggagattcct

SEQ ID NO: 1402222 - DNA, 25 bp, Homo sapien
tgtttgaccaagagggaatgggaaa

SEQ ID NO: 1402223 - DNA, 25 bp, Homo sapien
caacattccctttacgatcagctgc

SEQ ID NO: 1402224 - DNA, 25 bp, Homo sapien
tcaacattccctttacgatcagctg

SEQ ID NO: 1402225 - DNA, 25 bp, Homo sapien
aacattccctttacgatcagctgca

SEQ ID NO: 1402226 - DNA, 25 bp, Homo sapien
tcatctcttttcctcgtccaattgt

SEQ ID NO: 1402227 - DNA, 25 bp, Homo sapien
tcaaaggtaaatcggggcagttcat

SEQ ID NO: 1402228 - DNA, 25 bp, Homo sapien
tcgtccaattgttgggttttggaga

SEQ ID NO: 1402229 - DNA, 25 bp, Homo sapien
gagcagtggtgattttgccattttt

SEQ ID NO: 1402230 - DNA, 25 bp, Homo sapien
ctcctgccagggttcaagggcagat

SEQ ID NO: 1402231 - DNA, 25 bp, Homo sapien
gcccatgctgggactgtgatttttt

SEQ ID NO: 1402232 - DNA, 25 bp, Homo sapien
gcaagaggcgtttgcctggaagtca

SEQ ID NO: 1402233 - DNA, 25 bp, Homo sapien
tcacatggcctagggcgaggacaag

SEQ ID NO: 1402234 - DNA, 25 bp, Homo sapien
ccagggagagcagccgggggccctc

SEQ ID NO: 1402235 - DNA, 25 bp, Homo sapien
gggccagggagagcagccgggggcc

SEQ ID NO: 1402236 - DNA, 25 bp, Homo sapien
cccatcggagacgccagccagggcc

SEQ ID NO: 1402237 - DNA, 25 bp, Homo sapien
catcggagacgccagccagggccag

SEQ ID NO: 1402238 - DNA, 25 bp, Homo sapien
tctgacgaggatttattccatggtg

SEQ ID NO: 1402239 - DNA, 25 bp, Homo sapien
tgtagtctgacgaggatttattcca

SEQ ID NO: 1402240 - DNA, 25 bp, Homo sapien
tcaaagtgtagtctgacgaggattt

SEQ ID NO: 1402241 - DNA, 25 bp, Homo sapien
aggatttattccatggtgttctgac

SEQ ID NO: 1402242 - DNA, 25 bp, Homo sapien
caaagaagagcagcgctccagtgaa

SEQ ID NO: 1402243 - DNA, 25 bp, Homo sapien
cccaaagaagagcagcgctccagtg

SEQ ID NO: 1402244 - DNA, 25 bp, Homo sapien
gaagagcagcgctccagtgaatccc

SEQ ID NO: 1402245 - DNA, 25 bp, Homo sapien
gagcagcgctccagtgaatccccat

SEQ ID NO: 1402246 - DNA, 25 bp, Homo sapien
tctgggactggattatatgaactct

SEQ ID NO: 1402247 - DNA, 25 bp, Homo sapien
tgagaccaacgctagatcttgaggg

SEQ ID NO: 1402248 - DNA, 25 bp, Homo sapien
tacctgctacgtgcccggcattggc

SEQ ID NO: 1402249 - DNA, 25 bp, Homo sapien
tactttgaatatggccaagaaccac

SEQ ID NO: 1402250 - DNA, 25 bp, Homo sapien
cttcctccactcgcaggaagcaggt

SEQ ID NO: 1402251 - DNA, 25 bp, Homo sapien
ttcctccactcgcaggaagcaggtt

SEQ ID NO: 1402252 - DNA, 25 bp, Homo sapien
cacacttgggataactccttcctcc

SEQ ID NO: 1402253 - DNA, 25 bp, Homo sapien
tcctccactcgcaggaagcaggttc

SEQ ID NO: 1402254 - DNA, 25 bp, Homo sapien
caaacgtgctatactctgccgagaa

SEQ ID NO: 1402255 - DNA, 25 bp, Homo sapien
gaactcagcatgctttccattcaaa

SEQ ID NO: 1402256 - DNA, 25 bp, Homo sapien
tgccgagaagagtatactgtcagac

SEQ ID NO: 1402257 - DNA, 25 bp, Homo sapien
tcaaagaacgtgctacaaacgtgct

SEQ ID NO: 1402258 - DNA, 25 bp, Homo sapien
caggcagtcgtgatagtgaccacct

SEQ ID NO: 1402259 - DNA, 25 bp, Homo sapien
gacccagctggtaagtgcaaggccc

SEQ ID NO: 1402260 - DNA, 25 bp, Homo sapien
tggtggacccagctggtaagtgcaa

SEQ ID NO: 1402261 - DNA, 25 bp, Homo sapien
tagtgaccacctggtggacccagct

SEQ ID NO: 1402262 - DNA, 25 bp, Homo sapien
tggtaggcgatgatcaagcccaaaa

SEQ ID NO: 1402263 - DNA, 25 bp, Homo sapien
ggcgatgatcaagcccaaaaggatg

SEQ ID NO: 1402264 - DNA, 25 bp, Homo sapien
acttcacgtgtgtggtaggcgatga

SEQ ID NO: 1402265 - DNA, 25 bp, Homo sapien
tcaagcccaaaaggatgatggtgga

SEQ ID NO: 1402266 - DNA, 25 bp, Homo sapien
tgcttcttggttttggccagtacaa

SEQ ID NO: 1402267 - DNA, 25 bp, Homo sapien
ctgcttcttggttttggccagtaca

SEQ ID NO: 1402268 - DNA, 25 bp, Homo sapien
gcttcttggttttggccagtacaac

SEQ ID NO: 1402269 - DNA, 25 bp, Homo sapien
tcttggttttggccagtacaacctc

SEQ ID NO: 1402270 - DNA, 25 bp, Homo sapien
gactagagctggaccgtttgacacc

SEQ ID NO: 1402271 - DNA, 25 bp, Homo sapien
actagagctggaccgtttgacacca

SEQ ID NO: 1402272 - DNA, 25 bp, Homo sapien
aaagactagagctggaccgtttgac

SEQ ID NO: 1402273 - DNA, 25 bp, Homo sapien
ccaaagactagagctggaccgtttg

SEQ ID NO: 1402274 - DNA, 25 bp, Homo sapien
aaggtacctcgtacaagtgaggaga

SEQ ID NO: 1402275 - DNA, 25 bp, Homo sapien
gcagccagaaggtacctcgtacaag

SEQ ID NO: 1402276 - DNA, 25 bp, Homo sapien
cagaaggtacctcgtacaagtgagg

SEQ ID NO: 1402277 - DNA, 25 bp, Homo sapien
agagcagccagaaggtacctcgtac

SEQ ID NO: 1402278 - DNA, 25 bp, Homo sapien
agggcacgacagaggtggtgaggat

SEQ ID NO: 1402279 - DNA, 25 bp, Homo sapien
tgagcgagggcacgacagaggtggt

SEQ ID NO: 1402280 - DNA, 25 bp, Homo sapien
cgagagtgtagccacgtgggtgagc

SEQ ID NO: 1402281 - DNA, 25 bp, Homo sapien
acgtgggtgagcgagggcacgacag

SEQ ID NO: 1402282 - DNA, 25 bp, Homo sapien
tattctccaaatcatcgctggcttc

SEQ ID NO: 1402283 - DNA, 25 bp, Homo sapien
cctgatatttacagcccccgaggct

SEQ ID NO: 1402284 - DNA, 25 bp, Homo sapien
ccatgctgctattgcaatcatcaat

SEQ ID NO: 1402285 - DNA, 25 bp, Homo sapien
gctattgcaatcatcaatgggctta

SEQ ID NO: 1402286 - DNA, 25 bp, Homo sapien
tcatcagcctagttcgtgaagcccc

SEQ ID NO: 1402287 - DNA, 25 bp, Homo sapien
gcaaattcatcagcctagttcgtga

SEQ ID NO: 1402288 - DNA, 25 bp, Homo sapien
ctgtgcctttagacaaaagtgcaaa

SEQ ID NO: 1402289 - DNA, 25 bp, Homo sapien
ccctgtgcctttagacaaaagtgca

SEQ ID NO: 1402290 - DNA, 25 bp, Homo sapien
tgcctttccccactctcctcccagt

SEQ ID NO: 1402291 - DNA, 25 bp, Homo sapien
ctgctgcctttccccactctcctcc

SEQ ID NO: 1402292 - DNA, 25 bp, Homo sapien
ctgcctttccccactctcctcccag

SEQ ID NO: 1402293 - DNA, 25 bp, Homo sapien
gctgcctttccccactctcctccca

SEQ ID NO: 1402294 - DNA, 25 bp, Homo sapien
agacaagcaggactcgtgccaaggg

SEQ ID NO: 1402295 - DNA, 25 bp, Homo sapien
ggagacaagcaggactcgtgccaag

SEQ ID NO: 1402296 - DNA, 25 bp, Homo sapien
aggagacaagcaggactcgtgccaa

SEQ ID NO: 1402297 - DNA, 25 bp, Homo sapien
acaagcaggactcgtgccaagggct

SEQ ID NO: 1402298 - DNA, 25 bp, Homo sapien
tctctccgaaattccatctggtgct

SEQ ID NO: 1402299 - DNA, 25 bp, Homo sapien
cccgccagctggaatagcgtagctt

SEQ ID NO: 1402300 - DNA, 25 bp, Homo sapien
caacatgcaccatcgatgaggaccc

SEQ ID NO: 1402301 - DNA, 25 bp, Homo sapien
cccgcagatggccagtgcaggaaac

SEQ ID NO: 1402302 - DNA, 25 bp, Homo sapien
cctactgggtaacctgggcagggca

SEQ ID NO: 1402303 - DNA, 25 bp, Homo sapien
tcagcaaggttcaatggctcaagcc

SEQ ID NO: 1402304 - DNA, 25 bp, Homo sapien
gaaggtaacatcacccatgcaggca

SEQ ID NO: 1402305 - DNA, 25 bp, Homo sapien
tggaccagaatgagcaagggcagcc

SEQ ID NO: 1402306 - DNA, 25 bp, Homo sapien
tccttgcagatgtcgcgtggcaggc

SEQ ID NO: 1402307 - DNA, 25 bp, Homo sapien
ctgaagcaaaacaccaaacaactgt

SEQ ID NO: 1402308 - DNA, 25 bp, Homo sapien
cgcgtggcaggcctggtatcagcaa

SEQ ID NO: 1402309 - DNA, 25 bp, Homo sapien
caccaaacaactgtccttgcagatg

SEQ ID NO: 1402310 - DNA, 25 bp, Homo sapien
ccctgcaaggagtgtcctttaagct

SEQ ID NO: 1402311 - DNA, 25 bp, Homo sapien
aatttgacactgagcagcactcctg

SEQ ID NO: 1402312 - DNA, 25 bp, Homo sapien
aagctgactttcctgttaatttgac

SEQ ID NO: 1402313 - DNA, 25 bp, Homo sapien
ggagtaggtgccagctcagtccctg

SEQ ID NO: 1402314 - DNA, 25 bp, Homo sapien
gggaagggactcgacaaagatcaca

SEQ ID NO: 1402315 - DNA, 25 bp, Homo sapien
taagaacaggactctccggactgtg

SEQ ID NO: 1402316 - DNA, 25 bp, Homo sapien
tggaatcagattgcgaagcctcggc

SEQ ID NO: 1402317 - DNA, 25 bp, Homo sapien
ttttaggccagagaaacgaggccca

SEQ ID NO: 1402318 - DNA, 25 bp, Homo sapien
gaaaatgccttgtaagatgtaagat

SEQ ID NO: 1402319 - DNA, 25 bp, Homo sapien
ttttctcatccctgagatagttggt

SEQ ID NO: 1402320 - DNA, 25 bp, Homo sapien
ccctgagatagttggtcatcatgag

SEQ ID NO: 1402321 - DNA, 25 bp, Homo sapien
gatagttggtcatcatgagccctgg

SEQ ID NO: 1402322 - DNA, 25 bp, Homo sapien
ggtgtaatgtaaagccagcccagca

SEQ ID NO: 1402323 - DNA, 25 bp, Homo sapien
gcatgaacttgggagctaaacgggc

SEQ ID NO: 1402324 - DNA, 25 bp, Homo sapien
ccaggtggcaccgatcagtacagat

SEQ ID NO: 1402325 - DNA, 25 bp, Homo sapien
caacattttgcatcacgggtctcag

SEQ ID NO: 1402326 - DNA, 25 bp, Homo sapien
ggatatctatcttggccctgcagtg

SEQ ID NO: 1402327 - DNA, 25 bp, Homo sapien
tattttgactaaggcggcttccagg

SEQ ID NO: 1402328 - DNA, 25 bp, Homo sapien
cagaccatggaggagtagagaccac

SEQ ID NO: 1402329 - DNA, 25 bp, Homo sapien
taggtcccatttgttgagcaggcag

SEQ ID NO: 1402330 - DNA, 25 bp, Homo sapien
tcatcccgtcccaaggagaggtgct

SEQ ID NO: 1402331 - DNA, 25 bp, Homo sapien
caggagatgtttacgaagcagcagc

SEQ ID NO: 1402332 - DNA, 25 bp, Homo sapien
tgctctgcccaggtaacacctgtag

SEQ ID NO: 1402333 - DNA, 25 bp, Homo sapien
cccgctaaagccagtgcctgctgtt

SEQ ID NO: 1402334 - DNA, 25 bp, Homo sapien
tacatattccttttgttcaaggtat

SEQ ID NO: 1402335 - DNA, 25 bp, Homo sapien
ctacatattccttttgttcaaggta

SEQ ID NO: 1402336 - DNA, 25 bp, Homo sapien
catattccttttgttcaaggtataa

SEQ ID NO: 1402337 - DNA, 25 bp, Homo sapien
tccttttgttcaaggtataaagaga

SEQ ID NO: 1402338 - DNA, 25 bp, Homo sapien
tgaccccaccgctatacttgcagga

SEQ ID NO: 1402339 - DNA, 25 bp, Homo sapien
tctggtgggcatggttgtcctcccg

SEQ ID NO: 1402340 - DNA, 25 bp, Homo sapien
aatcagagcatagtcactcagtcgc

SEQ ID NO: 1402341 - DNA, 25 bp, Homo sapien
gagagctcggtctctatcaccataa

SEQ ID NO: 1402342 - DNA, 25 bp, Homo sapien
ggaggaagggtggaggatggcggtg

SEQ ID NO: 1402343 - DNA, 25 bp, Homo sapien
ggaagggtggaggatggcggtggag

SEQ ID NO: 1402344 - DNA, 25 bp, Homo sapien
ggaggatggcggtggagttggacga

SEQ ID NO: 1402345 - DNA, 25 bp, Homo sapien
gatggcggtggagttggacgaaggg

SEQ ID NO: 1402346 - DNA, 25 bp, Homo sapien
gaaagcggtgggagaggagtgcagc

SEQ ID NO: 1402347 - DNA, 25 bp, Homo sapien
ctgaaagcggtgggagaggagtgca

SEQ ID NO: 1402348 - DNA, 25 bp, Homo sapien
gcaggccagggtggacgggctggct

SEQ ID NO: 1402349 - DNA, 25 bp, Homo sapien
cagcaggccagggtggacgggctgg

SEQ ID NO: 1402350 - DNA, 25 bp, Homo sapien
cacttggggtcttcatccaagtccc

SEQ ID NO: 1402351 - DNA, 25 bp, Homo sapien
ctgagacaggggatgcggtggctgc

SEQ ID NO: 1402352 - DNA, 25 bp, Homo sapien
aggggcacttggggtcttcatccaa

SEQ ID NO: 1402353 - DNA, 25 bp, Homo sapien
gggcacttggggtcttcatccaagt

SEQ ID NO: 1402354 - DNA, 25 bp, Homo sapien
catggaagtgcccagaagtgtccat

SEQ ID NO: 1402355 - DNA, 25 bp, Homo sapien
agtcatggaagtgcccagaagtgtc

SEQ ID NO: 1402356 - DNA, 25 bp, Homo sapien
ccgagtcatggaagtgcccagaagt

SEQ ID NO: 1402357 - DNA, 25 bp, Homo sapien
ccccgagtcatggaagtgcccagaa

SEQ ID NO: 1402358 - DNA, 25 bp, Homo sapien
cactcaagaatgcattgtattgggc

SEQ ID NO: 1402359 - DNA, 25 bp, Homo sapien
tctaggagcgtgtgaggccaggctc

SEQ ID NO: 1402360 - DNA, 25 bp, Homo sapien
ctttggcttgcttcggttctctggg

SEQ ID NO: 1402361 - DNA, 25 bp, Homo sapien
caaagccaccctcgctccaaagatg

SEQ ID NO: 1402362 - DNA, 25 bp, Homo sapien
tcctctgacaggtatggccacaacc

SEQ ID NO: 1402363 - DNA, 25 bp, Homo sapien
agctgagccgctgtcctctttcctc

SEQ ID NO: 1402364 - DNA, 25 bp, Homo sapien
ggcgcagcgaggactgggaactgta

SEQ ID NO: 1402365 - DNA, 25 bp, Homo sapien
taagcccacggcgataagggatgtt

SEQ ID NO: 1402366 - DNA, 25 bp, Homo sapien
ctgggcgatggggaggagggacaga

SEQ ID NO: 1402367 - DNA, 25 bp, Homo sapien
ggcgatggggaggagggacagaggg

SEQ ID NO: 1402368 - DNA, 25 bp, Homo sapien
gcgatggggaggagggacagagggc

SEQ ID NO: 1402369 - DNA, 25 bp, Homo sapien
tgggcgatggggaggagggacagag

SEQ ID NO: 1402370 - DNA, 25 bp, Homo sapien
gaaagatagcttgggtagagcccta

SEQ ID NO: 1402371 - DNA, 25 bp, Homo sapien
taaggatgaaagatagcttgggtag

SEQ ID NO: 1402372 - DNA, 25 bp, Homo sapien
aaatggggcctatcagagcacgtcc

SEQ ID NO: 1402373 - DNA, 25 bp, Homo sapien
agcacgtcctgccatcatggataag

SEQ ID NO: 1402374 - DNA, 25 bp, Homo sapien
tgagagtccctggatgtctagaccc

SEQ ID NO: 1402375 - DNA, 25 bp, Homo sapien
gaagcctcttataatgaatgcccac

SEQ ID NO: 1402376 - DNA, 25 bp, Homo sapien
tctagaccctgggtgaagcctctta

SEQ ID NO: 1402377 - DNA, 25 bp, Homo sapien
ctggtaagtgtaggccttctgtcca

SEQ ID NO: 1402378 - DNA, 25 bp, Homo sapien
cgaatggaaggtgctgataccgtgt

SEQ ID NO: 1402379 - DNA, 25 bp, Homo sapien
agtcaaaggtcgaatggaaggtgct

SEQ ID NO: 1402380 - DNA, 25 bp, Homo sapien
ttgagggagtcaaaggtcgaatgga

SEQ ID NO: 1402381 - DNA, 25 bp, Homo sapien
caaaggtcgaatggaaggtgctgat

SEQ ID NO: 1402382 - DNA, 25 bp, Homo sapien
cccagagtctgggtaggtccactgt

SEQ ID NO: 1402383 - DNA, 25 bp, Homo sapien
caagggctcagcatggaagcctcgg

SEQ ID NO: 1402384 - DNA, 25 bp, Homo sapien
ggtgcatactttgcacacggtgaag

SEQ ID NO: 1402385 - DNA, 25 bp, Homo sapien
tgctgccgacgtgcactggccagta

SEQ ID NO: 1402386 - DNA, 25 bp, Homo sapien
agaaggcggccagtgtctcgtgggc

SEQ ID NO: 1402387 - DNA, 25 bp, Homo sapien
gcccagaccggagcagccatggatt

SEQ ID NO: 1402388 - DNA, 25 bp, Homo sapien
ggccggctggcagttgaggccacag

SEQ ID NO: 1402389 - DNA, 25 bp, Homo sapien
ggagcagccatggattcctagcagg

SEQ ID NO: 1402390 - DNA, 25 bp, Homo sapien
ttcttgctacttccattatagaagc

SEQ ID NO: 1402391 - DNA, 25 bp, Homo sapien
gctacttccattatagaagcttctg

SEQ ID NO: 1402392 - DNA, 25 bp, Homo sapien
cttccattatagaagcttctgagcc

SEQ ID NO: 1402393 - DNA, 25 bp, Homo sapien
tccattatagaagcttctgagccca

SEQ ID NO: 1402394 - DNA, 25 bp, Homo sapien
tatgaaggggtttcacggaccgaga

SEQ ID NO: 1402395 - DNA, 25 bp, Homo sapien
ttttcatccctctcatatgaagggg

SEQ ID NO: 1402396 - DNA, 25 bp, Homo sapien
attcgaggaatacaattaaccttag

SEQ ID NO: 1402397 - DNA, 25 bp, Homo sapien
gaccgagaaggggtcttggatcaga

SEQ ID NO: 1402398 - DNA, 25 bp, Homo sapien
agagagagaagaaacgtgcgtgcat

SEQ ID NO: 1402399 - DNA, 25 bp, Homo sapien
tcaccccagacttggcggttttgaa

SEQ ID NO: 1402400 - DNA, 25 bp, Homo sapien
aagtgatccaccagaagagagagaa

SEQ ID NO: 1402401 - DNA, 25 bp, Homo sapien
caagcccagtggtatagcttccagg

SEQ ID NO: 1402402 - DNA, 25 bp, Homo sapien
tgctggcattagagacgtgatttgt

SEQ ID NO: 1402403 - DNA, 25 bp, Homo sapien
ttaaatagctctccgtacctggcac

SEQ ID NO: 1402404 - DNA, 25 bp, Homo sapien
gagcaactgtgggtaaaggacttag

SEQ ID NO: 1402405 - DNA, 25 bp, Homo sapien
ggacttagaatggtctctgtgtaaa

SEQ ID NO: 1402406 - DNA, 25 bp, Homo sapien
caagaggtaatgaaccacgtgaggc

SEQ ID NO: 1402407 - DNA, 25 bp, Homo sapien
cacgtgaggccaaactaggatggtg

SEQ ID NO: 1402408 - DNA, 25 bp, Homo sapien
gaacacaaggatgaacagtatacac

SEQ ID NO: 1402409 - DNA, 25 bp, Homo sapien
gggatggctctgctttctacatttt

SEQ ID NO: 1402410 - DNA, 25 bp, Homo sapien
gagcccgttacggaagaagcacgct

SEQ ID NO: 1402411 - DNA, 25 bp, Homo sapien
aaatctgaaggttgggtctcggcca

SEQ ID NO: 1402412 - DNA, 25 bp, Homo sapien
gaagcacgcttcaagagccaacatg

SEQ ID NO: 1402413 - DNA, 25 bp, Homo sapien
aagccactccgaatacagcgcatag

SEQ ID NO: 1402414 - DNA, 25 bp, Homo sapien
cctgagtgtggaccttccagattca

SEQ ID NO: 1402415 - DNA, 25 bp, Homo sapien
tcctgagtgtggaccttccagattc

SEQ ID NO: 1402416 - DNA, 25 bp, Homo sapien
cagattcacctctgttgtcaaacaa

SEQ ID NO: 1402417 - DNA, 25 bp, Homo sapien
tcctttgggcgtcatatcagccctc

SEQ ID NO: 1402418 - DNA, 25 bp, Homo sapien
gggcgtcatatcagccctcaaaaag

SEQ ID NO: 1402419 - DNA, 25 bp, Homo sapien
catttcctttgggcgtcatatcagc

SEQ ID NO: 1402420 - DNA, 25 bp, Homo sapien
ttgggcgtcatatcagccctcaaaa

SEQ ID NO: 1402421 - DNA, 25 bp, Homo sapien
catctgctaaatgcgatgaaaatcc

SEQ ID NO: 1402422 - DNA, 25 bp, Homo sapien
gctaaatgcgatgaaaatcctatcc

SEQ ID NO: 1402423 - DNA, 25 bp, Homo sapien
aaatgcgatgaaaatcctatcctcg

SEQ ID NO: 1402424 - DNA, 25 bp, Homo sapien
cttggcatctgctaaatgcgatgaa

SEQ ID NO: 1402425 - DNA, 25 bp, Homo sapien
tccaagaggtttattagtatccaca

SEQ ID NO: 1402426 - DNA, 25 bp, Homo sapien
gctccaagaggtttattagtatcca

SEQ ID NO: 1402427 - DNA, 25 bp, Homo sapien
gaggtttattagtatccacactggg

SEQ ID NO: 1402428 - DNA, 25 bp, Homo sapien
caagaggtttattagtatccacact

SEQ ID NO: 1402429 - DNA, 25 bp, Homo sapien
gaggtttcctgccttgcccaatatc

SEQ ID NO: 1402430 - DNA, 25 bp, Homo sapien
tggagtctcctcctgaagagcatgg

SEQ ID NO: 1402431 - DNA, 25 bp, Homo sapien
aacatccagtcaggatgcaaggcca

SEQ ID NO: 1402432 - DNA, 25 bp, Homo sapien
tgtctgttcctcacctcggccagga

SEQ ID NO: 1402433 - DNA, 25 bp, Homo sapien
ttctatcaggttctccaactgctcc

SEQ ID NO: 1402434 - DNA, 25 bp, Homo sapien
caggcgctgttcaactccatggttc

SEQ ID NO: 1402435 - DNA, 25 bp, Homo sapien
ctaaagtctggagcggataaattct

SEQ ID NO: 1402436 - DNA, 25 bp, Homo sapien
tctggagcggataaattctatcagg

SEQ ID NO: 1402437 - DNA, 25 bp, Homo sapien
cagtcaaagtccccgaagttgtcca

SEQ ID NO: 1402438 - DNA, 25 bp, Homo sapien
ccgaagttgtccaggccacattctg

SEQ ID NO: 1402439 - DNA, 25 bp, Homo sapien
caggccacattctgactcagcatcg

SEQ ID NO: 1402440 - DNA, 25 bp, Homo sapien
ggccacattctgactcagcatcgtc

SEQ ID NO: 1402441 - DNA, 25 bp, Homo sapien
tcggctctgctccaacgctacaacg

SEQ ID NO: 1402442 - DNA, 25 bp, Homo sapien
taggcctcccgaaaccactggatgt

SEQ ID NO: 1402443 - DNA, 25 bp, Homo sapien
gctacaacgcggaccgtctgcgtca

SEQ ID NO: 1402444 - DNA, 25 bp, Homo sapien
gatgtcagacactctccgtgtgtca

SEQ ID NO: 1402445 - DNA, 25 bp, Homo sapien
gggctgggagatgccctccacaatc

SEQ ID NO: 1402446 - DNA, 25 bp, Homo sapien
ctgggagatgccctccacaatcttc

SEQ ID NO: 1402447 - DNA, 25 bp, Homo sapien
cagatgggctgggagatgccctcca

SEQ ID NO: 1402448 - DNA, 25 bp, Homo sapien
atgggctgggagatgccctccacaa

SEQ ID NO: 1402449 - DNA, 25 bp, Homo sapien
cggatcatgtccttccgaaaggcct

SEQ ID NO: 1402450 - DNA, 25 bp, Homo sapien
ccaggagtctctggaagttcaagcc

SEQ ID NO: 1402451 - DNA, 25 bp, Homo sapien
tgtccttccgaaaggcctccttgta

SEQ ID NO: 1402452 - DNA, 25 bp, Homo sapien
gtcagcctggcgtttctcctctccc

SEQ ID NO: 1402453 - DNA, 25 bp, Homo sapien
ggcttagccttcaactaaagtggga

SEQ ID NO: 1402454 - DNA, 25 bp, Homo sapien
catcccctgggcaaaggcttagcct

SEQ ID NO: 1402455 - DNA, 25 bp, Homo sapien
tatgtggcgtggtttctcttttgca

SEQ ID NO: 1402456 - DNA, 25 bp, Homo sapien
tcccaaatcccacggagattgtgtc

SEQ ID NO: 1402457 - DNA, 25 bp, Homo sapien
tgcaacaagaccttctcccctcagg

SEQ ID NO: 1402458 - DNA, 25 bp, Homo sapien
ggaaatcaatgcatgaacatttcat

SEQ ID NO: 1402459 - DNA, 25 bp, Homo sapien
tcttcttgtgacttaggaaatcaat

SEQ ID NO: 1402460 - DNA, 25 bp, Homo sapien
ctgcaagaggaggtcagtagccacc

SEQ ID NO: 1402461 - DNA, 25 bp, Homo sapien
ttccctccaggagcgttgtggtcta

SEQ ID NO: 1402462 - DNA, 25 bp, Homo sapien
tgccaactcgagtgtcgacagcctt

SEQ ID NO: 1402463 - DNA, 25 bp, Homo sapien
ctcgagtgtcgacagcctttcctgg

SEQ ID NO: 1402464 - DNA, 25 bp, Homo sapien
agagctgccaactcgagtgtcgaca

SEQ ID NO: 1402465 - DNA, 25 bp, Homo sapien
catcagagctgccaactcgagtgtc

SEQ ID NO: 1402466 - DNA, 25 bp, Homo sapien
cggaggacagcacagacatcagctc

SEQ ID NO: 1402467 - DNA, 25 bp, Homo sapien
agccggaggacagcacagacatcag

SEQ ID NO: 1402468 - DNA, 25 bp, Homo sapien
agagccggaggacagcacagacatc

SEQ ID NO: 1402469 - DNA, 25 bp, Homo sapien
cagagagccggaggacagcacagac

SEQ ID NO: 1402470 - DNA, 25 bp, Homo sapien
cagcgcctcggtcacgaagtccttc

SEQ ID NO: 1402471 - DNA, 25 bp, Homo sapien
ccggatttcctcttgccgctgaaca

SEQ ID NO: 1402472 - DNA, 25 bp, Homo sapien
gctgaacagcagtaccagccgcggg

SEQ ID NO: 1402473 - DNA, 25 bp, Homo sapien
gccgctgaacagcagtaccagccgc

SEQ ID NO: 1402474 - DNA, 25 bp, Homo sapien
ggatttcctcttgccgctgaacagc

SEQ ID NO: 1402475 - DNA, 25 bp, Homo sapien
cctcgccgtagctgcgaacagggct

SEQ ID NO: 1402476 - DNA, 25 bp, Homo sapien
cagctcatgtccaaacagatatggg

SEQ ID NO: 1402477 - DNA, 25 bp, Homo sapien
ggagcggcaacaaggaacaatcgcg

SEQ ID NO: 1402478 - DNA, 25 bp, Homo sapien
ctaaaatcgggacaccgcgcggaat

SEQ ID NO: 1402479 - DNA, 25 bp, Homo sapien
aataaacatgtatttgggcctccac

SEQ ID NO: 1402480 - DNA, 25 bp, Homo sapien
atgtatttgggcctccacggaaagt

SEQ ID NO: 1402481 - DNA, 25 bp, Homo sapien
tatttgggcctccacggaaagtcca

SEQ ID NO: 1402482 - DNA, 25 bp, Homo sapien
aaacatgtatttgggcctccacgga

SEQ ID NO: 1402483 - DNA, 25 bp, Homo sapien
tcttcacccagttggcagactgctc

SEQ ID NO: 1402484 - DNA, 25 bp, Homo sapien
tcaagatccaactcaaaggccaccc

SEQ ID NO: 1402485 - DNA, 25 bp, Homo sapien
tgcagctaatccaattagcctcggg

SEQ ID NO: 1402486 - DNA, 25 bp, Homo sapien
tggcaccattaagagagtactatta

SEQ ID NO: 1402487 - DNA, 25 bp, Homo sapien
ttcttcctgattcagcagcttcaga

SEQ ID NO: 1402488 - DNA, 25 bp, Homo sapien
tgggttcgtggctttttcttcctga

SEQ ID NO: 1402489 - DNA, 25 bp, Homo sapien
gaaacctccagctcagcatatctac

SEQ ID NO: 1402490 - DNA, 25 bp, Homo sapien
gattcagcagcttcagaaacctcca

SEQ ID NO: 1402491 - DNA, 25 bp, Homo sapien
ccctctgggaactcaggtaggccag

SEQ ID NO: 1402492 - DNA, 25 bp, Homo sapien
gcaaacgaaggaaatgagccctaaa

SEQ ID NO: 1402493 - DNA, 25 bp, Homo sapien
cgttcgttatgcaaacgaaggaaat

SEQ ID NO: 1402494 - DNA, 25 bp, Homo sapien
caggtaggccagtttgtatcccctt

SEQ ID NO: 1402495 - DNA, 25 bp, Homo sapien
gaatctgtctctcagcaacccaact

SEQ ID NO: 1402496 - DNA, 25 bp, Homo sapien
tctgtctctcagcaacccaacttta

SEQ ID NO: 1402497 - DNA, 25 bp, Homo sapien
ctctcagcaacccaactttaccagt

SEQ ID NO: 1402498 - DNA, 25 bp, Homo sapien
tctcagcaacccaactttaccagtc

SEQ ID NO: 1402499 - DNA, 25 bp, Homo sapien
aatttgctacatctcccaggggtgg

SEQ ID NO: 1402500 - DNA, 25 bp, Homo sapien
caaagttcccagagattaacttgcc

SEQ ID NO: 1402501 - DNA, 25 bp, Homo sapien
tccaaaacccacactcaatttgcta

SEQ ID NO: 1402502 - DNA, 25 bp, Homo sapien
ccatcgccttttttgaggataagaa

SEQ ID NO: 1402503 - DNA, 25 bp, Homo sapien
tctcaagggcctagggtttgttgga

SEQ ID NO: 1402504 - DNA, 25 bp, Homo sapien
agtatcagcttctcaagggcctagg

SEQ ID NO: 1402505 - DNA, 25 bp, Homo sapien
tgtgcttagaaaccacctagcatca

SEQ ID NO: 1402506 - DNA, 25 bp, Homo sapien
agaacaagggggcaagtaccagtgc

SEQ ID NO: 1402507 - DNA, 25 bp, Homo sapien
gcaacgcaggtccagctaaggcctt

SEQ ID NO: 1402508 - DNA, 25 bp, Homo sapien
gcatttgcatagacggcaacgcagg

SEQ ID NO: 1402509 - DNA, 25 bp, Homo sapien
cataaagtgacatcagtgcagggct

SEQ ID NO: 1402510 - DNA, 25 bp, Homo sapien
caaggcaccggtcagcatgtgggtc

SEQ ID NO: 1402511 - DNA, 25 bp, Homo sapien
ggccccgcagctcttgggctctgtg

SEQ ID NO: 1402512 - DNA, 25 bp, Homo sapien
tgggccccgcagctcttgggctctg

SEQ ID NO: 1402513 - DNA, 25 bp, Homo sapien
tgggctctgtgagtgcttgtccttc

SEQ ID NO: 1402514 - DNA, 25 bp, Homo sapien
gctctgtgagtgcttgtccttcttc

SEQ ID NO: 1402515 - DNA, 25 bp, Homo sapien
taatgatccttgctcttcacatcct

SEQ ID NO: 1402516 - DNA, 25 bp, Homo sapien
tcttcacatcctcccgactgcctct

SEQ ID NO: 1402517 - DNA, 25 bp, Homo sapien
aaactaatgatccttgctcttcaca

SEQ ID NO: 1402518 - DNA, 25 bp, Homo sapien
tcaaactaatgatccttgctcttca

SEQ ID NO: 1402519 - DNA, 25 bp, Homo sapien
cgacccaactcccccacagctgccc

SEQ ID NO: 1402520 - DNA, 25 bp, Homo sapien
gacccaactcccccacagctgccca

SEQ ID NO: 1402521 - DNA, 25 bp, Homo sapien
ccgacccaactcccccacagctgcc

SEQ ID NO: 1402522 - DNA, 25 bp, Homo sapien
acccaactcccccacagctgcccac

SEQ ID NO: 1402523 - DNA, 25 bp, Homo sapien
cacaaaatcccggaagcggaggcgg

SEQ ID NO: 1402524 - DNA, 25 bp, Homo sapien
gtcatgacggaagatgccatcctca

SEQ ID NO: 1402525 - DNA, 25 bp, Homo sapien
catcatcatcacctgtctgttgcac

SEQ ID NO: 1402526 - DNA, 25 bp, Homo sapien
gcatccacaaaatcccggaagcgga

SEQ ID NO: 1402527 - DNA, 25 bp, Homo sapien
tcctgttgccgcactggggctagct

SEQ ID NO: 1402528 - DNA, 25 bp, Homo sapien
gcacactcgtccacacctgagcagc

SEQ ID NO: 1402529 - DNA, 25 bp, Homo sapien
gggcagccgtgccaagtatgttctt

SEQ ID NO: 1402530 - DNA, 25 bp, Homo sapien
tatgttcttagcagagaggccagct

SEQ ID NO: 1402531 - DNA, 25 bp, Homo sapien
cccaggatggcagggggtcatggct

SEQ ID NO: 1402532 - DNA, 25 bp, Homo sapien
gcccaggatggcagggggtcatggc

SEQ ID NO: 1402533 - DNA, 25 bp, Homo sapien
ctgcccaggatggcagggggtcatg

SEQ ID NO: 1402534 - DNA, 25 bp, Homo sapien
aggatggcagggggtcatggctgtc

SEQ ID NO: 1402535 - DNA, 25 bp, Homo sapien
ttttctccagaggagtggaagctac

SEQ ID NO: 1402536 - DNA, 25 bp, Homo sapien
gagtggaagctaccacttttccttg

SEQ ID NO: 1402537 - DNA, 25 bp, Homo sapien
ccctccaccgaggttgcttctgctt

SEQ ID NO: 1402538 - DNA, 25 bp, Homo sapien
ggccctgtcgcttgccctccttctt

SEQ ID NO: 1402539 - DNA, 25 bp, Homo sapien
tccagagcccgctggaaggcttcgc

SEQ ID NO: 1402540 - DNA, 25 bp, Homo sapien
tggtgcatcaggctctgaagctctt

SEQ ID NO: 1402541 - DNA, 25 bp, Homo sapien
ccaggcctttgaggcattggcagag

SEQ ID NO: 1402542 - DNA, 25 bp, Homo sapien
cctagaattctggaagtgggacttc

SEQ ID NO: 1402543 - DNA, 25 bp, Homo sapien
cacaaagagttcttgtcaggatagc

SEQ ID NO: 1402544 - DNA, 25 bp, Homo sapien
cctgagcccgttttacagcctggaa

SEQ ID NO: 1402545 - DNA, 25 bp, Homo sapien
aattccattctattatagtgggcag

SEQ ID NO: 1402546 - DNA, 25 bp, Homo sapien
ccaatgccttctaccccaattccat

SEQ ID NO: 1402547 - DNA, 25 bp, Homo sapien
tgtgtgggtaaataggaaacattcc

SEQ ID NO: 1402548 - DNA, 25 bp, Homo sapien
cagacgcctggcctaggtgggttac

SEQ ID NO: 1402549 - DNA, 25 bp, Homo sapien
ggatgtgtgggtaaataggaaacat

SEQ ID NO: 1402550 - DNA, 25 bp, Homo sapien
gggaggatgctaggacagacgcctg

SEQ ID NO: 1402551 - DNA, 25 bp, Homo sapien
gcctgcagcagccggatgtcctggt

SEQ ID NO: 1402552 - DNA, 25 bp, Homo sapien
ctgcagcagccggatgtcctggttc

SEQ ID NO: 1402553 - DNA, 25 bp, Homo sapien
agcacctcggggtctgggaggacct

SEQ ID NO: 1402554 - DNA, 25 bp, Homo sapien
gggtctgggaggacctgccgctcca

SEQ ID NO: 1402555 - DNA, 25 bp, Homo sapien
ctgggaggacctgccgctccacttc

SEQ ID NO: 1402556 - DNA, 25 bp, Homo sapien
tgccgctccacttcctccatgggcc

SEQ ID NO: 1402557 - DNA, 25 bp, Homo sapien
gaagaggaggacccccaggccaagc

SEQ ID NO: 1402558 - DNA, 25 bp, Homo sapien
agaggaggacccccaggccaagcag

SEQ ID NO: 1402559 - DNA, 25 bp, Homo sapien
ggcacatgttgagggagatgcccag

SEQ ID NO: 1402560 - DNA, 25 bp, Homo sapien
gaggcacatgttgagggagatgccc

SEQ ID NO: 1402561 - DNA, 25 bp, Homo sapien
agcagcggccctcctccctgatcca

SEQ ID NO: 1402562 - DNA, 25 bp, Homo sapien
cggccccgccgtctccgcagaccct

SEQ ID NO: 1402563 - DNA, 25 bp, Homo sapien
ctccatgtccacgtcggtgtcatcg

SEQ ID NO: 1402564 - DNA, 25 bp, Homo sapien
gccgtctccgcagaccctccatgtc

SEQ ID NO: 1402565 - DNA, 25 bp, Homo sapien
ggaaaggacagggacagggcagtga

SEQ ID NO: 1402566 - DNA, 25 bp, Homo sapien
taggggaaaggacagggacagggca

SEQ ID NO: 1402567 - DNA, 25 bp, Homo sapien
ggacagggacagggcagtgaggtga

SEQ ID NO: 1402568 - DNA, 25 bp, Homo sapien
aaggacagggacagggcagtgaggt

SEQ ID NO: 1402569 - DNA, 25 bp, Homo sapien
tggctcagtctgatctgccgcttac

SEQ ID NO: 1402570 - DNA, 25 bp, Homo sapien
ttggctcagtctgatctgccgctta

SEQ ID NO: 1402571 - DNA, 25 bp, Homo sapien
cttggctcagtctgatctgccgctt

SEQ ID NO: 1402572 - DNA, 25 bp, Homo sapien
acaaggaagggactccagaaatgag

SEQ ID NO: 1402573 - DNA, 25 bp, Homo sapien
caaggaagggactccagaaatgagg

SEQ ID NO: 1402574 - DNA, 25 bp, Homo sapien
tgtgtgtctggtcccaggcctgtca

SEQ ID NO: 1402575 - DNA, 25 bp, Homo sapien
ggtcctgtgtgtctggtcccaggcc

SEQ ID NO: 1402576 - DNA, 25 bp, Homo sapien
tctgtggagggctctggccttccag

SEQ ID NO: 1402577 - DNA, 25 bp, Homo sapien
ccaggcctgtcaccacggtggtctc

SEQ ID NO: 1402578 - DNA, 25 bp, Homo sapien
caggtctccctggactactgtgtct

SEQ ID NO: 1402579 - DNA, 25 bp, Homo sapien
aggtctccctggactactgtgtctc

SEQ ID NO: 1402580 - DNA, 25 bp, Homo sapien
ctgcaggtctccctggactactgtg

SEQ ID NO: 1402581 - DNA, 25 bp, Homo sapien
gcaggtctccctggactactgtgtc

SEQ ID NO: 1402582 - DNA, 25 bp, Homo sapien
gggccaggaggctccacaccacaaa

SEQ ID NO: 1402583 - DNA, 25 bp, Homo sapien
ggaggctccacaccacaaacatcac

SEQ ID NO: 1402584 - DNA, 25 bp, Homo sapien
ccaggaggctccacaccacaaacat

SEQ ID NO: 1402585 - DNA, 25 bp, Homo sapien
cacaaacatcaccttccagggtgcc

SEQ ID NO: 1402586 - DNA, 25 bp, Homo sapien
tctcctctgttagaatgctgccaga

SEQ ID NO: 1402587 - DNA, 25 bp, Homo sapien
agtctcctctgttagaatgctgcca

SEQ ID NO: 1402588 - DNA, 25 bp, Homo sapien
ctcagtctcctctgttagaatgctg

SEQ ID NO: 1402589 - DNA, 25 bp, Homo sapien
ctctgttagaatgctgccagactga

SEQ ID NO: 1402590 - DNA, 25 bp, Homo sapien
ccctaccaggttggaagaggcagga

SEQ ID NO: 1402591 - DNA, 25 bp, Homo sapien
ccaggatggaatgagaaaaggagtt

SEQ ID NO: 1402592 - DNA, 25 bp, Homo sapien
gtaagctatgtcctaagcagggccc

SEQ ID NO: 1402593 - DNA, 25 bp, Homo sapien
gaaaaggcgcagaaaaacccactgc

SEQ ID NO: 1402594 - DNA, 25 bp, Homo sapien
ttcccatctgtcttggaggggctgt

SEQ ID NO: 1402595 - DNA, 25 bp, Homo sapien
ggatgccgggcccagtgtctccact

SEQ ID NO: 1402596 - DNA, 25 bp, Homo sapien
tggatgccgggcccagtgtctccac

SEQ ID NO: 1402597 - DNA, 25 bp, Homo sapien
ctccaacccacgtctccacatcacc

SEQ ID NO: 1402598 - DNA, 25 bp, Homo sapien
caacccacgtctccacatcacccat

SEQ ID NO: 1402599 - DNA, 25 bp, Homo sapien
tccaacccacgtctccacatcaccc

SEQ ID NO: 1402600 - DNA, 25 bp, Homo sapien
ccaacccacgtctccacatcaccca

SEQ ID NO: 1402601 - DNA, 25 bp, Homo sapien
gcaagcacccagctattatcagagt

SEQ ID NO: 1402602 - DNA, 25 bp, Homo sapien
cagctattatcagagtctgggcagg

SEQ ID NO: 1402603 - DNA, 25 bp, Homo sapien
gcacccagctattatcagagtctgg

SEQ ID NO: 1402604 - DNA, 25 bp, Homo sapien
cagcaagcacccagctattatcaga

SEQ ID NO: 1402605 - DNA, 25 bp, Homo sapien
aggtccctgaggctgctgtggctgc

SEQ ID NO: 1402606 - DNA, 25 bp, Homo sapien
tccctgaggctgctgtggctgccac

SEQ ID NO: 1402607 - DNA, 25 bp, Homo sapien
ttgctgaggtccctgaggctgctgt

SEQ ID NO: 1402608 - DNA, 25 bp, Homo sapien
agttgctgaggtccctgaggctgct

SEQ ID NO: 1402609 - DNA, 25 bp, Homo sapien
aaccagctcttgcttcggtcttcag

SEQ ID NO: 1402610 - DNA, 25 bp, Homo sapien
gctcttgcttcggtcttcagcttaa

SEQ ID NO: 1402611 - DNA, 25 bp, Homo sapien
cagcttaacttgttgcaggcttccc

SEQ ID NO: 1402612 - DNA, 25 bp, Homo sapien
cggtcttcagcttaacttgttgcag

SEQ ID NO: 1402613 - DNA, 25 bp, Homo sapien
tacgccgttttagtgtgagggacac

SEQ ID NO: 1402614 - DNA, 25 bp, Homo sapien
ggaccactaggtctttgccactgta

SEQ ID NO: 1402615 - DNA, 25 bp, Homo sapien
tcaaaggttgtcagctccaccagag

SEQ ID NO: 1402616 - DNA, 25 bp, Homo sapien
ggactcctaacttctccgagggcca

SEQ ID NO: 1402617 - DNA, 25 bp, Homo sapien
tatgaagaagatacgtcctgacagc

SEQ ID NO: 1402618 - DNA, 25 bp, Homo sapien
gaaatgaggtatagggctctgcgcc

SEQ ID NO: 1402619 - DNA, 25 bp, Homo sapien
gaattgctaattaatcaccaggccc

SEQ ID NO: 1402620 - DNA, 25 bp, Homo sapien
tattgcagggatggcaagaccccaa

SEQ ID NO: 1402621 - DNA, 25 bp, Homo sapien
taggcgctctcagtcatgcctgtgc

SEQ ID NO: 1402622 - DNA, 25 bp, Homo sapien
ccctcacggatgtagacagactgga

SEQ ID NO: 1402623 - DNA, 25 bp, Homo sapien
tgcactcacggtggaaccatttctg

SEQ ID NO: 1402624 - DNA, 25 bp, Homo sapien
cccagacggcagaagcttcagtggt

SEQ ID NO: 1402625 - DNA, 25 bp, Homo sapien
ggacttgtgttaggcggcaggctgg

SEQ ID NO: 1402626 - DNA, 25 bp, Homo sapien
ggaaagggacttgtgttaggcggca

SEQ ID NO: 1402627 - DNA, 25 bp, Homo sapien
aagggacttgtgttaggcggcaggc

SEQ ID NO: 1402628 - DNA, 25 bp, Homo sapien
gaaaagcagtagaagcaggtggatt

SEQ ID NO: 1402629 - DNA, 25 bp, Homo sapien
cctggctgagcaaatcgttgggaca

SEQ ID NO: 1402630 - DNA, 25 bp, Homo sapien
ggtggctgtcgacggagtggctggg

SEQ ID NO: 1402631 - DNA, 25 bp, Homo sapien
gaagggttggctgggaaagttcatg

SEQ ID NO: 1402632 - DNA, 25 bp, Homo sapien
gggtgagatcatgggaccaaatccc

SEQ ID NO: 1402633 - DNA, 25 bp, Homo sapien
cggaagcctccgaagggcacaggac

SEQ ID NO: 1402634 - DNA, 25 bp, Homo sapien
caaactccgtcagatgtgagtatgc

SEQ ID NO: 1402635 - DNA, 25 bp, Homo sapien
gggtggtgcaaactccgtcagatgt

SEQ ID NO: 1402636 - DNA, 25 bp, Homo sapien
gcctccgaagggcacaggactgcca

SEQ ID NO: 1402637 - DNA, 25 bp, Homo sapien
ctgagtatttgacttccttcgcttc

SEQ ID NO: 1402638 - DNA, 25 bp, Homo sapien
tgagtatttgacttccttcgcttct

SEQ ID NO: 1402639 - DNA, 25 bp, Homo sapien
gagtatttgacttccttcgcttctt

SEQ ID NO: 1402640 - DNA, 25 bp, Homo sapien
tcccggtgctgggcggcgcaggggg

SEQ ID NO: 1402641 - DNA, 25 bp, Homo sapien
gcggcggcagcaaccggaaccggaa

SEQ ID NO: 1402642 - DNA, 25 bp, Homo sapien
acaaagtgcgacgacagggaagcgc

SEQ ID NO: 1402643 - DNA, 25 bp, Homo sapien
accatcgcccagaaggggtgtcagg

SEQ ID NO: 1402644 - DNA, 25 bp, Homo sapien
aaactgcgcgctctctccagactcg

SEQ ID NO: 1402645 - DNA, 25 bp, Homo sapien
atcccgggcggtggagccgccgcgg

SEQ ID NO: 1402646 - DNA, 25 bp, Homo sapien
gcccggctgccggaccgtaccatcc

SEQ ID NO: 1402647 - DNA, 25 bp, Homo sapien
ctgccggaccgtaccatcccgggcg

SEQ ID NO: 1402648 - DNA, 25 bp, Homo sapien
gcgcgagccgaaggcgcacccggga

SEQ ID NO: 1402649 - DNA, 25 bp, Homo sapien
gagccagccccctctgcggacacga

SEQ ID NO: 1402650 - DNA, 25 bp, Homo sapien
agccagccccctctgcggacacgac

SEQ ID NO: 1402651 - DNA, 25 bp, Homo sapien
cggagccagccccctctgcggacac

SEQ ID NO: 1402652 - DNA, 25 bp, Homo sapien
ccagccccctctgcggacacgacat

SEQ ID NO: 1402653 - DNA, 25 bp, Homo sapien
cttcccagaagggttaagaggcaga

SEQ ID NO: 1402654 - DNA, 25 bp, Homo sapien
cgcggcgtacacaataggcttccca

SEQ ID NO: 1402655 - DNA, 25 bp, Homo sapien
ccgcggcgtacacaataggcttccc

SEQ ID NO: 1402656 - DNA, 25 bp, Homo sapien
ggcttcccagaagggttaagaggca

SEQ ID NO: 1402657 - DNA, 25 bp, Homo sapien
gaagaaatacggactttaatgaaga

SEQ ID NO: 1402658 - DNA, 25 bp, Homo sapien
aaactgacaggcattcgggctgact

SEQ ID NO: 1402659 - DNA, 25 bp, Homo sapien
taagtgagacccgtggaaacatcca

SEQ ID NO: 1402660 - DNA, 25 bp, Homo sapien
tagaaggtactcaggaactgcaggt

SEQ ID NO: 1402661 - DNA, 25 bp, Homo sapien
tcagtctcgcggtaagagacccaag

SEQ ID NO: 1402662 - DNA, 25 bp, Homo sapien
taagggttgcatatccccagggaga

SEQ ID NO: 1402663 - DNA, 25 bp, Homo sapien
tataaaaggtgcgatcccagttacc

SEQ ID NO: 1402664 - DNA, 25 bp, Homo sapien
cataggcatgcaacatgggagggca

SEQ ID NO: 1402665 - DNA, 25 bp, Homo sapien
cactttggcgtagagtacataggca

SEQ ID NO: 1402666 - DNA, 25 bp, Homo sapien
atcaggttggcacaggaaaggccca

SEQ ID NO: 1402667 - DNA, 25 bp, Homo sapien
tcaggttggcacaggaaaggcccag

SEQ ID NO: 1402668 - DNA, 25 bp, Homo sapien
catcaggttggcacaggaaaggccc

SEQ ID NO: 1402669 - DNA, 25 bp, Homo sapien
aggttggcacaggaaaggcccaggt

SEQ ID NO: 1402670 - DNA, 25 bp, Homo sapien
cactcccaaacgaggtcccgagagt

SEQ ID NO: 1402671 - DNA, 25 bp, Homo sapien
atcttctggaagagagcgctagggc

SEQ ID NO: 1402672 - DNA, 25 bp, Homo sapien
aaaccctctcactcagctggatatg

SEQ ID NO: 1402673 - DNA, 25 bp, Homo sapien
gatatgaaacccagagtccatgcta

SEQ ID NO: 1402674 - DNA, 25 bp, Homo sapien
gtagacacagttcgctgcccgcaga

SEQ ID NO: 1402675 - DNA, 25 bp, Homo sapien
tagacacagttcgctgcccgcagag

SEQ ID NO: 1402676 - DNA, 25 bp, Homo sapien
aaggcaaaggcgacatcagccctga

SEQ ID NO: 1402677 - DNA, 25 bp, Homo sapien
tatatacccctttcttgacctggag

SEQ ID NO: 1402678 - DNA, 25 bp, Homo sapien
ggcctgtcaatcctgatcattgagg

SEQ ID NO: 1402679 - DNA, 25 bp, Homo sapien
ggaagttggcatgtctcagaagagt

SEQ ID NO: 1402680 - DNA, 25 bp, Homo sapien
gatacactgtagggtactgtacctt

SEQ ID NO: 1402681 - DNA, 25 bp, Homo sapien
gctgcccagcgggaatgtctacaaa

SEQ ID NO: 1402682 - DNA, 25 bp, Homo sapien
gaatgtctacaaagcaatgagggaa

SEQ ID NO: 1402683 - DNA, 25 bp, Homo sapien
gaggcccatagacagctgcccagcg

SEQ ID NO: 1402684 - DNA, 25 bp, Homo sapien
gtggaggcacgcgaagagcatcttc

SEQ ID NO: 1402685 - DNA, 25 bp, Homo sapien
gtggtcgtgctctcccgtaccagga

SEQ ID NO: 1402686 - DNA, 25 bp, Homo sapien
cacgcgaagagcatcttcgaagggc

SEQ ID NO: 1402687 - DNA, 25 bp, Homo sapien
tcagccatggacaccgactggggag

SEQ ID NO: 1402688 - DNA, 25 bp, Homo sapien
ctgcttgccgggccttgtctaggtt

SEQ ID NO: 1402689 - DNA, 25 bp, Homo sapien
gacataggagggatcatcaaaaagc

SEQ ID NO: 1402690 - DNA, 25 bp, Homo sapien
cgttgacataggagggatcatcaaa

SEQ ID NO: 1402691 - DNA, 25 bp, Homo sapien
ctggacgttgacataggagggatca

SEQ ID NO: 1402692 - DNA, 25 bp, Homo sapien
taggagggatcatcaaaaagctctc

SEQ ID NO: 1402693 - DNA, 25 bp, Homo sapien
aggtggcatctgtttgcggacttct

SEQ ID NO: 1402694 - DNA, 25 bp, Homo sapien
atctgtttgcggacttctggatctc

SEQ ID NO: 1402695 - DNA, 25 bp, Homo sapien
catctgtttgcggacttctggatct

SEQ ID NO: 1402696 - DNA, 25 bp, Homo sapien
tggcatctgtttgcggacttctgga

SEQ ID NO: 1402697 - DNA, 25 bp, Homo sapien
ccccgggaagtcattatagtactga

SEQ ID NO: 1402698 - DNA, 25 bp, Homo sapien
tctgggcattgggtgcagtgggtcg

SEQ ID NO: 1402699 - DNA, 25 bp, Homo sapien
tccccgggaagtcattatagtactg

SEQ ID NO: 1402700 - DNA, 25 bp, Homo sapien
gcattgggtgcagtgggtcgagcag

SEQ ID NO: 1402701 - DNA, 25 bp, Homo sapien
ggcctggccaatggtgctgatgaca

SEQ ID NO: 1402702 - DNA, 25 bp, Homo sapien
tgatgacatcctgggcaagcccttc

SEQ ID NO: 1402703 - DNA, 25 bp, Homo sapien
caagcccttcgggacactccagaat

SEQ ID NO: 1402704 - DNA, 25 bp, Homo sapien
tttgaagcgcaactcgaaggcctgg

SEQ ID NO: 1402705 - DNA, 25 bp, Homo sapien
gcacagcagaggctgtcagtgagct

SEQ ID NO: 1402706 - DNA, 25 bp, Homo sapien
ctgagggcacagcagaggctgtcag

SEQ ID NO: 1402707 - DNA, 25 bp, Homo sapien
cacagcagaggctgtcagtgagctg

SEQ ID NO: 1402708 - DNA, 25 bp, Homo sapien
agggcacagcagaggctgtcagtga

SEQ ID NO: 1402709 - DNA, 25 bp, Homo sapien
cataggcgacatactcggctgtgtc

SEQ ID NO: 1402710 - DNA, 25 bp, Homo sapien
ctttggcaacataggcgacatactc

SEQ ID NO: 1402711 - DNA, 25 bp, Homo sapien
ggcaacataggcgacatactcggct

SEQ ID NO: 1402712 - DNA, 25 bp, Homo sapien
aacataggcgacatactcggctgtg

SEQ ID NO: 1402713 - DNA, 25 bp, Homo sapien
gattgcatgtggtggttggcgatga

SEQ ID NO: 1402714 - DNA, 25 bp, Homo sapien
ccgccggatgcaaatgagatagatt

SEQ ID NO: 1402715 - DNA, 25 bp, Homo sapien
ggatccccgccggatgcaaatgaga

SEQ ID NO: 1402716 - DNA, 25 bp, Homo sapien
aatgagatagattgcatgtggtggt

SEQ ID NO: 1402717 - DNA, 25 bp, Homo sapien
tttgcagtctgcggccatgaggttg

SEQ ID NO: 1402718 - DNA, 25 bp, Homo sapien
agtctgcggccatgaggttgaggct

SEQ ID NO: 1402719 - DNA, 25 bp, Homo sapien
ctgtttgcagtctgcggccatgagg

SEQ ID NO: 1402720 - DNA, 25 bp, Homo sapien
gtctgcggccatgaggttgaggctg

SEQ ID NO: 1402721 - DNA, 25 bp, Homo sapien
cggtgagagtgattggcattccagc

SEQ ID NO: 1402722 - DNA, 25 bp, Homo sapien
gagacggtgagagtgattggcattc

SEQ ID NO: 1402723 - DNA, 25 bp, Homo sapien
cattccagcaaatttcaggttactc

SEQ ID NO: 1402724 - DNA, 25 bp, Homo sapien
gacggtgagagtgattggcattcca

SEQ ID NO: 1402725 - DNA, 25 bp, Homo sapien
gcccccttagcacccggcacagcct

SEQ ID NO: 1402726 - DNA, 25 bp, Homo sapien
ctccttgtcgcccccttagcacccg

SEQ ID NO: 1402727 - DNA, 25 bp, Homo sapien
cttgtcgcccccttagcacccggca

SEQ ID NO: 1402728 - DNA, 25 bp, Homo sapien
gtcgcccccttagcacccggcacag

SEQ ID NO: 1402729 - DNA, 25 bp, Homo sapien
cagggcacgcattgactggaggacc

SEQ ID NO: 1402730 - DNA, 25 bp, Homo sapien
tggtgacctgagtccgggtgttgaa

SEQ ID NO: 1402731 - DNA, 25 bp, Homo sapien
tggaggacctccacacaacccatgt

SEQ ID NO: 1402732 - DNA, 25 bp, Homo sapien
cctgagtccgggtgttgaagtccag

SEQ ID NO: 1402733 - DNA, 25 bp, Homo sapien
cggccaagctggagtgagcattaga

SEQ ID NO: 1402734 - DNA, 25 bp, Homo sapien
aaaaagagattccggccaagctgga

SEQ ID NO: 1402735 - DNA, 25 bp, Homo sapien
ataggacactgaaacggggttgttg

SEQ ID NO: 1402736 - DNA, 25 bp, Homo sapien
tgagaaaggtttaggaaataggaca

SEQ ID NO: 1402737 - DNA, 25 bp, Homo sapien
cagccccgcgtgggcttattgacaa

SEQ ID NO: 1402738 - DNA, 25 bp, Homo sapien
cccgggtcccatgactttgtcgttg

SEQ ID NO: 1402739 - DNA, 25 bp, Homo sapien
gactttgtcgttgggatgcagccag

SEQ ID NO: 1402740 - DNA, 25 bp, Homo sapien
ccttccacccgagtcctgcgcccgc

SEQ ID NO: 1402741 - DNA, 25 bp, Homo sapien
aggaggggtagggggcctgagtctg

SEQ ID NO: 1402742 - DNA, 25 bp, Homo sapien
ggggtagggggcctgagtctggcat

SEQ ID NO: 1402743 - DNA, 25 bp, Homo sapien
gaggggtagggggcctgagtctggc

SEQ ID NO: 1402744 - DNA, 25 bp, Homo sapien
aggggtagggggcctgagtctggca

SEQ ID NO: 1402745 - DNA, 25 bp, Homo sapien
tggctcccccttagaccctgggcgc

SEQ ID NO: 1402746 - DNA, 25 bp, Homo sapien
cagggtagtgggactatcgtcccca

SEQ ID NO: 1402747 - DNA, 25 bp, Homo sapien
ctcaggttgctcatccgggggaaga

SEQ ID NO: 1402748 - DNA, 25 bp, Homo sapien
tgggactatcgtccccaggcagagg

SEQ ID NO: 1402749 - DNA, 25 bp, Homo sapien
gagtggattgtacttgggcttgggg

SEQ ID NO: 1402750 - DNA, 25 bp, Homo sapien
ccggagtggattgtacttgggcttg

SEQ ID NO: 1402751 - DNA, 25 bp, Homo sapien
tccggagtggattgtacttgggctt

SEQ ID NO: 1402752 - DNA, 25 bp, Homo sapien
cggagtggattgtacttgggcttgg

SEQ ID NO: 1402753 - DNA, 25 bp, Homo sapien
agttgaggtgaaagaggggctgctg

SEQ ID NO: 1402754 - DNA, 25 bp, Homo sapien
gaaagaggggctgctgcccagcctg

SEQ ID NO: 1402755 - DNA, 25 bp, Homo sapien
gtgaaagaggggctgctgcccagcc

SEQ ID NO: 1402756 - DNA, 25 bp, Homo sapien
aagaggggctgctgcccagcctggc

SEQ ID NO: 1402757 - DNA, 25 bp, Homo sapien
ggccaggcagggggtatccccaggc

SEQ ID NO: 1402758 - DNA, 25 bp, Homo sapien
cccagacagtttcaggccccatccc

SEQ ID NO: 1402759 - DNA, 25 bp, Homo sapien
ttagcctggttggacctctgtggcc

SEQ ID NO: 1402760 - DNA, 25 bp, Homo sapien
ccttagcctggttggacctctgtgg

SEQ ID NO: 1402761 - DNA, 25 bp, Homo sapien
gcctggttggacctctgtggcccag

SEQ ID NO: 1402762 - DNA, 25 bp, Homo sapien
cctggacgataagagcgaaactccg

SEQ ID NO: 1402763 - DNA, 25 bp, Homo sapien
gcctggacgataagagcgaaactcc

SEQ ID NO: 1402764 - DNA, 25 bp, Homo sapien
actccagcctggacgataagagcga

SEQ ID NO: 1402765 - DNA, 25 bp, Homo sapien
ccagcctggacgataagagcgaaac

SEQ ID NO: 1402766 - DNA, 25 bp, Homo sapien
gcaccgcaccgcgggccgatttggt

SEQ ID NO: 1402767 - DNA, 25 bp, Homo sapien
acgccactgccagcttaggttaccg

SEQ ID NO: 1402768 - DNA, 25 bp, Homo sapien
atttggtgccggatcacgccactgc

SEQ ID NO: 1402769 - DNA, 25 bp, Homo sapien
cagggcctcatggagtctccgcacc

SEQ ID NO: 1402770 - DNA, 25 bp, Homo sapien
ccagggttacatacctaggaagttg

SEQ ID NO: 1402771 - DNA, 25 bp, Homo sapien
tcgcctaggctagagctaatttttt

SEQ ID NO: 1402772 - DNA, 25 bp, Homo sapien
taatgcctgatgctcccttactcca

SEQ ID NO: 1402773 - DNA, 25 bp, Homo sapien
cctggtcggcaaaaaatcccaattg

SEQ ID NO: 1402774 - DNA, 25 bp, Homo sapien
acaggagcgtaccaccatgtcctgc

SEQ ID NO: 1402775 - DNA, 25 bp, Homo sapien
ttacaggagcgtaccaccatgtcct

SEQ ID NO: 1402776 - DNA, 25 bp, Homo sapien
ttttttgagacagagtctcgctctg

SEQ ID NO: 1402777 - DNA, 25 bp, Homo sapien
catgtcctgctaatttcgatttttt

SEQ ID NO: 1402778 - DNA, 25 bp, Homo sapien
tgggttgggcggtcgcggtgggagc

SEQ ID NO: 1402779 - DNA, 25 bp, Homo sapien
gcgtggggggtctgcggtctgagcg

SEQ ID NO: 1402780 - DNA, 25 bp, Homo sapien
gggcggtcgcggtgggagcgctggg

SEQ ID NO: 1402781 - DNA, 25 bp, Homo sapien
gcggtctgagcgcccccagcggttt

SEQ ID NO: 1402782 - DNA, 25 bp, Homo sapien
tgcccttgagcactgaagggtaggt

SEQ ID NO: 1402783 - DNA, 25 bp, Homo sapien
ggtgataggcactcccacctttacc

SEQ ID NO: 1402784 - DNA, 25 bp, Homo sapien
gccggtctagcaggcctgacagtga

SEQ ID NO: 1402785 - DNA, 25 bp, Homo sapien
aagagagctgcccaccggcttggcc

SEQ ID NO: 1402786 - DNA, 25 bp, Homo sapien
tgggcctcatcttagcatttcaggt

SEQ ID NO: 1402787 - DNA, 25 bp, Homo sapien
gaccagtccctgttatctatttaaa

SEQ ID NO: 1402788 - DNA, 25 bp, Homo sapien
gctgcccaggtacccctaacagtgg

SEQ ID NO: 1402789 - DNA, 25 bp, Homo sapien
ttcctcgctgggtgctggacccctt

SEQ ID NO: 1402790 - DNA, 25 bp, Homo sapien
gagtgggggctcctttagtggcgga

SEQ ID NO: 1402791 - DNA, 25 bp, Homo sapien
gaggatgtctcaggtggtctgtggg

SEQ ID NO: 1402792 - DNA, 25 bp, Homo sapien
tcaggtggtctgtggggctcagggc

SEQ ID NO: 1402793 - DNA, 25 bp, Homo sapien
ggcggaggatgtctcaggtggtctg

SEQ ID NO: 1402794 - DNA, 25 bp, Homo sapien
actcggaagtggactccattgagag

SEQ ID NO: 1402795 - DNA, 25 bp, Homo sapien
gctgcaataaccatgcctgctcagg

SEQ ID NO: 1402796 - DNA, 25 bp, Homo sapien
acttcttggagctgttgctgcaata

SEQ ID NO: 1402797 - DNA, 25 bp, Homo sapien
cagccagccatagctgagggccctc

SEQ ID NO: 1402798 - DNA, 25 bp, Homo sapien
cggaagcaagtgaggcagtagagac

SEQ ID NO: 1402799 - DNA, 25 bp, Homo sapien
acacacggagcaggtattgtccagg

SEQ ID NO: 1402800 - DNA, 25 bp, Homo sapien
caggaggcggaagcaagtgaggcag

SEQ ID NO: 1402801 - DNA, 25 bp, Homo sapien
ggtaggagaggggagatgcacacac

SEQ ID NO: 1402802 - DNA, 25 bp, Homo sapien
gagctgctgcaatgccacttgcata

SEQ ID NO: 1402803 - DNA, 25 bp, Homo sapien
acactagggagctgctgcaatgcca

SEQ ID NO: 1402804 - DNA, 25 bp, Homo sapien
gctgcaatgccacttgcatataaat

SEQ ID NO: 1402805 - DNA, 25 bp, Homo sapien
tcaaggggtgcacactagggagctg

SEQ ID NO: 1402806 - DNA, 25 bp, Homo sapien
gtactgcaggacacagtgttctcca

SEQ ID NO: 1402807 - DNA, 25 bp, Homo sapien
ccatgtctccctcatcctggggctg

SEQ ID NO: 1402808 - DNA, 25 bp, Homo sapien
gacacagtgttctccatgtctccct

SEQ ID NO: 1402809 - DNA, 25 bp, Homo sapien
tggcagccgggggtactgcaggaca

SEQ ID NO: 1402810 - DNA, 25 bp, Homo sapien
tgatgcagccaaaagtggctgacaa

SEQ ID NO: 1402811 - DNA, 25 bp, Homo sapien
aaagtggctgacaaatggacctagg

SEQ ID NO: 1402812 - DNA, 25 bp, Homo sapien
tggctgacaaatggacctaggcagg

SEQ ID NO: 1402813 - DNA, 25 bp, Homo sapien
gccaaaagtggctgacaaatggacc

SEQ ID NO: 1402814 - DNA, 25 bp, Homo sapien
ttctgtggccctggtcagccgcccg

SEQ ID NO: 1402815 - DNA, 25 bp, Homo sapien
cgccgcctcactgatcggtgcaggg

SEQ ID NO: 1402816 - DNA, 25 bp, Homo sapien
caacagattggttcggcggctcaga

SEQ ID NO: 1402817 - DNA, 25 bp, Homo sapien
ctcactgatcggtgcagggcagcca

SEQ ID NO: 1402818 - DNA, 25 bp, Homo sapien
catagctgccaaacagggtgatgaa

SEQ ID NO: 1402819 - DNA, 25 bp, Homo sapien
gaagaagcataggccatacatgacg

SEQ ID NO: 1402820 - DNA, 25 bp, Homo sapien
atgactcgccgcagccggctgacat

SEQ ID NO: 1402821 - DNA, 25 bp, Homo sapien
gtagtaggaggcacagatgactcgc

SEQ ID NO: 1402822 - DNA, 25 bp, Homo sapien
atggtgtccacgcccccagggacct

SEQ ID NO: 1402823 - DNA, 25 bp, Homo sapien
agggacctcagggtgtagttgatac

SEQ ID NO: 1402824 - DNA, 25 bp, Homo sapien
tgtccacgcccccagggacctcagg

SEQ ID NO: 1402825 - DNA, 25 bp, Homo sapien
ccagggacctcagggtgtagttgat

SEQ ID NO: 1402826 - DNA, 25 bp, Homo sapien
tgacaccaggtcacgataaatattc

SEQ ID NO: 1402827 - DNA, 25 bp, Homo sapien
cttgctgcaggacatcaaatgctga

SEQ ID NO: 1402828 - DNA, 25 bp, Homo sapien
agacaacgccgggacaaaatactga

SEQ ID NO: 1402829 - DNA, 25 bp, Homo sapien
ctgtcaggctccgagggacgaagga

SEQ ID NO: 1402830 - DNA, 25 bp, Homo sapien
tccacggttagagacaccaacacag

SEQ ID NO: 1402831 - DNA, 25 bp, Homo sapien
cacggttagagacaccaacacagga

SEQ ID NO: 1402832 - DNA, 25 bp, Homo sapien
acggttagagacaccaacacaggac

SEQ ID NO: 1402833 - DNA, 25 bp, Homo sapien
cttccacggttagagacaccaacac

SEQ ID NO: 1402834 - DNA, 25 bp, Homo sapien
agacactgtgtgagtgacactcatg

SEQ ID NO: 1402835 - DNA, 25 bp, Homo sapien
cacaaagacactgtgtgagtgacac

SEQ ID NO: 1402836 - DNA, 25 bp, Homo sapien
ctggcacaaagacactgtgtgagtg

SEQ ID NO: 1402837 - DNA, 25 bp, Homo sapien
caaagacactgtgtgagtgacactc

SEQ ID NO: 1402838 - DNA, 25 bp, Homo sapien
taggatgactcagacccttggctgg

SEQ ID NO: 1402839 - DNA, 25 bp, Homo sapien
gagcagcgcaggtcataggatgact

SEQ ID NO: 1402840 - DNA, 25 bp, Homo sapien
caggtcataggatgactcagaccct

SEQ ID NO: 1402841 - DNA, 25 bp, Homo sapien
aggaaagtggagcagcgcaggtcat

SEQ ID NO: 1402842 - DNA, 25 bp, Homo sapien
tgcagctggtgccgggccaggtcaa

SEQ ID NO: 1402843 - DNA, 25 bp, Homo sapien
ctggtgccgggccaggtcaagcacc

SEQ ID NO: 1402844 - DNA, 25 bp, Homo sapien
ccagaagacagcatagtctaggaag

SEQ ID NO: 1402845 - DNA, 25 bp, Homo sapien
tgcgggccacaatctccccctgcag

SEQ ID NO: 1402846 - DNA, 25 bp, Homo sapien
cacgaggaggaggtgtcggataagg

SEQ ID NO: 1402847 - DNA, 25 bp, Homo sapien
agcacgaggaggaggtgtcggataa

SEQ ID NO: 1402848 - DNA, 25 bp, Homo sapien
gaggaggtgtcggataaggttgaag

SEQ ID NO: 1402849 - DNA, 25 bp, Homo sapien
cgaggaggaggtgtcggataaggtt

SEQ ID NO: 1402850 - DNA, 25 bp, Homo sapien
tcccattgggacaagaagatggagc

SEQ ID NO: 1402851 - DNA, 25 bp, Homo sapien
tctcccattgggacaagaagatgga

SEQ ID NO: 1402852 - DNA, 25 bp, Homo sapien
cagaatgtaaaaaaacttctcccat

SEQ ID NO: 1402853 - DNA, 25 bp, Homo sapien
aaacttctcccattgggacaagaag

SEQ ID NO: 1402854 - DNA, 25 bp, Homo sapien
ccggtgggatgtagcgcctggcctc

SEQ ID NO: 1402855 - DNA, 25 bp, Homo sapien
ggtgggatgtagcgcctggcctcgt

SEQ ID NO: 1402856 - DNA, 25 bp, Homo sapien
gatgtagcgcctggcctcgtgagca

SEQ ID NO: 1402857 - DNA, 25 bp, Homo sapien
tgggatgtagcgcctggcctcgtga

SEQ ID NO: 1402858 - DNA, 25 bp, Homo sapien
catgcgcaggaatcggctagtgatg

SEQ ID NO: 1402859 - DNA, 25 bp, Homo sapien
agcctccatgcgcaggaatcggcta

SEQ ID NO: 1402860 - DNA, 25 bp, Homo sapien
caggaatcggctagtgatgtagata

SEQ ID NO: 1402861 - DNA, 25 bp, Homo sapien
cctccatgcgcaggaatcggctagt

SEQ ID NO: 1402862 - DNA, 25 bp, Homo sapien
tccgagaggcattgagatccacaga

SEQ ID NO: 1402863 - DNA, 25 bp, Homo sapien
agcttcatgctgacagcctcgtgga

SEQ ID NO: 1402864 - DNA, 25 bp, Homo sapien
gcacccggttgagcaactgaatcac

SEQ ID NO: 1402865 - DNA, 25 bp, Homo sapien
tggctacctgggacaggctccgaga

SEQ ID NO: 1402866 - DNA, 25 bp, Homo sapien
gctggacccgtttcctgatctgtac

SEQ ID NO: 1402867 - DNA, 25 bp, Homo sapien
gggagaccactagggagcaccatat

SEQ ID NO: 1402868 - DNA, 25 bp, Homo sapien
caaagcctccacgtatctgtgccat

SEQ ID NO: 1402869 - DNA, 25 bp, Homo sapien
gcatgcaacagatgcccctaaggaa

SEQ ID NO: 1402870 - DNA, 25 bp, Homo sapien
gggtgccgatggtctggcgcaagaa

SEQ ID NO: 1402871 - DNA, 25 bp, Homo sapien
ggttgaatgtacttagggatgacgc

SEQ ID NO: 1402872 - DNA, 25 bp, Homo sapien
tacttagggatgacgcagaacacct

SEQ ID NO: 1402873 - DNA, 25 bp, Homo sapien
ctggcgcaagaagggttgaatgtac

SEQ ID NO: 1402874 - DNA, 25 bp, Homo sapien
tgaagggcatgagcacgtaacacag

SEQ ID NO: 1402875 - DNA, 25 bp, Homo sapien
tccacagagcgccagtttgaagggc

SEQ ID NO: 1402876 - DNA, 25 bp, Homo sapien
taacacaggtggtaggcttgtggta

SEQ ID NO: 1402877 - DNA, 25 bp, Homo sapien
tggcaagtccacagagcgccagttt

SEQ ID NO: 1402878 - DNA, 25 bp, Homo sapien
tccttggcatcatcgaaaacccgtg

SEQ ID NO: 1402879 - DNA, 25 bp, Homo sapien
tgcacacttcaggtaagggttgccc

SEQ ID NO: 1402880 - DNA, 25 bp, Homo sapien
acatcgccgatgtgcaggagccact

SEQ ID NO: 1402881 - DNA, 25 bp, Homo sapien
agttccgagttgcacacatcgccga

SEQ ID NO: 1402882 - DNA, 25 bp, Homo sapien
ggtcttccgggcaatagctttaatc

SEQ ID NO: 1402883 - DNA, 25 bp, Homo sapien
ctctttggtcttccgggcaatagct

SEQ ID NO: 1402884 - DNA, 25 bp, Homo sapien
aagaacttgcggacccggtcagcca

SEQ ID NO: 1402885 - DNA, 25 bp, Homo sapien
cacaccatccatgattgaccgaaag

SEQ ID NO: 1402886 - DNA, 25 bp, Homo sapien
cctctgtagcacttcggcggtctgg

SEQ ID NO: 1402887 - DNA, 25 bp, Homo sapien
ttgcgtagagtgttggcacaaggcc

SEQ ID NO: 1402888 - DNA, 25 bp, Homo sapien
tgacaagaggttgcttggccctctg

SEQ ID NO: 1402889 - DNA, 25 bp, Homo sapien
gctggcccgggtgaagttgcgtaga

SEQ ID NO: 1402890 - DNA, 25 bp, Homo sapien
gcagccaccaacagtagtgtccggc

SEQ ID NO: 1402891 - DNA, 25 bp, Homo sapien
caaaagcagccaccaacagtagtgt

SEQ ID NO: 1402892 - DNA, 25 bp, Homo sapien
cttgaagcaccaacccaaaagcagc

SEQ ID NO: 1402893 - DNA, 25 bp, Homo sapien
cccaaaagcagccaccaacagtagt

SEQ ID NO: 1402894 - DNA, 25 bp, Homo sapien
catgcccaggctaaggaaggcagcc

SEQ ID NO: 1402895 - DNA, 25 bp, Homo sapien
aaggcagccaaagtgagggtgccca

SEQ ID NO: 1402896 - DNA, 25 bp, Homo sapien
cgtaggccgtggctaaagacaagcc

SEQ ID NO: 1402897 - DNA, 25 bp, Homo sapien
tggctcggacctggcgagagaatcc

SEQ ID NO: 1402898 - DNA, 25 bp, Homo sapien
ggtgcacaacatccttcatgacttt

SEQ ID NO: 1402899 - DNA, 25 bp, Homo sapien
cccaaggggtgcacaacatccttca

SEQ ID NO: 1402900 - DNA, 25 bp, Homo sapien
gggtgcacaacatccttcatgactt

SEQ ID NO: 1402901 - DNA, 25 bp, Homo sapien
gcacaacatccttcatgactttggg

SEQ ID NO: 1402902 - DNA, 25 bp, Homo sapien
gagatgcccgctgacttctgtgctc

SEQ ID NO: 1402903 - DNA, 25 bp, Homo sapien
tctgtgctcctggaatttctcaccg

SEQ ID NO: 1402904 - DNA, 25 bp, Homo sapien
tccaggagatgcccgctgacttctg

SEQ ID NO: 1402905 - DNA, 25 bp, Homo sapien
tgctcctggaatttctcaccgtatt

SEQ ID NO: 1402906 - DNA, 25 bp, Homo sapien
gatgagtggtgcttccccaaaacag

SEQ ID NO: 1402907 - DNA, 25 bp, Homo sapien
tgcaagccctgaatcctaatgagcc

SEQ ID NO: 1402908 - DNA, 25 bp, Homo sapien
gaagaaaacagcctcataccagtga

SEQ ID NO: 1402909 - DNA, 25 bp, Homo sapien
tcccatgaagcggaagagacaggca

SEQ ID NO: 1402910 - DNA, 25 bp, Homo sapien
gaatgactgtgcctcaaggaagccc

SEQ ID NO: 1402911 - DNA, 25 bp, Homo sapien
tatatatgcaggcatgcacccatgc

SEQ ID NO: 1402912 - DNA, 25 bp, Homo sapien
cacttccaggagatatgctgcaggc

SEQ ID NO: 1402913 - DNA, 25 bp, Homo sapien
tctacacaattggaaggcagggaca

SEQ ID NO: 1402914 - DNA, 25 bp, Homo sapien
tcgatgaccgcaggaagaagctggt

SEQ ID NO: 1402915 - DNA, 25 bp, Homo sapien
tgccctgtgtgggttcatgctccag

SEQ ID NO: 1402916 - DNA, 25 bp, Homo sapien
tgttttccagggcaaacggactctg

SEQ ID NO: 1402917 - DNA, 25 bp, Homo sapien
ttctgccagatcgatgaccgcagga

SEQ ID NO: 1402918 - DNA, 25 bp, Homo sapien
atccaggcctcagaaatgagcaatg

SEQ ID NO: 1402919 - DNA, 25 bp, Homo sapien
ccttgcaagcccaccatccaggcct

SEQ ID NO: 1402920 - DNA, 25 bp, Homo sapien
aaaaccgtcatcttcccttgcaagc

SEQ ID NO: 1402921 - DNA, 25 bp, Homo sapien
aaatgagcaatgtggtgaggacagc

SEQ ID NO: 1402922 - DNA, 25 bp, Homo sapien
cagcctcttgagtagctgagattac

SEQ ID NO: 1402923 - DNA, 25 bp, Homo sapien
cacctcccaggttcaagcagttctc

SEQ ID NO: 1402924 - DNA, 25 bp, Homo sapien
cacaatctcagctcactgcaacctc

SEQ ID NO: 1402925 - DNA, 25 bp, Homo sapien
gctggaggagtgcattggcacaatc

SEQ ID NO: 1402926 - DNA, 25 bp, Homo sapien
atgcagcaagttccatatgcatgca

SEQ ID NO: 1402927 - DNA, 25 bp, Homo sapien
catgcagcaagttccatatgcatgc

SEQ ID NO: 1402928 - DNA, 25 bp, Homo sapien
ggtgaagaggcgtcctgctcgctct

SEQ ID NO: 1402929 - DNA, 25 bp, Homo sapien
aataaaatgccctgtacgcttcacg

SEQ ID NO: 1402930 - DNA, 25 bp, Homo sapien
gcactgcctcgcctgcagtcgggaa

SEQ ID NO: 1402931 - DNA, 25 bp, Homo sapien
tcctccgcctttagtgacagcaacg

SEQ ID NO: 1402932 - DNA, 25 bp, Homo sapien
agcctccgccacgtagtctactgga

SEQ ID NO: 1402933 - DNA, 25 bp, Homo sapien
ctctgggccgcgttcctcggctccc

SEQ ID NO: 1402934 - DNA, 25 bp, Homo sapien
tctcctcgactgtgaagcgggccgg

SEQ ID NO: 1402935 - DNA, 25 bp, Homo sapien
ctttctctcctcgactgtgaagcgg

SEQ ID NO: 1402936 - DNA, 25 bp, Homo sapien
ccttcaaggtcttagctgagttggt

SEQ ID NO: 1402937 - DNA, 25 bp, Homo sapien
gacatactgtacactttttaaagct

SEQ ID NO: 1402938 - DNA, 25 bp, Homo sapien
cttagaaaggatgaggtcatagatc

SEQ ID NO: 1402939 - DNA, 25 bp, Homo sapien
ctgagttggttgtctctattggcaa

SEQ ID NO: 1402940 - DNA, 25 bp, Homo sapien
tgagtcagcccatcctgttgggagc

SEQ ID NO: 1402941 - DNA, 25 bp, Homo sapien
gagtcagcccatcctgttgggagcc

SEQ ID NO: 1402942 - DNA, 25 bp, Homo sapien
tatgatcaaatcctcaagccagctg

SEQ ID NO: 1402943 - DNA, 25 bp, Homo sapien
taaagaagagcagtagacagccctg

SEQ ID NO: 1402944 - DNA, 25 bp, Homo sapien
caaacacaggcgctttgcaggctgc

SEQ ID NO: 1402945 - DNA, 25 bp, Homo sapien
caattcagaccgacaagatggagca

SEQ ID NO: 1402946 - DNA, 25 bp, Homo sapien
cgtccccagcggcctctttgttctt

SEQ ID NO: 1402947 - DNA, 25 bp, Homo sapien
gtccccagcggcctctttgttctta

SEQ ID NO: 1402948 - DNA, 25 bp, Homo sapien
tccccagcggcctctttgttcttag

SEQ ID NO: 1402949 - DNA, 25 bp, Homo sapien
ccgtccccagcggcctctttgttct

SEQ ID NO: 1402950 - DNA, 25 bp, Homo sapien
tctgaatggtatcctaggtggtgcc

SEQ ID NO: 1402951 - DNA, 25 bp, Homo sapien
cgaggctatgatccccacaaggcca

SEQ ID NO: 1402952 - DNA, 25 bp, Homo sapien
tctggtaggcgaggctatgatcccc

SEQ ID NO: 1402953 - DNA, 25 bp, Homo sapien
tcttccacctctggtaggcgaggct

SEQ ID NO: 1402954 - DNA, 25 bp, Homo sapien
agcctccactggcacggtgccggcc

SEQ ID NO: 1402955 - DNA, 25 bp, Homo sapien
tgttgtgctgattagctcggcccgg

SEQ ID NO: 1402956 - DNA, 25 bp, Homo sapien
ccagccatcgataggtggatgttgt

SEQ ID NO: 1402957 - DNA, 25 bp, Homo sapien
caccgagccagccatcgataggtgg

SEQ ID NO: 1402958 - DNA, 25 bp, Homo sapien
ggcgctagaggtccagagaccgaca

SEQ ID NO: 1402959 - DNA, 25 bp, Homo sapien
agaggcagcgtgtgaacatggttac

SEQ ID NO: 1402960 - DNA, 25 bp, Homo sapien
tttgcacacctaggtcagatcccgg

SEQ ID NO: 1402961 - DNA, 25 bp, Homo sapien
cacagaggtgctagggttttctaac

SEQ ID NO: 1402962 - DNA, 25 bp, Homo sapien
caccgcgggcagagcggactccagt

SEQ ID NO: 1402963 - DNA, 25 bp, Homo sapien
agagcggactccagtctgtcccttc

SEQ ID NO: 1402964 - DNA, 25 bp, Homo sapien
tgggtggagggcagcaccgcgggca

SEQ ID NO: 1402965 - DNA, 25 bp, Homo sapien
cgggcagagcggactccagtctgtc

SEQ ID NO: 1402966 - DNA, 25 bp, Homo sapien
aaccttgatctttagcgggggcgag

SEQ ID NO: 1402967 - DNA, 25 bp, Homo sapien
tcttgtaggtaggtgcgtgtatcag

SEQ ID NO: 1402968 - DNA, 25 bp, Homo sapien
cttcaccccaaaccttgatctttag

SEQ ID NO: 1402969 - DNA, 25 bp, Homo sapien
gtgcgtgtatcagggccttcacccc

SEQ ID NO: 1402970 - DNA, 25 bp, Homo sapien
agctatgggctaggtcttcaggtcc

SEQ ID NO: 1402971 - DNA, 25 bp, Homo sapien
ccatctttaccgtcatccaggaggg

SEQ ID NO: 1402972 - DNA, 25 bp, Homo sapien
gactgggagcgactagttagcagcc

SEQ ID NO: 1402973 - DNA, 25 bp, Homo sapien
cctcccaagtgaagccataggcgga

SEQ ID NO: 1402974 - DNA, 25 bp, Homo sapien
gccagcctccttttcgcagaaccag

SEQ ID NO: 1402975 - DNA, 25 bp, Homo sapien
ttttcgcagaaccaggcgggcgcgc

SEQ ID NO: 1402976 - DNA, 25 bp, Homo sapien
ctggcgcgcggacgcgccgctgata

SEQ ID NO: 1402977 - DNA, 25 bp, Homo sapien
gcctccttttcgcagaaccaggcgg

SEQ ID NO: 1402978 - DNA, 25 bp, Homo sapien
actttcctcatagcatgcgcgggcg

SEQ ID NO: 1402979 - DNA, 25 bp, Homo sapien
ccttacccacgagaagtcgaggcgt

SEQ ID NO: 1402980 - DNA, 25 bp, Homo sapien
ctaaactcagtagcgctaggcggct

SEQ ID NO: 1402981 - DNA, 25 bp, Homo sapien
tagtctctcccgaatagatgcgaaa

SEQ ID NO: 1402982 - DNA, 25 bp, Homo sapien
gctgctgctcgtgcccgtgccgctg

SEQ ID NO: 1402983 - DNA, 25 bp, Homo sapien
agcgcggggctcagtcggggggcgg

SEQ ID NO: 1402984 - DNA, 25 bp, Homo sapien
gctgctcgtgcccgtgccgctgctg

SEQ ID NO: 1402985 - DNA, 25 bp, Homo sapien
ctgctgctgctcgtgcccgtgccgc

SEQ ID NO: 1402986 - DNA, 25 bp, Homo sapien
gatacagatatagcacttggtgcca

SEQ ID NO: 1402987 - DNA, 25 bp, Homo sapien
ttctctactgactccccccatttgc

SEQ ID NO: 1402988 - DNA, 25 bp, Homo sapien
cagcagatacagatatagcacttgg

SEQ ID NO: 1402989 - DNA, 25 bp, Homo sapien
tcccagcagatacagatatagcact

SEQ ID NO: 1402990 - DNA, 25 bp, Homo sapien
ttcacattcacttctcgaccgttag

SEQ ID NO: 1402991 - DNA, 25 bp, Homo sapien
tctcgaccgttagtacatagaatcc

SEQ ID NO: 1402992 - DNA, 25 bp, Homo sapien
gaccgttagtacatagaatccccaa

SEQ ID NO: 1402993 - DNA, 25 bp, Homo sapien
cacttctcgaccgttagtacataga

SEQ ID NO: 1402994 - DNA, 25 bp, Homo sapien
gaggaagggctgtccgcacaggaat

SEQ ID NO: 1402995 - DNA, 25 bp, Homo sapien
ggaggaagggctgtccgcacaggaa

SEQ ID NO: 1402996 - DNA, 25 bp, Homo sapien
gggaggaagggctgtccgcacagga

SEQ ID NO: 1402997 - DNA, 25 bp, Homo sapien
aggaagggctgtccgcacaggaatg

SEQ ID NO: 1402998 - DNA, 25 bp, Homo sapien
gtggccacacgatagcccacagtgc

SEQ ID NO: 1402999 - DNA, 25 bp, Homo sapien
tcgcagtcatgaaaagtggccacac

SEQ ID NO: 1403000 - DNA, 25 bp, Homo sapien
aggtggagcccaggatcgctagtcc

SEQ ID NO: 1403001 - DNA, 25 bp, Homo sapien
agccggcggacaccagcaagtaggc

SEQ ID NO: 1403002 - DNA, 25 bp, Homo sapien
tgcgagagaaggaagcaatgctccc

SEQ ID NO: 1403003 - DNA, 25 bp, Homo sapien
ctgcgagagaaggaagcaatgctcc

SEQ ID NO: 1403004 - DNA, 25 bp, Homo sapien
tcaaccgaagcccgcccacggagag

SEQ ID NO: 1403005 - DNA, 25 bp, Homo sapien
caaactcaaccgaagcccgcccacg

SEQ ID NO: 1403006 - DNA, 25 bp, Homo sapien
accgaagcccgcccacggagagcat

SEQ ID NO: 1403007 - DNA, 25 bp, Homo sapien
actcaaccgaagcccgcccacggag

SEQ ID NO: 1403008 - DNA, 25 bp, Homo sapien
aggtccgaacttgagtgcccacaaa

SEQ ID NO: 1403009 - DNA, 25 bp, Homo sapien
gggaatcgccgatcccagaggtccg

SEQ ID NO: 1403010 - DNA, 25 bp, Homo sapien
ccctctatatttgagacccactccc

SEQ ID NO: 1403011 - DNA, 25 bp, Homo sapien
ccgatcccagaggtccgaacttgag

SEQ ID NO: 1403012 - DNA, 25 bp, Homo sapien
tggttcacgttccgcttccgcgcgg

SEQ ID NO: 1403013 - DNA, 25 bp, Homo sapien
ctccctggttcacgttccgcttccg

SEQ ID NO: 1403014 - DNA, 25 bp, Homo sapien
tgttggcgtccggaagtcctccctg

SEQ ID NO: 1403015 - DNA, 25 bp, Homo sapien
gcggcccggatgttggcgtccggaa

SEQ ID NO: 1403016 - DNA, 25 bp, Homo sapien
aagaatcaactttattgaacattca

SEQ ID NO: 1403017 - DNA, 25 bp, Homo sapien
agaatcaactttattgaacattcag

SEQ ID NO: 1403018 - DNA, 25 bp, Homo sapien
gaatcaactttattgaacattcagg

SEQ ID NO: 1403019 - DNA, 25 bp, Homo sapien
aatcaactttattgaacattcaggg

SEQ ID NO: 1403020 - DNA, 25 bp, Homo sapien
tggtacagggtggaggagatcttgt

SEQ ID NO: 1403021 - DNA, 25 bp, Homo sapien
cctggtacagggtggaggagatctt

SEQ ID NO: 1403022 - DNA, 25 bp, Homo sapien
ctggtacagggtggaggagatcttg

SEQ ID NO: 1403023 - DNA, 25 bp, Homo sapien
gacagaaaggtcatggcaccagtgg

SEQ ID NO: 1403024 - DNA, 25 bp, Homo sapien
gtgggcatctgccagcctggtgcct

SEQ ID NO: 1403025 - DNA, 25 bp, Homo sapien
ggtgaagacagaaaggtcatggcac

SEQ ID NO: 1403026 - DNA, 25 bp, Homo sapien
ggtcatggcaccagtgggcatctgc

SEQ ID NO: 1403027 - DNA, 25 bp, Homo sapien
tgccaaaaaacggaatgctacaccc

SEQ ID NO: 1403028 - DNA, 25 bp, Homo sapien
aggaaaaactctggcaccatcacag

SEQ ID NO: 1403029 - DNA, 25 bp, Homo sapien
tggcaccatcacagtaagatccaat

SEQ ID NO: 1403030 - DNA, 25 bp, Homo sapien
gggaagacactagcatcaaggaaag

SEQ ID NO: 1403031 - DNA, 25 bp, Homo sapien
ggtggtgacacagactcggtggatg

SEQ ID NO: 1403032 - DNA, 25 bp, Homo sapien
gtgacacagactcggtggatgaggc

SEQ ID NO: 1403033 - DNA, 25 bp, Homo sapien
aggtggtgacacagactcggtggat

SEQ ID NO: 1403034 - DNA, 25 bp, Homo sapien
tggtgacacagactcggtggatgag

SEQ ID NO: 1403035 - DNA, 25 bp, Homo sapien
taccttaatgatacccagaacatgg

SEQ ID NO: 1403036 - DNA, 25 bp, Homo sapien
aagggtaagcgtgactacagcagga

SEQ ID NO: 1403037 - DNA, 25 bp, Homo sapien
tactaggcatctgcacatggagtcc

SEQ ID NO: 1403038 - DNA, 25 bp, Homo sapien
gtagtacagtggtacacatgcctgt

SEQ ID NO: 1403039 - DNA, 25 bp, Homo sapien
tgggcccaagctatctgccagccta

SEQ ID NO: 1403040 - DNA, 25 bp, Homo sapien
tagccagttatggtggcgcacgcat

SEQ ID NO: 1403041 - DNA, 25 bp, Homo sapien
cgtgtgccatcccacccagccaatg

SEQ ID NO: 1403042 - DNA, 25 bp, Homo sapien
gaagcaactgaaaagccaggcacag

SEQ ID NO: 1403043 - DNA, 25 bp, Homo sapien
gggctactggatggaaagaactctg

SEQ ID NO: 1403044 - DNA, 25 bp, Homo sapien
caaaacctaacagagagaagtcccg

SEQ ID NO: 1403045 - DNA, 25 bp, Homo sapien
gctgtgaatttctgagcacgtggca

SEQ ID NO: 1403046 - DNA, 25 bp, Homo sapien
tatgcggagaaagcaagtcctagag

SEQ ID NO: 1403047 - DNA, 25 bp, Homo sapien
gaatcgaaaagcgtcatctgtcttc

SEQ ID NO: 1403048 - DNA, 25 bp, Homo sapien
ccaggagctatacaaggtgcagaat

SEQ ID NO: 1403049 - DNA, 25 bp, Homo sapien
ttcagacagcttcagtaaatatatt

SEQ ID NO: 1403050 - DNA, 25 bp, Homo sapien
tatatttctccttaacaacctttca

SEQ ID NO: 1403051 - DNA, 25 bp, Homo sapien
tcatgtttcaggaggttaaagagga

SEQ ID NO: 1403052 - DNA, 25 bp, Homo sapien
gaggagaaagttcaaatactcaagc

SEQ ID NO: 1403053 - DNA, 25 bp, Homo sapien
ttcaatatcatgtttcaggaggtta

SEQ ID NO: 1403054 - DNA, 25 bp, Homo sapien
caaatactcaagctccaatattcac

SEQ ID NO: 1403055 - DNA, 25 bp, Homo sapien
gccaaagacaagattctccagatta

SEQ ID NO: 1403056 - DNA, 25 bp, Homo sapien
gacaagattctccagattattgaag

SEQ ID NO: 1403057 - DNA, 25 bp, Homo sapien
aagacaagattctccagattattga

SEQ ID NO: 1403058 - DNA, 25 bp, Homo sapien
ccaaagacaagattctccagattat

SEQ ID NO: 1403059 - DNA, 25 bp, Homo sapien
ctggttgagggagttaaggagtagg

SEQ ID NO: 1403060 - DNA, 25 bp, Homo sapien
ggagttaaggagtagggtgtgcaac

SEQ ID NO: 1403061 - DNA, 25 bp, Homo sapien
gagggagttaaggagtagggtgtgc

SEQ ID NO: 1403062 - DNA, 25 bp, Homo sapien
agttaaggagtagggtgtgcaacgg

SEQ ID NO: 1403063 - DNA, 25 bp, Homo sapien
gtgtggggaaggggaagggcacatg

SEQ ID NO: 1403064 - DNA, 25 bp, Homo sapien
gggaaggggaagggcacatgcctac

SEQ ID NO: 1403065 - DNA, 25 bp, Homo sapien
gtggggaaggggaagggcacatgcc

SEQ ID NO: 1403066 - DNA, 25 bp, Homo sapien
ctgtgtggggaaggggaagggcaca

SEQ ID NO: 1403067 - DNA, 25 bp, Homo sapien
gccccctccaactgcagggaggata

SEQ ID NO: 1403068 - DNA, 25 bp, Homo sapien
ccccctccaactgcagggaggatac

SEQ ID NO: 1403069 - DNA, 25 bp, Homo sapien
cgccccctccaactgcagggaggat

SEQ ID NO: 1403070 - DNA, 25 bp, Homo sapien
tgagcgagaacacgaagagacccga

SEQ ID NO: 1403071 - DNA, 25 bp, Homo sapien
gtgagcgagaacacgaagagacccg

SEQ ID NO: 1403072 - DNA, 25 bp, Homo sapien
agcgagaacacgaagagacccgaac

SEQ ID NO: 1403073 - DNA, 25 bp, Homo sapien
agtgagcgagaacacgaagagaccc

SEQ ID NO: 1403074 - DNA, 25 bp, Homo sapien
aggccgccctggatggtgagccact

SEQ ID NO: 1403075 - DNA, 25 bp, Homo sapien
agccactcggtggaggccagctgac

SEQ ID NO: 1403076 - DNA, 25 bp, Homo sapien
cctggatggtgagccactcggtgga

SEQ ID NO: 1403077 - DNA, 25 bp, Homo sapien
ccagctgacggctgtacatctgcat

SEQ ID NO: 1403078 - DNA, 25 bp, Homo sapien
gccagcgaggtgcccgtacccacca

SEQ ID NO: 1403079 - DNA, 25 bp, Homo sapien
tggaaatgcccgctcccggtggaac

SEQ ID NO: 1403080 - DNA, 25 bp, Homo sapien
agatcagccggtccggaagctcggt

SEQ ID NO: 1403081 - DNA, 25 bp, Homo sapien
caggacacgtcagctctgtcgggag

SEQ ID NO: 1403082 - DNA, 25 bp, Homo sapien
ggacggagagtcaggctccgccctc

SEQ ID NO: 1403083 - DNA, 25 bp, Homo sapien
gcgcctctggccaagaaaggcgagc

SEQ ID NO: 1403084 - DNA, 25 bp, Homo sapien
aaaggcgagctgaaccgggtgcggt

SEQ ID NO: 1403085 - DNA, 25 bp, Homo sapien
atgccccgcccgtgagtccaaccgg

SEQ ID NO: 1403086 - DNA, 25 bp, Homo sapien
aaccgggtgcggttagctatgcgca

SEQ ID NO: 1403087 - DNA, 25 bp, Homo sapien
ccctcttgcgacagggaggaaataa

SEQ ID NO: 1403088 - DNA, 25 bp, Homo sapien
aataatgcgtcgagggggcatcctc

SEQ ID NO: 1403089 - DNA, 25 bp, Homo sapien
tcaggctttcctcgtacctggtgcg

SEQ ID NO: 1403090 - DNA, 25 bp, Homo sapien
gcggacttgctactcctcgcgttct

SEQ ID NO: 1403091 - DNA, 25 bp, Homo sapien
tcatctctagtgcacgttcctcaaa

SEQ ID NO: 1403092 - DNA, 25 bp, Homo sapien
tttagtgctcccaaccaggaactca

SEQ ID NO: 1403093 - DNA, 25 bp, Homo sapien
gcctgtggcatctatcccatctctg

SEQ ID NO: 1403094 - DNA, 25 bp, Homo sapien
tatctctttaagtcattgggcccat

SEQ ID NO: 1403095 - DNA, 25 bp, Homo sapien
tgggctcctgcattaagcccggggt

SEQ ID NO: 1403096 - DNA, 25 bp, Homo sapien
ctgcattaagcccggggttcgcagc

SEQ ID NO: 1403097 - DNA, 25 bp, Homo sapien
ggctcctgcattaagcccggggttc

SEQ ID NO: 1403098 - DNA, 25 bp, Homo sapien
ctcctgcattaagcccggggttcgc

SEQ ID NO: 1403099 - DNA, 25 bp, Homo sapien
ctctttgtttgtaggctgtggccac

SEQ ID NO: 1403100 - DNA, 25 bp, Homo sapien
tttgtaggctgtggccaccgcggac

SEQ ID NO: 1403101 - DNA, 25 bp, Homo sapien
cgcgctcagcgctgcttctccctct

SEQ ID NO: 1403102 - DNA, 25 bp, Homo sapien
tctccctctctttgtttgtaggctg

SEQ ID NO: 1403103 - DNA, 25 bp, Homo sapien
actgagaagtgtccgagaaattggt

SEQ ID NO: 1403104 - DNA, 25 bp, Homo sapien
gctcaccagcccaaacagggtgcag

SEQ ID NO: 1403105 - DNA, 25 bp, Homo sapien
accacaacacttcccaggcatgagc

SEQ ID NO: 1403106 - DNA, 25 bp, Homo sapien
tcaggatccccgctatctcagggct

SEQ ID NO: 1403107 - DNA, 25 bp, Homo sapien
aagttggcagaagtggctgccactg

SEQ ID NO: 1403108 - DNA, 25 bp, Homo sapien
aagtggctgccactgctgggtttgt

SEQ ID NO: 1403109 - DNA, 25 bp, Homo sapien
tggctgccactgctgggtttgtgta

SEQ ID NO: 1403110 - DNA, 25 bp, Homo sapien
agttggcagaagtggctgccactgc

SEQ ID NO: 1403111 - DNA, 25 bp, Homo sapien
tggggtaatcagtccagagtcctgg

SEQ ID NO: 1403112 - DNA, 25 bp, Homo sapien
aggtacctcctagagcccctggatg

SEQ ID NO: 1403113 - DNA, 25 bp, Homo sapien
gagcaaaaggtacctcctagagccc

SEQ ID NO: 1403114 - DNA, 25 bp, Homo sapien
caaagggttaattcagagagagcac

SEQ ID NO: 1403115 - DNA, 25 bp, Homo sapien
tgccagcctttctcggtctaccctc

SEQ ID NO: 1403116 - DNA, 25 bp, Homo sapien
gcctttctcggtctaccctccattc

SEQ ID NO: 1403117 - DNA, 25 bp, Homo sapien
cagcctttctcggtctaccctccat

SEQ ID NO: 1403118 - DNA, 25 bp, Homo sapien
tatgccagcctttctcggtctaccc

SEQ ID NO: 1403119 - DNA, 25 bp, Homo sapien
gtgctccacccattttgcctctggg

SEQ ID NO: 1403120 - DNA, 25 bp, Homo sapien
aaacaaaactgccacggtggcacca

SEQ ID NO: 1403121 - DNA, 25 bp, Homo sapien
tggacggccaatgatcttttaggaa

SEQ ID NO: 1403122 - DNA, 25 bp, Homo sapien
cttcagaatccttgcccagccaaac

SEQ ID NO: 1403123 - DNA, 25 bp, Homo sapien
agggggcacatagcgcccatgggtg

SEQ ID NO: 1403124 - DNA, 25 bp, Homo sapien
tagggggcacatagcgcccatgggt

SEQ ID NO: 1403125 - DNA, 25 bp, Homo sapien
gggcacatagcgcccatgggtgtgg

SEQ ID NO: 1403126 - DNA, 25 bp, Homo sapien
cacatagcgcccatgggtgtggtag

SEQ ID NO: 1403127 - DNA, 25 bp, Homo sapien
ttctttcggcggcactgacagacag

SEQ ID NO: 1403128 - DNA, 25 bp, Homo sapien
tatcccgggctggaaagatgtccag

SEQ ID NO: 1403129 - DNA, 25 bp, Homo sapien
tgcccgtagttctttcggcggcact

SEQ ID NO: 1403130 - DNA, 25 bp, Homo sapien
tcataggatggtaggtatcccgggc

SEQ ID NO: 1403131 - DNA, 25 bp, Homo sapien
caggccatggagtgccttctaccgg

SEQ ID NO: 1403132 - DNA, 25 bp, Homo sapien
ccttctaccggggggctctgatcag

SEQ ID NO: 1403133 - DNA, 25 bp, Homo sapien
gagataggaggttatggcaggccat

SEQ ID NO: 1403134 - DNA, 25 bp, Homo sapien
taccggggggctctgatcagggcca

SEQ ID NO: 1403135 - DNA, 25 bp, Homo sapien
atagacaatggccagcgcaaccaga

SEQ ID NO: 1403136 - DNA, 25 bp, Homo sapien
agcgcaaccagaacacagaccagca

SEQ ID NO: 1403137 - DNA, 25 bp, Homo sapien
agacaatggccagcgcaaccagaac

SEQ ID NO: 1403138 - DNA, 25 bp, Homo sapien
tggccagcgcaaccagaacacagac

SEQ ID NO: 1403139 - DNA, 25 bp, Homo sapien
ctgggcagagaaaggaaatggcaca

SEQ ID NO: 1403140 - DNA, 25 bp, Homo sapien
gctgcagccagggaagtagcctcac

SEQ ID NO: 1403141 - DNA, 25 bp, Homo sapien
gcactaaggaaagagcggggaccca

SEQ ID NO: 1403142 - DNA, 25 bp, Homo sapien
ctcccgctgccagcactaaggaaag

SEQ ID NO: 1403143 - DNA, 25 bp, Homo sapien
ggccccggcatggtgctgggctgca

SEQ ID NO: 1403144 - DNA, 25 bp, Homo sapien
tcgtcaggttatatcgagaggctgc

SEQ ID NO: 1403145 - DNA, 25 bp, Homo sapien
gagaggctgcttccgttttatactg

SEQ ID NO: 1403146 - DNA, 25 bp, Homo sapien
tactgattgaactgtgtctccacgt

SEQ ID NO: 1403147 - DNA, 25 bp, Homo sapien
cattgatggtaccttctcggaaggc

SEQ ID NO: 1403148 - DNA, 25 bp, Homo sapien
tcaattgtaccaccacagatcctgg

SEQ ID NO: 1403149 - DNA, 25 bp, Homo sapien
cttcccccaaccttaagtgcaccag

SEQ ID NO: 1403150 - DNA, 25 bp, Homo sapien
ccctccctacggtcatgaccaccac

SEQ ID NO: 1403151 - DNA, 25 bp, Homo sapien
tccctacggtcatgaccaccaccca

SEQ ID NO: 1403152 - DNA, 25 bp, Homo sapien
tcccccaaccttaagtgcaccagtc

SEQ ID NO: 1403153 - DNA, 25 bp, Homo sapien
aaccaccacactgggtccacaccca

SEQ ID NO: 1403154 - DNA, 25 bp, Homo sapien
gaacttaatattggagaggcccaga

SEQ ID NO: 1403155 - DNA, 25 bp, Homo sapien
ctgaacttaatattggagaggccca

SEQ ID NO: 1403156 - DNA, 25 bp, Homo sapien
acttaatattggagaggcccagaaa

SEQ ID NO: 1403157 - DNA, 25 bp, Homo sapien
taatattggagaggcccagaaaacc

SEQ ID NO: 1403158 - DNA, 25 bp, Homo sapien
actcaggcttgatgcaaagggtgtg

SEQ ID NO: 1403159 - DNA, 25 bp, Homo sapien
aagggtgtggacagttctgatggct

SEQ ID NO: 1403160 - DNA, 25 bp, Homo sapien
tggggaaggaaaggccgatactcac

SEQ ID NO: 1403161 - DNA, 25 bp, Homo sapien
aaggactcaggcttgatgcaaaggg

SEQ ID NO: 1403162 - DNA, 25 bp, Homo sapien
tcttggtagtagtcggtgctgggat

SEQ ID NO: 1403163 - DNA, 25 bp, Homo sapien
ctcttggtagtagtcggtgctggga

SEQ ID NO: 1403164 - DNA, 25 bp, Homo sapien
gaggtttgaaatgtgaaaagacagg

SEQ ID NO: 1403165 - DNA, 25 bp, Homo sapien
ctggaggtttgaaatgtgaaaagac

SEQ ID NO: 1403166 - DNA, 25 bp, Homo sapien
ttgaaatgtgaaaagacaggaaaaa

SEQ ID NO: 1403167 - DNA, 25 bp, Homo sapien
ggtttgaaatgtgaaaagacaggaa

SEQ ID NO: 1403168 - DNA, 25 bp, Homo sapien
tgctgtgattggaggaggtgagagg

SEQ ID NO: 1403169 - DNA, 25 bp, Homo sapien
gtgctgtgattggaggaggtgagag

SEQ ID NO: 1403170 - DNA, 25 bp, Homo sapien
agaagtgctgtgattggaggaggtg

SEQ ID NO: 1403171 - DNA, 25 bp, Homo sapien
gggagaagtgctgtgattggaggag

SEQ ID NO: 1403172 - DNA, 25 bp, Homo sapien
cagaggtgccgttgtgcaccagagt

SEQ ID NO: 1403173 - DNA, 25 bp, Homo sapien
aattgagaatggagtgctcttgctg

SEQ ID NO: 1403174 - DNA, 25 bp, Homo sapien
gcaagggtggtaggagtatcagagt

SEQ ID NO: 1403175 - DNA, 25 bp, Homo sapien
cgtgctatggtgagtgctactggca

SEQ ID NO: 1403176 - DNA, 25 bp, Homo sapien
gtccggggccgaggtgacaccatgg

SEQ ID NO: 1403177 - DNA, 25 bp, Homo sapien
tgtccggggccgaggtgacaccatg

SEQ ID NO: 1403178 - DNA, 25 bp, Homo sapien
tccggggccgaggtgacaccatggg

SEQ ID NO: 1403179 - DNA, 25 bp, Homo sapien
tggtgtccggggccgaggtgacacc

SEQ ID NO: 1403180 - DNA, 25 bp, Homo sapien
tgtccggggccgaggtgacaccgtg

SEQ ID NO: 1403181 - DNA, 25 bp, Homo sapien
ctggtgtccggggccgaggtgacac

SEQ ID NO: 1403182 - DNA, 25 bp, Homo sapien
ctggtgtccggggccgaggtgacac

SEQ ID NO: 1403183 - DNA, 25 bp, Homo sapien
tgtccggggccgaggtgacaccgtg

SEQ ID NO: 1403184 - DNA, 25 bp, Homo sapien
tggtgtccggggccgaggtgacacc

SEQ ID NO: 1403185 - DNA, 25 bp, Homo sapien
ctggtgtccggggccgaggtgacac

SEQ ID NO: 1403186 - DNA, 25 bp, Homo sapien
tgtccggggccgaggtgacaccgtg

SEQ ID NO: 1403187 - DNA, 25 bp, Homo sapien
tggtgtccggggccgaggtgacacc

SEQ ID NO: 1403188 - DNA, 25 bp, Homo sapien
ctggtgtccggggccgaggtgacac

SEQ ID NO: 1403189 - DNA, 25 bp, Homo sapien
ctggtgtccggggccgaggtgacac

SEQ ID NO: 1403190 - DNA, 25 bp, Homo sapien
ctggagagtacgctgctggtcatac

SEQ ID NO: 1403191 - DNA, 25 bp, Homo sapien
tgactgggaccgaggtgacatcctg

SEQ ID NO: 1403192 - DNA, 25 bp, Homo sapien
gctgaggtgacatcgtgggctggcg

SEQ ID NO: 1403193 - DNA, 25 bp, Homo sapien
aacctgaagctggttccgtggccgg

SEQ ID NO: 1403194 - DNA, 25 bp, Homo sapien
agcattcttctcagtagagctgggc

SEQ ID NO: 1403195 - DNA, 25 bp, Homo sapien
agtagagctgggcactgaacttctc

SEQ ID NO: 1403196 - DNA, 25 bp, Homo sapien
tctgggtagccgaagtctccttttc

SEQ ID NO: 1403197 - DNA, 25 bp, Homo sapien
gaacttctctgggtagccgaagtct

SEQ ID NO: 1403198 - DNA, 25 bp, Homo sapien
tggggtagagcttgcatgaccagaa

SEQ ID NO: 1403199 - DNA, 25 bp, Homo sapien
ggggtagagcttgcatgaccagaac

SEQ ID NO: 1403200 - DNA, 25 bp, Homo sapien
ctggggtagagcttgcatgaccaga

SEQ ID NO: 1403201 - DNA, 25 bp, Homo sapien
tgttgcgggtttaggggctgtggta

SEQ ID NO: 1403202 - DNA, 25 bp, Homo sapien
ctgttgcgggtttaggggctgtggt

SEQ ID NO: 1403203 - DNA, 25 bp, Homo sapien
aaggagactgggtgcccggtgtcat

SEQ ID NO: 1403204 - DNA, 25 bp, Homo sapien
aaaggagactgggtgcccggtgtca

SEQ ID NO: 1403205 - DNA, 25 bp, Homo sapien
caggaagaaaggagactgggtgccc

SEQ ID NO: 1403206 - DNA, 25 bp, Homo sapien
aagaaaggagactgggtgcccggtg

SEQ ID NO: 1403207 - DNA, 25 bp, Homo sapien
caggcgcctaccgctttataccggt

SEQ ID NO: 1403208 - DNA, 25 bp, Homo sapien
cgggcacaggcgcctaccgctttat

SEQ ID NO: 1403209 - DNA, 25 bp, Homo sapien
aacagattcaggcaggcgctggctg

SEQ ID NO: 1403210 - DNA, 25 bp, Homo sapien
ggcacaggcgcctaccgctttatac

SEQ ID NO: 1403211 - DNA, 25 bp, Homo sapien
gttagtgcctgagtaataccccttg

SEQ ID NO: 1403212 - DNA, 25 bp, Homo sapien
tgaattctgaatctggtggcctcct

SEQ ID NO: 1403213 - DNA, 25 bp, Homo sapien
accaaaactttatggcaatgtgctg

SEQ ID NO: 1403214 - DNA, 25 bp, Homo sapien
gggctgtagcttagacctcagggtc

SEQ ID NO: 1403215 - DNA, 25 bp, Homo sapien
cagctgcctccggaatggctcaaag

SEQ ID NO: 1403216 - DNA, 25 bp, Homo sapien
tgcctccggaatggctcaaagtcct

SEQ ID NO: 1403217 - DNA, 25 bp, Homo sapien
gctgcctccggaatggctcaaagtc

SEQ ID NO: 1403218 - DNA, 25 bp, Homo sapien
cctccggaatggctcaaagtcctca

SEQ ID NO: 1403219 - DNA, 25 bp, Homo sapien
gaatccgccacaagctggggtccct

SEQ ID NO: 1403220 - DNA, 25 bp, Homo sapien
cccctcgcatggatgtgtcaatgat

SEQ ID NO: 1403221 - DNA, 25 bp, Homo sapien
ggatgtgtcaatgatcaccccagaa

SEQ ID NO: 1403222 - DNA, 25 bp, Homo sapien
catcgatactggagattggaccaaa

SEQ ID NO: 1403223 - DNA, 25 bp, Homo sapien
caggattccaggataggagtatcca

SEQ ID NO: 1403224 - DNA, 25 bp, Homo sapien
tccaggattccaggataggagtatc

SEQ ID NO: 1403225 - DNA, 25 bp, Homo sapien
tccaggataggagtatccattggtg

SEQ ID NO: 1403226 - DNA, 25 bp, Homo sapien
gattccaggataggagtatccattg

SEQ ID NO: 1403227 - DNA, 25 bp, Homo sapien
catgacaataagcacaatgggctgg

SEQ ID NO: 1403228 - DNA, 25 bp, Homo sapien
tggacaaagtgttgaaccgaggcct

SEQ ID NO: 1403229 - DNA, 25 bp, Homo sapien
caagcgaggattgggttgccatgac

SEQ ID NO: 1403230 - DNA, 25 bp, Homo sapien
catggaaagtccagcctctaagcag

SEQ ID NO: 1403231 - DNA, 25 bp, Homo sapien
aatgtagccaacttgaggccggtgc

SEQ ID NO: 1403232 - DNA, 25 bp, Homo sapien
tccacagcagtcgtacctgatcagg

SEQ ID NO: 1403233 - DNA, 25 bp, Homo sapien
ccacagggcatttcggaggtgctca

SEQ ID NO: 1403234 - DNA, 25 bp, Homo sapien
gcgataggaggtcttgtcccgccag

SEQ ID NO: 1403235 - DNA, 25 bp, Homo sapien
gggtaagagggttcccagtcaagca

SEQ ID NO: 1403236 - DNA, 25 bp, Homo sapien
gacaacaggtcggtaagtgcaggtg

SEQ ID NO: 1403237 - DNA, 25 bp, Homo sapien
cctgggttgcggaatctgagcagct

SEQ ID NO: 1403238 - DNA, 25 bp, Homo sapien
tgggaaagggattcaaggcggtcat

SEQ ID NO: 1403239 - DNA, 25 bp, Homo sapien
caaagtccacaccattgaaggccgt

SEQ ID NO: 1403240 - DNA, 25 bp, Homo sapien
agtaggtctgctcggtctgcttcca

SEQ ID NO: 1403241 - DNA, 25 bp, Homo sapien
cacatgactacgtagaagcggccac

SEQ ID NO: 1403242 - DNA, 25 bp, Homo sapien
cactgtgttcacatggaaggtgcct

SEQ ID NO: 1403243 - DNA, 25 bp, Homo sapien
actttgcccattctccctgtctgtt

SEQ ID NO: 1403244 - DNA, 25 bp, Homo sapien
tatgtatgtggccagcttgtgccac

SEQ ID NO: 1403245 - DNA, 25 bp, Homo sapien
tctgcccctataggattcctccatt

SEQ ID NO: 1403246 - DNA, 25 bp, Homo sapien
ttggaagtgattgaactgcatatcc

SEQ ID NO: 1403247 - DNA, 25 bp, Homo sapien
tgttcatggtctgaacgatttccat

SEQ ID NO: 1403248 - DNA, 25 bp, Homo sapien
actgttcatggtctgaacgatttcc

SEQ ID NO: 1403249 - DNA, 25 bp, Homo sapien
ttcatggtctgaacgatttccatgc

SEQ ID NO: 1403250 - DNA, 25 bp, Homo sapien
tcatggtctgaacgatttccatgcc

SEQ ID NO: 1403251 - DNA, 25 bp, Homo sapien
tgataggcccgaaaatccgtaagcg

SEQ ID NO: 1403252 - DNA, 25 bp, Homo sapien
agtttgggtcaatctgagcatcacc

SEQ ID NO: 1403253 - DNA, 25 bp, Homo sapien
taagcgttacctctgcactttcagg

SEQ ID NO: 1403254 - DNA, 25 bp, Homo sapien
tccaggacgacggtctgataggccc

SEQ ID NO: 1403255 - DNA, 25 bp, Homo sapien
ggcagagtgaggctgggtgctcagg

SEQ ID NO: 1403256 - DNA, 25 bp, Homo sapien
cagagtgaggctgggtgctcaggaa

SEQ ID NO: 1403257 - DNA, 25 bp, Homo sapien
ctgggcagagtgaggctgggtgctc

SEQ ID NO: 1403258 - DNA, 25 bp, Homo sapien
tgggcagagtgaggctgggtgctca

SEQ ID NO: 1403259 - DNA, 25 bp, Homo sapien
tctaacgtgctctgggtccgcaggc

SEQ ID NO: 1403260 - DNA, 25 bp, Homo sapien
cagtctaacgtgctctgggtccgca

SEQ ID NO: 1403261 - DNA, 25 bp, Homo sapien
ctgggcaaaggcaacaccagtctaa

SEQ ID NO: 1403262 - DNA, 25 bp, Homo sapien
ggcaacaccagtctaacgtgctctg

SEQ ID NO: 1403263 - DNA, 25 bp, Homo sapien
tcgttatcagagtccagctgggagc

SEQ ID NO: 1403264 - DNA, 25 bp, Homo sapien
caggaggcacataatctgggatgcc

SEQ ID NO: 1403265 - DNA, 25 bp, Homo sapien
ttctgattgggattgggtaccaggc

SEQ ID NO: 1403266 - DNA, 25 bp, Homo sapien
gtaccaggcggcagttatcgggacc

SEQ ID NO: 1403267 - DNA, 25 bp, Homo sapien
cagacatcccccaccaggtcgctgt

SEQ ID NO: 1403268 - DNA, 25 bp, Homo sapien
ctgtcttcattagtatcacagacat

SEQ ID NO: 1403269 - DNA, 25 bp, Homo sapien
cttcattagtatcacagacatcccc

SEQ ID NO: 1403270 - DNA, 25 bp, Homo sapien
gtcttcattagtatcacagacatcc

SEQ ID NO: 1403271 - DNA, 25 bp, Homo sapien
tgggtaggattgctcatttcagggc

SEQ ID NO: 1403272 - DNA, 25 bp, Homo sapien
ccctgtctgtctgtagtgggttggg

SEQ ID NO: 1403273 - DNA, 25 bp, Homo sapien
gggcagctgtcgcaagcatctccca

SEQ ID NO: 1403274 - DNA, 25 bp, Homo sapien
gggactttagggcaattgtccaatc

SEQ ID NO: 1403275 - DNA, 25 bp, Homo sapien
ttactagaacatgccatattctctc

SEQ ID NO: 1403276 - DNA, 25 bp, Homo sapien
tagaagacatgggtagcacaaggtt

SEQ ID NO: 1403277 - DNA, 25 bp, Homo sapien
ggtagcacaaggttgttactagaac

SEQ ID NO: 1403278 - DNA, 25 bp, Homo sapien
tcttctaggttggtgaaagtcccga

SEQ ID NO: 1403279 - DNA, 25 bp, Homo sapien
ctctgcctaacactacgccctacct

SEQ ID NO: 1403280 - DNA, 25 bp, Homo sapien
cctctagtccacactctgcctaaca

SEQ ID NO: 1403281 - DNA, 25 bp, Homo sapien
tttcttgtctcaccctctagtccac

SEQ ID NO: 1403282 - DNA, 25 bp, Homo sapien
tgcctaacactacgccctacctcac

SEQ ID NO: 1403283 - DNA, 25 bp, Homo sapien
aggccaacgtccacaagcctgcctc

SEQ ID NO: 1403284 - DNA, 25 bp, Homo sapien
atccaaattctcacaggtcccccag

SEQ ID NO: 1403285 - DNA, 25 bp, Homo sapien
tgatccaaattctcacaggtccccc

SEQ ID NO: 1403286 - DNA, 25 bp, Homo sapien
cctgatccaaattctcacaggtccc

SEQ ID NO: 1403287 - DNA, 25 bp, Homo sapien
ccaccccttcagccccaggcctgca

SEQ ID NO: 1403288 - DNA, 25 bp, Homo sapien
caccccttcagccccaggcctgcac

SEQ ID NO: 1403289 - DNA, 25 bp, Homo sapien
aacgttggggcaattgtcacaggca

SEQ ID NO: 1403290 - DNA, 25 bp, Homo sapien
tctgtgtccttctggtcattgttgg

SEQ ID NO: 1403291 - DNA, 25 bp, Homo sapien
caggcatcaccaaatgaatctgtat

SEQ ID NO: 1403292 - DNA, 25 bp, Homo sapien
ccttctggtcattgttgggaacgtt

SEQ ID NO: 1403293 - DNA, 25 bp, Homo sapien
gcccttactagagagctgccagatg

SEQ ID NO: 1403294 - DNA, 25 bp, Homo sapien
gacaaactgctcagtacagtcccac

SEQ ID NO: 1403295 - DNA, 25 bp, Homo sapien
gatggacaaactgctcagtacagtc

SEQ ID NO: 1403296 - DNA, 25 bp, Homo sapien
gatttggagtatttggcccttacta

SEQ ID NO: 1403297 - DNA, 25 bp, Homo sapien
agttgggtgtcaaaaggcagttgtc

SEQ ID NO: 1403298 - DNA, 25 bp, Homo sapien
gagttgggtgtcaaaaggcagttgt

SEQ ID NO: 1403299 - DNA, 25 bp, Homo sapien
ccagagttgggtgtcaaaaggcagt

SEQ ID NO: 1403300 - DNA, 25 bp, Homo sapien
gcccagagttgggtgtcaaaaggca

SEQ ID NO: 1403301 - DNA, 25 bp, Homo sapien
gccatcgatgtctgtgtcagtccca

SEQ ID NO: 1403302 - DNA, 25 bp, Homo sapien
tagccatcgatgtctgtgtcagtcc

SEQ ID NO: 1403303 - DNA, 25 bp, Homo sapien
gtagccatcgatgtctgtgtcagtc

SEQ ID NO: 1403304 - DNA, 25 bp, Homo sapien
catcgatgtctgtgtcagtcccaca

SEQ ID NO: 1403305 - DNA, 25 bp, Homo sapien
ctggcaggacactgcaccattgcgt

SEQ ID NO: 1403306 - DNA, 25 bp, Homo sapien
gacactgcaccattgcgttcaaaga

SEQ ID NO: 1403307 - DNA, 25 bp, Homo sapien
gcaccattgcgttcaaagagacagt

SEQ ID NO: 1403308 - DNA, 25 bp, Homo sapien
tcaaagagacagtgagcatggatgt

SEQ ID NO: 1403309 - DNA, 25 bp, Homo sapien
cagatggagtttgggtcacagccac

SEQ ID NO: 1403310 - DNA, 25 bp, Homo sapien
tgttgccatcgttgcattcatcgat

SEQ ID NO: 1403311 - DNA, 25 bp, Homo sapien
gttgcattcatcgatgtcattgcag

SEQ ID NO: 1403312 - DNA, 25 bp, Homo sapien
ttggtgcagatggagtttgggtcac

SEQ ID NO: 1403313 - DNA, 25 bp, Homo sapien
tccatgtcccattcatcacaagggt

SEQ ID NO: 1403314 - DNA, 25 bp, Homo sapien
tgaacatcaacattaagcccagacc

SEQ ID NO: 1403315 - DNA, 25 bp, Homo sapien
tatggtgggtctcctcagatacagc

SEQ ID NO: 1403316 - DNA, 25 bp, Homo sapien
tttgggtggaaccagacctatggtg

SEQ ID NO: 1403317 - DNA, 25 bp, Homo sapien
cgggaaacaggggtcagcgtgagca

SEQ ID NO: 1403318 - DNA, 25 bp, Homo sapien
agtcaatgcccacaccagacacctg

SEQ ID NO: 1403319 - DNA, 25 bp, Homo sapien
tgctggcccgggcatagtcaatgcc

SEQ ID NO: 1403320 - DNA, 25 bp, Homo sapien
tgtgcccttgtaccctcgaggacag

SEQ ID NO: 1403321 - DNA, 25 bp, Homo sapien
agatgagaaggcagaggtcaggccg

SEQ ID NO: 1403322 - DNA, 25 bp, Homo sapien
ctggggaccagatgagaaggcagag

SEQ ID NO: 1403323 - DNA, 25 bp, Homo sapien
atgagaaggcagaggtcaggccgcc

SEQ ID NO: 1403324 - DNA, 25 bp, Homo sapien
gagaaggcagaggtcaggccgccct

SEQ ID NO: 1403325 - DNA, 25 bp, Homo sapien
ggcagggcccacagcggtagcctgg

SEQ ID NO: 1403326 - DNA, 25 bp, Homo sapien
attgatgtcactgcagtgggtgccg

SEQ ID NO: 1403327 - DNA, 25 bp, Homo sapien
actgcagtgggtgccgttgccctgc

SEQ ID NO: 1403328 - DNA, 25 bp, Homo sapien
acagcggtagcctgggtactcgtac

SEQ ID NO: 1403329 - DNA, 25 bp, Homo sapien
ctgcagtgggaacgctgctcatgga

SEQ ID NO: 1403330 - DNA, 25 bp, Homo sapien
ccacacctcggaagcagggattggg

SEQ ID NO: 1403331 - DNA, 25 bp, Homo sapien
cagtgggaacgctgctcatggaagc

SEQ ID NO: 1403332 - DNA, 25 bp, Homo sapien
cagtccacacctcggaagcagggat

SEQ ID NO: 1403333 - DNA, 25 bp, Homo sapien
caaagccattgggtggggaacgtgg

SEQ ID NO: 1403334 - DNA, 25 bp, Homo sapien
gggaacgtggcacggtcatgtggag

SEQ ID NO: 1403335 - DNA, 25 bp, Homo sapien
tttaagccaccagaagggaaagcca

SEQ ID NO: 1403336 - DNA, 25 bp, Homo sapien
ggcacggtcatgtggagcctcccct

SEQ ID NO: 1403337 - DNA, 25 bp, Homo sapien
cactccataatggtgtttcggatca

SEQ ID NO: 1403338 - DNA, 25 bp, Homo sapien
atggtgtttcggatcagggacattt

SEQ ID NO: 1403339 - DNA, 25 bp, Homo sapien
cataatggtgtttcggatcagggac

SEQ ID NO: 1403340 - DNA, 25 bp, Homo sapien
tgacactccataatggtgtttcgga

SEQ ID NO: 1403341 - DNA, 25 bp, Homo sapien
gaatcagtgccacccttcgccagcc

SEQ ID NO: 1403342 - DNA, 25 bp, Homo sapien
ttgacatctgccaccctaccccaga

SEQ ID NO: 1403343 - DNA, 25 bp, Homo sapien
ccaccctaccccagaatcagtgcca

SEQ ID NO: 1403344 - DNA, 25 bp, Homo sapien
agtcagcacttgacatctgccaccc

SEQ ID NO: 1403345 - DNA, 25 bp, Homo sapien
gtgagttgggtgaccagcgccttgg

SEQ ID NO: 1403346 - DNA, 25 bp, Homo sapien
ggtctcgtatatcatcccgcagctc

SEQ ID NO: 1403347 - DNA, 25 bp, Homo sapien
gttgaagagggtgagttgggtgacc

SEQ ID NO: 1403348 - DNA, 25 bp, Homo sapien
ctggtctcgtatatcatcccgcagc

SEQ ID NO: 1403349 - DNA, 25 bp, Homo sapien
aataagccagtacctgccacggctg

SEQ ID NO: 1403350 - DNA, 25 bp, Homo sapien
agaggacttagtttcaggcagctgc

SEQ ID NO: 1403351 - DNA, 25 bp, Homo sapien
tcagtactggagcaccagtcctggg

SEQ ID NO: 1403352 - DNA, 25 bp, Homo sapien
tgcctttaaacctactacattcctg

SEQ ID NO: 1403353 - DNA, 25 bp, Homo sapien
agaatggagtgcagtgcattggtca

SEQ ID NO: 1403354 - DNA, 25 bp, Homo sapien
ctagaatggagtgcagtgcattggt

SEQ ID NO: 1403355 - DNA, 25 bp, Homo sapien
tagaatggagtgcagtgcattggtc

SEQ ID NO: 1403356 - DNA, 25 bp, Homo sapien
cagggccccagtatatccccatttt

SEQ ID NO: 1403357 - DNA, 25 bp, Homo sapien
ctggttcctaggcatggtagtggca

SEQ ID NO: 1403358 - DNA, 25 bp, Homo sapien
aagggatggacccaaagcagggcca

SEQ ID NO: 1403359 - DNA, 25 bp, Homo sapien
ctaagggagttgcttcacaggaagt

SEQ ID NO: 1403360 - DNA, 25 bp, Homo sapien
caggatccgtggtccaatgtcagca

SEQ ID NO: 1403361 - DNA, 25 bp, Homo sapien
gagagggagatcaagaagacaggag

SEQ ID NO: 1403362 - DNA, 25 bp, Homo sapien
gccacaggatccgtggtccaatgtc

SEQ ID NO: 1403363 - DNA, 25 bp, Homo sapien
atccgtggtccaatgtcagcaaaca

SEQ ID NO: 1403364 - DNA, 25 bp, Homo sapien
ctgtggatggactcgtccccttgga

SEQ ID NO: 1403365 - DNA, 25 bp, Homo sapien
tcagggctcctacccgggccatgga

SEQ ID NO: 1403366 - DNA, 25 bp, Homo sapien
ttggaatggacactcactcagggct

SEQ ID NO: 1403367 - DNA, 25 bp, Homo sapien
tggactcgtccccttggaatggaca

SEQ ID NO: 1403368 - DNA, 25 bp, Homo sapien
gccaggcccgcttgctgtaggttca

SEQ ID NO: 1403369 - DNA, 25 bp, Homo sapien
tgcagtccacgtagagatgtagggc

SEQ ID NO: 1403370 - DNA, 25 bp, Homo sapien
ggttcacggcgtggactttgccatc

SEQ ID NO: 1403371 - DNA, 25 bp, Homo sapien
cctcggagtcgcaggagaactgtgt

SEQ ID NO: 1403372 - DNA, 25 bp, Homo sapien
tgcccaggaggggagatcagtatgg

SEQ ID NO: 1403373 - DNA, 25 bp, Homo sapien
cccaggaggggagatcagtatgggc

SEQ ID NO: 1403374 - DNA, 25 bp, Homo sapien
ctgcccaggaggggagatcagtatg

SEQ ID NO: 1403375 - DNA, 25 bp, Homo sapien
ccaggaggggagatcagtatgggcg

SEQ ID NO: 1403376 - DNA, 25 bp, Homo sapien
ccttgtatttaataggtacacaata

SEQ ID NO: 1403377 - DNA, 25 bp, Homo sapien
gagccttggatcaactctgctagat

SEQ ID NO: 1403378 - DNA, 25 bp, Homo sapien
ctaattctactatgtggctctcaac

SEQ ID NO: 1403379 - DNA, 25 bp, Homo sapien
gataccacatctctagggcccctat

SEQ ID NO: 1403380 - DNA, 25 bp, Homo sapien
tggtacatgggctcctaaagcacct

SEQ ID NO: 1403381 - DNA, 25 bp, Homo sapien
gactcaagcctcaccctattgtttg

SEQ ID NO: 1403382 - DNA, 25 bp, Homo sapien
gaaagacctttctgtatcaccgctg

SEQ ID NO: 1403383 - DNA, 25 bp, Homo sapien
tttgtggccactgacctgttccagg

SEQ ID NO: 1403384 - DNA, 25 bp, Homo sapien
gggaagtagggatgagggagagtgc

SEQ ID NO: 1403385 - DNA, 25 bp, Homo sapien
accattgcaagaaaggagatgccca

SEQ ID NO: 1403386 - DNA, 25 bp, Homo sapien
gagtgcttaaggaggtcaccattgc

SEQ ID NO: 1403387 - DNA, 25 bp, Homo sapien
cctaatggaggccaaggagaatgag

SEQ ID NO: 1403388 - DNA, 25 bp, Homo sapien
tgatcttgcctacaacagaggcctc

SEQ ID NO: 1403389 - DNA, 25 bp, Homo sapien
ggcctccagccatcgagtgttgtct

SEQ ID NO: 1403390 - DNA, 25 bp, Homo sapien
tgttgtcttggcgagaatagaggcc

SEQ ID NO: 1403391 - DNA, 25 bp, Homo sapien
taagaggtagatgtccccagcagtg

SEQ ID NO: 1403392 - DNA, 25 bp, Homo sapien
actcgcccacagtcagcaggtcaat

SEQ ID NO: 1403393 - DNA, 25 bp, Homo sapien
acagctaccatctgccgagactcgc

SEQ ID NO: 1403394 - DNA, 25 bp, Homo sapien
cgagactcgcccacagtcagcaggt

SEQ ID NO: 1403395 - DNA, 25 bp, Homo sapien
tcgcccacagtcagcaggtcaatta

SEQ ID NO: 1403396 - DNA, 25 bp, Homo sapien
tcaaatgctaaggtatgccctcccc

SEQ ID NO: 1403397 - DNA, 25 bp, Homo sapien
caccaggcagcgttagtcacctcaa

SEQ ID NO: 1403398 - DNA, 25 bp, Homo sapien
tcaggcaggggttatcaaggttaga

SEQ ID NO: 1403399 - DNA, 25 bp, Homo sapien
ttatcaaggttagagaatgggatca

SEQ ID NO: 1403400 - DNA, 25 bp, Homo sapien
tgcagatcctgactggcagatgtga

SEQ ID NO: 1403401 - DNA, 25 bp, Homo sapien
cctgcagatcctgactggcagatgt

SEQ ID NO: 1403402 - DNA, 25 bp, Homo sapien
cagatcctgactggcagatgtgaaa

SEQ ID NO: 1403403 - DNA, 25 bp, Homo sapien
ccccccgaagttcctgcgtctccat

SEQ ID NO: 1403404 - DNA, 25 bp, Homo sapien
gcctctcagccggctcactacccct

SEQ ID NO: 1403405 - DNA, 25 bp, Homo sapien
cctctcagccggctcactacccctg

SEQ ID NO: 1403406 - DNA, 25 bp, Homo sapien
ctctcagccggctcactacccctgg

SEQ ID NO: 1403407 - DNA, 25 bp, Homo sapien
ctccctctccgcagtcatcattgtt

SEQ ID NO: 1403408 - DNA, 25 bp, Homo sapien
ggtgcctccctctccgcagtcatca

SEQ ID NO: 1403409 - DNA, 25 bp, Homo sapien
tacctctccctaatgatcctccccc

SEQ ID NO: 1403410 - DNA, 25 bp, Homo sapien
acctctccctaatgatcctccccca

SEQ ID NO: 1403411 - DNA, 25 bp, Homo sapien
gctccacttggacgaggcgccgtga

SEQ ID NO: 1403412 - DNA, 25 bp, Homo sapien
acgaggcgccgtgacactccgaggc

SEQ ID NO: 1403413 - DNA, 25 bp, Homo sapien
aggcgcacaagaccccgctctccag

SEQ ID NO: 1403414 - DNA, 25 bp, Homo sapien
cgacagcgctgtcccgctacgtggg

SEQ ID NO: 1403415 - DNA, 25 bp, Homo sapien
ttacgtcgctgtaagctcacgctgg

SEQ ID NO: 1403416 - DNA, 25 bp, Homo sapien
acgtcgctgtaagctcacgctggcc

SEQ ID NO: 1403417 - DNA, 25 bp, Homo sapien
gcttacgtcgctgtaagctcacgct

SEQ ID NO: 1403418 - DNA, 25 bp, Homo sapien
gggcttacgtcgctgtaagctcacg

SEQ ID NO: 1403419 - DNA, 25 bp, Homo sapien
cactggcgacgccacaggtaggtgt

SEQ ID NO: 1403420 - DNA, 25 bp, Homo sapien
cacagcaggatccttgatggtaaga

SEQ ID NO: 1403421 - DNA, 25 bp, Homo sapien
ggtaagaggcacatccttagaggag

SEQ ID NO: 1403422 - DNA, 25 bp, Homo sapien
aatggagtagccaggtgagattgtc

SEQ ID NO: 1403423 - DNA, 25 bp, Homo sapien
tcgttcttctgactggcaaccagcc

SEQ ID NO: 1403424 - DNA, 25 bp, Homo sapien
agagccatcgggatgcatcagtgcc

SEQ ID NO: 1403425 - DNA, 25 bp, Homo sapien
ggtcgttcttctgactggcaaccag

SEQ ID NO: 1403426 - DNA, 25 bp, Homo sapien
atcgggatgcatcagtgccactgcg

SEQ ID NO: 1403427 - DNA, 25 bp, Homo sapien
gggttttctgttgctacctagtcac

SEQ ID NO: 1403428 - DNA, 25 bp, Homo sapien
gatgtaagccatccgatgtaggaga

SEQ ID NO: 1403429 - DNA, 25 bp, Homo sapien
ccctcgtggtgtagagtgatgtaag

SEQ ID NO: 1403430 - DNA, 25 bp, Homo sapien
cctgcttttctgcatcgcagtccag

SEQ ID NO: 1403431 - DNA, 25 bp, Homo sapien
gaagtggccaaggtggtagaacatg

SEQ ID NO: 1403432 - DNA, 25 bp, Homo sapien
ctgaagtggccaaggtggtagaaca

SEQ ID NO: 1403433 - DNA, 25 bp, Homo sapien
agtggccaaggtggtagaacatggg

SEQ ID NO: 1403434 - DNA, 25 bp, Homo sapien
tgaagtggccaaggtggtagaacat

SEQ ID NO: 1403435 - DNA, 25 bp, Homo sapien
ctgtttgtaaaacgtgtgcttggtg

SEQ ID NO: 1403436 - DNA, 25 bp, Homo sapien
ctacaatgatgggttccagtcggtc

SEQ ID NO: 1403437 - DNA, 25 bp, Homo sapien
tacaatgatgggttccagtcggtcc

SEQ ID NO: 1403438 - DNA, 25 bp, Homo sapien
agagtgtaggtaagggtcacgtgtg

SEQ ID NO: 1403439 - DNA, 25 bp, Homo sapien
caaagagacaaaggcgcaacactgg

SEQ ID NO: 1403440 - DNA, 25 bp, Homo sapien
tccccagagagtgtaggtaagggtc

SEQ ID NO: 1403441 - DNA, 25 bp, Homo sapien
cccagagagtgtaggtaagggtcac

SEQ ID NO: 1403442 - DNA, 25 bp, Homo sapien
ctgtgaggggcacattccttagtag

SEQ ID NO: 1403443 - DNA, 25 bp, Homo sapien
tgtgaagatccaggcatctcaaggg

SEQ ID NO: 1403444 - DNA, 25 bp, Homo sapien
ggtgtgaagatccaggcatctcaag

SEQ ID NO: 1403445 - DNA, 25 bp, Homo sapien
agctgcaagtgcctcagtagttgca

SEQ ID NO: 1403446 - DNA, 25 bp, Homo sapien
ttgcaaaaggggcaatgaggtgtgc

SEQ ID NO: 1403447 - DNA, 25 bp, Homo sapien
ggaatcatggttccccagagttgcc

SEQ ID NO: 1403448 - DNA, 25 bp, Homo sapien
actactaatgggtctgaggtctcct

SEQ ID NO: 1403449 - DNA, 25 bp, Homo sapien
ggaagggcttctatcagtctttggt

SEQ ID NO: 1403450 - DNA, 25 bp, Homo sapien
cccagagttgcccaaaagggcaggc

SEQ ID NO: 1403451 - DNA, 25 bp, Homo sapien
gtactgcatccctcgatcccaggag

SEQ ID NO: 1403452 - DNA, 25 bp, Homo sapien
tgtggctgtactgcatccctcgatc

SEQ ID NO: 1403453 - DNA, 25 bp, Homo sapien
ggagcctagccgcacactctgctcc

SEQ ID NO: 1403454 - DNA, 25 bp, Homo sapien
gatcccaggagcctagccgcacact

SEQ ID NO: 1403455 - DNA, 25 bp, Homo sapien
aggtaccaatgtacagcaataccat

SEQ ID NO: 1403456 - DNA, 25 bp, Homo sapien
tagctgcttctgggtctgtcagtac

SEQ ID NO: 1403457 - DNA, 25 bp, Homo sapien
ttagctgcttctgggtctgtcagta

SEQ ID NO: 1403458 - DNA, 25 bp, Homo sapien
tctaggctcaactaaacctcccgcc

SEQ ID NO: 1403459 - DNA, 25 bp, Homo sapien
gaaattctaggctcaactaaacctc

SEQ ID NO: 1403460 - DNA, 25 bp, Homo sapien
tgtcactgcccagaactgtaacttg

SEQ ID NO: 1403461 - DNA, 25 bp, Homo sapien
gtaacttgtgctcagcataggcatc

SEQ ID NO: 1403462 - DNA, 25 bp, Homo sapien
tcatccagcatgagtaggcggacat

SEQ ID NO: 1403463 - DNA, 25 bp, Homo sapien
cacgggcaatgaagtctcgctgatg

SEQ ID NO: 1403464 - DNA, 25 bp, Homo sapien
cagatccaagtttgaaaggcccaga

SEQ ID NO: 1403465 - DNA, 25 bp, Homo sapien
gaaagtgggccagaccgagagaaca

SEQ ID NO: 1403466 - DNA, 25 bp, Homo sapien
aaagtgggccagaccgagagaacag

SEQ ID NO: 1403467 - DNA, 25 bp, Homo sapien
atggagtgggcaagactgacagatc

SEQ ID NO: 1403468 - DNA, 25 bp, Homo sapien
tgggccaactgcagggctcggtgaa

SEQ ID NO: 1403469 - DNA, 25 bp, Homo sapien
gggacgctgggccaactgcagggct

SEQ ID NO: 1403470 - DNA, 25 bp, Homo sapien
gccaactgcagggctcggtgaatca

SEQ ID NO: 1403471 - DNA, 25 bp, Homo sapien
acgctgggccaactgcagggctcgg

SEQ ID NO: 1403472 - DNA, 25 bp, Homo sapien
ggctgaagttgtgcaactggaaatc

SEQ ID NO: 1403473 - DNA, 25 bp, Homo sapien
gaggctgaagttgtgcaactggaaa

SEQ ID NO: 1403474 - DNA, 25 bp, Homo sapien
aaatcatcaggggtgtctgcatagg

SEQ ID NO: 1403475 - DNA, 25 bp, Homo sapien
taggtgcggatggagaagtcacagc

SEQ ID NO: 1403476 - DNA, 25 bp, Homo sapien
acccagatgatgttatatccgattc

SEQ ID NO: 1403477 - DNA, 25 bp, Homo sapien
gggtacccagatgatgttatatccg

SEQ ID NO: 1403478 - DNA, 25 bp, Homo sapien
gtacccagatgatgttatatccgat

SEQ ID NO: 1403479 - DNA, 25 bp, Homo sapien
ggtacccagatgatgttatatccga

SEQ ID NO: 1403480 - DNA, 25 bp, Homo sapien
gtatgggactctgcttatcacttgc

SEQ ID NO: 1403481 - DNA, 25 bp, Homo sapien
tatggtagtccgagtcaataggaga

SEQ ID NO: 1403482 - DNA, 25 bp, Homo sapien
tatcacttgccagtcctaatagtgt

SEQ ID NO: 1403483 - DNA, 25 bp, Homo sapien
tcctaatagtgtctgagtcagggcc

SEQ ID NO: 1403484 - DNA, 25 bp, Homo sapien
ttagcagatgataggcggcgaaatc

SEQ ID NO: 1403485 - DNA, 25 bp, Homo sapien
cagttagcagatgataggcggcgaa

SEQ ID NO: 1403486 - DNA, 25 bp, Homo sapien
tagcagatgataggcggcgaaatct

SEQ ID NO: 1403487 - DNA, 25 bp, Homo sapien
tagcagttagcagatgataggcggc

SEQ ID NO: 1403488 - DNA, 25 bp, Homo sapien
agtcagggtccaaagaattggcaaa

SEQ ID NO: 1403489 - DNA, 25 bp, Homo sapien
cagggtccaaagaattggcaaagaa

SEQ ID NO: 1403490 - DNA, 25 bp, Homo sapien
gtcagggtccaaagaattggcaaag

SEQ ID NO: 1403491 - DNA, 25 bp, Homo sapien
cttcttcagagaagtaccatttaag

SEQ ID NO: 1403492 - DNA, 25 bp, Homo sapien
ccaaatcccttcactttctggaact

SEQ ID NO: 1403493 - DNA, 25 bp, Homo sapien
tcccttcactttctggaacttctgg

SEQ ID NO: 1403494 - DNA, 25 bp, Homo sapien
ctgcatctgtcacggcccctccaaa

SEQ ID NO: 1403495 - DNA, 25 bp, Homo sapien
aatcccttcactttctggaacttct

SEQ ID NO: 1403496 - DNA, 25 bp, Homo sapien
gcccaggggagaaactccatggtga

SEQ ID NO: 1403497 - DNA, 25 bp, Homo sapien
gacatccacagggttatcagtgccc

SEQ ID NO: 1403498 - DNA, 25 bp, Homo sapien
gaaactccatggtgatcactgacac

SEQ ID NO: 1403499 - DNA, 25 bp, Homo sapien
catggtgatcactgacaccgtttac

SEQ ID NO: 1403500 - DNA, 25 bp, Homo sapien
ctaggaggacccagcctggcccggg

SEQ ID NO: 1403501 - DNA, 25 bp, Homo sapien
ctctaggaggacccagcctggcccg

SEQ ID NO: 1403502 - DNA, 25 bp, Homo sapien
tctaggaggacccagcctggcccgg

SEQ ID NO: 1403503 - DNA, 25 bp, Homo sapien
tgtgccggtgcaattagcctgtatg

SEQ ID NO: 1403504 - DNA, 25 bp, Homo sapien
gcttctgctcttgtagcggctgaag

SEQ ID NO: 1403505 - DNA, 25 bp, Homo sapien
gctccatccaatgcccactgcttct

SEQ ID NO: 1403506 - DNA, 25 bp, Homo sapien
tgtatggtcctgtactcagctccat

SEQ ID NO: 1403507 - DNA, 25 bp, Homo sapien
gagtcacagtatgtggcattgcaga

SEQ ID NO: 1403508 - DNA, 25 bp, Homo sapien
agtcacagtatgtggcattgcagac

SEQ ID NO: 1403509 - DNA, 25 bp, Homo sapien
gtcacagtatgtggcattgcagaca

SEQ ID NO: 1403510 - DNA, 25 bp, Homo sapien
gcttttagggatgcaggggcaccac

SEQ ID NO: 1403511 - DNA, 25 bp, Homo sapien
tgtactgaagcttttagggatgcag

SEQ ID NO: 1403512 - DNA, 25 bp, Homo sapien
aagcttttagggatgcaggggcacc

SEQ ID NO: 1403513 - DNA, 25 bp, Homo sapien
caccgagctgtactgaagcttttag

SEQ ID NO: 1403514 - DNA, 25 bp, Homo sapien
gctaccaaaggactatgaggcagaa

SEQ ID NO: 1403515 - DNA, 25 bp, Homo sapien
taaaagtctaccaccagcttactgg

SEQ ID NO: 1403516 - DNA, 25 bp, Homo sapien
tggagaacggacacagctgtttgga

SEQ ID NO: 1403517 - DNA, 25 bp, Homo sapien
tggtctcagtcactcaaaaggattt

SEQ ID NO: 1403518 - DNA, 25 bp, Homo sapien
tgaagtagaagcaatcctgtgaggc

SEQ ID NO: 1403519 - DNA, 25 bp, Homo sapien
tagaagcaatcctgtgaggctgcca

SEQ ID NO: 1403520 - DNA, 25 bp, Homo sapien
cacgacactgcctgaagtagaagca

SEQ ID NO: 1403521 - DNA, 25 bp, Homo sapien
tgatgcccacgacactgcctgaagt

SEQ ID NO: 1403522 - DNA, 25 bp, Homo sapien
tcacctcagggtcactagatgagga

SEQ ID NO: 1403523 - DNA, 25 bp, Homo sapien
taggttactcctgcaagtaattctg

SEQ ID NO: 1403524 - DNA, 25 bp, Homo sapien
ggcactaggttactcctgcaagtaa

SEQ ID NO: 1403525 - DNA, 25 bp, Homo sapien
atagctataggcactaggttactcc

SEQ ID NO: 1403526 - DNA, 25 bp, Homo sapien
aagtaattctggcttcccaatgtgg

SEQ ID NO: 1403527 - DNA, 25 bp, Homo sapien
ctaaatatccttgtagacagcctgg

SEQ ID NO: 1403528 - DNA, 25 bp, Homo sapien
tctctaaagggcaattggcttccag

SEQ ID NO: 1403529 - DNA, 25 bp, Homo sapien
catttactcattaagggcctcggag

SEQ ID NO: 1403530 - DNA, 25 bp, Homo sapien
taaacattgcaacatgtcaggcctc

SEQ ID NO: 1403531 - DNA, 25 bp, Homo sapien
ttttccagggtggctgggcacggta

SEQ ID NO: 1403532 - DNA, 25 bp, Homo sapien
ctgggcacggtagctcatgcctata

SEQ ID NO: 1403533 - DNA, 25 bp, Homo sapien
ggctgggcacggtagctcatgccta

SEQ ID NO: 1403534 - DNA, 25 bp, Homo sapien
gtggctgggcacggtagctcatgcc

SEQ ID NO: 1403535 - DNA, 25 bp, Homo sapien
cagcaagacctgtcttggagtgtag

SEQ ID NO: 1403536 - DNA, 25 bp, Homo sapien
tcagatagcaaactccagccctttc

SEQ ID NO: 1403537 - DNA, 25 bp, Homo sapien
tgtaggtctggctcagatagcaaac

SEQ ID NO: 1403538 - DNA, 25 bp, Homo sapien
ctgtcttggagtgtaggtctggctc

SEQ ID NO: 1403539 - DNA, 25 bp, Homo sapien
atattcaaccacttgagaagatgag

SEQ ID NO: 1403540 - DNA, 25 bp, Homo sapien
aaaatctcaaagctcttcattcagc

SEQ ID NO: 1403541 - DNA, 25 bp, Homo sapien
ttccttaaaggttgcaaacagttgc

SEQ ID NO: 1403542 - DNA, 25 bp, Homo sapien
catggtcgctggagcgtgtatattc

SEQ ID NO: 1403543 - DNA, 25 bp, Homo sapien
agtccatcctggctcccatgtgcag

SEQ ID NO: 1403544 - DNA, 25 bp, Homo sapien
catcctggctcccatgtgcagcccc

SEQ ID NO: 1403545 - DNA, 25 bp, Homo sapien
cagtccagtccatcctggctcccat

SEQ ID NO: 1403546 - DNA, 25 bp, Homo sapien
gtccagtccatcctggctcccatgt

SEQ ID NO: 1403547 - DNA, 25 bp, Homo sapien
cctgcgcactaggcgcggaagtcaa

SEQ ID NO: 1403548 - DNA, 25 bp, Homo sapien
gggccctgcgcactaggcgcggaag

SEQ ID NO: 1403549 - DNA, 25 bp, Homo sapien
ccctgcgcactaggcgcggaagtca

SEQ ID NO: 1403550 - DNA, 25 bp, Homo sapien
gccctgcgcactaggcgcggaagtc

SEQ ID NO: 1403551 - DNA, 25 bp, Homo sapien
cattgacggtcaggttccaagaggg

SEQ ID NO: 1403552 - DNA, 25 bp, Homo sapien
cttgaatcagacaggtgcactggct

SEQ ID NO: 1403553 - DNA, 25 bp, Homo sapien
caagaactacgtagaagtgacccgg

SEQ ID NO: 1403554 - DNA, 25 bp, Homo sapien
ggagctgctcctagtttgcggccca

SEQ ID NO: 1403555 - DNA, 25 bp, Homo sapien
gcttacgtcgctgtaagctcacact

SEQ ID NO: 1403556 - DNA, 25 bp, Homo sapien
gggcttacgtcgctgtaagctcaca

SEQ ID NO: 1403557 - DNA, 25 bp, Homo sapien
ttacgtcgctgtaagctcacactgg

SEQ ID NO: 1403558 - DNA, 25 bp, Homo sapien
acgtcgctgtaagctcacactggcc

SEQ ID NO: 1403559 - DNA, 25 bp, Homo sapien
cactggcgacgccacaggtaggtgt

SEQ ID NO: 1403560 - DNA, 25 bp, Homo sapien
ggtaagaggcacatccttagaggag

SEQ ID NO: 1403561 - DNA, 25 bp, Homo sapien
cacagcaggatccttgatggtaaga

SEQ ID NO: 1403562 - DNA, 25 bp, Homo sapien
aatggagtagccaggtgagattgtc

SEQ ID NO: 1403563 - DNA, 25 bp, Homo sapien
ggtcgttcttctgactggcaaccag

SEQ ID NO: 1403564 - DNA, 25 bp, Homo sapien
tcgttcttctgactggcaaccagcc

SEQ ID NO: 1403565 - DNA, 25 bp, Homo sapien
agagccatcgggatgcatcagtgcc

SEQ ID NO: 1403566 - DNA, 25 bp, Homo sapien
atcgggatgcatcagtgccactgcg

SEQ ID NO: 1403567 - DNA, 25 bp, Homo sapien
ctggtatggaatgggggtgcccgcc

SEQ ID NO: 1403568 - DNA, 25 bp, Homo sapien
tggtatggaatgggggtgcccgccc

SEQ ID NO: 1403569 - DNA, 25 bp, Homo sapien
catgggctgtttgtaaaacgtgtcc

SEQ ID NO: 1403570 - DNA, 25 bp, Homo sapien
gtctacaatgatgggactgtcgaca

SEQ ID NO: 1403571 - DNA, 25 bp, Homo sapien
ttcagggcaaggttccagtcggtcc

SEQ ID NO: 1403572 - DNA, 25 bp, Homo sapien
tcgacaaagttacgcacccaattgg

SEQ ID NO: 1403573 - DNA, 25 bp, Homo sapien
ccagaaagtccaggtaccaatgtac

SEQ ID NO: 1403574 - DNA, 25 bp, Homo sapien
ggagcctagccgcacactctgctcc

SEQ ID NO: 1403575 - DNA, 25 bp, Homo sapien
tgtggctgtactgcatccctcgatc

SEQ ID NO: 1403576 - DNA, 25 bp, Homo sapien
ctgaggcaaagagcatggtgttggg

SEQ ID NO: 1403577 - DNA, 25 bp, Homo sapien
agagcaactgatcctggaccttgca

SEQ ID NO: 1403578 - DNA, 25 bp, Homo sapien
ctgcaaaggaagagcaactgatcct

SEQ ID NO: 1403579 - DNA, 25 bp, Homo sapien
ctgatcctggaccttgcacacaggc

SEQ ID NO: 1403580 - DNA, 25 bp, Homo sapien
aaggaagagcaactgatcctggacc

SEQ ID NO: 1403581 - DNA, 25 bp, Homo sapien
tgtcactgcccagaactgtaacttg

SEQ ID NO: 1403582 - DNA, 25 bp, Homo sapien
gtaacttgtgctcagcataggcatc

SEQ ID NO: 1403583 - DNA, 25 bp, Homo sapien
tcatccagcatgagtaggcggacat

SEQ ID NO: 1403584 - DNA, 25 bp, Homo sapien
cacgggcaatgaagtctcgctgatg

SEQ ID NO: 1403585 - DNA, 25 bp, Homo sapien
agatctggaagtggaactaggttga

SEQ ID NO: 1403586 - DNA, 25 bp, Homo sapien
gatggagtgggcaagattgacaggc

SEQ ID NO: 1403587 - DNA, 25 bp, Homo sapien
tgggcaagattgacaggcccaaggc

SEQ ID NO: 1403588 - DNA, 25 bp, Homo sapien
ggcccaaggctgaaaggcccagaag

SEQ ID NO: 1403589 - DNA, 25 bp, Homo sapien
gtctggtggtagatgtctccgggct

SEQ ID NO: 1403590 - DNA, 25 bp, Homo sapien
ctggtggtagatgtctccgggctgt

SEQ ID NO: 1403591 - DNA, 25 bp, Homo sapien
caccgctccattggtcttgagccaa

SEQ ID NO: 1403592 - DNA, 25 bp, Homo sapien
tctggtggtagatgtctccgggctg

SEQ ID NO: 1403593 - DNA, 25 bp, Homo sapien
ggctgaagttgtgcaactggaaatc

SEQ ID NO: 1403594 - DNA, 25 bp, Homo sapien
aaatcatcaggggtgtctgcatagg

SEQ ID NO: 1403595 - DNA, 25 bp, Homo sapien
gaggctgaagttgtgcaactggaaa

SEQ ID NO: 1403596 - DNA, 25 bp, Homo sapien
taggtgcggatggagaagtcacagc

SEQ ID NO: 1403597 - DNA, 25 bp, Homo sapien
gtatgggactctgcttatcacttgc

SEQ ID NO: 1403598 - DNA, 25 bp, Homo sapien
gagcctgagtccgtagcagttagca

SEQ ID NO: 1403599 - DNA, 25 bp, Homo sapien
gatcaagatatggtagtccgagtca

SEQ ID NO: 1403600 - DNA, 25 bp, Homo sapien
tcctaatagtgtctgagtcagggcc

SEQ ID NO: 1403601 - DNA, 25 bp, Homo sapien
tgcactcctgtctcgccgacagaat

SEQ ID NO: 1403602 - DNA, 25 bp, Homo sapien
tctcgccgacagaatgggcagagtg

SEQ ID NO: 1403603 - DNA, 25 bp, Homo sapien
cgaaaagtttcaatggctctatgtc

SEQ ID NO: 1403604 - DNA, 25 bp, Homo sapien
cgacagaatgggcagagtgagattc

SEQ ID NO: 1403605 - DNA, 25 bp, Homo sapien
tcactttctggaacttctgttctgg

SEQ ID NO: 1403606 - DNA, 25 bp, Homo sapien
cttcttcagagaagtacgatttaag

SEQ ID NO: 1403607 - DNA, 25 bp, Homo sapien
cactttctggaacttctgttctggc

SEQ ID NO: 1403608 - DNA, 25 bp, Homo sapien
acaccaccgagctgtagccgaagct

SEQ ID NO: 1403609 - DNA, 25 bp, Homo sapien
ggatgggccccatactcagctccat

SEQ ID NO: 1403610 - DNA, 25 bp, Homo sapien
catagcggctgaaggtaccaagggc

SEQ ID NO: 1403611 - DNA, 25 bp, Homo sapien
gtcgcccactgcgtgtactctcata

SEQ ID NO: 1403612 - DNA, 25 bp, Homo sapien
acctgtaatcctagcactttaggag

SEQ ID NO: 1403613 - DNA, 25 bp, Homo sapien
tgagacctgccttgccagcatggtg

SEQ ID NO: 1403614 - DNA, 25 bp, Homo sapien
cccttggccgggcgcaggggctcac

SEQ ID NO: 1403615 - DNA, 25 bp, Homo sapien
gccgaggtgggcggatcacctgagg

SEQ ID NO: 1403616 - DNA, 25 bp, Homo sapien
tgaagtagaagcaatcctgtgaggc

SEQ ID NO: 1403617 - DNA, 25 bp, Homo sapien
tagaagcaatcctgtgaggctgcca

SEQ ID NO: 1403618 - DNA, 25 bp, Homo sapien
tgatgcccacgacactgcctgaagt

SEQ ID NO: 1403619 - DNA, 25 bp, Homo sapien
cacgacactgcctgaagtagaagca

SEQ ID NO: 1403620 - DNA, 25 bp, Homo sapien
taccctactcaaaggcttgggacat

SEQ ID NO: 1403621 - DNA, 25 bp, Homo sapien
gcttaccctactcaaaggcttggga

SEQ ID NO: 1403622 - DNA, 25 bp, Homo sapien
tgcttaccctactcaaaggcttggg

SEQ ID NO: 1403623 - DNA, 25 bp, Homo sapien
gatgcttaccctactcaaaggcttg

SEQ ID NO: 1403624 - DNA, 25 bp, Homo sapien
catctgtgccttgctcaaagagcca

SEQ ID NO: 1403625 - DNA, 25 bp, Homo sapien
aatcaggatgctccccaccactctt

SEQ ID NO: 1403626 - DNA, 25 bp, Homo sapien
tccatctgtgccttgctcaaagagc

SEQ ID NO: 1403627 - DNA, 25 bp, Homo sapien
ccccaaatcaggatgctccccacca

SEQ ID NO: 1403628 - DNA, 25 bp, Homo sapien
ctctctggaaggacttgaaaactcc

SEQ ID NO: 1403629 - DNA, 25 bp, Homo sapien
ctctggaaggacttgaaaactccat

SEQ ID NO: 1403630 - DNA, 25 bp, Homo sapien
tctctggaaggacttgaaaactcca

SEQ ID NO: 1403631 - DNA, 25 bp, Homo sapien
tcattagatgaagagaagaccacag

SEQ ID NO: 1403632 - DNA, 25 bp, Homo sapien
attagatgaagagaagaccacaggg

SEQ ID NO: 1403633 - DNA, 25 bp, Homo sapien
cattagatgaagagaagaccacagg

SEQ ID NO: 1403634 - DNA, 25 bp, Homo sapien
ccttagctataggcactaggttagc

SEQ ID NO: 1403635 - DNA, 25 bp, Homo sapien
cttagctataggcactaggttagcc

SEQ ID NO: 1403636 - DNA, 25 bp, Homo sapien
ttagctataggcactaggttagccc

SEQ ID NO: 1403637 - DNA, 25 bp, Homo sapien
aataataatgatggttggccgggcg

SEQ ID NO: 1403638 - DNA, 25 bp, Homo sapien
gaaatcccaccgcagcctgcaaagg

SEQ ID NO: 1403639 - DNA, 25 bp, Homo sapien
ggccccgcgcagtaagactctgaag

SEQ ID NO: 1403640 - DNA, 25 bp, Homo sapien
caagttgaacgaacaagtgtcgctg

SEQ ID NO: 1403641 - DNA, 25 bp, Homo sapien
agagacggtcactcatgcagaggcg

SEQ ID NO: 1403642 - DNA, 25 bp, Homo sapien
gaaggcttacatactgttaagagct

SEQ ID NO: 1403643 - DNA, 25 bp, Homo sapien
gattttttggactcttcgtgcctgc

SEQ ID NO: 1403644 - DNA, 25 bp, Homo sapien
cagtctttaatggagcaggcaattg

SEQ ID NO: 1403645 - DNA, 25 bp, Homo sapien
ttaagagctttacaaacattctacc

SEQ ID NO: 1403646 - DNA, 25 bp, Homo sapien
taccaccccattgcataggcacacg

SEQ ID NO: 1403647 - DNA, 25 bp, Homo sapien
ggccatgcctttgccctgaccatag

SEQ ID NO: 1403648 - DNA, 25 bp, Homo sapien
tagtgcccttgcaaatcagaaagag

SEQ ID NO: 1403649 - DNA, 25 bp, Homo sapien
taggcacacgtcaccctgtacttaa

SEQ ID NO: 1403650 - DNA, 25 bp, Homo sapien
tctttttgtgccagccagtgcaaga

SEQ ID NO: 1403651 - DNA, 25 bp, Homo sapien
gtctaaatacccatgcagcacagga

SEQ ID NO: 1403652 - DNA, 25 bp, Homo sapien
gtgctataagaaggggcatctcccc

SEQ ID NO: 1403653 - DNA, 25 bp, Homo sapien
tgttcagtgtgacaagaagcctagg

SEQ ID NO: 1403654 - DNA, 25 bp, Homo sapien
ggctgcccccgttgaggctgaggct

SEQ ID NO: 1403655 - DNA, 25 bp, Homo sapien
agacgccgcagggaagagctagagc

SEQ ID NO: 1403656 - DNA, 25 bp, Homo sapien
ccagcctgcggccagacaggagacg

SEQ ID NO: 1403657 - DNA, 25 bp, Homo sapien
cagctgcgaaggtggaggctctctc

SEQ ID NO: 1403658 - DNA, 25 bp, Homo sapien
gagctcagatctccgcagctgcgaa

SEQ ID NO: 1403659 - DNA, 25 bp, Homo sapien
ctgaccgggcacgtagcaacttggg

SEQ ID NO: 1403660 - DNA, 25 bp, Homo sapien
gcacagggcgccgtttctcggctga

SEQ ID NO: 1403661 - DNA, 25 bp, Homo sapien
gtttctcggctgaccgggcacgtag

SEQ ID NO: 1403662 - DNA, 25 bp, Homo sapien
gggtctggggctttcctggatatct

SEQ ID NO: 1403663 - DNA, 25 bp, Homo sapien
aagaggcaggcttcagagcagagcc

SEQ ID NO: 1403664 - DNA, 25 bp, Homo sapien
ggcggaagaggcaggcttcagagca

SEQ ID NO: 1403665 - DNA, 25 bp, Homo sapien
ctaggcggaagaggcaggcttcaga

SEQ ID NO: 1403666 - DNA, 25 bp, Homo sapien
ggaagaggcaggcttcagagcagag

SEQ ID NO: 1403667 - DNA, 25 bp, Homo sapien
aagcactttggtataaaggtccctg

SEQ ID NO: 1403668 - DNA, 25 bp, Homo sapien
cctcaagcactttggtataaaggtc

SEQ ID NO: 1403669 - DNA, 25 bp, Homo sapien
cttcctcaagcactttggtataaag

SEQ ID NO: 1403670 - DNA, 25 bp, Homo sapien
cactttggtataaaggtccctgaag

SEQ ID NO: 1403671 - DNA, 25 bp, Homo sapien
atgccggatgaggaggccggtgccc

SEQ ID NO: 1403672 - DNA, 25 bp, Homo sapien
cagtgtcactggaggtcgtgatgcc

SEQ ID NO: 1403673 - DNA, 25 bp, Homo sapien
gagggaacctgagctatcgctgaag

SEQ ID NO: 1403674 - DNA, 25 bp, Homo sapien
cgtgatgcctgggtcgctgtgggac

SEQ ID NO: 1403675 - DNA, 25 bp, Homo sapien
cgacgagtcggggctcgggtgggcg

SEQ ID NO: 1403676 - DNA, 25 bp, Homo sapien
ccagccctccaaccggtggcagctg

SEQ ID NO: 1403677 - DNA, 25 bp, Homo sapien
cacggctgcgctggatggagcgaaa

SEQ ID NO: 1403678 - DNA, 25 bp, Homo sapien
cagagcaggaataggagcgggcagc

SEQ ID NO: 1403679 - DNA, 25 bp, Homo sapien
aagagaacgtagtccacggagcgca

SEQ ID NO: 1403680 - DNA, 25 bp, Homo sapien
ggctgaggcagtagccggcacggct

SEQ ID NO: 1403681 - DNA, 25 bp, Homo sapien
cggcagggggcgctgtgtagcacca

SEQ ID NO: 1403682 - DNA, 25 bp, Homo sapien
gcagggggcgctgtgtagcaccagc

SEQ ID NO: 1403683 - DNA, 25 bp, Homo sapien
ggggcgctgtgtagcaccagcctgg

SEQ ID NO: 1403684 - DNA, 25 bp, Homo sapien
gggggcgctgtgtagcaccagcctg

SEQ ID NO: 1403685 - DNA, 25 bp, Homo sapien
tgtctctacccaccccagctatccc

SEQ ID NO: 1403686 - DNA, 25 bp, Homo sapien
cttgtccacccctcattacgccctg

SEQ ID NO: 1403687 - DNA, 25 bp, Homo sapien
tccacccctcattacgccctgctca

SEQ ID NO: 1403688 - DNA, 25 bp, Homo sapien
gcagccccgcccttgtccacccctc

SEQ ID NO: 1403689 - DNA, 25 bp, Homo sapien
cgtctacaatggaggccactcgttc

SEQ ID NO: 1403690 - DNA, 25 bp, Homo sapien
tggaggccactcgttcacagatgca

SEQ ID NO: 1403691 - DNA, 25 bp, Homo sapien
tcgttcacagatgcacgagccatcg

SEQ ID NO: 1403692 - DNA, 25 bp, Homo sapien
ccatcgtgaagctgagggtcaaaga

SEQ ID NO: 1403693 - DNA, 25 bp, Homo sapien
caatcggtagggtacaagggcactg

SEQ ID NO: 1403694 - DNA, 25 bp, Homo sapien
ctcgtagtcccatgactgcctcata

SEQ ID NO: 1403695 - DNA, 25 bp, Homo sapien
tcccatgactgcctcataagaaggg

SEQ ID NO: 1403696 - DNA, 25 bp, Homo sapien
gcaatcggtagggtacaagggcact

SEQ ID NO: 1403697 - DNA, 25 bp, Homo sapien
cccttccttagctcccccagcaaga

SEQ ID NO: 1403698 - DNA, 25 bp, Homo sapien
agagggtcaatgtaggagaaataat

SEQ ID NO: 1403699 - DNA, 25 bp, Homo sapien
gtcaatgtaggagaaataattcccc

SEQ ID NO: 1403700 - DNA, 25 bp, Homo sapien
ccagcaagaccccaccaggccttac

SEQ ID NO: 1403701 - DNA, 25 bp, Homo sapien
ggacgtgcagcccagaggtcccagt

SEQ ID NO: 1403702 - DNA, 25 bp, Homo sapien
ttctgagctgcaggtatactctggg

SEQ ID NO: 1403703 - DNA, 25 bp, Homo sapien
gggacaaattcctccaggtccagca

SEQ ID NO: 1403704 - DNA, 25 bp, Homo sapien
ggtccagcatggtgtgtaggagagg

SEQ ID NO: 1403705 - DNA, 25 bp, Homo sapien
agcgagcaggtcagcaagtctggat

SEQ ID NO: 1403706 - DNA, 25 bp, Homo sapien
gggaagcgagcaggtcagcaagtct

SEQ ID NO: 1403707 - DNA, 25 bp, Homo sapien
ttttttctggccctatcccctgaga

SEQ ID NO: 1403708 - DNA, 25 bp, Homo sapien
tggccctatcccctgagagaagctc

SEQ ID NO: 1403709 - DNA, 25 bp, Homo sapien
ccgtgcccagcataggaccttcttg

SEQ ID NO: 1403710 - DNA, 25 bp, Homo sapien
catccattcctccaatagatgagga

SEQ ID NO: 1403711 - DNA, 25 bp, Homo sapien
gatctgtagccattgttccctcagg

SEQ ID NO: 1403712 - DNA, 25 bp, Homo sapien
tggtgctcaaaagccagatctgtag

SEQ ID NO: 1403713 - DNA, 25 bp, Homo sapien
cagcagacaatagcagagagtgtac

SEQ ID NO: 1403714 - DNA, 25 bp, Homo sapien
atggtgagcccacagacgctgaaga

SEQ ID NO: 1403715 - DNA, 25 bp, Homo sapien
gagaagatttggatgcagcagacaa

SEQ ID NO: 1403716 - DNA, 25 bp, Homo sapien
ttatagcggcacaaatggtgagccc

SEQ ID NO: 1403717 - DNA, 25 bp, Homo sapien
ggaacagagggacagcacacacaga

SEQ ID NO: 1403718 - DNA, 25 bp, Homo sapien
agttaggggcaactttcagttcctg

SEQ ID NO: 1403719 - DNA, 25 bp, Homo sapien
cccctcgggcttcatcacaggtgga

SEQ ID NO: 1403720 - DNA, 25 bp, Homo sapien
gagggacagcacacacagacctttc

SEQ ID NO: 1403721 - DNA, 25 bp, Homo sapien
cacagagcaccgaaagcaaggagaa

SEQ ID NO: 1403722 - DNA, 25 bp, Homo sapien
gagaacagagccagccatgctaagc

SEQ ID NO: 1403723 - DNA, 25 bp, Homo sapien
tggaagtctcgggccagttgagcat

SEQ ID NO: 1403724 - DNA, 25 bp, Homo sapien
tgagcattcttacaggagagaacag

SEQ ID NO: 1403725 - DNA, 25 bp, Homo sapien
tgggcttccccttgcgtgctgggca

SEQ ID NO: 1403726 - DNA, 25 bp, Homo sapien
cataaatgggcttccccttgcgtgc

SEQ ID NO: 1403727 - DNA, 25 bp, Homo sapien
gaggacataaatgggcttccccttg

SEQ ID NO: 1403728 - DNA, 25 bp, Homo sapien
cttcttgaggacataaatgggcttc

SEQ ID NO: 1403729 - DNA, 25 bp, Homo sapien
tgccaaccaccccggagaacgccag

SEQ ID NO: 1403730 - DNA, 25 bp, Homo sapien
aatggccgcttccaggacacaatgc

SEQ ID NO: 1403731 - DNA, 25 bp, Homo sapien
caatgccaaccaccccggagaacgc

SEQ ID NO: 1403732 - DNA, 25 bp, Homo sapien
gtgaatggccgcttccaggacacaa

SEQ ID NO: 1403733 - DNA, 25 bp, Homo sapien
cgagaacccagcccaagacgggcag

SEQ ID NO: 1403734 - DNA, 25 bp, Homo sapien
gacctcttgatgctctcggtggtgg

SEQ ID NO: 1403735 - DNA, 25 bp, Homo sapien
tcggtggtggtgacggaagaggcca

SEQ ID NO: 1403736 - DNA, 25 bp, Homo sapien
ccaagacgggcaggacctcttgatg

SEQ ID NO: 1403737 - DNA, 25 bp, Homo sapien
ttggaccagccccagcgtaagcagg

SEQ ID NO: 1403738 - DNA, 25 bp, Homo sapien
gaggtgggtaaggcccctggtgctg

SEQ ID NO: 1403739 - DNA, 25 bp, Homo sapien
agccccagcgtaagcagggcctgca

SEQ ID NO: 1403740 - DNA, 25 bp, Homo sapien
ggatgcccaggagcacttggaccag

SEQ ID NO: 1403741 - DNA, 25 bp, Homo sapien
ggctggagtcactaggcgagggcat

SEQ ID NO: 1403742 - DNA, 25 bp, Homo sapien
agcggctggagtcactaggcgaggg

SEQ ID NO: 1403743 - DNA, 25 bp, Homo sapien
cgagcggctggagtcactaggcgag

SEQ ID NO: 1403744 - DNA, 25 bp, Homo sapien
cagcgagcggctggagtcactaggc

SEQ ID NO: 1403745 - DNA, 25 bp, Homo sapien
ctgctgcccggttgcctgcgcctcg

SEQ ID NO: 1403746 - DNA, 25 bp, Homo sapien
cctgctgcccggttgcctgcgcctc

SEQ ID NO: 1403747 - DNA, 25 bp, Homo sapien
gcctgctgcccggttgcctgcgcct

SEQ ID NO: 1403748 - DNA, 25 bp, Homo sapien
ctctccaccccactcgctctagagc

SEQ ID NO: 1403749 - DNA, 25 bp, Homo sapien
gcacttgggagcatctcagaggcgc

SEQ ID NO: 1403750 - DNA, 25 bp, Homo sapien
ctggggcatggccgagggacgccag

SEQ ID NO: 1403751 - DNA, 25 bp, Homo sapien
cctggcacttgggagcatctcagag

SEQ ID NO: 1403752 - DNA, 25 bp, Homo sapien
gagggaccgcggagtgctccctccc

SEQ ID NO: 1403753 - DNA, 25 bp, Homo sapien
gcgtcacggagggaccgcggagtgc

SEQ ID NO: 1403754 - DNA, 25 bp, Homo sapien
ggggccaagcgaggggcgtcacgga

SEQ ID NO: 1403755 - DNA, 25 bp, Homo sapien
caagcgaggggcgtcacggagggac

SEQ ID NO: 1403756 - DNA, 25 bp, Homo sapien
gggcactggacgggcaccgtgcccg

SEQ ID NO: 1403757 - DNA, 25 bp, Homo sapien
gcactggacgggcaccgtgcccggg

SEQ ID NO: 1403758 - DNA, 25 bp, Homo sapien
gcgggggcaccggctcatcgcatct

SEQ ID NO: 1403759 - DNA, 25 bp, Homo sapien
cgtgcccggggcgacgatgaggacg

SEQ ID NO: 1403760 - DNA, 25 bp, Homo sapien
tctggaccctggctaggctgctagt

SEQ ID NO: 1403761 - DNA, 25 bp, Homo sapien
aggcagtcggataagcgctcctcca

SEQ ID NO: 1403762 - DNA, 25 bp, Homo sapien
gtattccttggcgttcccggcagag

SEQ ID NO: 1403763 - DNA, 25 bp, Homo sapien
tcttccccgtcattaatggagaggg

SEQ ID NO: 1403764 - DNA, 25 bp, Homo sapien
ttgggagcactacggaggagccatc

SEQ ID NO: 1403765 - DNA, 25 bp, Homo sapien
ttaaataaccgaagcaacagccgtg

SEQ ID NO: 1403766 - DNA, 25 bp, Homo sapien
ccagagaccttagggacgggagcta

SEQ ID NO: 1403767 - DNA, 25 bp, Homo sapien
cctgtcaggttcagcagtcatggcc

SEQ ID NO: 1403768 - DNA, 25 bp, Homo sapien
ctgcattggcagctgcggttcgcac

SEQ ID NO: 1403769 - DNA, 25 bp, Homo sapien
cccagcggctgcattggcagctgcg

SEQ ID NO: 1403770 - DNA, 25 bp, Homo sapien
tcacggggcccggaaggcattttca

SEQ ID NO: 1403771 - DNA, 25 bp, Homo sapien
cccggaaggcattttcagcagcccc

SEQ ID NO: 1403772 - DNA, 25 bp, Homo sapien
tgctgggccttctgaaagctggcac

SEQ ID NO: 1403773 - DNA, 25 bp, Homo sapien
gaagacaccagcagcaaattcttgc

SEQ ID NO: 1403774 - DNA, 25 bp, Homo sapien
aaagctggcacctgtgcggcggtat

SEQ ID NO: 1403775 - DNA, 25 bp, Homo sapien
ctgtgcggcggtataaggagtggat

SEQ ID NO: 1403776 - DNA, 25 bp, Homo sapien
gacaattcctagcacagcaatgcca

SEQ ID NO: 1403777 - DNA, 25 bp, Homo sapien
cagcagcatgagcacggatactgct

SEQ ID NO: 1403778 - DNA, 25 bp, Homo sapien
tgtgttgcccttcggcaccaccaga

SEQ ID NO: 1403779 - DNA, 25 bp, Homo sapien
ccagtgaagagcagggcgaccagca

SEQ ID NO: 1403780 - DNA, 25 bp, Homo sapien
tgtcaatcgagcagcattccaagca

SEQ ID NO: 1403781 - DNA, 25 bp, Homo sapien
caggaagccaccttagattggccaa

SEQ ID NO: 1403782 - DNA, 25 bp, Homo sapien
ccatggttctatgcctcctccagga

SEQ ID NO: 1403783 - DNA, 25 bp, Homo sapien
tatgtgtcaagagtgctgtctgcgc

SEQ ID NO: 1403784 - DNA, 25 bp, Homo sapien
caatggcctggaggacaaagagcac

SEQ ID NO: 1403785 - DNA, 25 bp, Homo sapien
tggcctggaggacaaagagcacatc

SEQ ID NO: 1403786 - DNA, 25 bp, Homo sapien
ctgggataccaatggcctggaggac

SEQ ID NO: 1403787 - DNA, 25 bp, Homo sapien
tgggataccaatggcctggaggaca

SEQ ID NO: 1403788 - DNA, 25 bp, Homo sapien
gaagaaaacgaagaaattgaatgaa

SEQ ID NO: 1403789 - DNA, 25 bp, Homo sapien
aaggaggacccagaggatagaaagc

SEQ ID NO: 1403790 - DNA, 25 bp, Homo sapien
ctgcgccattgttggtttccacaca

SEQ ID NO: 1403791 - DNA, 25 bp, Homo sapien
gaagttcaggagaagagccagcgtg

SEQ ID NO: 1403792 - DNA, 25 bp, Homo sapien
aagcccaaagcctgcgccattgttg

SEQ ID NO: 1403793 - DNA, 25 bp, Homo sapien
gggcaagaacatttgctagcaggct

SEQ ID NO: 1403794 - DNA, 25 bp, Homo sapien
gcccaaagacatctaaagaattcaa

SEQ ID NO: 1403795 - DNA, 25 bp, Homo sapien
agagggcaagaacatttgctagcag

SEQ ID NO: 1403796 - DNA, 25 bp, Homo sapien
gagttctaaatagaggtgaagtgtt

SEQ ID NO: 1403797 - DNA, 25 bp, Homo sapien
cctccaaaaggcttctcactactca

SEQ ID NO: 1403798 - DNA, 25 bp, Homo sapien
tcctccaaaaggcttctcactactc

SEQ ID NO: 1403799 - DNA, 25 bp, Homo sapien
agtacatggtggatacagtcttctg

SEQ ID NO: 1403800 - DNA, 25 bp, Homo sapien
aattcttgggggatctccatggaga

SEQ ID NO: 1403801 - DNA, 25 bp, Homo sapien
tgaaattcttgggggatctccatgg

SEQ ID NO: 1403802 - DNA, 25 bp, Homo sapien
tacatggtggatacagtcttctgaa

SEQ ID NO: 1403803 - DNA, 25 bp, Homo sapien
aggtagagggggccaattgttctgt

SEQ ID NO: 1403804 - DNA, 25 bp, Homo sapien
aaggtagagggggccaattgttctg

SEQ ID NO: 1403805 - DNA, 25 bp, Homo sapien
agagggggccaattgttctgtcgag

SEQ ID NO: 1403806 - DNA, 25 bp, Homo sapien
gtagagggggccaattgttctgtcg

SEQ ID NO: 1403807 - DNA, 25 bp, Homo sapien
ctcgctcccttcggtccaactcctc

SEQ ID NO: 1403808 - DNA, 25 bp, Homo sapien
ctcccttcggtccaactcctctgcc

SEQ ID NO: 1403809 - DNA, 25 bp, Homo sapien
ctgccttccggttgagctcctcctg

SEQ ID NO: 1403810 - DNA, 25 bp, Homo sapien
gctcccttcggtccaactcctctgc

SEQ ID NO: 1403811 - DNA, 25 bp, Homo sapien
ctgcccagtgtgagcagacggagat

SEQ ID NO: 1403812 - DNA, 25 bp, Homo sapien
agtgtgagcagacggagatgtgagc

SEQ ID NO: 1403813 - DNA, 25 bp, Homo sapien
cccagtgtgagcagacggagatgtg

SEQ ID NO: 1403814 - DNA, 25 bp, Homo sapien
tgtgagcagacggagatgtgagccc

SEQ ID NO: 1403815 - DNA, 25 bp, Homo sapien
ctgagtgctgtatgagccatagttc

SEQ ID NO: 1403816 - DNA, 25 bp, Homo sapien
gagccatagttcttaggttctgtgg

SEQ ID NO: 1403817 - DNA, 25 bp, Homo sapien
ctggaggctcataggctggtggtgg

SEQ ID NO: 1403818 - DNA, 25 bp, Homo sapien
ggctggaggctcataggctggtggt

SEQ ID NO: 1403819 - DNA, 25 bp, Homo sapien
aggggctggaggctcataggctggt

SEQ ID NO: 1403820 - DNA, 25 bp, Homo sapien
gcaggggctggaggctcataggctg

SEQ ID NO: 1403821 - DNA, 25 bp, Homo sapien
tccagtgggacaaacaggtgtagtc

SEQ ID NO: 1403822 - DNA, 25 bp, Homo sapien
tctcagggaactaagatcacagtgc

SEQ ID NO: 1403823 - DNA, 25 bp, Homo sapien
catggctgactagcctctctcaggg

SEQ ID NO: 1403824 - DNA, 25 bp, Homo sapien
cagaacattggttaaggccttgcca

SEQ ID NO: 1403825 - DNA, 25 bp, Homo sapien
tcaagcgtggcatactgccggctgg

SEQ ID NO: 1403826 - DNA, 25 bp, Homo sapien
caaaagggttgtagacgtcaagcgt

SEQ ID NO: 1403827 - DNA, 25 bp, Homo sapien
tagacgtcaagcgtggcatactgcc

SEQ ID NO: 1403828 - DNA, 25 bp, Homo sapien
ggtctcaaaagggttgtagacgtca

SEQ ID NO: 1403829 - DNA, 25 bp, Homo sapien
tgtggctccaagtactgcaccttcg

SEQ ID NO: 1403830 - DNA, 25 bp, Homo sapien
tacagaaccgggaagaatcaacctg

SEQ ID NO: 1403831 - DNA, 25 bp, Homo sapien
aaaagaggccgactggcgcaagtca

SEQ ID NO: 1403832 - DNA, 25 bp, Homo sapien
cagagtgctcactggtctggagtca

SEQ ID NO: 1403833 - DNA, 25 bp, Homo sapien
gcgaacgggtttccgccgtctctgc

SEQ ID NO: 1403834 - DNA, 25 bp, Homo sapien
ctgaaaggggttgtcaagctcgctg

SEQ ID NO: 1403835 - DNA, 25 bp, Homo sapien
ggtttccgccgtctctgctctgagc

SEQ ID NO: 1403836 - DNA, 25 bp, Homo sapien
gtcaagctcgctgggctcggcgaac

SEQ ID NO: 1403837 - DNA, 25 bp, Homo sapien
tgtgcacggattggttccaccgacc

SEQ ID NO: 1403838 - DNA, 25 bp, Homo sapien
caccgaccggaagggccacaaggat

SEQ ID NO: 1403839 - DNA, 25 bp, Homo sapien
tccaaaagctaagacgaaagtgccc

SEQ ID NO: 1403840 - DNA, 25 bp, Homo sapien
tgcgcctgcgtcttgtccaaaagct

SEQ ID NO: 1403841 - DNA, 25 bp, Homo sapien
aaactgtgtggatggaatagtatta

SEQ ID NO: 1403842 - DNA, 25 bp, Homo sapien
ggaaactgtgtggatggaatagtat

SEQ ID NO: 1403843 - DNA, 25 bp, Homo sapien
aggtatatagagagccaggaggaag

SEQ ID NO: 1403844 - DNA, 25 bp, Homo sapien
actctggctcgttctcttgtataaa

SEQ ID NO: 1403845 - DNA, 25 bp, Homo sapien
ctgaagggcttcacccaaggtcagc

SEQ ID NO: 1403846 - DNA, 25 bp, Homo sapien
tttcaatcagatcgaagagctggtg

SEQ ID NO: 1403847 - DNA, 25 bp, Homo sapien
tgctttcaatcagatcgaagagctg

SEQ ID NO: 1403848 - DNA, 25 bp, Homo sapien
tcaatcagatcgaagagctggtggt

SEQ ID NO: 1403849 - DNA, 25 bp, Homo sapien
cattcttggagaaccaaggctctgc

SEQ ID NO: 1403850 - DNA, 25 bp, Homo sapien
tttgaaggctacctaaccacgacca

SEQ ID NO: 1403851 - DNA, 25 bp, Homo sapien
gaccacaccaggaccaacgtttctg

SEQ ID NO: 1403852 - DNA, 25 bp, Homo sapien
tgaggcaggatgccttacaaaccct

SEQ ID NO: 1403853 - DNA, 25 bp, Homo sapien
tatccttgtcaacttcatgaatctt

SEQ ID NO: 1403854 - DNA, 25 bp, Homo sapien
tatatccttgtcaacttcatgaatc

SEQ ID NO: 1403855 - DNA, 25 bp, Homo sapien
ttgtatatccttgtcaacttcatga

SEQ ID NO: 1403856 - DNA, 25 bp, Homo sapien
tgtatatccttgtcaacttcatgaa

SEQ ID NO: 1403857 - DNA, 25 bp, Homo sapien
gatctctggttgtctcaaggttagg

SEQ ID NO: 1403858 - DNA, 25 bp, Homo sapien
gacttctggacggtgggcactattt

SEQ ID NO: 1403859 - DNA, 25 bp, Homo sapien
ggcactatttatcccgagcccagct

SEQ ID NO: 1403860 - DNA, 25 bp, Homo sapien
gcaaaccaccctaagaaggaagtga

SEQ ID NO: 1403861 - DNA, 25 bp, Homo sapien
ccgcagcggtttgcagttctcacga

SEQ ID NO: 1403862 - DNA, 25 bp, Homo sapien
gtttgcagttctcacgaacatagcg

SEQ ID NO: 1403863 - DNA, 25 bp, Homo sapien
tgatgtgttctcatcccaatccagg

SEQ ID NO: 1403864 - DNA, 25 bp, Homo sapien
ctgatgtgttctcatcccaatccag

SEQ ID NO: 1403865 - DNA, 25 bp, Homo sapien
ccatctgaaagtaactggggggaga

SEQ ID NO: 1403866 - DNA, 25 bp, Homo sapien
gaggttgaggaatcagaaggtcacc

SEQ ID NO: 1403867 - DNA, 25 bp, Homo sapien
tgaaatagaccaattctgtggagag

SEQ ID NO: 1403868 - DNA, 25 bp, Homo sapien
agagttaactagtgccccctcaagg

SEQ ID NO: 1403869 - DNA, 25 bp, Homo sapien
catccgggaagggataggacccaag

SEQ ID NO: 1403870 - DNA, 25 bp, Homo sapien
cttgtctttcggatcatccgggaag

SEQ ID NO: 1403871 - DNA, 25 bp, Homo sapien
gggataggacccaagatcctttcca

SEQ ID NO: 1403872 - DNA, 25 bp, Homo sapien
ctttcggatcatccgggaagggata

SEQ ID NO: 1403873 - DNA, 25 bp, Homo sapien
caaaggaaccaggtagaagaatgcc

SEQ ID NO: 1403874 - DNA, 25 bp, Homo sapien
aactgagcatgggactgaaaagggc

SEQ ID NO: 1403875 - DNA, 25 bp, Homo sapien
gaatgccaggcagtcaagtaagaca

SEQ ID NO: 1403876 - DNA, 25 bp, Homo sapien
catgctaaggatcagctgccaggaa

SEQ ID NO: 1403877 - DNA, 25 bp, Homo sapien
gatgcagcctatactccacacatca

SEQ ID NO: 1403878 - DNA, 25 bp, Homo sapien
agatgatgcagcctatactccacac

SEQ ID NO: 1403879 - DNA, 25 bp, Homo sapien
gatgatgcagcctatactccacaca

SEQ ID NO: 1403880 - DNA, 25 bp, Homo sapien
aaagatgatgcagcctatactccac

SEQ ID NO: 1403881 - DNA, 25 bp, Homo sapien
ggagacaatggtgctatggtgctca

SEQ ID NO: 1403882 - DNA, 25 bp, Homo sapien
agacaatggtgctatggtgctcatg

SEQ ID NO: 1403883 - DNA, 25 bp, Homo sapien
caaggatgacttctggtgctcggta

SEQ ID NO: 1403884 - DNA, 25 bp, Homo sapien
ctcggtaatggcgagtggagacaat

SEQ ID NO: 1403885 - DNA, 25 bp, Homo sapien
aaaggtactgtgatctcctgcctgg

SEQ ID NO: 1403886 - DNA, 25 bp, Homo sapien
tccagttagtcaaaggagccgagct

SEQ ID NO: 1403887 - DNA, 25 bp, Homo sapien
gcctggccttacaagccctgggaaa

SEQ ID NO: 1403888 - DNA, 25 bp, Homo sapien
gatgaacctctgcacccagactgag

SEQ ID NO: 1403889 - DNA, 25 bp, Homo sapien
gagaaaatgtgggaggacgaaataa

SEQ ID NO: 1403890 - DNA, 25 bp, Homo sapien
tgcctgcccccagtaaccaagggca

SEQ ID NO: 1403891 - DNA, 25 bp, Homo sapien
cagaaggcaaagtggtgcagctgcc

SEQ ID NO: 1403892 - DNA, 25 bp, Homo sapien
ggagaaaacaaagggctcggcagaa

SEQ ID NO: 1403893 - DNA, 25 bp, Homo sapien
tcaggcttgaggtctgtatgtgtca

SEQ ID NO: 1403894 - DNA, 25 bp, Homo sapien
cttctctaggttgtaggtgagctca

SEQ ID NO: 1403895 - DNA, 25 bp, Homo sapien
tctctaggttgtaggtgagctcata

SEQ ID NO: 1403896 - DNA, 25 bp, Homo sapien
tgtgtcagcttgttatcatggagga

SEQ ID NO: 1403897 - DNA, 25 bp, Homo sapien
tctacgtctaaatggaatgcctggt

SEQ ID NO: 1403898 - DNA, 25 bp, Homo sapien
agctaactggtatcagctgacccca

SEQ ID NO: 1403899 - DNA, 25 bp, Homo sapien
gagacaggtccagaatcactagggc

SEQ ID NO: 1403900 - DNA, 25 bp, Homo sapien
ccaggcctggttacctagggcaaag

SEQ ID NO: 1403901 - DNA, 25 bp, Homo sapien
ggaaatcgaaggtgctaaggcccag

SEQ ID NO: 1403902 - DNA, 25 bp, Homo sapien
tcgaaggtgctaaggcccagaagct

SEQ ID NO: 1403903 - DNA, 25 bp, Homo sapien
tgttgtctttgaggaaatcgaaggt

SEQ ID NO: 1403904 - DNA, 25 bp, Homo sapien
ccagtcaaacatctggacacagagg

SEQ ID NO: 1403905 - DNA, 25 bp, Homo sapien
tgatctcaagtcgagctgcttcctt

SEQ ID NO: 1403906 - DNA, 25 bp, Homo sapien
ttgatctcaagtcgagctgcttcct

SEQ ID NO: 1403907 - DNA, 25 bp, Homo sapien
tgcgatggtcaacacattgtacaac

SEQ ID NO: 1403908 - DNA, 25 bp, Homo sapien
acacattgtacaactcggccgaagg

SEQ ID NO: 1403909 - DNA, 25 bp, Homo sapien
ctgcgatggtcaacacattgtacaa

SEQ ID NO: 1403910 - DNA, 25 bp, Homo sapien
tgaaatgaaagagagcagggtcggg

SEQ ID NO: 1403911 - DNA, 25 bp, Homo sapien
aaatgaaagagagcagggtcgggga

SEQ ID NO: 1403912 - DNA, 25 bp, Homo sapien
atgaaagagagcagggtcggggaga

SEQ ID NO: 1403913 - DNA, 25 bp, Homo sapien
ctgaaatgaaagagagcagggtcgg

SEQ ID NO: 1403914 - DNA, 25 bp, Homo sapien
gaagaaaacccctgcgtgattccca

SEQ ID NO: 1403915 - DNA, 25 bp, Homo sapien
gccgtgagagctgggagtggacaac

SEQ ID NO: 1403916 - DNA, 25 bp, Homo sapien
aattctcaacagcaactcaaaccac

SEQ ID NO: 1403917 - DNA, 25 bp, Homo sapien
agaggtcaattctcaacagcaactc

SEQ ID NO: 1403918 - DNA, 25 bp, Homo sapien
ccattacaggctataggattgttac

SEQ ID NO: 1403919 - DNA, 25 bp, Homo sapien
acgttaggatggctatgggaccatt

SEQ ID NO: 1403920 - DNA, 25 bp, Homo sapien
tatgggaccattacaggctatagga

SEQ ID NO: 1403921 - DNA, 25 bp, Homo sapien
ctcaggttggcttgggacgttagga

SEQ ID NO: 1403922 - DNA, 25 bp, Homo sapien
cagtccccgacgtggtagatgaggt

SEQ ID NO: 1403923 - DNA, 25 bp, Homo sapien
gctcttgtagccagtccccgacgtg

SEQ ID NO: 1403924 - DNA, 25 bp, Homo sapien
gatgaggtggccctcagcgtcgtcc

SEQ ID NO: 1403925 - DNA, 25 bp, Homo sapien
agcgtcgtcctctacactcttggct

SEQ ID NO: 1403926 - DNA, 25 bp, Homo sapien
caataagcccaacatgccagggaga

SEQ ID NO: 1403927 - DNA, 25 bp, Homo sapien
cagggcccttcaagagtcggagagc

SEQ ID NO: 1403928 - DNA, 25 bp, Homo sapien
tcggagagcttccaagaaagtaggc

SEQ ID NO: 1403929 - DNA, 25 bp, Homo sapien
tcacttaccagagtcctagagggcc

SEQ ID NO: 1403930 - DNA, 25 bp, Homo sapien
tgctgcgctggctgcggtaactgct

SEQ ID NO: 1403931 - DNA, 25 bp, Homo sapien
gtgtcatagtaggcatctccccgat

SEQ ID NO: 1403932 - DNA, 25 bp, Homo sapien
ccgatcccggctataatcgttgcgt

SEQ ID NO: 1403933 - DNA, 25 bp, Homo sapien
tgttctcccgctgatattcatagga

SEQ ID NO: 1403934 - DNA, 25 bp, Homo sapien
gtcatacaccctccggtcggacgaa

SEQ ID NO: 1403935 - DNA, 25 bp, Homo sapien
ccggtcggacgaacgatcatcataa

SEQ ID NO: 1403936 - DNA, 25 bp, Homo sapien
ctgtagctgccacagtatcgccggt

SEQ ID NO: 1403937 - DNA, 25 bp, Homo sapien
gctgccacagtatcgccggtcatac

SEQ ID NO: 1403938 - DNA, 25 bp, Homo sapien
gataacaaataccaatgaggtgtat

SEQ ID NO: 1403939 - DNA, 25 bp, Homo sapien
tggataacaaataccaatgaggtgt

SEQ ID NO: 1403940 - DNA, 25 bp, Homo sapien
ttggataacaaataccaatgaggtg

SEQ ID NO: 1403941 - DNA, 25 bp, Homo sapien
tgttggataacaaataccaatgagg

SEQ ID NO: 1403942 - DNA, 25 bp, Homo sapien
ttcagccagctacttaaggcaatgg

SEQ ID NO: 1403943 - DNA, 25 bp, Homo sapien
tagttacctgtagctcccagtcctt

SEQ ID NO: 1403944 - DNA, 25 bp, Homo sapien
caaacgcactgggtacgtcctcagt

SEQ ID NO: 1403945 - DNA, 25 bp, Homo sapien
tgaacaaaggaatgagcgagtgacc

SEQ ID NO: 1403946 - DNA, 25 bp, Homo sapien
ggagcgacttcttcgtcgcttatgc

SEQ ID NO: 1403947 - DNA, 25 bp, Homo sapien
ttgaccaggagcgacttcttcgtcg

SEQ ID NO: 1403948 - DNA, 25 bp, Homo sapien
acttcttcgtcgcttatgctttcgg

SEQ ID NO: 1403949 - DNA, 25 bp, Homo sapien
tcgcttatgctttcggctccgatag

SEQ ID NO: 1403950 - DNA, 25 bp, Homo sapien
gcccgtgcgcttgtcccacaggaag

SEQ ID NO: 1403951 - DNA, 25 bp, Homo sapien
cccgtgcgcttgtcccacaggaagt

SEQ ID NO: 1403952 - DNA, 25 bp, Homo sapien
ccgtgcgcttgtcccacaggaagtc

SEQ ID NO: 1403953 - DNA, 25 bp, Homo sapien
aggcccgtgcgcttgtcccacagga

SEQ ID NO: 1403954 - DNA, 25 bp, Homo sapien
ggcacccccgcggcgacgaaatgct

SEQ ID NO: 1403955 - DNA, 25 bp, Homo sapien
cccgatcccagctcggtctccggct

SEQ ID NO: 1403956 - DNA, 25 bp, Homo sapien
taagatctgcttggcgccgctcgca

SEQ ID NO: 1403957 - DNA, 25 bp, Homo sapien
ggcccgatcccagctcggtctccgg

SEQ ID NO: 1403958 - DNA, 25 bp, Homo sapien
agatctgcttggcgccgctcgcacc

SEQ ID NO: 1403959 - DNA, 25 bp, Homo sapien
ttggcaggcatccgcctgtcagagc

SEQ ID NO: 1403960 - DNA, 25 bp, Homo sapien
agttggcaggcatccgcctgtcaga

SEQ ID NO: 1403961 - DNA, 25 bp, Homo sapien
tagttggcaggcatccgcctgtcag

SEQ ID NO: 1403962 - DNA, 25 bp, Homo sapien
gtagttggcaggcatccgcctgtca

SEQ ID NO: 1403963 - DNA, 25 bp, Homo sapien
cgagactcagagtgactgaggcggc

SEQ ID NO: 1403964 - DNA, 25 bp, Homo sapien
gggcggggccgagactcagagtgac

SEQ ID NO: 1403965 - DNA, 25 bp, Homo sapien
gggccgagactcagagtgactgagg

SEQ ID NO: 1403966 - DNA, 25 bp, Homo sapien
actcagagtgactgaggcggcaaag

SEQ ID NO: 1403967 - DNA, 25 bp, Homo sapien
tgccttctcagggacaagagtagtc

SEQ ID NO: 1403968 - DNA, 25 bp, Homo sapien
gaaaggcccaaggtatccaagcctg

SEQ ID NO: 1403969 - DNA, 25 bp, Homo sapien
tataattgcttccaaacagctgggt

SEQ ID NO: 1403970 - DNA, 25 bp, Homo sapien
gtctacaagcccagcacggaggttg

SEQ ID NO: 1403971 - DNA, 25 bp, Homo sapien
ctggagaacgtagactggggaggaa

SEQ ID NO: 1403972 - DNA, 25 bp, Homo sapien
gatggggtacaagggtaggctgggc

SEQ ID NO: 1403973 - DNA, 25 bp, Homo sapien
tcgaaggggctagatgacagttata

SEQ ID NO: 1403974 - DNA, 25 bp, Homo sapien
ggtcaggaatagagaagagaggact

SEQ ID NO: 1403975 - DNA, 25 bp, Homo sapien
tgtagccggagccaggtcgccagcc

SEQ ID NO: 1403976 - DNA, 25 bp, Homo sapien
aggtcgccagcctgtcaccacaatc

SEQ ID NO: 1403977 - DNA, 25 bp, Homo sapien
caccaggtctccaacacggaggaag

SEQ ID NO: 1403978 - DNA, 25 bp, Homo sapien
ccgcatgatgttggtgtagccggag

SEQ ID NO: 1403979 - DNA, 25 bp, Homo sapien
tttcaatgccaaattgcacccggcg

SEQ ID NO: 1403980 - DNA, 25 bp, Homo sapien
aagactcctcggcataagtggacct

SEQ ID NO: 1403981 - DNA, 25 bp, Homo sapien
gcccgaggtcggtaccgagacagaa

SEQ ID NO: 1403982 - DNA, 25 bp, Homo sapien
tctggaggttcacggtaaagcaagg

SEQ ID NO: 1403983 - DNA, 25 bp, Homo sapien
cagttgtggtcagcacaatgatggc

SEQ ID NO: 1403984 - DNA, 25 bp, Homo sapien
agctgccggtggtacactgcggcct

SEQ ID NO: 1403985 - DNA, 25 bp, Homo sapien
caatggcggtgacctcagtgggatc

SEQ ID NO: 1403986 - DNA, 25 bp, Homo sapien
ggatcacggcttagtggcgctgccc

SEQ ID NO: 1403987 - DNA, 25 bp, Homo sapien
ttggcgacatcgcttgtctctgccc

SEQ ID NO: 1403988 - DNA, 25 bp, Homo sapien
gggcttggtaatcatgctctccagc

SEQ ID NO: 1403989 - DNA, 25 bp, Homo sapien
gcatcttcaccgcttccacagggaa

SEQ ID NO: 1403990 - DNA, 25 bp, Homo sapien
ccagcacagcattggcgacatcgct

SEQ ID NO: 1403991 - DNA, 25 bp, Homo sapien
ccgtcgctcacctccaggatttcat

SEQ ID NO: 1403992 - DNA, 25 bp, Homo sapien
tctgctgggatctcgatgcctaggt

SEQ ID NO: 1403993 - DNA, 25 bp, Homo sapien
aggcttgcccgccaagttgcagcgc

SEQ ID NO: 1403994 - DNA, 25 bp, Homo sapien
gtgccaccatgatgccgtcgctcac

SEQ ID NO: 1403995 - DNA, 25 bp, Homo sapien
aggtctcggacgtcctgctcggaca

SEQ ID NO: 1403996 - DNA, 25 bp, Homo sapien
tgacggcagccacgtcgctggcttt

SEQ ID NO: 1403997 - DNA, 25 bp, Homo sapien
caaaggaggcaaagacgatgtccac

SEQ ID NO: 1403998 - DNA, 25 bp, Homo sapien
gatcttgatgccgtgtccttccgga

SEQ ID NO: 1403999 - DNA, 25 bp, Homo sapien
tcgtcaatgtagatgcggcccccca

SEQ ID NO: 1404000 - DNA, 25 bp, Homo sapien
tggaccactagggagatgagcccgt

SEQ ID NO: 1404001 - DNA, 25 bp, Homo sapien
cactagggagatgagcccgtcgtca

SEQ ID NO: 1404002 - DNA, 25 bp, Homo sapien
gagatgagcccgtcgtcaatgtaga

SEQ ID NO: 1404003 - DNA, 25 bp, Homo sapien
cggcacgacccggacaatattgggg

SEQ ID NO: 1404004 - DNA, 25 bp, Homo sapien
tagtccacccacacggtgttcgcgt

SEQ ID NO: 1404005 - DNA, 25 bp, Homo sapien
aatattggggtagtccacccacacg

SEQ ID NO: 1404006 - DNA, 25 bp, Homo sapien
cggaacgcggggtccacagtcacca

SEQ ID NO: 1404007 - DNA, 25 bp, Homo sapien
atcccagtgcggatctccggtccct

SEQ ID NO: 1404008 - DNA, 25 bp, Homo sapien
caggatcccagtgcggatctccggt

SEQ ID NO: 1404009 - DNA, 25 bp, Homo sapien
tggccacgggccggtagctgagtgg

SEQ ID NO: 1404010 - DNA, 25 bp, Homo sapien
ggccacgggccggtagctgagtggg

SEQ ID NO: 1404011 - DNA, 25 bp, Homo sapien
cgttggcgatggactcagcatggta

SEQ ID NO: 1404012 - DNA, 25 bp, Homo sapien
gacgttggcgatggactcagcatgg

SEQ ID NO: 1404013 - DNA, 25 bp, Homo sapien
ccggacgttggcgatggactcagca

SEQ ID NO: 1404014 - DNA, 25 bp, Homo sapien
ctcccggacgttggcgatggactca

SEQ ID NO: 1404015 - DNA, 25 bp, Homo sapien
cgctccacggagcgagatgctggcc

SEQ ID NO: 1404016 - DNA, 25 bp, Homo sapien
gcgcaatgttcatcccggccttgat

SEQ ID NO: 1404017 - DNA, 25 bp, Homo sapien
ttgatcatctccttgaggcgctcca

SEQ ID NO: 1404018 - DNA, 25 bp, Homo sapien
ggagaagttgagtcgcgcaatgttc

SEQ ID NO: 1404019 - DNA, 25 bp, Homo sapien
gaaggtgtctgccatagcagctggc

SEQ ID NO: 1404020 - DNA, 25 bp, Homo sapien
tcctgggtcagttgggccacactgg

SEQ ID NO: 1404021 - DNA, 25 bp, Homo sapien
ccacgggctcggagtcaatgtccag

SEQ ID NO: 1404022 - DNA, 25 bp, Homo sapien
caatgatgctggtactgcgagcagc

SEQ ID NO: 1404023 - DNA, 25 bp, Homo sapien
ccacactgttgggttgtcagaggca

SEQ ID NO: 1404024 - DNA, 25 bp, Homo sapien
cacactgttgggttgtcagaggcat

SEQ ID NO: 1404025 - DNA, 25 bp, Homo sapien
gacttagagacccatgaccgaagct

SEQ ID NO: 1404026 - DNA, 25 bp, Homo sapien
gacccatgaccgaagctgcagggat

SEQ ID NO: 1404027 - DNA, 25 bp, Homo sapien
gactttgctaagtctctttgggact

SEQ ID NO: 1404028 - DNA, 25 bp, Homo sapien
caatcaggatggactttgctaagtc

SEQ ID NO: 1404029 - DNA, 25 bp, Homo sapien
gagagggagaggatgacaaaactgc

SEQ ID NO: 1404030 - DNA, 25 bp, Homo sapien
agaatccctcccccagaacggcctg

SEQ ID NO: 1404031 - DNA, 25 bp, Homo sapien
cccacagaatccctcccccagaacg

SEQ ID NO: 1404032 - DNA, 25 bp, Homo sapien
cacagaatccctcccccagaacggc

SEQ ID NO: 1404033 - DNA, 25 bp, Homo sapien
cagaatccctcccccagaacggcct

SEQ ID NO: 1404034 - DNA, 25 bp, Homo sapien
actgaagttagctctagtgaatcca

SEQ ID NO: 1404035 - DNA, 25 bp, Homo sapien
ttactgaagttagctctagtgaatc

SEQ ID NO: 1404036 - DNA, 25 bp, Homo sapien
tactgaagttagctctagtgaatcc

SEQ ID NO: 1404037 - DNA, 25 bp, Homo sapien
tttactgaagttagctctagtgaat

SEQ ID NO: 1404038 - DNA, 25 bp, Homo sapien
cattgtccacagcaaggatgtgcag

SEQ ID NO: 1404039 - DNA, 25 bp, Homo sapien
ctccttgagaacatacctgggtaga

SEQ ID NO: 1404040 - DNA, 25 bp, Homo sapien
aatgtatgctttggcctgattgccc

SEQ ID NO: 1404041 - DNA, 25 bp, Homo sapien
gcatcctttgtgagtgctgccctga

SEQ ID NO: 1404042 - DNA, 25 bp, Homo sapien
tcatcatagcattcattagttacca

SEQ ID NO: 1404043 - DNA, 25 bp, Homo sapien
gacagactatcaacaagtatcagag

SEQ ID NO: 1404044 - DNA, 25 bp, Homo sapien
ccctctgtgagatttacagtatagt

SEQ ID NO: 1404045 - DNA, 25 bp, Homo sapien
tacgctgtatcaggccctaaggaca

SEQ ID NO: 1404046 - DNA, 25 bp, Homo sapien
tccccactgtccaatctttatcgag

SEQ ID NO: 1404047 - DNA, 25 bp, Homo sapien
accagttgggaggataggaatccca

SEQ ID NO: 1404048 - DNA, 25 bp, Homo sapien
gcccgtgtcctgtccagctaaggga

SEQ ID NO: 1404049 - DNA, 25 bp, Homo sapien
tgaactgactccagaaccagttggg

SEQ ID NO: 1404050 - DNA, 25 bp, Homo sapien
tatcccagtcccaagggattagcag

SEQ ID NO: 1404051 - DNA, 25 bp, Homo sapien
cattccacaggcatggactgaaccc

SEQ ID NO: 1404052 - DNA, 25 bp, Homo sapien
gctttgtcagttgagagccctccct

SEQ ID NO: 1404053 - DNA, 25 bp, Homo sapien
cccgacgcatgccagactggaggag

SEQ ID NO: 1404054 - DNA, 25 bp, Homo sapien
gcacagacacaaacgcaggtggctt

SEQ ID NO: 1404055 - DNA, 25 bp, Homo sapien
ttacaagtgtgagactcatcttttt

SEQ ID NO: 1404056 - DNA, 25 bp, Homo sapien
atttccctaataaatagaaagtgct

SEQ ID NO: 1404057 - DNA, 25 bp, Homo sapien
cctaataaatagaaagtgctggtgg

SEQ ID NO: 1404058 - DNA, 25 bp, Homo sapien
ctaataaatagaaagtgctggtggg

SEQ ID NO: 1404059 - DNA, 25 bp, Homo sapien
tccctaataaatagaaagtgctggt

SEQ ID NO: 1404060 - DNA, 25 bp, Homo sapien
actgaaaatacaaaattaggctggg

SEQ ID NO: 1404061 - DNA, 25 bp, Homo sapien
agcactttgggaggctgaggcgggc

SEQ ID NO: 1404062 - DNA, 25 bp, Homo sapien
ggatcatgaagtcaggagatcgaga

SEQ ID NO: 1404063 - DNA, 25 bp, Homo sapien
cgcagtggctcatgcctgtaatccc

SEQ ID NO: 1404064 - DNA, 25 bp, Homo sapien
tcttgagctgggtgcgctggtgtgt

SEQ ID NO: 1404065 - DNA, 25 bp, Homo sapien
ggtgtgtgcctatatccctagattc

SEQ ID NO: 1404066 - DNA, 25 bp, Homo sapien
aaaaacctgggtatgtatctagaag

SEQ ID NO: 1404067 - DNA, 25 bp, Homo sapien
aacctgggtatagggccgggtgcat

SEQ ID NO: 1404068 - DNA, 25 bp, Homo sapien
ggtaccttcagatgggcactcagaa

SEQ ID NO: 1404069 - DNA, 25 bp, Homo sapien
tctagtgggaaacccgacacgttca

SEQ ID NO: 1404070 - DNA, 25 bp, Homo sapien
atggattcatcccttacccgccggg

SEQ ID NO: 1404071 - DNA, 25 bp, Homo sapien
tattagacctgcactgctaaggagc

SEQ ID NO: 1404072 - DNA, 25 bp, Homo sapien
ggctcttagtatgaaccgagactag

SEQ ID NO: 1404073 - DNA, 25 bp, Homo sapien
ccgagactagagattgattgcttgt

SEQ ID NO: 1404074 - DNA, 25 bp, Homo sapien
caatgatgctaacctcctggaagca

SEQ ID NO: 1404075 - DNA, 25 bp, Homo sapien
ctgctggtatcagaaggtaatgtgg

SEQ ID NO: 1404076 - DNA, 25 bp, Homo sapien
aacctgatcgagctcttcctgcagg

SEQ ID NO: 1404077 - DNA, 25 bp, Homo sapien
catggtagccttggcctctatagga

SEQ ID NO: 1404078 - DNA, 25 bp, Homo sapien
tggtagccttggcctctataggaca

SEQ ID NO: 1404079 - DNA, 25 bp, Homo sapien
tattgcagacagggcccgatgccca

SEQ ID NO: 1404080 - DNA, 25 bp, Homo sapien
tttcagggtacaggattgcagcgtg

SEQ ID NO: 1404081 - DNA, 25 bp, Homo sapien
ggtttcagggtacaggattgcagcg

SEQ ID NO: 1404082 - DNA, 25 bp, Homo sapien
ttcagggtacaggattgcagcgtgc

SEQ ID NO: 1404083 - DNA, 25 bp, Homo sapien
gtttcagggtacaggattgcagcgt

SEQ ID NO: 1404084 - DNA, 25 bp, Homo sapien
tcaggactgtctaggtcagggaagc

SEQ ID NO: 1404085 - DNA, 25 bp, Homo sapien
ggctgtgcacctctagaatggattc

SEQ ID NO: 1404086 - DNA, 25 bp, Homo sapien
cagtcagtgggattaagtgtctacc

SEQ ID NO: 1404087 - DNA, 25 bp, Homo sapien
cgtgaacactgctacccctggtgaa

SEQ ID NO: 1404088 - DNA, 25 bp, Homo sapien
accagatcctgaaggtgcctgagag

SEQ ID NO: 1404089 - DNA, 25 bp, Homo sapien
gaccccagtgtgaccggcaaaattg

SEQ ID NO: 1404090 - DNA, 25 bp, Homo sapien
gtgtgaccggcaaaattggcactga

SEQ ID NO: 1404091 - DNA, 25 bp, Homo sapien
ctgaaggtgcctgagagagggtggt

SEQ ID NO: 1404092 - DNA, 25 bp, Homo sapien
gctctttccagaatgtgcagggtgg

SEQ ID NO: 1404093 - DNA, 25 bp, Homo sapien
aaaccctggagtagaggatgcctgg

SEQ ID NO: 1404094 - DNA, 25 bp, Homo sapien
ttgcgcgcaaaatctacaagcggag

SEQ ID NO: 1404095 - DNA, 25 bp, Homo sapien
ggtgacaaaagacgctaaacgctgg

SEQ ID NO: 1404096 - DNA, 25 bp, Homo sapien
ccttcggagatccagagcgcagccg

SEQ ID NO: 1404097 - DNA, 25 bp, Homo sapien
ttgacaagctgacggctgctccatc

SEQ ID NO: 1404098 - DNA, 25 bp, Homo sapien
ccagcagatgcggagttgacaagct

SEQ ID NO: 1404099 - DNA, 25 bp, Homo sapien
tgcattcaccagacaaactctgcgt

SEQ ID NO: 1404100 - DNA, 25 bp, Homo sapien
tgccgtcaagtcacctcggtgtcct

SEQ ID NO: 1404101 - DNA, 25 bp, Homo sapien
tggaaactaatggtcagtcgattgc

SEQ ID NO: 1404102 - DNA, 25 bp, Homo sapien
ggttacattcgactccatctgcaaa

SEQ ID NO: 1404103 - DNA, 25 bp, Homo sapien
ttgcatctcattgaaatatcttcca

SEQ ID NO: 1404104 - DNA, 25 bp, Homo sapien
agcaggatctccctacctctgagct

SEQ ID NO: 1404105 - DNA, 25 bp, Homo sapien
cttagaggcggatgatgggaaaatc

SEQ ID NO: 1404106 - DNA, 25 bp, Homo sapien
ggactcgaactgcaacgccctgacc

SEQ ID NO: 1404107 - DNA, 25 bp, Homo sapien
tcttcttcacccgatcctggcctgg

SEQ ID NO: 1404108 - DNA, 25 bp, Homo sapien
cccagttggctgggctttggtcccg

SEQ ID NO: 1404109 - DNA, 25 bp, Homo sapien
cagttggctgggctttggtcccgcc

SEQ ID NO: 1404110 - DNA, 25 bp, Homo sapien
cagtcccgcctcgagaccccccagt

SEQ ID NO: 1404111 - DNA, 25 bp, Homo sapien
cctcgagaccccccagttggctggg

SEQ ID NO: 1404112 - DNA, 25 bp, Homo sapien
ggtcccagcgagtctgttgttaggg

SEQ ID NO: 1404113 - DNA, 25 bp, Homo sapien
tgttgttaggggctttgggtcacac

SEQ ID NO: 1404114 - DNA, 25 bp, Homo sapien
cagcctccatgccaagtctaggggg

SEQ ID NO: 1404115 - DNA, 25 bp, Homo sapien
tctagggggtcccagcgagtctgtt

SEQ ID NO: 1404116 - DNA, 25 bp, Homo sapien
gagtcagagcatcgtcaccataagg

SEQ ID NO: 1404117 - DNA, 25 bp, Homo sapien
ggagagacaaacttccctagtcagg

SEQ ID NO: 1404118 - DNA, 25 bp, Homo sapien
cactcaaacgggcttggacatgcga

SEQ ID NO: 1404119 - DNA, 25 bp, Homo sapien
tacctgggtataggaagcagcttct

SEQ ID NO: 1404120 - DNA, 25 bp, Homo sapien
aaagtacgccttcgcagtttcctgc

SEQ ID NO: 1404121 - DNA, 25 bp, Homo sapien
ttcctccagcaagtaggtcacatca

SEQ ID NO: 1404122 - DNA, 25 bp, Homo sapien
acaaagtacgccttcgcagtttcct

SEQ ID NO: 1404123 - DNA, 25 bp, Homo sapien
gtacgccttcgcagtttcctgcctg

SEQ ID NO: 1404124 - DNA, 25 bp, Homo sapien
gctttgagcgctcagacttccagga

SEQ ID NO: 1404125 - DNA, 25 bp, Homo sapien
tggctagaacctcttcaatcaaggg

SEQ ID NO: 1404126 - DNA, 25 bp, Homo sapien
caatcaagggtagagcatcatcctc

SEQ ID NO: 1404127 - DNA, 25 bp, Homo sapien
gcaagatctggttgagtcgttcccg

SEQ ID NO: 1404128 - DNA, 25 bp, Homo sapien
ctcttgtagttgtctgggacgtaat

SEQ ID NO: 1404129 - DNA, 25 bp, Homo sapien
cctcttgtagttgtctgggacgtaa

SEQ ID NO: 1404130 - DNA, 25 bp, Homo sapien
cttgtagttgtctgggacgtaatga

SEQ ID NO: 1404131 - DNA, 25 bp, Homo sapien
tgtagttgtctgggacgtaatgagg

SEQ ID NO: 1404132 - DNA, 25 bp, Homo sapien
aacaggtgtgctgacttgtcaagcc

SEQ ID NO: 1404133 - DNA, 25 bp, Homo sapien
tcttttttgggagtgagcttcttgg

SEQ ID NO: 1404134 - DNA, 25 bp, Homo sapien
tgtcaagccgataatcacagatgta

SEQ ID NO: 1404135 - DNA, 25 bp, Homo sapien
tagcggttccggtggatcttgtaaa

SEQ ID NO: 1404136 - DNA, 25 bp, Homo sapien
tcccacaccgctgggattatcagcg

SEQ ID NO: 1404137 - DNA, 25 bp, Homo sapien
acaccgctgggattatcagcgtgag

SEQ ID NO: 1404138 - DNA, 25 bp, Homo sapien
ccactgcacttggccgaggtcattt

SEQ ID NO: 1404139 - DNA, 25 bp, Homo sapien
cattttttaactagcccagatcact

SEQ ID NO: 1404140 - DNA, 25 bp, Homo sapien
tacaatacgtataaaggtccaacac

SEQ ID NO: 1404141 - DNA, 25 bp, Homo sapien
cattatgatagaaccgacgggatgg

SEQ ID NO: 1404142 - DNA, 25 bp, Homo sapien
gaatgatctcatagagtggcacccg

SEQ ID NO: 1404143 - DNA, 25 bp, Homo sapien
ataatggtgaccaaaggcaaaccgt

SEQ ID NO: 1404144 - DNA, 25 bp, Homo sapien
gcttctcaatgcgaaagatgtcaag

SEQ ID NO: 1404145 - DNA, 25 bp, Homo sapien
gatgtcaagtttatctcggttaatg

SEQ ID NO: 1404146 - DNA, 25 bp, Homo sapien
taacagtcgataggactgacggacc

SEQ ID NO: 1404147 - DNA, 25 bp, Homo sapien
gtgcgccgactatccctcatcagat

SEQ ID NO: 1404148 - DNA, 25 bp, Homo sapien
caagtcatctcggagcaaacagatg

SEQ ID NO: 1404149 - DNA, 25 bp, Homo sapien
tagacacagccaggttgggcatagt

SEQ ID NO: 1404150 - DNA, 25 bp, Homo sapien
agtagacacagccaggttgggcata

SEQ ID NO: 1404151 - DNA, 25 bp, Homo sapien
cctgacgaagcagcaagtcatctcg

SEQ ID NO: 1404152 - DNA, 25 bp, Homo sapien
tctcttgcctcagccacccaagtac

SEQ ID NO: 1404153 - DNA, 25 bp, Homo sapien
tcccgggttctagcagttctcttgc

SEQ ID NO: 1404154 - DNA, 25 bp, Homo sapien
ctcccgggttctagcagttctcttg

SEQ ID NO: 1404155 - DNA, 25 bp, Homo sapien
cccgggttctagcagttctcttgcc

SEQ ID NO: 1404156 - DNA, 25 bp, Homo sapien
attccttccacagatttctaagtat

SEQ ID NO: 1404157 - DNA, 25 bp, Homo sapien
tttatatagtgccattccttccaca

SEQ ID NO: 1404158 - DNA, 25 bp, Homo sapien
ccttagttttatatagtgccattcc

SEQ ID NO: 1404159 - DNA, 25 bp, Homo sapien
agacttcaggtgcacgcctccatgc

SEQ ID NO: 1404160 - DNA, 25 bp, Homo sapien
tgtccacaggccttgggtcacactg

SEQ ID NO: 1404161 - DNA, 25 bp, Homo sapien
ctgtccacaggccttgggtcacact

SEQ ID NO: 1404162 - DNA, 25 bp, Homo sapien
catctgagttcactcccatacaatc

SEQ ID NO: 1404163 - DNA, 25 bp, Homo sapien
ttcactcccatacaatcacagtgct

SEQ ID NO: 1404164 - DNA, 25 bp, Homo sapien
gaggccacagatacagcgaataaca

SEQ ID NO: 1404165 - DNA, 25 bp, Homo sapien
tctcatcaatctgggctgatgcctc

SEQ ID NO: 1404166 - DNA, 25 bp, Homo sapien
gaataacatcgtcgtccttctcatg

SEQ ID NO: 1404167 - DNA, 25 bp, Homo sapien
gtaataggcctttcgtagacgacaa

SEQ ID NO: 1404168 - DNA, 25 bp, Homo sapien
gtcttatagtaaccagtgaggatct

SEQ ID NO: 1404169 - DNA, 25 bp, Homo sapien
tcagcattccgaaagactttgagca

SEQ ID NO: 1404170 - DNA, 25 bp, Homo sapien
tccactgtcttatagtaaccagtga

SEQ ID NO: 1404171 - DNA, 25 bp, Homo sapien
tccgaaagactttgagcatgtcagc

SEQ ID NO: 1404172 - DNA, 25 bp, Homo sapien
ctaggggatcagagatcttctcata

SEQ ID NO: 1404173 - DNA, 25 bp, Homo sapien
gggatcagagatcttctcataataa

SEQ ID NO: 1404174 - DNA, 25 bp, Homo sapien
gatcttctcataataatcagcattc

SEQ ID NO: 1404175 - DNA, 25 bp, Homo sapien
tcagagatcttctcataataatcag

SEQ ID NO: 1404176 - DNA, 25 bp, Homo sapien
agctgccagtgcttgccgggaagaa

SEQ ID NO: 1404177 - DNA, 25 bp, Homo sapien
gctgccagtgcttgccgggaagaat

SEQ ID NO: 1404178 - DNA, 25 bp, Homo sapien
gagctgccagtgcttgccgggaaga

SEQ ID NO: 1404179 - DNA, 25 bp, Homo sapien
gaacagatcgagctgtctgcagggc

SEQ ID NO: 1404180 - DNA, 25 bp, Homo sapien
tgcagctgccaaccgtcttgttcga

SEQ ID NO: 1404181 - DNA, 25 bp, Homo sapien
gatgataccatcacaaatttctttg

SEQ ID NO: 1404182 - DNA, 25 bp, Homo sapien
gctgcccgagccacttcaatatttt

SEQ ID NO: 1404183 - DNA, 25 bp, Homo sapien
gaatattatcactggtgtgctttac

SEQ ID NO: 1404184 - DNA, 25 bp, Homo sapien
tccaacgggtatataatgatgctga

SEQ ID NO: 1404185 - DNA, 25 bp, Homo sapien
tcttctcccagtttcggaccaagaa

SEQ ID NO: 1404186 - DNA, 25 bp, Homo sapien
tcctgtttttgacgaatcttctccc

SEQ ID NO: 1404187 - DNA, 25 bp, Homo sapien
ctagttggggtgttgatattttcac

SEQ ID NO: 1404188 - DNA, 25 bp, Homo sapien
ctttcacgattggacattggcttca

SEQ ID NO: 1404189 - DNA, 25 bp, Homo sapien
cgattggacattggcttcatctgta

SEQ ID NO: 1404190 - DNA, 25 bp, Homo sapien
gcttcatctgtaattggggggtcaa

SEQ ID NO: 1404191 - DNA, 25 bp, Homo sapien
gatgattcctcgacatttctcaaag

SEQ ID NO: 1404192 - DNA, 25 bp, Homo sapien
tttgaccgtccagattttttgtgtg

SEQ ID NO: 1404193 - DNA, 25 bp, Homo sapien
ccattcacacgctgactcttgcctc

SEQ ID NO: 1404194 - DNA, 25 bp, Homo sapien
ttcagcttgtgcttagactttctct

SEQ ID NO: 1404195 - DNA, 25 bp, Homo sapien
tgcttcagtaatctgtttgtcatcc

SEQ ID NO: 1404196 - DNA, 25 bp, Homo sapien
gaaatgcttcagtaatctgtttgtc

SEQ ID NO: 1404197 - DNA, 25 bp, Homo sapien
cagtaatctgtttgtcatccttgca

SEQ ID NO: 1404198 - DNA, 25 bp, Homo sapien
acatgaaatgcttcagtaatctgtt

SEQ ID NO: 1404199 - DNA, 25 bp, Homo sapien
agagcatagagtccaatccggtata

SEQ ID NO: 1404200 - DNA, 25 bp, Homo sapien
catgtctttaagagcatagagtcca

SEQ ID NO: 1404201 - DNA, 25 bp, Homo sapien
agttcagtcccagctggcatgtctt

SEQ ID NO: 1404202 - DNA, 25 bp, Homo sapien
tataatcataagtgagttcagtccc

SEQ ID NO: 1404203 - DNA, 25 bp, Homo sapien
tacctttgccaatactgtcagtctt

SEQ ID NO: 1404204 - DNA, 25 bp, Homo sapien
ctgtatctaacatattaagcgctgt

SEQ ID NO: 1404205 - DNA, 25 bp, Homo sapien
ccagcaaatctaagagcatttatgc

SEQ ID NO: 1404206 - DNA, 25 bp, Homo sapien
taggattagagttgctggtttaccg

SEQ ID NO: 1404207 - DNA, 25 bp, Homo sapien
cgaagcagcttactctgcccgtggg

SEQ ID NO: 1404208 - DNA, 25 bp, Homo sapien
tggaaagatcaatcccttgctgcac

SEQ ID NO: 1404209 - DNA, 25 bp, Homo sapien
gaagttagggtgaaaacgaagcagc

SEQ ID NO: 1404210 - DNA, 25 bp, Homo sapien
gatcctgaaactacttgcatgccaa

SEQ ID NO: 1404211 - DNA, 25 bp, Homo sapien
cacagctatggttgatgaatcgggc

SEQ ID NO: 1404212 - DNA, 25 bp, Homo sapien
catcccactatccaggttcaggcag

SEQ ID NO: 1404213 - DNA, 25 bp, Homo sapien
gaatcgggcctcatttcccatgcgg

SEQ ID NO: 1404214 - DNA, 25 bp, Homo sapien
tgcatttcacaatttgggtcacagc

SEQ ID NO: 1404215 - DNA, 25 bp, Homo sapien
gaaatcgttctagacattgcaccca

SEQ ID NO: 1404216 - DNA, 25 bp, Homo sapien
ggtattcaatgatgaactgcccagc

SEQ ID NO: 1404217 - DNA, 25 bp, Homo sapien
tatcctctggttacagcattgctcg

SEQ ID NO: 1404218 - DNA, 25 bp, Homo sapien
tgctcgccacatgggcaagtgttgg

SEQ ID NO: 1404219 - DNA, 25 bp, Homo sapien
aaggggtttgacatcaacgtagaca

SEQ ID NO: 1404220 - DNA, 25 bp, Homo sapien
cttcttacagttacaggtggtagct

SEQ ID NO: 1404221 - DNA, 25 bp, Homo sapien
caggtggtagcttcgtaaccagaaa

SEQ ID NO: 1404222 - DNA, 25 bp, Homo sapien
tacagttacaggtggtagcttcgta

SEQ ID NO: 1404223 - DNA, 25 bp, Homo sapien
attttcttatatagtgggacatctg

SEQ ID NO: 1404224 - DNA, 25 bp, Homo sapien
tttcttatatagtgggacatctggc

SEQ ID NO: 1404225 - DNA, 25 bp, Homo sapien
ttcttatatagtgggacatctggct

SEQ ID NO: 1404226 - DNA, 25 bp, Homo sapien
cttatatagtgggacatctggcttt

SEQ ID NO: 1404227 - DNA, 25 bp, Homo sapien
aggaagctggaagtcaattctcttt

SEQ ID NO: 1404228 - DNA, 25 bp, Homo sapien
gcgcctggccaagagtctttaaaaa

SEQ ID NO: 1404229 - DNA, 25 bp, Homo sapien
aggagcccaccaccgtgcccaacta

SEQ ID NO: 1404230 - DNA, 25 bp, Homo sapien
actgcgcctggccaagagtctttaa

SEQ ID NO: 1404231 - DNA, 25 bp, Homo sapien
ggagcccaccaccgtgcccaactaa

SEQ ID NO: 1404232 - DNA, 25 bp, Homo sapien
gggcactaaggtccctgatccagga

SEQ ID NO: 1404233 - DNA, 25 bp, Homo sapien
agagatccttcgcttccctagttag

SEQ ID NO: 1404234 - DNA, 25 bp, Homo sapien
tgtcttatatagtaactgctgccac

SEQ ID NO: 1404235 - DNA, 25 bp, Homo sapien
ctaaaatggagtcaggaggccatgg

SEQ ID NO: 1404236 - DNA, 25 bp, Homo sapien
gagccaccacacctgcctgtgtttt

SEQ ID NO: 1404237 - DNA, 25 bp, Homo sapien
ttttgagacggagtcttgctctgtt

SEQ ID NO: 1404238 - DNA, 25 bp, Homo sapien
gcaatctctgctcactgtaacctct

SEQ ID NO: 1404239 - DNA, 25 bp, Homo sapien
caccacacctgcctgtgtttttttt

SEQ ID NO: 1404240 - DNA, 25 bp, Homo sapien
gcctgcttccgctgctatgatctca

SEQ ID NO: 1404241 - DNA, 25 bp, Homo sapien
gagctttggcactaatcctagagaa

SEQ ID NO: 1404242 - DNA, 25 bp, Homo sapien
tcctagagaataaggaacttactct

SEQ ID NO: 1404243 - DNA, 25 bp, Homo sapien
cacgtaaagtttatgtagctgagaa

SEQ ID NO: 1404244 - DNA, 25 bp, Homo sapien
aataatccatattcatgctctcctg

SEQ ID NO: 1404245 - DNA, 25 bp, Homo sapien
catgctctcctggagtatactccag

SEQ ID NO: 1404246 - DNA, 25 bp, Homo sapien
taattggatcaatcgactctttggg

SEQ ID NO: 1404247 - DNA, 25 bp, Homo sapien
caacatgaatgggcgctggaaataa

SEQ ID NO: 1404248 - DNA, 25 bp, Homo sapien
ccaagttgaacaaagggtggccctg

SEQ ID NO: 1404249 - DNA, 25 bp, Homo sapien
tggccctggccataagaagtttaca

SEQ ID NO: 1404250 - DNA, 25 bp, Homo sapien
tgctgggttctacaaggcatccaag

SEQ ID NO: 1404251 - DNA, 25 bp, Homo sapien
tatttgttaccacatgagagggcag

SEQ ID NO: 1404252 - DNA, 25 bp, Homo sapien
gagagcgattctctgtgtcaaaaaa

SEQ ID NO: 1404253 - DNA, 25 bp, Homo sapien
gacatcccatattcacagatatggt

SEQ ID NO: 1404254 - DNA, 25 bp, Homo sapien
gatgaccaaatactgttaagacagc

SEQ ID NO: 1404255 - DNA, 25 bp, Homo sapien
taggtcgggcatggtcactcatccc

SEQ ID NO: 1404256 - DNA, 25 bp, Homo sapien
gagaggttctccctaagcaagaaat

SEQ ID NO: 1404257 - DNA, 25 bp, Homo sapien
ccttaacagctattaacacctagag

SEQ ID NO: 1404258 - DNA, 25 bp, Homo sapien
cgcaacctgtcttatggctaaagtg

SEQ ID NO: 1404259 - DNA, 25 bp, Homo sapien
gatgtgtcccaaagtgtatttctac

SEQ ID NO: 1404260 - DNA, 25 bp, Homo sapien
ttttgtgatatctacctcagtgaca

SEQ ID NO: 1404261 - DNA, 25 bp, Homo sapien
tttttgccactagtaattcattcca

SEQ ID NO: 1404262 - DNA, 25 bp, Homo sapien
actgtgaggtgagagtttttgccac

SEQ ID NO: 1404263 - DNA, 25 bp, Homo sapien
tactttaacaccaccaaacgagatg

SEQ ID NO: 1404264 - DNA, 25 bp, Homo sapien
tatttcctatagcaaaatagcatta

SEQ ID NO: 1404265 - DNA, 25 bp, Homo sapien
tttcctatagcaaaatagcattaaa

SEQ ID NO: 1404266 - DNA, 25 bp, Homo sapien
ttttatttcctatagcaaaatagca

SEQ ID NO: 1404267 - DNA, 25 bp, Homo sapien
tcctatagcaaaatagcattaaaaa

SEQ ID NO: 1404268 - DNA, 25 bp, Homo sapien
cacaggctgcaaggtactttcaggt

SEQ ID NO: 1404269 - DNA, 25 bp, Homo sapien
tcccttgggatgagagaaagcacag

SEQ ID NO: 1404270 - DNA, 25 bp, Homo sapien
ttcaggttcagaaggtttagctggg

SEQ ID NO: 1404271 - DNA, 25 bp, Homo sapien
ggactgggaatctcaactggtgctt

SEQ ID NO: 1404272 - DNA, 25 bp, Homo sapien
actgcgtccggctgctaatgatttt

SEQ ID NO: 1404273 - DNA, 25 bp, Homo sapien
cctcagatgatttacatgcctctgc

SEQ ID NO: 1404274 - DNA, 25 bp, Homo sapien
cactgcgtccggctgctaatgattt

SEQ ID NO: 1404275 - DNA, 25 bp, Homo sapien
acttgtctactgcctcttggttggc

SEQ ID NO: 1404276 - DNA, 25 bp, Homo sapien
tcaccatcatgcagggctatttttt

SEQ ID NO: 1404277 - DNA, 25 bp, Homo sapien
cactcaccatcatgcagggctattt

SEQ ID NO: 1404278 - DNA, 25 bp, Homo sapien
ggcactcaccatcatgcagggctat

SEQ ID NO: 1404279 - DNA, 25 bp, Homo sapien
caggcactcaccatcatgcagggct

SEQ ID NO: 1404280 - DNA, 25 bp, Homo sapien
ggtgggagcccccatgcctggccta

SEQ ID NO: 1404281 - DNA, 25 bp, Homo sapien
aggtgggagcccccatgcctggcct

SEQ ID NO: 1404282 - DNA, 25 bp, Homo sapien
gtgggagcccccatgcctggcctaa

SEQ ID NO: 1404283 - DNA, 25 bp, Homo sapien
catctgtgagtttaagtatcgcaaa

SEQ ID NO: 1404284 - DNA, 25 bp, Homo sapien
aacttactgggcacaatttgttgaa

SEQ ID NO: 1404285 - DNA, 25 bp, Homo sapien
gatccccagggatttcaacttactg

SEQ ID NO: 1404286 - DNA, 25 bp, Homo sapien
ggtcaactgtatttaatcaactggg

SEQ ID NO: 1404287 - DNA, 25 bp, Homo sapien
tcataaccattaaattcttcctgtg

SEQ ID NO: 1404288 - DNA, 25 bp, Homo sapien
ctcataaccattaaattcttcctgt

SEQ ID NO: 1404289 - DNA, 25 bp, Homo sapien
taaccattaaattcttcctgtgcat

SEQ ID NO: 1404290 - DNA, 25 bp, Homo sapien
cataaccattaaattcttcctgtgc

SEQ ID NO: 1404291 - DNA, 25 bp, Homo sapien
tttggtaccccaggctatgggagcc

SEQ ID NO: 1404292 - DNA, 25 bp, Homo sapien
attttggtaccccaggctatgggag

SEQ ID NO: 1404293 - DNA, 25 bp, Homo sapien
tcaaactgaggtgcctgcccttcta

SEQ ID NO: 1404294 - DNA, 25 bp, Homo sapien
ttcaaactgaggtgcctgcccttct

SEQ ID NO: 1404295 - DNA, 25 bp, Homo sapien
tctgggttgacaaactgagcagcct

SEQ ID NO: 1404296 - DNA, 25 bp, Homo sapien
tgcattgatacgacagcctgaaggg

SEQ ID NO: 1404297 - DNA, 25 bp, Homo sapien
tgtgactgcaggcactaaaaggctg

SEQ ID NO: 1404298 - DNA, 25 bp, Homo sapien
cacattttccgagcttggcgttgca

SEQ ID NO: 1404299 - DNA, 25 bp, Homo sapien
ttaaatttaactgcggaggtcctca

SEQ ID NO: 1404300 - DNA, 25 bp, Homo sapien
caactctggcctatagacccttgtc

SEQ ID NO: 1404301 - DNA, 25 bp, Homo sapien
tagcccagtgtggtttcctgtaccc

SEQ ID NO: 1404302 - DNA, 25 bp, Homo sapien
tcccactgggaacatgtttattctc

SEQ ID NO: 1404303 - DNA, 25 bp, Homo sapien
aataagccacgaagtgtctgtcgcc

SEQ ID NO: 1404304 - DNA, 25 bp, Homo sapien
aaaataagccacgaagtgtctgtcg

SEQ ID NO: 1404305 - DNA, 25 bp, Homo sapien
aaaaaataagccacgaagtgtctgt

SEQ ID NO: 1404306 - DNA, 25 bp, Homo sapien
taagccacgaagtgtctgtcgccca

SEQ ID NO: 1404307 - DNA, 25 bp, Homo sapien
ttctgtctcccaaagtgctggtatt

SEQ ID NO: 1404308 - DNA, 25 bp, Homo sapien
gctcaagcgatccacacacttctgt

SEQ ID NO: 1404309 - DNA, 25 bp, Homo sapien
gtattacaggtgtgagccaccatgc

SEQ ID NO: 1404310 - DNA, 25 bp, Homo sapien
aagcgatccacacacttctgtctcc

SEQ ID NO: 1404311 - DNA, 25 bp, Homo sapien
ttctatatgttgagcttaaacacac

SEQ ID NO: 1404312 - DNA, 25 bp, Homo sapien
cagaaattgtactgttaaactcatt

SEQ ID NO: 1404313 - DNA, 25 bp, Homo sapien
cgcgcccggcgctacatttcagttt

SEQ ID NO: 1404314 - DNA, 25 bp, Homo sapien
taagacttccctataatgctgaata

SEQ ID NO: 1404315 - DNA, 25 bp, Homo sapien
ttttgttcagatcaatatccgggag

SEQ ID NO: 1404316 - DNA, 25 bp, Homo sapien
tcacgcaggtagctaagacttcagg

SEQ ID NO: 1404317 - DNA, 25 bp, Homo sapien
gactttatgctcttgggacctttgt

SEQ ID NO: 1404318 - DNA, 25 bp, Homo sapien
tcttgccaaggtgctcagactagcc

SEQ ID NO: 1404319 - DNA, 25 bp, Homo sapien
taccatataatcgaggaattccact

SEQ ID NO: 1404320 - DNA, 25 bp, Homo sapien
tgtaccacaggtcactaaagtttca

SEQ ID NO: 1404321 - DNA, 25 bp, Homo sapien
cgtagagtttcatcgatctgtggga

SEQ ID NO: 1404322 - DNA, 25 bp, Homo sapien
gccaaggttggtagcaacccaagta

SEQ ID NO: 1404323 - DNA, 25 bp, Homo sapien
tacacttagaaatggggagtctagg

SEQ ID NO: 1404324 - DNA, 25 bp, Homo sapien
atggggagtctaggcaggcgcggtg

SEQ ID NO: 1404325 - DNA, 25 bp, Homo sapien
aaaagttacggagattggttgcaca

SEQ ID NO: 1404326 - DNA, 25 bp, Homo sapien
cttaacactagtgaattaactgtac

SEQ ID NO: 1404327 - DNA, 25 bp, Homo sapien
tgttctactagagtcctaggctctg

SEQ ID NO: 1404328 - DNA, 25 bp, Homo sapien
tcccgtacattgttaagtgtcacct

SEQ ID NO: 1404329 - DNA, 25 bp, Homo sapien
gatgtgttccaattaccagactccc

SEQ ID NO: 1404330 - DNA, 25 bp, Homo sapien
gccaccagggatcaagcagatgtca

SEQ ID NO: 1404331 - DNA, 25 bp, Homo sapien
tagggctacaatttgtgctctctga

SEQ ID NO: 1404332 - DNA, 25 bp, Homo sapien
ttccgggtagggctacaatttgtgc

SEQ ID NO: 1404333 - DNA, 25 bp, Homo sapien
tctcagatgaagaccttttccgggt

SEQ ID NO: 1404334 - DNA, 25 bp, Homo sapien
cagatgaagaccttttccgggtagg

SEQ ID NO: 1404335 - DNA, 25 bp, Homo sapien
tccttcttttggtgacatctggagc

SEQ ID NO: 1404336 - DNA, 25 bp, Homo sapien
ccttcttttggtgacatctggagct

SEQ ID NO: 1404337 - DNA, 25 bp, Homo sapien
cttttggtgacatctggagcttcag

SEQ ID NO: 1404338 - DNA, 25 bp, Homo sapien
ttcttttggtgacatctggagcttc

SEQ ID NO: 1404339 - DNA, 25 bp, Homo sapien
gaatgctaaggtaaaagctgggtcc

SEQ ID NO: 1404340 - DNA, 25 bp, Homo sapien
tacaagagagtatgactcagagcct

SEQ ID NO: 1404341 - DNA, 25 bp, Homo sapien
gctgggtccacaataaaaacagctg

SEQ ID NO: 1404342 - DNA, 25 bp, Homo sapien
tcacagttgatagccaccttggaac

SEQ ID NO: 1404343 - DNA, 25 bp, Homo sapien
ttcttctggaaattcccctaactgc

SEQ ID NO: 1404344 - DNA, 25 bp, Homo sapien
aactaggctatttttcataatgccc

SEQ ID NO: 1404345 - DNA, 25 bp, Homo sapien
tcacacttcctttataggcatatct

SEQ ID NO: 1404346 - DNA, 25 bp, Homo sapien
gaaattcccctaactgcactaacca

SEQ ID NO: 1404347 - DNA, 25 bp, Homo sapien
aagttctgtcatgtgtagccagcca

SEQ ID NO: 1404348 - DNA, 25 bp, Homo sapien
tgcataggtgtgtcttataaacagc

SEQ ID NO: 1404349 - DNA, 25 bp, Homo sapien
taagcctcacttattcttggaggac

SEQ ID NO: 1404350 - DNA, 25 bp, Homo sapien
tgctctgccaattttagaatccagg

SEQ ID NO: 1404351 - DNA, 25 bp, Homo sapien
acttaacaatttgtattctgctgta

SEQ ID NO: 1404352 - DNA, 25 bp, Homo sapien
gaatactcgtatgtcctttacccaa

SEQ ID NO: 1404353 - DNA, 25 bp, Homo sapien
ccttttttcactgtcaatctgggat

SEQ ID NO: 1404354 - DNA, 25 bp, Homo sapien
tcatcaattatcagtttgagatatg

SEQ ID NO: 1404355 - DNA, 25 bp, Homo sapien
gagagtacatgatatcaccatgcct

SEQ ID NO: 1404356 - DNA, 25 bp, Homo sapien
ttggaccactgggagacatttcagg

SEQ ID NO: 1404357 - DNA, 25 bp, Homo sapien
ttaagttccacctcctgaaagtgtg

SEQ ID NO: 1404358 - DNA, 25 bp, Homo sapien
gtcagcagtccagtccatattcaag

SEQ ID NO: 1404359 - DNA, 25 bp, Homo sapien
ttgccactatacaaatggctctcag

SEQ ID NO: 1404360 - DNA, 25 bp, Homo sapien
tctcagacacaagacaaactaaccg

SEQ ID NO: 1404361 - DNA, 25 bp, Homo sapien
agcctccagaaatctaacatttgcc

SEQ ID NO: 1404362 - DNA, 25 bp, Homo sapien
aaagccaatcatccactttcagtac

SEQ ID NO: 1404363 - DNA, 25 bp, Homo sapien
caagacctttaaagtcagtccctca

SEQ ID NO: 1404364 - DNA, 25 bp, Homo sapien
taagcacagtaacacatccccatgc

SEQ ID NO: 1404365 - DNA, 25 bp, Homo sapien
tattaagaaccgtcaggctgtgcgc

SEQ ID NO: 1404366 - DNA, 25 bp, Homo sapien
tgctccccaaaatgccttgtaagta

SEQ ID NO: 1404367 - DNA, 25 bp, Homo sapien
gaaagcctgaggtaacttcaagatg

SEQ ID NO: 1404368 - DNA, 25 bp, Homo sapien
taattacccaagtgacaggaatgtc

SEQ ID NO: 1404369 - DNA, 25 bp, Homo sapien
tgttacgacagtgagatgaaagcct

SEQ ID NO: 1404370 - DNA, 25 bp, Homo sapien
ccagttctgactttcaaagggatca

SEQ ID NO: 1404371 - DNA, 25 bp, Homo sapien
gacatttagtcttaacaatatatat

SEQ ID NO: 1404372 - DNA, 25 bp, Homo sapien
tcaagtgatacttcaacctcacctc

SEQ ID NO: 1404373 - DNA, 25 bp, Homo sapien
agtgatcaacttgccacagcctcct

SEQ ID NO: 1404374 - DNA, 25 bp, Homo sapien
cacagcttacagtagcagccttgaa

SEQ ID NO: 1404375 - DNA, 25 bp, Homo sapien
tgagaactagatacccaacgacctt

SEQ ID NO: 1404376 - DNA, 25 bp, Homo sapien
tcaaatcctccgcttcaacgttcag

SEQ ID NO: 1404377 - DNA, 25 bp, Homo sapien
tgctctgcttataaagttgcacagg

SEQ ID NO: 1404378 - DNA, 25 bp, Homo sapien
ggtcaagcttctctactaagcctga

SEQ ID NO: 1404379 - DNA, 25 bp, Homo sapien
taaaaatgcaaacctaaaatcaata

SEQ ID NO: 1404380 - DNA, 25 bp, Homo sapien
tcctctttcaccacgatgaagcttt

SEQ ID NO: 1404381 - DNA, 25 bp, Homo sapien
catccagtgttcatgcagaaggcaa

SEQ ID NO: 1404382 - DNA, 25 bp, Homo sapien
tatccaatatctaaactccttccca

SEQ ID NO: 1404383 - DNA, 25 bp, Homo sapien
gctgcaaaatgaagtctgtctgaat

SEQ ID NO: 1404384 - DNA, 25 bp, Homo sapien
caaaatgaagtctgtctgaatgaat

SEQ ID NO: 1404385 - DNA, 25 bp, Homo sapien
tgctgcaaaatgaagtctgtctgaa

SEQ ID NO: 1404386 - DNA, 25 bp, Homo sapien
tgcaaaatgaagtctgtctgaatga

SEQ ID NO: 1404387 - DNA, 25 bp, Homo sapien
tgcatttataactactggattaata

SEQ ID NO: 1404388 - DNA, 25 bp, Homo sapien
catttataactactggattaatata

SEQ ID NO: 1404389 - DNA, 25 bp, Homo sapien
tccagcattaccttttacctcttgg

SEQ ID NO: 1404390 - DNA, 25 bp, Homo sapien
ccagcattaccttttacctcttggg

SEQ ID NO: 1404391 - DNA, 25 bp, Homo sapien
cattccctacttcttaaatcttaag

SEQ ID NO: 1404392 - DNA, 25 bp, Homo sapien
aatcttaaggaaaaggaatactgag

SEQ ID NO: 1404393 - DNA, 25 bp, Homo sapien
aaataatatagacattccctacttc

SEQ ID NO: 1404394 - DNA, 25 bp, Homo sapien
tatagacattccctacttcttaaat

SEQ ID NO: 1404395 - DNA, 25 bp, Homo sapien
caacaaagtaggaggagataaccgc

SEQ ID NO: 1404396 - DNA, 25 bp, Homo sapien
attctgaaggctctcggtggaccca

SEQ ID NO: 1404397 - DNA, 25 bp, Homo sapien
taacctaatcctatgggagcagctg

SEQ ID NO: 1404398 - DNA, 25 bp, Homo sapien
tgctggttgtaagaaaggcctcctg

SEQ ID NO: 1404399 - DNA, 25 bp, Homo sapien
gaataccgctgtagtgccagttccc

SEQ ID NO: 1404400 - DNA, 25 bp, Homo sapien
ccattttaaagtccggagaagtgca

SEQ ID NO: 1404401 - DNA, 25 bp, Homo sapien
caggatcccggctaccaagaagagt

SEQ ID NO: 1404402 - DNA, 25 bp, Homo sapien
gacctatgaccaacgttcaagtggg

SEQ ID NO: 1404403 - DNA, 25 bp, Homo sapien
tgtgcaaatatcaccactactttaa

SEQ ID NO: 1404404 - DNA, 25 bp, Homo sapien
tacgtatacttcctcacaaacttga

SEQ ID NO: 1404405 - DNA, 25 bp, Homo sapien
tctagagataagacactcactttgt

SEQ ID NO: 1404406 - DNA, 25 bp, Homo sapien
tcggactgtttttccatacgtatac

SEQ ID NO: 1404407 - DNA, 25 bp, Homo sapien
caactgtgtgtggagttggtgccca

SEQ ID NO: 1404408 - DNA, 25 bp, Homo sapien
catggaagcattagttagtcacaac

SEQ ID NO: 1404409 - DNA, 25 bp, Homo sapien
aatgaagacgataaggatgacaacc

SEQ ID NO: 1404410 - DNA, 25 bp, Homo sapien
cagtgattttccgtctgccagtcca

SEQ ID NO: 1404411 - DNA, 25 bp, Homo sapien
gcagatatcctagctatgaaagtga

SEQ ID NO: 1404412 - DNA, 25 bp, Homo sapien
catttaagggagctcatgcttccgt

SEQ ID NO: 1404413 - DNA, 25 bp, Homo sapien
tcttcaatcagccaaatgcagtact

SEQ ID NO: 1404414 - DNA, 25 bp, Homo sapien
gcagagcccaatggcagggatttgc

SEQ ID NO: 1404415 - DNA, 25 bp, Homo sapien
tgccccaatattatatagcttgact

SEQ ID NO: 1404416 - DNA, 25 bp, Homo sapien
tttcactctctcatgaagaccaggg

SEQ ID NO: 1404417 - DNA, 25 bp, Homo sapien
gataaagaagctctacgaatctgcc

SEQ ID NO: 1404418 - DNA, 25 bp, Homo sapien
aataaaagtcaggtacttatctgac

SEQ ID NO: 1404419 - DNA, 25 bp, Homo sapien
aaatggcagacaccacatgtaactg

SEQ ID NO: 1404420 - DNA, 25 bp, Homo sapien
catgtaactgcatcaaagccaaaca

SEQ ID NO: 1404421 - DNA, 25 bp, Homo sapien
caatcacgtattatgtaactccaaa

SEQ ID NO: 1404422 - DNA, 25 bp, Homo sapien
gaatgtaccattctgacagcttatg

SEQ ID NO: 1404423 - DNA, 25 bp, Homo sapien
acaatctcaataggagttccagggc

SEQ ID NO: 1404424 - DNA, 25 bp, Homo sapien
cacaatctcaataggagttccaggg

SEQ ID NO: 1404425 - DNA, 25 bp, Homo sapien
tcacaatctcaataggagttccagg

SEQ ID NO: 1404426 - DNA, 25 bp, Homo sapien
aatgtacagtacagcggtggttcag

SEQ ID NO: 1404427 - DNA, 25 bp, Homo sapien
cagtcattcggcattttacacacca

SEQ ID NO: 1404428 - DNA, 25 bp, Homo sapien
caaccggcaacaaccagatcagtgg

SEQ ID NO: 1404429 - DNA, 25 bp, Homo sapien
gaggaactcggcaacttcaaccatt

SEQ ID NO: 1404430 - DNA, 25 bp, Homo sapien
gaattatctctgttggcagacgaca

SEQ ID NO: 1404431 - DNA, 25 bp, Homo sapien
ccactaaagaggttgcttgaccaca

SEQ ID NO: 1404432 - DNA, 25 bp, Homo sapien
caaaatcagttgtggccaacacagt

SEQ ID NO: 1404433 - DNA, 25 bp, Homo sapien
cctattcagtaatggccattgggag

SEQ ID NO: 1404434 - DNA, 25 bp, Homo sapien
gcaggtcgacatacatagttctcca

SEQ ID NO: 1404435 - DNA, 25 bp, Homo sapien
cagtactgatggcagaaggactctt

SEQ ID NO: 1404436 - DNA, 25 bp, Homo sapien
gattccgtttgcgaaggtcctcttc

SEQ ID NO: 1404437 - DNA, 25 bp, Homo sapien
gctgtgcatcagtcaaaccatcatc

SEQ ID NO: 1404438 - DNA, 25 bp, Homo sapien
cttcggaatcagaacccaatcctaa

SEQ ID NO: 1404439 - DNA, 25 bp, Homo sapien
cggaatcagaacccaatcctaacat

SEQ ID NO: 1404440 - DNA, 25 bp, Homo sapien
ttcggaatcagaacccaatcctaac

SEQ ID NO: 1404441 - DNA, 25 bp, Homo sapien
tcggaatcagaacccaatcctaaca

SEQ ID NO: 1404442 - DNA, 25 bp, Homo sapien
tgttattgccaaggaatcttatgaa

SEQ ID NO: 1404443 - DNA, 25 bp, Homo sapien
gcgtatgttattgccaaggaatctt

SEQ ID NO: 1404444 - DNA, 25 bp, Homo sapien
caagcgtatgttattgccaaggaat

SEQ ID NO: 1404445 - DNA, 25 bp, Homo sapien
cacaagcgtatgttattgccaagga

SEQ ID NO: 1404446 - DNA, 25 bp, Homo sapien
gcccagccagagactagtgaatata

SEQ ID NO: 1404447 - DNA, 25 bp, Homo sapien
aacaagtcagtattcttgaagactg

SEQ ID NO: 1404448 - DNA, 25 bp, Homo sapien
tcaaacatatgtctgagtcaagatc

SEQ ID NO: 1404449 - DNA, 25 bp, Homo sapien
gacagactagtcttcatgtcaaaca

SEQ ID NO: 1404450 - DNA, 25 bp, Homo sapien
cagagggaggcagtgtaacaacata

SEQ ID NO: 1404451 - DNA, 25 bp, Homo sapien
gaactggagatacaatagtacaaaa

SEQ ID NO: 1404452 - DNA, 25 bp, Homo sapien
ttctagaagtatgccaggatgagac

SEQ ID NO: 1404453 - DNA, 25 bp, Homo sapien
tggtatggtggtaccatttggagac

SEQ ID NO: 1404454 - DNA, 25 bp, Homo sapien
gcagagcaagagcaaataaccacca

SEQ ID NO: 1404455 - DNA, 25 bp, Homo sapien
gttaactgcccctacatatctctgg

SEQ ID NO: 1404456 - DNA, 25 bp, Homo sapien
cagtctcagaagctagtcctgctat

SEQ ID NO: 1404457 - DNA, 25 bp, Homo sapien
aattttgtgcaaagtactcacggcc

SEQ ID NO: 1404458 - DNA, 25 bp, Homo sapien
tctagaaacttagaacaggaaagtg

SEQ ID NO: 1404459 - DNA, 25 bp, Homo sapien
ggaggaaagtatgcatctcatgacc

SEQ ID NO: 1404460 - DNA, 25 bp, Homo sapien
gtattataccaacaagtccttctag

SEQ ID NO: 1404461 - DNA, 25 bp, Homo sapien
cagtaaccatttctaactctcaaag

SEQ ID NO: 1404462 - DNA, 25 bp, Homo sapien
tagcctctgaactggtcaacctggt

SEQ ID NO: 1404463 - DNA, 25 bp, Homo sapien
ttgaacacaccaacaggtactcctg

SEQ ID NO: 1404464 - DNA, 25 bp, Homo sapien
tatgttatctggtccctggctacct

SEQ ID NO: 1404465 - DNA, 25 bp, Homo sapien
tatcagatcaagtcatttccctgct

SEQ ID NO: 1404466 - DNA, 25 bp, Homo sapien
cagccactcaaagtgtaagccactg

SEQ ID NO: 1404467 - DNA, 25 bp, Homo sapien
caaagcgaacccaaaatggcggcgg

SEQ ID NO: 1404468 - DNA, 25 bp, Homo sapien
tcccgcttgtcaggaggcggccagc

SEQ ID NO: 1404469 - DNA, 25 bp, Homo sapien
gactggcggaaatgcgagagaggag

SEQ ID NO: 1404470 - DNA, 25 bp, Homo sapien
ggatccctcccgcttgtcaggaggc

SEQ ID NO: 1404471 - DNA, 25 bp, Homo sapien
gatggtacttcttcagcctcgttag

SEQ ID NO: 1404472 - DNA, 25 bp, Homo sapien
gagaactagtcctcgactcacggtg

SEQ ID NO: 1404473 - DNA, 25 bp, Homo sapien
tgacgcacttactcatggatggtac

SEQ ID NO: 1404474 - DNA, 25 bp, Homo sapien
tgccggtcgcctagtcaggagaact

SEQ ID NO: 1404475 - DNA, 25 bp, Homo sapien
ctgggagacgagagtgaaactcctt

SEQ ID NO: 1404476 - DNA, 25 bp, Homo sapien
cgagagtgaaactccttctcaaaaa

SEQ ID NO: 1404477 - DNA, 25 bp, Homo sapien
acgagagtgaaactccttctcaaaa

SEQ ID NO: 1404478 - DNA, 25 bp, Homo sapien
gacgagagtgaaactccttctcaaa

SEQ ID NO: 1404479 - DNA, 25 bp, Homo sapien
tctccttcactggtacagccgactc

SEQ ID NO: 1404480 - DNA, 25 bp, Homo sapien
tttggcagttctgctagtttgacat

SEQ ID NO: 1404481 - DNA, 25 bp, Homo sapien
ttagtttggcagttctgctagtttg

SEQ ID NO: 1404482 - DNA, 25 bp, Homo sapien
agtttggcagttctgctagtttgac

SEQ ID NO: 1404483 - DNA, 25 bp, Homo sapien
tatttaagacggaagaaatttgaga

SEQ ID NO: 1404484 - DNA, 25 bp, Homo sapien
agtagcgggccatgtaatggctggg

SEQ ID NO: 1404485 - DNA, 25 bp, Homo sapien
acgtaattcttggtagggtactcag

SEQ ID NO: 1404486 - DNA, 25 bp, Homo sapien
gacgtaattcttggtagggtactca

SEQ ID NO: 1404487 - DNA, 25 bp, Homo sapien
tcagacgtaattcttggtagggtac

SEQ ID NO: 1404488 - DNA, 25 bp, Homo sapien
cacaggtggtacacttggccccagc

SEQ ID NO: 1404489 - DNA, 25 bp, Homo sapien
cagcaacaaaaggcctgaggccgcc

SEQ ID NO: 1404490 - DNA, 25 bp, Homo sapien
gaggtgagcaccaggcgggccttgg

SEQ ID NO: 1404491 - DNA, 25 bp, Homo sapien
caaggtagaccagcaagccgaacag

SEQ ID NO: 1404492 - DNA, 25 bp, Homo sapien
cagcccagcagtgtcaggacgactc

SEQ ID NO: 1404493 - DNA, 25 bp, Homo sapien
gcagtgtcaggacgactcccaggat

SEQ ID NO: 1404494 - DNA, 25 bp, Homo sapien
cagcagtgtcaggacgactcccagg

SEQ ID NO: 1404495 - DNA, 25 bp, Homo sapien
gtgtcaggacgactcccaggatctg

SEQ ID NO: 1404496 - DNA, 25 bp, Homo sapien
tgcctgccgggttcactccattctc

SEQ ID NO: 1404497 - DNA, 25 bp, Homo sapien
gccgggttcactccattctcccacc

SEQ ID NO: 1404498 - DNA, 25 bp, Homo sapien
tctgcctgccgggttcactccattc

SEQ ID NO: 1404499 - DNA, 25 bp, Homo sapien
ctgccgggttcactccattctccca

SEQ ID NO: 1404500 - DNA, 25 bp, Homo sapien
gatcttatgagcctgggaagccaag

SEQ ID NO: 1404501 - DNA, 25 bp, Homo sapien
ggttggaggatcttatgagcctggg

SEQ ID NO: 1404502 - DNA, 25 bp, Homo sapien
aaggcctcagtgagcggtgattgca

SEQ ID NO: 1404503 - DNA, 25 bp, Homo sapien
agccaaggcctcagtgagcggtgat

SEQ ID NO: 1404504 - DNA, 25 bp, Homo sapien
taaataggcaacagtaagttgttcc

SEQ ID NO: 1404505 - DNA, 25 bp, Homo sapien
gacaatatctttttagggaaccaga

SEQ ID NO: 1404506 - DNA, 25 bp, Homo sapien
tcgcaagcacatttccaactacatg

SEQ ID NO: 1404507 - DNA, 25 bp, Homo sapien
tgacttttcaaggtacagcctccaa

SEQ ID NO: 1404508 - DNA, 25 bp, Homo sapien
gctatgcggtgtggccagccaactc

SEQ ID NO: 1404509 - DNA, 25 bp, Homo sapien
caactcaaggaggacgaagcaacct

SEQ ID NO: 1404510 - DNA, 25 bp, Homo sapien
cctttgcctctaaactgcctggaac

SEQ ID NO: 1404511 - DNA, 25 bp, Homo sapien
ttttcctaaggactgcgactcggtg

SEQ ID NO: 1404512 - DNA, 25 bp, Homo sapien
attcagggcggggaataataacctg

SEQ ID NO: 1404513 - DNA, 25 bp, Homo sapien
gagaagtaaacagtcacacagtggg

SEQ ID NO: 1404514 - DNA, 25 bp, Homo sapien
ttctcatcctgctaactatcttttg

SEQ ID NO: 1404515 - DNA, 25 bp, Homo sapien
gtggaacttagagaagtaaacagtc

SEQ ID NO: 1404516 - DNA, 25 bp, Homo sapien
tcctgattccctgatgcagtttgga

SEQ ID NO: 1404517 - DNA, 25 bp, Homo sapien
tgcagtttggaggagccaccccatg

SEQ ID NO: 1404518 - DNA, 25 bp, Homo sapien
tatctccattcctggattaaaagtg

SEQ ID NO: 1404519 - DNA, 25 bp, Homo sapien
atctccattcctggattaaaagtgc

SEQ ID NO: 1404520 - DNA, 25 bp, Homo sapien
actatctccattcctggattaaaag

SEQ ID NO: 1404521 - DNA, 25 bp, Homo sapien
tttactatctccattcctggattaa

SEQ ID NO: 1404522 - DNA, 25 bp, Homo sapien
ttccttatcagtttggcagagtccc

SEQ ID NO: 1404523 - DNA, 25 bp, Homo sapien
agctgaactccactctcgatgctac

SEQ ID NO: 1404524 - DNA, 25 bp, Homo sapien
actccactctcgatgctacttacag

SEQ ID NO: 1404525 - DNA, 25 bp, Homo sapien
gttggacttccttatcagtttggca

SEQ ID NO: 1404526 - DNA, 25 bp, Homo sapien
tgcatgagttctcgaaaatggtggg

SEQ ID NO: 1404527 - DNA, 25 bp, Homo sapien
ctgcatgagttctcgaaaatggtgg

SEQ ID NO: 1404528 - DNA, 25 bp, Homo sapien
gctgcatgagttctcgaaaatggtg

SEQ ID NO: 1404529 - DNA, 25 bp, Homo sapien
gcatgagttctcgaaaatggtggga

SEQ ID NO: 1404530 - DNA, 25 bp, Homo sapien
agggctgtattcactgatccttagt

SEQ ID NO: 1404531 - DNA, 25 bp, Homo sapien
gctgtattcactgatccttagtaac

SEQ ID NO: 1404532 - DNA, 25 bp, Homo sapien
gtattcactgatccttagtaacatg

SEQ ID NO: 1404533 - DNA, 25 bp, Homo sapien
cactgatccttagtaacatgttaac

SEQ ID NO: 1404534 - DNA, 25 bp, Homo sapien
gccccttgctcctggcacatggtga

SEQ ID NO: 1404535 - DNA, 25 bp, Homo sapien
cagctgctgggagatgatgctgaag

SEQ ID NO: 1404536 - DNA, 25 bp, Homo sapien
agcaggggtcttatttcccagctgc

SEQ ID NO: 1404537 - DNA, 25 bp, Homo sapien
ggtgaggatcacacggtcagcttcc

SEQ ID NO: 1404538 - DNA, 25 bp, Homo sapien
cacacaccgtagcttctgtggcctt

SEQ ID NO: 1404539 - DNA, 25 bp, Homo sapien
gcacacaccgtagcttctgtggcct

SEQ ID NO: 1404540 - DNA, 25 bp, Homo sapien
acacaccgtagcttctgtggccttt

SEQ ID NO: 1404541 - DNA, 25 bp, Homo sapien
ttggcacacaccgtagcttctgtgg

SEQ ID NO: 1404542 - DNA, 25 bp, Homo sapien
ggggctttgggagaagtctctgagg

SEQ ID NO: 1404543 - DNA, 25 bp, Homo sapien
ctttgggagaagtctctgaggtgtc

SEQ ID NO: 1404544 - DNA, 25 bp, Homo sapien
ggctttgggagaagtctctgaggtg

SEQ ID NO: 1404545 - DNA, 25 bp, Homo sapien
taggggctttgggagaagtctctga

SEQ ID NO: 1404546 - DNA, 25 bp, Homo sapien
ctcttgagtgtctggtttcccggac

SEQ ID NO: 1404547 - DNA, 25 bp, Homo sapien
ggtttcccggacacatgtcttctcc

SEQ ID NO: 1404548 - DNA, 25 bp, Homo sapien
gagtgtctggtttcccggacacatg

SEQ ID NO: 1404549 - DNA, 25 bp, Homo sapien
tctggtttcccggacacatgtcttc

SEQ ID NO: 1404550 - DNA, 25 bp, Homo sapien
ggtaccaggcaatttctcagtttct

SEQ ID NO: 1404551 - DNA, 25 bp, Homo sapien
cccagaccagcatcaaagcctctga

SEQ ID NO: 1404552 - DNA, 25 bp, Homo sapien
cacggtaccaggcaatttctcagtt

SEQ ID NO: 1404553 - DNA, 25 bp, Homo sapien
gttccacggtaccaggcaatttctc

SEQ ID NO: 1404554 - DNA, 25 bp, Homo sapien
aggggatggcaaagtgccccccact

SEQ ID NO: 1404555 - DNA, 25 bp, Homo sapien
gaggggatggcaaagtgccccccac

SEQ ID NO: 1404556 - DNA, 25 bp, Homo sapien
ggaggagccgttctgtaagagtcac

SEQ ID NO: 1404557 - DNA, 25 bp, Homo sapien
gaggagccgttctgtaagagtcact

SEQ ID NO: 1404558 - DNA, 25 bp, Homo sapien
ctgaaataggcatctctctttctgg

SEQ ID NO: 1404559 - DNA, 25 bp, Homo sapien
gatcttctgggtcaaaggtgtcctg

SEQ ID NO: 1404560 - DNA, 25 bp, Homo sapien
atgatcttctgggtcaaaggtgtcc

SEQ ID NO: 1404561 - DNA, 25 bp, Homo sapien
ttctgggtcaaaggtgtcctgaccg

SEQ ID NO: 1404562 - DNA, 25 bp, Homo sapien
tcttctgggtcaaaggtgtcctgac

SEQ ID NO: 1404563 - DNA, 25 bp, Homo sapien
ggcccaccaaaggaagaagccctgc

SEQ ID NO: 1404564 - DNA, 25 bp, Homo sapien
ggctcttctcaaaagcctgctgctc

SEQ ID NO: 1404565 - DNA, 25 bp, Homo sapien
ccagctgccgaaggaacttgcggct

SEQ ID NO: 1404566 - DNA, 25 bp, Homo sapien
ccttggaggaccttgataatcttct

SEQ ID NO: 1404567 - DNA, 25 bp, Homo sapien
cttggaggaccttgataatcttctg

SEQ ID NO: 1404568 - DNA, 25 bp, Homo sapien
caatcccttagtttgcagctataac

SEQ ID NO: 1404569 - DNA, 25 bp, Homo sapien
caggctgcagctagagcttaaactc

SEQ ID NO: 1404570 - DNA, 25 bp, Homo sapien
ccctatatgattggttgaaggttca

SEQ ID NO: 1404571 - DNA, 25 bp, Homo sapien
gcttgggtgtcttatacttatatcc

SEQ ID NO: 1404572 - DNA, 25 bp, Homo sapien
aattctggagggctactgctgctaa

SEQ ID NO: 1404573 - DNA, 25 bp, Homo sapien
ggtgaccagtgaatctgcaactcgt

SEQ ID NO: 1404574 - DNA, 25 bp, Homo sapien
tgtcatcatttaactcttgtgataa

SEQ ID NO: 1404575 - DNA, 25 bp, Homo sapien
agagttaagctagctttgtaaggtg

SEQ ID NO: 1404576 - DNA, 25 bp, Homo sapien
tttcttaacacataacaaaatggag

SEQ ID NO: 1404577 - DNA, 25 bp, Homo sapien
gaagaatttttcttaacacataaca

SEQ ID NO: 1404578 - DNA, 25 bp, Homo sapien
tgatcatctgtgggtgtttctcaaa

SEQ ID NO: 1404579 - DNA, 25 bp, Homo sapien
catctgtgggtgtttctcaaagagg

SEQ ID NO: 1404580 - DNA, 25 bp, Homo sapien
ctctcttgcttttccccacatttcc

SEQ ID NO: 1404581 - DNA, 25 bp, Homo sapien
tgatctctcttgcttttccccacat

SEQ ID NO: 1404582 - DNA, 25 bp, Homo sapien
tctcttgcttttccccacatttccc

SEQ ID NO: 1404583 - DNA, 25 bp, Homo sapien
atctctcttgcttttccccacattt

SEQ ID NO: 1404584 - DNA, 25 bp, Homo sapien
agttcagccggaggccagtattgat

SEQ ID NO: 1404585 - DNA, 25 bp, Homo sapien
tgaagttcagccggaggccagtatt

SEQ ID NO: 1404586 - DNA, 25 bp, Homo sapien
tactgaagttcagccggaggccagt

SEQ ID NO: 1404587 - DNA, 25 bp, Homo sapien
tcagccggaggccagtattgatagg

SEQ ID NO: 1404588 - DNA, 25 bp, Homo sapien
cgagaagtcttctcctgatcaaagg

SEQ ID NO: 1404589 - DNA, 25 bp, Homo sapien
gaaatcctgaatgtgtccccagaaa

SEQ ID NO: 1404590 - DNA, 25 bp, Homo sapien
tcttttcttgattgaagggttcgtg

SEQ ID NO: 1404591 - DNA, 25 bp, Homo sapien
tccccagaaatgagacgagaagtct

SEQ ID NO: 1404592 - DNA, 25 bp, Homo sapien
aagaagccatggacctcagtggtga

SEQ ID NO: 1404593 - DNA, 25 bp, Homo sapien
aaagaagccatggacctcagtggtg

SEQ ID NO: 1404594 - DNA, 25 bp, Homo sapien
gaaagaagccatggacctcagtggt

SEQ ID NO: 1404595 - DNA, 25 bp, Homo sapien
taaaccgagctgtagcctcagccag

SEQ ID NO: 1404596 - DNA, 25 bp, Homo sapien
tcaagggccttcaggtaaaccgagc

SEQ ID NO: 1404597 - DNA, 25 bp, Homo sapien
acatgatggctaggccctctgtgaa

SEQ ID NO: 1404598 - DNA, 25 bp, Homo sapien
gctggcaggcatgctaactgtttta

SEQ ID NO: 1404599 - DNA, 25 bp, Homo sapien
aaacatgtcccttgaaggagaagca

SEQ ID NO: 1404600 - DNA, 25 bp, Homo sapien
tgtcccttgaaggagaagcagccac

SEQ ID NO: 1404601 - DNA, 25 bp, Homo sapien
atgtcccttgaaggagaagcagcca

SEQ ID NO: 1404602 - DNA, 25 bp, Homo sapien
ttaaaacatgtcccttgaaggagaa

SEQ ID NO: 1404603 - DNA, 25 bp, Homo sapien
aactggcagtaacaggaagcaacat

SEQ ID NO: 1404604 - DNA, 25 bp, Homo sapien
ctggcagtaacaggaagcaacattt

SEQ ID NO: 1404605 - DNA, 25 bp, Homo sapien
actggcagtaacaggaagcaacatt

SEQ ID NO: 1404606 - DNA, 25 bp, Homo sapien
gagggggtcttgctcaagaatgtcc

SEQ ID NO: 1404607 - DNA, 25 bp, Homo sapien
agccaagtccttctgctccctgagg

SEQ ID NO: 1404608 - DNA, 25 bp, Homo sapien
ttgggcaaaagccaagtccttctgc

SEQ ID NO: 1404609 - DNA, 25 bp, Homo sapien
gtcttgctcaagaatgtcctcatca

SEQ ID NO: 1404610 - DNA, 25 bp, Homo sapien
aacttccccacttgttgcaagctct

SEQ ID NO: 1404611 - DNA, 25 bp, Homo sapien
caagctctatgattgtttcggcctt

SEQ ID NO: 1404612 - DNA, 25 bp, Homo sapien
gtccttgctggccagaccccaactt

SEQ ID NO: 1404613 - DNA, 25 bp, Homo sapien
tgttgcaagctctatgattgtttcg

SEQ ID NO: 1404614 - DNA, 25 bp, Homo sapien
tctctgtccctgcaacccgtgctct

SEQ ID NO: 1404615 - DNA, 25 bp, Homo sapien
ctctgtccctgcaacccgtgctctt

SEQ ID NO: 1404616 - DNA, 25 bp, Homo sapien
tctgtccctgcaacccgtgctcttc

SEQ ID NO: 1404617 - DNA, 25 bp, Homo sapien
ccaagattgtgccactgcactccag

SEQ ID NO: 1404618 - DNA, 25 bp, Homo sapien
cctgggcaacgagagtgaaactccg

SEQ ID NO: 1404619 - DNA, 25 bp, Homo sapien
gaggttgcagagagccaagattgtg

SEQ ID NO: 1404620 - DNA, 25 bp, Homo sapien
gagaatctattgaagctgggaggtg

SEQ ID NO: 1404621 - DNA, 25 bp, Homo sapien
agagtctccaactgcttcatccgtc

SEQ ID NO: 1404622 - DNA, 25 bp, Homo sapien
agtctccaactgcttcatccgtcat

SEQ ID NO: 1404623 - DNA, 25 bp, Homo sapien
gagtctccaactgcttcatccgtca

SEQ ID NO: 1404624 - DNA, 25 bp, Homo sapien
ccggctcagagttctcctcctgaga

SEQ ID NO: 1404625 - DNA, 25 bp, Homo sapien
ttccggctcagagttctcctcctga

SEQ ID NO: 1404626 - DNA, 25 bp, Homo sapien
cagagttctcctcctgagaattctc

SEQ ID NO: 1404627 - DNA, 25 bp, Homo sapien
tcttcttccggctcagagttctcct

SEQ ID NO: 1404628 - DNA, 25 bp, Homo sapien
ttttcagatgccagccaagtcagtt

SEQ ID NO: 1404629 - DNA, 25 bp, Homo sapien
gccaagtcagtttctccattgtttc

SEQ ID NO: 1404630 - DNA, 25 bp, Homo sapien
gcgccttttcagatgccagccaagt

SEQ ID NO: 1404631 - DNA, 25 bp, Homo sapien
agatgccagccaagtcagtttctcc

SEQ ID NO: 1404632 - DNA, 25 bp, Homo sapien
acaaaatacttgagagtattctcta

SEQ ID NO: 1404633 - DNA, 25 bp, Homo sapien
caagcaggtggcatatcaataagtt

SEQ ID NO: 1404634 - DNA, 25 bp, Homo sapien
gttaaacatattactgagtccacaa

SEQ ID NO: 1404635 - DNA, 25 bp, Homo sapien
taaacatattactgagtccacaaaa

SEQ ID NO: 1404636 - DNA, 25 bp, Homo sapien
tctggtccaactggggtccccactg

SEQ ID NO: 1404637 - DNA, 25 bp, Homo sapien
cttcctcattttgggtgaggtcatc

SEQ ID NO: 1404638 - DNA, 25 bp, Homo sapien
ctttttctggcctatctttctctcc

SEQ ID NO: 1404639 - DNA, 25 bp, Homo sapien
cacagattcctcagaagctgatgac

SEQ ID NO: 1404640 - DNA, 25 bp, Homo sapien
tcaacactggatgagtctttgggct

SEQ ID NO: 1404641 - DNA, 25 bp, Homo sapien
aacactggatgagtctttgggcttc

SEQ ID NO: 1404642 - DNA, 25 bp, Homo sapien
ccatcaacactggatgagtctttgg

SEQ ID NO: 1404643 - DNA, 25 bp, Homo sapien
ctgaccatcaacactggatgagtct

SEQ ID NO: 1404644 - DNA, 25 bp, Homo sapien
tcacttcaggattcatggaggatga

SEQ ID NO: 1404645 - DNA, 25 bp, Homo sapien
gatgaagcattatttggtgatcctt

SEQ ID NO: 1404646 - DNA, 25 bp, Homo sapien
cttgatgtcatcacaaataccgtgc

SEQ ID NO: 1404647 - DNA, 25 bp, Homo sapien
tcagggtgttaccagtggacggtct

SEQ ID NO: 1404648 - DNA, 25 bp, Homo sapien
tcattccctggatagaagccctgct

SEQ ID NO: 1404649 - DNA, 25 bp, Homo sapien
acaggatgacttcttgttggccggg

SEQ ID NO: 1404650 - DNA, 25 bp, Homo sapien
gcaaatgaagatttcgcctgcgacc

SEQ ID NO: 1404651 - DNA, 25 bp, Homo sapien
gacgtagcccatgaccaattggagg

SEQ ID NO: 1404652 - DNA, 25 bp, Homo sapien
tatgcagcatagacaccaaggagag

SEQ ID NO: 1404653 - DNA, 25 bp, Homo sapien
tatagtggctgacggaagcttcaag

SEQ ID NO: 1404654 - DNA, 25 bp, Homo sapien
aggaaatgattccatccatttggaa

SEQ ID NO: 1404655 - DNA, 25 bp, Homo sapien
ggagagttggtaggcattcacttat

SEQ ID NO: 1404656 - DNA, 25 bp, Homo sapien
ggcgtggccaacaccactgaaaaag

SEQ ID NO: 1404657 - DNA, 25 bp, Homo sapien
gacgtatccaacttctaatcctggt

SEQ ID NO: 1404658 - DNA, 25 bp, Homo sapien
ctagaaagacgtatccaacttctaa

SEQ ID NO: 1404659 - DNA, 25 bp, Homo sapien
actttgactacagaaggcgtggcca

SEQ ID NO: 1404660 - DNA, 25 bp, Homo sapien
gcctgagtgtgaattcgccctgaat

SEQ ID NO: 1404661 - DNA, 25 bp, Homo sapien
aaagagaactcaggtctgtcaccca

SEQ ID NO: 1404662 - DNA, 25 bp, Homo sapien
cctgaatgagctaccactgccaatg

SEQ ID NO: 1404663 - DNA, 25 bp, Homo sapien
aggaaacaaggtcccctcagtggag

SEQ ID NO: 1404664 - DNA, 25 bp, Homo sapien
ttgaatgaagaactgaacaaattgc

SEQ ID NO: 1404665 - DNA, 25 bp, Homo sapien
aatgttgaatgaagaactgaacaaa

SEQ ID NO: 1404666 - DNA, 25 bp, Homo sapien
cggagggtcttgactacaatttgtc

SEQ ID NO: 1404667 - DNA, 25 bp, Homo sapien
aaaatatgttactgtcggagggtct

SEQ ID NO: 1404668 - DNA, 25 bp, Homo sapien
cagatttattgaagcaaaagtatat

SEQ ID NO: 1404669 - DNA, 25 bp, Homo sapien
gatttattgaagcaaaagtatattc

SEQ ID NO: 1404670 - DNA, 25 bp, Homo sapien
tttattgaagcaaaagtatattcca

SEQ ID NO: 1404671 - DNA, 25 bp, Homo sapien
ttattgaagcaaaagtatattccac

SEQ ID NO: 1404672 - DNA, 25 bp, Homo sapien
tcaagagccccagttgcaaaatctg

SEQ ID NO: 1404673 - DNA, 25 bp, Homo sapien
tggttacaccctatgcgccaccaat

SEQ ID NO: 1404674 - DNA, 25 bp, Homo sapien
ccaccaatcggaggccgaagtgaag

SEQ ID NO: 1404675 - DNA, 25 bp, Homo sapien
aagagccccagttgcaaaatctggg

SEQ ID NO: 1404676 - DNA, 25 bp, Homo sapien
tcttggcactgtttatcgactggtg

SEQ ID NO: 1404677 - DNA, 25 bp, Homo sapien
tttcacaacggtccagcgataggca

SEQ ID NO: 1404678 - DNA, 25 bp, Homo sapien
ggccctgggctatgttccactttgg

SEQ ID NO: 1404679 - DNA, 25 bp, Homo sapien
tgtttatcgactggtggaggccctg

SEQ ID NO: 1404680 - DNA, 25 bp, Homo sapien
ggctttcgaaacatggaagaggcag

SEQ ID NO: 1404681 - DNA, 25 bp, Homo sapien
cgtctcacatatggctttcgaaaca

SEQ ID NO: 1404682 - DNA, 25 bp, Homo sapien
tttgatacagcgaaaggccctggct

SEQ ID NO: 1404683 - DNA, 25 bp, Homo sapien
gtgaagataacagatgcagggtgga

SEQ ID NO: 1404684 - DNA, 25 bp, Homo sapien
cttctgaatgagttgattgggctgg

SEQ ID NO: 1404685 - DNA, 25 bp, Homo sapien
taggcaatagcagtgggtaccgagt

SEQ ID NO: 1404686 - DNA, 25 bp, Homo sapien
caatagcagtgggtaccgagtttca

SEQ ID NO: 1404687 - DNA, 25 bp, Homo sapien
gcttctgaatgagttgattgggctg

SEQ ID NO: 1404688 - DNA, 25 bp, Homo sapien
ggaaatgagaacactctgatccagc

SEQ ID NO: 1404689 - DNA, 25 bp, Homo sapien
tagaatcacccggagaagggcagaa

SEQ ID NO: 1404690 - DNA, 25 bp, Homo sapien
tcctacagacttcgaggaagagggc

SEQ ID NO: 1404691 - DNA, 25 bp, Homo sapien
taagtttagggacctgagacaagct

SEQ ID NO: 1404692 - DNA, 25 bp, Homo sapien
cattttcctaggactggcagctgtt

SEQ ID NO: 1404693 - DNA, 25 bp, Homo sapien
ctttaaccagaatgggagccggtgt

SEQ ID NO: 1404694 - DNA, 25 bp, Homo sapien
gcttccactgatgtggctggatctc

SEQ ID NO: 1404695 - DNA, 25 bp, Homo sapien
tctctctctataggtggcttccact

SEQ ID NO: 1404696 - DNA, 25 bp, Homo sapien
catagaaacaagagctatacatata

SEQ ID NO: 1404697 - DNA, 25 bp, Homo sapien
caggaaactggccagacatggagga

SEQ ID NO: 1404698 - DNA, 25 bp, Homo sapien
ggtacacagtacaatattactacca

SEQ ID NO: 1404699 - DNA, 25 bp, Homo sapien
tatacatataaacaaggtacacagt

SEQ ID NO: 1404700 - DNA, 25 bp, Homo sapien
tgatgttgtcaggagctctgttcat

SEQ ID NO: 1404701 - DNA, 25 bp, Homo sapien
ttaatgatgttgtcaggagctctgt

SEQ ID NO: 1404702 - DNA, 25 bp, Homo sapien
tttaatgatgttgtcaggagctctg

SEQ ID NO: 1404703 - DNA, 25 bp, Homo sapien
aatgatgttgtcaggagctctgttc

SEQ ID NO: 1404704 - DNA, 25 bp, Homo sapien
gattctcactgtcagttggcgggca

SEQ ID NO: 1404705 - DNA, 25 bp, Homo sapien
attctcactgtcagttggcgggcag

SEQ ID NO: 1404706 - DNA, 25 bp, Homo sapien
ttctcactgtcagttggcgggcagt

SEQ ID NO: 1404707 - DNA, 25 bp, Homo sapien
ttcaaaatgcttcagtcctaaagct

SEQ ID NO: 1404708 - DNA, 25 bp, Homo sapien
aaactcagtcccttcaaaatgcttc

SEQ ID NO: 1404709 - DNA, 25 bp, Homo sapien
gattagagggttaagaaactcagtc

SEQ ID NO: 1404710 - DNA, 25 bp, Homo sapien
ctgattagagggttaagaaactcag

SEQ ID NO: 1404711 - DNA, 25 bp, Homo sapien
gttcacaattaagtaggagcaagag

SEQ ID NO: 1404712 - DNA, 25 bp, Homo sapien
tctgtggctataaacgtttgctacc

SEQ ID NO: 1404713 - DNA, 25 bp, Homo sapien
tacaagttggtgactactcagtaga

SEQ ID NO: 1404714 - DNA, 25 bp, Homo sapien
gaataataggtaccccgtcagacaa

SEQ ID NO: 1404715 - DNA, 25 bp, Homo sapien
tacatgaaaaccttgcttgtggcca

SEQ ID NO: 1404716 - DNA, 25 bp, Homo sapien
gccacttgctttggcaaacagggaa

SEQ ID NO: 1404717 - DNA, 25 bp, Homo sapien
gccttcagggaacacactggaagta

SEQ ID NO: 1404718 - DNA, 25 bp, Homo sapien
tctggatacatgaaaaccttgcttg

SEQ ID NO: 1404719 - DNA, 25 bp, Homo sapien
tataagaaaataaatctctgataaa

SEQ ID NO: 1404720 - DNA, 25 bp, Homo sapien
ctataagaaaataaatctctgataa

SEQ ID NO: 1404721 - DNA, 25 bp, Homo sapien
aaaataaatctctgataaatcaact

SEQ ID NO: 1404722 - DNA, 25 bp, Homo sapien
aagaaaataaatctctgataaatca

SEQ ID NO: 1404723 - DNA, 25 bp, Homo sapien
tcttactctttcttacgtgtaacac

SEQ ID NO: 1404724 - DNA, 25 bp, Homo sapien
atacctgtcacatagtgtatgctca

SEQ ID NO: 1404725 - DNA, 25 bp, Homo sapien
cagtctttcctcaactaacattagg

SEQ ID NO: 1404726 - DNA, 25 bp, Homo sapien
tttttgcatttaggtagagctgtcc

SEQ ID NO: 1404727 - DNA, 25 bp, Homo sapien
tacccaggcccggagattatcatgt

SEQ ID NO: 1404728 - DNA, 25 bp, Homo sapien
tccaattcttagcactgagcctcag

SEQ ID NO: 1404729 - DNA, 25 bp, Homo sapien
ttcagaatggagatatcacctatgc

SEQ ID NO: 1404730 - DNA, 25 bp, Homo sapien
aacatgaccgaactttaccacctga

SEQ ID NO: 1404731 - DNA, 25 bp, Homo sapien
gtaaaaacttaaagctgacacatct

SEQ ID NO: 1404732 - DNA, 25 bp, Homo sapien
agtaaaaacttaaagctgacacatc

SEQ ID NO: 1404733 - DNA, 25 bp, Homo sapien
aagtaaaaacttaaagctgacacat

SEQ ID NO: 1404734 - DNA, 25 bp, Homo sapien
tgcatagctcccatcaagttacagg

SEQ ID NO: 1404735 - DNA, 25 bp, Homo sapien
tgtgtgctgaagtcttcaatcagct

SEQ ID NO: 1404736 - DNA, 25 bp, Homo sapien
catcaagttacagggttggaacagg

SEQ ID NO: 1404737 - DNA, 25 bp, Homo sapien
tgacagttttatgagggctgcagtc

SEQ ID NO: 1404738 - DNA, 25 bp, Homo sapien
ctgggaaaacacgacacaaggaaga

SEQ ID NO: 1404739 - DNA, 25 bp, Homo sapien
tgggaaaacacgacacaaggaagat

SEQ ID NO: 1404740 - DNA, 25 bp, Homo sapien
ctactggcctccggattgagattgg

SEQ ID NO: 1404741 - DNA, 25 bp, Homo sapien
tggcaagaaggtggatttgtgtcaa

SEQ ID NO: 1404742 - DNA, 25 bp, Homo sapien
ggtgctactggcctccggattgaga

SEQ ID NO: 1404743 - DNA, 25 bp, Homo sapien
gtggcaagaaggtggatttgtgtca

SEQ ID NO: 1404744 - DNA, 25 bp, Homo sapien
atcagggtctgatgaacttccttac

SEQ ID NO: 1404745 - DNA, 25 bp, Homo sapien
tgctgggtccagaatcagggtctga

SEQ ID NO: 1404746 - DNA, 25 bp, Homo sapien
tgatgaacttccttacactggggtt

SEQ ID NO: 1404747 - DNA, 25 bp, Homo sapien
cagaatcagggtctgatgaacttcc

SEQ ID NO: 1404748 - DNA, 25 bp, Homo sapien
ctgctgtttggctgaaggtttcttc

SEQ ID NO: 1404749 - DNA, 25 bp, Homo sapien
gctgtttggctgaaggtttcttcat

SEQ ID NO: 1404750 - DNA, 25 bp, Homo sapien
tgctgtttggctgaaggtttcttca

SEQ ID NO: 1404751 - DNA, 25 bp, Homo sapien
catttagtaggttggccagtagttc

SEQ ID NO: 1404752 - DNA, 25 bp, Homo sapien
tagttccttcgctatctgatgttgt

SEQ ID NO: 1404753 - DNA, 25 bp, Homo sapien
agctgttcaaatagttccttcgcta

SEQ ID NO: 1404754 - DNA, 25 bp, Homo sapien
tcgctatctgatgttgttcatttag

SEQ ID NO: 1404755 - DNA, 25 bp, Homo sapien
atcccaaacggggatgactgaattt

SEQ ID NO: 1404756 - DNA, 25 bp, Homo sapien
cccaaacggggatgactgaatttga

SEQ ID NO: 1404757 - DNA, 25 bp, Homo sapien
ctatcccaaacggggatgactgaat

SEQ ID NO: 1404758 - DNA, 25 bp, Homo sapien
tcccaaacggggatgactgaatttg

SEQ ID NO: 1404759 - DNA, 25 bp, Homo sapien
tccttacatcagtaacagaagctgg

SEQ ID NO: 1404760 - DNA, 25 bp, Homo sapien
tacagcttggcctacagctgcactg

SEQ ID NO: 1404761 - DNA, 25 bp, Homo sapien
gaagtggatatggatgccagctact

SEQ ID NO: 1404762 - DNA, 25 bp, Homo sapien
tgcactgccccataacaaggagact

SEQ ID NO: 1404763 - DNA, 25 bp, Homo sapien
gagcttgaggggtgttaaagttagc

SEQ ID NO: 1404764 - DNA, 25 bp, Homo sapien
tgggccatcatcttccatgttggag

SEQ ID NO: 1404765 - DNA, 25 bp, Homo sapien
gggtgttaaagttagcttgaggctc

SEQ ID NO: 1404766 - DNA, 25 bp, Homo sapien
ttgaggctcagccacacgctcctcc

SEQ ID NO: 1404767 - DNA, 25 bp, Homo sapien
cagaaagagcctacatcagaacctt

SEQ ID NO: 1404768 - DNA, 25 bp, Homo sapien
gcacccagaaagagcctacatcaga

SEQ ID NO: 1404769 - DNA, 25 bp, Homo sapien
tggcacccagaaagagcctacatca

SEQ ID NO: 1404770 - DNA, 25 bp, Homo sapien
tgctggcacccagaaagagcctaca

SEQ ID NO: 1404771 - DNA, 25 bp, Homo sapien
agcctatgagttccagaacatggca

SEQ ID NO: 1404772 - DNA, 25 bp, Homo sapien
ttctcacttgaggatcattactcac

SEQ ID NO: 1404773 - DNA, 25 bp, Homo sapien
tgttctcacttgaggatcattactc

SEQ ID NO: 1404774 - DNA, 25 bp, Homo sapien
catgttctcacttgaggatcattac

SEQ ID NO: 1404775 - DNA, 25 bp, Homo sapien
cccatgttctcacttgaggatcatt

SEQ ID NO: 1404776 - DNA, 25 bp, Homo sapien
gaattccatgtagacaatgtatgat

SEQ ID NO: 1404777 - DNA, 25 bp, Homo sapien
agtacttactatgtttcaatccctg

SEQ ID NO: 1404778 - DNA, 25 bp, Homo sapien
cattttacaatatggaggaattcca

SEQ ID NO: 1404779 - DNA, 25 bp, Homo sapien
gatgttttcaacaaggcatctgacg

SEQ ID NO: 1404780 - DNA, 25 bp, Homo sapien
tcatgttaatgggtaaagagcttca

SEQ ID NO: 1404781 - DNA, 25 bp, Homo sapien
gacagtttgacaatgcccaatgaca

SEQ ID NO: 1404782 - DNA, 25 bp, Homo sapien
cctctacaatggttatctaggaagt

SEQ ID NO: 1404783 - DNA, 25 bp, Homo sapien
gagcgttctgatctctgacacacaa

SEQ ID NO: 1404784 - DNA, 25 bp, Homo sapien
gcccaaattaataagtcctgagata

SEQ ID NO: 1404785 - DNA, 25 bp, Homo sapien
ggaatcctataccagtactaaaaga

SEQ ID NO: 1404786 - DNA, 25 bp, Homo sapien
catcactgtatcttagtacctggaa

SEQ ID NO: 1404787 - DNA, 25 bp, Homo sapien
taaaagatcctatattggaaaatga

SEQ ID NO: 1404788 - DNA, 25 bp, Homo sapien
aatagctactggattttatatcagg

SEQ ID NO: 1404789 - DNA, 25 bp, Homo sapien
taataaattaatgggtagtctgtca

SEQ ID NO: 1404790 - DNA, 25 bp, Homo sapien
gggtagtctgtcaaatagctactgg

SEQ ID NO: 1404791 - DNA, 25 bp, Homo sapien
agctactggattttatatcaggagg

SEQ ID NO: 1404792 - DNA, 25 bp, Homo sapien
ctctgaaggataagtgaccccaaaa

SEQ ID NO: 1404793 - DNA, 25 bp, Homo sapien
gagggcccagtgtctttcatccgat

SEQ ID NO: 1404794 - DNA, 25 bp, Homo sapien
aatcatgtgattgcgcttatgctca

SEQ ID NO: 1404795 - DNA, 25 bp, Homo sapien
tatgctcatcttctaacttgagggc

SEQ ID NO: 1404796 - DNA, 25 bp, Homo sapien
ccttgatgatcctcacctcaaggca

SEQ ID NO: 1404797 - DNA, 25 bp, Homo sapien
gacaccttgatgatcctcacctcaa

SEQ ID NO: 1404798 - DNA, 25 bp, Homo sapien
aaggcatggaccattcattgaatgg

SEQ ID NO: 1404799 - DNA, 25 bp, Homo sapien
ctcaaggcatggaccattcattgaa

SEQ ID NO: 1404800 - DNA, 25 bp, Homo sapien
tcccgcttgtcaggaggcggccagc

SEQ ID NO: 1404801 - DNA, 25 bp, Homo sapien
gcggatccctcccgcttgtcaggag

SEQ ID NO: 1404802 - DNA, 25 bp, Homo sapien
atccctcccgcttgtcaggaggcgg

SEQ ID NO: 1404803 - DNA, 25 bp, Homo sapien
ctcccgcttgtcaggaggcggccag

SEQ ID NO: 1404804 - DNA, 25 bp, Homo sapien
cggcagcagagtggccgcggcagct

SEQ ID NO: 1404805 - DNA, 25 bp, Homo sapien
gcttcgcccgactccggccatgtag

SEQ ID NO: 1404806 - DNA, 25 bp, Homo sapien
gatcgtttcccctcgcaaagcgaac

SEQ ID NO: 1404807 - DNA, 25 bp, Homo sapien
ggagctaagggcgcctagcgacacc

SEQ ID NO: 1404808 - DNA, 25 bp, Homo sapien
cacgcgtacgagtgtctacgggctc

SEQ ID NO: 1404809 - DNA, 25 bp, Homo sapien
cagcccgcacgcgtacgagtgtcta

SEQ ID NO: 1404810 - DNA, 25 bp, Homo sapien
ttcggccgtcctgcgagccagccat

SEQ ID NO: 1404811 - DNA, 25 bp, Homo sapien
gtctacgggctcgtcgctggctgct

SEQ ID NO: 1404812 - DNA, 25 bp, Homo sapien
cacgggaacctcctcgcccagttct

SEQ ID NO: 1404813 - DNA, 25 bp, Homo sapien
acctcctcgcccagttctccactcc

SEQ ID NO: 1404814 - DNA, 25 bp, Homo sapien
gggaacctcctcgcccagttctcca

SEQ ID NO: 1404815 - DNA, 25 bp, Homo sapien
gaacctcctcgcccagttctccact

SEQ ID NO: 1404816 - DNA, 25 bp, Homo sapien
tgtcaagccggctccagcgcaggcc

SEQ ID NO: 1404817 - DNA, 25 bp, Homo sapien
tcaagccggctccagcgcaggccct

SEQ ID NO: 1404818 - DNA, 25 bp, Homo sapien
gtcaagccggctccagcgcaggccc

SEQ ID NO: 1404819 - DNA, 25 bp, Homo sapien
ctgtcaagccggctccagcgcaggc

SEQ ID NO: 1404820 - DNA, 25 bp, Homo sapien
ccaccctacactcctcgcgcgtgcg

SEQ ID NO: 1404821 - DNA, 25 bp, Homo sapien
gcgcgtgcgcctcccacagtcccca

SEQ ID NO: 1404822 - DNA, 25 bp, Homo sapien
accaaccgccgccaaagcagccgcc

SEQ ID NO: 1404823 - DNA, 25 bp, Homo sapien
gcacggccaccaaccgccgccaaag

SEQ ID NO: 1404824 - DNA, 25 bp, Homo sapien
cgcgggactgttccattcctggcgg

SEQ ID NO: 1404825 - DNA, 25 bp, Homo sapien
ctccctgggttcgtcgccgcggcgc

SEQ ID NO: 1404826 - DNA, 25 bp, Homo sapien
gcggcgctgcggctcgcctcctcct

SEQ ID NO: 1404827 - DNA, 25 bp, Homo sapien
ccctgggttcgtcgccgcggcgctg

SEQ ID NO: 1404828 - DNA, 25 bp, Homo sapien
tgggttcgtcgccgcggcgctgcgg

SEQ ID NO: 1404829 - DNA, 25 bp, Homo sapien
gcggctgcgcgttgagtcgtttcct

SEQ ID NO: 1404830 - DNA, 25 bp, Homo sapien
cggatgacccgacccttttttgcag

SEQ ID NO: 1404831 - DNA, 25 bp, Homo sapien
ccggtggttggaggccgcggcggct

SEQ ID NO: 1404832 - DNA, 25 bp, Homo sapien
tgagtcgtttcctgccggatgaccc

SEQ ID NO: 1404833 - DNA, 25 bp, Homo sapien
aaggagcgggactccggacctccag

SEQ ID NO: 1404834 - DNA, 25 bp, Homo sapien
ggaatggaccgacacgggtattgta

SEQ ID NO: 1404835 - DNA, 25 bp, Homo sapien
tcctcccgggcgttgagttgccaac

SEQ ID NO: 1404836 - DNA, 25 bp, Homo sapien
tattgtaccgctgagggaaaggagc

SEQ ID NO: 1404837 - DNA, 25 bp, Homo sapien
tactccagatgtagagcagactgag

SEQ ID NO: 1404838 - DNA, 25 bp, Homo sapien
aacttctgccttagaggtcgccatg

SEQ ID NO: 1404839 - DNA, 25 bp, Homo sapien
gaagccttttgatgctaagcagtcc

SEQ ID NO: 1404840 - DNA, 25 bp, Homo sapien
tatcagcattctagagtcgtcagta

SEQ ID NO: 1404841 - DNA, 25 bp, Homo sapien
tgaaccaggtgactagactcccaga

SEQ ID NO: 1404842 - DNA, 25 bp, Homo sapien
tacaaatgagcgcttcctgaaccag

SEQ ID NO: 1404843 - DNA, 25 bp, Homo sapien
catggattctttgtgccctgagtac

SEQ ID NO: 1404844 - DNA, 25 bp, Homo sapien
cagaagttgagtgctaggtagtcct

SEQ ID NO: 1404845 - DNA, 25 bp, Homo sapien
ggaaggatttgatgccctggatccc

SEQ ID NO: 1404846 - DNA, 25 bp, Homo sapien
tctggtgctttgttccttaactaac

SEQ ID NO: 1404847 - DNA, 25 bp, Homo sapien
catatgtggagtcctgtatcaggca

SEQ ID NO: 1404848 - DNA, 25 bp, Homo sapien
tggaaaacaattggcttcaacatga

SEQ ID NO: 1404849 - DNA, 25 bp, Homo sapien
tgctggacccagtaagatgaggaag

SEQ ID NO: 1404850 - DNA, 25 bp, Homo sapien
catgtgaggaagacagtggacatct

SEQ ID NO: 1404851 - DNA, 25 bp, Homo sapien
gagctgctgttcctaagtaacgcga

SEQ ID NO: 1404852 - DNA, 25 bp, Homo sapien
actgtgcctacctctaagccaagat

SEQ ID NO: 1404853 - DNA, 25 bp, Homo sapien
gagaagcctaggctctacaacaaat

SEQ ID NO: 1404854 - DNA, 25 bp, Homo sapien
tgaccaagcacggtggtccatgcct

SEQ ID NO: 1404855 - DNA, 25 bp, Homo sapien
ggcagttattcccatattgacctat

SEQ ID NO: 1404856 - DNA, 25 bp, Homo sapien
gagtactcagtaataagatggcagt

SEQ ID NO: 1404857 - DNA, 25 bp, Homo sapien
tagcctaactacagttatccttttc

SEQ ID NO: 1404858 - DNA, 25 bp, Homo sapien
ttttaatagcctaactacagttatc

SEQ ID NO: 1404859 - DNA, 25 bp, Homo sapien
gcaaattaagttgcctaaagctgaa

SEQ ID NO: 1404860 - DNA, 25 bp, Homo sapien
tacatcaggtcattattgttgaccc

SEQ ID NO: 1404861 - DNA, 25 bp, Homo sapien
tatgatagctaggtcagtccacggg

SEQ ID NO: 1404862 - DNA, 25 bp, Homo sapien
ggagcttccgctattctggcaaggt

SEQ ID NO: 1404863 - DNA, 25 bp, Homo sapien
tctgaagagtcgtgatccgtgtgac

SEQ ID NO: 1404864 - DNA, 25 bp, Homo sapien
catgggaggctttagcggagcttcc

SEQ ID NO: 1404865 - DNA, 25 bp, Homo sapien
gacattttgccggtttcgtgggcgc

SEQ ID NO: 1404866 - DNA, 25 bp, Homo sapien
tttgccggtttcgtgggcgcgcact

SEQ ID NO: 1404867 - DNA, 25 bp, Homo sapien
actgcagttgggacattttgccggt

SEQ ID NO: 1404868 - DNA, 25 bp, Homo sapien
gggcgcgcactggtggaaccagcag

SEQ ID NO: 1404869 - DNA, 25 bp, Homo sapien
gcttttggtctcgtgcacctgactg

SEQ ID NO: 1404870 - DNA, 25 bp, Homo sapien
gagtaaacattcgaatcccattggg

SEQ ID NO: 1404871 - DNA, 25 bp, Homo sapien
ttttctttacgaggaggcccagaga

SEQ ID NO: 1404872 - DNA, 25 bp, Homo sapien
cccattgggagagtggcttaatgca

SEQ ID NO: 1404873 - DNA, 25 bp, Homo sapien
tgatgtggcctctcagatcacactg

SEQ ID NO: 1404874 - DNA, 25 bp, Homo sapien
tgaggcccgagcttgaactcagctg

SEQ ID NO: 1404875 - DNA, 25 bp, Homo sapien
tcttgttctgactgcggcaggctac

SEQ ID NO: 1404876 - DNA, 25 bp, Homo sapien
tgctcccagtcagtcgctgtctgta

SEQ ID NO: 1404877 - DNA, 25 bp, Homo sapien
agctgaactccactctcgatgctat

SEQ ID NO: 1404878 - DNA, 25 bp, Homo sapien
gttggacttccttatcagtttggcg

SEQ ID NO: 1404879 - DNA, 25 bp, Homo sapien
gctgcatgagttctcgaaaacggtg

SEQ ID NO: 1404880 - DNA, 25 bp, Homo sapien
tgcatgagttctcgaaaacggtggg

SEQ ID NO: 1404881 - DNA, 25 bp, Homo sapien
gcatgagttctcgaaaacggtggga

SEQ ID NO: 1404882 - DNA, 25 bp, Homo sapien
ctgcatgagttctcgaaaacggtgg

SEQ ID NO: 1404883 - DNA, 25 bp, Homo sapien
ggcgacaagtgaaactgcgtctaaa

SEQ ID NO: 1404884 - DNA, 25 bp, Homo sapien
taggcgacaagtgaaactgcgtcta

SEQ ID NO: 1404885 - DNA, 25 bp, Homo sapien
aggcgacaagtgaaactgcgtctaa

SEQ ID NO: 1404886 - DNA, 25 bp, Homo sapien
gccccttgctcctggcacatggtga

SEQ ID NO: 1404887 - DNA, 25 bp, Homo sapien
ggtgaggatcacacggtcagcttcc

SEQ ID NO: 1404888 - DNA, 25 bp, Homo sapien
agcaggggtcttatttcccagctgc

SEQ ID NO: 1404889 - DNA, 25 bp, Homo sapien
gagatgatgttgaaggtctgtggct

SEQ ID NO: 1404890 - DNA, 25 bp, Homo sapien
agccacatggatgtggtctatgctc

SEQ ID NO: 1404891 - DNA, 25 bp, Homo sapien
caaacacacgtcatccacccttacc

SEQ ID NO: 1404892 - DNA, 25 bp, Homo sapien
tggtctatgctcttttccaaacaca

SEQ ID NO: 1404893 - DNA, 25 bp, Homo sapien
aacacacgtcatccacccttaccta

SEQ ID NO: 1404894 - DNA, 25 bp, Homo sapien
cacacaccgtagcttctgcggcctt

SEQ ID NO: 1404895 - DNA, 25 bp, Homo sapien
gcacacaccgtagcttctgcggcct

SEQ ID NO: 1404896 - DNA, 25 bp, Homo sapien
tggcacacaccgtagcttctgcggc

SEQ ID NO: 1404897 - DNA, 25 bp, Homo sapien
ttggcacacaccgtagcttctgcgg

SEQ ID NO: 1404898 - DNA, 25 bp, Homo sapien
ggggctttgggagaagtctctgagg

SEQ ID NO: 1404899 - DNA, 25 bp, Homo sapien
ctttgggagaagtctctgaggtgtc

SEQ ID NO: 1404900 - DNA, 25 bp, Homo sapien
ggctttgggagaagtctctgaggtg

SEQ ID NO: 1404901 - DNA, 25 bp, Homo sapien
taggggctttgggagaagtctctga

SEQ ID NO: 1404902 - DNA, 25 bp, Homo sapien
ggtttcccggacacatgtcttctcc

SEQ ID NO: 1404903 - DNA, 25 bp, Homo sapien
gagtgtctggtttcccggacacatg

SEQ ID NO: 1404904 - DNA, 25 bp, Homo sapien
tctggtttcccggacacatgtcttc

SEQ ID NO: 1404905 - DNA, 25 bp, Homo sapien
ctcttgagtgtctggtttcccggac

SEQ ID NO: 1404906 - DNA, 25 bp, Homo sapien
ggaggagccgttctgtaacagtcac

SEQ ID NO: 1404907 - DNA, 25 bp, Homo sapien
cttagcaccaggcataggactagcc

SEQ ID NO: 1404908 - DNA, 25 bp, Homo sapien
cctcagtgctctcccgctcctctgg

SEQ ID NO: 1404909 - DNA, 25 bp, Homo sapien
aggcataggactagcctctcggtgg

SEQ ID NO: 1404910 - DNA, 25 bp, Homo sapien
caccaggcataggactagcctctcg

SEQ ID NO: 1404911 - DNA, 25 bp, Homo sapien
agagaaccaggattacttgtagaga

SEQ ID NO: 1404912 - DNA, 25 bp, Homo sapien
ccaagaactgtgtttttcctgccaa

SEQ ID NO: 1404913 - DNA, 25 bp, Homo sapien
taaatggccccgaatagagtattgg

SEQ ID NO: 1404914 - DNA, 25 bp, Homo sapien
ccccgaatagagtattggattccac

SEQ ID NO: 1404915 - DNA, 25 bp, Homo sapien
attttcacgacagaggtttatttca

SEQ ID NO: 1404916 - DNA, 25 bp, Homo sapien
caattcttggtagcaaacaatcccc

SEQ ID NO: 1404917 - DNA, 25 bp, Homo sapien
aattcagtaaggtacaattcttggt

SEQ ID NO: 1404918 - DNA, 25 bp, Homo sapien
agctctgataccctcgggacccttg

SEQ ID NO: 1404919 - DNA, 25 bp, Homo sapien
tgataccctcgggacccttgatact

SEQ ID NO: 1404920 - DNA, 25 bp, Homo sapien
ttcttcagcttggaatctggacctc

SEQ ID NO: 1404921 - DNA, 25 bp, Homo sapien
gtggctacagctccgccttttgctc

SEQ ID NO: 1404922 - DNA, 25 bp, Homo sapien
tacagtggctacagctccgcctttt

SEQ ID NO: 1404923 - DNA, 25 bp, Homo sapien
cagtggctacagctccgccttttgc

SEQ ID NO: 1404924 - DNA, 25 bp, Homo sapien
tcagcttagcgcaacttccactccc

SEQ ID NO: 1404925 - DNA, 25 bp, Homo sapien
tagagataggaattcgcaatgttac

SEQ ID NO: 1404926 - DNA, 25 bp, Homo sapien
tcgcaatgttactctggctggtctt

SEQ ID NO: 1404927 - DNA, 25 bp, Homo sapien
cagcacctagcctatggctaatttt

SEQ ID NO: 1404928 - DNA, 25 bp, Homo sapien
caataacttggcataccttatcatg

SEQ ID NO: 1404929 - DNA, 25 bp, Homo sapien
ttttcaataacttggcataccttat

SEQ ID NO: 1404930 - DNA, 25 bp, Homo sapien
tcaataacttggcataccttatcat

SEQ ID NO: 1404931 - DNA, 25 bp, Homo sapien
ataacttggcataccttatcatgat

SEQ ID NO: 1404932 - DNA, 25 bp, Homo sapien
tgttctttgaggctgtgggtatctt

SEQ ID NO: 1404933 - DNA, 25 bp, Homo sapien
catgattttggaccccgatctcttt

SEQ ID NO: 1404934 - DNA, 25 bp, Homo sapien
cttatcatgattttggaccccgatc

SEQ ID NO: 1404935 - DNA, 25 bp, Homo sapien
gttctttgaggctgtgggtatcttg

SEQ ID NO: 1404936 - DNA, 25 bp, Homo sapien
aggccaatatccctcccacgtgtgg

SEQ ID NO: 1404937 - DNA, 25 bp, Homo sapien
caggccaatatccctcccacgtgtg

SEQ ID NO: 1404938 - DNA, 25 bp, Homo sapien
tcataaggctacagcagccttaggt

SEQ ID NO: 1404939 - DNA, 25 bp, Homo sapien
ataaggctacagcagccttaggtcc

SEQ ID NO: 1404940 - DNA, 25 bp, Homo sapien
cgtggcccttgaggagctgccacat

SEQ ID NO: 1404941 - DNA, 25 bp, Homo sapien
tcttcaaagtcacccatccggctag

SEQ ID NO: 1404942 - DNA, 25 bp, Homo sapien
ttcctcagtccaattgatctcttca

SEQ ID NO: 1404943 - DNA, 25 bp, Homo sapien
tgggcgcaagtggtcaaagaagata

SEQ ID NO: 1404944 - DNA, 25 bp, Homo sapien
cttggaggaccttgataatcttctg

SEQ ID NO: 1404945 - DNA, 25 bp, Homo sapien
ggctcttctcaaaagcctgctgctc

SEQ ID NO: 1404946 - DNA, 25 bp, Homo sapien
ccagctgccgaaggaacttgcggct

SEQ ID NO: 1404947 - DNA, 25 bp, Homo sapien
ccttggaggaccttgataatcttct

SEQ ID NO: 1404948 - DNA, 25 bp, Homo sapien
cagcaaagtctttcaacagctgagg

SEQ ID NO: 1404949 - DNA, 25 bp, Homo sapien
gatctacagccgtccgtctctgggt

SEQ ID NO: 1404950 - DNA, 25 bp, Homo sapien
cacaggccagagcttgctcaggtaa

SEQ ID NO: 1404951 - DNA, 25 bp, Homo sapien
gaaggaagtcttcatacttgccagg

SEQ ID NO: 1404952 - DNA, 25 bp, Homo sapien
tccttctgctccctgagtggatctc

SEQ ID NO: 1404953 - DNA, 25 bp, Homo sapien
gatctcgctcgagaatgtcctcatc

SEQ ID NO: 1404954 - DNA, 25 bp, Homo sapien
gacttccccgcttgttgcgagctcg

SEQ ID NO: 1404955 - DNA, 25 bp, Homo sapien
tgcgagctcgatgattgttccggcc

SEQ ID NO: 1404956 - DNA, 25 bp, Homo sapien
cctgtccctgcaacctgtgttcttc

SEQ ID NO: 1404957 - DNA, 25 bp, Homo sapien
tttccctgtccctgcaacctgtgtt

SEQ ID NO: 1404958 - DNA, 25 bp, Homo sapien
tccctgtccctgcaacctgtgttct

SEQ ID NO: 1404959 - DNA, 25 bp, Homo sapien
gtttccctgtccctgcaacctgtgt

SEQ ID NO: 1404960 - DNA, 25 bp, Homo sapien
caactgcttcatccgtcatttcatc

SEQ ID NO: 1404961 - DNA, 25 bp, Homo sapien
gcttcatccgtcatttcatcctctt

SEQ ID NO: 1404962 - DNA, 25 bp, Homo sapien
agagtctccaactgcttcatccgtc

SEQ ID NO: 1404963 - DNA, 25 bp, Homo sapien
gtctccaactgcttcatccgtcatt

SEQ ID NO: 1404964 - DNA, 25 bp, Homo sapien
ctggctcagagttctcctcctgaga

SEQ ID NO: 1404965 - DNA, 25 bp, Homo sapien
ttcttctggctcagagttctcctcc

SEQ ID NO: 1404966 - DNA, 25 bp, Homo sapien
agagttctcctcctgagaattctct

SEQ ID NO: 1404967 - DNA, 25 bp, Homo sapien
tgcaggctttccattccttctgctt

SEQ ID NO: 1404968 - DNA, 25 bp, Homo sapien
cctcctgactcatgcgcctttcaga

SEQ ID NO: 1404969 - DNA, 25 bp, Homo sapien
tgactcatgcgcctttcagatgcca

SEQ ID NO: 1404970 - DNA, 25 bp, Homo sapien
tcctgactcatgcgcctttcagatg

SEQ ID NO: 1404971 - DNA, 25 bp, Homo sapien
cagatgccagccaagtcagtttctc

SEQ ID NO: 1404972 - DNA, 25 bp, Homo sapien
ccacgtcggccaggccagtctgaaa

SEQ ID NO: 1404973 - DNA, 25 bp, Homo sapien
catttaaagtatggtcaggtgattc

SEQ ID NO: 1404974 - DNA, 25 bp, Homo sapien
ccaagcccagcctattactattttt

SEQ ID NO: 1404975 - DNA, 25 bp, Homo sapien
tttaaggcatttaaagtatggtcag

SEQ ID NO: 1404976 - DNA, 25 bp, Homo sapien
tgtgtaaacgagtttaatataataa

SEQ ID NO: 1404977 - DNA, 25 bp, Homo sapien
tctcatttcacctcaactccacaat

SEQ ID NO: 1404978 - DNA, 25 bp, Homo sapien
tccacaatcatgtcccataatgcat

SEQ ID NO: 1404979 - DNA, 25 bp, Homo sapien
tcaactccacaatcatgtcccataa

SEQ ID NO: 1404980 - DNA, 25 bp, Homo sapien
aagcaggtggcatatcaataagtga

SEQ ID NO: 1404981 - DNA, 25 bp, Homo sapien
caagcaggtggcatatcaataagtg

SEQ ID NO: 1404982 - DNA, 25 bp, Homo sapien
acatattactgagtccacgaaatac

SEQ ID NO: 1404983 - DNA, 25 bp, Homo sapien
catattactgagtccacgaaatact

SEQ ID NO: 1404984 - DNA, 25 bp, Homo sapien
gactgaccatcaacactggatgaat

SEQ ID NO: 1404985 - DNA, 25 bp, Homo sapien
ctgaccatcaacactggatgaatct

SEQ ID NO: 1404986 - DNA, 25 bp, Homo sapien
tgaccatcaacactggatgaatctt

SEQ ID NO: 1404987 - DNA, 25 bp, Homo sapien
actgaccatcaacactggatgaatc

SEQ ID NO: 1404988 - DNA, 25 bp, Homo sapien
ttttcacaacggtccagcgacaggc

SEQ ID NO: 1404989 - DNA, 25 bp, Homo sapien
cctgggctatgttccactttcggga

SEQ ID NO: 1404990 - DNA, 25 bp, Homo sapien
tctgcatctgctagtggaggccctg

SEQ ID NO: 1404991 - DNA, 25 bp, Homo sapien
tgtcatcacaaatatcacgctcagg

SEQ ID NO: 1404992 - DNA, 25 bp, Homo sapien
acagaggaggccacaagggactggt

SEQ ID NO: 1404993 - DNA, 25 bp, Homo sapien
catatggctttcgaaacttagaagg

SEQ ID NO: 1404994 - DNA, 25 bp, Homo sapien
tttcatacagggagaggccttgact

SEQ ID NO: 1404995 - DNA, 25 bp, Homo sapien
gtgaagataacagatgcagggtggt

SEQ ID NO: 1404996 - DNA, 25 bp, Homo sapien
aattgtctttttctaggcttcgatc

SEQ ID NO: 1404997 - DNA, 25 bp, Homo sapien
caatagcagtgggtaccgagattca

SEQ ID NO: 1404998 - DNA, 25 bp, Homo sapien
ctggggaaacgggtggcaactggct

SEQ ID NO: 1404999 - DNA, 25 bp, Homo sapien
cttctgaatgagttgatcgggctgg

SEQ ID NO: 1405000 - DNA, 25 bp, Homo sapien
gcttccactgatgtggctggatctc

SEQ ID NO: 1405001 - DNA, 25 bp, Homo sapien
ctttaaccagaatgggagccggtgt

SEQ ID NO: 1405002 - DNA, 25 bp, Homo sapien
cattttcctaggactggcagctgtt

SEQ ID NO: 1405003 - DNA, 25 bp, Homo sapien
tctctctctataggtggcttccact

SEQ ID NO: 1405004 - DNA, 25 bp, Homo sapien
aatgatgttgtcaggagctctgttc

SEQ ID NO: 1405005 - DNA, 25 bp, Homo sapien
ttaatgatgttgtcaggagctctgt

SEQ ID NO: 1405006 - DNA, 25 bp, Homo sapien
tttaatgatgttgtcaggagctctg

SEQ ID NO: 1405007 - DNA, 25 bp, Homo sapien
tgatgttgtcaggagctctgttcat

SEQ ID NO: 1405008 - DNA, 25 bp, Homo sapien
tccttcaaaatgcttcagtcctaaa

SEQ ID NO: 1405009 - DNA, 25 bp, Homo sapien
ttagaggattaggaaactcagttcc

SEQ ID NO: 1405010 - DNA, 25 bp, Homo sapien
aactcagttccttcaaaatgcttca

SEQ ID NO: 1405011 - DNA, 25 bp, Homo sapien
tgattagaggattaggaaactcagt

SEQ ID NO: 1405012 - DNA, 25 bp, Homo sapien
tacatgaaaaccttgcttgtggcca

SEQ ID NO: 1405013 - DNA, 25 bp, Homo sapien
gccttcagggaacacactggaagta

SEQ ID NO: 1405014 - DNA, 25 bp, Homo sapien
gccacttgctttggcaaacagggaa

SEQ ID NO: 1405015 - DNA, 25 bp, Homo sapien
tctggatacatgaaaaccttgcttg

SEQ ID NO: 1405016 - DNA, 25 bp, Homo sapien
ctataagaaaataaatctcggataa

SEQ ID NO: 1405017 - DNA, 25 bp, Homo sapien
taagaaaataaatctcggataaatc

SEQ ID NO: 1405018 - DNA, 25 bp, Homo sapien
gaaaataaatctcggataaatcaac

SEQ ID NO: 1405019 - DNA, 25 bp, Homo sapien
aaataaatctcggataaatcaactt

SEQ ID NO: 1405020 - DNA, 25 bp, Homo sapien
ggagctatccttacctaacttgatt

SEQ ID NO: 1405021 - DNA, 25 bp, Homo sapien
catttaggtaggagctatccttacc

SEQ ID NO: 1405022 - DNA, 25 bp, Homo sapien
tttttgcatttaggtaggagctatc

SEQ ID NO: 1405023 - DNA, 25 bp, Homo sapien
taggtaggagctatccttacctaac

SEQ ID NO: 1405024 - DNA, 25 bp, Homo sapien
tcctaggcaagtatccttagttatc

SEQ ID NO: 1405025 - DNA, 25 bp, Homo sapien
ttcctaggcaagtatccttagttat

SEQ ID NO: 1405026 - DNA, 25 bp, Homo sapien
attcctaggcaagtatccttagtta

SEQ ID NO: 1405027 - DNA, 25 bp, Homo sapien
aagtaaaaacttaaagctgacacat

SEQ ID NO: 1405028 - DNA, 25 bp, Homo sapien
agtaaaaacttaaagctgacacatc

SEQ ID NO: 1405029 - DNA, 25 bp, Homo sapien
gtaaaaacttaaagctgacacatct

SEQ ID NO: 1405030 - DNA, 25 bp, Homo sapien
catcaagttacagggttggaacagg

SEQ ID NO: 1405031 - DNA, 25 bp, Homo sapien
tgcatagctcccatcaagttacagg

SEQ ID NO: 1405032 - DNA, 25 bp, Homo sapien
tgtgtgctgaagtcttcaatcagct

SEQ ID NO: 1405033 - DNA, 25 bp, Homo sapien
tgacagttttatgagggctgcagtc

SEQ ID NO: 1405034 - DNA, 25 bp, Homo sapien
gtggtagtggcctccggattgaggt

SEQ ID NO: 1405035 - DNA, 25 bp, Homo sapien
aatatcctggtggtagtggcctccg

SEQ ID NO: 1405036 - DNA, 25 bp, Homo sapien
aagaaatatcctggtggtagtggcc

SEQ ID NO: 1405037 - DNA, 25 bp, Homo sapien
ggtggtagtggcctccggattgagg

SEQ ID NO: 1405038 - DNA, 25 bp, Homo sapien
gaatcagagtctgatgaactttctc

SEQ ID NO: 1405039 - DNA, 25 bp, Homo sapien
ttaacaggttggccagtggttcctc

SEQ ID NO: 1405040 - DNA, 25 bp, Homo sapien
gttcatttaacaggttggccagtgg

SEQ ID NO: 1405041 - DNA, 25 bp, Homo sapien
gctccttcactgtccgatgttgttc

SEQ ID NO: 1405042 - DNA, 25 bp, Homo sapien
tcatttaacaggttggccagtggtt

SEQ ID NO: 1405043 - DNA, 25 bp, Homo sapien
gaaccacatattcagagatggctcc

SEQ ID NO: 1405044 - DNA, 25 bp, Homo sapien
agatggctccataagattactgtac

SEQ ID NO: 1405045 - DNA, 25 bp, Homo sapien
tatctatggacttacagaatccagg

SEQ ID NO: 1405046 - DNA, 25 bp, Homo sapien
tggcctgggagcaatatgttatacc

SEQ ID NO: 1405047 - DNA, 25 bp, Homo sapien
taccagaaggtaactgaattctaac

SEQ ID NO: 1405048 - DNA, 25 bp, Homo sapien
tgtcaagcaggctgtcatctcagct

SEQ ID NO: 1405049 - DNA, 25 bp, Homo sapien
tcacagaatgtatcaccatgagatg

SEQ ID NO: 1405050 - DNA, 25 bp, Homo sapien
tcccattatatgttcccaggatgaa

SEQ ID NO: 1405051 - DNA, 25 bp, Homo sapien
taaagttaggacgaggctcagctac

SEQ ID NO: 1405052 - DNA, 25 bp, Homo sapien
caacttgtaacagtaaggacagagc

SEQ ID NO: 1405053 - DNA, 25 bp, Homo sapien
ggctattatgccaagaaagaagtca

SEQ ID NO: 1405054 - DNA, 25 bp, Homo sapien
gaagtcattcaaccagtcaacttgt

SEQ ID NO: 1405055 - DNA, 25 bp, Homo sapien
aggattcccacaaacccacacttgg

SEQ ID NO: 1405056 - DNA, 25 bp, Homo sapien
tctgcagtaaccgtgactacaggtg

SEQ ID NO: 1405057 - DNA, 25 bp, Homo sapien
taaggacacaccaaatgacagtagg

SEQ ID NO: 1405058 - DNA, 25 bp, Homo sapien
tcaggaggcttagacgaaggactgc

SEQ ID NO: 1405059 - DNA, 25 bp, Homo sapien
tccagaacaacctgagcaatgtggt

SEQ ID NO: 1405060 - DNA, 25 bp, Homo sapien
tccatcagctcatttacttcctttt

SEQ ID NO: 1405061 - DNA, 25 bp, Homo sapien
ttcaaacagctcttccatcagctca

SEQ ID NO: 1405062 - DNA, 25 bp, Homo sapien
agtttcaaacagctcttccatcagc

SEQ ID NO: 1405063 - DNA, 25 bp, Homo sapien
ttccatcagctcatttacttccttt

SEQ ID NO: 1405064 - DNA, 25 bp, Homo sapien
actgcccggtcagtccggaaatcct

SEQ ID NO: 1405065 - DNA, 25 bp, Homo sapien
ctgcccggtcagtccggaaatcctc

SEQ ID NO: 1405066 - DNA, 25 bp, Homo sapien
tggtgattctcactgcccggtcagt

SEQ ID NO: 1405067 - DNA, 25 bp, Homo sapien
cctaccaagtaactgagattacaga

SEQ ID NO: 1405068 - DNA, 25 bp, Homo sapien
cagatgcccaccaccacgcccggct

SEQ ID NO: 1405069 - DNA, 25 bp, Homo sapien
taccaagtaactgagattacagatg

SEQ ID NO: 1405070 - DNA, 25 bp, Homo sapien
ctaccaagtaactgagattacagat

SEQ ID NO: 1405071 - DNA, 25 bp, Homo sapien
agtcgatctgacttgttcccctgga

SEQ ID NO: 1405072 - DNA, 25 bp, Homo sapien
gaacagtctccctatcaatcccatg

SEQ ID NO: 1405073 - DNA, 25 bp, Homo sapien
cacactgttctatgaggtgctatca

SEQ ID NO: 1405074 - DNA, 25 bp, Homo sapien
ccatgtagtaccaagagactgggca

SEQ ID NO: 1405075 - DNA, 25 bp, Homo sapien
gggcatcttagaacgcgttcgaaat

SEQ ID NO: 1405076 - DNA, 25 bp, Homo sapien
catcatctgccgtattggggtcata

SEQ ID NO: 1405077 - DNA, 25 bp, Homo sapien
catacatatctggagtgatgtctgg

SEQ ID NO: 1405078 - DNA, 25 bp, Homo sapien
cgaaatgcaatgagactgtcatcca

SEQ ID NO: 1405079 - DNA, 25 bp, Homo sapien
ggattatggacataagccaccaaac

SEQ ID NO: 1405080 - DNA, 25 bp, Homo sapien
tggacataagccaccaaaccggacc

SEQ ID NO: 1405081 - DNA, 25 bp, Homo sapien
ttatggacataagccaccaaaccgg

SEQ ID NO: 1405082 - DNA, 25 bp, Homo sapien
atggacataagccaccaaaccggac

SEQ ID NO: 1405083 - DNA, 25 bp, Homo sapien
catgggcactacctcagcactgatg

SEQ ID NO: 1405084 - DNA, 25 bp, Homo sapien
atctctggtctgtttcggctttgga

SEQ ID NO: 1405085 - DNA, 25 bp, Homo sapien
tctccatgaaagtactatctctggt

SEQ ID NO: 1405086 - DNA, 25 bp, Homo sapien
ctaccgcatgtaacttctccatgaa

SEQ ID NO: 1405087 - DNA, 25 bp, Homo sapien
tcagaagactgcctcaatctggatt

SEQ ID NO: 1405088 - DNA, 25 bp, Homo sapien
gaagactgcctcaatctggatttct

SEQ ID NO: 1405089 - DNA, 25 bp, Homo sapien
tctggatttctttgccccacgtgga

SEQ ID NO: 1405090 - DNA, 25 bp, Homo sapien
ctgataatatgccactctcctcatc

SEQ ID NO: 1405091 - DNA, 25 bp, Homo sapien
cggctggtattcttcatctgaggaa

SEQ ID NO: 1405092 - DNA, 25 bp, Homo sapien
aggtggatatccacaaactgaggag

SEQ ID NO: 1405093 - DNA, 25 bp, Homo sapien
ttcttcaaggtggatatccacaaac

SEQ ID NO: 1405094 - DNA, 25 bp, Homo sapien
ttcatcatccggctggtattcttca

SEQ ID NO: 1405095 - DNA, 25 bp, Homo sapien
gaattccatgagatacaaacctaag

SEQ ID NO: 1405096 - DNA, 25 bp, Homo sapien
cagctaaagcaaataacacgaggca

SEQ ID NO: 1405097 - DNA, 25 bp, Homo sapien
taagagcataatgtacagctaaagc

SEQ ID NO: 1405098 - DNA, 25 bp, Homo sapien
caaacctaagagtaatagaatggaa

SEQ ID NO: 1405099 - DNA, 25 bp, Homo sapien
ccttcttaattggtgaaatattcca

SEQ ID NO: 1405100 - DNA, 25 bp, Homo sapien
ggccttcttaattggtgaaatattc

SEQ ID NO: 1405101 - DNA, 25 bp, Homo sapien
gccttcttaattggtgaaatattcc

SEQ ID NO: 1405102 - DNA, 25 bp, Homo sapien
tgcaaccccatctctaataaaaatt

SEQ ID NO: 1405103 - DNA, 25 bp, Homo sapien
tgtaatcccagctactcaggaggct

SEQ ID NO: 1405104 - DNA, 25 bp, Homo sapien
taatcccagctactcaggaggctga

SEQ ID NO: 1405105 - DNA, 25 bp, Homo sapien
ttgaaaccaggctggccaaacatgg

SEQ ID NO: 1405106 - DNA, 25 bp, Homo sapien
tacctgccttgtaagcacaaactag

SEQ ID NO: 1405107 - DNA, 25 bp, Homo sapien
taagaaggatatagcacagctccaa

SEQ ID NO: 1405108 - DNA, 25 bp, Homo sapien
cagtctccaaggaataaaaccagga

SEQ ID NO: 1405109 - DNA, 25 bp, Homo sapien
tttcggtctgtaaggcaaatcttcc

SEQ ID NO: 1405110 - DNA, 25 bp, Homo sapien
ccttcagtttagagcgtgtcatttt

SEQ ID NO: 1405111 - DNA, 25 bp, Homo sapien
ctcctttttccactacttccttcag

SEQ ID NO: 1405112 - DNA, 25 bp, Homo sapien
tcagtttagagcgtgtcattttagg

SEQ ID NO: 1405113 - DNA, 25 bp, Homo sapien
gtttagagcgtgtcattttaggctc

SEQ ID NO: 1405114 - DNA, 25 bp, Homo sapien
catcatagctaccacgtgttcattt

SEQ ID NO: 1405115 - DNA, 25 bp, Homo sapien
atatcttccgtctcactgatggctg

SEQ ID NO: 1405116 - DNA, 25 bp, Homo sapien
aaacattggcatatcttccgtctca

SEQ ID NO: 1405117 - DNA, 25 bp, Homo sapien
gctaccacgtgttcatttgtgatta

SEQ ID NO: 1405118 - DNA, 25 bp, Homo sapien
tagattgtgctgcttggcaccatcc

SEQ ID NO: 1405119 - DNA, 25 bp, Homo sapien
cggacattgactgctgttagattgt

SEQ ID NO: 1405120 - DNA, 25 bp, Homo sapien
tgaaggatgtttcggacattgactg

SEQ ID NO: 1405121 - DNA, 25 bp, Homo sapien
caaggtacggtcaagcatgtcatcc

SEQ ID NO: 1405122 - DNA, 25 bp, Homo sapien
tggtgaaacagagtcctgagtggct

SEQ ID NO: 1405123 - DNA, 25 bp, Homo sapien
catctggctgggttgatttcctggg

SEQ ID NO: 1405124 - DNA, 25 bp, Homo sapien
gaggagaggcacaaacatctggctg

SEQ ID NO: 1405125 - DNA, 25 bp, Homo sapien
ttctatctcttcctcaggttggtga

SEQ ID NO: 1405126 - DNA, 25 bp, Homo sapien
tgtaggttgcagtgaattatgagac

SEQ ID NO: 1405127 - DNA, 25 bp, Homo sapien
aaggccaggaattgtaggttgcagt

SEQ ID NO: 1405128 - DNA, 25 bp, Homo sapien
catttaaggccaggaattgtaggtt

SEQ ID NO: 1405129 - DNA, 25 bp, Homo sapien
gttgcagtgaattatgagacctcac

SEQ ID NO: 1405130 - DNA, 25 bp, Homo sapien
taaacagcagggctacgggtgattt

SEQ ID NO: 1405131 - DNA, 25 bp, Homo sapien
agcagggctacgggtgatttttatt

SEQ ID NO: 1405132 - DNA, 25 bp, Homo sapien
acagcagggctacgggtgattttta

SEQ ID NO: 1405133 - DNA, 25 bp, Homo sapien
tcctctctgttttgtgttacattat

SEQ ID NO: 1405134 - DNA, 25 bp, Homo sapien
tagtccctgttttggcaatttgggc

SEQ ID NO: 1405135 - DNA, 25 bp, Homo sapien
gagtcacattattctatggccccaa

SEQ ID NO: 1405136 - DNA, 25 bp, Homo sapien
aaatgagggtcccaaatgagctgcc

SEQ ID NO: 1405137 - DNA, 25 bp, Homo sapien
ggccaatgtctagatactccaggtt

SEQ ID NO: 1405138 - DNA, 25 bp, Homo sapien
tttggaacttaagagaccaggttca

SEQ ID NO: 1405139 - DNA, 25 bp, Homo sapien
tgtttaaccaggacacctagtccta

SEQ ID NO: 1405140 - DNA, 25 bp, Homo sapien
gttggacaagcctcactataccttc

SEQ ID NO: 1405141 - DNA, 25 bp, Homo sapien
actaattcaggccatgacaagaaac

SEQ ID NO: 1405142 - DNA, 25 bp, Homo sapien
agttccaattccgtaccaaatcaat

SEQ ID NO: 1405143 - DNA, 25 bp, Homo sapien
tcactgttgacccttagcaacacag

SEQ ID NO: 1405144 - DNA, 25 bp, Homo sapien
caattccgtaccaaatcaatatccc

SEQ ID NO: 1405145 - DNA, 25 bp, Homo sapien
ctgttgacccttagcaacacagcag

SEQ ID NO: 1405146 - DNA, 25 bp, Homo sapien
tgacaagaatgtaacctagagacct

SEQ ID NO: 1405147 - DNA, 25 bp, Homo sapien
taacctagagaccttgtatacctta

SEQ ID NO: 1405148 - DNA, 25 bp, Homo sapien
ttgacaagaatgtaacctagagacc

SEQ ID NO: 1405149 - DNA, 25 bp, Homo sapien
gtattgacaagaatgtaacctagag

SEQ ID NO: 1405150 - DNA, 25 bp, Homo sapien
tgagccagtagcgtggagttttcct

SEQ ID NO: 1405151 - DNA, 25 bp, Homo sapien
ccaggatagtgacaccgaactcaag

SEQ ID NO: 1405152 - DNA, 25 bp, Homo sapien
gaactcaagtccttaacctggtcag

SEQ ID NO: 1405153 - DNA, 25 bp, Homo sapien
caaagactgtacttcgaagccagct

SEQ ID NO: 1405154 - DNA, 25 bp, Homo sapien
gacatcgttcgtccaggtgtcccag

SEQ ID NO: 1405155 - DNA, 25 bp, Homo sapien
cttctcaacctggacatcgttcgtc

SEQ ID NO: 1405156 - DNA, 25 bp, Homo sapien
tcagacccgaccttctcaacctgga

SEQ ID NO: 1405157 - DNA, 25 bp, Homo sapien
gacttcacgcccttaacttccgcca

SEQ ID NO: 1405158 - DNA, 25 bp, Homo sapien
cggaagtcagccaacaacagcgaat

SEQ ID NO: 1405159 - DNA, 25 bp, Homo sapien
gattccacggaaacggctttggcac

SEQ ID NO: 1405160 - DNA, 25 bp, Homo sapien
gcgccgcagtgcatcaaggagcatg

SEQ ID NO: 1405161 - DNA, 25 bp, Homo sapien
ggagcatgcgcctaacactatgcgc

SEQ ID NO: 1405162 - DNA, 25 bp, Homo sapien
gcagatcagttcttagcaatgatgt

SEQ ID NO: 1405163 - DNA, 25 bp, Homo sapien
tttgcaaggcgctagaatcttttat

SEQ ID NO: 1405164 - DNA, 25 bp, Homo sapien
gctgcagatcagttcttagcaatga

SEQ ID NO: 1405165 - DNA, 25 bp, Homo sapien
tttctgctttgcaaggcgctagaat

SEQ ID NO: 1405166 - DNA, 25 bp, Homo sapien
aactgaagaaattagcctaactgcc

SEQ ID NO: 1405167 - DNA, 25 bp, Homo sapien
ggaaagacccctataaatctatata

SEQ ID NO: 1405168 - DNA, 25 bp, Homo sapien
caagttgcagattttaatccatgga

SEQ ID NO: 1405169 - DNA, 25 bp, Homo sapien
caatgtaaccatatacttgcatgtc

SEQ ID NO: 1405170 - DNA, 25 bp, Homo sapien
cacatcttagcttttgcacaaggca

SEQ ID NO: 1405171 - DNA, 25 bp, Homo sapien
cacaaggcattcgtggtcaggaata

SEQ ID NO: 1405172 - DNA, 25 bp, Homo sapien
ggaatgccttctcctaagagtcagt

SEQ ID NO: 1405173 - DNA, 25 bp, Homo sapien
caggaataggttagggaatggtcac

SEQ ID NO: 1405174 - DNA, 25 bp, Homo sapien
atggagtttcacaattgtttcccag

SEQ ID NO: 1405175 - DNA, 25 bp, Homo sapien
gagatggagtttcacaattgtttcc

SEQ ID NO: 1405176 - DNA, 25 bp, Homo sapien
gcctcccaaagtgtaggccgatagt

SEQ ID NO: 1405177 - DNA, 25 bp, Homo sapien
cctcccaaagtgtaggccgatagtt

SEQ ID NO: 1405178 - DNA, 25 bp, Homo sapien
gctacctagcaccacgaatagaact

SEQ ID NO: 1405179 - DNA, 25 bp, Homo sapien
taccggtctggtatggacatgaaca

SEQ ID NO: 1405180 - DNA, 25 bp, Homo sapien
tatcatacctgtcaagctacctagc

SEQ ID NO: 1405181 - DNA, 25 bp, Homo sapien
gcaatgtttctactgcctgactacc

SEQ ID NO: 1405182 - DNA, 25 bp, Homo sapien
tactctccgcatataacaaggtcag

SEQ ID NO: 1405183 - DNA, 25 bp, Homo sapien
tacagttcctaaactatgcacaggg

SEQ ID NO: 1405184 - DNA, 25 bp, Homo sapien
tgaagggccgaaaaaacatcttgcc

SEQ ID NO: 1405185 - DNA, 25 bp, Homo sapien
taaaaagggaccactactcagagct

SEQ ID NO: 1405186 - DNA, 25 bp, Homo sapien
aaagcgaagcttgtactgagaatac

SEQ ID NO: 1405187 - DNA, 25 bp, Homo sapien
cacttatcccggtgaatttgggcca

SEQ ID NO: 1405188 - DNA, 25 bp, Homo sapien
taagtccctgcaaacatatagccca

SEQ ID NO: 1405189 - DNA, 25 bp, Homo sapien
ggttcccaggagaaaccttcatcac

SEQ ID NO: 1405190 - DNA, 25 bp, Homo sapien
taattaatagcgcaacagaacccaa

SEQ ID NO: 1405191 - DNA, 25 bp, Homo sapien
taaaaactcctagtaggcatgtccc

SEQ ID NO: 1405192 - DNA, 25 bp, Homo sapien
caggttactggactgctttgataca

SEQ ID NO: 1405193 - DNA, 25 bp, Homo sapien
tcagttaagtgaaagagcaagcacc

SEQ ID NO: 1405194 - DNA, 25 bp, Homo sapien
tcctacgtatctcccgtacaagggc

SEQ ID NO: 1405195 - DNA, 25 bp, Homo sapien
aaagggacagctgaattctcgggcc

SEQ ID NO: 1405196 - DNA, 25 bp, Homo sapien
catcaatatagtagcggtatgcagc

SEQ ID NO: 1405197 - DNA, 25 bp, Homo sapien
catacactgtttttgggcttagatt

SEQ ID NO: 1405198 - DNA, 25 bp, Homo sapien
gaaccacaggtgtatcgtcagtacg

SEQ ID NO: 1405199 - DNA, 25 bp, Homo sapien
tcgacgatccgtgatagagtaacag

SEQ ID NO: 1405200 - DNA, 25 bp, Homo sapien
ggtcccgcatggctgtaaactctgc

SEQ ID NO: 1405201 - DNA, 25 bp, Homo sapien
tacgtcggactcgataaataagctg

SEQ ID NO: 1405202 - DNA, 25 bp, Homo sapien
cggatcctgatcttataagcatctt

SEQ ID NO: 1405203 - DNA, 25 bp, Homo sapien
caatacggatcctgatcttataagc

SEQ ID NO: 1405204 - DNA, 25 bp, Homo sapien
gattggcaggctcatcatcaatacg

SEQ ID NO: 1405205 - DNA, 25 bp, Homo sapien
ggctcatcatcaatacggatcctga

SEQ ID NO: 1405206 - DNA, 25 bp, Homo sapien
cacattttctcaggaagcatgctaa

SEQ ID NO: 1405207 - DNA, 25 bp, Homo sapien
ctcatcttacagagtagtacattgt

SEQ ID NO: 1405208 - DNA, 25 bp, Homo sapien
cataaactgagtcttcaactgaagt

SEQ ID NO: 1405209 - DNA, 25 bp, Homo sapien
gatgtagtttattcacagctgaaga

SEQ ID NO: 1405210 - DNA, 25 bp, Homo sapien
ggctatctgggcacagtggtgactg

SEQ ID NO: 1405211 - DNA, 25 bp, Homo sapien
aggctatctgggcacagtggtgact

SEQ ID NO: 1405212 - DNA, 25 bp, Homo sapien
gctatctgggcacagtggtgactgc

SEQ ID NO: 1405213 - DNA, 25 bp, Homo sapien
tgcactcagccgagaccccatctct

SEQ ID NO: 1405214 - DNA, 25 bp, Homo sapien
ttgttattatctaccagacattata

SEQ ID NO: 1405215 - DNA, 25 bp, Homo sapien
ttattatctaccagacattatacta

SEQ ID NO: 1405216 - DNA, 25 bp, Homo sapien
actgcactcagccgagaccccatct

SEQ ID NO: 1405217 - DNA, 25 bp, Homo sapien
gattacaggcatgcagcagtaacac

SEQ ID NO: 1405218 - DNA, 25 bp, Homo sapien
aggcatgcagcagtaacacgcccag

SEQ ID NO: 1405219 - DNA, 25 bp, Homo sapien
acaggcatgcagcagtaacacgccc

SEQ ID NO: 1405220 - DNA, 25 bp, Homo sapien
ttacaggcatgcagcagtaacacgc

SEQ ID NO: 1405221 - DNA, 25 bp, Homo sapien
ctggagtgtgatggcactatctcgg

SEQ ID NO: 1405222 - DNA, 25 bp, Homo sapien
tggagtgtgatggcactatctcggc

SEQ ID NO: 1405223 - DNA, 25 bp, Homo sapien
gagttgtcccattaatgttcagtaa

SEQ ID NO: 1405224 - DNA, 25 bp, Homo sapien
ggttgtaagagttcagcagcctggc

SEQ ID NO: 1405225 - DNA, 25 bp, Homo sapien
tgtggaagttcaaaccagctgactc

SEQ ID NO: 1405226 - DNA, 25 bp, Homo sapien
agaaaaggcttcgttaagtggcctg

SEQ ID NO: 1405227 - DNA, 25 bp, Homo sapien
tgggatcatgatcttctgggaatcg

SEQ ID NO: 1405228 - DNA, 25 bp, Homo sapien
tctgggaatcggtggctgatgaact

SEQ ID NO: 1405229 - DNA, 25 bp, Homo sapien
gatcatgatcttctgggaatcggtg

SEQ ID NO: 1405230 - DNA, 25 bp, Homo sapien
atgatcttctgggaatcggtggctg

SEQ ID NO: 1405231 - DNA, 25 bp, Homo sapien
gctgctacagcagctaccaactggg

SEQ ID NO: 1405232 - DNA, 25 bp, Homo sapien
tgtactcccgtgagagcccagcggg

SEQ ID NO: 1405233 - DNA, 25 bp, Homo sapien
cagcatcactagtttgtactcccgt

SEQ ID NO: 1405234 - DNA, 25 bp, Homo sapien
cagctaccaactgggcgagttccag

SEQ ID NO: 1405235 - DNA, 25 bp, Homo sapien
tcctcttggggccttcctcggttgc

SEQ ID NO: 1405236 - DNA, 25 bp, Homo sapien
ttcactcgcggaggctccggcactg

SEQ ID NO: 1405237 - DNA, 25 bp, Homo sapien
tggaacaccacagccggtcgggtca

SEQ ID NO: 1405238 - DNA, 25 bp, Homo sapien
ccggtcgggtcacgcacttcgtctt

SEQ ID NO: 1405239 - DNA, 25 bp, Homo sapien
tcgtcttccttcactcgcggaggct

SEQ ID NO: 1405240 - DNA, 25 bp, Homo sapien
tcagtgtatggatgggttgtggaag

SEQ ID NO: 1405241 - DNA, 25 bp, Homo sapien
tctcaaactattcctggttcagcag

SEQ ID NO: 1405242 - DNA, 25 bp, Homo sapien
ggttcagcagactagctccttcact

SEQ ID NO: 1405243 - DNA, 25 bp, Homo sapien
ttaagtccaaaatcctatagccagc

SEQ ID NO: 1405244 - DNA, 25 bp, Homo sapien
aggataagtttatacaaagccagcc

SEQ ID NO: 1405245 - DNA, 25 bp, Homo sapien
ggccccagagtcttgttaaatcaaa

SEQ ID NO: 1405246 - DNA, 25 bp, Homo sapien
taatggctatgagaccaatgtgcct

SEQ ID NO: 1405247 - DNA, 25 bp, Homo sapien
tcaaatgtgtatgggaacgaccctg

SEQ ID NO: 1405248 - DNA, 25 bp, Homo sapien
caatgtgcctgaaggtgccagcttt

SEQ ID NO: 1405249 - DNA, 25 bp, Homo sapien
tagctcgtggttgtgatgaaggata

SEQ ID NO: 1405250 - DNA, 25 bp, Homo sapien
tctgttgtttagctcgtggttgtga

SEQ ID NO: 1405251 - DNA, 25 bp, Homo sapien
ggatattggtatcccaaactccagc

SEQ ID NO: 1405252 - DNA, 25 bp, Homo sapien
ccagaatggcatctgttgtttagct

SEQ ID NO: 1405253 - DNA, 25 bp, Homo sapien
gccaccaagccaaatcccttctctg

SEQ ID NO: 1405254 - DNA, 25 bp, Homo sapien
catcagatgaatctgcagcataagc

SEQ ID NO: 1405255 - DNA, 25 bp, Homo sapien
tgaatctgcagcataagccaccaag

SEQ ID NO: 1405256 - DNA, 25 bp, Homo sapien
accaagccaaatcccttctctgtag

SEQ ID NO: 1405257 - DNA, 25 bp, Homo sapien
tgaagatcacacgaaaaacagcacc

SEQ ID NO: 1405258 - DNA, 25 bp, Homo sapien
tctagatacacgttggttggaaaca

SEQ ID NO: 1405259 - DNA, 25 bp, Homo sapien
taagtccgtatcagatgacctcctg

SEQ ID NO: 1405260 - DNA, 25 bp, Homo sapien
caatggtcacccaaaaacgttgaag

SEQ ID NO: 1405261 - DNA, 25 bp, Homo sapien
ttagaccagtcttagccactcccct

SEQ ID NO: 1405262 - DNA, 25 bp, Homo sapien
tgttcccccagctatatcacactca

SEQ ID NO: 1405263 - DNA, 25 bp, Homo sapien
cctgttcccccagctatatcacact

SEQ ID NO: 1405264 - DNA, 25 bp, Homo sapien
accagtcttagccactcccctgttc

SEQ ID NO: 1405265 - DNA, 25 bp, Homo sapien
tcctttcatcggactctgtttttat

SEQ ID NO: 1405266 - DNA, 25 bp, Homo sapien
ctccctgttaaggtcccagacccat

SEQ ID NO: 1405267 - DNA, 25 bp, Homo sapien
agacccattcctttcatcggactct

SEQ ID NO: 1405268 - DNA, 25 bp, Homo sapien
tggctccctgttaaggtcccagacc

SEQ ID NO: 1405269 - DNA, 25 bp, Homo sapien
caatggaagtcaagaaagatgtctg

SEQ ID NO: 1405270 - DNA, 25 bp, Homo sapien
tggcaggctgaactcccacattcat

SEQ ID NO: 1405271 - DNA, 25 bp, Homo sapien
tctgttactgtctacccttaggaaa

SEQ ID NO: 1405272 - DNA, 25 bp, Homo sapien
gcctgtctacacagcaattgccatg

SEQ ID NO: 1405273 - DNA, 25 bp, Homo sapien
ctggcttcgatcctgcaccttcaat

SEQ ID NO: 1405274 - DNA, 25 bp, Homo sapien
acttgctggcttcgatcctgcacct

SEQ ID NO: 1405275 - DNA, 25 bp, Homo sapien
tgctggcttcgatcctgcaccttca

SEQ ID NO: 1405276 - DNA, 25 bp, Homo sapien
ggcttcgatcctgcaccttcaatct

SEQ ID NO: 1405277 - DNA, 25 bp, Homo sapien
ctaaattagtcatatgaatgggtcc

SEQ ID NO: 1405278 - DNA, 25 bp, Homo sapien
taaattagtcatatgaatgggtcca

SEQ ID NO: 1405279 - DNA, 25 bp, Homo sapien
aaattagtcatatgaatgggtccat

SEQ ID NO: 1405280 - DNA, 25 bp, Homo sapien
aattagtcatatgaatgggtccatg

SEQ ID NO: 1405281 - DNA, 25 bp, Homo sapien
ttttctctataggacttggacaggg

SEQ ID NO: 1405282 - DNA, 25 bp, Homo sapien
gaaagcagaaatcctagtactggga

SEQ ID NO: 1405283 - DNA, 25 bp, Homo sapien
gatctgctgtgtaactgtagtcaaa

SEQ ID NO: 1405284 - DNA, 25 bp, Homo sapien
caactgccgtattgactttagctcc

SEQ ID NO: 1405285 - DNA, 25 bp, Homo sapien
ctggtatccaagcagtccagattcc

SEQ ID NO: 1405286 - DNA, 25 bp, Homo sapien
cagattcccgttcatctggtagctc

SEQ ID NO: 1405287 - DNA, 25 bp, Homo sapien
gcagcaggaataaaaggaccaccca

SEQ ID NO: 1405288 - DNA, 25 bp, Homo sapien
aaggcagttttgacaggagcagcag

SEQ ID NO: 1405289 - DNA, 25 bp, Homo sapien
caggcaaggcagttttgacaggagc

SEQ ID NO: 1405290 - DNA, 25 bp, Homo sapien
cagcaggaataaaaggaccacccat

SEQ ID NO: 1405291 - DNA, 25 bp, Homo sapien
ttcaaaagtagagacctacagagct

SEQ ID NO: 1405292 - DNA, 25 bp, Homo sapien
tctgctgtattgcttcccaattaca

SEQ ID NO: 1405293 - DNA, 25 bp, Homo sapien
gaccttcaaaagtagagacctacag

SEQ ID NO: 1405294 - DNA, 25 bp, Homo sapien
tgccttaactccctgcttttaacca

SEQ ID NO: 1405295 - DNA, 25 bp, Homo sapien
cacagagaaggacccaccataaatc

SEQ ID NO: 1405296 - DNA, 25 bp, Homo sapien
tggttcgaggctgccatttgctatg

SEQ ID NO: 1405297 - DNA, 25 bp, Homo sapien
actgggcaatggttcgaggctgcca

SEQ ID NO: 1405298 - DNA, 25 bp, Homo sapien
gctatggcatgggtacactatgaga

SEQ ID NO: 1405299 - DNA, 25 bp, Homo sapien
gggtatggcaaactatgactgtggc

SEQ ID NO: 1405300 - DNA, 25 bp, Homo sapien
taaacagctatttggtgtgcaagac

SEQ ID NO: 1405301 - DNA, 25 bp, Homo sapien
tgtggtgaaggtagccccattctcc

SEQ ID NO: 1405302 - DNA, 25 bp, Homo sapien
cattgaggtattatccacgggctgc

SEQ ID NO: 1405303 - DNA, 25 bp, Homo sapien
taatgccggcaagactccaggtgct

SEQ ID NO: 1405304 - DNA, 25 bp, Homo sapien
ggtgctaatgaaacagctggtggca

SEQ ID NO: 1405305 - DNA, 25 bp, Homo sapien
cactatgcttggtactccgtaggga

SEQ ID NO: 1405306 - DNA, 25 bp, Homo sapien
tgggactccagtaggtaatgccggc

SEQ ID NO: 1405307 - DNA, 25 bp, Homo sapien
tggttgaggagggacactacttata

SEQ ID NO: 1405308 - DNA, 25 bp, Homo sapien
cattggatggataatatggtggttg

SEQ ID NO: 1405309 - DNA, 25 bp, Homo sapien
ctgatagccattggatggataatat

SEQ ID NO: 1405310 - DNA, 25 bp, Homo sapien
cactacttatagcagagggttgtgt

SEQ ID NO: 1405311 - DNA, 25 bp, Homo sapien
cacaaatctagagtattcagcatga

SEQ ID NO: 1405312 - DNA, 25 bp, Homo sapien
taatctgattcacaaatctagagta

SEQ ID NO: 1405313 - DNA, 25 bp, Homo sapien
ggtacagcagtattaatctgattca

SEQ ID NO: 1405314 - DNA, 25 bp, Homo sapien
ctggtaaaggtacagcagtattaat

SEQ ID NO: 1405315 - DNA, 25 bp, Homo sapien
acccagggtacaatgcaatggcatg

SEQ ID NO: 1405316 - DNA, 25 bp, Homo sapien
ccagggtacaatgcaatggcatggt

SEQ ID NO: 1405317 - DNA, 25 bp, Homo sapien
gcgcgatcttgtatcactgcaaatc

SEQ ID NO: 1405318 - DNA, 25 bp, Homo sapien
tccaccttcacggtttaagcgattc

SEQ ID NO: 1405319 - DNA, 25 bp, Homo sapien
tttgcaaaagattctcacaaagctt

SEQ ID NO: 1405320 - DNA, 25 bp, Homo sapien
gtttgcaaaagattctcacaaagct

SEQ ID NO: 1405321 - DNA, 25 bp, Homo sapien
tgtttgcaaaagattctcacaaagc

SEQ ID NO: 1405322 - DNA, 25 bp, Homo sapien
ttgcaaaagattctcacaaagcttc

SEQ ID NO: 1405323 - DNA, 25 bp, Homo sapien
tacataggttcaaaagcttctcggc

SEQ ID NO: 1405324 - DNA, 25 bp, Homo sapien
ctttgccccgcaggaagactttggc

SEQ ID NO: 1405325 - DNA, 25 bp, Homo sapien
tgcaaataggagcagcctggacctt

SEQ ID NO: 1405326 - DNA, 25 bp, Homo sapien
ggtacagcatgttctagacccacaa

SEQ ID NO: 1405327 - DNA, 25 bp, Homo sapien
gtacagtcagccctgtgatactctt

SEQ ID NO: 1405328 - DNA, 25 bp, Homo sapien
tatcagcaaagtcttacttcatcag

SEQ ID NO: 1405329 - DNA, 25 bp, Homo sapien
aaagtcttacttcatcagactcagc

SEQ ID NO: 1405330 - DNA, 25 bp, Homo sapien
ggaggaatgtatcagcaaagtctta

SEQ ID NO: 1405331 - DNA, 25 bp, Homo sapien
catgcccgggtaatgttcgtgacgg

SEQ ID NO: 1405332 - DNA, 25 bp, Homo sapien
atgcccgggtaatgttcgtgacggg

SEQ ID NO: 1405333 - DNA, 25 bp, Homo sapien
ccatgcccgggtaatgttcgtgacg

SEQ ID NO: 1405334 - DNA, 25 bp, Homo sapien
gataatgctattaacgatccctccc

SEQ ID NO: 1405335 - DNA, 25 bp, Homo sapien
tgataatgctattaacgatccctcc

SEQ ID NO: 1405336 - DNA, 25 bp, Homo sapien
tggctaacagctggagacaactgag

SEQ ID NO: 1405337 - DNA, 25 bp, Homo sapien
ccattaaaagttggacttgttcctg

SEQ ID NO: 1405338 - DNA, 25 bp, Homo sapien
gcttttaccactccattggtgataa

SEQ ID NO: 1405339 - DNA, 25 bp, Homo sapien
taatttctttgatccggtttacagc

SEQ ID NO: 1405340 - DNA, 25 bp, Homo sapien
tgtccactaattcccgtgtctggcc

SEQ ID NO: 1405341 - DNA, 25 bp, Homo sapien
gtgtctggccctgaacatgaagata

SEQ ID NO: 1405342 - DNA, 25 bp, Homo sapien
cctgaacatgaagatataatggacg

SEQ ID NO: 1405343 - DNA, 25 bp, Homo sapien
aacatgaagatataatggacgatcc

SEQ ID NO: 1405344 - DNA, 25 bp, Homo sapien
ctcgagttgatactgcagccccact

SEQ ID NO: 1405345 - DNA, 25 bp, Homo sapien
ttttcctcagttgtcatgaacctcc

SEQ ID NO: 1405346 - DNA, 25 bp, Homo sapien
tactgcagccccactaagtcggctg

SEQ ID NO: 1405347 - DNA, 25 bp, Homo sapien
catgaacctccctcgagttgatact

SEQ ID NO: 1405348 - DNA, 25 bp, Homo sapien
taccaccaggtcatccttgctttta

SEQ ID NO: 1405349 - DNA, 25 bp, Homo sapien
caggtcatccttgcttttattgcta

SEQ ID NO: 1405350 - DNA, 25 bp, Homo sapien
ttgagtctgtcctcgagtcagcaag

SEQ ID NO: 1405351 - DNA, 25 bp, Homo sapien
tattgctagttaggcctttgccagg

SEQ ID NO: 1405352 - DNA, 25 bp, Homo sapien
caaagccatgtaaccagtaactgtg

SEQ ID NO: 1405353 - DNA, 25 bp, Homo sapien
tttgcaaacaataggctgcgcctgg

SEQ ID NO: 1405354 - DNA, 25 bp, Homo sapien
tgtatcctgctgaggtcaactacct

SEQ ID NO: 1405355 - DNA, 25 bp, Homo sapien
caaggagcactacatctttgtcaag

SEQ ID NO: 1405356 - DNA, 25 bp, Homo sapien
tcgcaattagtggagacccttcaac

SEQ ID NO: 1405357 - DNA, 25 bp, Homo sapien
caactattaaattcgcaattagtgg

SEQ ID NO: 1405358 - DNA, 25 bp, Homo sapien
taaattcgcaattagtggagaccct

SEQ ID NO: 1405359 - DNA, 25 bp, Homo sapien
tagtggagacccttcaacttcaaat

SEQ ID NO: 1405360 - DNA, 25 bp, Homo sapien
catccaaggctcctgaaggagcagc

SEQ ID NO: 1405361 - DNA, 25 bp, Homo sapien
cagcatccaaggctcctgaaggagc

SEQ ID NO: 1405362 - DNA, 25 bp, Homo sapien
cttcccttttgccatgagcatggca

SEQ ID NO: 1405363 - DNA, 25 bp, Homo sapien
gcttcccttttgccatgagcatggc

SEQ ID NO: 1405364 - DNA, 25 bp, Homo sapien
gagctggttggtcccatttgctgcg

SEQ ID NO: 1405365 - DNA, 25 bp, Homo sapien
tggttggtcccatttgctgcggcgc

SEQ ID NO: 1405366 - DNA, 25 bp, Homo sapien
gctggttggtcccatttgctgcggc

SEQ ID NO: 1405367 - DNA, 25 bp, Homo sapien
tggagctggttggtcccatttgctg

SEQ ID NO: 1405368 - DNA, 25 bp, Homo sapien
cctatacgcagcttctcagggtccc

SEQ ID NO: 1405369 - DNA, 25 bp, Homo sapien
tatacgcagcttctcagggtccctc

SEQ ID NO: 1405370 - DNA, 25 bp, Homo sapien
gatgccctcgcccctgaagccgtac

SEQ ID NO: 1405371 - DNA, 25 bp, Homo sapien
cgcagcttctcagggtccctccgcc

SEQ ID NO: 1405372 - DNA, 25 bp, Homo sapien
caggatgtgtcgcgctccccgcgga

SEQ ID NO: 1405373 - DNA, 25 bp, Homo sapien
agctccaggatgtgtcgcgctcccc

SEQ ID NO: 1405374 - DNA, 25 bp, Homo sapien
tccaggatgtgtcgcgctccccgcg

SEQ ID NO: 1405375 - DNA, 25 bp, Homo sapien
gatgtgtcgcgctccccgcggacat

SEQ ID NO: 1405376 - DNA, 25 bp, Homo sapien
accgcttctactcaaccacccgcca

SEQ ID NO: 1405377 - DNA, 25 bp, Homo sapien
caaccacccgccaactatccgacta

SEQ ID NO: 1405378 - DNA, 25 bp, Homo sapien
cgaccgcttctactcaaccacccgc

SEQ ID NO: 1405379 - DNA, 25 bp, Homo sapien
ggcgaccgcttctactcaaccaccc

SEQ ID NO: 1405380 - DNA, 25 bp, Homo sapien
ctctcgtcacttccgcccccaacgt

SEQ ID NO: 1405381 - DNA, 25 bp, Homo sapien
gaaaatgtcgattccgattggactc

SEQ ID NO: 1405382 - DNA, 25 bp, Homo sapien
cgagcggttccggtgaaaatgtcga

SEQ ID NO: 1405383 - DNA, 25 bp, Homo sapien
gcacagcctcttccggtcgtggggc

SEQ ID NO: 1405384 - DNA, 25 bp, Homo sapien
tggactctcgatgatttaaaggcat

SEQ ID NO: 1405385 - DNA, 25 bp, Homo sapien
aaatttgtgatgtaactcctatgcc

SEQ ID NO: 1405386 - DNA, 25 bp, Homo sapien
tttagtgtgtccacaagattgtgcc

SEQ ID NO: 1405387 - DNA, 25 bp, Homo sapien
gaaacccctcacctgttaacagtca

SEQ ID NO: 1405388 - DNA, 25 bp, Homo sapien
cccgcaagacatgggctaccactaa

SEQ ID NO: 1405389 - DNA, 25 bp, Homo sapien
tccagagtatctccctcaaactcat

SEQ ID NO: 1405390 - DNA, 25 bp, Homo sapien
cagagtatctccctcaaactcattt

SEQ ID NO: 1405391 - DNA, 25 bp, Homo sapien
agtatctccctcaaactcatttaga

SEQ ID NO: 1405392 - DNA, 25 bp, Homo sapien
gagtatctccctcaaactcatttag

SEQ ID NO: 1405393 - DNA, 25 bp, Homo sapien
tatggaacaaaaggattcgttgctc

SEQ ID NO: 1405394 - DNA, 25 bp, Homo sapien
ggctaatgaatcagaggtcagtgcc

SEQ ID NO: 1405395 - DNA, 25 bp, Homo sapien
tctccggtatcaaggccaaaaatgc

SEQ ID NO: 1405396 - DNA, 25 bp, Homo sapien
cagggtatcccttgtctttctccgg

SEQ ID NO: 1405397 - DNA, 25 bp, Homo sapien
tggactggaactaagaaggccggcc

SEQ ID NO: 1405398 - DNA, 25 bp, Homo sapien
gcagtggttacttttgttagtgccc

SEQ ID NO: 1405399 - DNA, 25 bp, Homo sapien
ttgcagtggttacttttgttagtgc

SEQ ID NO: 1405400 - DNA, 25 bp, Homo sapien
ttttgttagtgccccctctcttcag

SEQ ID NO: 1405401 - DNA, 25 bp, Homo sapien
cttttgttagtgccccctctcttca

SEQ ID NO: 1405402 - DNA, 25 bp, Homo sapien
cggctctctactaccatcctcctca

SEQ ID NO: 1405403 - DNA, 25 bp, Homo sapien
cctcagaattggcagacattatgga

SEQ ID NO: 1405404 - DNA, 25 bp, Homo sapien
acttaggtcactgcccggctctcta

SEQ ID NO: 1405405 - DNA, 25 bp, Homo sapien
ttcagaggaacttaggtcactgccc

SEQ ID NO: 1405406 - DNA, 25 bp, Homo sapien
acatttgggggctggtcgacatttg

SEQ ID NO: 1405407 - DNA, 25 bp, Homo sapien
catttgggggcaagggttccactga

SEQ ID NO: 1405408 - DNA, 25 bp, Homo sapien
agaagaaaattcttcgacatttggg

SEQ ID NO: 1405409 - DNA, 25 bp, Homo sapien
aatcccccaaattcacgctgaggtt

SEQ ID NO: 1405410 - DNA, 25 bp, Homo sapien
gatgagcctgaatataccccagtag

SEQ ID NO: 1405411 - DNA, 25 bp, Homo sapien
ccagtagtgttcaaggacaaggccc

SEQ ID NO: 1405412 - DNA, 25 bp, Homo sapien
taaatggccccaggtatccaaggat

SEQ ID NO: 1405413 - DNA, 25 bp, Homo sapien
cacgtgcagttgactttggtacaaa

SEQ ID NO: 1405414 - DNA, 25 bp, Homo sapien
tccccgtcgcggctctccgtctcct

SEQ ID NO: 1405415 - DNA, 25 bp, Homo sapien
cgtctcctccgggatgtcctgcatt

SEQ ID NO: 1405416 - DNA, 25 bp, Homo sapien
ttagctctcggaggctacagcctcc

SEQ ID NO: 1405417 - DNA, 25 bp, Homo sapien
cctccgggatgtcctgcattctggt

SEQ ID NO: 1405418 - DNA, 25 bp, Homo sapien
gtccatgtctccgccagggtctcac

SEQ ID NO: 1405419 - DNA, 25 bp, Homo sapien
tctggtccatgtctccgccagggtc

SEQ ID NO: 1405420 - DNA, 25 bp, Homo sapien
tggtccatgtctccgccagggtctc

SEQ ID NO: 1405421 - DNA, 25 bp, Homo sapien
ctctggtccatgtctccgccagggt

SEQ ID NO: 1405422 - DNA, 25 bp, Homo sapien
ctgtggggcggagacagacggctgc

SEQ ID NO: 1405423 - DNA, 25 bp, Homo sapien
tggggcggagacagacggctgctac

SEQ ID NO: 1405424 - DNA, 25 bp, Homo sapien
ctcgtggactgtggggcggagacag

SEQ ID NO: 1405425 - DNA, 25 bp, Homo sapien
gactgtggggcggagacagacggct

SEQ ID NO: 1405426 - DNA, 25 bp, Homo sapien
tctcggtcctcaaagtttcgatgga

SEQ ID NO: 1405427 - DNA, 25 bp, Homo sapien
ttcgatggacagagcgagtagtgac

SEQ ID NO: 1405428 - DNA, 25 bp, Homo sapien
gatccaggcggtcagtgcctcggct

SEQ ID NO: 1405429 - DNA, 25 bp, Homo sapien
tagtgacaggtagatccaggcggtc

SEQ ID NO: 1405430 - DNA, 25 bp, Homo sapien
catgttgccgctgcagtaatgccag

SEQ ID NO: 1405431 - DNA, 25 bp, Homo sapien
catcccgagagttggctcggcacag

SEQ ID NO: 1405432 - DNA, 25 bp, Homo sapien
gcttccatcagagtgtcctgctggg

SEQ ID NO: 1405433 - DNA, 25 bp, Homo sapien
tcaagtacagggcatcgcctgcggg

SEQ ID NO: 1405434 - DNA, 25 bp, Homo sapien
agattgaccaatcgctgtaacgcct

SEQ ID NO: 1405435 - DNA, 25 bp, Homo sapien
agtccatagagattgaccaatcgct

SEQ ID NO: 1405436 - DNA, 25 bp, Homo sapien
tagagattgaccaatcgctgtaacg

SEQ ID NO: 1405437 - DNA, 25 bp, Homo sapien
tccatagagattgaccaatcgctgt

SEQ ID NO: 1405438 - DNA, 25 bp, Homo sapien
tgatctcagctgatttccatttcga

SEQ ID NO: 1405439 - DNA, 25 bp, Homo sapien
gcggtgatctcagctgatttccatt

SEQ ID NO: 1405440 - DNA, 25 bp, Homo sapien
atctcagctgatttccatttcgatc

SEQ ID NO: 1405441 - DNA, 25 bp, Homo sapien
ctcttgcggtgatctcagctgattt

SEQ ID NO: 1405442 - DNA, 25 bp, Homo sapien
aagtcccagaacctcttgaggacct

SEQ ID NO: 1405443 - DNA, 25 bp, Homo sapien
gtcccagaacctcttgaggacctac

SEQ ID NO: 1405444 - DNA, 25 bp, Homo sapien
ccaagtcccagaacctcttgaggac

SEQ ID NO: 1405445 - DNA, 25 bp, Homo sapien
ttgccaagtcccagaacctcttgag

SEQ ID NO: 1405446 - DNA, 25 bp, Homo sapien
tagagtctgagtcagctctgcagag

SEQ ID NO: 1405447 - DNA, 25 bp, Homo sapien
tctgcagagttcaatggagccattg

SEQ ID NO: 1405448 - DNA, 25 bp, Homo sapien
tggctagagtctgagtcagctctgc

SEQ ID NO: 1405449 - DNA, 25 bp, Homo sapien
gagccattgaaggttctggcctcac

SEQ ID NO: 1405450 - DNA, 25 bp, Homo sapien
accgctgtctggttccaagggcagg

SEQ ID NO: 1405451 - DNA, 25 bp, Homo sapien
gactcgtgttaccaccgctgtctgg

SEQ ID NO: 1405452 - DNA, 25 bp, Homo sapien
gcagtgaccccaggactcgtgttac

SEQ ID NO: 1405453 - DNA, 25 bp, Homo sapien
tctcggggtgtcaagagcagttcca

SEQ ID NO: 1405454 - DNA, 25 bp, Homo sapien
tcaagggactcagagcggaaaaggc

SEQ ID NO: 1405455 - DNA, 25 bp, Homo sapien
ctcttcggcctggaaatgggtcatc

SEQ ID NO: 1405456 - DNA, 25 bp, Homo sapien
atctcagcaaacagcccgaccttct

SEQ ID NO: 1405457 - DNA, 25 bp, Homo sapien
tcgccacgaggggactcaagggact

SEQ ID NO: 1405458 - DNA, 25 bp, Homo sapien
taatatgtttcagttgtggatctac

SEQ ID NO: 1405459 - DNA, 25 bp, Homo sapien
tatgtttcagttgtggatctacacc

SEQ ID NO: 1405460 - DNA, 25 bp, Homo sapien
agttgtggatctacaccagccctca

SEQ ID NO: 1405461 - DNA, 25 bp, Homo sapien
tttcagttgtggatctacaccagcc

SEQ ID NO: 1405462 - DNA, 25 bp, Homo sapien
tcatcctctgtctcaatcaggggga

SEQ ID NO: 1405463 - DNA, 25 bp, Homo sapien
aatcagggggaagtcctccctggat

SEQ ID NO: 1405464 - DNA, 25 bp, Homo sapien
cttaattcgccgcaggtaagcctca

SEQ ID NO: 1405465 - DNA, 25 bp, Homo sapien
aattcgccgcaggtaagcctcatcc

SEQ ID NO: 1405466 - DNA, 25 bp, Homo sapien
gttgggatctaatgctgcaggtacc

SEQ ID NO: 1405467 - DNA, 25 bp, Homo sapien
tatggttgggatctaatgctgcagg

SEQ ID NO: 1405468 - DNA, 25 bp, Homo sapien
gagttctatggttgggatctaatgc

SEQ ID NO: 1405469 - DNA, 25 bp, Homo sapien
ttcccagggagttctatggttggga

SEQ ID NO: 1405470 - DNA, 25 bp, Homo sapien
gaggtcataagcacatgcaggcggc

SEQ ID NO: 1405471 - DNA, 25 bp, Homo sapien
ctgaggtcataagcacatgcaggcg

SEQ ID NO: 1405472 - DNA, 25 bp, Homo sapien
ggtcataagcacatgcaggcggcag

SEQ ID NO: 1405473 - DNA, 25 bp, Homo sapien
cataagcacatgcaggcggcaggca

SEQ ID NO: 1405474 - DNA, 25 bp, Homo sapien
gctgtgtgcacctcgtacatctcag

SEQ ID NO: 1405475 - DNA, 25 bp, Homo sapien
gctctgctgaatgacccggatccag

SEQ ID NO: 1405476 - DNA, 25 bp, Homo sapien
tctcgtacgattagattctgcagcg

SEQ ID NO: 1405477 - DNA, 25 bp, Homo sapien
tctgcagcgataccactgaaggctt

SEQ ID NO: 1405478 - DNA, 25 bp, Homo sapien
gagaaacaccagtacatctgtcatc

SEQ ID NO: 1405479 - DNA, 25 bp, Homo sapien
ttcctggagaaacaccagtacatct

SEQ ID NO: 1405480 - DNA, 25 bp, Homo sapien
cctggagaaacaccagtacatctgt

SEQ ID NO: 1405481 - DNA, 25 bp, Homo sapien
tggagaaacaccagtacatctgtca

SEQ ID NO: 1405482 - DNA, 25 bp, Homo sapien
tcaggtttatccaccagtttcggcc

SEQ ID NO: 1405483 - DNA, 25 bp, Homo sapien
attcatgtgctatcagacaaaacag

SEQ ID NO: 1405484 - DNA, 25 bp, Homo sapien
tacagcttaaaaacagtgtgggtgg

SEQ ID NO: 1405485 - DNA, 25 bp, Homo sapien
cgcgcctggtcacacattcttacag

SEQ ID NO: 1405486 - DNA, 25 bp, Homo sapien
tagggaaggccctgtatggtccata

SEQ ID NO: 1405487 - DNA, 25 bp, Homo sapien
gatttaggtgagaaagactttgcca

SEQ ID NO: 1405488 - DNA, 25 bp, Homo sapien
gttgattctaagacctgcaggcatc

SEQ ID NO: 1405489 - DNA, 25 bp, Homo sapien
tagtagctctctaggcatgcaagga

SEQ ID NO: 1405490 - DNA, 25 bp, Homo sapien
cagccatcgtggatgagtttgcgcc

SEQ ID NO: 1405491 - DNA, 25 bp, Homo sapien
tcagaagttcctctcggccaaaggg

SEQ ID NO: 1405492 - DNA, 25 bp, Homo sapien
ggtccatgcggttgtagatctcctg

SEQ ID NO: 1405493 - DNA, 25 bp, Homo sapien
gataaataccctcgtccacattgga

SEQ ID NO: 1405494 - DNA, 25 bp, Homo sapien
cagttcccatcgtgtcttgattcca

SEQ ID NO: 1405495 - DNA, 25 bp, Homo sapien
ggctcaaccagtttcactcacaccc

SEQ ID NO: 1405496 - DNA, 25 bp, Homo sapien
ccttcctgtggtcataccgagcctt

SEQ ID NO: 1405497 - DNA, 25 bp, Homo sapien
tgtggtcataccgagcctttcctca

SEQ ID NO: 1405498 - DNA, 25 bp, Homo sapien
gtgatgcgctgagtcaccagcagga

SEQ ID NO: 1405499 - DNA, 25 bp, Homo sapien
tgcactcctgtaccccgtgccgctt

SEQ ID NO: 1405500 - DNA, 25 bp, Homo sapien
tgtaccccgtgccgcttgagcacgg

SEQ ID NO: 1405501 - DNA, 25 bp, Homo sapien
gcggctgatgagtaacgggtacttg

SEQ ID NO: 1405502 - DNA, 25 bp, Homo sapien
cgggcgtacagctccttatagagct

SEQ ID NO: 1405503 - DNA, 25 bp, Homo sapien
cttacacatctgctccgcactagga

SEQ ID NO: 1405504 - DNA, 25 bp, Homo sapien
cggctgcagaactccgagtaggtct

SEQ ID NO: 1405505 - DNA, 25 bp, Homo sapien
tgaattgctggaagcgtttgtctcg

SEQ ID NO: 1405506 - DNA, 25 bp, Homo sapien
tggcgtcggcgttctaatagctggc

SEQ ID NO: 1405507 - DNA, 25 bp, Homo sapien
gatgacaaagttccgggtgctgcca

SEQ ID NO: 1405508 - DNA, 25 bp, Homo sapien
tggctgatgagcagatcacccaagc

SEQ ID NO: 1405509 - DNA, 25 bp, Homo sapien
tatggatgtcactgagctcgtccac

SEQ ID NO: 1405510 - DNA, 25 bp, Homo sapien
ctcatccatctcaaagtcactcatc

SEQ ID NO: 1405511 - DNA, 25 bp, Homo sapien
tctcatccatctcaaagtcactcat

SEQ ID NO: 1405512 - DNA, 25 bp, Homo sapien
tcggttccgcatgttgagggagtct

SEQ ID NO: 1405513 - DNA, 25 bp, Homo sapien
actgtgagaggatccggcgcagccc

SEQ ID NO: 1405514 - DNA, 25 bp, Homo sapien
cttcgtcaatgagggattccacgga

SEQ ID NO: 1405515 - DNA, 25 bp, Homo sapien
tccacggatagggttcggttccgca

SEQ ID NO: 1405516 - DNA, 25 bp, Homo sapien
ctgaagaaagtggaggctgtctgca

SEQ ID NO: 1405517 - DNA, 25 bp, Homo sapien
aaagtggaggctgtctgcatcaccc

SEQ ID NO: 1405518 - DNA, 25 bp, Homo sapien
atcacccccagtcgggcaaaagatc

SEQ ID NO: 1405519 - DNA, 25 bp, Homo sapien
tgcatcacccccagtcgggcaaaag

SEQ ID NO: 1405520 - DNA, 25 bp, Homo sapien
cgagcttggccgctcccggatggtt

SEQ ID NO: 1405521 - DNA, 25 bp, Homo sapien
cactcttggctaaagacaaggagga

SEQ ID NO: 1405522 - DNA, 25 bp, Homo sapien
tggtagaaacactcttggctaaaga

SEQ ID NO: 1405523 - DNA, 25 bp, Homo sapien
tggccgagcttggccgctcccggat

SEQ ID NO: 1405524 - DNA, 25 bp, Homo sapien
tgcaaggcggtgttgttcttcagca

SEQ ID NO: 1405525 - DNA, 25 bp, Homo sapien
aaacggactgcaaggcggtgttgtt

SEQ ID NO: 1405526 - DNA, 25 bp, Homo sapien
ttcgaagagaaacggactgcaaggc

SEQ ID NO: 1405527 - DNA, 25 bp, Homo sapien
tgttcttcagcagggccgctttctg

SEQ ID NO: 1405528 - DNA, 25 bp, Homo sapien
ggtgtctttacagcggttgtggata

SEQ ID NO: 1405529 - DNA, 25 bp, Homo sapien
tacagcggttgtggatagtcacatt

SEQ ID NO: 1405530 - DNA, 25 bp, Homo sapien
cttggtacagttggcgagggtgtct

SEQ ID NO: 1405531 - DNA, 25 bp, Homo sapien
cagttggcgagggtgtctttacagc

SEQ ID NO: 1405532 - DNA, 25 bp, Homo sapien
gagcgggttgcccatcactggtcct

SEQ ID NO: 1405533 - DNA, 25 bp, Homo sapien
tcatagggatttacaggctagagct

SEQ ID NO: 1405534 - DNA, 25 bp, Homo sapien
ttcccagatagtccggcttatgcca

SEQ ID NO: 1405535 - DNA, 25 bp, Homo sapien
gggatcaagcaactggccctggcat

SEQ ID NO: 1405536 - DNA, 25 bp, Homo sapien
agcacatggtcatgcctgaaactga

SEQ ID NO: 1405537 - DNA, 25 bp, Homo sapien
tggtgaagaggtgcccattggtata

SEQ ID NO: 1405538 - DNA, 25 bp, Homo sapien
gcatagcacatggtcatgcctgaaa

SEQ ID NO: 1405539 - DNA, 25 bp, Homo sapien
tgaagaggtgcccattggtatagcg

SEQ ID NO: 1405540 - DNA, 25 bp, Homo sapien
tgggctgcctcctgttgccactcat

SEQ ID NO: 1405541 - DNA, 25 bp, Homo sapien
cctgttgccactcatctccctggct

SEQ ID NO: 1405542 - DNA, 25 bp, Homo sapien
tggcccctacggctgggctgcctcc

SEQ ID NO: 1405543 - DNA, 25 bp, Homo sapien
ctggcccctacggctgggctgcctc

SEQ ID NO: 1405544 - DNA, 25 bp, Homo sapien
ctaggtctctgcgtcctcactccac

SEQ ID NO: 1405545 - DNA, 25 bp, Homo sapien
tctctgcgtcctcactccaccttcc

SEQ ID NO: 1405546 - DNA, 25 bp, Homo sapien
aggtctctgcgtcctcactccacct

SEQ ID NO: 1405547 - DNA, 25 bp, Homo sapien
ggtctctgcgtcctcactccacctt

SEQ ID NO: 1405548 - DNA, 25 bp, Homo sapien
ccgagctgctgtactctcttctctg

SEQ ID NO: 1405549 - DNA, 25 bp, Homo sapien
gagctgctgtactctcttctctgtg

SEQ ID NO: 1405550 - DNA, 25 bp, Homo sapien
cgagctgctgtactctcttctctgt

SEQ ID NO: 1405551 - DNA, 25 bp, Homo sapien
ccccgagctgctgtactctcttctc

SEQ ID NO: 1405552 - DNA, 25 bp, Homo sapien
gagagcaggcgaagcggagggtgcc

SEQ ID NO: 1405553 - DNA, 25 bp, Homo sapien
agagcaggcgaagcggagggtgcca

SEQ ID NO: 1405554 - DNA, 25 bp, Homo sapien
ggggagagcaggcgaagcggagggt

SEQ ID NO: 1405555 - DNA, 25 bp, Homo sapien
ggagagcaggcgaagcggagggtgc

SEQ ID NO: 1405556 - DNA, 25 bp, Homo sapien
gctcctcttataaccatgacaacca

SEQ ID NO: 1405557 - DNA, 25 bp, Homo sapien
cagcgctttccaatctatgggagtt

SEQ ID NO: 1405558 - DNA, 25 bp, Homo sapien
tgacaaccagtgttggatctgctgt

SEQ ID NO: 1405559 - DNA, 25 bp, Homo sapien
tccaatctatgggagttagctcctc

SEQ ID NO: 1405560 - DNA, 25 bp, Homo sapien
tcagtgttgatctccgcagatggcg

SEQ ID NO: 1405561 - DNA, 25 bp, Homo sapien
tttaagtaaggaagctcagccagcc

SEQ ID NO: 1405562 - DNA, 25 bp, Homo sapien
gacagaggattacagttcagcggga

SEQ ID NO: 1405563 - DNA, 25 bp, Homo sapien
taggagaccagtactgactcagccg

SEQ ID NO: 1405564 - DNA, 25 bp, Homo sapien
acccctgctctaggtgggccagcag

SEQ ID NO: 1405565 - DNA, 25 bp, Homo sapien
cccctgctctaggtgggccagcagc

SEQ ID NO: 1405566 - DNA, 25 bp, Homo sapien
ccctgctctaggtgggccagcagcg

SEQ ID NO: 1405567 - DNA, 25 bp, Homo sapien
cctgctctaggtgggccagcagcgg

SEQ ID NO: 1405568 - DNA, 25 bp, Homo sapien
ggcatgcatcatgatgctcacctaa

SEQ ID NO: 1405569 - DNA, 25 bp, Homo sapien
atgcatcatgatgctcacctaattt

SEQ ID NO: 1405570 - DNA, 25 bp, Homo sapien
caggcatgcatcatgatgctcacct

SEQ ID NO: 1405571 - DNA, 25 bp, Homo sapien
cacaggcatgcatcatgatgctcac

SEQ ID NO: 1405572 - DNA, 25 bp, Homo sapien
ctggcccctattctggaaaccctct

SEQ ID NO: 1405573 - DNA, 25 bp, Homo sapien
gggctctaagccattctctcctatt

SEQ ID NO: 1405574 - DNA, 25 bp, Homo sapien
tggggtctcagtagcaccctggccc

SEQ ID NO: 1405575 - DNA, 25 bp, Homo sapien
ctcctgaagggctctaagccattct

SEQ ID NO: 1405576 - DNA, 25 bp, Homo sapien
cagagtactcagaatcacctctcct

SEQ ID NO: 1405577 - DNA, 25 bp, Homo sapien
cttctgggagagtcacagagtactc

SEQ ID NO: 1405578 - DNA, 25 bp, Homo sapien
caggtatgtccaaatcaagacttct

SEQ ID NO: 1405579 - DNA, 25 bp, Homo sapien
tgcttctctctcaggtatgtccaaa

SEQ ID NO: 1405580 - DNA, 25 bp, Homo sapien
aagatggtgacacctctgtccacac

SEQ ID NO: 1405581 - DNA, 25 bp, Homo sapien
ctctgtaatagtgaccggagagcct

SEQ ID NO: 1405582 - DNA, 25 bp, Homo sapien
ttccaccaggattcgagtcacctgt

SEQ ID NO: 1405583 - DNA, 25 bp, Homo sapien
ccacaccctctgtaatagtgaccgg

SEQ ID NO: 1405584 - DNA, 25 bp, Homo sapien
acagcagaggcgccgttggctatga

SEQ ID NO: 1405585 - DNA, 25 bp, Homo sapien
cagaggcgccgttggctatgaaggg

SEQ ID NO: 1405586 - DNA, 25 bp, Homo sapien
cagcagaggcgccgttggctatgaa

SEQ ID NO: 1405587 - DNA, 25 bp, Homo sapien
ctgtacagcagaggcgccgttggct

SEQ ID NO: 1405588 - DNA, 25 bp, Homo sapien
aggaggagctatagggctgggaaat

SEQ ID NO: 1405589 - DNA, 25 bp, Homo sapien
gaaatgaagaggtgagggattgctg

SEQ ID NO: 1405590 - DNA, 25 bp, Homo sapien
aatgaagaggtgagggattgctggg

SEQ ID NO: 1405591 - DNA, 25 bp, Homo sapien
tgaagaggtgagggattgctggggg

SEQ ID NO: 1405592 - DNA, 25 bp, Homo sapien
aaagcactcggtcccgccggcttgg

SEQ ID NO: 1405593 - DNA, 25 bp, Homo sapien
gcaactttctttcaagcggcctaaa

SEQ ID NO: 1405594 - DNA, 25 bp, Homo sapien
tccgcccgattttggcgcccagaaa

SEQ ID NO: 1405595 - DNA, 25 bp, Homo sapien
ttggaggcgaccaagcccaggtccg

SEQ ID NO: 1405596 - DNA, 25 bp, Homo sapien
gcgtgagggattcgatccgagacat

SEQ ID NO: 1405597 - DNA, 25 bp, Homo sapien
ctctctgctccggtcgatccgcgcc

SEQ ID NO: 1405598 - DNA, 25 bp, Homo sapien
cgcgcccgcgtgagggattcgatcc

SEQ ID NO: 1405599 - DNA, 25 bp, Homo sapien
tcgatccgcgcccgcgtgagggatt

SEQ ID NO: 1405600 - DNA, 25 bp, Homo sapien
cagggaggacgcggcgcggaccccg

SEQ ID NO: 1405601 - DNA, 25 bp, Homo sapien
gggaccagggaggacgcggcgcgga

SEQ ID NO: 1405602 - DNA, 25 bp, Homo sapien
gaccagggaggacgcggcgcggacc

SEQ ID NO: 1405603 - DNA, 25 bp, Homo sapien
ggaccagggaggacgcggcgcggac

SEQ ID NO: 1405604 - DNA, 25 bp, Homo sapien
gttcggcccgcacgcgttggtctcg

SEQ ID NO: 1405605 - DNA, 25 bp, Homo sapien
cccgcacgcgttggtctcggggaca

SEQ ID NO: 1405606 - DNA, 25 bp, Homo sapien
cacgcgttggtctcggggacaggaa

SEQ ID NO: 1405607 - DNA, 25 bp, Homo sapien
ggttcggcccgcacgcgttggtctc

SEQ ID NO: 1405608 - DNA, 25 bp, Homo sapien
agtctttaaagacccgcaggcagga

SEQ ID NO: 1405609 - DNA, 25 bp, Homo sapien
gaactaaacgctggatcttcagtac

SEQ ID NO: 1405610 - DNA, 25 bp, Homo sapien
ggccttcggggtcccatcaaagcag

SEQ ID NO: 1405611 - DNA, 25 bp, Homo sapien
gcagactgaccccttttacgattgg

SEQ ID NO: 1405612 - DNA, 25 bp, Homo sapien
aaggtctgtcgcagggaggagccta

SEQ ID NO: 1405613 - DNA, 25 bp, Homo sapien
ttggcctttccggtcatgcccgaga

SEQ ID NO: 1405614 - DNA, 25 bp, Homo sapien
aagctgaaggtctgtcgcagggagg

SEQ ID NO: 1405615 - DNA, 25 bp, Homo sapien
gagcctacccgggtacctgaatgtc

SEQ ID NO: 1405616 - DNA, 25 bp, Homo sapien
tgattcaggaagcagggaacccact

SEQ ID NO: 1405617 - DNA, 25 bp, Homo sapien
tattcaatggacaccctgtgccctg

SEQ ID NO: 1405618 - DNA, 25 bp, Homo sapien
tgcagctaccgggaacctggtgagc

SEQ ID NO: 1405619 - DNA, 25 bp, Homo sapien
gggtgaattctatgcagctcaggga

SEQ ID NO: 1405620 - DNA, 25 bp, Homo sapien
caatggcagaggactgggatacatt

SEQ ID NO: 1405621 - DNA, 25 bp, Homo sapien
atggcagaggactgggatacattcc

SEQ ID NO: 1405622 - DNA, 25 bp, Homo sapien
cgtttcctgaggtcaatggcagagg

SEQ ID NO: 1405623 - DNA, 25 bp, Homo sapien
gtcaatggcagaggactgggataca

SEQ ID NO: 1405624 - DNA, 25 bp, Homo sapien
atgagaagtgtctagctaaagccag

SEQ ID NO: 1405625 - DNA, 25 bp, Homo sapien
gatgagaagtgtctagctaaagcca

SEQ ID NO: 1405626 - DNA, 25 bp, Homo sapien
agatgagaagtgtctagctaaagcc

SEQ ID NO: 1405627 - DNA, 25 bp, Homo sapien
atgccagtggccgagtggtccaaag

SEQ ID NO: 1405628 - DNA, 25 bp, Homo sapien
catctgtatccgaacggtccaagag

SEQ ID NO: 1405629 - DNA, 25 bp, Homo sapien
gagacagttgatgccactcacgggt

SEQ ID NO: 1405630 - DNA, 25 bp, Homo sapien
cgagtggtccaaagggccagcagat

SEQ ID NO: 1405631 - DNA, 25 bp, Homo sapien
cagtccttctcggatctgcaggaag

SEQ ID NO: 1405632 - DNA, 25 bp, Homo sapien
gggcctgggcatcccgatgcttgca

SEQ ID NO: 1405633 - DNA, 25 bp, Homo sapien
ctgcagtcccagaaaggtgtccagt

SEQ ID NO: 1405634 - DNA, 25 bp, Homo sapien
ggcatcccgatgcttgcagtctcct

SEQ ID NO: 1405635 - DNA, 25 bp, Homo sapien
acctttggaggggtacagcatgcga

SEQ ID NO: 1405636 - DNA, 25 bp, Homo sapien
attcagtgggccctcgagctccctg

SEQ ID NO: 1405637 - DNA, 25 bp, Homo sapien
ctgaagacgtctttgttttcggccg

SEQ ID NO: 1405638 - DNA, 25 bp, Homo sapien
aggcccccaactatgtcttctgaag

SEQ ID NO: 1405639 - DNA, 25 bp, Homo sapien
ctatgctatgatgccaatacttttt

SEQ ID NO: 1405640 - DNA, 25 bp, Homo sapien
gggtcccatcatcgtgttgcttctt

SEQ ID NO: 1405641 - DNA, 25 bp, Homo sapien
gatgaggtttaacaaggcttcctca

SEQ ID NO: 1405642 - DNA, 25 bp, Homo sapien
tccattagattaactctcctagccc

SEQ ID NO: 1405643 - DNA, 25 bp, Homo sapien
tcctccaagtgtataacctccacag

SEQ ID NO: 1405644 - DNA, 25 bp, Homo sapien
tatttagccctcaaatgagatcaca

SEQ ID NO: 1405645 - DNA, 25 bp, Homo sapien
gattgcactggtcatcaaagatttc

SEQ ID NO: 1405646 - DNA, 25 bp, Homo sapien
actgagcaaagagataggagattct

SEQ ID NO: 1405647 - DNA, 25 bp, Homo sapien
ttggtgacttcagtgtgggaaaaag

SEQ ID NO: 1405648 - DNA, 25 bp, Homo sapien
gagatatcccaaagatgggggacct

SEQ ID NO: 1405649 - DNA, 25 bp, Homo sapien
gaaaaagtcctgcttcaggtggccc

SEQ ID NO: 1405650 - DNA, 25 bp, Homo sapien
gtttctgctgtcagttggtgacttc

SEQ ID NO: 1405651 - DNA, 25 bp, Homo sapien
gggagcactcctcgcctcctgtggg

SEQ ID NO: 1405652 - DNA, 25 bp, Homo sapien
gacatcggacttcctgaggtaaagg

SEQ ID NO: 1405653 - DNA, 25 bp, Homo sapien
acagctggggcggacatcggacttc

SEQ ID NO: 1405654 - DNA, 25 bp, Homo sapien
gtaaaggggagcactcctcgcctcc

SEQ ID NO: 1405655 - DNA, 25 bp, Homo sapien
ggccagtcttgggatgtccaagctg

SEQ ID NO: 1405656 - DNA, 25 bp, Homo sapien
atttggagcctctcgtctccatgtt

SEQ ID NO: 1405657 - DNA, 25 bp, Homo sapien
ccagtcttgggatgtccaagctgca

SEQ ID NO: 1405658 - DNA, 25 bp, Homo sapien
ctggccagtcttgggatgtccaagc

SEQ ID NO: 1405659 - DNA, 25 bp, Homo sapien
taggctcaaggctattgccaaaggc

SEQ ID NO: 1405660 - DNA, 25 bp, Homo sapien
gactcctagggctggtccttcacta

SEQ ID NO: 1405661 - DNA, 25 bp, Homo sapien
tatggcttcacgatggaaccaagga

SEQ ID NO: 1405662 - DNA, 25 bp, Homo sapien
gagagaattcacgttgccagcaata

SEQ ID NO: 1405663 - DNA, 25 bp, Homo sapien
ttgggagaggagggctgtggaagcc

SEQ ID NO: 1405664 - DNA, 25 bp, Homo sapien
gagaggagggctgtggaagccccaa

SEQ ID NO: 1405665 - DNA, 25 bp, Homo sapien
ctggatttcttgggagaggagggct

SEQ ID NO: 1405666 - DNA, 25 bp, Homo sapien
gggagaggagggctgtggaagcccc

SEQ ID NO: 1405667 - DNA, 25 bp, Homo sapien
ttgctggagtaccacaatagcaggg

SEQ ID NO: 1405668 - DNA, 25 bp, Homo sapien
tggagggaagggtcatgaccccaaa

SEQ ID NO: 1405669 - DNA, 25 bp, Homo sapien
cgttttgggagtgtcatatttcctc

SEQ ID NO: 1405670 - DNA, 25 bp, Homo sapien
tcagttcttcttcgttttgggagtg

SEQ ID NO: 1405671 - DNA, 25 bp, Homo sapien
tggtgcctcgccagcctgtaagatc

SEQ ID NO: 1405672 - DNA, 25 bp, Homo sapien
caaaccagactggaagagaagcttc

SEQ ID NO: 1405673 - DNA, 25 bp, Homo sapien
aattccagcattcagtacttcaggc

SEQ ID NO: 1405674 - DNA, 25 bp, Homo sapien
gaagccaagagggtccagaaccaaa

SEQ ID NO: 1405675 - DNA, 25 bp, Homo sapien
tgatgagagagaacactagaaagct

SEQ ID NO: 1405676 - DNA, 25 bp, Homo sapien
ggaactgatgagagagaacactaga

SEQ ID NO: 1405677 - DNA, 25 bp, Homo sapien
caaggaactgatgagagagaacact

SEQ ID NO: 1405678 - DNA, 25 bp, Homo sapien
tgagagagaacactagaaagcttac

SEQ ID NO: 1405679 - DNA, 25 bp, Homo sapien
gggagaatcgcctgtcaaactcccg

SEQ ID NO: 1405680 - DNA, 25 bp, Homo sapien
cctgtccaggtgcactggtagagcc

SEQ ID NO: 1405681 - DNA, 25 bp, Homo sapien
gtccaggtgcactggtagagccaat

SEQ ID NO: 1405682 - DNA, 25 bp, Homo sapien
tcaaactcccgctgagccaggattc

SEQ ID NO: 1405683 - DNA, 25 bp, Homo sapien
agagtcttagttcccaaaggctcag

SEQ ID NO: 1405684 - DNA, 25 bp, Homo sapien
caaggtgtgcgtggaatgacttacc

SEQ ID NO: 1405685 - DNA, 25 bp, Homo sapien
gacctgagaaataccccatggagaa

SEQ ID NO: 1405686 - DNA, 25 bp, Homo sapien
tataaagaggagtacctaggagcca

SEQ ID NO: 1405687 - DNA, 25 bp, Homo sapien
ctttattccaaagtggcagcaaagc

SEQ ID NO: 1405688 - DNA, 25 bp, Homo sapien
tagaaccaaagagtcctgaggttgg

SEQ ID NO: 1405689 - DNA, 25 bp, Homo sapien
gtctattaacccatcaactaccagg

SEQ ID NO: 1405690 - DNA, 25 bp, Homo sapien
gggttgagtctggtccacattcctt

SEQ ID NO: 1405691 - DNA, 25 bp, Homo sapien
tacagccctactggtatggaggatc

SEQ ID NO: 1405692 - DNA, 25 bp, Homo sapien
tccaaattccatccagctaagggtt

SEQ ID NO: 1405693 - DNA, 25 bp, Homo sapien
tgataccggatgtgaaaacaccgct

SEQ ID NO: 1405694 - DNA, 25 bp, Homo sapien
agctcagccctgatgccgtaagcag

SEQ ID NO: 1405695 - DNA, 25 bp, Homo sapien
cctcctgggccaggtaagtaattgt

SEQ ID NO: 1405696 - DNA, 25 bp, Homo sapien
aattgttgccgaggtgaagttgaaa

SEQ ID NO: 1405697 - DNA, 25 bp, Homo sapien
ccaggtaagtaattgttgccgaggt

SEQ ID NO: 1405698 - DNA, 25 bp, Homo sapien
tgccgaggtgaagttgaaataacca

SEQ ID NO: 1405699 - DNA, 25 bp, Homo sapien
gagggcgcaggaccacagtgtggga

SEQ ID NO: 1405700 - DNA, 25 bp, Homo sapien
cttgagagggcgcaggaccacagtg

SEQ ID NO: 1405701 - DNA, 25 bp, Homo sapien
agagggcgcaggaccacagtgtggg

SEQ ID NO: 1405702 - DNA, 25 bp, Homo sapien
tgagagggcgcaggaccacagtgtg

SEQ ID NO: 1405703 - DNA, 25 bp, Homo sapien
aaacatttgccaatacatgctgatc

SEQ ID NO: 1405704 - DNA, 25 bp, Homo sapien
acatttgccaatacatgctgatctc

SEQ ID NO: 1405705 - DNA, 25 bp, Homo sapien
aaaacatttgccaatacatgctgat

SEQ ID NO: 1405706 - DNA, 25 bp, Homo sapien
atttgccaatacatgctgatctcat

SEQ ID NO: 1405707 - DNA, 25 bp, Homo sapien
gcctatttgaagtacccctgctgct

SEQ ID NO: 1405708 - DNA, 25 bp, Homo sapien
atatccagcctatttgaagtacccc

SEQ ID NO: 1405709 - DNA, 25 bp, Homo sapien
tccagcctatttgaagtacccctgc

SEQ ID NO: 1405710 - DNA, 25 bp, Homo sapien
acaggaggacagccacacatatcca

SEQ ID NO: 1405711 - DNA, 25 bp, Homo sapien
agatagttccacgtctaatgcagca

SEQ ID NO: 1405712 - DNA, 25 bp, Homo sapien
aatcatcagatagttccacgtctaa

SEQ ID NO: 1405713 - DNA, 25 bp, Homo sapien
ttgagcattccagacacaatgccaa

SEQ ID NO: 1405714 - DNA, 25 bp, Homo sapien
gggcaatccggtcccatttgacatt

SEQ ID NO: 1405715 - DNA, 25 bp, Homo sapien
tctgttgcactgaagaatccaggtc

SEQ ID NO: 1405716 - DNA, 25 bp, Homo sapien
tgagtaatatagcaacttggttctg

SEQ ID NO: 1405717 - DNA, 25 bp, Homo sapien
ttgctcagaagcaccaaaataatca

SEQ ID NO: 1405718 - DNA, 25 bp, Homo sapien
taatcaagtatccaggaggcaatag

SEQ ID NO: 1405719 - DNA, 25 bp, Homo sapien
gcttgagtgacagcaaatagagcca

SEQ ID NO: 1405720 - DNA, 25 bp, Homo sapien
aaggtcaggtctcgtccctccacgg

SEQ ID NO: 1405721 - DNA, 25 bp, Homo sapien
cttgagccaacattgtagatgttgt

SEQ ID NO: 1405722 - DNA, 25 bp, Homo sapien
ccacggcgtatctgttcagcagtga

SEQ ID NO: 1405723 - DNA, 25 bp, Homo sapien
aaagtgagttatcaaaccaagtacg

SEQ ID NO: 1405724 - DNA, 25 bp, Homo sapien
aaagcaaagtgagttatcaaaccaa

SEQ ID NO: 1405725 - DNA, 25 bp, Homo sapien
gtgagttatcaaaccaagtacgtca

SEQ ID NO: 1405726 - DNA, 25 bp, Homo sapien
gagttatcaaaccaagtacgtcaaa

SEQ ID NO: 1405727 - DNA, 25 bp, Homo sapien
ggtgcctgatttcggccgatctcgg

SEQ ID NO: 1405728 - DNA, 25 bp, Homo sapien
tcggacctgcaggagcctgtagctt

SEQ ID NO: 1405729 - DNA, 25 bp, Homo sapien
ctctattgggatcccaccgcggact

SEQ ID NO: 1405730 - DNA, 25 bp, Homo sapien
ggagcctgtagctttccctcacaca

SEQ ID NO: 1405731 - DNA, 25 bp, Homo sapien
catccctttcttggtcccacgggcg

SEQ ID NO: 1405732 - DNA, 25 bp, Homo sapien
ctgtcacatccctttcttggtccca

SEQ ID NO: 1405733 - DNA, 25 bp, Homo sapien
cacatccctttcttggtcccacggg

SEQ ID NO: 1405734 - DNA, 25 bp, Homo sapien
gtcacatccctttcttggtcccacg

SEQ ID NO: 1405735 - DNA, 25 bp, Homo sapien
agccacggggtgatgcgcggacacg

SEQ ID NO: 1405736 - DNA, 25 bp, Homo sapien
gcctcccgcctcttgcaaggttaca

SEQ ID NO: 1405737 - DNA, 25 bp, Homo sapien
gcctcttgcaaggttacacgtcctc

SEQ ID NO: 1405738 - DNA, 25 bp, Homo sapien
ttgcaaggttacacgtcctccagcc

SEQ ID NO: 1405739 - DNA, 25 bp, Homo sapien
agagcgtcagcatccgaaagaccgg

SEQ ID NO: 1405740 - DNA, 25 bp, Homo sapien
gacaggaagagagcgtcagcatccg

SEQ ID NO: 1405741 - DNA, 25 bp, Homo sapien
gaagagagcgtcagcatccgaaaga

SEQ ID NO: 1405742 - DNA, 25 bp, Homo sapien
caggaagagagcgtcagcatccgaa

SEQ ID NO: 1405743 - DNA, 25 bp, Homo sapien
ccatttatttacaaaggccagtgtg

SEQ ID NO: 1405744 - DNA, 25 bp, Homo sapien
acaaagaccacgccatttatttaca

SEQ ID NO: 1405745 - DNA, 25 bp, Homo sapien
tttatttacaaaggccagtgtggga

SEQ ID NO: 1405746 - DNA, 25 bp, Homo sapien
aagaccacgccatttatttacaaag

SEQ ID NO: 1405747 - DNA, 25 bp, Homo sapien
tggagcaaactctgttcctcttgcc

SEQ ID NO: 1405748 - DNA, 25 bp, Homo sapien
ttctctggactgcttgggacccttt

SEQ ID NO: 1405749 - DNA, 25 bp, Homo sapien
aaagccacacagacatcttctctgg

SEQ ID NO: 1405750 - DNA, 25 bp, Homo sapien
tcttgccgtcatattctcagccatg

SEQ ID NO: 1405751 - DNA, 25 bp, Homo sapien
ttcacacgaatttcctctgggctgc

SEQ ID NO: 1405752 - DNA, 25 bp, Homo sapien
ctttcacacgaatttcctctgggct

SEQ ID NO: 1405753 - DNA, 25 bp, Homo sapien
ggagcccagcagtctctcgatagct

SEQ ID NO: 1405754 - DNA, 25 bp, Homo sapien
ccagcagtctctcgatagctgcgtt

SEQ ID NO: 1405755 - DNA, 25 bp, Homo sapien
tagctgcgttgatgtcccctcctgt

SEQ ID NO: 1405756 - DNA, 25 bp, Homo sapien
tctctcgatagctgcgttgatgtcc

SEQ ID NO: 1405757 - DNA, 25 bp, Homo sapien
ttgtgaagtgggcacaggaccaatc

SEQ ID NO: 1405758 - DNA, 25 bp, Homo sapien
gacaggccttgtgaagtgggcacag

SEQ ID NO: 1405759 - DNA, 25 bp, Homo sapien
aagtgggcacaggaccaatcttggg

SEQ ID NO: 1405760 - DNA, 25 bp, Homo sapien
gaggggacaggccttgtgaagtggg

SEQ ID NO: 1405761 - DNA, 25 bp, Homo sapien
tccacttccagccaaaagctggatc

SEQ ID NO: 1405762 - DNA, 25 bp, Homo sapien
tgagtttccacttccagccaaaagc

SEQ ID NO: 1405763 - DNA, 25 bp, Homo sapien
ctgtgagtttccacttccagccaaa

SEQ ID NO: 1405764 - DNA, 25 bp, Homo sapien
ttccacttccagccaaaagctggat

SEQ ID NO: 1405765 - DNA, 25 bp, Homo sapien
ccgggatatcccaaaggagccaagg

SEQ ID NO: 1405766 - DNA, 25 bp, Homo sapien
gtccgggatatcccaaaggagccaa

SEQ ID NO: 1405767 - DNA, 25 bp, Homo sapien
tccgggatatcccaaaggagccaag

SEQ ID NO: 1405768 - DNA, 25 bp, Homo sapien
ggtccgggatatcccaaaggagcca

SEQ ID NO: 1405769 - DNA, 25 bp, Homo sapien
agaagttgctagaaccttgctgccc

SEQ ID NO: 1405770 - DNA, 25 bp, Homo sapien
caagagagaccaagaggtaggagat

SEQ ID NO: 1405771 - DNA, 25 bp, Homo sapien
gagttgaaggggagaagttgctaga

SEQ ID NO: 1405772 - DNA, 25 bp, Homo sapien
cagagacacaaaggatgctgagaga

SEQ ID NO: 1405773 - DNA, 25 bp, Homo sapien
cagcaatgcctgcatggctcgggga

SEQ ID NO: 1405774 - DNA, 25 bp, Homo sapien
ggcctcggtctgcaaggtctgtagt

SEQ ID NO: 1405775 - DNA, 25 bp, Homo sapien
ggtctgcaaggtctgtagtccctgc

SEQ ID NO: 1405776 - DNA, 25 bp, Homo sapien
cagcccaggggcctcggtctgcaag

SEQ ID NO: 1405777 - DNA, 25 bp, Homo sapien
ctgctgcaggaagactgggagctgc

SEQ ID NO: 1405778 - DNA, 25 bp, Homo sapien
gctgcaggaagactgggagctgcag

SEQ ID NO: 1405779 - DNA, 25 bp, Homo sapien
caggaagactgggagctgcaggcgg

SEQ ID NO: 1405780 - DNA, 25 bp, Homo sapien
ggaagactgggagctgcaggcggag

SEQ ID NO: 1405781 - DNA, 25 bp, Homo sapien
ctgcagttgggggttccccgcgaag

SEQ ID NO: 1405782 - DNA, 25 bp, Homo sapien
cgaagagcggcacattcaccatcat

SEQ ID NO: 1405783 - DNA, 25 bp, Homo sapien
cgcgaagagcggcacattcaccatc

SEQ ID NO: 1405784 - DNA, 25 bp, Homo sapien
tgggggttccccgcgaagagcggca

SEQ ID NO: 1405785 - DNA, 25 bp, Homo sapien
aagtatcctgaaggcctaagtggga

SEQ ID NO: 1405786 - DNA, 25 bp, Homo sapien
tgatgaggacagctaacatttccag

SEQ ID NO: 1405787 - DNA, 25 bp, Homo sapien
tggaactatgctctgggtaatgaag

SEQ ID NO: 1405788 - DNA, 25 bp, Homo sapien
ggtatacagaacttactctgtcaca

SEQ ID NO: 1405789 - DNA, 25 bp, Homo sapien
tctgggcaagcgtctgcatcatgct

SEQ ID NO: 1405790 - DNA, 25 bp, Homo sapien
gcatgtagggtgctgagatcacatt

SEQ ID NO: 1405791 - DNA, 25 bp, Homo sapien
catcatgctgcgcatgtagggtgct

SEQ ID NO: 1405792 - DNA, 25 bp, Homo sapien
gggttctgggcaagcgtctgcatca

SEQ ID NO: 1405793 - DNA, 25 bp, Homo sapien
cacctggctggtccccgatcctccg

SEQ ID NO: 1405794 - DNA, 25 bp, Homo sapien
caggctagccgcattgatcccaaag

SEQ ID NO: 1405795 - DNA, 25 bp, Homo sapien
tggtccccgatcctccggtgccctc

SEQ ID NO: 1405796 - DNA, 25 bp, Homo sapien
ggctagccgcattgatcccaaaggg

SEQ ID NO: 1405797 - DNA, 25 bp, Homo sapien
attctcagtccgcagaggctgggag

SEQ ID NO: 1405798 - DNA, 25 bp, Homo sapien
gatgagctgtcggagttcccggcca

SEQ ID NO: 1405799 - DNA, 25 bp, Homo sapien
ggctctcgattctcagtccgcagag

SEQ ID NO: 1405800 - DNA, 25 bp, Homo sapien
atgagctgtcggagttcccggccag

SEQ ID NO: 1405801 - DNA, 25 bp, Homo sapien
ctctcaaggttgctcagggcccggt

SEQ ID NO: 1405802 - DNA, 25 bp, Homo sapien
ggctggattccgagcaagctccatt

SEQ ID NO: 1405803 - DNA, 25 bp, Homo sapien
tacatgcggcggagggcattatacc

SEQ ID NO: 1405804 - DNA, 25 bp, Homo sapien
tcctggatgtccgtgtacatgcggc

SEQ ID NO: 1405805 - DNA, 25 bp, Homo sapien
tcaagggagagagacaaaatgggcc

SEQ ID NO: 1405806 - DNA, 25 bp, Homo sapien
gagagagacaaaatgggccccggaa

SEQ ID NO: 1405807 - DNA, 25 bp, Homo sapien
ctgatcaagggagagagacaaaatg

SEQ ID NO: 1405808 - DNA, 25 bp, Homo sapien
ggagagagacaaaatgggccccgga

SEQ ID NO: 1405809 - DNA, 25 bp, Homo sapien
caggaactgccccacagtgacaggg

SEQ ID NO: 1405810 - DNA, 25 bp, Homo sapien
tgccccacagtgacagggagtagag

SEQ ID NO: 1405811 - DNA, 25 bp, Homo sapien
gacagggagtagagtaaactggact

SEQ ID NO: 1405812 - DNA, 25 bp, Homo sapien
cagggagtagagtaaactggacttc

SEQ ID NO: 1405813 - DNA, 25 bp, Homo sapien
tgcctcatgagttcagggttattga

SEQ ID NO: 1405814 - DNA, 25 bp, Homo sapien
tagacatcatatcctggaccagggg

SEQ ID NO: 1405815 - DNA, 25 bp, Homo sapien
ctgctgcagctccatgaagttggca

SEQ ID NO: 1405816 - DNA, 25 bp, Homo sapien
tgtggctgatctcagggttccgctc

SEQ ID NO: 1405817 - DNA, 25 bp, Homo sapien
ggacgcagtagcactgggggatccc

SEQ ID NO: 1405818 - DNA, 25 bp, Homo sapien
agagtatggacgcagtagcactggg

SEQ ID NO: 1405819 - DNA, 25 bp, Homo sapien
tatggacgcagtagcactgggggat

SEQ ID NO: 1405820 - DNA, 25 bp, Homo sapien
gtatggacgcagtagcactggggga

SEQ ID NO: 1405821 - DNA, 25 bp, Homo sapien
tgctcctccggcttccactgccagc

SEQ ID NO: 1405822 - DNA, 25 bp, Homo sapien
tccactgccagcatctgaagaggca

SEQ ID NO: 1405823 - DNA, 25 bp, Homo sapien
ttccactgccagcatctgaagaggc

SEQ ID NO: 1405824 - DNA, 25 bp, Homo sapien
cactgctcctccggcttccactgcc

SEQ ID NO: 1405825 - DNA, 25 bp, Homo sapien
ggtgaagcaggcgtggtggagggtg

SEQ ID NO: 1405826 - DNA, 25 bp, Homo sapien
gatcaggaccagctgatcctgctga

SEQ ID NO: 1405827 - DNA, 25 bp, Homo sapien
ccagatggacagtgagcccgtcctt

SEQ ID NO: 1405828 - DNA, 25 bp, Homo sapien
gctgagccttaaacctccgggagat

SEQ ID NO: 1405829 - DNA, 25 bp, Homo sapien
ccgtccttgattccgtgctggttca

SEQ ID NO: 1405830 - DNA, 25 bp, Homo sapien
gaagtcctttctgtagtctcgacgc

SEQ ID NO: 1405831 - DNA, 25 bp, Homo sapien
gtcctttctgtagtctcgacgccat

SEQ ID NO: 1405832 - DNA, 25 bp, Homo sapien
gggaagtcctttctgtagtctcgac

SEQ ID NO: 1405833 - DNA, 25 bp, Homo sapien
agtcctttctgtagtctcgacgcca

SEQ ID NO: 1405834 - DNA, 25 bp, Homo sapien
cttaacaaaggagatgaaccagtga

SEQ ID NO: 1405835 - DNA, 25 bp, Homo sapien
tggagttagacttcccaaattctac

SEQ ID NO: 1405836 - DNA, 25 bp, Homo sapien
aggtaaggtaacttgccccaggcag

SEQ ID NO: 1405837 - DNA, 25 bp, Homo sapien
cactgcctctcaatgagagccgttt

SEQ ID NO: 1405838 - DNA, 25 bp, Homo sapien
ttgacaccaaagtccaggctcttaa

SEQ ID NO: 1405839 - DNA, 25 bp, Homo sapien
ggacgccggaccgtcagagaggccc

SEQ ID NO: 1405840 - DNA, 25 bp, Homo sapien
cgggacgccggaccgtcagagaggc

SEQ ID NO: 1405841 - DNA, 25 bp, Homo sapien
ctccgggacgccggaccgtcagaga

SEQ ID NO: 1405842 - DNA, 25 bp, Homo sapien
ttcagctcctcggagtcccagccgg

SEQ ID NO: 1405843 - DNA, 25 bp, Homo sapien
accgaggctcgatcgcagatcacaa

SEQ ID NO: 1405844 - DNA, 25 bp, Homo sapien
ttgaccgaggctcgatcgcagatca

SEQ ID NO: 1405845 - DNA, 25 bp, Homo sapien
ctccttgaccgaggctcgatcgcag

SEQ ID NO: 1405846 - DNA, 25 bp, Homo sapien
gctcgatcgcagatcacaatttcct

SEQ ID NO: 1405847 - DNA, 25 bp, Homo sapien
ggcctcgtctcggccccgctcggct

SEQ ID NO: 1405848 - DNA, 25 bp, Homo sapien
gggcctcgtctcggccccgctcggc

SEQ ID NO: 1405849 - DNA, 25 bp, Homo sapien
cgcccgccagcccgcccggctcctc

SEQ ID NO: 1405850 - DNA, 25 bp, Homo sapien
gccgccacccggccgcccgccagcc

SEQ ID NO: 1405851 - DNA, 25 bp, Homo sapien
gccgccgccacccggccgcccgcca

SEQ ID NO: 1405852 - DNA, 25 bp, Homo sapien
ccgcccgccagcccgcccggctcct

SEQ ID NO: 1405853 - DNA, 25 bp, Homo sapien
cccggccggcccggctcggcttctg

SEQ ID NO: 1405854 - DNA, 25 bp, Homo sapien
ggagcccggccagggtctcgccagg

SEQ ID NO: 1405855 - DNA, 25 bp, Homo sapien
cccctccggaccagccgcagccaca

SEQ ID NO: 1405856 - DNA, 25 bp, Homo sapien
cggccagggtctcgccaggcggggg

SEQ ID NO: 1405857 - DNA, 25 bp, Homo sapien
caggtccggagcccggccagggtct

SEQ ID NO: 1405858 - DNA, 25 bp, Homo sapien
taggattacaaacttgagcccttcc

SEQ ID NO: 1405859 - DNA, 25 bp, Homo sapien
caaacttgagcccttccagtcttct

SEQ ID NO: 1405860 - DNA, 25 bp, Homo sapien
ctgatcccaaagaagaaggatggat

SEQ ID NO: 1405861 - DNA, 25 bp, Homo sapien
tccagtcttcttcctgatcccaaag

SEQ ID NO: 1405862 - DNA, 25 bp, Homo sapien
tctacagtggagagaccatcctccc

SEQ ID NO: 1405863 - DNA, 25 bp, Homo sapien
cctacctgaacacatatagatggag

SEQ ID NO: 1405864 - DNA, 25 bp, Homo sapien
tgttgatttctcacacgcagaagcc

SEQ ID NO: 1405865 - DNA, 25 bp, Homo sapien
tctgtagagaagtggaccgaggtca

SEQ ID NO: 1405866 - DNA, 25 bp, Homo sapien
taccacattggagtatgggctgccc

SEQ ID NO: 1405867 - DNA, 25 bp, Homo sapien
tgtgcatcctttccaagaccctggg

SEQ ID NO: 1405868 - DNA, 25 bp, Homo sapien
gcaactcagggtggactcagccact

SEQ ID NO: 1405869 - DNA, 25 bp, Homo sapien
tttatacattctactggacccaggg

SEQ ID NO: 1405870 - DNA, 25 bp, Homo sapien
agtccatggagtgaaatccaatcta

SEQ ID NO: 1405871 - DNA, 25 bp, Homo sapien
ttctttgtttggctctgccggctcc

SEQ ID NO: 1405872 - DNA, 25 bp, Homo sapien
tccttagtcctacagcttcttcctt

SEQ ID NO: 1405873 - DNA, 25 bp, Homo sapien
ccaggatcctcagtccttagtccta

SEQ ID NO: 1405874 - DNA, 25 bp, Homo sapien
tgattctcagaataggccctgctgc

SEQ ID NO: 1405875 - DNA, 25 bp, Homo sapien
tcaggatggctcacataggcgggaa

SEQ ID NO: 1405876 - DNA, 25 bp, Homo sapien
tagatacaggtggtaattctccctc

SEQ ID NO: 1405877 - DNA, 25 bp, Homo sapien
tattgtacagacatctcaggatggc

SEQ ID NO: 1405878 - DNA, 25 bp, Homo sapien
aggctttagtggaaaacaggtccag

SEQ ID NO: 1405879 - DNA, 25 bp, Homo sapien
gcgagtatctctaagcaccttgccc

SEQ ID NO: 1405880 - DNA, 25 bp, Homo sapien
tcaaatcaccgctttccaaaaggct

SEQ ID NO: 1405881 - DNA, 25 bp, Homo sapien
cttccccagcgagcgagtatctcta

SEQ ID NO: 1405882 - DNA, 25 bp, Homo sapien
gaatattcggatggcttgcgtggct

SEQ ID NO: 1405883 - DNA, 25 bp, Homo sapien
tgtgatgtggcagacgggacactct

SEQ ID NO: 1405884 - DNA, 25 bp, Homo sapien
tctcgcagatgcgtactgcacactc

SEQ ID NO: 1405885 - DNA, 25 bp, Homo sapien
cagaacaggttgtgtccgcagggca

SEQ ID NO: 1405886 - DNA, 25 bp, Homo sapien
caggccgcccccaccaagtttagag

SEQ ID NO: 1405887 - DNA, 25 bp, Homo sapien
tctcaaagcagaccatgcaatcccg

SEQ ID NO: 1405888 - DNA, 25 bp, Homo sapien
agaagccctggagcggctctcccgg

SEQ ID NO: 1405889 - DNA, 25 bp, Homo sapien
ccaccaagtttagagaagccctgga

SEQ ID NO: 1405890 - DNA, 25 bp, Homo sapien
cggccagctcgggtcccgcggaagt

SEQ ID NO: 1405891 - DNA, 25 bp, Homo sapien
ggagtccggccagctcgggtcccgc

SEQ ID NO: 1405892 - DNA, 25 bp, Homo sapien
caggggagcggtgtgcgcccggggg

SEQ ID NO: 1405893 - DNA, 25 bp, Homo sapien
ctcgggtcccgcggaagtggcaggg

SEQ ID NO: 1405894 - DNA, 25 bp, Homo sapien
ggaggaggaggcagaggagaagagc

SEQ ID NO: 1405895 - DNA, 25 bp, Homo sapien
aggaggaggcagaggagaagagcac

SEQ ID NO: 1405896 - DNA, 25 bp, Homo sapien
gaggaggaggcagaggagaagagca

SEQ ID NO: 1405897 - DNA, 25 bp, Homo sapien
ggaggtgggcgtggcgttctcctgg

SEQ ID NO: 1405898 - DNA, 25 bp, Homo sapien
gccacgccgtagtacacatcctgct

SEQ ID NO: 1405899 - DNA, 25 bp, Homo sapien
ccgtagccaaagtccccgccctgct

SEQ ID NO: 1405900 - DNA, 25 bp, Homo sapien
agcggggggctagtctcggccacgc

SEQ ID NO: 1405901 - DNA, 25 bp, Homo sapien
cacgccatagcccggaaagaggtac

SEQ ID NO: 1405902 - DNA, 25 bp, Homo sapien
cattgttgtactcgaggatcttgcc

SEQ ID NO: 1405903 - DNA, 25 bp, Homo sapien
gcaccgcgatgtgcgtctcgatctc

SEQ ID NO: 1405904 - DNA, 25 bp, Homo sapien
gctccccgccaggaagtcgttttca

SEQ ID NO: 1405905 - DNA, 25 bp, Homo sapien
tcggagtagcggctatcgattgctg

SEQ ID NO: 1405906 - DNA, 25 bp, Homo sapien
acgcggtagggcacccgcacacgga

SEQ ID NO: 1405907 - DNA, 25 bp, Homo sapien
agggcacccgcacacggatggtcac

SEQ ID NO: 1405908 - DNA, 25 bp, Homo sapien
tgcgcttgatggttgcccctttggg

SEQ ID NO: 1405909 - DNA, 25 bp, Homo sapien
gatgcgcttgatggttgcccctttg

SEQ ID NO: 1405910 - DNA, 25 bp, Homo sapien
ctgagatgatttcccgccgggctgt

SEQ ID NO: 1405911 - DNA, 25 bp, Homo sapien
tggagaagtgctccgctgctgagat

SEQ ID NO: 1405912 - DNA, 25 bp, Homo sapien
caaaggcggcgcctgacttgttgcg

SEQ ID NO: 1405913 - DNA, 25 bp, Homo sapien
acttgttgcgggaggcacggatcat

SEQ ID NO: 1405914 - DNA, 25 bp, Homo sapien
acaaagaaacgcacacagcaaggtt

SEQ ID NO: 1405915 - DNA, 25 bp, Homo sapien
caaagaaacgcacacagcaaggttt

SEQ ID NO: 1405916 - DNA, 25 bp, Homo sapien
gagagacaaagaaacgcacacagca

SEQ ID NO: 1405917 - DNA, 25 bp, Homo sapien
agagacaaagaaacgcacacagcaa

SEQ ID NO: 1405918 - DNA, 25 bp, Homo sapien
ggcacgggaacacactccgtggtgt

SEQ ID NO: 1405919 - DNA, 25 bp, Homo sapien
ctcggaggtgggcacgggaacacac

SEQ ID NO: 1405920 - DNA, 25 bp, Homo sapien
cgggaacacactccgtggtgttgct

SEQ ID NO: 1405921 - DNA, 25 bp, Homo sapien
aggtgggcacgggaacacactccgt

SEQ ID NO: 1405922 - DNA, 25 bp, Homo sapien
ctgcccttcaggcgcagctcggcct

SEQ ID NO: 1405923 - DNA, 25 bp, Homo sapien
agcgcagagcttggcgtcgctcgcc

SEQ ID NO: 1405924 - DNA, 25 bp, Homo sapien
tgtagagagcgcagagcttggcgtc

SEQ ID NO: 1405925 - DNA, 25 bp, Homo sapien
ctttgtagagagcgcagagcttggc

SEQ ID NO: 1405926 - DNA, 25 bp, Homo sapien
tagagagcgcagagcttggcgtcgc

SEQ ID NO: 1405927 - DNA, 25 bp, Homo sapien
gaaacatcctagttctccaaagccc

SEQ ID NO: 1405928 - DNA, 25 bp, Homo sapien
aggcagagttgatcgagagccagct

SEQ ID NO: 1405929 - DNA, 25 bp, Homo sapien
agagttgatcgagagccagctgaag

SEQ ID NO: 1405930 - DNA, 25 bp, Homo sapien
gaagggcgcgctcgtcttccagcag

SEQ ID NO: 1405931 - DNA, 25 bp, Homo sapien
ttccagataccactagactaggcat

SEQ ID NO: 1405932 - DNA, 25 bp, Homo sapien
attccagataccactagactaggca

SEQ ID NO: 1405933 - DNA, 25 bp, Homo sapien
tattccagataccactagactaggc

SEQ ID NO: 1405934 - DNA, 25 bp, Homo sapien
tatgcggaaacagagcgggtatgaa

SEQ ID NO: 1405935 - DNA, 25 bp, Homo sapien
agaggttctcggcagagaagacaaa

SEQ ID NO: 1405936 - DNA, 25 bp, Homo sapien
cgctctcccagagtcgatcccggag

SEQ ID NO: 1405937 - DNA, 25 bp, Homo sapien
gtatgaagctggctaacgccgcgcg

SEQ ID NO: 1405938 - DNA, 25 bp, Homo sapien
ctcgggacgaacacccaggtagctg

SEQ ID NO: 1405939 - DNA, 25 bp, Homo sapien
ctgggaatccccgtgggtctgagca

SEQ ID NO: 1405940 - DNA, 25 bp, Homo sapien
tccagtcgcctaaacctggcttcat

SEQ ID NO: 1405941 - DNA, 25 bp, Homo sapien
gataatgatgctaccagtcgtttcc

SEQ ID NO: 1405942 - DNA, 25 bp, Homo sapien
ctatctggccaggacaacatagtga

SEQ ID NO: 1405943 - DNA, 25 bp, Homo sapien
gtcatgctatctggccaggacaaca

SEQ ID NO: 1405944 - DNA, 25 bp, Homo sapien
gaaaggatggtcatgctatctggcc

SEQ ID NO: 1405945 - DNA, 25 bp, Homo sapien
gctaatttagaaaggatggtcatgc

SEQ ID NO: 1405946 - DNA, 25 bp, Homo sapien
aattcatcatgctctattgtaactg

SEQ ID NO: 1405947 - DNA, 25 bp, Homo sapien
tctggatatcccttacaattcatca

SEQ ID NO: 1405948 - DNA, 25 bp, Homo sapien
ctggtcacttctggatatcccttac

SEQ ID NO: 1405949 - DNA, 25 bp, Homo sapien
gctctattgtaactgtatgtttaca

SEQ ID NO: 1405950 - DNA, 25 bp, Homo sapien
aatattccacttctccctctgcttt

SEQ ID NO: 1405951 - DNA, 25 bp, Homo sapien
tattgccaaatattccacttctccc

SEQ ID NO: 1405952 - DNA, 25 bp, Homo sapien
ttctccctctgcttttctggcatac

SEQ ID NO: 1405953 - DNA, 25 bp, Homo sapien
ccatatattgccaaatattccactt

SEQ ID NO: 1405954 - DNA, 25 bp, Homo sapien
ctttcactcccacatccagctccat

SEQ ID NO: 1405955 - DNA, 25 bp, Homo sapien
atccaactggatggtagctccccca

SEQ ID NO: 1405956 - DNA, 25 bp, Homo sapien
ccaactggatggtagctcccccacc

SEQ ID NO: 1405957 - DNA, 25 bp, Homo sapien
ctggatggtagctcccccaccgttt

SEQ ID NO: 1405958 - DNA, 25 bp, Homo sapien
aactggatggtagctcccccaccgt

SEQ ID NO: 1405959 - DNA, 25 bp, Homo sapien
cctccctcatcatatccacactcct

SEQ ID NO: 1405960 - DNA, 25 bp, Homo sapien
ccctcatcatatccacactccttgg

SEQ ID NO: 1405961 - DNA, 25 bp, Homo sapien
acaccctccctcatcatatccacac

SEQ ID NO: 1405962 - DNA, 25 bp, Homo sapien
cactccttggctccccccttcacag

SEQ ID NO: 1405963 - DNA, 25 bp, Homo sapien
tgcgtcagcaccagccgtcaggccc

SEQ ID NO: 1405964 - DNA, 25 bp, Homo sapien
gcgtcagcaccagccgtcaggccct

SEQ ID NO: 1405965 - DNA, 25 bp, Homo sapien
acgcagtcgcctgcgtcagcaccag

SEQ ID NO: 1405966 - DNA, 25 bp, Homo sapien
gcccacacgcagtcgcctgcgtcag

SEQ ID NO: 1405967 - DNA, 25 bp, Homo sapien
ttcgcatcaccgagtctgaagaggt

SEQ ID NO: 1405968 - DNA, 25 bp, Homo sapien
gacctgcaggagctcaatgatcgct

SEQ ID NO: 1405969 - DNA, 25 bp, Homo sapien
agcagtctctgtccttcgacccgag

SEQ ID NO: 1405970 - DNA, 25 bp, Homo sapien
tgtgcgctcgctggaaacggagaac

SEQ ID NO: 1405971 - DNA, 25 bp, Homo sapien
tcctgggttcattctgctgaaagag

SEQ ID NO: 1405972 - DNA, 25 bp, Homo sapien
ggatcccaagctgatagaaagtggg

SEQ ID NO: 1405973 - DNA, 25 bp, Homo sapien
caggattggttactccctgctgggt

SEQ ID NO: 1405974 - DNA, 25 bp, Homo sapien
taagaccctgtagcaatttttgacc

SEQ ID NO: 1405975 - DNA, 25 bp, Homo sapien
tcccaccaaagcctagagagaaggt

SEQ ID NO: 1405976 - DNA, 25 bp, Homo sapien
gactacaggcacatgccatcacgcc

SEQ ID NO: 1405977 - DNA, 25 bp, Homo sapien
ggcacatgccatcacgcccagttaa

SEQ ID NO: 1405978 - DNA, 25 bp, Homo sapien
tacaggcacatgccatcacgcccag

SEQ ID NO: 1405979 - DNA, 25 bp, Homo sapien
caggcacatgccatcacgcccagtt

SEQ ID NO: 1405980 - DNA, 25 bp, Homo sapien
gacagcagttgtcttaaagggagga

SEQ ID NO: 1405981 - DNA, 25 bp, Homo sapien
aggagtggtggtctgaatgtctacc

SEQ ID NO: 1405982 - DNA, 25 bp, Homo sapien
gaaggttgtaagcaccagggaagcc

SEQ ID NO: 1405983 - DNA, 25 bp, Homo sapien
gatttggatacccaagtgcaggcag

SEQ ID NO: 1405984 - DNA, 25 bp, Homo sapien
tgcttgacaacttcctggattgccc

SEQ ID NO: 1405985 - DNA, 25 bp, Homo sapien
ggcccacaaagcagaagcgctactt

SEQ ID NO: 1405986 - DNA, 25 bp, Homo sapien
gaggcacagatgcttgtcccatgtc

SEQ ID NO: 1405987 - DNA, 25 bp, Homo sapien
tcatgtaggctctgatcaagacaag

SEQ ID NO: 1405988 - DNA, 25 bp, Homo sapien
ggtcactcgcagctaccgcagtgtg

SEQ ID NO: 1405989 - DNA, 25 bp, Homo sapien
tagctagaacagagtcagagtcact

SEQ ID NO: 1405990 - DNA, 25 bp, Homo sapien
ggcctgagtggtcagtcccagactc

SEQ ID NO: 1405991 - DNA, 25 bp, Homo sapien
aattaatagtgcatgcctgctgccc

SEQ ID NO: 1405992 - DNA, 25 bp, Homo sapien
accaaagagggcttcctctagaagc

SEQ ID NO: 1405993 - DNA, 25 bp, Homo sapien
ggcatagaggcttctccgccagcct

SEQ ID NO: 1405994 - DNA, 25 bp, Homo sapien
cttccctagctttagaccctgggtg

SEQ ID NO: 1405995 - DNA, 25 bp, Homo sapien
ccaggtaccagctgcgcttgctttt

SEQ ID NO: 1405996 - DNA, 25 bp, Homo sapien
aaggcttctgggggagccaccttct

SEQ ID NO: 1405997 - DNA, 25 bp, Homo sapien
gaattataaggagtagcctgagctg

SEQ ID NO: 1405998 - DNA, 25 bp, Homo sapien
aggaattataaggagtagcctgagc

SEQ ID NO: 1405999 - DNA, 25 bp, Homo sapien
attataaggagtagcctgagctgta

SEQ ID NO: 1406000 - DNA, 25 bp, Homo sapien
ggaattataaggagtagcctgagct

SEQ ID NO: 1406001 - DNA, 25 bp, Homo sapien
aacttccgcccaagccaggatctgt

SEQ ID NO: 1406002 - DNA, 25 bp, Homo sapien
taaactttctggttggaccgagcag

SEQ ID NO: 1406003 - DNA, 25 bp, Homo sapien
atcgctgaaatgacctagaagggcc

SEQ ID NO: 1406004 - DNA, 25 bp, Homo sapien
caactcgagaggtggaaattccggt

SEQ ID NO: 1406005 - DNA, 25 bp, Homo sapien
ctttatatgtatatcgtgacaatat

SEQ ID NO: 1406006 - DNA, 25 bp, Homo sapien
tatcgtgacaatataacagacagga

SEQ ID NO: 1406007 - DNA, 25 bp, Homo sapien
tgttatctgtaatcagcagttctct

SEQ ID NO: 1406008 - DNA, 25 bp, Homo sapien
gacaggaaatgtcgtggcctcactt

SEQ ID NO: 1406009 - DNA, 25 bp, Homo sapien
caaagttattctgatccctagccct

SEQ ID NO: 1406010 - DNA, 25 bp, Homo sapien
tagccctctgaatgtaacctggttt

SEQ ID NO: 1406011 - DNA, 25 bp, Homo sapien
ccagaggtactgttgagaagcccaa

SEQ ID NO: 1406012 - DNA, 25 bp, Homo sapien
tcctggaaaaggatacatggcaggt

SEQ ID NO: 1406013 - DNA, 25 bp, Homo sapien
gatgacagtgagaccctgtttcaaa

SEQ ID NO: 1406014 - DNA, 25 bp, Homo sapien
cagcctggatgacagtgagaccctg

SEQ ID NO: 1406015 - DNA, 25 bp, Homo sapien
atgacagtgagaccctgtttcaaaa

SEQ ID NO: 1406016 - DNA, 25 bp, Homo sapien
cctggatgacagtgagaccctgttt

SEQ ID NO: 1406017 - DNA, 25 bp, Homo sapien
tggcaggggtaatctgagccttctt

SEQ ID NO: 1406018 - DNA, 25 bp, Homo sapien
taccctagctgaccccttcacctct

SEQ ID NO: 1406019 - DNA, 25 bp, Homo sapien
cttcactcctttaccctagctgacc

SEQ ID NO: 1406020 - DNA, 25 bp, Homo sapien
aatggcaggggtaatctgagccttc

SEQ ID NO: 1406021 - DNA, 25 bp, Homo sapien
tgtatccttctgctagacaggcgat

SEQ ID NO: 1406022 - DNA, 25 bp, Homo sapien
tggccacatctctctcagtatctga

SEQ ID NO: 1406023 - DNA, 25 bp, Homo sapien
tatagaaagactgtgcatccacccc

SEQ ID NO: 1406024 - DNA, 25 bp, Homo sapien
tctgagcattgctagagggtgctgc

SEQ ID NO: 1406025 - DNA, 25 bp, Homo sapien
ggaatggacacattctactatggcc

SEQ ID NO: 1406026 - DNA, 25 bp, Homo sapien
tgggtcaccccataagtgcaaaggt

SEQ ID NO: 1406027 - DNA, 25 bp, Homo sapien
cagggacttgagtaacatctctttg

SEQ ID NO: 1406028 - DNA, 25 bp, Homo sapien
gagaactggtatcaacggatgcatg

SEQ ID NO: 1406029 - DNA, 25 bp, Homo sapien
tatctaggttagttcctttatattc

SEQ ID NO: 1406030 - DNA, 25 bp, Homo sapien
caaattttctttcgaagctttgcaa

SEQ ID NO: 1406031 - DNA, 25 bp, Homo sapien
tgaccgctctcctacaatatataaa

SEQ ID NO: 1406032 - DNA, 25 bp, Homo sapien
tgtgggtaataaacattgtcacccc

SEQ ID NO: 1406033 - DNA, 25 bp, Homo sapien
caattagaaagagcccaaccagaac

SEQ ID NO: 1406034 - DNA, 25 bp, Homo sapien
taagcgtctggtgattcaatttccg

SEQ ID NO: 1406035 - DNA, 25 bp, Homo sapien
caggcgccttaacgctgagggcata

SEQ ID NO: 1406036 - DNA, 25 bp, Homo sapien
taaagaaggcgtggctactgcccaa

SEQ ID NO: 1406037 - DNA, 25 bp, Homo sapien
gctcaaaggctcaaacgccattggc

SEQ ID NO: 1406038 - DNA, 25 bp, Homo sapien
gtaccggtagcccagtcgagatgga

SEQ ID NO: 1406039 - DNA, 25 bp, Homo sapien
aaacgccattggcagaatccccgac

SEQ ID NO: 1406040 - DNA, 25 bp, Homo sapien
tcagttctcggaagtgcggcacatc

SEQ ID NO: 1406041 - DNA, 25 bp, Homo sapien
cgacggatagactgggggctgcggc

SEQ ID NO: 1406042 - DNA, 25 bp, Homo sapien
aacgacggatagactgggggctgcg

SEQ ID NO: 1406043 - DNA, 25 bp, Homo sapien
acgacggatagactgggggctgcgg

SEQ ID NO: 1406044 - DNA, 25 bp, Homo sapien
agaagccgccggcttgaggtccctg

SEQ ID NO: 1406045 - DNA, 25 bp, Homo sapien
aggtccgggcttggagttcgcctca

SEQ ID NO: 1406046 - DNA, 25 bp, Homo sapien
agttcgcctcagacgcggtggagcc

SEQ ID NO: 1406047 - DNA, 25 bp, Homo sapien
aactaaggtctctgaggatctgcac

SEQ ID NO: 1406048 - DNA, 25 bp, Homo sapien
cctggcagaggatcgtgagattcgc

SEQ ID NO: 1406049 - DNA, 25 bp, Homo sapien
gggcatgttcgaagacccagagttg

SEQ ID NO: 1406050 - DNA, 25 bp, Homo sapien
ttcgctgacagcgaagaagcacggc

SEQ ID NO: 1406051 - DNA, 25 bp, Homo sapien
gggtgtcccacggagtatcttgaga

SEQ ID NO: 1406052 - DNA, 25 bp, Homo sapien
atggaagaccaaaggaaagctgggt

SEQ ID NO: 1406053 - DNA, 25 bp, Homo sapien
aaggaaagctgggtgggaatctcac

SEQ ID NO: 1406054 - DNA, 25 bp, Homo sapien
ctatggaagaccaaaggaaagctgg

SEQ ID NO: 1406055 - DNA, 25 bp, Homo sapien
caaaggaaagctgggtgggaatctc

SEQ ID NO: 1406056 - DNA, 25 bp, Homo sapien
tagggaggagatgatctcgaaggag

SEQ ID NO: 1406057 - DNA, 25 bp, Homo sapien
gatctcgaaggagggttcggaggca

SEQ ID NO: 1406058 - DNA, 25 bp, Homo sapien
gatgatctcgaaggagggttcggag

SEQ ID NO: 1406059 - DNA, 25 bp, Homo sapien
ggagatgatctcgaaggagggttcg

SEQ ID NO: 1406060 - DNA, 25 bp, Homo sapien
gacggcattcgctgggaacgacgga

SEQ ID NO: 1406061 - DNA, 25 bp, Homo sapien
acggcattcgctgggaacgacggat

SEQ ID NO: 1406062 - DNA, 25 bp, Homo sapien
gattacttcaggacaaagtgctcac

SEQ ID NO: 1406063 - DNA, 25 bp, Homo sapien
aaatccggaattggagccatgcaca

SEQ ID NO: 1406064 - DNA, 25 bp, Homo sapien
tcacctgttaggtcccttgaggaag

SEQ ID NO: 1406065 - DNA, 25 bp, Homo sapien
tggaggaactttgcatacaggtatc

SEQ ID NO: 1406066 - DNA, 25 bp, Homo sapien
tggacttggagcactaccttgagaa

SEQ ID NO: 1406067 - DNA, 25 bp, Homo sapien
gcagagccaaacctaggagagggca

SEQ ID NO: 1406068 - DNA, 25 bp, Homo sapien
tcaggagccctaggagagtctaagc

SEQ ID NO: 1406069 - DNA, 25 bp, Homo sapien
gcacagttctaagtggatcaggctg

SEQ ID NO: 1406070 - DNA, 25 bp, Homo sapien
gggttggacccacggatcattctga

SEQ ID NO: 1406071 - DNA, 25 bp, Homo sapien
gaaacctgattggagcactgaggaa

SEQ ID NO: 1406072 - DNA, 25 bp, Homo sapien
gcagactctctgaacgtttgatgaa

SEQ ID NO: 1406073 - DNA, 25 bp, Homo sapien
cgtacacacacgcagttttaagggt

SEQ ID NO: 1406074 - DNA, 25 bp, Homo sapien
ccatcacatgctggttgtgtgacct

SEQ ID NO: 1406075 - DNA, 25 bp, Homo sapien
cagtgagttatgtagagtacataga

SEQ ID NO: 1406076 - DNA, 25 bp, Homo sapien
ggtgatgataatagaaccccgcctc

SEQ ID NO: 1406077 - DNA, 25 bp, Homo sapien
cacagaatcatggtaaggattcagt

SEQ ID NO: 1406078 - DNA, 25 bp, Homo sapien
ctacctggataattcttggccatgt

SEQ ID NO: 1406079 - DNA, 25 bp, Homo sapien
tcttctctaggttcaggtcagctct

SEQ ID NO: 1406080 - DNA, 25 bp, Homo sapien
catgttctctccacatccgtaaata

SEQ ID NO: 1406081 - DNA, 25 bp, Homo sapien
gactaggccagagcaagcctcactg

SEQ ID NO: 1406082 - DNA, 25 bp, Homo sapien
tgggagggaggtgtcaggaggatgg

SEQ ID NO: 1406083 - DNA, 25 bp, Homo sapien
gagtgtgggagggaggtgtcaggag

SEQ ID NO: 1406084 - DNA, 25 bp, Homo sapien
agtttatggagtgtgggagggaggt

SEQ ID NO: 1406085 - DNA, 25 bp, Homo sapien
tatggagtgtgggagggaggtgtca

SEQ ID NO: 1406086 - DNA, 25 bp, Homo sapien
tagggataccccctctagcctagga

SEQ ID NO: 1406087 - DNA, 25 bp, Homo sapien
tgttccagaaaacgttgaaggtggc

SEQ ID NO: 1406088 - DNA, 25 bp, Homo sapien
gcttcccaaagtctaactagggata

SEQ ID NO: 1406089 - DNA, 25 bp, Homo sapien
tccagaaaacgttgaaggtggcttc

SEQ ID NO: 1406090 - DNA, 25 bp, Homo sapien
atctctataggcaaatagctgctgg

SEQ ID NO: 1406091 - DNA, 25 bp, Homo sapien
atccataatgcacccagataggccc

SEQ ID NO: 1406092 - DNA, 25 bp, Homo sapien
caggacagactcatctctataggca

SEQ ID NO: 1406093 - DNA, 25 bp, Homo sapien
cacctcaatccaccaaaccatccat

SEQ ID NO: 1406094 - DNA, 25 bp, Homo sapien
tggcctctcggcctggttagcaaga

SEQ ID NO: 1406095 - DNA, 25 bp, Homo sapien
gaaacggagccagatgaaaggaccc

SEQ ID NO: 1406096 - DNA, 25 bp, Homo sapien
tagtcgtgttagttcttccctgtgc

SEQ ID NO: 1406097 - DNA, 25 bp, Homo sapien
tagcaagaagcattcagggtaggcc

SEQ ID NO: 1406098 - DNA, 25 bp, Homo sapien
aggctgagatgcgtccccacctgat

SEQ ID NO: 1406099 - DNA, 25 bp, Homo sapien
ttcttccactcccatcaagagcccc

SEQ ID NO: 1406100 - DNA, 25 bp, Homo sapien
cctgattaggcccaaatctgggctc

SEQ ID NO: 1406101 - DNA, 25 bp, Homo sapien
tcagcctggacacgcatgcatctcc

SEQ ID NO: 1406102 - DNA, 25 bp, Homo sapien
aataatgagtaggttcccagctgca

SEQ ID NO: 1406103 - DNA, 25 bp, Homo sapien
gctctgcgtgatcccatatcagcca

SEQ ID NO: 1406104 - DNA, 25 bp, Homo sapien
tgtgaaagcagcaataatgagtagg

SEQ ID NO: 1406105 - DNA, 25 bp, Homo sapien
aagcagcaataatgagtaggttccc

SEQ ID NO: 1406106 - DNA, 25 bp, Homo sapien
gttcattctgtgctctgggaaggca

SEQ ID NO: 1406107 - DNA, 25 bp, Homo sapien
cctgcctcttcccgggccgggccag

SEQ ID NO: 1406108 - DNA, 25 bp, Homo sapien
tgggaaggcatctgcccctgcctct

SEQ ID NO: 1406109 - DNA, 25 bp, Homo sapien
cgggccgggccaggcgtgccctcac

SEQ ID NO: 1406110 - DNA, 25 bp, Homo sapien
cgatgtaatcaaagcgtcctggtgc

SEQ ID NO: 1406111 - DNA, 25 bp, Homo sapien
tgtaatcaaagcgtcctggtgccag

SEQ ID NO: 1406112 - DNA, 25 bp, Homo sapien
aatcaaagcgtcctggtgccagcct

SEQ ID NO: 1406113 - DNA, 25 bp, Homo sapien
gatgtaatcaaagcgtcctggtgcc

SEQ ID NO: 1406114 - DNA, 25 bp, Homo sapien
agcgcgcagaagagatggtagccat

SEQ ID NO: 1406115 - DNA, 25 bp, Homo sapien
aggaagccagtgagcagcgcgcaga

SEQ ID NO: 1406116 - DNA, 25 bp, Homo sapien
aagccagtgagcagcgcgcagaaga

SEQ ID NO: 1406117 - DNA, 25 bp, Homo sapien
aggcaggtgggaggcgaagaggaag

SEQ ID NO: 1406118 - DNA, 25 bp, Homo sapien
ctcctgcccacagccgtggcccctg

SEQ ID NO: 1406119 - DNA, 25 bp, Homo sapien
gggcctcctgcccacagccgtggcc

SEQ ID NO: 1406120 - DNA, 25 bp, Homo sapien
ggctggtgctcagggcctcctgccc

SEQ ID NO: 1406121 - DNA, 25 bp, Homo sapien
ctcagggcctcctgcccacagccgt

SEQ ID NO: 1406122 - DNA, 25 bp, Homo sapien
taaaagagtgggaggttgtcgaaca

SEQ ID NO: 1406123 - DNA, 25 bp, Homo sapien
aatggataggcgaaggctcctgtgc

SEQ ID NO: 1406124 - DNA, 25 bp, Homo sapien
ttgtcgaacaggaatggataggcga

SEQ ID NO: 1406125 - DNA, 25 bp, Homo sapien
tgtgcggaggaccttactgagccca

SEQ ID NO: 1406126 - DNA, 25 bp, Homo sapien
ggaaaaggccggtcaccatcgctgt

SEQ ID NO: 1406127 - DNA, 25 bp, Homo sapien
ggaggaaaaggccggtcaccatcgc

SEQ ID NO: 1406128 - DNA, 25 bp, Homo sapien
aggaaaaggccggtcaccatcgctg

SEQ ID NO: 1406129 - DNA, 25 bp, Homo sapien
gaaaaggccggtcaccatcgctgtg

SEQ ID NO: 1406130 - DNA, 25 bp, Homo sapien
acaaagaactggtgcaggtggccgt

SEQ ID NO: 1406131 - DNA, 25 bp, Homo sapien
ccaggaggccggcatggagtaggcg

SEQ ID NO: 1406132 - DNA, 25 bp, Homo sapien
agtgcggcggcaggcacaaagaact

SEQ ID NO: 1406133 - DNA, 25 bp, Homo sapien
aggagaggccggtgcacaggaagga

SEQ ID NO: 1406134 - DNA, 25 bp, Homo sapien
ccagactgtagaggctgagcgcgcc

SEQ ID NO: 1406135 - DNA, 25 bp, Homo sapien
gcgccgtagtcgaggaagtagcaga

SEQ ID NO: 1406136 - DNA, 25 bp, Homo sapien
aagtagcagatgtggcgcatgcggg

SEQ ID NO: 1406137 - DNA, 25 bp, Homo sapien
ggaagtagcagatgtggcgcatgcg

SEQ ID NO: 1406138 - DNA, 25 bp, Homo sapien
gcagcacgacgcgaaggggtagagg

SEQ ID NO: 1406139 - DNA, 25 bp, Homo sapien
gctgaaggtgtgcgcgcagcacgac

SEQ ID NO: 1406140 - DNA, 25 bp, Homo sapien
agcacgacgcgaaggggtagaggca

SEQ ID NO: 1406141 - DNA, 25 bp, Homo sapien
tgaaggtgtgcgcgcagcacgacgc

SEQ ID NO: 1406142 - DNA, 25 bp, Homo sapien
ggctccgcacggaagccggggccgc

SEQ ID NO: 1406143 - DNA, 25 bp, Homo sapien
tacggctccgcacggaagccggggc

SEQ ID NO: 1406144 - DNA, 25 bp, Homo sapien
gctccgcacggaagccggggccgcc

SEQ ID NO: 1406145 - DNA, 25 bp, Homo sapien
cggctccgcacggaagccggggccg

SEQ ID NO: 1406146 - DNA, 25 bp, Homo sapien
cgccaggagccgccacaggaagtac

SEQ ID NO: 1406147 - DNA, 25 bp, Homo sapien
ggccgccgcggacccccgcgactgc

SEQ ID NO: 1406148 - DNA, 25 bp, Homo sapien
cctggacggtccctgcccgcctggg

SEQ ID NO: 1406149 - DNA, 25 bp, Homo sapien
tggacggtccctgcccgcctgggta

SEQ ID NO: 1406150 - DNA, 25 bp, Homo sapien
tgggtaccccctctgagctcaaggc

SEQ ID NO: 1406151 - DNA, 25 bp, Homo sapien
ggcctggggcggagcctcccctcac

SEQ ID NO: 1406152 - DNA, 25 bp, Homo sapien
gacacagtccaaagccgagctggtg

SEQ ID NO: 1406153 - DNA, 25 bp, Homo sapien
gaccgtctcgttggtcatctggaag

SEQ ID NO: 1406154 - DNA, 25 bp, Homo sapien
tgagtccagatgttgaccgtctcgt

SEQ ID NO: 1406155 - DNA, 25 bp, Homo sapien
agctgaggacacagtccaaagccga

SEQ ID NO: 1406156 - DNA, 25 bp, Homo sapien
gaagttggggcagcttgagactgag

SEQ ID NO: 1406157 - DNA, 25 bp, Homo sapien
agttggggcagcttgagactgagca

SEQ ID NO: 1406158 - DNA, 25 bp, Homo sapien
acttgaagaagttggggcagcttga

SEQ ID NO: 1406159 - DNA, 25 bp, Homo sapien
aagaagttggggcagcttgagactg

SEQ ID NO: 1406160 - DNA, 25 bp, Homo sapien
ggtggcctggtacctccacgttgac

SEQ ID NO: 1406161 - DNA, 25 bp, Homo sapien
ctgtgcactgcctccgggtggccgc

SEQ ID NO: 1406162 - DNA, 25 bp, Homo sapien
ctctattttcccagaagagccccag

SEQ ID NO: 1406163 - DNA, 25 bp, Homo sapien
tattttcccagaagagccccagaag

SEQ ID NO: 1406164 - DNA, 25 bp, Homo sapien
ttcccagaagagccccagaaggtga

SEQ ID NO: 1406165 - DNA, 25 bp, Homo sapien
tttcccagaagagccccagaaggtg

SEQ ID NO: 1406166 - DNA, 25 bp, Homo sapien
tccacgggcggagtccaaggctgct

SEQ ID NO: 1406167 - DNA, 25 bp, Homo sapien
gctcctaagctggtgggtcaacagg

SEQ ID NO: 1406168 - DNA, 25 bp, Homo sapien
ccagggctccacgggcggagtccaa

SEQ ID NO: 1406169 - DNA, 25 bp, Homo sapien
gtgggtgctcctaagctggtgggtc

SEQ ID NO: 1406170 - DNA, 25 bp, Homo sapien
ttaagtgatgctttagtctcagtct

SEQ ID NO: 1406171 - DNA, 25 bp, Homo sapien
gaggcaggaagccaactatcctcta

SEQ ID NO: 1406172 - DNA, 25 bp, Homo sapien
agtgatgctttagtctcagtctctg

SEQ ID NO: 1406173 - DNA, 25 bp, Homo sapien
caggaagccaactatcctctaagcc

SEQ ID NO: 1406174 - DNA, 25 bp, Homo sapien
gccctgagctattcatgatctctgc

SEQ ID NO: 1406175 - DNA, 25 bp, Homo sapien
acagccctgctcttggtgcgccatt

SEQ ID NO: 1406176 - DNA, 25 bp, Homo sapien
cctgctcttggtgcgccattcactg

SEQ ID NO: 1406177 - DNA, 25 bp, Homo sapien
actgccctgagctattcatgatctc

SEQ ID NO: 1406178 - DNA, 25 bp, Homo sapien
tgagcagcttcaaggagcctctcct

SEQ ID NO: 1406179 - DNA, 25 bp, Homo sapien
tgaatgccggccccttgtcttcagc

SEQ ID NO: 1406180 - DNA, 25 bp, Homo sapien
cctctgactgagcagcttcaaggag

SEQ ID NO: 1406181 - DNA, 25 bp, Homo sapien
caggtcttcagtcctgcggaaggca

SEQ ID NO: 1406182 - DNA, 25 bp, Homo sapien
agcagccaagagcacaaagcacagc

SEQ ID NO: 1406183 - DNA, 25 bp, Homo sapien
gactgcctgcagccctaggtggggc

SEQ ID NO: 1406184 - DNA, 25 bp, Homo sapien
ctggtgggcacaggagaccgtgctg

SEQ ID NO: 1406185 - DNA, 25 bp, Homo sapien
tgctactcggtgcaggccactccag

SEQ ID NO: 1406186 - DNA, 25 bp, Homo sapien
ggtctgcagagaatcactcagacac

SEQ ID NO: 1406187 - DNA, 25 bp, Homo sapien
gacaccaggtattacccagctcttc

SEQ ID NO: 1406188 - DNA, 25 bp, Homo sapien
aaccctgaccctgctactcggtgca

SEQ ID NO: 1406189 - DNA, 25 bp, Homo sapien
caaccaccctgcatcttgggtgagg

SEQ ID NO: 1406190 - DNA, 25 bp, Homo sapien
taatccaagcactttcctcgctttc

SEQ ID NO: 1406191 - DNA, 25 bp, Homo sapien
tcctaacgtcttggcaacaaaggga

SEQ ID NO: 1406192 - DNA, 25 bp, Homo sapien
gaaatgcaggtacccatgcctacca

SEQ ID NO: 1406193 - DNA, 25 bp, Homo sapien
gtccagaacattcttgatgtccaca

SEQ ID NO: 1406194 - DNA, 25 bp, Homo sapien
cttgatgtccacactggcgtgggca

SEQ ID NO: 1406195 - DNA, 25 bp, Homo sapien
cactggcgtgggcagcggcctgcag

SEQ ID NO: 1406196 - DNA, 25 bp, Homo sapien
tgcttgtagaagtccagaacattct

SEQ ID NO: 1406197 - DNA, 25 bp, Homo sapien
agggtctgacctcctgaactgaaga

SEQ ID NO: 1406198 - DNA, 25 bp, Homo sapien
tgtttgcagctgtctaggatcttat

SEQ ID NO: 1406199 - DNA, 25 bp, Homo sapien
cctgaaagcacgctggggttgtcca

SEQ ID NO: 1406200 - DNA, 25 bp, Homo sapien
ctgcatggggcctgaaagcacgctg

SEQ ID NO: 1406201 - DNA, 25 bp, Homo sapien
gtcaccatgccactcggatcctcct

SEQ ID NO: 1406202 - DNA, 25 bp, Homo sapien
cagaggggaagatgggccaagaccc

SEQ ID NO: 1406203 - DNA, 25 bp, Homo sapien
gggaagatgggccaagacccagcat

SEQ ID NO: 1406204 - DNA, 25 bp, Homo sapien
gggccaagacccagcattagcacag

SEQ ID NO: 1406205 - DNA, 25 bp, Homo sapien
attagcacagcccaaacaccaggat

SEQ ID NO: 1406206 - DNA, 25 bp, Homo sapien
ccctggcaggctacgtgtggagcct

SEQ ID NO: 1406207 - DNA, 25 bp, Homo sapien
ctgagcatcgcaaggcccaaagagg

SEQ ID NO: 1406208 - DNA, 25 bp, Homo sapien
gcaacttcgtactcctcgcaaggtg

SEQ ID NO: 1406209 - DNA, 25 bp, Homo sapien
tgcattgagggaaaacaccaagcct

SEQ ID NO: 1406210 - DNA, 25 bp, Homo sapien
tcttcagcttatgccgctcaaagct

SEQ ID NO: 1406211 - DNA, 25 bp, Homo sapien
agcttatgccgctcaaagctctttc

SEQ ID NO: 1406212 - DNA, 25 bp, Homo sapien
cagcttatgccgctcaaagctcttt

SEQ ID NO: 1406213 - DNA, 25 bp, Homo sapien
tgcctcttcagcttatgccgctcaa

SEQ ID NO: 1406214 - DNA, 25 bp, Homo sapien
aactctgcctccaggtaccgaatcc

SEQ ID NO: 1406215 - DNA, 25 bp, Homo sapien
ttcagcaaatccaggccatcgatca

SEQ ID NO: 1406216 - DNA, 25 bp, Homo sapien
ctgcctccaggtaccgaatcccatc

SEQ ID NO: 1406217 - DNA, 25 bp, Homo sapien
cttcagcaaatccaggccatcgatc

SEQ ID NO: 1406218 - DNA, 25 bp, Homo sapien
ctggtgggcaaggtagggaaagaca

SEQ ID NO: 1406219 - DNA, 25 bp, Homo sapien
caatgaagcggccactggtggccag

SEQ ID NO: 1406220 - DNA, 25 bp, Homo sapien
acgaggtagggagacatggctgact

SEQ ID NO: 1406221 - DNA, 25 bp, Homo sapien
ctgggtgtcagggacgaggtaggga

SEQ ID NO: 1406222 - DNA, 25 bp, Homo sapien
gccagttggcggatgacagggagat

SEQ ID NO: 1406223 - DNA, 25 bp, Homo sapien
tgtctctcatgagcctgttccgacg

SEQ ID NO: 1406224 - DNA, 25 bp, Homo sapien
tcatgagcctgttccgacgagcttc

SEQ ID NO: 1406225 - DNA, 25 bp, Homo sapien
tctcatgagcctgttccgacgagct

SEQ ID NO: 1406226 - DNA, 25 bp, Homo sapien
catgtctctcatgagcctgttccga

SEQ ID NO: 1406227 - DNA, 25 bp, Homo sapien
gcactctgaacaacttccattacca

SEQ ID NO: 1406228 - DNA, 25 bp, Homo sapien
atcaggaagaccaagagggtttcct

SEQ ID NO: 1406229 - DNA, 25 bp, Homo sapien
gggtctcagtgtgacctcatgcaaa

SEQ ID NO: 1406230 - DNA, 25 bp, Homo sapien
gcaaagtcactctctagcactgctg

SEQ ID NO: 1406231 - DNA, 25 bp, Homo sapien
gatgcaggtcatgatgttccaggcc

SEQ ID NO: 1406232 - DNA, 25 bp, Homo sapien
ccgatgcaggtcatgatgttccagg

SEQ ID NO: 1406233 - DNA, 25 bp, Homo sapien
cgatgcaggtcatgatgttccaggc

SEQ ID NO: 1406234 - DNA, 25 bp, Homo sapien
aaggatggggactttatcctgtaag

SEQ ID NO: 1406235 - DNA, 25 bp, Homo sapien
tatcctgtaagatatggggagccac

SEQ ID NO: 1406236 - DNA, 25 bp, Homo sapien
ttccttagtatggtctataagatga

SEQ ID NO: 1406237 - DNA, 25 bp, Homo sapien
tcctctgtattatgggtaaagccca

SEQ ID NO: 1406238 - DNA, 25 bp, Homo sapien
gatgtaggcctacgcgttcctcaga

SEQ ID NO: 1406239 - DNA, 25 bp, Homo sapien
taggtgagtgagatccgcctggacc

SEQ ID NO: 1406240 - DNA, 25 bp, Homo sapien
gaagtcccatcagcaggtactacac

SEQ ID NO: 1406241 - DNA, 25 bp, Homo sapien
tatgaggctctgacattaccaaccc

SEQ ID NO: 1406242 - DNA, 25 bp, Homo sapien
tctgggttgaactgcaggatgctgc

SEQ ID NO: 1406243 - DNA, 25 bp, Homo sapien
tctcctgctcagactgggcaatgct

SEQ ID NO: 1406244 - DNA, 25 bp, Homo sapien
ttgcaggcgggcgatgaaatgacca

SEQ ID NO: 1406245 - DNA, 25 bp, Homo sapien
gaaatgaccaaagctgcggatgcag

SEQ ID NO: 1406246 - DNA, 25 bp, Homo sapien
tgagcaggggccgatccgtgtcaaa

SEQ ID NO: 1406247 - DNA, 25 bp, Homo sapien
ggcaggttacgaagagccatgtcct

SEQ ID NO: 1406248 - DNA, 25 bp, Homo sapien
ccgtgtcaaagttaaagcgtctgtg

SEQ ID NO: 1406249 - DNA, 25 bp, Homo sapien
ttaaagcgtctgtgggcagctcgga

SEQ ID NO: 1406250 - DNA, 25 bp, Homo sapien
cagaaggctagaggggaggtcaggc

SEQ ID NO: 1406251 - DNA, 25 bp, Homo sapien
aggcagttcacaaccttcaagaaga

SEQ ID NO: 1406252 - DNA, 25 bp, Homo sapien
gtcaggcagttcacaaccttcaaga

SEQ ID NO: 1406253 - DNA, 25 bp, Homo sapien
ctagaggggaggtcaggcagttcac

SEQ ID NO: 1406254 - DNA, 25 bp, Homo sapien
acagacaggcggttccacagacttt

SEQ ID NO: 1406255 - DNA, 25 bp, Homo sapien
caggcaacagattcagcaacacaga

SEQ ID NO: 1406256 - DNA, 25 bp, Homo sapien
gcaggcaacagattcagcaacacag

SEQ ID NO: 1406257 - DNA, 25 bp, Homo sapien
ttcagcaacacagacaggcggttcc

SEQ ID NO: 1406258 - DNA, 25 bp, Homo sapien
ggttggtccgaagccagtccaggaa

SEQ ID NO: 1406259 - DNA, 25 bp, Homo sapien
gaccttcggccatcaggacctgaag

SEQ ID NO: 1406260 - DNA, 25 bp, Homo sapien
attccgacaggagcgtccactggac

SEQ ID NO: 1406261 - DNA, 25 bp, Homo sapien
ctcctggatgctgcgctcattccga

SEQ ID NO: 1406262 - DNA, 25 bp, Homo sapien
tagattgctggcaatgctagcctca

SEQ ID NO: 1406263 - DNA, 25 bp, Homo sapien
tctgggtggacatggcttgtagatt

SEQ ID NO: 1406264 - DNA, 25 bp, Homo sapien
cagcgcttagtctggaacatctggg

SEQ ID NO: 1406265 - DNA, 25 bp, Homo sapien
gtctacatccccattgacgcaaggc

SEQ ID NO: 1406266 - DNA, 25 bp, Homo sapien
tgtttcagcatcaaaggccgttccc

SEQ ID NO: 1406267 - DNA, 25 bp, Homo sapien
tctgatcgggactcctggctattca

SEQ ID NO: 1406268 - DNA, 25 bp, Homo sapien
gccattgagggaatcgggagcctct

SEQ ID NO: 1406269 - DNA, 25 bp, Homo sapien
gagtcatggcttgagtccgattcaa

SEQ ID NO: 1406270 - DNA, 25 bp, Homo sapien
catcaccaactttgggtgggtggcg

SEQ ID NO: 1406271 - DNA, 25 bp, Homo sapien
agaggcgagagaacttacggctctt

SEQ ID NO: 1406272 - DNA, 25 bp, Homo sapien
cctcacccacttggggtgttacagg

SEQ ID NO: 1406273 - DNA, 25 bp, Homo sapien
cgagagaacttacggctctttctgc

SEQ ID NO: 1406274 - DNA, 25 bp, Homo sapien
tgccgggacgggattctcgccctct

SEQ ID NO: 1406275 - DNA, 25 bp, Homo sapien
atcactctggaatgccgggacggga

SEQ ID NO: 1406276 - DNA, 25 bp, Homo sapien
agcctgcagccgtatgttgacatga

SEQ ID NO: 1406277 - DNA, 25 bp, Homo sapien
ttgacatgattgacgaggtgggaaa

SEQ ID NO: 1406278 - DNA, 25 bp, Homo sapien
gtaccctgacccttgtgtctgcaca

SEQ ID NO: 1406279 - DNA, 25 bp, Homo sapien
tctgtctggatgatcactaagtacc

SEQ ID NO: 1406280 - DNA, 25 bp, Homo sapien
tctacatacacttctgccagaaagg

SEQ ID NO: 1406281 - DNA, 25 bp, Homo sapien
cgtgaggcactgtacgtgtcctatt

SEQ ID NO: 1406282 - DNA, 25 bp, Homo sapien
agaaggtccgggaggaaagcatatc

SEQ ID NO: 1406283 - DNA, 25 bp, Homo sapien
cacataaggcagatgatgaccattt

SEQ ID NO: 1406284 - DNA, 25 bp, Homo sapien
gactggcaaagtgaggtcagctctg

SEQ ID NO: 1406285 - DNA, 25 bp, Homo sapien
tctctccaagctgtgcacacacata

SEQ ID NO: 1406286 - DNA, 25 bp, Homo sapien
gatacataaagttcactagcaacct

SEQ ID NO: 1406287 - DNA, 25 bp, Homo sapien
aaagttcactagcaaccttttaatg

SEQ ID NO: 1406288 - DNA, 25 bp, Homo sapien
tgcagatacataaagttcactagca

SEQ ID NO: 1406289 - DNA, 25 bp, Homo sapien
cactagcaaccttttaatgtcttta

SEQ ID NO: 1406290 - DNA, 25 bp, Homo sapien
ccttgtcatacagccgcttgaggtt

SEQ ID NO: 1406291 - DNA, 25 bp, Homo sapien
agtttccgagtctcacacttcttca

SEQ ID NO: 1406292 - DNA, 25 bp, Homo sapien
ggttcccataggctccctcaaagga

SEQ ID NO: 1406293 - DNA, 25 bp, Homo sapien
cagttggtggtacattttggctgcc

SEQ ID NO: 1406294 - DNA, 25 bp, Homo sapien
ttctaacagctaagagtcagaccca

SEQ ID NO: 1406295 - DNA, 25 bp, Homo sapien
ttttattctaacagctaagagtcag

SEQ ID NO: 1406296 - DNA, 25 bp, Homo sapien
tgagctaccaggccctgccaaaaat

SEQ ID NO: 1406297 - DNA, 25 bp, Homo sapien
tattctaacagctaagagtcagacc

SEQ ID NO: 1406298 - DNA, 25 bp, Homo sapien
cagcgcaggtagcaatacatggctt

SEQ ID NO: 1406299 - DNA, 25 bp, Homo sapien
cagggtgcccagctgattgaagggc

SEQ ID NO: 1406300 - DNA, 25 bp, Homo sapien
gcaggtagcaatacatggcttccac

SEQ ID NO: 1406301 - DNA, 25 bp, Homo sapien
ggcttccacattatagtacttgctg

SEQ ID NO: 1406302 - DNA, 25 bp, Homo sapien
ttgatggagtaccattcctctggct

SEQ ID NO: 1406303 - DNA, 25 bp, Homo sapien
tatggctcctccaaggttgatggaa

SEQ ID NO: 1406304 - DNA, 25 bp, Homo sapien
caggcgttacctgaattgatggagt

SEQ ID NO: 1406305 - DNA, 25 bp, Homo sapien
tcccacctggtgtgacaggcgttac

SEQ ID NO: 1406306 - DNA, 25 bp, Homo sapien
ctactgacagggcttggtagtaaaa

SEQ ID NO: 1406307 - DNA, 25 bp, Homo sapien
gctagcagctcggtatctacgccag

SEQ ID NO: 1406308 - DNA, 25 bp, Homo sapien
ggtagtaaaatctctcggctagcag

SEQ ID NO: 1406309 - DNA, 25 bp, Homo sapien
tatctacgccagctaattcattctg

SEQ ID NO: 1406310 - DNA, 25 bp, Homo sapien
aaatgcaaatgctcaatttcacaga

SEQ ID NO: 1406311 - DNA, 25 bp, Homo sapien
atttagttctgaaatgcaaatgctc

SEQ ID NO: 1406312 - DNA, 25 bp, Homo sapien
caaatgctcaatttcacagagaaga

SEQ ID NO: 1406313 - DNA, 25 bp, Homo sapien
gaataggctcttcttggtaatctct

SEQ ID NO: 1406314 - DNA, 25 bp, Homo sapien
agcctgggctcgtcctgtaacccaa

SEQ ID NO: 1406315 - DNA, 25 bp, Homo sapien
gcctgggctcgtcctgtaacccaaa

SEQ ID NO: 1406316 - DNA, 25 bp, Homo sapien
cagatacaccagacatcggtgacat

SEQ ID NO: 1406317 - DNA, 25 bp, Homo sapien
tacaccagacatcggtgacatgcca

SEQ ID NO: 1406318 - DNA, 25 bp, Homo sapien
accagacatcggtgacatgccatct

SEQ ID NO: 1406319 - DNA, 25 bp, Homo sapien
gatacaccagacatcggtgacatgc

SEQ ID NO: 1406320 - DNA, 25 bp, Homo sapien
agagacacagaggatcacaggtggc

SEQ ID NO: 1406321 - DNA, 25 bp, Homo sapien
tatgaagaaatacccctccgagatg

SEQ ID NO: 1406322 - DNA, 25 bp, Homo sapien
cattcataggacaggaaggaactgg

SEQ ID NO: 1406323 - DNA, 25 bp, Homo sapien
tagggccctcaacctaggatggcac

SEQ ID NO: 1406324 - DNA, 25 bp, Homo sapien
ggtgacaaggacacaacctccatct

SEQ ID NO: 1406325 - DNA, 25 bp, Homo sapien
tggtgacaaggacacaacctccatc

SEQ ID NO: 1406326 - DNA, 25 bp, Homo sapien
gtgacaaggacacaacctccatctc

SEQ ID NO: 1406327 - DNA, 25 bp, Homo sapien
aattatagctgccagtacctcagct

SEQ ID NO: 1406328 - DNA, 25 bp, Homo sapien
aagcatgagaacctgctcaagtcca

SEQ ID NO: 1406329 - DNA, 25 bp, Homo sapien
gtcgcaagctacatgaaccctgagg

SEQ ID NO: 1406330 - DNA, 25 bp, Homo sapien
aggccagaggtagaagcatgagaac

SEQ ID NO: 1406331 - DNA, 25 bp, Homo sapien
ggtcgcaagctacatgaaccctgag

SEQ ID NO: 1406332 - DNA, 25 bp, Homo sapien
gcgtcctgtaggcacattccaaagt

SEQ ID NO: 1406333 - DNA, 25 bp, Homo sapien
tgacatgggtccagtcgatgcagca

SEQ ID NO: 1406334 - DNA, 25 bp, Homo sapien
aataccagcaaccaggtgcgtcctg

SEQ ID NO: 1406335 - DNA, 25 bp, Homo sapien
gaaggagatgctggtagaagccaat

SEQ ID NO: 1406336 - DNA, 25 bp, Homo sapien
tactgtcatactcttagctctaact

SEQ ID NO: 1406337 - DNA, 25 bp, Homo sapien
actctcactcacaagttactgtcat

SEQ ID NO: 1406338 - DNA, 25 bp, Homo sapien
ccctgttcatctcacttggctctgg

SEQ ID NO: 1406339 - DNA, 25 bp, Homo sapien
tccttctctaatcctaattacatct

SEQ ID NO: 1406340 - DNA, 25 bp, Homo sapien
tttctcccatagtccactgggtgca

SEQ ID NO: 1406341 - DNA, 25 bp, Homo sapien
tcttgataagctggataacttcata

SEQ ID NO: 1406342 - DNA, 25 bp, Homo sapien
gcaggaacataagcttgacgcagag

SEQ ID NO: 1406343 - DNA, 25 bp, Homo sapien
ggataacttcatagtatacctttct

SEQ ID NO: 1406344 - DNA, 25 bp, Homo sapien
cttcttgataagcagttttgttgca

SEQ ID NO: 1406345 - DNA, 25 bp, Homo sapien
tgttcctcaggctaatgttttctgg

SEQ ID NO: 1406346 - DNA, 25 bp, Homo sapien
ggtttgaatacttcttgataagcag

SEQ ID NO: 1406347 - DNA, 25 bp, Homo sapien
aggtcaagtcgatgcacagcctcca

SEQ ID NO: 1406348 - DNA, 25 bp, Homo sapien
ccgcttagtgtggaggacttttgct

SEQ ID NO: 1406349 - DNA, 25 bp, Homo sapien
aagccgcttagtgtggaggactttt

SEQ ID NO: 1406350 - DNA, 25 bp, Homo sapien
gtaaagccgcttagtgtggaggact

SEQ ID NO: 1406351 - DNA, 25 bp, Homo sapien
gacttttgcttcgggctcgctgctc

SEQ ID NO: 1406352 - DNA, 25 bp, Homo sapien
cgggggcagctcccggtcacaggcc

SEQ ID NO: 1406353 - DNA, 25 bp, Homo sapien
ggggcagctcccggtcacaggcccc

SEQ ID NO: 1406354 - DNA, 25 bp, Homo sapien
gcagctcccggtcacaggcccctgc

SEQ ID NO: 1406355 - DNA, 25 bp, Homo sapien
gggcagctcccggtcacaggcccct

SEQ ID NO: 1406356 - DNA, 25 bp, Homo sapien
ggccgccatcgctgtgaggcggctg

SEQ ID NO: 1406357 - DNA, 25 bp, Homo sapien
cctgctcggccgccatcgctgtgag

SEQ ID NO: 1406358 - DNA, 25 bp, Homo sapien
tgctcggccgccatcgctgtgaggc

SEQ ID NO: 1406359 - DNA, 25 bp, Homo sapien
ctcggccgccatcgctgtgaggcgg

SEQ ID NO: 1406360 - DNA, 25 bp, Homo sapien
tttcttctttaccatggacaagttc

SEQ ID NO: 1406361 - DNA, 25 bp, Homo sapien
gttcattaagcagtttgtgcctcag

SEQ ID NO: 1406362 - DNA, 25 bp, Homo sapien
agagagttgctcaggtcagtcggca

SEQ ID NO: 1406363 - DNA, 25 bp, Homo sapien
tcctctcttatccagggtcctttct

SEQ ID NO: 1406364 - DNA, 25 bp, Homo sapien
gcagagacagtctatatagtatgct

SEQ ID NO: 1406365 - DNA, 25 bp, Homo sapien
aataactttttgctcatatatgcac

SEQ ID NO: 1406366 - DNA, 25 bp, Homo sapien
cagtctatatagtatgctgccatac

SEQ ID NO: 1406367 - DNA, 25 bp, Homo sapien
tcactcaatgtattatcacactggc

SEQ ID NO: 1406368 - DNA, 25 bp, Homo sapien
tactatactcattgaatttgctcaa

SEQ ID NO: 1406369 - DNA, 25 bp, Homo sapien
ttgagaccatctcgggtgaaacccc

SEQ ID NO: 1406370 - DNA, 25 bp, Homo sapien
ggaagatattttactatactcattg

SEQ ID NO: 1406371 - DNA, 25 bp, Homo sapien
tttactatactcattgaatttgctc

SEQ ID NO: 1406372 - DNA, 25 bp, Homo sapien
tttgagcccagactggcaacatagc

SEQ ID NO: 1406373 - DNA, 25 bp, Homo sapien
tttaaagtttgtacagccaggtgtg

SEQ ID NO: 1406374 - DNA, 25 bp, Homo sapien
ggtgagagaatcactcaaggccaga

SEQ ID NO: 1406375 - DNA, 25 bp, Homo sapien
gagagaatcactcaaggccagaagt

SEQ ID NO: 1406376 - DNA, 25 bp, Homo sapien
tctactacatgttcgtggtggagcc

SEQ ID NO: 1406377 - DNA, 25 bp, Homo sapien
tttgccgtgggccgctccttccgag

SEQ ID NO: 1406378 - DNA, 25 bp, Homo sapien
gagccggagcgcatgctcactgcca

SEQ ID NO: 1406379 - DNA, 25 bp, Homo sapien
gaggcttcggctacggcctgacgtt

SEQ ID NO: 1406380 - DNA, 25 bp, Homo sapien
tcaaacagaaacttgccttccaagc

SEQ ID NO: 1406381 - DNA, 25 bp, Homo sapien
aacactcacacatcaagagactgga

SEQ ID NO: 1406382 - DNA, 25 bp, Homo sapien
caagaccagcccaacaacactcaca

SEQ ID NO: 1406383 - DNA, 25 bp, Homo sapien
cagatgacgatagaaacctcccagc

SEQ ID NO: 1406384 - DNA, 25 bp, Homo sapien
tcatttaggcctgcaagtcccatcc

SEQ ID NO: 1406385 - DNA, 25 bp, Homo sapien
cccatccaagggaaatgtgtggaga

SEQ ID NO: 1406386 - DNA, 25 bp, Homo sapien
tcagaatgcctctcatttaggcctg

SEQ ID NO: 1406387 - DNA, 25 bp, Homo sapien
caccaaggggaccttatcaatagcc

SEQ ID NO: 1406388 - DNA, 25 bp, Homo sapien
ccagagtttcgaggcacagcaagac

SEQ ID NO: 1406389 - DNA, 25 bp, Homo sapien
gctccaacctccagagtttcgaggc

SEQ ID NO: 1406390 - DNA, 25 bp, Homo sapien
ggctggaacttgatgctccaacctc

SEQ ID NO: 1406391 - DNA, 25 bp, Homo sapien
gggccggctggaacttgatgctcca

SEQ ID NO: 1406392 - DNA, 25 bp, Homo sapien
tagtggggacaagccgtccactgga

SEQ ID NO: 1406393 - DNA, 25 bp, Homo sapien
ccactggagggaagcccacacccag

SEQ ID NO: 1406394 - DNA, 25 bp, Homo sapien
ttaatttatggactggtactctgag

SEQ ID NO: 1406395 - DNA, 25 bp, Homo sapien
tggtactctgagtacttcttgtggt

SEQ ID NO: 1406396 - DNA, 25 bp, Homo sapien
tgtggaagccccgaacgtcagattg

SEQ ID NO: 1406397 - DNA, 25 bp, Homo sapien
cccaaagaaggctcggacaatgggt

SEQ ID NO: 1406398 - DNA, 25 bp, Homo sapien
aaggcacagaagttattctgggacc

SEQ ID NO: 1406399 - DNA, 25 bp, Homo sapien
ggacccaaagaaggctcggacaatg

SEQ ID NO: 1406400 - DNA, 25 bp, Homo sapien
tgggagtaagccactggtcgccact

SEQ ID NO: 1406401 - DNA, 25 bp, Homo sapien
cagggcagggctgattctcggcccc

SEQ ID NO: 1406402 - DNA, 25 bp, Homo sapien
agtaagccactggtcgccactgtgc

SEQ ID NO: 1406403 - DNA, 25 bp, Homo sapien
gcttctgggagtaagccactggtcg

SEQ ID NO: 1406404 - DNA, 25 bp, Homo sapien
ctgggaagaaaggcaaacaagggag

SEQ ID NO: 1406405 - DNA, 25 bp, Homo sapien
tattctgtgactagcagcaggagtc

SEQ ID NO: 1406406 - DNA, 25 bp, Homo sapien
tgactagcagcaggagtcctgagtc

SEQ ID NO: 1406407 - DNA, 25 bp, Homo sapien
ctgtgcccgaccctcttttccttgc

SEQ ID NO: 1406408 - DNA, 25 bp, Homo sapien
cagccttattctgtgactagcagca

SEQ ID NO: 1406409 - DNA, 25 bp, Homo sapien
gcacagtgcctagctcttaaacgac

SEQ ID NO: 1406410 - DNA, 25 bp, Homo sapien
tctgccagagtgtaagtcatattgc

SEQ ID NO: 1406411 - DNA, 25 bp, Homo sapien
tgagttttaggtcccaatggtgtcc

SEQ ID NO: 1406412 - DNA, 25 bp, Homo sapien
tccaaacctccaagtctggactcag

SEQ ID NO: 1406413 - DNA, 25 bp, Homo sapien
tctgcctctctccaggaagcctgac

SEQ ID NO: 1406414 - DNA, 25 bp, Homo sapien
atctgcctctctccaggaagcctga

SEQ ID NO: 1406415 - DNA, 25 bp, Homo sapien
ccatctgcctctctccaggaagcct

SEQ ID NO: 1406416 - DNA, 25 bp, Homo sapien
catctgcctctctccaggaagcctg

SEQ ID NO: 1406417 - DNA, 25 bp, Homo sapien
gccacctctagctgacaggtgtctg

SEQ ID NO: 1406418 - DNA, 25 bp, Homo sapien
aatgtggctacctccagcccaaaca

SEQ ID NO: 1406419 - DNA, 25 bp, Homo sapien
ggaagacggccggtgcatattcatc

SEQ ID NO: 1406420 - DNA, 25 bp, Homo sapien
ttcatcgtcgatggagtgctgctcc

SEQ ID NO: 1406421 - DNA, 25 bp, Homo sapien
cattggcaaaagtcctggtagggtc

SEQ ID NO: 1406422 - DNA, 25 bp, Homo sapien
gagtatggaggatatggtcttccca

SEQ ID NO: 1406423 - DNA, 25 bp, Homo sapien
tggcactcagggtggcaggatccaa

SEQ ID NO: 1406424 - DNA, 25 bp, Homo sapien
tcggacacgttggtgctgtcaaact

SEQ ID NO: 1406425 - DNA, 25 bp, Homo sapien
catatctgagtctatttcacccacc

SEQ ID NO: 1406426 - DNA, 25 bp, Homo sapien
tagttccaccctctaattgggatga

SEQ ID NO: 1406427 - DNA, 25 bp, Homo sapien
cagtctttagttccaccctctaatt

SEQ ID NO: 1406428 - DNA, 25 bp, Homo sapien
ttgggatgaactctctcctctgcac

SEQ ID NO: 1406429 - DNA, 25 bp, Homo sapien
ccacacatagtgcagtgtggaattg

SEQ ID NO: 1406430 - DNA, 25 bp, Homo sapien
cagtgtggaattggtgcccactgcc

SEQ ID NO: 1406431 - DNA, 25 bp, Homo sapien
aggctccagttgacgctcagggtgc

SEQ ID NO: 1406432 - DNA, 25 bp, Homo sapien
gcccactgcccgtatatgaagcagg

SEQ ID NO: 1406433 - DNA, 25 bp, Homo sapien
agccagttagggatgacctccagag

SEQ ID NO: 1406434 - DNA, 25 bp, Homo sapien
ggcccagccagttagggatgacctc

SEQ ID NO: 1406435 - DNA, 25 bp, Homo sapien
cccagccagttagggatgacctcca

SEQ ID NO: 1406436 - DNA, 25 bp, Homo sapien
cagccagttagggatgacctccaga

SEQ ID NO: 1406437 - DNA, 25 bp, Homo sapien
tcttctcccccagcaggccaaatgg

SEQ ID NO: 1406438 - DNA, 25 bp, Homo sapien
ctggcgggtcttctcccccagcagg

SEQ ID NO: 1406439 - DNA, 25 bp, Homo sapien
ggtcttctcccccagcaggccaaat

SEQ ID NO: 1406440 - DNA, 25 bp, Homo sapien
ttctcccccagcaggccaaatgggg

SEQ ID NO: 1406441 - DNA, 25 bp, Homo sapien
aggtgcactccacagagccgcgcat

SEQ ID NO: 1406442 - DNA, 25 bp, Homo sapien
ccaaccccaggtgcactccacagag

SEQ ID NO: 1406443 - DNA, 25 bp, Homo sapien
ctgcaaacagaagtagagtccaaag

SEQ ID NO: 1406444 - DNA, 25 bp, Homo sapien
caaacagaagtagagtccaaaggag

SEQ ID NO: 1406445 - DNA, 25 bp, Homo sapien
ttcagccgacggaagaggtgccaga

SEQ ID NO: 1406446 - DNA, 25 bp, Homo sapien
caattcagccgacggaagaggtgcc

SEQ ID NO: 1406447 - DNA, 25 bp, Homo sapien
cgcaattcagccgacggaagaggtg

SEQ ID NO: 1406448 - DNA, 25 bp, Homo sapien
acggccgcaattcagccgacggaag

SEQ ID NO: 1406449 - DNA, 25 bp, Homo sapien
gatcttccagatcgtcatagagtga

SEQ ID NO: 1406450 - DNA, 25 bp, Homo sapien
ttcaatcacatttggatgatcttcc

SEQ ID NO: 1406451 - DNA, 25 bp, Homo sapien
tgggcttgactaggcttccgacaac

SEQ ID NO: 1406452 - DNA, 25 bp, Homo sapien
catagagtgatctgacgatgtccag

SEQ ID NO: 1406453 - DNA, 25 bp, Homo sapien
gatgttggcaaaaacaggctgtcca

SEQ ID NO: 1406454 - DNA, 25 bp, Homo sapien
ctgcagtgtgatgttggcaaaaaca

SEQ ID NO: 1406455 - DNA, 25 bp, Homo sapien
cagtgtgatgttggcaaaaacaggc

SEQ ID NO: 1406456 - DNA, 25 bp, Homo sapien
ttggcaaaaacaggctgtccattaa

SEQ ID NO: 1406457 - DNA, 25 bp, Homo sapien
gaagcttatcatgtgtccttgcatc

SEQ ID NO: 1406458 - DNA, 25 bp, Homo sapien
agaagcttatcatgtgtccttgcat

SEQ ID NO: 1406459 - DNA, 25 bp, Homo sapien
aagcttatcatgtgtccttgcatct

SEQ ID NO: 1406460 - DNA, 25 bp, Homo sapien
cagaagcttatcatgtgtccttgca

SEQ ID NO: 1406461 - DNA, 25 bp, Homo sapien
gcagcagcttgccatagtagttgag

SEQ ID NO: 1406462 - DNA, 25 bp, Homo sapien
ccatagtagttgagccacacaggca

SEQ ID NO: 1406463 - DNA, 25 bp, Homo sapien
cttgccatagtagttgagccacaca

SEQ ID NO: 1406464 - DNA, 25 bp, Homo sapien
agtagttgagccacacaggcagcac

SEQ ID NO: 1406465 - DNA, 25 bp, Homo sapien
agctcgcgtgagttcacagagcgca

SEQ ID NO: 1406466 - DNA, 25 bp, Homo sapien
gttcacagagcgcagcacaggccat

SEQ ID NO: 1406467 - DNA, 25 bp, Homo sapien
tccgggagagctcgcgtgagttcac

SEQ ID NO: 1406468 - DNA, 25 bp, Homo sapien
cagatgatgatccgggagagctcgc

SEQ ID NO: 1406469 - DNA, 25 bp, Homo sapien
ccgaagccttgacaacttgggcctg

SEQ ID NO: 1406470 - DNA, 25 bp, Homo sapien
tacctccgaagccttgacaacttgg

SEQ ID NO: 1406471 - DNA, 25 bp, Homo sapien
ggatttcggcaagagttacaatgga

SEQ ID NO: 1406472 - DNA, 25 bp, Homo sapien
agagactacttccgttcacccggat

SEQ ID NO: 1406473 - DNA, 25 bp, Homo sapien
tccatgagatagcacacctgagggt

SEQ ID NO: 1406474 - DNA, 25 bp, Homo sapien
cgtcccactgaagagctacctatag

SEQ ID NO: 1406475 - DNA, 25 bp, Homo sapien
tacctgggtggtaagcaagacatcc

SEQ ID NO: 1406476 - DNA, 25 bp, Homo sapien
tagatcagacagacttactcccagc

SEQ ID NO: 1406477 - DNA, 25 bp, Homo sapien
tgcattgaagtagccttgcctagca

SEQ ID NO: 1406478 - DNA, 25 bp, Homo sapien
tagagaagaattacatgtcagtgtc

SEQ ID NO: 1406479 - DNA, 25 bp, Homo sapien
ctggcactctggctcaggaaaaggg

SEQ ID NO: 1406480 - DNA, 25 bp, Homo sapien
ttctgaacaaagacgtccacagtgt

SEQ ID NO: 1406481 - DNA, 25 bp, Homo sapien
tctggtcatcgcctttctttttgtg

SEQ ID NO: 1406482 - DNA, 25 bp, Homo sapien
tttgtggcctgaaacgatgtcatca

SEQ ID NO: 1406483 - DNA, 25 bp, Homo sapien
gatgtcatcaattcgcagtagcaga

SEQ ID NO: 1406484 - DNA, 25 bp, Homo sapien
cttgccggctctggtcatcgccttt

SEQ ID NO: 1406485 - DNA, 25 bp, Homo sapien
gccaatggctcccatatgcccagtt

SEQ ID NO: 1406486 - DNA, 25 bp, Homo sapien
ccatttacaccccaggtctcacagt

SEQ ID NO: 1406487 - DNA, 25 bp, Homo sapien
gctgtcttataagtctgcagcttca

SEQ ID NO: 1406488 - DNA, 25 bp, Homo sapien
caaagtacccgtctcaccatttaca

SEQ ID NO: 1406489 - DNA, 25 bp, Homo sapien
gggacaccaccagttgtcaagctac

SEQ ID NO: 1406490 - DNA, 25 bp, Homo sapien
aacctgagagacagctctacccttc

SEQ ID NO: 1406491 - DNA, 25 bp, Homo sapien
gcagtaagggggatcccaggcaccc

SEQ ID NO: 1406492 - DNA, 25 bp, Homo sapien
cgcccacaggtccatgggagcttga

SEQ ID NO: 1406493 - DNA, 25 bp, Homo sapien
acccccgatccctgagactgagggg

SEQ ID NO: 1406494 - DNA, 25 bp, Homo sapien
ctgggagtcttttccctaacttgtg

SEQ ID NO: 1406495 - DNA, 25 bp, Homo sapien
gactgaggggtttacgggctgtgaa

SEQ ID NO: 1406496 - DNA, 25 bp, Homo sapien
aaatctcaatattcatctcccacat

SEQ ID NO: 1406497 - DNA, 25 bp, Homo sapien
tctacccttcctcccagtaagaagg

SEQ ID NO: 1406498 - DNA, 25 bp, Homo sapien
caggcacccatctcaaggagtggct

SEQ ID NO: 1406499 - DNA, 25 bp, Homo sapien
gctgtgaatggaccttcagccctgc

SEQ ID NO: 1406500 - DNA, 25 bp, Homo sapien
gggtgcctgggatcccccttactgc

SEQ ID NO: 1406501 - DNA, 25 bp, Homo sapien
ccttcttactgggaggaagggtaga

SEQ ID NO: 1406502 - DNA, 25 bp, Homo sapien
agccactccttgagatgggtgcctg

SEQ ID NO: 1406503 - DNA, 25 bp, Homo sapien
ttcacagcccgtaaacccctcagtc

SEQ ID NO: 1406504 - DNA, 25 bp, Homo sapien
cccctcagtctcagggatcgggggt

SEQ ID NO: 1406505 - DNA, 25 bp, Homo sapien
atgtgggagatgaatattgagattt

SEQ ID NO: 1406506 - DNA, 25 bp, Homo sapien
cacaagttagggaaaagactcccag

SEQ ID NO: 1406507 - DNA, 25 bp, Homo sapien
gtagcttgacaactggtggtgtccc

SEQ ID NO: 1406508 - DNA, 25 bp, Homo sapien
gcagggctgaaggtccattcacagc

SEQ ID NO: 1406509 - DNA, 25 bp, Homo sapien
tcaagctcccatggacctgtgggcg

SEQ ID NO: 1406510 - DNA, 25 bp, Homo sapien
gaagggtagagctgtctctcaggtt

SEQ ID NO: 1406511 - DNA, 25 bp, Homo sapien
tccaggagaacattgcgacacactt

SEQ ID NO: 1406512 - DNA, 25 bp, Homo sapien
aggaatgacctctagggcctgggca

SEQ ID NO: 1406513 - DNA, 25 bp, Homo sapien
catcctggaggttgcgttctacttc

SEQ ID NO: 1406514 - DNA, 25 bp, Homo sapien
tctggatcagggtacgaggaatgac

SEQ ID NO: 1406515 - DNA, 25 bp, Homo sapien
tctggtcatacatccaaggctgact

SEQ ID NO: 1406516 - DNA, 25 bp, Homo sapien
ctggtcatacatccaaggctgactc

SEQ ID NO: 1406517 - DNA, 25 bp, Homo sapien
ctacttcatctggtcatacatccaa

SEQ ID NO: 1406518 - DNA, 25 bp, Homo sapien
catctggtcatacatccaaggctga

SEQ ID NO: 1406519 - DNA, 25 bp, Homo sapien
ctctggtcggctgactatccgggcc

SEQ ID NO: 1406520 - DNA, 25 bp, Homo sapien
tggtcggctgactatccgggcccca

SEQ ID NO: 1406521 - DNA, 25 bp, Homo sapien
cccggaggagaatggtgcaggcctt

SEQ ID NO: 1406522 - DNA, 25 bp, Homo sapien
cgagagaatctctttgctagccccc

SEQ ID NO: 1406523 - DNA, 25 bp, Homo sapien
aattaacacaagatgacaggccagg

SEQ ID NO: 1406524 - DNA, 25 bp, Homo sapien
cttcgtaggatttatgacagagcca

SEQ ID NO: 1406525 - DNA, 25 bp, Homo sapien
aaaaaactggcatagcggtggtgaa

SEQ ID NO: 1406526 - DNA, 25 bp, Homo sapien
ttctgcaggagcaaactgtgtccag

SEQ ID NO: 1406527 - DNA, 25 bp, Homo sapien
ctagcaatgcgattattgtctgtct

SEQ ID NO: 1406528 - DNA, 25 bp, Homo sapien
ccgcataaggtagtgctgagctaaa

SEQ ID NO: 1406529 - DNA, 25 bp, Homo sapien
tgtcttccggactctgcggatggct

SEQ ID NO: 1406530 - DNA, 25 bp, Homo sapien
tggctgtgatattggcccgcataag

SEQ ID NO: 1406531 - DNA, 25 bp, Homo sapien
ttttcagtgatgaccacatcgggct

SEQ ID NO: 1406532 - DNA, 25 bp, Homo sapien
cagttggataatgtcctcacagagc

SEQ ID NO: 1406533 - DNA, 25 bp, Homo sapien
cctcctctcgtgtaatctcaatgtc

SEQ ID NO: 1406534 - DNA, 25 bp, Homo sapien
gaattcgggtgaagtcctcctctcg

SEQ ID NO: 1406535 - DNA, 25 bp, Homo sapien
ataaaacaaccagaactgaaagtca

SEQ ID NO: 1406536 - DNA, 25 bp, Homo sapien
ccagctccagttatatcattataaa

SEQ ID NO: 1406537 - DNA, 25 bp, Homo sapien
taaaacaaccagaactgaaagtcac

SEQ ID NO: 1406538 - DNA, 25 bp, Homo sapien
aacaaccagaactgaaagtcacaca

SEQ ID NO: 1406539 - DNA, 25 bp, Homo sapien
tccttgttaatcatgactccacgca

SEQ ID NO: 1406540 - DNA, 25 bp, Homo sapien
gccgcatacgtggatgggtcacatc

SEQ ID NO: 1406541 - DNA, 25 bp, Homo sapien
gcagcacaatgcgagggttcttgat

SEQ ID NO: 1406542 - DNA, 25 bp, Homo sapien
catgactccacgcaagacacaggag

SEQ ID NO: 1406543 - DNA, 25 bp, Homo sapien
tgttgcaagccaaagatgaccaccg

SEQ ID NO: 1406544 - DNA, 25 bp, Homo sapien
gatgttcagcatcatatcactgtca

SEQ ID NO: 1406545 - DNA, 25 bp, Homo sapien
cactgtcactgatgtcgactgggat

SEQ ID NO: 1406546 - DNA, 25 bp, Homo sapien
taccatcttgacagcatccagggca

SEQ ID NO: 1406547 - DNA, 25 bp, Homo sapien
gcggtaagcactgatcaccactgtt

SEQ ID NO: 1406548 - DNA, 25 bp, Homo sapien
catccaatgccttgcggtaagcact

SEQ ID NO: 1406549 - DNA, 25 bp, Homo sapien
tttagggtgctgatcatatcatcca

SEQ ID NO: 1406550 - DNA, 25 bp, Homo sapien
tttctttagggtgctgatcatatca

SEQ ID NO: 1406551 - DNA, 25 bp, Homo sapien
caggaagtgctcagctacagacagc

SEQ ID NO: 1406552 - DNA, 25 bp, Homo sapien
aggaagtgctcagctacagacagca

SEQ ID NO: 1406553 - DNA, 25 bp, Homo sapien
tccaggaagtgctcagctacagaca

SEQ ID NO: 1406554 - DNA, 25 bp, Homo sapien
gctccaggaagtgctcagctacaga

SEQ ID NO: 1406555 - DNA, 25 bp, Homo sapien
aaaaagatacaagcaccatagtaat

SEQ ID NO: 1406556 - DNA, 25 bp, Homo sapien
aaagatacaagcaccatagtaatat

SEQ ID NO: 1406557 - DNA, 25 bp, Homo sapien
ctgaaaaagatacaagcaccatagt

SEQ ID NO: 1406558 - DNA, 25 bp, Homo sapien
agatacaagcaccatagtaatattt

SEQ ID NO: 1406559 - DNA, 25 bp, Homo sapien
gacctgaggttgatagagtttgaca

SEQ ID NO: 1406560 - DNA, 25 bp, Homo sapien
acctgaggttgatagagtttgacac

SEQ ID NO: 1406561 - DNA, 25 bp, Homo sapien
aaattagctaggcttagccaggcac

SEQ ID NO: 1406562 - DNA, 25 bp, Homo sapien
attagctaggcttagccaggcacgg

SEQ ID NO: 1406563 - DNA, 25 bp, Homo sapien
aattagctaggcttagccaggcacg

SEQ ID NO: 1406564 - DNA, 25 bp, Homo sapien
aattagcatcccttggctgggcgca

SEQ ID NO: 1406565 - DNA, 25 bp, Homo sapien
taaaatagtccctctcaggccaggc

SEQ ID NO: 1406566 - DNA, 25 bp, Homo sapien
actataaattagcatcccttggctg

SEQ ID NO: 1406567 - DNA, 25 bp, Homo sapien
aaatagtccctctcaggccaggcgt

SEQ ID NO: 1406568 - DNA, 25 bp, Homo sapien
gctagctaatgcttctatgtgcaag

SEQ ID NO: 1406569 - DNA, 25 bp, Homo sapien
gaggcttataggtatctaaccctgt

SEQ ID NO: 1406570 - DNA, 25 bp, Homo sapien
tacgttaggtgagctttgtccaggc

SEQ ID NO: 1406571 - DNA, 25 bp, Homo sapien
tgctatgggctatgagttcaatgct

SEQ ID NO: 1406572 - DNA, 25 bp, Homo sapien
tcgcaccaccacactccagcatggt

SEQ ID NO: 1406573 - DNA, 25 bp, Homo sapien
gcaccaccacactccagcatggtga

SEQ ID NO: 1406574 - DNA, 25 bp, Homo sapien
atcgcaccaccacactccagcatgg

SEQ ID NO: 1406575 - DNA, 25 bp, Homo sapien
accaccacactccagcatggtgaca

SEQ ID NO: 1406576 - DNA, 25 bp, Homo sapien
atttcgatcatggacttggccgctg

SEQ ID NO: 1406577 - DNA, 25 bp, Homo sapien
tcctgggtccggctaatttcgatca

SEQ ID NO: 1406578 - DNA, 25 bp, Homo sapien
ccggctaatttcgatcatggacttg

SEQ ID NO: 1406579 - DNA, 25 bp, Homo sapien
tgggtccggctaatttcgatcatgg

SEQ ID NO: 1406580 - DNA, 25 bp, Homo sapien
gaagaatggcattgccatcattggt

SEQ ID NO: 1406581 - DNA, 25 bp, Homo sapien
ctctcgaagaatggcattgccatca

SEQ ID NO: 1406582 - DNA, 25 bp, Homo sapien
tgccatcattggtcatcacaatgcc

SEQ ID NO: 1406583 - DNA, 25 bp, Homo sapien
catcattggtcatcacaatgcctcc

SEQ ID NO: 1406584 - DNA, 25 bp, Homo sapien
ggtcccaaacatgttcggatgatat

SEQ ID NO: 1406585 - DNA, 25 bp, Homo sapien
catggacttgggtcccaaacatgtt

SEQ ID NO: 1406586 - DNA, 25 bp, Homo sapien
gacttgggtcccaaacatgttcgga

SEQ ID NO: 1406587 - DNA, 25 bp, Homo sapien
ttcatcatggacttgggtcccaaac

SEQ ID NO: 1406588 - DNA, 25 bp, Homo sapien
gattatcagtcctaactcagaaggg

SEQ ID NO: 1406589 - DNA, 25 bp, Homo sapien
taatgacacccctaaagcatggtta

SEQ ID NO: 1406590 - DNA, 25 bp, Homo sapien
tctagatgcacaggacacatggcta

SEQ ID NO: 1406591 - DNA, 25 bp, Homo sapien
tatctatccaagatctacggtgggc

SEQ ID NO: 1406592 - DNA, 25 bp, Homo sapien
tcttccggattcacgctttgtgttc

SEQ ID NO: 1406593 - DNA, 25 bp, Homo sapien
ttttcttccggattcacgctttgtg

SEQ ID NO: 1406594 - DNA, 25 bp, Homo sapien
acttttcttccggattcacgctttg

SEQ ID NO: 1406595 - DNA, 25 bp, Homo sapien
ccggattcacgctttgtgttctggc

SEQ ID NO: 1406596 - DNA, 25 bp, Homo sapien
gactgccccatcgtacacaagctat

SEQ ID NO: 1406597 - DNA, 25 bp, Homo sapien
cgaactccctgagattatgtgagaa

SEQ ID NO: 1406598 - DNA, 25 bp, Homo sapien
taacctgagatctatgaatgggcct

SEQ ID NO: 1406599 - DNA, 25 bp, Homo sapien
gccttagtgggatagcgaactccct

SEQ ID NO: 1406600 - DNA, 25 bp, Homo sapien
ctttaactgggaggctaatcggtca

SEQ ID NO: 1406601 - DNA, 25 bp, Homo sapien
tccagcataattagtgatagcgccc

SEQ ID NO: 1406602 - DNA, 25 bp, Homo sapien
gatttacatctatctcagggagctg

SEQ ID NO: 1406603 - DNA, 25 bp, Homo sapien
taatcggtcacagccaactaatgcc

SEQ ID NO: 1406604 - DNA, 25 bp, Homo sapien
atggaggtggtgctcatcagaaaaa

SEQ ID NO: 1406605 - DNA, 25 bp, Homo sapien
acaatggaggtggtgctcatcagaa

SEQ ID NO: 1406606 - DNA, 25 bp, Homo sapien
aagacaatggaggtggtgctcatca

SEQ ID NO: 1406607 - DNA, 25 bp, Homo sapien
gaagacaatggaggtggtgctcatc

SEQ ID NO: 1406608 - DNA, 25 bp, Homo sapien
gaaaaggtgaccagtcgagaaatct

SEQ ID NO: 1406609 - DNA, 25 bp, Homo sapien
gacacggagggaacgattacatcta

SEQ ID NO: 1406610 - DNA, 25 bp, Homo sapien
tctaagatcagtgaggcaagtacgg

SEQ ID NO: 1406611 - DNA, 25 bp, Homo sapien
gaaaagggattgctgttcaagagac

SEQ ID NO: 1406612 - DNA, 25 bp, Homo sapien
attaccgctactaagggatgggcca

SEQ ID NO: 1406613 - DNA, 25 bp, Homo sapien
taactccgtaatacagattgaaaca

SEQ ID NO: 1406614 - DNA, 25 bp, Homo sapien
tgggccaagaatataaagctagacc

SEQ ID NO: 1406615 - DNA, 25 bp, Homo sapien
aaatactgttaactccgtaatacag

SEQ ID NO: 1406616 - DNA, 25 bp, Homo sapien
gcacacgtcaaggaaagaggctcgg

SEQ ID NO: 1406617 - DNA, 25 bp, Homo sapien
attggaaggctcagtggcccggtca

SEQ ID NO: 1406618 - DNA, 25 bp, Homo sapien
tgcagctacatagcgacaatcaggc

SEQ ID NO: 1406619 - DNA, 25 bp, Homo sapien
ggctcggcgagaataaggccagttt

SEQ ID NO: 1406620 - DNA, 25 bp, Homo sapien
gagcacgagcactggacgatggccc

SEQ ID NO: 1406621 - DNA, 25 bp, Homo sapien
tgagcacgagcactggacgatggcc

SEQ ID NO: 1406622 - DNA, 25 bp, Homo sapien
agcacgagcactggacgatggccca

SEQ ID NO: 1406623 - DNA, 25 bp, Homo sapien
gcacgagcactggacgatggcccat

SEQ ID NO: 1406624 - DNA, 25 bp, Homo sapien
acgcgatgcagagccgggtacccag

SEQ ID NO: 1406625 - DNA, 25 bp, Homo sapien
atggcgacgcgatgcagagccgggt

SEQ ID NO: 1406626 - DNA, 25 bp, Homo sapien
ccagagctgggggaaccggcagaac

SEQ ID NO: 1406627 - DNA, 25 bp, Homo sapien
atgcagagccgggtacccagagctg

SEQ ID NO: 1406628 - DNA, 25 bp, Homo sapien
aaccagacagaagcccagaaaacgc

SEQ ID NO: 1406629 - DNA, 25 bp, Homo sapien
accagacagaagcccagaaaacgct

SEQ ID NO: 1406630 - DNA, 25 bp, Homo sapien
cccagaaaacgctgcctcctcaggg

SEQ ID NO: 1406631 - DNA, 25 bp, Homo sapien
tactctcaaggtagtcgccaatcac

SEQ ID NO: 1406632 - DNA, 25 bp, Homo sapien
tctcaaggtagtcgccaatcaccgc

SEQ ID NO: 1406633 - DNA, 25 bp, Homo sapien
ctcaacccgctactctcaaggtagt

SEQ ID NO: 1406634 - DNA, 25 bp, Homo sapien
ccgctactctcaaggtagtcgccaa

SEQ ID NO: 1406635 - DNA, 25 bp, Homo sapien
aaaacagaccaattgacagccttag

SEQ ID NO: 1406636 - DNA, 25 bp, Homo sapien
ctcattgatcggcacaaaaacagac

SEQ ID NO: 1406637 - DNA, 25 bp, Homo sapien
agacagagagcgcacgacgaaggca

SEQ ID NO: 1406638 - DNA, 25 bp, Homo sapien
cctacgcaagaacggccagacaagt

SEQ ID NO: 1406639 - DNA, 25 bp, Homo sapien
gcgtgcagcgcgaacgtcggcgcag

SEQ ID NO: 1406640 - DNA, 25 bp, Homo sapien
tgggagggcacaggcgcttgcgcag

SEQ ID NO: 1406641 - DNA, 25 bp, Homo sapien
gaacgtcggcgcaggcgccaaggct

SEQ ID NO: 1406642 - DNA, 25 bp, Homo sapien
tcccggccgcgtgcagcgcgaacgt

SEQ ID NO: 1406643 - DNA, 25 bp, Homo sapien
ctgttggtgttcagatggagcggca

SEQ ID NO: 1406644 - DNA, 25 bp, Homo sapien
tgttggtgttcagatggagcggcac

SEQ ID NO: 1406645 - DNA, 25 bp, Homo sapien
ttggtgttcagatggagcggcacac

SEQ ID NO: 1406646 - DNA, 25 bp, Homo sapien
tggtgttcagatggagcggcacact

SEQ ID NO: 1406647 - DNA, 25 bp, Homo sapien
cacattctgcacaagccatcaagtg

SEQ ID NO: 1406648 - DNA, 25 bp, Homo sapien
ctgcacaagccatcaagtgactgat

SEQ ID NO: 1406649 - DNA, 25 bp, Homo sapien
acaagccatcaagtgactgatgact

SEQ ID NO: 1406650 - DNA, 25 bp, Homo sapien
ttctgcacaagccatcaagtgactg

SEQ ID NO: 1406651 - DNA, 25 bp, Homo sapien
gctcttgccagaccttgaggactca

SEQ ID NO: 1406652 - DNA, 25 bp, Homo sapien
gccagaccttgaggactcatcatct

SEQ ID NO: 1406653 - DNA, 25 bp, Homo sapien
gaccttgaggactcatcatctccat

SEQ ID NO: 1406654 - DNA, 25 bp, Homo sapien
aacagctcttgccagaccttgagga

SEQ ID NO: 1406655 - DNA, 25 bp, Homo sapien
ccagatcaccttcatacattcatta

SEQ ID NO: 1406656 - DNA, 25 bp, Homo sapien
gctcggtctatgttggtcccacttc

SEQ ID NO: 1406657 - DNA, 25 bp, Homo sapien
ttcatagattgtccttccagatcac

SEQ ID NO: 1406658 - DNA, 25 bp, Homo sapien
caggctcggtctatgttggtcccac

SEQ ID NO: 1406659 - DNA, 25 bp, Homo sapien
ctctcagcagcctctctatattccc

SEQ ID NO: 1406660 - DNA, 25 bp, Homo sapien
tacaggataaactgggatgggctag

SEQ ID NO: 1406661 - DNA, 25 bp, Homo sapien
tcaaagtcttatcccagatggctcc

SEQ ID NO: 1406662 - DNA, 25 bp, Homo sapien
tctttcagtcaactgggaaggctta

SEQ ID NO: 1406663 - DNA, 25 bp, Homo sapien
gacttcaacttgctagagcctagcc

SEQ ID NO: 1406664 - DNA, 25 bp, Homo sapien
cagcccaaccagatgaagtacattc

SEQ ID NO: 1406665 - DNA, 25 bp, Homo sapien
gggaatccagcccaaccagatgaag

SEQ ID NO: 1406666 - DNA, 25 bp, Homo sapien
gaatccagcccaaccagatgaagta

SEQ ID NO: 1406667 - DNA, 25 bp, Homo sapien
cagagggaatccagcccaaccagat

SEQ ID NO: 1406668 - DNA, 25 bp, Homo sapien
tgtcaagcgtaaagaaaaatacttc

SEQ ID NO: 1406669 - DNA, 25 bp, Homo sapien
ctgaaaagaaaaattgtcaagcgta

SEQ ID NO: 1406670 - DNA, 25 bp, Homo sapien
ttttttttgagatggaatctcactc

SEQ ID NO: 1406671 - DNA, 25 bp, Homo sapien
gatggaatctcactctgtcacccag

SEQ ID NO: 1406672 - DNA, 25 bp, Homo sapien
caaatgggcacaaatcagggtcagc

SEQ ID NO: 1406673 - DNA, 25 bp, Homo sapien
tgcctaaggcgtaaactcagatccc

SEQ ID NO: 1406674 - DNA, 25 bp, Homo sapien
tagcaacggtacagtagcagagggc

SEQ ID NO: 1406675 - DNA, 25 bp, Homo sapien
gatgcccctcgaggtcaaagtgacc

SEQ ID NO: 1406676 - DNA, 25 bp, Homo sapien
gagctggtgctatagccatatagat

SEQ ID NO: 1406677 - DNA, 25 bp, Homo sapien
catggagaaggacttcccaagacag

SEQ ID NO: 1406678 - DNA, 25 bp, Homo sapien
catatagatcttggttagacatgga

SEQ ID NO: 1406679 - DNA, 25 bp, Homo sapien
acttagccatgccaagccaagagcc

SEQ ID NO: 1406680 - DNA, 25 bp, Homo sapien
tgctctgaggtacaatatggcagcc

SEQ ID NO: 1406681 - DNA, 25 bp, Homo sapien
tgcttggagacaaaagactgtcctg

SEQ ID NO: 1406682 - DNA, 25 bp, Homo sapien
cgtgggctgacggatctaaataggt

SEQ ID NO: 1406683 - DNA, 25 bp, Homo sapien
cgcgggaaaatccagataggagcta

SEQ ID NO: 1406684 - DNA, 25 bp, Homo sapien
agaggcaccgttctgtacacctggt

SEQ ID NO: 1406685 - DNA, 25 bp, Homo sapien
ctggtggagattccacaatggcttg

SEQ ID NO: 1406686 - DNA, 25 bp, Homo sapien
cacctggtggagattccacaatggc

SEQ ID NO: 1406687 - DNA, 25 bp, Homo sapien
tctgtacacctggtggagattccac

SEQ ID NO: 1406688 - DNA, 25 bp, Homo sapien
ggagttcaccacctaattgttaaca

SEQ ID NO: 1406689 - DNA, 25 bp, Homo sapien
ccatttctcagtcaggcctccgtta

SEQ ID NO: 1406690 - DNA, 25 bp, Homo sapien
tccgttatggactgcacccggtgat

SEQ ID NO: 1406691 - DNA, 25 bp, Homo sapien
ccagtggataaaagaggctgccgtt

SEQ ID NO: 1406692 - DNA, 25 bp, Homo sapien
tgagagaagctcaagcagggtcagt

SEQ ID NO: 1406693 - DNA, 25 bp, Homo sapien
gagaaaggtctctacacatcgatga

SEQ ID NO: 1406694 - DNA, 25 bp, Homo sapien
tcaggagacagcatgtatgagcagg

SEQ ID NO: 1406695 - DNA, 25 bp, Homo sapien
tgcccagacctggttaaagcctgag

SEQ ID NO: 1406696 - DNA, 25 bp, Homo sapien
catggccactcacagagaagtcttt

SEQ ID NO: 1406697 - DNA, 25 bp, Homo sapien
agaagtctttgtgcacaagccgggc

SEQ ID NO: 1406698 - DNA, 25 bp, Homo sapien
cagagaagtctttgtgcacaagccg

SEQ ID NO: 1406699 - DNA, 25 bp, Homo sapien
acttccatggccactcacagagaag

SEQ ID NO: 1406700 - DNA, 25 bp, Homo sapien
ctgggggatgggcggtggtgggcac

SEQ ID NO: 1406701 - DNA, 25 bp, Homo sapien
cagcagccagcagcagcctcaccat

SEQ ID NO: 1406702 - DNA, 25 bp, Homo sapien
attccgcccagcagccagcagcagc

SEQ ID NO: 1406703 - DNA, 25 bp, Homo sapien
ccagcagccagcagcagcctcacca

SEQ ID NO: 1406704 - DNA, 25 bp, Homo sapien
cgcccagcagccagcagcagcctca

SEQ ID NO: 1406705 - DNA, 25 bp, Homo sapien
ctgtagccccctgtgtcacacagcc

SEQ ID NO: 1406706 - DNA, 25 bp, Homo sapien
ccagcctctcatccgctttcttgag

SEQ ID NO: 1406707 - DNA, 25 bp, Homo sapien
aggaagaattccctcggagccttgg

SEQ ID NO: 1406708 - DNA, 25 bp, Homo sapien
ccttggccctggctactacctcacc

SEQ ID NO: 1406709 - DNA, 25 bp, Homo sapien
cttctcgaatgctgtggactgtcca

SEQ ID NO: 1406710 - DNA, 25 bp, Homo sapien
tgtgctgagggacaccaacttctgc

SEQ ID NO: 1406711 - DNA, 25 bp, Homo sapien
ctcagagcagcgttgtattccacac

SEQ ID NO: 1406712 - DNA, 25 bp, Homo sapien
tgttgccccacaaagtcagagccag

SEQ ID NO: 1406713 - DNA, 25 bp, Homo sapien
tagttaaggaactggtccatccgga

SEQ ID NO: 1406714 - DNA, 25 bp, Homo sapien
gagagaccctcaaactagcagatga

SEQ ID NO: 1406715 - DNA, 25 bp, Homo sapien
catacaggtcaaggaggactgggct

SEQ ID NO: 1406716 - DNA, 25 bp, Homo sapien
gaaaacaagctaccagcagaacctg

SEQ ID NO: 1406717 - DNA, 25 bp, Homo sapien
tacaggcgccagttacctaagatgg

SEQ ID NO: 1406718 - DNA, 25 bp, Homo sapien
tcaacagtatttctggtcagccagg

SEQ ID NO: 1406719 - DNA, 25 bp, Homo sapien
gaaagagtagaaggtcaaggcccca

SEQ ID NO: 1406720 - DNA, 25 bp, Homo sapien
gcatgcaaatcaggcttaacgagcg

SEQ ID NO: 1406721 - DNA, 25 bp, Homo sapien
caggccccgttccagtttgcatgac

SEQ ID NO: 1406722 - DNA, 25 bp, Homo sapien
gcctatgtggcctgccgctgtcaaa

SEQ ID NO: 1406723 - DNA, 25 bp, Homo sapien
gaggattctcaagggaagattccca

SEQ ID NO: 1406724 - DNA, 25 bp, Homo sapien
aagagggtgacgcttatgcatgcca

SEQ ID NO: 1406725 - DNA, 25 bp, Homo sapien
cctccaaaccacttcagacagaggt

SEQ ID NO: 1406726 - DNA, 25 bp, Homo sapien
aaaccacttcagacagaggtagcag

SEQ ID NO: 1406727 - DNA, 25 bp, Homo sapien
tgggcttgccagctactgctaggta

SEQ ID NO: 1406728 - DNA, 25 bp, Homo sapien
gctactgctaggtatgccctgtccc

SEQ ID NO: 1406729 - DNA, 25 bp, Homo sapien
ggatcttggcatttccgctaaccag

SEQ ID NO: 1406730 - DNA, 25 bp, Homo sapien
ccttttttgcataggggcaacctgc

SEQ ID NO: 1406731 - DNA, 25 bp, Homo sapien
cgctccacacaacgcaggcagagag

SEQ ID NO: 1406732 - DNA, 25 bp, Homo sapien
ctcgtaaaggaggtatcagacagat

SEQ ID NO: 1406733 - DNA, 25 bp, Homo sapien
taaaatgaggaatataggaatgatg

SEQ ID NO: 1406734 - DNA, 25 bp, Homo sapien
catttcagctctacctgatctatac

SEQ ID NO: 1406735 - DNA, 25 bp, Homo sapien
gatgatatctaaggctcatttcagc

SEQ ID NO: 1406736 - DNA, 25 bp, Homo sapien
ccgtatcttacatgacctaggttaa

SEQ ID NO: 1406737 - DNA, 25 bp, Homo sapien
ctctatcgtccacacggaggaagga

SEQ ID NO: 1406738 - DNA, 25 bp, Homo sapien
tggatgtggctctatcgtccacacg

SEQ ID NO: 1406739 - DNA, 25 bp, Homo sapien
tgtggctctatcgtccacacggagg

SEQ ID NO: 1406740 - DNA, 25 bp, Homo sapien
gagggtggtgcagaacccacccgcc

SEQ ID NO: 1406741 - DNA, 25 bp, Homo sapien
taacctcaggtgcacattaaataat

SEQ ID NO: 1406742 - DNA, 25 bp, Homo sapien
gcacgtgtacacatccacaggcatg

SEQ ID NO: 1406743 - DNA, 25 bp, Homo sapien
catgtgggtacatgcatacgtgtgt

SEQ ID NO: 1406744 - DNA, 25 bp, Homo sapien
gagaggtgagcctacatcagtggtt

SEQ ID NO: 1406745 - DNA, 25 bp, Homo sapien
gaggtgggaaggtcaatccataccc

SEQ ID NO: 1406746 - DNA, 25 bp, Homo sapien
tgtgctgtagaagctcaaaccaccc

SEQ ID NO: 1406747 - DNA, 25 bp, Homo sapien
taaactcatgatctcctagggaagt

SEQ ID NO: 1406748 - DNA, 25 bp, Homo sapien
taccaaccttaggaatcgcactggg

SEQ ID NO: 1406749 - DNA, 25 bp, Homo sapien
cctcaagttaaatgttatgagatcc

SEQ ID NO: 1406750 - DNA, 25 bp, Homo sapien
caagttaaatgttatgagatcctca

SEQ ID NO: 1406751 - DNA, 25 bp, Homo sapien
ttatgagatcctcagtcaggaacat

SEQ ID NO: 1406752 - DNA, 25 bp, Homo sapien
taaatgttatgagatcctcagtcag

SEQ ID NO: 1406753 - DNA, 25 bp, Homo sapien
gccagagagctgccctttttacatt

SEQ ID NO: 1406754 - DNA, 25 bp, Homo sapien
gaattaccgtttaaccatgagtgtc

SEQ ID NO: 1406755 - DNA, 25 bp, Homo sapien
ttctgcacacaataatcctaagggt

SEQ ID NO: 1406756 - DNA, 25 bp, Homo sapien
cacggcttgctgactaggatgattc

SEQ ID NO: 1406757 - DNA, 25 bp, Homo sapien
ggatgattcctgtgactgtaagaac

SEQ ID NO: 1406758 - DNA, 25 bp, Homo sapien
ggtgtcagttctcaacccctcactt

SEQ ID NO: 1406759 - DNA, 25 bp, Homo sapien
cactgaggtgctggcgttgtagggt

SEQ ID NO: 1406760 - DNA, 25 bp, Homo sapien
tgtagggtgtcagttctcaacccct

SEQ ID NO: 1406761 - DNA, 25 bp, Homo sapien
tggcgttgtagggtgtcagttctca

SEQ ID NO: 1406762 - DNA, 25 bp, Homo sapien
ccagttgttcccacaggcaagttca

SEQ ID NO: 1406763 - DNA, 25 bp, Homo sapien
gtctcatgtgaatgagcctcagtgg

SEQ ID NO: 1406764 - DNA, 25 bp, Homo sapien
caacaagctacatgaaaggctttcg

SEQ ID NO: 1406765 - DNA, 25 bp, Homo sapien
gcctcagtggatcccaaatacacat

SEQ ID NO: 1406766 - DNA, 25 bp, Homo sapien
cagagggcaccacaatgaggcttcc

SEQ ID NO: 1406767 - DNA, 25 bp, Homo sapien
gagccgacttaagcaaagaccagtg

SEQ ID NO: 1406768 - DNA, 25 bp, Homo sapien
aatggaaccgagattgccctgcact

SEQ ID NO: 1406769 - DNA, 25 bp, Homo sapien
ggcggaataaccctgcagctagatt

SEQ ID NO: 1406770 - DNA, 25 bp, Homo sapien
ctggtgctggtcagtcctcgcggct

SEQ ID NO: 1406771 - DNA, 25 bp, Homo sapien
tcgcccgaaccagtgaggtctctct

SEQ ID NO: 1406772 - DNA, 25 bp, Homo sapien
gggtgaaatgtcgcccgaaccagtg

SEQ ID NO: 1406773 - DNA, 25 bp, Homo sapien
cctctggtgctggtcagtcctcgcg

SEQ ID NO: 1406774 - DNA, 25 bp, Homo sapien
ttatgaagactccacaccactcata

SEQ ID NO: 1406775 - DNA, 25 bp, Homo sapien
tttatgaagactccacaccactcat

SEQ ID NO: 1406776 - DNA, 25 bp, Homo sapien
ctttatgaagactccacaccactca

SEQ ID NO: 1406777 - DNA, 25 bp, Homo sapien
gagcctaggcgagcagggtggagcg

SEQ ID NO: 1406778 - DNA, 25 bp, Homo sapien
tgctcttagcctccgccgagcctag

SEQ ID NO: 1406779 - DNA, 25 bp, Homo sapien
gcccagggtgcccatccgtgctctc

SEQ ID NO: 1406780 - DNA, 25 bp, Homo sapien
tggagcgggtctcacctcctagctc

SEQ ID NO: 1406781 - DNA, 25 bp, Homo sapien
ccatcaggtagattgagggcattac

SEQ ID NO: 1406782 - DNA, 25 bp, Homo sapien
catattcttgtccatggtagctaac

SEQ ID NO: 1406783 - DNA, 25 bp, Homo sapien
ggtagctaacactatgcctaaagca

SEQ ID NO: 1406784 - DNA, 25 bp, Homo sapien
ccgtgagtatgtctgcaagtctgca

SEQ ID NO: 1406785 - DNA, 25 bp, Homo sapien
gcagggtggcctatcattgactatg

SEQ ID NO: 1406786 - DNA, 25 bp, Homo sapien
ggatgtcacacttcttccccacgag

SEQ ID NO: 1406787 - DNA, 25 bp, Homo sapien
ggaggatatcgtccctaaggatgtc

SEQ ID NO: 1406788 - DNA, 25 bp, Homo sapien
tatgcaagggtgctgcgcatcacac

SEQ ID NO: 1406789 - DNA, 25 bp, Homo sapien
aaaacataagtgagacagggccagt

SEQ ID NO: 1406790 - DNA, 25 bp, Homo sapien
gaaaacataagtgagacagggccag

SEQ ID NO: 1406791 - DNA, 25 bp, Homo sapien
cacctacgatgacaccagaaaacaa

SEQ ID NO: 1406792 - DNA, 25 bp, Homo sapien
ataggtggccacctacgatgacacc

SEQ ID NO: 1406793 - DNA, 25 bp, Homo sapien
cccaaaagccataggtggccaccta

SEQ ID NO: 1406794 - DNA, 25 bp, Homo sapien
aaaagccataggtggccacctacga

SEQ ID NO: 1406795 - DNA, 25 bp, Homo sapien
caccccacaccaatttgctgacatg

SEQ ID NO: 1406796 - DNA, 25 bp, Homo sapien
ccaccccacaccaatttgctgacat

SEQ ID NO: 1406797 - DNA, 25 bp, Homo sapien
gactttgtcctcccctaaaagctga

SEQ ID NO: 1406798 - DNA, 25 bp, Homo sapien
tgtcctcccctaaaagctgaagtct

SEQ ID NO: 1406799 - DNA, 25 bp, Homo sapien
ttgtcctcccctaaaagctgaagtc

SEQ ID NO: 1406800 - DNA, 25 bp, Homo sapien
ctttgtcctcccctaaaagctgaag

SEQ ID NO: 1406801 - DNA, 25 bp, Homo sapien
cctagcctcttgtggagtggaggat

SEQ ID NO: 1406802 - DNA, 25 bp, Homo sapien
aggagagactgttcgggtggcccct

SEQ ID NO: 1406803 - DNA, 25 bp, Homo sapien
gaggatgcagctccgatgacgtagc

SEQ ID NO: 1406804 - DNA, 25 bp, Homo sapien
cattcaggaatttcgcttgcctctc

SEQ ID NO: 1406805 - DNA, 25 bp, Homo sapien
ctgcccctctctggagacactacca

SEQ ID NO: 1406806 - DNA, 25 bp, Homo sapien
gcaaaaagggggtgctgcccctctc

SEQ ID NO: 1406807 - DNA, 25 bp, Homo sapien
tgcccctctctggagacactaccac

SEQ ID NO: 1406808 - DNA, 25 bp, Homo sapien
ctggaaaggcagcaaaaagggggtg

SEQ ID NO: 1406809 - DNA, 25 bp, Homo sapien
gcggggagatgaaggccagcacttg

SEQ ID NO: 1406810 - DNA, 25 bp, Homo sapien
ggagatgaaggccagcacttggaag

SEQ ID NO: 1406811 - DNA, 25 bp, Homo sapien
gagttggagggggcgcatcttgcgg

SEQ ID NO: 1406812 - DNA, 25 bp, Homo sapien
tcttgcggggagatgaaggccagca

SEQ ID NO: 1406813 - DNA, 25 bp, Homo sapien
tctgaatgagggattctgagggcta

SEQ ID NO: 1406814 - DNA, 25 bp, Homo sapien
gcctggcgatccctaagctctgaat

SEQ ID NO: 1406815 - DNA, 25 bp, Homo sapien
tggaggccacttgagtctctgctgg

SEQ ID NO: 1406816 - DNA, 25 bp, Homo sapien
ctgagggctaaggtcagagtctata

SEQ ID NO: 1406817 - DNA, 25 bp, Homo sapien
cggctggaagacattgagttccttg

SEQ ID NO: 1406818 - DNA, 25 bp, Homo sapien
tccctggcaatccagttggacatct

SEQ ID NO: 1406819 - DNA, 25 bp, Homo sapien
cacactgtctgcgtcttgccgggct

SEQ ID NO: 1406820 - DNA, 25 bp, Homo sapien
tgtctgcgtcttgccgggcttggtt

SEQ ID NO: 1406821 - DNA, 25 bp, Homo sapien
tcatctccctggcaatccagttgga

SEQ ID NO: 1406822 - DNA, 25 bp, Homo sapien
tgcagacaggctccatcatccgcca

SEQ ID NO: 1406823 - DNA, 25 bp, Homo sapien
gcagacaggctccatcatccgccat

SEQ ID NO: 1406824 - DNA, 25 bp, Homo sapien
agacaggctccatcatccgccatgc

SEQ ID NO: 1406825 - DNA, 25 bp, Homo sapien
cctgcagacaggctccatcatccgc

SEQ ID NO: 1406826 - DNA, 25 bp, Homo sapien
catttcttggtgcagtactggtatc

SEQ ID NO: 1406827 - DNA, 25 bp, Homo sapien
gggctcaggctcttagattttggct

SEQ ID NO: 1406828 - DNA, 25 bp, Homo sapien
tgcttcatactctgtaccctggtgc

SEQ ID NO: 1406829 - DNA, 25 bp, Homo sapien
tagggttctgtaggtctgatgctca

SEQ ID NO: 1406830 - DNA, 25 bp, Homo sapien
tctccccgagcgtgtgctctcggct

SEQ ID NO: 1406831 - DNA, 25 bp, Homo sapien
gaagagccggctggacggtcagcca

SEQ ID NO: 1406832 - DNA, 25 bp, Homo sapien
acccacagagagtcgcgggagcccg

SEQ ID NO: 1406833 - DNA, 25 bp, Homo sapien
cgggagctgcgggactccttcgccc

SEQ ID NO: 1406834 - DNA, 25 bp, Homo sapien
cggcgtcaagcggagcctcggtcca

SEQ ID NO: 1406835 - DNA, 25 bp, Homo sapien
gcgtcaagcggagcctcggtccagc

SEQ ID NO: 1406836 - DNA, 25 bp, Homo sapien
gtctgggttcgcggcgtcaagcgga

SEQ ID NO: 1406837 - DNA, 25 bp, Homo sapien
gttcgcggcgtcaagcggagcctcg

SEQ ID NO: 1406838 - DNA, 25 bp, Homo sapien
gggctctggaggtctctcaggatca

SEQ ID NO: 1406839 - DNA, 25 bp, Homo sapien
gctctggaggtctctcaggatcagc

SEQ ID NO: 1406840 - DNA, 25 bp, Homo sapien
ctgcgacgatgggaattggggagag

SEQ ID NO: 1406841 - DNA, 25 bp, Homo sapien
tctggaggtctctcaggatcagccc

SEQ ID NO: 1406842 - DNA, 25 bp, Homo sapien
gactgtcaaagtaggcaaaatttat

SEQ ID NO: 1406843 - DNA, 25 bp, Homo sapien
ggtcagacatacagcacaacagctc

SEQ ID NO: 1406844 - DNA, 25 bp, Homo sapien
tccagcttccaagtactgattccct

SEQ ID NO: 1406845 - DNA, 25 bp, Homo sapien
tactgattccctcctaaaaggcaat

SEQ ID NO: 1406846 - DNA, 25 bp, Homo sapien
ggaagtgcagggcatgctgaaaact

SEQ ID NO: 1406847 - DNA, 25 bp, Homo sapien
taaggttcaccaagggcataggcag

SEQ ID NO: 1406848 - DNA, 25 bp, Homo sapien
tagaaccccactcggcaataggaat

SEQ ID NO: 1406849 - DNA, 25 bp, Homo sapien
ttagagggtagagagccttggacac

SEQ ID NO: 1406850 - DNA, 25 bp, Homo sapien
tggtgaaactccacacagaggcgtg

SEQ ID NO: 1406851 - DNA, 25 bp, Homo sapien
gattctgcatgtaaggtacctggca

SEQ ID NO: 1406852 - DNA, 25 bp, Homo sapien
cagccttacacggttattgtggaaa

SEQ ID NO: 1406853 - DNA, 25 bp, Homo sapien
gaggcgtgggcactaactaaactta

SEQ ID NO: 1406854 - DNA, 25 bp, Homo sapien
taaggaaattgaggtctcggagaga

SEQ ID NO: 1406855 - DNA, 25 bp, Homo sapien
caatctctgaaaccttgttgggtaa

SEQ ID NO: 1406856 - DNA, 25 bp, Homo sapien
caccacacaattctgagcaattcag

SEQ ID NO: 1406857 - DNA, 25 bp, Homo sapien
cagtacacattttctgggctcctac

SEQ ID NO: 1406858 - DNA, 25 bp, Homo sapien
actttcagttacttgagtctcttca

SEQ ID NO: 1406859 - DNA, 25 bp, Homo sapien
cccattggccttaagtaactttcag

SEQ ID NO: 1406860 - DNA, 25 bp, Homo sapien
taacatgccagacacagtgcttggg

SEQ ID NO: 1406861 - DNA, 25 bp, Homo sapien
ggatatatagctgcacagggtcccc

SEQ ID NO: 1406862 - DNA, 25 bp, Homo sapien
caaagtgatctttcccgtttctgaa

SEQ ID NO: 1406863 - DNA, 25 bp, Homo sapien
tctgaacgcctctagcactcatttt

SEQ ID NO: 1406864 - DNA, 25 bp, Homo sapien
tcatcttcttcacgcagccttcaga

SEQ ID NO: 1406865 - DNA, 25 bp, Homo sapien
tcagatcacaggagcacaaagtgat

SEQ ID NO: 1406866 - DNA, 25 bp, Homo sapien
ccaggccagtgactcgctgtgtttg

SEQ ID NO: 1406867 - DNA, 25 bp, Homo sapien
ttcgtaaactgcgaagcatcctcct

SEQ ID NO: 1406868 - DNA, 25 bp, Homo sapien
caaatcaatgttcgtgccatcgttg

SEQ ID NO: 1406869 - DNA, 25 bp, Homo sapien
caggtcccgaggcagtattgactga

SEQ ID NO: 1406870 - DNA, 25 bp, Homo sapien
tgtgcaccgatatctgagtccagaa

SEQ ID NO: 1406871 - DNA, 25 bp, Homo sapien
cctctttggatacaggagcccagtg

SEQ ID NO: 1406872 - DNA, 25 bp, Homo sapien
gagcccagtgggtgctaattcttct

SEQ ID NO: 1406873 - DNA, 25 bp, Homo sapien
aaaactgggaccctaaggatctgtg

SEQ ID NO: 1406874 - DNA, 25 bp, Homo sapien
taccaatgtctgcagaattttggga

SEQ ID NO: 1406875 - DNA, 25 bp, Homo sapien
accaatgtctgcagaattttgggaa

SEQ ID NO: 1406876 - DNA, 25 bp, Homo sapien
tgtagaatactaagaaagcatcacc

SEQ ID NO: 1406877 - DNA, 25 bp, Homo sapien
aacaaaactcataagaatctcgagg

SEQ ID NO: 1406878 - DNA, 25 bp, Homo sapien
gaatctcgaggactttgtcttttct

SEQ ID NO: 1406879 - DNA, 25 bp, Homo sapien
aagcatcaccatacagcacgaaaag

SEQ ID NO: 1406880 - DNA, 25 bp, Homo sapien
tctttcaagccctggatcgaggctc

SEQ ID NO: 1406881 - DNA, 25 bp, Homo sapien
taagtgatcactgctcagctgaggg

SEQ ID NO: 1406882 - DNA, 25 bp, Homo sapien
cttcctgtccaaggtagggagggct

SEQ ID NO: 1406883 - DNA, 25 bp, Homo sapien
tgaaactccgtctagaagcctgcag

SEQ ID NO: 1406884 - DNA, 25 bp, Homo sapien
aatctcgtctgtacagtacgggccg

SEQ ID NO: 1406885 - DNA, 25 bp, Homo sapien
agacggtcggctaacacaaaactgg

SEQ ID NO: 1406886 - DNA, 25 bp, Homo sapien
tacacgtgtgtacctgcgtagaggc

SEQ ID NO: 1406887 - DNA, 25 bp, Homo sapien
gtttgatctccaatcctgcctgagg

SEQ ID NO: 1406888 - DNA, 25 bp, Homo sapien
tgtaaccgtcaacaggacacgaagc

SEQ ID NO: 1406889 - DNA, 25 bp, Homo sapien
tgtgtacaacgtgcaaagtgtcccc

SEQ ID NO: 1406890 - DNA, 25 bp, Homo sapien
acacaagaatcagcgcaggtgtggc

SEQ ID NO: 1406891 - DNA, 25 bp, Homo sapien
actcgccccaatgaaagagctctgg

SEQ ID NO: 1406892 - DNA, 25 bp, Homo sapien
ggctttgggtatgcaccccccactc

SEQ ID NO: 1406893 - DNA, 25 bp, Homo sapien
agaagtcatcgagcagaaggactga

SEQ ID NO: 1406894 - DNA, 25 bp, Homo sapien
ggaagaagtcatcgagcagaaggac

SEQ ID NO: 1406895 - DNA, 25 bp, Homo sapien
catagggccaggattctagtggcag

SEQ ID NO: 1406896 - DNA, 25 bp, Homo sapien
gggtagccggccacaaggcctcttg

SEQ ID NO: 1406897 - DNA, 25 bp, Homo sapien
ctggcggaaggggtagccggccaca

SEQ ID NO: 1406898 - DNA, 25 bp, Homo sapien
tagccggccacaaggcctcttgggt

SEQ ID NO: 1406899 - DNA, 25 bp, Homo sapien
cacgcggggcagtccctgggtgtag

SEQ ID NO: 1406900 - DNA, 25 bp, Homo sapien
gtcatcccggtctcccgtctcatag

SEQ ID NO: 1406901 - DNA, 25 bp, Homo sapien
gtctcataggatcccccggctgggc

SEQ ID NO: 1406902 - DNA, 25 bp, Homo sapien
ggtatcaagccgcatcctcttcaca

SEQ ID NO: 1406903 - DNA, 25 bp, Homo sapien
gctgctgagaccatcgccaggctca

SEQ ID NO: 1406904 - DNA, 25 bp, Homo sapien
gggggaggcgcagggctgcgctcac

SEQ ID NO: 1406905 - DNA, 25 bp, Homo sapien
agggggaggcgcagggctgcgctca

SEQ ID NO: 1406906 - DNA, 25 bp, Homo sapien
ggagggggaggcgcagggctgcgct

SEQ ID NO: 1406907 - DNA, 25 bp, Homo sapien
ctggagggggaggcgcagggctgcg

SEQ ID NO: 1406908 - DNA, 25 bp, Homo sapien
gggacaccggttctgacttgatgct

SEQ ID NO: 1406909 - DNA, 25 bp, Homo sapien
ggacaccggttctgacttgatgctg

SEQ ID NO: 1406910 - DNA, 25 bp, Homo sapien
tggggacaccggttctgacttgatg

SEQ ID NO: 1406911 - DNA, 25 bp, Homo sapien
gcttggggacaccggttctgacttg

SEQ ID NO: 1406912 - DNA, 25 bp, Homo sapien
gagggcagcacccacgtggggcagg

SEQ ID NO: 1406913 - DNA, 25 bp, Homo sapien
ctgtgagggcagcacccacgtgggg

SEQ ID NO: 1406914 - DNA, 25 bp, Homo sapien
gcagcacccacgtggggcagggggc

SEQ ID NO: 1406915 - DNA, 25 bp, Homo sapien
cagcacccacgtggggcagggggct

SEQ ID NO: 1406916 - DNA, 25 bp, Homo sapien
ctgagagatacagggaccaggtggg

SEQ ID NO: 1406917 - DNA, 25 bp, Homo sapien
agtgacattgcctagcgacagcccc

SEQ ID NO: 1406918 - DNA, 25 bp, Homo sapien
ggaggagagctctgcactggtcaac

SEQ ID NO: 1406919 - DNA, 25 bp, Homo sapien
gagctctgcactggtcaactggtaa

SEQ ID NO: 1406920 - DNA, 25 bp, Homo sapien
gctgttgccaggcagtgacattgcc

SEQ ID NO: 1406921 - DNA, 25 bp, Homo sapien
tagggtcacctgaaaacacctgctg

SEQ ID NO: 1406922 - DNA, 25 bp, Homo sapien
gggtcacctgaaaacacctgctgtt

SEQ ID NO: 1406923 - DNA, 25 bp, Homo sapien
taaactgagatctgcttagctgctc

SEQ ID NO: 1406924 - DNA, 25 bp, Homo sapien
aaaacacctgctgtttaaactgaga

SEQ ID NO: 1406925 - DNA, 25 bp, Homo sapien
ggcctgggttctggatttttacatg

SEQ ID NO: 1406926 - DNA, 25 bp, Homo sapien
tcttttggtccagactaaactcatc

SEQ ID NO: 1406927 - DNA, 25 bp, Homo sapien
gagaagtttatgagtcttttggtcc

SEQ ID NO: 1406928 - DNA, 25 bp, Homo sapien
aaactcatcaaaggaactggcctga

SEQ ID NO: 1406929 - DNA, 25 bp, Homo sapien
ctgtgttgtaggcagtgggcatgga

SEQ ID NO: 1406930 - DNA, 25 bp, Homo sapien
gaggccctggctgagtaaactcggc

SEQ ID NO: 1406931 - DNA, 25 bp, Homo sapien
taaactcggcgttgccacagaaacc

SEQ ID NO: 1406932 - DNA, 25 bp, Homo sapien
tgagtagactgggagaccccaaggc

SEQ ID NO: 1406933 - DNA, 25 bp, Homo sapien
tcagaggactagtgggatccagccc

SEQ ID NO: 1406934 - DNA, 25 bp, Homo sapien
gaaacagcaacagttcacgcacagg

SEQ ID NO: 1406935 - DNA, 25 bp, Homo sapien
gaaaatgagcagctgtgcatgcctc

SEQ ID NO: 1406936 - DNA, 25 bp, Homo sapien
ccaagaatgcagtgtgggcctgagt

SEQ ID NO: 1406937 - DNA, 25 bp, Homo sapien
ccacccttggcccagacacccactt

SEQ ID NO: 1406938 - DNA, 25 bp, Homo sapien
cacccttggcccagacacccactta

SEQ ID NO: 1406939 - DNA, 25 bp, Homo sapien
tctttcccctgtccctactcttcca

SEQ ID NO: 1406940 - DNA, 25 bp, Homo sapien
gtccctactcttccattccccagcc

SEQ ID NO: 1406941 - DNA, 25 bp, Homo sapien
gacttggcagggatgaccttgttta

SEQ ID NO: 1406942 - DNA, 25 bp, Homo sapien
aagtgatgcattaacccctttcctg

SEQ ID NO: 1406943 - DNA, 25 bp, Homo sapien
gaagtgatgactcgcaggtcgggct

SEQ ID NO: 1406944 - DNA, 25 bp, Homo sapien
gtttaggctgttgccattggccaca

SEQ ID NO: 1406945 - DNA, 25 bp, Homo sapien
gacaaaccaacaaccactcagactg

SEQ ID NO: 1406946 - DNA, 25 bp, Homo sapien
acaggacccaccatgaccaggatgt

SEQ ID NO: 1406947 - DNA, 25 bp, Homo sapien
actcagactgctccatttgccgtga

SEQ ID NO: 1406948 - DNA, 25 bp, Homo sapien
gcagcctggaatccgggcctcactg

SEQ ID NO: 1406949 - DNA, 25 bp, Homo sapien
tatacagtgccccaaaactgagctg

SEQ ID NO: 1406950 - DNA, 25 bp, Homo sapien
tgacataattatcaccagggaggta

SEQ ID NO: 1406951 - DNA, 25 bp, Homo sapien
ggaccactctgggaatggcaggaat

SEQ ID NO: 1406952 - DNA, 25 bp, Homo sapien
tatggatcactgctcacttgaggtc

SEQ ID NO: 1406953 - DNA, 25 bp, Homo sapien
ctccgttagcactgttcaggtcacc

SEQ ID NO: 1406954 - DNA, 25 bp, Homo sapien
ggctccgttagcactgttcaggtca

SEQ ID NO: 1406955 - DNA, 25 bp, Homo sapien
gggcaggctccgttagcactgttca

SEQ ID NO: 1406956 - DNA, 25 bp, Homo sapien
gcaggctccgttagcactgttcagg

SEQ ID NO: 1406957 - DNA, 25 bp, Homo sapien
ggtccgtgagggatgatgtcaccag

SEQ ID NO: 1406958 - DNA, 25 bp, Homo sapien
ggtgaccagggagccgctgggattg

SEQ ID NO: 1406959 - DNA, 25 bp, Homo sapien
caccgtgacaggcatggcaaagttg

SEQ ID NO: 1406960 - DNA, 25 bp, Homo sapien
gtgagctctgattggacacgggcac

SEQ ID NO: 1406961 - DNA, 25 bp, Homo sapien
ctcagggctctcacattccctgtgc

SEQ ID NO: 1406962 - DNA, 25 bp, Homo sapien
tttatcaaactcctcgtctatcttt

SEQ ID NO: 1406963 - DNA, 25 bp, Homo sapien
caaactcctcgtctatctttttata

SEQ ID NO: 1406964 - DNA, 25 bp, Homo sapien
acctcagggctctcacattccctgt

SEQ ID NO: 1406965 - DNA, 25 bp, Homo sapien
cagggggctctgttccagcgagtcc

SEQ ID NO: 1406966 - DNA, 25 bp, Homo sapien
tgtcgcagccgttgaagcccttctt

SEQ ID NO: 1406967 - DNA, 25 bp, Homo sapien
gaagagcccgtcgagctcctcgctg

SEQ ID NO: 1406968 - DNA, 25 bp, Homo sapien
tggcgcgtcggtacttgtcctccag

SEQ ID NO: 1406969 - DNA, 25 bp, Homo sapien
gcaggtctgcgtgtacatgcaacgt

SEQ ID NO: 1406970 - DNA, 25 bp, Homo sapien
acgtgtccatgtggatgcaggcggg

SEQ ID NO: 1406971 - DNA, 25 bp, Homo sapien
tacatgcaacgtgggcacgtgtcca

SEQ ID NO: 1406972 - DNA, 25 bp, Homo sapien
tgtgcataggcaggtctgcgtgtac

SEQ ID NO: 1406973 - DNA, 25 bp, Homo sapien
cgtgtggctcattgtactccgtgta

SEQ ID NO: 1406974 - DNA, 25 bp, Homo sapien
gatgatgtcggcgttggtgcggctc

SEQ ID NO: 1406975 - DNA, 25 bp, Homo sapien
tggttgaagatgatgagtgcgatct

SEQ ID NO: 1406976 - DNA, 25 bp, Homo sapien
tgagtgcgatctcgcagtcacatag

SEQ ID NO: 1406977 - DNA, 25 bp, Homo sapien
ggattcaggtggacagaactccaca

SEQ ID NO: 1406978 - DNA, 25 bp, Homo sapien
ggcaggattcaggtggacagaactc

SEQ ID NO: 1406979 - DNA, 25 bp, Homo sapien
cagaactccacacctctgtgctgga

SEQ ID NO: 1406980 - DNA, 25 bp, Homo sapien
ggaggctatgaagaggtcagtggag

SEQ ID NO: 1406981 - DNA, 25 bp, Homo sapien
ctgtcggttccgctcgtcggtgatt

SEQ ID NO: 1406982 - DNA, 25 bp, Homo sapien
cggtgattcgctggatctgaatctt

SEQ ID NO: 1406983 - DNA, 25 bp, Homo sapien
ttccgctcgtcggtgattcgctgga

SEQ ID NO: 1406984 - DNA, 25 bp, Homo sapien
tcgtcggtgattcgctggatctgaa

SEQ ID NO: 1406985 - DNA, 25 bp, Homo sapien
ctacggaggggaggggctcgctggg

SEQ ID NO: 1406986 - DNA, 25 bp, Homo sapien
aggggaggggctcgctgggtggtgg

SEQ ID NO: 1406987 - DNA, 25 bp, Homo sapien
acggaggggaggggctcgctgggtg

SEQ ID NO: 1406988 - DNA, 25 bp, Homo sapien
gaggggaggggctcgctgggtggtg

SEQ ID NO: 1406989 - DNA, 25 bp, Homo sapien
catgaacggtctgggaacagtgctc

SEQ ID NO: 1406990 - DNA, 25 bp, Homo sapien
gtctcggcacaccttacactgtgct

SEQ ID NO: 1406991 - DNA, 25 bp, Homo sapien
tacactgtgctcatgaacggtctgg

SEQ ID NO: 1406992 - DNA, 25 bp, Homo sapien
aacagtgctcagttcatggtctgca

SEQ ID NO: 1406993 - DNA, 25 bp, Homo sapien
tgcagtagtgagaagagaagaaaga

SEQ ID NO: 1406994 - DNA, 25 bp, Homo sapien
gtagtgagaagagaagaaagagtag

SEQ ID NO: 1406995 - DNA, 25 bp, Homo sapien
tgagctaactcactacctttggaca

SEQ ID NO: 1406996 - DNA, 25 bp, Homo sapien
ctaactcactacctttggacatgcc

SEQ ID NO: 1406997 - DNA, 25 bp, Homo sapien
tcgacctcgtgctccatgggccctg

SEQ ID NO: 1406998 - DNA, 25 bp, Homo sapien
ctgggcctcctactggtaccctggg

SEQ ID NO: 1406999 - DNA, 25 bp, Homo sapien
tactggtaccctgggacaagagcaa

SEQ ID NO: 1407000 - DNA, 25 bp, Homo sapien
gcctcctactggtaccctgggacaa

SEQ ID NO: 1407001 - DNA, 25 bp, Homo sapien
tgtgctttctagagctacagtggtg

SEQ ID NO: 1407002 - DNA, 25 bp, Homo sapien
ttcccagtgcaatccaaagactgtg

SEQ ID NO: 1407003 - DNA, 25 bp, Homo sapien
cctgcttcccagtgcaatccaaaga

SEQ ID NO: 1407004 - DNA, 25 bp, Homo sapien
ctgtgctttctagagctacagtggt

SEQ ID NO: 1407005 - DNA, 25 bp, Homo sapien
gcagccctgagcacatggagatgga

SEQ ID NO: 1407006 - DNA, 25 bp, Homo sapien
tcctctatggagctagaacccttgc

SEQ ID NO: 1407007 - DNA, 25 bp, Homo sapien
gagattcactgagcatcgtctgaca

SEQ ID NO: 1407008 - DNA, 25 bp, Homo sapien
taaagtcttctaaggagcagccctg

SEQ ID NO: 1407009 - DNA, 25 bp, Homo sapien
cattccacattgctgcagggtcttt

SEQ ID NO: 1407010 - DNA, 25 bp, Homo sapien
tttccttctgctatccattccacat

SEQ ID NO: 1407011 - DNA, 25 bp, Homo sapien
tctgctatccattccacattgctgc

SEQ ID NO: 1407012 - DNA, 25 bp, Homo sapien
cattgctgcagggtctttgaaagcc

SEQ ID NO: 1407013 - DNA, 25 bp, Homo sapien
tccttcaccctgcctagtatctgga

SEQ ID NO: 1407014 - DNA, 25 bp, Homo sapien
aggaagccctcgcagatgatccggc

SEQ ID NO: 1407015 - DNA, 25 bp, Homo sapien
ctctaggaagccctcgcagatgatc

SEQ ID NO: 1407016 - DNA, 25 bp, Homo sapien
ctcgcagatgatccggcccttggct

SEQ ID NO: 1407017 - DNA, 25 bp, Homo sapien
aagggtggctgaggagaagccttca

SEQ ID NO: 1407018 - DNA, 25 bp, Homo sapien
ccttcacaaatggacagcagggagg

SEQ ID NO: 1407019 - DNA, 25 bp, Homo sapien
ggcgggctgttggtttgtgggggca

SEQ ID NO: 1407020 - DNA, 25 bp, Homo sapien
taaaggggccgttcagggcaatagc

SEQ ID NO: 1407021 - DNA, 25 bp, Homo sapien
gaagccactgaggatttaaaggggc

SEQ ID NO: 1407022 - DNA, 25 bp, Homo sapien
ttctaactcgaaggacagtcctcta

SEQ ID NO: 1407023 - DNA, 25 bp, Homo sapien
tcagggcaatagctgggtctccttc

SEQ ID NO: 1407024 - DNA, 25 bp, Homo sapien
ccaaaggctgattctctgccctctg

SEQ ID NO: 1407025 - DNA, 25 bp, Homo sapien
aggccagagcttcggacatgtccct

SEQ ID NO: 1407026 - DNA, 25 bp, Homo sapien
tgggtgtggccagcgacaggccaga

SEQ ID NO: 1407027 - DNA, 25 bp, Homo sapien
tggccagcgacaggccagagcttcg

SEQ ID NO: 1407028 - DNA, 25 bp, Homo sapien
agcgacaggccagagcttcggacat

SEQ ID NO: 1407029 - DNA, 25 bp, Homo sapien
tgtccccataaaggtactcaggtgt

SEQ ID NO: 1407030 - DNA, 25 bp, Homo sapien
agggacgaccacagcagagggaccc

SEQ ID NO: 1407031 - DNA, 25 bp, Homo sapien
cacaccaggccagcgtaagtcctga

SEQ ID NO: 1407032 - DNA, 25 bp, Homo sapien
gcctctctgggggtataagagccag

SEQ ID NO: 1407033 - DNA, 25 bp, Homo sapien
gccccagacggcaaacttcccatag

SEQ ID NO: 1407034 - DNA, 25 bp, Homo sapien
caaacttcccatagtctaggctgga

SEQ ID NO: 1407035 - DNA, 25 bp, Homo sapien
tcccatagtctaggctggaccctga

SEQ ID NO: 1407036 - DNA, 25 bp, Homo sapien
catagtctaggctggaccctgaatt

SEQ ID NO: 1407037 - DNA, 25 bp, Homo sapien
tgtcacggcaaagagcgggtagccc

SEQ ID NO: 1407038 - DNA, 25 bp, Homo sapien
agccgcctcggctgttgttgatatt

SEQ ID NO: 1407039 - DNA, 25 bp, Homo sapien
gaataataaatgaggccggcgtccg

SEQ ID NO: 1407040 - DNA, 25 bp, Homo sapien
ggatcttcaacaccgggaagccgca

SEQ ID NO: 1407041 - DNA, 25 bp, Homo sapien
ccagaggagcagtagccaccttgtc

SEQ ID NO: 1407042 - DNA, 25 bp, Homo sapien
gctgcttatcgatctgattttcaat

SEQ ID NO: 1407043 - DNA, 25 bp, Homo sapien
cttgcagctgcttatcgatctgatt

SEQ ID NO: 1407044 - DNA, 25 bp, Homo sapien
cagaggagcagtagccaccttgtcc

SEQ ID NO: 1407045 - DNA, 25 bp, Homo sapien
gaagtagaaggcctgacaggcaaca

SEQ ID NO: 1407046 - DNA, 25 bp, Homo sapien
tcagaagtagaaggcctgacaggca

SEQ ID NO: 1407047 - DNA, 25 bp, Homo sapien
tagaaggcctgacaggcaacaggag

SEQ ID NO: 1407048 - DNA, 25 bp, Homo sapien
ctcagaagtagaaggcctgacaggc

SEQ ID NO: 1407049 - DNA, 25 bp, Homo sapien
catggaaagctaaaagttccttcag

SEQ ID NO: 1407050 - DNA, 25 bp, Homo sapien
taggtgagtgattgtaaaggtgcca

SEQ ID NO: 1407051 - DNA, 25 bp, Homo sapien
tgcagggcggggttctgcctccttt

SEQ ID NO: 1407052 - DNA, 25 bp, Homo sapien
tcttcaaccctataagtaggtgagt

SEQ ID NO: 1407053 - DNA, 25 bp, Homo sapien
caacagtacaggaagttgggtagat

SEQ ID NO: 1407054 - DNA, 25 bp, Homo sapien
tctatggaaattgcctggaagagtc

SEQ ID NO: 1407055 - DNA, 25 bp, Homo sapien
gaggcaggactgcagatctatggaa

SEQ ID NO: 1407056 - DNA, 25 bp, Homo sapien
ttaacatcagaagggcaacagtaca

SEQ ID NO: 1407057 - DNA, 25 bp, Homo sapien
taaaaccctgattaagtctgcacaa

SEQ ID NO: 1407058 - DNA, 25 bp, Homo sapien
gaataaataccctagtgacccacat

SEQ ID NO: 1407059 - DNA, 25 bp, Homo sapien
gagtaatggctttcccaggtcaagg

SEQ ID NO: 1407060 - DNA, 25 bp, Homo sapien
taaacatgagtgagaatctgttgcc

SEQ ID NO: 1407061 - DNA, 25 bp, Homo sapien
tggactctgggcaaggcccacttta

SEQ ID NO: 1407062 - DNA, 25 bp, Homo sapien
gggtgagaatccctgggccttgccc

SEQ ID NO: 1407063 - DNA, 25 bp, Homo sapien
gggcttgggtagcaccctttgcctc

SEQ ID NO: 1407064 - DNA, 25 bp, Homo sapien
aattagaagatacactgtctgtggc

SEQ ID NO: 1407065 - DNA, 25 bp, Homo sapien
agatgagaaggttgacattgacttt

SEQ ID NO: 1407066 - DNA, 25 bp, Homo sapien
gagaaggttgacattgactttggcc

SEQ ID NO: 1407067 - DNA, 25 bp, Homo sapien
tgacagccacaccctcatactggag

SEQ ID NO: 1407068 - DNA, 25 bp, Homo sapien
tgactttggccttgttgaagagttt

SEQ ID NO: 1407069 - DNA, 25 bp, Homo sapien
agctgaaatcgctccatgtccacac

SEQ ID NO: 1407070 - DNA, 25 bp, Homo sapien
atctcccggcgtgatgtcaaagatg

SEQ ID NO: 1407071 - DNA, 25 bp, Homo sapien
gtgaagctgaaatcgctccatgtcc

SEQ ID NO: 1407072 - DNA, 25 bp, Homo sapien
tgcctcatctcccggcgtgatgtca

SEQ ID NO: 1407073 - DNA, 25 bp, Homo sapien
tgagcagcagtgtaatgaagagaag

SEQ ID NO: 1407074 - DNA, 25 bp, Homo sapien
gcagcagtgtaatgaagagaaggct

SEQ ID NO: 1407075 - DNA, 25 bp, Homo sapien
agcagcagtgtaatgaagagaaggc

SEQ ID NO: 1407076 - DNA, 25 bp, Homo sapien
gctgagcagcagtgtaatgaagaga

SEQ ID NO: 1407077 - DNA, 25 bp, Homo sapien
tgctcctcatagaaggtggtcttag

SEQ ID NO: 1407078 - DNA, 25 bp, Homo sapien
caggcccggatgtactggctgtagt

SEQ ID NO: 1407079 - DNA, 25 bp, Homo sapien
caggccctgtaatgtggcctgcagc

SEQ ID NO: 1407080 - DNA, 25 bp, Homo sapien
tggctgtagtagtcaccctgctcct

SEQ ID NO: 1407081 - DNA, 25 bp, Homo sapien
tcaagtcggcgtaggttccgcagga

SEQ ID NO: 1407082 - DNA, 25 bp, Homo sapien
tcggctcatcagctgcttgtgggct

SEQ ID NO: 1407083 - DNA, 25 bp, Homo sapien
tagcccctggtagccatttctggcg

SEQ ID NO: 1407084 - DNA, 25 bp, Homo sapien
ctgtacaggcctggcgtcggctcat

SEQ ID NO: 1407085 - DNA, 25 bp, Homo sapien
tatgatatcggccaacagctgcttg

SEQ ID NO: 1407086 - DNA, 25 bp, Homo sapien
ttgctctctggaagccgagagggac

SEQ ID NO: 1407087 - DNA, 25 bp, Homo sapien
gccgagagggacaggatctccttga

SEQ ID NO: 1407088 - DNA, 25 bp, Homo sapien
cccaggatggaactgtatgatatcg

SEQ ID NO: 1407089 - DNA, 25 bp, Homo sapien
tagtccttcaaacttgttggtcagc

SEQ ID NO: 1407090 - DNA, 25 bp, Homo sapien
caggctacgggtgttggagtcatca

SEQ ID NO: 1407091 - DNA, 25 bp, Homo sapien
agcgtcagggacacttctagcttgc

SEQ ID NO: 1407092 - DNA, 25 bp, Homo sapien
tctagcttgctcaggtccgtgtgcc

SEQ ID NO: 1407093 - DNA, 25 bp, Homo sapien
ggtcttggtgatcaggggcaatgca

SEQ ID NO: 1407094 - DNA, 25 bp, Homo sapien
gagctcatgcagggggtcttggtga

SEQ ID NO: 1407095 - DNA, 25 bp, Homo sapien
gggggtcttggtgatcaggggcaat

SEQ ID NO: 1407096 - DNA, 25 bp, Homo sapien
tcttggtgatcaggggcaatgcagt

SEQ ID NO: 1407097 - DNA, 25 bp, Homo sapien
gagtactcgtccactgcaaaacgct

SEQ ID NO: 1407098 - DNA, 25 bp, Homo sapien
tgatgtacaccatgggtttggccac

SEQ ID NO: 1407099 - DNA, 25 bp, Homo sapien
actgcaaaacgctcctctggctctg

SEQ ID NO: 1407100 - DNA, 25 bp, Homo sapien
caccatgtctgagtactcgtccact

SEQ ID NO: 1407101 - DNA, 25 bp, Homo sapien
caggaagcggtagtacaggaggttc

SEQ ID NO: 1407102 - DNA, 25 bp, Homo sapien
ccagccgcagcgtgctgtaggagct

SEQ ID NO: 1407103 - DNA, 25 bp, Homo sapien
aatgtcgaaggcgtcaggagccacc

SEQ ID NO: 1407104 - DNA, 25 bp, Homo sapien
cattcaggacccgtaggtgctggct

SEQ ID NO: 1407105 - DNA, 25 bp, Homo sapien
agggcaaaggagactctcccagaag

SEQ ID NO: 1407106 - DNA, 25 bp, Homo sapien
gggcaaaggagactctcccagaagt

SEQ ID NO: 1407107 - DNA, 25 bp, Homo sapien
tgagggcaaaggagactctcccaga

SEQ ID NO: 1407108 - DNA, 25 bp, Homo sapien
gagggcaaaggagactctcccagaa

SEQ ID NO: 1407109 - DNA, 25 bp, Homo sapien
agcaaagcaaaggagggattgggag

SEQ ID NO: 1407110 - DNA, 25 bp, Homo sapien
gcaaagcaaaggagggattgggagg

SEQ ID NO: 1407111 - DNA, 25 bp, Homo sapien
cagcaaagcaaaggagggattggga

SEQ ID NO: 1407112 - DNA, 25 bp, Homo sapien
tatagacctcgctgtctgtggcgtc

SEQ ID NO: 1407113 - DNA, 25 bp, Homo sapien
tcagggaatttctctgccagagttg

SEQ ID NO: 1407114 - DNA, 25 bp, Homo sapien
tgccagagttgccttcaggactttg

SEQ ID NO: 1407115 - DNA, 25 bp, Homo sapien
gactttggccacatatcgcatccca

SEQ ID NO: 1407116 - DNA, 25 bp, Homo sapien
ggagcttcgagcattccccacatct

SEQ ID NO: 1407117 - DNA, 25 bp, Homo sapien
tctcagctcagctctctagcaggag

SEQ ID NO: 1407118 - DNA, 25 bp, Homo sapien
tgagatcattttagggtccctcctc

SEQ ID NO: 1407119 - DNA, 25 bp, Homo sapien
gctaataaagtgtccctgagatcat

SEQ ID NO: 1407120 - DNA, 25 bp, Homo sapien
tggccctcttgaaatcccatgcgta

SEQ ID NO: 1407121 - DNA, 25 bp, Homo sapien
tcttgaaatcccatgcgtaggctgg

SEQ ID NO: 1407122 - DNA, 25 bp, Homo sapien
gtggcctggccctcttgaaatccca

SEQ ID NO: 1407123 - DNA, 25 bp, Homo sapien
ccctcttgaaatcccatgcgtaggc

SEQ ID NO: 1407124 - DNA, 25 bp, Homo sapien
tgcgtagggcgatgtccagtcgtct

SEQ ID NO: 1407125 - DNA, 25 bp, Homo sapien
acctcggggtggctcaaggcctgct

SEQ ID NO: 1407126 - DNA, 25 bp, Homo sapien
taaaaggaacttatcagtcatggcg

SEQ ID NO: 1407127 - DNA, 25 bp, Homo sapien
ggaatttggtccacagatgaggtga

SEQ ID NO: 1407128 - DNA, 25 bp, Homo sapien
tctgtccccgcccattacggtagaa

SEQ ID NO: 1407129 - DNA, 25 bp, Homo sapien
tcttatagaggtggacagggtctgt

SEQ ID NO: 1407130 - DNA, 25 bp, Homo sapien
ctcaccactgttgggttgcctgtca

SEQ ID NO: 1407131 - DNA, 25 bp, Homo sapien
tgtgtggacgctgagcactttgtct

SEQ ID NO: 1407132 - DNA, 25 bp, Homo sapien
tttaagaggtcattgaaaccagtct

SEQ ID NO: 1407133 - DNA, 25 bp, Homo sapien
ctgtggtttaagaggtcattgaaac

SEQ ID NO: 1407134 - DNA, 25 bp, Homo sapien
tggtttaagaggtcattgaaaccag

SEQ ID NO: 1407135 - DNA, 25 bp, Homo sapien
gtttaagaggtcattgaaaccagtc

SEQ ID NO: 1407136 - DNA, 25 bp, Homo sapien
tggtgtccccgctcttaaggaatgt

SEQ ID NO: 1407137 - DNA, 25 bp, Homo sapien
gatgttttacggtttctccacagga

SEQ ID NO: 1407138 - DNA, 25 bp, Homo sapien
tcctttgtgttagcatgtcagccca

SEQ ID NO: 1407139 - DNA, 25 bp, Homo sapien
caagttgtcaccttgtgaaggagcc

SEQ ID NO: 1407140 - DNA, 25 bp, Homo sapien
ggcatagttgtacaggctgaaaatc

SEQ ID NO: 1407141 - DNA, 25 bp, Homo sapien
agtgctgtcttgaacagctggagca

SEQ ID NO: 1407142 - DNA, 25 bp, Homo sapien
cctctcggcggctggaggcatagtt

SEQ ID NO: 1407143 - DNA, 25 bp, Homo sapien
tggagcaggagataggcctctcggc

SEQ ID NO: 1407144 - DNA, 25 bp, Homo sapien
tgtccagaaccatcatatctgacag

SEQ ID NO: 1407145 - DNA, 25 bp, Homo sapien
attcctcttggtcagcttcttgcag

SEQ ID NO: 1407146 - DNA, 25 bp, Homo sapien
ggtatgcttctagtttctgccgttt

SEQ ID NO: 1407147 - DNA, 25 bp, Homo sapien
tgctcagcgactttaaacccttctg

SEQ ID NO: 1407148 - DNA, 25 bp, Homo sapien
tccagctgctgattggatcggatct

SEQ ID NO: 1407149 - DNA, 25 bp, Homo sapien
ctgcagagtgatccggttcttcacc

SEQ ID NO: 1407150 - DNA, 25 bp, Homo sapien
tgcctcagccaagaagtcttgctgg

SEQ ID NO: 1407151 - DNA, 25 bp, Homo sapien
cttgatgtccatgatgttgaggtcc

SEQ ID NO: 1407152 - DNA, 25 bp, Homo sapien
ctgagaggagggtggggtgcatgca

SEQ ID NO: 1407153 - DNA, 25 bp, Homo sapien
cctgcccgagtcagcccaccccagt

SEQ ID NO: 1407154 - DNA, 25 bp, Homo sapien
ggatcagcaggtccccaaccccagt

SEQ ID NO: 1407155 - DNA, 25 bp, Homo sapien
gtccccgttctgcttgggatcagca

SEQ ID NO: 1407156 - DNA, 25 bp, Homo sapien
ccccagtccccgttctgcttgggat

SEQ ID NO: 1407157 - DNA, 25 bp, Homo sapien
gctgtgcagtcgcagaaggatgtct

SEQ ID NO: 1407158 - DNA, 25 bp, Homo sapien
tgtgcagtcgcagaaggatgtctag

SEQ ID NO: 1407159 - DNA, 25 bp, Homo sapien
agtcgcagaaggatgtctagacctg

SEQ ID NO: 1407160 - DNA, 25 bp, Homo sapien
tgcagtcgcagaaggatgtctagac

SEQ ID NO: 1407161 - DNA, 25 bp, Homo sapien
ctaatatcctgtagtcatcttgggc

SEQ ID NO: 1407162 - DNA, 25 bp, Homo sapien
gggctttcctggctcggaaaaatgc

SEQ ID NO: 1407163 - DNA, 25 bp, Homo sapien
tatcctgtagtcatcttgggctttc

SEQ ID NO: 1407164 - DNA, 25 bp, Homo sapien
gcctggatcttcacaatggagttaa

SEQ ID NO: 1407165 - DNA, 25 bp, Homo sapien
ggtattgcctccgagctgcccacat

SEQ ID NO: 1407166 - DNA, 25 bp, Homo sapien
attcttctggaagtagtgcagacgc

SEQ ID NO: 1407167 - DNA, 25 bp, Homo sapien
tctggaagtagtgcagacgcctcag

SEQ ID NO: 1407168 - DNA, 25 bp, Homo sapien
tgcagacgcctcaggtattgcctcc

SEQ ID NO: 1407169 - DNA, 25 bp, Homo sapien
gtaaatcttccgctgcctataaccc

SEQ ID NO: 1407170 - DNA, 25 bp, Homo sapien
tccaggtaaatcttccgctgcctat

SEQ ID NO: 1407171 - DNA, 25 bp, Homo sapien
tactgcaaccactccaggtaaatct

SEQ ID NO: 1407172 - DNA, 25 bp, Homo sapien
cgctgcctataaccccgccaatgag

SEQ ID NO: 1407173 - DNA, 25 bp, Homo sapien
gctggataacaaagccgacgttggc

SEQ ID NO: 1407174 - DNA, 25 bp, Homo sapien
gctcagcaaacttctgccgaactag

SEQ ID NO: 1407175 - DNA, 25 bp, Homo sapien
tccagagctgttggcggtcataggc

SEQ ID NO: 1407176 - DNA, 25 bp, Homo sapien
tgccgaactaggaagccacggaggc

SEQ ID NO: 1407177 - DNA, 25 bp, Homo sapien
ggcagtgccatccttcatgtcatgt

SEQ ID NO: 1407178 - DNA, 25 bp, Homo sapien
tcatgttgaacccagaaagctgtgt

SEQ ID NO: 1407179 - DNA, 25 bp, Homo sapien
cagatggaagtagtaggcagtgcca

SEQ ID NO: 1407180 - DNA, 25 bp, Homo sapien
tcctcccgggtcaggtgagaggtgt

SEQ ID NO: 1407181 - DNA, 25 bp, Homo sapien
gcagcgaagaggagggtcaggttgg

SEQ ID NO: 1407182 - DNA, 25 bp, Homo sapien
gggttcctcaacacccgctcagtct

SEQ ID NO: 1407183 - DNA, 25 bp, Homo sapien
ctggacgctgtttctttgccatggc

SEQ ID NO: 1407184 - DNA, 25 bp, Homo sapien
tcgctggtagccgttggcacagtcg

SEQ ID NO: 1407185 - DNA, 25 bp, Homo sapien
cacagtcgggaactacccctcgaag

SEQ ID NO: 1407186 - DNA, 25 bp, Homo sapien
ctggttggctctgaccactccctgg

SEQ ID NO: 1407187 - DNA, 25 bp, Homo sapien
tccctggcggatctcctcaagccac

SEQ ID NO: 1407188 - DNA, 25 bp, Homo sapien
ttctctgagctgtattagtgtcctg

SEQ ID NO: 1407189 - DNA, 25 bp, Homo sapien
cactccctggcggatctcctcaagc

SEQ ID NO: 1407190 - DNA, 25 bp, Homo sapien
tctttccttttcttgctccacactc

SEQ ID NO: 1407191 - DNA, 25 bp, Homo sapien
tttccttttcttgctccacactcct

SEQ ID NO: 1407192 - DNA, 25 bp, Homo sapien
tctctttccttttcttgctccacac

SEQ ID NO: 1407193 - DNA, 25 bp, Homo sapien
ctctttccttttcttgctccacact

SEQ ID NO: 1407194 - DNA, 25 bp, Homo sapien
ttgtccagagcctcattgatgaggc

SEQ ID NO: 1407195 - DNA, 25 bp, Homo sapien
agatggtaccgaggggcgacaggga

SEQ ID NO: 1407196 - DNA, 25 bp, Homo sapien
ttgatgaggctgactgcaaggaccc

SEQ ID NO: 1407197 - DNA, 25 bp, Homo sapien
cagtagggcagacagagtcttctca

SEQ ID NO: 1407198 - DNA, 25 bp, Homo sapien
gggtctgtgcattgacctggctcac

SEQ ID NO: 1407199 - DNA, 25 bp, Homo sapien
attgacctggctcacggtggcctgc

SEQ ID NO: 1407200 - DNA, 25 bp, Homo sapien
tggcctgcaggtcattccagctcag

SEQ ID NO: 1407201 - DNA, 25 bp, Homo sapien
cgctcctgtcgcaatttcagcaggg

SEQ ID NO: 1407202 - DNA, 25 bp, Homo sapien
cggttaatcaggaccacagctgaga

SEQ ID NO: 1407203 - DNA, 25 bp, Homo sapien
taatcaggaccacagctgagagcat

SEQ ID NO: 1407204 - DNA, 25 bp, Homo sapien
tcaggaccacagctgagagcatctc

SEQ ID NO: 1407205 - DNA, 25 bp, Homo sapien
aggaccacagctgagagcatctcca

SEQ ID NO: 1407206 - DNA, 25 bp, Homo sapien
gcaggtgaagggtctaaaggcctat

SEQ ID NO: 1407207 - DNA, 25 bp, Homo sapien
tctaaaggcctattcaccatcctgc

SEQ ID NO: 1407208 - DNA, 25 bp, Homo sapien
gcccccaaggttcttgaatatccca

SEQ ID NO: 1407209 - DNA, 25 bp, Homo sapien
agtctctatcccaaaaccccagtgg

SEQ ID NO: 1407210 - DNA, 25 bp, Homo sapien
cagctccagctggtacatagacgat

SEQ ID NO: 1407211 - DNA, 25 bp, Homo sapien
tttgttgatccgctgcacagcgtgg

SEQ ID NO: 1407212 - DNA, 25 bp, Homo sapien
ttgatccgctgcacagcgtggagca

SEQ ID NO: 1407213 - DNA, 25 bp, Homo sapien
gacgatgcaacagggtacactggag

SEQ ID NO: 1407214 - DNA, 25 bp, Homo sapien
tttgtgttggctgcagccacaccag

SEQ ID NO: 1407215 - DNA, 25 bp, Homo sapien
gcttgttcctgatcaccctttgtgt

SEQ ID NO: 1407216 - DNA, 25 bp, Homo sapien
ttcctgatcaccctttgtgttggct

SEQ ID NO: 1407217 - DNA, 25 bp, Homo sapien
tggcttgttcctgatcaccctttgt

SEQ ID NO: 1407218 - DNA, 25 bp, Homo sapien
ccaggtaccagtcagcaaagtctct

SEQ ID NO: 1407219 - DNA, 25 bp, Homo sapien
catcaacaacttctagagccccatg

SEQ ID NO: 1407220 - DNA, 25 bp, Homo sapien
tcaacaacttctagagccccatgga

SEQ ID NO: 1407221 - DNA, 25 bp, Homo sapien
atcatcaacaacttctagagcccca

SEQ ID NO: 1407222 - DNA, 25 bp, Homo sapien
atggttgatattgccctggatttca

SEQ ID NO: 1407223 - DNA, 25 bp, Homo sapien
cgttgacatggttgatattgccctg

SEQ ID NO: 1407224 - DNA, 25 bp, Homo sapien
catggttgatattgccctggatttc

SEQ ID NO: 1407225 - DNA, 25 bp, Homo sapien
tgacatggttgatattgccctggat

SEQ ID NO: 1407226 - DNA, 25 bp, Homo sapien
tgagttaggtagtggtcatagatgt

SEQ ID NO: 1407227 - DNA, 25 bp, Homo sapien
ctgagttaggtagtggtcatagatg

SEQ ID NO: 1407228 - DNA, 25 bp, Homo sapien
cattgatggcaagaacagctgcatg

SEQ ID NO: 1407229 - DNA, 25 bp, Homo sapien
acccctcgctccactgcttcattga

SEQ ID NO: 1407230 - DNA, 25 bp, Homo sapien
catctcttggtagacggctgccaga

SEQ ID NO: 1407231 - DNA, 25 bp, Homo sapien
tcggagattctccagaagagcactg

SEQ ID NO: 1407232 - DNA, 25 bp, Homo sapien
tcatccaccgagagctcattggcca

SEQ ID NO: 1407233 - DNA, 25 bp, Homo sapien
gccatatttggccagttcggacgcc

SEQ ID NO: 1407234 - DNA, 25 bp, Homo sapien
cagttcggacgccatgttgctgagt

SEQ ID NO: 1407235 - DNA, 25 bp, Homo sapien
ccgagagctcattggccaagatgcc

SEQ ID NO: 1407236 - DNA, 25 bp, Homo sapien
aatgatgccacaggtgcccttcatc

SEQ ID NO: 1407237 - DNA, 25 bp, Homo sapien
gatgccacaggtgcccttcatcagg

SEQ ID NO: 1407238 - DNA, 25 bp, Homo sapien
caatgatgccacaggtgcccttcat

SEQ ID NO: 1407239 - DNA, 25 bp, Homo sapien
gccacaggtgcccttcatcaggccc

SEQ ID NO: 1407240 - DNA, 25 bp, Homo sapien
gtggtcagggaaggagctgggctta

SEQ ID NO: 1407241 - DNA, 25 bp, Homo sapien
ctgtggtggtcagggaaggagctgg

SEQ ID NO: 1407242 - DNA, 25 bp, Homo sapien
tggtggtcagggaaggagctgggct

SEQ ID NO: 1407243 - DNA, 25 bp, Homo sapien
tggtcagggaaggagctgggcttac

SEQ ID NO: 1407244 - DNA, 25 bp, Homo sapien
tttcccgtatagatcatgtatctga

SEQ ID NO: 1407245 - DNA, 25 bp, Homo sapien
ttcactttcccgtatagatcatgta

SEQ ID NO: 1407246 - DNA, 25 bp, Homo sapien
gaatttcactttcccgtatagatca

SEQ ID NO: 1407247 - DNA, 25 bp, Homo sapien
ctgtgaatttcactttcccgtatag

SEQ ID NO: 1407248 - DNA, 25 bp, Homo sapien
ctgagagcatggatgcagtagacta

SEQ ID NO: 1407249 - DNA, 25 bp, Homo sapien
gagagcatggatgcagtagactacc

SEQ ID NO: 1407250 - DNA, 25 bp, Homo sapien
gagcatggatgcagtagactacccg

SEQ ID NO: 1407251 - DNA, 25 bp, Homo sapien
gcatggatgcagtagactacccggg

SEQ ID NO: 1407252 - DNA, 25 bp, Homo sapien
tgtgtgacggaaatgtaagccagtt

SEQ ID NO: 1407253 - DNA, 25 bp, Homo sapien
ctattgcagatagccaaaagttgat

SEQ ID NO: 1407254 - DNA, 25 bp, Homo sapien
tagccaaaagttgatgttgtctgtg

SEQ ID NO: 1407255 - DNA, 25 bp, Homo sapien
cgaaggcagaccgatgtgggctatt

SEQ ID NO: 1407256 - DNA, 25 bp, Homo sapien
tccacatcgtagatcttcttcaagg

SEQ ID NO: 1407257 - DNA, 25 bp, Homo sapien
aaacagtggcctagcttggccagca

SEQ ID NO: 1407258 - DNA, 25 bp, Homo sapien
tcttcaagggaaccacggagggtgc

SEQ ID NO: 1407259 - DNA, 25 bp, Homo sapien
agcagcactccattccgaaggctct

SEQ ID NO: 1407260 - DNA, 25 bp, Homo sapien
gcacaggtactgataggcaacattc

SEQ ID NO: 1407261 - DNA, 25 bp, Homo sapien
gccggcacaggtactgataggcaac

SEQ ID NO: 1407262 - DNA, 25 bp, Homo sapien
ctccagccggcacaggtactgatag

SEQ ID NO: 1407263 - DNA, 25 bp, Homo sapien
cagccggcacaggtactgataggca

SEQ ID NO: 1407264 - DNA, 25 bp, Homo sapien
cccagcctgggcccgctgctctcct

SEQ ID NO: 1407265 - DNA, 25 bp, Homo sapien
gctgcccagcctgggcccgctgctc

SEQ ID NO: 1407266 - DNA, 25 bp, Homo sapien
aggctgcccagcctgggcccgctgc

SEQ ID NO: 1407267 - DNA, 25 bp, Homo sapien
agcctgggcccgctgctctcctctc

SEQ ID NO: 1407268 - DNA, 25 bp, Homo sapien
cctccttcttccaggtttgaatctc

SEQ ID NO: 1407269 - DNA, 25 bp, Homo sapien
tcttccaggtttgaatctcccgccg

SEQ ID NO: 1407270 - DNA, 25 bp, Homo sapien
tcaccgtcggcaccgccagacagga

SEQ ID NO: 1407271 - DNA, 25 bp, Homo sapien
caggtttgaatctcccgccgttggg

SEQ ID NO: 1407272 - DNA, 25 bp, Homo sapien
gacttcgtggtcaagtagctttgga

SEQ ID NO: 1407273 - DNA, 25 bp, Homo sapien
gaagaggcatcttacccaaccaatg

SEQ ID NO: 1407274 - DNA, 25 bp, Homo sapien
gaaaatggatggcaaattccctgtc

SEQ ID NO: 1407275 - DNA, 25 bp, Homo sapien
tagcctgtaggacagctcctgccag

SEQ ID NO: 1407276 - DNA, 25 bp, Homo sapien
aggaatctaatcacaggctccatcc

SEQ ID NO: 1407277 - DNA, 25 bp, Homo sapien
tcatgtcagataagagaaagtaggg

SEQ ID NO: 1407278 - DNA, 25 bp, Homo sapien
caaactggaaattgcgggtgataca

SEQ ID NO: 1407279 - DNA, 25 bp, Homo sapien
gaccctggccacactttgacagatg

SEQ ID NO: 1407280 - DNA, 25 bp, Homo sapien
tacttatcagtgtagcaagactaca

SEQ ID NO: 1407281 - DNA, 25 bp, Homo sapien
gcaagactacaaagaggttaaccga

SEQ ID NO: 1407282 - DNA, 25 bp, Homo sapien
atttgtattcaggaccttcccaggc

SEQ ID NO: 1407283 - DNA, 25 bp, Homo sapien
gacagggagctacttctacttatca

SEQ ID NO: 1407284 - DNA, 25 bp, Homo sapien
tcatggtcctgggttagaagctgca

SEQ ID NO: 1407285 - DNA, 25 bp, Homo sapien
ggctaggagcgcaagctcatgttta

SEQ ID NO: 1407286 - DNA, 25 bp, Homo sapien
tttggtagcgctagaaactggcaac

SEQ ID NO: 1407287 - DNA, 25 bp, Homo sapien
gactgtgctgactccctcaactaag

SEQ ID NO: 1407288 - DNA, 25 bp, Homo sapien
tttcctttctgggagggactcctca

SEQ ID NO: 1407289 - DNA, 25 bp, Homo sapien
gcagacctgcatcaaccctggtctt

SEQ ID NO: 1407290 - DNA, 25 bp, Homo sapien
caaccctggtctttgaggcttcaac

SEQ ID NO: 1407291 - DNA, 25 bp, Homo sapien
cagcagctgacgtcccagagatcag

SEQ ID NO: 1407292 - DNA, 25 bp, Homo sapien
attgagccctacctttaccagacct

SEQ ID NO: 1407293 - DNA, 25 bp, Homo sapien
atcaattgagccctacctttaccag

SEQ ID NO: 1407294 - DNA, 25 bp, Homo sapien
tcaatcaattgagccctacctttac

SEQ ID NO: 1407295 - DNA, 25 bp, Homo sapien
aaatcaatcaattgagccctacctt

SEQ ID NO: 1407296 - DNA, 25 bp, Homo sapien
ctctctgcttccctagccccgccat

SEQ ID NO: 1407297 - DNA, 25 bp, Homo sapien
ccttctcatcccttacatccaagat

SEQ ID NO: 1407298 - DNA, 25 bp, Homo sapien
ttctcatcccttacatccaagatgt

SEQ ID NO: 1407299 - DNA, 25 bp, Homo sapien
tctgcttccctagccccgccatcct

SEQ ID NO: 1407300 - DNA, 25 bp, Homo sapien
tgcttccctggttccaccacctaaa

SEQ ID NO: 1407301 - DNA, 25 bp, Homo sapien
tgctctctgcttccctggttccacc

SEQ ID NO: 1407302 - DNA, 25 bp, Homo sapien
ctctctgcttccctggttccaccac

SEQ ID NO: 1407303 - DNA, 25 bp, Homo sapien
tctgcttccctggttccaccaccta

SEQ ID NO: 1407304 - DNA, 25 bp, Homo sapien
gctgcatgggtcagcatatgccctg

SEQ ID NO: 1407305 - DNA, 25 bp, Homo sapien
ctggcctttgagacgagccaggaag

SEQ ID NO: 1407306 - DNA, 25 bp, Homo sapien
tcctgagggactgattggtttgctc

SEQ ID NO: 1407307 - DNA, 25 bp, Homo sapien
tcctgggcctctaggcgagcaagct

SEQ ID NO: 1407308 - DNA, 25 bp, Homo sapien
gagctcaaggagctgaccactactt

SEQ ID NO: 1407309 - DNA, 25 bp, Homo sapien
tcttcaggcaatagatgggtaggta

SEQ ID NO: 1407310 - DNA, 25 bp, Homo sapien
gaaatgggcctagtccttaagcctg

SEQ ID NO: 1407311 - DNA, 25 bp, Homo sapien
cagggtccaagtcaaagcgagggta

SEQ ID NO: 1407312 - DNA, 25 bp, Homo sapien
ttgtgtgctgttcgcccctcacagg

SEQ ID NO: 1407313 - DNA, 25 bp, Homo sapien
caggcttggagcagcatctcatcag

SEQ ID NO: 1407314 - DNA, 25 bp, Homo sapien
tgttcgcccctcacaggcttggagc

SEQ ID NO: 1407315 - DNA, 25 bp, Homo sapien
tgctgttcgcccctcacaggcttgg

SEQ ID NO: 1407316 - DNA, 25 bp, Homo sapien
gagatcagcagttacaaacagacct

SEQ ID NO: 1407317 - DNA, 25 bp, Homo sapien
cagacctggtggaaaggcttgacct

SEQ ID NO: 1407318 - DNA, 25 bp, Homo sapien
tcaacactgaattcttgttcaggac

SEQ ID NO: 1407319 - DNA, 25 bp, Homo sapien
ttgttcaggacctggcactttttga

SEQ ID NO: 1407320 - DNA, 25 bp, Homo sapien
ggatacaaagattagtacaacacag

SEQ ID NO: 1407321 - DNA, 25 bp, Homo sapien
cagtcaagcattagatttagccctt

SEQ ID NO: 1407322 - DNA, 25 bp, Homo sapien
agaagcccccagtcaagcattagat

SEQ ID NO: 1407323 - DNA, 25 bp, Homo sapien
attccccaagagctaaaatgaagtc

SEQ ID NO: 1407324 - DNA, 25 bp, Homo sapien
ccctggttgtcgtcatcactgcagc

SEQ ID NO: 1407325 - DNA, 25 bp, Homo sapien
gttgtcgtcatcactgcagctctcc

SEQ ID NO: 1407326 - DNA, 25 bp, Homo sapien
ggacccctggttgtcgtcatcactg

SEQ ID NO: 1407327 - DNA, 25 bp, Homo sapien
ggacttggacccctggttgtcgtca

SEQ ID NO: 1407328 - DNA, 25 bp, Homo sapien
tgagagtctactatgggccaaggag

SEQ ID NO: 1407329 - DNA, 25 bp, Homo sapien
tggttcatcaggtcttcacagtgga

SEQ ID NO: 1407330 - DNA, 25 bp, Homo sapien
cctgaagatggaagactgtcgtacc

SEQ ID NO: 1407331 - DNA, 25 bp, Homo sapien
tgcagagccatataagccagtccga

SEQ ID NO: 1407332 - DNA, 25 bp, Homo sapien
tccacggaacctgaagatctcaatt

SEQ ID NO: 1407333 - DNA, 25 bp, Homo sapien
cagtctaagtaagcaacagcaaggc

SEQ ID NO: 1407334 - DNA, 25 bp, Homo sapien
agggtctgggcagtctaagtaagca

SEQ ID NO: 1407335 - DNA, 25 bp, Homo sapien
atggcaggatccacggaacctgaag

SEQ ID NO: 1407336 - DNA, 25 bp, Homo sapien
tctgagaattgataaggcatacaag

SEQ ID NO: 1407337 - DNA, 25 bp, Homo sapien
gaattgataaggcatacaaggcaac

SEQ ID NO: 1407338 - DNA, 25 bp, Homo sapien
gcatacaaggcaactgttcaggccc

SEQ ID NO: 1407339 - DNA, 25 bp, Homo sapien
gaaaaaggatggactctgttaccca

SEQ ID NO: 1407340 - DNA, 25 bp, Homo sapien
tccttagaaaggctccttatctgta

SEQ ID NO: 1407341 - DNA, 25 bp, Homo sapien
agttgggcttgggatgattataacg

SEQ ID NO: 1407342 - DNA, 25 bp, Homo sapien
tagaaaggctccttatctgtactcc

SEQ ID NO: 1407343 - DNA, 25 bp, Homo sapien
gattataacgggtggtctccttaga

SEQ ID NO: 1407344 - DNA, 25 bp, Homo sapien
tatcagtaccagtgaatgggtgaca

SEQ ID NO: 1407345 - DNA, 25 bp, Homo sapien
ctgtagagaattatcagtaccagtg

SEQ ID NO: 1407346 - DNA, 25 bp, Homo sapien
gaatgggtgacatatcatgactgcc

SEQ ID NO: 1407347 - DNA, 25 bp, Homo sapien
tatcatgactgcctacgccacaggt

SEQ ID NO: 1407348 - DNA, 25 bp, Homo sapien
ttccactaccaagttggccgcagtc

SEQ ID NO: 1407349 - DNA, 25 bp, Homo sapien
gctcattccaccagtggtttgtgaa

SEQ ID NO: 1407350 - DNA, 25 bp, Homo sapien
gaagagctcattccaccagtggttt

SEQ ID NO: 1407351 - DNA, 25 bp, Homo sapien
ggccgcagtcttgttgaagagctca

SEQ ID NO: 1407352 - DNA, 25 bp, Homo sapien
ccaggggaataaatatgagctctga

SEQ ID NO: 1407353 - DNA, 25 bp, Homo sapien
gccaggggaataaatatgagctctg

SEQ ID NO: 1407354 - DNA, 25 bp, Homo sapien
tgagagcctgagtgataccattctc

SEQ ID NO: 1407355 - DNA, 25 bp, Homo sapien
agcctgagtgataccattctccttc

SEQ ID NO: 1407356 - DNA, 25 bp, Homo sapien
attctccttccggccgaggcctttg

SEQ ID NO: 1407357 - DNA, 25 bp, Homo sapien
gagagcctgagtgataccattctcc

SEQ ID NO: 1407358 - DNA, 25 bp, Homo sapien
cctttaattaaatggactacatggg

SEQ ID NO: 1407359 - DNA, 25 bp, Homo sapien
cttttggtagagagcccatatctct

SEQ ID NO: 1407360 - DNA, 25 bp, Homo sapien
catatagtcccctgcctttgtgtga

SEQ ID NO: 1407361 - DNA, 25 bp, Homo sapien
tgtacctctcagaagacctcctagc

SEQ ID NO: 1407362 - DNA, 25 bp, Homo sapien
aaacttcatcccacgactcttgacc

SEQ ID NO: 1407363 - DNA, 25 bp, Homo sapien
aacttcatcccacgactcttgacct

SEQ ID NO: 1407364 - DNA, 25 bp, Homo sapien
caaacttcatcccacgactcttgac

SEQ ID NO: 1407365 - DNA, 25 bp, Homo sapien
gcaaacttcatcccacgactcttga

SEQ ID NO: 1407366 - DNA, 25 bp, Homo sapien
tgagaaaaaagtctctatcctcaga

SEQ ID NO: 1407367 - DNA, 25 bp, Homo sapien
gtgagaaaaaagtctctatcctcag

SEQ ID NO: 1407368 - DNA, 25 bp, Homo sapien
ggtgagaaaaaagtctctatcctca

SEQ ID NO: 1407369 - DNA, 25 bp, Homo sapien
catcctgactgcttgttaagaattc

SEQ ID NO: 1407370 - DNA, 25 bp, Homo sapien
ccatcctgactgcttgttaagaatt

SEQ ID NO: 1407371 - DNA, 25 bp, Homo sapien
tgccctggaagttaagagaccggct

SEQ ID NO: 1407372 - DNA, 25 bp, Homo sapien
taattgaaaactacatgccctggaa

SEQ ID NO: 1407373 - DNA, 25 bp, Homo sapien
gataactgggtagaagctgtgcgcc

SEQ ID NO: 1407374 - DNA, 25 bp, Homo sapien
cgtttgctaataagcccgggctccg

SEQ ID NO: 1407375 - DNA, 25 bp, Homo sapien
cgtcattgctgggtccgctccgcgg

SEQ ID NO: 1407376 - DNA, 25 bp, Homo sapien
tgctgggtccgctccgcggaaacat

SEQ ID NO: 1407377 - DNA, 25 bp, Homo sapien
ttgctgggtccgctccgcggaaaca

SEQ ID NO: 1407378 - DNA, 25 bp, Homo sapien
cattgctgggtccgctccgcggaaa

SEQ ID NO: 1407379 - DNA, 25 bp, Homo sapien
ccaatttgccggtatggttgccata

SEQ ID NO: 1407380 - DNA, 25 bp, Homo sapien
tgtcgaaaccatagagacgtccgcg

SEQ ID NO: 1407381 - DNA, 25 bp, Homo sapien
gagcgtgcccattttcggaggttcc

SEQ ID NO: 1407382 - DNA, 25 bp, Homo sapien
catagaaactgggacctggagcgtg

SEQ ID NO: 1407383 - DNA, 25 bp, Homo sapien
agaatcttgtaaggttttaatgcaa

SEQ ID NO: 1407384 - DNA, 25 bp, Homo sapien
ggtgatatctgattacctcagcctg

SEQ ID NO: 1407385 - DNA, 25 bp, Homo sapien
tgatacctgatcacccttgatatct

SEQ ID NO: 1407386 - DNA, 25 bp, Homo sapien
tggcaagaatcttgtaaggttttaa

SEQ ID NO: 1407387 - DNA, 25 bp, Homo sapien
ctattcgaatattattcacttttct

SEQ ID NO: 1407388 - DNA, 25 bp, Homo sapien
tattcgaatattattcacttttctt

SEQ ID NO: 1407389 - DNA, 25 bp, Homo sapien
ggagtcttgctgataatggccactt

SEQ ID NO: 1407390 - DNA, 25 bp, Homo sapien
gtcttgctgataatggccacttcat

SEQ ID NO: 1407391 - DNA, 25 bp, Homo sapien
cttagctacgcgaaggacttgcaga

SEQ ID NO: 1407392 - DNA, 25 bp, Homo sapien
gcaaacactaaagctgtccttagct

SEQ ID NO: 1407393 - DNA, 25 bp, Homo sapien
cagtgaattgaccattataaacaga

SEQ ID NO: 1407394 - DNA, 25 bp, Homo sapien
atccttatccacctctgagatgggc

SEQ ID NO: 1407395 - DNA, 25 bp, Homo sapien
taaacggtccacttgaatatcagca

SEQ ID NO: 1407396 - DNA, 25 bp, Homo sapien
cagtcaggagcttcatacaatcatt

SEQ ID NO: 1407397 - DNA, 25 bp, Homo sapien
tggtccccaggccaagtgttcttcg

SEQ ID NO: 1407398 - DNA, 25 bp, Homo sapien
ctgacggcagtgtgcgcttcccaat

SEQ ID NO: 1407399 - DNA, 25 bp, Homo sapien
tcccggagtgcgcagtttcggcttc

SEQ ID NO: 1407400 - DNA, 25 bp, Homo sapien
gggacctactgctacgccgagaatt

SEQ ID NO: 1407401 - DNA, 25 bp, Homo sapien
ataacctggggatcttttgtgttgg

SEQ ID NO: 1407402 - DNA, 25 bp, Homo sapien
aataacctggggatcttttgtgttg

SEQ ID NO: 1407403 - DNA, 25 bp, Homo sapien
ggggcattaactgacctctgagtac

SEQ ID NO: 1407404 - DNA, 25 bp, Homo sapien
attcagatgtactcgggctccagcc

SEQ ID NO: 1407405 - DNA, 25 bp, Homo sapien
ggtttgcaaccctcaaagcgcggtc

SEQ ID NO: 1407406 - DNA, 25 bp, Homo sapien
gacaaatgagtggtccttccccata

SEQ ID NO: 1407407 - DNA, 25 bp, Homo sapien
tctcaacttgggtcatggcctcagc

SEQ ID NO: 1407408 - DNA, 25 bp, Homo sapien
agaactagattttgctaagcccgag

SEQ ID NO: 1407409 - DNA, 25 bp, Homo sapien
ggtacagtagatattgcccagtgca

SEQ ID NO: 1407410 - DNA, 25 bp, Homo sapien
gatgccagagtcctcgtctgcgcaa

SEQ ID NO: 1407411 - DNA, 25 bp, Homo sapien
aaaaagacatcctaaggctgcccag

SEQ ID NO: 1407412 - DNA, 25 bp, Homo sapien
cctacagtagatgggtctctgggaa

SEQ ID NO: 1407413 - DNA, 25 bp, Homo sapien
cagtccagagttcccaagagggacc

SEQ ID NO: 1407414 - DNA, 25 bp, Homo sapien
ccaagtccatggcactgggagtgaa

SEQ ID NO: 1407415 - DNA, 25 bp, Homo sapien
tcaaagccctttggaaccaagtcca

SEQ ID NO: 1407416 - DNA, 25 bp, Homo sapien
tctttgaacaacgagaagactctcc

SEQ ID NO: 1407417 - DNA, 25 bp, Homo sapien
ggtagcgttccggatcagtccttgc

SEQ ID NO: 1407418 - DNA, 25 bp, Homo sapien
gagatttccgaccttgtcccaggca

SEQ ID NO: 1407419 - DNA, 25 bp, Homo sapien
gacaccttactgtagtccggcagga

SEQ ID NO: 1407420 - DNA, 25 bp, Homo sapien
tcaggcttaggaaagtgcagggaca

SEQ ID NO: 1407421 - DNA, 25 bp, Homo sapien
cagttcctatgggacagaccttggc

SEQ ID NO: 1407422 - DNA, 25 bp, Homo sapien
tcaagggaacggaccgcatgactgc

SEQ ID NO: 1407423 - DNA, 25 bp, Homo sapien
tatacgagagggatctgcaactgct

SEQ ID NO: 1407424 - DNA, 25 bp, Homo sapien
tacttgcgttcggtctaggaggccc

SEQ ID NO: 1407425 - DNA, 25 bp, Homo sapien
aattctgagtataagagcacccacc

SEQ ID NO: 1407426 - DNA, 25 bp, Homo sapien
aaaggccaggtgagtatggtgtccc

SEQ ID NO: 1407427 - DNA, 25 bp, Homo sapien
tctagaaggcagaagaggctaaaga

SEQ ID NO: 1407428 - DNA, 25 bp, Homo sapien
gaagtccatcctgaagtctaacccc

SEQ ID NO: 1407429 - DNA, 25 bp, Homo sapien
agctcaggtaagcaaccccacttgg

SEQ ID NO: 1407430 - DNA, 25 bp, Homo sapien
gagcttggcttaggtcacacagtga

SEQ ID NO: 1407431 - DNA, 25 bp, Homo sapien
ggagccaggatatgtgtgaacccac

SEQ ID NO: 1407432 - DNA, 25 bp, Homo sapien
tcaggtatctatcgctgtgaggtcc

SEQ ID NO: 1407433 - DNA, 25 bp, Homo sapien
tctccgcgggtcaagtggactttcc

SEQ ID NO: 1407434 - DNA, 25 bp, Homo sapien
tcgacagcgttaagttccagccggc

SEQ ID NO: 1407435 - DNA, 25 bp, Homo sapien
tgcgcgtcaaggtgaacgaggccta

SEQ ID NO: 1407436 - DNA, 25 bp, Homo sapien
tgacctgtagtcctttaacccacca

SEQ ID NO: 1407437 - DNA, 25 bp, Homo sapien
cactgacagcgccagccgaggtgga

SEQ ID NO: 1407438 - DNA, 25 bp, Homo sapien
ggcccctgagggtaccagggagctg

SEQ ID NO: 1407439 - DNA, 25 bp, Homo sapien
tctgcccaaggctcaactgccctct

SEQ ID NO: 1407440 - DNA, 25 bp, Homo sapien
ctgcctggctatgggggggacctgt

SEQ ID NO: 1407441 - DNA, 25 bp, Homo sapien
aggaggaaggggtccgctgcctatg

SEQ ID NO: 1407442 - DNA, 25 bp, Homo sapien
aggaaggggtccgctgcctatgtct

SEQ ID NO: 1407443 - DNA, 25 bp, Homo sapien
gaaggggtccgctgcctatgtctgc

SEQ ID NO: 1407444 - DNA, 25 bp, Homo sapien
ggcagagacccagtgccggatgtac

SEQ ID NO: 1407445 - DNA, 25 bp, Homo sapien
agggcgcctgctacaagcacttttc

SEQ ID NO: 1407446 - DNA, 25 bp, Homo sapien
cagtgccggatgtacggcgcgcatc

SEQ ID NO: 1407447 - DNA, 25 bp, Homo sapien
ttttccacacgaaggagctgggagg

SEQ ID NO: 1407448 - DNA, 25 bp, Homo sapien
cagccctgcggtggactgggcttcg

SEQ ID NO: 1407449 - DNA, 25 bp, Homo sapien
agccctgcggtggactgggcttcgg

SEQ ID NO: 1407450 - DNA, 25 bp, Homo sapien
gccctgcggtggactgggcttcggg

SEQ ID NO: 1407451 - DNA, 25 bp, Homo sapien
ctagggggcgccgcggacttgcgtc

SEQ ID NO: 1407452 - DNA, 25 bp, Homo sapien
gagccccaggatcccgctagggggc

SEQ ID NO: 1407453 - DNA, 25 bp, Homo sapien
tgctctgagagtgccgtgtacgcgt

SEQ ID NO: 1407454 - DNA, 25 bp, Homo sapien
acgcgtgcgccggtggagacgggca

SEQ ID NO: 1407455 - DNA, 25 bp, Homo sapien
tcaatgcatttttagggctctcggg

SEQ ID NO: 1407456 - DNA, 25 bp, Homo sapien
ctctcgggggcatttaggtggaact

SEQ ID NO: 1407457 - DNA, 25 bp, Homo sapien
tggaactgtgagtggatgaagatca

SEQ ID NO: 1407458 - DNA, 25 bp, Homo sapien
atgaagatcaaggtgggcctttgaa

SEQ ID NO: 1407459 - DNA, 25 bp, Homo sapien
gttccctgaggtggagtttagatag

SEQ ID NO: 1407460 - DNA, 25 bp, Homo sapien
tccctgaggtggagtttagatagta

SEQ ID NO: 1407461 - DNA, 25 bp, Homo sapien
cctgaggtggagtttagatagtata

SEQ ID NO: 1407462 - DNA, 25 bp, Homo sapien
ggttccctgaggtggagtttagata

SEQ ID NO: 1407463 - DNA, 25 bp, Homo sapien
ctctccccaagagcggcaggagggc

SEQ ID NO: 1407464 - DNA, 25 bp, Homo sapien
cggcaggagggctccatcatcttct

SEQ ID NO: 1407465 - DNA, 25 bp, Homo sapien
tctgatgtattgatcaggagagctc

SEQ ID NO: 1407466 - DNA, 25 bp, Homo sapien
tccagaggtagacaggctgaagctg

SEQ ID NO: 1407467 - DNA, 25 bp, Homo sapien
cggaagccctctcctggctttgttg

SEQ ID NO: 1407468 - DNA, 25 bp, Homo sapien
ctgctggggtgttctggcggggccc

SEQ ID NO: 1407469 - DNA, 25 bp, Homo sapien
aagccctctcctggctttgttgggt

SEQ ID NO: 1407470 - DNA, 25 bp, Homo sapien
cggaaacggaagccctctcctggct

SEQ ID NO: 1407471 - DNA, 25 bp, Homo sapien
ctttgtcccagccgtgaggccctgt

SEQ ID NO: 1407472 - DNA, 25 bp, Homo sapien
gggcctttgtcccagccgtgaggcc

SEQ ID NO: 1407473 - DNA, 25 bp, Homo sapien
tgtcccagccgtgaggccctgtctg

SEQ ID NO: 1407474 - DNA, 25 bp, Homo sapien
cactggggcctttgtcccagccgtg

SEQ ID NO: 1407475 - DNA, 25 bp, Homo sapien
tatccttagggaagtcctcgcttct

SEQ ID NO: 1407476 - DNA, 25 bp, Homo sapien
tccacgacatatatccttagggaag

SEQ ID NO: 1407477 - DNA, 25 bp, Homo sapien
ttccaaagagaacacgccttccacg

SEQ ID NO: 1407478 - DNA, 25 bp, Homo sapien
tcttgctgcattgacagacaatcac

SEQ ID NO: 1407479 - DNA, 25 bp, Homo sapien
ttggtaactctataggcgatcaggg

SEQ ID NO: 1407480 - DNA, 25 bp, Homo sapien
cctgtttgagattattggcagcaat

SEQ ID NO: 1407481 - DNA, 25 bp, Homo sapien
tttgagattattggcagcaatggcc

SEQ ID NO: 1407482 - DNA, 25 bp, Homo sapien
ggccagtttggtaactctataggcg

SEQ ID NO: 1407483 - DNA, 25 bp, Homo sapien
gggacctagtactatcgggattcag

SEQ ID NO: 1407484 - DNA, 25 bp, Homo sapien
tgagatggtgcactactgcagtgag

SEQ ID NO: 1407485 - DNA, 25 bp, Homo sapien
gagtcagcacatgggagtgccgtca

SEQ ID NO: 1407486 - DNA, 25 bp, Homo sapien
agggcgtgctactgcagtgagatgg

SEQ ID NO: 1407487 - DNA, 25 bp, Homo sapien
ccctttgcagggtgggaggttatat

SEQ ID NO: 1407488 - DNA, 25 bp, Homo sapien
ctaagtccccagtgccgggcagatg

SEQ ID NO: 1407489 - DNA, 25 bp, Homo sapien
ggcctctcagccagaaaccatatgt

SEQ ID NO: 1407490 - DNA, 25 bp, Homo sapien
cttttcaccttagcgggccaggcct

SEQ ID NO: 1407491 - DNA, 25 bp, Homo sapien
ctccttccctctgagtgaacttcag

SEQ ID NO: 1407492 - DNA, 25 bp, Homo sapien
ctgaggaccaggactctctatctcc

SEQ ID NO: 1407493 - DNA, 25 bp, Homo sapien
tctccttccctctgagtgaacttca

SEQ ID NO: 1407494 - DNA, 25 bp, Homo sapien
ctagtcctcccctgaggaccaggac

SEQ ID NO: 1407495 - DNA, 25 bp, Homo sapien
taacaccaatgatgtctgcccctgg

SEQ ID NO: 1407496 - DNA, 25 bp, Homo sapien
tctccctcagagactagcggcattc

SEQ ID NO: 1407497 - DNA, 25 bp, Homo sapien
gagccagaaggctcagcactgtcct

SEQ ID NO: 1407498 - DNA, 25 bp, Homo sapien
tctagagggccagggactttgtcct

SEQ ID NO: 1407499 - DNA, 25 bp, Homo sapien
ctgacactcacagaatcagactcca

SEQ ID NO: 1407500 - DNA, 25 bp, Homo sapien
atcccaggggacactgacactcaca

SEQ ID NO: 1407501 - DNA, 25 bp, Homo sapien
gggacactgacactcacagaatcag

SEQ ID NO: 1407502 - DNA, 25 bp, Homo sapien
gacactgacactcacagaatcagac

SEQ ID NO: 1407503 - DNA, 25 bp, Homo sapien
gccaacagaagaccctggcccccac

SEQ ID NO: 1407504 - DNA, 25 bp, Homo sapien
ctgccaacagaagaccctggccccc

SEQ ID NO: 1407505 - DNA, 25 bp, Homo sapien
tgccaacagaagaccctggccccca

SEQ ID NO: 1407506 - DNA, 25 bp, Homo sapien
ctggctccctcccctcctcctgatc

SEQ ID NO: 1407507 - DNA, 25 bp, Homo sapien
cgcccagcccctggctccctcccct

SEQ ID NO: 1407508 - DNA, 25 bp, Homo sapien
cagcccctggctccctcccctcctc

SEQ ID NO: 1407509 - DNA, 25 bp, Homo sapien
cctggctccctcccctcctcctgat

SEQ ID NO: 1407510 - DNA, 25 bp, Homo sapien
ggcacctggcccagaggttctgcca

SEQ ID NO: 1407511 - DNA, 25 bp, Homo sapien
atctgcaaacccatcggactcccca

SEQ ID NO: 1407512 - DNA, 25 bp, Homo sapien
agaaaaggtgcctcagtccccaggt

SEQ ID NO: 1407513 - DNA, 25 bp, Homo sapien
ggactccccatctcgatcccaggct

SEQ ID NO: 1407514 - DNA, 25 bp, Homo sapien
aaggccctcggaagccaggacagca

SEQ ID NO: 1407515 - DNA, 25 bp, Homo sapien
gagtcacggccacactcctcttctc

SEQ ID NO: 1407516 - DNA, 25 bp, Homo sapien
aattcttctgacaggtcagagtcac

SEQ ID NO: 1407517 - DNA, 25 bp, Homo sapien
tcaaggccctcggaagccaggacag

SEQ ID NO: 1407518 - DNA, 25 bp, Homo sapien
agtctggaagggtctccccgagctc

SEQ ID NO: 1407519 - DNA, 25 bp, Homo sapien
ctggaagggtctccccgagctcatc

SEQ ID NO: 1407520 - DNA, 25 bp, Homo sapien
gggagtggagtctggaagggtctcc

SEQ ID NO: 1407521 - DNA, 25 bp, Homo sapien
tgaggtagaagcccaggggagtgga

SEQ ID NO: 1407522 - DNA, 25 bp, Homo sapien
tcgctctctactttccccagggctt

SEQ ID NO: 1407523 - DNA, 25 bp, Homo sapien
gctagcctcctgactcccttcagcc

SEQ ID NO: 1407524 - DNA, 25 bp, Homo sapien
cccagctagcctcctgactcccttc

SEQ ID NO: 1407525 - DNA, 25 bp, Homo sapien
tcctgctcgctctctactttcccca

SEQ ID NO: 1407526 - DNA, 25 bp, Homo sapien
agggtctcagcagggaacgcctcct

SEQ ID NO: 1407527 - DNA, 25 bp, Homo sapien
tctgaccccagaggccaaggtgaag

SEQ ID NO: 1407528 - DNA, 25 bp, Homo sapien
tttctaggcccttccaagccctgaa

SEQ ID NO: 1407529 - DNA, 25 bp, Homo sapien
agcactggtggtacatcctcctcag

SEQ ID NO: 1407530 - DNA, 25 bp, Homo sapien
gttgtgattgcccttcagggtcctg

SEQ ID NO: 1407531 - DNA, 25 bp, Homo sapien
tccagccatcccaggagggctttcc

SEQ ID NO: 1407532 - DNA, 25 bp, Homo sapien
ctgggatccagacctcctctgtggc

SEQ ID NO: 1407533 - DNA, 25 bp, Homo sapien
tctctgggtgcccctcgcctgggat

SEQ ID NO: 1407534 - DNA, 25 bp, Homo sapien
ggtccttctccaccgtatcttccca

SEQ ID NO: 1407535 - DNA, 25 bp, Homo sapien
tggtccttctccaccgtatcttccc

SEQ ID NO: 1407536 - DNA, 25 bp, Homo sapien
gtccttctccaccgtatcttcccac

SEQ ID NO: 1407537 - DNA, 25 bp, Homo sapien
ttggtccttctccaccgtatcttcc

SEQ ID NO: 1407538 - DNA, 25 bp, Homo sapien
ttccaggttctcttgtcccgcagac

SEQ ID NO: 1407539 - DNA, 25 bp, Homo sapien
aggttccatgctcccagagatctca

SEQ ID NO: 1407540 - DNA, 25 bp, Homo sapien
gaggtctagctatctcctggtcaag

SEQ ID NO: 1407541 - DNA, 25 bp, Homo sapien
tagagacctccgtcgctgttgagtc

SEQ ID NO: 1407542 - DNA, 25 bp, Homo sapien
tccagagctgtcaatgactctaagt

SEQ ID NO: 1407543 - DNA, 25 bp, Homo sapien
caatgactctaagttctcttgcaga

SEQ ID NO: 1407544 - DNA, 25 bp, Homo sapien
cagtggctcttgattctccttttcc

SEQ ID NO: 1407545 - DNA, 25 bp, Homo sapien
tacttctggagatctcagtggctct

SEQ ID NO: 1407546 - DNA, 25 bp, Homo sapien
ctggaaataaaaatgtctctagatt

SEQ ID NO: 1407547 - DNA, 25 bp, Homo sapien
tggaaataaaaatgtctctagatta

SEQ ID NO: 1407548 - DNA, 25 bp, Homo sapien
ggaaataaaaatgtctctagattac

SEQ ID NO: 1407549 - DNA, 25 bp, Homo sapien
tcggcatatgctgaacactctagac

SEQ ID NO: 1407550 - DNA, 25 bp, Homo sapien
caggtgtctcaagggtagcaggcaa

SEQ ID NO: 1407551 - DNA, 25 bp, Homo sapien
ccttagcctctaaactggagtggtc

SEQ ID NO: 1407552 - DNA, 25 bp, Homo sapien
tgatctctgcatctacagcaggaga

SEQ ID NO: 1407553 - DNA, 25 bp, Homo sapien
gcagccaccgctggcaagagtatcc

SEQ ID NO: 1407554 - DNA, 25 bp, Homo sapien
aagagtatccatgcgcctgcccctg

SEQ ID NO: 1407555 - DNA, 25 bp, Homo sapien
gaaatttagattggtgcctctcggg

SEQ ID NO: 1407556 - DNA, 25 bp, Homo sapien
tcactgacactggaggccacggact

SEQ ID NO: 1407557 - DNA, 25 bp, Homo sapien
ccaccgccaggtgtttgcagccggg

SEQ ID NO: 1407558 - DNA, 25 bp, Homo sapien
caggtgtttgcagccgggagttctc

SEQ ID NO: 1407559 - DNA, 25 bp, Homo sapien
ttgcagccgggagttctcagcctcc

SEQ ID NO: 1407560 - DNA, 25 bp, Homo sapien
ggagccaccgccaggtgtttgcagc

SEQ ID NO: 1407561 - DNA, 25 bp, Homo sapien
ctgagggacatcttgaggtgcgcca

SEQ ID NO: 1407562 - DNA, 25 bp, Homo sapien
agggacatcttgaggtgcgccagct

SEQ ID NO: 1407563 - DNA, 25 bp, Homo sapien
ggacctgagcgatctggctctgtag

SEQ ID NO: 1407564 - DNA, 25 bp, Homo sapien
tgctgccgaccttccaggacctgag

SEQ ID NO: 1407565 - DNA, 25 bp, Homo sapien
aacttttcagtagcccgcagccgct

SEQ ID NO: 1407566 - DNA, 25 bp, Homo sapien
ctggaacttttcagtagcccgcagc

SEQ ID NO: 1407567 - DNA, 25 bp, Homo sapien
ggccctccaacctctgttccaacgc

SEQ ID NO: 1407568 - DNA, 25 bp, Homo sapien
cagcgacgtctccatgtgtgccacg

SEQ ID NO: 1407569 - DNA, 25 bp, Homo sapien
cgcgccacgcctcgcccagtcgcct

SEQ ID NO: 1407570 - DNA, 25 bp, Homo sapien
cgccacgcctcgcccagtcgccttg

SEQ ID NO: 1407571 - DNA, 25 bp, Homo sapien
cccgcgccacgcctcgcccagtcgc

SEQ ID NO: 1407572 - DNA, 25 bp, Homo sapien
ccacgcctcgcccagtcgccttgcc

SEQ ID NO: 1407573 - DNA, 25 bp, Homo sapien
ggcggcgcggggcagcggggggcac

SEQ ID NO: 1407574 - DNA, 25 bp, Homo sapien
gaggcccgcggggcggcgcggggca

SEQ ID NO: 1407575 - DNA, 25 bp, Homo sapien
gggcggcgcggggcagcggggggca

SEQ ID NO: 1407576 - DNA, 25 bp, Homo sapien
ccgcggggcggcgcggggcagcggg

SEQ ID NO: 1407577 - DNA, 25 bp, Homo sapien
aggcagcctgcgcgttcaggccgac

SEQ ID NO: 1407578 - DNA, 25 bp, Homo sapien
tcctcgtgcgccacgcgtagagcct

SEQ ID NO: 1407579 - DNA, 25 bp, Homo sapien
acgcgtagagcctctagctcgcgct

SEQ ID NO: 1407580 - DNA, 25 bp, Homo sapien
gctcctcctcgtgcgccacgcgtag

SEQ ID NO: 1407581 - DNA, 25 bp, Homo sapien
tgcgccacgcgtagagcctctagct

SEQ ID NO: 1407582 - DNA, 25 bp, Homo sapien
ggcgcatttctctgcctcgacggcg

SEQ ID NO: 1407583 - DNA, 25 bp, Homo sapien
tgtccgcggattgtgcccggagccc

SEQ ID NO: 1407584 - DNA, 25 bp, Homo sapien
tgcttctcccgccagcgttggtcaa

SEQ ID NO: 1407585 - DNA, 25 bp, Homo sapien
aggtaggcctccaggcgccgattga

SEQ ID NO: 1407586 - DNA, 25 bp, Homo sapien
cagagcttttaggacggaagagaaa

SEQ ID NO: 1407587 - DNA, 25 bp, Homo sapien
gcaccgggagaagggagcggctcgc

SEQ ID NO: 1407588 - DNA, 25 bp, Homo sapien
gggtgggagtagcctgagcgactga

SEQ ID NO: 1407589 - DNA, 25 bp, Homo sapien
gaaaagagaccgacggggacaatga

SEQ ID NO: 1407590 - DNA, 25 bp, Homo sapien
ggcagttgccactagcaaggttgga

SEQ ID NO: 1407591 - DNA, 25 bp, Homo sapien
tagaaggcagttgccactagcaagg

SEQ ID NO: 1407592 - DNA, 25 bp, Homo sapien
actagcaaggttggatgagacctga

SEQ ID NO: 1407593 - DNA, 25 bp, Homo sapien
tagtggcgagttagaaggcagttgc

SEQ ID NO: 1407594 - DNA, 25 bp, Homo sapien
agtgcccataccaatttactcttgg

SEQ ID NO: 1407595 - DNA, 25 bp, Homo sapien
aaatgctcataccagtggccaggca

SEQ ID NO: 1407596 - DNA, 25 bp, Homo sapien
ttaaaaaatgctcataccagtggcc

SEQ ID NO: 1407597 - DNA, 25 bp, Homo sapien
cagtggccaggcacgatcgcttatg

SEQ ID NO: 1407598 - DNA, 25 bp, Homo sapien
ttgagagacgcacaccaccgtctgg

SEQ ID NO: 1407599 - DNA, 25 bp, Homo sapien
ggaggctcaaccactagcagaagca

SEQ ID NO: 1407600 - DNA, 25 bp, Homo sapien
ggaactctaacaagctgggaatgaa

SEQ ID NO: 1407601 - DNA, 25 bp, Homo sapien
aatttcagcccaaacgagccagtca

SEQ ID NO: 1407602 - DNA, 25 bp, Homo sapien
agggagtccagggtccagagggact

SEQ ID NO: 1407603 - DNA, 25 bp, Homo sapien
gagtccagggtccagagggactgac

SEQ ID NO: 1407604 - DNA, 25 bp, Homo sapien
tctttctgcagggagtccagggtcc

SEQ ID NO: 1407605 - DNA, 25 bp, Homo sapien
tcaagctgtctttctgcagggagtc

SEQ ID NO: 1407606 - DNA, 25 bp, Homo sapien
gacgttcgggtgagtcaactcgacg

SEQ ID NO: 1407607 - DNA, 25 bp, Homo sapien
caactcgacgttgaggtgagtggat

SEQ ID NO: 1407608 - DNA, 25 bp, Homo sapien
ggatgtgttactccgtccaggacag

SEQ ID NO: 1407609 - DNA, 25 bp, Homo sapien
gaatgtgagcagaagacgttcgggt

SEQ ID NO: 1407610 - DNA, 25 bp, Homo sapien
tgagctggtggcaataaaaataacc

SEQ ID NO: 1407611 - DNA, 25 bp, Homo sapien
gggaggtatatttatctcctgagct

SEQ ID NO: 1407612 - DNA, 25 bp, Homo sapien
ctgggtaacccaagctccccagcct

SEQ ID NO: 1407613 - DNA, 25 bp, Homo sapien
tcctgagctggtggcaataaaaata

SEQ ID NO: 1407614 - DNA, 25 bp, Homo sapien
gctgggtgggggccatcaatgggga

SEQ ID NO: 1407615 - DNA, 25 bp, Homo sapien
tatgctgggtgggggccatcaatgg

SEQ ID NO: 1407616 - DNA, 25 bp, Homo sapien
ctatgctgggtgggggccatcaatg

SEQ ID NO: 1407617 - DNA, 25 bp, Homo sapien
atgctgggtgggggccatcaatggg

SEQ ID NO: 1407618 - DNA, 25 bp, Homo sapien
caggaaaggtcttgcgtgctgccct

SEQ ID NO: 1407619 - DNA, 25 bp, Homo sapien
gaaaggtcttgcgtgctgccctgcc

SEQ ID NO: 1407620 - DNA, 25 bp, Homo sapien
gggcaggaaaggtcttgcgtgctgc

SEQ ID NO: 1407621 - DNA, 25 bp, Homo sapien
gcaggaaaggtcttgcgtgctgccc

SEQ ID NO: 1407622 - DNA, 25 bp, Homo sapien
ctaccgcatgccagggactgggctg

SEQ ID NO: 1407623 - DNA, 25 bp, Homo sapien
taccgcatgccagggactgggctgg

SEQ ID NO: 1407624 - DNA, 25 bp, Homo sapien
tgtggaacgcgttcttgccctgaga

SEQ ID NO: 1407625 - DNA, 25 bp, Homo sapien
ttcatccccttgagaagttaaagcg

SEQ ID NO: 1407626 - DNA, 25 bp, Homo sapien
cctgagccccttgagaaaataagcc

SEQ ID NO: 1407627 - DNA, 25 bp, Homo sapien
agttaaagcgacagcaggaggcact

SEQ ID NO: 1407628 - DNA, 25 bp, Homo sapien
tgtgtttctacagctccttggttgg

SEQ ID NO: 1407629 - DNA, 25 bp, Homo sapien
ctgtgtttctacagctccttggttg

SEQ ID NO: 1407630 - DNA, 25 bp, Homo sapien
tctgtgtttctacagctccttggtt

SEQ ID NO: 1407631 - DNA, 25 bp, Homo sapien
tgggttcttctggacacccgtccca

SEQ ID NO: 1407632 - DNA, 25 bp, Homo sapien
aaagttttgatgaaagattgagcct

SEQ ID NO: 1407633 - DNA, 25 bp, Homo sapien
tgacagaaggacaattgcaggaaag

SEQ ID NO: 1407634 - DNA, 25 bp, Homo sapien
gctggcggtggtagaagtgggttct

SEQ ID NO: 1407635 - DNA, 25 bp, Homo sapien
gcggctgaggaatcttctgggtccc

SEQ ID NO: 1407636 - DNA, 25 bp, Homo sapien
cttctactcaggcacgtcctggggt

SEQ ID NO: 1407637 - DNA, 25 bp, Homo sapien
gcagctctcgctgagacctgggtcc

SEQ ID NO: 1407638 - DNA, 25 bp, Homo sapien
tcctcttgaaaccttagctcataac

SEQ ID NO: 1407639 - DNA, 25 bp, Homo sapien
ctcatcatctgcagcggggaaggac

SEQ ID NO: 1407640 - DNA, 25 bp, Homo sapien
cacactgaagaacccaggcccctcg

SEQ ID NO: 1407641 - DNA, 25 bp, Homo sapien
aacgtaggctgtgggaaagactgac

SEQ ID NO: 1407642 - DNA, 25 bp, Homo sapien
gggatgagaggtgggaacgtaggct

SEQ ID NO: 1407643 - DNA, 25 bp, Homo sapien
tggctgacacccgttgggactaagc

SEQ ID NO: 1407644 - DNA, 25 bp, Homo sapien
ttgagtcaccagcttgagtccctgc

SEQ ID NO: 1407645 - DNA, 25 bp, Homo sapien
taagctggtttgtactgaacccaag

SEQ ID NO: 1407646 - DNA, 25 bp, Homo sapien
ccatgcagctgtcgggcttgagtca

SEQ ID NO: 1407647 - DNA, 25 bp, Homo sapien
ttctcccaaacgcactgctgagtaa

SEQ ID NO: 1407648 - DNA, 25 bp, Homo sapien
agctggagggactttctcacggatg

SEQ ID NO: 1407649 - DNA, 25 bp, Homo sapien
gatccaatctcccagtccatgactg

SEQ ID NO: 1407650 - DNA, 25 bp, Homo sapien
tgctgagtaacaaaggcccaggtaa

SEQ ID NO: 1407651 - DNA, 25 bp, Homo sapien
aaggccagcttgtgggtgccgttga

SEQ ID NO: 1407652 - DNA, 25 bp, Homo sapien
catctggaaccatgtgggaggccaa

SEQ ID NO: 1407653 - DNA, 25 bp, Homo sapien
gggtgccgttgagctcatctggaac

SEQ ID NO: 1407654 - DNA, 25 bp, Homo sapien
cagcttgtgggtgccgttgagctca

SEQ ID NO: 1407655 - DNA, 25 bp, Homo sapien
ttagaacggtgactggaaggactgt

SEQ ID NO: 1407656 - DNA, 25 bp, Homo sapien
tgtggattcagcagcaaacgaaggg

SEQ ID NO: 1407657 - DNA, 25 bp, Homo sapien
tatctacctgcccaatgagccagag

SEQ ID NO: 1407658 - DNA, 25 bp, Homo sapien
gtataactcagttccatgctgcaga

SEQ ID NO: 1407659 - DNA, 25 bp, Homo sapien
tcaagtcccctttagagagaccctg

SEQ ID NO: 1407660 - DNA, 25 bp, Homo sapien
aaagcaagaccctgcaagaggcatc

SEQ ID NO: 1407661 - DNA, 25 bp, Homo sapien
acaaagggtagaagctagagggcca

SEQ ID NO: 1407662 - DNA, 25 bp, Homo sapien
tgtataggctacagggacaaagggt

SEQ ID NO: 1407663 - DNA, 25 bp, Homo sapien
cacacaacgtcatccgccgtcatgg

SEQ ID NO: 1407664 - DNA, 25 bp, Homo sapien
acacaacgtcatccgccgtcatggt

SEQ ID NO: 1407665 - DNA, 25 bp, Homo sapien
cggacgtagaccctggtgcacacaa

SEQ ID NO: 1407666 - DNA, 25 bp, Homo sapien
tctcggacgtagaccctggtgcaca

SEQ ID NO: 1407667 - DNA, 25 bp, Homo sapien
gttccccatcgttggtcagttctct

SEQ ID NO: 1407668 - DNA, 25 bp, Homo sapien
tccccatcgttggtcagttctctgg

SEQ ID NO: 1407669 - DNA, 25 bp, Homo sapien
gttctctggtccacgaggtcttggg

SEQ ID NO: 1407670 - DNA, 25 bp, Homo sapien
catcgttggtcagttctctggtcca

SEQ ID NO: 1407671 - DNA, 25 bp, Homo sapien
ccactgctggcttggacgctgcagc

SEQ ID NO: 1407672 - DNA, 25 bp, Homo sapien
tccccaaccttgaagttaatctctg

SEQ ID NO: 1407673 - DNA, 25 bp, Homo sapien
gccacagcaatcttcctcagcatca

SEQ ID NO: 1407674 - DNA, 25 bp, Homo sapien
taatctctgtggtgcgcacggtggt

SEQ ID NO: 1407675 - DNA, 25 bp, Homo sapien
aagccaatcaaggttgggtatagtg

SEQ ID NO: 1407676 - DNA, 25 bp, Homo sapien
tcaaaagccaatcaaggttgggtat

SEQ ID NO: 1407677 - DNA, 25 bp, Homo sapien
aaaagccaatcaaggttgggtatag

SEQ ID NO: 1407678 - DNA, 25 bp, Homo sapien
ttcaaaagccaatcaaggttgggta

SEQ ID NO: 1407679 - DNA, 25 bp, Homo sapien
tccagttgccagagaagttgggcat

SEQ ID NO: 1407680 - DNA, 25 bp, Homo sapien
caattcctcgaagttttccgatcgg

SEQ ID NO: 1407681 - DNA, 25 bp, Homo sapien
tccgatcggatgattttccagttgc

SEQ ID NO: 1407682 - DNA, 25 bp, Homo sapien
tcctcgaagttttccgatcggatga

SEQ ID NO: 1407683 - DNA, 25 bp, Homo sapien
ggtccccgtagactcctaggctgga

SEQ ID NO: 1407684 - DNA, 25 bp, Homo sapien
gcggtccccgtagactcctaggctg

SEQ ID NO: 1407685 - DNA, 25 bp, Homo sapien
cggtccccgtagactcctaggctgg

SEQ ID NO: 1407686 - DNA, 25 bp, Homo sapien
agtcaaaagagacgtcgccgtcgcc

SEQ ID NO: 1407687 - DNA, 25 bp, Homo sapien
ttagtcaaaagagacgtcgccgtcg

SEQ ID NO: 1407688 - DNA, 25 bp, Homo sapien
tttagtcaaaagagacgtcgccgtc

SEQ ID NO: 1407689 - DNA, 25 bp, Homo sapien
tagtcaaaagagacgtcgccgtcgc

SEQ ID NO: 1407690 - DNA, 25 bp, Homo sapien
caagacaagtccagggacaacccca

SEQ ID NO: 1407691 - DNA, 25 bp, Homo sapien
caagtccagggacaaccccaaagct

SEQ ID NO: 1407692 - DNA, 25 bp, Homo sapien
gaaccaagacaagtccagggacaac

SEQ ID NO: 1407693 - DNA, 25 bp, Homo sapien
ctggaaccaagacaagtccagggac

SEQ ID NO: 1407694 - DNA, 25 bp, Homo sapien
gatcttgagccgtagctggccctag

SEQ ID NO: 1407695 - DNA, 25 bp, Homo sapien
gactcggtgcattcaactccttggt

SEQ ID NO: 1407696 - DNA, 25 bp, Homo sapien
ggccctagctccattgaaccctgaa

SEQ ID NO: 1407697 - DNA, 25 bp, Homo sapien
tgggaccactccgtactcagagagg

SEQ ID NO: 1407698 - DNA, 25 bp, Homo sapien
tttctctgtcgcttcactcccgaga

SEQ ID NO: 1407699 - DNA, 25 bp, Homo sapien
cggaaaccgcagaggagcgaagcct

SEQ ID NO: 1407700 - DNA, 25 bp, Homo sapien
ccctcccttggagagcggctttgaa

SEQ ID NO: 1407701 - DNA, 25 bp, Homo sapien
tgcgccaccacctagataggcggga

SEQ ID NO: 1407702 - DNA, 25 bp, Homo sapien
cttgagggcacttatggtctctgtg

SEQ ID NO: 1407703 - DNA, 25 bp, Homo sapien
tgaccgtcaggtgctggtctcccag

SEQ ID NO: 1407704 - DNA, 25 bp, Homo sapien
tgtgggccaaatctcctcataagct

SEQ ID NO: 1407705 - DNA, 25 bp, Homo sapien
tcataagctatctgaccgtcaggtg

SEQ ID NO: 1407706 - DNA, 25 bp, Homo sapien
gcattgtatgtaccctttgaaagaa

SEQ ID NO: 1407707 - DNA, 25 bp, Homo sapien
cccagcactgtgcaagagtttccat

SEQ ID NO: 1407708 - DNA, 25 bp, Homo sapien
gtgtgcttgtccttccatgccaaat

SEQ ID NO: 1407709 - DNA, 25 bp, Homo sapien
ttgaaagaaagcatagaggctgggc

SEQ ID NO: 1407710 - DNA, 25 bp, Homo sapien
gctgcagtgtagtggcttgatcttg

SEQ ID NO: 1407711 - DNA, 25 bp, Homo sapien
ggctcaccgcagcttccgcctcctg

SEQ ID NO: 1407712 - DNA, 25 bp, Homo sapien
cttggctcaccgcagcttccgcctc

SEQ ID NO: 1407713 - DNA, 25 bp, Homo sapien
ggctgcagtgtagtggcttgatctt

SEQ ID NO: 1407714 - DNA, 25 bp, Homo sapien
ctggccaagcactggttcttaaggg

SEQ ID NO: 1407715 - DNA, 25 bp, Homo sapien
cagagagatgagtagtgctgaagcc

SEQ ID NO: 1407716 - DNA, 25 bp, Homo sapien
gctgaagcctaaaatctcaaaatac

SEQ ID NO: 1407717 - DNA, 25 bp, Homo sapien
caagcactggttcttaagggcagag

SEQ ID NO: 1407718 - DNA, 25 bp, Homo sapien
gggtttgtccactatcaactggatg

SEQ ID NO: 1407719 - DNA, 25 bp, Homo sapien
caggcacccttgctaggtaagctgg

SEQ ID NO: 1407720 - DNA, 25 bp, Homo sapien
gagccatcacatccaacaagacctt

SEQ ID NO: 1407721 - DNA, 25 bp, Homo sapien
gatctgtcttagtctctgtgttggg

SEQ ID NO: 1407722 - DNA, 25 bp, Homo sapien
agtgcaggcctcaacaagaccatgt

SEQ ID NO: 1407723 - DNA, 25 bp, Homo sapien
tgcaccggcctgacaaagttagttt

SEQ ID NO: 1407724 - DNA, 25 bp, Homo sapien
tgtaccaccaaaagctggcagcagg

SEQ ID NO: 1407725 - DNA, 25 bp, Homo sapien
cattaaatatgttgggccccacagg

SEQ ID NO: 1407726 - DNA, 25 bp, Homo sapien
gacacaggctagatacagactctga

SEQ ID NO: 1407727 - DNA, 25 bp, Homo sapien
catatgtccacccaagtgataaggc

SEQ ID NO: 1407728 - DNA, 25 bp, Homo sapien
tagagaacgggaattcgccatgttg

SEQ ID NO: 1407729 - DNA, 25 bp, Homo sapien
gagaactaaagctcaccagcgatgg

SEQ ID NO: 1407730 - DNA, 25 bp, Homo sapien
actcgacttcaaccaacttatatag

SEQ ID NO: 1407731 - DNA, 25 bp, Homo sapien
gctcttcccactcgacttcaaccaa

SEQ ID NO: 1407732 - DNA, 25 bp, Homo sapien
agtctgtagggggattccgggctag

SEQ ID NO: 1407733 - DNA, 25 bp, Homo sapien
gggattccgggctaggtgctcttcc

SEQ ID NO: 1407734 - DNA, 25 bp, Homo sapien
cagaattctggtggggtcctactcc

SEQ ID NO: 1407735 - DNA, 25 bp, Homo sapien
tcctactccttatgtaatttcaggg

SEQ ID NO: 1407736 - DNA, 25 bp, Homo sapien
tgcctccgctacacagtttcttctg

SEQ ID NO: 1407737 - DNA, 25 bp, Homo sapien
tcagcagcctacaaagacagaattc

SEQ ID NO: 1407738 - DNA, 25 bp, Homo sapien
tcagagtctggctaggggcatcaac

SEQ ID NO: 1407739 - DNA, 25 bp, Homo sapien
tggatctctacaaccacaggacttc

SEQ ID NO: 1407740 - DNA, 25 bp, Homo sapien
gggcatcaacgagagccatgtccaa

SEQ ID NO: 1407741 - DNA, 25 bp, Homo sapien
caacgagagccatgtccaagatggg

SEQ ID NO: 1407742 - DNA, 25 bp, Homo sapien
attctccgggcagtcagccttccgg

SEQ ID NO: 1407743 - DNA, 25 bp, Homo sapien
tccgggcagtcagccttccggttga

SEQ ID NO: 1407744 - DNA, 25 bp, Homo sapien
ctgaagggctttgaagtcgttgtgg

SEQ ID NO: 1407745 - DNA, 25 bp, Homo sapien
catggtggcattctccgggcagtca

SEQ ID NO: 1407746 - DNA, 25 bp, Homo sapien
aaggaagactgaagtggaacccctg

SEQ ID NO: 1407747 - DNA, 25 bp, Homo sapien
gagagtggtgagaaggaagactgaa

SEQ ID NO: 1407748 - DNA, 25 bp, Homo sapien
aagactgaagtggaacccctgcatt

SEQ ID NO: 1407749 - DNA, 25 bp, Homo sapien
gtgggaagagagtggtgagaaggaa

SEQ ID NO: 1407750 - DNA, 25 bp, Homo sapien
tgaaaaccagacgtagtcccgtgaa

SEQ ID NO: 1407751 - DNA, 25 bp, Homo sapien
tgctaccaatgaggacaaccgaaga

SEQ ID NO: 1407752 - DNA, 25 bp, Homo sapien
ttagtctcataaccccagcttggca

SEQ ID NO: 1407753 - DNA, 25 bp, Homo sapien
tataccctgtttggactcatactgc

SEQ ID NO: 1407754 - DNA, 25 bp, Homo sapien
cttgccccaggctactttttgcttg

SEQ ID NO: 1407755 - DNA, 25 bp, Homo sapien
ttgggacgagctctccacctttcct

SEQ ID NO: 1407756 - DNA, 25 bp, Homo sapien
tttttctatgcagattcccagttcc

SEQ ID NO: 1407757 - DNA, 25 bp, Homo sapien
agcttaggctccaactcgcaaggtt

SEQ ID NO: 1407758 - DNA, 25 bp, Homo sapien
ggccttcttcaacaactgatagatt

SEQ ID NO: 1407759 - DNA, 25 bp, Homo sapien
tccctccacaaacgttggtgtcttc

SEQ ID NO: 1407760 - DNA, 25 bp, Homo sapien
tagtgatatcctttgctgaaaaatg

SEQ ID NO: 1407761 - DNA, 25 bp, Homo sapien
aatgatttagacctctctccatcca

SEQ ID NO: 1407762 - DNA, 25 bp, Homo sapien
ctccacctggttcggtagtccacaa

SEQ ID NO: 1407763 - DNA, 25 bp, Homo sapien
tggttcggtagtccacaatgtggca

SEQ ID NO: 1407764 - DNA, 25 bp, Homo sapien
ttcggtagtccacaatgtggcaggg

SEQ ID NO: 1407765 - DNA, 25 bp, Homo sapien
taccactccacctggttcggtagtc

SEQ ID NO: 1407766 - DNA, 25 bp, Homo sapien
gcaacagaatcagccttttttgaag

SEQ ID NO: 1407767 - DNA, 25 bp, Homo sapien
cgttctaagagcctccgcttcttga

SEQ ID NO: 1407768 - DNA, 25 bp, Homo sapien
gagtgcaacttaggcgccttgctag

SEQ ID NO: 1407769 - DNA, 25 bp, Homo sapien
tttggaagggcactctggaactccc

SEQ ID NO: 1407770 - DNA, 25 bp, Homo sapien
gaagagtggcttatggatgaaaaga

SEQ ID NO: 1407771 - DNA, 25 bp, Homo sapien
tgtccaacatgtggaggtctgtagt

SEQ ID NO: 1407772 - DNA, 25 bp, Homo sapien
gaggatgtgggactcattctctgct

SEQ ID NO: 1407773 - DNA, 25 bp, Homo sapien
cattctctgctgaatcctactgtcc

SEQ ID NO: 1407774 - DNA, 25 bp, Homo sapien
aagtgatcctggtaattgagctcct

SEQ ID NO: 1407775 - DNA, 25 bp, Homo sapien
gatcctggtaattgagctcctaggc

SEQ ID NO: 1407776 - DNA, 25 bp, Homo sapien
tgatcctggtaattgagctcctagg

SEQ ID NO: 1407777 - DNA, 25 bp, Homo sapien
gtgatcctggtaattgagctcctag

SEQ ID NO: 1407778 - DNA, 25 bp, Homo sapien
gaggtaagctcgatctccgtaggac

SEQ ID NO: 1407779 - DNA, 25 bp, Homo sapien
ggcttatagagctcgaaccctctga

SEQ ID NO: 1407780 - DNA, 25 bp, Homo sapien
gcaagcctggattctagtgaagccc

SEQ ID NO: 1407781 - DNA, 25 bp, Homo sapien
taagaggctagaacacgtgcgatct

SEQ ID NO: 1407782 - DNA, 25 bp, Homo sapien
gatccccgcggtacagatcgatctc

SEQ ID NO: 1407783 - DNA, 25 bp, Homo sapien
gataagcatacttcggatccccgcg

SEQ ID NO: 1407784 - DNA, 25 bp, Homo sapien
agatcgatctctcacgctcacaaac

SEQ ID NO: 1407785 - DNA, 25 bp, Homo sapien
ctggataagcatacttcggatcccc

SEQ ID NO: 1407786 - DNA, 25 bp, Homo sapien
tccggagccggatgcggaaatcggt

SEQ ID NO: 1407787 - DNA, 25 bp, Homo sapien
gaccccaggtagtgaggccagtgat

SEQ ID NO: 1407788 - DNA, 25 bp, Homo sapien
ctaagaccggaagcgtccggagccg

SEQ ID NO: 1407789 - DNA, 25 bp, Homo sapien
ttccgagtgtgtgaggagcggcagt

SEQ ID NO: 1407790 - DNA, 25 bp, Homo sapien
gagcatgtcaggtgttccaagaaca

SEQ ID NO: 1407791 - DNA, 25 bp, Homo sapien
tagaatcctgcctcccctatgatgt

SEQ ID NO: 1407792 - DNA, 25 bp, Homo sapien
ggaaccatgctgcaactatgttgaa

SEQ ID NO: 1407793 - DNA, 25 bp, Homo sapien
aaatgcgtggacattggaaccatgc

SEQ ID NO: 1407794 - DNA, 25 bp, Homo sapien
gatggactgaaaccaccacagctgg

SEQ ID NO: 1407795 - DNA, 25 bp, Homo sapien
catggcaggaagcattggatggact

SEQ ID NO: 1407796 - DNA, 25 bp, Homo sapien
cagagaactgactcggcttagcagg

SEQ ID NO: 1407797 - DNA, 25 bp, Homo sapien
acagagttaagccaccagagtcggg

SEQ ID NO: 1407798 - DNA, 25 bp, Homo sapien
cctgggcctcgggttgtaaactgct

SEQ ID NO: 1407799 - DNA, 25 bp, Homo sapien
tccacggcgtgtgccctggccttta

SEQ ID NO: 1407800 - DNA, 25 bp, Homo sapien
ggactatctcaggtacaggtcagtg

SEQ ID NO: 1407801 - DNA, 25 bp, Homo sapien
atgggactattcactggaggcctcg

SEQ ID NO: 1407802 - DNA, 25 bp, Homo sapien
cagatttaacaatgggggagttata

SEQ ID NO: 1407803 - DNA, 25 bp, Homo sapien
gggagttatataccaacttaagcca

SEQ ID NO: 1407804 - DNA, 25 bp, Homo sapien
ggagttatataccaacttaagccac

SEQ ID NO: 1407805 - DNA, 25 bp, Homo sapien
agtcagatttaacaatgggggagtt

SEQ ID NO: 1407806 - DNA, 25 bp, Homo sapien
tccaggttacccatggggagggtga

SEQ ID NO: 1407807 - DNA, 25 bp, Homo sapien
actgaacagggctgtttccatcctc

SEQ ID NO: 1407808 - DNA, 25 bp, Homo sapien
catctctcccgcttcatggctcttg

SEQ ID NO: 1407809 - DNA, 25 bp, Homo sapien
tgatagtggatagggcactgaacag

SEQ ID NO: 1407810 - DNA, 25 bp, Homo sapien
atcagagactggtggagagagccca

SEQ ID NO: 1407811 - DNA, 25 bp, Homo sapien
aagagcatcgaaggggatcagagac

SEQ ID NO: 1407812 - DNA, 25 bp, Homo sapien
gggttgatggtgaagagcatcgaag

SEQ ID NO: 1407813 - DNA, 25 bp, Homo sapien
gatcagagactggtggagagagccc

SEQ ID NO: 1407814 - DNA, 25 bp, Homo sapien
caactcagaatctgcaggccctgcc

SEQ ID NO: 1407815 - DNA, 25 bp, Homo sapien
gtcataaactcaggaaagaagcttc

SEQ ID NO: 1407816 - DNA, 25 bp, Homo sapien
gattaggggtgccattctaccacac

SEQ ID NO: 1407817 - DNA, 25 bp, Homo sapien
gagggccgccttaaggccagctaac

SEQ ID NO: 1407818 - DNA, 25 bp, Homo sapien
tctgaaaaagaagtgcctcagcctt

SEQ ID NO: 1407819 - DNA, 25 bp, Homo sapien
tcataaagtgctctttattggcatc

SEQ ID NO: 1407820 - DNA, 25 bp, Homo sapien
ttccgggtctccttgatccccatgg

SEQ ID NO: 1407821 - DNA, 25 bp, Homo sapien
cttgtatttccgggtctccttgatc

SEQ ID NO: 1407822 - DNA, 25 bp, Homo sapien
tgtatttccgggtctccttgatccc

SEQ ID NO: 1407823 - DNA, 25 bp, Homo sapien
tatttccgggtctccttgatcccca

SEQ ID NO: 1407824 - DNA, 25 bp, Homo sapien
cgtttcagggacgatgccatcagct

SEQ ID NO: 1407825 - DNA, 25 bp, Homo sapien
gctctcctgcttcagtaaatctcca

SEQ ID NO: 1407826 - DNA, 25 bp, Homo sapien
taaatctccactcgatctcagtggg

SEQ ID NO: 1407827 - DNA, 25 bp, Homo sapien
gatcgtgtggagactcgtacccgct

SEQ ID NO: 1407828 - DNA, 25 bp, Homo sapien
ggtccctcttaatttccagagcatc

SEQ ID NO: 1407829 - DNA, 25 bp, Homo sapien
ttaatttccagagcatccaacccac

SEQ ID NO: 1407830 - DNA, 25 bp, Homo sapien
agatggtccctcttaatttccagag

SEQ ID NO: 1407831 - DNA, 25 bp, Homo sapien
ccctcttaatttccagagcatccaa

SEQ ID NO: 1407832 - DNA, 25 bp, Homo sapien
ccagagggtgagaaaccctctgccc

SEQ ID NO: 1407833 - DNA, 25 bp, Homo sapien
agggtgagaaaccctctgcccagag

SEQ ID NO: 1407834 - DNA, 25 bp, Homo sapien
agagggtgagaaaccctctgcccag

SEQ ID NO: 1407835 - DNA, 25 bp, Homo sapien
ctctgcccagagccccgttgcttgc

SEQ ID NO: 1407836 - DNA, 25 bp, Homo sapien
tgtccataggatccacaagtttgac

SEQ ID NO: 1407837 - DNA, 25 bp, Homo sapien
ctgtccataggatccacaagtttga

SEQ ID NO: 1407838 - DNA, 25 bp, Homo sapien
cactagggatcatggttccccggta

SEQ ID NO: 1407839 - DNA, 25 bp, Homo sapien
ccccggtaatccatggtcttgccaa

SEQ ID NO: 1407840 - DNA, 25 bp, Homo sapien
catggttccccggtaatccatggtc

SEQ ID NO: 1407841 - DNA, 25 bp, Homo sapien
agcaagggggcttcactagggatca

SEQ ID NO: 1407842 - DNA, 25 bp, Homo sapien
tgcccttgctactcggcgcattcag

SEQ ID NO: 1407843 - DNA, 25 bp, Homo sapien
gggtttgcccttgctactcggcgca

SEQ ID NO: 1407844 - DNA, 25 bp, Homo sapien
aggggtttgcccttgctactcggcg

SEQ ID NO: 1407845 - DNA, 25 bp, Homo sapien
gagtgtcagaaagcacggggtgtga

SEQ ID NO: 1407846 - DNA, 25 bp, Homo sapien
tcgctgccggataacttgaaccact

SEQ ID NO: 1407847 - DNA, 25 bp, Homo sapien
gaccacccagtttcgctgccggata

SEQ ID NO: 1407848 - DNA, 25 bp, Homo sapien
cccagtttcgctgccggataacttg

SEQ ID NO: 1407849 - DNA, 25 bp, Homo sapien
gataacttgaaccactttgccctgc

SEQ ID NO: 1407850 - DNA, 25 bp, Homo sapien
cagaacagataccagtcttcatcag

SEQ ID NO: 1407851 - DNA, 25 bp, Homo sapien
gggctcatcccatagcggtaatggg

SEQ ID NO: 1407852 - DNA, 25 bp, Homo sapien
tcagagatgggttccacaaccactg

SEQ ID NO: 1407853 - DNA, 25 bp, Homo sapien
cgccgcctgatccatggggggttct

SEQ ID NO: 1407854 - DNA, 25 bp, Homo sapien
cttggatgccaaggccagcagggca

SEQ ID NO: 1407855 - DNA, 25 bp, Homo sapien
gccaaggccagcagggcagaaagac

SEQ ID NO: 1407856 - DNA, 25 bp, Homo sapien
ccaaggccagcagggcagaaagacg

SEQ ID NO: 1407857 - DNA, 25 bp, Homo sapien
aggccagcagggcagaaagacgcat

SEQ ID NO: 1407858 - DNA, 25 bp, Homo sapien
agcaaaacgctcgaaaccttccttg

SEQ ID NO: 1407859 - DNA, 25 bp, Homo sapien
aaacgctcgaaaccttccttgtcag

SEQ ID NO: 1407860 - DNA, 25 bp, Homo sapien
acgctcgaaaccttccttgtcagct

SEQ ID NO: 1407861 - DNA, 25 bp, Homo sapien
gccagcaaaacgctcgaaaccttcc

SEQ ID NO: 1407862 - DNA, 25 bp, Homo sapien
tacaatggcataaagagccctggac

SEQ ID NO: 1407863 - DNA, 25 bp, Homo sapien
gaatacttgcaacttaccacgtgcc

SEQ ID NO: 1407864 - DNA, 25 bp, Homo sapien
aggatggaacgctggcatacggcca

SEQ ID NO: 1407865 - DNA, 25 bp, Homo sapien
caatgtatgaacagcaggataggaa

SEQ ID NO: 1407866 - DNA, 25 bp, Homo sapien
caaggtgcaaaataatgtattatta

SEQ ID NO: 1407867 - DNA, 25 bp, Homo sapien
aggtgcaaaataatgtattattatc

SEQ ID NO: 1407868 - DNA, 25 bp, Homo sapien
ggtgcaaaataatgtattattatcc

SEQ ID NO: 1407869 - DNA, 25 bp, Homo sapien
gcaaggtgcaaaataatgtattatt

SEQ ID NO: 1407870 - DNA, 25 bp, Homo sapien
tattaacggtttatctgaacagtga

SEQ ID NO: 1407871 - DNA, 25 bp, Homo sapien
ctgtttgggaggtctgttaattcca

SEQ ID NO: 1407872 - DNA, 25 bp, Homo sapien
taaaggcctgatgttattttcggaa

SEQ ID NO: 1407873 - DNA, 25 bp, Homo sapien
gtaacgtttgcattttctaaccatg

SEQ ID NO: 1407874 - DNA, 25 bp, Homo sapien
aggtgaggttgccagatgcatcgta

SEQ ID NO: 1407875 - DNA, 25 bp, Homo sapien
tgttcctgtgagtattcaacaaatg

SEQ ID NO: 1407876 - DNA, 25 bp, Homo sapien
gctgggaatttcattgccggcattt

SEQ ID NO: 1407877 - DNA, 25 bp, Homo sapien
ttcaattaatgctgactggcctaag

SEQ ID NO: 1407878 - DNA, 25 bp, Homo sapien
cgctccaaacttccggtgcaaataa

SEQ ID NO: 1407879 - DNA, 25 bp, Homo sapien
gggaggcgactgagccatggccagg

SEQ ID NO: 1407880 - DNA, 25 bp, Homo sapien
taaaccctggggaggcgactgagcc

SEQ ID NO: 1407881 - DNA, 25 bp, Homo sapien
tggccagggaaaaggataggctctt

SEQ ID NO: 1407882 - DNA, 25 bp, Homo sapien
gcacctctagggcgggcggccctca

SEQ ID NO: 1407883 - DNA, 25 bp, Homo sapien
cggacgggcacctctagggcgggcg

SEQ ID NO: 1407884 - DNA, 25 bp, Homo sapien
gacgggcacctctagggcgggcggc

SEQ ID NO: 1407885 - DNA, 25 bp, Homo sapien
tctcggacgggcacctctagggcgg

SEQ ID NO: 1407886 - DNA, 25 bp, Homo sapien
cactttccgcggcacttcggatttt

SEQ ID NO: 1407887 - DNA, 25 bp, Homo sapien
tgtaaaacggaagctcaaccacgaa

SEQ ID NO: 1407888 - DNA, 25 bp, Homo sapien
cacgcccgtcgactttctgggagtt

SEQ ID NO: 1407889 - DNA, 25 bp, Homo sapien
ggattttcagcacatgggccctcag

SEQ ID NO: 1407890 - DNA, 25 bp, Homo sapien
gaaacgtgggcccttccaatgctag

SEQ ID NO: 1407891 - DNA, 25 bp, Homo sapien
tcgggaatcgaaaggcaagctggtt

SEQ ID NO: 1407892 - DNA, 25 bp, Homo sapien
tagtccgccgctagaaagctggaaa

SEQ ID NO: 1407893 - DNA, 25 bp, Homo sapien
cttcctgttcaaggcaaagggccgc

SEQ ID NO: 1407894 - DNA, 25 bp, Homo sapien
cagggtaaaagagacgagactgtag

SEQ ID NO: 1407895 - DNA, 25 bp, Homo sapien
aaagagacgagactgtagagaggca

SEQ ID NO: 1407896 - DNA, 25 bp, Homo sapien
ggtaaaagagacgagactgtagaga

SEQ ID NO: 1407897 - DNA, 25 bp, Homo sapien
acgagactgtagagaggcatagaga

SEQ ID NO: 1407898 - DNA, 25 bp, Homo sapien
aaagtcatcaagccccaaatagaag

SEQ ID NO: 1407899 - DNA, 25 bp, Homo sapien
agtcatcaagccccaaatagaaggg

SEQ ID NO: 1407900 - DNA, 25 bp, Homo sapien
catcaagccccaaatagaaggggag

SEQ ID NO: 1407901 - DNA, 25 bp, Homo sapien
caagccccaaatagaaggggagcct

SEQ ID NO: 1407902 - DNA, 25 bp, Homo sapien
tcctttatgtctgggtgatatatat

SEQ ID NO: 1407903 - DNA, 25 bp, Homo sapien
tacaagctgtcccactttccctgaa

SEQ ID NO: 1407904 - DNA, 25 bp, Homo sapien
aaaaggacagctaggagtcttccca

SEQ ID NO: 1407905 - DNA, 25 bp, Homo sapien
acaggagctcagaaggaggccgccc

SEQ ID NO: 1407906 - DNA, 25 bp, Homo sapien
cagaggtccagaatgcctaggagag

SEQ ID NO: 1407907 - DNA, 25 bp, Homo sapien
aacccagaggtccagaatgcctagg

SEQ ID NO: 1407908 - DNA, 25 bp, Homo sapien
gatcccaacccagaggtccagaatg

SEQ ID NO: 1407909 - DNA, 25 bp, Homo sapien
attcctacccctgatcccaacccag

SEQ ID NO: 1407910 - DNA, 25 bp, Homo sapien
agcggaaggaacacagtggcctcaa

SEQ ID NO: 1407911 - DNA, 25 bp, Homo sapien
aagcggaaggaacacagtggcctca

SEQ ID NO: 1407912 - DNA, 25 bp, Homo sapien
caagcggaaggaacacagtggcctc

SEQ ID NO: 1407913 - DNA, 25 bp, Homo sapien
gcggaaggaacacagtggcctcaac

SEQ ID NO: 1407914 - DNA, 25 bp, Homo sapien
ctgactcagatcataggagtatggg

SEQ ID NO: 1407915 - DNA, 25 bp, Homo sapien
gggagaagacatggctctgactcag

SEQ ID NO: 1407916 - DNA, 25 bp, Homo sapien
ggacctagaggtgagagccaggtgg

SEQ ID NO: 1407917 - DNA, 25 bp, Homo sapien
tatggggacctagaggtgagagcca

SEQ ID NO: 1407918 - DNA, 25 bp, Homo sapien
gaaaagtgagtagaagaggagagca

SEQ ID NO: 1407919 - DNA, 25 bp, Homo sapien
gttcccagtttgcaggccatggcca

SEQ ID NO: 1407920 - DNA, 25 bp, Homo sapien
tgggggctcctcttgaaacattggt

SEQ ID NO: 1407921 - DNA, 25 bp, Homo sapien
agtagcacccagacagcagcaggaa

SEQ ID NO: 1407922 - DNA, 25 bp, Homo sapien
tcctcttctccgagagtggccggtc

SEQ ID NO: 1407923 - DNA, 25 bp, Homo sapien
agtgccggtctcctaggagagccca

SEQ ID NO: 1407924 - DNA, 25 bp, Homo sapien
agggttaatggtgtggccttggcct

SEQ ID NO: 1407925 - DNA, 25 bp, Homo sapien
cagccagtgccggtctcctaggaga

SEQ ID NO: 1407926 - DNA, 25 bp, Homo sapien
tgatgcctggggcctcagcatcttc

SEQ ID NO: 1407927 - DNA, 25 bp, Homo sapien
ctcatgatctctgatgcctggggcc

SEQ ID NO: 1407928 - DNA, 25 bp, Homo sapien
ctgatgcctggggcctcagcatctt

SEQ ID NO: 1407929 - DNA, 25 bp, Homo sapien
atgatctctgatgcctggggcctca

SEQ ID NO: 1407930 - DNA, 25 bp, Homo sapien
cccccggccagagccgggctcagag

SEQ ID NO: 1407931 - DNA, 25 bp, Homo sapien
agccgggctcagagggggtgctatt

SEQ ID NO: 1407932 - DNA, 25 bp, Homo sapien
aggcccccggccagagccgggctca

SEQ ID NO: 1407933 - DNA, 25 bp, Homo sapien
gctcagagggggtgctattcttttc

SEQ ID NO: 1407934 - DNA, 25 bp, Homo sapien
ctgcctccttgggacgtttaggaga

SEQ ID NO: 1407935 - DNA, 25 bp, Homo sapien
tgcctccttgggacgtttaggagag

SEQ ID NO: 1407936 - DNA, 25 bp, Homo sapien
ttcttatcaccgtcaccctctgcag

SEQ ID NO: 1407937 - DNA, 25 bp, Homo sapien
tgcagcttcgggctctggttcaggc

SEQ ID NO: 1407938 - DNA, 25 bp, Homo sapien
tcttcaacgctcctttctcgttctt

SEQ ID NO: 1407939 - DNA, 25 bp, Homo sapien
ttggctggctcatcaatgaccagct

SEQ ID NO: 1407940 - DNA, 25 bp, Homo sapien
ggtaaacccactggccgggcaggca

SEQ ID NO: 1407941 - DNA, 25 bp, Homo sapien
gtaaacccactggccgggcaggcag

SEQ ID NO: 1407942 - DNA, 25 bp, Homo sapien
tcacactaggcccaacaaaggcctg

SEQ ID NO: 1407943 - DNA, 25 bp, Homo sapien
tgattagctcctaccctgaaagccc

SEQ ID NO: 1407944 - DNA, 25 bp, Homo sapien
tcctggaagcctttgtggaaagagt

SEQ ID NO: 1407945 - DNA, 25 bp, Homo sapien
tgtgtcctatactcacactaggccc

SEQ ID NO: 1407946 - DNA, 25 bp, Homo sapien
cagtagggttgttctcgatctccca

SEQ ID NO: 1407947 - DNA, 25 bp, Homo sapien
tccttggattcctcgtaagggaaga

SEQ ID NO: 1407948 - DNA, 25 bp, Homo sapien
ctcgctgaaccctttcctcttgttg

SEQ ID NO: 1407949 - DNA, 25 bp, Homo sapien
ctgatagccggaagccttgacagta

SEQ ID NO: 1407950 - DNA, 25 bp, Homo sapien
atgaaaggggcaccaacaccacctc

SEQ ID NO: 1407951 - DNA, 25 bp, Homo sapien
acagcccggcatgaaaggggcacca

SEQ ID NO: 1407952 - DNA, 25 bp, Homo sapien
ctcaccttccccagagtagtcctcc

SEQ ID NO: 1407953 - DNA, 25 bp, Homo sapien
actgcccctgagctgcacagcccgg

SEQ ID NO: 1407954 - DNA, 25 bp, Homo sapien
acggcagcctcaggcatctcgtcaa

SEQ ID NO: 1407955 - DNA, 25 bp, Homo sapien
cggcagcctcaggcatctcgtcaat

SEQ ID NO: 1407956 - DNA, 25 bp, Homo sapien
gcgaaagggggcgtccttctcagga

SEQ ID NO: 1407957 - DNA, 25 bp, Homo sapien
aatccacacacgggccttctttatg

SEQ ID NO: 1407958 - DNA, 25 bp, Homo sapien
aggaaaatccacacacgggccttct

SEQ ID NO: 1407959 - DNA, 25 bp, Homo sapien
acacacgggccttctttatggctga

SEQ ID NO: 1407960 - DNA, 25 bp, Homo sapien
tccacacacgggccttctttatggc

SEQ ID NO: 1407961 - DNA, 25 bp, Homo sapien
tcaaagggtgcagggtaaagtacag

SEQ ID NO: 1407962 - DNA, 25 bp, Homo sapien
agagttgtaacgcagagagtcccgc

SEQ ID NO: 1407963 - DNA, 25 bp, Homo sapien
ggaagccggtcctcatttgatccat

SEQ ID NO: 1407964 - DNA, 25 bp, Homo sapien
ttcactcccaatagcggaagccggt

SEQ ID NO: 1407965 - DNA, 25 bp, Homo sapien
tgtggggggggctcatactggctgg

SEQ ID NO: 1407966 - DNA, 25 bp, Homo sapien
gttgtggggggggctcatactggct

SEQ ID NO: 1407967 - DNA, 25 bp, Homo sapien
ggttgtggggggggctcatactggc

SEQ ID NO: 1407968 - DNA, 25 bp, Homo sapien
ttgtggggggggctcatactggctg

SEQ ID NO: 1407969 - DNA, 25 bp, Homo sapien
ctgaattaaccacatggcagagact

SEQ ID NO: 1407970 - DNA, 25 bp, Homo sapien
tgaattaaccacatggcagagactg

SEQ ID NO: 1407971 - DNA, 25 bp, Homo sapien
catggcagagactgggccgttctgg

SEQ ID NO: 1407972 - DNA, 25 bp, Homo sapien
actgggccgttctggcggaagatct

SEQ ID NO: 1407973 - DNA, 25 bp, Homo sapien
gtgcccttcccggtgttatgcaacc

SEQ ID NO: 1407974 - DNA, 25 bp, Homo sapien
ttcccggtgttatgcaacccaagcc

SEQ ID NO: 1407975 - DNA, 25 bp, Homo sapien
agcgctcgtgcccttcccggtgtta

SEQ ID NO: 1407976 - DNA, 25 bp, Homo sapien
ggtgttatgcaacccaagcccgcag

SEQ ID NO: 1407977 - DNA, 25 bp, Homo sapien
gtgtgggtagcccttcatcttggcg

SEQ ID NO: 1407978 - DNA, 25 bp, Homo sapien
gccggccagtgtgggtagcccttca

SEQ ID NO: 1407979 - DNA, 25 bp, Homo sapien
tagcccttcatcttggcgaacacca

SEQ ID NO: 1407980 - DNA, 25 bp, Homo sapien
atcttggcgaacaccaggtccccgc

SEQ ID NO: 1407981 - DNA, 25 bp, Homo sapien
ctccttctgccggttggatcgcgac

SEQ ID NO: 1407982 - DNA, 25 bp, Homo sapien
tgtactccttctgccggttggatcg

SEQ ID NO: 1407983 - DNA, 25 bp, Homo sapien
ttgtactccttctgccggttggatc

SEQ ID NO: 1407984 - DNA, 25 bp, Homo sapien
tactccttctgccggttggatcgcg

SEQ ID NO: 1407985 - DNA, 25 bp, Homo sapien
aagtttgcgcgtgcggcggtggcgg

SEQ ID NO: 1407986 - DNA, 25 bp, Homo sapien
gccgggaagcgcgagcccaagtttg

SEQ ID NO: 1407987 - DNA, 25 bp, Homo sapien
gaagcgcgagcccaagtttgcgcgt

SEQ ID NO: 1407988 - DNA, 25 bp, Homo sapien
agcgcgagcccaagtttgcgcgtgc

SEQ ID NO: 1407989 - DNA, 25 bp, Homo sapien
gtgggtgcgcgctcgtgcagttgtt

SEQ ID NO: 1407990 - DNA, 25 bp, Homo sapien
cggatcggggcaaggctccggcgcg

SEQ ID NO: 1407991 - DNA, 25 bp, Homo sapien
tgcgcgctcgtgcagttgtttgtgt

SEQ ID NO: 1407992 - DNA, 25 bp, Homo sapien
ctccctcctctgcgcgaggcctctt

SEQ ID NO: 1407993 - DNA, 25 bp, Homo sapien
gacgtctgtacacggtttccgcctg

SEQ ID NO: 1407994 - DNA, 25 bp, Homo sapien
ttcttggcagcgtgctaggcgccga

SEQ ID NO: 1407995 - DNA, 25 bp, Homo sapien
ccccagcgcagttaagtgtggacgt

SEQ ID NO: 1407996 - DNA, 25 bp, Homo sapien
atttactgggcacccgcggttcttg

SEQ ID NO: 1407997 - DNA, 25 bp, Homo sapien
tctaagctactgtcttgccaaggag

SEQ ID NO: 1407998 - DNA, 25 bp, Homo sapien
gagacttggactcaacggctagcta

SEQ ID NO: 1407999 - DNA, 25 bp, Homo sapien
cctttgctaaggaggaaacgcttga

SEQ ID NO: 1408000 - DNA, 25 bp, Homo sapien
gcacaaattggccaccttccgggtg

SEQ ID NO: 1408001 - DNA, 25 bp, Homo sapien
gggttttggccctcaacactgtgtg

SEQ ID NO: 1408002 - DNA, 25 bp, Homo sapien
cacatcacgatttcttggcccaagt

SEQ ID NO: 1408003 - DNA, 25 bp, Homo sapien
tattaggttcaaaggaaatgtccac

SEQ ID NO: 1408004 - DNA, 25 bp, Homo sapien
gagtcgagggttttggccctcaaca

SEQ ID NO: 1408005 - DNA, 25 bp, Homo sapien
caatgaatggctccttggacctcaa

SEQ ID NO: 1408006 - DNA, 25 bp, Homo sapien
gagatcttcaaccttagtagggcag

SEQ ID NO: 1408007 - DNA, 25 bp, Homo sapien
tgtaggtagtacatgccaatgatgc

SEQ ID NO: 1408008 - DNA, 25 bp, Homo sapien
ggtcaaagcacctgaagatcttcat

SEQ ID NO: 1408009 - DNA, 25 bp, Homo sapien
cggattgtcagagccttgcccatct

SEQ ID NO: 1408010 - DNA, 25 bp, Homo sapien
accccgatcctggtgagggagatca

SEQ ID NO: 1408011 - DNA, 25 bp, Homo sapien
catctttgtctcactggttgctgca

SEQ ID NO: 1408012 - DNA, 25 bp, Homo sapien
gttcctggatgtgcaccccgatcct

SEQ ID NO: 1408013 - DNA, 25 bp, Homo sapien
tgagtagccatagcaatcctctaaa

SEQ ID NO: 1408014 - DNA, 25 bp, Homo sapien
tagctgtggagcagtttgcctatta

SEQ ID NO: 1408015 - DNA, 25 bp, Homo sapien
tattacagtcttacagtagccactt

SEQ ID NO: 1408016 - DNA, 25 bp, Homo sapien
ccacagtggatctggccttcaattc

SEQ ID NO: 1408017 - DNA, 25 bp, Homo sapien
gtactatttgcaccttaggcttggg

SEQ ID NO: 1408018 - DNA, 25 bp, Homo sapien
tggtgttcccgcaaaagcacgggca

SEQ ID NO: 1408019 - DNA, 25 bp, Homo sapien
taaatagcgggatcccttagccagt

SEQ ID NO: 1408020 - DNA, 25 bp, Homo sapien
tgagtgtgaatctcagacctggaca

SEQ ID NO: 1408021 - DNA, 25 bp, Homo sapien
taagagagaattcctagcagtcaga

SEQ ID NO: 1408022 - DNA, 25 bp, Homo sapien
cattagtttagcgtggtggttcctg

SEQ ID NO: 1408023 - DNA, 25 bp, Homo sapien
tctcaagatgtagagggctcctagg

SEQ ID NO: 1408024 - DNA, 25 bp, Homo sapien
tatggccccagagagtaaaagtata

SEQ ID NO: 1408025 - DNA, 25 bp, Homo sapien
tcacattggcattggagatgcagca

SEQ ID NO: 1408026 - DNA, 25 bp, Homo sapien
tcctgaaagttcctaagagcacgtc

SEQ ID NO: 1408027 - DNA, 25 bp, Homo sapien
gatagttaaagctacagccatcaca

SEQ ID NO: 1408028 - DNA, 25 bp, Homo sapien
tgatcatcgctttgccatccctagg

SEQ ID NO: 1408029 - DNA, 25 bp, Homo sapien
ctcctgagtaggagtagctgggatt

SEQ ID NO: 1408030 - DNA, 25 bp, Homo sapien
tcaccacattggcccaggctagtct

SEQ ID NO: 1408031 - DNA, 25 bp, Homo sapien
tgccaccatgtccagctaatttttg

SEQ ID NO: 1408032 - DNA, 25 bp, Homo sapien
acaggcatgtgccaccatgtccagc

SEQ ID NO: 1408033 - DNA, 25 bp, Homo sapien
cgcctctgcgagaatgaacatattt

SEQ ID NO: 1408034 - DNA, 25 bp, Homo sapien
agagaacaagctcagccgccgtcag

SEQ ID NO: 1408035 - DNA, 25 bp, Homo sapien
caaatatggattctagggctctgga

SEQ ID NO: 1408036 - DNA, 25 bp, Homo sapien
ggaactgattgctcccaggatctcc

SEQ ID NO: 1408037 - DNA, 25 bp, Homo sapien
ttcagtgcctctgcaacgctgctgg

SEQ ID NO: 1408038 - DNA, 25 bp, Homo sapien
cctcacagagatgatacggttgtcg

SEQ ID NO: 1408039 - DNA, 25 bp, Homo sapien
aagctgaggtctacgaggatcagac

SEQ ID NO: 1408040 - DNA, 25 bp, Homo sapien
gatcagacttagaaccctcacagag

SEQ ID NO: 1408041 - DNA, 25 bp, Homo sapien
cacaactagttagcacagggtcata

SEQ ID NO: 1408042 - DNA, 25 bp, Homo sapien
gaggtaactgactccctgcgtctaa

SEQ ID NO: 1408043 - DNA, 25 bp, Homo sapien
caatgagaccctgtgcgcaaatgag

SEQ ID NO: 1408044 - DNA, 25 bp, Homo sapien
tactctgtcatcaagggtctctgaa

SEQ ID NO: 1408045 - DNA, 25 bp, Homo sapien
gactcaaaaggctcagagggccaag

SEQ ID NO: 1408046 - DNA, 25 bp, Homo sapien
gagggccaaggaaattagactccag

SEQ ID NO: 1408047 - DNA, 25 bp, Homo sapien
ggactgagccattggattcttggga

SEQ ID NO: 1408048 - DNA, 25 bp, Homo sapien
tgtcttagatcaccaaggactgagc

SEQ ID NO: 1408049 - DNA, 25 bp, Homo sapien
tccaagttatcctcaccaagctcag

SEQ ID NO: 1408050 - DNA, 25 bp, Homo sapien
aagttatcctcaccaagctcagact

SEQ ID NO: 1408051 - DNA, 25 bp, Homo sapien
gttatcctcaccaagctcagactta

SEQ ID NO: 1408052 - DNA, 25 bp, Homo sapien
caagttatcctcaccaagctcagac

SEQ ID NO: 1408053 - DNA, 25 bp, Homo sapien
cctgaagcacctgtctagaaagatt

SEQ ID NO: 1408054 - DNA, 25 bp, Homo sapien
ctgaagcacctgtctagaaagattg

SEQ ID NO: 1408055 - DNA, 25 bp, Homo sapien
tcctgaagcacctgtctagaaagat

SEQ ID NO: 1408056 - DNA, 25 bp, Homo sapien
cctcctaggtgtacttgcagtctca

SEQ ID NO: 1408057 - DNA, 25 bp, Homo sapien
gagaaggacagttctaggtcacacc

SEQ ID NO: 1408058 - DNA, 25 bp, Homo sapien
ctctgcctcctaggtgtacttgcag

SEQ ID NO: 1408059 - DNA, 25 bp, Homo sapien
ggacagttctaggtcacaccctcta

SEQ ID NO: 1408060 - DNA, 25 bp, Homo sapien
agggagacagggagtacacagaagc

SEQ ID NO: 1408061 - DNA, 25 bp, Homo sapien
gacagggagtacacagaagcaggct

SEQ ID NO: 1408062 - DNA, 25 bp, Homo sapien
gagagcagggtccccctcccctgag

SEQ ID NO: 1408063 - DNA, 25 bp, Homo sapien
tcccctgagctcactgagatgacat

SEQ ID NO: 1408064 - DNA, 25 bp, Homo sapien
aagatggacgcagatcaaaaaagcc

SEQ ID NO: 1408065 - DNA, 25 bp, Homo sapien
caggacaagatggacgcagatcaaa

SEQ ID NO: 1408066 - DNA, 25 bp, Homo sapien
gcagatcaaaaaagcctcgatgtgg

SEQ ID NO: 1408067 - DNA, 25 bp, Homo sapien
caaaaaagcctcgatgtgggaggtg

SEQ ID NO: 1408068 - DNA, 25 bp, Homo sapien
caccttcccccatctacctgcaggg

SEQ ID NO: 1408069 - DNA, 25 bp, Homo sapien
gaggctggtgcctggatcattctgt

SEQ ID NO: 1408070 - DNA, 25 bp, Homo sapien
gacaaagatgaggtctgagcgactc

SEQ ID NO: 1408071 - DNA, 25 bp, Homo sapien
ccaggcatccactctgaacaccttc

SEQ ID NO: 1408072 - DNA, 25 bp, Homo sapien
cagggtgcccaagggtggcgggtag

SEQ ID NO: 1408073 - DNA, 25 bp, Homo sapien
cagctcttccgtaggacagggtgcc

SEQ ID NO: 1408074 - DNA, 25 bp, Homo sapien
tggaccagctcttccgtaggacagg

SEQ ID NO: 1408075 - DNA, 25 bp, Homo sapien
ggtggcgggtaggccctcatcttcc

SEQ ID NO: 1408076 - DNA, 25 bp, Homo sapien
ccacatagatgttgctgggggcttc

SEQ ID NO: 1408077 - DNA, 25 bp, Homo sapien
cccggcccatggcatagaaagctat

SEQ ID NO: 1408078 - DNA, 25 bp, Homo sapien
gaaagctatgggttcatcaggctca

SEQ ID NO: 1408079 - DNA, 25 bp, Homo sapien
aggctcattgtagataggattggag

SEQ ID NO: 1408080 - DNA, 25 bp, Homo sapien
cagctgaggtttggcggggatggga

SEQ ID NO: 1408081 - DNA, 25 bp, Homo sapien
ccgggcggtgtcgtggaacagggat

SEQ ID NO: 1408082 - DNA, 25 bp, Homo sapien
tcgtggaacagggattgtgtagact

SEQ ID NO: 1408083 - DNA, 25 bp, Homo sapien
ggaacagggattgtgtagacttctg

SEQ ID NO: 1408084 - DNA, 25 bp, Homo sapien
caaagtttgattcttcggtcctcag

SEQ ID NO: 1408085 - DNA, 25 bp, Homo sapien
gggcttgcccctgtttgatgattgg

SEQ ID NO: 1408086 - DNA, 25 bp, Homo sapien
cccctctttctgcatcgggactggg

SEQ ID NO: 1408087 - DNA, 25 bp, Homo sapien
tcttcggtcctcagggaaagtcctg

SEQ ID NO: 1408088 - DNA, 25 bp, Homo sapien
tgcattaaacttaatttcttctgga

SEQ ID NO: 1408089 - DNA, 25 bp, Homo sapien
tgcaacatggctttacacgtcttta

SEQ ID NO: 1408090 - DNA, 25 bp, Homo sapien
agggccaggccagattccatttgtg

SEQ ID NO: 1408091 - DNA, 25 bp, Homo sapien
tgtactgccggttactttatggaaa

SEQ ID NO: 1408092 - DNA, 25 bp, Homo sapien
gcgcagaaagttgcgtggcacacag

SEQ ID NO: 1408093 - DNA, 25 bp, Homo sapien
taggctaaatggtaccctgtatttc

SEQ ID NO: 1408094 - DNA, 25 bp, Homo sapien
tgcctgaacttgtgcaccgctgcct

SEQ ID NO: 1408095 - DNA, 25 bp, Homo sapien
agtaggctttgtgagtttgagatcc

SEQ ID NO: 1408096 - DNA, 25 bp, Homo sapien
gggctgctactgcagcaacagggat

SEQ ID NO: 1408097 - DNA, 25 bp, Homo sapien
caggggctgctactgcagcaacagg

SEQ ID NO: 1408098 - DNA, 25 bp, Homo sapien
gcaggggctgctactgcagcaacag

SEQ ID NO: 1408099 - DNA, 25 bp, Homo sapien
ctgcaggggctgctactgcagcaac

SEQ ID NO: 1408100 - DNA, 25 bp, Homo sapien
tccttgcccctctgactccgtgtgg

SEQ ID NO: 1408101 - DNA, 25 bp, Homo sapien
cccgagtggtgtttcgggatgagaa

SEQ ID NO: 1408102 - DNA, 25 bp, Homo sapien
tgcgcctgggctctgagcgggaggg

SEQ ID NO: 1408103 - DNA, 25 bp, Homo sapien
tggcccgagaccctgggctctctgg

SEQ ID NO: 1408104 - DNA, 25 bp, Homo sapien
gcctgggtaagggaggcatgcccga

SEQ ID NO: 1408105 - DNA, 25 bp, Homo sapien
gggctgagcgggtgcgcggtgtagt

SEQ ID NO: 1408106 - DNA, 25 bp, Homo sapien
gagcgtctccccgtaggggctgagc

SEQ ID NO: 1408107 - DNA, 25 bp, Homo sapien
ctgcagccgcgcgtgggcgctgtcc

SEQ ID NO: 1408108 - DNA, 25 bp, Homo sapien
tcgggcgaggggctcggtgagcgtc

SEQ ID NO: 1408109 - DNA, 25 bp, Homo sapien
tggagggcgccgttagggatcagac

SEQ ID NO: 1408110 - DNA, 25 bp, Homo sapien
gagaggcgtgatccccaccttcagc

SEQ ID NO: 1408111 - DNA, 25 bp, Homo sapien
gccagggtcaccagcgagaggcgtg

SEQ ID NO: 1408112 - DNA, 25 bp, Homo sapien
tagggatcagactatctcccgctcc

SEQ ID NO: 1408113 - DNA, 25 bp, Homo sapien
ccccgccttgtgtcgcccggcgcgg

SEQ ID NO: 1408114 - DNA, 25 bp, Homo sapien
cgcccctcccgagccccgccttgtg

SEQ ID NO: 1408115 - DNA, 25 bp, Homo sapien
cccgagccccgccttgtgtcgcccg

SEQ ID NO: 1408116 - DNA, 25 bp, Homo sapien
gagccccgccttgtgtcgcccggcg

SEQ ID NO: 1408117 - DNA, 25 bp, Homo sapien
agcacgaaggtcaccgcgctctcgc

SEQ ID NO: 1408118 - DNA, 25 bp, Homo sapien
cgcaccaagtagcacccctgaggct

SEQ ID NO: 1408119 - DNA, 25 bp, Homo sapien
gaaggtcaccgcgctctcgctgaac

SEQ ID NO: 1408120 - DNA, 25 bp, Homo sapien
gctctcgctgaaccgcaccaagtag

SEQ ID NO: 1408121 - DNA, 25 bp, Homo sapien
gggggccgaaccctgctctgacact

SEQ ID NO: 1408122 - DNA, 25 bp, Homo sapien
tgaaaggctaggaaaactctgggag

SEQ ID NO: 1408123 - DNA, 25 bp, Homo sapien
caatgatctcccctggagagatgcc

SEQ ID NO: 1408124 - DNA, 25 bp, Homo sapien
taccagcattcgaggccttagggac

SEQ ID NO: 1408125 - DNA, 25 bp, Homo sapien
caaagctgaactgaggaggtgaaca

SEQ ID NO: 1408126 - DNA, 25 bp, Homo sapien
tgggcctgggtcttctggaaccaag

SEQ ID NO: 1408127 - DNA, 25 bp, Homo sapien
cccgggtctcggcctgcaggaacag

SEQ ID NO: 1408128 - DNA, 25 bp, Homo sapien
ggaacaggcttccttctccaggcac

SEQ ID NO: 1408129 - DNA, 25 bp, Homo sapien
tccgggtgatgaagccatggaacca

SEQ ID NO: 1408130 - DNA, 25 bp, Homo sapien
ctgtgttggaggcagcctccggggc

SEQ ID NO: 1408131 - DNA, 25 bp, Homo sapien
tctcctgtctattttagggtacaat

SEQ ID NO: 1408132 - DNA, 25 bp, Homo sapien
ctggatcagggaagagttcaaggag

SEQ ID NO: 1408133 - DNA, 25 bp, Homo sapien
gtctattttagggtacaattgccca

SEQ ID NO: 1408134 - DNA, 25 bp, Homo sapien
tagggtacaattgcccagaaagtcc

SEQ ID NO: 1408135 - DNA, 25 bp, Homo sapien
ttcataatatgagggactgacctag

SEQ ID NO: 1408136 - DNA, 25 bp, Homo sapien
ccagaatgagggagggcttacttca

SEQ ID NO: 1408137 - DNA, 25 bp, Homo sapien
tgatgcaggaagtcaccctagaggc

SEQ ID NO: 1408138 - DNA, 25 bp, Homo sapien
agtcaccctagaggccagaatgagg

SEQ ID NO: 1408139 - DNA, 25 bp, Homo sapien
agcccgttggcagacccggatcatt

SEQ ID NO: 1408140 - DNA, 25 bp, Homo sapien
tggtcatctgcggactcagcctgag

SEQ ID NO: 1408141 - DNA, 25 bp, Homo sapien
catctgcaagtccttccccatggga

SEQ ID NO: 1408142 - DNA, 25 bp, Homo sapien
cggcgcatgaaggaggtactcctca

SEQ ID NO: 1408143 - DNA, 25 bp, Homo sapien
gctcctgcgggtcatgtctgtgatc

SEQ ID NO: 1408144 - DNA, 25 bp, Homo sapien
ggcagctcctgcgggtcatgtctgt

SEQ ID NO: 1408145 - DNA, 25 bp, Homo sapien
tcctgcgggtcatgtctgtgatctg

SEQ ID NO: 1408146 - DNA, 25 bp, Homo sapien
cagctcctgcgggtcatgtctgtga

SEQ ID NO: 1408147 - DNA, 25 bp, Homo sapien
gttgggatgggggcttcgtgactcc

SEQ ID NO: 1408148 - DNA, 25 bp, Homo sapien
aggttgggatgggggcttcgtgact

SEQ ID NO: 1408149 - DNA, 25 bp, Homo sapien
ggttgggatgggggcttcgtgactc

SEQ ID NO: 1408150 - DNA, 25 bp, Homo sapien
gactcacgtcatggaaagccttaag

SEQ ID NO: 1408151 - DNA, 25 bp, Homo sapien
tatgtgttccggaaaggtgtgcaca

SEQ ID NO: 1408152 - DNA, 25 bp, Homo sapien
ggcaggaaatgtcgccttacccaca

SEQ ID NO: 1408153 - DNA, 25 bp, Homo sapien
cagccttagttctggcgaggactca

SEQ ID NO: 1408154 - DNA, 25 bp, Homo sapien
tctgtgtttaggtgttaggaagccc

SEQ ID NO: 1408155 - DNA, 25 bp, Homo sapien
cactctgtgtttaggtgttaggaag

SEQ ID NO: 1408156 - DNA, 25 bp, Homo sapien
ctctgtgtttaggtgttaggaagcc

SEQ ID NO: 1408157 - DNA, 25 bp, Homo sapien
ctgtgtttaggtgttaggaagccct

SEQ ID NO: 1408158 - DNA, 25 bp, Homo sapien
ggatcatgctttgaggagacatgag

SEQ ID NO: 1408159 - DNA, 25 bp, Homo sapien
gatcatgctttgaggagacatgagg

SEQ ID NO: 1408160 - DNA, 25 bp, Homo sapien
tcatgctttgaggagacatgaggaa

SEQ ID NO: 1408161 - DNA, 25 bp, Homo sapien
atcatgctttgaggagacatgagga

SEQ ID NO: 1408162 - DNA, 25 bp, Homo sapien
aaggtctctcccctaggaaattctg

SEQ ID NO: 1408163 - DNA, 25 bp, Homo sapien
gccatctagggagggttgctagcca

SEQ ID NO: 1408164 - DNA, 25 bp, Homo sapien
atgccccagaagttgccgccatcta

SEQ ID NO: 1408165 - DNA, 25 bp, Homo sapien
gctttatagcttacaaagcactggg

SEQ ID NO: 1408166 - DNA, 25 bp, Homo sapien
gactgccccttggttggacatctaa

SEQ ID NO: 1408167 - DNA, 25 bp, Homo sapien
cagtgcgtccacactgggccaaggg

SEQ ID NO: 1408168 - DNA, 25 bp, Homo sapien
aaggtccaaagtgtctactccagga

SEQ ID NO: 1408169 - DNA, 25 bp, Homo sapien
aacacgttggtatgagcaggtgtcg

SEQ ID NO: 1408170 - DNA, 25 bp, Homo sapien
ggcatatttctgaagccctcttttc

SEQ ID NO: 1408171 - DNA, 25 bp, Homo sapien
tttgcaggtgcagccgcgatggcat

SEQ ID NO: 1408172 - DNA, 25 bp, Homo sapien
agccctcttttcttcgacttccaat

SEQ ID NO: 1408173 - DNA, 25 bp, Homo sapien
tgcagccgcgatggcatatttctga

SEQ ID NO: 1408174 - DNA, 25 bp, Homo sapien
actgttgcttcagtcaccaatgcag

SEQ ID NO: 1408175 - DNA, 25 bp, Homo sapien
ttagctgcggttctgctggtaacca

SEQ ID NO: 1408176 - DNA, 25 bp, Homo sapien
tggtaaccattaggggtcactgttg

SEQ ID NO: 1408177 - DNA, 25 bp, Homo sapien
ctgttgcttcagtcaccaatgcagg

SEQ ID NO: 1408178 - DNA, 25 bp, Homo sapien
gatttcaaacatgtcgctggcccta

SEQ ID NO: 1408179 - DNA, 25 bp, Homo sapien
aaaccagtggcaagcaaggcagtca

SEQ ID NO: 1408180 - DNA, 25 bp, Homo sapien
gaagaaagggtgactgtactccaag

SEQ ID NO: 1408181 - DNA, 25 bp, Homo sapien
tgagaaactcctatggtgagacccc

SEQ ID NO: 1408182 - DNA, 25 bp, Homo sapien
ccggcattccgggctgtagtagaag

SEQ ID NO: 1408183 - DNA, 25 bp, Homo sapien
gcaggcgtgggttcggctgccagca

SEQ ID NO: 1408184 - DNA, 25 bp, Homo sapien
tgcatcggtggtaggcagggagccc

SEQ ID NO: 1408185 - DNA, 25 bp, Homo sapien
tgtgtgaaagatgggcgcaggcgtg

SEQ ID NO: 1408186 - DNA, 25 bp, Homo sapien
gccagggtcacaatctcccagagta

SEQ ID NO: 1408187 - DNA, 25 bp, Homo sapien
tggtagggttgttctgccagggtca

SEQ ID NO: 1408188 - DNA, 25 bp, Homo sapien
catccatgacgaacttcagcacctg

SEQ ID NO: 1408189 - DNA, 25 bp, Homo sapien
ctgctcattggacaggccctggtag

SEQ ID NO: 1408190 - DNA, 25 bp, Homo sapien
catccgagtgggtggtgaagatccc

SEQ ID NO: 1408191 - DNA, 25 bp, Homo sapien
cccacccttgcggtaatagtctgtc

SEQ ID NO: 1408192 - DNA, 25 bp, Homo sapien
tagtctgtctcatacacgtcccgag

SEQ ID NO: 1408193 - DNA, 25 bp, Homo sapien
agatcccatctttgagggactcggg

SEQ ID NO: 1408194 - DNA, 25 bp, Homo sapien
cagttgcgggctgctagatctcggt

SEQ ID NO: 1408195 - DNA, 25 bp, Homo sapien
tcttgacggtgaagtcctgggacac

SEQ ID NO: 1408196 - DNA, 25 bp, Homo sapien
gatctcggtgcacaaacttgttggc

SEQ ID NO: 1408197 - DNA, 25 bp, Homo sapien
tgttggcagcaaggtaggccatgcc

SEQ ID NO: 1408198 - DNA, 25 bp, Homo sapien
ctcaggccgcaaagatcgaagatgg

SEQ ID NO: 1408199 - DNA, 25 bp, Homo sapien
tcttgaggtccccacgggtcattaa

SEQ ID NO: 1408200 - DNA, 25 bp, Homo sapien
ttggctggccctgagataccacacc

SEQ ID NO: 1408201 - DNA, 25 bp, Homo sapien
caaagatcgaagatggctcttgagg

SEQ ID NO: 1408202 - DNA, 25 bp, Homo sapien
gaactcaatgcattcccgtgggctg

SEQ ID NO: 1408203 - DNA, 25 bp, Homo sapien
tcattcaccgtcttcagggccacgg

SEQ ID NO: 1408204 - DNA, 25 bp, Homo sapien
ttatcgagatctgctcccgaggcac

SEQ ID NO: 1408205 - DNA, 25 bp, Homo sapien
cctggcccagttcccggattatcga

SEQ ID NO: 1408206 - DNA, 25 bp, Homo sapien
cccaaggctatcttctgcaagaagg

SEQ ID NO: 1408207 - DNA, 25 bp, Homo sapien
aggctatcttctgcaagaaggtctt

SEQ ID NO: 1408208 - DNA, 25 bp, Homo sapien
caaggctatcttctgcaagaaggtc

SEQ ID NO: 1408209 - DNA, 25 bp, Homo sapien
ccaaggctatcttctgcaagaaggt

SEQ ID NO: 1408210 - DNA, 25 bp, Homo sapien
gattcacagaagcatacagggttct

SEQ ID NO: 1408211 - DNA, 25 bp, Homo sapien
tatcagaggcgctgaagtactctgg

SEQ ID NO: 1408212 - DNA, 25 bp, Homo sapien
gaagtactctggattcacagaagca

SEQ ID NO: 1408213 - DNA, 25 bp, Homo sapien
ggcgctgaagtactctggattcaca

SEQ ID NO: 1408214 - DNA, 25 bp, Homo sapien
cttcttgccgtagaagaaaccaagg

SEQ ID NO: 1408215 - DNA, 25 bp, Homo sapien
aagggcagcaagaacgatgagcagc

SEQ ID NO: 1408216 - DNA, 25 bp, Homo sapien
ctcttcttgccgtagaagaaaccaa

SEQ ID NO: 1408217 - DNA, 25 bp, Homo sapien
ccaagggcagcaagaacgatgagca

SEQ ID NO: 1408218 - DNA, 25 bp, Homo sapien
taaccctggcagagtagtttccagg

SEQ ID NO: 1408219 - DNA, 25 bp, Homo sapien
ctgggccaaggatgtagaaggcaac

SEQ ID NO: 1408220 - DNA, 25 bp, Homo sapien
tcgcatatcgaagacgggacacaca

SEQ ID NO: 1408221 - DNA, 25 bp, Homo sapien
gagccattgccagccagtgaggttg

SEQ ID NO: 1408222 - DNA, 25 bp, Homo sapien
caagcggcggtacttgatttcgtac

SEQ ID NO: 1408223 - DNA, 25 bp, Homo sapien
gatttcgtacttgaggatgagtccg

SEQ ID NO: 1408224 - DNA, 25 bp, Homo sapien
tctggtggctcgagccagcgcagaa

SEQ ID NO: 1408225 - DNA, 25 bp, Homo sapien
gaaggacactgttcttgctggaggc

SEQ ID NO: 1408226 - DNA, 25 bp, Homo sapien
tcaccttatgttcaaacccaagcta

SEQ ID NO: 1408227 - DNA, 25 bp, Homo sapien
ccagcagccgggccaaaagtggttc

SEQ ID NO: 1408228 - DNA, 25 bp, Homo sapien
ccaaacctttgcacagggtccttgg

SEQ ID NO: 1408229 - DNA, 25 bp, Homo sapien
caagcaaagcgaggctctggggtta

SEQ ID NO: 1408230 - DNA, 25 bp, Homo sapien
tgtcctcctggatctcgaaatccga

SEQ ID NO: 1408231 - DNA, 25 bp, Homo sapien
gcaggcatggatgtcgatccggtat

SEQ ID NO: 1408232 - DNA, 25 bp, Homo sapien
attccgtgaagtggcgcaggccgct

SEQ ID NO: 1408233 - DNA, 25 bp, Homo sapien
gcatggtgcgcgcaaagacgaaggt

SEQ ID NO: 1408234 - DNA, 25 bp, Homo sapien
gctcttgttgatggacgtcaccttc

SEQ ID NO: 1408235 - DNA, 25 bp, Homo sapien
ggctcttgttgatggacgtcacctt

SEQ ID NO: 1408236 - DNA, 25 bp, Homo sapien
tcttgttgatggacgtcaccttcca

SEQ ID NO: 1408237 - DNA, 25 bp, Homo sapien
gggctcttgttgatggacgtcacct

SEQ ID NO: 1408238 - DNA, 25 bp, Homo sapien
ctggcaagggcagcagtcggactcc

SEQ ID NO: 1408239 - DNA, 25 bp, Homo sapien
tggtgatcgcgttgtgtagaaagtt

SEQ ID NO: 1408240 - DNA, 25 bp, Homo sapien
aggatccccgtcttcgccgtcgaag

SEQ ID NO: 1408241 - DNA, 25 bp, Homo sapien
tcttctggaacgaggcctcttgcgc

SEQ ID NO: 1408242 - DNA, 25 bp, Homo sapien
aggtagtaggtgaggttcccattgc

SEQ ID NO: 1408243 - DNA, 25 bp, Homo sapien
tagtcattgaggtagaggtcgccgt

SEQ ID NO: 1408244 - DNA, 25 bp, Homo sapien
gtcggtggcttccagcgcaccagga

SEQ ID NO: 1408245 - DNA, 25 bp, Homo sapien
ttcccattgcgctgggtcggtggct

SEQ ID NO: 1408246 - DNA, 25 bp, Homo sapien
cgttcggaggtagacgatgggactc

SEQ ID NO: 1408247 - DNA, 25 bp, Homo sapien
gcatctggacccacgtgctctgtgg

SEQ ID NO: 1408248 - DNA, 25 bp, Homo sapien
tgatggcccgcacaaacactgcgta

SEQ ID NO: 1408249 - DNA, 25 bp, Homo sapien
ctgtcctcctcagtggttagcgtga

SEQ ID NO: 1408250 - DNA, 25 bp, Homo sapien
ctgaacacccatccccagagctgag

SEQ ID NO: 1408251 - DNA, 25 bp, Homo sapien
acacccatccccagagctgaggggt

SEQ ID NO: 1408252 - DNA, 25 bp, Homo sapien
gaacacccatccccagagctgaggg

SEQ ID NO: 1408253 - DNA, 25 bp, Homo sapien
cccatccccagagctgaggggtcat

SEQ ID NO: 1408254 - DNA, 25 bp, Homo sapien
tcccagcgtagcaggatgcggtctg

SEQ ID NO: 1408255 - DNA, 25 bp, Homo sapien
tacacgatgaagctgagcaggtcgc

SEQ ID NO: 1408256 - DNA, 25 bp, Homo sapien
tcacgttggacacgaagcgcagggt

SEQ ID NO: 1408257 - DNA, 25 bp, Homo sapien
tgcggtctgcctccgtcacgttgga

SEQ ID NO: 1408258 - DNA, 25 bp, Homo sapien
ttgttctgccgacctcgcgtgcctg

SEQ ID NO: 1408259 - DNA, 25 bp, Homo sapien
ttgcccacgggaatggtgagccccg

SEQ ID NO: 1408260 - DNA, 25 bp, Homo sapien
cacccaggaccctagctgttgtagg

SEQ ID NO: 1408261 - DNA, 25 bp, Homo sapien
ggttgaaggcgaagtagatcttgcc

SEQ ID NO: 1408262 - DNA, 25 bp, Homo sapien
tgaaaaagcccagggacacgagggc

SEQ ID NO: 1408263 - DNA, 25 bp, Homo sapien
agccagtaatggtttctaccagccc

SEQ ID NO: 1408264 - DNA, 25 bp, Homo sapien
tgaggttcttgaaaaagcccaggga

SEQ ID NO: 1408265 - DNA, 25 bp, Homo sapien
accatggcgtctccccggattagtt

SEQ ID NO: 1408266 - DNA, 25 bp, Homo sapien
tggagtaggagcaaggaaggtgatg

SEQ ID NO: 1408267 - DNA, 25 bp, Homo sapien
agtaggagcaaggaaggtgatgggt

SEQ ID NO: 1408268 - DNA, 25 bp, Homo sapien
ctggagtaggagcaaggaaggtgat

SEQ ID NO: 1408269 - DNA, 25 bp, Homo sapien
gagtaggagcaaggaaggtgatggg

SEQ ID NO: 1408270 - DNA, 25 bp, Homo sapien
ccgggaaggtgggccctcaggactg

SEQ ID NO: 1408271 - DNA, 25 bp, Homo sapien
gactgggacccaggatgatggaaaa

SEQ ID NO: 1408272 - DNA, 25 bp, Homo sapien
gtgggccctcaggactgggacccag

SEQ ID NO: 1408273 - DNA, 25 bp, Homo sapien
gacccaggatgatggaaaattgtgc

SEQ ID NO: 1408274 - DNA, 25 bp, Homo sapien
ggtgtggccccaaagtaggtactga

SEQ ID NO: 1408275 - DNA, 25 bp, Homo sapien
gtgtggccccaaagtaggtactgac

SEQ ID NO: 1408276 - DNA, 25 bp, Homo sapien
gaggaagggtatgaccaggaggagg

SEQ ID NO: 1408277 - DNA, 25 bp, Homo sapien
ggaggaagggtatgaccaggaggag

SEQ ID NO: 1408278 - DNA, 25 bp, Homo sapien
ccacatgcgtgcagcccacaagatc

SEQ ID NO: 1408279 - DNA, 25 bp, Homo sapien
cccacaagatcctgtgccgcctgga

SEQ ID NO: 1408280 - DNA, 25 bp, Homo sapien
tccacatgcgtgcagcccacaagat

SEQ ID NO: 1408281 - DNA, 25 bp, Homo sapien
gcccacaagatcctgtgccgcctgg

SEQ ID NO: 1408282 - DNA, 25 bp, Homo sapien
gcccctcgcacttgtggcagaatat

SEQ ID NO: 1408283 - DNA, 25 bp, Homo sapien
cccctcgcacttgtggcagaatatg

SEQ ID NO: 1408284 - DNA, 25 bp, Homo sapien
cactctttagggcacagcccctcgc

SEQ ID NO: 1408285 - DNA, 25 bp, Homo sapien
acagcccctcgcacttgtggcagaa

SEQ ID NO: 1408286 - DNA, 25 bp, Homo sapien
ggcattcggtgtggcagcactcgcc

SEQ ID NO: 1408287 - DNA, 25 bp, Homo sapien
caactgccctggtgtatgccgaagg

SEQ ID NO: 1408288 - DNA, 25 bp, Homo sapien
ctattacgggtgaagccagaagggc

SEQ ID NO: 1408289 - DNA, 25 bp, Homo sapien
gactcatactggtaggtgcctggcg

SEQ ID NO: 1408290 - DNA, 25 bp, Homo sapien
ctgtgcaagccatcccatgggggca

SEQ ID NO: 1408291 - DNA, 25 bp, Homo sapien
tgtgcaagccatcccatgggggcag

SEQ ID NO: 1408292 - DNA, 25 bp, Homo sapien
cagtgtgcccgctgaaggtggtctt

SEQ ID NO: 1408293 - DNA, 25 bp, Homo sapien
gctggaggtccagcatctgtagtca

SEQ ID NO: 1408294 - DNA, 25 bp, Homo sapien
tcagtgtgcccgctgaaggtggtct

SEQ ID NO: 1408295 - DNA, 25 bp, Homo sapien
cctccccggtggctgtgaacatgag

SEQ ID NO: 1408296 - DNA, 25 bp, Homo sapien
gcagtgccacgtcacgcagatgtgg

SEQ ID NO: 1408297 - DNA, 25 bp, Homo sapien
acctctgagcgaatatccaggctgg

SEQ ID NO: 1408298 - DNA, 25 bp, Homo sapien
gcgtcccgcggatgactgctaggtt

SEQ ID NO: 1408299 - DNA, 25 bp, Homo sapien
ctccccagggccacagactaggcac

SEQ ID NO: 1408300 - DNA, 25 bp, Homo sapien
aggaagatcacaggcaggcatgctc

SEQ ID NO: 1408301 - DNA, 25 bp, Homo sapien
ctgtatccaggccaaatcccaagga

SEQ ID NO: 1408302 - DNA, 25 bp, Homo sapien
caaggagaggaagatcacaggcagg

SEQ ID NO: 1408303 - DNA, 25 bp, Homo sapien
ggagaacggtgtgataagccctaag

SEQ ID NO: 1408304 - DNA, 25 bp, Homo sapien
cagagaccagggttcagataggaga

SEQ ID NO: 1408305 - DNA, 25 bp, Homo sapien
acagggagagtctcgggcctccaga

SEQ ID NO: 1408306 - DNA, 25 bp, Homo sapien
cagagagactcagcatgagattgag

SEQ ID NO: 1408307 - DNA, 25 bp, Homo sapien
caatgtcatttcctgtgtcctgggt

SEQ ID NO: 1408308 - DNA, 25 bp, Homo sapien
tcatcaatgtcatttcctgtgtcct

SEQ ID NO: 1408309 - DNA, 25 bp, Homo sapien
catcatcaatgtcatttcctgtgtc

SEQ ID NO: 1408310 - DNA, 25 bp, Homo sapien
atcaatgtcatttcctgtgtcctgg

SEQ ID NO: 1408311 - DNA, 25 bp, Homo sapien
ccctcaacatctcctatcagactct

SEQ ID NO: 1408312 - DNA, 25 bp, Homo sapien
agctgagagttggcatctgttcctc

SEQ ID NO: 1408313 - DNA, 25 bp, Homo sapien
tctcctatcagactctcccagaaga

SEQ ID NO: 1408314 - DNA, 25 bp, Homo sapien
agaggaaactcacgctccaggcagc

SEQ ID NO: 1408315 - DNA, 25 bp, Homo sapien
ggagagagatagaaggtcatggggc

SEQ ID NO: 1408316 - DNA, 25 bp, Homo sapien
gagagagatagaaggtcatggggct

SEQ ID NO: 1408317 - DNA, 25 bp, Homo sapien
ccaggtacctgcagaaggcctacag

SEQ ID NO: 1408318 - DNA, 25 bp, Homo sapien
catttagtagggagatggaaccaac

SEQ ID NO: 1408319 - DNA, 25 bp, Homo sapien
aagggtaccaggcacaggttctgtc

SEQ ID NO: 1408320 - DNA, 25 bp, Homo sapien
ttcagtgaaccttccaatgcatggc

SEQ ID NO: 1408321 - DNA, 25 bp, Homo sapien
ggtaacaacgcagagctcaggtgtg

SEQ ID NO: 1408322 - DNA, 25 bp, Homo sapien
cagtaactgctaagatagatgagcc

SEQ ID NO: 1408323 - DNA, 25 bp, Homo sapien
gctttaagcaaatctgttggcacca

SEQ ID NO: 1408324 - DNA, 25 bp, Homo sapien
gactgaataagttggagacttccct

SEQ ID NO: 1408325 - DNA, 25 bp, Homo sapien
tcccgctttaggctcgatcctggaa

SEQ ID NO: 1408326 - DNA, 25 bp, Homo sapien
gacactgaaacctgactccgacttg

SEQ ID NO: 1408327 - DNA, 25 bp, Homo sapien
acaggcgtgcgcgtgtacacacata

SEQ ID NO: 1408328 - DNA, 25 bp, Homo sapien
acttgagcagaccaagcaacatgcg

SEQ ID NO: 1408329 - DNA, 25 bp, Homo sapien
tatggtcctggtgacgcggctgcgt

SEQ ID NO: 1408330 - DNA, 25 bp, Homo sapien
tcctggtgacgcggctgcgtctgct

SEQ ID NO: 1408331 - DNA, 25 bp, Homo sapien
tggtcctggtgacgcggctgcgtct

SEQ ID NO: 1408332 - DNA, 25 bp, Homo sapien
ttatggtcctggtgacgcggctgcg

SEQ ID NO: 1408333 - DNA, 25 bp, Homo sapien
tctcgtagggcttgaaaagggctgt

SEQ ID NO: 1408334 - DNA, 25 bp, Homo sapien
gaactccactttcatcagcgcctaa

SEQ ID NO: 1408335 - DNA, 25 bp, Homo sapien
tttaatcagcacgagtcttaggccg

SEQ ID NO: 1408336 - DNA, 25 bp, Homo sapien
gttatgacatagctgtgtccctggc

SEQ ID NO: 1408337 - DNA, 25 bp, Homo sapien
gactctcccccaagggacttgagca

SEQ ID NO: 1408338 - DNA, 25 bp, Homo sapien
catctgtccatctagctgcttctgt

SEQ ID NO: 1408339 - DNA, 25 bp, Homo sapien
gcgtggtgccaccagatgactctcc

SEQ ID NO: 1408340 - DNA, 25 bp, Homo sapien
gctccttagcgggaggtgagaggga

SEQ ID NO: 1408341 - DNA, 25 bp, Homo sapien
tggtatggaagatcatgcccacgtc

SEQ ID NO: 1408342 - DNA, 25 bp, Homo sapien
ttgagagtgagctgctcaatggtat

SEQ ID NO: 1408343 - DNA, 25 bp, Homo sapien
tgagctgctcaatggtatggaagat

SEQ ID NO: 1408344 - DNA, 25 bp, Homo sapien
agatcatgcccacgtccctgagggc

SEQ ID NO: 1408345 - DNA, 25 bp, Homo sapien
cctctgagtggtcggtgcttgagtc

SEQ ID NO: 1408346 - DNA, 25 bp, Homo sapien
gggcgtcttggatcatcgttgcctc

SEQ ID NO: 1408347 - DNA, 25 bp, Homo sapien
ttggatcatcgttgcctccctgcag

SEQ ID NO: 1408348 - DNA, 25 bp, Homo sapien
gggtcctgatggcatgctgacataa

SEQ ID NO: 1408349 - DNA, 25 bp, Homo sapien
cccgtctttagagccagatcttcct

SEQ ID NO: 1408350 - DNA, 25 bp, Homo sapien
ctttagaaccagatctccccgtctt

SEQ ID NO: 1408351 - DNA, 25 bp, Homo sapien
ttagctccaaggagaaagttattac

SEQ ID NO: 1408352 - DNA, 25 bp, Homo sapien
gctggatggacagccagcctttaga

SEQ ID NO: 1408353 - DNA, 25 bp, Homo sapien
actctctggtagtgcagggacaacc

SEQ ID NO: 1408354 - DNA, 25 bp, Homo sapien
tggtagtgcagggacaaccttgctg

SEQ ID NO: 1408355 - DNA, 25 bp, Homo sapien
ttgttccgccttccacttcaggtgg

SEQ ID NO: 1408356 - DNA, 25 bp, Homo sapien
ctttgttccgccttccacttcaggt

SEQ ID NO: 1408357 - DNA, 25 bp, Homo sapien
ggtgaacacaagatcatacacgatg

SEQ ID NO: 1408358 - DNA, 25 bp, Homo sapien
ctcaaggccgtccatggtgtttccc

SEQ ID NO: 1408359 - DNA, 25 bp, Homo sapien
tttccaccaattcaccgagagacag

SEQ ID NO: 1408360 - DNA, 25 bp, Homo sapien
ccaggcagtgcagagaactttccac

SEQ ID NO: 1408361 - DNA, 25 bp, Homo sapien
tgaggagcactaacagagactggta

SEQ ID NO: 1408362 - DNA, 25 bp, Homo sapien
tactggtagttggtttgtgccaggc

SEQ ID NO: 1408363 - DNA, 25 bp, Homo sapien
tgtgccaggcagaaagaaatgtcct

SEQ ID NO: 1408364 - DNA, 25 bp, Homo sapien
ttttccctgggaacaggagatcagt

SEQ ID NO: 1408365 - DNA, 25 bp, Homo sapien
ggaagcagctgttcggaagacttat

SEQ ID NO: 1408366 - DNA, 25 bp, Homo sapien
tccaaagcctgcctgatatcggcgt

SEQ ID NO: 1408367 - DNA, 25 bp, Homo sapien
gctaagctctgaatctcgaatgtcc

SEQ ID NO: 1408368 - DNA, 25 bp, Homo sapien
cagcgtaggtctctgctcacacggt

SEQ ID NO: 1408369 - DNA, 25 bp, Homo sapien
tggagactcccatatcccagaattt

SEQ ID NO: 1408370 - DNA, 25 bp, Homo sapien
tccatggtgtgacctggcagcaggc

SEQ ID NO: 1408371 - DNA, 25 bp, Homo sapien
gcaggctccacaggatcagatgtcg

SEQ ID NO: 1408372 - DNA, 25 bp, Homo sapien
gcaagctgggtgttgtccccttcac

SEQ ID NO: 1408373 - DNA, 25 bp, Homo sapien
atgggactgcacaccacgccagaag

SEQ ID NO: 1408374 - DNA, 25 bp, Homo sapien
gggctctggccaactagctggtggg

SEQ ID NO: 1408375 - DNA, 25 bp, Homo sapien
atgacatctgtctccgcatccatct

SEQ ID NO: 1408376 - DNA, 25 bp, Homo sapien
cagaaggatcgttgtactgccccac

SEQ ID NO: 1408377 - DNA, 25 bp, Homo sapien
ccagagcggagtcagcgagcccttc

SEQ ID NO: 1408378 - DNA, 25 bp, Homo sapien
ggcaggacacccagttcctcttcct

SEQ ID NO: 1408379 - DNA, 25 bp, Homo sapien
ttgtcctgatgcccctgttctctcc

SEQ ID NO: 1408380 - DNA, 25 bp, Homo sapien
gcggagtcagcgagcccttccatga

SEQ ID NO: 1408381 - DNA, 25 bp, Homo sapien
gtcctctagcaggacctggtgcttc

SEQ ID NO: 1408382 - DNA, 25 bp, Homo sapien
gggtcctctagcaggacctggtgct

SEQ ID NO: 1408383 - DNA, 25 bp, Homo sapien
cagggtcctctagcaggacctggtg

SEQ ID NO: 1408384 - DNA, 25 bp, Homo sapien
ctcagggtcctctagcaggacctgg

SEQ ID NO: 1408385 - DNA, 25 bp, Homo sapien
tcaggttcaccatggaacacgtctg

SEQ ID NO: 1408386 - DNA, 25 bp, Homo sapien
caccatggaacacgtctgagtcatc

SEQ ID NO: 1408387 - DNA, 25 bp, Homo sapien
ggaacacgtctgagtcatccagttc

SEQ ID NO: 1408388 - DNA, 25 bp, Homo sapien
cacgtctgagtcatccagttctacc

SEQ ID NO: 1408389 - DNA, 25 bp, Homo sapien
tcaggctcagctctattatagccag

SEQ ID NO: 1408390 - DNA, 25 bp, Homo sapien
ttccgcacggcctcttctaagagct

SEQ ID NO: 1408391 - DNA, 25 bp, Homo sapien
tggacgggcattggggcagctccgg

SEQ ID NO: 1408392 - DNA, 25 bp, Homo sapien
ggtggcattccgcacggcctcttct

SEQ ID NO: 1408393 - DNA, 25 bp, Homo sapien
gtgcctggtggcattccgcacggcc

SEQ ID NO: 1408394 - DNA, 25 bp, Homo sapien
gtcaatgcaaccagctcatagatct

SEQ ID NO: 1408395 - DNA, 25 bp, Homo sapien
tgacgtcaatgcaaccagctcatag

SEQ ID NO: 1408396 - DNA, 25 bp, Homo sapien
tctgatgacgtcaatgcaaccagct

SEQ ID NO: 1408397 - DNA, 25 bp, Homo sapien
gttcttgtctgatgacgtcaatgca

SEQ ID NO: 1408398 - DNA, 25 bp, Homo sapien
cacagcattgagcttgagcacgggg

SEQ ID NO: 1408399 - DNA, 25 bp, Homo sapien
gtctgcttgctgtctgaggagccca

SEQ ID NO: 1408400 - DNA, 25 bp, Homo sapien
ctgcttgctgtctgaggagcccaca

SEQ ID NO: 1408401 - DNA, 25 bp, Homo sapien
ggccacagagcggatgagcacagca

SEQ ID NO: 1408402 - DNA, 25 bp, Homo sapien
aggtcttatccttgctgatcctcca

SEQ ID NO: 1408403 - DNA, 25 bp, Homo sapien
catttttctggttgtaagatccagg

SEQ ID NO: 1408404 - DNA, 25 bp, Homo sapien
caggggtccctcatggatcattttt

SEQ ID NO: 1408405 - DNA, 25 bp, Homo sapien
tatccttgctgatcctccaggtcag

SEQ ID NO: 1408406 - DNA, 25 bp, Homo sapien
ttaccgcttcattcacatacttgag

SEQ ID NO: 1408407 - DNA, 25 bp, Homo sapien
cacagcttctcatgctcagaggtgc

SEQ ID NO: 1408408 - DNA, 25 bp, Homo sapien
ttctggtagccctctaaacggtggc

SEQ ID NO: 1408409 - DNA, 25 bp, Homo sapien
agaatctcccggcactggtcccggg

SEQ ID NO: 1408410 - DNA, 25 bp, Homo sapien
catgaggaccccaagtggtaagggt

SEQ ID NO: 1408411 - DNA, 25 bp, Homo sapien
caattatgcctctagaaagcctgtt

SEQ ID NO: 1408412 - DNA, 25 bp, Homo sapien
ccagctctacagatgcaagggacag

SEQ ID NO: 1408413 - DNA, 25 bp, Homo sapien
gacagatcactgctttgaagacgct

SEQ ID NO: 1408414 - DNA, 25 bp, Homo sapien
cagaatgagggtctggcacgaggcc

SEQ ID NO: 1408415 - DNA, 25 bp, Homo sapien
gtcacaaagcagtgtcagaatgagg

SEQ ID NO: 1408416 - DNA, 25 bp, Homo sapien
ggtctggcacgaggcccactgcctg

SEQ ID NO: 1408417 - DNA, 25 bp, Homo sapien
aaggtcacaaagcagtgtcagaatg

SEQ ID NO: 1408418 - DNA, 25 bp, Homo sapien
gctgcagccgccgacactgagggtg

SEQ ID NO: 1408419 - DNA, 25 bp, Homo sapien
tgcagccgccgacactgagggtggc

SEQ ID NO: 1408420 - DNA, 25 bp, Homo sapien
ctgcagccgccgacactgagggtgg

SEQ ID NO: 1408421 - DNA, 25 bp, Homo sapien
agctgcagccgccgacactgagggt

SEQ ID NO: 1408422 - DNA, 25 bp, Homo sapien
cgttgcttggtcttgattagctcta

SEQ ID NO: 1408423 - DNA, 25 bp, Homo sapien
ctgcatgaagagctggaatcgactc

SEQ ID NO: 1408424 - DNA, 25 bp, Homo sapien
ttgactgataggaacagaactgtgc

SEQ ID NO: 1408425 - DNA, 25 bp, Homo sapien
ttagctctagggctattgactgata

SEQ ID NO: 1408426 - DNA, 25 bp, Homo sapien
catgaggtcactgatctctttgatg

SEQ ID NO: 1408427 - DNA, 25 bp, Homo sapien
ccgggccagcatgaggtcactgatc

SEQ ID NO: 1408428 - DNA, 25 bp, Homo sapien
gccagcatgaggtcactgatctctt

SEQ ID NO: 1408429 - DNA, 25 bp, Homo sapien
agcatgaggtcactgatctctttga

SEQ ID NO: 1408430 - DNA, 25 bp, Homo sapien
cattcgctggtagaagatcaggtcc

SEQ ID NO: 1408431 - DNA, 25 bp, Homo sapien
tctatgagttcaggcaggttcggga

SEQ ID NO: 1408432 - DNA, 25 bp, Homo sapien
cgcaggtgggaagcttcagtcacaa

SEQ ID NO: 1408433 - DNA, 25 bp, Homo sapien
atcaggtccaggacccggagtgtgc

SEQ ID NO: 1408434 - DNA, 25 bp, Homo sapien
cattgatgacctcttgccggtcaat

SEQ ID NO: 1408435 - DNA, 25 bp, Homo sapien
tgctgccaattttgggcatctggct

SEQ ID NO: 1408436 - DNA, 25 bp, Homo sapien
tatctgtgcagaaccccaaactggg

SEQ ID NO: 1408437 - DNA, 25 bp, Homo sapien
tcaatctcccgctgggttagcccag

SEQ ID NO: 1408438 - DNA, 25 bp, Homo sapien
ccattttgggagtgaatggaggggt

SEQ ID NO: 1408439 - DNA, 25 bp, Homo sapien
cattttgggagtgaatggaggggtt

SEQ ID NO: 1408440 - DNA, 25 bp, Homo sapien
attttgggagtgaatggaggggttg

SEQ ID NO: 1408441 - DNA, 25 bp, Homo sapien
ctgactggtgcaggcgagtagcctc

SEQ ID NO: 1408442 - DNA, 25 bp, Homo sapien
atgtcaacatcactgcgagagcggg

SEQ ID NO: 1408443 - DNA, 25 bp, Homo sapien
gcccaggcgaatctctgagcgtgaa

SEQ ID NO: 1408444 - DNA, 25 bp, Homo sapien
ccttgaggctttcagagcggcccag

SEQ ID NO: 1408445 - DNA, 25 bp, Homo sapien
tactgctggttgttctcaaagtgct

SEQ ID NO: 1408446 - DNA, 25 bp, Homo sapien
tccggtcgagagtcgttgtgtccca

SEQ ID NO: 1408447 - DNA, 25 bp, Homo sapien
tcaggaaagcttccggtcgagagtc

SEQ ID NO: 1408448 - DNA, 25 bp, Homo sapien
gggcatcatactgctggttgttctc

SEQ ID NO: 1408449 - DNA, 25 bp, Homo sapien
cttccacaggggacaagggaatatg

SEQ ID NO: 1408450 - DNA, 25 bp, Homo sapien
tccacaggggacaagggaatatgaa

SEQ ID NO: 1408451 - DNA, 25 bp, Homo sapien
acaggggacaagggaatatgaaatg

SEQ ID NO: 1408452 - DNA, 25 bp, Homo sapien
ccacaggggacaagggaatatgaaa

SEQ ID NO: 1408453 - DNA, 25 bp, Homo sapien
tcccaatgtatttgaggatagggtt

SEQ ID NO: 1408454 - DNA, 25 bp, Homo sapien
tatttgaggatagggtttcgcttct

SEQ ID NO: 1408455 - DNA, 25 bp, Homo sapien
aatgtatttgaggatagggtttcgc

SEQ ID NO: 1408456 - DNA, 25 bp, Homo sapien
tgggcttcccaatgtatttgaggat

SEQ ID NO: 1408457 - DNA, 25 bp, Homo sapien
catgtaggtattgagggcgaagtcc

SEQ ID NO: 1408458 - DNA, 25 bp, Homo sapien
tagggaagaacggtagccacttgtc

SEQ ID NO: 1408459 - DNA, 25 bp, Homo sapien
tcagctgtgttggaaggtcgtgcct

SEQ ID NO: 1408460 - DNA, 25 bp, Homo sapien
gaagacggatcccagcatggctcat

SEQ ID NO: 1408461 - DNA, 25 bp, Homo sapien
ctcagccacttggcgctctcggaga

SEQ ID NO: 1408462 - DNA, 25 bp, Homo sapien
gtcattttcaccatacaggctgccc

SEQ ID NO: 1408463 - DNA, 25 bp, Homo sapien
tcattttcaccatacaggctgccca

SEQ ID NO: 1408464 - DNA, 25 bp, Homo sapien
cgctctcggagagggtccccatcca

SEQ ID NO: 1408465 - DNA, 25 bp, Homo sapien
ctgtagtcgtggatctgctcttgga

SEQ ID NO: 1408466 - DNA, 25 bp, Homo sapien
catcttcgctgttccgcaggcgcga

SEQ ID NO: 1408467 - DNA, 25 bp, Homo sapien
agcttcacagagaacaccacgggca

SEQ ID NO: 1408468 - DNA, 25 bp, Homo sapien
aggcatggctgcctcttgagcttca

SEQ ID NO: 1408469 - DNA, 25 bp, Homo sapien
ctgtagcatctcagggatcttcact

SEQ ID NO: 1408470 - DNA, 25 bp, Homo sapien
gcatctcagggatcttcactctcag

SEQ ID NO: 1408471 - DNA, 25 bp, Homo sapien
atctcagggatcttcactctcagag

SEQ ID NO: 1408472 - DNA, 25 bp, Homo sapien
caatttcagcctgtagcatctcagg

SEQ ID NO: 1408473 - DNA, 25 bp, Homo sapien
cttcgggaatccttggggcttgcct

SEQ ID NO: 1408474 - DNA, 25 bp, Homo sapien
cttggggcttgcctgctgataaact

SEQ ID NO: 1408475 - DNA, 25 bp, Homo sapien
caagcttcgggaatccttggggctt

SEQ ID NO: 1408476 - DNA, 25 bp, Homo sapien
tgtctttccccaagcttcgggaatc

SEQ ID NO: 1408477 - DNA, 25 bp, Homo sapien
ccagatcctggaatatgatgtcgct

SEQ ID NO: 1408478 - DNA, 25 bp, Homo sapien
ttctccagatcctggaatatgatgt

SEQ ID NO: 1408479 - DNA, 25 bp, Homo sapien
cccaggtgagctggccgagacttca

SEQ ID NO: 1408480 - DNA, 25 bp, Homo sapien
gagagaagatgtaacgtagaaaaac

SEQ ID NO: 1408481 - DNA, 25 bp, Homo sapien
ataacccgggtcatagtcttcctct

SEQ ID NO: 1408482 - DNA, 25 bp, Homo sapien
cgggtcatagtcttcctctgggcca

SEQ ID NO: 1408483 - DNA, 25 bp, Homo sapien
aacccgggtcatagtcttcctctgg

SEQ ID NO: 1408484 - DNA, 25 bp, Homo sapien
tgttgaaataacccgggtcatagtc

SEQ ID NO: 1408485 - DNA, 25 bp, Homo sapien
tggcatctcactcccgcccccaaaa

SEQ ID NO: 1408486 - DNA, 25 bp, Homo sapien
cccgggtctggtgaacgttggcatc

SEQ ID NO: 1408487 - DNA, 25 bp, Homo sapien
ggtctggtgaacgttggcatctcac

SEQ ID NO: 1408488 - DNA, 25 bp, Homo sapien
cgggtctggtgaacgttggcatctc

SEQ ID NO: 1408489 - DNA, 25 bp, Homo sapien
catttacagtgtatcatgatgctgg

SEQ ID NO: 1408490 - DNA, 25 bp, Homo sapien
caactaattcccctcatcagaggca

SEQ ID NO: 1408491 - DNA, 25 bp, Homo sapien
cacttcgtcctcaagccaactaatt

SEQ ID NO: 1408492 - DNA, 25 bp, Homo sapien
tacaggtagaacgttgaatatttag

SEQ ID NO: 1408493 - DNA, 25 bp, Homo sapien
tgcagggtggctccagatcactcac

SEQ ID NO: 1408494 - DNA, 25 bp, Homo sapien
tctagcccagggtctgacagtaccg

SEQ ID NO: 1408495 - DNA, 25 bp, Homo sapien
gtaccgagttccgattcatcaatga

SEQ ID NO: 1408496 - DNA, 25 bp, Homo sapien
gggactgctgcatccgagccctgcc

SEQ ID NO: 1408497 - DNA, 25 bp, Homo sapien
gaggttcgaggactgtctagcccag

SEQ ID NO: 1408498 - DNA, 25 bp, Homo sapien
aggaaagcgttctgtcccagagtcc

SEQ ID NO: 1408499 - DNA, 25 bp, Homo sapien
tcctgggaatccagagagagccggc

SEQ ID NO: 1408500 - DNA, 25 bp, Homo sapien
gttctgtcccagagtccaagccact

SEQ ID NO: 1408501 - DNA, 25 bp, Homo sapien
tcactgagggaaggaaagcgttctg

SEQ ID NO: 1408502 - DNA, 25 bp, Homo sapien
tcacctcctgaaataagactccata

SEQ ID NO: 1408503 - DNA, 25 bp, Homo sapien
catgacctctagactcggacacttc

SEQ ID NO: 1408504 - DNA, 25 bp, Homo sapien
tttcacctgtctatgcacctgggca

SEQ ID NO: 1408505 - DNA, 25 bp, Homo sapien
tcaggcaagctgctgtctggaccat

SEQ ID NO: 1408506 - DNA, 25 bp, Homo sapien
tgtcaccatatagtggaagtatgtc

SEQ ID NO: 1408507 - DNA, 25 bp, Homo sapien
tggtgtcaccatatagtggaagtat

SEQ ID NO: 1408508 - DNA, 25 bp, Homo sapien
ggtgtcaccatatagtggaagtatg

SEQ ID NO: 1408509 - DNA, 25 bp, Homo sapien
tcagctgtaactgagtgactcgccg

SEQ ID NO: 1408510 - DNA, 25 bp, Homo sapien
taactgagtgactcgccgccgggca

SEQ ID NO: 1408511 - DNA, 25 bp, Homo sapien
gggcaccttcgatctgctcttccag

SEQ ID NO: 1408512 - DNA, 25 bp, Homo sapien
gcggggttccggctatagacctcac

SEQ ID NO: 1408513 - DNA, 25 bp, Homo sapien
actgcgcaggctactctttcaaaaa

SEQ ID NO: 1408514 - DNA, 25 bp, Homo sapien
tagtttcctcccattactgcgcagg

SEQ ID NO: 1408515 - DNA, 25 bp, Homo sapien
aaatcaaatgtaatagcaagtggtg

SEQ ID NO: 1408516 - DNA, 25 bp, Homo sapien
cattagtctacaactagggccctgc

SEQ ID NO: 1408517 - DNA, 25 bp, Homo sapien
gcagtggtgcgattatagctttgca

SEQ ID NO: 1408518 - DNA, 25 bp, Homo sapien
gtgcgattatagctttgcagcctca

SEQ ID NO: 1408519 - DNA, 25 bp, Homo sapien
gtggtgcgattatagctttgcagcc

SEQ ID NO: 1408520 - DNA, 25 bp, Homo sapien
ggtgcgattatagctttgcagcctc

SEQ ID NO: 1408521 - DNA, 25 bp, Homo sapien
aatcccattgtatgaacagactata

SEQ ID NO: 1408522 - DNA, 25 bp, Homo sapien
aaaatcccattgtatgaacagacta

SEQ ID NO: 1408523 - DNA, 25 bp, Homo sapien
attcatcagcggaagaacatttggg

SEQ ID NO: 1408524 - DNA, 25 bp, Homo sapien
gcttatctattcatcagcggaagaa

SEQ ID NO: 1408525 - DNA, 25 bp, Homo sapien
ggcatcttcccatgcttattggcca

SEQ ID NO: 1408526 - DNA, 25 bp, Homo sapien
tattgctgagcttttaagagtcctt

SEQ ID NO: 1408527 - DNA, 25 bp, Homo sapien
gaatcctttgacatatacaagcttt

SEQ ID NO: 1408528 - DNA, 25 bp, Homo sapien
tctacaggtctatccttgaaccagt

SEQ ID NO: 1408529 - DNA, 25 bp, Homo sapien
cctcagcatattcctgaggatctgg

SEQ ID NO: 1408530 - DNA, 25 bp, Homo sapien
tgcctcagcatattcctgaggatct

SEQ ID NO: 1408531 - DNA, 25 bp, Homo sapien
tggcatgtttttgaacttcgggatc

SEQ ID NO: 1408532 - DNA, 25 bp, Homo sapien
tgaggatctgggtggcatgtttttg

SEQ ID NO: 1408533 - DNA, 25 bp, Homo sapien
tgtgatgcgttgtggaggtggtaga

SEQ ID NO: 1408534 - DNA, 25 bp, Homo sapien
gagggtgagtgcgacataggcgcca

SEQ ID NO: 1408535 - DNA, 25 bp, Homo sapien
cactgacgtgattcggggagctcct

SEQ ID NO: 1408536 - DNA, 25 bp, Homo sapien
gtttgggtcctgtgatgcgttgtgg

SEQ ID NO: 1408537 - DNA, 25 bp, Homo sapien
tgagctattggtcaccatggtgccg

SEQ ID NO: 1408538 - DNA, 25 bp, Homo sapien
tgtgagctattggtcaccatggtgc

SEQ ID NO: 1408539 - DNA, 25 bp, Homo sapien
aggtgtgagctattggtcaccatgg

SEQ ID NO: 1408540 - DNA, 25 bp, Homo sapien
tattggtcaccatggtgccgttgac

SEQ ID NO: 1408541 - DNA, 25 bp, Homo sapien
acaccggccttcatggctgcacctc

SEQ ID NO: 1408542 - DNA, 25 bp, Homo sapien
cacaccggccttcatggctgcacct

SEQ ID NO: 1408543 - DNA, 25 bp, Homo sapien
gtcgccctctttcacaccggccttc

SEQ ID NO: 1408544 - DNA, 25 bp, Homo sapien
tttgatgatccggtcgccctctttc

SEQ ID NO: 1408545 - DNA, 25 bp, Homo sapien
caattcagtgcttccgaggtcagcc

SEQ ID NO: 1408546 - DNA, 25 bp, Homo sapien
tgtgacttcaatgccaatccaaatg

SEQ ID NO: 1408547 - DNA, 25 bp, Homo sapien
gacctcttgccagaaagcaattcag

SEQ ID NO: 1408548 - DNA, 25 bp, Homo sapien
tatctggaaaagataaccgctgctt

SEQ ID NO: 1408549 - DNA, 25 bp, Homo sapien
gataatgacacagcgttgaacgaga

SEQ ID NO: 1408550 - DNA, 25 bp, Homo sapien
gaacaatgcgatccccactgactgt

SEQ ID NO: 1408551 - DNA, 25 bp, Homo sapien
gccgaagccatgctggtccttttgg

SEQ ID NO: 1408552 - DNA, 25 bp, Homo sapien
gcacagactgcaccagaacaatgcg

SEQ ID NO: 1408553 - DNA, 25 bp, Homo sapien
cactacagaccagagctcttcggct

SEQ ID NO: 1408554 - DNA, 25 bp, Homo sapien
gaccagagctcttcggctcaagcga

SEQ ID NO: 1408555 - DNA, 25 bp, Homo sapien
ctactgataagcatgggtgttctga

SEQ ID NO: 1408556 - DNA, 25 bp, Homo sapien
cactactgataagcatgggtgttct

SEQ ID NO: 1408557 - DNA, 25 bp, Homo sapien
gggacttgcgctctggtgcagaatc

SEQ ID NO: 1408558 - DNA, 25 bp, Homo sapien
gtctcagaggcatccgaaggctggc

SEQ ID NO: 1408559 - DNA, 25 bp, Homo sapien
tcagaggcatccgaaggctggcgat

SEQ ID NO: 1408560 - DNA, 25 bp, Homo sapien
tgcgctctggtgcagaatctcccag

SEQ ID NO: 1408561 - DNA, 25 bp, Homo sapien
gcagagacaagctccccatttagct

SEQ ID NO: 1408562 - DNA, 25 bp, Homo sapien
agaggtctgcatgagcacaacatgt

SEQ ID NO: 1408563 - DNA, 25 bp, Homo sapien
gaggtctgcatgagcacaacatgtg

SEQ ID NO: 1408564 - DNA, 25 bp, Homo sapien
gagacaagctccccatttagcttca

SEQ ID NO: 1408565 - DNA, 25 bp, Homo sapien
tctggtctgtttggcggtagtattc

SEQ ID NO: 1408566 - DNA, 25 bp, Homo sapien
aggacaggaatctggtctgtttggc

SEQ ID NO: 1408567 - DNA, 25 bp, Homo sapien
tctgtttggcggtagtattccaacc

SEQ ID NO: 1408568 - DNA, 25 bp, Homo sapien
caggaatctggtctgtttggcggta

SEQ ID NO: 1408569 - DNA, 25 bp, Homo sapien
ggtgagactgctttttactggctga

SEQ ID NO: 1408570 - DNA, 25 bp, Homo sapien
ctggacaggtgagactgctttttac

SEQ ID NO: 1408571 - DNA, 25 bp, Homo sapien
caggtgagactgctttttactggct

SEQ ID NO: 1408572 - DNA, 25 bp, Homo sapien
ggacaggtgagactgctttttactg

SEQ ID NO: 1408573 - DNA, 25 bp, Homo sapien
tgtttttatgttatcaatttgagat

SEQ ID NO: 1408574 - DNA, 25 bp, Homo sapien
ccactgtccttggtcttaatctgtt

SEQ ID NO: 1408575 - DNA, 25 bp, Homo sapien
gagccactgtccttggtcttaatct

SEQ ID NO: 1408576 - DNA, 25 bp, Homo sapien
tcaatttgagatatatttatgtttc

SEQ ID NO: 1408577 - DNA, 25 bp, Homo sapien
tatgttgttctcatgcatacttgtc

SEQ ID NO: 1408578 - DNA, 25 bp, Homo sapien
taatgataaacttcgtgtatgttgt

SEQ ID NO: 1408579 - DNA, 25 bp, Homo sapien
agatgaaatcagatacaggtaacag

SEQ ID NO: 1408580 - DNA, 25 bp, Homo sapien
gatgaaatcagatacaggtaacaga

SEQ ID NO: 1408581 - DNA, 25 bp, Homo sapien
taaacggagttgttacttgagtcga

SEQ ID NO: 1408582 - DNA, 25 bp, Homo sapien
cagtaagatgggaagaccaagcctt

SEQ ID NO: 1408583 - DNA, 25 bp, Homo sapien
gcccggccctacaggcatatcttgt

SEQ ID NO: 1408584 - DNA, 25 bp, Homo sapien
gctggaattagagcgtgtgtcaaca

SEQ ID NO: 1408585 - DNA, 25 bp, Homo sapien
ttcctggctggtgacttcaggaagc

SEQ ID NO: 1408586 - DNA, 25 bp, Homo sapien
cattcctggctggtgacttcaggaa

SEQ ID NO: 1408587 - DNA, 25 bp, Homo sapien
ccacattcctggctggtgacttcag

SEQ ID NO: 1408588 - DNA, 25 bp, Homo sapien
cctccacattcctggctggtgactt

SEQ ID NO: 1408589 - DNA, 25 bp, Homo sapien
tcatatgggctaagaatcggagggc

SEQ ID NO: 1408590 - DNA, 25 bp, Homo sapien
cggagggccagtttaattagatgac

SEQ ID NO: 1408591 - DNA, 25 bp, Homo sapien
tctgatttgaagacagagcgggact

SEQ ID NO: 1408592 - DNA, 25 bp, Homo sapien
gatggaatcacacaatcatatgggc

SEQ ID NO: 1408593 - DNA, 25 bp, Homo sapien
tatggtgacccaagctgactaaacc

SEQ ID NO: 1408594 - DNA, 25 bp, Homo sapien
tcttgaggagttaggagacacaggc

SEQ ID NO: 1408595 - DNA, 25 bp, Homo sapien
cagttcctggaacaccgtagatgct

SEQ ID NO: 1408596 - DNA, 25 bp, Homo sapien
taagctgggagccaatggtatcacc

SEQ ID NO: 1408597 - DNA, 25 bp, Homo sapien
ggctgctgccataccattaagattt

SEQ ID NO: 1408598 - DNA, 25 bp, Homo sapien
caaatatggacaatcaggatggcga

SEQ ID NO: 1408599 - DNA, 25 bp, Homo sapien
tattcctcaggcagtcatacccttc

SEQ ID NO: 1408600 - DNA, 25 bp, Homo sapien
catccagactagtgagatttaaggc

SEQ ID NO: 1408601 - DNA, 25 bp, Homo sapien
tgtctccattatcttccccgatgca

SEQ ID NO: 1408602 - DNA, 25 bp, Homo sapien
tagatgctgactgagacaatggtag

SEQ ID NO: 1408603 - DNA, 25 bp, Homo sapien
taagcacacaatacaaagtaggtgt

SEQ ID NO: 1408604 - DNA, 25 bp, Homo sapien
gcatgtcgaagataaataagcacac

SEQ ID NO: 1408605 - DNA, 25 bp, Homo sapien
catgcccaggttcttccttacaagt

SEQ ID NO: 1408606 - DNA, 25 bp, Homo sapien
tcttcatgcccaggttcttccttac

SEQ ID NO: 1408607 - DNA, 25 bp, Homo sapien
ttggagggagatggctccttcttca

SEQ ID NO: 1408608 - DNA, 25 bp, Homo sapien
tccttcttcatgcccaggttcttcc

SEQ ID NO: 1408609 - DNA, 25 bp, Homo sapien
caagcttcttatttgagggatggca

SEQ ID NO: 1408610 - DNA, 25 bp, Homo sapien
taagagcattacacggtcctcaggc

SEQ ID NO: 1408611 - DNA, 25 bp, Homo sapien
aaccctgttcctgtgaagacactga

SEQ ID NO: 1408612 - DNA, 25 bp, Homo sapien
taatggttctatggtctcactacag

SEQ ID NO: 1408613 - DNA, 25 bp, Homo sapien
gatttctgaaaaaccatttggccca

SEQ ID NO: 1408614 - DNA, 25 bp, Homo sapien
tgattttcaggaaagccagacaatg

SEQ ID NO: 1408615 - DNA, 25 bp, Homo sapien
tttcaagctttcattttcactgatt

SEQ ID NO: 1408616 - DNA, 25 bp, Homo sapien
tcaggcagctttgttctctgttctt

SEQ ID NO: 1408617 - DNA, 25 bp, Homo sapien
cttcttgcacgcccccaaaacttgg

SEQ ID NO: 1408618 - DNA, 25 bp, Homo sapien
ccttcttgcacgcccccaaaacttg

SEQ ID NO: 1408619 - DNA, 25 bp, Homo sapien
tcagttctccctttccaagggtcaa

SEQ ID NO: 1408620 - DNA, 25 bp, Homo sapien
tgacacacctcagttctccctttcc

SEQ ID NO: 1408621 - DNA, 25 bp, Homo sapien
cacctcagttctccctttccaaggg

SEQ ID NO: 1408622 - DNA, 25 bp, Homo sapien
cttgacacacctcagttctcccttt

SEQ ID NO: 1408623 - DNA, 25 bp, Homo sapien
tatactctggggtaaccttacactc

SEQ ID NO: 1408624 - DNA, 25 bp, Homo sapien
ctatactctggggtaaccttacact

SEQ ID NO: 1408625 - DNA, 25 bp, Homo sapien
tactctggggtaaccttacactcat

SEQ ID NO: 1408626 - DNA, 25 bp, Homo sapien
atactctggggtaaccttacactca

SEQ ID NO: 1408627 - DNA, 25 bp, Homo sapien
gtttctcggtgtctccacggttcca

SEQ ID NO: 1408628 - DNA, 25 bp, Homo sapien
tgtctccacggttccagaatcctgt

SEQ ID NO: 1408629 - DNA, 25 bp, Homo sapien
tggtgtcttgatcaggattgaatcg

SEQ ID NO: 1408630 - DNA, 25 bp, Homo sapien
gaatcctgtagctttggtgtcttga

SEQ ID NO: 1408631 - DNA, 25 bp, Homo sapien
agctgtccttctgttggcaagagac

SEQ ID NO: 1408632 - DNA, 25 bp, Homo sapien
tccaagtccagtgcaaccctgggaa

SEQ ID NO: 1408633 - DNA, 25 bp, Homo sapien
gcaagagaccctctagctcaaaggg

SEQ ID NO: 1408634 - DNA, 25 bp, Homo sapien
tcttcaaggttagcactatggccaa

SEQ ID NO: 1408635 - DNA, 25 bp, Homo sapien
gttctgatgagggtgatgtgcaata

SEQ ID NO: 1408636 - DNA, 25 bp, Homo sapien
tgtaggtagcaatcaggttctgatg

SEQ ID NO: 1408637 - DNA, 25 bp, Homo sapien
tctgatgagggtgatgtgcaatacc

SEQ ID NO: 1408638 - DNA, 25 bp, Homo sapien
cttcactgtaggtagcaatcaggtt

SEQ ID NO: 1408639 - DNA, 25 bp, Homo sapien
gtactgaaacagtagagcacaaagt

SEQ ID NO: 1408640 - DNA, 25 bp, Homo sapien
ctgtactgaaacagtagagcacaaa

SEQ ID NO: 1408641 - DNA, 25 bp, Homo sapien
tactgaaacagtagagcacaaagtc

SEQ ID NO: 1408642 - DNA, 25 bp, Homo sapien
tgtactgaaacagtagagcacaaag

SEQ ID NO: 1408643 - DNA, 25 bp, Homo sapien
cagtagatccattcaccacggggag

SEQ ID NO: 1408644 - DNA, 25 bp, Homo sapien
cacagtagatccattcaccacgggg

SEQ ID NO: 1408645 - DNA, 25 bp, Homo sapien
attcaccacggggagagagggcaca

SEQ ID NO: 1408646 - DNA, 25 bp, Homo sapien
gatccattcaccacggggagagagg

SEQ ID NO: 1408647 - DNA, 25 bp, Homo sapien
cactgttgacggtaatatctgtccc

SEQ ID NO: 1408648 - DNA, 25 bp, Homo sapien
taattgtctggtcaaaagaagcact

SEQ ID NO: 1408649 - DNA, 25 bp, Homo sapien
gaagcactaaggatctgactgctat

SEQ ID NO: 1408650 - DNA, 25 bp, Homo sapien
ttacagtgccatcagaggatgcact

SEQ ID NO: 1408651 - DNA, 25 bp, Homo sapien
ttgggccccagttgctaacatttct

SEQ ID NO: 1408652 - DNA, 25 bp, Homo sapien
tgatttttccagtagtaaagttcca

SEQ ID NO: 1408653 - DNA, 25 bp, Homo sapien
tctgctgaaacacatgcagaggaca

SEQ ID NO: 1408654 - DNA, 25 bp, Homo sapien
ggccccagttgctaacatttctgta

SEQ ID NO: 1408655 - DNA, 25 bp, Homo sapien
tctgaccaaacttaatatgcctgct

SEQ ID NO: 1408656 - DNA, 25 bp, Homo sapien
tgcctgctcagttgtgtaggaaact

SEQ ID NO: 1408657 - DNA, 25 bp, Homo sapien
gaaaatcgagcacactccacttgtg

SEQ ID NO: 1408658 - DNA, 25 bp, Homo sapien
gatttctgaccaaacttaatatgcc

SEQ ID NO: 1408659 - DNA, 25 bp, Homo sapien
ccagctaaggcctgggcaattgctg

SEQ ID NO: 1408660 - DNA, 25 bp, Homo sapien
gcctgggcaattgctgctcttctct

SEQ ID NO: 1408661 - DNA, 25 bp, Homo sapien
ccatgagacgagatggaggcaccac

SEQ ID NO: 1408662 - DNA, 25 bp, Homo sapien
tgccatgagacgagatggaggcacc

SEQ ID NO: 1408663 - DNA, 25 bp, Homo sapien
ggccaaaaggttctccagatgaata

SEQ ID NO: 1408664 - DNA, 25 bp, Homo sapien
ctggccaaaaggttctccagatgaa

SEQ ID NO: 1408665 - DNA, 25 bp, Homo sapien
aggttctccagatgaatatattgct

SEQ ID NO: 1408666 - DNA, 25 bp, Homo sapien
caaaaggttctccagatgaatatat

SEQ ID NO: 1408667 - DNA, 25 bp, Homo sapien
cagtctgtctcaatagtgacttggc

SEQ ID NO: 1408668 - DNA, 25 bp, Homo sapien
tgtctcaatagtgacttggcagcac

SEQ ID NO: 1408669 - DNA, 25 bp, Homo sapien
gatcatgggatcagtctgtctcaat

SEQ ID NO: 1408670 - DNA, 25 bp, Homo sapien
gggatcagtctgtctcaatagtgac

SEQ ID NO: 1408671 - DNA, 25 bp, Homo sapien
tatcccaatggccactgttaatgtc

SEQ ID NO: 1408672 - DNA, 25 bp, Homo sapien
gagggttttgtctggcaatttcaga

SEQ ID NO: 1408673 - DNA, 25 bp, Homo sapien
tgtatagcctgcaacacagtatccc

SEQ ID NO: 1408674 - DNA, 25 bp, Homo sapien
cacggagctctatcaattccagaac

SEQ ID NO: 1408675 - DNA, 25 bp, Homo sapien
gattcagttttgatcaacgtagctg

SEQ ID NO: 1408676 - DNA, 25 bp, Homo sapien
tgatcaacgtagctgtatctctctg

SEQ ID NO: 1408677 - DNA, 25 bp, Homo sapien
tccgaagattcagttttgatcaacg

SEQ ID NO: 1408678 - DNA, 25 bp, Homo sapien
cacatccgaagattcagttttgatc

SEQ ID NO: 1408679 - DNA, 25 bp, Homo sapien
ttgtcctggaggtggaccccaacat

SEQ ID NO: 1408680 - DNA, 25 bp, Homo sapien
gagcccccttgtcctggaggtggac

SEQ ID NO: 1408681 - DNA, 25 bp, Homo sapien
cttgtcctggaggtggaccccaaca

SEQ ID NO: 1408682 - DNA, 25 bp, Homo sapien
tgagcccccttgtcctggaggtgga

SEQ ID NO: 1408683 - DNA, 25 bp, Homo sapien
cgttgttatagcagatgacagctcc

SEQ ID NO: 1408684 - DNA, 25 bp, Homo sapien
ttaaatctccaaggcgggccgggca

SEQ ID NO: 1408685 - DNA, 25 bp, Homo sapien
ggagcagcatgtatagtattatcca

SEQ ID NO: 1408686 - DNA, 25 bp, Homo sapien
tgaaatattgtgttatggagcagca

SEQ ID NO: 1408687 - DNA, 25 bp, Homo sapien
tcacctcagagtcggctgtgggctc

SEQ ID NO: 1408688 - DNA, 25 bp, Homo sapien
aacagtcttctgagtccgaggaacc

SEQ ID NO: 1408689 - DNA, 25 bp, Homo sapien
cactcttgccttgtggagaccaaca

SEQ ID NO: 1408690 - DNA, 25 bp, Homo sapien
tatacgcctttggtggatagtccat

SEQ ID NO: 1408691 - DNA, 25 bp, Homo sapien
gctgcagaagcacgtgctcagggcg

SEQ ID NO: 1408692 - DNA, 25 bp, Homo sapien
tgagaaggatgcaccaactcctggg

SEQ ID NO: 1408693 - DNA, 25 bp, Homo sapien
aggctgcagaagcacgtgctcaggg

SEQ ID NO: 1408694 - DNA, 25 bp, Homo sapien
tgcagaagcacgtgctcagggcgtc

SEQ ID NO: 1408695 - DNA, 25 bp, Homo sapien
cacatgtcccctactttccaggcac

SEQ ID NO: 1408696 - DNA, 25 bp, Homo sapien
catgtcccctactttccaggcacct

SEQ ID NO: 1408697 - DNA, 25 bp, Homo sapien
acatgtcccctactttccaggcacc

SEQ ID NO: 1408698 - DNA, 25 bp, Homo sapien
tctcgtctccctgaagaaaagttga

SEQ ID NO: 1408699 - DNA, 25 bp, Homo sapien
ggtttccagggtctcagaaatcaga

SEQ ID NO: 1408700 - DNA, 25 bp, Homo sapien
gactggagaccttagcctggaatgg

SEQ ID NO: 1408701 - DNA, 25 bp, Homo sapien
gaatgtccccttagtctgcttagca

SEQ ID NO: 1408702 - DNA, 25 bp, Homo sapien
gctcgccttggacgctccccaaatg

SEQ ID NO: 1408703 - DNA, 25 bp, Homo sapien
cagctcgccttggacgctccccaaa

SEQ ID NO: 1408704 - DNA, 25 bp, Homo sapien
tcgccttggacgctccccaaatggc

SEQ ID NO: 1408705 - DNA, 25 bp, Homo sapien
gccttggacgctccccaaatggcag

SEQ ID NO: 1408706 - DNA, 25 bp, Homo sapien
gtccagtgtatttgataagaagaat

SEQ ID NO: 1408707 - DNA, 25 bp, Homo sapien
tgtccagtgtatttgataagaagaa

SEQ ID NO: 1408708 - DNA, 25 bp, Homo sapien
ccagtgtatttgataagaagaatat

SEQ ID NO: 1408709 - DNA, 25 bp, Homo sapien
tatgtccagtgtatttgataagaag

SEQ ID NO: 1408710 - DNA, 25 bp, Homo sapien
gcatcccttagggccaaagcatagg

SEQ ID NO: 1408711 - DNA, 25 bp, Homo sapien
ttagcatcccttagggccaaagcat

SEQ ID NO: 1408712 - DNA, 25 bp, Homo sapien
gcttagcatcccttagggccaaagc

SEQ ID NO: 1408713 - DNA, 25 bp, Homo sapien
tagcatcccttagggccaaagcata

SEQ ID NO: 1408714 - DNA, 25 bp, Homo sapien
ccatggatccttcttccatgaaatt

SEQ ID NO: 1408715 - DNA, 25 bp, Homo sapien
ggtgaaggccatggatccttcttcc

SEQ ID NO: 1408716 - DNA, 25 bp, Homo sapien
gtgaaggccatggatccttcttcca

SEQ ID NO: 1408717 - DNA, 25 bp, Homo sapien
tgaaggccatggatccttcttccat

SEQ ID NO: 1408718 - DNA, 25 bp, Homo sapien
cagtcgctggcagtaatcccatctc

SEQ ID NO: 1408719 - DNA, 25 bp, Homo sapien
gtcgctggcagtaatcccatctctg

SEQ ID NO: 1408720 - DNA, 25 bp, Homo sapien
agcagtcgctggcagtaatcccatc

SEQ ID NO: 1408721 - DNA, 25 bp, Homo sapien
gcagtcgctggcagtaatcccatct

SEQ ID NO: 1408722 - DNA, 25 bp, Homo sapien
tgatgggcaaatagcatgctgtgca

SEQ ID NO: 1408723 - DNA, 25 bp, Homo sapien
tgggcaaatagcatgctgtgcagga

SEQ ID NO: 1408724 - DNA, 25 bp, Homo sapien
caccatggcctgatgggcaaatagc

SEQ ID NO: 1408725 - DNA, 25 bp, Homo sapien
tggcctgatgggcaaatagcatgct

SEQ ID NO: 1408726 - DNA, 25 bp, Homo sapien
ctgtaccacctggattgttaatacc

SEQ ID NO: 1408727 - DNA, 25 bp, Homo sapien
tgtaccacctggattgttaataccc

SEQ ID NO: 1408728 - DNA, 25 bp, Homo sapien
accacctggattgttaatacccctg

SEQ ID NO: 1408729 - DNA, 25 bp, Homo sapien
tcactctgcacacccacgggcacca

SEQ ID NO: 1408730 - DNA, 25 bp, Homo sapien
accagcgctggccgacacagggcag

SEQ ID NO: 1408731 - DNA, 25 bp, Homo sapien
gggatggcggcgcccgcacttccca

SEQ ID NO: 1408732 - DNA, 25 bp, Homo sapien
ggcgcccgcacttcccacaaaggat

SEQ ID NO: 1408733 - DNA, 25 bp, Homo sapien
tttggtcttatgcaggatcctctta

SEQ ID NO: 1408734 - DNA, 25 bp, Homo sapien
ggtcttatgcaggatcctcttattg

SEQ ID NO: 1408735 - DNA, 25 bp, Homo sapien
tgcctttggtcttatgcaggatcct

SEQ ID NO: 1408736 - DNA, 25 bp, Homo sapien
cttatgcaggatcctcttattgtag

SEQ ID NO: 1408737 - DNA, 25 bp, Homo sapien
acgactcggctttgtaggcccaatc

SEQ ID NO: 1408738 - DNA, 25 bp, Homo sapien
ctcggctttgtaggcccaatcaggg

SEQ ID NO: 1408739 - DNA, 25 bp, Homo sapien
gactcggctttgtaggcccaatcag

SEQ ID NO: 1408740 - DNA, 25 bp, Homo sapien
gggacgactcggctttgtaggccca

SEQ ID NO: 1408741 - DNA, 25 bp, Homo sapien
tccagttgccggggttggctgggat

SEQ ID NO: 1408742 - DNA, 25 bp, Homo sapien
ggctgggatgccctcagccaagcag

SEQ ID NO: 1408743 - DNA, 25 bp, Homo sapien
ctgggatgccctcagccaagcagct

SEQ ID NO: 1408744 - DNA, 25 bp, Homo sapien
ctgagatccagttgccggggttggc

SEQ ID NO: 1408745 - DNA, 25 bp, Homo sapien
ttaggatctcttctgcttcacctta

SEQ ID NO: 1408746 - DNA, 25 bp, Homo sapien
atctcttctgcttcaccttaggaaa

SEQ ID NO: 1408747 - DNA, 25 bp, Homo sapien
ttctgcttcaccttaggaaaatggg

SEQ ID NO: 1408748 - DNA, 25 bp, Homo sapien
ggatctcttctgcttcaccttagga

SEQ ID NO: 1408749 - DNA, 25 bp, Homo sapien
caaacagctgagctggatgagctgg

SEQ ID NO: 1408750 - DNA, 25 bp, Homo sapien
ctagcaaacagctgagctggatgag

SEQ ID NO: 1408751 - DNA, 25 bp, Homo sapien
gcagggccagcatggggctgagtaa

SEQ ID NO: 1408752 - DNA, 25 bp, Homo sapien
aacagctgagctggatgagctggca

SEQ ID NO: 1408753 - DNA, 25 bp, Homo sapien
cagactttaggcttcttctagttcc

SEQ ID NO: 1408754 - DNA, 25 bp, Homo sapien
cacaggggctctcgtgataagcagg

SEQ ID NO: 1408755 - DNA, 25 bp, Homo sapien
ttcacgttctcagactttaggcttc

SEQ ID NO: 1408756 - DNA, 25 bp, Homo sapien
taagcaggagacttcacgttctcag

SEQ ID NO: 1408757 - DNA, 25 bp, Homo sapien
agctgattgtcaatcctcacccact

SEQ ID NO: 1408758 - DNA, 25 bp, Homo sapien
agccaccagctgattgtcaatcctc

SEQ ID NO: 1408759 - DNA, 25 bp, Homo sapien
tgcccagtagtagccaccagctgat

SEQ ID NO: 1408760 - DNA, 25 bp, Homo sapien
ctcacccactgatcttcaacctcag

SEQ ID NO: 1408761 - DNA, 25 bp, Homo sapien
tagctgaggccagcattcggtcagc

SEQ ID NO: 1408762 - DNA, 25 bp, Homo sapien
tccaacttgatccattcatcccaag

SEQ ID NO: 1408763 - DNA, 25 bp, Homo sapien
gccagcattcggtcagccccaggat

SEQ ID NO: 1408764 - DNA, 25 bp, Homo sapien
agttgtatctgccaatagctgaccc

SEQ ID NO: 1408765 - DNA, 25 bp, Homo sapien
cctctgtcgttaaagtcctggggat

SEQ ID NO: 1408766 - DNA, 25 bp, Homo sapien
tgaccctggagcctgtcggccctgt

SEQ ID NO: 1408767 - DNA, 25 bp, Homo sapien
ctctgtcgttaaagtcctggggatc

SEQ ID NO: 1408768 - DNA, 25 bp, Homo sapien
gcctctgtcgttaaagtcctgggga

SEQ ID NO: 1408769 - DNA, 25 bp, Homo sapien
gtggagatgacaagatggtgccatt

SEQ ID NO: 1408770 - DNA, 25 bp, Homo sapien
cttggggagtgtttctcaaggagct

SEQ ID NO: 1408771 - DNA, 25 bp, Homo sapien
gggtggagatgacaagatggtgcca

SEQ ID NO: 1408772 - DNA, 25 bp, Homo sapien
gagtgtttctcaaggagctgcacag

SEQ ID NO: 1408773 - DNA, 25 bp, Homo sapien
ttacggagggggcaaaagtgatgca

SEQ ID NO: 1408774 - DNA, 25 bp, Homo sapien
atgcaaagaagacacttaaattcca

SEQ ID NO: 1408775 - DNA, 25 bp, Homo sapien
cacttccttccagttagttacggag

SEQ ID NO: 1408776 - DNA, 25 bp, Homo sapien
gaagacacttaaattccagaacact

SEQ ID NO: 1408777 - DNA, 25 bp, Homo sapien
cctgccatcatctgtttgtgctgct

SEQ ID NO: 1408778 - DNA, 25 bp, Homo sapien
catcatctgtttgtgctgctctttg

SEQ ID NO: 1408779 - DNA, 25 bp, Homo sapien
ccctgccatcatctgtttgtgctgc

SEQ ID NO: 1408780 - DNA, 25 bp, Homo sapien
tgccatcatctgtttgtgctgctct

SEQ ID NO: 1408781 - DNA, 25 bp, Homo sapien
tccaggcctcatctctttccttact

SEQ ID NO: 1408782 - DNA, 25 bp, Homo sapien
caggcctcatctctttccttacttc

SEQ ID NO: 1408783 - DNA, 25 bp, Homo sapien
gcctcatctctttccttacttcttt

SEQ ID NO: 1408784 - DNA, 25 bp, Homo sapien
ctttcccctttgtcctcatcctcca

SEQ ID NO: 1408785 - DNA, 25 bp, Homo sapien
ggtgtccttcgatggtcctccctgg

SEQ ID NO: 1408786 - DNA, 25 bp, Homo sapien
ttttgagcagagatactgacaaggt

SEQ ID NO: 1408787 - DNA, 25 bp, Homo sapien
ggctcagcccgctattttgtgaaat

SEQ ID NO: 1408788 - DNA, 25 bp, Homo sapien
caaggtagtcacagtttctcagggc

SEQ ID NO: 1408789 - DNA, 25 bp, Homo sapien
caactgactctacccacttggtgag

SEQ ID NO: 1408790 - DNA, 25 bp, Homo sapien
cagaggactagggtgcaatcattcc

SEQ ID NO: 1408791 - DNA, 25 bp, Homo sapien
caggttcggctctgtataaggaccc

SEQ ID NO: 1408792 - DNA, 25 bp, Homo sapien
tggcccaggcaatgtcaacgacttc

SEQ ID NO: 1408793 - DNA, 25 bp, Homo sapien
cactggtggtgcactctgaggaacc

SEQ ID NO: 1408794 - DNA, 25 bp, Homo sapien
gcattcctggaggacacgggatcca

SEQ ID NO: 1408795 - DNA, 25 bp, Homo sapien
tcctggccagaagcagttagggagc

SEQ ID NO: 1408796 - DNA, 25 bp, Homo sapien
ttagggagctagcagagaaccgtcc

SEQ ID NO: 1408797 - DNA, 25 bp, Homo sapien
gatggtggaaaatacaaaagcctgc

SEQ ID NO: 1408798 - DNA, 25 bp, Homo sapien
ctgtgatggtggaaaatacaaaagc

SEQ ID NO: 1408799 - DNA, 25 bp, Homo sapien
tggtggaaaatacaaaagcctgcat

SEQ ID NO: 1408800 - DNA, 25 bp, Homo sapien
gtgatggtggaaaatacaaaagcct

SEQ ID NO: 1408801 - DNA, 25 bp, Homo sapien
tggcctcaaacgataaacttgcttc

SEQ ID NO: 1408802 - DNA, 25 bp, Homo sapien
gcctcaaacgataaacttgcttcag

SEQ ID NO: 1408803 - DNA, 25 bp, Homo sapien
ctcaaacgataaacttgcttcagcc

SEQ ID NO: 1408804 - DNA, 25 bp, Homo sapien
ctggcctcaaacgataaacttgctt

SEQ ID NO: 1408805 - DNA, 25 bp, Homo sapien
ttcatattgccagtgatgaaagaga

SEQ ID NO: 1408806 - DNA, 25 bp, Homo sapien
gatctttgccgacattaaggcagaa

SEQ ID NO: 1408807 - DNA, 25 bp, Homo sapien
aggacgtctggcttccgagcaggaa

SEQ ID NO: 1408808 - DNA, 25 bp, Homo sapien
cagaaaagggcagacttgatagatt

SEQ ID NO: 1408809 - DNA, 25 bp, Homo sapien
gctgaagtacacagggacgaaatgt

SEQ ID NO: 1408810 - DNA, 25 bp, Homo sapien
caatgttaaacatcctgggtgtggt

SEQ ID NO: 1408811 - DNA, 25 bp, Homo sapien
tgttcctgggaaatacaagctgaag

SEQ ID NO: 1408812 - DNA, 25 bp, Homo sapien
gacaactgtcattcgaatacggact

SEQ ID NO: 1408813 - DNA, 25 bp, Homo sapien
tatacctaggatgtgagcaaccagg

SEQ ID NO: 1408814 - DNA, 25 bp, Homo sapien
gcaaaagtacctccataaagcagat

SEQ ID NO: 1408815 - DNA, 25 bp, Homo sapien
tagataactattcaacctaccctga

SEQ ID NO: 1408816 - DNA, 25 bp, Homo sapien
ctgggctgaaaagttgaataacgta

SEQ ID NO: 1408817 - DNA, 25 bp, Homo sapien
gatcagcattctttgccttagcata

SEQ ID NO: 1408818 - DNA, 25 bp, Homo sapien
cttagcatacaaggccacaatgaca

SEQ ID NO: 1408819 - DNA, 25 bp, Homo sapien
gcagagtcaagctaaaactgcccta

SEQ ID NO: 1408820 - DNA, 25 bp, Homo sapien
cagagtacttactgatggactggtc

SEQ ID NO: 1408821 - DNA, 25 bp, Homo sapien
ttgagaaagaccacattaagtttat

SEQ ID NO: 1408822 - DNA, 25 bp, Homo sapien
gctataaccaggaaagtcaagaggg

SEQ ID NO: 1408823 - DNA, 25 bp, Homo sapien
aagccctactgcacttaacaggaga

SEQ ID NO: 1408824 - DNA, 25 bp, Homo sapien
gggtcttagaacatatactgctcag

SEQ ID NO: 1408825 - DNA, 25 bp, Homo sapien
ggagagaaggtcaagtaaccccaga

SEQ ID NO: 1408826 - DNA, 25 bp, Homo sapien
tgaatgggtagttgggcatcaccag

SEQ ID NO: 1408827 - DNA, 25 bp, Homo sapien
cacttgaccgaatgttgatgaatgg

SEQ ID NO: 1408828 - DNA, 25 bp, Homo sapien
gcatcaccagcttgttgaagttaaa

SEQ ID NO: 1408829 - DNA, 25 bp, Homo sapien
gaaggatcctcttgttgtaatagta

SEQ ID NO: 1408830 - DNA, 25 bp, Homo sapien
cctacgtataaccaaagatatgcct

SEQ ID NO: 1408831 - DNA, 25 bp, Homo sapien
ttttatctagcattcaccaaacagc

SEQ ID NO: 1408832 - DNA, 25 bp, Homo sapien
tcgcccactacagagcagaatcagc

SEQ ID NO: 1408833 - DNA, 25 bp, Homo sapien
gatccagtgccagccacattggaat

SEQ ID NO: 1408834 - DNA, 25 bp, Homo sapien
ggtttgcatttcctgcggccccaga

SEQ ID NO: 1408835 - DNA, 25 bp, Homo sapien
tccctgctgccaggcgatgacatgg

SEQ ID NO: 1408836 - DNA, 25 bp, Homo sapien
gacatggcggaactcttccttctgc

SEQ ID NO: 1408837 - DNA, 25 bp, Homo sapien
cagcttgtcataattcatctgtggt

SEQ ID NO: 1408838 - DNA, 25 bp, Homo sapien
ctgttttgtaggcccagtcaggaaa

SEQ ID NO: 1408839 - DNA, 25 bp, Homo sapien
tccacgatgctacagccggctttca

SEQ ID NO: 1408840 - DNA, 25 bp, Homo sapien
tggcttttccacgatgctacagccg

SEQ ID NO: 1408841 - DNA, 25 bp, Homo sapien
tccttctggcttttccacgatgcta

SEQ ID NO: 1408842 - DNA, 25 bp, Homo sapien
ttttccacgatgctacagccggctt

SEQ ID NO: 1408843 - DNA, 25 bp, Homo sapien
cgtcttcggtccggtctcctccgcg

SEQ ID NO: 1408844 - DNA, 25 bp, Homo sapien
tcttcggtccggtctcctccgcggc

SEQ ID NO: 1408845 - DNA, 25 bp, Homo sapien
tcctcggctgctttcgtcacttcca

SEQ ID NO: 1408846 - DNA, 25 bp, Homo sapien
gcaggaagtgacctcctcggctgct

SEQ ID NO: 1408847 - DNA, 25 bp, Homo sapien
cctcggctgctttcgtcacttccat

SEQ ID NO: 1408848 - DNA, 25 bp, Homo sapien
aggaagtgacctcctcggctgcttt

SEQ ID NO: 1408849 - DNA, 25 bp, Homo sapien
atccgccccggcacggcccgtgcgt

SEQ ID NO: 1408850 - DNA, 25 bp, Homo sapien
gcagacgccgacttccgcccgcact

SEQ ID NO: 1408851 - DNA, 25 bp, Homo sapien
ctcccggcccgcatcccgcgcatcc

SEQ ID NO: 1408852 - DNA, 25 bp, Homo sapien
tcagcagacgccgacttccgcccgc

SEQ ID NO: 1408853 - DNA, 25 bp, Homo sapien
tttcaaaacgtggagatttttcatg

SEQ ID NO: 1408854 - DNA, 25 bp, Homo sapien
ctgaaatagggagagcatgagcttt

SEQ ID NO: 1408855 - DNA, 25 bp, Homo sapien
ctctacttatcaggattcggggttt

SEQ ID NO: 1408856 - DNA, 25 bp, Homo sapien
tatcaggattcggggtttaggtctc

SEQ ID NO: 1408857 - DNA, 25 bp, Homo sapien
tctacttatcaggattcggggttta

SEQ ID NO: 1408858 - DNA, 25 bp, Homo sapien
ctacttatcaggattcggggtttag

SEQ ID NO: 1408859 - DNA, 25 bp, Homo sapien
actccttgagcggcttcagtggatg

SEQ ID NO: 1408860 - DNA, 25 bp, Homo sapien
ggatgcaggacccacgcagttctgt

SEQ ID NO: 1408861 - DNA, 25 bp, Homo sapien
atgcaggacccacgcagttctgtgg

SEQ ID NO: 1408862 - DNA, 25 bp, Homo sapien
cccactccttgagcggcttcagtgg

SEQ ID NO: 1408863 - DNA, 25 bp, Homo sapien
tcctagcggcagtttggtcttcagc

SEQ ID NO: 1408864 - DNA, 25 bp, Homo sapien
gcctccttgcaggaaattcctagcg

SEQ ID NO: 1408865 - DNA, 25 bp, Homo sapien
cacgaggtggcactagtgcgcaggt

SEQ ID NO: 1408866 - DNA, 25 bp, Homo sapien
gtttggtcttcagccacgaggtggc

SEQ ID NO: 1408867 - DNA, 25 bp, Homo sapien
tgaccacagggcagataggagcggt

SEQ ID NO: 1408868 - DNA, 25 bp, Homo sapien
tgcagcagtgctgaggggtggtgga

SEQ ID NO: 1408869 - DNA, 25 bp, Homo sapien
cagggcagataggagcggttagggc

SEQ ID NO: 1408870 - DNA, 25 bp, Homo sapien
accacagggcagataggagcggtta

SEQ ID NO: 1408871 - DNA, 25 bp, Homo sapien
agccccgagaccgactctgggaagt

SEQ ID NO: 1408872 - DNA, 25 bp, Homo sapien
tcagccccgagaccgactctgggaa

SEQ ID NO: 1408873 - DNA, 25 bp, Homo sapien
cctcagccccgagaccgactctggg

SEQ ID NO: 1408874 - DNA, 25 bp, Homo sapien
gccccgagaccgactctgggaagtg

SEQ ID NO: 1408875 - DNA, 25 bp, Homo sapien
tgttgcccagattccgctttaacca

SEQ ID NO: 1408876 - DNA, 25 bp, Homo sapien
attccgctttaaccaccgattcctg

SEQ ID NO: 1408877 - DNA, 25 bp, Homo sapien
aactggtgtggatttagcattaggg

SEQ ID NO: 1408878 - DNA, 25 bp, Homo sapien
gactccaggtctgctacacagaggc

SEQ ID NO: 1408879 - DNA, 25 bp, Homo sapien
cagacaatgctgcacattccagggc

SEQ ID NO: 1408880 - DNA, 25 bp, Homo sapien
gctgccgtctggtcgttaagtgttc

SEQ ID NO: 1408881 - DNA, 25 bp, Homo sapien
gtggcacagtaattggaggctccca

SEQ ID NO: 1408882 - DNA, 25 bp, Homo sapien
gcaagatacttcataggagcctcct

SEQ ID NO: 1408883 - DNA, 25 bp, Homo sapien
tactgagggcgtcaggaaccagtaa

SEQ ID NO: 1408884 - DNA, 25 bp, Homo sapien
cccgtcccaggcgtaactactgagg

SEQ ID NO: 1408885 - DNA, 25 bp, Homo sapien
ggtgcggacgcccaggcgaagggtc

SEQ ID NO: 1408886 - DNA, 25 bp, Homo sapien
gattgagaagatgtggtcccgtccc

SEQ ID NO: 1408887 - DNA, 25 bp, Homo sapien
caggatccaccctgcgtctgggtga

SEQ ID NO: 1408888 - DNA, 25 bp, Homo sapien
cgggcccgcagtccgctcccgaaag

SEQ ID NO: 1408889 - DNA, 25 bp, Homo sapien
cagtgggaacttgcggcgatgtcac

SEQ ID NO: 1408890 - DNA, 25 bp, Homo sapien
tgaccgccgagctaggtgctcccgg

SEQ ID NO: 1408891 - DNA, 25 bp, Homo sapien
cgcaggtgagatcgcagagaccaca

SEQ ID NO: 1408892 - DNA, 25 bp, Homo sapien
tcaaaagtctatcggcacattcagg

SEQ ID NO: 1408893 - DNA, 25 bp, Homo sapien
gttggatgatgtggtctatccttcc

SEQ ID NO: 1408894 - DNA, 25 bp, Homo sapien
agagaccacaggtttccttgcgggg

SEQ ID NO: 1408895 - DNA, 25 bp, Homo sapien
gtccagagccgccttggggcccaga

SEQ ID NO: 1408896 - DNA, 25 bp, Homo sapien
tccagagatgcagccacaggccttg

SEQ ID NO: 1408897 - DNA, 25 bp, Homo sapien
gcagtgggtccagagccgccttggg

SEQ ID NO: 1408898 - DNA, 25 bp, Homo sapien
cccagaggctccagagatgcagcca

SEQ ID NO: 1408899 - DNA, 25 bp, Homo sapien
tgttccaacgttctggagcccttct

SEQ ID NO: 1408900 - DNA, 25 bp, Homo sapien
cgggcttggaaatgtcgtgttaggt

SEQ ID NO: 1408901 - DNA, 25 bp, Homo sapien
tatgtaaggtgcagctctgagccct

SEQ ID NO: 1408902 - DNA, 25 bp, Homo sapien
gccacagaggaaggtcaccacctcc

SEQ ID NO: 1408903 - DNA, 25 bp, Homo sapien
aggagcaaggtgagcatcacttcct

SEQ ID NO: 1408904 - DNA, 25 bp, Homo sapien
ggtgagcatcacttcctggactttc

SEQ ID NO: 1408905 - DNA, 25 bp, Homo sapien
caaggtgagcatcacttcctggact

SEQ ID NO: 1408906 - DNA, 25 bp, Homo sapien
actctaaggagcaaggtgagcatca

SEQ ID NO: 1408907 - DNA, 25 bp, Homo sapien
gtttgaataagagtcactgttccta

SEQ ID NO: 1408908 - DNA, 25 bp, Homo sapien
gatgtttgaataagagtcactgttc

SEQ ID NO: 1408909 - DNA, 25 bp, Homo sapien
tgatgtttgaataagagtcactgtt

SEQ ID NO: 1408910 - DNA, 25 bp, Homo sapien
tgtttgaataagagtcactgttcct

SEQ ID NO: 1408911 - DNA, 25 bp, Homo sapien
agctccacattaaggaaggatgtcg

SEQ ID NO: 1408912 - DNA, 25 bp, Homo sapien
gggaacccatgggagcagctcatgc

SEQ ID NO: 1408913 - DNA, 25 bp, Homo sapien
cttgctgtctccgtgggatgaggca

SEQ ID NO: 1408914 - DNA, 25 bp, Homo sapien
acattaaggaaggatgtcgaggacc

SEQ ID NO: 1408915 - DNA, 25 bp, Homo sapien
caagtcccttcattgccccagtgtc

SEQ ID NO: 1408916 - DNA, 25 bp, Homo sapien
aagtcccttcattgccccagtgtct

SEQ ID NO: 1408917 - DNA, 25 bp, Homo sapien
gctctgggcttgtccagatcttgtc

SEQ ID NO: 1408918 - DNA, 25 bp, Homo sapien
catacacagtgtggactgctggagc

SEQ ID NO: 1408919 - DNA, 25 bp, Homo sapien
tcatggtctaggcacactccggagc

SEQ ID NO: 1408920 - DNA, 25 bp, Homo sapien
tctaggcacactccggagctctggg

SEQ ID NO: 1408921 - DNA, 25 bp, Homo sapien
ctcttcttcatgtcattctgcaatt

SEQ ID NO: 1408922 - DNA, 25 bp, Homo sapien
ttctcttcttcatgtcattctgcaa

SEQ ID NO: 1408923 - DNA, 25 bp, Homo sapien
agcttctcttcttcatgtcattctg

SEQ ID NO: 1408924 - DNA, 25 bp, Homo sapien
gcttctcttcttcatgtcattctgc

SEQ ID NO: 1408925 - DNA, 25 bp, Homo sapien
ctctgtgtttctctagttgggggta

SEQ ID NO: 1408926 - DNA, 25 bp, Homo sapien
tagtggggcttggattccaaagagt

SEQ ID NO: 1408927 - DNA, 25 bp, Homo sapien
ggattccaaagagttatgttctgag

SEQ ID NO: 1408928 - DNA, 25 bp, Homo sapien
gggcttggattccaaagagttatgt

SEQ ID NO: 1408929 - DNA, 25 bp, Homo sapien
taggcagaattactccatgggggac

SEQ ID NO: 1408930 - DNA, 25 bp, Homo sapien
catgggggaccatagcaccaacttc

SEQ ID NO: 1408931 - DNA, 25 bp, Homo sapien
gcggccatatgagatgctctcccag

SEQ ID NO: 1408932 - DNA, 25 bp, Homo sapien
aacttccaatgaagggccagcggcc

SEQ ID NO: 1408933 - DNA, 25 bp, Homo sapien
tcatttacactcacctctcctgtgg

SEQ ID NO: 1408934 - DNA, 25 bp, Homo sapien
cgctgagcatgagcatggcaccact

SEQ ID NO: 1408935 - DNA, 25 bp, Homo sapien
agcagccgctgagcatgagcatggc

SEQ ID NO: 1408936 - DNA, 25 bp, Homo sapien
caggttagcaatgtcccgtgtggga

SEQ ID NO: 1408937 - DNA, 25 bp, Homo sapien
ggtggctgtcaatctcactagtctg

SEQ ID NO: 1408938 - DNA, 25 bp, Homo sapien
gaaacagccttgtatctcagggata

SEQ ID NO: 1408939 - DNA, 25 bp, Homo sapien
taaatagatgcgagagttcaaatcc

SEQ ID NO: 1408940 - DNA, 25 bp, Homo sapien
tctaactttagaggaaagctctcag

SEQ ID NO: 1408941 - DNA, 25 bp, Homo sapien
gctgtgggattgtaatacctagtct

SEQ ID NO: 1408942 - DNA, 25 bp, Homo sapien
cctatgtcttagcagaattcaagcc

SEQ ID NO: 1408943 - DNA, 25 bp, Homo sapien
ggccaatgcctaggaatgaccaagg

SEQ ID NO: 1408944 - DNA, 25 bp, Homo sapien
gtccaggtggagtcagtcagttgcc

SEQ ID NO: 1408945 - DNA, 25 bp, Homo sapien
tgaccaaggacagcttgaaagctag

SEQ ID NO: 1408946 - DNA, 25 bp, Homo sapien
agaagattggaaatccctgactgta

SEQ ID NO: 1408947 - DNA, 25 bp, Homo sapien
aatgtcttcaaaagttagctcagcc

SEQ ID NO: 1408948 - DNA, 25 bp, Homo sapien
cccaatagcgtaggaatagttaagg

SEQ ID NO: 1408949 - DNA, 25 bp, Homo sapien
ccagaagattggaaatccctgactg

SEQ ID NO: 1408950 - DNA, 25 bp, Homo sapien
gaatttgggagaggctgcatgcaca

SEQ ID NO: 1408951 - DNA, 25 bp, Homo sapien
acttaagagatccaagttcccagtt

SEQ ID NO: 1408952 - DNA, 25 bp, Homo sapien
ttctcccgtgattcttctcttggga

SEQ ID NO: 1408953 - DNA, 25 bp, Homo sapien
cacatgcccagtagcctgccagaat

SEQ ID NO: 1408954 - DNA, 25 bp, Homo sapien
gattacaggtggagaataccttaga

SEQ ID NO: 1408955 - DNA, 25 bp, Homo sapien
tagaacttctaaattagcatcccgg

SEQ ID NO: 1408956 - DNA, 25 bp, Homo sapien
ttctaaattagcatcccggttgcca

SEQ ID NO: 1408957 - DNA, 25 bp, Homo sapien
ctgcagaattctggagcaatagatt

SEQ ID NO: 1408958 - DNA, 25 bp, Homo sapien
ctaaatatcagtattagtattagta

SEQ ID NO: 1408959 - DNA, 25 bp, Homo sapien
atttatcagcaaataggcagttggg

SEQ ID NO: 1408960 - DNA, 25 bp, Homo sapien
tatttatcagcaaataggcagttgg

SEQ ID NO: 1408961 - DNA, 25 bp, Homo sapien
ctatttatcagcaaataggcagttg

SEQ ID NO: 1408962 - DNA, 25 bp, Homo sapien
tttatcagcaaataggcagttgggt

SEQ ID NO: 1408963 - DNA, 25 bp, Homo sapien
gctggcaatttgttaagctcaacag

SEQ ID NO: 1408964 - DNA, 25 bp, Homo sapien
gtttctgaccacatacagaagaccg

SEQ ID NO: 1408965 - DNA, 25 bp, Homo sapien
tttgttaagctcaacagactcttcc

SEQ ID NO: 1408966 - DNA, 25 bp, Homo sapien
acagaagaccggcattgcactggct

SEQ ID NO: 1408967 - DNA, 25 bp, Homo sapien
gcctgctgtgatggatgatgactca

SEQ ID NO: 1408968 - DNA, 25 bp, Homo sapien
ggcctttgctaacccaggtcacatt

SEQ ID NO: 1408969 - DNA, 25 bp, Homo sapien
cattcatatcctctgtggtccctag

SEQ ID NO: 1408970 - DNA, 25 bp, Homo sapien
ggtccctagagaattgtcctccact

SEQ ID NO: 1408971 - DNA, 25 bp, Homo sapien
gggctccttccattacctggcaata

SEQ ID NO: 1408972 - DNA, 25 bp, Homo sapien
ggctccttccattacctggcaatac

SEQ ID NO: 1408973 - DNA, 25 bp, Homo sapien
cattacctggcaataccccacggga

SEQ ID NO: 1408974 - DNA, 25 bp, Homo sapien
ctggcaataccccacgggagtcctt

SEQ ID NO: 1408975 - DNA, 25 bp, Homo sapien
acccttaaacttgatgacgtctgca

SEQ ID NO: 1408976 - DNA, 25 bp, Homo sapien
gatcatctgggtgtaaacctgagga

SEQ ID NO: 1408977 - DNA, 25 bp, Homo sapien
tatggtccaggaattagtgcagagc

SEQ ID NO: 1408978 - DNA, 25 bp, Homo sapien
tgtgattatactgaactgacccaga

SEQ ID NO: 1408979 - DNA, 25 bp, Homo sapien
actgatacccagtaatgtccagtca

SEQ ID NO: 1408980 - DNA, 25 bp, Homo sapien
ttatgctgccccagggttaatgtgc

SEQ ID NO: 1408981 - DNA, 25 bp, Homo sapien
gccagtgaagagactggcacaccct

SEQ ID NO: 1408982 - DNA, 25 bp, Homo sapien
aagagactggcacaccctcggcctt

SEQ ID NO: 1408983 - DNA, 25 bp, Homo sapien
agtgaagagactggcacaccctcgg

SEQ ID NO: 1408984 - DNA, 25 bp, Homo sapien
aagccagtgaagagactggcacacc

SEQ ID NO: 1408985 - DNA, 25 bp, Homo sapien
tttccagatattgttcaccgatgcc

SEQ ID NO: 1408986 - DNA, 25 bp, Homo sapien
aatgatcttaatggcctggcctgga

SEQ ID NO: 1408987 - DNA, 25 bp, Homo sapien
cctgttgcttcctccaatcgaatga

SEQ ID NO: 1408988 - DNA, 25 bp, Homo sapien
tgtagataggagtgagagactccct

SEQ ID NO: 1408989 - DNA, 25 bp, Homo sapien
gagatcttcatattggttgacacca

SEQ ID NO: 1408990 - DNA, 25 bp, Homo sapien
ccttgcccttcggaaacacttgctg

SEQ ID NO: 1408991 - DNA, 25 bp, Homo sapien
acacttgctgcctgagatcttcata

SEQ ID NO: 1408992 - DNA, 25 bp, Homo sapien
gttgacaccatcatcgaccccatgg

SEQ ID NO: 1408993 - DNA, 25 bp, Homo sapien
ctcttcctatattcatcatcttctt

SEQ ID NO: 1408994 - DNA, 25 bp, Homo sapien
tcttcttcttcccacatgtcttcaa

SEQ ID NO: 1408995 - DNA, 25 bp, Homo sapien
tcttcttcccacatgtcttcaaaag

SEQ ID NO: 1408996 - DNA, 25 bp, Homo sapien
tcttcctatattcatcatcttcttc

SEQ ID NO: 1408997 - DNA, 25 bp, Homo sapien
ccagggtgacgttacacaggtctgg

SEQ ID NO: 1408998 - DNA, 25 bp, Homo sapien
gtgacgttacacaggtctggtgtga

SEQ ID NO: 1408999 - DNA, 25 bp, Homo sapien
agagtttcctaaggtctaagactgc

SEQ ID NO: 1409000 - DNA, 25 bp, Homo sapien
ctaaggtctaagactgcagctttct

SEQ ID NO: 1409001 - DNA, 25 bp, Homo sapien
tgcggactcgcagcaactgtgtatg

SEQ ID NO: 1409002 - DNA, 25 bp, Homo sapien
gcttgaacttgtcctggagtttcaa

SEQ ID NO: 1409003 - DNA, 25 bp, Homo sapien
aactcggtgcctacatctactctga

SEQ ID NO: 1409004 - DNA, 25 bp, Homo sapien
gagcttctcgatcgcattaaacaag

SEQ ID NO: 1409005 - DNA, 25 bp, Homo sapien
cccacaagggatagtgagagaaggg

SEQ ID NO: 1409006 - DNA, 25 bp, Homo sapien
aagggtcatgtcactcgtgggtggg

SEQ ID NO: 1409007 - DNA, 25 bp, Homo sapien
ccacaagggatagtgagagaagggt

SEQ ID NO: 1409008 - DNA, 25 bp, Homo sapien
tgagagaagggtcatgtcactcgtg

SEQ ID NO: 1409009 - DNA, 25 bp, Homo sapien
acccagagcctcatcacatcctcct

SEQ ID NO: 1409010 - DNA, 25 bp, Homo sapien
atggaacccagagcctcatcacatc

SEQ ID NO: 1409011 - DNA, 25 bp, Homo sapien
ggaacccagagcctcatcacatcct

SEQ ID NO: 1409012 - DNA, 25 bp, Homo sapien
gaacccagagcctcatcacatcctc

SEQ ID NO: 1409013 - DNA, 25 bp, Homo sapien
agtcatccagaagaaggaccggttc

SEQ ID NO: 1409014 - DNA, 25 bp, Homo sapien
tcatccagaagaaggaccggttctt

SEQ ID NO: 1409015 - DNA, 25 bp, Homo sapien
gcaggttgcctgctggcctgttcag

SEQ ID NO: 1409016 - DNA, 25 bp, Homo sapien
cccatggcaggttgcctgctggcct

SEQ ID NO: 1409017 - DNA, 25 bp, Homo sapien
tctgccccaggtggccgtggtcacc

SEQ ID NO: 1409018 - DNA, 25 bp, Homo sapien
tgccccaggtggccgtggtcaccag

SEQ ID NO: 1409019 - DNA, 25 bp, Homo sapien
ccccaggtggccgtggtcaccagtg

SEQ ID NO: 1409020 - DNA, 25 bp, Homo sapien
caggtggccgtggtcaccagtgtca

SEQ ID NO: 1409021 - DNA, 25 bp, Homo sapien
tatttagggtcttatctcagctggc

SEQ ID NO: 1409022 - DNA, 25 bp, Homo sapien
caaggcaactgagaatcacgcgagg

SEQ ID NO: 1409023 - DNA, 25 bp, Homo sapien
catgggtagaccgaaacgtttcagg

SEQ ID NO: 1409024 - DNA, 25 bp, Homo sapien
gaatgctccgaaagctgtgcagcgg

SEQ ID NO: 1409025 - DNA, 25 bp, Homo sapien
ggtgaggacattgtagcagagctcc

SEQ ID NO: 1409026 - DNA, 25 bp, Homo sapien
tggtgaggacattgtagcagagctc

SEQ ID NO: 1409027 - DNA, 25 bp, Homo sapien
ttccccacactttgtggcatcttct

SEQ ID NO: 1409028 - DNA, 25 bp, Homo sapien
ccacactttgtggcatcttcttcct

SEQ ID NO: 1409029 - DNA, 25 bp, Homo sapien
tgacaggggagtagatggagatcca

SEQ ID NO: 1409030 - DNA, 25 bp, Homo sapien
agctgaagtctagagttcattaagg

SEQ ID NO: 1409031 - DNA, 25 bp, Homo sapien
ccttcagcgcttcatgatcctcatg

SEQ ID NO: 1409032 - DNA, 25 bp, Homo sapien
agttcattaaggagatgacagggga

SEQ ID NO: 1409033 - DNA, 25 bp, Homo sapien
tcttcttgtttgagttgccatagcc

SEQ ID NO: 1409034 - DNA, 25 bp, Homo sapien
attaagtaatgctgagctggtgtgc

SEQ ID NO: 1409035 - DNA, 25 bp, Homo sapien
cttcttgtttgagttgccatagcca

SEQ ID NO: 1409036 - DNA, 25 bp, Homo sapien
ttcttgtttgagttgccatagccat

SEQ ID NO: 1409037 - DNA, 25 bp, Homo sapien
cagcagccaacatcatttgcagagt

SEQ ID NO: 1409038 - DNA, 25 bp, Homo sapien
gaggttttgaggactttggcaacag

SEQ ID NO: 1409039 - DNA, 25 bp, Homo sapien
tagatggaagtgttcagccccgagg

SEQ ID NO: 1409040 - DNA, 25 bp, Homo sapien
cctggcaagaaaagggctacactct

SEQ ID NO: 1409041 - DNA, 25 bp, Homo sapien
tcagggccgcctgaagacaactaaa

SEQ ID NO: 1409042 - DNA, 25 bp, Homo sapien
atttttccacagaacacgtagcttg

SEQ ID NO: 1409043 - DNA, 25 bp, Homo sapien
gacaactaaaggagaggagctctcc

SEQ ID NO: 1409044 - DNA, 25 bp, Homo sapien
tccacagaacacgtagcttgggcca

SEQ ID NO: 1409045 - DNA, 25 bp, Homo sapien
tgatcaagctcgtcctcttttctta

SEQ ID NO: 1409046 - DNA, 25 bp, Homo sapien
atgatcaagctcgtcctcttttctt

SEQ ID NO: 1409047 - DNA, 25 bp, Homo sapien
gatcaagctcgtcctcttttcttac

SEQ ID NO: 1409048 - DNA, 25 bp, Homo sapien
ctgctgggcgactgtgctcctggta

SEQ ID NO: 1409049 - DNA, 25 bp, Homo sapien
gggcgactgtgctcctggtattcat

SEQ ID NO: 1409050 - DNA, 25 bp, Homo sapien
ggccatcaagcagcctgccatgggg

SEQ ID NO: 1409051 - DNA, 25 bp, Homo sapien
gctgggcgactgtgctcctggtatt

SEQ ID NO: 1409052 - DNA, 25 bp, Homo sapien
ccactccgtgtctgccagcagggag

SEQ ID NO: 1409053 - DNA, 25 bp, Homo sapien
atgcccactccgtgtctgccagcag

SEQ ID NO: 1409054 - DNA, 25 bp, Homo sapien
tgaatgcccactccgtgtctgccag

SEQ ID NO: 1409055 - DNA, 25 bp, Homo sapien
cccactccgtgtctgccagcaggga

SEQ ID NO: 1409056 - DNA, 25 bp, Homo sapien
gaggccgcggcagcttctcagtcct

SEQ ID NO: 1409057 - DNA, 25 bp, Homo sapien
ggaggccgcggcagcttctcagtcc

SEQ ID NO: 1409058 - DNA, 25 bp, Homo sapien
tcctgcggggctcagacgacagtgc

SEQ ID NO: 1409059 - DNA, 25 bp, Homo sapien
cagacgacagtgcagctgagctagt

SEQ ID NO: 1409060 - DNA, 25 bp, Homo sapien
gggggtggcgatgtcactgtagaga

SEQ ID NO: 1409061 - DNA, 25 bp, Homo sapien
ggtgcagtgtgggagctcattgttg

SEQ ID NO: 1409062 - DNA, 25 bp, Homo sapien
ctcattgttggggaggtcaggtggc

SEQ ID NO: 1409063 - DNA, 25 bp, Homo sapien
tgtcactgtagagatgctgggtgca

SEQ ID NO: 1409064 - DNA, 25 bp, Homo sapien
ttgtaggcactgaatatgaattcat

SEQ ID NO: 1409065 - DNA, 25 bp, Homo sapien
tgtaggcactgaatatgaattcata

SEQ ID NO: 1409066 - DNA, 25 bp, Homo sapien
gttgtaggcactgaatatgaattca

SEQ ID NO: 1409067 - DNA, 25 bp, Homo sapien
agttgtaggcactgaatatgaattc

SEQ ID NO: 1409068 - DNA, 25 bp, Homo sapien
catggttcaggtggagtgagcttcc

SEQ ID NO: 1409069 - DNA, 25 bp, Homo sapien
aatggcagtctcaggctctacgcag

SEQ ID NO: 1409070 - DNA, 25 bp, Homo sapien
catcactgtacaatccactgggagc

SEQ ID NO: 1409071 - DNA, 25 bp, Homo sapien
agcagggccctgcattctggtcaga

SEQ ID NO: 1409072 - DNA, 25 bp, Homo sapien
gggttgacgccaccttaacttcaga

SEQ ID NO: 1409073 - DNA, 25 bp, Homo sapien
gaagccaagaacagggatccggaaa

SEQ ID NO: 1409074 - DNA, 25 bp, Homo sapien
ggaagccaagaacagggatccggaa

SEQ ID NO: 1409075 - DNA, 25 bp, Homo sapien
acttcagagtagatgataggggaac

SEQ ID NO: 1409076 - DNA, 25 bp, Homo sapien
cctgagatgcctggggtcagaggcc

SEQ ID NO: 1409077 - DNA, 25 bp, Homo sapien
cttgttcctgagatgcctggggtca

SEQ ID NO: 1409078 - DNA, 25 bp, Homo sapien
ttgttcctgagatgcctggggtcag

SEQ ID NO: 1409079 - DNA, 25 bp, Homo sapien
gttcctgagatgcctggggtcagag

SEQ ID NO: 1409080 - DNA, 25 bp, Homo sapien
tccctctgtgcggtgagtagccatt

SEQ ID NO: 1409081 - DNA, 25 bp, Homo sapien
ggaaagtgttcagttgtggaagact

SEQ ID NO: 1409082 - DNA, 25 bp, Homo sapien
gagtagccattcctcttagttggtg

SEQ ID NO: 1409083 - DNA, 25 bp, Homo sapien
agtgttcagttgtggaagactggca

SEQ ID NO: 1409084 - DNA, 25 bp, Homo sapien
tccgtacttctgagtaaaccacatt

SEQ ID NO: 1409085 - DNA, 25 bp, Homo sapien
cttggatgatccgtacttctgagta

SEQ ID NO: 1409086 - DNA, 25 bp, Homo sapien
ttctcttggatgatccgtacttctg

SEQ ID NO: 1409087 - DNA, 25 bp, Homo sapien
ggatgatccgtacttctgagtaaac

SEQ ID NO: 1409088 - DNA, 25 bp, Homo sapien
ctaggcctcggcatagtccctcccc

SEQ ID NO: 1409089 - DNA, 25 bp, Homo sapien
gcctcggcatagtccctccccatct

SEQ ID NO: 1409090 - DNA, 25 bp, Homo sapien
cctcggcatagtccctccccatctc

SEQ ID NO: 1409091 - DNA, 25 bp, Homo sapien
aggcctcggcatagtccctccccat

SEQ ID NO: 1409092 - DNA, 25 bp, Homo sapien
caaatgcaggatcctcgggcctcac

SEQ ID NO: 1409093 - DNA, 25 bp, Homo sapien
tcttgggagtccgagtctgaagggc

SEQ ID NO: 1409094 - DNA, 25 bp, Homo sapien
tacattgtgataggtgggctcttgg

SEQ ID NO: 1409095 - DNA, 25 bp, Homo sapien
tcccaggctggtacattgtgatagg

SEQ ID NO: 1409096 - DNA, 25 bp, Homo sapien
cattagtgtacactggttgcagctc

SEQ ID NO: 1409097 - DNA, 25 bp, Homo sapien
agtacataacaaactgaccatgggc

SEQ ID NO: 1409098 - DNA, 25 bp, Homo sapien
tcatctagtgtgtaacaggcatggt

SEQ ID NO: 1409099 - DNA, 25 bp, Homo sapien
tgagtgacttcttactgcagggtgg

SEQ ID NO: 1409100 - DNA, 25 bp, Homo sapien
gatgcttacagcaatacgttgttag

SEQ ID NO: 1409101 - DNA, 25 bp, Homo sapien
gcggggtcagaggcaggctttctcc

SEQ ID NO: 1409102 - DNA, 25 bp, Homo sapien
ctggcggggtcagaggcaggctttc

SEQ ID NO: 1409103 - DNA, 25 bp, Homo sapien
ggcggggtcagaggcaggctttctc

SEQ ID NO: 1409104 - DNA, 25 bp, Homo sapien
tggcggggtcagaggcaggctttct

SEQ ID NO: 1409105 - DNA, 25 bp, Homo sapien
aaagggccacttctgttcgcggtca

SEQ ID NO: 1409106 - DNA, 25 bp, Homo sapien
gcagtagagcagcagtgcccccgca

SEQ ID NO: 1409107 - DNA, 25 bp, Homo sapien
cccggcgactcctgtggcaaaaggg

SEQ ID NO: 1409108 - DNA, 25 bp, Homo sapien
tcctgtggcaaaagggccacttctg

SEQ ID NO: 1409109 - DNA, 25 bp, Homo sapien
cagagggggacgacctatttcctag

SEQ ID NO: 1409110 - DNA, 25 bp, Homo sapien
ataaagtgtcactgtctcactgcgc

SEQ ID NO: 1409111 - DNA, 25 bp, Homo sapien
ccccaccgcagcatgggtcccggga

SEQ ID NO: 1409112 - DNA, 25 bp, Homo sapien
atgaaaaaaccggtacaggatcagg

SEQ ID NO: 1409113 - DNA, 25 bp, Homo sapien
aacaaatctgcttctagtgggccag

SEQ ID NO: 1409114 - DNA, 25 bp, Homo sapien
catatgcccttggtggtaatacaaa

SEQ ID NO: 1409115 - DNA, 25 bp, Homo sapien
gttaaaagtggccacaacggatgag

SEQ ID NO: 1409116 - DNA, 25 bp, Homo sapien
tcaggctgggcaagaaaccctttag

SEQ ID NO: 1409117 - DNA, 25 bp, Homo sapien
gaaccataccacaaaggatccgaga

SEQ ID NO: 1409118 - DNA, 25 bp, Homo sapien
cagcttaatcctttctacggcagag

SEQ ID NO: 1409119 - DNA, 25 bp, Homo sapien
tgggatgccacacaagcaaacagcc

SEQ ID NO: 1409120 - DNA, 25 bp, Homo sapien
gatccgagactttcacagggaggtt

SEQ ID NO: 1409121 - DNA, 25 bp, Homo sapien
gtgctgctggtgggcagggcccact

SEQ ID NO: 1409122 - DNA, 25 bp, Homo sapien
ctgctggtgggcagggcccactcac

SEQ ID NO: 1409123 - DNA, 25 bp, Homo sapien
tcagttctcagatgtgctgctggtg

SEQ ID NO: 1409124 - DNA, 25 bp, Homo sapien
cagttctcagatgtgctgctggtgg

SEQ ID NO: 1409125 - DNA, 25 bp, Homo sapien
ctgggcctccagaccattgtctgcc

SEQ ID NO: 1409126 - DNA, 25 bp, Homo sapien
tgggcctccagaccattgtctgcct

SEQ ID NO: 1409127 - DNA, 25 bp, Homo sapien
gggcctccagaccattgtctgcctc

SEQ ID NO: 1409128 - DNA, 25 bp, Homo sapien
cctccagagggggctgagatcttac

SEQ ID NO: 1409129 - DNA, 25 bp, Homo sapien
ctgtagtcagagagaggttgaagga

SEQ ID NO: 1409130 - DNA, 25 bp, Homo sapien
tcctccagagggggctgagatctta

SEQ ID NO: 1409131 - DNA, 25 bp, Homo sapien
agagaggttgaaggaggcccctcct

SEQ ID NO: 1409132 - DNA, 25 bp, Homo sapien
tcttcatgataaaaccagtacagga

SEQ ID NO: 1409133 - DNA, 25 bp, Homo sapien
cagggtgacatcttcatgataaaac

SEQ ID NO: 1409134 - DNA, 25 bp, Homo sapien
cctgggagccctgaaggtgaggatg

SEQ ID NO: 1409135 - DNA, 25 bp, Homo sapien
catgataaaaccagtacaggattgg

SEQ ID NO: 1409136 - DNA, 25 bp, Homo sapien
gaaaaacgttatgtatcagctgctt

SEQ ID NO: 1409137 - DNA, 25 bp, Homo sapien
ggaaaaacgttatgtatcagctgct

SEQ ID NO: 1409138 - DNA, 25 bp, Homo sapien
accagggatgtaattgcatctgggc

SEQ ID NO: 1409139 - DNA, 25 bp, Homo sapien
ccagggatgtaattgcatctgggct

SEQ ID NO: 1409140 - DNA, 25 bp, Homo sapien
cagggatgtaattgcatctgggctg

SEQ ID NO: 1409141 - DNA, 25 bp, Homo sapien
gatacaaaacttagagatggaggct

SEQ ID NO: 1409142 - DNA, 25 bp, Homo sapien
tgtgctgctggttaggtcaacttac

SEQ ID NO: 1409143 - DNA, 25 bp, Homo sapien
gcaaatgactctagaaactgtacct

SEQ ID NO: 1409144 - DNA, 25 bp, Homo sapien
tgtgtaggcaccaagcctgacagga

SEQ ID NO: 1409145 - DNA, 25 bp, Homo sapien
taacactgagtgatattgtgtcact

SEQ ID NO: 1409146 - DNA, 25 bp, Homo sapien
gtcactgtgctgggccactaggcca

SEQ ID NO: 1409147 - DNA, 25 bp, Homo sapien
ctataacactgagtgatattgtgtc

SEQ ID NO: 1409148 - DNA, 25 bp, Homo sapien
cactgagtgatattgtgtcactgtg

SEQ ID NO: 1409149 - DNA, 25 bp, Homo sapien
gagaggttgaaagaagcttctcctc

SEQ ID NO: 1409150 - DNA, 25 bp, Homo sapien
gagagaggttgaaagaagcttctcc

SEQ ID NO: 1409151 - DNA, 25 bp, Homo sapien
agaggttgaaagaagcttctcctcc

SEQ ID NO: 1409152 - DNA, 25 bp, Homo sapien
agagagaggttgaaagaagcttctc

SEQ ID NO: 1409153 - DNA, 25 bp, Homo sapien
aggtagaccaatggaaggagagaac

SEQ ID NO: 1409154 - DNA, 25 bp, Homo sapien
aaacactggtgtaagaaatcgcaga

SEQ ID NO: 1409155 - DNA, 25 bp, Homo sapien
gaaatacaccttcacaagtaaatga

SEQ ID NO: 1409156 - DNA, 25 bp, Homo sapien
gaaacagctctttgtcctagccaga

SEQ ID NO: 1409157 - DNA, 25 bp, Homo sapien
attgttcttctaaaagactggacct

SEQ ID NO: 1409158 - DNA, 25 bp, Homo sapien
tacacatgcatttcttaggataaat

SEQ ID NO: 1409159 - DNA, 25 bp, Homo sapien
tgcaaagtttatgtctgacaaggtg

SEQ ID NO: 1409160 - DNA, 25 bp, Homo sapien
gatgctgcattaagtaattctgtag

SEQ ID NO: 1409161 - DNA, 25 bp, Homo sapien
tatgagtacggaaaaccccagctag

SEQ ID NO: 1409162 - DNA, 25 bp, Homo sapien
gccaaacactgagtaggcacaggga

SEQ ID NO: 1409163 - DNA, 25 bp, Homo sapien
tcagtagagaagtaggacacgctcc

SEQ ID NO: 1409164 - DNA, 25 bp, Homo sapien
gacacgctccgtgcatcaagaaaaa

SEQ ID NO: 1409165 - DNA, 25 bp, Homo sapien
gggaggaaactggacagtgcaaaca

SEQ ID NO: 1409166 - DNA, 25 bp, Homo sapien
gggtgggtgactggcaagaacccag

SEQ ID NO: 1409167 - DNA, 25 bp, Homo sapien
ggtgagagagaactcagccaggggt

SEQ ID NO: 1409168 - DNA, 25 bp, Homo sapien
actggacagtgcaaacagattttta

SEQ ID NO: 1409169 - DNA, 25 bp, Homo sapien
tgtcagctgtgcagtagtaattccc

SEQ ID NO: 1409170 - DNA, 25 bp, Homo sapien
ttgtcagctgtgcagtagtaattcc

SEQ ID NO: 1409171 - DNA, 25 bp, Homo sapien
cctcaaaaatcaggtcctcaggaga

SEQ ID NO: 1409172 - DNA, 25 bp, Homo sapien
acggagaggctcaccgccttactgc

SEQ ID NO: 1409173 - DNA, 25 bp, Homo sapien
gccttactgcgctgggggccaaagc

SEQ ID NO: 1409174 - DNA, 25 bp, Homo sapien
tcctgcagagttggccgacctacgc

SEQ ID NO: 1409175 - DNA, 25 bp, Homo sapien
aggtatatgctgacttccgaagggc

SEQ ID NO: 1409176 - DNA, 25 bp, Homo sapien
gatagaaagccactgcaccatcagg

SEQ ID NO: 1409177 - DNA, 25 bp, Homo sapien
tcatttgatgtctcccgctgggttc

SEQ ID NO: 1409178 - DNA, 25 bp, Homo sapien
tataagggcacctagactgcaatgc

SEQ ID NO: 1409179 - DNA, 25 bp, Homo sapien
tgggcttggcgccaaggccattgtc

SEQ ID NO: 1409180 - DNA, 25 bp, Homo sapien
gcttggcgccaaggccattgtcagc

SEQ ID NO: 1409181 - DNA, 25 bp, Homo sapien
ggcttggcgccaaggccattgtcag

SEQ ID NO: 1409182 - DNA, 25 bp, Homo sapien
tggcgccaaggccattgtcagctgt

SEQ ID NO: 1409183 - DNA, 25 bp, Homo sapien
ttcacagcggactgacttgtgcctc

SEQ ID NO: 1409184 - DNA, 25 bp, Homo sapien
gtgagaagctgatggatgctcccct

SEQ ID NO: 1409185 - DNA, 25 bp, Homo sapien
taaaacctgtacaaagtgcgcagag

SEQ ID NO: 1409186 - DNA, 25 bp, Homo sapien
acagtgaagtgtcaccttggttccc

SEQ ID NO: 1409187 - DNA, 25 bp, Homo sapien
gagtgaggacaggatgagatgcagg

SEQ ID NO: 1409188 - DNA, 25 bp, Homo sapien
gagagtgaggacaggatgagatgca

SEQ ID NO: 1409189 - DNA, 25 bp, Homo sapien
gtgaggacaggatgagatgcaggga

SEQ ID NO: 1409190 - DNA, 25 bp, Homo sapien
ctgagagtgaggacaggatgagatg

SEQ ID NO: 1409191 - DNA, 25 bp, Homo sapien
cattgttgctgccttacaccagtag

SEQ ID NO: 1409192 - DNA, 25 bp, Homo sapien
cacctgtatccaggatctcgggctg

SEQ ID NO: 1409193 - DNA, 25 bp, Homo sapien
tgaatctttactccacatggcagta

SEQ ID NO: 1409194 - DNA, 25 bp, Homo sapien
cagatatgacgctgtaaggcattgt

SEQ ID NO: 1409195 - DNA, 25 bp, Homo sapien
ctcagcactggacgtgtaaatggct

SEQ ID NO: 1409196 - DNA, 25 bp, Homo sapien
actgggttcccgctgatgggctgga

SEQ ID NO: 1409197 - DNA, 25 bp, Homo sapien
ctggctctcagcactggacgtgtaa

SEQ ID NO: 1409198 - DNA, 25 bp, Homo sapien
agggtcactgggttcccgctgatgg

SEQ ID NO: 1409199 - DNA, 25 bp, Homo sapien
aacagggcaacaactttccttatat

SEQ ID NO: 1409200 - DNA, 25 bp, Homo sapien
aactttccttatatccagtacagcg

SEQ ID NO: 1409201 - DNA, 25 bp, Homo sapien
ttttgactgtattggaagaaacagg

SEQ ID NO: 1409202 - DNA, 25 bp, Homo sapien
gtacagcgatatgcaccattgtcct

SEQ ID NO: 1409203 - DNA, 25 bp, Homo sapien
gccaggacattatcattcttgtaaa

SEQ ID NO: 1409204 - DNA, 25 bp, Homo sapien
gacattatcattcttgtaaatagta

SEQ ID NO: 1409205 - DNA, 25 bp, Homo sapien
tcttttattaaggaatgccaggaca

SEQ ID NO: 1409206 - DNA, 25 bp, Homo sapien
ttattaaggaatgccaggacattat

SEQ ID NO: 1409207 - DNA, 25 bp, Homo sapien
agaaccacagagtctccttcaaaca

SEQ ID NO: 1409208 - DNA, 25 bp, Homo sapien
ctcagaaccacagagtctccttcaa

SEQ ID NO: 1409209 - DNA, 25 bp, Homo sapien
aaacacagaaagtggagcttgcagg

SEQ ID NO: 1409210 - DNA, 25 bp, Homo sapien
ttcaaacacagaaagtggagcttgc

SEQ ID NO: 1409211 - DNA, 25 bp, Homo sapien
caggagttcaacattagcctgggca

SEQ ID NO: 1409212 - DNA, 25 bp, Homo sapien
ctgggcagcatgaggaaatcccatc

SEQ ID NO: 1409213 - DNA, 25 bp, Homo sapien
tgggcagcatgaggaaatcccatct

SEQ ID NO: 1409214 - DNA, 25 bp, Homo sapien
agttcaacattagcctgggcagcat

SEQ ID NO: 1409215 - DNA, 25 bp, Homo sapien
tgggcctggcatctgtactctccag

SEQ ID NO: 1409216 - DNA, 25 bp, Homo sapien
ctgtggtgagtagaagcgaaatccc

SEQ ID NO: 1409217 - DNA, 25 bp, Homo sapien
cccttgcaagtgagggtcactctct

SEQ ID NO: 1409218 - DNA, 25 bp, Homo sapien
tccagattcctgaacctcaaggata

SEQ ID NO: 1409219 - DNA, 25 bp, Homo sapien
aaaataatgggcctgggtgtccttg

SEQ ID NO: 1409220 - DNA, 25 bp, Homo sapien
tggaggaaaataatgggcctgggtg

SEQ ID NO: 1409221 - DNA, 25 bp, Homo sapien
ctggaggaaaataatgggcctgggt

SEQ ID NO: 1409222 - DNA, 25 bp, Homo sapien
gaggaaaataatgggcctgggtgtc

SEQ ID NO: 1409223 - DNA, 25 bp, Homo sapien
caggaccagtaatatcacccacagc

SEQ ID NO: 1409224 - DNA, 25 bp, Homo sapien
ccaggaccagtaatatcacccacag

SEQ ID NO: 1409225 - DNA, 25 bp, Homo sapien
accagctccaaggagcacatctgag

SEQ ID NO: 1409226 - DNA, 25 bp, Homo sapien
tcaaaaagagcagaatgcattagtg

SEQ ID NO: 1409227 - DNA, 25 bp, Homo sapien
ccaaaacaggtttggacttgatctt

SEQ ID NO: 1409228 - DNA, 25 bp, Homo sapien
gagatcaaaagagaagtttcctcaa

SEQ ID NO: 1409229 - DNA, 25 bp, Homo sapien
ttggagcctgcgtttcctgccacct

SEQ ID NO: 1409230 - DNA, 25 bp, Homo sapien
cttggagcttttcccgtagatgtgt

SEQ ID NO: 1409231 - DNA, 25 bp, Homo sapien
agatgtgtattggagcctgcgtttc

SEQ ID NO: 1409232 - DNA, 25 bp, Homo sapien
aaacttggagcttttcccgtagatg

SEQ ID NO: 1409233 - DNA, 25 bp, Homo sapien
cagcgtagttgggatatctgtcacc

SEQ ID NO: 1409234 - DNA, 25 bp, Homo sapien
gaagccaggtgatttgccctataga

SEQ ID NO: 1409235 - DNA, 25 bp, Homo sapien
cattccttttggtcgacatgtctcg

SEQ ID NO: 1409236 - DNA, 25 bp, Homo sapien
gtataagcgctgaaagtgaatatcc

SEQ ID NO: 1409237 - DNA, 25 bp, Homo sapien
tatttcagtgaacagacgtaggaaa

SEQ ID NO: 1409238 - DNA, 25 bp, Homo sapien
tctctgcaaggagtgcttattgcta

SEQ ID NO: 1409239 - DNA, 25 bp, Homo sapien
attagtaactcaaagacacagttcc

SEQ ID NO: 1409240 - DNA, 25 bp, Homo sapien
cagtgaacagacgtaggaaatattt

SEQ ID NO: 1409241 - DNA, 25 bp, Homo sapien
tctctaaagcagaccctagggaata

SEQ ID NO: 1409242 - DNA, 25 bp, Homo sapien
cacatgagtaggacgttctcgtaac

SEQ ID NO: 1409243 - DNA, 25 bp, Homo sapien
tagggaatacattaggtcaggccca

SEQ ID NO: 1409244 - DNA, 25 bp, Homo sapien
catttgcttttggaagcgcagccta

SEQ ID NO: 1409245 - DNA, 25 bp, Homo sapien
tccagctgagttatctgggtgttgt

SEQ ID NO: 1409246 - DNA, 25 bp, Homo sapien
ctttccagctgagttatctgggtgt

SEQ ID NO: 1409247 - DNA, 25 bp, Homo sapien
ttccagctgagttatctgggtgttg

SEQ ID NO: 1409248 - DNA, 25 bp, Homo sapien
tttccagctgagttatctgggtgtt

SEQ ID NO: 1409249 - DNA, 25 bp, Homo sapien
tatcctctagaagtgtcctggaggt

SEQ ID NO: 1409250 - DNA, 25 bp, Homo sapien
tctagaagtgtcctggaggtattag

SEQ ID NO: 1409251 - DNA, 25 bp, Homo sapien
tcctctagaagtgtcctggaggtat

SEQ ID NO: 1409252 - DNA, 25 bp, Homo sapien
cttatcctctagaagtgtcctggag

SEQ ID NO: 1409253 - DNA, 25 bp, Homo sapien
gagtactccatatgcatgccctgtg

SEQ ID NO: 1409254 - DNA, 25 bp, Homo sapien
ccccgattgtttggcaagttcccat

SEQ ID NO: 1409255 - DNA, 25 bp, Homo sapien
tctctcctacattaacaagttctag

SEQ ID NO: 1409256 - DNA, 25 bp, Homo sapien
gcatgccctgtgagaaaaactctct

SEQ ID NO: 1409257 - DNA, 25 bp, Homo sapien
tctggatctcagagtataccaaatc

SEQ ID NO: 1409258 - DNA, 25 bp, Homo sapien
tgagtagtctggatctcagagtata

SEQ ID NO: 1409259 - DNA, 25 bp, Homo sapien
agtagtctggatctcagagtatacc

SEQ ID NO: 1409260 - DNA, 25 bp, Homo sapien
tagtctggatctcagagtataccaa

SEQ ID NO: 1409261 - DNA, 25 bp, Homo sapien
cagcttcctagaagggaatcctcac

SEQ ID NO: 1409262 - DNA, 25 bp, Homo sapien
taaagtgctacagatgcctcttcct

SEQ ID NO: 1409263 - DNA, 25 bp, Homo sapien
agcgcattatctttccatggctgag

SEQ ID NO: 1409264 - DNA, 25 bp, Homo sapien
tctggatttgggacactttagggag

SEQ ID NO: 1409265 - DNA, 25 bp, Homo sapien
ggaatgggaggactctcctgggcct

SEQ ID NO: 1409266 - DNA, 25 bp, Homo sapien
caacatacaacgactgaagctccac

SEQ ID NO: 1409267 - DNA, 25 bp, Homo sapien
catacaacgactgaagctccacctg

SEQ ID NO: 1409268 - DNA, 25 bp, Homo sapien
catcaacatacaacgactgaagctc

SEQ ID NO: 1409269 - DNA, 25 bp, Homo sapien
gccagtagggaactggaaagcctga

SEQ ID NO: 1409270 - DNA, 25 bp, Homo sapien
gggagtctctgacatcatcgtaaca

SEQ ID NO: 1409271 - DNA, 25 bp, Homo sapien
taacatgcgggagagtgagataccc

SEQ ID NO: 1409272 - DNA, 25 bp, Homo sapien
ctggaaacaaggttagggagtctct

SEQ ID NO: 1409273 - DNA, 25 bp, Homo sapien
tctaagagaggtaatcaagacagtc

SEQ ID NO: 1409274 - DNA, 25 bp, Homo sapien
catgtaacaggagctatctaagaga

SEQ ID NO: 1409275 - DNA, 25 bp, Homo sapien
agggagctctttctcaatgacttca

SEQ ID NO: 1409276 - DNA, 25 bp, Homo sapien
caaagacgcatttttgtcagcagag

SEQ ID NO: 1409277 - DNA, 25 bp, Homo sapien
gacttcctccgacgccagcagtgaa

SEQ ID NO: 1409278 - DNA, 25 bp, Homo sapien
agtggctcccgcggcgacaaggcca

SEQ ID NO: 1409279 - DNA, 25 bp, Homo sapien
ctgacttcctccgacgccagcagtg

SEQ ID NO: 1409280 - DNA, 25 bp, Homo sapien
cccgcggcgacaaggccatctctgt

SEQ ID NO: 1409281 - DNA, 25 bp, Homo sapien
tgagattgaggaggaattgaagccc

SEQ ID NO: 1409282 - DNA, 25 bp, Homo sapien
gagtgagaacatagcttggcccagt

SEQ ID NO: 1409283 - DNA, 25 bp, Homo sapien
tgtgatatcccaaagtaaggcttct

SEQ ID NO: 1409284 - DNA, 25 bp, Homo sapien
ctcaatggacaaaagtgggctctgt

SEQ ID NO: 1409285 - DNA, 25 bp, Homo sapien
gacattcagcaccatgctctggaca

SEQ ID NO: 1409286 - DNA, 25 bp, Homo sapien
ctcagggaacgctgagttttcctcc

SEQ ID NO: 1409287 - DNA, 25 bp, Homo sapien
ctgctctcagggaacgctgagtttt

SEQ ID NO: 1409288 - DNA, 25 bp, Homo sapien
catgtcctctcggtgccaggagaat

SEQ ID NO: 1409289 - DNA, 25 bp, Homo sapien
gctgggtctccaggagcaccccaga

SEQ ID NO: 1409290 - DNA, 25 bp, Homo sapien
tccaggagcaccccagacacaggga

SEQ ID NO: 1409291 - DNA, 25 bp, Homo sapien
ggtctccaggagcaccccagacaca

SEQ ID NO: 1409292 - DNA, 25 bp, Homo sapien
cttcaacagcctggccccctgaggg

SEQ ID NO: 1409293 - DNA, 25 bp, Homo sapien
gttccgggtacgtgctccagtctga

SEQ ID NO: 1409294 - DNA, 25 bp, Homo sapien
cacatggatctgtagcgagggactg

SEQ ID NO: 1409295 - DNA, 25 bp, Homo sapien
tccagtctgacaggatgacctcgcc

SEQ ID NO: 1409296 - DNA, 25 bp, Homo sapien
gatgttacccctcactgtttcagca

SEQ ID NO: 1409297 - DNA, 25 bp, Homo sapien
cttgtgggataagaagatcccagct

SEQ ID NO: 1409298 - DNA, 25 bp, Homo sapien
tgtggcatctcagaaccaatgtgtc

SEQ ID NO: 1409299 - DNA, 25 bp, Homo sapien
tatccaatgcatcgataattgccat

SEQ ID NO: 1409300 - DNA, 25 bp, Homo sapien
tccaagtatatttcacagcagtcaa

SEQ ID NO: 1409301 - DNA, 25 bp, Homo sapien
gaatatggtgcctgcaggattaagg

SEQ ID NO: 1409302 - DNA, 25 bp, Homo sapien
tatggtgcctgcaggattaaggagt

SEQ ID NO: 1409303 - DNA, 25 bp, Homo sapien
aacacagaatatggtgcctgcagga

SEQ ID NO: 1409304 - DNA, 25 bp, Homo sapien
caaacacagaatatggtgcctgcag

SEQ ID NO: 1409305 - DNA, 25 bp, Homo sapien
ctgaagaaaagagcaagcgcacagg

SEQ ID NO: 1409306 - DNA, 25 bp, Homo sapien
gaagaaaagagcaagcgcacagggt

SEQ ID NO: 1409307 - DNA, 25 bp, Homo sapien
agaaaagagcaagcgcacagggtta

SEQ ID NO: 1409308 - DNA, 25 bp, Homo sapien
gaaaagagcaagcgcacagggttac

SEQ ID NO: 1409309 - DNA, 25 bp, Homo sapien
gcatctgtacagtccagattcccga

SEQ ID NO: 1409310 - DNA, 25 bp, Homo sapien
ccgggcctggcatctgtacagtcca

SEQ ID NO: 1409311 - DNA, 25 bp, Homo sapien
atctgtacagtccagattcccgaac

SEQ ID NO: 1409312 - DNA, 25 bp, Homo sapien
gagccccgggcctggcatctgtaca

SEQ ID NO: 1409313 - DNA, 25 bp, Homo sapien
ctctgttgcatagaactgaaatcca

SEQ ID NO: 1409314 - DNA, 25 bp, Homo sapien
tttctccccagtagtgccgatgata

SEQ ID NO: 1409315 - DNA, 25 bp, Homo sapien
ggatggacggaaatcacaggtttgt

SEQ ID NO: 1409316 - DNA, 25 bp, Homo sapien
gaaatccattgcaagtcagagtcac

SEQ ID NO: 1409317 - DNA, 25 bp, Homo sapien
atcagcgtaggcgaagagtcccgaa

SEQ ID NO: 1409318 - DNA, 25 bp, Homo sapien
taggcgaagagtcccgaactattca

SEQ ID NO: 1409319 - DNA, 25 bp, Homo sapien
ccagccatcagcgtaggcgaagagt

SEQ ID NO: 1409320 - DNA, 25 bp, Homo sapien
aagagccagccatcagcgtaggcga

SEQ ID NO: 1409321 - DNA, 25 bp, Homo sapien
ccagcaaggacgcccacagcagcat

SEQ ID NO: 1409322 - DNA, 25 bp, Homo sapien
caaaggccagcaaggacgcccacag

SEQ ID NO: 1409323 - DNA, 25 bp, Homo sapien
aaaggccagcaaggacgcccacagc

SEQ ID NO: 1409324 - DNA, 25 bp, Homo sapien
aggccagcaaggacgcccacagcag

SEQ ID NO: 1409325 - DNA, 25 bp, Homo sapien
ggaagcctgctccaggattggagaa

SEQ ID NO: 1409326 - DNA, 25 bp, Homo sapien
ctgctccaggattggagaaggagtt

SEQ ID NO: 1409327 - DNA, 25 bp, Homo sapien
agcctgctccaggattggagaagga

SEQ ID NO: 1409328 - DNA, 25 bp, Homo sapien
gaagcctgctccaggattggagaag

SEQ ID NO: 1409329 - DNA, 25 bp, Homo sapien
gcacttgcctacaccagcaccagca

SEQ ID NO: 1409330 - DNA, 25 bp, Homo sapien
agcagcacttgcctacaccagcacc

SEQ ID NO: 1409331 - DNA, 25 bp, Homo sapien
tcttctctgcataaagctgattgag

SEQ ID NO: 1409332 - DNA, 25 bp, Homo sapien
ttcttctctgcataaagctgattga

SEQ ID NO: 1409333 - DNA, 25 bp, Homo sapien
gcaagcatcgtccacagtaatggga

SEQ ID NO: 1409334 - DNA, 25 bp, Homo sapien
cttccaacttcccaaggagcccgag

SEQ ID NO: 1409335 - DNA, 25 bp, Homo sapien
caaggccttttgcaagcatcgtcca

SEQ ID NO: 1409336 - DNA, 25 bp, Homo sapien
tctttcctggtgttagacttccaac

SEQ ID NO: 1409337 - DNA, 25 bp, Homo sapien
ggctggtcctagtgtccctatctgc

SEQ ID NO: 1409338 - DNA, 25 bp, Homo sapien
ctggcattgaactggctcgggggca

SEQ ID NO: 1409339 - DNA, 25 bp, Homo sapien
gaggctggtcctagtgtccctatct

SEQ ID NO: 1409340 - DNA, 25 bp, Homo sapien
gtcctagtgtccctatctgctccag

SEQ ID NO: 1409341 - DNA, 25 bp, Homo sapien
gaggacacatatatttagaccacag

SEQ ID NO: 1409342 - DNA, 25 bp, Homo sapien
tgtttcagagatggtaccttctcac

SEQ ID NO: 1409343 - DNA, 25 bp, Homo sapien
gagatctctgcatgacctaatcacc

SEQ ID NO: 1409344 - DNA, 25 bp, Homo sapien
tactagcaatgcgtaacaacagttg

SEQ ID NO: 1409345 - DNA, 25 bp, Homo sapien
acacaaatttgggatctcaggctcc

SEQ ID NO: 1409346 - DNA, 25 bp, Homo sapien
tgcacacaaatttgggatctcaggc

SEQ ID NO: 1409347 - DNA, 25 bp, Homo sapien
gggatctcaggctccgttttctgac

SEQ ID NO: 1409348 - DNA, 25 bp, Homo sapien
tctgcacacaaatttgggatctcag

SEQ ID NO: 1409349 - DNA, 25 bp, Homo sapien
cgtgtgagccacagtatctatctca

SEQ ID NO: 1409350 - DNA, 25 bp, Homo sapien
gtgagccacagtatctatctcacac

SEQ ID NO: 1409351 - DNA, 25 bp, Homo sapien
tgtgagccacagtatctatctcaca

SEQ ID NO: 1409352 - DNA, 25 bp, Homo sapien
gtgtgagccacagtatctatctcac

SEQ ID NO: 1409353 - DNA, 25 bp, Homo sapien
tgatcccagggtctggccatctccg

SEQ ID NO: 1409354 - DNA, 25 bp, Homo sapien
cagaaggaccatgaatcttcactcc

SEQ ID NO: 1409355 - DNA, 25 bp, Homo sapien
ggccatctccgaagaagcagaactg

SEQ ID NO: 1409356 - DNA, 25 bp, Homo sapien
cactgatctggaacttcggggagct

SEQ ID NO: 1409357 - DNA, 25 bp, Homo sapien
ctcagcactggacgtgaaaacagct

SEQ ID NO: 1409358 - DNA, 25 bp, Homo sapien
tctcagcactggacgtgaaaacagc

SEQ ID NO: 1409359 - DNA, 25 bp, Homo sapien
gctctcagcactggacgtgaaaaca

SEQ ID NO: 1409360 - DNA, 25 bp, Homo sapien
ctggctctcagcactggacgtgaaa

SEQ ID NO: 1409361 - DNA, 25 bp, Homo sapien
ccattgtctttgagacttgcgtgat

SEQ ID NO: 1409362 - DNA, 25 bp, Homo sapien
cttccgttaaatccagtaaagtgat

SEQ ID NO: 1409363 - DNA, 25 bp, Homo sapien
aagtgatatgcaccattgtctttga

SEQ ID NO: 1409364 - DNA, 25 bp, Homo sapien
tgcgtgatgaatatggaagtcagag

SEQ ID NO: 1409365 - DNA, 25 bp, Homo sapien
tattcagtgttacttccgcctttgc

SEQ ID NO: 1409366 - DNA, 25 bp, Homo sapien
cctttgcccggcacctcagaaccac

SEQ ID NO: 1409367 - DNA, 25 bp, Homo sapien
tcagtgttacttccgcctttgcccg

SEQ ID NO: 1409368 - DNA, 25 bp, Homo sapien
gcctttgcccggcacctcagaacca

SEQ ID NO: 1409369 - DNA, 25 bp, Homo sapien
ccattgtcagctgtgcagtagtaat

SEQ ID NO: 1409370 - DNA, 25 bp, Homo sapien
gccattgtcagctgtgcagtagtaa

SEQ ID NO: 1409371 - DNA, 25 bp, Homo sapien
agccattgtcagctgtgcagtagta

SEQ ID NO: 1409372 - DNA, 25 bp, Homo sapien
attgtcagctgtgcagtagtaattc

SEQ ID NO: 1409373 - DNA, 25 bp, Homo sapien
gctgaaggacactcttcccacagag

SEQ ID NO: 1409374 - DNA, 25 bp, Homo sapien
tcccacagagggtgttgagctgctc

SEQ ID NO: 1409375 - DNA, 25 bp, Homo sapien
ccaggggcacatcctcatgataaaa

SEQ ID NO: 1409376 - DNA, 25 bp, Homo sapien
tccccaggggcacatcctcatgata

SEQ ID NO: 1409377 - DNA, 25 bp, Homo sapien
ccttcaaaagtcagggcctcagcag

SEQ ID NO: 1409378 - DNA, 25 bp, Homo sapien
tcacagtggctccttcaaaagtcag

SEQ ID NO: 1409379 - DNA, 25 bp, Homo sapien
gctccttcaaaagtcagggcctcag

SEQ ID NO: 1409380 - DNA, 25 bp, Homo sapien
cagtggctccttcaaaagtcagggc

SEQ ID NO: 1409381 - DNA, 25 bp, Homo sapien
tgtcagctgtgcagtagtagttccc

SEQ ID NO: 1409382 - DNA, 25 bp, Homo sapien
gtcagctgtgcagtagtagttccct

SEQ ID NO: 1409383 - DNA, 25 bp, Homo sapien
agccattgtcagctgtgcagtagta

SEQ ID NO: 1409384 - DNA, 25 bp, Homo sapien
tcagctgtgcagtagtagttccctg

SEQ ID NO: 1409385 - DNA, 25 bp, Homo sapien
tgaagtgtcaccttggctccctcaa

SEQ ID NO: 1409386 - DNA, 25 bp, Homo sapien
gatggggagtgaacctctctgggct

SEQ ID NO: 1409387 - DNA, 25 bp, Homo sapien
acagtgaagtgtcaccttggctccc

SEQ ID NO: 1409388 - DNA, 25 bp, Homo sapien
aagtgtcaccttggctccctcaaaa

SEQ ID NO: 1409389 - DNA, 25 bp, Homo sapien
ctgagggtgaggacaggatgagaca

SEQ ID NO: 1409390 - DNA, 25 bp, Homo sapien
gtgaggacaggatgagacacgggga

SEQ ID NO: 1409391 - DNA, 25 bp, Homo sapien
tgagggtgaggacaggatgagacac

SEQ ID NO: 1409392 - DNA, 25 bp, Homo sapien
agggtgaggacaggatgagacacgg

SEQ ID NO: 1409393 - DNA, 25 bp, Homo sapien
acaccatttgcatgtgtttaaccct

SEQ ID NO: 1409394 - DNA, 25 bp, Homo sapien
aacaccatttgcatgtgtttaaccc

SEQ ID NO: 1409395 - DNA, 25 bp, Homo sapien
caccatttgcatgtgtttaaccctc

SEQ ID NO: 1409396 - DNA, 25 bp, Homo sapien
aaacaccatttgcatgtgtttaacc

SEQ ID NO: 1409397 - DNA, 25 bp, Homo sapien
ccaggtctagattcacggtgtccac

SEQ ID NO: 1409398 - DNA, 25 bp, Homo sapien
ccaatccaggtctagattcacggtg

SEQ ID NO: 1409399 - DNA, 25 bp, Homo sapien
ggtctagattcacggtgtccactca

SEQ ID NO: 1409400 - DNA, 25 bp, Homo sapien
aatccaggtctagattcacggtgtc

SEQ ID NO: 1409401 - DNA, 25 bp, Homo sapien
tgaggacctgtcctggaaaacccaa

SEQ ID NO: 1409402 - DNA, 25 bp, Homo sapien
tgaccatacaattcaggtctgagta

SEQ ID NO: 1409403 - DNA, 25 bp, Homo sapien
tctgagtacagatgctctccacagt

SEQ ID NO: 1409404 - DNA, 25 bp, Homo sapien
gaaccagcatcaaaggccacagcaa

SEQ ID NO: 1409405 - DNA, 25 bp, Homo sapien
taagacctgctatcctgttagaaag

SEQ ID NO: 1409406 - DNA, 25 bp, Homo sapien
tcactggttgcacagtattgacaaa

SEQ ID NO: 1409407 - DNA, 25 bp, Homo sapien
tgaagtagacaagaagctatccagg

SEQ ID NO: 1409408 - DNA, 25 bp, Homo sapien
ctgccatgggtcctaaggaaatgaa

SEQ ID NO: 1409409 - DNA, 25 bp, Homo sapien
ccaggtttcttctatgacagttcca

SEQ ID NO: 1409410 - DNA, 25 bp, Homo sapien
tctacggttgaatgaccctggcgct

SEQ ID NO: 1409411 - DNA, 25 bp, Homo sapien
caatgataccataacagtgtccagg

SEQ ID NO: 1409412 - DNA, 25 bp, Homo sapien
tgtaaaatggtcttcccagtagtgg

SEQ ID NO: 1409413 - DNA, 25 bp, Homo sapien
tcttctcttaatctcaaactcagat

SEQ ID NO: 1409414 - DNA, 25 bp, Homo sapien
gagactattatgacttcaatctcat

SEQ ID NO: 1409415 - DNA, 25 bp, Homo sapien
taatagtctctaacaatacttggta

SEQ ID NO: 1409416 - DNA, 25 bp, Homo sapien
gagcttttcttcgatgggagactat

SEQ ID NO: 1409417 - DNA, 25 bp, Homo sapien
caatttgttgatatgtggttgtaca

SEQ ID NO: 1409418 - DNA, 25 bp, Homo sapien
cactggtcattgaagagcttattgt

SEQ ID NO: 1409419 - DNA, 25 bp, Homo sapien
tcttcactggtcattgaagagctta

SEQ ID NO: 1409420 - DNA, 25 bp, Homo sapien
ggtcattgaagagcttattgtttaa

SEQ ID NO: 1409421 - DNA, 25 bp, Homo sapien
tcactggtcattgaagagcttattg

SEQ ID NO: 1409422 - DNA, 25 bp, Homo sapien
ctgtttcctgctgccgtgtgaaggt

SEQ ID NO: 1409423 - DNA, 25 bp, Homo sapien
ggttttgtaaggcagtcttcccagc

SEQ ID NO: 1409424 - DNA, 25 bp, Homo sapien
tattccagaacacacctgtaataaa

SEQ ID NO: 1409425 - DNA, 25 bp, Homo sapien
gctcttgctaactcgctgtttcctg

SEQ ID NO: 1409426 - DNA, 25 bp, Homo sapien
tggtcttttattttcaaaggctcca

SEQ ID NO: 1409427 - DNA, 25 bp, Homo sapien
tcttttattttcaaaggctccacta

SEQ ID NO: 1409428 - DNA, 25 bp, Homo sapien
caatggtcttttattttcaaaggct

SEQ ID NO: 1409429 - DNA, 25 bp, Homo sapien
tctgggctatgggtttttagttgtg

SEQ ID NO: 1409430 - DNA, 25 bp, Homo sapien
gataaaagtcaagtagagcactgca

SEQ ID NO: 1409431 - DNA, 25 bp, Homo sapien
cattttacagggcaatcaatcagaa

SEQ ID NO: 1409432 - DNA, 25 bp, Homo sapien
tccgagatgtacagttaggactcac

SEQ ID NO: 1409433 - DNA, 25 bp, Homo sapien
ttccactcacatactctgatttgca

SEQ ID NO: 1409434 - DNA, 25 bp, Homo sapien
cactcacatactctgatttgcacag

SEQ ID NO: 1409435 - DNA, 25 bp, Homo sapien
cccttcttccactcacatactctga

SEQ ID NO: 1409436 - DNA, 25 bp, Homo sapien
actcacatactctgatttgcacagg

SEQ ID NO: 1409437 - DNA, 25 bp, Homo sapien
ctaagtgttacaaagacatggaaaa

SEQ ID NO: 1409438 - DNA, 25 bp, Homo sapien
agtgttacaaagacatggaaaatct

SEQ ID NO: 1409439 - DNA, 25 bp, Homo sapien
agacatggaaaatcttgaactttgt

SEQ ID NO: 1409440 - DNA, 25 bp, Homo sapien
tacaaagacatggaaaatcttgaac

SEQ ID NO: 1409441 - DNA, 25 bp, Homo sapien
gaggagagcctccatatacagcctg

SEQ ID NO: 1409442 - DNA, 25 bp, Homo sapien
cccaatatggtagcaaggatacagc

SEQ ID NO: 1409443 - DNA, 25 bp, Homo sapien
tacagcctggtggttggtacccaaa

SEQ ID NO: 1409444 - DNA, 25 bp, Homo sapien
tctcagtacgggcaggacatcatgc

SEQ ID NO: 1409445 - DNA, 25 bp, Homo sapien
gcccagcctcgtaggaggcagagtc

SEQ ID NO: 1409446 - DNA, 25 bp, Homo sapien
agcccagcctcgtaggaggcagagt

SEQ ID NO: 1409447 - DNA, 25 bp, Homo sapien
ctagtggtctgaggccagtaataca

SEQ ID NO: 1409448 - DNA, 25 bp, Homo sapien
tagtggtctgaggccagtaatacac

SEQ ID NO: 1409449 - DNA, 25 bp, Homo sapien
ccctgcagagtcgtctgggtgtgtc

SEQ ID NO: 1409450 - DNA, 25 bp, Homo sapien
cccctgcagagtcgtctgggtgtgt

SEQ ID NO: 1409451 - DNA, 25 bp, Homo sapien
cagttctgaatagaggactgtaagt

SEQ ID NO: 1409452 - DNA, 25 bp, Homo sapien
gttctgaatagaggactgtaagttc

SEQ ID NO: 1409453 - DNA, 25 bp, Homo sapien
tcagttctgaatagaggactgtaag

SEQ ID NO: 1409454 - DNA, 25 bp, Homo sapien
agttctgaatagaggactgtaagtt

SEQ ID NO: 1409455 - DNA, 25 bp, Homo sapien
gaaagaaagccaagaaatgtgactc

SEQ ID NO: 1409456 - DNA, 25 bp, Homo sapien
aagaaagccaagaaatgtgactcac

SEQ ID NO: 1409457 - DNA, 25 bp, Homo sapien
ctaaatacaggagaggaaggccaga

SEQ ID NO: 1409458 - DNA, 25 bp, Homo sapien
atacaggagaggaaggccagagagg

SEQ ID NO: 1409459 - DNA, 25 bp, Homo sapien
catgctcttgatgcatcattggaca

SEQ ID NO: 1409460 - DNA, 25 bp, Homo sapien
ctcatgctcttgatgcatcattgga

SEQ ID NO: 1409461 - DNA, 25 bp, Homo sapien
tcttgatgcatcattggacaattag

SEQ ID NO: 1409462 - DNA, 25 bp, Homo sapien
gctcttgatgcatcattggacaatt

SEQ ID NO: 1409463 - DNA, 25 bp, Homo sapien
aagtattaaactgtgggcaatatat

SEQ ID NO: 1409464 - DNA, 25 bp, Homo sapien
ctgttgggtaggagtagcaaagaaa

SEQ ID NO: 1409465 - DNA, 25 bp, Homo sapien
taaactgtgggcaatatattccaac

SEQ ID NO: 1409466 - DNA, 25 bp, Homo sapien
tgttgggtaggagtagcaaagaaaa

SEQ ID NO: 1409467 - DNA, 25 bp, Homo sapien
tcttgatttgcttgatctcttgctg

SEQ ID NO: 1409468 - DNA, 25 bp, Homo sapien
cttcttgatttgcttgatctcttga

SEQ ID NO: 1409469 - DNA, 25 bp, Homo sapien
cctctgctggattcttccaaaccca

SEQ ID NO: 1409470 - DNA, 25 bp, Homo sapien
gatttgcttgatctcttgactgttt

SEQ ID NO: 1409471 - DNA, 25 bp, Homo sapien
ttcttttgtatgctggatgctccag

SEQ ID NO: 1409472 - DNA, 25 bp, Homo sapien
tgctggatgctccagatctgggaat

SEQ ID NO: 1409473 - DNA, 25 bp, Homo sapien
ccagatctgggaataaatcgggttg

SEQ ID NO: 1409474 - DNA, 25 bp, Homo sapien
taaatcgggttgctatctccaggat

SEQ ID NO: 1409475 - DNA, 25 bp, Homo sapien
tcttgagggtctatcctggaaggcc

SEQ ID NO: 1409476 - DNA, 25 bp, Homo sapien
gctcctgacactcactaggactgtg

SEQ ID NO: 1409477 - DNA, 25 bp, Homo sapien
gcctggacgaggaaggctcctgaca

SEQ ID NO: 1409478 - DNA, 25 bp, Homo sapien
ctagtggtttagagtgagtgggctc

SEQ ID NO: 1409479 - DNA, 25 bp, Homo sapien
ctagatgttccagtggcagaaagtc

SEQ ID NO: 1409480 - DNA, 25 bp, Homo sapien
gatgttccagtggcagaaagtcctc

SEQ ID NO: 1409481 - DNA, 25 bp, Homo sapien
agatgttccagtggcagaaagtcct

SEQ ID NO: 1409482 - DNA, 25 bp, Homo sapien
tagatgttccagtggcagaaagtcc

SEQ ID NO: 1409483 - DNA, 25 bp, Homo sapien
gcagcagcaaggacgaggatgctga

SEQ ID NO: 1409484 - DNA, 25 bp, Homo sapien
agccccgtgattcccgcagcggtaa

SEQ ID NO: 1409485 - DNA, 25 bp, Homo sapien
gtgattcccgcagcggtaaggcctg

SEQ ID NO: 1409486 - DNA, 25 bp, Homo sapien
ttccttcgggccctggcgtaatgca

SEQ ID NO: 1409487 - DNA, 25 bp, Homo sapien
cctctagcccaggtactattaacac

SEQ ID NO: 1409488 - DNA, 25 bp, Homo sapien
tctagcccaggtactattaacacac

SEQ ID NO: 1409489 - DNA, 25 bp, Homo sapien
ctctagcccaggtactattaacaca

SEQ ID NO: 1409490 - DNA, 25 bp, Homo sapien
acctctagcccaggtactattaaca

SEQ ID NO: 1409491 - DNA, 25 bp, Homo sapien
tccagagtgggccgagatgttcccc

SEQ ID NO: 1409492 - DNA, 25 bp, Homo sapien
gtcaccactttactgtgctgggccc

SEQ ID NO: 1409493 - DNA, 25 bp, Homo sapien
ctgtaacattgagtgtcaccacttt

SEQ ID NO: 1409494 - DNA, 25 bp, Homo sapien
gagatgttccccaaggtgtcatcct

SEQ ID NO: 1409495 - DNA, 25 bp, Homo sapien
gtctctgtttcagcacactgtctgg

SEQ ID NO: 1409496 - DNA, 25 bp, Homo sapien
cccaagtttggcctataggaaggat

SEQ ID NO: 1409497 - DNA, 25 bp, Homo sapien
gagtggtgcgagatccagaattctt

SEQ ID NO: 1409498 - DNA, 25 bp, Homo sapien
gaacaagagtccatggcaaaatcca

SEQ ID NO: 1409499 - DNA, 25 bp, Homo sapien
tgagactcactccatgactgtgctg

SEQ ID NO: 1409500 - DNA, 25 bp, Homo sapien
ctgagactcactccatgactgtgct

SEQ ID NO: 1409501 - DNA, 25 bp, Homo sapien
tcatgataaaatcggtacaggatcg

SEQ ID NO: 1409502 - DNA, 25 bp, Homo sapien
gaggattctgacgttgtgacagatg

SEQ ID NO: 1409503 - DNA, 25 bp, Homo sapien
gattctgacgttgtgacagatgcac

SEQ ID NO: 1409504 - DNA, 25 bp, Homo sapien
tgtgacagatgcacaacctctctca

SEQ ID NO: 1409505 - DNA, 25 bp, Homo sapien
agatgcacaacctctctcaaggagc

SEQ ID NO: 1409506 - DNA, 25 bp, Homo sapien
tagattcacattagacacagggact

SEQ ID NO: 1409507 - DNA, 25 bp, Homo sapien
tccttcacggtgagaacatgcagct

SEQ ID NO: 1409508 - DNA, 25 bp, Homo sapien
ccggtgggccggatctctagattca

SEQ ID NO: 1409509 - DNA, 25 bp, Homo sapien
tgaacgttatcagctgcacagtagt

SEQ ID NO: 1409510 - DNA, 25 bp, Homo sapien
caagatggcatgtgaaggtcctgat

SEQ ID NO: 1409511 - DNA, 25 bp, Homo sapien
tgaataggccaatagcagcaggtgc

SEQ ID NO: 1409512 - DNA, 25 bp, Homo sapien
catccttgagaaatgtgggcaccaa

SEQ ID NO: 1409513 - DNA, 25 bp, Homo sapien
gaccaacgttgagcttaaagagaga

SEQ ID NO: 1409514 - DNA, 25 bp, Homo sapien
tatctgagatctcaggctccttttt

SEQ ID NO: 1409515 - DNA, 25 bp, Homo sapien
gaccctgagtcttcagtccacatgg

SEQ ID NO: 1409516 - DNA, 25 bp, Homo sapien
tctgtacacgtatctgagatctcag

SEQ ID NO: 1409517 - DNA, 25 bp, Homo sapien
gctccagcccaatccgagggtctgg

SEQ ID NO: 1409518 - DNA, 25 bp, Homo sapien
gggagaattgcagctggacatctgg

SEQ ID NO: 1409519 - DNA, 25 bp, Homo sapien
tgaagagggagaattgcagctggac

SEQ ID NO: 1409520 - DNA, 25 bp, Homo sapien
ctgaagagggagaattgcagctgga

SEQ ID NO: 1409521 - DNA, 25 bp, Homo sapien
agaattgcagctggacatctggcct

SEQ ID NO: 1409522 - DNA, 25 bp, Homo sapien
gggtcatgggactcccctctatggg

SEQ ID NO: 1409523 - DNA, 25 bp, Homo sapien
aggtcagggtcatgggactcccctc

SEQ ID NO: 1409524 - DNA, 25 bp, Homo sapien
gactcccctctatgggcgtggaaga

SEQ ID NO: 1409525 - DNA, 25 bp, Homo sapien
catgggactcccctctatgggcgtg

SEQ ID NO: 1409526 - DNA, 25 bp, Homo sapien
taacaaacccagtaatccacaggaa

SEQ ID NO: 1409527 - DNA, 25 bp, Homo sapien
tcagagttcctagagagatgcattt

SEQ ID NO: 1409528 - DNA, 25 bp, Homo sapien
gatgcatttgtcatctcagcaccag

SEQ ID NO: 1409529 - DNA, 25 bp, Homo sapien
gaaacaacatagtctccagggtggt

SEQ ID NO: 1409530 - DNA, 25 bp, Homo sapien
tgaagttacttcaatgtcaagtatg

SEQ ID NO: 1409531 - DNA, 25 bp, Homo sapien
tatttgctattatccctggagactg

SEQ ID NO: 1409532 - DNA, 25 bp, Homo sapien
tgtaaaacttcctataagcagtaca

SEQ ID NO: 1409533 - DNA, 25 bp, Homo sapien
tggagactgaattcactgtgatctt

SEQ ID NO: 1409534 - DNA, 25 bp, Homo sapien
ctttcatttccacccatgaggcaag

SEQ ID NO: 1409535 - DNA, 25 bp, Homo sapien
gagcacactcaggttatcccctgct

SEQ ID NO: 1409536 - DNA, 25 bp, Homo sapien
gagcacaggagcacactcaggttat

SEQ ID NO: 1409537 - DNA, 25 bp, Homo sapien
atttccacccatgaggcaagagcca

SEQ ID NO: 1409538 - DNA, 25 bp, Homo sapien
ctgagggaggatcctcgggtcttac

SEQ ID NO: 1409539 - DNA, 25 bp, Homo sapien
tgcacggcatcactgagggaggatc

SEQ ID NO: 1409540 - DNA, 25 bp, Homo sapien
aaaattccacatgcacggcatcact

SEQ ID NO: 1409541 - DNA, 25 bp, Homo sapien
cacatgcacggcatcactgagggag

SEQ ID NO: 1409542 - DNA, 25 bp, Homo sapien
caatatgtgtctccctgggctaggg

SEQ ID NO: 1409543 - DNA, 25 bp, Homo sapien
ctagggaatgtgatatgctgctgca

SEQ ID NO: 1409544 - DNA, 25 bp, Homo sapien
ccatggaggattgaggagaagtaca

SEQ ID NO: 1409545 - DNA, 25 bp, Homo sapien
gctgctgcatatgagagccactttt

SEQ ID NO: 1409546 - DNA, 25 bp, Homo sapien
tcagcagcagcagccacagaagcat

SEQ ID NO: 1409547 - DNA, 25 bp, Homo sapien
atcagcagcagcagccacagaagca

SEQ ID NO: 1409548 - DNA, 25 bp, Homo sapien
tcaggatcagcagcagcagccacag

SEQ ID NO: 1409549 - DNA, 25 bp, Homo sapien
aggatcagcagcagcagccacagaa

SEQ ID NO: 1409550 - DNA, 25 bp, Homo sapien
caggaagctgctactcagatgagac

SEQ ID NO: 1409551 - DNA, 25 bp, Homo sapien
aagcccgacttatctccaagaagga

SEQ ID NO: 1409552 - DNA, 25 bp, Homo sapien
aaagtctgtctcaccaaaagcccga

SEQ ID NO: 1409553 - DNA, 25 bp, Homo sapien
gggcaggaagctgctactcagatga

SEQ ID NO: 1409554 - DNA, 25 bp, Homo sapien
aatgctgtttgtatctcaatcccgg

SEQ ID NO: 1409555 - DNA, 25 bp, Homo sapien
gtttgtatctcaatcccggtagtga

SEQ ID NO: 1409556 - DNA, 25 bp, Homo sapien
gctgtttgtatctcaatcccggtag

SEQ ID NO: 1409557 - DNA, 25 bp, Homo sapien
cctaaatgctgtttgtatctcaatc

SEQ ID NO: 1409558 - DNA, 25 bp, Homo sapien
atcagctgcagtctctcaggagtaa

SEQ ID NO: 1409559 - DNA, 25 bp, Homo sapien
ctagaaatatcaagttgtgtatttg

SEQ ID NO: 1409560 - DNA, 25 bp, Homo sapien
agctgcagtctctcaggagtaatgt

SEQ ID NO: 1409561 - DNA, 25 bp, Homo sapien
tagaaatatcaagttgtgtatttgc

SEQ ID NO: 1409562 - DNA, 25 bp, Homo sapien
cacagtcaaggtgtcaagcatatgc

SEQ ID NO: 1409563 - DNA, 25 bp, Homo sapien
ctaatgtaggcaagcttaatgagcg

SEQ ID NO: 1409564 - DNA, 25 bp, Homo sapien
acagcctttggttctgcatgcagct

SEQ ID NO: 1409565 - DNA, 25 bp, Homo sapien
ttaatgagcgtggtgtgaatcacac

SEQ ID NO: 1409566 - DNA, 25 bp, Homo sapien
tcagattaaggcgatcaagaacacc

SEQ ID NO: 1409567 - DNA, 25 bp, Homo sapien
gaagcttcagtatctcaccaatcag

SEQ ID NO: 1409568 - DNA, 25 bp, Homo sapien
tcccatccgtcgtaaaagatccaag

SEQ ID NO: 1409569 - DNA, 25 bp, Homo sapien
gaaggtttagcagatctcccatccg

SEQ ID NO: 1409570 - DNA, 25 bp, Homo sapien
tgggctcagctgaactctattcctg

SEQ ID NO: 1409571 - DNA, 25 bp, Homo sapien
tggccagttcacaggaagtacagga

SEQ ID NO: 1409572 - DNA, 25 bp, Homo sapien
tacaggagtacaggttttgacacaa

SEQ ID NO: 1409573 - DNA, 25 bp, Homo sapien
tctacagcaatgagtgaacgggcac

SEQ ID NO: 1409574 - DNA, 25 bp, Homo sapien
tctcaaaatgtatttggtatccagc

SEQ ID NO: 1409575 - DNA, 25 bp, Homo sapien
tctggtaagtggaggtgccaaacac

SEQ ID NO: 1409576 - DNA, 25 bp, Homo sapien
catgcatgattgacagtgatctcca

SEQ ID NO: 1409577 - DNA, 25 bp, Homo sapien
cacctgggactctttgatctcaaaa

SEQ ID NO: 1409578 - DNA, 25 bp, Homo sapien
catgagagcaccttggatgaaagtc

SEQ ID NO: 1409579 - DNA, 25 bp, Homo sapien
agtaactctgcacctaatgtcttgt

SEQ ID NO: 1409580 - DNA, 25 bp, Homo sapien
ggaggctgaatcacaggtcaacttt

SEQ ID NO: 1409581 - DNA, 25 bp, Homo sapien
cgttgcagcccaggttgatgtactc

SEQ ID NO: 1409582 - DNA, 25 bp, Homo sapien
taatcctaatctataccgcttggtg

SEQ ID NO: 1409583 - DNA, 25 bp, Homo sapien
tgtcactttgatggcctcaggattg

SEQ ID NO: 1409584 - DNA, 25 bp, Homo sapien
gagcttgtaacatccagtctattcc

SEQ ID NO: 1409585 - DNA, 25 bp, Homo sapien
atcagtgtacatgggagggacagcc

SEQ ID NO: 1409586 - DNA, 25 bp, Homo sapien
gctctgcctccccgggtttatgcca

SEQ ID NO: 1409587 - DNA, 25 bp, Homo sapien
aagctctgcctccccgggtttatgc

SEQ ID NO: 1409588 - DNA, 25 bp, Homo sapien
gcaccccccaccacacctggctaat

SEQ ID NO: 1409589 - DNA, 25 bp, Homo sapien
tctcgctctgtcgctgcaagctctg

SEQ ID NO: 1409590 - DNA, 25 bp, Homo sapien
gatctcctttaactggccgttggtc

SEQ ID NO: 1409591 - DNA, 25 bp, Homo sapien
catggccatgccttcggtgttctga

SEQ ID NO: 1409592 - DNA, 25 bp, Homo sapien
ttcggtgttctgatagctgctggct

SEQ ID NO: 1409593 - DNA, 25 bp, Homo sapien
gccgttggtcctgtccagtgatggc

SEQ ID NO: 1409594 - DNA, 25 bp, Homo sapien
tcctagaccaatatcaagcgctgaa

SEQ ID NO: 1409595 - DNA, 25 bp, Homo sapien
tatgtttacactcaagtcgatgcac

SEQ ID NO: 1409596 - DNA, 25 bp, Homo sapien
tcacagtagatgaaggtgagacctt

SEQ ID NO: 1409597 - DNA, 25 bp, Homo sapien
caaacattctggcagagacacagtg

SEQ ID NO: 1409598 - DNA, 25 bp, Homo sapien
tggatgtagcagcagttcaatgaat

SEQ ID NO: 1409599 - DNA, 25 bp, Homo sapien
tatagcaagtcttaatgatgcccca

SEQ ID NO: 1409600 - DNA, 25 bp, Homo sapien
cctcctgaggcacgttctggctgtg

SEQ ID NO: 1409601 - DNA, 25 bp, Homo sapien
tgtggcaggtgataagcctcaagca

SEQ ID NO: 1409602 - DNA, 25 bp, Homo sapien
ttatgatttcttcacagaagagtag

SEQ ID NO: 1409603 - DNA, 25 bp, Homo sapien
tcacagaagagtagatgacttggga

SEQ ID NO: 1409604 - DNA, 25 bp, Homo sapien
tatgatttcttcacagaagagtaga

SEQ ID NO: 1409605 - DNA, 25 bp, Homo sapien
cagaagagtagatgacttgggagtc

SEQ ID NO: 1409606 - DNA, 25 bp, Homo sapien
tgggagagacacacaggaataaaga

SEQ ID NO: 1409607 - DNA, 25 bp, Homo sapien
ctgggagagacacacaggaataaag

SEQ ID NO: 1409608 - DNA, 25 bp, Homo sapien
cttgttctccagaagtgtcctgatg

SEQ ID NO: 1409609 - DNA, 25 bp, Homo sapien
ttgttctccagaagtgtcctgatgt

SEQ ID NO: 1409610 - DNA, 25 bp, Homo sapien
ttctccagaagtgtcctgatgtttg

SEQ ID NO: 1409611 - DNA, 25 bp, Homo sapien
tgttctccagaagtgtcctgatgtt

SEQ ID NO: 1409612 - DNA, 25 bp, Homo sapien
gcagttcctgcaaagctacgtgtca

SEQ ID NO: 1409613 - DNA, 25 bp, Homo sapien
gtagctagatgaccactgaccagga

SEQ ID NO: 1409614 - DNA, 25 bp, Homo sapien
taatgaccctgttcacctgagagaa

SEQ ID NO: 1409615 - DNA, 25 bp, Homo sapien
tagagggcttggaaagtgactgcac

SEQ ID NO: 1409616 - DNA, 25 bp, Homo sapien
agaataaaccacatccacatctaca

SEQ ID NO: 1409617 - DNA, 25 bp, Homo sapien
gaataaaccacatccacatctacag

SEQ ID NO: 1409618 - DNA, 25 bp, Homo sapien
gattatatccttcctctcaacccca

SEQ ID NO: 1409619 - DNA, 25 bp, Homo sapien
cacctaatggtctccgctcctgtct

SEQ ID NO: 1409620 - DNA, 25 bp, Homo sapien
agggttcacacttcatacacagctt

SEQ ID NO: 1409621 - DNA, 25 bp, Homo sapien
caggccctggcttaatgattatatc

SEQ ID NO: 1409622 - DNA, 25 bp, Homo sapien
gacatacactggctgcagctcctcc

SEQ ID NO: 1409623 - DNA, 25 bp, Homo sapien
ttgacatacactggctgcagctcct

SEQ ID NO: 1409624 - DNA, 25 bp, Homo sapien
cattgacatacactggctgcagctc

SEQ ID NO: 1409625 - DNA, 25 bp, Homo sapien
catacactggctgcagctcctccat

SEQ ID NO: 1409626 - DNA, 25 bp, Homo sapien
ggttgggcttgaataggtgaactct

SEQ ID NO: 1409627 - DNA, 25 bp, Homo sapien
aataggtgaactcttgaggatttgg

SEQ ID NO: 1409628 - DNA, 25 bp, Homo sapien
cttgaataggtgaactcttgaggat

SEQ ID NO: 1409629 - DNA, 25 bp, Homo sapien
gggcttgaataggtgaactcttgag

SEQ ID NO: 1409630 - DNA, 25 bp, Homo sapien
tgggttcattagtggcagaactttc

SEQ ID NO: 1409631 - DNA, 25 bp, Homo sapien
gggttcattagtggcagaactttct

SEQ ID NO: 1409632 - DNA, 25 bp, Homo sapien
ggttcattagtggcagaactttctc

SEQ ID NO: 1409633 - DNA, 25 bp, Homo sapien
ctgggttcattagtggcagaacttt

SEQ ID NO: 1409634 - DNA, 25 bp, Homo sapien
tggcaaacccgtcatgcactggtaa

SEQ ID NO: 1409635 - DNA, 25 bp, Homo sapien
tgccacatagatgtatatagaggcc

SEQ ID NO: 1409636 - DNA, 25 bp, Homo sapien
aagagaatcctcatagcgatccagg

SEQ ID NO: 1409637 - DNA, 25 bp, Homo sapien
cattcgtaaggcgaactaggccatc

SEQ ID NO: 1409638 - DNA, 25 bp, Homo sapien
tatagcggtcccattacataggtat

SEQ ID NO: 1409639 - DNA, 25 bp, Homo sapien
caggagcccctctgttgagagtcat

SEQ ID NO: 1409640 - DNA, 25 bp, Homo sapien
ggcaagctcgccaaatcccattgtt

SEQ ID NO: 1409641 - DNA, 25 bp, Homo sapien
ggtgctctaccctcccagtacattg

SEQ ID NO: 1409642 - DNA, 25 bp, Homo sapien
catatagtcatgctgaaaatgccaa

SEQ ID NO: 1409643 - DNA, 25 bp, Homo sapien
cacggcagcttaaggaatatgttgg

SEQ ID NO: 1409644 - DNA, 25 bp, Homo sapien
tactaaggacaactagaaaggctgg

SEQ ID NO: 1409645 - DNA, 25 bp, Homo sapien
cagggagcatgaggataagcccacc

SEQ ID NO: 1409646 - DNA, 25 bp, Homo sapien
ttgtataattagcagtatgaccaca

SEQ ID NO: 1409647 - DNA, 25 bp, Homo sapien
tgcacagagccttgcagaattatga

SEQ ID NO: 1409648 - DNA, 25 bp, Homo sapien
tatgaccacattgagcattgcacag

SEQ ID NO: 1409649 - DNA, 25 bp, Homo sapien
gcagaattatgaagcataaaaagaa

SEQ ID NO: 1409650 - DNA, 25 bp, Homo sapien
aatatggagaatccaaatggtagat

SEQ ID NO: 1409651 - DNA, 25 bp, Homo sapien
tatggagaatccaaatggtagatac

SEQ ID NO: 1409652 - DNA, 25 bp, Homo sapien
caaaatatggagaatccaaatggta

SEQ ID NO: 1409653 - DNA, 25 bp, Homo sapien
ggagaatccaaatggtagatacaac

SEQ ID NO: 1409654 - DNA, 25 bp, Homo sapien
tgtcatgaggtctcttctatagcca

SEQ ID NO: 1409655 - DNA, 25 bp, Homo sapien
gtccccagagaactccagctgtcat

SEQ ID NO: 1409656 - DNA, 25 bp, Homo sapien
gcaacaccagtgaaaccaaggacac

SEQ ID NO: 1409657 - DNA, 25 bp, Homo sapien
tcttgtggaacaaggcatacaacag

SEQ ID NO: 1409658 - DNA, 25 bp, Homo sapien
gtctgtactcttcaggttagtgtgg

SEQ ID NO: 1409659 - DNA, 25 bp, Homo sapien
acttgggcccttcttataaatgcta

SEQ ID NO: 1409660 - DNA, 25 bp, Homo sapien
ggaaagaaagcagtgcttcagcccc

SEQ ID NO: 1409661 - DNA, 25 bp, Homo sapien
aagccactggacactgagatcacct

SEQ ID NO: 1409662 - DNA, 25 bp, Homo sapien
aaactctgtatccaggtaacaccca

SEQ ID NO: 1409663 - DNA, 25 bp, Homo sapien
ctgtatccaggtaacacccacccac

SEQ ID NO: 1409664 - DNA, 25 bp, Homo sapien
ctctgtatccaggtaacacccaccc

SEQ ID NO: 1409665 - DNA, 25 bp, Homo sapien
tcaaactctgtatccaggtaacacc

SEQ ID NO: 1409666 - DNA, 25 bp, Homo sapien
ttggcctcacaggagtagtttccag

SEQ ID NO: 1409667 - DNA, 25 bp, Homo sapien
cccaggccgttgttggcctcacagg

SEQ ID NO: 1409668 - DNA, 25 bp, Homo sapien
tggagactggcactgcctcactgca

SEQ ID NO: 1409669 - DNA, 25 bp, Homo sapien
ctgagatggagactggcactgcctc

SEQ ID NO: 1409670 - DNA, 25 bp, Homo sapien
tcatgataaaattggtacaagattg

SEQ ID NO: 1409671 - DNA, 25 bp, Homo sapien
ctgcagtcaaagagaggttgaagga

SEQ ID NO: 1409672 - DNA, 25 bp, Homo sapien
acaagattgggggagagcctctcag

SEQ ID NO: 1409673 - DNA, 25 bp, Homo sapien
caagggtgacatcctcatgataaaa

SEQ ID NO: 1409674 - DNA, 25 bp, Homo sapien
ctcaatagattcacaaactcccaac

SEQ ID NO: 1409675 - DNA, 25 bp, Homo sapien
gacacagaggggctatcagaaaaga

SEQ ID NO: 1409676 - DNA, 25 bp, Homo sapien
cacagaggggctatcagaaaagatt

SEQ ID NO: 1409677 - DNA, 25 bp, Homo sapien
tttgtgatgcctcaatagattcaca

SEQ ID NO: 1409678 - DNA, 25 bp, Homo sapien
tgcaggctcagcaaagggcctggcc

SEQ ID NO: 1409679 - DNA, 25 bp, Homo sapien
agggcctggccccatggctgttgca

SEQ ID NO: 1409680 - DNA, 25 bp, Homo sapien
agcaaagggcctggccccatggctg

SEQ ID NO: 1409681 - DNA, 25 bp, Homo sapien
tggccccatggctgttgcatatttt

SEQ ID NO: 1409682 - DNA, 25 bp, Homo sapien
cgtttgaggggaatatcagttctgg

SEQ ID NO: 1409683 - DNA, 25 bp, Homo sapien
gacgtttgaggggaatatcagttct

SEQ ID NO: 1409684 - DNA, 25 bp, Homo sapien
aacaatatatttagacgtttgaggg

SEQ ID NO: 1409685 - DNA, 25 bp, Homo sapien
tcaacaatatatttagacgtttgag

SEQ ID NO: 1409686 - DNA, 25 bp, Homo sapien
gaagcaggctgttaccactatgaac

SEQ ID NO: 1409687 - DNA, 25 bp, Homo sapien
ccctttgggtgcagtttcggcaagc

SEQ ID NO: 1409688 - DNA, 25 bp, Homo sapien
tggctacttggctacaacaccaggt

SEQ ID NO: 1409689 - DNA, 25 bp, Homo sapien
tcagcccagttcaggactataggac

SEQ ID NO: 1409690 - DNA, 25 bp, Homo sapien
gctctggataggcacatggccgttg

SEQ ID NO: 1409691 - DNA, 25 bp, Homo sapien
tatttgccggcatcactctctttca

SEQ ID NO: 1409692 - DNA, 25 bp, Homo sapien
cagggatattcaccaccttgctctg

SEQ ID NO: 1409693 - DNA, 25 bp, Homo sapien
ggccgttgtcagctctacagtaata

SEQ ID NO: 1409694 - DNA, 25 bp, Homo sapien
tcccatactggttcctgtggcctct

SEQ ID NO: 1409695 - DNA, 25 bp, Homo sapien
tttctttcccatactggttcctgtg

SEQ ID NO: 1409696 - DNA, 25 bp, Homo sapien
tctttcccatactggttcctgtggc

SEQ ID NO: 1409697 - DNA, 25 bp, Homo sapien
tttcccatactggttcctgtggcct

SEQ ID NO: 1409698 - DNA, 25 bp, Homo sapien
tctccaagcttacattagagatggg

SEQ ID NO: 1409699 - DNA, 25 bp, Homo sapien
ccggatctccaagcttacattagag

SEQ ID NO: 1409700 - DNA, 25 bp, Homo sapien
ttgtccttcagtcacctgtcccccg

SEQ ID NO: 1409701 - DNA, 25 bp, Homo sapien
gggcccggatctccaagcttacatt

SEQ ID NO: 1409702 - DNA, 25 bp, Homo sapien
ctagatggatataagacaacaggtg

SEQ ID NO: 1409703 - DNA, 25 bp, Homo sapien
atggatataagacaacaggtgagaa

SEQ ID NO: 1409704 - DNA, 25 bp, Homo sapien
tagatggatataagacaacaggtga

SEQ ID NO: 1409705 - DNA, 25 bp, Homo sapien
gatggatataagacaacaggtgaga

SEQ ID NO: 1409706 - DNA, 25 bp, Homo sapien
tgtgatagatctccatgagacagga

SEQ ID NO: 1409707 - DNA, 25 bp, Homo sapien
tttgaatgtcctaaccctggccaat

SEQ ID NO: 1409708 - DNA, 25 bp, Homo sapien
gatatcttcagtcttgcagtggaaa

SEQ ID NO: 1409709 - DNA, 25 bp, Homo sapien
gacaccttttgcacagaatatagag

SEQ ID NO: 1409710 - DNA, 25 bp, Homo sapien
acagcaggtggtttgccttttgaag

SEQ ID NO: 1409711 - DNA, 25 bp, Homo sapien
gctacattgccttctaataagtcaa

SEQ ID NO: 1409712 - DNA, 25 bp, Homo sapien
catttggagagccattagacagcag

SEQ ID NO: 1409713 - DNA, 25 bp, Homo sapien
tttgtgttgcaatctcatcatgtgg

SEQ ID NO: 1409714 - DNA, 25 bp, Homo sapien
ttatgaagtaggaagccaggagcaa

SEQ ID NO: 1409715 - DNA, 25 bp, Homo sapien
gaaacagactagtagtccaagctga

SEQ ID NO: 1409716 - DNA, 25 bp, Homo sapien
actaaatgccaaggcatacagtcag

SEQ ID NO: 1409717 - DNA, 25 bp, Homo sapien
caatggagtcttgatcaatgaatat

SEQ ID NO: 1409718 - DNA, 25 bp, Homo sapien
gagtcaccgtttctgccttgcacca

SEQ ID NO: 1409719 - DNA, 25 bp, Homo sapien
gcagaactggagttgaacatccaac

SEQ ID NO: 1409720 - DNA, 25 bp, Homo sapien
tgttttctgatcctgtgagtcaccg

SEQ ID NO: 1409721 - DNA, 25 bp, Homo sapien
tccacacggcagaaatctggagctc

SEQ ID NO: 1409722 - DNA, 25 bp, Homo sapien
gctggcagtcagcacaggacgttga

SEQ ID NO: 1409723 - DNA, 25 bp, Homo sapien
ctggcagtcagcacaggacgttgaa

SEQ ID NO: 1409724 - DNA, 25 bp, Homo sapien
tggcagtcagcacaggacgttgaaa

SEQ ID NO: 1409725 - DNA, 25 bp, Homo sapien
gagctggcagtcagcacaggacgtt

SEQ ID NO: 1409726 - DNA, 25 bp, Homo sapien
aaaagcctctggcaagaagcaaccc

SEQ ID NO: 1409727 - DNA, 25 bp, Homo sapien
gctaagattcctgctgaaaagcctc

SEQ ID NO: 1409728 - DNA, 25 bp, Homo sapien
ccatcatggctcctttgatgatcaa

SEQ ID NO: 1409729 - DNA, 25 bp, Homo sapien
gagaaggatcacaatagtccccaaa

SEQ ID NO: 1409730 - DNA, 25 bp, Homo sapien
ccagagaaagagttgtcctttggta

SEQ ID NO: 1409731 - DNA, 25 bp, Homo sapien
gaaagagttgtcctttggtactaca

SEQ ID NO: 1409732 - DNA, 25 bp, Homo sapien
cagagaaagagttgtcctttggtac

SEQ ID NO: 1409733 - DNA, 25 bp, Homo sapien
agagaaagagttgtcctttggtact

SEQ ID NO: 1409734 - DNA, 25 bp, Homo sapien
tgtctccttcgaagacagaagaggg

SEQ ID NO: 1409735 - DNA, 25 bp, Homo sapien
tccttatggtaagccatcttctgaa

SEQ ID NO: 1409736 - DNA, 25 bp, Homo sapien
cttaaaactgcactttggataagga

SEQ ID NO: 1409737 - DNA, 25 bp, Homo sapien
ccctggcatttcagaacgatgctgt

SEQ ID NO: 1409738 - DNA, 25 bp, Homo sapien
gggatgtctttgtagcagaagctaa

SEQ ID NO: 1409739 - DNA, 25 bp, Homo sapien
gatgtctttgtagcagaagctaatg

SEQ ID NO: 1409740 - DNA, 25 bp, Homo sapien
ggggatgtctttgtagcagaagcta

SEQ ID NO: 1409741 - DNA, 25 bp, Homo sapien
gtctttgtagcagaagctaatgatg

SEQ ID NO: 1409742 - DNA, 25 bp, Homo sapien
cattgtggtgcaacctcaagagttc

SEQ ID NO: 1409743 - DNA, 25 bp, Homo sapien
caagagttctaatctgtatgcacca

SEQ ID NO: 1409744 - DNA, 25 bp, Homo sapien
tggctctacactggctgtcattgtg

SEQ ID NO: 1409745 - DNA, 25 bp, Homo sapien
tatgcaccattagcagggtacaagg

SEQ ID NO: 1409746 - DNA, 25 bp, Homo sapien
tgaccagcaatgaccacagcagcat

SEQ ID NO: 1409747 - DNA, 25 bp, Homo sapien
caaagatgaccagcaatgaccacag

SEQ ID NO: 1409748 - DNA, 25 bp, Homo sapien
gatgaccagcaatgaccacagcagc

SEQ ID NO: 1409749 - DNA, 25 bp, Homo sapien
aagatgaccagcaatgaccacagca

SEQ ID NO: 1409750 - DNA, 25 bp, Homo sapien
gatgtactcttggtcaccaactgga

SEQ ID NO: 1409751 - DNA, 25 bp, Homo sapien
aagagatgtactcttggtcaccaac

SEQ ID NO: 1409752 - DNA, 25 bp, Homo sapien
tgtactcttggtcaccaactggaga

SEQ ID NO: 1409753 - DNA, 25 bp, Homo sapien
tttgaaaagagatgtactcttggtc

SEQ ID NO: 1409754 - DNA, 25 bp, Homo sapien
gatagtaactagatactttccgagt

SEQ ID NO: 1409755 - DNA, 25 bp, Homo sapien
cattgttatggcagtagtggtagta

SEQ ID NO: 1409756 - DNA, 25 bp, Homo sapien
tacataaatggcagtagaagtagtc

SEQ ID NO: 1409757 - DNA, 25 bp, Homo sapien
agaagtagtcatagtcatggtcatc

SEQ ID NO: 1409758 - DNA, 25 bp, Homo sapien
ttgaggactcaatgtcatttcaggc

SEQ ID NO: 1409759 - DNA, 25 bp, Homo sapien
gaaaacagaagaagctagacgacca

SEQ ID NO: 1409760 - DNA, 25 bp, Homo sapien
tcacagaccctatcaaaaatgatgg

SEQ ID NO: 1409761 - DNA, 25 bp, Homo sapien
gaacccggaggctaatgtgcttgaa

SEQ ID NO: 1409762 - DNA, 25 bp, Homo sapien
tgagctccaagcacatagcaatggc

SEQ ID NO: 1409763 - DNA, 25 bp, Homo sapien
cagtagttgtttctagagtggcata

SEQ ID NO: 1409764 - DNA, 25 bp, Homo sapien
catgataagggtttggattactcaa

SEQ ID NO: 1409765 - DNA, 25 bp, Homo sapien
ttgtcaaattgatggaactatgcac

SEQ ID NO: 1409766 - DNA, 25 bp, Homo sapien
gactggacatgagtatgagggaact

SEQ ID NO: 1409767 - DNA, 25 bp, Homo sapien
tacagccttacctgagagacattga

SEQ ID NO: 1409768 - DNA, 25 bp, Homo sapien
tgatttcccagacgttgttggtgaa

SEQ ID NO: 1409769 - DNA, 25 bp, Homo sapien
actgatttcccagacgttgttggtg

SEQ ID NO: 1409770 - DNA, 25 bp, Homo sapien
gtgaagatataaattgatacagcct

SEQ ID NO: 1409771 - DNA, 25 bp, Homo sapien
ctcgatgatccatgtaagtagcggg

SEQ ID NO: 1409772 - DNA, 25 bp, Homo sapien
tctctacgtaagacaaaaaatggcc

SEQ ID NO: 1409773 - DNA, 25 bp, Homo sapien
ggtatactggaaagctaatgcccca

SEQ ID NO: 1409774 - DNA, 25 bp, Homo sapien
taatgccccaggatctctgaagaac

SEQ ID NO: 1409775 - DNA, 25 bp, Homo sapien
gctttcctcagcctggaatagatgt

SEQ ID NO: 1409776 - DNA, 25 bp, Homo sapien
cagcctggaatagatgtctaaggaa

SEQ ID NO: 1409777 - DNA, 25 bp, Homo sapien
cctcagcctggaatagatgtctaag

SEQ ID NO: 1409778 - DNA, 25 bp, Homo sapien
gcctggaatagatgtctaaggaaac

SEQ ID NO: 1409779 - DNA, 25 bp, Homo sapien
ttgtcctccatatgtgtccccaggg

SEQ ID NO: 1409780 - DNA, 25 bp, Homo sapien
tcctccatatgtgtccccagggttt

SEQ ID NO: 1409781 - DNA, 25 bp, Homo sapien
cttgtcctccatatgtgtccccagg

SEQ ID NO: 1409782 - DNA, 25 bp, Homo sapien
tgtcctccatatgtgtccccagggt

SEQ ID NO: 1409783 - DNA, 25 bp, Homo sapien
ggctctactcaaggtagctccagac

SEQ ID NO: 1409784 - DNA, 25 bp, Homo sapien
attagctctgggctctactcaaggt

SEQ ID NO: 1409785 - DNA, 25 bp, Homo sapien
ccagacccaaggacagccattaagt

SEQ ID NO: 1409786 - DNA, 25 bp, Homo sapien
gacagccattaagtacacacagtga

SEQ ID NO: 1409787 - DNA, 25 bp, Homo sapien
gaatgctgttgtctgccatgcacag

SEQ ID NO: 1409788 - DNA, 25 bp, Homo sapien
gaataaacctcatccccacttacaa

SEQ ID NO: 1409789 - DNA, 25 bp, Homo sapien
gtacgccagtgaataaacctcatcc

SEQ ID NO: 1409790 - DNA, 25 bp, Homo sapien
cggctggttatagtacgccagtgaa

SEQ ID NO: 1409791 - DNA, 25 bp, Homo sapien
ttcctgctccggctggttatagtac

SEQ ID NO: 1409792 - DNA, 25 bp, Homo sapien
catcgttggcctgggccatttggga

SEQ ID NO: 1409793 - DNA, 25 bp, Homo sapien
atcgttggcctgggccatttgggaa

SEQ ID NO: 1409794 - DNA, 25 bp, Homo sapien
tcgttggcctgggccatttgggaag

SEQ ID NO: 1409795 - DNA, 25 bp, Homo sapien
gttggcctgggccatttgggaaggc

SEQ ID NO: 1409796 - DNA, 25 bp, Homo sapien
ttttcatatataggctgtagctgcc

SEQ ID NO: 1409797 - DNA, 25 bp, Homo sapien
cattttcatatataggctgtagctg

SEQ ID NO: 1409798 - DNA, 25 bp, Homo sapien
tttcatatataggctgtagctgccc

SEQ ID NO: 1409799 - DNA, 25 bp, Homo sapien
attttcatatataggctgtagctgc

SEQ ID NO: 1409800 - DNA, 25 bp, Homo sapien
gagtggatccctggctgaacgtctt

SEQ ID NO: 1409801 - DNA, 25 bp, Homo sapien
tgagtggatccctggctgaacgtct

SEQ ID NO: 1409802 - DNA, 25 bp, Homo sapien
ctgagtggatccctggctgaacgtc

SEQ ID NO: 1409803 - DNA, 25 bp, Homo sapien
agtggatccctggctgaacgtcttc

SEQ ID NO: 1409804 - DNA, 25 bp, Homo sapien
tcaatgactcctgaggtaagatgat

SEQ ID NO: 1409805 - DNA, 25 bp, Homo sapien
tcttttgaggccgtagcaaaataat

SEQ ID NO: 1409806 - DNA, 25 bp, Homo sapien
gccacggtggctggaccaagggtgc

SEQ ID NO: 1409807 - DNA, 25 bp, Homo sapien
tagcaaaataataaggccacggtgg

SEQ ID NO: 1409808 - DNA, 25 bp, Homo sapien
gggacttgtggcttatcatctttat

SEQ ID NO: 1409809 - DNA, 25 bp, Homo sapien
atctttatgacaagagaagagctgc

SEQ ID NO: 1409810 - DNA, 25 bp, Homo sapien
tgcccctccaatacatcactcatga

SEQ ID NO: 1409811 - DNA, 25 bp, Homo sapien
aagagaagagctgcacccaaccttg

SEQ ID NO: 1409812 - DNA, 25 bp, Homo sapien
aactctcccaggacgctgggaagga

SEQ ID NO: 1409813 - DNA, 25 bp, Homo sapien
cattgaccaagacagttccatagcc

SEQ ID NO: 1409814 - DNA, 25 bp, Homo sapien
catgggtagcaaacccccggaagca

SEQ ID NO: 1409815 - DNA, 25 bp, Homo sapien
gcacagtggcaccagcaaaactctc

SEQ ID NO: 1409816 - DNA, 25 bp, Homo sapien
gaagttgagtgtcaccgcctcactg

SEQ ID NO: 1409817 - DNA, 25 bp, Homo sapien
aagttgagtgtcaccgcctcactgc

SEQ ID NO: 1409818 - DNA, 25 bp, Homo sapien
agcatgaggattgggcgagacaccg

SEQ ID NO: 1409819 - DNA, 25 bp, Homo sapien
tgagcatgaggattgggcgagacac

SEQ ID NO: 1409820 - DNA, 25 bp, Homo sapien
atgaggattgggcgagacaccggga

SEQ ID NO: 1409821 - DNA, 25 bp, Homo sapien
ctgagcatgaggattgggcgagaca

SEQ ID NO: 1409822 - DNA, 25 bp, Homo sapien
agagacagtctctgacaatgcagca

SEQ ID NO: 1409823 - DNA, 25 bp, Homo sapien
tttgtgactggctggctgaacgaag

SEQ ID NO: 1409824 - DNA, 25 bp, Homo sapien
cagggaaactttgtgtgccccaggg

SEQ ID NO: 1409825 - DNA, 25 bp, Homo sapien
attgaacttcctcagcatgccccag

SEQ ID NO: 1409826 - DNA, 25 bp, Homo sapien
tgcccatagcaactgagcagatgag

SEQ ID NO: 1409827 - DNA, 25 bp, Homo sapien
cactgaaggaatctcatactctgct

SEQ ID NO: 1409828 - DNA, 25 bp, Homo sapien
tacacagtaatattgctcagcatca

SEQ ID NO: 1409829 - DNA, 25 bp, Homo sapien
tgaacgctgggtctttgactgaagg

SEQ ID NO: 1409830 - DNA, 25 bp, Homo sapien
caagctcacatcagcgacagggacc

SEQ ID NO: 1409831 - DNA, 25 bp, Homo sapien
aagctcacatcagcgacagggaccc

SEQ ID NO: 1409832 - DNA, 25 bp, Homo sapien
tccaagctcacatcagcgacaggga

SEQ ID NO: 1409833 - DNA, 25 bp, Homo sapien
ccaagctcacatcagcgacagggac

SEQ ID NO: 1409834 - DNA, 25 bp, Homo sapien
aagacagtaagtagatatgacggtc

SEQ ID NO: 1409835 - DNA, 25 bp, Homo sapien
ctgtgtggacacaagatgacatagg

SEQ ID NO: 1409836 - DNA, 25 bp, Homo sapien
gtgcctcgcaccagtatgaccctgt

SEQ ID NO: 1409837 - DNA, 25 bp, Homo sapien
ctgtgcctcgcaccagtatgaccct

SEQ ID NO: 1409838 - DNA, 25 bp, Homo sapien
tgtgcctcgcaccagtatgaccctg

SEQ ID NO: 1409839 - DNA, 25 bp, Homo sapien
atcttacacgtcagggtcactgggc

SEQ ID NO: 1409840 - DNA, 25 bp, Homo sapien
gggcatcttacacgtcagggtcact

SEQ ID NO: 1409841 - DNA, 25 bp, Homo sapien
aaagggcatcttacacgtcagggtc

SEQ ID NO: 1409842 - DNA, 25 bp, Homo sapien
ctgtagaaagggcatcttacacgtc

SEQ ID NO: 1409843 - DNA, 25 bp, Homo sapien
gaggggctggctatcaaaaacagct

SEQ ID NO: 1409844 - DNA, 25 bp, Homo sapien
atgggaggggctggctatcaaaaac

SEQ ID NO: 1409845 - DNA, 25 bp, Homo sapien
ggatgggaggggctggctatcaaaa

SEQ ID NO: 1409846 - DNA, 25 bp, Homo sapien
ggaggggctggctatcaaaaacagc

SEQ ID NO: 1409847 - DNA, 25 bp, Homo sapien
tgattaatgcggttcggaatttctg

SEQ ID NO: 1409848 - DNA, 25 bp, Homo sapien
taatgcggttcggaatttctggtaa

SEQ ID NO: 1409849 - DNA, 25 bp, Homo sapien
tgcggttcggaatttctggtaagag

SEQ ID NO: 1409850 - DNA, 25 bp, Homo sapien
acaaatgattaatgcggttcggaat

SEQ ID NO: 1409851 - DNA, 25 bp, Homo sapien
cctaatagctatgggctgtgtgggc

SEQ ID NO: 1409852 - DNA, 25 bp, Homo sapien
gaggcatggaatatcttagagtcac

SEQ ID NO: 1409853 - DNA, 25 bp, Homo sapien
gcatttgtttatccaaccctcagag

SEQ ID NO: 1409854 - DNA, 25 bp, Homo sapien
catcagttccatccatagtaccaga

SEQ ID NO: 1409855 - DNA, 25 bp, Homo sapien
tgatgtttgtacacctcagcagctg

SEQ ID NO: 1409856 - DNA, 25 bp, Homo sapien
gcttgatctagtgaagagtccttcg

SEQ ID NO: 1409857 - DNA, 25 bp, Homo sapien
cagacacgtgtcaggtgcagagact

SEQ ID NO: 1409858 - DNA, 25 bp, Homo sapien
tcaggaccagtgcaatgaagtaagt

SEQ ID NO: 1409859 - DNA, 25 bp, Homo sapien
tctgctccttttcccatattctgca

SEQ ID NO: 1409860 - DNA, 25 bp, Homo sapien
tctctctgctccttttcccatattc

SEQ ID NO: 1409861 - DNA, 25 bp, Homo sapien
ttctctctgctccttttcccatatt

SEQ ID NO: 1409862 - DNA, 25 bp, Homo sapien
tctctgctccttttcccatattctg

SEQ ID NO: 1409863 - DNA, 25 bp, Homo sapien
tctaggtatcaactttgaggatgtc

SEQ ID NO: 1409864 - DNA, 25 bp, Homo sapien
gaaataagcttgcatttaagcttaa

SEQ ID NO: 1409865 - DNA, 25 bp, Homo sapien
cagcaaaagatccaagccagatgca

SEQ ID NO: 1409866 - DNA, 25 bp, Homo sapien
catttaagcttaaagtggcacatga

SEQ ID NO: 1409867 - DNA, 25 bp, Homo sapien
ggattacagacatgagccaccatac

SEQ ID NO: 1409868 - DNA, 25 bp, Homo sapien
gttggtcagcttggtctgaactcct

SEQ ID NO: 1409869 - DNA, 25 bp, Homo sapien
atgttggtcagcttggtctgaactc

SEQ ID NO: 1409870 - DNA, 25 bp, Homo sapien
atcatgttggtcagcttggtctgaa

SEQ ID NO: 1409871 - DNA, 25 bp, Homo sapien
gctgagtgtggttgcatgtgtctct

SEQ ID NO: 1409872 - DNA, 25 bp, Homo sapien
ctgagtgtggttgcatgtgtctctg

SEQ ID NO: 1409873 - DNA, 25 bp, Homo sapien
tgagtgtggttgcatgtgtctctgg

SEQ ID NO: 1409874 - DNA, 25 bp, Homo sapien
tgaattagaaagaaagccagcagaa

SEQ ID NO: 1409875 - DNA, 25 bp, Homo sapien
agaatatgatattccagaagccaaa

SEQ ID NO: 1409876 - DNA, 25 bp, Homo sapien
caaaaattatagacagtctttcaaa

SEQ ID NO: 1409877 - DNA, 25 bp, Homo sapien
gtcaaaaattatagacagtctttca

SEQ ID NO: 1409878 - DNA, 25 bp, Homo sapien
tttgattctgctggtggttatatgg

SEQ ID NO: 1409879 - DNA, 25 bp, Homo sapien
tattttgattctgctggtggttata

SEQ ID NO: 1409880 - DNA, 25 bp, Homo sapien
tagtacaccatttgctagccaagct

SEQ ID NO: 1409881 - DNA, 25 bp, Homo sapien
cagggactcaaaacctaggctcagg

SEQ ID NO: 1409882 - DNA, 25 bp, Homo sapien
cagtcaggatcagcttggaatgcag

SEQ ID NO: 1409883 - DNA, 25 bp, Homo sapien
gaacaagctgtctaggaatcactcc

SEQ ID NO: 1409884 - DNA, 25 bp, Homo sapien
gaacatgtaggataattgcctggca

SEQ ID NO: 1409885 - DNA, 25 bp, Homo sapien
aagcatgcagaagggcgtgtaaacc

SEQ ID NO: 1409886 - DNA, 25 bp, Homo sapien
gataatggagcaacatggactgtga

SEQ ID NO: 1409887 - DNA, 25 bp, Homo sapien
ccattcagctgtttatgtccaggag

SEQ ID NO: 1409888 - DNA, 25 bp, Homo sapien
tcctaagaagtccttacagcccttc

SEQ ID NO: 1409889 - DNA, 25 bp, Homo sapien
cacagatcaacagcaacagcctcgg

SEQ ID NO: 1409890 - DNA, 25 bp, Homo sapien
cagatcaacagcaacagcctcggca

SEQ ID NO: 1409891 - DNA, 25 bp, Homo sapien
acagatcaacagcaacagcctcggc

SEQ ID NO: 1409892 - DNA, 25 bp, Homo sapien
acctagagatgcctctcatcaaaaa

SEQ ID NO: 1409893 - DNA, 25 bp, Homo sapien
aggaccaggtcagggatggtaccta

SEQ ID NO: 1409894 - DNA, 25 bp, Homo sapien
caggtcagggatggtacctagagat

SEQ ID NO: 1409895 - DNA, 25 bp, Homo sapien
atgcacctcagagtcgagcagcagc

SEQ ID NO: 1409896 - DNA, 25 bp, Homo sapien
tagttccaaactatgtctgatggcc

SEQ ID NO: 1409897 - DNA, 25 bp, Homo sapien
gcaccaagtataagtcccagtccaa

SEQ ID NO: 1409898 - DNA, 25 bp, Homo sapien
gatggcctgagaactagacctgatg

SEQ ID NO: 1409899 - DNA, 25 bp, Homo sapien
cagtcatgtagacagtaaatgctcc

SEQ ID NO: 1409900 - DNA, 25 bp, Homo sapien
caaggtttaacaccaacaggagcaa

SEQ ID NO: 1409901 - DNA, 25 bp, Homo sapien
gaagccatggtgtcaaacccagtag

SEQ ID NO: 1409902 - DNA, 25 bp, Homo sapien
cagaagggagaacctctagggtgca

SEQ ID NO: 1409903 - DNA, 25 bp, Homo sapien
aatgccctaggaggacagtgggacc

SEQ ID NO: 1409904 - DNA, 25 bp, Homo sapien
aagaaactgccatagagaatctgac

SEQ ID NO: 1409905 - DNA, 25 bp, Homo sapien
ctgccatagagaatctgacacagct

SEQ ID NO: 1409906 - DNA, 25 bp, Homo sapien
gaaactgccatagagaatctgacac

SEQ ID NO: 1409907 - DNA, 25 bp, Homo sapien
ttaagaaactgccatagagaatctg

SEQ ID NO: 1409908 - DNA, 25 bp, Homo sapien
tgcctcaagcttacaggccccaaag

SEQ ID NO: 1409909 - DNA, 25 bp, Homo sapien
tagcctcagaatctaaagttgtcaa

SEQ ID NO: 1409910 - DNA, 25 bp, Homo sapien
agacacaactttagccctccctgat

SEQ ID NO: 1409911 - DNA, 25 bp, Homo sapien
taataagtactcagcctagcctcag

SEQ ID NO: 1409912 - DNA, 25 bp, Homo sapien
tgttgctattgtggtcacctgaagc

SEQ ID NO: 1409913 - DNA, 25 bp, Homo sapien
gaaagaattgtctacctacactaag

SEQ ID NO: 1409914 - DNA, 25 bp, Homo sapien
tatagggatggacaacaaagatttt

SEQ ID NO: 1409915 - DNA, 25 bp, Homo sapien
tttacacgtcatgaaaaggtctagg

SEQ ID NO: 1409916 - DNA, 25 bp, Homo sapien
gctcacatctacaggcagcaatggg

SEQ ID NO: 1409917 - DNA, 25 bp, Homo sapien
ttccaggcagcttgagaaaaggcag

SEQ ID NO: 1409918 - DNA, 25 bp, Homo sapien
gtgacaggtttgaggattccaggca

SEQ ID NO: 1409919 - DNA, 25 bp, Homo sapien
gctgcttgtccctgagagtaaggca

SEQ ID NO: 1409920 - DNA, 25 bp, Homo sapien
ggccaggtcaagcaacaccaggata

SEQ ID NO: 1409921 - DNA, 25 bp, Homo sapien
tgaggataatcagggctcaggagaa

SEQ ID NO: 1409922 - DNA, 25 bp, Homo sapien
ccccagaatgagtatgaggataatc

SEQ ID NO: 1409923 - DNA, 25 bp, Homo sapien
gcctgagccccagaatgagtatgag

SEQ ID NO: 1409924 - DNA, 25 bp, Homo sapien
gatcccacactgatgtgagccaggc

SEQ ID NO: 1409925 - DNA, 25 bp, Homo sapien
tatcccagggacttactcaactagc

SEQ ID NO: 1409926 - DNA, 25 bp, Homo sapien
agagctaagccatgtacagatccca

SEQ ID NO: 1409927 - DNA, 25 bp, Homo sapien
cacattagctaagggagaagactgg

SEQ ID NO: 1409928 - DNA, 25 bp, Homo sapien
agggcctggacttccagccatatcc

SEQ ID NO: 1409929 - DNA, 25 bp, Homo sapien
cacagggcctggacttccagccata

SEQ ID NO: 1409930 - DNA, 25 bp, Homo sapien
acagggcctggacttccagccatat

SEQ ID NO: 1409931 - DNA, 25 bp, Homo sapien
cagggcctggacttccagccatatc

SEQ ID NO: 1409932 - DNA, 25 bp, Homo sapien
gggccatagcatttccggtctctga

SEQ ID NO: 1409933 - DNA, 25 bp, Homo sapien
cctactagtctcaagtcaaagggat

SEQ ID NO: 1409934 - DNA, 25 bp, Homo sapien
cagtcgcccagagcagaggttgtct

SEQ ID NO: 1409935 - DNA, 25 bp, Homo sapien
tcctggtgggtgcagtcgtgaaacc

SEQ ID NO: 1409936 - DNA, 25 bp, Homo sapien
tgtgattagagctccttctgtagct

SEQ ID NO: 1409937 - DNA, 25 bp, Homo sapien
tgtccaggtcgacttctctcacaaa

SEQ ID NO: 1409938 - DNA, 25 bp, Homo sapien
gatcatctacatgcttaccaagccc

SEQ ID NO: 1409939 - DNA, 25 bp, Homo sapien
catgttctaacctctgttgtccagg

SEQ ID NO: 1409940 - DNA, 25 bp, Homo sapien
aacctagtctttggacgcacaggca

SEQ ID NO: 1409941 - DNA, 25 bp, Homo sapien
tatctgcccagttaaataagtttgc

SEQ ID NO: 1409942 - DNA, 25 bp, Homo sapien
aatgagattccacataattaaatcc

SEQ ID NO: 1409943 - DNA, 25 bp, Homo sapien
cctttggtgcgttagtagctctttg

SEQ ID NO: 1409944 - DNA, 25 bp, Homo sapien
gaagggttgcttctcgtcctgagca

SEQ ID NO: 1409945 - DNA, 25 bp, Homo sapien
gccataggcatgcttgttgcagcgt

SEQ ID NO: 1409946 - DNA, 25 bp, Homo sapien
ccagatgggttttcggccataggca

SEQ ID NO: 1409947 - DNA, 25 bp, Homo sapien
tctggcacacggtataccactggtt

SEQ ID NO: 1409948 - DNA, 25 bp, Homo sapien
tgattggatgaggaccttttgctct

SEQ ID NO: 1409949 - DNA, 25 bp, Homo sapien
tgctcacactgagccaatgtatctt

SEQ ID NO: 1409950 - DNA, 25 bp, Homo sapien
gtatcttctgttcctgtgcaactga

SEQ ID NO: 1409951 - DNA, 25 bp, Homo sapien
tctgctggtggctcatacaaaatac

SEQ ID NO: 1409952 - DNA, 25 bp, Homo sapien
acgtccttaatgtcccagccgtcat

SEQ ID NO: 1409953 - DNA, 25 bp, Homo sapien
cgcccttcacagcggtggaggcccc

SEQ ID NO: 1409954 - DNA, 25 bp, Homo sapien
tgttccacctccacccgcccttcac

SEQ ID NO: 1409955 - DNA, 25 bp, Homo sapien
ccggcacaacacagccacgtcctta

SEQ ID NO: 1409956 - DNA, 25 bp, Homo sapien
catggagtctccagataagttgtga

SEQ ID NO: 1409957 - DNA, 25 bp, Homo sapien
tggaagtacaaaagctaacagaggt

SEQ ID NO: 1409958 - DNA, 25 bp, Homo sapien
caagagtttggtctaattccaggga

SEQ ID NO: 1409959 - DNA, 25 bp, Homo sapien
ttcaagcgcccatctcaggagaaat

SEQ ID NO: 1409960 - DNA, 25 bp, Homo sapien
ctaggaatccaggtctggtgcaaat

SEQ ID NO: 1409961 - DNA, 25 bp, Homo sapien
taggaatccaggtctggtgcaaatg

SEQ ID NO: 1409962 - DNA, 25 bp, Homo sapien
aggaatccaggtctggtgcaaatgg

SEQ ID NO: 1409963 - DNA, 25 bp, Homo sapien
ggatcaaggagaatagcagagccat

SEQ ID NO: 1409964 - DNA, 25 bp, Homo sapien
aggatcaaggagaatagcagagcca

SEQ ID NO: 1409965 - DNA, 25 bp, Homo sapien
caaggatcaaggagaatagcagagc

SEQ ID NO: 1409966 - DNA, 25 bp, Homo sapien
aaggatcaaggagaatagcagagcc

SEQ ID NO: 1409967 - DNA, 25 bp, Homo sapien
gaccaaggcaggtgaaggtgatgag

SEQ ID NO: 1409968 - DNA, 25 bp, Homo sapien
tgatgagctgaaatttaaggctaga

SEQ ID NO: 1409969 - DNA, 25 bp, Homo sapien
tagaaggaggtccccaagcagcaat

SEQ ID NO: 1409970 - DNA, 25 bp, Homo sapien
gaaggaggtccccaagcagcaatat

SEQ ID NO: 1409971 - DNA, 25 bp, Homo sapien
gattttccttaatccgtgtgattga

SEQ ID NO: 1409972 - DNA, 25 bp, Homo sapien
tccttaatccgtgtgattgagcaaa

SEQ ID NO: 1409973 - DNA, 25 bp, Homo sapien
tgagcaaaccatctgttctacccag

SEQ ID NO: 1409974 - DNA, 25 bp, Homo sapien
tgtgattgagcaaaccatctgttct

SEQ ID NO: 1409975 - DNA, 25 bp, Homo sapien
aagcaaatggtgaacattgtcttct

SEQ ID NO: 1409976 - DNA, 25 bp, Homo sapien
attgtcttctcagttaggtagctga

SEQ ID NO: 1409977 - DNA, 25 bp, Homo sapien
tcagttaggtagctgagaatagcaa

SEQ ID NO: 1409978 - DNA, 25 bp, Homo sapien
gaatagcaatgagatttacatcctc

SEQ ID NO: 1409979 - DNA, 25 bp, Homo sapien
ccctcaaattcccattccaacaact

SEQ ID NO: 1409980 - DNA, 25 bp, Homo sapien
ctcaaattcccattccaacaactcc

SEQ ID NO: 1409981 - DNA, 25 bp, Homo sapien
ttggtgcagtccctcaaattcccat

SEQ ID NO: 1409982 - DNA, 25 bp, Homo sapien
ggtgcagtccctcaaattcccattc

SEQ ID NO: 1409983 - DNA, 25 bp, Homo sapien
tccaaggtgacgacaagaaacaggg

SEQ ID NO: 1409984 - DNA, 25 bp, Homo sapien
tgtacagcagacaacagctacggcc

SEQ ID NO: 1409985 - DNA, 25 bp, Homo sapien
cattggccatgtggtggagcttcac

SEQ ID NO: 1409986 - DNA, 25 bp, Homo sapien
catggtctgaatctgctagccggcg

SEQ ID NO: 1409987 - DNA, 25 bp, Homo sapien
tccgtttgattaatggtcctcacca

SEQ ID NO: 1409988 - DNA, 25 bp, Homo sapien
aagtccgtttgattaatggtcctca

SEQ ID NO: 1409989 - DNA, 25 bp, Homo sapien
ctcttctgtttgcagagcccccgac

SEQ ID NO: 1409990 - DNA, 25 bp, Homo sapien
caaagtccgtttgattaatggtcct

SEQ ID NO: 1409991 - DNA, 25 bp, Homo sapien
atgtggccgtggtgtgccaggagct

SEQ ID NO: 1409992 - DNA, 25 bp, Homo sapien
atgacagctgggacatgaaggatgt

SEQ ID NO: 1409993 - DNA, 25 bp, Homo sapien
cgtgtgtgatgacagctgggacatg

SEQ ID NO: 1409994 - DNA, 25 bp, Homo sapien
ctgggacatgaaggatgtggccgtg

SEQ ID NO: 1409995 - DNA, 25 bp, Homo sapien
tccagagcattgtatccagtggctg

SEQ ID NO: 1409996 - DNA, 25 bp, Homo sapien
gacttattgtcccagctgctagaat

SEQ ID NO: 1409997 - DNA, 25 bp, Homo sapien
tggattctgtgatgcgccacccaga

SEQ ID NO: 1409998 - DNA, 25 bp, Homo sapien
cacactagggtataaaggcagggcc

SEQ ID NO: 1409999 - DNA, 25 bp, Homo sapien
gtgatgatgacggtactacagagtc

SEQ ID NO: 1410000 - DNA, 25 bp, Homo sapien
gtggtgatgatgacggtactacaga

SEQ ID NO: 1410001 - DNA, 25 bp, Homo sapien
tttgccagctccatggtgttgctat

SEQ ID NO: 1410002 - DNA, 25 bp, Homo sapien
tgccagctccatggtgttgctattg

SEQ ID NO: 1410003 - DNA, 25 bp, Homo sapien
cctccttgagtagatggattgatgg

SEQ ID NO: 1410004 - DNA, 25 bp, Homo sapien
cttgagtagatggattgatgggaag

SEQ ID NO: 1410005 - DNA, 25 bp, Homo sapien
ccttgagtagatggattgatgggaa

SEQ ID NO: 1410006 - DNA, 25 bp, Homo sapien
ctccttgagtagatggattgatggg

SEQ ID NO: 1410007 - DNA, 25 bp, Homo sapien
tgagctgaaacatactttccaaccc

SEQ ID NO: 1410008 - DNA, 25 bp, Homo sapien
gctgaaacatactttccaaccccat

SEQ ID NO: 1410009 - DNA, 25 bp, Homo sapien
gccactgagctgaaacatactttcc

SEQ ID NO: 1410010 - DNA, 25 bp, Homo sapien
taagccactgagctgaaacatactt

SEQ ID NO: 1410011 - DNA, 25 bp, Homo sapien
ctctctcggagggtagcaaggattg

SEQ ID NO: 1410012 - DNA, 25 bp, Homo sapien
tattgctcgatccatacctcatgtc

SEQ ID NO: 1410013 - DNA, 25 bp, Homo sapien
accaagccatggtcttctgtgtgca

SEQ ID NO: 1410014 - DNA, 25 bp, Homo sapien
atcactcaagaccaagccatggtct

SEQ ID NO: 1410015 - DNA, 25 bp, Homo sapien
agtccattgcccaggtttacacagg

SEQ ID NO: 1410016 - DNA, 25 bp, Homo sapien
tgtccccagccctagaagagtgcta

SEQ ID NO: 1410017 - DNA, 25 bp, Homo sapien
tattcggaggatgaaatgacacgcc

SEQ ID NO: 1410018 - DNA, 25 bp, Homo sapien
tctagcccgggcagaatattccagg

SEQ ID NO: 1410019 - DNA, 25 bp, Homo sapien
agccccgatcatccatgttagagga

SEQ ID NO: 1410020 - DNA, 25 bp, Homo sapien
gacaggtccagccccgatcatccat

SEQ ID NO: 1410021 - DNA, 25 bp, Homo sapien
gtccagccccgatcatccatgttag

SEQ ID NO: 1410022 - DNA, 25 bp, Homo sapien
aggtccagccccgatcatccatgtt

SEQ ID NO: 1410023 - DNA, 25 bp, Homo sapien
tatatggccacttcaatggggtcag

SEQ ID NO: 1410024 - DNA, 25 bp, Homo sapien
atatggccacttcaatggggtcaga

SEQ ID NO: 1410025 - DNA, 25 bp, Homo sapien
ctatatggccacttcaatggggtca

SEQ ID NO: 1410026 - DNA, 25 bp, Homo sapien
tagaaacctgtttcaaattccctga

SEQ ID NO: 1410027 - DNA, 25 bp, Homo sapien
gaaacctgtttcaaattccctgaga

SEQ ID NO: 1410028 - DNA, 25 bp, Homo sapien
agaaacctgtttcaaattccctgag

SEQ ID NO: 1410029 - DNA, 25 bp, Homo sapien
aaagtctcccgcgtcatctgacaaa

SEQ ID NO: 1410030 - DNA, 25 bp, Homo sapien
aaaagtctcccgcgtcatctgacaa

SEQ ID NO: 1410031 - DNA, 25 bp, Homo sapien
aagtctcccgcgtcatctgacaaaa

SEQ ID NO: 1410032 - DNA, 25 bp, Homo sapien
agtctcccgcgtcatctgacaaaaa

SEQ ID NO: 1410033 - DNA, 25 bp, Homo sapien
ctttactggttaacctggtctgagg

SEQ ID NO: 1410034 - DNA, 25 bp, Homo sapien
accaccaccgacatctttagtcaga

SEQ ID NO: 1410035 - DNA, 25 bp, Homo sapien
ggtctgaggtaacaacatcctctcc

SEQ ID NO: 1410036 - DNA, 25 bp, Homo sapien
taacctggtctgaggtaacaacatc

SEQ ID NO: 1410037 - DNA, 25 bp, Homo sapien
gccagttcgactgtttctagcacat

SEQ ID NO: 1410038 - DNA, 25 bp, Homo sapien
cacatttatagaagcaaggagagct

SEQ ID NO: 1410039 - DNA, 25 bp, Homo sapien
aggtctgtgagccagttcgactgtt

SEQ ID NO: 1410040 - DNA, 25 bp, Homo sapien
tctagcacatttatagaagcaagga

SEQ ID NO: 1410041 - DNA, 25 bp, Homo sapien
gatctgggcttccttggaatatctt

SEQ ID NO: 1410042 - DNA, 25 bp, Homo sapien
gcgtgtcttactggcatcctcatgt

SEQ ID NO: 1410043 - DNA, 25 bp, Homo sapien
catgtcttaatgtatcagggatctg

SEQ ID NO: 1410044 - DNA, 25 bp, Homo sapien
ctagtttctgttgcgtgtcttactg

SEQ ID NO: 1410045 - DNA, 25 bp, Homo sapien
aagccatccagttggctaccttctc

SEQ ID NO: 1410046 - DNA, 25 bp, Homo sapien
caaactccagcgtgcttagagatct

SEQ ID NO: 1410047 - DNA, 25 bp, Homo sapien
ccagttggctaccttctccttcggg

SEQ ID NO: 1410048 - DNA, 25 bp, Homo sapien
tgaggccaggtcttggcccttcaaa

SEQ ID NO: 1410049 - DNA, 25 bp, Homo sapien
cgggcgggcgcacggcgggcggaca

SEQ ID NO: 1410050 - DNA, 25 bp, Homo sapien
gcgcacggcgggcggacagcatgct

SEQ ID NO: 1410051 - DNA, 25 bp, Homo sapien
gggcggacagcatgctgagcctcct

SEQ ID NO: 1410052 - DNA, 25 bp, Homo sapien
cacggcgggcggacagcatgctgag

SEQ ID NO: 1410053 - DNA, 25 bp, Homo sapien
tctctccgatactttctcccaaggt

SEQ ID NO: 1410054 - DNA, 25 bp, Homo sapien
ctctccgatactttctcccaaggta

SEQ ID NO: 1410055 - DNA, 25 bp, Homo sapien
cgggggctcggtccgggcgcagagc

SEQ ID NO: 1410056 - DNA, 25 bp, Homo sapien
gagagtgctggagtgccccgcggcc

SEQ ID NO: 1410057 - DNA, 25 bp, Homo sapien
actgcttccccggtgggagagtgct

SEQ ID NO: 1410058 - DNA, 25 bp, Homo sapien
ggggcactgcttccccggtgggaga

SEQ ID NO: 1410059 - DNA, 25 bp, Homo sapien
ttggtgggggcacgtcttgattcat

SEQ ID NO: 1410060 - DNA, 25 bp, Homo sapien
ttcccagttccgaaggcaaagcctg

SEQ ID NO: 1410061 - DNA, 25 bp, Homo sapien
tccgaaggcaaagcctggctgagtt

SEQ ID NO: 1410062 - DNA, 25 bp, Homo sapien
tctccttgtcgggtctcttcccagt

SEQ ID NO: 1410063 - DNA, 25 bp, Homo sapien
tctggaccagtttacttggcaatct

SEQ ID NO: 1410064 - DNA, 25 bp, Homo sapien
ctctggaccagtttacttggcaatc

SEQ ID NO: 1410065 - DNA, 25 bp, Homo sapien
cctctggaccagtttacttggcaat

SEQ ID NO: 1410066 - DNA, 25 bp, Homo sapien
tggcacaggctttatccccggagct

SEQ ID NO: 1410067 - DNA, 25 bp, Homo sapien
tgctggcacaggctttatccccgga

SEQ ID NO: 1410068 - DNA, 25 bp, Homo sapien
ggctgctggcacaggctttatcccc

SEQ ID NO: 1410069 - DNA, 25 bp, Homo sapien
gctgctggcacaggctttatccccg

SEQ ID NO: 1410070 - DNA, 25 bp, Homo sapien
tggtatccagccatcgattgatgtg

SEQ ID NO: 1410071 - DNA, 25 bp, Homo sapien
tgtgtccaaatggctgggcgacttc

SEQ ID NO: 1410072 - DNA, 25 bp, Homo sapien
ctgtgtccaaatggctgggcgactt

SEQ ID NO: 1410073 - DNA, 25 bp, Homo sapien
ccttgctttgcagctcattttattg

SEQ ID NO: 1410074 - DNA, 25 bp, Homo sapien
gccttccctttcgaggagcaccttg

SEQ ID NO: 1410075 - DNA, 25 bp, Homo sapien
ccctttcgaggagcaccttgcagtt

SEQ ID NO: 1410076 - DNA, 25 bp, Homo sapien
gagtggccgccttccctttcgagga

SEQ ID NO: 1410077 - DNA, 25 bp, Homo sapien
cagtttggggtggacagcaagctgt

SEQ ID NO: 1410078 - DNA, 25 bp, Homo sapien
gcctcctgatgcttatggttttcat

SEQ ID NO: 1410079 - DNA, 25 bp, Homo sapien
gagagggcagtttggggtggacagc

SEQ ID NO: 1410080 - DNA, 25 bp, Homo sapien
ggcctcctgatgcttatggttttca

SEQ ID NO: 1410081 - DNA, 25 bp, Homo sapien
caactgttctgatggtggacgtggt

SEQ ID NO: 1410082 - DNA, 25 bp, Homo sapien
catgggcagcccagtgtagttgcaa

SEQ ID NO: 1410083 - DNA, 25 bp, Homo sapien
acgtggtgcatggaggccgagaagc

SEQ ID NO: 1410084 - DNA, 25 bp, Homo sapien
actcagtgcatactcggtgccttcc

SEQ ID NO: 1410085 - DNA, 25 bp, Homo sapien
catctgcaattcctcctcacagggc

SEQ ID NO: 1410086 - DNA, 25 bp, Homo sapien
tctgcacctggggagtgatcagcag

SEQ ID NO: 1410087 - DNA, 25 bp, Homo sapien
cacagggcagggcaaggttctgcac

SEQ ID NO: 1410088 - DNA, 25 bp, Homo sapien
ggctggagcatccaccaccatctgc

SEQ ID NO: 1410089 - DNA, 25 bp, Homo sapien
aagttttcccaacaggttgcgctgc

SEQ ID NO: 1410090 - DNA, 25 bp, Homo sapien
agttttcccaacaggttgcgctgct

SEQ ID NO: 1410091 - DNA, 25 bp, Homo sapien
caagttttcccaacaggttgcgctg

SEQ ID NO: 1410092 - DNA, 25 bp, Homo sapien
ttaatgacagcgaccatctgccacc

SEQ ID NO: 1410093 - DNA, 25 bp, Homo sapien
ctccttcgcctttcccagcagggag

SEQ ID NO: 1410094 - DNA, 25 bp, Homo sapien
tgccacccctgctggtgatcagccc

SEQ ID NO: 1410095 - DNA, 25 bp, Homo sapien
tggaatccgtttaatgacagcgacc

SEQ ID NO: 1410096 - DNA, 25 bp, Homo sapien
cagtgccttgagtgtcaagctttgg

SEQ ID NO: 1410097 - DNA, 25 bp, Homo sapien
agtgtcaagctttggatgaccgacc

SEQ ID NO: 1410098 - DNA, 25 bp, Homo sapien
ttgagtgtcaagctttggatgaccg

SEQ ID NO: 1410099 - DNA, 25 bp, Homo sapien
tgccttgagtgtcaagctttggatg

SEQ ID NO: 1410100 - DNA, 25 bp, Homo sapien
agtgggtacttgtgagcctcggaca

SEQ ID NO: 1410101 - DNA, 25 bp, Homo sapien
tgagcctcggacacactgttaagtg

SEQ ID NO: 1410102 - DNA, 25 bp, Homo sapien
tacttgtgagcctcggacacactgt

SEQ ID NO: 1410103 - DNA, 25 bp, Homo sapien
agtgttacagtgttaggagagagat

SEQ ID NO: 1410104 - DNA, 25 bp, Homo sapien
agagaacttgtgctgaccgggagaa

SEQ ID NO: 1410105 - DNA, 25 bp, Homo sapien
tctgaccaaagagaacaggcgctcc

SEQ ID NO: 1410106 - DNA, 25 bp, Homo sapien
gagacagggcctctggtgcagttcc

SEQ ID NO: 1410107 - DNA, 25 bp, Homo sapien
taggaaggaccagataatacccagg

SEQ ID NO: 1410108 - DNA, 25 bp, Homo sapien
ttaacaaggtaactggagcctcttg

SEQ ID NO: 1410109 - DNA, 25 bp, Homo sapien
ctggagcctcttgggtgtcaaacaa

SEQ ID NO: 1410110 - DNA, 25 bp, Homo sapien
gcctcttgggtgtcaaacaagcacc

SEQ ID NO: 1410111 - DNA, 25 bp, Homo sapien
ctgtcctctactccttaacaaggta

SEQ ID NO: 1410112 - DNA, 25 bp, Homo sapien
agtggaaggcgtccttgatcacaga

SEQ ID NO: 1410113 - DNA, 25 bp, Homo sapien
ggagtggaaggcgtccttgatcaca

SEQ ID NO: 1410114 - DNA, 25 bp, Homo sapien
tcagaatctgaattggaacctacct

SEQ ID NO: 1410115 - DNA, 25 bp, Homo sapien
attggaacctacctgatgggcccag

SEQ ID NO: 1410116 - DNA, 25 bp, Homo sapien
gacccgtttggagcgaactgccttg

SEQ ID NO: 1410117 - DNA, 25 bp, Homo sapien
ggaaggttctgtccctactgctgaa

SEQ ID NO: 1410118 - DNA, 25 bp, Homo sapien
tgcccaaaaggattagtgaagctcc

SEQ ID NO: 1410119 - DNA, 25 bp, Homo sapien
cccaagttagtgctgtctgacctga

SEQ ID NO: 1410120 - DNA, 25 bp, Homo sapien
gctcatctttgtcagcgtggtcctg

SEQ ID NO: 1410121 - DNA, 25 bp, Homo sapien
ggtcctgacgttcacctctgggctg

SEQ ID NO: 1410122 - DNA, 25 bp, Homo sapien
gctttttgtgaaaggcattggctca

SEQ ID NO: 1410123 - DNA, 25 bp, Homo sapien
aaggccaggctttttgtgaaaggca

SEQ ID NO: 1410124 - DNA, 25 bp, Homo sapien
ttgagaagtccaatttcaccagaag

SEQ ID NO: 1410125 - DNA, 25 bp, Homo sapien
agtctgctgtccctaccctggtttt

SEQ ID NO: 1410126 - DNA, 25 bp, Homo sapien
acaatcttgttagcaacagtgaccc

SEQ ID NO: 1410127 - DNA, 25 bp, Homo sapien
tgttgagtatcgatgggccctgagc

SEQ ID NO: 1410128 - DNA, 25 bp, Homo sapien
taggagtggatatggtacagcgacc

SEQ ID NO: 1410129 - DNA, 25 bp, Homo sapien
gataggtacgtggtgcaagccgact

SEQ ID NO: 1410130 - DNA, 25 bp, Homo sapien
gattactgcccaccagggttctgtg

SEQ ID NO: 1410131 - DNA, 25 bp, Homo sapien
tagcaaaacttctgcatggtcggtg

SEQ ID NO: 1410132 - DNA, 25 bp, Homo sapien
cctagtcagctgcttcccatgaggc

SEQ ID NO: 1410133 - DNA, 25 bp, Homo sapien
ccatggtttgactggttgccccaaa

SEQ ID NO: 1410134 - DNA, 25 bp, Homo sapien
aactccctttacacgaggagttcat

SEQ ID NO: 1410135 - DNA, 25 bp, Homo sapien
tggttccctgtttcaggcatattgg

SEQ ID NO: 1410136 - DNA, 25 bp, Homo sapien
ccctctagtatcttcagagcaagct

SEQ ID NO: 1410137 - DNA, 25 bp, Homo sapien
gctgaaccaaccctcaaaggcatca

SEQ ID NO: 1410138 - DNA, 25 bp, Homo sapien
cacaacacatcatccgctgaaccaa

SEQ ID NO: 1410139 - DNA, 25 bp, Homo sapien
aggcatcaaggttgacttgttcttc

SEQ ID NO: 1410140 - DNA, 25 bp, Homo sapien
tctggatgacctagagggctgtatc

SEQ ID NO: 1410141 - DNA, 25 bp, Homo sapien
acctctggatgacctagagggctgt

SEQ ID NO: 1410142 - DNA, 25 bp, Homo sapien
tggatgacctagagggctgtatctg

SEQ ID NO: 1410143 - DNA, 25 bp, Homo sapien
ctctggatgacctagagggctgtat

SEQ ID NO: 1410144 - DNA, 25 bp, Homo sapien
tccagtgtctctcatcccttgagag

SEQ ID NO: 1410145 - DNA, 25 bp, Homo sapien
cagagttccaagagcgtcccagctt

SEQ ID NO: 1410146 - DNA, 25 bp, Homo sapien
cagtgtctctcatcccttgagagca

SEQ ID NO: 1410147 - DNA, 25 bp, Homo sapien
cttgatgatggcaacagagttccaa

SEQ ID NO: 1410148 - DNA, 25 bp, Homo sapien
cttcctgatagtggtgctatctaca

SEQ ID NO: 1410149 - DNA, 25 bp, Homo sapien
tgctatctacactgagacctaaaga

SEQ ID NO: 1410150 - DNA, 25 bp, Homo sapien
gaatgaggaggagctagccacagaa

SEQ ID NO: 1410151 - DNA, 25 bp, Homo sapien
gaggaggagctagccacagaaagat

SEQ ID NO: 1410152 - DNA, 25 bp, Homo sapien
cagccctcaaggctcaaggaagctt

SEQ ID NO: 1410153 - DNA, 25 bp, Homo sapien
gcctaggatccattgtgaggcagcc

SEQ ID NO: 1410154 - DNA, 25 bp, Homo sapien
aagcctaggatccattgtgaggcag

SEQ ID NO: 1410155 - DNA, 25 bp, Homo sapien
gaaaaaagaagcctaggatccattg

SEQ ID NO: 1410156 - DNA, 25 bp, Homo sapien
gtgggctggcaagaagagactgtta

SEQ ID NO: 1410157 - DNA, 25 bp, Homo sapien
ggtgggctggcaagaagagactgtt

SEQ ID NO: 1410158 - DNA, 25 bp, Homo sapien
atctctggttggatatctgctgatg

SEQ ID NO: 1410159 - DNA, 25 bp, Homo sapien
ctgatgagcttgttgatctgtactc

SEQ ID NO: 1410160 - DNA, 25 bp, Homo sapien
tctggttggatatctgctgatgagc

SEQ ID NO: 1410161 - DNA, 25 bp, Homo sapien
gatgagcttgttgatctgtactctg

SEQ ID NO: 1410162 - DNA, 25 bp, Homo sapien
acttcattcaatggtggaggaatgc

SEQ ID NO: 1410163 - DNA, 25 bp, Homo sapien
ggtctatgggcaccaacagtaccat

SEQ ID NO: 1410164 - DNA, 25 bp, Homo sapien
attcaatggtggaggaatgcccagc

SEQ ID NO: 1410165 - DNA, 25 bp, Homo sapien
ggtctggaggtctatgggcaccaac

SEQ ID NO: 1410166 - DNA, 25 bp, Homo sapien
tcttgcttgttgctgatattgaatt

SEQ ID NO: 1410167 - DNA, 25 bp, Homo sapien
gatcaactctgagtcatccttacat

SEQ ID NO: 1410168 - DNA, 25 bp, Homo sapien
ctgaatagaatagtttcttgcttgt

SEQ ID NO: 1410169 - DNA, 25 bp, Homo sapien
aattgtaggccatttttgtaaggat

SEQ ID NO: 1410170 - DNA, 25 bp, Homo sapien
atttgctgcaaattatcttttctca

SEQ ID NO: 1410171 - DNA, 25 bp, Homo sapien
caatttgctgcaaattatcttttct

SEQ ID NO: 1410172 - DNA, 25 bp, Homo sapien
aatttgctgcaaattatcttttctc

SEQ ID NO: 1410173 - DNA, 25 bp, Homo sapien
tttgctgcaaattatcttttctcac

SEQ ID NO: 1410174 - DNA, 25 bp, Homo sapien
cactcattgatttgaaccttggttg

SEQ ID NO: 1410175 - DNA, 25 bp, Homo sapien
tcactcattgatttgaaccttggtt

SEQ ID NO: 1410176 - DNA, 25 bp, Homo sapien
cattgatttgaaccttggttgacat

SEQ ID NO: 1410177 - DNA, 25 bp, Homo sapien
ctcattgatttgaaccttggttgac

SEQ ID NO: 1410178 - DNA, 25 bp, Homo sapien
ttagtcaaaagctttagccatctgt

SEQ ID NO: 1410179 - DNA, 25 bp, Homo sapien
gtgctggaaatcttgttctatggtc

SEQ ID NO: 1410180 - DNA, 25 bp, Homo sapien
attagtgagtttgcattattgtacc

SEQ ID NO: 1410181 - DNA, 25 bp, Homo sapien
cctgacacatggctaaaatttttga

SEQ ID NO: 1410182 - DNA, 25 bp, Homo sapien
tgaaatatagacaatggatccccaa

SEQ ID NO: 1410183 - DNA, 25 bp, Homo sapien
tactgaaactttcaacagccaaagt

SEQ ID NO: 1410184 - DNA, 25 bp, Homo sapien
tacaacttttaagtgtggacactgg

SEQ ID NO: 1410185 - DNA, 25 bp, Homo sapien
tggacactggatccccaatatctaa

SEQ ID NO: 1410186 - DNA, 25 bp, Homo sapien
taagtttattcacatgttctggtcc

SEQ ID NO: 1410187 - DNA, 25 bp, Homo sapien
tattcacatgttctggtccaagcag

SEQ ID NO: 1410188 - DNA, 25 bp, Homo sapien
ttcacatgttctggtccaagcagag

SEQ ID NO: 1410189 - DNA, 25 bp, Homo sapien
agtttattcacatgttctggtccaa

SEQ ID NO: 1410190 - DNA, 25 bp, Homo sapien
tactctgcactgacgtcatctttat

SEQ ID NO: 1410191 - DNA, 25 bp, Homo sapien
cgtcatctttataattccggcgttg

SEQ ID NO: 1410192 - DNA, 25 bp, Homo sapien
atcatactctgcactgacgtcatct

SEQ ID NO: 1410193 - DNA, 25 bp, Homo sapien
gcactgacgtcatctttataattcc

SEQ ID NO: 1410194 - DNA, 25 bp, Homo sapien
tctttttggactttttgtgagacac

SEQ ID NO: 1410195 - DNA, 25 bp, Homo sapien
ctcaatagtctcaatgtcgtgcttt

SEQ ID NO: 1410196 - DNA, 25 bp, Homo sapien
atgtcgtgcttttttatttggtcct

SEQ ID NO: 1410197 - DNA, 25 bp, Homo sapien
caatagtctcaatgtcgtgcttttt

SEQ ID NO: 1410198 - DNA, 25 bp, Homo sapien
gaatggttttcttccataggctttg

SEQ ID NO: 1410199 - DNA, 25 bp, Homo sapien
cttccataggctttggacactttaa

SEQ ID NO: 1410200 - DNA, 25 bp, Homo sapien
tccataggctttggacactttaata

SEQ ID NO: 1410201 - DNA, 25 bp, Homo sapien
cataggctttggacactttaataga

SEQ ID NO: 1410202 - DNA, 25 bp, Homo sapien
tacttgtcttgttggttctcataga

SEQ ID NO: 1410203 - DNA, 25 bp, Homo sapien
cttgttggttctcatagatactatt

SEQ ID NO: 1410204 - DNA, 25 bp, Homo sapien
gttggttctcatagatactattgtt

SEQ ID NO: 1410205 - DNA, 25 bp, Homo sapien
cttgtcttgttggttctcatagata

SEQ ID NO: 1410206 - DNA, 25 bp, Homo sapien
cttgagcccccggccttctggagtg

SEQ ID NO: 1410207 - DNA, 25 bp, Homo sapien
ggtcttgagcccccggccttctgga

SEQ ID NO: 1410208 - DNA, 25 bp, Homo sapien
ctgtcaacaggtaggtcttgagccc

SEQ ID NO: 1410209 - DNA, 25 bp, Homo sapien
tgtcaacaggtaggtcttgagcccc

SEQ ID NO: 1410210 - DNA, 25 bp, Homo sapien
aaaccggcagatgggttgaaggcaa

SEQ ID NO: 1410211 - DNA, 25 bp, Homo sapien
atgtgaaaccggcagatgggttgaa

SEQ ID NO: 1410212 - DNA, 25 bp, Homo sapien
aggaggatgtgaaaccggcagatgg

SEQ ID NO: 1410213 - DNA, 25 bp, Homo sapien
cagatgggttgaaggcaagcggtgg

SEQ ID NO: 1410214 - DNA, 25 bp, Homo sapien
cattgactccaatgaccaagtgtct

SEQ ID NO: 1410215 - DNA, 25 bp, Homo sapien
ctccaatgaccaagtgtctatttca

SEQ ID NO: 1410216 - DNA, 25 bp, Homo sapien
ttgactccaatgaccaagtgtctat

SEQ ID NO: 1410217 - DNA, 25 bp, Homo sapien
gagagcattgactccaatgaccaag

SEQ ID NO: 1410218 - DNA, 25 bp, Homo sapien
acataatcctttgaagtatacgaga

SEQ ID NO: 1410219 - DNA, 25 bp, Homo sapien
aatcctttgaagtatacgagaggtc

SEQ ID NO: 1410220 - DNA, 25 bp, Homo sapien
taaaaacataatcctttgaagtata

SEQ ID NO: 1410221 - DNA, 25 bp, Homo sapien
tgtatccaggccagtctctctgaag

SEQ ID NO: 1410222 - DNA, 25 bp, Homo sapien
ctgtatggcttctgagagacgctgc

SEQ ID NO: 1410223 - DNA, 25 bp, Homo sapien
ccctgtatggcttctgagagacgct

SEQ ID NO: 1410224 - DNA, 25 bp, Homo sapien
cctgtatggcttctgagagacgctg

SEQ ID NO: 1410225 - DNA, 25 bp, Homo sapien
tgtatggcttctgagagacgctgct

SEQ ID NO: 1410226 - DNA, 25 bp, Homo sapien
atcgaattggatttgcagggttcat

SEQ ID NO: 1410227 - DNA, 25 bp, Homo sapien
ctatcgaattggatttgcagggttc

SEQ ID NO: 1410228 - DNA, 25 bp, Homo sapien
ggatttgcagggttcatgggggttg

SEQ ID NO: 1410229 - DNA, 25 bp, Homo sapien
atttgcagggttcatgggggttgac

SEQ ID NO: 1410230 - DNA, 25 bp, Homo sapien
tatctgaaacagcttgaggtgcttt

SEQ ID NO: 1410231 - DNA, 25 bp, Homo sapien
gctttccgaatttgcactcttttcc

SEQ ID NO: 1410232 - DNA, 25 bp, Homo sapien
tttcctctcaggaactgtatctgaa

SEQ ID NO: 1410233 - DNA, 25 bp, Homo sapien
cttgaggtgctttccgaatttgcac

SEQ ID NO: 1410234 - DNA, 25 bp, Homo sapien
ttgcccacatttgacaaataaaagt

SEQ ID NO: 1410235 - DNA, 25 bp, Homo sapien
gtataaatcccaggcaattgagctg

SEQ ID NO: 1410236 - DNA, 25 bp, Homo sapien
gagtcgtttgttgcacacactgtaa

SEQ ID NO: 1410237 - DNA, 25 bp, Homo sapien
tgtgcttcggttgcgggattcctcc

SEQ ID NO: 1410238 - DNA, 25 bp, Homo sapien
gccgactcggtgagcttcacatgca

SEQ ID NO: 1410239 - DNA, 25 bp, Homo sapien
gaattttgacaagctcctggagtct

SEQ ID NO: 1410240 - DNA, 25 bp, Homo sapien
tggctctggtaagtctggagcgcct

SEQ ID NO: 1410241 - DNA, 25 bp, Homo sapien
gaactgaattgaaggtcgaaaagaa

SEQ ID NO: 1410242 - DNA, 25 bp, Homo sapien
agcccatagcgctgccccgcgaccc

SEQ ID NO: 1410243 - DNA, 25 bp, Homo sapien
cacgagagcccatagcgctgccccg

SEQ ID NO: 1410244 - DNA, 25 bp, Homo sapien
agagcccatagcgctgccccgcgac

SEQ ID NO: 1410245 - DNA, 25 bp, Homo sapien
cgagagcccatagcgctgccccgcg

SEQ ID NO: 1410246 - DNA, 25 bp, Homo sapien
ccgccgccagtccagctccagcctc

SEQ ID NO: 1410247 - DNA, 25 bp, Homo sapien
tcccagaggtgccgccgccgccagt

SEQ ID NO: 1410248 - DNA, 25 bp, Homo sapien
ccgccagtccagctccagcctccac

SEQ ID NO: 1410249 - DNA, 25 bp, Homo sapien
tgccgccgccgccagtccagctcca

SEQ ID NO: 1410250 - DNA, 25 bp, Homo sapien
tgcagccgccgccactgctagggcc

SEQ ID NO: 1410251 - DNA, 25 bp, Homo sapien
tgcggccgcagctgcttgggcttct

SEQ ID NO: 1410252 - DNA, 25 bp, Homo sapien
cagccgccgccactgctagggccat

SEQ ID NO: 1410253 - DNA, 25 bp, Homo sapien
cggccgcagctgcttgggcttctgc

SEQ ID NO: 1410254 - DNA, 25 bp, Homo sapien
tataaaaagtttgccctggatgtca

SEQ ID NO: 1410255 - DNA, 25 bp, Homo sapien
tcatattggcagttggaggacacag

SEQ ID NO: 1410256 - DNA, 25 bp, Homo sapien
tttggatttacgactgaagaaggac

SEQ ID NO: 1410257 - DNA, 25 bp, Homo sapien
actgactgatgacaaacccaggagt

SEQ ID NO: 1410258 - DNA, 25 bp, Homo sapien
gctgaagccatgacagaagaatgtg

SEQ ID NO: 1410259 - DNA, 25 bp, Homo sapien
aatgtggattgtgaagattttatgg

SEQ ID NO: 1410260 - DNA, 25 bp, Homo sapien
tgtggattgtgaagattttatggac

SEQ ID NO: 1410261 - DNA, 25 bp, Homo sapien
gaagccatgacagaagaatgtggat

SEQ ID NO: 1410262 - DNA, 25 bp, Homo sapien
ggtcgagattgcagaggtgaaataa

SEQ ID NO: 1410263 - DNA, 25 bp, Homo sapien
cctcagccttcctgtcggcatcagg

SEQ ID NO: 1410264 - DNA, 25 bp, Homo sapien
tgccagtctcagaatggctgcggcg

SEQ ID NO: 1410265 - DNA, 25 bp, Homo sapien
gtctcagaatggctgcggcgtaggg

SEQ ID NO: 1410266 - DNA, 25 bp, Homo sapien
aactggaattccgtctctgacccag

SEQ ID NO: 1410267 - DNA, 25 bp, Homo sapien
ttagcctcgggacttgagaggctgc

SEQ ID NO: 1410268 - DNA, 25 bp, Homo sapien
ccttcatgacatgatggttgggcac

SEQ ID NO: 1410269 - DNA, 25 bp, Homo sapien
ctccaggtgcttaggcatgtggaca

SEQ ID NO: 1410270 - DNA, 25 bp, Homo sapien
catgacatgatggttgggcacattc

SEQ ID NO: 1410271 - DNA, 25 bp, Homo sapien
gagttcataaatgggaatccagttc

SEQ ID NO: 1410272 - DNA, 25 bp, Homo sapien
aaaggagttcataaatgggaatcca

SEQ ID NO: 1410273 - DNA, 25 bp, Homo sapien
aaggagttcataaatgggaatccag

SEQ ID NO: 1410274 - DNA, 25 bp, Homo sapien
tgggaatccagttcttcttaggcat

SEQ ID NO: 1410275 - DNA, 25 bp, Homo sapien
tctcggcggctgtagggtaggggtc

SEQ ID NO: 1410276 - DNA, 25 bp, Homo sapien
tcggcggctgtagggtaggggtctg

SEQ ID NO: 1410277 - DNA, 25 bp, Homo sapien
atatctcggcggctgtagggtaggg

SEQ ID NO: 1410278 - DNA, 25 bp, Homo sapien
caatatctcggcggctgtagggtag

SEQ ID NO: 1410279 - DNA, 25 bp, Homo sapien
gacgtttgcttcctacggctttgta

SEQ ID NO: 1410280 - DNA, 25 bp, Homo sapien
ggacaaagtagagcccaatgacctt

SEQ ID NO: 1410281 - DNA, 25 bp, Homo sapien
ccttccaaatagtagtagagccagc

SEQ ID NO: 1410282 - DNA, 25 bp, Homo sapien
caaaaatcggttggctgtgaatgtg

SEQ ID NO: 1410283 - DNA, 25 bp, Homo sapien
cttgcaactttactgtgttgatcag

SEQ ID NO: 1410284 - DNA, 25 bp, Homo sapien
gcctgattgctttagacagaacttc

SEQ ID NO: 1410285 - DNA, 25 bp, Homo sapien
ttttggtggagtctctacatttttc

SEQ ID NO: 1410286 - DNA, 25 bp, Homo sapien
tgttttatgtagcaggagctcctgg

SEQ ID NO: 1410287 - DNA, 25 bp, Homo sapien
tgtgagtgaccgttaagcagtggca

SEQ ID NO: 1410288 - DNA, 25 bp, Homo sapien
caagacacactaggctccaggattg

SEQ ID NO: 1410289 - DNA, 25 bp, Homo sapien
gaaagcctgccaaagactgagatag

SEQ ID NO: 1410290 - DNA, 25 bp, Homo sapien
tacgtattcttgtggtgcctgggaa

SEQ ID NO: 1410291 - DNA, 25 bp, Homo sapien
ctagtctgggcaataagagcgaaac

SEQ ID NO: 1410292 - DNA, 25 bp, Homo sapien
tcgcaccatcgcactctagtctggg

SEQ ID NO: 1410293 - DNA, 25 bp, Homo sapien
cgagatcgcaccatcgcactctagt

SEQ ID NO: 1410294 - DNA, 25 bp, Homo sapien
agatcgcaccatcgcactctagtct

SEQ ID NO: 1410295 - DNA, 25 bp, Homo sapien
taagggtcccaacagatgaacagct

SEQ ID NO: 1410296 - DNA, 25 bp, Homo sapien
ctgaaagtggtgagttaagataagg

SEQ ID NO: 1410297 - DNA, 25 bp, Homo sapien
ctcttctgaaagtggtgagttaaga

SEQ ID NO: 1410298 - DNA, 25 bp, Homo sapien
gagttaagataagggtcccaacaga

SEQ ID NO: 1410299 - DNA, 25 bp, Homo sapien
ctgtttttgtgactcccagggcttc

SEQ ID NO: 1410300 - DNA, 25 bp, Homo sapien
tgcattccatctgtcctttgaggag

SEQ ID NO: 1410301 - DNA, 25 bp, Homo sapien
cctggtgaggttcatagaaaaaggc

SEQ ID NO: 1410302 - DNA, 25 bp, Homo sapien
aatgtttcagaagaccctggtgagg

SEQ ID NO: 1410303 - DNA, 25 bp, Homo sapien
taatatacagaggaagcccgctcag

SEQ ID NO: 1410304 - DNA, 25 bp, Homo sapien
gctgagaccccgacaccatgtgtta

SEQ ID NO: 1410305 - DNA, 25 bp, Homo sapien
gccaaatgatatccacgccatgaat

SEQ ID NO: 1410306 - DNA, 25 bp, Homo sapien
ctatacttaagattccagagaagca

SEQ ID NO: 1410307 - DNA, 25 bp, Homo sapien
tacagtctcataataaatttacagt

SEQ ID NO: 1410308 - DNA, 25 bp, Homo sapien
cactgttagtacagtctcataataa

SEQ ID NO: 1410309 - DNA, 25 bp, Homo sapien
cagggtgaatcacactgttagtaca

SEQ ID NO: 1410310 - DNA, 25 bp, Homo sapien
aaaatcagggtgaatcacactgtta

SEQ ID NO: 1410311 - DNA, 25 bp, Homo sapien
ttcttggtacttattgcgaatggga

SEQ ID NO: 1410312 - DNA, 25 bp, Homo sapien
cttattgcgaatgggagaggagaca

SEQ ID NO: 1410313 - DNA, 25 bp, Homo sapien
tgaaatatgataagattgacttttg

SEQ ID NO: 1410314 - DNA, 25 bp, Homo sapien
gacttttgggctgatatcttgggct

SEQ ID NO: 1410315 - DNA, 25 bp, Homo sapien
cagaagaacaaaagagctccacata

SEQ ID NO: 1410316 - DNA, 25 bp, Homo sapien
tatgctacaatgaggatattacgct

SEQ ID NO: 1410317 - DNA, 25 bp, Homo sapien
ccaagtgtccatagatagacgaatg

SEQ ID NO: 1410318 - DNA, 25 bp, Homo sapien
gaaggaagccctttcatatgctaca

SEQ ID NO: 1410319 - DNA, 25 bp, Homo sapien
taatgcaaggcatagcaaaaggagc

SEQ ID NO: 1410320 - DNA, 25 bp, Homo sapien
aaaaggagcaaggaaggcactatta

SEQ ID NO: 1410321 - DNA, 25 bp, Homo sapien
aaacaattgagccaatggaggtggg

SEQ ID NO: 1410322 - DNA, 25 bp, Homo sapien
cggcgcctcatataccataatgcaa

SEQ ID NO: 1410323 - DNA, 25 bp, Homo sapien
gataccatgtccagttagcattggg

SEQ ID NO: 1410324 - DNA, 25 bp, Homo sapien
atgtccagttagcattgggcaggat

SEQ ID NO: 1410325 - DNA, 25 bp, Homo sapien
taccatgtccagttagcattgggca

SEQ ID NO: 1410326 - DNA, 25 bp, Homo sapien
ccatgtccagttagcattgggcagg

SEQ ID NO: 1410327 - DNA, 25 bp, Homo sapien
cctgagacatggcacacaagctgca

SEQ ID NO: 1410328 - DNA, 25 bp, Homo sapien
ggctttgggtagaatcctgagacat

SEQ ID NO: 1410329 - DNA, 25 bp, Homo sapien
cacatcacccacacgggctttgggt

SEQ ID NO: 1410330 - DNA, 25 bp, Homo sapien
cacccacacgggctttgggtagaat

SEQ ID NO: 1410331 - DNA, 25 bp, Homo sapien
ggaagcttactatggcacctccaga

SEQ ID NO: 1410332 - DNA, 25 bp, Homo sapien
cctgcattgaggacgcccaagagat

SEQ ID NO: 1410333 - DNA, 25 bp, Homo sapien
gaagcattcttgacactcaggaaat

SEQ ID NO: 1410334 - DNA, 25 bp, Homo sapien
ggtttcatagaggagaattctcaca

SEQ ID NO: 1410335 - DNA, 25 bp, Homo sapien
tgcccaggtactattggtaaaggac

SEQ ID NO: 1410336 - DNA, 25 bp, Homo sapien
caaagtcttgtacttctcgagcgaa

SEQ ID NO: 1410337 - DNA, 25 bp, Homo sapien
gcgaatccaaagatgtagactcgga

SEQ ID NO: 1410338 - DNA, 25 bp, Homo sapien
ctgagtcgctatcccagccatgaat

SEQ ID NO: 1410339 - DNA, 25 bp, Homo sapien
catgaaaggaggtcggcccctggaa

SEQ ID NO: 1410340 - DNA, 25 bp, Homo sapien
aacatgaaaggaggtcggcccctgg

SEQ ID NO: 1410341 - DNA, 25 bp, Homo sapien
acatgaaaggaggtcggcccctgga

SEQ ID NO: 1410342 - DNA, 25 bp, Homo sapien
atgaaaggaggtcggcccctggaag

SEQ ID NO: 1410343 - DNA, 25 bp, Homo sapien
tgggagctgccagagtgactcttac

SEQ ID NO: 1410344 - DNA, 25 bp, Homo sapien
gtgctgggagctgccagagtgactc

SEQ ID NO: 1410345 - DNA, 25 bp, Homo sapien
gctgggagctgccagagtgactctt

SEQ ID NO: 1410346 - DNA, 25 bp, Homo sapien
ctgggagctgccagagtgactctta

SEQ ID NO: 1410347 - DNA, 25 bp, Homo sapien
agaacagctaacagttgaaatggca

SEQ ID NO: 1410348 - DNA, 25 bp, Homo sapien
ttcactgggagatgcaacttcttac

SEQ ID NO: 1410349 - DNA, 25 bp, Homo sapien
gcaaagcttttcctcagtaccctgt

SEQ ID NO: 1410350 - DNA, 25 bp, Homo sapien
taccctgtagtgacttcttctctct

SEQ ID NO: 1410351 - DNA, 25 bp, Homo sapien
tcctcagtaccctgtagtgacttct

SEQ ID NO: 1410352 - DNA, 25 bp, Homo sapien
tgagcctcttacctcaccttttatt

SEQ ID NO: 1410353 - DNA, 25 bp, Homo sapien
tatgctctgcaagaacccatgctag

SEQ ID NO: 1410354 - DNA, 25 bp, Homo sapien
aagcatgtgacctgtgcagacacat

SEQ ID NO: 1410355 - DNA, 25 bp, Homo sapien
caagaacccatgctagatttaatgc

SEQ ID NO: 1410356 - DNA, 25 bp, Homo sapien
cacatggaatcgtatgctctgcaag

SEQ ID NO: 1410357 - DNA, 25 bp, Homo sapien
ttgttacgtacgtatacatgtgcta

SEQ ID NO: 1410358 - DNA, 25 bp, Homo sapien
tgttacgtacgtatacatgtgctat

SEQ ID NO: 1410359 - DNA, 25 bp, Homo sapien
cgtacgtatacatgtgctatgttgg

SEQ ID NO: 1410360 - DNA, 25 bp, Homo sapien
ttacgtacgtatacatgtgctatgt

SEQ ID NO: 1410361 - DNA, 25 bp, Homo sapien
gaaaatgttcctggcctaaggccca

SEQ ID NO: 1410362 - DNA, 25 bp, Homo sapien
ccatcaagggaggtagtgggttcca

SEQ ID NO: 1410363 - DNA, 25 bp, Homo sapien
tactatgcagcacaatacctatggc

SEQ ID NO: 1410364 - DNA, 25 bp, Homo sapien
tagggatgctccatacagagacacg

SEQ ID NO: 1410365 - DNA, 25 bp, Homo sapien
gatccaatgactgcttttgaggaag

SEQ ID NO: 1410366 - DNA, 25 bp, Homo sapien
cttggttgccacaggcattccaaga

SEQ ID NO: 1410367 - DNA, 25 bp, Homo sapien
ttagctcatcttggttgccacaggc

SEQ ID NO: 1410368 - DNA, 25 bp, Homo sapien
caagaactcttttcaatgcagtttt

SEQ ID NO: 1410369 - DNA, 25 bp, Homo sapien
ggttgccacaggcattccaagaact

SEQ ID NO: 1410370 - DNA, 25 bp, Homo sapien
caactgatccttgtctgaggcagac

SEQ ID NO: 1410371 - DNA, 25 bp, Homo sapien
taagggagtaaccactgtgtaggtc

SEQ ID NO: 1410372 - DNA, 25 bp, Homo sapien
ctgtagacaagaggattaagtaagg

SEQ ID NO: 1410373 - DNA, 25 bp, Homo sapien
cagacttggacttgggccgcagata

SEQ ID NO: 1410374 - DNA, 25 bp, Homo sapien
tgaagcgaataacggccatgatggt

SEQ ID NO: 1410375 - DNA, 25 bp, Homo sapien
gcaccataattaccaggatgctgag

SEQ ID NO: 1410376 - DNA, 25 bp, Homo sapien
cctcagagggtgacaaattgctaca

SEQ ID NO: 1410377 - DNA, 25 bp, Homo sapien
tgcaggctaacttgataacaggtgc

SEQ ID NO: 1410378 - DNA, 25 bp, Homo sapien
tattttgcaaattgccttttcttta

SEQ ID NO: 1410379 - DNA, 25 bp, Homo sapien
tctggcttttgatacttgttaagca

SEQ ID NO: 1410380 - DNA, 25 bp, Homo sapien
ttgccttctggcttttgatacttgt

SEQ ID NO: 1410381 - DNA, 25 bp, Homo sapien
ttgcaaattgccttttctttaactc

SEQ ID NO: 1410382 - DNA, 25 bp, Homo sapien
catttaacaattgtgatctgatgat

SEQ ID NO: 1410383 - DNA, 25 bp, Homo sapien
tcatttaacaattgtgatctgatga

SEQ ID NO: 1410384 - DNA, 25 bp, Homo sapien
ctgaggtccagaaaacatctagaaa

SEQ ID NO: 1410385 - DNA, 25 bp, Homo sapien
ttaacaattgtgatctgatgatttt

SEQ ID NO: 1410386 - DNA, 25 bp, Homo sapien
ttgttcttctcacaattttacaaag

SEQ ID NO: 1410387 - DNA, 25 bp, Homo sapien
cattgggttgaacaatggagttata

SEQ ID NO: 1410388 - DNA, 25 bp, Homo sapien
caaagagctgatttgaactctttat

SEQ ID NO: 1410389 - DNA, 25 bp, Homo sapien
tttctcaagctataaatcattgggt

SEQ ID NO: 1410390 - DNA, 25 bp, Homo sapien
cagccatagtggacagtgacaataa

SEQ ID NO: 1410391 - DNA, 25 bp, Homo sapien
caataatgaggtgagatacacaggt

SEQ ID NO: 1410392 - DNA, 25 bp, Homo sapien
tcctggcttgaggagtagttggact

SEQ ID NO: 1410393 - DNA, 25 bp, Homo sapien
catcctggcttgaggagtagttgga

SEQ ID NO: 1410394 - DNA, 25 bp, Homo sapien
atcataacccatgactgccagcaga

SEQ ID NO: 1410395 - DNA, 25 bp, Homo sapien
gatagccaggaccaatgtacagagc

SEQ ID NO: 1410396 - DNA, 25 bp, Homo sapien
actaaagtggttatggtgagatgcc

SEQ ID NO: 1410397 - DNA, 25 bp, Homo sapien
ggcaggtgaaataccaaggatgtga

SEQ ID NO: 1410398 - DNA, 25 bp, Homo sapien
cagaacctttctcagagccatcttt

SEQ ID NO: 1410399 - DNA, 25 bp, Homo sapien
tttaagcatctacccagaacctttc

SEQ ID NO: 1410400 - DNA, 25 bp, Homo sapien
cagttttggaatttaagcatctacc

SEQ ID NO: 1410401 - DNA, 25 bp, Homo sapien
gaatttaagcatctacccagaacct

SEQ ID NO: 1410402 - DNA, 25 bp, Homo sapien
gtaatcacagtataagtcactgcca

SEQ ID NO: 1410403 - DNA, 25 bp, Homo sapien
tcacagtataagtcactgccacgag

SEQ ID NO: 1410404 - DNA, 25 bp, Homo sapien
agtataagtcactgccacgagccgg

SEQ ID NO: 1410405 - DNA, 25 bp, Homo sapien
ggttgagtagtggagtaatcacagt

SEQ ID NO: 1410406 - DNA, 25 bp, Homo sapien
ggtggcgaaggctttgcactgtcct

SEQ ID NO: 1410407 - DNA, 25 bp, Homo sapien
ggatgtgggcctcaagtagataaag

SEQ ID NO: 1410408 - DNA, 25 bp, Homo sapien
tccgattggaggcacagaggagcac

SEQ ID NO: 1410409 - DNA, 25 bp, Homo sapien
tgtgcagcccagttttatgacaggg

SEQ ID NO: 1410410 - DNA, 25 bp, Homo sapien
gaagcctataaggatgaactcggtg

SEQ ID NO: 1410411 - DNA, 25 bp, Homo sapien
ccaaggtgtagcaggtttcagaaca

SEQ ID NO: 1410412 - DNA, 25 bp, Homo sapien
gaaaacagttggtacaagccaagcc

SEQ ID NO: 1410413 - DNA, 25 bp, Homo sapien
aacatagcgatcgtagcccatcaca

SEQ ID NO: 1410414 - DNA, 25 bp, Homo sapien
tttcaatgctctttgggtgctcccc

SEQ ID NO: 1410415 - DNA, 25 bp, Homo sapien
tcaattttcaatgctctttgggtgc

SEQ ID NO: 1410416 - DNA, 25 bp, Homo sapien
tgtgcttagcaaagtagtgaatgcc

SEQ ID NO: 1410417 - DNA, 25 bp, Homo sapien
tagtgaatgccatttggttccagga

SEQ ID NO: 1410418 - DNA, 25 bp, Homo sapien
cttttccccattcagggaatgtttg

SEQ ID NO: 1410419 - DNA, 25 bp, Homo sapien
tctcatccatcttgtaggtcagctg

SEQ ID NO: 1410420 - DNA, 25 bp, Homo sapien
tcttcaaccttttgctgcaggctct

SEQ ID NO: 1410421 - DNA, 25 bp, Homo sapien
caaaataattgctgacatgctcttc

SEQ ID NO: 1410422 - DNA, 25 bp, Homo sapien
tacagattctcttaagattccatag

SEQ ID NO: 1410423 - DNA, 25 bp, Homo sapien
tgttatgaatcagttggtcagccca

SEQ ID NO: 1410424 - DNA, 25 bp, Homo sapien
gtcatgtagaaaataccagacaggg

SEQ ID NO: 1410425 - DNA, 25 bp, Homo sapien
cattgagtgtgtattctatttttgt

SEQ ID NO: 1410426 - DNA, 25 bp, Homo sapien
tatgtgtccaacaaagacaggctgg

SEQ ID NO: 1410427 - DNA, 25 bp, Homo sapien
tcttggcagaaaacctcaccatggt

SEQ ID NO: 1410428 - DNA, 25 bp, Homo sapien
aatttaaatgcctagtccactggga

SEQ ID NO: 1410429 - DNA, 25 bp, Homo sapien
taggtggagggaacatcttgcttca

SEQ ID NO: 1410430 - DNA, 25 bp, Homo sapien
cctgtcatggtttcatagtgccaaa

SEQ ID NO: 1410431 - DNA, 25 bp, Homo sapien
tagagcttattagagttttatacac

SEQ ID NO: 1410432 - DNA, 25 bp, Homo sapien
tgtgggagaatgtgattgacagttc

SEQ ID NO: 1410433 - DNA, 25 bp, Homo sapien
ttggtgtgtatataacctgtcatgg

SEQ ID NO: 1410434 - DNA, 25 bp, Homo sapien
gacattggaaagagtaagattggct

SEQ ID NO: 1410435 - DNA, 25 bp, Homo sapien
tgaataaggaactcgacttctccat

SEQ ID NO: 1410436 - DNA, 25 bp, Homo sapien
gggaagccaaccagttcacaacacc

SEQ ID NO: 1410437 - DNA, 25 bp, Homo sapien
cattcttgtcacaattgggtcacca

SEQ ID NO: 1410438 - DNA, 25 bp, Homo sapien
aaatatgataaaaatcaactactag

SEQ ID NO: 1410439 - DNA, 25 bp, Homo sapien
atatgataaaaatcaactactagaa

SEQ ID NO: 1410440 - DNA, 25 bp, Homo sapien
aatatgataaaaatcaactactaga

SEQ ID NO: 1410441 - DNA, 25 bp, Homo sapien
tataatagttgcttaccactggtaa

SEQ ID NO: 1410442 - DNA, 25 bp, Homo sapien
tacctgtctcattacaagccaataa

SEQ ID NO: 1410443 - DNA, 25 bp, Homo sapien
catagatcatcactagactgccaac

SEQ ID NO: 1410444 - DNA, 25 bp, Homo sapien
tcccaacggagtagcattgctttgt

SEQ ID NO: 1410445 - DNA, 25 bp, Homo sapien
ctgtctgcttgtggctatatctgat

SEQ ID NO: 1410446 - DNA, 25 bp, Homo sapien
ttctgtctgcttgtggctatatctg

SEQ ID NO: 1410447 - DNA, 25 bp, Homo sapien
ctgcttgtggctatatctgattgtt

SEQ ID NO: 1410448 - DNA, 25 bp, Homo sapien
gtctgcttgtggctatatctgattg

SEQ ID NO: 1410449 - DNA, 25 bp, Homo sapien
taatgggaggcactgaaaatatgtt

SEQ ID NO: 1410450 - DNA, 25 bp, Homo sapien
cactcagtctccacaagctccattt

SEQ ID NO: 1410451 - DNA, 25 bp, Homo sapien
gctccattttggacaccctcatgct

SEQ ID NO: 1410452 - DNA, 25 bp, Homo sapien
gatttcctctccatcacataatggg

SEQ ID NO: 1410453 - DNA, 25 bp, Homo sapien
aaagtttcttctattgccacagaga

SEQ ID NO: 1410454 - DNA, 25 bp, Homo sapien
ggaaaagtttcttctattgccacag

SEQ ID NO: 1410455 - DNA, 25 bp, Homo sapien
gaaaagtttcttctattgccacaga

SEQ ID NO: 1410456 - DNA, 25 bp, Homo sapien
ctggaaaagtttcttctattgccac

SEQ ID NO: 1410457 - DNA, 25 bp, Homo sapien
actactgaaagccccatttccctgg

SEQ ID NO: 1410458 - DNA, 25 bp, Homo sapien
ctactgaaagccccatttccctggg

SEQ ID NO: 1410459 - DNA, 25 bp, Homo sapien
aactactgaaagccccatttccctg

SEQ ID NO: 1410460 - DNA, 25 bp, Homo sapien
gaagaagtccaccatctcagcctgt

SEQ ID NO: 1410461 - DNA, 25 bp, Homo sapien
gaatagcaatgaccatgagggccaa

SEQ ID NO: 1410462 - DNA, 25 bp, Homo sapien
aaggatagcagcgtaggatgccacc

SEQ ID NO: 1410463 - DNA, 25 bp, Homo sapien
gagaatgccttttggcggccctgag

SEQ ID NO: 1410464 - DNA, 25 bp, Homo sapien
caagaaggatgtactcagtgcagac

SEQ ID NO: 1410465 - DNA, 25 bp, Homo sapien
cagcagtgtcagcagataggttgcc

SEQ ID NO: 1410466 - DNA, 25 bp, Homo sapien
tggtcgtgttggaaaccccagaaga

SEQ ID NO: 1410467 - DNA, 25 bp, Homo sapien
aagtacatgggcttatgcagctgcc

SEQ ID NO: 1410468 - DNA, 25 bp, Homo sapien
ctacttccagaattatggtggtcat

SEQ ID NO: 1410469 - DNA, 25 bp, Homo sapien
tctcaggaatataacccttttccca

SEQ ID NO: 1410470 - DNA, 25 bp, Homo sapien
ttttcccacctagctttatcaaaga

SEQ ID NO: 1410471 - DNA, 25 bp, Homo sapien
cacctagctttatcaaagatggcca

SEQ ID NO: 1410472 - DNA, 25 bp, Homo sapien
ctagctttatcaaagatggccagct

SEQ ID NO: 1410473 - DNA, 25 bp, Homo sapien
catccctaggatagtgacatctgcc

SEQ ID NO: 1410474 - DNA, 25 bp, Homo sapien
cctaggatagtgacatctgcccatc

SEQ ID NO: 1410475 - DNA, 25 bp, Homo sapien
acatccctaggatagtgacatctgc

SEQ ID NO: 1410476 - DNA, 25 bp, Homo sapien
tccctaggatagtgacatctgccca

SEQ ID NO: 1410477 - DNA, 25 bp, Homo sapien
tagataacaaccactgccagatgag

SEQ ID NO: 1410478 - DNA, 25 bp, Homo sapien
ggccagaaggaagtctactagctct

SEQ ID NO: 1410479 - DNA, 25 bp, Homo sapien
tcccctggacgtagggatcctcagg

SEQ ID NO: 1410480 - DNA, 25 bp, Homo sapien
aaaccacagccaatagagggagtag

SEQ ID NO: 1410481 - DNA, 25 bp, Homo sapien
gccaacagcacacattcagtacagg

SEQ ID NO: 1410482 - DNA, 25 bp, Homo sapien
tgccaacagcacacattcagtacag

SEQ ID NO: 1410483 - DNA, 25 bp, Homo sapien
cctgggtaagaaaggctgccaagag

SEQ ID NO: 1410484 - DNA, 25 bp, Homo sapien
tacgtaggagactctaccatcctgg

SEQ ID NO: 1410485 - DNA, 25 bp, Homo sapien
taaagaagtacagttgggtcatgca

SEQ ID NO: 1410486 - DNA, 25 bp, Homo sapien
ccaagagccgaggaatggtgacatt

SEQ ID NO: 1410487 - DNA, 25 bp, Homo sapien
cctcgacatggcctccactcaaatt

SEQ ID NO: 1410488 - DNA, 25 bp, Homo sapien
caagacaaactcctcgacatggcct

SEQ ID NO: 1410489 - DNA, 25 bp, Homo sapien
tcgacatggcctccactcaaatttc

SEQ ID NO: 1410490 - DNA, 25 bp, Homo sapien
cgacatggcctccactcaaatttct

SEQ ID NO: 1410491 - DNA, 25 bp, Homo sapien
tcacaggaagaacaagaggtttgaa

SEQ ID NO: 1410492 - DNA, 25 bp, Homo sapien
ggaagaacaagaggtttgaaagata

SEQ ID NO: 1410493 - DNA, 25 bp, Homo sapien
taaaataaatcacaggaagaacaag

SEQ ID NO: 1410494 - DNA, 25 bp, Homo sapien
aaatcacaggaagaacaagaggttt

SEQ ID NO: 1410495 - DNA, 25 bp, Homo sapien
cactcacagctgctattatgaccat

SEQ ID NO: 1410496 - DNA, 25 bp, Homo sapien
acaaagcctctgtgaggactttgtc

SEQ ID NO: 1410497 - DNA, 25 bp, Homo sapien
ctctggtcttttgcacatgaataaa

SEQ ID NO: 1410498 - DNA, 25 bp, Homo sapien
gactttgtccaaaaagtccttcaca

SEQ ID NO: 1410499 - DNA, 25 bp, Homo sapien
ccttggtagcagagatctcactcat

SEQ ID NO: 1410500 - DNA, 25 bp, Homo sapien
tccttggtagcagagatctcactca

SEQ ID NO: 1410501 - DNA, 25 bp, Homo sapien
cctccttggtagcagagatctcact

SEQ ID NO: 1410502 - DNA, 25 bp, Homo sapien
ctccttggtagcagagatctcactc

SEQ ID NO: 1410503 - DNA, 25 bp, Homo sapien
ctgctatgagtgtgtcatctcctga

SEQ ID NO: 1410504 - DNA, 25 bp, Homo sapien
gggtaatgacagtataagggactgc

SEQ ID NO: 1410505 - DNA, 25 bp, Homo sapien
aagtggattataaccacggtgaggt

SEQ ID NO: 1410506 - DNA, 25 bp, Homo sapien
ccaaagtggattataaccacggtga

SEQ ID NO: 1410507 - DNA, 25 bp, Homo sapien
tgtccttggccagtagatcttccag

SEQ ID NO: 1410508 - DNA, 25 bp, Homo sapien
tctgtaagctacaacctgtgactga

SEQ ID NO: 1410509 - DNA, 25 bp, Homo sapien
cacccaagttagacccatgatgatc

SEQ ID NO: 1410510 - DNA, 25 bp, Homo sapien
gatggtcagcgtatagcaggtctca

SEQ ID NO: 1410511 - DNA, 25 bp, Homo sapien
gagaaggtagagacaaaagaagacc

SEQ ID NO: 1410512 - DNA, 25 bp, Homo sapien
gccaacaagaatgaattccttcagg

SEQ ID NO: 1410513 - DNA, 25 bp, Homo sapien
ctggttgatcttcatcgtttgaatg

SEQ ID NO: 1410514 - DNA, 25 bp, Homo sapien
gaaggtagagacaaaagaagaccac

SEQ ID NO: 1410515 - DNA, 25 bp, Homo sapien
atttgaaagaaacaacaataaacat

SEQ ID NO: 1410516 - DNA, 25 bp, Homo sapien
ctgaaatttgaaagaaacaacaata

SEQ ID NO: 1410517 - DNA, 25 bp, Homo sapien
tgaaagaaacaacaataaacattca

SEQ ID NO: 1410518 - DNA, 25 bp, Homo sapien
aacaacaataaacattcaacaccat

SEQ ID NO: 1410519 - DNA, 25 bp, Homo sapien
ctaagggaatattatagaggaccat

SEQ ID NO: 1410520 - DNA, 25 bp, Homo sapien
ccatgacctatactgtagtgacccc

SEQ ID NO: 1410521 - DNA, 25 bp, Homo sapien
tgtgcctcgcaccttacagtggtca

SEQ ID NO: 1410522 - DNA, 25 bp, Homo sapien
ccgagtgagctgaggatctttatcc

SEQ ID NO: 1410523 - DNA, 25 bp, Homo sapien
tcttgagagagatcagcttattgcc

SEQ ID NO: 1410524 - DNA, 25 bp, Homo sapien
aaaatacgggagcttggaggacaag

SEQ ID NO: 1410525 - DNA, 25 bp, Homo sapien
tgagagtaataacatctacaataat

SEQ ID NO: 1410526 - DNA, 25 bp, Homo sapien
catctacaataattttgaagtatgg

SEQ ID NO: 1410527 - DNA, 25 bp, Homo sapien
ctgctatgctggaattttgtctttc

SEQ ID NO: 1410528 - DNA, 25 bp, Homo sapien
ttacagtaaaattagctgcccactc

SEQ ID NO: 1410529 - DNA, 25 bp, Homo sapien
gctgcccactcttatatgagtacag

SEQ ID NO: 1410530 - DNA, 25 bp, Homo sapien
catggcccttctttacagtaaaatt

SEQ ID NO: 1410531 - DNA, 25 bp, Homo sapien
ttatctactataccatggcccttct

SEQ ID NO: 1410532 - DNA, 25 bp, Homo sapien
cacacacacgaggccatctttatct

SEQ ID NO: 1410533 - DNA, 25 bp, Homo sapien
tctataatcggaataaagcaaaatg

SEQ ID NO: 1410534 - DNA, 25 bp, Homo sapien
cccctcagcagtgactagttgcata

SEQ ID NO: 1410535 - DNA, 25 bp, Homo sapien
caataaatgtaatatgcacacaaac

SEQ ID NO: 1410536 - DNA, 25 bp, Homo sapien
ttttctacgatccacgaggagctgc

SEQ ID NO: 1410537 - DNA, 25 bp, Homo sapien
ctaagattttctacgatccacgagg

SEQ ID NO: 1410538 - DNA, 25 bp, Homo sapien
gattttctacgatccacgaggagct

SEQ ID NO: 1410539 - DNA, 25 bp, Homo sapien
tctacgatccacgaggagctgctta

SEQ ID NO: 1410540 - DNA, 25 bp, Homo sapien
ccaaagtaggaattggtgaagccaa

SEQ ID NO: 1410541 - DNA, 25 bp, Homo sapien
cccgtgggtccatatattgctgcat

SEQ ID NO: 1410542 - DNA, 25 bp, Homo sapien
cgtagtcatagccagagagatggct

SEQ ID NO: 1410543 - DNA, 25 bp, Homo sapien
agagatggcttcgaccccgtgggtc

SEQ ID NO: 1410544 - DNA, 25 bp, Homo sapien
tattacgccataaatgcaggagatg

SEQ ID NO: 1410545 - DNA, 25 bp, Homo sapien
tcagccctttcttgaaaaagagagc

SEQ ID NO: 1410546 - DNA, 25 bp, Homo sapien
gagtctctggaagacgcaagcccta

SEQ ID NO: 1410547 - DNA, 25 bp, Homo sapien
tacagttatagggattcaaaatagc

SEQ ID NO: 1410548 - DNA, 25 bp, Homo sapien
gctgggacttgaacctatgatcctc

SEQ ID NO: 1410549 - DNA, 25 bp, Homo sapien
gtttgtgcaaaacgataccatcatg

SEQ ID NO: 1410550 - DNA, 25 bp, Homo sapien
caaagagttcctctattcactgtgc

SEQ ID NO: 1410551 - DNA, 25 bp, Homo sapien
taccaagtggatccctaaagactcc

SEQ ID NO: 1410552 - DNA, 25 bp, Homo sapien
gacagtgtagtaggggaagcaacca

SEQ ID NO: 1410553 - DNA, 25 bp, Homo sapien
caaattaggatgacagtgtagtagg

SEQ ID NO: 1410554 - DNA, 25 bp, Homo sapien
tgacagtgtagtaggggaagcaacc

SEQ ID NO: 1410555 - DNA, 25 bp, Homo sapien
attcaaattaggatgacagtgtagt

SEQ ID NO: 1410556 - DNA, 25 bp, Homo sapien
ttggtaatatatgacttgccctctg

SEQ ID NO: 1410557 - DNA, 25 bp, Homo sapien
tctttggtaatatatgacttgccct

SEQ ID NO: 1410558 - DNA, 25 bp, Homo sapien
gaaagcagtatagtcctccagtgag

SEQ ID NO: 1410559 - DNA, 25 bp, Homo sapien
tttctgactccttgtcaatcaggaa

SEQ ID NO: 1410560 - DNA, 25 bp, Homo sapien
ccaccatgggcaagtagtaattgag

SEQ ID NO: 1410561 - DNA, 25 bp, Homo sapien
gccctgtcaaattctcatcaaagtg

SEQ ID NO: 1410562 - DNA, 25 bp, Homo sapien
tctcaggcaggaccggaactctttg

SEQ ID NO: 1410563 - DNA, 25 bp, Homo sapien
gaactctttgtgagtcaggcgccct

SEQ ID NO: 1410564 - DNA, 25 bp, Homo sapien
tagattgtgctaaattcctttagag

SEQ ID NO: 1410565 - DNA, 25 bp, Homo sapien
ttatagattgtgctaaattccttta

SEQ ID NO: 1410566 - DNA, 25 bp, Homo sapien
tcctttagagtctcttcactcacac

SEQ ID NO: 1410567 - DNA, 25 bp, Homo sapien
gattgtgctaaattcctttagagtc

SEQ ID NO: 1410568 - DNA, 25 bp, Homo sapien
tccctgtatatgaaacacaggttag

SEQ ID NO: 1410569 - DNA, 25 bp, Homo sapien
cacaggttagcagaacacaagccac

SEQ ID NO: 1410570 - DNA, 25 bp, Homo sapien
ttttgtacagtccatgagccaagag

SEQ ID NO: 1410571 - DNA, 25 bp, Homo sapien
gagtcatctagttcaagagttggca

SEQ ID NO: 1410572 - DNA, 25 bp, Homo sapien
ggtgcaccaaactctcgcccttagt

SEQ ID NO: 1410573 - DNA, 25 bp, Homo sapien
tcctaagagatcacataagatggtg

SEQ ID NO: 1410574 - DNA, 25 bp, Homo sapien
aaatgctattgagacctagagctgc

SEQ ID NO: 1410575 - DNA, 25 bp, Homo sapien
gcaactcttttatctggtgcaccaa

SEQ ID NO: 1410576 - DNA, 25 bp, Homo sapien
tcaaggatcagagcgtcttccaagt

SEQ ID NO: 1410577 - DNA, 25 bp, Homo sapien
gctccaggttgtgttgcatccgcaa

SEQ ID NO: 1410578 - DNA, 25 bp, Homo sapien
tagttgacgcttcatcgcctggatc

SEQ ID NO: 1410579 - DNA, 25 bp, Homo sapien
gcatccgcaacccaagctggtagag

SEQ ID NO: 1410580 - DNA, 25 bp, Homo sapien
ttccagctgagattccagagttcct

SEQ ID NO: 1410581 - DNA, 25 bp, Homo sapien
tttatttgcttccagctgagattcc

SEQ ID NO: 1410582 - DNA, 25 bp, Homo sapien
gctgagattccagagttcctgtttc

SEQ ID NO: 1410583 - DNA, 25 bp, Homo sapien
agttcctgtttctttgagcaatgat

SEQ ID NO: 1410584 - DNA, 25 bp, Homo sapien
ctttcttaacgaattcttccataat

SEQ ID NO: 1410585 - DNA, 25 bp, Homo sapien
acatgatgataacataaaatactga

SEQ ID NO: 1410586 - DNA, 25 bp, Homo sapien
taaagcaaacatgatgataacataa

SEQ ID NO: 1410587 - DNA, 25 bp, Homo sapien
tgaaaatgtctcagcactaactctt

SEQ ID NO: 1410588 - DNA, 25 bp, Homo sapien
gacacacctactggatacaactttg

SEQ ID NO: 1410589 - DNA, 25 bp, Homo sapien
tatcttcaggtacagaacagtttgc

SEQ ID NO: 1410590 - DNA, 25 bp, Homo sapien
catggaggtccggaacaggaatcac

SEQ ID NO: 1410591 - DNA, 25 bp, Homo sapien
tgttggacacacattgccaggatgt

SEQ ID NO: 1410592 - DNA, 25 bp, Homo sapien
aggatccattgaaggaaggtactgg

SEQ ID NO: 1410593 - DNA, 25 bp, Homo sapien
caggatccattgaaggaaggtactg

SEQ ID NO: 1410594 - DNA, 25 bp, Homo sapien
ccaggatccattgaaggaaggtact

SEQ ID NO: 1410595 - DNA, 25 bp, Homo sapien
tccaggatccattgaaggaaggtac

SEQ ID NO: 1410596 - DNA, 25 bp, Homo sapien
gcaaattccacgaacaggtcctcag

SEQ ID NO: 1410597 - DNA, 25 bp, Homo sapien
tcacaccagttgttcaaagctgaag

SEQ ID NO: 1410598 - DNA, 25 bp, Homo sapien
tttaaagtctgcttgagccctagcc

SEQ ID NO: 1410599 - DNA, 25 bp, Homo sapien
tataagggctggaaggcacacctaa

SEQ ID NO: 1410600 - DNA, 25 bp, Homo sapien
aacatgtgagttagcggtacgagcc

SEQ ID NO: 1410601 - DNA, 25 bp, Homo sapien
tgcagggccaccaatctaaaagggc

SEQ ID NO: 1410602 - DNA, 25 bp, Homo sapien
gacactaccatctttcctgataaag

SEQ ID NO: 1410603 - DNA, 25 bp, Homo sapien
gcagaactaaaaccaatagggactg

SEQ ID NO: 1410604 - DNA, 25 bp, Homo sapien
ggcctccttccattattgatatttt

SEQ ID NO: 1410605 - DNA, 25 bp, Homo sapien
tatttttatgatcaacatccaatgc

SEQ ID NO: 1410606 - DNA, 25 bp, Homo sapien
ctggcctccttccattattgatatt

SEQ ID NO: 1410607 - DNA, 25 bp, Homo sapien
catccaatgccttagcagccaacat

SEQ ID NO: 1410608 - DNA, 25 bp, Homo sapien
ggtaacagagaactgatcatgcctc

SEQ ID NO: 1410609 - DNA, 25 bp, Homo sapien
cagaatagaatggtgatgctactca

SEQ ID NO: 1410610 - DNA, 25 bp, Homo sapien
gacaaccttgacttttgcctgacag

SEQ ID NO: 1410611 - DNA, 25 bp, Homo sapien
ggtcttcaacctaggaaagcttgat

SEQ ID NO: 1410612 - DNA, 25 bp, Homo sapien
tgtgttgagcagaaatcagtttgtc

SEQ ID NO: 1410613 - DNA, 25 bp, Homo sapien
tggaaactctgcagactggcatcca

SEQ ID NO: 1410614 - DNA, 25 bp, Homo sapien
gcggcataacgctcttcaatggctt

SEQ ID NO: 1410615 - DNA, 25 bp, Homo sapien
caggtcagtgatctcgggaagtctc

SEQ ID NO: 1410616 - DNA, 25 bp, Homo sapien
gagcagccctggttaaagggcttcc

SEQ ID NO: 1410617 - DNA, 25 bp, Homo sapien
gacttcaggacccatcaggtaggag

SEQ ID NO: 1410618 - DNA, 25 bp, Homo sapien
ggttaaagggcttccattgaaatgc

SEQ ID NO: 1410619 - DNA, 25 bp, Homo sapien
gacccatcaggtaggagcagccctg

SEQ ID NO: 1410620 - DNA, 25 bp, Homo sapien
tgccattggtctttaggcttgtttc

SEQ ID NO: 1410621 - DNA, 25 bp, Homo sapien
ccattggtctttaggcttgtttcct

SEQ ID NO: 1410622 - DNA, 25 bp, Homo sapien
gccattggtctttaggcttgtttcc

SEQ ID NO: 1410623 - DNA, 25 bp, Homo sapien
ttggaagaaatctctttgttctgac

SEQ ID NO: 1410624 - DNA, 25 bp, Homo sapien
tcgtcttccaattgcaacttccaag

SEQ ID NO: 1410625 - DNA, 25 bp, Homo sapien
cttccagttgaattcctgaaaggca

SEQ ID NO: 1410626 - DNA, 25 bp, Homo sapien
ttttcattcagagcctctatcttgg

SEQ ID NO: 1410627 - DNA, 25 bp, Homo sapien
gcacacacattttgtactcgggtct

SEQ ID NO: 1410628 - DNA, 25 bp, Homo sapien
ttttgtactcgggtctcatggacag

SEQ ID NO: 1410629 - DNA, 25 bp, Homo sapien
cacacattttgtactcgggtctcat

SEQ ID NO: 1410630 - DNA, 25 bp, Homo sapien
tgtactcgggtctcatggacagcaa

SEQ ID NO: 1410631 - DNA, 25 bp, Homo sapien
tggtgctgagtgaaaaggtcaatct

SEQ ID NO: 1410632 - DNA, 25 bp, Homo sapien
gatattcttataccacgacactgct

SEQ ID NO: 1410633 - DNA, 25 bp, Homo sapien
ccttgtgatgatgctagccttctga

SEQ ID NO: 1410634 - DNA, 25 bp, Homo sapien
ccctcaacaggtgagtggttcgact

SEQ ID NO: 1410635 - DNA, 25 bp, Homo sapien
tcagcattctgcatgaattgcaagt

SEQ ID NO: 1410636 - DNA, 25 bp, Homo sapien
ctaatgtatctccacaatctcctcg

SEQ ID NO: 1410637 - DNA, 25 bp, Homo sapien
aatctcctcggacagccaaagcatt

SEQ ID NO: 1410638 - DNA, 25 bp, Homo sapien
tcttttcattgatccaagcttcctc

SEQ ID NO: 1410639 - DNA, 25 bp, Homo sapien
caaactgagccagccgcaactggat

SEQ ID NO: 1410640 - DNA, 25 bp, Homo sapien
aaactgagccagccgcaactggatc

SEQ ID NO: 1410641 - DNA, 25 bp, Homo sapien
atggcaggctcatgggccaccagct

SEQ ID NO: 1410642 - DNA, 25 bp, Homo sapien
agctccccctctaggcgtttgtgct

SEQ ID NO: 1410643 - DNA, 25 bp, Homo sapien
tcctgggagctcactcgtatcaact

SEQ ID NO: 1410644 - DNA, 25 bp, Homo sapien
tcagcaagttctgaaccccctgaag

SEQ ID NO: 1410645 - DNA, 25 bp, Homo sapien
tgcaaaaggtttgagcatcaccacg

SEQ ID NO: 1410646 - DNA, 25 bp, Homo sapien
gaaaattatatatgacctccacagg

SEQ ID NO: 1410647 - DNA, 25 bp, Homo sapien
taataccctggtgccaatgaccaaa

SEQ ID NO: 1410648 - DNA, 25 bp, Homo sapien
agtcatggcagttgggatgcttcca

SEQ ID NO: 1410649 - DNA, 25 bp, Homo sapien
tcaatttttcgtggtgtgcagctgc

SEQ ID NO: 1410650 - DNA, 25 bp, Homo sapien
gacattcaggaaacgcttgttgaca

SEQ ID NO: 1410651 - DNA, 25 bp, Homo sapien
gaagaactggaacaaggcataggcc

SEQ ID NO: 1410652 - DNA, 25 bp, Homo sapien
tgatcaacgttgaaagtcccgctgg

SEQ ID NO: 1410653 - DNA, 25 bp, Homo sapien
ggagagggatgccaacactacttac

SEQ ID NO: 1410654 - DNA, 25 bp, Homo sapien
aatgactgctggttgagaacactaa

SEQ ID NO: 1410655 - DNA, 25 bp, Homo sapien
ctcctaacatgggagggagaagagc

SEQ ID NO: 1410656 - DNA, 25 bp, Homo sapien
gaacactaagaacaattttgcaagg

SEQ ID NO: 1410657 - DNA, 25 bp, Homo sapien
tctctctctccaatagctgatgctt

SEQ ID NO: 1410658 - DNA, 25 bp, Homo sapien
tgctgaagccaagtccctggcctga

SEQ ID NO: 1410659 - DNA, 25 bp, Homo sapien
taggtttcctgctgaagccaagtcc

SEQ ID NO: 1410660 - DNA, 25 bp, Homo sapien
tctccaatagctgatgcttcttgag

SEQ ID NO: 1410661 - DNA, 25 bp, Homo sapien
ctgttgacgactggcctcattgagc

SEQ ID NO: 1410662 - DNA, 25 bp, Homo sapien
caaagtcccggatgcttgtgttgaa

SEQ ID NO: 1410663 - DNA, 25 bp, Homo sapien
gcttgtgttgaacctctgttgacga

SEQ ID NO: 1410664 - DNA, 25 bp, Homo sapien
gaacctctgttgacgactggcctca

SEQ ID NO: 1410665 - DNA, 25 bp, Homo sapien
gaattctatacagccataaaaatga

SEQ ID NO: 1410666 - DNA, 25 bp, Homo sapien
attctatacagccataaaaatgatg

SEQ ID NO: 1410667 - DNA, 25 bp, Homo sapien
ttctatacagccataaaaatgatga

SEQ ID NO: 1410668 - DNA, 25 bp, Homo sapien
tggaattctatacagccataaaaat

SEQ ID NO: 1410669 - DNA, 25 bp, Homo sapien
tcagatcggccatcgacttcatgtg

SEQ ID NO: 1410670 - DNA, 25 bp, Homo sapien
ggttgatgacgccatgcacctgctc

SEQ ID NO: 1410671 - DNA, 25 bp, Homo sapien
cacaagcgctacactcaatcaggga

SEQ ID NO: 1410672 - DNA, 25 bp, Homo sapien
gacttcatgtgcaaaggtctggtgt

SEQ ID NO: 1410673 - DNA, 25 bp, Homo sapien
agggaaaatgaaacagaaattatat

SEQ ID NO: 1410674 - DNA, 25 bp, Homo sapien
tgaagggaaaatgaaacagaaatta

SEQ ID NO: 1410675 - DNA, 25 bp, Homo sapien
gaaaatgaaacagaaattatattat

SEQ ID NO: 1410676 - DNA, 25 bp, Homo sapien
ctgaagggaaaatgaaacagaaatt

SEQ ID NO: 1410677 - DNA, 25 bp, Homo sapien
ctgctccacatcagactctgaagtc

SEQ ID NO: 1410678 - DNA, 25 bp, Homo sapien
tgctccacatcagactctgaagtct

SEQ ID NO: 1410679 - DNA, 25 bp, Homo sapien
ggcgtctttgtaggattcatcacag

SEQ ID NO: 1410680 - DNA, 25 bp, Homo sapien
tgtaggattcatcacaggctgtggg

SEQ ID NO: 1410681 - DNA, 25 bp, Homo sapien
tgttagtggcgtctttgtaggattc

SEQ ID NO: 1410682 - DNA, 25 bp, Homo sapien
ctgaatgttagtggcgtctttgtag

SEQ ID NO: 1410683 - DNA, 25 bp, Homo sapien
cagttgtgctttgagagccttccac

SEQ ID NO: 1410684 - DNA, 25 bp, Homo sapien
attgttttaggttggcatagtctcc

SEQ ID NO: 1410685 - DNA, 25 bp, Homo sapien
gctcctcaaggtctcggtagaattg

SEQ ID NO: 1410686 - DNA, 25 bp, Homo sapien
ttgtccgctcatcaatcagttgtgc

SEQ ID NO: 1410687 - DNA, 25 bp, Homo sapien
ggagccgcgtagcaatctcttcttt

SEQ ID NO: 1410688 - DNA, 25 bp, Homo sapien
ctgtctagtacacgttggagccgcg

SEQ ID NO: 1410689 - DNA, 25 bp, Homo sapien
cgttggagccgcgtagcaatctctt

SEQ ID NO: 1410690 - DNA, 25 bp, Homo sapien
gtacacgttggagccgcgtagcaat

SEQ ID NO: 1410691 - DNA, 25 bp, Homo sapien
aacttttgtcatctgacctcaggga

SEQ ID NO: 1410692 - DNA, 25 bp, Homo sapien
ccagactgtctaaggaacttttgtc

SEQ ID NO: 1410693 - DNA, 25 bp, Homo sapien
ggaattctcacgtgccaccatccag

SEQ ID NO: 1410694 - DNA, 25 bp, Homo sapien
tgctttgtccaaatcgtcccgtttc

SEQ ID NO: 1410695 - DNA, 25 bp, Homo sapien
gttctgcactgaagtcctctaaggc

SEQ ID NO: 1410696 - DNA, 25 bp, Homo sapien
ggtgcccactgtcgataagttctgc

SEQ ID NO: 1410697 - DNA, 25 bp, Homo sapien
ttttttcaatttcagggctagcatg

SEQ ID NO: 1410698 - DNA, 25 bp, Homo sapien
atctctctctagcttgacagcttga

SEQ ID NO: 1410699 - DNA, 25 bp, Homo sapien
tgatgataccatgccaccaatgcta

SEQ ID NO: 1410700 - DNA, 25 bp, Homo sapien
tctctatgccagttaagtcttcggc

SEQ ID NO: 1410701 - DNA, 25 bp, Homo sapien
gctactgatccagttctgcagatcc

SEQ ID NO: 1410702 - DNA, 25 bp, Homo sapien
ttcggccagctcctgtgatgatacc

SEQ ID NO: 1410703 - DNA, 25 bp, Homo sapien
ggatgggactcactgagccgctctg

SEQ ID NO: 1410704 - DNA, 25 bp, Homo sapien
cgatcctttgtacgcccctgcaggt

SEQ ID NO: 1410705 - DNA, 25 bp, Homo sapien
tctgggcctcatttaggctctcctt

SEQ ID NO: 1410706 - DNA, 25 bp, Homo sapien
gcatctggatgggactcactgagcc

SEQ ID NO: 1410707 - DNA, 25 bp, Homo sapien
tcatgccgtcgctgaagagcctgaa

SEQ ID NO: 1410708 - DNA, 25 bp, Homo sapien
tctgctccttcgtgtcatctgcttc

SEQ ID NO: 1410709 - DNA, 25 bp, Homo sapien
agccctcatgccgtcgctgaagagc

SEQ ID NO: 1410710 - DNA, 25 bp, Homo sapien
tttcaaagccctcatgccgtcgctg

SEQ ID NO: 1410711 - DNA, 25 bp, Homo sapien
caaagaaccccagcgggaattcaat

SEQ ID NO: 1410712 - DNA, 25 bp, Homo sapien
ctctgcaaagaaccccagcgggaat

SEQ ID NO: 1410713 - DNA, 25 bp, Homo sapien
tgcaaagaaccccagcgggaattca

SEQ ID NO: 1410714 - DNA, 25 bp, Homo sapien
aagcctctgcaaagaaccccagcgg

SEQ ID NO: 1410715 - DNA, 25 bp, Homo sapien
tgaggaggaatggagggagccttag

SEQ ID NO: 1410716 - DNA, 25 bp, Homo sapien
ctggtagtgaggaggaatggaggga

SEQ ID NO: 1410717 - DNA, 25 bp, Homo sapien
aggaggaatggagggagccttagtt

SEQ ID NO: 1410718 - DNA, 25 bp, Homo sapien
gaggaatggagggagccttagttac

SEQ ID NO: 1410719 - DNA, 25 bp, Homo sapien
tagtagatcatcagctaccttgttg

SEQ ID NO: 1410720 - DNA, 25 bp, Homo sapien
gttgatatcccttagccgaggctca

SEQ ID NO: 1410721 - DNA, 25 bp, Homo sapien
tagaagtccttcaaatagtagatca

SEQ ID NO: 1410722 - DNA, 25 bp, Homo sapien
tagccgaggctcattggtattcaaa

SEQ ID NO: 1410723 - DNA, 25 bp, Homo sapien
gaatccattccagcatgtctcctgc

SEQ ID NO: 1410724 - DNA, 25 bp, Homo sapien
gttcttctgcccgatccaagaggga

SEQ ID NO: 1410725 - DNA, 25 bp, Homo sapien
cattataacgttgcaatagacgacg

SEQ ID NO: 1410726 - DNA, 25 bp, Homo sapien
gcagctcccaaacatcatctagttc

SEQ ID NO: 1410727 - DNA, 25 bp, Homo sapien
tcgggaactcatcgtgggccagtct

SEQ ID NO: 1410728 - DNA, 25 bp, Homo sapien
ggctcttctcgtcgccgctgtggga

SEQ ID NO: 1410729 - DNA, 25 bp, Homo sapien
agctgggacaatgccctgatgatca

SEQ ID NO: 1410730 - DNA, 25 bp, Homo sapien
cagtcttctgacatagacagctggg

SEQ ID NO: 1410731 - DNA, 25 bp, Homo sapien
cttattgatggaactgagcagcgtt

SEQ ID NO: 1410732 - DNA, 25 bp, Homo sapien
tcatggtgacttctcgggggctgcg

SEQ ID NO: 1410733 - DNA, 25 bp, Homo sapien
gatggaactgagcagcgttaagaca

SEQ ID NO: 1410734 - DNA, 25 bp, Homo sapien
tattgatggaactgagcagcgttaa

SEQ ID NO: 1410735 - DNA, 25 bp, Homo sapien
tactgtctccaaatgaattgagatc

SEQ ID NO: 1410736 - DNA, 25 bp, Homo sapien
tggcaggcgtttgcctgattccgca

SEQ ID NO: 1410737 - DNA, 25 bp, Homo sapien
gatctaatagaaaggcctcatgctt

SEQ ID NO: 1410738 - DNA, 25 bp, Homo sapien
gcctgattccgcagagctttcatac

SEQ ID NO: 1410739 - DNA, 25 bp, Homo sapien
gctcgagcacggagagactccatat

SEQ ID NO: 1410740 - DNA, 25 bp, Homo sapien
ctctctgatccatgtttctgcttca

SEQ ID NO: 1410741 - DNA, 25 bp, Homo sapien
caagatcattttgtcgcctagcagc

SEQ ID NO: 1410742 - DNA, 25 bp, Homo sapien
gttagtattatctacaataggttcc

SEQ ID NO: 1410743 - DNA, 25 bp, Homo sapien
gttatctcttgaatgcgtggttcat

SEQ ID NO: 1410744 - DNA, 25 bp, Homo sapien
aagctttttggaagcaatcaggtcc

SEQ ID NO: 1410745 - DNA, 25 bp, Homo sapien
ttgaatgcgtggttcatggctggca

SEQ ID NO: 1410746 - DNA, 25 bp, Homo sapien
gactctatgcctattcagaagcttt

SEQ ID NO: 1410747 - DNA, 25 bp, Homo sapien
ttcaaatcggcataccaaggactct

SEQ ID NO: 1410748 - DNA, 25 bp, Homo sapien
cagccaggtctgtaaggatatccac

SEQ ID NO: 1410749 - DNA, 25 bp, Homo sapien
taagagcttcttctttcgggtggcc

SEQ ID NO: 1410750 - DNA, 25 bp, Homo sapien
gggttcagtctcttggatccaggcc

SEQ ID NO: 1410751 - DNA, 25 bp, Homo sapien
gaggccgtgtttcctgagtcgattc

SEQ ID NO: 1410752 - DNA, 25 bp, Homo sapien
gagtcgattctgtacctcggccagg

SEQ ID NO: 1410753 - DNA, 25 bp, Homo sapien
ctcagaggtgacttgccactcaaca

SEQ ID NO: 1410754 - DNA, 25 bp, Homo sapien
gccagcgctgcaaatcttctgcatt

SEQ ID NO: 1410755 - DNA, 25 bp, Homo sapien
tttgaaccctgctcttcaagttctg

SEQ ID NO: 1410756 - DNA, 25 bp, Homo sapien
tcagaggcatagtgaccaccctcaa

SEQ ID NO: 1410757 - DNA, 25 bp, Homo sapien
gctggcaacttcactcagacgagtg

SEQ ID NO: 1410758 - DNA, 25 bp, Homo sapien
gctgggtcttattaactgccaactc

SEQ ID NO: 1410759 - DNA, 25 bp, Homo sapien
ccagttctttaggtcatctgagtcc

SEQ ID NO: 1410760 - DNA, 25 bp, Homo sapien
gcaatctacgtctagtggcagcctt

SEQ ID NO: 1410761 - DNA, 25 bp, Homo sapien
tcctcatacagtttttgcagaagca

SEQ ID NO: 1410762 - DNA, 25 bp, Homo sapien
tggcagccttttcacgtagggcatc

SEQ ID NO: 1410763 - DNA, 25 bp, Homo sapien
tcaatttggttgcagtcttgtctac

SEQ ID NO: 1410764 - DNA, 25 bp, Homo sapien
ctctgaatcataatggtcatcacca

SEQ ID NO: 1410765 - DNA, 25 bp, Homo sapien
tcaccaatcaatttggttgcagtct

SEQ ID NO: 1410766 - DNA, 25 bp, Homo sapien
gaatcataatggtcatcaccaatca

SEQ ID NO: 1410767 - DNA, 25 bp, Homo sapien
gatcttctcttcctgggcagtaaag

SEQ ID NO: 1410768 - DNA, 25 bp, Homo sapien
cttctcttcctgggcagtaaaggct

SEQ ID NO: 1410769 - DNA, 25 bp, Homo sapien
ttcctgggcagtaaaggcttcctca

SEQ ID NO: 1410770 - DNA, 25 bp, Homo sapien
ctcttcctgggcagtaaaggcttcc

SEQ ID NO: 1410771 - DNA, 25 bp, Homo sapien
tttcccagatcctcgttttccagga

SEQ ID NO: 1410772 - DNA, 25 bp, Homo sapien
cccagatcctcgttttccaggaagg

SEQ ID NO: 1410773 - DNA, 25 bp, Homo sapien
agtttcccagatcctcgttttccag

SEQ ID NO: 1410774 - DNA, 25 bp, Homo sapien
agtgagtttcccagatcctcgtttt

SEQ ID NO: 1410775 - DNA, 25 bp, Homo sapien
gagatgaaagtccaagcactgctca

SEQ ID NO: 1410776 - DNA, 25 bp, Homo sapien
tgctcatactgacgatgacgctcgt

SEQ ID NO: 1410777 - DNA, 25 bp, Homo sapien
cagggcagtccagttgttgtcaagt

SEQ ID NO: 1410778 - DNA, 25 bp, Homo sapien
gatgacgctcgtcccacagttccag

SEQ ID NO: 1410779 - DNA, 25 bp, Homo sapien
ttttcccgaacttcatcagaggctt

SEQ ID NO: 1410780 - DNA, 25 bp, Homo sapien
cagaggcttcatgattggcattcac

SEQ ID NO: 1410781 - DNA, 25 bp, Homo sapien
tcttgaccagtctcatcagcagatt

SEQ ID NO: 1410782 - DNA, 25 bp, Homo sapien
cggtcatcgtaagagtcaatctcat

SEQ ID NO: 1410783 - DNA, 25 bp, Homo sapien
accagccacatctgttggcagctca

SEQ ID NO: 1410784 - DNA, 25 bp, Homo sapien
gcctgagagttcatcaaagtcagat

SEQ ID NO: 1410785 - DNA, 25 bp, Homo sapien
gctgctgatgcctgtccagcagaac

SEQ ID NO: 1410786 - DNA, 25 bp, Homo sapien
tcatcagcattgatcgcagcagtct

SEQ ID NO: 1410787 - DNA, 25 bp, Homo sapien
gggcacgaatatgctcccagctgga

SEQ ID NO: 1410788 - DNA, 25 bp, Homo sapien
tctgctttagcacataactccttca

SEQ ID NO: 1410789 - DNA, 25 bp, Homo sapien
tggtggccagggcacgaatatgctc

SEQ ID NO: 1410790 - DNA, 25 bp, Homo sapien
tctcctggatctgaggtgcatctga

SEQ ID NO: 1410791 - DNA, 25 bp, Homo sapien
gatccactggatggcttcagtcaca

SEQ ID NO: 1410792 - DNA, 25 bp, Homo sapien
ctttgccatagtcctcagaggtgag

SEQ ID NO: 1410793 - DNA, 25 bp, Homo sapien
gtccttcagaggcaacaaggtcttt

SEQ ID NO: 1410794 - DNA, 25 bp, Homo sapien
agaggtgagtacaggttccttctcc

SEQ ID NO: 1410795 - DNA, 25 bp, Homo sapien
gaaagagcctaatacaaagacacgg

SEQ ID NO: 1410796 - DNA, 25 bp, Homo sapien
catccttggccatagagtaggtcac

SEQ ID NO: 1410797 - DNA, 25 bp, Homo sapien
gaagtgttgaccattaattgctaac

SEQ ID NO: 1410798 - DNA, 25 bp, Homo sapien
tcccaaaggcaagtacatgatccac

SEQ ID NO: 1410799 - DNA, 25 bp, Homo sapien
tcgttgtaagtttgcagcattggac

SEQ ID NO: 1410800 - DNA, 25 bp, Homo sapien
ggagagccaaaccacgaaggcgctc

SEQ ID NO: 1410801 - DNA, 25 bp, Homo sapien
gaatcgttgtaagtttgcagcattg

SEQ ID NO: 1410802 - DNA, 25 bp, Homo sapien
tggagagccaaaccacgaaggcgct

SEQ ID NO: 1410803 - DNA, 25 bp, Homo sapien
ctgaattaagggtaggtcaggatgg

SEQ ID NO: 1410804 - DNA, 25 bp, Homo sapien
acaacactggagttatacagagatg

SEQ ID NO: 1410805 - DNA, 25 bp, Homo sapien
aaacaacactggagttatacagaga

SEQ ID NO: 1410806 - DNA, 25 bp, Homo sapien
caacactggagttatacagagatga

SEQ ID NO: 1410807 - DNA, 25 bp, Homo sapien
gaaaacaacactggagttatacaga

SEQ ID NO: 1410808 - DNA, 25 bp, Homo sapien
cttgtcaatgcttgagatctccttg

SEQ ID NO: 1410809 - DNA, 25 bp, Homo sapien
ttgtcaatgcttgagatctccttga

SEQ ID NO: 1410810 - DNA, 25 bp, Homo sapien
tgtcaatgcttgagatctccttgaa

SEQ ID NO: 1410811 - DNA, 25 bp, Homo sapien
tatgcagaacttcggtgcgctccca

SEQ ID NO: 1410812 - DNA, 25 bp, Homo sapien
cagtcttcacctagctccactgatg

SEQ ID NO: 1410813 - DNA, 25 bp, Homo sapien
gctccactgatgtcgctatagcctc

SEQ ID NO: 1410814 - DNA, 25 bp, Homo sapien
ctcggcacactcattggcatattgg

SEQ ID NO: 1410815 - DNA, 25 bp, Homo sapien
ggtggcgtagctcctctatatgggc

SEQ ID NO: 1410816 - DNA, 25 bp, Homo sapien
gtctccaatccactctaagatgtca

SEQ ID NO: 1410817 - DNA, 25 bp, Homo sapien
cagggtcagctctaacagcaggtcc

SEQ ID NO: 1410818 - DNA, 25 bp, Homo sapien
tctaagatgtcagcacactcctgta

SEQ ID NO: 1410819 - DNA, 25 bp, Homo sapien
tgggcagaatgacccatggtaaatc

SEQ ID NO: 1410820 - DNA, 25 bp, Homo sapien
cttcgtttcttcgtgggcagaatga

SEQ ID NO: 1410821 - DNA, 25 bp, Homo sapien
tgacccatggtaaatcgttcttccc

SEQ ID NO: 1410822 - DNA, 25 bp, Homo sapien
ccatggtaaatcgttcttcccttgt

SEQ ID NO: 1410823 - DNA, 25 bp, Homo sapien
gcttcaagggattgatgcttctgat

SEQ ID NO: 1410824 - DNA, 25 bp, Homo sapien
tctgcttcaagggattgatgcttct

SEQ ID NO: 1410825 - DNA, 25 bp, Homo sapien
tgcacctctgcttcaagggattgat

SEQ ID NO: 1410826 - DNA, 25 bp, Homo sapien
cacctctgcttcaagggattgatgc

SEQ ID NO: 1410827 - DNA, 25 bp, Homo sapien
tgtaagtgataggaatcctcaagct

SEQ ID NO: 1410828 - DNA, 25 bp, Homo sapien
ttcatagctcttatcggttaagata

SEQ ID NO: 1410829 - DNA, 25 bp, Homo sapien
atctgcatctcgcttgaaaacttgt

SEQ ID NO: 1410830 - DNA, 25 bp, Homo sapien
ggttaagatattgactttctccatg

SEQ ID NO: 1410831 - DNA, 25 bp, Homo sapien
tccttgaaactttgataccgagtca

SEQ ID NO: 1410832 - DNA, 25 bp, Homo sapien
gataccgagtcaacacttcctgacg

SEQ ID NO: 1410833 - DNA, 25 bp, Homo sapien
ccgctccttgaaactttgataccga

SEQ ID NO: 1410834 - DNA, 25 bp, Homo sapien
gaaactttgataccgagtcaacact

SEQ ID NO: 1410835 - DNA, 25 bp, Homo sapien
tgtccagtcgaattcaaatagaaat

SEQ ID NO: 1410836 - DNA, 25 bp, Homo sapien
ggaactgtccagtcgaattcaaata

SEQ ID NO: 1410837 - DNA, 25 bp, Homo sapien
tcttgcttggtcctagaatcccatc

SEQ ID NO: 1410838 - DNA, 25 bp, Homo sapien
aatcccatcagccatacacaatcga

SEQ ID NO: 1410839 - DNA, 25 bp, Homo sapien
cattaggctgatggttgtgtcccag

SEQ ID NO: 1410840 - DNA, 25 bp, Homo sapien
tatccaagcaatctcagggagcagc

SEQ ID NO: 1410841 - DNA, 25 bp, Homo sapien
tacagatgattgtgtcggtgacagc

SEQ ID NO: 1410842 - DNA, 25 bp, Homo sapien
tgtgtcccagaaaaaggagtacttg

SEQ ID NO: 1410843 - DNA, 25 bp, Homo sapien
ggtagcaaaggtgattacagatggc

SEQ ID NO: 1410844 - DNA, 25 bp, Homo sapien
aaaggtgattacagatggccaggta

SEQ ID NO: 1410845 - DNA, 25 bp, Homo sapien
actgtggggtagcaaaggtgattac

SEQ ID NO: 1410846 - DNA, 25 bp, Homo sapien
cgtgactgtggggtagcaaaggtga

SEQ ID NO: 1410847 - DNA, 25 bp, Homo sapien
taaaagaaatacatctgcaataggc

SEQ ID NO: 1410848 - DNA, 25 bp, Homo sapien
aaccatccagggaggtggtcttctg

SEQ ID NO: 1410849 - DNA, 25 bp, Homo sapien
caataggcaaccatccagggaggtg

SEQ ID NO: 1410850 - DNA, 25 bp, Homo sapien
tcagtgatgccgagggagtaaaaga

SEQ ID NO: 1410851 - DNA, 25 bp, Homo sapien
gggatggtgatggtggtataccaga

SEQ ID NO: 1410852 - DNA, 25 bp, Homo sapien
atggtgatggtggtataccagatct

SEQ ID NO: 1410853 - DNA, 25 bp, Homo sapien
tggggatggtgatggtggtatacca

SEQ ID NO: 1410854 - DNA, 25 bp, Homo sapien
tggctaggttgaagaacatcttggg

SEQ ID NO: 1410855 - DNA, 25 bp, Homo sapien
tacggaaaaaaatatcttagcttga

SEQ ID NO: 1410856 - DNA, 25 bp, Homo sapien
gaagcgtaggtacatgagagtcaca

SEQ ID NO: 1410857 - DNA, 25 bp, Homo sapien
gcagacaacagacttaacccaggaa

SEQ ID NO: 1410858 - DNA, 25 bp, Homo sapien
tacctgaatcatgacgatggctcgt

SEQ ID NO: 1410859 - DNA, 25 bp, Homo sapien
tcaaaggccataactgtcaagagac

SEQ ID NO: 1410860 - DNA, 25 bp, Homo sapien
aatggtggttcgattggggctctcc

SEQ ID NO: 1410861 - DNA, 25 bp, Homo sapien
ccatctccaagttgaaagtgagagt

SEQ ID NO: 1410862 - DNA, 25 bp, Homo sapien
tttcaatttccagtgcactcaagcc

SEQ ID NO: 1410863 - DNA, 25 bp, Homo sapien
actcaagccttctaggaggcatcta

SEQ ID NO: 1410864 - DNA, 25 bp, Homo sapien
ctattggataaaggaatacacttac

SEQ ID NO: 1410865 - DNA, 25 bp, Homo sapien
aagaagccagcgtctgaatagagcc

SEQ ID NO: 1410866 - DNA, 25 bp, Homo sapien
gtaatggggatagagaggaagacaa

SEQ ID NO: 1410867 - DNA, 25 bp, Homo sapien
agagaggaagacaaggaagaaggac

SEQ ID NO: 1410868 - DNA, 25 bp, Homo sapien
agaggaagacaaggaagaaggacat

SEQ ID NO: 1410869 - DNA, 25 bp, Homo sapien
ctgtaatggggatagagaggaagac

SEQ ID NO: 1410870 - DNA, 25 bp, Homo sapien
cgctgaaacgcaagtacatgagtga

SEQ ID NO: 1410871 - DNA, 25 bp, Homo sapien
caagtacagtaaacatcagtgcaat

SEQ ID NO: 1410872 - DNA, 25 bp, Homo sapien
tacactgccaaagaatatcgggaag

SEQ ID NO: 1410873 - DNA, 25 bp, Homo sapien
aatggctgtgtccaaaactggtgga

SEQ ID NO: 1410874 - DNA, 25 bp, Homo sapien
tctcgggaagcaggataaggaaacc

SEQ ID NO: 1410875 - DNA, 25 bp, Homo sapien
catttgatagcgaagagggttgcag

SEQ ID NO: 1410876 - DNA, 25 bp, Homo sapien
caggcttagcacagggaccaagtca

SEQ ID NO: 1410877 - DNA, 25 bp, Homo sapien
tcatggacgtgtctgtacaggccag

SEQ ID NO: 1410878 - DNA, 25 bp, Homo sapien
ccagaaaggaaaatatactgataaa

SEQ ID NO: 1410879 - DNA, 25 bp, Homo sapien
ctccagaaaggaaaatatactgata

SEQ ID NO: 1410880 - DNA, 25 bp, Homo sapien
aaggaaaatatactgataaaattat

SEQ ID NO: 1410881 - DNA, 25 bp, Homo sapien
ggaaaatatactgataaaattatac

SEQ ID NO: 1410882 - DNA, 25 bp, Homo sapien
ccttacagcagagaagattaataag

SEQ ID NO: 1410883 - DNA, 25 bp, Homo sapien
cttacagcagagaagattaataagt

SEQ ID NO: 1410884 - DNA, 25 bp, Homo sapien
tacagcagagaagattaataagtta

SEQ ID NO: 1410885 - DNA, 25 bp, Homo sapien
gattaataagttatcaatgataata

SEQ ID NO: 1410886 - DNA, 25 bp, Homo sapien
cactgttgattggtttccgctctcc

SEQ ID NO: 1410887 - DNA, 25 bp, Homo sapien
tttccgctctccatatttctagtag

SEQ ID NO: 1410888 - DNA, 25 bp, Homo sapien
gataaattcagtcactgttgattgg

SEQ ID NO: 1410889 - DNA, 25 bp, Homo sapien
tgaagctgagggaatccagtgaaga

SEQ ID NO: 1410890 - DNA, 25 bp, Homo sapien
ggcatagtccagcacatgagagggt

SEQ ID NO: 1410891 - DNA, 25 bp, Homo sapien
agggcatagtccagcacatgagagg

SEQ ID NO: 1410892 - DNA, 25 bp, Homo sapien
cagcacatgagagggtagagaaaaa

SEQ ID NO: 1410893 - DNA, 25 bp, Homo sapien
tagtccagcacatgagagggtagag

SEQ ID NO: 1410894 - DNA, 25 bp, Homo sapien
gacgtgtctgtacaggccaagcgca

SEQ ID NO: 1410895 - DNA, 25 bp, Homo sapien
caagcgcagcacaggttcaaaatca

SEQ ID NO: 1410896 - DNA, 25 bp, Homo sapien
tcagaaagacactaagatgggcggc

SEQ ID NO: 1410897 - DNA, 25 bp, Homo sapien
catgcaatctctgggagcaacacaa

SEQ ID NO: 1410898 - DNA, 25 bp, Homo sapien
tgtggcagttgtgtaccagatctcc

SEQ ID NO: 1410899 - DNA, 25 bp, Homo sapien
ttgtggcagttgtgtaccagatctc

SEQ ID NO: 1410900 - DNA, 25 bp, Homo sapien
gttgtggagacgggtatccaccctg

SEQ ID NO: 1410901 - DNA, 25 bp, Homo sapien
ttgtggagacgggtatccaccctga

SEQ ID NO: 1410902 - DNA, 25 bp, Homo sapien
gacaatgaatatgtagataacaaac

SEQ ID NO: 1410903 - DNA, 25 bp, Homo sapien
agaagaggaggctaccatcttcaaa

SEQ ID NO: 1410904 - DNA, 25 bp, Homo sapien
gataacaaacaatggaatgaagaag

SEQ ID NO: 1410905 - DNA, 25 bp, Homo sapien
tacaataagattcccaatgacaatg

SEQ ID NO: 1410906 - DNA, 25 bp, Homo sapien
tgtgggaatccagagaagagaaact

SEQ ID NO: 1410907 - DNA, 25 bp, Homo sapien
ctgtgggaatccagagaagagaaac

SEQ ID NO: 1410908 - DNA, 25 bp, Homo sapien
ctgttacttactgtagcagtttggt

SEQ ID NO: 1410909 - DNA, 25 bp, Homo sapien
ctatggatagaaagacacagctcat

SEQ ID NO: 1410910 - DNA, 25 bp, Homo sapien
gaagcgcagatacatgagtgacaca

SEQ ID NO: 1410911 - DNA, 25 bp, Homo sapien
gcaatggccttgtccagtaatggtg

SEQ ID NO: 1410912 - DNA, 25 bp, Homo sapien
aatgtgacagagaagcgcagataca

SEQ ID NO: 1410913 - DNA, 25 bp, Homo sapien
tccagtaatggtgggaatgtgacag

SEQ ID NO: 1410914 - DNA, 25 bp, Homo sapien
agcaatgtgggctgcacatgtggag

SEQ ID NO: 1410915 - DNA, 25 bp, Homo sapien
caatgtgggctgcacatgtggagaa

SEQ ID NO: 1410916 - DNA, 25 bp, Homo sapien
tagcaatgtgggctgcacatgtgga

SEQ ID NO: 1410917 - DNA, 25 bp, Homo sapien
gcaatgtgggctgcacatgtggaga

SEQ ID NO: 1410918 - DNA, 25 bp, Homo sapien
gagggaatcctcaggatcaccgtga

SEQ ID NO: 1410919 - DNA, 25 bp, Homo sapien
agagggaatcctcaggatcaccgtg

SEQ ID NO: 1410920 - DNA, 25 bp, Homo sapien
gggaatcctcaggatcaccgtgatg

SEQ ID NO: 1410921 - DNA, 25 bp, Homo sapien
gaatcctcaggatcaccgtgatgat

SEQ ID NO: 1410922 - DNA, 25 bp, Homo sapien
agaatggaaatagcacggatcacat

SEQ ID NO: 1410923 - DNA, 25 bp, Homo sapien
cagaatggaaatagcacggatcaca

SEQ ID NO: 1410924 - DNA, 25 bp, Homo sapien
agagttgatgaatttggttggcgcc

SEQ ID NO: 1410925 - DNA, 25 bp, Homo sapien
caatctctggcagtaacatgaggaa

SEQ ID NO: 1410926 - DNA, 25 bp, Homo sapien
ttggttggcgccacagaatggaaga

SEQ ID NO: 1410927 - DNA, 25 bp, Homo sapien
atgcacacaatctctggcagtaaca

SEQ ID NO: 1410928 - DNA, 25 bp, Homo sapien
cacggtggtgtaccaaatctccagg

SEQ ID NO: 1410929 - DNA, 25 bp, Homo sapien
caggaggcaacctatgaaagagatg

SEQ ID NO: 1410930 - DNA, 25 bp, Homo sapien
ggactagggcttctgtgaccccgag

SEQ ID NO: 1410931 - DNA, 25 bp, Homo sapien
ctgtgaccccgagtgagtggaagaa

SEQ ID NO: 1410932 - DNA, 25 bp, Homo sapien
ataaagagcataggaatgaagaata

SEQ ID NO: 1410933 - DNA, 25 bp, Homo sapien
gaggctgccattcttagattgagga

SEQ ID NO: 1410934 - DNA, 25 bp, Homo sapien
gtccggttggacagcaaagaaaatc

SEQ ID NO: 1410935 - DNA, 25 bp, Homo sapien
ctgtacataggattatggagatggg

SEQ ID NO: 1410936 - DNA, 25 bp, Homo sapien
tctaagtacatgcaaagaacaaata

SEQ ID NO: 1410937 - DNA, 25 bp, Homo sapien
gtcaacattctaagtacatgcaaag

SEQ ID NO: 1410938 - DNA, 25 bp, Homo sapien
ttcacttgttggctcataaaacaca

SEQ ID NO: 1410939 - DNA, 25 bp, Homo sapien
cttgttggctcataaaacacagtca

SEQ ID NO: 1410940 - DNA, 25 bp, Homo sapien
ctcttccagaaaccaacagagccac

SEQ ID NO: 1410941 - DNA, 25 bp, Homo sapien
taagtaggaaggttgtaaccacagc

SEQ ID NO: 1410942 - DNA, 25 bp, Homo sapien
atcttcattgctctgcagcccaata

SEQ ID NO: 1410943 - DNA, 25 bp, Homo sapien
gaaggttgtaaccacagccacacct

SEQ ID NO: 1410944 - DNA, 25 bp, Homo sapien
gctctgcagcccaataagtaggaag

SEQ ID NO: 1410945 - DNA, 25 bp, Homo sapien
cacagggccatttgcagtagtggca

SEQ ID NO: 1410946 - DNA, 25 bp, Homo sapien
taacgcaatgtggttcaaaggcagg

SEQ ID NO: 1410947 - DNA, 25 bp, Homo sapien
ggagcagtttagtgatcacacagca

SEQ ID NO: 1410948 - DNA, 25 bp, Homo sapien
tgtattgcagaagattcagccagct

SEQ ID NO: 1410949 - DNA, 25 bp, Homo sapien
acttcaaccggagcaatagagtgag

SEQ ID NO: 1410950 - DNA, 25 bp, Homo sapien
tgattgaggccatgacttcgaggct

SEQ ID NO: 1410951 - DNA, 25 bp, Homo sapien
agtgcaccgtgatcgcccctgtaag

SEQ ID NO: 1410952 - DNA, 25 bp, Homo sapien
taaggcagatccttgagtggaggca

SEQ ID NO: 1410953 - DNA, 25 bp, Homo sapien
tgatctatgattgcacctatacact

SEQ ID NO: 1410954 - DNA, 25 bp, Homo sapien
gatctatgattgcacctatacactc

SEQ ID NO: 1410955 - DNA, 25 bp, Homo sapien
catagtccagtgagtagctcttctt

SEQ ID NO: 1410956 - DNA, 25 bp, Homo sapien
tgtgagcactgagtagaccactgcc

SEQ ID NO: 1410957 - DNA, 25 bp, Homo sapien
aatatcccaattctctttagctgcc

SEQ ID NO: 1410958 - DNA, 25 bp, Homo sapien
ccttgttgcgcaagctgtagatgaa

SEQ ID NO: 1410959 - DNA, 25 bp, Homo sapien
ggaaaggatgctcccatagaagatg

SEQ ID NO: 1410960 - DNA, 25 bp, Homo sapien
atggaaaggatgctcccatagaaga

SEQ ID NO: 1410961 - DNA, 25 bp, Homo sapien
ggatgctcccatagaagatgagaac

SEQ ID NO: 1410962 - DNA, 25 bp, Homo sapien
aaaggatgctcccatagaagatgag

SEQ ID NO: 1410963 - DNA, 25 bp, Homo sapien
gcacaggagggaagtcacaaaagac

SEQ ID NO: 1410964 - DNA, 25 bp, Homo sapien
caaaagacgtgctgaatgcgattgg

SEQ ID NO: 1410965 - DNA, 25 bp, Homo sapien
cacagaatgggaggcgtgaaatcaa

SEQ ID NO: 1410966 - DNA, 25 bp, Homo sapien
tagacgtatcagtgcaagccaaact

SEQ ID NO: 1410967 - DNA, 25 bp, Homo sapien
gctgtatagccaagctctgagaagg

SEQ ID NO: 1410968 - DNA, 25 bp, Homo sapien
tgtcaggagatagcactcagtcgct

SEQ ID NO: 1410969 - DNA, 25 bp, Homo sapien
gaagagataaatctggacaccctgg

SEQ ID NO: 1410970 - DNA, 25 bp, Homo sapien
tatcgtaggccatagctgtcaggag

SEQ ID NO: 1410971 - DNA, 25 bp, Homo sapien
cctggaggggttgaagtttatcact

SEQ ID NO: 1410972 - DNA, 25 bp, Homo sapien
gtctcatttgcagtattatacccag

SEQ ID NO: 1410973 - DNA, 25 bp, Homo sapien
agtttgaagagaacttcctgtatac

SEQ ID NO: 1410974 - DNA, 25 bp, Homo sapien
ccagccactgctcggagtccgaagt

SEQ ID NO: 1410975 - DNA, 25 bp, Homo sapien
gtagcattcagacgctcccaaggag

SEQ ID NO: 1410976 - DNA, 25 bp, Homo sapien
ggaatagctcttctttagccgcaca

SEQ ID NO: 1410977 - DNA, 25 bp, Homo sapien
tagcagatgtgtccttgcaggccaa

SEQ ID NO: 1410978 - DNA, 25 bp, Homo sapien
tatagcaagtgttcggtcaagggtc

SEQ ID NO: 1410979 - DNA, 25 bp, Homo sapien
aagaagaaaacattggattgagatg

SEQ ID NO: 1410980 - DNA, 25 bp, Homo sapien
gaagaaaacattggattgagatgac

SEQ ID NO: 1410981 - DNA, 25 bp, Homo sapien
agaaaacattggattgagatgactg

SEQ ID NO: 1410982 - DNA, 25 bp, Homo sapien
gaaagaagaaaacattggattgaga

SEQ ID NO: 1410983 - DNA, 25 bp, Homo sapien
gccttatatccaccaggcatcctgg

SEQ ID NO: 1410984 - DNA, 25 bp, Homo sapien
gatggcagagataatttgagcagac

SEQ ID NO: 1410985 - DNA, 25 bp, Homo sapien
ttttagagccttatatccaccaggc

SEQ ID NO: 1410986 - DNA, 25 bp, Homo sapien
acagagacttttagagccttatatc

SEQ ID NO: 1410987 - DNA, 25 bp, Homo sapien
tggtaagggcagtgatcacagtgga

SEQ ID NO: 1410988 - DNA, 25 bp, Homo sapien
gatcacagtggaaatgctaagcctc

SEQ ID NO: 1410989 - DNA, 25 bp, Homo sapien
ggcagtgatcacagtggaaatgcta

SEQ ID NO: 1410990 - DNA, 25 bp, Homo sapien
gtaagggcagtgatcacagtggaaa

SEQ ID NO: 1410991 - DNA, 25 bp, Homo sapien
ctatctaccccataccacaaaggaa

SEQ ID NO: 1410992 - DNA, 25 bp, Homo sapien
tatctaccccataccacaaaggaaa

SEQ ID NO: 1410993 - DNA, 25 bp, Homo sapien
agttgaacctatctaccccatacca

SEQ ID NO: 1410994 - DNA, 25 bp, Homo sapien
caacagttgaacctatctaccccat

SEQ ID NO: 1410995 - DNA, 25 bp, Homo sapien
aaataattctgatcctgtcaatgac

SEQ ID NO: 1410996 - DNA, 25 bp, Homo sapien
cttaaaataattctgatcctgtcaa

SEQ ID NO: 1410997 - DNA, 25 bp, Homo sapien
taaaataattctgatcctgtcaatg

SEQ ID NO: 1410998 - DNA, 25 bp, Homo sapien
aataattctgatcctgtcaatgact

SEQ ID NO: 1410999 - DNA, 25 bp, Homo sapien
cgcgcccagccatgactctccttaa

SEQ ID NO: 1411000 - DNA, 25 bp, Homo sapien
cgcccagccatgactctccttaaag

SEQ ID NO: 1411001 - DNA, 25 bp, Homo sapien
cagccatgactctccttaaagcctt

SEQ ID NO: 1411002 - DNA, 25 bp, Homo sapien
ccatgactctccttaaagccttctt

SEQ ID NO: 1411003 - DNA, 25 bp, Homo sapien
tgagcacaaagttgcaaccagtggc

SEQ ID NO: 1411004 - DNA, 25 bp, Homo sapien
taatgggccacctctttcaagcaga

SEQ ID NO: 1411005 - DNA, 25 bp, Homo sapien
caaccgcattagtggtgccaagtca

SEQ ID NO: 1411006 - DNA, 25 bp, Homo sapien
taaggtagctatccagtgccatgac

SEQ ID NO: 1411007 - DNA, 25 bp, Homo sapien
ttggagcaaggtgtgcagcagcatg

SEQ ID NO: 1411008 - DNA, 25 bp, Homo sapien
cttggagcaaggtgtgcagcagcat

SEQ ID NO: 1411009 - DNA, 25 bp, Homo sapien
ggacactgataaataagtacatggg

SEQ ID NO: 1411010 - DNA, 25 bp, Homo sapien
aataagtacatgggcgtgaacagtc

SEQ ID NO: 1411011 - DNA, 25 bp, Homo sapien
gaggacactgataaataagtacatg

SEQ ID NO: 1411012 - DNA, 25 bp, Homo sapien
gtacatgggcgtgaacagtccagaa

SEQ ID NO: 1411013 - DNA, 25 bp, Homo sapien
tccagttatgactgacgtgatccat

SEQ ID NO: 1411014 - DNA, 25 bp, Homo sapien
ccctgcaagtgtgaggagatagatg

SEQ ID NO: 1411015 - DNA, 25 bp, Homo sapien
gagatagatgcatagggtccccaag

SEQ ID NO: 1411016 - DNA, 25 bp, Homo sapien
tggtgaaaccagcaaggataaaact

SEQ ID NO: 1411017 - DNA, 25 bp, Homo sapien
gaaagagctccagagggcatataag

SEQ ID NO: 1411018 - DNA, 25 bp, Homo sapien
catgtgctccatgcccggttgattt

SEQ ID NO: 1411019 - DNA, 25 bp, Homo sapien
gatttgttaaatctcccgtttgtga

SEQ ID NO: 1411020 - DNA, 25 bp, Homo sapien
gtgacccaagagcacttcaaaatgg

SEQ ID NO: 1411021 - DNA, 25 bp, Homo sapien
tcaagctggcgagggaacataaaat

SEQ ID NO: 1411022 - DNA, 25 bp, Homo sapien
gagtcaagtgaaaggccctctgcca

SEQ ID NO: 1411023 - DNA, 25 bp, Homo sapien
tatagacccctgtgtaaccatggac

SEQ ID NO: 1411024 - DNA, 25 bp, Homo sapien
tgcagtgtgccaagccaagatctgg

SEQ ID NO: 1411025 - DNA, 25 bp, Homo sapien
tgtgggttccatggtaatgtcccct

SEQ ID NO: 1411026 - DNA, 25 bp, Homo sapien
cccagagactctgatatattgtatt

SEQ ID NO: 1411027 - DNA, 25 bp, Homo sapien
gaatttcctgagcattgctttatgg

SEQ ID NO: 1411028 - DNA, 25 bp, Homo sapien
ttctagttcctgtaaatgtgatgtt

SEQ ID NO: 1411029 - DNA, 25 bp, Homo sapien
gaccgggcagatgagggactcccac

SEQ ID NO: 1411030 - DNA, 25 bp, Homo sapien
cttgactgagaaacggaccgggcag

SEQ ID NO: 1411031 - DNA, 25 bp, Homo sapien
actgagaaacggaccgggcagatga

SEQ ID NO: 1411032 - DNA, 25 bp, Homo sapien
gcagatgagggactcccacatatac

SEQ ID NO: 1411033 - DNA, 25 bp, Homo sapien
gcgttttaaatcaagttggctactc

SEQ ID NO: 1411034 - DNA, 25 bp, Homo sapien
tcactgcagacaccatgccagcgtt

SEQ ID NO: 1411035 - DNA, 25 bp, Homo sapien
agttggctactcgtgctgtttagag

SEQ ID NO: 1411036 - DNA, 25 bp, Homo sapien
tcttcccgaagacattttgccacaa

SEQ ID NO: 1411037 - DNA, 25 bp, Homo sapien
ccagttcctcatcggtgatgttatc

SEQ ID NO: 1411038 - DNA, 25 bp, Homo sapien
gtatctccttatatttactctccat

SEQ ID NO: 1411039 - DNA, 25 bp, Homo sapien
ctcatcggtgatgttatccaggctg

SEQ ID NO: 1411040 - DNA, 25 bp, Homo sapien
tggttagcaagagtatctccttata

SEQ ID NO: 1411041 - DNA, 25 bp, Homo sapien
ttcattttcttagcgtttctggaga

SEQ ID NO: 1411042 - DNA, 25 bp, Homo sapien
catcctgcggttccgtttctgggaa

SEQ ID NO: 1411043 - DNA, 25 bp, Homo sapien
gagattacaacatcctgcggttccg

SEQ ID NO: 1411044 - DNA, 25 bp, Homo sapien
ttctggagattacaacatcctgcgg

SEQ ID NO: 1411045 - DNA, 25 bp, Homo sapien
aatgcacattctaagctgaccggat

SEQ ID NO: 1411046 - DNA, 25 bp, Homo sapien
ccaattaggcgggaaggcatgtctg

SEQ ID NO: 1411047 - DNA, 25 bp, Homo sapien
tgaccggattggctactgctttaaa

SEQ ID NO: 1411048 - DNA, 25 bp, Homo sapien
taattaggcgggaaggaagacactg

SEQ ID NO: 1411049 - DNA, 25 bp, Homo sapien
gaatggttaagtccttactgagcaa

SEQ ID NO: 1411050 - DNA, 25 bp, Homo sapien
gaacattgttctactaaaaggatta

SEQ ID NO: 1411051 - DNA, 25 bp, Homo sapien
aaaagttccgaggtgatgctggttt

SEQ ID NO: 1411052 - DNA, 25 bp, Homo sapien
aaaaggattagaggtcatcaatgat

SEQ ID NO: 1411053 - DNA, 25 bp, Homo sapien
caaaaagctggaatgtttgagctca

SEQ ID NO: 1411054 - DNA, 25 bp, Homo sapien
gagagttaccagaagcttgcttttt

SEQ ID NO: 1411055 - DNA, 25 bp, Homo sapien
gtacaaatattggaagagactcagt

SEQ ID NO: 1411056 - DNA, 25 bp, Homo sapien
acaaatccagttctaggatgatgag

SEQ ID NO: 1411057 - DNA, 25 bp, Homo sapien
cagtacatgattttacgctgttgcc

SEQ ID NO: 1411058 - DNA, 25 bp, Homo sapien
aacaggtggtgcttcgttataggaa

SEQ ID NO: 1411059 - DNA, 25 bp, Homo sapien
tgtgaattagaaaacgtcgtgtgtg

SEQ ID NO: 1411060 - DNA, 25 bp, Homo sapien
gttttatacagaggaagctctccaa

SEQ ID NO: 1411061 - DNA, 25 bp, Homo sapien
tgaagccccatggtgacgcctcccg

SEQ ID NO: 1411062 - DNA, 25 bp, Homo sapien
tcagcgccgcccaagggatgctgtg

SEQ ID NO: 1411063 - DNA, 25 bp, Homo sapien
aggggcattgtgacttacctggcca

SEQ ID NO: 1411064 - DNA, 25 bp, Homo sapien
gcccctcttgaagtcttggccttct

SEQ ID NO: 1411065 - DNA, 25 bp, Homo sapien
tgaagtctctgcctaagccactctc

SEQ ID NO: 1411066 - DNA, 25 bp, Homo sapien
tttgggttcttagtcctgaagtctc

SEQ ID NO: 1411067 - DNA, 25 bp, Homo sapien
tatttcccttgctacgcagaagctt

SEQ ID NO: 1411068 - DNA, 25 bp, Homo sapien
attatttcccttgctacgcagaagc

SEQ ID NO: 1411069 - DNA, 25 bp, Homo sapien
taatatatcgtgaactgccatgcaa

SEQ ID NO: 1411070 - DNA, 25 bp, Homo sapien
cctaatgttatggaaaattggccac

SEQ ID NO: 1411071 - DNA, 25 bp, Homo sapien
caccttgtgtcagggtactgatgtc

SEQ ID NO: 1411072 - DNA, 25 bp, Homo sapien
tcactcacaggtggccaatatcatc

SEQ ID NO: 1411073 - DNA, 25 bp, Homo sapien
tctgcttccccatacctcttgatag

SEQ ID NO: 1411074 - DNA, 25 bp, Homo sapien
tcttgataggggatatgccttttct

SEQ ID NO: 1411075 - DNA, 25 bp, Homo sapien
gacctgacctgggtagaaaggagta

SEQ ID NO: 1411076 - DNA, 25 bp, Homo sapien
ttttgggagtcacttcatggcagct

SEQ ID NO: 1411077 - DNA, 25 bp, Homo sapien
agactccctgcttgtgggcttccca

SEQ ID NO: 1411078 - DNA, 25 bp, Homo sapien
attgtccgcctctccagttgcatga

SEQ ID NO: 1411079 - DNA, 25 bp, Homo sapien
cagggggtgctgtttcggcaaaaca

SEQ ID NO: 1411080 - DNA, 25 bp, Homo sapien
gtttcggcaaaacagcagtcaaagt

SEQ ID NO: 1411081 - DNA, 25 bp, Homo sapien
gtcccgtagtacggagacacaattg

SEQ ID NO: 1411082 - DNA, 25 bp, Homo sapien
atctgacgggagtgtcccgtagtac

SEQ ID NO: 1411083 - DNA, 25 bp, Homo sapien
cccgtagtacggagacacaattgcc

SEQ ID NO: 1411084 - DNA, 25 bp, Homo sapien
aggttcaggatgctttcaaaagggg

SEQ ID NO: 1411085 - DNA, 25 bp, Homo sapien
gaacaagcaaggttcatctaaactg

SEQ ID NO: 1411086 - DNA, 25 bp, Homo sapien
tgcaaaatagattgtagtcttacac

SEQ ID NO: 1411087 - DNA, 25 bp, Homo sapien
actgtttcacaaggagtctcagata

SEQ ID NO: 1411088 - DNA, 25 bp, Homo sapien
gatggaactgtttcacaaggagtct

SEQ ID NO: 1411089 - DNA, 25 bp, Homo sapien
ttctatcctaatttggtggagagag

SEQ ID NO: 1411090 - DNA, 25 bp, Homo sapien
tattgtgatcatctgttgatattct

SEQ ID NO: 1411091 - DNA, 25 bp, Homo sapien
aatctgattgaagaggctgtatcac

SEQ ID NO: 1411092 - DNA, 25 bp, Homo sapien
tatccagcaattattctatcctaat

SEQ ID NO: 1411093 - DNA, 25 bp, Homo sapien
ccagttggcttgaattggtcctttt

SEQ ID NO: 1411094 - DNA, 25 bp, Homo sapien
tagaccagttggcttgaattggtcc

SEQ ID NO: 1411095 - DNA, 25 bp, Homo sapien
gaccagttggcttgaattggtcctt

SEQ ID NO: 1411096 - DNA, 25 bp, Homo sapien
ttagaccagttggcttgaattggtc

SEQ ID NO: 1411097 - DNA, 25 bp, Homo sapien
gagatagcaggcagtgcaaccaaca

SEQ ID NO: 1411098 - DNA, 25 bp, Homo sapien
ctcttacagagatagcaggcagtgc

SEQ ID NO: 1411099 - DNA, 25 bp, Homo sapien
caggcagtgcaaccaacactgagac

SEQ ID NO: 1411100 - DNA, 25 bp, Homo sapien
caaatcttggcctccactcttacag

SEQ ID NO: 1411101 - DNA, 25 bp, Homo sapien
tcacccccttggagagttgactttg

SEQ ID NO: 1411102 - DNA, 25 bp, Homo sapien
cacccccttggagagttgactttgt

SEQ ID NO: 1411103 - DNA, 25 bp, Homo sapien
tcattgtgtcctcgtttctaacccc

SEQ ID NO: 1411104 - DNA, 25 bp, Homo sapien
gaatgtaagtcgaaccttatctcct

SEQ ID NO: 1411105 - DNA, 25 bp, Homo sapien
tgtcacttaggtcaaataatatgtt

SEQ ID NO: 1411106 - DNA, 25 bp, Homo sapien
cattttcccagtgttgtcacttagg

SEQ ID NO: 1411107 - DNA, 25 bp, Homo sapien
tagaacatgttgtctcctatgccta

SEQ ID NO: 1411108 - DNA, 25 bp, Homo sapien
gggtggcccatagaagcaacaactg

SEQ ID NO: 1411109 - DNA, 25 bp, Homo sapien
ggaggcagacgtgtcttacttagaa

SEQ ID NO: 1411110 - DNA, 25 bp, Homo sapien
tcagaagccctaatccctacattgt

SEQ ID NO: 1411111 - DNA, 25 bp, Homo sapien
aaaccattcacaattgttccaaggg

SEQ ID NO: 1411112 - DNA, 25 bp, Homo sapien
ttccaaggggctgagtttgaagcgt

SEQ ID NO: 1411113 - DNA, 25 bp, Homo sapien
cttctggactacaaacaaaccattc

SEQ ID NO: 1411114 - DNA, 25 bp, Homo sapien
agtttgaagcgtgttgatcttcggg

SEQ ID NO: 1411115 - DNA, 25 bp, Homo sapien
tgttcagcgggacattaaccttttg

SEQ ID NO: 1411116 - DNA, 25 bp, Homo sapien
ttacctctaagaaaccactgtgccg

SEQ ID NO: 1411117 - DNA, 25 bp, Homo sapien
cagcatctaacacacgtgaggcgct

SEQ ID NO: 1411118 - DNA, 25 bp, Homo sapien
taaccttttggtcagattcagcatc

SEQ ID NO: 1411119 - DNA, 25 bp, Homo sapien
tgctttcagtaccataactggcaaa

SEQ ID NO: 1411120 - DNA, 25 bp, Homo sapien
ctctgatagattcctgctgggccac

SEQ ID NO: 1411121 - DNA, 25 bp, Homo sapien
ttcttgggtctcaaacgtgaagggc

SEQ ID NO: 1411122 - DNA, 25 bp, Homo sapien
ccataactggcaaacagcgcttctg

SEQ ID NO: 1411123 - DNA, 25 bp, Homo sapien
gaagacaagagaagaaagatatcag

SEQ ID NO: 1411124 - DNA, 25 bp, Homo sapien
ctgaagacaagagaagaaagatatc

SEQ ID NO: 1411125 - DNA, 25 bp, Homo sapien
tgaagacaagagaagaaagatatca

SEQ ID NO: 1411126 - DNA, 25 bp, Homo sapien
ggagagacttttggtgcagcacgtt

SEQ ID NO: 1411127 - DNA, 25 bp, Homo sapien
cttaacatgaggagagacttttggt

SEQ ID NO: 1411128 - DNA, 25 bp, Homo sapien
gcagcacgttgctttgcgacatcat

SEQ ID NO: 1411129 - DNA, 25 bp, Homo sapien
ctcatttcagcttgacttagtggct

SEQ ID NO: 1411130 - DNA, 25 bp, Homo sapien
ctcctgaagacgttttgccaaaagc

SEQ ID NO: 1411131 - DNA, 25 bp, Homo sapien
cctcctgaagacgttttgccaaaag

SEQ ID NO: 1411132 - DNA, 25 bp, Homo sapien
ctgaagacgttttgccaaaagcata

SEQ ID NO: 1411133 - DNA, 25 bp, Homo sapien
tcctgaagacgttttgccaaaagca

SEQ ID NO: 1411134 - DNA, 25 bp, Homo sapien
tcaaggtagctacttgtattctgtt

SEQ ID NO: 1411135 - DNA, 25 bp, Homo sapien
gacaccgccccagcattttgaatca

SEQ ID NO: 1411136 - DNA, 25 bp, Homo sapien
ttctgtttgcagtatgtagtttgcc

SEQ ID NO: 1411137 - DNA, 25 bp, Homo sapien
tattaaactcgtctgaaagaaagaa

SEQ ID NO: 1411138 - DNA, 25 bp, Homo sapien
cagttcctcatcagtgatgttatcc

SEQ ID NO: 1411139 - DNA, 25 bp, Homo sapien
ttaaacctatccagttcctcatcag

SEQ ID NO: 1411140 - DNA, 25 bp, Homo sapien
gttcctcatcagtgatgttatccag

SEQ ID NO: 1411141 - DNA, 25 bp, Homo sapien
tcctcatcagtgatgttatccaggc

SEQ ID NO: 1411142 - DNA, 25 bp, Homo sapien
gtatctccttgtatttactctccat

SEQ ID NO: 1411143 - DNA, 25 bp, Homo sapien
agcaagagtatctccttgtatttac

SEQ ID NO: 1411144 - DNA, 25 bp, Homo sapien
gagtatctccttgtatttactctcc

SEQ ID NO: 1411145 - DNA, 25 bp, Homo sapien
ctgttagcaagagtatctccttgta

SEQ ID NO: 1411146 - DNA, 25 bp, Homo sapien
cagcagtgttgtcaaattaatctat

SEQ ID NO: 1411147 - DNA, 25 bp, Homo sapien
tacaaagtacataagaacatcgaat

SEQ ID NO: 1411148 - DNA, 25 bp, Homo sapien
ggacctacttaagtgggtgtatgtc

SEQ ID NO: 1411149 - DNA, 25 bp, Homo sapien
ttttagtaccactccaagagagaaa

SEQ ID NO: 1411150 - DNA, 25 bp, Homo sapien
gacaactggagctctaattggctga

SEQ ID NO: 1411151 - DNA, 25 bp, Homo sapien
tgacacttctggacggcttcacatg

SEQ ID NO: 1411152 - DNA, 25 bp, Homo sapien
gagctggtttgggttctcactagca

SEQ ID NO: 1411153 - DNA, 25 bp, Homo sapien
tcaggagagcatgcccaaataacct

SEQ ID NO: 1411154 - DNA, 25 bp, Homo sapien
accagggtggactgagcatgacaca

SEQ ID NO: 1411155 - DNA, 25 bp, Homo sapien
acagtatcatacagggtggtttccc

SEQ ID NO: 1411156 - DNA, 25 bp, Homo sapien
gtataatgagtatccaccctcacag

SEQ ID NO: 1411157 - DNA, 25 bp, Homo sapien
cagactccagagttgccactagggt

SEQ ID NO: 1411158 - DNA, 25 bp, Homo sapien
attttgcagtctgtcaccattcgtc

SEQ ID NO: 1411159 - DNA, 25 bp, Homo sapien
cttccaaaaatagcatccaagggtc

SEQ ID NO: 1411160 - DNA, 25 bp, Homo sapien
aatagcatccaagggtcaccataac

SEQ ID NO: 1411161 - DNA, 25 bp, Homo sapien
gtcaccattcgtctttcttccaaaa

SEQ ID NO: 1411162 - DNA, 25 bp, Homo sapien
acagctagacttcctactggagaga

SEQ ID NO: 1411163 - DNA, 25 bp, Homo sapien
gaaacccataagtgagggaacagag

SEQ ID NO: 1411164 - DNA, 25 bp, Homo sapien
tggagagaaagcaacaatcttgaac

SEQ ID NO: 1411165 - DNA, 25 bp, Homo sapien
gtcatttgctcaagggtaccctgct

SEQ ID NO: 1411166 - DNA, 25 bp, Homo sapien
taatgccaagacctgactacactgc

SEQ ID NO: 1411167 - DNA, 25 bp, Homo sapien
tgtctgaagccagccgcatcagcaa

SEQ ID NO: 1411168 - DNA, 25 bp, Homo sapien
tccgtatgtacttcgcaattgctgc

SEQ ID NO: 1411169 - DNA, 25 bp, Homo sapien
tgctattgcctaaaacccagatgtc

SEQ ID NO: 1411170 - DNA, 25 bp, Homo sapien
tggaaggaaccatacttgtgctgaa

SEQ ID NO: 1411171 - DNA, 25 bp, Homo sapien
agtggaaggaaccatacttgtgctg

SEQ ID NO: 1411172 - DNA, 25 bp, Homo sapien
ggaaggaaccatacttgtgctgaac

SEQ ID NO: 1411173 - DNA, 25 bp, Homo sapien
gaaggaaccatacttgtgctgaact

SEQ ID NO: 1411174 - DNA, 25 bp, Homo sapien
ggctcccttgtgttcagcaccatca

SEQ ID NO: 1411175 - DNA, 25 bp, Homo sapien
tgagtaacttcctattgacctcctt

SEQ ID NO: 1411176 - DNA, 25 bp, Homo sapien
tcttcctgagtaacttcctattgac

SEQ ID NO: 1411177 - DNA, 25 bp, Homo sapien
aaatggctcccttgtgttcagcacc

SEQ ID NO: 1411178 - DNA, 25 bp, Homo sapien
tgcaatcgttacattatcctgatca

SEQ ID NO: 1411179 - DNA, 25 bp, Homo sapien
gatgggatgaatcaaggcagccagc

SEQ ID NO: 1411180 - DNA, 25 bp, Homo sapien
gacagcaatctgtaggatgggatga

SEQ ID NO: 1411181 - DNA, 25 bp, Homo sapien
catctcttgtgttgacagcaatctg

SEQ ID NO: 1411182 - DNA, 25 bp, Homo sapien
ggacccaggcccacattatcagact

SEQ ID NO: 1411183 - DNA, 25 bp, Homo sapien
caggcccacattatcagactgaagg

SEQ ID NO: 1411184 - DNA, 25 bp, Homo sapien
ttacacagattagagactggcccct

SEQ ID NO: 1411185 - DNA, 25 bp, Homo sapien
agactgaaggaggttaaagcttatt

SEQ ID NO: 1411186 - DNA, 25 bp, Homo sapien
cagctacgtgctcaagaatgctctc

SEQ ID NO: 1411187 - DNA, 25 bp, Homo sapien
cccagctacgtgctcaagaatgctc

SEQ ID NO: 1411188 - DNA, 25 bp, Homo sapien
tcaagaatgctctctgctatgttct

SEQ ID NO: 1411189 - DNA, 25 bp, Homo sapien
ccagctacgtgctcaagaatgctct

SEQ ID NO: 1411190 - DNA, 25 bp, Homo sapien
tctctttcacccctacaagggcatg

SEQ ID NO: 1411191 - DNA, 25 bp, Homo sapien
tgtaactgtgtagtctctgagacct

SEQ ID NO: 1411192 - DNA, 25 bp, Homo sapien
tcaggcaaaccgctaagtcttgtaa

SEQ ID NO: 1411193 - DNA, 25 bp, Homo sapien
tttcacccctacaagggcatgaatt

SEQ ID NO: 1411194 - DNA, 25 bp, Homo sapien
cgtgagaatcgtttgtgcttcagcc

SEQ ID NO: 1411195 - DNA, 25 bp, Homo sapien
ttcagccaaggctccatagtctgca

SEQ ID NO: 1411196 - DNA, 25 bp, Homo sapien
cattttagcttctaccgtgagaatc

SEQ ID NO: 1411197 - DNA, 25 bp, Homo sapien
tagtctgcaaccaaattaggaaccc

SEQ ID NO: 1411198 - DNA, 25 bp, Homo sapien
atgcaaagtaaactttccagaaaca

SEQ ID NO: 1411199 - DNA, 25 bp, Homo sapien
tgcaaagtaaactttccagaaacat

SEQ ID NO: 1411200 - DNA, 25 bp, Homo sapien
catgcaaagtaaactttccagaaac

SEQ ID NO: 1411201 - DNA, 25 bp, Homo sapien
caatctggagagacagccatctcct

SEQ ID NO: 1411202 - DNA, 25 bp, Homo sapien
aatctggagagacagccatctcctc

SEQ ID NO: 1411203 - DNA, 25 bp, Homo sapien
atctggagagacagccatctcctct

SEQ ID NO: 1411204 - DNA, 25 bp, Homo sapien
cattgactagaatacaagagagata

SEQ ID NO: 1411205 - DNA, 25 bp, Homo sapien
actgccttgcacacctctcctttct

SEQ ID NO: 1411206 - DNA, 25 bp, Homo sapien
gagagatacactaactcctgagtct

SEQ ID NO: 1411207 - DNA, 25 bp, Homo sapien
ttccatagccttcccgaataacaaa

SEQ ID NO: 1411208 - DNA, 25 bp, Homo sapien
tttctctaaactggtctatggtaaa

SEQ ID NO: 1411209 - DNA, 25 bp, Homo sapien
tatgctgtagaaagttccaatagtc

SEQ ID NO: 1411210 - DNA, 25 bp, Homo sapien
ctatggtaaagtggtcaaatcctat

SEQ ID NO: 1411211 - DNA, 25 bp, Homo sapien
gtggtcaaatcctatgctgtagaaa

SEQ ID NO: 1411212 - DNA, 25 bp, Homo sapien
cttcaagatttgtttgccaatattg

SEQ ID NO: 1411213 - DNA, 25 bp, Homo sapien
cagtcggatgtaagtgctcctggtt

SEQ ID NO: 1411214 - DNA, 25 bp, Homo sapien
tttgccaatattgccactggcatca

SEQ ID NO: 1411215 - DNA, 25 bp, Homo sapien
attccagtcggatgtaagtgctcct

SEQ ID NO: 1411216 - DNA, 25 bp, Homo sapien
cagtctgtgttcagatgttcttctt

SEQ ID NO: 1411217 - DNA, 25 bp, Homo sapien
taaatgtttcctgatagttaagtat

SEQ ID NO: 1411218 - DNA, 25 bp, Homo sapien
gtgagcggagattgcgccatcgtac

SEQ ID NO: 1411219 - DNA, 25 bp, Homo sapien
aggttgtagtcagtggagattgcag

SEQ ID NO: 1411220 - DNA, 25 bp, Homo sapien
agtgagcggagattgcgccatcgta

SEQ ID NO: 1411221 - DNA, 25 bp, Homo sapien
ggcggaggttgtagtcagtggagat

SEQ ID NO: 1411222 - DNA, 25 bp, Homo sapien
gcagagaagtcctaacacgaccctt

SEQ ID NO: 1411223 - DNA, 25 bp, Homo sapien
ccggcattgccccacgcagagaagt

SEQ ID NO: 1411224 - DNA, 25 bp, Homo sapien
tcccaggctttaaagcccggcattg

SEQ ID NO: 1411225 - DNA, 25 bp, Homo sapien
tctgaggattgttgtaggacttctc

SEQ ID NO: 1411226 - DNA, 25 bp, Homo sapien
aaatctaggccttttacagtgatca

SEQ ID NO: 1411227 - DNA, 25 bp, Homo sapien
agagaaaaatctaggccttttacag

SEQ ID NO: 1411228 - DNA, 25 bp, Homo sapien
tagagaaaaatctaggccttttaca

SEQ ID NO: 1411229 - DNA, 25 bp, Homo sapien
gaaaaatctaggccttttacagtga

SEQ ID NO: 1411230 - DNA, 25 bp, Homo sapien
tccagagtcccgcatgggagagatg

SEQ ID NO: 1411231 - DNA, 25 bp, Homo sapien
tagagtgcaagtgcacagctgtgtc

SEQ ID NO: 1411232 - DNA, 25 bp, Homo sapien
tgggacacgtatcttctcaggtttc

SEQ ID NO: 1411233 - DNA, 25 bp, Homo sapien
tgtgtcctctggtcgcccgtccaga

SEQ ID NO: 1411234 - DNA, 25 bp, Homo sapien
aagtccagcgcgctcgtccattgcg

SEQ ID NO: 1411235 - DNA, 25 bp, Homo sapien
tctggattagaagtccagcgcgctc

SEQ ID NO: 1411236 - DNA, 25 bp, Homo sapien
tcgaacccggaacctctggattaga

SEQ ID NO: 1411237 - DNA, 25 bp, Homo sapien
ccggaacctctggattagaagtcca

SEQ ID NO: 1411238 - DNA, 25 bp, Homo sapien
gcatcagcaccagaactgaaaaagc

SEQ ID NO: 1411239 - DNA, 25 bp, Homo sapien
atcagcaccagaactgaaaaagcac

SEQ ID NO: 1411240 - DNA, 25 bp, Homo sapien
acagcatcagcaccagaactgaaaa

SEQ ID NO: 1411241 - DNA, 25 bp, Homo sapien
acacacagcatcagcaccagaactg

SEQ ID NO: 1411242 - DNA, 25 bp, Homo sapien
tctgcatcaccgagccatctcagca

SEQ ID NO: 1411243 - DNA, 25 bp, Homo sapien
tctcaatactctgggtccgatggtc

SEQ ID NO: 1411244 - DNA, 25 bp, Homo sapien
aatgtgacagcagtcaatttcccag

SEQ ID NO: 1411245 - DNA, 25 bp, Homo sapien
gtggagatccaccagccggcttcat

SEQ ID NO: 1411246 - DNA, 25 bp, Homo sapien
tggaacaggacagaactagagcctt

SEQ ID NO: 1411247 - DNA, 25 bp, Homo sapien
gaacaggacagaactagagcctttg

SEQ ID NO: 1411248 - DNA, 25 bp, Homo sapien
tgatggaacaggacagaactagagc

SEQ ID NO: 1411249 - DNA, 25 bp, Homo sapien
ggacagaactagagcctttgctctc

SEQ ID NO: 1411250 - DNA, 25 bp, Homo sapien
ctctgtccacgcctttgctcatttc

SEQ ID NO: 1411251 - DNA, 25 bp, Homo sapien
ttccctacattcatctccagacgtt

SEQ ID NO: 1411252 - DNA, 25 bp, Homo sapien
tacattcatctccagacgttctggg

SEQ ID NO: 1411253 - DNA, 25 bp, Homo sapien
tccagacgttctgggttctgcctga

SEQ ID NO: 1411254 - DNA, 25 bp, Homo sapien
ggaagaacttgctggtccttccttc

SEQ ID NO: 1411255 - DNA, 25 bp, Homo sapien
gcttaaggggatccccagttgccaa

SEQ ID NO: 1411256 - DNA, 25 bp, Homo sapien
ggctgagagttagtagttatccact

SEQ ID NO: 1411257 - DNA, 25 bp, Homo sapien
agaaggctgagagttagtagttatc

SEQ ID NO: 1411258 - DNA, 25 bp, Homo sapien
tagcgtttaggagaaggctgagagt

SEQ ID NO: 1411259 - DNA, 25 bp, Homo sapien
ggctagtgagcacgcccttgcccag

SEQ ID NO: 1411260 - DNA, 25 bp, Homo sapien
atggccctgtccgactcccctccct

SEQ ID NO: 1411261 - DNA, 25 bp, Homo sapien
ctcaggctagtgagcacgcccttgc

SEQ ID NO: 1411262 - DNA, 25 bp, Homo sapien
tcaggctagtgagcacgcccttgcc

SEQ ID NO: 1411263 - DNA, 25 bp, Homo sapien
ggcgccctttcggtcaacatcgtag

SEQ ID NO: 1411264 - DNA, 25 bp, Homo sapien
tttcggtcaacatcgtagtccaccc

SEQ ID NO: 1411265 - DNA, 25 bp, Homo sapien
gccctttcggtcaacatcgtagtcc

SEQ ID NO: 1411266 - DNA, 25 bp, Homo sapien
ggagccggccgggaagcgcgatggg

SEQ ID NO: 1411267 - DNA, 25 bp, Homo sapien
cgtgtgtcgggtgtttgtgtatgta

SEQ ID NO: 1411268 - DNA, 25 bp, Homo sapien
gcgtgggcaaagaagagggccctta

SEQ ID NO: 1411269 - DNA, 25 bp, Homo sapien
tcagtcagggcgtgtgtcgggtgtt

SEQ ID NO: 1411270 - DNA, 25 bp, Homo sapien
gtgggcaaagaagagggcccttatc

SEQ ID NO: 1411271 - DNA, 25 bp, Homo sapien
ggtgctagcccctgacagtgacact

SEQ ID NO: 1411272 - DNA, 25 bp, Homo sapien
tctccatggtgctagcccctgacag

SEQ ID NO: 1411273 - DNA, 25 bp, Homo sapien
ctgacagtgacactccaggcttttc

SEQ ID NO: 1411274 - DNA, 25 bp, Homo sapien
tagcccctgacagtgacactccagg

SEQ ID NO: 1411275 - DNA, 25 bp, Homo sapien
tagttcagggtcaagaaggtcaggt

SEQ ID NO: 1411276 - DNA, 25 bp, Homo sapien
actaactgtgtattgattgctaatt

SEQ ID NO: 1411277 - DNA, 25 bp, Homo sapien
tataagcacctttggctcatttact

SEQ ID NO: 1411278 - DNA, 25 bp, Homo sapien
tctagttcagggtcaagaaggtcag

SEQ ID NO: 1411279 - DNA, 25 bp, Homo sapien
tttttagctccaaagggcatggcag

SEQ ID NO: 1411280 - DNA, 25 bp, Homo sapien
gaagtgtaagaagatgccatccgcc

SEQ ID NO: 1411281 - DNA, 25 bp, Homo sapien
tgtgtgaactggaacctgccggtaa

SEQ ID NO: 1411282 - DNA, 25 bp, Homo sapien
gcagtgacttctgcccaatggcctc

SEQ ID NO: 1411283 - DNA, 25 bp, Homo sapien
gataccaacccgtggtctaggccag

SEQ ID NO: 1411284 - DNA, 25 bp, Homo sapien
agaagattactttaccccactgagc

SEQ ID NO: 1411285 - DNA, 25 bp, Homo sapien
tatggttaggacacttctgaggaag

SEQ ID NO: 1411286 - DNA, 25 bp, Homo sapien
gccagtataatgtagccaggctgca

SEQ ID NO: 1411287 - DNA, 25 bp, Homo sapien
cctgaggtaggtttagggtgcatca

SEQ ID NO: 1411288 - DNA, 25 bp, Homo sapien
tcttcttgtggagtcgacctaggcc

SEQ ID NO: 1411289 - DNA, 25 bp, Homo sapien
tttggcagactcaatccacaggccg

SEQ ID NO: 1411290 - DNA, 25 bp, Homo sapien
gacaatccggactctagccgcagtg

SEQ ID NO: 1411291 - DNA, 25 bp, Homo sapien
caactgcgatgattaggccagaccc

SEQ ID NO: 1411292 - DNA, 25 bp, Homo sapien
tgctacactgtgagggtcgcggcaa

SEQ ID NO: 1411293 - DNA, 25 bp, Homo sapien
cactctagaatgtgtaatggccgct

SEQ ID NO: 1411294 - DNA, 25 bp, Homo sapien
tgggtcccgccagaaagtcttatct

SEQ ID NO: 1411295 - DNA, 25 bp, Homo sapien
gccatcatcggtgggatcgtggctt

SEQ ID NO: 1411296 - DNA, 25 bp, Homo sapien
atcgtggctttcattgtcttcctgc

SEQ ID NO: 1411297 - DNA, 25 bp, Homo sapien
gatcgtggctttcattgtcttcctg

SEQ ID NO: 1411298 - DNA, 25 bp, Homo sapien
cacgccatcatcggtgggatcgtgg

SEQ ID NO: 1411299 - DNA, 25 bp, Homo sapien
cagaaacgggatggttgtcggcaaa

SEQ ID NO: 1411300 - DNA, 25 bp, Homo sapien
tgaggcaaaaggctccgacgatgct

SEQ ID NO: 1411301 - DNA, 25 bp, Homo sapien
atatttcatctagaggcgcctgccc

SEQ ID NO: 1411302 - DNA, 25 bp, Homo sapien
tcatcaatgcagaaggcgggcagtc

SEQ ID NO: 1411303 - DNA, 25 bp, Homo sapien
gagtgagaggcagagcgaggaactg

SEQ ID NO: 1411304 - DNA, 25 bp, Homo sapien
gggtattcctagtcagggttcacac

SEQ ID NO: 1411305 - DNA, 25 bp, Homo sapien
ctgggcaagtggacagggctgtggg

SEQ ID NO: 1411306 - DNA, 25 bp, Homo sapien
tgaggaggagggctaagagccaggg

SEQ ID NO: 1411307 - DNA, 25 bp, Homo sapien
cctggtctgacaatgggcatgcaaa

SEQ ID NO: 1411308 - DNA, 25 bp, Homo sapien
ccatcggtcttggagaaaggagtcc

SEQ ID NO: 1411309 - DNA, 25 bp, Homo sapien
tggcgttgaccctggaaagacctac

SEQ ID NO: 1411310 - DNA, 25 bp, Homo sapien
ccagcacccgcttttgggaaaatga

SEQ ID NO: 1411311 - DNA, 25 bp, Homo sapien
tgggtatcctagctagcagcactgt

SEQ ID NO: 1411312 - DNA, 25 bp, Homo sapien
ctactgtgtctggtatggctcagcc

SEQ ID NO: 1411313 - DNA, 25 bp, Homo sapien
tgcaccctgatatacagcacggagc

SEQ ID NO: 1411314 - DNA, 25 bp, Homo sapien
gctttgctgctagggtgccatgcct

SEQ ID NO: 1411315 - DNA, 25 bp, Homo sapien
ccacccgcaccctcttgccctctct

SEQ ID NO: 1411316 - DNA, 25 bp, Homo sapien
ttggaagcaaatcctagttctcttc

SEQ ID NO: 1411317 - DNA, 25 bp, Homo sapien
tggaagcaaatcctagttctcttcc

SEQ ID NO: 1411318 - DNA, 25 bp, Homo sapien
ggaagcaaatcctagttctcttccc

SEQ ID NO: 1411319 - DNA, 25 bp, Homo sapien
cagaagtgttccttacatgcagaca

SEQ ID NO: 1411320 - DNA, 25 bp, Homo sapien
cctccagggtggttgcggtggattc

SEQ ID NO: 1411321 - DNA, 25 bp, Homo sapien
tgttcagaagtgttccttacatgca

SEQ ID NO: 1411322 - DNA, 25 bp, Homo sapien
gatacaagagcaagaagctcttgcc

SEQ ID NO: 1411323 - DNA, 25 bp, Homo sapien
tgtgtccaggtacacatcgcagaag

SEQ ID NO: 1411324 - DNA, 25 bp, Homo sapien
gcacatgtgtacacagccacgcatg

SEQ ID NO: 1411325 - DNA, 25 bp, Homo sapien
ccacgcatggtctactgcttctgga

SEQ ID NO: 1411326 - DNA, 25 bp, Homo sapien
aggtacacatcgcagaaggcaggtg

SEQ ID NO: 1411327 - DNA, 25 bp, Homo sapien
cacactctgtacacactctgctgat

SEQ ID NO: 1411328 - DNA, 25 bp, Homo sapien
gcctgaaatgactgcgacgagagat

SEQ ID NO: 1411329 - DNA, 25 bp, Homo sapien
tgtacacactctgctgatgcctgaa

SEQ ID NO: 1411330 - DNA, 25 bp, Homo sapien
ttggcaaacattgtccgctctctgt

SEQ ID NO: 1411331 - DNA, 25 bp, Homo sapien
tgatacaggacgagccagtgtgtgc

SEQ ID NO: 1411332 - DNA, 25 bp, Homo sapien
cctgatacaggacgagccagtgtgt

SEQ ID NO: 1411333 - DNA, 25 bp, Homo sapien
gggatacgtgaaggcgcaggagcac

SEQ ID NO: 1411334 - DNA, 25 bp, Homo sapien
aaggcgcaggagcaccagcaccaag

SEQ ID NO: 1411335 - DNA, 25 bp, Homo sapien
ccccccgcaggtataatttcttcat

SEQ ID NO: 1411336 - DNA, 25 bp, Homo sapien
ctcatttccattttccccccgcagg

SEQ ID NO: 1411337 - DNA, 25 bp, Homo sapien
tccccccgcaggtataatttcttca

SEQ ID NO: 1411338 - DNA, 25 bp, Homo sapien
gacattgccctttggctgccgctca

SEQ ID NO: 1411339 - DNA, 25 bp, Homo sapien
cacaaattcaggatgttggcacaga

SEQ ID NO: 1411340 - DNA, 25 bp, Homo sapien
tgtggccgccttcactgctgattcc

SEQ ID NO: 1411341 - DNA, 25 bp, Homo sapien
tacaatttagtcaggacattgccct

SEQ ID NO: 1411342 - DNA, 25 bp, Homo sapien
catactataatacagagcagagctc

SEQ ID NO: 1411343 - DNA, 25 bp, Homo sapien
aaaactccgttccaggcccatagtg

SEQ ID NO: 1411344 - DNA, 25 bp, Homo sapien
tcaacattgcagcagaaaagaccag

SEQ ID NO: 1411345 - DNA, 25 bp, Homo sapien
ttgtgacccatcaggacctaagcat

SEQ ID NO: 1411346 - DNA, 25 bp, Homo sapien
ctgagtgttaggatgccggatgccc

SEQ ID NO: 1411347 - DNA, 25 bp, Homo sapien
cttgtctgagattgcagtgtgactc

SEQ ID NO: 1411348 - DNA, 25 bp, Homo sapien
aggatgccggatgcccttgtctgag

SEQ ID NO: 1411349 - DNA, 25 bp, Homo sapien
gcccttgtctgagattgcagtgtga

SEQ ID NO: 1411350 - DNA, 25 bp, Homo sapien
ggcaaaaggttttttgccaatagca

SEQ ID NO: 1411351 - DNA, 25 bp, Homo sapien
gttttttgccaatagcacggtgaag

SEQ ID NO: 1411352 - DNA, 25 bp, Homo sapien
tttgccaatagcacggtgaagggca

SEQ ID NO: 1411353 - DNA, 25 bp, Homo sapien
aaggttttttgccaatagcacggtg

SEQ ID NO: 1411354 - DNA, 25 bp, Homo sapien
tgtacacaacaggattaagtagtgg

SEQ ID NO: 1411355 - DNA, 25 bp, Homo sapien
tccggccctcaggagaggtgacctt

SEQ ID NO: 1411356 - DNA, 25 bp, Homo sapien
taaagacggtgtatgtcactgaaat

SEQ ID NO: 1411357 - DNA, 25 bp, Homo sapien
tcatgtagagtggtatcaacacagg

SEQ ID NO: 1411358 - DNA, 25 bp, Homo sapien
taatgggccacctgtttatcacaaa

SEQ ID NO: 1411359 - DNA, 25 bp, Homo sapien
gaaataatgggccacctgtttatca

SEQ ID NO: 1411360 - DNA, 25 bp, Homo sapien
ctgggtggatatcacagaaataatg

SEQ ID NO: 1411361 - DNA, 25 bp, Homo sapien
tcacagaaataatgggccacctgtt

SEQ ID NO: 1411362 - DNA, 25 bp, Homo sapien
gatgaaatctgaactatggccacaa

SEQ ID NO: 1411363 - DNA, 25 bp, Homo sapien
tatggccacaagcagcccaacactg

SEQ ID NO: 1411364 - DNA, 25 bp, Homo sapien
aatctgaactatggccacaagcagc

SEQ ID NO: 1411365 - DNA, 25 bp, Homo sapien
tgaactatggccacaagcagcccaa

SEQ ID NO: 1411366 - DNA, 25 bp, Homo sapien
tttcttgttcatgatgatcatgtac

SEQ ID NO: 1411367 - DNA, 25 bp, Homo sapien
actttcttgttcatgatgatcatgt

SEQ ID NO: 1411368 - DNA, 25 bp, Homo sapien
ctttcttgttcatgatgatcatgta

SEQ ID NO: 1411369 - DNA, 25 bp, Homo sapien
tggccacatagcgatcataccccat

SEQ ID NO: 1411370 - DNA, 25 bp, Homo sapien
ggccacatagcgatcataccccatt

SEQ ID NO: 1411371 - DNA, 25 bp, Homo sapien
gccacatagcgatcataccccattg

SEQ ID NO: 1411372 - DNA, 25 bp, Homo sapien
gatggccacatagcgatcatacccc

SEQ ID NO: 1411373 - DNA, 25 bp, Homo sapien
cagaaagcagttgttgatggccaag

SEQ ID NO: 1411374 - DNA, 25 bp, Homo sapien
cccaaagagataggttggcttagac

SEQ ID NO: 1411375 - DNA, 25 bp, Homo sapien
tacaatgactaatgtgtagacagtc

SEQ ID NO: 1411376 - DNA, 25 bp, Homo sapien
agagactggagagcatccgtggtac

SEQ ID NO: 1411377 - DNA, 25 bp, Homo sapien
tgaagtggaaagcatactaacaaag

SEQ ID NO: 1411378 - DNA, 25 bp, Homo sapien
ctgaagtggaaagcatactaacaaa

SEQ ID NO: 1411379 - DNA, 25 bp, Homo sapien
gaagtggaaagcatactaacaaaga

SEQ ID NO: 1411380 - DNA, 25 bp, Homo sapien
aagtggaaagcatactaacaaagaa

SEQ ID NO: 1411381 - DNA, 25 bp, Homo sapien
gacgatcaatgctgataattgtcac

SEQ ID NO: 1411382 - DNA, 25 bp, Homo sapien
aacaaactcccttatcactgtgtgg

SEQ ID NO: 1411383 - DNA, 25 bp, Homo sapien
gagggtaagcttgtgttcatgaaag

SEQ ID NO: 1411384 - DNA, 25 bp, Homo sapien
tgccagccagggttaaaagacacaa

SEQ ID NO: 1411385 - DNA, 25 bp, Homo sapien
tgcactttgtcagtatgttgaggag

SEQ ID NO: 1411386 - DNA, 25 bp, Homo sapien
ccctcttctcattaaatgggaaatg

SEQ ID NO: 1411387 - DNA, 25 bp, Homo sapien
agtacttgaagaaagactctgatct

SEQ ID NO: 1411388 - DNA, 25 bp, Homo sapien
gagtggagactcagacaaatggtgc

SEQ ID NO: 1411389 - DNA, 25 bp, Homo sapien
tcaggaatatggacagttcacgtct

SEQ ID NO: 1411390 - DNA, 25 bp, Homo sapien
caggaatatggacagttcacgtctg

SEQ ID NO: 1411391 - DNA, 25 bp, Homo sapien
gaatatggacagttcacgtctgtgt

SEQ ID NO: 1411392 - DNA, 25 bp, Homo sapien
tatggacagttcacgtctgtgttct

SEQ ID NO: 1411393 - DNA, 25 bp, Homo sapien
ttcacaacctctcttcattaaggag

SEQ ID NO: 1411394 - DNA, 25 bp, Homo sapien
tttgccccacggctctgtgcagagc

SEQ ID NO: 1411395 - DNA, 25 bp, Homo sapien
tcttcattaaggagacagagttttt

SEQ ID NO: 1411396 - DNA, 25 bp, Homo sapien
gtacatatttataaacgcaaaggaa

SEQ ID NO: 1411397 - DNA, 25 bp, Homo sapien
ggctgtacacaacagggttcagtag

SEQ ID NO: 1411398 - DNA, 25 bp, Homo sapien
taggggagtgatgagtgtaggtcac

SEQ ID NO: 1411399 - DNA, 25 bp, Homo sapien
acacaacagggttcagtaggggagt

SEQ ID NO: 1411400 - DNA, 25 bp, Homo sapien
gtacacaacagggttcagtagggga

SEQ ID NO: 1411401 - DNA, 25 bp, Homo sapien
ctctgggacttaggcttcaggtaga

SEQ ID NO: 1411402 - DNA, 25 bp, Homo sapien
ggaactctgggacttaggcttcagg

SEQ ID NO: 1411403 - DNA, 25 bp, Homo sapien
gagatgagtctgtcctgtcccaggg

SEQ ID NO: 1411404 - DNA, 25 bp, Homo sapien
cctgtcccagggaactctgggactt

SEQ ID NO: 1411405 - DNA, 25 bp, Homo sapien
gcgcaggtggcaaaggccttcttct

SEQ ID NO: 1411406 - DNA, 25 bp, Homo sapien
ctgtgaggtgggaggcgcaggtggc

SEQ ID NO: 1411407 - DNA, 25 bp, Homo sapien
tgtgaggtgggaggcgcaggtggca

SEQ ID NO: 1411408 - DNA, 25 bp, Homo sapien
gaggcgcaggtggcaaaggccttct

SEQ ID NO: 1411409 - DNA, 25 bp, Homo sapien
gaccaggcccataggtagaacaagg

SEQ ID NO: 1411410 - DNA, 25 bp, Homo sapien
acaaaggcatcacagaatggcaggc

SEQ ID NO: 1411411 - DNA, 25 bp, Homo sapien
gctgaggcaatcttaagaatggtgg

SEQ ID NO: 1411412 - DNA, 25 bp, Homo sapien
tccagaggccagttggatacaggcc

SEQ ID NO: 1411413 - DNA, 25 bp, Homo sapien
tctcagagatggatagcatgcacag

SEQ ID NO: 1411414 - DNA, 25 bp, Homo sapien
aagacaagtttgtgctgccgcctga

SEQ ID NO: 1411415 - DNA, 25 bp, Homo sapien
gatggtccaggcgaataatggtcat

SEQ ID NO: 1411416 - DNA, 25 bp, Homo sapien
aatcacattgccagagagagtcagc

SEQ ID NO: 1411417 - DNA, 25 bp, Homo sapien
caaggtaggtctaggtttgaaagag

SEQ ID NO: 1411418 - DNA, 25 bp, Homo sapien
tggaagcatagaaggctaccctggg

SEQ ID NO: 1411419 - DNA, 25 bp, Homo sapien
tttggaagcatagaaggctaccctg

SEQ ID NO: 1411420 - DNA, 25 bp, Homo sapien
tctttggaagcatagaaggctaccc

SEQ ID NO: 1411421 - DNA, 25 bp, Homo sapien
aagcatagaaggctaccctgggacc

SEQ ID NO: 1411422 - DNA, 25 bp, Homo sapien
agacctcattactaaggcagcacat

SEQ ID NO: 1411423 - DNA, 25 bp, Homo sapien
gataatggcagaagacacaatccaa

SEQ ID NO: 1411424 - DNA, 25 bp, Homo sapien
cagcagagcatctggagacctcatt

SEQ ID NO: 1411425 - DNA, 25 bp, Homo sapien
agaagacacaatccaaacagcagag

SEQ ID NO: 1411426 - DNA, 25 bp, Homo sapien
gagtgcttatccctgtgccaaaacc

SEQ ID NO: 1411427 - DNA, 25 bp, Homo sapien
atcaatcaggaatgccagccccgtt

SEQ ID NO: 1411428 - DNA, 25 bp, Homo sapien
tgctgttttgtaccttaaggaatca

SEQ ID NO: 1411429 - DNA, 25 bp, Homo sapien
gactagtctgtgctttccatcaatc

SEQ ID NO: 1411430 - DNA, 25 bp, Homo sapien
tgtttatacagccagatcttgagaa

SEQ ID NO: 1411431 - DNA, 25 bp, Homo sapien
tcaagcatagatcccagagacactg

SEQ ID NO: 1411432 - DNA, 25 bp, Homo sapien
taagcagagttagaggcatcaagca

SEQ ID NO: 1411433 - DNA, 25 bp, Homo sapien
cctacatactcagtgctaagcagag

SEQ ID NO: 1411434 - DNA, 25 bp, Homo sapien
ttctttcatatcatgcactgaggag

SEQ ID NO: 1411435 - DNA, 25 bp, Homo sapien
cactgaggagttgaagcacagccat

SEQ ID NO: 1411436 - DNA, 25 bp, Homo sapien
catatcatgcactgaggagttgaag

SEQ ID NO: 1411437 - DNA, 25 bp, Homo sapien
cagccatgcaccaatttcttataaa

SEQ ID NO: 1411438 - DNA, 25 bp, Homo sapien
tagcgcacaatccaacaatacctag

SEQ ID NO: 1411439 - DNA, 25 bp, Homo sapien
gtctgtcgtccacatccacatagcg

SEQ ID NO: 1411440 - DNA, 25 bp, Homo sapien
taggatgtgaactaatacaccatgc

SEQ ID NO: 1411441 - DNA, 25 bp, Homo sapien
tacctagtgactgatcgtttcccat

SEQ ID NO: 1411442 - DNA, 25 bp, Homo sapien
ttcctaccctcagttgaagcaatct

SEQ ID NO: 1411443 - DNA, 25 bp, Homo sapien
gaagcaatcttaaggatggtgtaga

SEQ ID NO: 1411444 - DNA, 25 bp, Homo sapien
gatcagggcaatatgtaggacaagg

SEQ ID NO: 1411445 - DNA, 25 bp, Homo sapien
ggtcataggagataaagatcagggc

SEQ ID NO: 1411446 - DNA, 25 bp, Homo sapien
cctcagtgacccagatcccagccag

SEQ ID NO: 1411447 - DNA, 25 bp, Homo sapien
cgctgcatgaagctgaccaaggatt

SEQ ID NO: 1411448 - DNA, 25 bp, Homo sapien
tcttttgactgctcaccgattaaac

SEQ ID NO: 1411449 - DNA, 25 bp, Homo sapien
tttgactgctcaccgattaaaccca

SEQ ID NO: 1411450 - DNA, 25 bp, Homo sapien
agctgaccaaggatttgcataagga

SEQ ID NO: 1411451 - DNA, 25 bp, Homo sapien
gcttattttaccaaatgacttcagt

SEQ ID NO: 1411452 - DNA, 25 bp, Homo sapien
aggaaagaggcttagttgactgact

SEQ ID NO: 1411453 - DNA, 25 bp, Homo sapien
agaggcttagttgactgactcacag

SEQ ID NO: 1411454 - DNA, 25 bp, Homo sapien
gatgaaaagaggaatcttgaagctt

SEQ ID NO: 1411455 - DNA, 25 bp, Homo sapien
caggcctaagtatggaacagtcttt

SEQ ID NO: 1411456 - DNA, 25 bp, Homo sapien
caaaatgtagcctgtccacattttc

SEQ ID NO: 1411457 - DNA, 25 bp, Homo sapien
tatggaacagtctttatcactttcc

SEQ ID NO: 1411458 - DNA, 25 bp, Homo sapien
agaggttgggaaacttcaagttgat

SEQ ID NO: 1411459 - DNA, 25 bp, Homo sapien
gctcacggtgtactcttctaaacag

SEQ ID NO: 1411460 - DNA, 25 bp, Homo sapien
tcatctcattgtgtcagaagccaag

SEQ ID NO: 1411461 - DNA, 25 bp, Homo sapien
gaaacacttatattatgctcacggt

SEQ ID NO: 1411462 - DNA, 25 bp, Homo sapien
cacaggccaactaggtgaaggacac

SEQ ID NO: 1411463 - DNA, 25 bp, Homo sapien
gacagctctacttatccttccaatg

SEQ ID NO: 1411464 - DNA, 25 bp, Homo sapien
cactgccaagttctctttagccatg

SEQ ID NO: 1411465 - DNA, 25 bp, Homo sapien
tcaaaggacagctctacttatcctt

SEQ ID NO: 1411466 - DNA, 25 bp, Homo sapien
tggtaaggtctccattaactctggc

SEQ ID NO: 1411467 - DNA, 25 bp, Homo sapien
acagtagttcccagaacaatgacaa

SEQ ID NO: 1411468 - DNA, 25 bp, Homo sapien
taaaggacaaatccttagagtatgt

SEQ ID NO: 1411469 - DNA, 25 bp, Homo sapien
cacattgattagaacagtagttccc

SEQ ID NO: 1411470 - DNA, 25 bp, Homo sapien
tgtatgttgacttctctcacattga

SEQ ID NO: 1411471 - DNA, 25 bp, Homo sapien
aaaactgctgcaggccataaactca

SEQ ID NO: 1411472 - DNA, 25 bp, Homo sapien
ggcaaaactgctgcaggccataaac

SEQ ID NO: 1411473 - DNA, 25 bp, Homo sapien
tcagatggcaaaactgctgcaggcc

SEQ ID NO: 1411474 - DNA, 25 bp, Homo sapien
gatggcaaaactgctgcaggccata

SEQ ID NO: 1411475 - DNA, 25 bp, Homo sapien
tcaagtcgtcttacaaagacagggt

SEQ ID NO: 1411476 - DNA, 25 bp, Homo sapien
aaagcccacatcacattcacctctg

SEQ ID NO: 1411477 - DNA, 25 bp, Homo sapien
ggccaaatctcttcaagtcgtctta

SEQ ID NO: 1411478 - DNA, 25 bp, Homo sapien
gggtgatcaactcccatgcctgtgg

SEQ ID NO: 1411479 - DNA, 25 bp, Homo sapien
agatttgactgtcagagagttcagg

SEQ ID NO: 1411480 - DNA, 25 bp, Homo sapien
gcacagaaacaagtagtcttaatcc

SEQ ID NO: 1411481 - DNA, 25 bp, Homo sapien
atcccctaaccagacaagctcaaag

SEQ ID NO: 1411482 - DNA, 25 bp, Homo sapien
aaccagacaagctcaaagatttgac

SEQ ID NO: 1411483 - DNA, 25 bp, Homo sapien
tttctgcccacaactctgcataggg

SEQ ID NO: 1411484 - DNA, 25 bp, Homo sapien
caactctgcatagggcatcctttac

SEQ ID NO: 1411485 - DNA, 25 bp, Homo sapien
taagaaatatttctgcccacaactc

SEQ ID NO: 1411486 - DNA, 25 bp, Homo sapien
ccacaactctgcatagggcatcctt

SEQ ID NO: 1411487 - DNA, 25 bp, Homo sapien
ggtgtacgtcactgagagaacaagg

SEQ ID NO: 1411488 - DNA, 25 bp, Homo sapien
aactttctgacttcggcttgaggta

SEQ ID NO: 1411489 - DNA, 25 bp, Homo sapien
gagataaatatcaggcctatgggca

SEQ ID NO: 1411490 - DNA, 25 bp, Homo sapien
tctcagactgtaaacaacagggttc

SEQ ID NO: 1411491 - DNA, 25 bp, Homo sapien
agaagtggtctaccactgtgccaca

SEQ ID NO: 1411492 - DNA, 25 bp, Homo sapien
aaagaagtggtctaccactgtgcca

SEQ ID NO: 1411493 - DNA, 25 bp, Homo sapien
ggtatcaatgcaagaaagtttcatg

SEQ ID NO: 1411494 - DNA, 25 bp, Homo sapien
cattgatagtggtatcaatgcaaga

SEQ ID NO: 1411495 - DNA, 25 bp, Homo sapien
tgaacatggctgtcacatggagaac

SEQ ID NO: 1411496 - DNA, 25 bp, Homo sapien
tgtgtacaccgtctctgaactagcc

SEQ ID NO: 1411497 - DNA, 25 bp, Homo sapien
ggctcaaaagcattcgtggcacaat

SEQ ID NO: 1411498 - DNA, 25 bp, Homo sapien
atttgtgtagcacagcctgccaagg

SEQ ID NO: 1411499 - DNA, 25 bp, Homo sapien
tagcctcgtggaagccattgctcag

SEQ ID NO: 1411500 - DNA, 25 bp, Homo sapien
gctcatggaagaacacagggtcctc

SEQ ID NO: 1411501 - DNA, 25 bp, Homo sapien
ggcgcagggctggaaaattactcac

SEQ ID NO: 1411502 - DNA, 25 bp, Homo sapien
cattgctcagacaagtagggaggtc

SEQ ID NO: 1411503 - DNA, 25 bp, Homo sapien
gacagctctagccaagacctcttgt

SEQ ID NO: 1411504 - DNA, 25 bp, Homo sapien
gatgacaagagtagcgcaagacagc

SEQ ID NO: 1411505 - DNA, 25 bp, Homo sapien
catggcatagttgacaagatgacaa

SEQ ID NO: 1411506 - DNA, 25 bp, Homo sapien
tgtagctgcacgagcaaggaatctg

SEQ ID NO: 1411507 - DNA, 25 bp, Homo sapien
tatcgaaaagttcccggctccagtg

SEQ ID NO: 1411508 - DNA, 25 bp, Homo sapien
ggtcttgactcaacgagagcacttg

SEQ ID NO: 1411509 - DNA, 25 bp, Homo sapien
tggtcaaagcaactggatactagat

SEQ ID NO: 1411510 - DNA, 25 bp, Homo sapien
tttggtgaaaaagggtctgcgacag

SEQ ID NO: 1411511 - DNA, 25 bp, Homo sapien
gggtttctcctaacaataatcaggc

SEQ ID NO: 1411512 - DNA, 25 bp, Homo sapien
taatcaggctgtactgtaatccatc

SEQ ID NO: 1411513 - DNA, 25 bp, Homo sapien
gcaactacttgcatagatctcagga

SEQ ID NO: 1411514 - DNA, 25 bp, Homo sapien
caggatacagtgtttgtgacaggtt

SEQ ID NO: 1411515 - DNA, 25 bp, Homo sapien
catgcaggagaaatgatagcttccc

SEQ ID NO: 1411516 - DNA, 25 bp, Homo sapien
cagtttccctgcatctagtgggtcc

SEQ ID NO: 1411517 - DNA, 25 bp, Homo sapien
ttcctgggcttatgtacctgaccca

SEQ ID NO: 1411518 - DNA, 25 bp, Homo sapien
tccaattcaaatgtataccacaggt

SEQ ID NO: 1411519 - DNA, 25 bp, Homo sapien
ggacttaaacaccacactgtcaaca

SEQ ID NO: 1411520 - DNA, 25 bp, Homo sapien
gggacttaaacaccacactgtcaac

SEQ ID NO: 1411521 - DNA, 25 bp, Homo sapien
tgggggacttaaacaccacactgtc

SEQ ID NO: 1411522 - DNA, 25 bp, Homo sapien
aatgggggacttaaacaccacactg

SEQ ID NO: 1411523 - DNA, 25 bp, Homo sapien
acagaaacctgtcaatgacagccag

SEQ ID NO: 1411524 - DNA, 25 bp, Homo sapien
aaacccatgcatgtgccagagctga

SEQ ID NO: 1411525 - DNA, 25 bp, Homo sapien
aacctgtcaatgacagccagagaag

SEQ ID NO: 1411526 - DNA, 25 bp, Homo sapien
agccatggtaaccacttctaggaga

SEQ ID NO: 1411527 - DNA, 25 bp, Homo sapien
cctccaggaagtatgtcacgatgca

SEQ ID NO: 1411528 - DNA, 25 bp, Homo sapien
caggaagtatgtcacgatgcaatgg

SEQ ID NO: 1411529 - DNA, 25 bp, Homo sapien
cacctccaggaagtatgtcacgatg

SEQ ID NO: 1411530 - DNA, 25 bp, Homo sapien
gtatgtcacgatgcaatggagaaat

SEQ ID NO: 1411531 - DNA, 25 bp, Homo sapien
ggttttatgtcatactgtttaccca

SEQ ID NO: 1411532 - DNA, 25 bp, Homo sapien
gttttatgtcatactgtttacccat

SEQ ID NO: 1411533 - DNA, 25 bp, Homo sapien
cacttcaatgtctcccacaaggact

SEQ ID NO: 1411534 - DNA, 25 bp, Homo sapien
gttcccacagagcattgcttttcca

SEQ ID NO: 1411535 - DNA, 25 bp, Homo sapien
ataatgcttatctctgttcccacag

SEQ ID NO: 1411536 - DNA, 25 bp, Homo sapien
tcgacccagagctcagtaatccctg

SEQ ID NO: 1411537 - DNA, 25 bp, Homo sapien
ctattgtgcttatctggtcacaaag

SEQ ID NO: 1411538 - DNA, 25 bp, Homo sapien
tgctgtctttgggaaacacgagagc

SEQ ID NO: 1411539 - DNA, 25 bp, Homo sapien
ttgctgtctttgggaaacacgagag

SEQ ID NO: 1411540 - DNA, 25 bp, Homo sapien
tttctattgtgcttatctggtcaca

SEQ ID NO: 1411541 - DNA, 25 bp, Homo sapien
agtgacatccgggaagcaaaattgt

SEQ ID NO: 1411542 - DNA, 25 bp, Homo sapien
tggtacagtagctctgcagtgacat

SEQ ID NO: 1411543 - DNA, 25 bp, Homo sapien
gttctaccctccctagcgatgactt

SEQ ID NO: 1411544 - DNA, 25 bp, Homo sapien
aaattgttctgtctctgttctaccc

SEQ ID NO: 1411545 - DNA, 25 bp, Homo sapien
aagagagctgaatcacattgactga

SEQ ID NO: 1411546 - DNA, 25 bp, Homo sapien
ctgaatcacattgactgaaatgctc

SEQ ID NO: 1411547 - DNA, 25 bp, Homo sapien
gagctgaatcacattgactgaaatg

SEQ ID NO: 1411548 - DNA, 25 bp, Homo sapien
gagagctgaatcacattgactgaaa

SEQ ID NO: 1411549 - DNA, 25 bp, Homo sapien
cattcttggaatgattgagacttta

SEQ ID NO: 1411550 - DNA, 25 bp, Homo sapien
cactcccttttccttcatatggttc

SEQ ID NO: 1411551 - DNA, 25 bp, Homo sapien
tggttcttgtgacccttctattaag

SEQ ID NO: 1411552 - DNA, 25 bp, Homo sapien
gaggatgtcatgtccctccaattta

SEQ ID NO: 1411553 - DNA, 25 bp, Homo sapien
catcttcaatatctcccaccaagga

SEQ ID NO: 1411554 - DNA, 25 bp, Homo sapien
tatctaatctcacaaagtcccacat

SEQ ID NO: 1411555 - DNA, 25 bp, Homo sapien
tgttcacatcttcaatatctcccac

SEQ ID NO: 1411556 - DNA, 25 bp, Homo sapien
tcctcctcatcatgggcttcccatc

SEQ ID NO: 1411557 - DNA, 25 bp, Homo sapien
ccatttgatatgcaggaagccccat

SEQ ID NO: 1411558 - DNA, 25 bp, Homo sapien
tgaacctggcagcagatccatggat

SEQ ID NO: 1411559 - DNA, 25 bp, Homo sapien
tctacaaagaacttgaacccgctgg

SEQ ID NO: 1411560 - DNA, 25 bp, Homo sapien
gagaagcttcaactgctgccaacca

SEQ ID NO: 1411561 - DNA, 25 bp, Homo sapien
tgtggcaaacaagatggctactggt

SEQ ID NO: 1411562 - DNA, 25 bp, Homo sapien
tctggttccagacaaggctgattca

SEQ ID NO: 1411563 - DNA, 25 bp, Homo sapien
tattggcttatagacctgggcagtc

SEQ ID NO: 1411564 - DNA, 25 bp, Homo sapien
caggttcacgtcctctcagcttgga

SEQ ID NO: 1411565 - DNA, 25 bp, Homo sapien
ccaactatcctccagatagggagct

SEQ ID NO: 1411566 - DNA, 25 bp, Homo sapien
tgctaggaacacgtaactatccaac

SEQ ID NO: 1411567 - DNA, 25 bp, Homo sapien
cttgtggcctgggtatattgggaat

SEQ ID NO: 1411568 - DNA, 25 bp, Homo sapien
tgtggttcacgtccactcttgtggc

SEQ ID NO: 1411569 - DNA, 25 bp, Homo sapien
gcatagttaacgagctcccagacca

SEQ ID NO: 1411570 - DNA, 25 bp, Homo sapien
gattctgagactgaagagccctgtg

SEQ ID NO: 1411571 - DNA, 25 bp, Homo sapien
gactgcgtggtattgctgggcttcc

SEQ ID NO: 1411572 - DNA, 25 bp, Homo sapien
gggcccagcagttctatgacatgat

SEQ ID NO: 1411573 - DNA, 25 bp, Homo sapien
cttcatacttcagtgcccgccagtt

SEQ ID NO: 1411574 - DNA, 25 bp, Homo sapien
tgcccgccagttcaggacattagga

SEQ ID NO: 1411575 - DNA, 25 bp, Homo sapien
gggtttggtgaacacttcgccttgc

SEQ ID NO: 1411576 - DNA, 25 bp, Homo sapien
tggtgaacacttcgccttgcacttc

SEQ ID NO: 1411577 - DNA, 25 bp, Homo sapien
ggcccgccaagatagatggtgttaa

SEQ ID NO: 1411578 - DNA, 25 bp, Homo sapien
aagggcccgccaagatagatggtgt

SEQ ID NO: 1411579 - DNA, 25 bp, Homo sapien
tgaagggcccgccaagatagatggt

SEQ ID NO: 1411580 - DNA, 25 bp, Homo sapien
cgccaagatagatggtgttaatctc

SEQ ID NO: 1411581 - DNA, 25 bp, Homo sapien
ctggtgacagcacaaagtcccacat

SEQ ID NO: 1411582 - DNA, 25 bp, Homo sapien
caaagttcccaccgaaggaatcctg

SEQ ID NO: 1411583 - DNA, 25 bp, Homo sapien
agatgatgcttgcttctgcccccac

SEQ ID NO: 1411584 - DNA, 25 bp, Homo sapien
tcacatttccaatgtctcccaccag

SEQ ID NO: 1411585 - DNA, 25 bp, Homo sapien
agaactccacgatccctgaggcgga

SEQ ID NO: 1411586 - DNA, 25 bp, Homo sapien
gacttcaggaacctcgaataatatt

SEQ ID NO: 1411587 - DNA, 25 bp, Homo sapien
tgtactggagctactgtgacttcag

SEQ ID NO: 1411588 - DNA, 25 bp, Homo sapien
cactgtaaaactgtatcctatatcc

SEQ ID NO: 1411589 - DNA, 25 bp, Homo sapien
gaataatatttcagacccacccact

SEQ ID NO: 1411590 - DNA, 25 bp, Homo sapien
gtctcttggtggcatacgagaaaat

SEQ ID NO: 1411591 - DNA, 25 bp, Homo sapien
ctcttggtggcatacgagaaaatac

SEQ ID NO: 1411592 - DNA, 25 bp, Homo sapien
cttggtggcatacgagaaaatactg

SEQ ID NO: 1411593 - DNA, 25 bp, Homo sapien
ggtggcatacgagaaaatactgtac

SEQ ID NO: 1411594 - DNA, 25 bp, Homo sapien
cgttaacggtgctttgagggataca

SEQ ID NO: 1411595 - DNA, 25 bp, Homo sapien
cataggaagtatccgactctttggg

SEQ ID NO: 1411596 - DNA, 25 bp, Homo sapien
tcgaggacagttccgtgtagaagtg

SEQ ID NO: 1411597 - DNA, 25 bp, Homo sapien
tgtagaagtggaggcacacagtgaa

SEQ ID NO: 1411598 - DNA, 25 bp, Homo sapien
atgagagaggctggtcaagaccaag

SEQ ID NO: 1411599 - DNA, 25 bp, Homo sapien
tctggccaaaagcatgagagaggct

SEQ ID NO: 1411600 - DNA, 25 bp, Homo sapien
gaggctggtcaagaccaagaaacac

SEQ ID NO: 1411601 - DNA, 25 bp, Homo sapien
ctgtctggccaaaagcatgagagag

SEQ ID NO: 1411602 - DNA, 25 bp, Homo sapien
tggaaaagatgtattcggctgaaag

SEQ ID NO: 1411603 - DNA, 25 bp, Homo sapien
gctgccagtgatacaagggcctgaa

SEQ ID NO: 1411604 - DNA, 25 bp, Homo sapien
caagggcctgaattcactcctttgg

SEQ ID NO: 1411605 - DNA, 25 bp, Homo sapien
tcctttggaaaagatgtattcggct

SEQ ID NO: 1411606 - DNA, 25 bp, Homo sapien
tcctttctgagctttcgttagaacc

SEQ ID NO: 1411607 - DNA, 25 bp, Homo sapien
tctgagctttcgttagaacccatgt

SEQ ID NO: 1411608 - DNA, 25 bp, Homo sapien
ctttctgagctttcgttagaaccca

SEQ ID NO: 1411609 - DNA, 25 bp, Homo sapien
ttctgagctttcgttagaacccatg

SEQ ID NO: 1411610 - DNA, 25 bp, Homo sapien
gaagctcattcctctcaagaacttg

SEQ ID NO: 1411611 - DNA, 25 bp, Homo sapien
acttgcttagatcccctgaagtgtt

SEQ ID NO: 1411612 - DNA, 25 bp, Homo sapien
ttaatgaagctcattcctctcaaga

SEQ ID NO: 1411613 - DNA, 25 bp, Homo sapien
aagaacttgcttagatcccctgaag

SEQ ID NO: 1411614 - DNA, 25 bp, Homo sapien
tccaccatgctaacaccagggaatg

SEQ ID NO: 1411615 - DNA, 25 bp, Homo sapien
gctaaaaggataaggaggcgctgaa

SEQ ID NO: 1411616 - DNA, 25 bp, Homo sapien
tgtccttcgataggacccttccctc

SEQ ID NO: 1411617 - DNA, 25 bp, Homo sapien
ggcgctgaacccagagtcaccatgg

SEQ ID NO: 1411618 - DNA, 25 bp, Homo sapien
ctgacttttgttcacttttggaata

SEQ ID NO: 1411619 - DNA, 25 bp, Homo sapien
ttcacttttggaataaagaaggagc

SEQ ID NO: 1411620 - DNA, 25 bp, Homo sapien
gaaggagcagcagaaattattaccc

SEQ ID NO: 1411621 - DNA, 25 bp, Homo sapien
ctgtgtgaaaaactgacttttgttc

SEQ ID NO: 1411622 - DNA, 25 bp, Homo sapien
gaaacaactggaagcaagtcagaag

SEQ ID NO: 1411623 - DNA, 25 bp, Homo sapien
tgactgcttcataagccatgtatcc

SEQ ID NO: 1411624 - DNA, 25 bp, Homo sapien
catgtatcccaacataggtgtcctg

SEQ ID NO: 1411625 - DNA, 25 bp, Homo sapien
gaaggagcaccagccttaaacctta

SEQ ID NO: 1411626 - DNA, 25 bp, Homo sapien
aagacctagtcttcccggggcaatg

SEQ ID NO: 1411627 - DNA, 25 bp, Homo sapien
gcattatccccaagacctagtcttc

SEQ ID NO: 1411628 - DNA, 25 bp, Homo sapien
gtcttcccggggcaatggtgagcac

SEQ ID NO: 1411629 - DNA, 25 bp, Homo sapien
tgccccgcattatccccaagaccta

SEQ ID NO: 1411630 - DNA, 25 bp, Homo sapien
ttctccaaatagtgatcaatttgtc

SEQ ID NO: 1411631 - DNA, 25 bp, Homo sapien
tctcttctccaaatagtgatcaatt

SEQ ID NO: 1411632 - DNA, 25 bp, Homo sapien
tcttctccaaatagtgatcaatttg

SEQ ID NO: 1411633 - DNA, 25 bp, Homo sapien
ctcttctccaaatagtgatcaattt

SEQ ID NO: 1411634 - DNA, 25 bp, Homo sapien
ggtctccacattctgttctgcaatc

SEQ ID NO: 1411635 - DNA, 25 bp, Homo sapien
ggggacaagcctgggtctccacatt

SEQ ID NO: 1411636 - DNA, 25 bp, Homo sapien
cattctgttctgcaatcctgtggtc

SEQ ID NO: 1411637 - DNA, 25 bp, Homo sapien
tccacattctgttctgcaatcctgt

SEQ ID NO: 1411638 - DNA, 25 bp, Homo sapien
caggtgaggcaaatcagaaagaaac

SEQ ID NO: 1411639 - DNA, 25 bp, Homo sapien
gggatccccaggtgaggcaaatcag

SEQ ID NO: 1411640 - DNA, 25 bp, Homo sapien
ctggaggccacaagggaagtcaatg

SEQ ID NO: 1411641 - DNA, 25 bp, Homo sapien
gccacaagggaagtcaatgggatcc

SEQ ID NO: 1411642 - DNA, 25 bp, Homo sapien
ccagggtccagtgcaataaatcctt

SEQ ID NO: 1411643 - DNA, 25 bp, Homo sapien
tcctctaaagacacaagttttatag

SEQ ID NO: 1411644 - DNA, 25 bp, Homo sapien
tttaccactatctcctctaaagaca

SEQ ID NO: 1411645 - DNA, 25 bp, Homo sapien
ctgggttccgcatctacccaaggaa

SEQ ID NO: 1411646 - DNA, 25 bp, Homo sapien
caagataccatgtgtgcaaaagtgt

SEQ ID NO: 1411647 - DNA, 25 bp, Homo sapien
tcaggtggagggtcaaatgtacaag

SEQ ID NO: 1411648 - DNA, 25 bp, Homo sapien
tacaccaatgtgtctcggaatacca

SEQ ID NO: 1411649 - DNA, 25 bp, Homo sapien
tacttaggtgctaggcctggagacg

SEQ ID NO: 1411650 - DNA, 25 bp, Homo sapien
ctgaacgaagttgaagacaactcag

SEQ ID NO: 1411651 - DNA, 25 bp, Homo sapien
gctgaacgaagttgaagacaactca

SEQ ID NO: 1411652 - DNA, 25 bp, Homo sapien
ctgcagctgaacgaagttgaagaca

SEQ ID NO: 1411653 - DNA, 25 bp, Homo sapien
ctccgctgtgccagaacaggcccca

SEQ ID NO: 1411654 - DNA, 25 bp, Homo sapien
ggcctggttgctctctgccggcttc

SEQ ID NO: 1411655 - DNA, 25 bp, Homo sapien
ctctctgccggcttcgccctgacct

SEQ ID NO: 1411656 - DNA, 25 bp, Homo sapien
cctccgctgtgccagaacaggcccc

SEQ ID NO: 1411657 - DNA, 25 bp, Homo sapien
taagtcaacgagcatgggcatcccc

SEQ ID NO: 1411658 - DNA, 25 bp, Homo sapien
ctttggtaagtcaacgagcatgggc

SEQ ID NO: 1411659 - DNA, 25 bp, Homo sapien
ggtaagtcaacgagcatgggcatcc

SEQ ID NO: 1411660 - DNA, 25 bp, Homo sapien
gtaagtcaacgagcatgggcatccc

SEQ ID NO: 1411661 - DNA, 25 bp, Homo sapien
gagctcaagacaggtgtgtgcacct

SEQ ID NO: 1411662 - DNA, 25 bp, Homo sapien
tttgtggctggagctcaagacaggt

SEQ ID NO: 1411663 - DNA, 25 bp, Homo sapien
cccaattccagtgggtttgtggctg

SEQ ID NO: 1411664 - DNA, 25 bp, Homo sapien
ctttcccaattccagtgggtttgtg

SEQ ID NO: 1411665 - DNA, 25 bp, Homo sapien
gcccttttcaaattgactgtctctc

SEQ ID NO: 1411666 - DNA, 25 bp, Homo sapien
ttgaagaatcaactccattgtctga

SEQ ID NO: 1411667 - DNA, 25 bp, Homo sapien
accaaagcccttttcaaattgactg

SEQ ID NO: 1411668 - DNA, 25 bp, Homo sapien
tgaaaggcctgtgctctgagtaacc

SEQ ID NO: 1411669 - DNA, 25 bp, Homo sapien
tctctcttctctccatttcttctca

SEQ ID NO: 1411670 - DNA, 25 bp, Homo sapien
ctctcttctctccatttcttctcat

SEQ ID NO: 1411671 - DNA, 25 bp, Homo sapien
tctctctcttctctccatttcttct

SEQ ID NO: 1411672 - DNA, 25 bp, Homo sapien
ctctctcttctctccatttcttctc

SEQ ID NO: 1411673 - DNA, 25 bp, Homo sapien
gctaagcaacagtgggcgtttctaa

SEQ ID NO: 1411674 - DNA, 25 bp, Homo sapien
ggcacctcaggcacaaaagttaagg

SEQ ID NO: 1411675 - DNA, 25 bp, Homo sapien
gagaagtaaggccatttcgcatcca

SEQ ID NO: 1411676 - DNA, 25 bp, Homo sapien
gcaacatgcctctagttcatccaag

SEQ ID NO: 1411677 - DNA, 25 bp, Homo sapien
gacaatatgaactgatgcctggact

SEQ ID NO: 1411678 - DNA, 25 bp, Homo sapien
gatagtagaaagctccatgcaggga

SEQ ID NO: 1411679 - DNA, 25 bp, Homo sapien
taaattgcagttgtagacaccgagg

SEQ ID NO: 1411680 - DNA, 25 bp, Homo sapien
tcaggtaatcagagttcatgggccc

SEQ ID NO: 1411681 - DNA, 25 bp, Homo sapien
gaaagggtactgaggcactctagaa

SEQ ID NO: 1411682 - DNA, 25 bp, Homo sapien
gagagtgaagaaccataaaacgcta

SEQ ID NO: 1411683 - DNA, 25 bp, Homo sapien
gagagaaagggtactgaggcactct

SEQ ID NO: 1411684 - DNA, 25 bp, Homo sapien
taaaacgctatgcagaaggaacatt

SEQ ID NO: 1411685 - DNA, 25 bp, Homo sapien
cttggacaaaggatcagcacagctg

SEQ ID NO: 1411686 - DNA, 25 bp, Homo sapien
tccctgttggtaacctggctttatc

SEQ ID NO: 1411687 - DNA, 25 bp, Homo sapien
caagattacctgaacagggtccatg

SEQ ID NO: 1411688 - DNA, 25 bp, Homo sapien
catggccactcaacctgtcagcttg

SEQ ID NO: 1411689 - DNA, 25 bp, Homo sapien
cctcagtccctaaaaatgatgtgga

SEQ ID NO: 1411690 - DNA, 25 bp, Homo sapien
tacagtcaggccacatgcctggtca

SEQ ID NO: 1411691 - DNA, 25 bp, Homo sapien
ggatctgacaatgagccctggtgga

SEQ ID NO: 1411692 - DNA, 25 bp, Homo sapien
aaagcccaggatctgacaatgagcc

SEQ ID NO: 1411693 - DNA, 25 bp, Homo sapien
ggaatcagtagtcaagcgaaaccct

SEQ ID NO: 1411694 - DNA, 25 bp, Homo sapien
aaatattgattgagggcgctgcatg

SEQ ID NO: 1411695 - DNA, 25 bp, Homo sapien
cttagcaacctcatttcgacagtgg

SEQ ID NO: 1411696 - DNA, 25 bp, Homo sapien
tttgtagcgtggtgcaccagggcct

SEQ ID NO: 1411697 - DNA, 25 bp, Homo sapien
ccttgagcaatagtttttgcatctg

SEQ ID NO: 1411698 - DNA, 25 bp, Homo sapien
ttgtggtcaggtgagagccctctcc

SEQ ID NO: 1411699 - DNA, 25 bp, Homo sapien
tgtggtcaggtgagagccctctcca

SEQ ID NO: 1411700 - DNA, 25 bp, Homo sapien
ctgggcagtcaggagaaggtagagc

SEQ ID NO: 1411701 - DNA, 25 bp, Homo sapien
tgggcagtcaggagaaggtagagct

SEQ ID NO: 1411702 - DNA, 25 bp, Homo sapien
gcagtcaggagaaggtagagctctc

SEQ ID NO: 1411703 - DNA, 25 bp, Homo sapien
gtcaggagaaggtagagctctcatc

SEQ ID NO: 1411704 - DNA, 25 bp, Homo sapien
cagctgctaatggagcatttattct

SEQ ID NO: 1411705 - DNA, 25 bp, Homo sapien
tgagggaagtctacaccagaggcca

SEQ ID NO: 1411706 - DNA, 25 bp, Homo sapien
ctgagggaagtctacaccagaggcc

SEQ ID NO: 1411707 - DNA, 25 bp, Homo sapien
agctgctaatggagcatttattctt

SEQ ID NO: 1411708 - DNA, 25 bp, Homo sapien
tatcctgggtctgaaggtagctgag

SEQ ID NO: 1411709 - DNA, 25 bp, Homo sapien
tagctgaggggcagtttatggacaa

SEQ ID NO: 1411710 - DNA, 25 bp, Homo sapien
ctgtatcctgggtctgaaggtagct

SEQ ID NO: 1411711 - DNA, 25 bp, Homo sapien
gtagctgaggggcagtttatggaca

SEQ ID NO: 1411712 - DNA, 25 bp, Homo sapien
tgcccatcctgctgaaatgcatcta

SEQ ID NO: 1411713 - DNA, 25 bp, Homo sapien
gcccatcctgctgaaatgcatctaa

SEQ ID NO: 1411714 - DNA, 25 bp, Homo sapien
gtcctccacacacccctctactgca

SEQ ID NO: 1411715 - DNA, 25 bp, Homo sapien
ctactgcacattcttcccaacctaa

SEQ ID NO: 1411716 - DNA, 25 bp, Homo sapien
ccacacacccctctactgcacattc

SEQ ID NO: 1411717 - DNA, 25 bp, Homo sapien
cctccacacacccctctactgcaca

SEQ ID NO: 1411718 - DNA, 25 bp, Homo sapien
gagtaatcatattgaactttacttc

SEQ ID NO: 1411719 - DNA, 25 bp, Homo sapien
gtaatcatattgaactttacttcat

SEQ ID NO: 1411720 - DNA, 25 bp, Homo sapien
agagtaatcatattgaactttactt

SEQ ID NO: 1411721 - DNA, 25 bp, Homo sapien
aatcatattgaactttacttcataa

SEQ ID NO: 1411722 - DNA, 25 bp, Homo sapien
tttcagcaacatacaaagactccct

SEQ ID NO: 1411723 - DNA, 25 bp, Homo sapien
gactccctagaccttcagagcacat

SEQ ID NO: 1411724 - DNA, 25 bp, Homo sapien
tcagcaacatacaaagactccctag

SEQ ID NO: 1411725 - DNA, 25 bp, Homo sapien
caaagactccctagaccttcagagc

SEQ ID NO: 1411726 - DNA, 25 bp, Homo sapien
tcagagctcagacctcacacacaga

SEQ ID NO: 1411727 - DNA, 25 bp, Homo sapien
agaacaattcgtccagacagacccc

SEQ ID NO: 1411728 - DNA, 25 bp, Homo sapien
tgcctccctacgcatttccttaggg

SEQ ID NO: 1411729 - DNA, 25 bp, Homo sapien
gaaggctcaggatcgccttcctccg

SEQ ID NO: 1411730 - DNA, 25 bp, Homo sapien
gaggccgttcttgcactgcaccggc

SEQ ID NO: 1411731 - DNA, 25 bp, Homo sapien
accggcccctcggcgcagtcagccg

SEQ ID NO: 1411732 - DNA, 25 bp, Homo sapien
ggcccctcggcgcagtcagccggct

SEQ ID NO: 1411733 - DNA, 25 bp, Homo sapien
aggccgttcttgcactgcaccggcc

SEQ ID NO: 1411734 - DNA, 25 bp, Homo sapien
ggaggggcccgcttcgcaggcggcg

SEQ ID NO: 1411735 - DNA, 25 bp, Homo sapien
cagggccacgtcctcggggccgccg

SEQ ID NO: 1411736 - DNA, 25 bp, Homo sapien
gaggcgcgtacttgcggcgcaggga

SEQ ID NO: 1411737 - DNA, 25 bp, Homo sapien
gccgcaggggggaggcgcgtacttg

SEQ ID NO: 1411738 - DNA, 25 bp, Homo sapien
gctggccttgcacccgggcgccacg

SEQ ID NO: 1411739 - DNA, 25 bp, Homo sapien
cccgctggccttgcacccgggcgcc

SEQ ID NO: 1411740 - DNA, 25 bp, Homo sapien
gaggtgggtgacgcggctgccgcgc

SEQ ID NO: 1411741 - DNA, 25 bp, Homo sapien
aggtgggtgacgcggctgccgcgcc

SEQ ID NO: 1411742 - DNA, 25 bp, Homo sapien
ggctgctccgcagcggggcgtgggc

SEQ ID NO: 1411743 - DNA, 25 bp, Homo sapien
gcgggcgggtgagcgggctgctccg

SEQ ID NO: 1411744 - DNA, 25 bp, Homo sapien
caggcgggcgggtgagcgggctgct

SEQ ID NO: 1411745 - DNA, 25 bp, Homo sapien
aacaggcgggcgggtgagcgggctg

SEQ ID NO: 1411746 - DNA, 25 bp, Homo sapien
gcagagccgggggctcttggcaacc

SEQ ID NO: 1411747 - DNA, 25 bp, Homo sapien
cagagccgggggctcttggcaacct

SEQ ID NO: 1411748 - DNA, 25 bp, Homo sapien
ggcagagccgggggctcttggcaac

SEQ ID NO: 1411749 - DNA, 25 bp, Homo sapien
cccttcctgggtcggcgaccctgca

SEQ ID NO: 1411750 - DNA, 25 bp, Homo sapien
gaccctgcagcggtcccggagccag

SEQ ID NO: 1411751 - DNA, 25 bp, Homo sapien
catcctccagacagggcttgtccac

SEQ ID NO: 1411752 - DNA, 25 bp, Homo sapien
ctgggtcggcgaccctgcagcggtc

SEQ ID NO: 1411753 - DNA, 25 bp, Homo sapien
ccctttctgatgtttcgcaggccca

SEQ ID NO: 1411754 - DNA, 25 bp, Homo sapien
tttctgatgtttcgcaggcccagaa

SEQ ID NO: 1411755 - DNA, 25 bp, Homo sapien
ctgatgtttcgcaggcccagaagaa

SEQ ID NO: 1411756 - DNA, 25 bp, Homo sapien
tctgatgtttcgcaggcccagaaga

SEQ ID NO: 1411757 - DNA, 25 bp, Homo sapien
gcactccgtggcgatggcgggcagg

SEQ ID NO: 1411758 - DNA, 25 bp, Homo sapien
gggcccagccggccggtggcaggca

SEQ ID NO: 1411759 - DNA, 25 bp, Homo sapien
ctccgtggcgatggcgggcagggtt

SEQ ID NO: 1411760 - DNA, 25 bp, Homo sapien
cccagcactccgtggcgatggcggg

SEQ ID NO: 1411761 - DNA, 25 bp, Homo sapien
gccgttgccgtagccgaaggcaccg

SEQ ID NO: 1411762 - DNA, 25 bp, Homo sapien
ctgatctcactagccaagtcgccgc

SEQ ID NO: 1411763 - DNA, 25 bp, Homo sapien
atctcactagccaagtcgccgcagg

SEQ ID NO: 1411764 - DNA, 25 bp, Homo sapien
gccgccgttgccgtagccgaaggca

SEQ ID NO: 1411765 - DNA, 25 bp, Homo sapien
cccaggacgatgccgatgatcacgc

SEQ ID NO: 1411766 - DNA, 25 bp, Homo sapien
gtggagagaagtggaggcaggtcag

SEQ ID NO: 1411767 - DNA, 25 bp, Homo sapien
gagaagtggaggcaggtcaggcttt

SEQ ID NO: 1411768 - DNA, 25 bp, Homo sapien
aggctttctcacagcctggcaggtg

SEQ ID NO: 1411769 - DNA, 25 bp, Homo sapien
aagtggaggcaggtcaggctttctc

SEQ ID NO: 1411770 - DNA, 25 bp, Homo sapien
tgatacagcccatcatctgctctgg

SEQ ID NO: 1411771 - DNA, 25 bp, Homo sapien
cacacaaacactgtagcccacgttg

SEQ ID NO: 1411772 - DNA, 25 bp, Homo sapien
catcatctgctctggagatatcctt

SEQ ID NO: 1411773 - DNA, 25 bp, Homo sapien
ctgagaccttcacctccaccacaca

SEQ ID NO: 1411774 - DNA, 25 bp, Homo sapien
aggtgtaagacccagctcgataggg

SEQ ID NO: 1411775 - DNA, 25 bp, Homo sapien
ttcagcaccacatcgttgccatatg

SEQ ID NO: 1411776 - DNA, 25 bp, Homo sapien
gacagctctgagtggtagctgtgct

SEQ ID NO: 1411777 - DNA, 25 bp, Homo sapien
gatcttggcccacttgtaggagagg

SEQ ID NO: 1411778 - DNA, 25 bp, Homo sapien
gacagtgacaatgaccttccgggtg

SEQ ID NO: 1411779 - DNA, 25 bp, Homo sapien
catcgtactggcttgggtctgaggc

SEQ ID NO: 1411780 - DNA, 25 bp, Homo sapien
tctgaggctgcaaagcggaccctct

SEQ ID NO: 1411781 - DNA, 25 bp, Homo sapien
ttcttcacccggcactcataagtgg

SEQ ID NO: 1411782 - DNA, 25 bp, Homo sapien
aggaggtagactgactggctagctt

SEQ ID NO: 1411783 - DNA, 25 bp, Homo sapien
gaggtagactgactggctagcttaa

SEQ ID NO: 1411784 - DNA, 25 bp, Homo sapien
tggctagcttaattcacaattgcag

SEQ ID NO: 1411785 - DNA, 25 bp, Homo sapien
gactgactggctagcttaattcaca

SEQ ID NO: 1411786 - DNA, 25 bp, Homo sapien
tgtccatccccgttgatccgcacag

SEQ ID NO: 1411787 - DNA, 25 bp, Homo sapien
gcccattgggaccatagtcctcagg

SEQ ID NO: 1411788 - DNA, 25 bp, Homo sapien
cgttgatccgcacagcagacagcag

SEQ ID NO: 1411789 - DNA, 25 bp, Homo sapien
gagttgacctgcatccactcgatgt

SEQ ID NO: 1411790 - DNA, 25 bp, Homo sapien
agttgctcctaatgtctcaccttga

SEQ ID NO: 1411791 - DNA, 25 bp, Homo sapien
ctccttgggaagttgctcctaatgt

SEQ ID NO: 1411792 - DNA, 25 bp, Homo sapien
ggaagttgctcctaatgtctcacct

SEQ ID NO: 1411793 - DNA, 25 bp, Homo sapien
cctaatgtctcaccttgattcctct

SEQ ID NO: 1411794 - DNA, 25 bp, Homo sapien
ctccgtctgggctgggtatcccgtg

SEQ ID NO: 1411795 - DNA, 25 bp, Homo sapien
aactctcatgtctctaggctcggtg

SEQ ID NO: 1411796 - DNA, 25 bp, Homo sapien
gaaggtggaatgctcctccaactct

SEQ ID NO: 1411797 - DNA, 25 bp, Homo sapien
ctgggctcaggcacacgagtagaag

SEQ ID NO: 1411798 - DNA, 25 bp, Homo sapien
ctgtcctccacacccatactcgact

SEQ ID NO: 1411799 - DNA, 25 bp, Homo sapien
tcaggcctcctgagctgaaagagga

SEQ ID NO: 1411800 - DNA, 25 bp, Homo sapien
caggaacagagtctcctcctggctg

SEQ ID NO: 1411801 - DNA, 25 bp, Homo sapien
gcttcaggcctttcaaagggactca

SEQ ID NO: 1411802 - DNA, 25 bp, Homo sapien
tcgggctgactaaaccagcacagtt

SEQ ID NO: 1411803 - DNA, 25 bp, Homo sapien
agtgaagggccaccccttgttggct

SEQ ID NO: 1411804 - DNA, 25 bp, Homo sapien
cacagttctgggtaagttcgtgctg

SEQ ID NO: 1411805 - DNA, 25 bp, Homo sapien
tggactggtcatcgggctgactaaa

SEQ ID NO: 1411806 - DNA, 25 bp, Homo sapien
ggaagagtgttagggagagttatgg

SEQ ID NO: 1411807 - DNA, 25 bp, Homo sapien
gaggaagagtgttagggagagttat

SEQ ID NO: 1411808 - DNA, 25 bp, Homo sapien
aggaggaagagtgttagggagagtt

SEQ ID NO: 1411809 - DNA, 25 bp, Homo sapien
tgttagggagagttatggggctcag

SEQ ID NO: 1411810 - DNA, 25 bp, Homo sapien
ggaaacacaaggagtccacgcgtct

SEQ ID NO: 1411811 - DNA, 25 bp, Homo sapien
aaaaatggtcttggtgatcctgtgg

SEQ ID NO: 1411812 - DNA, 25 bp, Homo sapien
gagacctaccagatgtacacaatga

SEQ ID NO: 1411813 - DNA, 25 bp, Homo sapien
gctggtgcctaagctgggataccca

SEQ ID NO: 1411814 - DNA, 25 bp, Homo sapien
agttagggctaaatcaaaggctggg

SEQ ID NO: 1411815 - DNA, 25 bp, Homo sapien
tttaaagacacgtaagcagcgggag

SEQ ID NO: 1411816 - DNA, 25 bp, Homo sapien
tccatctgctaaatccaggtttggc

SEQ ID NO: 1411817 - DNA, 25 bp, Homo sapien
tctgcctgggaatacagttagggct

SEQ ID NO: 1411818 - DNA, 25 bp, Homo sapien
ggaagctactgacaatgagttgggc

SEQ ID NO: 1411819 - DNA, 25 bp, Homo sapien
tgacaatgagttgggctctgacacc

SEQ ID NO: 1411820 - DNA, 25 bp, Homo sapien
gacaccaaaccgaactagaagatgg

SEQ ID NO: 1411821 - DNA, 25 bp, Homo sapien
gggctctgacaccaaaccgaactag

SEQ ID NO: 1411822 - DNA, 25 bp, Homo sapien
aagtgcagcccagccccagaacctt

SEQ ID NO: 1411823 - DNA, 25 bp, Homo sapien
agtgcagcccagccccagaaccttt

SEQ ID NO: 1411824 - DNA, 25 bp, Homo sapien
cagatgaagtgcagcccagccccag

SEQ ID NO: 1411825 - DNA, 25 bp, Homo sapien
atgaagtgcagcccagccccagaac

SEQ ID NO: 1411826 - DNA, 25 bp, Homo sapien
ttgccccgctggcagttgcccagga

SEQ ID NO: 1411827 - DNA, 25 bp, Homo sapien
gcgtcagtacgaagctgcagctggt

SEQ ID NO: 1411828 - DNA, 25 bp, Homo sapien
gctggtgtgtgtctcgttcagagcc

SEQ ID NO: 1411829 - DNA, 25 bp, Homo sapien
tcagagcctttctcactaagcccgt

SEQ ID NO: 1411830 - DNA, 25 bp, Homo sapien
tccacagcccacaaatccagacttc

SEQ ID NO: 1411831 - DNA, 25 bp, Homo sapien
acagcccacaaatccagacttcttg

SEQ ID NO: 1411832 - DNA, 25 bp, Homo sapien
agcccacaaatccagacttcttgtc

SEQ ID NO: 1411833 - DNA, 25 bp, Homo sapien
ccacagcccacaaatccagacttct

SEQ ID NO: 1411834 - DNA, 25 bp, Homo sapien
aacctttgccagtgccccaactgca

SEQ ID NO: 1411835 - DNA, 25 bp, Homo sapien
catcttcccaagacccctagggagg

SEQ ID NO: 1411836 - DNA, 25 bp, Homo sapien
tcccatccgaggctgggtaccacat

SEQ ID NO: 1411837 - DNA, 25 bp, Homo sapien
ccagaatcctcagcggcattgccat

SEQ ID NO: 1411838 - DNA, 25 bp, Homo sapien
gttgcagttaaaggtgctgagcagg

SEQ ID NO: 1411839 - DNA, 25 bp, Homo sapien
ggggcaacaatctttcctggtggaa

SEQ ID NO: 1411840 - DNA, 25 bp, Homo sapien
tggtcgggcggggcaacaatctttc

SEQ ID NO: 1411841 - DNA, 25 bp, Homo sapien
ggttgcagttaaaggtgctgagcag

SEQ ID NO: 1411842 - DNA, 25 bp, Homo sapien
cccactgagaggcaactgtagctct

SEQ ID NO: 1411843 - DNA, 25 bp, Homo sapien
aaatgcttctgaactgggcgtcagg

SEQ ID NO: 1411844 - DNA, 25 bp, Homo sapien
aatgcttctgaactgggcgtcaggg

SEQ ID NO: 1411845 - DNA, 25 bp, Homo sapien
ctctgcctcaatgccctgaaatgct

SEQ ID NO: 1411846 - DNA, 25 bp, Homo sapien
ctgtcccccgaaggcatcctgaggg

SEQ ID NO: 1411847 - DNA, 25 bp, Homo sapien
gcaattatggatgcccagagactgg

SEQ ID NO: 1411848 - DNA, 25 bp, Homo sapien
actatgaaatgtctaggttagcagc

SEQ ID NO: 1411849 - DNA, 25 bp, Homo sapien
agtcaagtagatttaatctgtaact

SEQ ID NO: 1411850 - DNA, 25 bp, Homo sapien
ggtagctggcaggatgttagctttg

SEQ ID NO: 1411851 - DNA, 25 bp, Homo sapien
tgcagtacttctcgggaaggccagt

SEQ ID NO: 1411852 - DNA, 25 bp, Homo sapien
gatgttagctttgcgctcagcttca

SEQ ID NO: 1411853 - DNA, 25 bp, Homo sapien
tgcgctcagcttcaatgcagtactt

SEQ ID NO: 1411854 - DNA, 25 bp, Homo sapien
cctggcgccggagctcattggcatg

SEQ ID NO: 1411855 - DNA, 25 bp, Homo sapien
cctcaaaggtggcaatccggttctg

SEQ ID NO: 1411856 - DNA, 25 bp, Homo sapien
attggcatgctgtaagcgccctgtg

SEQ ID NO: 1411857 - DNA, 25 bp, Homo sapien
ttgatctcatcgatgcgctcacggc

SEQ ID NO: 1411858 - DNA, 25 bp, Homo sapien
ggactagctccagggtcgcatgact

SEQ ID NO: 1411859 - DNA, 25 bp, Homo sapien
tgtcatgggcatgcttagaagggcc

SEQ ID NO: 1411860 - DNA, 25 bp, Homo sapien
gctccttcagtagacatgcctcaga

SEQ ID NO: 1411861 - DNA, 25 bp, Homo sapien
ttatgcaaccagtcttacacccagg

SEQ ID NO: 1411862 - DNA, 25 bp, Homo sapien
gagcatctgttaacatgccagaaag

SEQ ID NO: 1411863 - DNA, 25 bp, Homo sapien
gcaattccaggtgctatctcccaat

SEQ ID NO: 1411864 - DNA, 25 bp, Homo sapien
gttccagggtaaataatcccagtca

SEQ ID NO: 1411865 - DNA, 25 bp, Homo sapien
caatatggaccatccctgctacagt

SEQ ID NO: 1411866 - DNA, 25 bp, Homo sapien
tgaaagccacctgttcgagccgact

SEQ ID NO: 1411867 - DNA, 25 bp, Homo sapien
ccagagcgtgctccttgaaagccac

SEQ ID NO: 1411868 - DNA, 25 bp, Homo sapien
aagaatcctctcgaactcatcccgg

SEQ ID NO: 1411869 - DNA, 25 bp, Homo sapien
gttgcacctgaacagccagagcgtg

SEQ ID NO: 1411870 - DNA, 25 bp, Homo sapien
tgggaatgttggcaggggaccagtg

SEQ ID NO: 1411871 - DNA, 25 bp, Homo sapien
ctgggaatgttggcaggggaccagt

SEQ ID NO: 1411872 - DNA, 25 bp, Homo sapien
aggggaccagtgagggcacaaaata

SEQ ID NO: 1411873 - DNA, 25 bp, Homo sapien
ggcaggggaccagtgagggcacaaa

SEQ ID NO: 1411874 - DNA, 25 bp, Homo sapien
tttctccctccggattctctcctgc

SEQ ID NO: 1411875 - DNA, 25 bp, Homo sapien
tggccctcaagcgtgcgatctcctt

SEQ ID NO: 1411876 - DNA, 25 bp, Homo sapien
ttctgcctggtaatcctgggccttc

SEQ ID NO: 1411877 - DNA, 25 bp, Homo sapien
cctgcatggccctcaagcgtgcgat

SEQ ID NO: 1411878 - DNA, 25 bp, Homo sapien
ctgccggaaggaaaggccttgtaga

SEQ ID NO: 1411879 - DNA, 25 bp, Homo sapien
aaaggccttgtagaatagttgccat

SEQ ID NO: 1411880 - DNA, 25 bp, Homo sapien
aaggaaaggccttgtagaatagttg

SEQ ID NO: 1411881 - DNA, 25 bp, Homo sapien
ggaaaggccttgtagaatagttgcc

SEQ ID NO: 1411882 - DNA, 25 bp, Homo sapien
tacggggctgttgtcaagctgcttc

SEQ ID NO: 1411883 - DNA, 25 bp, Homo sapien
tttgtccaccctgccctagataaca

SEQ ID NO: 1411884 - DNA, 25 bp, Homo sapien
tagataacaggacagggaactctgg

SEQ ID NO: 1411885 - DNA, 25 bp, Homo sapien
tgagttgtccctgtaagttgtacgg

SEQ ID NO: 1411886 - DNA, 25 bp, Homo sapien
cctcatcccaacttctaatcaaagg

SEQ ID NO: 1411887 - DNA, 25 bp, Homo sapien
tgaggttaaagctaatttggttgtc

SEQ ID NO: 1411888 - DNA, 25 bp, Homo sapien
ttcttttctgcctgcatatggccct

SEQ ID NO: 1411889 - DNA, 25 bp, Homo sapien
ctctgttaacgaacaagtggactgg

SEQ ID NO: 1411890 - DNA, 25 bp, Homo sapien
ttcatcattgatgcgcttaatctca

SEQ ID NO: 1411891 - DNA, 25 bp, Homo sapien
ttgatgcgcttaatctcagcttgca

SEQ ID NO: 1411892 - DNA, 25 bp, Homo sapien
gtttttgttgctgccttcgttccat

SEQ ID NO: 1411893 - DNA, 25 bp, Homo sapien
tcttcttggtaaactccatcaccat

SEQ ID NO: 1411894 - DNA, 25 bp, Homo sapien
cgctgctcagcaagcagcgatcgct

SEQ ID NO: 1411895 - DNA, 25 bp, Homo sapien
ttggagctgttccatatattccagc

SEQ ID NO: 1411896 - DNA, 25 bp, Homo sapien
gctgttccatatattccagcatctg

SEQ ID NO: 1411897 - DNA, 25 bp, Homo sapien
gcgatcgctcctcctggttcttttc

SEQ ID NO: 1411898 - DNA, 25 bp, Homo sapien
gaatggatttctgccgctccacttc

SEQ ID NO: 1411899 - DNA, 25 bp, Homo sapien
tcccggatggcatggcacttagcat

SEQ ID NO: 1411900 - DNA, 25 bp, Homo sapien
gcatggcacttagcattgaggataa

SEQ ID NO: 1411901 - DNA, 25 bp, Homo sapien
ggcatcccggatggcatggcactta

SEQ ID NO: 1411902 - DNA, 25 bp, Homo sapien
caggatttgggcatcccggatggca

SEQ ID NO: 1411903 - DNA, 25 bp, Homo sapien
tcctgctccatccgcagcttgttgg

SEQ ID NO: 1411904 - DNA, 25 bp, Homo sapien
ctccatccgcagcttgttggctctc

SEQ ID NO: 1411905 - DNA, 25 bp, Homo sapien
ctgctccatccgcagcttgttggct

SEQ ID NO: 1411906 - DNA, 25 bp, Homo sapien
tgctccatccgcagcttgttggctc

SEQ ID NO: 1411907 - DNA, 25 bp, Homo sapien
catgggatgcccatttgattcgctc

SEQ ID NO: 1411908 - DNA, 25 bp, Homo sapien
ggctgatgattagggactccccgga

SEQ ID NO: 1411909 - DNA, 25 bp, Homo sapien
gattcgctcaaactcctcagggctg

SEQ ID NO: 1411910 - DNA, 25 bp, Homo sapien
tcttctctggtcaggacatgggatg

SEQ ID NO: 1411911 - DNA, 25 bp, Homo sapien
gcttatctcggagcagcacaatggg

SEQ ID NO: 1411912 - DNA, 25 bp, Homo sapien
gatggtctctggcttgcgatccaag

SEQ ID NO: 1411913 - DNA, 25 bp, Homo sapien
cttgcgatccaagcccaaagcagtg

SEQ ID NO: 1411914 - DNA, 25 bp, Homo sapien
atgagttctcggaccatgtcccggg

SEQ ID NO: 1411915 - DNA, 25 bp, Homo sapien
ccttgacctgttggaagcggcagaa

SEQ ID NO: 1411916 - DNA, 25 bp, Homo sapien
tccaaagaggctctcatccacctca

SEQ ID NO: 1411917 - DNA, 25 bp, Homo sapien
gatagcgagccttattccttgacct

SEQ ID NO: 1411918 - DNA, 25 bp, Homo sapien
tcacggctttggtccgatagcgagc

SEQ ID NO: 1411919 - DNA, 25 bp, Homo sapien
tcaggatgccagctgtgcttagtgg

SEQ ID NO: 1411920 - DNA, 25 bp, Homo sapien
ctcaggatgccagctgtgcttagtg

SEQ ID NO: 1411921 - DNA, 25 bp, Homo sapien
ggaagaggcagaaagtttgggtcat

SEQ ID NO: 1411922 - DNA, 25 bp, Homo sapien
gcaggaagaggcagaaagtttgggt

SEQ ID NO: 1411923 - DNA, 25 bp, Homo sapien
ctgcaggaagaggcagaaagtttgg

SEQ ID NO: 1411924 - DNA, 25 bp, Homo sapien
caggaagaggcagaaagtttgggtc

SEQ ID NO: 1411925 - DNA, 25 bp, Homo sapien
ccacacgccctgactccggacttct

SEQ ID NO: 1411926 - DNA, 25 bp, Homo sapien
agccacacgccctgactccggactt

SEQ ID NO: 1411927 - DNA, 25 bp, Homo sapien
cacacgccctgactccggacttctg

SEQ ID NO: 1411928 - DNA, 25 bp, Homo sapien
acacgccctgactccggacttctgc

SEQ ID NO: 1411929 - DNA, 25 bp, Homo sapien
gcccaaccgcggctctgaaggattg

SEQ ID NO: 1411930 - DNA, 25 bp, Homo sapien
ggagcccgtcgctccaaccgttgca

SEQ ID NO: 1411931 - DNA, 25 bp, Homo sapien
ctgaaggattgacccgccctggcgt

SEQ ID NO: 1411932 - DNA, 25 bp, Homo sapien
gctccaaccgttgcagctccacgct

SEQ ID NO: 1411933 - DNA, 25 bp, Homo sapien
aaactgcttcaaagtatggcttaga

SEQ ID NO: 1411934 - DNA, 25 bp, Homo sapien
gcttcaaagtatggcttagaacata

SEQ ID NO: 1411935 - DNA, 25 bp, Homo sapien
gaggcctgagaggctatttcactat

SEQ ID NO: 1411936 - DNA, 25 bp, Homo sapien
caaagtatggcttagaacataaaca

SEQ ID NO: 1411937 - DNA, 25 bp, Homo sapien
agggtggtagtgaggagtactgagg

SEQ ID NO: 1411938 - DNA, 25 bp, Homo sapien
gtgcttgcggctagaggccctaagt

SEQ ID NO: 1411939 - DNA, 25 bp, Homo sapien
gcagagatgttagggtgagggtggt

SEQ ID NO: 1411940 - DNA, 25 bp, Homo sapien
tctgagagacccgtgcatgcggcac

SEQ ID NO: 1411941 - DNA, 25 bp, Homo sapien
agtattattggtgcccctactccca

SEQ ID NO: 1411942 - DNA, 25 bp, Homo sapien
agagtaatgacagacagagccccag

SEQ ID NO: 1411943 - DNA, 25 bp, Homo sapien
ggccaggccacagtattattggtgc

SEQ ID NO: 1411944 - DNA, 25 bp, Homo sapien
ccatgaatgaggagttgaaatgcca

SEQ ID NO: 1411945 - DNA, 25 bp, Homo sapien
cacattcccatagtgcgatatctcc

SEQ ID NO: 1411946 - DNA, 25 bp, Homo sapien
gacattaacaaatctgcagcctccc

SEQ ID NO: 1411947 - DNA, 25 bp, Homo sapien
ttcttgaaaaccacatctccaccat

SEQ ID NO: 1411948 - DNA, 25 bp, Homo sapien
gtgcgatatctcctagaccaaagag

SEQ ID NO: 1411949 - DNA, 25 bp, Homo sapien
ttgccctggtatcctagacacgcct

SEQ ID NO: 1411950 - DNA, 25 bp, Homo sapien
tgccacagattctcagtccataggt

SEQ ID NO: 1411951 - DNA, 25 bp, Homo sapien
cataggtctcataggtctaactgga

SEQ ID NO: 1411952 - DNA, 25 bp, Homo sapien
ggtagggccaactcttgttcaaggc

SEQ ID NO: 1411953 - DNA, 25 bp, Homo sapien
tgtcagtctgaggacgtcactcaga

SEQ ID NO: 1411954 - DNA, 25 bp, Homo sapien
gattccttgtagcagggttaggaga

SEQ ID NO: 1411955 - DNA, 25 bp, Homo sapien
ttaagaagttgagattccttgtagc

SEQ ID NO: 1411956 - DNA, 25 bp, Homo sapien
ggacgtcactcagagaacagaacaa

SEQ ID NO: 1411957 - DNA, 25 bp, Homo sapien
tactaaagccctaccaagaggcgac

SEQ ID NO: 1411958 - DNA, 25 bp, Homo sapien
tgttctgagacttgtgagccacaca

SEQ ID NO: 1411959 - DNA, 25 bp, Homo sapien
aaaatgcaactctcgggtatcgtcc

SEQ ID NO: 1411960 - DNA, 25 bp, Homo sapien
caagtgagtgaccaggagtccagag

SEQ ID NO: 1411961 - DNA, 25 bp, Homo sapien
aacttgacttctgaccacacaaagc

SEQ ID NO: 1411962 - DNA, 25 bp, Homo sapien
tgacttctgaccacacaaagccagg

SEQ ID NO: 1411963 - DNA, 25 bp, Homo sapien
aggaaagaaatagcccctcgctcca

SEQ ID NO: 1411964 - DNA, 25 bp, Homo sapien
cttgacttctgaccacacaaagcca

SEQ ID NO: 1411965 - DNA, 25 bp, Homo sapien
agagcatgcaatccaccctccaacc

SEQ ID NO: 1411966 - DNA, 25 bp, Homo sapien
agcatgcaatccaccctccaacctc

SEQ ID NO: 1411967 - DNA, 25 bp, Homo sapien
tcctctcctctatctgtaggaaatg

SEQ ID NO: 1411968 - DNA, 25 bp, Homo sapien
cctctcctctatctgtaggaaatgc

SEQ ID NO: 1411969 - DNA, 25 bp, Homo sapien
cccaccctctcagtgactgagaagc

SEQ ID NO: 1411970 - DNA, 25 bp, Homo sapien
gagacagcttcacttgccaggactg

SEQ ID NO: 1411971 - DNA, 25 bp, Homo sapien
cttgccaggactgatggctgtgcca

SEQ ID NO: 1411972 - DNA, 25 bp, Homo sapien
cttcacttgccaggactgatggctg

SEQ ID NO: 1411973 - DNA, 25 bp, Homo sapien
tgcactttgcccagtattcctccct

SEQ ID NO: 1411974 - DNA, 25 bp, Homo sapien
cactttgcccagtattcctcccttc

SEQ ID NO: 1411975 - DNA, 25 bp, Homo sapien
agtggcacagtggccccagacacag

SEQ ID NO: 1411976 - DNA, 25 bp, Homo sapien
cacagtggccccagacacagccaga

SEQ ID NO: 1411977 - DNA, 25 bp, Homo sapien
tcatcttcctcaagccccagaccat

SEQ ID NO: 1411978 - DNA, 25 bp, Homo sapien
tctttatttaaatcaacaaactcat

SEQ ID NO: 1411979 - DNA, 25 bp, Homo sapien
ttcctcaagccccagaccatggtag

SEQ ID NO: 1411980 - DNA, 25 bp, Homo sapien
aaatcaacaaactcatcttcctcaa

SEQ ID NO: 1411981 - DNA, 25 bp, Homo sapien
aaaatgagaagccacgagggcccct

SEQ ID NO: 1411982 - DNA, 25 bp, Homo sapien
ggaatggaaaatgagaagccacgag

SEQ ID NO: 1411983 - DNA, 25 bp, Homo sapien
tggaaaatgagaagccacgagggcc

SEQ ID NO: 1411984 - DNA, 25 bp, Homo sapien
ccaccccttagccacagtgaaggga

SEQ ID NO: 1411985 - DNA, 25 bp, Homo sapien
gctgccccagatgtgtggtgagcac

SEQ ID NO: 1411986 - DNA, 25 bp, Homo sapien
ggctgccccagatgtgtggtgagca

SEQ ID NO: 1411987 - DNA, 25 bp, Homo sapien
aaggctgccccagatgtgtggtgag

SEQ ID NO: 1411988 - DNA, 25 bp, Homo sapien
ctgccccagatgtgtggtgagcaca

SEQ ID NO: 1411989 - DNA, 25 bp, Homo sapien
aagcatacttgtagaagcaaggcca

SEQ ID NO: 1411990 - DNA, 25 bp, Homo sapien
caggctcctccctataaattaagtt

SEQ ID NO: 1411991 - DNA, 25 bp, Homo sapien
acaggctcctccctataaattaagt

SEQ ID NO: 1411992 - DNA, 25 bp, Homo sapien
ccacaggctcctccctataaattaa

SEQ ID NO: 1411993 - DNA, 25 bp, Homo sapien
gctctctgggaatgtcactgctaaa

SEQ ID NO: 1411994 - DNA, 25 bp, Homo sapien
gaggccagttggtccagttttgatg

SEQ ID NO: 1411995 - DNA, 25 bp, Homo sapien
cagggcatggcggtgagggactgag

SEQ ID NO: 1411996 - DNA, 25 bp, Homo sapien
gggaatgtcactgctaaaatatata

SEQ ID NO: 1411997 - DNA, 25 bp, Homo sapien
ctgcctgagacgccccgcggttggt

SEQ ID NO: 1411998 - DNA, 25 bp, Homo sapien
cccgcggttggtgcccatctgtaac

SEQ ID NO: 1411999 - DNA, 25 bp, Homo sapien
ggtgcccatctgtaacccgatcacg

SEQ ID NO: 1412000 - DNA, 25 bp, Homo sapien
agaggatctggcgtggcatcccgta

SEQ ID NO: 1412001 - DNA, 25 bp, Homo sapien
gaaccagttgggatccccagagaag

SEQ ID NO: 1412002 - DNA, 25 bp, Homo sapien
tcccagaggtccacagtttggaaga

SEQ ID NO: 1412003 - DNA, 25 bp, Homo sapien
ttcccagaggtccacagtttggaag

SEQ ID NO: 1412004 - DNA, 25 bp, Homo sapien
cccagaggtccacagtttggaagat

SEQ ID NO: 1412005 - DNA, 25 bp, Homo sapien
cttcccagaggtccacagtttggaa

SEQ ID NO: 1412006 - DNA, 25 bp, Homo sapien
cttgcaggaactgagagatctgctc

SEQ ID NO: 1412007 - DNA, 25 bp, Homo sapien
tcagtggtgttaatgccatagcgct

SEQ ID NO: 1412008 - DNA, 25 bp, Homo sapien
ggaggcctggatcttctttactggg

SEQ ID NO: 1412009 - DNA, 25 bp, Homo sapien
aatgccatagcgctcagctgcttgc

SEQ ID NO: 1412010 - DNA, 25 bp, Homo sapien
tcggggtacagtgcattaatgagct

SEQ ID NO: 1412011 - DNA, 25 bp, Homo sapien
gcccctcggggtacagtgcattaat

SEQ ID NO: 1412012 - DNA, 25 bp, Homo sapien
gggtacagtgcattaatgagctcac

SEQ ID NO: 1412013 - DNA, 25 bp, Homo sapien
gtacagtgcattaatgagctcacat

SEQ ID NO: 1412014 - DNA, 25 bp, Homo sapien
ccttgagccagttctggaagttctc

SEQ ID NO: 1412015 - DNA, 25 bp, Homo sapien
caggaattctgcctgcagggatata

SEQ ID NO: 1412016 - DNA, 25 bp, Homo sapien
gatgaggaccagaactgttaccaaa

SEQ ID NO: 1412017 - DNA, 25 bp, Homo sapien
aggatgaggaccagaactgttacca

SEQ ID NO: 1412018 - DNA, 25 bp, Homo sapien
tatacaccatttcccccacggtgag

SEQ ID NO: 1412019 - DNA, 25 bp, Homo sapien
tcttggctagggtgtttaattggga

SEQ ID NO: 1412020 - DNA, 25 bp, Homo sapien
ccaactcagatttgggacagggagt

SEQ ID NO: 1412021 - DNA, 25 bp, Homo sapien
gatggaacacaggagaacttcccaa

SEQ ID NO: 1412022 - DNA, 25 bp, Homo sapien
gactctccatccaccgtgcagatgg

SEQ ID NO: 1412023 - DNA, 25 bp, Homo sapien
gcttctgtgtaccaaacagtgttgg

SEQ ID NO: 1412024 - DNA, 25 bp, Homo sapien
aagctccaaagcttgcgtgggagga

SEQ ID NO: 1412025 - DNA, 25 bp, Homo sapien
aaacaggaagctccaaagcttgcgt

SEQ ID NO: 1412026 - DNA, 25 bp, Homo sapien
caggaagctccaaagcttgcgtggg

SEQ ID NO: 1412027 - DNA, 25 bp, Homo sapien
aggacaccggcttcaggtagcccca

SEQ ID NO: 1412028 - DNA, 25 bp, Homo sapien
caggacaccggcttcaggtagcccc

SEQ ID NO: 1412029 - DNA, 25 bp, Homo sapien
ccaggacaccggcttcaggtagccc

SEQ ID NO: 1412030 - DNA, 25 bp, Homo sapien
tatgcatgggctaacctcgcctgac

SEQ ID NO: 1412031 - DNA, 25 bp, Homo sapien
gacggacgccctgtctatgcatggg

SEQ ID NO: 1412032 - DNA, 25 bp, Homo sapien
tcgtccaacaatgtcgggtcagggc

SEQ ID NO: 1412033 - DNA, 25 bp, Homo sapien
cagtgaggactcagcgatggagccc

SEQ ID NO: 1412034 - DNA, 25 bp, Homo sapien
caagaaggtttaaaggcgccgcagc

SEQ ID NO: 1412035 - DNA, 25 bp, Homo sapien
gggagtctgaatctacaaaggcggc

SEQ ID NO: 1412036 - DNA, 25 bp, Homo sapien
cagagggacagtagaccagagcaag

SEQ ID NO: 1412037 - DNA, 25 bp, Homo sapien
gcactgactcaaggcaagggctgca

SEQ ID NO: 1412038 - DNA, 25 bp, Homo sapien
aggtgacccaaacccactatcaggg

SEQ ID NO: 1412039 - DNA, 25 bp, Homo sapien
tttcacagcctcacatcagggatgt

SEQ ID NO: 1412040 - DNA, 25 bp, Homo sapien
gagagaggcagacctaagatccctg

SEQ ID NO: 1412041 - DNA, 25 bp, Homo sapien
acatacattccataccaaggtgacc

SEQ ID NO: 1412042 - DNA, 25 bp, Homo sapien
ggccagtaacatgggcagtgttcag

SEQ ID NO: 1412043 - DNA, 25 bp, Homo sapien
gccctagtagcatctcggcggcggc

SEQ ID NO: 1412044 - DNA, 25 bp, Homo sapien
actggctgtcgataggctggtagcc

SEQ ID NO: 1412045 - DNA, 25 bp, Homo sapien
ctcagggccagtaacatgggcagtg

SEQ ID NO: 1412046 - DNA, 25 bp, Homo sapien
gccaagcccaggtgcaaagtctcca

SEQ ID NO: 1412047 - DNA, 25 bp, Homo sapien
cactcatagttctcgtccacagatg

SEQ ID NO: 1412048 - DNA, 25 bp, Homo sapien
tctgagtcccactcatagttctcgt

SEQ ID NO: 1412049 - DNA, 25 bp, Homo sapien
tagttctcgtccacagatgtgttcc

SEQ ID NO: 1412050 - DNA, 25 bp, Homo sapien
aagatgaggtgggacagcgccgggt

SEQ ID NO: 1412051 - DNA, 25 bp, Homo sapien
ggccgcaggaacgaagcgctgcctc

SEQ ID NO: 1412052 - DNA, 25 bp, Homo sapien
gcgccgggtatccatgtaatctggg

SEQ ID NO: 1412053 - DNA, 25 bp, Homo sapien
tcgcccactgctctggctggtgagg

SEQ ID NO: 1412054 - DNA, 25 bp, Homo sapien
ctttcctggggggccgccacagtgg

SEQ ID NO: 1412055 - DNA, 25 bp, Homo sapien
ctgctgctacagtcaaaggaccggg

SEQ ID NO: 1412056 - DNA, 25 bp, Homo sapien
gctgctgctacagtcaaaggaccgg

SEQ ID NO: 1412057 - DNA, 25 bp, Homo sapien
ttcctggggggccgccacagtgggc

SEQ ID NO: 1412058 - DNA, 25 bp, Homo sapien
cacaaagcgcccgtctgggccccgg

SEQ ID NO: 1412059 - DNA, 25 bp, Homo sapien
ccggcaaatgggctccagaggtaag

SEQ ID NO: 1412060 - DNA, 25 bp, Homo sapien
gggctgggagttccggcaggatccc

SEQ ID NO: 1412061 - DNA, 25 bp, Homo sapien
cagaggtaagggtccccggctagat

SEQ ID NO: 1412062 - DNA, 25 bp, Homo sapien
ctggggaaggacaggagatcagggt

SEQ ID NO: 1412063 - DNA, 25 bp, Homo sapien
tactggcacgtacaatggaaaggca

SEQ ID NO: 1412064 - DNA, 25 bp, Homo sapien
caagcgaggaaaggaccaacaaggt

SEQ ID NO: 1412065 - DNA, 25 bp, Homo sapien
cagagctaggaagaacaagcgagga

SEQ ID NO: 1412066 - DNA, 25 bp, Homo sapien
gccatactggaacggcctcaggctg

SEQ ID NO: 1412067 - DNA, 25 bp, Homo sapien
gctgacttcccggtcggagagaaga

SEQ ID NO: 1412068 - DNA, 25 bp, Homo sapien
tgacttcccggtcggagagaagata

SEQ ID NO: 1412069 - DNA, 25 bp, Homo sapien
gcagctgacttcccggtcggagaga

SEQ ID NO: 1412070 - DNA, 25 bp, Homo sapien
ttcccggtcggagagaagataagag

SEQ ID NO: 1412071 - DNA, 25 bp, Homo sapien
agaaagcagactccgcccaccacgc

SEQ ID NO: 1412072 - DNA, 25 bp, Homo sapien
cggccaggatgctcacaaggacggc

SEQ ID NO: 1412073 - DNA, 25 bp, Homo sapien
tgcgtgcgcgaagggtagacctcca

SEQ ID NO: 1412074 - DNA, 25 bp, Homo sapien
aggcccggcagctgcgtgcgcgaag

SEQ ID NO: 1412075 - DNA, 25 bp, Homo sapien
gggtcgctgacgaagctgcccgcga

SEQ ID NO: 1412076 - DNA, 25 bp, Homo sapien
gtggagacgttggccgtgttgctgg

SEQ ID NO: 1412077 - DNA, 25 bp, Homo sapien
gtcgctgacgaagctgcccgcgaag

SEQ ID NO: 1412078 - DNA, 25 bp, Homo sapien
cgctgacgaagctgcccgcgaaggc

SEQ ID NO: 1412079 - DNA, 25 bp, Homo sapien
tctctgtatcgcctttcgcacatac

SEQ ID NO: 1412080 - DNA, 25 bp, Homo sapien
taggacgcagaggtgaagagctcaa

SEQ ID NO: 1412081 - DNA, 25 bp, Homo sapien
gaggcctctctctgtatcgcctttc

SEQ ID NO: 1412082 - DNA, 25 bp, Homo sapien
gaaagaccgtgcacgtgggacggaa

SEQ ID NO: 1412083 - DNA, 25 bp, Homo sapien
agccttgccggccttccaagacgta

SEQ ID NO: 1412084 - DNA, 25 bp, Homo sapien
tgccggccttccaagacgtagccat

SEQ ID NO: 1412085 - DNA, 25 bp, Homo sapien
ccaagacgtagccatccagtctctt

SEQ ID NO: 1412086 - DNA, 25 bp, Homo sapien
cttccaagacgtagccatccagtct

SEQ ID NO: 1412087 - DNA, 25 bp, Homo sapien
ctctgttgggggaagcccgggtgca

SEQ ID NO: 1412088 - DNA, 25 bp, Homo sapien
gggatcccaatgcaggagtaccccc

SEQ ID NO: 1412089 - DNA, 25 bp, Homo sapien
cccgggtgcagctggcgtggtagga

SEQ ID NO: 1412090 - DNA, 25 bp, Homo sapien
caggggaggcggtatctctgttggg

SEQ ID NO: 1412091 - DNA, 25 bp, Homo sapien
tcatggtgcattcggtcaggacgct

SEQ ID NO: 1412092 - DNA, 25 bp, Homo sapien
cttccggagcagacaagacgatttc

SEQ ID NO: 1412093 - DNA, 25 bp, Homo sapien
gcttgttctgagctagcacgctgaa

SEQ ID NO: 1412094 - DNA, 25 bp, Homo sapien
tgaagggaccactccccagcttgtt

SEQ ID NO: 1412095 - DNA, 25 bp, Homo sapien
tgaggacatggggggcacctcgtga

SEQ ID NO: 1412096 - DNA, 25 bp, Homo sapien
atgaggacatggggggcacctcgtg

SEQ ID NO: 1412097 - DNA, 25 bp, Homo sapien
gaggacatggggggcacctcgtgag

SEQ ID NO: 1412098 - DNA, 25 bp, Homo sapien
ttggtgacaacatgagggctagtgc

SEQ ID NO: 1412099 - DNA, 25 bp, Homo sapien
ccaggagacattggcacccttgggc

SEQ ID NO: 1412100 - DNA, 25 bp, Homo sapien
tgggcaaagccaccacggacacatt

SEQ ID NO: 1412101 - DNA, 25 bp, Homo sapien
caggctcccaggagacattggcacc

SEQ ID NO: 1412102 - DNA, 25 bp, Homo sapien
gcaggggggaatggagggatggtgg

SEQ ID NO: 1412103 - DNA, 25 bp, Homo sapien
ggggggaatggagggatggtggtca

SEQ ID NO: 1412104 - DNA, 25 bp, Homo sapien
ggaatggagggatggtggtcagggc

SEQ ID NO: 1412105 - DNA, 25 bp, Homo sapien
ggggaatggagggatggtggtcagg

SEQ ID NO: 1412106 - DNA, 25 bp, Homo sapien
ccagcacgtagacgttcgtggaggt

SEQ ID NO: 1412107 - DNA, 25 bp, Homo sapien
cccgtgggcctccttggtcaatggt

SEQ ID NO: 1412108 - DNA, 25 bp, Homo sapien
tcaatggtcgcaggatgaggctgct

SEQ ID NO: 1412109 - DNA, 25 bp, Homo sapien
gccactcgggccacagcattgctgg

SEQ ID NO: 1412110 - DNA, 25 bp, Homo sapien
tgtagtgggcgtgggtacaggcaga

SEQ ID NO: 1412111 - DNA, 25 bp, Homo sapien
gacacacgcagccacccctcaccaa

SEQ ID NO: 1412112 - DNA, 25 bp, Homo sapien
acccctcaccaaaggcgcccctcat

SEQ ID NO: 1412113 - DNA, 25 bp, Homo sapien
tgggtacaggcagagcgggctcagg

SEQ ID NO: 1412114 - DNA, 25 bp, Homo sapien
cttgggccgctctataaaagctggg

SEQ ID NO: 1412115 - DNA, 25 bp, Homo sapien
gccctacttcttggaaatattcttc

SEQ ID NO: 1412116 - DNA, 25 bp, Homo sapien
ttccttgggccgctctataaaagct

SEQ ID NO: 1412117 - DNA, 25 bp, Homo sapien
agctcccgccctacttcttggaaat

SEQ ID NO: 1412118 - DNA, 25 bp, Homo sapien
ctctgtgctccctgtcatgccatgt

SEQ ID NO: 1412119 - DNA, 25 bp, Homo sapien
gaggggccctctcttacatctaagg

SEQ ID NO: 1412120 - DNA, 25 bp, Homo sapien
atctaaggctggctactccctctct

SEQ ID NO: 1412121 - DNA, 25 bp, Homo sapien
tgtgctccctgtcatgccatgtctc

SEQ ID NO: 1412122 - DNA, 25 bp, Homo sapien
caagcctgtctctacctcattctct

SEQ ID NO: 1412123 - DNA, 25 bp, Homo sapien
tctgtttctgttccccagtgggtag

SEQ ID NO: 1412124 - DNA, 25 bp, Homo sapien
catctctcaattcctctctggctct

SEQ ID NO: 1412125 - DNA, 25 bp, Homo sapien
tggctctgtttctgttccccagtgg

SEQ ID NO: 1412126 - DNA, 25 bp, Homo sapien
tctggatgtgtgtgactgatgtccc

SEQ ID NO: 1412127 - DNA, 25 bp, Homo sapien
ggcaaacaggatatcttacttctgg

SEQ ID NO: 1412128 - DNA, 25 bp, Homo sapien
caggcttaggcaggactctcagaga

SEQ ID NO: 1412129 - DNA, 25 bp, Homo sapien
gcagcacggtcaaggttagtgagag

SEQ ID NO: 1412130 - DNA, 25 bp, Homo sapien
gatgatcagtgagccttctgtgccc

SEQ ID NO: 1412131 - DNA, 25 bp, Homo sapien
gagtattctcccagggcatcctcgt

SEQ ID NO: 1412132 - DNA, 25 bp, Homo sapien
gcccggcggtaccaagactgttgta

SEQ ID NO: 1412133 - DNA, 25 bp, Homo sapien
tcctcgttccccagggcgatgatca

SEQ ID NO: 1412134 - DNA, 25 bp, Homo sapien
cagatggtgcccactttaaggatgg

SEQ ID NO: 1412135 - DNA, 25 bp, Homo sapien
caagcccgggatggcagtacaagag

SEQ ID NO: 1412136 - DNA, 25 bp, Homo sapien
aagccccaggtacactatgatgaaa

SEQ ID NO: 1412137 - DNA, 25 bp, Homo sapien
tttctctattaaagggcccgccatc

SEQ ID NO: 1412138 - DNA, 25 bp, Homo sapien
gcacgaaccgggcagcggatcaccc

SEQ ID NO: 1412139 - DNA, 25 bp, Homo sapien
gggcagcggatcacccccggcatgc

SEQ ID NO: 1412140 - DNA, 25 bp, Homo sapien
ttggcacgaaccgggcagcggatca

SEQ ID NO: 1412141 - DNA, 25 bp, Homo sapien
gggttggcacgaaccgggcagcgga

SEQ ID NO: 1412142 - DNA, 25 bp, Homo sapien
caggggtgtctcaggaggcatagct

SEQ ID NO: 1412143 - DNA, 25 bp, Homo sapien
tctcaggaggcatagctgtcacctg

SEQ ID NO: 1412144 - DNA, 25 bp, Homo sapien
aggaggcatagctgtcacctgggct

SEQ ID NO: 1412145 - DNA, 25 bp, Homo sapien
ggtgtctcaggaggcatagctgtca

SEQ ID NO: 1412146 - DNA, 25 bp, Homo sapien
ctgggggaaagtagtggcaagttgg

SEQ ID NO: 1412147 - DNA, 25 bp, Homo sapien
ccggcatcatcaggctgggtggcca

SEQ ID NO: 1412148 - DNA, 25 bp, Homo sapien
acacaggtgtagcagccggcatcat

SEQ ID NO: 1412149 - DNA, 25 bp, Homo sapien
ggtggatgcaggaggccattgctgg

SEQ ID NO: 1412150 - DNA, 25 bp, Homo sapien
agagcacagtgaggtaggcagaggc

SEQ ID NO: 1412151 - DNA, 25 bp, Homo sapien
gccaatgaaacatcctgggaggcat

SEQ ID NO: 1412152 - DNA, 25 bp, Homo sapien
cattgatgttgtcctggaaccagct

SEQ ID NO: 1412153 - DNA, 25 bp, Homo sapien
gtaggtgaggttagcagggtatgcc

SEQ ID NO: 1412154 - DNA, 25 bp, Homo sapien
ctcagcatggcaggccaatgaaaca

SEQ ID NO: 1412155 - DNA, 25 bp, Homo sapien
actactgggcactaagatcgctttg

SEQ ID NO: 1412156 - DNA, 25 bp, Homo sapien
gactcaaggagttaactggctcaca

SEQ ID NO: 1412157 - DNA, 25 bp, Homo sapien
gatcgctttgtctgcttactgagcc

SEQ ID NO: 1412158 - DNA, 25 bp, Homo sapien
tggctcacagcctaacacaagcacc

SEQ ID NO: 1412159 - DNA, 25 bp, Homo sapien
ctcctatcttgctgtgaaccaattc

SEQ ID NO: 1412160 - DNA, 25 bp, Homo sapien
ttgcataggtaaccctggaccccag

SEQ ID NO: 1412161 - DNA, 25 bp, Homo sapien
tatcttgctgtgaaccaattcagcc

SEQ ID NO: 1412162 - DNA, 25 bp, Homo sapien
gtcacagcccccttgcataggtaac

SEQ ID NO: 1412163 - DNA, 25 bp, Homo sapien
tgcctcgctctacccggcggatccg

SEQ ID NO: 1412164 - DNA, 25 bp, Homo sapien
cgtgggtggcgctgccctcagtgct

SEQ ID NO: 1412165 - DNA, 25 bp, Homo sapien
ggcggatccgcagcgtcccgttctg

SEQ ID NO: 1412166 - DNA, 25 bp, Homo sapien
gcactagcagctgggtggcgtgggt

SEQ ID NO: 1412167 - DNA, 25 bp, Homo sapien
ccaggctcggggcaaacaatgccaa

SEQ ID NO: 1412168 - DNA, 25 bp, Homo sapien
cacttccgagtttggccagcagagg

SEQ ID NO: 1412169 - DNA, 25 bp, Homo sapien
cagcctcagatcctgcacttccgag

SEQ ID NO: 1412170 - DNA, 25 bp, Homo sapien
tcggggcaaacaatgccaagccctt

SEQ ID NO: 1412171 - DNA, 25 bp, Homo sapien
tgccacgggccacacaacgcagggt

SEQ ID NO: 1412172 - DNA, 25 bp, Homo sapien
tttcctcggagcttccacgtcacat

SEQ ID NO: 1412173 - DNA, 25 bp, Homo sapien
agcttccacgtcacatgaggcaggg

SEQ ID NO: 1412174 - DNA, 25 bp, Homo sapien
gccacacaacgcagggtcacaggct

SEQ ID NO: 1412175 - DNA, 25 bp, Homo sapien
atgcaatgggaatgattatgacctc

SEQ ID NO: 1412176 - DNA, 25 bp, Homo sapien
gcctcacctatgcaatgggaatgat

SEQ ID NO: 1412177 - DNA, 25 bp, Homo sapien
aggagcactgttctgggagtgagga

SEQ ID NO: 1412178 - DNA, 25 bp, Homo sapien
gctgaacccaggttggatgtccaga

SEQ ID NO: 1412179 - DNA, 25 bp, Homo sapien
aaagagggagttcctgacaccgagc

SEQ ID NO: 1412180 - DNA, 25 bp, Homo sapien
tttgaagaactgaaaagggcaggag

SEQ ID NO: 1412181 - DNA, 25 bp, Homo sapien
tactaagtgagcaaacaagggctct

SEQ ID NO: 1412182 - DNA, 25 bp, Homo sapien
gagcctagaaggctgattgaattta

SEQ ID NO: 1412183 - DNA, 25 bp, Homo sapien
ctcccaccagccagagatccccatc

SEQ ID NO: 1412184 - DNA, 25 bp, Homo sapien
gatgcacccaggagccgttagcaaa

SEQ ID NO: 1412185 - DNA, 25 bp, Homo sapien
cgttagcaaaatcgtcttcagggat

SEQ ID NO: 1412186 - DNA, 25 bp, Homo sapien
tccaggaagaacacgcggcactcgt

SEQ ID NO: 1412187 - DNA, 25 bp, Homo sapien
cggcactcgtaccagccctggtctt

SEQ ID NO: 1412188 - DNA, 25 bp, Homo sapien
tgttacagaacaggaagatcgccag

SEQ ID NO: 1412189 - DNA, 25 bp, Homo sapien
ttaggaccgagtgctgttcagggca

SEQ ID NO: 1412190 - DNA, 25 bp, Homo sapien
agacgcggcgtgctttccatggaca

SEQ ID NO: 1412191 - DNA, 25 bp, Homo sapien
tgtgacagctggactgctagacctg

SEQ ID NO: 1412192 - DNA, 25 bp, Homo sapien
tatgcagcggcgtgtgaagaaaaca

SEQ ID NO: 1412193 - DNA, 25 bp, Homo sapien
ctctcttaagctctcggaaggcagg

SEQ ID NO: 1412194 - DNA, 25 bp, Homo sapien
tgttgacttcagatcttcccatatg

SEQ ID NO: 1412195 - DNA, 25 bp, Homo sapien
tgcagggctaaagcctgttgacttc

SEQ ID NO: 1412196 - DNA, 25 bp, Homo sapien
cgtaatcagggtcaattcggggaga

SEQ ID NO: 1412197 - DNA, 25 bp, Homo sapien
taatcagggtcaattcggggagagt

SEQ ID NO: 1412198 - DNA, 25 bp, Homo sapien
caattcggggagagtagaggccgaa

SEQ ID NO: 1412199 - DNA, 25 bp, Homo sapien
ccacgtaatcagggtcaattcgggg

SEQ ID NO: 1412200 - DNA, 25 bp, Homo sapien
aagcgcagccactcgatgacatgca

SEQ ID NO: 1412201 - DNA, 25 bp, Homo sapien
caaagcgcagccactcgatgacatg

SEQ ID NO: 1412202 - DNA, 25 bp, Homo sapien
accaccgataccacctcaggcttcc

SEQ ID NO: 1412203 - DNA, 25 bp, Homo sapien
cgcagccactcgatgacatgcaggg

SEQ ID NO: 1412204 - DNA, 25 bp, Homo sapien
gtcagccccctggctgatgaccagg

SEQ ID NO: 1412205 - DNA, 25 bp, Homo sapien
cgtcagccccctggctgatgaccag

SEQ ID NO: 1412206 - DNA, 25 bp, Homo sapien
cggccaggccgaggcaccacaccat

SEQ ID NO: 1412207 - DNA, 25 bp, Homo sapien
acggccaggccgaggcaccacacca

SEQ ID NO: 1412208 - DNA, 25 bp, Homo sapien
cccagctggcctgctcacccagccc

SEQ ID NO: 1412209 - DNA, 25 bp, Homo sapien
cagctggcctgctcacccagcccct

SEQ ID NO: 1412210 - DNA, 25 bp, Homo sapien
agctggcctgctcacccagcccctc

SEQ ID NO: 1412211 - DNA, 25 bp, Homo sapien
gcccagctggcctgctcacccagcc

SEQ ID NO: 1412212 - DNA, 25 bp, Homo sapien
cagctctcactcttctgtacagtga

SEQ ID NO: 1412213 - DNA, 25 bp, Homo sapien
gatgtccttctgatcagctcaggga

SEQ ID NO: 1412214 - DNA, 25 bp, Homo sapien
ggctcatgtaacacccgaggaagct

SEQ ID NO: 1412215 - DNA, 25 bp, Homo sapien
agctcagggaacaggtttcagctct

SEQ ID NO: 1412216 - DNA, 25 bp, Homo sapien
gcgccacttcctcacgatactgcca

SEQ ID NO: 1412217 - DNA, 25 bp, Homo sapien
tggcgccacttcctcacgatactgc

SEQ ID NO: 1412218 - DNA, 25 bp, Homo sapien
acttcctcacgatactgccaagcag

SEQ ID NO: 1412219 - DNA, 25 bp, Homo sapien
gccacttcctcacgatactgccaag

SEQ ID NO: 1412220 - DNA, 25 bp, Homo sapien
gcaacgaattccacttctctctaga

SEQ ID NO: 1412221 - DNA, 25 bp, Homo sapien
cttcactccccagaactcccctagt

SEQ ID NO: 1412222 - DNA, 25 bp, Homo sapien
tagaactccccgctttctcctgtcc

SEQ ID NO: 1412223 - DNA, 25 bp, Homo sapien
ccctagttctactcctgcaacgaat

SEQ ID NO: 1412224 - DNA, 25 bp, Homo sapien
ccgcaccgctcggctccactctcgc

SEQ ID NO: 1412225 - DNA, 25 bp, Homo sapien
cgcaccgctcggctccactctcgcc

SEQ ID NO: 1412226 - DNA, 25 bp, Homo sapien
tccgcaccgctcggctccactctcg

SEQ ID NO: 1412227 - DNA, 25 bp, Homo sapien
tgcctaactgtgtctctgtaggagc

SEQ ID NO: 1412228 - DNA, 25 bp, Homo sapien
gaggctgtggctcaatggaagtttg

SEQ ID NO: 1412229 - DNA, 25 bp, Homo sapien
tgtctctgtggcaccaagtcgcttg

SEQ ID NO: 1412230 - DNA, 25 bp, Homo sapien
ccagtgtgcacttcttggagaaaga

SEQ ID NO: 1412231 - DNA, 25 bp, Homo sapien
ggcaactgcataagtaacatccaca

SEQ ID NO: 1412232 - DNA, 25 bp, Homo sapien
taggctcccagccatacatcacagc

SEQ ID NO: 1412233 - DNA, 25 bp, Homo sapien
cctgtcctgtcaattgggtgttttc

SEQ ID NO: 1412234 - DNA, 25 bp, Homo sapien
tcctgcaattcacccactgcgtaca

SEQ ID NO: 1412235 - DNA, 25 bp, Homo sapien
cagagccacccagtgaggacggaag

SEQ ID NO: 1412236 - DNA, 25 bp, Homo sapien
ccagagccacccagtgaggacggaa

SEQ ID NO: 1412237 - DNA, 25 bp, Homo sapien
tgccagagccacccagtgaggacgg

SEQ ID NO: 1412238 - DNA, 25 bp, Homo sapien
agagccacccagtgaggacggaagg

SEQ ID NO: 1412239 - DNA, 25 bp, Homo sapien
ttccctcagaagtatggctctctgg

SEQ ID NO: 1412240 - DNA, 25 bp, Homo sapien
gaagagagctgaggaaggattctct

SEQ ID NO: 1412241 - DNA, 25 bp, Homo sapien
ttattgccagccagtcttccctcag

SEQ ID NO: 1412242 - DNA, 25 bp, Homo sapien
tctggatacccacccctgagcacct

SEQ ID NO: 1412243 - DNA, 25 bp, Homo sapien
caggactggggttcccaaggagcag

SEQ ID NO: 1412244 - DNA, 25 bp, Homo sapien
tcaggactggggttcccaaggagca

SEQ ID NO: 1412245 - DNA, 25 bp, Homo sapien
cttttctggactcggatgacccaga

SEQ ID NO: 1412246 - DNA, 25 bp, Homo sapien
ggagccaggctttgcctccttcctc

SEQ ID NO: 1412247 - DNA, 25 bp, Homo sapien
tggagccaggctttgcctccttcct

SEQ ID NO: 1412248 - DNA, 25 bp, Homo sapien
tttctggactcggatgacccagagt

SEQ ID NO: 1412249 - DNA, 25 bp, Homo sapien
aggcttctcagaagcatagttagga

SEQ ID NO: 1412250 - DNA, 25 bp, Homo sapien
aaggcttctcagaagcatagttagg

SEQ ID NO: 1412251 - DNA, 25 bp, Homo sapien
ggcttctcagaagcatagttaggat

SEQ ID NO: 1412252 - DNA, 25 bp, Homo sapien
ctaggcactatctttcatgagctca

SEQ ID NO: 1412253 - DNA, 25 bp, Homo sapien
ttcatgagctcagggggtgtctcag

SEQ ID NO: 1412254 - DNA, 25 bp, Homo sapien
cagggggtgtctcaggggttctggt

SEQ ID NO: 1412255 - DNA, 25 bp, Homo sapien
tctttcatgagctcagggggtgtct

SEQ ID NO: 1412256 - DNA, 25 bp, Homo sapien
catggaatgtataagtgctatcccc

SEQ ID NO: 1412257 - DNA, 25 bp, Homo sapien
agcacaccagggacatactgcaggc

SEQ ID NO: 1412258 - DNA, 25 bp, Homo sapien
taggtcatatccatgcctgccttct

SEQ ID NO: 1412259 - DNA, 25 bp, Homo sapien
tgcatagaagggcccatcagggatg

SEQ ID NO: 1412260 - DNA, 25 bp, Homo sapien
tggtagagatctgggatgttctcag

SEQ ID NO: 1412261 - DNA, 25 bp, Homo sapien
acttgagcttggtaaagccctgaat

SEQ ID NO: 1412262 - DNA, 25 bp, Homo sapien
gacttgagcttggtaaagccctgaa

SEQ ID NO: 1412263 - DNA, 25 bp, Homo sapien
gcatggtagagatctgggatgttct

SEQ ID NO: 1412264 - DNA, 25 bp, Homo sapien
caccatgatggtagctggatgtccc

SEQ ID NO: 1412265 - DNA, 25 bp, Homo sapien
gccctggtagtgtggattggtcacc

SEQ ID NO: 1412266 - DNA, 25 bp, Homo sapien
aaggaccgcaaccacttcctcggat

SEQ ID NO: 1412267 - DNA, 25 bp, Homo sapien
aagacttttgtgagaggaccagatg

SEQ ID NO: 1412268 - DNA, 25 bp, Homo sapien
ggagaagaagcagccaaggaaaggc

SEQ ID NO: 1412269 - DNA, 25 bp, Homo sapien
gaagcagccaaggaaaggcacacat

SEQ ID NO: 1412270 - DNA, 25 bp, Homo sapien
aagaagcagccaaggaaaggcacac

SEQ ID NO: 1412271 - DNA, 25 bp, Homo sapien
cagcaggagaagaagcagccaagga

SEQ ID NO: 1412272 - DNA, 25 bp, Homo sapien
gtgcagaagactgcattaggaggct

SEQ ID NO: 1412273 - DNA, 25 bp, Homo sapien
taggaggctcctagacacaaagagc

SEQ ID NO: 1412274 - DNA, 25 bp, Homo sapien
tgcattaggaggctcctagacacaa

SEQ ID NO: 1412275 - DNA, 25 bp, Homo sapien
cacaaagagcctgactgatggtcct

SEQ ID NO: 1412276 - DNA, 25 bp, Homo sapien
ttccccagccagtgatatcttttgt

SEQ ID NO: 1412277 - DNA, 25 bp, Homo sapien
tctggcctttggagaatatgagagg

SEQ ID NO: 1412278 - DNA, 25 bp, Homo sapien
tctgttggagcagagaggaagttcc

SEQ ID NO: 1412279 - DNA, 25 bp, Homo sapien
ggctccgggagcttttaatctgttc

SEQ ID NO: 1412280 - DNA, 25 bp, Homo sapien
ctggactcctcaatcctgccctgca

SEQ ID NO: 1412281 - DNA, 25 bp, Homo sapien
actcctcaatcctgccctgcactga

SEQ ID NO: 1412282 - DNA, 25 bp, Homo sapien
caaactggactcctcaatcctgccc

SEQ ID NO: 1412283 - DNA, 25 bp, Homo sapien
aactggactcctcaatcctgccctg

SEQ ID NO: 1412284 - DNA, 25 bp, Homo sapien
ggtgaaggattctagcagggaccct

SEQ ID NO: 1412285 - DNA, 25 bp, Homo sapien
gattctagcagggaccctctgtgct

SEQ ID NO: 1412286 - DNA, 25 bp, Homo sapien
cgttgagcccctttatgagctggta

SEQ ID NO: 1412287 - DNA, 25 bp, Homo sapien
accctctgtgctcatagccgttgag

SEQ ID NO: 1412288 - DNA, 25 bp, Homo sapien
gaacaagagggaaacagctccacca

SEQ ID NO: 1412289 - DNA, 25 bp, Homo sapien
ttcactgggaacaagagggaaacag

SEQ ID NO: 1412290 - DNA, 25 bp, Homo sapien
ggagccgagtgatccccaggacaga

SEQ ID NO: 1412291 - DNA, 25 bp, Homo sapien
agatacccaagatctctccattgag

SEQ ID NO: 1412292 - DNA, 25 bp, Homo sapien
cctcacaccagtaaagcccagagtc

SEQ ID NO: 1412293 - DNA, 25 bp, Homo sapien
tcacaccagtaaagcccagagtctc

SEQ ID NO: 1412294 - DNA, 25 bp, Homo sapien
ctcacaccagtaaagcccagagtct

SEQ ID NO: 1412295 - DNA, 25 bp, Homo sapien
ggggcccctgtcctgcaaggtgtgg

SEQ ID NO: 1412296 - DNA, 25 bp, Homo sapien
ggcccctgtcctgcaaggtgtggcc

SEQ ID NO: 1412297 - DNA, 25 bp, Homo sapien
ccctgtcctgcaaggtgtggccatc

SEQ ID NO: 1412298 - DNA, 25 bp, Homo sapien
gtgggggcccctgtcctgcaaggtg

SEQ ID NO: 1412299 - DNA, 25 bp, Homo sapien
ggacttgaaccatggcagtctctga

SEQ ID NO: 1412300 - DNA, 25 bp, Homo sapien
gacttgaaccatggcagtctctgaa

SEQ ID NO: 1412301 - DNA, 25 bp, Homo sapien
tggacttgaaccatggcagtctctg

SEQ ID NO: 1412302 - DNA, 25 bp, Homo sapien
ctgtagaacttcacctgagacagtg

SEQ ID NO: 1412303 - DNA, 25 bp, Homo sapien
gacagtggtgtattcttccatccct

SEQ ID NO: 1412304 - DNA, 25 bp, Homo sapien
ggtgtattcttccatccctgacatc

SEQ ID NO: 1412305 - DNA, 25 bp, Homo sapien
atctctgtagaacttcacctgagac

SEQ ID NO: 1412306 - DNA, 25 bp, Homo sapien
atcgatgccccacaccaataccgat

SEQ ID NO: 1412307 - DNA, 25 bp, Homo sapien
cacaccaataccgatccccagcagg

SEQ ID NO: 1412308 - DNA, 25 bp, Homo sapien
agaggtccagactccatcgatgccc

SEQ ID NO: 1412309 - DNA, 25 bp, Homo sapien
cccagaggtccagactccatcgatg

SEQ ID NO: 1412310 - DNA, 25 bp, Homo sapien
gacagtatcaagaatccagagccca

SEQ ID NO: 1412311 - DNA, 25 bp, Homo sapien
tcagtatacaatgggaatggttggg

SEQ ID NO: 1412312 - DNA, 25 bp, Homo sapien
aaggaactgggtttctcagtataca

SEQ ID NO: 1412313 - DNA, 25 bp, Homo sapien
tagtcctaactattcagattccttg

SEQ ID NO: 1412314 - DNA, 25 bp, Homo sapien
caggtcatagttcctattaagttcc

SEQ ID NO: 1412315 - DNA, 25 bp, Homo sapien
tcctattaagttccataggaacatt

SEQ ID NO: 1412316 - DNA, 25 bp, Homo sapien
ttaagttccataggaacatttctgc

SEQ ID NO: 1412317 - DNA, 25 bp, Homo sapien
catagttcctattaagttccatagg

SEQ ID NO: 1412318 - DNA, 25 bp, Homo sapien
cacagaatcggcgtggggagttaga

SEQ ID NO: 1412319 - DNA, 25 bp, Homo sapien
ggtggtgaggtctggatggagcaca

SEQ ID NO: 1412320 - DNA, 25 bp, Homo sapien
tcagagattgaaaatcacaggacgt

SEQ ID NO: 1412321 - DNA, 25 bp, Homo sapien
gaaactttgggtggtgaggtctgga

SEQ ID NO: 1412322 - DNA, 25 bp, Homo sapien
aggggaaacagccttcccagaccag

SEQ ID NO: 1412323 - DNA, 25 bp, Homo sapien
tctcccgtgactggccttagagcag

SEQ ID NO: 1412324 - DNA, 25 bp, Homo sapien
aacagccttcccagaccagggggtg

SEQ ID NO: 1412325 - DNA, 25 bp, Homo sapien
ttccattctcccgtgactggcctta

SEQ ID NO: 1412326 - DNA, 25 bp, Homo sapien
tattactaaagctaaaagagagagg

SEQ ID NO: 1412327 - DNA, 25 bp, Homo sapien
tcttccagacaagcatagaccaaag

SEQ ID NO: 1412328 - DNA, 25 bp, Homo sapien
tttaacataatatcaaggtggcatt

SEQ ID NO: 1412329 - DNA, 25 bp, Homo sapien
gatcattggctaaacttcaggagaa

SEQ ID NO: 1412330 - DNA, 25 bp, Homo sapien
tttcaaaggaacaggtcaagatgag

SEQ ID NO: 1412331 - DNA, 25 bp, Homo sapien
atcttttcaaaggaacaggtcaaga

SEQ ID NO: 1412332 - DNA, 25 bp, Homo sapien
tcaaaggaacaggtcaagatgagaa

SEQ ID NO: 1412333 - DNA, 25 bp, Homo sapien
cttttcaaaggaacaggtcaagatg

SEQ ID NO: 1412334 - DNA, 25 bp, Homo sapien
gaactgcccctcaaaagattagaag

SEQ ID NO: 1412335 - DNA, 25 bp, Homo sapien
ccatatatggcggaataggtgccca

SEQ ID NO: 1412336 - DNA, 25 bp, Homo sapien
caagagacacttgacagagccagta

SEQ ID NO: 1412337 - DNA, 25 bp, Homo sapien
agtgacttgttctatgccagcatgc

SEQ ID NO: 1412338 - DNA, 25 bp, Homo sapien
tccaatgggcctatcaagagaattt

SEQ ID NO: 1412339 - DNA, 25 bp, Homo sapien
gtgggagtattagcctttccaatgg

SEQ ID NO: 1412340 - DNA, 25 bp, Homo sapien
tgggagtattagcctttccaatggg

SEQ ID NO: 1412341 - DNA, 25 bp, Homo sapien
ttccaatgggcctatcaagagaatt

SEQ ID NO: 1412342 - DNA, 25 bp, Homo sapien
cagtgataagggaaacgatctgacc

SEQ ID NO: 1412343 - DNA, 25 bp, Homo sapien
tagggaatcccaagcctagacaggc

SEQ ID NO: 1412344 - DNA, 25 bp, Homo sapien
gattttaggcctgaactgacatgaa

SEQ ID NO: 1412345 - DNA, 25 bp, Homo sapien
tggaaggccactagtaaacaagcac

SEQ ID NO: 1412346 - DNA, 25 bp, Homo sapien
aaaataatactactaagcatcttag

SEQ ID NO: 1412347 - DNA, 25 bp, Homo sapien
ctctaaaataatactactaagcatc

SEQ ID NO: 1412348 - DNA, 25 bp, Homo sapien
agaccccacatttaatatagaagtt

SEQ ID NO: 1412349 - DNA, 25 bp, Homo sapien
aagaccccacatttaatatagaagt

SEQ ID NO: 1412350 - DNA, 25 bp, Homo sapien
catgcagctatgactacaggggtgc

SEQ ID NO: 1412351 - DNA, 25 bp, Homo sapien
ctcccatgcagctatgactacaggg

SEQ ID NO: 1412352 - DNA, 25 bp, Homo sapien
attctcccacctcagcctcccatgc

SEQ ID NO: 1412353 - DNA, 25 bp, Homo sapien
cagggtcttgctctgggctcaagca

SEQ ID NO: 1412354 - DNA, 25 bp, Homo sapien
aatactggcttaaacctgatgtctc

SEQ ID NO: 1412355 - DNA, 25 bp, Homo sapien
gacagaagcattgtaaaacaggaac

SEQ ID NO: 1412356 - DNA, 25 bp, Homo sapien
ttttggattttcacagctgtcagga

SEQ ID NO: 1412357 - DNA, 25 bp, Homo sapien
ggcaagggccaccatacacagttta

SEQ ID NO: 1412358 - DNA, 25 bp, Homo sapien
tctgttggaacatgggaactttcac

SEQ ID NO: 1412359 - DNA, 25 bp, Homo sapien
catgtcccaaataaacgagtcctag

SEQ ID NO: 1412360 - DNA, 25 bp, Homo sapien
cagtagcagagggtgtggaacatac

SEQ ID NO: 1412361 - DNA, 25 bp, Homo sapien
aaaatgtcccaaagctctcttctgg

SEQ ID NO: 1412362 - DNA, 25 bp, Homo sapien
tcaagtagaggaccatcaggaccag

SEQ ID NO: 1412363 - DNA, 25 bp, Homo sapien
tcagggcaaaaaacgtgagtccagc

SEQ ID NO: 1412364 - DNA, 25 bp, Homo sapien
caaacaagcctggaaagtgtaccgg

SEQ ID NO: 1412365 - DNA, 25 bp, Homo sapien
tcattgtcgcgatctggaagcaggt

SEQ ID NO: 1412366 - DNA, 25 bp, Homo sapien
cccagctccaaactgccttcgtact

SEQ ID NO: 1412367 - DNA, 25 bp, Homo sapien
accttcccttcggttctttgcagca

SEQ ID NO: 1412368 - DNA, 25 bp, Homo sapien
ccttcccttcggttctttgcagcag

SEQ ID NO: 1412369 - DNA, 25 bp, Homo sapien
caaactgccttcgtacttctaacct

SEQ ID NO: 1412370 - DNA, 25 bp, Homo sapien
cgcgcggtcttctcagccgcccgag

SEQ ID NO: 1412371 - DNA, 25 bp, Homo sapien
ctgcagactatcacatccggcatga

SEQ ID NO: 1412372 - DNA, 25 bp, Homo sapien
agactatcacatccggcatgaagcc

SEQ ID NO: 1412373 - DNA, 25 bp, Homo sapien
agccgcccgagccaaaaacttgcct

SEQ ID NO: 1412374 - DNA, 25 bp, Homo sapien
agaggaaaaccctccgacgagcagc

SEQ ID NO: 1412375 - DNA, 25 bp, Homo sapien
ggaaatccggcactggcttgaggat

SEQ ID NO: 1412376 - DNA, 25 bp, Homo sapien
ttcttccagcggaggcgggatttcc

SEQ ID NO: 1412377 - DNA, 25 bp, Homo sapien
ttctttgtaagtgacagcccgccgc

SEQ ID NO: 1412378 - DNA, 25 bp, Homo sapien
gtgaaaggaagataagccttctcat

SEQ ID NO: 1412379 - DNA, 25 bp, Homo sapien
gtgaaaaatgtaggagtgaaaggaa

SEQ ID NO: 1412380 - DNA, 25 bp, Homo sapien
tccgagagtgaaaaatgtaggagtg

SEQ ID NO: 1412381 - DNA, 25 bp, Homo sapien
ctggagatccgagagtgaaaaatgt

SEQ ID NO: 1412382 - DNA, 25 bp, Homo sapien
gaaattgggcttgtgatcactggcc

SEQ ID NO: 1412383 - DNA, 25 bp, Homo sapien
gaaaactggcaacaagactacatgg

SEQ ID NO: 1412384 - DNA, 25 bp, Homo sapien
caaaagggacaatgcccaggatcca

SEQ ID NO: 1412385 - DNA, 25 bp, Homo sapien
tattgtcccatgaaaaccgaatgtg

SEQ ID NO: 1412386 - DNA, 25 bp, Homo sapien
ggattccagggttgaggcttcccat

SEQ ID NO: 1412387 - DNA, 25 bp, Homo sapien
gcacattgcagagatttcggaagcc

SEQ ID NO: 1412388 - DNA, 25 bp, Homo sapien
ccttgggagatcttcagcctaacag

SEQ ID NO: 1412389 - DNA, 25 bp, Homo sapien
gcaagaataaaggaccagggcagca

SEQ ID NO: 1412390 - DNA, 25 bp, Homo sapien
taaaaaggcgctacagtggcaggac

SEQ ID NO: 1412391 - DNA, 25 bp, Homo sapien
tactgtagatggacaccgaagggtc

SEQ ID NO: 1412392 - DNA, 25 bp, Homo sapien
taaagttgagaacgcagaagctggc

SEQ ID NO: 1412393 - DNA, 25 bp, Homo sapien
tgtaagtctgaaaatctgggtgtcc

SEQ ID NO: 1412394 - DNA, 25 bp, Homo sapien
taatgtgagtatccaagcatggctg

SEQ ID NO: 1412395 - DNA, 25 bp, Homo sapien
tagtattccttaccagggcattgga

SEQ ID NO: 1412396 - DNA, 25 bp, Homo sapien
cagtggcgaccatggttctagctta

SEQ ID NO: 1412397 - DNA, 25 bp, Homo sapien
caagcttcacagtggcaaaccctgg

SEQ ID NO: 1412398 - DNA, 25 bp, Homo sapien
tcagggtctccgtagcgtacagtgc

SEQ ID NO: 1412399 - DNA, 25 bp, Homo sapien
tgtgaactcgtagccccaaaggatc

SEQ ID NO: 1412400 - DNA, 25 bp, Homo sapien
taggagaggccactttcacaacttg

SEQ ID NO: 1412401 - DNA, 25 bp, Homo sapien
tgctgatgcgcacactaagggcact

SEQ ID NO: 1412402 - DNA, 25 bp, Homo sapien
gaagagcagaagcttgtagcgccac

SEQ ID NO: 1412403 - DNA, 25 bp, Homo sapien
tgtgggaggccacaactgcatgctg

SEQ ID NO: 1412404 - DNA, 25 bp, Homo sapien
tcaatgaaggttgtccacaggtcct

SEQ ID NO: 1412405 - DNA, 25 bp, Homo sapien
caactcggatcatgaggcagggctt

SEQ ID NO: 1412406 - DNA, 25 bp, Homo sapien
tcaagggtactggagatttcggcca

SEQ ID NO: 1412407 - DNA, 25 bp, Homo sapien
cagctgtagtgcctgtggttgccag

SEQ ID NO: 1412408 - DNA, 25 bp, Homo sapien
gcctctggctgttgtgattgccacc

SEQ ID NO: 1412409 - DNA, 25 bp, Homo sapien
tttcggccactgctagcctctttgt

SEQ ID NO: 1412410 - DNA, 25 bp, Homo sapien
tggccagcccctgtggattccttca

SEQ ID NO: 1412411 - DNA, 25 bp, Homo sapien
agcccctgtggattccttcatggcc

SEQ ID NO: 1412412 - DNA, 25 bp, Homo sapien
cctgcaagggtcaggtacagagcct

SEQ ID NO: 1412413 - DNA, 25 bp, Homo sapien
cagcccctgtggattccttcatggc

SEQ ID NO: 1412414 - DNA, 25 bp, Homo sapien
gagtggccccttggatgggccgcgg

SEQ ID NO: 1412415 - DNA, 25 bp, Homo sapien
gctgggatcagataagggcttgtcc

SEQ ID NO: 1412416 - DNA, 25 bp, Homo sapien
cagagctgtgcgacgggccgggcca

SEQ ID NO: 1412417 - DNA, 25 bp, Homo sapien
gccaggactcttaaacccggagctg

SEQ ID NO: 1412418 - DNA, 25 bp, Homo sapien
ttacaggtcacagtgaaggaggtct

SEQ ID NO: 1412419 - DNA, 25 bp, Homo sapien
gtgaaggaggtcttcaccacagaag

SEQ ID NO: 1412420 - DNA, 25 bp, Homo sapien
cagtgaaggaggtcttcaccacaga

SEQ ID NO: 1412421 - DNA, 25 bp, Homo sapien
gaaggaggtcttcaccacagaagac

SEQ ID NO: 1412422 - DNA, 25 bp, Homo sapien
tcagcctgttgttcttcgtcctggc

SEQ ID NO: 1412423 - DNA, 25 bp, Homo sapien
atctggtggctgatcgcctacggcc

SEQ ID NO: 1412424 - DNA, 25 bp, Homo sapien
gtcaacaacctcaacggcttcgtgg

SEQ ID NO: 1412425 - DNA, 25 bp, Homo sapien
agaccgagaccaccatcggctacgg

SEQ ID NO: 1412426 - DNA, 25 bp, Homo sapien
gagccggaccaagatgggcacatga

SEQ ID NO: 1412427 - DNA, 25 bp, Homo sapien
taatgacacggtaggccaagctgaa

SEQ ID NO: 1412428 - DNA, 25 bp, Homo sapien
tgagatcttacaggtatcaggcaca

SEQ ID NO: 1412429 - DNA, 25 bp, Homo sapien
gtataggatggattgcagtccccag

SEQ ID NO: 1412430 - DNA, 25 bp, Homo sapien
ggaagacagtcgacacctgcaagac

SEQ ID NO: 1412431 - DNA, 25 bp, Homo sapien
gcacgtctcccattctgggtagtgg

SEQ ID NO: 1412432 - DNA, 25 bp, Homo sapien
ctgggtagtgggaggtcaaataaat

SEQ ID NO: 1412433 - DNA, 25 bp, Homo sapien
aaatggcctccctataggatcccta

SEQ ID NO: 1412434 - DNA, 25 bp, Homo sapien
agagagccctgagtggggctccctc

SEQ ID NO: 1412435 - DNA, 25 bp, Homo sapien
gagccctgagtggggctccctcgcg

SEQ ID NO: 1412436 - DNA, 25 bp, Homo sapien
gagagccctgagtggggctccctcg

SEQ ID NO: 1412437 - DNA, 25 bp, Homo sapien
agagccctgagtggggctccctcgc

SEQ ID NO: 1412438 - DNA, 25 bp, Homo sapien
agtggcaccagtgactagggccacc

SEQ ID NO: 1412439 - DNA, 25 bp, Homo sapien
tcaccgttttcgaagcctcttcatg

SEQ ID NO: 1412440 - DNA, 25 bp, Homo sapien
agcctcttcatgaagcagcaagtga

SEQ ID NO: 1412441 - DNA, 25 bp, Homo sapien
cagaggcacaaatagggtgtccagg

SEQ ID NO: 1412442 - DNA, 25 bp, Homo sapien
tcatcctccacccatacacttgcct

SEQ ID NO: 1412443 - DNA, 25 bp, Homo sapien
gagagatagtagcaggagggtcaga

SEQ ID NO: 1412444 - DNA, 25 bp, Homo sapien
gcgctttccccatcaagttctctga

SEQ ID NO: 1412445 - DNA, 25 bp, Homo sapien
agaggaccccgtgcaggtgggcact

SEQ ID NO: 1412446 - DNA, 25 bp, Homo sapien
tagactgtaacaggccctgagcggg

SEQ ID NO: 1412447 - DNA, 25 bp, Homo sapien
tgtaggggtagactgtaacaggccc

SEQ ID NO: 1412448 - DNA, 25 bp, Homo sapien
gggtagactgtaacaggccctgagc

SEQ ID NO: 1412449 - DNA, 25 bp, Homo sapien
catgtaggggtagactgtaacaggc

SEQ ID NO: 1412450 - DNA, 25 bp, Homo sapien
tgtgtagtctcagccgatggcttcg

SEQ ID NO: 1412451 - DNA, 25 bp, Homo sapien
cctggtaccagctgtagtcggcatg

SEQ ID NO: 1412452 - DNA, 25 bp, Homo sapien
agtggtacacgccttcatcctcggg

SEQ ID NO: 1412453 - DNA, 25 bp, Homo sapien
tgtagtcggcatgctgcacccaggc

SEQ ID NO: 1412454 - DNA, 25 bp, Homo sapien
ctctccgtcctctggtcgctccacc

SEQ ID NO: 1412455 - DNA, 25 bp, Homo sapien
tccgtcctctggtcgctccacccac

SEQ ID NO: 1412456 - DNA, 25 bp, Homo sapien
tctccgtcctctggtcgctccaccc

SEQ ID NO: 1412457 - DNA, 25 bp, Homo sapien
gctctccgtcctctggtcgctccac

SEQ ID NO: 1412458 - DNA, 25 bp, Homo sapien
ggcagtctccccgcggtacactgtg

SEQ ID NO: 1412459 - DNA, 25 bp, Homo sapien
agggaggcagtctccccgcggtaca

SEQ ID NO: 1412460 - DNA, 25 bp, Homo sapien
agtctccccgcggtacactgtgcct

SEQ ID NO: 1412461 - DNA, 25 bp, Homo sapien
ggggccaccccgcacagagatgttg

SEQ ID NO: 1412462 - DNA, 25 bp, Homo sapien
agccatgccacagcctccagcacca

SEQ ID NO: 1412463 - DNA, 25 bp, Homo sapien
catgccacagcctccagcaccacac

SEQ ID NO: 1412464 - DNA, 25 bp, Homo sapien
ccatgccacagcctccagcaccaca

SEQ ID NO: 1412465 - DNA, 25 bp, Homo sapien
ctagccatgccacagcctccagcac

SEQ ID NO: 1412466 - DNA, 25 bp, Homo sapien
gttgacaatcctcgaaccccgtcca

SEQ ID NO: 1412467 - DNA, 25 bp, Homo sapien
gaaactcagggtattcccacaatct

SEQ ID NO: 1412468 - DNA, 25 bp, Homo sapien
ggagcgtgaggctgtggcctgcaaa

SEQ ID NO: 1412469 - DNA, 25 bp, Homo sapien
cacaatcttggtagaagaggagcgt

SEQ ID NO: 1412470 - DNA, 25 bp, Homo sapien
gaccctcgaacataggctttggcga

SEQ ID NO: 1412471 - DNA, 25 bp, Homo sapien
ctgcttcacgaagccgggtcccaga

SEQ ID NO: 1412472 - DNA, 25 bp, Homo sapien
tcccgcacatgtacagggagaggcc

SEQ ID NO: 1412473 - DNA, 25 bp, Homo sapien
aacgggcactggctgcttcacgaag

SEQ ID NO: 1412474 - DNA, 25 bp, Homo sapien
tacagagtatgcagcatgacggcct

SEQ ID NO: 1412475 - DNA, 25 bp, Homo sapien
aatgtgtcggccctcatagccaggg

SEQ ID NO: 1412476 - DNA, 25 bp, Homo sapien
gccgtagccggtatgttctggatgc

SEQ ID NO: 1412477 - DNA, 25 bp, Homo sapien
gaagtgcccctgacacattgcacag

SEQ ID NO: 1412478 - DNA, 25 bp, Homo sapien
aggccccactgtcactgccagctgg

SEQ ID NO: 1412479 - DNA, 25 bp, Homo sapien
cgttcaccaggccccactgtcactg

SEQ ID NO: 1412480 - DNA, 25 bp, Homo sapien
ccaggccccactgtcactgccagct

SEQ ID NO: 1412481 - DNA, 25 bp, Homo sapien
caccaggccccactgtcactgccag

SEQ ID NO: 1412482 - DNA, 25 bp, Homo sapien
gagttccttggagtcagatgatggc

SEQ ID NO: 1412483 - DNA, 25 bp, Homo sapien
taggggcttgaatctcacccctcag

SEQ ID NO: 1412484 - DNA, 25 bp, Homo sapien
cagagaaaacccatcaagggccggg

SEQ ID NO: 1412485 - DNA, 25 bp, Homo sapien
agcagagaaaacccatcaagggccg

SEQ ID NO: 1412486 - DNA, 25 bp, Homo sapien
ctgggcaccccctactaccatgcgg

SEQ ID NO: 1412487 - DNA, 25 bp, Homo sapien
gccatcaggatcctgaatccactca

SEQ ID NO: 1412488 - DNA, 25 bp, Homo sapien
tgggccaggacggcccttttctctg

SEQ ID NO: 1412489 - DNA, 25 bp, Homo sapien
ggcaccccctactaccatgcggtac

SEQ ID NO: 1412490 - DNA, 25 bp, Homo sapien
ttctgtgtgcttgtcctcgccaggc

SEQ ID NO: 1412491 - DNA, 25 bp, Homo sapien
tcgggcacagatcgcccaaaggaca

SEQ ID NO: 1412492 - DNA, 25 bp, Homo sapien
agttgaccgcccaactggtgcctcg

SEQ ID NO: 1412493 - DNA, 25 bp, Homo sapien
caatcgctcagcatagggagctcca

SEQ ID NO: 1412494 - DNA, 25 bp, Homo sapien
cagcagacacctggaggacatctgg

SEQ ID NO: 1412495 - DNA, 25 bp, Homo sapien
tgggggggcagcagacacctggagg

SEQ ID NO: 1412496 - DNA, 25 bp, Homo sapien
gcagacacctggaggacatctggaa

SEQ ID NO: 1412497 - DNA, 25 bp, Homo sapien
agacacctggaggacatctggaaga

SEQ ID NO: 1412498 - DNA, 25 bp, Homo sapien
gaaccactcgaagttctgctgggca

SEQ ID NO: 1412499 - DNA, 25 bp, Homo sapien
tatccttggtactgacaatgcccag

SEQ ID NO: 1412500 - DNA, 25 bp, Homo sapien
tcatagccggtcacattgcaggaga

SEQ ID NO: 1412501 - DNA, 25 bp, Homo sapien
tgagcaccacggcatcaccttgtag

SEQ ID NO: 1412502 - DNA, 25 bp, Homo sapien
tggttcctcattccatgccctctgc

SEQ ID NO: 1412503 - DNA, 25 bp, Homo sapien
ctggttcctcattccatgccctctg

SEQ ID NO: 1412504 - DNA, 25 bp, Homo sapien
gttggagatgcctggttcctcattc

SEQ ID NO: 1412505 - DNA, 25 bp, Homo sapien
gcctctgccttgacgacagcagctc

SEQ ID NO: 1412506 - DNA, 25 bp, Homo sapien
ttcactgtctccatgccatactctt

SEQ ID NO: 1412507 - DNA, 25 bp, Homo sapien
ctcatcaacatctgtactggcagtt

SEQ ID NO: 1412508 - DNA, 25 bp, Homo sapien
ttcactctcatttcaagggcttcag

SEQ ID NO: 1412509 - DNA, 25 bp, Homo sapien
ttgatgaagtgcgtggagcgcaact

SEQ ID NO: 1412510 - DNA, 25 bp, Homo sapien
cacaaggtgcttggagatcccagga

SEQ ID NO: 1412511 - DNA, 25 bp, Homo sapien
caaggaagctggaactaagcggtgt

SEQ ID NO: 1412512 - DNA, 25 bp, Homo sapien
gacttacttcaaagatcgtgggcag

SEQ ID NO: 1412513 - DNA, 25 bp, Homo sapien
gcggcagcagcgtgggcctgagggc

SEQ ID NO: 1412514 - DNA, 25 bp, Homo sapien
gcagcgaaggcggcagcagcgtggg

SEQ ID NO: 1412515 - DNA, 25 bp, Homo sapien
gcagcgtgggcctgagggcgcccat

SEQ ID NO: 1412516 - DNA, 25 bp, Homo sapien
gcgaaggcggcagcagcgtgggcct

SEQ ID NO: 1412517 - DNA, 25 bp, Homo sapien
cagctctggggaggctccgggggat

SEQ ID NO: 1412518 - DNA, 25 bp, Homo sapien
tggggaggctccgggggatggcgcg

SEQ ID NO: 1412519 - DNA, 25 bp, Homo sapien
cctgcgcggccagctctggggaggc

SEQ ID NO: 1412520 - DNA, 25 bp, Homo sapien
ctctggggaggctccgggggatggc

SEQ ID NO: 1412521 - DNA, 25 bp, Homo sapien
ggaagcggggcagcgaggcgtgggt

SEQ ID NO: 1412522 - DNA, 25 bp, Homo sapien
gtgggtgcgccgagcgagctgaact

SEQ ID NO: 1412523 - DNA, 25 bp, Homo sapien
gccgagcgagctgaactggagctgc

SEQ ID NO: 1412524 - DNA, 25 bp, Homo sapien
gcagcgaggcgtgggtgcgccgagc

SEQ ID NO: 1412525 - DNA, 25 bp, Homo sapien
aagactccagccctggatccgcccc

SEQ ID NO: 1412526 - DNA, 25 bp, Homo sapien
tgagtcgcatcgagtcccagccccg

SEQ ID NO: 1412527 - DNA, 25 bp, Homo sapien
agtcgcatcgagtcccagccccgcc

SEQ ID NO: 1412528 - DNA, 25 bp, Homo sapien
ctttgagtcgcatcgagtcccagcc

SEQ ID NO: 1412529 - DNA, 25 bp, Homo sapien
agaactgggttggtgtctccctcca

SEQ ID NO: 1412530 - DNA, 25 bp, Homo sapien
ctccagaggggataaggcccaagga

SEQ ID NO: 1412531 - DNA, 25 bp, Homo sapien
ggaacccagactgcgggttccagag

SEQ ID NO: 1412532 - DNA, 25 bp, Homo sapien
gacggacccctcagctgcttatgta

SEQ ID NO: 1412533 - DNA, 25 bp, Homo sapien
aggcatgggcctgcatccgacaccc

SEQ ID NO: 1412534 - DNA, 25 bp, Homo sapien
cctccatgtactaccccaggcatgg

SEQ ID NO: 1412535 - DNA, 25 bp, Homo sapien
gcatgggcctgcatccgacacccgt

SEQ ID NO: 1412536 - DNA, 25 bp, Homo sapien
gccctccatgtactaccccaggcat

SEQ ID NO: 1412537 - DNA, 25 bp, Homo sapien
gcacagctcatcctgtgttttcacc

SEQ ID NO: 1412538 - DNA, 25 bp, Homo sapien
acagctcatcctgtgttttcacctc

SEQ ID NO: 1412539 - DNA, 25 bp, Homo sapien
caggcacagctcatcctgtgttttc

SEQ ID NO: 1412540 - DNA, 25 bp, Homo sapien
agccaggcacagctcatcctgtgtt

SEQ ID NO: 1412541 - DNA, 25 bp, Homo sapien
gggcacatcctttccggtattgagt

SEQ ID NO: 1412542 - DNA, 25 bp, Homo sapien
ctcgggctgtgctctcgcccaaatg

SEQ ID NO: 1412543 - DNA, 25 bp, Homo sapien
gcagaggaagggcacatcctttccg

SEQ ID NO: 1412544 - DNA, 25 bp, Homo sapien
tgtgctctcgcccaaatgcagggca

SEQ ID NO: 1412545 - DNA, 25 bp, Homo sapien
cctggtgacctctcccgctaaggtc

SEQ ID NO: 1412546 - DNA, 25 bp, Homo sapien
gggtcgcagtctagagggtgaggga

SEQ ID NO: 1412547 - DNA, 25 bp, Homo sapien
gtatccctaaagagcaggggtcgca

SEQ ID NO: 1412548 - DNA, 25 bp, Homo sapien
agggtctccgactgtcccagacggg

SEQ ID NO: 1412549 - DNA, 25 bp, Homo sapien
cagcaatggctacaccaagaggaag

SEQ ID NO: 1412550 - DNA, 25 bp, Homo sapien
aagccatgggctttgaggactttcc

SEQ ID NO: 1412551 - DNA, 25 bp, Homo sapien
tccggatgtcccgagcagcattgtc

SEQ ID NO: 1412552 - DNA, 25 bp, Homo sapien
gagcagcattgtccgtgggttccaa

SEQ ID NO: 1412553 - DNA, 25 bp, Homo sapien
agttgtgtgacactgacggtcaata

SEQ ID NO: 1412554 - DNA, 25 bp, Homo sapien
aagtgacaggtgattgccaaagttg

SEQ ID NO: 1412555 - DNA, 25 bp, Homo sapien
cactgacggtcaataatgtaggact

SEQ ID NO: 1412556 - DNA, 25 bp, Homo sapien
tctgtggaaagtgacaggtgattgc

SEQ ID NO: 1412557 - DNA, 25 bp, Homo sapien
ctcctagaatccttgataaaataat

SEQ ID NO: 1412558 - DNA, 25 bp, Homo sapien
tcaagaacatggtacctcaggtaag

SEQ ID NO: 1412559 - DNA, 25 bp, Homo sapien
cagcaagcccttgtgatccgggagg

SEQ ID NO: 1412560 - DNA, 25 bp, Homo sapien
ccttctgcttgacggtgtgggagac

SEQ ID NO: 1412561 - DNA, 25 bp, Homo sapien
gaggtcataccagagcaagcagttg

SEQ ID NO: 1412562 - DNA, 25 bp, Homo sapien
tccgaaagctcatcctgcggcggta

SEQ ID NO: 1412563 - DNA, 25 bp, Homo sapien
caagtgagtgtctctttcgggcggc

SEQ ID NO: 1412564 - DNA, 25 bp, Homo sapien
ttcgggcggcctgagtagtcatacg

SEQ ID NO: 1412565 - DNA, 25 bp, Homo sapien
agccctgactctttcgaacctgttg

SEQ ID NO: 1412566 - DNA, 25 bp, Homo sapien
gctggtaagggaccttcagggagag

SEQ ID NO: 1412567 - DNA, 25 bp, Homo sapien
tccccttcagaccttgcaatcacaa

SEQ ID NO: 1412568 - DNA, 25 bp, Homo sapien
ttcctgcaggactctatccctggct

SEQ ID NO: 1412569 - DNA, 25 bp, Homo sapien
ttgtctcccagtcgaggctggtaag

SEQ ID NO: 1412570 - DNA, 25 bp, Homo sapien
catgctgttctgaaagggatggcca

SEQ ID NO: 1412571 - DNA, 25 bp, Homo sapien
agctccatgctgttctgaaagggat

SEQ ID NO: 1412572 - DNA, 25 bp, Homo sapien
gctgttctgaaagggatggccacaa

SEQ ID NO: 1412573 - DNA, 25 bp, Homo sapien
tccatgctgttctgaaagggatggc

SEQ ID NO: 1412574 - DNA, 25 bp, Homo sapien
ttttgacgtcttaggtggcagggct

SEQ ID NO: 1412575 - DNA, 25 bp, Homo sapien
ggcaaatgcccttcaaaccgacgat

SEQ ID NO: 1412576 - DNA, 25 bp, Homo sapien
gagagttggtttcaggttcctacag

SEQ ID NO: 1412577 - DNA, 25 bp, Homo sapien
aaagacaagcattgggtcagaccca

SEQ ID NO: 1412578 - DNA, 25 bp, Homo sapien
cgagtgcatgggctaattatcatca

SEQ ID NO: 1412579 - DNA, 25 bp, Homo sapien
gaggtggcatgtttagtctaccaaa

SEQ ID NO: 1412580 - DNA, 25 bp, Homo sapien
tccttttagaagcagcgagtgcatg

SEQ ID NO: 1412581 - DNA, 25 bp, Homo sapien
gaaacatctacaggatctttattgg

SEQ ID NO: 1412582 - DNA, 25 bp, Homo sapien
tctatgattcagcaacaggaactga

SEQ ID NO: 1412583 - DNA, 25 bp, Homo sapien
taaatccatcagtaatgggaatgat

SEQ ID NO: 1412584 - DNA, 25 bp, Homo sapien
gaaatagaagctcaagggcctgatg

SEQ ID NO: 1412585 - DNA, 25 bp, Homo sapien
gcctgatgatatctatgtgcaagaa

SEQ ID NO: 1412586 - DNA, 25 bp, Homo sapien
ttggtctacaccacaagttcttggg

SEQ ID NO: 1412587 - DNA, 25 bp, Homo sapien
ggagatcatcccattacagctaagg

SEQ ID NO: 1412588 - DNA, 25 bp, Homo sapien
gaatgagcgactaaaacccttgttg

SEQ ID NO: 1412589 - DNA, 25 bp, Homo sapien
gaaaaatgaaggatccgggctctga

SEQ ID NO: 1412590 - DNA, 25 bp, Homo sapien
tatgtgctgctcgatagcaccctct

SEQ ID NO: 1412591 - DNA, 25 bp, Homo sapien
gatgacctcttctgagttcctgctg

SEQ ID NO: 1412592 - DNA, 25 bp, Homo sapien
ctcaaaagttgtccctagtaaatgt

SEQ ID NO: 1412593 - DNA, 25 bp, Homo sapien
gtccacagggtctgacactcaaaag

SEQ ID NO: 1412594 - DNA, 25 bp, Homo sapien
ccaggggtcctaggcaccgtggtca

SEQ ID NO: 1412595 - DNA, 25 bp, Homo sapien
taggcaccgtggtcatccaaaggtc

SEQ ID NO: 1412596 - DNA, 25 bp, Homo sapien
ccgtggtcatccaaaggtcaaaagg

SEQ ID NO: 1412597 - DNA, 25 bp, Homo sapien
gtcctaggcaccgtggtcatccaaa

SEQ ID NO: 1412598 - DNA, 25 bp, Homo sapien
ggaggttccggacgctgcttaggaa

SEQ ID NO: 1412599 - DNA, 25 bp, Homo sapien
gctcagctccagaggcggtgagagg

SEQ ID NO: 1412600 - DNA, 25 bp, Homo sapien
ggacgagtccactttgtgtcaggcc

SEQ ID NO: 1412601 - DNA, 25 bp, Homo sapien
tctaggcttggaggggcaacgatct

SEQ ID NO: 1412602 - DNA, 25 bp, Homo sapien
gtccctcggtcggtgcgtcccgagc

SEQ ID NO: 1412603 - DNA, 25 bp, Homo sapien
tggaggcggcgtggctccggccagc

SEQ ID NO: 1412604 - DNA, 25 bp, Homo sapien
ccgagcgtgtgctggaggcggcgtg

SEQ ID NO: 1412605 - DNA, 25 bp, Homo sapien
gttccacgctgaacggcagtttggg

SEQ ID NO: 1412606 - DNA, 25 bp, Homo sapien
tataatccgtgtcaaaactgacagg

SEQ ID NO: 1412607 - DNA, 25 bp, Homo sapien
aaacgtccctggactacgcatccgg

SEQ ID NO: 1412608 - DNA, 25 bp, Homo sapien
gaaacacgcacacctataaggcacg

SEQ ID NO: 1412609 - DNA, 25 bp, Homo sapien
gggcggctggtaccatgtgccctca

SEQ ID NO: 1412610 - DNA, 25 bp, Homo sapien
tgagtggacagaaagggccactgtc

SEQ ID NO: 1412611 - DNA, 25 bp, Homo sapien
ccatggtttcagattgttcctcttt

SEQ ID NO: 1412612 - DNA, 25 bp, Homo sapien
gagtcttctgaactgcgggctccaa

SEQ ID NO: 1412613 - DNA, 25 bp, Homo sapien
caagtcatcagtccgacaggacagc

SEQ ID NO: 1412614 - DNA, 25 bp, Homo sapien
cacaaggagacaggattttgcggac

SEQ ID NO: 1412615 - DNA, 25 bp, Homo sapien
ggtctcattcctctaacacaaggag

SEQ ID NO: 1412616 - DNA, 25 bp, Homo sapien
ttggtctcattcctctaacacaagg

SEQ ID NO: 1412617 - DNA, 25 bp, Homo sapien
caggattttgcggactaatgagggt

SEQ ID NO: 1412618 - DNA, 25 bp, Homo sapien
tctgctctgcctgatccagtgccag

SEQ ID NO: 1412619 - DNA, 25 bp, Homo sapien
tcagttggtttgacctttgtcaggg

SEQ ID NO: 1412620 - DNA, 25 bp, Homo sapien
aggaaggtgtgaggaagcggtgagc

SEQ ID NO: 1412621 - DNA, 25 bp, Homo sapien
tgaggaagcggtgagcctagcacag

SEQ ID NO: 1412622 - DNA, 25 bp, Homo sapien
cccagcatcctcagttggtttgacc

SEQ ID NO: 1412623 - DNA, 25 bp, Homo sapien
ggcacatacacctccattaccagaa

SEQ ID NO: 1412624 - DNA, 25 bp, Homo sapien
gattagcatccataagatccgagca

SEQ ID NO: 1412625 - DNA, 25 bp, Homo sapien
gagctgtgcccacaacccggggatt

SEQ ID NO: 1412626 - DNA, 25 bp, Homo sapien
ccacagccatatatccagtgctggc

SEQ ID NO: 1412627 - DNA, 25 bp, Homo sapien
tgaaagcctaggtgagatctggcct

SEQ ID NO: 1412628 - DNA, 25 bp, Homo sapien
cagaccatgctgaaggtagtgccag

SEQ ID NO: 1412629 - DNA, 25 bp, Homo sapien
caggcacagcacaaagggtaggaga

SEQ ID NO: 1412630 - DNA, 25 bp, Homo sapien
gactgaatacaaggctagcatggtg

SEQ ID NO: 1412631 - DNA, 25 bp, Homo sapien
gctgagtttccccactttaggagga

SEQ ID NO: 1412632 - DNA, 25 bp, Homo sapien
ctgagtttccccactttaggaggag

SEQ ID NO: 1412633 - DNA, 25 bp, Homo sapien
cagggagtaagtacagcagccaaca

SEQ ID NO: 1412634 - DNA, 25 bp, Homo sapien
gactttcagactcagtgaccagtga

SEQ ID NO: 1412635 - DNA, 25 bp, Homo sapien
tgaccagtgataagacaagtgccca

SEQ ID NO: 1412636 - DNA, 25 bp, Homo sapien
caagcactggaaatacgggtctccc

SEQ ID NO: 1412637 - DNA, 25 bp, Homo sapien
gggtaagtcccaatctctagtgacc

SEQ ID NO: 1412638 - DNA, 25 bp, Homo sapien
aatgaggatccttccattctcaagc

SEQ ID NO: 1412639 - DNA, 25 bp, Homo sapien
tctagtgaccatacacagaggtaaa

SEQ ID NO: 1412640 - DNA, 25 bp, Homo sapien
cacaatagtctgcagtggtggcacc

SEQ ID NO: 1412641 - DNA, 25 bp, Homo sapien
atataggtatttaaactttgacaat

SEQ ID NO: 1412642 - DNA, 25 bp, Homo sapien
tataggtatttaaactttgacaata

SEQ ID NO: 1412643 - DNA, 25 bp, Homo sapien
tttatagatataaaattaggcctct

SEQ ID NO: 1412644 - DNA, 25 bp, Homo sapien
gatataaaattaggcctctaacagt

SEQ ID NO: 1412645 - DNA, 25 bp, Homo sapien
tagatataaaattaggcctctaaca

SEQ ID NO: 1412646 - DNA, 25 bp, Homo sapien
tatagatataaaattaggcctctaa

SEQ ID NO: 1412647 - DNA, 25 bp, Homo sapien
atagggacagggagattgctgccac

SEQ ID NO: 1412648 - DNA, 25 bp, Homo sapien
gattgctgccaccaaacaatgtttc

SEQ ID NO: 1412649 - DNA, 25 bp, Homo sapien
taacagaagaggtaatatccttcct

SEQ ID NO: 1412650 - DNA, 25 bp, Homo sapien
aagaggtaatatccttcctattctt

SEQ ID NO: 1412651 - DNA, 25 bp, Homo sapien
aagtgcaaaatactgtggtaagtac

SEQ ID NO: 1412652 - DNA, 25 bp, Homo sapien
cacctgacctatttagggggtgatg

SEQ ID NO: 1412653 - DNA, 25 bp, Homo sapien
cctcacctgacctatttagggggtg

SEQ ID NO: 1412654 - DNA, 25 bp, Homo sapien
gcaaaatactgtggtaagtacagag

SEQ ID NO: 1412655 - DNA, 25 bp, Homo sapien
caggaaaataggattctgggatggg

SEQ ID NO: 1412656 - DNA, 25 bp, Homo sapien
gacttcccaggaaaataggattctg

SEQ ID NO: 1412657 - DNA, 25 bp, Homo sapien
atgaataaggtggaaaggaaagtga

SEQ ID NO: 1412658 - DNA, 25 bp, Homo sapien
aagtgaagagtgtgggatggttagg

SEQ ID NO: 1412659 - DNA, 25 bp, Homo sapien
ggccccttggtactgaatagccagt

SEQ ID NO: 1412660 - DNA, 25 bp, Homo sapien
cagttaacaaaataggcttccctct

SEQ ID NO: 1412661 - DNA, 25 bp, Homo sapien
gagaggccatttctgccgagtccta

SEQ ID NO: 1412662 - DNA, 25 bp, Homo sapien
taaaccaaagagagagtggcactcc

SEQ ID NO: 1412663 - DNA, 25 bp, Homo sapien
tcactcctctggtttgtccttctcc

SEQ ID NO: 1412664 - DNA, 25 bp, Homo sapien
actcctctggtttgtccttctcctg

SEQ ID NO: 1412665 - DNA, 25 bp, Homo sapien
ctctggtttgtccttctcctgggat

SEQ ID NO: 1412666 - DNA, 25 bp, Homo sapien
tcctctggtttgtccttctcctggg

SEQ ID NO: 1412667 - DNA, 25 bp, Homo sapien
ctaaagcaaaaagtccaaagtgcgt

SEQ ID NO: 1412668 - DNA, 25 bp, Homo sapien
gtccaaagtgcgtttctgctgaatg

SEQ ID NO: 1412669 - DNA, 25 bp, Homo sapien
gcaaaaagtccaaagtgcgtttctg

SEQ ID NO: 1412670 - DNA, 25 bp, Homo sapien
ccaaagtgcgtttctgctgaatgta

SEQ ID NO: 1412671 - DNA, 25 bp, Homo sapien
caggcaggatcaggttggcagcccc

SEQ ID NO: 1412672 - DNA, 25 bp, Homo sapien
ctgggacaggaaagggttgcccagg

SEQ ID NO: 1412673 - DNA, 25 bp, Homo sapien
gacaggaaagggttgcccaggcagg

SEQ ID NO: 1412674 - DNA, 25 bp, Homo sapien
ttgcccaggcaggatcaggttggca

SEQ ID NO: 1412675 - DNA, 25 bp, Homo sapien
tcctcgtccgatgtgtctgaggagc

SEQ ID NO: 1412676 - DNA, 25 bp, Homo sapien
atcagagtccgcgtctgtggcccca

SEQ ID NO: 1412677 - DNA, 25 bp, Homo sapien
aggagctgggagactcatcagagtc

SEQ ID NO: 1412678 - DNA, 25 bp, Homo sapien
gactcatcagagtccgcgtctgtgg

SEQ ID NO: 1412679 - DNA, 25 bp, Homo sapien
tggatgggaaaggcttgttagtaac

SEQ ID NO: 1412680 - DNA, 25 bp, Homo sapien
ctgtggatgggaaaggcttgttagt

SEQ ID NO: 1412681 - DNA, 25 bp, Homo sapien
tgtggatgggaaaggcttgttagta

SEQ ID NO: 1412682 - DNA, 25 bp, Homo sapien
gtggatgggaaaggcttgttagtaa

SEQ ID NO: 1412683 - DNA, 25 bp, Homo sapien
tcaactcattgtagcgtgaaggccg

SEQ ID NO: 1412684 - DNA, 25 bp, Homo sapien
gaactaggcctcttttggcataaga

SEQ ID NO: 1412685 - DNA, 25 bp, Homo sapien
gacggcaatggacaaaagtagatac

SEQ ID NO: 1412686 - DNA, 25 bp, Homo sapien
gcctttatgaagatagcattacaca

SEQ ID NO: 1412687 - DNA, 25 bp, Homo sapien
tctcttccaaggctatatcagggat

SEQ ID NO: 1412688 - DNA, 25 bp, Homo sapien
ctgatgtctcttccaaggctatatc

SEQ ID NO: 1412689 - DNA, 25 bp, Homo sapien
cacccttttctgctgatgtctcttc

SEQ ID NO: 1412690 - DNA, 25 bp, Homo sapien
tgtctcttccaaggctatatcaggg

SEQ ID NO: 1412691 - DNA, 25 bp, Homo sapien
acagaggacagtggataggaaatcc

SEQ ID NO: 1412692 - DNA, 25 bp, Homo sapien
taggaaatccgaccaagatcacctg

SEQ ID NO: 1412693 - DNA, 25 bp, Homo sapien
tactgcttgaagtcactactctgga

SEQ ID NO: 1412694 - DNA, 25 bp, Homo sapien
ctactctggaactttttagccctct

SEQ ID NO: 1412695 - DNA, 25 bp, Homo sapien
ggaaccacagcatgtgactatcaaa

SEQ ID NO: 1412696 - DNA, 25 bp, Homo sapien
caaacaggtcagtttggtgcaagct

SEQ ID NO: 1412697 - DNA, 25 bp, Homo sapien
cggtgatggcgtctctgtctcaggt

SEQ ID NO: 1412698 - DNA, 25 bp, Homo sapien
tctcaggtgatgcataaggaaccac

SEQ ID NO: 1412699 - DNA, 25 bp, Homo sapien
gtctaggccactggttgccagcaca

SEQ ID NO: 1412700 - DNA, 25 bp, Homo sapien
tttaaccctgtcagctcagtggaag

SEQ ID NO: 1412701 - DNA, 25 bp, Homo sapien
cttttaaccctgtcagctcagtgga

SEQ ID NO: 1412702 - DNA, 25 bp, Homo sapien
catggtctaggccactggttgccag

SEQ ID NO: 1412703 - DNA, 25 bp, Homo sapien
ggaacacataggaaaggcaccctgc

SEQ ID NO: 1412704 - DNA, 25 bp, Homo sapien
caacaggctcagctataaggcagca

SEQ ID NO: 1412705 - DNA, 25 bp, Homo sapien
tcagtggctttcaccaagtggcaaa

SEQ ID NO: 1412706 - DNA, 25 bp, Homo sapien
ggaacatcctactacttgccctgag

SEQ ID NO: 1412707 - DNA, 25 bp, Homo sapien
caattccttggaacttaagactaag

SEQ ID NO: 1412708 - DNA, 25 bp, Homo sapien
ggaacaagagaataacatacagtac

SEQ ID NO: 1412709 - DNA, 25 bp, Homo sapien
cctgtactctgagctagctctgctt

SEQ ID NO: 1412710 - DNA, 25 bp, Homo sapien
agcccttgttacagacctgtactct

SEQ ID NO: 1412711 - DNA, 25 bp, Homo sapien
tgggccagagtacctggtcacttca

SEQ ID NO: 1412712 - DNA, 25 bp, Homo sapien
tgaattggagcctgcggggggagcc

SEQ ID NO: 1412713 - DNA, 25 bp, Homo sapien
tacctggtcacttcaccagacctgt

SEQ ID NO: 1412714 - DNA, 25 bp, Homo sapien
cggggggagccgacagagaacttct

SEQ ID NO: 1412715 - DNA, 25 bp, Homo sapien
gaatgggatcaagcatcaaagtgct

SEQ ID NO: 1412716 - DNA, 25 bp, Homo sapien
taaaagaccacatcgatcattcagc

SEQ ID NO: 1412717 - DNA, 25 bp, Homo sapien
gagctctggccttagatgactgggc

SEQ ID NO: 1412718 - DNA, 25 bp, Homo sapien
cattgaaagtagtgcctggtaaccc

SEQ ID NO: 1412719 - DNA, 25 bp, Homo sapien
aaccctggcattggctgagctaaaa

SEQ ID NO: 1412720 - DNA, 25 bp, Homo sapien
tccttagaggccttggataaccaga

SEQ ID NO: 1412721 - DNA, 25 bp, Homo sapien
tgaagttccccacagctaagaagga

SEQ ID NO: 1412722 - DNA, 25 bp, Homo sapien
aaaggccaggcagactatgatacga

SEQ ID NO: 1412723 - DNA, 25 bp, Homo sapien
tacgatcatgggttatacagcaagc

SEQ ID NO: 1412724 - DNA, 25 bp, Homo sapien
gggccatagaaattgacgcctttta

SEQ ID NO: 1412725 - DNA, 25 bp, Homo sapien
tgtatctcttaacatactgggcccc

SEQ ID NO: 1412726 - DNA, 25 bp, Homo sapien
agaacaagaacatagcagtgaaggc

SEQ ID NO: 1412727 - DNA, 25 bp, Homo sapien
caagaacaagaacatagcagtgaag

SEQ ID NO: 1412728 - DNA, 25 bp, Homo sapien
gaacaagaacatagcagtgaaggca

SEQ ID NO: 1412729 - DNA, 25 bp, Homo sapien
tgccaagaacaagaacatagcagtg

SEQ ID NO: 1412730 - DNA, 25 bp, Homo sapien
caagacaggtgatgtttgctttgga

SEQ ID NO: 1412731 - DNA, 25 bp, Homo sapien
tgtttgctttggactcactgttcac

SEQ ID NO: 1412732 - DNA, 25 bp, Homo sapien
tacacaagacaggtgatgtttgctt

SEQ ID NO: 1412733 - DNA, 25 bp, Homo sapien
caggtgatgtttgctttggactcac

SEQ ID NO: 1412734 - DNA, 25 bp, Homo sapien
agaagtgaagtgactgccaagatca

SEQ ID NO: 1412735 - DNA, 25 bp, Homo sapien
cctgcagcaactggcccttcatgaa

SEQ ID NO: 1412736 - DNA, 25 bp, Homo sapien
ccaacaagttcaggtgcagccttgg

SEQ ID NO: 1412737 - DNA, 25 bp, Homo sapien
gacttgaaagtccaagctcttccca

SEQ ID NO: 1412738 - DNA, 25 bp, Homo sapien
gatgaggacagaacttcttgagtac

SEQ ID NO: 1412739 - DNA, 25 bp, Homo sapien
tgttctcattctcatcaattttcct

SEQ ID NO: 1412740 - DNA, 25 bp, Homo sapien
aggacagaacttcttgagtactcca

SEQ ID NO: 1412741 - DNA, 25 bp, Homo sapien
ggtgatgaggacagaacttcttgag

SEQ ID NO: 1412742 - DNA, 25 bp, Homo sapien
gagatgatttactgactgtgcttca

SEQ ID NO: 1412743 - DNA, 25 bp, Homo sapien
tgtgcttcatcaatcagggcctata

SEQ ID NO: 1412744 - DNA, 25 bp, Homo sapien
tgtcagccaaatttaccactaaagg

SEQ ID NO: 1412745 - DNA, 25 bp, Homo sapien
tcacgtaaggaatagtgtgcacacc

SEQ ID NO: 1412746 - DNA, 25 bp, Homo sapien
ttcacatagatcgtatacagcccca

SEQ ID NO: 1412747 - DNA, 25 bp, Homo sapien
ggattcacatagatcgtatacagcc

SEQ ID NO: 1412748 - DNA, 25 bp, Homo sapien
cactgcaaactggtgggtattggca

SEQ ID NO: 1412749 - DNA, 25 bp, Homo sapien
catagatcgtatacagccccacttt

SEQ ID NO: 1412750 - DNA, 25 bp, Homo sapien
tctcaggtcaatggtgaaaacaact

SEQ ID NO: 1412751 - DNA, 25 bp, Homo sapien
caggtcaatggtgaaaacaactgca

SEQ ID NO: 1412752 - DNA, 25 bp, Homo sapien
gacgctgggcggtcttgtctcaggt

SEQ ID NO: 1412753 - DNA, 25 bp, Homo sapien
cgctgggcggtcttgtctcaggtca

SEQ ID NO: 1412754 - DNA, 25 bp, Homo sapien
ctgcagataagaacgtacagggaga

SEQ ID NO: 1412755 - DNA, 25 bp, Homo sapien
taagaacgtacagggagagtctggt

SEQ ID NO: 1412756 - DNA, 25 bp, Homo sapien
cagataagaacgtacagggagagtc

SEQ ID NO: 1412757 - DNA, 25 bp, Homo sapien
gaacgtacagggagagtctggttcc

SEQ ID NO: 1412758 - DNA, 25 bp, Homo sapien
caattccatacccttaagtgcagag

SEQ ID NO: 1412759 - DNA, 25 bp, Homo sapien
ttttcacatatcctgggccgccttg

SEQ ID NO: 1412760 - DNA, 25 bp, Homo sapien
tagaaaaggatactccaggtccacc

SEQ ID NO: 1412761 - DNA, 25 bp, Homo sapien
aactccttgttagctgccaccatgg

SEQ ID NO: 1412762 - DNA, 25 bp, Homo sapien
agttctgctactcgaacctgcccgt

SEQ ID NO: 1412763 - DNA, 25 bp, Homo sapien
tgggacgctcccttgtgctgggcca

SEQ ID NO: 1412764 - DNA, 25 bp, Homo sapien
gggccacacgttttgtattcttgca

SEQ ID NO: 1412765 - DNA, 25 bp, Homo sapien
cttgtgggacgctcccttgtgctgg

SEQ ID NO: 1412766 - DNA, 25 bp, Homo sapien
gcagtttggttcaagagcctgtgct

SEQ ID NO: 1412767 - DNA, 25 bp, Homo sapien
catgctcaaggaatctagggttgcc

SEQ ID NO: 1412768 - DNA, 25 bp, Homo sapien
tgaggcttccaacagtccacatgct

SEQ ID NO: 1412769 - DNA, 25 bp, Homo sapien
tgcatgcaccctacctatgaggctt

SEQ ID NO: 1412770 - DNA, 25 bp, Homo sapien
aataactcactatcagctcccaatc

SEQ ID NO: 1412771 - DNA, 25 bp, Homo sapien
gattctctcagttgctattatgctc

SEQ ID NO: 1412772 - DNA, 25 bp, Homo sapien
aactcatgcctgattctctcagttg

SEQ ID NO: 1412773 - DNA, 25 bp, Homo sapien
tacaataactcactatcagctccca

SEQ ID NO: 1412774 - DNA, 25 bp, Homo sapien
tcaagcccatgctgcaggcggaaac

SEQ ID NO: 1412775 - DNA, 25 bp, Homo sapien
aagtccagtactggctgccgccgta

SEQ ID NO: 1412776 - DNA, 25 bp, Homo sapien
aggtgccgcgctggttaaagtgcag

SEQ ID NO: 1412777 - DNA, 25 bp, Homo sapien
taaagtgcagggtattgacacaacc

SEQ ID NO: 1412778 - DNA, 25 bp, Homo sapien
ctgatgagtcctggtcacggttagc

SEQ ID NO: 1412779 - DNA, 25 bp, Homo sapien
gtacacggcgccgaggctgctcttc

SEQ ID NO: 1412780 - DNA, 25 bp, Homo sapien
cctcttcctctgagcggtcatggac

SEQ ID NO: 1412781 - DNA, 25 bp, Homo sapien
ctgtacacggcgccgaggctgctct

SEQ ID NO: 1412782 - DNA, 25 bp, Homo sapien
acacggcgccgaggctgctcttctt

SEQ ID NO: 1412783 - DNA, 25 bp, Homo sapien
tcgattttcatcattaatggagtaa

SEQ ID NO: 1412784 - DNA, 25 bp, Homo sapien
taatggagtaatgaccagtgtcctc

SEQ ID NO: 1412785 - DNA, 25 bp, Homo sapien
ccatgctgtcagagtccttatcttc

SEQ ID NO: 1412786 - DNA, 25 bp, Homo sapien
agtgtcctccatgctgtcagagtcc

SEQ ID NO: 1412787 - DNA, 25 bp, Homo sapien
tgagctctctgtgtctgtgcctcga

SEQ ID NO: 1412788 - DNA, 25 bp, Homo sapien
gagctctctgtgtctgtgcctcgac

SEQ ID NO: 1412789 - DNA, 25 bp, Homo sapien
ctgagctctctgtgtctgtgcctcg

SEQ ID NO: 1412790 - DNA, 25 bp, Homo sapien
cttcaatgcctgaggatgtctccct

SEQ ID NO: 1412791 - DNA, 25 bp, Homo sapien
tcatccccagtcaagctcaaactca

SEQ ID NO: 1412792 - DNA, 25 bp, Homo sapien
ccacttcaatgcctgaggatgtctc

SEQ ID NO: 1412793 - DNA, 25 bp, Homo sapien
ccatcatccccagtcaagctcaaac

SEQ ID NO: 1412794 - DNA, 25 bp, Homo sapien
tcctctggactgctagacaggcttc

SEQ ID NO: 1412795 - DNA, 25 bp, Homo sapien
ctcctctggactgctagacaggctt

SEQ ID NO: 1412796 - DNA, 25 bp, Homo sapien
gctgagcctgttatatatgctacga

SEQ ID NO: 1412797 - DNA, 25 bp, Homo sapien
gcaccttattgcctagtcatgtgga

SEQ ID NO: 1412798 - DNA, 25 bp, Homo sapien
gactgaaacaccaacctaacaggtc

SEQ ID NO: 1412799 - DNA, 25 bp, Homo sapien
gcaatgtactcttaagcaaaaccca

SEQ ID NO: 1412800 - DNA, 25 bp, Homo sapien
gcccagccatgtaatctctctatca

SEQ ID NO: 1412801 - DNA, 25 bp, Homo sapien
gcataatatagtccaaggtgtttcc

SEQ ID NO: 1412802 - DNA, 25 bp, Homo sapien
aggcctccactctatcttgcaggga

SEQ ID NO: 1412803 - DNA, 25 bp, Homo sapien
ctgtggaaagggacctctcaatata

SEQ ID NO: 1412804 - DNA, 25 bp, Homo sapien
cattagctaagtctgttctgccatc

SEQ ID NO: 1412805 - DNA, 25 bp, Homo sapien
gctaagtctgttctgccatctgtgc

SEQ ID NO: 1412806 - DNA, 25 bp, Homo sapien
agtctgttctgccatctgtgctgct

SEQ ID NO: 1412807 - DNA, 25 bp, Homo sapien
tgttctgccatctgtgctgctccct

SEQ ID NO: 1412808 - DNA, 25 bp, Homo sapien
ttgaatgatgtttgctgtagccagc

SEQ ID NO: 1412809 - DNA, 25 bp, Homo sapien
cttgaatgatgtttgctgtagccag

SEQ ID NO: 1412810 - DNA, 25 bp, Homo sapien
gattgttcataataggccaaggtgg

SEQ ID NO: 1412811 - DNA, 25 bp, Homo sapien
aaaagtatcctctgtcaaaagacag

SEQ ID NO: 1412812 - DNA, 25 bp, Homo sapien
gacagtagcccaaagattgttcata

SEQ ID NO: 1412813 - DNA, 25 bp, Homo sapien
tgaagctgactgaacttcaggaagg

SEQ ID NO: 1412814 - DNA, 25 bp, Homo sapien
tatccactcccagagaattcaaaag

SEQ ID NO: 1412815 - DNA, 25 bp, Homo sapien
taccatacgtttcaccccactatta

SEQ ID NO: 1412816 - DNA, 25 bp, Homo sapien
ccactcccagagaattcaaaagcag

SEQ ID NO: 1412817 - DNA, 25 bp, Homo sapien
cactattatccactcccagagaatt

SEQ ID NO: 1412818 - DNA, 25 bp, Homo sapien
ccttgatccctttactaagacctga

SEQ ID NO: 1412819 - DNA, 25 bp, Homo sapien
tgagcccgatcgaaacatcaacgtg

SEQ ID NO: 1412820 - DNA, 25 bp, Homo sapien
taagacctgaattcggtctgtcaaa

SEQ ID NO: 1412821 - DNA, 25 bp, Homo sapien
catcaacgtgtaaatattattattg

SEQ ID NO: 1412822 - DNA, 25 bp, Homo sapien
tgctcccaaggtacaacttacaata

SEQ ID NO: 1412823 - DNA, 25 bp, Homo sapien
gcttaaaacctcaagaagtgccttc

SEQ ID NO: 1412824 - DNA, 25 bp, Homo sapien
catttacatcagaagtctgttgcca

SEQ ID NO: 1412825 - DNA, 25 bp, Homo sapien
tctcagtttaactaattcctaggga

SEQ ID NO: 1412826 - DNA, 25 bp, Homo sapien
caatgccctattggcaacctcaagg

SEQ ID NO: 1412827 - DNA, 25 bp, Homo sapien
cacgtgaggcaaatatgtatgcttc

SEQ ID NO: 1412828 - DNA, 25 bp, Homo sapien
gcattgacccaatccactagacata

SEQ ID NO: 1412829 - DNA, 25 bp, Homo sapien
gaacttggccagacttccttaaaca

SEQ ID NO: 1412830 - DNA, 25 bp, Homo sapien
tctcagcgcactgcagtgatcactg

SEQ ID NO: 1412831 - DNA, 25 bp, Homo sapien
taattgactgcatttagcagggtgc

SEQ ID NO: 1412832 - DNA, 25 bp, Homo sapien
ggttggtcctactccacactaagga

SEQ ID NO: 1412833 - DNA, 25 bp, Homo sapien
tgttgcccatactaaactgcagagg

SEQ ID NO: 1412834 - DNA, 25 bp, Homo sapien
tccccagccctgattcacttttaaa

SEQ ID NO: 1412835 - DNA, 25 bp, Homo sapien
aaaagagaccttttcctcatacagt

SEQ ID NO: 1412836 - DNA, 25 bp, Homo sapien
gaatagttgcagtagaagtaaacaa

SEQ ID NO: 1412837 - DNA, 25 bp, Homo sapien
gatgaggatcactgtatagcccaac

SEQ ID NO: 1412838 - DNA, 25 bp, Homo sapien
gtcacatgccatgagcctctagtct

SEQ ID NO: 1412839 - DNA, 25 bp, Homo sapien
ctagtctctgctaccagaaacctga

SEQ ID NO: 1412840 - DNA, 25 bp, Homo sapien
tgaaagcctcacgaaaactgcattt

SEQ ID NO: 1412841 - DNA, 25 bp, Homo sapien
catttataagtatgttctgactccc

SEQ ID NO: 1412842 - DNA, 25 bp, Homo sapien
cagcgcagtctgtcttgaactcaag

SEQ ID NO: 1412843 - DNA, 25 bp, Homo sapien
tgaaatagactggactcagacacca

SEQ ID NO: 1412844 - DNA, 25 bp, Homo sapien
agaacaacactcaagctctttggga

SEQ ID NO: 1412845 - DNA, 25 bp, Homo sapien
gatgacaacccgaagctgtgagagg

SEQ ID NO: 1412846 - DNA, 25 bp, Homo sapien
atcactgaagtaaggccaggctgag

SEQ ID NO: 1412847 - DNA, 25 bp, Homo sapien
tatcactgaagtaaggccaggctga

SEQ ID NO: 1412848 - DNA, 25 bp, Homo sapien
tcactgaagtaaggccaggctgagc

SEQ ID NO: 1412849 - DNA, 25 bp, Homo sapien
ttatcactgaagtaaggccaggctg

SEQ ID NO: 1412850 - DNA, 25 bp, Homo sapien
ctgagaaaataggtctgtagattca

SEQ ID NO: 1412851 - DNA, 25 bp, Homo sapien
gatgctttccaactaacagggacca

SEQ ID NO: 1412852 - DNA, 25 bp, Homo sapien
catgaagattagaagccaggcaagt

SEQ ID NO: 1412853 - DNA, 25 bp, Homo sapien
ggcgagccgtgtccctcaatctaag

SEQ ID NO: 1412854 - DNA, 25 bp, Homo sapien
tcccggagagaatgtgatagcgcta

SEQ ID NO: 1412855 - DNA, 25 bp, Homo sapien
ccaacgaagcaaggcgtccctgtga

SEQ ID NO: 1412856 - DNA, 25 bp, Homo sapien
aaggcgtccctgtgaactgtgcggc

SEQ ID NO: 1412857 - DNA, 25 bp, Homo sapien
cctgtgaactgtgcggctggctctt

SEQ ID NO: 1412858 - DNA, 25 bp, Homo sapien
cggctggctcttgggggcaacacca

SEQ ID NO: 1412859 - DNA, 25 bp, Homo sapien
ggaaaagacctgagcgctaagagct

SEQ ID NO: 1412860 - DNA, 25 bp, Homo sapien
tcccagcgatgacttcgggtcggcg

SEQ ID NO: 1412861 - DNA, 25 bp, Homo sapien
cgctaagagcttgggatacgggtca

SEQ ID NO: 1412862 - DNA, 25 bp, Homo sapien
aagggcaaccagtactcccagcgat

SEQ ID NO: 1412863 - DNA, 25 bp, Homo sapien
gggcgcaggccgagccggaacgaga

SEQ ID NO: 1412864 - DNA, 25 bp, Homo sapien
ggccgagccggaacgagacacagac

SEQ ID NO: 1412865 - DNA, 25 bp, Homo sapien
caggccgagccggaacgagacacag

SEQ ID NO: 1412866 - DNA, 25 bp, Homo sapien
cgcaggccgagccggaacgagacac

SEQ ID NO: 1412867 - DNA, 25 bp, Homo sapien
atcggcgaggctcagcagcccgctt

SEQ ID NO: 1412868 - DNA, 25 bp, Homo sapien
aagcacgggaatcggcgaggctcag

SEQ ID NO: 1412869 - DNA, 25 bp, Homo sapien
agcccgcttcccgtcttgggtcatc

SEQ ID NO: 1412870 - DNA, 25 bp, Homo sapien
ttctgctagcggctgctccgactgt

SEQ ID NO: 1412871 - DNA, 25 bp, Homo sapien
ctgccacgctttccggccccgtttg

SEQ ID NO: 1412872 - DNA, 25 bp, Homo sapien
ttccggccccgtttgcgacgatgtg

SEQ ID NO: 1412873 - DNA, 25 bp, Homo sapien
cgcctgcgctgccacgctttccggc

SEQ ID NO: 1412874 - DNA, 25 bp, Homo sapien
ctttccggccccgtttgcgacgatg

SEQ ID NO: 1412875 - DNA, 25 bp, Homo sapien
ggtcgcgcgagctcacggctcgcaa

SEQ ID NO: 1412876 - DNA, 25 bp, Homo sapien
gactgagggaagagtggtcgcgcga

SEQ ID NO: 1412877 - DNA, 25 bp, Homo sapien
accctcctcgaaggacgcacaaggg

SEQ ID NO: 1412878 - DNA, 25 bp, Homo sapien
taaggccaacggaaaacagagcgag

SEQ ID NO: 1412879 - DNA, 25 bp, Homo sapien
tcttcgggcttgcttatcttgtgat

SEQ ID NO: 1412880 - DNA, 25 bp, Homo sapien
tttccagcggattggcaggccactt

SEQ ID NO: 1412881 - DNA, 25 bp, Homo sapien
tactctaaacaaatgcgagttaggg

SEQ ID NO: 1412882 - DNA, 25 bp, Homo sapien
caggccacttcctggatgatggcca

SEQ ID NO: 1412883 - DNA, 25 bp, Homo sapien
tcgaaactcgtttgaaaccaggcca

SEQ ID NO: 1412884 - DNA, 25 bp, Homo sapien
tattgccattacagttaaacataag

SEQ ID NO: 1412885 - DNA, 25 bp, Homo sapien
cgtttgtctacttccattattgcca

SEQ ID NO: 1412886 - DNA, 25 bp, Homo sapien
ttaaacataaggcagccagagtgct

SEQ ID NO: 1412887 - DNA, 25 bp, Homo sapien
ccattcagtggcctgagcagtggga

SEQ ID NO: 1412888 - DNA, 25 bp, Homo sapien
cctacccattcagtggcctgagcag

SEQ ID NO: 1412889 - DNA, 25 bp, Homo sapien
ttaagaccattcagtggttgctcct

SEQ ID NO: 1412890 - DNA, 25 bp, Homo sapien
ccattcagtggttgctcctacccat

SEQ ID NO: 1412891 - DNA, 25 bp, Homo sapien
agtgctccattgttcagtaggaact

SEQ ID NO: 1412892 - DNA, 25 bp, Homo sapien
tgagtgctccattgttcagtaggaa

SEQ ID NO: 1412893 - DNA, 25 bp, Homo sapien
gagtgctccattgttcagtaggaac

SEQ ID NO: 1412894 - DNA, 25 bp, Homo sapien
tccttggtcactgccttttcagcag

SEQ ID NO: 1412895 - DNA, 25 bp, Homo sapien
attcctccttggtcactgccttttc

SEQ ID NO: 1412896 - DNA, 25 bp, Homo sapien
agctggagcagaccattcaccctga

SEQ ID NO: 1412897 - DNA, 25 bp, Homo sapien
ggagcagaccattcaccctgaaatt

SEQ ID NO: 1412898 - DNA, 25 bp, Homo sapien
cgggatggcaatgtccacatagcgc

SEQ ID NO: 1412899 - DNA, 25 bp, Homo sapien
cagtgagctcccttgttgttgcacg

SEQ ID NO: 1412900 - DNA, 25 bp, Homo sapien
tcagtgagctcccttgttgttgcac

SEQ ID NO: 1412901 - DNA, 25 bp, Homo sapien
tgcacgggatggcaatgtccacata

SEQ ID NO: 1412902 - DNA, 25 bp, Homo sapien
gagcgatggtaggtagattaacata

SEQ ID NO: 1412903 - DNA, 25 bp, Homo sapien
cagagcgatggtaggtagattaaca

SEQ ID NO: 1412904 - DNA, 25 bp, Homo sapien
gttacacagagcgatggtaggtaga

SEQ ID NO: 1412905 - DNA, 25 bp, Homo sapien
cacagagcgatggtaggtagattaa

SEQ ID NO: 1412906 - DNA, 25 bp, Homo sapien
acaatagcacgagctgccagcagaa

SEQ ID NO: 1412907 - DNA, 25 bp, Homo sapien
cataagaagccatggctcccagaag

SEQ ID NO: 1412908 - DNA, 25 bp, Homo sapien
caatggcaacaatagcacgagctgc

SEQ ID NO: 1412909 - DNA, 25 bp, Homo sapien
tggcaacaatagcacgagctgccag

SEQ ID NO: 1412910 - DNA, 25 bp, Homo sapien
ttccttttatagatatactgttcca

SEQ ID NO: 1412911 - DNA, 25 bp, Homo sapien
tttccttttatagatatactgttcc

SEQ ID NO: 1412912 - DNA, 25 bp, Homo sapien
cttttccttttatagatatactgtt

SEQ ID NO: 1412913 - DNA, 25 bp, Homo sapien
tcacttttccttttatagatatact

SEQ ID NO: 1412914 - DNA, 25 bp, Homo sapien
ctgtaagtcaagattggtgccacct

SEQ ID NO: 1412915 - DNA, 25 bp, Homo sapien
gattggtgccacctaagtgggttcc

SEQ ID NO: 1412916 - DNA, 25 bp, Homo sapien
aagattggtgccacctaagtgggtt

SEQ ID NO: 1412917 - DNA, 25 bp, Homo sapien
ttggtgccacctaagtgggttcctg

SEQ ID NO: 1412918 - DNA, 25 bp, Homo sapien
ctgcaaggaacttaaggacatcctc

SEQ ID NO: 1412919 - DNA, 25 bp, Homo sapien
ttgcaggacatcaagggctccggac

SEQ ID NO: 1412920 - DNA, 25 bp, Homo sapien
ctcctccttcatttgcaggacatca

SEQ ID NO: 1412921 - DNA, 25 bp, Homo sapien
gaacttaaggacatcctcctccttc

SEQ ID NO: 1412922 - DNA, 25 bp, Homo sapien
tggagacaacacctctacaaccttt

SEQ ID NO: 1412923 - DNA, 25 bp, Homo sapien
ggttcctgggtatcaatgccaactc

SEQ ID NO: 1412924 - DNA, 25 bp, Homo sapien
tttttggacccactgtgagagcagg

SEQ ID NO: 1412925 - DNA, 25 bp, Homo sapien
aagacactgtggtggtacttcaggt

SEQ ID NO: 1412926 - DNA, 25 bp, Homo sapien
taggaccactcacattccgttagcc

SEQ ID NO: 1412927 - DNA, 25 bp, Homo sapien
gatatccagctgttatccactgcag

SEQ ID NO: 1412928 - DNA, 25 bp, Homo sapien
ccacacgtgattacagaagagttct

SEQ ID NO: 1412929 - DNA, 25 bp, Homo sapien
taacccaggaattgcaattgacatc

SEQ ID NO: 1412930 - DNA, 25 bp, Homo sapien
ttcaattcttaattcatgaagccac

SEQ ID NO: 1412931 - DNA, 25 bp, Homo sapien
aattcttaattcatgaagccaccca

SEQ ID NO: 1412932 - DNA, 25 bp, Homo sapien
tcttaattcatgaagccacccatac

SEQ ID NO: 1412933 - DNA, 25 bp, Homo sapien
caattcttaattcatgaagccaccc

SEQ ID NO: 1412934 - DNA, 25 bp, Homo sapien
ggtcttcagagagaccgagggcccc

SEQ ID NO: 1412935 - DNA, 25 bp, Homo sapien
gacttgtgctggtcagtgaacacct

SEQ ID NO: 1412936 - DNA, 25 bp, Homo sapien
tgctgtcaaacttgccgggtcggca

SEQ ID NO: 1412937 - DNA, 25 bp, Homo sapien
gacttaacctacagaacagtctggc

SEQ ID NO: 1412938 - DNA, 25 bp, Homo sapien
tagtttgagaaagactgccctagag

SEQ ID NO: 1412939 - DNA, 25 bp, Homo sapien
gaagctcaaagcgactcataatgca

SEQ ID NO: 1412940 - DNA, 25 bp, Homo sapien
tttagattcctggagtaagccctgg

SEQ ID NO: 1412941 - DNA, 25 bp, Homo sapien
aatagtgacactgaagccccatgac

SEQ ID NO: 1412942 - DNA, 25 bp, Homo sapien
agccaaggtccgtagacccactggg

SEQ ID NO: 1412943 - DNA, 25 bp, Homo sapien
caacatatgtcagccaaggtccgta

SEQ ID NO: 1412944 - DNA, 25 bp, Homo sapien
tatgtcagccaaggtccgtagaccc

SEQ ID NO: 1412945 - DNA, 25 bp, Homo sapien
caaggtccgtagacccactgggagc

SEQ ID NO: 1412946 - DNA, 25 bp, Homo sapien
ggaacatgaggaaagatggccatcc

SEQ ID NO: 1412947 - DNA, 25 bp, Homo sapien
caacttacggaagctgaggaagatc

SEQ ID NO: 1412948 - DNA, 25 bp, Homo sapien
caatattgtgtagaactagtctcct

SEQ ID NO: 1412949 - DNA, 25 bp, Homo sapien
cattgaaatactcaagggaacatga

SEQ ID NO: 1412950 - DNA, 25 bp, Homo sapien
tgtatctcaaataagccagaatgta

SEQ ID NO: 1412951 - DNA, 25 bp, Homo sapien
ccaagctactttcctgaaccaaggg

SEQ ID NO: 1412952 - DNA, 25 bp, Homo sapien
tctaagagaatcatgtatctcaaat

SEQ ID NO: 1412953 - DNA, 25 bp, Homo sapien
gctactttcctgaaccaagggacag

SEQ ID NO: 1412954 - DNA, 25 bp, Homo sapien
aaaaacctcagctggtatggcacaa

SEQ ID NO: 1412955 - DNA, 25 bp, Homo sapien
ccacaatggagtagggttcacagaa

SEQ ID NO: 1412956 - DNA, 25 bp, Homo sapien
gagtagagacaaggcacaaagaccc

SEQ ID NO: 1412957 - DNA, 25 bp, Homo sapien
tcagcacctagagagaggagaatcc

SEQ ID NO: 1412958 - DNA, 25 bp, Homo sapien
tgggcccgaaagattgagggcatcc

SEQ ID NO: 1412959 - DNA, 25 bp, Homo sapien
cacctggtgggcccgaaagattgag

SEQ ID NO: 1412960 - DNA, 25 bp, Homo sapien
gcccgaaagattgagggcatccagg

SEQ ID NO: 1412961 - DNA, 25 bp, Homo sapien
tggcacctggtgggcccgaaagatt

SEQ ID NO: 1412962 - DNA, 25 bp, Homo sapien
aatcctgagaggttaaagaattctg

SEQ ID NO: 1412963 - DNA, 25 bp, Homo sapien
gaattctggaaattggggactcaaa

SEQ ID NO: 1412964 - DNA, 25 bp, Homo sapien
gacgtgaagatccatccccagtagc

SEQ ID NO: 1412965 - DNA, 25 bp, Homo sapien
gatgaagggactcagatagttgctc

SEQ ID NO: 1412966 - DNA, 25 bp, Homo sapien
tccagccagctcttttggaggatgg

SEQ ID NO: 1412967 - DNA, 25 bp, Homo sapien
gctcttttggaggatggcctaaatc

SEQ ID NO: 1412968 - DNA, 25 bp, Homo sapien
gccagctcttttggaggatggccta

SEQ ID NO: 1412969 - DNA, 25 bp, Homo sapien
tcttttggaggatggcctaaatctt

SEQ ID NO: 1412970 - DNA, 25 bp, Homo sapien
cactgaacacctaagtggacagcac

SEQ ID NO: 1412971 - DNA, 25 bp, Homo sapien
cacctaggtctagcagtattgcatc

SEQ ID NO: 1412972 - DNA, 25 bp, Homo sapien
gagaggatccctcctccacctaggt

SEQ ID NO: 1412973 - DNA, 25 bp, Homo sapien
gaagaggaatctaatgaatgatctc

SEQ ID NO: 1412974 - DNA, 25 bp, Homo sapien
ctgctctggaggtagagattcccga

SEQ ID NO: 1412975 - DNA, 25 bp, Homo sapien
gctgtgctgctcctgatatttttca

SEQ ID NO: 1412976 - DNA, 25 bp, Homo sapien
tattttgcacatgacgctgtgctgc

SEQ ID NO: 1412977 - DNA, 25 bp, Homo sapien
ggtctctgcctcaaactgctcacat

SEQ ID NO: 1412978 - DNA, 25 bp, Homo sapien
agctcttcttccgacatgctggagt

SEQ ID NO: 1412979 - DNA, 25 bp, Homo sapien
tacagcacatccttggagagtaggt

SEQ ID NO: 1412980 - DNA, 25 bp, Homo sapien
taggttctgcataatactctgcatg

SEQ ID NO: 1412981 - DNA, 25 bp, Homo sapien
gctcttcttccgacatgctggagtt

SEQ ID NO: 1412982 - DNA, 25 bp, Homo sapien
ggcatttttggctaatccacttagt

SEQ ID NO: 1412983 - DNA, 25 bp, Homo sapien
ctttaggcaagaagtgaattcttgt

SEQ ID NO: 1412984 - DNA, 25 bp, Homo sapien
ttttggctaatccacttagtgtttc

SEQ ID NO: 1412985 - DNA, 25 bp, Homo sapien
aattcttgttgggaggtcatatcac

SEQ ID NO: 1412986 - DNA, 25 bp, Homo sapien
gcttttggaactgctccaccaggtg

SEQ ID NO: 1412987 - DNA, 25 bp, Homo sapien
gagcttttggaactgctccaccagg

SEQ ID NO: 1412988 - DNA, 25 bp, Homo sapien
agagcttttggaactgctccaccag

SEQ ID NO: 1412989 - DNA, 25 bp, Homo sapien
gagagcttttggaactgctccacca

SEQ ID NO: 1412990 - DNA, 25 bp, Homo sapien
gaactccgcagtggcttgggaagcc

SEQ ID NO: 1412991 - DNA, 25 bp, Homo sapien
tgccttctcgaactccgcagtggct

SEQ ID NO: 1412992 - DNA, 25 bp, Homo sapien
cagttcactgtcgaatagttcctgg

SEQ ID NO: 1412993 - DNA, 25 bp, Homo sapien
ttctcttgggaagcgaagagggcat

SEQ ID NO: 1412994 - DNA, 25 bp, Homo sapien
gctttatcgaaatcatcaagagcac

SEQ ID NO: 1412995 - DNA, 25 bp, Homo sapien
gggtttggctttatcgaaatcatca

SEQ ID NO: 1412996 - DNA, 25 bp, Homo sapien
ggcgatctcttctggggccccgaag

SEQ ID NO: 1412997 - DNA, 25 bp, Homo sapien
ggagggtttggctttatcgaaatca

SEQ ID NO: 1412998 - DNA, 25 bp, Homo sapien
cagactccatggtacggcattaaac

SEQ ID NO: 1412999 - DNA, 25 bp, Homo sapien
tctcttattctccagtttagtgctc

SEQ ID NO: 1413000 - DNA, 25 bp, Homo sapien
ccatggtacggcattaaactatctt

SEQ ID NO: 1413001 - DNA, 25 bp, Homo sapien
ttctcttattctccagtttagtgct

SEQ ID NO: 1413002 - DNA, 25 bp, Homo sapien
gaaaggagtccgcttgagctactga

SEQ ID NO: 1413003 - DNA, 25 bp, Homo sapien
gaccggccacgagcttgctaggagt

SEQ ID NO: 1413004 - DNA, 25 bp, Homo sapien
gagtgcgtagttcgctacccagcaa

SEQ ID NO: 1413005 - DNA, 25 bp, Homo sapien
gaagaggtatcatgaaacgccgtcc

SEQ ID NO: 1413006 - DNA, 25 bp, Homo sapien
aagctcctccaattccctgtccgct

SEQ ID NO: 1413007 - DNA, 25 bp, Homo sapien
tacagccttcctcagcggcggccat

SEQ ID NO: 1413008 - DNA, 25 bp, Homo sapien
ttcggccccgacactacagccttcc

SEQ ID NO: 1413009 - DNA, 25 bp, Homo sapien
ttccctgtccgcttcggccccgaca

SEQ ID NO: 1413010 - DNA, 25 bp, Homo sapien
aggcgggacctcctcggtgccgaca

SEQ ID NO: 1413011 - DNA, 25 bp, Homo sapien
gaccagtgcggaaccgccattttta

SEQ ID NO: 1413012 - DNA, 25 bp, Homo sapien
taaccaatggtattgttgaccagtg

SEQ ID NO: 1413013 - DNA, 25 bp, Homo sapien
cttctgcctcgggtaaccaatggta

SEQ ID NO: 1413014 - DNA, 25 bp, Homo sapien
tctccacacagaacccaacctccaa

SEQ ID NO: 1413015 - DNA, 25 bp, Homo sapien
tttccctgaacaatctccttttctc

SEQ ID NO: 1413016 - DNA, 25 bp, Homo sapien
cctgaacaatctccttttctccaca

SEQ ID NO: 1413017 - DNA, 25 bp, Homo sapien
ttctccacacagaacccaacctcca

SEQ ID NO: 1413018 - DNA, 25 bp, Homo sapien
gcagtttaggtcctcatatataccc

SEQ ID NO: 1413019 - DNA, 25 bp, Homo sapien
gataaaaggctgcaatcaaaaacag

SEQ ID NO: 1413020 - DNA, 25 bp, Homo sapien
gaaggcacagtaatgtcactctacc

SEQ ID NO: 1413021 - DNA, 25 bp, Homo sapien
caattattcttagcatatgacaagc

SEQ ID NO: 1413022 - DNA, 25 bp, Homo sapien
atatgtactttggtggggtgcctgc

SEQ ID NO: 1413023 - DNA, 25 bp, Homo sapien
gaacatgagagtgtccaagaaataa

SEQ ID NO: 1413024 - DNA, 25 bp, Homo sapien
tattactggaaggaagatatgtact

SEQ ID NO: 1413025 - DNA, 25 bp, Homo sapien
cctgcatgggtgaacaagaacatga

SEQ ID NO: 1413026 - DNA, 25 bp, Homo sapien
gaacaaatcaataacccgcagtgtg

SEQ ID NO: 1413027 - DNA, 25 bp, Homo sapien
agtacacagagggtacctgccttga

SEQ ID NO: 1413028 - DNA, 25 bp, Homo sapien
gatgattaagagttggtgtggccta

SEQ ID NO: 1413029 - DNA, 25 bp, Homo sapien
ggcctagtcacaccaaaatgtattt

SEQ ID NO: 1413030 - DNA, 25 bp, Homo sapien
tataggcgcatgctaccatgccagg

SEQ ID NO: 1413031 - DNA, 25 bp, Homo sapien
ctataggcgcatgctaccatgccag

SEQ ID NO: 1413032 - DNA, 25 bp, Homo sapien
tagaccttcggattttccatagaag

SEQ ID NO: 1413033 - DNA, 25 bp, Homo sapien
gaaaggcaaggacaattatgagcac

SEQ ID NO: 1413034 - DNA, 25 bp, Homo sapien
gaacatatggtgactgacccatgca

SEQ ID NO: 1413035 - DNA, 25 bp, Homo sapien
gagccagatctgaagagtagctgca

SEQ ID NO: 1413036 - DNA, 25 bp, Homo sapien
gatccttaaaccaatcacatctttg

SEQ ID NO: 1413037 - DNA, 25 bp, Homo sapien
gactgatccttaaaccaatcacatc

SEQ ID NO: 1413038 - DNA, 25 bp, Homo sapien
ggactgatccttaaaccaatcacat

SEQ ID NO: 1413039 - DNA, 25 bp, Homo sapien
ctgatccttaaaccaatcacatctt

SEQ ID NO: 1413040 - DNA, 25 bp, Homo sapien
tcactgactggccaagagcagtggg

SEQ ID NO: 1413041 - DNA, 25 bp, Homo sapien
tgtattccctatacccctcaatggg

SEQ ID NO: 1413042 - DNA, 25 bp, Homo sapien
gatttgtaagattgagaaccctaga

SEQ ID NO: 1413043 - DNA, 25 bp, Homo sapien
ctcaatgggcacagtagacaggtat

SEQ ID NO: 1413044 - DNA, 25 bp, Homo sapien
ctgagtggacacttttctactggct

SEQ ID NO: 1413045 - DNA, 25 bp, Homo sapien
tactggctttccacggtagatgggc

SEQ ID NO: 1413046 - DNA, 25 bp, Homo sapien
gatgggccgatatgatgcagcacaa

SEQ ID NO: 1413047 - DNA, 25 bp, Homo sapien
tcataattgagctggtaggcatctg

SEQ ID NO: 1413048 - DNA, 25 bp, Homo sapien
tggtcactgaaggagttccatctac

SEQ ID NO: 1413049 - DNA, 25 bp, Homo sapien
tccatgtaagagctgatctggcttc

SEQ ID NO: 1413050 - DNA, 25 bp, Homo sapien
ggcaaggaccttggtctgctccctc

SEQ ID NO: 1413051 - DNA, 25 bp, Homo sapien
tgctttgtttcagaggcaaggacct

SEQ ID NO: 1413052 - DNA, 25 bp, Homo sapien
ggccacctcaggcttgggcccgagt

SEQ ID NO: 1413053 - DNA, 25 bp, Homo sapien
gctgtacgcagcaccaggatcatgt

SEQ ID NO: 1413054 - DNA, 25 bp, Homo sapien
gtttgagtgggtgaaataggctgcc

SEQ ID NO: 1413055 - DNA, 25 bp, Homo sapien
cgagttctagtaggcgccgagcaaa

SEQ ID NO: 1413056 - DNA, 25 bp, Homo sapien
tcacggcaaatggtgatgagctgct

SEQ ID NO: 1413057 - DNA, 25 bp, Homo sapien
ctcacagatgcgcttctgctgttct

SEQ ID NO: 1413058 - DNA, 25 bp, Homo sapien
tgtctccacggacaaacccacaatg

SEQ ID NO: 1413059 - DNA, 25 bp, Homo sapien
tctgctgttctagagtctctttggg

SEQ ID NO: 1413060 - DNA, 25 bp, Homo sapien
cacaacaagaagtggcacactgaga

SEQ ID NO: 1413061 - DNA, 25 bp, Homo sapien
acagctgcaaccgttggatgaggtc

SEQ ID NO: 1413062 - DNA, 25 bp, Homo sapien
gatggaacggaatttttccacagcc

SEQ ID NO: 1413063 - DNA, 25 bp, Homo sapien
aaatttgccaactgtggtgagctgg

SEQ ID NO: 1413064 - DNA, 25 bp, Homo sapien
taggatagccatacatggagggtag

SEQ ID NO: 1413065 - DNA, 25 bp, Homo sapien
aggttgtgcggcctcgggcgtatgt

SEQ ID NO: 1413066 - DNA, 25 bp, Homo sapien
cagagcctgataggttgtgcggcct

SEQ ID NO: 1413067 - DNA, 25 bp, Homo sapien
cagttgcgattaggatagccataca

SEQ ID NO: 1413068 - DNA, 25 bp, Homo sapien
aactggattacccctacttggtcat

SEQ ID NO: 1413069 - DNA, 25 bp, Homo sapien
actggattacccctacttggtcatg

SEQ ID NO: 1413070 - DNA, 25 bp, Homo sapien
tgtttcgaaagagcctgccaggatg

SEQ ID NO: 1413071 - DNA, 25 bp, Homo sapien
ccgcatggctgtttcgaaagagcct

SEQ ID NO: 1413072 - DNA, 25 bp, Homo sapien
actggaagctgagagttattacacc

SEQ ID NO: 1413073 - DNA, 25 bp, Homo sapien
gagcctgccaggatgtgatcaactg

SEQ ID NO: 1413074 - DNA, 25 bp, Homo sapien
tgagttggacttgttcccttggttg

SEQ ID NO: 1413075 - DNA, 25 bp, Homo sapien
ctgagttggacttgttcccttggtt

SEQ ID NO: 1413076 - DNA, 25 bp, Homo sapien
taagcatcagactaggagggtctag

SEQ ID NO: 1413077 - DNA, 25 bp, Homo sapien
cagactaggagggtctagtcccctt

SEQ ID NO: 1413078 - DNA, 25 bp, Homo sapien
tctttcaaatgggagataagcatca

SEQ ID NO: 1413079 - DNA, 25 bp, Homo sapien
tgggagataagcatcagactaggag

SEQ ID NO: 1413080 - DNA, 25 bp, Homo sapien
gtaggggacaataaggcctctggct

SEQ ID NO: 1413081 - DNA, 25 bp, Homo sapien
cagggagatacggagagaaccttct

SEQ ID NO: 1413082 - DNA, 25 bp, Homo sapien
ccttctaagggtacaaattccacat

SEQ ID NO: 1413083 - DNA, 25 bp, Homo sapien
gataggagacctgaggatagtggta

SEQ ID NO: 1413084 - DNA, 25 bp, Homo sapien
agctccagatcttcttctacatccc

SEQ ID NO: 1413085 - DNA, 25 bp, Homo sapien
ccttgccaagagcatcatcccccaa

SEQ ID NO: 1413086 - DNA, 25 bp, Homo sapien
cccttgccaagagcatcatccccca

SEQ ID NO: 1413087 - DNA, 25 bp, Homo sapien
caaaggaagtaaaatcaatcctagt

SEQ ID NO: 1413088 - DNA, 25 bp, Homo sapien
caaaacagatttgggcagtggcata

SEQ ID NO: 1413089 - DNA, 25 bp, Homo sapien
gcctggaagtctgcagagctaccca

SEQ ID NO: 1413090 - DNA, 25 bp, Homo sapien
cctagttcgtttcatggcctggaag

SEQ ID NO: 1413091 - DNA, 25 bp, Homo sapien
cagccctctgtaccaacagtgtcaa

SEQ ID NO: 1413092 - DNA, 25 bp, Homo sapien
ccctctgtaccaacagtgtcaatgt

SEQ ID NO: 1413093 - DNA, 25 bp, Homo sapien
gccctctgtaccaacagtgtcaatg

SEQ ID NO: 1413094 - DNA, 25 bp, Homo sapien
cccagccctctgtaccaacagtgtc

SEQ ID NO: 1413095 - DNA, 25 bp, Homo sapien
ggccaattggtatccaatggcatga

SEQ ID NO: 1413096 - DNA, 25 bp, Homo sapien
tccaatggcatgataggtgcaggtg

SEQ ID NO: 1413097 - DNA, 25 bp, Homo sapien
gagcagcttggcattagggtcaatg

SEQ ID NO: 1413098 - DNA, 25 bp, Homo sapien
gatacagtcaataaaggccaattgg

SEQ ID NO: 1413099 - DNA, 25 bp, Homo sapien
caaatagcacttggaagtcacgtaa

SEQ ID NO: 1413100 - DNA, 25 bp, Homo sapien
tctgcctctcctggtaaccaggtgg

SEQ ID NO: 1413101 - DNA, 25 bp, Homo sapien
tagagttaatcctgtaataagagac

SEQ ID NO: 1413102 - DNA, 25 bp, Homo sapien
aaccaggtgggagagtgacattcat

SEQ ID NO: 1413103 - DNA, 25 bp, Homo sapien
taagccatgggtagcagctgtgaga

SEQ ID NO: 1413104 - DNA, 25 bp, Homo sapien
cttcttcatctaagccatgggtagc

SEQ ID NO: 1413105 - DNA, 25 bp, Homo sapien
atgtctcctttaggctctcagcttc

SEQ ID NO: 1413106 - DNA, 25 bp, Homo sapien
gtagcagctgtgagataggccaggg

SEQ ID NO: 1413107 - DNA, 25 bp, Homo sapien
gtatccatccgtgctgagaaccttg

SEQ ID NO: 1413108 - DNA, 25 bp, Homo sapien
ttagacaacagggagcaaggacatg

SEQ ID NO: 1413109 - DNA, 25 bp, Homo sapien
gctgtaagggaaactagctaccacg

SEQ ID NO: 1413110 - DNA, 25 bp, Homo sapien
tcatgagagatcctaagccggaggc

SEQ ID NO: 1413111 - DNA, 25 bp, Homo sapien
tatagggcattctgatagtggccac

SEQ ID NO: 1413112 - DNA, 25 bp, Homo sapien
gccactcatgtcctttctgatctca

SEQ ID NO: 1413113 - DNA, 25 bp, Homo sapien
ttcaggatccgcacacgctctgaca

SEQ ID NO: 1413114 - DNA, 25 bp, Homo sapien
gctctgacacatcacccaggtatag

SEQ ID NO: 1413115 - DNA, 25 bp, Homo sapien
cacatttccacaatctggtggttcc

SEQ ID NO: 1413116 - DNA, 25 bp, Homo sapien
tttgtcaaagtttttggtacgctga

SEQ ID NO: 1413117 - DNA, 25 bp, Homo sapien
ggtacgctgatagcacatttccaca

SEQ ID NO: 1413118 - DNA, 25 bp, Homo sapien
catcatcttgcgaagtttttctaag

SEQ ID NO: 1413119 - DNA, 25 bp, Homo sapien
cctagcagttgctgattccatagag

SEQ ID NO: 1413120 - DNA, 25 bp, Homo sapien
ctgattccatagagccagttcttgc

SEQ ID NO: 1413121 - DNA, 25 bp, Homo sapien
aaccacctagcagttgctgattcca

SEQ ID NO: 1413122 - DNA, 25 bp, Homo sapien
cacctagcagttgctgattccatag

SEQ ID NO: 1413123 - DNA, 25 bp, Homo sapien
ctaaagcgagttttctcatccttga

SEQ ID NO: 1413124 - DNA, 25 bp, Homo sapien
cagtgccagactaaagcgagttttc

SEQ ID NO: 1413125 - DNA, 25 bp, Homo sapien
gtgccacttcaggatagcccttctt

SEQ ID NO: 1413126 - DNA, 25 bp, Homo sapien
cttgacaaaatgcagtgccacttca

SEQ ID NO: 1413127 - DNA, 25 bp, Homo sapien
gataagcaataatagactggccaac

SEQ ID NO: 1413128 - DNA, 25 bp, Homo sapien
aagcaataatagactggccaactag

SEQ ID NO: 1413129 - DNA, 25 bp, Homo sapien
aatagactggccaactagtttggca

SEQ ID NO: 1413130 - DNA, 25 bp, Homo sapien
gccaactagtttggcattcctcacc

SEQ ID NO: 1413131 - DNA, 25 bp, Homo sapien
cagagttcgaatgatcccgtggtcc

SEQ ID NO: 1413132 - DNA, 25 bp, Homo sapien
catagatgggtaaatccagagttcg

SEQ ID NO: 1413133 - DNA, 25 bp, Homo sapien
gacgacactccctgtctaggcagta

SEQ ID NO: 1413134 - DNA, 25 bp, Homo sapien
agtatacattgttgcccttcacccg

SEQ ID NO: 1413135 - DNA, 25 bp, Homo sapien
gagggcacagctttcagtaagtgag

SEQ ID NO: 1413136 - DNA, 25 bp, Homo sapien
ctaagaacagagggcacagctttca

SEQ ID NO: 1413137 - DNA, 25 bp, Homo sapien
tcagtaagtgagagggaaaatccat

SEQ ID NO: 1413138 - DNA, 25 bp, Homo sapien
cagctttcagtaagtgagagggaaa

SEQ ID NO: 1413139 - DNA, 25 bp, Homo sapien
tccatatgacttcaagggcaaattc

SEQ ID NO: 1413140 - DNA, 25 bp, Homo sapien
cagttgtatgcaaactcattgaggg

SEQ ID NO: 1413141 - DNA, 25 bp, Homo sapien
aaatattagcaacctaaagctagca

SEQ ID NO: 1413142 - DNA, 25 bp, Homo sapien
tagagaaagtcctatgtccatatga

SEQ ID NO: 1413143 - DNA, 25 bp, Homo sapien
cccgggaggtggaggttgcagtgag

SEQ ID NO: 1413144 - DNA, 25 bp, Homo sapien
ctgaggtcatgccactgtactccag

SEQ ID NO: 1413145 - DNA, 25 bp, Homo sapien
cagtgagctgaggtgcttgaacccg

SEQ ID NO: 1413146 - DNA, 25 bp, Homo sapien
tccagcctggggtgagactctgtct

SEQ ID NO: 1413147 - DNA, 25 bp, Homo sapien
gctcacataattctaacacactgaa

SEQ ID NO: 1413148 - DNA, 25 bp, Homo sapien
acacactgaaagttcaccctttaag

SEQ ID NO: 1413149 - DNA, 25 bp, Homo sapien
aaactcttagcaaaaagaaatagca

SEQ ID NO: 1413150 - DNA, 25 bp, Homo sapien
tgctgtcatcatgttaattccacat

SEQ ID NO: 1413151 - DNA, 25 bp, Homo sapien
gaaaattcatggaggacttcagtta

SEQ ID NO: 1413152 - DNA, 25 bp, Homo sapien
tacatctcaagacaagacagtgatt

SEQ ID NO: 1413153 - DNA, 25 bp, Homo sapien
ttctgatgccccttgcacatatatg

SEQ ID NO: 1413154 - DNA, 25 bp, Homo sapien
aaagaatgttctgatgccccttgca

SEQ ID NO: 1413155 - DNA, 25 bp, Homo sapien
gcttgtggtatagataaatacccca

SEQ ID NO: 1413156 - DNA, 25 bp, Homo sapien
cagtggtgacagcatatttgatgtg

SEQ ID NO: 1413157 - DNA, 25 bp, Homo sapien
cccactcttgacacgaatgttctca

SEQ ID NO: 1413158 - DNA, 25 bp, Homo sapien
tgaatgttacataaagcatccagtt

SEQ ID NO: 1413159 - DNA, 25 bp, Homo sapien
ctgtaagaggcaaagggcatgagtg

SEQ ID NO: 1413160 - DNA, 25 bp, Homo sapien
tgtaagaggcaaagggcatgagtgt

SEQ ID NO: 1413161 - DNA, 25 bp, Homo sapien
gtaagaggcaaagggcatgagtgtt

SEQ ID NO: 1413162 - DNA, 25 bp, Homo sapien
tgttggatagggtaagtgccgtaga

SEQ ID NO: 1413163 - DNA, 25 bp, Homo sapien
ctgttggatagggtaagtgccgtag

SEQ ID NO: 1413164 - DNA, 25 bp, Homo sapien
ctgctgaccagataacgtatttcac

SEQ ID NO: 1413165 - DNA, 25 bp, Homo sapien
tgctgaccagataacgtatttcact

SEQ ID NO: 1413166 - DNA, 25 bp, Homo sapien
tctgctgaccagataacgtatttca

SEQ ID NO: 1413167 - DNA, 25 bp, Homo sapien
gatctacatcaattgcaccctctaa

SEQ ID NO: 1413168 - DNA, 25 bp, Homo sapien
ctgagatagatagagatgtgcaaac

SEQ ID NO: 1413169 - DNA, 25 bp, Homo sapien
gcaaacatgaatggatctatttccc

SEQ ID NO: 1413170 - DNA, 25 bp, Homo sapien
tcccttgtctcaggctttgatctac

SEQ ID NO: 1413171 - DNA, 25 bp, Homo sapien
cagttgggcacctgtacctttttgg

SEQ ID NO: 1413172 - DNA, 25 bp, Homo sapien
gcttctgctgtacgtcaaagagtgt

SEQ ID NO: 1413173 - DNA, 25 bp, Homo sapien
gaagcaggagattgcctgtgccagc

SEQ ID NO: 1413174 - DNA, 25 bp, Homo sapien
tagagtccgcatctcgaagcaggag

SEQ ID NO: 1413175 - DNA, 25 bp, Homo sapien
caggcctgaggatcgtttcccttca

SEQ ID NO: 1413176 - DNA, 25 bp, Homo sapien
cgacccaaacggctgtcaggcctga

SEQ ID NO: 1413177 - DNA, 25 bp, Homo sapien
cgaatgcatccgatctaggacagca

SEQ ID NO: 1413178 - DNA, 25 bp, Homo sapien
taggacagcaaaccgatttcgagcg

SEQ ID NO: 1413179 - DNA, 25 bp, Homo sapien
atcatgtactggcagaagggccgcc

SEQ ID NO: 1413180 - DNA, 25 bp, Homo sapien
cacactccatcaagctaacgagcag

SEQ ID NO: 1413181 - DNA, 25 bp, Homo sapien
aagctgcggcaaagcaagcctgtgt

SEQ ID NO: 1413182 - DNA, 25 bp, Homo sapien
tctctaggccaagtggttgcatttc

SEQ ID NO: 1413183 - DNA, 25 bp, Homo sapien
ggataaacagaagggtgcatcaaaa

SEQ ID NO: 1413184 - DNA, 25 bp, Homo sapien
ctctgggaaacttgtagaaggataa

SEQ ID NO: 1413185 - DNA, 25 bp, Homo sapien
aggataaacagaagggtgcatcaaa

SEQ ID NO: 1413186 - DNA, 25 bp, Homo sapien
ataaacagaagggtgcatcaaaata

SEQ ID NO: 1413187 - DNA, 25 bp, Homo sapien
tcgcctctgatgcaattgtcagcag

SEQ ID NO: 1413188 - DNA, 25 bp, Homo sapien
ggtcgcctctgatgcaattgtcagc

SEQ ID NO: 1413189 - DNA, 25 bp, Homo sapien
catggtcgcctctgatgcaattgtc

SEQ ID NO: 1413190 - DNA, 25 bp, Homo sapien
cctctgatgcaattgtcagcagcac

SEQ ID NO: 1413191 - DNA, 25 bp, Homo sapien
ctgccaacagacatgagtgatgtgg

SEQ ID NO: 1413192 - DNA, 25 bp, Homo sapien
gatgtggccatggcttggggatgga

SEQ ID NO: 1413193 - DNA, 25 bp, Homo sapien
ccaacagacatgagtgatgtggcca

SEQ ID NO: 1413194 - DNA, 25 bp, Homo sapien
atggcttggggatggaatgtgaaaa

SEQ ID NO: 1413195 - DNA, 25 bp, Homo sapien
tgaagaggagttatgatgcgggtga

SEQ ID NO: 1413196 - DNA, 25 bp, Homo sapien
cttgaagaggagttatgatgcgggt

SEQ ID NO: 1413197 - DNA, 25 bp, Homo sapien
gaagaggagttatgatgcgggtgag

SEQ ID NO: 1413198 - DNA, 25 bp, Homo sapien
gaggagttatgatgcgggtgaggag

SEQ ID NO: 1413199 - DNA, 25 bp, Homo sapien
ctggaagcagagtggggtagacaaa

SEQ ID NO: 1413200 - DNA, 25 bp, Homo sapien
tggaagcagagtggggtagacaaaa

SEQ ID NO: 1413201 - DNA, 25 bp, Homo sapien
aagcagagtggggtagacaaaaaga

SEQ ID NO: 1413202 - DNA, 25 bp, Homo sapien
cagagtggggtagacaaaaagaaca

SEQ ID NO: 1413203 - DNA, 25 bp, Homo sapien
caggtcataggtactattctctaga

SEQ ID NO: 1413204 - DNA, 25 bp, Homo sapien
catctttagggatggtgtacaggtc

SEQ ID NO: 1413205 - DNA, 25 bp, Homo sapien
gatggtgtacaggtcataggtacta

SEQ ID NO: 1413206 - DNA, 25 bp, Homo sapien
atctttagggatggtgtacaggtca

SEQ ID NO: 1413207 - DNA, 25 bp, Homo sapien
caaaggaagggatcaaggtaaacat

SEQ ID NO: 1413208 - DNA, 25 bp, Homo sapien
caaattatttctagtgatctgggtc

SEQ ID NO: 1413209 - DNA, 25 bp, Homo sapien
gaaacagagaggagtcattgatgac

SEQ ID NO: 1413210 - DNA, 25 bp, Homo sapien
gctttaggaaagataggcagttcac

SEQ ID NO: 1413211 - DNA, 25 bp, Homo sapien
attgaatactggaaacttggaacca

SEQ ID NO: 1413212 - DNA, 25 bp, Homo sapien
ctggattgtatgacatattgaatac

SEQ ID NO: 1413213 - DNA, 25 bp, Homo sapien
tctcttcctttaaggcttggcaact

SEQ ID NO: 1413214 - DNA, 25 bp, Homo sapien
ccctagctcagctttgaacaaacag

SEQ ID NO: 1413215 - DNA, 25 bp, Homo sapien
aaaagtaagccatagtagaagtcaa

SEQ ID NO: 1413216 - DNA, 25 bp, Homo sapien
acacctcctacttatccaatcttta

SEQ ID NO: 1413217 - DNA, 25 bp, Homo sapien
tgggtttaaactgagcgggctcatc

SEQ ID NO: 1413218 - DNA, 25 bp, Homo sapien
gattttccatccacaaggtcactag

SEQ ID NO: 1413219 - DNA, 25 bp, Homo sapien
aggtcactagcattctcaagaaggg

SEQ ID NO: 1413220 - DNA, 25 bp, Homo sapien
gcaagagacccagcaaattgtggca

SEQ ID NO: 1413221 - DNA, 25 bp, Homo sapien
taagaatcggtccttgacatagtgt

SEQ ID NO: 1413222 - DNA, 25 bp, Homo sapien
gacatagtgtagcatattgccatga

SEQ ID NO: 1413223 - DNA, 25 bp, Homo sapien
acagcataggctggccgttcccgtt

SEQ ID NO: 1413224 - DNA, 25 bp, Homo sapien
gaaatccagctgtcgtaagaatcgg

SEQ ID NO: 1413225 - DNA, 25 bp, Homo sapien
gctaggacccagaaacgatcatggt

SEQ ID NO: 1413226 - DNA, 25 bp, Homo sapien
agaaacgatcatggtctctgcggaa

SEQ ID NO: 1413227 - DNA, 25 bp, Homo sapien
taaggttagggtgagcagctaggac

SEQ ID NO: 1413228 - DNA, 25 bp, Homo sapien
tgcaaagaggttaaggttagggtga

SEQ ID NO: 1413229 - DNA, 25 bp, Homo sapien
cgcttagacatatcccagactcgaa

SEQ ID NO: 1413230 - DNA, 25 bp, Homo sapien
cattgttgtaatggccccggcaggt

SEQ ID NO: 1413231 - DNA, 25 bp, Homo sapien
gaagacggcacaagatacattgttg

SEQ ID NO: 1413232 - DNA, 25 bp, Homo sapien
aattgctgaggatcaactcttggcg

SEQ ID NO: 1413233 - DNA, 25 bp, Homo sapien
tttctaatatggcaatcttcttcat

SEQ ID NO: 1413234 - DNA, 25 bp, Homo sapien
ttctttctaatatggcaatcttctt

SEQ ID NO: 1413235 - DNA, 25 bp, Homo sapien
ctttctaatatggcaatcttcttca

SEQ ID NO: 1413236 - DNA, 25 bp, Homo sapien
tctttctaatatggcaatcttcttc

SEQ ID NO: 1413237 - DNA, 25 bp, Homo sapien
tagaacaaatatgagctccttcaga

SEQ ID NO: 1413238 - DNA, 25 bp, Homo sapien
aacagtggtatagaagcaagctggc

SEQ ID NO: 1413239 - DNA, 25 bp, Homo sapien
taagagcatctgatttccacatctg

SEQ ID NO: 1413240 - DNA, 25 bp, Homo sapien
tagtcaccgctgtatctccagagcc

SEQ ID NO: 1413241 - DNA, 25 bp, Homo sapien
ttgctgaaatgaagagctcattaga

SEQ ID NO: 1413242 - DNA, 25 bp, Homo sapien
ttgaaaaatacacagtcaggctggg

SEQ ID NO: 1413243 - DNA, 25 bp, Homo sapien
cagtgagctcgaagactggctgttt

SEQ ID NO: 1413244 - DNA, 25 bp, Homo sapien
gagactctgaatagcagactggacc

SEQ ID NO: 1413245 - DNA, 25 bp, Homo sapien
ccgctgctgtgcggagacccccggg

SEQ ID NO: 1413246 - DNA, 25 bp, Homo sapien
gctgctgtgcggagacccccgggtg

SEQ ID NO: 1413247 - DNA, 25 bp, Homo sapien
cgctgctgtgcggagacccccgggt

SEQ ID NO: 1413248 - DNA, 25 bp, Homo sapien
aagaaactcaaagaatcatactgtc

SEQ ID NO: 1413249 - DNA, 25 bp, Homo sapien
cagggcgttccaatgaattcattca

SEQ ID NO: 1413250 - DNA, 25 bp, Homo sapien
gatagcagtgagattcacttcaaag

SEQ ID NO: 1413251 - DNA, 25 bp, Homo sapien
tccaaaagaactgggaatggaggaa

SEQ ID NO: 1413252 - DNA, 25 bp, Homo sapien
cattcatgcgccagatcttcacttg

SEQ ID NO: 1413253 - DNA, 25 bp, Homo sapien
ttcatgcgccagatcttcacttgac

SEQ ID NO: 1413254 - DNA, 25 bp, Homo sapien
catgcgccagatcttcacttgacga

SEQ ID NO: 1413255 - DNA, 25 bp, Homo sapien
gcgccagatcttcacttgacgatca

SEQ ID NO: 1413256 - DNA, 25 bp, Homo sapien
aggcagcccagtttactccacgatc

SEQ ID NO: 1413257 - DNA, 25 bp, Homo sapien
cagatacaataaggggcatagtggg

SEQ ID NO: 1413258 - DNA, 25 bp, Homo sapien
gcagcccagtttactccacgatcgt

SEQ ID NO: 1413259 - DNA, 25 bp, Homo sapien
gcccagtttactccacgatcgtgac

SEQ ID NO: 1413260 - DNA, 25 bp, Homo sapien
ttataacttaatgcagaaatctcag

SEQ ID NO: 1413261 - DNA, 25 bp, Homo sapien
taatgcagaaatctcagtctggtct

SEQ ID NO: 1413262 - DNA, 25 bp, Homo sapien
acttaatgcagaaatctcagtctgg

SEQ ID NO: 1413263 - DNA, 25 bp, Homo sapien
acttttataacttaatgcagaaatc

SEQ ID NO: 1413264 - DNA, 25 bp, Homo sapien
tatcatgatgcagcgaaaagcacct

SEQ ID NO: 1413265 - DNA, 25 bp, Homo sapien
tgccctgccttacagaaagcttgag

SEQ ID NO: 1413266 - DNA, 25 bp, Homo sapien
tacaatagagtttcccagcacatga

SEQ ID NO: 1413267 - DNA, 25 bp, Homo sapien
catggctggttctcgataactccga

SEQ ID NO: 1413268 - DNA, 25 bp, Homo sapien
ttcaccactgcatctgtagttccaa

SEQ ID NO: 1413269 - DNA, 25 bp, Homo sapien
ctctagtacatgcttcaccactgca

SEQ ID NO: 1413270 - DNA, 25 bp, Homo sapien
caaatagatcaaccccagttattcc

SEQ ID NO: 1413271 - DNA, 25 bp, Homo sapien
tcacatccgattccaccgcaccagg

SEQ ID NO: 1413272 - DNA, 25 bp, Homo sapien
gataactcactatcttcggactagg

SEQ ID NO: 1413273 - DNA, 25 bp, Homo sapien
ataactcactatcttcggactaggc

SEQ ID NO: 1413274 - DNA, 25 bp, Homo sapien
agaatggggaaaagagtggaacaag

SEQ ID NO: 1413275 - DNA, 25 bp, Homo sapien
gtagtgagaatggggaaaagagtgg

SEQ ID NO: 1413276 - DNA, 25 bp, Homo sapien
gcctactacttgactcttggacgaa

SEQ ID NO: 1413277 - DNA, 25 bp, Homo sapien
tagtcttatttgtagaggacccaca

SEQ ID NO: 1413278 - DNA, 25 bp, Homo sapien
gataacgtaaaaccataagccatgt

SEQ ID NO: 1413279 - DNA, 25 bp, Homo sapien
ttgaagcctttcgacagctgatggg

SEQ ID NO: 1413280 - DNA, 25 bp, Homo sapien
ctcttctgttatggtggcacctaca

SEQ ID NO: 1413281 - DNA, 25 bp, Homo sapien
cttctgttatggtggcacctacatg

SEQ ID NO: 1413282 - DNA, 25 bp, Homo sapien
aagaacttaagtttaataactgcat

SEQ ID NO: 1413283 - DNA, 25 bp, Homo sapien
atctcttctgttatggtggcaccta

SEQ ID NO: 1413284 - DNA, 25 bp, Homo sapien
caaaagattcaggttaagctaagcc

SEQ ID NO: 1413285 - DNA, 25 bp, Homo sapien
cctatgggagaggtaccaagagata

SEQ ID NO: 1413286 - DNA, 25 bp, Homo sapien
gagactgagcctgaattacatgggc

SEQ ID NO: 1413287 - DNA, 25 bp, Homo sapien
gcttaactaactcagagagtgtccc

SEQ ID NO: 1413288 - DNA, 25 bp, Homo sapien
cagttttgcaccagagatgaccagg

SEQ ID NO: 1413289 - DNA, 25 bp, Homo sapien
attgcagttttgcaccagagatgac

SEQ ID NO: 1413290 - DNA, 25 bp, Homo sapien
aattgcagttttgcaccagagatga

SEQ ID NO: 1413291 - DNA, 25 bp, Homo sapien
gttttgcaccagagatgaccaggtt

SEQ ID NO: 1413292 - DNA, 25 bp, Homo sapien
cagaaatatcccaaacgcgcacagt

SEQ ID NO: 1413293 - DNA, 25 bp, Homo sapien
gggtggaactgagcacacatcacat

SEQ ID NO: 1413294 - DNA, 25 bp, Homo sapien
cataatggttgtgccctgttaacac

SEQ ID NO: 1413295 - DNA, 25 bp, Homo sapien
aaatatcccaaacgcgcacagtctg

SEQ ID NO: 1413296 - DNA, 25 bp, Homo sapien
ggcaggtcatcctaccaattctgaa

SEQ ID NO: 1413297 - DNA, 25 bp, Homo sapien
tcaggaggactaagattacatagct

SEQ ID NO: 1413298 - DNA, 25 bp, Homo sapien
tccatactgtaaattatctgtgaga

SEQ ID NO: 1413299 - DNA, 25 bp, Homo sapien
attagaggtggaagtcaacagactc

SEQ ID NO: 1413300 - DNA, 25 bp, Homo sapien
ggtaagaaattattggaagtccaga

SEQ ID NO: 1413301 - DNA, 25 bp, Homo sapien
caaaggtctagaccttgactcaggt

SEQ ID NO: 1413302 - DNA, 25 bp, Homo sapien
taaaaggctatatgacttctcttcc

SEQ ID NO: 1413303 - DNA, 25 bp, Homo sapien
gaaagttctatgtaaagctccagct

SEQ ID NO: 1413304 - DNA, 25 bp, Homo sapien
gagaagattgttctaagagaagctc

SEQ ID NO: 1413305 - DNA, 25 bp, Homo sapien
cagtaattaatcagccgacatagtc

SEQ ID NO: 1413306 - DNA, 25 bp, Homo sapien
aaaagcatcctacaaatacaatcag

SEQ ID NO: 1413307 - DNA, 25 bp, Homo sapien
catagtccatttgagaagggagaag

SEQ ID NO: 1413308 - DNA, 25 bp, Homo sapien
ctgatcatcggaggcactcagaatc

SEQ ID NO: 1413309 - DNA, 25 bp, Homo sapien
cacaggttctagattgccagttcca

SEQ ID NO: 1413310 - DNA, 25 bp, Homo sapien
ttccacactcggatggtctgatcat

SEQ ID NO: 1413311 - DNA, 25 bp, Homo sapien
gatggtctgatcatcggaggcactc

SEQ ID NO: 1413312 - DNA, 25 bp, Homo sapien
tgcccaagcaatgtgaaaagacagc

SEQ ID NO: 1413313 - DNA, 25 bp, Homo sapien
gatgaaaaaacgtggtgcgaatata

SEQ ID NO: 1413314 - DNA, 25 bp, Homo sapien
gacagcgccgaagcttgtaattcca

SEQ ID NO: 1413315 - DNA, 25 bp, Homo sapien
cgaatataatctaagtgcccaagca

SEQ ID NO: 1413316 - DNA, 25 bp, Homo sapien
aatgctacatttatctggatatagc

SEQ ID NO: 1413317 - DNA, 25 bp, Homo sapien
atagcaagcaataagatggtccaca

SEQ ID NO: 1413318 - DNA, 25 bp, Homo sapien
gcaagcaataagatggtccacagac

SEQ ID NO: 1413319 - DNA, 25 bp, Homo sapien
ttgtcaacgaggattataactaatg

SEQ ID NO: 1413320 - DNA, 25 bp, Homo sapien
tttgagatctgtcaggtggtttgag

SEQ ID NO: 1413321 - DNA, 25 bp, Homo sapien
taatgaggtgatatccttatgggct

SEQ ID NO: 1413322 - DNA, 25 bp, Homo sapien
ctaagaaattcatacccattagctg

SEQ ID NO: 1413323 - DNA, 25 bp, Homo sapien
gattataagaatcccaagttaacca

SEQ ID NO: 1413324 - DNA, 25 bp, Homo sapien
tcaaatgctactacctaagctcagg

SEQ ID NO: 1413325 - DNA, 25 bp, Homo sapien
gataacatctaaactcctgagcgcc

SEQ ID NO: 1413326 - DNA, 25 bp, Homo sapien
gagcgccacaaacaggtactccatg

SEQ ID NO: 1413327 - DNA, 25 bp, Homo sapien
catataaatctggtatcactcctgt

SEQ ID NO: 1413328 - DNA, 25 bp, Homo sapien
gctattacttggatatatgtttatc

SEQ ID NO: 1413329 - DNA, 25 bp, Homo sapien
tcctatttcactgtgaatatctctc

SEQ ID NO: 1413330 - DNA, 25 bp, Homo sapien
tatctctctattatattgcttacca

SEQ ID NO: 1413331 - DNA, 25 bp, Homo sapien
gcttaccaaactgtacatgctatta

SEQ ID NO: 1413332 - DNA, 25 bp, Homo sapien
gattcccaaaccttcccacatcctc

SEQ ID NO: 1413333 - DNA, 25 bp, Homo sapien
gataatgttgtcaaaggcctgagct

SEQ ID NO: 1413334 - DNA, 25 bp, Homo sapien
gtttgctgagtaagttctccggata

SEQ ID NO: 1413335 - DNA, 25 bp, Homo sapien
taagttctccggataatgttgtcaa

SEQ ID NO: 1413336 - DNA, 25 bp, Homo sapien
gcttatggaagtcaatgcctcgcac

SEQ ID NO: 1413337 - DNA, 25 bp, Homo sapien
tgctgcttatggaagtcaatgcctc

SEQ ID NO: 1413338 - DNA, 25 bp, Homo sapien
tatggaagtcaatgcctcgcactgg

SEQ ID NO: 1413339 - DNA, 25 bp, Homo sapien
tccagagacgaacagtggctgctgc

SEQ ID NO: 1413340 - DNA, 25 bp, Homo sapien
gtatgttagacagagctatcctttc

SEQ ID NO: 1413341 - DNA, 25 bp, Homo sapien
ggaatccatgtcaaacaaggcttaa

SEQ ID NO: 1413342 - DNA, 25 bp, Homo sapien
caaggcttaaaataccccaggatat

SEQ ID NO: 1413343 - DNA, 25 bp, Homo sapien
tctaaggtgattcctattcaggatt

SEQ ID NO: 1413344 - DNA, 25 bp, Homo sapien
tgagagtgcacatccgatagtccca

SEQ ID NO: 1413345 - DNA, 25 bp, Homo sapien
tggatgaccccattatgtaaactag

SEQ ID NO: 1413346 - DNA, 25 bp, Homo sapien
gatagtcccataactggatgacccc

SEQ ID NO: 1413347 - DNA, 25 bp, Homo sapien
tagtcaggatccaaggtcttttggg

SEQ ID NO: 1413348 - DNA, 25 bp, Homo sapien
acatttcacctatacaggtctcaga

SEQ ID NO: 1413349 - DNA, 25 bp, Homo sapien
aaactgaaagattatgaagacccat

SEQ ID NO: 1413350 - DNA, 25 bp, Homo sapien
tatgatatataagtacactcaacaa

SEQ ID NO: 1413351 - DNA, 25 bp, Homo sapien
caacaatggatgtttgccctcaaat

SEQ ID NO: 1413352 - DNA, 25 bp, Homo sapien
ctctctataaaagacgattttacag

SEQ ID NO: 1413353 - DNA, 25 bp, Homo sapien
gagtctacaccaggcgctgtaataa

SEQ ID NO: 1413354 - DNA, 25 bp, Homo sapien
gataacaacctccagtttttgagct

SEQ ID NO: 1413355 - DNA, 25 bp, Homo sapien
ggtcaagtttcccaagagacttaga

SEQ ID NO: 1413356 - DNA, 25 bp, Homo sapien
ctccgggtccgtctggtgggcccat

SEQ ID NO: 1413357 - DNA, 25 bp, Homo sapien
ctggtgggcccatttcgaccaacac

SEQ ID NO: 1413358 - DNA, 25 bp, Homo sapien
catttcgaccaacacctctacccat

SEQ ID NO: 1413359 - DNA, 25 bp, Homo sapien
gcccatttcgaccaacacctctacc

SEQ ID NO: 1413360 - DNA, 25 bp, Homo sapien
cgcgcgctcttggtctcgaatttgg

SEQ ID NO: 1413361 - DNA, 25 bp, Homo sapien
tcttggtctcgaatttggttaacat

SEQ ID NO: 1413362 - DNA, 25 bp, Homo sapien
gcgctcttggtctcgaatttggtta

SEQ ID NO: 1413363 - DNA, 25 bp, Homo sapien
gacccgcgcgctcttggtctcgaat

SEQ ID NO: 1413364 - DNA, 25 bp, Homo sapien
cgatgtcttaatccgagccccgaca

SEQ ID NO: 1413365 - DNA, 25 bp, Homo sapien
gaagcgcctggaaacacgaacttcc

SEQ ID NO: 1413366 - DNA, 25 bp, Homo sapien
tccgggccacagagacggtgtcagt

SEQ ID NO: 1413367 - DNA, 25 bp, Homo sapien
ctagagaggccgctaacagacagga

SEQ ID NO: 1413368 - DNA, 25 bp, Homo sapien
cgcccgtgagctccgttctctaagg

SEQ ID NO: 1413369 - DNA, 25 bp, Homo sapien
tctgcgtcctactagcaggtgaggc

SEQ ID NO: 1413370 - DNA, 25 bp, Homo sapien
ctctaaggggaactctcggatcggc

SEQ ID NO: 1413371 - DNA, 25 bp, Homo sapien
acgacagaagttccccctttgcctg

SEQ ID NO: 1413372 - DNA, 25 bp, Homo sapien
ttctctactcatgccagattttggg

SEQ ID NO: 1413373 - DNA, 25 bp, Homo sapien
cctcagatggcacattagggtgggc

SEQ ID NO: 1413374 - DNA, 25 bp, Homo sapien
aaactacattgagcccctgaggaca

SEQ ID NO: 1413375 - DNA, 25 bp, Homo sapien
cataaaaggtttaatgtcagggtca

SEQ ID NO: 1413376 - DNA, 25 bp, Homo sapien
gccttggcaacctggcaattctgtt

SEQ ID NO: 1413377 - DNA, 25 bp, Homo sapien
ccatgtctgttacccaatgactctg

SEQ ID NO: 1413378 - DNA, 25 bp, Homo sapien
gtctctatctctcccatagcttggg

SEQ ID NO: 1413379 - DNA, 25 bp, Homo sapien
caagtcttccacaaagccttggcaa

SEQ ID NO: 1413380 - DNA, 25 bp, Homo sapien
actatgttgcaagtcatcacagtgg

SEQ ID NO: 1413381 - DNA, 25 bp, Homo sapien
tgtcagtgctgactatgttgcaagt

SEQ ID NO: 1413382 - DNA, 25 bp, Homo sapien
tatgatacttgccattgtgcaaagc

SEQ ID NO: 1413383 - DNA, 25 bp, Homo sapien
attggctatgatacttgccattgtg

SEQ ID NO: 1413384 - DNA, 25 bp, Homo sapien
ctgaaattcaaaatagtgaatatgg

SEQ ID NO: 1413385 - DNA, 25 bp, Homo sapien
ttcatacctgtaatactaatacttg

SEQ ID NO: 1413386 - DNA, 25 bp, Homo sapien
tctgtaccatctatcctttgtttct

SEQ ID NO: 1413387 - DNA, 25 bp, Homo sapien
attcaaaatagtgaatatggccgag

SEQ ID NO: 1413388 - DNA, 25 bp, Homo sapien
gcatctaagatggtgtgccctggcc

SEQ ID NO: 1413389 - DNA, 25 bp, Homo sapien
tgatagttagggctcccagggctag

SEQ ID NO: 1413390 - DNA, 25 bp, Homo sapien
ccagattgggagtcagtggccacgt

SEQ ID NO: 1413391 - DNA, 25 bp, Homo sapien
ccagggctagtaaggcacttgcatc

SEQ ID NO: 1413392 - DNA, 25 bp, Homo sapien
tctaggccctgcaggaatcagtgcc

SEQ ID NO: 1413393 - DNA, 25 bp, Homo sapien
tcttcagtggcccaacagggtttct

SEQ ID NO: 1413394 - DNA, 25 bp, Homo sapien
ggcaaccacgtggaaaccctctgtg

SEQ ID NO: 1413395 - DNA, 25 bp, Homo sapien
tagactcctgtacagacatagtggc

SEQ ID NO: 1413396 - DNA, 25 bp, Homo sapien
gtattccaatggcaaaccctgatga

SEQ ID NO: 1413397 - DNA, 25 bp, Homo sapien
gatgatgtaacacctgcgatgagac

SEQ ID NO: 1413398 - DNA, 25 bp, Homo sapien
gcgatgagacatcggactctccgga

SEQ ID NO: 1413399 - DNA, 25 bp, Homo sapien
tccgtgcgcaaaaggaagagggctt

SEQ ID NO: 1413400 - DNA, 25 bp, Homo sapien
aaaatagccatctgtactctgatat

SEQ ID NO: 1413401 - DNA, 25 bp, Homo sapien
ttgtcaaaaatagccatctgtactc

SEQ ID NO: 1413402 - DNA, 25 bp, Homo sapien
aaatagccatctgtactctgatatc

SEQ ID NO: 1413403 - DNA, 25 bp, Homo sapien
cacttgtcaaaaatagccatctgta

SEQ ID NO: 1413404 - DNA, 25 bp, Homo sapien
tccaaactgtatcatcagggaaagc

SEQ ID NO: 1413405 - DNA, 25 bp, Homo sapien
tattgaagaattcgaccctgggcaa

SEQ ID NO: 1413406 - DNA, 25 bp, Homo sapien
tcagtgactggtacgagattgtgta

SEQ ID NO: 1413407 - DNA, 25 bp, Homo sapien
tccagttgaagtgaaagcagatcca

SEQ ID NO: 1413408 - DNA, 25 bp, Homo sapien
caacaaggtaatggcccagagatta

SEQ ID NO: 1413409 - DNA, 25 bp, Homo sapien
gaacccaacaaggtaatggcccaga

SEQ ID NO: 1413410 - DNA, 25 bp, Homo sapien
accagtaaaggatgaacccaacaag

SEQ ID NO: 1413411 - DNA, 25 bp, Homo sapien
aaggatgaacccaacaaggtaatgg

SEQ ID NO: 1413412 - DNA, 25 bp, Homo sapien
cgtcccaagtcatgcaaatcagagc

SEQ ID NO: 1413413 - DNA, 25 bp, Homo sapien
aatcagagctgcgtgtttggtaact

SEQ ID NO: 1413414 - DNA, 25 bp, Homo sapien
catgccttgtaagtccccttggatg

SEQ ID NO: 1413415 - DNA, 25 bp, Homo sapien
tgctgtgtccccatcggtggcctcg

SEQ ID NO: 1413416 - DNA, 25 bp, Homo sapien
gcacgaacatggcagtaaccctctt

SEQ ID NO: 1413417 - DNA, 25 bp, Homo sapien
gaagtctccatgaacccagaaccta

SEQ ID NO: 1413418 - DNA, 25 bp, Homo sapien
gagcttcaggtcatgttgcacgaac

SEQ ID NO: 1413419 - DNA, 25 bp, Homo sapien
tgaatcctgtggtcttgagagctga

SEQ ID NO: 1413420 - DNA, 25 bp, Homo sapien
aacaaaacagttattgtctctgttt

SEQ ID NO: 1413421 - DNA, 25 bp, Homo sapien
cttagggtatagtgggagaaataga

SEQ ID NO: 1413422 - DNA, 25 bp, Homo sapien
ggtgctagggttacggtgataaaca

SEQ ID NO: 1413423 - DNA, 25 bp, Homo sapien
aaatgacatagaaggtgtaacagaa

SEQ ID NO: 1413424 - DNA, 25 bp, Homo sapien
tccgaaggactggaggtgatcatcc

SEQ ID NO: 1413425 - DNA, 25 bp, Homo sapien
tccaaaaggttaggcagtatgtccc

SEQ ID NO: 1413426 - DNA, 25 bp, Homo sapien
tttctgaggtagagtccaaagggcc

SEQ ID NO: 1413427 - DNA, 25 bp, Homo sapien
tcaggtaggcaggtttaagtccgaa

SEQ ID NO: 1413428 - DNA, 25 bp, Homo sapien
acgacattgtcaagggcagttgccc

SEQ ID NO: 1413429 - DNA, 25 bp, Homo sapien
attgtcaagggcagttgccctggaa

SEQ ID NO: 1413430 - DNA, 25 bp, Homo sapien
gacattgtcaagggcagttgccctg

SEQ ID NO: 1413431 - DNA, 25 bp, Homo sapien
cattgtcaagggcagttgccctgga

SEQ ID NO: 1413432 - DNA, 25 bp, Homo sapien
gattaattgtggagtaaattgtgat

SEQ ID NO: 1413433 - DNA, 25 bp, Homo sapien
ttgtggagtaaattgtgatagtatc

SEQ ID NO: 1413434 - DNA, 25 bp, Homo sapien
tggaatgattaattgtggagtaaat

SEQ ID NO: 1413435 - DNA, 25 bp, Homo sapien
taattgtggagtaaattgtgatagt

SEQ ID NO: 1413436 - DNA, 25 bp, Homo sapien
gactgaagcatacacagtgttgttc

SEQ ID NO: 1413437 - DNA, 25 bp, Homo sapien
tacacagtgttgttcgttggagaca

SEQ ID NO: 1413438 - DNA, 25 bp, Homo sapien
aacatactctaggttccttgcggac

SEQ ID NO: 1413439 - DNA, 25 bp, Homo sapien
cgttggagacactgaaacatactct

SEQ ID NO: 1413440 - DNA, 25 bp, Homo sapien
tggttcacatgcctatgcctgtgaa

SEQ ID NO: 1413441 - DNA, 25 bp, Homo sapien
gcatgtggtctgagtaatgacattc

SEQ ID NO: 1413442 - DNA, 25 bp, Homo sapien
gaaactgtgtgagtgactggttcac

SEQ ID NO: 1413443 - DNA, 25 bp, Homo sapien
tgtaggacccatgattacagatcat

SEQ ID NO: 1413444 - DNA, 25 bp, Homo sapien
ttcgctgagtagacaaagataggga

SEQ ID NO: 1413445 - DNA, 25 bp, Homo sapien
cctgtgttcgctgagtagacaaaga

SEQ ID NO: 1413446 - DNA, 25 bp, Homo sapien
tgttcgctgagtagacaaagatagg

SEQ ID NO: 1413447 - DNA, 25 bp, Homo sapien
gggccctgtgttcgctgagtagaca

SEQ ID NO: 1413448 - DNA, 25 bp, Homo sapien
gcagtatgatgaaaccgaagactat

SEQ ID NO: 1413449 - DNA, 25 bp, Homo sapien
tgaaaccgaagactatgcatatccc

SEQ ID NO: 1413450 - DNA, 25 bp, Homo sapien
tatcccagaaaccataaacagaatc

SEQ ID NO: 1413451 - DNA, 25 bp, Homo sapien
gaagactatgcatatcccagaaacc

SEQ ID NO: 1413452 - DNA, 25 bp, Homo sapien
ggataaattactgacagcattctct

SEQ ID NO: 1413453 - DNA, 25 bp, Homo sapien
aaggataaattactgacagcattct

SEQ ID NO: 1413454 - DNA, 25 bp, Homo sapien
cagagaaggataaattactgacagc

SEQ ID NO: 1413455 - DNA, 25 bp, Homo sapien
agagaaggataaattactgacagca

SEQ ID NO: 1413456 - DNA, 25 bp, Homo sapien
caaggcctcccatctgaatgagaca

SEQ ID NO: 1413457 - DNA, 25 bp, Homo sapien
gagacattgtcatctgcatcctcca

SEQ ID NO: 1413458 - DNA, 25 bp, Homo sapien
agcaagtcagatggagctcacaggt

SEQ ID NO: 1413459 - DNA, 25 bp, Homo sapien
gaaatagctgactgtgattggtaac

SEQ ID NO: 1413460 - DNA, 25 bp, Homo sapien
tcacgtggatttctggacttttggt

SEQ ID NO: 1413461 - DNA, 25 bp, Homo sapien
ttgtggatatctgggctctgtaaga

SEQ ID NO: 1413462 - DNA, 25 bp, Homo sapien
ggtgaagttcagtcgctttccctgt

SEQ ID NO: 1413463 - DNA, 25 bp, Homo sapien
cctgtttcggattagtcacgtggat

SEQ ID NO: 1413464 - DNA, 25 bp, Homo sapien
aatggggttaagctgctttgtgaaa

SEQ ID NO: 1413465 - DNA, 25 bp, Homo sapien
ttaagctgctttgtgaaactacatt

SEQ ID NO: 1413466 - DNA, 25 bp, Homo sapien
caatggggttaagctgctttgtgaa

SEQ ID NO: 1413467 - DNA, 25 bp, Homo sapien
gggttaagctgctttgtgaaactac

SEQ ID NO: 1413468 - DNA, 25 bp, Homo sapien
tgctgagtgcttgtatatcttcatt

SEQ ID NO: 1413469 - DNA, 25 bp, Homo sapien
aaaaccaaaccagcatctattgtgt

SEQ ID NO: 1413470 - DNA, 25 bp, Homo sapien
aaccaaaccagcatctattgtgttc

SEQ ID NO: 1413471 - DNA, 25 bp, Homo sapien
gaataatgggagctctacagttcaa

SEQ ID NO: 1413472 - DNA, 25 bp, Homo sapien
tctgtctagaatgttaaagctcagt

SEQ ID NO: 1413473 - DNA, 25 bp, Homo sapien
gcctaaggactcaccaggagctgtt

SEQ ID NO: 1413474 - DNA, 25 bp, Homo sapien
tgggcttactcagtggcctaaggac

SEQ ID NO: 1413475 - DNA, 25 bp, Homo sapien
ttactgagtgaatggacatatctcc

SEQ ID NO: 1413476 - DNA, 25 bp, Homo sapien
tttatgtaccagtttctagactgga

SEQ ID NO: 1413477 - DNA, 25 bp, Homo sapien
agtaaaaccttaggaaccatggcat

SEQ ID NO: 1413478 - DNA, 25 bp, Homo sapien
ccttaggaaccatggcatatttatt

SEQ ID NO: 1413479 - DNA, 25 bp, Homo sapien
ttgctaacttccatgctaattcaat

SEQ ID NO: 1413480 - DNA, 25 bp, Homo sapien
tatctgctaccctgggctagctctg

SEQ ID NO: 1413481 - DNA, 25 bp, Homo sapien
tcataacgtgtgtacagcacctggc

SEQ ID NO: 1413482 - DNA, 25 bp, Homo sapien
gaatgctacactttgtctcccgtgg

SEQ ID NO: 1413483 - DNA, 25 bp, Homo sapien
ttacaagagcttgtcgcatgctggc

SEQ ID NO: 1413484 - DNA, 25 bp, Homo sapien
cctccctgaggttcacagtacgata

SEQ ID NO: 1413485 - DNA, 25 bp, Homo sapien
gtagatacattggtatgagggccca

SEQ ID NO: 1413486 - DNA, 25 bp, Homo sapien
ggtcttggtactctttataacacaa

SEQ ID NO: 1413487 - DNA, 25 bp, Homo sapien
tcaggaaggataagtaacctccctg

SEQ ID NO: 1413488 - DNA, 25 bp, Homo sapien
tatcgcatccaaagttgagaggagg

SEQ ID NO: 1413489 - DNA, 25 bp, Homo sapien
tatacagacgatttaggttgagcaa

SEQ ID NO: 1413490 - DNA, 25 bp, Homo sapien
gaggtagtagtatatcaggtaacac

SEQ ID NO: 1413491 - DNA, 25 bp, Homo sapien
gacaaccatctcaggcttatcgcat

SEQ ID NO: 1413492 - DNA, 25 bp, Homo sapien
agtgactacaccgatctggattgac

SEQ ID NO: 1413493 - DNA, 25 bp, Homo sapien
gtgactacaccgatctggattgaca

SEQ ID NO: 1413494 - DNA, 25 bp, Homo sapien
tgactacaccgatctggattgacat

SEQ ID NO: 1413495 - DNA, 25 bp, Homo sapien
aacaggagcgattggaacagccaca

SEQ ID NO: 1413496 - DNA, 25 bp, Homo sapien
aagacaaacaggagcgattggaaca

SEQ ID NO: 1413497 - DNA, 25 bp, Homo sapien
acaaacaggagcgattggaacagcc

SEQ ID NO: 1413498 - DNA, 25 bp, Homo sapien
ggagcgattggaacagccacaacat

SEQ ID NO: 1413499 - DNA, 25 bp, Homo sapien
cttgaggcagtcaatgtttttgccc

SEQ ID NO: 1413500 - DNA, 25 bp, Homo sapien
gctttccgcggtgaagactggtgct

SEQ ID NO: 1413501 - DNA, 25 bp, Homo sapien
cctcttagaggcgtggtgacaactt

SEQ ID NO: 1413502 - DNA, 25 bp, Homo sapien
agactggtgcttgagaccttgaggc

SEQ ID NO: 1413503 - DNA, 25 bp, Homo sapien
gtggccacacgccatagtttgctaa

SEQ ID NO: 1413504 - DNA, 25 bp, Homo sapien
aacagatggcagactggatgtggcc

SEQ ID NO: 1413505 - DNA, 25 bp, Homo sapien
aggtgataggactagcccttaagac

SEQ ID NO: 1413506 - DNA, 25 bp, Homo sapien
agatgactgggaattatcctttcat

SEQ ID NO: 1413507 - DNA, 25 bp, Homo sapien
agagtcttgctctgttgcccaggct

SEQ ID NO: 1413508 - DNA, 25 bp, Homo sapien
ggagtgcagtggcaccatctcagct

SEQ ID NO: 1413509 - DNA, 25 bp, Homo sapien
aattataaactaactttctctctct

SEQ ID NO: 1413510 - DNA, 25 bp, Homo sapien
ttctttcttttgagaaagagtcttg

SEQ ID NO: 1413511 - DNA, 25 bp, Homo sapien
tctgcaggcagtaacgtaggcaccc

SEQ ID NO: 1413512 - DNA, 25 bp, Homo sapien
tatcagggaatggtaggaaccgtcc

SEQ ID NO: 1413513 - DNA, 25 bp, Homo sapien
cttatcagggaattcttatcaggga

SEQ ID NO: 1413514 - DNA, 25 bp, Homo sapien
tgtaatctaccaaagaagctcgatg

SEQ ID NO: 1413515 - DNA, 25 bp, Homo sapien
gcttgtagtctcatttcttaggcac

SEQ ID NO: 1413516 - DNA, 25 bp, Homo sapien
gagcttgtagtctcatttcttaggc

SEQ ID NO: 1413517 - DNA, 25 bp, Homo sapien
gtagtctcatttcttaggcacttac

SEQ ID NO: 1413518 - DNA, 25 bp, Homo sapien
tgtagtctcatttcttaggcactta

SEQ ID NO: 1413519 - DNA, 25 bp, Homo sapien
tttagaaggccgcacaagagggata

SEQ ID NO: 1413520 - DNA, 25 bp, Homo sapien
catgacacctagcttctggaatacg

SEQ ID NO: 1413521 - DNA, 25 bp, Homo sapien
ggaatacggttagtggcatttgcca

SEQ ID NO: 1413522 - DNA, 25 bp, Homo sapien
aatatatttcgctttggacgggagg

SEQ ID NO: 1413523 - DNA, 25 bp, Homo sapien
cagacctgtgagttagattttggac

SEQ ID NO: 1413524 - DNA, 25 bp, Homo sapien
taatagcaacccaggtaacacgtga

SEQ ID NO: 1413525 - DNA, 25 bp, Homo sapien
taggccaattaagggcacatgcctg

SEQ ID NO: 1413526 - DNA, 25 bp, Homo sapien
taggatgagctactgtgattcagcc

SEQ ID NO: 1413527 - DNA, 25 bp, Homo sapien
tgcctgtgcccgatttccaagctgg

SEQ ID NO: 1413528 - DNA, 25 bp, Homo sapien
aactggcacactttggtctgataca

SEQ ID NO: 1413529 - DNA, 25 bp, Homo sapien
tctccaggcaggacctaagaagtgc

SEQ ID NO: 1413530 - DNA, 25 bp, Homo sapien
cagttgagtccctcagtaaagccca

SEQ ID NO: 1413531 - DNA, 25 bp, Homo sapien
aatcaggagattcatagcagagaaa

SEQ ID NO: 1413532 - DNA, 25 bp, Homo sapien
tcatgaatcaggagattcatagcag

SEQ ID NO: 1413533 - DNA, 25 bp, Homo sapien
catgaatcaggagattcatagcaga

SEQ ID NO: 1413534 - DNA, 25 bp, Homo sapien
tgaatcaggagattcatagcagaga

SEQ ID NO: 1413535 - DNA, 25 bp, Homo sapien
cctgagtccaaaggctaccttcaga

SEQ ID NO: 1413536 - DNA, 25 bp, Homo sapien
acaagagtagggtgtcctgagtcca

SEQ ID NO: 1413537 - DNA, 25 bp, Homo sapien
caagagtagggtgtcctgagtccaa

SEQ ID NO: 1413538 - DNA, 25 bp, Homo sapien
agtccaaaggctaccttcagaattc

SEQ ID NO: 1413539 - DNA, 25 bp, Homo sapien
taggataaacgcagcctgttcagtg

SEQ ID NO: 1413540 - DNA, 25 bp, Homo sapien
tagttggtctgcctaactctgaaag

SEQ ID NO: 1413541 - DNA, 25 bp, Homo sapien
caaagtgcctttacactaggaacag

SEQ ID NO: 1413542 - DNA, 25 bp, Homo sapien
caactggttaggtgcttcagctgac

SEQ ID NO: 1413543 - DNA, 25 bp, Homo sapien
aatttgattgcaccatgcttattgg

SEQ ID NO: 1413544 - DNA, 25 bp, Homo sapien
cctgatatttaatgcttgccagaat

SEQ ID NO: 1413545 - DNA, 25 bp, Homo sapien
tgcatcctgatatttaatgcttgcc

SEQ ID NO: 1413546 - DNA, 25 bp, Homo sapien
gcaccatgcttattggcttctatct

SEQ ID NO: 1413547 - DNA, 25 bp, Homo sapien
caagaggcctctagtcatatgcagc

SEQ ID NO: 1413548 - DNA, 25 bp, Homo sapien
gaaaagtgtcccagcagtctctaga

SEQ ID NO: 1413549 - DNA, 25 bp, Homo sapien
ggcagtttgcaatctcccagtaaga

SEQ ID NO: 1413550 - DNA, 25 bp, Homo sapien
tgactgtgagcagagcatcttggct

SEQ ID NO: 1413551 - DNA, 25 bp, Homo sapien
ctagatcacaatttcatagcttgaa

SEQ ID NO: 1413552 - DNA, 25 bp, Homo sapien
cacaatttcatagcttgaagtccca

SEQ ID NO: 1413553 - DNA, 25 bp, Homo sapien
gatcacaatttcatagcttgaagtc

SEQ ID NO: 1413554 - DNA, 25 bp, Homo sapien
agcttgaagtcccaggaggtttact

SEQ ID NO: 1413555 - DNA, 25 bp, Homo sapien
aactgcacttcggaataaactgtgt

SEQ ID NO: 1413556 - DNA, 25 bp, Homo sapien
agcaaactgcacttcggaataaact

SEQ ID NO: 1413557 - DNA, 25 bp, Homo sapien
gcacttcggaataaactgtgttcac

SEQ ID NO: 1413558 - DNA, 25 bp, Homo sapien
acttcggaataaactgtgttcactg

SEQ ID NO: 1413559 - DNA, 25 bp, Homo sapien
tgctggctgggtgttccttgaagcc

SEQ ID NO: 1413560 - DNA, 25 bp, Homo sapien
atcatagattctggactctgctggc

SEQ ID NO: 1413561 - DNA, 25 bp, Homo sapien
tcatcatagattctggactctgctg

SEQ ID NO: 1413562 - DNA, 25 bp, Homo sapien
ctggctgggtgttccttgaagccat

SEQ ID NO: 1413563 - DNA, 25 bp, Homo sapien
gatatatgtgtatatggttttcttt

SEQ ID NO: 1413564 - DNA, 25 bp, Homo sapien
tatatgtgtatatggttttctttga

SEQ ID NO: 1413565 - DNA, 25 bp, Homo sapien
tatatggttttctttgaggcagcat

SEQ ID NO: 1413566 - DNA, 25 bp, Homo sapien
gtgtatatggttttctttgaggcag

SEQ ID NO: 1413567 - DNA, 25 bp, Homo sapien
ctgtctcacaaataaatatagaccc

SEQ ID NO: 1413568 - DNA, 25 bp, Homo sapien
ctcacaaataaatatagacccacag

SEQ ID NO: 1413569 - DNA, 25 bp, Homo sapien
tcacaaataaatatagacccacagt

SEQ ID NO: 1413570 - DNA, 25 bp, Homo sapien
gtctcacaaataaatatagacccac

SEQ ID NO: 1413571 - DNA, 25 bp, Homo sapien
gactgtcttgcatggctagttgact

SEQ ID NO: 1413572 - DNA, 25 bp, Homo sapien
tgcttggatcctcagaatgtctcag

SEQ ID NO: 1413573 - DNA, 25 bp, Homo sapien
ccccagggattaaatggctgccatc

SEQ ID NO: 1413574 - DNA, 25 bp, Homo sapien
tctactctagagtccagattaggcc

SEQ ID NO: 1413575 - DNA, 25 bp, Homo sapien
tattcaaggaactttgtggctgaga

SEQ ID NO: 1413576 - DNA, 25 bp, Homo sapien
ttattcaaggaactttgtggctgag

SEQ ID NO: 1413577 - DNA, 25 bp, Homo sapien
ttcaaggaactttgtggctgagaac

SEQ ID NO: 1413578 - DNA, 25 bp, Homo sapien
attcaaggaactttgtggctgagaa

SEQ ID NO: 1413579 - DNA, 25 bp, Homo sapien
ttagtgaaggtgttcaagcaggaac

SEQ ID NO: 1413580 - DNA, 25 bp, Homo sapien
agggttcttagtgaaggtgttcaag

SEQ ID NO: 1413581 - DNA, 25 bp, Homo sapien
ggttcttagtgaaggtgttcaagca

SEQ ID NO: 1413582 - DNA, 25 bp, Homo sapien
tcttagtgaaggtgttcaagcagga

SEQ ID NO: 1413583 - DNA, 25 bp, Homo sapien
tactaagctcgaacccatgttctgg

SEQ ID NO: 1413584 - DNA, 25 bp, Homo sapien
tctgaatggagaatggcacaactac

SEQ ID NO: 1413585 - DNA, 25 bp, Homo sapien
ttcagagggacatagtgacaaccat

SEQ ID NO: 1413586 - DNA, 25 bp, Homo sapien
aacatttcacatgtgagggccctga

SEQ ID NO: 1413587 - DNA, 25 bp, Homo sapien
gaaaaaggcagattccctggaacaa

SEQ ID NO: 1413588 - DNA, 25 bp, Homo sapien
agatcggaaaaaggcagattccctg

SEQ ID NO: 1413589 - DNA, 25 bp, Homo sapien
tcggaaaaaggcagattccctggaa

SEQ ID NO: 1413590 - DNA, 25 bp, Homo sapien
gtggagatcggaaaaaggcagattc

SEQ ID NO: 1413591 - DNA, 25 bp, Homo sapien
tggataaatggcttcagtcccagga

SEQ ID NO: 1413592 - DNA, 25 bp, Homo sapien
ttggataaatggcttcagtcccagg

SEQ ID NO: 1413593 - DNA, 25 bp, Homo sapien
tggtgagtacggaagcccattgcga

SEQ ID NO: 1413594 - DNA, 25 bp, Homo sapien
ggtgagtacggaagcccattgcgat

SEQ ID NO: 1413595 - DNA, 25 bp, Homo sapien
atagccagcacgctcagcaacccgg

SEQ ID NO: 1413596 - DNA, 25 bp, Homo sapien
tcagcaacccggtgtggtgagtacg

SEQ ID NO: 1413597 - DNA, 25 bp, Homo sapien
agtgaccaggccaaagataaaggaa

SEQ ID NO: 1413598 - DNA, 25 bp, Homo sapien
aggtgatgccctcagtgaccaggcc

SEQ ID NO: 1413599 - DNA, 25 bp, Homo sapien
cagtgaccaggccaaagataaagga

SEQ ID NO: 1413600 - DNA, 25 bp, Homo sapien
gaggtgatgccctcagtgaccaggc

SEQ ID NO: 1413601 - DNA, 25 bp, Homo sapien
tgtggcccacgttcagaccttgcag

SEQ ID NO: 1413602 - DNA, 25 bp, Homo sapien
agaatgtggcccacgttcagacctt

SEQ ID NO: 1413603 - DNA, 25 bp, Homo sapien
ccacgttcagaccttgcagctcctc

SEQ ID NO: 1413604 - DNA, 25 bp, Homo sapien
gaatgtggcccacgttcagaccttg

SEQ ID NO: 1413605 - DNA, 25 bp, Homo sapien
caggagagatgggcagagctggtta

SEQ ID NO: 1413606 - DNA, 25 bp, Homo sapien
aggagagatgggcagagctggttac

SEQ ID NO: 1413607 - DNA, 25 bp, Homo sapien
aaggacattaccctcttctcccagg

SEQ ID NO: 1413608 - DNA, 25 bp, Homo sapien
tggtcctcaggagtctggaagattt

SEQ ID NO: 1413609 - DNA, 25 bp, Homo sapien
cacgtgtaagtcagctcttggtcct

SEQ ID NO: 1413610 - DNA, 25 bp, Homo sapien
tcagaattgttgctgacagggttct

SEQ ID NO: 1413611 - DNA, 25 bp, Homo sapien
cattacaggtgctgttcacagatgc

SEQ ID NO: 1413612 - DNA, 25 bp, Homo sapien
catgagccaatagtgagctggagct

SEQ ID NO: 1413613 - DNA, 25 bp, Homo sapien
gcttgtactagtttgtgggagccaa

SEQ ID NO: 1413614 - DNA, 25 bp, Homo sapien
tgcaattgctataagctaggactcg

SEQ ID NO: 1413615 - DNA, 25 bp, Homo sapien
gagtattaccccacagaaatttgca

SEQ ID NO: 1413616 - DNA, 25 bp, Homo sapien
tgtgggtcacagtaactacgggtgc

SEQ ID NO: 1413617 - DNA, 25 bp, Homo sapien
taatgaccagattgtagttcggacc

SEQ ID NO: 1413618 - DNA, 25 bp, Homo sapien
gagtctcctggtgttacataagcaa

SEQ ID NO: 1413619 - DNA, 25 bp, Homo sapien
tatttacagggaaagtgactgactc

SEQ ID NO: 1413620 - DNA, 25 bp, Homo sapien
attttcccgtaggagcagtatccgg

SEQ ID NO: 1413621 - DNA, 25 bp, Homo sapien
gagattttcccgtaggagcagtatc

SEQ ID NO: 1413622 - DNA, 25 bp, Homo sapien
aggaacagctgatgtaaagctcttt

SEQ ID NO: 1413623 - DNA, 25 bp, Homo sapien
caggaacagctgatgtaaagctctt

SEQ ID NO: 1413624 - DNA, 25 bp, Homo sapien
tttttgtggcactagctaaacttcc

SEQ ID NO: 1413625 - DNA, 25 bp, Homo sapien
tggaacatcgctgagtattgtaggt

SEQ ID NO: 1413626 - DNA, 25 bp, Homo sapien
tttcttaggatcctccagacaaaca

SEQ ID NO: 1413627 - DNA, 25 bp, Homo sapien
cctccagacaaacatttcttgttct

SEQ ID NO: 1413628 - DNA, 25 bp, Homo sapien
cacttggagctgacaaggtaggcct

SEQ ID NO: 1413629 - DNA, 25 bp, Homo sapien
gatttaggaatactccagtagcctg

SEQ ID NO: 1413630 - DNA, 25 bp, Homo sapien
gatctccaggactgcttcaagcact

SEQ ID NO: 1413631 - DNA, 25 bp, Homo sapien
catcaggctcctgttgcgaaggtgc

SEQ ID NO: 1413632 - DNA, 25 bp, Homo sapien
gcaagatccataggtggtgctgagc

SEQ ID NO: 1413633 - DNA, 25 bp, Homo sapien
aggtttgcaggcaaaggagcaagat

SEQ ID NO: 1413634 - DNA, 25 bp, Homo sapien
ggcaaaggagcaagatccataggtg

SEQ ID NO: 1413635 - DNA, 25 bp, Homo sapien
aaggagcaagatccataggtggtgc

SEQ ID NO: 1413636 - DNA, 25 bp, Homo sapien
ccttctgtggaaaagcacggcactg

SEQ ID NO: 1413637 - DNA, 25 bp, Homo sapien
ctttcagggtctaaccttctgtgga

SEQ ID NO: 1413638 - DNA, 25 bp, Homo sapien
agctgaatattgagcttagtgtagg

SEQ ID NO: 1413639 - DNA, 25 bp, Homo sapien
agacatgagctgaatattgagctta

SEQ ID NO: 1413640 - DNA, 25 bp, Homo sapien
gggagatttgctgattctagacatg

SEQ ID NO: 1413641 - DNA, 25 bp, Homo sapien
gatttgctgattctagacatgagct

SEQ ID NO: 1413642 - DNA, 25 bp, Homo sapien
taaccatggtctagggtgagaggca

SEQ ID NO: 1413643 - DNA, 25 bp, Homo sapien
ggactgtgcccagttgtacttcaga

SEQ ID NO: 1413644 - DNA, 25 bp, Homo sapien
tcccttcaaaccgagaatgggtgtg

SEQ ID NO: 1413645 - DNA, 25 bp, Homo sapien
tccaagtgctgggaactgagcttct

SEQ ID NO: 1413646 - DNA, 25 bp, Homo sapien
tagaaagtgcctaggaaagaccttg

SEQ ID NO: 1413647 - DNA, 25 bp, Homo sapien
gaccttgacctgcaataccccttga

SEQ ID NO: 1413648 - DNA, 25 bp, Homo sapien
cacagagagtcttagctgaggttcc

SEQ ID NO: 1413649 - DNA, 25 bp, Homo sapien
gcacagaactgtacttttaaggctc

SEQ ID NO: 1413650 - DNA, 25 bp, Homo sapien
attcacccttcagcctctattcact

SEQ ID NO: 1413651 - DNA, 25 bp, Homo sapien
taatatcagagtgttttatgtataa

SEQ ID NO: 1413652 - DNA, 25 bp, Homo sapien
tattcactctttatcctgagagaga

SEQ ID NO: 1413653 - DNA, 25 bp, Homo sapien
agcttcctttatacaataatatcag

SEQ ID NO: 1413654 - DNA, 25 bp, Homo sapien
ctcccagaacaaagtaaagatagcc

SEQ ID NO: 1413655 - DNA, 25 bp, Homo sapien
agctcccagaacaaagtaaagatag

SEQ ID NO: 1413656 - DNA, 25 bp, Homo sapien
cagctcccagaacaaagtaaagata

SEQ ID NO: 1413657 - DNA, 25 bp, Homo sapien
tcccagaacaaagtaaagatagcca

SEQ ID NO: 1413658 - DNA, 25 bp, Homo sapien
tatcaagtaacgctctgttctgcgc

SEQ ID NO: 1413659 - DNA, 25 bp, Homo sapien
tgagaagggtacagacgtgcagcat

SEQ ID NO: 1413660 - DNA, 25 bp, Homo sapien
gcaagatgcccaaagtctgaactca

SEQ ID NO: 1413661 - DNA, 25 bp, Homo sapien
tgcagcatgtctgccagaggaaact

SEQ ID NO: 1413662 - DNA, 25 bp, Homo sapien
cacactagcatagactgtgatggaa

SEQ ID NO: 1413663 - DNA, 25 bp, Homo sapien
tcacactagcatagactgtgatgga

SEQ ID NO: 1413664 - DNA, 25 bp, Homo sapien
acactagcatagactgtgatggaat

SEQ ID NO: 1413665 - DNA, 25 bp, Homo sapien
tctagtgggactcaaagggagaaga

SEQ ID NO: 1413666 - DNA, 25 bp, Homo sapien
gttttgctgttacatatgggtcaca

SEQ ID NO: 1413667 - DNA, 25 bp, Homo sapien
gagaagagggttatgcgcaaagatc

SEQ ID NO: 1413668 - DNA, 25 bp, Homo sapien
agatctctcatgtcaaagaaacaaa

SEQ ID NO: 1413669 - DNA, 25 bp, Homo sapien
gtcatgaggatttgttatacacagt

SEQ ID NO: 1413670 - DNA, 25 bp, Homo sapien
tattccctctctacggagagtaggc

SEQ ID NO: 1413671 - DNA, 25 bp, Homo sapien
gcctagtgcccaatagctattttcc

SEQ ID NO: 1413672 - DNA, 25 bp, Homo sapien
cctaggtatgaagcctagtgcccaa

SEQ ID NO: 1413673 - DNA, 25 bp, Homo sapien
caacatatatggtggtgcaagggtc

SEQ ID NO: 1413674 - DNA, 25 bp, Homo sapien
cagcaacatatatggtggtgcaagg

SEQ ID NO: 1413675 - DNA, 25 bp, Homo sapien
ggcagcaacatatatggtggtgcaa

SEQ ID NO: 1413676 - DNA, 25 bp, Homo sapien
gcaacatatatggtggtgcaagggt

SEQ ID NO: 1413677 - DNA, 25 bp, Homo sapien
aggagtcaagtttcttctgaagagg

SEQ ID NO: 1413678 - DNA, 25 bp, Homo sapien
tgggaaggagtcaagtttcttctga

SEQ ID NO: 1413679 - DNA, 25 bp, Homo sapien
tgagctgggaaggagtcaagtttct

SEQ ID NO: 1413680 - DNA, 25 bp, Homo sapien
aaggagtcaagtttcttctgaagag

SEQ ID NO: 1413681 - DNA, 25 bp, Homo sapien
aacagagagagctagttctcaccca

SEQ ID NO: 1413682 - DNA, 25 bp, Homo sapien
gaaagcagattagctgaacagagag

SEQ ID NO: 1413683 - DNA, 25 bp, Homo sapien
ctgaacagagagagctagttctcac

SEQ ID NO: 1413684 - DNA, 25 bp, Homo sapien
gagagagctagttctcacccaactc

SEQ ID NO: 1413685 - DNA, 25 bp, Homo sapien
gaagaggcaaagaggattttctcct

SEQ ID NO: 1413686 - DNA, 25 bp, Homo sapien
gaataagtccgaagtctgatgatga

SEQ ID NO: 1413687 - DNA, 25 bp, Homo sapien
tggccctgaggatgtgcctccttga

SEQ ID NO: 1413688 - DNA, 25 bp, Homo sapien
ggagagcctggagccaccagatgct

SEQ ID NO: 1413689 - DNA, 25 bp, Homo sapien
taattgactaacatggaacctagac

SEQ ID NO: 1413690 - DNA, 25 bp, Homo sapien
tgccagagctggaaagagtcataca

SEQ ID NO: 1413691 - DNA, 25 bp, Homo sapien
ggaatactctaggaaacatgacagg

SEQ ID NO: 1413692 - DNA, 25 bp, Homo sapien
gcaaggtagactggccaggaatact

SEQ ID NO: 1413693 - DNA, 25 bp, Homo sapien
cactgttgtctggtaatggttcgtt

SEQ ID NO: 1413694 - DNA, 25 bp, Homo sapien
tgggcatagatcgtaaggctttttt

SEQ ID NO: 1413695 - DNA, 25 bp, Homo sapien
gacttgggcatagatcgtaaggctt

SEQ ID NO: 1413696 - DNA, 25 bp, Homo sapien
ttccactgttgtctggtaatggttc

SEQ ID NO: 1413697 - DNA, 25 bp, Homo sapien
tgtagtattaccaccatgatgagaa

SEQ ID NO: 1413698 - DNA, 25 bp, Homo sapien
tcttctcaactgtagtattaccacc

SEQ ID NO: 1413699 - DNA, 25 bp, Homo sapien
caactgtagtattaccaccatgatg

SEQ ID NO: 1413700 - DNA, 25 bp, Homo sapien
gtattaccaccatgatgagaatcat

SEQ ID NO: 1413701 - DNA, 25 bp, Homo sapien
cccctaacagcccagcatacactgc

SEQ ID NO: 1413702 - DNA, 25 bp, Homo sapien
gcatacactgcccatggttttgttt

SEQ ID NO: 1413703 - DNA, 25 bp, Homo sapien
agcccagcatacactgcccatggtt

SEQ ID NO: 1413704 - DNA, 25 bp, Homo sapien
taacagcccagcatacactgcccat

SEQ ID NO: 1413705 - DNA, 25 bp, Homo sapien
ggagggcactcaatatgcactcgat

SEQ ID NO: 1413706 - DNA, 25 bp, Homo sapien
gggagcaaattccattgtgaaccag

SEQ ID NO: 1413707 - DNA, 25 bp, Homo sapien
ctttattggcaggatgagagcggac

SEQ ID NO: 1413708 - DNA, 25 bp, Homo sapien
cattccaccggaaacaatatagggc

SEQ ID NO: 1413709 - DNA, 25 bp, Homo sapien
ttatagcgggtgtggcccatgacca

SEQ ID NO: 1413710 - DNA, 25 bp, Homo sapien
gactctgaaacaatgggaactccct

SEQ ID NO: 1413711 - DNA, 25 bp, Homo sapien
gagacctgtcttagtgcctggaaca

SEQ ID NO: 1413712 - DNA, 25 bp, Homo sapien
ttcacctaggagatactgcgacgtt

SEQ ID NO: 1413713 - DNA, 25 bp, Homo sapien
gaattgttgctgatagggttgctca

SEQ ID NO: 1413714 - DNA, 25 bp, Homo sapien
gtatcaaggtgcaggtcccgttctc

SEQ ID NO: 1413715 - DNA, 25 bp, Homo sapien
tcagtgggtgggtgcccgccttttc

SEQ ID NO: 1413716 - DNA, 25 bp, Homo sapien
tcacggtgcagatgtagatattgtc

SEQ ID NO: 1413717 - DNA, 25 bp, Homo sapien
tagaacaaagtacagcctaatggca

SEQ ID NO: 1413718 - DNA, 25 bp, Homo sapien
tacatcctatctaagaccaccttgg

SEQ ID NO: 1413719 - DNA, 25 bp, Homo sapien
ccaatattgttagggctccactcgc

SEQ ID NO: 1413720 - DNA, 25 bp, Homo sapien
cccctgggaattctcacttgacctt

SEQ ID NO: 1413721 - DNA, 25 bp, Homo sapien
caagatccttgggtctatcggccct

SEQ ID NO: 1413722 - DNA, 25 bp, Homo sapien
tgtaaatgtgctaaccgcttctggt

SEQ ID NO: 1413723 - DNA, 25 bp, Homo sapien
tacaactcacagcttctaagtggcc

SEQ ID NO: 1413724 - DNA, 25 bp, Homo sapien
tcttggtcaaaggagcaccttggcc

SEQ ID NO: 1413725 - DNA, 25 bp, Homo sapien
ggactggggaagccgccattattac

SEQ ID NO: 1413726 - DNA, 25 bp, Homo sapien
caggcaaaagcgctgaactgaaaca

SEQ ID NO: 1413727 - DNA, 25 bp, Homo sapien
aggcaaaagcgctgaactgaaacat

SEQ ID NO: 1413728 - DNA, 25 bp, Homo sapien
gcaggcaaaagcgctgaactgaaac

SEQ ID NO: 1413729 - DNA, 25 bp, Homo sapien
tgcaggcaaaagcgctgaactgaaa

SEQ ID NO: 1413730 - DNA, 25 bp, Homo sapien
cctgcttcggatggatcaagagaca

SEQ ID NO: 1413731 - DNA, 25 bp, Homo sapien
tatccccagggtgagattctccaga

SEQ ID NO: 1413732 - DNA, 25 bp, Homo sapien
aatctttgggcagttcatcatgcgc

SEQ ID NO: 1413733 - DNA, 25 bp, Homo sapien
gataaaacttgtagcgatctcctag

SEQ ID NO: 1413734 - DNA, 25 bp, Homo sapien
cgaaggtcaaggagaggagcccctt

SEQ ID NO: 1413735 - DNA, 25 bp, Homo sapien
gttccgtagcttgccccaaaagcca

SEQ ID NO: 1413736 - DNA, 25 bp, Homo sapien
aggtcaaggagaggagccccttggg

SEQ ID NO: 1413737 - DNA, 25 bp, Homo sapien
aggagaggagccccttgggatccat

SEQ ID NO: 1413738 - DNA, 25 bp, Homo sapien
ggaagggatcctggccggagcctgg

SEQ ID NO: 1413739 - DNA, 25 bp, Homo sapien
gagaaggaagggatcctggccggag

SEQ ID NO: 1413740 - DNA, 25 bp, Homo sapien
agaaggaagggatcctggccggagc

SEQ ID NO: 1413741 - DNA, 25 bp, Homo sapien
aaggaagggatcctggccggagcct

SEQ ID NO: 1413742 - DNA, 25 bp, Homo sapien
gaagccaggcacttagcctatggga

SEQ ID NO: 1413743 - DNA, 25 bp, Homo sapien
gtgtgtagtcacctcggccaaaacc

SEQ ID NO: 1413744 - DNA, 25 bp, Homo sapien
gcaagcttcgtgtcatgcagcagag

SEQ ID NO: 1413745 - DNA, 25 bp, Homo sapien
gaacccgcttcctgtatcactggga

SEQ ID NO: 1413746 - DNA, 25 bp, Homo sapien
acgaagaataaagccagtaggaaga

SEQ ID NO: 1413747 - DNA, 25 bp, Homo sapien
tcatctaaatgagagtggcgatcca

SEQ ID NO: 1413748 - DNA, 25 bp, Homo sapien
ggaaatcttgaaaggatgtaacgaa

SEQ ID NO: 1413749 - DNA, 25 bp, Homo sapien
tgtaacgaatcgttcaagtcgaacg

SEQ ID NO: 1413750 - DNA, 25 bp, Homo sapien
gggatgtgcagaccctcatgggcag

SEQ ID NO: 1413751 - DNA, 25 bp, Homo sapien
caggggatgtgcagaccctcatggg

SEQ ID NO: 1413752 - DNA, 25 bp, Homo sapien
tcaggggatgtgcagaccctcatgg

SEQ ID NO: 1413753 - DNA, 25 bp, Homo sapien
ggggatgtgcagaccctcatgggca

SEQ ID NO: 1413754 - DNA, 25 bp, Homo sapien
ctgtggttagcatttgccagctggt

SEQ ID NO: 1413755 - DNA, 25 bp, Homo sapien
agagcagctggcgaaagagaataga

SEQ ID NO: 1413756 - DNA, 25 bp, Homo sapien
gctggcgaaagagaatagagcctgt

SEQ ID NO: 1413757 - DNA, 25 bp, Homo sapien
atagagcctgtggttagcatttgcc

SEQ ID NO: 1413758 - DNA, 25 bp, Homo sapien
ggagcatgatcaccaacaggcaaga

SEQ ID NO: 1413759 - DNA, 25 bp, Homo sapien
cgttgataattcagcagcatgcttc

SEQ ID NO: 1413760 - DNA, 25 bp, Homo sapien
tctggtcagcctatacagtctctgt

SEQ ID NO: 1413761 - DNA, 25 bp, Homo sapien
gaagtttcgcttgagttaaaagagc

SEQ ID NO: 1413762 - DNA, 25 bp, Homo sapien
gaccactagccaacttgcaatccat

SEQ ID NO: 1413763 - DNA, 25 bp, Homo sapien
gaatggtgggcaccgtgaccactag

SEQ ID NO: 1413764 - DNA, 25 bp, Homo sapien
ggcaccgtgaccactagccaacttg

SEQ ID NO: 1413765 - DNA, 25 bp, Homo sapien
gccaagaatggtgggcaccgtgacc

SEQ ID NO: 1413766 - DNA, 25 bp, Homo sapien
agaaggggcaagtgtactggacact

SEQ ID NO: 1413767 - DNA, 25 bp, Homo sapien
aaccctatatgcttaggtatcttta

SEQ ID NO: 1413768 - DNA, 25 bp, Homo sapien
taggtatctttatcttgactaatgt

SEQ ID NO: 1413769 - DNA, 25 bp, Homo sapien
tgactaatgtattgagaaggggcaa

SEQ ID NO: 1413770 - DNA, 25 bp, Homo sapien
cagggaatgtgcgtcttcctttttc

SEQ ID NO: 1413771 - DNA, 25 bp, Homo sapien
gggaatgtgcgtcttcctttttctg

SEQ ID NO: 1413772 - DNA, 25 bp, Homo sapien
agggaatgtgcgtcttcctttttct

SEQ ID NO: 1413773 - DNA, 25 bp, Homo sapien
tgatattgatatgagggtggtgttg

SEQ ID NO: 1413774 - DNA, 25 bp, Homo sapien
cagataccacactgtcacagtgggt

SEQ ID NO: 1413775 - DNA, 25 bp, Homo sapien
tcaggatgtgatattgatatgaggg

SEQ ID NO: 1413776 - DNA, 25 bp, Homo sapien
atattgatatgagggtggtgttgga

SEQ ID NO: 1413777 - DNA, 25 bp, Homo sapien
cactcatgagtggatcctcccagga

SEQ ID NO: 1413778 - DNA, 25 bp, Homo sapien
gaagtgaccccaggtatgactgact

SEQ ID NO: 1413779 - DNA, 25 bp, Homo sapien
gatctagagccaggtgtgacactca

SEQ ID NO: 1413780 - DNA, 25 bp, Homo sapien
tagctgtcccatgctagcaccagtg

SEQ ID NO: 1413781 - DNA, 25 bp, Homo sapien
gactgaggcagaccgtgccattctt

SEQ ID NO: 1413782 - DNA, 25 bp, Homo sapien
agggtggactgaggcagaccgtgcc

SEQ ID NO: 1413783 - DNA, 25 bp, Homo sapien
ctgaggcagaccgtgccattcttgc

SEQ ID NO: 1413784 - DNA, 25 bp, Homo sapien
gtggactgaggcagaccgtgccatt

SEQ ID NO: 1413785 - DNA, 25 bp, Homo sapien
aattgctgacttggcaagtataaca

SEQ ID NO: 1413786 - DNA, 25 bp, Homo sapien
agaattgctgacttggcaagtataa

SEQ ID NO: 1413787 - DNA, 25 bp, Homo sapien
attgctgacttggcaagtataacac

SEQ ID NO: 1413788 - DNA, 25 bp, Homo sapien
gaattgctgacttggcaagtataac

SEQ ID NO: 1413789 - DNA, 25 bp, Homo sapien
ctggagtaattatgtggcataaggg

SEQ ID NO: 1413790 - DNA, 25 bp, Homo sapien
tcaagcacactgttctggagctcct

SEQ ID NO: 1413791 - DNA, 25 bp, Homo sapien
gtggtttcaagcacactgttctgga

SEQ ID NO: 1413792 - DNA, 25 bp, Homo sapien
tgtggcataagggtggtttcaagca

SEQ ID NO: 1413793 - DNA, 25 bp, Homo sapien
cgccaggtatcacacatgacagttt

SEQ ID NO: 1413794 - DNA, 25 bp, Homo sapien
tacagactcgccaggtatcacacat

SEQ ID NO: 1413795 - DNA, 25 bp, Homo sapien
ggtgtagtttacagactcgccaggt

SEQ ID NO: 1413796 - DNA, 25 bp, Homo sapien
gtcatccatgtcttctatcttctca

SEQ ID NO: 1413797 - DNA, 25 bp, Homo sapien
gcacagctagtgagcaactgaccag

SEQ ID NO: 1413798 - DNA, 25 bp, Homo sapien
gaacaccactgtaagagaccttgaa

SEQ ID NO: 1413799 - DNA, 25 bp, Homo sapien
catatacactggttagactggagct

SEQ ID NO: 1413800 - DNA, 25 bp, Homo sapien
ggatatctgttgacctaggctcact

SEQ ID NO: 1413801 - DNA, 25 bp, Homo sapien
tctcctcctccccgagagtgcccca

SEQ ID NO: 1413802 - DNA, 25 bp, Homo sapien
gaagccctacagtggtccatctggg

SEQ ID NO: 1413803 - DNA, 25 bp, Homo sapien
ggaagccctacagtggtccatctgg

SEQ ID NO: 1413804 - DNA, 25 bp, Homo sapien
cctcctccccgagagtgccccatgc

SEQ ID NO: 1413805 - DNA, 25 bp, Homo sapien
cattctacaatcttctggtcgaaag

SEQ ID NO: 1413806 - DNA, 25 bp, Homo sapien
gatcttccattcttgctcattccca

SEQ ID NO: 1413807 - DNA, 25 bp, Homo sapien
gaccttagagatgtacagtgcgcca

SEQ ID NO: 1413808 - DNA, 25 bp, Homo sapien
cctcatgatgtaggtgctgttgtcc

SEQ ID NO: 1413809 - DNA, 25 bp, Homo sapien
aactgactcaccagacgcaatggaa

SEQ ID NO: 1413810 - DNA, 25 bp, Homo sapien
cctactagtcctaccttagtgggat

SEQ ID NO: 1413811 - DNA, 25 bp, Homo sapien
tgaattggcatgatatagggctgaa

SEQ ID NO: 1413812 - DNA, 25 bp, Homo sapien
tagaggaaataacagaaacttcggc

SEQ ID NO: 1413813 - DNA, 25 bp, Homo sapien
tttcaaagaagaataaatgaccaag

SEQ ID NO: 1413814 - DNA, 25 bp, Homo sapien
tgattgtttcaaagaagaataaatg

SEQ ID NO: 1413815 - DNA, 25 bp, Homo sapien
agaagaataaatgaccaagatgaag

SEQ ID NO: 1413816 - DNA, 25 bp, Homo sapien
tcaggtgtggtctgattgtttcaaa

SEQ ID NO: 1413817 - DNA, 25 bp, Homo sapien
tcagtgcacaatcacagatacacag

SEQ ID NO: 1413818 - DNA, 25 bp, Homo sapien
catgccttcagtgcacaatcacaga

SEQ ID NO: 1413819 - DNA, 25 bp, Homo sapien
tgcacaatcacagatacacagttgg

SEQ ID NO: 1413820 - DNA, 25 bp, Homo sapien
caatcacagatacacagttggtgga

SEQ ID NO: 1413821 - DNA, 25 bp, Homo sapien
gacacgaatcccaacctctggagca

SEQ ID NO: 1413822 - DNA, 25 bp, Homo sapien
gagccagacacgaatcccaacctct

SEQ ID NO: 1413823 - DNA, 25 bp, Homo sapien
gcagtagcaattccagagccagaca

SEQ ID NO: 1413824 - DNA, 25 bp, Homo sapien
cagcagtagcaattccagagccaga

SEQ ID NO: 1413825 - DNA, 25 bp, Homo sapien
caacgcaggagacagttgagagcct

SEQ ID NO: 1413826 - DNA, 25 bp, Homo sapien
gagacagttgagagcctggctagaa

SEQ ID NO: 1413827 - DNA, 25 bp, Homo sapien
agttgagagcctggctagaaaaagg

SEQ ID NO: 1413828 - DNA, 25 bp, Homo sapien
cagaacttcccagcaacgcaggaga

SEQ ID NO: 1413829 - DNA, 25 bp, Homo sapien
tacgggtatgttacagcttgttcct

SEQ ID NO: 1413830 - DNA, 25 bp, Homo sapien
cagcaaatgagggcacctcacagct

SEQ ID NO: 1413831 - DNA, 25 bp, Homo sapien
caaatacgggtatgttacagcttgt

SEQ ID NO: 1413832 - DNA, 25 bp, Homo sapien
agcaaatacgggtatgttacagctt

SEQ ID NO: 1413833 - DNA, 25 bp, Homo sapien
atattccttgattagggaaccaagg

SEQ ID NO: 1413834 - DNA, 25 bp, Homo sapien
ctggatagccttaagcaattgtctc

SEQ ID NO: 1413835 - DNA, 25 bp, Homo sapien
ggcattcctgccgaactaaaagcgt

SEQ ID NO: 1413836 - DNA, 25 bp, Homo sapien
agcgtaagcgtatgcaaagcttcag

SEQ ID NO: 1413837 - DNA, 25 bp, Homo sapien
tttcaaggcgatcacatcggagtca

SEQ ID NO: 1413838 - DNA, 25 bp, Homo sapien
tatcggtattccctgaagattggta

SEQ ID NO: 1413839 - DNA, 25 bp, Homo sapien
ccacgagtaatttcaaggcgatcac

SEQ ID NO: 1413840 - DNA, 25 bp, Homo sapien
gaagattggtatgtcatcctgctcc

SEQ ID NO: 1413841 - DNA, 25 bp, Homo sapien
ggagctcctcgagggagtgctgctc

SEQ ID NO: 1413842 - DNA, 25 bp, Homo sapien
gaggagctcctcgagggagtgctgc

SEQ ID NO: 1413843 - DNA, 25 bp, Homo sapien
agggaggagctcctcgagggagtgc

SEQ ID NO: 1413844 - DNA, 25 bp, Homo sapien
ggaggagctcctcgagggagtgctg

SEQ ID NO: 1413845 - DNA, 25 bp, Homo sapien
tctctgggacacattcaaagcagtg

SEQ ID NO: 1413846 - DNA, 25 bp, Homo sapien
aatctctgggacacattcaaagcag

SEQ ID NO: 1413847 - DNA, 25 bp, Homo sapien
ggacacattcaaagcagtgtgtaga

SEQ ID NO: 1413848 - DNA, 25 bp, Homo sapien
tctgggacacattcaaagcagtgtg

SEQ ID NO: 1413849 - DNA, 25 bp, Homo sapien
ggacgggggaaacactgtcatgtac

SEQ ID NO: 1413850 - DNA, 25 bp, Homo sapien
gacgggggaaacactgtcatgtaca

SEQ ID NO: 1413851 - DNA, 25 bp, Homo sapien
aggacgggggaaacactgtcatgta

SEQ ID NO: 1413852 - DNA, 25 bp, Homo sapien
gaggacgggggaaacactgtcatgt

SEQ ID NO: 1413853 - DNA, 25 bp, Homo sapien
tagaaatgcagtcaacccagagagg

SEQ ID NO: 1413854 - DNA, 25 bp, Homo sapien
cctgggccggcgagagtctagaaat

SEQ ID NO: 1413855 - DNA, 25 bp, Homo sapien
gcaattgagtaaagcccaggccctg

SEQ ID NO: 1413856 - DNA, 25 bp, Homo sapien
gaaatgtctggcctgacgactcagg

SEQ ID NO: 1413857 - DNA, 25 bp, Homo sapien
tgggctttaggttgactctttccaa

SEQ ID NO: 1413858 - DNA, 25 bp, Homo sapien
tctccagctctttgcggctcaatcg

SEQ ID NO: 1413859 - DNA, 25 bp, Homo sapien
tgcggctcaatcgagcagggttctg

SEQ ID NO: 1413860 - DNA, 25 bp, Homo sapien
gaataaacatcaaagttctccagct

SEQ ID NO: 1413861 - DNA, 25 bp, Homo sapien
ttcatgacctcacaagctacctggg

SEQ ID NO: 1413862 - DNA, 25 bp, Homo sapien
tactcaggatccacgactagtgtga

SEQ ID NO: 1413863 - DNA, 25 bp, Homo sapien
gaatcaattcaaccaccaggctcag

SEQ ID NO: 1413864 - DNA, 25 bp, Homo sapien
gaagattaagctcacctatgtcctg

SEQ ID NO: 1413865 - DNA, 25 bp, Homo sapien
ggctgtggttcctcttcctggatcc

SEQ ID NO: 1413866 - DNA, 25 bp, Homo sapien
tagatagtgctattgaaggaagggc

SEQ ID NO: 1413867 - DNA, 25 bp, Homo sapien
cacttcatagatagtgctattgaag

SEQ ID NO: 1413868 - DNA, 25 bp, Homo sapien
ctattgaaggaagggctgtggttcc

SEQ ID NO: 1413869 - DNA, 25 bp, Homo sapien
gtaaagaatacttaacttcgagata

SEQ ID NO: 1413870 - DNA, 25 bp, Homo sapien
aattctgaggcactctcagccagaa

SEQ ID NO: 1413871 - DNA, 25 bp, Homo sapien
cttaacttcgagataagtgctctcc

SEQ ID NO: 1413872 - DNA, 25 bp, Homo sapien
ttcgagataagtgctctcccactcc

SEQ ID NO: 1413873 - DNA, 25 bp, Homo sapien
gcaggttcttgtgacgtgggagcag

SEQ ID NO: 1413874 - DNA, 25 bp, Homo sapien
gtatatgcaggttcttgtgacgtgg

SEQ ID NO: 1413875 - DNA, 25 bp, Homo sapien
aatgtatatgcaggttcttgtgacg

SEQ ID NO: 1413876 - DNA, 25 bp, Homo sapien
tataatgtatatgcaggttcttgtg

SEQ ID NO: 1413877 - DNA, 25 bp, Homo sapien
ctggatcatagagtagatggtgctc

SEQ ID NO: 1413878 - DNA, 25 bp, Homo sapien
ctgggactggatcatagagtagatg

SEQ ID NO: 1413879 - DNA, 25 bp, Homo sapien
gactggatcatagagtagatggtgc

SEQ ID NO: 1413880 - DNA, 25 bp, Homo sapien
gatcatagagtagatggtgctcccc

SEQ ID NO: 1413881 - DNA, 25 bp, Homo sapien
cttttcctccatcaccagaactagg

SEQ ID NO: 1413882 - DNA, 25 bp, Homo sapien
gacagtcgttcagtcctttttgtcc

SEQ ID NO: 1413883 - DNA, 25 bp, Homo sapien
cacatcaaaaggacagtcgttcagt

SEQ ID NO: 1413884 - DNA, 25 bp, Homo sapien
tcctccatcaccagaactaggaagc

SEQ ID NO: 1413885 - DNA, 25 bp, Homo sapien
attttccaagccagctgagagagac

SEQ ID NO: 1413886 - DNA, 25 bp, Homo sapien
agaccccagcctccgggatgacata

SEQ ID NO: 1413887 - DNA, 25 bp, Homo sapien
ttccaagccagctgagagagacccc

SEQ ID NO: 1413888 - DNA, 25 bp, Homo sapien
gagaccccagcctccgggatgacat

SEQ ID NO: 1413889 - DNA, 25 bp, Homo sapien
catcttcgtaaattgtcaaaaattc

SEQ ID NO: 1413890 - DNA, 25 bp, Homo sapien
ggttttcagatccttgacatcttcg

SEQ ID NO: 1413891 - DNA, 25 bp, Homo sapien
gacatcttcgtaaattgtcaaaaat

SEQ ID NO: 1413892 - DNA, 25 bp, Homo sapien
gatccttgacatcttcgtaaattgt

SEQ ID NO: 1413893 - DNA, 25 bp, Homo sapien
cagtgcgcttagaatcacgatgatc

SEQ ID NO: 1413894 - DNA, 25 bp, Homo sapien
ccaaggaacagtgcgcttagaatca

SEQ ID NO: 1413895 - DNA, 25 bp, Homo sapien
ggtgccaaggaacagtgcgcttaga

SEQ ID NO: 1413896 - DNA, 25 bp, Homo sapien
gaacagtgcgcttagaatcacgatg

SEQ ID NO: 1413897 - DNA, 25 bp, Homo sapien
tcttgcacatgagcctggttgcggg

SEQ ID NO: 1413898 - DNA, 25 bp, Homo sapien
tgtggaacggtaactcaggtaactc

SEQ ID NO: 1413899 - DNA, 25 bp, Homo sapien
agaaaagcttgcatctcccagaagg

SEQ ID NO: 1413900 - DNA, 25 bp, Homo sapien
gatgagcataagcaacagcccaaga

SEQ ID NO: 1413901 - DNA, 25 bp, Homo sapien
ggctttcccagctaacaggattgct

SEQ ID NO: 1413902 - DNA, 25 bp, Homo sapien
attaatgtcaacctcctcgtccagg

SEQ ID NO: 1413903 - DNA, 25 bp, Homo sapien
tgctccctctgtaccaagcatagga

SEQ ID NO: 1413904 - DNA, 25 bp, Homo sapien
cattgcaggtatatgtgtgagtgcc

SEQ ID NO: 1413905 - DNA, 25 bp, Homo sapien
agaccaagcaagacagagccacttg

SEQ ID NO: 1413906 - DNA, 25 bp, Homo sapien
accaagcaagacagagccacttggc

SEQ ID NO: 1413907 - DNA, 25 bp, Homo sapien
ctgcccctgtaggcggggtttctca

SEQ ID NO: 1413908 - DNA, 25 bp, Homo sapien
tgcccctgtaggcggggtttctcaa

SEQ ID NO: 1413909 - DNA, 25 bp, Homo sapien
cctggaacgtggctgtctgaacttt

SEQ ID NO: 1413910 - DNA, 25 bp, Homo sapien
ctgccttgatgagaagactcaagtt

SEQ ID NO: 1413911 - DNA, 25 bp, Homo sapien
tacaaaaacctggaacgtggctgtc

SEQ ID NO: 1413912 - DNA, 25 bp, Homo sapien
gccttgatgagaagactcaagttct

SEQ ID NO: 1413913 - DNA, 25 bp, Homo sapien
gaaatccattttgtgagggcagcaa

SEQ ID NO: 1413914 - DNA, 25 bp, Homo sapien
cattggaagtattggaaggcaaaga

SEQ ID NO: 1413915 - DNA, 25 bp, Homo sapien
ctatcattggaagtattggaaggca

SEQ ID NO: 1413916 - DNA, 25 bp, Homo sapien
cccacttcaatatgtgatgaaatcc

SEQ ID NO: 1413917 - DNA, 25 bp, Homo sapien
taactgaagaggcactcccgagatg

SEQ ID NO: 1413918 - DNA, 25 bp, Homo sapien
tgaagaggcactcccgagatgctaa

SEQ ID NO: 1413919 - DNA, 25 bp, Homo sapien
ggcactcccgagatgctaaccacat

SEQ ID NO: 1413920 - DNA, 25 bp, Homo sapien
ggttgtaactgaagaggcactcccg

SEQ ID NO: 1413921 - DNA, 25 bp, Homo sapien
gaaattctgaatggtcaggcccagg

SEQ ID NO: 1413922 - DNA, 25 bp, Homo sapien
cagtgctgaggcaactactaatggc

SEQ ID NO: 1413923 - DNA, 25 bp, Homo sapien
cagtttggcttgagaggataaattc

SEQ ID NO: 1413924 - DNA, 25 bp, Homo sapien
gcacaggtgctagggagcttatttg

SEQ ID NO: 1413925 - DNA, 25 bp, Homo sapien
agctgaactcatggcccctcaacca

SEQ ID NO: 1413926 - DNA, 25 bp, Homo sapien
caagctgaactcatggcccctcaac

SEQ ID NO: 1413927 - DNA, 25 bp, Homo sapien
cacagagctgaatacataatcctct

SEQ ID NO: 1413928 - DNA, 25 bp, Homo sapien
tctcacagagctgaatacataatcc

SEQ ID NO: 1413929 - DNA, 25 bp, Homo sapien
gaatttatgtgccaggatgttgaca

SEQ ID NO: 1413930 - DNA, 25 bp, Homo sapien
cattgccgagactgaatggatggat

SEQ ID NO: 1413931 - DNA, 25 bp, Homo sapien
cagttgaccatgaacccttggaccg

SEQ ID NO: 1413932 - DNA, 25 bp, Homo sapien
gatgttgacatcacacaccataatg

SEQ ID NO: 1413933 - DNA, 25 bp, Homo sapien
cccaacagtccagtgtgggaaggag

SEQ ID NO: 1413934 - DNA, 25 bp, Homo sapien
tggcaaggttggtggaatccctaac

SEQ ID NO: 1413935 - DNA, 25 bp, Homo sapien
gatgacgaaggtgtggaattctccc

SEQ ID NO: 1413936 - DNA, 25 bp, Homo sapien
cattgacactggagacttgttggca

SEQ ID NO: 1413937 - DNA, 25 bp, Homo sapien
gaacggatgaggtgaactagtaact

SEQ ID NO: 1413938 - DNA, 25 bp, Homo sapien
agaacggatgaggtgaactagtaac

SEQ ID NO: 1413939 - DNA, 25 bp, Homo sapien
ttaagaacggatgaggtgaactagt

SEQ ID NO: 1413940 - DNA, 25 bp, Homo sapien
taagaacggatgaggtgaactagta

SEQ ID NO: 1413941 - DNA, 25 bp, Homo sapien
ttcaccgtgcaagggccggcatagc

SEQ ID NO: 1413942 - DNA, 25 bp, Homo sapien
gcaagggccggcatagccaagccca

SEQ ID NO: 1413943 - DNA, 25 bp, Homo sapien
tgcaagggccggcatagccaagccc

SEQ ID NO: 1413944 - DNA, 25 bp, Homo sapien
cagcttcaccgtgcaagggccggca

SEQ ID NO: 1413945 - DNA, 25 bp, Homo sapien
ggaggagtatgagggtgaccacttg

SEQ ID NO: 1413946 - DNA, 25 bp, Homo sapien
ggagtatgagggtgaccacttgccc

SEQ ID NO: 1413947 - DNA, 25 bp, Homo sapien
aggagtatgagggtgaccacttgcc

SEQ ID NO: 1413948 - DNA, 25 bp, Homo sapien
aggaggagtatgagggtgaccactt

SEQ ID NO: 1413949 - DNA, 25 bp, Homo sapien
tgttaacgcctgctgtgagctgaca

SEQ ID NO: 1413950 - DNA, 25 bp, Homo sapien
agaactgccttgcaacctgtccagc

SEQ ID NO: 1413951 - DNA, 25 bp, Homo sapien
gctgacaaggccactgagaaagccc

SEQ ID NO: 1413952 - DNA, 25 bp, Homo sapien
tccccagtcagcaagaggacgatgg

SEQ ID NO: 1413953 - DNA, 25 bp, Homo sapien
aagtgggagggtgcttgaagttcac

SEQ ID NO: 1413954 - DNA, 25 bp, Homo sapien
tgaatcctatatggagagaccccca

SEQ ID NO: 1413955 - DNA, 25 bp, Homo sapien
caaaattgcatcccgttctctgctt

SEQ ID NO: 1413956 - DNA, 25 bp, Homo sapien
tcaagtgggagggtgcttgaagttc

SEQ ID NO: 1413957 - DNA, 25 bp, Homo sapien
gcctgggcaatgtagtgagaccaca

SEQ ID NO: 1413958 - DNA, 25 bp, Homo sapien
tgcttgagtccaagagttcgagaca

SEQ ID NO: 1413959 - DNA, 25 bp, Homo sapien
caagcctgggcaatgtagtgagacc

SEQ ID NO: 1413960 - DNA, 25 bp, Homo sapien
gcttgagtccaagagttcgagacaa

SEQ ID NO: 1413961 - DNA, 25 bp, Homo sapien
ccatccttgggatctcatggttggg

SEQ ID NO: 1413962 - DNA, 25 bp, Homo sapien
taacattctagctactgggtaagtt

SEQ ID NO: 1413963 - DNA, 25 bp, Homo sapien
tctcttctgccattaacattctagc

SEQ ID NO: 1413964 - DNA, 25 bp, Homo sapien
catccttgggatctcatggttggga

SEQ ID NO: 1413965 - DNA, 25 bp, Homo sapien
tagaagcacagctgcctcagttatc

SEQ ID NO: 1413966 - DNA, 25 bp, Homo sapien
aagcacagctgcctcagttatctca

SEQ ID NO: 1413967 - DNA, 25 bp, Homo sapien
gaatagaagcacagctgcctcagtt

SEQ ID NO: 1413968 - DNA, 25 bp, Homo sapien
aatagaagcacagctgcctcagtta

SEQ ID NO: 1413969 - DNA, 25 bp, Homo sapien
tgtaaccaacatgagttccatatcc

SEQ ID NO: 1413970 - DNA, 25 bp, Homo sapien
caacatgagttccatatccactcca

SEQ ID NO: 1413971 - DNA, 25 bp, Homo sapien
ctggcctctggaaagtatcctcctc

SEQ ID NO: 1413972 - DNA, 25 bp, Homo sapien
agtatcctcctccaccaatgcagtg

SEQ ID NO: 1413973 - DNA, 25 bp, Homo sapien
tcctctgtattcaactggtgacatg

SEQ ID NO: 1413974 - DNA, 25 bp, Homo sapien
taattatatccctcattgacccaga

SEQ ID NO: 1413975 - DNA, 25 bp, Homo sapien
tccttgatgccgtcctcatgatagt

SEQ ID NO: 1413976 - DNA, 25 bp, Homo sapien
gcttggatctctacacaggaacctc

SEQ ID NO: 1413977 - DNA, 25 bp, Homo sapien
tgaactgaacaaatcccgcagtgaa

SEQ ID NO: 1413978 - DNA, 25 bp, Homo sapien
attccagcacacaaggcgttggctg

SEQ ID NO: 1413979 - DNA, 25 bp, Homo sapien
tcagtgttacatccggtgaccctca

SEQ ID NO: 1413980 - DNA, 25 bp, Homo sapien
gttggctgctctctcgttattaaat

SEQ ID NO: 1413981 - DNA, 25 bp, Homo sapien
atagggtgagtaataagatgctgtt

SEQ ID NO: 1413982 - DNA, 25 bp, Homo sapien
tctgggcgtcgccaaaatcatagac

SEQ ID NO: 1413983 - DNA, 25 bp, Homo sapien
atcatagaccacagggatcaccggg

SEQ ID NO: 1413984 - DNA, 25 bp, Homo sapien
gatcaccgggccgttgtcagtccaa

SEQ ID NO: 1413985 - DNA, 25 bp, Homo sapien
ctttccttctccatatttcactgga

SEQ ID NO: 1413986 - DNA, 25 bp, Homo sapien
cttctccatatttcactggatattt

SEQ ID NO: 1413987 - DNA, 25 bp, Homo sapien
tccttctccatatttcactggatat

SEQ ID NO: 1413988 - DNA, 25 bp, Homo sapien
ttccttctccatatttcactggata

SEQ ID NO: 1413989 - DNA, 25 bp, Homo sapien
atgccaaacagattatgtcccagtg

SEQ ID NO: 1413990 - DNA, 25 bp, Homo sapien
tccgtgcggtacctcagcagggagc

SEQ ID NO: 1413991 - DNA, 25 bp, Homo sapien
tgtccgtgcggtacctcagcaggga

SEQ ID NO: 1413992 - DNA, 25 bp, Homo sapien
aacagattatgtcccagtgtctgga

SEQ ID NO: 1413993 - DNA, 25 bp, Homo sapien
tgtcacagaaggtctggtagataac

SEQ ID NO: 1413994 - DNA, 25 bp, Homo sapien
tcacagaaggtctggtagataacac

SEQ ID NO: 1413995 - DNA, 25 bp, Homo sapien
atgtcacagaaggtctggtagataa

SEQ ID NO: 1413996 - DNA, 25 bp, Homo sapien
cacagaaggtctggtagataacacc

SEQ ID NO: 1413997 - DNA, 25 bp, Homo sapien
caaatgcactaggacattcgtcttt

SEQ ID NO: 1413998 - DNA, 25 bp, Homo sapien
actaggacattcgtctttgatttcc

SEQ ID NO: 1413999 - DNA, 25 bp, Homo sapien
tgcactaggacattcgtctttgatt

SEQ ID NO: 1414000 - DNA, 25 bp, Homo sapien
aatgcactaggacattcgtctttga

SEQ ID NO: 1414001 - DNA, 25 bp, Homo sapien
gagatggagacgaagaacaggtcca

SEQ ID NO: 1414002 - DNA, 25 bp, Homo sapien
tccttgaagtaagtattagcctcat

SEQ ID NO: 1414003 - DNA, 25 bp, Homo sapien
ggtccattccttgaagtaagtatta

SEQ ID NO: 1414004 - DNA, 25 bp, Homo sapien
gagacgaagaacaggtccattcctt

SEQ ID NO: 1414005 - DNA, 25 bp, Homo sapien
tctggtggtcgctatgagaaacagc

SEQ ID NO: 1414006 - DNA, 25 bp, Homo sapien
tggtggtcgctatgagaaacagcag

SEQ ID NO: 1414007 - DNA, 25 bp, Homo sapien
ctctggtggtcgctatgagaaacag

SEQ ID NO: 1414008 - DNA, 25 bp, Homo sapien
taaagaaagcaagatgaaggtcacc

SEQ ID NO: 1414009 - DNA, 25 bp, Homo sapien
ctaaagaaagcaagatgaaggtcac

SEQ ID NO: 1414010 - DNA, 25 bp, Homo sapien
agatgaaggtcaccatcttggccat

SEQ ID NO: 1414011 - DNA, 25 bp, Homo sapien
gcaagatgaaggtcaccatcttggc

SEQ ID NO: 1414012 - DNA, 25 bp, Homo sapien
agctttatggaggaagcccagtggg

SEQ ID NO: 1414013 - DNA, 25 bp, Homo sapien
gctttctccaaaaacgctcctgatg

SEQ ID NO: 1414014 - DNA, 25 bp, Homo sapien
ttccttgggtacagagagctccttc

SEQ ID NO: 1414015 - DNA, 25 bp, Homo sapien
cgctcctgatgtggaatgaggtgca

SEQ ID NO: 1414016 - DNA, 25 bp, Homo sapien
tactgggcgggtgaaacgattacca

SEQ ID NO: 1414017 - DNA, 25 bp, Homo sapien
aaatacatgcgaaaaacgtgtggcg

SEQ ID NO: 1414018 - DNA, 25 bp, Homo sapien
gagtgatttggcatatacccgggcc

SEQ ID NO: 1414019 - DNA, 25 bp, Homo sapien
cccatagtgcgaggagagccatcga

SEQ ID NO: 1414020 - DNA, 25 bp, Homo sapien
tttggatatttggaggagtgaacat

SEQ ID NO: 1414021 - DNA, 25 bp, Homo sapien
ttggtgcttataagagagagttaaa

SEQ ID NO: 1414022 - DNA, 25 bp, Homo sapien
gaggagtgaacatcgttgttttgct

SEQ ID NO: 1414023 - DNA, 25 bp, Homo sapien
tggtgcttataagagagagttaaaa

SEQ ID NO: 1414024 - DNA, 25 bp, Homo sapien
agagagtcagtttggtaatgaccac

SEQ ID NO: 1414025 - DNA, 25 bp, Homo sapien
tcagtttggtaatgaccacagtagt

SEQ ID NO: 1414026 - DNA, 25 bp, Homo sapien
gagtcagtttggtaatgaccacagt

SEQ ID NO: 1414027 - DNA, 25 bp, Homo sapien
ttggtaatgaccacagtagtggcag

SEQ ID NO: 1414028 - DNA, 25 bp, Homo sapien
aaatcaggatccgaaggcacaagtc

SEQ ID NO: 1414029 - DNA, 25 bp, Homo sapien
tctaacatgtccgatccctgggtgg

SEQ ID NO: 1414030 - DNA, 25 bp, Homo sapien
tcaaccagggaagcttactcaggcc

SEQ ID NO: 1414031 - DNA, 25 bp, Homo sapien
tactcgcagaatattgtcaaccagg

SEQ ID NO: 1414032 - DNA, 25 bp, Homo sapien
gaggctaaatgtatgactaaggagc

SEQ ID NO: 1414033 - DNA, 25 bp, Homo sapien
gtgctggagaggctaaatgtatgac

SEQ ID NO: 1414034 - DNA, 25 bp, Homo sapien
gctggagaggctaaatgtatgacta

SEQ ID NO: 1414035 - DNA, 25 bp, Homo sapien
gagtaagactgtttctgtttggtct

SEQ ID NO: 1414036 - DNA, 25 bp, Homo sapien
ctgttgctccacaggacggcgacag

SEQ ID NO: 1414037 - DNA, 25 bp, Homo sapien
cggcgacaggtccagtagtagaaca

SEQ ID NO: 1414038 - DNA, 25 bp, Homo sapien
caggacggcgacaggtccagtagta

SEQ ID NO: 1414039 - DNA, 25 bp, Homo sapien
agtgagaggccttgttcttgctcct

SEQ ID NO: 1414040 - DNA, 25 bp, Homo sapien
cagtttttccgtctccaaatagccg

SEQ ID NO: 1414041 - DNA, 25 bp, Homo sapien
tcgccctgacaccgcagagctctgt

SEQ ID NO: 1414042 - DNA, 25 bp, Homo sapien
tctccaaatagccggggttggaaga

SEQ ID NO: 1414043 - DNA, 25 bp, Homo sapien
tggaagatgggttctcgccctgaca

SEQ ID NO: 1414044 - DNA, 25 bp, Homo sapien
cctccgttatctcccgactgcagct

SEQ ID NO: 1414045 - DNA, 25 bp, Homo sapien
tcatctatagaacaagagtacagcc

SEQ ID NO: 1414046 - DNA, 25 bp, Homo sapien
aacaagagtacagccgcctccgtta

SEQ ID NO: 1414047 - DNA, 25 bp, Homo sapien
tatagaacaagagtacagccgcctc

SEQ ID NO: 1414048 - DNA, 25 bp, Homo sapien
ttgccctgtgggaagaaccctcctc

SEQ ID NO: 1414049 - DNA, 25 bp, Homo sapien
tgggaagaaccctcctccaccgatg

SEQ ID NO: 1414050 - DNA, 25 bp, Homo sapien
atcccagtcaaaggcggagaagtcc

SEQ ID NO: 1414051 - DNA, 25 bp, Homo sapien
ccatatccatcccagtcaaaggcgg

SEQ ID NO: 1414052 - DNA, 25 bp, Homo sapien
ttggctgctctctcgttattaaaca

SEQ ID NO: 1414053 - DNA, 25 bp, Homo sapien
aacacccggaactgaacgaatcctg

SEQ ID NO: 1414054 - DNA, 25 bp, Homo sapien
tacagccagtaacttttatcccagc

SEQ ID NO: 1414055 - DNA, 25 bp, Homo sapien
ttatcccagcacaaagggcgttggc

SEQ ID NO: 1414056 - DNA, 25 bp, Homo sapien
gggccattgtcattccaacatttcc

SEQ ID NO: 1414057 - DNA, 25 bp, Homo sapien
tacggtgagtaataagatgcagtct

SEQ ID NO: 1414058 - DNA, 25 bp, Homo sapien
tcatagaccacaggtatggctgggc

SEQ ID NO: 1414059 - DNA, 25 bp, Homo sapien
cagtcttcttagcatcaccaaagtc

SEQ ID NO: 1414060 - DNA, 25 bp, Homo sapien
gcggtacctcagcagggcgctgttt

SEQ ID NO: 1414061 - DNA, 25 bp, Homo sapien
atgccaaacagattatgtcccagtc

SEQ ID NO: 1414062 - DNA, 25 bp, Homo sapien
tgttggtgcggtacctcagcagggc

SEQ ID NO: 1414063 - DNA, 25 bp, Homo sapien
ttggtgcggtacctcagcagggcgc

SEQ ID NO: 1414064 - DNA, 25 bp, Homo sapien
tcacagaaggtctggtagacaacac

SEQ ID NO: 1414065 - DNA, 25 bp, Homo sapien
tgctgactggaccagcgatcaccca

SEQ ID NO: 1414066 - DNA, 25 bp, Homo sapien
acagaaggtctggtagacaacacca

SEQ ID NO: 1414067 - DNA, 25 bp, Homo sapien
atgtcacagaaggtctggtagacaa

SEQ ID NO: 1414068 - DNA, 25 bp, Homo sapien
tgtagagagaaccagcccagagcct

SEQ ID NO: 1414069 - DNA, 25 bp, Homo sapien
taggaagtcaaaagcacactcagaa

SEQ ID NO: 1414070 - DNA, 25 bp, Homo sapien
gaagactccaacacatacttgctgg

SEQ ID NO: 1414071 - DNA, 25 bp, Homo sapien
tctcagctccgtgaatagaaaagcc

SEQ ID NO: 1414072 - DNA, 25 bp, Homo sapien
cctgcactatggcagcgttccttga

SEQ ID NO: 1414073 - DNA, 25 bp, Homo sapien
cacctgcactatggcagcgttcctt

SEQ ID NO: 1414074 - DNA, 25 bp, Homo sapien
ctatggcagcgttccttgatttctt

SEQ ID NO: 1414075 - DNA, 25 bp, Homo sapien
tgcactatggcagcgttccttgatt

SEQ ID NO: 1414076 - DNA, 25 bp, Homo sapien
tcgaattccctcgagagcatctcaa

SEQ ID NO: 1414077 - DNA, 25 bp, Homo sapien
aattccctcgagagcatctcaagag

SEQ ID NO: 1414078 - DNA, 25 bp, Homo sapien
caggtttcgaattccctcgagagca

SEQ ID NO: 1414079 - DNA, 25 bp, Homo sapien
agaaggcacaggtttcgaattccct

SEQ ID NO: 1414080 - DNA, 25 bp, Homo sapien
cacagagaagaataacaggaagcag

SEQ ID NO: 1414081 - DNA, 25 bp, Homo sapien
actgcacccactggtggccacagag

SEQ ID NO: 1414082 - DNA, 25 bp, Homo sapien
aggaagcagagtctggtcattgtcc

SEQ ID NO: 1414083 - DNA, 25 bp, Homo sapien
gcactgcacccactggtggccacag

SEQ ID NO: 1414084 - DNA, 25 bp, Homo sapien
gctgatagttcccttcctgtggaca

SEQ ID NO: 1414085 - DNA, 25 bp, Homo sapien
ccttcctgtggacactcggagctcc

SEQ ID NO: 1414086 - DNA, 25 bp, Homo sapien
aagtgctggtccctttatgtggaga

SEQ ID NO: 1414087 - DNA, 25 bp, Homo sapien
agtgctggtccctttatgtggagag

SEQ ID NO: 1414088 - DNA, 25 bp, Homo sapien
tgaagtgctggtccctttatgtgga

SEQ ID NO: 1414089 - DNA, 25 bp, Homo sapien
ggtgaagtgctggtccctttatgtg

SEQ ID NO: 1414090 - DNA, 25 bp, Homo sapien
catggaagtcatccacctcataggg

SEQ ID NO: 1414091 - DNA, 25 bp, Homo sapien
caaccgtatgatttggcatccctgc

SEQ ID NO: 1414092 - DNA, 25 bp, Homo sapien
gacaagttgctggtgtttaaggcac

SEQ ID NO: 1414093 - DNA, 25 bp, Homo sapien
ggcctccggcacatctcttgctatt

SEQ ID NO: 1414094 - DNA, 25 bp, Homo sapien
gaagggaaacgcctcactgctccca

SEQ ID NO: 1414095 - DNA, 25 bp, Homo sapien
agaagggaaacgcctcactgctccc

SEQ ID NO: 1414096 - DNA, 25 bp, Homo sapien
ctggagaagggaaacgcctcactgc

SEQ ID NO: 1414097 - DNA, 25 bp, Homo sapien
ggagaagggaaacgcctcactgctc

SEQ ID NO: 1414098 - DNA, 25 bp, Homo sapien
gatgggcaccagaccaggacatgtc

SEQ ID NO: 1414099 - DNA, 25 bp, Homo sapien
ggcaccagaccaggacatgtctcca

SEQ ID NO: 1414100 - DNA, 25 bp, Homo sapien
tgggcaccagaccaggacatgtctc

SEQ ID NO: 1414101 - DNA, 25 bp, Homo sapien
caccagaccaggacatgtctccagg

SEQ ID NO: 1414102 - DNA, 25 bp, Homo sapien
ctgaggtgaacatctaaattgatct

SEQ ID NO: 1414103 - DNA, 25 bp, Homo sapien
taattttcatgtaaatctgaggtga

SEQ ID NO: 1414104 - DNA, 25 bp, Homo sapien
ttttcatgtaaatctgaggtgaaca

SEQ ID NO: 1414105 - DNA, 25 bp, Homo sapien
ggtgaacatctaaattgatctttct

SEQ ID NO: 1414106 - DNA, 25 bp, Homo sapien
tgctggaaatcgtatcgttggagag

SEQ ID NO: 1414107 - DNA, 25 bp, Homo sapien
cctgctggaaatcgtatcgttggag

SEQ ID NO: 1414108 - DNA, 25 bp, Homo sapien
ttcctgctggaaatcgtatcgttgg

SEQ ID NO: 1414109 - DNA, 25 bp, Homo sapien
attcctgctggaaatcgtatcgttg

SEQ ID NO: 1414110 - DNA, 25 bp, Homo sapien
gagagtgttctctatgggctacacc

SEQ ID NO: 1414111 - DNA, 25 bp, Homo sapien
ccgagagtgttctctatgggctaca

SEQ ID NO: 1414112 - DNA, 25 bp, Homo sapien
agtgttctctatgggctacaccaaa

SEQ ID NO: 1414113 - DNA, 25 bp, Homo sapien
catccgagagtgttctctatgggct

SEQ ID NO: 1414114 - DNA, 25 bp, Homo sapien
tagctgacgtagtctccagccagag

SEQ ID NO: 1414115 - DNA, 25 bp, Homo sapien
ggatcttaagaacaccctcgaggcc

SEQ ID NO: 1414116 - DNA, 25 bp, Homo sapien
tcccttaggaggaagcgaattagct

SEQ ID NO: 1414117 - DNA, 25 bp, Homo sapien
gctcggctagctccgtgagaagcga

SEQ ID NO: 1414118 - DNA, 25 bp, Homo sapien
caaagatcataactcacggcaggct

SEQ ID NO: 1414119 - DNA, 25 bp, Homo sapien
caaggtcctgtacccaattttgtat

SEQ ID NO: 1414120 - DNA, 25 bp, Homo sapien
tgggattacagtgcgaaccacggct

SEQ ID NO: 1414121 - DNA, 25 bp, Homo sapien
cccggtggtgcagtgccaaagatca

SEQ ID NO: 1414122 - DNA, 25 bp, Homo sapien
tgtcaccgtggcttgaccatagtgc

SEQ ID NO: 1414123 - DNA, 25 bp, Homo sapien
ggtgtagtcaggagcaattttttac

SEQ ID NO: 1414124 - DNA, 25 bp, Homo sapien
aggacaggagtatcacaaagtacat

SEQ ID NO: 1414125 - DNA, 25 bp, Homo sapien
tcagaggaccttacaaaaagtttca

SEQ ID NO: 1414126 - DNA, 25 bp, Homo sapien
caattgtatctctaccaggcaaaca

SEQ ID NO: 1414127 - DNA, 25 bp, Homo sapien
ggatcatttgtatcactgtcaggct

SEQ ID NO: 1414128 - DNA, 25 bp, Homo sapien
actgtcaggcttctacatatttaac

SEQ ID NO: 1414129 - DNA, 25 bp, Homo sapien
aatatgaacagggatcatttgtatc

SEQ ID NO: 1414130 - DNA, 25 bp, Homo sapien
cctcccagtgaggtgcaaaagctta

SEQ ID NO: 1414131 - DNA, 25 bp, Homo sapien
agaaacctactgttctccttggagg

SEQ ID NO: 1414132 - DNA, 25 bp, Homo sapien
tcaggttgcttcttcggttcagtac

SEQ ID NO: 1414133 - DNA, 25 bp, Homo sapien
caaaagcttatacgccatcatgagg

SEQ ID NO: 1414134 - DNA, 25 bp, Homo sapien
tgaattgcgcacgtgaatcactatc

SEQ ID NO: 1414135 - DNA, 25 bp, Homo sapien
tcccaatggccggaaacttgtggaa

SEQ ID NO: 1414136 - DNA, 25 bp, Homo sapien
taatgtattgttcccgatgagcctc

SEQ ID NO: 1414137 - DNA, 25 bp, Homo sapien
cttgctctaaggcattgaaacggca

SEQ ID NO: 1414138 - DNA, 25 bp, Homo sapien
tactagctcctgtcgtaaaaatagg

SEQ ID NO: 1414139 - DNA, 25 bp, Homo sapien
gacaagagccaattcacaaatccag

SEQ ID NO: 1414140 - DNA, 25 bp, Homo sapien
cactgggacctgagagtttctttga

SEQ ID NO: 1414141 - DNA, 25 bp, Homo sapien
ccagattgtctagtcacatggagca

SEQ ID NO: 1414142 - DNA, 25 bp, Homo sapien
tgtatgtgcatatcaaaccatgttg

SEQ ID NO: 1414143 - DNA, 25 bp, Homo sapien
tactttattaagctgtcctcaggcc

SEQ ID NO: 1414144 - DNA, 25 bp, Homo sapien
aagggtacacgctttcagttacaag

SEQ ID NO: 1414145 - DNA, 25 bp, Homo sapien
gaatgtccaatcactctaggagtcc

SEQ ID NO: 1414146 - DNA, 25 bp, Homo sapien
ggcctagacaataaggaaccattca

SEQ ID NO: 1414147 - DNA, 25 bp, Homo sapien
ggtccattgtaagctagagaagtaa

SEQ ID NO: 1414148 - DNA, 25 bp, Homo sapien
caaattcacagagccatgaatcacc

SEQ ID NO: 1414149 - DNA, 25 bp, Homo sapien
gaatgcagacaaggtgttttccagt

SEQ ID NO: 1414150 - DNA, 25 bp, Homo sapien
actcaattctgttagggatttccaa

SEQ ID NO: 1414151 - DNA, 25 bp, Homo sapien
cgcacttagtatatcctccacagaa

SEQ ID NO: 1414152 - DNA, 25 bp, Homo sapien
taggatagggcaaagtcgcacttag

SEQ ID NO: 1414153 - DNA, 25 bp, Homo sapien
tattggcatgtgacccttgactgat

SEQ ID NO: 1414154 - DNA, 25 bp, Homo sapien
gctctgccttgagataagaaccagg

SEQ ID NO: 1414155 - DNA, 25 bp, Homo sapien
tgttgtacaaaggagcctaggaacc

SEQ ID NO: 1414156 - DNA, 25 bp, Homo sapien
ggtctgttaatgcacctggctgaac

SEQ ID NO: 1414157 - DNA, 25 bp, Homo sapien
tggctgaacaggaggtacaagagta

SEQ ID NO: 1414158 - DNA, 25 bp, Homo sapien
gcatacagctaagactacacaacac

SEQ ID NO: 1414159 - DNA, 25 bp, Homo sapien
gcaccacaggcacatctcaaaaggg

SEQ ID NO: 1414160 - DNA, 25 bp, Homo sapien
aagggtgatggcctaagccaccagc

SEQ ID NO: 1414161 - DNA, 25 bp, Homo sapien
tcaaaagggtctgtccagtagttcc

SEQ ID NO: 1414162 - DNA, 25 bp, Homo sapien
actgcgcccagcctccagttttctt

SEQ ID NO: 1414163 - DNA, 25 bp, Homo sapien
tgcgcccagcctccagttttctttt

SEQ ID NO: 1414164 - DNA, 25 bp, Homo sapien
cgcccagcctccagttttcttttct

SEQ ID NO: 1414165 - DNA, 25 bp, Homo sapien
gcgcccagcctccagttttcttttc

SEQ ID NO: 1414166 - DNA, 25 bp, Homo sapien
tggccctggtcgtcagtacacaagg

SEQ ID NO: 1414167 - DNA, 25 bp, Homo sapien
caaacaaccatttcagccgctctag

SEQ ID NO: 1414168 - DNA, 25 bp, Homo sapien
cagcttgtattcaggaggacagggc

SEQ ID NO: 1414169 - DNA, 25 bp, Homo sapien
taattcccgctctagaacagctggc

SEQ ID NO: 1414170 - DNA, 25 bp, Homo sapien
tattaaaaacacatccgaagaagta

SEQ ID NO: 1414171 - DNA, 25 bp, Homo sapien
atttttgctgtctacttagaaggga

SEQ ID NO: 1414172 - DNA, 25 bp, Homo sapien
aagtcaatggcatacccaggattcc

SEQ ID NO: 1414173 - DNA, 25 bp, Homo sapien
ccctgtggggtgtagaagacaaata

SEQ ID NO: 1414174 - DNA, 25 bp, Homo sapien
atgataggcggtgagccgaccaggc

SEQ ID NO: 1414175 - DNA, 25 bp, Homo sapien
ccggtagcacctgagtaaggcaaat

SEQ ID NO: 1414176 - DNA, 25 bp, Homo sapien
taaggcaaatgcagatgataggcgg

SEQ ID NO: 1414177 - DNA, 25 bp, Homo sapien
ggccagagtccggtagcacctgagt

SEQ ID NO: 1414178 - DNA, 25 bp, Homo sapien
caggaatgacgaggtctgtttgaat

SEQ ID NO: 1414179 - DNA, 25 bp, Homo sapien
ccaggaatgacgaggtctgtttgaa

SEQ ID NO: 1414180 - DNA, 25 bp, Homo sapien
caccaggaatgacgaggtctgtttg

SEQ ID NO: 1414181 - DNA, 25 bp, Homo sapien
cacaccaggaatgacgaggtctgtt

SEQ ID NO: 1414182 - DNA, 25 bp, Homo sapien
ccctgcccaggggaggcatactcac

SEQ ID NO: 1414183 - DNA, 25 bp, Homo sapien
gtaaatcaccttcttactcgaagtc

SEQ ID NO: 1414184 - DNA, 25 bp, Homo sapien
ggctgtaaatcaccttcttactcga

SEQ ID NO: 1414185 - DNA, 25 bp, Homo sapien
taggctggctgtaaatcaccttctt

SEQ ID NO: 1414186 - DNA, 25 bp, Homo sapien
gggcactaggctggctgtaaatcac

SEQ ID NO: 1414187 - DNA, 25 bp, Homo sapien
cagggtcagtactcagatgacaccc

SEQ ID NO: 1414188 - DNA, 25 bp, Homo sapien
ccagctcttggtgttagatgggtga

SEQ ID NO: 1414189 - DNA, 25 bp, Homo sapien
ggcagtacaaaggagagcctctggg

SEQ ID NO: 1414190 - DNA, 25 bp, Homo sapien
agcacagtatcagggtcagtactca

SEQ ID NO: 1414191 - DNA, 25 bp, Homo sapien
tgtcaaagtggcctcggctataggc

SEQ ID NO: 1414192 - DNA, 25 bp, Homo sapien
cggctataggcaaaccagatgccaa

SEQ ID NO: 1414193 - DNA, 25 bp, Homo sapien
ttacaaggacggctgccacgatgac

SEQ ID NO: 1414194 - DNA, 25 bp, Homo sapien
ccaagattcccaggagaatcagggt

SEQ ID NO: 1414195 - DNA, 25 bp, Homo sapien
gcttccatgcgcacagcatttgaag

SEQ ID NO: 1414196 - DNA, 25 bp, Homo sapien
tatcagaggctgacaggggatcaaa

SEQ ID NO: 1414197 - DNA, 25 bp, Homo sapien
tgggtgtcccatacccattccgtgc

SEQ ID NO: 1414198 - DNA, 25 bp, Homo sapien
gcatttgaagtcatgggtgtcccat

SEQ ID NO: 1414199 - DNA, 25 bp, Homo sapien
gcttttgggattcgtaggcatcact

SEQ ID NO: 1414200 - DNA, 25 bp, Homo sapien
agcactgcccggttcccaatggtgg

SEQ ID NO: 1414201 - DNA, 25 bp, Homo sapien
tgaaccaggtgtattcagaaggtgg

SEQ ID NO: 1414202 - DNA, 25 bp, Homo sapien
cttgttctgagcatgtcagcactgc

SEQ ID NO: 1414203 - DNA, 25 bp, Homo sapien
agctgttgccgccttcctcagagac

SEQ ID NO: 1414204 - DNA, 25 bp, Homo sapien
tgaccttgacctccccatagctgtt

SEQ ID NO: 1414205 - DNA, 25 bp, Homo sapien
aaggtgataccagttggcaagaagg

SEQ ID NO: 1414206 - DNA, 25 bp, Homo sapien
tcccgtgtcacggacttgaaggtga

SEQ ID NO: 1414207 - DNA, 25 bp, Homo sapien
agcaaacgagtctggtggtgtctcc

SEQ ID NO: 1414208 - DNA, 25 bp, Homo sapien
attatagcaaacgagtctggtggtg

SEQ ID NO: 1414209 - DNA, 25 bp, Homo sapien
tgtctccttggtcaaacttccactc

SEQ ID NO: 1414210 - DNA, 25 bp, Homo sapien
ggtgtctccttggtcaaacttccac

SEQ ID NO: 1414211 - DNA, 25 bp, Homo sapien
gcccgagtaggcacaggacaacttc

SEQ ID NO: 1414212 - DNA, 25 bp, Homo sapien
agcccgagtaggcacaggacaactt

SEQ ID NO: 1414213 - DNA, 25 bp, Homo sapien
aaagcccgagtaggcacaggacaac

SEQ ID NO: 1414214 - DNA, 25 bp, Homo sapien
aaaagcccgagtaggcacaggacaa

SEQ ID NO: 1414215 - DNA, 25 bp, Homo sapien
ctgcagacagggtcaaaatgagccg

SEQ ID NO: 1414216 - DNA, 25 bp, Homo sapien
tgcagacagggtcaaaatgagccga

SEQ ID NO: 1414217 - DNA, 25 bp, Homo sapien
agacagggtcaaaatgagccgaagg

SEQ ID NO: 1414218 - DNA, 25 bp, Homo sapien
gcagacagggtcaaaatgagccgaa

SEQ ID NO: 1414219 - DNA, 25 bp, Homo sapien
gtgcactgtaacactgcccaatgcc

SEQ ID NO: 1414220 - DNA, 25 bp, Homo sapien
tcagaagagtgcactgtaacactgc

SEQ ID NO: 1414221 - DNA, 25 bp, Homo sapien
gaagagtgcactgtaacactgccca

SEQ ID NO: 1414222 - DNA, 25 bp, Homo sapien
caggttcagaagagtgcactgtaac

SEQ ID NO: 1414223 - DNA, 25 bp, Homo sapien
cacttacacaattattctcatccat

SEQ ID NO: 1414224 - DNA, 25 bp, Homo sapien
tgcacttacacaattattctcatcc

SEQ ID NO: 1414225 - DNA, 25 bp, Homo sapien
gcacttacacaattattctcatcca

SEQ ID NO: 1414226 - DNA, 25 bp, Homo sapien
ctgcacttacacaattattctcatc

SEQ ID NO: 1414227 - DNA, 25 bp, Homo sapien
ccccagttgccagggagctggagcc

SEQ ID NO: 1414228 - DNA, 25 bp, Homo sapien
accccccagttgccagggagctgga

SEQ ID NO: 1414229 - DNA, 25 bp, Homo sapien
aagaccccccagttgccagggagct

SEQ ID NO: 1414230 - DNA, 25 bp, Homo sapien
cccccagttgccagggagctggagc

SEQ ID NO: 1414231 - DNA, 25 bp, Homo sapien
tgaagtaactcccataagggttggc

SEQ ID NO: 1414232 - DNA, 25 bp, Homo sapien
aggatcgccaatatgaagaggcaca

SEQ ID NO: 1414233 - DNA, 25 bp, Homo sapien
gtttcctctcgacttgcgcctttgt

SEQ ID NO: 1414234 - DNA, 25 bp, Homo sapien
ggatcgccaatatgaagaggcacaa

SEQ ID NO: 1414235 - DNA, 25 bp, Homo sapien
gaggcacaacagtttcctctcgact

SEQ ID NO: 1414236 - DNA, 25 bp, Homo sapien
tcccgacacaacagccgccgaagga

SEQ ID NO: 1414237 - DNA, 25 bp, Homo sapien
cgcgatcaggctcccgacacaacag

SEQ ID NO: 1414238 - DNA, 25 bp, Homo sapien
aggctcccgacacaacagccgccga

SEQ ID NO: 1414239 - DNA, 25 bp, Homo sapien
ggctcccgacacaacagccgccgaa

SEQ ID NO: 1414240 - DNA, 25 bp, Homo sapien
gctccgcgactacagcgaggggact

SEQ ID NO: 1414241 - DNA, 25 bp, Homo sapien
acacagctccgcgactacagcgagg

SEQ ID NO: 1414242 - DNA, 25 bp, Homo sapien
tccgcgactacagcgaggggactga

SEQ ID NO: 1414243 - DNA, 25 bp, Homo sapien
gaacagacacagctccgcgactaca

SEQ ID NO: 1414244 - DNA, 25 bp, Homo sapien
gctgggttctcagttggagctagag

SEQ ID NO: 1414245 - DNA, 25 bp, Homo sapien
tgttcccgaagtagcgacttcctga

SEQ ID NO: 1414246 - DNA, 25 bp, Homo sapien
cgaagtagcgacttcctgactggct

SEQ ID NO: 1414247 - DNA, 25 bp, Homo sapien
ccctgattggttggtgttcccgaag

SEQ ID NO: 1414248 - DNA, 25 bp, Homo sapien
agaaatggaatgttactttggcacc

SEQ ID NO: 1414249 - DNA, 25 bp, Homo sapien
aacaaatattaatatgggagggtag

SEQ ID NO: 1414250 - DNA, 25 bp, Homo sapien
caaatattaatatgggagggtaggg

SEQ ID NO: 1414251 - DNA, 25 bp, Homo sapien
tggaatgttactttggcaccacctc

SEQ ID NO: 1414252 - DNA, 25 bp, Homo sapien
ctggaaaatgggagcctgggcagta

SEQ ID NO: 1414253 - DNA, 25 bp, Homo sapien
actcaactggaaaatgggagcctgg

SEQ ID NO: 1414254 - DNA, 25 bp, Homo sapien
aaaagggaaagggagcactcaactg

SEQ ID NO: 1414255 - DNA, 25 bp, Homo sapien
gggaaagggagcactcaactggaaa

SEQ ID NO: 1414256 - DNA, 25 bp, Homo sapien
aatagttgtgtgctgactaagccac

SEQ ID NO: 1414257 - DNA, 25 bp, Homo sapien
gaacatgctctagaaacatctctgg

SEQ ID NO: 1414258 - DNA, 25 bp, Homo sapien
tctctgggtgactggatatgtcctt

SEQ ID NO: 1414259 - DNA, 25 bp, Homo sapien
catatttgatctgtgaacaggtccc

SEQ ID NO: 1414260 - DNA, 25 bp, Homo sapien
agcctgctgggcatcaagagcgaaa

SEQ ID NO: 1414261 - DNA, 25 bp, Homo sapien
tagtatagcgtatgggttacaaaac

SEQ ID NO: 1414262 - DNA, 25 bp, Homo sapien
tgtatatccattcacgttgttttaa

SEQ ID NO: 1414263 - DNA, 25 bp, Homo sapien
tccattcacgttgttttaattacta

SEQ ID NO: 1414264 - DNA, 25 bp, Homo sapien
gaaatttatcttagtatagcgtatg

SEQ ID NO: 1414265 - DNA, 25 bp, Homo sapien
gagcgtctctgacaggccgccctga

SEQ ID NO: 1414266 - DNA, 25 bp, Homo sapien
ccgccgccccttctgagatgtgaag

SEQ ID NO: 1414267 - DNA, 25 bp, Homo sapien
gccgccccttctgagatgtgaagaa

SEQ ID NO: 1414268 - DNA, 25 bp, Homo sapien
tctgacaggccgccctgagaagtga

SEQ ID NO: 1414269 - DNA, 25 bp, Homo sapien
ccagggataaagagggacacagtga

SEQ ID NO: 1414270 - DNA, 25 bp, Homo sapien
gagagatagacttgggccaggttca

SEQ ID NO: 1414271 - DNA, 25 bp, Homo sapien
tacacctctgtaagtaactggtaga

SEQ ID NO: 1414272 - DNA, 25 bp, Homo sapien
tttgaaggtaggaagcatccccagg

SEQ ID NO: 1414273 - DNA, 25 bp, Homo sapien
cagccactggaagataaatttggaa

SEQ ID NO: 1414274 - DNA, 25 bp, Homo sapien
ggtgacaccagatctagactacaga

SEQ ID NO: 1414275 - DNA, 25 bp, Homo sapien
aagtgcttgagccactagacaacaa

SEQ ID NO: 1414276 - DNA, 25 bp, Homo sapien
caacaaggacctattataaattatc

SEQ ID NO: 1414277 - DNA, 25 bp, Homo sapien
tatttgatgcttttgtgtgcacaac

SEQ ID NO: 1414278 - DNA, 25 bp, Homo sapien
tgatgcttttgtgtgcacaacacta

SEQ ID NO: 1414279 - DNA, 25 bp, Homo sapien
tctttatttgatgcttttgtgtgca

SEQ ID NO: 1414280 - DNA, 25 bp, Homo sapien
tttgatgcttttgtgtgcacaacac

SEQ ID NO: 1414281 - DNA, 25 bp, Homo sapien
cagcccgttcacacccttagttaag

SEQ ID NO: 1414282 - DNA, 25 bp, Homo sapien
caagtcagcccgttcacacccttag

SEQ ID NO: 1414283 - DNA, 25 bp, Homo sapien
gtcagcccgttcacacccttagtta

SEQ ID NO: 1414284 - DNA, 25 bp, Homo sapien
aagtcagcccgttcacacccttagt

SEQ ID NO: 1414285 - DNA, 25 bp, Homo sapien
ataggctccagcgtagttgcgagcc

SEQ ID NO: 1414286 - DNA, 25 bp, Homo sapien
ctataggctccagcgtagttgcgag

SEQ ID NO: 1414287 - DNA, 25 bp, Homo sapien
tataggctccagcgtagttgcgagc

SEQ ID NO: 1414288 - DNA, 25 bp, Homo sapien
agaagcgtgagagactgacaggaat

SEQ ID NO: 1414289 - DNA, 25 bp, Homo sapien
caaagaagcgtgagagactgacagg

SEQ ID NO: 1414290 - DNA, 25 bp, Homo sapien
aggaatgacaggcagtccccatcac

SEQ ID NO: 1414291 - DNA, 25 bp, Homo sapien
tggagacaaagaagcgtgagagact

SEQ ID NO: 1414292 - DNA, 25 bp, Homo sapien
ccagtgtatccaagactccgggcca

SEQ ID NO: 1414293 - DNA, 25 bp, Homo sapien
cagtgtatccaagactccgggccag

SEQ ID NO: 1414294 - DNA, 25 bp, Homo sapien
cccgcttgcccatctgacagaagaa

SEQ ID NO: 1414295 - DNA, 25 bp, Homo sapien
cagaagaaaacgagatgctcatctt

SEQ ID NO: 1414296 - DNA, 25 bp, Homo sapien
ggatgggccagttccgatgccaaga

SEQ ID NO: 1414297 - DNA, 25 bp, Homo sapien
gaacggtctctattccaccacctgg

SEQ ID NO: 1414298 - DNA, 25 bp, Homo sapien
caatttggcactcaggttcggaagc

SEQ ID NO: 1414299 - DNA, 25 bp, Homo sapien
caagccactccctaagctgtgagga

SEQ ID NO: 1414300 - DNA, 25 bp, Homo sapien
gcacgtcgaagagccgggcccgtcc

SEQ ID NO: 1414301 - DNA, 25 bp, Homo sapien
ctgccgcctcctcgcgagagcgcac

SEQ ID NO: 1414302 - DNA, 25 bp, Homo sapien
tgttgagcgcccctgggatggtccc

SEQ ID NO: 1414303 - DNA, 25 bp, Homo sapien
tcgcgagagcgcacgtcgaagagcc

SEQ ID NO: 1414304 - DNA, 25 bp, Homo sapien
aacggagttcaggaagcgagaccgt

SEQ ID NO: 1414305 - DNA, 25 bp, Homo sapien
tgaacggagttcaggaagcgagacc

SEQ ID NO: 1414306 - DNA, 25 bp, Homo sapien
gagtgaacggagttcaggaagcgag

SEQ ID NO: 1414307 - DNA, 25 bp, Homo sapien
taggagtgaacggagttcaggaagc

SEQ ID NO: 1414308 - DNA, 25 bp, Homo sapien
cccagaggaccaagagaaccgcggc

SEQ ID NO: 1414309 - DNA, 25 bp, Homo sapien
gtcacggccgccatggcatcccctc

SEQ ID NO: 1414310 - DNA, 25 bp, Homo sapien
tcccggtagggtgtgcacgaagacc

SEQ ID NO: 1414311 - DNA, 25 bp, Homo sapien
gcccctcccggtagggtgtgcacga

SEQ ID NO: 1414312 - DNA, 25 bp, Homo sapien
tcggcgcctgcaacatctcccgttc

SEQ ID NO: 1414313 - DNA, 25 bp, Homo sapien
ctccagccatggtgcgcgtagcaac

SEQ ID NO: 1414314 - DNA, 25 bp, Homo sapien
tggtgcgcgtagcaaccgcgagtct

SEQ ID NO: 1414315 - DNA, 25 bp, Homo sapien
aaccgcgagtctccggagtgcggcc

SEQ ID NO: 1414316 - DNA, 25 bp, Homo sapien
cacatgcattgtgcgagaggagcac

SEQ ID NO: 1414317 - DNA, 25 bp, Homo sapien
tgtcagtgcacgtccacattgtgtg

SEQ ID NO: 1414318 - DNA, 25 bp, Homo sapien
cacagggcctcagttcaaggacaca

SEQ ID NO: 1414319 - DNA, 25 bp, Homo sapien
caagccccagagtttagtgtgtcca

SEQ ID NO: 1414320 - DNA, 25 bp, Homo sapien
tggtgccgcaactgagctcgaagca

SEQ ID NO: 1414321 - DNA, 25 bp, Homo sapien
tgatgacgacctctaatccgtggtg

SEQ ID NO: 1414322 - DNA, 25 bp, Homo sapien
tgtcattcttgatgacgacctctaa

SEQ ID NO: 1414323 - DNA, 25 bp, Homo sapien
gagctcgaagcagcagattcttgtt

SEQ ID NO: 1414324 - DNA, 25 bp, Homo sapien
caaagtagagggtgtcaaactgggt

SEQ ID NO: 1414325 - DNA, 25 bp, Homo sapien
aactgggtcagtggctagcagaact

SEQ ID NO: 1414326 - DNA, 25 bp, Homo sapien
caagcccctgaatgtattcagacat

SEQ ID NO: 1414327 - DNA, 25 bp, Homo sapien
cctgaatgtattcagacatccactg

SEQ ID NO: 1414328 - DNA, 25 bp, Homo sapien
gttgtcgaagcacgtcattgtccag

SEQ ID NO: 1414329 - DNA, 25 bp, Homo sapien
cctgcagttcttcagacaagcggtg

SEQ ID NO: 1414330 - DNA, 25 bp, Homo sapien
ggtggttactctgccgaagctcctg

SEQ ID NO: 1414331 - DNA, 25 bp, Homo sapien
ccagctgcagttggtcaagtccctg

SEQ ID NO: 1414332 - DNA, 25 bp, Homo sapien
gataagactactgtcatgtgtgccc

SEQ ID NO: 1414333 - DNA, 25 bp, Homo sapien
ggatttcagatacccagcttgcttt

SEQ ID NO: 1414334 - DNA, 25 bp, Homo sapien
gtggtataatatctcccagggatac

SEQ ID NO: 1414335 - DNA, 25 bp, Homo sapien
ggaacctcagggagagataagacta

SEQ ID NO: 1414336 - DNA, 25 bp, Homo sapien
ttgatcttgtctcggcggcgacgct

SEQ ID NO: 1414337 - DNA, 25 bp, Homo sapien
ttggtgctctccatagagcagtctg

SEQ ID NO: 1414338 - DNA, 25 bp, Homo sapien
ctctccatagagcagtctgggatta

SEQ ID NO: 1414339 - DNA, 25 bp, Homo sapien
ggagagctgcacgatccagttgttg

SEQ ID NO: 1414340 - DNA, 25 bp, Homo sapien
cctgcgtttctcatcccgagtcgtc

SEQ ID NO: 1414341 - DNA, 25 bp, Homo sapien
cgtttctcatcccgagtcgtccggg

SEQ ID NO: 1414342 - DNA, 25 bp, Homo sapien
gccctgcgtttctcatcccgagtcg

SEQ ID NO: 1414343 - DNA, 25 bp, Homo sapien
tgcgtttctcatcccgagtcgtccg

SEQ ID NO: 1414344 - DNA, 25 bp, Homo sapien
tcctccctgcagtacttcttgtggt

SEQ ID NO: 1414345 - DNA, 25 bp, Homo sapien
ctaggggcaattgagcgctggcttc

SEQ ID NO: 1414346 - DNA, 25 bp, Homo sapien
tgagtcctaggggcaattgagcgct

SEQ ID NO: 1414347 - DNA, 25 bp, Homo sapien
ttcctccctgcagtacttcttgtgg

SEQ ID NO: 1414348 - DNA, 25 bp, Homo sapien
tcaggacatgggtaggaacctcacc

SEQ ID NO: 1414349 - DNA, 25 bp, Homo sapien
ctaagagtcatgagtgaaggctcac

SEQ ID NO: 1414350 - DNA, 25 bp, Homo sapien
aaggctcactgcctaccagtcatgt

SEQ ID NO: 1414351 - DNA, 25 bp, Homo sapien
tgcctgtccaggtcttaatgatcac

SEQ ID NO: 1414352 - DNA, 25 bp, Homo sapien
gggaagtaagtatagtgcgtctcag

SEQ ID NO: 1414353 - DNA, 25 bp, Homo sapien
cactgccgtgctggggaagtaagta

SEQ ID NO: 1414354 - DNA, 25 bp, Homo sapien
taagtatagtgcgtctcagcagctg

SEQ ID NO: 1414355 - DNA, 25 bp, Homo sapien
gcagctgtcccctccgtgtcaactg

SEQ ID NO: 1414356 - DNA, 25 bp, Homo sapien
agtggcagggtagccactgatggcg

SEQ ID NO: 1414357 - DNA, 25 bp, Homo sapien
ggtagccactgatggcgccagttcc

SEQ ID NO: 1414358 - DNA, 25 bp, Homo sapien
ctgggtcatggattgagtggcaggg

SEQ ID NO: 1414359 - DNA, 25 bp, Homo sapien
cagggtagccactgatggcgccagt

SEQ ID NO: 1414360 - DNA, 25 bp, Homo sapien
gcccccattctcagttcggaagacg

SEQ ID NO: 1414361 - DNA, 25 bp, Homo sapien
ccccattctcagttcggaagacgta

SEQ ID NO: 1414362 - DNA, 25 bp, Homo sapien
ctggcccccattctcagttcggaag

SEQ ID NO: 1414363 - DNA, 25 bp, Homo sapien
cccattctcagttcggaagacgtac

SEQ ID NO: 1414364 - DNA, 25 bp, Homo sapien
ttgggtcttccccagtagccactgc

SEQ ID NO: 1414365 - DNA, 25 bp, Homo sapien
acactggttgggtcttccccagtag

SEQ ID NO: 1414366 - DNA, 25 bp, Homo sapien
cacactggttgggtcttccccagta

SEQ ID NO: 1414367 - DNA, 25 bp, Homo sapien
tggttgggtcttccccagtagccac

SEQ ID NO: 1414368 - DNA, 25 bp, Homo sapien
tgcactgtcccctcttccgtttcag

SEQ ID NO: 1414369 - DNA, 25 bp, Homo sapien
actgtcccctcttccgtttcagctg

SEQ ID NO: 1414370 - DNA, 25 bp, Homo sapien
tctgcactgtcccctcttccgtttc

SEQ ID NO: 1414371 - DNA, 25 bp, Homo sapien
ctgtcccctcttccgtttcagctgt

SEQ ID NO: 1414372 - DNA, 25 bp, Homo sapien
gtcaatgagaagctcactggcccag

SEQ ID NO: 1414373 - DNA, 25 bp, Homo sapien
agctcactggcccagtaacatatgg

SEQ ID NO: 1414374 - DNA, 25 bp, Homo sapien
actggcccagtaacatatggctgca

SEQ ID NO: 1414375 - DNA, 25 bp, Homo sapien
gaagtcaatgagaagctcactggcc

SEQ ID NO: 1414376 - DNA, 25 bp, Homo sapien
gggggcacatccgaggaactggtcc

SEQ ID NO: 1414377 - DNA, 25 bp, Homo sapien
ctttgtatctcctgattcacaggcc

SEQ ID NO: 1414378 - DNA, 25 bp, Homo sapien
gcacatccgaggaactggtcctttt

SEQ ID NO: 1414379 - DNA, 25 bp, Homo sapien
gagggggcacatccgaggaactggt

SEQ ID NO: 1414380 - DNA, 25 bp, Homo sapien
tggaaattctctacccataaggtcc

SEQ ID NO: 1414381 - DNA, 25 bp, Homo sapien
cacagtacaaagcaataagataatc

SEQ ID NO: 1414382 - DNA, 25 bp, Homo sapien
gatttttggaaattctctacccata

SEQ ID NO: 1414383 - DNA, 25 bp, Homo sapien
ataagataatcccaacacaaaaggg

SEQ ID NO: 1414384 - DNA, 25 bp, Homo sapien
ggataagcctcggaaagaccgcgtc

SEQ ID NO: 1414385 - DNA, 25 bp, Homo sapien
gaccgcgtccgaggaaaatgttgaa

SEQ ID NO: 1414386 - DNA, 25 bp, Homo sapien
aagaccgcgtccgaggaaaatgttg

SEQ ID NO: 1414387 - DNA, 25 bp, Homo sapien
taagcctcggaaagaccgcgtccga

SEQ ID NO: 1414388 - DNA, 25 bp, Homo sapien
gcactagtgttttgggaccacctac

SEQ ID NO: 1414389 - DNA, 25 bp, Homo sapien
gcaaggagatcccagtcgataaggg

SEQ ID NO: 1414390 - DNA, 25 bp, Homo sapien
gacgaagtaacgctgcaaggagatc

SEQ ID NO: 1414391 - DNA, 25 bp, Homo sapien
gaagtagcactagtgttttgggacc

SEQ ID NO: 1414392 - DNA, 25 bp, Homo sapien
aggaaatgccctgcgaagcttgccg

SEQ ID NO: 1414393 - DNA, 25 bp, Homo sapien
tgccctgcgaagcttgccgcgctga

SEQ ID NO: 1414394 - DNA, 25 bp, Homo sapien
agaggaaatgccctgcgaagcttgc

SEQ ID NO: 1414395 - DNA, 25 bp, Homo sapien
gaaatgccctgcgaagcttgccgcg

SEQ ID NO: 1414396 - DNA, 25 bp, Homo sapien
aaggcaatgaaatagagggcccggc

SEQ ID NO: 1414397 - DNA, 25 bp, Homo sapien
ggaggcatctctattggccacagct

SEQ ID NO: 1414398 - DNA, 25 bp, Homo sapien
gcaatgaaatagagggcccggcaca

SEQ ID NO: 1414399 - DNA, 25 bp, Homo sapien
ggcatctctattggccacagctgtc

SEQ ID NO: 1414400 - DNA, 25 bp, Homo sapien
ttacggagctgagcgcccgccaggc

SEQ ID NO: 1414401 - DNA, 25 bp, Homo sapien
ctgcaggctcaccaaccagaaggcg

SEQ ID NO: 1414402 - DNA, 25 bp, Homo sapien
gccttagaatgaggcgtctccctgc

SEQ ID NO: 1414403 - DNA, 25 bp, Homo sapien
cttgccttagaatgaggcgtctccc

SEQ ID NO: 1414404 - DNA, 25 bp, Homo sapien
ggccgtctcagctgccgattttctc

SEQ ID NO: 1414405 - DNA, 25 bp, Homo sapien
ggcctaggtatctccatagacagct

SEQ ID NO: 1414406 - DNA, 25 bp, Homo sapien
tctcccggcctaggtatctccatag

SEQ ID NO: 1414407 - DNA, 25 bp, Homo sapien
ggccaaggccgtctcagctgccgat

SEQ ID NO: 1414408 - DNA, 25 bp, Homo sapien
caccatgaacctagctctagtttct

SEQ ID NO: 1414409 - DNA, 25 bp, Homo sapien
tacagcttttattctgagacattga

SEQ ID NO: 1414410 - DNA, 25 bp, Homo sapien
atacagcttttattctgagacattg

SEQ ID NO: 1414411 - DNA, 25 bp, Homo sapien
cttcactagagtgggacctgtggcc

SEQ ID NO: 1414412 - DNA, 25 bp, Homo sapien
ttcactagagtgggacctgtggccc

SEQ ID NO: 1414413 - DNA, 25 bp, Homo sapien
ccttcactagagtgggacctgtggc

SEQ ID NO: 1414414 - DNA, 25 bp, Homo sapien
gtacaggacctctcttgcacatggt

SEQ ID NO: 1414415 - DNA, 25 bp, Homo sapien
ccagggcctgagtgacaccatttcc

SEQ ID NO: 1414416 - DNA, 25 bp, Homo sapien
agagagatctgtacaggacctctct

SEQ ID NO: 1414417 - DNA, 25 bp, Homo sapien
gcctgagtgacaccatttccctttc

SEQ ID NO: 1414418 - DNA, 25 bp, Homo sapien
gacaggaggtatcttagggtccaag

SEQ ID NO: 1414419 - DNA, 25 bp, Homo sapien
caggaatgggcaactctagaagtgt

SEQ ID NO: 1414420 - DNA, 25 bp, Homo sapien
gagagattcacagctcagaggaagg

SEQ ID NO: 1414421 - DNA, 25 bp, Homo sapien
tgtggaaggccctaacctggccctg

SEQ ID NO: 1414422 - DNA, 25 bp, Homo sapien
acccactccctgggaacaagatctt

SEQ ID NO: 1414423 - DNA, 25 bp, Homo sapien
gacccactccctgggaacaagatct

SEQ ID NO: 1414424 - DNA, 25 bp, Homo sapien
agttcaggtaaaccaaccaaggcag

SEQ ID NO: 1414425 - DNA, 25 bp, Homo sapien
gctagtcaggaaccctggagattca

SEQ ID NO: 1414426 - DNA, 25 bp, Homo sapien
gctggagggccaaagcctatagagt

SEQ ID NO: 1414427 - DNA, 25 bp, Homo sapien
gagttgggcactacagctgctcatg

SEQ ID NO: 1414428 - DNA, 25 bp, Homo sapien
ccagggttagcctgtgtttcaaatg

SEQ ID NO: 1414429 - DNA, 25 bp, Homo sapien
agggttagcctgtgtttcaaatgca

SEQ ID NO: 1414430 - DNA, 25 bp, Homo sapien
cagggttagcctgtgtttcaaatgc

SEQ ID NO: 1414431 - DNA, 25 bp, Homo sapien
gcgctgagaggacaacagggggtca

SEQ ID NO: 1414432 - DNA, 25 bp, Homo sapien
tgagaggacaacagggggtcaggaa

SEQ ID NO: 1414433 - DNA, 25 bp, Homo sapien
aggacaacagggggtcaggaacctg

SEQ ID NO: 1414434 - DNA, 25 bp, Homo sapien
ctgcgctgagaggacaacagggggt

SEQ ID NO: 1414435 - DNA, 25 bp, Homo sapien
agacgactccgggatccagaccctt

SEQ ID NO: 1414436 - DNA, 25 bp, Homo sapien
taagacgactccgggatccagaccc

SEQ ID NO: 1414437 - DNA, 25 bp, Homo sapien
tctgcaccttcagatgggagctcca

SEQ ID NO: 1414438 - DNA, 25 bp, Homo sapien
cttctgcaccttcagatgggagctc

SEQ ID NO: 1414439 - DNA, 25 bp, Homo sapien
atcatgctacaaggggaggttctgg

SEQ ID NO: 1414440 - DNA, 25 bp, Homo sapien
gttctggggatgaggcagtaatccc

SEQ ID NO: 1414441 - DNA, 25 bp, Homo sapien
ctggggatgaggcagtaatccccac

SEQ ID NO: 1414442 - DNA, 25 bp, Homo sapien
cagagatcatgctacaaggggaggt

SEQ ID NO: 1414443 - DNA, 25 bp, Homo sapien
tcctccaagaggatcgagaagctcg

SEQ ID NO: 1414444 - DNA, 25 bp, Homo sapien
tcagtacaggtctgggttcgccgaa

SEQ ID NO: 1414445 - DNA, 25 bp, Homo sapien
cctgttggacctgaaccagagtgga

SEQ ID NO: 1414446 - DNA, 25 bp, Homo sapien
gaatcttgctacacattgcactggg

SEQ ID NO: 1414447 - DNA, 25 bp, Homo sapien
gagaacaggggcatagacagccgtc

SEQ ID NO: 1414448 - DNA, 25 bp, Homo sapien
caggggcatagacagccgtctggac

SEQ ID NO: 1414449 - DNA, 25 bp, Homo sapien
catagacagccgtctggactgggct

SEQ ID NO: 1414450 - DNA, 25 bp, Homo sapien
gccaagagaacaggggcatagacag

SEQ ID NO: 1414451 - DNA, 25 bp, Homo sapien
ttcttgcttcatggtaccccttctc

SEQ ID NO: 1414452 - DNA, 25 bp, Homo sapien
gggacgctacacctgaaccttcaga

SEQ ID NO: 1414453 - DNA, 25 bp, Homo sapien
ggattgccctctttggcacagtcaa

SEQ ID NO: 1414454 - DNA, 25 bp, Homo sapien
gcctcttgtttctgtacaacttccc

SEQ ID NO: 1414455 - DNA, 25 bp, Homo sapien
catactgtcagccttcttctgacct

SEQ ID NO: 1414456 - DNA, 25 bp, Homo sapien
ctcccttctctcaatctgacttttg

SEQ ID NO: 1414457 - DNA, 25 bp, Homo sapien
cctcccctctatcctcactggcctt

SEQ ID NO: 1414458 - DNA, 25 bp, Homo sapien
tcccttctctcaatctgacttttgt

SEQ ID NO: 1414459 - DNA, 25 bp, Homo sapien
ccccaacttcccagcatgcctgctc

SEQ ID NO: 1414460 - DNA, 25 bp, Homo sapien
ccctgatgtctagcctgcctccagg

SEQ ID NO: 1414461 - DNA, 25 bp, Homo sapien
ctcttccctgatgtctagcctgcct

SEQ ID NO: 1414462 - DNA, 25 bp, Homo sapien
caacttcccagcatgcctgctcttc

SEQ ID NO: 1414463 - DNA, 25 bp, Homo sapien
aagacaaactgtgcctcatccagag

SEQ ID NO: 1414464 - DNA, 25 bp, Homo sapien
agctgggggccaagacaaactgtgc

SEQ ID NO: 1414465 - DNA, 25 bp, Homo sapien
ggggacttaggtcatcataggcact

SEQ ID NO: 1414466 - DNA, 25 bp, Homo sapien
tccaggggtggctccacagagaact

SEQ ID NO: 1414467 - DNA, 25 bp, Homo sapien
cccaaacccagcacggctctcctta

SEQ ID NO: 1414468 - DNA, 25 bp, Homo sapien
cccccaaacccagcacggctctcct

SEQ ID NO: 1414469 - DNA, 25 bp, Homo sapien
ccccaaacccagcacggctctcctt

SEQ ID NO: 1414470 - DNA, 25 bp, Homo sapien
ccaaacccagcacggctctccttac

SEQ ID NO: 1414471 - DNA, 25 bp, Homo sapien
cctccaggtagcccatcccagggtc

SEQ ID NO: 1414472 - DNA, 25 bp, Homo sapien
aggtagcccatcccagggtcgtcct

SEQ ID NO: 1414473 - DNA, 25 bp, Homo sapien
gtagcccatcccagggtcgtcctcc

SEQ ID NO: 1414474 - DNA, 25 bp, Homo sapien
tccaggtagcccatcccagggtcgt

SEQ ID NO: 1414475 - DNA, 25 bp, Homo sapien
ggacttgaggctggacttgcttcca

SEQ ID NO: 1414476 - DNA, 25 bp, Homo sapien
agggcaggagccaagtcgtctgggc

SEQ ID NO: 1414477 - DNA, 25 bp, Homo sapien
gagccaagtcgtctgggcctgagtc

SEQ ID NO: 1414478 - DNA, 25 bp, Homo sapien
tgaggctggacttgcttccaacttt

SEQ ID NO: 1414479 - DNA, 25 bp, Homo sapien
caggcccctattcttgggtacatca

SEQ ID NO: 1414480 - DNA, 25 bp, Homo sapien
tctgaaggctgctagagatctcctc

SEQ ID NO: 1414481 - DNA, 25 bp, Homo sapien
tgtccttagtaatccctgctgtatg

SEQ ID NO: 1414482 - DNA, 25 bp, Homo sapien
acggcgcctggctggtacttaataa

SEQ ID NO: 1414483 - DNA, 25 bp, Homo sapien
agggcttggccggtgctgtagagca

SEQ ID NO: 1414484 - DNA, 25 bp, Homo sapien
gcactcaaggccacgggtgagcctg

SEQ ID NO: 1414485 - DNA, 25 bp, Homo sapien
ctggccaaggaaacgttagagatga

SEQ ID NO: 1414486 - DNA, 25 bp, Homo sapien
ttagagatgatgttcgggggcacac

SEQ ID NO: 1414487 - DNA, 25 bp, Homo sapien
gagtttgtgccacccagtgcttctg

SEQ ID NO: 1414488 - DNA, 25 bp, Homo sapien
ggtctgagatgtggacaccagcaca

SEQ ID NO: 1414489 - DNA, 25 bp, Homo sapien
gaatcgttctccaagctctcaggca

SEQ ID NO: 1414490 - DNA, 25 bp, Homo sapien
tggctgaccgcccagctcgtggtgt

SEQ ID NO: 1414491 - DNA, 25 bp, Homo sapien
atgcttttggctggccgcagtgtcc

SEQ ID NO: 1414492 - DNA, 25 bp, Homo sapien
catgcttttggctggccgcagtgtc

SEQ ID NO: 1414493 - DNA, 25 bp, Homo sapien
gcttttggctggccgcagtgtcccc

SEQ ID NO: 1414494 - DNA, 25 bp, Homo sapien
tgcttttggctggccgcagtgtccc

SEQ ID NO: 1414495 - DNA, 25 bp, Homo sapien
ctcagcagagctccccccatctccc

SEQ ID NO: 1414496 - DNA, 25 bp, Homo sapien
ggatgtgtgtagagccagggccttg

SEQ ID NO: 1414497 - DNA, 25 bp, Homo sapien
tgtgtgtagagccagggccttgtgc

SEQ ID NO: 1414498 - DNA, 25 bp, Homo sapien
gtgtgtagagccagggccttgtgca

SEQ ID NO: 1414499 - DNA, 25 bp, Homo sapien
gcttagtctcatggccagagcgacc

SEQ ID NO: 1414500 - DNA, 25 bp, Homo sapien
aattgaagatagacctccacttcct

SEQ ID NO: 1414501 - DNA, 25 bp, Homo sapien
gccagagcgacctaaattgaagata

SEQ ID NO: 1414502 - DNA, 25 bp, Homo sapien
ccgtggaagtttacgcttagtctca

SEQ ID NO: 1414503 - DNA, 25 bp, Homo sapien
gggtccatcgccagcctgcagtatg

SEQ ID NO: 1414504 - DNA, 25 bp, Homo sapien
gatagtatggtagggccgcatctgt

SEQ ID NO: 1414505 - DNA, 25 bp, Homo sapien
tgcagtatgctaggcaggtgataag

SEQ ID NO: 1414506 - DNA, 25 bp, Homo sapien
tgtgctctgcaatctcgatgatagt

SEQ ID NO: 1414507 - DNA, 25 bp, Homo sapien
ctgggagatccgagaacgttggcct

SEQ ID NO: 1414508 - DNA, 25 bp, Homo sapien
gaacagagccaagagagggacctca

SEQ ID NO: 1414509 - DNA, 25 bp, Homo sapien
tcacctcaaaagagtgccctcatgg

SEQ ID NO: 1414510 - DNA, 25 bp, Homo sapien
gccatgccctagactgacagcagaa

SEQ ID NO: 1414511 - DNA, 25 bp, Homo sapien
tgaggatgaactccacgacgatgga

SEQ ID NO: 1414512 - DNA, 25 bp, Homo sapien
caaagagctggtccacgtgtgtgag

SEQ ID NO: 1414513 - DNA, 25 bp, Homo sapien
ggattgtacccgcacctccatgaag

SEQ ID NO: 1414514 - DNA, 25 bp, Homo sapien
gaaggccgctgtcccattgaagcct

SEQ ID NO: 1414515 - DNA, 25 bp, Homo sapien
gagcatgcatgttggtctgggcact

SEQ ID NO: 1414516 - DNA, 25 bp, Homo sapien
caggttgcgagcatgcatgttggtc

SEQ ID NO: 1414517 - DNA, 25 bp, Homo sapien
aggccatgtgtaccaagtgcctcat

SEQ ID NO: 1414518 - DNA, 25 bp, Homo sapien
tgcgagcatgcatgttggtctgggc

SEQ ID NO: 1414519 - DNA, 25 bp, Homo sapien
ggacagggagttcccgaagcacctc

SEQ ID NO: 1414520 - DNA, 25 bp, Homo sapien
ggttccaattgcactcctacagcct

SEQ ID NO: 1414521 - DNA, 25 bp, Homo sapien
ggagttcccgaagcacctctaggat

SEQ ID NO: 1414522 - DNA, 25 bp, Homo sapien
aggatcttgaccaagcgctcaggtt

SEQ ID NO: 1414523 - DNA, 25 bp, Homo sapien
tactgggatacttcagtggcgccac

SEQ ID NO: 1414524 - DNA, 25 bp, Homo sapien
catcctccatccgtagagctctggt

SEQ ID NO: 1414525 - DNA, 25 bp, Homo sapien
ctccatccgtagagctctggtactg

SEQ ID NO: 1414526 - DNA, 25 bp, Homo sapien
gagctctggtactgggatacttcag

SEQ ID NO: 1414527 - DNA, 25 bp, Homo sapien
ggatccggcagttctctgaaatagg

SEQ ID NO: 1414528 - DNA, 25 bp, Homo sapien
cgcagtgaatgtcttggaggtaaac

SEQ ID NO: 1414529 - DNA, 25 bp, Homo sapien
tgaaataggccttgcacagggagga

SEQ ID NO: 1414530 - DNA, 25 bp, Homo sapien
agcaaacttgtcatagagccggtaa

SEQ ID NO: 1414531 - DNA, 25 bp, Homo sapien
cactccatactcctccacaaattct

SEQ ID NO: 1414532 - DNA, 25 bp, Homo sapien
gagacccctgagaggcggtagatcc

SEQ ID NO: 1414533 - DNA, 25 bp, Homo sapien
ccaccactccatactcctccacaaa

SEQ ID NO: 1414534 - DNA, 25 bp, Homo sapien
agacccctgagaggcggtagatccc

SEQ ID NO: 1414535 - DNA, 25 bp, Homo sapien
ggtcctaaaggtcctgggagctcac

SEQ ID NO: 1414536 - DNA, 25 bp, Homo sapien
gatctgggtggtcaaagactgcact

SEQ ID NO: 1414537 - DNA, 25 bp, Homo sapien
ggagaccacgacgagcaaagctcat

SEQ ID NO: 1414538 - DNA, 25 bp, Homo sapien
tacagtatctctgcttagtgggtcc

SEQ ID NO: 1414539 - DNA, 25 bp, Homo sapien
cccaaaaacccgctcctttgcgctg

SEQ ID NO: 1414540 - DNA, 25 bp, Homo sapien
tgctcctgcaagtcgcacccaaaaa

SEQ ID NO: 1414541 - DNA, 25 bp, Homo sapien
aaacccgctcctttgcgctgccctt

SEQ ID NO: 1414542 - DNA, 25 bp, Homo sapien
aggtgctcctgcaagtcgcacccaa

SEQ ID NO: 1414543 - DNA, 25 bp, Homo sapien
caagaaattgtgtcctgtgtctcgt

SEQ ID NO: 1414544 - DNA, 25 bp, Homo sapien
gctccttaacccacttcctgttaga

SEQ ID NO: 1414545 - DNA, 25 bp, Homo sapien
agggcactggcccggtcacctctat

SEQ ID NO: 1414546 - DNA, 25 bp, Homo sapien
gaagcagtgcagctccttaacccac

SEQ ID NO: 1414547 - DNA, 25 bp, Homo sapien
aagggtacactgctgcctatttcac

SEQ ID NO: 1414548 - DNA, 25 bp, Homo sapien
acctgtaaaaaagggtacactgctg

SEQ ID NO: 1414549 - DNA, 25 bp, Homo sapien
tagctgttgttgagtctccagtaca

SEQ ID NO: 1414550 - DNA, 25 bp, Homo sapien
tacactgctgcctatttcacatagc

SEQ ID NO: 1414551 - DNA, 25 bp, Homo sapien
cactttgcaaactaaggtactggcc

SEQ ID NO: 1414552 - DNA, 25 bp, Homo sapien
gactcagagcttacacagttcaagg

SEQ ID NO: 1414553 - DNA, 25 bp, Homo sapien
tacaggaaggatggtaccgagacag

SEQ ID NO: 1414554 - DNA, 25 bp, Homo sapien
tactggccatcctcgaaagggttct

SEQ ID NO: 1414555 - DNA, 25 bp, Homo sapien
gaagatgccttggaagtagcccctt

SEQ ID NO: 1414556 - DNA, 25 bp, Homo sapien
tgaattagtgatccaaaacccaggg

SEQ ID NO: 1414557 - DNA, 25 bp, Homo sapien
tccgaagtggtaggagacaggttcc

SEQ ID NO: 1414558 - DNA, 25 bp, Homo sapien
acattcgaagtcctaggctggctgg

SEQ ID NO: 1414559 - DNA, 25 bp, Homo sapien
tccctcaccgtggtcagcgtggagt

SEQ ID NO: 1414560 - DNA, 25 bp, Homo sapien
gcttggcccgtagggtcccattctc

SEQ ID NO: 1414561 - DNA, 25 bp, Homo sapien
ggtgtccccgcccattgatgtagat

SEQ ID NO: 1414562 - DNA, 25 bp, Homo sapien
gatgtagatgccattgcccgtgggc

SEQ ID NO: 1414563 - DNA, 25 bp, Homo sapien
ggatcagaggccaggcgtaagcagg

SEQ ID NO: 1414564 - DNA, 25 bp, Homo sapien
taacggttgcctcagaagcataggg

SEQ ID NO: 1414565 - DNA, 25 bp, Homo sapien
ggctgctgacgcaccatatctggga

SEQ ID NO: 1414566 - DNA, 25 bp, Homo sapien
caaagacgtagcagagatgcggtgc

SEQ ID NO: 1414567 - DNA, 25 bp, Homo sapien
tgtccttgagactatcagggtggcc

SEQ ID NO: 1414568 - DNA, 25 bp, Homo sapien
gagactatcagggtggccctcggct

SEQ ID NO: 1414569 - DNA, 25 bp, Homo sapien
catcacagagcagctactgttgtcc

SEQ ID NO: 1414570 - DNA, 25 bp, Homo sapien
gagcagctactgttgtccttgagac

SEQ ID NO: 1414571 - DNA, 25 bp, Homo sapien
gggtccgtgtgatgggaatgcagcc

SEQ ID NO: 1414572 - DNA, 25 bp, Homo sapien
cctccggatggagttctccctggtc

SEQ ID NO: 1414573 - DNA, 25 bp, Homo sapien
agcctccggatggagttctccctgg

SEQ ID NO: 1414574 - DNA, 25 bp, Homo sapien
gcagcctccggatggagttctccct

SEQ ID NO: 1414575 - DNA, 25 bp, Homo sapien
accaccgaggctgacactaggtcca

SEQ ID NO: 1414576 - DNA, 25 bp, Homo sapien
cgatggtatcgggacatgagcacca

SEQ ID NO: 1414577 - DNA, 25 bp, Homo sapien
cagaacaagagtgcggcgatcacac

SEQ ID NO: 1414578 - DNA, 25 bp, Homo sapien
gccttgcgccgatggtatcgggaca

SEQ ID NO: 1414579 - DNA, 25 bp, Homo sapien
caaggacttctgctccagtgcttac

SEQ ID NO: 1414580 - DNA, 25 bp, Homo sapien
acagtgacctgagaatcccttgagg

SEQ ID NO: 1414581 - DNA, 25 bp, Homo sapien
tggcagacgtagatgccgctgtgct

SEQ ID NO: 1414582 - DNA, 25 bp, Homo sapien
ggaaagcccaaagtgtccccatcca

SEQ ID NO: 1414583 - DNA, 25 bp, Homo sapien
gctgacatggcagacgtagatgccg

SEQ ID NO: 1414584 - DNA, 25 bp, Homo sapien
ctgccaatgtgccacagattttggt

SEQ ID NO: 1414585 - DNA, 25 bp, Homo sapien
tggtcttcaaggcccctcacagagg

SEQ ID NO: 1414586 - DNA, 25 bp, Homo sapien
ttctctgccaatgtgccacagattt

SEQ ID NO: 1414587 - DNA, 25 bp, Homo sapien
tcttcaaggcccctcacagaggcct

SEQ ID NO: 1414588 - DNA, 25 bp, Homo sapien
tgggtgatcctttggtcctggagca

SEQ ID NO: 1414589 - DNA, 25 bp, Homo sapien
ggatgggacaccacacaagtcagtg

SEQ ID NO: 1414590 - DNA, 25 bp, Homo sapien
gccctcttctagtgctggaccagga

SEQ ID NO: 1414591 - DNA, 25 bp, Homo sapien
ttcatgctgcggctaggcaccaagt

SEQ ID NO: 1414592 - DNA, 25 bp, Homo sapien
acatgaagcccgtatttggagtgca

SEQ ID NO: 1414593 - DNA, 25 bp, Homo sapien
tagaagcagggcagttttgcgtcct

SEQ ID NO: 1414594 - DNA, 25 bp, Homo sapien
agcaccacagttaccacgtctgagg

SEQ ID NO: 1414595 - DNA, 25 bp, Homo sapien
agtgcagtagcgctagttcctgggc

SEQ ID NO: 1414596 - DNA, 25 bp, Homo sapien
tggccgggagccacggcaagaatcc

SEQ ID NO: 1414597 - DNA, 25 bp, Homo sapien
tttcagaaagtgtggccgggagcca

SEQ ID NO: 1414598 - DNA, 25 bp, Homo sapien
ggatagtttcagaaagtgtggccgg

SEQ ID NO: 1414599 - DNA, 25 bp, Homo sapien
cgggagccacggcaagaatccaaaa

SEQ ID NO: 1414600 - DNA, 25 bp, Homo sapien
atgtgaatgtaggggatcgtagagg

SEQ ID NO: 1414601 - DNA, 25 bp, Homo sapien
tgaatgtaggggatcgtagaggtgg

SEQ ID NO: 1414602 - DNA, 25 bp, Homo sapien
agatgtgaatgtaggggatcgtaga

SEQ ID NO: 1414603 - DNA, 25 bp, Homo sapien
aatgtaggggatcgtagaggtgggt

SEQ ID NO: 1414604 - DNA, 25 bp, Homo sapien
agagggaagagctgtgtatcagtat

SEQ ID NO: 1414605 - DNA, 25 bp, Homo sapien
gaagagctgtgtatcagtatgtgtg

SEQ ID NO: 1414606 - DNA, 25 bp, Homo sapien
ctgtgtatcagtatgtgtgaatgtg

SEQ ID NO: 1414607 - DNA, 25 bp, Homo sapien
gagctgtgtatcagtatgtgtgaat

SEQ ID NO: 1414608 - DNA, 25 bp, Homo sapien
ctgacagcaacaatctccaccgaga

SEQ ID NO: 1414609 - DNA, 25 bp, Homo sapien
gacagcaacaatctccaccgagagc

SEQ ID NO: 1414610 - DNA, 25 bp, Homo sapien
acagcaacaatctccaccgagagct

SEQ ID NO: 1414611 - DNA, 25 bp, Homo sapien
tgacagcaacaatctccaccgagag

SEQ ID NO: 1414612 - DNA, 25 bp, Homo sapien
gcaacttcagtctccttggattcag

SEQ ID NO: 1414613 - DNA, 25 bp, Homo sapien
tggccccctcctcatttagattctc

SEQ ID NO: 1414614 - DNA, 25 bp, Homo sapien
tcagtctccttggattcaggcaatc

SEQ ID NO: 1414615 - DNA, 25 bp, Homo sapien
tctccttggattcaggcaatcctcc

SEQ ID NO: 1414616 - DNA, 25 bp, Homo sapien
gggatcccagacatagtgacctggc

SEQ ID NO: 1414617 - DNA, 25 bp, Homo sapien
gggtcaccacgtctattccccaaga

SEQ ID NO: 1414618 - DNA, 25 bp, Homo sapien
agggatcccagacatagtgacctgg

SEQ ID NO: 1414619 - DNA, 25 bp, Homo sapien
ctgcctgcccatctacactgggtca

SEQ ID NO: 1414620 - DNA, 25 bp, Homo sapien
cacatctcggctcccagggacaggg

SEQ ID NO: 1414621 - DNA, 25 bp, Homo sapien
ctgtaaatgatgccagcagtagcag

SEQ ID NO: 1414622 - DNA, 25 bp, Homo sapien
gcctcaggcccccacatctcggctc

SEQ ID NO: 1414623 - DNA, 25 bp, Homo sapien
tgtaaatgatgccagcagtagcagc

SEQ ID NO: 1414624 - DNA, 25 bp, Homo sapien
aagaagccgtgatcgggagctccga

SEQ ID NO: 1414625 - DNA, 25 bp, Homo sapien
ccggctgcagacttgaataaggaac

SEQ ID NO: 1414626 - DNA, 25 bp, Homo sapien
agttccaccgagatctccctgggag

SEQ ID NO: 1414627 - DNA, 25 bp, Homo sapien
caacaacgacggcagaaacctggga

SEQ ID NO: 1414628 - DNA, 25 bp, Homo sapien
tcccctgtgcagatcgtgggatgaa

SEQ ID NO: 1414629 - DNA, 25 bp, Homo sapien
gggatgaaacgcatgggccatcgca

SEQ ID NO: 1414630 - DNA, 25 bp, Homo sapien
tgcagatcgtgggatgaaacgcatg

SEQ ID NO: 1414631 - DNA, 25 bp, Homo sapien
ccacttcccctgtgcagatcgtggg

SEQ ID NO: 1414632 - DNA, 25 bp, Homo sapien
taaagcgttatcaccagagctatct

SEQ ID NO: 1414633 - DNA, 25 bp, Homo sapien
gacacatcactaagcctcgttttgt

SEQ ID NO: 1414634 - DNA, 25 bp, Homo sapien
tttgttgcaaacctataaagcgtta

SEQ ID NO: 1414635 - DNA, 25 bp, Homo sapien
tctaaatagtgccaagacacatcac

SEQ ID NO: 1414636 - DNA, 25 bp, Homo sapien
taacaataaagagaaattagaagtg

SEQ ID NO: 1414637 - DNA, 25 bp, Homo sapien
attagaagtgggagtcagggtagaa

SEQ ID NO: 1414638 - DNA, 25 bp, Homo sapien
tattacaatagcagagaaaataata

SEQ ID NO: 1414639 - DNA, 25 bp, Homo sapien
gggagtcagggtagaaaaaaatgca

SEQ ID NO: 1414640 - DNA, 25 bp, Homo sapien
tctcccatgagacgaatgttgtgct

SEQ ID NO: 1414641 - DNA, 25 bp, Homo sapien
ggagaccaacactccagctgagctg

SEQ ID NO: 1414642 - DNA, 25 bp, Homo sapien
ctaggagaccaacactccagctgag

SEQ ID NO: 1414643 - DNA, 25 bp, Homo sapien
aatgttgtgcttttcccggaattca

SEQ ID NO: 1414644 - DNA, 25 bp, Homo sapien
tgtattcgtgaaacacacactatga

SEQ ID NO: 1414645 - DNA, 25 bp, Homo sapien
tatgagaaacattactctaacccca

SEQ ID NO: 1414646 - DNA, 25 bp, Homo sapien
taatccagtgggtctgggaagctgc

SEQ ID NO: 1414647 - DNA, 25 bp, Homo sapien
ttagcatagcataatgagcataggc

SEQ ID NO: 1414648 - DNA, 25 bp, Homo sapien
tgttgttctccaaagcgggcagcac

SEQ ID NO: 1414649 - DNA, 25 bp, Homo sapien
tcctccaaccatgcggtagcactta

SEQ ID NO: 1414650 - DNA, 25 bp, Homo sapien
tagcacttacgagtttcatctacct

SEQ ID NO: 1414651 - DNA, 25 bp, Homo sapien
ggcagcacctctttgacagttcgct

SEQ ID NO: 1414652 - DNA, 25 bp, Homo sapien
gaaggcggttgaagccagcaatcac

SEQ ID NO: 1414653 - DNA, 25 bp, Homo sapien
gctgttcctgccgaaggcggttgaa

SEQ ID NO: 1414654 - DNA, 25 bp, Homo sapien
gctttggatgccaggcctcgctgtt

SEQ ID NO: 1414655 - DNA, 25 bp, Homo sapien
aggcctcgctgttcctgccgaaggc

SEQ ID NO: 1414656 - DNA, 25 bp, Homo sapien
taaaatctacttaaacatgttgagt

SEQ ID NO: 1414657 - DNA, 25 bp, Homo sapien
gctaataactaatttcctcttgttc

SEQ ID NO: 1414658 - DNA, 25 bp, Homo sapien
ttatgaacttttaatcaaataccaa

SEQ ID NO: 1414659 - DNA, 25 bp, Homo sapien
cactgcacccgcctgagattttttt

SEQ ID NO: 1414660 - DNA, 25 bp, Homo sapien
gctaactgcaacttaactgtagact

SEQ ID NO: 1414661 - DNA, 25 bp, Homo sapien
taatagtcttctcccctatggctag

SEQ ID NO: 1414662 - DNA, 25 bp, Homo sapien
gctcccactatgcataagacacctg

SEQ ID NO: 1414663 - DNA, 25 bp, Homo sapien
catcagtgttgcgtctctcaaccct

SEQ ID NO: 1414664 - DNA, 25 bp, Homo sapien
tcccgctgctcttgccggcgcgacc

SEQ ID NO: 1414665 - DNA, 25 bp, Homo sapien
ctgctctgcggacaccgcccccttc

SEQ ID NO: 1414666 - DNA, 25 bp, Homo sapien
tgctctgcggacaccgcccccttcc

SEQ ID NO: 1414667 - DNA, 25 bp, Homo sapien
ccggcgcgaccgctgttctccgcca

SEQ ID NO: 1414668 - DNA, 25 bp, Homo sapien
gcgcagctcagcccccgccttgcgt

SEQ ID NO: 1414669 - DNA, 25 bp, Homo sapien
ctgctgggtttccggccggcgcagc

SEQ ID NO: 1414670 - DNA, 25 bp, Homo sapien
ctcagcccccgccttgcgtcacgtc

SEQ ID NO: 1414671 - DNA, 25 bp, Homo sapien
ctgggtttccggccggcgcagctca

SEQ ID NO: 1414672 - DNA, 25 bp, Homo sapien
ggatacctcaactctcagtactttg

SEQ ID NO: 1414673 - DNA, 25 bp, Homo sapien
cactgtatggtcttgtcccttagcc

SEQ ID NO: 1414674 - DNA, 25 bp, Homo sapien
tgtgtcctggactccggatacctca

SEQ ID NO: 1414675 - DNA, 25 bp, Homo sapien
ggccctgattcaggctcacagtata

SEQ ID NO: 1414676 - DNA, 25 bp, Homo sapien
tgtgccaggtaacatcgacgccaga

SEQ ID NO: 1414677 - DNA, 25 bp, Homo sapien
ggcccagagccatggctatctcctc

SEQ ID NO: 1414678 - DNA, 25 bp, Homo sapien
atcgacgccagacaagcaacagaac

SEQ ID NO: 1414679 - DNA, 25 bp, Homo sapien
aggtaacatcgacgccagacaagca

SEQ ID NO: 1414680 - DNA, 25 bp, Homo sapien
gctggactaagctccagttctagac

SEQ ID NO: 1414681 - DNA, 25 bp, Homo sapien
gggagttggtattgtaccagctgga

SEQ ID NO: 1414682 - DNA, 25 bp, Homo sapien
gacatcgcctttgggaactagaagg

SEQ ID NO: 1414683 - DNA, 25 bp, Homo sapien
ctgtgtctggacatcgcctttggga

SEQ ID NO: 1414684 - DNA, 25 bp, Homo sapien
tctcccaagcatgggagtgggcgta

SEQ ID NO: 1414685 - DNA, 25 bp, Homo sapien
tatgatgccctttgcccaagccaga

SEQ ID NO: 1414686 - DNA, 25 bp, Homo sapien
aacactcagtgcatgtcccagcccc

SEQ ID NO: 1414687 - DNA, 25 bp, Homo sapien
tacttcacttacacctatgatgccc

SEQ ID NO: 1414688 - DNA, 25 bp, Homo sapien
tggaaagaaagtgtcacactccccc

SEQ ID NO: 1414689 - DNA, 25 bp, Homo sapien
gcagaggtttcaagccatggaatgg

SEQ ID NO: 1414690 - DNA, 25 bp, Homo sapien
gtacacatataccaccacagttggg

SEQ ID NO: 1414691 - DNA, 25 bp, Homo sapien
gaggcatgactaggctgacccagtc

SEQ ID NO: 1414692 - DNA, 25 bp, Homo sapien
gataactccttagtgcatccaaaaa

SEQ ID NO: 1414693 - DNA, 25 bp, Homo sapien
ataccacttccactttcttttgtct

SEQ ID NO: 1414694 - DNA, 25 bp, Homo sapien
aaaccccagaacagtgtaagctcca

SEQ ID NO: 1414695 - DNA, 25 bp, Homo sapien
gtagagaacaaaccccagaacagtg

SEQ ID NO: 1414696 - DNA, 25 bp, Homo sapien
gatgggaacagtccccaaagtgaga

SEQ ID NO: 1414697 - DNA, 25 bp, Homo sapien
ggtgtgattggttggaagggtagag

SEQ ID NO: 1414698 - DNA, 25 bp, Homo sapien
tcaaactggcgctcaagtgggtcct

SEQ ID NO: 1414699 - DNA, 25 bp, Homo sapien
tcaggagtttctgtcggcccagctc

SEQ ID NO: 1414700 - DNA, 25 bp, Homo sapien
tgtagtcacgccagaatgcatcgag

SEQ ID NO: 1414701 - DNA, 25 bp, Homo sapien
ggtgttggcctggttaaagcgctca

SEQ ID NO: 1414702 - DNA, 25 bp, Homo sapien
tacagtaagggatgagtttacaagc

SEQ ID NO: 1414703 - DNA, 25 bp, Homo sapien
gaggttacagtaagggatgagttta

SEQ ID NO: 1414704 - DNA, 25 bp, Homo sapien
aagaggttacagtaagggatgagtt

SEQ ID NO: 1414705 - DNA, 25 bp, Homo sapien
gtaagggatgagtttacaagccaag

SEQ ID NO: 1414706 - DNA, 25 bp, Homo sapien
tccatctctggaacccttgaacttc

SEQ ID NO: 1414707 - DNA, 25 bp, Homo sapien
tgaatagcataaactgcccagtgtc

SEQ ID NO: 1414708 - DNA, 25 bp, Homo sapien
gcataaactgcccagtgtcccagca

SEQ ID NO: 1414709 - DNA, 25 bp, Homo sapien
gctccatctctggaacccttgaact

SEQ ID NO: 1414710 - DNA, 25 bp, Homo sapien
gtgtcactgacttccggcgttttcg

SEQ ID NO: 1414711 - DNA, 25 bp, Homo sapien
ttcgctggctcccaagtgtggctct

SEQ ID NO: 1414712 - DNA, 25 bp, Homo sapien
ctccttgggatctggtgtcactgac

SEQ ID NO: 1414713 - DNA, 25 bp, Homo sapien
ctcgggctggccgcttgctacacat

SEQ ID NO: 1414714 - DNA, 25 bp, Homo sapien
aacacaccacaggatagtggggagg

SEQ ID NO: 1414715 - DNA, 25 bp, Homo sapien
cacaccacaggatagtggggaggca

SEQ ID NO: 1414716 - DNA, 25 bp, Homo sapien
gtggggcaacacaccacaggatagt

SEQ ID NO: 1414717 - DNA, 25 bp, Homo sapien
cccgaagtggggcaacacaccacag

SEQ ID NO: 1414718 - DNA, 25 bp, Homo sapien
cacagtagggtaaaggcagaaattc

SEQ ID NO: 1414719 - DNA, 25 bp, Homo sapien
aacacagtagggtaaaggcagaaat

SEQ ID NO: 1414720 - DNA, 25 bp, Homo sapien
cagtagggtaaaggcagaaattcaa

SEQ ID NO: 1414721 - DNA, 25 bp, Homo sapien
acagtagggtaaaggcagaaattca

SEQ ID NO: 1414722 - DNA, 25 bp, Homo sapien
aggaaggaatcatttagacttagca

SEQ ID NO: 1414723 - DNA, 25 bp, Homo sapien
ttggaatgaggaaggaatcatttag

SEQ ID NO: 1414724 - DNA, 25 bp, Homo sapien
tgaggaaggaatcatttagacttag

SEQ ID NO: 1414725 - DNA, 25 bp, Homo sapien
ctgttggaatgaggaaggaatcatt

SEQ ID NO: 1414726 - DNA, 25 bp, Homo sapien
gatacttgtctacaagatcagggca

SEQ ID NO: 1414727 - DNA, 25 bp, Homo sapien
gggtcacatagcgaattgatgtctc

SEQ ID NO: 1414728 - DNA, 25 bp, Homo sapien
gatgtctcctccagatacttgtcta

SEQ ID NO: 1414729 - DNA, 25 bp, Homo sapien
tagcgaattgatgtctcctccagat

SEQ ID NO: 1414730 - DNA, 25 bp, Homo sapien
agcccgtctcctcttgagggtgacg

SEQ ID NO: 1414731 - DNA, 25 bp, Homo sapien
ctcctcttgagggtgacgtagggca

SEQ ID NO: 1414732 - DNA, 25 bp, Homo sapien
gagggtgacgtagggcagcaggtcg

SEQ ID NO: 1414733 - DNA, 25 bp, Homo sapien
tggcgagtgatgatgcgcagcagct

SEQ ID NO: 1414734 - DNA, 25 bp, Homo sapien
taagaagtcacgtccatttcggatg

SEQ ID NO: 1414735 - DNA, 25 bp, Homo sapien
gcgctccagtgccaataagaagtca

SEQ ID NO: 1414736 - DNA, 25 bp, Homo sapien
tccacgctcgtggtcatcaatgaca

SEQ ID NO: 1414737 - DNA, 25 bp, Homo sapien
agttactttcatcacagcggccctg

SEQ ID NO: 1414738 - DNA, 25 bp, Homo sapien
cggtgcaggctgtacagcccatgtt

SEQ ID NO: 1414739 - DNA, 25 bp, Homo sapien
gtgcccacgatgtcaaacatgcggt

SEQ ID NO: 1414740 - DNA, 25 bp, Homo sapien
tgtgtgtcagatgagtgcccacgat

SEQ ID NO: 1414741 - DNA, 25 bp, Homo sapien
atgcggtgcaggctgtacagcccat

SEQ ID NO: 1414742 - DNA, 25 bp, Homo sapien
acacctggcttgcccgccgctttag

SEQ ID NO: 1414743 - DNA, 25 bp, Homo sapien
acctggcttgcccgccgctttaggc

SEQ ID NO: 1414744 - DNA, 25 bp, Homo sapien
tggcttgcccgccgctttaggcccg

SEQ ID NO: 1414745 - DNA, 25 bp, Homo sapien
ctggcttgcccgccgctttaggccc

SEQ ID NO: 1414746 - DNA, 25 bp, Homo sapien
ggggctcaggtacgcaatgctttcc

SEQ ID NO: 1414747 - DNA, 25 bp, Homo sapien
tcaggtacgcaatgctttccagaat

SEQ ID NO: 1414748 - DNA, 25 bp, Homo sapien
ggctcaggtacgcaatgctttccag

SEQ ID NO: 1414749 - DNA, 25 bp, Homo sapien
ctgggggctcaggtacgcaatgctt

SEQ ID NO: 1414750 - DNA, 25 bp, Homo sapien
aaagaaccgatgagacactcaaggg

SEQ ID NO: 1414751 - DNA, 25 bp, Homo sapien
cctggcacagtatagtgctttatac

SEQ ID NO: 1414752 - DNA, 25 bp, Homo sapien
ggcaggaactagtctcatgcattcc

SEQ ID NO: 1414753 - DNA, 25 bp, Homo sapien
agggaaagaaccgatgagacactca

SEQ ID NO: 1414754 - DNA, 25 bp, Homo sapien
tagtagacaatgtactagaatacag

SEQ ID NO: 1414755 - DNA, 25 bp, Homo sapien
atacagccttccatatgttaaaaaa

SEQ ID NO: 1414756 - DNA, 25 bp, Homo sapien
gggattgtcccaagacatctaaatc

SEQ ID NO: 1414757 - DNA, 25 bp, Homo sapien
tccaagggcaacatttagtagacaa

SEQ ID NO: 1414758 - DNA, 25 bp, Homo sapien
ctccgcaagaaacttaatttcccag

SEQ ID NO: 1414759 - DNA, 25 bp, Homo sapien
acctcagaggcccatagaattagac

SEQ ID NO: 1414760 - DNA, 25 bp, Homo sapien
tcatacgtctatgtttcaccaggga

SEQ ID NO: 1414761 - DNA, 25 bp, Homo sapien
caaaatatctaatggcgcagcatcc

SEQ ID NO: 1414762 - DNA, 25 bp, Homo sapien
agagcctccaccttagcatataggg

SEQ ID NO: 1414763 - DNA, 25 bp, Homo sapien
tccagtctcaatggcttgcggcaag

SEQ ID NO: 1414764 - DNA, 25 bp, Homo sapien
tcctcgcaacacccctcatcagagt

SEQ ID NO: 1414765 - DNA, 25 bp, Homo sapien
ctcctcgcaacacccctcatcagag

SEQ ID NO: 1414766 - DNA, 25 bp, Homo sapien
gttctcaggctggacgtcgccaccg

SEQ ID NO: 1414767 - DNA, 25 bp, Homo sapien
tcaggctggacgtcgccaccgcctc

SEQ ID NO: 1414768 - DNA, 25 bp, Homo sapien
gaggttctcaggctggacgtcgcca

SEQ ID NO: 1414769 - DNA, 25 bp, Homo sapien
ctcaggctggacgtcgccaccgcct

SEQ ID NO: 1414770 - DNA, 25 bp, Homo sapien
atgttggatccatccgcgccgctct

SEQ ID NO: 1414771 - DNA, 25 bp, Homo sapien
cgccatgttggatccatccgcgccg

SEQ ID NO: 1414772 - DNA, 25 bp, Homo sapien
ggctcaggctcggcgccgccatgtt

SEQ ID NO: 1414773 - DNA, 25 bp, Homo sapien
ccatgttggatccatccgcgccgct

SEQ ID NO: 1414774 - DNA, 25 bp, Homo sapien
gccggttagtggcggcttcgaggcc

SEQ ID NO: 1414775 - DNA, 25 bp, Homo sapien
ccggttagtggcggcttcgaggcca

SEQ ID NO: 1414776 - DNA, 25 bp, Homo sapien
cggttagtggcggcttcgaggccat

SEQ ID NO: 1414777 - DNA, 25 bp, Homo sapien
cggccggttagtggcggcttcgagg

SEQ ID NO: 1414778 - DNA, 25 bp, Homo sapien
agccaagtccccctgaccctgcggt

SEQ ID NO: 1414779 - DNA, 25 bp, Homo sapien
gaccctgcggtcctggcaacgtcgg

SEQ ID NO: 1414780 - DNA, 25 bp, Homo sapien
caaacagctttatttgaaagacggg

SEQ ID NO: 1414781 - DNA, 25 bp, Homo sapien
ttatttgaaagacgggggacagcca

SEQ ID NO: 1414782 - DNA, 25 bp, Homo sapien
aggccgcggcccctgtcggggcctg

SEQ ID NO: 1414783 - DNA, 25 bp, Homo sapien
tcatatataggacggagtaatctgt

SEQ ID NO: 1414784 - DNA, 25 bp, Homo sapien
caagcgggtaactaggtgacaagaa

SEQ ID NO: 1414785 - DNA, 25 bp, Homo sapien
cattctgttcttctcgatgcactca

SEQ ID NO: 1414786 - DNA, 25 bp, Homo sapien
gacggagtaatctgtttacattctg

SEQ ID NO: 1414787 - DNA, 25 bp, Homo sapien
gccacgcgacgtgttgtgtctgaga

SEQ ID NO: 1414788 - DNA, 25 bp, Homo sapien
ttcccatagtaaagatgacggcgcc

SEQ ID NO: 1414789 - DNA, 25 bp, Homo sapien
gccggaccccgagatcgtgagttgt

SEQ ID NO: 1414790 - DNA, 25 bp, Homo sapien
tgacggcgccttgaggtaagctaca

SEQ ID NO: 1414791 - DNA, 25 bp, Homo sapien
gactagctcatctcatggctctggg

SEQ ID NO: 1414792 - DNA, 25 bp, Homo sapien
gattttcccagggtctgctggccta

SEQ ID NO: 1414793 - DNA, 25 bp, Homo sapien
gacttaggccctgagcagtacaaga

SEQ ID NO: 1414794 - DNA, 25 bp, Homo sapien
tctatgtgtaaatcaccatggcacg

SEQ ID NO: 1414795 - DNA, 25 bp, Homo sapien
tctagaggtaatttatatccgcccc

SEQ ID NO: 1414796 - DNA, 25 bp, Homo sapien
aagactgggctttggacaatctaga

SEQ ID NO: 1414797 - DNA, 25 bp, Homo sapien
taactcatctaactgcttccccgga

SEQ ID NO: 1414798 - DNA, 25 bp, Homo sapien
cagagggacctttgataggctacga

SEQ ID NO: 1414799 - DNA, 25 bp, Homo sapien
ctcagggacttgctttggagtcatg

SEQ ID NO: 1414800 - DNA, 25 bp, Homo sapien
caggtctgcctgatgaacggctcaa

SEQ ID NO: 1414801 - DNA, 25 bp, Homo sapien
ccgttccaagtctgtgagcagtggg

SEQ ID NO: 1414802 - DNA, 25 bp, Homo sapien
gattgccttgggagggcaccgtggc

SEQ ID NO: 1414803 - DNA, 25 bp, Homo sapien
aggcccccttcgagcagatcatggg

SEQ ID NO: 1414804 - DNA, 25 bp, Homo sapien
cagggactcctaggaatcgtcacat

SEQ ID NO: 1414805 - DNA, 25 bp, Homo sapien
gattcacagtcataagccctacagg

SEQ ID NO: 1414806 - DNA, 25 bp, Homo sapien
cctagcacggcaccagagttcagtt

SEQ ID NO: 1414807 - DNA, 25 bp, Homo sapien
taaatattcacagaggtccgaggag

SEQ ID NO: 1414808 - DNA, 25 bp, Homo sapien
accccgagggtcagtcccaatgtct

SEQ ID NO: 1414809 - DNA, 25 bp, Homo sapien
cagcatctcttgacggaaggcttgg

SEQ ID NO: 1414810 - DNA, 25 bp, Homo sapien
caactggtatgtcagtgagttcatc

SEQ ID NO: 1414811 - DNA, 25 bp, Homo sapien
gagttcatcccatcttgcgtccagg

SEQ ID NO: 1414812 - DNA, 25 bp, Homo sapien
ctgggtacggaccaggaggtcaaat

SEQ ID NO: 1414813 - DNA, 25 bp, Homo sapien
gaaccctgaggatccagtaacaatt

SEQ ID NO: 1414814 - DNA, 25 bp, Homo sapien
gaggttggagactaagacccagaaa

SEQ ID NO: 1414815 - DNA, 25 bp, Homo sapien
tcctggctaggggtacagaaccctg

SEQ ID NO: 1414816 - DNA, 25 bp, Homo sapien
caattcccaggcagtccttccttct

SEQ ID NO: 1414817 - DNA, 25 bp, Homo sapien
tggggggccgagagatcttcatccc

SEQ ID NO: 1414818 - DNA, 25 bp, Homo sapien
tcggtgcttcaccatcttatagtgt

SEQ ID NO: 1414819 - DNA, 25 bp, Homo sapien
tcttatagtgtcctacagatgtggg

SEQ ID NO: 1414820 - DNA, 25 bp, Homo sapien
tcattgcccttatctcctcggtgct

SEQ ID NO: 1414821 - DNA, 25 bp, Homo sapien
ggaagggattaaatgtttctgtaca

SEQ ID NO: 1414822 - DNA, 25 bp, Homo sapien
tgccagtcaccctagggcctttaaa

SEQ ID NO: 1414823 - DNA, 25 bp, Homo sapien
ccttgcagtctaggaaggacgcaga

SEQ ID NO: 1414824 - DNA, 25 bp, Homo sapien
tcatgggggatccagagtagagaaa

SEQ ID NO: 1414825 - DNA, 25 bp, Homo sapien
gctgagactcctccgaagtactggg

SEQ ID NO: 1414826 - DNA, 25 bp, Homo sapien
tggtagcaatgtcgtcatcctcacc

SEQ ID NO: 1414827 - DNA, 25 bp, Homo sapien
caggtactggtcaggagtaagtgct

SEQ ID NO: 1414828 - DNA, 25 bp, Homo sapien
gagtaagtgctgagactcctccgaa

SEQ ID NO: 1414829 - DNA, 25 bp, Homo sapien
aaagatccttgcataccccgagtct

SEQ ID NO: 1414830 - DNA, 25 bp, Homo sapien
gagagaaagatccttgcataccccg

SEQ ID NO: 1414831 - DNA, 25 bp, Homo sapien
gagaaagatccttgcataccccgag

SEQ ID NO: 1414832 - DNA, 25 bp, Homo sapien
agaaagatccttgcataccccgagt

SEQ ID NO: 1414833 - DNA, 25 bp, Homo sapien
cacaggatagtaggcttccctgttt

SEQ ID NO: 1414834 - DNA, 25 bp, Homo sapien
tccacaggatagtaggcttccctgt

SEQ ID NO: 1414835 - DNA, 25 bp, Homo sapien
ctgtttcccagtacccttccatgcc

SEQ ID NO: 1414836 - DNA, 25 bp, Homo sapien
ccttccacaggatagtaggcttccc

SEQ ID NO: 1414837 - DNA, 25 bp, Homo sapien
catacagattgtggtcattttctgg

SEQ ID NO: 1414838 - DNA, 25 bp, Homo sapien
tatccaaacttgttcatagcaacgg

SEQ ID NO: 1414839 - DNA, 25 bp, Homo sapien
ccaacgttcaacagttttgccctgt

SEQ ID NO: 1414840 - DNA, 25 bp, Homo sapien
tccacatcgtgcaagaacaggcagt

SEQ ID NO: 1414841 - DNA, 25 bp, Homo sapien
tcagtcaaaatgaggtggagattgg

SEQ ID NO: 1414842 - DNA, 25 bp, Homo sapien
cttagaagaaagtcagtcaaaatga

SEQ ID NO: 1414843 - DNA, 25 bp, Homo sapien
tgtgcttgaggcttccttagaagaa

SEQ ID NO: 1414844 - DNA, 25 bp, Homo sapien
atgtgcttgaggcttccttagaaga

SEQ ID NO: 1414845 - DNA, 25 bp, Homo sapien
agatgccataagcaagctgctggcg

SEQ ID NO: 1414846 - DNA, 25 bp, Homo sapien
atgacatagatgccataagcaagct

SEQ ID NO: 1414847 - DNA, 25 bp, Homo sapien
gccataagcaagctgctggcgctgc

SEQ ID NO: 1414848 - DNA, 25 bp, Homo sapien
ggatgacatagatgccataagcaag

SEQ ID NO: 1414849 - DNA, 25 bp, Homo sapien
aggcacaatgatggctgttcgggag

SEQ ID NO: 1414850 - DNA, 25 bp, Homo sapien
acaatgatggctgttcgggagcggg

SEQ ID NO: 1414851 - DNA, 25 bp, Homo sapien
tggctgttcgggagcggggctcaca

SEQ ID NO: 1414852 - DNA, 25 bp, Homo sapien
ggctgttcgggagcggggctcacaa

SEQ ID NO: 1414853 - DNA, 25 bp, Homo sapien
actgggctaaaggacaccgacacag

SEQ ID NO: 1414854 - DNA, 25 bp, Homo sapien
atggcactgggctaaaggacaccga

SEQ ID NO: 1414855 - DNA, 25 bp, Homo sapien
agtgatggcactgggctaaaggaca

SEQ ID NO: 1414856 - DNA, 25 bp, Homo sapien
ccagtgatggcactgggctaaagga

SEQ ID NO: 1414857 - DNA, 25 bp, Homo sapien
tttgggaatacctctgacactggca

SEQ ID NO: 1414858 - DNA, 25 bp, Homo sapien
tatcactgggacagctctacaaagg

SEQ ID NO: 1414859 - DNA, 25 bp, Homo sapien
taaaccagggctcatctacaaggaa

SEQ ID NO: 1414860 - DNA, 25 bp, Homo sapien
actcagaaatctcgcatgccttgga

SEQ ID NO: 1414861 - DNA, 25 bp, Homo sapien
ttctggacagtagggcagaccttga

SEQ ID NO: 1414862 - DNA, 25 bp, Homo sapien
agatcgttctggacagtagggcaga

SEQ ID NO: 1414863 - DNA, 25 bp, Homo sapien
agagaggagatcgttctggacagta

SEQ ID NO: 1414864 - DNA, 25 bp, Homo sapien
ctaagagaggagatcgttctggaca

SEQ ID NO: 1414865 - DNA, 25 bp, Homo sapien
tgagaatagtcaaatgtcggtccct

SEQ ID NO: 1414866 - DNA, 25 bp, Homo sapien
tcaaatgtcggtccctgatctcggc

SEQ ID NO: 1414867 - DNA, 25 bp, Homo sapien
tgtagacatcacgagggtgagaata

SEQ ID NO: 1414868 - DNA, 25 bp, Homo sapien
tcacgagggtgagaatagtcaaatg

SEQ ID NO: 1414869 - DNA, 25 bp, Homo sapien
agggcactgagacttcggaagcccc

SEQ ID NO: 1414870 - DNA, 25 bp, Homo sapien
ccccccagtgacaggtacatcatga

SEQ ID NO: 1414871 - DNA, 25 bp, Homo sapien
gccccccagtgacaggtacatcatg

SEQ ID NO: 1414872 - DNA, 25 bp, Homo sapien
ctgagacttcggaagccccccagtg

SEQ ID NO: 1414873 - DNA, 25 bp, Homo sapien
cagcgtgcaaggccgctccagcagc

SEQ ID NO: 1414874 - DNA, 25 bp, Homo sapien
gccagcgtgcaaggccgctccagca

SEQ ID NO: 1414875 - DNA, 25 bp, Homo sapien
ccagcgtgcaaggccgctccagcag

SEQ ID NO: 1414876 - DNA, 25 bp, Homo sapien
aggtgcacagtcacgcaaggaaaca

SEQ ID NO: 1414877 - DNA, 25 bp, Homo sapien
cagaatgtaaccaccagtaacccta

SEQ ID NO: 1414878 - DNA, 25 bp, Homo sapien
aacaaagtcacagaagggagcacac

SEQ ID NO: 1414879 - DNA, 25 bp, Homo sapien
tttcagaaagtctctagagaacccc

SEQ ID NO: 1414880 - DNA, 25 bp, Homo sapien
ttcaagctgtcttcttagggatcat

SEQ ID NO: 1414881 - DNA, 25 bp, Homo sapien
aagctgtcttcttagggatcatggg

SEQ ID NO: 1414882 - DNA, 25 bp, Homo sapien
taggttcaagctgtcttcttaggga

SEQ ID NO: 1414883 - DNA, 25 bp, Homo sapien
cttcttagggatcatgggggctcca

SEQ ID NO: 1414884 - DNA, 25 bp, Homo sapien
actccagcagcgaatctgggaccag

SEQ ID NO: 1414885 - DNA, 25 bp, Homo sapien
cactccagcagcgaatctgggacca

SEQ ID NO: 1414886 - DNA, 25 bp, Homo sapien
gcactccagcagcgaatctgggacc

SEQ ID NO: 1414887 - DNA, 25 bp, Homo sapien
gaagtggtaaaggataactagctac

SEQ ID NO: 1414888 - DNA, 25 bp, Homo sapien
aacagaagtggtaaaggataactag

SEQ ID NO: 1414889 - DNA, 25 bp, Homo sapien
ctggaacagaagtggtaaaggataa

SEQ ID NO: 1414890 - DNA, 25 bp, Homo sapien
cagaagtggtaaaggataactagct

SEQ ID NO: 1414891 - DNA, 25 bp, Homo sapien
gatggtaggtccctcgcctatctcc

SEQ ID NO: 1414892 - DNA, 25 bp, Homo sapien
ggtttcccagcaggcgaagtgaagg

SEQ ID NO: 1414893 - DNA, 25 bp, Homo sapien
caggagatggtaggtccctcgccta

SEQ ID NO: 1414894 - DNA, 25 bp, Homo sapien
ttcccagcaggcgaagtgaaggaaa

SEQ ID NO: 1414895 - DNA, 25 bp, Homo sapien
ccagaccaagaaccagttgaagtgg

SEQ ID NO: 1414896 - DNA, 25 bp, Homo sapien
taagtgtcaggttcatacttaacca

SEQ ID NO: 1414897 - DNA, 25 bp, Homo sapien
gggacaggacagctaatggaaacat

SEQ ID NO: 1414898 - DNA, 25 bp, Homo sapien
ggcgacagagtcatgacaggaccgt

SEQ ID NO: 1414899 - DNA, 25 bp, Homo sapien
tcaggtgcagggaccgtgaccacct

SEQ ID NO: 1414900 - DNA, 25 bp, Homo sapien
gctgtaagcgaacagccccggagct

SEQ ID NO: 1414901 - DNA, 25 bp, Homo sapien
cggagctcggcggagagtagggtgg

SEQ ID NO: 1414902 - DNA, 25 bp, Homo sapien
ccagggcgaagtaggaaacaggctc

SEQ ID NO: 1414903 - DNA, 25 bp, Homo sapien
ctcttctagcgggggtggggaggag

SEQ ID NO: 1414904 - DNA, 25 bp, Homo sapien
aagagaaagggagagggagagcagg

SEQ ID NO: 1414905 - DNA, 25 bp, Homo sapien
gagaaagggagagggagagcagggg

SEQ ID NO: 1414906 - DNA, 25 bp, Homo sapien
ctgaagagaaagggagagggagagc

SEQ ID NO: 1414907 - DNA, 25 bp, Homo sapien
gaaagggagagggagagcaggggca

SEQ ID NO: 1414908 - DNA, 25 bp, Homo sapien
caggcgttacccaaaacttctcact

SEQ ID NO: 1414909 - DNA, 25 bp, Homo sapien
gtgtcgacgcattcccagcgcacat

SEQ ID NO: 1414910 - DNA, 25 bp, Homo sapien
tttatcccaggcctccgtgtcgacg

SEQ ID NO: 1414911 - DNA, 25 bp, Homo sapien
tgccctacctactagcaacgtgagc

SEQ ID NO: 1414912 - DNA, 25 bp, Homo sapien
ctggtcttttgctgcctgtcgtcac

SEQ ID NO: 1414913 - DNA, 25 bp, Homo sapien
gggcaggcatcgctgccgccatctt

SEQ ID NO: 1414914 - DNA, 25 bp, Homo sapien
cccaacagccgggcaggcatcgctg

SEQ ID NO: 1414915 - DNA, 25 bp, Homo sapien
cgggcaggcatcgctgccgccatct

SEQ ID NO: 1414916 - DNA, 25 bp, Homo sapien
aacagccgggcaggcatcgctgccg

SEQ ID NO: 1414917 - DNA, 25 bp, Homo sapien
ctgcgggggcggggtctcgcgtcat

SEQ ID NO: 1414918 - DNA, 25 bp, Homo sapien
tcctctgggccgagactgatcagga

SEQ ID NO: 1414919 - DNA, 25 bp, Homo sapien
cacctggaacgcgttgtaggcgacc

SEQ ID NO: 1414920 - DNA, 25 bp, Homo sapien
tagggttcaactccactacgcagac

SEQ ID NO: 1414921 - DNA, 25 bp, Homo sapien
tacgcagactgctagtgggatttca

SEQ ID NO: 1414922 - DNA, 25 bp, Homo sapien
gggtttcatcttctatctactaggc

SEQ ID NO: 1414923 - DNA, 25 bp, Homo sapien
cagagaccagattctcaaaccaggc

SEQ ID NO: 1414924 - DNA, 25 bp, Homo sapien
gaccagattctcaaaccaggctgat

SEQ ID NO: 1414925 - DNA, 25 bp, Homo sapien
tcttctatctactaggctggtctcg

SEQ ID NO: 1414926 - DNA, 25 bp, Homo sapien
taagtctggacctctctataaggca

SEQ ID NO: 1414927 - DNA, 25 bp, Homo sapien
ggataaacagtcaattctcaatgca

SEQ ID NO: 1414928 - DNA, 25 bp, Homo sapien
tacaggtaagtaagtagcaaggctt

SEQ ID NO: 1414929 - DNA, 25 bp, Homo sapien
caaggcttagattcaatttgactcc

SEQ ID NO: 1414930 - DNA, 25 bp, Homo sapien
aatcacagaggtggcccctaagctc

SEQ ID NO: 1414931 - DNA, 25 bp, Homo sapien
agaggtggcccctaagctcagtctc

SEQ ID NO: 1414932 - DNA, 25 bp, Homo sapien
aggtggcccctaagctcagtctcat

SEQ ID NO: 1414933 - DNA, 25 bp, Homo sapien
ccaatcacagaggtggcccctaagc

SEQ ID NO: 1414934 - DNA, 25 bp, Homo sapien
ttagcaaagcccagatccagtaagc

SEQ ID NO: 1414935 - DNA, 25 bp, Homo sapien
agcagtatttggcatcccagctagg

SEQ ID NO: 1414936 - DNA, 25 bp, Homo sapien
tacagggtgctgtataaggcactgc

SEQ ID NO: 1414937 - DNA, 25 bp, Homo sapien
gcagagtgaagtgcctttggttccc

SEQ ID NO: 1414938 - DNA, 25 bp, Homo sapien
tttctcaagcaaaggcgccttgccc

SEQ ID NO: 1414939 - DNA, 25 bp, Homo sapien
gccttcttgcctatttcctgccaaa

SEQ ID NO: 1414940 - DNA, 25 bp, Homo sapien
tctgccattttgaggcacctggctc

SEQ ID NO: 1414941 - DNA, 25 bp, Homo sapien
tgtttttgtatcgagacgagtctca

SEQ ID NO: 1414942 - DNA, 25 bp, Homo sapien
tagtcccatatgagcaatctaaggc

SEQ ID NO: 1414943 - DNA, 25 bp, Homo sapien
gggtaacctctcacatggccatgac

SEQ ID NO: 1414944 - DNA, 25 bp, Homo sapien
caaattgaatccagacccgctggct

SEQ ID NO: 1414945 - DNA, 25 bp, Homo sapien
ataagacgccgagccccaaattgaa

SEQ ID NO: 1414946 - DNA, 25 bp, Homo sapien
gacatggagttaggatgcaaccaca

SEQ ID NO: 1414947 - DNA, 25 bp, Homo sapien
tccccactgagtcttagcatgaggc

SEQ ID NO: 1414948 - DNA, 25 bp, Homo sapien
aagataatccctcactccctgaagg

SEQ ID NO: 1414949 - DNA, 25 bp, Homo sapien
gcatgaggcagcaacagaagctctc

SEQ ID NO: 1414950 - DNA, 25 bp, Homo sapien
tgtgctcttcggtgcagccagtcct

SEQ ID NO: 1414951 - DNA, 25 bp, Homo sapien
gccgccgaaggatctccagaatctg

SEQ ID NO: 1414952 - DNA, 25 bp, Homo sapien
ttcagggccaagtagatgctccggt

SEQ ID NO: 1414953 - DNA, 25 bp, Homo sapien
cagcgtgtattcaccattgagggca

SEQ ID NO: 1414954 - DNA, 25 bp, Homo sapien
cttgctgcaaccagaaccgtcccct

SEQ ID NO: 1414955 - DNA, 25 bp, Homo sapien
tcccctccgcacaccatgcacttgt

SEQ ID NO: 1414956 - DNA, 25 bp, Homo sapien
gccaatgatgcgatcacagccagca

SEQ ID NO: 1414957 - DNA, 25 bp, Homo sapien
gccagcatggatgcatcggccctgg

SEQ ID NO: 1414958 - DNA, 25 bp, Homo sapien
ggtggttgtaggcagcacactgctc

SEQ ID NO: 1414959 - DNA, 25 bp, Homo sapien
tgaagaggtcggtgcggtggttgta

SEQ ID NO: 1414960 - DNA, 25 bp, Homo sapien
ggccacgcctgtgtagcgaggaacc

SEQ ID NO: 1414961 - DNA, 25 bp, Homo sapien
ctgtgtagcgaggaacccagtccat

SEQ ID NO: 1414962 - DNA, 25 bp, Homo sapien
ggtccgagagcagtcaccccatggt

SEQ ID NO: 1414963 - DNA, 25 bp, Homo sapien
agcgggtacggcggccctcacagta

SEQ ID NO: 1414964 - DNA, 25 bp, Homo sapien
ctcgtgcagtctcgggaggagaact

SEQ ID NO: 1414965 - DNA, 25 bp, Homo sapien
accattccgggggacaggcctcgtg

SEQ ID NO: 1414966 - DNA, 25 bp, Homo sapien
ccttgccagggaaagtcacaggcag

SEQ ID NO: 1414967 - DNA, 25 bp, Homo sapien
tcgggcccgaaggtcagctggcact

SEQ ID NO: 1414968 - DNA, 25 bp, Homo sapien
cactggcggtcagcatcatagtcct

SEQ ID NO: 1414969 - DNA, 25 bp, Homo sapien
tcacaggcagatgcaatggagcctc

SEQ ID NO: 1414970 - DNA, 25 bp, Homo sapien
agtcagtgatgaagcgggcactgca

SEQ ID NO: 1414971 - DNA, 25 bp, Homo sapien
aaaggcccattcaaactgatgcatg

SEQ ID NO: 1414972 - DNA, 25 bp, Homo sapien
cagggctcctcaggatccacatgag

SEQ ID NO: 1414973 - DNA, 25 bp, Homo sapien
ccatgacatggcgagaggtgctcaa

SEQ ID NO: 1414974 - DNA, 25 bp, Homo sapien
tatgtagccccgtctctttctctgt

SEQ ID NO: 1414975 - DNA, 25 bp, Homo sapien
gagggactccataataaatctggct

SEQ ID NO: 1414976 - DNA, 25 bp, Homo sapien
gagcaaaggccctgataggatctga

SEQ ID NO: 1414977 - DNA, 25 bp, Homo sapien
caaaatatactcagggtccctccct

SEQ ID NO: 1414978 - DNA, 25 bp, Homo sapien
taatagccctatacctaggcctggg

SEQ ID NO: 1414979 - DNA, 25 bp, Homo sapien
actgtggtgaacttgctaccccctc

SEQ ID NO: 1414980 - DNA, 25 bp, Homo sapien
gggacccccattaacactgtggtga

SEQ ID NO: 1414981 - DNA, 25 bp, Homo sapien
agaggagtaatagccctatacctag

SEQ ID NO: 1414982 - DNA, 25 bp, Homo sapien
tgtcgcaagtggagactccacacag

SEQ ID NO: 1414983 - DNA, 25 bp, Homo sapien
cagcgtgtcgcaagtggagactcca

SEQ ID NO: 1414984 - DNA, 25 bp, Homo sapien
catacccagcgtgtcgcaagtggag

SEQ ID NO: 1414985 - DNA, 25 bp, Homo sapien
agccgggtcacagacggtgcccaca

SEQ ID NO: 1414986 - DNA, 25 bp, Homo sapien
tggagagggatcatagaaggtgcat

SEQ ID NO: 1414987 - DNA, 25 bp, Homo sapien
agattcccggggacctgggcactga

SEQ ID NO: 1414988 - DNA, 25 bp, Homo sapien
ttgggttgagatccagattcccggg

SEQ ID NO: 1414989 - DNA, 25 bp, Homo sapien
gccaagacacctgggtccattgggt

SEQ ID NO: 1414990 - DNA, 25 bp, Homo sapien
tggctggggcaaggcaccatgtcac

SEQ ID NO: 1414991 - DNA, 25 bp, Homo sapien
gcaccatgtcacacaactccaggaa

SEQ ID NO: 1414992 - DNA, 25 bp, Homo sapien
ccaggaacatcatttgcatcatagt

SEQ ID NO: 1414993 - DNA, 25 bp, Homo sapien
caactccaggaacatcatttgcatc

SEQ ID NO: 1414994 - DNA, 25 bp, Homo sapien
atgtagtggcgcttcttagaattgt

SEQ ID NO: 1414995 - DNA, 25 bp, Homo sapien
cagtgcatggcctgcggtgctgact

SEQ ID NO: 1414996 - DNA, 25 bp, Homo sapien
gtgcagtgcatggcctgcggtgctg

SEQ ID NO: 1414997 - DNA, 25 bp, Homo sapien
ctatgtagtggcgcttcttagaatt

SEQ ID NO: 1414998 - DNA, 25 bp, Homo sapien
tcaccaccaagctgacaggattgcg

SEQ ID NO: 1414999 - DNA, 25 bp, Homo sapien
tgttagcaggtagcgctttagcccc

SEQ ID NO: 1415000 - DNA, 25 bp, Homo sapien
gcaccgtggaatgcggccatcttgt

SEQ ID NO: 1415001 - DNA, 25 bp, Homo sapien
cagaatggctgtgtcaaagtggtca

SEQ ID NO: 1415002 - DNA, 25 bp, Homo sapien
agatcctgaaatagcctctcagacc

SEQ ID NO: 1415003 - DNA, 25 bp, Homo sapien
ggaagatcctgaaatagcctctcag

SEQ ID NO: 1415004 - DNA, 25 bp, Homo sapien
gaggaagatcctgaaatagcctctc

SEQ ID NO: 1415005 - DNA, 25 bp, Homo sapien
gaagatcctgaaatagcctctcaga

SEQ ID NO: 1415006 - DNA, 25 bp, Homo sapien
tctggaactcagcatagtcagctgg

SEQ ID NO: 1415007 - DNA, 25 bp, Homo sapien
ccacgggattcctgactcctggcgg

SEQ ID NO: 1415008 - DNA, 25 bp, Homo sapien
caaatctcagggcttttgtggtaac

SEQ ID NO: 1415009 - DNA, 25 bp, Homo sapien
gactcctggcgggtcttggttgggc

SEQ ID NO: 1415010 - DNA, 25 bp, Homo sapien
ctgggctgcaacgtgtctgccctgt

SEQ ID NO: 1415011 - DNA, 25 bp, Homo sapien
gctgcaacgtgtctgccctgtgtgg

SEQ ID NO: 1415012 - DNA, 25 bp, Homo sapien
ccctgtgtggttggaggaacgattc

SEQ ID NO: 1415013 - DNA, 25 bp, Homo sapien
cctatgggaccagggctagagggct

SEQ ID NO: 1415014 - DNA, 25 bp, Homo sapien
ttgcacatgggaccttgaccgctgg

SEQ ID NO: 1415015 - DNA, 25 bp, Homo sapien
aagaggagccttgacgttgcacatg

SEQ ID NO: 1415016 - DNA, 25 bp, Homo sapien
attgtaacacgcctaacagggctcc

SEQ ID NO: 1415017 - DNA, 25 bp, Homo sapien
tcttccggcgtaggatgtgagcccc

SEQ ID NO: 1415018 - DNA, 25 bp, Homo sapien
cctcccgggatgcgagcctgtctgg

SEQ ID NO: 1415019 - DNA, 25 bp, Homo sapien
accagccaggagagcggcacaatgg

SEQ ID NO: 1415020 - DNA, 25 bp, Homo sapien
caccagccaggagagcggcacaatg

SEQ ID NO: 1415021 - DNA, 25 bp, Homo sapien
cgggatgcgagcctgtctgggacat

SEQ ID NO: 1415022 - DNA, 25 bp, Homo sapien
tcctttcctggatctttgtctctcc

SEQ ID NO: 1415023 - DNA, 25 bp, Homo sapien
aagtcctccacaccctagctttgga

SEQ ID NO: 1415024 - DNA, 25 bp, Homo sapien
ggactgaggccgtctagggcaccaa

SEQ ID NO: 1415025 - DNA, 25 bp, Homo sapien
tgtctctctcgtgcatatgtgtctg

SEQ ID NO: 1415026 - DNA, 25 bp, Homo sapien
cccctccaaagcccagaacagccat

SEQ ID NO: 1415027 - DNA, 25 bp, Homo sapien
tatcgatgcaagatcaaggctcctg

SEQ ID NO: 1415028 - DNA, 25 bp, Homo sapien
tatactgccattgaggctcccaagg

SEQ ID NO: 1415029 - DNA, 25 bp, Homo sapien
gcacccggccatataagagattctt

SEQ ID NO: 1415030 - DNA, 25 bp, Homo sapien
catgtggctttagtctccctgaggg

SEQ ID NO: 1415031 - DNA, 25 bp, Homo sapien
cagatgctgtttacggatatttata

SEQ ID NO: 1415032 - DNA, 25 bp, Homo sapien
taatgctcagatgctgtttacggat

SEQ ID NO: 1415033 - DNA, 25 bp, Homo sapien
gttaaagactaatgctcagatgctg

SEQ ID NO: 1415034 - DNA, 25 bp, Homo sapien
ctcctccctgttaaagactaatgct

SEQ ID NO: 1415035 - DNA, 25 bp, Homo sapien
gttggaagacaatggtctggacact

SEQ ID NO: 1415036 - DNA, 25 bp, Homo sapien
gtgggtagggacaggagctctagga

SEQ ID NO: 1415037 - DNA, 25 bp, Homo sapien
caggagctctaggactggccagtgg

SEQ ID NO: 1415038 - DNA, 25 bp, Homo sapien
aggagctctaggactggccagtggg

SEQ ID NO: 1415039 - DNA, 25 bp, Homo sapien
ggcaggctgtgttccaagttccacg

SEQ ID NO: 1415040 - DNA, 25 bp, Homo sapien
tgttccaagttccacgaaatagctc

SEQ ID NO: 1415041 - DNA, 25 bp, Homo sapien
cacgaaatagctcaagaagttaacc

SEQ ID NO: 1415042 - DNA, 25 bp, Homo sapien
tagctcaagaagttaaccagttccg

SEQ ID NO: 1415043 - DNA, 25 bp, Homo sapien
cagctgctcctttgacttttcaaag

SEQ ID NO: 1415044 - DNA, 25 bp, Homo sapien
gctgctcctttgacttttcaaagta

SEQ ID NO: 1415045 - DNA, 25 bp, Homo sapien
tgctcctttgacttttcaaagtaag

SEQ ID NO: 1415046 - DNA, 25 bp, Homo sapien
agctgctcctttgacttttcaaagt

SEQ ID NO: 1415047 - DNA, 25 bp, Homo sapien
aatctgagggaccctaggcactggc

SEQ ID NO: 1415048 - DNA, 25 bp, Homo sapien
gattagagtttaatctgagggaccc

SEQ ID NO: 1415049 - DNA, 25 bp, Homo sapien
taggtgaggggattagagtttaatc

SEQ ID NO: 1415050 - DNA, 25 bp, Homo sapien
atctgagggaccctaggcactggca

SEQ ID NO: 1415051 - DNA, 25 bp, Homo sapien
cctttgctaggtagagggacagact

SEQ ID NO: 1415052 - DNA, 25 bp, Homo sapien
cctaggtaggaatagagtcaagacc

SEQ ID NO: 1415053 - DNA, 25 bp, Homo sapien
tagagactgaaattcaaggcccagt

SEQ ID NO: 1415054 - DNA, 25 bp, Homo sapien
tcgcatggcaaagcccctaggtagg

SEQ ID NO: 1415055 - DNA, 25 bp, Homo sapien
ggtccttgccatagtcagtcacggt

SEQ ID NO: 1415056 - DNA, 25 bp, Homo sapien
tgaagctctgggctcttgaccttct

SEQ ID NO: 1415057 - DNA, 25 bp, Homo sapien
ttggcctcggcctgaagctctgggc

SEQ ID NO: 1415058 - DNA, 25 bp, Homo sapien
ccatcaggtccttgccatagtcagt

SEQ ID NO: 1415059 - DNA, 25 bp, Homo sapien
tcctttgcctgtctccgaaccaaag

SEQ ID NO: 1415060 - DNA, 25 bp, Homo sapien
ctttgcctgtctccgaaccaaagct

SEQ ID NO: 1415061 - DNA, 25 bp, Homo sapien
ctgagaaaccaggctctccacacat

SEQ ID NO: 1415062 - DNA, 25 bp, Homo sapien
agaaaccaggctctccacacatggc

SEQ ID NO: 1415063 - DNA, 25 bp, Homo sapien
tctgggctttagagagggaatgatc

SEQ ID NO: 1415064 - DNA, 25 bp, Homo sapien
tccttttgagccctttggttgccag

SEQ ID NO: 1415065 - DNA, 25 bp, Homo sapien
tccagccagatctttggatgggctt

SEQ ID NO: 1415066 - DNA, 25 bp, Homo sapien
gccagatctttggatgggctttctg

SEQ ID NO: 1415067 - DNA, 25 bp, Homo sapien
atataagagcacaggcagataggta

SEQ ID NO: 1415068 - DNA, 25 bp, Homo sapien
ggatataagagcacaggcagatagg

SEQ ID NO: 1415069 - DNA, 25 bp, Homo sapien
ctggatataagagcacaggcagata

SEQ ID NO: 1415070 - DNA, 25 bp, Homo sapien
tttggccccctctccatatcacacc

SEQ ID NO: 1415071 - DNA, 25 bp, Homo sapien
gatggtgaggagtagcacagttgct

SEQ ID NO: 1415072 - DNA, 25 bp, Homo sapien
ctgcagatggtgaggagtagcacag

SEQ ID NO: 1415073 - DNA, 25 bp, Homo sapien
aggagtagcacagttgctgcgagca

SEQ ID NO: 1415074 - DNA, 25 bp, Homo sapien
tagcacagttgctgcgagcagcttc

SEQ ID NO: 1415075 - DNA, 25 bp, Homo sapien
agctcctccccagggatctccctac

SEQ ID NO: 1415076 - DNA, 25 bp, Homo sapien
gggacactgaagccaaatgggcttc

SEQ ID NO: 1415077 - DNA, 25 bp, Homo sapien
gtttgggggacactgaagccaaatg

SEQ ID NO: 1415078 - DNA, 25 bp, Homo sapien
cactgaagccaaatgggcttcagct

SEQ ID NO: 1415079 - DNA, 25 bp, Homo sapien
tgcccattccaacctggctctctcc

SEQ ID NO: 1415080 - DNA, 25 bp, Homo sapien
cagcgtctctgtccttggtgtctgt

SEQ ID NO: 1415081 - DNA, 25 bp, Homo sapien
gcgtctctgtccttggtgtctgtgc

SEQ ID NO: 1415082 - DNA, 25 bp, Homo sapien
ctagccagcgtctctgtccttggtg

SEQ ID NO: 1415083 - DNA, 25 bp, Homo sapien
gccagcgtctctgtccttggtgtct

SEQ ID NO: 1415084 - DNA, 25 bp, Homo sapien
ggcagttattgctttagtctttcat

SEQ ID NO: 1415085 - DNA, 25 bp, Homo sapien
ttcattgcaaccactgggctccctt

SEQ ID NO: 1415086 - DNA, 25 bp, Homo sapien
gcttctttacctcttagccctgagg

SEQ ID NO: 1415087 - DNA, 25 bp, Homo sapien
ctatccccatgaccgcatgaagagg

SEQ ID NO: 1415088 - DNA, 25 bp, Homo sapien
ggcctcattaatgctccggagctca

SEQ ID NO: 1415089 - DNA, 25 bp, Homo sapien
gcaggcctagcaacttcgcatacag

SEQ ID NO: 1415090 - DNA, 25 bp, Homo sapien
tgtgctggatttggtacccgtaggc

SEQ ID NO: 1415091 - DNA, 25 bp, Homo sapien
tctcctggagcagcggcatcatggc

SEQ ID NO: 1415092 - DNA, 25 bp, Homo sapien
aagcggtgcatacctcagagcctgg

SEQ ID NO: 1415093 - DNA, 25 bp, Homo sapien
caaactagctcttggaggaacgagc

SEQ ID NO: 1415094 - DNA, 25 bp, Homo sapien
catgaaactgtgaatggccctaact

SEQ ID NO: 1415095 - DNA, 25 bp, Homo sapien
gaaatcgaaggaattggcccaatgg

SEQ ID NO: 1415096 - DNA, 25 bp, Homo sapien
gatcccggggccttcgctgctggcc

SEQ ID NO: 1415097 - DNA, 25 bp, Homo sapien
tctctctgggtaactccaggtcggt

SEQ ID NO: 1415098 - DNA, 25 bp, Homo sapien
caatctcatctctctgggtaactcc

SEQ ID NO: 1415099 - DNA, 25 bp, Homo sapien
tctcatctctctgggtaactccagg

SEQ ID NO: 1415100 - DNA, 25 bp, Homo sapien
actgaggctgggatagacctagtct

SEQ ID NO: 1415101 - DNA, 25 bp, Homo sapien
gctgggatagacctagtctgcaggt

SEQ ID NO: 1415102 - DNA, 25 bp, Homo sapien
cctagtctgcaggtttgatagctag

SEQ ID NO: 1415103 - DNA, 25 bp, Homo sapien
ggatagacctagtctgcaggtttga

SEQ ID NO: 1415104 - DNA, 25 bp, Homo sapien
ggcctgggtggatggactcaaggag

SEQ ID NO: 1415105 - DNA, 25 bp, Homo sapien
ctgggtggatggactcaaggagctg

SEQ ID NO: 1415106 - DNA, 25 bp, Homo sapien
gcagttttcgtagtgttccatggaa

SEQ ID NO: 1415107 - DNA, 25 bp, Homo sapien
ctcttggagctgcagttttcgtagt

SEQ ID NO: 1415108 - DNA, 25 bp, Homo sapien
gcaactccaaaaactctacctggaa

SEQ ID NO: 1415109 - DNA, 25 bp, Homo sapien
catggaagtgaaagagcaactccaa

SEQ ID NO: 1415110 - DNA, 25 bp, Homo sapien
ctaggattaggagcctctaggtcac

SEQ ID NO: 1415111 - DNA, 25 bp, Homo sapien
tcctgtaccatgaggacacatgccc

SEQ ID NO: 1415112 - DNA, 25 bp, Homo sapien
ctgaccacatcctgtaccatgagga

SEQ ID NO: 1415113 - DNA, 25 bp, Homo sapien
taggagcctctaggtcacctgacca

SEQ ID NO: 1415114 - DNA, 25 bp, Homo sapien
ttcaattgtgtagcgaagaggcccg

SEQ ID NO: 1415115 - DNA, 25 bp, Homo sapien
aagaggcccgcagaggaagttttgt

SEQ ID NO: 1415116 - DNA, 25 bp, Homo sapien
aagggagatctggtcttcaatgggc

SEQ ID NO: 1415117 - DNA, 25 bp, Homo sapien
tattgagtacgatgtgacagatttc

SEQ ID NO: 1415118 - DNA, 25 bp, Homo sapien
aacttgatgacttgcagtaccatga

SEQ ID NO: 1415119 - DNA, 25 bp, Homo sapien
ttgatgtctgcgaagtgtgtgacca

SEQ ID NO: 1415120 - DNA, 25 bp, Homo sapien
aaagtgttgatgtctgcgaagtgtg

SEQ ID NO: 1415121 - DNA, 25 bp, Homo sapien
tgatgacttgcagtaccatgaaagt

SEQ ID NO: 1415122 - DNA, 25 bp, Homo sapien
ggtgatggatgaacagatgagctgg

SEQ ID NO: 1415123 - DNA, 25 bp, Homo sapien
tgatggatgaacagatgagctggag

SEQ ID NO: 1415124 - DNA, 25 bp, Homo sapien
ctggtgatggatgaacagatgagct

SEQ ID NO: 1415125 - DNA, 25 bp, Homo sapien
gatggatgaacagatgagctggagg

SEQ ID NO: 1415126 - DNA, 25 bp, Homo sapien
cacaggtgtttgctgtgcccgccgc

SEQ ID NO: 1415127 - DNA, 25 bp, Homo sapien
aaactgttcaaacatggtgcccatg

SEQ ID NO: 1415128 - DNA, 25 bp, Homo sapien
tttgctcgccgcaatgccagggctt

SEQ ID NO: 1415129 - DNA, 25 bp, Homo sapien
gctcttcttgctccttactcagttg

SEQ ID NO: 1415130 - DNA, 25 bp, Homo sapien
acaaagctgttgagaccagcagagc

SEQ ID NO: 1415131 - DNA, 25 bp, Homo sapien
aggcaagagatcatgacaaagctgt

SEQ ID NO: 1415132 - DNA, 25 bp, Homo sapien
gacaaagctgttgagaccagcagag

SEQ ID NO: 1415133 - DNA, 25 bp, Homo sapien
tgtgaagaactgcagcagaaaactg

SEQ ID NO: 1415134 - DNA, 25 bp, Homo sapien
gtgaagaactgcagcagaaaactgc

SEQ ID NO: 1415135 - DNA, 25 bp, Homo sapien
ctgtgaagaactgcagcagaaaact

SEQ ID NO: 1415136 - DNA, 25 bp, Homo sapien
tgaagaactgcagcagaaaactgca

SEQ ID NO: 1415137 - DNA, 25 bp, Homo sapien
tgtgggagagctagatcatgagatc

SEQ ID NO: 1415138 - DNA, 25 bp, Homo sapien
gcctgctatgtagagaatgcactgt

SEQ ID NO: 1415139 - DNA, 25 bp, Homo sapien
gacaaagacagacgcagtcaatgga

SEQ ID NO: 1415140 - DNA, 25 bp, Homo sapien
tcaaaaagagtactgtgcctgctat

SEQ ID NO: 1415141 - DNA, 25 bp, Homo sapien
cagtggcgcctctgagtcttgctga

SEQ ID NO: 1415142 - DNA, 25 bp, Homo sapien
atctaagcacttctgcaacctgcag

SEQ ID NO: 1415143 - DNA, 25 bp, Homo sapien
agtcttgctgacttcacagcttcca

SEQ ID NO: 1415144 - DNA, 25 bp, Homo sapien
ggtgggaccaatgcttttgctgact

SEQ ID NO: 1415145 - DNA, 25 bp, Homo sapien
taatctgagctgtgcccaaaggtcc

SEQ ID NO: 1415146 - DNA, 25 bp, Homo sapien
cagccacagggtagttagactctaa

SEQ ID NO: 1415147 - DNA, 25 bp, Homo sapien
tctggtgaaatggactaatctgagc

SEQ ID NO: 1415148 - DNA, 25 bp, Homo sapien
tactagctaggtgcttcacaggcag

SEQ ID NO: 1415149 - DNA, 25 bp, Homo sapien
gcagccctcacaagtcagcgcatta

SEQ ID NO: 1415150 - DNA, 25 bp, Homo sapien
gccctcacaagtcagcgcattaaag

SEQ ID NO: 1415151 - DNA, 25 bp, Homo sapien
cattaaagtggtagcctgtggcttg

SEQ ID NO: 1415152 - DNA, 25 bp, Homo sapien
aagtcagcgcattaaagtggtagcc

SEQ ID NO: 1415153 - DNA, 25 bp, Homo sapien
gacgtcacgtgttggggtggctgtc

SEQ ID NO: 1415154 - DNA, 25 bp, Homo sapien
gtgttggggtggctgtcacagactc

SEQ ID NO: 1415155 - DNA, 25 bp, Homo sapien
tcacgtgttggggtggctgtcacag

SEQ ID NO: 1415156 - DNA, 25 bp, Homo sapien
acgtcacgtgttggggtggctgtca

SEQ ID NO: 1415157 - DNA, 25 bp, Homo sapien
gaatctggtatggaatgcctctccc

SEQ ID NO: 1415158 - DNA, 25 bp, Homo sapien
tatgacccgtagtatctggaaaaca

SEQ ID NO: 1415159 - DNA, 25 bp, Homo sapien
cctctgatctcaggagttgccagtg

SEQ ID NO: 1415160 - DNA, 25 bp, Homo sapien
tgattggagttagggattatgaccc

SEQ ID NO: 1415161 - DNA, 25 bp, Homo sapien
gggttgccttgggaacagactgctt

SEQ ID NO: 1415162 - DNA, 25 bp, Homo sapien
ccagggattacaccgagccttgttc

SEQ ID NO: 1415163 - DNA, 25 bp, Homo sapien
cagatggagagtggaatctgctgca

SEQ ID NO: 1415164 - DNA, 25 bp, Homo sapien
tcttggagaagtccaccttgaagtt

SEQ ID NO: 1415165 - DNA, 25 bp, Homo sapien
tgggctccgagaatcccgggtgcca

SEQ ID NO: 1415166 - DNA, 25 bp, Homo sapien
taccgagctgagtataaaaggtggg

SEQ ID NO: 1415167 - DNA, 25 bp, Homo sapien
ctattggtcgggctggaggcgggta

SEQ ID NO: 1415168 - DNA, 25 bp, Homo sapien
ctgagcggctctgacaggacgggtc

SEQ ID NO: 1415169 - DNA, 25 bp, Homo sapien
ggctgcggagatgagcgaggtgagc

SEQ ID NO: 1415170 - DNA, 25 bp, Homo sapien
gcctcgcgcgccctgtccggctgcg

SEQ ID NO: 1415171 - DNA, 25 bp, Homo sapien
agatgagcgaggtgagcggtgcggc

SEQ ID NO: 1415172 - DNA, 25 bp, Homo sapien
cggagatgagcgaggtgagcggtgc

SEQ ID NO: 1415173 - DNA, 25 bp, Homo sapien
gctgagctctcaggtggtaggtcat

SEQ ID NO: 1415174 - DNA, 25 bp, Homo sapien
gggcgctgggaaacgattggaagac

SEQ ID NO: 1415175 - DNA, 25 bp, Homo sapien
ttggaatcggctgtagagtccggaa

SEQ ID NO: 1415176 - DNA, 25 bp, Homo sapien
tccctactgtggacggcgcttttgg

SEQ ID NO: 1415177 - DNA, 25 bp, Homo sapien
tagttcagtacatatccacgtcttc

SEQ ID NO: 1415178 - DNA, 25 bp, Homo sapien
tatggagacagtacagcctgttggc

SEQ ID NO: 1415179 - DNA, 25 bp, Homo sapien
aaagaatagttcaagccaggtgcag

SEQ ID NO: 1415180 - DNA, 25 bp, Homo sapien
tgcagtggcattacacctattatct

SEQ ID NO: 1415181 - DNA, 25 bp, Homo sapien
tgatgaatgtccagatgaagtagcc

SEQ ID NO: 1415182 - DNA, 25 bp, Homo sapien
gactccaaaagtaccaagtgcagga

SEQ ID NO: 1415183 - DNA, 25 bp, Homo sapien
tccatctgagcagggaacctgggaa

SEQ ID NO: 1415184 - DNA, 25 bp, Homo sapien
gcagaacccttacgtctggcagtca

SEQ ID NO: 1415185 - DNA, 25 bp, Homo sapien
aggttgtagcaagcggagatcatgc

SEQ ID NO: 1415186 - DNA, 25 bp, Homo sapien
atggaggttgtagcaagcggagatc

SEQ ID NO: 1415187 - DNA, 25 bp, Homo sapien
gagatggaggttgtagcaagcggag

SEQ ID NO: 1415188 - DNA, 25 bp, Homo sapien
gaggttgtagcaagcggagatcatg

SEQ ID NO: 1415189 - DNA, 25 bp, Homo sapien
gactccagcctgggcaacaagagtg

SEQ ID NO: 1415190 - DNA, 25 bp, Homo sapien
tgagctgagatagcgccattggact

SEQ ID NO: 1415191 - DNA, 25 bp, Homo sapien
gctgagatagcgccattggactcca

SEQ ID NO: 1415192 - DNA, 25 bp, Homo sapien
ggactccagcctgggcaacaagagt

SEQ ID NO: 1415193 - DNA, 25 bp, Homo sapien
aacttgccctcacaggaatcactct

SEQ ID NO: 1415194 - DNA, 25 bp, Homo sapien
tgctcggtccctgaaaacttgccct

SEQ ID NO: 1415195 - DNA, 25 bp, Homo sapien
tgtccctgctgtgctcggtccctga

SEQ ID NO: 1415196 - DNA, 25 bp, Homo sapien
aactgtttgcagtgggagtggcttc

SEQ ID NO: 1415197 - DNA, 25 bp, Homo sapien
tagttacagtctcgaccaggtctct

SEQ ID NO: 1415198 - DNA, 25 bp, Homo sapien
ggtggggcagttagtcagaggccag

SEQ ID NO: 1415199 - DNA, 25 bp, Homo sapien
tacagtctcgaccaggtctctgctg

SEQ ID NO: 1415200 - DNA, 25 bp, Homo sapien
gttacagtctcgaccaggtctctgc

SEQ ID NO: 1415201 - DNA, 25 bp, Homo sapien
cattggtcctcagtcatgggtgtaa

SEQ ID NO: 1415202 - DNA, 25 bp, Homo sapien
aaatcctaagaatcccctgtggctg

SEQ ID NO: 1415203 - DNA, 25 bp, Homo sapien
aaaccctgaaggagagtctgatctg

SEQ ID NO: 1415204 - DNA, 25 bp, Homo sapien
gaaccaatgctatactgaagtgtga

SEQ ID NO: 1415205 - DNA, 25 bp, Homo sapien
ggtaggattagctcctgggctccca

SEQ ID NO: 1415206 - DNA, 25 bp, Homo sapien
ggtgaggggtaggattagctcctgg

SEQ ID NO: 1415207 - DNA, 25 bp, Homo sapien
accaaacacacagcccccggggcag

SEQ ID NO: 1415208 - DNA, 25 bp, Homo sapien
gcagagggtatcaaagtccctttct

SEQ ID NO: 1415209 - DNA, 25 bp, Homo sapien
ctagacgggggtaagaggagcctag

SEQ ID NO: 1415210 - DNA, 25 bp, Homo sapien
aggagcctaggtccccctgctctgg

SEQ ID NO: 1415211 - DNA, 25 bp, Homo sapien
ttacatctcaaagggaggtgagggc

SEQ ID NO: 1415212 - DNA, 25 bp, Homo sapien
cttacatctcaaagggaggtgaggg

SEQ ID NO: 1415213 - DNA, 25 bp, Homo sapien
ggacttgacagcaggccggagctcc

SEQ ID NO: 1415214 - DNA, 25 bp, Homo sapien
atctcgatgaccatcacctttgggc

SEQ ID NO: 1415215 - DNA, 25 bp, Homo sapien
ccatcatgttcttgagggcgttttt

SEQ ID NO: 1415216 - DNA, 25 bp, Homo sapien
tctgctcatcctttcgtagctccat

SEQ ID NO: 1415217 - DNA, 25 bp, Homo sapien
tatccttgcgagactcccccagccc

SEQ ID NO: 1415218 - DNA, 25 bp, Homo sapien
tccttgcgagactcccccagcccct

SEQ ID NO: 1415219 - DNA, 25 bp, Homo sapien
tcttatccttgcgagactcccccag

SEQ ID NO: 1415220 - DNA, 25 bp, Homo sapien
atttcttatccttgcgagactcccc

SEQ ID NO: 1415221 - DNA, 25 bp, Homo sapien
tggtccagcattgcatacagcactg

SEQ ID NO: 1415222 - DNA, 25 bp, Homo sapien
ccagcattgcatacagcactggcgt

SEQ ID NO: 1415223 - DNA, 25 bp, Homo sapien
ctgtggtccagcattgcatacagca

SEQ ID NO: 1415224 - DNA, 25 bp, Homo sapien
tccagcattgcatacagcactggcg

SEQ ID NO: 1415225 - DNA, 25 bp, Homo sapien
ttgtctaggccccaagtcccgctaa

SEQ ID NO: 1415226 - DNA, 25 bp, Homo sapien
caccgagcgactggggcttgactgt

SEQ ID NO: 1415227 - DNA, 25 bp, Homo sapien
cacacatcagtcaccgagcgactgg

SEQ ID NO: 1415228 - DNA, 25 bp, Homo sapien
ttcccatcttgtctaggccccaagt

SEQ ID NO: 1415229 - DNA, 25 bp, Homo sapien
tgccgcccgcgcttcgacgcgtcct

SEQ ID NO: 1415230 - DNA, 25 bp, Homo sapien
gcttcgacgcgtcctttcctggctt

SEQ ID NO: 1415231 - DNA, 25 bp, Homo sapien
gcgcttcgacgcgtcctttcctggc

SEQ ID NO: 1415232 - DNA, 25 bp, Homo sapien
cccgcgcttcgacgcgtcctttcct

SEQ ID NO: 1415233 - DNA, 25 bp, Homo sapien
ccagcagtaccgaaccacgtagaaa

SEQ ID NO: 1415234 - DNA, 25 bp, Homo sapien
tcacagctcccagaacgaccccgta

SEQ ID NO: 1415235 - DNA, 25 bp, Homo sapien
taccgaaccacgtagaaaagcagca

SEQ ID NO: 1415236 - DNA, 25 bp, Homo sapien
tgcctgcgtagccagcagtaccgaa

SEQ ID NO: 1415237 - DNA, 25 bp, Homo sapien
tctggagggtttttgacgtcacaag

SEQ ID NO: 1415238 - DNA, 25 bp, Homo sapien
tacagcgtgacctgagaggtcttgc

SEQ ID NO: 1415239 - DNA, 25 bp, Homo sapien
aggtcttgcccactatgtctggagg

SEQ ID NO: 1415240 - DNA, 25 bp, Homo sapien
tttttcaaagacatacagcgtgacc

SEQ ID NO: 1415241 - DNA, 25 bp, Homo sapien
tacccactggatgcgctctttgaag

SEQ ID NO: 1415242 - DNA, 25 bp, Homo sapien
tagggttgtcccttggcatagtgga

SEQ ID NO: 1415243 - DNA, 25 bp, Homo sapien
aaggtccccacctcgtcaatgtagg

SEQ ID NO: 1415244 - DNA, 25 bp, Homo sapien
gttgtgtatgacaatggagccatcc

SEQ ID NO: 1415245 - DNA, 25 bp, Homo sapien
tgaaggagatgtcatctgagaccca

SEQ ID NO: 1415246 - DNA, 25 bp, Homo sapien
ccccttcgggctggtagcgccaggt

SEQ ID NO: 1415247 - DNA, 25 bp, Homo sapien
tggacctccctgtcggtgtaaacca

SEQ ID NO: 1415248 - DNA, 25 bp, Homo sapien
tgtcggtgtaaaccacgatggcctg

SEQ ID NO: 1415249 - DNA, 25 bp, Homo sapien
tctattcctcctgttacaatatcaa

SEQ ID NO: 1415250 - DNA, 25 bp, Homo sapien
attcactggctctaacttctattcc

SEQ ID NO: 1415251 - DNA, 25 bp, Homo sapien
taacaagggagataattcactggct

SEQ ID NO: 1415252 - DNA, 25 bp, Homo sapien
taattcactggctctaacttctatt

SEQ ID NO: 1415253 - DNA, 25 bp, Homo sapien
gcagcacagccaggatagggctggg

SEQ ID NO: 1415254 - DNA, 25 bp, Homo sapien
gcacagccaggatagggctggggct

SEQ ID NO: 1415255 - DNA, 25 bp, Homo sapien
agaagagaagagcagcacagccagg

SEQ ID NO: 1415256 - DNA, 25 bp, Homo sapien
ccaaagaagagaagagcagcacagc

SEQ ID NO: 1415257 - DNA, 25 bp, Homo sapien
tggggcaggggcaggggcccggagc

SEQ ID NO: 1415258 - DNA, 25 bp, Homo sapien
ggggcaggggcaggggcccggagca

SEQ ID NO: 1415259 - DNA, 25 bp, Homo sapien
gctggggcaggggcaggggcccgga

SEQ ID NO: 1415260 - DNA, 25 bp, Homo sapien
gggcaggggcaggggcccggagcat

SEQ ID NO: 1415261 - DNA, 25 bp, Homo sapien
tagcgctgaaacaacgaacaaggga

SEQ ID NO: 1415262 - DNA, 25 bp, Homo sapien
cattgtcctcggctagtgggcgcct

SEQ ID NO: 1415263 - DNA, 25 bp, Homo sapien
tgggtgtcacccacatagcgctgaa

SEQ ID NO: 1415264 - DNA, 25 bp, Homo sapien
aaataggagttgctctagcctgtcc

SEQ ID NO: 1415265 - DNA, 25 bp, Homo sapien
tacgcaggtggaacgtagactgcag

SEQ ID NO: 1415266 - DNA, 25 bp, Homo sapien
gattttgagccagcggcgtttctgc

SEQ ID NO: 1415267 - DNA, 25 bp, Homo sapien
aaatcctggcaaattccggtagaag

SEQ ID NO: 1415268 - DNA, 25 bp, Homo sapien
caagtccgccgtttgctgtttggga

SEQ ID NO: 1415269 - DNA, 25 bp, Homo sapien
aaaaaattgtactgtgttatacaat

SEQ ID NO: 1415270 - DNA, 25 bp, Homo sapien
aaaaattgtactgtgttatacaata

SEQ ID NO: 1415271 - DNA, 25 bp, Homo sapien
tctccctagttttgcttccaagaag

SEQ ID NO: 1415272 - DNA, 25 bp, Homo sapien
caactgtcagatggatgcttttgcc

SEQ ID NO: 1415273 - DNA, 25 bp, Homo sapien
ccttagagacaagcactttctggat

SEQ ID NO: 1415274 - DNA, 25 bp, Homo sapien
tacttccaaatcatagccttagaga

SEQ ID NO: 1415275 - DNA, 25 bp, Homo sapien
caagagagtcaaaattagtgttttg

SEQ ID NO: 1415276 - DNA, 25 bp, Homo sapien
acaagagagtcaaaattagtgtttt

SEQ ID NO: 1415277 - DNA, 25 bp, Homo sapien
aagagagtcaaaattagtgttttgt

SEQ ID NO: 1415278 - DNA, 25 bp, Homo sapien
agagagtcaaaattagtgttttgtt

SEQ ID NO: 1415279 - DNA, 25 bp, Homo sapien
gatgaggtggctgcaaaaactcccc

SEQ ID NO: 1415280 - DNA, 25 bp, Homo sapien
tagtctgtcccagctagagggagat

SEQ ID NO: 1415281 - DNA, 25 bp, Homo sapien
tatagctttggacacgaggaagatc

SEQ ID NO: 1415282 - DNA, 25 bp, Homo sapien
tctcttcattggtgagagcccaggc

SEQ ID NO: 1415283 - DNA, 25 bp, Homo sapien
caaaatttccctgtttcacagttct

SEQ ID NO: 1415284 - DNA, 25 bp, Homo sapien
aatttccctgtttcacagttctgac

SEQ ID NO: 1415285 - DNA, 25 bp, Homo sapien
tccctgtttcacagttctgactggg

SEQ ID NO: 1415286 - DNA, 25 bp, Homo sapien
ttccctgtttcacagttctgactgg

SEQ ID NO: 1415287 - DNA, 25 bp, Homo sapien
tggacctcagctagattaggccctg

SEQ ID NO: 1415288 - DNA, 25 bp, Homo sapien
gttctagcatacgtggacttccagg

SEQ ID NO: 1415289 - DNA, 25 bp, Homo sapien
tatttcactgagtcgctatacgggt

SEQ ID NO: 1415290 - DNA, 25 bp, Homo sapien
tatacgggtttttcagtgtgtggcc

SEQ ID NO: 1415291 - DNA, 25 bp, Homo sapien
ggagcttggaattatggttggactt

SEQ ID NO: 1415292 - DNA, 25 bp, Homo sapien
ttcttctgactgtctggatcatggg

SEQ ID NO: 1415293 - DNA, 25 bp, Homo sapien
ttcatctggggaattgaggttggca

SEQ ID NO: 1415294 - DNA, 25 bp, Homo sapien
cttcgtgcttgttgtacagtctttg

SEQ ID NO: 1415295 - DNA, 25 bp, Homo sapien
caccagcagttgtacgggaggtcag

SEQ ID NO: 1415296 - DNA, 25 bp, Homo sapien
cccattggaggccttgagtaaatca

SEQ ID NO: 1415297 - DNA, 25 bp, Homo sapien
gatttcaggacacagcccattggag

SEQ ID NO: 1415298 - DNA, 25 bp, Homo sapien
tctgtatccatttggtgagggaggc

SEQ ID NO: 1415299 - DNA, 25 bp, Homo sapien
cacagaaggcagtagatgaccacga

SEQ ID NO: 1415300 - DNA, 25 bp, Homo sapien
gatgaccacgatcgttggcaataat

SEQ ID NO: 1415301 - DNA, 25 bp, Homo sapien
cagtagatgaccacgatcgttggca

SEQ ID NO: 1415302 - DNA, 25 bp, Homo sapien
tcgttggcaataatttgagtgtagc

SEQ ID NO: 1415303 - DNA, 25 bp, Homo sapien
tggggagcttggtcagagaaggata

SEQ ID NO: 1415304 - DNA, 25 bp, Homo sapien
ttggggagcttggtcagagaaggat

SEQ ID NO: 1415305 - DNA, 25 bp, Homo sapien
ggggagcttggtcagagaaggatat

SEQ ID NO: 1415306 - DNA, 25 bp, Homo sapien
gcttagtgggagaccagttctgcag

SEQ ID NO: 1415307 - DNA, 25 bp, Homo sapien
tacttggatgagaaagccttttcat

SEQ ID NO: 1415308 - DNA, 25 bp, Homo sapien
cttttgttggcttagtgggagacca

SEQ ID NO: 1415309 - DNA, 25 bp, Homo sapien
gaccagttctgcagatacttggatg

SEQ ID NO: 1415310 - DNA, 25 bp, Homo sapien
ctggttggcactgtagttagtggcc

SEQ ID NO: 1415311 - DNA, 25 bp, Homo sapien
tggttggcactgtagttagtggcca

SEQ ID NO: 1415312 - DNA, 25 bp, Homo sapien
ggttggcactgtagttagtggccat

SEQ ID NO: 1415313 - DNA, 25 bp, Homo sapien
gtgctgtttacactcgttgcttggc

SEQ ID NO: 1415314 - DNA, 25 bp, Homo sapien
gctgtttacactcgttgcttggcaa

SEQ ID NO: 1415315 - DNA, 25 bp, Homo sapien
tgctgtttacactcgttgcttggca

SEQ ID NO: 1415316 - DNA, 25 bp, Homo sapien
tttacaggatgttcagtgaaaagca

SEQ ID NO: 1415317 - DNA, 25 bp, Homo sapien
ttctgataggaatgtaatgataaat

SEQ ID NO: 1415318 - DNA, 25 bp, Homo sapien
tgtttacaggatgttcagtgaaaag

SEQ ID NO: 1415319 - DNA, 25 bp, Homo sapien
gtgaaaagcaaatctccatttgatt

SEQ ID NO: 1415320 - DNA, 25 bp, Homo sapien
cagttgccttaactagttgccttgg

SEQ ID NO: 1415321 - DNA, 25 bp, Homo sapien
taacccactgttctagagagaaagg

SEQ ID NO: 1415322 - DNA, 25 bp, Homo sapien
aatgtggacaaggttatgcttcagt

SEQ ID NO: 1415323 - DNA, 25 bp, Homo sapien
taaaatccaaggtacacgctgggca

SEQ ID NO: 1415324 - DNA, 25 bp, Homo sapien
cggagactgctgttacatctctcct

SEQ ID NO: 1415325 - DNA, 25 bp, Homo sapien
tctctcggagactgctgttacatct

SEQ ID NO: 1415326 - DNA, 25 bp, Homo sapien
tccctctctcggagactgctgttac

SEQ ID NO: 1415327 - DNA, 25 bp, Homo sapien
taatattcttgataagatccccttc

SEQ ID NO: 1415328 - DNA, 25 bp, Homo sapien
tgtcactgctatggtaagtcacagc

SEQ ID NO: 1415329 - DNA, 25 bp, Homo sapien
gctatggtaagtcacagccagccag

SEQ ID NO: 1415330 - DNA, 25 bp, Homo sapien
gacacaaggtgtttcaatggtgttg

SEQ ID NO: 1415331 - DNA, 25 bp, Homo sapien
caactcaaggcccaatttgccttct

SEQ ID NO: 1415332 - DNA, 25 bp, Homo sapien
ccaatacaactcaaggcccaatttg

SEQ ID NO: 1415333 - DNA, 25 bp, Homo sapien
tctttgtccccaatacaactcaagg

SEQ ID NO: 1415334 - DNA, 25 bp, Homo sapien
tcagcgatggaagtgatccggacgc

SEQ ID NO: 1415335 - DNA, 25 bp, Homo sapien
ttcggctccgctggttcctggaaga

SEQ ID NO: 1415336 - DNA, 25 bp, Homo sapien
agcagtggttcatcctccacgccag

SEQ ID NO: 1415337 - DNA, 25 bp, Homo sapien
caggatgcgagttccgctcagggtc

SEQ ID NO: 1415338 - DNA, 25 bp, Homo sapien
ttgagaatgctgtctaggaagggac

SEQ ID NO: 1415339 - DNA, 25 bp, Homo sapien
tcctttaagaggtgaattttcagac

SEQ ID NO: 1415340 - DNA, 25 bp, Homo sapien
gtcctgctcttttgcatacctagct

SEQ ID NO: 1415341 - DNA, 25 bp, Homo sapien
ttatttctgccaattcccacatctt

SEQ ID NO: 1415342 - DNA, 25 bp, Homo sapien
cagagacaagtcatccccactatac

SEQ ID NO: 1415343 - DNA, 25 bp, Homo sapien
ccactataccctttccgaattcttg

SEQ ID NO: 1415344 - DNA, 25 bp, Homo sapien
tgaatgagcaactccaaatgattcc

SEQ ID NO: 1415345 - DNA, 25 bp, Homo sapien
gtgaatgagcaactccaaatgattc

SEQ ID NO: 1415346 - DNA, 25 bp, Homo sapien
ggccagaagaagctaggcaatccac

SEQ ID NO: 1415347 - DNA, 25 bp, Homo sapien
gaagaagctaggcaatccacccctt

SEQ ID NO: 1415348 - DNA, 25 bp, Homo sapien
ttgtggccagaagaagctaggcaat

SEQ ID NO: 1415349 - DNA, 25 bp, Homo sapien
agaagaagctaggcaatccacccct

SEQ ID NO: 1415350 - DNA, 25 bp, Homo sapien
gggtcggaagtgacgacttcattca

SEQ ID NO: 1415351 - DNA, 25 bp, Homo sapien
cattcactgagcagccatttccggt

SEQ ID NO: 1415352 - DNA, 25 bp, Homo sapien
gtccgggtcggaagtgacgacttca

SEQ ID NO: 1415353 - DNA, 25 bp, Homo sapien
tcattcactgagcagccatttccgg

SEQ ID NO: 1415354 - DNA, 25 bp, Homo sapien
gggacctttcgcgtgtgaggcgaac

SEQ ID NO: 1415355 - DNA, 25 bp, Homo sapien
ctttcgcgtgtgaggcgaacgtgat

SEQ ID NO: 1415356 - DNA, 25 bp, Homo sapien
ccggggacctttcgcgtgtgaggcg

SEQ ID NO: 1415357 - DNA, 25 bp, Homo sapien
gaacgtgataaccactacactacgg

SEQ ID NO: 1415358 - DNA, 25 bp, Homo sapien
tgtctctgacccacgagaaaagtac

SEQ ID NO: 1415359 - DNA, 25 bp, Homo sapien
aagcaggtaagtcccgggctgctcg

SEQ ID NO: 1415360 - DNA, 25 bp, Homo sapien
caaagcaggtaagtcccgggctgct

SEQ ID NO: 1415361 - DNA, 25 bp, Homo sapien
cgcagggaagtagccagcaaagcag

SEQ ID NO: 1415362 - DNA, 25 bp, Homo sapien
ggccacccacagcttcgggatcggg

SEQ ID NO: 1415363 - DNA, 25 bp, Homo sapien
ttcctgatcctgtcgggtccctaag

SEQ ID NO: 1415364 - DNA, 25 bp, Homo sapien
tcaggaaacttccggcgcagtcagg

SEQ ID NO: 1415365 - DNA, 25 bp, Homo sapien
aggcgtccccgaatgctcgtcgtgg

SEQ ID NO: 1415366 - DNA, 25 bp, Homo sapien
ccagagcccggagatagttgggcag

SEQ ID NO: 1415367 - DNA, 25 bp, Homo sapien
taggtagaaccccaagatagctgtg

SEQ ID NO: 1415368 - DNA, 25 bp, Homo sapien
gaaagagaccgtgaagagtattcct

SEQ ID NO: 1415369 - DNA, 25 bp, Homo sapien
tcttttccactgctgcgggtgaaat

SEQ ID NO: 1415370 - DNA, 25 bp, Homo sapien
tattcctggagggactcaagatacc

SEQ ID NO: 1415371 - DNA, 25 bp, Homo sapien
tgttgtatgatacaaatgtccaggg

SEQ ID NO: 1415372 - DNA, 25 bp, Homo sapien
gggctagcatggaacaatgttggct

SEQ ID NO: 1415373 - DNA, 25 bp, Homo sapien
cgccaggagctctaatctggcaaga

SEQ ID NO: 1415374 - DNA, 25 bp, Homo sapien
gaacaatgttggctgactgcgccag

SEQ ID NO: 1415375 - DNA, 25 bp, Homo sapien
cttttccccgatcagtctctgggaa

SEQ ID NO: 1415376 - DNA, 25 bp, Homo sapien
tttccccgatcagtctctgggaagg

SEQ ID NO: 1415377 - DNA, 25 bp, Homo sapien
ttccccgatcagtctctgggaaggc

SEQ ID NO: 1415378 - DNA, 25 bp, Homo sapien
ttttccccgatcagtctctgggaag

SEQ ID NO: 1415379 - DNA, 25 bp, Homo sapien
caataagattgctggctacaaagtc

SEQ ID NO: 1415380 - DNA, 25 bp, Homo sapien
aatcagaaatttccaccacatcagc

SEQ ID NO: 1415381 - DNA, 25 bp, Homo sapien
aaaatcagaaatttccaccacatca

SEQ ID NO: 1415382 - DNA, 25 bp, Homo sapien
gctggctacaaagtcaacattaaaa

SEQ ID NO: 1415383 - DNA, 25 bp, Homo sapien
aagttgagaactaattaagtgaaga

SEQ ID NO: 1415384 - DNA, 25 bp, Homo sapien
ggcaagttgagaactaattaagtga

SEQ ID NO: 1415385 - DNA, 25 bp, Homo sapien
agggcaagttgagaactaattaagt

SEQ ID NO: 1415386 - DNA, 25 bp, Homo sapien
caagttgagaactaattaagtgaag

SEQ ID NO: 1415387 - DNA, 25 bp, Homo sapien
tgatttagtattataaagatgtgaa

SEQ ID NO: 1415388 - DNA, 25 bp, Homo sapien
tttagtattataaagatgtgaattt

SEQ ID NO: 1415389 - DNA, 25 bp, Homo sapien
gatttagtattataaagatgtgaat

SEQ ID NO: 1415390 - DNA, 25 bp, Homo sapien
aacagaatggcttatataacttgac

SEQ ID NO: 1415391 - DNA, 25 bp, Homo sapien
catgcgatatcaatatatcaacaga

SEQ ID NO: 1415392 - DNA, 25 bp, Homo sapien
tatcaacagaatggcttatataact

SEQ ID NO: 1415393 - DNA, 25 bp, Homo sapien
ctgcaagacccatgcgatatcaata

SEQ ID NO: 1415394 - DNA, 25 bp, Homo sapien
ctttttgcaagacagagtgataatg

SEQ ID NO: 1415395 - DNA, 25 bp, Homo sapien
tacactcgtgttgaagttttctgac

SEQ ID NO: 1415396 - DNA, 25 bp, Homo sapien
tcgtttgaaagagcaagcgtaatac

SEQ ID NO: 1415397 - DNA, 25 bp, Homo sapien
ttttctgacaaaccatggtagttac

SEQ ID NO: 1415398 - DNA, 25 bp, Homo sapien
caaggttcagccatgcgcagactgg

SEQ ID NO: 1415399 - DNA, 25 bp, Homo sapien
aaggttcagccatgcgcagactggt

SEQ ID NO: 1415400 - DNA, 25 bp, Homo sapien
aggttcagccatgcgcagactggtc

SEQ ID NO: 1415401 - DNA, 25 bp, Homo sapien
gttcagccatgcgcagactggtcag

SEQ ID NO: 1415402 - DNA, 25 bp, Homo sapien
aaaacttctagaacagaaccctctg

SEQ ID NO: 1415403 - DNA, 25 bp, Homo sapien
cagaaccctctgaatgggtttaaca

SEQ ID NO: 1415404 - DNA, 25 bp, Homo sapien
ttaacagcaaattggacacagcagg

SEQ ID NO: 1415405 - DNA, 25 bp, Homo sapien
caaagacagatcaataggctgggca

SEQ ID NO: 1415406 - DNA, 25 bp, Homo sapien
caaccacgtgctttgaccagattcg

SEQ ID NO: 1415407 - DNA, 25 bp, Homo sapien
ctgggtcacgaaaatccaaccacgt

SEQ ID NO: 1415408 - DNA, 25 bp, Homo sapien
accagattcgtttcctgctcagatt

SEQ ID NO: 1415409 - DNA, 25 bp, Homo sapien
gaagcactgggtcacgaaaatccaa

SEQ ID NO: 1415410 - DNA, 25 bp, Homo sapien
gtgaaagcgccgaatcctagccact

SEQ ID NO: 1415411 - DNA, 25 bp, Homo sapien
ccgggccgcggcggtgaaagcgccg

SEQ ID NO: 1415412 - DNA, 25 bp, Homo sapien
cggcggtgaaagcgccgaatcctag

SEQ ID NO: 1415413 - DNA, 25 bp, Homo sapien
gccgcggcggtgaaagcgccgaatc

SEQ ID NO: 1415414 - DNA, 25 bp, Homo sapien
tcttcacaacttactgctcttcatc

SEQ ID NO: 1415415 - DNA, 25 bp, Homo sapien
taaaggcacttttctacagagatct

SEQ ID NO: 1415416 - DNA, 25 bp, Homo sapien
ttaaaggcacttttctacagagatc

SEQ ID NO: 1415417 - DNA, 25 bp, Homo sapien
ttccacatagtttagttgcttcttc

SEQ ID NO: 1415418 - DNA, 25 bp, Homo sapien
gaacgcgctaaccgattgcgccaca

SEQ ID NO: 1415419 - DNA, 25 bp, Homo sapien
cgcgctaaccgattgcgccacagag

SEQ ID NO: 1415420 - DNA, 25 bp, Homo sapien
tccctgggtgggctcgaaccaccaa

SEQ ID NO: 1415421 - DNA, 25 bp, Homo sapien
tttcggttaacagccgaacgcgcta

SEQ ID NO: 1415422 - DNA, 25 bp, Homo sapien
gacgatttcgctacctagagttctg

SEQ ID NO: 1415423 - DNA, 25 bp, Homo sapien
tagagttctggttcactactacgtg

SEQ ID NO: 1415424 - DNA, 25 bp, Homo sapien
tactacgtgactgcaagtctaggtc

SEQ ID NO: 1415425 - DNA, 25 bp, Homo sapien
catgaaaccattcctgctatgtgac

SEQ ID NO: 1415426 - DNA, 25 bp, Homo sapien
gcaactgattagatcgtgcgcacca

SEQ ID NO: 1415427 - DNA, 25 bp, Homo sapien
tacactgtttgcaagcatgaggagg

SEQ ID NO: 1415428 - DNA, 25 bp, Homo sapien
gatgtaggtggagaagctaagccac

SEQ ID NO: 1415429 - DNA, 25 bp, Homo sapien
cagatacacctagcatgagtacgtt

SEQ ID NO: 1415430 - DNA, 25 bp, Homo sapien
gctccacactactggagcattccgt

SEQ ID NO: 1415431 - DNA, 25 bp, Homo sapien
cacccggcttggactggcggaagcc

SEQ ID NO: 1415432 - DNA, 25 bp, Homo sapien
gcattccgtggccagaagagagtgc

SEQ ID NO: 1415433 - DNA, 25 bp, Homo sapien
agaagagagtgcgagggtgctgctg

SEQ ID NO: 1415434 - DNA, 25 bp, Homo sapien
atgcgttgggcgggaatcgagcccg

SEQ ID NO: 1415435 - DNA, 25 bp, Homo sapien
actatgctcaccactataccaccaa

SEQ ID NO: 1415436 - DNA, 25 bp, Homo sapien
actgcttggaaggcaactatgctca

SEQ ID NO: 1415437 - DNA, 25 bp, Homo sapien
atcgagcccgggtcaactgcttgga

SEQ ID NO: 1415438 - DNA, 25 bp, Homo sapien
ggccccgtgtgtcgcagaaagcctc

SEQ ID NO: 1415439 - DNA, 25 bp, Homo sapien
ttgggcgccgtgcagggccagagga

SEQ ID NO: 1415440 - DNA, 25 bp, Homo sapien
actttgagccggcagctcgttgggc

SEQ ID NO: 1415441 - DNA, 25 bp, Homo sapien
acaaccactttgagccggcagctcg

SEQ ID NO: 1415442 - DNA, 25 bp, Homo sapien
gcccgagatggcaccctgcgactag

SEQ ID NO: 1415443 - DNA, 25 bp, Homo sapien
ccgcggacgagaagaaaagacagga

SEQ ID NO: 1415444 - DNA, 25 bp, Homo sapien
taccaagccgcggacgagaagaaaa

SEQ ID NO: 1415445 - DNA, 25 bp, Homo sapien
ggcccgagatggcaccctgcgacta

SEQ ID NO: 1415446 - DNA, 25 bp, Homo sapien
gatactcaccactatactaacgagg

SEQ ID NO: 1415447 - DNA, 25 bp, Homo sapien
tcccgcgtgacaggcggggatactc

SEQ ID NO: 1415448 - DNA, 25 bp, Homo sapien
gggatactcaccactatactaacga

SEQ ID NO: 1415449 - DNA, 25 bp, Homo sapien
tcgaaccccggtctcccgcgtgaca

SEQ ID NO: 1415450 - DNA, 25 bp, Homo sapien
cgccttgaatcgccgctgcgctgcc

SEQ ID NO: 1415451 - DNA, 25 bp, Homo sapien
ctggcctgaacagcccgcccggttt

SEQ ID NO: 1415452 - DNA, 25 bp, Homo sapien
cgctgcgctgcccagaggcgtcctg

SEQ ID NO: 1415453 - DNA, 25 bp, Homo sapien
gctgcccagaggcgtcctggcctga

SEQ ID NO: 1415454 - DNA, 25 bp, Homo sapien
gtggagccgcacacacgtctcccac

SEQ ID NO: 1415455 - DNA, 25 bp, Homo sapien
gagcagcagcgagcgactcgctcgt

SEQ ID NO: 1415456 - DNA, 25 bp, Homo sapien
agcgactcgctcgtggagccgcaca

SEQ ID NO: 1415457 - DNA, 25 bp, Homo sapien
cagcgagcgactcgctcgtggagcc

SEQ ID NO: 1415458 - DNA, 25 bp, Homo sapien
aatgacacgggacaggtttgtgcag

SEQ ID NO: 1415459 - DNA, 25 bp, Homo sapien
ggacgtctactttgcccctacagag

SEQ ID NO: 1415460 - DNA, 25 bp, Homo sapien
tctatccccgatagggtctggtccc

SEQ ID NO: 1415461 - DNA, 25 bp, Homo sapien
gactgtgccaagatcccacgaatga

SEQ ID NO: 1415462 - DNA, 25 bp, Homo sapien
gggccgcggcggtgagagcgccgaa

SEQ ID NO: 1415463 - DNA, 25 bp, Homo sapien
gccgcggcggtgagagcgccgaatc

SEQ ID NO: 1415464 - DNA, 25 bp, Homo sapien
cccgggccgcggcggtgagagcgcc

SEQ ID NO: 1415465 - DNA, 25 bp, Homo sapien
atcgaacccgggccgcggcggtgag

SEQ ID NO: 1415466 - DNA, 25 bp, Homo sapien
tatgctcaccactataccaccaacg

SEQ ID NO: 1415467 - DNA, 25 bp, Homo sapien
atcgaacccgggtcaactgcttgga

SEQ ID NO: 1415468 - DNA, 25 bp, Homo sapien
gaatcgaacccgggtcaactgcttg

SEQ ID NO: 1415469 - DNA, 25 bp, Homo sapien
gcttggaaggcagctatgctcacca

SEQ ID NO: 1415470 - DNA, 25 bp, Homo sapien
gggatactcaccactatactaacga

SEQ ID NO: 1415471 - DNA, 25 bp, Homo sapien
gatactcaccactatactaacgagg

SEQ ID NO: 1415472 - DNA, 25 bp, Homo sapien
tcgaaccccggtctcccgcgtgaca

SEQ ID NO: 1415473 - DNA, 25 bp, Homo sapien
tcccgcgtgacaggcggggatactc

SEQ ID NO: 1415474 - DNA, 25 bp, Homo sapien
gagcagcagcgagcgactcgctcgt

SEQ ID NO: 1415475 - DNA, 25 bp, Homo sapien
tccaacttctgaccgctgagcagca

SEQ ID NO: 1415476 - DNA, 25 bp, Homo sapien
ctggcctgaacagcccgcccggttt

SEQ ID NO: 1415477 - DNA, 25 bp, Homo sapien
gctgcccagaggcgtcctggcctga

SEQ ID NO: 1415478 - DNA, 25 bp, Homo sapien
tctatccccgatagggtctggtccc

SEQ ID NO: 1415479 - DNA, 25 bp, Homo sapien
ggacgtctactttgcccctacagag

SEQ ID NO: 1415480 - DNA, 25 bp, Homo sapien
gactgtgccaagatcccacgaatga

SEQ ID NO: 1415481 - DNA, 25 bp, Homo sapien
aatgacacgggacaggtttgtgcag

SEQ ID NO: 1415482 - DNA, 25 bp, Homo sapien
cctgacaaggaagggctgtgaagct

SEQ ID NO: 1415483 - DNA, 25 bp, Homo sapien
cgccagcgaggccaaaaggagggat

SEQ ID NO: 1415484 - DNA, 25 bp, Homo sapien
tttgccgctgacaaagagtgggagc

SEQ ID NO: 1415485 - DNA, 25 bp, Homo sapien
agctgatgttgcgaaggtggcgcca

SEQ ID NO: 1415486 - DNA, 25 bp, Homo sapien
tggggcgcgggagaagcgagccagc

SEQ ID NO: 1415487 - DNA, 25 bp, Homo sapien
ctggggcgcgggagaagcgagccag

SEQ ID NO: 1415488 - DNA, 25 bp, Homo sapien
gggccgcggcggtgagagcgccgaa

SEQ ID NO: 1415489 - DNA, 25 bp, Homo sapien
gccgcggcggtgagagcgccgaatc

SEQ ID NO: 1415490 - DNA, 25 bp, Homo sapien
atcgaacccgggccgcggcggtgag

SEQ ID NO: 1415491 - DNA, 25 bp, Homo sapien
cccgggccgcggcggtgagagcgcc

SEQ ID NO: 1415492 - DNA, 25 bp, Homo sapien
tatgctcaccactataccaccaacg

SEQ ID NO: 1415493 - DNA, 25 bp, Homo sapien
atcgaacccgggtcaactgcttgga

SEQ ID NO: 1415494 - DNA, 25 bp, Homo sapien
gaatcgaacccgggtcaactgcttg

SEQ ID NO: 1415495 - DNA, 25 bp, Homo sapien
gcttggaaggcagctatgctcacca

SEQ ID NO: 1415496 - DNA, 25 bp, Homo sapien
gatactcaccactatactaacgagg

SEQ ID NO: 1415497 - DNA, 25 bp, Homo sapien
tcgaaccccggtctcccgcgtgaca

SEQ ID NO: 1415498 - DNA, 25 bp, Homo sapien
tcccgcgtgacaggcggggatactc

SEQ ID NO: 1415499 - DNA, 25 bp, Homo sapien
gggatactcaccactatactaacga

SEQ ID NO: 1415500 - DNA, 25 bp, Homo sapien
cgccggagggcaacgcccatggcaa

SEQ ID NO: 1415501 - DNA, 25 bp, Homo sapien
ccgcccgccggagggcaacgcccat

SEQ ID NO: 1415502 - DNA, 25 bp, Homo sapien
gagggcaacgcccatggcaaccctg

SEQ ID NO: 1415503 - DNA, 25 bp, Homo sapien
ggcaacgcccatggcaaccctggag

SEQ ID NO: 1415504 - DNA, 25 bp, Homo sapien
cccttgcccgctctccagactccag

SEQ ID NO: 1415505 - DNA, 25 bp, Homo sapien
tggccgcttcctgccttgagccctt

SEQ ID NO: 1415506 - DNA, 25 bp, Homo sapien
ttcctgccttgagcccttgcccgct

SEQ ID NO: 1415507 - DNA, 25 bp, Homo sapien
tgccttgagcccttgcccgctctcc

SEQ ID NO: 1415508 - DNA, 25 bp, Homo sapien
tccaacttctgaccgctgagcagca

SEQ ID NO: 1415509 - DNA, 25 bp, Homo sapien
ctggcctgaacagcccgcccggttt

SEQ ID NO: 1415510 - DNA, 25 bp, Homo sapien
gagcagcagcgagcgactcgctcgt

SEQ ID NO: 1415511 - DNA, 25 bp, Homo sapien
gctgcccagaggcgtcctggcctga

SEQ ID NO: 1415512 - DNA, 25 bp, Homo sapien
ggacgtctactttgcccctacagag

SEQ ID NO: 1415513 - DNA, 25 bp, Homo sapien
gactgtgccaagatcccacgaatga

SEQ ID NO: 1415514 - DNA, 25 bp, Homo sapien
tctatccccgatagggtctggtccc

SEQ ID NO: 1415515 - DNA, 25 bp, Homo sapien
aatgacacgggacaggtttgtgcag

SEQ ID NO: 1415516 - DNA, 25 bp, Homo sapien
agctgatgttgcgaaggtggcgcca

SEQ ID NO: 1415517 - DNA, 25 bp, Homo sapien
cgccagcgaggccaaaaggagggat

SEQ ID NO: 1415518 - DNA, 25 bp, Homo sapien
tttgccgctgacaaagagtgggagc

SEQ ID NO: 1415519 - DNA, 25 bp, Homo sapien
cctgacaaggaagggctgtgaagct

SEQ ID NO: 1415520 - DNA, 25 bp, Homo sapien
gccgcggcggtgagagcgccgaatc

SEQ ID NO: 1415521 - DNA, 25 bp, Homo sapien
cccgggccgcggcggtgagagcgcc

SEQ ID NO: 1415522 - DNA, 25 bp, Homo sapien
atcgaacccgggccgcggcggtgag

SEQ ID NO: 1415523 - DNA, 25 bp, Homo sapien
gggccgcggcggtgagagcgccgaa

SEQ ID NO: 1415524 - DNA, 25 bp, Homo sapien
atcgaacccgggtcaactgcttgga

SEQ ID NO: 1415525 - DNA, 25 bp, Homo sapien
gaatcgaacccgggtcaactgcttg

SEQ ID NO: 1415526 - DNA, 25 bp, Homo sapien
gcttggaaggcagctatgctcacca

SEQ ID NO: 1415527 - DNA, 25 bp, Homo sapien
tatgctcaccactataccaccaacg

SEQ ID NO: 1415528 - DNA, 25 bp, Homo sapien
cgggccctgtgcctcgcagaaagcc

SEQ ID NO: 1415529 - DNA, 25 bp, Homo sapien
gatactcaccactatactaacgagg

SEQ ID NO: 1415530 - DNA, 25 bp, Homo sapien
tcccgcgtgacaggcggggatactc

SEQ ID NO: 1415531 - DNA, 25 bp, Homo sapien
tcgaaccccggtctcccgcgtgaca

SEQ ID NO: 1415532 - DNA, 25 bp, Homo sapien
gggatactcaccactatactaacga

SEQ ID NO: 1415533 - DNA, 25 bp, Homo sapien
ttcctgccttgagcccttgcccgct

SEQ ID NO: 1415534 - DNA, 25 bp, Homo sapien
cccttgcccgctctccagactccag

SEQ ID NO: 1415535 - DNA, 25 bp, Homo sapien
tggccgcttcctgccttgagccctt

SEQ ID NO: 1415536 - DNA, 25 bp, Homo sapien
tgccttgagcccttgcccgctctcc

SEQ ID NO: 1415537 - DNA, 25 bp, Homo sapien
ctggcctgaacagcccgcccggttt

SEQ ID NO: 1415538 - DNA, 25 bp, Homo sapien
tccaacttctgaccgctgagcagca

SEQ ID NO: 1415539 - DNA, 25 bp, Homo sapien
gagcagcagcgagcgactcgctcgt

SEQ ID NO: 1415540 - DNA, 25 bp, Homo sapien
gctgcccagaggcgtcctggcctga

SEQ ID NO: 1415541 - DNA, 25 bp, Homo sapien
tctatccccgatagggtctggtccc

SEQ ID NO: 1415542 - DNA, 25 bp, Homo sapien
ggacgtctactttgcccctacagag

SEQ ID NO: 1415543 - DNA, 25 bp, Homo sapien
gactgtgccaagatcccacgaatga

SEQ ID NO: 1415544 - DNA, 25 bp, Homo sapien
aatgacacgggacaggtttgtgcag

SEQ ID NO: 1415545 - DNA, 25 bp, Homo sapien
cctgacaaggaagggctgtgaagct

SEQ ID NO: 1415546 - DNA, 25 bp, Homo sapien
cgccagcgaggccaaaaggagggat

SEQ ID NO: 1415547 - DNA, 25 bp, Homo sapien
tttgccgctgacaaagagtgggagc

SEQ ID NO: 1415548 - DNA, 25 bp, Homo sapien
agctgatgttgcgaaggtggcgcca

SEQ ID NO: 1415549 - DNA, 25 bp, Homo sapien
tggggcgcgggagaagcgagccagc

SEQ ID NO: 1415550 - DNA, 25 bp, Homo sapien
ctggggcgcgggagaagcgagccag

SEQ ID NO: 1415551 - DNA, 25 bp, Homo sapien
cccgggccgcggcggtgagagcgcc

SEQ ID NO: 1415552 - DNA, 25 bp, Homo sapien
gccgcggcggtgagagcgccgaatc

SEQ ID NO: 1415553 - DNA, 25 bp, Homo sapien
gggccgcggcggtgagagcgccgaa

SEQ ID NO: 1415554 - DNA, 25 bp, Homo sapien
atcgaacccgggccgcggcggtgag

SEQ ID NO: 1415555 - DNA, 25 bp, Homo sapien
tatgctcaccactataccaccaacg

SEQ ID NO: 1415556 - DNA, 25 bp, Homo sapien
gcttggaaggcagctatgctcacca

SEQ ID NO: 1415557 - DNA, 25 bp, Homo sapien
gaatcgaacccgggtcaactgcttg

SEQ ID NO: 1415558 - DNA, 25 bp, Homo sapien
atcgaacccgggtcaactgcttgga

SEQ ID NO: 1415559 - DNA, 25 bp, Homo sapien
gatactcaccactatactaacgagg

SEQ ID NO: 1415560 - DNA, 25 bp, Homo sapien
tcgaaccccggtctcccgcgtgaca

SEQ ID NO: 1415561 - DNA, 25 bp, Homo sapien
gggatactcaccactatactaacga

SEQ ID NO: 1415562 - DNA, 25 bp, Homo sapien
tcccgcgtgacaggcggggatactc

SEQ ID NO: 1415563 - DNA, 25 bp, Homo sapien
tggccgcttcctgccttgagccctt

SEQ ID NO: 1415564 - DNA, 25 bp, Homo sapien
cccttgcccgctctccagactccag

SEQ ID NO: 1415565 - DNA, 25 bp, Homo sapien
ttcctgccttgagcccttgcccgct

SEQ ID NO: 1415566 - DNA, 25 bp, Homo sapien
tgccttgagcccttgcccgctctcc

SEQ ID NO: 1415567 - DNA, 25 bp, Homo sapien
gctgcccagaggcgtcctggcctga

SEQ ID NO: 1415568 - DNA, 25 bp, Homo sapien
gagcagcagcgagcgactcgctcgt

SEQ ID NO: 1415569 - DNA, 25 bp, Homo sapien
tccaacttctgaccgctgagcagca

SEQ ID NO: 1415570 - DNA, 25 bp, Homo sapien
ctggcctgaacagcccgcccggttt

SEQ ID NO: 1415571 - DNA, 25 bp, Homo sapien
ctctctgtggatccctactgctggt

SEQ ID NO: 1415572 - DNA, 25 bp, Homo sapien
ggatgaccagcatcagccccaatgt

SEQ ID NO: 1415573 - DNA, 25 bp, Homo sapien
gaagaacaaagagcccaattaccag

SEQ ID NO: 1415574 - DNA, 25 bp, Homo sapien
tgcttatgcagtcggaagctccaga

SEQ ID NO: 1415575 - DNA, 25 bp, Homo sapien
cggaaatccgaacgccagcagatct

SEQ ID NO: 1415576 - DNA, 25 bp, Homo sapien
tgttttggctttcagcggaaatccg

SEQ ID NO: 1415577 - DNA, 25 bp, Homo sapien
cagctgccagctattgcagttgcca

SEQ ID NO: 1415578 - DNA, 25 bp, Homo sapien
gagtatctctgcctgtcatgcgtga

SEQ ID NO: 1415579 - DNA, 25 bp, Homo sapien
cgaacccgggcctcccgcgtggcag

SEQ ID NO: 1415580 - DNA, 25 bp, Homo sapien
gaattctaccactgaaccaccaatg

SEQ ID NO: 1415581 - DNA, 25 bp, Homo sapien
cgcgtggcaggcgagaattctacca

SEQ ID NO: 1415582 - DNA, 25 bp, Homo sapien
tcgaacccgggcctcccgcgtggca

SEQ ID NO: 1415583 - DNA, 25 bp, Homo sapien
acaacaccgtgttcgatgccaagcg

SEQ ID NO: 1415584 - DNA, 25 bp, Homo sapien
cacttcatggaagaattccggcgga

SEQ ID NO: 1415585 - DNA, 25 bp, Homo sapien
cctactcgtgcgtgggcgtgtttca

SEQ ID NO: 1415586 - DNA, 25 bp, Homo sapien
caagcccaaggtgcgcgtatgctac

SEQ ID NO: 1415587 - DNA, 25 bp, Homo sapien
gacctgaacgcagcgccttagaccg

SEQ ID NO: 1415588 - DNA, 25 bp, Homo sapien
cgacctgaacgcagcgccttagacc

SEQ ID NO: 1415589 - DNA, 25 bp, Homo sapien
ggatcctccgcaccaatcactgttg

SEQ ID NO: 1415590 - DNA, 25 bp, Homo sapien
gatccagtgcggagtctcgaacagc

SEQ ID NO: 1415591 - DNA, 25 bp, Homo sapien
tcgagccatgtcaaggtagaccctg

SEQ ID NO: 1415592 - DNA, 25 bp, Homo sapien
ttgctgaatccgacacccggcggat

SEQ ID NO: 1415593 - DNA, 25 bp, Homo sapien
ctaattggtcctgggcaaggtcccg

SEQ ID NO: 1415594 - DNA, 25 bp, Homo sapien
tcatagtaagcaacccattcgggcc

SEQ ID NO: 1415595 - DNA, 25 bp, Homo sapien
caagctttctaattagtcccaggcc

SEQ ID NO: 1415596 - DNA, 25 bp, Homo sapien
cagttccttaataggtctagggcca

SEQ ID NO: 1415597 - DNA, 25 bp, Homo sapien
tagtactaaggtcccacagaggctg

SEQ ID NO: 1415598 - DNA, 25 bp, Homo sapien
ccctgatattctctgactcttagta

SEQ ID NO: 1415599 - DNA, 25 bp, Homo sapien
caagaagaaccaaagggtagtactg

SEQ ID NO: 1415600 - DNA, 25 bp, Homo sapien
ccaaagggtagtactgactggtagt

SEQ ID NO: 1415601 - DNA, 25 bp, Homo sapien
tcttcaggactgtgcccgaatgggc

SEQ ID NO: 1415602 - DNA, 25 bp, Homo sapien
gccacttctgatcctgtcggtgaca

SEQ ID NO: 1415603 - DNA, 25 bp, Homo sapien
tcctgtcggtgacaatggagcttcc

SEQ ID NO: 1415604 - DNA, 25 bp, Homo sapien
tagacagtccatgacacttgcccat

SEQ ID NO: 1415605 - DNA, 25 bp, Homo sapien
tccgactagggttgtagtgataact

SEQ ID NO: 1415606 - DNA, 25 bp, Homo sapien
tggtagcagacctccgcgttgtgtg

SEQ ID NO: 1415607 - DNA, 25 bp, Homo sapien
ccgcgttgtgtggttcccaatgtcc

SEQ ID NO: 1415608 - DNA, 25 bp, Homo sapien
tcttctgccttagtgctgtacgggt

SEQ ID NO: 1415609 - DNA, 25 bp, Homo sapien
cttaaccacggcaattacgttatgg

SEQ ID NO: 1415610 - DNA, 25 bp, Homo sapien
taaccacggcaattacgttatggaa

SEQ ID NO: 1415611 - DNA, 25 bp, Homo sapien
ggcaattacgttatggaaactgaca

SEQ ID NO: 1415612 - DNA, 25 bp, Homo sapien
ccacggcaattacgttatggaaact

SEQ ID NO: 1415613 - DNA, 25 bp, Homo sapien
atcattcatattttattaccatggt

SEQ ID NO: 1415614 - DNA, 25 bp, Homo sapien
tcattcatattttattaccatggtt

SEQ ID NO: 1415615 - DNA, 25 bp, Homo sapien
tcccatcttctatctaagagtagca

SEQ ID NO: 1415616 - DNA, 25 bp, Homo sapien
ttcccatcttctatctaagagtagc

SEQ ID NO: 1415617 - DNA, 25 bp, Homo sapien
cccatcttctatctaagagtagcat

SEQ ID NO: 1415618 - DNA, 25 bp, Homo sapien
ccaagaaatgttgcgcttaaagctt

SEQ ID NO: 1415619 - DNA, 25 bp, Homo sapien
aaagctttctttcataagcaacaat

SEQ ID NO: 1415620 - DNA, 25 bp, Homo sapien
gcgaagctcagtagtacatttagta

SEQ ID NO: 1415621 - DNA, 25 bp, Homo sapien
gaaagtttcataacttaactcagcg

SEQ ID NO: 1415622 - DNA, 25 bp, Homo sapien
tctgttcacttagcaacttgggaca

SEQ ID NO: 1415623 - DNA, 25 bp, Homo sapien
cacactctgtatggtcctgcctcaa

SEQ ID NO: 1415624 - DNA, 25 bp, Homo sapien
cagttctgatagagtcccctggaag

SEQ ID NO: 1415625 - DNA, 25 bp, Homo sapien
tacggctaatgttctaggaagacac

SEQ ID NO: 1415626 - DNA, 25 bp, Homo sapien
gggcttccctgcttgaagatcatgg

SEQ ID NO: 1415627 - DNA, 25 bp, Homo sapien
cctgcttgaagatcatgggcttttc

SEQ ID NO: 1415628 - DNA, 25 bp, Homo sapien
tgcttgaagatcatgggcttttccc

SEQ ID NO: 1415629 - DNA, 25 bp, Homo sapien
ttccctgcttgaagatcatgggctt

SEQ ID NO: 1415630 - DNA, 25 bp, Homo sapien
tgctactgctcttattacccccatg

SEQ ID NO: 1415631 - DNA, 25 bp, Homo sapien
gagaccaaggaaaagtcgagagttg

SEQ ID NO: 1415632 - DNA, 25 bp, Homo sapien
tactgctcttattacccccatggga

SEQ ID NO: 1415633 - DNA, 25 bp, Homo sapien
agagttggataagggatctggctct

SEQ ID NO: 1415634 - DNA, 25 bp, Homo sapien
taaatttatggtccttccagtctct

SEQ ID NO: 1415635 - DNA, 25 bp, Homo sapien
catttgtcttgagggtcctttctcc

SEQ ID NO: 1415636 - DNA, 25 bp, Homo sapien
tttgtcttgagggtcctttctccat

SEQ ID NO: 1415637 - DNA, 25 bp, Homo sapien
atggtccttccagtctcttgttgag

SEQ ID NO: 1415638 - DNA, 25 bp, Homo sapien
actgcaaaaaggagtaccatcacca

SEQ ID NO: 1415639 - DNA, 25 bp, Homo sapien
cttggtacccaggtggaaagaatga

SEQ ID NO: 1415640 - DNA, 25 bp, Homo sapien
ccaagcagaaagagacttggtaccc

SEQ ID NO: 1415641 - DNA, 25 bp, Homo sapien
tgcaaaaaggagtaccatcaccaag

SEQ ID NO: 1415642 - DNA, 25 bp, Homo sapien
cctggtgatcaccaggagggaacca

SEQ ID NO: 1415643 - DNA, 25 bp, Homo sapien
ccacatatgaagaagtgcgtgtaag

SEQ ID NO: 1415644 - DNA, 25 bp, Homo sapien
attgcaggttccacacacaggcgtc

SEQ ID NO: 1415645 - DNA, 25 bp, Homo sapien
cgtgtaagaatcaggaatctcctcc

SEQ ID NO: 1415646 - DNA, 25 bp, Homo sapien
tgtggcttttggaatgtagaagtca

SEQ ID NO: 1415647 - DNA, 25 bp, Homo sapien
ttgagtgatggtgatgttcacagtc

SEQ ID NO: 1415648 - DNA, 25 bp, Homo sapien
caaaaagccccctgcagaagtagga

SEQ ID NO: 1415649 - DNA, 25 bp, Homo sapien
cctgcagaagtaggagccgctgtct

SEQ ID NO: 1415650 - DNA, 25 bp, Homo sapien
atgtgaccttatgcagagcagtgtt

SEQ ID NO: 1415651 - DNA, 25 bp, Homo sapien
tgaccttatgcagagcagtgttctt

SEQ ID NO: 1415652 - DNA, 25 bp, Homo sapien
aggtgaatagggtcttcctccttga

SEQ ID NO: 1415653 - DNA, 25 bp, Homo sapien
ggtgaatagggtcttcctccttgaa

SEQ ID NO: 1415654 - DNA, 25 bp, Homo sapien
cagggcctcggtgagaccaacttta

SEQ ID NO: 1415655 - DNA, 25 bp, Homo sapien
gaactcaatgtaaacaccagggagg

SEQ ID NO: 1415656 - DNA, 25 bp, Homo sapien
tcaggaataaggtgacggtggccac

SEQ ID NO: 1415657 - DNA, 25 bp, Homo sapien
tcagcctggcaattcgtggtttcta

SEQ ID NO: 1415658 - DNA, 25 bp, Homo sapien
gatatggacttctagctgcaccggg

SEQ ID NO: 1415659 - DNA, 25 bp, Homo sapien
tctcattgtgaaaccactgtgtgga

SEQ ID NO: 1415660 - DNA, 25 bp, Homo sapien
tcaatgaagtagctcgaggcctggc

SEQ ID NO: 1415661 - DNA, 25 bp, Homo sapien
tcgactgtggcagcgtcaatgaagt

SEQ ID NO: 1415662 - DNA, 25 bp, Homo sapien
gaggctccaggaacaccacagcctt

SEQ ID NO: 1415663 - DNA, 25 bp, Homo sapien
ccaggaacaccacagcctttgggag

SEQ ID NO: 1415664 - DNA, 25 bp, Homo sapien
ggctccaggaacaccacagcctttg

SEQ ID NO: 1415665 - DNA, 25 bp, Homo sapien
ctgtaccattgaggctccaggaaca

SEQ ID NO: 1415666 - DNA, 25 bp, Homo sapien
aggagccaagataatgtggggtgag

SEQ ID NO: 1415667 - DNA, 25 bp, Homo sapien
ctgaggagccaagataatgtggggt

SEQ ID NO: 1415668 - DNA, 25 bp, Homo sapien
aagtagcagagcagttgggaggagc

SEQ ID NO: 1415669 - DNA, 25 bp, Homo sapien
agaagtagcagagcagttgggagga

SEQ ID NO: 1415670 - DNA, 25 bp, Homo sapien
tagcagagcagttgggaggagcagc

SEQ ID NO: 1415671 - DNA, 25 bp, Homo sapien
ctagaagtagcagagcagttgggag

SEQ ID NO: 1415672 - DNA, 25 bp, Homo sapien
gacaagtcaccaaagatatccggag

SEQ ID NO: 1415673 - DNA, 25 bp, Homo sapien
tggacaagtcaccaaagatatccgg

SEQ ID NO: 1415674 - DNA, 25 bp, Homo sapien
agtggacaagtcaccaaagatatcc

SEQ ID NO: 1415675 - DNA, 25 bp, Homo sapien
caagtcaccaaagatatccggagcc

SEQ ID NO: 1415676 - DNA, 25 bp, Homo sapien
ccgactagacaggaggaagtaaaca

SEQ ID NO: 1415677 - DNA, 25 bp, Homo sapien
gacaggaggaagtaaacagcctttc

SEQ ID NO: 1415678 - DNA, 25 bp, Homo sapien
agggaccaaaccgactagacaggag

SEQ ID NO: 1415679 - DNA, 25 bp, Homo sapien
caaaccgactagacaggaggaagta

SEQ ID NO: 1415680 - DNA, 25 bp, Homo sapien
tcatctgacttctcagtctgaagtc

SEQ ID NO: 1415681 - DNA, 25 bp, Homo sapien
agaatctgccagagtgtgccctcag

SEQ ID NO: 1415682 - DNA, 25 bp, Homo sapien
tgaagtctggcaagggagccccacc

SEQ ID NO: 1415683 - DNA, 25 bp, Homo sapien
agggagccccaccatagaacaggac

SEQ ID NO: 1415684 - DNA, 25 bp, Homo sapien
cctcgtgttacccaggtcctgcgga

SEQ ID NO: 1415685 - DNA, 25 bp, Homo sapien
tgactctgcttgatagtgccactcc

SEQ ID NO: 1415686 - DNA, 25 bp, Homo sapien
cacgttggttactctcacaatggtc

SEQ ID NO: 1415687 - DNA, 25 bp, Homo sapien
cagggctccttaccagaaaaggtgg

SEQ ID NO: 1415688 - DNA, 25 bp, Homo sapien
tcaagcaccgatcttaggatcagtg

SEQ ID NO: 1415689 - DNA, 25 bp, Homo sapien
gactgagccagagactggagtttta

SEQ ID NO: 1415690 - DNA, 25 bp, Homo sapien
aaatcagtcttccagagtattcggg

SEQ ID NO: 1415691 - DNA, 25 bp, Homo sapien
taggatcagtgcttaggaagggtca

SEQ ID NO: 1415692 - DNA, 25 bp, Homo sapien
tagcctgctgaaaacagtcctgagc

SEQ ID NO: 1415693 - DNA, 25 bp, Homo sapien
caaagcagctcaaccagactgagga

SEQ ID NO: 1415694 - DNA, 25 bp, Homo sapien
cagcagttgagttccagttacctat

SEQ ID NO: 1415695 - DNA, 25 bp, Homo sapien
gagggaggtcctacaacctgtatta

SEQ ID NO: 1415696 - DNA, 25 bp, Homo sapien
gagacaatgccaggtcatcaggcac

SEQ ID NO: 1415697 - DNA, 25 bp, Homo sapien
cccttgcatgcgtacttcacaatag

SEQ ID NO: 1415698 - DNA, 25 bp, Homo sapien
atgccaggtcatcaggcactagatt

SEQ ID NO: 1415699 - DNA, 25 bp, Homo sapien
gatcccttgcatgcgtacttcacaa

SEQ ID NO: 1415700 - DNA, 25 bp, Homo sapien
taatgctgatcttggtacaaggacc

SEQ ID NO: 1415701 - DNA, 25 bp, Homo sapien
tgggagctactacggcagccaactt

SEQ ID NO: 1415702 - DNA, 25 bp, Homo sapien
agttctggacaattaatcctcaggg

SEQ ID NO: 1415703 - DNA, 25 bp, Homo sapien
gagaactgctgctctaagccaatta

SEQ ID NO: 1415704 - DNA, 25 bp, Homo sapien
ctttggatacctgattaatggacat

SEQ ID NO: 1415705 - DNA, 25 bp, Homo sapien
tctttggatacctgattaatggaca

SEQ ID NO: 1415706 - DNA, 25 bp, Homo sapien
ttctttggatacctgattaatggac

SEQ ID NO: 1415707 - DNA, 25 bp, Homo sapien
gcactaacgcctccctcagaggctt

SEQ ID NO: 1415708 - DNA, 25 bp, Homo sapien
cttctccacgttctcactgtgctag

SEQ ID NO: 1415709 - DNA, 25 bp, Homo sapien
gtggggcactaacgcctccctcaga

SEQ ID NO: 1415710 - DNA, 25 bp, Homo sapien
ctccacgttctcactgtgctaggtg

SEQ ID NO: 1415711 - DNA, 25 bp, Homo sapien
aaagctcccattgaaaggtggctct

SEQ ID NO: 1415712 - DNA, 25 bp, Homo sapien
tcagccaatgcgtgagacatggtgg

SEQ ID NO: 1415713 - DNA, 25 bp, Homo sapien
caaactagcttatgtgtcagccaat

SEQ ID NO: 1415714 - DNA, 25 bp, Homo sapien
ggaggctccatagcccaacaagggc

SEQ ID NO: 1415715 - DNA, 25 bp, Homo sapien
ggatagaagtacagaggaggctcca

SEQ ID NO: 1415716 - DNA, 25 bp, Homo sapien
ggtggtgtgtgagggcagcgcttag

SEQ ID NO: 1415717 - DNA, 25 bp, Homo sapien
gcagtaacagcacacaaacagggct

SEQ ID NO: 1415718 - DNA, 25 bp, Homo sapien
acagtgcctggtaggcagtaacagc

SEQ ID NO: 1415719 - DNA, 25 bp, Homo sapien
gatgaaagaggctgatgctcttaca

SEQ ID NO: 1415720 - DNA, 25 bp, Homo sapien
ccttttcaaggctgtattggttgga

SEQ ID NO: 1415721 - DNA, 25 bp, Homo sapien
tattggttggagtgtagactgaact

SEQ ID NO: 1415722 - DNA, 25 bp, Homo sapien
tcaaggctgtattggttggagtgta

SEQ ID NO: 1415723 - DNA, 25 bp, Homo sapien
tctgtttaccttttcaaggctgtat

SEQ ID NO: 1415724 - DNA, 25 bp, Homo sapien
tagtcacctgcaaatagtcaccctg

SEQ ID NO: 1415725 - DNA, 25 bp, Homo sapien
tttgcaggtgatatagtggaggcca

SEQ ID NO: 1415726 - DNA, 25 bp, Homo sapien
tgatctctggacctcttgcacagct

SEQ ID NO: 1415727 - DNA, 25 bp, Homo sapien
tttactgtactcctgtgcccactgg

SEQ ID NO: 1415728 - DNA, 25 bp, Homo sapien
tgactgtagattttcaaaagtggca

SEQ ID NO: 1415729 - DNA, 25 bp, Homo sapien
caaaagtggcaacaggtacataggt

SEQ ID NO: 1415730 - DNA, 25 bp, Homo sapien
cggattcggtatgggacattcttat

SEQ ID NO: 1415731 - DNA, 25 bp, Homo sapien
ttcgggacagccgcacacggattcg

SEQ ID NO: 1415732 - DNA, 25 bp, Homo sapien
ctgatatcaatgcgcgcatctggag

SEQ ID NO: 1415733 - DNA, 25 bp, Homo sapien
cgcatctggagttcccatctccttc

SEQ ID NO: 1415734 - DNA, 25 bp, Homo sapien
gatatcaatgcgcgcatctggagtt

SEQ ID NO: 1415735 - DNA, 25 bp, Homo sapien
catctggagttcccatctccttcat

SEQ ID NO: 1415736 - DNA, 25 bp, Homo sapien
caaatttccgaagctctttgagtgc

SEQ ID NO: 1415737 - DNA, 25 bp, Homo sapien
aatttccgaagctctttgagtgccc

SEQ ID NO: 1415738 - DNA, 25 bp, Homo sapien
atttccgaagctctttgagtgcccg

SEQ ID NO: 1415739 - DNA, 25 bp, Homo sapien
ggcaaatttccgaagctctttgagt

SEQ ID NO: 1415740 - DNA, 25 bp, Homo sapien
ccactccatggatgtgcttgtgaat

SEQ ID NO: 1415741 - DNA, 25 bp, Homo sapien
gaagcccactccatggatgtgcttg

SEQ ID NO: 1415742 - DNA, 25 bp, Homo sapien
gttgatggtgtattctcgggtcacc

SEQ ID NO: 1415743 - DNA, 25 bp, Homo sapien
gcccactccatggatgtgcttgtga

SEQ ID NO: 1415744 - DNA, 25 bp, Homo sapien
tgatggcagaacggcccttttattc

SEQ ID NO: 1415745 - DNA, 25 bp, Homo sapien
ggcagaacggcccttttattcttgc

SEQ ID NO: 1415746 - DNA, 25 bp, Homo sapien
atggcagaacggcccttttattctt

SEQ ID NO: 1415747 - DNA, 25 bp, Homo sapien
cagaacggcccttttattcttgcca

SEQ ID NO: 1415748 - DNA, 25 bp, Homo sapien
ttgagggagaaggaaagccgagaat

SEQ ID NO: 1415749 - DNA, 25 bp, Homo sapien
caagttggaaaggaagagcgcgagg

SEQ ID NO: 1415750 - DNA, 25 bp, Homo sapien
ttggaaaggaagagcgcgagggatt

SEQ ID NO: 1415751 - DNA, 25 bp, Homo sapien
aaggaagagcgcgagggattgaggg

SEQ ID NO: 1415752 - DNA, 25 bp, Homo sapien
gatacatatatgctgtggtatacta

SEQ ID NO: 1415753 - DNA, 25 bp, Homo sapien
tcaatacatagagttagtcatagtc

SEQ ID NO: 1415754 - DNA, 25 bp, Homo sapien
gccaaactaaccataggagaagtct

SEQ ID NO: 1415755 - DNA, 25 bp, Homo sapien
tgaatccgaggctcagtacctgggt

SEQ ID NO: 1415756 - DNA, 25 bp, Homo sapien
ttagccgtgctagtattcaaaagcc

SEQ ID NO: 1415757 - DNA, 25 bp, Homo sapien
tgagacaggtgacatgactatagat

SEQ ID NO: 1415758 - DNA, 25 bp, Homo sapien
tcagtactgctatagacggtaaata

SEQ ID NO: 1415759 - DNA, 25 bp, Homo sapien
aactatctaggttcatttaaggaga

SEQ ID NO: 1415760 - DNA, 25 bp, Homo sapien
ctgcaaggcttactgcctcactgcc

SEQ ID NO: 1415761 - DNA, 25 bp, Homo sapien
acatcagctgcaaggcttactgcct

SEQ ID NO: 1415762 - DNA, 25 bp, Homo sapien
gcaaggcttactgcctcactgcctt

SEQ ID NO: 1415763 - DNA, 25 bp, Homo sapien
atcacatcagctgcaaggcttactg

SEQ ID NO: 1415764 - DNA, 25 bp, Homo sapien
ccttggaacaatcggctggagccct

SEQ ID NO: 1415765 - DNA, 25 bp, Homo sapien
tctgagccgggtggtcctggaatta

SEQ ID NO: 1415766 - DNA, 25 bp, Homo sapien
tcactttgctgtgagcccgggaacc

SEQ ID NO: 1415767 - DNA, 25 bp, Homo sapien
ccttggctcctggtaataggccgct

SEQ ID NO: 1415768 - DNA, 25 bp, Homo sapien
tctgcttgatagatgttgcgtcaca

SEQ ID NO: 1415769 - DNA, 25 bp, Homo sapien
gcgtcacaacccgattttccatttc

SEQ ID NO: 1415770 - DNA, 25 bp, Homo sapien
ctttctgagtgattaaccagaataa

SEQ ID NO: 1415771 - DNA, 25 bp, Homo sapien
agaataatatcaacagccttcatcc

SEQ ID NO: 1415772 - DNA, 25 bp, Homo sapien
gataaagactggaggtctgattaac

SEQ ID NO: 1415773 - DNA, 25 bp, Homo sapien
ctggaggtctgattaacatctagaa

SEQ ID NO: 1415774 - DNA, 25 bp, Homo sapien
aaagactggaggtctgattaacatc

SEQ ID NO: 1415775 - DNA, 25 bp, Homo sapien
ctttggataaagactggaggtctga

SEQ ID NO: 1415776 - DNA, 25 bp, Homo sapien
cagtcacccatagccatttctccag

SEQ ID NO: 1415777 - DNA, 25 bp, Homo sapien
ttaggactccacacgcaagggtttg

SEQ ID NO: 1415778 - DNA, 25 bp, Homo sapien
cattcagtctggagcaaagcctgct

SEQ ID NO: 1415779 - DNA, 25 bp, Homo sapien
cctggccggaggacattgacttaca

SEQ ID NO: 1415780 - DNA, 25 bp, Homo sapien
tctgttccagaatagagacacgtcg

SEQ ID NO: 1415781 - DNA, 25 bp, Homo sapien
tttacatggcaatcaaagccttttg

SEQ ID NO: 1415782 - DNA, 25 bp, Homo sapien
aaatattgcctgttttgggatcaca

SEQ ID NO: 1415783 - DNA, 25 bp, Homo sapien
catggcagattgtttgtgctttcaa

SEQ ID NO: 1415784 - DNA, 25 bp, Homo sapien
gatgtaacctggaaactatgcttta

SEQ ID NO: 1415785 - DNA, 25 bp, Homo sapien
cacttcccggtttcaagcgatactc

SEQ ID NO: 1415786 - DNA, 25 bp, Homo sapien
ttacaggaacctgcccccacgcctg

SEQ ID NO: 1415787 - DNA, 25 bp, Homo sapien
ctggactgcaacgatgtgatctcag

SEQ ID NO: 1415788 - DNA, 25 bp, Homo sapien
ctccacttcccggtttcaagcgata

SEQ ID NO: 1415789 - DNA, 25 bp, Homo sapien
ctgcttgaattcagaagttttgaga

SEQ ID NO: 1415790 - DNA, 25 bp, Homo sapien
gactgcttgaattcagaagttttga

SEQ ID NO: 1415791 - DNA, 25 bp, Homo sapien
gcttgaattcagaagttttgagacc

SEQ ID NO: 1415792 - DNA, 25 bp, Homo sapien
ttgaattcagaagttttgagaccag

SEQ ID NO: 1415793 - DNA, 25 bp, Homo sapien
tgggattacagctacttgcccgcca

SEQ ID NO: 1415794 - DNA, 25 bp, Homo sapien
gggattacagctacttgcccgccac

SEQ ID NO: 1415795 - DNA, 25 bp, Homo sapien
acgcagtctcgcaatgtcgaccagg

SEQ ID NO: 1415796 - DNA, 25 bp, Homo sapien
gagacgcagtctcgcaatgtcgacc

SEQ ID NO: 1415797 - DNA, 25 bp, Homo sapien
gggaaagattccacgtggtcctaga

SEQ ID NO: 1415798 - DNA, 25 bp, Homo sapien
gcatacgtattcgtcggttacagta

SEQ ID NO: 1415799 - DNA, 25 bp, Homo sapien
tgtagtaatatacccacgagcagtt

SEQ ID NO: 1415800 - DNA, 25 bp, Homo sapien
gcttacctaccatgggaaagattcc

SEQ ID NO: 1415801 - DNA, 25 bp, Homo sapien
ccacgctgtggcattaagaaggata

SEQ ID NO: 1415802 - DNA, 25 bp, Homo sapien
tttgttctgagatagccacgctgtg

SEQ ID NO: 1415803 - DNA, 25 bp, Homo sapien
taaaacagcgggacagaaagtcctg

SEQ ID NO: 1415804 - DNA, 25 bp, Homo sapien
gaattgatgtctgcgtgtcttcccc

SEQ ID NO: 1415805 - DNA, 25 bp, Homo sapien
cctgcctcggccccccaaagtgctt

SEQ ID NO: 1415806 - DNA, 25 bp, Homo sapien
ctcggccccccaaagtgcttgggat

SEQ ID NO: 1415807 - DNA, 25 bp, Homo sapien
cacctgccaccacacccggctaatt

SEQ ID NO: 1415808 - DNA, 25 bp, Homo sapien
tgggattacagggattacaggcacc

SEQ ID NO: 1415809 - DNA, 25 bp, Homo sapien
tataataagacaaatccttttagca

SEQ ID NO: 1415810 - DNA, 25 bp, Homo sapien
gagttactaagtttatgttcagata

SEQ ID NO: 1415811 - DNA, 25 bp, Homo sapien
catgactctccatattcagtgtaaa

SEQ ID NO: 1415812 - DNA, 25 bp, Homo sapien
tatttttggtattgtatgcatttgt

SEQ ID NO: 1415813 - DNA, 25 bp, Homo sapien
taagcgtgtgctgctattgatccaa

SEQ ID NO: 1415814 - DNA, 25 bp, Homo sapien
tgtggtacaacttcaagcacctgga

SEQ ID NO: 1415815 - DNA, 25 bp, Homo sapien
gatcttacccattacgtctgcagaa

SEQ ID NO: 1415816 - DNA, 25 bp, Homo sapien
tcttttttctaacgcaggccagacg

SEQ ID NO: 1415817 - DNA, 25 bp, Homo sapien
aactcattgcagtttagcacactaa

SEQ ID NO: 1415818 - DNA, 25 bp, Homo sapien
tgtttttggcaatatggtaggctaa

SEQ ID NO: 1415819 - DNA, 25 bp, Homo sapien
ctgccttttctactatgctgtaaag

SEQ ID NO: 1415820 - DNA, 25 bp, Homo sapien
gtaggctaaaggtacaggaaactca

SEQ ID NO: 1415821 - DNA, 25 bp, Homo sapien
acaaaagttgccctaccactcaggg

SEQ ID NO: 1415822 - DNA, 25 bp, Homo sapien
gaaagtgtccatcctagaaaaactg

SEQ ID NO: 1415823 - DNA, 25 bp, Homo sapien
ggcacctgagggaattgaatgcaaa

SEQ ID NO: 1415824 - DNA, 25 bp, Homo sapien
ctcagggagactgttattaagtacc

SEQ ID NO: 1415825 - DNA, 25 bp, Homo sapien
cgaggagattatatccagcacctga

SEQ ID NO: 1415826 - DNA, 25 bp, Homo sapien
actgtgctcttccaacgggcttaac

SEQ ID NO: 1415827 - DNA, 25 bp, Homo sapien
cgggcttaacaaacagcacacgagg

SEQ ID NO: 1415828 - DNA, 25 bp, Homo sapien
cagcacctgacttggagggtcctac

SEQ ID NO: 1415829 - DNA, 25 bp, Homo sapien
tgtatctaattcacctcttggggga

SEQ ID NO: 1415830 - DNA, 25 bp, Homo sapien
gtttgatagccttatctaaattccc

SEQ ID NO: 1415831 - DNA, 25 bp, Homo sapien
gccttatctaaattcccctagcttg

SEQ ID NO: 1415832 - DNA, 25 bp, Homo sapien
cttgaatgtagtaaatatgagtgtg

SEQ ID NO: 1415833 - DNA, 25 bp, Homo sapien
tcaacatttgataactctcagtagg

SEQ ID NO: 1415834 - DNA, 25 bp, Homo sapien
catttgataactctcagtagggcct

SEQ ID NO: 1415835 - DNA, 25 bp, Homo sapien
atttcagtggagcaaaatgtggtcc

SEQ ID NO: 1415836 - DNA, 25 bp, Homo sapien
cttttgataagccagtctccaatgc

SEQ ID NO: 1415837 - DNA, 25 bp, Homo sapien
gaatgaatgattctaagctggtttg

SEQ ID NO: 1415838 - DNA, 25 bp, Homo sapien
gacctcttagaagccctgaatttgg

SEQ ID NO: 1415839 - DNA, 25 bp, Homo sapien
gttctaggactaagccaattgttat

SEQ ID NO: 1415840 - DNA, 25 bp, Homo sapien
tttaggatcacctgctgttaccagc

SEQ ID NO: 1415841 - DNA, 25 bp, Homo sapien
ctggttggccttacttccctcttat

SEQ ID NO: 1415842 - DNA, 25 bp, Homo sapien
ttcttgaagtcattagtgtatccat

SEQ ID NO: 1415843 - DNA, 25 bp, Homo sapien
gccttacttccctcttatttcttga

SEQ ID NO: 1415844 - DNA, 25 bp, Homo sapien
catttcctctggttggccttacttc

SEQ ID NO: 1415845 - DNA, 25 bp, Homo sapien
gtgggggacaaggtgagggatagca

SEQ ID NO: 1415846 - DNA, 25 bp, Homo sapien
atcacacatcggggcctttcggggg

SEQ ID NO: 1415847 - DNA, 25 bp, Homo sapien
aacatcacacatcggggcctttcgg

SEQ ID NO: 1415848 - DNA, 25 bp, Homo sapien
aaggactttgcagggacgtggatga

SEQ ID NO: 1415849 - DNA, 25 bp, Homo sapien
tgtctaagtttcattgactacaagt

SEQ ID NO: 1415850 - DNA, 25 bp, Homo sapien
gactacaagttggaagatgaccacc

SEQ ID NO: 1415851 - DNA, 25 bp, Homo sapien
tattgctgtgattgttcagttgggc

SEQ ID NO: 1415852 - DNA, 25 bp, Homo sapien
cacacatctttttactgtattgctg

SEQ ID NO: 1415853 - DNA, 25 bp, Homo sapien
tgctggaaaactgagcgtgggaccc

SEQ ID NO: 1415854 - DNA, 25 bp, Homo sapien
gaggcaacccacgttgtcagcacca

SEQ ID NO: 1415855 - DNA, 25 bp, Homo sapien
tatttaaagctatgccacacatgca

SEQ ID NO: 1415856 - DNA, 25 bp, Homo sapien
tagcaccctgcagctatgctggaaa

SEQ ID NO: 1415857 - DNA, 25 bp, Homo sapien
cagcagtacagggacacagcttcat

SEQ ID NO: 1415858 - DNA, 25 bp, Homo sapien
gaatcagatgttaggagcttgtccc

SEQ ID NO: 1415859 - DNA, 25 bp, Homo sapien
gggctgacaataatacactcttggg

SEQ ID NO: 1415860 - DNA, 25 bp, Homo sapien
gggttgacttatgcccagcagtaca

SEQ ID NO: 1415861 - DNA, 25 bp, Homo sapien
ccctgtgtgtattccccggtagtca

SEQ ID NO: 1415862 - DNA, 25 bp, Homo sapien
cggtagtcaccgcagcgagatgctg

SEQ ID NO: 1415863 - DNA, 25 bp, Homo sapien
tcttgccagtaagaagttgacacgg

SEQ ID NO: 1415864 - DNA, 25 bp, Homo sapien
gacacggaggtatttgaaagcaatg

SEQ ID NO: 1415865 - DNA, 25 bp, Homo sapien
aagagttagagcctgatctgatgcc

SEQ ID NO: 1415866 - DNA, 25 bp, Homo sapien
tcatactattggctatttcatacca

SEQ ID NO: 1415867 - DNA, 25 bp, Homo sapien
ctgactcagcttccttcagccgact

SEQ ID NO: 1415868 - DNA, 25 bp, Homo sapien
catactattggctatttcataccaa

SEQ ID NO: 1415869 - DNA, 25 bp, Homo sapien
tgaaaatgtgccacagcagggtatg

SEQ ID NO: 1415870 - DNA, 25 bp, Homo sapien
tcagcacagggctagggtctttcgg

SEQ ID NO: 1415871 - DNA, 25 bp, Homo sapien
ttctgcaggaatgccgtaaccccaa

SEQ ID NO: 1415872 - DNA, 25 bp, Homo sapien
gaataggccagtgcgttctgcagga

SEQ ID NO: 1415873 - DNA, 25 bp, Homo sapien
gagtcgtggatgctcgagctcgggc

SEQ ID NO: 1415874 - DNA, 25 bp, Homo sapien
catgctcagcatggacagatgagct

SEQ ID NO: 1415875 - DNA, 25 bp, Homo sapien
gctgagcccctcaggagtctgaaga

SEQ ID NO: 1415876 - DNA, 25 bp, Homo sapien
ggaggactgacacagttccagaatt

SEQ ID NO: 1415877 - DNA, 25 bp, Homo sapien
tcttctgagggcagctggcagacct

SEQ ID NO: 1415878 - DNA, 25 bp, Homo sapien
aaagccagcttatcacagaggttgg

SEQ ID NO: 1415879 - DNA, 25 bp, Homo sapien
agccagcttatcacagaggttggag

SEQ ID NO: 1415880 - DNA, 25 bp, Homo sapien
gctcaggggggaaaagccagcttat

SEQ ID NO: 1415881 - DNA, 25 bp, Homo sapien
tctgtccaaccccagactttcctct

SEQ ID NO: 1415882 - DNA, 25 bp, Homo sapien
tgctgctggccgcactttaactccc

SEQ ID NO: 1415883 - DNA, 25 bp, Homo sapien
tgggaagttcaccagcgttttccag

SEQ ID NO: 1415884 - DNA, 25 bp, Homo sapien
ggcactgccaaattttccttggtgc

SEQ ID NO: 1415885 - DNA, 25 bp, Homo sapien
ggctctaaaaccaattgattcaccc

SEQ ID NO: 1415886 - DNA, 25 bp, Homo sapien
gcctgagtgggcagtttggctctaa

SEQ ID NO: 1415887 - DNA, 25 bp, Homo sapien
gagtgggcagtttggctctaaaacc

SEQ ID NO: 1415888 - DNA, 25 bp, Homo sapien
ttgattcacccagacaagctgcagc

SEQ ID NO: 1415889 - DNA, 25 bp, Homo sapien
cttgttctctacacagcgggggtgc

SEQ ID NO: 1415890 - DNA, 25 bp, Homo sapien
tccctggtgtgaccctctaacttgg

SEQ ID NO: 1415891 - DNA, 25 bp, Homo sapien
tgttctctacacagcgggggtgctc

SEQ ID NO: 1415892 - DNA, 25 bp, Homo sapien
gggtgctccctggtgtgaccctcta

SEQ ID NO: 1415893 - DNA, 25 bp, Homo sapien
ctcgccacatagcacttctttcttg

SEQ ID NO: 1415894 - DNA, 25 bp, Homo sapien
ttttttctcgccacatagcacttct

SEQ ID NO: 1415895 - DNA, 25 bp, Homo sapien
aaactttttttctcgccacatagca

SEQ ID NO: 1415896 - DNA, 25 bp, Homo sapien
ttttctcgccacatagcacttcttt

SEQ ID NO: 1415897 - DNA, 25 bp, Homo sapien
aaccttttcaatggtcgagatctga

SEQ ID NO: 1415898 - DNA, 25 bp, Homo sapien
ccttttcaatggtcgagatctgaga

SEQ ID NO: 1415899 - DNA, 25 bp, Homo sapien
ttttcaatggtcgagatctgagact

SEQ ID NO: 1415900 - DNA, 25 bp, Homo sapien
ttcaatggtcgagatctgagacttg

SEQ ID NO: 1415901 - DNA, 25 bp, Homo sapien
cacgtatggattgatctacaatcca

SEQ ID NO: 1415902 - DNA, 25 bp, Homo sapien
tgaaggaaggtggttactggtcaaa

SEQ ID NO: 1415903 - DNA, 25 bp, Homo sapien
gaccagcacatacacgtatggattg

SEQ ID NO: 1415904 - DNA, 25 bp, Homo sapien
catacacgtatggattgatctacaa

SEQ ID NO: 1415905 - DNA, 25 bp, Homo sapien
caaggtgctagtgacccctctgtgc

SEQ ID NO: 1415906 - DNA, 25 bp, Homo sapien
cacaaggtgctagtgacccctctgt

SEQ ID NO: 1415907 - DNA, 25 bp, Homo sapien
cacacaaggtgctagtgacccctct

SEQ ID NO: 1415908 - DNA, 25 bp, Homo sapien
acacacaaggtgctagtgacccctc

SEQ ID NO: 1415909 - DNA, 25 bp, Homo sapien
aggcaaagatgacatggtaagtgac

SEQ ID NO: 1415910 - DNA, 25 bp, Homo sapien
tcagtaggcaaagatgacatggtaa

SEQ ID NO: 1415911 - DNA, 25 bp, Homo sapien
gtaggcaaagatgacatggtaagtg

SEQ ID NO: 1415912 - DNA, 25 bp, Homo sapien
cagtaggcaaagatgacatggtaag

SEQ ID NO: 1415913 - DNA, 25 bp, Homo sapien
tagaaggcgccattgtataccacgt

SEQ ID NO: 1415914 - DNA, 25 bp, Homo sapien
tactcattctcgaacagcagcctgg

SEQ ID NO: 1415915 - DNA, 25 bp, Homo sapien
cccacagatgacgaagcagttgccg

SEQ ID NO: 1415916 - DNA, 25 bp, Homo sapien
tcgtaggccacgtcatgcagcatgg

SEQ ID NO: 1415917 - DNA, 25 bp, Homo sapien
ctgcaggtggggagaaaacaggagg

SEQ ID NO: 1415918 - DNA, 25 bp, Homo sapien
tgaagttctccaggttccggaactc

SEQ ID NO: 1415919 - DNA, 25 bp, Homo sapien
tgtttgaagttctccaggttccgga

SEQ ID NO: 1415920 - DNA, 25 bp, Homo sapien
cttgtttgaagttctccaggttccg

SEQ ID NO: 1415921 - DNA, 25 bp, Homo sapien
tgccgtagtaatagttggttacgta

SEQ ID NO: 1415922 - DNA, 25 bp, Homo sapien
atagttggttacgtaaatccgctca

SEQ ID NO: 1415923 - DNA, 25 bp, Homo sapien
ggttacgtaaatccgctcatccttg

SEQ ID NO: 1415924 - DNA, 25 bp, Homo sapien
cagggtgttgccgtagtaatagttg

SEQ ID NO: 1415925 - DNA, 25 bp, Homo sapien
ccgtgattgtggagagagtgtcctt

SEQ ID NO: 1415926 - DNA, 25 bp, Homo sapien
ccttcattccgcccatatgtgttct

SEQ ID NO: 1415927 - DNA, 25 bp, Homo sapien
ggccccttcattccgcccatatgtg

SEQ ID NO: 1415928 - DNA, 25 bp, Homo sapien
gtgttctgggtggtcggccccgtga

SEQ ID NO: 1415929 - DNA, 25 bp, Homo sapien
tggactcctcggcaggctttaacag

SEQ ID NO: 1415930 - DNA, 25 bp, Homo sapien
gctgatctagtgatgcctcacccct

SEQ ID NO: 1415931 - DNA, 25 bp, Homo sapien
ttaacagccctgtataacctgaccc

SEQ ID NO: 1415932 - DNA, 25 bp, Homo sapien
tacacttgaccctacacttgagcct

SEQ ID NO: 1415933 - DNA, 25 bp, Homo sapien
gatgggtgatgagaataattggtcc

SEQ ID NO: 1415934 - DNA, 25 bp, Homo sapien
agaataattggtccttgacactcac

SEQ ID NO: 1415935 - DNA, 25 bp, Homo sapien
tgacgacactgatgggtgatgagaa

SEQ ID NO: 1415936 - DNA, 25 bp, Homo sapien
tgagaataattggtccttgacactc

SEQ ID NO: 1415937 - DNA, 25 bp, Homo sapien
ctgacaggacaggagcaagcagctg

SEQ ID NO: 1415938 - DNA, 25 bp, Homo sapien
ctccccgcagtggtttgaggaagga

SEQ ID NO: 1415939 - DNA, 25 bp, Homo sapien
aatccgttccatctactctgctccc

SEQ ID NO: 1415940 - DNA, 25 bp, Homo sapien
tccaatccgttccatctactctgct

SEQ ID NO: 1415941 - DNA, 25 bp, Homo sapien
atgaggattgccatcaccgggcaat

SEQ ID NO: 1415942 - DNA, 25 bp, Homo sapien
aggattgccatcaccgggcaatcct

SEQ ID NO: 1415943 - DNA, 25 bp, Homo sapien
catgaggattgccatcaccgggcaa

SEQ ID NO: 1415944 - DNA, 25 bp, Homo sapien
tgaggattgccatcaccgggcaatc

SEQ ID NO: 1415945 - DNA, 25 bp, Homo sapien
tggtggattctgcataaaagttgaa

SEQ ID NO: 1415946 - DNA, 25 bp, Homo sapien
gcagtctattaagggttcaataaca

SEQ ID NO: 1415947 - DNA, 25 bp, Homo sapien
ctgattgatcagaggagtggatgct

SEQ ID NO: 1415948 - DNA, 25 bp, Homo sapien
gaattgtataattcatgctagtaaa

SEQ ID NO: 1415949 - DNA, 25 bp, Homo sapien
gccttccattccctgcccaacctgg

SEQ ID NO: 1415950 - DNA, 25 bp, Homo sapien
ccattccctgcccaacctggcgcat

SEQ ID NO: 1415951 - DNA, 25 bp, Homo sapien
cttccattccctgcccaacctggcg

SEQ ID NO: 1415952 - DNA, 25 bp, Homo sapien
ttccctgcccaacctggcgcatgct

SEQ ID NO: 1415953 - DNA, 25 bp, Homo sapien
cacgctgtagtggtagatgaattat

SEQ ID NO: 1415954 - DNA, 25 bp, Homo sapien
ttggatctttgcagccgagcacgct

SEQ ID NO: 1415955 - DNA, 25 bp, Homo sapien
catcaaaaggcttagacttcagtcc

SEQ ID NO: 1415956 - DNA, 25 bp, Homo sapien
taatactagatgactctttatcctc

SEQ ID NO: 1415957 - DNA, 25 bp, Homo sapien
cctgtgttatacgatgactggattt

SEQ ID NO: 1415958 - DNA, 25 bp, Homo sapien
tgttatacgatgactggatttccag

SEQ ID NO: 1415959 - DNA, 25 bp, Homo sapien
aggcccctgtgttatacgatgactg

SEQ ID NO: 1415960 - DNA, 25 bp, Homo sapien
cagaggcccctgtgttatacgatga

SEQ ID NO: 1415961 - DNA, 25 bp, Homo sapien
gaagcgccttctcggatggtaccaa

SEQ ID NO: 1415962 - DNA, 25 bp, Homo sapien
tcatttctctgcagtagcctgagct

SEQ ID NO: 1415963 - DNA, 25 bp, Homo sapien
gccccttctacaaaatgcatcagga

SEQ ID NO: 1415964 - DNA, 25 bp, Homo sapien
gggctgtcccgagcagaagcgcctt

SEQ ID NO: 1415965 - DNA, 25 bp, Homo sapien
ggcatttgaagaacacactacatct

SEQ ID NO: 1415966 - DNA, 25 bp, Homo sapien
ttggcatttgaagaacacactacat

SEQ ID NO: 1415967 - DNA, 25 bp, Homo sapien
tggcatttgaagaacacactacatc

SEQ ID NO: 1415968 - DNA, 25 bp, Homo sapien
ctgcagtcgacataagaggtgagaa

SEQ ID NO: 1415969 - DNA, 25 bp, Homo sapien
agtcgacataagaggtgagaacccc

SEQ ID NO: 1415970 - DNA, 25 bp, Homo sapien
gacataagaggtgagaaccccagct

SEQ ID NO: 1415971 - DNA, 25 bp, Homo sapien
ataagaggtgagaaccccagctcct

SEQ ID NO: 1415972 - DNA, 25 bp, Homo sapien
gggaaagagttataagtgtccctga

SEQ ID NO: 1415973 - DNA, 25 bp, Homo sapien
gagttataagtgtccctgaaaacac

SEQ ID NO: 1415974 - DNA, 25 bp, Homo sapien
atcagcatctcaattaggctactgg

SEQ ID NO: 1415975 - DNA, 25 bp, Homo sapien
cagcatctcaattaggctactggag

SEQ ID NO: 1415976 - DNA, 25 bp, Homo sapien
gcaagtcaccgacggaagaggctcc

SEQ ID NO: 1415977 - DNA, 25 bp, Homo sapien
ggcttgcaaggtgtgtgggtcctac

SEQ ID NO: 1415978 - DNA, 25 bp, Homo sapien
tcctggctagcaagtcaccgacgga

SEQ ID NO: 1415979 - DNA, 25 bp, Homo sapien
agacaccattgcctgatggcttgca

SEQ ID NO: 1415980 - DNA, 25 bp, Homo sapien
gcagcctgtcttcactgttagcatt

SEQ ID NO: 1415981 - DNA, 25 bp, Homo sapien
ctgcagcctgtcttcactgttagca

SEQ ID NO: 1415982 - DNA, 25 bp, Homo sapien
gcctgtcttcactgttagcattctg

SEQ ID NO: 1415983 - DNA, 25 bp, Homo sapien
ctgtcttcactgttagcattctgga

SEQ ID NO: 1415984 - DNA, 25 bp, Homo sapien
atgacattccggatgtcatcttctt

SEQ ID NO: 1415985 - DNA, 25 bp, Homo sapien
tatgacattccggatgtcatcttct

SEQ ID NO: 1415986 - DNA, 25 bp, Homo sapien
ctatgacattccggatgtcatcttc

SEQ ID NO: 1415987 - DNA, 25 bp, Homo sapien
ctggcaggggttgttccccacccag

SEQ ID NO: 1415988 - DNA, 25 bp, Homo sapien
tggcaggggttgttccccacccagc

SEQ ID NO: 1415989 - DNA, 25 bp, Homo sapien
tctttccccagcgagtctgttctga

SEQ ID NO: 1415990 - DNA, 25 bp, Homo sapien
atctttccccagcgagtctgttctg

SEQ ID NO: 1415991 - DNA, 25 bp, Homo sapien
gatctggagacaccgaggttgtttg

SEQ ID NO: 1415992 - DNA, 25 bp, Homo sapien
ccactgaggcatggttggcgatgct

SEQ ID NO: 1415993 - DNA, 25 bp, Homo sapien
tgtttggagtgttggtcccactgag

SEQ ID NO: 1415994 - DNA, 25 bp, Homo sapien
tcaggtcgcttgtcacagcagtgct

SEQ ID NO: 1415995 - DNA, 25 bp, Homo sapien
tctcaggagctgatcttcaatcagc

SEQ ID NO: 1415996 - DNA, 25 bp, Homo sapien
catcaggccgttgtgtctcaggagc

SEQ ID NO: 1415997 - DNA, 25 bp, Homo sapien
cattgtcaccgctgaaaaactcatc

SEQ ID NO: 1415998 - DNA, 25 bp, Homo sapien
aatcagcaaatccactccattgtca

SEQ ID NO: 1415999 - DNA, 25 bp, Homo sapien
ctctggggcggccctgttgacccca

SEQ ID NO: 1416000 - DNA, 25 bp, Homo sapien
ggcggccctgttgaccccaactcac

SEQ ID NO: 1416001 - DNA, 25 bp, Homo sapien
tctggggcggccctgttgaccccaa

SEQ ID NO: 1416002 - DNA, 25 bp, Homo sapien
gggcggccctgttgaccccaactca

SEQ ID NO: 1416003 - DNA, 25 bp, Homo sapien
ccaggggtcgcgtctgcagaagttc

SEQ ID NO: 1416004 - DNA, 25 bp, Homo sapien
ccttggctttatagtaggtgatgcc

SEQ ID NO: 1416005 - DNA, 25 bp, Homo sapien
cagaagttcgatggagttgatctgc

SEQ ID NO: 1416006 - DNA, 25 bp, Homo sapien
tatagtaggtgatgccccggatgac

SEQ ID NO: 1416007 - DNA, 25 bp, Homo sapien
tcagaggggacacaagggaaggtca

SEQ ID NO: 1416008 - DNA, 25 bp, Homo sapien
agaggggacacaagggaaggtcagg

SEQ ID NO: 1416009 - DNA, 25 bp, Homo sapien
ctcagaggggacacaagggaaggtc

SEQ ID NO: 1416010 - DNA, 25 bp, Homo sapien
ggggacacaagggaaggtcaggtca

SEQ ID NO: 1416011 - DNA, 25 bp, Homo sapien
atctggatggcgctgtgagagtgcc

SEQ ID NO: 1416012 - DNA, 25 bp, Homo sapien
cgctgtgagagtgccctgtgacagc

SEQ ID NO: 1416013 - DNA, 25 bp, Homo sapien
ggcccggtgactgggcatctggatg

SEQ ID NO: 1416014 - DNA, 25 bp, Homo sapien
ccggtgactgggcatctggatggcg

SEQ ID NO: 1416015 - DNA, 25 bp, Homo sapien
tcctgtgttggtctgttcagccaga

SEQ ID NO: 1416016 - DNA, 25 bp, Homo sapien
tctctggtcctgtgttggtctgttc

SEQ ID NO: 1416017 - DNA, 25 bp, Homo sapien
ggtcctgtgttggtctgttcagcca

SEQ ID NO: 1416018 - DNA, 25 bp, Homo sapien
gtgttggtctgttcagccagactcc

SEQ ID NO: 1416019 - DNA, 25 bp, Homo sapien
caacctgtgaactgactgtgctcaa

SEQ ID NO: 1416020 - DNA, 25 bp, Homo sapien
aactgactgtgctcaaagtcagggc

SEQ ID NO: 1416021 - DNA, 25 bp, Homo sapien
gactccagtggctggataatgaaga

SEQ ID NO: 1416022 - DNA, 25 bp, Homo sapien
accttgggcatacaacctgtgaact

SEQ ID NO: 1416023 - DNA, 25 bp, Homo sapien
cctcgcttattcatctcggttcgaa

SEQ ID NO: 1416024 - DNA, 25 bp, Homo sapien
gatgtctggcatgctatctaggatg

SEQ ID NO: 1416025 - DNA, 25 bp, Homo sapien
ctctgggtgggcgtaggctgctgct

SEQ ID NO: 1416026 - DNA, 25 bp, Homo sapien
gatgttttcagagcaattttctttg

SEQ ID NO: 1416027 - DNA, 25 bp, Homo sapien
aagacaagcaggaggcagctagcag

SEQ ID NO: 1416028 - DNA, 25 bp, Homo sapien
tgaagacaagcaggaggcagctagc

SEQ ID NO: 1416029 - DNA, 25 bp, Homo sapien
cctgaagacaagcaggaggcagcta

SEQ ID NO: 1416030 - DNA, 25 bp, Homo sapien
gacaagcaggaggcagctagcagcc

SEQ ID NO: 1416031 - DNA, 25 bp, Homo sapien
ctgtcctttgtatatagtccactct

SEQ ID NO: 1416032 - DNA, 25 bp, Homo sapien
tgggccaccaggacaccaggttctt

SEQ ID NO: 1416033 - DNA, 25 bp, Homo sapien
attaataacattgacaagtctctgg

SEQ ID NO: 1416034 - DNA, 25 bp, Homo sapien
cactcttatccagtgttgaagaaca

SEQ ID NO: 1416035 - DNA, 25 bp, Homo sapien
aagccaccaaagctttaggtgtggg

SEQ ID NO: 1416036 - DNA, 25 bp, Homo sapien
tacattctggggagcggaccagttc

SEQ ID NO: 1416037 - DNA, 25 bp, Homo sapien
agttctgggtctggtaaatccatcg

SEQ ID NO: 1416038 - DNA, 25 bp, Homo sapien
aaatccatcgtggacttaaatcttc

SEQ ID NO: 1416039 - DNA, 25 bp, Homo sapien
gtatagacgataccaccctgctggg

SEQ ID NO: 1416040 - DNA, 25 bp, Homo sapien
gggcactggtattgcatcaaattca

SEQ ID NO: 1416041 - DNA, 25 bp, Homo sapien
cacccatactccctcctgagcaggg

SEQ ID NO: 1416042 - DNA, 25 bp, Homo sapien
gtgtgactgtatagacgataccacc

SEQ ID NO: 1416043 - DNA, 25 bp, Homo sapien
caggcagaatggcaactgtttggct

SEQ ID NO: 1416044 - DNA, 25 bp, Homo sapien
aagcagaagaggttgctgtcgctcc

SEQ ID NO: 1416045 - DNA, 25 bp, Homo sapien
ctgtttggctgccaaggtcaggtaa

SEQ ID NO: 1416046 - DNA, 25 bp, Homo sapien
agagcactgtactctccctccagat

SEQ ID NO: 1416047 - DNA, 25 bp, Homo sapien
agatgcccagggtcctagttctttg

SEQ ID NO: 1416048 - DNA, 25 bp, Homo sapien
ccagggtcctagttctttgagagaa

SEQ ID NO: 1416049 - DNA, 25 bp, Homo sapien
tgttaacattgaggaaggagagact

SEQ ID NO: 1416050 - DNA, 25 bp, Homo sapien
taacattgaggaaggagagactcaa

SEQ ID NO: 1416051 - DNA, 25 bp, Homo sapien
ggccatagaacgctccttccaacat

SEQ ID NO: 1416052 - DNA, 25 bp, Homo sapien
gaacgctccttccaacatgtctatg

SEQ ID NO: 1416053 - DNA, 25 bp, Homo sapien
cactcgccccaccagtttggtggtg

SEQ ID NO: 1416054 - DNA, 25 bp, Homo sapien
ctgaatgtagcttcaggagatccag

SEQ ID NO: 1416055 - DNA, 25 bp, Homo sapien
gaattgagaggttgccgtgagaaac

SEQ ID NO: 1416056 - DNA, 25 bp, Homo sapien
ggaaagccactagccaggaattgag

SEQ ID NO: 1416057 - DNA, 25 bp, Homo sapien
gcattctgccttccgaaatgtttgg

SEQ ID NO: 1416058 - DNA, 25 bp, Homo sapien
ggatgtaggcaagcacaatggtgta

SEQ ID NO: 1416059 - DNA, 25 bp, Homo sapien
catcctgcctgccagtacagaggcc

SEQ ID NO: 1416060 - DNA, 25 bp, Homo sapien
ggccgaggctctggcggcactgagg

SEQ ID NO: 1416061 - DNA, 25 bp, Homo sapien
gtggccgaggctctggcggcactga

SEQ ID NO: 1416062 - DNA, 25 bp, Homo sapien
aggtggccgaggctctggcggcact

SEQ ID NO: 1416063 - DNA, 25 bp, Homo sapien
tcttcaaagggcttagaatcttcaa

SEQ ID NO: 1416064 - DNA, 25 bp, Homo sapien
gacttgtggatctcaaaagtgccct

SEQ ID NO: 1416065 - DNA, 25 bp, Homo sapien
accatggccttaccagacttgtgga

SEQ ID NO: 1416066 - DNA, 25 bp, Homo sapien
aaggcattgccccataccaggtcct

SEQ ID NO: 1416067 - DNA, 25 bp, Homo sapien
tccctcgcagggattgagggccgat

SEQ ID NO: 1416068 - DNA, 25 bp, Homo sapien
tccgagccctcagacatagccttga

SEQ ID NO: 1416069 - DNA, 25 bp, Homo sapien
cctgaggtgatggtttccacggtat

SEQ ID NO: 1416070 - DNA, 25 bp, Homo sapien
cacttgcacgacgagcctgaggtga

SEQ ID NO: 1416071 - DNA, 25 bp, Homo sapien
gagataaaacgttctcctggttgtc

SEQ ID NO: 1416072 - DNA, 25 bp, Homo sapien
cactgtctgcgcatctgggggctcg

SEQ ID NO: 1416073 - DNA, 25 bp, Homo sapien
tggttgtccgcctcgttttgcagag

SEQ ID NO: 1416074 - DNA, 25 bp, Homo sapien
ttttgcagagtctcgtcctccgcag

SEQ ID NO: 1416075 - DNA, 25 bp, Homo sapien
acccaggccggaaccacaatcagag

SEQ ID NO: 1416076 - DNA, 25 bp, Homo sapien
gaaccacaatcagagcgaagtagag

SEQ ID NO: 1416077 - DNA, 25 bp, Homo sapien
tgtgaggacaatgctggacacccag

SEQ ID NO: 1416078 - DNA, 25 bp, Homo sapien
tagagaactagcagccgaggcttgg

SEQ ID NO: 1416079 - DNA, 25 bp, Homo sapien
cgcgataagagtgtcctcagcccct

SEQ ID NO: 1416080 - DNA, 25 bp, Homo sapien
accttctaaagctgggtgcggctga

SEQ ID NO: 1416081 - DNA, 25 bp, Homo sapien
tcagccccttcagagaatggctggg

SEQ ID NO: 1416082 - DNA, 25 bp, Homo sapien
tgtcctcgctagagcccgaaagtgg

SEQ ID NO: 1416083 - DNA, 25 bp, Homo sapien
tcctgtagtactctcacacttccct

SEQ ID NO: 1416084 - DNA, 25 bp, Homo sapien
ttcctccttcccgtgcacattcctg

SEQ ID NO: 1416085 - DNA, 25 bp, Homo sapien
tcccgtgcacattcctgtagtactc

SEQ ID NO: 1416086 - DNA, 25 bp, Homo sapien
ccccatctagatcaccctttgttgg

SEQ ID NO: 1416087 - DNA, 25 bp, Homo sapien
gtcacatacgaacaaaaagcgccta

SEQ ID NO: 1416088 - DNA, 25 bp, Homo sapien
gactctgagaattaatgagggccca

SEQ ID NO: 1416089 - DNA, 25 bp, Homo sapien
taagatagtcctccatttgggcgca

SEQ ID NO: 1416090 - DNA, 25 bp, Homo sapien
tatctgggacaagacttgggccttc

SEQ ID NO: 1416091 - DNA, 25 bp, Homo sapien
ccgggcggtgcgttccactgctctg

SEQ ID NO: 1416092 - DNA, 25 bp, Homo sapien
tgatccagcgtctccgtgacaggca

SEQ ID NO: 1416093 - DNA, 25 bp, Homo sapien
tggcggctgatccagcgtctccgtg

SEQ ID NO: 1416094 - DNA, 25 bp, Homo sapien
ggcacctcagatcccggcagtctgg

SEQ ID NO: 1416095 - DNA, 25 bp, Homo sapien
gaatcaacattggattgagtgttcc

SEQ ID NO: 1416096 - DNA, 25 bp, Homo sapien
tttcagggttaaatccacatcgcag

SEQ ID NO: 1416097 - DNA, 25 bp, Homo sapien
agctctttctctcccaagggctggc

SEQ ID NO: 1416098 - DNA, 25 bp, Homo sapien
tacccttggaaaatgagtgcagctc

SEQ ID NO: 1416099 - DNA, 25 bp, Homo sapien
tgggcaacgggtcacctgtaaagac

SEQ ID NO: 1416100 - DNA, 25 bp, Homo sapien
ggctatgtccgggacccaggtctgc

SEQ ID NO: 1416101 - DNA, 25 bp, Homo sapien
gaccatgttgatgttgtccagataa

SEQ ID NO: 1416102 - DNA, 25 bp, Homo sapien
tttccattgtggctatgtccgggac

SEQ ID NO: 1416103 - DNA, 25 bp, Homo sapien
tgaggtcttgcttttcacatgcagc

SEQ ID NO: 1416104 - DNA, 25 bp, Homo sapien
aaaaatgagctcaaggctttggtgc

SEQ ID NO: 1416105 - DNA, 25 bp, Homo sapien
cctgttccactgagctttctgtaga

SEQ ID NO: 1416106 - DNA, 25 bp, Homo sapien
ttctgtagagcatactcatgggtgc

SEQ ID NO: 1416107 - DNA, 25 bp, Homo sapien
tcatggagatttaaaaaatgtggta

SEQ ID NO: 1416108 - DNA, 25 bp, Homo sapien
agatttaaaaaatgtggtagttctg

SEQ ID NO: 1416109 - DNA, 25 bp, Homo sapien
aaaaatgtggtagttctgtttccat

SEQ ID NO: 1416110 - DNA, 25 bp, Homo sapien
aaatgtggtagttctgtttccatct

SEQ ID NO: 1416111 - DNA, 25 bp, Homo sapien
ggttcaggttcatcatatgccccat

SEQ ID NO: 1416112 - DNA, 25 bp, Homo sapien
ttcctagtggcttgagtgctccagc

SEQ ID NO: 1416113 - DNA, 25 bp, Homo sapien
cgaacctcctgtgggtcccctgttg

SEQ ID NO: 1416114 - DNA, 25 bp, Homo sapien
ggttcagcggcagttctccagttta

SEQ ID NO: 1416115 - DNA, 25 bp, Homo sapien
gctgagtgtctgagctgagttctgc

SEQ ID NO: 1416116 - DNA, 25 bp, Homo sapien
caagtgttgacttctgtcctgttaa

SEQ ID NO: 1416117 - DNA, 25 bp, Homo sapien
ccaaaccatggtccagttgttgaag

SEQ ID NO: 1416118 - DNA, 25 bp, Homo sapien
tcagctagtttaggattgagcagag

SEQ ID NO: 1416119 - DNA, 25 bp, Homo sapien
tggtgattcagacaagatctctcag

SEQ ID NO: 1416120 - DNA, 25 bp, Homo sapien
cagtagagcacttgcctctagttgc

SEQ ID NO: 1416121 - DNA, 25 bp, Homo sapien
ctctagttgctcttgagcacccttc

SEQ ID NO: 1416122 - DNA, 25 bp, Homo sapien
cacttgcctctagttgctcttgagc

SEQ ID NO: 1416123 - DNA, 25 bp, Homo sapien
cacagtagagcacttgcctctagtt

SEQ ID NO: 1416124 - DNA, 25 bp, Homo sapien
cccagtaaatttgcgtggacagcta

SEQ ID NO: 1416125 - DNA, 25 bp, Homo sapien
tggacagctaatgccatccatggga

SEQ ID NO: 1416126 - DNA, 25 bp, Homo sapien
tgctttgcatccgtcacatttcagg

SEQ ID NO: 1416127 - DNA, 25 bp, Homo sapien
cgtcctctgtagtggactcctgaga

SEQ ID NO: 1416128 - DNA, 25 bp, Homo sapien
ccagatggtgacccttcgctcccca

SEQ ID NO: 1416129 - DNA, 25 bp, Homo sapien
gcccggccttggagaggatgtttaa

SEQ ID NO: 1416130 - DNA, 25 bp, Homo sapien
cacttcagacttggagagaattttt

SEQ ID NO: 1416131 - DNA, 25 bp, Homo sapien
catttgagaggggtaaaccgatcac

SEQ ID NO: 1416132 - DNA, 25 bp, Homo sapien
gtttaattcaaccttctcattgtgc

SEQ ID NO: 1416133 - DNA, 25 bp, Homo sapien
taattgttcagatcatgttcccgca

SEQ ID NO: 1416134 - DNA, 25 bp, Homo sapien
tgttcccgcacagagtacataaagc

SEQ ID NO: 1416135 - DNA, 25 bp, Homo sapien
gaattatagggaagagtagacaacc

SEQ ID NO: 1416136 - DNA, 25 bp, Homo sapien
gaagccaaccaaggtcacattgtgc

SEQ ID NO: 1416137 - DNA, 25 bp, Homo sapien
tgacttggcgcctaatggaaacttc

SEQ ID NO: 1416138 - DNA, 25 bp, Homo sapien
tttgtgatctcttttgacttggcgc

SEQ ID NO: 1416139 - DNA, 25 bp, Homo sapien
tctcttttgacttggcgcctaatgg

SEQ ID NO: 1416140 - DNA, 25 bp, Homo sapien
cttggcgcctaatggaaacttctgc

SEQ ID NO: 1416141 - DNA, 25 bp, Homo sapien
tagaattagatccagttcctgcccc

SEQ ID NO: 1416142 - DNA, 25 bp, Homo sapien
cccatgaacttgatgtgagataagc

SEQ ID NO: 1416143 - DNA, 25 bp, Homo sapien
tttgtggcctgtagaagtaatcggc

SEQ ID NO: 1416144 - DNA, 25 bp, Homo sapien
gtggttaattcctctcaactgcagg

SEQ ID NO: 1416145 - DNA, 25 bp, Homo sapien
tgaagattctgagatcctcgtcaac

SEQ ID NO: 1416146 - DNA, 25 bp, Homo sapien
gatctctgaatttccgttctaccct

SEQ ID NO: 1416147 - DNA, 25 bp, Homo sapien
cgtcaacttggtacttgatctctga

SEQ ID NO: 1416148 - DNA, 25 bp, Homo sapien
gagttggagttgatcttcgtttgct

SEQ ID NO: 1416149 - DNA, 25 bp, Homo sapien
ggctcccttgtggatgagggctctg

SEQ ID NO: 1416150 - DNA, 25 bp, Homo sapien
ctcataataggtaagcatctggcag

SEQ ID NO: 1416151 - DNA, 25 bp, Homo sapien
gctcccttgtggatgagggctctgg

SEQ ID NO: 1416152 - DNA, 25 bp, Homo sapien
tcataataggtaagcatctggcaga

SEQ ID NO: 1416153 - DNA, 25 bp, Homo sapien
gctgcagttaatgctgctttgttcc

SEQ ID NO: 1416154 - DNA, 25 bp, Homo sapien
tgttccatgctaaatgaggcgagaa

SEQ ID NO: 1416155 - DNA, 25 bp, Homo sapien
tttgttccatgctaaatgaggcgag

SEQ ID NO: 1416156 - DNA, 25 bp, Homo sapien
cggaatctggggccgctcctgctgc

SEQ ID NO: 1416157 - DNA, 25 bp, Homo sapien
tcccacctactggtaaccattgttc

SEQ ID NO: 1416158 - DNA, 25 bp, Homo sapien
taaccattgttctactctctctttc

SEQ ID NO: 1416159 - DNA, 25 bp, Homo sapien
cacctactggtaaccattgttctac

SEQ ID NO: 1416160 - DNA, 25 bp, Homo sapien
cttcccacctactggtaaccattgt

SEQ ID NO: 1416161 - DNA, 25 bp, Homo sapien
taggctccgggagtgtaagcgcatt

SEQ ID NO: 1416162 - DNA, 25 bp, Homo sapien
tattggttggatgccgtaggctccg

SEQ ID NO: 1416163 - DNA, 25 bp, Homo sapien
agttcactatacattctcgctggta

SEQ ID NO: 1416164 - DNA, 25 bp, Homo sapien
tctcgctggtatacatggttcagtc

SEQ ID NO: 1416165 - DNA, 25 bp, Homo sapien
gtaaatatgaacaccagtctgtcgt

SEQ ID NO: 1416166 - DNA, 25 bp, Homo sapien
gaaaccaggttgctggcattgcact

SEQ ID NO: 1416167 - DNA, 25 bp, Homo sapien
cagggtggctggtaatgctgaaacc

SEQ ID NO: 1416168 - DNA, 25 bp, Homo sapien
gaataggtgagtccagcagccagat

SEQ ID NO: 1416169 - DNA, 25 bp, Homo sapien
gctcttaaaccaggggatagatccc

SEQ ID NO: 1416170 - DNA, 25 bp, Homo sapien
gcagtcgaaacgtggtgcagcctct

SEQ ID NO: 1416171 - DNA, 25 bp, Homo sapien
gcctctggtggccaatacagaccaa

SEQ ID NO: 1416172 - DNA, 25 bp, Homo sapien
gatagatccctgcagtcgaaacgtg

SEQ ID NO: 1416173 - DNA, 25 bp, Homo sapien
tgcactgacacacctcatgtttggg

SEQ ID NO: 1416174 - DNA, 25 bp, Homo sapien
gggagtcctctgaagccaacagtgt

SEQ ID NO: 1416175 - DNA, 25 bp, Homo sapien
gatgttattgagtttccacgggagg

SEQ ID NO: 1416176 - DNA, 25 bp, Homo sapien
ccacgggaggatttgatattgccca

SEQ ID NO: 1416177 - DNA, 25 bp, Homo sapien
tccctgtggaggtcagttgcccctt

SEQ ID NO: 1416178 - DNA, 25 bp, Homo sapien
tctcccgagccgctaagacatagtc

SEQ ID NO: 1416179 - DNA, 25 bp, Homo sapien
caacataatcgcctggccctggtgc

SEQ ID NO: 1416180 - DNA, 25 bp, Homo sapien
aaataggtggagtgtacatctagcc

SEQ ID NO: 1416181 - DNA, 25 bp, Homo sapien
tctctagggctgatggagatcatca

SEQ ID NO: 1416182 - DNA, 25 bp, Homo sapien
gattcgggctctaaaactgggtctc

SEQ ID NO: 1416183 - DNA, 25 bp, Homo sapien
gtcacataggcaatgaatggccagg

SEQ ID NO: 1416184 - DNA, 25 bp, Homo sapien
cctttgggattctctgctcgttgga

SEQ ID NO: 1416185 - DNA, 25 bp, Homo sapien
gctggtccacacttttctggacttc

SEQ ID NO: 1416186 - DNA, 25 bp, Homo sapien
ttctggttgagccagtctgctcaga

SEQ ID NO: 1416187 - DNA, 25 bp, Homo sapien
agtagtctgtgttagtgctgtcctg

SEQ ID NO: 1416188 - DNA, 25 bp, Homo sapien
cagtctgctcagatacgaacttcca

SEQ ID NO: 1416189 - DNA, 25 bp, Homo sapien
tccaggatcttgtctgggaccacat

SEQ ID NO: 1416190 - DNA, 25 bp, Homo sapien
catttagttcttatcctccttaggc

SEQ ID NO: 1416191 - DNA, 25 bp, Homo sapien
aagacagagaggtaagatggcattc

SEQ ID NO: 1416192 - DNA, 25 bp, Homo sapien
gtcaggcctattttgtagaatctcc

SEQ ID NO: 1416193 - DNA, 25 bp, Homo sapien
tttgtgagggcaactgtacagcttg

SEQ ID NO: 1416194 - DNA, 25 bp, Homo sapien
atatccctgagttccctaagagaca

SEQ ID NO: 1416195 - DNA, 25 bp, Homo sapien
catgtggaggtacaatgggaagatc

SEQ ID NO: 1416196 - DNA, 25 bp, Homo sapien
gcgttctcctagatagctggctaca

SEQ ID NO: 1416197 - DNA, 25 bp, Homo sapien
cctgtagttgacctctttgtgtttg

SEQ ID NO: 1416198 - DNA, 25 bp, Homo sapien
ctgtagttgacctctttgtgtttgt

SEQ ID NO: 1416199 - DNA, 25 bp, Homo sapien
caagcaatcaggtctgagtggagta

SEQ ID NO: 1416200 - DNA, 25 bp, Homo sapien
tctatcttgctgaatagcagccaag

SEQ ID NO: 1416201 - DNA, 25 bp, Homo sapien
ccttttcgccttgaccatttactga

SEQ ID NO: 1416202 - DNA, 25 bp, Homo sapien
tagaaagggagctagacaagcaatc

SEQ ID NO: 1416203 - DNA, 25 bp, Homo sapien
gtctggtatttaggtctgagacagt

SEQ ID NO: 1416204 - DNA, 25 bp, Homo sapien
tctggtatttaggtctgagacagtg

SEQ ID NO: 1416205 - DNA, 25 bp, Homo sapien
gacagtgtctcgccaacagcccttg

SEQ ID NO: 1416206 - DNA, 25 bp, Homo sapien
ggtatttaggtctgagacagtgtct

SEQ ID NO: 1416207 - DNA, 25 bp, Homo sapien
tctccagttaccattactgttgccg

SEQ ID NO: 1416208 - DNA, 25 bp, Homo sapien
taccattactgttgccgtgtccttt

SEQ ID NO: 1416209 - DNA, 25 bp, Homo sapien
tgttgccgtgtcctttccttcattc

SEQ ID NO: 1416210 - DNA, 25 bp, Homo sapien
actgttgccgtgtcctttccttcat

SEQ ID NO: 1416211 - DNA, 25 bp, Homo sapien
aatgcaaagaccacacacgggcaag

SEQ ID NO: 1416212 - DNA, 25 bp, Homo sapien
ccattccattgtgaagatgagccag

SEQ ID NO: 1416213 - DNA, 25 bp, Homo sapien
ggcaagggcatcaaacacgtttctg

SEQ ID NO: 1416214 - DNA, 25 bp, Homo sapien
gaatagagtttgtcggtggctctcc

SEQ ID NO: 1416215 - DNA, 25 bp, Homo sapien
catgtaaggttgtaccaggcaacca

SEQ ID NO: 1416216 - DNA, 25 bp, Homo sapien
cagtgtagggcccaagtgtctcagg

SEQ ID NO: 1416217 - DNA, 25 bp, Homo sapien
gcctttaagttggaaatagtctgga

SEQ ID NO: 1416218 - DNA, 25 bp, Homo sapien
tagaagggcgataggatagcacagt

SEQ ID NO: 1416219 - DNA, 25 bp, Homo sapien
gagtgacatgttcaaatagctccat

SEQ ID NO: 1416220 - DNA, 25 bp, Homo sapien
gaatgggagatccatttgctctggt

SEQ ID NO: 1416221 - DNA, 25 bp, Homo sapien
tgggagatccatttgctctggttgg

SEQ ID NO: 1416222 - DNA, 25 bp, Homo sapien
atgggagatccatttgctctggttg

SEQ ID NO: 1416223 - DNA, 25 bp, Homo sapien
aagaagctaaattaggtgccagagc

SEQ ID NO: 1416224 - DNA, 25 bp, Homo sapien
ggtgccagagctttcaacagtctct

SEQ ID NO: 1416225 - DNA, 25 bp, Homo sapien
ctccaggtatttgccagtttgtaag

SEQ ID NO: 1416226 - DNA, 25 bp, Homo sapien
gtatttgccagtttgtaagtggcag

SEQ ID NO: 1416227 - DNA, 25 bp, Homo sapien
taactcgctcaaatggatcaaggtt

SEQ ID NO: 1416228 - DNA, 25 bp, Homo sapien
tctctaccccggctgcctgccaaaa

SEQ ID NO: 1416229 - DNA, 25 bp, Homo sapien
cttctaactcgctcaaatggatcaa

SEQ ID NO: 1416230 - DNA, 25 bp, Homo sapien
accccggctgcctgccaaaagcaaa

SEQ ID NO: 1416231 - DNA, 25 bp, Homo sapien
tgcctaagtgaagaagacttccctg

SEQ ID NO: 1416232 - DNA, 25 bp, Homo sapien
tattggctcttggtagcatgagcct

SEQ ID NO: 1416233 - DNA, 25 bp, Homo sapien
ttccctggcgctggtattggctctt

SEQ ID NO: 1416234 - DNA, 25 bp, Homo sapien
gctcttatgtaagagcttgcctaag

SEQ ID NO: 1416235 - DNA, 25 bp, Homo sapien
tcaaggggtgatggacaatagatga

SEQ ID NO: 1416236 - DNA, 25 bp, Homo sapien
tggaaacctgcataaaggccttcca

SEQ ID NO: 1416237 - DNA, 25 bp, Homo sapien
ttccttttatcaaggggtgatggac

SEQ ID NO: 1416238 - DNA, 25 bp, Homo sapien
ttggaaacctgcataaaggccttcc

SEQ ID NO: 1416239 - DNA, 25 bp, Homo sapien
gtgcttttctcagcctagcccttgg

SEQ ID NO: 1416240 - DNA, 25 bp, Homo sapien
gataccctgcagatttagccaatag

SEQ ID NO: 1416241 - DNA, 25 bp, Homo sapien
ccacagtgaccatctatggatcaaa

SEQ ID NO: 1416242 - DNA, 25 bp, Homo sapien
tagtatggtcacgaagagaatcctg

SEQ ID NO: 1416243 - DNA, 25 bp, Homo sapien
tcttgaagccccactggaataacca

SEQ ID NO: 1416244 - DNA, 25 bp, Homo sapien
cctggtggatccgtgatgtgcattt

SEQ ID NO: 1416245 - DNA, 25 bp, Homo sapien
ttaaacctggtggatccgtgatgtg

SEQ ID NO: 1416246 - DNA, 25 bp, Homo sapien
tttctctcttgaagccccactggaa

SEQ ID NO: 1416247 - DNA, 25 bp, Homo sapien
tacctttcattataccacgaatatt

SEQ ID NO: 1416248 - DNA, 25 bp, Homo sapien
tttcattataccacgaatattcact

SEQ ID NO: 1416249 - DNA, 25 bp, Homo sapien
ccaccttacatctggaacttgtatt

SEQ ID NO: 1416250 - DNA, 25 bp, Homo sapien
ccttacatctggaacttgtattatc

SEQ ID NO: 1416251 - DNA, 25 bp, Homo sapien
caggcaagggatttagggaccactt

SEQ ID NO: 1416252 - DNA, 25 bp, Homo sapien
acttgggagagcataggaaaagcag

SEQ ID NO: 1416253 - DNA, 25 bp, Homo sapien
ttcaacgggtagaagacttgggaga

SEQ ID NO: 1416254 - DNA, 25 bp, Homo sapien
ctggcattggtgaaaacattgctac

SEQ ID NO: 1416255 - DNA, 25 bp, Homo sapien
tgagtccttctttcatggatgaatg

SEQ ID NO: 1416256 - DNA, 25 bp, Homo sapien
cagcaagcactacgattgaatccac

SEQ ID NO: 1416257 - DNA, 25 bp, Homo sapien
tgtagttggccgctgaccctaatgg

SEQ ID NO: 1416258 - DNA, 25 bp, Homo sapien
gacagcaaagtctctctgacaaagg

SEQ ID NO: 1416259 - DNA, 25 bp, Homo sapien
cttcacatgccccacgctccaactc

SEQ ID NO: 1416260 - DNA, 25 bp, Homo sapien
acatgccccacgctccaactcaaat

SEQ ID NO: 1416261 - DNA, 25 bp, Homo sapien
atgccccacgctccaactcaaatcc

SEQ ID NO: 1416262 - DNA, 25 bp, Homo sapien
catcttcacatgccccacgctccaa

SEQ ID NO: 1416263 - DNA, 25 bp, Homo sapien
tgccaactgtctctctgttcgctga

SEQ ID NO: 1416264 - DNA, 25 bp, Homo sapien
tcactgccaactgtctctctgttcg

SEQ ID NO: 1416265 - DNA, 25 bp, Homo sapien
actgccaactgtctctctgttcgct

SEQ ID NO: 1416266 - DNA, 25 bp, Homo sapien
gccaactgtctctctgttcgctgac

SEQ ID NO: 1416267 - DNA, 25 bp, Homo sapien
cttgagctgtgaactatgctctgtc

SEQ ID NO: 1416268 - DNA, 25 bp, Homo sapien
gacccatcttcgcttgtttcttcag

SEQ ID NO: 1416269 - DNA, 25 bp, Homo sapien
ttctccctacaaatatgttcagctc

SEQ ID NO: 1416270 - DNA, 25 bp, Homo sapien
ctcttctggacccatcttcgcttgt

SEQ ID NO: 1416271 - DNA, 25 bp, Homo sapien
tgacatgtaaggaccatgtgaaggc

SEQ ID NO: 1416272 - DNA, 25 bp, Homo sapien
ctcagtgtccttggaatcacatgga

SEQ ID NO: 1416273 - DNA, 25 bp, Homo sapien
gattcgcttaggagggacctttatg

SEQ ID NO: 1416274 - DNA, 25 bp, Homo sapien
atcacatggatgatgggaatgttgg

SEQ ID NO: 1416275 - DNA, 25 bp, Homo sapien
cgcagcatgagcattttgcactaaa

SEQ ID NO: 1416276 - DNA, 25 bp, Homo sapien
tgttgtagcttactccgcagcatga

SEQ ID NO: 1416277 - DNA, 25 bp, Homo sapien
ctctggcctgactgggtaagctttc

SEQ ID NO: 1416278 - DNA, 25 bp, Homo sapien
ctgtctagatactgccacagtgccc

SEQ ID NO: 1416279 - DNA, 25 bp, Homo sapien
tcagcacataattaattgttggaga

SEQ ID NO: 1416280 - DNA, 25 bp, Homo sapien
gcatttccttccagagtcggagcag

SEQ ID NO: 1416281 - DNA, 25 bp, Homo sapien
catcgttgctcagtgtctcccatca

SEQ ID NO: 1416282 - DNA, 25 bp, Homo sapien
gatgaggtagtgcaggtgcatttcc

SEQ ID NO: 1416283 - DNA, 25 bp, Homo sapien
ccttttgatccatgtcacgtttctg

SEQ ID NO: 1416284 - DNA, 25 bp, Homo sapien
ttgtctacaactgcctagggagtac

SEQ ID NO: 1416285 - DNA, 25 bp, Homo sapien
cattcaaatggcctgtcctgttggg

SEQ ID NO: 1416286 - DNA, 25 bp, Homo sapien
ccagtcctctcggttgacagatgga

SEQ ID NO: 1416287 - DNA, 25 bp, Homo sapien
tagggagtacccaacagacaagcac

SEQ ID NO: 1416288 - DNA, 25 bp, Homo sapien
aaaatcctatcctctaatcatacct

SEQ ID NO: 1416289 - DNA, 25 bp, Homo sapien
gggcgtgggactgaaaaatcctatc

SEQ ID NO: 1416290 - DNA, 25 bp, Homo sapien
cactggtgattagtttaacttttag

SEQ ID NO: 1416291 - DNA, 25 bp, Homo sapien
tctaaatgttcagctgcccggcagc

SEQ ID NO: 1416292 - DNA, 25 bp, Homo sapien
gacctgctagagtcatatgttcggg

SEQ ID NO: 1416293 - DNA, 25 bp, Homo sapien
ctcctgtaaggccataagtggctgt

SEQ ID NO: 1416294 - DNA, 25 bp, Homo sapien
tagggatcactactccttaacgggc

SEQ ID NO: 1416295 - DNA, 25 bp, Homo sapien
actactccttaacgggctggctggg

SEQ ID NO: 1416296 - DNA, 25 bp, Homo sapien
gcctggtaaaggagggagtgtttga

SEQ ID NO: 1416297 - DNA, 25 bp, Homo sapien
gcttccctgcaaggagtacaaatga

SEQ ID NO: 1416298 - DNA, 25 bp, Homo sapien
agtcctgattcatgggaatgtaggc

SEQ ID NO: 1416299 - DNA, 25 bp, Homo sapien
ggtatcactatgacacagctcagca

SEQ ID NO: 1416300 - DNA, 25 bp, Homo sapien
taggcaaccattagccaaaggtgat

SEQ ID NO: 1416301 - DNA, 25 bp, Homo sapien
aaggtgatgagagccgggttctggg

SEQ ID NO: 1416302 - DNA, 25 bp, Homo sapien
ttgctaggcaaccattagccaaagg

SEQ ID NO: 1416303 - DNA, 25 bp, Homo sapien
gcaaccattagccaaaggtgatgag

SEQ ID NO: 1416304 - DNA, 25 bp, Homo sapien
cgccaatttgcctaaggtgttcagc

SEQ ID NO: 1416305 - DNA, 25 bp, Homo sapien
ccaatttgcctaaggtgttcagcag

SEQ ID NO: 1416306 - DNA, 25 bp, Homo sapien
caatttgcctaaggtgttcagcagg

SEQ ID NO: 1416307 - DNA, 25 bp, Homo sapien
aatttgcctaaggtgttcagcagga

SEQ ID NO: 1416308 - DNA, 25 bp, Homo sapien
ctattgaaggcctggcagctgccgg

SEQ ID NO: 1416309 - DNA, 25 bp, Homo sapien
tgtctcccagccgggccttctgctc

SEQ ID NO: 1416310 - DNA, 25 bp, Homo sapien
tgccggaggagagcctgtctcccag

SEQ ID NO: 1416311 - DNA, 25 bp, Homo sapien
cagctgccggaggagagcctgtctc

SEQ ID NO: 1416312 - DNA, 25 bp, Homo sapien
tgcacctctgggaagtcataggcct

SEQ ID NO: 1416313 - DNA, 25 bp, Homo sapien
tcagaaaggcagttgtcccacttgc

SEQ ID NO: 1416314 - DNA, 25 bp, Homo sapien
ccagggccggtagatagtgcagttc

SEQ ID NO: 1416315 - DNA, 25 bp, Homo sapien
tgtctgcacacacgaagtagctgta

SEQ ID NO: 1416316 - DNA, 25 bp, Homo sapien
ctgcaaaggaaaggaccaggtctga

SEQ ID NO: 1416317 - DNA, 25 bp, Homo sapien
accaggtctgagtctctggcaggga

SEQ ID NO: 1416318 - DNA, 25 bp, Homo sapien
gcagggagcagtggagccaaggatg

SEQ ID NO: 1416319 - DNA, 25 bp, Homo sapien
ggaaaggaccaggtctgagtctctg

SEQ ID NO: 1416320 - DNA, 25 bp, Homo sapien
tctgagagcagacgcaagacagtgg

SEQ ID NO: 1416321 - DNA, 25 bp, Homo sapien
cagttctgagagcagacgcaagaca

SEQ ID NO: 1416322 - DNA, 25 bp, Homo sapien
tggtaagagcagccgagggcattcc

SEQ ID NO: 1416323 - DNA, 25 bp, Homo sapien
agcagacgcaagacagtggtaagag

SEQ ID NO: 1416324 - DNA, 25 bp, Homo sapien
tggtatttgtcgaggccttcccctc

SEQ ID NO: 1416325 - DNA, 25 bp, Homo sapien
taagccttggtatttgtcgaggcct

SEQ ID NO: 1416326 - DNA, 25 bp, Homo sapien
tagttggtaagccttggtatttgtc

SEQ ID NO: 1416327 - DNA, 25 bp, Homo sapien
gagaggctgcttttagttggtaagc

SEQ ID NO: 1416328 - DNA, 25 bp, Homo sapien
gctggatgcctcagtgggtactgct

SEQ ID NO: 1416329 - DNA, 25 bp, Homo sapien
ctgacaatgatgctttggtactggg

SEQ ID NO: 1416330 - DNA, 25 bp, Homo sapien
tggtgagagcgctgtgttctgtatc

SEQ ID NO: 1416331 - DNA, 25 bp, Homo sapien
ctgtgttctgtatcccttgcctgac

SEQ ID NO: 1416332 - DNA, 25 bp, Homo sapien
aatgtcgggaaaagcactcagggcg

SEQ ID NO: 1416333 - DNA, 25 bp, Homo sapien
gcactcagggcggaggaagagattg

SEQ ID NO: 1416334 - DNA, 25 bp, Homo sapien
ggtggcacgagagaacataatgtcg

SEQ ID NO: 1416335 - DNA, 25 bp, Homo sapien
cataatgtcgggaaaagcactcagg

SEQ ID NO: 1416336 - DNA, 25 bp, Homo sapien
gggtacagagatcacacgcctgctc

SEQ ID NO: 1416337 - DNA, 25 bp, Homo sapien
acagagatcacacgcctgctctgga

SEQ ID NO: 1416338 - DNA, 25 bp, Homo sapien
tgcgggggtacagagatcacacgcc

SEQ ID NO: 1416339 - DNA, 25 bp, Homo sapien
gagatcacacgcctgctctggagag

SEQ ID NO: 1416340 - DNA, 25 bp, Homo sapien
ttgtgagtgatgcacacaggacccc

SEQ ID NO: 1416341 - DNA, 25 bp, Homo sapien
cctcagacttaaagtaaagggagct

SEQ ID NO: 1416342 - DNA, 25 bp, Homo sapien
catttctccgactgccaacttcaga

SEQ ID NO: 1416343 - DNA, 25 bp, Homo sapien
ggaccccgaggacttggaattgcat

SEQ ID NO: 1416344 - DNA, 25 bp, Homo sapien
ttttgtggatgacttacatccccag

SEQ ID NO: 1416345 - DNA, 25 bp, Homo sapien
cctttctcggacaggtaagatatcc

SEQ ID NO: 1416346 - DNA, 25 bp, Homo sapien
ctcggacaggtaagatatcctgttt

SEQ ID NO: 1416347 - DNA, 25 bp, Homo sapien
ggatgacttacatccccagatgccc

SEQ ID NO: 1416348 - DNA, 25 bp, Homo sapien
tggcccactcgctcaaggcccacct

SEQ ID NO: 1416349 - DNA, 25 bp, Homo sapien
gcccactcgctcaaggcccacctct

SEQ ID NO: 1416350 - DNA, 25 bp, Homo sapien
caaggcccacctctgtagacctgag

SEQ ID NO: 1416351 - DNA, 25 bp, Homo sapien
ctggcccactcgctcaaggcccacc

SEQ ID NO: 1416352 - DNA, 25 bp, Homo sapien
gaaacatttcctcggctggatcctc

SEQ ID NO: 1416353 - DNA, 25 bp, Homo sapien
aggtcagtcctgcaagaaacatttc

SEQ ID NO: 1416354 - DNA, 25 bp, Homo sapien
cataaccagaaagcgaacccctcgg

SEQ ID NO: 1416355 - DNA, 25 bp, Homo sapien
gatttcatcacagcctgtcctcagc

SEQ ID NO: 1416356 - DNA, 25 bp, Homo sapien
ttccttgtatgaggcaccagcagag

SEQ ID NO: 1416357 - DNA, 25 bp, Homo sapien
gaagtccttgagtagttctagttaa

SEQ ID NO: 1416358 - DNA, 25 bp, Homo sapien
tgctgtcctttgaatagagcctctg

SEQ ID NO: 1416359 - DNA, 25 bp, Homo sapien
cagtcgtccatcatgggattttgca

SEQ ID NO: 1416360 - DNA, 25 bp, Homo sapien
cttgaacaaggtggccggttccctg

SEQ ID NO: 1416361 - DNA, 25 bp, Homo sapien
caagaggagaacgttctttttcttg

SEQ ID NO: 1416362 - DNA, 25 bp, Homo sapien
accaggggcctattgtgctgtcttc

SEQ ID NO: 1416363 - DNA, 25 bp, Homo sapien
agccttaactggttcctgcaaccca

SEQ ID NO: 1416364 - DNA, 25 bp, Homo sapien
ctgggaatggcacgtccggccaggg

SEQ ID NO: 1416365 - DNA, 25 bp, Homo sapien
aggcggtgcggcatcctcctcctgg

SEQ ID NO: 1416366 - DNA, 25 bp, Homo sapien
tctattcattgtttggcttcccacc

SEQ ID NO: 1416367 - DNA, 25 bp, Homo sapien
acccataagctctgggatacccagg

SEQ ID NO: 1416368 - DNA, 25 bp, Homo sapien
ctgacttgttggctgaagtatgttg

SEQ ID NO: 1416369 - DNA, 25 bp, Homo sapien
aaggctgacttgttggctgaagtat

SEQ ID NO: 1416370 - DNA, 25 bp, Homo sapien
gacttgttggctgaagtatgttggc

SEQ ID NO: 1416371 - DNA, 25 bp, Homo sapien
tcaaggctgacttgttggctgaagt

SEQ ID NO: 1416372 - DNA, 25 bp, Homo sapien
tcatgatgtgcacaggcacgaccct

SEQ ID NO: 1416373 - DNA, 25 bp, Homo sapien
atcatgatgtgcacaggcacgaccc

SEQ ID NO: 1416374 - DNA, 25 bp, Homo sapien
tctgccaacccgacctatcactgtt

SEQ ID NO: 1416375 - DNA, 25 bp, Homo sapien
cccgacctatcactgtttcaggatg

SEQ ID NO: 1416376 - DNA, 25 bp, Homo sapien
gtcagatccaaggatccagaggacc

SEQ ID NO: 1416377 - DNA, 25 bp, Homo sapien
gtgtcagatccaaggatccagagga

SEQ ID NO: 1416378 - DNA, 25 bp, Homo sapien
tgtcagatccaaggatccagaggac

SEQ ID NO: 1416379 - DNA, 25 bp, Homo sapien
cagaatatacaagacttcagttggg

SEQ ID NO: 1416380 - DNA, 25 bp, Homo sapien
ctaagcattccctgtaatactggga

SEQ ID NO: 1416381 - DNA, 25 bp, Homo sapien
tacaggaggccctaaccaatgggta

SEQ ID NO: 1416382 - DNA, 25 bp, Homo sapien
caaaaaagatgacccaagaacatgg

SEQ ID NO: 1416383 - DNA, 25 bp, Homo sapien
actgtggaagatacaagggagaccc

SEQ ID NO: 1416384 - DNA, 25 bp, Homo sapien
tctgactgcatggtccaaaggaggg

SEQ ID NO: 1416385 - DNA, 25 bp, Homo sapien
gagacccaaccgtgctttgatggca

SEQ ID NO: 1416386 - DNA, 25 bp, Homo sapien
gggcaatgctcaccaggaagtttaa

SEQ ID NO: 1416387 - DNA, 25 bp, Homo sapien
aaggcaagacatccacataatcgct

SEQ ID NO: 1416388 - DNA, 25 bp, Homo sapien
tcaaggcaagacatccacataatcg

SEQ ID NO: 1416389 - DNA, 25 bp, Homo sapien
ggcaagacatccacataatcgctgt

SEQ ID NO: 1416390 - DNA, 25 bp, Homo sapien
caagacatccacataatcgctgtta

SEQ ID NO: 1416391 - DNA, 25 bp, Homo sapien
tgtctgtattgagtttacaaagtaa

SEQ ID NO: 1416392 - DNA, 25 bp, Homo sapien
catttgtctgtattgagtttacaaa

SEQ ID NO: 1416393 - DNA, 25 bp, Homo sapien
ctgtattgagtttacaaagtaaggc

SEQ ID NO: 1416394 - DNA, 25 bp, Homo sapien
gtattgagtttacaaagtaaggcat

SEQ ID NO: 1416395 - DNA, 25 bp, Homo sapien
taggcttggaaagacctgttttgga

SEQ ID NO: 1416396 - DNA, 25 bp, Homo sapien
tcagttcctttaggcttggaaagac

SEQ ID NO: 1416397 - DNA, 25 bp, Homo sapien
tttggagatcagttcctttaggctt

SEQ ID NO: 1416398 - DNA, 25 bp, Homo sapien
ggctggttctctttattggctttaa

SEQ ID NO: 1416399 - DNA, 25 bp, Homo sapien
tggctcaggtaaaagacatgttccc

SEQ ID NO: 1416400 - DNA, 25 bp, Homo sapien
taactcgatctgactctcatctctg

SEQ ID NO: 1416401 - DNA, 25 bp, Homo sapien
gaaaaaccaggttaactcgatctga

SEQ ID NO: 1416402 - DNA, 25 bp, Homo sapien
gaatgctttcgcacagtcatggctc

SEQ ID NO: 1416403 - DNA, 25 bp, Homo sapien
ctgtatcctgtaatacccgtgtttc

SEQ ID NO: 1416404 - DNA, 25 bp, Homo sapien
tctctgaagattcggtatgtgtaga

SEQ ID NO: 1416405 - DNA, 25 bp, Homo sapien
gtttctctctgaagattcggtatgt

SEQ ID NO: 1416406 - DNA, 25 bp, Homo sapien
gtaatacccgtgtttctctctgaag

SEQ ID NO: 1416407 - DNA, 25 bp, Homo sapien
agtcttgcttggtcagacgtccatg

SEQ ID NO: 1416408 - DNA, 25 bp, Homo sapien
agaggcacaggactcctggtatcga

SEQ ID NO: 1416409 - DNA, 25 bp, Homo sapien
acaggactcctggtatcgactcgct

SEQ ID NO: 1416410 - DNA, 25 bp, Homo sapien
cttgcttggtcagacgtccatggta

SEQ ID NO: 1416411 - DNA, 25 bp, Homo sapien
ggcctgaaattcacccccaagtcaa

SEQ ID NO: 1416412 - DNA, 25 bp, Homo sapien
cagctctgaggagagatgtgtaagc

SEQ ID NO: 1416413 - DNA, 25 bp, Homo sapien
caggaagccctgttggcctgaaatt

SEQ ID NO: 1416414 - DNA, 25 bp, Homo sapien
ccccaagtcaagggacagctctgag

SEQ ID NO: 1416415 - DNA, 25 bp, Homo sapien
aggaagcacaccgctgcttttgctg

SEQ ID NO: 1416416 - DNA, 25 bp, Homo sapien
ggaagcacaccgctgcttttgctgt

SEQ ID NO: 1416417 - DNA, 25 bp, Homo sapien
ttctttggctactggtatcctttcc

SEQ ID NO: 1416418 - DNA, 25 bp, Homo sapien
caacttctttggctactggtatcct

SEQ ID NO: 1416419 - DNA, 25 bp, Homo sapien
aaaggactcctgtcatcgactcgct

SEQ ID NO: 1416420 - DNA, 25 bp, Homo sapien
cagatacagaggcaaaggactcctg

SEQ ID NO: 1416421 - DNA, 25 bp, Homo sapien
tcttaacaaaaagttgccatcccca

SEQ ID NO: 1416422 - DNA, 25 bp, Homo sapien
tcaacagatacagaggcaaaggact

SEQ ID NO: 1416423 - DNA, 25 bp, Homo sapien
ccggggttgcagacagagtctggtt

SEQ ID NO: 1416424 - DNA, 25 bp, Homo sapien
tctggttcactcagtgctcaatggt

SEQ ID NO: 1416425 - DNA, 25 bp, Homo sapien
gtgccggggttgcagacagagtctg

SEQ ID NO: 1416426 - DNA, 25 bp, Homo sapien
gagtctggttcactcagtgctcaat

SEQ ID NO: 1416427 - DNA, 25 bp, Homo sapien
aagtggcttttctcagcattagttg

SEQ ID NO: 1416428 - DNA, 25 bp, Homo sapien
gataaggtccctaggttctgtagtg

SEQ ID NO: 1416429 - DNA, 25 bp, Homo sapien
gcaacgcagcaaaccagtaatgtga

SEQ ID NO: 1416430 - DNA, 25 bp, Homo sapien
ttccttcagacgttacagatgcttc

SEQ ID NO: 1416431 - DNA, 25 bp, Homo sapien
ctgtagtgggtgagctgcgggcctg

SEQ ID NO: 1416432 - DNA, 25 bp, Homo sapien
gtttgagatactgataaaatgctaa

SEQ ID NO: 1416433 - DNA, 25 bp, Homo sapien
aatagagtttccaagaactgacctg

SEQ ID NO: 1416434 - DNA, 25 bp, Homo sapien
tatatatataccaagtttgagatac

SEQ ID NO: 1416435 - DNA, 25 bp, Homo sapien
gaggaagatcaggagtatagttata

SEQ ID NO: 1416436 - DNA, 25 bp, Homo sapien
tcggcctgtatgataggctcttcct

SEQ ID NO: 1416437 - DNA, 25 bp, Homo sapien
ttttccaaacctagcgcgtctaatc

SEQ ID NO: 1416438 - DNA, 25 bp, Homo sapien
catttccggcttctgggactcgggt

SEQ ID NO: 1416439 - DNA, 25 bp, Homo sapien
tagcgcgtctaatctcttctaggcc

SEQ ID NO: 1416440 - DNA, 25 bp, Homo sapien
gctggcggagatgtgaccgcgggcc

SEQ ID NO: 1416441 - DNA, 25 bp, Homo sapien
tgcggagccgctggtccggctggcg

SEQ ID NO: 1416442 - DNA, 25 bp, Homo sapien
cggcctgcctcaggcgtcgcgtcag

SEQ ID NO: 1416443 - DNA, 25 bp, Homo sapien
ggcttccggtgtcatggctgcttga

SEQ ID NO: 1416444 - DNA, 25 bp, Homo sapien
ttaacccacaccgatggcgggatcc

SEQ ID NO: 1416445 - DNA, 25 bp, Homo sapien
tgcagggtcacagaaacatcggtaa

SEQ ID NO: 1416446 - DNA, 25 bp, Homo sapien
gcctcggtgtatcgggttcgctgct

SEQ ID NO: 1416447 - DNA, 25 bp, Homo sapien
cgagtatggtttccgcaaagagagg

SEQ ID NO: 1416448 - DNA, 25 bp, Homo sapien
tcctccccttctgcgggagaagcgg

SEQ ID NO: 1416449 - DNA, 25 bp, Homo sapien
ttcctccccttctgcgggagaagcg

SEQ ID NO: 1416450 - DNA, 25 bp, Homo sapien
aacataatgtgtccctgagtagagg

SEQ ID NO: 1416451 - DNA, 25 bp, Homo sapien
gctatgcgtgagttcatggacacaa

SEQ ID NO: 1416452 - DNA, 25 bp, Homo sapien
gaacaaactggagtctagcctggag

SEQ ID NO: 1416453 - DNA, 25 bp, Homo sapien
gacaaaacataattcctgagaggcc

SEQ ID NO: 1416454 - DNA, 25 bp, Homo sapien
caaaaacaagtagagttggacacct

SEQ ID NO: 1416455 - DNA, 25 bp, Homo sapien
aaagaaatgcctcctgtgattgaaa

SEQ ID NO: 1416456 - DNA, 25 bp, Homo sapien
caaagatcacattagcagattaccc

SEQ ID NO: 1416457 - DNA, 25 bp, Homo sapien
gggtagctagctagccactgtcaaa

SEQ ID NO: 1416458 - DNA, 25 bp, Homo sapien
tactccagctgctaaagagtgctga

SEQ ID NO: 1416459 - DNA, 25 bp, Homo sapien
ttgtggccaccaatatagcagctct

SEQ ID NO: 1416460 - DNA, 25 bp, Homo sapien
tgctatgccttgagccaaactggct

SEQ ID NO: 1416461 - DNA, 25 bp, Homo sapien
gagggattccctttctgctatgcct

SEQ ID NO: 1416462 - DNA, 25 bp, Homo sapien
gggagacactcagtaaccatctatt

SEQ ID NO: 1416463 - DNA, 25 bp, Homo sapien
tatttacctagacacttatgcaggg

SEQ ID NO: 1416464 - DNA, 25 bp, Homo sapien
tacatgctaggtggctttattcaga

SEQ ID NO: 1416465 - DNA, 25 bp, Homo sapien
tcgggtacattggaatcacatcatg

SEQ ID NO: 1416466 - DNA, 25 bp, Homo sapien
tgacaagtgccatggatatttaaga

SEQ ID NO: 1416467 - DNA, 25 bp, Homo sapien
caaactttattctcctgataggaaa

SEQ ID NO: 1416468 - DNA, 25 bp, Homo sapien
ccagtagattcacagtagcatgtac

SEQ ID NO: 1416469 - DNA, 25 bp, Homo sapien
taggtggtcattaaagtgatcttca

SEQ ID NO: 1416470 - DNA, 25 bp, Homo sapien
ccaggacagtgagggtataagagca

SEQ ID NO: 1416471 - DNA, 25 bp, Homo sapien
gaaaatggctcccttactggtctta

SEQ ID NO: 1416472 - DNA, 25 bp, Homo sapien
ggtaccgctagcatagaaacattgc

SEQ ID NO: 1416473 - DNA, 25 bp, Homo sapien
ccattaaattgggtagctgtcacaa

SEQ ID NO: 1416474 - DNA, 25 bp, Homo sapien
cactagctgcaaagtcacagcacct

SEQ ID NO: 1416475 - DNA, 25 bp, Homo sapien
tatgcactagctgcaaagtcacagc

SEQ ID NO: 1416476 - DNA, 25 bp, Homo sapien
ctgcaaagtcacagcaccttatgga

SEQ ID NO: 1416477 - DNA, 25 bp, Homo sapien
gcattagtatgcactagctgcaaag

SEQ ID NO: 1416478 - DNA, 25 bp, Homo sapien
taccagttgtttcagtagcatattg

SEQ ID NO: 1416479 - DNA, 25 bp, Homo sapien
gaacaatgcgtttcagttgactgta

SEQ ID NO: 1416480 - DNA, 25 bp, Homo sapien
ctgacttaccataagatgcactgtt

SEQ ID NO: 1416481 - DNA, 25 bp, Homo sapien
caaaaactaagtgggactatgtatg

SEQ ID NO: 1416482 - DNA, 25 bp, Homo sapien
ccagtacaacctagggacgtcaggg

SEQ ID NO: 1416483 - DNA, 25 bp, Homo sapien
taaacatagcttccaagggcacagt

SEQ ID NO: 1416484 - DNA, 25 bp, Homo sapien
gagtactgaggcctagcgacgttaa

SEQ ID NO: 1416485 - DNA, 25 bp, Homo sapien
aaacagagagcgagtttggagcccg

SEQ ID NO: 1416486 - DNA, 25 bp, Homo sapien
ttcatactacattaaaccaggtgac

SEQ ID NO: 1416487 - DNA, 25 bp, Homo sapien
ggtactgggcatgtacatatttctt

SEQ ID NO: 1416488 - DNA, 25 bp, Homo sapien
accaggtgacctagcagaaagtgac

SEQ ID NO: 1416489 - DNA, 25 bp, Homo sapien
tcaggtagctggatcatgtcactaa

SEQ ID NO: 1416490 - DNA, 25 bp, Homo sapien
cagtgttggtacgtgatccttgtca

SEQ ID NO: 1416491 - DNA, 25 bp, Homo sapien
tagttgtctctgcatgttacgtagc

SEQ ID NO: 1416492 - DNA, 25 bp, Homo sapien
gaatggcaaaatagctcaactgtag

SEQ ID NO: 1416493 - DNA, 25 bp, Homo sapien
gactaaatattgtagctgattccct

SEQ ID NO: 1416494 - DNA, 25 bp, Homo sapien
taccagcctgcctacagtgcatggt

SEQ ID NO: 1416495 - DNA, 25 bp, Homo sapien
taactggcatcgtagtttagtgctc

SEQ ID NO: 1416496 - DNA, 25 bp, Homo sapien
tacttggtggcaggtatctctctgg

SEQ ID NO: 1416497 - DNA, 25 bp, Homo sapien
tctggatgacactaactcagaatct

SEQ ID NO: 1416498 - DNA, 25 bp, Homo sapien
gagcacctagcattgggcttggcat

SEQ ID NO: 1416499 - DNA, 25 bp, Homo sapien
tcctcagggaatttagtgatcatca

SEQ ID NO: 1416500 - DNA, 25 bp, Homo sapien
gaagtgctgtaaagagctaccagta

SEQ ID NO: 1416501 - DNA, 25 bp, Homo sapien
caaatagtgtccttctgacctgaga

SEQ ID NO: 1416502 - DNA, 25 bp, Homo sapien
gttctcaccataaagaaaggataag

SEQ ID NO: 1416503 - DNA, 25 bp, Homo sapien
cctatgctggagaagtaagtctgct

SEQ ID NO: 1416504 - DNA, 25 bp, Homo sapien
gattattcgacagtgtatatatgca

SEQ ID NO: 1416505 - DNA, 25 bp, Homo sapien
gtatatatgcattgaatcatcacat

SEQ ID NO: 1416506 - DNA, 25 bp, Homo sapien
ttcgtacagctgaaatataggcagg

SEQ ID NO: 1416507 - DNA, 25 bp, Homo sapien
gaccaactgtgaacctacaagacgt

SEQ ID NO: 1416508 - DNA, 25 bp, Homo sapien
ggccatccaggaaatttcgtacagc

SEQ ID NO: 1416509 - DNA, 25 bp, Homo sapien
tacaagacgtcttggacaactgaag

SEQ ID NO: 1416510 - DNA, 25 bp, Homo sapien
tctcctgttgtaagaaaatactagt

SEQ ID NO: 1416511 - DNA, 25 bp, Homo sapien
tgcagagtctttagctcctgaatgc

SEQ ID NO: 1416512 - DNA, 25 bp, Homo sapien
tcattgaaatgagctccaaatgggt

SEQ ID NO: 1416513 - DNA, 25 bp, Homo sapien
cattgggtagttaagagcaaactct

SEQ ID NO: 1416514 - DNA, 25 bp, Homo sapien
gagccactgtaatcaattttgtaaa

SEQ ID NO: 1416515 - DNA, 25 bp, Homo sapien
agccactgtaatcaattttgtaaag

SEQ ID NO: 1416516 - DNA, 25 bp, Homo sapien
gcgtgagccactgtaatcaattttg

SEQ ID NO: 1416517 - DNA, 25 bp, Homo sapien
gtgagccactgtaatcaattttgta

SEQ ID NO: 1416518 - DNA, 25 bp, Homo sapien
tgtcctaccctaatctgccctgctg

SEQ ID NO: 1416519 - DNA, 25 bp, Homo sapien
gatactccagggtcttgtttctgga

SEQ ID NO: 1416520 - DNA, 25 bp, Homo sapien
cataagttgagggtaatgatgagct

SEQ ID NO: 1416521 - DNA, 25 bp, Homo sapien
tcaggggggcttgcataagcataag

SEQ ID NO: 1416522 - DNA, 25 bp, Homo sapien
tctgagaaatgctgacatcatccat

SEQ ID NO: 1416523 - DNA, 25 bp, Homo sapien
cgtctgagaaatgctgacatcatcc

SEQ ID NO: 1416524 - DNA, 25 bp, Homo sapien
ctgcttgaccgtctgagaaatgctg

SEQ ID NO: 1416525 - DNA, 25 bp, Homo sapien
gcttgaccgtctgagaaatgctgac

SEQ ID NO: 1416526 - DNA, 25 bp, Homo sapien
tggggagttatcatcctctgcaact

SEQ ID NO: 1416527 - DNA, 25 bp, Homo sapien
ctgcaactgcacagaggatctttat

SEQ ID NO: 1416528 - DNA, 25 bp, Homo sapien
ggcctgctgtaatcatttaggagtg

SEQ ID NO: 1416529 - DNA, 25 bp, Homo sapien
agtgtactgcaaatgtgactcttca

SEQ ID NO: 1416530 - DNA, 25 bp, Homo sapien
ggttgaaggaaattgtagatgggag

SEQ ID NO: 1416531 - DNA, 25 bp, Homo sapien
tgggtgacagcagataatgattgag

SEQ ID NO: 1416532 - DNA, 25 bp, Homo sapien
gagggtatcaagatactctgatgaa

SEQ ID NO: 1416533 - DNA, 25 bp, Homo sapien
cagataatgattgagagggtatcaa

SEQ ID NO: 1416534 - DNA, 25 bp, Homo sapien
cctccagtggcagaggtagatcagg

SEQ ID NO: 1416535 - DNA, 25 bp, Homo sapien
tagatcagggtgaatgatgtctgga

SEQ ID NO: 1416536 - DNA, 25 bp, Homo sapien
atcagggtgaatgatgtctggaact

SEQ ID NO: 1416537 - DNA, 25 bp, Homo sapien
ggtagatcagggtgaatgatgtctg

SEQ ID NO: 1416538 - DNA, 25 bp, Homo sapien
caaagcctggaatctaaggagagag

SEQ ID NO: 1416539 - DNA, 25 bp, Homo sapien
taccaggtacggcaactgaaagaag

SEQ ID NO: 1416540 - DNA, 25 bp, Homo sapien
gaagtggtgcctggtatactgtacc

SEQ ID NO: 1416541 - DNA, 25 bp, Homo sapien
gatttagttggcattgcaaagcctg

SEQ ID NO: 1416542 - DNA, 25 bp, Homo sapien
caccagatggactgatttgaatttt

SEQ ID NO: 1416543 - DNA, 25 bp, Homo sapien
acttttccgttcatccgtgggagag

SEQ ID NO: 1416544 - DNA, 25 bp, Homo sapien
ccgttcatccgtgggagagtcacca

SEQ ID NO: 1416545 - DNA, 25 bp, Homo sapien
tgggagagtcaccagatggactgat

SEQ ID NO: 1416546 - DNA, 25 bp, Homo sapien
aacgttcctccatgatctctttcca

SEQ ID NO: 1416547 - DNA, 25 bp, Homo sapien
tgggaacgttcctccatgatctctt

SEQ ID NO: 1416548 - DNA, 25 bp, Homo sapien
tatgggaacgttcctccatgatctc

SEQ ID NO: 1416549 - DNA, 25 bp, Homo sapien
ggaacgttcctccatgatctctttc

SEQ ID NO: 1416550 - DNA, 25 bp, Homo sapien
aaaccaaatgtgcaatatattggat

SEQ ID NO: 1416551 - DNA, 25 bp, Homo sapien
gaaaacagctctgattggtgacttt

SEQ ID NO: 1416552 - DNA, 25 bp, Homo sapien
tgcaatatattggatgctgggatcc

SEQ ID NO: 1416553 - DNA, 25 bp, Homo sapien
tgctgggatccctggcgctttccca

SEQ ID NO: 1416554 - DNA, 25 bp, Homo sapien
tttcttttcaccacccatatgtcca

SEQ ID NO: 1416555 - DNA, 25 bp, Homo sapien
caaatgcattgctccccttttttct

SEQ ID NO: 1416556 - DNA, 25 bp, Homo sapien
aaaacgccaagagcatctttgccat

SEQ ID NO: 1416557 - DNA, 25 bp, Homo sapien
ttgagaaactgtgtaccaaaacgcc

SEQ ID NO: 1416558 - DNA, 25 bp, Homo sapien
tagcatacttgagatccaagcccat

SEQ ID NO: 1416559 - DNA, 25 bp, Homo sapien
caggagcacacgaggaaaaacgata

SEQ ID NO: 1416560 - DNA, 25 bp, Homo sapien
gatgtggccagtttgggttgattcc

SEQ ID NO: 1416561 - DNA, 25 bp, Homo sapien
ccaaaaacaatattatgcgagatgt

SEQ ID NO: 1416562 - DNA, 25 bp, Homo sapien
ttttatgactgagatttccggtggg

SEQ ID NO: 1416563 - DNA, 25 bp, Homo sapien
gacatcatcagtactggccctagtg

SEQ ID NO: 1416564 - DNA, 25 bp, Homo sapien
ggccctagtgcagttacatacctgg

SEQ ID NO: 1416565 - DNA, 25 bp, Homo sapien
gaagaggctgaatttcaagacactg

SEQ ID NO: 1416566 - DNA, 25 bp, Homo sapien
tcataaaaggatcgtctctaaattg

SEQ ID NO: 1416567 - DNA, 25 bp, Homo sapien
taaaaggatcgtctctaaattgtga

SEQ ID NO: 1416568 - DNA, 25 bp, Homo sapien
cgtctctaaattgtgagtgtggtga

SEQ ID NO: 1416569 - DNA, 25 bp, Homo sapien
gatcgtctctaaattgtgagtgtgg

SEQ ID NO: 1416570 - DNA, 25 bp, Homo sapien
agggctctacgagaatggcatagtt

SEQ ID NO: 1416571 - DNA, 25 bp, Homo sapien
gggctctacgagaatggcatagttc

SEQ ID NO: 1416572 - DNA, 25 bp, Homo sapien
gctctacgagaatggcatagttcat

SEQ ID NO: 1416573 - DNA, 25 bp, Homo sapien
ggctctacgagaatggcatagttca

SEQ ID NO: 1416574 - DNA, 25 bp, Homo sapien
ctttgtctctggtgtagtgataatc

SEQ ID NO: 1416575 - DNA, 25 bp, Homo sapien
aggaagtcaaggaaactcccaggct

SEQ ID NO: 1416576 - DNA, 25 bp, Homo sapien
gtcgtcatgaccagcacctattaca

SEQ ID NO: 1416577 - DNA, 25 bp, Homo sapien
gtagtgataatctgttgtgtcgtca

SEQ ID NO: 1416578 - DNA, 25 bp, Homo sapien
gcacccgacgtggaatcaaccattt

SEQ ID NO: 1416579 - DNA, 25 bp, Homo sapien
tttgatctgaccctagaagcctttg

SEQ ID NO: 1416580 - DNA, 25 bp, Homo sapien
acaaactgggtagtagggatgctca

SEQ ID NO: 1416581 - DNA, 25 bp, Homo sapien
ttttgaacatgtacagcacccgacg

SEQ ID NO: 1416582 - DNA, 25 bp, Homo sapien
tcaagtcgagcaaggtagaaacagg

SEQ ID NO: 1416583 - DNA, 25 bp, Homo sapien
tgtgttttcctagtcccatccaggc

SEQ ID NO: 1416584 - DNA, 25 bp, Homo sapien
aaagccatgatgtgggtctaaacca

SEQ ID NO: 1416585 - DNA, 25 bp, Homo sapien
tagaaacaggagtagctagagccat

SEQ ID NO: 1416586 - DNA, 25 bp, Homo sapien
tagagattagaatgaaacgacccca

SEQ ID NO: 1416587 - DNA, 25 bp, Homo sapien
ttcctgcaaacacaccaagagtctg

SEQ ID NO: 1416588 - DNA, 25 bp, Homo sapien
taatctgagtcccaagctagcctgt

SEQ ID NO: 1416589 - DNA, 25 bp, Homo sapien
tgtataaacagtgccagttctgggc

SEQ ID NO: 1416590 - DNA, 25 bp, Homo sapien
tagttttctgagaatatttctcaga

SEQ ID NO: 1416591 - DNA, 25 bp, Homo sapien
cagaatatgtgagttttctgagcac

SEQ ID NO: 1416592 - DNA, 25 bp, Homo sapien
tatgtgagttttctgagcacatttt

SEQ ID NO: 1416593 - DNA, 25 bp, Homo sapien
tctcagaatatgtgagttttctgag

SEQ ID NO: 1416594 - DNA, 25 bp, Homo sapien
agctgtgtcctatgagtgataaaat

SEQ ID NO: 1416595 - DNA, 25 bp, Homo sapien
aattaaatggcatctattttgaact

SEQ ID NO: 1416596 - DNA, 25 bp, Homo sapien
ctgtgtcctatgagtgataaaatat

SEQ ID NO: 1416597 - DNA, 25 bp, Homo sapien
acatattatgatggttatcaagctg

SEQ ID NO: 1416598 - DNA, 25 bp, Homo sapien
agctgtctggacttcacttaattca

SEQ ID NO: 1416599 - DNA, 25 bp, Homo sapien
ccgagactgcggtaatgctgagcct

SEQ ID NO: 1416600 - DNA, 25 bp, Homo sapien
gacggtcttgctctgaagctgtctg

SEQ ID NO: 1416601 - DNA, 25 bp, Homo sapien
tcagtctgtcttaggctggcggtca

SEQ ID NO: 1416602 - DNA, 25 bp, Homo sapien
agttcttaataaaatcagtgctcat

SEQ ID NO: 1416603 - DNA, 25 bp, Homo sapien
aattagatgataatcgcccaacttt

SEQ ID NO: 1416604 - DNA, 25 bp, Homo sapien
atgataatcgcccaactttggctcc

SEQ ID NO: 1416605 - DNA, 25 bp, Homo sapien
taatcgcccaactttggctcctaga

SEQ ID NO: 1416606 - DNA, 25 bp, Homo sapien
ttagatgataatcgcccaactttgg

SEQ ID NO: 1416607 - DNA, 25 bp, Homo sapien
taggacttccgaaagcagcggcggt

SEQ ID NO: 1416608 - DNA, 25 bp, Homo sapien
tcagactcgatgacgcaacgggagg

SEQ ID NO: 1416609 - DNA, 25 bp, Homo sapien
tgaggcggcccgaaatcgtaggact

SEQ ID NO: 1416610 - DNA, 25 bp, Homo sapien
ctggctttgcctaggttccccggag

SEQ ID NO: 1416611 - DNA, 25 bp, Homo sapien
cagtaagtgatgagtgtcgcagtga

SEQ ID NO: 1416612 - DNA, 25 bp, Homo sapien
tgatgatcctgaggttatcaaggca

SEQ ID NO: 1416613 - DNA, 25 bp, Homo sapien
tatcaaggcaatggggtactcaggc

SEQ ID NO: 1416614 - DNA, 25 bp, Homo sapien
ggaaaactagagcatcagtaagtga

SEQ ID NO: 1416615 - DNA, 25 bp, Homo sapien
gcagttgaatcaggcgtggctccag

SEQ ID NO: 1416616 - DNA, 25 bp, Homo sapien
gagcttcattggatgttgcacccct

SEQ ID NO: 1416617 - DNA, 25 bp, Homo sapien
gatcctagtaatcctccaggtgcgg

SEQ ID NO: 1416618 - DNA, 25 bp, Homo sapien
tacggagtgagcaggtgaacgcctc

SEQ ID NO: 1416619 - DNA, 25 bp, Homo sapien
tcaaggtcaccacgatgcaggtgga

SEQ ID NO: 1416620 - DNA, 25 bp, Homo sapien
gcacattctgtgtctgaactgccct

SEQ ID NO: 1416621 - DNA, 25 bp, Homo sapien
tggatggcaacctgcagtcagtgct

SEQ ID NO: 1416622 - DNA, 25 bp, Homo sapien
tgtttgccatgcaggaacatgagca

SEQ ID NO: 1416623 - DNA, 25 bp, Homo sapien
tggaagttggccatgactgcaacaa

SEQ ID NO: 1416624 - DNA, 25 bp, Homo sapien
agtgggtgttttagcccctggccag

SEQ ID NO: 1416625 - DNA, 25 bp, Homo sapien
tgaagtagctcctgccaagggcaag

SEQ ID NO: 1416626 - DNA, 25 bp, Homo sapien
gaaagaacagcaccaatcacagaat

SEQ ID NO: 1416627 - DNA, 25 bp, Homo sapien
gatagctagcatactgcgggtatga

SEQ ID NO: 1416628 - DNA, 25 bp, Homo sapien
gtgtgagtgtgtactccctaaggaa

SEQ ID NO: 1416629 - DNA, 25 bp, Homo sapien
tgaactaccatctgagtcctcaggg

SEQ ID NO: 1416630 - DNA, 25 bp, Homo sapien
tatgagcgcttgtagtgaactacca

SEQ ID NO: 1416631 - DNA, 25 bp, Homo sapien
taactgaaaacgagggcaggagcca

SEQ ID NO: 1416632 - DNA, 25 bp, Homo sapien
tgtgatgacgataggcaaggcttgc

SEQ ID NO: 1416633 - DNA, 25 bp, Homo sapien
gtattgtctccccattgaaggccag

SEQ ID NO: 1416634 - DNA, 25 bp, Homo sapien
caagaaaggttccatgcagcagcgt

SEQ ID NO: 1416635 - DNA, 25 bp, Homo sapien
tgtcaggctatgttaaacggttaga

SEQ ID NO: 1416636 - DNA, 25 bp, Homo sapien
tagctatgccgttttgccagcaggt

SEQ ID NO: 1416637 - DNA, 25 bp, Homo sapien
ccatgagaatctcctagaggaaaca

SEQ ID NO: 1416638 - DNA, 25 bp, Homo sapien
caggaagtccctgaaagcaagactg

SEQ ID NO: 1416639 - DNA, 25 bp, Homo sapien
tggctttgtgaactcgccttcgaag

SEQ ID NO: 1416640 - DNA, 25 bp, Homo sapien
taatgggcatttctggcctttgaaa

SEQ ID NO: 1416641 - DNA, 25 bp, Homo sapien
gaccctgtgccggagataatgggca

SEQ ID NO: 1416642 - DNA, 25 bp, Homo sapien
tccagtgttcccatctggctttaga

SEQ ID NO: 1416643 - DNA, 25 bp, Homo sapien
gggtctacgtccttagatggattca

SEQ ID NO: 1416644 - DNA, 25 bp, Homo sapien
tgtcttgggccatacgggttgccaa

SEQ ID NO: 1416645 - DNA, 25 bp, Homo sapien
gttctatggtgttggtggaaacctc

SEQ ID NO: 1416646 - DNA, 25 bp, Homo sapien
ctgggctggaactaggaccttgttc

SEQ ID NO: 1416647 - DNA, 25 bp, Homo sapien
ccattccccaaataagaggagaact

SEQ ID NO: 1416648 - DNA, 25 bp, Homo sapien
cacgagaacatcttctggtctcttc

SEQ ID NO: 1416649 - DNA, 25 bp, Homo sapien
cattccccaaataagaggagaactt

SEQ ID NO: 1416650 - DNA, 25 bp, Homo sapien
attttcttagcctgtggggctctgt

SEQ ID NO: 1416651 - DNA, 25 bp, Homo sapien
gagagaatatgacttcccaaaggac

SEQ ID NO: 1416652 - DNA, 25 bp, Homo sapien
gagtgggaatcaactaaatggcttc

SEQ ID NO: 1416653 - DNA, 25 bp, Homo sapien
tttatgttcgtttacagcacctggc

SEQ ID NO: 1416654 - DNA, 25 bp, Homo sapien
tcagccaggaaagccacttactagg

SEQ ID NO: 1416655 - DNA, 25 bp, Homo sapien
gcctcagcggagtgatgggcctgct

SEQ ID NO: 1416656 - DNA, 25 bp, Homo sapien
tcagcggagtgatgggcctgctgcc

SEQ ID NO: 1416657 - DNA, 25 bp, Homo sapien
tgaaagggcctcagcggagtgatgg

SEQ ID NO: 1416658 - DNA, 25 bp, Homo sapien
agggcctcagcggagtgatgggcct

SEQ ID NO: 1416659 - DNA, 25 bp, Homo sapien
gaggcaaataacctttagtctctgc

SEQ ID NO: 1416660 - DNA, 25 bp, Homo sapien
tcaaaatgcttatacaattgtcccc

SEQ ID NO: 1416661 - DNA, 25 bp, Homo sapien
gcttatacaattgtcccctgaccat

SEQ ID NO: 1416662 - DNA, 25 bp, Homo sapien
acatggtagaggcaaataaccttta

SEQ ID NO: 1416663 - DNA, 25 bp, Homo sapien
tcactgcatctcctagcaggccatt

SEQ ID NO: 1416664 - DNA, 25 bp, Homo sapien
ttttctttagcagccggtagcctgg

SEQ ID NO: 1416665 - DNA, 25 bp, Homo sapien
gatggggcgagacgcctcctggtca

SEQ ID NO: 1416666 - DNA, 25 bp, Homo sapien
gcaagttttcaaccctgttacagcc

SEQ ID NO: 1416667 - DNA, 25 bp, Homo sapien
cagggatggcctttggtccaacaaa

SEQ ID NO: 1416668 - DNA, 25 bp, Homo sapien
aaatatccgactccagtgcctctga

SEQ ID NO: 1416669 - DNA, 25 bp, Homo sapien
tggaagtcatcgagccacatgcagt

SEQ ID NO: 1416670 - DNA, 25 bp, Homo sapien
caatcagtgtactcacagggatggc

SEQ ID NO: 1416671 - DNA, 25 bp, Homo sapien
ttcttgcacaatgtctgcaatcttt

SEQ ID NO: 1416672 - DNA, 25 bp, Homo sapien
attcttgcacaatgtctgcaatctt

SEQ ID NO: 1416673 - DNA, 25 bp, Homo sapien
aaaggctcccgtgaacatggcagcc

SEQ ID NO: 1416674 - DNA, 25 bp, Homo sapien
tgttctactgtagcatacggacaga

SEQ ID NO: 1416675 - DNA, 25 bp, Homo sapien
tcagtggcacggctcttgttctact

SEQ ID NO: 1416676 - DNA, 25 bp, Homo sapien
cggacagaccatctgcaaaggctcc

SEQ ID NO: 1416677 - DNA, 25 bp, Homo sapien
gataatgtggagtatggtatcctga

SEQ ID NO: 1416678 - DNA, 25 bp, Homo sapien
tatcctgaagtctgaagtaccctgt

SEQ ID NO: 1416679 - DNA, 25 bp, Homo sapien
ctgggctgcgcaagtgggccaaggg

SEQ ID NO: 1416680 - DNA, 25 bp, Homo sapien
aagccagaacaaagccggggccctg

SEQ ID NO: 1416681 - DNA, 25 bp, Homo sapien
ctctccttcaatgagccaatctgag

SEQ ID NO: 1416682 - DNA, 25 bp, Homo sapien
tgagccaatctgagtcccatcttta

SEQ ID NO: 1416683 - DNA, 25 bp, Homo sapien
tcttctctccttcaatgagccaatc

SEQ ID NO: 1416684 - DNA, 25 bp, Homo sapien
gagtcccatctttaacaatgatttt

SEQ ID NO: 1416685 - DNA, 25 bp, Homo sapien
tcaaggaagctgactagcttctgag

SEQ ID NO: 1416686 - DNA, 25 bp, Homo sapien
cctcaaggaagctgactagcttctg

SEQ ID NO: 1416687 - DNA, 25 bp, Homo sapien
ctcaaggaagctgactagcttctga

SEQ ID NO: 1416688 - DNA, 25 bp, Homo sapien
ccctcaaggaagctgactagcttct

SEQ ID NO: 1416689 - DNA, 25 bp, Homo sapien
gatttctttcgttatgtctccagtc

SEQ ID NO: 1416690 - DNA, 25 bp, Homo sapien
gaagacatcacttcagaacaccctt

SEQ ID NO: 1416691 - DNA, 25 bp, Homo sapien
cagtccttgctaattggacaactat

SEQ ID NO: 1416692 - DNA, 25 bp, Homo sapien
tatggtgctgcgaagacatcacttc

SEQ ID NO: 1416693 - DNA, 25 bp, Homo sapien
tgtccccagttctttgggcaattgc

SEQ ID NO: 1416694 - DNA, 25 bp, Homo sapien
tgggcaattgctgtttttgagtgtc

SEQ ID NO: 1416695 - DNA, 25 bp, Homo sapien
aattgctgtttttgagtgtcccagg

SEQ ID NO: 1416696 - DNA, 25 bp, Homo sapien
ccccagttctttgggcaattgctgt

SEQ ID NO: 1416697 - DNA, 25 bp, Homo sapien
taaccttttcatctgattgaagtag

SEQ ID NO: 1416698 - DNA, 25 bp, Homo sapien
ttgaatgagttgaccccagtgaatg

SEQ ID NO: 1416699 - DNA, 25 bp, Homo sapien
gagttgaccccagtgaatgcttcca

SEQ ID NO: 1416700 - DNA, 25 bp, Homo sapien
atgcttccatcaaggacaaagctgc

SEQ ID NO: 1416701 - DNA, 25 bp, Homo sapien
ctcttcacctgcgggctttctcttt

SEQ ID NO: 1416702 - DNA, 25 bp, Homo sapien
ctgctcttcacctgcgggctttctc

SEQ ID NO: 1416703 - DNA, 25 bp, Homo sapien
ggcttttgaagtaatagagtccaga

SEQ ID NO: 1416704 - DNA, 25 bp, Homo sapien
tgctcttcacctgcgggctttctct

SEQ ID NO: 1416705 - DNA, 25 bp, Homo sapien
tctacttcatcttctacgtggtggg

SEQ ID NO: 1416706 - DNA, 25 bp, Homo sapien
gggccaaacaacagtgggcagctat

SEQ ID NO: 1416707 - DNA, 25 bp, Homo sapien
agtgggcagctatttcatcctcctg

SEQ ID NO: 1416708 - DNA, 25 bp, Homo sapien
tacgtggtgggccaaacaacagtgg

SEQ ID NO: 1416709 - DNA, 25 bp, Homo sapien
aaagtctcagtaagaattctaattt

SEQ ID NO: 1416710 - DNA, 25 bp, Homo sapien
aaaagtctcagtaagaattctaatt

SEQ ID NO: 1416711 - DNA, 25 bp, Homo sapien
aagtctcagtaagaattctaatttg

SEQ ID NO: 1416712 - DNA, 25 bp, Homo sapien
gaaaagtctcagtaagaattctaat

SEQ ID NO: 1416713 - DNA, 25 bp, Homo sapien
ggggcccagctgaaccgagagggtg

SEQ ID NO: 1416714 - DNA, 25 bp, Homo sapien
aagtgggcctgataggaagacattg

SEQ ID NO: 1416715 - DNA, 25 bp, Homo sapien
gataagggggcccagctgaaccgag

SEQ ID NO: 1416716 - DNA, 25 bp, Homo sapien
agggggcccagctgaaccgagaggg

SEQ ID NO: 1416717 - DNA, 25 bp, Homo sapien
ctcccaaagagcccacattcctgca

SEQ ID NO: 1416718 - DNA, 25 bp, Homo sapien
tcccaaagagcccacattcctgcag

SEQ ID NO: 1416719 - DNA, 25 bp, Homo sapien
aatggagtgtgagcccttcaacctc

SEQ ID NO: 1416720 - DNA, 25 bp, Homo sapien
tctgaatggagtgtgagcccttcaa

SEQ ID NO: 1416721 - DNA, 25 bp, Homo sapien
caacctctttcgaacagccaggact

SEQ ID NO: 1416722 - DNA, 25 bp, Homo sapien
cttcaacctctttcgaacagccagg

SEQ ID NO: 1416723 - DNA, 25 bp, Homo sapien
cattgtttgccaaatgcttggaaca

SEQ ID NO: 1416724 - DNA, 25 bp, Homo sapien
cagcaatacagatagtgtctccact

SEQ ID NO: 1416725 - DNA, 25 bp, Homo sapien
catttctttagggtgactctgccaa

SEQ ID NO: 1416726 - DNA, 25 bp, Homo sapien
cagcgttaccgtctttatcatgaaa

SEQ ID NO: 1416727 - DNA, 25 bp, Homo sapien
caggttcgtgattctgattccattc

SEQ ID NO: 1416728 - DNA, 25 bp, Homo sapien
gactctcgaaatcatgaacactcca

SEQ ID NO: 1416729 - DNA, 25 bp, Homo sapien
gaacactccatttccctactacctc

SEQ ID NO: 1416730 - DNA, 25 bp, Homo sapien
tgattccattctttgactctcgaaa

SEQ ID NO: 1416731 - DNA, 25 bp, Homo sapien
tcacttgggtttcgtaactgaggaa

SEQ ID NO: 1416732 - DNA, 25 bp, Homo sapien
tacagatagctctagactggaagtc

SEQ ID NO: 1416733 - DNA, 25 bp, Homo sapien
ggaagtcaggatattgtggtctcac

SEQ ID NO: 1416734 - DNA, 25 bp, Homo sapien
tgagagttcccgttcccagtgtata

SEQ ID NO: 1416735 - DNA, 25 bp, Homo sapien
atttccaattacacagcaaaatttc

SEQ ID NO: 1416736 - DNA, 25 bp, Homo sapien
tcgcccctctttctctaacaagaat

SEQ ID NO: 1416737 - DNA, 25 bp, Homo sapien
atgtctactgacagaagcagcttag

SEQ ID NO: 1416738 - DNA, 25 bp, Homo sapien
gcaaaatttccatgtctactgacag

SEQ ID NO: 1416739 - DNA, 25 bp, Homo sapien
ctcagttccctggcccatatgtgga

SEQ ID NO: 1416740 - DNA, 25 bp, Homo sapien
cagttccctggcccatatgtggagt

SEQ ID NO: 1416741 - DNA, 25 bp, Homo sapien
tcagttccctggcccatatgtggag

SEQ ID NO: 1416742 - DNA, 25 bp, Homo sapien
agttccctggcccatatgtggagtc

SEQ ID NO: 1416743 - DNA, 25 bp, Homo sapien
tcaagcaatggcatcagtggaaatt

SEQ ID NO: 1416744 - DNA, 25 bp, Homo sapien
ggatagtgaactagatgccacagga

SEQ ID NO: 1416745 - DNA, 25 bp, Homo sapien
tgggagcaccatgtacctgaccaag

SEQ ID NO: 1416746 - DNA, 25 bp, Homo sapien
agtgctcagtgccaagtgtgagagt

SEQ ID NO: 1416747 - DNA, 25 bp, Homo sapien
gaaagggatgggagcaccatgtacc

SEQ ID NO: 1416748 - DNA, 25 bp, Homo sapien
gattttctcctagaatggaggactc

SEQ ID NO: 1416749 - DNA, 25 bp, Homo sapien
cctagaatggaggactctattatgc

SEQ ID NO: 1416750 - DNA, 25 bp, Homo sapien
tggaggactctattatgctgcgaac

SEQ ID NO: 1416751 - DNA, 25 bp, Homo sapien
ggactctattatgctgcgaacactc

SEQ ID NO: 1416752 - DNA, 25 bp, Homo sapien
gccctgatatagttacttagcttag

SEQ ID NO: 1416753 - DNA, 25 bp, Homo sapien
cctgaagttgccctgatatagttac

SEQ ID NO: 1416754 - DNA, 25 bp, Homo sapien
tggaaatgacctgaagttgccctga

SEQ ID NO: 1416755 - DNA, 25 bp, Homo sapien
tgacctgaagttgccctgatatagt

SEQ ID NO: 1416756 - DNA, 25 bp, Homo sapien
ttctccaaaccttgcacaggttctg

SEQ ID NO: 1416757 - DNA, 25 bp, Homo sapien
gactgtctctaacacgatttccttt

SEQ ID NO: 1416758 - DNA, 25 bp, Homo sapien
tcactttagttggactgtctctaac

SEQ ID NO: 1416759 - DNA, 25 bp, Homo sapien
ccttgcacaggttctgtttgtctca

SEQ ID NO: 1416760 - DNA, 25 bp, Homo sapien
gtgggagtttgccatatggtgccac

SEQ ID NO: 1416761 - DNA, 25 bp, Homo sapien
tttctcatatttgcacttgagtggg

SEQ ID NO: 1416762 - DNA, 25 bp, Homo sapien
tgtatcttgcagtcccacatcttct

SEQ ID NO: 1416763 - DNA, 25 bp, Homo sapien
cataacccccgacaagcgtagtttg

SEQ ID NO: 1416764 - DNA, 25 bp, Homo sapien
aatgtagagcggaaactggatggtc

SEQ ID NO: 1416765 - DNA, 25 bp, Homo sapien
ggataatttctaatagcccagtgca

SEQ ID NO: 1416766 - DNA, 25 bp, Homo sapien
ggtcattgtcaaaaggtccctgtca

SEQ ID NO: 1416767 - DNA, 25 bp, Homo sapien
catcaacaatgctctagtgggataa

SEQ ID NO: 1416768 - DNA, 25 bp, Homo sapien
cccacagcttgctgtgaaagcttca

SEQ ID NO: 1416769 - DNA, 25 bp, Homo sapien
gaacatgtgtgcggaagcacatgag

SEQ ID NO: 1416770 - DNA, 25 bp, Homo sapien
cagcttgctgtgaaagcttcatgag

SEQ ID NO: 1416771 - DNA, 25 bp, Homo sapien
aacatgtgtgcggaagcacatgagc

SEQ ID NO: 1416772 - DNA, 25 bp, Homo sapien
tcttccagcaaatgaagtgcagtca

SEQ ID NO: 1416773 - DNA, 25 bp, Homo sapien
tttcttcttccagcaaatgaagtgc

SEQ ID NO: 1416774 - DNA, 25 bp, Homo sapien
cttccagcaaatgaagtgcagtcat

SEQ ID NO: 1416775 - DNA, 25 bp, Homo sapien
tcttcttccagcaaatgaagtgcag

SEQ ID NO: 1416776 - DNA, 25 bp, Homo sapien
gacaccagagacattgactccatca

SEQ ID NO: 1416777 - DNA, 25 bp, Homo sapien
ttagttatattaatgccagttgaag

SEQ ID NO: 1416778 - DNA, 25 bp, Homo sapien
cactgacaccagagacattgactcc

SEQ ID NO: 1416779 - DNA, 25 bp, Homo sapien
agttgaagactgaagattaaagtca

SEQ ID NO: 1416780 - DNA, 25 bp, Homo sapien
aatcgtccttgggtagctcctgtgc

SEQ ID NO: 1416781 - DNA, 25 bp, Homo sapien
gatgtcttgattccagctttactcc

SEQ ID NO: 1416782 - DNA, 25 bp, Homo sapien
gaacctgcacgggcacttttctgat

SEQ ID NO: 1416783 - DNA, 25 bp, Homo sapien
cttaaatgctgaggggccaacacca

SEQ ID NO: 1416784 - DNA, 25 bp, Homo sapien
cttcctggtatacagcatcctccag

SEQ ID NO: 1416785 - DNA, 25 bp, Homo sapien
ttcctggtatacagcatcctccagc

SEQ ID NO: 1416786 - DNA, 25 bp, Homo sapien
gttgtatagtgataaaatcagggct

SEQ ID NO: 1416787 - DNA, 25 bp, Homo sapien
tgcataggttgtatagtgataaaat

SEQ ID NO: 1416788 - DNA, 25 bp, Homo sapien
tgtatagtgataaaatcagggcttt

SEQ ID NO: 1416789 - DNA, 25 bp, Homo sapien
taggttgtatagtgataaaatcagg

SEQ ID NO: 1416790 - DNA, 25 bp, Homo sapien
gaaaagtttatgcaggaaccatgtg

SEQ ID NO: 1416791 - DNA, 25 bp, Homo sapien
tcattaggtagaactgggaaccact

SEQ ID NO: 1416792 - DNA, 25 bp, Homo sapien
gaccttggtaattgatagctgcata

SEQ ID NO: 1416793 - DNA, 25 bp, Homo sapien
gaaagaggcttccaacttgagtaag

SEQ ID NO: 1416794 - DNA, 25 bp, Homo sapien
ataaatggaggtacaggatatcacc

SEQ ID NO: 1416795 - DNA, 25 bp, Homo sapien
cactgcattcgttgctccagtataa

SEQ ID NO: 1416796 - DNA, 25 bp, Homo sapien
ttacatgcatgagcacctttctggc

SEQ ID NO: 1416797 - DNA, 25 bp, Homo sapien
tcacaatttgaaaagcccacataag

SEQ ID NO: 1416798 - DNA, 25 bp, Homo sapien
tcacactcggacagcatgccggcag

SEQ ID NO: 1416799 - DNA, 25 bp, Homo sapien
cacactgtcctggtcacgttgttcc

SEQ ID NO: 1416800 - DNA, 25 bp, Homo sapien
cactgtcctggtcacgttgttcctg

SEQ ID NO: 1416801 - DNA, 25 bp, Homo sapien
gcatgccggcaggaaataggcactt

SEQ ID NO: 1416802 - DNA, 25 bp, Homo sapien
cattggagtgatagttaggacttct

SEQ ID NO: 1416803 - DNA, 25 bp, Homo sapien
ctaaaaccaaactgaatctagagcg

SEQ ID NO: 1416804 - DNA, 25 bp, Homo sapien
tgatagttaggacttctaaaaccaa

SEQ ID NO: 1416805 - DNA, 25 bp, Homo sapien
gagcggtgatatactggcatcccca

SEQ ID NO: 1416806 - DNA, 25 bp, Homo sapien
tgcttccacaagatatcacactggt

SEQ ID NO: 1416807 - DNA, 25 bp, Homo sapien
tacctcagggtgtatcaactctggc

SEQ ID NO: 1416808 - DNA, 25 bp, Homo sapien
gtagggcttgtccttctaaggtgaa

SEQ ID NO: 1416809 - DNA, 25 bp, Homo sapien
tggcaaggccagcaacatgcccttg

SEQ ID NO: 1416810 - DNA, 25 bp, Homo sapien
tcacttggccattgattagggtgct

SEQ ID NO: 1416811 - DNA, 25 bp, Homo sapien
gatacatacaattagacactgacat

SEQ ID NO: 1416812 - DNA, 25 bp, Homo sapien
ttgattagggtgctgcttacatctg

SEQ ID NO: 1416813 - DNA, 25 bp, Homo sapien
acatacaattagacactgacatgac

SEQ ID NO: 1416814 - DNA, 25 bp, Homo sapien
gatgtccagcttcacttaaaataag

SEQ ID NO: 1416815 - DNA, 25 bp, Homo sapien
ttcaaagacaaaagacacgtgaaag

SEQ ID NO: 1416816 - DNA, 25 bp, Homo sapien
ggactatgcagagatacattatttg

SEQ ID NO: 1416817 - DNA, 25 bp, Homo sapien
taatagttggagagggtaatacatc

SEQ ID NO: 1416818 - DNA, 25 bp, Homo sapien
tcacaattagagttgcttccctcct

SEQ ID NO: 1416819 - DNA, 25 bp, Homo sapien
aagttattcattgcagtattgtttg

SEQ ID NO: 1416820 - DNA, 25 bp, Homo sapien
gaacagtttgtcagaaattgatcac

SEQ ID NO: 1416821 - DNA, 25 bp, Homo sapien
tcctagagatacacctgcataggtg

SEQ ID NO: 1416822 - DNA, 25 bp, Homo sapien
tattctccacagcagtggtaatcaa

SEQ ID NO: 1416823 - DNA, 25 bp, Homo sapien
ctattctccacagcagtggtaatca

SEQ ID NO: 1416824 - DNA, 25 bp, Homo sapien
tgagggcatccacatatgattggct

SEQ ID NO: 1416825 - DNA, 25 bp, Homo sapien
ccacatatgattggctataatatca

SEQ ID NO: 1416826 - DNA, 25 bp, Homo sapien
taactaaagagccttgtgcgaagca

SEQ ID NO: 1416827 - DNA, 25 bp, Homo sapien
tagtcattgctctcgtttgcctcag

SEQ ID NO: 1416828 - DNA, 25 bp, Homo sapien
taccccttgggtttcgatgcttgga

SEQ ID NO: 1416829 - DNA, 25 bp, Homo sapien
gaggtttaatagcagttgagccagc

SEQ ID NO: 1416830 - DNA, 25 bp, Homo sapien
gtacagagcacacatcaaccaaata

SEQ ID NO: 1416831 - DNA, 25 bp, Homo sapien
tggcactgaattctacttaaagcat

SEQ ID NO: 1416832 - DNA, 25 bp, Homo sapien
aaataattaacagctccatcctatt

SEQ ID NO: 1416833 - DNA, 25 bp, Homo sapien
ttgaaatggcttgtgtacagagcac

SEQ ID NO: 1416834 - DNA, 25 bp, Homo sapien
tattttccgctgagaggtctaccca

SEQ ID NO: 1416835 - DNA, 25 bp, Homo sapien
tgtcctgccctgtaggtaaaagccc

SEQ ID NO: 1416836 - DNA, 25 bp, Homo sapien
gaaaatccaacaagcgcagtcagtg

SEQ ID NO: 1416837 - DNA, 25 bp, Homo sapien
cagacatttactcaagggaacgtgg

SEQ ID NO: 1416838 - DNA, 25 bp, Homo sapien
tatttagctgtgaatgagacacgtc

SEQ ID NO: 1416839 - DNA, 25 bp, Homo sapien
caactaacatgaaggtggtccaagg

SEQ ID NO: 1416840 - DNA, 25 bp, Homo sapien
tgatatttaggtgggagactactcc

SEQ ID NO: 1416841 - DNA, 25 bp, Homo sapien
taaaagtgtctcacctagaaggcct

SEQ ID NO: 1416842 - DNA, 25 bp, Homo sapien
gccttcggacagtagataagtatcc

SEQ ID NO: 1416843 - DNA, 25 bp, Homo sapien
tgtgggtatcactgagcaaagctgc

SEQ ID NO: 1416844 - DNA, 25 bp, Homo sapien
tgtgtctgactacaagctgaagata

SEQ ID NO: 1416845 - DNA, 25 bp, Homo sapien
taagtatccaaagcagtgtgggcaa

SEQ ID NO: 1416846 - DNA, 25 bp, Homo sapien
cattgtgatgtccttagtgaagtgg

SEQ ID NO: 1416847 - DNA, 25 bp, Homo sapien
gaatccttttccatcagggcatgga

SEQ ID NO: 1416848 - DNA, 25 bp, Homo sapien
caaagcgaggcagagaatccttttc

SEQ ID NO: 1416849 - DNA, 25 bp, Homo sapien
gattaactcctgataaaactcagag

SEQ ID NO: 1416850 - DNA, 25 bp, Homo sapien
gatgggataaggcagctgatgttcc

SEQ ID NO: 1416851 - DNA, 25 bp, Homo sapien
caacagatgcatccaaccggtatta

SEQ ID NO: 1416852 - DNA, 25 bp, Homo sapien
accggtattagacacccaccaggtg

SEQ ID NO: 1416853 - DNA, 25 bp, Homo sapien
cacttctcactttataggcgatggg

SEQ ID NO: 1416854 - DNA, 25 bp, Homo sapien
ttaggagcctccgtttgaatgaatt

SEQ ID NO: 1416855 - DNA, 25 bp, Homo sapien
tctttaggagcctccgtttgaatga

SEQ ID NO: 1416856 - DNA, 25 bp, Homo sapien
taggagcctccgtttgaatgaattc

SEQ ID NO: 1416857 - DNA, 25 bp, Homo sapien
ggagcctccgtttgaatgaattctt

SEQ ID NO: 1416858 - DNA, 25 bp, Homo sapien
caggaaacttttgaaactggcaagt

SEQ ID NO: 1416859 - DNA, 25 bp, Homo sapien
aaggttttcctcactgaattcagac

SEQ ID NO: 1416860 - DNA, 25 bp, Homo sapien
ggcaatccagaactcaaggttttcc

SEQ ID NO: 1416861 - DNA, 25 bp, Homo sapien
aaacttttgaaactggcaagtccat

SEQ ID NO: 1416862 - DNA, 25 bp, Homo sapien
ttttagttgggctacttcgaatgga

SEQ ID NO: 1416863 - DNA, 25 bp, Homo sapien
gttgggctacttcgaatggattagt

SEQ ID NO: 1416864 - DNA, 25 bp, Homo sapien
tagttgggctacttcgaatggatta

SEQ ID NO: 1416865 - DNA, 25 bp, Homo sapien
ggctacttcgaatggattagtgtcc

SEQ ID NO: 1416866 - DNA, 25 bp, Homo sapien
tttgtccagggaatcacgccactgc

SEQ ID NO: 1416867 - DNA, 25 bp, Homo sapien
gtttgtccagggaatcacgccactg

SEQ ID NO: 1416868 - DNA, 25 bp, Homo sapien
ctgttttgctggctagaaatacagg

SEQ ID NO: 1416869 - DNA, 25 bp, Homo sapien
tgttttgctggctagaaatacaggc

SEQ ID NO: 1416870 - DNA, 25 bp, Homo sapien
tgaaataatcttgggtgatttctgt

SEQ ID NO: 1416871 - DNA, 25 bp, Homo sapien
ttgtgaaataatcttgggtgatttc

SEQ ID NO: 1416872 - DNA, 25 bp, Homo sapien
ctgataaccagtggtgacctgggca

SEQ ID NO: 1416873 - DNA, 25 bp, Homo sapien
tgataaccagtggtgacctgggcat

SEQ ID NO: 1416874 - DNA, 25 bp, Homo sapien
gatgatgatgaacgatgggaatgct

SEQ ID NO: 1416875 - DNA, 25 bp, Homo sapien
tagtgacagtctctgcagctagcag

SEQ ID NO: 1416876 - DNA, 25 bp, Homo sapien
agtcgtgttcctgagttaaagcggg

SEQ ID NO: 1416877 - DNA, 25 bp, Homo sapien
tagaagtaatagttccctaggatgc

SEQ ID NO: 1416878 - DNA, 25 bp, Homo sapien
ctctggcttctcattgtacggaatg

SEQ ID NO: 1416879 - DNA, 25 bp, Homo sapien
tctcattgtacggaatgacaaggtc

SEQ ID NO: 1416880 - DNA, 25 bp, Homo sapien
aatgacaaggtcaccaactgagtct

SEQ ID NO: 1416881 - DNA, 25 bp, Homo sapien
tgacaaggtcaccaactgagtctgg

SEQ ID NO: 1416882 - DNA, 25 bp, Homo sapien
cagaacatcaggttactcttttcct

SEQ ID NO: 1416883 - DNA, 25 bp, Homo sapien
tcaggttactcttttcctcatattt

SEQ ID NO: 1416884 - DNA, 25 bp, Homo sapien
agaacatcaggttactcttttcctc

SEQ ID NO: 1416885 - DNA, 25 bp, Homo sapien
acatcaggttactcttttcctcata

SEQ ID NO: 1416886 - DNA, 25 bp, Homo sapien
caacaccatccagagaagataattt

SEQ ID NO: 1416887 - DNA, 25 bp, Homo sapien
tggtctcgggctctatttgactgca

SEQ ID NO: 1416888 - DNA, 25 bp, Homo sapien
cgggctctatttgactgcacactag

SEQ ID NO: 1416889 - DNA, 25 bp, Homo sapien
ttcctgcttggtctcgggctctatt

SEQ ID NO: 1416890 - DNA, 25 bp, Homo sapien
gctttgccaactagcaggacgcgtg

SEQ ID NO: 1416891 - DNA, 25 bp, Homo sapien
tagaaagaccatgctccaaaggtgg

SEQ ID NO: 1416892 - DNA, 25 bp, Homo sapien
ttaacccttagagatggcacctgtg

SEQ ID NO: 1416893 - DNA, 25 bp, Homo sapien
tatgaaatactcctcgggtgctcca

SEQ ID NO: 1416894 - DNA, 25 bp, Homo sapien
cattcttacacctctgtagggagat

SEQ ID NO: 1416895 - DNA, 25 bp, Homo sapien
gttccctgttctagatcctttctga

SEQ ID NO: 1416896 - DNA, 25 bp, Homo sapien
tgcaaggggccctttcatgggagtc

SEQ ID NO: 1416897 - DNA, 25 bp, Homo sapien
tctaatgttccttgcaaggggccct

SEQ ID NO: 1416898 - DNA, 25 bp, Homo sapien
gggcaaagctgcaagtcctttgcac

SEQ ID NO: 1416899 - DNA, 25 bp, Homo sapien
ggcaaagctgcaagtcctttgcaca

SEQ ID NO: 1416900 - DNA, 25 bp, Homo sapien
gcaaagctgcaagtcctttgcacat

SEQ ID NO: 1416901 - DNA, 25 bp, Homo sapien
gcactactgtggcataaggctttca

SEQ ID NO: 1416902 - DNA, 25 bp, Homo sapien
tccagccaatccagagccttagagg

SEQ ID NO: 1416903 - DNA, 25 bp, Homo sapien
cagcagagccagtctttgaaaactt

SEQ ID NO: 1416904 - DNA, 25 bp, Homo sapien
tttggcaggtggcttagctcctccg

SEQ ID NO: 1416905 - DNA, 25 bp, Homo sapien
tcagccccttatcgaaggctgccaa

SEQ ID NO: 1416906 - DNA, 25 bp, Homo sapien
agccccttatcgaaggctgccaagt

SEQ ID NO: 1416907 - DNA, 25 bp, Homo sapien
ccccttatcgaaggctgccaagtgc

SEQ ID NO: 1416908 - DNA, 25 bp, Homo sapien
cgtctcagccccttatcgaaggctg

SEQ ID NO: 1416909 - DNA, 25 bp, Homo sapien
gaaatgtttcttgcgcacatttttc

SEQ ID NO: 1416910 - DNA, 25 bp, Homo sapien
tatgccaatgagcactgtgcatctg

SEQ ID NO: 1416911 - DNA, 25 bp, Homo sapien
ccaatgagcactgtgcatctgtaag

SEQ ID NO: 1416912 - DNA, 25 bp, Homo sapien
attgatatgccaatgagcactgtgc

SEQ ID NO: 1416913 - DNA, 25 bp, Homo sapien
aagtgataggatgatgttgcaaaag

SEQ ID NO: 1416914 - DNA, 25 bp, Homo sapien
taggatgatgttgcaaaagtggatt

SEQ ID NO: 1416915 - DNA, 25 bp, Homo sapien
gcaaaagtggatttgaggtcgaaga

SEQ ID NO: 1416916 - DNA, 25 bp, Homo sapien
tgatgttgcaaaagtggatttgagg

SEQ ID NO: 1416917 - DNA, 25 bp, Homo sapien
ttttattttttatcttggcagatgt

SEQ ID NO: 1416918 - DNA, 25 bp, Homo sapien
tttttattttttatcttggcagatg

SEQ ID NO: 1416919 - DNA, 25 bp, Homo sapien
atttgtttgcaactctggttgttga

SEQ ID NO: 1416920 - DNA, 25 bp, Homo sapien
ttaagggactcggaaaagacaatga

SEQ ID NO: 1416921 - DNA, 25 bp, Homo sapien
gcagaaacaatgacatttgcaacaa

SEQ ID NO: 1416922 - DNA, 25 bp, Homo sapien
ttcactgggtgattggtgccaaaaa

SEQ ID NO: 1416923 - DNA, 25 bp, Homo sapien
tggcttccgtattatctagatagat

SEQ ID NO: 1416924 - DNA, 25 bp, Homo sapien
ccctggcttccgtattatctagata

SEQ ID NO: 1416925 - DNA, 25 bp, Homo sapien
gcttccgtattatctagatagatag

SEQ ID NO: 1416926 - DNA, 25 bp, Homo sapien
cctggcttccgtattatctagatag

SEQ ID NO: 1416927 - DNA, 25 bp, Homo sapien
agatgagatgatataaaactcacca

SEQ ID NO: 1416928 - DNA, 25 bp, Homo sapien
caggctctgtacatatcctcttata

SEQ ID NO: 1416929 - DNA, 25 bp, Homo sapien
ggagttttgattgccttcaagatga

SEQ ID NO: 1416930 - DNA, 25 bp, Homo sapien
aaaatgaactatccttaatctttat

SEQ ID NO: 1416931 - DNA, 25 bp, Homo sapien
gatcagagaagaagagtttgctcaa

SEQ ID NO: 1416932 - DNA, 25 bp, Homo sapien
tgggcactgatcagagaagaagagt

SEQ ID NO: 1416933 - DNA, 25 bp, Homo sapien
aatatcaagaataaccatttccctg

SEQ ID NO: 1416934 - DNA, 25 bp, Homo sapien
cactgatcagagaagaagagtttgc

SEQ ID NO: 1416935 - DNA, 25 bp, Homo sapien
tgctaataacttgtcttctccttag

SEQ ID NO: 1416936 - DNA, 25 bp, Homo sapien
tcagcgaatgtcaaccttgtatttc

SEQ ID NO: 1416937 - DNA, 25 bp, Homo sapien
tcttttgggtgctaataacttgtct

SEQ ID NO: 1416938 - DNA, 25 bp, Homo sapien
tgtatttccatccgcactggtgctt

SEQ ID NO: 1416939 - DNA, 25 bp, Homo sapien
tcaaccaagtgggagaacaactgcc

SEQ ID NO: 1416940 - DNA, 25 bp, Homo sapien
gaggaagctgaagaatagcccacct

SEQ ID NO: 1416941 - DNA, 25 bp, Homo sapien
tagcccacctcaaccaagtgggaga

SEQ ID NO: 1416942 - DNA, 25 bp, Homo sapien
tgaagaatagcccacctcaaccaag

SEQ ID NO: 1416943 - DNA, 25 bp, Homo sapien
gacagggagggaccatatgatatat

SEQ ID NO: 1416944 - DNA, 25 bp, Homo sapien
catggcatcagcaaatccggagtgg

SEQ ID NO: 1416945 - DNA, 25 bp, Homo sapien
tatcacataatttctgggcgctaca

SEQ ID NO: 1416946 - DNA, 25 bp, Homo sapien
gaaacttcgagtagcctgattagaa

SEQ ID NO: 1416947 - DNA, 25 bp, Homo sapien
cccaaggtcatatagagtggtataa

SEQ ID NO: 1416948 - DNA, 25 bp, Homo sapien
ctttaaagagtatgacttccagtca

SEQ ID NO: 1416949 - DNA, 25 bp, Homo sapien
tggattcaaaattagcgcacactct

SEQ ID NO: 1416950 - DNA, 25 bp, Homo sapien
tgaaattatcgccagtgctttaaag

SEQ ID NO: 1416951 - DNA, 25 bp, Homo sapien
aaaccaggatcaagaggctcacaag

SEQ ID NO: 1416952 - DNA, 25 bp, Homo sapien
acaaaccaggatcaagaggctcaca

SEQ ID NO: 1416953 - DNA, 25 bp, Homo sapien
caaaccaggatcaagaggctcacaa

SEQ ID NO: 1416954 - DNA, 25 bp, Homo sapien
aagaagcatgaagcacagaacccag

SEQ ID NO: 1416955 - DNA, 25 bp, Homo sapien
agaagcatgaagcacagaacccaga

SEQ ID NO: 1416956 - DNA, 25 bp, Homo sapien
gcagaatcctgtacagcccacagaa

SEQ ID NO: 1416957 - DNA, 25 bp, Homo sapien
catgggtaagtttcccagcgcctcc

SEQ ID NO: 1416958 - DNA, 25 bp, Homo sapien
catatccatgtgttccgcgtctggg

SEQ ID NO: 1416959 - DNA, 25 bp, Homo sapien
tgctcaggccatatgaagaccgtgc

SEQ ID NO: 1416960 - DNA, 25 bp, Homo sapien
gagcttttaggaccatgccattcat

SEQ ID NO: 1416961 - DNA, 25 bp, Homo sapien
gttacaactggtggctaaaagcatg

SEQ ID NO: 1416962 - DNA, 25 bp, Homo sapien
taatggttatccactctcagcctgt

SEQ ID NO: 1416963 - DNA, 25 bp, Homo sapien
gctttgtagagatactcccaggcct

SEQ ID NO: 1416964 - DNA, 25 bp, Homo sapien
gacctctccgaagcatttgatgtta

SEQ ID NO: 1416965 - DNA, 25 bp, Homo sapien
cagcacatggttctgcaagattacc

SEQ ID NO: 1416966 - DNA, 25 bp, Homo sapien
tccactgtgcaacgtgttgtgcagc

SEQ ID NO: 1416967 - DNA, 25 bp, Homo sapien
cactgtcagtcatctgttgttccac

SEQ ID NO: 1416968 - DNA, 25 bp, Homo sapien
tgggatagccagcttctttgtacgc

SEQ ID NO: 1416969 - DNA, 25 bp, Homo sapien
gaagccaggaatattcaacatggag

SEQ ID NO: 1416970 - DNA, 25 bp, Homo sapien
gaaaagggatacttggaagccagga

SEQ ID NO: 1416971 - DNA, 25 bp, Homo sapien
cctgcataggtaaatgctggcagct

SEQ ID NO: 1416972 - DNA, 25 bp, Homo sapien
cacagaaatgggcagagtacagaca

SEQ ID NO: 1416973 - DNA, 25 bp, Homo sapien
gagcctttatggttaatcactacta

SEQ ID NO: 1416974 - DNA, 25 bp, Homo sapien
ctgatgacaagttcttaggttggca

SEQ ID NO: 1416975 - DNA, 25 bp, Homo sapien
tttcttattacagttccagtgaagc

SEQ ID NO: 1416976 - DNA, 25 bp, Homo sapien
ttttggaggctctatcttcagccac

SEQ ID NO: 1416977 - DNA, 25 bp, Homo sapien
aagttgtctccaaggatctcatcag

SEQ ID NO: 1416978 - DNA, 25 bp, Homo sapien
gattcccagggaggatacctatgac

SEQ ID NO: 1416979 - DNA, 25 bp, Homo sapien
ttttaattacacacaggagtcccac

SEQ ID NO: 1416980 - DNA, 25 bp, Homo sapien
tcaaatttctgtgatagaagcacat

SEQ ID NO: 1416981 - DNA, 25 bp, Homo sapien
caaatttctgtgatagaagcacata

SEQ ID NO: 1416982 - DNA, 25 bp, Homo sapien
gaattgttaagccagtagtatgttg

SEQ ID NO: 1416983 - DNA, 25 bp, Homo sapien
taaattcaaacactgtttcatggga

SEQ ID NO: 1416984 - DNA, 25 bp, Homo sapien
actgtttcatgggaattgttaagcc

SEQ ID NO: 1416985 - DNA, 25 bp, Homo sapien
catgggaattgttaagccagtagta

SEQ ID NO: 1416986 - DNA, 25 bp, Homo sapien
taaaaacgtgtgatatgcctgacca

SEQ ID NO: 1416987 - DNA, 25 bp, Homo sapien
ctttcagtgctcaagtactaaccag

SEQ ID NO: 1416988 - DNA, 25 bp, Homo sapien
gatagctgtaattggcctcaagagg

SEQ ID NO: 1416989 - DNA, 25 bp, Homo sapien
ctcactgggacggaagagtgtcctc

SEQ ID NO: 1416990 - DNA, 25 bp, Homo sapien
cacgttgtgttgtgcataggaataa

SEQ ID NO: 1416991 - DNA, 25 bp, Homo sapien
taaatctaagatacagctcacgttg

SEQ ID NO: 1416992 - DNA, 25 bp, Homo sapien
tgagaataaatctaagatacagctc

SEQ ID NO: 1416993 - DNA, 25 bp, Homo sapien
gatacagctcacgttgtgttgtgca

SEQ ID NO: 1416994 - DNA, 25 bp, Homo sapien
gatactctgaagactagagaagaat

SEQ ID NO: 1416995 - DNA, 25 bp, Homo sapien
tcttcacctgctacaataaaataag

SEQ ID NO: 1416996 - DNA, 25 bp, Homo sapien
gcatcttcacctgctacaataaaat

SEQ ID NO: 1416997 - DNA, 25 bp, Homo sapien
aataagatactctgaagactagaga

SEQ ID NO: 1416998 - DNA, 25 bp, Homo sapien
gaatcttttcatacctaagcttgtg

SEQ ID NO: 1416999 - DNA, 25 bp, Homo sapien
tcttttgtatatgcaaggaaactga

SEQ ID NO: 1417000 - DNA, 25 bp, Homo sapien
taacttaagatcatacagaaggaga

SEQ ID NO: 1417001 - DNA, 25 bp, Homo sapien
cagaaggagaatgtggatttgaacc

SEQ ID NO: 1417002 - DNA, 25 bp, Homo sapien
gttcaaatctgcaactacggtatca

SEQ ID NO: 1417003 - DNA, 25 bp, Homo sapien
gaaggatctatgactgattcaccat

SEQ ID NO: 1417004 - DNA, 25 bp, Homo sapien
gaatgctagattttgaaagaacaca

SEQ ID NO: 1417005 - DNA, 25 bp, Homo sapien
gaattgcatctcagtggttcaaatc

SEQ ID NO: 1417006 - DNA, 25 bp, Homo sapien
aagagtcagtgactgtcctatctgg

SEQ ID NO: 1417007 - DNA, 25 bp, Homo sapien
caaattgtaaagtcttaagagtcag

SEQ ID NO: 1417008 - DNA, 25 bp, Homo sapien
tggtcactgattaatcttgcctggt

SEQ ID NO: 1417009 - DNA, 25 bp, Homo sapien
atgtgattataaaaggacccccaag

SEQ ID NO: 1417010 - DNA, 25 bp, Homo sapien
ctcaccaggtgggaaaacagctcga

SEQ ID NO: 1417011 - DNA, 25 bp, Homo sapien
gccacacattgggaataatcagtaa

SEQ ID NO: 1417012 - DNA, 25 bp, Homo sapien
tcttcaatgattaccagggccacac

SEQ ID NO: 1417013 - DNA, 25 bp, Homo sapien
gaagattactcatttccaaggaggc

SEQ ID NO: 1417014 - DNA, 25 bp, Homo sapien
catatactggactgagatgtaaggc

SEQ ID NO: 1417015 - DNA, 25 bp, Homo sapien
actggactgagatgtaaggcttttc

SEQ ID NO: 1417016 - DNA, 25 bp, Homo sapien
tgtcctggtggcttctgttggtttg

SEQ ID NO: 1417017 - DNA, 25 bp, Homo sapien
aaaaccatccatatactggactgag

SEQ ID NO: 1417018 - DNA, 25 bp, Homo sapien
gtgagagacccgaagtgtcaccaat

SEQ ID NO: 1417019 - DNA, 25 bp, Homo sapien
tccagacagtgctttttaagcgctc

SEQ ID NO: 1417020 - DNA, 25 bp, Homo sapien
ttttccctctgaagatatccagaca

SEQ ID NO: 1417021 - DNA, 25 bp, Homo sapien
cgaagtgtcaccaattcagttaact

SEQ ID NO: 1417022 - DNA, 25 bp, Homo sapien
cacaggatggacaatgttgtacttt

SEQ ID NO: 1417023 - DNA, 25 bp, Homo sapien
gaaactgtgccattctaaaatagaa

SEQ ID NO: 1417024 - DNA, 25 bp, Homo sapien
cagtgtttaccagcatattgtgtga

SEQ ID NO: 1417025 - DNA, 25 bp, Homo sapien
cagcagtgtgctacatttaaaaaag

SEQ ID NO: 1417026 - DNA, 25 bp, Homo sapien
aatggattgagccatgccaatagtt

SEQ ID NO: 1417027 - DNA, 25 bp, Homo sapien
tggattgagccatgccaatagttca

SEQ ID NO: 1417028 - DNA, 25 bp, Homo sapien
atggattgagccatgccaatagttc

SEQ ID NO: 1417029 - DNA, 25 bp, Homo sapien
ttaaaggtattgcaatttaattgag

SEQ ID NO: 1417030 - DNA, 25 bp, Homo sapien
ctgtcatgagaataaaaagtccaaa

SEQ ID NO: 1417031 - DNA, 25 bp, Homo sapien
agtccaaataagactcagtctttga

SEQ ID NO: 1417032 - DNA, 25 bp, Homo sapien
cagtctttgactttaaaggtattgc

SEQ ID NO: 1417033 - DNA, 25 bp, Homo sapien
catcatctttttgcttatagagggt

SEQ ID NO: 1417034 - DNA, 25 bp, Homo sapien
aagacaacaaatgaagttggccaca

SEQ ID NO: 1417035 - DNA, 25 bp, Homo sapien
gttggccacatcagttgacttttcc

SEQ ID NO: 1417036 - DNA, 25 bp, Homo sapien
gcattgtacccatagaacttcttac

SEQ ID NO: 1417037 - DNA, 25 bp, Homo sapien
tgtataatagtggagacaggcacaa

SEQ ID NO: 1417038 - DNA, 25 bp, Homo sapien
gacgcatcatgtctcaaaaggagtt

SEQ ID NO: 1417039 - DNA, 25 bp, Homo sapien
tgagtctgcctctgtgttacctaaa

SEQ ID NO: 1417040 - DNA, 25 bp, Homo sapien
attgagtgtgcagtttgtaccaggc

SEQ ID NO: 1417041 - DNA, 25 bp, Homo sapien
ccacactggcaatgccccagtataa

SEQ ID NO: 1417042 - DNA, 25 bp, Homo sapien
actggcaatgccccagtataaactg

SEQ ID NO: 1417043 - DNA, 25 bp, Homo sapien
tggattactacaattatctcctaac

SEQ ID NO: 1417044 - DNA, 25 bp, Homo sapien
ctggattactacaattatctcctaa

SEQ ID NO: 1417045 - DNA, 25 bp, Homo sapien
cagcctcatgaatgcgaagtgggta

SEQ ID NO: 1417046 - DNA, 25 bp, Homo sapien
gactggtcattctggctgctactta

SEQ ID NO: 1417047 - DNA, 25 bp, Homo sapien
ggtctcaggtgtaaagcagcctcat

SEQ ID NO: 1417048 - DNA, 25 bp, Homo sapien
gcaagataatgaagaccctagcaca

SEQ ID NO: 1417049 - DNA, 25 bp, Homo sapien
ccatcttgtcactcaaaggtccact

SEQ ID NO: 1417050 - DNA, 25 bp, Homo sapien
gcaggctgccatggtctctttggaa

SEQ ID NO: 1417051 - DNA, 25 bp, Homo sapien
tcaaaggtccactcagtcctgatag

SEQ ID NO: 1417052 - DNA, 25 bp, Homo sapien
cctgataggtctgtcatccagaatt

SEQ ID NO: 1417053 - DNA, 25 bp, Homo sapien
tgctcttcaactcggaccccgaaaa

SEQ ID NO: 1417054 - DNA, 25 bp, Homo sapien
ttttgctcttcaactcggaccccga

SEQ ID NO: 1417055 - DNA, 25 bp, Homo sapien
tcccttgtcaccctgaacttagtga

SEQ ID NO: 1417056 - DNA, 25 bp, Homo sapien
ttggttttgctcttcaactcggacc

SEQ ID NO: 1417057 - DNA, 25 bp, Homo sapien
taaacgctggcggaagtcacgcaga

SEQ ID NO: 1417058 - DNA, 25 bp, Homo sapien
tcacgcagagatgggctagacgctc

SEQ ID NO: 1417059 - DNA, 25 bp, Homo sapien
ttcctgcagtccgaggttccgactc

SEQ ID NO: 1417060 - DNA, 25 bp, Homo sapien
gccagctccgcgagcaatggttccg

SEQ ID NO: 1417061 - DNA, 25 bp, Homo sapien
aaccggcatccgtcgcggttggacg

SEQ ID NO: 1417062 - DNA, 25 bp, Homo sapien
aagtgatgacggttgacgtttgctg

SEQ ID NO: 1417063 - DNA, 25 bp, Homo sapien
gacttccagtaggaggcggcaagtt

SEQ ID NO: 1417064 - DNA, 25 bp, Homo sapien
ggcggcaagtttgaaaagtgatgac

SEQ ID NO: 1417065 - DNA, 25 bp, Homo sapien
gagcgcgagaggacggaggaaggaa

SEQ ID NO: 1417066 - DNA, 25 bp, Homo sapien
aggtgagcgcgagaggacggaggaa

SEQ ID NO: 1417067 - DNA, 25 bp, Homo sapien
ctgtaggtgagcgcgagaggacgga

SEQ ID NO: 1417068 - DNA, 25 bp, Homo sapien
gtaggtgagcgcgagaggacggagg

SEQ ID NO: 1417069 - DNA, 25 bp, Homo sapien
tggtgcagcatagaccgaagaagac

SEQ ID NO: 1417070 - DNA, 25 bp, Homo sapien
ctgaaattgttcaagttaggcatac

SEQ ID NO: 1417071 - DNA, 25 bp, Homo sapien
gtaatgtggtttatttggctgcaga

SEQ ID NO: 1417072 - DNA, 25 bp, Homo sapien
cagatgcttgtcagctttttacaca

SEQ ID NO: 1417073 - DNA, 25 bp, Homo sapien
tatagcactacgcatgcataacgcc

SEQ ID NO: 1417074 - DNA, 25 bp, Homo sapien
aaggaaaagagcagcgcatatatag

SEQ ID NO: 1417075 - DNA, 25 bp, Homo sapien
taacgccatcattgttccttttaaa

SEQ ID NO: 1417076 - DNA, 25 bp, Homo sapien
ggtaaaaatatcacacctaatccaa

SEQ ID NO: 1417077 - DNA, 25 bp, Homo sapien
ctttgaactgttgatagagagatgt

SEQ ID NO: 1417078 - DNA, 25 bp, Homo sapien
ttcaagcctactgggtccttacaga

SEQ ID NO: 1417079 - DNA, 25 bp, Homo sapien
gtattaccatgccatatcatccttg

SEQ ID NO: 1417080 - DNA, 25 bp, Homo sapien
tattaacatagctacttcaggtttc

SEQ ID NO: 1417081 - DNA, 25 bp, Homo sapien
gtggtaggattttagtgaggcctta

SEQ ID NO: 1417082 - DNA, 25 bp, Homo sapien
ataaacttaaggcaggtggtaggat

SEQ ID NO: 1417083 - DNA, 25 bp, Homo sapien
gaaagaacctgttgaggtatgagat

SEQ ID NO: 1417084 - DNA, 25 bp, Homo sapien
ccttagaaagacttgagatacatga

SEQ ID NO: 1417085 - DNA, 25 bp, Homo sapien
cctggacttggctgaatgtttgaga

SEQ ID NO: 1417086 - DNA, 25 bp, Homo sapien
aattttctactcttcgagagcctag

SEQ ID NO: 1417087 - DNA, 25 bp, Homo sapien
gcctagtgtgtgttggactctttcc

SEQ ID NO: 1417088 - DNA, 25 bp, Homo sapien
ttcaaaggtcttgatgtcattattt

SEQ ID NO: 1417089 - DNA, 25 bp, Homo sapien
tggttgtagggacctctcgcttgct

SEQ ID NO: 1417090 - DNA, 25 bp, Homo sapien
gggacctctcgcttgctccattgtt

SEQ ID NO: 1417091 - DNA, 25 bp, Homo sapien
ggagtaggataaacatcagacctca

SEQ ID NO: 1417092 - DNA, 25 bp, Homo sapien
gagagtggagaaatcagacaccagg

SEQ ID NO: 1417093 - DNA, 25 bp, Homo sapien
ggcctgtttctgtctgaaactattc

SEQ ID NO: 1417094 - DNA, 25 bp, Homo sapien
cctgtttctgtctgaaactattcat

SEQ ID NO: 1417095 - DNA, 25 bp, Homo sapien
gcctgtttctgtctgaaactattca

SEQ ID NO: 1417096 - DNA, 25 bp, Homo sapien
taagggatggcctgatgaaatagtg

SEQ ID NO: 1417097 - DNA, 25 bp, Homo sapien
tcaggtgtgaagataaattgggcat

SEQ ID NO: 1417098 - DNA, 25 bp, Homo sapien
gatggcagcccatgttagaaggtta

SEQ ID NO: 1417099 - DNA, 25 bp, Homo sapien
tgttccgtagttcttgatgtgcagt

SEQ ID NO: 1417100 - DNA, 25 bp, Homo sapien
caggagtcattgctttgccccaact

SEQ ID NO: 1417101 - DNA, 25 bp, Homo sapien
gtcatccaagcactcctctccagct

SEQ ID NO: 1417102 - DNA, 25 bp, Homo sapien
tagaacagaacagcacaggagtcat

SEQ ID NO: 1417103 - DNA, 25 bp, Homo sapien
tcctctccagctttagaacagaaca

SEQ ID NO: 1417104 - DNA, 25 bp, Homo sapien
tcttgtccttcccatctccagaaga

SEQ ID NO: 1417105 - DNA, 25 bp, Homo sapien
gtccttcccatctccagaagatgct

SEQ ID NO: 1417106 - DNA, 25 bp, Homo sapien
aagggggaaagttctcttcagacat

SEQ ID NO: 1417107 - DNA, 25 bp, Homo sapien
gacattttgaacctccatcttgtcc

SEQ ID NO: 1417108 - DNA, 25 bp, Homo sapien
cccagatgcttatgttgttgctgca

SEQ ID NO: 1417109 - DNA, 25 bp, Homo sapien
tctgtgggtcccagatgcttatgtt

SEQ ID NO: 1417110 - DNA, 25 bp, Homo sapien
tctgagctggcccttttactatcag

SEQ ID NO: 1417111 - DNA, 25 bp, Homo sapien
tactatcagtctctctgtgggtccc

SEQ ID NO: 1417112 - DNA, 25 bp, Homo sapien
gaagttcttccattacagtccagca

SEQ ID NO: 1417113 - DNA, 25 bp, Homo sapien
taaagtaggtgaagaccacatgtcc

SEQ ID NO: 1417114 - DNA, 25 bp, Homo sapien
tctccaaagtgggttcagagccttg

SEQ ID NO: 1417115 - DNA, 25 bp, Homo sapien
cagtcttggaggctgggaacactaa

SEQ ID NO: 1417116 - DNA, 25 bp, Homo sapien
cagtggtattgtggtattgccggcc

SEQ ID NO: 1417117 - DNA, 25 bp, Homo sapien
ggctttctcgagtcatatacatata

SEQ ID NO: 1417118 - DNA, 25 bp, Homo sapien
tcactgtcgccccagttatccttga

SEQ ID NO: 1417119 - DNA, 25 bp, Homo sapien
tcccggtcgagtttgctaattgttc

SEQ ID NO: 1417120 - DNA, 25 bp, Homo sapien
tcccgcacagcggtgcttcacggaa

SEQ ID NO: 1417121 - DNA, 25 bp, Homo sapien
tcacggaattcctgaggcgtactgg

SEQ ID NO: 1417122 - DNA, 25 bp, Homo sapien
gcgtactgggagcaccggcacagcc

SEQ ID NO: 1417123 - DNA, 25 bp, Homo sapien
agcggtgcttcacggaattcctgag

SEQ ID NO: 1417124 - DNA, 25 bp, Homo sapien
tatgttgagccctgtatataatcac

SEQ ID NO: 1417125 - DNA, 25 bp, Homo sapien
tgtgggttatctctcagcttgctaa

SEQ ID NO: 1417126 - DNA, 25 bp, Homo sapien
tatccttaccactaagaaagcagtt

SEQ ID NO: 1417127 - DNA, 25 bp, Homo sapien
tctggcctgaaggagtactagattc

SEQ ID NO: 1417128 - DNA, 25 bp, Homo sapien
ttatttctggctgcggatcacacac

SEQ ID NO: 1417129 - DNA, 25 bp, Homo sapien
tgccatctgggactgtgtgtgcttc

SEQ ID NO: 1417130 - DNA, 25 bp, Homo sapien
gacagaggagattgttaccagaaag

SEQ ID NO: 1417131 - DNA, 25 bp, Homo sapien
tgtgtgcttccagacagatggctga

SEQ ID NO: 1417132 - DNA, 25 bp, Homo sapien
tgtcctttgatgagagttcacctac

SEQ ID NO: 1417133 - DNA, 25 bp, Homo sapien
catcaaggaccatgtgatttctgtg

SEQ ID NO: 1417134 - DNA, 25 bp, Homo sapien
gtcagtggccctaatatgcttagct

SEQ ID NO: 1417135 - DNA, 25 bp, Homo sapien
tatgcttagctaggcctggcatcaa

SEQ ID NO: 1417136 - DNA, 25 bp, Homo sapien
caaagcctgccacgtttcaaagcag

SEQ ID NO: 1417137 - DNA, 25 bp, Homo sapien
gctgcaggtatagagcaattcacac

SEQ ID NO: 1417138 - DNA, 25 bp, Homo sapien
cagtcactctgatagggaaatagat

SEQ ID NO: 1417139 - DNA, 25 bp, Homo sapien
aatgccctggtgttctcttggagga

SEQ ID NO: 1417140 - DNA, 25 bp, Homo sapien
gaagcttgggtgagaacaggtttct

SEQ ID NO: 1417141 - DNA, 25 bp, Homo sapien
tggcttgcatcactggctctgaagg

SEQ ID NO: 1417142 - DNA, 25 bp, Homo sapien
ccaaggtggatgatgtcgaggtctc

SEQ ID NO: 1417143 - DNA, 25 bp, Homo sapien
gcaatcatcacgagagcagaactgg

SEQ ID NO: 1417144 - DNA, 25 bp, Homo sapien
tctttcagcttataaggacagccgg

SEQ ID NO: 1417145 - DNA, 25 bp, Homo sapien
tccacagggtctacactcagatcat

SEQ ID NO: 1417146 - DNA, 25 bp, Homo sapien
cacatagggtgtctctagagtcctg

SEQ ID NO: 1417147 - DNA, 25 bp, Homo sapien
tgatcttggtggaactccacagggt

SEQ ID NO: 1417148 - DNA, 25 bp, Homo sapien
tgtgaggctgggatatcaggatcat

SEQ ID NO: 1417149 - DNA, 25 bp, Homo sapien
ggctgcattctgttaccacttcgcc

SEQ ID NO: 1417150 - DNA, 25 bp, Homo sapien
gctctgcctgaagcccggtgtgagg

SEQ ID NO: 1417151 - DNA, 25 bp, Homo sapien
tgcattctgttaccacttcgccggg

SEQ ID NO: 1417152 - DNA, 25 bp, Homo sapien
gtatggatgaagtccatacttcaag

SEQ ID NO: 1417153 - DNA, 25 bp, Homo sapien
agtatggatgaagtccatacttcaa

SEQ ID NO: 1417154 - DNA, 25 bp, Homo sapien
ctctcccaaagtcaacccatcagcc

SEQ ID NO: 1417155 - DNA, 25 bp, Homo sapien
gcctctcccaaagtcaacccatcag

SEQ ID NO: 1417156 - DNA, 25 bp, Homo sapien
ctcccaaagtcaacccatcagccat

SEQ ID NO: 1417157 - DNA, 25 bp, Homo sapien
tgcgcctctcccaaagtcaacccat

SEQ ID NO: 1417158 - DNA, 25 bp, Homo sapien
atccaaatgtgattctaagggtttt

SEQ ID NO: 1417159 - DNA, 25 bp, Homo sapien
tccaaatgtgattctaagggttttg

SEQ ID NO: 1417160 - DNA, 25 bp, Homo sapien
ttgtttttggcctgcttatcccctg

SEQ ID NO: 1417161 - DNA, 25 bp, Homo sapien
gagcttaggatgtaagaccattcca

SEQ ID NO: 1417162 - DNA, 25 bp, Homo sapien
agactggctttctgagcttaggatg

SEQ ID NO: 1417163 - DNA, 25 bp, Homo sapien
cctgcttatcccctgctttgatgtt

SEQ ID NO: 1417164 - DNA, 25 bp, Homo sapien
cagacgagatcaggcaccttcagag

SEQ ID NO: 1417165 - DNA, 25 bp, Homo sapien
atcagacgagatcaggcaccttcag

SEQ ID NO: 1417166 - DNA, 25 bp, Homo sapien
acgagatcaggcaccttcagagtgg

SEQ ID NO: 1417167 - DNA, 25 bp, Homo sapien
gacgagatcaggcaccttcagagtg

SEQ ID NO: 1417168 - DNA, 25 bp, Homo sapien
aggtagagaggtggtatgttgctgc

SEQ ID NO: 1417169 - DNA, 25 bp, Homo sapien
tgctggaactcgagacaggtagaga

SEQ ID NO: 1417170 - DNA, 25 bp, Homo sapien
gctgctggaactcgagacaggtaga

SEQ ID NO: 1417171 - DNA, 25 bp, Homo sapien
tggtatgttgctgccaacatgatgt

SEQ ID NO: 1417172 - DNA, 25 bp, Homo sapien
caccttactagtaaggtaaggcaga

SEQ ID NO: 1417173 - DNA, 25 bp, Homo sapien
catccagaacagtcaccataatagt

SEQ ID NO: 1417174 - DNA, 25 bp, Homo sapien
cagaacagtcaccataatagtccat

SEQ ID NO: 1417175 - DNA, 25 bp, Homo sapien
ccagaacagtcaccataatagtcca

SEQ ID NO: 1417176 - DNA, 25 bp, Homo sapien
tccagaacagtcaccataatagtcc

SEQ ID NO: 1417177 - DNA, 25 bp, Homo sapien
gctttagaatagtgggctgtctcct

SEQ ID NO: 1417178 - DNA, 25 bp, Homo sapien
cagcaatccaacaataaatgatttg

SEQ ID NO: 1417179 - DNA, 25 bp, Homo sapien
atgatttgctttagaatagtgggct

SEQ ID NO: 1417180 - DNA, 25 bp, Homo sapien
tttgctttagaatagtgggctgtct

SEQ ID NO: 1417181 - DNA, 25 bp, Homo sapien
tcgttgtgtttctgactgatagagt

SEQ ID NO: 1417182 - DNA, 25 bp, Homo sapien
taaatctgttattctgtaaaccact

SEQ ID NO: 1417183 - DNA, 25 bp, Homo sapien
aaccactttctgagggattttctgt

SEQ ID NO: 1417184 - DNA, 25 bp, Homo sapien
ttgctggcaattgaattcgttgtgt

SEQ ID NO: 1417185 - DNA, 25 bp, Homo sapien
gaatatccgttttcccagatgcccc

SEQ ID NO: 1417186 - DNA, 25 bp, Homo sapien
gatgccccagcaagtgaatttacag

SEQ ID NO: 1417187 - DNA, 25 bp, Homo sapien
ctgcaaggtatcctgcaaggctgct

SEQ ID NO: 1417188 - DNA, 25 bp, Homo sapien
caaatggctgatgtaggcttcctgc

SEQ ID NO: 1417189 - DNA, 25 bp, Homo sapien
tcttgacttagggtaatagacacta

SEQ ID NO: 1417190 - DNA, 25 bp, Homo sapien
tagacactaattgggtggcagcctt

SEQ ID NO: 1417191 - DNA, 25 bp, Homo sapien
gacttattgtcaagaattcctgcag

SEQ ID NO: 1417192 - DNA, 25 bp, Homo sapien
tccataagctgctacatggtttggg

SEQ ID NO: 1417193 - DNA, 25 bp, Homo sapien
ctaacatgcgtcttcagtgtgatgg

SEQ ID NO: 1417194 - DNA, 25 bp, Homo sapien
gtgatgggggcctcgtggatggcaa

SEQ ID NO: 1417195 - DNA, 25 bp, Homo sapien
tggatggcaaatacagatatcacta

SEQ ID NO: 1417196 - DNA, 25 bp, Homo sapien
taacatgcgtcttcagtgtgatggg

SEQ ID NO: 1417197 - DNA, 25 bp, Homo sapien
agcgccttcctctgtgtatggcagg

SEQ ID NO: 1417198 - DNA, 25 bp, Homo sapien
gatttcttatcctagcgccttcctc

SEQ ID NO: 1417199 - DNA, 25 bp, Homo sapien
ctggtctgcgtggatttcttatcct

SEQ ID NO: 1417200 - DNA, 25 bp, Homo sapien
cagggcgtaggtatacaatctacac

SEQ ID NO: 1417201 - DNA, 25 bp, Homo sapien
tagcaaaaagagtttatctacctgg

SEQ ID NO: 1417202 - DNA, 25 bp, Homo sapien
aaagagtttatctacctggttctct

SEQ ID NO: 1417203 - DNA, 25 bp, Homo sapien
ggtcttagcaaaaagagtttatcta

SEQ ID NO: 1417204 - DNA, 25 bp, Homo sapien
ctacctggttctctttgggaatggg

SEQ ID NO: 1417205 - DNA, 25 bp, Homo sapien
gagctgccctatctcctcagaaact

SEQ ID NO: 1417206 - DNA, 25 bp, Homo sapien
cctctccctcgtttgagctgcccta

SEQ ID NO: 1417207 - DNA, 25 bp, Homo sapien
ctttggaggtatttgacccactgcc

SEQ ID NO: 1417208 - DNA, 25 bp, Homo sapien
ggaggtatttgacccactgcccaca

SEQ ID NO: 1417209 - DNA, 25 bp, Homo sapien
tctgctttccatgggaacaagaaat

SEQ ID NO: 1417210 - DNA, 25 bp, Homo sapien
ctaaaagtctctaggtctctgcttt

SEQ ID NO: 1417211 - DNA, 25 bp, Homo sapien
ctttccatgggaacaagaaatcctt

SEQ ID NO: 1417212 - DNA, 25 bp, Homo sapien
taaaagtctctaggtctctgctttc

SEQ ID NO: 1417213 - DNA, 25 bp, Homo sapien
caccgaggcctaactcttagaggaa

SEQ ID NO: 1417214 - DNA, 25 bp, Homo sapien
gatgtgcaagtcgtttctgagaaag

SEQ ID NO: 1417215 - DNA, 25 bp, Homo sapien
ctttctaagatgtgcaagtcgtttc

SEQ ID NO: 1417216 - DNA, 25 bp, Homo sapien
taataattgacagaagccaccgagg

SEQ ID NO: 1417217 - DNA, 25 bp, Homo sapien
gaggtgaaaggacgtggagatgcat

SEQ ID NO: 1417218 - DNA, 25 bp, Homo sapien
gtgaggtgaaaggacgtggagatgc

SEQ ID NO: 1417219 - DNA, 25 bp, Homo sapien
tgaggtgaaaggacgtggagatgca

SEQ ID NO: 1417220 - DNA, 25 bp, Homo sapien
cacatgcagcgttcttaatgtaatg

SEQ ID NO: 1417221 - DNA, 25 bp, Homo sapien
taataaacctcataaaagacactat

SEQ ID NO: 1417222 - DNA, 25 bp, Homo sapien
aagacactattaaacacatgcagcg

SEQ ID NO: 1417223 - DNA, 25 bp, Homo sapien
tcacaaaggctgtaaaaatattgtt

SEQ ID NO: 1417224 - DNA, 25 bp, Homo sapien
tccatcagcttgtattaattgaatc

SEQ ID NO: 1417225 - DNA, 25 bp, Homo sapien
taattgaatctgctctgcatcaggg

SEQ ID NO: 1417226 - DNA, 25 bp, Homo sapien
attaattgaatctgctctgcatcag

SEQ ID NO: 1417227 - DNA, 25 bp, Homo sapien
actccatcagcttgtattaattgaa

SEQ ID NO: 1417228 - DNA, 25 bp, Homo sapien
acattcctggaattcaagccatcat

SEQ ID NO: 1417229 - DNA, 25 bp, Homo sapien
gccacattcctggaattcaagccat

SEQ ID NO: 1417230 - DNA, 25 bp, Homo sapien
cacattcctggaattcaagccatca

SEQ ID NO: 1417231 - DNA, 25 bp, Homo sapien
tgccacattcctggaattcaagcca

SEQ ID NO: 1417232 - DNA, 25 bp, Homo sapien
ccatccacagagatataaggaagct

SEQ ID NO: 1417233 - DNA, 25 bp, Homo sapien
ttacagagtccctaggccatccaca

SEQ ID NO: 1417234 - DNA, 25 bp, Homo sapien
ggaagctcggcaaagatctgttgag

SEQ ID NO: 1417235 - DNA, 25 bp, Homo sapien
tataaggaagctcggcaaagatctg

SEQ ID NO: 1417236 - DNA, 25 bp, Homo sapien
tcctgcaagccgtcataggtagcag

SEQ ID NO: 1417237 - DNA, 25 bp, Homo sapien
caagtggtgaaaggctttgactgct

SEQ ID NO: 1417238 - DNA, 25 bp, Homo sapien
tagcagggtgccaagaatcaggatg

SEQ ID NO: 1417239 - DNA, 25 bp, Homo sapien
ttggcccacgggtaagattcaagtg

SEQ ID NO: 1417240 - DNA, 25 bp, Homo sapien
tcttcggcattctgtttcttcgtgg

SEQ ID NO: 1417241 - DNA, 25 bp, Homo sapien
gtttcttcgtggtagcctccaggaa

SEQ ID NO: 1417242 - DNA, 25 bp, Homo sapien
ccctgccatcttcggcattctgttt

SEQ ID NO: 1417243 - DNA, 25 bp, Homo sapien
tccaggaacctgagagaccttatgt

SEQ ID NO: 1417244 - DNA, 25 bp, Homo sapien
aatactagcccagaccctttgagga

SEQ ID NO: 1417245 - DNA, 25 bp, Homo sapien
aaagtcactccaaatactagcccag

SEQ ID NO: 1417246 - DNA, 25 bp, Homo sapien
ctataactgagattgggaaaaattg

SEQ ID NO: 1417247 - DNA, 25 bp, Homo sapien
aaattgatttccgtgtaccttatga

SEQ ID NO: 1417248 - DNA, 25 bp, Homo sapien
taaagggtataattgcatggcacag

SEQ ID NO: 1417249 - DNA, 25 bp, Homo sapien
tttcctcgtcgtcagtaaactgttg

SEQ ID NO: 1417250 - DNA, 25 bp, Homo sapien
taaactgttggcaggatactgcacc

SEQ ID NO: 1417251 - DNA, 25 bp, Homo sapien
tttgagaatccggtttggaagctgg

SEQ ID NO: 1417252 - DNA, 25 bp, Homo sapien
gaaacttgagggctgaaccctggac

SEQ ID NO: 1417253 - DNA, 25 bp, Homo sapien
ccttatggtgggctggtaaaactga

SEQ ID NO: 1417254 - DNA, 25 bp, Homo sapien
ttttcacttgtgagagaggcccaac

SEQ ID NO: 1417255 - DNA, 25 bp, Homo sapien
ggacctgtgaaaacatcccatcaag

SEQ ID NO: 1417256 - DNA, 25 bp, Homo sapien
aagtcagctctgactagaatagtca

SEQ ID NO: 1417257 - DNA, 25 bp, Homo sapien
tgcctttccagtacctaagtcagct

SEQ ID NO: 1417258 - DNA, 25 bp, Homo sapien
gtacctaagtcagctctgactagaa

SEQ ID NO: 1417259 - DNA, 25 bp, Homo sapien
ccagtacctaagtcagctctgacta

SEQ ID NO: 1417260 - DNA, 25 bp, Homo sapien
tctctgcttgttctatggaagaaca

SEQ ID NO: 1417261 - DNA, 25 bp, Homo sapien
aatactctaatgaagtactgatcaa

SEQ ID NO: 1417262 - DNA, 25 bp, Homo sapien
tactctaatgaagtactgatcaaag

SEQ ID NO: 1417263 - DNA, 25 bp, Homo sapien
gaatactctaatgaagtactgatca

SEQ ID NO: 1417264 - DNA, 25 bp, Homo sapien
gacccaaatgctatctgtcaacttg

SEQ ID NO: 1417265 - DNA, 25 bp, Homo sapien
gtcaacttgtccttccagcgacttt

SEQ ID NO: 1417266 - DNA, 25 bp, Homo sapien
cagcgacttttcaccccatgctctg

SEQ ID NO: 1417267 - DNA, 25 bp, Homo sapien
agcgacccaaatgctatctgtcaac

SEQ ID NO: 1417268 - DNA, 25 bp, Homo sapien
tccaaaagcaactttagtggtatta

SEQ ID NO: 1417269 - DNA, 25 bp, Homo sapien
ctgctgatacaccaagtttggaatg

SEQ ID NO: 1417270 - DNA, 25 bp, Homo sapien
tagtggtattaagtgccagaaatct

SEQ ID NO: 1417271 - DNA, 25 bp, Homo sapien
aatctgggatggctgtgaacaggat

SEQ ID NO: 1417272 - DNA, 25 bp, Homo sapien
tcctttacattgctctctaccccca

SEQ ID NO: 1417273 - DNA, 25 bp, Homo sapien
cttctcctttacattgctctctacc

SEQ ID NO: 1417274 - DNA, 25 bp, Homo sapien
tctcctttacattgctctctacccc

SEQ ID NO: 1417275 - DNA, 25 bp, Homo sapien
cctttacattgctctctacccccat

SEQ ID NO: 1417276 - DNA, 25 bp, Homo sapien
gctgtcaaattgaccggggttgtca

SEQ ID NO: 1417277 - DNA, 25 bp, Homo sapien
agagctgcaactggttctaaggagg

SEQ ID NO: 1417278 - DNA, 25 bp, Homo sapien
tctaaggagggtgtcttattgctgt

SEQ ID NO: 1417279 - DNA, 25 bp, Homo sapien
ttgggtcaacaagagctgcaactgg

SEQ ID NO: 1417280 - DNA, 25 bp, Homo sapien
gatagggtccttgttaactcattaa

SEQ ID NO: 1417281 - DNA, 25 bp, Homo sapien
ggaaagaaatagccgcggtaataca

SEQ ID NO: 1417282 - DNA, 25 bp, Homo sapien
tagccgcggtaatacatgtaatcaa

SEQ ID NO: 1417283 - DNA, 25 bp, Homo sapien
aagatagggtccttgttaactcatt

SEQ ID NO: 1417284 - DNA, 25 bp, Homo sapien
caagggtttacttgatctgctacct

SEQ ID NO: 1417285 - DNA, 25 bp, Homo sapien
aagggtttacttgatctgctacctt

SEQ ID NO: 1417286 - DNA, 25 bp, Homo sapien
tcaagggtttacttgatctgctacc

SEQ ID NO: 1417287 - DNA, 25 bp, Homo sapien
agggtttacttgatctgctaccttt

SEQ ID NO: 1417288 - DNA, 25 bp, Homo sapien
gttaatgaaggatcgtttctcccag

SEQ ID NO: 1417289 - DNA, 25 bp, Homo sapien
tatcaccaaccctgtgtttaagtta

SEQ ID NO: 1417290 - DNA, 25 bp, Homo sapien
tgagctctctaatcaagacttgtgt

SEQ ID NO: 1417291 - DNA, 25 bp, Homo sapien
tattttcatgccaggcagcttgagc

SEQ ID NO: 1417292 - DNA, 25 bp, Homo sapien
ccatatattcaaccgctactccaga

SEQ ID NO: 1417293 - DNA, 25 bp, Homo sapien
tggcttggtttcgtcttccatatat

SEQ ID NO: 1417294 - DNA, 25 bp, Homo sapien
ctccagagttttgggccaaactttg

SEQ ID NO: 1417295 - DNA, 25 bp, Homo sapien
cgctactccagagttttgggccaaa

SEQ ID NO: 1417296 - DNA, 25 bp, Homo sapien
caaacacagaaatcttgatgaaaca

SEQ ID NO: 1417297 - DNA, 25 bp, Homo sapien
gaaagtccagacaattgcaagtgac

SEQ ID NO: 1417298 - DNA, 25 bp, Homo sapien
gacaattgcaagtgacgtcactgct

SEQ ID NO: 1417299 - DNA, 25 bp, Homo sapien
agtgacgtcactgctttgcagctgt

SEQ ID NO: 1417300 - DNA, 25 bp, Homo sapien
tttttgtaaaatgcaggttggctca

SEQ ID NO: 1417301 - DNA, 25 bp, Homo sapien
aatgcaggttggctcaggtatattg

SEQ ID NO: 1417302 - DNA, 25 bp, Homo sapien
caggttggctcaggtatattgcatg

SEQ ID NO: 1417303 - DNA, 25 bp, Homo sapien
tgtaaaatgcaggttggctcaggta

SEQ ID NO: 1417304 - DNA, 25 bp, Homo sapien
agctgcgtggactttgtgtcctata

SEQ ID NO: 1417305 - DNA, 25 bp, Homo sapien
tcttcatagacagccacagcaacca

SEQ ID NO: 1417306 - DNA, 25 bp, Homo sapien
cttggacctagaagctggcagtagt

SEQ ID NO: 1417307 - DNA, 25 bp, Homo sapien
ctggcagtagttcatcagttttctg

SEQ ID NO: 1417308 - DNA, 25 bp, Homo sapien
tgccaaaggcagagtgaccatctct

SEQ ID NO: 1417309 - DNA, 25 bp, Homo sapien
gatggatgacatgacacgcagtcag

SEQ ID NO: 1417310 - DNA, 25 bp, Homo sapien
aaatgaagctggtatcgtgctgcca

SEQ ID NO: 1417311 - DNA, 25 bp, Homo sapien
tgctggtacctgctctgtaaatgaa

SEQ ID NO: 1417312 - DNA, 25 bp, Homo sapien
tgtgcttagagttcttccgggatga

SEQ ID NO: 1417313 - DNA, 25 bp, Homo sapien
gaccaccttgtccaggactactttg

SEQ ID NO: 1417314 - DNA, 25 bp, Homo sapien
tggcctgttcggctctcagagacac

SEQ ID NO: 1417315 - DNA, 25 bp, Homo sapien
gatcatctcagctaggaccaccttg

SEQ ID NO: 1417316 - DNA, 25 bp, Homo sapien
taactacagcctctcttttgaatgc

SEQ ID NO: 1417317 - DNA, 25 bp, Homo sapien
tgaatgcaagtccagttaagactgc

SEQ ID NO: 1417318 - DNA, 25 bp, Homo sapien
tctgtgacctagctggaaactttaa

SEQ ID NO: 1417319 - DNA, 25 bp, Homo sapien
taaagtagtcggtaatggcatagag

SEQ ID NO: 1417320 - DNA, 25 bp, Homo sapien
ctcctcccgctgtgttgctggggtt

SEQ ID NO: 1417321 - DNA, 25 bp, Homo sapien
tccactggcaacaggctcccttttg

SEQ ID NO: 1417322 - DNA, 25 bp, Homo sapien
gccccatgacaaattgtgctgaagg

SEQ ID NO: 1417323 - DNA, 25 bp, Homo sapien
catcataaggatcaggccagctcct

SEQ ID NO: 1417324 - DNA, 25 bp, Homo sapien
tgacaacgccaaatccatcataagg

SEQ ID NO: 1417325 - DNA, 25 bp, Homo sapien
tgacgattgcaactccaccaaggat

SEQ ID NO: 1417326 - DNA, 25 bp, Homo sapien
tttccaggtcccatcaacttgacga

SEQ ID NO: 1417327 - DNA, 25 bp, Homo sapien
caattgcaagttgtgactttccagg

SEQ ID NO: 1417328 - DNA, 25 bp, Homo sapien
gagaaagggcaaggcatgagcaatt

SEQ ID NO: 1417329 - DNA, 25 bp, Homo sapien
aggcatggaggtgcaatcgtttcat

SEQ ID NO: 1417330 - DNA, 25 bp, Homo sapien
ggaggtgcaatcgtttcataatccc

SEQ ID NO: 1417331 - DNA, 25 bp, Homo sapien
ggtgcaatcgtttcataatccctgc

SEQ ID NO: 1417332 - DNA, 25 bp, Homo sapien
caatcgtttcataatccctgctgtc

SEQ ID NO: 1417333 - DNA, 25 bp, Homo sapien
tgcctgtaaattgggctctgtgttt

SEQ ID NO: 1417334 - DNA, 25 bp, Homo sapien
aactttgcctgtaaattgggctctg

SEQ ID NO: 1417335 - DNA, 25 bp, Homo sapien
tttgcctgtaaattgggctctgtgt

SEQ ID NO: 1417336 - DNA, 25 bp, Homo sapien
ctttgcctgtaaattgggctctgtg

SEQ ID NO: 1417337 - DNA, 25 bp, Homo sapien
tagtgaataagtacacgtcttggta

SEQ ID NO: 1417338 - DNA, 25 bp, Homo sapien
tacacgtcttggtacaatctcctgt

SEQ ID NO: 1417339 - DNA, 25 bp, Homo sapien
cctcaggcaagtagtgaataagtac

SEQ ID NO: 1417340 - DNA, 25 bp, Homo sapien
gcaagtagtgaataagtacacgtct

SEQ ID NO: 1417341 - DNA, 25 bp, Homo sapien
gattgcacgcttctttatattgtgg

SEQ ID NO: 1417342 - DNA, 25 bp, Homo sapien
tctctgcaagattgcacgcttcttt

SEQ ID NO: 1417343 - DNA, 25 bp, Homo sapien
caagattgcacgcttctttatattg

SEQ ID NO: 1417344 - DNA, 25 bp, Homo sapien
ctcctctctgcaagattgcacgctt

SEQ ID NO: 1417345 - DNA, 25 bp, Homo sapien
gtgttcatgactgaacacatgcttt

SEQ ID NO: 1417346 - DNA, 25 bp, Homo sapien
gtgctgtgttcatgactgaacacat

SEQ ID NO: 1417347 - DNA, 25 bp, Homo sapien
tgttcatgactgaacacatgctttg

SEQ ID NO: 1417348 - DNA, 25 bp, Homo sapien
ggtgctgtgttcatgactgaacaca

SEQ ID NO: 1417349 - DNA, 25 bp, Homo sapien
ttcctgcagtccacttcagcctgag

SEQ ID NO: 1417350 - DNA, 25 bp, Homo sapien
gcaaagtagccatctttggctttag

SEQ ID NO: 1417351 - DNA, 25 bp, Homo sapien
cctccatagttgatcaaggcctttc

SEQ ID NO: 1417352 - DNA, 25 bp, Homo sapien
gaaaaataagaatccaactacattc

SEQ ID NO: 1417353 - DNA, 25 bp, Homo sapien
cctggagactgatgttatcaaactg

SEQ ID NO: 1417354 - DNA, 25 bp, Homo sapien
tttcctgaaccttgctacacattgt

SEQ ID NO: 1417355 - DNA, 25 bp, Homo sapien
tatcaaactgcttaatctcactctc

SEQ ID NO: 1417356 - DNA, 25 bp, Homo sapien
acattgttccggaagagagacagtc

SEQ ID NO: 1417357 - DNA, 25 bp, Homo sapien
ttcaaagttctctgtcccaatgtta

SEQ ID NO: 1417358 - DNA, 25 bp, Homo sapien
agctggtacttgttgctcacaggat

SEQ ID NO: 1417359 - DNA, 25 bp, Homo sapien
cagaaagagtgtcctccgcggtagc

SEQ ID NO: 1417360 - DNA, 25 bp, Homo sapien
ggatgcactgcaagttcaaagttct

SEQ ID NO: 1417361 - DNA, 25 bp, Homo sapien
gatccttcagcggtttcagacacct

SEQ ID NO: 1417362 - DNA, 25 bp, Homo sapien
cagcggtttcagacacctcttctct

SEQ ID NO: 1417363 - DNA, 25 bp, Homo sapien
ttccagatccttcagcggtttcaga

SEQ ID NO: 1417364 - DNA, 25 bp, Homo sapien
ctgcttccagatccttcagcggttt

SEQ ID NO: 1417365 - DNA, 25 bp, Homo sapien
tagttcctagtacatgcccacatcc

SEQ ID NO: 1417366 - DNA, 25 bp, Homo sapien
tttgccacgggcagttcaaggacaa

SEQ ID NO: 1417367 - DNA, 25 bp, Homo sapien
cattggacattgcttgggcgttagg

SEQ ID NO: 1417368 - DNA, 25 bp, Homo sapien
gacaaagcagatttagttcctagta

SEQ ID NO: 1417369 - DNA, 25 bp, Homo sapien
ccaggttcttagtgccttcattcat

SEQ ID NO: 1417370 - DNA, 25 bp, Homo sapien
tctgccaggttcttagtgccttcat

SEQ ID NO: 1417371 - DNA, 25 bp, Homo sapien
tgccaggttcttagtgccttcattc

SEQ ID NO: 1417372 - DNA, 25 bp, Homo sapien
ttctgccaggttcttagtgccttca

SEQ ID NO: 1417373 - DNA, 25 bp, Homo sapien
tcctataaaggcaaagctccggcta

SEQ ID NO: 1417374 - DNA, 25 bp, Homo sapien
taataaaccagtaccccagtcatgt

SEQ ID NO: 1417375 - DNA, 25 bp, Homo sapien
gaaatgcataccaggcatgcggtgc

SEQ ID NO: 1417376 - DNA, 25 bp, Homo sapien
tgccagcatgcataaaggacacttc

SEQ ID NO: 1417377 - DNA, 25 bp, Homo sapien
taagggtgtgatacggaaagctgca

SEQ ID NO: 1417378 - DNA, 25 bp, Homo sapien
tgttcttcagtcagcggatggccac

SEQ ID NO: 1417379 - DNA, 25 bp, Homo sapien
tatgtaagtaagacaaaaggtgcgt

SEQ ID NO: 1417380 - DNA, 25 bp, Homo sapien
caaatgttgcctgcttgtacaaagc

SEQ ID NO: 1417381 - DNA, 25 bp, Homo sapien
tgttgtctgttatgtttgacactca

SEQ ID NO: 1417382 - DNA, 25 bp, Homo sapien
cagtcaagcaaacaggaagtgggag

SEQ ID NO: 1417383 - DNA, 25 bp, Homo sapien
tcccagtcaagcaaacaggaagtgg

SEQ ID NO: 1417384 - DNA, 25 bp, Homo sapien
gttctcccagtcaagcaaacaggaa

SEQ ID NO: 1417385 - DNA, 25 bp, Homo sapien
tctcccagtcaagcaaacaggaagt

SEQ ID NO: 1417386 - DNA, 25 bp, Homo sapien
tctgattgaagtccaccgctggact

SEQ ID NO: 1417387 - DNA, 25 bp, Homo sapien
ctcctgctgcacctccagttcccag

SEQ ID NO: 1417388 - DNA, 25 bp, Homo sapien
gagcacggctccgtgatgaccgcag

SEQ ID NO: 1417389 - DNA, 25 bp, Homo sapien
tggactcagctgagcacggctccgt

SEQ ID NO: 1417390 - DNA, 25 bp, Homo sapien
caccttgccttgctatggcccatat

SEQ ID NO: 1417391 - DNA, 25 bp, Homo sapien
tctccaccttgccttgctatggccc

SEQ ID NO: 1417392 - DNA, 25 bp, Homo sapien
ttgccttgctatggcccatatttta

SEQ ID NO: 1417393 - DNA, 25 bp, Homo sapien
ttgctatggcccatattttaaggag

SEQ ID NO: 1417394 - DNA, 25 bp, Homo sapien
tttctacattgtgtaacctcagctc

SEQ ID NO: 1417395 - DNA, 25 bp, Homo sapien
ttctacattgtgtaacctcagctcc

SEQ ID NO: 1417396 - DNA, 25 bp, Homo sapien
tggcacaaatgtacttgcgaagagt

SEQ ID NO: 1417397 - DNA, 25 bp, Homo sapien
gaccgttggcacaaatgtacttgcg

SEQ ID NO: 1417398 - DNA, 25 bp, Homo sapien
tgtacttgcgaagagttgtaggcat

SEQ ID NO: 1417399 - DNA, 25 bp, Homo sapien
aattttcacaaggaccgttggcaca

SEQ ID NO: 1417400 - DNA, 25 bp, Homo sapien
ttatcacatacttggtcccgtatgg

SEQ ID NO: 1417401 - DNA, 25 bp, Homo sapien
tcacatacttggtcccgtatggata

SEQ ID NO: 1417402 - DNA, 25 bp, Homo sapien
ttcttcttatcacatacttggtccc

SEQ ID NO: 1417403 - DNA, 25 bp, Homo sapien
ttcttatcacatacttggtcccgta

SEQ ID NO: 1417404 - DNA, 25 bp, Homo sapien
catcaacaaggcagtgtttgagaat

SEQ ID NO: 1417405 - DNA, 25 bp, Homo sapien
tcaacaaggcagtgtttgagaatgg

SEQ ID NO: 1417406 - DNA, 25 bp, Homo sapien
cacatcaacaaggcagtgtttgaga

SEQ ID NO: 1417407 - DNA, 25 bp, Homo sapien
caacaaggcagtgtttgagaatggg

SEQ ID NO: 1417408 - DNA, 25 bp, Homo sapien
tcaagaacagaggagacatctgcac

SEQ ID NO: 1417409 - DNA, 25 bp, Homo sapien
actgtttcagccctaggatatggtc

SEQ ID NO: 1417410 - DNA, 25 bp, Homo sapien
cctgtctcaagaacagaggagacat

SEQ ID NO: 1417411 - DNA, 25 bp, Homo sapien
taggatatggtcctccacttctttg

SEQ ID NO: 1417412 - DNA, 25 bp, Homo sapien
gatttggctttcaggaggtgtacac

SEQ ID NO: 1417413 - DNA, 25 bp, Homo sapien
tgtcaggtacctttacgctaacggc

SEQ ID NO: 1417414 - DNA, 25 bp, Homo sapien
tttgctgtacagatgcctgggctca

SEQ ID NO: 1417415 - DNA, 25 bp, Homo sapien
ggctcagtaaacacaaagtctgggc

SEQ ID NO: 1417416 - DNA, 25 bp, Homo sapien
cagagtaaaatggccgctggttctg

SEQ ID NO: 1417417 - DNA, 25 bp, Homo sapien
tcaaagtgagtgtgatctgaaccca

SEQ ID NO: 1417418 - DNA, 25 bp, Homo sapien
gtgagtgtgatctgaacccagcagg

SEQ ID NO: 1417419 - DNA, 25 bp, Homo sapien
tttcaaagtgagtgtgatctgaacc

SEQ ID NO: 1417420 - DNA, 25 bp, Homo sapien
tgtgaattatagaggccaggactgg

SEQ ID NO: 1417421 - DNA, 25 bp, Homo sapien
aagaaaacggagacagaaacatcct

SEQ ID NO: 1417422 - DNA, 25 bp, Homo sapien
ttcatccagtaatggctttgaaaag

SEQ ID NO: 1417423 - DNA, 25 bp, Homo sapien
ctacttgaagctaactgtggctttt

SEQ ID NO: 1417424 - DNA, 25 bp, Homo sapien
cttgaagctaactgtggcttttgaa

SEQ ID NO: 1417425 - DNA, 25 bp, Homo sapien
tacttgaagctaactgtggcttttg

SEQ ID NO: 1417426 - DNA, 25 bp, Homo sapien
acttgaagctaactgtggcttttga

SEQ ID NO: 1417427 - DNA, 25 bp, Homo sapien
tgcacacttgatttgcctcattctg

SEQ ID NO: 1417428 - DNA, 25 bp, Homo sapien
cacttgatttgcctcattctgtgga

SEQ ID NO: 1417429 - DNA, 25 bp, Homo sapien
aatttatgcacacttgatttgcctc

SEQ ID NO: 1417430 - DNA, 25 bp, Homo sapien
tgatttgcctcattctgtggatgaa

SEQ ID NO: 1417431 - DNA, 25 bp, Homo sapien
ctttttaccatcgaatgtgtgtatg

SEQ ID NO: 1417432 - DNA, 25 bp, Homo sapien
tgtgtatggcttttagacgtctttc

SEQ ID NO: 1417433 - DNA, 25 bp, Homo sapien
tatggcttttagacgtctttcacag

SEQ ID NO: 1417434 - DNA, 25 bp, Homo sapien
catcgaatgtgtgtatggcttttag

SEQ ID NO: 1417435 - DNA, 25 bp, Homo sapien
ccagatgttgccaaacgtgaattga

SEQ ID NO: 1417436 - DNA, 25 bp, Homo sapien
tgttgccaaacgtgaattgactcat

SEQ ID NO: 1417437 - DNA, 25 bp, Homo sapien
caatgtgatgagacataaccagatg

SEQ ID NO: 1417438 - DNA, 25 bp, Homo sapien
aatttgcaatgtgatgagacataac

SEQ ID NO: 1417439 - DNA, 25 bp, Homo sapien
gcatccaggcaatctcttttacttt

SEQ ID NO: 1417440 - DNA, 25 bp, Homo sapien
gaaaatgacttttgtgaagtacatt

SEQ ID NO: 1417441 - DNA, 25 bp, Homo sapien
acagggcatccaggcaatctctttt

SEQ ID NO: 1417442 - DNA, 25 bp, Homo sapien
gggcatccaggcaatctcttttact

SEQ ID NO: 1417443 - DNA, 25 bp, Homo sapien
taaccccgatgatctgaggaagact

SEQ ID NO: 1417444 - DNA, 25 bp, Homo sapien
aaccccgatgatctgaggaagactc

SEQ ID NO: 1417445 - DNA, 25 bp, Homo sapien
ttaaccccgatgatctgaggaagac

SEQ ID NO: 1417446 - DNA, 25 bp, Homo sapien
tctgcaatccctgcatcacactggt

SEQ ID NO: 1417447 - DNA, 25 bp, Homo sapien
cccatgatttccttagcaggtgttg

SEQ ID NO: 1417448 - DNA, 25 bp, Homo sapien
ggttcatacacaaccttcccatgat

SEQ ID NO: 1417449 - DNA, 25 bp, Homo sapien
tgaaattcttacgaaagcacactgg

SEQ ID NO: 1417450 - DNA, 25 bp, Homo sapien
ttcaccctggctcgtgggagactcc

SEQ ID NO: 1417451 - DNA, 25 bp, Homo sapien
aacactagccattctgcgctgttca

SEQ ID NO: 1417452 - DNA, 25 bp, Homo sapien
gactccattgccgtatccagggcct

SEQ ID NO: 1417453 - DNA, 25 bp, Homo sapien
tacaagctccagaacaacactagcc

SEQ ID NO: 1417454 - DNA, 25 bp, Homo sapien
tctctaaatgcagctccacatccat

SEQ ID NO: 1417455 - DNA, 25 bp, Homo sapien
catgtatcatatgaagagggaaata

SEQ ID NO: 1417456 - DNA, 25 bp, Homo sapien
gagtaataatttataccgcagagta

SEQ ID NO: 1417457 - DNA, 25 bp, Homo sapien
tctcgaccctcccaatgctgaaagg

SEQ ID NO: 1417458 - DNA, 25 bp, Homo sapien
cgcagagtaatttcagaccgagagt

SEQ ID NO: 1417459 - DNA, 25 bp, Homo sapien
tcttcatgcttgtgtaaccgtccag

SEQ ID NO: 1417460 - DNA, 25 bp, Homo sapien
cattaggcccagttttcatccctgt

SEQ ID NO: 1417461 - DNA, 25 bp, Homo sapien
cagaaagagcgtgaccatgtaggat

SEQ ID NO: 1417462 - DNA, 25 bp, Homo sapien
tcatccctgttaaattgcaggccgc

SEQ ID NO: 1417463 - DNA, 25 bp, Homo sapien
ttagttttctgctgatcttcagcat

SEQ ID NO: 1417464 - DNA, 25 bp, Homo sapien
atttagttttctgctgatcttcagc

SEQ ID NO: 1417465 - DNA, 25 bp, Homo sapien
ccttgatttagttttctgctgatct

SEQ ID NO: 1417466 - DNA, 25 bp, Homo sapien
tgatttagttttctgctgatcttca

SEQ ID NO: 1417467 - DNA, 25 bp, Homo sapien
tctttgagccaatcactcaaagcct

SEQ ID NO: 1417468 - DNA, 25 bp, Homo sapien
taagacctgtcccaataattgctta

SEQ ID NO: 1417469 - DNA, 25 bp, Homo sapien
ttgctttcatcagctaattgcacag

SEQ ID NO: 1417470 - DNA, 25 bp, Homo sapien
gacctgtcccaataattgcttatgt

SEQ ID NO: 1417471 - DNA, 25 bp, Homo sapien
tccattagaactaagggcaggtgca

SEQ ID NO: 1417472 - DNA, 25 bp, Homo sapien
ttgggtaaatatcaagtaaacagac

SEQ ID NO: 1417473 - DNA, 25 bp, Homo sapien
cttgttgatggcagacttgggtaaa

SEQ ID NO: 1417474 - DNA, 25 bp, Homo sapien
tcttcctcttgccaagtgagatgcc

SEQ ID NO: 1417475 - DNA, 25 bp, Homo sapien
gccaagtgagatgccgatgtgtttt

SEQ ID NO: 1417476 - DNA, 25 bp, Homo sapien
tggatctggttctggagcaatccat

SEQ ID NO: 1417477 - DNA, 25 bp, Homo sapien
tcacaaaactttgccctggatctgg

SEQ ID NO: 1417478 - DNA, 25 bp, Homo sapien
aaaactttgccctggatctggttct

SEQ ID NO: 1417479 - DNA, 25 bp, Homo sapien
ggatctggttctggagcaatccatc

SEQ ID NO: 1417480 - DNA, 25 bp, Homo sapien
ggacctgcctttgtgagcggaagaa

SEQ ID NO: 1417481 - DNA, 25 bp, Homo sapien
gaatcaggcatgagatacaatgtct

SEQ ID NO: 1417482 - DNA, 25 bp, Homo sapien
tccccttggcctgttgaatattgag

SEQ ID NO: 1417483 - DNA, 25 bp, Homo sapien
catcttttgtagtagtccccttggc

SEQ ID NO: 1417484 - DNA, 25 bp, Homo sapien
cactcggtaatactgattaggataa

SEQ ID NO: 1417485 - DNA, 25 bp, Homo sapien
gctcactcggtaatactgattagga

SEQ ID NO: 1417486 - DNA, 25 bp, Homo sapien
cggtaatactgattaggataatggg

SEQ ID NO: 1417487 - DNA, 25 bp, Homo sapien
cctgctcactcggtaatactgatta

SEQ ID NO: 1417488 - DNA, 25 bp, Homo sapien
ccaaggttgaggcaataatatctgc

SEQ ID NO: 1417489 - DNA, 25 bp, Homo sapien
ctctgaagacagaacccaaggttga

SEQ ID NO: 1417490 - DNA, 25 bp, Homo sapien
gacagaacccaaggttgaggcaata

SEQ ID NO: 1417491 - DNA, 25 bp, Homo sapien
cccaaggttgaggcaataatatctg

SEQ ID NO: 1417492 - DNA, 25 bp, Homo sapien
aactactcttcgtccgctgccctca

SEQ ID NO: 1417493 - DNA, 25 bp, Homo sapien
ctcctactctccctggatgttaaat

SEQ ID NO: 1417494 - DNA, 25 bp, Homo sapien
tctccctggatgttaaatgtaagtt

SEQ ID NO: 1417495 - DNA, 25 bp, Homo sapien
tcgtccgctgccctcaaattccttg

SEQ ID NO: 1417496 - DNA, 25 bp, Homo sapien
caccagtttggccaggaatacatgg

SEQ ID NO: 1417497 - DNA, 25 bp, Homo sapien
catcaaaaccccaggtggcagaaac

SEQ ID NO: 1417498 - DNA, 25 bp, Homo sapien
agacaccagaacacagcttcctgcc

SEQ ID NO: 1417499 - DNA, 25 bp, Homo sapien
atacatggcgccaccactcacaaaa

SEQ ID NO: 1417500 - DNA, 25 bp, Homo sapien
gcaacttgagttaacattgtgatcc

SEQ ID NO: 1417501 - DNA, 25 bp, Homo sapien
atagaaaggatagggtgtctcctcc

SEQ ID NO: 1417502 - DNA, 25 bp, Homo sapien
tcaaggttccatagaaaggataggg

SEQ ID NO: 1417503 - DNA, 25 bp, Homo sapien
tgtgatcctctcactccggatctct

SEQ ID NO: 1417504 - DNA, 25 bp, Homo sapien
tatgcgttgcacactgtagctttca

SEQ ID NO: 1417505 - DNA, 25 bp, Homo sapien
ctaagcatagactttaatagcccac

SEQ ID NO: 1417506 - DNA, 25 bp, Homo sapien
ttaatagcccacactttctcatcac

SEQ ID NO: 1417507 - DNA, 25 bp, Homo sapien
ttttcaaggtatcagtacaatttag

SEQ ID NO: 1417508 - DNA, 25 bp, Homo sapien
tatgaagaaccctcaaagggaatgg

SEQ ID NO: 1417509 - DNA, 25 bp, Homo sapien
gaatggccagagtcagtttgcccaa

SEQ ID NO: 1417510 - DNA, 25 bp, Homo sapien
gaagagcgagcagaagacgacaact

SEQ ID NO: 1417511 - DNA, 25 bp, Homo sapien
agcgagcagaagacgacaactccca

SEQ ID NO: 1417512 - DNA, 25 bp, Homo sapien
aagggcaaaagagccgttactcttg

SEQ ID NO: 1417513 - DNA, 25 bp, Homo sapien
tcagccatgttaggcctgaggccat

SEQ ID NO: 1417514 - DNA, 25 bp, Homo sapien
tggaactgagggccttaagggcaaa

SEQ ID NO: 1417515 - DNA, 25 bp, Homo sapien
tcttgtcaggaaggaatgacttcag

SEQ ID NO: 1417516 - DNA, 25 bp, Homo sapien
aactgcaggtacaaacagtgccttc

SEQ ID NO: 1417517 - DNA, 25 bp, Homo sapien
agacagcaggatgcagagaaagaca

SEQ ID NO: 1417518 - DNA, 25 bp, Homo sapien
caggatgcagagaaagacacagaca

SEQ ID NO: 1417519 - DNA, 25 bp, Homo sapien
tgctcccagatgcacagacagcagg

SEQ ID NO: 1417520 - DNA, 25 bp, Homo sapien
agctgctcccagatgcacagacagc

SEQ ID NO: 1417521 - DNA, 25 bp, Homo sapien
taattacatgagctcttaaaagtgg

SEQ ID NO: 1417522 - DNA, 25 bp, Homo sapien
ttctgagtgggtccaatctaattac

SEQ ID NO: 1417523 - DNA, 25 bp, Homo sapien
cagctgggtcacagatatgtgacaa

SEQ ID NO: 1417524 - DNA, 25 bp, Homo sapien
atctaattacatgagctcttaaaag

SEQ ID NO: 1417525 - DNA, 25 bp, Homo sapien
aatgatttgggtaaacagctaattg

SEQ ID NO: 1417526 - DNA, 25 bp, Homo sapien
ctactgctgctttcctaatttcatc

SEQ ID NO: 1417527 - DNA, 25 bp, Homo sapien
gagtaaccagataattcttcccgaa

SEQ ID NO: 1417528 - DNA, 25 bp, Homo sapien
cagctaattgttgcccaaagtgttg

SEQ ID NO: 1417529 - DNA, 25 bp, Homo sapien
gccaaacttgttttgcgtaatgatt

SEQ ID NO: 1417530 - DNA, 25 bp, Homo sapien
tttgaaatgcttgcatcagtgctcc

SEQ ID NO: 1417531 - DNA, 25 bp, Homo sapien
cgtaatgattggtgagaagaataac

SEQ ID NO: 1417532 - DNA, 25 bp, Homo sapien
caataagtgccaagtagcttgctaa

SEQ ID NO: 1417533 - DNA, 25 bp, Homo sapien
cagattggttacactgcgctttgca

SEQ ID NO: 1417534 - DNA, 25 bp, Homo sapien
tacactgcgcttgcagattggttac

SEQ ID NO: 1417535 - DNA, 25 bp, Homo sapien
ttgcagattggttacactgcgcttg

SEQ ID NO: 1417536 - DNA, 25 bp, Homo sapien
ggttacactgcgctttgcatttcct

SEQ ID NO: 1417537 - DNA, 25 bp, Homo sapien
cttccgtgacacagacagctatgta

SEQ ID NO: 1417538 - DNA, 25 bp, Homo sapien
gtgacacagacagctatgtagggtc

SEQ ID NO: 1417539 - DNA, 25 bp, Homo sapien
cgtgacacagacagctatgtagggt

SEQ ID NO: 1417540 - DNA, 25 bp, Homo sapien
tccgtgacacagacagctatgtagg

SEQ ID NO: 1417541 - DNA, 25 bp, Homo sapien
ctggtgccagacctattcacatggt

SEQ ID NO: 1417542 - DNA, 25 bp, Homo sapien
gctggtgccagacctattcacatgg

SEQ ID NO: 1417543 - DNA, 25 bp, Homo sapien
actgctggtgccagacctattcaca

SEQ ID NO: 1417544 - DNA, 25 bp, Homo sapien
tgctggtgccagacctattcacatg

SEQ ID NO: 1417545 - DNA, 25 bp, Homo sapien
gaatagttgttctggcataactccg

SEQ ID NO: 1417546 - DNA, 25 bp, Homo sapien
gagtagtatctaccatatgggacag

SEQ ID NO: 1417547 - DNA, 25 bp, Homo sapien
gatacatggttgttccccactcaaa

SEQ ID NO: 1417548 - DNA, 25 bp, Homo sapien
tgattttgccttgccatacttcaag

SEQ ID NO: 1417549 - DNA, 25 bp, Homo sapien
ggcctgaatcatgggcagaatcaat

SEQ ID NO: 1417550 - DNA, 25 bp, Homo sapien
tgggcagaatcaatgtgacatgggc

SEQ ID NO: 1417551 - DNA, 25 bp, Homo sapien
caaagcccatgacaggagcctggaa

SEQ ID NO: 1417552 - DNA, 25 bp, Homo sapien
tgtgacatgggcaggtccatcactc

SEQ ID NO: 1417553 - DNA, 25 bp, Homo sapien
aggaacttgtcctcaaattgcttac

SEQ ID NO: 1417554 - DNA, 25 bp, Homo sapien
agaaatataagataggaacttgtcc

SEQ ID NO: 1417555 - DNA, 25 bp, Homo sapien
ttgccaggtacttctatggcaggca

SEQ ID NO: 1417556 - DNA, 25 bp, Homo sapien
tgccaggtacttctatggcaggcag

SEQ ID NO: 1417557 - DNA, 25 bp, Homo sapien
gtggctttgctatttatagacttgt

SEQ ID NO: 1417558 - DNA, 25 bp, Homo sapien
ttagcatttgctttagtggctttgc

SEQ ID NO: 1417559 - DNA, 25 bp, Homo sapien
ccccactcagtgttgagtttagcat

SEQ ID NO: 1417560 - DNA, 25 bp, Homo sapien
tcagccccactcagtgttgagttta

SEQ ID NO: 1417561 - DNA, 25 bp, Homo sapien
agcagctctgcgttgtaaggatgtc

SEQ ID NO: 1417562 - DNA, 25 bp, Homo sapien
cataacgaggtataccagcgaaata

SEQ ID NO: 1417563 - DNA, 25 bp, Homo sapien
gatgtcatgcataacgaggtatacc

SEQ ID NO: 1417564 - DNA, 25 bp, Homo sapien
tctgcgttgtaaggatgtcatgcat

SEQ ID NO: 1417565 - DNA, 25 bp, Homo sapien
ctgctgtggctttattaggaattcc

SEQ ID NO: 1417566 - DNA, 25 bp, Homo sapien
ttggctggccgcccacagcatgggc

SEQ ID NO: 1417567 - DNA, 25 bp, Homo sapien
tcccttgctctctacaagtctgctg

SEQ ID NO: 1417568 - DNA, 25 bp, Homo sapien
tttcgaagcatatggtgaagtgtgc

SEQ ID NO: 1417569 - DNA, 25 bp, Homo sapien
gtcctcatcactcagtgacagacag

SEQ ID NO: 1417570 - DNA, 25 bp, Homo sapien
atcactcagtgacagacaggaatca

SEQ ID NO: 1417571 - DNA, 25 bp, Homo sapien
accctttgtcctcatcactcagtga

SEQ ID NO: 1417572 - DNA, 25 bp, Homo sapien
actcagtgacagacaggaatcaaat

SEQ ID NO: 1417573 - DNA, 25 bp, Homo sapien
tattggctgtaatgcctgctcatcc

SEQ ID NO: 1417574 - DNA, 25 bp, Homo sapien
gaatattggctgtaatgcctgctca

SEQ ID NO: 1417575 - DNA, 25 bp, Homo sapien
ggctgtaatgcctgctcatccatcc

SEQ ID NO: 1417576 - DNA, 25 bp, Homo sapien
tagaatattggctgtaatgcctgct

SEQ ID NO: 1417577 - DNA, 25 bp, Homo sapien
gaggtatttagggtggaggagatat

SEQ ID NO: 1417578 - DNA, 25 bp, Homo sapien
tgcgaggtatttagggtggaggaga

SEQ ID NO: 1417579 - DNA, 25 bp, Homo sapien
aggtatttagggtggaggagatatt

SEQ ID NO: 1417580 - DNA, 25 bp, Homo sapien
gcgaggtatttagggtggaggagat

SEQ ID NO: 1417581 - DNA, 25 bp, Homo sapien
cttggccagcgcaactggaaaggga

SEQ ID NO: 1417582 - DNA, 25 bp, Homo sapien
ttgtcccagcctcattaggagctac

SEQ ID NO: 1417583 - DNA, 25 bp, Homo sapien
gattgtcccagcctcattaggagct

SEQ ID NO: 1417584 - DNA, 25 bp, Homo sapien
tcttgattgtcccagcctcattagg

SEQ ID NO: 1417585 - DNA, 25 bp, Homo sapien
ctggacttgctcacttgcactgctt

SEQ ID NO: 1417586 - DNA, 25 bp, Homo sapien
gacttgctcacttgcactgcttgct

SEQ ID NO: 1417587 - DNA, 25 bp, Homo sapien
ctgtgcttcaggtaaacaagctgct

SEQ ID NO: 1417588 - DNA, 25 bp, Homo sapien
gcccccctgtgcttcaggtaaacaa

SEQ ID NO: 1417589 - DNA, 25 bp, Homo sapien
caggatgggtttatgtggcccctca

SEQ ID NO: 1417590 - DNA, 25 bp, Homo sapien
gcccctcagggccttctaagaagac

SEQ ID NO: 1417591 - DNA, 25 bp, Homo sapien
tcctttgtaagtagatggtgacatc

SEQ ID NO: 1417592 - DNA, 25 bp, Homo sapien
agagttggttgttgtcccctagaag

SEQ ID NO: 1417593 - DNA, 25 bp, Homo sapien
tatggccttcgttttggggtctcgc

SEQ ID NO: 1417594 - DNA, 25 bp, Homo sapien
cttcgttttggggtctcgcagccat

SEQ ID NO: 1417595 - DNA, 25 bp, Homo sapien
tggccttcgttttggggtctcgcag

SEQ ID NO: 1417596 - DNA, 25 bp, Homo sapien
ggccttcgttttggggtctcgcagc

SEQ ID NO: 1417597 - DNA, 25 bp, Homo sapien
cataaagagccttacacctgaaata

SEQ ID NO: 1417598 - DNA, 25 bp, Homo sapien
ttttcataaagagccttacacctga

SEQ ID NO: 1417599 - DNA, 25 bp, Homo sapien
tttcataaagagccttacacctgaa

SEQ ID NO: 1417600 - DNA, 25 bp, Homo sapien
tacctgaggaatggcttgcatttta

SEQ ID NO: 1417601 - DNA, 25 bp, Homo sapien
ttcatacctgaggaatggcttgcat

SEQ ID NO: 1417602 - DNA, 25 bp, Homo sapien
cctgaggaatggcttgcattttata

SEQ ID NO: 1417603 - DNA, 25 bp, Homo sapien
catacctgaggaatggcttgcattt

SEQ ID NO: 1417604 - DNA, 25 bp, Homo sapien
tacatgtacctgcaccccaattctg

SEQ ID NO: 1417605 - DNA, 25 bp, Homo sapien
tttccacccacttagacatgctgct

SEQ ID NO: 1417606 - DNA, 25 bp, Homo sapien
caaagcttctgtgtatcctacatgt

SEQ ID NO: 1417607 - DNA, 25 bp, Homo sapien
tacttgcacgaaagggctcttgcct

SEQ ID NO: 1417608 - DNA, 25 bp, Homo sapien
gagttcctgagtgtcgggtttcagc

SEQ ID NO: 1417609 - DNA, 25 bp, Homo sapien
tgtatgaagcgttaatgaaggctgc

SEQ ID NO: 1417610 - DNA, 25 bp, Homo sapien
taagggctgagtgtatgaagcgtta

SEQ ID NO: 1417611 - DNA, 25 bp, Homo sapien
gaaggctgccattggaaccagtcca

SEQ ID NO: 1417612 - DNA, 25 bp, Homo sapien
tggatatgggataatcttcacttta

SEQ ID NO: 1417613 - DNA, 25 bp, Homo sapien
ccagagggttggtgcacattcacga

SEQ ID NO: 1417614 - DNA, 25 bp, Homo sapien
ccaagaccggaacctgttacaccag

SEQ ID NO: 1417615 - DNA, 25 bp, Homo sapien
ggcgtcataacagaagtagtcacag

SEQ ID NO: 1417616 - DNA, 25 bp, Homo sapien
caaaaggcttcctggcgtcataaca

SEQ ID NO: 1417617 - DNA, 25 bp, Homo sapien
tgcctgcgcgtctccttttgttctg

SEQ ID NO: 1417618 - DNA, 25 bp, Homo sapien
taagctctgagcttgacggtggtcc

SEQ ID NO: 1417619 - DNA, 25 bp, Homo sapien
tcagcccaatgcagcaggctctggt

SEQ ID NO: 1417620 - DNA, 25 bp, Homo sapien
cattgaggcaattggtggccgccgc

SEQ ID NO: 1417621 - DNA, 25 bp, Homo sapien
gaaagctgctttgaagaatggtgaa

SEQ ID NO: 1417622 - DNA, 25 bp, Homo sapien
tgaagaatggtgaacttgggccacg

SEQ ID NO: 1417623 - DNA, 25 bp, Homo sapien
ttgaagcaagaaggggctggttcca

SEQ ID NO: 1417624 - DNA, 25 bp, Homo sapien
ggccacggggcatcattctgcttta

SEQ ID NO: 1417625 - DNA, 25 bp, Homo sapien
agaggttaaggtcttcatagagtga

SEQ ID NO: 1417626 - DNA, 25 bp, Homo sapien
gttagtgaattaagccaggaaggca

SEQ ID NO: 1417627 - DNA, 25 bp, Homo sapien
aaaagcagagtttagcagtgaggaa

SEQ ID NO: 1417628 - DNA, 25 bp, Homo sapien
ggaacccattggtctatggcctgct

SEQ ID NO: 1417629 - DNA, 25 bp, Homo sapien
ttttatcccaactgccctgaacttg

SEQ ID NO: 1417630 - DNA, 25 bp, Homo sapien
gtaatcacctaggtatgcatacgga

SEQ ID NO: 1417631 - DNA, 25 bp, Homo sapien
tgcatacggaaaacctttctggact

SEQ ID NO: 1417632 - DNA, 25 bp, Homo sapien
gttaccatccctgtaagacaaagca

SEQ ID NO: 1417633 - DNA, 25 bp, Homo sapien
gctgctgactggtgcgctatgctgc

SEQ ID NO: 1417634 - DNA, 25 bp, Homo sapien
ggtgcgctatgctgcttcactctgc

SEQ ID NO: 1417635 - DNA, 25 bp, Homo sapien
gactggtgcgctatgctgcttcact

SEQ ID NO: 1417636 - DNA, 25 bp, Homo sapien
ctggctgctgactggtgcgctatgc

SEQ ID NO: 1417637 - DNA, 25 bp, Homo sapien
tctgggcagtctttgatgtagccac

SEQ ID NO: 1417638 - DNA, 25 bp, Homo sapien
tgtgtgactccctgtaaactttcaa

SEQ ID NO: 1417639 - DNA, 25 bp, Homo sapien
tccgtgtgtcaacaagtctgggcag

SEQ ID NO: 1417640 - DNA, 25 bp, Homo sapien
ttgatgtagccaccagcgtctaggc

SEQ ID NO: 1417641 - DNA, 25 bp, Homo sapien
cctccccaggtcctccttactcctg

SEQ ID NO: 1417642 - DNA, 25 bp, Homo sapien
cagcccctgggtctccctccccagg

SEQ ID NO: 1417643 - DNA, 25 bp, Homo sapien
tgtgccttctgctgccctctcagcc

SEQ ID NO: 1417644 - DNA, 25 bp, Homo sapien
tccccaggtcctccttactcctgct

SEQ ID NO: 1417645 - DNA, 25 bp, Homo sapien
taggaccagaagaaaagctcccatc

SEQ ID NO: 1417646 - DNA, 25 bp, Homo sapien
gaaccctggttgcatagcttttgat

SEQ ID NO: 1417647 - DNA, 25 bp, Homo sapien
caggtgtcagacaagctagagggta

SEQ ID NO: 1417648 - DNA, 25 bp, Homo sapien
gaaatacttccatttaggcaccatc

SEQ ID NO: 1417649 - DNA, 25 bp, Homo sapien
gattctcaatttgtgggccacggac

SEQ ID NO: 1417650 - DNA, 25 bp, Homo sapien
aattcatgcacataccaagcattgt

SEQ ID NO: 1417651 - DNA, 25 bp, Homo sapien
cttcctctaacatggtgattctcaa

SEQ ID NO: 1417652 - DNA, 25 bp, Homo sapien
tgaaagaattggttagaggcatgca

SEQ ID NO: 1417653 - DNA, 25 bp, Homo sapien
acatttttattgtacgcagaaagac

SEQ ID NO: 1417654 - DNA, 25 bp, Homo sapien
caggattctgttattacgtctgatg

SEQ ID NO: 1417655 - DNA, 25 bp, Homo sapien
atttttattgtacgcagaaagacag

SEQ ID NO: 1417656 - DNA, 25 bp, Homo sapien
tctgttattacgtctgatgtttgtt

SEQ ID NO: 1417657 - DNA, 25 bp, Homo sapien
gtcgtttgaaattggaaaattagca

SEQ ID NO: 1417658 - DNA, 25 bp, Homo sapien
tgagtcgtttgaaattggaaaatta

SEQ ID NO: 1417659 - DNA, 25 bp, Homo sapien
ctttgaagctcataagatctttcat

SEQ ID NO: 1417660 - DNA, 25 bp, Homo sapien
aaaattagcagcttctttgaagctc

SEQ ID NO: 1417661 - DNA, 25 bp, Homo sapien
agtgttcgatatctttgcaggctga

SEQ ID NO: 1417662 - DNA, 25 bp, Homo sapien
ggctgaatggccagttgacttgaga

SEQ ID NO: 1417663 - DNA, 25 bp, Homo sapien
cagttgacttgagatgcatatacca

SEQ ID NO: 1417664 - DNA, 25 bp, Homo sapien
gcaaaggtgagtgttcgatatcttt

SEQ ID NO: 1417665 - DNA, 25 bp, Homo sapien
ggcaacagttccatcgtttcttagg

SEQ ID NO: 1417666 - DNA, 25 bp, Homo sapien
tgccatggcaacagttccatcgttt

SEQ ID NO: 1417667 - DNA, 25 bp, Homo sapien
ttcttagggtagagcaggatgacat

SEQ ID NO: 1417668 - DNA, 25 bp, Homo sapien
tatttttgtttaggccacatattgt

SEQ ID NO: 1417669 - DNA, 25 bp, Homo sapien
tctacgagtcttttggcatgggcat

SEQ ID NO: 1417670 - DNA, 25 bp, Homo sapien
gaaaacctaatgcttgtgaccaatg

SEQ ID NO: 1417671 - DNA, 25 bp, Homo sapien
gaaagctaacatgcactaggttcct

SEQ ID NO: 1417672 - DNA, 25 bp, Homo sapien
ttggatgacgtgaaaaagaaccctg

SEQ ID NO: 1417673 - DNA, 25 bp, Homo sapien
tgctcactgagtattccctgtcctg

SEQ ID NO: 1417674 - DNA, 25 bp, Homo sapien
tagtgccgttgaccttctgcagtgc

SEQ ID NO: 1417675 - DNA, 25 bp, Homo sapien
tctggacctgcacagtgtaaggctt

SEQ ID NO: 1417676 - DNA, 25 bp, Homo sapien
ttcgaaggtcgagattagtgccgtt

SEQ ID NO: 1417677 - DNA, 25 bp, Homo sapien
gaaggagacagaaatcttctcgtct

SEQ ID NO: 1417678 - DNA, 25 bp, Homo sapien
cttgctgacgtagtatttcctcttg

SEQ ID NO: 1417679 - DNA, 25 bp, Homo sapien
gtactaaggtcacattgaactttgg

SEQ ID NO: 1417680 - DNA, 25 bp, Homo sapien
ccagagttggaacgtgaagcacagt

SEQ ID NO: 1417681 - DNA, 25 bp, Homo sapien
ggcagcgtggtcacttgcgcagatt

SEQ ID NO: 1417682 - DNA, 25 bp, Homo sapien
gatggcttctatgggtcgctctctg

SEQ ID NO: 1417683 - DNA, 25 bp, Homo sapien
gaatggacataatcatgctgcctag

SEQ ID NO: 1417684 - DNA, 25 bp, Homo sapien
tgtaaggcagcagttaagggcactc

SEQ ID NO: 1417685 - DNA, 25 bp, Homo sapien
tctgagctgcctctgacggtcacat

SEQ ID NO: 1417686 - DNA, 25 bp, Homo sapien
agctgcctctgacggtcacattcca

SEQ ID NO: 1417687 - DNA, 25 bp, Homo sapien
ctgagctgcctctgacggtcacatt

SEQ ID NO: 1417688 - DNA, 25 bp, Homo sapien
tgagctgcctctgacggtcacattc

SEQ ID NO: 1417689 - DNA, 25 bp, Homo sapien
ttgtgatactgattttagtgttgtc

SEQ ID NO: 1417690 - DNA, 25 bp, Homo sapien
tgtgatactgattttagtgttgtcc

SEQ ID NO: 1417691 - DNA, 25 bp, Homo sapien
gggtgatgccatttactctccagat

SEQ ID NO: 1417692 - DNA, 25 bp, Homo sapien
caaggatgatgttgccccatccatc

SEQ ID NO: 1417693 - DNA, 25 bp, Homo sapien
ctctccagatttagtataggaaaga

SEQ ID NO: 1417694 - DNA, 25 bp, Homo sapien
tggtggaagatagaatggaggctcc

SEQ ID NO: 1417695 - DNA, 25 bp, Homo sapien
tatgtaggttatagctgagaatccc

SEQ ID NO: 1417696 - DNA, 25 bp, Homo sapien
tcctaaatgtcgatgatgtccctag

SEQ ID NO: 1417697 - DNA, 25 bp, Homo sapien
tcatacattagatgaaagccgtggg

SEQ ID NO: 1417698 - DNA, 25 bp, Homo sapien
taaccattgggagcagcttgactca

SEQ ID NO: 1417699 - DNA, 25 bp, Homo sapien
agttagcactaaaggttgaacaggg

SEQ ID NO: 1417700 - DNA, 25 bp, Homo sapien
tagcagttagcactaaaggttgaac

SEQ ID NO: 1417701 - DNA, 25 bp, Homo sapien
actcttcaaactgatagcagttagc

SEQ ID NO: 1417702 - DNA, 25 bp, Homo sapien
aactgatagcagttagcactaaagg

SEQ ID NO: 1417703 - DNA, 25 bp, Homo sapien
aatgaaaacatgcaccagagcaggg

SEQ ID NO: 1417704 - DNA, 25 bp, Homo sapien
acatgcaccagagcaggggcctcta

SEQ ID NO: 1417705 - DNA, 25 bp, Homo sapien
gtaatgaaaacatgcaccagagcag

SEQ ID NO: 1417706 - DNA, 25 bp, Homo sapien
tgcaccagagcaggggcctctagcc

SEQ ID NO: 1417707 - DNA, 25 bp, Homo sapien
actttgtgttcattctggacctgga

SEQ ID NO: 1417708 - DNA, 25 bp, Homo sapien
gggttactttgtgttcattctggac

SEQ ID NO: 1417709 - DNA, 25 bp, Homo sapien
attctggacctggatcattttcagg

SEQ ID NO: 1417710 - DNA, 25 bp, Homo sapien
ggacctggatcattttcagggggtc

SEQ ID NO: 1417711 - DNA, 25 bp, Homo sapien
tgtgggaacattggcctacagatct

SEQ ID NO: 1417712 - DNA, 25 bp, Homo sapien
cattggcctacagatctagttaggt

SEQ ID NO: 1417713 - DNA, 25 bp, Homo sapien
tgtactgcaatgtgggaacattggc

SEQ ID NO: 1417714 - DNA, 25 bp, Homo sapien
ctacagatctagttaggtcctctcc

SEQ ID NO: 1417715 - DNA, 25 bp, Homo sapien
tactttctattggaagagaaggcag

SEQ ID NO: 1417716 - DNA, 25 bp, Homo sapien
gttaacccagcaggacaacctgtct

SEQ ID NO: 1417717 - DNA, 25 bp, Homo sapien
gctcctctaggtgtgcacattaagg

SEQ ID NO: 1417718 - DNA, 25 bp, Homo sapien
tgcattatgtggagaatagagagcc

SEQ ID NO: 1417719 - DNA, 25 bp, Homo sapien
ctggctcattttgtcccctttgctt

SEQ ID NO: 1417720 - DNA, 25 bp, Homo sapien
gcttaggctgtcactgctgacagtc

SEQ ID NO: 1417721 - DNA, 25 bp, Homo sapien
tttgcttaggctgtcactgctgaca

SEQ ID NO: 1417722 - DNA, 25 bp, Homo sapien
cattttgtcccctttgcttaggctg

SEQ ID NO: 1417723 - DNA, 25 bp, Homo sapien
tcgttgtctggttgatttattttca

SEQ ID NO: 1417724 - DNA, 25 bp, Homo sapien
ttttcctcgttgtctggttgattta

SEQ ID NO: 1417725 - DNA, 25 bp, Homo sapien
ttggccttggctgcggtttgttgct

SEQ ID NO: 1417726 - DNA, 25 bp, Homo sapien
cttggccttggctgcggtttgttgc

SEQ ID NO: 1417727 - DNA, 25 bp, Homo sapien
tgagtacaacattgagatacatggc

SEQ ID NO: 1417728 - DNA, 25 bp, Homo sapien
tacagagcaccatgctatgggagtg

SEQ ID NO: 1417729 - DNA, 25 bp, Homo sapien
tgtggtctggctttgggagtagaaa

SEQ ID NO: 1417730 - DNA, 25 bp, Homo sapien
gatacatggctgttgggaccactct

SEQ ID NO: 1417731 - DNA, 25 bp, Homo sapien
gagtttatacatgggttgactgtgg

SEQ ID NO: 1417732 - DNA, 25 bp, Homo sapien
tgagacttgtagagatcagttctgc

SEQ ID NO: 1417733 - DNA, 25 bp, Homo sapien
tggctatagaggaaagtgacggaaa

SEQ ID NO: 1417734 - DNA, 25 bp, Homo sapien
tgctaaaatgtacaggaaattcttg

SEQ ID NO: 1417735 - DNA, 25 bp, Homo sapien
cagtttaagcccatgcaacctgcat

SEQ ID NO: 1417736 - DNA, 25 bp, Homo sapien
gctttattgaccactacagtttaag

SEQ ID NO: 1417737 - DNA, 25 bp, Homo sapien
aaaggtgatggacagatagtcccag

SEQ ID NO: 1417738 - DNA, 25 bp, Homo sapien
catttgctcaccctgatctgtgtgg

SEQ ID NO: 1417739 - DNA, 25 bp, Homo sapien
tcttatcatcatagtagctttgggt

SEQ ID NO: 1417740 - DNA, 25 bp, Homo sapien
tttgggtatggcctcctagcagctt

SEQ ID NO: 1417741 - DNA, 25 bp, Homo sapien
cactccatgtcttgccatcttatca

SEQ ID NO: 1417742 - DNA, 25 bp, Homo sapien
gcattcgtgtcccactgtcaggcag

SEQ ID NO: 1417743 - DNA, 25 bp, Homo sapien
gtggtagatggggagacctaaagtc

SEQ ID NO: 1417744 - DNA, 25 bp, Homo sapien
tagatggggagacctaaagtccaaa

SEQ ID NO: 1417745 - DNA, 25 bp, Homo sapien
tggtagatggggagacctaaagtcc

SEQ ID NO: 1417746 - DNA, 25 bp, Homo sapien
gtagatggggagacctaaagtccaa

SEQ ID NO: 1417747 - DNA, 25 bp, Homo sapien
gcaccttgatgtatacctgtactat

SEQ ID NO: 1417748 - DNA, 25 bp, Homo sapien
aagcaccttgatgtatacctgtact

SEQ ID NO: 1417749 - DNA, 25 bp, Homo sapien
agcaccttgatgtatacctgtacta

SEQ ID NO: 1417750 - DNA, 25 bp, Homo sapien
caccttgatgtatacctgtactatt

SEQ ID NO: 1417751 - DNA, 25 bp, Homo sapien
gttcttcagcatctatagtaatggt

SEQ ID NO: 1417752 - DNA, 25 bp, Homo sapien
atgaatccagccgagggcctctctc

SEQ ID NO: 1417753 - DNA, 25 bp, Homo sapien
tgaatgaatccagccgagggcctct

SEQ ID NO: 1417754 - DNA, 25 bp, Homo sapien
ctgtgaatgaatccagccgagggcc

SEQ ID NO: 1417755 - DNA, 25 bp, Homo sapien
tgtgaatgaatccagccgagggcct

SEQ ID NO: 1417756 - DNA, 25 bp, Homo sapien
cttctaggagacagggtgtaggcag

SEQ ID NO: 1417757 - DNA, 25 bp, Homo sapien
gagttaataggatttttgcagaata

SEQ ID NO: 1417758 - DNA, 25 bp, Homo sapien
taccaagccgactatgcatttcctc

SEQ ID NO: 1417759 - DNA, 25 bp, Homo sapien
gaagcctccctgaatctgtgatccc

SEQ ID NO: 1417760 - DNA, 25 bp, Homo sapien
ttgcattgcaaccagtaccaagccg

SEQ ID NO: 1417761 - DNA, 25 bp, Homo sapien
ttggttcagggtccgaggagccttc

SEQ ID NO: 1417762 - DNA, 25 bp, Homo sapien
aactgtcaccacaattgggaagctg

SEQ ID NO: 1417763 - DNA, 25 bp, Homo sapien
gtgttgccgccagtaccaagccaac

SEQ ID NO: 1417764 - DNA, 25 bp, Homo sapien
aagccccggtacatcctttgtgttg

SEQ ID NO: 1417765 - DNA, 25 bp, Homo sapien
tcaggtgtgaccaaaccaaaactga

SEQ ID NO: 1417766 - DNA, 25 bp, Homo sapien
tttgcaatactcttggggtgactgt

SEQ ID NO: 1417767 - DNA, 25 bp, Homo sapien
ggatgtccccatttgcaatactctt

SEQ ID NO: 1417768 - DNA, 25 bp, Homo sapien
atttgcaatactcttggggtgactg

SEQ ID NO: 1417769 - DNA, 25 bp, Homo sapien
tgtccccatttgcaatactcttggg

SEQ ID NO: 1417770 - DNA, 25 bp, Homo sapien
gattcccgcagatgagagaggcact

SEQ ID NO: 1417771 - DNA, 25 bp, Homo sapien
tagcacacgtctgcttgggagtctg

SEQ ID NO: 1417772 - DNA, 25 bp, Homo sapien
tctggtaggaagactgtgtgttacg

SEQ ID NO: 1417773 - DNA, 25 bp, Homo sapien
tagattttagcacacgtctgcttgg

SEQ ID NO: 1417774 - DNA, 25 bp, Homo sapien
agggctgttttggtattctttatgg

SEQ ID NO: 1417775 - DNA, 25 bp, Homo sapien
ggctgttttggtattctttatggta

SEQ ID NO: 1417776 - DNA, 25 bp, Homo sapien
tagggctgttttggtattctttatg

SEQ ID NO: 1417777 - DNA, 25 bp, Homo sapien
gctgttttggtattctttatggtaa

SEQ ID NO: 1417778 - DNA, 25 bp, Homo sapien
tctgcataattacactcgtccactt

SEQ ID NO: 1417779 - DNA, 25 bp, Homo sapien
ctgtcttattgatatagctccagtg

SEQ ID NO: 1417780 - DNA, 25 bp, Homo sapien
tattgatatagctccagtggtgctt

SEQ ID NO: 1417781 - DNA, 25 bp, Homo sapien
gcataattacactcgtccactttct

SEQ ID NO: 1417782 - DNA, 25 bp, Homo sapien
gcacatctggctgctatgagagtgt

SEQ ID NO: 1417783 - DNA, 25 bp, Homo sapien
gctgctatgagagtgtgagagtact

SEQ ID NO: 1417784 - DNA, 25 bp, Homo sapien
gagagtactaagccataggcagagt

SEQ ID NO: 1417785 - DNA, 25 bp, Homo sapien
tatgagagtgtgagagtactaagcc

SEQ ID NO: 1417786 - DNA, 25 bp, Homo sapien
tctccagaccctcttgtactttcaa

SEQ ID NO: 1417787 - DNA, 25 bp, Homo sapien
ttaaattgaagagagtccaccgtgg

SEQ ID NO: 1417788 - DNA, 25 bp, Homo sapien
attaaattgaagagagtccaccgtg

SEQ ID NO: 1417789 - DNA, 25 bp, Homo sapien
gctgggctagctggatgatgccttt

SEQ ID NO: 1417790 - DNA, 25 bp, Homo sapien
catctgttagatgcattccaagctc

SEQ ID NO: 1417791 - DNA, 25 bp, Homo sapien
gactccagaaaaatcacgtacgtgg

SEQ ID NO: 1417792 - DNA, 25 bp, Homo sapien
gaaattatcctcacataggcagagg

SEQ ID NO: 1417793 - DNA, 25 bp, Homo sapien
cattagtttaaaccctagacactgg

SEQ ID NO: 1417794 - DNA, 25 bp, Homo sapien
cctactttagagtggagcgtggaag

SEQ ID NO: 1417795 - DNA, 25 bp, Homo sapien
gttcaaagatacatcatcacagctg

SEQ ID NO: 1417796 - DNA, 25 bp, Homo sapien
tcagtaacctgttgaagccagaaca

SEQ ID NO: 1417797 - DNA, 25 bp, Homo sapien
aataatgtgagagtatttgtttccc

SEQ ID NO: 1417798 - DNA, 25 bp, Homo sapien
tacagccatgaaataatgtgagagt

SEQ ID NO: 1417799 - DNA, 25 bp, Homo sapien
cctgtggtggaagaaatgcagagtc

SEQ ID NO: 1417800 - DNA, 25 bp, Homo sapien
gatttctgctccactcggtccccct

SEQ ID NO: 1417801 - DNA, 25 bp, Homo sapien
tgaaagtgttcggtcacctggaacc

SEQ ID NO: 1417802 - DNA, 25 bp, Homo sapien
gatgaaagtgttcggtcacctggaa

SEQ ID NO: 1417803 - DNA, 25 bp, Homo sapien
tgatctgtgactaaactgttcaccc

SEQ ID NO: 1417804 - DNA, 25 bp, Homo sapien
agtgttcggtcacctggaacctgtg

SEQ ID NO: 1417805 - DNA, 25 bp, Homo sapien
agcagccccagaatggtcaggagga

SEQ ID NO: 1417806 - DNA, 25 bp, Homo sapien
cagccccagaatggtcaggaggaaa

SEQ ID NO: 1417807 - DNA, 25 bp, Homo sapien
cccagaatggtcaggaggaaaggca

SEQ ID NO: 1417808 - DNA, 25 bp, Homo sapien
ggcagcagccccagaatggtcagga

SEQ ID NO: 1417809 - DNA, 25 bp, Homo sapien
tggcaaactgccttgattacttcta

SEQ ID NO: 1417810 - DNA, 25 bp, Homo sapien
actgccttgattacttctactgctg

SEQ ID NO: 1417811 - DNA, 25 bp, Homo sapien
gattacttctactgctgtacccatt

SEQ ID NO: 1417812 - DNA, 25 bp, Homo sapien
tctactgctgtacccattatgtgaa

SEQ ID NO: 1417813 - DNA, 25 bp, Homo sapien
ttttcattatctctgccacatcgga

SEQ ID NO: 1417814 - DNA, 25 bp, Homo sapien
tctgccacatcggatgcaggatggg

SEQ ID NO: 1417815 - DNA, 25 bp, Homo sapien
ggaggccgcagattttcattatctc

SEQ ID NO: 1417816 - DNA, 25 bp, Homo sapien
tccagtgtctggaggccgcagattt

SEQ ID NO: 1417817 - DNA, 25 bp, Homo sapien
aggctgaagcgtcttctaggctagg

SEQ ID NO: 1417818 - DNA, 25 bp, Homo sapien
ctgaggctgaagcgtcttctaggct

SEQ ID NO: 1417819 - DNA, 25 bp, Homo sapien
ctaggctaggggctaccacagggca

SEQ ID NO: 1417820 - DNA, 25 bp, Homo sapien
tctaggctaggggctaccacagggc

SEQ ID NO: 1417821 - DNA, 25 bp, Homo sapien
gagcttgcaggcaaccttggctttt

SEQ ID NO: 1417822 - DNA, 25 bp, Homo sapien
tttctcaagcgctggtagaaaggct

SEQ ID NO: 1417823 - DNA, 25 bp, Homo sapien
agcagagagcttgcaggcaaccttg

SEQ ID NO: 1417824 - DNA, 25 bp, Homo sapien
aaccttggcttttctcaagcgctgg

SEQ ID NO: 1417825 - DNA, 25 bp, Homo sapien
tggttcatgctcgctgttgcagaag

SEQ ID NO: 1417826 - DNA, 25 bp, Homo sapien
acaagatgagctgtctctgaactgg

SEQ ID NO: 1417827 - DNA, 25 bp, Homo sapien
cagagcagagtttggatgtacaaga

SEQ ID NO: 1417828 - DNA, 25 bp, Homo sapien
gtttggatgtacaagatgagctgtc

SEQ ID NO: 1417829 - DNA, 25 bp, Homo sapien
acttttgctctccaggtccagtgag

SEQ ID NO: 1417830 - DNA, 25 bp, Homo sapien
gcatatctgttattccatctgcagc

SEQ ID NO: 1417831 - DNA, 25 bp, Homo sapien
gaggtagcacctgtgtcattggctg

SEQ ID NO: 1417832 - DNA, 25 bp, Homo sapien
cattggctgttctagtgtgctgtca

SEQ ID NO: 1417833 - DNA, 25 bp, Homo sapien
gacccagtcgttatttgagcataga

SEQ ID NO: 1417834 - DNA, 25 bp, Homo sapien
agtaataaatggagacccagtcgtt

SEQ ID NO: 1417835 - DNA, 25 bp, Homo sapien
cttctcatctggtaaaaatgtgccg

SEQ ID NO: 1417836 - DNA, 25 bp, Homo sapien
tgaaattagattgaaggacttctca

SEQ ID NO: 1417837 - DNA, 25 bp, Homo sapien
gaagctttgtggtaagcgacttgga

SEQ ID NO: 1417838 - DNA, 25 bp, Homo sapien
gattttctagtgtcgggctcttctc

SEQ ID NO: 1417839 - DNA, 25 bp, Homo sapien
cgggtctgggaaattaaagtgcctg

SEQ ID NO: 1417840 - DNA, 25 bp, Homo sapien
tcccagggcaccgattgttaagagg

SEQ ID NO: 1417841 - DNA, 25 bp, Homo sapien
tggcatgctgatttccctttgtggg

SEQ ID NO: 1417842 - DNA, 25 bp, Homo sapien
tacagggtgtgcttaacccttggca

SEQ ID NO: 1417843 - DNA, 25 bp, Homo sapien
aatgggctttcgcaacatgccggaa

SEQ ID NO: 1417844 - DNA, 25 bp, Homo sapien
aatactgagagccagggtgctcatg

SEQ ID NO: 1417845 - DNA, 25 bp, Homo sapien
catcagagctttcatattggagttg

SEQ ID NO: 1417846 - DNA, 25 bp, Homo sapien
attggagttgactcttcattttgag

SEQ ID NO: 1417847 - DNA, 25 bp, Homo sapien
tgtgcacttgtacagatacaccata

SEQ ID NO: 1417848 - DNA, 25 bp, Homo sapien
tgagttgaccaaggtgggcttcagt

SEQ ID NO: 1417849 - DNA, 25 bp, Homo sapien
caggctcgatcccaccattggtcaa

SEQ ID NO: 1417850 - DNA, 25 bp, Homo sapien
cattggtcaacacagactgctctgt

SEQ ID NO: 1417851 - DNA, 25 bp, Homo sapien
gacatcaaactgagtgtggacaccc

SEQ ID NO: 1417852 - DNA, 25 bp, Homo sapien
ataggtgtatacctccatgctgggc

SEQ ID NO: 1417853 - DNA, 25 bp, Homo sapien
aattgcacccatgagaaccgaacca

SEQ ID NO: 1417854 - DNA, 25 bp, Homo sapien
catccaattgcacccatgagaaccg

SEQ ID NO: 1417855 - DNA, 25 bp, Homo sapien
cacacatccaattgcacccatgaga

SEQ ID NO: 1417856 - DNA, 25 bp, Homo sapien
tccaattgcacccatgagaaccgaa

SEQ ID NO: 1417857 - DNA, 25 bp, Homo sapien
tataggttgtctgggtgttagcccc

SEQ ID NO: 1417858 - DNA, 25 bp, Homo sapien
taaggcaagagcattggcagagccc

SEQ ID NO: 1417859 - DNA, 25 bp, Homo sapien
tgcgctatcttgattagaagccctg

SEQ ID NO: 1417860 - DNA, 25 bp, Homo sapien
tgaggactaagaaccaagcaaatgc

SEQ ID NO: 1417861 - DNA, 25 bp, Homo sapien
caggaccgctggagaaataggccca

SEQ ID NO: 1417862 - DNA, 25 bp, Homo sapien
tgatcagcagaaggtggccatggac

SEQ ID NO: 1417863 - DNA, 25 bp, Homo sapien
gaaatcctctagtcttgttcactcg

SEQ ID NO: 1417864 - DNA, 25 bp, Homo sapien
tgttcactcgaaattgtgcaaggac

SEQ ID NO: 1417865 - DNA, 25 bp, Homo sapien
cagaagtcgtctcgggtccggagtg

SEQ ID NO: 1417866 - DNA, 25 bp, Homo sapien
tctcgggtccggagtgctgtctgca

SEQ ID NO: 1417867 - DNA, 25 bp, Homo sapien
gggtccggagtgctgtctgcatcca

SEQ ID NO: 1417868 - DNA, 25 bp, Homo sapien
tcgtctcgggtccggagtgctgtct

SEQ ID NO: 1417869 - DNA, 25 bp, Homo sapien
aagtcccacctgctgttgttgaccc

SEQ ID NO: 1417870 - DNA, 25 bp, Homo sapien
tcctccaagtcccacctgctgttgt

SEQ ID NO: 1417871 - DNA, 25 bp, Homo sapien
cttcctccaagtcccacctgctgtt

SEQ ID NO: 1417872 - DNA, 25 bp, Homo sapien
tccaagtcccacctgctgttgttga

SEQ ID NO: 1417873 - DNA, 25 bp, Homo sapien
cacaggagcccaatcgagtggtaca

SEQ ID NO: 1417874 - DNA, 25 bp, Homo sapien
tcccggttgatatcggaaggcacag

SEQ ID NO: 1417875 - DNA, 25 bp, Homo sapien
tagcagccttatcgctcgggagaga

SEQ ID NO: 1417876 - DNA, 25 bp, Homo sapien
tcaccgactggctgataacaggctg

SEQ ID NO: 1417877 - DNA, 25 bp, Homo sapien
cgttcagcgtctccgtgcagttgga

SEQ ID NO: 1417878 - DNA, 25 bp, Homo sapien
tgtgtgggcccgttgcctgttccgt

SEQ ID NO: 1417879 - DNA, 25 bp, Homo sapien
gcctgttccgttcagcgtctccgtg

SEQ ID NO: 1417880 - DNA, 25 bp, Homo sapien
gcccgttgcctgttccgttcagcgt

SEQ ID NO: 1417881 - DNA, 25 bp, Homo sapien
catggcatccctccagaatgacttg

SEQ ID NO: 1417882 - DNA, 25 bp, Homo sapien
gaatgacttgccctgcccaactcat

SEQ ID NO: 1417883 - DNA, 25 bp, Homo sapien
tacacatgcctagaggccagatgat

SEQ ID NO: 1417884 - DNA, 25 bp, Homo sapien
aatccattttgcctggacgacgact

SEQ ID NO: 1417885 - DNA, 25 bp, Homo sapien
gccagacctaagtgccagcagcaag

SEQ ID NO: 1417886 - DNA, 25 bp, Homo sapien
aattaggcaatttagcccaaggcag

SEQ ID NO: 1417887 - DNA, 25 bp, Homo sapien
gagccagacctaagtgccagcagca

SEQ ID NO: 1417888 - DNA, 25 bp, Homo sapien
gaatatgtagcctacatattgaaaa

SEQ ID NO: 1417889 - DNA, 25 bp, Homo sapien
ggctttttctagtcatgctttgtgg

SEQ ID NO: 1417890 - DNA, 25 bp, Homo sapien
aaaggtcagctgagcacggaggaac

SEQ ID NO: 1417891 - DNA, 25 bp, Homo sapien
tgcctcttggcatcatcatgcaggg

SEQ ID NO: 1417892 - DNA, 25 bp, Homo sapien
gaaactgtctactcccatttctgga

SEQ ID NO: 1417893 - DNA, 25 bp, Homo sapien
ctttgggcccttgagcaggcatttg

SEQ ID NO: 1417894 - DNA, 25 bp, Homo sapien
gaattctgtttagggcactgctcca

SEQ ID NO: 1417895 - DNA, 25 bp, Homo sapien
tgctccaaatctcggtgacactcca

SEQ ID NO: 1417896 - DNA, 25 bp, Homo sapien
gctgcatatgaacctgggagccatg

SEQ ID NO: 1417897 - DNA, 25 bp, Homo sapien
gagttaccagaaggttcacccatgt

SEQ ID NO: 1417898 - DNA, 25 bp, Homo sapien
cattggtgtgaaaaatcgagttacc

SEQ ID NO: 1417899 - DNA, 25 bp, Homo sapien
tgaatactgaacgttttatttagtg

SEQ ID NO: 1417900 - DNA, 25 bp, Homo sapien
ggttcacccatgttccacaggtatg

SEQ ID NO: 1417901 - DNA, 25 bp, Homo sapien
ccttcctgcatccagtagacttgca

SEQ ID NO: 1417902 - DNA, 25 bp, Homo sapien
ccagcatctgtgattgtccattctt

SEQ ID NO: 1417903 - DNA, 25 bp, Homo sapien
tctttgtcaggcctttcagagttcc

SEQ ID NO: 1417904 - DNA, 25 bp, Homo sapien
cctgcatccagtagacttgcaggga

SEQ ID NO: 1417905 - DNA, 25 bp, Homo sapien
ctccctttgtcatgggaagtggcgg

SEQ ID NO: 1417906 - DNA, 25 bp, Homo sapien
cagaacgaatggctttaataagggc

SEQ ID NO: 1417907 - DNA, 25 bp, Homo sapien
taaggccattccgtcagtgctgagg

SEQ ID NO: 1417908 - DNA, 25 bp, Homo sapien
gaggaccacatgaccattaactctg

SEQ ID NO: 1417909 - DNA, 25 bp, Homo sapien
aacactgatgactagagagacccat

SEQ ID NO: 1417910 - DNA, 25 bp, Homo sapien
tgaggttaatagtcctggccagctt

SEQ ID NO: 1417911 - DNA, 25 bp, Homo sapien
tgaaagtgactgtagagcggttgac

SEQ ID NO: 1417912 - DNA, 25 bp, Homo sapien
tcctacagggccagaaacagtgatg

SEQ ID NO: 1417913 - DNA, 25 bp, Homo sapien
gagcggctgcttgacccaaaaaaga

SEQ ID NO: 1417914 - DNA, 25 bp, Homo sapien
ggctctcagtgttggaaacgggaat

SEQ ID NO: 1417915 - DNA, 25 bp, Homo sapien
ggataaaggctctcagtgttggaaa

SEQ ID NO: 1417916 - DNA, 25 bp, Homo sapien
ttggaaacgggaatgatgcagttga

SEQ ID NO: 1417917 - DNA, 25 bp, Homo sapien
acgggaatgatgcagttgagcagtt

SEQ ID NO: 1417918 - DNA, 25 bp, Homo sapien
gaaggtggcaggagtagccgtgaaa

SEQ ID NO: 1417919 - DNA, 25 bp, Homo sapien
gtggcaggagtagccgtgaaaggcc

SEQ ID NO: 1417920 - DNA, 25 bp, Homo sapien
aaggtggcaggagtagccgtgaaag

SEQ ID NO: 1417921 - DNA, 25 bp, Homo sapien
ctgaaggtggcaggagtagccgtga

SEQ ID NO: 1417922 - DNA, 25 bp, Homo sapien
gagaaagagccgcagtaggagccaa

SEQ ID NO: 1417923 - DNA, 25 bp, Homo sapien
tgccagactgtgtcgggagaacctt

SEQ ID NO: 1417924 - DNA, 25 bp, Homo sapien
aagccagtgctggatcttgggtctg

SEQ ID NO: 1417925 - DNA, 25 bp, Homo sapien
taggagccaagtatctgccagactg

SEQ ID NO: 1417926 - DNA, 25 bp, Homo sapien
tgtagaggtagtggcctcttcaaag

SEQ ID NO: 1417927 - DNA, 25 bp, Homo sapien
ttcaaagtccccaagcacgcagcca

SEQ ID NO: 1417928 - DNA, 25 bp, Homo sapien
taaagctctgtagaggtagtggcct

SEQ ID NO: 1417929 - DNA, 25 bp, Homo sapien
accacagttgtaaagctctgtagag

SEQ ID NO: 1417930 - DNA, 25 bp, Homo sapien
tcagcagccctgattaaccgaatca

SEQ ID NO: 1417931 - DNA, 25 bp, Homo sapien
gattaaccgaatcagaatgagcagc

SEQ ID NO: 1417932 - DNA, 25 bp, Homo sapien
gcagccctgattaaccgaatcagaa

SEQ ID NO: 1417933 - DNA, 25 bp, Homo sapien
cctgattaaccgaatcagaatgagc

SEQ ID NO: 1417934 - DNA, 25 bp, Homo sapien
gatgtgtctgctcagctcactaaat

SEQ ID NO: 1417935 - DNA, 25 bp, Homo sapien
ttttcctcacagtaagatgtgtctg

SEQ ID NO: 1417936 - DNA, 25 bp, Homo sapien
taaaagtactgtcccctcacatcac

SEQ ID NO: 1417937 - DNA, 25 bp, Homo sapien
tcacactacttagggacacattggt

SEQ ID NO: 1417938 - DNA, 25 bp, Homo sapien
tggtaattagttatctgggtctgca

SEQ ID NO: 1417939 - DNA, 25 bp, Homo sapien
agtgtgcagtaggtccattcctcca

SEQ ID NO: 1417940 - DNA, 25 bp, Homo sapien
gtgtgcagtaggtccattcctccat

SEQ ID NO: 1417941 - DNA, 25 bp, Homo sapien
aaccaacctggtaattagttatctg

SEQ ID NO: 1417942 - DNA, 25 bp, Homo sapien
tctaagttgactgctagagctccag

SEQ ID NO: 1417943 - DNA, 25 bp, Homo sapien
aggtgatcctgtgtcatcctcgtga

SEQ ID NO: 1417944 - DNA, 25 bp, Homo sapien
taccacttgtatcccatcagttagg

SEQ ID NO: 1417945 - DNA, 25 bp, Homo sapien
caagggagtcttggacatgtagctg

SEQ ID NO: 1417946 - DNA, 25 bp, Homo sapien
tcaatgaagatgattggctcccgat

SEQ ID NO: 1417947 - DNA, 25 bp, Homo sapien
gctcccgataatggctcccttctgg

SEQ ID NO: 1417948 - DNA, 25 bp, Homo sapien
gagggaacttggcttcatcaatgaa

SEQ ID NO: 1417949 - DNA, 25 bp, Homo sapien
gaagagggaacttggcttcatcaat

SEQ ID NO: 1417950 - DNA, 25 bp, Homo sapien
tccagggtaccatggaaacttgtgt

SEQ ID NO: 1417951 - DNA, 25 bp, Homo sapien
tcatttaaacctgatggcaatcctg

SEQ ID NO: 1417952 - DNA, 25 bp, Homo sapien
gaggctttgagaagtgaactgactc

SEQ ID NO: 1417953 - DNA, 25 bp, Homo sapien
taacacttactggatgccttctgtg

SEQ ID NO: 1417954 - DNA, 25 bp, Homo sapien
gatgtggtttgactcccttataaat

SEQ ID NO: 1417955 - DNA, 25 bp, Homo sapien
cctggcccctacaaaggtgagcaga

SEQ ID NO: 1417956 - DNA, 25 bp, Homo sapien
tctttgaacttgcacatgtgatgtg

SEQ ID NO: 1417957 - DNA, 25 bp, Homo sapien
gagtggatcatgaagaatctcacag

SEQ ID NO: 1417958 - DNA, 25 bp, Homo sapien
tgtaaggaccagatgaggtcttgtg

SEQ ID NO: 1417959 - DNA, 25 bp, Homo sapien
gaatgacaccatcataaccaggaag

SEQ ID NO: 1417960 - DNA, 25 bp, Homo sapien
aggtcttgtgtgtgctgtacaaatg

SEQ ID NO: 1417961 - DNA, 25 bp, Homo sapien
tagaaccagtcctctcctaaggctg

SEQ ID NO: 1417962 - DNA, 25 bp, Homo sapien
tgactccctttttttagctttcaga

SEQ ID NO: 1417963 - DNA, 25 bp, Homo sapien
tcagatggtaactgacttgagacca

SEQ ID NO: 1417964 - DNA, 25 bp, Homo sapien
ttttagctttcagatggtaactgac

SEQ ID NO: 1417965 - DNA, 25 bp, Homo sapien
gctttcagatggtaactgacttgag

SEQ ID NO: 1417966 - DNA, 25 bp, Homo sapien
gcacttgcgtaagctgtaactttga

SEQ ID NO: 1417967 - DNA, 25 bp, Homo sapien
taaaaaataggcatccaggatctac

SEQ ID NO: 1417968 - DNA, 25 bp, Homo sapien
tgtgggtcagcatagacaatgtagg

SEQ ID NO: 1417969 - DNA, 25 bp, Homo sapien
tggacattgaagaactgcacttgcg

SEQ ID NO: 1417970 - DNA, 25 bp, Homo sapien
cagctctttgttgggaaatcttcat

SEQ ID NO: 1417971 - DNA, 25 bp, Homo sapien
ttcactgtagccagctctttgttgg

SEQ ID NO: 1417972 - DNA, 25 bp, Homo sapien
tcttcataatcagtgtcaccttctg

SEQ ID NO: 1417973 - DNA, 25 bp, Homo sapien
aaatcttcataatcagtgtcacctt

SEQ ID NO: 1417974 - DNA, 25 bp, Homo sapien
ggctagtgccattctcttcttcagt

SEQ ID NO: 1417975 - DNA, 25 bp, Homo sapien
cattgcaggctagtgccattctctt

SEQ ID NO: 1417976 - DNA, 25 bp, Homo sapien
ttgaccattgcaggctagtgccatt

SEQ ID NO: 1417977 - DNA, 25 bp, Homo sapien
caggctagtgccattctcttcttca

SEQ ID NO: 1417978 - DNA, 25 bp, Homo sapien
gatatctttcttgcctcgagggtgt

SEQ ID NO: 1417979 - DNA, 25 bp, Homo sapien
tctaactgtttgtactggcggctca

SEQ ID NO: 1417980 - DNA, 25 bp, Homo sapien
ttcataggatgggtacacttcactc

SEQ ID NO: 1417981 - DNA, 25 bp, Homo sapien
gaagacagccgtgacctctgaaaga

SEQ ID NO: 1417982 - DNA, 25 bp, Homo sapien
gccgtgggctgtgtactacagacaa

SEQ ID NO: 1417983 - DNA, 25 bp, Homo sapien
tgtaggccccactgagttgcacatc

SEQ ID NO: 1417984 - DNA, 25 bp, Homo sapien
tgtgatgtctatgtcagctgggacc

SEQ ID NO: 1417985 - DNA, 25 bp, Homo sapien
ctacagacaatgctgtaattgcttc

SEQ ID NO: 1417986 - DNA, 25 bp, Homo sapien
ctgtgctggtggctaaatatttact

SEQ ID NO: 1417987 - DNA, 25 bp, Homo sapien
agaagtggagtgttgattacagctg

SEQ ID NO: 1417988 - DNA, 25 bp, Homo sapien
agtggagtgttgattacagctgttt

SEQ ID NO: 1417989 - DNA, 25 bp, Homo sapien
gcttcacctctgatctgggaggggt

SEQ ID NO: 1417990 - DNA, 25 bp, Homo sapien
gaatgcacagcaagttgccgaccaa

SEQ ID NO: 1417991 - DNA, 25 bp, Homo sapien
ttcatctccacggaatgcacagcaa

SEQ ID NO: 1417992 - DNA, 25 bp, Homo sapien
gcaagttgccgaccaatggctccac

SEQ ID NO: 1417993 - DNA, 25 bp, Homo sapien
gaccaatggctccacatttttcatg

SEQ ID NO: 1417994 - DNA, 25 bp, Homo sapien
cttgagctattaaggaccaaagccc

SEQ ID NO: 1417995 - DNA, 25 bp, Homo sapien
tttcccgagcagcagtccagacttg

SEQ ID NO: 1417996 - DNA, 25 bp, Homo sapien
gaacgtgtgaatgggatccatgccc

SEQ ID NO: 1417997 - DNA, 25 bp, Homo sapien
gggcctatcgcccagcacattagct

SEQ ID NO: 1417998 - DNA, 25 bp, Homo sapien
acccaccctggcaatctcatgtacc

SEQ ID NO: 1417999 - DNA, 25 bp, Homo sapien
cccaccctggcaatctcatgtaccc

SEQ ID NO: 1418000 - DNA, 25 bp, Homo sapien
tcttgaagtcggagcccatatctgg

SEQ ID NO: 1418001 - DNA, 25 bp, Homo sapien
gagcctttgtcaccggtaatgttgg

SEQ ID NO: 1418002 - DNA, 25 bp, Homo sapien
tgtttgattgcactgagcgttcctc

SEQ ID NO: 1418003 - DNA, 25 bp, Homo sapien
caccttggaggtacttgagcagtaa

SEQ ID NO: 1418004 - DNA, 25 bp, Homo sapien
ctctggcttaatgccagtgtagttt

SEQ ID NO: 1418005 - DNA, 25 bp, Homo sapien
tctggcttaatgccagtgtagtttt

SEQ ID NO: 1418006 - DNA, 25 bp, Homo sapien
gctctggcttaatgccagtgtagtt

SEQ ID NO: 1418007 - DNA, 25 bp, Homo sapien
ctggcttaatgccagtgtagttttg

SEQ ID NO: 1418008 - DNA, 25 bp, Homo sapien
agatccttggatctcaccagcccgt

SEQ ID NO: 1418009 - DNA, 25 bp, Homo sapien
caccagcccgtatcttccctccttg

SEQ ID NO: 1418010 - DNA, 25 bp, Homo sapien
ttggatctcaccagcccgtatcttc

SEQ ID NO: 1418011 - DNA, 25 bp, Homo sapien
atccttggatctcaccagcccgtat

SEQ ID NO: 1418012 - DNA, 25 bp, Homo sapien
taagaatgattaccaaatgggttaa

SEQ ID NO: 1418013 - DNA, 25 bp, Homo sapien
ctcttccataattgggtggatttgt

SEQ ID NO: 1418014 - DNA, 25 bp, Homo sapien
tcttccataattgggtggatttgtg

SEQ ID NO: 1418015 - DNA, 25 bp, Homo sapien
aactctttctgtaagaatgattacc

SEQ ID NO: 1418016 - DNA, 25 bp, Homo sapien
tcctgaaacttccatggcgggtagg

SEQ ID NO: 1418017 - DNA, 25 bp, Homo sapien
gaaagctaagcgaaatactaacact

SEQ ID NO: 1418018 - DNA, 25 bp, Homo sapien
gggcttgcagtttatcctttcagtg

SEQ ID NO: 1418019 - DNA, 25 bp, Homo sapien
cactgcgcccaattaaatgtatcct

SEQ ID NO: 1418020 - DNA, 25 bp, Homo sapien
tggtgtgtggatatccaccagggac

SEQ ID NO: 1418021 - DNA, 25 bp, Homo sapien
tgtgtggatatccaccagggactta

SEQ ID NO: 1418022 - DNA, 25 bp, Homo sapien
tgtggatatccaccagggacttaga

SEQ ID NO: 1418023 - DNA, 25 bp, Homo sapien
ctctggtgtgtggatatccaccagg

SEQ ID NO: 1418024 - DNA, 25 bp, Homo sapien
tgaaccaagtgataccctgaggatg

SEQ ID NO: 1418025 - DNA, 25 bp, Homo sapien
caatgacggtgttgattgtcctgcc

SEQ ID NO: 1418026 - DNA, 25 bp, Homo sapien
gaatctcctgcgagagcaaagccgg

SEQ ID NO: 1418027 - DNA, 25 bp, Homo sapien
gatgggccatcggtttcacacagta

SEQ ID NO: 1418028 - DNA, 25 bp, Homo sapien
tgcgtagtgcaaagtgcaagtgact

SEQ ID NO: 1418029 - DNA, 25 bp, Homo sapien
cgttctgcgtagtgcaaagtgcaag

SEQ ID NO: 1418030 - DNA, 25 bp, Homo sapien
gtagtgcaaagtgcaagtgactggt

SEQ ID NO: 1418031 - DNA, 25 bp, Homo sapien
tgcagcccgttctgcgtagtgcaaa

SEQ ID NO: 1418032 - DNA, 25 bp, Homo sapien
gaaataatagagtgcaactgacctg

SEQ ID NO: 1418033 - DNA, 25 bp, Homo sapien
taatgcgctgagctgcacgatgact

SEQ ID NO: 1418034 - DNA, 25 bp, Homo sapien
gggcaagagcacaatttgagcaata

SEQ ID NO: 1418035 - DNA, 25 bp, Homo sapien
tttaaccaaaccttgcacgttgagc

SEQ ID NO: 1418036 - DNA, 25 bp, Homo sapien
gtgctgagtctcttaagttttaaca

SEQ ID NO: 1418037 - DNA, 25 bp, Homo sapien
gtctacctcatttgtatagtttaca

SEQ ID NO: 1418038 - DNA, 25 bp, Homo sapien
caaagtgctgagtctcttaagtttt

SEQ ID NO: 1418039 - DNA, 25 bp, Homo sapien
aagtgctgagtctcttaagttttaa

SEQ ID NO: 1418040 - DNA, 25 bp, Homo sapien
gagacctaatgcctgttcttgagca

SEQ ID NO: 1418041 - DNA, 25 bp, Homo sapien
tgtttagtagatgttttcttgagac

SEQ ID NO: 1418042 - DNA, 25 bp, Homo sapien
tgttgtttagcctgtttccattggc

SEQ ID NO: 1418043 - DNA, 25 bp, Homo sapien
ttattactcagaatagtgttgggca

SEQ ID NO: 1418044 - DNA, 25 bp, Homo sapien
acttcatgacattgtacttaaaaac

SEQ ID NO: 1418045 - DNA, 25 bp, Homo sapien
catgacattgtacttaaaaacttaa

SEQ ID NO: 1418046 - DNA, 25 bp, Homo sapien
tcatgacattgtacttaaaaactta

SEQ ID NO: 1418047 - DNA, 25 bp, Homo sapien
atttctgtactgctgagtcattttt

SEQ ID NO: 1418048 - DNA, 25 bp, Homo sapien
tgtccctgaaataaacgggttcatg

SEQ ID NO: 1418049 - DNA, 25 bp, Homo sapien
tgtcacattgactgcttgggaggct

SEQ ID NO: 1418050 - DNA, 25 bp, Homo sapien
cgggttcatgccatctagggacaat

SEQ ID NO: 1418051 - DNA, 25 bp, Homo sapien
gggcagctagcaagaacatggaaat

SEQ ID NO: 1418052 - DNA, 25 bp, Homo sapien
cacattaggcgaagcaggagaacac

SEQ ID NO: 1418053 - DNA, 25 bp, Homo sapien
tatcacttccgacttccaacgtggc

SEQ ID NO: 1418054 - DNA, 25 bp, Homo sapien
aacgtggcatccgtgagatctgtcc

SEQ ID NO: 1418055 - DNA, 25 bp, Homo sapien
gatgggtttggaaagagcatgcctc

SEQ ID NO: 1418056 - DNA, 25 bp, Homo sapien
gagagcaagatgcaccccaggattt

SEQ ID NO: 1418057 - DNA, 25 bp, Homo sapien
tttctaatagatgtgggagtgctcc

SEQ ID NO: 1418058 - DNA, 25 bp, Homo sapien
gcatggaattgacgcccgtgcagta

SEQ ID NO: 1418059 - DNA, 25 bp, Homo sapien
tgagaaacgatactagaccctgggt

SEQ ID NO: 1418060 - DNA, 25 bp, Homo sapien
aatatgtatacaaggtgatgtgaaa

SEQ ID NO: 1418061 - DNA, 25 bp, Homo sapien
cttcaatatgtatacaaggtgatgt

SEQ ID NO: 1418062 - DNA, 25 bp, Homo sapien
tcaatatgtatacaaggtgatgtga

SEQ ID NO: 1418063 - DNA, 25 bp, Homo sapien
tcttcaatatgtatacaaggtgatg

SEQ ID NO: 1418064 - DNA, 25 bp, Homo sapien
ttgctcacctgcatttccagagagt

SEQ ID NO: 1418065 - DNA, 25 bp, Homo sapien
gcccatgttgatgtctcgttgctca

SEQ ID NO: 1418066 - DNA, 25 bp, Homo sapien
caaaagcgaagatcaagcccatgtt

SEQ ID NO: 1418067 - DNA, 25 bp, Homo sapien
tccagagagtgtgacactcatgcag

SEQ ID NO: 1418068 - DNA, 25 bp, Homo sapien
tctgacttaggcagctgcttaaagc

SEQ ID NO: 1418069 - DNA, 25 bp, Homo sapien
taataactacattccatgaggcctc

SEQ ID NO: 1418070 - DNA, 25 bp, Homo sapien
aagaggttacgtttacttcacagag

SEQ ID NO: 1418071 - DNA, 25 bp, Homo sapien
ttccaggagagtcccgcaggagatg

SEQ ID NO: 1418072 - DNA, 25 bp, Homo sapien
tgaaatgctttcctttggttgttgg

SEQ ID NO: 1418073 - DNA, 25 bp, Homo sapien
tccaactgaacttttgtgttctcta

SEQ ID NO: 1418074 - DNA, 25 bp, Homo sapien
gttctctaatgatactaacacggtg

SEQ ID NO: 1418075 - DNA, 25 bp, Homo sapien
acctgcaaagctctgctctgttttg

SEQ ID NO: 1418076 - DNA, 25 bp, Homo sapien
cacggtgtaggttttacagtctcct

SEQ ID NO: 1418077 - DNA, 25 bp, Homo sapien
ccaccacgcctaggttcctctcttt

SEQ ID NO: 1418078 - DNA, 25 bp, Homo sapien
caccacgcctaggttcctctctttt

SEQ ID NO: 1418079 - DNA, 25 bp, Homo sapien
atataactgctatgttggaattcac

SEQ ID NO: 1418080 - DNA, 25 bp, Homo sapien
aatgtgtccaccttttctgttcgca

SEQ ID NO: 1418081 - DNA, 25 bp, Homo sapien
ttctctatacatataactgctatgt

SEQ ID NO: 1418082 - DNA, 25 bp, Homo sapien
cactaataatccttcaagtattttc

SEQ ID NO: 1418083 - DNA, 25 bp, Homo sapien
ggatcctttggtattgaggaacaca

SEQ ID NO: 1418084 - DNA, 25 bp, Homo sapien
tgaggaacacattggttgctcacta

SEQ ID NO: 1418085 - DNA, 25 bp, Homo sapien
tcaccagtgagaacatttccaattg

SEQ ID NO: 1418086 - DNA, 25 bp, Homo sapien
aactggtcccctatctgctgctttg

SEQ ID NO: 1418087 - DNA, 25 bp, Homo sapien
gtccaggctggcctggatcattctc

SEQ ID NO: 1418088 - DNA, 25 bp, Homo sapien
caggctggcctggatcattctccag

SEQ ID NO: 1418089 - DNA, 25 bp, Homo sapien
gaaaaagggccttctgtccaggctg

SEQ ID NO: 1418090 - DNA, 25 bp, Homo sapien
agaaaaagggccttctgtccaggct

SEQ ID NO: 1418091 - DNA, 25 bp, Homo sapien
tactccttcttcaagcaggtgtcca

SEQ ID NO: 1418092 - DNA, 25 bp, Homo sapien
actccttcttcaagcaggtgtccat

SEQ ID NO: 1418093 - DNA, 25 bp, Homo sapien
gtactccttcttcaagcaggtgtcc

SEQ ID NO: 1418094 - DNA, 25 bp, Homo sapien
tttcctgttgatacctgcaatattt

SEQ ID NO: 1418095 - DNA, 25 bp, Homo sapien
cctgttgatacctgcaatattttaa

SEQ ID NO: 1418096 - DNA, 25 bp, Homo sapien
ctgttgatacctgcaatattttaaa

SEQ ID NO: 1418097 - DNA, 25 bp, Homo sapien
tatgatcttcacagcttaatctgat

SEQ ID NO: 1418098 - DNA, 25 bp, Homo sapien
atctgataacatgccaatacttagc

SEQ ID NO: 1418099 - DNA, 25 bp, Homo sapien
caatacttagcaaactgcatctgga

SEQ ID NO: 1418100 - DNA, 25 bp, Homo sapien
ttcagctgcactttgacattggaag

SEQ ID NO: 1418101 - DNA, 25 bp, Homo sapien
aaatgacaacgtctgtctggctggg

SEQ ID NO: 1418102 - DNA, 25 bp, Homo sapien
catgattgggtgtctagcttggaac

SEQ ID NO: 1418103 - DNA, 25 bp, Homo sapien
gcttatctgacaggacgtgctccct

SEQ ID NO: 1418104 - DNA, 25 bp, Homo sapien
gggcgagaacatggctttcacagcc

SEQ ID NO: 1418105 - DNA, 25 bp, Homo sapien
ggccacactctgctcagagtcagat

SEQ ID NO: 1418106 - DNA, 25 bp, Homo sapien
caacttccatggctaaggccacact

SEQ ID NO: 1418107 - DNA, 25 bp, Homo sapien
cattgattccggtggtattgatgtc

SEQ ID NO: 1418108 - DNA, 25 bp, Homo sapien
tattgatgtcatcagtactggaatt

SEQ ID NO: 1418109 - DNA, 25 bp, Homo sapien
ttcacaggcaccctcaacttgtatg

SEQ ID NO: 1418110 - DNA, 25 bp, Homo sapien
cacaggcaccctcaacttgtatgtg

SEQ ID NO: 1418111 - DNA, 25 bp, Homo sapien
atttctcatgaatcctcatcacttg

SEQ ID NO: 1418112 - DNA, 25 bp, Homo sapien
atgaatcctcatcacttgatttggg

SEQ ID NO: 1418113 - DNA, 25 bp, Homo sapien
aaggccatggctatagggctagtta

SEQ ID NO: 1418114 - DNA, 25 bp, Homo sapien
cattgtgatgcttccctgttattat

SEQ ID NO: 1418115 - DNA, 25 bp, Homo sapien
catccacagggtagaagaaagtact

SEQ ID NO: 1418116 - DNA, 25 bp, Homo sapien
gctagttatgagcagtgctgggtct

SEQ ID NO: 1418117 - DNA, 25 bp, Homo sapien
tgcccaccaaaagagccatctcatg

SEQ ID NO: 1418118 - DNA, 25 bp, Homo sapien
caagcatatgtgagactccaggatc

SEQ ID NO: 1418119 - DNA, 25 bp, Homo sapien
cccaccaaaagagccatctcatgga

SEQ ID NO: 1418120 - DNA, 25 bp, Homo sapien
tgtgttcccaagcatatgtgagact

SEQ ID NO: 1418121 - DNA, 25 bp, Homo sapien
tgaaagcaggcagaggacagcctct

SEQ ID NO: 1418122 - DNA, 25 bp, Homo sapien
aagcaggcagaggacagcctctcac

SEQ ID NO: 1418123 - DNA, 25 bp, Homo sapien
aaagcaggcagaggacagcctctca

SEQ ID NO: 1418124 - DNA, 25 bp, Homo sapien
ctgaaagcaggcagaggacagcctc

SEQ ID NO: 1418125 - DNA, 25 bp, Homo sapien
ttcagcagcaatgggctcctctctg

SEQ ID NO: 1418126 - DNA, 25 bp, Homo sapien
gggctcctctctgcgtggttgctga

SEQ ID NO: 1418127 - DNA, 25 bp, Homo sapien
cctctctgcgtggttgctgatgctg

SEQ ID NO: 1418128 - DNA, 25 bp, Homo sapien
cttcagcagcaatgggctcctctct

SEQ ID NO: 1418129 - DNA, 25 bp, Homo sapien
ggggctggtagtgtgtgggtgaata

SEQ ID NO: 1418130 - DNA, 25 bp, Homo sapien
ggctggtagtgtgtgggtgaatagg

SEQ ID NO: 1418131 - DNA, 25 bp, Homo sapien
ctggtagtgtgtgggtgaataggca

SEQ ID NO: 1418132 - DNA, 25 bp, Homo sapien
gaggggctggtagtgtgtgggtgaa

SEQ ID NO: 1418133 - DNA, 25 bp, Homo sapien
tgtgctagcctcttccagtgagtaa

SEQ ID NO: 1418134 - DNA, 25 bp, Homo sapien
gcatggtatgtgctagcctcttcca

SEQ ID NO: 1418135 - DNA, 25 bp, Homo sapien
cctcttccagtgagtaatgcagagc

SEQ ID NO: 1418136 - DNA, 25 bp, Homo sapien
tagcctcttccagtgagtaatgcag

SEQ ID NO: 1418137 - DNA, 25 bp, Homo sapien
tgaagccaccgggcatggcaaacat

SEQ ID NO: 1418138 - DNA, 25 bp, Homo sapien
agccaccgggcatggcaaacatcac

SEQ ID NO: 1418139 - DNA, 25 bp, Homo sapien
aagccaccgggcatggcaaacatca

SEQ ID NO: 1418140 - DNA, 25 bp, Homo sapien
tcatgaagccaccgggcatggcaaa

SEQ ID NO: 1418141 - DNA, 25 bp, Homo sapien
actcacactggggtcctttagggtg

SEQ ID NO: 1418142 - DNA, 25 bp, Homo sapien
cagctgaggacgtcctgaatcttca

SEQ ID NO: 1418143 - DNA, 25 bp, Homo sapien
gactcagctgaggacgtcctgaatc

SEQ ID NO: 1418144 - DNA, 25 bp, Homo sapien
ctgatccagcctcagactcagctga

SEQ ID NO: 1418145 - DNA, 25 bp, Homo sapien
taaaacaagaagataaggggatgtc

SEQ ID NO: 1418146 - DNA, 25 bp, Homo sapien
cacgtgtaaaccaacatgtggaacc

SEQ ID NO: 1418147 - DNA, 25 bp, Homo sapien
tcacatgtctactttcacgtgtaaa

SEQ ID NO: 1418148 - DNA, 25 bp, Homo sapien
gccactcaagggcattaaagatata

SEQ ID NO: 1418149 - DNA, 25 bp, Homo sapien
gcatatgtccattctagggatgtca

SEQ ID NO: 1418150 - DNA, 25 bp, Homo sapien
tggaatttggcacgttctcggagtt

SEQ ID NO: 1418151 - DNA, 25 bp, Homo sapien
tttggaatttggcacgttctcggag

SEQ ID NO: 1418152 - DNA, 25 bp, Homo sapien
gaatttggcacgttctcggagttac

SEQ ID NO: 1418153 - DNA, 25 bp, Homo sapien
atttggcacgttctcggagttacct

SEQ ID NO: 1418154 - DNA, 25 bp, Homo sapien
tttggttccggagacccctctcata

SEQ ID NO: 1418155 - DNA, 25 bp, Homo sapien
ctctcatagccagtaaaaatggcct

SEQ ID NO: 1418156 - DNA, 25 bp, Homo sapien
ccaagatggcgggaagagaaaaaca

SEQ ID NO: 1418157 - DNA, 25 bp, Homo sapien
gagccaagatggcgggaagagaaaa

SEQ ID NO: 1418158 - DNA, 25 bp, Homo sapien
tgccttgagttcacccctccattga

SEQ ID NO: 1418159 - DNA, 25 bp, Homo sapien
gccccaatgtactagaggtagggct

SEQ ID NO: 1418160 - DNA, 25 bp, Homo sapien
gagatgagtccttgccccaatgtac

SEQ ID NO: 1418161 - DNA, 25 bp, Homo sapien
gggaggtagaatctgccttgagttc

SEQ ID NO: 1418162 - DNA, 25 bp, Homo sapien
taatatattgcaggaagtttcaccc

SEQ ID NO: 1418163 - DNA, 25 bp, Homo sapien
cacccataaaaggtgatggctgcgc

SEQ ID NO: 1418164 - DNA, 25 bp, Homo sapien
gctggacgcctgtaacttatgacct

SEQ ID NO: 1418165 - DNA, 25 bp, Homo sapien
gtgggtctcgcgagcaagtccatca

SEQ ID NO: 1418166 - DNA, 25 bp, Homo sapien
gcctcttgctccctactcttgcacc

SEQ ID NO: 1418167 - DNA, 25 bp, Homo sapien
agtggtgtggagacttcccgttcct

SEQ ID NO: 1418168 - DNA, 25 bp, Homo sapien
ttgctccctactcttgcaccatttt

SEQ ID NO: 1418169 - DNA, 25 bp, Homo sapien
ggtgtggagacttcccgttcctgct

SEQ ID NO: 1418170 - DNA, 25 bp, Homo sapien
ctgagacacacagaatcatctgctt

SEQ ID NO: 1418171 - DNA, 25 bp, Homo sapien
ctgtttgccaactaacccattttgc

SEQ ID NO: 1418172 - DNA, 25 bp, Homo sapien
gtttgccaactaacccattttgcat

SEQ ID NO: 1418173 - DNA, 25 bp, Homo sapien
tgtttgccaactaacccattttgca

SEQ ID NO: 1418174 - DNA, 25 bp, Homo sapien
ttcctgagaagaaacaatgcacacc

SEQ ID NO: 1418175 - DNA, 25 bp, Homo sapien
tcctgagaagaaacaatgcacacca

SEQ ID NO: 1418176 - DNA, 25 bp, Homo sapien
tgagaagaaacaatgcacaccatct

SEQ ID NO: 1418177 - DNA, 25 bp, Homo sapien
gcttcctgagaagaaacaatgcaca

SEQ ID NO: 1418178 - DNA, 25 bp, Homo sapien
ctgatgtcgggctttaacttctctt

SEQ ID NO: 1418179 - DNA, 25 bp, Homo sapien
gatgtcgggctttaacttctcttca

SEQ ID NO: 1418180 - DNA, 25 bp, Homo sapien
tgtcgggctttaacttctcttcact

SEQ ID NO: 1418181 - DNA, 25 bp, Homo sapien
cgggctttaacttctcttcacttgc

SEQ ID NO: 1418182 - DNA, 25 bp, Homo sapien
caagttcgtgtatggcagctttgcc

SEQ ID NO: 1418183 - DNA, 25 bp, Homo sapien
aagttcgtgtatggcagctttgcca

SEQ ID NO: 1418184 - DNA, 25 bp, Homo sapien
gttcgtgtatggcagctttgccagc

SEQ ID NO: 1418185 - DNA, 25 bp, Homo sapien
ttcgtgtatggcagctttgccagct

SEQ ID NO: 1418186 - DNA, 25 bp, Homo sapien
ggatgcaagagtggacagatgctca

SEQ ID NO: 1418187 - DNA, 25 bp, Homo sapien
gccaagtgaccaatgagagtcaggg

SEQ ID NO: 1418188 - DNA, 25 bp, Homo sapien
cattagccaagtgaccaatgagagt

SEQ ID NO: 1418189 - DNA, 25 bp, Homo sapien
aagagtggacagatgctcattagcc

SEQ ID NO: 1418190 - DNA, 25 bp, Homo sapien
gaagccatgtctgttctgattcata

SEQ ID NO: 1418191 - DNA, 25 bp, Homo sapien
tccctgcagtgatgggtgaatgcca

SEQ ID NO: 1418192 - DNA, 25 bp, Homo sapien
cacaggcagagtggaagtatcagac

SEQ ID NO: 1418193 - DNA, 25 bp, Homo sapien
catattgtcaactgctggagcctcc

SEQ ID NO: 1418194 - DNA, 25 bp, Homo sapien
tacatgatgggcaacttttgatgag

SEQ ID NO: 1418195 - DNA, 25 bp, Homo sapien
ttgatgagaggagctagaactgagt

SEQ ID NO: 1418196 - DNA, 25 bp, Homo sapien
ctttggccccttgtagaagacttga

SEQ ID NO: 1418197 - DNA, 25 bp, Homo sapien
tagaactgagttgacagcagtgctg

SEQ ID NO: 1418198 - DNA, 25 bp, Homo sapien
ttgggggaatgcgtacattatgaaa

SEQ ID NO: 1418199 - DNA, 25 bp, Homo sapien
tgggggaatgcgtacattatgaaaa

SEQ ID NO: 1418200 - DNA, 25 bp, Homo sapien
cttgggggaatgcgtacattatgaa

SEQ ID NO: 1418201 - DNA, 25 bp, Homo sapien
gggggaatgcgtacattatgaaaaa

SEQ ID NO: 1418202 - DNA, 25 bp, Homo sapien
ctttgcctaaagagcttgtagatac

SEQ ID NO: 1418203 - DNA, 25 bp, Homo sapien
aaaaatgacttgtctggccctgatg

SEQ ID NO: 1418204 - DNA, 25 bp, Homo sapien
taaaaattttaatagcccaggatga

SEQ ID NO: 1418205 - DNA, 25 bp, Homo sapien
ggacacaaatcaattagatgatgac

SEQ ID NO: 1418206 - DNA, 25 bp, Homo sapien
ggccctgatgcctttagatttacat

SEQ ID NO: 1418207 - DNA, 25 bp, Homo sapien
ccagctgatggtgttctttagagcg

SEQ ID NO: 1418208 - DNA, 25 bp, Homo sapien
ttctcattctgccagctgatggtgt

SEQ ID NO: 1418209 - DNA, 25 bp, Homo sapien
gctgttctcattctgccagctgatg

SEQ ID NO: 1418210 - DNA, 25 bp, Homo sapien
ctcattctgccagctgatggtgttc

SEQ ID NO: 1418211 - DNA, 25 bp, Homo sapien
gccgggaagcattatctttagaaaa

SEQ ID NO: 1418212 - DNA, 25 bp, Homo sapien
cattatctttagaaaatagtccgtc

SEQ ID NO: 1418213 - DNA, 25 bp, Homo sapien
ctgtggagatgccgggaagcattat

SEQ ID NO: 1418214 - DNA, 25 bp, Homo sapien
aatagtccgtccctattttcattca

SEQ ID NO: 1418215 - DNA, 25 bp, Homo sapien
tgttggggaacttccaaaggcaata

SEQ ID NO: 1418216 - DNA, 25 bp, Homo sapien
cagcagcactctcagacagttgttg

SEQ ID NO: 1418217 - DNA, 25 bp, Homo sapien
taaaagtctgcatgtccaaagataa

SEQ ID NO: 1418218 - DNA, 25 bp, Homo sapien
gcagcactctcagacagttgttggg

SEQ ID NO: 1418219 - DNA, 25 bp, Homo sapien
tgttaatcttctctgtatccttcca

SEQ ID NO: 1418220 - DNA, 25 bp, Homo sapien
acatttcatccttgcacagaggcca

SEQ ID NO: 1418221 - DNA, 25 bp, Homo sapien
gtatatgtgctgctgaagtgagcac

SEQ ID NO: 1418222 - DNA, 25 bp, Homo sapien
attttagtatatgtgctgctgaagt

SEQ ID NO: 1418223 - DNA, 25 bp, Homo sapien
agctttcaggagcaggttctactcc

SEQ ID NO: 1418224 - DNA, 25 bp, Homo sapien
ttcctcctctttgggagtcagctgc

SEQ ID NO: 1418225 - DNA, 25 bp, Homo sapien
gctcccccacgtcatagctttcagg

SEQ ID NO: 1418226 - DNA, 25 bp, Homo sapien
gggacaagacaggagctgccctgct

SEQ ID NO: 1418227 - DNA, 25 bp, Homo sapien
ctgtgtgtccactgtcctaagtatt

SEQ ID NO: 1418228 - DNA, 25 bp, Homo sapien
attctctgtgcgtgtttggatgcgc

SEQ ID NO: 1418229 - DNA, 25 bp, Homo sapien
ggatgcgcatataatgcattcaaat

SEQ ID NO: 1418230 - DNA, 25 bp, Homo sapien
aactgcaacgataaatgacttcatg

SEQ ID NO: 1418231 - DNA, 25 bp, Homo sapien
ccctgggggctggtgataacctgca

SEQ ID NO: 1418232 - DNA, 25 bp, Homo sapien
ctgcagatggatgcactgtctgatg

SEQ ID NO: 1418233 - DNA, 25 bp, Homo sapien
aagcccaggtctggagcaggattga

SEQ ID NO: 1418234 - DNA, 25 bp, Homo sapien
cccaggtctggagcaggattgagcc

SEQ ID NO: 1418235 - DNA, 25 bp, Homo sapien
tcctcaagcagcagacgcaaagcaa

SEQ ID NO: 1418236 - DNA, 25 bp, Homo sapien
agtggctccttatatcctcaagcag

SEQ ID NO: 1418237 - DNA, 25 bp, Homo sapien
ttatatcctcaagcagcagacgcaa

SEQ ID NO: 1418238 - DNA, 25 bp, Homo sapien
tccttatatcctcaagcagcagacg

SEQ ID NO: 1418239 - DNA, 25 bp, Homo sapien
tgtgcttaagcagctatctaggcat

SEQ ID NO: 1418240 - DNA, 25 bp, Homo sapien
gaaagggtctagcatacccaagatt

SEQ ID NO: 1418241 - DNA, 25 bp, Homo sapien
gtggaaagataacccatagaatgga

SEQ ID NO: 1418242 - DNA, 25 bp, Homo sapien
catcacagaaacctatgtcacacca

SEQ ID NO: 1418243 - DNA, 25 bp, Homo sapien
gggatgcaagtaggatctctgcccc

SEQ ID NO: 1418244 - DNA, 25 bp, Homo sapien
catgaaagctaatcccctgtgtgtg

SEQ ID NO: 1418245 - DNA, 25 bp, Homo sapien
agaaaccgtatataggaacacctgc

SEQ ID NO: 1418246 - DNA, 25 bp, Homo sapien
caggcagatttcagttaaggcaaca

SEQ ID NO: 1418247 - DNA, 25 bp, Homo sapien
gaaacttttaggcatcacacgagaa

SEQ ID NO: 1418248 - DNA, 25 bp, Homo sapien
ttttaggcatcacacgagaatagca

SEQ ID NO: 1418249 - DNA, 25 bp, Homo sapien
ctagtatggaaacttttaggcatca

SEQ ID NO: 1418250 - DNA, 25 bp, Homo sapien
catcacacgagaatagcaaagtctt

SEQ ID NO: 1418251 - DNA, 25 bp, Homo sapien
gacagctttaagtactggcagcaga

SEQ ID NO: 1418252 - DNA, 25 bp, Homo sapien
cagctttaagtactggcagcagaaa

SEQ ID NO: 1418253 - DNA, 25 bp, Homo sapien
tcagacagctttaagtactggcagc

SEQ ID NO: 1418254 - DNA, 25 bp, Homo sapien
gctttaagtactggcagcagaaatg

SEQ ID NO: 1418255 - DNA, 25 bp, Homo sapien
ttgccaaagtgtgtttctgagggag

SEQ ID NO: 1418256 - DNA, 25 bp, Homo sapien
cattttgccaaagtgtgtttctgag

SEQ ID NO: 1418257 - DNA, 25 bp, Homo sapien
tcattttgccaaagtgtgtttctga

SEQ ID NO: 1418258 - DNA, 25 bp, Homo sapien
ttttgccaaagtgtgtttctgaggg

SEQ ID NO: 1418259 - DNA, 25 bp, Homo sapien
ggtgtttcagtcagcctcattattt

SEQ ID NO: 1418260 - DNA, 25 bp, Homo sapien
gaggtgtttcagtcagcctcattat

SEQ ID NO: 1418261 - DNA, 25 bp, Homo sapien
gtgtttcagtcagcctcattatttg

SEQ ID NO: 1418262 - DNA, 25 bp, Homo sapien
ctgaggtgtttcagtcagcctcatt

SEQ ID NO: 1418263 - DNA, 25 bp, Homo sapien
ctcttagtggagtaacgtgcagtaa

SEQ ID NO: 1418264 - DNA, 25 bp, Homo sapien
gctccaaacagtgagaccacaggtc

SEQ ID NO: 1418265 - DNA, 25 bp, Homo sapien
tgagtcttactccagatgcagaatc

SEQ ID NO: 1418266 - DNA, 25 bp, Homo sapien
cagaggcctagggaatttatggacc

SEQ ID NO: 1418267 - DNA, 25 bp, Homo sapien
caaagtcagtgcacctggtagtgtg

SEQ ID NO: 1418268 - DNA, 25 bp, Homo sapien
tcgtggtggtaaccatggcacccca

SEQ ID NO: 1418269 - DNA, 25 bp, Homo sapien
catttctaagtacatggccggcaca

SEQ ID NO: 1418270 - DNA, 25 bp, Homo sapien
cggcacaaccaccaaaagcagctgt

SEQ ID NO: 1418271 - DNA, 25 bp, Homo sapien
agcagctgtggtcgcaagcaagtca

SEQ ID NO: 1418272 - DNA, 25 bp, Homo sapien
aatttcatagctctaaccaccttac

SEQ ID NO: 1418273 - DNA, 25 bp, Homo sapien
aatggacccaggtctttgtccacaa

SEQ ID NO: 1418274 - DNA, 25 bp, Homo sapien
tccacaaatttcatagctctaacca

SEQ ID NO: 1418275 - DNA, 25 bp, Homo sapien
ggaatggacccaggtctttgtccac

SEQ ID NO: 1418276 - DNA, 25 bp, Homo sapien
aactcgggtccttgccgccagggca

SEQ ID NO: 1418277 - DNA, 25 bp, Homo sapien
gggcacacagagtcaatcccctctg

SEQ ID NO: 1418278 - DNA, 25 bp, Homo sapien
ccttcatgggggttggctctttcac

SEQ ID NO: 1418279 - DNA, 25 bp, Homo sapien
catcgtcgtctcctgaaaatggaaa

SEQ ID NO: 1418280 - DNA, 25 bp, Homo sapien
gtggggatgccaaaatgggcaccat

SEQ ID NO: 1418281 - DNA, 25 bp, Homo sapien
tggaggtggggatgccaaaatgggc

SEQ ID NO: 1418282 - DNA, 25 bp, Homo sapien
aggtggggatgccaaaatgggcacc

SEQ ID NO: 1418283 - DNA, 25 bp, Homo sapien
ggaggtggggatgccaaaatgggca

SEQ ID NO: 1418284 - DNA, 25 bp, Homo sapien
cctcatactgcatttagagatcctt

SEQ ID NO: 1418285 - DNA, 25 bp, Homo sapien
aggccttctgtatgtccaaagcctc

SEQ ID NO: 1418286 - DNA, 25 bp, Homo sapien
ctcatactgcatttagagatccttg

SEQ ID NO: 1418287 - DNA, 25 bp, Homo sapien
gtgttctcatagggcggttcatttt

SEQ ID NO: 1418288 - DNA, 25 bp, Homo sapien
gaaatgcaaatactcgaatgatgac

SEQ ID NO: 1418289 - DNA, 25 bp, Homo sapien
catagggcggttcattttgcttgtg

SEQ ID NO: 1418290 - DNA, 25 bp, Homo sapien
caaatactcgaatgatgacagatgg

SEQ ID NO: 1418291 - DNA, 25 bp, Homo sapien
ctaagctctgggggaaaagctgggt

SEQ ID NO: 1418292 - DNA, 25 bp, Homo sapien
gggtattcccctggggctgactcca

SEQ ID NO: 1418293 - DNA, 25 bp, Homo sapien
tgactccaggacttggaactatggg

SEQ ID NO: 1418294 - DNA, 25 bp, Homo sapien
gggaattcttgacactgcagacagg

SEQ ID NO: 1418295 - DNA, 25 bp, Homo sapien
tttggggaattcttgacactgcaga

SEQ ID NO: 1418296 - DNA, 25 bp, Homo sapien
tggagagcggctgtgttccaaggct

SEQ ID NO: 1418297 - DNA, 25 bp, Homo sapien
gagcggctgtgttccaaggctcaca

SEQ ID NO: 1418298 - DNA, 25 bp, Homo sapien
gagagcggctgtgttccaaggctca

SEQ ID NO: 1418299 - DNA, 25 bp, Homo sapien
tccaaggctcacaggctcatcctgg

SEQ ID NO: 1418300 - DNA, 25 bp, Homo sapien
ggagaaccgagccgtgtggcagcca

SEQ ID NO: 1418301 - DNA, 25 bp, Homo sapien
agggggagaaccgagccgtgtggca

SEQ ID NO: 1418302 - DNA, 25 bp, Homo sapien
ggggagaaccgagccgtgtggcagc

SEQ ID NO: 1418303 - DNA, 25 bp, Homo sapien
gagaaccgagccgtgtggcagccat

SEQ ID NO: 1418304 - DNA, 25 bp, Homo sapien
gcacacttgtatcaccaggaacatc

SEQ ID NO: 1418305 - DNA, 25 bp, Homo sapien
gagcacacttgtatcaccaggaaca

SEQ ID NO: 1418306 - DNA, 25 bp, Homo sapien
tgcagagcacacttgtatcaccagg

SEQ ID NO: 1418307 - DNA, 25 bp, Homo sapien
cagagcacacttgtatcaccaggaa

SEQ ID NO: 1418308 - DNA, 25 bp, Homo sapien
ccagggtaggcttactggcatccat

SEQ ID NO: 1418309 - DNA, 25 bp, Homo sapien
ggccaccagggtaggcttactggca

SEQ ID NO: 1418310 - DNA, 25 bp, Homo sapien
caccagggtaggcttactggcatcc

SEQ ID NO: 1418311 - DNA, 25 bp, Homo sapien
cctgggccaccagggtaggcttact

SEQ ID NO: 1418312 - DNA, 25 bp, Homo sapien
gagtgagtttcataatcctttagtt

SEQ ID NO: 1418313 - DNA, 25 bp, Homo sapien
gagtttcataatcctttagttctaa

SEQ ID NO: 1418314 - DNA, 25 bp, Homo sapien
ttgcattgtgttctaagagactgtt

SEQ ID NO: 1418315 - DNA, 25 bp, Homo sapien
tctaattttattgcattgtgttcta

SEQ ID NO: 1418316 - DNA, 25 bp, Homo sapien
cacattgtgttaaaggaatccttgc

SEQ ID NO: 1418317 - DNA, 25 bp, Homo sapien
tgttcctgtgctagagtgaccctca

SEQ ID NO: 1418318 - DNA, 25 bp, Homo sapien
tgccgtcctgtcatctgttcctgtg

SEQ ID NO: 1418319 - DNA, 25 bp, Homo sapien
agaagccctttgcaactcgggaccg

SEQ ID NO: 1418320 - DNA, 25 bp, Homo sapien
gcaccaggtttttggcaatcttttg

SEQ ID NO: 1418321 - DNA, 25 bp, Homo sapien
cttggccctgtccgtttaagaatat

SEQ ID NO: 1418322 - DNA, 25 bp, Homo sapien
gccctgtccgtttaagaatatttga

SEQ ID NO: 1418323 - DNA, 25 bp, Homo sapien
ttgacttggccctgtccgtttaaga

SEQ ID NO: 1418324 - DNA, 25 bp, Homo sapien
cattctggtcatatcctaaaaggct

SEQ ID NO: 1418325 - DNA, 25 bp, Homo sapien
aaaggctaaaaatgcctgccctagg

SEQ ID NO: 1418326 - DNA, 25 bp, Homo sapien
ccaagcaactccaaatagggtgata

SEQ ID NO: 1418327 - DNA, 25 bp, Homo sapien
tgtatcaggaaacattaaggcttgc

SEQ ID NO: 1418328 - DNA, 25 bp, Homo sapien
gctctgggctgaacaaaaaggtgga

SEQ ID NO: 1418329 - DNA, 25 bp, Homo sapien
agcagactgcttcccggaaagggct

SEQ ID NO: 1418330 - DNA, 25 bp, Homo sapien
ggagcagccagtccaacataacctc

SEQ ID NO: 1418331 - DNA, 25 bp, Homo sapien
gtgcaagcttgaagaaccatccgac

SEQ ID NO: 1418332 - DNA, 25 bp, Homo sapien
tgtctgaactagcaggctggcgcac

SEQ ID NO: 1418333 - DNA, 25 bp, Homo sapien
ctccagggaccgggaagaagtgtct

SEQ ID NO: 1418334 - DNA, 25 bp, Homo sapien
gcctctgatttgtcacacagggaat

SEQ ID NO: 1418335 - DNA, 25 bp, Homo sapien
gatgaagaagtcacaggcaacccaa

SEQ ID NO: 1418336 - DNA, 25 bp, Homo sapien
ggttaaaatgtcttgcctgaattcc

SEQ ID NO: 1418337 - DNA, 25 bp, Homo sapien
cttttctttgccgaatttgatggca

SEQ ID NO: 1418338 - DNA, 25 bp, Homo sapien
aatttgatggcagtgatcaagcagc

SEQ ID NO: 1418339 - DNA, 25 bp, Homo sapien
aggcagctgacggttaaaatgtctt

SEQ ID NO: 1418340 - DNA, 25 bp, Homo sapien
tgctggcacagtaccgtgtcatgag

SEQ ID NO: 1418341 - DNA, 25 bp, Homo sapien
ggcacagtaccgtgtcatgagaaca

SEQ ID NO: 1418342 - DNA, 25 bp, Homo sapien
cacagtaccgtgtcatgagaacaga

SEQ ID NO: 1418343 - DNA, 25 bp, Homo sapien
catgagaacagagcgtgctctgcat

SEQ ID NO: 1418344 - DNA, 25 bp, Homo sapien
aactgtccatcaagtgtgacccaga

SEQ ID NO: 1418345 - DNA, 25 bp, Homo sapien
gacccagaggcccagggcacagtat

SEQ ID NO: 1418346 - DNA, 25 bp, Homo sapien
acccagaggcccagggcacagtata

SEQ ID NO: 1418347 - DNA, 25 bp, Homo sapien
tgtccatcaagtgtgacccagaggc

SEQ ID NO: 1418348 - DNA, 25 bp, Homo sapien
tctgggtgaaaagctaaatgcagca

SEQ ID NO: 1418349 - DNA, 25 bp, Homo sapien
tgatcctcaggtttttcaattcccc

SEQ ID NO: 1418350 - DNA, 25 bp, Homo sapien
gctaggaacagaggttgccaagatg

SEQ ID NO: 1418351 - DNA, 25 bp, Homo sapien
gcagcaggtcgtttctgatcctcag

SEQ ID NO: 1418352 - DNA, 25 bp, Homo sapien
agtagtgtgcaagggataaacttcc

SEQ ID NO: 1418353 - DNA, 25 bp, Homo sapien
ccaaggttttgtggattagattaag

SEQ ID NO: 1418354 - DNA, 25 bp, Homo sapien
ggattagattaagccggatatgcat

SEQ ID NO: 1418355 - DNA, 25 bp, Homo sapien
gtgtgcaagggataaacttccaagg

SEQ ID NO: 1418356 - DNA, 25 bp, Homo sapien
tatatgtgtagcagtcactgtgcaa

SEQ ID NO: 1418357 - DNA, 25 bp, Homo sapien
tggtcaacatgtttgagcagttggt

SEQ ID NO: 1418358 - DNA, 25 bp, Homo sapien
tgtgcaagtcaataaaagggtacac

SEQ ID NO: 1418359 - DNA, 25 bp, Homo sapien
gcaagtcaataaaagggtacacaac

SEQ ID NO: 1418360 - DNA, 25 bp, Homo sapien
gcctagaatgtacttccccaactta

SEQ ID NO: 1418361 - DNA, 25 bp, Homo sapien
cccaacttatgcttgttgaagttca

SEQ ID NO: 1418362 - DNA, 25 bp, Homo sapien
aatgtacttccccaacttatgcttg

SEQ ID NO: 1418363 - DNA, 25 bp, Homo sapien
ctctgcctagaatgtacttccccaa

SEQ ID NO: 1418364 - DNA, 25 bp, Homo sapien
tgggagttctagcaccaacatcctt

SEQ ID NO: 1418365 - DNA, 25 bp, Homo sapien
gcaggagaagcccacttgctgccaa

SEQ ID NO: 1418366 - DNA, 25 bp, Homo sapien
tccacggctattcctgcaggagaag

SEQ ID NO: 1418367 - DNA, 25 bp, Homo sapien
tgccaacgggcctgcctgccatcat

SEQ ID NO: 1418368 - DNA, 25 bp, Homo sapien
ttctgcctctggtttgtcctcctcc

SEQ ID NO: 1418369 - DNA, 25 bp, Homo sapien
tcttctggggaatactgcaacccgt

SEQ ID NO: 1418370 - DNA, 25 bp, Homo sapien
tcctcctccagtcaatcctccccat

SEQ ID NO: 1418371 - DNA, 25 bp, Homo sapien
ggaatactgcaacccgtccttctgc

SEQ ID NO: 1418372 - DNA, 25 bp, Homo sapien
tgtactcagtattccctcattattt

SEQ ID NO: 1418373 - DNA, 25 bp, Homo sapien
gcacatgcctgacatcccatagggc

SEQ ID NO: 1418374 - DNA, 25 bp, Homo sapien
acatgcctgacatcccatagggctg

SEQ ID NO: 1418375 - DNA, 25 bp, Homo sapien
gtactcagtattccctcattatttt

SEQ ID NO: 1418376 - DNA, 25 bp, Homo sapien
cattcccattgctctctaccatggc

SEQ ID NO: 1418377 - DNA, 25 bp, Homo sapien
ttcccattgctctctaccatggcat

SEQ ID NO: 1418378 - DNA, 25 bp, Homo sapien
attcccattgctctctaccatggca

SEQ ID NO: 1418379 - DNA, 25 bp, Homo sapien
gacagcctaggcacaggccctttga

SEQ ID NO: 1418380 - DNA, 25 bp, Homo sapien
cgtgaaggctcaacctgtggatcca

SEQ ID NO: 1418381 - DNA, 25 bp, Homo sapien
ggctctgtaagacacacgctgagat

SEQ ID NO: 1418382 - DNA, 25 bp, Homo sapien
gaggaatttcctatgacctgactcc

SEQ ID NO: 1418383 - DNA, 25 bp, Homo sapien
tgccagagtgatagggacgtgtctc

SEQ ID NO: 1418384 - DNA, 25 bp, Homo sapien
tgaaaacagaatgaaccccagcact

SEQ ID NO: 1418385 - DNA, 25 bp, Homo sapien
ccatatgggagcctagtcacagaac

SEQ ID NO: 1418386 - DNA, 25 bp, Homo sapien
tggcaagccatagaaagcaggcccg

SEQ ID NO: 1418387 - DNA, 25 bp, Homo sapien
cccagcttctgaggttgctaggaaa

SEQ ID NO: 1418388 - DNA, 25 bp, Homo sapien
tgctaggaaacaatcacccaggtta

SEQ ID NO: 1418389 - DNA, 25 bp, Homo sapien
tcgctatccaggtcatggaaaaggg

SEQ ID NO: 1418390 - DNA, 25 bp, Homo sapien
actgagggaggtgtcgtcgctatcc

SEQ ID NO: 1418391 - DNA, 25 bp, Homo sapien
ttctgtagcactgatactgctgatc

SEQ ID NO: 1418392 - DNA, 25 bp, Homo sapien
tctctggcatgaagcgcaagacttg

SEQ ID NO: 1418393 - DNA, 25 bp, Homo sapien
ttaattaaggccttctgtagcactg

SEQ ID NO: 1418394 - DNA, 25 bp, Homo sapien
caagacttgcaattcaatgacaaca

SEQ ID NO: 1418395 - DNA, 25 bp, Homo sapien
accctgtcggaagggatctgagctg

SEQ ID NO: 1418396 - DNA, 25 bp, Homo sapien
gagaccctgtcggaagggatctgag

SEQ ID NO: 1418397 - DNA, 25 bp, Homo sapien
agggatctgagctgtagacactctg

SEQ ID NO: 1418398 - DNA, 25 bp, Homo sapien
agagccgtgtaggggttcatgattc

SEQ ID NO: 1418399 - DNA, 25 bp, Homo sapien
cccagcactcccaccaccgtttgtc

SEQ ID NO: 1418400 - DNA, 25 bp, Homo sapien
agcactcccaccaccgtttgtctga

SEQ ID NO: 1418401 - DNA, 25 bp, Homo sapien
gcactcccaccaccgtttgtctgag

SEQ ID NO: 1418402 - DNA, 25 bp, Homo sapien
cagcactcccaccaccgtttgtctg

SEQ ID NO: 1418403 - DNA, 25 bp, Homo sapien
catctgtgacatagggataataaca

SEQ ID NO: 1418404 - DNA, 25 bp, Homo sapien
ttctccactcgcctccaggaatggg

SEQ ID NO: 1418405 - DNA, 25 bp, Homo sapien
agtcagcatgtatgagaacaccaat

SEQ ID NO: 1418406 - DNA, 25 bp, Homo sapien
cgatctagggccacattcaatcttg

SEQ ID NO: 1418407 - DNA, 25 bp, Homo sapien
tgctgctgtcgcctggccagcttct

SEQ ID NO: 1418408 - DNA, 25 bp, Homo sapien
agcctctgggtgttctgctgatctt

SEQ ID NO: 1418409 - DNA, 25 bp, Homo sapien
agagctcagcctctgggtgttctgc

SEQ ID NO: 1418410 - DNA, 25 bp, Homo sapien
gctgctgtcgcctggccagcttctt

SEQ ID NO: 1418411 - DNA, 25 bp, Homo sapien
ctggacgacacggacactcagccct

SEQ ID NO: 1418412 - DNA, 25 bp, Homo sapien
acacctggacgacacggacactcag

SEQ ID NO: 1418413 - DNA, 25 bp, Homo sapien
gaaccacacctggacgacacggaca

SEQ ID NO: 1418414 - DNA, 25 bp, Homo sapien
ggacgacacggacactcagccctgt

SEQ ID NO: 1418415 - DNA, 25 bp, Homo sapien
ggagatggataacagagccacccac

SEQ ID NO: 1418416 - DNA, 25 bp, Homo sapien
ctggagcagtcgcttggacacagga

SEQ ID NO: 1418417 - DNA, 25 bp, Homo sapien
tgacaactggagcagtcgcttggac

SEQ ID NO: 1418418 - DNA, 25 bp, Homo sapien
gtgactggaaacatggtgacaactg

SEQ ID NO: 1418419 - DNA, 25 bp, Homo sapien
atgaatgaatccccaaaccaccaca

SEQ ID NO: 1418420 - DNA, 25 bp, Homo sapien
tgaatccccaaaccaccacaccaag

SEQ ID NO: 1418421 - DNA, 25 bp, Homo sapien
atccccaaaccaccacaccaagtgg

SEQ ID NO: 1418422 - DNA, 25 bp, Homo sapien
aatgaatccccaaaccaccacacca

SEQ ID NO: 1418423 - DNA, 25 bp, Homo sapien
ggccttgaatgctcgcctctgttga

SEQ ID NO: 1418424 - DNA, 25 bp, Homo sapien
cttggaggatacttcaaatgaggcc

SEQ ID NO: 1418425 - DNA, 25 bp, Homo sapien
tgccccatgggctgacttgcagaga

SEQ ID NO: 1418426 - DNA, 25 bp, Homo sapien
tcaagatggttctcggacgtttggg

SEQ ID NO: 1418427 - DNA, 25 bp, Homo sapien
tcaactgccctcttttctctggtga

SEQ ID NO: 1418428 - DNA, 25 bp, Homo sapien
agagctcaactgccctcttttctct

SEQ ID NO: 1418429 - DNA, 25 bp, Homo sapien
gctcaactgccctcttttctctggt

SEQ ID NO: 1418430 - DNA, 25 bp, Homo sapien
aactgccctcttttctctggtgaac

SEQ ID NO: 1418431 - DNA, 25 bp, Homo sapien
ggctgctccttccttctctccgcat

SEQ ID NO: 1418432 - DNA, 25 bp, Homo sapien
cacaggtggctgctccttccttctc

SEQ ID NO: 1418433 - DNA, 25 bp, Homo sapien
gtggctgctccttccttctctccgc

SEQ ID NO: 1418434 - DNA, 25 bp, Homo sapien
ctgctccttccttctctccgcatcc

SEQ ID NO: 1418435 - DNA, 25 bp, Homo sapien
cggagattcatttcaggttgttgga

SEQ ID NO: 1418436 - DNA, 25 bp, Homo sapien
ccaacggcccataaacagggcaaga

SEQ ID NO: 1418437 - DNA, 25 bp, Homo sapien
atcccaacggcccataaacagggca

SEQ ID NO: 1418438 - DNA, 25 bp, Homo sapien
tgtggggcctcggagattcatttca

SEQ ID NO: 1418439 - DNA, 25 bp, Homo sapien
ctaggaggcgagggtgagggagggg

SEQ ID NO: 1418440 - DNA, 25 bp, Homo sapien
gtgagggaggggatgagagaccttc

SEQ ID NO: 1418441 - DNA, 25 bp, Homo sapien
taggaggcgagggtgagggagggga

SEQ ID NO: 1418442 - DNA, 25 bp, Homo sapien
agggaggggatgagagaccttcatg

SEQ ID NO: 1418443 - DNA, 25 bp, Homo sapien
cctccagctgccccttgctgcaaca

SEQ ID NO: 1418444 - DNA, 25 bp, Homo sapien
ctccagctgccccttgctgcaacat

SEQ ID NO: 1418445 - DNA, 25 bp, Homo sapien
aaatcagggttcaggtagcgacggt

SEQ ID NO: 1418446 - DNA, 25 bp, Homo sapien
gagtcagctcagtccaaaggaaatc

SEQ ID NO: 1418447 - DNA, 25 bp, Homo sapien
cgacggtgtccgtgcgtttcttcac

SEQ ID NO: 1418448 - DNA, 25 bp, Homo sapien
tcttcactagtgcatgtgcgaggag

SEQ ID NO: 1418449 - DNA, 25 bp, Homo sapien
tcagcaccaaggctctgcaactgga

SEQ ID NO: 1418450 - DNA, 25 bp, Homo sapien
tactgcgttctcttctaactcgagt

SEQ ID NO: 1418451 - DNA, 25 bp, Homo sapien
taactcgagtctctgtggttcagca

SEQ ID NO: 1418452 - DNA, 25 bp, Homo sapien
ggctgattaaggtatttcaactcca

SEQ ID NO: 1418453 - DNA, 25 bp, Homo sapien
ctagtaaggtcacatagatgttacc

SEQ ID NO: 1418454 - DNA, 25 bp, Homo sapien
gcttggaaatggactagaattggca

SEQ ID NO: 1418455 - DNA, 25 bp, Homo sapien
tggcaatggcaagaactagtaaggt

SEQ ID NO: 1418456 - DNA, 25 bp, Homo sapien
gatgttacctaattggatctcacag

SEQ ID NO: 1418457 - DNA, 25 bp, Homo sapien
ctgagtctgaggctgctgggctcac

SEQ ID NO: 1418458 - DNA, 25 bp, Homo sapien
gaagctgtcgctcgcagacacagca

SEQ ID NO: 1418459 - DNA, 25 bp, Homo sapien
ggagcgatggcctcgaagcagcccc

SEQ ID NO: 1418460 - DNA, 25 bp, Homo sapien
caggtggtatacactcttctgggcc

SEQ ID NO: 1418461 - DNA, 25 bp, Homo sapien
tgggcccgcataacaaactcattgg

SEQ ID NO: 1418462 - DNA, 25 bp, Homo sapien
ggagaaaggaagtacatgcaccatg

SEQ ID NO: 1418463 - DNA, 25 bp, Homo sapien
acatgcaccatgagtaaaatctggc

SEQ ID NO: 1418464 - DNA, 25 bp, Homo sapien
gaaaggaagtacatgcaccatgagt

SEQ ID NO: 1418465 - DNA, 25 bp, Homo sapien
aggaagtacatgcaccatgagtaaa

SEQ ID NO: 1418466 - DNA, 25 bp, Homo sapien
cctggcagtagctaagaaaacatga

SEQ ID NO: 1418467 - DNA, 25 bp, Homo sapien
gaagagcattttcctatacacaggc

SEQ ID NO: 1418468 - DNA, 25 bp, Homo sapien
gaaaacatgaacaactgaagagcat

SEQ ID NO: 1418469 - DNA, 25 bp, Homo sapien
ttcctatacacaggccaactaccat

SEQ ID NO: 1418470 - DNA, 25 bp, Homo sapien
gactcaggagtcgctagaggaagtg

SEQ ID NO: 1418471 - DNA, 25 bp, Homo sapien
ggaagtggcgggagttgtctgggct

SEQ ID NO: 1418472 - DNA, 25 bp, Homo sapien
caggagtcgctagaggaagtggcgg

SEQ ID NO: 1418473 - DNA, 25 bp, Homo sapien
gcgggagttgtctgggctcaaatcc

SEQ ID NO: 1418474 - DNA, 25 bp, Homo sapien
agtgccatgttgacttggtaactga

SEQ ID NO: 1418475 - DNA, 25 bp, Homo sapien
gatggtgagagaagggtattcaaaa

SEQ ID NO: 1418476 - DNA, 25 bp, Homo sapien
gccaaaactgtctgccggaaaatct

SEQ ID NO: 1418477 - DNA, 25 bp, Homo sapien
tattgggaaccaaaagcatggcttg

SEQ ID NO: 1418478 - DNA, 25 bp, Homo sapien
gttttactgcctggcaaccagactg

SEQ ID NO: 1418479 - DNA, 25 bp, Homo sapien
catttgggcttatatggcagtgtct

SEQ ID NO: 1418480 - DNA, 25 bp, Homo sapien
cttgagagagtcgtttacatgaccc

SEQ ID NO: 1418481 - DNA, 25 bp, Homo sapien
ccagactgggactaagcttgctaaa

SEQ ID NO: 1418482 - DNA, 25 bp, Homo sapien
ttctgctcattagagcccgccagcg

SEQ ID NO: 1418483 - DNA, 25 bp, Homo sapien
ggctcaagagcaacttttcagctga

SEQ ID NO: 1418484 - DNA, 25 bp, Homo sapien
ctgaaaggcttgcaggcccgtcagg

SEQ ID NO: 1418485 - DNA, 25 bp, Homo sapien
gatgagagctgatttactgccggtg

SEQ ID NO: 1418486 - DNA, 25 bp, Homo sapien
attttggcggctaacccctgtccag

SEQ ID NO: 1418487 - DNA, 25 bp, Homo sapien
cagctggcccatgtgaaatgctgcc

SEQ ID NO: 1418488 - DNA, 25 bp, Homo sapien
ccattctggattttggcggctaacc

SEQ ID NO: 1418489 - DNA, 25 bp, Homo sapien
aggcagctggcccatgtgaaatgct

SEQ ID NO: 1418490 - DNA, 25 bp, Homo sapien
cccacctggcaactgtatggttgaa

SEQ ID NO: 1418491 - DNA, 25 bp, Homo sapien
tctcgtcccacctggcaactgtatg

SEQ ID NO: 1418492 - DNA, 25 bp, Homo sapien
ggcaactgtatggttgaatacctga

SEQ ID NO: 1418493 - DNA, 25 bp, Homo sapien
gttgaatacctgattgcagagcccc

SEQ ID NO: 1418494 - DNA, 25 bp, Homo sapien
tggccaagtaaccacaaactgctgg

SEQ ID NO: 1418495 - DNA, 25 bp, Homo sapien
tcctcagctggaagagtggccaagt

SEQ ID NO: 1418496 - DNA, 25 bp, Homo sapien
gctggtcacggacttggcttcggca

SEQ ID NO: 1418497 - DNA, 25 bp, Homo sapien
gcttcggcagcccaatgacttgttc

SEQ ID NO: 1418498 - DNA, 25 bp, Homo sapien
tggaaccagcaccacggtcactttg

SEQ ID NO: 1418499 - DNA, 25 bp, Homo sapien
tagcaacctcatgatgggcaccctt

SEQ ID NO: 1418500 - DNA, 25 bp, Homo sapien
taagacttatgactccctcaagctg

SEQ ID NO: 1418501 - DNA, 25 bp, Homo sapien
gggcacccttggcagtaagacttat

SEQ ID NO: 1418502 - DNA, 25 bp, Homo sapien
gggcttcccggctggtactgagaca

SEQ ID NO: 1418503 - DNA, 25 bp, Homo sapien
cttcccggctggtactgagacatac

SEQ ID NO: 1418504 - DNA, 25 bp, Homo sapien
gaggcgctgggcaggaaaaactggg

SEQ ID NO: 1418505 - DNA, 25 bp, Homo sapien
ggaggcgctgggcaggaaaaactgg

SEQ ID NO: 1418506 - DNA, 25 bp, Homo sapien
cacaagtgctttgtcggggaggtgg

SEQ ID NO: 1418507 - DNA, 25 bp, Homo sapien
gcacaagtgctttgtcggggaggtg

SEQ ID NO: 1418508 - DNA, 25 bp, Homo sapien
gtttcccaggggcatccgagttaca

SEQ ID NO: 1418509 - DNA, 25 bp, Homo sapien
ggggcatccgagttacacacaggag

SEQ ID NO: 1418510 - DNA, 25 bp, Homo sapien
atccacatccaggcggtttcccagg

SEQ ID NO: 1418511 - DNA, 25 bp, Homo sapien
taaagttaacatgccctcattttca

SEQ ID NO: 1418512 - DNA, 25 bp, Homo sapien
tgacccaccatttatcctctgcgta

SEQ ID NO: 1418513 - DNA, 25 bp, Homo sapien
tcaacgctacattaatgacccacca

SEQ ID NO: 1418514 - DNA, 25 bp, Homo sapien
caccatttatcctctgcgtaattca

SEQ ID NO: 1418515 - DNA, 25 bp, Homo sapien
cctctgggttcagggtcaacgctac

SEQ ID NO: 1418516 - DNA, 25 bp, Homo sapien
tgctagtgttgtgcctgaaggatgt

SEQ ID NO: 1418517 - DNA, 25 bp, Homo sapien
aatttgctagtgttgtgcctgaagg

SEQ ID NO: 1418518 - DNA, 25 bp, Homo sapien
cttgtgaatttgctagtgttgtgcc

SEQ ID NO: 1418519 - DNA, 25 bp, Homo sapien
ccaatacttgtgaatttgctagtgt

SEQ ID NO: 1418520 - DNA, 25 bp, Homo sapien
taaaagcccctgcatccgagggttc

SEQ ID NO: 1418521 - DNA, 25 bp, Homo sapien
gcgaacgggctgtgcgcttagctcc

SEQ ID NO: 1418522 - DNA, 25 bp, Homo sapien
aaactgtccggactccagcgaacaa

SEQ ID NO: 1418523 - DNA, 25 bp, Homo sapien
ttagctccgaatggcagcagagcca

SEQ ID NO: 1418524 - DNA, 25 bp, Homo sapien
gtctcaccgcaaggcacaggcgcga

SEQ ID NO: 1418525 - DNA, 25 bp, Homo sapien
gggtcaatacagtctcaccgcaagg

SEQ ID NO: 1418526 - DNA, 25 bp, Homo sapien
ctgcggggtcaatacagtctcaccg

SEQ ID NO: 1418527 - DNA, 25 bp, Homo sapien
aatacagtctcaccgcaaggcacag

SEQ ID NO: 1418528 - DNA, 25 bp, Homo sapien
tacacgactgcgctgaagggaagtt

SEQ ID NO: 1418529 - DNA, 25 bp, Homo sapien
caccttcccgtgaggggcaatgtac

SEQ ID NO: 1418530 - DNA, 25 bp, Homo sapien
aagttctgctcgctgggcgtgtctc

SEQ ID NO: 1418531 - DNA, 25 bp, Homo sapien
aagggaagttctgctcgctgggcgt

SEQ ID NO: 1418532 - DNA, 25 bp, Homo sapien
gacagccctcgcagacagacttggg

SEQ ID NO: 1418533 - DNA, 25 bp, Homo sapien
ttgagccgcagcagaaacctgtcca

SEQ ID NO: 1418534 - DNA, 25 bp, Homo sapien
aacctgtccaagatgacccgctgac

SEQ ID NO: 1418535 - DNA, 25 bp, Homo sapien
tgccagaagctgtcgttgagccgca

SEQ ID NO: 1418536 - DNA, 25 bp, Homo sapien
agcccgggcaggtagaccatgccaa

SEQ ID NO: 1418537 - DNA, 25 bp, Homo sapien
agggaactcctgctaatcaaccaag

SEQ ID NO: 1418538 - DNA, 25 bp, Homo sapien
caggtagaccatgccaaacctggcc

SEQ ID NO: 1418539 - DNA, 25 bp, Homo sapien
cacaacagacgttggcgggtgagca

SEQ ID NO: 1418540 - DNA, 25 bp, Homo sapien
caggtatgctcgcaaacgtctgcac

SEQ ID NO: 1418541 - DNA, 25 bp, Homo sapien
ccaggtatgctcgcaaacgtctgca

SEQ ID NO: 1418542 - DNA, 25 bp, Homo sapien
gtatgctcgcaaacgtctgcacatc

SEQ ID NO: 1418543 - DNA, 25 bp, Homo sapien
aggtatgctcgcaaacgtctgcaca

SEQ ID NO: 1418544 - DNA, 25 bp, Homo sapien
cttccgagaggcccggccaccggct

SEQ ID NO: 1418545 - DNA, 25 bp, Homo sapien
tcttgcgctccccatttcccggctg

SEQ ID NO: 1418546 - DNA, 25 bp, Homo sapien
aacactcttgcgctccccatttccc

SEQ ID NO: 1418547 - DNA, 25 bp, Homo sapien
gcgctccccatttcccggctgcact

SEQ ID NO: 1418548 - DNA, 25 bp, Homo sapien
cgtcctgggccacgttgagagcgaa

SEQ ID NO: 1418549 - DNA, 25 bp, Homo sapien
ttaggagaagcagcgagatagatcc

SEQ ID NO: 1418550 - DNA, 25 bp, Homo sapien
tcggtagggtctcggcgtcctgggc

SEQ ID NO: 1418551 - DNA, 25 bp, Homo sapien
ggacacagagtaaaaagcgacgccc

SEQ ID NO: 1418552 - DNA, 25 bp, Homo sapien
gatcgcgctttggaagttctcctcc

SEQ ID NO: 1418553 - DNA, 25 bp, Homo sapien
gtgtcgatcgcgctttggaagttct

SEQ ID NO: 1418554 - DNA, 25 bp, Homo sapien
aggaggccgaggtgtcgatcgcgct

SEQ ID NO: 1418555 - DNA, 25 bp, Homo sapien
ccgaggtgtcgatcgcgctttggaa

SEQ ID NO: 1418556 - DNA, 25 bp, Homo sapien
tctgacgtccgtgcccgctgggact

SEQ ID NO: 1418557 - DNA, 25 bp, Homo sapien
gaggagagatcagtcacagcgaact

SEQ ID NO: 1418558 - DNA, 25 bp, Homo sapien
tgtagaggagaagaaacgatgcgtc

SEQ ID NO: 1418559 - DNA, 25 bp, Homo sapien
caccgcactcctgggaaagaactga

SEQ ID NO: 1418560 - DNA, 25 bp, Homo sapien
tccctcgagcgaccgggtccaggca

SEQ ID NO: 1418561 - DNA, 25 bp, Homo sapien
cccagccgccccgttgcggccctca

SEQ ID NO: 1418562 - DNA, 25 bp, Homo sapien
cacgcgggacgatggggtttgcaat

SEQ ID NO: 1418563 - DNA, 25 bp, Homo sapien
gggtttgcaatcccgcgtcccagcc

SEQ ID NO: 1418564 - DNA, 25 bp, Homo sapien
gcttctggactcctggcgctgcgct

SEQ ID NO: 1418565 - DNA, 25 bp, Homo sapien
ggagggcgtcccgcccgcttctgga

SEQ ID NO: 1418566 - DNA, 25 bp, Homo sapien
ccccaggtcgagaaggggcactgta

SEQ ID NO: 1418567 - DNA, 25 bp, Homo sapien
cccaggtcgagaaggggcactgtaa

SEQ ID NO: 1418568 - DNA, 25 bp, Homo sapien
cgcggggaggtcctcccgccagtcg

SEQ ID NO: 1418569 - DNA, 25 bp, Homo sapien
gcgcaggagccggtgtgcggggcgc

SEQ ID NO: 1418570 - DNA, 25 bp, Homo sapien
gtcctcccgccagtcggccagtgcc

SEQ ID NO: 1418571 - DNA, 25 bp, Homo sapien
ccgccagtcggccagtgccgggaat

SEQ ID NO: 1418572 - DNA, 25 bp, Homo sapien
tggtaggcgagctctctcccagtga

SEQ ID NO: 1418573 - DNA, 25 bp, Homo sapien
ctggtaggcgagctctctcccagtg

SEQ ID NO: 1418574 - DNA, 25 bp, Homo sapien
cagagagaagttgcggagcgctgct

SEQ ID NO: 1418575 - DNA, 25 bp, Homo sapien
aagcttctgcccgggaaggcgtcgc

SEQ ID NO: 1418576 - DNA, 25 bp, Homo sapien
agactgcagccggaggagccgccct

SEQ ID NO: 1418577 - DNA, 25 bp, Homo sapien
agccggagcgaacgccggccgctgg

SEQ ID NO: 1418578 - DNA, 25 bp, Homo sapien
ggccgggacgtggtcgcgagctgcc

SEQ ID NO: 1418579 - DNA, 25 bp, Homo sapien
ctgggccgggacgtggtcgcgagct

SEQ ID NO: 1418580 - DNA, 25 bp, Homo sapien
ccgggacgtggtcgcgagctgccgg

SEQ ID NO: 1418581 - DNA, 25 bp, Homo sapien
tgggccgggacgtggtcgcgagctg

SEQ ID NO: 1418582 - DNA, 25 bp, Homo sapien
gggcggatcctgcagcttctgacag

SEQ ID NO: 1418583 - DNA, 25 bp, Homo sapien
gagagggccagttgcttctccaagg

SEQ ID NO: 1418584 - DNA, 25 bp, Homo sapien
tcctgggtgcgagtcggccctgctt

SEQ ID NO: 1418585 - DNA, 25 bp, Homo sapien
ttctccaaggctaggagggaaggca

SEQ ID NO: 1418586 - DNA, 25 bp, Homo sapien
cgctctggcccggtcgccccccagt

SEQ ID NO: 1418587 - DNA, 25 bp, Homo sapien
ggcgctctggcccggtcgcccccca

SEQ ID NO: 1418588 - DNA, 25 bp, Homo sapien
gctctggcccggtcgccccccagtg

SEQ ID NO: 1418589 - DNA, 25 bp, Homo sapien
tctggcccggtcgccccccagtgcc

SEQ ID NO: 1418590 - DNA, 25 bp, Homo sapien
tcacccgagggctcatgccagtttc

SEQ ID NO: 1418591 - DNA, 25 bp, Homo sapien
taaaagcgctgcaatccttacccgg

SEQ ID NO: 1418592 - DNA, 25 bp, Homo sapien
tagcgccagtagatgtgggcccagc

SEQ ID NO: 1418593 - DNA, 25 bp, Homo sapien
gcctttgcggagatgtcggcgcctc

SEQ ID NO: 1418594 - DNA, 25 bp, Homo sapien
ttggcaaggtagtgagaagctgctt

SEQ ID NO: 1418595 - DNA, 25 bp, Homo sapien
gagccagactctgtggacacatttg

SEQ ID NO: 1418596 - DNA, 25 bp, Homo sapien
agagaagaaagacgccaccttgggc

SEQ ID NO: 1418597 - DNA, 25 bp, Homo sapien
gaagtgggcgcagaacttatctctg

SEQ ID NO: 1418598 - DNA, 25 bp, Homo sapien
tagctcgactaaaaatgcccagcag

SEQ ID NO: 1418599 - DNA, 25 bp, Homo sapien
tatctctgcgacagcttagctcgac

SEQ ID NO: 1418600 - DNA, 25 bp, Homo sapien
tcattgagtaatttgtaaggcagct

SEQ ID NO: 1418601 - DNA, 25 bp, Homo sapien
agtaatttgtaaggcagctctcaag

SEQ ID NO: 1418602 - DNA, 25 bp, Homo sapien
tgtaaggcagctctcaagaattatt

SEQ ID NO: 1418603 - DNA, 25 bp, Homo sapien
ttcattgagtaatttgtaaggcagc

SEQ ID NO: 1418604 - DNA, 25 bp, Homo sapien
ttaccctgagagatgcacgaaggcc

SEQ ID NO: 1418605 - DNA, 25 bp, Homo sapien
ggtaacttccactagccctctggga

SEQ ID NO: 1418606 - DNA, 25 bp, Homo sapien
ttaacgaaattgatgggaccctgca

SEQ ID NO: 1418607 - DNA, 25 bp, Homo sapien
tttagagtcgtcatgggtaacttcc

SEQ ID NO: 1418608 - DNA, 25 bp, Homo sapien
tggagagggtgaggacgccgagcgt

SEQ ID NO: 1418609 - DNA, 25 bp, Homo sapien
acgccgagcgtgtgatgagcgccta

SEQ ID NO: 1418610 - DNA, 25 bp, Homo sapien
gcgcctagtgagtattcactgtgca

SEQ ID NO: 1418611 - DNA, 25 bp, Homo sapien
accgccgccagagctctcttggaga

SEQ ID NO: 1418612 - DNA, 25 bp, Homo sapien
gctcctcttcataggagagaggtaa

SEQ ID NO: 1418613 - DNA, 25 bp, Homo sapien
ttccctgtccgcactgtcacttgct

SEQ ID NO: 1418614 - DNA, 25 bp, Homo sapien
ttggcttccctgtccgcactgtcac

SEQ ID NO: 1418615 - DNA, 25 bp, Homo sapien
tcacttgctcctcttcataggagag

SEQ ID NO: 1418616 - DNA, 25 bp, Homo sapien
tgaatccctgaacaggggcactctc

SEQ ID NO: 1418617 - DNA, 25 bp, Homo sapien
catgggatgaatccctgaacagggg

SEQ ID NO: 1418618 - DNA, 25 bp, Homo sapien
tgggatgaatccctgaacaggggca

SEQ ID NO: 1418619 - DNA, 25 bp, Homo sapien
ggatgaatccctgaacaggggcact

SEQ ID NO: 1418620 - DNA, 25 bp, Homo sapien
cacagaaggtccccattcttcagct

SEQ ID NO: 1418621 - DNA, 25 bp, Homo sapien
caggtgaggaggaggttgttctttc

SEQ ID NO: 1418622 - DNA, 25 bp, Homo sapien
gttctttcccagcctgaacctgact

SEQ ID NO: 1418623 - DNA, 25 bp, Homo sapien
tgtgtcccctttagctagtggggtg

SEQ ID NO: 1418624 - DNA, 25 bp, Homo sapien
ccttttcatgcattctctatgggat

SEQ ID NO: 1418625 - DNA, 25 bp, Homo sapien
gacagcaaagcgtattacctttaac

SEQ ID NO: 1418626 - DNA, 25 bp, Homo sapien
tgtacagaggcttgattagttttcc

SEQ ID NO: 1418627 - DNA, 25 bp, Homo sapien
taaaccaattgtatgtacagaggct

SEQ ID NO: 1418628 - DNA, 25 bp, Homo sapien
acatctatacaaaagtccacctata

SEQ ID NO: 1418629 - DNA, 25 bp, Homo sapien
aaggttttctttattataagcatca

SEQ ID NO: 1418630 - DNA, 25 bp, Homo sapien
ttataagcatcacattttggggaca

SEQ ID NO: 1418631 - DNA, 25 bp, Homo sapien
gaggtggaggaaagtgcagggtggg

SEQ ID NO: 1418632 - DNA, 25 bp, Homo sapien
agggtgggggtccacacacacctgc

SEQ ID NO: 1418633 - DNA, 25 bp, Homo sapien
aggtgctccaggcatttcaagccaa

SEQ ID NO: 1418634 - DNA, 25 bp, Homo sapien
caagccaatggaacgcagagctggg

SEQ ID NO: 1418635 - DNA, 25 bp, Homo sapien
tttcaagccaatggaacgcagagct

SEQ ID NO: 1418636 - DNA, 25 bp, Homo sapien
aggtgatctgcagcggggtctccaa

SEQ ID NO: 1418637 - DNA, 25 bp, Homo sapien
tgcagggaagccaagaggcatcagg

SEQ ID NO: 1418638 - DNA, 25 bp, Homo sapien
ggcatcagggacagggacgggcagg

SEQ ID NO: 1418639 - DNA, 25 bp, Homo sapien
acagggacgggcaggcactgcacac

SEQ ID NO: 1418640 - DNA, 25 bp, Homo sapien
agggacagggacgggcaggcactgc

SEQ ID NO: 1418641 - DNA, 25 bp, Homo sapien
attggccttctcgacccatctgtga

SEQ ID NO: 1418642 - DNA, 25 bp, Homo sapien
caattggccttctcgacccatctgt

SEQ ID NO: 1418643 - DNA, 25 bp, Homo sapien
tggcaggaggccgtccaattggcct

SEQ ID NO: 1418644 - DNA, 25 bp, Homo sapien
gaggccgtccaattggccttctcga

SEQ ID NO: 1418645 - DNA, 25 bp, Homo sapien
gaagaactagatgactgtgtccact

SEQ ID NO: 1418646 - DNA, 25 bp, Homo sapien
gaatctctaagcctaaagagcttca

SEQ ID NO: 1418647 - DNA, 25 bp, Homo sapien
gagggcttgtcagccttaacagaag

SEQ ID NO: 1418648 - DNA, 25 bp, Homo sapien
agctggagcgcatgacccttcaaga

SEQ ID NO: 1418649 - DNA, 25 bp, Homo sapien
tgccaggatccccttcaaccaggtt

SEQ ID NO: 1418650 - DNA, 25 bp, Homo sapien
tggctgtgccaggatccccttcaac

SEQ ID NO: 1418651 - DNA, 25 bp, Homo sapien
ctgtgccaggatccccttcaaccag

SEQ ID NO: 1418652 - DNA, 25 bp, Homo sapien
ctggctgtgccaggatccccttcaa

SEQ ID NO: 1418653 - DNA, 25 bp, Homo sapien
taaaccttctctcgcagagtctcca

SEQ ID NO: 1418654 - DNA, 25 bp, Homo sapien
cctcaagggtggcataaaccttctc

SEQ ID NO: 1418655 - DNA, 25 bp, Homo sapien
cacctcagaggggttggacaggccc

SEQ ID NO: 1418656 - DNA, 25 bp, Homo sapien
ggctgttccggatacttctgcttgg

SEQ ID NO: 1418657 - DNA, 25 bp, Homo sapien
ctgggttaaagagtacaatggctcg

SEQ ID NO: 1418658 - DNA, 25 bp, Homo sapien
taaagagtacaatggctcgcaggca

SEQ ID NO: 1418659 - DNA, 25 bp, Homo sapien
acaatggctcgcaggcatcccagtt

SEQ ID NO: 1418660 - DNA, 25 bp, Homo sapien
atcccagttccgacttgtccatctg

SEQ ID NO: 1418661 - DNA, 25 bp, Homo sapien
tttggaaaccagctcagttaggact

SEQ ID NO: 1418662 - DNA, 25 bp, Homo sapien
tggacatgtaaacccgtggccagaa

SEQ ID NO: 1418663 - DNA, 25 bp, Homo sapien
ggagaaagaggcaatcagcaattca

SEQ ID NO: 1418664 - DNA, 25 bp, Homo sapien
ggcactgctccggtggacatgtaaa

SEQ ID NO: 1418665 - DNA, 25 bp, Homo sapien
gatgccatcctgcacggaaactgag

SEQ ID NO: 1418666 - DNA, 25 bp, Homo sapien
gggaatacgcttggcccattcaacg

SEQ ID NO: 1418667 - DNA, 25 bp, Homo sapien
tggtcctccaaggtgaggtcagaga

SEQ ID NO: 1418668 - DNA, 25 bp, Homo sapien
tcaacgagggtgaaaagctgcttgt

SEQ ID NO: 1418669 - DNA, 25 bp, Homo sapien
catgacatatgttggtaacagggtc

SEQ ID NO: 1418670 - DNA, 25 bp, Homo sapien
tgaccactggtagcacattctgcct

SEQ ID NO: 1418671 - DNA, 25 bp, Homo sapien
tcaacagcaagttcagcttctagaa

SEQ ID NO: 1418672 - DNA, 25 bp, Homo sapien
cacaggcatgtcttcatgaccactg

SEQ ID NO: 1418673 - DNA, 25 bp, Homo sapien
gaatcctctccacaggcatgtcttc

SEQ ID NO: 1418674 - DNA, 25 bp, Homo sapien
tatcccgacacgtgtagatgaggtc

SEQ ID NO: 1418675 - DNA, 25 bp, Homo sapien
tcacaactgtataccccgtagtgct

SEQ ID NO: 1418676 - DNA, 25 bp, Homo sapien
tcttgaagaaccctttgcagccttc

SEQ ID NO: 1418677 - DNA, 25 bp, Homo sapien
cagcggttgcgctgacgcttgtcaa

SEQ ID NO: 1418678 - DNA, 25 bp, Homo sapien
agatgtgtttaaccagagatccggg

SEQ ID NO: 1418679 - DNA, 25 bp, Homo sapien
tgctgacactgttgaccacatttag

SEQ ID NO: 1418680 - DNA, 25 bp, Homo sapien
tggtggatgggtagttcatgtttcc

SEQ ID NO: 1418681 - DNA, 25 bp, Homo sapien
catgtttccaatcccgggaagccct

SEQ ID NO: 1418682 - DNA, 25 bp, Homo sapien
gccagcagcaaccacggatagtaat

SEQ ID NO: 1418683 - DNA, 25 bp, Homo sapien
gcagcaaccacggatagtaatgatt

SEQ ID NO: 1418684 - DNA, 25 bp, Homo sapien
ctccgaccctcaactccagcaggac

SEQ ID NO: 1418685 - DNA, 25 bp, Homo sapien
aaccacggatagtaatgattgccat

SEQ ID NO: 1418686 - DNA, 25 bp, Homo sapien
ttccagtgtcatctcgttaaccgag

SEQ ID NO: 1418687 - DNA, 25 bp, Homo sapien
aataatctgcccagacgatccagag

SEQ ID NO: 1418688 - DNA, 25 bp, Homo sapien
ttgctgcagtgtggttccggagccc

SEQ ID NO: 1418689 - DNA, 25 bp, Homo sapien
cagctcactgtagctaacaccaagg

SEQ ID NO: 1418690 - DNA, 25 bp, Homo sapien
gaggcgctgcaagtgctcctgaggg

SEQ ID NO: 1418691 - DNA, 25 bp, Homo sapien
atgggctcatggatgtagagccagt

SEQ ID NO: 1418692 - DNA, 25 bp, Homo sapien
ccaagttgattcctggaggcgctgc

SEQ ID NO: 1418693 - DNA, 25 bp, Homo sapien
gatgactcgatatggagagcccagg

SEQ ID NO: 1418694 - DNA, 25 bp, Homo sapien
aagttttccagatacctgattatat

SEQ ID NO: 1418695 - DNA, 25 bp, Homo sapien
tggaaactgcagccaataccaaaag

SEQ ID NO: 1418696 - DNA, 25 bp, Homo sapien
agttttccagatacctgattatatc

SEQ ID NO: 1418697 - DNA, 25 bp, Homo sapien
gaagggtagagagtttgctctccca

SEQ ID NO: 1418698 - DNA, 25 bp, Homo sapien
tttctgactggccagacaagggagc

SEQ ID NO: 1418699 - DNA, 25 bp, Homo sapien
caaaatgtcaagcatgcagtttttc

SEQ ID NO: 1418700 - DNA, 25 bp, Homo sapien
gcaaatggcctggtgtttccacccc

SEQ ID NO: 1418701 - DNA, 25 bp, Homo sapien
tttccctgagtccccttggagccac

SEQ ID NO: 1418702 - DNA, 25 bp, Homo sapien
gagtttccctgagtccccttggagc

SEQ ID NO: 1418703 - DNA, 25 bp, Homo sapien
tgagtttccctgagtccccttggag

SEQ ID NO: 1418704 - DNA, 25 bp, Homo sapien
gtttccctgagtccccttggagcca

SEQ ID NO: 1418705 - DNA, 25 bp, Homo sapien
tgtgactcaaaatctcctttgctcc

SEQ ID NO: 1418706 - DNA, 25 bp, Homo sapien
tcagaggaacgggaaacaaagcact

SEQ ID NO: 1418707 - DNA, 25 bp, Homo sapien
caaagcacttaatgaatatcttgga

SEQ ID NO: 1418708 - DNA, 25 bp, Homo sapien
gtttcttctaggctggttgcctggg

SEQ ID NO: 1418709 - DNA, 25 bp, Homo sapien
gcaccggaagcaaccccagctccca

SEQ ID NO: 1418710 - DNA, 25 bp, Homo sapien
caagcaccggaagcaaccccagctc

SEQ ID NO: 1418711 - DNA, 25 bp, Homo sapien
aagcaccggaagcaaccccagctcc

SEQ ID NO: 1418712 - DNA, 25 bp, Homo sapien
tcaagcaccggaagcaaccccagct

SEQ ID NO: 1418713 - DNA, 25 bp, Homo sapien
gaactgccctgtgcggcttcgaaag

SEQ ID NO: 1418714 - DNA, 25 bp, Homo sapien
ggcttcgaaaggctagccagctggt

SEQ ID NO: 1418715 - DNA, 25 bp, Homo sapien
cgaaaggctagccagctggtccgaa

SEQ ID NO: 1418716 - DNA, 25 bp, Homo sapien
ccctgtgcggcttcgaaaggctagc

SEQ ID NO: 1418717 - DNA, 25 bp, Homo sapien
ctccatagcctgcgggaaacttcat

SEQ ID NO: 1418718 - DNA, 25 bp, Homo sapien
tgaagtgagaataatttccatacat

SEQ ID NO: 1418719 - DNA, 25 bp, Homo sapien
gaaacttcatgaagtgagaataatt

SEQ ID NO: 1418720 - DNA, 25 bp, Homo sapien
catagcctgcgggaaacttcatgaa

SEQ ID NO: 1418721 - DNA, 25 bp, Homo sapien
aagagtggtcatcgcttcctagcag

SEQ ID NO: 1418722 - DNA, 25 bp, Homo sapien
gtaatcacgcataatgctgccgccg

SEQ ID NO: 1418723 - DNA, 25 bp, Homo sapien
tcaacttgggctaacaagagtggtc

SEQ ID NO: 1418724 - DNA, 25 bp, Homo sapien
tccacatagtgcgtttgagacggct

SEQ ID NO: 1418725 - DNA, 25 bp, Homo sapien
tagatgtcagcattagagctcagga

SEQ ID NO: 1418726 - DNA, 25 bp, Homo sapien
gccaatgtccatgccatgaaacttc

SEQ ID NO: 1418727 - DNA, 25 bp, Homo sapien
gtgaagatgtcaatgccaatgccaa

SEQ ID NO: 1418728 - DNA, 25 bp, Homo sapien
caacgtggagaaccagaaaatttgt

SEQ ID NO: 1418729 - DNA, 25 bp, Homo sapien
aatactactggtccatctgaggaca

SEQ ID NO: 1418730 - DNA, 25 bp, Homo sapien
ttcccaagcagaatcttcggcagct

SEQ ID NO: 1418731 - DNA, 25 bp, Homo sapien
ccagtccgtggagttaaccaagaca

SEQ ID NO: 1418732 - DNA, 25 bp, Homo sapien
ggataacttacacaagccatggctg

SEQ ID NO: 1418733 - DNA, 25 bp, Homo sapien
tcaacagtctgcagttatctggacc

SEQ ID NO: 1418734 - DNA, 25 bp, Homo sapien
gaggaaaggttctctgagcacatgc

SEQ ID NO: 1418735 - DNA, 25 bp, Homo sapien
gaagggaggataactccaccagcat

SEQ ID NO: 1418736 - DNA, 25 bp, Homo sapien
tcagtggaatctcccagttgggcca

SEQ ID NO: 1418737 - DNA, 25 bp, Homo sapien
tcagcgacccgccaatagtttccag

SEQ ID NO: 1418738 - DNA, 25 bp, Homo sapien
ttgcctttcccgtctctcttctctt

SEQ ID NO: 1418739 - DNA, 25 bp, Homo sapien
ttttgcctttcccgtctctcttctc

SEQ ID NO: 1418740 - DNA, 25 bp, Homo sapien
tctgcttttgcctttcccgtctctc

SEQ ID NO: 1418741 - DNA, 25 bp, Homo sapien
ccactctgcttttgcctttcccgtc

SEQ ID NO: 1418742 - DNA, 25 bp, Homo sapien
tgggacaagtggttcaccctcacaa

SEQ ID NO: 1418743 - DNA, 25 bp, Homo sapien
tctgagaacatctaagtactgggaa

SEQ ID NO: 1418744 - DNA, 25 bp, Homo sapien
cagttgtgccgatgaagctctggga

SEQ ID NO: 1418745 - DNA, 25 bp, Homo sapien
cccatgtatgcaagggctgtgctga

SEQ ID NO: 1418746 - DNA, 25 bp, Homo sapien
tgaacactgctactcagggataagc

SEQ ID NO: 1418747 - DNA, 25 bp, Homo sapien
cccagaagaggaagataccatatgc

SEQ ID NO: 1418748 - DNA, 25 bp, Homo sapien
cacatgggagttgcactagggaaca

SEQ ID NO: 1418749 - DNA, 25 bp, Homo sapien
gatagtttattagtcacatatgctc

SEQ ID NO: 1418750 - DNA, 25 bp, Homo sapien
tgacaaagacccaatgtctccagac

SEQ ID NO: 1418751 - DNA, 25 bp, Homo sapien
gtaaccgttactttgataaatatca

SEQ ID NO: 1418752 - DNA, 25 bp, Homo sapien
tagaagaggtctgacattgactgac

SEQ ID NO: 1418753 - DNA, 25 bp, Homo sapien
taaatatcaatgttagaagaggtct

SEQ ID NO: 1418754 - DNA, 25 bp, Homo sapien
tcacacaggccagctaacatctcgg

SEQ ID NO: 1418755 - DNA, 25 bp, Homo sapien
cctaagcaaccatgggtgaagaatc

SEQ ID NO: 1418756 - DNA, 25 bp, Homo sapien
cagcttccttgcttataaacctaag

SEQ ID NO: 1418757 - DNA, 25 bp, Homo sapien
gcattctgtctcaaggcctcacaca

SEQ ID NO: 1418758 - DNA, 25 bp, Homo sapien
ctagaaacagtttgggcctgattgt

SEQ ID NO: 1418759 - DNA, 25 bp, Homo sapien
gtttgggcctgattgtctgtgaaac

SEQ ID NO: 1418760 - DNA, 25 bp, Homo sapien
aacagtttgggcctgattgtctgtg

SEQ ID NO: 1418761 - DNA, 25 bp, Homo sapien
tagaaacagtttgggcctgattgtc

SEQ ID NO: 1418762 - DNA, 25 bp, Homo sapien
ctccaatgctggtgcctgtgacact

SEQ ID NO: 1418763 - DNA, 25 bp, Homo sapien
cctccaatgctggtgcctgtgacac

SEQ ID NO: 1418764 - DNA, 25 bp, Homo sapien
gcaacttcaccactgtgcgctggtt

SEQ ID NO: 1418765 - DNA, 25 bp, Homo sapien
acttcaccactgtgcgctggttctg

SEQ ID NO: 1418766 - DNA, 25 bp, Homo sapien
tccctttgcctgcgaggccacatta

SEQ ID NO: 1418767 - DNA, 25 bp, Homo sapien
gccacattaacacccccaaaattgc

SEQ ID NO: 1418768 - DNA, 25 bp, Homo sapien
ctcgcaagaggtcatcctgttcatc

SEQ ID NO: 1418769 - DNA, 25 bp, Homo sapien
ctttgcctgcgaggccacattaaca

SEQ ID NO: 1418770 - DNA, 25 bp, Homo sapien
cacaataatgagatatccttctgca

SEQ ID NO: 1418771 - DNA, 25 bp, Homo sapien
tctgcaatgctcctaaataaatgcc

SEQ ID NO: 1418772 - DNA, 25 bp, Homo sapien
tgtctcactgaggttgaacaacaac

SEQ ID NO: 1418773 - DNA, 25 bp, Homo sapien
ccacgttataaagggatcggtctct

SEQ ID NO: 1418774 - DNA, 25 bp, Homo sapien
ctagctacgtgacttgggcaacatt

SEQ ID NO: 1418775 - DNA, 25 bp, Homo sapien
gaagcattgcactggatgagctcga

SEQ ID NO: 1418776 - DNA, 25 bp, Homo sapien
gatcagcagaatccctaaggaggtg

SEQ ID NO: 1418777 - DNA, 25 bp, Homo sapien
tcaggagaaccgagtccatgttggc

SEQ ID NO: 1418778 - DNA, 25 bp, Homo sapien
gaaggattctcagagccatattttg

SEQ ID NO: 1418779 - DNA, 25 bp, Homo sapien
ccatattttgtggattggcttaagt

SEQ ID NO: 1418780 - DNA, 25 bp, Homo sapien
gaatgatgaaactataactgaatcc

SEQ ID NO: 1418781 - DNA, 25 bp, Homo sapien
cagtgagtgctttcggcatttcaaa

SEQ ID NO: 1418782 - DNA, 25 bp, Homo sapien
tggcaaaggctaacatagatattgc

SEQ ID NO: 1418783 - DNA, 25 bp, Homo sapien
gcattggcaaaggctaacatagata

SEQ ID NO: 1418784 - DNA, 25 bp, Homo sapien
cattggcaaaggctaacatagatat

SEQ ID NO: 1418785 - DNA, 25 bp, Homo sapien
ctggcattggcaaaggctaacatag

SEQ ID NO: 1418786 - DNA, 25 bp, Homo sapien
tatgattggcacatcagctctttgc

SEQ ID NO: 1418787 - DNA, 25 bp, Homo sapien
tcaagatgctcaaagcctccaggga

SEQ ID NO: 1418788 - DNA, 25 bp, Homo sapien
tccaagaagaatacaccagcggtcc

SEQ ID NO: 1418789 - DNA, 25 bp, Homo sapien
ggtcctgaccaaattagcacttacg

SEQ ID NO: 1418790 - DNA, 25 bp, Homo sapien
aggcgtcaacaaatttcatggggaa

SEQ ID NO: 1418791 - DNA, 25 bp, Homo sapien
gggaaataatgtgatttgatttata

SEQ ID NO: 1418792 - DNA, 25 bp, Homo sapien
cgtcaacaaatttcatggggaaata

SEQ ID NO: 1418793 - DNA, 25 bp, Homo sapien
tcatggggaaataatgtgatttgat

SEQ ID NO: 1418794 - DNA, 25 bp, Homo sapien
ctgcagtccatctgaagaggagaag

SEQ ID NO: 1418795 - DNA, 25 bp, Homo sapien
ggctgccactggagtctcgtggccc

SEQ ID NO: 1418796 - DNA, 25 bp, Homo sapien
tctatgcagtggctgtgttcagagt

SEQ ID NO: 1418797 - DNA, 25 bp, Homo sapien
tgttcagagttgagcggctgccact

SEQ ID NO: 1418798 - DNA, 25 bp, Homo sapien
cagctggctgctcaatacagacact

SEQ ID NO: 1418799 - DNA, 25 bp, Homo sapien
tcagctggctgctcaatacagacac

SEQ ID NO: 1418800 - DNA, 25 bp, Homo sapien
ctgcagtgtttcagaacaatgccag

SEQ ID NO: 1418801 - DNA, 25 bp, Homo sapien
tgtttcagaacaatgccagaaatta

SEQ ID NO: 1418802 - DNA, 25 bp, Homo sapien
acaatgccagaaattagttgttctt

SEQ ID NO: 1418803 - DNA, 25 bp, Homo sapien
cagaaattagttgttcttttcaccg

SEQ ID NO: 1418804 - DNA, 25 bp, Homo sapien
gccgcctaatgacagcggtacccaa

SEQ ID NO: 1418805 - DNA, 25 bp, Homo sapien
agtgttcgccgcctaatgacagcgg

SEQ ID NO: 1418806 - DNA, 25 bp, Homo sapien
ttcgccgcctaatgacagcggtacc

SEQ ID NO: 1418807 - DNA, 25 bp, Homo sapien
cgcctaatgacagcggtacccaaat

SEQ ID NO: 1418808 - DNA, 25 bp, Homo sapien
aaaacacttattgagacagctaacg

SEQ ID NO: 1418809 - DNA, 25 bp, Homo sapien
cgtgatcacgactaggaagggtttt

SEQ ID NO: 1418810 - DNA, 25 bp, Homo sapien
gccaagctgcacagtgtggcccctt

SEQ ID NO: 1418811 - DNA, 25 bp, Homo sapien
ccaattcaaaaccaacgtgatcacg

SEQ ID NO: 1418812 - DNA, 25 bp, Homo sapien
gccaggattctagcaaaggaagtca

SEQ ID NO: 1418813 - DNA, 25 bp, Homo sapien
aagtcaggctgcagggttcatctct

SEQ ID NO: 1418814 - DNA, 25 bp, Homo sapien
catacaaggaataagtaacagtgcc

SEQ ID NO: 1418815 - DNA, 25 bp, Homo sapien
tcttaactgctatatcccagcagct

SEQ ID NO: 1418816 - DNA, 25 bp, Homo sapien
ggtgatgaacagtgagagattccca

SEQ ID NO: 1418817 - DNA, 25 bp, Homo sapien
gcggtgatgaacagtgagagattcc

SEQ ID NO: 1418818 - DNA, 25 bp, Homo sapien
cggtgatgaacagtgagagattccc

SEQ ID NO: 1418819 - DNA, 25 bp, Homo sapien
cagcggtgatgaacagtgagagatt

SEQ ID NO: 1418820 - DNA, 25 bp, Homo sapien
gcgttgctcagatccagagagtgac

SEQ ID NO: 1418821 - DNA, 25 bp, Homo sapien
caggagtcagcgtctaaagaaaaca

SEQ ID NO: 1418822 - DNA, 25 bp, Homo sapien
taggaatacttcatcacggctcagc

SEQ ID NO: 1418823 - DNA, 25 bp, Homo sapien
cattgtaccacgaggatctggcaga

SEQ ID NO: 1418824 - DNA, 25 bp, Homo sapien
gccagtttctcgcaaagttaatcat

SEQ ID NO: 1418825 - DNA, 25 bp, Homo sapien
gagtaacaatatgctgtatctctac

SEQ ID NO: 1418826 - DNA, 25 bp, Homo sapien
caagtcttcaaagcagtactattca

SEQ ID NO: 1418827 - DNA, 25 bp, Homo sapien
taccatgtaactttacacccactag

SEQ ID NO: 1418828 - DNA, 25 bp, Homo sapien
acttacagtcctggatgactactga

SEQ ID NO: 1418829 - DNA, 25 bp, Homo sapien
cactctcagtgcatggctttcacac

SEQ ID NO: 1418830 - DNA, 25 bp, Homo sapien
gaagctccagataccacattcaaat

SEQ ID NO: 1418831 - DNA, 25 bp, Homo sapien
gtcctggatgactactgaagctcca

SEQ ID NO: 1418832 - DNA, 25 bp, Homo sapien
tctgctggcataaacaaacatcctc

SEQ ID NO: 1418833 - DNA, 25 bp, Homo sapien
ggaggagctcattcagtgctgttga

SEQ ID NO: 1418834 - DNA, 25 bp, Homo sapien
gatttgatctgactgtcagcagcag

SEQ ID NO: 1418835 - DNA, 25 bp, Homo sapien
gaggctgcgcatataagcatggttt

SEQ ID NO: 1418836 - DNA, 25 bp, Homo sapien
tgtgtcattctctgtcctcagactc

SEQ ID NO: 1418837 - DNA, 25 bp, Homo sapien
tcctcagactcactcagtgattctc

SEQ ID NO: 1418838 - DNA, 25 bp, Homo sapien
tctgtcctcagactcactcagtgat

SEQ ID NO: 1418839 - DNA, 25 bp, Homo sapien
ttctctgtcctcagactcactcagt

SEQ ID NO: 1418840 - DNA, 25 bp, Homo sapien
cctttggatcttgctaaatgtttat

SEQ ID NO: 1418841 - DNA, 25 bp, Homo sapien
atgtttataaatatccttcacacag

SEQ ID NO: 1418842 - DNA, 25 bp, Homo sapien
tataaatatccttcacacagctgaa

SEQ ID NO: 1418843 - DNA, 25 bp, Homo sapien
tttataaatatccttcacacagctg

SEQ ID NO: 1418844 - DNA, 25 bp, Homo sapien
tggatggtatcttcaccttagctgc

SEQ ID NO: 1418845 - DNA, 25 bp, Homo sapien
aacaatgaggtaattcgagatggac

SEQ ID NO: 1418846 - DNA, 25 bp, Homo sapien
tcgagatggaccttttcttccctaa

SEQ ID NO: 1418847 - DNA, 25 bp, Homo sapien
tggtatcttcaccttagctgctgaa

SEQ ID NO: 1418848 - DNA, 25 bp, Homo sapien
ctggtgatgagcttcatggaatctt

SEQ ID NO: 1418849 - DNA, 25 bp, Homo sapien
aaagcagcgagtgttggaccttgaa

SEQ ID NO: 1418850 - DNA, 25 bp, Homo sapien
caagggcgccgagcaggatctgcac

SEQ ID NO: 1418851 - DNA, 25 bp, Homo sapien
gcccttgccaggaacagcgtaaaca

SEQ ID NO: 1418852 - DNA, 25 bp, Homo sapien
gaccttgaaggagggtaagatccca

SEQ ID NO: 1418853 - DNA, 25 bp, Homo sapien
cctctgagcaggtccccaagacagc

SEQ ID NO: 1418854 - DNA, 25 bp, Homo sapien
gacgcggtccagcctctgagcaggt

SEQ ID NO: 1418855 - DNA, 25 bp, Homo sapien
agcctctgagcaggtccccaagaca

SEQ ID NO: 1418856 - DNA, 25 bp, Homo sapien
ccagcctctgagcaggtccccaaga

SEQ ID NO: 1418857 - DNA, 25 bp, Homo sapien
ttcgccatctgcatgatcgcaaggc

SEQ ID NO: 1418858 - DNA, 25 bp, Homo sapien
gccatctgcatgatcgcaaggcctc

SEQ ID NO: 1418859 - DNA, 25 bp, Homo sapien
tgctcctcattcgccatctgcatga

SEQ ID NO: 1418860 - DNA, 25 bp, Homo sapien
ctcattcgccatctgcatgatcgca

SEQ ID NO: 1418861 - DNA, 25 bp, Homo sapien
cagaaacgccattgcatgcactgtg

SEQ ID NO: 1418862 - DNA, 25 bp, Homo sapien
tcaagaaatatccatatcctgcagc

SEQ ID NO: 1418863 - DNA, 25 bp, Homo sapien
acgccattgcatgcactgtggagtt

SEQ ID NO: 1418864 - DNA, 25 bp, Homo sapien
ctgatcatcagaaacgccattgcat

SEQ ID NO: 1418865 - DNA, 25 bp, Homo sapien
aatccaattagccttttccgtggct

SEQ ID NO: 1418866 - DNA, 25 bp, Homo sapien
agccttttccgtggctccatgcttg

SEQ ID NO: 1418867 - DNA, 25 bp, Homo sapien
tccaatccaattagccttttccgtg

SEQ ID NO: 1418868 - DNA, 25 bp, Homo sapien
aattagccttttccgtggctccatg

SEQ ID NO: 1418869 - DNA, 25 bp, Homo sapien
tacagctgataagtcaggtccacct

SEQ ID NO: 1418870 - DNA, 25 bp, Homo sapien
catttatagtatgctacaggcatca

SEQ ID NO: 1418871 - DNA, 25 bp, Homo sapien
gactctaacttggagctttctgcta

SEQ ID NO: 1418872 - DNA, 25 bp, Homo sapien
gataagttgccagttgtacagctga

SEQ ID NO: 1418873 - DNA, 25 bp, Homo sapien
gggaggatcacattcttgacacagg

SEQ ID NO: 1418874 - DNA, 25 bp, Homo sapien
aatagtggctatcgtgtttccttaa

SEQ ID NO: 1418875 - DNA, 25 bp, Homo sapien
atatgactcattgcgttgctgggag

SEQ ID NO: 1418876 - DNA, 25 bp, Homo sapien
gtgaccacgggcgagtggcacctct

SEQ ID NO: 1418877 - DNA, 25 bp, Homo sapien
ggcactgtgcttaggtttcaatatg

SEQ ID NO: 1418878 - DNA, 25 bp, Homo sapien
tatgttactaatattcacaactcag

SEQ ID NO: 1418879 - DNA, 25 bp, Homo sapien
cctcagatgttttatcttatttctg

SEQ ID NO: 1418880 - DNA, 25 bp, Homo sapien
tgcctgatatgccttcctccacggg

SEQ ID NO: 1418881 - DNA, 25 bp, Homo sapien
aaagtcctaggagaatacgagtggt

SEQ ID NO: 1418882 - DNA, 25 bp, Homo sapien
tagaagtactagagaggcactcact

SEQ ID NO: 1418883 - DNA, 25 bp, Homo sapien
tctggcaacactgaaaaactggcac

SEQ ID NO: 1418884 - DNA, 25 bp, Homo sapien
tatccaagaaaagacccacactgag

SEQ ID NO: 1418885 - DNA, 25 bp, Homo sapien
tggaaacccctggaagtgcaactgc

SEQ ID NO: 1418886 - DNA, 25 bp, Homo sapien
caaacgcagggaaagggtgagacct

SEQ ID NO: 1418887 - DNA, 25 bp, Homo sapien
tatttggactgtcagaacaaccgga

SEQ ID NO: 1418888 - DNA, 25 bp, Homo sapien
ggacctcagaaataccggcttgcag

SEQ ID NO: 1418889 - DNA, 25 bp, Homo sapien
actggcgggttcaatactgttttct

SEQ ID NO: 1418890 - DNA, 25 bp, Homo sapien
ctacactaataggtgtggttccagg

SEQ ID NO: 1418891 - DNA, 25 bp, Homo sapien
caggacccagacaccgtagttcttc

SEQ ID NO: 1418892 - DNA, 25 bp, Homo sapien
cttggctcctacactaataggtgtg

SEQ ID NO: 1418893 - DNA, 25 bp, Homo sapien
aagaacaacaggttccttcaaccag

SEQ ID NO: 1418894 - DNA, 25 bp, Homo sapien
taagaacaacaggttccttcaacca

SEQ ID NO: 1418895 - DNA, 25 bp, Homo sapien
ctccagccctcttgggtttctgccc

SEQ ID NO: 1418896 - DNA, 25 bp, Homo sapien
agaacaacaggttccttcaaccagg

SEQ ID NO: 1418897 - DNA, 25 bp, Homo sapien
cagatccccttatgagacattgtgg

SEQ ID NO: 1418898 - DNA, 25 bp, Homo sapien
gttacatgtcctgcttggaatttag

SEQ ID NO: 1418899 - DNA, 25 bp, Homo sapien
tagggctgccttgcagatcccctta

SEQ ID NO: 1418900 - DNA, 25 bp, Homo sapien
tcctgcttggaatttagggctgcct

SEQ ID NO: 1418901 - DNA, 25 bp, Homo sapien
gcctaatgtctagcaagtacgcaca

SEQ ID NO: 1418902 - DNA, 25 bp, Homo sapien
tgtccccatgcgcagaggttactag

SEQ ID NO: 1418903 - DNA, 25 bp, Homo sapien
gatcttgccgcactgtgatgactga

SEQ ID NO: 1418904 - DNA, 25 bp, Homo sapien
attgcgggctacaacggtcacgtcg

SEQ ID NO: 1418905 - DNA, 25 bp, Homo sapien
tgggaatgtcccttacaacggccag

SEQ ID NO: 1418906 - DNA, 25 bp, Homo sapien
tctgacagaaaaccaggtctcttct

SEQ ID NO: 1418907 - DNA, 25 bp, Homo sapien
ccaaggtggttcgaaatgagatggt

SEQ ID NO: 1418908 - DNA, 25 bp, Homo sapien
tcccaccgggagtaacttcgacata

SEQ ID NO: 1418909 - DNA, 25 bp, Homo sapien
cacatcaaaggtctgggtcgcgaag

SEQ ID NO: 1418910 - DNA, 25 bp, Homo sapien
ggtcgcgaaggcagagactccatgt

SEQ ID NO: 1418911 - DNA, 25 bp, Homo sapien
agcgtaacgggagcaggtgttcaca

SEQ ID NO: 1418912 - DNA, 25 bp, Homo sapien
ggattttccggcatttagaagccag

SEQ ID NO: 1418913 - DNA, 25 bp, Homo sapien
aacccaatccgggaggtatgacctg

SEQ ID NO: 1418914 - DNA, 25 bp, Homo sapien
caatccgggaggtatgacctggctg

SEQ ID NO: 1418915 - DNA, 25 bp, Homo sapien
tgctggggacaaattattcacgtcc

SEQ ID NO: 1418916 - DNA, 25 bp, Homo sapien
tctgcaaacccaatccgggaggtat

SEQ ID NO: 1418917 - DNA, 25 bp, Homo sapien
agctgttcgaaggtgatccaggtga

SEQ ID NO: 1418918 - DNA, 25 bp, Homo sapien
tccagctgttcgaaggtgatccagg

SEQ ID NO: 1418919 - DNA, 25 bp, Homo sapien
acttcagcctttgcgcagggcactc

SEQ ID NO: 1418920 - DNA, 25 bp, Homo sapien
cgccgggggcacttcagcctttgcg

SEQ ID NO: 1418921 - DNA, 25 bp, Homo sapien
ccttactaaatactgtgcacggtgg

SEQ ID NO: 1418922 - DNA, 25 bp, Homo sapien
gctcttcagatcctttgtcgcaatg

SEQ ID NO: 1418923 - DNA, 25 bp, Homo sapien
tgcttagaacaaggtttgcccctta

SEQ ID NO: 1418924 - DNA, 25 bp, Homo sapien
gatgtcaggtgtggtcaaacttgct

SEQ ID NO: 1418925 - DNA, 25 bp, Homo sapien
cattgagcattgtgtgagctccgct

SEQ ID NO: 1418926 - DNA, 25 bp, Homo sapien
gagctccgctgagcattgtatggag

SEQ ID NO: 1418927 - DNA, 25 bp, Homo sapien
gcattgtatggagggtcagctgccc

SEQ ID NO: 1418928 - DNA, 25 bp, Homo sapien
gaggcttgttccttcgtggaaacat

SEQ ID NO: 1418929 - DNA, 25 bp, Homo sapien
cctttccaaggtcctaactgttgct

SEQ ID NO: 1418930 - DNA, 25 bp, Homo sapien
tccaaggtcctaactgttgctggct

SEQ ID NO: 1418931 - DNA, 25 bp, Homo sapien
tttccaaggtcctaactgttgctgg

SEQ ID NO: 1418932 - DNA, 25 bp, Homo sapien
ttccaaggtcctaactgttgctggc

SEQ ID NO: 1418933 - DNA, 25 bp, Homo sapien
gactttctacacttgggaagagaat

SEQ ID NO: 1418934 - DNA, 25 bp, Homo sapien
ggccaggatctgctgacctgtggaa

SEQ ID NO: 1418935 - DNA, 25 bp, Homo sapien
acctgtggaaccagcccgctgcagt

SEQ ID NO: 1418936 - DNA, 25 bp, Homo sapien
gggaagccagagactccttgctctc

SEQ ID NO: 1418937 - DNA, 25 bp, Homo sapien
caaagtgcttactaggcaagttcac

SEQ ID NO: 1418938 - DNA, 25 bp, Homo sapien
catttaaagggtagctccactggtg

SEQ ID NO: 1418939 - DNA, 25 bp, Homo sapien
tagatttcctctatcgcagtagtga

SEQ ID NO: 1418940 - DNA, 25 bp, Homo sapien
gcaggctgtagttcaaggacccaag

SEQ ID NO: 1418941 - DNA, 25 bp, Homo sapien
caaagaaatctacaaactggttgtg

SEQ ID NO: 1418942 - DNA, 25 bp, Homo sapien
aaataccactgcacttggatcagcc

SEQ ID NO: 1418943 - DNA, 25 bp, Homo sapien
gaatggagaaggaacaaagaaatct

SEQ ID NO: 1418944 - DNA, 25 bp, Homo sapien
caagactaggcaagtgaagcagtgg

SEQ ID NO: 1418945 - DNA, 25 bp, Homo sapien
cagcgtggccatgtcaataggtttc

SEQ ID NO: 1418946 - DNA, 25 bp, Homo sapien
gatttcacaaaaatacgctttgagg

SEQ ID NO: 1418947 - DNA, 25 bp, Homo sapien
cgctttgaggagaatcacagctttc

SEQ ID NO: 1418948 - DNA, 25 bp, Homo sapien
taaacagggccaattcacatcattc

SEQ ID NO: 1418949 - DNA, 25 bp, Homo sapien
tcgattgtcacacggccgttctctc

SEQ ID NO: 1418950 - DNA, 25 bp, Homo sapien
tattcgattgtcacacggccgttct

SEQ ID NO: 1418951 - DNA, 25 bp, Homo sapien
acacagtcttcagctgtgaataata

SEQ ID NO: 1418952 - DNA, 25 bp, Homo sapien
cagctgtgaataatattcgattgtc

SEQ ID NO: 1418953 - DNA, 25 bp, Homo sapien
cactgggctgacgttatagttgtta

SEQ ID NO: 1418954 - DNA, 25 bp, Homo sapien
taccactctatgagcccgttggatg

SEQ ID NO: 1418955 - DNA, 25 bp, Homo sapien
accaaagggcaactccactgggctg

SEQ ID NO: 1418956 - DNA, 25 bp, Homo sapien
tgacttcttatatccaccaaagggc

SEQ ID NO: 1418957 - DNA, 25 bp, Homo sapien
gaaaagttacactgccagttctagg

SEQ ID NO: 1418958 - DNA, 25 bp, Homo sapien
taagtaacagcaataagggtaccaa

SEQ ID NO: 1418959 - DNA, 25 bp, Homo sapien
gggttttatagtcccatgcacatgg

SEQ ID NO: 1418960 - DNA, 25 bp, Homo sapien
cagttctagggttctcaaatcttac

SEQ ID NO: 1418961 - DNA, 25 bp, Homo sapien
tagatatacacccaacagaaacgaa

SEQ ID NO: 1418962 - DNA, 25 bp, Homo sapien
tgaatggacgaacaaaaagtggtac

SEQ ID NO: 1418963 - DNA, 25 bp, Homo sapien
ccttcatacgttgttcggaggaatg

SEQ ID NO: 1418964 - DNA, 25 bp, Homo sapien
tgttacccagcaattcactactaga

SEQ ID NO: 1418965 - DNA, 25 bp, Homo sapien
tggtaaagacgccagctgctagtcc

SEQ ID NO: 1418966 - DNA, 25 bp, Homo sapien
aggcccaaagatctcttccttcaca

SEQ ID NO: 1418967 - DNA, 25 bp, Homo sapien
caaagatctcttccttcacacaggt

SEQ ID NO: 1418968 - DNA, 25 bp, Homo sapien
agtccaaaagtggtatcattggctc

SEQ ID NO: 1418969 - DNA, 25 bp, Homo sapien
tgtggtcctggataaactaatacat

SEQ ID NO: 1418970 - DNA, 25 bp, Homo sapien
taaacttgggtagtaggaccacata

SEQ ID NO: 1418971 - DNA, 25 bp, Homo sapien
gtaggaccacataatttgccagccc

SEQ ID NO: 1418972 - DNA, 25 bp, Homo sapien
atacatatgggtgccctaaaggagg

SEQ ID NO: 1418973 - DNA, 25 bp, Homo sapien
tatctccaccacataacactttagc

SEQ ID NO: 1418974 - DNA, 25 bp, Homo sapien
acaaggtctcatgtaatatccatcc

SEQ ID NO: 1418975 - DNA, 25 bp, Homo sapien
catatatatctccaccacataacac

SEQ ID NO: 1418976 - DNA, 25 bp, Homo sapien
tgggatcttcaggtacatatatatc

SEQ ID NO: 1418977 - DNA, 25 bp, Homo sapien
taatcctttgggtctgtttcaccac

SEQ ID NO: 1418978 - DNA, 25 bp, Homo sapien
tggtcggttgatgagtggacccatc

SEQ ID NO: 1418979 - DNA, 25 bp, Homo sapien
ccaaggactcgctccaggtgtggtc

SEQ ID NO: 1418980 - DNA, 25 bp, Homo sapien
caaatactcttgtgccattacagca

SEQ ID NO: 1418981 - DNA, 25 bp, Homo sapien
taagtctaagggaccgctcctaatc

SEQ ID NO: 1418982 - DNA, 25 bp, Homo sapien
acaaatcggtgggatcctgagagat

SEQ ID NO: 1418983 - DNA, 25 bp, Homo sapien
gatcctgagagattcacatgatgct

SEQ ID NO: 1418984 - DNA, 25 bp, Homo sapien
gatgctgcacaagtacgatttgtga

SEQ ID NO: 1418985 - DNA, 25 bp, Homo sapien
tgttccttgggccacgtgcatgcaa

SEQ ID NO: 1418986 - DNA, 25 bp, Homo sapien
gaatgcccaaaagcattacctggga

SEQ ID NO: 1418987 - DNA, 25 bp, Homo sapien
tcaccaaaacgacaaacacagggaa

SEQ ID NO: 1418988 - DNA, 25 bp, Homo sapien
cttgggccacgtgcatgcaaatcta

SEQ ID NO: 1418989 - DNA, 25 bp, Homo sapien
gatgatgagtggagatttgcctcca

SEQ ID NO: 1418990 - DNA, 25 bp, Homo sapien
gccttgtgtgaggaagttggccatc

SEQ ID NO: 1418991 - DNA, 25 bp, Homo sapien
tcagcgccccctttacagcattgtt

SEQ ID NO: 1418992 - DNA, 25 bp, Homo sapien
tgtgaggaagttggccatcagcgcc

SEQ ID NO: 1418993 - DNA, 25 bp, Homo sapien
taacaggtttgattcctttagctga

SEQ ID NO: 1418994 - DNA, 25 bp, Homo sapien
tgattcctttagctgacatctccat

SEQ ID NO: 1418995 - DNA, 25 bp, Homo sapien
gtaacaggtttgattcctttagctg

SEQ ID NO: 1418996 - DNA, 25 bp, Homo sapien
ggtttgattcctttagctgacatct

SEQ ID NO: 1418997 - DNA, 25 bp, Homo sapien
ggccacatcgggatgctgacacaga

SEQ ID NO: 1418998 - DNA, 25 bp, Homo sapien
gccagtgggcacacttccagtgaag

SEQ ID NO: 1418999 - DNA, 25 bp, Homo sapien
atgccagtgggcacacttccagtga

SEQ ID NO: 1419000 - DNA, 25 bp, Homo sapien
tgcaccacattgaagagcccaggag

SEQ ID NO: 1419001 - DNA, 25 bp, Homo sapien
tcagccagtagcaatgcagaaacag

SEQ ID NO: 1419002 - DNA, 25 bp, Homo sapien
gggagaaggtttaaagaccatggca

SEQ ID NO: 1419003 - DNA, 25 bp, Homo sapien
ggagaaggtttaaagaccatggcat

SEQ ID NO: 1419004 - DNA, 25 bp, Homo sapien
ttcagccagtagcaatgcagaaaca

SEQ ID NO: 1419005 - DNA, 25 bp, Homo sapien
tattcccacacataccccaagtggt

SEQ ID NO: 1419006 - DNA, 25 bp, Homo sapien
gggtagttccatgctcctattccca

SEQ ID NO: 1419007 - DNA, 25 bp, Homo sapien
taaccaaacgatccacctgggagct

SEQ ID NO: 1419008 - DNA, 25 bp, Homo sapien
cacaggctaatgctggagccgactt

SEQ ID NO: 1419009 - DNA, 25 bp, Homo sapien
tgttgatgcactccatagtagcaat

SEQ ID NO: 1419010 - DNA, 25 bp, Homo sapien
ccaagcgggcctcaaagatggactt

SEQ ID NO: 1419011 - DNA, 25 bp, Homo sapien
tagtagcaatttcatcctcccgttc

SEQ ID NO: 1419012 - DNA, 25 bp, Homo sapien
caggcactgccaggaaatgtcaatg

SEQ ID NO: 1419013 - DNA, 25 bp, Homo sapien
aaagcagcctttgcattttgaacag

SEQ ID NO: 1419014 - DNA, 25 bp, Homo sapien
cagcctccaaaaggattcggcaacg

SEQ ID NO: 1419015 - DNA, 25 bp, Homo sapien
catgtgaaagtagctatcactcggc

SEQ ID NO: 1419016 - DNA, 25 bp, Homo sapien
gctccatgccagatttttgactcca

SEQ ID NO: 1419017 - DNA, 25 bp, Homo sapien
tgctcaagtcaacgctgcagaacac

SEQ ID NO: 1419018 - DNA, 25 bp, Homo sapien
tggccgggaaatccgcgcatccggc

SEQ ID NO: 1419019 - DNA, 25 bp, Homo sapien
ctgtcttgtgctcaagtcaacgctg

SEQ ID NO: 1419020 - DNA, 25 bp, Homo sapien
agcctccccggctcgttgcagttac

SEQ ID NO: 1419021 - DNA, 25 bp, Homo sapien
cggttgctggctcgaaagctttctc

SEQ ID NO: 1419022 - DNA, 25 bp, Homo sapien
gcgacacgacgaaggtgccagtgct

SEQ ID NO: 1419023 - DNA, 25 bp, Homo sapien
ctcgaaagctttctcggtaccggag

SEQ ID NO: 1419024 - DNA, 25 bp, Homo sapien
gccccgccgcggtaattgagcggct

SEQ ID NO: 1419025 - DNA, 25 bp, Homo sapien
ggcggcgacaggagagggccgaaga

SEQ ID NO: 1419026 - DNA, 25 bp, Homo sapien
aagaagcggggagagcgcggccagg

SEQ ID NO: 1419027 - DNA, 25 bp, Homo sapien
cgaagaagcggggagagcgcggcca

SEQ ID NO: 1419028 - DNA, 25 bp, Homo sapien
agaagcggggagagcgcggccaggc

SEQ ID NO: 1419029 - DNA, 25 bp, Homo sapien
ctgcgaagaagcggggagagcgcgg

SEQ ID NO: 1419030 - DNA, 25 bp, Homo sapien
ccgcgggatcggttctaggagattt

SEQ ID NO: 1419031 - DNA, 25 bp, Homo sapien
agtcactcgattcctctgcggtcca

SEQ ID NO: 1419032 - DNA, 25 bp, Homo sapien
catcattgcatgtaagcatcctagg

SEQ ID NO: 1419033 - DNA, 25 bp, Homo sapien
tctccaggcgggaagaggacttcct

SEQ ID NO: 1419034 - DNA, 25 bp, Homo sapien
gatcttgcacaaaggttcattcttc

SEQ ID NO: 1419035 - DNA, 25 bp, Homo sapien
gcacctccagtagagactttgacaa

SEQ ID NO: 1419036 - DNA, 25 bp, Homo sapien
aggtctgtcagctgagggatcttgc

SEQ ID NO: 1419037 - DNA, 25 bp, Homo sapien
gaaagtaattggcaatttggacatt

SEQ ID NO: 1419038 - DNA, 25 bp, Homo sapien
tctgacataacaagacgtggcgatg

SEQ ID NO: 1419039 - DNA, 25 bp, Homo sapien
tatcgaaggcaaaaatagcaatggc

SEQ ID NO: 1419040 - DNA, 25 bp, Homo sapien
agtccagggataatatggtggcccc

SEQ ID NO: 1419041 - DNA, 25 bp, Homo sapien
tataacggtccatgctaagcagtcc

SEQ ID NO: 1419042 - DNA, 25 bp, Homo sapien
acagtgaagccacagttgccgagct

SEQ ID NO: 1419043 - DNA, 25 bp, Homo sapien
ttgccgagctccacatcatacgtta

SEQ ID NO: 1419044 - DNA, 25 bp, Homo sapien
catcatacgttatggctgtgattcc

SEQ ID NO: 1419045 - DNA, 25 bp, Homo sapien
gatagcttgagtgaggccgctcaga

SEQ ID NO: 1419046 - DNA, 25 bp, Homo sapien
tgcagtgagctgagattgcaccact

SEQ ID NO: 1419047 - DNA, 25 bp, Homo sapien
tcacttgaacctgggaggtggaggt

SEQ ID NO: 1419048 - DNA, 25 bp, Homo sapien
agactgaggtaggagaagaatcact

SEQ ID NO: 1419049 - DNA, 25 bp, Homo sapien
ccgggagactgaggtaggagaagaa

SEQ ID NO: 1419050 - DNA, 25 bp, Homo sapien
tccttgtatcctacaggtgaaatgc

SEQ ID NO: 1419051 - DNA, 25 bp, Homo sapien
cttcatggctagaaggcttcagaac

SEQ ID NO: 1419052 - DNA, 25 bp, Homo sapien
tacaggtgaaatgctgagccttggt

SEQ ID NO: 1419053 - DNA, 25 bp, Homo sapien
ttttttcatccagatgggatccttg

SEQ ID NO: 1419054 - DNA, 25 bp, Homo sapien
tgttacacaattgactggcaagagt

SEQ ID NO: 1419055 - DNA, 25 bp, Homo sapien
ccagacgaggctattgaagcttaga

SEQ ID NO: 1419056 - DNA, 25 bp, Homo sapien
gaatgactcatataagaaaggctct

SEQ ID NO: 1419057 - DNA, 25 bp, Homo sapien
tgcacaagcatggttgagagcattc

SEQ ID NO: 1419058 - DNA, 25 bp, Homo sapien
acaaggctctagtgattctgataca

SEQ ID NO: 1419059 - DNA, 25 bp, Homo sapien
gagatgctgatgaaccaataggtga

SEQ ID NO: 1419060 - DNA, 25 bp, Homo sapien
cacagcagacttacagatcaccagc

SEQ ID NO: 1419061 - DNA, 25 bp, Homo sapien
tcaaaagctgctcgcattacagaga

SEQ ID NO: 1419062 - DNA, 25 bp, Homo sapien
tattatgattgcaacctgagtagac

SEQ ID NO: 1419063 - DNA, 25 bp, Homo sapien
gaatgacttacctgggaagagaaag

SEQ ID NO: 1419064 - DNA, 25 bp, Homo sapien
aactggccccattggagagaatgac

SEQ ID NO: 1419065 - DNA, 25 bp, Homo sapien
ggcccagtctggtcaaggacatatg

SEQ ID NO: 1419066 - DNA, 25 bp, Homo sapien
tagggtgaatagatgtaatctctcc

SEQ ID NO: 1419067 - DNA, 25 bp, Homo sapien
tgcttagagtggtcaatgatatgga

SEQ ID NO: 1419068 - DNA, 25 bp, Homo sapien
gaaagcaccaacttcaaagcctcag

SEQ ID NO: 1419069 - DNA, 25 bp, Homo sapien
cataagaagtctgattagaaagcac

SEQ ID NO: 1419070 - DNA, 25 bp, Homo sapien
cttgtatgccataccttcaccttgg

SEQ ID NO: 1419071 - DNA, 25 bp, Homo sapien
tatttctctgttgaccattgtttct

SEQ ID NO: 1419072 - DNA, 25 bp, Homo sapien
tgttgaccattgtttcttgtatgcc

SEQ ID NO: 1419073 - DNA, 25 bp, Homo sapien
gaccattgtttcttgtatgccatac

SEQ ID NO: 1419074 - DNA, 25 bp, Homo sapien
tgttggtttaacaatgattaccttg

SEQ ID NO: 1419075 - DNA, 25 bp, Homo sapien
ttctggactttatggtgctgataag

SEQ ID NO: 1419076 - DNA, 25 bp, Homo sapien
ttctaagttgatacttattttcctc

SEQ ID NO: 1419077 - DNA, 25 bp, Homo sapien
tctcactggtagaatactcacattt

SEQ ID NO: 1419078 - DNA, 25 bp, Homo sapien
tattgtgactaaaaggaagctctgc

SEQ ID NO: 1419079 - DNA, 25 bp, Homo sapien
tttattgataagactccacacagga

SEQ ID NO: 1419080 - DNA, 25 bp, Homo sapien
gaagctctgcgagattaacaacata

SEQ ID NO: 1419081 - DNA, 25 bp, Homo sapien
taggatatgaagagaacagctgagg

SEQ ID NO: 1419082 - DNA, 25 bp, Homo sapien
ttttgagtatatgagtcaagtatgg

SEQ ID NO: 1419083 - DNA, 25 bp, Homo sapien
tatatgagtcaagtatggcaaaaag

SEQ ID NO: 1419084 - DNA, 25 bp, Homo sapien
gagtatatgagtcaagtatggcaaa

SEQ ID NO: 1419085 - DNA, 25 bp, Homo sapien
cagacatcagtgttacttgccaaga

SEQ ID NO: 1419086 - DNA, 25 bp, Homo sapien
acttatatctagaaatacggcaaaa

SEQ ID NO: 1419087 - DNA, 25 bp, Homo sapien
tatatctagaaatacggcaaaacaa

SEQ ID NO: 1419088 - DNA, 25 bp, Homo sapien
tatctagaaatacggcaaaacaaaa

SEQ ID NO: 1419089 - DNA, 25 bp, Homo sapien
ctagaaatacggcaaaacaaaatga

SEQ ID NO: 1419090 - DNA, 25 bp, Homo sapien
tattgatcttatgtcatgtatttgg

SEQ ID NO: 1419091 - DNA, 25 bp, Homo sapien
caacaacaaaacaaacagttacaag

SEQ ID NO: 1419092 - DNA, 25 bp, Homo sapien
tacacagtgccttgagagtcggtcc

SEQ ID NO: 1419093 - DNA, 25 bp, Homo sapien
gagtcggtcccacagaaaatactta

SEQ ID NO: 1419094 - DNA, 25 bp, Homo sapien
tcatagacagccaacttgcagggca

SEQ ID NO: 1419095 - DNA, 25 bp, Homo sapien
taattcaaaactagaaagaggccca

SEQ ID NO: 1419096 - DNA, 25 bp, Homo sapien
ggtggtgggccaagaaatccacctg

SEQ ID NO: 1419097 - DNA, 25 bp, Homo sapien
gggcaaggccgagaatcttctgaat

SEQ ID NO: 1419098 - DNA, 25 bp, Homo sapien
cctgcttggtggcggctcgtgaagg

SEQ ID NO: 1419099 - DNA, 25 bp, Homo sapien
caaggccgagaatcttctgaatgtt

SEQ ID NO: 1419100 - DNA, 25 bp, Homo sapien
aacggcaatatgttcagaaactgaa

SEQ ID NO: 1419101 - DNA, 25 bp, Homo sapien
tatttactgcatgtgcaaacctttc

SEQ ID NO: 1419102 - DNA, 25 bp, Homo sapien
caaagcctgccgaacggcaatatgt

SEQ ID NO: 1419103 - DNA, 25 bp, Homo sapien
tgtgcaaacctttccactacaaagc

SEQ ID NO: 1419104 - DNA, 25 bp, Homo sapien
cccagcagatttcgatgagacagtc

SEQ ID NO: 1419105 - DNA, 25 bp, Homo sapien
ctcccagcagatttcgatgagacag

SEQ ID NO: 1419106 - DNA, 25 bp, Homo sapien
tcccagcagatttcgatgagacagt

SEQ ID NO: 1419107 - DNA, 25 bp, Homo sapien
atctcccagcagatttcgatgagac

SEQ ID NO: 1419108 - DNA, 25 bp, Homo sapien
acagaaatagagctttaagtctctg

SEQ ID NO: 1419109 - DNA, 25 bp, Homo sapien
ggacagaaatagagctttaagtctc

SEQ ID NO: 1419110 - DNA, 25 bp, Homo sapien
ttccaaagaagaatctgggacagaa

SEQ ID NO: 1419111 - DNA, 25 bp, Homo sapien
tgggacagaaatagagctttaagtc

SEQ ID NO: 1419112 - DNA, 25 bp, Homo sapien
tatctcagaaaccactaagctcctc

SEQ ID NO: 1419113 - DNA, 25 bp, Homo sapien
gctcctcattgttggaaataaagga

SEQ ID NO: 1419114 - DNA, 25 bp, Homo sapien
gatatagggaggcatattttggccc

SEQ ID NO: 1419115 - DNA, 25 bp, Homo sapien
tctgttagagacattagtgatgagc

SEQ ID NO: 1419116 - DNA, 25 bp, Homo sapien
aaagatgatttattcaactacgtga

SEQ ID NO: 1419117 - DNA, 25 bp, Homo sapien
gggaagctactgatacgtaataaac

SEQ ID NO: 1419118 - DNA, 25 bp, Homo sapien
cactgcctaagttttgggaagctac

SEQ ID NO: 1419119 - DNA, 25 bp, Homo sapien
aatataacaagtaggctaggtgcag

SEQ ID NO: 1419120 - DNA, 25 bp, Homo sapien
gccaatagcaaacatggatttcatt

SEQ ID NO: 1419121 - DNA, 25 bp, Homo sapien
tgaacattcccattagggcagtaaa

SEQ ID NO: 1419122 - DNA, 25 bp, Homo sapien
agccaatagcaaacatggatttcat

SEQ ID NO: 1419123 - DNA, 25 bp, Homo sapien
tctgttgttattcttcagtttctct

SEQ ID NO: 1419124 - DNA, 25 bp, Homo sapien
ttcttcagtttctcttcttgtctct

SEQ ID NO: 1419125 - DNA, 25 bp, Homo sapien
tattcttcagtttctcttcttgtct

SEQ ID NO: 1419126 - DNA, 25 bp, Homo sapien
tctctgttgttattcttcagtttct

SEQ ID NO: 1419127 - DNA, 25 bp, Homo sapien
tgggccatgaacgcgtcactgtgct

SEQ ID NO: 1419128 - DNA, 25 bp, Homo sapien
agtgggccatgaacgcgtcactgtg

SEQ ID NO: 1419129 - DNA, 25 bp, Homo sapien
ggccatgaacgcgtcactgtgctcc

SEQ ID NO: 1419130 - DNA, 25 bp, Homo sapien
cagtgggccatgaacgcgtcactgt

SEQ ID NO: 1419131 - DNA, 25 bp, Homo sapien
tctggggacatctgcctggcaccat

SEQ ID NO: 1419132 - DNA, 25 bp, Homo sapien
tggggacatctgcctggcaccatac

SEQ ID NO: 1419133 - DNA, 25 bp, Homo sapien
ttctggggacatctgcctggcacca

SEQ ID NO: 1419134 - DNA, 25 bp, Homo sapien
cttctggggacatctgcctggcacc

SEQ ID NO: 1419135 - DNA, 25 bp, Homo sapien
gggttagcctcatgaagatttataa

SEQ ID NO: 1419136 - DNA, 25 bp, Homo sapien
gaagggttagcctcatgaagattta

SEQ ID NO: 1419137 - DNA, 25 bp, Homo sapien
cttgttgaagggttagcctcatgaa

SEQ ID NO: 1419138 - DNA, 25 bp, Homo sapien
ttataacaccctctgtcctactact

SEQ ID NO: 1419139 - DNA, 25 bp, Homo sapien
cgaccagctgactctgttattgttt

SEQ ID NO: 1419140 - DNA, 25 bp, Homo sapien
gaccagctgactctgttattgtttc

SEQ ID NO: 1419141 - DNA, 25 bp, Homo sapien
tcttgtacttgtctgtcctgtaaac

SEQ ID NO: 1419142 - DNA, 25 bp, Homo sapien
tgtacttgtctgtcctgtaaaccag

SEQ ID NO: 1419143 - DNA, 25 bp, Homo sapien
tctcttgtacttgtctgtcctgtaa

SEQ ID NO: 1419144 - DNA, 25 bp, Homo sapien
tacttgtctgtcctgtaaaccagga

SEQ ID NO: 1419145 - DNA, 25 bp, Homo sapien
gaaaactcggcaatcgactccatac

SEQ ID NO: 1419146 - DNA, 25 bp, Homo sapien
gaccaaagaaaactcggcaatcgac

SEQ ID NO: 1419147 - DNA, 25 bp, Homo sapien
ctgctcctgttcacgagttgcccag

SEQ ID NO: 1419148 - DNA, 25 bp, Homo sapien
tgttcacgagttgcccagagattcc

SEQ ID NO: 1419149 - DNA, 25 bp, Homo sapien
tcaagcaagtaaggctcgcgatctt

SEQ ID NO: 1419150 - DNA, 25 bp, Homo sapien
gcctctcaagcaagtaaggctcgcg

SEQ ID NO: 1419151 - DNA, 25 bp, Homo sapien
gcaagtaaggctcgcgatctttccc

SEQ ID NO: 1419152 - DNA, 25 bp, Homo sapien
agtagatgagcctctcaagcaagta

SEQ ID NO: 1419153 - DNA, 25 bp, Homo sapien
gggactgatcaaacgtctgagaaat

SEQ ID NO: 1419154 - DNA, 25 bp, Homo sapien
tgatcaaacgtctgagaaatacccg

SEQ ID NO: 1419155 - DNA, 25 bp, Homo sapien
aacgtctgagaaatacccgctctca

SEQ ID NO: 1419156 - DNA, 25 bp, Homo sapien
cctcccggggactgatcaaacgtct

SEQ ID NO: 1419157 - DNA, 25 bp, Homo sapien
gagtgtccgcgaacatagtgctcat

SEQ ID NO: 1419158 - DNA, 25 bp, Homo sapien
cgagcagagccgtgcacacagagat

SEQ ID NO: 1419159 - DNA, 25 bp, Homo sapien
gataaaaacgatgaggagagtgtcc

SEQ ID NO: 1419160 - DNA, 25 bp, Homo sapien
tctgcgagcagagccgtgcacacag

SEQ ID NO: 1419161 - DNA, 25 bp, Homo sapien
ggggaaagcgctctacagccaggaa

SEQ ID NO: 1419162 - DNA, 25 bp, Homo sapien
cgtagactccgccaccaccgagtaa

SEQ ID NO: 1419163 - DNA, 25 bp, Homo sapien
cgccaccaccgagtaacagaccaac

SEQ ID NO: 1419164 - DNA, 25 bp, Homo sapien
caggaaaagtgaagcgaaaacggct

SEQ ID NO: 1419165 - DNA, 25 bp, Homo sapien
tagcaccggaaaggctcgtatcgga

SEQ ID NO: 1419166 - DNA, 25 bp, Homo sapien
tcgtatcggagaacggtgtggccac

SEQ ID NO: 1419167 - DNA, 25 bp, Homo sapien
ggcatagcaccggaaaggctcgtat

SEQ ID NO: 1419168 - DNA, 25 bp, Homo sapien
aaaggctcgtatcggagaacggtgt

SEQ ID NO: 1419169 - DNA, 25 bp, Homo sapien
ggtagtcaggccgaatctcgcgaga

SEQ ID NO: 1419170 - DNA, 25 bp, Homo sapien
tctcgcgagaattggaactatttca

SEQ ID NO: 1419171 - DNA, 25 bp, Homo sapien
cggcggcgaactttgcccggtagat

SEQ ID NO: 1419172 - DNA, 25 bp, Homo sapien
cagcccaacttctgtggtcgtaata

SEQ ID NO: 1419173 - DNA, 25 bp, Homo sapien
gacttccgcaaaggtactgaacgac

SEQ ID NO: 1419174 - DNA, 25 bp, Homo sapien
gcaaaggtactgaacgactgggtgt

SEQ ID NO: 1419175 - DNA, 25 bp, Homo sapien
cttccgcaaaggtactgaacgactg

SEQ ID NO: 1419176 - DNA, 25 bp, Homo sapien
tccgcaaaggtactgaacgactggg

SEQ ID NO: 1419177 - DNA, 25 bp, Homo sapien
cagaaatgtaatttgtggtaaattc

SEQ ID NO: 1419178 - DNA, 25 bp, Homo sapien
tttgtggtaaattctctcttgcgcc

SEQ ID NO: 1419179 - DNA, 25 bp, Homo sapien
aaattctctcttgcgcctgtgtttc

SEQ ID NO: 1419180 - DNA, 25 bp, Homo sapien
ggtaaattctctcttgcgcctgtgt

SEQ ID NO: 1419181 - DNA, 25 bp, Homo sapien
ctgggaggtcaaagcgtcagtaagt

SEQ ID NO: 1419182 - DNA, 25 bp, Homo sapien
tgggaggtcaaagcgtcagtaagtg

SEQ ID NO: 1419183 - DNA, 25 bp, Homo sapien
cattccagcctattggatagagtga

SEQ ID NO: 1419184 - DNA, 25 bp, Homo sapien
gggaggtcaaagcgtcagtaagtgg

SEQ ID NO: 1419185 - DNA, 25 bp, Homo sapien
aaaagaggaactcaaattgtctctc

SEQ ID NO: 1419186 - DNA, 25 bp, Homo sapien
aatcaatgtgcaagcattcctatac

SEQ ID NO: 1419187 - DNA, 25 bp, Homo sapien
aaaccctgtctcagccccaaatctc

SEQ ID NO: 1419188 - DNA, 25 bp, Homo sapien
aaaatcaatgtgcaagcattcctat

SEQ ID NO: 1419189 - DNA, 25 bp, Homo sapien
gagatctcattaaagctaggaaata

SEQ ID NO: 1419190 - DNA, 25 bp, Homo sapien
gcaagaatgtcaagaaaagtggcag

SEQ ID NO: 1419191 - DNA, 25 bp, Homo sapien
tgaaatgccaatctaaggatatact

SEQ ID NO: 1419192 - DNA, 25 bp, Homo sapien
tgcatttgacactaatcagttccag

SEQ ID NO: 1419193 - DNA, 25 bp, Homo sapien
agaggatcagcatattctttgaaca

SEQ ID NO: 1419194 - DNA, 25 bp, Homo sapien
atccatacaaagaggatcagcatat

SEQ ID NO: 1419195 - DNA, 25 bp, Homo sapien
catacaaagaggatcagcatattct

SEQ ID NO: 1419196 - DNA, 25 bp, Homo sapien
tacaaagaggatcagcatattcttt

SEQ ID NO: 1419197 - DNA, 25 bp, Homo sapien
caagtcgatagaggagtgcaatggc

SEQ ID NO: 1419198 - DNA, 25 bp, Homo sapien
taatacaatcaagggaacaagcctt

SEQ ID NO: 1419199 - DNA, 25 bp, Homo sapien
tgttgaggccctacaaggtgccaga

SEQ ID NO: 1419200 - DNA, 25 bp, Homo sapien
ggtgccagaaccgttccaggcgttg

SEQ ID NO: 1419201 - DNA, 25 bp, Homo sapien
actccatagctatttggtaaggcac

SEQ ID NO: 1419202 - DNA, 25 bp, Homo sapien
atagctatttggtaaggcacccctt

SEQ ID NO: 1419203 - DNA, 25 bp, Homo sapien
tccatagctatttggtaaggcaccc

SEQ ID NO: 1419204 - DNA, 25 bp, Homo sapien
ccactccatagctatttggtaaggc

SEQ ID NO: 1419205 - DNA, 25 bp, Homo sapien
tttcgcagagacctcgggcggcggc

SEQ ID NO: 1419206 - DNA, 25 bp, Homo sapien
gctgcccgcccggattggagcagca

SEQ ID NO: 1419207 - DNA, 25 bp, Homo sapien
tgcccgcccggattggagcagcagc

SEQ ID NO: 1419208 - DNA, 25 bp, Homo sapien
tcggcgaatagcagcgcgctgcccg

SEQ ID NO: 1419209 - DNA, 25 bp, Homo sapien
gagcggctcgcaggcgagcgacagc

SEQ ID NO: 1419210 - DNA, 25 bp, Homo sapien
gagcgtgcgtccgttcgcacaggca

SEQ ID NO: 1419211 - DNA, 25 bp, Homo sapien
atgtaaaccggaccagccgctgcgg

SEQ ID NO: 1419212 - DNA, 25 bp, Homo sapien
tgcggaaagcggagggagtccgacg

SEQ ID NO: 1419213 - DNA, 25 bp, Homo sapien
gacgtacgcgtcttggatccacgga

SEQ ID NO: 1419214 - DNA, 25 bp, Homo sapien
gagccaaataggtgccgtgacatca

SEQ ID NO: 1419215 - DNA, 25 bp, Homo sapien
gctccaagctcttcggtgtccagga

SEQ ID NO: 1419216 - DNA, 25 bp, Homo sapien
tataagaggaaacgtggtcggcttc

SEQ ID NO: 1419217 - DNA, 25 bp, Homo sapien
cggcgcccactgctctgttctggaa

SEQ ID NO: 1419218 - DNA, 25 bp, Homo sapien
tgcagcttggccgtgagtcagcatc

SEQ ID NO: 1419219 - DNA, 25 bp, Homo sapien
agcagtggcctcttcgtgtaaatat

SEQ ID NO: 1419220 - DNA, 25 bp, Homo sapien
aggagatgctgtcccctctgaggtg

SEQ ID NO: 1419221 - DNA, 25 bp, Homo sapien
tctgaacctgtgtaagtggtagtca

SEQ ID NO: 1419222 - DNA, 25 bp, Homo sapien
gaaagactgacatcccctgccgttt

SEQ ID NO: 1419223 - DNA, 25 bp, Homo sapien
cactggtcacacaaagtacttcttg

SEQ ID NO: 1419224 - DNA, 25 bp, Homo sapien
gaaggtcctgggacccttcagtatg

SEQ ID NO: 1419225 - DNA, 25 bp, Homo sapien
ttttgaagcttccaccccttcctgc

SEQ ID NO: 1419226 - DNA, 25 bp, Homo sapien
aggtcacaaattgcagtttttgaag

SEQ ID NO: 1419227 - DNA, 25 bp, Homo sapien
gtcacaaattgcagtttttgaagct

SEQ ID NO: 1419228 - DNA, 25 bp, Homo sapien
ttaatccaggtcacaaattgcagtt

SEQ ID NO: 1419229 - DNA, 25 bp, Homo sapien
tgtttttaagcgtctgccaaactga

SEQ ID NO: 1419230 - DNA, 25 bp, Homo sapien
ccagtgcccagtgtcatggttggtg

SEQ ID NO: 1419231 - DNA, 25 bp, Homo sapien
gccaaactgaattaagtagtactcc

SEQ ID NO: 1419232 - DNA, 25 bp, Homo sapien
gtagcagtcattctcttgtgtcatg

SEQ ID NO: 1419233 - DNA, 25 bp, Homo sapien
ttttctgtaacacttgacagtgccc

SEQ ID NO: 1419234 - DNA, 25 bp, Homo sapien
ttggtttcactgctcttggctggtt

SEQ ID NO: 1419235 - DNA, 25 bp, Homo sapien
cttgtcctctgggaaacttttcttg

SEQ ID NO: 1419236 - DNA, 25 bp, Homo sapien
ttggctggttggctttcttcactct

SEQ ID NO: 1419237 - DNA, 25 bp, Homo sapien
ggttttgctgtaggacctgattagt

SEQ ID NO: 1419238 - DNA, 25 bp, Homo sapien
gttttgctgtaggacctgattagtc

SEQ ID NO: 1419239 - DNA, 25 bp, Homo sapien
ttgctgtaggacctgattagtcaca

SEQ ID NO: 1419240 - DNA, 25 bp, Homo sapien
tttgctgtaggacctgattagtcac

SEQ ID NO: 1419241 - DNA, 25 bp, Homo sapien
gatgttcacagtgacctggccaggg

SEQ ID NO: 1419242 - DNA, 25 bp, Homo sapien
tgtctggacatgtcacacagtctgc

SEQ ID NO: 1419243 - DNA, 25 bp, Homo sapien
ttgcagcaacttctggaccctgagc

SEQ ID NO: 1419244 - DNA, 25 bp, Homo sapien
cctgtgttgactccctgcatggtac

SEQ ID NO: 1419245 - DNA, 25 bp, Homo sapien
gctggtcctccgctggtgtctgagt

SEQ ID NO: 1419246 - DNA, 25 bp, Homo sapien
tctgagttggttaaccttaactgaa

SEQ ID NO: 1419247 - DNA, 25 bp, Homo sapien
gttggagactcgctgctggtcctcc

SEQ ID NO: 1419248 - DNA, 25 bp, Homo sapien
tcttgttacatgtattccagctctc

SEQ ID NO: 1419249 - DNA, 25 bp, Homo sapien
ctccacagccttgtcttgaaggcca

SEQ ID NO: 1419250 - DNA, 25 bp, Homo sapien
gttgaagccttccttgcttttccaa

SEQ ID NO: 1419251 - DNA, 25 bp, Homo sapien
tccaattgcttttctactgttgaca

SEQ ID NO: 1419252 - DNA, 25 bp, Homo sapien
agggttataattcatctccctgcag

SEQ ID NO: 1419253 - DNA, 25 bp, Homo sapien
ggcctgatcccttagcatgtgtgca

SEQ ID NO: 1419254 - DNA, 25 bp, Homo sapien
ctagagggttgaaagcaggtcctgt

SEQ ID NO: 1419255 - DNA, 25 bp, Homo sapien
cagctgcaggtcttttgtaacgctc

SEQ ID NO: 1419256 - DNA, 25 bp, Homo sapien
tgtaacgctctgtatatgcacagga

SEQ ID NO: 1419257 - DNA, 25 bp, Homo sapien
gtccaagaaaccaccatgtctgggt

SEQ ID NO: 1419258 - DNA, 25 bp, Homo sapien
gaatcagacaaaatagtccccactg

SEQ ID NO: 1419259 - DNA, 25 bp, Homo sapien
tacacgaacatcaaggctgggagag

SEQ ID NO: 1419260 - DNA, 25 bp, Homo sapien
tataggatttggagcttacacgaac

SEQ ID NO: 1419261 - DNA, 25 bp, Homo sapien
gatgtctgccgtgtatttctgtttc

SEQ ID NO: 1419262 - DNA, 25 bp, Homo sapien
aggagacctttgtcccggccgtgat

SEQ ID NO: 1419263 - DNA, 25 bp, Homo sapien
gtgttaggttccataaatgccaggc

SEQ ID NO: 1419264 - DNA, 25 bp, Homo sapien
gagagcattcctggagacgccttca

SEQ ID NO: 1419265 - DNA, 25 bp, Homo sapien
attagccaagtctttagcccccgct

SEQ ID NO: 1419266 - DNA, 25 bp, Homo sapien
ccccgcttgaagtctgtgggggcaa

SEQ ID NO: 1419267 - DNA, 25 bp, Homo sapien
gccaagtctttagcccccgcttgaa

SEQ ID NO: 1419268 - DNA, 25 bp, Homo sapien
ctttagcccccgcttgaagtctgtg

SEQ ID NO: 1419269 - DNA, 25 bp, Homo sapien
tgaattcgaggttcccgcgctccca

SEQ ID NO: 1419270 - DNA, 25 bp, Homo sapien
ggtgctgaagagttttatgcacatc

SEQ ID NO: 1419271 - DNA, 25 bp, Homo sapien
gtcgtaatcatcatagaacacatgc

SEQ ID NO: 1419272 - DNA, 25 bp, Homo sapien
cgtcctcaggttctgttgtggtcgt

SEQ ID NO: 1419273 - DNA, 25 bp, Homo sapien
ggagcagtgagctgatgcctgatca

SEQ ID NO: 1419274 - DNA, 25 bp, Homo sapien
acttctgaacgcaggtaagtgcatg

SEQ ID NO: 1419275 - DNA, 25 bp, Homo sapien
tgcctgatcagtgggtcgctggact

SEQ ID NO: 1419276 - DNA, 25 bp, Homo sapien
gggcccagattgcttcttgttaaca

SEQ ID NO: 1419277 - DNA, 25 bp, Homo sapien
gaatatagagtggaccattgcaggc

SEQ ID NO: 1419278 - DNA, 25 bp, Homo sapien
gggcgtaactgatctgactccttgg

SEQ ID NO: 1419279 - DNA, 25 bp, Homo sapien
tgtattgtggaatatagagtggacc

SEQ ID NO: 1419280 - DNA, 25 bp, Homo sapien
gcttcggtaactgatgccggcagca

SEQ ID NO: 1419281 - DNA, 25 bp, Homo sapien
aagttggagcctgaggttgaaatat

SEQ ID NO: 1419282 - DNA, 25 bp, Homo sapien
taagttggagcctgaggttgaaata

SEQ ID NO: 1419283 - DNA, 25 bp, Homo sapien
ctaagttggagcctgaggttgaaat

SEQ ID NO: 1419284 - DNA, 25 bp, Homo sapien
agttggagcctgaggttgaaatatt

SEQ ID NO: 1419285 - DNA, 25 bp, Homo sapien
gaatagcccactcctagcttggaaa

SEQ ID NO: 1419286 - DNA, 25 bp, Homo sapien
gcctccaatatctctgaatagccca

SEQ ID NO: 1419287 - DNA, 25 bp, Homo sapien
tgtggtgttgggaccaagcctccaa

SEQ ID NO: 1419288 - DNA, 25 bp, Homo sapien
ttggaaacagctataagggctgccc

SEQ ID NO: 1419289 - DNA, 25 bp, Homo sapien
ttggccaactctgtatctgaacttg

SEQ ID NO: 1419290 - DNA, 25 bp, Homo sapien
tggaaggctctacccctccgtggca

SEQ ID NO: 1419291 - DNA, 25 bp, Homo sapien
gaagggatggaaggctctacccctc

SEQ ID NO: 1419292 - DNA, 25 bp, Homo sapien
cagcatttggccaactctgtatctg

SEQ ID NO: 1419293 - DNA, 25 bp, Homo sapien
gagtctgtgtaagaaggatgcaagt

SEQ ID NO: 1419294 - DNA, 25 bp, Homo sapien
caagtatcctttgatttggagtgga

SEQ ID NO: 1419295 - DNA, 25 bp, Homo sapien
ccttgcaaaggcagtgggttaaaca

SEQ ID NO: 1419296 - DNA, 25 bp, Homo sapien
cctgggaccactatgagcagagaga

SEQ ID NO: 1419297 - DNA, 25 bp, Homo sapien
tggccacttggcaatcatggggaag

SEQ ID NO: 1419298 - DNA, 25 bp, Homo sapien
atccctgcttctggtcttggccact

SEQ ID NO: 1419299 - DNA, 25 bp, Homo sapien
cttgccgcagaactagcctaatcat

SEQ ID NO: 1419300 - DNA, 25 bp, Homo sapien
tcatggggaagttgactccccgcct

SEQ ID NO: 1419301 - DNA, 25 bp, Homo sapien
agagtttcattaggccgctgggtcg

SEQ ID NO: 1419302 - DNA, 25 bp, Homo sapien
gctggatacttgtggccacgcccag

SEQ ID NO: 1419303 - DNA, 25 bp, Homo sapien
tggccacgcccaggataggttgcca

SEQ ID NO: 1419304 - DNA, 25 bp, Homo sapien
taggttgccagagtttcattaggcc

SEQ ID NO: 1419305 - DNA, 25 bp, Homo sapien
gagcagcgaccgaatcctggctgtg

SEQ ID NO: 1419306 - DNA, 25 bp, Homo sapien
ggttacaaagtgaccacatattatg

SEQ ID NO: 1419307 - DNA, 25 bp, Homo sapien
taaagacagacaaaaaggctctcgc

SEQ ID NO: 1419308 - DNA, 25 bp, Homo sapien
ctgtgtggcccaagtggctcaggaa

SEQ ID NO: 1419309 - DNA, 25 bp, Homo sapien
tcagatttatactctgcaagtattt

SEQ ID NO: 1419310 - DNA, 25 bp, Homo sapien
ttggtgccatagctaataaatcttc

SEQ ID NO: 1419311 - DNA, 25 bp, Homo sapien
tgggtacaagtcactttcagattta

SEQ ID NO: 1419312 - DNA, 25 bp, Homo sapien
cctggccttctttactgagttttga

SEQ ID NO: 1419313 - DNA, 25 bp, Homo sapien
caggcagtttcggacaaatctgaga

SEQ ID NO: 1419314 - DNA, 25 bp, Homo sapien
tttcggacaaatctgagagccagga

SEQ ID NO: 1419315 - DNA, 25 bp, Homo sapien
gtgttgggctgaacattgtgctctg

SEQ ID NO: 1419316 - DNA, 25 bp, Homo sapien
acattgtgctctgacactctctggg

SEQ ID NO: 1419317 - DNA, 25 bp, Homo sapien
tactctctcgagatgtacacttagg

SEQ ID NO: 1419318 - DNA, 25 bp, Homo sapien
tactgtgcctactacagatcctggc

SEQ ID NO: 1419319 - DNA, 25 bp, Homo sapien
tgactgcagcctagtgcatagccag

SEQ ID NO: 1419320 - DNA, 25 bp, Homo sapien
cagaggtcctctttagagctagcac

SEQ ID NO: 1419321 - DNA, 25 bp, Homo sapien
taatgtgtgccttggtattgcagca

SEQ ID NO: 1419322 - DNA, 25 bp, Homo sapien
tctggtttgccatcttgacaggaga

SEQ ID NO: 1419323 - DNA, 25 bp, Homo sapien
ggagcacagccctctgtaatgtgtg

SEQ ID NO: 1419324 - DNA, 25 bp, Homo sapien
tgattgaaatgcagcgtcaccggct

SEQ ID NO: 1419325 - DNA, 25 bp, Homo sapien
gatacgggaatccaaggctggtttg

SEQ ID NO: 1419326 - DNA, 25 bp, Homo sapien
ctgatctgagatacgggaatccaag

SEQ ID NO: 1419327 - DNA, 25 bp, Homo sapien
ggcactgatctgagatacgggaatc

SEQ ID NO: 1419328 - DNA, 25 bp, Homo sapien
tctgagatacgggaatccaaggctg

SEQ ID NO: 1419329 - DNA, 25 bp, Homo sapien
tcagactcgcaggtagagttgacct

SEQ ID NO: 1419330 - DNA, 25 bp, Homo sapien
tgcatcagggtctggccttcagact

SEQ ID NO: 1419331 - DNA, 25 bp, Homo sapien
gttggccagcttagcttcagtgagc

SEQ ID NO: 1419332 - DNA, 25 bp, Homo sapien
agcttagcttcagtgagccccgctt

SEQ ID NO: 1419333 - DNA, 25 bp, Homo sapien
tcccctcacgttgttcgctggtgct

SEQ ID NO: 1419334 - DNA, 25 bp, Homo sapien
ttgtcccctcacgttgttcgctggt

SEQ ID NO: 1419335 - DNA, 25 bp, Homo sapien
cctcacgttgttcgctggtgctgca

SEQ ID NO: 1419336 - DNA, 25 bp, Homo sapien
cacgttgttcgctggtgctgcaact

SEQ ID NO: 1419337 - DNA, 25 bp, Homo sapien
tccttgtacatcgttctgacattta

SEQ ID NO: 1419338 - DNA, 25 bp, Homo sapien
gtttccttgtacatcgttctgacat

SEQ ID NO: 1419339 - DNA, 25 bp, Homo sapien
gctgtttccttgtacatcgttctga

SEQ ID NO: 1419340 - DNA, 25 bp, Homo sapien
tacatcgttctgacatttaatgagt

SEQ ID NO: 1419341 - DNA, 25 bp, Homo sapien
tcatggcctctggtgtgtgggcagt

SEQ ID NO: 1419342 - DNA, 25 bp, Homo sapien
agttctggctgtgttaggtgtttta

SEQ ID NO: 1419343 - DNA, 25 bp, Homo sapien
gatgcaaagcgtgctggagctgcaa

SEQ ID NO: 1419344 - DNA, 25 bp, Homo sapien
tgggagatgcaaagcgtgctggagc

SEQ ID NO: 1419345 - DNA, 25 bp, Homo sapien
tccacgccgccgaggccgaagttga

SEQ ID NO: 1419346 - DNA, 25 bp, Homo sapien
agatttgagcgagcaagggccagca

SEQ ID NO: 1419347 - DNA, 25 bp, Homo sapien
tgaaagcattttcgggaccatgagg

SEQ ID NO: 1419348 - DNA, 25 bp, Homo sapien
cgcatgcgaccaagtagcacaatga

SEQ ID NO: 1419349 - DNA, 25 bp, Homo sapien
ctgggaggtgcagctgggtcagtgg

SEQ ID NO: 1419350 - DNA, 25 bp, Homo sapien
gacatgtggaaacgtcacgcgcagc

SEQ ID NO: 1419351 - DNA, 25 bp, Homo sapien
tcaggccaccgagcagacatgtgga

SEQ ID NO: 1419352 - DNA, 25 bp, Homo sapien
ggcgggaacgtctaagcatgaaact

SEQ ID NO: 1419353 - DNA, 25 bp, Homo sapien
gaaacttgccacttatttagcctgt

SEQ ID NO: 1419354 - DNA, 25 bp, Homo sapien
cacccatccactgagtcttggtggg

SEQ ID NO: 1419355 - DNA, 25 bp, Homo sapien
tggggtctgtgaaatgcctcatcat

SEQ ID NO: 1419356 - DNA, 25 bp, Homo sapien
cagcacccatccactgagtcttggt

SEQ ID NO: 1419357 - DNA, 25 bp, Homo sapien
cttggtggggtctgtgaaatgcctc

SEQ ID NO: 1419358 - DNA, 25 bp, Homo sapien
gggaaacgtgtctgtgtaagcccca

SEQ ID NO: 1419359 - DNA, 25 bp, Homo sapien
tgtggagcctggtccttcaggctga

SEQ ID NO: 1419360 - DNA, 25 bp, Homo sapien
gggcatgcttctgcccatcagtgtg

SEQ ID NO: 1419361 - DNA, 25 bp, Homo sapien
caggctgataaaggatctcattcca

SEQ ID NO: 1419362 - DNA, 25 bp, Homo sapien
tccaccctgtagcagggagctggct

SEQ ID NO: 1419363 - DNA, 25 bp, Homo sapien
ctcttccaccctgtagcagggagct

SEQ ID NO: 1419364 - DNA, 25 bp, Homo sapien
ctggctgccaggcaaagtctgagca

SEQ ID NO: 1419365 - DNA, 25 bp, Homo sapien
tgattccttttgaaaagttcctggc

SEQ ID NO: 1419366 - DNA, 25 bp, Homo sapien
tgagctcccataagtctagggccat

SEQ ID NO: 1419367 - DNA, 25 bp, Homo sapien
cttgcatatatcttgtgagctccca

SEQ ID NO: 1419368 - DNA, 25 bp, Homo sapien
tggcactgagtgcagcgtctggcat

SEQ ID NO: 1419369 - DNA, 25 bp, Homo sapien
gccattttcaggttgtggcactgag

SEQ ID NO: 1419370 - DNA, 25 bp, Homo sapien
tgataaatggggcaactcgaggggg

SEQ ID NO: 1419371 - DNA, 25 bp, Homo sapien
aatggggcaactcgagggggacgtg

SEQ ID NO: 1419372 - DNA, 25 bp, Homo sapien
gcaactcgagggggacgtgggagcc

SEQ ID NO: 1419373 - DNA, 25 bp, Homo sapien
catttactgctgtgctgctaataaa

SEQ ID NO: 1419374 - DNA, 25 bp, Homo sapien
tgcaaaggaatttcccatttggtgg

SEQ ID NO: 1419375 - DNA, 25 bp, Homo sapien
gggctgatggcttattgtctttgaa

SEQ ID NO: 1419376 - DNA, 25 bp, Homo sapien
tcttgattatgaacccctgggtgag

SEQ ID NO: 1419377 - DNA, 25 bp, Homo sapien
tggtggcgtaattctcattgatgtc

SEQ ID NO: 1419378 - DNA, 25 bp, Homo sapien
ttctcattgggcctaattacccaag

SEQ ID NO: 1419379 - DNA, 25 bp, Homo sapien
ctaattacccaagtgaagtcatcca

SEQ ID NO: 1419380 - DNA, 25 bp, Homo sapien
cattgggcctaattacccaagtgaa

SEQ ID NO: 1419381 - DNA, 25 bp, Homo sapien
ggcctaattacccaagtgaagtcat

SEQ ID NO: 1419382 - DNA, 25 bp, Homo sapien
aacctgaaaactgcttgtgcctctt

SEQ ID NO: 1419383 - DNA, 25 bp, Homo sapien
tctttctcatggtcactagatggct

SEQ ID NO: 1419384 - DNA, 25 bp, Homo sapien
catggtcactagatggctgttgcac

SEQ ID NO: 1419385 - DNA, 25 bp, Homo sapien
tctcatggtcactagatggctgttg

SEQ ID NO: 1419386 - DNA, 25 bp, Homo sapien
ttttctttctcatggtcactagatg

SEQ ID NO: 1419387 - DNA, 25 bp, Homo sapien
caggcctccagtaaaggaaagaact

SEQ ID NO: 1419388 - DNA, 25 bp, Homo sapien
tctgtgcaaactaatggttcccctt

SEQ ID NO: 1419389 - DNA, 25 bp, Homo sapien
ggatgaccattgtggaacttctctt

SEQ ID NO: 1419390 - DNA, 25 bp, Homo sapien
gaaatgctggtctagttgagacccc

SEQ ID NO: 1419391 - DNA, 25 bp, Homo sapien
agagcagaaagggaatcttgcttgc

SEQ ID NO: 1419392 - DNA, 25 bp, Homo sapien
ttttgagggatgtgatgccacagtg

SEQ ID NO: 1419393 - DNA, 25 bp, Homo sapien
cttgcttgctaatgtgagagttgga

SEQ ID NO: 1419394 - DNA, 25 bp, Homo sapien
ggaatcttgcttgctaatgtgagag

SEQ ID NO: 1419395 - DNA, 25 bp, Homo sapien
ttgcagcccttgtctgttctcagct

SEQ ID NO: 1419396 - DNA, 25 bp, Homo sapien
ctcaggtctggctgtaattgtacgc

SEQ ID NO: 1419397 - DNA, 25 bp, Homo sapien
tcaggtctggctgtaattgtacgca

SEQ ID NO: 1419398 - DNA, 25 bp, Homo sapien
tctttgtgtagcatgtggtcccagg

SEQ ID NO: 1419399 - DNA, 25 bp, Homo sapien
catgtttcccatgggagtacaaagc

SEQ ID NO: 1419400 - DNA, 25 bp, Homo sapien
tttcccatgggagtacaaagccaag

SEQ ID NO: 1419401 - DNA, 25 bp, Homo sapien
tgtttcccatgggagtacaaagcca

SEQ ID NO: 1419402 - DNA, 25 bp, Homo sapien
atccctctgccgctccctttccatc

SEQ ID NO: 1419403 - DNA, 25 bp, Homo sapien
tctgggacatggtccttcctctgct

SEQ ID NO: 1419404 - DNA, 25 bp, Homo sapien
acctgctcccattttgacttcctga

SEQ ID NO: 1419405 - DNA, 25 bp, Homo sapien
gctccagcctcaccgaaaatctttg

SEQ ID NO: 1419406 - DNA, 25 bp, Homo sapien
tcttgcacctgctcccattttgact

SEQ ID NO: 1419407 - DNA, 25 bp, Homo sapien
aagtaactgttttctactctgagcg

SEQ ID NO: 1419408 - DNA, 25 bp, Homo sapien
ggagaattccacattgtaatcccca

SEQ ID NO: 1419409 - DNA, 25 bp, Homo sapien
aaacatccttgatagcaagtaactg

SEQ ID NO: 1419410 - DNA, 25 bp, Homo sapien
tactctgagcgtatggagaattcca

SEQ ID NO: 1419411 - DNA, 25 bp, Homo sapien
tccttaatgggtgtcagttcaaggt

SEQ ID NO: 1419412 - DNA, 25 bp, Homo sapien
tgtaggcactgttcctgggccaggc

SEQ ID NO: 1419413 - DNA, 25 bp, Homo sapien
tgtcagttcaaggtaaggagaagag

SEQ ID NO: 1419414 - DNA, 25 bp, Homo sapien
aatgcccctgtaatctgcaggtttg

SEQ ID NO: 1419415 - DNA, 25 bp, Homo sapien
tccatagtttgatccagggtctttc

SEQ ID NO: 1419416 - DNA, 25 bp, Homo sapien
ctgctccatagtttgatccagggtc

SEQ ID NO: 1419417 - DNA, 25 bp, Homo sapien
gttgaatagtcgttgcactgctcca

SEQ ID NO: 1419418 - DNA, 25 bp, Homo sapien
ttagcaccagaaggcgttgaatagt

SEQ ID NO: 1419419 - DNA, 25 bp, Homo sapien
ttgctggcaccttgagtggctgctg

SEQ ID NO: 1419420 - DNA, 25 bp, Homo sapien
gatgccccagacaattacatctgcc

SEQ ID NO: 1419421 - DNA, 25 bp, Homo sapien
ctgatgccccagacaattacatctg

SEQ ID NO: 1419422 - DNA, 25 bp, Homo sapien
tgatgccccagacaattacatctgc

SEQ ID NO: 1419423 - DNA, 25 bp, Homo sapien
acccttggggtagcaaatgccacag

SEQ ID NO: 1419424 - DNA, 25 bp, Homo sapien
acaggggcatttgagagcaagcctc

SEQ ID NO: 1419425 - DNA, 25 bp, Homo sapien
gagagcaagcctctggacccttggg

SEQ ID NO: 1419426 - DNA, 25 bp, Homo sapien
ggacccttggggtagcaaatgccac

SEQ ID NO: 1419427 - DNA, 25 bp, Homo sapien
gcatgcacacgcaatcactttgcaa

SEQ ID NO: 1419428 - DNA, 25 bp, Homo sapien
cttttccatctttaggggagatggg

SEQ ID NO: 1419429 - DNA, 25 bp, Homo sapien
ttttccatctttaggggagatggga

SEQ ID NO: 1419430 - DNA, 25 bp, Homo sapien
gtgcatgcacacgcaatcactttgc

SEQ ID NO: 1419431 - DNA, 25 bp, Homo sapien
ctcagtcctctctcaagggcctttc

SEQ ID NO: 1419432 - DNA, 25 bp, Homo sapien
tcagtcctctctcaagggcctttcc

SEQ ID NO: 1419433 - DNA, 25 bp, Homo sapien
cagagctatgattgtagctaggatt

SEQ ID NO: 1419434 - DNA, 25 bp, Homo sapien
gccttgcaggccaatgcgacacttt

SEQ ID NO: 1419435 - DNA, 25 bp, Homo sapien
tagactgatggactcggtaccagct

SEQ ID NO: 1419436 - DNA, 25 bp, Homo sapien
cagggaaccatcacatgcttggcca

SEQ ID NO: 1419437 - DNA, 25 bp, Homo sapien
ggtgggcattctccaatgactagga

SEQ ID NO: 1419438 - DNA, 25 bp, Homo sapien
caaggtttgaaacagggattcccat

SEQ ID NO: 1419439 - DNA, 25 bp, Homo sapien
tcttcgtcaaggtttgaaacaggga

SEQ ID NO: 1419440 - DNA, 25 bp, Homo sapien
tcgtcaaggtttgaaacagggattc

SEQ ID NO: 1419441 - DNA, 25 bp, Homo sapien
agctcctcttcgtcaaggtttgaaa

SEQ ID NO: 1419442 - DNA, 25 bp, Homo sapien
gaagatgcaggaatcccttttctaa

SEQ ID NO: 1419443 - DNA, 25 bp, Homo sapien
gctccagagttgagcatgtgctgct

SEQ ID NO: 1419444 - DNA, 25 bp, Homo sapien
tagaggcgtcttagttagacatatg

SEQ ID NO: 1419445 - DNA, 25 bp, Homo sapien
cagagatcatgcattctgatagaga

SEQ ID NO: 1419446 - DNA, 25 bp, Homo sapien
tggaaggtgccaagtacgaactaga

SEQ ID NO: 1419447 - DNA, 25 bp, Homo sapien
ttaggatatttggttatagcagccc

SEQ ID NO: 1419448 - DNA, 25 bp, Homo sapien
catttgtcctttgcaccacgtgagg

SEQ ID NO: 1419449 - DNA, 25 bp, Homo sapien
taagcccaaagcgtgtcattaggga

SEQ ID NO: 1419450 - DNA, 25 bp, Homo sapien
tggaaattgtttgggagcagcccgc

SEQ ID NO: 1419451 - DNA, 25 bp, Homo sapien
cctgggaagggtaacactcgactct

SEQ ID NO: 1419452 - DNA, 25 bp, Homo sapien
aaaataggctacgtttcccagcgag

SEQ ID NO: 1419453 - DNA, 25 bp, Homo sapien
tgaaacaatgcttgccccgggaaat

SEQ ID NO: 1419454 - DNA, 25 bp, Homo sapien
gggaaatcagctgtccagggattca

SEQ ID NO: 1419455 - DNA, 25 bp, Homo sapien
aaggctgggccacattaggtattta

SEQ ID NO: 1419456 - DNA, 25 bp, Homo sapien
gggctttccttgtcctactaggaga

SEQ ID NO: 1419457 - DNA, 25 bp, Homo sapien
gatacagcaggcacaactctcactt

SEQ ID NO: 1419458 - DNA, 25 bp, Homo sapien
tggccataacaaagtgggtgaacta

SEQ ID NO: 1419459 - DNA, 25 bp, Homo sapien
tgtagctcacccaacattcctgtgc

SEQ ID NO: 1419460 - DNA, 25 bp, Homo sapien
gacttgcaagaatcactgagtgacc

SEQ ID NO: 1419461 - DNA, 25 bp, Homo sapien
tgtaacccattagcaagtcaccagg

SEQ ID NO: 1419462 - DNA, 25 bp, Homo sapien
tatacaataagggtgtctctgggtg

SEQ ID NO: 1419463 - DNA, 25 bp, Homo sapien
cacaatgtggttgcacgtgtgcaga

SEQ ID NO: 1419464 - DNA, 25 bp, Homo sapien
tcctggaccatactggagagatgcc

SEQ ID NO: 1419465 - DNA, 25 bp, Homo sapien
cagttttctctaaggcaaggcacag

SEQ ID NO: 1419466 - DNA, 25 bp, Homo sapien
ccacatggattagattctagggtca

SEQ ID NO: 1419467 - DNA, 25 bp, Homo sapien
gggtcagtatccactccccaggatc

SEQ ID NO: 1419468 - DNA, 25 bp, Homo sapien
tgtggtgtcagcatggaaaataagc

SEQ ID NO: 1419469 - DNA, 25 bp, Homo sapien
taagctgctttgtactttagccatg

SEQ ID NO: 1419470 - DNA, 25 bp, Homo sapien
tcacttaaagactggaaaccctcaa

SEQ ID NO: 1419471 - DNA, 25 bp, Homo sapien
tacaggcttgcttaacatgagtagc

SEQ ID NO: 1419472 - DNA, 25 bp, Homo sapien
ggacagttccaaggaggctttctcc

SEQ ID NO: 1419473 - DNA, 25 bp, Homo sapien
tatattggcctgactaaaggaaacc

SEQ ID NO: 1419474 - DNA, 25 bp, Homo sapien
gattatggttctaccacccaaggag

SEQ ID NO: 1419475 - DNA, 25 bp, Homo sapien
gcatgtctcagaggcgtgtgatcca

SEQ ID NO: 1419476 - DNA, 25 bp, Homo sapien
caaaggctggcaaaccgagaggtct

SEQ ID NO: 1419477 - DNA, 25 bp, Homo sapien
ggagcagccctactcttcaaaagtg

SEQ ID NO: 1419478 - DNA, 25 bp, Homo sapien
agggatcacaaccagaggtggcccc

SEQ ID NO: 1419479 - DNA, 25 bp, Homo sapien
ctacttaggagggatcacaaccaga

SEQ ID NO: 1419480 - DNA, 25 bp, Homo sapien
ctgggcatcattggcattgggtttc

SEQ ID NO: 1419481 - DNA, 25 bp, Homo sapien
ggatgggttccatccggctcaggat

SEQ ID NO: 1419482 - DNA, 25 bp, Homo sapien
cattcatgctgacggagaacctgga

SEQ ID NO: 1419483 - DNA, 25 bp, Homo sapien
ccagccaggtcgtgaaactttggtc

SEQ ID NO: 1419484 - DNA, 25 bp, Homo sapien
tgttcccgtaccaagggtagctcac

SEQ ID NO: 1419485 - DNA, 25 bp, Homo sapien
ccccaagagctgaagagggtccact

SEQ ID NO: 1419486 - DNA, 25 bp, Homo sapien
ggcaaagcagaagacatgcacaaga

SEQ ID NO: 1419487 - DNA, 25 bp, Homo sapien
cagaagacatgcacaagaaaagaag

SEQ ID NO: 1419488 - DNA, 25 bp, Homo sapien
ctggcaaagcagaagacatgcacaa

SEQ ID NO: 1419489 - DNA, 25 bp, Homo sapien
gaagacatgcacaagaaaagaagag

SEQ ID NO: 1419490 - DNA, 25 bp, Homo sapien
tttcgctccgggtaccagggatgat

SEQ ID NO: 1419491 - DNA, 25 bp, Homo sapien
tagtcagcagagtgttgatgcatgc

SEQ ID NO: 1419492 - DNA, 25 bp, Homo sapien
agggcagaagtctagtcagcagagt

SEQ ID NO: 1419493 - DNA, 25 bp, Homo sapien
gctccatattttcgctccgggtacc

SEQ ID NO: 1419494 - DNA, 25 bp, Homo sapien
ccacagctgcaagagccttttttct

SEQ ID NO: 1419495 - DNA, 25 bp, Homo sapien
agccccagcctgaagtgaagggagg

SEQ ID NO: 1419496 - DNA, 25 bp, Homo sapien
aggaggtgaccccacagctgcaaga

SEQ ID NO: 1419497 - DNA, 25 bp, Homo sapien
gtgaccccacagctgcaagagcctt

SEQ ID NO: 1419498 - DNA, 25 bp, Homo sapien
tcttccatagccctagggaattagg

SEQ ID NO: 1419499 - DNA, 25 bp, Homo sapien
tctggccacatgtagtcattgggaa

SEQ ID NO: 1419500 - DNA, 25 bp, Homo sapien
gaattaggactacatcattaaggga

SEQ ID NO: 1419501 - DNA, 25 bp, Homo sapien
cactcttgtggctatctcaggaggg

SEQ ID NO: 1419502 - DNA, 25 bp, Homo sapien
ggaatggcgcataatttgtctctct

SEQ ID NO: 1419503 - DNA, 25 bp, Homo sapien
tcttacctggtctactggaatggcg

SEQ ID NO: 1419504 - DNA, 25 bp, Homo sapien
gagaagtctctgaaaagttccaaga

SEQ ID NO: 1419505 - DNA, 25 bp, Homo sapien
ccctaggctgccacagtgactgtat

SEQ ID NO: 1419506 - DNA, 25 bp, Homo sapien
tctctcttagattactgcagtggcc

SEQ ID NO: 1419507 - DNA, 25 bp, Homo sapien
tcattcacagaagtaacaaggttgt

SEQ ID NO: 1419508 - DNA, 25 bp, Homo sapien
tgacaccggtccaagctagagttgt

SEQ ID NO: 1419509 - DNA, 25 bp, Homo sapien
tcaaggtgtagtacctgactgctgc

SEQ ID NO: 1419510 - DNA, 25 bp, Homo sapien
cagctaatggacttgccaatgggcc

SEQ ID NO: 1419511 - DNA, 25 bp, Homo sapien
ctttagacaatcagctattgaccca

SEQ ID NO: 1419512 - DNA, 25 bp, Homo sapien
tattgacccaaagctcacagctaat

SEQ ID NO: 1419513 - DNA, 25 bp, Homo sapien
gccaatgggcctaataatgaaaaca

SEQ ID NO: 1419514 - DNA, 25 bp, Homo sapien
gccatgctctttcacactgggtaag

SEQ ID NO: 1419515 - DNA, 25 bp, Homo sapien
ccttttaagagacccactctggtat

SEQ ID NO: 1419516 - DNA, 25 bp, Homo sapien
taagagacccactctggtatcttct

SEQ ID NO: 1419517 - DNA, 25 bp, Homo sapien
gtatcttctggccatgctctttcac

SEQ ID NO: 1419518 - DNA, 25 bp, Homo sapien
cgtgagtctcatgttccgtgtcatt

SEQ ID NO: 1419519 - DNA, 25 bp, Homo sapien
gagcattgaggcttttcatctaacg

SEQ ID NO: 1419520 - DNA, 25 bp, Homo sapien
taacgtgaaggagagcaatgtgctc

SEQ ID NO: 1419521 - DNA, 25 bp, Homo sapien
aatgtgctcccagtcacgtgagtct

SEQ ID NO: 1419522 - DNA, 25 bp, Homo sapien
caggcccagtggcatttgttctcca

SEQ ID NO: 1419523 - DNA, 25 bp, Homo sapien
tttgttctccatcccgaaggtcaca

SEQ ID NO: 1419524 - DNA, 25 bp, Homo sapien
aggtggcaggtcagatgccttccca

SEQ ID NO: 1419525 - DNA, 25 bp, Homo sapien
acccaaggtggcaggtcagatgcct

SEQ ID NO: 1419526 - DNA, 25 bp, Homo sapien
cttaacaccgtgaacacctaatgcc

SEQ ID NO: 1419527 - DNA, 25 bp, Homo sapien
agtctacaatcctgcaggtcctgtg

SEQ ID NO: 1419528 - DNA, 25 bp, Homo sapien
tggagtctacaatcctgcaggtcct

SEQ ID NO: 1419529 - DNA, 25 bp, Homo sapien
gctataaaaggccttaacaccgtga

SEQ ID NO: 1419530 - DNA, 25 bp, Homo sapien
gccacactgtccacacgtgtggaca

SEQ ID NO: 1419531 - DNA, 25 bp, Homo sapien
aggaattcacatgggtattatcaaa

SEQ ID NO: 1419532 - DNA, 25 bp, Homo sapien
agcacacaaaaggagtgcctgtctg

SEQ ID NO: 1419533 - DNA, 25 bp, Homo sapien
cacaaaaggagtgcctgtctgcagt

SEQ ID NO: 1419534 - DNA, 25 bp, Homo sapien
gaataaaaagtgtggcagtatccct

SEQ ID NO: 1419535 - DNA, 25 bp, Homo sapien
ttatctgtgccaatggaagcgagca

SEQ ID NO: 1419536 - DNA, 25 bp, Homo sapien
tctcagcaggatgatctgcccaaaa

SEQ ID NO: 1419537 - DNA, 25 bp, Homo sapien
tttccagaacttagctctcagcagg

SEQ ID NO: 1419538 - DNA, 25 bp, Homo sapien
taattcccatgtgaaaagtgcagct

SEQ ID NO: 1419539 - DNA, 25 bp, Homo sapien
ggtctcactggtctgaaagaatgca

SEQ ID NO: 1419540 - DNA, 25 bp, Homo sapien
tagcataggtttccatcaagaaggt

SEQ ID NO: 1419541 - DNA, 25 bp, Homo sapien
caggaatggcagacctatgggtttt

SEQ ID NO: 1419542 - DNA, 25 bp, Homo sapien
gggcaagggtgagcaaacccgacat

SEQ ID NO: 1419543 - DNA, 25 bp, Homo sapien
tgggcaagggtgagcaaacccgaca

SEQ ID NO: 1419544 - DNA, 25 bp, Homo sapien
gatggtttcaatctcttggcctggt

SEQ ID NO: 1419545 - DNA, 25 bp, Homo sapien
tttcaatctcttggcctggtgatct

SEQ ID NO: 1419546 - DNA, 25 bp, Homo sapien
ggtttcaatctcttggcctggtgat

SEQ ID NO: 1419547 - DNA, 25 bp, Homo sapien
tggtttcaatctcttggcctggtga

SEQ ID NO: 1419548 - DNA, 25 bp, Homo sapien
aacgataaatggattcaagaagccc

SEQ ID NO: 1419549 - DNA, 25 bp, Homo sapien
tgtggatgaatttaggaaaccctca

SEQ ID NO: 1419550 - DNA, 25 bp, Homo sapien
agtcaaaattgtagtcctctcgtcc

SEQ ID NO: 1419551 - DNA, 25 bp, Homo sapien
gaagtgtgtgagaccttttcaggca

SEQ ID NO: 1419552 - DNA, 25 bp, Homo sapien
gaaccaaggttaacagcagaaacag

SEQ ID NO: 1419553 - DNA, 25 bp, Homo sapien
tgaacttgtgtttggaacctgggac

SEQ ID NO: 1419554 - DNA, 25 bp, Homo sapien
gggcatcccactagtcaatgagtat

SEQ ID NO: 1419555 - DNA, 25 bp, Homo sapien
tatggataaatgtgctccctgtgac

SEQ ID NO: 1419556 - DNA, 25 bp, Homo sapien
ggtacactcttcctgttaatctaac

SEQ ID NO: 1419557 - DNA, 25 bp, Homo sapien
cacttccttgacccaaagtctgtgc

SEQ ID NO: 1419558 - DNA, 25 bp, Homo sapien
tcttggtgacgggtggcttctgaat

SEQ ID NO: 1419559 - DNA, 25 bp, Homo sapien
taacacttcaactttaacaacagtg

SEQ ID NO: 1419560 - DNA, 25 bp, Homo sapien
tctccaggctgctaggatatccctc

SEQ ID NO: 1419561 - DNA, 25 bp, Homo sapien
tctgtcatctttgacgctacttgga

SEQ ID NO: 1419562 - DNA, 25 bp, Homo sapien
gacgctacttggatcttatttcttc

SEQ ID NO: 1419563 - DNA, 25 bp, Homo sapien
gctgctaggatatccctctcagact

SEQ ID NO: 1419564 - DNA, 25 bp, Homo sapien
aaccggcgctgctgaaagttggaga

SEQ ID NO: 1419565 - DNA, 25 bp, Homo sapien
ccagtgccgcaattaggaaagtttt

SEQ ID NO: 1419566 - DNA, 25 bp, Homo sapien
taaggaccctagacagacaagagat

SEQ ID NO: 1419567 - DNA, 25 bp, Homo sapien
tgtggttccagacggaaacgcctcc

SEQ ID NO: 1419568 - DNA, 25 bp, Homo sapien
ttcaacagtcgcgagggcaaggaca

SEQ ID NO: 1419569 - DNA, 25 bp, Homo sapien
gggcaaggacagaactaccaactcc

SEQ ID NO: 1419570 - DNA, 25 bp, Homo sapien
agaactaccaactcccgctcggatg

SEQ ID NO: 1419571 - DNA, 25 bp, Homo sapien
caagggttcgaaacttcaacagtcg

SEQ ID NO: 1419572 - DNA, 25 bp, Homo sapien
ttcccggggagccccacaaagcaca

SEQ ID NO: 1419573 - DNA, 25 bp, Homo sapien
ccggggagccccacaaagcacagac

SEQ ID NO: 1419574 - DNA, 25 bp, Homo sapien
tcttcccggggagccccacaaagca

SEQ ID NO: 1419575 - DNA, 25 bp, Homo sapien
cccggggagccccacaaagcacaga

SEQ ID NO: 1419576 - DNA, 25 bp, Homo sapien
aaaatgccttcgcaaggagcctccc

SEQ ID NO: 1419577 - DNA, 25 bp, Homo sapien
ttctcctcgcgtttctgggaagtca

SEQ ID NO: 1419578 - DNA, 25 bp, Homo sapien
gtcagaagcaaaccacgagaaaatg

SEQ ID NO: 1419579 - DNA, 25 bp, Homo sapien
gcacctttctcctcgcgtttctggg

SEQ ID NO: 1419580 - DNA, 25 bp, Homo sapien
tgattgcacgcctgaatccagccca

SEQ ID NO: 1419581 - DNA, 25 bp, Homo sapien
tgcccaggtcgctgtaggtgttgaa

SEQ ID NO: 1419582 - DNA, 25 bp, Homo sapien
tcttgtagcgcaggacgatgggcga

SEQ ID NO: 1419583 - DNA, 25 bp, Homo sapien
acgatgggcgaggtctcctcgatgc

SEQ ID NO: 1419584 - DNA, 25 bp, Homo sapien
gatggtggcgcacacatcgtacacc

SEQ ID NO: 1419585 - DNA, 25 bp, Homo sapien
caggtgatgctttggatacagccca

SEQ ID NO: 1419586 - DNA, 25 bp, Homo sapien
ccggatccgcgccttgcaggtgatg

SEQ ID NO: 1419587 - DNA, 25 bp, Homo sapien
acaccacgatgttctcgcgccggat

SEQ ID NO: 1419588 - DNA, 25 bp, Homo sapien
gtagccggaccacaccgacactcct

SEQ ID NO: 1419589 - DNA, 25 bp, Homo sapien
gccccgtagccggaccacaccgaca

SEQ ID NO: 1419590 - DNA, 25 bp, Homo sapien
ccggaccacaccgacactcctcggc

SEQ ID NO: 1419591 - DNA, 25 bp, Homo sapien
ccgtagccggaccacaccgacactc

SEQ ID NO: 1419592 - DNA, 25 bp, Homo sapien
gtgcatgtctgcaggcgttcctcat

SEQ ID NO: 1419593 - DNA, 25 bp, Homo sapien
gcaggcgttcctcatcagcagggtt

SEQ ID NO: 1419594 - DNA, 25 bp, Homo sapien
agcagctcagtgctggtgcatgtct

SEQ ID NO: 1419595 - DNA, 25 bp, Homo sapien
gcagcagctcagtgctggtgcatgt

SEQ ID NO: 1419596 - DNA, 25 bp, Homo sapien
tgtggaaggcagagtcaccccttgt

SEQ ID NO: 1419597 - DNA, 25 bp, Homo sapien
aaggcagagtcaccccttgtcctct

SEQ ID NO: 1419598 - DNA, 25 bp, Homo sapien
gaaggcagagtcaccccttgtcctc

SEQ ID NO: 1419599 - DNA, 25 bp, Homo sapien
ttaatgggacatttggtgaagctgc

SEQ ID NO: 1419600 - DNA, 25 bp, Homo sapien
catttggtgaagctgctagcctgag

SEQ ID NO: 1419601 - DNA, 25 bp, Homo sapien
taattttaggcacataggtaggtga

SEQ ID NO: 1419602 - DNA, 25 bp, Homo sapien
ttaggcacataggtaggtgagtatg

SEQ ID NO: 1419603 - DNA, 25 bp, Homo sapien
gatccatcctgatccttatgagaag

SEQ ID NO: 1419604 - DNA, 25 bp, Homo sapien
ctgggttgtcacagttagaggctga

SEQ ID NO: 1419605 - DNA, 25 bp, Homo sapien
aagctgttgtgtcccagaggctcga

SEQ ID NO: 1419606 - DNA, 25 bp, Homo sapien
tagaggctgagacagatcctgatcc

SEQ ID NO: 1419607 - DNA, 25 bp, Homo sapien
gccatgctgtatacagcagggacaa

SEQ ID NO: 1419608 - DNA, 25 bp, Homo sapien
gtatacagcagggacaatctggcca

SEQ ID NO: 1419609 - DNA, 25 bp, Homo sapien
cctggggccatgctgtatacagcag

SEQ ID NO: 1419610 - DNA, 25 bp, Homo sapien
tatacagcagggacaatctggccat

SEQ ID NO: 1419611 - DNA, 25 bp, Homo sapien
taagatagaaataagttatacctat

SEQ ID NO: 1419612 - DNA, 25 bp, Homo sapien
aggtagagctctagtagcttctagt

SEQ ID NO: 1419613 - DNA, 25 bp, Homo sapien
ctctagtagcttctagtcagctatc

SEQ ID NO: 1419614 - DNA, 25 bp, Homo sapien
tgacatccaattttgggaacactga

SEQ ID NO: 1419615 - DNA, 25 bp, Homo sapien
gcagatattccacagtacccaaatc

SEQ ID NO: 1419616 - DNA, 25 bp, Homo sapien
aaatcttcacttgagtctgataacc

SEQ ID NO: 1419617 - DNA, 25 bp, Homo sapien
actggagagagtttgcagatattcc

SEQ ID NO: 1419618 - DNA, 25 bp, Homo sapien
cacttgagtctgataaccataggcc

SEQ ID NO: 1419619 - DNA, 25 bp, Homo sapien
gaagtaggacctgttcccatgggaa

SEQ ID NO: 1419620 - DNA, 25 bp, Homo sapien
gactctatggtcaatcttagttctt

SEQ ID NO: 1419621 - DNA, 25 bp, Homo sapien
ggctcctgtgactctatggtcaatc

SEQ ID NO: 1419622 - DNA, 25 bp, Homo sapien
taaggaaaggcagataggctcctgt

SEQ ID NO: 1419623 - DNA, 25 bp, Homo sapien
gcgctcctgacagtgctcgccttta

SEQ ID NO: 1419624 - DNA, 25 bp, Homo sapien
cgctcctgacagtgctcgcctttat

SEQ ID NO: 1419625 - DNA, 25 bp, Homo sapien
gctcctgacagtgctcgcctttatc

SEQ ID NO: 1419626 - DNA, 25 bp, Homo sapien
ctcccattggttacatcaaaggtcc

SEQ ID NO: 1419627 - DNA, 25 bp, Homo sapien
gccacttctgtctctaccacagcca

SEQ ID NO: 1419628 - DNA, 25 bp, Homo sapien
ccattggttacatcaaaggtccggg

SEQ ID NO: 1419629 - DNA, 25 bp, Homo sapien
agccacttctgtctctaccacagcc

SEQ ID NO: 1419630 - DNA, 25 bp, Homo sapien
ggcgggaggaagccttcaggctttg

SEQ ID NO: 1419631 - DNA, 25 bp, Homo sapien
tgttctccaggcgaagttctggttt

SEQ ID NO: 1419632 - DNA, 25 bp, Homo sapien
gttctccaggcgaagttctggtttc

SEQ ID NO: 1419633 - DNA, 25 bp, Homo sapien
ttctccaggcgaagttctggtttcc

SEQ ID NO: 1419634 - DNA, 25 bp, Homo sapien
actggaggcctcttccgagcaagag

SEQ ID NO: 1419635 - DNA, 25 bp, Homo sapien
cactggaggcctcttccgagcaaga

SEQ ID NO: 1419636 - DNA, 25 bp, Homo sapien
ctggaggcctcttccgagcaagaga

SEQ ID NO: 1419637 - DNA, 25 bp, Homo sapien
ctagtccggaaaatcctccagactc

SEQ ID NO: 1419638 - DNA, 25 bp, Homo sapien
tgtcagaatgaactctgctgcccgt

SEQ ID NO: 1419639 - DNA, 25 bp, Homo sapien
tactgacttggagcttggctgtagg

SEQ ID NO: 1419640 - DNA, 25 bp, Homo sapien
tgctgctctgttagctatactgact

SEQ ID NO: 1419641 - DNA, 25 bp, Homo sapien
gctgcccgtagctgctgctctgtta

SEQ ID NO: 1419642 - DNA, 25 bp, Homo sapien
tagctgctttgttgaccatagctac

SEQ ID NO: 1419643 - DNA, 25 bp, Homo sapien
atagctgctttgttgaccatagcta

SEQ ID NO: 1419644 - DNA, 25 bp, Homo sapien
gtgttctgctgagagtaactgctct

SEQ ID NO: 1419645 - DNA, 25 bp, Homo sapien
ggctgcatggagtagctcccaggta

SEQ ID NO: 1419646 - DNA, 25 bp, Homo sapien
ggatggaggtgcggtgactggctgc

SEQ ID NO: 1419647 - DNA, 25 bp, Homo sapien
gtgactggctgcatggagtagctcc

SEQ ID NO: 1419648 - DNA, 25 bp, Homo sapien
ggtaggagggtaggatggaggtgcg

SEQ ID NO: 1419649 - DNA, 25 bp, Homo sapien
cccctgtgctagattgaggttgact

SEQ ID NO: 1419650 - DNA, 25 bp, Homo sapien
ggtggtatcataagcaccagtgcca

SEQ ID NO: 1419651 - DNA, 25 bp, Homo sapien
tgggtggtctgtgcatatccttgag

SEQ ID NO: 1419652 - DNA, 25 bp, Homo sapien
cataggttccatagctttgttgccc

SEQ ID NO: 1419653 - DNA, 25 bp, Homo sapien
cagagcaactttgcataagcagcgc

SEQ ID NO: 1419654 - DNA, 25 bp, Homo sapien
gcgtccaaatgctagtgcgatcaat

SEQ ID NO: 1419655 - DNA, 25 bp, Homo sapien
tgttgtggaatgacactggctctgg

SEQ ID NO: 1419656 - DNA, 25 bp, Homo sapien
tcaattcttgcagcgtgaacttggc

SEQ ID NO: 1419657 - DNA, 25 bp, Homo sapien
gtgcttcgtaatgacagtcctaagg

SEQ ID NO: 1419658 - DNA, 25 bp, Homo sapien
cttgagggatgttgtgcttcgtaat

SEQ ID NO: 1419659 - DNA, 25 bp, Homo sapien
agtcctaaggcaggtgcttcctgca

SEQ ID NO: 1419660 - DNA, 25 bp, Homo sapien
gtaatgacagtcctaaggcaggtgc

SEQ ID NO: 1419661 - DNA, 25 bp, Homo sapien
caaactctgctaattcttcctgggt

SEQ ID NO: 1419662 - DNA, 25 bp, Homo sapien
ctcaaactctgctaattcttcctgg

SEQ ID NO: 1419663 - DNA, 25 bp, Homo sapien
gtcagatgagtgtttgttcttactc

SEQ ID NO: 1419664 - DNA, 25 bp, Homo sapien
gggtcagatgagtgtttgttcttac

SEQ ID NO: 1419665 - DNA, 25 bp, Homo sapien
ttcatttagcgtctttctgcagagc

SEQ ID NO: 1419666 - DNA, 25 bp, Homo sapien
cataattcgcctcatctggacctgt

SEQ ID NO: 1419667 - DNA, 25 bp, Homo sapien
cctgcagacccatcctgacaaaatg

SEQ ID NO: 1419668 - DNA, 25 bp, Homo sapien
gacaaaatgcctagggatcccttcc

SEQ ID NO: 1419669 - DNA, 25 bp, Homo sapien
gcctggatttcactgcagctaacac

SEQ ID NO: 1419670 - DNA, 25 bp, Homo sapien
cctgagaagtgttttgtccgtgtgc

SEQ ID NO: 1419671 - DNA, 25 bp, Homo sapien
ggaaatattccattgcagctaaggg

SEQ ID NO: 1419672 - DNA, 25 bp, Homo sapien
gaagtgttttgtccgtgtgctgctg

SEQ ID NO: 1419673 - DNA, 25 bp, Homo sapien
caacaagcagttgccaagcagcttc

SEQ ID NO: 1419674 - DNA, 25 bp, Homo sapien
gctgggtagcgcctccatcaccata

SEQ ID NO: 1419675 - DNA, 25 bp, Homo sapien
cctttgcttcctcccgcagtcctcc

SEQ ID NO: 1419676 - DNA, 25 bp, Homo sapien
aagaaagctcaacaagcagttgcca

SEQ ID NO: 1419677 - DNA, 25 bp, Homo sapien
gactcattggactcattaaccttca

SEQ ID NO: 1419678 - DNA, 25 bp, Homo sapien
gtcaccaacagcatcgacatccaag

SEQ ID NO: 1419679 - DNA, 25 bp, Homo sapien
gctcgataactgagagagtttcctc

SEQ ID NO: 1419680 - DNA, 25 bp, Homo sapien
gagtttcctccacaaacgtcttgga

SEQ ID NO: 1419681 - DNA, 25 bp, Homo sapien
ttggcactggccactaattcctggg

SEQ ID NO: 1419682 - DNA, 25 bp, Homo sapien
cctgggcctcttgagaaatgtggag

SEQ ID NO: 1419683 - DNA, 25 bp, Homo sapien
ggcaggtccaggttcattaccgatt

SEQ ID NO: 1419684 - DNA, 25 bp, Homo sapien
ctctggaaatcgggccctgcttatt

SEQ ID NO: 1419685 - DNA, 25 bp, Homo sapien
ggacagcaaagtttgatgtgaggat

SEQ ID NO: 1419686 - DNA, 25 bp, Homo sapien
gctggacagcaaagtttgatgtgag

SEQ ID NO: 1419687 - DNA, 25 bp, Homo sapien
atgtgagcctggagcaatgatgtga

SEQ ID NO: 1419688 - DNA, 25 bp, Homo sapien
agcctggagcaatgatgtgagcctg

SEQ ID NO: 1419689 - DNA, 25 bp, Homo sapien
tgaacagattaatctgtttgctctt

SEQ ID NO: 1419690 - DNA, 25 bp, Homo sapien
tgccagaatttagagatatggctcc

SEQ ID NO: 1419691 - DNA, 25 bp, Homo sapien
gaatttagagatatggctccttgac

SEQ ID NO: 1419692 - DNA, 25 bp, Homo sapien
gctccttgacttttgaacagattaa

SEQ ID NO: 1419693 - DNA, 25 bp, Homo sapien
cgtacatttcccatttccttctctg

SEQ ID NO: 1419694 - DNA, 25 bp, Homo sapien
catttcccatttccttctctgttca

SEQ ID NO: 1419695 - DNA, 25 bp, Homo sapien
tacatttcccatttccttctctgtt

SEQ ID NO: 1419696 - DNA, 25 bp, Homo sapien
ccgtacatttcccatttccttctct

SEQ ID NO: 1419697 - DNA, 25 bp, Homo sapien
cattgcagcagtaagtccaagtgaa

SEQ ID NO: 1419698 - DNA, 25 bp, Homo sapien
tagctgcctgcttgaaagcatgcct

SEQ ID NO: 1419699 - DNA, 25 bp, Homo sapien
tgaacagcctgagttgtagaaacag

SEQ ID NO: 1419700 - DNA, 25 bp, Homo sapien
gggttcagtgctggcactagccaaa

SEQ ID NO: 1419701 - DNA, 25 bp, Homo sapien
tggaaagcctcagcatgcacataac

SEQ ID NO: 1419702 - DNA, 25 bp, Homo sapien
ggaaagcctcagcatgcacataaca

SEQ ID NO: 1419703 - DNA, 25 bp, Homo sapien
aataactggctgcaatagttaggca

SEQ ID NO: 1419704 - DNA, 25 bp, Homo sapien
ccatggggtcatgggtgaataactg

SEQ ID NO: 1419705 - DNA, 25 bp, Homo sapien
tggcccatggggtcatgggtgaata

SEQ ID NO: 1419706 - DNA, 25 bp, Homo sapien
gaataactggctgcaatagttaggc

SEQ ID NO: 1419707 - DNA, 25 bp, Homo sapien
aggcctctgaatgcagtactttggg

SEQ ID NO: 1419708 - DNA, 25 bp, Homo sapien
cagttggggtgagagcaaggtgcct

SEQ ID NO: 1419709 - DNA, 25 bp, Homo sapien
caacttctggtagttggggttgctc

SEQ ID NO: 1419710 - DNA, 25 bp, Homo sapien
tgctctccaacataggactgccacc

SEQ ID NO: 1419711 - DNA, 25 bp, Homo sapien
gatctcctaagaagtcagtatcaca

SEQ ID NO: 1419712 - DNA, 25 bp, Homo sapien
tagaccaaagccatgagaggtctgc

SEQ ID NO: 1419713 - DNA, 25 bp, Homo sapien
tcacaagtaattgttcaaggaagtt

SEQ ID NO: 1419714 - DNA, 25 bp, Homo sapien
cattatagcaatctcttgaattcac

SEQ ID NO: 1419715 - DNA, 25 bp, Homo sapien
gatggtagatgtcaccagagactga

SEQ ID NO: 1419716 - DNA, 25 bp, Homo sapien
gatcagaatgcagattgtccaacta

SEQ ID NO: 1419717 - DNA, 25 bp, Homo sapien
cgatagtgctattcgatgaggtgga

SEQ ID NO: 1419718 - DNA, 25 bp, Homo sapien
caggaggcagagtcaatatgatttc

SEQ ID NO: 1419719 - DNA, 25 bp, Homo sapien
ttggttctcagataaagatgtgcag

SEQ ID NO: 1419720 - DNA, 25 bp, Homo sapien
gcttcgtaagctatattaccaaggg

SEQ ID NO: 1419721 - DNA, 25 bp, Homo sapien
tgcactggccaatggaacattgtgg

SEQ ID NO: 1419722 - DNA, 25 bp, Homo sapien
gttggttccaatccagtcctctggt

SEQ ID NO: 1419723 - DNA, 25 bp, Homo sapien
tgagcaaaacaagtagtggatagag

SEQ ID NO: 1419724 - DNA, 25 bp, Homo sapien
aacacgatgtgtgttcttgttgagc

SEQ ID NO: 1419725 - DNA, 25 bp, Homo sapien
caagtagtggatagaggctccagga

SEQ ID NO: 1419726 - DNA, 25 bp, Homo sapien
tataaaagatggagtcaacacgatg

SEQ ID NO: 1419727 - DNA, 25 bp, Homo sapien
tcagcaggtaactctgactgctatg

SEQ ID NO: 1419728 - DNA, 25 bp, Homo sapien
gattataggtggaaataagacgaga

SEQ ID NO: 1419729 - DNA, 25 bp, Homo sapien
tggaaggtcttttctcgatcgaagg

SEQ ID NO: 1419730 - DNA, 25 bp, Homo sapien
atgagtgacttatgagttcagcagg

SEQ ID NO: 1419731 - DNA, 25 bp, Homo sapien
cagctctccatgagtcttggaaatt

SEQ ID NO: 1419732 - DNA, 25 bp, Homo sapien
aatttttgttctatcctgatgtcac

SEQ ID NO: 1419733 - DNA, 25 bp, Homo sapien
gaacacttgcacttgttgttgctct

SEQ ID NO: 1419734 - DNA, 25 bp, Homo sapien
tcagaacgtgacaggtcaggaaccc

SEQ ID NO: 1419735 - DNA, 25 bp, Homo sapien
tcttcatgtcttgggttgggcaatc

SEQ ID NO: 1419736 - DNA, 25 bp, Homo sapien
taaacgaggcaagagaacagggcct

SEQ ID NO: 1419737 - DNA, 25 bp, Homo sapien
ccatataaacgaggcaagagaacag

SEQ ID NO: 1419738 - DNA, 25 bp, Homo sapien
agcaaccatataaacgaggcaagag

SEQ ID NO: 1419739 - DNA, 25 bp, Homo sapien
actgtagcctccaggatagattgag

SEQ ID NO: 1419740 - DNA, 25 bp, Homo sapien
gaaacctgatttagtgtggagccaa

SEQ ID NO: 1419741 - DNA, 25 bp, Homo sapien
ggcactggagtacttattgggcata

SEQ ID NO: 1419742 - DNA, 25 bp, Homo sapien
tattttgcgtggatagtgctggcac

SEQ ID NO: 1419743 - DNA, 25 bp, Homo sapien
cattgagttcaaagattcgataaga

SEQ ID NO: 1419744 - DNA, 25 bp, Homo sapien
gtgatagtgccatggtctggaccat

SEQ ID NO: 1419745 - DNA, 25 bp, Homo sapien
tgagttcaaagattcgataagattc

SEQ ID NO: 1419746 - DNA, 25 bp, Homo sapien
ccattggttgaaaattctgcattaa

SEQ ID NO: 1419747 - DNA, 25 bp, Homo sapien
cttgaggactaaagattagtttggc

SEQ ID NO: 1419748 - DNA, 25 bp, Homo sapien
cagttgcaccctgtctactggtggt

SEQ ID NO: 1419749 - DNA, 25 bp, Homo sapien
tactggtggtcacagtctctaggaa

SEQ ID NO: 1419750 - DNA, 25 bp, Homo sapien
ggtagtaaataatgtcttgaggact

SEQ ID NO: 1419751 - DNA, 25 bp, Homo sapien
ctttttcagcactgtttgcacttta

SEQ ID NO: 1419752 - DNA, 25 bp, Homo sapien
gatgttccccagaggtctttttcag

SEQ ID NO: 1419753 - DNA, 25 bp, Homo sapien
tcttggaaggtgatgttccccagag

SEQ ID NO: 1419754 - DNA, 25 bp, Homo sapien
tcagcactgtttgcactttaaatcc

SEQ ID NO: 1419755 - DNA, 25 bp, Homo sapien
ttttgaaacattggcagcaactgac

SEQ ID NO: 1419756 - DNA, 25 bp, Homo sapien
tggctggcgagatcagtcatgttgc

SEQ ID NO: 1419757 - DNA, 25 bp, Homo sapien
tccttatagggatcgagaacttcca

SEQ ID NO: 1419758 - DNA, 25 bp, Homo sapien
taggcatatcattgctgccactgga

SEQ ID NO: 1419759 - DNA, 25 bp, Homo sapien
cctgccattgtgttagccattgaat

SEQ ID NO: 1419760 - DNA, 25 bp, Homo sapien
ttgggacacccctataaagcattgt

SEQ ID NO: 1419761 - DNA, 25 bp, Homo sapien
cactagcttctttgcttgggacacc

SEQ ID NO: 1419762 - DNA, 25 bp, Homo sapien
gaaaagcttctattcactgtcagat

SEQ ID NO: 1419763 - DNA, 25 bp, Homo sapien
aggctacaagatcaaggaggctgtt

SEQ ID NO: 1419764 - DNA, 25 bp, Homo sapien
aatcgtcactgtatccagtgcaggg

SEQ ID NO: 1419765 - DNA, 25 bp, Homo sapien
ttgaaggctacaagatcaaggaggc

SEQ ID NO: 1419766 - DNA, 25 bp, Homo sapien
acagcaaaatgagaaatcgtcactg

SEQ ID NO: 1419767 - DNA, 25 bp, Homo sapien
cggcaggttcaggtgtctgacaagg

SEQ ID NO: 1419768 - DNA, 25 bp, Homo sapien
tgcaaccttcagaggataagaatgc

SEQ ID NO: 1419769 - DNA, 25 bp, Homo sapien
gttcaggtgtctgacaagggctgct

SEQ ID NO: 1419770 - DNA, 25 bp, Homo sapien
caggttcaggtgtctgacaagggct

SEQ ID NO: 1419771 - DNA, 25 bp, Homo sapien
tcagaattctgacgagtggcagctc

SEQ ID NO: 1419772 - DNA, 25 bp, Homo sapien
taagccagacatgatcacccgtttg

SEQ ID NO: 1419773 - DNA, 25 bp, Homo sapien
gtaaagcagttcagcgtccatccag

SEQ ID NO: 1419774 - DNA, 25 bp, Homo sapien
caggcaactgcttttacctcagagc

SEQ ID NO: 1419775 - DNA, 25 bp, Homo sapien
tccagacggccaaaatagttttatc

SEQ ID NO: 1419776 - DNA, 25 bp, Homo sapien
atatagcattgcctccagacggcca

SEQ ID NO: 1419777 - DNA, 25 bp, Homo sapien
gaaaaatggttattgaggccacagt

SEQ ID NO: 1419778 - DNA, 25 bp, Homo sapien
tgtatctaagaagtacctagtcctt

SEQ ID NO: 1419779 - DNA, 25 bp, Homo sapien
taggactgtgacatagggagaacac

SEQ ID NO: 1419780 - DNA, 25 bp, Homo sapien
ggacccaaagaagcatagtctgacg

SEQ ID NO: 1419781 - DNA, 25 bp, Homo sapien
aaacggtgcgtatctaggactctag

SEQ ID NO: 1419782 - DNA, 25 bp, Homo sapien
gaacactaagtgtgtcctccgggcc

SEQ ID NO: 1419783 - DNA, 25 bp, Homo sapien
agaggacctgaaaccgtcaaccatc

SEQ ID NO: 1419784 - DNA, 25 bp, Homo sapien
taaattaaattgatcctccagacag

SEQ ID NO: 1419785 - DNA, 25 bp, Homo sapien
cagtgttttatatgaaggaagaagc

SEQ ID NO: 1419786 - DNA, 25 bp, Homo sapien
gttcgttctcatctccctaattata

SEQ ID NO: 1419787 - DNA, 25 bp, Homo sapien
tgaactggtcactaaaggaggtatc

SEQ ID NO: 1419788 - DNA, 25 bp, Homo sapien
tgaattcggtgagggtcccacaccc

SEQ ID NO: 1419789 - DNA, 25 bp, Homo sapien
tcttacatgcagaccacaggacact

SEQ ID NO: 1419790 - DNA, 25 bp, Homo sapien
aataggtacctcctagaaactggag

SEQ ID NO: 1419791 - DNA, 25 bp, Homo sapien
ccagagtttcgtgatgatcctttca

SEQ ID NO: 1419792 - DNA, 25 bp, Homo sapien
gatgccagagtttcgtgatgatcct

SEQ ID NO: 1419793 - DNA, 25 bp, Homo sapien
atttggatgccagagtttcgtgatg

SEQ ID NO: 1419794 - DNA, 25 bp, Homo sapien
tggatgccagagtttcgtgatgatc

SEQ ID NO: 1419795 - DNA, 25 bp, Homo sapien
catgtccaattatacttgagtagac

SEQ ID NO: 1419796 - DNA, 25 bp, Homo sapien
ttatacttgagtagacttatttttc

SEQ ID NO: 1419797 - DNA, 25 bp, Homo sapien
attaacgcatgtccaattatacttg

SEQ ID NO: 1419798 - DNA, 25 bp, Homo sapien
ggattaaaaaattaacgcatgtcca

SEQ ID NO: 1419799 - DNA, 25 bp, Homo sapien
tattaataacggcttttataacaga

SEQ ID NO: 1419800 - DNA, 25 bp, Homo sapien
ctcttaacctatccataaacctagg

SEQ ID NO: 1419801 - DNA, 25 bp, Homo sapien
aaaccagtgaatacctttgtagact

SEQ ID NO: 1419802 - DNA, 25 bp, Homo sapien
taaagaatctcttaacctatccata

SEQ ID NO: 1419803 - DNA, 25 bp, Homo sapien
tgtctccggagcatgccagcaggag

SEQ ID NO: 1419804 - DNA, 25 bp, Homo sapien
tcgtacatgttcaccggaggcaaag

SEQ ID NO: 1419805 - DNA, 25 bp, Homo sapien
aaagcttcaaaaagatcgtacatgt

SEQ ID NO: 1419806 - DNA, 25 bp, Homo sapien
caccggaggcaaagatgcaggtaga

SEQ ID NO: 1419807 - DNA, 25 bp, Homo sapien
tactcctgtagacatgaataatctg

SEQ ID NO: 1419808 - DNA, 25 bp, Homo sapien
tagctcaggatactgaacttccagt

SEQ ID NO: 1419809 - DNA, 25 bp, Homo sapien
gcacagagacaactgagcaacaagg

SEQ ID NO: 1419810 - DNA, 25 bp, Homo sapien
caggagtggcctgctagaatcttat

SEQ ID NO: 1419811 - DNA, 25 bp, Homo sapien
aactgacgtcagtatatctttaagg

SEQ ID NO: 1419812 - DNA, 25 bp, Homo sapien
tgcggggtcacgttactgccaaagg

SEQ ID NO: 1419813 - DNA, 25 bp, Homo sapien
cttcaggtatggctgcggggtcacg

SEQ ID NO: 1419814 - DNA, 25 bp, Homo sapien
gacgtcagtatatctttaaggtgat

SEQ ID NO: 1419815 - DNA, 25 bp, Homo sapien
gaacaaagtttcaagtcgtcatcat

SEQ ID NO: 1419816 - DNA, 25 bp, Homo sapien
catcatcttggggatcctttgccac

SEQ ID NO: 1419817 - DNA, 25 bp, Homo sapien
ccttcaagctggcctcgagtgggaa

SEQ ID NO: 1419818 - DNA, 25 bp, Homo sapien
tgggaagcatcattgtgtgggaaca

SEQ ID NO: 1419819 - DNA, 25 bp, Homo sapien
tgagagaggattttgaggctggaat

SEQ ID NO: 1419820 - DNA, 25 bp, Homo sapien
ctgagagaggattttgaggctggaa

SEQ ID NO: 1419821 - DNA, 25 bp, Homo sapien
ccttggtgatcacagaatgtatggc

SEQ ID NO: 1419822 - DNA, 25 bp, Homo sapien
ggagttatgccccagtaccttttgc

SEQ ID NO: 1419823 - DNA, 25 bp, Homo sapien
cagggagattctgatagcccattca

SEQ ID NO: 1419824 - DNA, 25 bp, Homo sapien
aatgccaccaaaactataccacagg

SEQ ID NO: 1419825 - DNA, 25 bp, Homo sapien
ttctgacgaacagaagaaagctttt

SEQ ID NO: 1419826 - DNA, 25 bp, Homo sapien
atcaaatttctgacgaacagaagaa

SEQ ID NO: 1419827 - DNA, 25 bp, Homo sapien
ccaggttttgctgcggaaccccctg

SEQ ID NO: 1419828 - DNA, 25 bp, Homo sapien
tgcggaaccccctggccaaggcaaa

SEQ ID NO: 1419829 - DNA, 25 bp, Homo sapien
cgtggccaagcgaagcacgctaagg

SEQ ID NO: 1419830 - DNA, 25 bp, Homo sapien
aagcgaagcacgctaaggcctaacc

SEQ ID NO: 1419831 - DNA, 25 bp, Homo sapien
ctgctgcgtggccaagcgaagcacg

SEQ ID NO: 1419832 - DNA, 25 bp, Homo sapien
gccaagcgaagcacgctaaggccta

SEQ ID NO: 1419833 - DNA, 25 bp, Homo sapien
acacactggaagtatttccactccc

SEQ ID NO: 1419834 - DNA, 25 bp, Homo sapien
acactggaagtatttccactccctt

SEQ ID NO: 1419835 - DNA, 25 bp, Homo sapien
cactggaagtatttccactccctta

SEQ ID NO: 1419836 - DNA, 25 bp, Homo sapien
cacactggaagtatttccactccct

SEQ ID NO: 1419837 - DNA, 25 bp, Homo sapien
tgacaacgcgtgagaatggccagga

SEQ ID NO: 1419838 - DNA, 25 bp, Homo sapien
atctgacaacgcgtgagaatggcca

SEQ ID NO: 1419839 - DNA, 25 bp, Homo sapien
ccaggaggaaatcattgtgagaatg

SEQ ID NO: 1419840 - DNA, 25 bp, Homo sapien
accaaaatctgacaacgcgtgagaa

SEQ ID NO: 1419841 - DNA, 25 bp, Homo sapien
caaggtcaaactcctctttgctgat

SEQ ID NO: 1419842 - DNA, 25 bp, Homo sapien
gagaagtctatgagcttcaaggtca

SEQ ID NO: 1419843 - DNA, 25 bp, Homo sapien
accacagctttaggttagcccagta

SEQ ID NO: 1419844 - DNA, 25 bp, Homo sapien
cattatcctgtgtgagaagtctatg

SEQ ID NO: 1419845 - DNA, 25 bp, Homo sapien
ccagctcgctcacaaaggtcgccat

SEQ ID NO: 1419846 - DNA, 25 bp, Homo sapien
ccgcctccagctcgctcacaaaggt

SEQ ID NO: 1419847 - DNA, 25 bp, Homo sapien
cccagggcctcgcttaagttcttct

SEQ ID NO: 1419848 - DNA, 25 bp, Homo sapien
tcgcttaagttcttcttggccgcct

SEQ ID NO: 1419849 - DNA, 25 bp, Homo sapien
cggccaccgcgatcaacaacccaaa

SEQ ID NO: 1419850 - DNA, 25 bp, Homo sapien
tctggaagctaagccggccgccgtc

SEQ ID NO: 1419851 - DNA, 25 bp, Homo sapien
tgctccgcgtgtctcagcccgaccg

SEQ ID NO: 1419852 - DNA, 25 bp, Homo sapien
aatctctcagaagtcgtttgtttgg

SEQ ID NO: 1419853 - DNA, 25 bp, Homo sapien
gcaagactatgctcgatgaagacta

SEQ ID NO: 1419854 - DNA, 25 bp, Homo sapien
tagagattccaaactgatgcactgt

SEQ ID NO: 1419855 - DNA, 25 bp, Homo sapien
gaagactagactactgacatcaccc

SEQ ID NO: 1419856 - DNA, 25 bp, Homo sapien
gaaatctttggcactctcggcaggt

SEQ ID NO: 1419857 - DNA, 25 bp, Homo sapien
ttggagtctgcccggctgccgccag

SEQ ID NO: 1419858 - DNA, 25 bp, Homo sapien
tgccgccagggggtgatgcgccctc

SEQ ID NO: 1419859 - DNA, 25 bp, Homo sapien
ctcggccggttggagtctgcccggc

SEQ ID NO: 1419860 - DNA, 25 bp, Homo sapien
gccggttggagtctgcccggctgcc

SEQ ID NO: 1419861 - DNA, 25 bp, Homo sapien
ctggagccttggcccgggatgatac

SEQ ID NO: 1419862 - DNA, 25 bp, Homo sapien
gatgcccgggatcccaaggagggtc

SEQ ID NO: 1419863 - DNA, 25 bp, Homo sapien
ggatgatacccttggccaccggcag

SEQ ID NO: 1419864 - DNA, 25 bp, Homo sapien
gtgggtctccgcgtcccaacctgga

SEQ ID NO: 1419865 - DNA, 25 bp, Homo sapien
aagtatagatttcacatgtatcccc

SEQ ID NO: 1419866 - DNA, 25 bp, Homo sapien
gatgtatcattatccctcaaagttc

SEQ ID NO: 1419867 - DNA, 25 bp, Homo sapien
caacatcccctgttagagtgattca

SEQ ID NO: 1419868 - DNA, 25 bp, Homo sapien
tacacataagctccctcactatcaa

SEQ ID NO: 1419869 - DNA, 25 bp, Homo sapien
tgagggtcttatgtcctgcttcagg

SEQ ID NO: 1419870 - DNA, 25 bp, Homo sapien
tctaatgccgataaactgcagggaa

SEQ ID NO: 1419871 - DNA, 25 bp, Homo sapien
tgcagggaacttagcaagccccgtt

SEQ ID NO: 1419872 - DNA, 25 bp, Homo sapien
ctgcttcagggcagacaagtgatgg

SEQ ID NO: 1419873 - DNA, 25 bp, Homo sapien
gctggtctccttaagtcaagaattt

SEQ ID NO: 1419874 - DNA, 25 bp, Homo sapien
ttatcaaagctgctggtctccttaa

SEQ ID NO: 1419875 - DNA, 25 bp, Homo sapien
tcttacagcgcaagtctttaggtca

SEQ ID NO: 1419876 - DNA, 25 bp, Homo sapien
cagcgcaagtctttaggtcaatttt

SEQ ID NO: 1419877 - DNA, 25 bp, Homo sapien
aaatggagtctccccactccacaat

SEQ ID NO: 1419878 - DNA, 25 bp, Homo sapien
tggagtctccccactccacaatctg

SEQ ID NO: 1419879 - DNA, 25 bp, Homo sapien
atggagtctccccactccacaatct

SEQ ID NO: 1419880 - DNA, 25 bp, Homo sapien
ataaatggagtctccccactccaca

SEQ ID NO: 1419881 - DNA, 25 bp, Homo sapien
tacattcagttcctggcgaaggtcc

SEQ ID NO: 1419882 - DNA, 25 bp, Homo sapien
tgagggtaccagaagaatccaggga

SEQ ID NO: 1419883 - DNA, 25 bp, Homo sapien
ggaagtccaagctcagtgcaccaat

SEQ ID NO: 1419884 - DNA, 25 bp, Homo sapien
cattcactggtatatggaaggctct

SEQ ID NO: 1419885 - DNA, 25 bp, Homo sapien
tgtacagctgaagactagggaatgg

SEQ ID NO: 1419886 - DNA, 25 bp, Homo sapien
tacagtttgatgacacggtttttgc

SEQ ID NO: 1419887 - DNA, 25 bp, Homo sapien
ggcatgcacctaaatcccacttgat

SEQ ID NO: 1419888 - DNA, 25 bp, Homo sapien
agcctgcctcaaaaacataatatgg

SEQ ID NO: 1419889 - DNA, 25 bp, Homo sapien
agactagttacttcatggccagccc

SEQ ID NO: 1419890 - DNA, 25 bp, Homo sapien
tatgcagtcgtgtctaatacttttg

SEQ ID NO: 1419891 - DNA, 25 bp, Homo sapien
caaagacaactgacaggtggccctc

SEQ ID NO: 1419892 - DNA, 25 bp, Homo sapien
ggtggccctcacgaagccaacttct

SEQ ID NO: 1419893 - DNA, 25 bp, Homo sapien
taatggcagaaaaaagcgaggcact

SEQ ID NO: 1419894 - DNA, 25 bp, Homo sapien
gaaatatctacaacagcctccctgg

SEQ ID NO: 1419895 - DNA, 25 bp, Homo sapien
cccaaaggattgagagggacctcac

SEQ ID NO: 1419896 - DNA, 25 bp, Homo sapien
tatgaacaagcatcaagtctacggc

SEQ ID NO: 1419897 - DNA, 25 bp, Homo sapien
gctcccctgtgaacgtgcttggatg

SEQ ID NO: 1419898 - DNA, 25 bp, Homo sapien
ctcccctgtgaacgtgcttggatgg

SEQ ID NO: 1419899 - DNA, 25 bp, Homo sapien
tcccctgtgaacgtgcttggatgga

SEQ ID NO: 1419900 - DNA, 25 bp, Homo sapien
agctcccctgtgaacgtgcttggat

SEQ ID NO: 1419901 - DNA, 25 bp, Homo sapien
ccaacttcctaatgaatccatgcat

SEQ ID NO: 1419902 - DNA, 25 bp, Homo sapien
tctccaacttcctaatgaatccatg

SEQ ID NO: 1419903 - DNA, 25 bp, Homo sapien
tccaacttcctaatgaatccatgca

SEQ ID NO: 1419904 - DNA, 25 bp, Homo sapien
ctccaacttcctaatgaatccatgc

SEQ ID NO: 1419905 - DNA, 25 bp, Homo sapien
taactcctgtccatatacccagaaa

SEQ ID NO: 1419906 - DNA, 25 bp, Homo sapien
actttgtactccaataagacctagg

SEQ ID NO: 1419907 - DNA, 25 bp, Homo sapien
aatgatttatccagttctacaaagg

SEQ ID NO: 1419908 - DNA, 25 bp, Homo sapien
tcccaaggttaattcagtagcctgc

SEQ ID NO: 1419909 - DNA, 25 bp, Homo sapien
ggttatggcttgtgtcttccagccc

SEQ ID NO: 1419910 - DNA, 25 bp, Homo sapien
aaaactcagcaccagggttatggct

SEQ ID NO: 1419911 - DNA, 25 bp, Homo sapien
ggactggccaaagcaacacggaagt

SEQ ID NO: 1419912 - DNA, 25 bp, Homo sapien
tgccagcactgggttcaactgttct

SEQ ID NO: 1419913 - DNA, 25 bp, Homo sapien
tactttgagaatagggtctagcccc

SEQ ID NO: 1419914 - DNA, 25 bp, Homo sapien
tctccaagcaatgacacataccagc

SEQ ID NO: 1419915 - DNA, 25 bp, Homo sapien
ctttggtaggtcaattctccaagca

SEQ ID NO: 1419916 - DNA, 25 bp, Homo sapien
tcttcagaggttgtccacggatcca

SEQ ID NO: 1419917 - DNA, 25 bp, Homo sapien
ggtagttgcaaggttcccaagagca

SEQ ID NO: 1419918 - DNA, 25 bp, Homo sapien
gggctactggctaaatcaaatcaca

SEQ ID NO: 1419919 - DNA, 25 bp, Homo sapien
gcagtctagtcaggccaaatgctgt

SEQ ID NO: 1419920 - DNA, 25 bp, Homo sapien
tgtcatgcagcaggatagtccaggc

SEQ ID NO: 1419921 - DNA, 25 bp, Homo sapien
aatcttccaaggtgatggccagaga

SEQ ID NO: 1419922 - DNA, 25 bp, Homo sapien
caaactagttagatgggcacagagg

SEQ ID NO: 1419923 - DNA, 25 bp, Homo sapien
tgtctctaagtatagcacaggaggt

SEQ ID NO: 1419924 - DNA, 25 bp, Homo sapien
tcttgtccccgtagtccatgtctga

SEQ ID NO: 1419925 - DNA, 25 bp, Homo sapien
agggacatcctggttggaaagtcat

SEQ ID NO: 1419926 - DNA, 25 bp, Homo sapien
gggacatcctggttggaaagtcatt

SEQ ID NO: 1419927 - DNA, 25 bp, Homo sapien
cagtcccctcggaggaggggaggca

SEQ ID NO: 1419928 - DNA, 25 bp, Homo sapien
tcagtcccctcggaggaggggaggc

SEQ ID NO: 1419929 - DNA, 25 bp, Homo sapien
cggaggaggggaggcagacgcagtc

SEQ ID NO: 1419930 - DNA, 25 bp, Homo sapien
aggaggggaggcagacgcagtctca

SEQ ID NO: 1419931 - DNA, 25 bp, Homo sapien
gtcctggtagaagccgctgtgcgcc

SEQ ID NO: 1419932 - DNA, 25 bp, Homo sapien
cttctccgagttgctgtggtagggc

SEQ ID NO: 1419933 - DNA, 25 bp, Homo sapien
cgctgcccaggtacgagtggtcgta

SEQ ID NO: 1419934 - DNA, 25 bp, Homo sapien
ggcgaagttcttccgcgacagcatc

SEQ ID NO: 1419935 - DNA, 25 bp, Homo sapien
ttgttatactccatggctgagggcc

SEQ ID NO: 1419936 - DNA, 25 bp, Homo sapien
gaaagactggcggaaattgctgtcc

SEQ ID NO: 1419937 - DNA, 25 bp, Homo sapien
tgtcctcctcatgtagggagctgag

SEQ ID NO: 1419938 - DNA, 25 bp, Homo sapien
catgacacctgaccaatagtcagga

SEQ ID NO: 1419939 - DNA, 25 bp, Homo sapien
acaaaatcaggcatgatagagcttt

SEQ ID NO: 1419940 - DNA, 25 bp, Homo sapien
gacaaaatcaggcatgatagagctt

SEQ ID NO: 1419941 - DNA, 25 bp, Homo sapien
gggacaaaatcaggcatgatagagc

SEQ ID NO: 1419942 - DNA, 25 bp, Homo sapien
agggacaaaatcaggcatgatagag

SEQ ID NO: 1419943 - DNA, 25 bp, Homo sapien
tacaacgcagacaggatgaatttag

SEQ ID NO: 1419944 - DNA, 25 bp, Homo sapien
tctttttatagtcggtgtggtggga

SEQ ID NO: 1419945 - DNA, 25 bp, Homo sapien
gttacaactagcttgtcaagtgcag

SEQ ID NO: 1419946 - DNA, 25 bp, Homo sapien
gggaggatacagcaatggatacaac

SEQ ID NO: 1419947 - DNA, 25 bp, Homo sapien
tctttgtcagcctggatccggtaac

SEQ ID NO: 1419948 - DNA, 25 bp, Homo sapien
tctcaacatagtacaggaccttcat

SEQ ID NO: 1419949 - DNA, 25 bp, Homo sapien
ccttctggctggatcaaactgagcc

SEQ ID NO: 1419950 - DNA, 25 bp, Homo sapien
gcctggatccggtaacctttgcgaa

SEQ ID NO: 1419951 - DNA, 25 bp, Homo sapien
gttgagaaaagcacaagaaggtgag

SEQ ID NO: 1419952 - DNA, 25 bp, Homo sapien
ctgttgagaaaagcacaagaaggtg

SEQ ID NO: 1419953 - DNA, 25 bp, Homo sapien
tgttgagaaaagcacaagaaggtga

SEQ ID NO: 1419954 - DNA, 25 bp, Homo sapien
ctgctgcgatgtggttacaagcagc

SEQ ID NO: 1419955 - DNA, 25 bp, Homo sapien
tagatgatgattgaagccacaggag

SEQ ID NO: 1419956 - DNA, 25 bp, Homo sapien
ccacaggagtgaataaggtttccca

SEQ ID NO: 1419957 - DNA, 25 bp, Homo sapien
tacagtggaagaacacccagcatac

SEQ ID NO: 1419958 - DNA, 25 bp, Homo sapien
ggcaaagaaagatgagcgcctcaga

SEQ ID NO: 1419959 - DNA, 25 bp, Homo sapien
cactggcagctcattaggtgggcta

SEQ ID NO: 1419960 - DNA, 25 bp, Homo sapien
tcacaatggaggcagtcaagatacc

SEQ ID NO: 1419961 - DNA, 25 bp, Homo sapien
tccagcggctcatctacatctaggg

SEQ ID NO: 1419962 - DNA, 25 bp, Homo sapien
gaattctactaatagctcctgggag

SEQ ID NO: 1419963 - DNA, 25 bp, Homo sapien
tgtccatcagcatgccagatgaggg

SEQ ID NO: 1419964 - DNA, 25 bp, Homo sapien
ggtggatgcggcttgtccatcagca

SEQ ID NO: 1419965 - DNA, 25 bp, Homo sapien
ccggggacaccggagacagagggag

SEQ ID NO: 1419966 - DNA, 25 bp, Homo sapien
ccaagggaggtggatgcggcttgtc

SEQ ID NO: 1419967 - DNA, 25 bp, Homo sapien
catgagaattccaaatgcatggagt

SEQ ID NO: 1419968 - DNA, 25 bp, Homo sapien
aaatgagaatggtcatccctgaggc

SEQ ID NO: 1419969 - DNA, 25 bp, Homo sapien
gcacccagcggagaagagtctggaa

SEQ ID NO: 1419970 - DNA, 25 bp, Homo sapien
gtagacatttctctcgatcgctctg

SEQ ID NO: 1419971 - DNA, 25 bp, Homo sapien
cagcaggaatctgggcagcatgggc

SEQ ID NO: 1419972 - DNA, 25 bp, Homo sapien
cagcatgggcagcggacatagcagc

SEQ ID NO: 1419973 - DNA, 25 bp, Homo sapien
agcagatccccaccaggacgaagaa

SEQ ID NO: 1419974 - DNA, 25 bp, Homo sapien
atgggcagcggacatagcagcagca

SEQ ID NO: 1419975 - DNA, 25 bp, Homo sapien
aagaaatccacactcgaggcagccc

SEQ ID NO: 1419976 - DNA, 25 bp, Homo sapien
cagggcagggtgcactttgattggc

SEQ ID NO: 1419977 - DNA, 25 bp, Homo sapien
atccacactcgaggcagcccacctc

SEQ ID NO: 1419978 - DNA, 25 bp, Homo sapien
agggcagggtgcactttgattggca

SEQ ID NO: 1419979 - DNA, 25 bp, Homo sapien
tttcctgtactcagcaccagttctg

SEQ ID NO: 1419980 - DNA, 25 bp, Homo sapien
acagctttcctgtactcagcaccag

SEQ ID NO: 1419981 - DNA, 25 bp, Homo sapien
tgactgtccctagaacagctttcct

SEQ ID NO: 1419982 - DNA, 25 bp, Homo sapien
ttccctgctgactgtccctagaaca

SEQ ID NO: 1419983 - DNA, 25 bp, Homo sapien
cataatctccacagcaaaactgggc

SEQ ID NO: 1419984 - DNA, 25 bp, Homo sapien
taatctccacagcaaaactgggcaa

SEQ ID NO: 1419985 - DNA, 25 bp, Homo sapien
ctggcataatctccacagcaaaact

SEQ ID NO: 1419986 - DNA, 25 bp, Homo sapien
ggcataatctccacagcaaaactgg

SEQ ID NO: 1419987 - DNA, 25 bp, Homo sapien
cctccaaatttatggcgaaagtgtg

SEQ ID NO: 1419988 - DNA, 25 bp, Homo sapien
gaaaatgtaggtacagctcaagtca

SEQ ID NO: 1419989 - DNA, 25 bp, Homo sapien
tgttccaaagaagtagcctccaaat

SEQ ID NO: 1419990 - DNA, 25 bp, Homo sapien
ctactgacgcataatctgaagcata

SEQ ID NO: 1419991 - DNA, 25 bp, Homo sapien
tgaagttagagcttcggtcaatggt

SEQ ID NO: 1419992 - DNA, 25 bp, Homo sapien
aactatgcctttgaagttagagctt

SEQ ID NO: 1419993 - DNA, 25 bp, Homo sapien
ttagagcttcggtcaatggttgtgg

SEQ ID NO: 1419994 - DNA, 25 bp, Homo sapien
tgcctttgaagttagagcttcggtc

SEQ ID NO: 1419995 - DNA, 25 bp, Homo sapien
caaagtgggtcaacaggaacttcac

SEQ ID NO: 1419996 - DNA, 25 bp, Homo sapien
ggaacttcacctaccctgcttgcta

SEQ ID NO: 1419997 - DNA, 25 bp, Homo sapien
ttagccctgacctactgcaaaagac

SEQ ID NO: 1419998 - DNA, 25 bp, Homo sapien
gagggattagtcctcttagccctga

SEQ ID NO: 1419999 - DNA, 25 bp, Homo sapien
taaaattcaatgactgagccagtgg

SEQ ID NO: 1420000 - DNA, 25 bp, Homo sapien
cacagctagtgttgccctaaaaagt

SEQ ID NO: 1420001 - DNA, 25 bp, Homo sapien
tacagtgctttatggactcagaaaa

SEQ ID NO: 1420002 - DNA, 25 bp, Homo sapien
ccaagtccacttttgctagaccaaa

SEQ ID NO: 1420003 - DNA, 25 bp, Homo sapien
gcatgttttgatccagaggaatgcc

SEQ ID NO: 1420004 - DNA, 25 bp, Homo sapien
aatagcatttttgcccaagttgctt

SEQ ID NO: 1420005 - DNA, 25 bp, Homo sapien
tcagatgacaaagctttcactctat

SEQ ID NO: 1420006 - DNA, 25 bp, Homo sapien
agaggaatgcccttcatatacttca

SEQ ID NO: 1420007 - DNA, 25 bp, Homo sapien
tggtgataatacagtaatagagtcc

SEQ ID NO: 1420008 - DNA, 25 bp, Homo sapien
tgtctccccacataagctttccaat

SEQ ID NO: 1420009 - DNA, 25 bp, Homo sapien
ccagcagttccactgagtcctcatt

SEQ ID NO: 1420010 - DNA, 25 bp, Homo sapien
agagtccgctgtctccccacataag

SEQ ID NO: 1420011 - DNA, 25 bp, Homo sapien
tgggctggaagagcatggccacctt

SEQ ID NO: 1420012 - DNA, 25 bp, Homo sapien
ggtagaggacatgcccaaggattct

SEQ ID NO: 1420013 - DNA, 25 bp, Homo sapien
aatctcccagggtgacagtcgagcc

SEQ ID NO: 1420014 - DNA, 25 bp, Homo sapien
tgctgtccaaacaatccaagtaggg

SEQ ID NO: 1420015 - DNA, 25 bp, Homo sapien
ataaacatgtccgaacagtgtccat

SEQ ID NO: 1420016 - DNA, 25 bp, Homo sapien
gaataaacatgtccgaacagtgtcc

SEQ ID NO: 1420017 - DNA, 25 bp, Homo sapien
aataaacatgtccgaacagtgtcca

SEQ ID NO: 1420018 - DNA, 25 bp, Homo sapien
agaataaacatgtccgaacagtgtc

SEQ ID NO: 1420019 - DNA, 25 bp, Homo sapien
ggacctcaccttccatcacatgatc

SEQ ID NO: 1420020 - DNA, 25 bp, Homo sapien
tggacctcaccttccatcacatgat

SEQ ID NO: 1420021 - DNA, 25 bp, Homo sapien
gacctcaccttccatcacatgatca

SEQ ID NO: 1420022 - DNA, 25 bp, Homo sapien
acctcaccttccatcacatgatcac

SEQ ID NO: 1420023 - DNA, 25 bp, Homo sapien
ggaaaagggtttctgcattctgtaa

SEQ ID NO: 1420024 - DNA, 25 bp, Homo sapien
tggggaaaagggtttctgcattctg

SEQ ID NO: 1420025 - DNA, 25 bp, Homo sapien
aaagggtttctgcattctgtaacat

SEQ ID NO: 1420026 - DNA, 25 bp, Homo sapien
ctgttggggaaaagggtttctgcat

SEQ ID NO: 1420027 - DNA, 25 bp, Homo sapien
ctgggtctgagaacccttgccctga

SEQ ID NO: 1420028 - DNA, 25 bp, Homo sapien
tccaccttggtatcctgatttgcaa

SEQ ID NO: 1420029 - DNA, 25 bp, Homo sapien
taataccagccccttctcctgaggg

SEQ ID NO: 1420030 - DNA, 25 bp, Homo sapien
aatccagttgctccactgggtctga

SEQ ID NO: 1420031 - DNA, 25 bp, Homo sapien
cgtctcatggttctctgtgaagaat

SEQ ID NO: 1420032 - DNA, 25 bp, Homo sapien
ctttcgtctcatggttctctgtgaa

SEQ ID NO: 1420033 - DNA, 25 bp, Homo sapien
agaatgagtctgaattcatctcctc

SEQ ID NO: 1420034 - DNA, 25 bp, Homo sapien
gtgaagaatgagtctgaattcatct

SEQ ID NO: 1420035 - DNA, 25 bp, Homo sapien
tccacctcagcaagaccctatccat

SEQ ID NO: 1420036 - DNA, 25 bp, Homo sapien
gagagaaatccacctcagcaagacc

SEQ ID NO: 1420037 - DNA, 25 bp, Homo sapien
ctgttagccagaagagagaaatcca

SEQ ID NO: 1420038 - DNA, 25 bp, Homo sapien
gccagaagagagaaatccacctcag

SEQ ID NO: 1420039 - DNA, 25 bp, Homo sapien
aacttcccagccgaattacggagtg

SEQ ID NO: 1420040 - DNA, 25 bp, Homo sapien
agccgaattacggagtgaggaaagt

SEQ ID NO: 1420041 - DNA, 25 bp, Homo sapien
ttcccagccgaattacggagtgagg

SEQ ID NO: 1420042 - DNA, 25 bp, Homo sapien
ccagccgaattacggagtgaggaaa

SEQ ID NO: 1420043 - DNA, 25 bp, Homo sapien
tccagccctggattagccatttctc

SEQ ID NO: 1420044 - DNA, 25 bp, Homo sapien
ccatatatggccagtgggagtacct

SEQ ID NO: 1420045 - DNA, 25 bp, Homo sapien
agagtatcattgattctagatcccc

SEQ ID NO: 1420046 - DNA, 25 bp, Homo sapien
tatttggcacaatatgttccaggcc

SEQ ID NO: 1420047 - DNA, 25 bp, Homo sapien
aaaaaattgtggttggagagcatct

SEQ ID NO: 1420048 - DNA, 25 bp, Homo sapien
ttttcttgagggattgttctgcttc

SEQ ID NO: 1420049 - DNA, 25 bp, Homo sapien
ttggagtcctatatgaacaaaactg

SEQ ID NO: 1420050 - DNA, 25 bp, Homo sapien
ggtatatcattaaagtttggagtcc

SEQ ID NO: 1420051 - DNA, 25 bp, Homo sapien
cctctggcctgtatcacttatgaac

SEQ ID NO: 1420052 - DNA, 25 bp, Homo sapien
cacctcaggcctttacgggtggtgt

SEQ ID NO: 1420053 - DNA, 25 bp, Homo sapien
tagatacttagtcacatttttcccc

SEQ ID NO: 1420054 - DNA, 25 bp, Homo sapien
tgtccaaatccactacttcagtagg

SEQ ID NO: 1420055 - DNA, 25 bp, Homo sapien
cacaaagccggagcacctggttttt

SEQ ID NO: 1420056 - DNA, 25 bp, Homo sapien
tcacacaaagccggagcacctggtt

SEQ ID NO: 1420057 - DNA, 25 bp, Homo sapien
ccatggtatcaaacttgtagagaag

SEQ ID NO: 1420058 - DNA, 25 bp, Homo sapien
acacaaagccggagcacctggtttt

SEQ ID NO: 1420059 - DNA, 25 bp, Homo sapien
ggatgcctggtgagacgagacactt

SEQ ID NO: 1420060 - DNA, 25 bp, Homo sapien
taagtattcccgcagggtgtttgaa

SEQ ID NO: 1420061 - DNA, 25 bp, Homo sapien
ggtgtttgaagcctcttcctggatg

SEQ ID NO: 1420062 - DNA, 25 bp, Homo sapien
ttgaatccaccttgcaaagctcctg

SEQ ID NO: 1420063 - DNA, 25 bp, Homo sapien
tctcgccatagaccagactgacagg

SEQ ID NO: 1420064 - DNA, 25 bp, Homo sapien
gtgttgacgtcaccttcggccacag

SEQ ID NO: 1420065 - DNA, 25 bp, Homo sapien
cagggcgtgctctcagactggaagt

SEQ ID NO: 1420066 - DNA, 25 bp, Homo sapien
ggaaggctcgcttactctcgccata

SEQ ID NO: 1420067 - DNA, 25 bp, Homo sapien
agggcagaatagaaacatgatgggc

SEQ ID NO: 1420068 - DNA, 25 bp, Homo sapien
gcctgccaagccaaataaactatgc

SEQ ID NO: 1420069 - DNA, 25 bp, Homo sapien
tgccaagccaaataaactatgctca

SEQ ID NO: 1420070 - DNA, 25 bp, Homo sapien
ggcagaatagaaacatgatgggctt

SEQ ID NO: 1420071 - DNA, 25 bp, Homo sapien
tcgggctttcctttcctccagccat

SEQ ID NO: 1420072 - DNA, 25 bp, Homo sapien
ttcgggctttcctttcctccagcca

SEQ ID NO: 1420073 - DNA, 25 bp, Homo sapien
acagaacccgtcctcagctgctttc

SEQ ID NO: 1420074 - DNA, 25 bp, Homo sapien
cctccatctgtgataaagctgtcca

SEQ ID NO: 1420075 - DNA, 25 bp, Homo sapien
tccatctgtgataaagctgtccaca

SEQ ID NO: 1420076 - DNA, 25 bp, Homo sapien
ctgtccacagaacccgtcctcagct

SEQ ID NO: 1420077 - DNA, 25 bp, Homo sapien
gatgaggccaggtctctatgcccca

SEQ ID NO: 1420078 - DNA, 25 bp, Homo sapien
tttaagccagcctagaagggtggag

SEQ ID NO: 1420079 - DNA, 25 bp, Homo sapien
cataaagttggcttgaagggctacc

SEQ ID NO: 1420080 - DNA, 25 bp, Homo sapien
tagacacttgcccatgcagaggcca

SEQ ID NO: 1420081 - DNA, 25 bp, Homo sapien
gctgcaagcttcaaagagggtgcct

SEQ ID NO: 1420082 - DNA, 25 bp, Homo sapien
cattgtattgctctgagcaaatcat

SEQ ID NO: 1420083 - DNA, 25 bp, Homo sapien
gggtgcctcgccagagaaaataaca

SEQ ID NO: 1420084 - DNA, 25 bp, Homo sapien
tgcagcccaacactacaggaatcag

SEQ ID NO: 1420085 - DNA, 25 bp, Homo sapien
aagtagaggggagacaagttcaatg

SEQ ID NO: 1420086 - DNA, 25 bp, Homo sapien
gggagacaagttcaatgggtcaggc

SEQ ID NO: 1420087 - DNA, 25 bp, Homo sapien
gaggggagacaagttcaatgggtca

SEQ ID NO: 1420088 - DNA, 25 bp, Homo sapien
gagacaagttcaatgggtcaggcat

SEQ ID NO: 1420089 - DNA, 25 bp, Homo sapien
ggagctcctgccaactacgagggaa

SEQ ID NO: 1420090 - DNA, 25 bp, Homo sapien
ggtttggaacatactggcagctacg

SEQ ID NO: 1420091 - DNA, 25 bp, Homo sapien
caattaagcttaagtgcccactagg

SEQ ID NO: 1420092 - DNA, 25 bp, Homo sapien
gacaggtacgatattgacaggcaga

SEQ ID NO: 1420093 - DNA, 25 bp, Homo sapien
tcactggtcgaggtggtccggggat

SEQ ID NO: 1420094 - DNA, 25 bp, Homo sapien
gggattcacgcccagtgctcctctg

SEQ ID NO: 1420095 - DNA, 25 bp, Homo sapien
aggtggtccggggattcacgcccag

SEQ ID NO: 1420096 - DNA, 25 bp, Homo sapien
gtccggggattcacgcccagtgctc

SEQ ID NO: 1420097 - DNA, 25 bp, Homo sapien
gtgccacagacttgttccacgcatg

SEQ ID NO: 1420098 - DNA, 25 bp, Homo sapien
gccacagacttgttccacgcatgag

SEQ ID NO: 1420099 - DNA, 25 bp, Homo sapien
aggtgccacagacttgttccacgca

SEQ ID NO: 1420100 - DNA, 25 bp, Homo sapien
taaaggtgccacagacttgttccac

SEQ ID NO: 1420101 - DNA, 25 bp, Homo sapien
aggaggaactggccccgtgacaggg

SEQ ID NO: 1420102 - DNA, 25 bp, Homo sapien
ctctagtcatgccacaggaagcccg

SEQ ID NO: 1420103 - DNA, 25 bp, Homo sapien
cacacttggctctagtcatgccaca

SEQ ID NO: 1420104 - DNA, 25 bp, Homo sapien
ggctccaggccacacttggctctag

SEQ ID NO: 1420105 - DNA, 25 bp, Homo sapien
cagtgttgtcgtccttccctcggca

SEQ ID NO: 1420106 - DNA, 25 bp, Homo sapien
tgtcttcagtgttgtcgtccttccc

SEQ ID NO: 1420107 - DNA, 25 bp, Homo sapien
taatgagggctgcaaccacgcccac

SEQ ID NO: 1420108 - DNA, 25 bp, Homo sapien
cctccttgtcttcagtgttgtcgtc

SEQ ID NO: 1420109 - DNA, 25 bp, Homo sapien
tgtctgtggagatattcttcaggga

SEQ ID NO: 1420110 - DNA, 25 bp, Homo sapien
atctgacggccaccgtgatgttgca

SEQ ID NO: 1420111 - DNA, 25 bp, Homo sapien
atgtagtaacccgatgtgtctgtgg

SEQ ID NO: 1420112 - DNA, 25 bp, Homo sapien
gaactgcgtcccctcctcattgctg

SEQ ID NO: 1420113 - DNA, 25 bp, Homo sapien
ctgccaccaggtggttacacgccat

SEQ ID NO: 1420114 - DNA, 25 bp, Homo sapien
agccttgcctgatccctgctgccac

SEQ ID NO: 1420115 - DNA, 25 bp, Homo sapien
tcctctaattttgctgcagagccag

SEQ ID NO: 1420116 - DNA, 25 bp, Homo sapien
agagccagccttgcctgatccctgc

SEQ ID NO: 1420117 - DNA, 25 bp, Homo sapien
cagttccctgatgcaaaccgtgtgc

SEQ ID NO: 1420118 - DNA, 25 bp, Homo sapien
tcttgtgccacaggaccttctttga

SEQ ID NO: 1420119 - DNA, 25 bp, Homo sapien
gctttgagctctaggccttgtttag

SEQ ID NO: 1420120 - DNA, 25 bp, Homo sapien
aaccgtgtgcactggaagctgctgg

SEQ ID NO: 1420121 - DNA, 25 bp, Homo sapien
tatttccacacccattggctctggg

SEQ ID NO: 1420122 - DNA, 25 bp, Homo sapien
aaaggtccaataccaagctgcccag

SEQ ID NO: 1420123 - DNA, 25 bp, Homo sapien
tggtctcctggcaactatagctgaa

SEQ ID NO: 1420124 - DNA, 25 bp, Homo sapien
tcagtttcctgactgaaaggtccaa

SEQ ID NO: 1420125 - DNA, 25 bp, Homo sapien
ggtgggacccttacagcaacatggt

SEQ ID NO: 1420126 - DNA, 25 bp, Homo sapien
gggacccttacagcaacatggtgct

SEQ ID NO: 1420127 - DNA, 25 bp, Homo sapien
acatggtgctgtcgttgtgtggagc

SEQ ID NO: 1420128 - DNA, 25 bp, Homo sapien
ttgtgtggagccataaaacggtggt

SEQ ID NO: 1420129 - DNA, 25 bp, Homo sapien
cgtggagcccccgagttagacttgg

SEQ ID NO: 1420130 - DNA, 25 bp, Homo sapien
gggtctcaaatgtatacttcaggac

SEQ ID NO: 1420131 - DNA, 25 bp, Homo sapien
taaattccccacctttgcgtggagc

SEQ ID NO: 1420132 - DNA, 25 bp, Homo sapien
gagggaccggcctggataaggaatg

SEQ ID NO: 1420133 - DNA, 25 bp, Homo sapien
tttgcacagagtgcttatcagggca

SEQ ID NO: 1420134 - DNA, 25 bp, Homo sapien
atcagggcacgttcatccaagagaa

SEQ ID NO: 1420135 - DNA, 25 bp, Homo sapien
cagagtgcttatcagggcacgttca

SEQ ID NO: 1420136 - DNA, 25 bp, Homo sapien
tgcttatcagggcacgttcatccaa

SEQ ID NO: 1420137 - DNA, 25 bp, Homo sapien
tttttgtttcttgccagaacctatg

SEQ ID NO: 1420138 - DNA, 25 bp, Homo sapien
ttaacatttaccacggcttccgcta

SEQ ID NO: 1420139 - DNA, 25 bp, Homo sapien
cgctacgcgctttacatgaatcatt

SEQ ID NO: 1420140 - DNA, 25 bp, Homo sapien
ttcttgccagaacctatgaggtagg

SEQ ID NO: 1420141 - DNA, 25 bp, Homo sapien
tggtgagccctcctttgattggcag

SEQ ID NO: 1420142 - DNA, 25 bp, Homo sapien
tcgatgccgcattctggtttggagg

SEQ ID NO: 1420143 - DNA, 25 bp, Homo sapien
aattatggtctctccctcgatgccg

SEQ ID NO: 1420144 - DNA, 25 bp, Homo sapien
tcaggatgttgtacctcttccagct

SEQ ID NO: 1420145 - DNA, 25 bp, Homo sapien
cagtaaagttatgtgcagggtgaag

SEQ ID NO: 1420146 - DNA, 25 bp, Homo sapien
ccacaggcagcagtaaagttatgtg

SEQ ID NO: 1420147 - DNA, 25 bp, Homo sapien
tgatgggcggaagcagttgccataa

SEQ ID NO: 1420148 - DNA, 25 bp, Homo sapien
agcacgggatgatgggcggacccac

SEQ ID NO: 1420149 - DNA, 25 bp, Homo sapien
ccaggaatgccttgaatcggaagca

SEQ ID NO: 1420150 - DNA, 25 bp, Homo sapien
cacaattggagagcgggcaaaacac

SEQ ID NO: 1420151 - DNA, 25 bp, Homo sapien
cttttcagaggtacgggagcatccc

SEQ ID NO: 1420152 - DNA, 25 bp, Homo sapien
gaaggtgaacaccacttcccagagg

SEQ ID NO: 1420153 - DNA, 25 bp, Homo sapien
ggtgccaaggcctctccgaagcctg

SEQ ID NO: 1420154 - DNA, 25 bp, Homo sapien
tgcgactcccgctacagacgtcagg

SEQ ID NO: 1420155 - DNA, 25 bp, Homo sapien
cgaaaccgagactgagaccacgcgt

SEQ ID NO: 1420156 - DNA, 25 bp, Homo sapien
ggaaccagtcgggtgccaaggcctc

SEQ ID NO: 1420157 - DNA, 25 bp, Homo sapien
tggaggaaaggacaccgacagagca

SEQ ID NO: 1420158 - DNA, 25 bp, Homo sapien
tggcttcgtctcaacacctgggctc

SEQ ID NO: 1420159 - DNA, 25 bp, Homo sapien
tcctcgagactgttggccattggcg

SEQ ID NO: 1420160 - DNA, 25 bp, Homo sapien
aggagcggtccctctgctgaagaca

SEQ ID NO: 1420161 - DNA, 25 bp, Homo sapien
tgatggaggcatcggactgctcagc

SEQ ID NO: 1420162 - DNA, 25 bp, Homo sapien
gacagaacactcgtaggtgccgttg

SEQ ID NO: 1420163 - DNA, 25 bp, Homo sapien
ggtgccgttgtcagccatggtcagc

SEQ ID NO: 1420164 - DNA, 25 bp, Homo sapien
caacaggcggacacgtgacttggtg

SEQ ID NO: 1420165 - DNA, 25 bp, Homo sapien
gctcaccatggatgtagtttttgtt

SEQ ID NO: 1420166 - DNA, 25 bp, Homo sapien
aaagctcaccatggatgtagttttt

SEQ ID NO: 1420167 - DNA, 25 bp, Homo sapien
tttgtttgaaaacggccagatgacc

SEQ ID NO: 1420168 - DNA, 25 bp, Homo sapien
tgaaaacggccagatgaccaccctt

SEQ ID NO: 1420169 - DNA, 25 bp, Homo sapien
gaacgtcctgcggagtttccacaga

SEQ ID NO: 1420170 - DNA, 25 bp, Homo sapien
tgaataagtccctctcgactggagg

SEQ ID NO: 1420171 - DNA, 25 bp, Homo sapien
cacagagatggcatcgacggtcacc

SEQ ID NO: 1420172 - DNA, 25 bp, Homo sapien
gggtgacactctttccctgcgaagc

SEQ ID NO: 1420173 - DNA, 25 bp, Homo sapien
cacaggaccactgagggaatgtcca

SEQ ID NO: 1420174 - DNA, 25 bp, Homo sapien
ggaatgtccagggctgttcttgcac

SEQ ID NO: 1420175 - DNA, 25 bp, Homo sapien
tgcccacaggaccactgagggaatg

SEQ ID NO: 1420176 - DNA, 25 bp, Homo sapien
caggaccactgagggaatgtccagg

SEQ ID NO: 1420177 - DNA, 25 bp, Homo sapien
tccaagactgcgatgaggacaaaca

SEQ ID NO: 1420178 - DNA, 25 bp, Homo sapien
ctcctccaagactgcgatgaggaca

SEQ ID NO: 1420179 - DNA, 25 bp, Homo sapien
ttggccctggcaaccagcttctcct

SEQ ID NO: 1420180 - DNA, 25 bp, Homo sapien
acatgggccttggtccacctgactc

SEQ ID NO: 1420181 - DNA, 25 bp, Homo sapien
tgagctgggtcctaataaggccttg

SEQ ID NO: 1420182 - DNA, 25 bp, Homo sapien
gattgagtggtatgtggcacaatcc

SEQ ID NO: 1420183 - DNA, 25 bp, Homo sapien
tcttatatccaccacttgccggctt

SEQ ID NO: 1420184 - DNA, 25 bp, Homo sapien
ttgccggctttacctgccaggtgtc

SEQ ID NO: 1420185 - DNA, 25 bp, Homo sapien
aagcagtccaaaggtcactgggtag

SEQ ID NO: 1420186 - DNA, 25 bp, Homo sapien
ttgacggttggtgccccaggcagaa

SEQ ID NO: 1420187 - DNA, 25 bp, Homo sapien
aggcgggttccaagcttgacggttg

SEQ ID NO: 1420188 - DNA, 25 bp, Homo sapien
agtccaaaggtcactgggtaggaga

SEQ ID NO: 1420189 - DNA, 25 bp, Homo sapien
ggaagaggtggtatcctctcatgag

SEQ ID NO: 1420190 - DNA, 25 bp, Homo sapien
aaggaagaggtggtatcctctcatg

SEQ ID NO: 1420191 - DNA, 25 bp, Homo sapien
aagaggtggtatcctctcatgaggc

SEQ ID NO: 1420192 - DNA, 25 bp, Homo sapien
gaggtggtatcctctcatgaggcat

SEQ ID NO: 1420193 - DNA, 25 bp, Homo sapien
acacaggccacatcttccccaccat

SEQ ID NO: 1420194 - DNA, 25 bp, Homo sapien
gcacagagtgtccacaacacaggcc

SEQ ID NO: 1420195 - DNA, 25 bp, Homo sapien
caacacaggccacatcttccccacc

SEQ ID NO: 1420196 - DNA, 25 bp, Homo sapien
ctgcacagagtgtccacaacacagg

SEQ ID NO: 1420197 - DNA, 25 bp, Homo sapien
gaggtccctgcaattttccctcttc

SEQ ID NO: 1420198 - DNA, 25 bp, Homo sapien
caggtctgagctgtctggttaaagc

SEQ ID NO: 1420199 - DNA, 25 bp, Homo sapien
tgccctaaacctaacctgtcactgg

SEQ ID NO: 1420200 - DNA, 25 bp, Homo sapien
taaagctacagcagcttctggcctg

SEQ ID NO: 1420201 - DNA, 25 bp, Homo sapien
ctccaaaggtcccaagaggagtctt

SEQ ID NO: 1420202 - DNA, 25 bp, Homo sapien
ttaacaagtgtacaaagtcctagac

SEQ ID NO: 1420203 - DNA, 25 bp, Homo sapien
tggattggcaggtgagctcctcagc

SEQ ID NO: 1420204 - DNA, 25 bp, Homo sapien
tcctagactgctcacaaaggggtag

SEQ ID NO: 1420205 - DNA, 25 bp, Homo sapien
gttccaaatgtggtgcggttcacac

SEQ ID NO: 1420206 - DNA, 25 bp, Homo sapien
tgaggtgctcgaagggagtaatgcg

SEQ ID NO: 1420207 - DNA, 25 bp, Homo sapien
atgtggtgcggttcacacatggccg

SEQ ID NO: 1420208 - DNA, 25 bp, Homo sapien
gctcgaagggagtaatgcggtaggg

SEQ ID NO: 1420209 - DNA, 25 bp, Homo sapien
ttggccattcagaagatacagtccc

SEQ ID NO: 1420210 - DNA, 25 bp, Homo sapien
tgtgttagccgtctcactaataaac

SEQ ID NO: 1420211 - DNA, 25 bp, Homo sapien
cagagaaatctggaatcagagtgca

SEQ ID NO: 1420212 - DNA, 25 bp, Homo sapien
ggtcttcctccatcgtctgtgttag

SEQ ID NO: 1420213 - DNA, 25 bp, Homo sapien
cagctgctttggttgtagcgccagc

SEQ ID NO: 1420214 - DNA, 25 bp, Homo sapien
gctgctttggttgtagcgccagctt

SEQ ID NO: 1420215 - DNA, 25 bp, Homo sapien
gctttggttgtagcgccagctttcc

SEQ ID NO: 1420216 - DNA, 25 bp, Homo sapien
tgctttggttgtagcgccagctttc

SEQ ID NO: 1420217 - DNA, 25 bp, Homo sapien
tggatctccaagtgccaatgcaggg

SEQ ID NO: 1420218 - DNA, 25 bp, Homo sapien
caatgcagggcctcgcttgccgtca

SEQ ID NO: 1420219 - DNA, 25 bp, Homo sapien
gtggtcctgtccatgccaagggcag

SEQ ID NO: 1420220 - DNA, 25 bp, Homo sapien
gaagggctggcactgaaggtggtcc

SEQ ID NO: 1420221 - DNA, 25 bp, Homo sapien
agacaggattcaccaaggacatctg

SEQ ID NO: 1420222 - DNA, 25 bp, Homo sapien
aggattcaccaaggacatctgtgtc

SEQ ID NO: 1420223 - DNA, 25 bp, Homo sapien
tcatttccagacaggattcaccaag

SEQ ID NO: 1420224 - DNA, 25 bp, Homo sapien
ccagacaggattcaccaaggacatc

SEQ ID NO: 1420225 - DNA, 25 bp, Homo sapien
agtgctcctttcattgctgcccaaa

SEQ ID NO: 1420226 - DNA, 25 bp, Homo sapien
aagtgtgccttccagaagtgctcct

SEQ ID NO: 1420227 - DNA, 25 bp, Homo sapien
caaacctcttctttgagaagggaag

SEQ ID NO: 1420228 - DNA, 25 bp, Homo sapien
tcagactctggctgagagaagtgtg

SEQ ID NO: 1420229 - DNA, 25 bp, Homo sapien
agtcaggtgcccgtggtttcctcca

SEQ ID NO: 1420230 - DNA, 25 bp, Homo sapien
gagtcaggtgcccgtggtttcctcc

SEQ ID NO: 1420231 - DNA, 25 bp, Homo sapien
aaagtcatccgaactgtaggctgac

SEQ ID NO: 1420232 - DNA, 25 bp, Homo sapien
taggcgttttgaaagtcatccgaac

SEQ ID NO: 1420233 - DNA, 25 bp, Homo sapien
gtcatccgaactgtaggctgactga

SEQ ID NO: 1420234 - DNA, 25 bp, Homo sapien
ctaggcgttttgaaagtcatccgaa

SEQ ID NO: 1420235 - DNA, 25 bp, Homo sapien
agcattttcttagcgttaggatgta

SEQ ID NO: 1420236 - DNA, 25 bp, Homo sapien
aaagcattttcttagcgttaggatg

SEQ ID NO: 1420237 - DNA, 25 bp, Homo sapien
caaaagcattttcttagcgttagga

SEQ ID NO: 1420238 - DNA, 25 bp, Homo sapien
ccaaaagcattttcttagcgttagg

SEQ ID NO: 1420239 - DNA, 25 bp, Homo sapien
cggtttgggtgtgaacgcggcccat

SEQ ID NO: 1420240 - DNA, 25 bp, Homo sapien
cgcgcttatccgtgtggaagtcatt

SEQ ID NO: 1420241 - DNA, 25 bp, Homo sapien
tacttttctgtgacgacctgggccg

SEQ ID NO: 1420242 - DNA, 25 bp, Homo sapien
tactggtatcttacccctctgaatc

SEQ ID NO: 1420243 - DNA, 25 bp, Homo sapien
tggctggtccttggtaaaagaggcc

SEQ ID NO: 1420244 - DNA, 25 bp, Homo sapien
ttggctggtccttggtaaaagaggc

SEQ ID NO: 1420245 - DNA, 25 bp, Homo sapien
tgcaaatggttgagcagacagtagt

SEQ ID NO: 1420246 - DNA, 25 bp, Homo sapien
caaatggttgagcagacagtagtgg

SEQ ID NO: 1420247 - DNA, 25 bp, Homo sapien
cctttttgcgatgcaaatggttgag

SEQ ID NO: 1420248 - DNA, 25 bp, Homo sapien
ctagtcttcctttttgcgatgcaaa

SEQ ID NO: 1420249 - DNA, 25 bp, Homo sapien
cacatttccctcgtgggtgtttgca

SEQ ID NO: 1420250 - DNA, 25 bp, Homo sapien
tccactgtggcgtacatcaccctca

SEQ ID NO: 1420251 - DNA, 25 bp, Homo sapien
cagccttgaggcagcgccaatgtcc

SEQ ID NO: 1420252 - DNA, 25 bp, Homo sapien
tggcgtacatcaccctcagcccggg

SEQ ID NO: 1420253 - DNA, 25 bp, Homo sapien
ccaggctaagacgaaagggtgttgg

SEQ ID NO: 1420254 - DNA, 25 bp, Homo sapien
cccaggctaagacgaaagggtgttg

SEQ ID NO: 1420255 - DNA, 25 bp, Homo sapien
caggctaagacgaaagggtgttggg

SEQ ID NO: 1420256 - DNA, 25 bp, Homo sapien
aggtcctggtgagtttccagtttgg

SEQ ID NO: 1420257 - DNA, 25 bp, Homo sapien
tcctggtgagtttccagtttggctg

SEQ ID NO: 1420258 - DNA, 25 bp, Homo sapien
gaagcaggaaatctttctggcaggt

SEQ ID NO: 1420259 - DNA, 25 bp, Homo sapien
gctgacagatagagaaatgtgcttt

SEQ ID NO: 1420260 - DNA, 25 bp, Homo sapien
ttgaagcgccgacttttctctgcag

SEQ ID NO: 1420261 - DNA, 25 bp, Homo sapien
ggacatggcacccatggtttgaagc

SEQ ID NO: 1420262 - DNA, 25 bp, Homo sapien
gcacccatggtttgaagcgccgact

SEQ ID NO: 1420263 - DNA, 25 bp, Homo sapien
gtccactgtgcacattcttcagagc

SEQ ID NO: 1420264 - DNA, 25 bp, Homo sapien
tgggtgtcactcactgagacacatt

SEQ ID NO: 1420265 - DNA, 25 bp, Homo sapien
tcatacaacggcgatatgtagcctg

SEQ ID NO: 1420266 - DNA, 25 bp, Homo sapien
tgtcactcactgagacacatttcct

SEQ ID NO: 1420267 - DNA, 25 bp, Homo sapien
acggcgatatgtagcctgggtgtca

SEQ ID NO: 1420268 - DNA, 25 bp, Homo sapien
tgtaaagtctgaagtccgaagtctc

SEQ ID NO: 1420269 - DNA, 25 bp, Homo sapien
cctctgagctgatgaaatggcccag

SEQ ID NO: 1420270 - DNA, 25 bp, Homo sapien
gctgaggcaccgagaagataccaat

SEQ ID NO: 1420271 - DNA, 25 bp, Homo sapien
gcctcatcgggctactctaagaatt

SEQ ID NO: 1420272 - DNA, 25 bp, Homo sapien
caatagggacctgttagagatgatc

SEQ ID NO: 1420273 - DNA, 25 bp, Homo sapien
gaaatatgcgttagacaggatctct

SEQ ID NO: 1420274 - DNA, 25 bp, Homo sapien
ggaactggagacacgtcaggatgct

SEQ ID NO: 1420275 - DNA, 25 bp, Homo sapien
gagatgatcaaggaccaaagcactg

SEQ ID NO: 1420276 - DNA, 25 bp, Homo sapien
ggctgccagtgcttcgagtccagtc

SEQ ID NO: 1420277 - DNA, 25 bp, Homo sapien
gggaaggtcttgacaattcagttta

SEQ ID NO: 1420278 - DNA, 25 bp, Homo sapien
ctgccagtgcttcgagtccagtcag

SEQ ID NO: 1420279 - DNA, 25 bp, Homo sapien
aggtcttgacaattcagtttatatc

SEQ ID NO: 1420280 - DNA, 25 bp, Homo sapien
tcatcagatcacagaagcagtcatt

SEQ ID NO: 1420281 - DNA, 25 bp, Homo sapien
catgggcctagtttaagagcagagc

SEQ ID NO: 1420282 - DNA, 25 bp, Homo sapien
tgttggtagtcatgggcctagttta

SEQ ID NO: 1420283 - DNA, 25 bp, Homo sapien
tggatgcacaccacgtgtgctcatc

SEQ ID NO: 1420284 - DNA, 25 bp, Homo sapien
ctcagagagaatgccagttgctgag

SEQ ID NO: 1420285 - DNA, 25 bp, Homo sapien
tccacattccaacaaaagttcccaa

SEQ ID NO: 1420286 - DNA, 25 bp, Homo sapien
cattccaacaaaagttcccaacact

SEQ ID NO: 1420287 - DNA, 25 bp, Homo sapien
gccagttgctgagcattccacattc

SEQ ID NO: 1420288 - DNA, 25 bp, Homo sapien
gaacctaatgccaacatccttcttc

SEQ ID NO: 1420289 - DNA, 25 bp, Homo sapien
cagactggctctgctatccccgaac

SEQ ID NO: 1420290 - DNA, 25 bp, Homo sapien
cgaacctaatgccaacatccttctt

SEQ ID NO: 1420291 - DNA, 25 bp, Homo sapien
tggctctgctatccccgaacctaat

SEQ ID NO: 1420292 - DNA, 25 bp, Homo sapien
ctgataggcagtagagagagttgga

SEQ ID NO: 1420293 - DNA, 25 bp, Homo sapien
tgataggcagtagagagagttggat

SEQ ID NO: 1420294 - DNA, 25 bp, Homo sapien
gataggcagtagagagagttggatg

SEQ ID NO: 1420295 - DNA, 25 bp, Homo sapien
taggcagtagagagagttggatgca

SEQ ID NO: 1420296 - DNA, 25 bp, Homo sapien
tggtatttactcccccacatctctt

SEQ ID NO: 1420297 - DNA, 25 bp, Homo sapien
tatttactcccccacatctcttccc

SEQ ID NO: 1420298 - DNA, 25 bp, Homo sapien
ggtatttactcccccacatctcttc

SEQ ID NO: 1420299 - DNA, 25 bp, Homo sapien
actggtatttactcccccacatctc

SEQ ID NO: 1420300 - DNA, 25 bp, Homo sapien
gggtactgctagcatccaggaagtt

SEQ ID NO: 1420301 - DNA, 25 bp, Homo sapien
gcaattcagagccagttactataat

SEQ ID NO: 1420302 - DNA, 25 bp, Homo sapien
actgctagcatccaggaagttgagc

SEQ ID NO: 1420303 - DNA, 25 bp, Homo sapien
aattcagagccagttactataatca

SEQ ID NO: 1420304 - DNA, 25 bp, Homo sapien
gctagatggattacaccttagtctt

SEQ ID NO: 1420305 - DNA, 25 bp, Homo sapien
ggtcactggaaatatgctagatgga

SEQ ID NO: 1420306 - DNA, 25 bp, Homo sapien
tggaaatatgctagatggattacac

SEQ ID NO: 1420307 - DNA, 25 bp, Homo sapien
gttgggtcactggaaatatgctaga

SEQ ID NO: 1420308 - DNA, 25 bp, Homo sapien
ccaaagtgcagggtgatccaatttt

SEQ ID NO: 1420309 - DNA, 25 bp, Homo sapien
cagggtgatccaattttgctaagca

SEQ ID NO: 1420310 - DNA, 25 bp, Homo sapien
aaagtgcagggtgatccaattttgc

SEQ ID NO: 1420311 - DNA, 25 bp, Homo sapien
caagaagtcaggacacattcaggct

SEQ ID NO: 1420312 - DNA, 25 bp, Homo sapien
gactgtagcaactgataggaaatcc

SEQ ID NO: 1420313 - DNA, 25 bp, Homo sapien
taggaaatcctaaggcccagaagca

SEQ ID NO: 1420314 - DNA, 25 bp, Homo sapien
cttctccaagagcaatggtctgttg

SEQ ID NO: 1420315 - DNA, 25 bp, Homo sapien
caatggtctgttgtgactgtagcaa

SEQ ID NO: 1420316 - DNA, 25 bp, Homo sapien
cagctagcagctcgaggaatctgtt

SEQ ID NO: 1420317 - DNA, 25 bp, Homo sapien
tagcagctcgaggaatctgttcatt

SEQ ID NO: 1420318 - DNA, 25 bp, Homo sapien
agctcgaggaatctgttcattgtca

SEQ ID NO: 1420319 - DNA, 25 bp, Homo sapien
tcattgtcatgcatgttggggagga

SEQ ID NO: 1420320 - DNA, 25 bp, Homo sapien
gtgtagagggcaggatgcttccaag

SEQ ID NO: 1420321 - DNA, 25 bp, Homo sapien
tgtgtagagggcaggatgcttccaa

SEQ ID NO: 1420322 - DNA, 25 bp, Homo sapien
tcccaaggagctaaggagctgggac

SEQ ID NO: 1420323 - DNA, 25 bp, Homo sapien
tctaagtgaagttaagttctcatcc

SEQ ID NO: 1420324 - DNA, 25 bp, Homo sapien
cctcccaaggagctaaggagctggg

SEQ ID NO: 1420325 - DNA, 25 bp, Homo sapien
ctcccaaggagctaaggagctggga

SEQ ID NO: 1420326 - DNA, 25 bp, Homo sapien
gccagcctggcgttagaagcaagta

SEQ ID NO: 1420327 - DNA, 25 bp, Homo sapien
aaccctgaagaaagtgcggagcaca

SEQ ID NO: 1420328 - DNA, 25 bp, Homo sapien
cggaaattacctagcgaggagcggc

SEQ ID NO: 1420329 - DNA, 25 bp, Homo sapien
ttaataagacgcctagctcccgagg

SEQ ID NO: 1420330 - DNA, 25 bp, Homo sapien
tcatgccactgtgcgtgtggactga

SEQ ID NO: 1420331 - DNA, 25 bp, Homo sapien
gaatctgaacgttgtaaattctaga

SEQ ID NO: 1420332 - DNA, 25 bp, Homo sapien
tcaacaatacgatggtgataatacc

SEQ ID NO: 1420333 - DNA, 25 bp, Homo sapien
tgtggactgagtattgaatctgaac

SEQ ID NO: 1420334 - DNA, 25 bp, Homo sapien
ttttacaagtaaatcaggttatata

SEQ ID NO: 1420335 - DNA, 25 bp, Homo sapien
cacgtgctatagagtttaatgctaa

SEQ ID NO: 1420336 - DNA, 25 bp, Homo sapien
agtttatacttttagatgctttagg

SEQ ID NO: 1420337 - DNA, 25 bp, Homo sapien
aataaattggtaactatgaaccacg

SEQ ID NO: 1420338 - DNA, 25 bp, Homo sapien
gtttgtgcctacaaaacagcagtca

SEQ ID NO: 1420339 - DNA, 25 bp, Homo sapien
gctattaggattatctgaacagacc

SEQ ID NO: 1420340 - DNA, 25 bp, Homo sapien
tgaagaaggagaagcacgtatgttt

SEQ ID NO: 1420341 - DNA, 25 bp, Homo sapien
gagtatatttgaccaacagtccagg

SEQ ID NO: 1420342 - DNA, 25 bp, Homo sapien
gactgcgggtaacattttgcttcat

SEQ ID NO: 1420343 - DNA, 25 bp, Homo sapien
ttgtgactccagaagtgactgcggg

SEQ ID NO: 1420344 - DNA, 25 bp, Homo sapien
tttggagggagtgactgaaagacac

SEQ ID NO: 1420345 - DNA, 25 bp, Homo sapien
gattgtcatgtgtgtcaccgctgag

SEQ ID NO: 1420346 - DNA, 25 bp, Homo sapien
gaaaccgtatctgccctcaaaggga

SEQ ID NO: 1420347 - DNA, 25 bp, Homo sapien
ttagagtggcagtaacaagggagct

SEQ ID NO: 1420348 - DNA, 25 bp, Homo sapien
ggagctgggccctcaataaagaagg

SEQ ID NO: 1420349 - DNA, 25 bp, Homo sapien
tggacttaattcagtagacagtggg

SEQ ID NO: 1420350 - DNA, 25 bp, Homo sapien
ggcacaggatcaaccagtaagtttc

SEQ ID NO: 1420351 - DNA, 25 bp, Homo sapien
tcattgctcctgagttactgtctca

SEQ ID NO: 1420352 - DNA, 25 bp, Homo sapien
tactctcctgtttagagcattcatc

SEQ ID NO: 1420353 - DNA, 25 bp, Homo sapien
gtaagtttccattcctactctcctg

SEQ ID NO: 1420354 - DNA, 25 bp, Homo sapien
gcttgaggctcctgagatctggcat

SEQ ID NO: 1420355 - DNA, 25 bp, Homo sapien
ctggcttgaggctcctgagatctgg

SEQ ID NO: 1420356 - DNA, 25 bp, Homo sapien
tactgtaggagtgctgctggcttga

SEQ ID NO: 1420357 - DNA, 25 bp, Homo sapien
catgtactgtaggagtgctgctggc

SEQ ID NO: 1420358 - DNA, 25 bp, Homo sapien
gggactatactgttactaagtagct

SEQ ID NO: 1420359 - DNA, 25 bp, Homo sapien
ttagtactgggactatactgttact

SEQ ID NO: 1420360 - DNA, 25 bp, Homo sapien
attttctgcctatggaacttgctgt

SEQ ID NO: 1420361 - DNA, 25 bp, Homo sapien
tttctgcctatggaacttgctgtat

SEQ ID NO: 1420362 - DNA, 25 bp, Homo sapien
ccccagaaggtcatattccgccatt

SEQ ID NO: 1420363 - DNA, 25 bp, Homo sapien
cactttagcacaacaggtgtggacc

SEQ ID NO: 1420364 - DNA, 25 bp, Homo sapien
tacctattgtaacagtaactggccc

SEQ ID NO: 1420365 - DNA, 25 bp, Homo sapien
tcacccgacattcctagtgggcaag

SEQ ID NO: 1420366 - DNA, 25 bp, Homo sapien
ctacagtcgcagccaagcatcaccc

SEQ ID NO: 1420367 - DNA, 25 bp, Homo sapien
tacagtcgcagccaagcatcaccct

SEQ ID NO: 1420368 - DNA, 25 bp, Homo sapien
tctaacgcaactacctcagcaaagc

SEQ ID NO: 1420369 - DNA, 25 bp, Homo sapien
tcttctaacgcaactacctcagcaa

SEQ ID NO: 1420370 - DNA, 25 bp, Homo sapien
gtgaccttgaggagcttgagcagtt

SEQ ID NO: 1420371 - DNA, 25 bp, Homo sapien
tagcagcaaccccaattcagacact

SEQ ID NO: 1420372 - DNA, 25 bp, Homo sapien
agcgaattgatactcccagcttgga

SEQ ID NO: 1420373 - DNA, 25 bp, Homo sapien
gagccagtcaacaccaaagcgaatt

SEQ ID NO: 1420374 - DNA, 25 bp, Homo sapien
tgcaagtgagcattgccatactcct

SEQ ID NO: 1420375 - DNA, 25 bp, Homo sapien
tcctccagaaagacgagtgttccat

SEQ ID NO: 1420376 - DNA, 25 bp, Homo sapien
tcccataggtacgtttgacacataa

SEQ ID NO: 1420377 - DNA, 25 bp, Homo sapien
aataatctcaaccaaacatgccccg

SEQ ID NO: 1420378 - DNA, 25 bp, Homo sapien
tgagaagcacaaaccatagaagagt

SEQ ID NO: 1420379 - DNA, 25 bp, Homo sapien
tgttgtcaaaatgagacctgcgtct

SEQ ID NO: 1420380 - DNA, 25 bp, Homo sapien
tctgcatggtaataaagtgactcct

SEQ ID NO: 1420381 - DNA, 25 bp, Homo sapien
gctctaatgagcaacagtacactgg

SEQ ID NO: 1420382 - DNA, 25 bp, Homo sapien
aaaggatggagacggaacatttgcc

SEQ ID NO: 1420383 - DNA, 25 bp, Homo sapien
tgcagtgtgattggactgccagcca

SEQ ID NO: 1420384 - DNA, 25 bp, Homo sapien
cctctcgccgtgttgtgagggcaaa

SEQ ID NO: 1420385 - DNA, 25 bp, Homo sapien
aaatgtgattggcttcctctcgccg

SEQ ID NO: 1420386 - DNA, 25 bp, Homo sapien
taaaggaggcacttattagccgggc

SEQ ID NO: 1420387 - DNA, 25 bp, Homo sapien
gcttgcttaaatctctggtggtccc

SEQ ID NO: 1420388 - DNA, 25 bp, Homo sapien
gctcagtgaggtaagacaaagggca

SEQ ID NO: 1420389 - DNA, 25 bp, Homo sapien
caccttatatgggagagcctggaaa

SEQ ID NO: 1420390 - DNA, 25 bp, Homo sapien
gaccctgagggtgcatttacatccc

SEQ ID NO: 1420391 - DNA, 25 bp, Homo sapien
ctctgtacatagcaaaagcataggc

SEQ ID NO: 1420392 - DNA, 25 bp, Homo sapien
taaatgatcccacagaacttaagtg

SEQ ID NO: 1420393 - DNA, 25 bp, Homo sapien
tgtccagtaggttcagggaccctga

SEQ ID NO: 1420394 - DNA, 25 bp, Homo sapien
aaaagatcttcccttactctcctat

SEQ ID NO: 1420395 - DNA, 25 bp, Homo sapien
aagatcttcccttactctcctataa

SEQ ID NO: 1420396 - DNA, 25 bp, Homo sapien
gatcttcccttactctcctataaat

SEQ ID NO: 1420397 - DNA, 25 bp, Homo sapien
ccaaaagatcttcccttactctcct

SEQ ID NO: 1420398 - DNA, 25 bp, Homo sapien
ctagggagtcaggtagttcattgtt

SEQ ID NO: 1420399 - DNA, 25 bp, Homo sapien
gagtcaggtagttcattgtttcggt

SEQ ID NO: 1420400 - DNA, 25 bp, Homo sapien
tagggagtcaggtagttcattgttt

SEQ ID NO: 1420401 - DNA, 25 bp, Homo sapien
tcaggtagttcattgtttcggtgta

SEQ ID NO: 1420402 - DNA, 25 bp, Homo sapien
cattcctgcgtgagtctgcagaagg

SEQ ID NO: 1420403 - DNA, 25 bp, Homo sapien
tcggggatgccatgtccttggttcc

SEQ ID NO: 1420404 - DNA, 25 bp, Homo sapien
taggcagtcggggatgccatgtcct

SEQ ID NO: 1420405 - DNA, 25 bp, Homo sapien
tgtccttggttccattcctgcgtga

SEQ ID NO: 1420406 - DNA, 25 bp, Homo sapien
ttgctcagtccgcaggaggtctcac

SEQ ID NO: 1420407 - DNA, 25 bp, Homo sapien
catgggcacgtgtgcattgctcagt

SEQ ID NO: 1420408 - DNA, 25 bp, Homo sapien
ctcccgcataagtctgtacttccat

SEQ ID NO: 1420409 - DNA, 25 bp, Homo sapien
gcataagtctgtacttccatcccct

SEQ ID NO: 1420410 - DNA, 25 bp, Homo sapien
tggtagtagtgaaggctaggtgagt

SEQ ID NO: 1420411 - DNA, 25 bp, Homo sapien
tagtagtgaaggctaggtgagtaag

SEQ ID NO: 1420412 - DNA, 25 bp, Homo sapien
ctgtggtagtagtgaaggctaggtg

SEQ ID NO: 1420413 - DNA, 25 bp, Homo sapien
tgtggtagtagtgaaggctaggtga

SEQ ID NO: 1420414 - DNA, 25 bp, Homo sapien
agctggccacacgtcaacttctgta

SEQ ID NO: 1420415 - DNA, 25 bp, Homo sapien
acttctgtacttgccttttccttgg

SEQ ID NO: 1420416 - DNA, 25 bp, Homo sapien
cgtcaacttctgtacttgccttttc

SEQ ID NO: 1420417 - DNA, 25 bp, Homo sapien
ggccacacgtcaacttctgtacttg

SEQ ID NO: 1420418 - DNA, 25 bp, Homo sapien
gctcctttaagctgactgctgcata

SEQ ID NO: 1420419 - DNA, 25 bp, Homo sapien
ttaagctgactgctgcatacacatt

SEQ ID NO: 1420420 - DNA, 25 bp, Homo sapien
tcctttaagctgactgctgcataca

SEQ ID NO: 1420421 - DNA, 25 bp, Homo sapien
aaaggctcctttaagctgactgctg

SEQ ID NO: 1420422 - DNA, 25 bp, Homo sapien
tagctttggccctcacaaacttgtg

SEQ ID NO: 1420423 - DNA, 25 bp, Homo sapien
cagtctgtggtgtcctggcacttag

SEQ ID NO: 1420424 - DNA, 25 bp, Homo sapien
gtgagcatgccctgaaacaaattgg

SEQ ID NO: 1420425 - DNA, 25 bp, Homo sapien
caatgggctctctagaagctgcatc

SEQ ID NO: 1420426 - DNA, 25 bp, Homo sapien
ttagcacagggcctagggagggtgg

SEQ ID NO: 1420427 - DNA, 25 bp, Homo sapien
atcatccaccctacaccaaccaggg

SEQ ID NO: 1420428 - DNA, 25 bp, Homo sapien
ggtcactatggggacttagcacagg

SEQ ID NO: 1420429 - DNA, 25 bp, Homo sapien
tggcccgaggactccacagagtggg

SEQ ID NO: 1420430 - DNA, 25 bp, Homo sapien
gctctgctgggtgctttaacctctg

SEQ ID NO: 1420431 - DNA, 25 bp, Homo sapien
atgcacgccacggtgcccttctgag

SEQ ID NO: 1420432 - DNA, 25 bp, Homo sapien
ctggaactgcttggaagtggctgtc

SEQ ID NO: 1420433 - DNA, 25 bp, Homo sapien
ctgggcgaatgcacgccacggtgcc

SEQ ID NO: 1420434 - DNA, 25 bp, Homo sapien
ctgataacttgcgtgctggaccttg

SEQ ID NO: 1420435 - DNA, 25 bp, Homo sapien
tattgtgtagccttactgccccaga

SEQ ID NO: 1420436 - DNA, 25 bp, Homo sapien
gccccagagtgcctgttagccaaat

SEQ ID NO: 1420437 - DNA, 25 bp, Homo sapien
cttagataactctgcactctgggtg

SEQ ID NO: 1420438 - DNA, 25 bp, Homo sapien
aggaaggtaaccctgaacttggcat

SEQ ID NO: 1420439 - DNA, 25 bp, Homo sapien
ggtaaccctgaacttggcatctggt

SEQ ID NO: 1420440 - DNA, 25 bp, Homo sapien
gaaggtaaccctgaacttggcatct

SEQ ID NO: 1420441 - DNA, 25 bp, Homo sapien
caagtcctgaacattcactgggtgg

SEQ ID NO: 1420442 - DNA, 25 bp, Homo sapien
cttgaattagatgatgtggagagcc

SEQ ID NO: 1420443 - DNA, 25 bp, Homo sapien
cgttgtcgcaagatgtgctcgctct

SEQ ID NO: 1420444 - DNA, 25 bp, Homo sapien
ggccatctggcaggcattcttgaat

SEQ ID NO: 1420445 - DNA, 25 bp, Homo sapien
tgtctatcacgtgctggccatctgg

SEQ ID NO: 1420446 - DNA, 25 bp, Homo sapien
agggaccaaaatgggaaggcaaatg

SEQ ID NO: 1420447 - DNA, 25 bp, Homo sapien
gctcctttatcatagaatttatatt

SEQ ID NO: 1420448 - DNA, 25 bp, Homo sapien
gcttgactgctgaaataaagcttag

SEQ ID NO: 1420449 - DNA, 25 bp, Homo sapien
agcttgactgctgaaataaagctta

SEQ ID NO: 1420450 - DNA, 25 bp, Homo sapien
aagcttgactgctgaaataaagctt

SEQ ID NO: 1420451 - DNA, 25 bp, Homo sapien
catgtgttgggtcttcctgcgaggc

SEQ ID NO: 1420452 - DNA, 25 bp, Homo sapien
tgaagtgaatcaacggcctcctctt

SEQ ID NO: 1420453 - DNA, 25 bp, Homo sapien
gcagtatcctagtacattgacgggt

SEQ ID NO: 1420454 - DNA, 25 bp, Homo sapien
tagagagcgttttccatccatggcc

SEQ ID NO: 1420455 - DNA, 25 bp, Homo sapien
catggcccagtacagttaccttgaa

SEQ ID NO: 1420456 - DNA, 25 bp, Homo sapien
caaatttacagcaggagtgaagcca

SEQ ID NO: 1420457 - DNA, 25 bp, Homo sapien
cttaaagagtgcagggacaacagtc

SEQ ID NO: 1420458 - DNA, 25 bp, Homo sapien
gtacagttcaatggtgcggcacaga

SEQ ID NO: 1420459 - DNA, 25 bp, Homo sapien
cataatctgggcgtctgcaggtctg

SEQ ID NO: 1420460 - DNA, 25 bp, Homo sapien
ctgagaagagtgaaccgggttgtaa

SEQ ID NO: 1420461 - DNA, 25 bp, Homo sapien
tttgagtggtgaaatcccctggctg

SEQ ID NO: 1420462 - DNA, 25 bp, Homo sapien
gaaccgggttgtaaatgcttcatcc

SEQ ID NO: 1420463 - DNA, 25 bp, Homo sapien
gggcctgcatgtgaagggcgtcgta

SEQ ID NO: 1420464 - DNA, 25 bp, Homo sapien
gggcagggcctgcatgtgaagggcg

SEQ ID NO: 1420465 - DNA, 25 bp, Homo sapien
catgtgaagggcgtcgtaggtgtcc

SEQ ID NO: 1420466 - DNA, 25 bp, Homo sapien
aagggcgtcgtaggtgtccttggtg

SEQ ID NO: 1420467 - DNA, 25 bp, Homo sapien
aacagcttcgttggtagatgggtgc

SEQ ID NO: 1420468 - DNA, 25 bp, Homo sapien
caaagagtgggtcagtagcctgtgt

SEQ ID NO: 1420469 - DNA, 25 bp, Homo sapien
ggccccacgggcaggagccttggct

SEQ ID NO: 1420470 - DNA, 25 bp, Homo sapien
caaatgctgtgccttacagtgcttg

SEQ ID NO: 1420471 - DNA, 25 bp, Homo sapien
gctctgtctgccatggccaagcaag

SEQ ID NO: 1420472 - DNA, 25 bp, Homo sapien
ttgccactggcctaaatgggtgcct

SEQ ID NO: 1420473 - DNA, 25 bp, Homo sapien
caagtaattcgcttgaatggccaag

SEQ ID NO: 1420474 - DNA, 25 bp, Homo sapien
gtgctccagggacttattggcagtg

SEQ ID NO: 1420475 - DNA, 25 bp, Homo sapien
tggtaaaggccatcgtgccccttgc

SEQ ID NO: 1420476 - DNA, 25 bp, Homo sapien
ctggtaaaggccatcgtgccccttg

SEQ ID NO: 1420477 - DNA, 25 bp, Homo sapien
gtaaaggccatcgtgccccttgccc

SEQ ID NO: 1420478 - DNA, 25 bp, Homo sapien
aaaggccatcgtgccccttgcccct

SEQ ID NO: 1420479 - DNA, 25 bp, Homo sapien
cacgtgcccgtttaccagctagaag

SEQ ID NO: 1420480 - DNA, 25 bp, Homo sapien
gattcctaaggtctagggcccgcag

SEQ ID NO: 1420481 - DNA, 25 bp, Homo sapien
tgagcactgaacacggcagcacata

SEQ ID NO: 1420482 - DNA, 25 bp, Homo sapien
catagtcagttcaatcacgtgcccg

SEQ ID NO: 1420483 - DNA, 25 bp, Homo sapien
ggttcgccttcacctctgatggcca

SEQ ID NO: 1420484 - DNA, 25 bp, Homo sapien
ccaggttcgccttcacctctgatgg

SEQ ID NO: 1420485 - DNA, 25 bp, Homo sapien
ggtgacagccaggttcgccttcacc

SEQ ID NO: 1420486 - DNA, 25 bp, Homo sapien
gtgacagccaggttcgccttcacct

SEQ ID NO: 1420487 - DNA, 25 bp, Homo sapien
tgcagcaggcgtgtctggaggacca

SEQ ID NO: 1420488 - DNA, 25 bp, Homo sapien
gcagcaggcgtgtctggaggaccaa

SEQ ID NO: 1420489 - DNA, 25 bp, Homo sapien
taggcctccgccatcttatctttct

SEQ ID NO: 1420490 - DNA, 25 bp, Homo sapien
tcactgtaggcctccgccatcttat

SEQ ID NO: 1420491 - DNA, 25 bp, Homo sapien
aatctcactgtaggcctccgccatc

SEQ ID NO: 1420492 - DNA, 25 bp, Homo sapien
atcccaatctcactgtaggcctccg

SEQ ID NO: 1420493 - DNA, 25 bp, Homo sapien
ttgatccccaagttggcagcagtgg

SEQ ID NO: 1420494 - DNA, 25 bp, Homo sapien
gggctcccacaatcaaggctccaaa

SEQ ID NO: 1420495 - DNA, 25 bp, Homo sapien
gagggcgtggaacactgatttttac

SEQ ID NO: 1420496 - DNA, 25 bp, Homo sapien
cagaagagggcgtggaacactgatt

SEQ ID NO: 1420497 - DNA, 25 bp, Homo sapien
tgccagctctttgcactgagctgag

SEQ ID NO: 1420498 - DNA, 25 bp, Homo sapien
tcaagttaggctcaaaaagatagga

SEQ ID NO: 1420499 - DNA, 25 bp, Homo sapien
tttggagtctcctccgagctgccag

SEQ ID NO: 1420500 - DNA, 25 bp, Homo sapien
agctgaggggctcaagttaggctca

SEQ ID NO: 1420501 - DNA, 25 bp, Homo sapien
tactcggcacttttcagctaaggag

SEQ ID NO: 1420502 - DNA, 25 bp, Homo sapien
cagatcgacaatcagggttcagggt

SEQ ID NO: 1420503 - DNA, 25 bp, Homo sapien
gagacattactcgatccaagaaggg

SEQ ID NO: 1420504 - DNA, 25 bp, Homo sapien
caggccgcaagcaggtgagacatta

SEQ ID NO: 1420505 - DNA, 25 bp, Homo sapien
attgtacaggccttcctgagggttc

SEQ ID NO: 1420506 - DNA, 25 bp, Homo sapien
tgtacaggccttcctgagggttctt

SEQ ID NO: 1420507 - DNA, 25 bp, Homo sapien
caggccttcctgagggttcttcctt

SEQ ID NO: 1420508 - DNA, 25 bp, Homo sapien
tacaggccttcctgagggttcttcc

SEQ ID NO: 1420509 - DNA, 25 bp, Homo sapien
cgtctcttgtccaaaacatcgtact

SEQ ID NO: 1420510 - DNA, 25 bp, Homo sapien
aaaacatcgtactcctctcttcgtc

SEQ ID NO: 1420511 - DNA, 25 bp, Homo sapien
cggccacgtctcttgtccaaaacat

SEQ ID NO: 1420512 - DNA, 25 bp, Homo sapien
tcctctcttcgtcctagattgagct

SEQ ID NO: 1420513 - DNA, 25 bp, Homo sapien
gttctggccctgctggtacgcgggg

SEQ ID NO: 1420514 - DNA, 25 bp, Homo sapien
gtacgcgggggcgtctgcgctcctg

SEQ ID NO: 1420515 - DNA, 25 bp, Homo sapien
gcgggggcgtctgcgctcctgctga

SEQ ID NO: 1420516 - DNA, 25 bp, Homo sapien
ttctggccctgctggtacgcggggg

SEQ ID NO: 1420517 - DNA, 25 bp, Homo sapien
ggcgcgcggcgacccgagggacagc

SEQ ID NO: 1420518 - DNA, 25 bp, Homo sapien
cacagaaagcaaagcgcgttactgc

SEQ ID NO: 1420519 - DNA, 25 bp, Homo sapien
ctactccgctccttggcaactaaca

SEQ ID NO: 1420520 - DNA, 25 bp, Homo sapien
aaagcgcgttactgctccgcgaggg

SEQ ID NO: 1420521 - DNA, 25 bp, Homo sapien
gcttgtcatggaggtgcctagcacc

SEQ ID NO: 1420522 - DNA, 25 bp, Homo sapien
cactgaagtgatgactgggactgga

SEQ ID NO: 1420523 - DNA, 25 bp, Homo sapien
tcacacttggaaagaaggacctctg

SEQ ID NO: 1420524 - DNA, 25 bp, Homo sapien
gatgtgcacacatttgtacggcttg

SEQ ID NO: 1420525 - DNA, 25 bp, Homo sapien
atccagcaggtagcagagtttggga

SEQ ID NO: 1420526 - DNA, 25 bp, Homo sapien
gattccatccagcaggtagcagagt

SEQ ID NO: 1420527 - DNA, 25 bp, Homo sapien
gatccagcaggccaaagctctgtgc

SEQ ID NO: 1420528 - DNA, 25 bp, Homo sapien
tttgggatccagcaggccaaagctc

SEQ ID NO: 1420529 - DNA, 25 bp, Homo sapien
ccagcatctccctgtcccctagtcc

SEQ ID NO: 1420530 - DNA, 25 bp, Homo sapien
ctaggcccagcatctccctgtcccc

SEQ ID NO: 1420531 - DNA, 25 bp, Homo sapien
agcatctccctgtcccctagtccca

SEQ ID NO: 1420532 - DNA, 25 bp, Homo sapien
ggcccagcatctccctgtcccctag

SEQ ID NO: 1420533 - DNA, 25 bp, Homo sapien
agatgggcctgaggaagacagtcat

SEQ ID NO: 1420534 - DNA, 25 bp, Homo sapien
ctgtgctgggagagatgggcctgag

SEQ ID NO: 1420535 - DNA, 25 bp, Homo sapien
tgctgggagagatgggcctgaggaa

SEQ ID NO: 1420536 - DNA, 25 bp, Homo sapien
ggagagatgggcctgaggaagacag

SEQ ID NO: 1420537 - DNA, 25 bp, Homo sapien
tctgtctctgagccagactatgaac

SEQ ID NO: 1420538 - DNA, 25 bp, Homo sapien
ttgaattgcgttgtttgtctgtctg

SEQ ID NO: 1420539 - DNA, 25 bp, Homo sapien
tttacttgaattgcgttgtttgtct

SEQ ID NO: 1420540 - DNA, 25 bp, Homo sapien
tgtctctgagccagactatgaactt

SEQ ID NO: 1420541 - DNA, 25 bp, Homo sapien
gctcaggatccggagtttccaccta

SEQ ID NO: 1420542 - DNA, 25 bp, Homo sapien
caaggacacctgcaggttagtggca

SEQ ID NO: 1420543 - DNA, 25 bp, Homo sapien
caggtacttctcttagccttatggc

SEQ ID NO: 1420544 - DNA, 25 bp, Homo sapien
tcgatgcagctgacctatgggctca

SEQ ID NO: 1420545 - DNA, 25 bp, Homo sapien
cggcttgtaaacgttccacttcaag

SEQ ID NO: 1420546 - DNA, 25 bp, Homo sapien
gacacttagtcacaacggcttgtaa

SEQ ID NO: 1420547 - DNA, 25 bp, Homo sapien
tcacaacggcttgtaaacgttccac

SEQ ID NO: 1420548 - DNA, 25 bp, Homo sapien
cttttgacacttagtcacaacggct

SEQ ID NO: 1420549 - DNA, 25 bp, Homo sapien
taggaagcacggcaggtaagaatga

SEQ ID NO: 1420550 - DNA, 25 bp, Homo sapien
tgataggaagcacggcaggtaagaa

SEQ ID NO: 1420551 - DNA, 25 bp, Homo sapien
gaagcacggcaggtaagaatgaatc

SEQ ID NO: 1420552 - DNA, 25 bp, Homo sapien
ctttgataggaagcacggcaggtaa

SEQ ID NO: 1420553 - DNA, 25 bp, Homo sapien
tttgagtccccaactttgagccctg

SEQ ID NO: 1420554 - DNA, 25 bp, Homo sapien
tgacattgcagggtaaaaacttaga

SEQ ID NO: 1420555 - DNA, 25 bp, Homo sapien
gggtgtgatgccgacccattgacca

SEQ ID NO: 1420556 - DNA, 25 bp, Homo sapien
ggaagtcactgttcttaggaaggca

SEQ ID NO: 1420557 - DNA, 25 bp, Homo sapien
atgtagctttctctggctgactcca

SEQ ID NO: 1420558 - DNA, 25 bp, Homo sapien
tgtagctttctctggctgactccag

SEQ ID NO: 1420559 - DNA, 25 bp, Homo sapien
acttggacatgtagctttctctggc

SEQ ID NO: 1420560 - DNA, 25 bp, Homo sapien
ttgccaacttggacatgtagctttc

SEQ ID NO: 1420561 - DNA, 25 bp, Homo sapien
ccagcagccgagtgagatgaaagcg

SEQ ID NO: 1420562 - DNA, 25 bp, Homo sapien
gcaactgtaagctggagaccctctg

SEQ ID NO: 1420563 - DNA, 25 bp, Homo sapien
gcgcttttccgatccaccgaatcag

SEQ ID NO: 1420564 - DNA, 25 bp, Homo sapien
tcagtcccactgcaactgtaagctg

SEQ ID NO: 1420565 - DNA, 25 bp, Homo sapien
tagggggactccaaatgtcgtcaaa

SEQ ID NO: 1420566 - DNA, 25 bp, Homo sapien
atagggggactccaaatgtcgtcaa

SEQ ID NO: 1420567 - DNA, 25 bp, Homo sapien
ctgccactctcggaatcaacagctg

SEQ ID NO: 1420568 - DNA, 25 bp, Homo sapien
tttgagccctgtgagcaaaagtttc

SEQ ID NO: 1420569 - DNA, 25 bp, Homo sapien
ggagagcgctaaattttatcttccc

SEQ ID NO: 1420570 - DNA, 25 bp, Homo sapien
ccgagaatacatgccggcactgcct

SEQ ID NO: 1420571 - DNA, 25 bp, Homo sapien
tcctgtgtggagctccgagaataca

SEQ ID NO: 1420572 - DNA, 25 bp, Homo sapien
cagtgcatggagagcgctaaatttt

SEQ ID NO: 1420573 - DNA, 25 bp, Homo sapien
gagttgacagccactgatagagctt

SEQ ID NO: 1420574 - DNA, 25 bp, Homo sapien
accacggtacggagggaagtggctg

SEQ ID NO: 1420575 - DNA, 25 bp, Homo sapien
agccactgatagagctttttcctga

SEQ ID NO: 1420576 - DNA, 25 bp, Homo sapien
caggaatgagggaccacggtacgga

SEQ ID NO: 1420577 - DNA, 25 bp, Homo sapien
gattctacgaatatatccagcccta

SEQ ID NO: 1420578 - DNA, 25 bp, Homo sapien
ttgcagaaagcctgctctgtgaggg

SEQ ID NO: 1420579 - DNA, 25 bp, Homo sapien
caacagggactactggtgccacact

SEQ ID NO: 1420580 - DNA, 25 bp, Homo sapien
tgtagacacagaacccaacagggac

SEQ ID NO: 1420581 - DNA, 25 bp, Homo sapien
tagaatatgctagtgaggacagtcc

SEQ ID NO: 1420582 - DNA, 25 bp, Homo sapien
gatctgcttcgtttagaatatgcta

SEQ ID NO: 1420583 - DNA, 25 bp, Homo sapien
ctaacacggctgcctgaagatctgc

SEQ ID NO: 1420584 - DNA, 25 bp, Homo sapien
tgaggacagtcctggaatttctttg

SEQ ID NO: 1420585 - DNA, 25 bp, Homo sapien
tcgttttctgaggaccggcttggtg

SEQ ID NO: 1420586 - DNA, 25 bp, Homo sapien
ggaccggcttggtgggtgctgatgc

SEQ ID NO: 1420587 - DNA, 25 bp, Homo sapien
cagtcgttttctgaggaccggcttg

SEQ ID NO: 1420588 - DNA, 25 bp, Homo sapien
ctccagtcgttttctgaggaccggc

SEQ ID NO: 1420589 - DNA, 25 bp, Homo sapien
ggaagacctcacacccacagtgtct

SEQ ID NO: 1420590 - DNA, 25 bp, Homo sapien
ctgcctggaagacctcacacccaca

SEQ ID NO: 1420591 - DNA, 25 bp, Homo sapien
cctcacacccacagtgtcttagaag

SEQ ID NO: 1420592 - DNA, 25 bp, Homo sapien
cacacccacagtgtcttagaagatt

SEQ ID NO: 1420593 - DNA, 25 bp, Homo sapien
taccagcctgctttagcgctaggag

SEQ ID NO: 1420594 - DNA, 25 bp, Homo sapien
aggtaccagcctgctttagcgctag

SEQ ID NO: 1420595 - DNA, 25 bp, Homo sapien
gtaccagcctgctttagcgctagga

SEQ ID NO: 1420596 - DNA, 25 bp, Homo sapien
ggtaccagcctgctttagcgctagg

SEQ ID NO: 1420597 - DNA, 25 bp, Homo sapien
gagtcttcctaaatattgcccagag

SEQ ID NO: 1420598 - DNA, 25 bp, Homo sapien
gagccagtaagtctgtgagttcagg

SEQ ID NO: 1420599 - DNA, 25 bp, Homo sapien
ccatctgttcatgagcaggcgctct

SEQ ID NO: 1420600 - DNA, 25 bp, Homo sapien
ggagcacacgcttgtctgtccatct

SEQ ID NO: 1420601 - DNA, 25 bp, Homo sapien
cctatgacgtactttgcgtggatca

SEQ ID NO: 1420602 - DNA, 25 bp, Homo sapien
gcattcgcctatgacgtactttgcg

SEQ ID NO: 1420603 - DNA, 25 bp, Homo sapien
ccacgcgctgtgagcattcgcctat

SEQ ID NO: 1420604 - DNA, 25 bp, Homo sapien
tgcgtggatcaaaggccccacaaag

SEQ ID NO: 1420605 - DNA, 25 bp, Homo sapien
tgatattctaggacatggaccaagt

SEQ ID NO: 1420606 - DNA, 25 bp, Homo sapien
gcgatgaagccagaccagtgtggtt

SEQ ID NO: 1420607 - DNA, 25 bp, Homo sapien
cctgtgaccatagaagaggcctctg

SEQ ID NO: 1420608 - DNA, 25 bp, Homo sapien
tatggctctcctcgacacagaagtc

SEQ ID NO: 1420609 - DNA, 25 bp, Homo sapien
ctacatacacgagaacccaagggag

SEQ ID NO: 1420610 - DNA, 25 bp, Homo sapien
acatacacgagaacccaagggagag

SEQ ID NO: 1420611 - DNA, 25 bp, Homo sapien
caagggagagagctgcacagggggc

SEQ ID NO: 1420612 - DNA, 25 bp, Homo sapien
gggagagagctgcacagggggcctg

SEQ ID NO: 1420613 - DNA, 25 bp, Homo sapien
aagccagaaaaggaggagaactgtt

SEQ ID NO: 1420614 - DNA, 25 bp, Homo sapien
ctaagccagaaaaggaggagaactg

SEQ ID NO: 1420615 - DNA, 25 bp, Homo sapien
cagaaaaggaggagaactgttcctt

SEQ ID NO: 1420616 - DNA, 25 bp, Homo sapien
gccagaaaaggaggagaactgttcc

SEQ ID NO: 1420617 - DNA, 25 bp, Homo sapien
ggaggatgggcagtcgccgggccat

SEQ ID NO: 1420618 - DNA, 25 bp, Homo sapien
tggaggatgggcagtcgccgggcca

SEQ ID NO: 1420619 - DNA, 25 bp, Homo sapien
gcgttgccactgagcatgggttgct

SEQ ID NO: 1420620 - DNA, 25 bp, Homo sapien
tttctgcgttgccactgagcatggg

SEQ ID NO: 1420621 - DNA, 25 bp, Homo sapien
tttgtggcttttctgcgttgccact

SEQ ID NO: 1420622 - DNA, 25 bp, Homo sapien
tgccactgagcatgggttgctctcg

SEQ ID NO: 1420623 - DNA, 25 bp, Homo sapien
tctggttcagtctgctgacaacacg

SEQ ID NO: 1420624 - DNA, 25 bp, Homo sapien
cagctccaactttgagaggaattta

SEQ ID NO: 1420625 - DNA, 25 bp, Homo sapien
gacaacacgttagatttattctggc

SEQ ID NO: 1420626 - DNA, 25 bp, Homo sapien
gcatcaactagctgcagagcccaag

SEQ ID NO: 1420627 - DNA, 25 bp, Homo sapien
agatgagcactttgcagttaaatag

SEQ ID NO: 1420628 - DNA, 25 bp, Homo sapien
gtgcagagcacagccctaagcgttg

SEQ ID NO: 1420629 - DNA, 25 bp, Homo sapien
aagcgctgaactgtttacgttccct

SEQ ID NO: 1420630 - DNA, 25 bp, Homo sapien
catttggaacgttccaaggacacaa

SEQ ID NO: 1420631 - DNA, 25 bp, Homo sapien
tccctcagttgaaggatgctctata

SEQ ID NO: 1420632 - DNA, 25 bp, Homo sapien
cagtgacttgcatagagagctcagg

SEQ ID NO: 1420633 - DNA, 25 bp, Homo sapien
aattcgaagactcctcaaagtgagc

SEQ ID NO: 1420634 - DNA, 25 bp, Homo sapien
gaaaacgtccctgtaatagctgtcc

SEQ ID NO: 1420635 - DNA, 25 bp, Homo sapien
tacaccctctgggtggttctctgac

SEQ ID NO: 1420636 - DNA, 25 bp, Homo sapien
ttacaccctctgggtggttctctga

SEQ ID NO: 1420637 - DNA, 25 bp, Homo sapien
gagatagccagctgtcccgagctgc

SEQ ID NO: 1420638 - DNA, 25 bp, Homo sapien
tgagatagccagctgtcccgagctg

SEQ ID NO: 1420639 - DNA, 25 bp, Homo sapien
agatagccagctgtcccgagctgcc

SEQ ID NO: 1420640 - DNA, 25 bp, Homo sapien
ctgagatagccagctgtcccgagct

SEQ ID NO: 1420641 - DNA, 25 bp, Homo sapien
tttcgaaaataaggttgcttcctgc

SEQ ID NO: 1420642 - DNA, 25 bp, Homo sapien
cgaaaataaggttgcttcctgccta

SEQ ID NO: 1420643 - DNA, 25 bp, Homo sapien
tcgaaaataaggttgcttcctgcct

SEQ ID NO: 1420644 - DNA, 25 bp, Homo sapien
gaaaataaggttgcttcctgcctac

SEQ ID NO: 1420645 - DNA, 25 bp, Homo sapien
caggaatgatgagagtcatgccaca

SEQ ID NO: 1420646 - DNA, 25 bp, Homo sapien
aatgcacacaaatgggacaccttgg

SEQ ID NO: 1420647 - DNA, 25 bp, Homo sapien
tctggccacagaacctaactggagg

SEQ ID NO: 1420648 - DNA, 25 bp, Homo sapien
gatactgaatagtctcactgccctc

SEQ ID NO: 1420649 - DNA, 25 bp, Homo sapien
tgaaatggcgcctttcttgggctgc

SEQ ID NO: 1420650 - DNA, 25 bp, Homo sapien
ttatgggttgaaatggcgcctttct

SEQ ID NO: 1420651 - DNA, 25 bp, Homo sapien
atgggttgaaatggcgcctttcttg

SEQ ID NO: 1420652 - DNA, 25 bp, Homo sapien
ggttgaaatggcgcctttcttgggc

SEQ ID NO: 1420653 - DNA, 25 bp, Homo sapien
cttcctgagggtggactctgaatct

SEQ ID NO: 1420654 - DNA, 25 bp, Homo sapien
ctgaatcttggcttctcttataccc

SEQ ID NO: 1420655 - DNA, 25 bp, Homo sapien
gagggtggactctgaatcttggctt

SEQ ID NO: 1420656 - DNA, 25 bp, Homo sapien
tcctgagggtggactctgaatcttg

SEQ ID NO: 1420657 - DNA, 25 bp, Homo sapien
agtggtcagtgccagaagaaagaca

SEQ ID NO: 1420658 - DNA, 25 bp, Homo sapien
gtggtcagtgccagaagaaagacaa

SEQ ID NO: 1420659 - DNA, 25 bp, Homo sapien
aagatggtcctgacttgaaagtgcc

SEQ ID NO: 1420660 - DNA, 25 bp, Homo sapien
tggaagatggtcctgacttgaaagt

SEQ ID NO: 1420661 - DNA, 25 bp, Homo sapien
tgccgctgatccctgacttggaatg

SEQ ID NO: 1420662 - DNA, 25 bp, Homo sapien
tggactgccgctgatccctgacttg

SEQ ID NO: 1420663 - DNA, 25 bp, Homo sapien
gatccctgacttggaatgccccttc

SEQ ID NO: 1420664 - DNA, 25 bp, Homo sapien
tctccctgtctggactgccgctgat

SEQ ID NO: 1420665 - DNA, 25 bp, Homo sapien
tctacccattggttgaggttgctcc

SEQ ID NO: 1420666 - DNA, 25 bp, Homo sapien
tacccattggttgaggttgctccag

SEQ ID NO: 1420667 - DNA, 25 bp, Homo sapien
gcttctgcaaacgccagttctttgc

SEQ ID NO: 1420668 - DNA, 25 bp, Homo sapien
cccattggttgaggttgctccaggg

SEQ ID NO: 1420669 - DNA, 25 bp, Homo sapien
tctgctcttaagaacgtctcctgtc

SEQ ID NO: 1420670 - DNA, 25 bp, Homo sapien
gcctaggagccttccagctaacaag

SEQ ID NO: 1420671 - DNA, 25 bp, Homo sapien
gactgtgggatatcctgctcaggtg

SEQ ID NO: 1420672 - DNA, 25 bp, Homo sapien
tgcacgctactggtactacttctgc

SEQ ID NO: 1420673 - DNA, 25 bp, Homo sapien
caacagccaagaggctgcttgagag

SEQ ID NO: 1420674 - DNA, 25 bp, Homo sapien
tttgcctgggtttgttctgaatctg

SEQ ID NO: 1420675 - DNA, 25 bp, Homo sapien
ctgggtttgttctgaatctgccctg

SEQ ID NO: 1420676 - DNA, 25 bp, Homo sapien
gcttgagagtcaaggcagcttcttc

SEQ ID NO: 1420677 - DNA, 25 bp, Homo sapien
ggagagaggccttgggctgcccgta

SEQ ID NO: 1420678 - DNA, 25 bp, Homo sapien
ctgggagagaggccttgggctgccc

SEQ ID NO: 1420679 - DNA, 25 bp, Homo sapien
agagaggccttgggctgcccgtacc

SEQ ID NO: 1420680 - DNA, 25 bp, Homo sapien
tgggagagaggccttgggctgcccg

SEQ ID NO: 1420681 - DNA, 25 bp, Homo sapien
gtagctggagttataggcatgcgcc

SEQ ID NO: 1420682 - DNA, 25 bp, Homo sapien
gggtgatccacctgcctcagcctcc

SEQ ID NO: 1420683 - DNA, 25 bp, Homo sapien
tagctggagttataggcatgcgcca

SEQ ID NO: 1420684 - DNA, 25 bp, Homo sapien
cgggtgatccacctgcctcagcctc

SEQ ID NO: 1420685 - DNA, 25 bp, Homo sapien
ctccagctccctgaagtcccctctg

SEQ ID NO: 1420686 - DNA, 25 bp, Homo sapien
tccatctcagtcacaaggacagcag

SEQ ID NO: 1420687 - DNA, 25 bp, Homo sapien
ccatctcagtcacaaggacagcagg

SEQ ID NO: 1420688 - DNA, 25 bp, Homo sapien
tgaagtcccctctgtacacccttcc

SEQ ID NO: 1420689 - DNA, 25 bp, Homo sapien
gagctgcctgagattagggagctgc

SEQ ID NO: 1420690 - DNA, 25 bp, Homo sapien
agagctgcctgagattagggagctg

SEQ ID NO: 1420691 - DNA, 25 bp, Homo sapien
agctgcctgagattagggagctgcc

SEQ ID NO: 1420692 - DNA, 25 bp, Homo sapien
tggctggcgtgctaggctcccgtgg

SEQ ID NO: 1420693 - DNA, 25 bp, Homo sapien
cccgtggggagggtatcccggcatg

SEQ ID NO: 1420694 - DNA, 25 bp, Homo sapien
gctggctggcgtgctaggctcccgt

SEQ ID NO: 1420695 - DNA, 25 bp, Homo sapien
tggggagggtatcccggcatggctt

SEQ ID NO: 1420696 - DNA, 25 bp, Homo sapien
gatggccatgatcaattcggatccc

SEQ ID NO: 1420697 - DNA, 25 bp, Homo sapien
gatggaggtggctagtgaataaaac

SEQ ID NO: 1420698 - DNA, 25 bp, Homo sapien
taaaacacttctgaagggtctttgc

SEQ ID NO: 1420699 - DNA, 25 bp, Homo sapien
ctttgctgcctgtgttgatggccat

SEQ ID NO: 1420700 - DNA, 25 bp, Homo sapien
tctctggccttgaagatctccatcc

SEQ ID NO: 1420701 - DNA, 25 bp, Homo sapien
tctccatcccgtggagagtctgact

SEQ ID NO: 1420702 - DNA, 25 bp, Homo sapien
tgtctccggatcctgaagcaaggag

SEQ ID NO: 1420703 - DNA, 25 bp, Homo sapien
gatcctgaagcaaggaggttttgca

SEQ ID NO: 1420704 - DNA, 25 bp, Homo sapien
agtaggaagaaggaacctagacgat

SEQ ID NO: 1420705 - DNA, 25 bp, Homo sapien
taggaagaaggaacctagacgatct

SEQ ID NO: 1420706 - DNA, 25 bp, Homo sapien
aagaaggaacctagacgatctctgg

SEQ ID NO: 1420707 - DNA, 25 bp, Homo sapien
ggaagaaggaacctagacgatctct

SEQ ID NO: 1420708 - DNA, 25 bp, Homo sapien
tcggactgtcctggccgcatagttt

SEQ ID NO: 1420709 - DNA, 25 bp, Homo sapien
cgcatagtttactgagggtctagac

SEQ ID NO: 1420710 - DNA, 25 bp, Homo sapien
cagtcctgttctgttgtgtctcccc

SEQ ID NO: 1420711 - DNA, 25 bp, Homo sapien
tgctgctcccgtcaagaagtgcctt

SEQ ID NO: 1420712 - DNA, 25 bp, Homo sapien
taaagtgcagtagtattatcacggc

SEQ ID NO: 1420713 - DNA, 25 bp, Homo sapien
ggcttgctgtctactcttcttatca

SEQ ID NO: 1420714 - DNA, 25 bp, Homo sapien
ctaatcacgatattgccacaggcca

SEQ ID NO: 1420715 - DNA, 25 bp, Homo sapien
cactgaaggtagaactaagtggcag

SEQ ID NO: 1420716 - DNA, 25 bp, Homo sapien
aaatattgtggtaaggtgagagccc

SEQ ID NO: 1420717 - DNA, 25 bp, Homo sapien
gaggctcccacttagaatgttaaaa

SEQ ID NO: 1420718 - DNA, 25 bp, Homo sapien
taaaaagtatttggagaggcaagga

SEQ ID NO: 1420719 - DNA, 25 bp, Homo sapien
agccgacgcacaagcagaagggatg

SEQ ID NO: 1420720 - DNA, 25 bp, Homo sapien
gatgtgatctctaggctagtaagcc

SEQ ID NO: 1420721 - DNA, 25 bp, Homo sapien
ccagagctccccaggaccgtttctg

SEQ ID NO: 1420722 - DNA, 25 bp, Homo sapien
tctaggctagtaagcctgagaaacg

SEQ ID NO: 1420723 - DNA, 25 bp, Homo sapien
ttctgggggatgcttagcagaagca

SEQ ID NO: 1420724 - DNA, 25 bp, Homo sapien
tgaccgctgggtgcattcttggcta

SEQ ID NO: 1420725 - DNA, 25 bp, Homo sapien
caaacaccacactgaccgctgggtg

SEQ ID NO: 1420726 - DNA, 25 bp, Homo sapien
ccccaaggctgcatgtcagagctcc

SEQ ID NO: 1420727 - DNA, 25 bp, Homo sapien
cacactgaccgctgggtgcattctt

SEQ ID NO: 1420728 - DNA, 25 bp, Homo sapien
accatcgcagccctcggtgtcaagg

SEQ ID NO: 1420729 - DNA, 25 bp, Homo sapien
gccctcggtgtcaaggcctctctga

SEQ ID NO: 1420730 - DNA, 25 bp, Homo sapien
aggcctctctgagtcgcgctttgcc

SEQ ID NO: 1420731 - DNA, 25 bp, Homo sapien
gagtcgcgctttgccttaccgtacc

SEQ ID NO: 1420732 - DNA, 25 bp, Homo sapien
ggctgctctgagcaagctcaggcac

SEQ ID NO: 1420733 - DNA, 25 bp, Homo sapien
gtgtgacttagaccccacaaggctt

SEQ ID NO: 1420734 - DNA, 25 bp, Homo sapien
tgacttagaccccacaaggcttttc

SEQ ID NO: 1420735 - DNA, 25 bp, Homo sapien
tgtgtgtgtgacttagaccccacaa

SEQ ID NO: 1420736 - DNA, 25 bp, Homo sapien
tgttctgtcaatgccgggccctctg

SEQ ID NO: 1420737 - DNA, 25 bp, Homo sapien
taaaggcttgcagcaaagctgggct

SEQ ID NO: 1420738 - DNA, 25 bp, Homo sapien
gaaaacatggtggaagctaaaggct

SEQ ID NO: 1420739 - DNA, 25 bp, Homo sapien
cgtggtggtgacttaaccaggcaca

SEQ ID NO: 1420740 - DNA, 25 bp, Homo sapien
gaccttgactgaccaacaaaatctt

SEQ ID NO: 1420741 - DNA, 25 bp, Homo sapien
accttgactgaccaacaaaatcttc

SEQ ID NO: 1420742 - DNA, 25 bp, Homo sapien
tttcaggccatgaccttgactgacc

SEQ ID NO: 1420743 - DNA, 25 bp, Homo sapien
gggcctgcctcggttgctctcttgc

SEQ ID NO: 1420744 - DNA, 25 bp, Homo sapien
tgaaagaagctgaagggactagaac

SEQ ID NO: 1420745 - DNA, 25 bp, Homo sapien
ggactagaacgtcgcagcacgaaac

SEQ ID NO: 1420746 - DNA, 25 bp, Homo sapien
agcacgaaacatggcctggctgaca

SEQ ID NO: 1420747 - DNA, 25 bp, Homo sapien
gctgtgtattctagcagctggctct

SEQ ID NO: 1420748 - DNA, 25 bp, Homo sapien
ggaggagctgtgtattctagcagct

SEQ ID NO: 1420749 - DNA, 25 bp, Homo sapien
tattctagcagctggctctgaactg

SEQ ID NO: 1420750 - DNA, 25 bp, Homo sapien
cagctggctctgaactgatgcccaa

SEQ ID NO: 1420751 - DNA, 25 bp, Homo sapien
ccattgatttgaggagggcaggatt

SEQ ID NO: 1420752 - DNA, 25 bp, Homo sapien
gctcacttgcccattgatttgagga

SEQ ID NO: 1420753 - DNA, 25 bp, Homo sapien
tacacaaagagtttctagaagttcc

SEQ ID NO: 1420754 - DNA, 25 bp, Homo sapien
tagaagttccctgccgtcgacacgt

SEQ ID NO: 1420755 - DNA, 25 bp, Homo sapien
caactgtgcctgcaggatggccgcg

SEQ ID NO: 1420756 - DNA, 25 bp, Homo sapien
ccgcggtgaaaagcgccttccactt

SEQ ID NO: 1420757 - DNA, 25 bp, Homo sapien
tggccgcggtgaaaagcgccttcca

SEQ ID NO: 1420758 - DNA, 25 bp, Homo sapien
gatggccgcggtgaaaagcgccttc

SEQ ID NO: 1420759 - DNA, 25 bp, Homo sapien
tgctggttttattctgcagctacct

SEQ ID NO: 1420760 - DNA, 25 bp, Homo sapien
ttttattctgcagctacctccccag

SEQ ID NO: 1420761 - DNA, 25 bp, Homo sapien
cagcggtggccgggacggttaggag

SEQ ID NO: 1420762 - DNA, 25 bp, Homo sapien
tggttttattctgcagctacctccc

SEQ ID NO: 1420763 - DNA, 25 bp, Homo sapien
gcctttgagaaagcacctgccgaca

SEQ ID NO: 1420764 - DNA, 25 bp, Homo sapien
cccctttcggttcacaggcaggaag

SEQ ID NO: 1420765 - DNA, 25 bp, Homo sapien
gattggtaaagtccatctctaggca

SEQ ID NO: 1420766 - DNA, 25 bp, Homo sapien
taggcaaatacaagttctcgatgga

SEQ ID NO: 1420767 - DNA, 25 bp, Homo sapien
ttgctgtgtggcgttgagtcagtca

SEQ ID NO: 1420768 - DNA, 25 bp, Homo sapien
gctgtgtggcgttgagtcagtcact

SEQ ID NO: 1420769 - DNA, 25 bp, Homo sapien
tgctgtgtggcgttgagtcagtcac

SEQ ID NO: 1420770 - DNA, 25 bp, Homo sapien
tgtgtggcgttgagtcagtcactca

SEQ ID NO: 1420771 - DNA, 25 bp, Homo sapien
agccatagactaggagaaattatgt

SEQ ID NO: 1420772 - DNA, 25 bp, Homo sapien
aaaagaagccatagactaggagaaa

SEQ ID NO: 1420773 - DNA, 25 bp, Homo sapien
gaagccatagactaggagaaattat

SEQ ID NO: 1420774 - DNA, 25 bp, Homo sapien
ctcaatagtaaagtaatcaactcaa

SEQ ID NO: 1420775 - DNA, 25 bp, Homo sapien
caagagcatggacggagttttattc

SEQ ID NO: 1420776 - DNA, 25 bp, Homo sapien
taggcaatttgaatggccagaactg

SEQ ID NO: 1420777 - DNA, 25 bp, Homo sapien
attcctgacccgaaaaccagatggg

SEQ ID NO: 1420778 - DNA, 25 bp, Homo sapien
tctttagtgtccagtacatagttgg

SEQ ID NO: 1420779 - DNA, 25 bp, Homo sapien
cgatcacgaagattgtaccatggcg

SEQ ID NO: 1420780 - DNA, 25 bp, Homo sapien
taccatggcgtgtcaatcttggagg

SEQ ID NO: 1420781 - DNA, 25 bp, Homo sapien
tgggaagatcagacacgcctggtgt

SEQ ID NO: 1420782 - DNA, 25 bp, Homo sapien
tcttggaggccaccttaggatccca

SEQ ID NO: 1420783 - DNA, 25 bp, Homo sapien
tgaaggaccagctaataaccatgtg

SEQ ID NO: 1420784 - DNA, 25 bp, Homo sapien
tatcctgtggaatgagcaagcttcg

SEQ ID NO: 1420785 - DNA, 25 bp, Homo sapien
gcaagcttcgaacgctgagaccctg

SEQ ID NO: 1420786 - DNA, 25 bp, Homo sapien
gaccaaatggtcttccctcagtggg

SEQ ID NO: 1420787 - DNA, 25 bp, Homo sapien
tgggtgtcctcagctatacaatgaa

SEQ ID NO: 1420788 - DNA, 25 bp, Homo sapien
agctccactagctgttacctcccca

SEQ ID NO: 1420789 - DNA, 25 bp, Homo sapien
attttcgtataatgattcctgcttc

SEQ ID NO: 1420790 - DNA, 25 bp, Homo sapien
tcagctccactagctgttacctccc

SEQ ID NO: 1420791 - DNA, 25 bp, Homo sapien
tggaaattaaattttcgtataatga

SEQ ID NO: 1420792 - DNA, 25 bp, Homo sapien
tgtctcagacaatatgaccacatgc

SEQ ID NO: 1420793 - DNA, 25 bp, Homo sapien
tacgctggcataatctgtgtctcag

SEQ ID NO: 1420794 - DNA, 25 bp, Homo sapien
cagagtaagcactttcatacactgc

SEQ ID NO: 1420795 - DNA, 25 bp, Homo sapien
tattttaacccatcgcagagtaagc

SEQ ID NO: 1420796 - DNA, 25 bp, Homo sapien
tagcttcaactgttaccattttgcc

SEQ ID NO: 1420797 - DNA, 25 bp, Homo sapien
taattgatacacattcttaaaagca

SEQ ID NO: 1420798 - DNA, 25 bp, Homo sapien
taatagcaaaatgaatctccaggca

SEQ ID NO: 1420799 - DNA, 25 bp, Homo sapien
gcaatttataacatgtaccaaaagc

SEQ ID NO: 1420800 - DNA, 25 bp, Homo sapien
gcaagatcttgactatgtttaaaca

SEQ ID NO: 1420801 - DNA, 25 bp, Homo sapien
tatgtttaaacatcactcccaagaa

SEQ ID NO: 1420802 - DNA, 25 bp, Homo sapien
gcttctaggaacacggttgtttatg

SEQ ID NO: 1420803 - DNA, 25 bp, Homo sapien
tgaaagaagcatgatacacattcat

SEQ ID NO: 1420804 - DNA, 25 bp, Homo sapien
taggaagctccatctgagtttcatc

SEQ ID NO: 1420805 - DNA, 25 bp, Homo sapien
tacccaggattgtgagacataaatc

SEQ ID NO: 1420806 - DNA, 25 bp, Homo sapien
ctggtgacctgacttagattgtagc

SEQ ID NO: 1420807 - DNA, 25 bp, Homo sapien
gataatactgtttcgacttaggtgg

SEQ ID NO: 1420808 - DNA, 25 bp, Homo sapien
ggaaatccaataacaggtcaactct

SEQ ID NO: 1420809 - DNA, 25 bp, Homo sapien
aaagtagctaccacatcttccagga

SEQ ID NO: 1420810 - DNA, 25 bp, Homo sapien
gagtgatgcactctaccaagcacag

SEQ ID NO: 1420811 - DNA, 25 bp, Homo sapien
tggctaatattctgggacgctttcc

SEQ ID NO: 1420812 - DNA, 25 bp, Homo sapien
tgttgctaaattcaccacagtctgc

SEQ ID NO: 1420813 - DNA, 25 bp, Homo sapien
taagtgttgctaaattcaccacagt

SEQ ID NO: 1420814 - DNA, 25 bp, Homo sapien
gtgttgctaaattcaccacagtctg

SEQ ID NO: 1420815 - DNA, 25 bp, Homo sapien
tcataagtgttgctaaattcaccac

SEQ ID NO: 1420816 - DNA, 25 bp, Homo sapien
ctaaattaagattttcagttcattt

SEQ ID NO: 1420817 - DNA, 25 bp, Homo sapien
tcaaccactagaatatactaaataa

SEQ ID NO: 1420818 - DNA, 25 bp, Homo sapien
atttcaaccactagaatatactaaa

SEQ ID NO: 1420819 - DNA, 25 bp, Homo sapien
ttcaaccactagaatatactaaata

SEQ ID NO: 1420820 - DNA, 25 bp, Homo sapien
tagccattgcccagtgatagtgacc

SEQ ID NO: 1420821 - DNA, 25 bp, Homo sapien
gaaatatccggatgtgcgccagagg

SEQ ID NO: 1420822 - DNA, 25 bp, Homo sapien
catctctaggtatcaagactgggca

SEQ ID NO: 1420823 - DNA, 25 bp, Homo sapien
gactgggcaagtctgtaatccatga

SEQ ID NO: 1420824 - DNA, 25 bp, Homo sapien
gccctggtcctcacagatatcactg

SEQ ID NO: 1420825 - DNA, 25 bp, Homo sapien
tccccggactattaaacagctctgg

SEQ ID NO: 1420826 - DNA, 25 bp, Homo sapien
tcctagactcggagatggacaattc

SEQ ID NO: 1420827 - DNA, 25 bp, Homo sapien
ccaaaaccgatctgggcaagccaag

SEQ ID NO: 1420828 - DNA, 25 bp, Homo sapien
ggccgcctctcaggacaagggaaaa

SEQ ID NO: 1420829 - DNA, 25 bp, Homo sapien
gcagcaaaacaagcgccaggactgt

SEQ ID NO: 1420830 - DNA, 25 bp, Homo sapien
cagtgtggagacttatgggaaaaca

SEQ ID NO: 1420831 - DNA, 25 bp, Homo sapien
taaactttaacttcgaagagcaggc

SEQ ID NO: 1420832 - DNA, 25 bp, Homo sapien
tcaatcattacaagcagaaagtgca

SEQ ID NO: 1420833 - DNA, 25 bp, Homo sapien
gaattccctgtgtcacctgggagaa

SEQ ID NO: 1420834 - DNA, 25 bp, Homo sapien
aaaagtagccagtatagcacccagc

SEQ ID NO: 1420835 - DNA, 25 bp, Homo sapien
tacagcatcatggatagaagtcagg

SEQ ID NO: 1420836 - DNA, 25 bp, Homo sapien
attgtcttcaatcctcactacttta

SEQ ID NO: 1420837 - DNA, 25 bp, Homo sapien
ttgtcttcaatcctcactactttaa

SEQ ID NO: 1420838 - DNA, 25 bp, Homo sapien
gtcttcaatcctcactactttaaaa

SEQ ID NO: 1420839 - DNA, 25 bp, Homo sapien
tgtcttcaatcctcactactttaaa

SEQ ID NO: 1420840 - DNA, 25 bp, Homo sapien
gtcagcggctttaccagactgccca

SEQ ID NO: 1420841 - DNA, 25 bp, Homo sapien
agcggctttaccagactgcccaggg

SEQ ID NO: 1420842 - DNA, 25 bp, Homo sapien
taagggcggcaatcttaggtgaaag

SEQ ID NO: 1420843 - DNA, 25 bp, Homo sapien
tcttaggtgaaagatgtgtaagtac

SEQ ID NO: 1420844 - DNA, 25 bp, Homo sapien
aagaaccaattatggctggaaggcc

SEQ ID NO: 1420845 - DNA, 25 bp, Homo sapien
tagtccaggacccagatattggtta

SEQ ID NO: 1420846 - DNA, 25 bp, Homo sapien
tctggtgtcacgatttttggtccac

SEQ ID NO: 1420847 - DNA, 25 bp, Homo sapien
catctcagggtgtcgaatgaataac

SEQ ID NO: 1420848 - DNA, 25 bp, Homo sapien
caaaggggactttgtggatcaaatc

SEQ ID NO: 1420849 - DNA, 25 bp, Homo sapien
gcagaagttggtctgtgccaaagtc

SEQ ID NO: 1420850 - DNA, 25 bp, Homo sapien
gggactttgtggatcaaatccatgt

SEQ ID NO: 1420851 - DNA, 25 bp, Homo sapien
atgtttcttgcagaagttggtctgt

SEQ ID NO: 1420852 - DNA, 25 bp, Homo sapien
agcgagaggacgtcggcgaagggcc

SEQ ID NO: 1420853 - DNA, 25 bp, Homo sapien
ctgcagcgggctcaggtagaaatag

SEQ ID NO: 1420854 - DNA, 25 bp, Homo sapien
tgcaggttgctcacggagagctgca

SEQ ID NO: 1420855 - DNA, 25 bp, Homo sapien
caggtagaaatagggcacgccgctg

SEQ ID NO: 1420856 - DNA, 25 bp, Homo sapien
gcgtggagatggtggccagagcgcc

SEQ ID NO: 1420857 - DNA, 25 bp, Homo sapien
tccagcgtggagatggtggccagag

SEQ ID NO: 1420858 - DNA, 25 bp, Homo sapien
gccagagcgccccagtcggagacgt

SEQ ID NO: 1420859 - DNA, 25 bp, Homo sapien
cccagtcggagacgtgcgtcacgaa

SEQ ID NO: 1420860 - DNA, 25 bp, Homo sapien
caacagcgtcgacgccagcagggcg

SEQ ID NO: 1420861 - DNA, 25 bp, Homo sapien
gcgggcgacacgagcagcgccaaca

SEQ ID NO: 1420862 - DNA, 25 bp, Homo sapien
acgagcagcgccaacagcgtcgacg

SEQ ID NO: 1420863 - DNA, 25 bp, Homo sapien
cggacccgcgggatagcccggccat

SEQ ID NO: 1420864 - DNA, 25 bp, Homo sapien
gtgtctccaggaagagtcccgggcc

SEQ ID NO: 1420865 - DNA, 25 bp, Homo sapien
cggtgtctccaggaagagtcccggg

SEQ ID NO: 1420866 - DNA, 25 bp, Homo sapien
ggcggtgtctccaggaagagtcccg

SEQ ID NO: 1420867 - DNA, 25 bp, Homo sapien
tgtctccaggaagagtcccgggccc

SEQ ID NO: 1420868 - DNA, 25 bp, Homo sapien
gcagcctagagccagatgcaggtat

SEQ ID NO: 1420869 - DNA, 25 bp, Homo sapien
gggtcagttacgattgccttgtaca

SEQ ID NO: 1420870 - DNA, 25 bp, Homo sapien
ggctggaaacttgccattgcaaagt

SEQ ID NO: 1420871 - DNA, 25 bp, Homo sapien
gtgcagggatgagaggataccctct

SEQ ID NO: 1420872 - DNA, 25 bp, Homo sapien
taatcccaagaccttttaatcactg

SEQ ID NO: 1420873 - DNA, 25 bp, Homo sapien
tgtacccattaagcggttgtgccca

SEQ ID NO: 1420874 - DNA, 25 bp, Homo sapien
tgtcccattgcttgtagaataaagt

SEQ ID NO: 1420875 - DNA, 25 bp, Homo sapien
ctttactttcatccccaggagacca

SEQ ID NO: 1420876 - DNA, 25 bp, Homo sapien
tcaggaaaaatttggacacctgtgc

SEQ ID NO: 1420877 - DNA, 25 bp, Homo sapien
cgaggagactggtgtacgcatcaca

SEQ ID NO: 1420878 - DNA, 25 bp, Homo sapien
gcccttgcaagatatcactacttct

SEQ ID NO: 1420879 - DNA, 25 bp, Homo sapien
taagcattatagaagccatgtagaa

SEQ ID NO: 1420880 - DNA, 25 bp, Homo sapien
tgtggcagaccccacaattcctggc

SEQ ID NO: 1420881 - DNA, 25 bp, Homo sapien
tctgccaccttctgtgccactggag

SEQ ID NO: 1420882 - DNA, 25 bp, Homo sapien
tctgtgccactggagcccctaaatg

SEQ ID NO: 1420883 - DNA, 25 bp, Homo sapien
gcagaccccacaattcctggcaggg

SEQ ID NO: 1420884 - DNA, 25 bp, Homo sapien
ctatgccacttctgggacctttgtg

SEQ ID NO: 1420885 - DNA, 25 bp, Homo sapien
gtgtctgaggccagcatgccaagac

SEQ ID NO: 1420886 - DNA, 25 bp, Homo sapien
tgccacttctgggacctttgtgtct

SEQ ID NO: 1420887 - DNA, 25 bp, Homo sapien
tgtctgaggccagcatgccaagacc

SEQ ID NO: 1420888 - DNA, 25 bp, Homo sapien
ttttgagatgttacaacttcacact

SEQ ID NO: 1420889 - DNA, 25 bp, Homo sapien
tttgagatgttacaacttcacactc

SEQ ID NO: 1420890 - DNA, 25 bp, Homo sapien
cttttgagatgttacaacttcacac

SEQ ID NO: 1420891 - DNA, 25 bp, Homo sapien
tcttttgagatgttacaacttcaca

SEQ ID NO: 1420892 - DNA, 25 bp, Homo sapien
caagacattttgtggtgtaccagct

SEQ ID NO: 1420893 - DNA, 25 bp, Homo sapien
tgtgcaatcctcaaggccagactct

SEQ ID NO: 1420894 - DNA, 25 bp, Homo sapien
tgtgatgataggagctgagcaagac

SEQ ID NO: 1420895 - DNA, 25 bp, Homo sapien
tccatcttgatggtagggatgcaag

SEQ ID NO: 1420896 - DNA, 25 bp, Homo sapien
tttcgcagatgcaaacaccaagcgc

SEQ ID NO: 1420897 - DNA, 25 bp, Homo sapien
gcagcaggatctccataaggaggct

SEQ ID NO: 1420898 - DNA, 25 bp, Homo sapien
agaacaacattctgagtgcagcagg

SEQ ID NO: 1420899 - DNA, 25 bp, Homo sapien
cccactcaaaggacggatgtgcacc

SEQ ID NO: 1420900 - DNA, 25 bp, Homo sapien
cacataaagctctgccatcagcccc

SEQ ID NO: 1420901 - DNA, 25 bp, Homo sapien
tgcaccgagcacacctaagtcaacg

SEQ ID NO: 1420902 - DNA, 25 bp, Homo sapien
cccgaggccttccttgacgctccat

SEQ ID NO: 1420903 - DNA, 25 bp, Homo sapien
cctaagtcaacgtcttcttcctctt

SEQ ID NO: 1420904 - DNA, 25 bp, Homo sapien
ttcctcttcccgtatccattctcta

SEQ ID NO: 1420905 - DNA, 25 bp, Homo sapien
atgaggctctctctgggcctgtctc

SEQ ID NO: 1420906 - DNA, 25 bp, Homo sapien
gtctctctccatggccagtgccctc

SEQ ID NO: 1420907 - DNA, 25 bp, Homo sapien
cctcaggccccagcttgtctgtgga

SEQ ID NO: 1420908 - DNA, 25 bp, Homo sapien
ttactcgagaagatgaggctctctc

SEQ ID NO: 1420909 - DNA, 25 bp, Homo sapien
ggctggttctggctatcaggatata

SEQ ID NO: 1420910 - DNA, 25 bp, Homo sapien
ccagagcagccagttacaatcccag

SEQ ID NO: 1420911 - DNA, 25 bp, Homo sapien
gaaggaagtggttccgtgttagcca

SEQ ID NO: 1420912 - DNA, 25 bp, Homo sapien
tgatgacctctacttattgcgtggc

SEQ ID NO: 1420913 - DNA, 25 bp, Homo sapien
agagttactgctattctggctcctg

SEQ ID NO: 1420914 - DNA, 25 bp, Homo sapien
catggctgcctaaacacagctcggg

SEQ ID NO: 1420915 - DNA, 25 bp, Homo sapien
tgcctgaaagtgcaaagatggtgcc

SEQ ID NO: 1420916 - DNA, 25 bp, Homo sapien
tcagggtagtctttgtagcaggagc

SEQ ID NO: 1420917 - DNA, 25 bp, Homo sapien
caaaagtgtgccttgcaggttacca

SEQ ID NO: 1420918 - DNA, 25 bp, Homo sapien
gatccgggtagcagggagtgaccct

SEQ ID NO: 1420919 - DNA, 25 bp, Homo sapien
tctctctgccgaagggtctgaaggg

SEQ ID NO: 1420920 - DNA, 25 bp, Homo sapien
aatccctcccatgcggtctctgctg

SEQ ID NO: 1420921 - DNA, 25 bp, Homo sapien
tgaccctggtgcagattccagtccc

SEQ ID NO: 1420922 - DNA, 25 bp, Homo sapien
tttaacaggaatggagacgaggccc

SEQ ID NO: 1420923 - DNA, 25 bp, Homo sapien
gaaaactttgcgtggattcctgatt

SEQ ID NO: 1420924 - DNA, 25 bp, Homo sapien
agatttaccacttcagggagcttgg

SEQ ID NO: 1420925 - DNA, 25 bp, Homo sapien
ccctatgggaatcagatgttgagca

SEQ ID NO: 1420926 - DNA, 25 bp, Homo sapien
catcgctgctgccaactagaagggc

SEQ ID NO: 1420927 - DNA, 25 bp, Homo sapien
gggcaaatgcctgctgttccgacgc

SEQ ID NO: 1420928 - DNA, 25 bp, Homo sapien
tgaaggacatggaggtaaaggaccc

SEQ ID NO: 1420929 - DNA, 25 bp, Homo sapien
caactccgaaggatcgtccctggtc

SEQ ID NO: 1420930 - DNA, 25 bp, Homo sapien
ggggttggtaaggaaagatctcaga

SEQ ID NO: 1420931 - DNA, 25 bp, Homo sapien
ctggggttggtaaggaaagatctca

SEQ ID NO: 1420932 - DNA, 25 bp, Homo sapien
tggggttggtaaggaaagatctcag

SEQ ID NO: 1420933 - DNA, 25 bp, Homo sapien
cagcagacatcttccatttgttgga

SEQ ID NO: 1420934 - DNA, 25 bp, Homo sapien
aattgcacagcctctgaagctagag

SEQ ID NO: 1420935 - DNA, 25 bp, Homo sapien
gatgggccgtaattaggaattgcac

SEQ ID NO: 1420936 - DNA, 25 bp, Homo sapien
tcggtggacttgtggcatgcccaaa

SEQ ID NO: 1420937 - DNA, 25 bp, Homo sapien
tatcagggccgcaagagaaagcatt

SEQ ID NO: 1420938 - DNA, 25 bp, Homo sapien
tttcagagcctgatccgcagcgtgg

SEQ ID NO: 1420939 - DNA, 25 bp, Homo sapien
gaaatctgaacactggcggctcagc

SEQ ID NO: 1420940 - DNA, 25 bp, Homo sapien
tcagcagcccggtaatcttatcagg

SEQ ID NO: 1420941 - DNA, 25 bp, Homo sapien
caaagtttcagtaatgcttcggaca

SEQ ID NO: 1420942 - DNA, 25 bp, Homo sapien
aatgcttcggacacaggatgaacac

SEQ ID NO: 1420943 - DNA, 25 bp, Homo sapien
tagcagcaaagtttcagtaatgctt

SEQ ID NO: 1420944 - DNA, 25 bp, Homo sapien
acagaaggatggttcttgtagcagc

SEQ ID NO: 1420945 - DNA, 25 bp, Homo sapien
agagccagacccgaatgaacactgt

SEQ ID NO: 1420946 - DNA, 25 bp, Homo sapien
ctgggcagtcagcctcccgtttttt

SEQ ID NO: 1420947 - DNA, 25 bp, Homo sapien
ccagacccgaatgaacactgtcctg

SEQ ID NO: 1420948 - DNA, 25 bp, Homo sapien
tatcaacaggattgccctaggaatc

SEQ ID NO: 1420949 - DNA, 25 bp, Homo sapien
gaattgtggaaacagctggctaagc

SEQ ID NO: 1420950 - DNA, 25 bp, Homo sapien
aattgtggaaacagctggctaagcc

SEQ ID NO: 1420951 - DNA, 25 bp, Homo sapien
attgtggaaacagctggctaagccc

SEQ ID NO: 1420952 - DNA, 25 bp, Homo sapien
gggcagggtcaagctgtgaggcgtt

SEQ ID NO: 1420953 - DNA, 25 bp, Homo sapien
ggcagggtcaagctgtgaggcgttc

SEQ ID NO: 1420954 - DNA, 25 bp, Homo sapien
caggctctgaacacccgatctgtac

SEQ ID NO: 1420955 - DNA, 25 bp, Homo sapien
tgaacacccgatctgtactggagtt

SEQ ID NO: 1420956 - DNA, 25 bp, Homo sapien
cagaagtcaccacacctaaccacag

SEQ ID NO: 1420957 - DNA, 25 bp, Homo sapien
gaatgccacaggctctgaacacccg

SEQ ID NO: 1420958 - DNA, 25 bp, Homo sapien
cagacccagccgtcatgtcttctcc

SEQ ID NO: 1420959 - DNA, 25 bp, Homo sapien
cccagccgtcatgtcttctccagat

SEQ ID NO: 1420960 - DNA, 25 bp, Homo sapien
ccagccgtcatgtcttctccagatg

SEQ ID NO: 1420961 - DNA, 25 bp, Homo sapien
gacccagccgtcatgtcttctccag

SEQ ID NO: 1420962 - DNA, 25 bp, Homo sapien
tgttggcttaggtgagtaaatccat

SEQ ID NO: 1420963 - DNA, 25 bp, Homo sapien
ttggagagtaacaaatcgtacattt

SEQ ID NO: 1420964 - DNA, 25 bp, Homo sapien
tacttgttggcttaggtgagtaaat

SEQ ID NO: 1420965 - DNA, 25 bp, Homo sapien
caaatcgtacatttacttgttggct

SEQ ID NO: 1420966 - DNA, 25 bp, Homo sapien
tgacactttgcgtgtaccagccagc

SEQ ID NO: 1420967 - DNA, 25 bp, Homo sapien
gaagcgttccctgattcacctaagc

SEQ ID NO: 1420968 - DNA, 25 bp, Homo sapien
catgttgcagcacagcctcagtata

SEQ ID NO: 1420969 - DNA, 25 bp, Homo sapien
tctggagcctgaattataacttgca

SEQ ID NO: 1420970 - DNA, 25 bp, Homo sapien
tcatgccatcgatgggattttccaa

SEQ ID NO: 1420971 - DNA, 25 bp, Homo sapien
tataaatcatgccatcgatgggatt

SEQ ID NO: 1420972 - DNA, 25 bp, Homo sapien
ggaattccagtcatacctctgtcat

SEQ ID NO: 1420973 - DNA, 25 bp, Homo sapien
caaacaggatggtaatttttgccct

SEQ ID NO: 1420974 - DNA, 25 bp, Homo sapien
gagactgaatctgagggcagcagac

SEQ ID NO: 1420975 - DNA, 25 bp, Homo sapien
gtagcagcagcagacgaagccattg

SEQ ID NO: 1420976 - DNA, 25 bp, Homo sapien
cctgtccaggacactaaaatgtgaa

SEQ ID NO: 1420977 - DNA, 25 bp, Homo sapien
aatgtgaagaacagctcattgtgcc

SEQ ID NO: 1420978 - DNA, 25 bp, Homo sapien
tctggaggtctgttagactacatcc

SEQ ID NO: 1420979 - DNA, 25 bp, Homo sapien
taacctggttgggactgatattgtc

SEQ ID NO: 1420980 - DNA, 25 bp, Homo sapien
cagtctgtcagacaaaaaggcctta

SEQ ID NO: 1420981 - DNA, 25 bp, Homo sapien
gactacatcctacactgacttcaga

SEQ ID NO: 1420982 - DNA, 25 bp, Homo sapien
ggatttgaacccgggacctctcgca

SEQ ID NO: 1420983 - DNA, 25 bp, Homo sapien
tgaacccgggacctctcgcacccta

SEQ ID NO: 1420984 - DNA, 25 bp, Homo sapien
ctcgcaccctaagcgagaatcatac

SEQ ID NO: 1420985 - DNA, 25 bp, Homo sapien
gggacctctcgcaccctaagcgaga

SEQ ID NO: 1420986 - DNA, 25 bp, Homo sapien
tctgccccattgacagaggttctgt

SEQ ID NO: 1420987 - DNA, 25 bp, Homo sapien
tgccccattgacagaggttctgtag

SEQ ID NO: 1420988 - DNA, 25 bp, Homo sapien
ccccattgacagaggttctgtagcc

SEQ ID NO: 1420989 - DNA, 25 bp, Homo sapien
ccattgacagaggttctgtagccat

SEQ ID NO: 1420990 - DNA, 25 bp, Homo sapien
gatgctgccctgtactctctaggga

SEQ ID NO: 1420991 - DNA, 25 bp, Homo sapien
tgtgtttgattgtgggatgctgccc

SEQ ID NO: 1420992 - DNA, 25 bp, Homo sapien
cctggccttaagacttttcgattag

SEQ ID NO: 1420993 - DNA, 25 bp, Homo sapien
tttatctgtaactgcaaagccacaa

SEQ ID NO: 1420994 - DNA, 25 bp, Homo sapien
gacaatacatatgtcgaataagatc

SEQ ID NO: 1420995 - DNA, 25 bp, Homo sapien
aggcagcattgtaaagcagctctcc

SEQ ID NO: 1420996 - DNA, 25 bp, Homo sapien
ttaggcagcattgtaaagcagctct

SEQ ID NO: 1420997 - DNA, 25 bp, Homo sapien
gatctctagcacagagttctccaaa

SEQ ID NO: 1420998 - DNA, 25 bp, Homo sapien
atttgcagcccataagcgaattgtt

SEQ ID NO: 1420999 - DNA, 25 bp, Homo sapien
taagcgaattgttttgcatagagcc

SEQ ID NO: 1421000 - DNA, 25 bp, Homo sapien
cgaattgttttgcatagagcctgca

SEQ ID NO: 1421001 - DNA, 25 bp, Homo sapien
cccataagcgaattgttttgcatag

SEQ ID NO: 1421002 - DNA, 25 bp, Homo sapien
tcagaggtgggccttgttccaagct

SEQ ID NO: 1421003 - DNA, 25 bp, Homo sapien
tgtcttcggtagactacagccatag

SEQ ID NO: 1421004 - DNA, 25 bp, Homo sapien
caagctgtgtgagtatagccctgag

SEQ ID NO: 1421005 - DNA, 25 bp, Homo sapien
tcaaggagttgtgagtctaacaggg

SEQ ID NO: 1421006 - DNA, 25 bp, Homo sapien
aaagggccaggcatttgtcaggtaa

SEQ ID NO: 1421007 - DNA, 25 bp, Homo sapien
agcatcctccaaggtagtgtcagca

SEQ ID NO: 1421008 - DNA, 25 bp, Homo sapien
tatggctgagcttatctgaatttag

SEQ ID NO: 1421009 - DNA, 25 bp, Homo sapien
tgggcattatgctgaagccatttgt

SEQ ID NO: 1421010 - DNA, 25 bp, Homo sapien
gtttgaccaagacgttattcctcag

SEQ ID NO: 1421011 - DNA, 25 bp, Homo sapien
tatacctcatagctttagcaccatg

SEQ ID NO: 1421012 - DNA, 25 bp, Homo sapien
aaactcactacccttatctgggcca

SEQ ID NO: 1421013 - DNA, 25 bp, Homo sapien
taatacagatcccttaatatgacag

SEQ ID NO: 1421014 - DNA, 25 bp, Homo sapien
tataacagcttcatggtgcctcaaa

SEQ ID NO: 1421015 - DNA, 25 bp, Homo sapien
tcaacagggatcaggtttggtcacc

SEQ ID NO: 1421016 - DNA, 25 bp, Homo sapien
ggtcaccacacatgtctgaagctgg

SEQ ID NO: 1421017 - DNA, 25 bp, Homo sapien
tcaagctgagactcctggtgagcct

SEQ ID NO: 1421018 - DNA, 25 bp, Homo sapien
actcactcgaatgacacctggaggc

SEQ ID NO: 1421019 - DNA, 25 bp, Homo sapien
gaaacatttcggagctccctgagag

SEQ ID NO: 1421020 - DNA, 25 bp, Homo sapien
ccttcacttcttcttgcggtgccgg

SEQ ID NO: 1421021 - DNA, 25 bp, Homo sapien
tcttcttgcggtgccgggaccatgt

SEQ ID NO: 1421022 - DNA, 25 bp, Homo sapien
gagaatcctcaccagttctcaccaa

SEQ ID NO: 1421023 - DNA, 25 bp, Homo sapien
ttctcaccaaccttccccccaggca

SEQ ID NO: 1421024 - DNA, 25 bp, Homo sapien
tcaaactctgtcagtgccctggcat

SEQ ID NO: 1421025 - DNA, 25 bp, Homo sapien
cagctgccagcatggtgctctgcca

SEQ ID NO: 1421026 - DNA, 25 bp, Homo sapien
gcaggacctcttcccaagccctgca

SEQ ID NO: 1421027 - DNA, 25 bp, Homo sapien
tcacactgagatgagcctctcaggg

SEQ ID NO: 1421028 - DNA, 25 bp, Homo sapien
gatgagcctctcagggcaggacctc

SEQ ID NO: 1421029 - DNA, 25 bp, Homo sapien
ccacccctgcagcccttttggctcc

SEQ ID NO: 1421030 - DNA, 25 bp, Homo sapien
tgcagataacgaactaaggttgcct

SEQ ID NO: 1421031 - DNA, 25 bp, Homo sapien
tctgtatgggagcactcaaaaggca

SEQ ID NO: 1421032 - DNA, 25 bp, Homo sapien
gaaatatatcagctagggaaaaacc

SEQ ID NO: 1421033 - DNA, 25 bp, Homo sapien
tcttcgtcctggcaaacagggtcgt

SEQ ID NO: 1421034 - DNA, 25 bp, Homo sapien
tagaatccacgggagacctggctgt

SEQ ID NO: 1421035 - DNA, 25 bp, Homo sapien
ccttggccttggaaatgggatctaa

SEQ ID NO: 1421036 - DNA, 25 bp, Homo sapien
ggcaggagggagctctagaatccac

SEQ ID NO: 1421037 - DNA, 25 bp, Homo sapien
gatgaaagtggctcacaagctcccc

SEQ ID NO: 1421038 - DNA, 25 bp, Homo sapien
gggtcaggctgctatgtctcgcagc

SEQ ID NO: 1421039 - DNA, 25 bp, Homo sapien
taatgtaaataggtgtaggtgctgg

SEQ ID NO: 1421040 - DNA, 25 bp, Homo sapien
cagagtgtatataccttcaagctat

SEQ ID NO: 1421041 - DNA, 25 bp, Homo sapien
gctatgtctcgcagcccaataatga

SEQ ID NO: 1421042 - DNA, 25 bp, Homo sapien
tcaggaggccacttaattatgtggc

SEQ ID NO: 1421043 - DNA, 25 bp, Homo sapien
ccagagctcagtcagagatgaagga

SEQ ID NO: 1421044 - DNA, 25 bp, Homo sapien
ggaagatgttcaagagcattggcaa

SEQ ID NO: 1421045 - DNA, 25 bp, Homo sapien
gctctgggattggaggagtcttgac

SEQ ID NO: 1421046 - DNA, 25 bp, Homo sapien
cagccttctaaagccaggatagggt

SEQ ID NO: 1421047 - DNA, 25 bp, Homo sapien
tttctccagccttctaaagccagga

SEQ ID NO: 1421048 - DNA, 25 bp, Homo sapien
cttctaaagccaggatagggtgcat

SEQ ID NO: 1421049 - DNA, 25 bp, Homo sapien
tctctcaggaagctttctccagcct

SEQ ID NO: 1421050 - DNA, 25 bp, Homo sapien
aacatgaatacttgcctgcagttca

SEQ ID NO: 1421051 - DNA, 25 bp, Homo sapien
tcatgcttttggcagctgttgggca

SEQ ID NO: 1421052 - DNA, 25 bp, Homo sapien
aaaacatgaatacttgcctgcagtt

SEQ ID NO: 1421053 - DNA, 25 bp, Homo sapien
ggcacaggggtgagactcatgcttt

SEQ ID NO: 1421054 - DNA, 25 bp, Homo sapien
aagacatcaccctggctttggaagc

SEQ ID NO: 1421055 - DNA, 25 bp, Homo sapien
ttgctatttgtaatattgtgctacc

SEQ ID NO: 1421056 - DNA, 25 bp, Homo sapien
tgtctttgtagaccatgacaaatgt

SEQ ID NO: 1421057 - DNA, 25 bp, Homo sapien
tgcagtcaggccctacaaacatgta

SEQ ID NO: 1421058 - DNA, 25 bp, Homo sapien
agaagagattatgtaggaacctgga

SEQ ID NO: 1421059 - DNA, 25 bp, Homo sapien
caaggacatagtgcttattaaaatc

SEQ ID NO: 1421060 - DNA, 25 bp, Homo sapien
ccatgacactcctgacccttgtagg

SEQ ID NO: 1421061 - DNA, 25 bp, Homo sapien
gccacggagaaaggtcaataataga

SEQ ID NO: 1421062 - DNA, 25 bp, Homo sapien
gtccacggtattagctctcatcagg

SEQ ID NO: 1421063 - DNA, 25 bp, Homo sapien
cacggtattagctctcatcaggaat

SEQ ID NO: 1421064 - DNA, 25 bp, Homo sapien
ggtattagctctcatcaggaatttg

SEQ ID NO: 1421065 - DNA, 25 bp, Homo sapien
attgtccacggtattagctctcatc

SEQ ID NO: 1421066 - DNA, 25 bp, Homo sapien
actcagaggttgagtaccatgattc

SEQ ID NO: 1421067 - DNA, 25 bp, Homo sapien
atgatgggagactcaagatcgtctg

SEQ ID NO: 1421068 - DNA, 25 bp, Homo sapien
tcttttaactcagaggttgagtacc

SEQ ID NO: 1421069 - DNA, 25 bp, Homo sapien
ctgaagccattggtcttcttttaac

SEQ ID NO: 1421070 - DNA, 25 bp, Homo sapien
cccggtttgctagctgatgatacat

SEQ ID NO: 1421071 - DNA, 25 bp, Homo sapien
gccaccccggtttgctagctgatga

SEQ ID NO: 1421072 - DNA, 25 bp, Homo sapien
tatatgggtgagcatcgccaccccg

SEQ ID NO: 1421073 - DNA, 25 bp, Homo sapien
cttctgggcttctttatatgggtga

SEQ ID NO: 1421074 - DNA, 25 bp, Homo sapien
cagacgtaagccatcaggtggtaga

SEQ ID NO: 1421075 - DNA, 25 bp, Homo sapien
gagccttgggcaaaagacagggcca

SEQ ID NO: 1421076 - DNA, 25 bp, Homo sapien
gccagtggtattttgagccaccaga

SEQ ID NO: 1421077 - DNA, 25 bp, Homo sapien
ctgtgtttcagagagccgcaaggct

SEQ ID NO: 1421078 - DNA, 25 bp, Homo sapien
tattccgtcatagtaagtaagtgtc

SEQ ID NO: 1421079 - DNA, 25 bp, Homo sapien
ccactggcttgggcattctctgact

SEQ ID NO: 1421080 - DNA, 25 bp, Homo sapien
agaacttgcccctccatgtacctag

SEQ ID NO: 1421081 - DNA, 25 bp, Homo sapien
ccctccatgtacctagatattccgt

SEQ ID NO: 1421082 - DNA, 25 bp, Homo sapien
ttgtaaaagttgtcccattcctgaa

SEQ ID NO: 1421083 - DNA, 25 bp, Homo sapien
agttgtcccattcctgaagtctggc

SEQ ID NO: 1421084 - DNA, 25 bp, Homo sapien
cttggcaaaagatttttagctctat

SEQ ID NO: 1421085 - DNA, 25 bp, Homo sapien
tagctctattggaaaatttgtaaaa

SEQ ID NO: 1421086 - DNA, 25 bp, Homo sapien
aagtgtgtagtctcctgcctacccc

SEQ ID NO: 1421087 - DNA, 25 bp, Homo sapien
gaagtgtgtagtctcctgcctaccc

SEQ ID NO: 1421088 - DNA, 25 bp, Homo sapien
ggttgtcctgacatcaacgtttcct

SEQ ID NO: 1421089 - DNA, 25 bp, Homo sapien
aaaatttggctatggttgtcctgac

SEQ ID NO: 1421090 - DNA, 25 bp, Homo sapien
tttggaccatgactcagctttttgg

SEQ ID NO: 1421091 - DNA, 25 bp, Homo sapien
tcccttaatttcctgccccgcagat

SEQ ID NO: 1421092 - DNA, 25 bp, Homo sapien
tctcctgctgagatagacaagaaaa

SEQ ID NO: 1421093 - DNA, 25 bp, Homo sapien
gatttttatgcccactaaagtctga

SEQ ID NO: 1421094 - DNA, 25 bp, Homo sapien
tagattccttaacctttaactcaca

SEQ ID NO: 1421095 - DNA, 25 bp, Homo sapien
gagctggccgactgccctccaggtg

SEQ ID NO: 1421096 - DNA, 25 bp, Homo sapien
cagatagctacagaggaataaagtc

SEQ ID NO: 1421097 - DNA, 25 bp, Homo sapien
cgtattggtgtatgaattccaaaca

SEQ ID NO: 1421098 - DNA, 25 bp, Homo sapien
gaacttgaggattctgttgttttcg

SEQ ID NO: 1421099 - DNA, 25 bp, Homo sapien
gctacagaggaataaagtcccagga

SEQ ID NO: 1421100 - DNA, 25 bp, Homo sapien
ggatgtccaagcagacaaaatagaa

SEQ ID NO: 1421101 - DNA, 25 bp, Homo sapien
aaagcaggatgtccaagcagacaaa

SEQ ID NO: 1421102 - DNA, 25 bp, Homo sapien
aaaaatgccttgctgaagatgtgtt

SEQ ID NO: 1421103 - DNA, 25 bp, Homo sapien
aaaatgccttgctgaagatgtgttc

SEQ ID NO: 1421104 - DNA, 25 bp, Homo sapien
ctgcagagggactgataatgtcggt

SEQ ID NO: 1421105 - DNA, 25 bp, Homo sapien
gaaggagacatctgctaagtctgca

SEQ ID NO: 1421106 - DNA, 25 bp, Homo sapien
tgttcagaaggagacatctgctaag

SEQ ID NO: 1421107 - DNA, 25 bp, Homo sapien
ataatgtcggttgggattctggagc

SEQ ID NO: 1421108 - DNA, 25 bp, Homo sapien
ttgtatcctcatgtcccatcttgcc

SEQ ID NO: 1421109 - DNA, 25 bp, Homo sapien
ttccttgtatcctcatgtcccatct

SEQ ID NO: 1421110 - DNA, 25 bp, Homo sapien
tgtggggcattccttgtatcctcat

SEQ ID NO: 1421111 - DNA, 25 bp, Homo sapien
gggcattccttgtatcctcatgtcc

SEQ ID NO: 1421112 - DNA, 25 bp, Homo sapien
caaatccaggtgtcccattatgagc

SEQ ID NO: 1421113 - DNA, 25 bp, Homo sapien
tgaagaccagtgtctcagccacgta

SEQ ID NO: 1421114 - DNA, 25 bp, Homo sapien
ccaggtggtggtatagcgaatagtc

SEQ ID NO: 1421115 - DNA, 25 bp, Homo sapien
gatttcaatgccctcgcctttcagg

SEQ ID NO: 1421116 - DNA, 25 bp, Homo sapien
aaacaattttgagtttccagtgcag

SEQ ID NO: 1421117 - DNA, 25 bp, Homo sapien
tgccggtaaagttgtgccagcctct

SEQ ID NO: 1421118 - DNA, 25 bp, Homo sapien
tttgcatcataactgccaggtgggc

SEQ ID NO: 1421119 - DNA, 25 bp, Homo sapien
taactgtagctatagatgcgccaca

SEQ ID NO: 1421120 - DNA, 25 bp, Homo sapien
gaaagattcggttgaggagcttcag

SEQ ID NO: 1421121 - DNA, 25 bp, Homo sapien
tgggcctgccgattcacataatgaa

SEQ ID NO: 1421122 - DNA, 25 bp, Homo sapien
catggatatggagaaacaaggagat

SEQ ID NO: 1421123 - DNA, 25 bp, Homo sapien
ttcttggcaagcactatctggccca

SEQ ID NO: 1421124 - DNA, 25 bp, Homo sapien
gagtttttagcaacttctgtccttc

SEQ ID NO: 1421125 - DNA, 25 bp, Homo sapien
aaggtggcagactcaaatgtctggc

SEQ ID NO: 1421126 - DNA, 25 bp, Homo sapien
tttagcaacttctgtccttcattca

SEQ ID NO: 1421127 - DNA, 25 bp, Homo sapien
gcaacttctgtccttcattcaaata

SEQ ID NO: 1421128 - DNA, 25 bp, Homo sapien
caccaaggtaagatcagacttgaag

SEQ ID NO: 1421129 - DNA, 25 bp, Homo sapien
tataataaggtgaggcagtatctcc

SEQ ID NO: 1421130 - DNA, 25 bp, Homo sapien
taggcaaatcttagcacgtgtgcac

SEQ ID NO: 1421131 - DNA, 25 bp, Homo sapien
tggatgaggaagtaagtccctgcac

SEQ ID NO: 1421132 - DNA, 25 bp, Homo sapien
ggcaagattccagagggataatgtc

SEQ ID NO: 1421133 - DNA, 25 bp, Homo sapien
ccagaggcaagatgacaatctctag

SEQ ID NO: 1421134 - DNA, 25 bp, Homo sapien
taatgtcttcgtcagatgtcttcat

SEQ ID NO: 1421135 - DNA, 25 bp, Homo sapien
aagcagatgcaatttctaagaagta

SEQ ID NO: 1421136 - DNA, 25 bp, Homo sapien
gaaattcaagatcttttctcttatt

SEQ ID NO: 1421137 - DNA, 25 bp, Homo sapien
agaaattcaagatcttttctcttat

SEQ ID NO: 1421138 - DNA, 25 bp, Homo sapien
ttggacaagataagcttttcttcag

SEQ ID NO: 1421139 - DNA, 25 bp, Homo sapien
tctgagttggacaagataagctttt

SEQ ID NO: 1421140 - DNA, 25 bp, Homo sapien
tctctgagttggacaagataagctt

SEQ ID NO: 1421141 - DNA, 25 bp, Homo sapien
ctgagttggacaagataagcttttc

SEQ ID NO: 1421142 - DNA, 25 bp, Homo sapien
gtcgagtcgatagccttctgaacag

SEQ ID NO: 1421143 - DNA, 25 bp, Homo sapien
ctaaagtttgtcgagtcgatagcct

SEQ ID NO: 1421144 - DNA, 25 bp, Homo sapien
gtttgtcgagtcgatagccttctga

SEQ ID NO: 1421145 - DNA, 25 bp, Homo sapien
gtcgatagccttctgaacaggtgaa

SEQ ID NO: 1421146 - DNA, 25 bp, Homo sapien
catcatgcccatagtgactgagtct

SEQ ID NO: 1421147 - DNA, 25 bp, Homo sapien
caaggtcctctgactagagtaggca

SEQ ID NO: 1421148 - DNA, 25 bp, Homo sapien
tttagccataatcaccaaggtcctc

SEQ ID NO: 1421149 - DNA, 25 bp, Homo sapien
cacatggctggttggtattattggc

SEQ ID NO: 1421150 - DNA, 25 bp, Homo sapien
ttagtctctagatttcccaagaaca

SEQ ID NO: 1421151 - DNA, 25 bp, Homo sapien
tctagatttcccaagaacagttagg

SEQ ID NO: 1421152 - DNA, 25 bp, Homo sapien
tagtctctagatttcccaagaacag

SEQ ID NO: 1421153 - DNA, 25 bp, Homo sapien
gtctctagatttcccaagaacagtt

SEQ ID NO: 1421154 - DNA, 25 bp, Homo sapien
agctcgtaggctgttttctgcatca

SEQ ID NO: 1421155 - DNA, 25 bp, Homo sapien
catccatgtctaaagcgttgagccg

SEQ ID NO: 1421156 - DNA, 25 bp, Homo sapien
catcatagggttacagaatcgaatc

SEQ ID NO: 1421157 - DNA, 25 bp, Homo sapien
gaatgaagtccctgcctcggcagtg

SEQ ID NO: 1421158 - DNA, 25 bp, Homo sapien
gaagctccttgccattccggaaaca

SEQ ID NO: 1421159 - DNA, 25 bp, Homo sapien
gaacgatagtgcacctcaaatgagg

SEQ ID NO: 1421160 - DNA, 25 bp, Homo sapien
tagattccactagggttgccagggt

SEQ ID NO: 1421161 - DNA, 25 bp, Homo sapien
actgggcttcagagacaaggaacga

SEQ ID NO: 1421162 - DNA, 25 bp, Homo sapien
tcactttccttatcactatggagag

SEQ ID NO: 1421163 - DNA, 25 bp, Homo sapien
cacttgtgaggtgacagacttcttc

SEQ ID NO: 1421164 - DNA, 25 bp, Homo sapien
ctatggagagtaaccatgtttaact

SEQ ID NO: 1421165 - DNA, 25 bp, Homo sapien
gacaggtttttcagtctgacaccac

SEQ ID NO: 1421166 - DNA, 25 bp, Homo sapien
tttgttggaaaacgagtacctcatg

SEQ ID NO: 1421167 - DNA, 25 bp, Homo sapien
tgttggaaaacgagtacctcatgat

SEQ ID NO: 1421168 - DNA, 25 bp, Homo sapien
ttgttggaaaacgagtacctcatga

SEQ ID NO: 1421169 - DNA, 25 bp, Homo sapien
gttggaaaacgagtacctcatgatg

SEQ ID NO: 1421170 - DNA, 25 bp, Homo sapien
gagatgcagctcacattgaggtcaa

SEQ ID NO: 1421171 - DNA, 25 bp, Homo sapien
aaatctccaggaggtcgaatccaca

SEQ ID NO: 1421172 - DNA, 25 bp, Homo sapien
tgttctttattacggccctggcagc

SEQ ID NO: 1421173 - DNA, 25 bp, Homo sapien
gatgtcgttaggctgtactgcacca

SEQ ID NO: 1421174 - DNA, 25 bp, Homo sapien
tcctggaaatctcccgagaaatagg

SEQ ID NO: 1421175 - DNA, 25 bp, Homo sapien
cctggaaatctcccgagaaataggg

SEQ ID NO: 1421176 - DNA, 25 bp, Homo sapien
ctggaaatctcccgagaaataggga

SEQ ID NO: 1421177 - DNA, 25 bp, Homo sapien
tggaaatctcccgagaaatagggaa

SEQ ID NO: 1421178 - DNA, 25 bp, Homo sapien
tatttcgaaggttggtctgtcgttc

SEQ ID NO: 1421179 - DNA, 25 bp, Homo sapien
aatgtttacaagtgtctaggcctag

SEQ ID NO: 1421180 - DNA, 25 bp, Homo sapien
gaagacagtagaacttttcatccaa

SEQ ID NO: 1421181 - DNA, 25 bp, Homo sapien
gaaagtttgatggaagctgatctta

SEQ ID NO: 1421182 - DNA, 25 bp, Homo sapien
ttttccatatcctggtaatccctca

SEQ ID NO: 1421183 - DNA, 25 bp, Homo sapien
tccctcatacattaagacttggctg

SEQ ID NO: 1421184 - DNA, 25 bp, Homo sapien
cctggtaatccctcatacattaaga

SEQ ID NO: 1421185 - DNA, 25 bp, Homo sapien
cttgggccaggtactcaattttcat

SEQ ID NO: 1421186 - DNA, 25 bp, Homo sapien
aagtagttgatctctttattacgtc

SEQ ID NO: 1421187 - DNA, 25 bp, Homo sapien
aaatttcttcatagtatacatgaag

SEQ ID NO: 1421188 - DNA, 25 bp, Homo sapien
tcttcatagtatacatgaagtagtt

SEQ ID NO: 1421189 - DNA, 25 bp, Homo sapien
tgaagtagttgatctctttattacg

SEQ ID NO: 1421190 - DNA, 25 bp, Homo sapien
gggtaatcctcctttctgttgcaga

SEQ ID NO: 1421191 - DNA, 25 bp, Homo sapien
gatgaggcacgccataccaaacatg

SEQ ID NO: 1421192 - DNA, 25 bp, Homo sapien
ccagcaaagggtaatcctcctttct

SEQ ID NO: 1421193 - DNA, 25 bp, Homo sapien
tcctttctgttgcagatgaggcacg

SEQ ID NO: 1421194 - DNA, 25 bp, Homo sapien
tctgcactggtagagaaaccccttt

SEQ ID NO: 1421195 - DNA, 25 bp, Homo sapien
tgtgtctggcgcagttccaagtgct

SEQ ID NO: 1421196 - DNA, 25 bp, Homo sapien
aatagcgcgccttttattggagcac

SEQ ID NO: 1421197 - DNA, 25 bp, Homo sapien
gacacctgatatacgacccagtaga

SEQ ID NO: 1421198 - DNA, 25 bp, Homo sapien
ccatttgggtgcaaatagatactca

SEQ ID NO: 1421199 - DNA, 25 bp, Homo sapien
ttttaaccctaacaatgcctcggca

SEQ ID NO: 1421200 - DNA, 25 bp, Homo sapien
caaagtgacacccataaatctatgc

SEQ ID NO: 1421201 - DNA, 25 bp, Homo sapien
tggtaccttgtatgtcactgcaaag

SEQ ID NO: 1421202 - DNA, 25 bp, Homo sapien
tcctgggtagtacatcatcatcctg

SEQ ID NO: 1421203 - DNA, 25 bp, Homo sapien
aaagtacgctggtaggttgctccca

SEQ ID NO: 1421204 - DNA, 25 bp, Homo sapien
tacggccccaatactgatacaatgg

SEQ ID NO: 1421205 - DNA, 25 bp, Homo sapien
cagagtcgcaggtcacaattcctgg

SEQ ID NO: 1421206 - DNA, 25 bp, Homo sapien
taaggagttctagcttattccagga

SEQ ID NO: 1421207 - DNA, 25 bp, Homo sapien
caacaagccattagcccatggctaa

SEQ ID NO: 1421208 - DNA, 25 bp, Homo sapien
gctgaaaatcttaaaccctgatagg

SEQ ID NO: 1421209 - DNA, 25 bp, Homo sapien
caggaaagtattacaggagcccctc

SEQ ID NO: 1421210 - DNA, 25 bp, Homo sapien
cacagaagacaatcccactggcaac

SEQ ID NO: 1421211 - DNA, 25 bp, Homo sapien
tgtgtccaacgatcccacagaagac

SEQ ID NO: 1421212 - DNA, 25 bp, Homo sapien
ccactggcaacaccgatggatacag

SEQ ID NO: 1421213 - DNA, 25 bp, Homo sapien
tctcacagtgtgtccaacgatccca

SEQ ID NO: 1421214 - DNA, 25 bp, Homo sapien
tggattttgtggacttgagagcaga

SEQ ID NO: 1421215 - DNA, 25 bp, Homo sapien
caaatatatccatagcacattccag

SEQ ID NO: 1421216 - DNA, 25 bp, Homo sapien
acattccagagcatgagtgagctcg

SEQ ID NO: 1421217 - DNA, 25 bp, Homo sapien
gagctcgtcaggtaccttttcccca

SEQ ID NO: 1421218 - DNA, 25 bp, Homo sapien
gatggctgggcctatctcttctgct

SEQ ID NO: 1421219 - DNA, 25 bp, Homo sapien
tcacaaacacaatcgtcactgggcg

SEQ ID NO: 1421220 - DNA, 25 bp, Homo sapien
tgtgcatataggcatcctggatggc

SEQ ID NO: 1421221 - DNA, 25 bp, Homo sapien
gatttggccttggaagatcttcagg

SEQ ID NO: 1421222 - DNA, 25 bp, Homo sapien
tttgtagggacatctccagttcagg

SEQ ID NO: 1421223 - DNA, 25 bp, Homo sapien
agcgtgcatgcaagcctcaggaggt

SEQ ID NO: 1421224 - DNA, 25 bp, Homo sapien
ggcttcagcgtgcatgcaagcctca

SEQ ID NO: 1421225 - DNA, 25 bp, Homo sapien
tttccatcacatacttttgtaggga

SEQ ID NO: 1421226 - DNA, 25 bp, Homo sapien
cctactgaccactggtagaggcaaa

SEQ ID NO: 1421227 - DNA, 25 bp, Homo sapien
taagaccctactgaccactggtaga

SEQ ID NO: 1421228 - DNA, 25 bp, Homo sapien
tcggcattgatataagaccctactg

SEQ ID NO: 1421229 - DNA, 25 bp, Homo sapien
agtaatgaagctgtcggcattgata

SEQ ID NO: 1421230 - DNA, 25 bp, Homo sapien
taatgcatgaaggtcgtacactttg

SEQ ID NO: 1421231 - DNA, 25 bp, Homo sapien
ggtcgtacactttgtgaaaaattca

SEQ ID NO: 1421232 - DNA, 25 bp, Homo sapien
tcaccagaaggataataatgcatga

SEQ ID NO: 1421233 - DNA, 25 bp, Homo sapien
ggataataatgcatgaaggtcgtac

SEQ ID NO: 1421234 - DNA, 25 bp, Homo sapien
taattgtccatatcccagggacagt

SEQ ID NO: 1421235 - DNA, 25 bp, Homo sapien
caatgttttctactaggcagagcca

SEQ ID NO: 1421236 - DNA, 25 bp, Homo sapien
tatcactgaacttcgccgcacttgc

SEQ ID NO: 1421237 - DNA, 25 bp, Homo sapien
gggacagttctgcttatagtcaatc

SEQ ID NO: 1421238 - DNA, 25 bp, Homo sapien
tttcaatcatgctccggtcacagag

SEQ ID NO: 1421239 - DNA, 25 bp, Homo sapien
ccatgttctgggcaaggcgcacatc

SEQ ID NO: 1421240 - DNA, 25 bp, Homo sapien
gaccaatcaccagaaagtggctgtg

SEQ ID NO: 1421241 - DNA, 25 bp, Homo sapien
taactgctctctgatctggaacact

SEQ ID NO: 1421242 - DNA, 25 bp, Homo sapien
gatctccaggctacatttaattacc

SEQ ID NO: 1421243 - DNA, 25 bp, Homo sapien
cactgtgataatgtttttcagctgc

SEQ ID NO: 1421244 - DNA, 25 bp, Homo sapien
gtttttcagctgctttcgctccacc

SEQ ID NO: 1421245 - DNA, 25 bp, Homo sapien
tatcttgactcggatgtctaggcct

SEQ ID NO: 1421246 - DNA, 25 bp, Homo sapien
tgcaaatttcaggatgtctcctcca

SEQ ID NO: 1421247 - DNA, 25 bp, Homo sapien
gcaaatttcaggatgtctcctccaa

SEQ ID NO: 1421248 - DNA, 25 bp, Homo sapien
ctgcaaatttcaggatgtctcctcc

SEQ ID NO: 1421249 - DNA, 25 bp, Homo sapien
cttatgtggtagttgaggatctcca

SEQ ID NO: 1421250 - DNA, 25 bp, Homo sapien
gtggtagttgaggatctccaccaac

SEQ ID NO: 1421251 - DNA, 25 bp, Homo sapien
ctccactattgcacttatgtggtag

SEQ ID NO: 1421252 - DNA, 25 bp, Homo sapien
ccactattgcacttatgtggtagtt

SEQ ID NO: 1421253 - DNA, 25 bp, Homo sapien
gagccagggccacaagctatttcct

SEQ ID NO: 1421254 - DNA, 25 bp, Homo sapien
gagatactggagcaaagaatgggac

SEQ ID NO: 1421255 - DNA, 25 bp, Homo sapien
tctagggagatcatttcctgaggtc

SEQ ID NO: 1421256 - DNA, 25 bp, Homo sapien
tgtgaattcccacgcgagcctgttg

SEQ ID NO: 1421257 - DNA, 25 bp, Homo sapien
gggagaaatgtccatagacaatgag

SEQ ID NO: 1421258 - DNA, 25 bp, Homo sapien
gaaatatcaacaaacatcaggactc

SEQ ID NO: 1421259 - DNA, 25 bp, Homo sapien
aataatccataaagggtcgctctgg

SEQ ID NO: 1421260 - DNA, 25 bp, Homo sapien
ccatagacaatgaggtctggtaaat

SEQ ID NO: 1421261 - DNA, 25 bp, Homo sapien
tgttcaggattttatggtgacagga

SEQ ID NO: 1421262 - DNA, 25 bp, Homo sapien
ttttatggtgacaggaagcagtctc

SEQ ID NO: 1421263 - DNA, 25 bp, Homo sapien
tggtgacaggaagcagtctccaaat

SEQ ID NO: 1421264 - DNA, 25 bp, Homo sapien
caggaagcagtctccaaataggtct

SEQ ID NO: 1421265 - DNA, 25 bp, Homo sapien
taaggtgagcaaatccgtgtaatac

SEQ ID NO: 1421266 - DNA, 25 bp, Homo sapien
actattgacctgtgggttgttccca

SEQ ID NO: 1421267 - DNA, 25 bp, Homo sapien
tatatagtattccatcacctgatgg

SEQ ID NO: 1421268 - DNA, 25 bp, Homo sapien
tgtaatacccattcatagcaagaag

SEQ ID NO: 1421269 - DNA, 25 bp, Homo sapien
tggtaccaacttacactccctcagg

SEQ ID NO: 1421270 - DNA, 25 bp, Homo sapien
gtagatcttgctaaacagctttcca

SEQ ID NO: 1421271 - DNA, 25 bp, Homo sapien
caaggtatgacagttcagttgctac

SEQ ID NO: 1421272 - DNA, 25 bp, Homo sapien
tggatacccctgcttgagtagatct

SEQ ID NO: 1421273 - DNA, 25 bp, Homo sapien
atgtctacacttaagtggcttattt

SEQ ID NO: 1421274 - DNA, 25 bp, Homo sapien
taatgtctacacttaagtggcttat

SEQ ID NO: 1421275 - DNA, 25 bp, Homo sapien
ttaatgtctacacttaagtggctta

SEQ ID NO: 1421276 - DNA, 25 bp, Homo sapien
aatgtctacacttaagtggcttatt

SEQ ID NO: 1421277 - DNA, 25 bp, Homo sapien
ggaaccatcttctacatatctttgt

SEQ ID NO: 1421278 - DNA, 25 bp, Homo sapien
gctccccgtttggaaccatcttcta

SEQ ID NO: 1421279 - DNA, 25 bp, Homo sapien
tgtaagctccccgtttggaaccatc

SEQ ID NO: 1421280 - DNA, 25 bp, Homo sapien
atctgaattgtaagctccccgtttg

SEQ ID NO: 1421281 - DNA, 25 bp, Homo sapien
tcaagaggtaggcacttggtagttg

SEQ ID NO: 1421282 - DNA, 25 bp, Homo sapien
cttcaagaggtaggcacttggtagt

SEQ ID NO: 1421283 - DNA, 25 bp, Homo sapien
caagaggtaggcacttggtagttgt

SEQ ID NO: 1421284 - DNA, 25 bp, Homo sapien
ttcaagaggtaggcacttggtagtt

SEQ ID NO: 1421285 - DNA, 25 bp, Homo sapien
cttttaagactgcagaagacaggag

SEQ ID NO: 1421286 - DNA, 25 bp, Homo sapien
tgaagacagctgaagcgccatgtct

SEQ ID NO: 1421287 - DNA, 25 bp, Homo sapien
tgtctgtctatagctgacccataaa

SEQ ID NO: 1421288 - DNA, 25 bp, Homo sapien
agaggaggccgggtgacattattct

SEQ ID NO: 1421289 - DNA, 25 bp, Homo sapien
ttaatgaaaaggaagtgaaacacca

SEQ ID NO: 1421290 - DNA, 25 bp, Homo sapien
taatgaaaaggaagtgaaacaccaa

SEQ ID NO: 1421291 - DNA, 25 bp, Homo sapien
tgcttaacctaggaaacacatgtgt

SEQ ID NO: 1421292 - DNA, 25 bp, Homo sapien
tcacaacggagccaaaggtcacaaa

SEQ ID NO: 1421293 - DNA, 25 bp, Homo sapien
tgtctaaagtcacagcataggctgg

SEQ ID NO: 1421294 - DNA, 25 bp, Homo sapien
tcattgtggcctatgtcaagctctc

SEQ ID NO: 1421295 - DNA, 25 bp, Homo sapien
tatagctagctacctgaccatccta

SEQ ID NO: 1421296 - DNA, 25 bp, Homo sapien
tatgtacatatgttggctgactgga

SEQ ID NO: 1421297 - DNA, 25 bp, Homo sapien
tagtttgaggtcatcttgatagtca

SEQ ID NO: 1421298 - DNA, 25 bp, Homo sapien
gaccatcctacactaaataagcaga

SEQ ID NO: 1421299 - DNA, 25 bp, Homo sapien
gataagttccttaagtcatgtagag

SEQ ID NO: 1421300 - DNA, 25 bp, Homo sapien
gctaccagttacagtgccttctaaa

SEQ ID NO: 1421301 - DNA, 25 bp, Homo sapien
tattgaatcaagaactagctaccag

SEQ ID NO: 1421302 - DNA, 25 bp, Homo sapien
cgagcaagtatggtttattacggac

SEQ ID NO: 1421303 - DNA, 25 bp, Homo sapien
taattacaagtgagtatcttgacca

SEQ ID NO: 1421304 - DNA, 25 bp, Homo sapien
tggaataattacaagtgagtatctt

SEQ ID NO: 1421305 - DNA, 25 bp, Homo sapien
agtgagtatcttgaccaaataaacc

SEQ ID NO: 1421306 - DNA, 25 bp, Homo sapien
gcaaacagactccaattttttggaa

SEQ ID NO: 1421307 - DNA, 25 bp, Homo sapien
aaacagcagattgagctgtgctaag

SEQ ID NO: 1421308 - DNA, 25 bp, Homo sapien
ttgagctgtgctaagtttttctgca

SEQ ID NO: 1421309 - DNA, 25 bp, Homo sapien
cagcagattgagctgtgctaagttt

SEQ ID NO: 1421310 - DNA, 25 bp, Homo sapien
cagattgagctgtgctaagtttttc

SEQ ID NO: 1421311 - DNA, 25 bp, Homo sapien
tcagccaatccagcacacaccaacc

SEQ ID NO: 1421312 - DNA, 25 bp, Homo sapien
atcagccaatccagcacacaccaac

SEQ ID NO: 1421313 - DNA, 25 bp, Homo sapien
cagccaatccagcacacaccaaccc

SEQ ID NO: 1421314 - DNA, 25 bp, Homo sapien
ccatttcataattggagcccagaag

SEQ ID NO: 1421315 - DNA, 25 bp, Homo sapien
atttcataattggagcccagaagaa

SEQ ID NO: 1421316 - DNA, 25 bp, Homo sapien
ttcataattggagcccagaagaaaa

SEQ ID NO: 1421317 - DNA, 25 bp, Homo sapien
attggagcccagaagaaaactgttc

SEQ ID NO: 1421318 - DNA, 25 bp, Homo sapien
tgcaactggctagggtggagtcaca

SEQ ID NO: 1421319 - DNA, 25 bp, Homo sapien
aacactggagtacagctatgcaact

SEQ ID NO: 1421320 - DNA, 25 bp, Homo sapien
ggctagggtggagtcacatattttt

SEQ ID NO: 1421321 - DNA, 25 bp, Homo sapien
gataatgcggggactgacatccttt

SEQ ID NO: 1421322 - DNA, 25 bp, Homo sapien
aagggagcggatgtcacataggtgg

SEQ ID NO: 1421323 - DNA, 25 bp, Homo sapien
gatcaggtttgggttggagtcgtgc

SEQ ID NO: 1421324 - DNA, 25 bp, Homo sapien
tttggtggccgcagaagttgagaag

SEQ ID NO: 1421325 - DNA, 25 bp, Homo sapien
gaaggctcaaatctggagatcaggt

SEQ ID NO: 1421326 - DNA, 25 bp, Homo sapien
tgctggatggttgtacaacggcctc

SEQ ID NO: 1421327 - DNA, 25 bp, Homo sapien
cactttatcgaggagccggtggtag

SEQ ID NO: 1421328 - DNA, 25 bp, Homo sapien
tgtacaacggcctcaatttctcggg

SEQ ID NO: 1421329 - DNA, 25 bp, Homo sapien
aatttctcgggcagcatcagctcca

SEQ ID NO: 1421330 - DNA, 25 bp, Homo sapien
agggatcgttggcagccgggtggga

SEQ ID NO: 1421331 - DNA, 25 bp, Homo sapien
cgccgccgagggatcgttggcagcc

SEQ ID NO: 1421332 - DNA, 25 bp, Homo sapien
gccgagggatcgttggcagccgggt

SEQ ID NO: 1421333 - DNA, 25 bp, Homo sapien
cgagggatcgttggcagccgggtgg

SEQ ID NO: 1421334 - DNA, 25 bp, Homo sapien
gccatggcaacaggtgccaaaataa

SEQ ID NO: 1421335 - DNA, 25 bp, Homo sapien
gaaggggagctagtcacttttcctg

SEQ ID NO: 1421336 - DNA, 25 bp, Homo sapien
gcccgctgtgaaccgaaaagctgcg

SEQ ID NO: 1421337 - DNA, 25 bp, Homo sapien
tcgcgtccgcctctcgcctggagta

SEQ ID NO: 1421338 - DNA, 25 bp, Homo sapien
ctgctggcagcgcgcttgcgcaggc

SEQ ID NO: 1421339 - DNA, 25 bp, Homo sapien
gcaggccgagctgcccgccatgatt

SEQ ID NO: 1421340 - DNA, 25 bp, Homo sapien
cttgcgcaggccgagctgcccgcca

SEQ ID NO: 1421341 - DNA, 25 bp, Homo sapien
gagctgcccgccatgattggcccgc

SEQ ID NO: 1421342 - DNA, 25 bp, Homo sapien
tccccagggtggtcgtcatctcgcg

SEQ ID NO: 1421343 - DNA, 25 bp, Homo sapien
cgtcatctcgcgagaaagggttggc

SEQ ID NO: 1421344 - DNA, 25 bp, Homo sapien
agagggaggagtcgccatcgcctcc

SEQ ID NO: 1421345 - DNA, 25 bp, Homo sapien
gagggtatccaggacgaggagaggg

SEQ ID NO: 1421346 - DNA, 25 bp, Homo sapien
cctcccacccggctcaggcagagcc

SEQ ID NO: 1421347 - DNA, 25 bp, Homo sapien
cagagccatgtctcggggtggctcc

SEQ ID NO: 1421348 - DNA, 25 bp, Homo sapien
aggcagagccatgtctcggggtggc

SEQ ID NO: 1421349 - DNA, 25 bp, Homo sapien
catgtctcggggtggctcctaccca

SEQ ID NO: 1421350 - DNA, 25 bp, Homo sapien
cgggctggaggacccgtcccggctg

SEQ ID NO: 1421351 - DNA, 25 bp, Homo sapien
cgtgaggaaaaggtccctcgggctg

SEQ ID NO: 1421352 - DNA, 25 bp, Homo sapien
tgttgtgggacgtgaggaaaaggtc

SEQ ID NO: 1421353 - DNA, 25 bp, Homo sapien
tggaggacccgtcccggctgcggag

SEQ ID NO: 1421354 - DNA, 25 bp, Homo sapien
gcacgctgccgggtctgttggaggt

SEQ ID NO: 1421355 - DNA, 25 bp, Homo sapien
agaaggtactggcttgtaaaggtgt

SEQ ID NO: 1421356 - DNA, 25 bp, Homo sapien
gccttggttgccgaattccgtgccg

SEQ ID NO: 1421357 - DNA, 25 bp, Homo sapien
tgttggaggtgggacggcgtctcgg

SEQ ID NO: 1421358 - DNA, 25 bp, Homo sapien
agacattctaacaggcatctagtag

SEQ ID NO: 1421359 - DNA, 25 bp, Homo sapien
tcaagtcatctgagaattaagttag

SEQ ID NO: 1421360 - DNA, 25 bp, Homo sapien
gattgaatagaaggagtggaatcag

SEQ ID NO: 1421361 - DNA, 25 bp, Homo sapien
tcatgttgtggttacatttcctgcc

SEQ ID NO: 1421362 - DNA, 25 bp, Homo sapien
tgtggtgagccgaaatcacgccatc

SEQ ID NO: 1421363 - DNA, 25 bp, Homo sapien
gtgaaactccgtctcagaaaaaaca

SEQ ID NO: 1421364 - DNA, 25 bp, Homo sapien
ctccgtctcagaaaaaacaacaaca

SEQ ID NO: 1421365 - DNA, 25 bp, Homo sapien
actccagcctgggcaacaaaagtga

SEQ ID NO: 1421366 - DNA, 25 bp, Homo sapien
tattgttgtacgtcataaatctaca

SEQ ID NO: 1421367 - DNA, 25 bp, Homo sapien
acccggcctattgttgtacgtcata

SEQ ID NO: 1421368 - DNA, 25 bp, Homo sapien
ttgttgtacgtcataaatctacatg

SEQ ID NO: 1421369 - DNA, 25 bp, Homo sapien
aatctacatgttcaaactaaaactt

SEQ ID NO: 1421370 - DNA, 25 bp, Homo sapien
cgatcctgtgcaagcaggctctaaa

SEQ ID NO: 1421371 - DNA, 25 bp, Homo sapien
ccgatcctgtgcaagcaggctctaa

SEQ ID NO: 1421372 - DNA, 25 bp, Homo sapien
gatcctgtgcaagcaggctctaaac

SEQ ID NO: 1421373 - DNA, 25 bp, Homo sapien
taaatcagtccttgaactggtatca

SEQ ID NO: 1421374 - DNA, 25 bp, Homo sapien
gagttttctttctgcaagcaactgg

SEQ ID NO: 1421375 - DNA, 25 bp, Homo sapien
gtgctccaacatcttcaagaggaat

SEQ ID NO: 1421376 - DNA, 25 bp, Homo sapien
tcattgcaatagaaagtagatccaa

SEQ ID NO: 1421377 - DNA, 25 bp, Homo sapien
tgaggcaatagaacatgctaagagc

SEQ ID NO: 1421378 - DNA, 25 bp, Homo sapien
gatcatgcagagaaagtacgtagca

SEQ ID NO: 1421379 - DNA, 25 bp, Homo sapien
cgggcatgtttaatagaacctactt

SEQ ID NO: 1421380 - DNA, 25 bp, Homo sapien
gtacgtagcacttactagcacattg

SEQ ID NO: 1421381 - DNA, 25 bp, Homo sapien
cagtggccaggatagttgttcatca

SEQ ID NO: 1421382 - DNA, 25 bp, Homo sapien
tgcttctatagtccagctgttaaac

SEQ ID NO: 1421383 - DNA, 25 bp, Homo sapien
cagtgaagcacaatcctctttgtgg

SEQ ID NO: 1421384 - DNA, 25 bp, Homo sapien
tgttaaactgatagatagcaaatcc

SEQ ID NO: 1421385 - DNA, 25 bp, Homo sapien
gaatcatcagaggatgtgacaaaat

SEQ ID NO: 1421386 - DNA, 25 bp, Homo sapien
tcctgaagaatcatcagaggatgtg

SEQ ID NO: 1421387 - DNA, 25 bp, Homo sapien
gaagaatcatcagaggatgtgacaa

SEQ ID NO: 1421388 - DNA, 25 bp, Homo sapien
tgtgacaaaatatcaggaaggagta

SEQ ID NO: 1421389 - DNA, 25 bp, Homo sapien
aacccagttgagaaccatatcaata

SEQ ID NO: 1421390 - DNA, 25 bp, Homo sapien
ctgcagaaaacccagttgagaacca

SEQ ID NO: 1421391 - DNA, 25 bp, Homo sapien
cccagttgagaaccatatcaatata

SEQ ID NO: 1421392 - DNA, 25 bp, Homo sapien
gaaaacccagttgagaaccatatca

SEQ ID NO: 1421393 - DNA, 25 bp, Homo sapien
cctcaatcttgatcgctcttgtggg

SEQ ID NO: 1421394 - DNA, 25 bp, Homo sapien
gccaagccattggattccaactcag

SEQ ID NO: 1421395 - DNA, 25 bp, Homo sapien
cacagccaagccattggattccaac

SEQ ID NO: 1421396 - DNA, 25 bp, Homo sapien
tgatcgctcttgtggggttccagaa

SEQ ID NO: 1421397 - DNA, 25 bp, Homo sapien
gcctcagttccaaacagaagccact

SEQ ID NO: 1421398 - DNA, 25 bp, Homo sapien
tgacagtgatgatgacccagtcctg

SEQ ID NO: 1421399 - DNA, 25 bp, Homo sapien
gacagtgatgatgacccagtcctga

SEQ ID NO: 1421400 - DNA, 25 bp, Homo sapien
aaataacaccaatcctgagcctcag

SEQ ID NO: 1421401 - DNA, 25 bp, Homo sapien
gttcccttcactagatttaatatca

SEQ ID NO: 1421402 - DNA, 25 bp, Homo sapien
gatttaatatcagaggaacaacaat

SEQ ID NO: 1421403 - DNA, 25 bp, Homo sapien
caataggtgatagaataatgaggta

SEQ ID NO: 1421404 - DNA, 25 bp, Homo sapien
gaggtaattcagtatgttccttcat

SEQ ID NO: 1421405 - DNA, 25 bp, Homo sapien
ttctaagtcttctatccaccactaa

SEQ ID NO: 1421406 - DNA, 25 bp, Homo sapien
gtatttctcatatgcttcttcactc

SEQ ID NO: 1421407 - DNA, 25 bp, Homo sapien
ttcatctagttctgaagggttactc

SEQ ID NO: 1421408 - DNA, 25 bp, Homo sapien
gattttatgtatttctcatatgctt

SEQ ID NO: 1421409 - DNA, 25 bp, Homo sapien
ttatgtatttctcatatgcttcttc

SEQ ID NO: 1421410 - DNA, 25 bp, Homo sapien
aaaggagaatagagttcactagcag

SEQ ID NO: 1421411 - DNA, 25 bp, Homo sapien
ctgataaaggagaatagagttcact

SEQ ID NO: 1421412 - DNA, 25 bp, Homo sapien
gataaaggagaatagagttcactag

SEQ ID NO: 1421413 - DNA, 25 bp, Homo sapien
ctcctgataaaggagaatagagttc

SEQ ID NO: 1421414 - DNA, 25 bp, Homo sapien
tcccaacgcttcctgtgcaaaattg

SEQ ID NO: 1421415 - DNA, 25 bp, Homo sapien
cagggagactacaataaacaacatc

SEQ ID NO: 1421416 - DNA, 25 bp, Homo sapien
tctgttgttacccattcgtgtttct

SEQ ID NO: 1421417 - DNA, 25 bp, Homo sapien
cccaacttcagggagactacaataa

SEQ ID NO: 1421418 - DNA, 25 bp, Homo sapien
ggcgggtgacgggaccgcgcgcagg

SEQ ID NO: 1421419 - DNA, 25 bp, Homo sapien
tgaatttacgcaccgagagcagagc

SEQ ID NO: 1421420 - DNA, 25 bp, Homo sapien
gcgtagcgtacggacggcgcccacc

SEQ ID NO: 1421421 - DNA, 25 bp, Homo sapien
gagcagagcgggtccagtgcgtagc

SEQ ID NO: 1421422 - DNA, 25 bp, Homo sapien
gggtcgcagcgctacgcctcggcca

SEQ ID NO: 1421423 - DNA, 25 bp, Homo sapien
gcgggggtcgcagcgctacgcctcg

SEQ ID NO: 1421424 - DNA, 25 bp, Homo sapien
gtcgcagcgctacgcctcggccacc

SEQ ID NO: 1421425 - DNA, 25 bp, Homo sapien
gggggtcgcagcgctacgcctcggc

SEQ ID NO: 1421426 - DNA, 25 bp, Homo sapien
tatagacgctctgctgttgcccgta

SEQ ID NO: 1421427 - DNA, 25 bp, Homo sapien
tcaaaatagaagtctatccactgct

SEQ ID NO: 1421428 - DNA, 25 bp, Homo sapien
tgtagtaactcaactagtctgactt

SEQ ID NO: 1421429 - DNA, 25 bp, Homo sapien
taaaaaccagtttgccgcatgctat

SEQ ID NO: 1421430 - DNA, 25 bp, Homo sapien
taccagatgaaataagaatagacca

SEQ ID NO: 1421431 - DNA, 25 bp, Homo sapien
gaatagaccagaaagatctctaaga

SEQ ID NO: 1421432 - DNA, 25 bp, Homo sapien
cgatctacaagtttctacacccagt

SEQ ID NO: 1421433 - DNA, 25 bp, Homo sapien
gaaaagtttttgagatgactagtgt

SEQ ID NO: 1421434 - DNA, 25 bp, Homo sapien
taagatatcttttctaggacgaggg

SEQ ID NO: 1421435 - DNA, 25 bp, Homo sapien
atctgggatcggcacactgctgagc

SEQ ID NO: 1421436 - DNA, 25 bp, Homo sapien
cagccacatccgtttgacccaagta

SEQ ID NO: 1421437 - DNA, 25 bp, Homo sapien
tcatgtggtaaactgcctgcagcca

SEQ ID NO: 1421438 - DNA, 25 bp, Homo sapien
gcctacagtgaagacggtaatttcc

SEQ ID NO: 1421439 - DNA, 25 bp, Homo sapien
tagggattctgtgaacccaagagcc

SEQ ID NO: 1421440 - DNA, 25 bp, Homo sapien
tacatacctaataaagccctgctgg

SEQ ID NO: 1421441 - DNA, 25 bp, Homo sapien
tactactacccaggaaaatgcttgc

SEQ ID NO: 1421442 - DNA, 25 bp, Homo sapien
tacaaacaggccagtagcatagagg

SEQ ID NO: 1421443 - DNA, 25 bp, Homo sapien
tatgatttggaacgttacaccaggc

SEQ ID NO: 1421444 - DNA, 25 bp, Homo sapien
ttagaatcggtatccacaggtcctg

SEQ ID NO: 1421445 - DNA, 25 bp, Homo sapien
ccatgtaattggaagcacgggatct

SEQ ID NO: 1421446 - DNA, 25 bp, Homo sapien
tacagaggacctagaaaggtgacaa

SEQ ID NO: 1421447 - DNA, 25 bp, Homo sapien
aactgaggccagctattttcattgg

SEQ ID NO: 1421448 - DNA, 25 bp, Homo sapien
taactgttgctcttgggagtgtgcc

SEQ ID NO: 1421449 - DNA, 25 bp, Homo sapien
atacaaaggtcggtccgtgggtctg

SEQ ID NO: 1421450 - DNA, 25 bp, Homo sapien
tggcactacagtcccattcagtccg

SEQ ID NO: 1421451 - DNA, 25 bp, Homo sapien
cacatagaatctatttaatgaggct

SEQ ID NO: 1421452 - DNA, 25 bp, Homo sapien
aacaaattcccttccataataacag

SEQ ID NO: 1421453 - DNA, 25 bp, Homo sapien
agtttctctatttcctggctgtgct

SEQ ID NO: 1421454 - DNA, 25 bp, Homo sapien
aaataccaaagaacttgtcagtagg

SEQ ID NO: 1421455 - DNA, 25 bp, Homo sapien
aacttgtcagtagggaagtaggcag

SEQ ID NO: 1421456 - DNA, 25 bp, Homo sapien
tcttgtcttttatagtggtttctcc

SEQ ID NO: 1421457 - DNA, 25 bp, Homo sapien
gcccttcctcttgtcttttatagtg

SEQ ID NO: 1421458 - DNA, 25 bp, Homo sapien
actgcccgcatcaaccatgtagagg

SEQ ID NO: 1421459 - DNA, 25 bp, Homo sapien
tctgcggaccagtcctagaactgag

SEQ ID NO: 1421460 - DNA, 25 bp, Homo sapien
caggacggtcgcgtgtcattaggaa

SEQ ID NO: 1421461 - DNA, 25 bp, Homo sapien
actgaggaccgctccgaagcgctct

SEQ ID NO: 1421462 - DNA, 25 bp, Homo sapien
cccagcacactgtgaagaggaggaa

SEQ ID NO: 1421463 - DNA, 25 bp, Homo sapien
gtgtgtggccagctgtacacagtga

SEQ ID NO: 1421464 - DNA, 25 bp, Homo sapien
tcactgggacctaaaagaagctcac

SEQ ID NO: 1421465 - DNA, 25 bp, Homo sapien
gaagctgtggactgtagacattatt

SEQ ID NO: 1421466 - DNA, 25 bp, Homo sapien
gcacaggcggtgatgggaactcctc

SEQ ID NO: 1421467 - DNA, 25 bp, Homo sapien
ctccttcttcgatgctctgcaactg

SEQ ID NO: 1421468 - DNA, 25 bp, Homo sapien
aaaacatctccttcttcgatgctct

SEQ ID NO: 1421469 - DNA, 25 bp, Homo sapien
aaacatctccttcttcgatgctctg

SEQ ID NO: 1421470 - DNA, 25 bp, Homo sapien
atctccttcttcgatgctctgcaac

SEQ ID NO: 1421471 - DNA, 25 bp, Homo sapien
ggctttggccaagcttgctgcgtaa

SEQ ID NO: 1421472 - DNA, 25 bp, Homo sapien
ggacagtccgtgctgtaaccaagac

SEQ ID NO: 1421473 - DNA, 25 bp, Homo sapien
tgctgcgtaactgtccaaggacttg

SEQ ID NO: 1421474 - DNA, 25 bp, Homo sapien
taagttgattttggcttcggcctca

SEQ ID NO: 1421475 - DNA, 25 bp, Homo sapien
cactcacaaagcaggactgatgggg

SEQ ID NO: 1421476 - DNA, 25 bp, Homo sapien
ggagggtgcctttggagctgccaca

SEQ ID NO: 1421477 - DNA, 25 bp, Homo sapien
gatggggcaagtgtggccctacgtg

SEQ ID NO: 1421478 - DNA, 25 bp, Homo sapien
gcaagtgtggccctacgtgggctgg

SEQ ID NO: 1421479 - DNA, 25 bp, Homo sapien
gctccttctcttgggtgggcaagtg

SEQ ID NO: 1421480 - DNA, 25 bp, Homo sapien
cagacgtgtagtcctcaagcagcat

SEQ ID NO: 1421481 - DNA, 25 bp, Homo sapien
cagtgagagggagggttgtcatcag

SEQ ID NO: 1421482 - DNA, 25 bp, Homo sapien
ccttctcttgggtgggcaagtgcag

SEQ ID NO: 1421483 - DNA, 25 bp, Homo sapien
taaaacaacgggcagattgtgcata

SEQ ID NO: 1421484 - DNA, 25 bp, Homo sapien
gtgcatatgtaactacaatctaaag

SEQ ID NO: 1421485 - DNA, 25 bp, Homo sapien
tgtaactacaatctaaagtcctcct

SEQ ID NO: 1421486 - DNA, 25 bp, Homo sapien
acaacgggcagattgtgcatatgta

SEQ ID NO: 1421487 - DNA, 25 bp, Homo sapien
agaaacacccgcctgtcatcctgtt

SEQ ID NO: 1421488 - DNA, 25 bp, Homo sapien
gtttcagggagtttgcagacagccg

SEQ ID NO: 1421489 - DNA, 25 bp, Homo sapien
tgcgccgcagcacgtgcccaagaaa

SEQ ID NO: 1421490 - DNA, 25 bp, Homo sapien
ccatcatcaagtggagctgactgcg

SEQ ID NO: 1421491 - DNA, 25 bp, Homo sapien
ttcatatatgactccgtgtggtgcg

SEQ ID NO: 1421492 - DNA, 25 bp, Homo sapien
gctgtttcagagcacctcgcagagg

SEQ ID NO: 1421493 - DNA, 25 bp, Homo sapien
tcagtctacctcacggagttgtggg

SEQ ID NO: 1421494 - DNA, 25 bp, Homo sapien
ttaaatcacatgagggactcaggcc

SEQ ID NO: 1421495 - DNA, 25 bp, Homo sapien
ccaagagcagagagatggaggagct

SEQ ID NO: 1421496 - DNA, 25 bp, Homo sapien
caagtcagaggtggtttttcaaagg

SEQ ID NO: 1421497 - DNA, 25 bp, Homo sapien
gaggagctgggagcggcagacccac

SEQ ID NO: 1421498 - DNA, 25 bp, Homo sapien
ctcccaagagcagagagatggagga

SEQ ID NO: 1421499 - DNA, 25 bp, Homo sapien
caggcatgcggctttgtgcagcttc

SEQ ID NO: 1421500 - DNA, 25 bp, Homo sapien
ggaagccgactgctcagacaaggag

SEQ ID NO: 1421501 - DNA, 25 bp, Homo sapien
gagccatgagtgtgactccctgcct

SEQ ID NO: 1421502 - DNA, 25 bp, Homo sapien
tcttcctcagcaatgtggagccatg

SEQ ID NO: 1421503 - DNA, 25 bp, Homo sapien
gcgacacgggggaaacgcaacacag

SEQ ID NO: 1421504 - DNA, 25 bp, Homo sapien
acacagggaaaacgcgacaggtgag

SEQ ID NO: 1421505 - DNA, 25 bp, Homo sapien
gaaacgcaacacagggaaaacgcga

SEQ ID NO: 1421506 - DNA, 25 bp, Homo sapien
cagctcttgagcctgcacaggggaa

SEQ ID NO: 1421507 - DNA, 25 bp, Homo sapien
tgaagccagtgtcccccgtgctgct

SEQ ID NO: 1421508 - DNA, 25 bp, Homo sapien
tgccatgagcgcagtgaggtgtggg

SEQ ID NO: 1421509 - DNA, 25 bp, Homo sapien
ctgccatgagcgcagtgaggtgtgg

SEQ ID NO: 1421510 - DNA, 25 bp, Homo sapien
gtgaggtgtggggacaggcccaggt

SEQ ID NO: 1421511 - DNA, 25 bp, Homo sapien
gcagtgaggtgtggggacaggccca

SEQ ID NO: 1421512 - DNA, 25 bp, Homo sapien
tggagcgaggtgttttcccctggac

SEQ ID NO: 1421513 - DNA, 25 bp, Homo sapien
gagcgaggtgttttcccctggacaa

SEQ ID NO: 1421514 - DNA, 25 bp, Homo sapien
ggagcgaggtgttttcccctggaca

SEQ ID NO: 1421515 - DNA, 25 bp, Homo sapien
ctggagcgaggtgttttcccctgga

SEQ ID NO: 1421516 - DNA, 25 bp, Homo sapien
cagtgtccttcgcaggagataacgg

SEQ ID NO: 1421517 - DNA, 25 bp, Homo sapien
tctatgcccaggagcttcaagggtc

SEQ ID NO: 1421518 - DNA, 25 bp, Homo sapien
tgaaggttctgggtcggccagcgga

SEQ ID NO: 1421519 - DNA, 25 bp, Homo sapien
gataacgggaaaggctctatgccca

SEQ ID NO: 1421520 - DNA, 25 bp, Homo sapien
tcagtcatcagaggaaggagcagcc

SEQ ID NO: 1421521 - DNA, 25 bp, Homo sapien
ccatgatgcttcgatggaaggctga

SEQ ID NO: 1421522 - DNA, 25 bp, Homo sapien
ttggcatggacacccccggattgtc

SEQ ID NO: 1421523 - DNA, 25 bp, Homo sapien
aaggccatgatgcttcgatggaagg

SEQ ID NO: 1421524 - DNA, 25 bp, Homo sapien
cggattgtctgggaccatctgagga

SEQ ID NO: 1421525 - DNA, 25 bp, Homo sapien
gaggatggttgaggaggaagacagc

SEQ ID NO: 1421526 - DNA, 25 bp, Homo sapien
gaggaggaggatggttgaggaggaa

SEQ ID NO: 1421527 - DNA, 25 bp, Homo sapien
aggaggatggttgaggaggaagaca

SEQ ID NO: 1421528 - DNA, 25 bp, Homo sapien
ggaggaggatggttgaggaggaaga

SEQ ID NO: 1421529 - DNA, 25 bp, Homo sapien
tcggaggggctatcctaacaatgcc

SEQ ID NO: 1421530 - DNA, 25 bp, Homo sapien
gggctatcctaacaatgcccaagtt

SEQ ID NO: 1421531 - DNA, 25 bp, Homo sapien
ggaggggctatcctaacaatgccca

SEQ ID NO: 1421532 - DNA, 25 bp, Homo sapien
gaggggctatcctaacaatgcccaa

SEQ ID NO: 1421533 - DNA, 25 bp, Homo sapien
tttgcactggttggccgagtagacc

SEQ ID NO: 1421534 - DNA, 25 bp, Homo sapien
ttgttccagagtccatagatcaggg

SEQ ID NO: 1421535 - DNA, 25 bp, Homo sapien
gagtagaccacaccctgaaaggcat

SEQ ID NO: 1421536 - DNA, 25 bp, Homo sapien
cacatgcccagtagttctttgcgaa

SEQ ID NO: 1421537 - DNA, 25 bp, Homo sapien
ccagtgtgacatgacactgatttct

SEQ ID NO: 1421538 - DNA, 25 bp, Homo sapien
gttccagtgtgacatgacactgatt

SEQ ID NO: 1421539 - DNA, 25 bp, Homo sapien
agggagttccagtgtgacatgacac

SEQ ID NO: 1421540 - DNA, 25 bp, Homo sapien
gagttccagtgtgacatgacactga

SEQ ID NO: 1421541 - DNA, 25 bp, Homo sapien
gcagcgatgatagaggtgaccacca

SEQ ID NO: 1421542 - DNA, 25 bp, Homo sapien
ccagcagcttggcagcgatgataga

SEQ ID NO: 1421543 - DNA, 25 bp, Homo sapien
gaaaatatgagaactatttccacag

SEQ ID NO: 1421544 - DNA, 25 bp, Homo sapien
tatgagaactatttccacagacctg

SEQ ID NO: 1421545 - DNA, 25 bp, Homo sapien
cccctgggtatacgtggcaacgtct

SEQ ID NO: 1421546 - DNA, 25 bp, Homo sapien
gaggccaggatgctgttgtatatcc

SEQ ID NO: 1421547 - DNA, 25 bp, Homo sapien
tacaatgacaaagcgtccaggctcg

SEQ ID NO: 1421548 - DNA, 25 bp, Homo sapien
tagctaaggttctcagctgggaacc

SEQ ID NO: 1421549 - DNA, 25 bp, Homo sapien
tcctggagctatccctgcagatgac

SEQ ID NO: 1421550 - DNA, 25 bp, Homo sapien
ctcaactgtaaacccctggtgggca

SEQ ID NO: 1421551 - DNA, 25 bp, Homo sapien
tagaccccagatttaagcaagcagc

SEQ ID NO: 1421552 - DNA, 25 bp, Homo sapien
tacttttgtgttaaatcggcgccca

SEQ ID NO: 1421553 - DNA, 25 bp, Homo sapien
gatgaacgcagtggccattagcaaa

SEQ ID NO: 1421554 - DNA, 25 bp, Homo sapien
gctgccaaagcccacaagacttgta

SEQ ID NO: 1421555 - DNA, 25 bp, Homo sapien
taaatctgacagcataatgcgggac

SEQ ID NO: 1421556 - DNA, 25 bp, Homo sapien
tgaagcccaacctgtgcctgtgatg

SEQ ID NO: 1421557 - DNA, 25 bp, Homo sapien
gagggtgttccctgttcgggctgca

SEQ ID NO: 1421558 - DNA, 25 bp, Homo sapien
agggcgggagcagccgagtttccaa

SEQ ID NO: 1421559 - DNA, 25 bp, Homo sapien
ccgtgcatcagctacgttgagggcg

SEQ ID NO: 1421560 - DNA, 25 bp, Homo sapien
ctctccccggtgtcactgcctgtat

SEQ ID NO: 1421561 - DNA, 25 bp, Homo sapien
ggcaatgaccccgagggttagcatg

SEQ ID NO: 1421562 - DNA, 25 bp, Homo sapien
atgaccccgagggttagcatgctgg

SEQ ID NO: 1421563 - DNA, 25 bp, Homo sapien
tcgatggcaatgaccccgagggtta

SEQ ID NO: 1421564 - DNA, 25 bp, Homo sapien
cggtcgatggcaatgaccccgaggg

SEQ ID NO: 1421565 - DNA, 25 bp, Homo sapien
gaagttgcaccacactacaccaaag

SEQ ID NO: 1421566 - DNA, 25 bp, Homo sapien
ggcagagaagttgcaccacactaca

SEQ ID NO: 1421567 - DNA, 25 bp, Homo sapien
gatggagctcgtcaccacaaaaggc

SEQ ID NO: 1421568 - DNA, 25 bp, Homo sapien
tacaccaaagatccattccctgcgg

SEQ ID NO: 1421569 - DNA, 25 bp, Homo sapien
tcaggctgaagacgaacttgttgct

SEQ ID NO: 1421570 - DNA, 25 bp, Homo sapien
tcccaggcagacaaaaatggtgatg

SEQ ID NO: 1421571 - DNA, 25 bp, Homo sapien
gacttcttgtacaaggtgaccacga

SEQ ID NO: 1421572 - DNA, 25 bp, Homo sapien
gatgacaatgatggcgatgaactgg

SEQ ID NO: 1421573 - DNA, 25 bp, Homo sapien
ggtcagtgcacctcggcgtggggtg

SEQ ID NO: 1421574 - DNA, 25 bp, Homo sapien
gtcagtgcacctcggcgtggggtgg

SEQ ID NO: 1421575 - DNA, 25 bp, Homo sapien
tatacctattggactgtagggcaat

SEQ ID NO: 1421576 - DNA, 25 bp, Homo sapien
taaccacgcttatgttgggaaccaa

SEQ ID NO: 1421577 - DNA, 25 bp, Homo sapien
taaacataaacttgactgtagacag

SEQ ID NO: 1421578 - DNA, 25 bp, Homo sapien
tactgtgggagataaacgatacaaa

SEQ ID NO: 1421579 - DNA, 25 bp, Homo sapien
gaatgtggacctaagagctgcccac

SEQ ID NO: 1421580 - DNA, 25 bp, Homo sapien
cagtctctgccaggaggtctggagt

SEQ ID NO: 1421581 - DNA, 25 bp, Homo sapien
gtctggagtagcgaaggcacaagcc

SEQ ID NO: 1421582 - DNA, 25 bp, Homo sapien
cccagagttggcttgcagtctttaa

SEQ ID NO: 1421583 - DNA, 25 bp, Homo sapien
gatcgcgccatctgcctaagcaaca

SEQ ID NO: 1421584 - DNA, 25 bp, Homo sapien
atcgcgccatctgcctaagcaacag

SEQ ID NO: 1421585 - DNA, 25 bp, Homo sapien
tctgaattcgccaatgggagagacc

SEQ ID NO: 1421586 - DNA, 25 bp, Homo sapien
ggtgctctccacagatacatgatca

SEQ ID NO: 1421587 - DNA, 25 bp, Homo sapien
gagtcagaaccccagatggcctatg

SEQ ID NO: 1421588 - DNA, 25 bp, Homo sapien
ctgggtttgaggttcctctccagct

SEQ ID NO: 1421589 - DNA, 25 bp, Homo sapien
ctgagcaacaagaatgaagctctgt

SEQ ID NO: 1421590 - DNA, 25 bp, Homo sapien
cctgagcaacaagaatgaagctctg

SEQ ID NO: 1421591 - DNA, 25 bp, Homo sapien
gcctgagcaacaagaatgaagctct

SEQ ID NO: 1421592 - DNA, 25 bp, Homo sapien
agcattttctccagctgaagtgaca

SEQ ID NO: 1421593 - DNA, 25 bp, Homo sapien
agcagctttctgtaactgagcattt

SEQ ID NO: 1421594 - DNA, 25 bp, Homo sapien
tgagcattttctccagctgaagtga

SEQ ID NO: 1421595 - DNA, 25 bp, Homo sapien
actgagcattttctccagctgaagt

SEQ ID NO: 1421596 - DNA, 25 bp, Homo sapien
cccacccttttcacacaccacatcc

SEQ ID NO: 1421597 - DNA, 25 bp, Homo sapien
acccacccttttcacacaccacatc

SEQ ID NO: 1421598 - DNA, 25 bp, Homo sapien
ccacccttttcacacaccacatcca

SEQ ID NO: 1421599 - DNA, 25 bp, Homo sapien
tttccaggcttggtgaccatattga

SEQ ID NO: 1421600 - DNA, 25 bp, Homo sapien
ttccaggcttggtgaccatattgag

SEQ ID NO: 1421601 - DNA, 25 bp, Homo sapien
tccaggcttggtgaccatattgagc

SEQ ID NO: 1421602 - DNA, 25 bp, Homo sapien
ttaggtcagttccagttcagcccat

SEQ ID NO: 1421603 - DNA, 25 bp, Homo sapien
tcctcttgctgacatttaggtcagt

SEQ ID NO: 1421604 - DNA, 25 bp, Homo sapien
ttctgtcttcctcggaacccaaaca

SEQ ID NO: 1421605 - DNA, 25 bp, Homo sapien
cctcggaacccaaacagagagctcg

SEQ ID NO: 1421606 - DNA, 25 bp, Homo sapien
tcggatatcgttgcggccttggatt

SEQ ID NO: 1421607 - DNA, 25 bp, Homo sapien
ctgcaacacaaagagaacggttcgg

SEQ ID NO: 1421608 - DNA, 25 bp, Homo sapien
ccaaaatgtcaagcgggcctcttaa

SEQ ID NO: 1421609 - DNA, 25 bp, Homo sapien
tattcttgatgttatggcagtggag

SEQ ID NO: 1421610 - DNA, 25 bp, Homo sapien
gctggtcgagttctcccctttccaa

SEQ ID NO: 1421611 - DNA, 25 bp, Homo sapien
ctttccaagaaccagccgaatctcc

SEQ ID NO: 1421612 - DNA, 25 bp, Homo sapien
ccaacagacgttctcatcccatatg

SEQ ID NO: 1421613 - DNA, 25 bp, Homo sapien
cttggcccagaaggcgccgagggct

SEQ ID NO: 1421614 - DNA, 25 bp, Homo sapien
cagagccgcccatccggcggcgccg

SEQ ID NO: 1421615 - DNA, 25 bp, Homo sapien
gggcagagccgcccatccggcggcg

SEQ ID NO: 1421616 - DNA, 25 bp, Homo sapien
gcagagccgcccatccggcggcgcc

SEQ ID NO: 1421617 - DNA, 25 bp, Homo sapien
agagccgcccatccggcggcgccgg

SEQ ID NO: 1421618 - DNA, 25 bp, Homo sapien
acaccctttgccctgagcgggacgt

SEQ ID NO: 1421619 - DNA, 25 bp, Homo sapien
ggtcctcacggattccagccgaggg

SEQ ID NO: 1421620 - DNA, 25 bp, Homo sapien
cgggacgtggagtctcttggcccca

SEQ ID NO: 1421621 - DNA, 25 bp, Homo sapien
agccgaggggcgtgaccgcttctcc

SEQ ID NO: 1421622 - DNA, 25 bp, Homo sapien
cgggcacgcacctacgccctcccat

SEQ ID NO: 1421623 - DNA, 25 bp, Homo sapien
gtcccgggcacgcacctacgccctc

SEQ ID NO: 1421624 - DNA, 25 bp, Homo sapien
gagtcccgggcacgcacctacgccc

SEQ ID NO: 1421625 - DNA, 25 bp, Homo sapien
cagagtcccgggcacgcacctacgc

SEQ ID NO: 1421626 - DNA, 25 bp, Homo sapien
tcctggtatcgcctttgctgctcac

SEQ ID NO: 1421627 - DNA, 25 bp, Homo sapien
gaaaacctttgtggtgcctaactca

SEQ ID NO: 1421628 - DNA, 25 bp, Homo sapien
tcccgccgtggacgatcctggtatc

SEQ ID NO: 1421629 - DNA, 25 bp, Homo sapien
ccgctgggacgtcgccttttccatg

SEQ ID NO: 1421630 - DNA, 25 bp, Homo sapien
gtaaacaggtcttcacactgctgcc

SEQ ID NO: 1421631 - DNA, 25 bp, Homo sapien
tctgtcccgggctctgttaatacca

SEQ ID NO: 1421632 - DNA, 25 bp, Homo sapien
taccacagtgaattcgtcccgaagc

SEQ ID NO: 1421633 - DNA, 25 bp, Homo sapien
gggcacgagcatccatctgccttct

SEQ ID NO: 1421634 - DNA, 25 bp, Homo sapien
ggaaccaaaaggccagggagcagtc

SEQ ID NO: 1421635 - DNA, 25 bp, Homo sapien
ctcggaaccaaaaggccagggagca

SEQ ID NO: 1421636 - DNA, 25 bp, Homo sapien
tcggaaccaaaaggccagggagcag

SEQ ID NO: 1421637 - DNA, 25 bp, Homo sapien
cggaaccaaaaggccagggagcagt

SEQ ID NO: 1421638 - DNA, 25 bp, Homo sapien
tgtgcattcagggatggaaattgct

SEQ ID NO: 1421639 - DNA, 25 bp, Homo sapien
tttttggagaacttattacatacat

SEQ ID NO: 1421640 - DNA, 25 bp, Homo sapien
tagaaacatgaatatggtttaccac

SEQ ID NO: 1421641 - DNA, 25 bp, Homo sapien
tttggagaacttattacatacatag

SEQ ID NO: 1421642 - DNA, 25 bp, Homo sapien
ttacatacatagaaacatgaatatg

SEQ ID NO: 1421643 - DNA, 25 bp, Homo sapien
aaaatgtgtatttgcccattgctaa

SEQ ID NO: 1421644 - DNA, 25 bp, Homo sapien
acttgttgattcagatgtcttggtc

SEQ ID NO: 1421645 - DNA, 25 bp, Homo sapien
tgtcttggtccctgaatagtcctag

SEQ ID NO: 1421646 - DNA, 25 bp, Homo sapien
taagagatgggtagaagagtatgcc

SEQ ID NO: 1421647 - DNA, 25 bp, Homo sapien
catttgatataccatcgtaggcttt

SEQ ID NO: 1421648 - DNA, 25 bp, Homo sapien
agcagggaatatggtggttccattt

SEQ ID NO: 1421649 - DNA, 25 bp, Homo sapien
tggtccagcatttgatataccatcg

SEQ ID NO: 1421650 - DNA, 25 bp, Homo sapien
cagggaatatggtggttccatttgt

SEQ ID NO: 1421651 - DNA, 25 bp, Homo sapien
tagagaccaagactttatattgcag

SEQ ID NO: 1421652 - DNA, 25 bp, Homo sapien
taccctgagacaagcatcgggaggc

SEQ ID NO: 1421653 - DNA, 25 bp, Homo sapien
atgttcgaccccaccatcctgttgt

SEQ ID NO: 1421654 - DNA, 25 bp, Homo sapien
caaagaaggcgtggtcatgaatgtg

SEQ ID NO: 1421655 - DNA, 25 bp, Homo sapien
ctgtgccaggtatgggtggctcaca

SEQ ID NO: 1421656 - DNA, 25 bp, Homo sapien
taggagttcaactgtgccaggtatg

SEQ ID NO: 1421657 - DNA, 25 bp, Homo sapien
aatgttaggagttcaactgtgccag

SEQ ID NO: 1421658 - DNA, 25 bp, Homo sapien
ctcacactgtaatgccaagactttg

SEQ ID NO: 1421659 - DNA, 25 bp, Homo sapien
gtcctactgtggctaagaactctga

SEQ ID NO: 1421660 - DNA, 25 bp, Homo sapien
cagggccaactggtccactagggct

SEQ ID NO: 1421661 - DNA, 25 bp, Homo sapien
tctgtcactgctaaaccaaaggaag

SEQ ID NO: 1421662 - DNA, 25 bp, Homo sapien
gattagtgccctgtcttgtcagcca

SEQ ID NO: 1421663 - DNA, 25 bp, Homo sapien
tgattgtttaggacgtcaccctgtt

SEQ ID NO: 1421664 - DNA, 25 bp, Homo sapien
tctcaatggacgcagtgacgcaatg

SEQ ID NO: 1421665 - DNA, 25 bp, Homo sapien
ccatggcctgtaggttgggaacctc

SEQ ID NO: 1421666 - DNA, 25 bp, Homo sapien
ggttttaagattcacatggcatgca

SEQ ID NO: 1421667 - DNA, 25 bp, Homo sapien
cagcttgaagattttgtgctgtagc

SEQ ID NO: 1421668 - DNA, 25 bp, Homo sapien
tcttcgtagttgacataatcttact

SEQ ID NO: 1421669 - DNA, 25 bp, Homo sapien
tattttgtcttcgtagttgacataa

SEQ ID NO: 1421670 - DNA, 25 bp, Homo sapien
cttgttcttctagcaaaagacggtg

SEQ ID NO: 1421671 - DNA, 25 bp, Homo sapien
aaatgacgcaatttatctactgtgc

SEQ ID NO: 1421672 - DNA, 25 bp, Homo sapien
cagttttgaggcacctggacttact

SEQ ID NO: 1421673 - DNA, 25 bp, Homo sapien
ctgtaaatgacgcaatttatctact

SEQ ID NO: 1421674 - DNA, 25 bp, Homo sapien
tgatcatgatcatgtagagcaacat

SEQ ID NO: 1421675 - DNA, 25 bp, Homo sapien
tataatgggctatcgtttttgttga

SEQ ID NO: 1421676 - DNA, 25 bp, Homo sapien
gattccatttcgtcagtctttgcct

SEQ ID NO: 1421677 - DNA, 25 bp, Homo sapien
actataatgggctatcgtttttgtt

SEQ ID NO: 1421678 - DNA, 25 bp, Homo sapien
gtatgattccatttcgtcagtcttt

SEQ ID NO: 1421679 - DNA, 25 bp, Homo sapien
atttttactgtaagtcactcagtga

SEQ ID NO: 1421680 - DNA, 25 bp, Homo sapien
gtaagtcactcagtgattatcttta

SEQ ID NO: 1421681 - DNA, 25 bp, Homo sapien
ttgtagtacactagtctttttcatt

SEQ ID NO: 1421682 - DNA, 25 bp, Homo sapien
gtttttgatattctgtgatatttct

SEQ ID NO: 1421683 - DNA, 25 bp, Homo sapien
tcattgcaagatgtcagtgagacgt

SEQ ID NO: 1421684 - DNA, 25 bp, Homo sapien
tagggcttggcataagtagagtctc

SEQ ID NO: 1421685 - DNA, 25 bp, Homo sapien
tagagtctcagtagggtaggtgtta

SEQ ID NO: 1421686 - DNA, 25 bp, Homo sapien
tgtgggacatgaggccaaggtacct

SEQ ID NO: 1421687 - DNA, 25 bp, Homo sapien
ttgggagtgaggacattcaaaagcc

SEQ ID NO: 1421688 - DNA, 25 bp, Homo sapien
taaatggactagctacctggacata

SEQ ID NO: 1421689 - DNA, 25 bp, Homo sapien
tcccaagggagagctatggtttaca

SEQ ID NO: 1421690 - DNA, 25 bp, Homo sapien
tctatgggactgtctacgccaggct

SEQ ID NO: 1421691 - DNA, 25 bp, Homo sapien
cacgggtgtgtttatagccagtctg

SEQ ID NO: 1421692 - DNA, 25 bp, Homo sapien
cccagtattcaagttggtgttcacg

SEQ ID NO: 1421693 - DNA, 25 bp, Homo sapien
gaatgttcatcgaaattaatgcccc

SEQ ID NO: 1421694 - DNA, 25 bp, Homo sapien
tcatcgaaattaatgcccctgctca

SEQ ID NO: 1421695 - DNA, 25 bp, Homo sapien
cgtttgccccgttgtccaactggat

SEQ ID NO: 1421696 - DNA, 25 bp, Homo sapien
ctgaaccatcatcctggatagctga

SEQ ID NO: 1421697 - DNA, 25 bp, Homo sapien
tggataccttctcccttaatagcca

SEQ ID NO: 1421698 - DNA, 25 bp, Homo sapien
ggagaattgtcctgccgtttgcccc

SEQ ID NO: 1421699 - DNA, 25 bp, Homo sapien
tatcattgcagttttagtagatgtg

SEQ ID NO: 1421700 - DNA, 25 bp, Homo sapien
catccttgtacagggaccatgttaa

SEQ ID NO: 1421701 - DNA, 25 bp, Homo sapien
ccttgtacagggaccatgttaatct

SEQ ID NO: 1421702 - DNA, 25 bp, Homo sapien
tgcagttttagtagatgtgctgccg

SEQ ID NO: 1421703 - DNA, 25 bp, Homo sapien
gacagtatatggacctcaggcagat

SEQ ID NO: 1421704 - DNA, 25 bp, Homo sapien
gccagccgaggagctttctaattga

SEQ ID NO: 1421705 - DNA, 25 bp, Homo sapien
cagatgttaagatagggccagccga

SEQ ID NO: 1421706 - DNA, 25 bp, Homo sapien
gtggatgatcgagcccactgtgtaa

SEQ ID NO: 1421707 - DNA, 25 bp, Homo sapien
tatctctgctttggttgggatgttg

SEQ ID NO: 1421708 - DNA, 25 bp, Homo sapien
ggctggtgggtccttgattgggagt

SEQ ID NO: 1421709 - DNA, 25 bp, Homo sapien
tctgctttggttgggatgttggact

SEQ ID NO: 1421710 - DNA, 25 bp, Homo sapien
ctttggttgggatgttggactgtca

SEQ ID NO: 1421711 - DNA, 25 bp, Homo sapien
tccttgggaagctgaacaatcaggc

SEQ ID NO: 1421712 - DNA, 25 bp, Homo sapien
cagactcttctgggtttaaataaca

SEQ ID NO: 1421713 - DNA, 25 bp, Homo sapien
tataaggtgccaggtcagactcttc

SEQ ID NO: 1421714 - DNA, 25 bp, Homo sapien
tctggggcttgcaactccttgggaa

SEQ ID NO: 1421715 - DNA, 25 bp, Homo sapien
tgcccagtctctcagtactcctggt

SEQ ID NO: 1421716 - DNA, 25 bp, Homo sapien
tctcagtactcctggtcttgggaag

SEQ ID NO: 1421717 - DNA, 25 bp, Homo sapien
cagtactcctggtcttgggaaggtg

SEQ ID NO: 1421718 - DNA, 25 bp, Homo sapien
gtctctcagtactcctggtcttggg

SEQ ID NO: 1421719 - DNA, 25 bp, Homo sapien
gaatgatcgccatggtatgccacat

SEQ ID NO: 1421720 - DNA, 25 bp, Homo sapien
gggatctttcagcatgaggacatgc

SEQ ID NO: 1421721 - DNA, 25 bp, Homo sapien
tatgccacattgaggtaaactgagg

SEQ ID NO: 1421722 - DNA, 25 bp, Homo sapien
cctcctgttcatggtctacatagag

SEQ ID NO: 1421723 - DNA, 25 bp, Homo sapien
ccaaagttgggagggcttctactgc

SEQ ID NO: 1421724 - DNA, 25 bp, Homo sapien
tcctgcaagtgccacactgtgtgca

SEQ ID NO: 1421725 - DNA, 25 bp, Homo sapien
tgcattattggtcagacactgtggc

SEQ ID NO: 1421726 - DNA, 25 bp, Homo sapien
tctgaaatctcggagacagcccagc

SEQ ID NO: 1421727 - DNA, 25 bp, Homo sapien
ctcacttgtccttgtcctccttgta

SEQ ID NO: 1421728 - DNA, 25 bp, Homo sapien
ttgtagccttccgccaaatgctcac

SEQ ID NO: 1421729 - DNA, 25 bp, Homo sapien
cttgtagccttccgccaaatgctca

SEQ ID NO: 1421730 - DNA, 25 bp, Homo sapien
tctcacttgtccttgtcctccttgt

SEQ ID NO: 1421731 - DNA, 25 bp, Homo sapien
cacatcagggcctctaggagtgaaa

SEQ ID NO: 1421732 - DNA, 25 bp, Homo sapien
gctttgtccctattctcgtctccag

SEQ ID NO: 1421733 - DNA, 25 bp, Homo sapien
ctgtcttttcccttgcaggaaggga

SEQ ID NO: 1421734 - DNA, 25 bp, Homo sapien
tctcccatcggctgttctgggcctg

SEQ ID NO: 1421735 - DNA, 25 bp, Homo sapien
tccgaatgccgtgggcacacacgct

SEQ ID NO: 1421736 - DNA, 25 bp, Homo sapien
ccgaatgccgtgggcacacacgctg

SEQ ID NO: 1421737 - DNA, 25 bp, Homo sapien
gatccgaatgccgtgggcacacacg

SEQ ID NO: 1421738 - DNA, 25 bp, Homo sapien
atccgaatgccgtgggcacacacgc

SEQ ID NO: 1421739 - DNA, 25 bp, Homo sapien
tacccgtgagggttctggaaatatc

SEQ ID NO: 1421740 - DNA, 25 bp, Homo sapien
tctggaaatatcacagaggtgggca

SEQ ID NO: 1421741 - DNA, 25 bp, Homo sapien
gcccattacccgtgagggttctgga

SEQ ID NO: 1421742 - DNA, 25 bp, Homo sapien
ggtgggcaccattagatgccaacat

SEQ ID NO: 1421743 - DNA, 25 bp, Homo sapien
tttcccctgcacatcgtatgtgcag

SEQ ID NO: 1421744 - DNA, 25 bp, Homo sapien
ttcccctgcacatcgtatgtgcagt

SEQ ID NO: 1421745 - DNA, 25 bp, Homo sapien
ccctgcacatcgtatgtgcagtacc

SEQ ID NO: 1421746 - DNA, 25 bp, Homo sapien
tcccctgcacatcgtatgtgcagta

SEQ ID NO: 1421747 - DNA, 25 bp, Homo sapien
gactgggatgtctcaaaatggctta

SEQ ID NO: 1421748 - DNA, 25 bp, Homo sapien
ttgaatgccccagaatgagcagctg

SEQ ID NO: 1421749 - DNA, 25 bp, Homo sapien
tagtgccggcatcactttgaaagca

SEQ ID NO: 1421750 - DNA, 25 bp, Homo sapien
tccttaaagggtacacactccagcc

SEQ ID NO: 1421751 - DNA, 25 bp, Homo sapien
tactcgcagtgcagttcagatgagg

SEQ ID NO: 1421752 - DNA, 25 bp, Homo sapien
tatattaccgacagggaagagtcct

SEQ ID NO: 1421753 - DNA, 25 bp, Homo sapien
cactggaggtgcaatggtgagcaaa

SEQ ID NO: 1421754 - DNA, 25 bp, Homo sapien
caatgagaccatagggtagggaact

SEQ ID NO: 1421755 - DNA, 25 bp, Homo sapien
gctacaatgttcagtgggttaggct

SEQ ID NO: 1421756 - DNA, 25 bp, Homo sapien
ccaaatgtaggctgagggaagtgtc

SEQ ID NO: 1421757 - DNA, 25 bp, Homo sapien
tgtgagtaaacatgctcagatgcag

SEQ ID NO: 1421758 - DNA, 25 bp, Homo sapien
gatcacgttttaaggtaggctagcc

SEQ ID NO: 1421759 - DNA, 25 bp, Homo sapien
tacttgtaacagtaatgaaaaaaga

SEQ ID NO: 1421760 - DNA, 25 bp, Homo sapien
ttgtaacagtaatgaaaaaagagac

SEQ ID NO: 1421761 - DNA, 25 bp, Homo sapien
ttggtacttgtaacagtaatgaaaa

SEQ ID NO: 1421762 - DNA, 25 bp, Homo sapien
tggtacttgtaacagtaatgaaaaa

SEQ ID NO: 1421763 - DNA, 25 bp, Homo sapien
cttgtgcatcttgtagctgggttct

SEQ ID NO: 1421764 - DNA, 25 bp, Homo sapien
ctggcctccaattgctctgctgatg

SEQ ID NO: 1421765 - DNA, 25 bp, Homo sapien
tcaaattggtcagagcccagcatct

SEQ ID NO: 1421766 - DNA, 25 bp, Homo sapien
catgttctccgatggctttgtccac

SEQ ID NO: 1421767 - DNA, 25 bp, Homo sapien
agtgtgtggagtaaagtcttctgat

SEQ ID NO: 1421768 - DNA, 25 bp, Homo sapien
gtggagtaaagtcttctgatttctg

SEQ ID NO: 1421769 - DNA, 25 bp, Homo sapien
gtgtggagtaaagtcttctgatttc

SEQ ID NO: 1421770 - DNA, 25 bp, Homo sapien
ctgaagtgtgtggagtaaagtcttc

SEQ ID NO: 1421771 - DNA, 25 bp, Homo sapien
tccaaaaagattgagccctgaacaa

SEQ ID NO: 1421772 - DNA, 25 bp, Homo sapien
attaacatccaaaaagattgagccc

SEQ ID NO: 1421773 - DNA, 25 bp, Homo sapien
atcagagagaccaaaggtcgaggag

SEQ ID NO: 1421774 - DNA, 25 bp, Homo sapien
gaccaaaggtcgaggaggatatata

SEQ ID NO: 1421775 - DNA, 25 bp, Homo sapien
atttcggcagccagacttgattctg

SEQ ID NO: 1421776 - DNA, 25 bp, Homo sapien
tgtggggaacccatgatttcggcag

SEQ ID NO: 1421777 - DNA, 25 bp, Homo sapien
gttttctaccacagaacagcaaggg

SEQ ID NO: 1421778 - DNA, 25 bp, Homo sapien
tgtgcaggatgagaagtatggacta

SEQ ID NO: 1421779 - DNA, 25 bp, Homo sapien
atctccgtttttgttgtcatgtagg

SEQ ID NO: 1421780 - DNA, 25 bp, Homo sapien
tttgttgtcatgtaggatacaagat

SEQ ID NO: 1421781 - DNA, 25 bp, Homo sapien
ccgtttttgttgtcatgtaggatac

SEQ ID NO: 1421782 - DNA, 25 bp, Homo sapien
agatctcctagaaagtggattggct

SEQ ID NO: 1421783 - DNA, 25 bp, Homo sapien
tgatttccacggataccctgtgaag

SEQ ID NO: 1421784 - DNA, 25 bp, Homo sapien
gggcattcaactgcacgagttgctt

SEQ ID NO: 1421785 - DNA, 25 bp, Homo sapien
aactgcacgagttgcttggtagctc

SEQ ID NO: 1421786 - DNA, 25 bp, Homo sapien
tctttgagccagaatctgaaggtga

SEQ ID NO: 1421787 - DNA, 25 bp, Homo sapien
caaaaaaatgtatctccatcctcag

SEQ ID NO: 1421788 - DNA, 25 bp, Homo sapien
gactgattatcacttgctgttcaag

SEQ ID NO: 1421789 - DNA, 25 bp, Homo sapien
ctgggactttctgattggagactga

SEQ ID NO: 1421790 - DNA, 25 bp, Homo sapien
gaacgtcattccagttgagtttgat

SEQ ID NO: 1421791 - DNA, 25 bp, Homo sapien
tgttgttccaaatgcagtctcagca

SEQ ID NO: 1421792 - DNA, 25 bp, Homo sapien
catcactattggttgttctgggacc

SEQ ID NO: 1421793 - DNA, 25 bp, Homo sapien
cagcagtgaccctagtatctgagta

SEQ ID NO: 1421794 - DNA, 25 bp, Homo sapien
gctggctgcagtccatcactattgg

SEQ ID NO: 1421795 - DNA, 25 bp, Homo sapien
tatttgtttctatgcacgtttgttc

SEQ ID NO: 1421796 - DNA, 25 bp, Homo sapien
atttgtttctatgcacgtttgttct

SEQ ID NO: 1421797 - DNA, 25 bp, Homo sapien
tttgtttctatgcacgtttgttctt

SEQ ID NO: 1421798 - DNA, 25 bp, Homo sapien
tccagctctattgatgaatgcatcc

SEQ ID NO: 1421799 - DNA, 25 bp, Homo sapien
tcctatggtggttggtgcttccagc

SEQ ID NO: 1421800 - DNA, 25 bp, Homo sapien
cacacacaattgtgctcaaaatgtc

SEQ ID NO: 1421801 - DNA, 25 bp, Homo sapien
tgaatgcatcccacacacaattgtg

SEQ ID NO: 1421802 - DNA, 25 bp, Homo sapien
cagtgtttggcaggtacttgtcatt

SEQ ID NO: 1421803 - DNA, 25 bp, Homo sapien
aacagtgtttggcaggtacttgtca

SEQ ID NO: 1421804 - DNA, 25 bp, Homo sapien
caggagagaggttttcacaacagtg

SEQ ID NO: 1421805 - DNA, 25 bp, Homo sapien
gagaggttttcacaacagtgtttgg

SEQ ID NO: 1421806 - DNA, 25 bp, Homo sapien
cagtgctggagtggtgttcgggatt

SEQ ID NO: 1421807 - DNA, 25 bp, Homo sapien
tctgtagcctgttatcattgacctg

SEQ ID NO: 1421808 - DNA, 25 bp, Homo sapien
ctttctaggccatggaacgtcacgt

SEQ ID NO: 1421809 - DNA, 25 bp, Homo sapien
gacctgatcattgaccaggtagcca

SEQ ID NO: 1421810 - DNA, 25 bp, Homo sapien
agtgctggggatagatggattcaca

SEQ ID NO: 1421811 - DNA, 25 bp, Homo sapien
gagtgctggggatagatggattcac

SEQ ID NO: 1421812 - DNA, 25 bp, Homo sapien
gtgctggggatagatggattcacag

SEQ ID NO: 1421813 - DNA, 25 bp, Homo sapien
cagagtgctggggatagatggattc

SEQ ID NO: 1421814 - DNA, 25 bp, Homo sapien
tgtgccttttgcttaatctgtgcat

SEQ ID NO: 1421815 - DNA, 25 bp, Homo sapien
tgtgcatatattgtatcctgagact

SEQ ID NO: 1421816 - DNA, 25 bp, Homo sapien
gactttctgacactgtagaatatgc

SEQ ID NO: 1421817 - DNA, 25 bp, Homo sapien
tgctttcttatggagaactgggtag

SEQ ID NO: 1421818 - DNA, 25 bp, Homo sapien
ggcaaaaccaggagggagatttcat

SEQ ID NO: 1421819 - DNA, 25 bp, Homo sapien
gtggcaaaaccaggagggagatttc

SEQ ID NO: 1421820 - DNA, 25 bp, Homo sapien
ttagccaagtggtggcaaaaccagg

SEQ ID NO: 1421821 - DNA, 25 bp, Homo sapien
agttagccaagtggtggcaaaacca

SEQ ID NO: 1421822 - DNA, 25 bp, Homo sapien
cctcagggaaggactattgcagcca

SEQ ID NO: 1421823 - DNA, 25 bp, Homo sapien
tgaggacacccaaccctggtagaaa

SEQ ID NO: 1421824 - DNA, 25 bp, Homo sapien
gacattcgtttggagtgaggacacc

SEQ ID NO: 1421825 - DNA, 25 bp, Homo sapien
tgggtccccagaatgaggtgctttc

SEQ ID NO: 1421826 - DNA, 25 bp, Homo sapien
ttggaccagtgacagtctgccccat

SEQ ID NO: 1421827 - DNA, 25 bp, Homo sapien
gagtatcagagctcagacatttggg

SEQ ID NO: 1421828 - DNA, 25 bp, Homo sapien
gaatgaaggctcctgaatcctgtct

SEQ ID NO: 1421829 - DNA, 25 bp, Homo sapien
catgggttggcaatgactgcatcag

SEQ ID NO: 1421830 - DNA, 25 bp, Homo sapien
cagagtctggagctatgggttccaa

SEQ ID NO: 1421831 - DNA, 25 bp, Homo sapien
cctcgagaggatagcacagataatt

SEQ ID NO: 1421832 - DNA, 25 bp, Homo sapien
ccaaagcaggattgttgcccaagca

SEQ ID NO: 1421833 - DNA, 25 bp, Homo sapien
gagtctctaagatgcaagtggttca

SEQ ID NO: 1421834 - DNA, 25 bp, Homo sapien
cagttgcagccaacacttgtgttcc

SEQ ID NO: 1421835 - DNA, 25 bp, Homo sapien
gaaatacactgagtgttcaacatgg

SEQ ID NO: 1421836 - DNA, 25 bp, Homo sapien
gaaggagacacaactctagcctgaa

SEQ ID NO: 1421837 - DNA, 25 bp, Homo sapien
gaataagctgaacaggtatcacact

SEQ ID NO: 1421838 - DNA, 25 bp, Homo sapien
ggtgttgaacaggaaagaagatact

SEQ ID NO: 1421839 - DNA, 25 bp, Homo sapien
gagaaaccagagagcttgtgtcctt

SEQ ID NO: 1421840 - DNA, 25 bp, Homo sapien
tctgaggcccttgagaagaaatagg

SEQ ID NO: 1421841 - DNA, 25 bp, Homo sapien
gacccctaagagagcagtagatgat

SEQ ID NO: 1421842 - DNA, 25 bp, Homo sapien
ttgtgatagggaagagcctctccat

SEQ ID NO: 1421843 - DNA, 25 bp, Homo sapien
cacaattttaccgttaagttgctgc

SEQ ID NO: 1421844 - DNA, 25 bp, Homo sapien
gctgcagcaccgaccaaggtgaaca

SEQ ID NO: 1421845 - DNA, 25 bp, Homo sapien
tgaatgcgccctagaggcgccagct

SEQ ID NO: 1421846 - DNA, 25 bp, Homo sapien
gtgtccttgggaatacccgtggctg

SEQ ID NO: 1421847 - DNA, 25 bp, Homo sapien
ctgagataactgcagtgccccaggt

SEQ ID NO: 1421848 - DNA, 25 bp, Homo sapien
ccttgggaatacccgtggctgctgc

SEQ ID NO: 1421849 - DNA, 25 bp, Homo sapien
gagataactgcagtgccccaggtgg

SEQ ID NO: 1421850 - DNA, 25 bp, Homo sapien
agcacagtgggccacggttgggtct

SEQ ID NO: 1421851 - DNA, 25 bp, Homo sapien
cagtgggccacggttgggtctgagc

SEQ ID NO: 1421852 - DNA, 25 bp, Homo sapien
tgcagggtgagctgctgactcactg

SEQ ID NO: 1421853 - DNA, 25 bp, Homo sapien
agggtgagctgctgactcactgctg

SEQ ID NO: 1421854 - DNA, 25 bp, Homo sapien
tactttgatgaactccgaatatggt

SEQ ID NO: 1421855 - DNA, 25 bp, Homo sapien
acttcgtgttctgttgtctactttg

SEQ ID NO: 1421856 - DNA, 25 bp, Homo sapien
ttagcaatgagacgtcgcacttttc

SEQ ID NO: 1421857 - DNA, 25 bp, Homo sapien
aaaatatcattctgggaacttcgtg

SEQ ID NO: 1421858 - DNA, 25 bp, Homo sapien
aaagtttcctgagagaattcttcct

SEQ ID NO: 1421859 - DNA, 25 bp, Homo sapien
agaaaaagtttcctgagagaattct

SEQ ID NO: 1421860 - DNA, 25 bp, Homo sapien
taataagaaaaagtttcctgagaga

SEQ ID NO: 1421861 - DNA, 25 bp, Homo sapien
ttcctgagagaattcttcctctcac

SEQ ID NO: 1421862 - DNA, 25 bp, Homo sapien
cattgaacgcttcttgtctagttga

SEQ ID NO: 1421863 - DNA, 25 bp, Homo sapien
gcttcttgtctagttgacgcataca

SEQ ID NO: 1421864 - DNA, 25 bp, Homo sapien
gtctagttgacgcatacatggcttc

SEQ ID NO: 1421865 - DNA, 25 bp, Homo sapien
cacatcattgaacgcttcttgtcta

SEQ ID NO: 1421866 - DNA, 25 bp, Homo sapien
cactcctgatgtgcacgatacatga

SEQ ID NO: 1421867 - DNA, 25 bp, Homo sapien
ttgccatatttaatgccactcctga

SEQ ID NO: 1421868 - DNA, 25 bp, Homo sapien
aataattctggcacaagatattcct

SEQ ID NO: 1421869 - DNA, 25 bp, Homo sapien
cctgatgtgcacgatacatgatagc

SEQ ID NO: 1421870 - DNA, 25 bp, Homo sapien
tagggtcctatactgtggtacaatc

SEQ ID NO: 1421871 - DNA, 25 bp, Homo sapien
ctaaagccgacatagcagcctcact

SEQ ID NO: 1421872 - DNA, 25 bp, Homo sapien
cttctgtagctgatcctaaagccga

SEQ ID NO: 1421873 - DNA, 25 bp, Homo sapien
gcctgtacactcaacacaattgctg

SEQ ID NO: 1421874 - DNA, 25 bp, Homo sapien
ctatattattttgaataactcaggg

SEQ ID NO: 1421875 - DNA, 25 bp, Homo sapien
atattattttgaataactcaggggt

SEQ ID NO: 1421876 - DNA, 25 bp, Homo sapien
tatattattttgaataactcagggg

SEQ ID NO: 1421877 - DNA, 25 bp, Homo sapien
caacaacttcggaactactctagcg

SEQ ID NO: 1421878 - DNA, 25 bp, Homo sapien
tgcagtaatgtaggcatgtagaaac

SEQ ID NO: 1421879 - DNA, 25 bp, Homo sapien
caatgccagatgtgctaaagttgtc

SEQ ID NO: 1421880 - DNA, 25 bp, Homo sapien
ctctagcgttataaggtggtacata

SEQ ID NO: 1421881 - DNA, 25 bp, Homo sapien
gcgtaatctggccttgtttcagtgc

SEQ ID NO: 1421882 - DNA, 25 bp, Homo sapien
ttttgacagagctctgttggcgtaa

SEQ ID NO: 1421883 - DNA, 25 bp, Homo sapien
aagagagagacatttttgacagagc

SEQ ID NO: 1421884 - DNA, 25 bp, Homo sapien
cagagctctgttggcgtaatctggc

SEQ ID NO: 1421885 - DNA, 25 bp, Homo sapien
cttctcagagggtccggcccagcat

SEQ ID NO: 1421886 - DNA, 25 bp, Homo sapien
tgatcaagaaactttggacacaatg

SEQ ID NO: 1421887 - DNA, 25 bp, Homo sapien
gaacaacagttcattgaggtgggag

SEQ ID NO: 1421888 - DNA, 25 bp, Homo sapien
tcatgaggagaaaaacccgttggaa

SEQ ID NO: 1421889 - DNA, 25 bp, Homo sapien
gatgacaacctcgtacatatcccct

SEQ ID NO: 1421890 - DNA, 25 bp, Homo sapien
tgctgtgtttctgggccaagggtct

SEQ ID NO: 1421891 - DNA, 25 bp, Homo sapien
gctgtgtttctgggccaagggtctt

SEQ ID NO: 1421892 - DNA, 25 bp, Homo sapien
ctgtgtttctgggccaagggtcttg

SEQ ID NO: 1421893 - DNA, 25 bp, Homo sapien
gatttgttatatggggattgtatta

SEQ ID NO: 1421894 - DNA, 25 bp, Homo sapien
ttgttatatggggattgtattagtc

SEQ ID NO: 1421895 - DNA, 25 bp, Homo sapien
tttacattcaggggtcccatgtgca

SEQ ID NO: 1421896 - DNA, 25 bp, Homo sapien
ttatatggggattgtattagtccgt

SEQ ID NO: 1421897 - DNA, 25 bp, Homo sapien
gcctgcacggttttcctggtctgtt

SEQ ID NO: 1421898 - DNA, 25 bp, Homo sapien
ccattgtccttcttgtctcctagct

SEQ ID NO: 1421899 - DNA, 25 bp, Homo sapien
tttcaaggtccacataacttctcct

SEQ ID NO: 1421900 - DNA, 25 bp, Homo sapien
gtgtatgagaacatgagctcccggg

SEQ ID NO: 1421901 - DNA, 25 bp, Homo sapien
gcctgttccaataggtgaccttgtc

SEQ ID NO: 1421902 - DNA, 25 bp, Homo sapien
tgttccaataggtgaccttgtctgg

SEQ ID NO: 1421903 - DNA, 25 bp, Homo sapien
agagcctgttccaataggtgacctt

SEQ ID NO: 1421904 - DNA, 25 bp, Homo sapien
ccaataggtgaccttgtctgggact

SEQ ID NO: 1421905 - DNA, 25 bp, Homo sapien
gagctaaagcttagtgttggccacc

SEQ ID NO: 1421906 - DNA, 25 bp, Homo sapien
ctaaagcttagtgttggccacctct

SEQ ID NO: 1421907 - DNA, 25 bp, Homo sapien
ttggagctaaagcttagtgttggcc

SEQ ID NO: 1421908 - DNA, 25 bp, Homo sapien
gctaaagcttagtgttggccacctc

SEQ ID NO: 1421909 - DNA, 25 bp, Homo sapien
tatggccagactgcttctctagatt

SEQ ID NO: 1421910 - DNA, 25 bp, Homo sapien
cgcagtgcagcaaagctatggccag

SEQ ID NO: 1421911 - DNA, 25 bp, Homo sapien
ctagattcctcctcactgggcaggg

SEQ ID NO: 1421912 - DNA, 25 bp, Homo sapien
ttcctcctcactgggcagggcatct

SEQ ID NO: 1421913 - DNA, 25 bp, Homo sapien
ctggcatcaggcgggtgcccctttg

SEQ ID NO: 1421914 - DNA, 25 bp, Homo sapien
ggcatcaggcgggtgcccctttggg

SEQ ID NO: 1421915 - DNA, 25 bp, Homo sapien
catcaggcgggtgcccctttgggat

SEQ ID NO: 1421916 - DNA, 25 bp, Homo sapien
ggctggcatcaggcgggtgcccctt

SEQ ID NO: 1421917 - DNA, 25 bp, Homo sapien
cagccattgggatgagttcctgaat

SEQ ID NO: 1421918 - DNA, 25 bp, Homo sapien
catttccatggcctaaaggtcacag

SEQ ID NO: 1421919 - DNA, 25 bp, Homo sapien
gagaatctgttcagtaccctgagag

SEQ ID NO: 1421920 - DNA, 25 bp, Homo sapien
gagagtcatttgtggaacaccagtg

SEQ ID NO: 1421921 - DNA, 25 bp, Homo sapien
gaggacttgttctccttaatattct

SEQ ID NO: 1421922 - DNA, 25 bp, Homo sapien
agagatgaggacttgttctccttaa

SEQ ID NO: 1421923 - DNA, 25 bp, Homo sapien
caataaagactattgtgaaatgaag

SEQ ID NO: 1421924 - DNA, 25 bp, Homo sapien
aataaagactattgtgaaatgaagg

SEQ ID NO: 1421925 - DNA, 25 bp, Homo sapien
agtgcattctggagattagattatg

SEQ ID NO: 1421926 - DNA, 25 bp, Homo sapien
caggtggatcttctcctggtttagt

SEQ ID NO: 1421927 - DNA, 25 bp, Homo sapien
ggtttagtgcattctggagattaga

SEQ ID NO: 1421928 - DNA, 25 bp, Homo sapien
tcctggtttagtgcattctggagat

SEQ ID NO: 1421929 - DNA, 25 bp, Homo sapien
caatattgtgggcttggtagctggt

SEQ ID NO: 1421930 - DNA, 25 bp, Homo sapien
gggcttggtagctggttttatgcca

SEQ ID NO: 1421931 - DNA, 25 bp, Homo sapien
taataaggccaatattgtgggcttg

SEQ ID NO: 1421932 - DNA, 25 bp, Homo sapien
agctggctggtgttaataaggccaa

SEQ ID NO: 1421933 - DNA, 25 bp, Homo sapien
aatgtgcatgtagctagatacactg

SEQ ID NO: 1421934 - DNA, 25 bp, Homo sapien
tgcatgtagctagatacactgggcc

SEQ ID NO: 1421935 - DNA, 25 bp, Homo sapien
tcagggccttcatgcttttgtgctg

SEQ ID NO: 1421936 - DNA, 25 bp, Homo sapien
cctcagggccttcatgcttttgtgc

SEQ ID NO: 1421937 - DNA, 25 bp, Homo sapien
tgaagtcagggctctatcagcttgg

SEQ ID NO: 1421938 - DNA, 25 bp, Homo sapien
caaaccgaacaggtgaagtcagggc

SEQ ID NO: 1421939 - DNA, 25 bp, Homo sapien
agggctctatcagcttggacttcca

SEQ ID NO: 1421940 - DNA, 25 bp, Homo sapien
tttgtttcagcaaaccgaacaggtg

SEQ ID NO: 1421941 - DNA, 25 bp, Homo sapien
atcttgctgatgcagaaagagacac

SEQ ID NO: 1421942 - DNA, 25 bp, Homo sapien
gccttccatcttgctgatgcagaaa

SEQ ID NO: 1421943 - DNA, 25 bp, Homo sapien
atggcctgctgagtcctggttccca

SEQ ID NO: 1421944 - DNA, 25 bp, Homo sapien
caggtctgccttccatcttgctgat

SEQ ID NO: 1421945 - DNA, 25 bp, Homo sapien
tgttatctgggggtaagggatgact

SEQ ID NO: 1421946 - DNA, 25 bp, Homo sapien
gagatctgggctggcagaaccgaag

SEQ ID NO: 1421947 - DNA, 25 bp, Homo sapien
gactttccatctcttcgcagtggtg

SEQ ID NO: 1421948 - DNA, 25 bp, Homo sapien
gaggaaatgggaggacagagatctg

SEQ ID NO: 1421949 - DNA, 25 bp, Homo sapien
ctgccacttcctgtcgtgcatatga

SEQ ID NO: 1421950 - DNA, 25 bp, Homo sapien
cctgtcgtgcatatgagagtttaga

SEQ ID NO: 1421951 - DNA, 25 bp, Homo sapien
tgcatatgagagtttagagagagac

SEQ ID NO: 1421952 - DNA, 25 bp, Homo sapien
tatgagagtttagagagagactgac

SEQ ID NO: 1421953 - DNA, 25 bp, Homo sapien
catggaagccaatttgatgttcgta

SEQ ID NO: 1421954 - DNA, 25 bp, Homo sapien
tgtgcagcatggaagccaatttgat

SEQ ID NO: 1421955 - DNA, 25 bp, Homo sapien
gccaatttgatgttcgtaatgtaca

SEQ ID NO: 1421956 - DNA, 25 bp, Homo sapien
tgatgttcgtaatgtacagggagag

SEQ ID NO: 1421957 - DNA, 25 bp, Homo sapien
gagtaaaacagcatacacacactca

SEQ ID NO: 1421958 - DNA, 25 bp, Homo sapien
ctgttcttgaggacacattgggctc

SEQ ID NO: 1421959 - DNA, 25 bp, Homo sapien
tcagaaagcaacttgtgtatccatc

SEQ ID NO: 1421960 - DNA, 25 bp, Homo sapien
ccatccaatgtaggagtaaaacagc

SEQ ID NO: 1421961 - DNA, 25 bp, Homo sapien
tagtggcagaatgagtgcaggcccc

SEQ ID NO: 1421962 - DNA, 25 bp, Homo sapien
catagatgaagaaatcagtgccctg

SEQ ID NO: 1421963 - DNA, 25 bp, Homo sapien
gaacttaacggaaagttggagatca

SEQ ID NO: 1421964 - DNA, 25 bp, Homo sapien
tagaaaacaagtttagccatctaat

SEQ ID NO: 1421965 - DNA, 25 bp, Homo sapien
tcaagtgttgagagtaataattatt

SEQ ID NO: 1421966 - DNA, 25 bp, Homo sapien
catcatgctgcttcaatattcctga

SEQ ID NO: 1421967 - DNA, 25 bp, Homo sapien
aatttttggtgtcactcatcaagtg

SEQ ID NO: 1421968 - DNA, 25 bp, Homo sapien
tcaatattcctgatagggggaaggg

SEQ ID NO: 1421969 - DNA, 25 bp, Homo sapien
ctgatatccttacaatgtttgtcat

SEQ ID NO: 1421970 - DNA, 25 bp, Homo sapien
tatccttacaatgtttgtcatctgg

SEQ ID NO: 1421971 - DNA, 25 bp, Homo sapien
ttgtcctttaatagagccaaatatt

SEQ ID NO: 1421972 - DNA, 25 bp, Homo sapien
gtcatctggttcgtaaatatttgca

SEQ ID NO: 1421973 - DNA, 25 bp, Homo sapien
cccttgagacttggctggacaagtt

SEQ ID NO: 1421974 - DNA, 25 bp, Homo sapien
cctgagtggttaagtaggtggctac

SEQ ID NO: 1421975 - DNA, 25 bp, Homo sapien
ggctggacaagttttgcccttatac

SEQ ID NO: 1421976 - DNA, 25 bp, Homo sapien
tttgcccttatacatcatcctgcaa

SEQ ID NO: 1421977 - DNA, 25 bp, Homo sapien
acatataagtgaatacagaagacat

SEQ ID NO: 1421978 - DNA, 25 bp, Homo sapien
tataatctcagtccatgagggtgta

SEQ ID NO: 1421979 - DNA, 25 bp, Homo sapien
cagtccatgagggtgtaaagtgaaa

SEQ ID NO: 1421980 - DNA, 25 bp, Homo sapien
catgagggtgtaaagtgaaatgagc

SEQ ID NO: 1421981 - DNA, 25 bp, Homo sapien
taaaaggtgagtataatctcagtcc

SEQ ID NO: 1421982 - DNA, 25 bp, Homo sapien
gtcacagctgtattggtcgattgct

SEQ ID NO: 1421983 - DNA, 25 bp, Homo sapien
tatttctggtgttggatttcctgtc

SEQ ID NO: 1421984 - DNA, 25 bp, Homo sapien
tattggtcgattgctgggttcctgt

SEQ ID NO: 1421985 - DNA, 25 bp, Homo sapien
tcctgttggcttggtctggatcatg

SEQ ID NO: 1421986 - DNA, 25 bp, Homo sapien
gcacagacttttaggccacgtttgg

SEQ ID NO: 1421987 - DNA, 25 bp, Homo sapien
tcagcacagacttttaggccacgtt

SEQ ID NO: 1421988 - DNA, 25 bp, Homo sapien
cacagacttttaggccacgtttggt

SEQ ID NO: 1421989 - DNA, 25 bp, Homo sapien
gatcagcacagacttttaggccacg

SEQ ID NO: 1421990 - DNA, 25 bp, Homo sapien
tctcaaggagccttccgtgatggtg

SEQ ID NO: 1421991 - DNA, 25 bp, Homo sapien
gagccttccgtgatggtgtaggtct

SEQ ID NO: 1421992 - DNA, 25 bp, Homo sapien
tcaaggagccttccgtgatggtgta

SEQ ID NO: 1421993 - DNA, 25 bp, Homo sapien
tgctctcaaggagccttccgtgatg

SEQ ID NO: 1421994 - DNA, 25 bp, Homo sapien
ctatgtgagacttcactccctacac

SEQ ID NO: 1421995 - DNA, 25 bp, Homo sapien
tgaggctcacacaggtcctcctatg

SEQ ID NO: 1421996 - DNA, 25 bp, Homo sapien
caggtcctcctatgtgagacttcac

SEQ ID NO: 1421997 - DNA, 25 bp, Homo sapien
cacacaggtcctcctatgtgagact

SEQ ID NO: 1421998 - DNA, 25 bp, Homo sapien
gttccagctgcaaagagctatcctc

SEQ ID NO: 1421999 - DNA, 25 bp, Homo sapien
tccagctgcaaagagctatcctcta

SEQ ID NO: 1422000 - DNA, 25 bp, Homo sapien
gctgcaaagagctatcctctataag

SEQ ID NO: 1422001 - DNA, 25 bp, Homo sapien
tgcaaagagctatcctctataagca

SEQ ID NO: 1422002 - DNA, 25 bp, Homo sapien
tgagcaggggttaacatcatcacca

SEQ ID NO: 1422003 - DNA, 25 bp, Homo sapien
gttctttgagcaggggttaacatca

SEQ ID NO: 1422004 - DNA, 25 bp, Homo sapien
ctttgagcaggggttaacatcatca

SEQ ID NO: 1422005 - DNA, 25 bp, Homo sapien
tgttctttgagcaggggttaacatc

SEQ ID NO: 1422006 - DNA, 25 bp, Homo sapien
aaacaagaagtctcagctggtagtg

SEQ ID NO: 1422007 - DNA, 25 bp, Homo sapien
acaagaagtctcagctggtagtgat

SEQ ID NO: 1422008 - DNA, 25 bp, Homo sapien
gaaaacaagaagtctcagctggtag

SEQ ID NO: 1422009 - DNA, 25 bp, Homo sapien
ctggaaaacaagaagtctcagctgg

SEQ ID NO: 1422010 - DNA, 25 bp, Homo sapien
caatgtatgcagtgagagagcagat

SEQ ID NO: 1422011 - DNA, 25 bp, Homo sapien
cacaatgtatgcagtgagagagcag

SEQ ID NO: 1422012 - DNA, 25 bp, Homo sapien
atgtatgcagtgagagagcagatgc

SEQ ID NO: 1422013 - DNA, 25 bp, Homo sapien
gtatgcagtgagagagcagatgcca

SEQ ID NO: 1422014 - DNA, 25 bp, Homo sapien
ggagagtgaggatcgggctctttga

SEQ ID NO: 1422015 - DNA, 25 bp, Homo sapien
gagagtgaggatcgggctctttgag

SEQ ID NO: 1422016 - DNA, 25 bp, Homo sapien
acggaagctgtaaaggaaatgaggt

SEQ ID NO: 1422017 - DNA, 25 bp, Homo sapien
gtggggtggtcactgtgttccatcc

SEQ ID NO: 1422018 - DNA, 25 bp, Homo sapien
cacggaagctgtaaaggaaatgagg

SEQ ID NO: 1422019 - DNA, 25 bp, Homo sapien
gggtggtcactgtgttccatcccac

SEQ ID NO: 1422020 - DNA, 25 bp, Homo sapien
tgccacactgagcttctcgatcctt

SEQ ID NO: 1422021 - DNA, 25 bp, Homo sapien
ttgactctctcaggaggggaagaga

SEQ ID NO: 1422022 - DNA, 25 bp, Homo sapien
cacactgagcttctcgatcctttgc

SEQ ID NO: 1422023 - DNA, 25 bp, Homo sapien
tgagcttctcgatcctttgctttct

SEQ ID NO: 1422024 - DNA, 25 bp, Homo sapien
gttgtggaagcctcatgtcacactg

SEQ ID NO: 1422025 - DNA, 25 bp, Homo sapien
tcccctcctgagagagtcaaagggt

SEQ ID NO: 1422026 - DNA, 25 bp, Homo sapien
tgtcacactggatgtcacatgaggt

SEQ ID NO: 1422027 - DNA, 25 bp, Homo sapien
ggatcgagaagctcagtgtggcagc

SEQ ID NO: 1422028 - DNA, 25 bp, Homo sapien
ttttggactcgggacattgcagatc

SEQ ID NO: 1422029 - DNA, 25 bp, Homo sapien
ttggactcgggacattgcagatctc

SEQ ID NO: 1422030 - DNA, 25 bp, Homo sapien
gattttggactcgggacattgcaga

SEQ ID NO: 1422031 - DNA, 25 bp, Homo sapien
agattttggactcgggacattgcag

SEQ ID NO: 1422032 - DNA, 25 bp, Homo sapien
gcttatagaggatagctctttgcag

SEQ ID NO: 1422033 - DNA, 25 bp, Homo sapien
ttgtggatcagcttaagtggctgag

SEQ ID NO: 1422034 - DNA, 25 bp, Homo sapien
tgcagctggaaccagatatagcggg

SEQ ID NO: 1422035 - DNA, 25 bp, Homo sapien
tttcacaaagcagcggaggtccctt

SEQ ID NO: 1422036 - DNA, 25 bp, Homo sapien
gcaatcgaccaatacagctgtgact

SEQ ID NO: 1422037 - DNA, 25 bp, Homo sapien
tcactttacacgctcatggactgag

SEQ ID NO: 1422038 - DNA, 25 bp, Homo sapien
gctgtgactctgactggctagtagt

SEQ ID NO: 1422039 - DNA, 25 bp, Homo sapien
gaaataacatgatccagaccaagcc

SEQ ID NO: 1422040 - DNA, 25 bp, Homo sapien
actgatatgcttagagagtcctggg

SEQ ID NO: 1422041 - DNA, 25 bp, Homo sapien
taagtacctgtgtatcttgggaaga

SEQ ID NO: 1422042 - DNA, 25 bp, Homo sapien
tcacaactgggttcataagtacctg

SEQ ID NO: 1422043 - DNA, 25 bp, Homo sapien
ctttgattctctctggcactgatat

SEQ ID NO: 1422044 - DNA, 25 bp, Homo sapien
ctttcctcatctacaacttcatcta

SEQ ID NO: 1422045 - DNA, 25 bp, Homo sapien
cctttcctcatctacaacttcatct

SEQ ID NO: 1422046 - DNA, 25 bp, Homo sapien
tttcctcatctacaacttcatctac

SEQ ID NO: 1422047 - DNA, 25 bp, Homo sapien
tcctcatctacaacttcatctacca

SEQ ID NO: 1422048 - DNA, 25 bp, Homo sapien
tcttggcaaagtagatttgatgatt

SEQ ID NO: 1422049 - DNA, 25 bp, Homo sapien
ttttggctggctttacgcggctggc

SEQ ID NO: 1422050 - DNA, 25 bp, Homo sapien
tcagtctatgaagtgaggtaattga

SEQ ID NO: 1422051 - DNA, 25 bp, Homo sapien
tacgcggctggcgattgtcgcagca

SEQ ID NO: 1422052 - DNA, 25 bp, Homo sapien
tctgtagaggccactgaagtgatgg

SEQ ID NO: 1422053 - DNA, 25 bp, Homo sapien
gagagagaaatcatgccacacgtct

SEQ ID NO: 1422054 - DNA, 25 bp, Homo sapien
ctccatggcctgataaatcctcttc

SEQ ID NO: 1422055 - DNA, 25 bp, Homo sapien
tgagatatctgtagaggccactgaa

SEQ ID NO: 1422056 - DNA, 25 bp, Homo sapien
cccaggagggaaacatgacttcttg

SEQ ID NO: 1422057 - DNA, 25 bp, Homo sapien
gaccagcagacccactttgtgttct

SEQ ID NO: 1422058 - DNA, 25 bp, Homo sapien
gcaaatggatgctgcttgtggcttc

SEQ ID NO: 1422059 - DNA, 25 bp, Homo sapien
caggacagcctaagtgctgcactaa

SEQ ID NO: 1422060 - DNA, 25 bp, Homo sapien
tgtagcaagctcagatgttccctca

SEQ ID NO: 1422061 - DNA, 25 bp, Homo sapien
ctcaggggatgagcgtgtatgttca

SEQ ID NO: 1422062 - DNA, 25 bp, Homo sapien
gttccctcaggggatgagcgtgtat

SEQ ID NO: 1422063 - DNA, 25 bp, Homo sapien
ctgctgtagcaagctcagatgttcc

SEQ ID NO: 1422064 - DNA, 25 bp, Homo sapien
tgtgagcttgagctttactctgaaa

SEQ ID NO: 1422065 - DNA, 25 bp, Homo sapien
tttgaatgtattccagattgcccat

SEQ ID NO: 1422066 - DNA, 25 bp, Homo sapien
cagattgcccatgagagccactggt

SEQ ID NO: 1422067 - DNA, 25 bp, Homo sapien
ttccagattgcccatgagagccact

SEQ ID NO: 1422068 - DNA, 25 bp, Homo sapien
tgtattccagattgcccatgagagc

SEQ ID NO: 1422069 - DNA, 25 bp, Homo sapien
catagcttcctgaattacacccagg

SEQ ID NO: 1422070 - DNA, 25 bp, Homo sapien
tctagtgtcaatagccaggacctgt

SEQ ID NO: 1422071 - DNA, 25 bp, Homo sapien
caggacctgtctaaacatcatggaa

SEQ ID NO: 1422072 - DNA, 25 bp, Homo sapien
aaacaaaccaggagtcatccatagc

SEQ ID NO: 1422073 - DNA, 25 bp, Homo sapien
aagtttctggtgtaggaaggctgaa

SEQ ID NO: 1422074 - DNA, 25 bp, Homo sapien
gaggctagttttactccataggaac

SEQ ID NO: 1422075 - DNA, 25 bp, Homo sapien
tctgaggatcatagacacccattct

SEQ ID NO: 1422076 - DNA, 25 bp, Homo sapien
tctttgttcacatagtatgaccagg

SEQ ID NO: 1422077 - DNA, 25 bp, Homo sapien
cattctcagagataaagtgtatttc

SEQ ID NO: 1422078 - DNA, 25 bp, Homo sapien
ctggtttcttcccgacctgtgttcg

SEQ ID NO: 1422079 - DNA, 25 bp, Homo sapien
cttcccgacctgtgttcgctctcat

SEQ ID NO: 1422080 - DNA, 25 bp, Homo sapien
tcttcccgacctgtgttcgctctca

SEQ ID NO: 1422081 - DNA, 25 bp, Homo sapien
gtttcttcccgacctgtgttcgctc

SEQ ID NO: 1422082 - DNA, 25 bp, Homo sapien
ggatctctggctgaccattaccctc

SEQ ID NO: 1422083 - DNA, 25 bp, Homo sapien
caaagcttcttgaagaacactctct

SEQ ID NO: 1422084 - DNA, 25 bp, Homo sapien
ttaccctctatgctagtgacgctcc

SEQ ID NO: 1422085 - DNA, 25 bp, Homo sapien
ctctcatcccatttgaactcaaagc

SEQ ID NO: 1422086 - DNA, 25 bp, Homo sapien
tttgaggaagcaagccacagtccct

SEQ ID NO: 1422087 - DNA, 25 bp, Homo sapien
tctgcgattaggaggtctgtcttgt

SEQ ID NO: 1422088 - DNA, 25 bp, Homo sapien
aaatctctggtctgcgattaggagg

SEQ ID NO: 1422089 - DNA, 25 bp, Homo sapien
tcaaagctattcctactgatggtac

SEQ ID NO: 1422090 - DNA, 25 bp, Homo sapien
ttgcacgtaacatcaaagacagctc

SEQ ID NO: 1422091 - DNA, 25 bp, Homo sapien
gtgtggactgaagttgcacgtaaca

SEQ ID NO: 1422092 - DNA, 25 bp, Homo sapien
ctgttggtggccatagagattggct

SEQ ID NO: 1422093 - DNA, 25 bp, Homo sapien
gttggtggccatagagattggcttc

SEQ ID NO: 1422094 - DNA, 25 bp, Homo sapien
ttttcttggcttcttgaggagcctc

SEQ ID NO: 1422095 - DNA, 25 bp, Homo sapien
tttcttggcttcttgaggagcctcc

SEQ ID NO: 1422096 - DNA, 25 bp, Homo sapien
tcttggcttcttgaggagcctcctc

SEQ ID NO: 1422097 - DNA, 25 bp, Homo sapien
ttggcttcttgaggagcctcctcac

SEQ ID NO: 1422098 - DNA, 25 bp, Homo sapien
tctacctgtcctaatgccttctgtt

SEQ ID NO: 1422099 - DNA, 25 bp, Homo sapien
ttccataggtttgctcaggcagtct

SEQ ID NO: 1422100 - DNA, 25 bp, Homo sapien
tttgctcaggcagtctctgctgctg

SEQ ID NO: 1422101 - DNA, 25 bp, Homo sapien
gtttctccagctcatagtgatcctt

SEQ ID NO: 1422102 - DNA, 25 bp, Homo sapien
aacaagccaaagtgccgttctggaa

SEQ ID NO: 1422103 - DNA, 25 bp, Homo sapien
ctggaaagcactgagtgtcgccgcc

SEQ ID NO: 1422104 - DNA, 25 bp, Homo sapien
aaagcatagccatgtgacattatcc

SEQ ID NO: 1422105 - DNA, 25 bp, Homo sapien
ttagaacaagccaaagtgccgttct

SEQ ID NO: 1422106 - DNA, 25 bp, Homo sapien
gacctgggaattttctcgaggctta

SEQ ID NO: 1422107 - DNA, 25 bp, Homo sapien
tcctctgcagggacctgggaatttt

SEQ ID NO: 1422108 - DNA, 25 bp, Homo sapien
cagggacctgggaattttctcgagg

SEQ ID NO: 1422109 - DNA, 25 bp, Homo sapien
ctgcagggacctgggaattttctcg

SEQ ID NO: 1422110 - DNA, 25 bp, Homo sapien
cagcggtaggccctaggttatcatc

SEQ ID NO: 1422111 - DNA, 25 bp, Homo sapien
cctaggttatcatctttagttccag

SEQ ID NO: 1422112 - DNA, 25 bp, Homo sapien
cagagccagcggtaggccctaggtt

SEQ ID NO: 1422113 - DNA, 25 bp, Homo sapien
ggtaggccctaggttatcatcttta

SEQ ID NO: 1422114 - DNA, 25 bp, Homo sapien
tatggcaaggtacgcgatccctgtg

SEQ ID NO: 1422115 - DNA, 25 bp, Homo sapien
cttcttgaccacctagagggggtgt

SEQ ID NO: 1422116 - DNA, 25 bp, Homo sapien
ggtacgcgatccctgtggttttgcc

SEQ ID NO: 1422117 - DNA, 25 bp, Homo sapien
ggtgtatggcaaggtacgcgatccc

SEQ ID NO: 1422118 - DNA, 25 bp, Homo sapien
aggaggaaagatagcgccatctctg

SEQ ID NO: 1422119 - DNA, 25 bp, Homo sapien
ttttgtaatgaagagtacaaatggt

SEQ ID NO: 1422120 - DNA, 25 bp, Homo sapien
cttttgtaatgaagagtacaaatgg

SEQ ID NO: 1422121 - DNA, 25 bp, Homo sapien
aggaggaggaaagatagcgccatct

SEQ ID NO: 1422122 - DNA, 25 bp, Homo sapien
cagaaggaaagttgatccccagggc

SEQ ID NO: 1422123 - DNA, 25 bp, Homo sapien
cacagaaggaaagttgatccccagg

SEQ ID NO: 1422124 - DNA, 25 bp, Homo sapien
agaaggaaagttgatccccagggca

SEQ ID NO: 1422125 - DNA, 25 bp, Homo sapien
acacagaaggaaagttgatccccag

SEQ ID NO: 1422126 - DNA, 25 bp, Homo sapien
cctaggaatcgtgggcaggcttcta

SEQ ID NO: 1422127 - DNA, 25 bp, Homo sapien
ggagagtttgccagtagctccccag

SEQ ID NO: 1422128 - DNA, 25 bp, Homo sapien
tcatttgagagtgatcctcacgggt

SEQ ID NO: 1422129 - DNA, 25 bp, Homo sapien
cagtgactcaaactcctttttccac

SEQ ID NO: 1422130 - DNA, 25 bp, Homo sapien
tccaaccctgttttcagctctgcct

SEQ ID NO: 1422131 - DNA, 25 bp, Homo sapien
ttccaaccctgttttcagctctgcc

SEQ ID NO: 1422132 - DNA, 25 bp, Homo sapien
tccttccaaccctgttttcagctct

SEQ ID NO: 1422133 - DNA, 25 bp, Homo sapien
caaccctgttttcagctctgcctcc

SEQ ID NO: 1422134 - DNA, 25 bp, Homo sapien
gggaacctacgtatcattcaaacag

SEQ ID NO: 1422135 - DNA, 25 bp, Homo sapien
agcatgcatggctcatgtggagcag

SEQ ID NO: 1422136 - DNA, 25 bp, Homo sapien
agtctcctcactcctggagcaaaga

SEQ ID NO: 1422137 - DNA, 25 bp, Homo sapien
gagctctgcacttggattgctaagc

SEQ ID NO: 1422138 - DNA, 25 bp, Homo sapien
tctcccctccactatgctgaacttg

SEQ ID NO: 1422139 - DNA, 25 bp, Homo sapien
taagcatgcgcactgtatatgtggt

SEQ ID NO: 1422140 - DNA, 25 bp, Homo sapien
gtgctccagaagcccggctgtaagc

SEQ ID NO: 1422141 - DNA, 25 bp, Homo sapien
tgtatatgtggtgtgcaaggaagcc

SEQ ID NO: 1422142 - DNA, 25 bp, Homo sapien
aagcagttgctatgaaacatgtgaa

SEQ ID NO: 1422143 - DNA, 25 bp, Homo sapien
tcatataaagcagttgctatgaaac

SEQ ID NO: 1422144 - DNA, 25 bp, Homo sapien
catcagtcatataaagcagttgcta

SEQ ID NO: 1422145 - DNA, 25 bp, Homo sapien
tcagtcatataaagcagttgctatg

SEQ ID NO: 1422146 - DNA, 25 bp, Homo sapien
tgtgatactagtcagaaaggcccag

SEQ ID NO: 1422147 - DNA, 25 bp, Homo sapien
ttattagaagtgtgatactagtcag

SEQ ID NO: 1422148 - DNA, 25 bp, Homo sapien
tcctttcacccagatttggtatgtg

SEQ ID NO: 1422149 - DNA, 25 bp, Homo sapien
ttggcattgcagttaccagctcagg

SEQ ID NO: 1422150 - DNA, 25 bp, Homo sapien
gtattcagtcatccggcacattatg

SEQ ID NO: 1422151 - DNA, 25 bp, Homo sapien
agtcgtattcagtcatccggcacat

SEQ ID NO: 1422152 - DNA, 25 bp, Homo sapien
catccggcacattatgaacttccac

SEQ ID NO: 1422153 - DNA, 25 bp, Homo sapien
tcagtcatccggcacattatgaact

SEQ ID NO: 1422154 - DNA, 25 bp, Homo sapien
gcagcagagaacatttggaggatct

SEQ ID NO: 1422155 - DNA, 25 bp, Homo sapien
actgaagggacacttaatctcactt

SEQ ID NO: 1422156 - DNA, 25 bp, Homo sapien
gggaactgaagggacacttaatctc

SEQ ID NO: 1422157 - DNA, 25 bp, Homo sapien
agggagagtcagaaaatgaatgtca

SEQ ID NO: 1422158 - DNA, 25 bp, Homo sapien
ccatagtgacctggatattctgttg

SEQ ID NO: 1422159 - DNA, 25 bp, Homo sapien
taattgtaggaaatcatgtccattt

SEQ ID NO: 1422160 - DNA, 25 bp, Homo sapien
tgctcctcggatatagtaatcataa

SEQ ID NO: 1422161 - DNA, 25 bp, Homo sapien
gtggttgttgctcctcggatatagt

SEQ ID NO: 1422162 - DNA, 25 bp, Homo sapien
tatagggcttggcatatgtcagcac

SEQ ID NO: 1422163 - DNA, 25 bp, Homo sapien
tccaggtagagaggagcaactgtac

SEQ ID NO: 1422164 - DNA, 25 bp, Homo sapien
gacagaggcatctacgaagggcaga

SEQ ID NO: 1422165 - DNA, 25 bp, Homo sapien
tacaaagatcagtgagtggccccat

SEQ ID NO: 1422166 - DNA, 25 bp, Homo sapien
tgagggtttggtcggctgccagact

SEQ ID NO: 1422167 - DNA, 25 bp, Homo sapien
aagctagagcacttcctaggtgcct

SEQ ID NO: 1422168 - DNA, 25 bp, Homo sapien
tcatgagggtttggtcggctgccag

SEQ ID NO: 1422169 - DNA, 25 bp, Homo sapien
ctgaagctagagcacttcctaggtg

SEQ ID NO: 1422170 - DNA, 25 bp, Homo sapien
aatatgggcacctcttgctgtagcg

SEQ ID NO: 1422171 - DNA, 25 bp, Homo sapien
gatccagcactgactcgaagtagcg

SEQ ID NO: 1422172 - DNA, 25 bp, Homo sapien
gaagtagcggctctggaatcctgcc

SEQ ID NO: 1422173 - DNA, 25 bp, Homo sapien
cagcccattgttggagcacgtctgg

SEQ ID NO: 1422174 - DNA, 25 bp, Homo sapien
ttggtctatcccctcttatgagtgg

SEQ ID NO: 1422175 - DNA, 25 bp, Homo sapien
ctatcccctcttatgagtgggcaga

SEQ ID NO: 1422176 - DNA, 25 bp, Homo sapien
catcccagccattggtctatcccct

SEQ ID NO: 1422177 - DNA, 25 bp, Homo sapien
cagccattggtctatcccctcttat

SEQ ID NO: 1422178 - DNA, 25 bp, Homo sapien
aatgagtgacccgactatgtcccat

SEQ ID NO: 1422179 - DNA, 25 bp, Homo sapien
gaagtagtattccatgcagtgtctg

SEQ ID NO: 1422180 - DNA, 25 bp, Homo sapien
tgtttaatagaagaatgagggaccg

SEQ ID NO: 1422181 - DNA, 25 bp, Homo sapien
gcagtgtctgacattgttgtccagc

SEQ ID NO: 1422182 - DNA, 25 bp, Homo sapien
gtttcagaaactggagtattgttag

SEQ ID NO: 1422183 - DNA, 25 bp, Homo sapien
tggagtattgttagccctgctccat

SEQ ID NO: 1422184 - DNA, 25 bp, Homo sapien
cagaaactggagtattgttagccct

SEQ ID NO: 1422185 - DNA, 25 bp, Homo sapien
aactggagtattgttagccctgctc

SEQ ID NO: 1422186 - DNA, 25 bp, Homo sapien
tgcacttggtctggaatctcttcag

SEQ ID NO: 1422187 - DNA, 25 bp, Homo sapien
ctgcacttggtctggaatctcttca

SEQ ID NO: 1422188 - DNA, 25 bp, Homo sapien
cagctggatcttattgtaaagaagt

SEQ ID NO: 1422189 - DNA, 25 bp, Homo sapien
gctggatcttattgtaaagaagttg

SEQ ID NO: 1422190 - DNA, 25 bp, Homo sapien
ggcagctggatcttattgtaaagaa

SEQ ID NO: 1422191 - DNA, 25 bp, Homo sapien
ggggcagctggatcttattgtaaag

SEQ ID NO: 1422192 - DNA, 25 bp, Homo sapien
ctggagggacagttgtaattaggtc

SEQ ID NO: 1422193 - DNA, 25 bp, Homo sapien
ttgccatgctccacattaggcagtg

SEQ ID NO: 1422194 - DNA, 25 bp, Homo sapien
gctcctgagaggtgaggactggagg

SEQ ID NO: 1422195 - DNA, 25 bp, Homo sapien
gacagttgtaattaggtcattgcca

SEQ ID NO: 1422196 - DNA, 25 bp, Homo sapien
ggcccacaaaggctgtccaagcagc

SEQ ID NO: 1422197 - DNA, 25 bp, Homo sapien
aaaggctgtccaagcagcctccaca

SEQ ID NO: 1422198 - DNA, 25 bp, Homo sapien
aaggctgtccaagcagcctccacag

SEQ ID NO: 1422199 - DNA, 25 bp, Homo sapien
gagaatggcccacaaaggctgtcca

SEQ ID NO: 1422200 - DNA, 25 bp, Homo sapien
ggtaaccaagtagggatcatccctc

SEQ ID NO: 1422201 - DNA, 25 bp, Homo sapien
ggctgagcccctccacagtcctggt

SEQ ID NO: 1422202 - DNA, 25 bp, Homo sapien
gccctgaatctggtcctgtggcact

SEQ ID NO: 1422203 - DNA, 25 bp, Homo sapien
tgaatctggtcctgtggcactggct

SEQ ID NO: 1422204 - DNA, 25 bp, Homo sapien
ggcgtagttccattgtctgtcagaa

SEQ ID NO: 1422205 - DNA, 25 bp, Homo sapien
ggttccccgaggctctgtggcgtgg

SEQ ID NO: 1422206 - DNA, 25 bp, Homo sapien
tggcgtgggcatgcaggcgtagttc

SEQ ID NO: 1422207 - DNA, 25 bp, Homo sapien
cattccatgccagccctgttgatct

SEQ ID NO: 1422208 - DNA, 25 bp, Homo sapien
gaagccttgccggttcaaattcacc

SEQ ID NO: 1422209 - DNA, 25 bp, Homo sapien
catcgctgtagtcatgatactgctg

SEQ ID NO: 1422210 - DNA, 25 bp, Homo sapien
tgggtatccataatcgccatactgg

SEQ ID NO: 1422211 - DNA, 25 bp, Homo sapien
gggacactggtagctgaagccttgc

SEQ ID NO: 1422212 - DNA, 25 bp, Homo sapien
tgactaggggcagaagtacccagag

SEQ ID NO: 1422213 - DNA, 25 bp, Homo sapien
actaggggcagaagtacccagagaa

SEQ ID NO: 1422214 - DNA, 25 bp, Homo sapien
ggtgactaggggcagaagtacccag

SEQ ID NO: 1422215 - DNA, 25 bp, Homo sapien
ggggcagaagtacccagagaagact

SEQ ID NO: 1422216 - DNA, 25 bp, Homo sapien
ccgttttatatagctgccgctgaca

SEQ ID NO: 1422217 - DNA, 25 bp, Homo sapien
agattgctggtctgaccgttttata

SEQ ID NO: 1422218 - DNA, 25 bp, Homo sapien
ggattttggcaaacaatgtcactct

SEQ ID NO: 1422219 - DNA, 25 bp, Homo sapien
ttttatatagctgccgctgacatgt

SEQ ID NO: 1422220 - DNA, 25 bp, Homo sapien
tgtttaaataccacagtcttgggaa

SEQ ID NO: 1422221 - DNA, 25 bp, Homo sapien
aaagaactgtgtgcccttttatggg

SEQ ID NO: 1422222 - DNA, 25 bp, Homo sapien
gaagcagacagactcgagttgaatc

SEQ ID NO: 1422223 - DNA, 25 bp, Homo sapien
tgcctgaaataatacgttaagaaag

SEQ ID NO: 1422224 - DNA, 25 bp, Homo sapien
ggagactgtggtgcaagatccagct

SEQ ID NO: 1422225 - DNA, 25 bp, Homo sapien
tccgcactccaagcatgcagatttc

SEQ ID NO: 1422226 - DNA, 25 bp, Homo sapien
actgtggtgcaagatccagctctcc

SEQ ID NO: 1422227 - DNA, 25 bp, Homo sapien
aaactccacaaatgctggaacagca

SEQ ID NO: 1422228 - DNA, 25 bp, Homo sapien
gccagcatgttgaaacccgtttctt

SEQ ID NO: 1422229 - DNA, 25 bp, Homo sapien
catgtaggtatataatccactttga

SEQ ID NO: 1422230 - DNA, 25 bp, Homo sapien
aattagctcggcgttgtgccggtca

SEQ ID NO: 1422231 - DNA, 25 bp, Homo sapien
ttgtatatgccataagttgtgaatc

SEQ ID NO: 1422232 - DNA, 25 bp, Homo sapien
attgatgatgaaatagacagtctga

SEQ ID NO: 1422233 - DNA, 25 bp, Homo sapien
cagtctgaagtctgacatctgggct

SEQ ID NO: 1422234 - DNA, 25 bp, Homo sapien
ccagaagtgagtaagtgatgatttc

SEQ ID NO: 1422235 - DNA, 25 bp, Homo sapien
gaaatagacagtctgaagtctgaca

SEQ ID NO: 1422236 - DNA, 25 bp, Homo sapien
ggaaacactttcatggatacagtca

SEQ ID NO: 1422237 - DNA, 25 bp, Homo sapien
catatcctggtatgtcaatggcagc

SEQ ID NO: 1422238 - DNA, 25 bp, Homo sapien
caatggcagcatatgtttgcaaggc

SEQ ID NO: 1422239 - DNA, 25 bp, Homo sapien
tttgcaaggcaatccatggttgtgg

SEQ ID NO: 1422240 - DNA, 25 bp, Homo sapien
tggccggaacatttctttcatatct

SEQ ID NO: 1422241 - DNA, 25 bp, Homo sapien
gcctagtagaccagggtattccaac

SEQ ID NO: 1422242 - DNA, 25 bp, Homo sapien
ctctaatctcttcacacatggccgg

SEQ ID NO: 1422243 - DNA, 25 bp, Homo sapien
gaccagggtattccaactctacctc

SEQ ID NO: 1422244 - DNA, 25 bp, Homo sapien
ttttgataagttgttctagccttcc

SEQ ID NO: 1422245 - DNA, 25 bp, Homo sapien
tgctttttgataagttgttctagcc

SEQ ID NO: 1422246 - DNA, 25 bp, Homo sapien
tttgataagttgttctagccttcct

SEQ ID NO: 1422247 - DNA, 25 bp, Homo sapien
tcatctgctttttgataagttgttc

SEQ ID NO: 1422248 - DNA, 25 bp, Homo sapien
gagaattcccagctagatggaaact

SEQ ID NO: 1422249 - DNA, 25 bp, Homo sapien
gatcatctaacctccttgttcctgg

SEQ ID NO: 1422250 - DNA, 25 bp, Homo sapien
tctttggatctcagacagcagttgc

SEQ ID NO: 1422251 - DNA, 25 bp, Homo sapien
caaggtgtaaaccatctgcggaagc

SEQ ID NO: 1422252 - DNA, 25 bp, Homo sapien
gcccttccaccccatcgtcagcaca

SEQ ID NO: 1422253 - DNA, 25 bp, Homo sapien
caccccatcgtcagcacatgaaagc

SEQ ID NO: 1422254 - DNA, 25 bp, Homo sapien
cccatcgtcagcacatgaaagcctc

SEQ ID NO: 1422255 - DNA, 25 bp, Homo sapien
cttccaccccatcgtcagcacatga

SEQ ID NO: 1422256 - DNA, 25 bp, Homo sapien
tgatgatggtctccctcattctcag

SEQ ID NO: 1422257 - DNA, 25 bp, Homo sapien
tgtgatgatggtctccctcattctc

SEQ ID NO: 1422258 - DNA, 25 bp, Homo sapien
cctgtgatgatggtctccctcattc

SEQ ID NO: 1422259 - DNA, 25 bp, Homo sapien
gtgatgatggtctccctcattctca

SEQ ID NO: 1422260 - DNA, 25 bp, Homo sapien
ctgctccttcacagcgtcaaatgga

SEQ ID NO: 1422261 - DNA, 25 bp, Homo sapien
acttgagtcagataacactacctgc

SEQ ID NO: 1422262 - DNA, 25 bp, Homo sapien
tgtgataatgcaaacagcctaacac

SEQ ID NO: 1422263 - DNA, 25 bp, Homo sapien
tgaacgtgacaaactatccccattt

SEQ ID NO: 1422264 - DNA, 25 bp, Homo sapien
tggttagtattagcctcacactcct

SEQ ID NO: 1422265 - DNA, 25 bp, Homo sapien
tgaatctatactgcctgatgtggac

SEQ ID NO: 1422266 - DNA, 25 bp, Homo sapien
ggtactcgcactgtcacattttgaa

SEQ ID NO: 1422267 - DNA, 25 bp, Homo sapien
cttgtgttaagaatagctaccctca

SEQ ID NO: 1422268 - DNA, 25 bp, Homo sapien
aagaagctgaccaggctcaggggaa

SEQ ID NO: 1422269 - DNA, 25 bp, Homo sapien
cccagtaatctccttggaagaagct

SEQ ID NO: 1422270 - DNA, 25 bp, Homo sapien
attggcctcttcctgtggtttcagc

SEQ ID NO: 1422271 - DNA, 25 bp, Homo sapien
ttggcctcttcctgtggtttcagct

SEQ ID NO: 1422272 - DNA, 25 bp, Homo sapien
gagagtatttatcgaagctgatcct

SEQ ID NO: 1422273 - DNA, 25 bp, Homo sapien
ccttgaggatacgaagcagagtggc

SEQ ID NO: 1422274 - DNA, 25 bp, Homo sapien
ttgctgaagaacacaacgccgacca

SEQ ID NO: 1422275 - DNA, 25 bp, Homo sapien
cagccatcaaaagttgacaatgacc

SEQ ID NO: 1422276 - DNA, 25 bp, Homo sapien
caagtagccggccattctgtctata

SEQ ID NO: 1422277 - DNA, 25 bp, Homo sapien
ccattctgtctatagcgttgagtca

SEQ ID NO: 1422278 - DNA, 25 bp, Homo sapien
ccatttgcaagtagccggccattct

SEQ ID NO: 1422279 - DNA, 25 bp, Homo sapien
cccaggctgccatttgcaagtagcc

SEQ ID NO: 1422280 - DNA, 25 bp, Homo sapien
cagtgctccagctctgaatatctga

SEQ ID NO: 1422281 - DNA, 25 bp, Homo sapien
tatctgagctactggaccattgtcc

SEQ ID NO: 1422282 - DNA, 25 bp, Homo sapien
aacaatagggagatccttctagcca

SEQ ID NO: 1422283 - DNA, 25 bp, Homo sapien
tttgaccttgaacaatagggagatc

SEQ ID NO: 1422284 - DNA, 25 bp, Homo sapien
gattgttcttgaatcaccaaactcc

SEQ ID NO: 1422285 - DNA, 25 bp, Homo sapien
ttgttcttgaatcaccaaactcctc

SEQ ID NO: 1422286 - DNA, 25 bp, Homo sapien
accaaactcctccttctgcccttgc

SEQ ID NO: 1422287 - DNA, 25 bp, Homo sapien
caaactcctccttctgcccttgcat

SEQ ID NO: 1422288 - DNA, 25 bp, Homo sapien
tttctttgttatcattctggaccat

SEQ ID NO: 1422289 - DNA, 25 bp, Homo sapien
ccatttttctttgttatcattctgg

SEQ ID NO: 1422290 - DNA, 25 bp, Homo sapien
catttttctttgttatcattctgga

SEQ ID NO: 1422291 - DNA, 25 bp, Homo sapien
tttttctttgttatcattctggacc

SEQ ID NO: 1422292 - DNA, 25 bp, Homo sapien
ctcaacaacctgaaaatttctcggt

SEQ ID NO: 1422293 - DNA, 25 bp, Homo sapien
atttctcggttcatctaccctccag

SEQ ID NO: 1422294 - DNA, 25 bp, Homo sapien
cctctttgagaaagcgctgagattc

SEQ ID NO: 1422295 - DNA, 25 bp, Homo sapien
tgcattcacaacctgtgttttcaca

SEQ ID NO: 1422296 - DNA, 25 bp, Homo sapien
gagaagtcagaggaggatgtggttc

SEQ ID NO: 1422297 - DNA, 25 bp, Homo sapien
agaagtcagaggaggatgtggttcc

SEQ ID NO: 1422298 - DNA, 25 bp, Homo sapien
tgagaagtcagaggaggatgtggtt

SEQ ID NO: 1422299 - DNA, 25 bp, Homo sapien
ctgagaagtcagaggaggatgtggt

SEQ ID NO: 1422300 - DNA, 25 bp, Homo sapien
tctgtggtcagtttagccacagttt

SEQ ID NO: 1422301 - DNA, 25 bp, Homo sapien
ctcacaatgtggcaattgcagcagc

SEQ ID NO: 1422302 - DNA, 25 bp, Homo sapien
gccagtctgtggtcagtttagccac

SEQ ID NO: 1422303 - DNA, 25 bp, Homo sapien
cagtctgtggtcagtttagccacag

SEQ ID NO: 1422304 - DNA, 25 bp, Homo sapien
cttggctccccttccactgccagca

SEQ ID NO: 1422305 - DNA, 25 bp, Homo sapien
ttggctccccttccactgccagcat

SEQ ID NO: 1422306 - DNA, 25 bp, Homo sapien
tagctaacttctgctctggtgggtg

SEQ ID NO: 1422307 - DNA, 25 bp, Homo sapien
agctaacttctgctctggtgggtga

SEQ ID NO: 1422308 - DNA, 25 bp, Homo sapien
atagctaacttctgctctggtgggt

SEQ ID NO: 1422309 - DNA, 25 bp, Homo sapien
ggatagaagtacaggcttcatcaag

SEQ ID NO: 1422310 - DNA, 25 bp, Homo sapien
tagtgattctatccgtgtcaatgtc

SEQ ID NO: 1422311 - DNA, 25 bp, Homo sapien
gctctcatccaccaaatggatagaa

SEQ ID NO: 1422312 - DNA, 25 bp, Homo sapien
gcggccagaggaacaatagtgattc

SEQ ID NO: 1422313 - DNA, 25 bp, Homo sapien
agtctgtatgctccttatggccagg

SEQ ID NO: 1422314 - DNA, 25 bp, Homo sapien
tgttctatagtcttccctctccaag

SEQ ID NO: 1422315 - DNA, 25 bp, Homo sapien
tgtatgctccttatggccaggtttt

SEQ ID NO: 1422316 - DNA, 25 bp, Homo sapien
tgtcttatataacatatttgttcta

SEQ ID NO: 1422317 - DNA, 25 bp, Homo sapien
ttcttgctgaagcacacagactgga

SEQ ID NO: 1422318 - DNA, 25 bp, Homo sapien
tttcttgctgaagcacacagactgg

SEQ ID NO: 1422319 - DNA, 25 bp, Homo sapien
ctcatgcttaaaagcatgcggctgg

SEQ ID NO: 1422320 - DNA, 25 bp, Homo sapien
tacacattgtcctttccttcgatta

SEQ ID NO: 1422321 - DNA, 25 bp, Homo sapien
ggcatgtcaccatattctgcaaatc

SEQ ID NO: 1422322 - DNA, 25 bp, Homo sapien
tccttcgattatcactggcatgtca

SEQ ID NO: 1422323 - DNA, 25 bp, Homo sapien
gctaggtaggtttggagatgcaaaa

SEQ ID NO: 1422324 - DNA, 25 bp, Homo sapien
tcctgaaaccagggtagtagaacca

SEQ ID NO: 1422325 - DNA, 25 bp, Homo sapien
gaatagagatgagccttcctgaaac

SEQ ID NO: 1422326 - DNA, 25 bp, Homo sapien
cccttctctcaggtcgcttgtcgta

SEQ ID NO: 1422327 - DNA, 25 bp, Homo sapien
tccagagcttccgttacatcgtgct

SEQ ID NO: 1422328 - DNA, 25 bp, Homo sapien
gagcttccgttacatcgtgctcttc

SEQ ID NO: 1422329 - DNA, 25 bp, Homo sapien
tccgttacatcgtgctcttctcact

SEQ ID NO: 1422330 - DNA, 25 bp, Homo sapien
ttcctccgccatttttcaccacaca

SEQ ID NO: 1422331 - DNA, 25 bp, Homo sapien
ctttaactagcagccctgccctgat

SEQ ID NO: 1422332 - DNA, 25 bp, Homo sapien
taagcttggaacttcacagccttct

SEQ ID NO: 1422333 - DNA, 25 bp, Homo sapien
cttcccttgcctgccttaagcttgg

SEQ ID NO: 1422334 - DNA, 25 bp, Homo sapien
tgcctgccttaagcttggaacttca

SEQ ID NO: 1422335 - DNA, 25 bp, Homo sapien
gcaggtacttggctggttggtatca

SEQ ID NO: 1422336 - DNA, 25 bp, Homo sapien
gaaaatgtacatggtaggaagcgcc

SEQ ID NO: 1422337 - DNA, 25 bp, Homo sapien
gacctctccccggtttgcaacagtg

SEQ ID NO: 1422338 - DNA, 25 bp, Homo sapien
tggcgtagcctcactttaaattgaa

SEQ ID NO: 1422339 - DNA, 25 bp, Homo sapien
caataccaacaattccagtgcccat

SEQ ID NO: 1422340 - DNA, 25 bp, Homo sapien
ctacaataccaacaattccagtgcc

SEQ ID NO: 1422341 - DNA, 25 bp, Homo sapien
tacaataccaacaattccagtgccc

SEQ ID NO: 1422342 - DNA, 25 bp, Homo sapien
aataccaacaattccagtgcccatt

SEQ ID NO: 1422343 - DNA, 25 bp, Homo sapien
tggctgttctattcaggtgcctaga

SEQ ID NO: 1422344 - DNA, 25 bp, Homo sapien
caggaacaagccatcctggctggct

SEQ ID NO: 1422345 - DNA, 25 bp, Homo sapien
tgccaatgatagaagcataggagag

SEQ ID NO: 1422346 - DNA, 25 bp, Homo sapien
gtgtttgcacaagtttactgccaat

SEQ ID NO: 1422347 - DNA, 25 bp, Homo sapien
aaattactccaactctagatgcttc

SEQ ID NO: 1422348 - DNA, 25 bp, Homo sapien
gaaaatcatcagcaatgaatcccat

SEQ ID NO: 1422349 - DNA, 25 bp, Homo sapien
gaatctcttcttggtatccagaaaa

SEQ ID NO: 1422350 - DNA, 25 bp, Homo sapien
ctggcttgaatctcttcttggtatc

SEQ ID NO: 1422351 - DNA, 25 bp, Homo sapien
cagaaaatcatcagcaatgaatccc

SEQ ID NO: 1422352 - DNA, 25 bp, Homo sapien
tggggccctccgcccatgatgaatg

SEQ ID NO: 1422353 - DNA, 25 bp, Homo sapien
tggccttccgccagctgtggggccc

SEQ ID NO: 1422354 - DNA, 25 bp, Homo sapien
cagctggccttccgccagctgtggg

SEQ ID NO: 1422355 - DNA, 25 bp, Homo sapien
gggccctccgcccatgatgaatgca

SEQ ID NO: 1422356 - DNA, 25 bp, Homo sapien
actcagattcctcagcgatgaacac

SEQ ID NO: 1422357 - DNA, 25 bp, Homo sapien
tcagattcctcagcgatgaacaccg

SEQ ID NO: 1422358 - DNA, 25 bp, Homo sapien
attcctcagcgatgaacaccgaaca

SEQ ID NO: 1422359 - DNA, 25 bp, Homo sapien
agattcctcagcgatgaacaccgaa

SEQ ID NO: 1422360 - DNA, 25 bp, Homo sapien
cacagacgcaaattttccctagaag

SEQ ID NO: 1422361 - DNA, 25 bp, Homo sapien
tgtgttctggactaaggccacagac

SEQ ID NO: 1422362 - DNA, 25 bp, Homo sapien
ctccagagaagactagggtgtgttc

SEQ ID NO: 1422363 - DNA, 25 bp, Homo sapien
ccctccagagaagactagggtgtgt

SEQ ID NO: 1422364 - DNA, 25 bp, Homo sapien
cacagggcaggccaattacgtaaag

SEQ ID NO: 1422365 - DNA, 25 bp, Homo sapien
caggccaattacgtaaagcacatct

SEQ ID NO: 1422366 - DNA, 25 bp, Homo sapien
gccaattacgtaaagcacatctcca

SEQ ID NO: 1422367 - DNA, 25 bp, Homo sapien
gggcaggccaattacgtaaagcaca

SEQ ID NO: 1422368 - DNA, 25 bp, Homo sapien
tggtttcttctcagactgaaagctg

SEQ ID NO: 1422369 - DNA, 25 bp, Homo sapien
agcatcagcagtgtgctttggtttc

SEQ ID NO: 1422370 - DNA, 25 bp, Homo sapien
ctttggtttcttctcagactgaaag

SEQ ID NO: 1422371 - DNA, 25 bp, Homo sapien
ggtttcttctcagactgaaagctgg

SEQ ID NO: 1422372 - DNA, 25 bp, Homo sapien
ctccagggagtttgagctctagaca

SEQ ID NO: 1422373 - DNA, 25 bp, Homo sapien
gagtttgagctctagacagtagtca

SEQ ID NO: 1422374 - DNA, 25 bp, Homo sapien
ctagacagtagtcactttggcccat

SEQ ID NO: 1422375 - DNA, 25 bp, Homo sapien
tgagctctagacagtagtcactttg

SEQ ID NO: 1422376 - DNA, 25 bp, Homo sapien
ccagtgccttttgagaatatgggcc

SEQ ID NO: 1422377 - DNA, 25 bp, Homo sapien
ccagggtgggatcttggcatgaaaa

SEQ ID NO: 1422378 - DNA, 25 bp, Homo sapien
aatatgggccccttataggcaagca

SEQ ID NO: 1422379 - DNA, 25 bp, Homo sapien
ggtatagaatcttgcacgccacagt

SEQ ID NO: 1422380 - DNA, 25 bp, Homo sapien
accttgggtcactgacttccccact

SEQ ID NO: 1422381 - DNA, 25 bp, Homo sapien
gccaccttgggtcactgacttcccc

SEQ ID NO: 1422382 - DNA, 25 bp, Homo sapien
ttgccaccttgggtcactgacttcc

SEQ ID NO: 1422383 - DNA, 25 bp, Homo sapien
cttgccaccttgggtcactgacttc

SEQ ID NO: 1422384 - DNA, 25 bp, Homo sapien
taagctgttatcactgttaccatgg

SEQ ID NO: 1422385 - DNA, 25 bp, Homo sapien
ccttggagatagagagtctataaat

SEQ ID NO: 1422386 - DNA, 25 bp, Homo sapien
gctccttggagatagagagtctata

SEQ ID NO: 1422387 - DNA, 25 bp, Homo sapien
aaatataagctgttatcactgttac

SEQ ID NO: 1422388 - DNA, 25 bp, Homo sapien
gccatcgccatggcccgcgggaaag

SEQ ID NO: 1422389 - DNA, 25 bp, Homo sapien
gaccggtggcagttggtgtaagtac

SEQ ID NO: 1422390 - DNA, 25 bp, Homo sapien
cgtctgatctttcccgggcggcgca

SEQ ID NO: 1422391 - DNA, 25 bp, Homo sapien
gaagaaggagtttctgggcaggacc

SEQ ID NO: 1422392 - DNA, 25 bp, Homo sapien
tcggttgagccttttactcctggga

SEQ ID NO: 1422393 - DNA, 25 bp, Homo sapien
tgggaatagtcaggctctgcgagac

SEQ ID NO: 1422394 - DNA, 25 bp, Homo sapien
gcagtctttcctaccgtgcatcggt

SEQ ID NO: 1422395 - DNA, 25 bp, Homo sapien
cacgacaggcggaaggttatgcata

SEQ ID NO: 1422396 - DNA, 25 bp, Homo sapien
tgagtcgtttggctggcacaggact

SEQ ID NO: 1422397 - DNA, 25 bp, Homo sapien
cattgagtcgtttggctggcacagg

SEQ ID NO: 1422398 - DNA, 25 bp, Homo sapien
gcattcacattgagtcgtttggctg

SEQ ID NO: 1422399 - DNA, 25 bp, Homo sapien
ttcacattgagtcgtttggctggca

SEQ ID NO: 1422400 - DNA, 25 bp, Homo sapien
atttccttcagagatagcatgggtg

SEQ ID NO: 1422401 - DNA, 25 bp, Homo sapien
tttaagcccacatatcaggaccgag

SEQ ID NO: 1422402 - DNA, 25 bp, Homo sapien
aatccacatgaatagcttcatttcc

SEQ ID NO: 1422403 - DNA, 25 bp, Homo sapien
cagagatagcatgggtgtcactttt

SEQ ID NO: 1422404 - DNA, 25 bp, Homo sapien
cagatgatctacgtggccctgagca

SEQ ID NO: 1422405 - DNA, 25 bp, Homo sapien
tcctgcgtacctccttgaatgtggg

SEQ ID NO: 1422406 - DNA, 25 bp, Homo sapien
gatcttcaaaatacggaggtggcaa

SEQ ID NO: 1422407 - DNA, 25 bp, Homo sapien
taacttccgggctctcacttacgaa

SEQ ID NO: 1422408 - DNA, 25 bp, Homo sapien
tctgagtcacaggaaaagtcctcag

SEQ ID NO: 1422409 - DNA, 25 bp, Homo sapien
gtctgagtcacaggaaaagtcctca

SEQ ID NO: 1422410 - DNA, 25 bp, Homo sapien
tgagtcacaggaaaagtcctcagtc

SEQ ID NO: 1422411 - DNA, 25 bp, Homo sapien
gagtcacaggaaaagtcctcagtcc

SEQ ID NO: 1422412 - DNA, 25 bp, Homo sapien
cacccaactcatcctcccaaagttc

SEQ ID NO: 1422413 - DNA, 25 bp, Homo sapien
ccacccaactcatcctcccaaagtt

SEQ ID NO: 1422414 - DNA, 25 bp, Homo sapien
acccaactcatcctcccaaagttct

SEQ ID NO: 1422415 - DNA, 25 bp, Homo sapien
ttctcaagccctacaaatggtgctg

SEQ ID NO: 1422416 - DNA, 25 bp, Homo sapien
gtccttaagtcctttgccctgggca

SEQ ID NO: 1422417 - DNA, 25 bp, Homo sapien
taaagcatcctcaatcactagaaag

SEQ ID NO: 1422418 - DNA, 25 bp, Homo sapien
gaatagcatttagtcgagccttact

SEQ ID NO: 1422419 - DNA, 25 bp, Homo sapien
gagtattttggactgggcaactccc

SEQ ID NO: 1422420 - DNA, 25 bp, Homo sapien
ctgaaattcgcatagagtgtaaggc

SEQ ID NO: 1422421 - DNA, 25 bp, Homo sapien
gcgtacggtgagaacattgggtaca

SEQ ID NO: 1422422 - DNA, 25 bp, Homo sapien
tgctggccgtacagttcaccaatct

SEQ ID NO: 1422423 - DNA, 25 bp, Homo sapien
ggtaatggcccatcgatgagcattt

SEQ ID NO: 1422424 - DNA, 25 bp, Homo sapien
gcccatcactttggctagtgacagg

SEQ ID NO: 1422425 - DNA, 25 bp, Homo sapien
catgctggtgctgtgtctttatgaa

SEQ ID NO: 1422426 - DNA, 25 bp, Homo sapien
tgtcctccggtatgttctaaagctg

SEQ ID NO: 1422427 - DNA, 25 bp, Homo sapien
agaaaaagtgtaatgtatgaaataa

SEQ ID NO: 1422428 - DNA, 25 bp, Homo sapien
tgttgtctacagtgcaaaatccatg

SEQ ID NO: 1422429 - DNA, 25 bp, Homo sapien
cacattcctcgtgtgtgattcactc

SEQ ID NO: 1422430 - DNA, 25 bp, Homo sapien
gattcactcttgtctaaatgtccca

SEQ ID NO: 1422431 - DNA, 25 bp, Homo sapien
ccccatagactggtgttaaatgttg

SEQ ID NO: 1422432 - DNA, 25 bp, Homo sapien
tccaagatcttgaagaagtattgaa

SEQ ID NO: 1422433 - DNA, 25 bp, Homo sapien
atccaagatcttgaagaagtattga

SEQ ID NO: 1422434 - DNA, 25 bp, Homo sapien
tatccaagatcttgaagaagtattg

SEQ ID NO: 1422435 - DNA, 25 bp, Homo sapien
attatccaagatcttgaagaagtat

SEQ ID NO: 1422436 - DNA, 25 bp, Homo sapien
cacttaacagagtccaagaggttgg

SEQ ID NO: 1422437 - DNA, 25 bp, Homo sapien
gcagagaatcgatgaagctccagtt

SEQ ID NO: 1422438 - DNA, 25 bp, Homo sapien
tggttcctgctattgcttcactaga

SEQ ID NO: 1422439 - DNA, 25 bp, Homo sapien
gacttcagacactggcatacccctt

SEQ ID NO: 1422440 - DNA, 25 bp, Homo sapien
caaggagtatggaacaatcctgcag

SEQ ID NO: 1422441 - DNA, 25 bp, Homo sapien
cagccagtgcccgatatagtcatta

SEQ ID NO: 1422442 - DNA, 25 bp, Homo sapien
cctgcaggaataggacataggatcc

SEQ ID NO: 1422443 - DNA, 25 bp, Homo sapien
agccacatatatcgggcacagccag

SEQ ID NO: 1422444 - DNA, 25 bp, Homo sapien
taaactattctcatcgataccactt

SEQ ID NO: 1422445 - DNA, 25 bp, Homo sapien
atggtctaaactattctcatcgata

SEQ ID NO: 1422446 - DNA, 25 bp, Homo sapien
tattctcatcgataccacttccttc

SEQ ID NO: 1422447 - DNA, 25 bp, Homo sapien
tctaaactattctcatcgataccac

SEQ ID NO: 1422448 - DNA, 25 bp, Homo sapien
cgcataagggctttagcaagtgcta

SEQ ID NO: 1422449 - DNA, 25 bp, Homo sapien
tctacaccaggttccccgattacaa

SEQ ID NO: 1422450 - DNA, 25 bp, Homo sapien
aaatgccatttgctaaaggaaacct

SEQ ID NO: 1422451 - DNA, 25 bp, Homo sapien
tctcggcctggagtcaactaccttt

SEQ ID NO: 1422452 - DNA, 25 bp, Homo sapien
cagattcatttgttgtcataaggcc

SEQ ID NO: 1422453 - DNA, 25 bp, Homo sapien
tatcagaagcttccatggaggcaca

SEQ ID NO: 1422454 - DNA, 25 bp, Homo sapien
tgtacactgatattccaagcaaaga

SEQ ID NO: 1422455 - DNA, 25 bp, Homo sapien
tgggtagaatccaacgagacggcta

SEQ ID NO: 1422456 - DNA, 25 bp, Homo sapien
ggcttctagcatacctgtaaccata

SEQ ID NO: 1422457 - DNA, 25 bp, Homo sapien
gcatttaatattatcggagggagaa

SEQ ID NO: 1422458 - DNA, 25 bp, Homo sapien
gaaaagatcccatactacacatttg

SEQ ID NO: 1422459 - DNA, 25 bp, Homo sapien
accataatagtgaagattgtactca

SEQ ID NO: 1422460 - DNA, 25 bp, Homo sapien
caacttgacttaatggagagtgcac

SEQ ID NO: 1422461 - DNA, 25 bp, Homo sapien
gctcagaacagtggctctccaagtg

SEQ ID NO: 1422462 - DNA, 25 bp, Homo sapien
agtgcacagtgttttttggctcaga

SEQ ID NO: 1422463 - DNA, 25 bp, Homo sapien
caaaaagtgctgagacaaaatgcct

SEQ ID NO: 1422464 - DNA, 25 bp, Homo sapien
tgctggccttctcacagggtctagg

SEQ ID NO: 1422465 - DNA, 25 bp, Homo sapien
ggaagtgtaacaacccttggctaca

SEQ ID NO: 1422466 - DNA, 25 bp, Homo sapien
aaagcagaaccaaagccgacttcga

SEQ ID NO: 1422467 - DNA, 25 bp, Homo sapien
tccatctagagaggctattgatcct

SEQ ID NO: 1422468 - DNA, 25 bp, Homo sapien
aaatttcatgggcatcagaagcacc

SEQ ID NO: 1422469 - DNA, 25 bp, Homo sapien
cagtggaccccgagaatttcatttc

SEQ ID NO: 1422470 - DNA, 25 bp, Homo sapien
cattgattgggaaccgctgcactag

SEQ ID NO: 1422471 - DNA, 25 bp, Homo sapien
caaatccccgagttgctaagcagct

SEQ ID NO: 1422472 - DNA, 25 bp, Homo sapien
gtcttgtgtcactcggattttcact

SEQ ID NO: 1422473 - DNA, 25 bp, Homo sapien
tcactgatcagacaacttgtcttgt

SEQ ID NO: 1422474 - DNA, 25 bp, Homo sapien
tgtcactcggattttcactttgaag

SEQ ID NO: 1422475 - DNA, 25 bp, Homo sapien
gacaacttgtcttgtgtcactcgga

SEQ ID NO: 1422476 - DNA, 25 bp, Homo sapien
ggcttttctatgtacaacttccagg

SEQ ID NO: 1422477 - DNA, 25 bp, Homo sapien
gggaacggcggtctcctagtagata

SEQ ID NO: 1422478 - DNA, 25 bp, Homo sapien
taggtccaagctatcagaaagtgag

SEQ ID NO: 1422479 - DNA, 25 bp, Homo sapien
ttaaagttcattcggaggttggcca

SEQ ID NO: 1422480 - DNA, 25 bp, Homo sapien
gcaatttatggtgatggtatagtca

SEQ ID NO: 1422481 - DNA, 25 bp, Homo sapien
gtggaccagcacagttcaaacattg

SEQ ID NO: 1422482 - DNA, 25 bp, Homo sapien
tgcagtccaaaatcatcagatggcc

SEQ ID NO: 1422483 - DNA, 25 bp, Homo sapien
ttctttgaaagctatgcagcatgct

SEQ ID NO: 1422484 - DNA, 25 bp, Homo sapien
cagtgaacagcattctggatcttag

SEQ ID NO: 1422485 - DNA, 25 bp, Homo sapien
ccagggcgtaaatgccgggcaattt

SEQ ID NO: 1422486 - DNA, 25 bp, Homo sapien
ctctggcagatcagtacagtgaaca

SEQ ID NO: 1422487 - DNA, 25 bp, Homo sapien
agttccagggcgtaaatgccgggca

SEQ ID NO: 1422488 - DNA, 25 bp, Homo sapien
cttttgaagtttatggcctgtaaca

SEQ ID NO: 1422489 - DNA, 25 bp, Homo sapien
agtatctcctgtaaattcctgtaag

SEQ ID NO: 1422490 - DNA, 25 bp, Homo sapien
gatgatgggcacatatggtcttctg

SEQ ID NO: 1422491 - DNA, 25 bp, Homo sapien
caacacacagtgaaacagtatctcc

SEQ ID NO: 1422492 - DNA, 25 bp, Homo sapien
tcattagctagctggggtttttacc

SEQ ID NO: 1422493 - DNA, 25 bp, Homo sapien
gctttttcatagtgtcagtggtctt

SEQ ID NO: 1422494 - DNA, 25 bp, Homo sapien
cagctttttcatagtgtcagtggtc

SEQ ID NO: 1422495 - DNA, 25 bp, Homo sapien
gatgcagctttttcatagtgtcagt

SEQ ID NO: 1422496 - DNA, 25 bp, Homo sapien
tatagatagaaagagttaaccagtt

SEQ ID NO: 1422497 - DNA, 25 bp, Homo sapien
tattgaattcagctttcgcaacagg

SEQ ID NO: 1422498 - DNA, 25 bp, Homo sapien
caataaactgtatcaatgcaagtcc

SEQ ID NO: 1422499 - DNA, 25 bp, Homo sapien
caagatttgttagccctggtactcc

SEQ ID NO: 1422500 - DNA, 25 bp, Homo sapien
catggactactttagtaattaggaa

SEQ ID NO: 1422501 - DNA, 25 bp, Homo sapien
tggactactttagtaattaggaaga

SEQ ID NO: 1422502 - DNA, 25 bp, Homo sapien
aacatggactactttagtaattagg

SEQ ID NO: 1422503 - DNA, 25 bp, Homo sapien
acatggactactttagtaattagga

SEQ ID NO: 1422504 - DNA, 25 bp, Homo sapien
acagagatgtcttctttagtttgcc

SEQ ID NO: 1422505 - DNA, 25 bp, Homo sapien
cagagatgtcttctttagtttgcct

SEQ ID NO: 1422506 - DNA, 25 bp, Homo sapien
gatgtcttctttagtttgcctaaat

SEQ ID NO: 1422507 - DNA, 25 bp, Homo sapien
gagatgtcttctttagtttgcctaa

SEQ ID NO: 1422508 - DNA, 25 bp, Homo sapien
cttgtgagaaattggagatttgggg

SEQ ID NO: 1422509 - DNA, 25 bp, Homo sapien
tgtgagaaattggagatttgggggt

SEQ ID NO: 1422510 - DNA, 25 bp, Homo sapien
cacttgtgagaaattggagatttgg

SEQ ID NO: 1422511 - DNA, 25 bp, Homo sapien
tcacttgtgagaaattggagatttg

SEQ ID NO: 1422512 - DNA, 25 bp, Homo sapien
atggcatttatcacaggaaggaagc

SEQ ID NO: 1422513 - DNA, 25 bp, Homo sapien
aaagtgtaggttgactcatactaaa

SEQ ID NO: 1422514 - DNA, 25 bp, Homo sapien
gtgtaggttgactcatactaaaata

SEQ ID NO: 1422515 - DNA, 25 bp, Homo sapien
tatggcatttatcacaggaaggaag

SEQ ID NO: 1422516 - DNA, 25 bp, Homo sapien
tcccatgatcttatgtaatttgagc

SEQ ID NO: 1422517 - DNA, 25 bp, Homo sapien
actttctataatcagagtcagtgtc

SEQ ID NO: 1422518 - DNA, 25 bp, Homo sapien
ttcccatgatcttatgtaatttgag

SEQ ID NO: 1422519 - DNA, 25 bp, Homo sapien
tactaattcactactttctataatc

SEQ ID NO: 1422520 - DNA, 25 bp, Homo sapien
ctagcacaccggatactgaggcagg

SEQ ID NO: 1422521 - DNA, 25 bp, Homo sapien
tagtacaacttattcccctagagcc

SEQ ID NO: 1422522 - DNA, 25 bp, Homo sapien
tacttccctctgtatcctaaatgac

SEQ ID NO: 1422523 - DNA, 25 bp, Homo sapien
gcttgaaaagaactactggaccagg

SEQ ID NO: 1422524 - DNA, 25 bp, Homo sapien
cacagactgggttgggttccttcag

SEQ ID NO: 1422525 - DNA, 25 bp, Homo sapien
tcttcatctacagtagccctgggaa

SEQ ID NO: 1422526 - DNA, 25 bp, Homo sapien
gatttcagatgacgtgagataccac

SEQ ID NO: 1422527 - DNA, 25 bp, Homo sapien
tctgcaaagtcaaccaaccacggat

SEQ ID NO: 1422528 - DNA, 25 bp, Homo sapien
ggaggtcctgccgactttctctatt

SEQ ID NO: 1422529 - DNA, 25 bp, Homo sapien
taagtatctattctttctccctgaa

SEQ ID NO: 1422530 - DNA, 25 bp, Homo sapien
gagcctctgactttaatctcttcca

SEQ ID NO: 1422531 - DNA, 25 bp, Homo sapien
cattactctatcacaaccacatgtg

SEQ ID NO: 1422532 - DNA, 25 bp, Homo sapien
agtcaaaattaagctgcatacaagg

SEQ ID NO: 1422533 - DNA, 25 bp, Homo sapien
agtatagtcaaaattaagctgcata

SEQ ID NO: 1422534 - DNA, 25 bp, Homo sapien
aaagtaacaattcagtatagtcaaa

SEQ ID NO: 1422535 - DNA, 25 bp, Homo sapien
tcaaaattaagctgcatacaaggaa

SEQ ID NO: 1422536 - DNA, 25 bp, Homo sapien
tattctgttgaatctccattgctac

SEQ ID NO: 1422537 - DNA, 25 bp, Homo sapien
aaaattctcgaaatgtctttgtagc

SEQ ID NO: 1422538 - DNA, 25 bp, Homo sapien
cattgctacacaagggccagaatac

SEQ ID NO: 1422539 - DNA, 25 bp, Homo sapien
gatcagcaggtccacaaaattctcg

SEQ ID NO: 1422540 - DNA, 25 bp, Homo sapien
ggtcactactcctttataaacttca

SEQ ID NO: 1422541 - DNA, 25 bp, Homo sapien
gatattcggtcactactcctttata

SEQ ID NO: 1422542 - DNA, 25 bp, Homo sapien
caacattaacccgatccatattgaa

SEQ ID NO: 1422543 - DNA, 25 bp, Homo sapien
taaacttcatagaattcctcaacat

SEQ ID NO: 1422544 - DNA, 25 bp, Homo sapien
ttcaaaacctgcatctcggatagcc

SEQ ID NO: 1422545 - DNA, 25 bp, Homo sapien
acctgcatctcggatagccatcagg

SEQ ID NO: 1422546 - DNA, 25 bp, Homo sapien
caaaacctgcatctcggatagccat

SEQ ID NO: 1422547 - DNA, 25 bp, Homo sapien
aaacctgcatctcggatagccatca

SEQ ID NO: 1422548 - DNA, 25 bp, Homo sapien
catagccaagtagtgctattttaat

SEQ ID NO: 1422549 - DNA, 25 bp, Homo sapien
tgatacatctgtaccaaatgaaggc

SEQ ID NO: 1422550 - DNA, 25 bp, Homo sapien
catctgtaccaaatgaaggccaaat

SEQ ID NO: 1422551 - DNA, 25 bp, Homo sapien
caaatgatacatctgtaccaaatga

SEQ ID NO: 1422552 - DNA, 25 bp, Homo sapien
tctcaaatgatacatctgtaccaaa

SEQ ID NO: 1422553 - DNA, 25 bp, Homo sapien
tgtgatgcctctacgtctgttttct

SEQ ID NO: 1422554 - DNA, 25 bp, Homo sapien
tgtgtttctctatgctttgttgaag

SEQ ID NO: 1422555 - DNA, 25 bp, Homo sapien
ctcacgaattatttgcctaagccaa

SEQ ID NO: 1422556 - DNA, 25 bp, Homo sapien
cagccttgtggcaaacatctgataa

SEQ ID NO: 1422557 - DNA, 25 bp, Homo sapien
cagggctcttggcttacacagcacc

SEQ ID NO: 1422558 - DNA, 25 bp, Homo sapien
ggctctgagtaagaataacccaatt

SEQ ID NO: 1422559 - DNA, 25 bp, Homo sapien
cattacagtggatagtaaaactctg

SEQ ID NO: 1422560 - DNA, 25 bp, Homo sapien
caaagctaccattacagtggatagt

SEQ ID NO: 1422561 - DNA, 25 bp, Homo sapien
tgtgtttctacaggatcagtggtga

SEQ ID NO: 1422562 - DNA, 25 bp, Homo sapien
gtgtttctacaggatcagtggtgat

SEQ ID NO: 1422563 - DNA, 25 bp, Homo sapien
ttgtgtttctacaggatcagtggtg

SEQ ID NO: 1422564 - DNA, 25 bp, Homo sapien
gtttgtgtttctacaggatcagtgg

SEQ ID NO: 1422565 - DNA, 25 bp, Homo sapien
gaaaataaacattgctctcctatta

SEQ ID NO: 1422566 - DNA, 25 bp, Homo sapien
ttgctctcctattaacaaaatgtac

SEQ ID NO: 1422567 - DNA, 25 bp, Homo sapien
cataaagtacatcaagaaaataaac

SEQ ID NO: 1422568 - DNA, 25 bp, Homo sapien
actgaatatagtgtattcaacatac

SEQ ID NO: 1422569 - DNA, 25 bp, Homo sapien
gacagcatggggtttaacaatgcaa

SEQ ID NO: 1422570 - DNA, 25 bp, Homo sapien
aatttagcagtgtttgccggcccac

SEQ ID NO: 1422571 - DNA, 25 bp, Homo sapien
taaatttagcagtgtttgccggccc

SEQ ID NO: 1422572 - DNA, 25 bp, Homo sapien
tttagcagtgtttgccggcccacaa

SEQ ID NO: 1422573 - DNA, 25 bp, Homo sapien
gcaaaaacaaccctgatcaatcagc

SEQ ID NO: 1422574 - DNA, 25 bp, Homo sapien
gacacagccacttcaacctttggca

SEQ ID NO: 1422575 - DNA, 25 bp, Homo sapien
catcaaagtaagatcagcaaaaaga

SEQ ID NO: 1422576 - DNA, 25 bp, Homo sapien
aatgctattgcatttagtagcctac

SEQ ID NO: 1422577 - DNA, 25 bp, Homo sapien
aggtcccagcagtcttttccattca

SEQ ID NO: 1422578 - DNA, 25 bp, Homo sapien
gcaaaagaatcagggccatgcgctg

SEQ ID NO: 1422579 - DNA, 25 bp, Homo sapien
caaagagggctctaatgctttcaga

SEQ ID NO: 1422580 - DNA, 25 bp, Homo sapien
tgtgcgtgccactccagagtttgca

SEQ ID NO: 1422581 - DNA, 25 bp, Homo sapien
gcaataataggaccagttgtaataa

SEQ ID NO: 1422582 - DNA, 25 bp, Homo sapien
ggcaataataggaccagttgtaata

SEQ ID NO: 1422583 - DNA, 25 bp, Homo sapien
caataataggaccagttgtaataaa

SEQ ID NO: 1422584 - DNA, 25 bp, Homo sapien
ataataggaccagttgtaataaact

SEQ ID NO: 1422585 - DNA, 25 bp, Homo sapien
ctggatgatgggatccatactccaa

SEQ ID NO: 1422586 - DNA, 25 bp, Homo sapien
tgactggtgatctacatgaaaatcc

SEQ ID NO: 1422587 - DNA, 25 bp, Homo sapien
ggtcttgactggtgatctacatgaa

SEQ ID NO: 1422588 - DNA, 25 bp, Homo sapien
gaaaaagggtcttgactggtgatct

SEQ ID NO: 1422589 - DNA, 25 bp, Homo sapien
aagggtcttgactggtgatctacat

SEQ ID NO: 1422590 - DNA, 25 bp, Homo sapien
atgtaggaggcaatgtttacttttc

SEQ ID NO: 1422591 - DNA, 25 bp, Homo sapien
taggaggcaatgtttacttttctac

SEQ ID NO: 1422592 - DNA, 25 bp, Homo sapien
acacttattattttagcttacatta

SEQ ID NO: 1422593 - DNA, 25 bp, Homo sapien
gaggcaatgtttacttttctactta

SEQ ID NO: 1422594 - DNA, 25 bp, Homo sapien
ttacaaccagaccagttaagactgg

SEQ ID NO: 1422595 - DNA, 25 bp, Homo sapien
tagaaccaagatatgcaaccaaatg

SEQ ID NO: 1422596 - DNA, 25 bp, Homo sapien
caaatgacatcaaaaagacctcggg

SEQ ID NO: 1422597 - DNA, 25 bp, Homo sapien
caatgaccggaagaggccataaaaa

SEQ ID NO: 1422598 - DNA, 25 bp, Homo sapien
tggttatagtaaatccagctttgtt

SEQ ID NO: 1422599 - DNA, 25 bp, Homo sapien
ctccagcctttgatattgcatctgg

SEQ ID NO: 1422600 - DNA, 25 bp, Homo sapien
catctggtttaattagggctagcgt

SEQ ID NO: 1422601 - DNA, 25 bp, Homo sapien
tgagtttggttatagtaaatccagc

SEQ ID NO: 1422602 - DNA, 25 bp, Homo sapien
acactggcattaattcaaggaatcc

SEQ ID NO: 1422603 - DNA, 25 bp, Homo sapien
gactcctaggtctgtccttccacat

SEQ ID NO: 1422604 - DNA, 25 bp, Homo sapien
gggcatcatcaccaaatcctcaaga

SEQ ID NO: 1422605 - DNA, 25 bp, Homo sapien
actatattagctggagtaattctgc

SEQ ID NO: 1422606 - DNA, 25 bp, Homo sapien
gatccccatagtcaattaataccag

SEQ ID NO: 1422607 - DNA, 25 bp, Homo sapien
ccagttgtcgagaaaagacattcac

SEQ ID NO: 1422608 - DNA, 25 bp, Homo sapien
tggtccgctttaaaaaggtgcgatg

SEQ ID NO: 1422609 - DNA, 25 bp, Homo sapien
gctggcgagctgtatattgatcccc

SEQ ID NO: 1422610 - DNA, 25 bp, Homo sapien
ataaaagctcataacgtcgaagaag

SEQ ID NO: 1422611 - DNA, 25 bp, Homo sapien
gctcataacgtcgaagaagtgaagc

SEQ ID NO: 1422612 - DNA, 25 bp, Homo sapien
aagtgaagcatttggatcataccac

SEQ ID NO: 1422613 - DNA, 25 bp, Homo sapien
taacgtcgaagaagtgaagcatttg

SEQ ID NO: 1422614 - DNA, 25 bp, Homo sapien
ctgcaatgaaaacgaatctttcact

SEQ ID NO: 1422615 - DNA, 25 bp, Homo sapien
tgaaaacgaatctttcactatgatt

SEQ ID NO: 1422616 - DNA, 25 bp, Homo sapien
caatgaaaacgaatctttcactatg

SEQ ID NO: 1422617 - DNA, 25 bp, Homo sapien
aatgaaaacgaatctttcactatga

SEQ ID NO: 1422618 - DNA, 25 bp, Homo sapien
ggagatataacagtggtacatctgg

SEQ ID NO: 1422619 - DNA, 25 bp, Homo sapien
tacttcctagagttaaaagatgtac

SEQ ID NO: 1422620 - DNA, 25 bp, Homo sapien
catcacagtgaggttggcctttcaa

SEQ ID NO: 1422621 - DNA, 25 bp, Homo sapien
gtacatctggacttgggataaaaca

SEQ ID NO: 1422622 - DNA, 25 bp, Homo sapien
tttgttgagccaaatctagaaaaaa

SEQ ID NO: 1422623 - DNA, 25 bp, Homo sapien
ttgttgagccaaatctagaaaaaag

SEQ ID NO: 1422624 - DNA, 25 bp, Homo sapien
tgttgagccaaatctagaaaaaagg

SEQ ID NO: 1422625 - DNA, 25 bp, Homo sapien
ctttagaactgcattgtacacactc

SEQ ID NO: 1422626 - DNA, 25 bp, Homo sapien
ttagaactgcattgtacacactcat

SEQ ID NO: 1422627 - DNA, 25 bp, Homo sapien
ctgtgactttagaactgcattgtac

SEQ ID NO: 1422628 - DNA, 25 bp, Homo sapien
gactttagaactgcattgtacacac

SEQ ID NO: 1422629 - DNA, 25 bp, Homo sapien
tgcttattgcatatctgccccaaaa

SEQ ID NO: 1422630 - DNA, 25 bp, Homo sapien
tgtttattgcttattgcatatctgc

SEQ ID NO: 1422631 - DNA, 25 bp, Homo sapien
tttattgcttattgcatatctgccc

SEQ ID NO: 1422632 - DNA, 25 bp, Homo sapien
tattgcttattgcatatctgcccca

SEQ ID NO: 1422633 - DNA, 25 bp, Homo sapien
tgtctgttttatttatggatgcatc

SEQ ID NO: 1422634 - DNA, 25 bp, Homo sapien
tgttttatttatggatgcatcccaa

SEQ ID NO: 1422635 - DNA, 25 bp, Homo sapien
ctgttttatttatggatgcatccca

SEQ ID NO: 1422636 - DNA, 25 bp, Homo sapien
ttttatttatggatgcatcccaagg

SEQ ID NO: 1422637 - DNA, 25 bp, Homo sapien
tttcttatttccattaggaaaatga

SEQ ID NO: 1422638 - DNA, 25 bp, Homo sapien
tcttatttccattaggaaaatgaat

SEQ ID NO: 1422639 - DNA, 25 bp, Homo sapien
ttcttatttccattaggaaaatgaa

SEQ ID NO: 1422640 - DNA, 25 bp, Homo sapien
cagctttttcttatttccattagga

SEQ ID NO: 1422641 - DNA, 25 bp, Homo sapien
taaaaacaactttgactcatgcctg

SEQ ID NO: 1422642 - DNA, 25 bp, Homo sapien
gattagttcttatggaacatagcta

SEQ ID NO: 1422643 - DNA, 25 bp, Homo sapien
tattacactaacagttcatctggag

SEQ ID NO: 1422644 - DNA, 25 bp, Homo sapien
aatccaagttactcacaaggtggag

SEQ ID NO: 1422645 - DNA, 25 bp, Homo sapien
gataaacacaggatggaggacatgg

SEQ ID NO: 1422646 - DNA, 25 bp, Homo sapien
ggaattaatgactatgaacctcagt

SEQ ID NO: 1422647 - DNA, 25 bp, Homo sapien
tgtgtccgggaagcaactgagttag

SEQ ID NO: 1422648 - DNA, 25 bp, Homo sapien
cttgaagccattaaagaagccagac

SEQ ID NO: 1422649 - DNA, 25 bp, Homo sapien
cagtgctctgccactcagaaaagca

SEQ ID NO: 1422650 - DNA, 25 bp, Homo sapien
taaccaactggatagaagagcgctg

SEQ ID NO: 1422651 - DNA, 25 bp, Homo sapien
gagcgctgatccaacatacacctgt

SEQ ID NO: 1422652 - DNA, 25 bp, Homo sapien
tacacctgttaatggccctcgtggg

SEQ ID NO: 1422653 - DNA, 25 bp, Homo sapien
taatgtgaatctgtgaacatgaaaa

SEQ ID NO: 1422654 - DNA, 25 bp, Homo sapien
cgcgttaatgtgaatctgtgaacat

SEQ ID NO: 1422655 - DNA, 25 bp, Homo sapien
agcgcgttaatgtgaatctgtgaac

SEQ ID NO: 1422656 - DNA, 25 bp, Homo sapien
gttaatgtgaatctgtgaacatgaa

SEQ ID NO: 1422657 - DNA, 25 bp, Homo sapien
tgcgttcatccaatcgacagacccg

SEQ ID NO: 1422658 - DNA, 25 bp, Homo sapien
gggagtaatctcagctgcgttcatc

SEQ ID NO: 1422659 - DNA, 25 bp, Homo sapien
tacggttactcaggcaacaaagccc

SEQ ID NO: 1422660 - DNA, 25 bp, Homo sapien
cacctcttcgtccttagtggctggg

SEQ ID NO: 1422661 - DNA, 25 bp, Homo sapien
tgctcttttggaaacgtattccgga

SEQ ID NO: 1422662 - DNA, 25 bp, Homo sapien
ggaagcgaaaccctgagtaatcgga

SEQ ID NO: 1422663 - DNA, 25 bp, Homo sapien
tgttacttgagtttatacgcactgc

SEQ ID NO: 1422664 - DNA, 25 bp, Homo sapien
cctgagtaatcggaagtggttagga

SEQ ID NO: 1422665 - DNA, 25 bp, Homo sapien
gcagctggcttgtcaaatactcatc

SEQ ID NO: 1422666 - DNA, 25 bp, Homo sapien
gtgacaacaaccaagttcaccttcg

SEQ ID NO: 1422667 - DNA, 25 bp, Homo sapien
gcctgtcgccataactcttgcacta

SEQ ID NO: 1422668 - DNA, 25 bp, Homo sapien
gaattcagggtccatgcagctggct

SEQ ID NO: 1422669 - DNA, 25 bp, Homo sapien
tacatatgtgcgttagttacatggg

SEQ ID NO: 1422670 - DNA, 25 bp, Homo sapien
gagtcactccttcagccttatgaaa

SEQ ID NO: 1422671 - DNA, 25 bp, Homo sapien
ggtccgggtatgattggtcccatca

SEQ ID NO: 1422672 - DNA, 25 bp, Homo sapien
taccctattgcttagcttgccatga

SEQ ID NO: 1422673 - DNA, 25 bp, Homo sapien
caaccaaagtacacagaccctaaga

SEQ ID NO: 1422674 - DNA, 25 bp, Homo sapien
catatccaaaattttgatagcagct

SEQ ID NO: 1422675 - DNA, 25 bp, Homo sapien
ttgatagcagctgcccactgaaata

SEQ ID NO: 1422676 - DNA, 25 bp, Homo sapien
gataaataccatttccataatttag

SEQ ID NO: 1422677 - DNA, 25 bp, Homo sapien
cagttataatgatcagtaaaacgaa

SEQ ID NO: 1422678 - DNA, 25 bp, Homo sapien
gtggtgctgtaactgtttagaacgc

SEQ ID NO: 1422679 - DNA, 25 bp, Homo sapien
gaacgcttagcttctagtcggagct

SEQ ID NO: 1422680 - DNA, 25 bp, Homo sapien
tctagtcggagctgtctagttctct

SEQ ID NO: 1422681 - DNA, 25 bp, Homo sapien
ccataatcgaaaagcttgttgtgga

SEQ ID NO: 1422682 - DNA, 25 bp, Homo sapien
agccataatcgaaaagcttgttgtg

SEQ ID NO: 1422683 - DNA, 25 bp, Homo sapien
ttttaagccataatcgaaaagcttg

SEQ ID NO: 1422684 - DNA, 25 bp, Homo sapien
taagccataatcgaaaagcttgttg

SEQ ID NO: 1422685 - DNA, 25 bp, Homo sapien
taaggtctaacagagagtagctgct

SEQ ID NO: 1422686 - DNA, 25 bp, Homo sapien
ccatgctctaggactaaggacaaaa

SEQ ID NO: 1422687 - DNA, 25 bp, Homo sapien
tgcacatgtgtagagtgaggctctg

SEQ ID NO: 1422688 - DNA, 25 bp, Homo sapien
ggagttccaatccaactatagtggg

SEQ ID NO: 1422689 - DNA, 25 bp, Homo sapien
tcattcataattgcttcaaagggaa

SEQ ID NO: 1422690 - DNA, 25 bp, Homo sapien
acattccatgttcatagatagtaag

SEQ ID NO: 1422691 - DNA, 25 bp, Homo sapien
catgttcatagatagtaagaatcaa

SEQ ID NO: 1422692 - DNA, 25 bp, Homo sapien
tcatgagtgaattctcattcataat

SEQ ID NO: 1422693 - DNA, 25 bp, Homo sapien
tagtcttaagtgagaccagtctcta

SEQ ID NO: 1422694 - DNA, 25 bp, Homo sapien
gcatgttgcatcttttgcaagggta

SEQ ID NO: 1422695 - DNA, 25 bp, Homo sapien
gactcccttctataaataagttcag

SEQ ID NO: 1422696 - DNA, 25 bp, Homo sapien
ataggctgttagtctgatatccaga

SEQ ID NO: 1422697 - DNA, 25 bp, Homo sapien
tcaatttcctttgctcgctgaattc

SEQ ID NO: 1422698 - DNA, 25 bp, Homo sapien
ttcctttgctcgctgaattctcctc

SEQ ID NO: 1422699 - DNA, 25 bp, Homo sapien
caatttcctttgctcgctgaattct

SEQ ID NO: 1422700 - DNA, 25 bp, Homo sapien
atttcctttgctcgctgaattctcc

SEQ ID NO: 1422701 - DNA, 25 bp, Homo sapien
cttcttctatttttcgtcgctcttc

SEQ ID NO: 1422702 - DNA, 25 bp, Homo sapien
tggtgagatatgtgcagactgtgtc

SEQ ID NO: 1422703 - DNA, 25 bp, Homo sapien
gaagtcactggtgagatatgtgcag

SEQ ID NO: 1422704 - DNA, 25 bp, Homo sapien
ttgtagttctttctgtcgaggggaa

SEQ ID NO: 1422705 - DNA, 25 bp, Homo sapien
gggaaagacagtatgttgaagtcac

SEQ ID NO: 1422706 - DNA, 25 bp, Homo sapien
cattccctttacttcgatctgagtt

SEQ ID NO: 1422707 - DNA, 25 bp, Homo sapien
cgatataagccagcggctctcctgt

SEQ ID NO: 1422708 - DNA, 25 bp, Homo sapien
gagtgagtgacagcatgaatctttg

SEQ ID NO: 1422709 - DNA, 25 bp, Homo sapien
acagcagagcttggacaagtcttgc

SEQ ID NO: 1422710 - DNA, 25 bp, Homo sapien
tgtcttctagtggaggaacttccaa

SEQ ID NO: 1422711 - DNA, 25 bp, Homo sapien
cattagtaagtgacaggagcacatc

SEQ ID NO: 1422712 - DNA, 25 bp, Homo sapien
caccggttcttgattctgtagaagc

SEQ ID NO: 1422713 - DNA, 25 bp, Homo sapien
caaatcaactaactggtccttgaac

SEQ ID NO: 1422714 - DNA, 25 bp, Homo sapien
atcagaatgccgtttggtgtgctcc

SEQ ID NO: 1422715 - DNA, 25 bp, Homo sapien
caggatcagaatgccgtttggtgtg

SEQ ID NO: 1422716 - DNA, 25 bp, Homo sapien
cagaatgccgtttggtgtgctccat

SEQ ID NO: 1422717 - DNA, 25 bp, Homo sapien
ggatcagaatgccgtttggtgtgct

SEQ ID NO: 1422718 - DNA, 25 bp, Homo sapien
tcacttttctttgaatcagtatctt

SEQ ID NO: 1422719 - DNA, 25 bp, Homo sapien
aaagtcatcttcgtattcttcactt

SEQ ID NO: 1422720 - DNA, 25 bp, Homo sapien
tcaaagtcatcttcgtattcttcac

SEQ ID NO: 1422721 - DNA, 25 bp, Homo sapien
ttcaaagtcatcttcgtattcttca

SEQ ID NO: 1422722 - DNA, 25 bp, Homo sapien
aaaatgcggcggctgggatcacaga

SEQ ID NO: 1422723 - DNA, 25 bp, Homo sapien
tcacattgaggcaaaggagaccccg

SEQ ID NO: 1422724 - DNA, 25 bp, Homo sapien
tctcctcctctttctaagctcttca

SEQ ID NO: 1422725 - DNA, 25 bp, Homo sapien
attgaggcaaaggagaccccggcac

SEQ ID NO: 1422726 - DNA, 25 bp, Homo sapien
aacagcgtgcctctgcgtcctccat

SEQ ID NO: 1422727 - DNA, 25 bp, Homo sapien
caacagcgtgcctctgcgtcctcca

SEQ ID NO: 1422728 - DNA, 25 bp, Homo sapien
tggcaacagcgtgcctctgcgtcct

SEQ ID NO: 1422729 - DNA, 25 bp, Homo sapien
ccatggcaacagcgtgcctctgcgt

SEQ ID NO: 1422730 - DNA, 25 bp, Homo sapien
ccgggcctctctaactacgagagcg

SEQ ID NO: 1422731 - DNA, 25 bp, Homo sapien
ctctaactacgagagcgacaaaaat

SEQ ID NO: 1422732 - DNA, 25 bp, Homo sapien
ctctctaactacgagagcgacaaaa

SEQ ID NO: 1422733 - DNA, 25 bp, Homo sapien
gggcctctctaactacgagagcgac

SEQ ID NO: 1422734 - DNA, 25 bp, Homo sapien
ttgcctttaaccctcagcagcagga

SEQ ID NO: 1422735 - DNA, 25 bp, Homo sapien
tgttcagcacctttgagcatatgtc

SEQ ID NO: 1422736 - DNA, 25 bp, Homo sapien
cagccttatttcatgtgttcagcac

SEQ ID NO: 1422737 - DNA, 25 bp, Homo sapien
gcatatgtccatttgccataaggca

SEQ ID NO: 1422738 - DNA, 25 bp, Homo sapien
tcttgaataccgcatgtcttgtagt

SEQ ID NO: 1422739 - DNA, 25 bp, Homo sapien
ttgtagtgacaatccaaaagcagtg

SEQ ID NO: 1422740 - DNA, 25 bp, Homo sapien
aagcagtggtggctacatatttttc

SEQ ID NO: 1422741 - DNA, 25 bp, Homo sapien
cgcatgtcttgtagtgacaatccaa

SEQ ID NO: 1422742 - DNA, 25 bp, Homo sapien
tggttttctgtggggacagtgaaac

SEQ ID NO: 1422743 - DNA, 25 bp, Homo sapien
ggccctaggatctgtctcatcctca

SEQ ID NO: 1422744 - DNA, 25 bp, Homo sapien
tggccctaggatctgtctcatcctc

SEQ ID NO: 1422745 - DNA, 25 bp, Homo sapien
gccctaggatctgtctcatcctcat

SEQ ID NO: 1422746 - DNA, 25 bp, Homo sapien
tctttggttggctgcagacacttct

SEQ ID NO: 1422747 - DNA, 25 bp, Homo sapien
aacttctgtccatcaaacattccct

SEQ ID NO: 1422748 - DNA, 25 bp, Homo sapien
caggccacttctatggccctgggag

SEQ ID NO: 1422749 - DNA, 25 bp, Homo sapien
ctgggaggggtcctaacaatgtatt

SEQ ID NO: 1422750 - DNA, 25 bp, Homo sapien
tcaaagggacaccagatactgccat

SEQ ID NO: 1422751 - DNA, 25 bp, Homo sapien
tttcaaagggacaccagatactgcc

SEQ ID NO: 1422752 - DNA, 25 bp, Homo sapien
tgggcttcttttcaaagggacacca

SEQ ID NO: 1422753 - DNA, 25 bp, Homo sapien
tgtggtgggcttcttttcaaaggga

SEQ ID NO: 1422754 - DNA, 25 bp, Homo sapien
aatatcttaatatgtggtgttttat

SEQ ID NO: 1422755 - DNA, 25 bp, Homo sapien
ttcatatattttgcagagctgctca

SEQ ID NO: 1422756 - DNA, 25 bp, Homo sapien
gggattaatcagacataaggaagaa

SEQ ID NO: 1422757 - DNA, 25 bp, Homo sapien
gaagtttatattgggggattaatca

SEQ ID NO: 1422758 - DNA, 25 bp, Homo sapien
aattattaaattgcttctgctcagc

SEQ ID NO: 1422759 - DNA, 25 bp, Homo sapien
cttcaggatctcaaccatgaatacc

SEQ ID NO: 1422760 - DNA, 25 bp, Homo sapien
gatctcaaccatgaatacctaaatt

SEQ ID NO: 1422761 - DNA, 25 bp, Homo sapien
ggcaattattaaattgcttctgctc

SEQ ID NO: 1422762 - DNA, 25 bp, Homo sapien
tgtaggaagtggctaggaaccttgc

SEQ ID NO: 1422763 - DNA, 25 bp, Homo sapien
tatggagagccaaaatgagggagca

SEQ ID NO: 1422764 - DNA, 25 bp, Homo sapien
tagcagccaatacagttaacaccca

SEQ ID NO: 1422765 - DNA, 25 bp, Homo sapien
taattaaagactagaccctcctcag

SEQ ID NO: 1422766 - DNA, 25 bp, Homo sapien
taaaagtatggccaaaatcgcaatt

SEQ ID NO: 1422767 - DNA, 25 bp, Homo sapien
taaataggaggtgaattgctcggtc

SEQ ID NO: 1422768 - DNA, 25 bp, Homo sapien
gcaatttatgagatcttatccatgg

SEQ ID NO: 1422769 - DNA, 25 bp, Homo sapien
gactttaaaggataatgccaaaatg

SEQ ID NO: 1422770 - DNA, 25 bp, Homo sapien
tcaaccctcccagaacatcagaagt

SEQ ID NO: 1422771 - DNA, 25 bp, Homo sapien
agaagtcttccatggtttttggcat

SEQ ID NO: 1422772 - DNA, 25 bp, Homo sapien
taaggtccatctttgtcaaccctcc

SEQ ID NO: 1422773 - DNA, 25 bp, Homo sapien
atcagaagtcttccatggtttttgg

SEQ ID NO: 1422774 - DNA, 25 bp, Homo sapien
acagaccgcagccaacgcccttccc

SEQ ID NO: 1422775 - DNA, 25 bp, Homo sapien
gtttaaaacgtcacagaccgcagcc

SEQ ID NO: 1422776 - DNA, 25 bp, Homo sapien
tgaagacgtttaaaacgtcacagac

SEQ ID NO: 1422777 - DNA, 25 bp, Homo sapien
accgcagccaacgcccttcccaata

SEQ ID NO: 1422778 - DNA, 25 bp, Homo sapien
tttcagaaaacggtcaacatcggca

SEQ ID NO: 1422779 - DNA, 25 bp, Homo sapien
ggctagccggtaatgcgcaggcaca

SEQ ID NO: 1422780 - DNA, 25 bp, Homo sapien
taaacaggctatccagagttcgact

SEQ ID NO: 1422781 - DNA, 25 bp, Homo sapien
tcctgcactggctagtcttgagagc

SEQ ID NO: 1422782 - DNA, 25 bp, Homo sapien
taatttgaggtggaacaaagaggct

SEQ ID NO: 1422783 - DNA, 25 bp, Homo sapien
tgataagcagcgaaatcaatgcctt

SEQ ID NO: 1422784 - DNA, 25 bp, Homo sapien
tgattctcaactcatggcaagaaga

SEQ ID NO: 1422785 - DNA, 25 bp, Homo sapien
tttaaaaagagataagagcagtgcc

SEQ ID NO: 1422786 - DNA, 25 bp, Homo sapien
taagaaaaggctcaggttgtatgcc

SEQ ID NO: 1422787 - DNA, 25 bp, Homo sapien
gaaaaaggccttggactaatgcaat

SEQ ID NO: 1422788 - DNA, 25 bp, Homo sapien
cagcacttttctacttgtttcggag

SEQ ID NO: 1422789 - DNA, 25 bp, Homo sapien
tactagcagccccttggtagactga

SEQ ID NO: 1422790 - DNA, 25 bp, Homo sapien
taaataatcgtcacaatgggaacca

SEQ ID NO: 1422791 - DNA, 25 bp, Homo sapien
gacttgcaacattttgtggcctctg

SEQ ID NO: 1422792 - DNA, 25 bp, Homo sapien
cacaaggtattagtcaagtggctgc

SEQ ID NO: 1422793 - DNA, 25 bp, Homo sapien
caggccaagcatctggctaagtaga

SEQ ID NO: 1422794 - DNA, 25 bp, Homo sapien
ttgagaacttgattgtggatcttcc

SEQ ID NO: 1422795 - DNA, 25 bp, Homo sapien
gagaacttgattgtggatcttccag

SEQ ID NO: 1422796 - DNA, 25 bp, Homo sapien
cacagcgatgagtgcaaaataactg

SEQ ID NO: 1422797 - DNA, 25 bp, Homo sapien
gcgatgagtgcaaaataactggcat

SEQ ID NO: 1422798 - DNA, 25 bp, Homo sapien
ggtttaactctaagctctggaacac

SEQ ID NO: 1422799 - DNA, 25 bp, Homo sapien
tcaactgtaatagtcctgggaactc

SEQ ID NO: 1422800 - DNA, 25 bp, Homo sapien
cactactagtgatggtatggacaag

SEQ ID NO: 1422801 - DNA, 25 bp, Homo sapien
ccttatacagggaggatggcaagca

SEQ ID NO: 1422802 - DNA, 25 bp, Homo sapien
gaagcagggaatctcaaacatggga

SEQ ID NO: 1422803 - DNA, 25 bp, Homo sapien
tgggatacagtattccaagcataga

SEQ ID NO: 1422804 - DNA, 25 bp, Homo sapien
cattgggctgatgagttacactcgg

SEQ ID NO: 1422805 - DNA, 25 bp, Homo sapien
tactaccttcgatgccaaaggagag

SEQ ID NO: 1422806 - DNA, 25 bp, Homo sapien
gccagggcaatgaaggtatttacac

SEQ ID NO: 1422807 - DNA, 25 bp, Homo sapien
cacaattagagtgagcagcgtctgc

SEQ ID NO: 1422808 - DNA, 25 bp, Homo sapien
tttctaatccaaggccactggcatc

SEQ ID NO: 1422809 - DNA, 25 bp, Homo sapien
tacaccaaatactagggcatagcgt

SEQ ID NO: 1422810 - DNA, 25 bp, Homo sapien
catctgaaaacagtaggaacataca

SEQ ID NO: 1422811 - DNA, 25 bp, Homo sapien
aacttgcctaaatgcttcctcagga

SEQ ID NO: 1422812 - DNA, 25 bp, Homo sapien
catataatacaatgcttcctcccat

SEQ ID NO: 1422813 - DNA, 25 bp, Homo sapien
tctactgtcaattgcctttccaacc

SEQ ID NO: 1422814 - DNA, 25 bp, Homo sapien
gatgcatagcacacccaaatgttac

SEQ ID NO: 1422815 - DNA, 25 bp, Homo sapien
gttacccacagtgtccatgatatac

SEQ ID NO: 1422816 - DNA, 25 bp, Homo sapien
tctgaagacaacataggatgcatag

SEQ ID NO: 1422817 - DNA, 25 bp, Homo sapien
tgctatcgtgatgagtaacatgtag

SEQ ID NO: 1422818 - DNA, 25 bp, Homo sapien
gtcatttctccccaagttgaccagg

SEQ ID NO: 1422819 - DNA, 25 bp, Homo sapien
ccaagttgaccaggatatttttata

SEQ ID NO: 1422820 - DNA, 25 bp, Homo sapien
ttttatataaccaactgcaaacaca

SEQ ID NO: 1422821 - DNA, 25 bp, Homo sapien
tctccccaagttgaccaggatattt

SEQ ID NO: 1422822 - DNA, 25 bp, Homo sapien
ccaccattatagatagcagcatagc

SEQ ID NO: 1422823 - DNA, 25 bp, Homo sapien
tccacgccaccattatagatagcag

SEQ ID NO: 1422824 - DNA, 25 bp, Homo sapien
ggcctccacgccaccattatagata

SEQ ID NO: 1422825 - DNA, 25 bp, Homo sapien
cagtaaggttgaaacggcctccacg

SEQ ID NO: 1422826 - DNA, 25 bp, Homo sapien
tgtgtgtagttcacaacttgaaaat

SEQ ID NO: 1422827 - DNA, 25 bp, Homo sapien
ccatagtactttcaatacaaggaga

SEQ ID NO: 1422828 - DNA, 25 bp, Homo sapien
ttgaaaatagccacaggtagagagg

SEQ ID NO: 1422829 - DNA, 25 bp, Homo sapien
gaggagtagcacatcaggaaatcat

SEQ ID NO: 1422830 - DNA, 25 bp, Homo sapien
tcaaataacatactgactctaaagt

SEQ ID NO: 1422831 - DNA, 25 bp, Homo sapien
aatgagcaaatatctacattattga

SEQ ID NO: 1422832 - DNA, 25 bp, Homo sapien
aagttttaaagtgccacttcctatg

SEQ ID NO: 1422833 - DNA, 25 bp, Homo sapien
tcctatgtgcctttgcgcaagtcag

SEQ ID NO: 1422834 - DNA, 25 bp, Homo sapien
ggatatcagggaactgacttgaatc

SEQ ID NO: 1422835 - DNA, 25 bp, Homo sapien
tatggtatcagtagcagagcctagg

SEQ ID NO: 1422836 - DNA, 25 bp, Homo sapien
cactgcccatctgctatggtatcag

SEQ ID NO: 1422837 - DNA, 25 bp, Homo sapien
gcattttagggccagtcagtgccaa

SEQ ID NO: 1422838 - DNA, 25 bp, Homo sapien
gctggggtgtcagtaacaatgccac

SEQ ID NO: 1422839 - DNA, 25 bp, Homo sapien
tgtcagtaacaatgccaccattttg

SEQ ID NO: 1422840 - DNA, 25 bp, Homo sapien
aagctggggtgtcagtaacaatgcc

SEQ ID NO: 1422841 - DNA, 25 bp, Homo sapien
gggtgtcagtaacaatgccaccatt

SEQ ID NO: 1422842 - DNA, 25 bp, Homo sapien
tgagacaaggatttgccctaggaca

SEQ ID NO: 1422843 - DNA, 25 bp, Homo sapien
aacacaggtaagagagatgacattc

SEQ ID NO: 1422844 - DNA, 25 bp, Homo sapien
gaacagcgaccagcctgccactgag

SEQ ID NO: 1422845 - DNA, 25 bp, Homo sapien
gacattcaggctgaacagcgaccag

SEQ ID NO: 1422846 - DNA, 25 bp, Homo sapien
tagcaccaggtaagagtaagtccat

SEQ ID NO: 1422847 - DNA, 25 bp, Homo sapien
tttataacggaggtagtctgtggca

SEQ ID NO: 1422848 - DNA, 25 bp, Homo sapien
tgagcccctgcagtagaacaacagg

SEQ ID NO: 1422849 - DNA, 25 bp, Homo sapien
catgtaacaataaggctgagcccct

SEQ ID NO: 1422850 - DNA, 25 bp, Homo sapien
gcaacctccgcctcaggtgaggctc

SEQ ID NO: 1422851 - DNA, 25 bp, Homo sapien
acctccgcctcaggtgaggctcagg

SEQ ID NO: 1422852 - DNA, 25 bp, Homo sapien
aggctcaggtgatccttccacctca

SEQ ID NO: 1422853 - DNA, 25 bp, Homo sapien
gctcaggtgatccttccacctcagc

SEQ ID NO: 1422854 - DNA, 25 bp, Homo sapien
acagacatgtgagccatctggccta

SEQ ID NO: 1422855 - DNA, 25 bp, Homo sapien
tctagacacaagatagggagccttt

SEQ ID NO: 1422856 - DNA, 25 bp, Homo sapien
tctgaagactagaggacaagctgac

SEQ ID NO: 1422857 - DNA, 25 bp, Homo sapien
taatctccattatcagtaaagggcg

SEQ ID NO: 1422858 - DNA, 25 bp, Homo sapien
tgtgatgaagcaacctaatcccaga

SEQ ID NO: 1422859 - DNA, 25 bp, Homo sapien
cagttagcaagctccacttgatcag

SEQ ID NO: 1422860 - DNA, 25 bp, Homo sapien
tgtgttggtaaatcagttagcaagc

SEQ ID NO: 1422861 - DNA, 25 bp, Homo sapien
ggaaattttgttgcacctgactatg

SEQ ID NO: 1422862 - DNA, 25 bp, Homo sapien
catgaattttggtctaatttgtgtt

SEQ ID NO: 1422863 - DNA, 25 bp, Homo sapien
attaacatacagtcaaattttagcc

SEQ ID NO: 1422864 - DNA, 25 bp, Homo sapien
tctggccttcaactattaacataca

SEQ ID NO: 1422865 - DNA, 25 bp, Homo sapien
gatctgttttactgaaagtctggcc

SEQ ID NO: 1422866 - DNA, 25 bp, Homo sapien
gcctgcttaaaacttacacactggt

SEQ ID NO: 1422867 - DNA, 25 bp, Homo sapien
tctcggtcaggttcttgtccggccc

SEQ ID NO: 1422868 - DNA, 25 bp, Homo sapien
ccccagcaggtacggggtcaggaag

SEQ ID NO: 1422869 - DNA, 25 bp, Homo sapien
tcaggttcttgtccggccccagcag

SEQ ID NO: 1422870 - DNA, 25 bp, Homo sapien
tccctctcggtcaggttcttgtccg

SEQ ID NO: 1422871 - DNA, 25 bp, Homo sapien
tcggcaagaaccagcattcgcgacg

SEQ ID NO: 1422872 - DNA, 25 bp, Homo sapien
gagacaccgggccgggcacatccat

SEQ ID NO: 1422873 - DNA, 25 bp, Homo sapien
attcgcgacggacccgagcggtccg

SEQ ID NO: 1422874 - DNA, 25 bp, Homo sapien
gcgaagaagccgtaggcgcagagca

SEQ ID NO: 1422875 - DNA, 25 bp, Homo sapien
ggtcaggcacttgtaaccgcgagtg

SEQ ID NO: 1422876 - DNA, 25 bp, Homo sapien
taaggccaggacgttctggactcgc

SEQ ID NO: 1422877 - DNA, 25 bp, Homo sapien
tcctccgccaactggagtgagggtc

SEQ ID NO: 1422878 - DNA, 25 bp, Homo sapien
gagtgacgccttctccctgtaaggc

SEQ ID NO: 1422879 - DNA, 25 bp, Homo sapien
tcttccattggtcgtgggtcacacg

SEQ ID NO: 1422880 - DNA, 25 bp, Homo sapien
tcaagcgcggaggacatgtggaact

SEQ ID NO: 1422881 - DNA, 25 bp, Homo sapien
tggaactccactccaaaagcggcgg

SEQ ID NO: 1422882 - DNA, 25 bp, Homo sapien
gcctgatcgcccagtttaagggaga

SEQ ID NO: 1422883 - DNA, 25 bp, Homo sapien
tagtcctccgctggaagaaacgcgc

SEQ ID NO: 1422884 - DNA, 25 bp, Homo sapien
tcctgtgggcctagtcctccgctgg

SEQ ID NO: 1422885 - DNA, 25 bp, Homo sapien
tgttctccccaaccaccgtttatca

SEQ ID NO: 1422886 - DNA, 25 bp, Homo sapien
tccgctggaagaaacgcgctgttct

SEQ ID NO: 1422887 - DNA, 25 bp, Homo sapien
aaagttcatgttgtgctcacagaaa

SEQ ID NO: 1422888 - DNA, 25 bp, Homo sapien
agcctaatcatatcagataacaaag

SEQ ID NO: 1422889 - DNA, 25 bp, Homo sapien
tggggaaaatcacccatatgattca

SEQ ID NO: 1422890 - DNA, 25 bp, Homo sapien
tcagctcttcacatacagtggaatg

SEQ ID NO: 1422891 - DNA, 25 bp, Homo sapien
catagtcttgggagacaactattac

SEQ ID NO: 1422892 - DNA, 25 bp, Homo sapien
agcaaatcctattgactttgccttc

SEQ ID NO: 1422893 - DNA, 25 bp, Homo sapien
gcatactgcttaattcattagcaaa

SEQ ID NO: 1422894 - DNA, 25 bp, Homo sapien
tttgccttcaaaatatggccggaat

SEQ ID NO: 1422895 - DNA, 25 bp, Homo sapien
catgtgaccctttgcaactgaacag

SEQ ID NO: 1422896 - DNA, 25 bp, Homo sapien
tctcaagtagagaataacgaagctg

SEQ ID NO: 1422897 - DNA, 25 bp, Homo sapien
tagagaagcccaggactagctgcgt

SEQ ID NO: 1422898 - DNA, 25 bp, Homo sapien
gaagctggccctgtagaaaacaaag

SEQ ID NO: 1422899 - DNA, 25 bp, Homo sapien
cagttgtgcaatatctacaggatca

SEQ ID NO: 1422900 - DNA, 25 bp, Homo sapien
gttgtgcaatatctacaggatcact

SEQ ID NO: 1422901 - DNA, 25 bp, Homo sapien
agttgtgcaatatctacaggatcac

SEQ ID NO: 1422902 - DNA, 25 bp, Homo sapien
ccagttgtgcaatatctacaggatc

SEQ ID NO: 1422903 - DNA, 25 bp, Homo sapien
caatgtgtgcagtccttagggagac

SEQ ID NO: 1422904 - DNA, 25 bp, Homo sapien
tacttactggtagcaaggagttaca

SEQ ID NO: 1422905 - DNA, 25 bp, Homo sapien
gaccaggacggattcacaatttcaa

SEQ ID NO: 1422906 - DNA, 25 bp, Homo sapien
gaaactgtgtgccatgtagtaccag

SEQ ID NO: 1422907 - DNA, 25 bp, Homo sapien
cacagcgtaaaatacattgcccatt

SEQ ID NO: 1422908 - DNA, 25 bp, Homo sapien
tcttccaggggtttttgaatgttca

SEQ ID NO: 1422909 - DNA, 25 bp, Homo sapien
taacatttaacacagcgtaaaatac

SEQ ID NO: 1422910 - DNA, 25 bp, Homo sapien
cattgcccattctaaatggtttgag

SEQ ID NO: 1422911 - DNA, 25 bp, Homo sapien
ggcgaagtgcaatactttgattcca

SEQ ID NO: 1422912 - DNA, 25 bp, Homo sapien
cacggataaacctggaaatgattgg

SEQ ID NO: 1422913 - DNA, 25 bp, Homo sapien
ttaggaatgacacggataaacctgg

SEQ ID NO: 1422914 - DNA, 25 bp, Homo sapien
caaagagttccaggcgaagtgcaat

SEQ ID NO: 1422915 - DNA, 25 bp, Homo sapien
actccctgctcactgtagtggatgg

SEQ ID NO: 1422916 - DNA, 25 bp, Homo sapien
cagagacttgcagccctgtgttata

SEQ ID NO: 1422917 - DNA, 25 bp, Homo sapien
gaggatttcagcctgtatggtttcc

SEQ ID NO: 1422918 - DNA, 25 bp, Homo sapien
gccgttatcttcttgatcttgagta

SEQ ID NO: 1422919 - DNA, 25 bp, Homo sapien
aacacatagataaggaagatgttaa

SEQ ID NO: 1422920 - DNA, 25 bp, Homo sapien
aatgacaaaaacacatagataagga

SEQ ID NO: 1422921 - DNA, 25 bp, Homo sapien
atgacaaaaacacatagataaggaa

SEQ ID NO: 1422922 - DNA, 25 bp, Homo sapien
tgacaaaaacacatagataaggaag

SEQ ID NO: 1422923 - DNA, 25 bp, Homo sapien
ttcttaaacgaagaagctgtgattt

SEQ ID NO: 1422924 - DNA, 25 bp, Homo sapien
cctgggcattcagacgggcacggaa

SEQ ID NO: 1422925 - DNA, 25 bp, Homo sapien
gcacggaagggttcccagtaatctc

SEQ ID NO: 1422926 - DNA, 25 bp, Homo sapien
cttggcttgccaggcattcacacgt

SEQ ID NO: 1422927 - DNA, 25 bp, Homo sapien
tattgtagaggcatctgaattgcca

SEQ ID NO: 1422928 - DNA, 25 bp, Homo sapien
gctcgagttggagagatcctaatat

SEQ ID NO: 1422929 - DNA, 25 bp, Homo sapien
tatatctagccacaataggtgggtc

SEQ ID NO: 1422930 - DNA, 25 bp, Homo sapien
tgcagttccaatcgaagggtaggtc

SEQ ID NO: 1422931 - DNA, 25 bp, Homo sapien
ttagagatgaagaagccggcaacct

SEQ ID NO: 1422932 - DNA, 25 bp, Homo sapien
tggaaacaccaatgagtacagactg

SEQ ID NO: 1422933 - DNA, 25 bp, Homo sapien
gacagactggctagggttctcggaa

SEQ ID NO: 1422934 - DNA, 25 bp, Homo sapien
tcctgaggctaaagaggcaccctac

SEQ ID NO: 1422935 - DNA, 25 bp, Homo sapien
acaagtgcacgccaccctgcctaat

SEQ ID NO: 1422936 - DNA, 25 bp, Homo sapien
caagtgcacgccaccctgcctaatt

SEQ ID NO: 1422937 - DNA, 25 bp, Homo sapien
ttacaagtgcacgccaccctgccta

SEQ ID NO: 1422938 - DNA, 25 bp, Homo sapien
attacaagtgcacgccaccctgcct

SEQ ID NO: 1422939 - DNA, 25 bp, Homo sapien
gaactgtaagctacatagaactctg

SEQ ID NO: 1422940 - DNA, 25 bp, Homo sapien
caggacttcaggtagtgtttggcac

SEQ ID NO: 1422941 - DNA, 25 bp, Homo sapien
tagaactctgtggtatagcaggact

SEQ ID NO: 1422942 - DNA, 25 bp, Homo sapien
gctgttccctttgaagatctgccag

SEQ ID NO: 1422943 - DNA, 25 bp, Homo sapien
gtttttctacactccaagcattata

SEQ ID NO: 1422944 - DNA, 25 bp, Homo sapien
gcattataagatccaccattgttta

SEQ ID NO: 1422945 - DNA, 25 bp, Homo sapien
taatcttgctaatctgggctcccag

SEQ ID NO: 1422946 - DNA, 25 bp, Homo sapien
ttgtttaatcttgctaatctgggct

SEQ ID NO: 1422947 - DNA, 25 bp, Homo sapien
gccttgatctgtgaatcagatatga

SEQ ID NO: 1422948 - DNA, 25 bp, Homo sapien
tatgataccagtgcttagtcccatt

SEQ ID NO: 1422949 - DNA, 25 bp, Homo sapien
gcttagtcccattggcatcctacag

SEQ ID NO: 1422950 - DNA, 25 bp, Homo sapien
tgtgaatcagatatgataccagtgc

SEQ ID NO: 1422951 - DNA, 25 bp, Homo sapien
caacctctgtgtttaggagccacca

SEQ ID NO: 1422952 - DNA, 25 bp, Homo sapien
caccagccaggttttgatgccttca

SEQ ID NO: 1422953 - DNA, 25 bp, Homo sapien
taagaaatggcgtttgcatccctgc

SEQ ID NO: 1422954 - DNA, 25 bp, Homo sapien
ctctgtccatgataagaaatggcgt

SEQ ID NO: 1422955 - DNA, 25 bp, Homo sapien
gccattttccagcaaggtctggccg

SEQ ID NO: 1422956 - DNA, 25 bp, Homo sapien
gccgcctatgttcagcaggtgtaac

SEQ ID NO: 1422957 - DNA, 25 bp, Homo sapien
gggccagacccctaactggtgctgt

SEQ ID NO: 1422958 - DNA, 25 bp, Homo sapien
gaaagtgaaccacgtgaatgtcttg

SEQ ID NO: 1422959 - DNA, 25 bp, Homo sapien
ggcatgttgctgtccttatgtagta

SEQ ID NO: 1422960 - DNA, 25 bp, Homo sapien
gggacctatcaagcctgagtgaata

SEQ ID NO: 1422961 - DNA, 25 bp, Homo sapien
ttctctcatgtccataggcatgttg

SEQ ID NO: 1422962 - DNA, 25 bp, Homo sapien
ttttcatcaaaggtcataaatagta

SEQ ID NO: 1422963 - DNA, 25 bp, Homo sapien
gagtaaattgtattgcctctttctc

SEQ ID NO: 1422964 - DNA, 25 bp, Homo sapien
aacagagtaaattgtattgcctctt

SEQ ID NO: 1422965 - DNA, 25 bp, Homo sapien
cagagtaaattgtattgcctctttc

SEQ ID NO: 1422966 - DNA, 25 bp, Homo sapien
aaaacagagtaaattgtattgcctc

SEQ ID NO: 1422967 - DNA, 25 bp, Homo sapien
gactttctggccctgatcgctcagt

SEQ ID NO: 1422968 - DNA, 25 bp, Homo sapien
ccttaaaccattcaggagagtcatc

SEQ ID NO: 1422969 - DNA, 25 bp, Homo sapien
tcacagctgagtagtaggcccaagc

SEQ ID NO: 1422970 - DNA, 25 bp, Homo sapien
cataggaaagtccatgggcatgtag

SEQ ID NO: 1422971 - DNA, 25 bp, Homo sapien
taggaccaagaattccgagatgctc

SEQ ID NO: 1422972 - DNA, 25 bp, Homo sapien
tgctgtcgaggtactttcgaaaaac

SEQ ID NO: 1422973 - DNA, 25 bp, Homo sapien
tactcccctcgaggatcacgtttgg

SEQ ID NO: 1422974 - DNA, 25 bp, Homo sapien
cacgtttggtaaaagtgctgtcgag

SEQ ID NO: 1422975 - DNA, 25 bp, Homo sapien
ctgtctctcactgggtataagtgcc

SEQ ID NO: 1422976 - DNA, 25 bp, Homo sapien
gccattgtgcctagtttgctcatag

SEQ ID NO: 1422977 - DNA, 25 bp, Homo sapien
tctccagtggtaagcacattatctg

SEQ ID NO: 1422978 - DNA, 25 bp, Homo sapien
cactgggtataagtgccatgaggtc

SEQ ID NO: 1422979 - DNA, 25 bp, Homo sapien
catcatagggcacataatcaatttc

SEQ ID NO: 1422980 - DNA, 25 bp, Homo sapien
tgtacaaattctgaataatcccagg

SEQ ID NO: 1422981 - DNA, 25 bp, Homo sapien
tttccattgttgctgcggaggtacc

SEQ ID NO: 1422982 - DNA, 25 bp, Homo sapien
tgcaatgttgtcaggatctctggag

SEQ ID NO: 1422983 - DNA, 25 bp, Homo sapien
agcaatgactgactagattcagaag

SEQ ID NO: 1422984 - DNA, 25 bp, Homo sapien
gatagaaaagtatcattgagagtag

SEQ ID NO: 1422985 - DNA, 25 bp, Homo sapien
gaaaagtatcattgagagtaggaga

SEQ ID NO: 1422986 - DNA, 25 bp, Homo sapien
gactgactagattcagaagggtaga

SEQ ID NO: 1422987 - DNA, 25 bp, Homo sapien
tggaggaggtgatatctggctgaga

SEQ ID NO: 1422988 - DNA, 25 bp, Homo sapien
gaggtgatatctggctgagatccgg

SEQ ID NO: 1422989 - DNA, 25 bp, Homo sapien
gctgagatccgggagaagggtggtg

SEQ ID NO: 1422990 - DNA, 25 bp, Homo sapien
tggctgagatccgggagaagggtgg

SEQ ID NO: 1422991 - DNA, 25 bp, Homo sapien
ctggggaaagggacatctgaccaaa

SEQ ID NO: 1422992 - DNA, 25 bp, Homo sapien
aagtttggggaaagatctgtctcac

SEQ ID NO: 1422993 - DNA, 25 bp, Homo sapien
tggggaaagggacatctgaccaaag

SEQ ID NO: 1422994 - DNA, 25 bp, Homo sapien
gaaagtagacgtatccctgtgacat

SEQ ID NO: 1422995 - DNA, 25 bp, Homo sapien
tatccagccaaaatccatagagggc

SEQ ID NO: 1422996 - DNA, 25 bp, Homo sapien
cagtgtcttggctaggaaggtcctc

SEQ ID NO: 1422997 - DNA, 25 bp, Homo sapien
gaaagtgtcatctggtcgaggtctg

SEQ ID NO: 1422998 - DNA, 25 bp, Homo sapien
caatgatgagtttcggaatgacctg

SEQ ID NO: 1422999 - DNA, 25 bp, Homo sapien
cattctccagagctagggcagtaag

SEQ ID NO: 1423000 - DNA, 25 bp, Homo sapien
cgatcatgcattttccgtgtagcca

SEQ ID NO: 1423001 - DNA, 25 bp, Homo sapien
tcttcaggttctaaacgatcatgca

SEQ ID NO: 1423002 - DNA, 25 bp, Homo sapien
cactggacagtgtcatcaaagcaga

SEQ ID NO: 1423003 - DNA, 25 bp, Homo sapien
gaccgtcacagattctccacgcatg

SEQ ID NO: 1423004 - DNA, 25 bp, Homo sapien
caagagtagttatgctctcaggcac

SEQ ID NO: 1423005 - DNA, 25 bp, Homo sapien
tgggtccccacactacagaagtgcc

SEQ ID NO: 1423006 - DNA, 25 bp, Homo sapien
gctcatgatgtttgattcataaaac

SEQ ID NO: 1423007 - DNA, 25 bp, Homo sapien
cacagcctgctgttcgatgtctgct

SEQ ID NO: 1423008 - DNA, 25 bp, Homo sapien
gtcctcaaggtaccagcttttgttc

SEQ ID NO: 1423009 - DNA, 25 bp, Homo sapien
ctcaaggtaccagcttttgttctca

SEQ ID NO: 1423010 - DNA, 25 bp, Homo sapien
gggtcatcacgtttcacctcatcag

SEQ ID NO: 1423011 - DNA, 25 bp, Homo sapien
tggtcttgttaagcactgggcatca

SEQ ID NO: 1423012 - DNA, 25 bp, Homo sapien
gaagtagtcctattagcccagaggc

SEQ ID NO: 1423013 - DNA, 25 bp, Homo sapien
tcccctggttgaactgctctgatca

SEQ ID NO: 1423014 - DNA, 25 bp, Homo sapien
gaggcgatgtctctcatgatgtcca

SEQ ID NO: 1423015 - DNA, 25 bp, Homo sapien
agttggattcagtagaagtgaaaga

SEQ ID NO: 1423016 - DNA, 25 bp, Homo sapien
tagttggattcagtagaagtgaaag

SEQ ID NO: 1423017 - DNA, 25 bp, Homo sapien
gttggattcagtagaagtgaaagat

SEQ ID NO: 1423018 - DNA, 25 bp, Homo sapien
gggcggctggccatatttttgaaca

SEQ ID NO: 1423019 - DNA, 25 bp, Homo sapien
tcttcataaggcgagaaggtcactc

SEQ ID NO: 1423020 - DNA, 25 bp, Homo sapien
cactccatgagggtaaatgctatag

SEQ ID NO: 1423021 - DNA, 25 bp, Homo sapien
gagttgacttcatcttcataaggcg

SEQ ID NO: 1423022 - DNA, 25 bp, Homo sapien
tatccaaatgctgagacctgtattt

SEQ ID NO: 1423023 - DNA, 25 bp, Homo sapien
gacctgggctctgataataggaccc

SEQ ID NO: 1423024 - DNA, 25 bp, Homo sapien
catcttcgtactgtgtgtacataac

SEQ ID NO: 1423025 - DNA, 25 bp, Homo sapien
gtttggtgaaggactcatcttcgta

SEQ ID NO: 1423026 - DNA, 25 bp, Homo sapien
gccgcctctgctcacgagttatttt

SEQ ID NO: 1423027 - DNA, 25 bp, Homo sapien
tgtccatattcgctggtattacagg

SEQ ID NO: 1423028 - DNA, 25 bp, Homo sapien
atgtcaatgtaagcctgcatcccag

SEQ ID NO: 1423029 - DNA, 25 bp, Homo sapien
tattacaggtgcatagtcccaaatg

SEQ ID NO: 1423030 - DNA, 25 bp, Homo sapien
tagtggatgtagcactgacaagggt

SEQ ID NO: 1423031 - DNA, 25 bp, Homo sapien
catatttgcggtagtggatgtagca

SEQ ID NO: 1423032 - DNA, 25 bp, Homo sapien
ggcccacagtcatatttgcggtagt

SEQ ID NO: 1423033 - DNA, 25 bp, Homo sapien
ctctgggcccacagtcatatttgcg

SEQ ID NO: 1423034 - DNA, 25 bp, Homo sapien
acctggccgttgaaatgaatggaga

SEQ ID NO: 1423035 - DNA, 25 bp, Homo sapien
caggacctggccgttgaaatgaatg

SEQ ID NO: 1423036 - DNA, 25 bp, Homo sapien
tgccagctgatgtggtcatgggcac

SEQ ID NO: 1423037 - DNA, 25 bp, Homo sapien
aataattctggccccgagctcattc

SEQ ID NO: 1423038 - DNA, 25 bp, Homo sapien
gtcccattcacatatccattgactg

SEQ ID NO: 1423039 - DNA, 25 bp, Homo sapien
cacgatttgcttgtcaaacgtcttc

SEQ ID NO: 1423040 - DNA, 25 bp, Homo sapien
ccattgactgtgtacattagggatg

SEQ ID NO: 1423041 - DNA, 25 bp, Homo sapien
tcaaacacagcaaatagtagcacga

SEQ ID NO: 1423042 - DNA, 25 bp, Homo sapien
gaatgtgtggtcaaggtaagaagca

SEQ ID NO: 1423043 - DNA, 25 bp, Homo sapien
cactgatactccattcataggtgta

SEQ ID NO: 1423044 - DNA, 25 bp, Homo sapien
tcgtccatcttctccgcagggaatg

SEQ ID NO: 1423045 - DNA, 25 bp, Homo sapien
aatcagccccgagttgaaatcctcg

SEQ ID NO: 1423046 - DNA, 25 bp, Homo sapien
tattccactcaaaacgctttgcatg

SEQ ID NO: 1423047 - DNA, 25 bp, Homo sapien
ctcaaaacgctttgcatgagtttgc

SEQ ID NO: 1423048 - DNA, 25 bp, Homo sapien
caaaacgctttgcatgagtttgcat

SEQ ID NO: 1423049 - DNA, 25 bp, Homo sapien
tggaaaatctattccactcaaaacg

SEQ ID NO: 1423050 - DNA, 25 bp, Homo sapien
gaggatggatgctcaagggcttatc

SEQ ID NO: 1423051 - DNA, 25 bp, Homo sapien
ttttatgatgtctccgacttcagca

SEQ ID NO: 1423052 - DNA, 25 bp, Homo sapien
tgatgtctccgacttcagcatataa

SEQ ID NO: 1423053 - DNA, 25 bp, Homo sapien
tactgtacctaattccttgaggatg

SEQ ID NO: 1423054 - DNA, 25 bp, Homo sapien
cctaggtgcccttttgtgagagtaa

SEQ ID NO: 1423055 - DNA, 25 bp, Homo sapien
aaaacaggtaaagcgagagcttcag

SEQ ID NO: 1423056 - DNA, 25 bp, Homo sapien
tctagataggagttaactggacatg

SEQ ID NO: 1423057 - DNA, 25 bp, Homo sapien
cagaaaactggtagtgaaggaaagg

SEQ ID NO: 1423058 - DNA, 25 bp, Homo sapien
tatggttcatactctctgtagacaa

SEQ ID NO: 1423059 - DNA, 25 bp, Homo sapien
aatatggttcatactctctgtagac

SEQ ID NO: 1423060 - DNA, 25 bp, Homo sapien
taaaatatggttcatactctctgta

SEQ ID NO: 1423061 - DNA, 25 bp, Homo sapien
tggttcatactctctgtagacaatt

SEQ ID NO: 1423062 - DNA, 25 bp, Homo sapien
cagcctacccagctggtgcccaaga

SEQ ID NO: 1423063 - DNA, 25 bp, Homo sapien
ggctcaggtcggtagctccaactga

SEQ ID NO: 1423064 - DNA, 25 bp, Homo sapien
tagctccaactgatgccctgagcag

SEQ ID NO: 1423065 - DNA, 25 bp, Homo sapien
tgccttagctgtgccgcttctgtcc

SEQ ID NO: 1423066 - DNA, 25 bp, Homo sapien
gacctgggcagcgcttgccgagctg

SEQ ID NO: 1423067 - DNA, 25 bp, Homo sapien
aggacctgggcagcgcttgccgagc

SEQ ID NO: 1423068 - DNA, 25 bp, Homo sapien
ggacctgggcagcgcttgccgagct

SEQ ID NO: 1423069 - DNA, 25 bp, Homo sapien
caggacctgggcagcgcttgccgag

SEQ ID NO: 1423070 - DNA, 25 bp, Homo sapien
gaccagaggtattagggagagcaac

SEQ ID NO: 1423071 - DNA, 25 bp, Homo sapien
gagagcaaccaaactagtgactgtt

SEQ ID NO: 1423072 - DNA, 25 bp, Homo sapien
tcccctgcagttcttgcaaacggca

SEQ ID NO: 1423073 - DNA, 25 bp, Homo sapien
tgtcccagctgcaatgagctctaga

SEQ ID NO: 1423074 - DNA, 25 bp, Homo sapien
aggcgggacaatgcccagggattca

SEQ ID NO: 1423075 - DNA, 25 bp, Homo sapien
catgagccggacaaagctgtatccc

SEQ ID NO: 1423076 - DNA, 25 bp, Homo sapien
cagggattcatgagccggacaaagc

SEQ ID NO: 1423077 - DNA, 25 bp, Homo sapien
caatgcccagggattcatgagccgg

SEQ ID NO: 1423078 - DNA, 25 bp, Homo sapien
tacactgatggtaaacaatgtgatg

SEQ ID NO: 1423079 - DNA, 25 bp, Homo sapien
tctcttgcagtgtagggtgtgcgat

SEQ ID NO: 1423080 - DNA, 25 bp, Homo sapien
taaataggacaaccataattgtgtg

SEQ ID NO: 1423081 - DNA, 25 bp, Homo sapien
caatgtgatgtatacagaccttact

SEQ ID NO: 1423082 - DNA, 25 bp, Homo sapien
tggagactccagaagatgctacagg

SEQ ID NO: 1423083 - DNA, 25 bp, Homo sapien
gctggtccagagctaatctaaggta

SEQ ID NO: 1423084 - DNA, 25 bp, Homo sapien
ggtccaagaggcctcatcaacagca

SEQ ID NO: 1423085 - DNA, 25 bp, Homo sapien
tccagagcgggtccaacaggctggt

SEQ ID NO: 1423086 - DNA, 25 bp, Homo sapien
tgttcacaacaggatcatatggagg

SEQ ID NO: 1423087 - DNA, 25 bp, Homo sapien
gcagcaaatgcattatagttaagtc

SEQ ID NO: 1423088 - DNA, 25 bp, Homo sapien
ccagtgtagcaggaaacttgatgtt

SEQ ID NO: 1423089 - DNA, 25 bp, Homo sapien
aggctgaatgaggagaccaggaaaa

SEQ ID NO: 1423090 - DNA, 25 bp, Homo sapien
tttgtaggacactcaactacccact

SEQ ID NO: 1423091 - DNA, 25 bp, Homo sapien
cctgaggcgcagcataatcttttct

SEQ ID NO: 1423092 - DNA, 25 bp, Homo sapien
tcatcatatctacaccctgaggcgc

SEQ ID NO: 1423093 - DNA, 25 bp, Homo sapien
ttttccagcaggtagcatagggaat

SEQ ID NO: 1423094 - DNA, 25 bp, Homo sapien
aaaaactccatatgttcctaggtgg

SEQ ID NO: 1423095 - DNA, 25 bp, Homo sapien
gcagcgtttgtaaaaactccatatg

SEQ ID NO: 1423096 - DNA, 25 bp, Homo sapien
gactcgggtcaaatgcagcgtttgt

SEQ ID NO: 1423097 - DNA, 25 bp, Homo sapien
ttaaggactcgggtcaaatgcagcg

SEQ ID NO: 1423098 - DNA, 25 bp, Homo sapien
ctgtgaggattcaaggggcatttcc

SEQ ID NO: 1423099 - DNA, 25 bp, Homo sapien
tgtgaggattcaaggggcatttccc

SEQ ID NO: 1423100 - DNA, 25 bp, Homo sapien
gctgagcaagctaatcacatacatg

SEQ ID NO: 1423101 - DNA, 25 bp, Homo sapien
tctccactgttagagggtcctctgg

SEQ ID NO: 1423102 - DNA, 25 bp, Homo sapien
gactgattttcaggagggctcatta

SEQ ID NO: 1423103 - DNA, 25 bp, Homo sapien
gcatcttgtgtcacttgccctcagc

SEQ ID NO: 1423104 - DNA, 25 bp, Homo sapien
ccaccgctccaccaaagtaagtcag

SEQ ID NO: 1423105 - DNA, 25 bp, Homo sapien
aggagcgtcccacccattatcagac

SEQ ID NO: 1423106 - DNA, 25 bp, Homo sapien
agacctatcgtagaagccaccgctc

SEQ ID NO: 1423107 - DNA, 25 bp, Homo sapien
tttcttagcaaagccaggagcgtcc

SEQ ID NO: 1423108 - DNA, 25 bp, Homo sapien
cttggcatgctgtttgtgcagagcc

SEQ ID NO: 1423109 - DNA, 25 bp, Homo sapien
agagcagattgatccataactgaag

SEQ ID NO: 1423110 - DNA, 25 bp, Homo sapien
ataactgaagtttccccagaggttg

SEQ ID NO: 1423111 - DNA, 25 bp, Homo sapien
caggttggcacggtagttgaccagt

SEQ ID NO: 1423112 - DNA, 25 bp, Homo sapien
aacatgtagttctgagcatttcaca

SEQ ID NO: 1423113 - DNA, 25 bp, Homo sapien
acatgtagttctgagcatttcacag

SEQ ID NO: 1423114 - DNA, 25 bp, Homo sapien
taacatgtagttctgagcatttcac

SEQ ID NO: 1423115 - DNA, 25 bp, Homo sapien
gagtgctgtctcctatgagtgtgaa

SEQ ID NO: 1423116 - DNA, 25 bp, Homo sapien
ttactgctgtccattgtcctgaagg

SEQ ID NO: 1423117 - DNA, 25 bp, Homo sapien
gagtgtgaatccagcgttgcagcca

SEQ ID NO: 1423118 - DNA, 25 bp, Homo sapien
caaaggttcccggatgatgcctaca

SEQ ID NO: 1423119 - DNA, 25 bp, Homo sapien
aagaagcaagaaatggtacagaaat

SEQ ID NO: 1423120 - DNA, 25 bp, Homo sapien
tcatccttgaggagatgattctcct

SEQ ID NO: 1423121 - DNA, 25 bp, Homo sapien
ccaattaaaagaagcgttaacagag

SEQ ID NO: 1423122 - DNA, 25 bp, Homo sapien
acagagttaaggctaatctggaata

SEQ ID NO: 1423123 - DNA, 25 bp, Homo sapien
tctccacgagtgtcagaacaatcca

SEQ ID NO: 1423124 - DNA, 25 bp, Homo sapien
cagcttaaagccgttgtcacaagag

SEQ ID NO: 1423125 - DNA, 25 bp, Homo sapien
tgtgcattccacattattgggcccc

SEQ ID NO: 1423126 - DNA, 25 bp, Homo sapien
gaaatggcaggtggagccaacattg

SEQ ID NO: 1423127 - DNA, 25 bp, Homo sapien
gggcaaagagttctgggcacttgat

SEQ ID NO: 1423128 - DNA, 25 bp, Homo sapien
tggggcaaagagttctgggcacttg

SEQ ID NO: 1423129 - DNA, 25 bp, Homo sapien
gcaaagagttctgggcacttgatgg

SEQ ID NO: 1423130 - DNA, 25 bp, Homo sapien
ctggggcaaagagttctgggcactt

SEQ ID NO: 1423131 - DNA, 25 bp, Homo sapien
ctggaacttccaagaggttgaacac

SEQ ID NO: 1423132 - DNA, 25 bp, Homo sapien
tatccctcgtcacagatgaattgac

SEQ ID NO: 1423133 - DNA, 25 bp, Homo sapien
tggtccagacaaagaatatccctcg

SEQ ID NO: 1423134 - DNA, 25 bp, Homo sapien
gcgtcccgatcgagtacaatccaat

SEQ ID NO: 1423135 - DNA, 25 bp, Homo sapien
ctgagggcttagcaaaggtgtgcag

SEQ ID NO: 1423136 - DNA, 25 bp, Homo sapien
tctgagggcttagcaaaggtgtgca

SEQ ID NO: 1423137 - DNA, 25 bp, Homo sapien
ctttcaatctgatcaacttgtccaa

SEQ ID NO: 1423138 - DNA, 25 bp, Homo sapien
aagtatttctgtagtaagtgtgtat

SEQ ID NO: 1423139 - DNA, 25 bp, Homo sapien
tttctgtagtaagtgtgtatgtggg

SEQ ID NO: 1423140 - DNA, 25 bp, Homo sapien
tcaacttgtccaaagatctggttct

SEQ ID NO: 1423141 - DNA, 25 bp, Homo sapien
aagaccctgataaggagttagcaag

SEQ ID NO: 1423142 - DNA, 25 bp, Homo sapien
ccccggaggcatttgcatttgggat

SEQ ID NO: 1423143 - DNA, 25 bp, Homo sapien
gacacttgtgtaatctgcctatccc

SEQ ID NO: 1423144 - DNA, 25 bp, Homo sapien
aagggccatgccctactgtctatgg

SEQ ID NO: 1423145 - DNA, 25 bp, Homo sapien
tgactggtacctaaaggcaccgaag

SEQ ID NO: 1423146 - DNA, 25 bp, Homo sapien
tcacccgggcctcatttggaactgg

SEQ ID NO: 1423147 - DNA, 25 bp, Homo sapien
gaattccagtttccagtagccaagc

SEQ ID NO: 1423148 - DNA, 25 bp, Homo sapien
tggaactgggagatcctggcactgc

SEQ ID NO: 1423149 - DNA, 25 bp, Homo sapien
ggtgtcatactgaaacgctctcaag

SEQ ID NO: 1423150 - DNA, 25 bp, Homo sapien
cactgtcccaagttatcacaccgaa

SEQ ID NO: 1423151 - DNA, 25 bp, Homo sapien
gaactatatcggctcctctcagcat

SEQ ID NO: 1423152 - DNA, 25 bp, Homo sapien
gagcaatccatgcttccgtggacag

SEQ ID NO: 1423153 - DNA, 25 bp, Homo sapien
agtgagcggatgaacacagtccatg

SEQ ID NO: 1423154 - DNA, 25 bp, Homo sapien
caagggtgcagaccagtgtccagag

SEQ ID NO: 1423155 - DNA, 25 bp, Homo sapien
aatgcagcggagcatgtccaagccc

SEQ ID NO: 1423156 - DNA, 25 bp, Homo sapien
tggcactcaaatttacagctggagc

SEQ ID NO: 1423157 - DNA, 25 bp, Homo sapien
aagctgcagctagactgatgctgga

SEQ ID NO: 1423158 - DNA, 25 bp, Homo sapien
gctgtgcattgcaccacttccggtc

SEQ ID NO: 1423159 - DNA, 25 bp, Homo sapien
caggtcatgtttcctcgttcaggaa

SEQ ID NO: 1423160 - DNA, 25 bp, Homo sapien
ggtccaactaatgcaaatccctctt

SEQ ID NO: 1423161 - DNA, 25 bp, Homo sapien
actgtggaggcttatttgtccagat

SEQ ID NO: 1423162 - DNA, 25 bp, Homo sapien
atttacttggtacccgtcagtgcag

SEQ ID NO: 1423163 - DNA, 25 bp, Homo sapien
gaggcttatttgtccagattccaga

SEQ ID NO: 1423164 - DNA, 25 bp, Homo sapien
acttggtacccgtcagtgcagtgga

SEQ ID NO: 1423165 - DNA, 25 bp, Homo sapien
tgcagttcatgagcacgtgttgagg

SEQ ID NO: 1423166 - DNA, 25 bp, Homo sapien
gtggctgcagttcatgagcacgtgt

SEQ ID NO: 1423167 - DNA, 25 bp, Homo sapien
gctgcagttcatgagcacgtgttga

SEQ ID NO: 1423168 - DNA, 25 bp, Homo sapien
cagttcatgagcacgtgttgaggga

SEQ ID NO: 1423169 - DNA, 25 bp, Homo sapien
aatccagggtaacaggagcaggtgt

SEQ ID NO: 1423170 - DNA, 25 bp, Homo sapien
tgtagttcccgatggtctcgaggca

SEQ ID NO: 1423171 - DNA, 25 bp, Homo sapien
gaggcactctccttgtttgctgcag

SEQ ID NO: 1423172 - DNA, 25 bp, Homo sapien
cgtattcacattctggcccatagaa

SEQ ID NO: 1423173 - DNA, 25 bp, Homo sapien
gaaaggctgaattctcgttttgacc

SEQ ID NO: 1423174 - DNA, 25 bp, Homo sapien
acagactcatcccctctcagatagg

SEQ ID NO: 1423175 - DNA, 25 bp, Homo sapien
gcatagatatggaaaggtcagagtc

SEQ ID NO: 1423176 - DNA, 25 bp, Homo sapien
aggtcagagtcatggacattcacag

SEQ ID NO: 1423177 - DNA, 25 bp, Homo sapien
taacaggaaagtttcaaagtagaga

SEQ ID NO: 1423178 - DNA, 25 bp, Homo sapien
acaggaaagtttcaaagtagagaag

SEQ ID NO: 1423179 - DNA, 25 bp, Homo sapien
caggaaagtttcaaagtagagaagg

SEQ ID NO: 1423180 - DNA, 25 bp, Homo sapien
gatcccaatccagtagtaggagctg

SEQ ID NO: 1423181 - DNA, 25 bp, Homo sapien
gctgtaatgataagtccatgctgcc

SEQ ID NO: 1423182 - DNA, 25 bp, Homo sapien
ctaagtctgtgtagcgattctggca

SEQ ID NO: 1423183 - DNA, 25 bp, Homo sapien
gactcttgatgtatatctccacgca

SEQ ID NO: 1423184 - DNA, 25 bp, Homo sapien
gaagcaaaggagttgggaaattcca

SEQ ID NO: 1423185 - DNA, 25 bp, Homo sapien
acaagatggctatttggcagttggc

SEQ ID NO: 1423186 - DNA, 25 bp, Homo sapien
cactgaagcaaaggagttgggaaat

SEQ ID NO: 1423187 - DNA, 25 bp, Homo sapien
ggaatctctggtacaagatggctat

SEQ ID NO: 1423188 - DNA, 25 bp, Homo sapien
gatgatgtagcgtgcatgggacggt

SEQ ID NO: 1423189 - DNA, 25 bp, Homo sapien
catgggacggtgtgcggttgtgtgt

SEQ ID NO: 1423190 - DNA, 25 bp, Homo sapien
ggtctgtgacaatttgctgcgaggt

SEQ ID NO: 1423191 - DNA, 25 bp, Homo sapien
tgtgttcgtgtgtcatgccccagtg

SEQ ID NO: 1423192 - DNA, 25 bp, Homo sapien
ctgccttctgcccaacccagactgc

SEQ ID NO: 1423193 - DNA, 25 bp, Homo sapien
ttctgcccaacccagactgcttaca

SEQ ID NO: 1423194 - DNA, 25 bp, Homo sapien
ctcctctgtgactctgctggttttc

SEQ ID NO: 1423195 - DNA, 25 bp, Homo sapien
tcctctgtgactctgctggttttct

SEQ ID NO: 1423196 - DNA, 25 bp, Homo sapien
gtgtcaggctgtttagaaaaacaac

SEQ ID NO: 1423197 - DNA, 25 bp, Homo sapien
tcagtgtcaggctgtttagaaaaac

SEQ ID NO: 1423198 - DNA, 25 bp, Homo sapien
cagtgtcaggctgtttagaaaaaca

SEQ ID NO: 1423199 - DNA, 25 bp, Homo sapien
agtgtcaggctgtttagaaaaacaa

SEQ ID NO: 1423200 - DNA, 25 bp, Homo sapien
caaatgcaaaattgcatgttacagg

SEQ ID NO: 1423201 - DNA, 25 bp, Homo sapien
ttgcatgttacagggtaacctttca

SEQ ID NO: 1423202 - DNA, 25 bp, Homo sapien
aacctttcagtaagaagccaggaag

SEQ ID NO: 1423203 - DNA, 25 bp, Homo sapien
catgggttggattagtaaaggacta

SEQ ID NO: 1423204 - DNA, 25 bp, Homo sapien
tctttcaacttgagcaggaccccat

SEQ ID NO: 1423205 - DNA, 25 bp, Homo sapien
catgtttgacgtaggaggtgccacc

SEQ ID NO: 1423206 - DNA, 25 bp, Homo sapien
taggatggtccaattcacagacggc

SEQ ID NO: 1423207 - DNA, 25 bp, Homo sapien
cagacggcgaggctacagtgcaaat

SEQ ID NO: 1423208 - DNA, 25 bp, Homo sapien
taggcctttctagaccatctggtga

SEQ ID NO: 1423209 - DNA, 25 bp, Homo sapien
ttcttaaatatagcacccattggcc

SEQ ID NO: 1423210 - DNA, 25 bp, Homo sapien
gtcttaactccccagctaggtaata

SEQ ID NO: 1423211 - DNA, 25 bp, Homo sapien
caactcctcaataagccatgggctc

SEQ ID NO: 1423212 - DNA, 25 bp, Homo sapien
aggtgcgagtttgaaagaaatcttc

SEQ ID NO: 1423213 - DNA, 25 bp, Homo sapien
acagacatagggagaccagcccaga

SEQ ID NO: 1423214 - DNA, 25 bp, Homo sapien
cttcacatctgtgggtttcctgcca

SEQ ID NO: 1423215 - DNA, 25 bp, Homo sapien
tcactcagtaggtgcgagtttgaaa

SEQ ID NO: 1423216 - DNA, 25 bp, Homo sapien
caagtatttagttcaggtcctagca

SEQ ID NO: 1423217 - DNA, 25 bp, Homo sapien
aagccctattttgccacctgtagtg

SEQ ID NO: 1423218 - DNA, 25 bp, Homo sapien
ggtcctagcacgtagacagtgttgc

SEQ ID NO: 1423219 - DNA, 25 bp, Homo sapien
tctagaatcatcctacccaggtgaa

SEQ ID NO: 1423220 - DNA, 25 bp, Homo sapien
aagataccctaagcttcctaccaag

SEQ ID NO: 1423221 - DNA, 25 bp, Homo sapien
ggcccacagatgaagactatttaat

SEQ ID NO: 1423222 - DNA, 25 bp, Homo sapien
cctaccaagccagtgatcttttggg

SEQ ID NO: 1423223 - DNA, 25 bp, Homo sapien
taatgttatcttaaagataccctaa

SEQ ID NO: 1423224 - DNA, 25 bp, Homo sapien
gttgtgttcttttcatgtgaagtta

SEQ ID NO: 1423225 - DNA, 25 bp, Homo sapien
ttgtgttcttttcatgtgaagttaa

SEQ ID NO: 1423226 - DNA, 25 bp, Homo sapien
tgtgttcttttcatgtgaagttaaa

SEQ ID NO: 1423227 - DNA, 25 bp, Homo sapien
gtgttcttttcatgtgaagttaaac

SEQ ID NO: 1423228 - DNA, 25 bp, Homo sapien
cagagaatgcagtaaccatgactgc

SEQ ID NO: 1423229 - DNA, 25 bp, Homo sapien
catgactgccactggaatgaagagg

SEQ ID NO: 1423230 - DNA, 25 bp, Homo sapien
ccttaatcattgagaaacttttgtc

SEQ ID NO: 1423231 - DNA, 25 bp, Homo sapien
gcagtaaccatgactgccactggaa

SEQ ID NO: 1423232 - DNA, 25 bp, Homo sapien
gcccctgatgagtctacagcatagg

SEQ ID NO: 1423233 - DNA, 25 bp, Homo sapien
taatgcctacagaatctcaatgccc

SEQ ID NO: 1423234 - DNA, 25 bp, Homo sapien
tcagtaaggcacatagcatgagacc

SEQ ID NO: 1423235 - DNA, 25 bp, Homo sapien
tgaaaatgcacctaaaaatgttggc

SEQ ID NO: 1423236 - DNA, 25 bp, Homo sapien
tgtcatccatgcagatagtctcagg

SEQ ID NO: 1423237 - DNA, 25 bp, Homo sapien
cactgtgtcaggtggagggtataca

SEQ ID NO: 1423238 - DNA, 25 bp, Homo sapien
gcttagtgatgattcaggagtatcc

SEQ ID NO: 1423239 - DNA, 25 bp, Homo sapien
ggagcagacacaggtagctattctt

SEQ ID NO: 1423240 - DNA, 25 bp, Homo sapien
tgctcatccatcagctccatcgtta

SEQ ID NO: 1423241 - DNA, 25 bp, Homo sapien
cagctccatcgttaagatttcagtt

SEQ ID NO: 1423242 - DNA, 25 bp, Homo sapien
tgtaaatgtttatgtatgtctttcc

SEQ ID NO: 1423243 - DNA, 25 bp, Homo sapien
tttcctcatatctgctcatccatca

SEQ ID NO: 1423244 - DNA, 25 bp, Homo sapien
tgacatattggactaggatttgacc

SEQ ID NO: 1423245 - DNA, 25 bp, Homo sapien
ccttctgagcagatgaaggtacatg

SEQ ID NO: 1423246 - DNA, 25 bp, Homo sapien
gaccagattccagatgattcacaaa

SEQ ID NO: 1423247 - DNA, 25 bp, Homo sapien
acatgcagaggtaaagctgaagctg

SEQ ID NO: 1423248 - DNA, 25 bp, Homo sapien
tcttcaatcccagttaagtttgttc

SEQ ID NO: 1423249 - DNA, 25 bp, Homo sapien
ttcccaaagggtgagtacagtccat

SEQ ID NO: 1423250 - DNA, 25 bp, Homo sapien
caggttggttctggagatgaccagt

SEQ ID NO: 1423251 - DNA, 25 bp, Homo sapien
ttgacaggttggttctggagatgac

SEQ ID NO: 1423252 - DNA, 25 bp, Homo sapien
gggcctccaaaggctcacactgaat

SEQ ID NO: 1423253 - DNA, 25 bp, Homo sapien
tggggcctccaaaggctcacactga

SEQ ID NO: 1423254 - DNA, 25 bp, Homo sapien
gcctccaaaggctcacactgaatca

SEQ ID NO: 1423255 - DNA, 25 bp, Homo sapien
tctggggcctccaaaggctcacact

SEQ ID NO: 1423256 - DNA, 25 bp, Homo sapien
ttttgttccaaccagcttcatgata

SEQ ID NO: 1423257 - DNA, 25 bp, Homo sapien
ccagcttcatgataagctataatga

SEQ ID NO: 1423258 - DNA, 25 bp, Homo sapien
gctataatgattcctgtgactttac

SEQ ID NO: 1423259 - DNA, 25 bp, Homo sapien
cagagtggctagtatcattttgttc

SEQ ID NO: 1423260 - DNA, 25 bp, Homo sapien
cagttgcaggtgtaattattgatga

SEQ ID NO: 1423261 - DNA, 25 bp, Homo sapien
gacactggggcccatagtaccccac

SEQ ID NO: 1423262 - DNA, 25 bp, Homo sapien
ggccactgcatgaccagggctggca

SEQ ID NO: 1423263 - DNA, 25 bp, Homo sapien
tattgatgatttctacacattctcc

SEQ ID NO: 1423264 - DNA, 25 bp, Homo sapien
taaatctgtgtaattgtctcggcag

SEQ ID NO: 1423265 - DNA, 25 bp, Homo sapien
gttgttgggctcaccatctccccag

SEQ ID NO: 1423266 - DNA, 25 bp, Homo sapien
cagaatcttctagccctttgccagt

SEQ ID NO: 1423267 - DNA, 25 bp, Homo sapien
tcagtaagagatttgttggttccca

SEQ ID NO: 1423268 - DNA, 25 bp, Homo sapien
taagtccagcagtcggttccatgat

SEQ ID NO: 1423269 - DNA, 25 bp, Homo sapien
taatggtaagtccagcagtcggttc

SEQ ID NO: 1423270 - DNA, 25 bp, Homo sapien
tttttcagaataatggtaagtccag

SEQ ID NO: 1423271 - DNA, 25 bp, Homo sapien
tccagcagtcggttccatgatgtgc

SEQ ID NO: 1423272 - DNA, 25 bp, Homo sapien
cacaacagagcattgtccaccccca

SEQ ID NO: 1423273 - DNA, 25 bp, Homo sapien
gatgttccataagtccctctgggtg

SEQ ID NO: 1423274 - DNA, 25 bp, Homo sapien
agatgttccataagtccctctgggt

SEQ ID NO: 1423275 - DNA, 25 bp, Homo sapien
aagatgttccataagtccctctggg

SEQ ID NO: 1423276 - DNA, 25 bp, Homo sapien
tgttccataagtccctctgggtgct

SEQ ID NO: 1423277 - DNA, 25 bp, Homo sapien
ggctttgcttggtccttctctagtt

SEQ ID NO: 1423278 - DNA, 25 bp, Homo sapien
tgagcctcttgacttagcacaaggg

SEQ ID NO: 1423279 - DNA, 25 bp, Homo sapien
tgaatgtcaacagaaagccttgctt

SEQ ID NO: 1423280 - DNA, 25 bp, Homo sapien
ggtctcaggtccttgcccaaaggga

SEQ ID NO: 1423281 - DNA, 25 bp, Homo sapien
ttgcccaaagggagtgtgctgtgct

SEQ ID NO: 1423282 - DNA, 25 bp, Homo sapien
tgttgttgccagtgttcagccagaa

SEQ ID NO: 1423283 - DNA, 25 bp, Homo sapien
tggttaacatcatgccttgctaggg

SEQ ID NO: 1423284 - DNA, 25 bp, Homo sapien
tgattctcacactcctcaaggctag

SEQ ID NO: 1423285 - DNA, 25 bp, Homo sapien
tgcatagtaaccctcgcacagagca

SEQ ID NO: 1423286 - DNA, 25 bp, Homo sapien
cagcaactgtgtaatcagctgtcga

SEQ ID NO: 1423287 - DNA, 25 bp, Homo sapien
tgacagcaactgtgtaatcagctgt

SEQ ID NO: 1423288 - DNA, 25 bp, Homo sapien
caactgtgtaatcagctgtcgaaac

SEQ ID NO: 1423289 - DNA, 25 bp, Homo sapien
ttatgacagcaactgtgtaatcagc

SEQ ID NO: 1423290 - DNA, 25 bp, Homo sapien
gtttctgtgccaagattttacagcg

SEQ ID NO: 1423291 - DNA, 25 bp, Homo sapien
aaaggaattctgagatttcagagtc

SEQ ID NO: 1423292 - DNA, 25 bp, Homo sapien
attctgagatttcagagtcttggtc

SEQ ID NO: 1423293 - DNA, 25 bp, Homo sapien
ttacagcgagcaagggagagttaga

SEQ ID NO: 1423294 - DNA, 25 bp, Homo sapien
ttcccttcattagccaacactttct

SEQ ID NO: 1423295 - DNA, 25 bp, Homo sapien
aatatcctttcccttcattagccaa

SEQ ID NO: 1423296 - DNA, 25 bp, Homo sapien
ttcattagccaacactttcttgatc

SEQ ID NO: 1423297 - DNA, 25 bp, Homo sapien
tgcttggaagaaaatatcctttccc

SEQ ID NO: 1423298 - DNA, 25 bp, Homo sapien
tgggtgttgcggtttcagccataaa

SEQ ID NO: 1423299 - DNA, 25 bp, Homo sapien
cctgctggactttgatctattgaag

SEQ ID NO: 1423300 - DNA, 25 bp, Homo sapien
tgttgcggtttcagccataaaggca

SEQ ID NO: 1423301 - DNA, 25 bp, Homo sapien
cttttcagttgaaggccgtccttgc

SEQ ID NO: 1423302 - DNA, 25 bp, Homo sapien
ggagagttatctgtctctgttaact

SEQ ID NO: 1423303 - DNA, 25 bp, Homo sapien
ctggcatagtaggcaagaagggcca

SEQ ID NO: 1423304 - DNA, 25 bp, Homo sapien
ggccagagacccgaggagagttatc

SEQ ID NO: 1423305 - DNA, 25 bp, Homo sapien
cagtgtatccctctagttccccaga

SEQ ID NO: 1423306 - DNA, 25 bp, Homo sapien
agaaggcttttggtagcttccatct

SEQ ID NO: 1423307 - DNA, 25 bp, Homo sapien
aagaaggcttttggtagcttccatc

SEQ ID NO: 1423308 - DNA, 25 bp, Homo sapien
tggaatacatgagaacactaggtaa

SEQ ID NO: 1423309 - DNA, 25 bp, Homo sapien
gttcaatggcatgctttgtataaga

SEQ ID NO: 1423310 - DNA, 25 bp, Homo sapien
aaaaatatgtggaatgttcaatggc

SEQ ID NO: 1423311 - DNA, 25 bp, Homo sapien
acactaggtaaagcactgtcttcca

SEQ ID NO: 1423312 - DNA, 25 bp, Homo sapien
tattaaatccagatacaatatgact

SEQ ID NO: 1423313 - DNA, 25 bp, Homo sapien
caatatgacttaattcatcaagtgt

SEQ ID NO: 1423314 - DNA, 25 bp, Homo sapien
caaactcgatgcttcagggcctctg

SEQ ID NO: 1423315 - DNA, 25 bp, Homo sapien
tcatcaagtgttgcaaactcgatgc

SEQ ID NO: 1423316 - DNA, 25 bp, Homo sapien
ccgtaagcatttccgaagccagagg

SEQ ID NO: 1423317 - DNA, 25 bp, Homo sapien
tgctaatgtcaggagggagagtcca

SEQ ID NO: 1423318 - DNA, 25 bp, Homo sapien
aagggaatgttggactcagtgggag

SEQ ID NO: 1423319 - DNA, 25 bp, Homo sapien
gcagaaagtccagctaccaagggaa

SEQ ID NO: 1423320 - DNA, 25 bp, Homo sapien
agtaagagacgaagaaaggtcatga

SEQ ID NO: 1423321 - DNA, 25 bp, Homo sapien
atgaggaagaattgatgttaaagtc

SEQ ID NO: 1423322 - DNA, 25 bp, Homo sapien
aggaagaattgatgttaaagtctct

SEQ ID NO: 1423323 - DNA, 25 bp, Homo sapien
ctaaggaagtaagagacgaagaaag

SEQ ID NO: 1423324 - DNA, 25 bp, Homo sapien
gacaaccaccatcaatcaatgcatc

SEQ ID NO: 1423325 - DNA, 25 bp, Homo sapien
cagacaaccaccatcaatcaatgca

SEQ ID NO: 1423326 - DNA, 25 bp, Homo sapien
agacaaccaccatcaatcaatgcat

SEQ ID NO: 1423327 - DNA, 25 bp, Homo sapien
caaccaccatcaatcaatgcatcac

SEQ ID NO: 1423328 - DNA, 25 bp, Homo sapien
cttcacaggtaggtagcaggccaga

SEQ ID NO: 1423329 - DNA, 25 bp, Homo sapien
gcagctcatgttgatctttcccgga

SEQ ID NO: 1423330 - DNA, 25 bp, Homo sapien
ttcaggacaggcgaacttgcacaca

SEQ ID NO: 1423331 - DNA, 25 bp, Homo sapien
catgtccgagctgcagagccattga

SEQ ID NO: 1423332 - DNA, 25 bp, Homo sapien
tgagttgatccatgtaattcaaatc

SEQ ID NO: 1423333 - DNA, 25 bp, Homo sapien
gtgcactcaagttgagttgatccat

SEQ ID NO: 1423334 - DNA, 25 bp, Homo sapien
tcttctgtccattgtccctgagatg

SEQ ID NO: 1423335 - DNA, 25 bp, Homo sapien
tctgtccattgtccctgagatgtgc

SEQ ID NO: 1423336 - DNA, 25 bp, Homo sapien
aataggggaatgagcacacctcacc

SEQ ID NO: 1423337 - DNA, 25 bp, Homo sapien
ccaataggggaatgagcacacctca

SEQ ID NO: 1423338 - DNA, 25 bp, Homo sapien
tccaataggggaatgagcacacctc

SEQ ID NO: 1423339 - DNA, 25 bp, Homo sapien
ctccaataggggaatgagcacacct

SEQ ID NO: 1423340 - DNA, 25 bp, Homo sapien
gacaattcatgtagcctcgctcggg

SEQ ID NO: 1423341 - DNA, 25 bp, Homo sapien
aacggaaactgccagaagcactagg

SEQ ID NO: 1423342 - DNA, 25 bp, Homo sapien
aactcacagctggacccataacgga

SEQ ID NO: 1423343 - DNA, 25 bp, Homo sapien
acatgtgggcttctcgttgtcccac

SEQ ID NO: 1423344 - DNA, 25 bp, Homo sapien
tgtccactgcccttgagtggtgcat

SEQ ID NO: 1423345 - DNA, 25 bp, Homo sapien
tgcacctcacagagccattctgagg

SEQ ID NO: 1423346 - DNA, 25 bp, Homo sapien
ttcacaaactgggatttgctgtgtc

SEQ ID NO: 1423347 - DNA, 25 bp, Homo sapien
tggtccctgcaacatgaagccttcc

SEQ ID NO: 1423348 - DNA, 25 bp, Homo sapien
caaatgtacaggttgtgttccatgg

SEQ ID NO: 1423349 - DNA, 25 bp, Homo sapien
tggaaacattccacgaacccattgg

SEQ ID NO: 1423350 - DNA, 25 bp, Homo sapien
tgggctcccattagttcaaatcctt

SEQ ID NO: 1423351 - DNA, 25 bp, Homo sapien
ggatttgtcacagcatcacactcaa

SEQ ID NO: 1423352 - DNA, 25 bp, Homo sapien
tccagaggacatacactgcatggtc

SEQ ID NO: 1423353 - DNA, 25 bp, Homo sapien
catgctgcttggcaggtaaccccta

SEQ ID NO: 1423354 - DNA, 25 bp, Homo sapien
ggacatacactgcatggtctccatg

SEQ ID NO: 1423355 - DNA, 25 bp, Homo sapien
attctccagaggacatacactgcat

SEQ ID NO: 1423356 - DNA, 25 bp, Homo sapien
tcccagtgggtgactgcaaaccagg

SEQ ID NO: 1423357 - DNA, 25 bp, Homo sapien
ccagtgggtgactgcaaaccaggct

SEQ ID NO: 1423358 - DNA, 25 bp, Homo sapien
ctgaagtttcccagtgggtgactgc

SEQ ID NO: 1423359 - DNA, 25 bp, Homo sapien
gtttcccagtgggtgactgcaaacc

SEQ ID NO: 1423360 - DNA, 25 bp, Homo sapien
taaaaatactacagtaagcttccaa

SEQ ID NO: 1423361 - DNA, 25 bp, Homo sapien
gtagtgtaattgtgtttacctcaaa

SEQ ID NO: 1423362 - DNA, 25 bp, Homo sapien
atactacagtaagcttccaaccagg

SEQ ID NO: 1423363 - DNA, 25 bp, Homo sapien
ggagagtagtgtaattgtgtttacc

SEQ ID NO: 1423364 - DNA, 25 bp, Homo sapien
ggaaggcatgcagacctgactctaa

SEQ ID NO: 1423365 - DNA, 25 bp, Homo sapien
gactctaatgccagctaggacgtga

SEQ ID NO: 1423366 - DNA, 25 bp, Homo sapien
agtctcagctcacgatcaccatatg

SEQ ID NO: 1423367 - DNA, 25 bp, Homo sapien
taaataactggtgaatctaggactc

SEQ ID NO: 1423368 - DNA, 25 bp, Homo sapien
cacttgcaagtgtaattattgatgg

SEQ ID NO: 1423369 - DNA, 25 bp, Homo sapien
actgcaggatgtattggtacaggca

SEQ ID NO: 1423370 - DNA, 25 bp, Homo sapien
ttcaccgtggccactgcaggatgta

SEQ ID NO: 1423371 - DNA, 25 bp, Homo sapien
tacacattcaccgtggccactgcag

SEQ ID NO: 1423372 - DNA, 25 bp, Homo sapien
tcccactgctgccgcaaactcccta

SEQ ID NO: 1423373 - DNA, 25 bp, Homo sapien
cccactgctgccgcaaactccctac

SEQ ID NO: 1423374 - DNA, 25 bp, Homo sapien
ctcccactgctgccgcaaactccct

SEQ ID NO: 1423375 - DNA, 25 bp, Homo sapien
ctttgctgacaataagcactggcct

SEQ ID NO: 1423376 - DNA, 25 bp, Homo sapien
gttttgaattgcaaccaggtgtgtg

SEQ ID NO: 1423377 - DNA, 25 bp, Homo sapien
ttgcctattgttgggttcacctgga

SEQ ID NO: 1423378 - DNA, 25 bp, Homo sapien
cataagtcatagcttccgtggaggt

SEQ ID NO: 1423379 - DNA, 25 bp, Homo sapien
gagagctgagagaaactgtgaagca

SEQ ID NO: 1423380 - DNA, 25 bp, Homo sapien
gtgagagctgagagaaactgtgaag

SEQ ID NO: 1423381 - DNA, 25 bp, Homo sapien
ctgagagaaactgtgaagcaatcat

SEQ ID NO: 1423382 - DNA, 25 bp, Homo sapien
ccaaagtgagagctgagagaaactg

SEQ ID NO: 1423383 - DNA, 25 bp, Homo sapien
gacttcaagagttcttttcacccaa

SEQ ID NO: 1423384 - DNA, 25 bp, Homo sapien
cttcaagagttcttttcacccaaag

SEQ ID NO: 1423385 - DNA, 25 bp, Homo sapien
ggcagcatcctaagattttgggcaa

SEQ ID NO: 1423386 - DNA, 25 bp, Homo sapien
ggaaatcgtgggtagctagttacat

SEQ ID NO: 1423387 - DNA, 25 bp, Homo sapien
tttgggcaaaggacactagtgcaat

SEQ ID NO: 1423388 - DNA, 25 bp, Homo sapien
caataagagcttgtacagatgtggt

SEQ ID NO: 1423389 - DNA, 25 bp, Homo sapien
tctcaggtgggtatcactgctgcct

SEQ ID NO: 1423390 - DNA, 25 bp, Homo sapien
tctgtctcaggtcagtataggagtt

SEQ ID NO: 1423391 - DNA, 25 bp, Homo sapien
cacaggatctctcaggtgggtatca

SEQ ID NO: 1423392 - DNA, 25 bp, Homo sapien
gcctctgtctcaggtcagtatagga

SEQ ID NO: 1423393 - DNA, 25 bp, Homo sapien
tcaaggctccactgaatctcccaag

SEQ ID NO: 1423394 - DNA, 25 bp, Homo sapien
aggctccactgaatctcccaagctc

SEQ ID NO: 1423395 - DNA, 25 bp, Homo sapien
ctctgaagatgtagctagctgttac

SEQ ID NO: 1423396 - DNA, 25 bp, Homo sapien
ttcaaggctccactgaatctcccaa

SEQ ID NO: 1423397 - DNA, 25 bp, Homo sapien
ggaccctcttggcagtttctcgcat

SEQ ID NO: 1423398 - DNA, 25 bp, Homo sapien
cggattgccggttttcaagcctcgc

SEQ ID NO: 1423399 - DNA, 25 bp, Homo sapien
agcctcgcctcacatggaccctctt

SEQ ID NO: 1423400 - DNA, 25 bp, Homo sapien
gattgccggttttcaagcctcgcct

SEQ ID NO: 1423401 - DNA, 25 bp, Homo sapien
gaaagtcacctaatctccacaaata

SEQ ID NO: 1423402 - DNA, 25 bp, Homo sapien
cagctagagagccttaagaaagtca

SEQ ID NO: 1423403 - DNA, 25 bp, Homo sapien
gacacagccataccatgccagctag

SEQ ID NO: 1423404 - DNA, 25 bp, Homo sapien
cccttttatgggatttctgtgagga

SEQ ID NO: 1423405 - DNA, 25 bp, Homo sapien
ggaaatgggttgcacttcaagtgag

SEQ ID NO: 1423406 - DNA, 25 bp, Homo sapien
cagaggattcactggttccctagca

SEQ ID NO: 1423407 - DNA, 25 bp, Homo sapien
tctttctcatatgtcccaggctgac

SEQ ID NO: 1423408 - DNA, 25 bp, Homo sapien
gcaggaccctgagtagttggaaaga

SEQ ID NO: 1423409 - DNA, 25 bp, Homo sapien
atcgatgacagtcacagtaacctga

SEQ ID NO: 1423410 - DNA, 25 bp, Homo sapien
tatcgatgacagtcacagtaacctg

SEQ ID NO: 1423411 - DNA, 25 bp, Homo sapien
tcgatgacagtcacagtaacctgat

SEQ ID NO: 1423412 - DNA, 25 bp, Homo sapien
ctatcgatgacagtcacagtaacct

SEQ ID NO: 1423413 - DNA, 25 bp, Homo sapien
aaagaagtaagtgtcaatggctccg

SEQ ID NO: 1423414 - DNA, 25 bp, Homo sapien
gtgtcaatggctccgacttccaagg

SEQ ID NO: 1423415 - DNA, 25 bp, Homo sapien
gtaagtgtcaatggctccgacttcc

SEQ ID NO: 1423416 - DNA, 25 bp, Homo sapien
gacttccaaggactctgatgtccca

SEQ ID NO: 1423417 - DNA, 25 bp, Homo sapien
gatgcctggtctcaacttgacaaaa

SEQ ID NO: 1423418 - DNA, 25 bp, Homo sapien
ccccaagttgggaaatccttatgtg

SEQ ID NO: 1423419 - DNA, 25 bp, Homo sapien
tggcttaggcagtaaacactttcgt

SEQ ID NO: 1423420 - DNA, 25 bp, Homo sapien
gaggaatacatggtggctctcagtg

SEQ ID NO: 1423421 - DNA, 25 bp, Homo sapien
gcctctctgccactatttttggaat

SEQ ID NO: 1423422 - DNA, 25 bp, Homo sapien
tgcctctctgccactatttttggaa

SEQ ID NO: 1423423 - DNA, 25 bp, Homo sapien
tcattttggatactcagtgaatgtt

SEQ ID NO: 1423424 - DNA, 25 bp, Homo sapien
ccaggaggtcaaaggtacattccca

SEQ ID NO: 1423425 - DNA, 25 bp, Homo sapien
tgctggccaaaagtacacgtccatt

SEQ ID NO: 1423426 - DNA, 25 bp, Homo sapien
caaaataatgtgctttgctggccaa

SEQ ID NO: 1423427 - DNA, 25 bp, Homo sapien
ggaccctcccttgaatgcagttata

SEQ ID NO: 1423428 - DNA, 25 bp, Homo sapien
gataacttaacatgctggaaacctg

SEQ ID NO: 1423429 - DNA, 25 bp, Homo sapien
ctgataacttaacatgctggaaacc

SEQ ID NO: 1423430 - DNA, 25 bp, Homo sapien
tgataacttaacatgctggaaacct

SEQ ID NO: 1423431 - DNA, 25 bp, Homo sapien
ataacttaacatgctggaaacctgg

SEQ ID NO: 1423432 - DNA, 25 bp, Homo sapien
tgtcttgagagggagctgcattttc

SEQ ID NO: 1423433 - DNA, 25 bp, Homo sapien
tcccacaagtgatcctgaggcaagt

SEQ ID NO: 1423434 - DNA, 25 bp, Homo sapien
ggaatccagggtcaaagctccatct

SEQ ID NO: 1423435 - DNA, 25 bp, Homo sapien
taggcatagcatgctctttggcagc

SEQ ID NO: 1423436 - DNA, 25 bp, Homo sapien
tatagtgaaattaaactgaaaggtc

SEQ ID NO: 1423437 - DNA, 25 bp, Homo sapien
atagtgaaattaaactgaaaggtca

SEQ ID NO: 1423438 - DNA, 25 bp, Homo sapien
ctatagtgaaattaaactgaaaggt

SEQ ID NO: 1423439 - DNA, 25 bp, Homo sapien
tagtgaaattaaactgaaaggtcat

SEQ ID NO: 1423440 - DNA, 25 bp, Homo sapien
agacgtctttggtcctctttccaag

SEQ ID NO: 1423441 - DNA, 25 bp, Homo sapien
gttgggcccaatttctctttagcag

SEQ ID NO: 1423442 - DNA, 25 bp, Homo sapien
tggatagaatttgatgatacacaca

SEQ ID NO: 1423443 - DNA, 25 bp, Homo sapien
tctttagcagcttatacatggtaac

SEQ ID NO: 1423444 - DNA, 25 bp, Homo sapien
gtcccgcggctaggaacgcgcctct

SEQ ID NO: 1423445 - DNA, 25 bp, Homo sapien
gcggctaggaacgcgcctctttcct

SEQ ID NO: 1423446 - DNA, 25 bp, Homo sapien
ccgcggctaggaacgcgcctctttc

SEQ ID NO: 1423447 - DNA, 25 bp, Homo sapien
acccagtcccgcggctaggaacgcg

SEQ ID NO: 1423448 - DNA, 25 bp, Homo sapien
cggaacaaatccgaccccagaagtg

SEQ ID NO: 1423449 - DNA, 25 bp, Homo sapien
ctgcaggtcccggaacaaatccgac

SEQ ID NO: 1423450 - DNA, 25 bp, Homo sapien
cacctccccatttgaatgtaatgtt

SEQ ID NO: 1423451 - DNA, 25 bp, Homo sapien
agaagtggggacttctggccctcac

SEQ ID NO: 1423452 - DNA, 25 bp, Homo sapien
ggatcgcgcttctgaaaaagctcac

SEQ ID NO: 1423453 - DNA, 25 bp, Homo sapien
tcccgacgtgtcctgggatcgcgct

SEQ ID NO: 1423454 - DNA, 25 bp, Homo sapien
gggatgcttgcttcccgacgtgtcc

SEQ ID NO: 1423455 - DNA, 25 bp, Homo sapien
gtgtcctgggatcgcgcttctgaaa

SEQ ID NO: 1423456 - DNA, 25 bp, Homo sapien
gcctcctccggacctaaatcgcgca

SEQ ID NO: 1423457 - DNA, 25 bp, Homo sapien
cctcctccggacctaaatcgcgcac

SEQ ID NO: 1423458 - DNA, 25 bp, Homo sapien
ctagagaagcccgactttctttccg

SEQ ID NO: 1423459 - DNA, 25 bp, Homo sapien
gactgcgagtttccggtctgggctt

SEQ ID NO: 1423460 - DNA, 25 bp, Homo sapien
tgtctcaggaaggtgcggtcccagc

SEQ ID NO: 1423461 - DNA, 25 bp, Homo sapien
tctctatggttttggagccggcgga

SEQ ID NO: 1423462 - DNA, 25 bp, Homo sapien
ttgcaaggccatgtgatactaacca

SEQ ID NO: 1423463 - DNA, 25 bp, Homo sapien
tgttctccacatgatgcacacttgg

SEQ ID NO: 1423464 - DNA, 25 bp, Homo sapien
taaccatccccacgtgagcagtttg

SEQ ID NO: 1423465 - DNA, 25 bp, Homo sapien
tatcctcggattttagaccacatgg

SEQ ID NO: 1423466 - DNA, 25 bp, Homo sapien
gcttgccctgtttgatatccacgaa

SEQ ID NO: 1423467 - DNA, 25 bp, Homo sapien
ttaaacagctcaaagaaaagctcac

SEQ ID NO: 1423468 - DNA, 25 bp, Homo sapien
tattcacagtgatatactttactca

SEQ ID NO: 1423469 - DNA, 25 bp, Homo sapien
gtccatgtagttaatgcttgccctg

SEQ ID NO: 1423470 - DNA, 25 bp, Homo sapien
gccttactgctagctgacaggagtt

SEQ ID NO: 1423471 - DNA, 25 bp, Homo sapien
gctagaacaacataccttggaggcg

SEQ ID NO: 1423472 - DNA, 25 bp, Homo sapien
gggagcatgcctcatattcagggaa

SEQ ID NO: 1423473 - DNA, 25 bp, Homo sapien
ctaacaagggaaatagggagctact

SEQ ID NO: 1423474 - DNA, 25 bp, Homo sapien
ttttactaagcaattgaggccacag

SEQ ID NO: 1423475 - DNA, 25 bp, Homo sapien
cagaagcattagtatgacccagcag

SEQ ID NO: 1423476 - DNA, 25 bp, Homo sapien
gatgaacctaaacctgtaagatggg

SEQ ID NO: 1423477 - DNA, 25 bp, Homo sapien
gaccagaacaggcatacacagcagg

SEQ ID NO: 1423478 - DNA, 25 bp, Homo sapien
taagacactggtagtagcactctga

SEQ ID NO: 1423479 - DNA, 25 bp, Homo sapien
caaaaagagctcgtcaggagttccc

SEQ ID NO: 1423480 - DNA, 25 bp, Homo sapien
tgggaaccctttgctaatgtgactg

SEQ ID NO: 1423481 - DNA, 25 bp, Homo sapien
gaagagtacaggtcagcgctgcata

SEQ ID NO: 1423482 - DNA, 25 bp, Homo sapien
tcctggaaaccagtactgtgagcct

SEQ ID NO: 1423483 - DNA, 25 bp, Homo sapien
tcaggaactgcctaggtccacaaag

SEQ ID NO: 1423484 - DNA, 25 bp, Homo sapien
cagtcagtctcctacttcagttggc

SEQ ID NO: 1423485 - DNA, 25 bp, Homo sapien
tggcacagactggataatgagctcc

SEQ ID NO: 1423486 - DNA, 25 bp, Homo sapien
cagttattatcttcccagttcagct

SEQ ID NO: 1423487 - DNA, 25 bp, Homo sapien
ttattatcttcccagttcagctccc

SEQ ID NO: 1423488 - DNA, 25 bp, Homo sapien
atcttcccagttcagctccccttct

SEQ ID NO: 1423489 - DNA, 25 bp, Homo sapien
cttcccagttcagctccccttcttc

SEQ ID NO: 1423490 - DNA, 25 bp, Homo sapien
gcaaattttgaggaaaactgcatca

SEQ ID NO: 1423491 - DNA, 25 bp, Homo sapien
ttttgaggaaaactgcatcactggg

SEQ ID NO: 1423492 - DNA, 25 bp, Homo sapien
agcagcagaaggcttaatttctggg

SEQ ID NO: 1423493 - DNA, 25 bp, Homo sapien
catctcaggatcttttactggcttc

SEQ ID NO: 1423494 - DNA, 25 bp, Homo sapien
tactttagtatctaagctgctgggc

SEQ ID NO: 1423495 - DNA, 25 bp, Homo sapien
gtgatgacacttttggcggctcgat

SEQ ID NO: 1423496 - DNA, 25 bp, Homo sapien
gatttccaaggcatagactcttcag

SEQ ID NO: 1423497 - DNA, 25 bp, Homo sapien
acaggttttgtagcagtgattccac

SEQ ID NO: 1423498 - DNA, 25 bp, Homo sapien
ttttacatctgagagtccatttatg

SEQ ID NO: 1423499 - DNA, 25 bp, Homo sapien
cagtcaggccactcctcagactttt

SEQ ID NO: 1423500 - DNA, 25 bp, Homo sapien
ggttctctaggccaaatctgtatgt

SEQ ID NO: 1423501 - DNA, 25 bp, Homo sapien
gaagttttcactgtcctccgaagta

SEQ ID NO: 1423502 - DNA, 25 bp, Homo sapien
gaactacacttatgggaaggatagc

SEQ ID NO: 1423503 - DNA, 25 bp, Homo sapien
gatcccagcagaacattactcaaga

SEQ ID NO: 1423504 - DNA, 25 bp, Homo sapien
tactcaagatcaacgatgtcacatg

SEQ ID NO: 1423505 - DNA, 25 bp, Homo sapien
gaaggatagcattaaggaagtgtag

SEQ ID NO: 1423506 - DNA, 25 bp, Homo sapien
tcttgcaggctcaaataagtttgcc

SEQ ID NO: 1423507 - DNA, 25 bp, Homo sapien
cactgagagatcctgtgcaatgtgt

SEQ ID NO: 1423508 - DNA, 25 bp, Homo sapien
tatagaaatgctctaagccaggcag

SEQ ID NO: 1423509 - DNA, 25 bp, Homo sapien
tttttcacaacacgcccattaacat

SEQ ID NO: 1423510 - DNA, 25 bp, Homo sapien
tgttgatgggcgtgctgccagaaaa

SEQ ID NO: 1423511 - DNA, 25 bp, Homo sapien
attgtagtaatctcgctgtatgtgc

SEQ ID NO: 1423512 - DNA, 25 bp, Homo sapien
gggttctccaagattggcgagatct

SEQ ID NO: 1423513 - DNA, 25 bp, Homo sapien
ttggcgagatctgactgtgatggct

SEQ ID NO: 1423514 - DNA, 25 bp, Homo sapien
tagacttctatgtattgggagacag

SEQ ID NO: 1423515 - DNA, 25 bp, Homo sapien
tatgaatggcatttataggactaga

SEQ ID NO: 1423516 - DNA, 25 bp, Homo sapien
tgcagcactgtttgtagggattaaa

SEQ ID NO: 1423517 - DNA, 25 bp, Homo sapien
acacctaggctataaactgatacag

SEQ ID NO: 1423518 - DNA, 25 bp, Homo sapien
gagaccagcactgctaggctatgca

SEQ ID NO: 1423519 - DNA, 25 bp, Homo sapien
ttgaagatcttggttcgttctcctc

SEQ ID NO: 1423520 - DNA, 25 bp, Homo sapien
tggaatcgctagtatcacgcaggcc

SEQ ID NO: 1423521 - DNA, 25 bp, Homo sapien
gagtaattgccacaatggaatcgct

SEQ ID NO: 1423522 - DNA, 25 bp, Homo sapien
gagcgcactcagaactcatctaggg

SEQ ID NO: 1423523 - DNA, 25 bp, Homo sapien
agtggctctcaaactacctgtggta

SEQ ID NO: 1423524 - DNA, 25 bp, Homo sapien
tcttcccctgtaaatgagcaattgg

SEQ ID NO: 1423525 - DNA, 25 bp, Homo sapien
cagctcttttcaagggtaggaccac

SEQ ID NO: 1423526 - DNA, 25 bp, Homo sapien
gagtgaagtgctccacgtaggcctc

SEQ ID NO: 1423527 - DNA, 25 bp, Homo sapien
gggatcacccgtgactggaacaggg

SEQ ID NO: 1423528 - DNA, 25 bp, Homo sapien
agcaccatccgcacatgctcttcat

SEQ ID NO: 1423529 - DNA, 25 bp, Homo sapien
cttcaaacaactggagaagcacggg

SEQ ID NO: 1423530 - DNA, 25 bp, Homo sapien
caaggagtttctccctgcgcatgat

SEQ ID NO: 1423531 - DNA, 25 bp, Homo sapien
gtgagagcaagcaaggagtttctcc

SEQ ID NO: 1423532 - DNA, 25 bp, Homo sapien
ggtgagagcaagcaaggagtttctc

SEQ ID NO: 1423533 - DNA, 25 bp, Homo sapien
gcaagcaaggagtttctccctgcgc

SEQ ID NO: 1423534 - DNA, 25 bp, Homo sapien
gaagaggcaccaaccttgaagctat

SEQ ID NO: 1423535 - DNA, 25 bp, Homo sapien
aaacaccaactgattaagcagaaga

SEQ ID NO: 1423536 - DNA, 25 bp, Homo sapien
caactgattaagcagaagaggcacc

SEQ ID NO: 1423537 - DNA, 25 bp, Homo sapien
ttgaagctatcaattcctctgacaa

SEQ ID NO: 1423538 - DNA, 25 bp, Homo sapien
tcaagaaattcacaacttccagaaa

SEQ ID NO: 1423539 - DNA, 25 bp, Homo sapien
caagaaattcacaacttccagaaaa

SEQ ID NO: 1423540 - DNA, 25 bp, Homo sapien
tcttcaatgttaaacttttcaagaa

SEQ ID NO: 1423541 - DNA, 25 bp, Homo sapien
tcctcttcactcttcaatgttaaac

SEQ ID NO: 1423542 - DNA, 25 bp, Homo sapien
gtcatgagatagtaaggtgcagagc

SEQ ID NO: 1423543 - DNA, 25 bp, Homo sapien
gaatgggattcagcaaagttgagtg

SEQ ID NO: 1423544 - DNA, 25 bp, Homo sapien
gagcgctggccgacattttggaatg

SEQ ID NO: 1423545 - DNA, 25 bp, Homo sapien
ttttggaatgggattcagcaaagtt

SEQ ID NO: 1423546 - DNA, 25 bp, Homo sapien
gagactgccgagagcaaaaaccaac

SEQ ID NO: 1423547 - DNA, 25 bp, Homo sapien
aatccagagctacagttagtttcca

SEQ ID NO: 1423548 - DNA, 25 bp, Homo sapien
cttttcaggacctctatagctggag

SEQ ID NO: 1423549 - DNA, 25 bp, Homo sapien
gagctacagttagtttccaatgcct

SEQ ID NO: 1423550 - DNA, 25 bp, Homo sapien
tcctacttattctatagatgcagta

SEQ ID NO: 1423551 - DNA, 25 bp, Homo sapien
gattccttactgtgctcaaagactg

SEQ ID NO: 1423552 - DNA, 25 bp, Homo sapien
ttccacacagaatacgtcatggatg

SEQ ID NO: 1423553 - DNA, 25 bp, Homo sapien
gatgcagtagtataactccaactca

SEQ ID NO: 1423554 - DNA, 25 bp, Homo sapien
cctgttcatttaagattgtgagcaa

SEQ ID NO: 1423555 - DNA, 25 bp, Homo sapien
tttaagattgtgagcaaactttcca

SEQ ID NO: 1423556 - DNA, 25 bp, Homo sapien
tcccgggcatgtccatgacactctg

SEQ ID NO: 1423557 - DNA, 25 bp, Homo sapien
ctctgggagagttgtgaattctgga

SEQ ID NO: 1423558 - DNA, 25 bp, Homo sapien
tcaggagggatagatgctgggtctc

SEQ ID NO: 1423559 - DNA, 25 bp, Homo sapien
tgggtctcttattgactgaatactc

SEQ ID NO: 1423560 - DNA, 25 bp, Homo sapien
tgctgggtctcttattgactgaata

SEQ ID NO: 1423561 - DNA, 25 bp, Homo sapien
caggagggatagatgctgggtctct

SEQ ID NO: 1423562 - DNA, 25 bp, Homo sapien
tgagaaactttacaaacagtttcca

SEQ ID NO: 1423563 - DNA, 25 bp, Homo sapien
agacattattgtgtgttaggtgtcc

SEQ ID NO: 1423564 - DNA, 25 bp, Homo sapien
aacagacattattgtgtgttaggtg

SEQ ID NO: 1423565 - DNA, 25 bp, Homo sapien
taaacagacattattgtgtgttagg

SEQ ID NO: 1423566 - DNA, 25 bp, Homo sapien
tgaaggaagataagagccagcaata

SEQ ID NO: 1423567 - DNA, 25 bp, Homo sapien
catccgcttccacagtacaagataa

SEQ ID NO: 1423568 - DNA, 25 bp, Homo sapien
gccagcaatatgtcatagatcccag

SEQ ID NO: 1423569 - DNA, 25 bp, Homo sapien
gctcagtgacaagatgaatgccatc

SEQ ID NO: 1423570 - DNA, 25 bp, Homo sapien
caagggtgacgaagtgtcttcaaat

SEQ ID NO: 1423571 - DNA, 25 bp, Homo sapien
tagcaagcaagggtgacgaagtgtc

SEQ ID NO: 1423572 - DNA, 25 bp, Homo sapien
cttagcaagcaagggtgacgaagtg

SEQ ID NO: 1423573 - DNA, 25 bp, Homo sapien
caagcaagggtgacgaagtgtcttc

SEQ ID NO: 1423574 - DNA, 25 bp, Homo sapien
tgttaccctcgagttaattcaataa

SEQ ID NO: 1423575 - DNA, 25 bp, Homo sapien
ttgttaccctcgagttaattcaata

SEQ ID NO: 1423576 - DNA, 25 bp, Homo sapien
ggtggttctctcagtgtatagctct

SEQ ID NO: 1423577 - DNA, 25 bp, Homo sapien
catcttgcagtacagcgggataaac

SEQ ID NO: 1423578 - DNA, 25 bp, Homo sapien
tctctcagtgtatagctctttaaag

SEQ ID NO: 1423579 - DNA, 25 bp, Homo sapien
actgaagcaaatttgccatcttgca

SEQ ID NO: 1423580 - DNA, 25 bp, Homo sapien
gcagtactgccactcttcctcaaag

SEQ ID NO: 1423581 - DNA, 25 bp, Homo sapien
cagtgaggcagtactgccactcttc

SEQ ID NO: 1423582 - DNA, 25 bp, Homo sapien
tatgcagtgaggcagtactgccact

SEQ ID NO: 1423583 - DNA, 25 bp, Homo sapien
cccttatgcagtgaggcagtactgc

SEQ ID NO: 1423584 - DNA, 25 bp, Homo sapien
cacaaaatcttgctcattagctttg

SEQ ID NO: 1423585 - DNA, 25 bp, Homo sapien
tggcgctatcctatctcactgtaac

SEQ ID NO: 1423586 - DNA, 25 bp, Homo sapien
caccatgcccgccagtgctttaaaa

SEQ ID NO: 1423587 - DNA, 25 bp, Homo sapien
tgcattggcgctatcctatctcact

SEQ ID NO: 1423588 - DNA, 25 bp, Homo sapien
gctagctgacaagcaatacacaatt

SEQ ID NO: 1423589 - DNA, 25 bp, Homo sapien
gatttcagctcaagatacattttat

SEQ ID NO: 1423590 - DNA, 25 bp, Homo sapien
caaaattcgagacccgactccgaga

SEQ ID NO: 1423591 - DNA, 25 bp, Homo sapien
tccgagaatttcacatggattcctg

SEQ ID NO: 1423592 - DNA, 25 bp, Homo sapien
gacgggcactggtcttggatcaaga

SEQ ID NO: 1423593 - DNA, 25 bp, Homo sapien
ccgaggcgccgctctcgcttcgctg

SEQ ID NO: 1423594 - DNA, 25 bp, Homo sapien
aatgaggccgccttcccgagggcgg

SEQ ID NO: 1423595 - DNA, 25 bp, Homo sapien
ctccctgcgaggaccgactccgcgg

SEQ ID NO: 1423596 - DNA, 25 bp, Homo sapien
ctgcctgtaaggctgtggccactac

SEQ ID NO: 1423597 - DNA, 25 bp, Homo sapien
ggccgggtttctcctacaccataga

SEQ ID NO: 1423598 - DNA, 25 bp, Homo sapien
ggaggaggccgagggtcttggctct

SEQ ID NO: 1423599 - DNA, 25 bp, Homo sapien
cgacgccaccaatgaggccaactaa

SEQ ID NO: 1423600 - DNA, 25 bp, Homo sapien
tagcgaggactttcaggagagtgac

SEQ ID NO: 1423601 - DNA, 25 bp, Homo sapien
tggccacttgtagcaaacagtagag

SEQ ID NO: 1423602 - DNA, 25 bp, Homo sapien
tgacgtcactcaacctgtagctttg

SEQ ID NO: 1423603 - DNA, 25 bp, Homo sapien
gccatcttaagtgtgggcgccgcga

SEQ ID NO: 1423604 - DNA, 25 bp, Homo sapien
ggttccagttctcagttccctggag

SEQ ID NO: 1423605 - DNA, 25 bp, Homo sapien
ccacagagccctctatagctctggt

SEQ ID NO: 1423606 - DNA, 25 bp, Homo sapien
tggttccagttctcagttccctgga

SEQ ID NO: 1423607 - DNA, 25 bp, Homo sapien
gccctctatagctctggttccagtt

SEQ ID NO: 1423608 - DNA, 25 bp, Homo sapien
ggaaggggccaaaatattacactca

SEQ ID NO: 1423609 - DNA, 25 bp, Homo sapien
gaaggggccaaaatattacactcac

SEQ ID NO: 1423610 - DNA, 25 bp, Homo sapien
cactattctgaaggatggctgtgtc

SEQ ID NO: 1423611 - DNA, 25 bp, Homo sapien
agacactgggcctccactattctga

SEQ ID NO: 1423612 - DNA, 25 bp, Homo sapien
ctgtgtcaactgagatcaaagggga

SEQ ID NO: 1423613 - DNA, 25 bp, Homo sapien
aaggcggcatggcagacactgggcc

SEQ ID NO: 1423614 - DNA, 25 bp, Homo sapien
caatacatttcagcgagagagttgc

SEQ ID NO: 1423615 - DNA, 25 bp, Homo sapien
tacgaacgtgccttgtatgaagggc

SEQ ID NO: 1423616 - DNA, 25 bp, Homo sapien
gggtggctgccttttcggctgcacc

SEQ ID NO: 1423617 - DNA, 25 bp, Homo sapien
cgtctctgagtgattcagcgccagg

SEQ ID NO: 1423618 - DNA, 25 bp, Homo sapien
cagaaggaggccgagtccccgcatc

SEQ ID NO: 1423619 - DNA, 25 bp, Homo sapien
tttctcagctgaacgggtgagtgtg

SEQ ID NO: 1423620 - DNA, 25 bp, Homo sapien
ttttctcagctgaacgggtgagtgt

SEQ ID NO: 1423621 - DNA, 25 bp, Homo sapien
ggaggccgagtccccgcatccccca

SEQ ID NO: 1423622 - DNA, 25 bp, Homo sapien
ataaacatacctcagatttacatct

SEQ ID NO: 1423623 - DNA, 25 bp, Homo sapien
cataaacatacctcagatttacatc

SEQ ID NO: 1423624 - DNA, 25 bp, Homo sapien
catagcaggtagtcaggaaaatatc

SEQ ID NO: 1423625 - DNA, 25 bp, Homo sapien
atagcaggtagtcaggaaaatatct

SEQ ID NO: 1423626 - DNA, 25 bp, Homo sapien
caggtgatcatggaactatctctga

SEQ ID NO: 1423627 - DNA, 25 bp, Homo sapien
gccacataaatagtgtagttagatc

SEQ ID NO: 1423628 - DNA, 25 bp, Homo sapien
tctttgatctatgtattccctttga

SEQ ID NO: 1423629 - DNA, 25 bp, Homo sapien
ccatttcttgctatctaaatgtacg

SEQ ID NO: 1423630 - DNA, 25 bp, Homo sapien
gctttcccatgctttagatactaaa

SEQ ID NO: 1423631 - DNA, 25 bp, Homo sapien
tatcactgcttgtcttgtatactac

SEQ ID NO: 1423632 - DNA, 25 bp, Homo sapien
taatcttgtatcactgcttgtcttg

SEQ ID NO: 1423633 - DNA, 25 bp, Homo sapien
taatgcgacttttaattagctttcc

SEQ ID NO: 1423634 - DNA, 25 bp, Homo sapien
aaattactcaagagtttacaagcag

SEQ ID NO: 1423635 - DNA, 25 bp, Homo sapien
cacgcgcaccctatattaacatgta

SEQ ID NO: 1423636 - DNA, 25 bp, Homo sapien
caggcacatggcatggaatatgaag

SEQ ID NO: 1423637 - DNA, 25 bp, Homo sapien
ccaccaaagagactataaccataaa

SEQ ID NO: 1423638 - DNA, 25 bp, Homo sapien
caaaattaacccaacccacacagat

SEQ ID NO: 1423639 - DNA, 25 bp, Homo sapien
caagatgtggtttgatgagtgaaca

SEQ ID NO: 1423640 - DNA, 25 bp, Homo sapien
gggttaatctgcagctaacaacata

SEQ ID NO: 1423641 - DNA, 25 bp, Homo sapien
ccagtctagtagcttttcagcattc

SEQ ID NO: 1423642 - DNA, 25 bp, Homo sapien
tgccaactggttggccaaagccatc

SEQ ID NO: 1423643 - DNA, 25 bp, Homo sapien
tcaagatccatagccatagtagtaa

SEQ ID NO: 1423644 - DNA, 25 bp, Homo sapien
tcatcagggcggaatccatatgctg

SEQ ID NO: 1423645 - DNA, 25 bp, Homo sapien
catatgctgtggcagggcgtccaag

SEQ ID NO: 1423646 - DNA, 25 bp, Homo sapien
caagattctcttcctagcagggata

SEQ ID NO: 1423647 - DNA, 25 bp, Homo sapien
tatcagtgaactctcatgcagggcc

SEQ ID NO: 1423648 - DNA, 25 bp, Homo sapien
tgcagggccaaatcataccataagc

SEQ ID NO: 1423649 - DNA, 25 bp, Homo sapien
cacaatgcagattaagaggcctaca

SEQ ID NO: 1423650 - DNA, 25 bp, Homo sapien
catttgtactgagcgattctggaca

SEQ ID NO: 1423651 - DNA, 25 bp, Homo sapien
gaacatggtggccttaacatgctca

SEQ ID NO: 1423652 - DNA, 25 bp, Homo sapien
taagtttgcactacatgagatggaa

SEQ ID NO: 1423653 - DNA, 25 bp, Homo sapien
gaatgctagtgagcttgacttccaa

SEQ ID NO: 1423654 - DNA, 25 bp, Homo sapien
cattgttgataaaaacctgcagtcc

SEQ ID NO: 1423655 - DNA, 25 bp, Homo sapien
tatttatgtagtcagcagttcaccc

SEQ ID NO: 1423656 - DNA, 25 bp, Homo sapien
tcccaagtcagtgaaagactggccc

SEQ ID NO: 1423657 - DNA, 25 bp, Homo sapien
gatattacctaatccacctgatggt

SEQ ID NO: 1423658 - DNA, 25 bp, Homo sapien
gtgaggcttaattagtgcgtatttg

SEQ ID NO: 1423659 - DNA, 25 bp, Homo sapien
ggcttaattagtgcgtatttgtaaa

SEQ ID NO: 1423660 - DNA, 25 bp, Homo sapien
cactttgaaatccttggatgaaaag

SEQ ID NO: 1423661 - DNA, 25 bp, Homo sapien
gaggcttaattagtgcgtatttgta

SEQ ID NO: 1423662 - DNA, 25 bp, Homo sapien
tttattcacaacatccttgacaggg

SEQ ID NO: 1423663 - DNA, 25 bp, Homo sapien
ctttgtcaaggcagttcattccatt

SEQ ID NO: 1423664 - DNA, 25 bp, Homo sapien
cttgacagggtctatccagctctct

SEQ ID NO: 1423665 - DNA, 25 bp, Homo sapien
caaaggctcatggaagtctttgact

SEQ ID NO: 1423666 - DNA, 25 bp, Homo sapien
gctgggaaggcaataacaaatacga

SEQ ID NO: 1423667 - DNA, 25 bp, Homo sapien
tagtgactctatataccatttgccc

SEQ ID NO: 1423668 - DNA, 25 bp, Homo sapien
aaattgctacaggacaatcttggca

SEQ ID NO: 1423669 - DNA, 25 bp, Homo sapien
cttgactataaggattggaggcacc

SEQ ID NO: 1423670 - DNA, 25 bp, Homo sapien
tgaagaacctattacagctgtccaa

SEQ ID NO: 1423671 - DNA, 25 bp, Homo sapien
caaaatcatgaacactgaagaacct

SEQ ID NO: 1423672 - DNA, 25 bp, Homo sapien
cataaacctgctaagaactggtggc

SEQ ID NO: 1423673 - DNA, 25 bp, Homo sapien
actggtggctactggagagttgtca

SEQ ID NO: 1423674 - DNA, 25 bp, Homo sapien
tgctgagcggcttaaataaccccta

SEQ ID NO: 1423675 - DNA, 25 bp, Homo sapien
taaactgagtcattagcacgtcctt

SEQ ID NO: 1423676 - DNA, 25 bp, Homo sapien
gattcctctggctcataataggctt

SEQ ID NO: 1423677 - DNA, 25 bp, Homo sapien
gagtgagttaaagcctgaacaccac

SEQ ID NO: 1423678 - DNA, 25 bp, Homo sapien
gctagtgtgatctgtaaccttccaa

SEQ ID NO: 1423679 - DNA, 25 bp, Homo sapien
gggaactagaaagcacatgccaaaa

SEQ ID NO: 1423680 - DNA, 25 bp, Homo sapien
taaacatgctgtaaagtctaagacc

SEQ ID NO: 1423681 - DNA, 25 bp, Homo sapien
aaacctcttggattactcaggctgc

SEQ ID NO: 1423682 - DNA, 25 bp, Homo sapien
cacaggtcatgaaaacgtttagggt

SEQ ID NO: 1423683 - DNA, 25 bp, Homo sapien
tatttcaagtatgcaggaacaggga

SEQ ID NO: 1423684 - DNA, 25 bp, Homo sapien
tctggcacttataagcaaagctggg

SEQ ID NO: 1423685 - DNA, 25 bp, Homo sapien
ttctcttagaaaagtgcacacaggt

SEQ ID NO: 1423686 - DNA, 25 bp, Homo sapien
tcttgtattggggtaactaacaaca

SEQ ID NO: 1423687 - DNA, 25 bp, Homo sapien
tattggggtaactaacaacaggcat

SEQ ID NO: 1423688 - DNA, 25 bp, Homo sapien
tgtattggggtaactaacaacaggc

SEQ ID NO: 1423689 - DNA, 25 bp, Homo sapien
tcctcttgtattggggtaactaaca

SEQ ID NO: 1423690 - DNA, 25 bp, Homo sapien
attaatgcctcaattgagaggtttc

SEQ ID NO: 1423691 - DNA, 25 bp, Homo sapien
tttaacctgtattaactgaatcagg

SEQ ID NO: 1423692 - DNA, 25 bp, Homo sapien
gaagttgctaacttccagttgccaa

SEQ ID NO: 1423693 - DNA, 25 bp, Homo sapien
tcaatgactatcacccaagatggcc

SEQ ID NO: 1423694 - DNA, 25 bp, Homo sapien
ccaagaggttcaaactgatagtgac

SEQ ID NO: 1423695 - DNA, 25 bp, Homo sapien
gtgacacatgtctaaaacccaggat

SEQ ID NO: 1423696 - DNA, 25 bp, Homo sapien
ttgggaaatcctggcgccaagaggt

SEQ ID NO: 1423697 - DNA, 25 bp, Homo sapien
tttgcattagctctaaatgttggga

SEQ ID NO: 1423698 - DNA, 25 bp, Homo sapien
tcaatatgtaaagatcaattcagct

SEQ ID NO: 1423699 - DNA, 25 bp, Homo sapien
tggaccatttccctgatttaaagga

SEQ ID NO: 1423700 - DNA, 25 bp, Homo sapien
cacctataggatatcaggagctgaa

SEQ ID NO: 1423701 - DNA, 25 bp, Homo sapien
tcttcatgttgtccattaagtctgc

SEQ ID NO: 1423702 - DNA, 25 bp, Homo sapien
tgaatgctgcccaacaacatctcca

SEQ ID NO: 1423703 - DNA, 25 bp, Homo sapien
ttgaaggtggtaatcattgaagaaa

SEQ ID NO: 1423704 - DNA, 25 bp, Homo sapien
aacatctccattttgaaggtggtaa

SEQ ID NO: 1423705 - DNA, 25 bp, Homo sapien
agaaatcgggacttatggctccttc

SEQ ID NO: 1423706 - DNA, 25 bp, Homo sapien
taagtgatggcttcagagctgttca

SEQ ID NO: 1423707 - DNA, 25 bp, Homo sapien
gatatatctgattacctacgctaaa

SEQ ID NO: 1423708 - DNA, 25 bp, Homo sapien
tatttgacagtttaagtgccagaca

SEQ ID NO: 1423709 - DNA, 25 bp, Homo sapien
cagtccctagcgttgtgagatatat

SEQ ID NO: 1423710 - DNA, 25 bp, Homo sapien
tcttgctattaataattggcccagg

SEQ ID NO: 1423711 - DNA, 25 bp, Homo sapien
ttaggcaatctggtgtctccaactc

SEQ ID NO: 1423712 - DNA, 25 bp, Homo sapien
tgctattaataattggcccaggttg

SEQ ID NO: 1423713 - DNA, 25 bp, Homo sapien
agggtcttgctattaataattggcc

SEQ ID NO: 1423714 - DNA, 25 bp, Homo sapien
gaatgtatggctcaattcgatcatc

SEQ ID NO: 1423715 - DNA, 25 bp, Homo sapien
ttcgatcatcaccatacaagtactg

SEQ ID NO: 1423716 - DNA, 25 bp, Homo sapien
cagccactgagagttatgccagcga

SEQ ID NO: 1423717 - DNA, 25 bp, Homo sapien
ggtcaggtctttcgagaatatctcc

SEQ ID NO: 1423718 - DNA, 25 bp, Homo sapien
gaagtctgtgtttgtattatcgatc

SEQ ID NO: 1423719 - DNA, 25 bp, Homo sapien
gattggtcccctaatacctgtgttg

SEQ ID NO: 1423720 - DNA, 25 bp, Homo sapien
gccagaatttaagcgagcagtaaga

SEQ ID NO: 1423721 - DNA, 25 bp, Homo sapien
ttatcgatcactaatggcaatggca

SEQ ID NO: 1423722 - DNA, 25 bp, Homo sapien
catagatctgctttgtgttctaaca

SEQ ID NO: 1423723 - DNA, 25 bp, Homo sapien
ctataggataacacagagctacata

SEQ ID NO: 1423724 - DNA, 25 bp, Homo sapien
tgttctaacataactgatggaaaac

SEQ ID NO: 1423725 - DNA, 25 bp, Homo sapien
ttgtatctgattaacacactatagg

SEQ ID NO: 1423726 - DNA, 25 bp, Homo sapien
agacctttcggatttcattattctt

SEQ ID NO: 1423727 - DNA, 25 bp, Homo sapien
tcacagacctttcggatttcattat

SEQ ID NO: 1423728 - DNA, 25 bp, Homo sapien
acagacctttcggatttcattattc

SEQ ID NO: 1423729 - DNA, 25 bp, Homo sapien
ctaatgtattatcacagacctttcg

SEQ ID NO: 1423730 - DNA, 25 bp, Homo sapien
aggtctatgagatatgctggagcct

SEQ ID NO: 1423731 - DNA, 25 bp, Homo sapien
taggtctatgagatatgctggagcc

SEQ ID NO: 1423732 - DNA, 25 bp, Homo sapien
tccttgattatgacgtctcttgtgg

SEQ ID NO: 1423733 - DNA, 25 bp, Homo sapien
aaccatctggtagaagacataaatt

SEQ ID NO: 1423734 - DNA, 25 bp, Homo sapien
cttgattatgacgtctcttgtggct

SEQ ID NO: 1423735 - DNA, 25 bp, Homo sapien
tcttgtggcttggtggaaaaccatc

SEQ ID NO: 1423736 - DNA, 25 bp, Homo sapien
gatttggctagcaatgcagcacaag

SEQ ID NO: 1423737 - DNA, 25 bp, Homo sapien
catccatggatacagttccaatcat

SEQ ID NO: 1423738 - DNA, 25 bp, Homo sapien
tttagcaattcaatgagtgcaggga

SEQ ID NO: 1423739 - DNA, 25 bp, Homo sapien
tgagtgcagggattatgccagattt

SEQ ID NO: 1423740 - DNA, 25 bp, Homo sapien
taagtctggaatggtcaagtttgca

SEQ ID NO: 1423741 - DNA, 25 bp, Homo sapien
tcccagtctaagtctggaatggtca

SEQ ID NO: 1423742 - DNA, 25 bp, Homo sapien
tccttgaggtatggaaccaacttat

SEQ ID NO: 1423743 - DNA, 25 bp, Homo sapien
tatattctttaagaaccaattccca

SEQ ID NO: 1423744 - DNA, 25 bp, Homo sapien
gatttttagttggtccatcatgctg

SEQ ID NO: 1423745 - DNA, 25 bp, Homo sapien
ggatccttaaacttcagagccctct

SEQ ID NO: 1423746 - DNA, 25 bp, Homo sapien
ttttcatcagcaatggatccttaaa

SEQ ID NO: 1423747 - DNA, 25 bp, Homo sapien
taaacagatttttagttggtccatc

SEQ ID NO: 1423748 - DNA, 25 bp, Homo sapien
tgagttccaagtcaattcgttcatc

SEQ ID NO: 1423749 - DNA, 25 bp, Homo sapien
cttcacagataagctgtacatttct

SEQ ID NO: 1423750 - DNA, 25 bp, Homo sapien
cacagataagctgtacatttctttt

SEQ ID NO: 1423751 - DNA, 25 bp, Homo sapien
caagtcaattcgttcatctgaacat

SEQ ID NO: 1423752 - DNA, 25 bp, Homo sapien
aacattgatttaaagcggtcatcca

SEQ ID NO: 1423753 - DNA, 25 bp, Homo sapien
acattgatttaaagcggtcatccat

SEQ ID NO: 1423754 - DNA, 25 bp, Homo sapien
acacacattgctatttgtttgtagt

SEQ ID NO: 1423755 - DNA, 25 bp, Homo sapien
gcttatgtggtaaagaacacacatt

SEQ ID NO: 1423756 - DNA, 25 bp, Homo sapien
cttatgtggtaaagaacacacattg

SEQ ID NO: 1423757 - DNA, 25 bp, Homo sapien
cacacattgctatttgtttgtagtt

SEQ ID NO: 1423758 - DNA, 25 bp, Homo sapien
agtaaagactctttggcagccaaca

SEQ ID NO: 1423759 - DNA, 25 bp, Homo sapien
gggaagatgtctggcaataacctga

SEQ ID NO: 1423760 - DNA, 25 bp, Homo sapien
aaaaatgcagcctataacttcacgg

SEQ ID NO: 1423761 - DNA, 25 bp, Homo sapien
cacggcatctagcagatatctggaa

SEQ ID NO: 1423762 - DNA, 25 bp, Homo sapien
gacgaaaggttcagtgaagatcaac

SEQ ID NO: 1423763 - DNA, 25 bp, Homo sapien
gagaacatacaatgtgctagacatt

SEQ ID NO: 1423764 - DNA, 25 bp, Homo sapien
gtgccatgctaatggtggttcaata

SEQ ID NO: 1423765 - DNA, 25 bp, Homo sapien
tctaggtattaggagtaaagaagtg

SEQ ID NO: 1423766 - DNA, 25 bp, Homo sapien
acacatgtgagggttgggctacact

SEQ ID NO: 1423767 - DNA, 25 bp, Homo sapien
gaagtttagcttactgtgttaggag

SEQ ID NO: 1423768 - DNA, 25 bp, Homo sapien
cggattgaggtaaaacaagtgtgaa

SEQ ID NO: 1423769 - DNA, 25 bp, Homo sapien
ataagcattgtagccaaagaccaca

SEQ ID NO: 1423770 - DNA, 25 bp, Homo sapien
cgatgtgtcaggacgtgatatttaa

SEQ ID NO: 1423771 - DNA, 25 bp, Homo sapien
tcaggacgtgatatttaagagattc

SEQ ID NO: 1423772 - DNA, 25 bp, Homo sapien
ctgtaggatttgctacgatgtgtca

SEQ ID NO: 1423773 - DNA, 25 bp, Homo sapien
gatttgctacgatgtgtcaggacgt

SEQ ID NO: 1423774 - DNA, 25 bp, Homo sapien
tagtttccagtcaaagaatatagac

SEQ ID NO: 1423775 - DNA, 25 bp, Homo sapien
gaggcttttcaacacagagctcaat

SEQ ID NO: 1423776 - DNA, 25 bp, Homo sapien
tttttgttcaggaggcttttcaaca

SEQ ID NO: 1423777 - DNA, 25 bp, Homo sapien
tccagtcaaagaatatagacagaat

SEQ ID NO: 1423778 - DNA, 25 bp, Homo sapien
tagtaaaagtcggagggtgatattc

SEQ ID NO: 1423779 - DNA, 25 bp, Homo sapien
ttcagcaggtcttcatgctcacaag

SEQ ID NO: 1423780 - DNA, 25 bp, Homo sapien
cctgtgtcaaaggataggtttagta

SEQ ID NO: 1423781 - DNA, 25 bp, Homo sapien
ggaagcagtccaacttgtaccatct

SEQ ID NO: 1423782 - DNA, 25 bp, Homo sapien
cacacccagcccgttattaatttgt

SEQ ID NO: 1423783 - DNA, 25 bp, Homo sapien
cagccttctagtcatgtctttttgg

SEQ ID NO: 1423784 - DNA, 25 bp, Homo sapien
gaaatatgtgcaattagtcaatcag

SEQ ID NO: 1423785 - DNA, 25 bp, Homo sapien
tagactagtatttaacacagccttc

SEQ ID NO: 1423786 - DNA, 25 bp, Homo sapien
gaatgacacaactaaaattagcagc

SEQ ID NO: 1423787 - DNA, 25 bp, Homo sapien
caagggctttcaccaacatgtgaac

SEQ ID NO: 1423788 - DNA, 25 bp, Homo sapien
agctcaaaattgtcccgatcaaggg

SEQ ID NO: 1423789 - DNA, 25 bp, Homo sapien
caagaatgacacaactaaaattagc

SEQ ID NO: 1423790 - DNA, 25 bp, Homo sapien
agttcggtacgagtatcctcagcaa

SEQ ID NO: 1423791 - DNA, 25 bp, Homo sapien
tcagttcggtacgagtatcctcagc

SEQ ID NO: 1423792 - DNA, 25 bp, Homo sapien
tttcagttcggtacgagtatcctca

SEQ ID NO: 1423793 - DNA, 25 bp, Homo sapien
cagttcggtacgagtatcctcagca

SEQ ID NO: 1423794 - DNA, 25 bp, Homo sapien
tttcataatcctttctcaaggtttg

SEQ ID NO: 1423795 - DNA, 25 bp, Homo sapien
gctgttcctgttttaccacaagccc

SEQ ID NO: 1423796 - DNA, 25 bp, Homo sapien
tcataatcctttctcaaggtttggt

SEQ ID NO: 1423797 - DNA, 25 bp, Homo sapien
ctcgtaatagctgttcctgttttac

SEQ ID NO: 1423798 - DNA, 25 bp, Homo sapien
taagtgctcatggattccctgggag

SEQ ID NO: 1423799 - DNA, 25 bp, Homo sapien
aaattttatgtgcaactttatccag

SEQ ID NO: 1423800 - DNA, 25 bp, Homo sapien
taaggatcatccatactcattgaag

SEQ ID NO: 1423801 - DNA, 25 bp, Homo sapien
cataataactgtgctgtaacagcac

SEQ ID NO: 1423802 - DNA, 25 bp, Homo sapien
aataagtccatgaaattgagaaaag

SEQ ID NO: 1423803 - DNA, 25 bp, Homo sapien
agttcttcttgccaaagctcatgtc

SEQ ID NO: 1423804 - DNA, 25 bp, Homo sapien
ctccaattttatagtgagtaataag

SEQ ID NO: 1423805 - DNA, 25 bp, Homo sapien
actcatgatcaataatattcataca

SEQ ID NO: 1423806 - DNA, 25 bp, Homo sapien
cttgctaatgcaccaagggcagttt

SEQ ID NO: 1423807 - DNA, 25 bp, Homo sapien
actcgacactttgcttccagtcttc

SEQ ID NO: 1423808 - DNA, 25 bp, Homo sapien
aaattatgtttgtagctaactcgac

SEQ ID NO: 1423809 - DNA, 25 bp, Homo sapien
gtttgtagctaactcgacactttgc

SEQ ID NO: 1423810 - DNA, 25 bp, Homo sapien
taattaaacatgttttatagtaatc

SEQ ID NO: 1423811 - DNA, 25 bp, Homo sapien
attaaacatgttttatagtaatcac

SEQ ID NO: 1423812 - DNA, 25 bp, Homo sapien
ttattcctctattataattaaacat

SEQ ID NO: 1423813 - DNA, 25 bp, Homo sapien
attcctctattataattaaacatgt

SEQ ID NO: 1423814 - DNA, 25 bp, Homo sapien
tatcaggatttcgagcaagctgcag

SEQ ID NO: 1423815 - DNA, 25 bp, Homo sapien
tccaagttatcaggatttcgagcaa

SEQ ID NO: 1423816 - DNA, 25 bp, Homo sapien
gagcaagctgcaggatcaaagcaga

SEQ ID NO: 1423817 - DNA, 25 bp, Homo sapien
gatttcgagcaagctgcaggatcaa

SEQ ID NO: 1423818 - DNA, 25 bp, Homo sapien
aaaggaggtggatctttaggcttgc

SEQ ID NO: 1423819 - DNA, 25 bp, Homo sapien
aaggaggtggatctttaggcttgct

SEQ ID NO: 1423820 - DNA, 25 bp, Homo sapien
tttcctgacaatgaatcacggcggt

SEQ ID NO: 1423821 - DNA, 25 bp, Homo sapien
tgaaggatgaatgagtttacattct

SEQ ID NO: 1423822 - DNA, 25 bp, Homo sapien
tcacggcggttctgtagatagtaca

SEQ ID NO: 1423823 - DNA, 25 bp, Homo sapien
ccttgccagggaagttatatctgtg

SEQ ID NO: 1423824 - DNA, 25 bp, Homo sapien
taaaaagacctctagtttgcttcca

SEQ ID NO: 1423825 - DNA, 25 bp, Homo sapien
ggctgaacagaaacagcctcagtct

SEQ ID NO: 1423826 - DNA, 25 bp, Homo sapien
tcatttgggtagatatctagaggca

SEQ ID NO: 1423827 - DNA, 25 bp, Homo sapien
tgagaccaacgcaaaaggtgggtga

SEQ ID NO: 1423828 - DNA, 25 bp, Homo sapien
ttttgacattcttttcgttctccca

SEQ ID NO: 1423829 - DNA, 25 bp, Homo sapien
ttgacattcttttcgttctcccaac

SEQ ID NO: 1423830 - DNA, 25 bp, Homo sapien
attcttttcgttctcccaacatggg

SEQ ID NO: 1423831 - DNA, 25 bp, Homo sapien
gacattcttttcgttctcccaacat

SEQ ID NO: 1423832 - DNA, 25 bp, Homo sapien
ttctccaagaatggtagcttccact

SEQ ID NO: 1423833 - DNA, 25 bp, Homo sapien
ctttttctgatggatgtacatctat

SEQ ID NO: 1423834 - DNA, 25 bp, Homo sapien
gatgtacatctatattccctccttt

SEQ ID NO: 1423835 - DNA, 25 bp, Homo sapien
catagtgaacaatgagtgctttttc

SEQ ID NO: 1423836 - DNA, 25 bp, Homo sapien
attgcttaatgccactgttgcttaa

SEQ ID NO: 1423837 - DNA, 25 bp, Homo sapien
gccactgttgcttaacaccttgata

SEQ ID NO: 1423838 - DNA, 25 bp, Homo sapien
ttgcttaacaccttgatattcatcc

SEQ ID NO: 1423839 - DNA, 25 bp, Homo sapien
aatgccactgttgcttaacaccttg

SEQ ID NO: 1423840 - DNA, 25 bp, Homo sapien
tgctcagggcagaatacatacccag

SEQ ID NO: 1423841 - DNA, 25 bp, Homo sapien
gttgaagccatatccaaacactgag

SEQ ID NO: 1423842 - DNA, 25 bp, Homo sapien
gctggcccctgggataaatagtaat

SEQ ID NO: 1423843 - DNA, 25 bp, Homo sapien
gatagtgcagctatgcagtcactga

SEQ ID NO: 1423844 - DNA, 25 bp, Homo sapien
tgatgtagcgaagaaaccatctttc

SEQ ID NO: 1423845 - DNA, 25 bp, Homo sapien
taaactagcgttgcccagtgacatc

SEQ ID NO: 1423846 - DNA, 25 bp, Homo sapien
tgagggcggatgcaccagactttat

SEQ ID NO: 1423847 - DNA, 25 bp, Homo sapien
ccaggctctcatgggatttatctat

SEQ ID NO: 1423848 - DNA, 25 bp, Homo sapien
agaacatcttcagggccctggcaag

SEQ ID NO: 1423849 - DNA, 25 bp, Homo sapien
caacccaagaacatcttcagggccc

SEQ ID NO: 1423850 - DNA, 25 bp, Homo sapien
agccaacccaagaacatcttcaggg

SEQ ID NO: 1423851 - DNA, 25 bp, Homo sapien
cccaagaacatcttcagggccctgg

SEQ ID NO: 1423852 - DNA, 25 bp, Homo sapien
cttttgaggtatctggcgtcctccc

SEQ ID NO: 1423853 - DNA, 25 bp, Homo sapien
ttttgaggtatctggcgtcctcccc

SEQ ID NO: 1423854 - DNA, 25 bp, Homo sapien
tcttgagaggcaggcgcggttattt

SEQ ID NO: 1423855 - DNA, 25 bp, Homo sapien
cagaggcgatgacagtcctgaggcc

SEQ ID NO: 1423856 - DNA, 25 bp, Homo sapien
ggttaccacggtgaagcctccagct

SEQ ID NO: 1423857 - DNA, 25 bp, Homo sapien
cagcagcggcgctgtggttaccacg

SEQ ID NO: 1423858 - DNA, 25 bp, Homo sapien
ctggagcggcccagacccgcccaga

SEQ ID NO: 1423859 - DNA, 25 bp, Homo sapien
gtcacgacgcatgcgcttgctctgc

SEQ ID NO: 1423860 - DNA, 25 bp, Homo sapien
acccgcccagagtcgcctaagccgg

SEQ ID NO: 1423861 - DNA, 25 bp, Homo sapien
ctaagccgggccgtcacgacgcatg

SEQ ID NO: 1423862 - DNA, 25 bp, Homo sapien
tggtgcagttttgagcgtccgtgta

SEQ ID NO: 1423863 - DNA, 25 bp, Homo sapien
tgtcaggtcagcttgaaaggagaga

SEQ ID NO: 1423864 - DNA, 25 bp, Homo sapien
ccccttgaggatgggaatagaaagg

SEQ ID NO: 1423865 - DNA, 25 bp, Homo sapien
taaggagtggctccgtagtcaccgc

SEQ ID NO: 1423866 - DNA, 25 bp, Homo sapien
tgcctttgggatgccatcaaatggc

SEQ ID NO: 1423867 - DNA, 25 bp, Homo sapien
ttgcctttgggatgccatcaaatgg

SEQ ID NO: 1423868 - DNA, 25 bp, Homo sapien
cctttgggatgccatcaaatggcca

SEQ ID NO: 1423869 - DNA, 25 bp, Homo sapien
gattgcctttgggatgccatcaaat

SEQ ID NO: 1423870 - DNA, 25 bp, Homo sapien
tttccaattagtttgagctcatgta

SEQ ID NO: 1423871 - DNA, 25 bp, Homo sapien
tagtttgagctcatgtagcacatct

SEQ ID NO: 1423872 - DNA, 25 bp, Homo sapien
gctcatgtagcacatcttaatacaa

SEQ ID NO: 1423873 - DNA, 25 bp, Homo sapien
caattagtttgagctcatgtagcac

SEQ ID NO: 1423874 - DNA, 25 bp, Homo sapien
ttcccgttcgccacttttatctgta

SEQ ID NO: 1423875 - DNA, 25 bp, Homo sapien
tctcttcaatatggagccctgtcct

SEQ ID NO: 1423876 - DNA, 25 bp, Homo sapien
gctaaatgatgcttctagtctgagg

SEQ ID NO: 1423877 - DNA, 25 bp, Homo sapien
tctggtggatcaggtttgagagctc

SEQ ID NO: 1423878 - DNA, 25 bp, Homo sapien
aaactcaacctggtaatgctgtggc

SEQ ID NO: 1423879 - DNA, 25 bp, Homo sapien
gactctattaacagacatgctgaga

SEQ ID NO: 1423880 - DNA, 25 bp, Homo sapien
tccaatcccagaggagtcgtttggc

SEQ ID NO: 1423881 - DNA, 25 bp, Homo sapien
ccctttttggtgaggtatactcctg

SEQ ID NO: 1423882 - DNA, 25 bp, Homo sapien
aagacctttgtgactctattaacag

SEQ ID NO: 1423883 - DNA, 25 bp, Homo sapien
ctgtgcctcctatgctgttgctgct

SEQ ID NO: 1423884 - DNA, 25 bp, Homo sapien
caggcatgtcgctgtgcctcctatg

SEQ ID NO: 1423885 - DNA, 25 bp, Homo sapien
gcctgtctcaggcatgtcgctgtgc

SEQ ID NO: 1423886 - DNA, 25 bp, Homo sapien
tgtgcctcctatgctgttgctgctg

SEQ ID NO: 1423887 - DNA, 25 bp, Homo sapien
ccttggtgatcagagatgtgcagat

SEQ ID NO: 1423888 - DNA, 25 bp, Homo sapien
aggatacggcagtgtacttctttcg

SEQ ID NO: 1423889 - DNA, 25 bp, Homo sapien
gagaggaagctttgtgagatacaat

SEQ ID NO: 1423890 - DNA, 25 bp, Homo sapien
ctttcgggtgaagagaggaagcttt

SEQ ID NO: 1423891 - DNA, 25 bp, Homo sapien
aactcttcgtggcttatacctctag

SEQ ID NO: 1423892 - DNA, 25 bp, Homo sapien
ggaccatccaactcttcgtggctta

SEQ ID NO: 1423893 - DNA, 25 bp, Homo sapien
tgagtgcatggtggaccatccaact

SEQ ID NO: 1423894 - DNA, 25 bp, Homo sapien
tggcttatacctctaggtaccttgt

SEQ ID NO: 1423895 - DNA, 25 bp, Homo sapien
gaagggctgtctaaagaggaacagg

SEQ ID NO: 1423896 - DNA, 25 bp, Homo sapien
gggctgtctaaagaggaacaggcaa

SEQ ID NO: 1423897 - DNA, 25 bp, Homo sapien
agggctgtctaaagaggaacaggca

SEQ ID NO: 1423898 - DNA, 25 bp, Homo sapien
cattaccaaacagtctaagtgcagc

SEQ ID NO: 1423899 - DNA, 25 bp, Homo sapien
gccagggaccagagctaaatcaaat

SEQ ID NO: 1423900 - DNA, 25 bp, Homo sapien
ttactcgccatgctctagggtagcg

SEQ ID NO: 1423901 - DNA, 25 bp, Homo sapien
gaatccgtgacaagcaagccaggga

SEQ ID NO: 1423902 - DNA, 25 bp, Homo sapien
cctgttttgagtgatgtattggaga

SEQ ID NO: 1423903 - DNA, 25 bp, Homo sapien
cagctgcctgtcatgagtaattaaa

SEQ ID NO: 1423904 - DNA, 25 bp, Homo sapien
taaaaccagtcgtgttattgctttc

SEQ ID NO: 1423905 - DNA, 25 bp, Homo sapien
tagttccagctgactctttgatgct

SEQ ID NO: 1423906 - DNA, 25 bp, Homo sapien
catattcgaaacctgccatatgagg

SEQ ID NO: 1423907 - DNA, 25 bp, Homo sapien
ttctgggatttccatattttgctct

SEQ ID NO: 1423908 - DNA, 25 bp, Homo sapien
ctgtctctgagtactttctgggatt

SEQ ID NO: 1423909 - DNA, 25 bp, Homo sapien
tttgctctaggcaactcttctcact

SEQ ID NO: 1423910 - DNA, 25 bp, Homo sapien
cttcatgggagaaaggcatagttcc

SEQ ID NO: 1423911 - DNA, 25 bp, Homo sapien
ttgcatcttcagttagcatggagca

SEQ ID NO: 1423912 - DNA, 25 bp, Homo sapien
ttcagtttgcagtctattagggcca

SEQ ID NO: 1423913 - DNA, 25 bp, Homo sapien
tcaatatctctgcttttgatggtca

SEQ ID NO: 1423914 - DNA, 25 bp, Homo sapien
tttgccttcagacctctaggacatg

SEQ ID NO: 1423915 - DNA, 25 bp, Homo sapien
cttccacaaactgattggaacctga

SEQ ID NO: 1423916 - DNA, 25 bp, Homo sapien
gacctctaggacatgctgtcaccct

SEQ ID NO: 1423917 - DNA, 25 bp, Homo sapien
tttgctctgtcaagagaggtatgga

SEQ ID NO: 1423918 - DNA, 25 bp, Homo sapien
gtagcaactcttcttgacataactg

SEQ ID NO: 1423919 - DNA, 25 bp, Homo sapien
gacataactgcatcctatagagtcc

SEQ ID NO: 1423920 - DNA, 25 bp, Homo sapien
gaaatttggctctacttataccaga

SEQ ID NO: 1423921 - DNA, 25 bp, Homo sapien
tataccagaaacaaaataggccact

SEQ ID NO: 1423922 - DNA, 25 bp, Homo sapien
atgaatgtcagtgccctccaaactc

SEQ ID NO: 1423923 - DNA, 25 bp, Homo sapien
tgttccatgaatgtcagtgccctcc

SEQ ID NO: 1423924 - DNA, 25 bp, Homo sapien
gttccatgaatgtcagtgccctcca

SEQ ID NO: 1423925 - DNA, 25 bp, Homo sapien
tccatgaatgtcagtgccctccaaa

SEQ ID NO: 1423926 - DNA, 25 bp, Homo sapien
aactgttattgccttcaggttgaca

SEQ ID NO: 1423927 - DNA, 25 bp, Homo sapien
tgcacggtcagtttgacaactgtta

SEQ ID NO: 1423928 - DNA, 25 bp, Homo sapien
gggttgccaaaaagttgcacggtca

SEQ ID NO: 1423929 - DNA, 25 bp, Homo sapien
cacagtgatttgtgtgggttgccaa

SEQ ID NO: 1423930 - DNA, 25 bp, Homo sapien
gcttgatttggaactgtcaccacca

SEQ ID NO: 1423931 - DNA, 25 bp, Homo sapien
gcctttcagaatgttgagccaccaa

SEQ ID NO: 1423932 - DNA, 25 bp, Homo sapien
tcatgcactactaaagggagacaag

SEQ ID NO: 1423933 - DNA, 25 bp, Homo sapien
gaagagcctagtttgattctccaga

SEQ ID NO: 1423934 - DNA, 25 bp, Homo sapien
tagtttgttaatatggaagaattca

SEQ ID NO: 1423935 - DNA, 25 bp, Homo sapien
aaacccatgacacatgtctggaaga

SEQ ID NO: 1423936 - DNA, 25 bp, Homo sapien
ccatttccttagtatcctgaaaaga

SEQ ID NO: 1423937 - DNA, 25 bp, Homo sapien
gtttctcctactggtatataggctc

SEQ ID NO: 1423938 - DNA, 25 bp, Homo sapien
tctgaccaccatttccttagtatcc

SEQ ID NO: 1423939 - DNA, 25 bp, Homo sapien
tgagtttctcctactggtatatagg

SEQ ID NO: 1423940 - DNA, 25 bp, Homo sapien
tgctaacctcaggatactggccagc

SEQ ID NO: 1423941 - DNA, 25 bp, Homo sapien
gaaagactgccaagcacatccagct

SEQ ID NO: 1423942 - DNA, 25 bp, Homo sapien
cacacagtttgtgtctcgggagaag

SEQ ID NO: 1423943 - DNA, 25 bp, Homo sapien
tttgtcaaaaatactggcacgtgca

SEQ ID NO: 1423944 - DNA, 25 bp, Homo sapien
tgcactgggtaggagacgaaacttc

SEQ ID NO: 1423945 - DNA, 25 bp, Homo sapien
tgagtatcagaagcgaccacagaag

SEQ ID NO: 1423946 - DNA, 25 bp, Homo sapien
tagctactgagaatgaggttcccgg

SEQ ID NO: 1423947 - DNA, 25 bp, Homo sapien
tctcacgaaaggcactagaacgcag

SEQ ID NO: 1423948 - DNA, 25 bp, Homo sapien
cacataggaatcacgaggatccagt

SEQ ID NO: 1423949 - DNA, 25 bp, Homo sapien
cacgaggatccagttcttaagaatc

SEQ ID NO: 1423950 - DNA, 25 bp, Homo sapien
attacccagggtctctccttggagg

SEQ ID NO: 1423951 - DNA, 25 bp, Homo sapien
tcttagttgacaccaaagatcatca

SEQ ID NO: 1423952 - DNA, 25 bp, Homo sapien
gcagtattctaagtacttctcacat

SEQ ID NO: 1423953 - DNA, 25 bp, Homo sapien
tattctaagtacttctcacatgtta

SEQ ID NO: 1423954 - DNA, 25 bp, Homo sapien
caagcagtattctaagtacttctca

SEQ ID NO: 1423955 - DNA, 25 bp, Homo sapien
ccaagcagtattctaagtacttctc

SEQ ID NO: 1423956 - DNA, 25 bp, Homo sapien
gggtggagtcgttaagcctagtcta

SEQ ID NO: 1423957 - DNA, 25 bp, Homo sapien
ctactctcagggtatgtgtagaggg

SEQ ID NO: 1423958 - DNA, 25 bp, Homo sapien
tttatattggtatgcacttatgtag

SEQ ID NO: 1423959 - DNA, 25 bp, Homo sapien
tagagtcacagattgattatcccta

SEQ ID NO: 1423960 - DNA, 25 bp, Homo sapien
taacttctatttgttcccaggtctg

SEQ ID NO: 1423961 - DNA, 25 bp, Homo sapien
tctgctaaactctcctgatactgct

SEQ ID NO: 1423962 - DNA, 25 bp, Homo sapien
gacatagcatctaaattaatagtgt

SEQ ID NO: 1423963 - DNA, 25 bp, Homo sapien
ttctcccaactccttaaagacatag

SEQ ID NO: 1423964 - DNA, 25 bp, Homo sapien
aataaagaggaattaacccatgagc

SEQ ID NO: 1423965 - DNA, 25 bp, Homo sapien
taaagaggaattaacccatgagcag

SEQ ID NO: 1423966 - DNA, 25 bp, Homo sapien
gaattaacccatgagcaggaagggt

SEQ ID NO: 1423967 - DNA, 25 bp, Homo sapien
agaggaattaacccatgagcaggaa

SEQ ID NO: 1423968 - DNA, 25 bp, Homo sapien
acttggcacttgtgacaggagaatg

SEQ ID NO: 1423969 - DNA, 25 bp, Homo sapien
ggagtactggccaaggacagcatcc

SEQ ID NO: 1423970 - DNA, 25 bp, Homo sapien
gagaatgtcagctcctcttaaagaa

SEQ ID NO: 1423971 - DNA, 25 bp, Homo sapien
ggcacatccctctgtcatggcctgg

SEQ ID NO: 1423972 - DNA, 25 bp, Homo sapien
tgctcaggggctacgtttttagcct

SEQ ID NO: 1423973 - DNA, 25 bp, Homo sapien
ggctgtgaccttctgcaggcttaca

SEQ ID NO: 1423974 - DNA, 25 bp, Homo sapien
ttacactgacactcagcgcccatgg

SEQ ID NO: 1423975 - DNA, 25 bp, Homo sapien
catgggtgtaactccagtgctcagg

SEQ ID NO: 1423976 - DNA, 25 bp, Homo sapien
taaatgtgatgtaggtgtgagtctc

SEQ ID NO: 1423977 - DNA, 25 bp, Homo sapien
taagtaaatgtgatgtaggtgtgag

SEQ ID NO: 1423978 - DNA, 25 bp, Homo sapien
aatgtgatgtaggtgtgagtctcgt

SEQ ID NO: 1423979 - DNA, 25 bp, Homo sapien
ctttgcagcttctaagtaaatgtga

SEQ ID NO: 1423980 - DNA, 25 bp, Homo sapien
tcatggagtctctggggacccacac

SEQ ID NO: 1423981 - DNA, 25 bp, Homo sapien
tgagagaaaagagcctgcattccag

SEQ ID NO: 1423982 - DNA, 25 bp, Homo sapien
cagcaaggtagttgggtgaaacttg

SEQ ID NO: 1423983 - DNA, 25 bp, Homo sapien
gcaccaagctgggatcaaatacaag

SEQ ID NO: 1423984 - DNA, 25 bp, Homo sapien
gaagcagtgtcagcttccaagcagg

SEQ ID NO: 1423985 - DNA, 25 bp, Homo sapien
ctagagtgatgacagtcttcagaaa

SEQ ID NO: 1423986 - DNA, 25 bp, Homo sapien
catgaatatcaacatgaattggatg

SEQ ID NO: 1423987 - DNA, 25 bp, Homo sapien
tcaacatgaattggatgatcaataa

SEQ ID NO: 1423988 - DNA, 25 bp, Homo sapien
gaaatagatcaccaggaactagagt

SEQ ID NO: 1423989 - DNA, 25 bp, Homo sapien
gcccagctgtcattctctccataac

SEQ ID NO: 1423990 - DNA, 25 bp, Homo sapien
ttgcccagctgtcattctctccata

SEQ ID NO: 1423991 - DNA, 25 bp, Homo sapien
cttgcccagctgtcattctctccat

SEQ ID NO: 1423992 - DNA, 25 bp, Homo sapien
cagctgtcattctctccataacatc

SEQ ID NO: 1423993 - DNA, 25 bp, Homo sapien
ggtgcagtatccaaacttcccttca

SEQ ID NO: 1423994 - DNA, 25 bp, Homo sapien
ctcatagccttgttcagcagacagc

SEQ ID NO: 1423995 - DNA, 25 bp, Homo sapien
tatgattgacatatctggtgcagta

SEQ ID NO: 1423996 - DNA, 25 bp, Homo sapien
caaaattaaactgccacactcatag

SEQ ID NO: 1423997 - DNA, 25 bp, Homo sapien
tctttatttactagtgcatattctt

SEQ ID NO: 1423998 - DNA, 25 bp, Homo sapien
tttctttatttactagtgcatattc

SEQ ID NO: 1423999 - DNA, 25 bp, Homo sapien
tatttactagtgcatattcttccaa

SEQ ID NO: 1424000 - DNA, 25 bp, Homo sapien
tttatttactagtgcatattcttcc

SEQ ID NO: 1424001 - DNA, 25 bp, Homo sapien
ttttataaataatcaagacaggatt

SEQ ID NO: 1424002 - DNA, 25 bp, Homo sapien
ggttttataaataatcaagacagga

SEQ ID NO: 1424003 - DNA, 25 bp, Homo sapien
gttttataaataatcaagacaggat

SEQ ID NO: 1424004 - DNA, 25 bp, Homo sapien
catcgaggcaagaatcagagcacgc

SEQ ID NO: 1424005 - DNA, 25 bp, Homo sapien
aatcagagcacgcagggtgcttaaa

SEQ ID NO: 1424006 - DNA, 25 bp, Homo sapien
tgtggcctacagtgatggaaggaac

SEQ ID NO: 1424007 - DNA, 25 bp, Homo sapien
tggaaggaacatcgaggcaagaatc

SEQ ID NO: 1424008 - DNA, 25 bp, Homo sapien
tgatatttgtaatcaaggcatggga

SEQ ID NO: 1424009 - DNA, 25 bp, Homo sapien
caggcgtggcagtcagattcattga

SEQ ID NO: 1424010 - DNA, 25 bp, Homo sapien
tttcacaggcgtggcagtcagattc

SEQ ID NO: 1424011 - DNA, 25 bp, Homo sapien
cgtggcagtcagattcattgaatac

SEQ ID NO: 1424012 - DNA, 25 bp, Homo sapien
agatcagccatgcatcttgcaaggc

SEQ ID NO: 1424013 - DNA, 25 bp, Homo sapien
tgctgctcccgtaggtgaatcgctc

SEQ ID NO: 1424014 - DNA, 25 bp, Homo sapien
atgtgctgctcccgtaggtgaatcg

SEQ ID NO: 1424015 - DNA, 25 bp, Homo sapien
tgtgctgctcccgtaggtgaatcgc

SEQ ID NO: 1424016 - DNA, 25 bp, Homo sapien
gctgctcccgtaggtgaatcgctcc

SEQ ID NO: 1424017 - DNA, 25 bp, Homo sapien
tggtctaactcggagtgagtcttca

SEQ ID NO: 1424018 - DNA, 25 bp, Homo sapien
tgtggtctaactcggagtgagtctt

SEQ ID NO: 1424019 - DNA, 25 bp, Homo sapien
gatgtggtctaactcggagtgagtc

SEQ ID NO: 1424020 - DNA, 25 bp, Homo sapien
ttgatgtggtctaactcggagtgag

SEQ ID NO: 1424021 - DNA, 25 bp, Homo sapien
ctggaagtaggtggcactcttcttc

SEQ ID NO: 1424022 - DNA, 25 bp, Homo sapien
agcaccatctgctccttttgctggc

SEQ ID NO: 1424023 - DNA, 25 bp, Homo sapien
tctgctccttttgctggctcttggc

SEQ ID NO: 1424024 - DNA, 25 bp, Homo sapien
gaagtaggtggcactcttcttctcc

SEQ ID NO: 1424025 - DNA, 25 bp, Homo sapien
tcaacacgtttgctgcctttacggt

SEQ ID NO: 1424026 - DNA, 25 bp, Homo sapien
tgcaagtttcaacacgtttgctgcc

SEQ ID NO: 1424027 - DNA, 25 bp, Homo sapien
ccactaggacctctgcaagtttcaa

SEQ ID NO: 1424028 - DNA, 25 bp, Homo sapien
ggacctctgcaagtttcaacacgtt

SEQ ID NO: 1424029 - DNA, 25 bp, Homo sapien
ataggtacactcaagattgggctgc

SEQ ID NO: 1424030 - DNA, 25 bp, Homo sapien
catccagaacttgtacatttttctg

SEQ ID NO: 1424031 - DNA, 25 bp, Homo sapien
gctgctgagagtcatagtgggtttt

SEQ ID NO: 1424032 - DNA, 25 bp, Homo sapien
agtgggtttttgagacatccagaac

SEQ ID NO: 1424033 - DNA, 25 bp, Homo sapien
gggacagtgttgaaatctggttcat

SEQ ID NO: 1424034 - DNA, 25 bp, Homo sapien
tcagggacagtgttgaaatctggtt

SEQ ID NO: 1424035 - DNA, 25 bp, Homo sapien
cagggacagtgttgaaatctggttc

SEQ ID NO: 1424036 - DNA, 25 bp, Homo sapien
ctttcagggacagtgttgaaatctg

SEQ ID NO: 1424037 - DNA, 25 bp, Homo sapien
gggttgagttctacttgatccttgc

SEQ ID NO: 1424038 - DNA, 25 bp, Homo sapien
ctacttgatccttgctgatgaatgg

SEQ ID NO: 1424039 - DNA, 25 bp, Homo sapien
tgtgagagtctcatacaggatattc

SEQ ID NO: 1424040 - DNA, 25 bp, Homo sapien
ctgcttttacctctaacgggaacat

SEQ ID NO: 1424041 - DNA, 25 bp, Homo sapien
tgcctgcgattgcaggcgcgcgccg

SEQ ID NO: 1424042 - DNA, 25 bp, Homo sapien
agtgcctgcgattgcaggcgcgcgc

SEQ ID NO: 1424043 - DNA, 25 bp, Homo sapien
gagtgcctgcgattgcaggcgcgcg

SEQ ID NO: 1424044 - DNA, 25 bp, Homo sapien
ccgagtgcctgcgattgcaggcgcg

SEQ ID NO: 1424045 - DNA, 25 bp, Homo sapien
tgtctcaactcaagtgtgctctcct

SEQ ID NO: 1424046 - DNA, 25 bp, Homo sapien
aactcaagtgtgctctcctttttct

SEQ ID NO: 1424047 - DNA, 25 bp, Homo sapien
tcaactcaagtgtgctctccttttt

SEQ ID NO: 1424048 - DNA, 25 bp, Homo sapien
tctcaactcaagtgtgctctccttt

SEQ ID NO: 1424049 - DNA, 25 bp, Homo sapien
tgtgtgtgagacatcagtaggttca

SEQ ID NO: 1424050 - DNA, 25 bp, Homo sapien
tctttgtcaaggcactccacatttg

SEQ ID NO: 1424051 - DNA, 25 bp, Homo sapien
tacatttctttgacagtatctttgt

SEQ ID NO: 1424052 - DNA, 25 bp, Homo sapien
aggcactccacatttgcgtgttctg

SEQ ID NO: 1424053 - DNA, 25 bp, Homo sapien
gcagccctcagtttctcaattttgt

SEQ ID NO: 1424054 - DNA, 25 bp, Homo sapien
caggtccctgacacattcacaaatt

SEQ ID NO: 1424055 - DNA, 25 bp, Homo sapien
ttgtcccctcggtcccatggaactg

SEQ ID NO: 1424056 - DNA, 25 bp, Homo sapien
atggaactgccaaaagcagccctca

SEQ ID NO: 1424057 - DNA, 25 bp, Homo sapien
ctgaaataaaggtctggtaggcaaa

SEQ ID NO: 1424058 - DNA, 25 bp, Homo sapien
ttgctgaaataaaggtctggtaggc

SEQ ID NO: 1424059 - DNA, 25 bp, Homo sapien
tgctgaaataaaggtctggtaggca

SEQ ID NO: 1424060 - DNA, 25 bp, Homo sapien
gctgaaataaaggtctggtaggcaa

SEQ ID NO: 1424061 - DNA, 25 bp, Homo sapien
caggaggtgcctgctacagacaaaa

SEQ ID NO: 1424062 - DNA, 25 bp, Homo sapien
gatgtcgtgtttgtatgcaggccca

SEQ ID NO: 1424063 - DNA, 25 bp, Homo sapien
caaaaaaggcatgtcccaaagagca

SEQ ID NO: 1424064 - DNA, 25 bp, Homo sapien
gacccgattggctgactattcctta

SEQ ID NO: 1424065 - DNA, 25 bp, Homo sapien
ctcttttgatcataaagctcagttt

SEQ ID NO: 1424066 - DNA, 25 bp, Homo sapien
atcataaagctcagttttggaaagg

SEQ ID NO: 1424067 - DNA, 25 bp, Homo sapien
cataaagctcagttttggaaaggtt

SEQ ID NO: 1424068 - DNA, 25 bp, Homo sapien
agctcagttttggaaaggttctcac

SEQ ID NO: 1424069 - DNA, 25 bp, Homo sapien
cttcaggccagcctctccgccaatg

SEQ ID NO: 1424070 - DNA, 25 bp, Homo sapien
ctccgccaatggctcccagttccat

SEQ ID NO: 1424071 - DNA, 25 bp, Homo sapien
ttgtgcgtcagtacattctggctga

SEQ ID NO: 1424072 - DNA, 25 bp, Homo sapien
gtggtttcctggttgtgcgtcagta

SEQ ID NO: 1424073 - DNA, 25 bp, Homo sapien
tgggatggtagccctcccctccttg

SEQ ID NO: 1424074 - DNA, 25 bp, Homo sapien
accttgaatgagagtttgcagctgg

SEQ ID NO: 1424075 - DNA, 25 bp, Homo sapien
cagctttgaactagactccaaggac

SEQ ID NO: 1424076 - DNA, 25 bp, Homo sapien
tggctgcagcataaaccttgaatga

SEQ ID NO: 1424077 - DNA, 25 bp, Homo sapien
cacttgtatcagttccttgtgaaag

SEQ ID NO: 1424078 - DNA, 25 bp, Homo sapien
tgtccacacttgtatcagttccttg

SEQ ID NO: 1424079 - DNA, 25 bp, Homo sapien
tgtatcagttccttgtgaaagattt

SEQ ID NO: 1424080 - DNA, 25 bp, Homo sapien
tttgtccacacttgtatcagttcct

SEQ ID NO: 1424081 - DNA, 25 bp, Homo sapien
taaaatctttgacgacaagctccaa

SEQ ID NO: 1424082 - DNA, 25 bp, Homo sapien
gattttaggagctgatgagtcattc

SEQ ID NO: 1424083 - DNA, 25 bp, Homo sapien
ctgaatctatttgcagttctcagag

SEQ ID NO: 1424084 - DNA, 25 bp, Homo sapien
gctccaatagctaaagtagacacag

SEQ ID NO: 1424085 - DNA, 25 bp, Homo sapien
taataatactaaaaggtcgctgcat

SEQ ID NO: 1424086 - DNA, 25 bp, Homo sapien
ttaataatactaaaaggtcgctgca

SEQ ID NO: 1424087 - DNA, 25 bp, Homo sapien
tttaataatactaaaaggtcgctgc

SEQ ID NO: 1424088 - DNA, 25 bp, Homo sapien
ggaatggagagcataaacatctgac

SEQ ID NO: 1424089 - DNA, 25 bp, Homo sapien
tgtgccctacaataaaatcctgagg

SEQ ID NO: 1424090 - DNA, 25 bp, Homo sapien
catctgacaatgaatgcctatctgt

SEQ ID NO: 1424091 - DNA, 25 bp, Homo sapien
cacccatccataacatttgtaagaa

SEQ ID NO: 1424092 - DNA, 25 bp, Homo sapien
tgttgtcttagatgaatccacagag

SEQ ID NO: 1424093 - DNA, 25 bp, Homo sapien
cacaggctaggaatacttgggtcag

SEQ ID NO: 1424094 - DNA, 25 bp, Homo sapien
gaagggagctcttggcagcgttaaa

SEQ ID NO: 1424095 - DNA, 25 bp, Homo sapien
aaggctgcctactgactttcaagca

SEQ ID NO: 1424096 - DNA, 25 bp, Homo sapien
cttgaactgtagaggccagtttgcc

SEQ ID NO: 1424097 - DNA, 25 bp, Homo sapien
gcttggcgcctaggttctgtcccac

SEQ ID NO: 1424098 - DNA, 25 bp, Homo sapien
caaccttgaactgtagaggccagtt

SEQ ID NO: 1424099 - DNA, 25 bp, Homo sapien
gcaaattgcagcctgaggatactgc

SEQ ID NO: 1424100 - DNA, 25 bp, Homo sapien
tttacttatttgcttgaccctgaga

SEQ ID NO: 1424101 - DNA, 25 bp, Homo sapien
cactcagcttcaagtaacatctgtt

SEQ ID NO: 1424102 - DNA, 25 bp, Homo sapien
tcagcttcaagtaacatctgtttca

SEQ ID NO: 1424103 - DNA, 25 bp, Homo sapien
tcaagtaacatctgtttcatcagat

SEQ ID NO: 1424104 - DNA, 25 bp, Homo sapien
gctgcttgggtggtatccacatgcc

SEQ ID NO: 1424105 - DNA, 25 bp, Homo sapien
tttgcttgagcctccaacccctgca

SEQ ID NO: 1424106 - DNA, 25 bp, Homo sapien
ttttgcttgagcctccaacccctgc

SEQ ID NO: 1424107 - DNA, 25 bp, Homo sapien
ctgcttgggtggtatccacatgcca

SEQ ID NO: 1424108 - DNA, 25 bp, Homo sapien
tctttcccatcatcttactgagttg

SEQ ID NO: 1424109 - DNA, 25 bp, Homo sapien
tcccatcatcttactgagttggtga

SEQ ID NO: 1424110 - DNA, 25 bp, Homo sapien
ctttctttcccatcatcttactgag

SEQ ID NO: 1424111 - DNA, 25 bp, Homo sapien
ctctttctttcccatcatcttactg

SEQ ID NO: 1424112 - DNA, 25 bp, Homo sapien
tcctgaagcgattaaccagcaacag

SEQ ID NO: 1424113 - DNA, 25 bp, Homo sapien
ccccttagctcctgaagcgattaac

SEQ ID NO: 1424114 - DNA, 25 bp, Homo sapien
ctgtttatctccacccttatcccca

SEQ ID NO: 1424115 - DNA, 25 bp, Homo sapien
cgattaaccagcaacagtgagaaac

SEQ ID NO: 1424116 - DNA, 25 bp, Homo sapien
aaaacggtccaggaatccactgtag

SEQ ID NO: 1424117 - DNA, 25 bp, Homo sapien
tctcccttagggaagattgctgcag

SEQ ID NO: 1424118 - DNA, 25 bp, Homo sapien
aagtgagcctacagccggggtgtct

SEQ ID NO: 1424119 - DNA, 25 bp, Homo sapien
cactgtagggatttgactcttgtga

SEQ ID NO: 1424120 - DNA, 25 bp, Homo sapien
tctcctgggagacgtattaagactg

SEQ ID NO: 1424121 - DNA, 25 bp, Homo sapien
gcagtagatcatgccctgacctcca

SEQ ID NO: 1424122 - DNA, 25 bp, Homo sapien
caaaaattacagtgtgaacaagaga

SEQ ID NO: 1424123 - DNA, 25 bp, Homo sapien
tggaaaatgatactcaatacctagt

SEQ ID NO: 1424124 - DNA, 25 bp, Homo sapien
atcacttttgtcttcaatttgcctt

SEQ ID NO: 1424125 - DNA, 25 bp, Homo sapien
catcacttttgtcttcaatttgcct

SEQ ID NO: 1424126 - DNA, 25 bp, Homo sapien
gcatcacttttgtcttcaatttgcc

SEQ ID NO: 1424127 - DNA, 25 bp, Homo sapien
gatataagtgacaaaatcatattgc

SEQ ID NO: 1424128 - DNA, 25 bp, Homo sapien
agtgacaaaatcatattgcatcagt

SEQ ID NO: 1424129 - DNA, 25 bp, Homo sapien
taagtgacaaaatcatattgcatca

SEQ ID NO: 1424130 - DNA, 25 bp, Homo sapien
gatgatataagtgacaaaatcatat

SEQ ID NO: 1424131 - DNA, 25 bp, Homo sapien
tgcaggtggtaaatctttgtactca

SEQ ID NO: 1424132 - DNA, 25 bp, Homo sapien
ggtttccaagtcagatgataatctc

SEQ ID NO: 1424133 - DNA, 25 bp, Homo sapien
gcaggtggtaaatctttgtactcac

SEQ ID NO: 1424134 - DNA, 25 bp, Homo sapien
ctcttactggaattcctacagcata

SEQ ID NO: 1424135 - DNA, 25 bp, Homo sapien
aaaattcagctataaacttctcatt

SEQ ID NO: 1424136 - DNA, 25 bp, Homo sapien
attggcatttgaattatagagtaaa

SEQ ID NO: 1424137 - DNA, 25 bp, Homo sapien
ttggcatttgaattatagagtaaaa

SEQ ID NO: 1424138 - DNA, 25 bp, Homo sapien
taaaaattcagctataaacttctca

SEQ ID NO: 1424139 - DNA, 25 bp, Homo sapien
ttaggtgcaaagagagcgttttccc

SEQ ID NO: 1424140 - DNA, 25 bp, Homo sapien
aaagcaccggaagactgtttaggtg

SEQ ID NO: 1424141 - DNA, 25 bp, Homo sapien
gtttaggtgcaaagagagcgttttc

SEQ ID NO: 1424142 - DNA, 25 bp, Homo sapien
accggaagactgtttaggtgcaaag

SEQ ID NO: 1424143 - DNA, 25 bp, Homo sapien
ttattggcttaatactcatgtatcc

SEQ ID NO: 1424144 - DNA, 25 bp, Homo sapien
tctcacattcttcaacccgttttat

SEQ ID NO: 1424145 - DNA, 25 bp, Homo sapien
cacattcttcaacccgttttattgg

SEQ ID NO: 1424146 - DNA, 25 bp, Homo sapien
agagtccactgggagcctcagaaaa

SEQ ID NO: 1424147 - DNA, 25 bp, Homo sapien
gttaactgctcaaatagacttgaaa

SEQ ID NO: 1424148 - DNA, 25 bp, Homo sapien
cttgttaactgctcaaatagacttg

SEQ ID NO: 1424149 - DNA, 25 bp, Homo sapien
actgctcaaatagacttgaaacctt

SEQ ID NO: 1424150 - DNA, 25 bp, Homo sapien
ctgctcaaatagacttgaaaccttt

SEQ ID NO: 1424151 - DNA, 25 bp, Homo sapien
tcttcctggctttacagtgatgatc

SEQ ID NO: 1424152 - DNA, 25 bp, Homo sapien
ttcttcctggctttacagtgatgat

SEQ ID NO: 1424153 - DNA, 25 bp, Homo sapien
gttcttcctggctttacagtgatga

SEQ ID NO: 1424154 - DNA, 25 bp, Homo sapien
tgatcatcagattcaaagtaaagac

SEQ ID NO: 1424155 - DNA, 25 bp, Homo sapien
agtggcaccgagacatgtttgggaa

SEQ ID NO: 1424156 - DNA, 25 bp, Homo sapien
tgtgaacagacttactcaacactgc

SEQ ID NO: 1424157 - DNA, 25 bp, Homo sapien
ggaatagaaatgcatgccgcctttg

SEQ ID NO: 1424158 - DNA, 25 bp, Homo sapien
tatacagcgtagaaggagccaggct

SEQ ID NO: 1424159 - DNA, 25 bp, Homo sapien
ggcccccactgaaatgtgactgcaa

SEQ ID NO: 1424160 - DNA, 25 bp, Homo sapien
gtgactgcaaggctaaaacaggtcc

SEQ ID NO: 1424161 - DNA, 25 bp, Homo sapien
taaaacaggtccaaactctgccaga

SEQ ID NO: 1424162 - DNA, 25 bp, Homo sapien
cccccactgaaatgtgactgcaagg

SEQ ID NO: 1424163 - DNA, 25 bp, Homo sapien
caacaacgaggtttatggggcactt

SEQ ID NO: 1424164 - DNA, 25 bp, Homo sapien
tctttgaggttgacaagtatttgct

SEQ ID NO: 1424165 - DNA, 25 bp, Homo sapien
tgaggttgacaagtatttgctccca

SEQ ID NO: 1424166 - DNA, 25 bp, Homo sapien
gaatctgaatgtgatgacttttgcc

SEQ ID NO: 1424167 - DNA, 25 bp, Homo sapien
gatccgcagtcttataatcttcacc

SEQ ID NO: 1424168 - DNA, 25 bp, Homo sapien
gaaactctttttcaagatccgcagt

SEQ ID NO: 1424169 - DNA, 25 bp, Homo sapien
gaggatctctgtttgatctccaggt

SEQ ID NO: 1424170 - DNA, 25 bp, Homo sapien
caaggatctatgctgttttagaaac

SEQ ID NO: 1424171 - DNA, 25 bp, Homo sapien
aacctccacatccaaatatgaaggc

SEQ ID NO: 1424172 - DNA, 25 bp, Homo sapien
ggtcagcaatacttcaacctccaca

SEQ ID NO: 1424173 - DNA, 25 bp, Homo sapien
ggcattggtcagcaatacttcaacc

SEQ ID NO: 1424174 - DNA, 25 bp, Homo sapien
acctccacatccaaatatgaaggca

SEQ ID NO: 1424175 - DNA, 25 bp, Homo sapien
ggaatatgatcccagacccaggtcc

SEQ ID NO: 1424176 - DNA, 25 bp, Homo sapien
tcctacagagtggatgccagcctgg

SEQ ID NO: 1424177 - DNA, 25 bp, Homo sapien
gaatactctggtgccttgccagtca

SEQ ID NO: 1424178 - DNA, 25 bp, Homo sapien
tccagagggctactagaacatgtca

SEQ ID NO: 1424179 - DNA, 25 bp, Homo sapien
gccatggtgtctggcctcttgtttc

SEQ ID NO: 1424180 - DNA, 25 bp, Homo sapien
tactgcaattattggcatttcagct

SEQ ID NO: 1424181 - DNA, 25 bp, Homo sapien
acatcattattgttagggacatcac

SEQ ID NO: 1424182 - DNA, 25 bp, Homo sapien
caattattggcatttcagcttagga

SEQ ID NO: 1424183 - DNA, 25 bp, Homo sapien
taccttctgttaattgttctttggc

SEQ ID NO: 1424184 - DNA, 25 bp, Homo sapien
ctgacactaccttctgttaattgtt

SEQ ID NO: 1424185 - DNA, 25 bp, Homo sapien
actaccttctgttaattgttctttg

SEQ ID NO: 1424186 - DNA, 25 bp, Homo sapien
gacactaccttctgttaattgttct

SEQ ID NO: 1424187 - DNA, 25 bp, Homo sapien
gacgttctctccatgggggccccat

SEQ ID NO: 1424188 - DNA, 25 bp, Homo sapien
cagacgttctctccatgggggcccc

SEQ ID NO: 1424189 - DNA, 25 bp, Homo sapien
tgtccctcagacgttctctccatgg

SEQ ID NO: 1424190 - DNA, 25 bp, Homo sapien
cttgtccctcagacgttctctccat

SEQ ID NO: 1424191 - DNA, 25 bp, Homo sapien
cagggaaaccctaggcagtaatcag

SEQ ID NO: 1424192 - DNA, 25 bp, Homo sapien
tattaacatgtcagggagtgcaacc

SEQ ID NO: 1424193 - DNA, 25 bp, Homo sapien
tagggtgggagacattctgctagcc

SEQ ID NO: 1424194 - DNA, 25 bp, Homo sapien
catggctgggaaccaaacctctctc

SEQ ID NO: 1424195 - DNA, 25 bp, Homo sapien
cacaggcggatgagaacgtgggcga

SEQ ID NO: 1424196 - DNA, 25 bp, Homo sapien
tgctggagtcgccgggactcaccag

SEQ ID NO: 1424197 - DNA, 25 bp, Homo sapien
tcgacaccctgcaggcgaaaaagaa

SEQ ID NO: 1424198 - DNA, 25 bp, Homo sapien
aagaacttctccgtcagtcacctgc

SEQ ID NO: 1424199 - DNA, 25 bp, Homo sapien
gctcctgtccttgtctactcccctt

SEQ ID NO: 1424200 - DNA, 25 bp, Homo sapien
aggctcctgtccttgtctactcccc

SEQ ID NO: 1424201 - DNA, 25 bp, Homo sapien
tcctgtccttgtctactcccctttc

SEQ ID NO: 1424202 - DNA, 25 bp, Homo sapien
ctcccctttctttggtactctctct

SEQ ID NO: 1424203 - DNA, 25 bp, Homo sapien
tttgagctttcactaatgtctttat

SEQ ID NO: 1424204 - DNA, 25 bp, Homo sapien
tcttctttgagctttcactaatgtc

SEQ ID NO: 1424205 - DNA, 25 bp, Homo sapien
cttctttgagctttcactaatgtct

SEQ ID NO: 1424206 - DNA, 25 bp, Homo sapien
tctttgagctttcactaatgtcttt

SEQ ID NO: 1424207 - DNA, 25 bp, Homo sapien
tgactcaggaacaacccggcagtgc

SEQ ID NO: 1424208 - DNA, 25 bp, Homo sapien
cctgggaagtcttgtcaaagggtga

SEQ ID NO: 1424209 - DNA, 25 bp, Homo sapien
ttcaagtgtgggctagcagctgact

SEQ ID NO: 1424210 - DNA, 25 bp, Homo sapien
gacaccaaggactgtgtgaggtggg

SEQ ID NO: 1424211 - DNA, 25 bp, Homo sapien
caagcaaattcaattggacatatac

SEQ ID NO: 1424212 - DNA, 25 bp, Homo sapien
aatataaacactaaacaagcaaatt

SEQ ID NO: 1424213 - DNA, 25 bp, Homo sapien
tggctgtagtcaatattgcttcact

SEQ ID NO: 1424214 - DNA, 25 bp, Homo sapien
tcaatccggcacctttcaccagcat

SEQ ID NO: 1424215 - DNA, 25 bp, Homo sapien
caatattgcttcactctgttatagt

SEQ ID NO: 1424216 - DNA, 25 bp, Homo sapien
tgtagaccgtctgcctccaaggctg

SEQ ID NO: 1424217 - DNA, 25 bp, Homo sapien
gctgactatatcgtttcatagacga

SEQ ID NO: 1424218 - DNA, 25 bp, Homo sapien
tatgttgtactgatttttgcaccca

SEQ ID NO: 1424219 - DNA, 25 bp, Homo sapien
aataaacctcctatagtctgctgac

SEQ ID NO: 1424220 - DNA, 25 bp, Homo sapien
tagctttgtccggtatgtttcaaca

SEQ ID NO: 1424221 - DNA, 25 bp, Homo sapien
cagtctccactagatgaggtgaagg

SEQ ID NO: 1424222 - DNA, 25 bp, Homo sapien
gagacgagggctggagataggagag

SEQ ID NO: 1424223 - DNA, 25 bp, Homo sapien
tcttaagaaatgacggtggcacaac

SEQ ID NO: 1424224 - DNA, 25 bp, Homo sapien
tcagagcagaattggcgtaaagttg

SEQ ID NO: 1424225 - DNA, 25 bp, Homo sapien
attgacacattgtaattgtacttgt

SEQ ID NO: 1424226 - DNA, 25 bp, Homo sapien
acagtacagcatgatattctgatac

SEQ ID NO: 1424227 - DNA, 25 bp, Homo sapien
gacacattgtaattgtacttgttta

SEQ ID NO: 1424228 - DNA, 25 bp, Homo sapien
tacttgtttatacagtacagcatga

SEQ ID NO: 1424229 - DNA, 25 bp, Homo sapien
ggttctacgaatgtcaagtgtttca

SEQ ID NO: 1424230 - DNA, 25 bp, Homo sapien
catgcagagcacttaacagaggttc

SEQ ID NO: 1424231 - DNA, 25 bp, Homo sapien
gatgtcgtccattgtgtgccctggg

SEQ ID NO: 1424232 - DNA, 25 bp, Homo sapien
tctgcaagacctcctagtgtagtga

SEQ ID NO: 1424233 - DNA, 25 bp, Homo sapien
accactttgccactttcctgctcca

SEQ ID NO: 1424234 - DNA, 25 bp, Homo sapien
ccactttgccactttcctgctccat

SEQ ID NO: 1424235 - DNA, 25 bp, Homo sapien
tgtcaccactttgccactttcctgc

SEQ ID NO: 1424236 - DNA, 25 bp, Homo sapien
tttttgtcaccactttgccactttc

SEQ ID NO: 1424237 - DNA, 25 bp, Homo sapien
aggcctcagttgtcaggcctctgga

SEQ ID NO: 1424238 - DNA, 25 bp, Homo sapien
cttagcaaaagacttagaggcctca

SEQ ID NO: 1424239 - DNA, 25 bp, Homo sapien
tgtacacaaatctagatcattccct

SEQ ID NO: 1424240 - DNA, 25 bp, Homo sapien
ggatttaagctacattttgactctg

SEQ ID NO: 1424241 - DNA, 25 bp, Homo sapien
caaaagaagaaagtcgtgggagcct

SEQ ID NO: 1424242 - DNA, 25 bp, Homo sapien
gattcctagcccatcgattagggcc

SEQ ID NO: 1424243 - DNA, 25 bp, Homo sapien
gagaccactgtggagttgatgcaga

SEQ ID NO: 1424244 - DNA, 25 bp, Homo sapien
gaacttgagctagacctcagggtag

SEQ ID NO: 1424245 - DNA, 25 bp, Homo sapien
tctacagggcactgatcacgtggta

SEQ ID NO: 1424246 - DNA, 25 bp, Homo sapien
agcatttagtactgggcctggacca

SEQ ID NO: 1424247 - DNA, 25 bp, Homo sapien
gctctaagagcaatgtgaaggcaca

SEQ ID NO: 1424248 - DNA, 25 bp, Homo sapien
taatttatgtgtatgttggcccctc

SEQ ID NO: 1424249 - DNA, 25 bp, Homo sapien
aagtcttattctgggccctattgca

SEQ ID NO: 1424250 - DNA, 25 bp, Homo sapien
taacccattggattagtctagagtg

SEQ ID NO: 1424251 - DNA, 25 bp, Homo sapien
tgctgttcagaaaatataggctgcc

SEQ ID NO: 1424252 - DNA, 25 bp, Homo sapien
ctgagtactctgagaaaccaggcca

SEQ ID NO: 1424253 - DNA, 25 bp, Homo sapien
ttctctttatagaagctctaggagc

SEQ ID NO: 1424254 - DNA, 25 bp, Homo sapien
tgtgctggacagacataattccctt

SEQ ID NO: 1424255 - DNA, 25 bp, Homo sapien
ttctcattgtctccatctttgttgg

SEQ ID NO: 1424256 - DNA, 25 bp, Homo sapien
taggagctttcgaaaagccaaagtc

SEQ ID NO: 1424257 - DNA, 25 bp, Homo sapien
cccttggcccacaaattcactaact

SEQ ID NO: 1424258 - DNA, 25 bp, Homo sapien
ccttggcccacaaattcactaactg

SEQ ID NO: 1424259 - DNA, 25 bp, Homo sapien
cttggcccacaaattcactaactga

SEQ ID NO: 1424260 - DNA, 25 bp, Homo sapien
agagtttccctgctgaactggaaac

SEQ ID NO: 1424261 - DNA, 25 bp, Homo sapien
catttaagtgttcgtatttcaaaga

SEQ ID NO: 1424262 - DNA, 25 bp, Homo sapien
tcatttaagtgttcgtatttcaaag

SEQ ID NO: 1424263 - DNA, 25 bp, Homo sapien
tttcaaagagtttccctgctgaact

SEQ ID NO: 1424264 - DNA, 25 bp, Homo sapien
tttattgatgctgtggtcaagcaga

SEQ ID NO: 1424265 - DNA, 25 bp, Homo sapien
gatgctgtggtcaagcagacttgta

SEQ ID NO: 1424266 - DNA, 25 bp, Homo sapien
gctgtggtcaagcagacttgtattc

SEQ ID NO: 1424267 - DNA, 25 bp, Homo sapien
caagcagacttgtattcagattctg

SEQ ID NO: 1424268 - DNA, 25 bp, Homo sapien
gaactttgctctgtggaaccctttg

SEQ ID NO: 1424269 - DNA, 25 bp, Homo sapien
tcctcacagtaatctaagtagtgga

SEQ ID NO: 1424270 - DNA, 25 bp, Homo sapien
cctttggcagttagctgatatctgc

SEQ ID NO: 1424271 - DNA, 25 bp, Homo sapien
tctgctgcagataatagcatactga

SEQ ID NO: 1424272 - DNA, 25 bp, Homo sapien
caaaatttggccgttgccatggtcc

SEQ ID NO: 1424273 - DNA, 25 bp, Homo sapien
aactgaagagttttgtctggcgtgg

SEQ ID NO: 1424274 - DNA, 25 bp, Homo sapien
gcactgagatgatctacaagtagat

SEQ ID NO: 1424275 - DNA, 25 bp, Homo sapien
caataaggccagattagtgatggga

SEQ ID NO: 1424276 - DNA, 25 bp, Homo sapien
tatgagagctcagcgcttttgtctt

SEQ ID NO: 1424277 - DNA, 25 bp, Homo sapien
aacctgtcgcctttcattcttatga

SEQ ID NO: 1424278 - DNA, 25 bp, Homo sapien
gttgatgcctataattagagcttca

SEQ ID NO: 1424279 - DNA, 25 bp, Homo sapien
aagtttgagctccttaccttgctag

SEQ ID NO: 1424280 - DNA, 25 bp, Homo sapien
gaattcttgtgagcctgccacatat

SEQ ID NO: 1424281 - DNA, 25 bp, Homo sapien
tgagaattcttgtgagcctgccaca

SEQ ID NO: 1424282 - DNA, 25 bp, Homo sapien
tgtctccctgtagaactggggagag

SEQ ID NO: 1424283 - DNA, 25 bp, Homo sapien
tgtgagaattcttgtgagcctgcca

SEQ ID NO: 1424284 - DNA, 25 bp, Homo sapien
tctttcagaggcatccattcaaggc

SEQ ID NO: 1424285 - DNA, 25 bp, Homo sapien
tttggattaatcagaacctgctggt

SEQ ID NO: 1424286 - DNA, 25 bp, Homo sapien
caggcttgtcccgaaatagattgga

SEQ ID NO: 1424287 - DNA, 25 bp, Homo sapien
gggcagtatctgtttgcagttacca

SEQ ID NO: 1424288 - DNA, 25 bp, Homo sapien
agatgctatctgagcgaggccgaac

SEQ ID NO: 1424289 - DNA, 25 bp, Homo sapien
gagcgaggccgaacagccaaatgga

SEQ ID NO: 1424290 - DNA, 25 bp, Homo sapien
ctatctgagcgaggccgaacagcca

SEQ ID NO: 1424291 - DNA, 25 bp, Homo sapien
tctgtggaagatgctatctgagcga

SEQ ID NO: 1424292 - DNA, 25 bp, Homo sapien
tgtgcccttaatctgtgaagtctgc

SEQ ID NO: 1424293 - DNA, 25 bp, Homo sapien
taggaagccccagatttgtagccag

SEQ ID NO: 1424294 - DNA, 25 bp, Homo sapien
ttgtagccagctgatcagaagtgcc

SEQ ID NO: 1424295 - DNA, 25 bp, Homo sapien
cagaattgctttgcagtaggcatgc

SEQ ID NO: 1424296 - DNA, 25 bp, Homo sapien
cgagtgggcttttgaacctctcatt

SEQ ID NO: 1424297 - DNA, 25 bp, Homo sapien
tttcgagtgggcttttgaacctctc

SEQ ID NO: 1424298 - DNA, 25 bp, Homo sapien
taaaacataatgtttcgagtgggct

SEQ ID NO: 1424299 - DNA, 25 bp, Homo sapien
taatgtttcgagtgggcttttgaac

SEQ ID NO: 1424300 - DNA, 25 bp, Homo sapien
catttcagagatatccggctctgga

SEQ ID NO: 1424301 - DNA, 25 bp, Homo sapien
atttcagagatatccggctctggac

SEQ ID NO: 1424302 - DNA, 25 bp, Homo sapien
tcatttcagagatatccggctctgg

SEQ ID NO: 1424303 - DNA, 25 bp, Homo sapien
actaccaacaccggccggatgtgtg

SEQ ID NO: 1424304 - DNA, 25 bp, Homo sapien
taccaacaccggccggatgtgtgcc

SEQ ID NO: 1424305 - DNA, 25 bp, Homo sapien
ccaacaccggccggatgtgtgcctg

SEQ ID NO: 1424306 - DNA, 25 bp, Homo sapien
aaccactaccaacaccggccggatg

SEQ ID NO: 1424307 - DNA, 25 bp, Homo sapien
gaatcaacaataggcttctccccat

SEQ ID NO: 1424308 - DNA, 25 bp, Homo sapien
ttgagaacaggctaagagcttggtc

SEQ ID NO: 1424309 - DNA, 25 bp, Homo sapien
cagatgcaggcaaaaaaactctagc

SEQ ID NO: 1424310 - DNA, 25 bp, Homo sapien
ccagggaaggtgacgaagtctccac

SEQ ID NO: 1424311 - DNA, 25 bp, Homo sapien
gagacatgacctctaagccaatgag

SEQ ID NO: 1424312 - DNA, 25 bp, Homo sapien
cctcatgctgcatgaagggctggta

SEQ ID NO: 1424313 - DNA, 25 bp, Homo sapien
cagtttcagctctagaccctcatgc

SEQ ID NO: 1424314 - DNA, 25 bp, Homo sapien
tacagcagatcccaacagggaccag

SEQ ID NO: 1424315 - DNA, 25 bp, Homo sapien
cctattggatgcatactcaggcctg

SEQ ID NO: 1424316 - DNA, 25 bp, Homo sapien
gaactccaggtatgataagctatca

SEQ ID NO: 1424317 - DNA, 25 bp, Homo sapien
tgcgtagacaagcagataatctttc

SEQ ID NO: 1424318 - DNA, 25 bp, Homo sapien
catgatcctggctgtgaactccagg

SEQ ID NO: 1424319 - DNA, 25 bp, Homo sapien
tgattgctggagtcacttcaggagg

SEQ ID NO: 1424320 - DNA, 25 bp, Homo sapien
caagcagtccccagatttattgaga

SEQ ID NO: 1424321 - DNA, 25 bp, Homo sapien
caggcatctttgtgcaagtacatga

SEQ ID NO: 1424322 - DNA, 25 bp, Homo sapien
tattaaggtgcccatttccccacac

SEQ ID NO: 1424323 - DNA, 25 bp, Homo sapien
caatggcagactcacatactgtatg

SEQ ID NO: 1424324 - DNA, 25 bp, Homo sapien
gaacaccacatgtgaatgggaccac

SEQ ID NO: 1424325 - DNA, 25 bp, Homo sapien
gcaaacacataggtcacaggcccat

SEQ ID NO: 1424326 - DNA, 25 bp, Homo sapien
ttatatagaactctcaatgctgctg

SEQ ID NO: 1424327 - DNA, 25 bp, Homo sapien
gttctgataagagacattcgccatc

SEQ ID NO: 1424328 - DNA, 25 bp, Homo sapien
aatgtatacaccatgttctcaggac

SEQ ID NO: 1424329 - DNA, 25 bp, Homo sapien
caaatgggaccttctctgtacctct

SEQ ID NO: 1424330 - DNA, 25 bp, Homo sapien
tcctgaggctgtatcattggccatg

SEQ ID NO: 1424331 - DNA, 25 bp, Homo sapien
aaagaaaggatagcccagagggtag

SEQ ID NO: 1424332 - DNA, 25 bp, Homo sapien
tgtcgataacggttacccatgcttg

SEQ ID NO: 1424333 - DNA, 25 bp, Homo sapien
gcaacatgtgctacccttcaagaaa

SEQ ID NO: 1424334 - DNA, 25 bp, Homo sapien
gaacgcactgctgatatggctattg

SEQ ID NO: 1424335 - DNA, 25 bp, Homo sapien
gaaagcctgaattgtcatttgatga

SEQ ID NO: 1424336 - DNA, 25 bp, Homo sapien
taatattgcgaaggaaaggatagac

SEQ ID NO: 1424337 - DNA, 25 bp, Homo sapien
tacttccaaacttgcagtgaacaag

SEQ ID NO: 1424338 - DNA, 25 bp, Homo sapien
cagttccatgggtgagtacttccaa

SEQ ID NO: 1424339 - DNA, 25 bp, Homo sapien
agttaacattttcgagctccatgca

SEQ ID NO: 1424340 - DNA, 25 bp, Homo sapien
taatctcatcaaggttcccactgaa

SEQ ID NO: 1424341 - DNA, 25 bp, Homo sapien
gggctcatacttcatccctcaagag

SEQ ID NO: 1424342 - DNA, 25 bp, Homo sapien
tccatgcatatgctagagactgtgc

SEQ ID NO: 1424343 - DNA, 25 bp, Homo sapien
ggctggtcctatgccagactcatta

SEQ ID NO: 1424344 - DNA, 25 bp, Homo sapien
aaaatggagaaaaagcgcaaatggt

SEQ ID NO: 1424345 - DNA, 25 bp, Homo sapien
cattaattaccatcgtgtctttcct

SEQ ID NO: 1424346 - DNA, 25 bp, Homo sapien
cttgtactttgccttctatggaaga

SEQ ID NO: 1424347 - DNA, 25 bp, Homo sapien
aagttactgacaatacccagacagg

SEQ ID NO: 1424348 - DNA, 25 bp, Homo sapien
cagacacgagtggtcgggagacttc

SEQ ID NO: 1424349 - DNA, 25 bp, Homo sapien
catactgacccagtgggaccggtcg

SEQ ID NO: 1424350 - DNA, 25 bp, Homo sapien
gaccggtcgttgaaacccatgcaga

SEQ ID NO: 1424351 - DNA, 25 bp, Homo sapien
cttcccttccaacttagatcaatgg

SEQ ID NO: 1424352 - DNA, 25 bp, Homo sapien
ggctccaccagttagttattatact

SEQ ID NO: 1424353 - DNA, 25 bp, Homo sapien
tattcctcttaaaggtccaccagtc

SEQ ID NO: 1424354 - DNA, 25 bp, Homo sapien
cattcctgtgataatccactaattc

SEQ ID NO: 1424355 - DNA, 25 bp, Homo sapien
tctatatcccccatatgtgtgtatg

SEQ ID NO: 1424356 - DNA, 25 bp, Homo sapien
aaggaaagcaatatgaaagcactcc

SEQ ID NO: 1424357 - DNA, 25 bp, Homo sapien
ctttatccatgtacaaagaaatgat

SEQ ID NO: 1424358 - DNA, 25 bp, Homo sapien
gatcactattcatgatatacatgca

SEQ ID NO: 1424359 - DNA, 25 bp, Homo sapien
gtctccttgattctagtcaccatcc

SEQ ID NO: 1424360 - DNA, 25 bp, Homo sapien
aagtcctcagtctctctggcctaga

SEQ ID NO: 1424361 - DNA, 25 bp, Homo sapien
gattgttgaaataacatcctgggtt

SEQ ID NO: 1424362 - DNA, 25 bp, Homo sapien
tcctctaatgctactctaatttaag

SEQ ID NO: 1424363 - DNA, 25 bp, Homo sapien
cctccaagtggacctagatttttct

SEQ ID NO: 1424364 - DNA, 25 bp, Homo sapien
aacccatattttgctattcccatca

SEQ ID NO: 1424365 - DNA, 25 bp, Homo sapien
tatggtccagcaaaactgaactaat

SEQ ID NO: 1424366 - DNA, 25 bp, Homo sapien
tcacgtgttcttacttttctatgca

SEQ ID NO: 1424367 - DNA, 25 bp, Homo sapien
tgagagttagtttgaacagtctgcc

SEQ ID NO: 1424368 - DNA, 25 bp, Homo sapien
cttggtatatgcaggagattggctc

SEQ ID NO: 1424369 - DNA, 25 bp, Homo sapien
acagtctgccaacaatatgatttga

SEQ ID NO: 1424370 - DNA, 25 bp, Homo sapien
tagaaattacagttggtccttggta

SEQ ID NO: 1424371 - DNA, 25 bp, Homo sapien
ctaggaagtatgtattatgattatc

SEQ ID NO: 1424372 - DNA, 25 bp, Homo sapien
cacttaataaccttgctgaagtatt

SEQ ID NO: 1424373 - DNA, 25 bp, Homo sapien
tttacaatttcggagctgtcacact

SEQ ID NO: 1424374 - DNA, 25 bp, Homo sapien
cttttcttcgcaatactgctaggaa

SEQ ID NO: 1424375 - DNA, 25 bp, Homo sapien
gaactgtcttgctcacatgatgtac

SEQ ID NO: 1424376 - DNA, 25 bp, Homo sapien
gaggcggctacataaaacgttcctg

SEQ ID NO: 1424377 - DNA, 25 bp, Homo sapien
tacaaagtccacaaagaggcggcta

SEQ ID NO: 1424378 - DNA, 25 bp, Homo sapien
acgttcctgacatatgccaattgca

SEQ ID NO: 1424379 - DNA, 25 bp, Homo sapien
gtccttagtgtgagaaaatgtccag

SEQ ID NO: 1424380 - DNA, 25 bp, Homo sapien
tatcaggcacacatcatgagaaccc

SEQ ID NO: 1424381 - DNA, 25 bp, Homo sapien
tctggccaatggaaggttgtcactc

SEQ ID NO: 1424382 - DNA, 25 bp, Homo sapien
gccagtctgagattggacagttact

SEQ ID NO: 1424383 - DNA, 25 bp, Homo sapien
gctcaggtgtgatgctctctgctta

SEQ ID NO: 1424384 - DNA, 25 bp, Homo sapien
ggaaaacgcatcctggtgattggaa

SEQ ID NO: 1424385 - DNA, 25 bp, Homo sapien
catagccgccaatacaagcatccag

SEQ ID NO: 1424386 - DNA, 25 bp, Homo sapien
aaaggccaatatttccatagccgcc

SEQ ID NO: 1424387 - DNA, 25 bp, Homo sapien
tggtggtcaggaatagcaaaaacta

SEQ ID NO: 1424388 - DNA, 25 bp, Homo sapien
ctgagctgccaaagagtcaaacatt

SEQ ID NO: 1424389 - DNA, 25 bp, Homo sapien
cattcattacacgatgatgctgctg

SEQ ID NO: 1424390 - DNA, 25 bp, Homo sapien
aagtattccctctcaagaaggcctg

SEQ ID NO: 1424391 - DNA, 25 bp, Homo sapien
catgagccgtatctctgaagatggc

SEQ ID NO: 1424392 - DNA, 25 bp, Homo sapien
tatgctccgcaatgtactgccacga

SEQ ID NO: 1424393 - DNA, 25 bp, Homo sapien
gaagatggctatccttgggactcag

SEQ ID NO: 1424394 - DNA, 25 bp, Homo sapien
tccacacccggtttcgttctatgct

SEQ ID NO: 1424395 - DNA, 25 bp, Homo sapien
tcctattagtatcgcctggttgggc

SEQ ID NO: 1424396 - DNA, 25 bp, Homo sapien
tgttgactacttggacgagctcgcc

SEQ ID NO: 1424397 - DNA, 25 bp, Homo sapien
tgtgagactctatttcggaccctgc

SEQ ID NO: 1424398 - DNA, 25 bp, Homo sapien
ccttagagataggtgcgaagccaga

SEQ ID NO: 1424399 - DNA, 25 bp, Homo sapien
ataatagacaaacatctcctaaggg

SEQ ID NO: 1424400 - DNA, 25 bp, Homo sapien
gaagataagctctgtcctgagtcca

SEQ ID NO: 1424401 - DNA, 25 bp, Homo sapien
tgtgctttggaagataagctctgtc

SEQ ID NO: 1424402 - DNA, 25 bp, Homo sapien
tactggtctgttagcagagacaaac

SEQ ID NO: 1424403 - DNA, 25 bp, Homo sapien
tttctaccaagcctttgtgaacatt

SEQ ID NO: 1424404 - DNA, 25 bp, Homo sapien
tcttatttctaccaagcctttgtga

SEQ ID NO: 1424405 - DNA, 25 bp, Homo sapien
tctaccaagcctttgtgaacattgc

SEQ ID NO: 1424406 - DNA, 25 bp, Homo sapien
tatttctaccaagcctttgtgaaca

SEQ ID NO: 1424407 - DNA, 25 bp, Homo sapien
tcagtgaattaccactgcctgtggg

SEQ ID NO: 1424408 - DNA, 25 bp, Homo sapien
agttacaccagaatttacaggcaag

SEQ ID NO: 1424409 - DNA, 25 bp, Homo sapien
tgggccaaatctagctcactatctg

SEQ ID NO: 1424410 - DNA, 25 bp, Homo sapien
tcagggacgtagaacaatggaatgt

SEQ ID NO: 1424411 - DNA, 25 bp, Homo sapien
actctcctccaccttattcagaaaa

SEQ ID NO: 1424412 - DNA, 25 bp, Homo sapien
tctgccatgcttacagagttaactc

SEQ ID NO: 1424413 - DNA, 25 bp, Homo sapien
tctcctccaccttattcagaaaaat

SEQ ID NO: 1424414 - DNA, 25 bp, Homo sapien
tgcttacagagttaactcctaactc

SEQ ID NO: 1424415 - DNA, 25 bp, Homo sapien
gcaaatcaaccattagctgctcctg

SEQ ID NO: 1424416 - DNA, 25 bp, Homo sapien
atcaaccattagctgctcctgtaaa

SEQ ID NO: 1424417 - DNA, 25 bp, Homo sapien
ctgcaaatcaaccattagctgctcc

SEQ ID NO: 1424418 - DNA, 25 bp, Homo sapien
caaatcaaccattagctgctcctgt

SEQ ID NO: 1424419 - DNA, 25 bp, Homo sapien
ttaaggcctccaacaaatatacacc

SEQ ID NO: 1424420 - DNA, 25 bp, Homo sapien
gatgtgaatacgagactcaaaaccc

SEQ ID NO: 1424421 - DNA, 25 bp, Homo sapien
caaatatacaccaggagtctggagg

SEQ ID NO: 1424422 - DNA, 25 bp, Homo sapien
gagcccttcttagtaaaaagatgtg

SEQ ID NO: 1424423 - DNA, 25 bp, Homo sapien
tggcagagccattggcaccagaaat

SEQ ID NO: 1424424 - DNA, 25 bp, Homo sapien
tacgtaaagtaagtaaccagatata

SEQ ID NO: 1424425 - DNA, 25 bp, Homo sapien
taataccagagtcctgcgtggcaga

SEQ ID NO: 1424426 - DNA, 25 bp, Homo sapien
gcaccagaaattacaagtacgtaaa

SEQ ID NO: 1424427 - DNA, 25 bp, Homo sapien
gggctaagtaggcaccttcacccac

SEQ ID NO: 1424428 - DNA, 25 bp, Homo sapien
tcctgaaatgtcacaacccacttga

SEQ ID NO: 1424429 - DNA, 25 bp, Homo sapien
caacccacttgaggatagggtatca

SEQ ID NO: 1424430 - DNA, 25 bp, Homo sapien
tgaatctctctctgattactcctga

SEQ ID NO: 1424431 - DNA, 25 bp, Homo sapien
ggaccaactgccctcgtctctttcc

SEQ ID NO: 1424432 - DNA, 25 bp, Homo sapien
tggggtgcctattggcatcctctcc

SEQ ID NO: 1424433 - DNA, 25 bp, Homo sapien
tcacctctggggtgcctattggcat

SEQ ID NO: 1424434 - DNA, 25 bp, Homo sapien
ccctgtgcttactaatacagtccct

SEQ ID NO: 1424435 - DNA, 25 bp, Homo sapien
ccacaggtgcactgtgctcaccaca

SEQ ID NO: 1424436 - DNA, 25 bp, Homo sapien
cacagccacaggtgcactgtgctca

SEQ ID NO: 1424437 - DNA, 25 bp, Homo sapien
caggtgcactgtgctcaccacacat

SEQ ID NO: 1424438 - DNA, 25 bp, Homo sapien
accacagccacaggtgcactgtgct

SEQ ID NO: 1424439 - DNA, 25 bp, Homo sapien
ggcagaggctcttgtgttttctcat

SEQ ID NO: 1424440 - DNA, 25 bp, Homo sapien
ctggtgcagccttttctggcagagg

SEQ ID NO: 1424441 - DNA, 25 bp, Homo sapien
tctggcagaggctcttgtgttttct

SEQ ID NO: 1424442 - DNA, 25 bp, Homo sapien
tggtgcagccttttctggcagaggc

SEQ ID NO: 1424443 - DNA, 25 bp, Homo sapien
cgagttagcgtactacctttggact

SEQ ID NO: 1424444 - DNA, 25 bp, Homo sapien
taaacaatcaatcgagttagcgtac

SEQ ID NO: 1424445 - DNA, 25 bp, Homo sapien
ctgtaaacaatcaatcgagttagcg

SEQ ID NO: 1424446 - DNA, 25 bp, Homo sapien
aatcaatcgagttagcgtactacct

SEQ ID NO: 1424447 - DNA, 25 bp, Homo sapien
taaaccagtctcagcaagttcagtg

SEQ ID NO: 1424448 - DNA, 25 bp, Homo sapien
catatcagtattgctctgcagacta

SEQ ID NO: 1424449 - DNA, 25 bp, Homo sapien
ggtgtccacatgcttacatattgag

SEQ ID NO: 1424450 - DNA, 25 bp, Homo sapien
tcctatggcatatgactagtacaca

SEQ ID NO: 1424451 - DNA, 25 bp, Homo sapien
tatgatatcaattcacatcctttgc

SEQ ID NO: 1424452 - DNA, 25 bp, Homo sapien
tctccatatgtgagatttatgttca

SEQ ID NO: 1424453 - DNA, 25 bp, Homo sapien
tcaactcttatcagtcaatgagata

SEQ ID NO: 1424454 - DNA, 25 bp, Homo sapien
cagacagatacaggaatctatatat

SEQ ID NO: 1424455 - DNA, 25 bp, Homo sapien
tgtattaggctcctggctagcgccc

SEQ ID NO: 1424456 - DNA, 25 bp, Homo sapien
gaaggcagagccagtctctacaagt

SEQ ID NO: 1424457 - DNA, 25 bp, Homo sapien
tactgtgtgcatctggaccggtgag

SEQ ID NO: 1424458 - DNA, 25 bp, Homo sapien
caaggagatgtcttgttactcagac

SEQ ID NO: 1424459 - DNA, 25 bp, Homo sapien
gacatcactaatgggcaggccaagt

SEQ ID NO: 1424460 - DNA, 25 bp, Homo sapien
cacgacatcactaatgggcaggcca

SEQ ID NO: 1424461 - DNA, 25 bp, Homo sapien
tcactaatgggcaggccaagttgtt

SEQ ID NO: 1424462 - DNA, 25 bp, Homo sapien
gtttcttcacgacatcactaatggg

SEQ ID NO: 1424463 - DNA, 25 bp, Homo sapien
cacttctctttcataatgggccttg

SEQ ID NO: 1424464 - DNA, 25 bp, Homo sapien
tctctttcataatgggccttgtcac

SEQ ID NO: 1424465 - DNA, 25 bp, Homo sapien
cttctctttcataatgggccttgtc

SEQ ID NO: 1424466 - DNA, 25 bp, Homo sapien
tcacttctctttcataatgggcctt

SEQ ID NO: 1424467 - DNA, 25 bp, Homo sapien
tctgggtgctgcttcttatgctctt

SEQ ID NO: 1424468 - DNA, 25 bp, Homo sapien
tgggtgctgcttcttatgctcttcc

SEQ ID NO: 1424469 - DNA, 25 bp, Homo sapien
ggtgctgcttcttatgctcttcccg

SEQ ID NO: 1424470 - DNA, 25 bp, Homo sapien
gctgcttcttatgctcttcccgaca

SEQ ID NO: 1424471 - DNA, 25 bp, Homo sapien
taccactggtattcctgagcctctc

SEQ ID NO: 1424472 - DNA, 25 bp, Homo sapien
cacagagtagatttacaatgctcca

SEQ ID NO: 1424473 - DNA, 25 bp, Homo sapien
tattcaaatagtaaaggccaccctc

SEQ ID NO: 1424474 - DNA, 25 bp, Homo sapien
gacagcactctgagccatcatacct

SEQ ID NO: 1424475 - DNA, 25 bp, Homo sapien
caacaggccctacaacattcccctc

SEQ ID NO: 1424476 - DNA, 25 bp, Homo sapien
cctacaacaggccctacaacattcc

SEQ ID NO: 1424477 - DNA, 25 bp, Homo sapien
ccctacaacaggccctacaacattc

SEQ ID NO: 1424478 - DNA, 25 bp, Homo sapien
caggccctacaacattcccctctct

SEQ ID NO: 1424479 - DNA, 25 bp, Homo sapien
tatggtaatccaagcaagagtcagg

SEQ ID NO: 1424480 - DNA, 25 bp, Homo sapien
tcagggtgtagaagtttgtttccaa

SEQ ID NO: 1424481 - DNA, 25 bp, Homo sapien
cctttggacagctcctatggtaatc

SEQ ID NO: 1424482 - DNA, 25 bp, Homo sapien
tggagaactccaagcatgaaagaac

SEQ ID NO: 1424483 - DNA, 25 bp, Homo sapien
tctttcacgaatagctgtaggaccc

SEQ ID NO: 1424484 - DNA, 25 bp, Homo sapien
tctctgcatagaaagtaccaggatt

SEQ ID NO: 1424485 - DNA, 25 bp, Homo sapien
tgtaggacccctgttgaaatgaatg

SEQ ID NO: 1424486 - DNA, 25 bp, Homo sapien
ttttacttgggaacatgaactcttc

SEQ ID NO: 1424487 - DNA, 25 bp, Homo sapien
tcatgaggattatggattaagtatt

SEQ ID NO: 1424488 - DNA, 25 bp, Homo sapien
tgaggattatggattaagtattacc

SEQ ID NO: 1424489 - DNA, 25 bp, Homo sapien
ggattatggattaagtattaccaaa

SEQ ID NO: 1424490 - DNA, 25 bp, Homo sapien
gaggattatggattaagtattacca

SEQ ID NO: 1424491 - DNA, 25 bp, Homo sapien
tgtggggcaatcactatgaaaacca

SEQ ID NO: 1424492 - DNA, 25 bp, Homo sapien
caatcactatgaaaaccagcgtgat

SEQ ID NO: 1424493 - DNA, 25 bp, Homo sapien
tcctctgtggggcaatcactatgaa

SEQ ID NO: 1424494 - DNA, 25 bp, Homo sapien
ctgccaaactgtatcctctgtgggg

SEQ ID NO: 1424495 - DNA, 25 bp, Homo sapien
tccttatcagtaccgcctcatgggc

SEQ ID NO: 1424496 - DNA, 25 bp, Homo sapien
ctcatgggccctggaaaatgggatg

SEQ ID NO: 1424497 - DNA, 25 bp, Homo sapien
cagaatgtccccttacctagtaagt

SEQ ID NO: 1424498 - DNA, 25 bp, Homo sapien
taagtctttggcgaggatgaacctg

SEQ ID NO: 1424499 - DNA, 25 bp, Homo sapien
tataccgtgcctgactgatgagatc

SEQ ID NO: 1424500 - DNA, 25 bp, Homo sapien
tatcatgttcatcggacacactgcc

SEQ ID NO: 1424501 - DNA, 25 bp, Homo sapien
tgatgaatcgacagtggccttgcca

SEQ ID NO: 1424502 - DNA, 25 bp, Homo sapien
aatggtcacccctgtgtagcagctg

SEQ ID NO: 1424503 - DNA, 25 bp, Homo sapien
cctgtcttgtcattatgtttgccaa

SEQ ID NO: 1424504 - DNA, 25 bp, Homo sapien
tcaaagcaagattacaagattgccc

SEQ ID NO: 1424505 - DNA, 25 bp, Homo sapien
ttcttcttagttgcaggtgatatgg

SEQ ID NO: 1424506 - DNA, 25 bp, Homo sapien
agatctagacttgccaatggcttaa

SEQ ID NO: 1424507 - DNA, 25 bp, Homo sapien
cacaccttgccaatctgagggctga

SEQ ID NO: 1424508 - DNA, 25 bp, Homo sapien
gatgatatagagcatcctgtccgaa

SEQ ID NO: 1424509 - DNA, 25 bp, Homo sapien
ctgtccgaaatgctgctctaggtcc

SEQ ID NO: 1424510 - DNA, 25 bp, Homo sapien
ggtaggaagctctgtgttagaagac

SEQ ID NO: 1424511 - DNA, 25 bp, Homo sapien
tctctctgcatcttgtatgttccca

SEQ ID NO: 1424512 - DNA, 25 bp, Homo sapien
gttcccagatacacttcttccccac

SEQ ID NO: 1424513 - DNA, 25 bp, Homo sapien
tcccagatacacttcttccccactt

SEQ ID NO: 1424514 - DNA, 25 bp, Homo sapien
ttcccagatacacttcttccccact

SEQ ID NO: 1424515 - DNA, 25 bp, Homo sapien
ggtggcagtaacaatcattgcagcc

SEQ ID NO: 1424516 - DNA, 25 bp, Homo sapien
gaacaccacagcaagggatcacctg

SEQ ID NO: 1424517 - DNA, 25 bp, Homo sapien
tagctctctagcaatggaaccaaac

SEQ ID NO: 1424518 - DNA, 25 bp, Homo sapien
aagaggaaacctctgaattgccaga

SEQ ID NO: 1424519 - DNA, 25 bp, Homo sapien
cataggggcgatgctaatcttctcc

SEQ ID NO: 1424520 - DNA, 25 bp, Homo sapien
cttctccgtatcattccaagtttac

SEQ ID NO: 1424521 - DNA, 25 bp, Homo sapien
atgtcatctttgcataggggcgatg

SEQ ID NO: 1424522 - DNA, 25 bp, Homo sapien
tccgtatcattccaagtttactata

SEQ ID NO: 1424523 - DNA, 25 bp, Homo sapien
cactgagacatactggcgaactgct

SEQ ID NO: 1424524 - DNA, 25 bp, Homo sapien
gctacagtgacaattccatggacat

SEQ ID NO: 1424525 - DNA, 25 bp, Homo sapien
agcttgccccaaattcactgagaca

SEQ ID NO: 1424526 - DNA, 25 bp, Homo sapien
tcataggtagttcacaaagaggaca

SEQ ID NO: 1424527 - DNA, 25 bp, Homo sapien
gagaccctcgaagtgcgcaaacttg

SEQ ID NO: 1424528 - DNA, 25 bp, Homo sapien
cgaaagtgctttggcggtttgtcca

SEQ ID NO: 1424529 - DNA, 25 bp, Homo sapien
caccctgaccggtaaggaaagcgag

SEQ ID NO: 1424530 - DNA, 25 bp, Homo sapien
tcgatcagagatcggcggagaccct

SEQ ID NO: 1424531 - DNA, 25 bp, Homo sapien
tagtgtcgggtatgcgtttccccaa

SEQ ID NO: 1424532 - DNA, 25 bp, Homo sapien
tccgctagggaagtgctgcccaact

SEQ ID NO: 1424533 - DNA, 25 bp, Homo sapien
tctaacttgcgtggtgaatctcggt

SEQ ID NO: 1424534 - DNA, 25 bp, Homo sapien
ccatgtggtctgcagcgggagttct

SEQ ID NO: 1424535 - DNA, 25 bp, Homo sapien
agggcttattactatgcttagtgca

SEQ ID NO: 1424536 - DNA, 25 bp, Homo sapien
gataataggacttccctcagaggct

SEQ ID NO: 1424537 - DNA, 25 bp, Homo sapien
aaaggtcaactaatagtggagggag

SEQ ID NO: 1424538 - DNA, 25 bp, Homo sapien
gcttagtgcatagtaaaaggtcaac

SEQ ID NO: 1424539 - DNA, 25 bp, Homo sapien
acgatctctgctcatggcaaactcc

SEQ ID NO: 1424540 - DNA, 25 bp, Homo sapien
cacgatctctgctcatggcaaactc

SEQ ID NO: 1424541 - DNA, 25 bp, Homo sapien
cgatctctgctcatggcaaactccg

SEQ ID NO: 1424542 - DNA, 25 bp, Homo sapien
cgttggacattttaatacgcttgct

SEQ ID NO: 1424543 - DNA, 25 bp, Homo sapien
gcttgagtgttctgcgatggctaga

SEQ ID NO: 1424544 - DNA, 25 bp, Homo sapien
aatcggatgttctataaccctgtgg

SEQ ID NO: 1424545 - DNA, 25 bp, Homo sapien
agctttactctttgggctgctttga

SEQ ID NO: 1424546 - DNA, 25 bp, Homo sapien
gagccacctcacttggcctttaaac

SEQ ID NO: 1424547 - DNA, 25 bp, Homo sapien
acaaaaataaagataacagtgcaat

SEQ ID NO: 1424548 - DNA, 25 bp, Homo sapien
aaaataaagataacagtgcaatgaa

SEQ ID NO: 1424549 - DNA, 25 bp, Homo sapien
tcctggcatcaagtagtctgcccac

SEQ ID NO: 1424550 - DNA, 25 bp, Homo sapien
atgttatttttatgcgggggctgtg

SEQ ID NO: 1424551 - DNA, 25 bp, Homo sapien
tttttatgcgggggctgtgctaatc

SEQ ID NO: 1424552 - DNA, 25 bp, Homo sapien
tgttatttttatgcgggggctgtgc

SEQ ID NO: 1424553 - DNA, 25 bp, Homo sapien
tatttttatgcgggggctgtgctaa

SEQ ID NO: 1424554 - DNA, 25 bp, Homo sapien
actgaatagagggtgcttaatgagc

SEQ ID NO: 1424555 - DNA, 25 bp, Homo sapien
ggaagtagattatacagagcaactg

SEQ ID NO: 1424556 - DNA, 25 bp, Homo sapien
tacagtatacagctaatcaaggaat

SEQ ID NO: 1424557 - DNA, 25 bp, Homo sapien
gatgatgaacaaggaagtaacagtc

SEQ ID NO: 1424558 - DNA, 25 bp, Homo sapien
ttctgggcctcctacacttcgagtg

SEQ ID NO: 1424559 - DNA, 25 bp, Homo sapien
gaactcctagacaagataccacctt

SEQ ID NO: 1424560 - DNA, 25 bp, Homo sapien
tatacttaccgtcttttgctgctca

SEQ ID NO: 1424561 - DNA, 25 bp, Homo sapien
tctacttgcatctgagacacctcgc

SEQ ID NO: 1424562 - DNA, 25 bp, Homo sapien
gaaacgattggatgagaagcttggc

SEQ ID NO: 1424563 - DNA, 25 bp, Homo sapien
gcttgtgcggagaaactgaaacgat

SEQ ID NO: 1424564 - DNA, 25 bp, Homo sapien
aacgggagcgtgagaaagaacttga

SEQ ID NO: 1424565 - DNA, 25 bp, Homo sapien
tagaacgtgctcgtaaacggcgtga

SEQ ID NO: 1424566 - DNA, 25 bp, Homo sapien
tcccaggacctattggaaagaagct

SEQ ID NO: 1424567 - DNA, 25 bp, Homo sapien
tcgaccagattcaagaccagcagtt

SEQ ID NO: 1424568 - DNA, 25 bp, Homo sapien
gagtactgttcaggtagagcctgca

SEQ ID NO: 1424569 - DNA, 25 bp, Homo sapien
gaccttgttatagagaggcctcgac

SEQ ID NO: 1424570 - DNA, 25 bp, Homo sapien
gagagccgccaagaagacatgagca

SEQ ID NO: 1424571 - DNA, 25 bp, Homo sapien
tcaaatgaggtggtagcagtgccca

SEQ ID NO: 1424572 - DNA, 25 bp, Homo sapien
gaatcgacgtggcaacaatggtcca

SEQ ID NO: 1424573 - DNA, 25 bp, Homo sapien
gcttatcgggacaatcagtggaacc

SEQ ID NO: 1424574 - DNA, 25 bp, Homo sapien
ttctagattcaatgtcagtgtgtcc

SEQ ID NO: 1424575 - DNA, 25 bp, Homo sapien
tgttgtaacaaagccctaggtcacc

SEQ ID NO: 1424576 - DNA, 25 bp, Homo sapien
tctctgtctaccagtctagtagctg

SEQ ID NO: 1424577 - DNA, 25 bp, Homo sapien
gactgattagcacatctgattagca

SEQ ID NO: 1424578 - DNA, 25 bp, Homo sapien
tattcactggtagggataagggctc

SEQ ID NO: 1424579 - DNA, 25 bp, Homo sapien
gctgctctagattgaaataaggcca

SEQ ID NO: 1424580 - DNA, 25 bp, Homo sapien
tggaaagtctgaaatccctagggtc

SEQ ID NO: 1424581 - DNA, 25 bp, Homo sapien
aaaacactgtgagcatgaagcagcc

SEQ ID NO: 1424582 - DNA, 25 bp, Homo sapien
gctgtatgccttcccttattgccca

SEQ ID NO: 1424583 - DNA, 25 bp, Homo sapien
tacctcatctacttttggcctgaag

SEQ ID NO: 1424584 - DNA, 25 bp, Homo sapien
tgaaacctcagcagttacagacaag

SEQ ID NO: 1424585 - DNA, 25 bp, Homo sapien
gcacaaaatctacaaccacatcgga

SEQ ID NO: 1424586 - DNA, 25 bp, Homo sapien
attgcagtgacgcggtcttggctta

SEQ ID NO: 1424587 - DNA, 25 bp, Homo sapien
gctggattgcagtgacgcggtcttg

SEQ ID NO: 1424588 - DNA, 25 bp, Homo sapien
gattgcagtgacgcggtcttggctt

SEQ ID NO: 1424589 - DNA, 25 bp, Homo sapien
tggattgcagtgacgcggtcttggc

SEQ ID NO: 1424590 - DNA, 25 bp, Homo sapien
ggatatgtctgtagtaaacagaaac

SEQ ID NO: 1424591 - DNA, 25 bp, Homo sapien
ctgtttgaaatcttactcaaaagta

SEQ ID NO: 1424592 - DNA, 25 bp, Homo sapien
caaaagtatttgaagagttgtgtat

SEQ ID NO: 1424593 - DNA, 25 bp, Homo sapien
gaagagttgtgtatagttgtatgga

SEQ ID NO: 1424594 - DNA, 25 bp, Homo sapien
agtcagaggtaatcaggcccaggct

SEQ ID NO: 1424595 - DNA, 25 bp, Homo sapien
gctcgtttgccacatgtagccaggg

SEQ ID NO: 1424596 - DNA, 25 bp, Homo sapien
cccaggctgcgttgaaggctgaaca

SEQ ID NO: 1424597 - DNA, 25 bp, Homo sapien
ggtccctccattggtaagagcccca

SEQ ID NO: 1424598 - DNA, 25 bp, Homo sapien
ccacatgaggtggttgtattccaca

SEQ ID NO: 1424599 - DNA, 25 bp, Homo sapien
aagcactttgggatccttcatgatg

SEQ ID NO: 1424600 - DNA, 25 bp, Homo sapien
ccacagtggattgtgcagttataga

SEQ ID NO: 1424601 - DNA, 25 bp, Homo sapien
taatgcagaaagagtgcctttagga

SEQ ID NO: 1424602 - DNA, 25 bp, Homo sapien
ggtgttggtaatgccacaatataag

SEQ ID NO: 1424603 - DNA, 25 bp, Homo sapien
tgtggtaggagctatcagaacttag

SEQ ID NO: 1424604 - DNA, 25 bp, Homo sapien
gccacaagacatttggtcctaggtg

SEQ ID NO: 1424605 - DNA, 25 bp, Homo sapien
aattatttaccagctcagaatgtgg

SEQ ID NO: 1424606 - DNA, 25 bp, Homo sapien
catttgtaggcttggaggtaaagaa

SEQ ID NO: 1424607 - DNA, 25 bp, Homo sapien
tgaagctttgaagcgctacttagca

SEQ ID NO: 1424608 - DNA, 25 bp, Homo sapien
gaactgaagataactggtgctggat

SEQ ID NO: 1424609 - DNA, 25 bp, Homo sapien
agtagtgaccgtgctttatcagagc

SEQ ID NO: 1424610 - DNA, 25 bp, Homo sapien
gcataacatactgctattggtcttt

SEQ ID NO: 1424611 - DNA, 25 bp, Homo sapien
tgccaggtaccacaacagtaacaga

SEQ ID NO: 1424612 - DNA, 25 bp, Homo sapien
actgctattggtctttttatataaa

SEQ ID NO: 1424613 - DNA, 25 bp, Homo sapien
acatactgctattggtctttttata

SEQ ID NO: 1424614 - DNA, 25 bp, Homo sapien
gctgtgctgtcaactttggaaaaag

SEQ ID NO: 1424615 - DNA, 25 bp, Homo sapien
tgtgctgtcaactttggaaaaagta

SEQ ID NO: 1424616 - DNA, 25 bp, Homo sapien
gctgtcaactttggaaaaagtatcc

SEQ ID NO: 1424617 - DNA, 25 bp, Homo sapien
tagctgtgctgtcaactttggaaaa

SEQ ID NO: 1424618 - DNA, 25 bp, Homo sapien
cattgtacagaaattaacagccata

SEQ ID NO: 1424619 - DNA, 25 bp, Homo sapien
gcattgtacagaaattaacagccat

SEQ ID NO: 1424620 - DNA, 25 bp, Homo sapien
catatctggacaagtagcatggctc

SEQ ID NO: 1424621 - DNA, 25 bp, Homo sapien
gaaagctttgcacatgtcagtgagg

SEQ ID NO: 1424622 - DNA, 25 bp, Homo sapien
tatgccatgtgcatatctggacaag

SEQ ID NO: 1424623 - DNA, 25 bp, Homo sapien
cacatgtcagtgaggtcaaacagcc

SEQ ID NO: 1424624 - DNA, 25 bp, Homo sapien
gacgagatggcataattctgtggcc

SEQ ID NO: 1424625 - DNA, 25 bp, Homo sapien
taatgtccatccaaggacgagatgg

SEQ ID NO: 1424626 - DNA, 25 bp, Homo sapien
tgcacagccaatttgataccacggg

SEQ ID NO: 1424627 - DNA, 25 bp, Homo sapien
ttagaccgtgagagtgggcattgtc

SEQ ID NO: 1424628 - DNA, 25 bp, Homo sapien
aagctccttgacgggccccagtgca

SEQ ID NO: 1424629 - DNA, 25 bp, Homo sapien
cagtgcacctctaaggacttccggg

SEQ ID NO: 1424630 - DNA, 25 bp, Homo sapien
tgtggagaagtccattgcttgagtc

SEQ ID NO: 1424631 - DNA, 25 bp, Homo sapien
tgtagagtggttctgttgtggagaa

SEQ ID NO: 1424632 - DNA, 25 bp, Homo sapien
ttcttctacccccatagtagttggc

SEQ ID NO: 1424633 - DNA, 25 bp, Homo sapien
ccattggtgtggaagtcggactcct

SEQ ID NO: 1424634 - DNA, 25 bp, Homo sapien
ttggtgtggaagtcggactccttac

SEQ ID NO: 1424635 - DNA, 25 bp, Homo sapien
ccccatagtagttggctgtgccatt

SEQ ID NO: 1424636 - DNA, 25 bp, Homo sapien
agggaaggagcctgcactgagtgtc

SEQ ID NO: 1424637 - DNA, 25 bp, Homo sapien
ccagctggatgctggacatacacat

SEQ ID NO: 1424638 - DNA, 25 bp, Homo sapien
ggttatgtgagacccaactgtattc

SEQ ID NO: 1424639 - DNA, 25 bp, Homo sapien
tacttatattcgatgctggccagag

SEQ ID NO: 1424640 - DNA, 25 bp, Homo sapien
tctgaagcattagaagccaactgta

SEQ ID NO: 1424641 - DNA, 25 bp, Homo sapien
taaatgcatcttacttatattcgat

SEQ ID NO: 1424642 - DNA, 25 bp, Homo sapien
catgtaacatgcaagagcaatggtt

SEQ ID NO: 1424643 - DNA, 25 bp, Homo sapien
ttttcaggaagaaactattatgcct

SEQ ID NO: 1424644 - DNA, 25 bp, Homo sapien
ttattgtggcttgtggtaaccatgt

SEQ ID NO: 1424645 - DNA, 25 bp, Homo sapien
agaagttatgctttttattgtggct

SEQ ID NO: 1424646 - DNA, 25 bp, Homo sapien
tatatgaaattgtctacgccctcag

SEQ ID NO: 1424647 - DNA, 25 bp, Homo sapien
tagatggtgaccatgttcatccttc

SEQ ID NO: 1424648 - DNA, 25 bp, Homo sapien
gaatagttagatggtgaccatgttc

SEQ ID NO: 1424649 - DNA, 25 bp, Homo sapien
cagactacaattcctgaatagttag

SEQ ID NO: 1424650 - DNA, 25 bp, Homo sapien
tgctgtaaatgacccagaggcctgc

SEQ ID NO: 1424651 - DNA, 25 bp, Homo sapien
gtgtagccaccccaagaatacggga

SEQ ID NO: 1424652 - DNA, 25 bp, Homo sapien
gcattggcgactgactgcttacgga

SEQ ID NO: 1424653 - DNA, 25 bp, Homo sapien
tagctgctgacggtgtacaaggtgc

SEQ ID NO: 1424654 - DNA, 25 bp, Homo sapien
tccacgtggtctcctgggtgtaggg

SEQ ID NO: 1424655 - DNA, 25 bp, Homo sapien
tggcggacatccgtgccaactgtgt

SEQ ID NO: 1424656 - DNA, 25 bp, Homo sapien
caactgtgtcgattctccacgtggt

SEQ ID NO: 1424657 - DNA, 25 bp, Homo sapien
tgtttctgctgttctcagcgtgaga

SEQ ID NO: 1424658 - DNA, 25 bp, Homo sapien
gaacttcagttagctcggacttcag

SEQ ID NO: 1424659 - DNA, 25 bp, Homo sapien
cactcctgagatagccagatgggct

SEQ ID NO: 1424660 - DNA, 25 bp, Homo sapien
ctccactcctgagatagccagatgg

SEQ ID NO: 1424661 - DNA, 25 bp, Homo sapien
gctctccttcaaaattcgggaagca

SEQ ID NO: 1424662 - DNA, 25 bp, Homo sapien
caaagtgtccaaattccacgtagaa

SEQ ID NO: 1424663 - DNA, 25 bp, Homo sapien
ccaaagtgtccaaattccacgtaga

SEQ ID NO: 1424664 - DNA, 25 bp, Homo sapien
gccaaagtgtccaaattccacgtag

SEQ ID NO: 1424665 - DNA, 25 bp, Homo sapien
ctgagaccagtaccagctgcttccc

SEQ ID NO: 1424666 - DNA, 25 bp, Homo sapien
ctccccctgtgcaggcaacacacac

SEQ ID NO: 1424667 - DNA, 25 bp, Homo sapien
ttctccccctgtgcaggcaacacac

SEQ ID NO: 1424668 - DNA, 25 bp, Homo sapien
cccttctccccctgtgcaggcaaca

SEQ ID NO: 1424669 - DNA, 25 bp, Homo sapien
ctgatgctgcctcgccgattgccat

SEQ ID NO: 1424670 - DNA, 25 bp, Homo sapien
agtgaccgccttcctgtacacaggt

SEQ ID NO: 1424671 - DNA, 25 bp, Homo sapien
ctctgatgctgcctcgccgattgcc

SEQ ID NO: 1424672 - DNA, 25 bp, Homo sapien
cagggtgcccgaggttccctgttct

SEQ ID NO: 1424673 - DNA, 25 bp, Homo sapien
tgaatgcaccctcccatgtatgctg

SEQ ID NO: 1424674 - DNA, 25 bp, Homo sapien
gaggcggcctattgcagctgcagac

SEQ ID NO: 1424675 - DNA, 25 bp, Homo sapien
gctttaggactgcagatagcgcctg

SEQ ID NO: 1424676 - DNA, 25 bp, Homo sapien
cacggacccagagcgaagttcttct

SEQ ID NO: 1424677 - DNA, 25 bp, Homo sapien
ccatggcccttacggctctgagcaa

SEQ ID NO: 1424678 - DNA, 25 bp, Homo sapien
tggtgccaagttccctgctgaatcc

SEQ ID NO: 1424679 - DNA, 25 bp, Homo sapien
agttcttctaccctcactggcaaag

SEQ ID NO: 1424680 - DNA, 25 bp, Homo sapien
ggagcccttcagattgtgccttgca

SEQ ID NO: 1424681 - DNA, 25 bp, Homo sapien
cctcactaagcttctctacccaaac

SEQ ID NO: 1424682 - DNA, 25 bp, Homo sapien
aaaccttcacacctagttcttgcca

SEQ ID NO: 1424683 - DNA, 25 bp, Homo sapien
ctttgtccactcagcctcactaagc

SEQ ID NO: 1424684 - DNA, 25 bp, Homo sapien
tcactaagcttctctacccaaacct

SEQ ID NO: 1424685 - DNA, 25 bp, Homo sapien
gctctcaggagctaaattactagta

SEQ ID NO: 1424686 - DNA, 25 bp, Homo sapien
tcaaaagggacaattgacaactttc

SEQ ID NO: 1424687 - DNA, 25 bp, Homo sapien
gctatggactgtgaaaactgacatg

SEQ ID NO: 1424688 - DNA, 25 bp, Homo sapien
taatacttgaaggtgatcgctgtgc

SEQ ID NO: 1424689 - DNA, 25 bp, Homo sapien
tgctgaactcagagtccccccactc

SEQ ID NO: 1424690 - DNA, 25 bp, Homo sapien
tcacctgctgaactcagagtccccc

SEQ ID NO: 1424691 - DNA, 25 bp, Homo sapien
tcagagtccccccactctgcattct

SEQ ID NO: 1424692 - DNA, 25 bp, Homo sapien
acctgctgaactcagagtcccccca

SEQ ID NO: 1424693 - DNA, 25 bp, Homo sapien
tcttgccttagtcgcttcttctctt

SEQ ID NO: 1424694 - DNA, 25 bp, Homo sapien
tgctttccaacctcctggccagatt

SEQ ID NO: 1424695 - DNA, 25 bp, Homo sapien
gtggcacagcccgagcagtgtctcg

SEQ ID NO: 1424696 - DNA, 25 bp, Homo sapien
ccagaactgacttgtctcggaggag

SEQ ID NO: 1424697 - DNA, 25 bp, Homo sapien
tttgggtttccagctggtcccgctc

SEQ ID NO: 1424698 - DNA, 25 bp, Homo sapien
tctgggcagctggattcattgggac

SEQ ID NO: 1424699 - DNA, 25 bp, Homo sapien
ccaggtctaagcgttgggtgctgct

SEQ ID NO: 1424700 - DNA, 25 bp, Homo sapien
gctgagtcgagctttggtggcctcc

SEQ ID NO: 1424701 - DNA, 25 bp, Homo sapien
cactgaaggtatactggcatcggcc

SEQ ID NO: 1424702 - DNA, 25 bp, Homo sapien
agcaacgtgcacagaagaacctcat

SEQ ID NO: 1424703 - DNA, 25 bp, Homo sapien
cagcaacgtgcacagaagaacctca

SEQ ID NO: 1424704 - DNA, 25 bp, Homo sapien
ggatgggtggccttgctggctcatg

SEQ ID NO: 1424705 - DNA, 25 bp, Homo sapien
ggaagggatacaaagctgtggggag

SEQ ID NO: 1424706 - DNA, 25 bp, Homo sapien
aaagttttacaaccacacagaggag

SEQ ID NO: 1424707 - DNA, 25 bp, Homo sapien
gggaagggatacaaagctgtgggga

SEQ ID NO: 1424708 - DNA, 25 bp, Homo sapien
agttttacaaccacacagaggaggg

SEQ ID NO: 1424709 - DNA, 25 bp, Homo sapien
caaaccaccgtggacaccttctttg

SEQ ID NO: 1424710 - DNA, 25 bp, Homo sapien
gatcaaaccaccgtggacaccttct

SEQ ID NO: 1424711 - DNA, 25 bp, Homo sapien
acatttcttgttgatcaaaccaccg

SEQ ID NO: 1424712 - DNA, 25 bp, Homo sapien
ttgttgatcaaaccaccgtggacac

SEQ ID NO: 1424713 - DNA, 25 bp, Homo sapien
gacagtgacattgaaggtgggggct

SEQ ID NO: 1424714 - DNA, 25 bp, Homo sapien
gtgacattgaaggtgggggctccac

SEQ ID NO: 1424715 - DNA, 25 bp, Homo sapien
cagtgacattgaaggtgggggctcc

SEQ ID NO: 1424716 - DNA, 25 bp, Homo sapien
cttggtgacagtgacattgaaggtg

SEQ ID NO: 1424717 - DNA, 25 bp, Homo sapien
gtgagtcccggatcaccgaacattt

SEQ ID NO: 1424718 - DNA, 25 bp, Homo sapien
cagtgagtcccggatcaccgaacat

SEQ ID NO: 1424719 - DNA, 25 bp, Homo sapien
tgcagcagtgagtcccggatcaccg

SEQ ID NO: 1424720 - DNA, 25 bp, Homo sapien
agtcccggatcaccgaacatttctg

SEQ ID NO: 1424721 - DNA, 25 bp, Homo sapien
gtagcccacgatggccacgtcctga

SEQ ID NO: 1424722 - DNA, 25 bp, Homo sapien
tcagctggcgcgatgttggcgaagg

SEQ ID NO: 1424723 - DNA, 25 bp, Homo sapien
acgatggccacgtcctgacaggtcc

SEQ ID NO: 1424724 - DNA, 25 bp, Homo sapien
cgcgatgttggcgaaggttttcccg

SEQ ID NO: 1424725 - DNA, 25 bp, Homo sapien
gtcggtgtccacccggccatggtca

SEQ ID NO: 1424726 - DNA, 25 bp, Homo sapien
cggccatggtcatgatgttgtcaat

SEQ ID NO: 1424727 - DNA, 25 bp, Homo sapien
tccacccggccatggtcatgatgtt

SEQ ID NO: 1424728 - DNA, 25 bp, Homo sapien
tgtccacccggccatggtcatgatg

SEQ ID NO: 1424729 - DNA, 25 bp, Homo sapien
gcgctgccgtctggaccgtggctct

SEQ ID NO: 1424730 - DNA, 25 bp, Homo sapien
gctggcttcttttcagggactggtt

SEQ ID NO: 1424731 - DNA, 25 bp, Homo sapien
agcaggcttctttcctctgtagtag

SEQ ID NO: 1424732 - DNA, 25 bp, Homo sapien
cccttctcatccgatttggcttcta

SEQ ID NO: 1424733 - DNA, 25 bp, Homo sapien
gcttcttaacaccaacagcaatctt

SEQ ID NO: 1424734 - DNA, 25 bp, Homo sapien
taaattcatctaacttctggaaagc

SEQ ID NO: 1424735 - DNA, 25 bp, Homo sapien
gatgaatcttgttgcgtggtgctca

SEQ ID NO: 1424736 - DNA, 25 bp, Homo sapien
gagagaagaagctttacgccaagtg

SEQ ID NO: 1424737 - DNA, 25 bp, Homo sapien
tattgatcatcttatggatgggaag

SEQ ID NO: 1424738 - DNA, 25 bp, Homo sapien
gagcaagcttcaaaatgttcagttt

SEQ ID NO: 1424739 - DNA, 25 bp, Homo sapien
gcaagcttcaaaatgttcagtttgc

SEQ ID NO: 1424740 - DNA, 25 bp, Homo sapien
aggagcaagcttcaaaatgttcagt

SEQ ID NO: 1424741 - DNA, 25 bp, Homo sapien
aaaagtcccacatgcccaccaggag

SEQ ID NO: 1424742 - DNA, 25 bp, Homo sapien
gggcctgtgcactggatacaatgac

SEQ ID NO: 1424743 - DNA, 25 bp, Homo sapien
gtgcactggatacaatgacggtttc

SEQ ID NO: 1424744 - DNA, 25 bp, Homo sapien
atgtaggggcctgtgcactggatac

SEQ ID NO: 1424745 - DNA, 25 bp, Homo sapien
cctgtgcactggatacaatgacggt

SEQ ID NO: 1424746 - DNA, 25 bp, Homo sapien
cactctatgatcctaacggcatcag

SEQ ID NO: 1424747 - DNA, 25 bp, Homo sapien
tgatcctaacggcatcaggttttgg

SEQ ID NO: 1424748 - DNA, 25 bp, Homo sapien
gtgttcactctatgatcctaacggc

SEQ ID NO: 1424749 - DNA, 25 bp, Homo sapien
cctaacggcatcaggttttggttgg

SEQ ID NO: 1424750 - DNA, 25 bp, Homo sapien
cttgaactctgggaatttgagccac

SEQ ID NO: 1424751 - DNA, 25 bp, Homo sapien
ctctgggaatttgagccacagctct

SEQ ID NO: 1424752 - DNA, 25 bp, Homo sapien
gaatttgagccacagctctgccggt

SEQ ID NO: 1424753 - DNA, 25 bp, Homo sapien
atttgagccacagctctgccggtac

SEQ ID NO: 1424754 - DNA, 25 bp, Homo sapien
cactttcagagtacaccgatattag

SEQ ID NO: 1424755 - DNA, 25 bp, Homo sapien
cagagtacaccgatattagtaggcg

SEQ ID NO: 1424756 - DNA, 25 bp, Homo sapien
caccgatattagtaggcgagcacat

SEQ ID NO: 1424757 - DNA, 25 bp, Homo sapien
atattagtaggcgagcacatgccat

SEQ ID NO: 1424758 - DNA, 25 bp, Homo sapien
tctgccaaggttcacagcactgtgc

SEQ ID NO: 1424759 - DNA, 25 bp, Homo sapien
taagaagtagagcacctttcagccc

SEQ ID NO: 1424760 - DNA, 25 bp, Homo sapien
gaagagcacccctatatccaggcaa

SEQ ID NO: 1424761 - DNA, 25 bp, Homo sapien
aagctagggaacagggcacatgaca

SEQ ID NO: 1424762 - DNA, 25 bp, Homo sapien
taaagtcataaccatgccagccatt

SEQ ID NO: 1424763 - DNA, 25 bp, Homo sapien
tgttacccatatcccaggcagcaat

SEQ ID NO: 1424764 - DNA, 25 bp, Homo sapien
tccatgagtgataattctgttaccc

SEQ ID NO: 1424765 - DNA, 25 bp, Homo sapien
gagggcttatatctccaaggttacc

SEQ ID NO: 1424766 - DNA, 25 bp, Homo sapien
tatttagatcttcttagataacttg

SEQ ID NO: 1424767 - DNA, 25 bp, Homo sapien
tcttcttagataacttgcaggtgtc

SEQ ID NO: 1424768 - DNA, 25 bp, Homo sapien
ctcctagtaataatcctgtagaatt

SEQ ID NO: 1424769 - DNA, 25 bp, Homo sapien
gcaggtgtcttgagtgtctcagtct

SEQ ID NO: 1424770 - DNA, 25 bp, Homo sapien
aacaggcttaggttaatggtcactc

SEQ ID NO: 1424771 - DNA, 25 bp, Homo sapien
gactgattatcatatgtgtgcgtgt

SEQ ID NO: 1424772 - DNA, 25 bp, Homo sapien
catttggttaccgactgactgatta

SEQ ID NO: 1424773 - DNA, 25 bp, Homo sapien
gacacaaggaggttggcatatttta

SEQ ID NO: 1424774 - DNA, 25 bp, Homo sapien
tacatctcctcaaggatgaacagga

SEQ ID NO: 1424775 - DNA, 25 bp, Homo sapien
tttgattgtgcaacatacatctcct

SEQ ID NO: 1424776 - DNA, 25 bp, Homo sapien
gtattaatagatggttttgctactt

SEQ ID NO: 1424777 - DNA, 25 bp, Homo sapien
atgagatagttggaagttagaggct

SEQ ID NO: 1424778 - DNA, 25 bp, Homo sapien
agaaaacagactggaccatgactgg

SEQ ID NO: 1424779 - DNA, 25 bp, Homo sapien
cagctatatattggtcattttcaaa

SEQ ID NO: 1424780 - DNA, 25 bp, Homo sapien
catgactggcagctatatattggtc

SEQ ID NO: 1424781 - DNA, 25 bp, Homo sapien
gactggcagctatatattggtcatt

SEQ ID NO: 1424782 - DNA, 25 bp, Homo sapien
gaatggttatgcatctctttcagca

SEQ ID NO: 1424783 - DNA, 25 bp, Homo sapien
tgacccgctccctaatgcaataatg

SEQ ID NO: 1424784 - DNA, 25 bp, Homo sapien
gataattggacattctcaacgttcc

SEQ ID NO: 1424785 - DNA, 25 bp, Homo sapien
tataatttggtactctacacaggct

SEQ ID NO: 1424786 - DNA, 25 bp, Homo sapien
ttgaaagttatatacacataggttt

SEQ ID NO: 1424787 - DNA, 25 bp, Homo sapien
gaaagttatatacacataggtttca

SEQ ID NO: 1424788 - DNA, 25 bp, Homo sapien
gttttgaaagttatatacacatagg

SEQ ID NO: 1424789 - DNA, 25 bp, Homo sapien
agaagttttgaaagttatatacaca

SEQ ID NO: 1424790 - DNA, 25 bp, Homo sapien
cagatcttgtttaatgaagatctct

SEQ ID NO: 1424791 - DNA, 25 bp, Homo sapien
tgtcccagatcttgtttaatgaaga

SEQ ID NO: 1424792 - DNA, 25 bp, Homo sapien
ctgtcccagatcttgtttaatgaag

SEQ ID NO: 1424793 - DNA, 25 bp, Homo sapien
tcccagatcttgtttaatgaagatc

SEQ ID NO: 1424794 - DNA, 25 bp, Homo sapien
tcaagtacggtatttcatgactata

SEQ ID NO: 1424795 - DNA, 25 bp, Homo sapien
gtacggtatttcatgactataagaa

SEQ ID NO: 1424796 - DNA, 25 bp, Homo sapien
aagtacggtatttcatgactataag

SEQ ID NO: 1424797 - DNA, 25 bp, Homo sapien
caagtacggtatttcatgactataa

SEQ ID NO: 1424798 - DNA, 25 bp, Homo sapien
gatactttccaaagcgtcataaaac

SEQ ID NO: 1424799 - DNA, 25 bp, Homo sapien
tagatactttccaaagcgtcataaa

SEQ ID NO: 1424800 - DNA, 25 bp, Homo sapien
ttagatactttccaaagcgtcataa

SEQ ID NO: 1424801 - DNA, 25 bp, Homo sapien
ctttccaaagcgtcataaaacctct

SEQ ID NO: 1424802 - DNA, 25 bp, Homo sapien
tgataatcactagcaaaaggatagc

SEQ ID NO: 1424803 - DNA, 25 bp, Homo sapien
gcagcaaccaaagccatgatggctt

SEQ ID NO: 1424804 - DNA, 25 bp, Homo sapien
agcaaccaaagccatgatggctttt

SEQ ID NO: 1424805 - DNA, 25 bp, Homo sapien
cagcaaccaaagccatgatggcttt

SEQ ID NO: 1424806 - DNA, 25 bp, Homo sapien
atccagtagcttctgatttacttac

SEQ ID NO: 1424807 - DNA, 25 bp, Homo sapien
tatccagtagcttctgatttactta

SEQ ID NO: 1424808 - DNA, 25 bp, Homo sapien
ctatccagtagcttctgatttactt

SEQ ID NO: 1424809 - DNA, 25 bp, Homo sapien
tttggatctgttgctaaaagctgtt

SEQ ID NO: 1424810 - DNA, 25 bp, Homo sapien
cgaagttgtttggatctgttgctaa

SEQ ID NO: 1424811 - DNA, 25 bp, Homo sapien
ccacatttgccttcgaagttgtttg

SEQ ID NO: 1424812 - DNA, 25 bp, Homo sapien
gctgttgcattatccgataagcttt

SEQ ID NO: 1424813 - DNA, 25 bp, Homo sapien
tatatcacatagaggatggagagaa

SEQ ID NO: 1424814 - DNA, 25 bp, Homo sapien
ctatatcacatagaggatggagaga

SEQ ID NO: 1424815 - DNA, 25 bp, Homo sapien
agagaaggattaaacgacataacag

SEQ ID NO: 1424816 - DNA, 25 bp, Homo sapien
aggattaaacgacataacaggattc

SEQ ID NO: 1424817 - DNA, 25 bp, Homo sapien
tagcaaacagattagtaatatcaag

SEQ ID NO: 1424818 - DNA, 25 bp, Homo sapien
gtagaagacaaaaactagcaaacag

SEQ ID NO: 1424819 - DNA, 25 bp, Homo sapien
cagattagtaatatcaagaaataca

SEQ ID NO: 1424820 - DNA, 25 bp, Homo sapien
gaagacaaaaactagcaaacagatt

SEQ ID NO: 1424821 - DNA, 25 bp, Homo sapien
gatttgtcctgtagttcatctagtc

SEQ ID NO: 1424822 - DNA, 25 bp, Homo sapien
tgtagttcatctagtctctcccctc

SEQ ID NO: 1424823 - DNA, 25 bp, Homo sapien
ctgatttgtcctgtagttcatctag

SEQ ID NO: 1424824 - DNA, 25 bp, Homo sapien
tgtcctgtagttcatctagtctctc

SEQ ID NO: 1424825 - DNA, 25 bp, Homo sapien
tattttcttgcatgacatcaataac

SEQ ID NO: 1424826 - DNA, 25 bp, Homo sapien
tttgtaatattttcttgcatgacat

SEQ ID NO: 1424827 - DNA, 25 bp, Homo sapien
ttttcttgcatgacatcaataactt

SEQ ID NO: 1424828 - DNA, 25 bp, Homo sapien
gcatgacatcaataacttcatccac

SEQ ID NO: 1424829 - DNA, 25 bp, Homo sapien
taggtccaaatcttggtccagatgg

SEQ ID NO: 1424830 - DNA, 25 bp, Homo sapien
catttctaggtccaaatcttggtcc

SEQ ID NO: 1424831 - DNA, 25 bp, Homo sapien
ttatcatttctaggtccaaatcttg

SEQ ID NO: 1424832 - DNA, 25 bp, Homo sapien
tttctaggtccaaatcttggtccag

SEQ ID NO: 1424833 - DNA, 25 bp, Homo sapien
caatagtgagttcctgggtgtagag

SEQ ID NO: 1424834 - DNA, 25 bp, Homo sapien
ggtagctattgctctagtctaaggc

SEQ ID NO: 1424835 - DNA, 25 bp, Homo sapien
tatagcaatcttgtcacccatagaa

SEQ ID NO: 1424836 - DNA, 25 bp, Homo sapien
ggcttttcaccacaagtagcattgt

SEQ ID NO: 1424837 - DNA, 25 bp, Homo sapien
tggcttcatgatccaaggtcacctg

SEQ ID NO: 1424838 - DNA, 25 bp, Homo sapien
ggaaggcatctctcacgtataaggg

SEQ ID NO: 1424839 - DNA, 25 bp, Homo sapien
cttgcagggcgacagatggttcatt

SEQ ID NO: 1424840 - DNA, 25 bp, Homo sapien
cgctttgtcccacctgaaatgtgaa

SEQ ID NO: 1424841 - DNA, 25 bp, Homo sapien
ctgaatcatcttccaaaagatttct

SEQ ID NO: 1424842 - DNA, 25 bp, Homo sapien
catctgaatcatcttccaaaagatt

SEQ ID NO: 1424843 - DNA, 25 bp, Homo sapien
cttcatctgaatcatcttccaaaag

SEQ ID NO: 1424844 - DNA, 25 bp, Homo sapien
ttcatctgaatcatcttccaaaaga

SEQ ID NO: 1424845 - DNA, 25 bp, Homo sapien
catcattgaggtggcgcttaaactt

SEQ ID NO: 1424846 - DNA, 25 bp, Homo sapien
catcatcattgaggtggcgcttaaa

SEQ ID NO: 1424847 - DNA, 25 bp, Homo sapien
attgaggtggcgcttaaacttggga

SEQ ID NO: 1424848 - DNA, 25 bp, Homo sapien
acatcatcatcattgaggtggcgct

SEQ ID NO: 1424849 - DNA, 25 bp, Homo sapien
tttgcttctcaacaggatagtcacc

SEQ ID NO: 1424850 - DNA, 25 bp, Homo sapien
tgcttctcaacaggatagtcaccac

SEQ ID NO: 1424851 - DNA, 25 bp, Homo sapien
ttgcttctcaacaggatagtcacca

SEQ ID NO: 1424852 - DNA, 25 bp, Homo sapien
cgaccagcccgactaggacgtcggg

SEQ ID NO: 1424853 - DNA, 25 bp, Homo sapien
cttcctagatccccgaggcccgccg

SEQ ID NO: 1424854 - DNA, 25 bp, Homo sapien
cctcccgctgcgaacaggccagcgc

SEQ ID NO: 1424855 - DNA, 25 bp, Homo sapien
gcaaggcaggggcgtcttcttcgtt

SEQ ID NO: 1424856 - DNA, 25 bp, Homo sapien
tgaggctcccggggaactcccggca

SEQ ID NO: 1424857 - DNA, 25 bp, Homo sapien
taggaagccgaggtaagaagctggg

SEQ ID NO: 1424858 - DNA, 25 bp, Homo sapien
gaaggagtaggaagccgaggtaaga

SEQ ID NO: 1424859 - DNA, 25 bp, Homo sapien
ggtgcggacccggcgtcggccgcag

SEQ ID NO: 1424860 - DNA, 25 bp, Homo sapien
aagccgaggtaagaagctgggaggg

SEQ ID NO: 1424861 - DNA, 25 bp, Homo sapien
atcgagccgatcggcgctcggcggc

SEQ ID NO: 1424862 - DNA, 25 bp, Homo sapien
catcgagccgatcggcgctcggcgg

SEQ ID NO: 1424863 - DNA, 25 bp, Homo sapien
tcatcgagccgatcggcgctcggcg

SEQ ID NO: 1424864 - DNA, 25 bp, Homo sapien
gaacccacacgcagtttagatgcat

SEQ ID NO: 1424865 - DNA, 25 bp, Homo sapien
actggttgtccacgttccggtcgtg

SEQ ID NO: 1424866 - DNA, 25 bp, Homo sapien
tctggctgactacgttgagtggcaa

SEQ ID NO: 1424867 - DNA, 25 bp, Homo sapien
cagctcgaggacctgcttcgggttc

SEQ ID NO: 1424868 - DNA, 25 bp, Homo sapien
ccttcaggaaatcgccctcgccagg

SEQ ID NO: 1424869 - DNA, 25 bp, Homo sapien
gccttcaggaaatcgccctcgccag

SEQ ID NO: 1424870 - DNA, 25 bp, Homo sapien
cagtcttggtagtaggcccaagacc

SEQ ID NO: 1424871 - DNA, 25 bp, Homo sapien
gaacacctgctttgtctttgttaca

SEQ ID NO: 1424872 - DNA, 25 bp, Homo sapien
atgaatttgctggttggaacacctg

SEQ ID NO: 1424873 - DNA, 25 bp, Homo sapien
agtcttggtagtaggcccaagacct

SEQ ID NO: 1424874 - DNA, 25 bp, Homo sapien
tgctgacctcaactcctaaatggat

SEQ ID NO: 1424875 - DNA, 25 bp, Homo sapien
catgcttagagtgccttggtgttat

SEQ ID NO: 1424876 - DNA, 25 bp, Homo sapien
gatatcatgtagttaaccataagct

SEQ ID NO: 1424877 - DNA, 25 bp, Homo sapien
gcaaattgactcttgtaagcatgta

SEQ ID NO: 1424878 - DNA, 25 bp, Homo sapien
tcccctgaagttgatgatatattgc

SEQ ID NO: 1424879 - DNA, 25 bp, Homo sapien
tttcccctgaagttgatgatatatt

SEQ ID NO: 1424880 - DNA, 25 bp, Homo sapien
ccctgaagttgatgatatattgcca

SEQ ID NO: 1424881 - DNA, 25 bp, Homo sapien
agttgatgatatattgccagcatct

SEQ ID NO: 1424882 - DNA, 25 bp, Homo sapien
actgtgcacatggtccttaggggaa

SEQ ID NO: 1424883 - DNA, 25 bp, Homo sapien
tgcacatggtccttaggggaagctg

SEQ ID NO: 1424884 - DNA, 25 bp, Homo sapien
tgtgcacatggtccttaggggaagc

SEQ ID NO: 1424885 - DNA, 25 bp, Homo sapien
cactgtgcacatggtccttagggga

SEQ ID NO: 1424886 - DNA, 25 bp, Homo sapien
ttgacgtatgggaaccatcttcttc

SEQ ID NO: 1424887 - DNA, 25 bp, Homo sapien
ccagatgttatgctgagatctttca

SEQ ID NO: 1424888 - DNA, 25 bp, Homo sapien
tccagaaaccactcaagattacatg

SEQ ID NO: 1424889 - DNA, 25 bp, Homo sapien
ccattgatttgccagatgttatgct

SEQ ID NO: 1424890 - DNA, 25 bp, Homo sapien
gtgggagctgcttgatgtgatatga

SEQ ID NO: 1424891 - DNA, 25 bp, Homo sapien
ggagcttttgcactcctggaaggtc

SEQ ID NO: 1424892 - DNA, 25 bp, Homo sapien
ggaaggtcctcacgggtaacaggca

SEQ ID NO: 1424893 - DNA, 25 bp, Homo sapien
gatgtgaggagcttttgcactcctg

SEQ ID NO: 1424894 - DNA, 25 bp, Homo sapien
gaatgaagaccaaatagatgcaggc

SEQ ID NO: 1424895 - DNA, 25 bp, Homo sapien
cagatgaggctcctgatgcagacat

SEQ ID NO: 1424896 - DNA, 25 bp, Homo sapien
agtcacttcatcctcatacagaatg

SEQ ID NO: 1424897 - DNA, 25 bp, Homo sapien
tctccttcgttgaggcagtggtggt

SEQ ID NO: 1424898 - DNA, 25 bp, Homo sapien
caattgcatactcctgggaaaaggc

SEQ ID NO: 1424899 - DNA, 25 bp, Homo sapien
caggattacagttggacatcagaca

SEQ ID NO: 1424900 - DNA, 25 bp, Homo sapien
gttcagtcactcagacaaaggccaa

SEQ ID NO: 1424901 - DNA, 25 bp, Homo sapien
taaagctcaagtcaggtgcccaatc

SEQ ID NO: 1424902 - DNA, 25 bp, Homo sapien
ccctgtcaggtcgtagaggcgagca

SEQ ID NO: 1424903 - DNA, 25 bp, Homo sapien
gagctgatcccgctggtgaaccgtc

SEQ ID NO: 1424904 - DNA, 25 bp, Homo sapien
tctgcaggacgcgttttcggcgctg

SEQ ID NO: 1424905 - DNA, 25 bp, Homo sapien
tcgagaacttcgtgggcaggtaagc

SEQ ID NO: 1424906 - DNA, 25 bp, Homo sapien
tgttgtccaggtgccatgtcattcc

SEQ ID NO: 1424907 - DNA, 25 bp, Homo sapien
caattgtgagagagcccgaggcaca

SEQ ID NO: 1424908 - DNA, 25 bp, Homo sapien
tcctcccggagagtcgaagaataaa

SEQ ID NO: 1424909 - DNA, 25 bp, Homo sapien
tcatctcggaactgaccagcatctt

SEQ ID NO: 1424910 - DNA, 25 bp, Homo sapien
ctcagtttctgagttgacaacaagg

SEQ ID NO: 1424911 - DNA, 25 bp, Homo sapien
ctgagttgacaacaaggcattgaat

SEQ ID NO: 1424912 - DNA, 25 bp, Homo sapien
gaatttagactgtgactttatcaca

SEQ ID NO: 1424913 - DNA, 25 bp, Homo sapien
caaggcattgaatttagactgtgac

SEQ ID NO: 1424914 - DNA, 25 bp, Homo sapien
cctctcggtacagtatagatatgca

SEQ ID NO: 1424915 - DNA, 25 bp, Homo sapien
gctgactgaattggagagattccag

SEQ ID NO: 1424916 - DNA, 25 bp, Homo sapien
tctgactttgatgtgctgccaagca

SEQ ID NO: 1424917 - DNA, 25 bp, Homo sapien
tgctgaaatggcagacctctcggta

SEQ ID NO: 1424918 - DNA, 25 bp, Homo sapien
ggcaatgttcttagatgctgagctt

SEQ ID NO: 1424919 - DNA, 25 bp, Homo sapien
tgttgcttggcacaaggtagttgct

SEQ ID NO: 1424920 - DNA, 25 bp, Homo sapien
tagtccgtttagcatcccctcaaac

SEQ ID NO: 1424921 - DNA, 25 bp, Homo sapien
tcaaacttgggtaaactccagggca

SEQ ID NO: 1424922 - DNA, 25 bp, Homo sapien
tgtggatgtgccttcctctaaagaa

SEQ ID NO: 1424923 - DNA, 25 bp, Homo sapien
gggagatttttgctagtgtgccact

SEQ ID NO: 1424924 - DNA, 25 bp, Homo sapien
agcagcactacacactggatctgta

SEQ ID NO: 1424925 - DNA, 25 bp, Homo sapien
tgctggtgtgttttccccgctgctg

SEQ ID NO: 1424926 - DNA, 25 bp, Homo sapien
ctcactggctggtttgtcttccaca

SEQ ID NO: 1424927 - DNA, 25 bp, Homo sapien
agacaaacttttctagtcactgtcg

SEQ ID NO: 1424928 - DNA, 25 bp, Homo sapien
ctgtcgtgtcaaagaaaagtctgag

SEQ ID NO: 1424929 - DNA, 25 bp, Homo sapien
cagaactgccctggtcagcgggtaa

SEQ ID NO: 1424930 - DNA, 25 bp, Homo sapien
actttctccctcgagggtcgggcat

SEQ ID NO: 1424931 - DNA, 25 bp, Homo sapien
gactttctccctcgagggtcgggca

SEQ ID NO: 1424932 - DNA, 25 bp, Homo sapien
tgtaacaagacgacctcttgtgctg

SEQ ID NO: 1424933 - DNA, 25 bp, Homo sapien
tgtttaccgcatggatgggcacatc

SEQ ID NO: 1424934 - DNA, 25 bp, Homo sapien
tgaatgaagatgtttaccgcatgga

SEQ ID NO: 1424935 - DNA, 25 bp, Homo sapien
gacctcttgtgctgcagcttgttac

SEQ ID NO: 1424936 - DNA, 25 bp, Homo sapien
attagaacagaacccttaggctgac

SEQ ID NO: 1424937 - DNA, 25 bp, Homo sapien
cccttgaaactcaggcacagctgac

SEQ ID NO: 1424938 - DNA, 25 bp, Homo sapien
cataataagaacctcggcctctaca

SEQ ID NO: 1424939 - DNA, 25 bp, Homo sapien
taccaacatgacagttagcaggccc

SEQ ID NO: 1424940 - DNA, 25 bp, Homo sapien
acttggtccatagagatactccctg

SEQ ID NO: 1424941 - DNA, 25 bp, Homo sapien
atggtgcccagtctactcccacagg

SEQ ID NO: 1424942 - DNA, 25 bp, Homo sapien
agctgcaggatctcaagctctctga

SEQ ID NO: 1424943 - DNA, 25 bp, Homo sapien
ttgagctttctctggcctaagccag

SEQ ID NO: 1424944 - DNA, 25 bp, Homo sapien
gcagactcccaagttctgtaagatt

SEQ ID NO: 1424945 - DNA, 25 bp, Homo sapien
cttaggaggtaagtgattcttcttt

SEQ ID NO: 1424946 - DNA, 25 bp, Homo sapien
tcttttgcagactcccaagttctgt

SEQ ID NO: 1424947 - DNA, 25 bp, Homo sapien
ttttcttgcataatagcctgagcct

SEQ ID NO: 1424948 - DNA, 25 bp, Homo sapien
ccttccgactgatgctggcttttct

SEQ ID NO: 1424949 - DNA, 25 bp, Homo sapien
tctcagggggttaagtcatcctcct

SEQ ID NO: 1424950 - DNA, 25 bp, Homo sapien
taggcttatggctaagggcatgcac

SEQ ID NO: 1424951 - DNA, 25 bp, Homo sapien
catgcactgacaaagggagtgcagg

SEQ ID NO: 1424952 - DNA, 25 bp, Homo sapien
gaaggtgctgatttagggccgggca

SEQ ID NO: 1424953 - DNA, 25 bp, Homo sapien
cattctgggagctgtcaagcactct

SEQ ID NO: 1424954 - DNA, 25 bp, Homo sapien
ggatgactctgctgccgtcctagct

SEQ ID NO: 1424955 - DNA, 25 bp, Homo sapien
taaggcaaaaatctgcatcgtgcaa

SEQ ID NO: 1424956 - DNA, 25 bp, Homo sapien
catttgcaacaggtggtacaaggca

SEQ ID NO: 1424957 - DNA, 25 bp, Homo sapien
taccatgacgcgtggaagtatcaaa

SEQ ID NO: 1424958 - DNA, 25 bp, Homo sapien
taggttgcaagtgaatgtgttggcc

SEQ ID NO: 1424959 - DNA, 25 bp, Homo sapien
tactcctagaactgtagcataagca

SEQ ID NO: 1424960 - DNA, 25 bp, Homo sapien
tggcagagttaacccagactggcag

SEQ ID NO: 1424961 - DNA, 25 bp, Homo sapien
tatggacaagaattcttagaataat

SEQ ID NO: 1424962 - DNA, 25 bp, Homo sapien
attctttgttaagcatcagactgaa

SEQ ID NO: 1424963 - DNA, 25 bp, Homo sapien
tgtgtacaataaaggtcaagggtag

SEQ ID NO: 1424964 - DNA, 25 bp, Homo sapien
caagggtagtgatttgctgacaaca

SEQ ID NO: 1424965 - DNA, 25 bp, Homo sapien
cccgagcccctcattttggttgtag

SEQ ID NO: 1424966 - DNA, 25 bp, Homo sapien
tggtgggttttaatacttgaatcaa

SEQ ID NO: 1424967 - DNA, 25 bp, Homo sapien
atgctatggtgtgagggctgctttc

SEQ ID NO: 1424968 - DNA, 25 bp, Homo sapien
aatacatgagttaagtattaaacca

SEQ ID NO: 1424969 - DNA, 25 bp, Homo sapien
gtgcctgctgtacaggtgagcggat

SEQ ID NO: 1424970 - DNA, 25 bp, Homo sapien
aggtgagcggatgttctgcacagca

SEQ ID NO: 1424971 - DNA, 25 bp, Homo sapien
tgagcggatgttctgcacagcaagt

SEQ ID NO: 1424972 - DNA, 25 bp, Homo sapien
tgcctgctgtacaggtgagcggatg

SEQ ID NO: 1424973 - DNA, 25 bp, Homo sapien
caaactggaaggctgttactcacag

SEQ ID NO: 1424974 - DNA, 25 bp, Homo sapien
ccatgctgtgaatcaaaagggtaca

SEQ ID NO: 1424975 - DNA, 25 bp, Homo sapien
gcccacatgtagtcagagttcagcg

SEQ ID NO: 1424976 - DNA, 25 bp, Homo sapien
cattgttatgttgaacctgccccta

SEQ ID NO: 1424977 - DNA, 25 bp, Homo sapien
taagtcgctagagccacatcaagca

SEQ ID NO: 1424978 - DNA, 25 bp, Homo sapien
ggaaactggctgtcacgctaagtca

SEQ ID NO: 1424979 - DNA, 25 bp, Homo sapien
ggtgggctattctccttagagcaga

SEQ ID NO: 1424980 - DNA, 25 bp, Homo sapien
taaacatattatctgggccgaaagc

SEQ ID NO: 1424981 - DNA, 25 bp, Homo sapien
gggccgacctctaaagttcagcaca

SEQ ID NO: 1424982 - DNA, 25 bp, Homo sapien
tcagtgggtttctagacaaagtgcc

SEQ ID NO: 1424983 - DNA, 25 bp, Homo sapien
tattttgctaaagagaacttgagtc

SEQ ID NO: 1424984 - DNA, 25 bp, Homo sapien
gacccatagggattcatttctttga

SEQ ID NO: 1424985 - DNA, 25 bp, Homo sapien
cacctaggttcccttggtcacagac

SEQ ID NO: 1424986 - DNA, 25 bp, Homo sapien
aaaaatgacttcagtcctgggatgt

SEQ ID NO: 1424987 - DNA, 25 bp, Homo sapien
tgttaacacaaatcatgggctcccc

SEQ ID NO: 1424988 - DNA, 25 bp, Homo sapien
ccaggtgagcagtcaagaaggcctt

SEQ ID NO: 1424989 - DNA, 25 bp, Homo sapien
tggatatgagattcaaaaaaggagc

SEQ ID NO: 1424990 - DNA, 25 bp, Homo sapien
cctagtgtgcaaaacctgtgaagaa

SEQ ID NO: 1424991 - DNA, 25 bp, Homo sapien
ttcggcagtcttttctcagcagtgt

SEQ ID NO: 1424992 - DNA, 25 bp, Homo sapien
attttgtccccagcggtccatggcg

SEQ ID NO: 1424993 - DNA, 25 bp, Homo sapien
ctcccttgcccagtctaaccaatgt

SEQ ID NO: 1424994 - DNA, 25 bp, Homo sapien
acaacggcattgtcctgaacaggta

SEQ ID NO: 1424995 - DNA, 25 bp, Homo sapien
caacggcattgtcctgaacaggtag

SEQ ID NO: 1424996 - DNA, 25 bp, Homo sapien
cttgcccagtctaaccaatgtgcag

SEQ ID NO: 1424997 - DNA, 25 bp, Homo sapien
tggggcgacggagcaggatctccag

SEQ ID NO: 1424998 - DNA, 25 bp, Homo sapien
ctggggcgacggagcaggatctcca

SEQ ID NO: 1424999 - DNA, 25 bp, Homo sapien
gcgacggagcaggatctccagaagc

SEQ ID NO: 1425000 - DNA, 25 bp, Homo sapien
acggagcaggatctccagaagcttc

SEQ ID NO: 1425001 - DNA, 25 bp, Homo sapien
cactcaagggctgtgatttccagtc

SEQ ID NO: 1425002 - DNA, 25 bp, Homo sapien
ccctgaattctgctgcgctgactga

SEQ ID NO: 1425003 - DNA, 25 bp, Homo sapien
cgtggcacatttgctgcagactggg

SEQ ID NO: 1425004 - DNA, 25 bp, Homo sapien
tgcgctgactgagacacactcaagg

SEQ ID NO: 1425005 - DNA, 25 bp, Homo sapien
tttatgtccataagacatgccttgg

SEQ ID NO: 1425006 - DNA, 25 bp, Homo sapien
tccaggtgtagacctgcttctgcca

SEQ ID NO: 1425007 - DNA, 25 bp, Homo sapien
gtcctcatagaggagccataaacca

SEQ ID NO: 1425008 - DNA, 25 bp, Homo sapien
taaaccactgaaccagtagtcagcc

SEQ ID NO: 1425009 - DNA, 25 bp, Homo sapien
gcgtgcacagcagccatttttatat

SEQ ID NO: 1425010 - DNA, 25 bp, Homo sapien
cactggcgtgcacagcagccatttt

SEQ ID NO: 1425011 - DNA, 25 bp, Homo sapien
ggcgtgcacagcagccatttttata

SEQ ID NO: 1425012 - DNA, 25 bp, Homo sapien
ctggcgtgcacagcagccattttta

SEQ ID NO: 1425013 - DNA, 25 bp, Homo sapien
ggggatcaggaatgtaccagtgaag

SEQ ID NO: 1425014 - DNA, 25 bp, Homo sapien
agaggggatcaggaatgtaccagtg

SEQ ID NO: 1425015 - DNA, 25 bp, Homo sapien
ttaagatctgagtggtacaatgatg

SEQ ID NO: 1425016 - DNA, 25 bp, Homo sapien
aggggatcaggaatgtaccagtgaa

SEQ ID NO: 1425017 - DNA, 25 bp, Homo sapien
tcctctgagactacagcaatcactt

SEQ ID NO: 1425018 - DNA, 25 bp, Homo sapien
gagactacagcaatcacttccccta

SEQ ID NO: 1425019 - DNA, 25 bp, Homo sapien
ctacagcaatcacttcccctatggt

SEQ ID NO: 1425020 - DNA, 25 bp, Homo sapien
cccaagtcctctgagactacagcaa

SEQ ID NO: 1425021 - DNA, 25 bp, Homo sapien
tatatgggatcctgagagacatgac

SEQ ID NO: 1425022 - DNA, 25 bp, Homo sapien
tgtgtccagattaccacagggtgct

SEQ ID NO: 1425023 - DNA, 25 bp, Homo sapien
gaaaagctccaagtatgtgtccaga

SEQ ID NO: 1425024 - DNA, 25 bp, Homo sapien
gcagacctctatacaggaagcccaa

SEQ ID NO: 1425025 - DNA, 25 bp, Homo sapien
caagtcctgtctttttagctacatc

SEQ ID NO: 1425026 - DNA, 25 bp, Homo sapien
ttttgagcgctcaccatagtatatc

SEQ ID NO: 1425027 - DNA, 25 bp, Homo sapien
gggatattcctccattgcagatact

SEQ ID NO: 1425028 - DNA, 25 bp, Homo sapien
gaagaagcctctctaccaattctcc

SEQ ID NO: 1425029 - DNA, 25 bp, Homo sapien
ggccatggccactaatgccactgag

SEQ ID NO: 1425030 - DNA, 25 bp, Homo sapien
tcaaatggttgagcctgactttttg

SEQ ID NO: 1425031 - DNA, 25 bp, Homo sapien
taaggccatggccactaatgccact

SEQ ID NO: 1425032 - DNA, 25 bp, Homo sapien
cttctaaggccatggccactaatgc

SEQ ID NO: 1425033 - DNA, 25 bp, Homo sapien
catcataaattcttgcacagtccat

SEQ ID NO: 1425034 - DNA, 25 bp, Homo sapien
ccatcataaattcttgcacagtcca

SEQ ID NO: 1425035 - DNA, 25 bp, Homo sapien
ctctagtctgcccacaaatcccatc

SEQ ID NO: 1425036 - DNA, 25 bp, Homo sapien
atcccatcataaattcttgcacagt

SEQ ID NO: 1425037 - DNA, 25 bp, Homo sapien
tgagggaagctcctaatgcctcctt

SEQ ID NO: 1425038 - DNA, 25 bp, Homo sapien
ggtctttgacggactctgggtacta

SEQ ID NO: 1425039 - DNA, 25 bp, Homo sapien
cagtgttcatgctgggtcctgaaga

SEQ ID NO: 1425040 - DNA, 25 bp, Homo sapien
cagtgagattgaaagaggccccttc

SEQ ID NO: 1425041 - DNA, 25 bp, Homo sapien
ttgcattgttacaaatgttaagaaa

SEQ ID NO: 1425042 - DNA, 25 bp, Homo sapien
tccatcttgtccctcaaagatggtt

SEQ ID NO: 1425043 - DNA, 25 bp, Homo sapien
ccatcttgtccctcaaagatggttt

SEQ ID NO: 1425044 - DNA, 25 bp, Homo sapien
tgtcatgacgaaagcaccaactcct

SEQ ID NO: 1425045 - DNA, 25 bp, Homo sapien
tgacgaaagcaccaactcctaacca

SEQ ID NO: 1425046 - DNA, 25 bp, Homo sapien
gaacctgggctgtcatgacgaaagc

SEQ ID NO: 1425047 - DNA, 25 bp, Homo sapien
ggctgtcatgacgaaagcaccaact

SEQ ID NO: 1425048 - DNA, 25 bp, Homo sapien
taaacattgtgctgacaaacccggg

SEQ ID NO: 1425049 - DNA, 25 bp, Homo sapien
tagattccttgtgagccctcaagtg

SEQ ID NO: 1425050 - DNA, 25 bp, Homo sapien
gatgtgttccgcctcttttggtcag

SEQ ID NO: 1425051 - DNA, 25 bp, Homo sapien
catccgctgagaattggtgttgcat

SEQ ID NO: 1425052 - DNA, 25 bp, Homo sapien
ttgtgctgaaccaagatcatgtcac

SEQ ID NO: 1425053 - DNA, 25 bp, Homo sapien
cttggatgtctcagattcctcagca

SEQ ID NO: 1425054 - DNA, 25 bp, Homo sapien
tctcatttaatggtaccacctctcc

SEQ ID NO: 1425055 - DNA, 25 bp, Homo sapien
ggcaggcaccattgtatatccattc

SEQ ID NO: 1425056 - DNA, 25 bp, Homo sapien
caaaactatctcaaatagagggtac

SEQ ID NO: 1425057 - DNA, 25 bp, Homo sapien
ttattaagggccgaacattattgta

SEQ ID NO: 1425058 - DNA, 25 bp, Homo sapien
ccttggaacctttgtctacagttct

SEQ ID NO: 1425059 - DNA, 25 bp, Homo sapien
cttgaggatatctggatgtgaagca

SEQ ID NO: 1425060 - DNA, 25 bp, Homo sapien
gtatcgtttcgccaatatttctaat

SEQ ID NO: 1425061 - DNA, 25 bp, Homo sapien
tcagagatcggcagaggtaagcatg

SEQ ID NO: 1425062 - DNA, 25 bp, Homo sapien
ctgctagtatcagagatcggcagag

SEQ ID NO: 1425063 - DNA, 25 bp, Homo sapien
agtatcagagatcggcagaggtaag

SEQ ID NO: 1425064 - DNA, 25 bp, Homo sapien
agatcggcagaggtaagcatgcagt

SEQ ID NO: 1425065 - DNA, 25 bp, Homo sapien
tctctgggttcttggttatctctct

SEQ ID NO: 1425066 - DNA, 25 bp, Homo sapien
tttttttgtagtgggcaggctagga

SEQ ID NO: 1425067 - DNA, 25 bp, Homo sapien
cttctcagttcattctctgggttct

SEQ ID NO: 1425068 - DNA, 25 bp, Homo sapien
ttgtagtgggcaggctaggaggcat

SEQ ID NO: 1425069 - DNA, 25 bp, Homo sapien
gcactttagcagaagctagataaca

SEQ ID NO: 1425070 - DNA, 25 bp, Homo sapien
tattaataattagtgtgggacagca

SEQ ID NO: 1425071 - DNA, 25 bp, Homo sapien
gataacaacttattggtagggtgtc

SEQ ID NO: 1425072 - DNA, 25 bp, Homo sapien
caacttgtgagttagcaagcctccc

SEQ ID NO: 1425073 - DNA, 25 bp, Homo sapien
gctccatattgcttcagacagtact

SEQ ID NO: 1425074 - DNA, 25 bp, Homo sapien
caatggcaatggctaaaacgccagg

SEQ ID NO: 1425075 - DNA, 25 bp, Homo sapien
tctcttctctttagtcactttggag

SEQ ID NO: 1425076 - DNA, 25 bp, Homo sapien
tcttgcagatatcttcccttggcct

SEQ ID NO: 1425077 - DNA, 25 bp, Homo sapien
gtggctaatttctccattgccattt

SEQ ID NO: 1425078 - DNA, 25 bp, Homo sapien
ttgtggctaatttctccattgccat

SEQ ID NO: 1425079 - DNA, 25 bp, Homo sapien
ctaatttctccattgccatttcctg

SEQ ID NO: 1425080 - DNA, 25 bp, Homo sapien
aatttctccattgccatttcctgaa

SEQ ID NO: 1425081 - DNA, 25 bp, Homo sapien
tgtcatacaaggtttatctgggagt

SEQ ID NO: 1425082 - DNA, 25 bp, Homo sapien
aagtgtattatctactggtaaaggg

SEQ ID NO: 1425083 - DNA, 25 bp, Homo sapien
ttatctagatgaataccaaccttct

SEQ ID NO: 1425084 - DNA, 25 bp, Homo sapien
taattttggccttaatctgtgttaa

SEQ ID NO: 1425085 - DNA, 25 bp, Homo sapien
gacttgtccatgagctctggatgct

SEQ ID NO: 1425086 - DNA, 25 bp, Homo sapien
gtatgatttcatgtaacctatgtgg

SEQ ID NO: 1425087 - DNA, 25 bp, Homo sapien
cataccccaggtattccaaatagaa

SEQ ID NO: 1425088 - DNA, 25 bp, Homo sapien
cctatgtggattctttgacttgtcc

SEQ ID NO: 1425089 - DNA, 25 bp, Homo sapien
aatcactacagcataagcctcaggg

SEQ ID NO: 1425090 - DNA, 25 bp, Homo sapien
caaggctatctggagtatacctgtg

SEQ ID NO: 1425091 - DNA, 25 bp, Homo sapien
gaaataccaagtgactcacctccag

SEQ ID NO: 1425092 - DNA, 25 bp, Homo sapien
tattttcaccaacaagggtgtgtct

SEQ ID NO: 1425093 - DNA, 25 bp, Homo sapien
tttgggacaccaaaacactgtatca

SEQ ID NO: 1425094 - DNA, 25 bp, Homo sapien
catagactaggtgggttaagcaaga

SEQ ID NO: 1425095 - DNA, 25 bp, Homo sapien
cattctgtggtactgctggttaggg

SEQ ID NO: 1425096 - DNA, 25 bp, Homo sapien
tacttcaattggacagtgctggatt

SEQ ID NO: 1425097 - DNA, 25 bp, Homo sapien
gcttcaactgcaaagaaccttattg

SEQ ID NO: 1425098 - DNA, 25 bp, Homo sapien
taaaaactgcaataggaaggactgt

SEQ ID NO: 1425099 - DNA, 25 bp, Homo sapien
gctggtttctacaatattattcacg

SEQ ID NO: 1425100 - DNA, 25 bp, Homo sapien
ttttaaacagcatcattgaacctgc

SEQ ID NO: 1425101 - DNA, 25 bp, Homo sapien
catttttcccgttcatcttagacat

SEQ ID NO: 1425102 - DNA, 25 bp, Homo sapien
gcatttttcccgttcatcttagaca

SEQ ID NO: 1425103 - DNA, 25 bp, Homo sapien
tttttcccgttcatcttagacattg

SEQ ID NO: 1425104 - DNA, 25 bp, Homo sapien
acattggtagaaggggcagtttact

SEQ ID NO: 1425105 - DNA, 25 bp, Homo sapien
catgttctggggcttagatggttca

SEQ ID NO: 1425106 - DNA, 25 bp, Homo sapien
gatttcaatgccaagccaataggtc

SEQ ID NO: 1425107 - DNA, 25 bp, Homo sapien
gccaagccaataggtcagcccttaa

SEQ ID NO: 1425108 - DNA, 25 bp, Homo sapien
gccaataggtcagcccttaatgatg

SEQ ID NO: 1425109 - DNA, 25 bp, Homo sapien
tgtggtatatccaggcacttgctta

SEQ ID NO: 1425110 - DNA, 25 bp, Homo sapien
ttagtgctgccatcagttcaaacgc

SEQ ID NO: 1425111 - DNA, 25 bp, Homo sapien
cactgtttcaccgagagtcattagt

SEQ ID NO: 1425112 - DNA, 25 bp, Homo sapien
taaatgaattcaggttgttttgctg

SEQ ID NO: 1425113 - DNA, 25 bp, Homo sapien
tatagctgtgaggagtagcttgaca

SEQ ID NO: 1425114 - DNA, 25 bp, Homo sapien
tagctgtgaggagtagcttgacaca

SEQ ID NO: 1425115 - DNA, 25 bp, Homo sapien
gctgtgaggagtagcttgacacaaa

SEQ ID NO: 1425116 - DNA, 25 bp, Homo sapien
tgtgaggagtagcttgacacaaatt

SEQ ID NO: 1425117 - DNA, 25 bp, Homo sapien
gggtttggccttcttctactcatct

SEQ ID NO: 1425118 - DNA, 25 bp, Homo sapien
aaacagctccagacaatattgtgaa

SEQ ID NO: 1425119 - DNA, 25 bp, Homo sapien
tccctcttctataagccaaacagct

SEQ ID NO: 1425120 - DNA, 25 bp, Homo sapien
tcatctctatcatccttcagtgtgg

SEQ ID NO: 1425121 - DNA, 25 bp, Homo sapien
caaatgtttgaccttgatggcctgc

SEQ ID NO: 1425122 - DNA, 25 bp, Homo sapien
tagggatacgatctccttgtttcgg

SEQ ID NO: 1425123 - DNA, 25 bp, Homo sapien
tgggctaagggtacacggacaatta

SEQ ID NO: 1425124 - DNA, 25 bp, Homo sapien
cttacgtcaaggtttggtgccatga

SEQ ID NO: 1425125 - DNA, 25 bp, Homo sapien
tcctgccacggttcggatgactggc

SEQ ID NO: 1425126 - DNA, 25 bp, Homo sapien
gcagtctgtttaggcgaggcccaga

SEQ ID NO: 1425127 - DNA, 25 bp, Homo sapien
gcaaacttgagtctaccttacacaa

SEQ ID NO: 1425128 - DNA, 25 bp, Homo sapien
tgcagatgcgtcaaggtagccttca

SEQ ID NO: 1425129 - DNA, 25 bp, Homo sapien
taaaacaacgagaattgctttttgc

SEQ ID NO: 1425130 - DNA, 25 bp, Homo sapien
taaaacttcatgtgaggcaaattcc

SEQ ID NO: 1425131 - DNA, 25 bp, Homo sapien
ctttttgcttctcagtagtgttgga

SEQ ID NO: 1425132 - DNA, 25 bp, Homo sapien
catgtgaggcaaattccaccttaat

SEQ ID NO: 1425133 - DNA, 25 bp, Homo sapien
tgttggtgctacacaactcatctct

SEQ ID NO: 1425134 - DNA, 25 bp, Homo sapien
gcagaaagaaaatgttggtgctaca

SEQ ID NO: 1425135 - DNA, 25 bp, Homo sapien
gaaaatgttggtgctacacaactca

SEQ ID NO: 1425136 - DNA, 25 bp, Homo sapien
gaaagaaaatgttggtgctacacaa

SEQ ID NO: 1425137 - DNA, 25 bp, Homo sapien
accacagaagtgggtatattaggca

SEQ ID NO: 1425138 - DNA, 25 bp, Homo sapien
cagaagtgggtatattaggcaccat

SEQ ID NO: 1425139 - DNA, 25 bp, Homo sapien
cacagaagtgggtatattaggcacc

SEQ ID NO: 1425140 - DNA, 25 bp, Homo sapien
gaagtgggtatattaggcaccatgc

SEQ ID NO: 1425141 - DNA, 25 bp, Homo sapien
ctagaagtgtgctccaacccgattt

SEQ ID NO: 1425142 - DNA, 25 bp, Homo sapien
tctttgggcccattcacactcattg

SEQ ID NO: 1425143 - DNA, 25 bp, Homo sapien
cccgatttatctttgggcccattca

SEQ ID NO: 1425144 - DNA, 25 bp, Homo sapien
ttgatctaccgcttgggacactgcc

SEQ ID NO: 1425145 - DNA, 25 bp, Homo sapien
gtcattttgagaggtacaaagctca

SEQ ID NO: 1425146 - DNA, 25 bp, Homo sapien
tgtggtaacaatagttcatttctca

SEQ ID NO: 1425147 - DNA, 25 bp, Homo sapien
taactccagattgtagtcattttga

SEQ ID NO: 1425148 - DNA, 25 bp, Homo sapien
tgacaacatggtaatgtccatagac

SEQ ID NO: 1425149 - DNA, 25 bp, Homo sapien
gccttgtctgctaccagtttgttaa

SEQ ID NO: 1425150 - DNA, 25 bp, Homo sapien
aatatgagccggatactttccactg

SEQ ID NO: 1425151 - DNA, 25 bp, Homo sapien
tactggtatattggtgagacttctc

SEQ ID NO: 1425152 - DNA, 25 bp, Homo sapien
ttactctgtctaaccacttgccttg

SEQ ID NO: 1425153 - DNA, 25 bp, Homo sapien
cttcaaaggaagcttcttactggaa

SEQ ID NO: 1425154 - DNA, 25 bp, Homo sapien
tactggaagaaagattctggatgcg

SEQ ID NO: 1425155 - DNA, 25 bp, Homo sapien
gaagaaagattctggatgcgaatca

SEQ ID NO: 1425156 - DNA, 25 bp, Homo sapien
caaaggaagcttcttactggaagaa

SEQ ID NO: 1425157 - DNA, 25 bp, Homo sapien
acctccatgagattattgtgaagga

SEQ ID NO: 1425158 - DNA, 25 bp, Homo sapien
agggattctttaaattacctccatg

SEQ ID NO: 1425159 - DNA, 25 bp, Homo sapien
tctctgactctccaaaaaagggatt

SEQ ID NO: 1425160 - DNA, 25 bp, Homo sapien
gattattgtgaaggaaggcatccag

SEQ ID NO: 1425161 - DNA, 25 bp, Homo sapien
tagacttcattgctccactcacaag

SEQ ID NO: 1425162 - DNA, 25 bp, Homo sapien
ggaagtgagcgttgttgaacacctg

SEQ ID NO: 1425163 - DNA, 25 bp, Homo sapien
agtgtagacttctgccaaaaaccag

SEQ ID NO: 1425164 - DNA, 25 bp, Homo sapien
tgcccagaaatacaccagtcagttt

SEQ ID NO: 1425165 - DNA, 25 bp, Homo sapien
gaaaggctgatgtcaaatgaagcac

SEQ ID NO: 1425166 - DNA, 25 bp, Homo sapien
ggctgatgtcaaatgaagcacaact

SEQ ID NO: 1425167 - DNA, 25 bp, Homo sapien
gatgtcaaatgaagcacaacttgga

SEQ ID NO: 1425168 - DNA, 25 bp, Homo sapien
cacaagaaaggctgatgtcaaatga

SEQ ID NO: 1425169 - DNA, 25 bp, Homo sapien
ttttttctgagatcaacctctggca

SEQ ID NO: 1425170 - DNA, 25 bp, Homo sapien
ctggagcaaattcttatttacaaat

SEQ ID NO: 1425171 - DNA, 25 bp, Homo sapien
agatcaacctctggcattctctgca

SEQ ID NO: 1425172 - DNA, 25 bp, Homo sapien
ctgagatcaacctctggcattctct

SEQ ID NO: 1425173 - DNA, 25 bp, Homo sapien
aaaagcttttcatttgcactatatg

SEQ ID NO: 1425174 - DNA, 25 bp, Homo sapien
tttcatccatgtgtataataaaaac

SEQ ID NO: 1425175 - DNA, 25 bp, Homo sapien
caacatgtctatccatggtatttaa

SEQ ID NO: 1425176 - DNA, 25 bp, Homo sapien
gcactatatgtcgtatgtacataaa

SEQ ID NO: 1425177 - DNA, 25 bp, Homo sapien
cgtattgttgaaagaagcactgagg

SEQ ID NO: 1425178 - DNA, 25 bp, Homo sapien
ttaacttcgtattgttgaaagaagc

SEQ ID NO: 1425179 - DNA, 25 bp, Homo sapien
aacttcgtattgttgaaagaagcac

SEQ ID NO: 1425180 - DNA, 25 bp, Homo sapien
cttcgtattgttgaaagaagcactg

SEQ ID NO: 1425181 - DNA, 25 bp, Homo sapien
gcacatgccagccaattgggaaatg

SEQ ID NO: 1425182 - DNA, 25 bp, Homo sapien
gcaccaaatagtgttgccagacttg

SEQ ID NO: 1425183 - DNA, 25 bp, Homo sapien
tcttgagccaggtttcgtgggagcc

SEQ ID NO: 1425184 - DNA, 25 bp, Homo sapien
caacttaaaaagagtgtgaggccca

SEQ ID NO: 1425185 - DNA, 25 bp, Homo sapien
aaaggagtatgccttatcaggccca

SEQ ID NO: 1425186 - DNA, 25 bp, Homo sapien
tgatattatccccaaaaggtccttg

SEQ ID NO: 1425187 - DNA, 25 bp, Homo sapien
taggcgtggtctaagctagcaggcc

SEQ ID NO: 1425188 - DNA, 25 bp, Homo sapien
gaaaaggcctacattctgagaacac

SEQ ID NO: 1425189 - DNA, 25 bp, Homo sapien
cacaaactgtgaatagatgcagcac

SEQ ID NO: 1425190 - DNA, 25 bp, Homo sapien
taaaggtctgaagctaggcacaaac

SEQ ID NO: 1425191 - DNA, 25 bp, Homo sapien
ttactgacctggcttctaaaggcct

SEQ ID NO: 1425192 - DNA, 25 bp, Homo sapien
gatgcagcacaatagcaggtgtctc

SEQ ID NO: 1425193 - DNA, 25 bp, Homo sapien
atgtcaccgcctctcttatttccta

SEQ ID NO: 1425194 - DNA, 25 bp, Homo sapien
tgaattccccctagcattctgctta

SEQ ID NO: 1425195 - DNA, 25 bp, Homo sapien
tagcattctgcttattgtgacacat

SEQ ID NO: 1425196 - DNA, 25 bp, Homo sapien
ccctgtcctccaagactaagcttaa

SEQ ID NO: 1425197 - DNA, 25 bp, Homo sapien
ggtagaaagaagtgactttacacac

SEQ ID NO: 1425198 - DNA, 25 bp, Homo sapien
ttgagccctagataaataaaagagc

SEQ ID NO: 1425199 - DNA, 25 bp, Homo sapien
agtaaccaattctgtgatcttgggc

SEQ ID NO: 1425200 - DNA, 25 bp, Homo sapien
gcattagcacattgaaaagggtaga

SEQ ID NO: 1425201 - DNA, 25 bp, Homo sapien
ctgtttatggaaaaatcatgagaca

SEQ ID NO: 1425202 - DNA, 25 bp, Homo sapien
gtttatggaaaaatcatgagacaac

SEQ ID NO: 1425203 - DNA, 25 bp, Homo sapien
tgtttatggaaaaatcatgagacaa

SEQ ID NO: 1425204 - DNA, 25 bp, Homo sapien
cctgtttatggaaaaatcatgagac

SEQ ID NO: 1425205 - DNA, 25 bp, Homo sapien
ttctcttaccacaatgacatgctgc

SEQ ID NO: 1425206 - DNA, 25 bp, Homo sapien
taacagaaaggataagcaccctcac

SEQ ID NO: 1425207 - DNA, 25 bp, Homo sapien
tagttaggaggctaatctatcagct

SEQ ID NO: 1425208 - DNA, 25 bp, Homo sapien
catgctgcttccagaatggaactct

SEQ ID NO: 1425209 - DNA, 25 bp, Homo sapien
cacagacatgagatagacatcagca

SEQ ID NO: 1425210 - DNA, 25 bp, Homo sapien
gctccggggagtacatgcctttagt

SEQ ID NO: 1425211 - DNA, 25 bp, Homo sapien
actaatggacagtaggcctcccacg

SEQ ID NO: 1425212 - DNA, 25 bp, Homo sapien
ccttggtgttagtcacaggttgagc

SEQ ID NO: 1425213 - DNA, 25 bp, Homo sapien
gccagtttaatcatcgccctcacag

SEQ ID NO: 1425214 - DNA, 25 bp, Homo sapien
gttttgaaatgagacctccctggaa

SEQ ID NO: 1425215 - DNA, 25 bp, Homo sapien
gctaggcctacaatagatgaatttg

SEQ ID NO: 1425216 - DNA, 25 bp, Homo sapien
ccctcacagaagtccaggtggttct

SEQ ID NO: 1425217 - DNA, 25 bp, Homo sapien
tatgtggtagtcaccttatgggaca

SEQ ID NO: 1425218 - DNA, 25 bp, Homo sapien
taaggtaacagagcagagccaggat

SEQ ID NO: 1425219 - DNA, 25 bp, Homo sapien
cagtggttcacatatcccttaggta

SEQ ID NO: 1425220 - DNA, 25 bp, Homo sapien
cagccatccggcaaatttgagaaaa

SEQ ID NO: 1425221 - DNA, 25 bp, Homo sapien
tctggcaccccatttggctttttgg

SEQ ID NO: 1425222 - DNA, 25 bp, Homo sapien
ggtctgcgacgcccaaaagggcagc

SEQ ID NO: 1425223 - DNA, 25 bp, Homo sapien
cagcccgggaatcttaaggccgccg

SEQ ID NO: 1425224 - DNA, 25 bp, Homo sapien
gggttggagggtctgcgacgcccaa

SEQ ID NO: 1425225 - DNA, 25 bp, Homo sapien
gggtccgccgcaatctccttagcga

SEQ ID NO: 1425226 - DNA, 25 bp, Homo sapien
ggctgcgactgtggccaagcacttc

SEQ ID NO: 1425227 - DNA, 25 bp, Homo sapien
tggcccaaacccgaatgctctgagc

SEQ ID NO: 1425228 - DNA, 25 bp, Homo sapien
tggaaccatcgcgacgtgactgctg

SEQ ID NO: 1425229 - DNA, 25 bp, Homo sapien
tcagagcagacagtctgttgacagc

SEQ ID NO: 1425230 - DNA, 25 bp, Homo sapien
agcagacagtctgttgacagccaac

SEQ ID NO: 1425231 - DNA, 25 bp, Homo sapien
gggtcagagcagacagtctgttgac

SEQ ID NO: 1425232 - DNA, 25 bp, Homo sapien
cagtctgttgacagccaactggaaa

SEQ ID NO: 1425233 - DNA, 25 bp, Homo sapien
ctctctcaggtaggcctgacaattt

SEQ ID NO: 1425234 - DNA, 25 bp, Homo sapien
ggactctctcaggtaggcctgacaa

SEQ ID NO: 1425235 - DNA, 25 bp, Homo sapien
tctcaggtaggcctgacaatttcaa

SEQ ID NO: 1425236 - DNA, 25 bp, Homo sapien
ggtaggcctgacaatttcaaagcca

SEQ ID NO: 1425237 - DNA, 25 bp, Homo sapien
gggacaggtgcaggttaaacatcaa

SEQ ID NO: 1425238 - DNA, 25 bp, Homo sapien
tccaagaagtcagcccaggtacgaa

SEQ ID NO: 1425239 - DNA, 25 bp, Homo sapien
cagtgccaagtgagacagagcgcag

SEQ ID NO: 1425240 - DNA, 25 bp, Homo sapien
caaagtgacataggagggcaaatcc

SEQ ID NO: 1425241 - DNA, 25 bp, Homo sapien
tgagggccccattaacattccagtg

SEQ ID NO: 1425242 - DNA, 25 bp, Homo sapien
tgtgtcagtactcctcacagggtgc

SEQ ID NO: 1425243 - DNA, 25 bp, Homo sapien
gaaatctgcatcataccttggccag

SEQ ID NO: 1425244 - DNA, 25 bp, Homo sapien
gctgctgagctggtcgtaaggaaac

SEQ ID NO: 1425245 - DNA, 25 bp, Homo sapien
gaggaaccagtgtgactccatgctg

SEQ ID NO: 1425246 - DNA, 25 bp, Homo sapien
ccatgctgctcagaaaccaacagct

SEQ ID NO: 1425247 - DNA, 25 bp, Homo sapien
gccaggaggaaccagtgtgactcca

SEQ ID NO: 1425248 - DNA, 25 bp, Homo sapien
tttcccctcaggccaggaggaacca

SEQ ID NO: 1425249 - DNA, 25 bp, Homo sapien
ggctatttgagcagtacaagctcca

SEQ ID NO: 1425250 - DNA, 25 bp, Homo sapien
ctcatacagtcagcaataatgtgga

SEQ ID NO: 1425251 - DNA, 25 bp, Homo sapien
gattccttttatgaccttagggcca

SEQ ID NO: 1425252 - DNA, 25 bp, Homo sapien
gcacaatggtacatgtcctgattcc

SEQ ID NO: 1425253 - DNA, 25 bp, Homo sapien
gcaaaagcataaatcgatacctgga

SEQ ID NO: 1425254 - DNA, 25 bp, Homo sapien
gaagcaagggcttacaagtcatagg

SEQ ID NO: 1425255 - DNA, 25 bp, Homo sapien
tatattggttcagcccgaaaaggtg

SEQ ID NO: 1425256 - DNA, 25 bp, Homo sapien
tagtaggagttacaggcaaaagcat

SEQ ID NO: 1425257 - DNA, 25 bp, Homo sapien
agcagggttcctctaaggctcatac

SEQ ID NO: 1425258 - DNA, 25 bp, Homo sapien
tacactctggacagattcagagcca

SEQ ID NO: 1425259 - DNA, 25 bp, Homo sapien
tacgagatgatagccatgccagcag

SEQ ID NO: 1425260 - DNA, 25 bp, Homo sapien
gggcccaggttacccgtgaagcaca

SEQ ID NO: 1425261 - DNA, 25 bp, Homo sapien
ctcatagtttaccataggagttagc

SEQ ID NO: 1425262 - DNA, 25 bp, Homo sapien
cctaggttggctcctcatagtttac

SEQ ID NO: 1425263 - DNA, 25 bp, Homo sapien
gaccttgggaaagtagcttgacctc

SEQ ID NO: 1425264 - DNA, 25 bp, Homo sapien
tcttttctcctaggttggctcctca

SEQ ID NO: 1425265 - DNA, 25 bp, Homo sapien
ttttctctcagatatttgtcttgtg

SEQ ID NO: 1425266 - DNA, 25 bp, Homo sapien
tatttggccagcatgactctgcttg

SEQ ID NO: 1425267 - DNA, 25 bp, Homo sapien
taagggaggacttgcttcctgtcca

SEQ ID NO: 1425268 - DNA, 25 bp, Homo sapien
cctacagagtcacaatgagtgagct

SEQ ID NO: 1425269 - DNA, 25 bp, Homo sapien
tcagtgagaaccctgcctacagagt

SEQ ID NO: 1425270 - DNA, 25 bp, Homo sapien
cttccttgagcagctcagcttactc

SEQ ID NO: 1425271 - DNA, 25 bp, Homo sapien
tcagcttactccatccctctttctc

SEQ ID NO: 1425272 - DNA, 25 bp, Homo sapien
tgtgtcaggtgagagttaatctcca

SEQ ID NO: 1425273 - DNA, 25 bp, Homo sapien
tgaacacctgttgcgcttatcctgt

SEQ ID NO: 1425274 - DNA, 25 bp, Homo sapien
tctgctcctgcgctttgtggtctcc

SEQ ID NO: 1425275 - DNA, 25 bp, Homo sapien
ggactatcggtcacattctcgcgct

SEQ ID NO: 1425276 - DNA, 25 bp, Homo sapien
ctgccgggaggatgtgccgccttct

SEQ ID NO: 1425277 - DNA, 25 bp, Homo sapien
ccccgccggcgattggctgttgaga

SEQ ID NO: 1425278 - DNA, 25 bp, Homo sapien
cagatccagttagtgagtttgtcaa

SEQ ID NO: 1425279 - DNA, 25 bp, Homo sapien
caggagtgtggatcagacagtctaa

SEQ ID NO: 1425280 - DNA, 25 bp, Homo sapien
gaagcccagttccttaggtgggata

SEQ ID NO: 1425281 - DNA, 25 bp, Homo sapien
ggtttggccaattagtacaagtctc

SEQ ID NO: 1425282 - DNA, 25 bp, Homo sapien
acggagctgtagtgccattagaaac

SEQ ID NO: 1425283 - DNA, 25 bp, Homo sapien
tagctattcagagcaagagggcctg

SEQ ID NO: 1425284 - DNA, 25 bp, Homo sapien
tcctgtctgcacaattagctattca

SEQ ID NO: 1425285 - DNA, 25 bp, Homo sapien
gagagcagagatacagtgagaaatt

SEQ ID NO: 1425286 - DNA, 25 bp, Homo sapien
cttgctaactgaagtttcagatacc

SEQ ID NO: 1425287 - DNA, 25 bp, Homo sapien
gctaactgaagtttcagatacctcc

SEQ ID NO: 1425288 - DNA, 25 bp, Homo sapien
actgaagtttcagatacctccagga

SEQ ID NO: 1425289 - DNA, 25 bp, Homo sapien
cacttgctaactgaagtttcagata

SEQ ID NO: 1425290 - DNA, 25 bp, Homo sapien
ggtgctttgttagctcgggtccgca

SEQ ID NO: 1425291 - DNA, 25 bp, Homo sapien
aggtgctttgttagctcgggtccgc

SEQ ID NO: 1425292 - DNA, 25 bp, Homo sapien
gtgctttgttagctcgggtccgcat

SEQ ID NO: 1425293 - DNA, 25 bp, Homo sapien
tctgttgcttggtggagtacacaca

SEQ ID NO: 1425294 - DNA, 25 bp, Homo sapien
cctatggaacaagatgacggctgaa

SEQ ID NO: 1425295 - DNA, 25 bp, Homo sapien
tagaagacccaggagtggttctccc

SEQ ID NO: 1425296 - DNA, 25 bp, Homo sapien
tgcattctggaacgcttgagctctc

SEQ ID NO: 1425297 - DNA, 25 bp, Homo sapien
gacacagccttgttggcgtccaagt

SEQ ID NO: 1425298 - DNA, 25 bp, Homo sapien
cagtgaagtccaggagtagggaccc

SEQ ID NO: 1425299 - DNA, 25 bp, Homo sapien
tgtaaatagaagaggtgacagcacc

SEQ ID NO: 1425300 - DNA, 25 bp, Homo sapien
ccttcctgtcttgtcgttggtgagg

SEQ ID NO: 1425301 - DNA, 25 bp, Homo sapien
ggcttttggtgggtgaaccacttca

SEQ ID NO: 1425302 - DNA, 25 bp, Homo sapien
gatgtgaactgctgaggaaatcccc

SEQ ID NO: 1425303 - DNA, 25 bp, Homo sapien
tgctgcttgccacagagggaataaa

SEQ ID NO: 1425304 - DNA, 25 bp, Homo sapien
caaagacaatgtgagttgaagtaag

SEQ ID NO: 1425305 - DNA, 25 bp, Homo sapien
ttcaagcttttagtgtccacacatg

SEQ ID NO: 1425306 - DNA, 25 bp, Homo sapien
caagcttttagtgtccacacatgta

SEQ ID NO: 1425307 - DNA, 25 bp, Homo sapien
gcttttagtgtccacacatgtaaaa

SEQ ID NO: 1425308 - DNA, 25 bp, Homo sapien
ttttcaagcttttagtgtccacaca

SEQ ID NO: 1425309 - DNA, 25 bp, Homo sapien
taatgagagataggagcatgagggc

SEQ ID NO: 1425310 - DNA, 25 bp, Homo sapien
ggagacaattgtttcattgaggtga

SEQ ID NO: 1425311 - DNA, 25 bp, Homo sapien
ctgggaacattggagacaattgttt

SEQ ID NO: 1425312 - DNA, 25 bp, Homo sapien
tgagagataggagcatgagggctct

SEQ ID NO: 1425313 - DNA, 25 bp, Homo sapien
tgtcaacttgaggttctttatttgt

SEQ ID NO: 1425314 - DNA, 25 bp, Homo sapien
tgatccttcgggttctttgtcaact

SEQ ID NO: 1425315 - DNA, 25 bp, Homo sapien
atttggtgatccttcgggttctttg

SEQ ID NO: 1425316 - DNA, 25 bp, Homo sapien
tccttcgggttctttgtcaacttga

SEQ ID NO: 1425317 - DNA, 25 bp, Homo sapien
aacagaacacagcactggtagtata

SEQ ID NO: 1425318 - DNA, 25 bp, Homo sapien
gagggctacagaaaggaaagtctaa

SEQ ID NO: 1425319 - DNA, 25 bp, Homo sapien
agatgagaagcaccgcagagggcta

SEQ ID NO: 1425320 - DNA, 25 bp, Homo sapien
cacagcactggtagtatagaaattc

SEQ ID NO: 1425321 - DNA, 25 bp, Homo sapien
tccccacactgtttgtcaactttta

SEQ ID NO: 1425322 - DNA, 25 bp, Homo sapien
tgagtttgtcactgtttccccacac

SEQ ID NO: 1425323 - DNA, 25 bp, Homo sapien
ccacactgtttgtcaacttttactt

SEQ ID NO: 1425324 - DNA, 25 bp, Homo sapien
ctgagtttgtcactgtttccccaca

SEQ ID NO: 1425325 - DNA, 25 bp, Homo sapien
gacaacctgaggatgtttgcagcct

SEQ ID NO: 1425326 - DNA, 25 bp, Homo sapien
agtgcataatcagacaacctgagga

SEQ ID NO: 1425327 - DNA, 25 bp, Homo sapien
gggtgttttccatgttcgctttgca

SEQ ID NO: 1425328 - DNA, 25 bp, Homo sapien
ggctgagctgtctactctttatgag

SEQ ID NO: 1425329 - DNA, 25 bp, Homo sapien
tgctaattaatgcttgggagaactg

SEQ ID NO: 1425330 - DNA, 25 bp, Homo sapien
tgggggcagattatttctactaggc

SEQ ID NO: 1425331 - DNA, 25 bp, Homo sapien
aatcactggaatgtcatgggggcag

SEQ ID NO: 1425332 - DNA, 25 bp, Homo sapien
tccttccgctgttcatgaatatttg

SEQ ID NO: 1425333 - DNA, 25 bp, Homo sapien
gcaaaagtctccttatgtctcaagt

SEQ ID NO: 1425334 - DNA, 25 bp, Homo sapien
cctgcattagttcacaaacacaact

SEQ ID NO: 1425335 - DNA, 25 bp, Homo sapien
tctcttctggtagttcccatggaag

SEQ ID NO: 1425336 - DNA, 25 bp, Homo sapien
tcacattgcaccatataaaagaggg

SEQ ID NO: 1425337 - DNA, 25 bp, Homo sapien
gattagtattccatgttccctgagg

SEQ ID NO: 1425338 - DNA, 25 bp, Homo sapien
tacagaatgtcgactcaggaaggag

SEQ ID NO: 1425339 - DNA, 25 bp, Homo sapien
tattacaactatccaggacaaagga

SEQ ID NO: 1425340 - DNA, 25 bp, Homo sapien
ctgggaatctggtccaagggcacta

SEQ ID NO: 1425341 - DNA, 25 bp, Homo sapien
gagcagctgacttattctgatgtgg

SEQ ID NO: 1425342 - DNA, 25 bp, Homo sapien
cactgcttatgtggacatggtgtac

SEQ ID NO: 1425343 - DNA, 25 bp, Homo sapien
tctgatgtggttttgcggttataca

SEQ ID NO: 1425344 - DNA, 25 bp, Homo sapien
ttttgcggttatacagtaagcagca

SEQ ID NO: 1425345 - DNA, 25 bp, Homo sapien
cacaactccgaggtgtatcagggat

SEQ ID NO: 1425346 - DNA, 25 bp, Homo sapien
cagggattgttatacgtcttgaaga

SEQ ID NO: 1425347 - DNA, 25 bp, Homo sapien
aagagccgctgttagaggattctga

SEQ ID NO: 1425348 - DNA, 25 bp, Homo sapien
gatatcccacatgtctggtacttgg

SEQ ID NO: 1425349 - DNA, 25 bp, Homo sapien
ggagtgtatagaccgggtagctcat

SEQ ID NO: 1425350 - DNA, 25 bp, Homo sapien
aaggcagagacccaagaaaaatggg

SEQ ID NO: 1425351 - DNA, 25 bp, Homo sapien
agagacctgggtaggagtgtataga

SEQ ID NO: 1425352 - DNA, 25 bp, Homo sapien
tgcaggagctgtgtcaagggtgttt

SEQ ID NO: 1425353 - DNA, 25 bp, Homo sapien
tagaagaagggctcgacagtctcag

SEQ ID NO: 1425354 - DNA, 25 bp, Homo sapien
cgatcctggcacactactgagagca

SEQ ID NO: 1425355 - DNA, 25 bp, Homo sapien
gcttaaactctcactggaatgccga

SEQ ID NO: 1425356 - DNA, 25 bp, Homo sapien
cagtctcagttcaaaaggtctcaca

SEQ ID NO: 1425357 - DNA, 25 bp, Homo sapien
gctttccaggagttctattgcttcc

SEQ ID NO: 1425358 - DNA, 25 bp, Homo sapien
tgtagctttccaggagttctattgc

SEQ ID NO: 1425359 - DNA, 25 bp, Homo sapien
tttttgcaaacacggtgacataatg

SEQ ID NO: 1425360 - DNA, 25 bp, Homo sapien
ttgcaaacacggtgacataatgact

SEQ ID NO: 1425361 - DNA, 25 bp, Homo sapien
gaagctcccacacaggtacaactga

SEQ ID NO: 1425362 - DNA, 25 bp, Homo sapien
ggaagacaagatatatgcacacaaa

SEQ ID NO: 1425363 - DNA, 25 bp, Homo sapien
tgttcctagcattgtgacacacctg

SEQ ID NO: 1425364 - DNA, 25 bp, Homo sapien
gaatattcctccaaagaacactgtg

SEQ ID NO: 1425365 - DNA, 25 bp, Homo sapien
agagataaacaggggctgaactctt

SEQ ID NO: 1425366 - DNA, 25 bp, Homo sapien
tcaggtagtatgctcggagaaagcc

SEQ ID NO: 1425367 - DNA, 25 bp, Homo sapien
tgctccagactggcgtactgagagt

SEQ ID NO: 1425368 - DNA, 25 bp, Homo sapien
gcaggggtgaatttggtgtgctcca

SEQ ID NO: 1425369 - DNA, 25 bp, Homo sapien
ggtagggcgttctgtattaaatgga

SEQ ID NO: 1425370 - DNA, 25 bp, Homo sapien
cttgtggttaaggagtagagaagca

SEQ ID NO: 1425371 - DNA, 25 bp, Homo sapien
gagatattgtctaccagagacccca

SEQ ID NO: 1425372 - DNA, 25 bp, Homo sapien
tttatcttatagtggaaggtagggc

SEQ ID NO: 1425373 - DNA, 25 bp, Homo sapien
tttttaggttcaagggtacatatgc

SEQ ID NO: 1425374 - DNA, 25 bp, Homo sapien
ttttagagccgaccgagtccttgtc

SEQ ID NO: 1425375 - DNA, 25 bp, Homo sapien
ccgagtccttgtcactcatgcagca

SEQ ID NO: 1425376 - DNA, 25 bp, Homo sapien
cgagtccttgtcactcatgcagcaa

SEQ ID NO: 1425377 - DNA, 25 bp, Homo sapien
ttggtgttttagagccgaccgagtc

SEQ ID NO: 1425378 - DNA, 25 bp, Homo sapien
gatctatcatctccacacgatgagc

SEQ ID NO: 1425379 - DNA, 25 bp, Homo sapien
tgtctttgagcagcaagactctcag

SEQ ID NO: 1425380 - DNA, 25 bp, Homo sapien
tccacacgatgagccatgtctgtga

SEQ ID NO: 1425381 - DNA, 25 bp, Homo sapien
tgtctgtgagttgggttcttgatgt

SEQ ID NO: 1425382 - DNA, 25 bp, Homo sapien
gttctgaaaactgccgaagtgcatt

SEQ ID NO: 1425383 - DNA, 25 bp, Homo sapien
tcagagttctgaaaactgccgaagt

SEQ ID NO: 1425384 - DNA, 25 bp, Homo sapien
gagttctgaaaactgccgaagtgca

SEQ ID NO: 1425385 - DNA, 25 bp, Homo sapien
gaaaactgccgaagtgcattcacct

SEQ ID NO: 1425386 - DNA, 25 bp, Homo sapien
gtttttaccacagtgagttcctgga

SEQ ID NO: 1425387 - DNA, 25 bp, Homo sapien
agtactaccttgataacacaatggg

SEQ ID NO: 1425388 - DNA, 25 bp, Homo sapien
ggtacagtccaacacaagcggtgca

SEQ ID NO: 1425389 - DNA, 25 bp, Homo sapien
aagcggtgcagaaagtccccagttt

SEQ ID NO: 1425390 - DNA, 25 bp, Homo sapien
aaagctcagtgagggcatgcttctg

SEQ ID NO: 1425391 - DNA, 25 bp, Homo sapien
tcaaggagcttcagcctcataactg

SEQ ID NO: 1425392 - DNA, 25 bp, Homo sapien
tatgtgtcagatagggtgataatcc

SEQ ID NO: 1425393 - DNA, 25 bp, Homo sapien
gcgcttcctgtcaaaggcccaagaa

SEQ ID NO: 1425394 - DNA, 25 bp, Homo sapien
atagtcctgagaggccttggatgcc

SEQ ID NO: 1425395 - DNA, 25 bp, Homo sapien
taaggaaggtgctggatagtcctga

SEQ ID NO: 1425396 - DNA, 25 bp, Homo sapien
tcccctgggaagttagctccaaggc

SEQ ID NO: 1425397 - DNA, 25 bp, Homo sapien
aaggcatttagtcctgctggtgtga

SEQ ID NO: 1425398 - DNA, 25 bp, Homo sapien
catagtacactaccctcagtgttgt

SEQ ID NO: 1425399 - DNA, 25 bp, Homo sapien
tagtacactaccctcagtgttgtgc

SEQ ID NO: 1425400 - DNA, 25 bp, Homo sapien
ccatagtacactaccctcagtgttg

SEQ ID NO: 1425401 - DNA, 25 bp, Homo sapien
tcccatagtacactaccctcagtgt

SEQ ID NO: 1425402 - DNA, 25 bp, Homo sapien
atagtgttaagatcaggttggatct

SEQ ID NO: 1425403 - DNA, 25 bp, Homo sapien
gcccattaggaggagccaagttttc

SEQ ID NO: 1425404 - DNA, 25 bp, Homo sapien
tacaagtgacaaacgtattccttcg

SEQ ID NO: 1425405 - DNA, 25 bp, Homo sapien
tggtatggagccacacactcattaa

SEQ ID NO: 1425406 - DNA, 25 bp, Homo sapien
tgtatggcaaggctgttgggctgtc

SEQ ID NO: 1425407 - DNA, 25 bp, Homo sapien
tctcattatcaggtctactggaaaa

SEQ ID NO: 1425408 - DNA, 25 bp, Homo sapien
cattatcaggtctactggaaaatcc

SEQ ID NO: 1425409 - DNA, 25 bp, Homo sapien
cctgtatggcaaggctgttgggctg

SEQ ID NO: 1425410 - DNA, 25 bp, Homo sapien
aagcttcagcgcaaaacattttggt

SEQ ID NO: 1425411 - DNA, 25 bp, Homo sapien
agcttcagcgcaaaacattttggta

SEQ ID NO: 1425412 - DNA, 25 bp, Homo sapien
gcttcagcgcaaaacattttggtac

SEQ ID NO: 1425413 - DNA, 25 bp, Homo sapien
ttcagcgcaaaacattttggtacca

SEQ ID NO: 1425414 - DNA, 25 bp, Homo sapien
tgcaggacagtagcaaggtaagtca

SEQ ID NO: 1425415 - DNA, 25 bp, Homo sapien
gcaggacagtagcaaggtaagtcat

SEQ ID NO: 1425416 - DNA, 25 bp, Homo sapien
ctgcaggacagtagcaaggtaagtc

SEQ ID NO: 1425417 - DNA, 25 bp, Homo sapien
ttgggtccaaaagaggcctaagcca

SEQ ID NO: 1425418 - DNA, 25 bp, Homo sapien
taatagaactacaggaggcagccag

SEQ ID NO: 1425419 - DNA, 25 bp, Homo sapien
ggagctcaggtcttctaaaacatct

SEQ ID NO: 1425420 - DNA, 25 bp, Homo sapien
ttcttgtaaagctaggttgggtcca

SEQ ID NO: 1425421 - DNA, 25 bp, Homo sapien
agcttcacatagcagcggtttcgta

SEQ ID NO: 1425422 - DNA, 25 bp, Homo sapien
cttcacatagcagcggtttcgtacc

SEQ ID NO: 1425423 - DNA, 25 bp, Homo sapien
tcagcttcacatagcagcggtttcg

SEQ ID NO: 1425424 - DNA, 25 bp, Homo sapien
atcagcttcacatagcagcggtttc

SEQ ID NO: 1425425 - DNA, 25 bp, Homo sapien
gctcaattctaccgccaaaacattt

SEQ ID NO: 1425426 - DNA, 25 bp, Homo sapien
ctgctcaattctaccgccaaaacat

SEQ ID NO: 1425427 - DNA, 25 bp, Homo sapien
ctcaattctaccgccaaaacatttt

SEQ ID NO: 1425428 - DNA, 25 bp, Homo sapien
tgctcaattctaccgccaaaacatt

SEQ ID NO: 1425429 - DNA, 25 bp, Homo sapien
tcaggctagtttgtacaccatttta

SEQ ID NO: 1425430 - DNA, 25 bp, Homo sapien
gcacttgactctccattgatggtga

SEQ ID NO: 1425431 - DNA, 25 bp, Homo sapien
taactccagtatagctttgcatcag

SEQ ID NO: 1425432 - DNA, 25 bp, Homo sapien
tgcatcagtgaactaccatcatcct

SEQ ID NO: 1425433 - DNA, 25 bp, Homo sapien
cagctggggactgagtctttctgct

SEQ ID NO: 1425434 - DNA, 25 bp, Homo sapien
tgcttctcagcccagattatcatca

SEQ ID NO: 1425435 - DNA, 25 bp, Homo sapien
cagcccagattatcatcagcctgga

SEQ ID NO: 1425436 - DNA, 25 bp, Homo sapien
catacagtactgagaggggccgtgg

SEQ ID NO: 1425437 - DNA, 25 bp, Homo sapien
cagtgtcttcagaaccatgctgttc

SEQ ID NO: 1425438 - DNA, 25 bp, Homo sapien
tgttctctgcttggctcctccttgc

SEQ ID NO: 1425439 - DNA, 25 bp, Homo sapien
catgctgttctctgcttggctcctc

SEQ ID NO: 1425440 - DNA, 25 bp, Homo sapien
ctccagtgtcttcagaaccatgctg

SEQ ID NO: 1425441 - DNA, 25 bp, Homo sapien
ccatgacattcagctactttcaata

SEQ ID NO: 1425442 - DNA, 25 bp, Homo sapien
cacttttagattctggcctaaaata

SEQ ID NO: 1425443 - DNA, 25 bp, Homo sapien
tgcctaggttcactttgtcttctcc

SEQ ID NO: 1425444 - DNA, 25 bp, Homo sapien
aaaacaaagatttgccatctttggg

SEQ ID NO: 1425445 - DNA, 25 bp, Homo sapien
tcttctcacacggaatggggaaggc

SEQ ID NO: 1425446 - DNA, 25 bp, Homo sapien
cctgacactacagcatccagatggc

SEQ ID NO: 1425447 - DNA, 25 bp, Homo sapien
tacttcccctgacactacagcatcc

SEQ ID NO: 1425448 - DNA, 25 bp, Homo sapien
gtcagtcttctcacacggaatgggg

SEQ ID NO: 1425449 - DNA, 25 bp, Homo sapien
caccaagcacttcggtgggccaggg

SEQ ID NO: 1425450 - DNA, 25 bp, Homo sapien
tggcccctgaatgtaaccagggtgt

SEQ ID NO: 1425451 - DNA, 25 bp, Homo sapien
tgagtattcctcacatcctgagtcc

SEQ ID NO: 1425452 - DNA, 25 bp, Homo sapien
gaggccatgaagatggcacatccat

SEQ ID NO: 1425453 - DNA, 25 bp, Homo sapien
ggtctatccacactgaaaggataag

SEQ ID NO: 1425454 - DNA, 25 bp, Homo sapien
cctttggtcctgatcagctgaccag

SEQ ID NO: 1425455 - DNA, 25 bp, Homo sapien
cattggtctatccacactgaaagga

SEQ ID NO: 1425456 - DNA, 25 bp, Homo sapien
tctgccattggtctatccacactga

SEQ ID NO: 1425457 - DNA, 25 bp, Homo sapien
ttctttggcaaggaaaggtggtagc

SEQ ID NO: 1425458 - DNA, 25 bp, Homo sapien
gactgtgcaagaaaggttcacgtgg

SEQ ID NO: 1425459 - DNA, 25 bp, Homo sapien
tctttggcaaggaaaggtggtagct

SEQ ID NO: 1425460 - DNA, 25 bp, Homo sapien
gttgaggactgtgcaagaaaggttc

SEQ ID NO: 1425461 - DNA, 25 bp, Homo sapien
cagggccagcacatgttgagtggtt

SEQ ID NO: 1425462 - DNA, 25 bp, Homo sapien
tggtttggttgggttatgacattac

SEQ ID NO: 1425463 - DNA, 25 bp, Homo sapien
gggttatgacattacttggagccat

SEQ ID NO: 1425464 - DNA, 25 bp, Homo sapien
ccagcacatgttgagtggtttggtt

SEQ ID NO: 1425465 - DNA, 25 bp, Homo sapien
gacagctcctcctgtcattaccctc

SEQ ID NO: 1425466 - DNA, 25 bp, Homo sapien
acagctcctcctgtcattaccctca

SEQ ID NO: 1425467 - DNA, 25 bp, Homo sapien
cagctcctcctgtcattaccctcat

SEQ ID NO: 1425468 - DNA, 25 bp, Homo sapien
tttgcaaactgtggaaagctagcta

SEQ ID NO: 1425469 - DNA, 25 bp, Homo sapien
ttggttgggataaggcctgaacagc

SEQ ID NO: 1425470 - DNA, 25 bp, Homo sapien
acatttgactaagatgggccctgca

SEQ ID NO: 1425471 - DNA, 25 bp, Homo sapien
taaagctgagacagtgcaatgcagg

SEQ ID NO: 1425472 - DNA, 25 bp, Homo sapien
taaagcaccctgcatcctgaggaag

SEQ ID NO: 1425473 - DNA, 25 bp, Homo sapien
tcggaatgactcctttgataaggct

SEQ ID NO: 1425474 - DNA, 25 bp, Homo sapien
caaagctctacgtgagggttcggaa

SEQ ID NO: 1425475 - DNA, 25 bp, Homo sapien
gaaatttccagatagcgtacattcc

SEQ ID NO: 1425476 - DNA, 25 bp, Homo sapien
ttacagcagcccaagaatatgagaa

SEQ ID NO: 1425477 - DNA, 25 bp, Homo sapien
gatgaaaattcacgtgcagaggagt

SEQ ID NO: 1425478 - DNA, 25 bp, Homo sapien
cctctacatgtgctgaagggaatga

SEQ ID NO: 1425479 - DNA, 25 bp, Homo sapien
aaaagtctttggctcttcccctgag

SEQ ID NO: 1425480 - DNA, 25 bp, Homo sapien
ctaggagatgaattggggatttgct

SEQ ID NO: 1425481 - DNA, 25 bp, Homo sapien
aattggggatttgctagtaaaatga

SEQ ID NO: 1425482 - DNA, 25 bp, Homo sapien
tggggatttgctagtaaaatgatac

SEQ ID NO: 1425483 - DNA, 25 bp, Homo sapien
gatgaattggggatttgctagtaaa

SEQ ID NO: 1425484 - DNA, 25 bp, Homo sapien
ttatacagccgcacctcaaaaggag

SEQ ID NO: 1425485 - DNA, 25 bp, Homo sapien
cttattcacgcaaggaggttcagaa

SEQ ID NO: 1425486 - DNA, 25 bp, Homo sapien
ttgaatatcaagtctatggtgtccc

SEQ ID NO: 1425487 - DNA, 25 bp, Homo sapien
tcattgtagtttgcattgggagcca

SEQ ID NO: 1425488 - DNA, 25 bp, Homo sapien
aacttagccatacagggctccttag

SEQ ID NO: 1425489 - DNA, 25 bp, Homo sapien
tagccatacagggctccttagcagt

SEQ ID NO: 1425490 - DNA, 25 bp, Homo sapien
cttagccatacagggctccttagca

SEQ ID NO: 1425491 - DNA, 25 bp, Homo sapien
aaacttagccatacagggctcctta

SEQ ID NO: 1425492 - DNA, 25 bp, Homo sapien
ctattgagcaaaagagccacagctt

SEQ ID NO: 1425493 - DNA, 25 bp, Homo sapien
gaaatagcaacataactattgagca

SEQ ID NO: 1425494 - DNA, 25 bp, Homo sapien
gctccttgagttcttgaatggctta

SEQ ID NO: 1425495 - DNA, 25 bp, Homo sapien
taaagattagccaactgaaggagca

SEQ ID NO: 1425496 - DNA, 25 bp, Homo sapien
tcatcaatttctagtgtatagaatg

SEQ ID NO: 1425497 - DNA, 25 bp, Homo sapien
catcaatttctagtgtatagaatgc

SEQ ID NO: 1425498 - DNA, 25 bp, Homo sapien
atttctagtgtatagaatgcgttca

SEQ ID NO: 1425499 - DNA, 25 bp, Homo sapien
caatttctagtgtatagaatgcgtt

SEQ ID NO: 1425500 - DNA, 25 bp, Homo sapien
tgatcgtcaatagtccagggaacat

SEQ ID NO: 1425501 - DNA, 25 bp, Homo sapien
gatgccaagtctgtagatcctgagg

SEQ ID NO: 1425502 - DNA, 25 bp, Homo sapien
tctgacctttatcaagagcagcctg

SEQ ID NO: 1425503 - DNA, 25 bp, Homo sapien
tagattacagtcatggccacttgca

SEQ ID NO: 1425504 - DNA, 25 bp, Homo sapien
aaatattcctgagagtggtaattgt

SEQ ID NO: 1425505 - DNA, 25 bp, Homo sapien
tccctgaaggccaatgtcctatata

SEQ ID NO: 1425506 - DNA, 25 bp, Homo sapien
aaatataacacttgtcctgagaagg

SEQ ID NO: 1425507 - DNA, 25 bp, Homo sapien
aattgttgagataaattcacacaaa

SEQ ID NO: 1425508 - DNA, 25 bp, Homo sapien
cccagctccttaatacccaaataag

SEQ ID NO: 1425509 - DNA, 25 bp, Homo sapien
aactgcctgttctctagtggtccga

SEQ ID NO: 1425510 - DNA, 25 bp, Homo sapien
aatctgcctttaattccccgaactg

SEQ ID NO: 1425511 - DNA, 25 bp, Homo sapien
gtggtccgatgagctcccagctcct

SEQ ID NO: 1425512 - DNA, 25 bp, Homo sapien
catgaatgtttcaaggaagtggcac

SEQ ID NO: 1425513 - DNA, 25 bp, Homo sapien
tccagccagtaaggtccggagacat

SEQ ID NO: 1425514 - DNA, 25 bp, Homo sapien
aagctagaagtgaggtaaggccatc

SEQ ID NO: 1425515 - DNA, 25 bp, Homo sapien
gatgtggcttcggttctgcctgtgc

SEQ ID NO: 1425516 - DNA, 25 bp, Homo sapien
tctcgtcactcataacctgaggatg

SEQ ID NO: 1425517 - DNA, 25 bp, Homo sapien
tgtctctttctcgtcactcataacc

SEQ ID NO: 1425518 - DNA, 25 bp, Homo sapien
taacctgaggatgatcatgtaggcc

SEQ ID NO: 1425519 - DNA, 25 bp, Homo sapien
gaggatgatcatgtaggcctcccat

SEQ ID NO: 1425520 - DNA, 25 bp, Homo sapien
tagcccatgttgctggaggttatcc

SEQ ID NO: 1425521 - DNA, 25 bp, Homo sapien
ccgtcctttgccatgtagatggaga

SEQ ID NO: 1425522 - DNA, 25 bp, Homo sapien
agagatgcggccgtcctttgccatg

SEQ ID NO: 1425523 - DNA, 25 bp, Homo sapien
catgttgctggaggttatccctgcc

SEQ ID NO: 1425524 - DNA, 25 bp, Homo sapien
cagtgatgtgttgccagttgtgagt

SEQ ID NO: 1425525 - DNA, 25 bp, Homo sapien
agtgatgtgttgccagttgtgagtg

SEQ ID NO: 1425526 - DNA, 25 bp, Homo sapien
gtcagtgatgtgttgccagttgtga

SEQ ID NO: 1425527 - DNA, 25 bp, Homo sapien
tcagtgatgtgttgccagttgtgag

SEQ ID NO: 1425528 - DNA, 25 bp, Homo sapien
tgtttggaatggtagaagcaatctg

SEQ ID NO: 1425529 - DNA, 25 bp, Homo sapien
tctgggccccattgaggggagagtt

SEQ ID NO: 1425530 - DNA, 25 bp, Homo sapien
gggtgtttggaatggtagaagcaat

SEQ ID NO: 1425531 - DNA, 25 bp, Homo sapien
atctgggccccattgaggggagagt

SEQ ID NO: 1425532 - DNA, 25 bp, Homo sapien
tgtcaaagagcgcaaagagattcct

SEQ ID NO: 1425533 - DNA, 25 bp, Homo sapien
gattccttttcttcacaactgttgc

SEQ ID NO: 1425534 - DNA, 25 bp, Homo sapien
tgccctgttcgatgaagtggtgcag

SEQ ID NO: 1425535 - DNA, 25 bp, Homo sapien
tgaaggctcctacatgctcaccata

SEQ ID NO: 1425536 - DNA, 25 bp, Homo sapien
cataataccgataacattgtagctg

SEQ ID NO: 1425537 - DNA, 25 bp, Homo sapien
gcaaatcttggggtcataataccga

SEQ ID NO: 1425538 - DNA, 25 bp, Homo sapien
aaactgcaaatcttggggtcataat

SEQ ID NO: 1425539 - DNA, 25 bp, Homo sapien
agcgcccgtgaagtcaaaactgcaa

SEQ ID NO: 1425540 - DNA, 25 bp, Homo sapien
tgctgttttcacccagggttggttc

SEQ ID NO: 1425541 - DNA, 25 bp, Homo sapien
tttcacccagggttggttctacaga

SEQ ID NO: 1425542 - DNA, 25 bp, Homo sapien
tcacccagggttggttctacagatg

SEQ ID NO: 1425543 - DNA, 25 bp, Homo sapien
cacccagggttggttctacagatgc

SEQ ID NO: 1425544 - DNA, 25 bp, Homo sapien
cctcttaaaggcttcagtgactccc

SEQ ID NO: 1425545 - DNA, 25 bp, Homo sapien
ggcttcagtgactcccaggatggga

SEQ ID NO: 1425546 - DNA, 25 bp, Homo sapien
ttaaaggcttcagtgactcccagga

SEQ ID NO: 1425547 - DNA, 25 bp, Homo sapien
ggtcccatttccacatgggtccacc

SEQ ID NO: 1425548 - DNA, 25 bp, Homo sapien
ggctgcggtaatcccggagaggagt

SEQ ID NO: 1425549 - DNA, 25 bp, Homo sapien
ctgggtggaaggctgcggtaatccc

SEQ ID NO: 1425550 - DNA, 25 bp, Homo sapien
tggaaggctgcggtaatcccggaga

SEQ ID NO: 1425551 - DNA, 25 bp, Homo sapien
aaggctgcggtaatcccggagagga

SEQ ID NO: 1425552 - DNA, 25 bp, Homo sapien
ccctggtcatcacgggaaaggagtg

SEQ ID NO: 1425553 - DNA, 25 bp, Homo sapien
gacatgtggctagacctcaactttt

SEQ ID NO: 1425554 - DNA, 25 bp, Homo sapien
gagtgggacatgtggctagacctca

SEQ ID NO: 1425555 - DNA, 25 bp, Homo sapien
ctgcccctggtcatcacgggaaagg

SEQ ID NO: 1425556 - DNA, 25 bp, Homo sapien
ttcaaactcagtgaatcctacaacc

SEQ ID NO: 1425557 - DNA, 25 bp, Homo sapien
tcaaactcagtgaatcctacaacca

SEQ ID NO: 1425558 - DNA, 25 bp, Homo sapien
caaactcagtgaatcctacaaccat

SEQ ID NO: 1425559 - DNA, 25 bp, Homo sapien
attcaaactcagtgaatcctacaac

SEQ ID NO: 1425560 - DNA, 25 bp, Homo sapien
aaagcccgccaagaagtttgcctag

SEQ ID NO: 1425561 - DNA, 25 bp, Homo sapien
taacaactgtttcggtactgaccaa

SEQ ID NO: 1425562 - DNA, 25 bp, Homo sapien
gaaattgtggcaggccatgtctcac

SEQ ID NO: 1425563 - DNA, 25 bp, Homo sapien
agaaaaagcccgtgccctcatgcaa

SEQ ID NO: 1425564 - DNA, 25 bp, Homo sapien
ttaacttacgtgctgcctcaccttt

SEQ ID NO: 1425565 - DNA, 25 bp, Homo sapien
agtacatctgtgtctcattattggg

SEQ ID NO: 1425566 - DNA, 25 bp, Homo sapien
agctaattaacttacgtgctgcctc

SEQ ID NO: 1425567 - DNA, 25 bp, Homo sapien
tacatctgtgtctcattattgggcc

SEQ ID NO: 1425568 - DNA, 25 bp, Homo sapien
cgtgatctttattatgttaagctac

SEQ ID NO: 1425569 - DNA, 25 bp, Homo sapien
ctgtgagcttgtcatacgtgatctt

SEQ ID NO: 1425570 - DNA, 25 bp, Homo sapien
taagctacattctttgtatacctca

SEQ ID NO: 1425571 - DNA, 25 bp, Homo sapien
gcctatttgctctaactaaaacttc

SEQ ID NO: 1425572 - DNA, 25 bp, Homo sapien
caagtcccttttgccaacgaacctg

SEQ ID NO: 1425573 - DNA, 25 bp, Homo sapien
tcaaaatccatagtctcgtctgaga

SEQ ID NO: 1425574 - DNA, 25 bp, Homo sapien
aaatttacaatcatgacggcagggg

SEQ ID NO: 1425575 - DNA, 25 bp, Homo sapien
catgaggtctctccccaacatgtag

SEQ ID NO: 1425576 - DNA, 25 bp, Homo sapien
tcatgtatctttacagtagcacccc

SEQ ID NO: 1425577 - DNA, 25 bp, Homo sapien
gaaacttacaatggtggcaggggaa

SEQ ID NO: 1425578 - DNA, 25 bp, Homo sapien
cccactctctgtggtaccagtttac

SEQ ID NO: 1425579 - DNA, 25 bp, Homo sapien
gcattgggaaacttacaatggtggc

SEQ ID NO: 1425580 - DNA, 25 bp, Homo sapien
taaatcttgagtgctttagaccaac

SEQ ID NO: 1425581 - DNA, 25 bp, Homo sapien
cataatctgtgacccgtggttggtg

SEQ ID NO: 1425582 - DNA, 25 bp, Homo sapien
ggcagtgatcagtagacctacaatt

SEQ ID NO: 1425583 - DNA, 25 bp, Homo sapien
gaacacaagcctccattgattctaa

SEQ ID NO: 1425584 - DNA, 25 bp, Homo sapien
tatacttaggcctgcatgtgcactg

SEQ ID NO: 1425585 - DNA, 25 bp, Homo sapien
aaactctgccatgtatatcgaaggg

SEQ ID NO: 1425586 - DNA, 25 bp, Homo sapien
catttagtgtaagggcgaacagccc

SEQ ID NO: 1425587 - DNA, 25 bp, Homo sapien
tcaatttaaccttggagaggccgct

SEQ ID NO: 1425588 - DNA, 25 bp, Homo sapien
cctagtaggctcaaggcaatcttgg

SEQ ID NO: 1425589 - DNA, 25 bp, Homo sapien
tggttttagatattgccatcagccc

SEQ ID NO: 1425590 - DNA, 25 bp, Homo sapien
caatgaagaatccatgccctgtcca

SEQ ID NO: 1425591 - DNA, 25 bp, Homo sapien
ggtgtgacggctaggcaatttagaa

SEQ ID NO: 1425592 - DNA, 25 bp, Homo sapien
tgtcagtggtcacattcaagtagac

SEQ ID NO: 1425593 - DNA, 25 bp, Homo sapien
gatgactgagttgttctgcaccttc

SEQ ID NO: 1425594 - DNA, 25 bp, Homo sapien
tttgtctttgtaagtcagagaggcc

SEQ ID NO: 1425595 - DNA, 25 bp, Homo sapien
ggataagaatcagttctccgccatt

SEQ ID NO: 1425596 - DNA, 25 bp, Homo sapien
tcaattaaacttttgacaatactta

SEQ ID NO: 1425597 - DNA, 25 bp, Homo sapien
tgaatcaattaaacttttgacaata

SEQ ID NO: 1425598 - DNA, 25 bp, Homo sapien
aatcaattaaacttttgacaatact

SEQ ID NO: 1425599 - DNA, 25 bp, Homo sapien
aatatgaatcaattaaacttttgac

SEQ ID NO: 1425600 - DNA, 25 bp, Homo sapien
tgatactttgaattcgaggataccg

SEQ ID NO: 1425601 - DNA, 25 bp, Homo sapien
tgtactttgatactttgaattcgag

SEQ ID NO: 1425602 - DNA, 25 bp, Homo sapien
gaattcgaggataccgatgtgatac

SEQ ID NO: 1425603 - DNA, 25 bp, Homo sapien
tactttgaattcgaggataccgatg

SEQ ID NO: 1425604 - DNA, 25 bp, Homo sapien
tcagtctctgtattcccatacaagt

SEQ ID NO: 1425605 - DNA, 25 bp, Homo sapien
gtttcagtctctgtattcccataca

SEQ ID NO: 1425606 - DNA, 25 bp, Homo sapien
ttcagtctctgtattcccatacaag

SEQ ID NO: 1425607 - DNA, 25 bp, Homo sapien
cagtctctgtattcccatacaagta

SEQ ID NO: 1425608 - DNA, 25 bp, Homo sapien
gtttagtgtcctagaaaccagcacc

SEQ ID NO: 1425609 - DNA, 25 bp, Homo sapien
tctcctggatattgatagtccaatg

SEQ ID NO: 1425610 - DNA, 25 bp, Homo sapien
tgacttgttggaaaggatcccctct

SEQ ID NO: 1425611 - DNA, 25 bp, Homo sapien
agtccaatgtgaccccaaccaccag

SEQ ID NO: 1425612 - DNA, 25 bp, Homo sapien
caatcagttagccttgaatggagcc

SEQ ID NO: 1425613 - DNA, 25 bp, Homo sapien
cccatggtgtaaggaaatatgtaac

SEQ ID NO: 1425614 - DNA, 25 bp, Homo sapien
ctcagggctcccagactggtgaatg

SEQ ID NO: 1425615 - DNA, 25 bp, Homo sapien
tgctcagagccgttgtgcaatcagt

SEQ ID NO: 1425616 - DNA, 25 bp, Homo sapien
gatgtcttgggcatccggtcgatgt

SEQ ID NO: 1425617 - DNA, 25 bp, Homo sapien
gcctaattccggttgatgtcttggg

SEQ ID NO: 1425618 - DNA, 25 bp, Homo sapien
cggtcgatgtcttgggcatcctgcc

SEQ ID NO: 1425619 - DNA, 25 bp, Homo sapien
aaagagcctaattccggttgatgtc

SEQ ID NO: 1425620 - DNA, 25 bp, Homo sapien
ctctccccgagtcgcctactttaat

SEQ ID NO: 1425621 - DNA, 25 bp, Homo sapien
gagaagtgcaggcagatgtaggtga

SEQ ID NO: 1425622 - DNA, 25 bp, Homo sapien
cagaggccaccagcaatagcttgtt

SEQ ID NO: 1425623 - DNA, 25 bp, Homo sapien
ttcctctcgaatcttggcctggctg

SEQ ID NO: 1425624 - DNA, 25 bp, Homo sapien
cagatgtaggtgaagcacaggagca

SEQ ID NO: 1425625 - DNA, 25 bp, Homo sapien
aggggaacgtgcgataaaactgaag

SEQ ID NO: 1425626 - DNA, 25 bp, Homo sapien
ccagggccagagataaaaggcgatt

SEQ ID NO: 1425627 - DNA, 25 bp, Homo sapien
cagaaaataggcaaaggtcccaggg

SEQ ID NO: 1425628 - DNA, 25 bp, Homo sapien
caaaacaaagcctatcaatcagaaa

SEQ ID NO: 1425629 - DNA, 25 bp, Homo sapien
gagagctagagtgtggagatatcac

SEQ ID NO: 1425630 - DNA, 25 bp, Homo sapien
tagtggaaggtaaaagagagctaga

SEQ ID NO: 1425631 - DNA, 25 bp, Homo sapien
tggctcacaattctgacggctgcaa

SEQ ID NO: 1425632 - DNA, 25 bp, Homo sapien
tgagagacctgctttcatgacccaa

SEQ ID NO: 1425633 - DNA, 25 bp, Homo sapien
atatgagacattaatcccctcttct

SEQ ID NO: 1425634 - DNA, 25 bp, Homo sapien
gatgagctttcacaattgtatacac

SEQ ID NO: 1425635 - DNA, 25 bp, Homo sapien
gggtagggtgccactagtatctagt

SEQ ID NO: 1425636 - DNA, 25 bp, Homo sapien
tctcaactaagggtagatttgcccc

SEQ ID NO: 1425637 - DNA, 25 bp, Homo sapien
aaatgggaccctaaagaagctcttg

SEQ ID NO: 1425638 - DNA, 25 bp, Homo sapien
taagagaattggctcagtgggaccg

SEQ ID NO: 1425639 - DNA, 25 bp, Homo sapien
gaacatgttaagcttccctgagcct

SEQ ID NO: 1425640 - DNA, 25 bp, Homo sapien
taagtaccatgtcgttcagcagatc

SEQ ID NO: 1425641 - DNA, 25 bp, Homo sapien
aggtgtaggctgcagtaagcagaca

SEQ ID NO: 1425642 - DNA, 25 bp, Homo sapien
taggctgcagtaagcagacatcacg

SEQ ID NO: 1425643 - DNA, 25 bp, Homo sapien
tgaactgggaggtgtaggctgcagt

SEQ ID NO: 1425644 - DNA, 25 bp, Homo sapien
gtaagcagacatcacgccactgtac

SEQ ID NO: 1425645 - DNA, 25 bp, Homo sapien
tactagagagtgagcaggtttgcag

SEQ ID NO: 1425646 - DNA, 25 bp, Homo sapien
gatgaatgagtagccaactaaagga

SEQ ID NO: 1425647 - DNA, 25 bp, Homo sapien
tgacaggaccattcttcaaggtgga

SEQ ID NO: 1425648 - DNA, 25 bp, Homo sapien
ttttaggaagtagagtcgacaagac

SEQ ID NO: 1425649 - DNA, 25 bp, Homo sapien
atttctcataaacaaggtccaggct

SEQ ID NO: 1425650 - DNA, 25 bp, Homo sapien
tttctcataaacaaggtccaggctc

SEQ ID NO: 1425651 - DNA, 25 bp, Homo sapien
ctatttctcataaacaaggtccagg

SEQ ID NO: 1425652 - DNA, 25 bp, Homo sapien
tatttctcataaacaaggtccaggc

SEQ ID NO: 1425653 - DNA, 25 bp, Homo sapien
gaaactgcagacttagtagaggcta

SEQ ID NO: 1425654 - DNA, 25 bp, Homo sapien
tcttcattgccaaaccaatcaggca

SEQ ID NO: 1425655 - DNA, 25 bp, Homo sapien
tagaggctacttgtgcaaatggtct

SEQ ID NO: 1425656 - DNA, 25 bp, Homo sapien
tatttaactaaatcttacattcaag

SEQ ID NO: 1425657 - DNA, 25 bp, Homo sapien
aaaatacctcatttctatggcatgc

SEQ ID NO: 1425658 - DNA, 25 bp, Homo sapien
aaggcttgaccagaggagacttctc

SEQ ID NO: 1425659 - DNA, 25 bp, Homo sapien
cagtgacattagttggagaagggaa

SEQ ID NO: 1425660 - DNA, 25 bp, Homo sapien
gaattcagaccatcacaacacaagg

SEQ ID NO: 1425661 - DNA, 25 bp, Homo sapien
ctttccactcttcaaaggacagctg

SEQ ID NO: 1425662 - DNA, 25 bp, Homo sapien
tgtctatgcaaatcctttccactct

SEQ ID NO: 1425663 - DNA, 25 bp, Homo sapien
tgatttcacccacacactctgtcta

SEQ ID NO: 1425664 - DNA, 25 bp, Homo sapien
aaaggacagctgaaatccaaccaca

SEQ ID NO: 1425665 - DNA, 25 bp, Homo sapien
aaatgtgacgaagtcatttttcatg

SEQ ID NO: 1425666 - DNA, 25 bp, Homo sapien
tgataaagaccacagttgtaaatac

SEQ ID NO: 1425667 - DNA, 25 bp, Homo sapien
ataacctcaaaaaatgtgacgaagt

SEQ ID NO: 1425668 - DNA, 25 bp, Homo sapien
taaagaccacagttgtaaatacata

SEQ ID NO: 1425669 - DNA, 25 bp, Homo sapien
gttatctggcaacacacgaaaaaaa

SEQ ID NO: 1425670 - DNA, 25 bp, Homo sapien
agaagttatctggcaacacacgaaa

SEQ ID NO: 1425671 - DNA, 25 bp, Homo sapien
aagttatctggcaacacacgaaaaa

SEQ ID NO: 1425672 - DNA, 25 bp, Homo sapien
gaagttatctggcaacacacgaaaa

SEQ ID NO: 1425673 - DNA, 25 bp, Homo sapien
ccagggttgagtgccggattcaata

SEQ ID NO: 1425674 - DNA, 25 bp, Homo sapien
tgagtgccggattcaatagcccata

SEQ ID NO: 1425675 - DNA, 25 bp, Homo sapien
aaagccagggttgagtgccggattc

SEQ ID NO: 1425676 - DNA, 25 bp, Homo sapien
ggttgagtgccggattcaatagccc

SEQ ID NO: 1425677 - DNA, 25 bp, Homo sapien
ggccccaatctgcactgctgctttg

SEQ ID NO: 1425678 - DNA, 25 bp, Homo sapien
cagaaaaagtaggtgctaggagcaa

SEQ ID NO: 1425679 - DNA, 25 bp, Homo sapien
tgaaattatcctggccactcatcag

SEQ ID NO: 1425680 - DNA, 25 bp, Homo sapien
gcactgctgctttgttgaaattatc

SEQ ID NO: 1425681 - DNA, 25 bp, Homo sapien
ccatattgggagtctctccagccag

SEQ ID NO: 1425682 - DNA, 25 bp, Homo sapien
catattgggagtctctccagccagg

SEQ ID NO: 1425683 - DNA, 25 bp, Homo sapien
attgggagtctctccagccaggaac

SEQ ID NO: 1425684 - DNA, 25 bp, Homo sapien
tattgggagtctctccagccaggaa

SEQ ID NO: 1425685 - DNA, 25 bp, Homo sapien
agggatttcccccaatagtctctgc

SEQ ID NO: 1425686 - DNA, 25 bp, Homo sapien
ttcccccaatagtctctgcaagttt

SEQ ID NO: 1425687 - DNA, 25 bp, Homo sapien
atagtctctgcaagtttctctctcc

SEQ ID NO: 1425688 - DNA, 25 bp, Homo sapien
gatttcccccaatagtctctgcaag

SEQ ID NO: 1425689 - DNA, 25 bp, Homo sapien
ttttggcaacctcatctgtttcagg

SEQ ID NO: 1425690 - DNA, 25 bp, Homo sapien
cacataacaaattctccatatggtt

SEQ ID NO: 1425691 - DNA, 25 bp, Homo sapien
gcatcttcattgactctgagaatcc

SEQ ID NO: 1425692 - DNA, 25 bp, Homo sapien
ctgagaatcctacttattaattgct

SEQ ID NO: 1425693 - DNA, 25 bp, Homo sapien
ctgagaaatctagaagtgatcgttt

SEQ ID NO: 1425694 - DNA, 25 bp, Homo sapien
gtccatagctctgcagaagagcctt

SEQ ID NO: 1425695 - DNA, 25 bp, Homo sapien
tgataaacgggaaccaggaagtcca

SEQ ID NO: 1425696 - DNA, 25 bp, Homo sapien
caatcccaatgtctataatgtgatg

SEQ ID NO: 1425697 - DNA, 25 bp, Homo sapien
gttcctggctcacaaatgatgctcg

SEQ ID NO: 1425698 - DNA, 25 bp, Homo sapien
ccttgtgatgatattgggccgacct

SEQ ID NO: 1425699 - DNA, 25 bp, Homo sapien
ggccgacctggatggataatctaga

SEQ ID NO: 1425700 - DNA, 25 bp, Homo sapien
taaaacctatgcgtagttgggagct

SEQ ID NO: 1425701 - DNA, 25 bp, Homo sapien
accttcttggattcaattgtttctc

SEQ ID NO: 1425702 - DNA, 25 bp, Homo sapien
cagtaccttcttggattcaattgtt

SEQ ID NO: 1425703 - DNA, 25 bp, Homo sapien
tccagtaccttcttggattcaattg

SEQ ID NO: 1425704 - DNA, 25 bp, Homo sapien
ccatatctctccatccagtaccttc

SEQ ID NO: 1425705 - DNA, 25 bp, Homo sapien
ttcttaagagcacaaaatatagctc

SEQ ID NO: 1425706 - DNA, 25 bp, Homo sapien
ggcttatcggatggatgtactacat

SEQ ID NO: 1425707 - DNA, 25 bp, Homo sapien
aaggaaaggcttatcggatggatgt

SEQ ID NO: 1425708 - DNA, 25 bp, Homo sapien
cttaagagcacaaaatatagctctg

SEQ ID NO: 1425709 - DNA, 25 bp, Homo sapien
gctaatcaagggtacgaggcgtcta

SEQ ID NO: 1425710 - DNA, 25 bp, Homo sapien
gcgtctaaattgaaggcccagctct

SEQ ID NO: 1425711 - DNA, 25 bp, Homo sapien
agttcagaagcctcatgccagcagg

SEQ ID NO: 1425712 - DNA, 25 bp, Homo sapien
tacatggacggtcttgcctcaaggg

SEQ ID NO: 1425713 - DNA, 25 bp, Homo sapien
gagaaaaccagggactgggaccaca

SEQ ID NO: 1425714 - DNA, 25 bp, Homo sapien
ttgaattcccacagagaattaagca

SEQ ID NO: 1425715 - DNA, 25 bp, Homo sapien
tattgagtagaggtagtagaccaac

SEQ ID NO: 1425716 - DNA, 25 bp, Homo sapien
gaatggaacaatgctctgaataaga

SEQ ID NO: 1425717 - DNA, 25 bp, Homo sapien
tagcaaaaaacaggtgcaggtcact

SEQ ID NO: 1425718 - DNA, 25 bp, Homo sapien
gcatccagcagcaattgttattaca

SEQ ID NO: 1425719 - DNA, 25 bp, Homo sapien
ttttcataacaagggcaaatactgc

SEQ ID NO: 1425720 - DNA, 25 bp, Homo sapien
gcaggtcactctatagctaaaaagg

SEQ ID NO: 1425721 - DNA, 25 bp, Homo sapien
tgcccttgagacctgtagagccatc

SEQ ID NO: 1425722 - DNA, 25 bp, Homo sapien
gccatcagcatgcaacatcagcctg

SEQ ID NO: 1425723 - DNA, 25 bp, Homo sapien
cagtccccactaggtcaatgtccag

SEQ ID NO: 1425724 - DNA, 25 bp, Homo sapien
atctgactccaactccgagagaagc

SEQ ID NO: 1425725 - DNA, 25 bp, Homo sapien
tttccactgaacctaaggccttaga

SEQ ID NO: 1425726 - DNA, 25 bp, Homo sapien
gcgtatgctactaccagatgtccaa

SEQ ID NO: 1425727 - DNA, 25 bp, Homo sapien
tagttctccctgttcactactgttg

SEQ ID NO: 1425728 - DNA, 25 bp, Homo sapien
ccttccagagagattttgcgtatgc

SEQ ID NO: 1425729 - DNA, 25 bp, Homo sapien
caaacatcccttgcaaagtgaaaga

SEQ ID NO: 1425730 - DNA, 25 bp, Homo sapien
gtgcccagccctacgtcagtgatat

SEQ ID NO: 1425731 - DNA, 25 bp, Homo sapien
ggcacgatgcctactgggcctcttt

SEQ ID NO: 1425732 - DNA, 25 bp, Homo sapien
ggtacagtggtatgggaaacatcca

SEQ ID NO: 1425733 - DNA, 25 bp, Homo sapien
gctggcacctgagtggagtaaggct

SEQ ID NO: 1425734 - DNA, 25 bp, Homo sapien
aggatgagaagggtgactgcctcac

SEQ ID NO: 1425735 - DNA, 25 bp, Homo sapien
cctcactcggtgcagactgctggca

SEQ ID NO: 1425736 - DNA, 25 bp, Homo sapien
tgactgcctcactcggtgcagactg

SEQ ID NO: 1425737 - DNA, 25 bp, Homo sapien
tggcagacacctcttaattaagtga

SEQ ID NO: 1425738 - DNA, 25 bp, Homo sapien
ggcagacacctcttaattaagtgat

SEQ ID NO: 1425739 - DNA, 25 bp, Homo sapien
actggcagacacctcttaattaagt

SEQ ID NO: 1425740 - DNA, 25 bp, Homo sapien
ctggcagacacctcttaattaagtg

SEQ ID NO: 1425741 - DNA, 25 bp, Homo sapien
tgctccttggactgaactttggcct

SEQ ID NO: 1425742 - DNA, 25 bp, Homo sapien
tggcctaggacttgcctgaagctct

SEQ ID NO: 1425743 - DNA, 25 bp, Homo sapien
tctggactagtccttaatgtgtggt

SEQ ID NO: 1425744 - DNA, 25 bp, Homo sapien
catgtacccagtctggactagtcct

SEQ ID NO: 1425745 - DNA, 25 bp, Homo sapien
actggtccgctttggccgcttgacg

SEQ ID NO: 1425746 - DNA, 25 bp, Homo sapien
ctgatttccccctgctgacactggt

SEQ ID NO: 1425747 - DNA, 25 bp, Homo sapien
gtctctgttgctgcggaccagggca

SEQ ID NO: 1425748 - DNA, 25 bp, Homo sapien
gccgcttgacgtgtgtgggcttcct

SEQ ID NO: 1425749 - DNA, 25 bp, Homo sapien
cccgcttcataaggttcgtgtgagg

SEQ ID NO: 1425750 - DNA, 25 bp, Homo sapien
taataaaccacgtggaagcgtggcc

SEQ ID NO: 1425751 - DNA, 25 bp, Homo sapien
caaattgtgtcccacggaatgctaa

SEQ ID NO: 1425752 - DNA, 25 bp, Homo sapien
ggaaggtaagtatcctcagcaccca

SEQ ID NO: 1425753 - DNA, 25 bp, Homo sapien
cccataagttaagagaagagcccct

SEQ ID NO: 1425754 - DNA, 25 bp, Homo sapien
tatgctatagaacacaccgccaagg

SEQ ID NO: 1425755 - DNA, 25 bp, Homo sapien
gaacctgaacgtcttccctggagaa

SEQ ID NO: 1425756 - DNA, 25 bp, Homo sapien
tatgtgaaagttccaccagcagcag

SEQ ID NO: 1425757 - DNA, 25 bp, Homo sapien
ggctggaaacggcctggtctctgct

SEQ ID NO: 1425758 - DNA, 25 bp, Homo sapien
ccaaggaggtaccttacgcactgtg

SEQ ID NO: 1425759 - DNA, 25 bp, Homo sapien
aaggaggtaccttacgcactgtgtc

SEQ ID NO: 1425760 - DNA, 25 bp, Homo sapien
ttggtggctggaaacggcctggtct

SEQ ID NO: 1425761 - DNA, 25 bp, Homo sapien
cacattcagaccacaccagaaagaa

SEQ ID NO: 1425762 - DNA, 25 bp, Homo sapien
gaaataggcaattctagacaaagta

SEQ ID NO: 1425763 - DNA, 25 bp, Homo sapien
tgctctcaggacttaggcctgtcgt

SEQ ID NO: 1425764 - DNA, 25 bp, Homo sapien
tcaagctcttttgtaaggaccctaa

SEQ ID NO: 1425765 - DNA, 25 bp, Homo sapien
taataatcttgtgggtcaggagtgg

SEQ ID NO: 1425766 - DNA, 25 bp, Homo sapien
tctttatttactcagccaggcagct

SEQ ID NO: 1425767 - DNA, 25 bp, Homo sapien
tatcgatattacgaacctgttggca

SEQ ID NO: 1425768 - DNA, 25 bp, Homo sapien
cacattagggtgaagggtctataga

SEQ ID NO: 1425769 - DNA, 25 bp, Homo sapien
caaaagtatggtggttccttcctga

SEQ ID NO: 1425770 - DNA, 25 bp, Homo sapien
tcagcacactgggacgggatttgtt

SEQ ID NO: 1425771 - DNA, 25 bp, Homo sapien
tatatagcagatgtaactcagaggc

SEQ ID NO: 1425772 - DNA, 25 bp, Homo sapien
aagagccatgcgctgattgttgggc

SEQ ID NO: 1425773 - DNA, 25 bp, Homo sapien
gcaaggtattcgatgccatggagac

SEQ ID NO: 1425774 - DNA, 25 bp, Homo sapien
cgaaagatcacttaggagacctggc

SEQ ID NO: 1425775 - DNA, 25 bp, Homo sapien
gaggccggaaccataataccatctg

SEQ ID NO: 1425776 - DNA, 25 bp, Homo sapien
aatgggagtggctacaaaagtgtgc

SEQ ID NO: 1425777 - DNA, 25 bp, Homo sapien
gcacacatctacaaggcaggaagga

SEQ ID NO: 1425778 - DNA, 25 bp, Homo sapien
taggaactaactggccaataccttg

SEQ ID NO: 1425779 - DNA, 25 bp, Homo sapien
tccctgccgcatgagcacacatcta

SEQ ID NO: 1425780 - DNA, 25 bp, Homo sapien
ggaaggagccctcactaggaactaa

SEQ ID NO: 1425781 - DNA, 25 bp, Homo sapien
gagttcactgtatcccagctgagca

SEQ ID NO: 1425782 - DNA, 25 bp, Homo sapien
tcctggaggagtagattgagttcac

SEQ ID NO: 1425783 - DNA, 25 bp, Homo sapien
tgccaacggccagaagctgtcatgg

SEQ ID NO: 1425784 - DNA, 25 bp, Homo sapien
gaggagagctctgtatgccaacggc

SEQ ID NO: 1425785 - DNA, 25 bp, Homo sapien
tttcattctggtggataactcatcc

SEQ ID NO: 1425786 - DNA, 25 bp, Homo sapien
tgcattgtgtgatcctcataccagc

SEQ ID NO: 1425787 - DNA, 25 bp, Homo sapien
taaacagtaaatcagtgaagcctct

SEQ ID NO: 1425788 - DNA, 25 bp, Homo sapien
ttcatataagaaccaagcactttgg

SEQ ID NO: 1425789 - DNA, 25 bp, Homo sapien
tagttctaagtaattttgtcgcaag

SEQ ID NO: 1425790 - DNA, 25 bp, Homo sapien
aaatccatcaaagcaaaatacaggc

SEQ ID NO: 1425791 - DNA, 25 bp, Homo sapien
taccattgctcaagccctataatcc

SEQ ID NO: 1425792 - DNA, 25 bp, Homo sapien
attgttactaaacctctgagtgcag

SEQ ID NO: 1425793 - DNA, 25 bp, Homo sapien
gaacgtatgcttaactctccagggt

SEQ ID NO: 1425794 - DNA, 25 bp, Homo sapien
cattcctcaggacaggactggtgag

SEQ ID NO: 1425795 - DNA, 25 bp, Homo sapien
tgtttctgatgttccccatggtgtg

SEQ ID NO: 1425796 - DNA, 25 bp, Homo sapien
aagtgggcgctttaaacagtgtctg

SEQ ID NO: 1425797 - DNA, 25 bp, Homo sapien
aggtttgctgacgaaggtctcatcc

SEQ ID NO: 1425798 - DNA, 25 bp, Homo sapien
caggtttgctgacgaaggtctcatc

SEQ ID NO: 1425799 - DNA, 25 bp, Homo sapien
gtttgctgacgaaggtctcatccat

SEQ ID NO: 1425800 - DNA, 25 bp, Homo sapien
ggtttgctgacgaaggtctcatcca

SEQ ID NO: 1425801 - DNA, 25 bp, Homo sapien
ggatcaaaatgctgaagttcccaac

SEQ ID NO: 1425802 - DNA, 25 bp, Homo sapien
taacagcctggtaaactgaggaata

SEQ ID NO: 1425803 - DNA, 25 bp, Homo sapien
gctggagagtgaattttgagtaaca

SEQ ID NO: 1425804 - DNA, 25 bp, Homo sapien
ggtggctccaaaaaggtggatcaaa

SEQ ID NO: 1425805 - DNA, 25 bp, Homo sapien
taaggattctatggctgaaagtatg

SEQ ID NO: 1425806 - DNA, 25 bp, Homo sapien
tagaatgctagttcccaacacaagg

SEQ ID NO: 1425807 - DNA, 25 bp, Homo sapien
aatggaatcctcatgcagtcaatgg

SEQ ID NO: 1425808 - DNA, 25 bp, Homo sapien
tgctccaccaatatcatagttactg

SEQ ID NO: 1425809 - DNA, 25 bp, Homo sapien
taagaggataacaagggaacagtac

SEQ ID NO: 1425810 - DNA, 25 bp, Homo sapien
catacttctggattacccatgggcc

SEQ ID NO: 1425811 - DNA, 25 bp, Homo sapien
tgcagaaggcatttaaaacggtgat

SEQ ID NO: 1425812 - DNA, 25 bp, Homo sapien
tcaaggatctaagcttgcaagtgac

SEQ ID NO: 1425813 - DNA, 25 bp, Homo sapien
tgatcaggttgttgatctgagagat

SEQ ID NO: 1425814 - DNA, 25 bp, Homo sapien
tatgatcaggttgttgatctgagag

SEQ ID NO: 1425815 - DNA, 25 bp, Homo sapien
ctttatgatcaggttgttgatctga

SEQ ID NO: 1425816 - DNA, 25 bp, Homo sapien
atcaggttgttgatctgagagatgg

SEQ ID NO: 1425817 - DNA, 25 bp, Homo sapien
tgcttgagaatctggaacccggtgt

SEQ ID NO: 1425818 - DNA, 25 bp, Homo sapien
gtttggtgaggttatcttggcccat

SEQ ID NO: 1425819 - DNA, 25 bp, Homo sapien
gcttgagaatctggaacccggtgtt

SEQ ID NO: 1425820 - DNA, 25 bp, Homo sapien
tgtttggtgaggttatcttggccca

SEQ ID NO: 1425821 - DNA, 25 bp, Homo sapien
ctaatattagctcatgaagagagga

SEQ ID NO: 1425822 - DNA, 25 bp, Homo sapien
caaaccattaataagtgtgaacaag

SEQ ID NO: 1425823 - DNA, 25 bp, Homo sapien
gaaaatgcagcaaaagctctaactt

SEQ ID NO: 1425824 - DNA, 25 bp, Homo sapien
taaacattcggccagtacaaactat

SEQ ID NO: 1425825 - DNA, 25 bp, Homo sapien
ctttctggaatagcatgcccgaggg

SEQ ID NO: 1425826 - DNA, 25 bp, Homo sapien
tagagagtccaagccaacaagggca

SEQ ID NO: 1425827 - DNA, 25 bp, Homo sapien
tccttgacgggtagatcatgccagc

SEQ ID NO: 1425828 - DNA, 25 bp, Homo sapien
tacatactgtgtgctcatgctggca

SEQ ID NO: 1425829 - DNA, 25 bp, Homo sapien
tatcatccaggagaatgaccccaac

SEQ ID NO: 1425830 - DNA, 25 bp, Homo sapien
taagatatgtatcagcagattctcc

SEQ ID NO: 1425831 - DNA, 25 bp, Homo sapien
aatcatccctaagatatgtatcagc

SEQ ID NO: 1425832 - DNA, 25 bp, Homo sapien
tcaagaaaatcatccctaagatatg

SEQ ID NO: 1425833 - DNA, 25 bp, Homo sapien
aggagacagaggttgcattgagctg

SEQ ID NO: 1425834 - DNA, 25 bp, Homo sapien
tgaggcaggagatttgcttgaaccc

SEQ ID NO: 1425835 - DNA, 25 bp, Homo sapien
ctgagatcgtgccactgcactccag

SEQ ID NO: 1425836 - DNA, 25 bp, Homo sapien
cagctactcaggctactcaagaggc

SEQ ID NO: 1425837 - DNA, 25 bp, Homo sapien
tactactccaaaatccctctgagag

SEQ ID NO: 1425838 - DNA, 25 bp, Homo sapien
tctttatgagggagtgtaggcacac

SEQ ID NO: 1425839 - DNA, 25 bp, Homo sapien
tagccagtatccagatcaatggtcc

SEQ ID NO: 1425840 - DNA, 25 bp, Homo sapien
tggtcctgtgcaatcaccaagtagc

SEQ ID NO: 1425841 - DNA, 25 bp, Homo sapien
agacgggaaaatatgggaaagcttg

SEQ ID NO: 1425842 - DNA, 25 bp, Homo sapien
ttttatggttcataacaaacagaaa

SEQ ID NO: 1425843 - DNA, 25 bp, Homo sapien
cttagacagttcatcgtagctgggc

SEQ ID NO: 1425844 - DNA, 25 bp, Homo sapien
cctagcactgacattggtacgggaa

SEQ ID NO: 1425845 - DNA, 25 bp, Homo sapien
aagccacttcctctgacataaggtc

SEQ ID NO: 1425846 - DNA, 25 bp, Homo sapien
ttgccacatcctcttagacagttca

SEQ ID NO: 1425847 - DNA, 25 bp, Homo sapien
ctggccgcgagtgggtgcgcagcag

SEQ ID NO: 1425848 - DNA, 25 bp, Homo sapien
tgtagggagctggccgcgagtgggt

SEQ ID NO: 1425849 - DNA, 25 bp, Homo sapien
cagggcggctgtgcgaagccgccgc

SEQ ID NO: 1425850 - DNA, 25 bp, Homo sapien
ggtagtcgagcagtcactccactcc

SEQ ID NO: 1425851 - DNA, 25 bp, Homo sapien
agagtcaaacctggcgcatcctcaa

SEQ ID NO: 1425852 - DNA, 25 bp, Homo sapien
ctaaagcgcgtacgccctgcagagt

SEQ ID NO: 1425853 - DNA, 25 bp, Homo sapien
gcagagacggcctatagtgtctgaa

SEQ ID NO: 1425854 - DNA, 25 bp, Homo sapien
cgagccccgcatcacgtgtgcagag

SEQ ID NO: 1425855 - DNA, 25 bp, Homo sapien
tcccaccctccgttctggaatttgc

SEQ ID NO: 1425856 - DNA, 25 bp, Homo sapien
ctcccaccctccgttctggaatttg

SEQ ID NO: 1425857 - DNA, 25 bp, Homo sapien
caccctccgttctggaatttgctcc

SEQ ID NO: 1425858 - DNA, 25 bp, Homo sapien
cccaccctccgttctggaatttgct

SEQ ID NO: 1425859 - DNA, 25 bp, Homo sapien
ttatatacagtatccagggagacag

SEQ ID NO: 1425860 - DNA, 25 bp, Homo sapien
tggttctggagtactagtggtccca

SEQ ID NO: 1425861 - DNA, 25 bp, Homo sapien
gctttgtgaaagataggactaggcc

SEQ ID NO: 1425862 - DNA, 25 bp, Homo sapien
ggactaggccagaaaaaggttgaga

SEQ ID NO: 1425863 - DNA, 25 bp, Homo sapien
tattggagctgaatgtcagggtcta

SEQ ID NO: 1425864 - DNA, 25 bp, Homo sapien
ttattgcagtcaggcatttgtttgg

SEQ ID NO: 1425865 - DNA, 25 bp, Homo sapien
tgtttggattcagggcatactggga

SEQ ID NO: 1425866 - DNA, 25 bp, Homo sapien
atttgtttggattcagggcatactg

SEQ ID NO: 1425867 - DNA, 25 bp, Homo sapien
caatattagtgccatgtgcctttca

SEQ ID NO: 1425868 - DNA, 25 bp, Homo sapien
caaagagctcccatctggcaagaaa

SEQ ID NO: 1425869 - DNA, 25 bp, Homo sapien
cacccattttgaagagtggcagaac

SEQ ID NO: 1425870 - DNA, 25 bp, Homo sapien
cccagccttaagtctcttggagaag

SEQ ID NO: 1425871 - DNA, 25 bp, Homo sapien
ctctactaataagtgccaggtttag

SEQ ID NO: 1425872 - DNA, 25 bp, Homo sapien
cccatttacgatgtcttagtctgct

SEQ ID NO: 1425873 - DNA, 25 bp, Homo sapien
tgctgctctgaactaatactctctc

SEQ ID NO: 1425874 - DNA, 25 bp, Homo sapien
tcagactttgattatactctactaa

SEQ ID NO: 1425875 - DNA, 25 bp, Homo sapien
gatcaaagcactggtaaatcctgtc

SEQ ID NO: 1425876 - DNA, 25 bp, Homo sapien
ctgcttcctgggttgtagtttgctg

SEQ ID NO: 1425877 - DNA, 25 bp, Homo sapien
cctgggttgtagtttgctgccttct

SEQ ID NO: 1425878 - DNA, 25 bp, Homo sapien
aagatcaaagcactggtaaatcctg

SEQ ID NO: 1425879 - DNA, 25 bp, Homo sapien
acttcagaggcagtctatgcgacct

SEQ ID NO: 1425880 - DNA, 25 bp, Homo sapien
tcaggatgccaattactgggtgcag

SEQ ID NO: 1425881 - DNA, 25 bp, Homo sapien
gctgtgcctaaatggccaagtcagg

SEQ ID NO: 1425882 - DNA, 25 bp, Homo sapien
ccaaagtgatagacctgtgattcct

SEQ ID NO: 1425883 - DNA, 25 bp, Homo sapien
gataatcctttagtatttgagcgag

SEQ ID NO: 1425884 - DNA, 25 bp, Homo sapien
gggagaatagctatactcgggaaaa

SEQ ID NO: 1425885 - DNA, 25 bp, Homo sapien
agttttacagaagtccatccattgc

SEQ ID NO: 1425886 - DNA, 25 bp, Homo sapien
ctcgggaaaatattagggaggcact

SEQ ID NO: 1425887 - DNA, 25 bp, Homo sapien
gagtagtctatcaaaggtgggttta

SEQ ID NO: 1425888 - DNA, 25 bp, Homo sapien
gattgcagggctattggaaactttt

SEQ ID NO: 1425889 - DNA, 25 bp, Homo sapien
attaactttatgactgattgcaggg

SEQ ID NO: 1425890 - DNA, 25 bp, Homo sapien
gcatctctacgctgtcatcttgtga

SEQ ID NO: 1425891 - DNA, 25 bp, Homo sapien
ggttgttcaaagaccgtgttgactg

SEQ ID NO: 1425892 - DNA, 25 bp, Homo sapien
tcctggttgttcaaagaccgtgttg

SEQ ID NO: 1425893 - DNA, 25 bp, Homo sapien
tgttcaaagaccgtgttgactgagg

SEQ ID NO: 1425894 - DNA, 25 bp, Homo sapien
ctttcctggttgttcaaagaccgtg

SEQ ID NO: 1425895 - DNA, 25 bp, Homo sapien
gcttggattatcagcagcttgctta

SEQ ID NO: 1425896 - DNA, 25 bp, Homo sapien
gctcagatgcttggattatcagcag

SEQ ID NO: 1425897 - DNA, 25 bp, Homo sapien
gcagcttgcttaaatcagaagttcc

SEQ ID NO: 1425898 - DNA, 25 bp, Homo sapien
tctttgggtaagctcagatgcttgg

SEQ ID NO: 1425899 - DNA, 25 bp, Homo sapien
cactatagcttgataaagtttccac

SEQ ID NO: 1425900 - DNA, 25 bp, Homo sapien
ggttgtaggtataatgcaaggtgca

SEQ ID NO: 1425901 - DNA, 25 bp, Homo sapien
tgtcttagtatcaattacactgcca

SEQ ID NO: 1425902 - DNA, 25 bp, Homo sapien
gcaaggtgcaaaatatggttcctct

SEQ ID NO: 1425903 - DNA, 25 bp, Homo sapien
aatcctccagggagataaagcaggc

SEQ ID NO: 1425904 - DNA, 25 bp, Homo sapien
aagccttcatataaatcctccaggg

SEQ ID NO: 1425905 - DNA, 25 bp, Homo sapien
tactgagagcaagctttagccatat

SEQ ID NO: 1425906 - DNA, 25 bp, Homo sapien
gacttgattcaaaatactgataggc

SEQ ID NO: 1425907 - DNA, 25 bp, Homo sapien
tccttgtgcatgcttcatgaagcgt

SEQ ID NO: 1425908 - DNA, 25 bp, Homo sapien
ctttagattcggtttgaacatgctc

SEQ ID NO: 1425909 - DNA, 25 bp, Homo sapien
cctttgctggacaggcattgcgatc

SEQ ID NO: 1425910 - DNA, 25 bp, Homo sapien
gcttcatgaagcgttcatgctgtgt

SEQ ID NO: 1425911 - DNA, 25 bp, Homo sapien
taaactagtttcacagatgacggta

SEQ ID NO: 1425912 - DNA, 25 bp, Homo sapien
aattatgtccccagtagtacagaac

SEQ ID NO: 1425913 - DNA, 25 bp, Homo sapien
gcttaagcagacagcttagctctcc

SEQ ID NO: 1425914 - DNA, 25 bp, Homo sapien
gatgacggtatattcaatttcacgc

SEQ ID NO: 1425915 - DNA, 25 bp, Homo sapien
ttccaaaggtaggagataaactatg

SEQ ID NO: 1425916 - DNA, 25 bp, Homo sapien
gattactctctattccaaaggtagg

SEQ ID NO: 1425917 - DNA, 25 bp, Homo sapien
gtctctggaccctctatcacacctt

SEQ ID NO: 1425918 - DNA, 25 bp, Homo sapien
tctggaccctctatcacacctttga

SEQ ID NO: 1425919 - DNA, 25 bp, Homo sapien
tctccagagtcaaaacaggcaagtt

SEQ ID NO: 1425920 - DNA, 25 bp, Homo sapien
aataattaagtagattccttgtggc

SEQ ID NO: 1425921 - DNA, 25 bp, Homo sapien
cctttacaaatggtatctccagagt

SEQ ID NO: 1425922 - DNA, 25 bp, Homo sapien
gtatctccagagtcaaaacaggcaa

SEQ ID NO: 1425923 - DNA, 25 bp, Homo sapien
taccttccagccaaatgatgttgtg

SEQ ID NO: 1425924 - DNA, 25 bp, Homo sapien
gaagtcaatgagaacatctttacct

SEQ ID NO: 1425925 - DNA, 25 bp, Homo sapien
aaatgatgttgtgaaggtatatgtc

SEQ ID NO: 1425926 - DNA, 25 bp, Homo sapien
aatgagaacatctttaccttccagc

SEQ ID NO: 1425927 - DNA, 25 bp, Homo sapien
cttatcaataatgcctcttgaacaa

SEQ ID NO: 1425928 - DNA, 25 bp, Homo sapien
ttccggattgcctgtttagtcttca

SEQ ID NO: 1425929 - DNA, 25 bp, Homo sapien
aatgacaacatcacgaccctcatgc

SEQ ID NO: 1425930 - DNA, 25 bp, Homo sapien
gattttttagagctttagcaatcac

SEQ ID NO: 1425931 - DNA, 25 bp, Homo sapien
tgttggtttccaaaatttcacatag

SEQ ID NO: 1425932 - DNA, 25 bp, Homo sapien
ctaattctttgacagcatcctgttt

SEQ ID NO: 1425933 - DNA, 25 bp, Homo sapien
gcatcctgtttgttggtttccaaaa

SEQ ID NO: 1425934 - DNA, 25 bp, Homo sapien
cagcatcctgtttgttggtttccaa

SEQ ID NO: 1425935 - DNA, 25 bp, Homo sapien
atcacacaactgacagttctttagg

SEQ ID NO: 1425936 - DNA, 25 bp, Homo sapien
tcctggaatcacacaactgacagtt

SEQ ID NO: 1425937 - DNA, 25 bp, Homo sapien
tggaatcacacaactgacagttctt

SEQ ID NO: 1425938 - DNA, 25 bp, Homo sapien
aacagtcctggaatcacacaactga

SEQ ID NO: 1425939 - DNA, 25 bp, Homo sapien
catctgcaattcttatcagtattgg

SEQ ID NO: 1425940 - DNA, 25 bp, Homo sapien
agctgaggcgctttttgatctgcac

SEQ ID NO: 1425941 - DNA, 25 bp, Homo sapien
tattgattcacagacagctatttgt

SEQ ID NO: 1425942 - DNA, 25 bp, Homo sapien
tcttgacttttgatatagccttttg

SEQ ID NO: 1425943 - DNA, 25 bp, Homo sapien
agagaggaagaaacctaattattct

SEQ ID NO: 1425944 - DNA, 25 bp, Homo sapien
acctaattattcttaaatatcccat

SEQ ID NO: 1425945 - DNA, 25 bp, Homo sapien
cttgaagagaggaagaaacctaatt

SEQ ID NO: 1425946 - DNA, 25 bp, Homo sapien
tgaagagaggaagaaacctaattat

SEQ ID NO: 1425947 - DNA, 25 bp, Homo sapien
tatcaatgattccaataaccaggat

SEQ ID NO: 1425948 - DNA, 25 bp, Homo sapien
aaattccaaagtattccaacattgt

SEQ ID NO: 1425949 - DNA, 25 bp, Homo sapien
tcacaaagtatacacaaaagatatc

SEQ ID NO: 1425950 - DNA, 25 bp, Homo sapien
tccaaagtattccaacattgttgaa

SEQ ID NO: 1425951 - DNA, 25 bp, Homo sapien
gaattgctctttttatagattctat

SEQ ID NO: 1425952 - DNA, 25 bp, Homo sapien
ctgaattgctctttttatagattct

SEQ ID NO: 1425953 - DNA, 25 bp, Homo sapien
tagattctatttctattttaaacag

SEQ ID NO: 1425954 - DNA, 25 bp, Homo sapien
gattctatttctattttaaacagta

SEQ ID NO: 1425955 - DNA, 25 bp, Homo sapien
agtgctgatacatttaaacctcttg

SEQ ID NO: 1425956 - DNA, 25 bp, Homo sapien
tggccacagatgtattatcatagga

SEQ ID NO: 1425957 - DNA, 25 bp, Homo sapien
catttaaacctcttgccattggcca

SEQ ID NO: 1425958 - DNA, 25 bp, Homo sapien
tagtagtttattgatatcagtgctg

SEQ ID NO: 1425959 - DNA, 25 bp, Homo sapien
gttctcatataagttgaaacatcat

SEQ ID NO: 1425960 - DNA, 25 bp, Homo sapien
ttctcatataagttgaaacatcata

SEQ ID NO: 1425961 - DNA, 25 bp, Homo sapien
agttctcatataagttgaaacatca

SEQ ID NO: 1425962 - DNA, 25 bp, Homo sapien
ctcatataagttgaaacatcataaa

SEQ ID NO: 1425963 - DNA, 25 bp, Homo sapien
gaattccattgttacgctgtttttc

SEQ ID NO: 1425964 - DNA, 25 bp, Homo sapien
tccattgttacgctgtttttcaaag

SEQ ID NO: 1425965 - DNA, 25 bp, Homo sapien
accaattaatatccgggctgcctct

SEQ ID NO: 1425966 - DNA, 25 bp, Homo sapien
tggagtaatagcattttgctgcacc

SEQ ID NO: 1425967 - DNA, 25 bp, Homo sapien
gcagctacatgcaatctggcttcct

SEQ ID NO: 1425968 - DNA, 25 bp, Homo sapien
tccattaaagcttcatctgttgtgg

SEQ ID NO: 1425969 - DNA, 25 bp, Homo sapien
catttgtattgcagctacatgcaat

SEQ ID NO: 1425970 - DNA, 25 bp, Homo sapien
tatcattatgtgaaacgtgggaaaa

SEQ ID NO: 1425971 - DNA, 25 bp, Homo sapien
taaggtccagttaacatttgtcaaa

SEQ ID NO: 1425972 - DNA, 25 bp, Homo sapien
ggaatgtattcgatcctcgttttat

SEQ ID NO: 1425973 - DNA, 25 bp, Homo sapien
gctgagtggcattttgcaagatcat

SEQ ID NO: 1425974 - DNA, 25 bp, Homo sapien
gtgttctgtactatctcctgtatgt

SEQ ID NO: 1425975 - DNA, 25 bp, Homo sapien
aaaggccttaatagagtacagtgag

SEQ ID NO: 1425976 - DNA, 25 bp, Homo sapien
aggccttaatagagtacagtgagga

SEQ ID NO: 1425977 - DNA, 25 bp, Homo sapien
caaaggccttaatagagtacagtga

SEQ ID NO: 1425978 - DNA, 25 bp, Homo sapien
aaggccttaatagagtacagtgagg

SEQ ID NO: 1425979 - DNA, 25 bp, Homo sapien
ttaaatgaagaagaacaaacacagc

SEQ ID NO: 1425980 - DNA, 25 bp, Homo sapien
agaagaacaaacacagcctggtggg

SEQ ID NO: 1425981 - DNA, 25 bp, Homo sapien
cagcctggtggggtggtaagcacct

SEQ ID NO: 1425982 - DNA, 25 bp, Homo sapien
tggtggggtggtaagcacctgtagt

SEQ ID NO: 1425983 - DNA, 25 bp, Homo sapien
caaagctgaggatcaggccatggca

SEQ ID NO: 1425984 - DNA, 25 bp, Homo sapien
tgaaagccgagataagccaagcact

SEQ ID NO: 1425985 - DNA, 25 bp, Homo sapien
tcgccagcccggaaagatgatattt

SEQ ID NO: 1425986 - DNA, 25 bp, Homo sapien
gatacatacagagggaggctgctta

SEQ ID NO: 1425987 - DNA, 25 bp, Homo sapien
caataatgatattacttgtacatag

SEQ ID NO: 1425988 - DNA, 25 bp, Homo sapien
ggctgactgagtcatcacgtatgaa

SEQ ID NO: 1425989 - DNA, 25 bp, Homo sapien
gaatttattcccattgtcaataatg

SEQ ID NO: 1425990 - DNA, 25 bp, Homo sapien
gatattacttgtacatagagtataa

SEQ ID NO: 1425991 - DNA, 25 bp, Homo sapien
cattgcctgaacacactacactggg

SEQ ID NO: 1425992 - DNA, 25 bp, Homo sapien
gctacggctgtaccagaggctctga

SEQ ID NO: 1425993 - DNA, 25 bp, Homo sapien
catgcaaagacagcacggtggtagc

SEQ ID NO: 1425994 - DNA, 25 bp, Homo sapien
gatcgggcccacagatataaatcct

SEQ ID NO: 1425995 - DNA, 25 bp, Homo sapien
tcctttaattccagaccacgtgatt

SEQ ID NO: 1425996 - DNA, 25 bp, Homo sapien
gattataaacatcaggagcccagag

SEQ ID NO: 1425997 - DNA, 25 bp, Homo sapien
gaatgcatcaaaatagggctcacta

SEQ ID NO: 1425998 - DNA, 25 bp, Homo sapien
ggtacttccacttttcgttcagcga

SEQ ID NO: 1425999 - DNA, 25 bp, Homo sapien
aaggatcgtttgtcctgtaatctga

SEQ ID NO: 1426000 - DNA, 25 bp, Homo sapien
ctaagcaaggatcgtttgtcctgta

SEQ ID NO: 1426001 - DNA, 25 bp, Homo sapien
gcaaggatcgtttgtcctgtaatct

SEQ ID NO: 1426002 - DNA, 25 bp, Homo sapien
taagcaaggatcgtttgtcctgtaa

SEQ ID NO: 1426003 - DNA, 25 bp, Homo sapien
tttcagagtattttgtccactgagg

SEQ ID NO: 1426004 - DNA, 25 bp, Homo sapien
gcttgccatctagtgctggcacatc

SEQ ID NO: 1426005 - DNA, 25 bp, Homo sapien
ttgtccactgaggtgtcctaagtgc

SEQ ID NO: 1426006 - DNA, 25 bp, Homo sapien
gagtattttgtccactgaggtgtcc

SEQ ID NO: 1426007 - DNA, 25 bp, Homo sapien
gaaattcatagtggctgagttctcc

SEQ ID NO: 1426008 - DNA, 25 bp, Homo sapien
tagtgtgaaattcatagtggctgag

SEQ ID NO: 1426009 - DNA, 25 bp, Homo sapien
aaatgaatatgaaaggtatagtgtg

SEQ ID NO: 1426010 - DNA, 25 bp, Homo sapien
agttctccacatccaatcacaatgc

SEQ ID NO: 1426011 - DNA, 25 bp, Homo sapien
gcaagagtgcctgacattcctaaaa

SEQ ID NO: 1426012 - DNA, 25 bp, Homo sapien
tagtaattacaagttcgatcttcgg

SEQ ID NO: 1426013 - DNA, 25 bp, Homo sapien
tacagcggctaaggcaagagtgcct

SEQ ID NO: 1426014 - DNA, 25 bp, Homo sapien
agttaaagaatctaaattcagtcct

SEQ ID NO: 1426015 - DNA, 25 bp, Homo sapien
tggcatccattgaattaaaggctgt

SEQ ID NO: 1426016 - DNA, 25 bp, Homo sapien
gtgctgagcactcttactcctgtga

SEQ ID NO: 1426017 - DNA, 25 bp, Homo sapien
tcttagcctaagtaagagctgccat

SEQ ID NO: 1426018 - DNA, 25 bp, Homo sapien
tggactaaactagctgaaggtcagc

SEQ ID NO: 1426019 - DNA, 25 bp, Homo sapien
ctaaaaacgtcagccaatatacact

SEQ ID NO: 1426020 - DNA, 25 bp, Homo sapien
tagtcagcatattgctaaaaacgtc

SEQ ID NO: 1426021 - DNA, 25 bp, Homo sapien
tatagaaagtcatgtacaccattga

SEQ ID NO: 1426022 - DNA, 25 bp, Homo sapien
tatacactgaatgatttttgcacac

SEQ ID NO: 1426023 - DNA, 25 bp, Homo sapien
gattctcctctaatgagatcaatgt

SEQ ID NO: 1426024 - DNA, 25 bp, Homo sapien
agaaaagtggattctgttgccccga

SEQ ID NO: 1426025 - DNA, 25 bp, Homo sapien
agtggattctgttgccccgaaaatt

SEQ ID NO: 1426026 - DNA, 25 bp, Homo sapien
aaaaaattgatgcgatgctacaaat

SEQ ID NO: 1426027 - DNA, 25 bp, Homo sapien
cgacatatccaattatgatgcttgc

SEQ ID NO: 1426028 - DNA, 25 bp, Homo sapien
gagtaggcaagattgcaaatcccat

SEQ ID NO: 1426029 - DNA, 25 bp, Homo sapien
gaattcacagaacgaagaggatcta

SEQ ID NO: 1426030 - DNA, 25 bp, Homo sapien
gatctataatgccaagggtgatgct

SEQ ID NO: 1426031 - DNA, 25 bp, Homo sapien
ggtattctagtttaaccacctgcca

SEQ ID NO: 1426032 - DNA, 25 bp, Homo sapien
aaatgttatacaattaccctggaag

SEQ ID NO: 1426033 - DNA, 25 bp, Homo sapien
gaaagggaaggccatgaaatgcttg

SEQ ID NO: 1426034 - DNA, 25 bp, Homo sapien
ctaaagatggcatgatggcatttac

SEQ ID NO: 1426035 - DNA, 25 bp, Homo sapien
tgctattccaataggtacacagtgg

SEQ ID NO: 1426036 - DNA, 25 bp, Homo sapien
caatgatgttctccagacctacagt

SEQ ID NO: 1426037 - DNA, 25 bp, Homo sapien
aattcttccttgttgtgcctatcga

SEQ ID NO: 1426038 - DNA, 25 bp, Homo sapien
taatttgtatgtaccccttggaggc

SEQ ID NO: 1426039 - DNA, 25 bp, Homo sapien
taaagctgatgtaactatagtcaat

SEQ ID NO: 1426040 - DNA, 25 bp, Homo sapien
aaactgacataattgcaaggagaaa

SEQ ID NO: 1426041 - DNA, 25 bp, Homo sapien
gaaaaatagcaatacttgtagacac

SEQ ID NO: 1426042 - DNA, 25 bp, Homo sapien
gacacttaataacaacctctatttg

SEQ ID NO: 1426043 - DNA, 25 bp, Homo sapien
gatgttcttagaagagggtagacaa

SEQ ID NO: 1426044 - DNA, 25 bp, Homo sapien
cattttcttgagtgtataaaattct

SEQ ID NO: 1426045 - DNA, 25 bp, Homo sapien
ttttcttgagtgtataaaattctac

SEQ ID NO: 1426046 - DNA, 25 bp, Homo sapien
aaaacttgatgttcttagaagaggg

SEQ ID NO: 1426047 - DNA, 25 bp, Homo sapien
gaattgtaggccatgtgtcctatca

SEQ ID NO: 1426048 - DNA, 25 bp, Homo sapien
tgtaggccatgtgtcctatcacgaa

SEQ ID NO: 1426049 - DNA, 25 bp, Homo sapien
taggccatgtgtcctatcacgaatc

SEQ ID NO: 1426050 - DNA, 25 bp, Homo sapien
acagaattgtaggccatgtgtccta

SEQ ID NO: 1426051 - DNA, 25 bp, Homo sapien
gagaaagaatcgtcaaaacaatgac

SEQ ID NO: 1426052 - DNA, 25 bp, Homo sapien
aaaacaatgacttcacaattcttta

SEQ ID NO: 1426053 - DNA, 25 bp, Homo sapien
ctgatagagaaagaatcgtcaaaac

SEQ ID NO: 1426054 - DNA, 25 bp, Homo sapien
aacaatgacttcacaattctttaaa

SEQ ID NO: 1426055 - DNA, 25 bp, Homo sapien
tgaagcatacaagcgttgtgaaatg

SEQ ID NO: 1426056 - DNA, 25 bp, Homo sapien
tacaagcgttgtgaaatgtttctct

SEQ ID NO: 1426057 - DNA, 25 bp, Homo sapien
acaatgaagcatacaagcgttgtga

SEQ ID NO: 1426058 - DNA, 25 bp, Homo sapien
gcatacaagcgttgtgaaatgtttc

SEQ ID NO: 1426059 - DNA, 25 bp, Homo sapien
gtaaatcaggtctgttactttcatt

SEQ ID NO: 1426060 - DNA, 25 bp, Homo sapien
ttttgtgcccagaagtaagaactca

SEQ ID NO: 1426061 - DNA, 25 bp, Homo sapien
gagtaaatcaggtctgttactttca

SEQ ID NO: 1426062 - DNA, 25 bp, Homo sapien
tttgtgcccagaagtaagaactcat

SEQ ID NO: 1426063 - DNA, 25 bp, Homo sapien
ttttccccagacctaacttgatgga

SEQ ID NO: 1426064 - DNA, 25 bp, Homo sapien
ccagacctaacttgatggagtggtt

SEQ ID NO: 1426065 - DNA, 25 bp, Homo sapien
tccccagacctaacttgatggagtg

SEQ ID NO: 1426066 - DNA, 25 bp, Homo sapien
tgatggagtggtttggttattattg

SEQ ID NO: 1426067 - DNA, 25 bp, Homo sapien
tgctatcctcacatgtaatgaccct

SEQ ID NO: 1426068 - DNA, 25 bp, Homo sapien
gccagggacagtactaccaactgat

SEQ ID NO: 1426069 - DNA, 25 bp, Homo sapien
caaattacccagatcagagatatgt

SEQ ID NO: 1426070 - DNA, 25 bp, Homo sapien
ggtctacaggtcacaatgattctgg

SEQ ID NO: 1426071 - DNA, 25 bp, Homo sapien
tggatctctctataggctggtcaag

SEQ ID NO: 1426072 - DNA, 25 bp, Homo sapien
catttcccctagttaggcagaggcc

SEQ ID NO: 1426073 - DNA, 25 bp, Homo sapien
caggctggagctcaaccaaggctgt

SEQ ID NO: 1426074 - DNA, 25 bp, Homo sapien
tctctacgtgaggaatgtcatgacc

SEQ ID NO: 1426075 - DNA, 25 bp, Homo sapien
tacagaagtctaaagaactactgcc

SEQ ID NO: 1426076 - DNA, 25 bp, Homo sapien
gactacttcccaaataatgtggagg

SEQ ID NO: 1426077 - DNA, 25 bp, Homo sapien
tgtaatcacttggttcacatgccag

SEQ ID NO: 1426078 - DNA, 25 bp, Homo sapien
gaaaaagccatgcagctacctatgt

SEQ ID NO: 1426079 - DNA, 25 bp, Homo sapien
cactgggtcggccaaaaaggtggct

SEQ ID NO: 1426080 - DNA, 25 bp, Homo sapien
tattgccagccttacagaataggag

SEQ ID NO: 1426081 - DNA, 25 bp, Homo sapien
ttttcaattacccaagcatggtggg

SEQ ID NO: 1426082 - DNA, 25 bp, Homo sapien
caacgtaagagaaggttgaggcgcc

SEQ ID NO: 1426083 - DNA, 25 bp, Homo sapien
tcctgaaggagcacgtgaaactcac

SEQ ID NO: 1426084 - DNA, 25 bp, Homo sapien
tgaacaggtcaaacaaaacaagggc

SEQ ID NO: 1426085 - DNA, 25 bp, Homo sapien
aagtgatagttgtacccagaggctc

SEQ ID NO: 1426086 - DNA, 25 bp, Homo sapien
gagtccggacataagcatgctgaac

SEQ ID NO: 1426087 - DNA, 25 bp, Homo sapien
tctcttctggtcatggcttgttaca

SEQ ID NO: 1426088 - DNA, 25 bp, Homo sapien
acagatttggcacttttcacttgac

SEQ ID NO: 1426089 - DNA, 25 bp, Homo sapien
gcttgttacagatttggcacttttc

SEQ ID NO: 1426090 - DNA, 25 bp, Homo sapien
ggtcatggcttgttacagatttggc

SEQ ID NO: 1426091 - DNA, 25 bp, Homo sapien
acctcccggattcgggtgatcatcc

SEQ ID NO: 1426092 - DNA, 25 bp, Homo sapien
cgcacccggcctagatgttgttgtt

SEQ ID NO: 1426093 - DNA, 25 bp, Homo sapien
cccggattcgggtgatcatcctgtc

SEQ ID NO: 1426094 - DNA, 25 bp, Homo sapien
ccacctcccggattcgggtgatcat

SEQ ID NO: 1426095 - DNA, 25 bp, Homo sapien
catgttaccacatggatggacatta

SEQ ID NO: 1426096 - DNA, 25 bp, Homo sapien
ggccaccacgaaaggcaacacatac

SEQ ID NO: 1426097 - DNA, 25 bp, Homo sapien
tcatacaacagttcattgcagcatt

SEQ ID NO: 1426098 - DNA, 25 bp, Homo sapien
ggtccagagggcagccatcctaacc

SEQ ID NO: 1426099 - DNA, 25 bp, Homo sapien
ctaatagctatagggtttcttttca

SEQ ID NO: 1426100 - DNA, 25 bp, Homo sapien
ctgctaatagctatagggtttcttt

SEQ ID NO: 1426101 - DNA, 25 bp, Homo sapien
ctatagggtttcttttcagagaggt

SEQ ID NO: 1426102 - DNA, 25 bp, Homo sapien
gctatagggtttcttttcagagagg

SEQ ID NO: 1426103 - DNA, 25 bp, Homo sapien
taatggaagcttctgtatgggtttc

SEQ ID NO: 1426104 - DNA, 25 bp, Homo sapien
tgtgaagataggagtcacaatatct

SEQ ID NO: 1426105 - DNA, 25 bp, Homo sapien
aaccactcattttttgcacggcatg

SEQ ID NO: 1426106 - DNA, 25 bp, Homo sapien
cacggcatgcactgaggatggtatt

SEQ ID NO: 1426107 - DNA, 25 bp, Homo sapien
tgtcttccttaaggagtttccctga

SEQ ID NO: 1426108 - DNA, 25 bp, Homo sapien
ccctgatcccttttctgtgtcagta

SEQ ID NO: 1426109 - DNA, 25 bp, Homo sapien
tgtgtcagtaacagctaaagagact

SEQ ID NO: 1426110 - DNA, 25 bp, Homo sapien
tcttccttaaggagtttccctgatc

SEQ ID NO: 1426111 - DNA, 25 bp, Homo sapien
ctgcttcttcggggagagtttctgc

SEQ ID NO: 1426112 - DNA, 25 bp, Homo sapien
agctgtcttcttcgtcttatttgtt

SEQ ID NO: 1426113 - DNA, 25 bp, Homo sapien
cttcttcgtcttatttgttttgtct

SEQ ID NO: 1426114 - DNA, 25 bp, Homo sapien
tcttcgtcttatttgttttgtctgt

SEQ ID NO: 1426115 - DNA, 25 bp, Homo sapien
aagctgtcttcttcgtcttatttgt

SEQ ID NO: 1426116 - DNA, 25 bp, Homo sapien
ctaccagtgctttcaaagtttccaa

SEQ ID NO: 1426117 - DNA, 25 bp, Homo sapien
tcttcccggaagttcaaagcttcta

SEQ ID NO: 1426118 - DNA, 25 bp, Homo sapien
gaatatctagcagcaacatctcgag

SEQ ID NO: 1426119 - DNA, 25 bp, Homo sapien
tatcaacatccagttctaccagtgc

SEQ ID NO: 1426120 - DNA, 25 bp, Homo sapien
gcagcacaatgtaagagtgtgtacc

SEQ ID NO: 1426121 - DNA, 25 bp, Homo sapien
tgcagcacaatgtaagagtgtgtac

SEQ ID NO: 1426122 - DNA, 25 bp, Homo sapien
ttaatcctcattataccctataagg

SEQ ID NO: 1426123 - DNA, 25 bp, Homo sapien
cattgcatctttaggtagtcataag

SEQ ID NO: 1426124 - DNA, 25 bp, Homo sapien
tcaatttacgatatgccaagcacta

SEQ ID NO: 1426125 - DNA, 25 bp, Homo sapien
gcgacttagataatgattgctaaaa

SEQ ID NO: 1426126 - DNA, 25 bp, Homo sapien
tttcattcagattcacaccatattt

SEQ ID NO: 1426127 - DNA, 25 bp, Homo sapien
ccatgcaagctgcatacaacaaatt

SEQ ID NO: 1426128 - DNA, 25 bp, Homo sapien
gctctaatcacgtcactttgcccag

SEQ ID NO: 1426129 - DNA, 25 bp, Homo sapien
tctcccaacgatgtcttcttctaag

SEQ ID NO: 1426130 - DNA, 25 bp, Homo sapien
cctgttcatgatgaggattctcagg

SEQ ID NO: 1426131 - DNA, 25 bp, Homo sapien
ggcctgttcatgatgaggattctca

SEQ ID NO: 1426132 - DNA, 25 bp, Homo sapien
tctcaggatcctcaaatatcttctg

SEQ ID NO: 1426133 - DNA, 25 bp, Homo sapien
atatcttctgcaaaccctctacatc

SEQ ID NO: 1426134 - DNA, 25 bp, Homo sapien
gagaaaaattctgaactctctgact

SEQ ID NO: 1426135 - DNA, 25 bp, Homo sapien
cctgtttcctctggttcttgggctt

SEQ ID NO: 1426136 - DNA, 25 bp, Homo sapien
cttcttgctgtgagaaaaattctga

SEQ ID NO: 1426137 - DNA, 25 bp, Homo sapien
tcttagggcctgtttcctctggttc

SEQ ID NO: 1426138 - DNA, 25 bp, Homo sapien
taatcacacctatgaattacaaaag

SEQ ID NO: 1426139 - DNA, 25 bp, Homo sapien
acagacaggaaatgtgcccgtgttg

SEQ ID NO: 1426140 - DNA, 25 bp, Homo sapien
gacaggaaatgtgcccgtgttgtaa

SEQ ID NO: 1426141 - DNA, 25 bp, Homo sapien
aaacccaataatcacacctatgaat

SEQ ID NO: 1426142 - DNA, 25 bp, Homo sapien
aagtagtcgcttaatcaagtcccag

SEQ ID NO: 1426143 - DNA, 25 bp, Homo sapien
tagaggagtagatcctaatgtgcct

SEQ ID NO: 1426144 - DNA, 25 bp, Homo sapien
caatccaggtaacgggaagagcata

SEQ ID NO: 1426145 - DNA, 25 bp, Homo sapien
gagcataaacaaagggcaaggaggc

SEQ ID NO: 1426146 - DNA, 25 bp, Homo sapien
gccgccaggtgatccaggaggtccc

SEQ ID NO: 1426147 - DNA, 25 bp, Homo sapien
ccaggtgatccaggaggtcccgcga

SEQ ID NO: 1426148 - DNA, 25 bp, Homo sapien
atacagaaagtggcagcgccgccag

SEQ ID NO: 1426149 - DNA, 25 bp, Homo sapien
agcgccgccaggtgatccaggaggt

SEQ ID NO: 1426150 - DNA, 25 bp, Homo sapien
tcttcggcctgaattccctagggac

SEQ ID NO: 1426151 - DNA, 25 bp, Homo sapien
cagagtttgctcttcggcctgaatt

SEQ ID NO: 1426152 - DNA, 25 bp, Homo sapien
cctagggaccttctgcgatcccttg

SEQ ID NO: 1426153 - DNA, 25 bp, Homo sapien
ttctgcgatcccttgcggctgccgg

SEQ ID NO: 1426154 - DNA, 25 bp, Homo sapien
gaagcagtgtgaggacgctgagatt

SEQ ID NO: 1426155 - DNA, 25 bp, Homo sapien
gggaagatgtccgtctaccccatcg

SEQ ID NO: 1426156 - DNA, 25 bp, Homo sapien
gcctggagggaagatgtccgtctac

SEQ ID NO: 1426157 - DNA, 25 bp, Homo sapien
ggacgctgagattgaagcccactcc

SEQ ID NO: 1426158 - DNA, 25 bp, Homo sapien
tcctcggttaccatagcaacggcgc

SEQ ID NO: 1426159 - DNA, 25 bp, Homo sapien
ctcggttaccatagcaacggcgcaa

SEQ ID NO: 1426160 - DNA, 25 bp, Homo sapien
cctcctcggttaccatagcaacggc

SEQ ID NO: 1426161 - DNA, 25 bp, Homo sapien
tcggttaccatagcaacggcgcaac

SEQ ID NO: 1426162 - DNA, 25 bp, Homo sapien
ctggggaatcagtgattatttcacc

SEQ ID NO: 1426163 - DNA, 25 bp, Homo sapien
aatcagtgattatttcaccaggcag

SEQ ID NO: 1426164 - DNA, 25 bp, Homo sapien
tggggaatcagtgattatttcacca

SEQ ID NO: 1426165 - DNA, 25 bp, Homo sapien
cagtgattatttcaccaggcagcat

SEQ ID NO: 1426166 - DNA, 25 bp, Homo sapien
gctactgcaaaaatacgcaaaatgg

SEQ ID NO: 1426167 - DNA, 25 bp, Homo sapien
gcaaaaatacgcaaaatggtaaaga

SEQ ID NO: 1426168 - DNA, 25 bp, Homo sapien
tatcagctactgcaaaaatacgcaa

SEQ ID NO: 1426169 - DNA, 25 bp, Homo sapien
cggtatcagctactgcaaaaatacg

SEQ ID NO: 1426170 - DNA, 25 bp, Homo sapien
tttcagttggtcataaggcaagccc

SEQ ID NO: 1426171 - DNA, 25 bp, Homo sapien
tgatccaacccagtcatgaaccaag

SEQ ID NO: 1426172 - DNA, 25 bp, Homo sapien
cattttatggcttgcaccagtgtcc

SEQ ID NO: 1426173 - DNA, 25 bp, Homo sapien
aagcccacgcaaccacaggtgtgag

SEQ ID NO: 1426174 - DNA, 25 bp, Homo sapien
ttgagctcaggagatcgagaccagc

SEQ ID NO: 1426175 - DNA, 25 bp, Homo sapien
ttgggagcctaggcaggtggattgc

SEQ ID NO: 1426176 - DNA, 25 bp, Homo sapien
gcctgggtaccacggtgaaactctg

SEQ ID NO: 1426177 - DNA, 25 bp, Homo sapien
ccagcctgggtaccacggtgaaact

SEQ ID NO: 1426178 - DNA, 25 bp, Homo sapien
aatggttactcttgggatacaagga

SEQ ID NO: 1426179 - DNA, 25 bp, Homo sapien
cgaggataaacaacctctgaggtta

SEQ ID NO: 1426180 - DNA, 25 bp, Homo sapien
agaggaggcttcagtattcaaatac

SEQ ID NO: 1426181 - DNA, 25 bp, Homo sapien
gccagttccgcagtgaattctaaaa

SEQ ID NO: 1426182 - DNA, 25 bp, Homo sapien
aaaggaaatagctctacgagcggca

SEQ ID NO: 1426183 - DNA, 25 bp, Homo sapien
tcctgcgggaacgatttaagaatag

SEQ ID NO: 1426184 - DNA, 25 bp, Homo sapien
agcaaagggcacgactacttccgga

SEQ ID NO: 1426185 - DNA, 25 bp, Homo sapien
ccggaaccccttggcggattatgtg

SEQ ID NO: 1426186 - DNA, 25 bp, Homo sapien
tggcataagaagtgacaagtagatc

SEQ ID NO: 1426187 - DNA, 25 bp, Homo sapien
tactatcattatggcaacactcccc

SEQ ID NO: 1426188 - DNA, 25 bp, Homo sapien
taattgagacagtgtcgtactggca

SEQ ID NO: 1426189 - DNA, 25 bp, Homo sapien
aacatcctgctcatagattagaaga

SEQ ID NO: 1426190 - DNA, 25 bp, Homo sapien
gaacttaatacagttaggctcattt

SEQ ID NO: 1426191 - DNA, 25 bp, Homo sapien
aacttgtgtgattatgccatgaact

SEQ ID NO: 1426192 - DNA, 25 bp, Homo sapien
aagtacaatactctacattctgtcc

SEQ ID NO: 1426193 - DNA, 25 bp, Homo sapien
tccttctccctataagtaaatacag

SEQ ID NO: 1426194 - DNA, 25 bp, Homo sapien
caggagttgaactgtatttaaaaca

SEQ ID NO: 1426195 - DNA, 25 bp, Homo sapien
gattttgattgccagttctccgcag

SEQ ID NO: 1426196 - DNA, 25 bp, Homo sapien
tctcatttgaatcctaagagtttaa

SEQ ID NO: 1426197 - DNA, 25 bp, Homo sapien
gcagtgaaatgctaggaaaatgtct

SEQ ID NO: 1426198 - DNA, 25 bp, Homo sapien
aaacagatgcagagatagatgccta

SEQ ID NO: 1426199 - DNA, 25 bp, Homo sapien
tgattagtacatgggcacctggctg

SEQ ID NO: 1426200 - DNA, 25 bp, Homo sapien
tctttcagcatagcaattaggcaag

SEQ ID NO: 1426201 - DNA, 25 bp, Homo sapien
tggctgtggctcatctactaccata

SEQ ID NO: 1426202 - DNA, 25 bp, Homo sapien
ttgccagttctgtcaaatatgctaa

SEQ ID NO: 1426203 - DNA, 25 bp, Homo sapien
tatgctaacactccaataaggtatt

SEQ ID NO: 1426204 - DNA, 25 bp, Homo sapien
ccaataaggtatttatgacacagaa

SEQ ID NO: 1426205 - DNA, 25 bp, Homo sapien
tctgtcaaatatgctaacactccaa

SEQ ID NO: 1426206 - DNA, 25 bp, Homo sapien
catcctctggatgtattgcgaaaga

SEQ ID NO: 1426207 - DNA, 25 bp, Homo sapien
tgtccagactttgagggctacaggg

SEQ ID NO: 1426208 - DNA, 25 bp, Homo sapien
gaaacacgaactaatcttgtggctg

SEQ ID NO: 1426209 - DNA, 25 bp, Homo sapien
ggtccattttgcatgcagtccacat

SEQ ID NO: 1426210 - DNA, 25 bp, Homo sapien
gacagaggttgcagtcaaccaagat

SEQ ID NO: 1426211 - DNA, 25 bp, Homo sapien
cttggaaggctaaggtggaaggatc

SEQ ID NO: 1426212 - DNA, 25 bp, Homo sapien
acttgagcccaggagacagaggttg

SEQ ID NO: 1426213 - DNA, 25 bp, Homo sapien
cgtgccactgtactccagcctgggt

SEQ ID NO: 1426214 - DNA, 25 bp, Homo sapien
ctggacaagaaatgcttccgggtcc

SEQ ID NO: 1426215 - DNA, 25 bp, Homo sapien
tggacaagaaatgcttccgggtccc

SEQ ID NO: 1426216 - DNA, 25 bp, Homo sapien
caagaaatgcttccgggtccctttg

SEQ ID NO: 1426217 - DNA, 25 bp, Homo sapien
agaaatgcttccgggtccctttgtg

SEQ ID NO: 1426218 - DNA, 25 bp, Homo sapien
tccactgtttatgcagaaggaatgc

SEQ ID NO: 1426219 - DNA, 25 bp, Homo sapien
gaaggaatgcaaccttttgagggtc

SEQ ID NO: 1426220 - DNA, 25 bp, Homo sapien
ccacttccacagcaagtcctttttg

SEQ ID NO: 1426221 - DNA, 25 bp, Homo sapien
gagttaaactatataaagtccactg

SEQ ID NO: 1426222 - DNA, 25 bp, Homo sapien
taaatgaactctgcttcctgaccga

SEQ ID NO: 1426223 - DNA, 25 bp, Homo sapien
cgaggtggagtcaggataaatgaac

SEQ ID NO: 1426224 - DNA, 25 bp, Homo sapien
ggaattttccttcgaggtggagtca

SEQ ID NO: 1426225 - DNA, 25 bp, Homo sapien
ctgcaactgcgaacactggggaatt

SEQ ID NO: 1426226 - DNA, 25 bp, Homo sapien
ctgcagaggagtggcacctataaag

SEQ ID NO: 1426227 - DNA, 25 bp, Homo sapien
tcttgaggatgcactaggagttgac

SEQ ID NO: 1426228 - DNA, 25 bp, Homo sapien
tgactctggtgcactgtaagaatcc

SEQ ID NO: 1426229 - DNA, 25 bp, Homo sapien
taatcttcaggtcttgaggatgcac

SEQ ID NO: 1426230 - DNA, 25 bp, Homo sapien
tccacaccatgtaatagtactcagc

SEQ ID NO: 1426231 - DNA, 25 bp, Homo sapien
gaaaacagatgagtggctgacagag

SEQ ID NO: 1426232 - DNA, 25 bp, Homo sapien
tagtgaatacatgactctacaccag

SEQ ID NO: 1426233 - DNA, 25 bp, Homo sapien
tgaagtagatcatgctcccagctaa

SEQ ID NO: 1426234 - DNA, 25 bp, Homo sapien
tcatgttccaatagtaggtggcccc

SEQ ID NO: 1426235 - DNA, 25 bp, Homo sapien
gataatgaccacacaacagggcaaa

SEQ ID NO: 1426236 - DNA, 25 bp, Homo sapien
caatctcctggaaacgtcgtctaca

SEQ ID NO: 1426237 - DNA, 25 bp, Homo sapien
agaattcctgtctggctttcaaggc

SEQ ID NO: 1426238 - DNA, 25 bp, Homo sapien
acgaatcattcttcaaaagtccggc

SEQ ID NO: 1426239 - DNA, 25 bp, Homo sapien
aaagtccggctccaaaactatgtgg

SEQ ID NO: 1426240 - DNA, 25 bp, Homo sapien
gctgtcacccattccggattcacga

SEQ ID NO: 1426241 - DNA, 25 bp, Homo sapien
caataaaatgccgtgatgacgctgt

SEQ ID NO: 1426242 - DNA, 25 bp, Homo sapien
aaaatgacagctaagacagaggcca

SEQ ID NO: 1426243 - DNA, 25 bp, Homo sapien
agacagaggccagactaacccctgg

SEQ ID NO: 1426244 - DNA, 25 bp, Homo sapien
tggccctcccaaattccctctcgct

SEQ ID NO: 1426245 - DNA, 25 bp, Homo sapien
tcgctccacaagtgggttcacaaga

SEQ ID NO: 1426246 - DNA, 25 bp, Homo sapien
cgggccctgcgacttcactctggga

SEQ ID NO: 1426247 - DNA, 25 bp, Homo sapien
acttcactctgggagggacatttcc

SEQ ID NO: 1426248 - DNA, 25 bp, Homo sapien
ctctgggagggacatttccgctcac

SEQ ID NO: 1426249 - DNA, 25 bp, Homo sapien
gcgggccctgcgacttcactctggg

SEQ ID NO: 1426250 - DNA, 25 bp, Homo sapien
cagctctgaaatcaagccgttgaga

SEQ ID NO: 1426251 - DNA, 25 bp, Homo sapien
gattccgtatcagtgaagcaactaa

SEQ ID NO: 1426252 - DNA, 25 bp, Homo sapien
aaatcgtttcccgactcgctctgcg

SEQ ID NO: 1426253 - DNA, 25 bp, Homo sapien
cattttaactgagggcaaggccgag

SEQ ID NO: 1426254 - DNA, 25 bp, Homo sapien
ctttccaatcgtgctcggttgctcc

SEQ ID NO: 1426255 - DNA, 25 bp, Homo sapien
caatcgtgctcggttgctcctcagt

SEQ ID NO: 1426256 - DNA, 25 bp, Homo sapien
tcgtgctcggttgctcctcagtttt

SEQ ID NO: 1426257 - DNA, 25 bp, Homo sapien
tccaatcgtgctcggttgctcctca

SEQ ID NO: 1426258 - DNA, 25 bp, Homo sapien
gcgtataccttgtgaccgcctctgg

SEQ ID NO: 1426259 - DNA, 25 bp, Homo sapien
gaagactcgaaatcggccagcaggt

SEQ ID NO: 1426260 - DNA, 25 bp, Homo sapien
gagcctctcgagaagcgtggaaaga

SEQ ID NO: 1426261 - DNA, 25 bp, Homo sapien
aatttccgcccgtagtaggcatggc

SEQ ID NO: 1426262 - DNA, 25 bp, Homo sapien
ttcgtgattgtttttcgccatcgtg

SEQ ID NO: 1426263 - DNA, 25 bp, Homo sapien
tgtttttcgccatcgtgtggctcca

SEQ ID NO: 1426264 - DNA, 25 bp, Homo sapien
tttcgccatcgtgtggctccaacat

SEQ ID NO: 1426265 - DNA, 25 bp, Homo sapien
cggcagcgtgggatttcgtgattgt

SEQ ID NO: 1426266 - DNA, 25 bp, Homo sapien
gaactgagggcgttgaaaacaagga

SEQ ID NO: 1426267 - DNA, 25 bp, Homo sapien
tatctggtaacattaggtgctgctg

SEQ ID NO: 1426268 - DNA, 25 bp, Homo sapien
tgaagccatgtgacggtattactgc

SEQ ID NO: 1426269 - DNA, 25 bp, Homo sapien
ggccagcagattgagtacaggagtt

SEQ ID NO: 1426270 - DNA, 25 bp, Homo sapien
ggttctactctcaaggtgttaaggc

SEQ ID NO: 1426271 - DNA, 25 bp, Homo sapien
taaggctagtaagccagaataggat

SEQ ID NO: 1426272 - DNA, 25 bp, Homo sapien
ttattgggtggccactatgtacaaa

SEQ ID NO: 1426273 - DNA, 25 bp, Homo sapien
caaagctctatggtagtagatgtga

SEQ ID NO: 1426274 - DNA, 25 bp, Homo sapien
cacggcattctaacctggataacat

SEQ ID NO: 1426275 - DNA, 25 bp, Homo sapien
gtgccacggcattctaacctggata

SEQ ID NO: 1426276 - DNA, 25 bp, Homo sapien
ggcattctaacctggataacatagc

SEQ ID NO: 1426277 - DNA, 25 bp, Homo sapien
acttgaggcaaagtgttcaaggctg

SEQ ID NO: 1426278 - DNA, 25 bp, Homo sapien
tagtatttgccaagcccgttctaag

SEQ ID NO: 1426279 - DNA, 25 bp, Homo sapien
tgccaaccctatgaaagaagttctg

SEQ ID NO: 1426280 - DNA, 25 bp, Homo sapien
ggaagtcctgcataccataggtagc

SEQ ID NO: 1426281 - DNA, 25 bp, Homo sapien
tcttggtatgaactaaacatgctgg

SEQ ID NO: 1426282 - DNA, 25 bp, Homo sapien
ttacacgtgcgcactaacacacccg

SEQ ID NO: 1426283 - DNA, 25 bp, Homo sapien
cacttgatcctgatttgtagcctgg

SEQ ID NO: 1426284 - DNA, 25 bp, Homo sapien
gagttctaagcataaggctttggcc

SEQ ID NO: 1426285 - DNA, 25 bp, Homo sapien
agccctgctgcaccttacaatcaaa

SEQ ID NO: 1426286 - DNA, 25 bp, Homo sapien
tggctacacatcagaccaactgaat

SEQ ID NO: 1426287 - DNA, 25 bp, Homo sapien
ggtggcacttagtggaccttcaaaa

SEQ ID NO: 1426288 - DNA, 25 bp, Homo sapien
ggatgagtccaagagttccatgaga

SEQ ID NO: 1426289 - DNA, 25 bp, Homo sapien
catggaggaattgccttaggtaaac

SEQ ID NO: 1426290 - DNA, 25 bp, Homo sapien
catctaagcctagatggtggcactt

SEQ ID NO: 1426291 - DNA, 25 bp, Homo sapien
taattataaaatgaggccgggtaca

SEQ ID NO: 1426292 - DNA, 25 bp, Homo sapien
aactaataattataaaatgaggccg

SEQ ID NO: 1426293 - DNA, 25 bp, Homo sapien
attataaaatgaggccgggtacagt

SEQ ID NO: 1426294 - DNA, 25 bp, Homo sapien
ctaataattataaaatgaggccggg

SEQ ID NO: 1426295 - DNA, 25 bp, Homo sapien
tcaaaataacgtgtactcaaggtca

SEQ ID NO: 1426296 - DNA, 25 bp, Homo sapien
gaagcctgagccataacctggcgaa

SEQ ID NO: 1426297 - DNA, 25 bp, Homo sapien
cttgaagcgcttacattcttgtggg

SEQ ID NO: 1426298 - DNA, 25 bp, Homo sapien
cacataataggtcatggtggtcaca

SEQ ID NO: 1426299 - DNA, 25 bp, Homo sapien
tcttcttgtgccatgagactccatc

SEQ ID NO: 1426300 - DNA, 25 bp, Homo sapien
taaaattggagacactgttttaatc

SEQ ID NO: 1426301 - DNA, 25 bp, Homo sapien
gctgtagtaagcttcaaaggccact

SEQ ID NO: 1426302 - DNA, 25 bp, Homo sapien
cagtctacaaagaccactgggaggc

SEQ ID NO: 1426303 - DNA, 25 bp, Homo sapien
ccacatttacagacttcaattaaaa

SEQ ID NO: 1426304 - DNA, 25 bp, Homo sapien
gccacatttacagacttcaattaaa

SEQ ID NO: 1426305 - DNA, 25 bp, Homo sapien
agccacatttacagacttcaattaa

SEQ ID NO: 1426306 - DNA, 25 bp, Homo sapien
tattgtcatcaagtaatcagtgaga

SEQ ID NO: 1426307 - DNA, 25 bp, Homo sapien
agtgagagagttcaagttggattga

SEQ ID NO: 1426308 - DNA, 25 bp, Homo sapien
taatcagtgagagagttcaagttgg

SEQ ID NO: 1426309 - DNA, 25 bp, Homo sapien
catcaagtaatcagtgagagagttc

SEQ ID NO: 1426310 - DNA, 25 bp, Homo sapien
gcaattataatagtcccaacatttc

SEQ ID NO: 1426311 - DNA, 25 bp, Homo sapien
tataatagtcccaacatttccaatc

SEQ ID NO: 1426312 - DNA, 25 bp, Homo sapien
aattataatagtcccaacatttcca

SEQ ID NO: 1426313 - DNA, 25 bp, Homo sapien
ctgcaattataatagtcccaacatt

SEQ ID NO: 1426314 - DNA, 25 bp, Homo sapien
gctgcatgcttgcttgttgtggtca

SEQ ID NO: 1426315 - DNA, 25 bp, Homo sapien
taagctgcatgcttgcttgttgtgg

SEQ ID NO: 1426316 - DNA, 25 bp, Homo sapien
gtaagctgcatgcttgcttgttgtg

SEQ ID NO: 1426317 - DNA, 25 bp, Homo sapien
tgcatgcttgcttgttgtggtcatt

SEQ ID NO: 1426318 - DNA, 25 bp, Homo sapien
tacaaatgtgtgatgcttgttagta

SEQ ID NO: 1426319 - DNA, 25 bp, Homo sapien
caaatgtgtgatgcttgttagtaga

SEQ ID NO: 1426320 - DNA, 25 bp, Homo sapien
aatacaaatgtgtgatgcttgttag

SEQ ID NO: 1426321 - DNA, 25 bp, Homo sapien
aatgtgtgatgcttgttagtagagt

SEQ ID NO: 1426322 - DNA, 25 bp, Homo sapien
aatggaacggttttacagtgatatc

SEQ ID NO: 1426323 - DNA, 25 bp, Homo sapien
atcaaaatggaacggttttacagtg

SEQ ID NO: 1426324 - DNA, 25 bp, Homo sapien
gaacggttttacagtgatatcatta

SEQ ID NO: 1426325 - DNA, 25 bp, Homo sapien
caaaatggaacggttttacagtgat

SEQ ID NO: 1426326 - DNA, 25 bp, Homo sapien
attggttacactgaaaatcatcaca

SEQ ID NO: 1426327 - DNA, 25 bp, Homo sapien
catcattggttacactgaaaatcat

SEQ ID NO: 1426328 - DNA, 25 bp, Homo sapien
tccttctcagtcacattttaacttt

SEQ ID NO: 1426329 - DNA, 25 bp, Homo sapien
ccatttaaaatttgccctactcaat

SEQ ID NO: 1426330 - DNA, 25 bp, Homo sapien
acagctaatcactcccatctacaga

SEQ ID NO: 1426331 - DNA, 25 bp, Homo sapien
tctacagattaaggtgtatatgcca

SEQ ID NO: 1426332 - DNA, 25 bp, Homo sapien
ctgcatttcttcaatcatgaattct

SEQ ID NO: 1426333 - DNA, 25 bp, Homo sapien
catttcttcaatcatgaattctgag

SEQ ID NO: 1426334 - DNA, 25 bp, Homo sapien
gcatttcttcaatcatgaattctga

SEQ ID NO: 1426335 - DNA, 25 bp, Homo sapien
tttcttcaatcatgaattctgagtc

SEQ ID NO: 1426336 - DNA, 25 bp, Homo sapien
tgaaattaagggacaatacacagta

SEQ ID NO: 1426337 - DNA, 25 bp, Homo sapien
gacaacttgcatacaattaggagta

SEQ ID NO: 1426338 - DNA, 25 bp, Homo sapien
tctccaaacattatagaatggctat

SEQ ID NO: 1426339 - DNA, 25 bp, Homo sapien
cataaactagaatgttaccgccaga

SEQ ID NO: 1426340 - DNA, 25 bp, Homo sapien
tcagataggagcgaaagacttaata

SEQ ID NO: 1426341 - DNA, 25 bp, Homo sapien
gttagtctgctgaactatgttatca

SEQ ID NO: 1426342 - DNA, 25 bp, Homo sapien
gacttaatattgctcatcagcgtta

SEQ ID NO: 1426343 - DNA, 25 bp, Homo sapien
acatcagataggagcgaaagactta

SEQ ID NO: 1426344 - DNA, 25 bp, Homo sapien
cacttaaaaaccagacttgaggcgg

SEQ ID NO: 1426345 - DNA, 25 bp, Homo sapien
tggacaacatagctgtacaaaatta

SEQ ID NO: 1426346 - DNA, 25 bp, Homo sapien
tacaacacttaaaaaccagacttga

SEQ ID NO: 1426347 - DNA, 25 bp, Homo sapien
cctggacaacatagctgtacaaaat

SEQ ID NO: 1426348 - DNA, 25 bp, Homo sapien
gggcaagagctagactcttgtctaa

SEQ ID NO: 1426349 - DNA, 25 bp, Homo sapien
tgggcaagagctagactcttgtcta

SEQ ID NO: 1426350 - DNA, 25 bp, Homo sapien
ggcaagagctagactcttgtctaaa

SEQ ID NO: 1426351 - DNA, 25 bp, Homo sapien
taaaacttgctccacacagtgtagt

SEQ ID NO: 1426352 - DNA, 25 bp, Homo sapien
ctttaaaacttgctccacacagtgt

SEQ ID NO: 1426353 - DNA, 25 bp, Homo sapien
tgctccacacagtgtagtcaagccg

SEQ ID NO: 1426354 - DNA, 25 bp, Homo sapien
cagtgtagtcaagccgactctccat

SEQ ID NO: 1426355 - DNA, 25 bp, Homo sapien
taatctcctttaccaataggtagta

SEQ ID NO: 1426356 - DNA, 25 bp, Homo sapien
tgtagaaatttaatctcctttacca

SEQ ID NO: 1426357 - DNA, 25 bp, Homo sapien
caataggtagtaataggtggatttc

SEQ ID NO: 1426358 - DNA, 25 bp, Homo sapien
tagtaataggtggatttctaaaaga

SEQ ID NO: 1426359 - DNA, 25 bp, Homo sapien
tctcagagagattcccatctgcttt

SEQ ID NO: 1426360 - DNA, 25 bp, Homo sapien
ttctcagagagattcccatctgctt

SEQ ID NO: 1426361 - DNA, 25 bp, Homo sapien
tttctcagagagattcccatctgct

SEQ ID NO: 1426362 - DNA, 25 bp, Homo sapien
agctcaatcaattaacgttaacatc

SEQ ID NO: 1426363 - DNA, 25 bp, Homo sapien
aatcaattaacgttaacatcaataa

SEQ ID NO: 1426364 - DNA, 25 bp, Homo sapien
tcaatcaattaacgttaacatcaat

SEQ ID NO: 1426365 - DNA, 25 bp, Homo sapien
gctcaatcaattaacgttaacatca

SEQ ID NO: 1426366 - DNA, 25 bp, Homo sapien
aaaaggtatgacaggaactgtcttc

SEQ ID NO: 1426367 - DNA, 25 bp, Homo sapien
caagtcatccatggataaaaacgtt

SEQ ID NO: 1426368 - DNA, 25 bp, Homo sapien
atccatggataaaaacgttaccagg

SEQ ID NO: 1426369 - DNA, 25 bp, Homo sapien
ccaagcaagtcatccatggataaaa

SEQ ID NO: 1426370 - DNA, 25 bp, Homo sapien
catccatggataaaaacgttaccag

SEQ ID NO: 1426371 - DNA, 25 bp, Homo sapien
aatgaggacttccattaaaatgcta

SEQ ID NO: 1426372 - DNA, 25 bp, Homo sapien
caaatgaggacttccattaaaatgc

SEQ ID NO: 1426373 - DNA, 25 bp, Homo sapien
aaatgaggacttccattaaaatgct

SEQ ID NO: 1426374 - DNA, 25 bp, Homo sapien
tacaaatgaggacttccattaaaat

SEQ ID NO: 1426375 - DNA, 25 bp, Homo sapien
tcagtgttacctttgtctacatgct

SEQ ID NO: 1426376 - DNA, 25 bp, Homo sapien
tcatttcaggtcagacatttgatca

SEQ ID NO: 1426377 - DNA, 25 bp, Homo sapien
ttcaggtcagacatttgatcaacat

SEQ ID NO: 1426378 - DNA, 25 bp, Homo sapien
acctttgtctacatgctcatttcag

SEQ ID NO: 1426379 - DNA, 25 bp, Homo sapien
ttaagctggtccaggcaagttggac

SEQ ID NO: 1426380 - DNA, 25 bp, Homo sapien
aagctggtccaggcaagttggactc

SEQ ID NO: 1426381 - DNA, 25 bp, Homo sapien
ctggtccaggcaagttggactccac

SEQ ID NO: 1426382 - DNA, 25 bp, Homo sapien
cagaaccattaagctggtccaggca

SEQ ID NO: 1426383 - DNA, 25 bp, Homo sapien
taagaaataagagtggtcttagaat

SEQ ID NO: 1426384 - DNA, 25 bp, Homo sapien
ctaagaaataagagtggtcttagaa

SEQ ID NO: 1426385 - DNA, 25 bp, Homo sapien
aatagccacagatgagtgttcaccc

SEQ ID NO: 1426386 - DNA, 25 bp, Homo sapien
gatgagtgttcaccccctgccaaaa

SEQ ID NO: 1426387 - DNA, 25 bp, Homo sapien
taagaccttcatgttcagtcagcat

SEQ ID NO: 1426388 - DNA, 25 bp, Homo sapien
tatttaatgcattcagcactaggag

SEQ ID NO: 1426389 - DNA, 25 bp, Homo sapien
cataacaagacaagaatccgccatt

SEQ ID NO: 1426390 - DNA, 25 bp, Homo sapien
catttgtgccgtaggaagtttgccc

SEQ ID NO: 1426391 - DNA, 25 bp, Homo sapien
cattcagcactaggaggtaactaaa

SEQ ID NO: 1426392 - DNA, 25 bp, Homo sapien
tgcttacttggatacagtttcactt

SEQ ID NO: 1426393 - DNA, 25 bp, Homo sapien
cttacttggatacagtttcacttac

SEQ ID NO: 1426394 - DNA, 25 bp, Homo sapien
ctgcttacttggatacagtttcact

SEQ ID NO: 1426395 - DNA, 25 bp, Homo sapien
gcttacttggatacagtttcactta

SEQ ID NO: 1426396 - DNA, 25 bp, Homo sapien
tttcaacttccagctttctgtctaa

SEQ ID NO: 1426397 - DNA, 25 bp, Homo sapien
catttcaacttccagctttctgtct

SEQ ID NO: 1426398 - DNA, 25 bp, Homo sapien
caacttccagctttctgtctaatgc

SEQ ID NO: 1426399 - DNA, 25 bp, Homo sapien
tcaacttccagctttctgtctaatg

SEQ ID NO: 1426400 - DNA, 25 bp, Homo sapien
ttaatggtagattggtggtacactg

SEQ ID NO: 1426401 - DNA, 25 bp, Homo sapien
ggtggtacactgcttaaccattaac

SEQ ID NO: 1426402 - DNA, 25 bp, Homo sapien
tattttaatggtagattggtggtac

SEQ ID NO: 1426403 - DNA, 25 bp, Homo sapien
ttggtggtacactgcttaaccatta

SEQ ID NO: 1426404 - DNA, 25 bp, Homo sapien
atcagacagatagtacatctcttca

SEQ ID NO: 1426405 - DNA, 25 bp, Homo sapien
tcttcagtattaaacttagtatcaa

SEQ ID NO: 1426406 - DNA, 25 bp, Homo sapien
cactaacatagataatcatcattgc

SEQ ID NO: 1426407 - DNA, 25 bp, Homo sapien
gagaagcactaacatagataatcat

SEQ ID NO: 1426408 - DNA, 25 bp, Homo sapien
acttagtatcaatatgagagcaaaa

SEQ ID NO: 1426409 - DNA, 25 bp, Homo sapien
ttgagttaggcttgctctttaggac

SEQ ID NO: 1426410 - DNA, 25 bp, Homo sapien
caatggcttgagttaggcttgctct

SEQ ID NO: 1426411 - DNA, 25 bp, Homo sapien
tgccaatggcttgagttaggcttgc

SEQ ID NO: 1426412 - DNA, 25 bp, Homo sapien
ctgtgtgccaatggcttgagttagg

SEQ ID NO: 1426413 - DNA, 25 bp, Homo sapien
tcatgtgaacttaggtgtactctct

SEQ ID NO: 1426414 - DNA, 25 bp, Homo sapien
tgtgaacttaggtgtactctctatg

SEQ ID NO: 1426415 - DNA, 25 bp, Homo sapien
cttcatgtgaacttaggtgtactct

SEQ ID NO: 1426416 - DNA, 25 bp, Homo sapien
aacttaggtgtactctctatgttcc

SEQ ID NO: 1426417 - DNA, 25 bp, Homo sapien
tcattctagcactcaagagtagcaa

SEQ ID NO: 1426418 - DNA, 25 bp, Homo sapien
caagagtagcaaataaactgtcatc

SEQ ID NO: 1426419 - DNA, 25 bp, Homo sapien
tcagttaagataatggtggttaaga

SEQ ID NO: 1426420 - DNA, 25 bp, Homo sapien
ggtggttaagatcctcatcattcta

SEQ ID NO: 1426421 - DNA, 25 bp, Homo sapien
caatggctttaaacctttttgagag

SEQ ID NO: 1426422 - DNA, 25 bp, Homo sapien
catccaatggctttaaacctttttg

SEQ ID NO: 1426423 - DNA, 25 bp, Homo sapien
ttcagtagctattctcatccttcct

SEQ ID NO: 1426424 - DNA, 25 bp, Homo sapien
ctattctcatccttccttggggaca

SEQ ID NO: 1426425 - DNA, 25 bp, Homo sapien
ttctcatccttccttggggacacaa

SEQ ID NO: 1426426 - DNA, 25 bp, Homo sapien
tcagtagctattctcatccttcctt

SEQ ID NO: 1426427 - DNA, 25 bp, Homo sapien
agaatttcagaaatcccttctgtcc

SEQ ID NO: 1426428 - DNA, 25 bp, Homo sapien
cttagatttcattcttcccaccata

SEQ ID NO: 1426429 - DNA, 25 bp, Homo sapien
cacctcttagatttcattcttccca

SEQ ID NO: 1426430 - DNA, 25 bp, Homo sapien
agatttcattcttcccaccatactt

SEQ ID NO: 1426431 - DNA, 25 bp, Homo sapien
gagaccacctcttagatttcattct

SEQ ID NO: 1426432 - DNA, 25 bp, Homo sapien
ctgtccataaggtgctatccagagc

SEQ ID NO: 1426433 - DNA, 25 bp, Homo sapien
ctttttaaaccaatgatgcaggtaa

SEQ ID NO: 1426434 - DNA, 25 bp, Homo sapien
ttaaaccaatgatgcaggtaacata

SEQ ID NO: 1426435 - DNA, 25 bp, Homo sapien
taaaccaatgatgcaggtaacatac

SEQ ID NO: 1426436 - DNA, 25 bp, Homo sapien
ttttaaaccaatgatgcaggtaaca

SEQ ID NO: 1426437 - DNA, 25 bp, Homo sapien
caatagcttactcgggtgactcggc

SEQ ID NO: 1426438 - DNA, 25 bp, Homo sapien
cagaactgcttaactcgggacgcgg

SEQ ID NO: 1426439 - DNA, 25 bp, Homo sapien
cctttcatgagagcggacggctgat

SEQ ID NO: 1426440 - DNA, 25 bp, Homo sapien
cagttaagaaccaccgatggcggcc

SEQ ID NO: 1426441 - DNA, 25 bp, Homo sapien
tcagagcggttggcattcatcatta

SEQ ID NO: 1426442 - DNA, 25 bp, Homo sapien
cagagcggttggcattcatcattac

SEQ ID NO: 1426443 - DNA, 25 bp, Homo sapien
gagcggttggcattcatcattactc

SEQ ID NO: 1426444 - DNA, 25 bp, Homo sapien
agagcggttggcattcatcattact

SEQ ID NO: 1426445 - DNA, 25 bp, Homo sapien
aacttgtaggccctgcaaaggcgcg

SEQ ID NO: 1426446 - DNA, 25 bp, Homo sapien
taacatagtcgcagcttaggtcacg

SEQ ID NO: 1426447 - DNA, 25 bp, Homo sapien
tagaagtcccagtcaattcagggtg

SEQ ID NO: 1426448 - DNA, 25 bp, Homo sapien
taggtcacgcatgcaccatatgtgc

SEQ ID NO: 1426449 - DNA, 25 bp, Homo sapien
aaaagacagtatggtgcctgggctc

SEQ ID NO: 1426450 - DNA, 25 bp, Homo sapien
cgaaaagacagtatggtgcctgggc

SEQ ID NO: 1426451 - DNA, 25 bp, Homo sapien
gaaaagacagtatggtgcctgggct

SEQ ID NO: 1426452 - DNA, 25 bp, Homo sapien
ctcgaaaagacagtatggtgcctgg

SEQ ID NO: 1426453 - DNA, 25 bp, Homo sapien
tccggcccattccggcccatttcca

SEQ ID NO: 1426454 - DNA, 25 bp, Homo sapien
ttccacccccggaggtaggtgctgc

SEQ ID NO: 1426455 - DNA, 25 bp, Homo sapien
gtccccatcttctccgaagttcctc

SEQ ID NO: 1426456 - DNA, 25 bp, Homo sapien
cccgcccgacgccttgtccccatct

SEQ ID NO: 1426457 - DNA, 25 bp, Homo sapien
cgcccgacgccttgtccccatcttc

SEQ ID NO: 1426458 - DNA, 25 bp, Homo sapien
tcttctccgaagttcctcagtgaca

SEQ ID NO: 1426459 - DNA, 25 bp, Homo sapien
attcctgagctcagtagtggctcac

SEQ ID NO: 1426460 - DNA, 25 bp, Homo sapien
ttcctgagctcagtagtggctcacg

SEQ ID NO: 1426461 - DNA, 25 bp, Homo sapien
tgacaagccaatagttcttggtggg

SEQ ID NO: 1426462 - DNA, 25 bp, Homo sapien
gatttgttctcccttcatttgacag

SEQ ID NO: 1426463 - DNA, 25 bp, Homo sapien
tgtccttcccctgatgacaagccaa

SEQ ID NO: 1426464 - DNA, 25 bp, Homo sapien
cctcctgtaagattctgtccttccc

SEQ ID NO: 1426465 - DNA, 25 bp, Homo sapien
taggaagaggtgcaaagaataagaa

SEQ ID NO: 1426466 - DNA, 25 bp, Homo sapien
gaagaggtgcaaagaataagaacat

SEQ ID NO: 1426467 - DNA, 25 bp, Homo sapien
ggaagaggtgcaaagaataagaaca

SEQ ID NO: 1426468 - DNA, 25 bp, Homo sapien
aaataggaagaggtgcaaagaataa

SEQ ID NO: 1426469 - DNA, 25 bp, Homo sapien
acaagggttggctactctgcccatg

SEQ ID NO: 1426470 - DNA, 25 bp, Homo sapien
tctgcccatgaagataatagtgttc

SEQ ID NO: 1426471 - DNA, 25 bp, Homo sapien
taatagtgttcagaggaacttctct

SEQ ID NO: 1426472 - DNA, 25 bp, Homo sapien
tacttaacacaagggttggctactc

SEQ ID NO: 1426473 - DNA, 25 bp, Homo sapien
ttagcgaacggccagcaatcacaac

SEQ ID NO: 1426474 - DNA, 25 bp, Homo sapien
ttggggtttagcgaacggccagcaa

SEQ ID NO: 1426475 - DNA, 25 bp, Homo sapien
tcacaacagcggtacttgcagctgc

SEQ ID NO: 1426476 - DNA, 25 bp, Homo sapien
agcaatcacaacagcggtacttgca

SEQ ID NO: 1426477 - DNA, 25 bp, Homo sapien
tttttggctcaagatctgaactcca

SEQ ID NO: 1426478 - DNA, 25 bp, Homo sapien
tccaagccttgtgctaggtaataag

SEQ ID NO: 1426479 - DNA, 25 bp, Homo sapien
taccagccgctgaaagatttttggc

SEQ ID NO: 1426480 - DNA, 25 bp, Homo sapien
taagagttccattcaggtaacccag

SEQ ID NO: 1426481 - DNA, 25 bp, Homo sapien
caatgagagttaaaaccctgaggac

SEQ ID NO: 1426482 - DNA, 25 bp, Homo sapien
caactcctgctatcatttgaggcaa

SEQ ID NO: 1426483 - DNA, 25 bp, Homo sapien
aatccatgtgaaagagggtgtgagc

SEQ ID NO: 1426484 - DNA, 25 bp, Homo sapien
gagttgaccacttctaactggagtc

SEQ ID NO: 1426485 - DNA, 25 bp, Homo sapien
acaattaggcatgtggccacactat

SEQ ID NO: 1426486 - DNA, 25 bp, Homo sapien
caattaggcatgtggccacactatt

SEQ ID NO: 1426487 - DNA, 25 bp, Homo sapien
ggatcacctgagatcgggagttcaa

SEQ ID NO: 1426488 - DNA, 25 bp, Homo sapien
tttgggggtgccaaggaggtggatc

SEQ ID NO: 1426489 - DNA, 25 bp, Homo sapien
agcactttgggggtgccaaggaggt

SEQ ID NO: 1426490 - DNA, 25 bp, Homo sapien
cactttgggggtgccaaggaggtgg

SEQ ID NO: 1426491 - DNA, 25 bp, Homo sapien
ggccttttccacgtgttcctgctgt

SEQ ID NO: 1426492 - DNA, 25 bp, Homo sapien
tttggagagggctgtattatagcag

SEQ ID NO: 1426493 - DNA, 25 bp, Homo sapien
gctgtattatagcaggcctgtggag

SEQ ID NO: 1426494 - DNA, 25 bp, Homo sapien
ttttgcatgccttaacactggaaac

SEQ ID NO: 1426495 - DNA, 25 bp, Homo sapien
tcaagaaatgccttatggaatgcat

SEQ ID NO: 1426496 - DNA, 25 bp, Homo sapien
ctcaagaaatgccttatggaatgca

SEQ ID NO: 1426497 - DNA, 25 bp, Homo sapien
tgaagccgtcctcaatgcggaagcg

SEQ ID NO: 1426498 - DNA, 25 bp, Homo sapien
tcagggctgaacagatcgacaaggc

SEQ ID NO: 1426499 - DNA, 25 bp, Homo sapien
tttgaagggcaactcaagcacctgg

SEQ ID NO: 1426500 - DNA, 25 bp, Homo sapien
tcatagatgctgaacacgactctcc

SEQ ID NO: 1426501 - DNA, 25 bp, Homo sapien
ccctgctgacctgtacctgtgtagc

SEQ ID NO: 1426502 - DNA, 25 bp, Homo sapien
tgtacctgtgtagctttcggcagtc

SEQ ID NO: 1426503 - DNA, 25 bp, Homo sapien
aaataatagattgacctgccctgct

SEQ ID NO: 1426504 - DNA, 25 bp, Homo sapien
taatagattgacctgccctgctgac

SEQ ID NO: 1426505 - DNA, 25 bp, Homo sapien
tgacatcggtgattcggccttcggt

SEQ ID NO: 1426506 - DNA, 25 bp, Homo sapien
gatggccgctctggattgctctgca

SEQ ID NO: 1426507 - DNA, 25 bp, Homo sapien
ggccttcggtcttattggacaccca

SEQ ID NO: 1426508 - DNA, 25 bp, Homo sapien
tggtgttaaccagcaccagaacagt

SEQ ID NO: 1426509 - DNA, 25 bp, Homo sapien
agcttggctccatataccaactcac

SEQ ID NO: 1426510 - DNA, 25 bp, Homo sapien
tgtctccaaaaaggcgattggctga

SEQ ID NO: 1426511 - DNA, 25 bp, Homo sapien
gattggctgatactaacttggagga

SEQ ID NO: 1426512 - DNA, 25 bp, Homo sapien
tgttggcttttcgatagagtcggca

SEQ ID NO: 1426513 - DNA, 25 bp, Homo sapien
gagtcggcagttcagtttggcaaag

SEQ ID NO: 1426514 - DNA, 25 bp, Homo sapien
tcatgggaatgtcccgcggcttggc

SEQ ID NO: 1426515 - DNA, 25 bp, Homo sapien
acagttcccagacacgccggttggt

SEQ ID NO: 1426516 - DNA, 25 bp, Homo sapien
caaagcgggaattggccttggacag

SEQ ID NO: 1426517 - DNA, 25 bp, Homo sapien
cttggtcatagcaaaagccgtggag

SEQ ID NO: 1426518 - DNA, 25 bp, Homo sapien
gggttgccccagtaaagcagaggat

SEQ ID NO: 1426519 - DNA, 25 bp, Homo sapien
ggttgccccagtaaagcagaggatt

SEQ ID NO: 1426520 - DNA, 25 bp, Homo sapien
gttgccccagtaaagcagaggattc

SEQ ID NO: 1426521 - DNA, 25 bp, Homo sapien
cagttcagttgcctggacgtggtca

SEQ ID NO: 1426522 - DNA, 25 bp, Homo sapien
tagacttcttgccaggggacagttc

SEQ ID NO: 1426523 - DNA, 25 bp, Homo sapien
ggcccgggacaggttcagtcctaga

SEQ ID NO: 1426524 - DNA, 25 bp, Homo sapien
cccgggacaggttcagtcctagact

SEQ ID NO: 1426525 - DNA, 25 bp, Homo sapien
atttggagtattatgtgctcaattc

SEQ ID NO: 1426526 - DNA, 25 bp, Homo sapien
atctgatggttatttggagtattat

SEQ ID NO: 1426527 - DNA, 25 bp, Homo sapien
gatggttatttggagtattatgtgc

SEQ ID NO: 1426528 - DNA, 25 bp, Homo sapien
ggttatttggagtattatgtgctca

SEQ ID NO: 1426529 - DNA, 25 bp, Homo sapien
ttatggttcctgcgtgtacacaagg

SEQ ID NO: 1426530 - DNA, 25 bp, Homo sapien
tggttcctgcgtgtacacaaggggg

SEQ ID NO: 1426531 - DNA, 25 bp, Homo sapien
gttcctgcgtgtacacaagggggtc

SEQ ID NO: 1426532 - DNA, 25 bp, Homo sapien
tatggttcctgcgtgtacacaaggg

SEQ ID NO: 1426533 - DNA, 25 bp, Homo sapien
gacaggcacccagtgcagattcacg

SEQ ID NO: 1426534 - DNA, 25 bp, Homo sapien
ttcacggacgtggtccgttgggcaa

SEQ ID NO: 1426535 - DNA, 25 bp, Homo sapien
cagtgcagattcacggacgtggtcc

SEQ ID NO: 1426536 - DNA, 25 bp, Homo sapien
ggcacccagtgcagattcacggacg

SEQ ID NO: 1426537 - DNA, 25 bp, Homo sapien
cagcggcaccaagggagatgtggaa

SEQ ID NO: 1426538 - DNA, 25 bp, Homo sapien
aacagaggtgcaaagccggagagaa

SEQ ID NO: 1426539 - DNA, 25 bp, Homo sapien
ttgccttcttgcgtggtctgagtcc

SEQ ID NO: 1426540 - DNA, 25 bp, Homo sapien
ttcaagaacagaggtgcaaagccgg

SEQ ID NO: 1426541 - DNA, 25 bp, Homo sapien
aggttacagttcctatcacattgga

SEQ ID NO: 1426542 - DNA, 25 bp, Homo sapien
gaggttacagttcctatcacattgg

SEQ ID NO: 1426543 - DNA, 25 bp, Homo sapien
tggagatagtgtgatctgaggcaat

SEQ ID NO: 1426544 - DNA, 25 bp, Homo sapien
gaggcaatccgcctgaaaactggtt

SEQ ID NO: 1426545 - DNA, 25 bp, Homo sapien
gttctttcctctaaatctcgcagag

SEQ ID NO: 1426546 - DNA, 25 bp, Homo sapien
tcctctaaatctcgcagaggttcca

SEQ ID NO: 1426547 - DNA, 25 bp, Homo sapien
ccacaggtcggtctataagccacat

SEQ ID NO: 1426548 - DNA, 25 bp, Homo sapien
tctttttccacaggtcggtctataa

SEQ ID NO: 1426549 - DNA, 25 bp, Homo sapien
gggcattcagcacactagctctttc

SEQ ID NO: 1426550 - DNA, 25 bp, Homo sapien
agcctgggcattcagcacactagct

SEQ ID NO: 1426551 - DNA, 25 bp, Homo sapien
gtggtgttagctcaccgcaacttct

SEQ ID NO: 1426552 - DNA, 25 bp, Homo sapien
ggtgttagctcaccgcaacttctac

SEQ ID NO: 1426553 - DNA, 25 bp, Homo sapien
tacctcccgagttcaagcgattttc

SEQ ID NO: 1426554 - DNA, 25 bp, Homo sapien
cagtggtgttagctcaccgcaactt

SEQ ID NO: 1426555 - DNA, 25 bp, Homo sapien
ggtggcgcaggcctatattctcagc

SEQ ID NO: 1426556 - DNA, 25 bp, Homo sapien
gcatggtggcgcaggcctatattct

SEQ ID NO: 1426557 - DNA, 25 bp, Homo sapien
gggcatggtggcgcaggcctatatt

SEQ ID NO: 1426558 - DNA, 25 bp, Homo sapien
catggtggcgcaggcctatattctc

SEQ ID NO: 1426559 - DNA, 25 bp, Homo sapien
cgtgtaagaaagtaatctcaagatt

SEQ ID NO: 1426560 - DNA, 25 bp, Homo sapien
ttagaataagatggcacacactcat

SEQ ID NO: 1426561 - DNA, 25 bp, Homo sapien
tctcaagattagaataagatggcac

SEQ ID NO: 1426562 - DNA, 25 bp, Homo sapien
aaacgtgtaagaaagtaatctcaag

SEQ ID NO: 1426563 - DNA, 25 bp, Homo sapien
caaaaatcggcaacaagtgggaaca

SEQ ID NO: 1426564 - DNA, 25 bp, Homo sapien
caaaattgagaaagatggccctagt

SEQ ID NO: 1426565 - DNA, 25 bp, Homo sapien
aatttaggccaacgatccatctgga

SEQ ID NO: 1426566 - DNA, 25 bp, Homo sapien
attttatctgcaactcatgggagcc

SEQ ID NO: 1426567 - DNA, 25 bp, Homo sapien
tgtgaaaataaagttcgttctctag

SEQ ID NO: 1426568 - DNA, 25 bp, Homo sapien
tacacatttttggacacgatattat

SEQ ID NO: 1426569 - DNA, 25 bp, Homo sapien
gataaagtttaggagaaattcagtg

SEQ ID NO: 1426570 - DNA, 25 bp, Homo sapien
tctctagggatgtttcagggataaa

SEQ ID NO: 1426571 - DNA, 25 bp, Homo sapien
tgaccacagtgatagcagaagctgg

SEQ ID NO: 1426572 - DNA, 25 bp, Homo sapien
gttacagagtcaagcagttatgccc

SEQ ID NO: 1426573 - DNA, 25 bp, Homo sapien
gattccagtggtgaggtaagtccct

SEQ ID NO: 1426574 - DNA, 25 bp, Homo sapien
gaattcctaaaaccgctgatgagca

SEQ ID NO: 1426575 - DNA, 25 bp, Homo sapien
aagaagacaaatgtataagaaaact

SEQ ID NO: 1426576 - DNA, 25 bp, Homo sapien
gacaaatgtataagaaaactggaaa

SEQ ID NO: 1426577 - DNA, 25 bp, Homo sapien
gaagacaaatgtataagaaaactgg

SEQ ID NO: 1426578 - DNA, 25 bp, Homo sapien
aagacaaatgtataagaaaactgga

SEQ ID NO: 1426579 - DNA, 25 bp, Homo sapien
ttatcgcaacagctgcgctcatgcg

SEQ ID NO: 1426580 - DNA, 25 bp, Homo sapien
taccacctcccaatcggtcaattta

SEQ ID NO: 1426581 - DNA, 25 bp, Homo sapien
cggtcaatttatcgcaacagctgcg

SEQ ID NO: 1426582 - DNA, 25 bp, Homo sapien
caacagctgcgctcatgcgaaaaaa

SEQ ID NO: 1426583 - DNA, 25 bp, Homo sapien
ttaaagccctggatccaaggcgtcc

SEQ ID NO: 1426584 - DNA, 25 bp, Homo sapien
tataaacacggtgccttgactgggc

SEQ ID NO: 1426585 - DNA, 25 bp, Homo sapien
tgaacgcaggcgaaacaccaaacat

SEQ ID NO: 1426586 - DNA, 25 bp, Homo sapien
tatgcccgacaaactgattaggagc

SEQ ID NO: 1426587 - DNA, 25 bp, Homo sapien
gagcagaactgggagtaactcctga

SEQ ID NO: 1426588 - DNA, 25 bp, Homo sapien
caaggctgatccatttggtacatca

SEQ ID NO: 1426589 - DNA, 25 bp, Homo sapien
gaggctgatattctcttgtgtcaag

SEQ ID NO: 1426590 - DNA, 25 bp, Homo sapien
ctggtcttgtttgataggaggctga

SEQ ID NO: 1426591 - DNA, 25 bp, Homo sapien
tattgtagggttgttcatggtagtt

SEQ ID NO: 1426592 - DNA, 25 bp, Homo sapien
atactgtttattgtagggttgttca

SEQ ID NO: 1426593 - DNA, 25 bp, Homo sapien
tagggttgttcatggtagttgatat

SEQ ID NO: 1426594 - DNA, 25 bp, Homo sapien
tgttcatggtagttgatatgtatct

SEQ ID NO: 1426595 - DNA, 25 bp, Homo sapien
cttgtttacttgtattcagtttgct

SEQ ID NO: 1426596 - DNA, 25 bp, Homo sapien
cctcagccggaaccttgttttgtgg

SEQ ID NO: 1426597 - DNA, 25 bp, Homo sapien
aatcagttatcatctatttaatggt

SEQ ID NO: 1426598 - DNA, 25 bp, Homo sapien
tttccacctggtgcagttccaagct

SEQ ID NO: 1426599 - DNA, 25 bp, Homo sapien
caactgctcacttgagatcatccca

SEQ ID NO: 1426600 - DNA, 25 bp, Homo sapien
ctgtgactggcctgccagggtgttt

SEQ ID NO: 1426601 - DNA, 25 bp, Homo sapien
tggcctgccagggtgtttgcctccc

SEQ ID NO: 1426602 - DNA, 25 bp, Homo sapien
tgcaacaccagcctgttactaacag

SEQ ID NO: 1426603 - DNA, 25 bp, Homo sapien
ctgcaacaccagcctgttactaaca

SEQ ID NO: 1426604 - DNA, 25 bp, Homo sapien
gcaacaccagcctgttactaacagc

SEQ ID NO: 1426605 - DNA, 25 bp, Homo sapien
gccaatttttgcactttttgtagtg

SEQ ID NO: 1426606 - DNA, 25 bp, Homo sapien
tgcactttttgtagtgaagggattt

SEQ ID NO: 1426607 - DNA, 25 bp, Homo sapien
atttttgcactttttgtagtgaagg

SEQ ID NO: 1426608 - DNA, 25 bp, Homo sapien
ttttgcactttttgtagtgaaggga

SEQ ID NO: 1426609 - DNA, 25 bp, Homo sapien
tacagaactacgtaaatgaaaagtg

SEQ ID NO: 1426610 - DNA, 25 bp, Homo sapien
ccacctgcctaaaatatcagggata

SEQ ID NO: 1426611 - DNA, 25 bp, Homo sapien
ctaagggtcaaataagataagtggt

SEQ ID NO: 1426612 - DNA, 25 bp, Homo sapien
tgaagacttgggttcgtgtttcaac

SEQ ID NO: 1426613 - DNA, 25 bp, Homo sapien
gtcgtagctgttctctctcagcaga

SEQ ID NO: 1426614 - DNA, 25 bp, Homo sapien
gaaggggttttccatgactggccac

SEQ ID NO: 1426615 - DNA, 25 bp, Homo sapien
ctgatggttcaattgctgcaattct

SEQ ID NO: 1426616 - DNA, 25 bp, Homo sapien
tagtccacgtagctgggtctgctgg

SEQ ID NO: 1426617 - DNA, 25 bp, Homo sapien
ccgtgggttccatatggactataat

SEQ ID NO: 1426618 - DNA, 25 bp, Homo sapien
ccaccgtgggttccatatggactat

SEQ ID NO: 1426619 - DNA, 25 bp, Homo sapien
atgaggtgaatatggagaagctccc

SEQ ID NO: 1426620 - DNA, 25 bp, Homo sapien
gatgaggtgaatatggagaagctcc

SEQ ID NO: 1426621 - DNA, 25 bp, Homo sapien
agagaatgatttattatggtataat

SEQ ID NO: 1426622 - DNA, 25 bp, Homo sapien
aatgatttattatggtataattcac

SEQ ID NO: 1426623 - DNA, 25 bp, Homo sapien
gaatgatttattatggtataattca

SEQ ID NO: 1426624 - DNA, 25 bp, Homo sapien
tgatttattatggtataattcacag

SEQ ID NO: 1426625 - DNA, 25 bp, Homo sapien
tgagatggcaccaaaccgagacact

SEQ ID NO: 1426626 - DNA, 25 bp, Homo sapien
taatagattttgtaggagctccctg

SEQ ID NO: 1426627 - DNA, 25 bp, Homo sapien
tgccatagcctgcattggaccagca

SEQ ID NO: 1426628 - DNA, 25 bp, Homo sapien
tgaagatctaatcgctggtccctca

SEQ ID NO: 1426629 - DNA, 25 bp, Homo sapien
gtttaaagataactcaactgcagag

SEQ ID NO: 1426630 - DNA, 25 bp, Homo sapien
tcatgccattctccgtgacaaagaa

SEQ ID NO: 1426631 - DNA, 25 bp, Homo sapien
taataaatgctctgtctcggtaagt

SEQ ID NO: 1426632 - DNA, 25 bp, Homo sapien
gagaaattgctatttgcacagaaat

SEQ ID NO: 1426633 - DNA, 25 bp, Homo sapien
gtatttcccagctaccttcaagtct

SEQ ID NO: 1426634 - DNA, 25 bp, Homo sapien
cgatggtgtcacatgaccagggaga

SEQ ID NO: 1426635 - DNA, 25 bp, Homo sapien
tctttggttccaatgtaggagccga

SEQ ID NO: 1426636 - DNA, 25 bp, Homo sapien
gagagtattggctataatcatttcc

SEQ ID NO: 1426637 - DNA, 25 bp, Homo sapien
gcgatgtagttcatctagactagga

SEQ ID NO: 1426638 - DNA, 25 bp, Homo sapien
ctagctgggccattatttcctttcg

SEQ ID NO: 1426639 - DNA, 25 bp, Homo sapien
caaggttggtgaaggtgcaaaagga

SEQ ID NO: 1426640 - DNA, 25 bp, Homo sapien
tccggatgaaaggtaggaggcaagg

SEQ ID NO: 1426641 - DNA, 25 bp, Homo sapien
gaggaagccggctataaggaggttc

SEQ ID NO: 1426642 - DNA, 25 bp, Homo sapien
gaggaggaagccggctataaggagg

SEQ ID NO: 1426643 - DNA, 25 bp, Homo sapien
aggaggaagccggctataaggaggt

SEQ ID NO: 1426644 - DNA, 25 bp, Homo sapien
aaagtaaggaatcacagcaagcaac

SEQ ID NO: 1426645 - DNA, 25 bp, Homo sapien
gcaagcaacagtcaaattaagtcta

SEQ ID NO: 1426646 - DNA, 25 bp, Homo sapien
caaagggttattgtcattgcataaa

SEQ ID NO: 1426647 - DNA, 25 bp, Homo sapien
gcaacagtcaaattaagtctatgta

SEQ ID NO: 1426648 - DNA, 25 bp, Homo sapien
gtactgctgcaggtggaatctcaat

SEQ ID NO: 1426649 - DNA, 25 bp, Homo sapien
tgtaagacggagcagggtacactcg

SEQ ID NO: 1426650 - DNA, 25 bp, Homo sapien
taatgatccaagtagggaggagcag

SEQ ID NO: 1426651 - DNA, 25 bp, Homo sapien
gctgtgtgccatactgagagtttac

SEQ ID NO: 1426652 - DNA, 25 bp, Homo sapien
caacagttgtggcaatagtttctca

SEQ ID NO: 1426653 - DNA, 25 bp, Homo sapien
agttctcttggcagctaactctgga

SEQ ID NO: 1426654 - DNA, 25 bp, Homo sapien
caacttttgcctcaaatgacgtgat

SEQ ID NO: 1426655 - DNA, 25 bp, Homo sapien
gatcttggaattaagcagttaggac

SEQ ID NO: 1426656 - DNA, 25 bp, Homo sapien
gctggttcaaatggcggagctgctc

SEQ ID NO: 1426657 - DNA, 25 bp, Homo sapien
gaacctcgaggtaccatctgaagtg

SEQ ID NO: 1426658 - DNA, 25 bp, Homo sapien
gctggatataactgagaacctcgag

SEQ ID NO: 1426659 - DNA, 25 bp, Homo sapien
tggtaacaggcattggaggcagatc

SEQ ID NO: 1426660 - DNA, 25 bp, Homo sapien
cttggaggtatagaatgtggattca

SEQ ID NO: 1426661 - DNA, 25 bp, Homo sapien
tgtggattcacaggtaaggcagaaa

SEQ ID NO: 1426662 - DNA, 25 bp, Homo sapien
aatactcttaggaacagattctagc

SEQ ID NO: 1426663 - DNA, 25 bp, Homo sapien
gaaatactcttaggaacagattcta

SEQ ID NO: 1426664 - DNA, 25 bp, Homo sapien
tgtattccctgttgatacaattcca

SEQ ID NO: 1426665 - DNA, 25 bp, Homo sapien
ggatccaggagcactactgctcaga

SEQ ID NO: 1426666 - DNA, 25 bp, Homo sapien
tccctcgcggaataagctgtgttac

SEQ ID NO: 1426667 - DNA, 25 bp, Homo sapien
tacaattccatttggcagagcagga

SEQ ID NO: 1426668 - DNA, 25 bp, Homo sapien
gcaggcccacctcattaagttgacc

SEQ ID NO: 1426669 - DNA, 25 bp, Homo sapien
tcaagggtcttctcggaaccaggcg

SEQ ID NO: 1426670 - DNA, 25 bp, Homo sapien
aaccaggcgcttattcattttacga

SEQ ID NO: 1426671 - DNA, 25 bp, Homo sapien
gttgacccaaagaggcactcaaggg

SEQ ID NO: 1426672 - DNA, 25 bp, Homo sapien
gattcagggtgttatgcccttagac

SEQ ID NO: 1426673 - DNA, 25 bp, Homo sapien
ggattcagggtgttatgcccttaga

SEQ ID NO: 1426674 - DNA, 25 bp, Homo sapien
tggattcagggtgttatgcccttag

SEQ ID NO: 1426675 - DNA, 25 bp, Homo sapien
ggtggattcagggtgttatgccctt

SEQ ID NO: 1426676 - DNA, 25 bp, Homo sapien
aaatgtacagctggccccacgaggg

SEQ ID NO: 1426677 - DNA, 25 bp, Homo sapien
ctctgcttcatatctcgacacatgt

SEQ ID NO: 1426678 - DNA, 25 bp, Homo sapien
cccacgagggcatcctcctctctgc

SEQ ID NO: 1426679 - DNA, 25 bp, Homo sapien
tcatatctcgacacatgtatgtttt

SEQ ID NO: 1426680 - DNA, 25 bp, Homo sapien
tatgagacacaacactaaactggac

SEQ ID NO: 1426681 - DNA, 25 bp, Homo sapien
gagttttacgttcacaggcttacta

SEQ ID NO: 1426682 - DNA, 25 bp, Homo sapien
tgaacctaatataaatcctgagagc

SEQ ID NO: 1426683 - DNA, 25 bp, Homo sapien
tcactatatggcagactttaaaggt

SEQ ID NO: 1426684 - DNA, 25 bp, Homo sapien
gttttaaggcatatccacagtgggt

SEQ ID NO: 1426685 - DNA, 25 bp, Homo sapien
caaatgctgccatatccaatgtgaa

SEQ ID NO: 1426686 - DNA, 25 bp, Homo sapien
tatctgtaggtatacccacagtggt

SEQ ID NO: 1426687 - DNA, 25 bp, Homo sapien
gataaagttatcagcctaatgcagt

SEQ ID NO: 1426688 - DNA, 25 bp, Homo sapien
cagcccatgtaccactgtacgcaca

SEQ ID NO: 1426689 - DNA, 25 bp, Homo sapien
cccatgtaccactgtacgcacagca

SEQ ID NO: 1426690 - DNA, 25 bp, Homo sapien
atgtaccactgtacgcacagcaacc

SEQ ID NO: 1426691 - DNA, 25 bp, Homo sapien
catgtaccactgtacgcacagcaac

SEQ ID NO: 1426692 - DNA, 25 bp, Homo sapien
gaacactctgtgcaaaagaggctgg

SEQ ID NO: 1426693 - DNA, 25 bp, Homo sapien
tcttagtcggttcaagtttgctggg

SEQ ID NO: 1426694 - DNA, 25 bp, Homo sapien
tccagttcgctggagagcaattgtt

SEQ ID NO: 1426695 - DNA, 25 bp, Homo sapien
ggtcaatgtttgctaacagctccaa

SEQ ID NO: 1426696 - DNA, 25 bp, Homo sapien
cagggaagacttatagagcagagca

SEQ ID NO: 1426697 - DNA, 25 bp, Homo sapien
gagttgcaaaacttccgatacaagc

SEQ ID NO: 1426698 - DNA, 25 bp, Homo sapien
gagcagagcaaacaacctacattgt

SEQ ID NO: 1426699 - DNA, 25 bp, Homo sapien
gatacaagctcctgtccaaacctaa

SEQ ID NO: 1426700 - DNA, 25 bp, Homo sapien
tgattggttatgacatgacactggc

SEQ ID NO: 1426701 - DNA, 25 bp, Homo sapien
tggtaaaaggttagtgtactctaca

SEQ ID NO: 1426702 - DNA, 25 bp, Homo sapien
tctacactgagaatggtcaagttca

SEQ ID NO: 1426703 - DNA, 25 bp, Homo sapien
gagtggtctctagagttggccttca

SEQ ID NO: 1426704 - DNA, 25 bp, Homo sapien
tgggagtcatgttctcgccgcagag

SEQ ID NO: 1426705 - DNA, 25 bp, Homo sapien
gcaatctgcactatctgggagtcat

SEQ ID NO: 1426706 - DNA, 25 bp, Homo sapien
cgccgcagagcttcataggttctaa

SEQ ID NO: 1426707 - DNA, 25 bp, Homo sapien
actggtccggtgcaattcgtaagcc

SEQ ID NO: 1426708 - DNA, 25 bp, Homo sapien
caatgagctaggtgggactgatgac

SEQ ID NO: 1426709 - DNA, 25 bp, Homo sapien
caatttgggataagagactatgtcc

SEQ ID NO: 1426710 - DNA, 25 bp, Homo sapien
tgatgactgtagagcttcagatgct

SEQ ID NO: 1426711 - DNA, 25 bp, Homo sapien
gaggcggtgcttattcaatttggga

SEQ ID NO: 1426712 - DNA, 25 bp, Homo sapien
caaaaatctataaaccttgacttga

SEQ ID NO: 1426713 - DNA, 25 bp, Homo sapien
taactataataagaccccatctaca

SEQ ID NO: 1426714 - DNA, 25 bp, Homo sapien
tcttcagaccaattctgcacagtct

SEQ ID NO: 1426715 - DNA, 25 bp, Homo sapien
caagctgagctttaatgtaggttca

SEQ ID NO: 1426716 - DNA, 25 bp, Homo sapien
tttagaggcttgaggaaaccgtggc

SEQ ID NO: 1426717 - DNA, 25 bp, Homo sapien
aacatgcccaatgctagttttagag

SEQ ID NO: 1426718 - DNA, 25 bp, Homo sapien
accatcttctaaggccagcagaacc

SEQ ID NO: 1426719 - DNA, 25 bp, Homo sapien
aaacaggaggctctataaaggagct

SEQ ID NO: 1426720 - DNA, 25 bp, Homo sapien
aaccaaaatttatcaagtacataga

SEQ ID NO: 1426721 - DNA, 25 bp, Homo sapien
tatttaatcatttctgcagctattc

SEQ ID NO: 1426722 - DNA, 25 bp, Homo sapien
gggaatatttaatcatttctgcagc

SEQ ID NO: 1426723 - DNA, 25 bp, Homo sapien
atcaagtacatagataagataaatc

SEQ ID NO: 1426724 - DNA, 25 bp, Homo sapien
ggactagagtcacaagcttcctctg

SEQ ID NO: 1426725 - DNA, 25 bp, Homo sapien
tgcattgggcgactcagaacactct

SEQ ID NO: 1426726 - DNA, 25 bp, Homo sapien
gttcacctaaagatcgagctgccct

SEQ ID NO: 1426727 - DNA, 25 bp, Homo sapien
gagctgccctcatggcacgaatcct

SEQ ID NO: 1426728 - DNA, 25 bp, Homo sapien
agtacaatgctaattcttctacaca

SEQ ID NO: 1426729 - DNA, 25 bp, Homo sapien
gcggttttaagtacaatgctaattc

SEQ ID NO: 1426730 - DNA, 25 bp, Homo sapien
ctctagcactgctgagcggttttaa

SEQ ID NO: 1426731 - DNA, 25 bp, Homo sapien
cactgctgagcggttttaagtacaa

SEQ ID NO: 1426732 - DNA, 25 bp, Homo sapien
acacaaagtaataggctgctgctca

SEQ ID NO: 1426733 - DNA, 25 bp, Homo sapien
aagtaataggctgctgctcagggac

SEQ ID NO: 1426734 - DNA, 25 bp, Homo sapien
caaagtaataggctgctgctcaggg

SEQ ID NO: 1426735 - DNA, 25 bp, Homo sapien
ctacacaaagtaataggctgctgct

SEQ ID NO: 1426736 - DNA, 25 bp, Homo sapien
cacttaacaatgtgttcaagggtct

SEQ ID NO: 1426737 - DNA, 25 bp, Homo sapien
ctttggaaagacgaatctattttct

SEQ ID NO: 1426738 - DNA, 25 bp, Homo sapien
caatcatcattgacagacatatagg

SEQ ID NO: 1426739 - DNA, 25 bp, Homo sapien
tcaagggtcttccaggttgtatcag

SEQ ID NO: 1426740 - DNA, 25 bp, Homo sapien
tgatcaggctcagatgatgctgcca

SEQ ID NO: 1426741 - DNA, 25 bp, Homo sapien
tcaggctcagatgatgctgccacct

SEQ ID NO: 1426742 - DNA, 25 bp, Homo sapien
cctccatcaggtgatcaggctcaga

SEQ ID NO: 1426743 - DNA, 25 bp, Homo sapien
atcaggtgatcaggctcagatgatg

SEQ ID NO: 1426744 - DNA, 25 bp, Homo sapien
tatgcaacactagctgggtacggtg

SEQ ID NO: 1426745 - DNA, 25 bp, Homo sapien
taagggcctatgtaccagacagtct

SEQ ID NO: 1426746 - DNA, 25 bp, Homo sapien
cagacagtctttcttacgtgtgtaa

SEQ ID NO: 1426747 - DNA, 25 bp, Homo sapien
cagattgtccattgccagcgtatag

SEQ ID NO: 1426748 - DNA, 25 bp, Homo sapien
gccacaacccaaactgatgggcttt

SEQ ID NO: 1426749 - DNA, 25 bp, Homo sapien
acatcttgcagacagtatggccaca

SEQ ID NO: 1426750 - DNA, 25 bp, Homo sapien
caagccttgcggtggagtttattca

SEQ ID NO: 1426751 - DNA, 25 bp, Homo sapien
tgagcacccacgagctgcagcaatg

SEQ ID NO: 1426752 - DNA, 25 bp, Homo sapien
tgtggagcttgtacaggcattgctt

SEQ ID NO: 1426753 - DNA, 25 bp, Homo sapien
aatccgtccattgtggagcttgtac

SEQ ID NO: 1426754 - DNA, 25 bp, Homo sapien
aaatccgtccattgtggagcttgta

SEQ ID NO: 1426755 - DNA, 25 bp, Homo sapien
acacacacaaatctaaagcaaagat

SEQ ID NO: 1426756 - DNA, 25 bp, Homo sapien
ctggagttacaattcacgaacacaa

SEQ ID NO: 1426757 - DNA, 25 bp, Homo sapien
caaagattccactggaatcaaaatc

SEQ ID NO: 1426758 - DNA, 25 bp, Homo sapien
tggagttacaattcacgaacacaaa

SEQ ID NO: 1426759 - DNA, 25 bp, Homo sapien
gattcaaaagagtgacactgctgct

SEQ ID NO: 1426760 - DNA, 25 bp, Homo sapien
gcattcaaggcctgcagataaactg

SEQ ID NO: 1426761 - DNA, 25 bp, Homo sapien
aagcaatgattagtttccccaccag

SEQ ID NO: 1426762 - DNA, 25 bp, Homo sapien
acagaagacaaatgatgagccctct

SEQ ID NO: 1426763 - DNA, 25 bp, Homo sapien
gagacacacaaatctgactggcaaa

SEQ ID NO: 1426764 - DNA, 25 bp, Homo sapien
gaaaatctaacctgtgcctgataaa

SEQ ID NO: 1426765 - DNA, 25 bp, Homo sapien
gaaatcagtcctcttgctgcaataa

SEQ ID NO: 1426766 - DNA, 25 bp, Homo sapien
tgggatgcagggacaaataatcaca

SEQ ID NO: 1426767 - DNA, 25 bp, Homo sapien
actggtatgtcactcagtcactgaa

SEQ ID NO: 1426768 - DNA, 25 bp, Homo sapien
catgcttttatcacagtaactggta

SEQ ID NO: 1426769 - DNA, 25 bp, Homo sapien
gcctcaagtctcacccttctgggct

SEQ ID NO: 1426770 - DNA, 25 bp, Homo sapien
ccggcaattccccatgcttttatca

SEQ ID NO: 1426771 - DNA, 25 bp, Homo sapien
gggaataggtgctaccacttcacta

SEQ ID NO: 1426772 - DNA, 25 bp, Homo sapien
cttaatgagaggctagattcaagca

SEQ ID NO: 1426773 - DNA, 25 bp, Homo sapien
gacttttgagccagtgtaaccagta

SEQ ID NO: 1426774 - DNA, 25 bp, Homo sapien
gaagagtcttttgtgccctcatgaa

SEQ ID NO: 1426775 - DNA, 25 bp, Homo sapien
tagtcataaagttagattcacaggg

SEQ ID NO: 1426776 - DNA, 25 bp, Homo sapien
taaaagcagagtgccacgcaaatca

SEQ ID NO: 1426777 - DNA, 25 bp, Homo sapien
tagatctcctataaccccattagaa

SEQ ID NO: 1426778 - DNA, 25 bp, Homo sapien
caggtatagggccaagatcaaggtt

SEQ ID NO: 1426779 - DNA, 25 bp, Homo sapien
cagaatggcgtttgctagggattag

SEQ ID NO: 1426780 - DNA, 25 bp, Homo sapien
ttccataaagagtccctggcagcat

SEQ ID NO: 1426781 - DNA, 25 bp, Homo sapien
cagagtactcttcctcgatgttggc

SEQ ID NO: 1426782 - DNA, 25 bp, Homo sapien
gcagcatgtctactgtacttagaga

SEQ ID NO: 1426783 - DNA, 25 bp, Homo sapien
ccgaggccaccgttgactctgattc

SEQ ID NO: 1426784 - DNA, 25 bp, Homo sapien
attctgtcccaggccgccgggccac

SEQ ID NO: 1426785 - DNA, 25 bp, Homo sapien
gaggccaccgttgactctgattctg

SEQ ID NO: 1426786 - DNA, 25 bp, Homo sapien
ggccaccgttgactctgattctgtc

SEQ ID NO: 1426787 - DNA, 25 bp, Homo sapien
tcttgtttctttttcacgtcttgtc

SEQ ID NO: 1426788 - DNA, 25 bp, Homo sapien
cttccatattatccaggttctggat

SEQ ID NO: 1426789 - DNA, 25 bp, Homo sapien
tcatcagctttgtcctcgtcacccc

SEQ ID NO: 1426790 - DNA, 25 bp, Homo sapien
tcagccgttgtcccccaactcttgt

SEQ ID NO: 1426791 - DNA, 25 bp, Homo sapien
caaaaggcccggacacgctactcca

SEQ ID NO: 1426792 - DNA, 25 bp, Homo sapien
gctactccaaaacgtctctcctggg

SEQ ID NO: 1426793 - DNA, 25 bp, Homo sapien
acagcccaaaaggcccggacacgct

SEQ ID NO: 1426794 - DNA, 25 bp, Homo sapien
ccggacacgctactccaaaacgtct

SEQ ID NO: 1426795 - DNA, 25 bp, Homo sapien
tatggcccatagaagggctcctgaa

SEQ ID NO: 1426796 - DNA, 25 bp, Homo sapien
gggctcctgaaatctaaccttgcga

SEQ ID NO: 1426797 - DNA, 25 bp, Homo sapien
gggacgacaggaaaagatatggccc

SEQ ID NO: 1426798 - DNA, 25 bp, Homo sapien
atctaaccttgcgactctttaaaag

SEQ ID NO: 1426799 - DNA, 25 bp, Homo sapien
tgtacccggggcatagaaatcctat

SEQ ID NO: 1426800 - DNA, 25 bp, Homo sapien
tggtatcagatgtgtacccggggca

SEQ ID NO: 1426801 - DNA, 25 bp, Homo sapien
aatcctatcagctcttgatttggga

SEQ ID NO: 1426802 - DNA, 25 bp, Homo sapien
cttctgacaggtggcaattctgtgg

SEQ ID NO: 1426803 - DNA, 25 bp, Homo sapien
ttctctcaacactgatttcttcatc

SEQ ID NO: 1426804 - DNA, 25 bp, Homo sapien
ctcaacactgatttcttcatcaaaa

SEQ ID NO: 1426805 - DNA, 25 bp, Homo sapien
tctcaacactgatttcttcatcaaa

SEQ ID NO: 1426806 - DNA, 25 bp, Homo sapien
cactgatttcttcatcaaaatacat

SEQ ID NO: 1426807 - DNA, 25 bp, Homo sapien
gttgaattccattccgtatgctcag

SEQ ID NO: 1426808 - DNA, 25 bp, Homo sapien
caaaaggtactttcggataggcaat

SEQ ID NO: 1426809 - DNA, 25 bp, Homo sapien
aactgtgaaatcttggaccgataaa

SEQ ID NO: 1426810 - DNA, 25 bp, Homo sapien
aaacttttcctggagattaggctca

SEQ ID NO: 1426811 - DNA, 25 bp, Homo sapien
ccagtttctggagtatttatttgcc

SEQ ID NO: 1426812 - DNA, 25 bp, Homo sapien
ttccagtttctggagtatttatttg

SEQ ID NO: 1426813 - DNA, 25 bp, Homo sapien
cagtttctggagtatttatttgcct

SEQ ID NO: 1426814 - DNA, 25 bp, Homo sapien
tccagtttctggagtatttatttgc

SEQ ID NO: 1426815 - DNA, 25 bp, Homo sapien
ctggatgtctaccaggtgcccattc

SEQ ID NO: 1426816 - DNA, 25 bp, Homo sapien
cttgtggcaagattgattagactgc

SEQ ID NO: 1426817 - DNA, 25 bp, Homo sapien
gattgattagactgcactggatgtc

SEQ ID NO: 1426818 - DNA, 25 bp, Homo sapien
tacttctcttgtggcaagattgatt

SEQ ID NO: 1426819 - DNA, 25 bp, Homo sapien
tctttacacttatcaaccattttta

SEQ ID NO: 1426820 - DNA, 25 bp, Homo sapien
gcctctttacacttatcaaccattt

SEQ ID NO: 1426821 - DNA, 25 bp, Homo sapien
ggcctctttacacttatcaaccatt

SEQ ID NO: 1426822 - DNA, 25 bp, Homo sapien
cctctttacacttatcaaccatttt

SEQ ID NO: 1426823 - DNA, 25 bp, Homo sapien
ggtacttctctgtacagtttaagaa

SEQ ID NO: 1426824 - DNA, 25 bp, Homo sapien
tagccaagattgtaaacaacctgtc

SEQ ID NO: 1426825 - DNA, 25 bp, Homo sapien
gattgtaaacaacctgtccaccaac

SEQ ID NO: 1426826 - DNA, 25 bp, Homo sapien
gtccaccaacagatgtaagggtact

SEQ ID NO: 1426827 - DNA, 25 bp, Homo sapien
ggatcaatgatagacaacatgcata

SEQ ID NO: 1426828 - DNA, 25 bp, Homo sapien
tggatcaatgatagacaacatgcat

SEQ ID NO: 1426829 - DNA, 25 bp, Homo sapien
ctggatcaatgatagacaacatgca

SEQ ID NO: 1426830 - DNA, 25 bp, Homo sapien
caagtagaagcctagagttgatcca

SEQ ID NO: 1426831 - DNA, 25 bp, Homo sapien
tttggtcaacatggtatagtactct

SEQ ID NO: 1426832 - DNA, 25 bp, Homo sapien
catctttggagtctgcttgtacgcc

SEQ ID NO: 1426833 - DNA, 25 bp, Homo sapien
tcagtgtggatagccaattttgctt

SEQ ID NO: 1426834 - DNA, 25 bp, Homo sapien
ggagtgtgatatggaccaaggttcc

SEQ ID NO: 1426835 - DNA, 25 bp, Homo sapien
ggtcatgtgcaagtaagcagagctg

SEQ ID NO: 1426836 - DNA, 25 bp, Homo sapien
aaggatttgggacaggtcatgtgca

SEQ ID NO: 1426837 - DNA, 25 bp, Homo sapien
caagaagagggcttgggagtgtgat

SEQ ID NO: 1426838 - DNA, 25 bp, Homo sapien
cggaagttgcagtccccagttacat

SEQ ID NO: 1426839 - DNA, 25 bp, Homo sapien
cactgaattccggaagttgcagtcc

SEQ ID NO: 1426840 - DNA, 25 bp, Homo sapien
cccatctttcgccactgaattccgg

SEQ ID NO: 1426841 - DNA, 25 bp, Homo sapien
gaattccggaagttgcagtccccag

SEQ ID NO: 1426842 - DNA, 25 bp, Homo sapien
caatagaggttactgcaagcgtgag

SEQ ID NO: 1426843 - DNA, 25 bp, Homo sapien
ccattgtataagtggccaaagggca

SEQ ID NO: 1426844 - DNA, 25 bp, Homo sapien
gcatgtgacctaggcttttcagcca

SEQ ID NO: 1426845 - DNA, 25 bp, Homo sapien
tgacctctgggataatgcgattctc

SEQ ID NO: 1426846 - DNA, 25 bp, Homo sapien
tgatgttagtgaactttttagcatg

SEQ ID NO: 1426847 - DNA, 25 bp, Homo sapien
gttagtgaactttttagcatgtcga

SEQ ID NO: 1426848 - DNA, 25 bp, Homo sapien
agtgaactttttagcatgtcgaaag

SEQ ID NO: 1426849 - DNA, 25 bp, Homo sapien
ctttgatgttagtgaactttttagc

SEQ ID NO: 1426850 - DNA, 25 bp, Homo sapien
tggtttgcagatagttgtccttttg

SEQ ID NO: 1426851 - DNA, 25 bp, Homo sapien
tgcagatagttgtccttttgcaatg

SEQ ID NO: 1426852 - DNA, 25 bp, Homo sapien
ttgcaatgtcttcataaggcctttt

SEQ ID NO: 1426853 - DNA, 25 bp, Homo sapien
tctaagatcaaggtaccaccagcag

SEQ ID NO: 1426854 - DNA, 25 bp, Homo sapien
actccaagtatgggtgacagaacaa

SEQ ID NO: 1426855 - DNA, 25 bp, Homo sapien
taccactgcactccaagtatgggtg

SEQ ID NO: 1426856 - DNA, 25 bp, Homo sapien
cactccaagtatgggtgacagaaca

SEQ ID NO: 1426857 - DNA, 25 bp, Homo sapien
ttgtaccactgcactccaagtatgg

SEQ ID NO: 1426858 - DNA, 25 bp, Homo sapien
agattactctgaatttcagccctac

SEQ ID NO: 1426859 - DNA, 25 bp, Homo sapien
ttcagccctacataaaaccgtgaaa

SEQ ID NO: 1426860 - DNA, 25 bp, Homo sapien
ctctgaatttcagccctacataaaa

SEQ ID NO: 1426861 - DNA, 25 bp, Homo sapien
cagccctacataaaaccgtgaaata

SEQ ID NO: 1426862 - DNA, 25 bp, Homo sapien
gctctctcggtgatttctcccttcc

SEQ ID NO: 1426863 - DNA, 25 bp, Homo sapien
ttcgctctctcggtgatttctccct

SEQ ID NO: 1426864 - DNA, 25 bp, Homo sapien
tcgctctctcggtgatttctccctt

SEQ ID NO: 1426865 - DNA, 25 bp, Homo sapien
tttcgctctctcggtgatttctccc

SEQ ID NO: 1426866 - DNA, 25 bp, Homo sapien
aggtgttacatgtggccatgggaca

SEQ ID NO: 1426867 - DNA, 25 bp, Homo sapien
gatgagtttgcatcagatcacctta

SEQ ID NO: 1426868 - DNA, 25 bp, Homo sapien
tctcgactaaaagcctgaagatctg

SEQ ID NO: 1426869 - DNA, 25 bp, Homo sapien
gcaagttggcacatgaagatagcat

SEQ ID NO: 1426870 - DNA, 25 bp, Homo sapien
gcggctttgtcaactgttgatttcc

SEQ ID NO: 1426871 - DNA, 25 bp, Homo sapien
aaggcagaaactgcggctttgtcaa

SEQ ID NO: 1426872 - DNA, 25 bp, Homo sapien
acctgaaggcagaaactgcggcttt

SEQ ID NO: 1426873 - DNA, 25 bp, Homo sapien
gaaactgcggctttgtcaactgttg

SEQ ID NO: 1426874 - DNA, 25 bp, Homo sapien
aaggaactaacaagggagcgcttca

SEQ ID NO: 1426875 - DNA, 25 bp, Homo sapien
gctttcctgttcattccccgcaggt

SEQ ID NO: 1426876 - DNA, 25 bp, Homo sapien
gttcattccccgcaggtgatttccc

SEQ ID NO: 1426877 - DNA, 25 bp, Homo sapien
agtctcccccgagtctcacagaagg

SEQ ID NO: 1426878 - DNA, 25 bp, Homo sapien
cagcgccgcccgtactcccgccttt

SEQ ID NO: 1426879 - DNA, 25 bp, Homo sapien
cgcccgtactcccgcctttcgcgcg

SEQ ID NO: 1426880 - DNA, 25 bp, Homo sapien
cccgcctttcgcgcgtccctgctct

SEQ ID NO: 1426881 - DNA, 25 bp, Homo sapien
tactcccgcctttcgcgcgtccctg

SEQ ID NO: 1426882 - DNA, 25 bp, Homo sapien
tgctgctggattcgcagtcccagcc

SEQ ID NO: 1426883 - DNA, 25 bp, Homo sapien
cgcccgctgctacgctgtggctgct

SEQ ID NO: 1426884 - DNA, 25 bp, Homo sapien
tcctgacattgctgcctcggcggct

SEQ ID NO: 1426885 - DNA, 25 bp, Homo sapien
ggctgctgctggattcgcagtccca

SEQ ID NO: 1426886 - DNA, 25 bp, Homo sapien
ctgcgtccggtgggcgagtggttag

SEQ ID NO: 1426887 - DNA, 25 bp, Homo sapien
tgcgtccggtgggcgagtggttagg

SEQ ID NO: 1426888 - DNA, 25 bp, Homo sapien
atgggatgcgttccgggcagatccc

SEQ ID NO: 1426889 - DNA, 25 bp, Homo sapien
tcttcctccgccgagcactttgctc

SEQ ID NO: 1426890 - DNA, 25 bp, Homo sapien
gagcactttgctcggctcctgctgt

SEQ ID NO: 1426891 - DNA, 25 bp, Homo sapien
aggcttctgtactcgaccatttctc

SEQ ID NO: 1426892 - DNA, 25 bp, Homo sapien
ctgtagggaatgccccgcttcaaag

SEQ ID NO: 1426893 - DNA, 25 bp, Homo sapien
gaatgccccgcttcaaagttgacct

SEQ ID NO: 1426894 - DNA, 25 bp, Homo sapien
ccgcttcaaagttgacctcctgagc

SEQ ID NO: 1426895 - DNA, 25 bp, Homo sapien
cttcaaagttgacctcctgagccat

SEQ ID NO: 1426896 - DNA, 25 bp, Homo sapien
caaacaccacgataagagttcaaat

SEQ ID NO: 1426897 - DNA, 25 bp, Homo sapien
acctgttccacaatatagcacaccc

SEQ ID NO: 1426898 - DNA, 25 bp, Homo sapien
gacctgttccacaatatagcacacc

SEQ ID NO: 1426899 - DNA, 25 bp, Homo sapien
cctgttccacaatatagcacacccc

SEQ ID NO: 1426900 - DNA, 25 bp, Homo sapien
gttagacagataatgtaccaatgct

SEQ ID NO: 1426901 - DNA, 25 bp, Homo sapien
gggtccaatgtcaccccaggatgat

SEQ ID NO: 1426902 - DNA, 25 bp, Homo sapien
tacagcgagagtctgacaaggagga

SEQ ID NO: 1426903 - DNA, 25 bp, Homo sapien
gaaaaggccataccaatgctggaga

SEQ ID NO: 1426904 - DNA, 25 bp, Homo sapien
caatatatgaggtggtgagtctaca

SEQ ID NO: 1426905 - DNA, 25 bp, Homo sapien
ctactgtatgggtctgatgacatct

SEQ ID NO: 1426906 - DNA, 25 bp, Homo sapien
ctgtgtagtactggtttttgaagga

SEQ ID NO: 1426907 - DNA, 25 bp, Homo sapien
gatgacatcttgtatactctgtgta

SEQ ID NO: 1426908 - DNA, 25 bp, Homo sapien
gtatactctgtgtagtactggtttt

SEQ ID NO: 1426909 - DNA, 25 bp, Homo sapien
ttgggtagtctggacatttaaatga

SEQ ID NO: 1426910 - DNA, 25 bp, Homo sapien
cagtttgatgacaccagccaaagac

SEQ ID NO: 1426911 - DNA, 25 bp, Homo sapien
tcagtttgatgacaccagccaaaga

SEQ ID NO: 1426912 - DNA, 25 bp, Homo sapien
gtttgatgacaccagccaaagacat

SEQ ID NO: 1426913 - DNA, 25 bp, Homo sapien
ttgatgacaccagccaaagacatac

SEQ ID NO: 1426914 - DNA, 25 bp, Homo sapien
caaggtgtttgttgctgcgagcttt

SEQ ID NO: 1426915 - DNA, 25 bp, Homo sapien
caattttgtcaaggtgtttgttgct

SEQ ID NO: 1426916 - DNA, 25 bp, Homo sapien
cttctaccaactgggtaccaaactg

SEQ ID NO: 1426917 - DNA, 25 bp, Homo sapien
tgtggcttctaccaactgggtacca

SEQ ID NO: 1426918 - DNA, 25 bp, Homo sapien
gtcagtgcggaaggccagagttgga

SEQ ID NO: 1426919 - DNA, 25 bp, Homo sapien
tgctagaacagtcagtgcggaaggc

SEQ ID NO: 1426920 - DNA, 25 bp, Homo sapien
agaacagtcagtgcggaaggccaga

SEQ ID NO: 1426921 - DNA, 25 bp, Homo sapien
gtggtgctagaacagtcagtgcgga

SEQ ID NO: 1426922 - DNA, 25 bp, Homo sapien
caagcagactgccgggcagcatcct

SEQ ID NO: 1426923 - DNA, 25 bp, Homo sapien
agcagactgccgggcagcatccttg

SEQ ID NO: 1426924 - DNA, 25 bp, Homo sapien
cagactgccgggcagcatccttgtc

SEQ ID NO: 1426925 - DNA, 25 bp, Homo sapien
gcaagcagactgccgggcagcatcc

SEQ ID NO: 1426926 - DNA, 25 bp, Homo sapien
cttgggttatccagaaagcctttga

SEQ ID NO: 1426927 - DNA, 25 bp, Homo sapien
ttggccagcttcatctatttatgca

SEQ ID NO: 1426928 - DNA, 25 bp, Homo sapien
cctcgggaaatatatgtcatgtcaa

SEQ ID NO: 1426929 - DNA, 25 bp, Homo sapien
tgcatcaatgcgttaaatagaaact

SEQ ID NO: 1426930 - DNA, 25 bp, Homo sapien
aaaatttactaaccacaacaatgag

SEQ ID NO: 1426931 - DNA, 25 bp, Homo sapien
cattgtgttgtaatgtaaatgcctt

SEQ ID NO: 1426932 - DNA, 25 bp, Homo sapien
taaaatgaactaagaattggctggg

SEQ ID NO: 1426933 - DNA, 25 bp, Homo sapien
ttgaatatgtaggtactggaaagtc

SEQ ID NO: 1426934 - DNA, 25 bp, Homo sapien
aaattgacaggatagtaggctgtcc

SEQ ID NO: 1426935 - DNA, 25 bp, Homo sapien
cattgtactttatatgcccagggcc

SEQ ID NO: 1426936 - DNA, 25 bp, Homo sapien
ggatcctactatactaatgagagaa

SEQ ID NO: 1426937 - DNA, 25 bp, Homo sapien
cagggcctggtactagcccttaata

SEQ ID NO: 1426938 - DNA, 25 bp, Homo sapien
ggtgcttagtgcctgtcttccttgg

SEQ ID NO: 1426939 - DNA, 25 bp, Homo sapien
gtatgtgaggcaatggatgaaagct

SEQ ID NO: 1426940 - DNA, 25 bp, Homo sapien
cggtgcttagtgcctgtcttccttg

SEQ ID NO: 1426941 - DNA, 25 bp, Homo sapien
tatgtgaggcaatggatgaaagctg

SEQ ID NO: 1426942 - DNA, 25 bp, Homo sapien
gggcttctgccagtttagcaacttc

SEQ ID NO: 1426943 - DNA, 25 bp, Homo sapien
cgggcttctgccagtttagcaactt

SEQ ID NO: 1426944 - DNA, 25 bp, Homo sapien
ggcttctgccagtttagcaacttca

SEQ ID NO: 1426945 - DNA, 25 bp, Homo sapien
gcttctgccagtttagcaacttcat

SEQ ID NO: 1426946 - DNA, 25 bp, Homo sapien
tatcgcatgttgtctgtgtaccaca

SEQ ID NO: 1426947 - DNA, 25 bp, Homo sapien
tactttattgctaatcacaggattt

SEQ ID NO: 1426948 - DNA, 25 bp, Homo sapien
agactaagccttggtaatttttatg

SEQ ID NO: 1426949 - DNA, 25 bp, Homo sapien
tgtccagtctgctagcataaaacat

SEQ ID NO: 1426950 - DNA, 25 bp, Homo sapien
actgttacctagtgacagtttcagc

SEQ ID NO: 1426951 - DNA, 25 bp, Homo sapien
caggagggccgagtcacctttctga

SEQ ID NO: 1426952 - DNA, 25 bp, Homo sapien
tcagctgcagtagccattggctgtg

SEQ ID NO: 1426953 - DNA, 25 bp, Homo sapien
tgtgaagaatatactgacagcatcc

SEQ ID NO: 1426954 - DNA, 25 bp, Homo sapien
aagctcccgggtcttggacaatcca

SEQ ID NO: 1426955 - DNA, 25 bp, Homo sapien
aagagataaatgaccgaagagcccg

SEQ ID NO: 1426956 - DNA, 25 bp, Homo sapien
ggctaggcctccgaagactgtctga

SEQ ID NO: 1426957 - DNA, 25 bp, Homo sapien
tccaacagcgttttccggctaggcc

SEQ ID NO: 1426958 - DNA, 25 bp, Homo sapien
tgataacttatggatacagcctcct

SEQ ID NO: 1426959 - DNA, 25 bp, Homo sapien
gatgtagcttttctggcacatgaaa

SEQ ID NO: 1426960 - DNA, 25 bp, Homo sapien
cataactagcaaggtagtctcttca

SEQ ID NO: 1426961 - DNA, 25 bp, Homo sapien
aatacttcctaattaatgagcccca

SEQ ID NO: 1426962 - DNA, 25 bp, Homo sapien
atgctttaccctttaaagcctcgtg

SEQ ID NO: 1426963 - DNA, 25 bp, Homo sapien
aactaggcactgtagagctgagctg

SEQ ID NO: 1426964 - DNA, 25 bp, Homo sapien
tggggattgtcactgccaaaaatgc

SEQ ID NO: 1426965 - DNA, 25 bp, Homo sapien
ggaactaggcactgtagagctgagc

SEQ ID NO: 1426966 - DNA, 25 bp, Homo sapien
tcctcagtgcttaatgtaatcctag

SEQ ID NO: 1426967 - DNA, 25 bp, Homo sapien
gaaaatgtcatgataactgtagctt

SEQ ID NO: 1426968 - DNA, 25 bp, Homo sapien
ttattgcctactccccaacataaaa

SEQ ID NO: 1426969 - DNA, 25 bp, Homo sapien
gatgtcttaatttcgaatggttctc

SEQ ID NO: 1426970 - DNA, 25 bp, Homo sapien
ggatctaccacttattacctgttga

SEQ ID NO: 1426971 - DNA, 25 bp, Homo sapien
ttgaccatggtcataatatcgaacc

SEQ ID NO: 1426972 - DNA, 25 bp, Homo sapien
tgaggccagtatgtaaagaagcagt

SEQ ID NO: 1426973 - DNA, 25 bp, Homo sapien
tcagctagtaagagtgctctgctct

SEQ ID NO: 1426974 - DNA, 25 bp, Homo sapien
cactttcgggtttagtaggtctgag

SEQ ID NO: 1426975 - DNA, 25 bp, Homo sapien
tgtagtctacagagcacacttggtg

SEQ ID NO: 1426976 - DNA, 25 bp, Homo sapien
tatggcatattaaggcagatcaagc

SEQ ID NO: 1426977 - DNA, 25 bp, Homo sapien
ttttttgttacaatgccagggacac

SEQ ID NO: 1426978 - DNA, 25 bp, Homo sapien
caaagggttctttagtccacaggtg

SEQ ID NO: 1426979 - DNA, 25 bp, Homo sapien
tactttctgggagctaaggcctgaa

SEQ ID NO: 1426980 - DNA, 25 bp, Homo sapien
tgactgctcagatgggtgattccca

SEQ ID NO: 1426981 - DNA, 25 bp, Homo sapien
aagtcaatgcgttcccttctggctg

SEQ ID NO: 1426982 - DNA, 25 bp, Homo sapien
ggcctggcaccagcgaagtatgaac

SEQ ID NO: 1426983 - DNA, 25 bp, Homo sapien
agtatgaacacaatgccagcactgc

SEQ ID NO: 1426984 - DNA, 25 bp, Homo sapien
cagcagttaattatagtagtaccat

SEQ ID NO: 1426985 - DNA, 25 bp, Homo sapien
gctggctatacagcatcaggcctgg

SEQ ID NO: 1426986 - DNA, 25 bp, Homo sapien
acagctaggccgtcatacagtaaag

SEQ ID NO: 1426987 - DNA, 25 bp, Homo sapien
gaaatacttgagtccagacacagtg

SEQ ID NO: 1426988 - DNA, 25 bp, Homo sapien
taaaatatagttgccaggactgtgg

SEQ ID NO: 1426989 - DNA, 25 bp, Homo sapien
cctacttggcagaagactaaaggca

SEQ ID NO: 1426990 - DNA, 25 bp, Homo sapien
caggaaagcttagctgggaaattca

SEQ ID NO: 1426991 - DNA, 25 bp, Homo sapien
tcaggaaagcttagctgggaaattc

SEQ ID NO: 1426992 - DNA, 25 bp, Homo sapien
tttataatgtttgcacgggagatta

SEQ ID NO: 1426993 - DNA, 25 bp, Homo sapien
taaatatgatcgtctacagtttgct

SEQ ID NO: 1426994 - DNA, 25 bp, Homo sapien
tggatgtctaaaactagattagtac

SEQ ID NO: 1426995 - DNA, 25 bp, Homo sapien
ggattacatttcacgacccccagtg

SEQ ID NO: 1426996 - DNA, 25 bp, Homo sapien
catccaattcttgctcctcctgttc

SEQ ID NO: 1426997 - DNA, 25 bp, Homo sapien
tcatccaattcttgctcctcctgtt

SEQ ID NO: 1426998 - DNA, 25 bp, Homo sapien
cactaatgatctgccatcgtgtgaa

SEQ ID NO: 1426999 - DNA, 25 bp, Homo sapien
tctgccatcgtgtgaattttccata

SEQ ID NO: 1427000 - DNA, 25 bp, Homo sapien
gagagcataacactaatgatctgcc

SEQ ID NO: 1427001 - DNA, 25 bp, Homo sapien
ctgagagcataacactaatgatctg

SEQ ID NO: 1427002 - DNA, 25 bp, Homo sapien
aatctgccctgaacctccctttcca

SEQ ID NO: 1427003 - DNA, 25 bp, Homo sapien
tctgccctgaacctccctttccaat

SEQ ID NO: 1427004 - DNA, 25 bp, Homo sapien
tgccctgaacctccctttccaatct

SEQ ID NO: 1427005 - DNA, 25 bp, Homo sapien
atgctctctacaatctgccctgaac

SEQ ID NO: 1427006 - DNA, 25 bp, Homo sapien
aagggactaactcgcattcgcatgc

SEQ ID NO: 1427007 - DNA, 25 bp, Homo sapien
tgaactcttcaggactatggcaggt

SEQ ID NO: 1427008 - DNA, 25 bp, Homo sapien
cctaagtgtagcttggaggttccac

SEQ ID NO: 1427009 - DNA, 25 bp, Homo sapien
ggttccactcaagatcaagcctgag

SEQ ID NO: 1427010 - DNA, 25 bp, Homo sapien
gaaatcttaattaaccaatcacact

SEQ ID NO: 1427011 - DNA, 25 bp, Homo sapien
tgaattttattaggaccattcctca

SEQ ID NO: 1427012 - DNA, 25 bp, Homo sapien
caaatgggcttataaatgagaaatt

SEQ ID NO: 1427013 - DNA, 25 bp, Homo sapien
ttaaccacccctctagggaacagca

SEQ ID NO: 1427014 - DNA, 25 bp, Homo sapien
catgtgcttagtctgtgtgatatac

SEQ ID NO: 1427015 - DNA, 25 bp, Homo sapien
cccttgataagtccaccctggagtg

SEQ ID NO: 1427016 - DNA, 25 bp, Homo sapien
tatacttccaaagaccaagcccttg

SEQ ID NO: 1427017 - DNA, 25 bp, Homo sapien
ggcactgtttccctgatgcgctaag

SEQ ID NO: 1427018 - DNA, 25 bp, Homo sapien
taacttcggaaagtaacagcatgga

SEQ ID NO: 1427019 - DNA, 25 bp, Homo sapien
tgtaactggagtctaaccccacatg

SEQ ID NO: 1427020 - DNA, 25 bp, Homo sapien
ccccagttgggacaatgaacagtca

SEQ ID NO: 1427021 - DNA, 25 bp, Homo sapien
caaccctgagaacgaaggcatatcc

SEQ ID NO: 1427022 - DNA, 25 bp, Homo sapien
tagagtggtatctctgcccttcagt

SEQ ID NO: 1427023 - DNA, 25 bp, Homo sapien
tgactttctaaagtgtctgcccgaa

SEQ ID NO: 1427024 - DNA, 25 bp, Homo sapien
tctgcccgaatgttggcacccgtgg

SEQ ID NO: 1427025 - DNA, 25 bp, Homo sapien
gcatcggaacattgtccatgggttt

SEQ ID NO: 1427026 - DNA, 25 bp, Homo sapien
tgaagaggggttgacagataactca

SEQ ID NO: 1427027 - DNA, 25 bp, Homo sapien
agaggggttgacagataactcatac

SEQ ID NO: 1427028 - DNA, 25 bp, Homo sapien
cctgatacctatgccacctgactgg

SEQ ID NO: 1427029 - DNA, 25 bp, Homo sapien
tctgaagaggggttgacagataact

SEQ ID NO: 1427030 - DNA, 25 bp, Homo sapien
tcttggttatgctcattggcaggca

SEQ ID NO: 1427031 - DNA, 25 bp, Homo sapien
taaggcacttaaagcacctggtagt

SEQ ID NO: 1427032 - DNA, 25 bp, Homo sapien
tgttctcctaacatcccaatgaagt

SEQ ID NO: 1427033 - DNA, 25 bp, Homo sapien
ggcaggcaagaatccattttatcca

SEQ ID NO: 1427034 - DNA, 25 bp, Homo sapien
ccaatagtactgattaaacctctcg

SEQ ID NO: 1427035 - DNA, 25 bp, Homo sapien
ctgatcaacgtggcgagaccctgtg

SEQ ID NO: 1427036 - DNA, 25 bp, Homo sapien
tgttcccgttaaatagaatcaaagc

SEQ ID NO: 1427037 - DNA, 25 bp, Homo sapien
aaaaatttaggtaggcatgctgggc

SEQ ID NO: 1427038 - DNA, 25 bp, Homo sapien
cataacttcaccaatcccggccagg

SEQ ID NO: 1427039 - DNA, 25 bp, Homo sapien
ccataacttcaccaatcccggccag

SEQ ID NO: 1427040 - DNA, 25 bp, Homo sapien
ccagcttcttgtccataacttcacc

SEQ ID NO: 1427041 - DNA, 25 bp, Homo sapien
cagcttcttgtccataacttcacca

SEQ ID NO: 1427042 - DNA, 25 bp, Homo sapien
tcttagtgaaccgaagaggcaggtg

SEQ ID NO: 1427043 - DNA, 25 bp, Homo sapien
gctggatcttaggaacttgcaaaat

SEQ ID NO: 1427044 - DNA, 25 bp, Homo sapien
tttgctctcctagtcaagaagggca

SEQ ID NO: 1427045 - DNA, 25 bp, Homo sapien
ggcaggtgatctgacaggaatgtct

SEQ ID NO: 1427046 - DNA, 25 bp, Homo sapien
cagaccatttcaggagctgttgcag

SEQ ID NO: 1427047 - DNA, 25 bp, Homo sapien
taagattcggtattggtgacagacc

SEQ ID NO: 1427048 - DNA, 25 bp, Homo sapien
gagagccagcgatagcacttaggat

SEQ ID NO: 1427049 - DNA, 25 bp, Homo sapien
gagtcatcagcattgaaaccatggg

SEQ ID NO: 1427050 - DNA, 25 bp, Homo sapien
aggattttttgagcttgggaggcat

SEQ ID NO: 1427051 - DNA, 25 bp, Homo sapien
ctagctacttgattggctgaagtgg

SEQ ID NO: 1427052 - DNA, 25 bp, Homo sapien
caaaatatttgaaaaggctgggtgt

SEQ ID NO: 1427053 - DNA, 25 bp, Homo sapien
tgacatgtgtctgtagtttcagcta

SEQ ID NO: 1427054 - DNA, 25 bp, Homo sapien
cttgatgacaatcttgatctctctc

SEQ ID NO: 1427055 - DNA, 25 bp, Homo sapien
caaagatgtattcttctgtagctat

SEQ ID NO: 1427056 - DNA, 25 bp, Homo sapien
ttgatgacaatcttgatctctctct

SEQ ID NO: 1427057 - DNA, 25 bp, Homo sapien
ttcaaagatgtattcttctgtagct

SEQ ID NO: 1427058 - DNA, 25 bp, Homo sapien
taaggataccaactctagctagata

SEQ ID NO: 1427059 - DNA, 25 bp, Homo sapien
ctcttgctaaggataccaactctag

SEQ ID NO: 1427060 - DNA, 25 bp, Homo sapien
ctgtagcctcttgctaaggatacca

SEQ ID NO: 1427061 - DNA, 25 bp, Homo sapien
actctagctagatacatatagatgg

SEQ ID NO: 1427062 - DNA, 25 bp, Homo sapien
ggtaaactactgattattgccacaa

SEQ ID NO: 1427063 - DNA, 25 bp, Homo sapien
gttggtaaactactgattattgcca

SEQ ID NO: 1427064 - DNA, 25 bp, Homo sapien
tgatggagttttctagataaacaat

SEQ ID NO: 1427065 - DNA, 25 bp, Homo sapien
atgatggagttttctagataaacaa

SEQ ID NO: 1427066 - DNA, 25 bp, Homo sapien
tgggatatagtctcgtggtgcgccg

SEQ ID NO: 1427067 - DNA, 25 bp, Homo sapien
tgtgggatatagtctcgtggtgcgc

SEQ ID NO: 1427068 - DNA, 25 bp, Homo sapien
ggtgtgggatatagtctcgtggtgc

SEQ ID NO: 1427069 - DNA, 25 bp, Homo sapien
ttttaagccggtctgaaaagcgcaa

SEQ ID NO: 1427070 - DNA, 25 bp, Homo sapien
atattaaagtgatggccaaaaggca

SEQ ID NO: 1427071 - DNA, 25 bp, Homo sapien
catattaaagtgatggccaaaaggc

SEQ ID NO: 1427072 - DNA, 25 bp, Homo sapien
tgacagcagcttgtcatctttatga

SEQ ID NO: 1427073 - DNA, 25 bp, Homo sapien
gatagaaactaatctgctcttgcag

SEQ ID NO: 1427074 - DNA, 25 bp, Homo sapien
ctgcatggaagacacaggatctttg

SEQ ID NO: 1427075 - DNA, 25 bp, Homo sapien
ccttaatttctggatagaaactaat

SEQ ID NO: 1427076 - DNA, 25 bp, Homo sapien
tagaggggtgtctgggattgggagg

SEQ ID NO: 1427077 - DNA, 25 bp, Homo sapien
ctgttggtagaggggtgtctgggat

SEQ ID NO: 1427078 - DNA, 25 bp, Homo sapien
ggtagaggggtgtctgggattggga

SEQ ID NO: 1427079 - DNA, 25 bp, Homo sapien
ttggtagaggggtgtctgggattgg

SEQ ID NO: 1427080 - DNA, 25 bp, Homo sapien
tgtggactttacgaaaatcaggaag

SEQ ID NO: 1427081 - DNA, 25 bp, Homo sapien
taagctcacatggtatattggttgc

SEQ ID NO: 1427082 - DNA, 25 bp, Homo sapien
tatatggccctcactagcttttgca

SEQ ID NO: 1427083 - DNA, 25 bp, Homo sapien
ggttgcaggattaatacaaggaggc

SEQ ID NO: 1427084 - DNA, 25 bp, Homo sapien
tatggttacgctgaatgcactctcc

SEQ ID NO: 1427085 - DNA, 25 bp, Homo sapien
ataactcttgtttgcccctgggtgg

SEQ ID NO: 1427086 - DNA, 25 bp, Homo sapien
gctgaactgcggttataactcttgt

SEQ ID NO: 1427087 - DNA, 25 bp, Homo sapien
tctcccagggtgcataggcgctgct

SEQ ID NO: 1427088 - DNA, 25 bp, Homo sapien
tatgacgcccatgttttcagccagc

SEQ ID NO: 1427089 - DNA, 25 bp, Homo sapien
gccagctgcacgatgaagacttcct

SEQ ID NO: 1427090 - DNA, 25 bp, Homo sapien
tcctcactagtctggtggccatcag

SEQ ID NO: 1427091 - DNA, 25 bp, Homo sapien
ggtgaattgctagccaagcctgtga

SEQ ID NO: 1427092 - DNA, 25 bp, Homo sapien
tacaagccacgaattgagccctcag

SEQ ID NO: 1427093 - DNA, 25 bp, Homo sapien
tttggagtatagtcagcatctcaga

SEQ ID NO: 1427094 - DNA, 25 bp, Homo sapien
gagccctcagaagatacaaccattg

SEQ ID NO: 1427095 - DNA, 25 bp, Homo sapien
tctattggttaagcccttcagtctg

SEQ ID NO: 1427096 - DNA, 25 bp, Homo sapien
tcaggctgccactcttcataaatgc

SEQ ID NO: 1427097 - DNA, 25 bp, Homo sapien
ccagattgcacccttccatggatgc

SEQ ID NO: 1427098 - DNA, 25 bp, Homo sapien
taaatgcccttattacgatgcttgg

SEQ ID NO: 1427099 - DNA, 25 bp, Homo sapien
tgggctccaacacatctgtgtcagg

SEQ ID NO: 1427100 - DNA, 25 bp, Homo sapien
gtagtatgttacttgcttagattcc

SEQ ID NO: 1427101 - DNA, 25 bp, Homo sapien
tacttgcttagattcctgggtcaga

SEQ ID NO: 1427102 - DNA, 25 bp, Homo sapien
gtcagatgtgtcctgtatcctttag

SEQ ID NO: 1427103 - DNA, 25 bp, Homo sapien
aattcagtattgtgaccttcacctc

SEQ ID NO: 1427104 - DNA, 25 bp, Homo sapien
ctcgttcttataaataatcctttga

SEQ ID NO: 1427105 - DNA, 25 bp, Homo sapien
cacgtaatatggactttggcttaat

SEQ ID NO: 1427106 - DNA, 25 bp, Homo sapien
tttacaaagcctaggagatgaagtt

SEQ ID NO: 1427107 - DNA, 25 bp, Homo sapien
ggcttaattttgtctcgttcttata

SEQ ID NO: 1427108 - DNA, 25 bp, Homo sapien
atttggaggaagtttgtgacagagt

SEQ ID NO: 1427109 - DNA, 25 bp, Homo sapien
tgatgagggtacttttgatttcact

SEQ ID NO: 1427110 - DNA, 25 bp, Homo sapien
ctggtagaaaggtagtgaggagacc

SEQ ID NO: 1427111 - DNA, 25 bp, Homo sapien
aaggtagtgaggagacctatggcca

SEQ ID NO: 1427112 - DNA, 25 bp, Homo sapien
aggtagtgaggagacctatggccat

SEQ ID NO: 1427113 - DNA, 25 bp, Homo sapien
gtagaaaggtagtgaggagacctat

SEQ ID NO: 1427114 - DNA, 25 bp, Homo sapien
gctgtatcagctttctgtggtccaa

SEQ ID NO: 1427115 - DNA, 25 bp, Homo sapien
cacaccaatacaattcaacatgtaa

SEQ ID NO: 1427116 - DNA, 25 bp, Homo sapien
cacagctgtatcagctttctgtggt

SEQ ID NO: 1427117 - DNA, 25 bp, Homo sapien
acatgtaaccagatttaatgcttgc

SEQ ID NO: 1427118 - DNA, 25 bp, Homo sapien
aatttagccccacattgagaataat

SEQ ID NO: 1427119 - DNA, 25 bp, Homo sapien
cccacattgagaataatcaatacag

SEQ ID NO: 1427120 - DNA, 25 bp, Homo sapien
cattgagaataatcaatacagtgag

SEQ ID NO: 1427121 - DNA, 25 bp, Homo sapien
tagccccacattgagaataatcaat

SEQ ID NO: 1427122 - DNA, 25 bp, Homo sapien
tccataagggatgcagtgggaacag

SEQ ID NO: 1427123 - DNA, 25 bp, Homo sapien
ggaatggttatgatccagcagcaac

SEQ ID NO: 1427124 - DNA, 25 bp, Homo sapien
aatagagaagaagggcactcagtga

SEQ ID NO: 1427125 - DNA, 25 bp, Homo sapien
aagatgtaggcctcaaaaaatgttc

SEQ ID NO: 1427126 - DNA, 25 bp, Homo sapien
cttaaggtgatctgctttaagctat

SEQ ID NO: 1427127 - DNA, 25 bp, Homo sapien
taagctataaatcttctgagtggtt

SEQ ID NO: 1427128 - DNA, 25 bp, Homo sapien
gagtggtttatgctctcaatgcttt

SEQ ID NO: 1427129 - DNA, 25 bp, Homo sapien
tctgagtggtttatgctctcaatgc

SEQ ID NO: 1427130 - DNA, 25 bp, Homo sapien
ggcatgatgtagtaaaggtactaga

SEQ ID NO: 1427131 - DNA, 25 bp, Homo sapien
ttagggtgaatgtgctcgatccatc

SEQ ID NO: 1427132 - DNA, 25 bp, Homo sapien
catgatgtagtaaaggtactagaag

SEQ ID NO: 1427133 - DNA, 25 bp, Homo sapien
ttttagggtgaatgtgctcgatcca

SEQ ID NO: 1427134 - DNA, 25 bp, Homo sapien
aataacaagagtttcatatcagctc

SEQ ID NO: 1427135 - DNA, 25 bp, Homo sapien
agagtttcatatcagctctcctgtc

SEQ ID NO: 1427136 - DNA, 25 bp, Homo sapien
taacaagagtttcatatcagctctc

SEQ ID NO: 1427137 - DNA, 25 bp, Homo sapien
caagagtttcatatcagctctcctg

SEQ ID NO: 1427138 - DNA, 25 bp, Homo sapien
tactgggaatcttcataagaagctg

SEQ ID NO: 1427139 - DNA, 25 bp, Homo sapien
tttgtaggtaactccagctgttgca

SEQ ID NO: 1427140 - DNA, 25 bp, Homo sapien
gatgctctctgatcatgctaactgt

SEQ ID NO: 1427141 - DNA, 25 bp, Homo sapien
cagcagttgtggcaagttcaattcc

SEQ ID NO: 1427142 - DNA, 25 bp, Homo sapien
catagatcttggactgggaacccag

SEQ ID NO: 1427143 - DNA, 25 bp, Homo sapien
gaagaataagatctctgtcctggga

SEQ ID NO: 1427144 - DNA, 25 bp, Homo sapien
gatcaatatgcagtttaagaagcca

SEQ ID NO: 1427145 - DNA, 25 bp, Homo sapien
ggtggcagtcaacaacataagtttc

SEQ ID NO: 1427146 - DNA, 25 bp, Homo sapien
ccgtagttccttaatagtcccacat

SEQ ID NO: 1427147 - DNA, 25 bp, Homo sapien
cagtatcaacacctcacaccgtagt

SEQ ID NO: 1427148 - DNA, 25 bp, Homo sapien
tgagttgagacttgcccactggcta

SEQ ID NO: 1427149 - DNA, 25 bp, Homo sapien
ccaggtacacatgagatccaggatc

SEQ ID NO: 1427150 - DNA, 25 bp, Homo sapien
caaaagccagtaggcgtgccctcta

SEQ ID NO: 1427151 - DNA, 25 bp, Homo sapien
tgatactgcatttttggccccgtag

SEQ ID NO: 1427152 - DNA, 25 bp, Homo sapien
gcttgctttgcagacactaaattga

SEQ ID NO: 1427153 - DNA, 25 bp, Homo sapien
cccacttgtctgtgagtgcagagca

SEQ ID NO: 1427154 - DNA, 25 bp, Homo sapien
gaggttggaacaagagaatgatgac

SEQ ID NO: 1427155 - DNA, 25 bp, Homo sapien
ttctgtatgtccagacactaatgcc

SEQ ID NO: 1427156 - DNA, 25 bp, Homo sapien
gaccttgcccatgaactagtaacaa

SEQ ID NO: 1427157 - DNA, 25 bp, Homo sapien
gagaaccgaagattacaggaggcca

SEQ ID NO: 1427158 - DNA, 25 bp, Homo sapien
ccttggacattcttagggcaaagcc

SEQ ID NO: 1427159 - DNA, 25 bp, Homo sapien
taccctgagagtcacacattggctg

SEQ ID NO: 1427160 - DNA, 25 bp, Homo sapien
tgacacccgttctttcctttagagc

SEQ ID NO: 1427161 - DNA, 25 bp, Homo sapien
attttcccagtgatccctaccagca

SEQ ID NO: 1427162 - DNA, 25 bp, Homo sapien
ctgttattccaaggttgaagtgata

SEQ ID NO: 1427163 - DNA, 25 bp, Homo sapien
ttcagataaagcacactgtggggcc

SEQ ID NO: 1427164 - DNA, 25 bp, Homo sapien
aaatggagacatctgttattccaag

SEQ ID NO: 1427165 - DNA, 25 bp, Homo sapien
tacataaaaatggagacatctgtta

SEQ ID NO: 1427166 - DNA, 25 bp, Homo sapien
ggtactttacgctttgattccaaga

SEQ ID NO: 1427167 - DNA, 25 bp, Homo sapien
tataggctgttagctttactggtac

SEQ ID NO: 1427168 - DNA, 25 bp, Homo sapien
gaatttcatagttctgtacagagct

SEQ ID NO: 1427169 - DNA, 25 bp, Homo sapien
caagaagccttgtgcagttgcctta

SEQ ID NO: 1427170 - DNA, 25 bp, Homo sapien
tgtttgctagcttcccacatcctga

SEQ ID NO: 1427171 - DNA, 25 bp, Homo sapien
gctaggatgcactctgtacaaaaca

SEQ ID NO: 1427172 - DNA, 25 bp, Homo sapien
tatcaggaacactaataggaatgcc

SEQ ID NO: 1427173 - DNA, 25 bp, Homo sapien
catacttgggtatgcctgttggtac

SEQ ID NO: 1427174 - DNA, 25 bp, Homo sapien
caactgagaaggtaacaaggtgact

SEQ ID NO: 1427175 - DNA, 25 bp, Homo sapien
caatgaccaattagacgtttccgta

SEQ ID NO: 1427176 - DNA, 25 bp, Homo sapien
tatgtgtgaatgaagccttgtgaaa

SEQ ID NO: 1427177 - DNA, 25 bp, Homo sapien
ttgtgttgcccctttggccccatta

SEQ ID NO: 1427178 - DNA, 25 bp, Homo sapien
gaggcaagagcaaacccagtgggtt

SEQ ID NO: 1427179 - DNA, 25 bp, Homo sapien
tctgtatcataggtcccaaaggcca

SEQ ID NO: 1427180 - DNA, 25 bp, Homo sapien
tttatctgctgacaagcccgaaggg

SEQ ID NO: 1427181 - DNA, 25 bp, Homo sapien
cccgaagggaacagtatgagtcata

SEQ ID NO: 1427182 - DNA, 25 bp, Homo sapien
tattctaagcctaataggaagctgt

SEQ ID NO: 1427183 - DNA, 25 bp, Homo sapien
aaactaactcttaaggcacaatggg

SEQ ID NO: 1427184 - DNA, 25 bp, Homo sapien
aaaagatatctcgagctgctctgtg

SEQ ID NO: 1427185 - DNA, 25 bp, Homo sapien
cctgggtgcgtagggtaagaaatat

SEQ ID NO: 1427186 - DNA, 25 bp, Homo sapien
tttattccaggtatagacagggcaa

SEQ ID NO: 1427187 - DNA, 25 bp, Homo sapien
ggtatgagtccttagcctgagcaat

SEQ ID NO: 1427188 - DNA, 25 bp, Homo sapien
gacagggcaattctcacatgagggt

SEQ ID NO: 1427189 - DNA, 25 bp, Homo sapien
tgggtagcatgtcccaaaccccgtc

SEQ ID NO: 1427190 - DNA, 25 bp, Homo sapien
caggctattggttggacacttaaaa

SEQ ID NO: 1427191 - DNA, 25 bp, Homo sapien
cactatgctcattaacaccatgggc

SEQ ID NO: 1427192 - DNA, 25 bp, Homo sapien
aatggaaccacgcaatatgaactct

SEQ ID NO: 1427193 - DNA, 25 bp, Homo sapien
tcgccgggccttaagcataatctac

SEQ ID NO: 1427194 - DNA, 25 bp, Homo sapien
gaaactgtggccataggcgggccct

SEQ ID NO: 1427195 - DNA, 25 bp, Homo sapien
ttataccgaatccaaacccaggcga

SEQ ID NO: 1427196 - DNA, 25 bp, Homo sapien
cagtccatgactgaaaggagggcct

SEQ ID NO: 1427197 - DNA, 25 bp, Homo sapien
tcggaactgttagaccgcggtgacg

SEQ ID NO: 1427198 - DNA, 25 bp, Homo sapien
aggtgactctctagtcaacttccga

SEQ ID NO: 1427199 - DNA, 25 bp, Homo sapien
tggactccgaagatcggtacgttat

SEQ ID NO: 1427200 - DNA, 25 bp, Homo sapien
ggcccagcgcggtcaaattataata

SEQ ID NO: 1427201 - DNA, 25 bp, Homo sapien
ctagagcggacgaaagcaggtgact

SEQ ID NO: 1427202 - DNA, 25 bp, Homo sapien
ggaagccctcctatgacactgaaac

SEQ ID NO: 1427203 - DNA, 25 bp, Homo sapien
tggagacgatgatatgaagcgaacc

SEQ ID NO: 1427204 - DNA, 25 bp, Homo sapien
gaagcgaaccattaataaagcctgg

SEQ ID NO: 1427205 - DNA, 25 bp, Homo sapien
gatgacctctttcgtgcaccaagtg

SEQ ID NO: 1427206 - DNA, 25 bp, Homo sapien
ccaacacagttagatcagagaaagc

SEQ ID NO: 1427207 - DNA, 25 bp, Homo sapien
tatttgtctaggagtatgtcagaaa

SEQ ID NO: 1427208 - DNA, 25 bp, Homo sapien
gaccagtgcctgtgatctccattac

SEQ ID NO: 1427209 - DNA, 25 bp, Homo sapien
tcaggcttttagtaggaattactcc

SEQ ID NO: 1427210 - DNA, 25 bp, Homo sapien
caaacaatgtattgacaggattcca

SEQ ID NO: 1427211 - DNA, 25 bp, Homo sapien
aatactgaaacacattatgcctctg

SEQ ID NO: 1427212 - DNA, 25 bp, Homo sapien
tagatatattccaagccgcctgacg

SEQ ID NO: 1427213 - DNA, 25 bp, Homo sapien
gggttgacacatgaacagaatagca

SEQ ID NO: 1427214 - DNA, 25 bp, Homo sapien
taaaaacaactgtattgagttgagg

SEQ ID NO: 1427215 - DNA, 25 bp, Homo sapien
gaagtataaaaacaactgtattgag

SEQ ID NO: 1427216 - DNA, 25 bp, Homo sapien
cttgttcagaagagaataaaccagt

SEQ ID NO: 1427217 - DNA, 25 bp, Homo sapien
ttgttcagaagagaataaaccagtg

SEQ ID NO: 1427218 - DNA, 25 bp, Homo sapien
tattatggtgcatccacatgaggga

SEQ ID NO: 1427219 - DNA, 25 bp, Homo sapien
agtacggtgccttctcgcagtatca

SEQ ID NO: 1427220 - DNA, 25 bp, Homo sapien
tatataacgtaaaatggtctccagg

SEQ ID NO: 1427221 - DNA, 25 bp, Homo sapien
gcagtatcagaagggtaaaagggac

SEQ ID NO: 1427222 - DNA, 25 bp, Homo sapien
caacaccgcatgactggaacctgaa

SEQ ID NO: 1427223 - DNA, 25 bp, Homo sapien
ggattacaaactgccatacatgagc

SEQ ID NO: 1427224 - DNA, 25 bp, Homo sapien
tgttcagccatcacaagaagaagtg

SEQ ID NO: 1427225 - DNA, 25 bp, Homo sapien
gagatcctccacaatacgggccttg

SEQ ID NO: 1427226 - DNA, 25 bp, Homo sapien
tctttgtactatgtatgggaacagt

SEQ ID NO: 1427227 - DNA, 25 bp, Homo sapien
tatgctactctttgtactatgtatg

SEQ ID NO: 1427228 - DNA, 25 bp, Homo sapien
ttattatgctactctttgtactatg

SEQ ID NO: 1427229 - DNA, 25 bp, Homo sapien
ctatgtatgggaacagtatgtttgt

SEQ ID NO: 1427230 - DNA, 25 bp, Homo sapien
tggcttccctgcaagctcaataggt

SEQ ID NO: 1427231 - DNA, 25 bp, Homo sapien
tagcatcaggtaggccaaacaactg

SEQ ID NO: 1427232 - DNA, 25 bp, Homo sapien
aagtagtttagagatagcatcaggt

SEQ ID NO: 1427233 - DNA, 25 bp, Homo sapien
aaacaactgtactgggcccctgtag

SEQ ID NO: 1427234 - DNA, 25 bp, Homo sapien
ggacgggacgtcataacacaccgat

SEQ ID NO: 1427235 - DNA, 25 bp, Homo sapien
gctggatcccagaaagttgcccatg

SEQ ID NO: 1427236 - DNA, 25 bp, Homo sapien
agactatacgactaagcctccagcg

SEQ ID NO: 1427237 - DNA, 25 bp, Homo sapien
tgcccatggtcagctaagtgacgga

SEQ ID NO: 1427238 - DNA, 25 bp, Homo sapien
tacaaagggactcatcttaattagc

SEQ ID NO: 1427239 - DNA, 25 bp, Homo sapien
gttgagttaatgatcttgtggtaca

SEQ ID NO: 1427240 - DNA, 25 bp, Homo sapien
ttatattgataccaagtcacaacaa

SEQ ID NO: 1427241 - DNA, 25 bp, Homo sapien
gactatttgtttatattgatgtgga

SEQ ID NO: 1427242 - DNA, 25 bp, Homo sapien
cctgagtgaattaatacgtagcctc

SEQ ID NO: 1427243 - DNA, 25 bp, Homo sapien
tctacatagtgacttcgaacttggc

SEQ ID NO: 1427244 - DNA, 25 bp, Homo sapien
catttttcgtctcttcacatcgcgc

SEQ ID NO: 1427245 - DNA, 25 bp, Homo sapien
catctgcgtattcataggccatttt

SEQ ID NO: 1427246 - DNA, 25 bp, Homo sapien
agtggagaaggaacaaataaatctg

SEQ ID NO: 1427247 - DNA, 25 bp, Homo sapien
taactggttgtgatcaattagttgt

SEQ ID NO: 1427248 - DNA, 25 bp, Homo sapien
tagggctagtcaagtgaaaaagtgg

SEQ ID NO: 1427249 - DNA, 25 bp, Homo sapien
taaacaccactgcactcgaaccagc

SEQ ID NO: 1427250 - DNA, 25 bp, Homo sapien
gggtagcggtgtggataaaagtaga

SEQ ID NO: 1427251 - DNA, 25 bp, Homo sapien
cccgtgggttatgagattcagcggt

SEQ ID NO: 1427252 - DNA, 25 bp, Homo sapien
ggacccgtgggttatgagattcagc

SEQ ID NO: 1427253 - DNA, 25 bp, Homo sapien
gtgtggataaaagtagaggcctgac

SEQ ID NO: 1427254 - DNA, 25 bp, Homo sapien
ttgaacgtccgcagcagcgagccca

SEQ ID NO: 1427255 - DNA, 25 bp, Homo sapien
agcagcgagcccagcatgaaggccg

SEQ ID NO: 1427256 - DNA, 25 bp, Homo sapien
gcgagcccagcatgaaggccgccat

SEQ ID NO: 1427257 - DNA, 25 bp, Homo sapien
ctgcttgaacgtccgcagcagcgag

SEQ ID NO: 1427258 - DNA, 25 bp, Homo sapien
tgtccgctacaaactacaaaccgct

SEQ ID NO: 1427259 - DNA, 25 bp, Homo sapien
ttgtccgctacaaactacaaaccgc

SEQ ID NO: 1427260 - DNA, 25 bp, Homo sapien
catttctccttattctcttttcttt

SEQ ID NO: 1427261 - DNA, 25 bp, Homo sapien
tcatttctccttattctcttttctt

SEQ ID NO: 1427262 - DNA, 25 bp, Homo sapien
cttgacctcgtattgccagaatgca

SEQ ID NO: 1427263 - DNA, 25 bp, Homo sapien
tcttgacctcgtattgccagaatgc

SEQ ID NO: 1427264 - DNA, 25 bp, Homo sapien
cttcttgacctcgtattgccagaat

SEQ ID NO: 1427265 - DNA, 25 bp, Homo sapien
ttcttgacctcgtattgccagaatg

SEQ ID NO: 1427266 - DNA, 25 bp, Homo sapien
ggaagaggaacccagtgtggagtga

SEQ ID NO: 1427267 - DNA, 25 bp, Homo sapien
ctgggaagaggaacccagtgtggag

SEQ ID NO: 1427268 - DNA, 25 bp, Homo sapien
gggaagaggaacccagtgtggagtg

SEQ ID NO: 1427269 - DNA, 25 bp, Homo sapien
cactgggaagaggaacccagtgtgg

SEQ ID NO: 1427270 - DNA, 25 bp, Homo sapien
tgccacttgaaacgtccaccagaac

SEQ ID NO: 1427271 - DNA, 25 bp, Homo sapien
aatgccacttgaaacgtccaccaga

SEQ ID NO: 1427272 - DNA, 25 bp, Homo sapien
atgccacttgaaacgtccaccagaa

SEQ ID NO: 1427273 - DNA, 25 bp, Homo sapien
tcaagcggtggtgatttcagggcat

SEQ ID NO: 1427274 - DNA, 25 bp, Homo sapien
ttcagggcatacaaggagcttcatg

SEQ ID NO: 1427275 - DNA, 25 bp, Homo sapien
atcaagcggtggtgatttcagggca

SEQ ID NO: 1427276 - DNA, 25 bp, Homo sapien
gtgatttcagggcatacaaggagct

SEQ ID NO: 1427277 - DNA, 25 bp, Homo sapien
tcagcaaccagattcactgtctcag

SEQ ID NO: 1427278 - DNA, 25 bp, Homo sapien
cagcaaccagattcactgtctcagc

SEQ ID NO: 1427279 - DNA, 25 bp, Homo sapien
ttcagcaaccagattcactgtctca

SEQ ID NO: 1427280 - DNA, 25 bp, Homo sapien
tgcttctaatttccgctcaagtgtc

SEQ ID NO: 1427281 - DNA, 25 bp, Homo sapien
gcttctaatttccgctcaagtgtcc

SEQ ID NO: 1427282 - DNA, 25 bp, Homo sapien
ttttgcttctaatttccgctcaagt

SEQ ID NO: 1427283 - DNA, 25 bp, Homo sapien
ctaatttccgctcaagtgtcctcac

SEQ ID NO: 1427284 - DNA, 25 bp, Homo sapien
attttcatctttcaatgcttcataa

SEQ ID NO: 1427285 - DNA, 25 bp, Homo sapien
tttcatctttcaatgcttcataact

SEQ ID NO: 1427286 - DNA, 25 bp, Homo sapien
tctttcaatgcttcataacttatct

SEQ ID NO: 1427287 - DNA, 25 bp, Homo sapien
tcatctttcaatgcttcataactta

SEQ ID NO: 1427288 - DNA, 25 bp, Homo sapien
gctgatactctaggccatactcccc

SEQ ID NO: 1427289 - DNA, 25 bp, Homo sapien
tgctgatactctaggccatactccc

SEQ ID NO: 1427290 - DNA, 25 bp, Homo sapien
ctgatactctaggccatactccccg

SEQ ID NO: 1427291 - DNA, 25 bp, Homo sapien
tgatactctaggccatactccccgg

SEQ ID NO: 1427292 - DNA, 25 bp, Homo sapien
gatcttcaaatttgtcatcgtcggg

SEQ ID NO: 1427293 - DNA, 25 bp, Homo sapien
aggcggaggttcttggtcttcagaa

SEQ ID NO: 1427294 - DNA, 25 bp, Homo sapien
cttcaaatttgtcatcgtcgggaat

SEQ ID NO: 1427295 - DNA, 25 bp, Homo sapien
caaatttgtcatcgtcgggaatggc

SEQ ID NO: 1427296 - DNA, 25 bp, Homo sapien
ctcatctcaggggttgaaagccgga

SEQ ID NO: 1427297 - DNA, 25 bp, Homo sapien
aaagccggagaaccacatgtccctg

SEQ ID NO: 1427298 - DNA, 25 bp, Homo sapien
gaatactttgctggcagtgttccca

SEQ ID NO: 1427299 - DNA, 25 bp, Homo sapien
agtgttcccagttagattccaccaa

SEQ ID NO: 1427300 - DNA, 25 bp, Homo sapien
agcagaagcatttcgtcgctcttct

SEQ ID NO: 1427301 - DNA, 25 bp, Homo sapien
gtcggcagctggaattatcaatggt

SEQ ID NO: 1427302 - DNA, 25 bp, Homo sapien
ggcagctggaattatcaatggtggc

SEQ ID NO: 1427303 - DNA, 25 bp, Homo sapien
tcgtcgctcttctggttgaggaggc

SEQ ID NO: 1427304 - DNA, 25 bp, Homo sapien
agtaaggctggacattccccattcc

SEQ ID NO: 1427305 - DNA, 25 bp, Homo sapien
ctgaggcccctagagtttctagaag

SEQ ID NO: 1427306 - DNA, 25 bp, Homo sapien
tatcatcgaagtcaccatgtctact

SEQ ID NO: 1427307 - DNA, 25 bp, Homo sapien
gaccctggcccagatatcatcgaag

SEQ ID NO: 1427308 - DNA, 25 bp, Homo sapien
gccagcatttatagcctccttgact

SEQ ID NO: 1427309 - DNA, 25 bp, Homo sapien
ggtcattgggcatctactcagtgct

SEQ ID NO: 1427310 - DNA, 25 bp, Homo sapien
tctatgtatgtggtatggaggaaca

SEQ ID NO: 1427311 - DNA, 25 bp, Homo sapien
tcagtgctaagaactcataatagac

SEQ ID NO: 1427312 - DNA, 25 bp, Homo sapien
tcgtggtctctggtctcgctggatc

SEQ ID NO: 1427313 - DNA, 25 bp, Homo sapien
agttagatacagagtttctacacac

SEQ ID NO: 1427314 - DNA, 25 bp, Homo sapien
acataaaggtcctccacgtcctcat

SEQ ID NO: 1427315 - DNA, 25 bp, Homo sapien
taaaggtcctccacgtcctcatcag

SEQ ID NO: 1427316 - DNA, 25 bp, Homo sapien
tgccgattgatgtattaacaatcct

SEQ ID NO: 1427317 - DNA, 25 bp, Homo sapien
gcgccatgaacttgtactcctcagc

SEQ ID NO: 1427318 - DNA, 25 bp, Homo sapien
cagtcccgcgccatgaacttgtact

SEQ ID NO: 1427319 - DNA, 25 bp, Homo sapien
catggagcaggggatggtattcgtc

SEQ ID NO: 1427320 - DNA, 25 bp, Homo sapien
ccgcgccatgaacttgtactcctca

SEQ ID NO: 1427321 - DNA, 25 bp, Homo sapien
aagccatgttgcctaactccagaag

SEQ ID NO: 1427322 - DNA, 25 bp, Homo sapien
gaaaggggagaagccatgttgccta

SEQ ID NO: 1427323 - DNA, 25 bp, Homo sapien
catgttgcctaactccagaagttgg

SEQ ID NO: 1427324 - DNA, 25 bp, Homo sapien
gggagaagccatgttgcctaactcc

SEQ ID NO: 1427325 - DNA, 25 bp, Homo sapien
accttgaggacagttgtctaggaca

SEQ ID NO: 1427326 - DNA, 25 bp, Homo sapien
gaccttgaggacagttgtctaggac

SEQ ID NO: 1427327 - DNA, 25 bp, Homo sapien
ccttgaggacagttgtctaggacag

SEQ ID NO: 1427328 - DNA, 25 bp, Homo sapien
gggaccccggagatgcatggctttc

SEQ ID NO: 1427329 - DNA, 25 bp, Homo sapien
acggctcagcccagaagtacaggaa

SEQ ID NO: 1427330 - DNA, 25 bp, Homo sapien
tgagagttccactcatggccgcagg

SEQ ID NO: 1427331 - DNA, 25 bp, Homo sapien
tggccgcagggtcaaccaacatgtt

SEQ ID NO: 1427332 - DNA, 25 bp, Homo sapien
ttggcgatatgcgaaagtcccttcg

SEQ ID NO: 1427333 - DNA, 25 bp, Homo sapien
tgcttggcgattgggaaaggtctca

SEQ ID NO: 1427334 - DNA, 25 bp, Homo sapien
gattgggaaaggtctcaccgctcgg

SEQ ID NO: 1427335 - DNA, 25 bp, Homo sapien
ggcgatatgcgaaagtcccttcgtg

SEQ ID NO: 1427336 - DNA, 25 bp, Homo sapien
ggctttaagtctggaaggatgagtt

SEQ ID NO: 1427337 - DNA, 25 bp, Homo sapien
gatgtcggctttaagtctggaagga

SEQ ID NO: 1427338 - DNA, 25 bp, Homo sapien
cacggggatgtgatgtcggctttaa

SEQ ID NO: 1427339 - DNA, 25 bp, Homo sapien
gggatgtgatgtcggctttaagtct

SEQ ID NO: 1427340 - DNA, 25 bp, Homo sapien
ctcaagcgcttcgctagggtggtgg

SEQ ID NO: 1427341 - DNA, 25 bp, Homo sapien
cgcttcgctagggtggtggagggga

SEQ ID NO: 1427342 - DNA, 25 bp, Homo sapien
agcgcttcgctagggtggtggaggg

SEQ ID NO: 1427343 - DNA, 25 bp, Homo sapien
caagcgcttcgctagggtggtggag

SEQ ID NO: 1427344 - DNA, 25 bp, Homo sapien
tgcactagccctccatagaagatgg

SEQ ID NO: 1427345 - DNA, 25 bp, Homo sapien
tgcgcactagcagtccatggaagtc

SEQ ID NO: 1427346 - DNA, 25 bp, Homo sapien
tgtactagccctccatggtagatgg

SEQ ID NO: 1427347 - DNA, 25 bp, Homo sapien
gagtgcgcactagctctctatggaa

SEQ ID NO: 1427348 - DNA, 25 bp, Homo sapien
gacataacctgccttgggcgagata

SEQ ID NO: 1427349 - DNA, 25 bp, Homo sapien
gcaccagaatgtttagcaatgtcct

SEQ ID NO: 1427350 - DNA, 25 bp, Homo sapien
tctctggttgtcatgagtgtgtggt

SEQ ID NO: 1427351 - DNA, 25 bp, Homo sapien
caatgtcctgggtggatgaacaagg

SEQ ID NO: 1427352 - DNA, 25 bp, Homo sapien
gccttccttcttaagccctccttga

SEQ ID NO: 1427353 - DNA, 25 bp, Homo sapien
gccctccttgaaatccagtcagcat

SEQ ID NO: 1427354 - DNA, 25 bp, Homo sapien
tgtgctctaggccttccttcttaag

SEQ ID NO: 1427355 - DNA, 25 bp, Homo sapien
ttcttaagccctccttgaaatccag

SEQ ID NO: 1427356 - DNA, 25 bp, Homo sapien
tacacacagtttttgccctagtggc

SEQ ID NO: 1427357 - DNA, 25 bp, Homo sapien
ctatgactctaccatggcgaaggcg

SEQ ID NO: 1427358 - DNA, 25 bp, Homo sapien
cacctttgagggagtctggtctcca

SEQ ID NO: 1427359 - DNA, 25 bp, Homo sapien
ttttcctgtagctggcacctttgag

SEQ ID NO: 1427360 - DNA, 25 bp, Homo sapien
tgttacttgtatggtcccggatccc

SEQ ID NO: 1427361 - DNA, 25 bp, Homo sapien
gatgtctttctcgagcctgtgctgg

SEQ ID NO: 1427362 - DNA, 25 bp, Homo sapien
tctagttacgccaggaaaggttgtc

SEQ ID NO: 1427363 - DNA, 25 bp, Homo sapien
gatatcaacaatggccttaggctcc

SEQ ID NO: 1427364 - DNA, 25 bp, Homo sapien
catctttgtaatacagtcacaatac

SEQ ID NO: 1427365 - DNA, 25 bp, Homo sapien
taacttgctcccaaggagtgaattg

SEQ ID NO: 1427366 - DNA, 25 bp, Homo sapien
gatagcaattttgccactgtgtaga

SEQ ID NO: 1427367 - DNA, 25 bp, Homo sapien
aataaacttctagagcataacttgc

SEQ ID NO: 1427368 - DNA, 25 bp, Homo sapien
cacttagaagagaagatcactcggg

SEQ ID NO: 1427369 - DNA, 25 bp, Homo sapien
ccattgcagcaattagtgggctcac

SEQ ID NO: 1427370 - DNA, 25 bp, Homo sapien
gcacaggtacacagttgcagtccac

SEQ ID NO: 1427371 - DNA, 25 bp, Homo sapien
tctgtatcaagacacacaagggtgg

SEQ ID NO: 1427372 - DNA, 25 bp, Homo sapien
tgagcagaatatacttgcccacgta

SEQ ID NO: 1427373 - DNA, 25 bp, Homo sapien
cctgcacaaagtacatagccaatga

SEQ ID NO: 1427374 - DNA, 25 bp, Homo sapien
tatccaagaattgtccacgtggtcc

SEQ ID NO: 1427375 - DNA, 25 bp, Homo sapien
gactgtagataatgtacttccctgc

SEQ ID NO: 1427376 - DNA, 25 bp, Homo sapien
gtgtggtcagaaggaggcttagccc

SEQ ID NO: 1427377 - DNA, 25 bp, Homo sapien
ctgtgtgtggtcagaaggaggctta

SEQ ID NO: 1427378 - DNA, 25 bp, Homo sapien
tgtgtggtcagaaggaggcttagcc

SEQ ID NO: 1427379 - DNA, 25 bp, Homo sapien
gaggcttagccccagaaaggaaaca

SEQ ID NO: 1427380 - DNA, 25 bp, Homo sapien
cagagatccagaggtcttcttcatc

SEQ ID NO: 1427381 - DNA, 25 bp, Homo sapien
gagatccagaggtcttcttcatcct

SEQ ID NO: 1427382 - DNA, 25 bp, Homo sapien
ggagaagcttgggttgagcagagat

SEQ ID NO: 1427383 - DNA, 25 bp, Homo sapien
agagatccagaggtcttcttcatcc

SEQ ID NO: 1427384 - DNA, 25 bp, Homo sapien
gatggtgtcccagatagagctgaag

SEQ ID NO: 1427385 - DNA, 25 bp, Homo sapien
tgtgatgatcaccaagagtggcagg

SEQ ID NO: 1427386 - DNA, 25 bp, Homo sapien
cagcaatggcaacagatgaagagga

SEQ ID NO: 1427387 - DNA, 25 bp, Homo sapien
gcagatggtgttgtagatgccttct

SEQ ID NO: 1427388 - DNA, 25 bp, Homo sapien
ttggctagattagggccagagaacc

SEQ ID NO: 1427389 - DNA, 25 bp, Homo sapien
cctgggctcaaaaggatgcaacctt

SEQ ID NO: 1427390 - DNA, 25 bp, Homo sapien
ctctcggcttacaagcaggtcctgg

SEQ ID NO: 1427391 - DNA, 25 bp, Homo sapien
tttgggtttgggcatgccactggca

SEQ ID NO: 1427392 - DNA, 25 bp, Homo sapien
tctgtagtatctagctagggagaca

SEQ ID NO: 1427393 - DNA, 25 bp, Homo sapien
ttggcaagttaaccagacctcagct

SEQ ID NO: 1427394 - DNA, 25 bp, Homo sapien
aacttctatccacccatgtatgagg

SEQ ID NO: 1427395 - DNA, 25 bp, Homo sapien
taacaatggactaattccagtgctg

SEQ ID NO: 1427396 - DNA, 25 bp, Homo sapien
tttcctggaggtcacgttcaacgta

SEQ ID NO: 1427397 - DNA, 25 bp, Homo sapien
gatctcggccagaactgctttcctg

SEQ ID NO: 1427398 - DNA, 25 bp, Homo sapien
gaacacccgccctgtgcattcagat

SEQ ID NO: 1427399 - DNA, 25 bp, Homo sapien
gtagtaaacaatcgctgaacacccg

SEQ ID NO: 1427400 - DNA, 25 bp, Homo sapien
gctggaatagctgaaaactaatgaa

SEQ ID NO: 1427401 - DNA, 25 bp, Homo sapien
aagccaaaagctaccttactgcaat

SEQ ID NO: 1427402 - DNA, 25 bp, Homo sapien
ctcaaaagtgatacagatatggttc

SEQ ID NO: 1427403 - DNA, 25 bp, Homo sapien
tcaaatcatagagggagtgagcata

SEQ ID NO: 1427404 - DNA, 25 bp, Homo sapien
ctgtggaatgttcagtgtggtggac

SEQ ID NO: 1427405 - DNA, 25 bp, Homo sapien
tctgtggaatgttcagtgtggtgga

SEQ ID NO: 1427406 - DNA, 25 bp, Homo sapien
ccaggctttggatggcagcttccac

SEQ ID NO: 1427407 - DNA, 25 bp, Homo sapien
ttcatatgtctgaggataaaccttt

SEQ ID NO: 1427408 - DNA, 25 bp, Homo sapien
tcatatgtctgaggataaaccttta

SEQ ID NO: 1427409 - DNA, 25 bp, Homo sapien
gttcatatgtctgaggataaacctt

SEQ ID NO: 1427410 - DNA, 25 bp, Homo sapien
catatgtctgaggataaacctttac

SEQ ID NO: 1427411 - DNA, 25 bp, Homo sapien
gcccttcccaaaagagatggcaagt

SEQ ID NO: 1427412 - DNA, 25 bp, Homo sapien
ttgtccctaggaatagccgtcatct

SEQ ID NO: 1427413 - DNA, 25 bp, Homo sapien
ggagaccctctggaaagcacttaag

SEQ ID NO: 1427414 - DNA, 25 bp, Homo sapien
gagacctcaaggctttgtgggagac

SEQ ID NO: 1427415 - DNA, 25 bp, Homo sapien
gtgtccttgggaaggtcactcagct

SEQ ID NO: 1427416 - DNA, 25 bp, Homo sapien
cttcatctccaaaatggggaacaat

SEQ ID NO: 1427417 - DNA, 25 bp, Homo sapien
tcagtgtgtgtccttgggaaggtca

SEQ ID NO: 1427418 - DNA, 25 bp, Homo sapien
tcagctgctttgagtctcagtttct

SEQ ID NO: 1427419 - DNA, 25 bp, Homo sapien
catgctacaacatacatcaaccctg

SEQ ID NO: 1427420 - DNA, 25 bp, Homo sapien
aaacaacacagatgtcggtcaacga

SEQ ID NO: 1427421 - DNA, 25 bp, Homo sapien
taaactcttatggtatatgcacaca

SEQ ID NO: 1427422 - DNA, 25 bp, Homo sapien
gaataagcaactccatagaggtagg

SEQ ID NO: 1427423 - DNA, 25 bp, Homo sapien
cagcttagcctctattagaactctg

SEQ ID NO: 1427424 - DNA, 25 bp, Homo sapien
gcttagcctctattagaactctgtt

SEQ ID NO: 1427425 - DNA, 25 bp, Homo sapien
acagcttagcctctattagaactct

SEQ ID NO: 1427426 - DNA, 25 bp, Homo sapien
cttagcctctattagaactctgttt

SEQ ID NO: 1427427 - DNA, 25 bp, Homo sapien
tgggttaaaccagcaccttggtgag

SEQ ID NO: 1427428 - DNA, 25 bp, Homo sapien
caataggaaagctgcaagtctgggc

SEQ ID NO: 1427429 - DNA, 25 bp, Homo sapien
ggttttttcttccatgcaggtcaca

SEQ ID NO: 1427430 - DNA, 25 bp, Homo sapien
acaagatcctgagccgagcactggc

SEQ ID NO: 1427431 - DNA, 25 bp, Homo sapien
aatgtatggaatggatgcatctccc

SEQ ID NO: 1427432 - DNA, 25 bp, Homo sapien
gaagtcatactcatttcacaggcca

SEQ ID NO: 1427433 - DNA, 25 bp, Homo sapien
tatactggcctgcacacggtaggtt

SEQ ID NO: 1427434 - DNA, 25 bp, Homo sapien
gactccaaggccctggtatactggc

SEQ ID NO: 1427435 - DNA, 25 bp, Homo sapien
taagcccgcgatgctttccggaggg

SEQ ID NO: 1427436 - DNA, 25 bp, Homo sapien
cctcgtataacgcaatcggtggcac

SEQ ID NO: 1427437 - DNA, 25 bp, Homo sapien
taaaggctggtaagacgcttgcaga

SEQ ID NO: 1427438 - DNA, 25 bp, Homo sapien
cttcttccaaacagagggcgcttaa

SEQ ID NO: 1427439 - DNA, 25 bp, Homo sapien
ttcggtccgcggaagggcttcctgc

SEQ ID NO: 1427440 - DNA, 25 bp, Homo sapien
ggcccagggaatctcctggttgctg

SEQ ID NO: 1427441 - DNA, 25 bp, Homo sapien
tcctggttgctgccccgtctgacag

SEQ ID NO: 1427442 - DNA, 25 bp, Homo sapien
tggttgctgccccgtctgacagcgc

SEQ ID NO: 1427443 - DNA, 25 bp, Homo sapien
cccgagccaggtctggcgtgtaggg

SEQ ID NO: 1427444 - DNA, 25 bp, Homo sapien
cggcgccggccaaggtcgtgggagc

SEQ ID NO: 1427445 - DNA, 25 bp, Homo sapien
cgagccaggtctggcgtgtagggcc

SEQ ID NO: 1427446 - DNA, 25 bp, Homo sapien
ggccaaggtcgtgggagccgcccgc

SEQ ID NO: 1427447 - DNA, 25 bp, Homo sapien
ttcctacgggccgacgcctggcata

SEQ ID NO: 1427448 - DNA, 25 bp, Homo sapien
ggcatagttgaggtttcgctccaac

SEQ ID NO: 1427449 - DNA, 25 bp, Homo sapien
gccgagggcagcgccctctgtgttc

SEQ ID NO: 1427450 - DNA, 25 bp, Homo sapien
tctgtcctgcccctgatgtcacagg

SEQ ID NO: 1427451 - DNA, 25 bp, Homo sapien
acacgccccagacgcgccctccctc

SEQ ID NO: 1427452 - DNA, 25 bp, Homo sapien
gccagcccacctcgggtgcctctgg

SEQ ID NO: 1427453 - DNA, 25 bp, Homo sapien
ggccagcccacctcgggtgcctctg

SEQ ID NO: 1427454 - DNA, 25 bp, Homo sapien
gccttgggcgcacacgccccagacg

SEQ ID NO: 1427455 - DNA, 25 bp, Homo sapien
tttctcgggctcctgatgttgccag

SEQ ID NO: 1427456 - DNA, 25 bp, Homo sapien
gaaaaattgctgcaggctcatcagg

SEQ ID NO: 1427457 - DNA, 25 bp, Homo sapien
agtgttctttctcgggctcctgatg

SEQ ID NO: 1427458 - DNA, 25 bp, Homo sapien
tctgaaagatgctggatctgagttc

SEQ ID NO: 1427459 - DNA, 25 bp, Homo sapien
gagaatcacacaggttccaactaca

SEQ ID NO: 1427460 - DNA, 25 bp, Homo sapien
tgagaatcacacaggttccaactac

SEQ ID NO: 1427461 - DNA, 25 bp, Homo sapien
gaatcacacaggttccaactacagc

SEQ ID NO: 1427462 - DNA, 25 bp, Homo sapien
ctgtgagaatcacacaggttccaac

SEQ ID NO: 1427463 - DNA, 25 bp, Homo sapien
gcattaaaccaagcacagggccgtg

SEQ ID NO: 1427464 - DNA, 25 bp, Homo sapien
tgttcccattgcgagtgacttctgc

SEQ ID NO: 1427465 - DNA, 25 bp, Homo sapien
gacagtagatgctggaaaccaccct

SEQ ID NO: 1427466 - DNA, 25 bp, Homo sapien
ctagctcgtagcaggattggttaca

SEQ ID NO: 1427467 - DNA, 25 bp, Homo sapien
aggtcaggaacacaggggacactgc

SEQ ID NO: 1427468 - DNA, 25 bp, Homo sapien
agctcctcaggaggtcaggaacaca

SEQ ID NO: 1427469 - DNA, 25 bp, Homo sapien
aggaacacaggggacactgcctgat

SEQ ID NO: 1427470 - DNA, 25 bp, Homo sapien
tgtcaaggggctaagccatccagca

SEQ ID NO: 1427471 - DNA, 25 bp, Homo sapien
gttctctgcccagggcaaccctgtg

SEQ ID NO: 1427472 - DNA, 25 bp, Homo sapien
aacttgcagagttcactgccctgga

SEQ ID NO: 1427473 - DNA, 25 bp, Homo sapien
caaacttgcagagttcactgccctg

SEQ ID NO: 1427474 - DNA, 25 bp, Homo sapien
ttacaaacttgcagagttcactgcc

SEQ ID NO: 1427475 - DNA, 25 bp, Homo sapien
ctggctggaacacttaaagggctct

SEQ ID NO: 1427476 - DNA, 25 bp, Homo sapien
tcacattccagggtgtgtttcacat

SEQ ID NO: 1427477 - DNA, 25 bp, Homo sapien
gccaacaccacaacaccagggtgct

SEQ ID NO: 1427478 - DNA, 25 bp, Homo sapien
ctgaaaccactgttgagggatcccc

SEQ ID NO: 1427479 - DNA, 25 bp, Homo sapien
ggcctgccttcttagtcttgtgagg

SEQ ID NO: 1427480 - DNA, 25 bp, Homo sapien
ccttcttagtcttgtgaggtggcac

SEQ ID NO: 1427481 - DNA, 25 bp, Homo sapien
tcattcccgttgttctcctttgtct

SEQ ID NO: 1427482 - DNA, 25 bp, Homo sapien
cattcccgttgttctcctttgtctg

SEQ ID NO: 1427483 - DNA, 25 bp, Homo sapien
aggttctctaagcaagcttggctgc

SEQ ID NO: 1427484 - DNA, 25 bp, Homo sapien
gcttgtaaagaggaattcctaggct

SEQ ID NO: 1427485 - DNA, 25 bp, Homo sapien
ggctctgcgagctcagtccttctgg

SEQ ID NO: 1427486 - DNA, 25 bp, Homo sapien
tcagtgccaaatgcatagcatccct

SEQ ID NO: 1427487 - DNA, 25 bp, Homo sapien
tagcatcccttggtcggctgtggcc

SEQ ID NO: 1427488 - DNA, 25 bp, Homo sapien
tctctctagagaacgacctggaaag

SEQ ID NO: 1427489 - DNA, 25 bp, Homo sapien
aaagaaggaaaccagctggctcagg

SEQ ID NO: 1427490 - DNA, 25 bp, Homo sapien
aaggtgcaccgttccttttgcagac

SEQ ID NO: 1427491 - DNA, 25 bp, Homo sapien
tctccggcagagagcttaagcgggc

SEQ ID NO: 1427492 - DNA, 25 bp, Homo sapien
ccatcactccacggttcttgggcat

SEQ ID NO: 1427493 - DNA, 25 bp, Homo sapien
agctccatcactccacggttcttgg

SEQ ID NO: 1427494 - DNA, 25 bp, Homo sapien
tccatcactccacggttcttgggca

SEQ ID NO: 1427495 - DNA, 25 bp, Homo sapien
gctccatcactccacggttcttggg

SEQ ID NO: 1427496 - DNA, 25 bp, Homo sapien
atctgtggaccatgccctgagtcat

SEQ ID NO: 1427497 - DNA, 25 bp, Homo sapien
gcatctgtggaccatgccctgagtc

SEQ ID NO: 1427498 - DNA, 25 bp, Homo sapien
tggcatctgtggaccatgccctgag

SEQ ID NO: 1427499 - DNA, 25 bp, Homo sapien
catctggcatctgtggaccatgccc

SEQ ID NO: 1427500 - DNA, 25 bp, Homo sapien
cctctctgcactcaatgggcaggct

SEQ ID NO: 1427501 - DNA, 25 bp, Homo sapien
ctgtcctggtgatttgggcctctct

SEQ ID NO: 1427502 - DNA, 25 bp, Homo sapien
ctctctgcactcaatgggcaggctt

SEQ ID NO: 1427503 - DNA, 25 bp, Homo sapien
gcctctctgcactcaatgggcaggc

SEQ ID NO: 1427504 - DNA, 25 bp, Homo sapien
tcgttcgtggttattgaaggcaaag

SEQ ID NO: 1427505 - DNA, 25 bp, Homo sapien
gggtcgttcgtggttattgaaggca

SEQ ID NO: 1427506 - DNA, 25 bp, Homo sapien
gtcgttcgtggttattgaaggcaaa

SEQ ID NO: 1427507 - DNA, 25 bp, Homo sapien
ggtcgttcgtggttattgaaggcaa

SEQ ID NO: 1427508 - DNA, 25 bp, Homo sapien
tgttggtgacctttagccctccttc

SEQ ID NO: 1427509 - DNA, 25 bp, Homo sapien
aagtggagagctcacaaatttcagg

SEQ ID NO: 1427510 - DNA, 25 bp, Homo sapien
tcacaaatttcaggtgaaaggtcat

SEQ ID NO: 1427511 - DNA, 25 bp, Homo sapien
gagctcacaaatttcaggtgaaagg

SEQ ID NO: 1427512 - DNA, 25 bp, Homo sapien
ggagagctcacaaatttcaggtgaa

SEQ ID NO: 1427513 - DNA, 25 bp, Homo sapien
cagaggtcttaagcaatgggtgaat

SEQ ID NO: 1427514 - DNA, 25 bp, Homo sapien
cacttttaatattacccctggcagt

SEQ ID NO: 1427515 - DNA, 25 bp, Homo sapien
ggcagttcttcgttcccataacaca

SEQ ID NO: 1427516 - DNA, 25 bp, Homo sapien
ttacgggcaagaagatgctactggg

SEQ ID NO: 1427517 - DNA, 25 bp, Homo sapien
gttctctggcagtacccacagatgg

SEQ ID NO: 1427518 - DNA, 25 bp, Homo sapien
accgggcctgtcaaatgttctctgg

SEQ ID NO: 1427519 - DNA, 25 bp, Homo sapien
agcacaccgggcctgtcaaatgttc

SEQ ID NO: 1427520 - DNA, 25 bp, Homo sapien
ccacagatggcactagagccttggg

SEQ ID NO: 1427521 - DNA, 25 bp, Homo sapien
tattaaagagcaacacagggtctcc

SEQ ID NO: 1427522 - DNA, 25 bp, Homo sapien
gagtctgggcctccgcagttggtaa

SEQ ID NO: 1427523 - DNA, 25 bp, Homo sapien
tgagtgccagtacccaggagagctg

SEQ ID NO: 1427524 - DNA, 25 bp, Homo sapien
ggtcccctggagtacatggcaaaaa

SEQ ID NO: 1427525 - DNA, 25 bp, Homo sapien
taggagtcctaccactttatgagta

SEQ ID NO: 1427526 - DNA, 25 bp, Homo sapien
tgcaaatccaggtcaccagctagtc

SEQ ID NO: 1427527 - DNA, 25 bp, Homo sapien
cattgaggttattggcaaccatggt

SEQ ID NO: 1427528 - DNA, 25 bp, Homo sapien
ttcccaactgatgcttttacaagag

SEQ ID NO: 1427529 - DNA, 25 bp, Homo sapien
tagaaaattgccgacactaaggctc

SEQ ID NO: 1427530 - DNA, 25 bp, Homo sapien
cattgttgccccgtctctaggtaag

SEQ ID NO: 1427531 - DNA, 25 bp, Homo sapien
tctggtcagacaaacataggcacta

SEQ ID NO: 1427532 - DNA, 25 bp, Homo sapien
gaaaggtcacggcttctagagcatc

SEQ ID NO: 1427533 - DNA, 25 bp, Homo sapien
tattaagccacctacactaaggagg

SEQ ID NO: 1427534 - DNA, 25 bp, Homo sapien
gaaggtcattcctgtttcccatagg

SEQ ID NO: 1427535 - DNA, 25 bp, Homo sapien
tggaaaggcttctcatgatctcacc

SEQ ID NO: 1427536 - DNA, 25 bp, Homo sapien
tataatctctatggcagtgccctga

SEQ ID NO: 1427537 - DNA, 25 bp, Homo sapien
tgtcagaagatgagaatctttggcc

SEQ ID NO: 1427538 - DNA, 25 bp, Homo sapien
agtgtcagaagatgagaatctttgg

SEQ ID NO: 1427539 - DNA, 25 bp, Homo sapien
tcagaagatgagaatctttggccca

SEQ ID NO: 1427540 - DNA, 25 bp, Homo sapien
agaagatgagaatctttggcccatt

SEQ ID NO: 1427541 - DNA, 25 bp, Homo sapien
gaaaccaagagcagatgttagccag

SEQ ID NO: 1427542 - DNA, 25 bp, Homo sapien
tgttggcaaaactctcttgctgagg

SEQ ID NO: 1427543 - DNA, 25 bp, Homo sapien
cacgacttggctttgaattggccct

SEQ ID NO: 1427544 - DNA, 25 bp, Homo sapien
tgttagccagcggattcctgcgaca

SEQ ID NO: 1427545 - DNA, 25 bp, Homo sapien
gggatggagaactcatggcctttcc

SEQ ID NO: 1427546 - DNA, 25 bp, Homo sapien
taaggactgccgttttctccctgcc

SEQ ID NO: 1427547 - DNA, 25 bp, Homo sapien
tccctgccatgagacggtggttgta

SEQ ID NO: 1427548 - DNA, 25 bp, Homo sapien
ttgtaggggcgcatcttcatttcca

SEQ ID NO: 1427549 - DNA, 25 bp, Homo sapien
tcatagcagaggtggagcatcgctt

SEQ ID NO: 1427550 - DNA, 25 bp, Homo sapien
atagcagaggtggagcatcgcttac

SEQ ID NO: 1427551 - DNA, 25 bp, Homo sapien
catagcagaggtggagcatcgctta

SEQ ID NO: 1427552 - DNA, 25 bp, Homo sapien
catgctcccttgtacgacatggcac

SEQ ID NO: 1427553 - DNA, 25 bp, Homo sapien
tcccattgaggttggtccggtggca

SEQ ID NO: 1427554 - DNA, 25 bp, Homo sapien
gttagtcactgcaacatcattgtct

SEQ ID NO: 1427555 - DNA, 25 bp, Homo sapien
tggactccccgtacttcccattgag

SEQ ID NO: 1427556 - DNA, 25 bp, Homo sapien
gaaagggcgtccttgatgatagctg

SEQ ID NO: 1427557 - DNA, 25 bp, Homo sapien
aagggcgtccttgatgatagctgag

SEQ ID NO: 1427558 - DNA, 25 bp, Homo sapien
gagaaagggcgtccttgatgatagc

SEQ ID NO: 1427559 - DNA, 25 bp, Homo sapien
tggagaaagggcgtccttgatgata

SEQ ID NO: 1427560 - DNA, 25 bp, Homo sapien
agatacattcattaggctgtcccat

SEQ ID NO: 1427561 - DNA, 25 bp, Homo sapien
ccagtcgaatgcagctgcctttatg

SEQ ID NO: 1427562 - DNA, 25 bp, Homo sapien
tccttaccatgggaatcccagtcga

SEQ ID NO: 1427563 - DNA, 25 bp, Homo sapien
accaatcttctctattcctcctgaa

SEQ ID NO: 1427564 - DNA, 25 bp, Homo sapien
tcctgaatttacattttgccctgct

SEQ ID NO: 1427565 - DNA, 25 bp, Homo sapien
cagtggttcccagtggcatggccct

SEQ ID NO: 1427566 - DNA, 25 bp, Homo sapien
tggccagcagcgaatgctggaactc

SEQ ID NO: 1427567 - DNA, 25 bp, Homo sapien
tgaggcagcttacgcctagaatctg

SEQ ID NO: 1427568 - DNA, 25 bp, Homo sapien
ttcccagtggcatggcccttcttct

SEQ ID NO: 1427569 - DNA, 25 bp, Homo sapien
gtagcttcctatgcggagtttgtac

SEQ ID NO: 1427570 - DNA, 25 bp, Homo sapien
ggagtttgtacaggtttctgctgtc

SEQ ID NO: 1427571 - DNA, 25 bp, Homo sapien
gccgttgtagcttcctatgcggagt

SEQ ID NO: 1427572 - DNA, 25 bp, Homo sapien
ccgcagtgccgttgtagcttcctat

SEQ ID NO: 1427573 - DNA, 25 bp, Homo sapien
aggcgaaggcggcctcttggccatc

SEQ ID NO: 1427574 - DNA, 25 bp, Homo sapien
cggcctcttggccatcccgcatgtc

SEQ ID NO: 1427575 - DNA, 25 bp, Homo sapien
tcccgcatgtccacgcgcagctcat

SEQ ID NO: 1427576 - DNA, 25 bp, Homo sapien
atgtccacgcgcagctcatagcggc

SEQ ID NO: 1427577 - DNA, 25 bp, Homo sapien
tcttcctgcaaagaggacagtccag

SEQ ID NO: 1427578 - DNA, 25 bp, Homo sapien
gatgggtttccaacacaggaaactc

SEQ ID NO: 1427579 - DNA, 25 bp, Homo sapien
gtctgctgatgggtttccaacacag

SEQ ID NO: 1427580 - DNA, 25 bp, Homo sapien
caggtctgctgatgggtttccaaca

SEQ ID NO: 1427581 - DNA, 25 bp, Homo sapien
ctcctcttgacccagtaactgacaa

SEQ ID NO: 1427582 - DNA, 25 bp, Homo sapien
tcctcttgacccagtaactgacaag

SEQ ID NO: 1427583 - DNA, 25 bp, Homo sapien
ttgacccagtaactgacaagccctg

SEQ ID NO: 1427584 - DNA, 25 bp, Homo sapien
tcttgacccagtaactgacaagccc

SEQ ID NO: 1427585 - DNA, 25 bp, Homo sapien
atcctccacgttcccgaagccaaca

SEQ ID NO: 1427586 - DNA, 25 bp, Homo sapien
tcagtttggccattctgccgcctct

SEQ ID NO: 1427587 - DNA, 25 bp, Homo sapien
ttcccgaagccaacacggtaatcag

SEQ ID NO: 1427588 - DNA, 25 bp, Homo sapien
atcagcccatttccggaaaaaatca

SEQ ID NO: 1427589 - DNA, 25 bp, Homo sapien
attttgcaccaggaaacatccagca

SEQ ID NO: 1427590 - DNA, 25 bp, Homo sapien
cattttgcaccaggaaacatccagc

SEQ ID NO: 1427591 - DNA, 25 bp, Homo sapien
ccattttgcaccaggaaacatccag

SEQ ID NO: 1427592 - DNA, 25 bp, Homo sapien
gcccccgtcggtggtcatatcacag

SEQ ID NO: 1427593 - DNA, 25 bp, Homo sapien
gtcatatcacagtacacttgtaatt

SEQ ID NO: 1427594 - DNA, 25 bp, Homo sapien
gtgtctccattcatcaaatgctggg

SEQ ID NO: 1427595 - DNA, 25 bp, Homo sapien
tccccattgaggaagatggggtaaa

SEQ ID NO: 1427596 - DNA, 25 bp, Homo sapien
ctgcaaggaaaatagacaatgtcca

SEQ ID NO: 1427597 - DNA, 25 bp, Homo sapien
agtgcacaagagctccttggatcat

SEQ ID NO: 1427598 - DNA, 25 bp, Homo sapien
cagtgcacaagagctccttggatca

SEQ ID NO: 1427599 - DNA, 25 bp, Homo sapien
caaggaaaatagacaatgtccagaa

SEQ ID NO: 1427600 - DNA, 25 bp, Homo sapien
cactggcctaacgtagtttagaaca

SEQ ID NO: 1427601 - DNA, 25 bp, Homo sapien
ttgctgccacacacccgtcgagggc

SEQ ID NO: 1427602 - DNA, 25 bp, Homo sapien
caaaggcattgcctactgcaggcat

SEQ ID NO: 1427603 - DNA, 25 bp, Homo sapien
gtcgagggcgcactggcctaacgta

SEQ ID NO: 1427604 - DNA, 25 bp, Homo sapien
agacctgtgcaaaagtacggcccct

SEQ ID NO: 1427605 - DNA, 25 bp, Homo sapien
aaattggtggagaagggtgttccag

SEQ ID NO: 1427606 - DNA, 25 bp, Homo sapien
ctggatgctggccacaaattggtgg

SEQ ID NO: 1427607 - DNA, 25 bp, Homo sapien
gagacagagcaagaattgggtggga

SEQ ID NO: 1427608 - DNA, 25 bp, Homo sapien
tctaaaagacaagtagaccttggat

SEQ ID NO: 1427609 - DNA, 25 bp, Homo sapien
caagtagaccttggatgaaatttca

SEQ ID NO: 1427610 - DNA, 25 bp, Homo sapien
actacttgtacttaattccctccag

SEQ ID NO: 1427611 - DNA, 25 bp, Homo sapien
gtcttgtgcaaacaccagagacaag

SEQ ID NO: 1427612 - DNA, 25 bp, Homo sapien
gaggcatggacgggaatccagtcat

SEQ ID NO: 1427613 - DNA, 25 bp, Homo sapien
aggcatggacgggaatccagtcatt

SEQ ID NO: 1427614 - DNA, 25 bp, Homo sapien
tgaggcatggacgggaatccagtca

SEQ ID NO: 1427615 - DNA, 25 bp, Homo sapien
ggcatggacgggaatccagtcattc

SEQ ID NO: 1427616 - DNA, 25 bp, Homo sapien
catttaattggtccgggtggatcag

SEQ ID NO: 1427617 - DNA, 25 bp, Homo sapien
cctgcggttaccttgttagtgagag

SEQ ID NO: 1427618 - DNA, 25 bp, Homo sapien
tcagggagttgtactgctggttcct

SEQ ID NO: 1427619 - DNA, 25 bp, Homo sapien
aacctgatgtctttacttggtgcat

SEQ ID NO: 1427620 - DNA, 25 bp, Homo sapien
aatccaggtgtcttctgcatccaca

SEQ ID NO: 1427621 - DNA, 25 bp, Homo sapien
tgcaggagcaccgtgtagtctgtgt

SEQ ID NO: 1427622 - DNA, 25 bp, Homo sapien
acaggccctccagtcgaatccaggt

SEQ ID NO: 1427623 - DNA, 25 bp, Homo sapien
ctccacgtggtgtcctgtgctgcct

SEQ ID NO: 1427624 - DNA, 25 bp, Homo sapien
catcggtggatttgtaggtcaagac

SEQ ID NO: 1427625 - DNA, 25 bp, Homo sapien
tcagggcactttgtctggtgacttc

SEQ ID NO: 1427626 - DNA, 25 bp, Homo sapien
aattttcaatctctgccctgggagg

SEQ ID NO: 1427627 - DNA, 25 bp, Homo sapien
gctgtcaggtttgccggagggtcca

SEQ ID NO: 1427628 - DNA, 25 bp, Homo sapien
gagaggtccattggtggcatacatg

SEQ ID NO: 1427629 - DNA, 25 bp, Homo sapien
taggaagcaggtcaacaagccgaaa

SEQ ID NO: 1427630 - DNA, 25 bp, Homo sapien
ctccgtcaacaaggatggtctctcc

SEQ ID NO: 1427631 - DNA, 25 bp, Homo sapien
aagccgaaattcctcactgactccg

SEQ ID NO: 1427632 - DNA, 25 bp, Homo sapien
tgcaaagtgtgtaagaacaatgacg

SEQ ID NO: 1427633 - DNA, 25 bp, Homo sapien
gcagggcttctgttggagtgatatt

SEQ ID NO: 1427634 - DNA, 25 bp, Homo sapien
ggtagcaatcagatccacagggttg

SEQ ID NO: 1427635 - DNA, 25 bp, Homo sapien
aacaatgacgtagttctccacctca

SEQ ID NO: 1427636 - DNA, 25 bp, Homo sapien
cctctggtcattatgtaggagctga

SEQ ID NO: 1427637 - DNA, 25 bp, Homo sapien
ctcccttcctctggtcattatgtag

SEQ ID NO: 1427638 - DNA, 25 bp, Homo sapien
tggtcattatgtaggagctgatgga

SEQ ID NO: 1427639 - DNA, 25 bp, Homo sapien
catctggatctgactagggggcctg

SEQ ID NO: 1427640 - DNA, 25 bp, Homo sapien
aagacacagtgagttggaggagcac

SEQ ID NO: 1427641 - DNA, 25 bp, Homo sapien
gagaaattgcaaattgccctgcaag

SEQ ID NO: 1427642 - DNA, 25 bp, Homo sapien
ccctgcaagacacagtgagttggag

SEQ ID NO: 1427643 - DNA, 25 bp, Homo sapien
gaatattgggggagagaaattgcaa

SEQ ID NO: 1427644 - DNA, 25 bp, Homo sapien
cccgaaatggagccttagcctccag

SEQ ID NO: 1427645 - DNA, 25 bp, Homo sapien
ccgaaatggagccttagcctccaga

SEQ ID NO: 1427646 - DNA, 25 bp, Homo sapien
cgaaatggagccttagcctccagaa

SEQ ID NO: 1427647 - DNA, 25 bp, Homo sapien
gaaatggagccttagcctccagaac

SEQ ID NO: 1427648 - DNA, 25 bp, Homo sapien
cgaacaacttcacccagatcttcag

SEQ ID NO: 1427649 - DNA, 25 bp, Homo sapien
acttgacacagcagggagacattcc

SEQ ID NO: 1427650 - DNA, 25 bp, Homo sapien
ctttctacaagcccgaacaacttca

SEQ ID NO: 1427651 - DNA, 25 bp, Homo sapien
gccagggttctgacttgacacagca

SEQ ID NO: 1427652 - DNA, 25 bp, Homo sapien
tattcggtagctgggttcagtctgg

SEQ ID NO: 1427653 - DNA, 25 bp, Homo sapien
tgtgcacaagagtacagatgcgctc

SEQ ID NO: 1427654 - DNA, 25 bp, Homo sapien
tgccccgcacgctgttgaggctgat

SEQ ID NO: 1427655 - DNA, 25 bp, Homo sapien
tgggcaccactgagctgtctagtcg

SEQ ID NO: 1427656 - DNA, 25 bp, Homo sapien
gtccttggtcacattgctaattgtg

SEQ ID NO: 1427657 - DNA, 25 bp, Homo sapien
ggtagtaatcgaaagatgcaacagg

SEQ ID NO: 1427658 - DNA, 25 bp, Homo sapien
tatgatactcggtagtaatcgaaag

SEQ ID NO: 1427659 - DNA, 25 bp, Homo sapien
cttgggtgggtcgatatgatactcg

SEQ ID NO: 1427660 - DNA, 25 bp, Homo sapien
aagccaatgttgtcccaaaggcaga

SEQ ID NO: 1427661 - DNA, 25 bp, Homo sapien
ttaacaacatgaagacaagctggca

SEQ ID NO: 1427662 - DNA, 25 bp, Homo sapien
tacaaggacccagtgattgtgggaa

SEQ ID NO: 1427663 - DNA, 25 bp, Homo sapien
agctggcaagctctgtacctgttac

SEQ ID NO: 1427664 - DNA, 25 bp, Homo sapien
tcttctaagctggtagtgggaggtc

SEQ ID NO: 1427665 - DNA, 25 bp, Homo sapien
cactggaggaagtagctgtttcaga

SEQ ID NO: 1427666 - DNA, 25 bp, Homo sapien
gaataatgagctgggactgatccaa

SEQ ID NO: 1427667 - DNA, 25 bp, Homo sapien
gattgcatgctagtcccatgtgaga

SEQ ID NO: 1427668 - DNA, 25 bp, Homo sapien
ctgctgccaagtcctccagcctcac

SEQ ID NO: 1427669 - DNA, 25 bp, Homo sapien
cactccaagtgatgttcacactgga

SEQ ID NO: 1427670 - DNA, 25 bp, Homo sapien
tgtgccatggacagccacaaggttc

SEQ ID NO: 1427671 - DNA, 25 bp, Homo sapien
gctggttgcaggcccatcaggacag

SEQ ID NO: 1427672 - DNA, 25 bp, Homo sapien
catcaggacagcatgcctcttggtg

SEQ ID NO: 1427673 - DNA, 25 bp, Homo sapien
tgcaaagcaaaggagatggatggtc

SEQ ID NO: 1427674 - DNA, 25 bp, Homo sapien
gaaacacgtgaggagatgggtcact

SEQ ID NO: 1427675 - DNA, 25 bp, Homo sapien
tgggtcactgggctagaagaacttc

SEQ ID NO: 1427676 - DNA, 25 bp, Homo sapien
tccttgctaataagggccacacctt

SEQ ID NO: 1427677 - DNA, 25 bp, Homo sapien
acttcttggctaaagggacctgctc

SEQ ID NO: 1427678 - DNA, 25 bp, Homo sapien
gaaatggaacattggaagagtgact

SEQ ID NO: 1427679 - DNA, 25 bp, Homo sapien
gagtgacttgcctgaatgaatttct

SEQ ID NO: 1427680 - DNA, 25 bp, Homo sapien
gaacctggctgggatttctgctgct

SEQ ID NO: 1427681 - DNA, 25 bp, Homo sapien
cacactgagatccactgatccctga

SEQ ID NO: 1427682 - DNA, 25 bp, Homo sapien
gacccctctcagcagtgacggaaat

SEQ ID NO: 1427683 - DNA, 25 bp, Homo sapien
tgttagtgtgtatgaggtcctgtcc

SEQ ID NO: 1427684 - DNA, 25 bp, Homo sapien
ggtacggtgacttctgaggcaatcc

SEQ ID NO: 1427685 - DNA, 25 bp, Homo sapien
cactggccttggtccagatgaggga

SEQ ID NO: 1427686 - DNA, 25 bp, Homo sapien
gctctgataccactggattgcatcc

SEQ ID NO: 1427687 - DNA, 25 bp, Homo sapien
aatctgaagaaagccgtgatgagct

SEQ ID NO: 1427688 - DNA, 25 bp, Homo sapien
gctgattttcaagctcgccatattc

SEQ ID NO: 1427689 - DNA, 25 bp, Homo sapien
gggcttggcaaatagatgaacaatc

SEQ ID NO: 1427690 - DNA, 25 bp, Homo sapien
tcatgacggcagatattccaactcc

SEQ ID NO: 1427691 - DNA, 25 bp, Homo sapien
tggctggcacgctttgctgtgagtt

SEQ ID NO: 1427692 - DNA, 25 bp, Homo sapien
gctgtgagttcatgacggcagatat

SEQ ID NO: 1427693 - DNA, 25 bp, Homo sapien
gcagatattccaactccatactcag

SEQ ID NO: 1427694 - DNA, 25 bp, Homo sapien
cttccatgctacaagtgaattgttg

SEQ ID NO: 1427695 - DNA, 25 bp, Homo sapien
tcttccatgctacaagtgaattgtt

SEQ ID NO: 1427696 - DNA, 25 bp, Homo sapien
gcagaggctgctaactaagaggaca

SEQ ID NO: 1427697 - DNA, 25 bp, Homo sapien
caagatcagcatgggactaagagga

SEQ ID NO: 1427698 - DNA, 25 bp, Homo sapien
catgatacaactaggtttggaaccc

SEQ ID NO: 1427699 - DNA, 25 bp, Homo sapien
tctcattgtgtgatgcgcgggctac

SEQ ID NO: 1427700 - DNA, 25 bp, Homo sapien
tgctggtggaattaatgagaaacac

SEQ ID NO: 1427701 - DNA, 25 bp, Homo sapien
gagtcaggctttcgaggccatctcc

SEQ ID NO: 1427702 - DNA, 25 bp, Homo sapien
caaccttgtcatataggagcatccc

SEQ ID NO: 1427703 - DNA, 25 bp, Homo sapien
ggagatctgagcagtcagcctcccc

SEQ ID NO: 1427704 - DNA, 25 bp, Homo sapien
ggtttggtgtttgtgcactggccca

SEQ ID NO: 1427705 - DNA, 25 bp, Homo sapien
tagagggtgccttaccaaagtgacc

SEQ ID NO: 1427706 - DNA, 25 bp, Homo sapien
aaaggaggctgagcactgtctggcc

SEQ ID NO: 1427707 - DNA, 25 bp, Homo sapien
tcactgtgacttcgcccaaaggagg

SEQ ID NO: 1427708 - DNA, 25 bp, Homo sapien
gctgtgcctttaggagtgcgtctgt

SEQ ID NO: 1427709 - DNA, 25 bp, Homo sapien
gtctgggatttcaacttgggaggaa

SEQ ID NO: 1427710 - DNA, 25 bp, Homo sapien
atttcaacttgggaggaaaactgct

SEQ ID NO: 1427711 - DNA, 25 bp, Homo sapien
gctttgattatactgcccttgttta

SEQ ID NO: 1427712 - DNA, 25 bp, Homo sapien
tgcactctttgctgtgtatcccttg

SEQ ID NO: 1427713 - DNA, 25 bp, Homo sapien
ttatcccactcgaggtcaaggctgg

SEQ ID NO: 1427714 - DNA, 25 bp, Homo sapien
gccagggtgctgtacacaaccttgt

SEQ ID NO: 1427715 - DNA, 25 bp, Homo sapien
tgatattgctcacccgccagggtgc

SEQ ID NO: 1427716 - DNA, 25 bp, Homo sapien
tggttgctgtgcgagaaccaactcg

SEQ ID NO: 1427717 - DNA, 25 bp, Homo sapien
tgcccctgcattgttgcccctaaat

SEQ ID NO: 1427718 - DNA, 25 bp, Homo sapien
tgccagatactatgtattcttgacg

SEQ ID NO: 1427719 - DNA, 25 bp, Homo sapien
cactcactgtactttagcttgccag

SEQ ID NO: 1427720 - DNA, 25 bp, Homo sapien
cgtgaatcaatgtgagcgcagaggc

SEQ ID NO: 1427721 - DNA, 25 bp, Homo sapien
caattagtgcactcctagtgtcgga

SEQ ID NO: 1427722 - DNA, 25 bp, Homo sapien
tgcactcctagtgtcggagccatca

SEQ ID NO: 1427723 - DNA, 25 bp, Homo sapien
catgcaggaagcaaatctctgcttt

SEQ ID NO: 1427724 - DNA, 25 bp, Homo sapien
taattgcctgtgcaattagtgcact

SEQ ID NO: 1427725 - DNA, 25 bp, Homo sapien
ggctgtattgagaagtcagccgcct

SEQ ID NO: 1427726 - DNA, 25 bp, Homo sapien
ggagcatatttgaggtgtaggctga

SEQ ID NO: 1427727 - DNA, 25 bp, Homo sapien
agtcagccgcctgacagctgccaat

SEQ ID NO: 1427728 - DNA, 25 bp, Homo sapien
catatttgaggtgtaggctgaggct

SEQ ID NO: 1427729 - DNA, 25 bp, Homo sapien
ctcattcctaatactcctcttgctg

SEQ ID NO: 1427730 - DNA, 25 bp, Homo sapien
gtgatgacaccaccggttggctcca

SEQ ID NO: 1427731 - DNA, 25 bp, Homo sapien
attcctaatactcctcttgctgtga

SEQ ID NO: 1427732 - DNA, 25 bp, Homo sapien
cttgtgcgtctctcccccaccgcag

SEQ ID NO: 1427733 - DNA, 25 bp, Homo sapien
gaactgagtggtggcagaatcgctc

SEQ ID NO: 1427734 - DNA, 25 bp, Homo sapien
tgtccgagacatcgcgaaccaggat

SEQ ID NO: 1427735 - DNA, 25 bp, Homo sapien
gactgacacctcgtatcgggagcca

SEQ ID NO: 1427736 - DNA, 25 bp, Homo sapien
agaatcgctctcgttggtccctcgg

SEQ ID NO: 1427737 - DNA, 25 bp, Homo sapien
ctgagtgagaaggatcaaacagaac

SEQ ID NO: 1427738 - DNA, 25 bp, Homo sapien
gagtgagaaggatcaaacagaacaa

SEQ ID NO: 1427739 - DNA, 25 bp, Homo sapien
gtgagaaggatcaaacagaacaaaa

SEQ ID NO: 1427740 - DNA, 25 bp, Homo sapien
tgagtgagaaggatcaaacagaaca

SEQ ID NO: 1427741 - DNA, 25 bp, Homo sapien
agaggtcatcatgagtattcaaaag

SEQ ID NO: 1427742 - DNA, 25 bp, Homo sapien
tccagattggttgccaaagaggtca

SEQ ID NO: 1427743 - DNA, 25 bp, Homo sapien
taaacatccaagacttccagattgg

SEQ ID NO: 1427744 - DNA, 25 bp, Homo sapien
ttcaaaagatgtccctgctcagcca

SEQ ID NO: 1427745 - DNA, 25 bp, Homo sapien
aacatgccttctgggtaaacttgct

SEQ ID NO: 1427746 - DNA, 25 bp, Homo sapien
acatttgcatatgaggacatgaaac

SEQ ID NO: 1427747 - DNA, 25 bp, Homo sapien
gcatatgaggacatgaaacatgcct

SEQ ID NO: 1427748 - DNA, 25 bp, Homo sapien
tgaaacatgccttctgggtaaactt

SEQ ID NO: 1427749 - DNA, 25 bp, Homo sapien
gggtcatttttctccatctgttctt

SEQ ID NO: 1427750 - DNA, 25 bp, Homo sapien
ggtcatttttctccatctgttcttg

SEQ ID NO: 1427751 - DNA, 25 bp, Homo sapien
gtcatttttctccatctgttcttgc

SEQ ID NO: 1427752 - DNA, 25 bp, Homo sapien
tcatttttctccatctgttcttgca

SEQ ID NO: 1427753 - DNA, 25 bp, Homo sapien
caggtcagggcaacacctggaaagc

SEQ ID NO: 1427754 - DNA, 25 bp, Homo sapien
cacctcttccaggttctctagtgta

SEQ ID NO: 1427755 - DNA, 25 bp, Homo sapien
gcaacacctggaaagctggttgatt

SEQ ID NO: 1427756 - DNA, 25 bp, Homo sapien
gtgtatttccctcataagccctggc

SEQ ID NO: 1427757 - DNA, 25 bp, Homo sapien
tttcagagccaccacattgacaatg

SEQ ID NO: 1427758 - DNA, 25 bp, Homo sapien
tgagcaatcactcccccttcattgt

SEQ ID NO: 1427759 - DNA, 25 bp, Homo sapien
gtctggttaaaggacgtaacatcgc

SEQ ID NO: 1427760 - DNA, 25 bp, Homo sapien
tggttaaaggacgtaacatcgctgg

SEQ ID NO: 1427761 - DNA, 25 bp, Homo sapien
cccacccatcgaaggaaaatgagaa

SEQ ID NO: 1427762 - DNA, 25 bp, Homo sapien
ctctgtgatcgtcttaaattgtagc

SEQ ID NO: 1427763 - DNA, 25 bp, Homo sapien
actgcacctccacggtggtctctgt

SEQ ID NO: 1427764 - DNA, 25 bp, Homo sapien
tcttaaattgtagcccttgaggagt

SEQ ID NO: 1427765 - DNA, 25 bp, Homo sapien
gccgtcggctggtaagagatcacat

SEQ ID NO: 1427766 - DNA, 25 bp, Homo sapien
gagatcacatattccgtcactgcca

SEQ ID NO: 1427767 - DNA, 25 bp, Homo sapien
tcaatggacctgtcgctgataccag

SEQ ID NO: 1427768 - DNA, 25 bp, Homo sapien
tgttgtaggtgagacctggctccag

SEQ ID NO: 1427769 - DNA, 25 bp, Homo sapien
gtgccaaaggttgggctggctgcag

SEQ ID NO: 1427770 - DNA, 25 bp, Homo sapien
gggtgccaaaggttgggctggctgc

SEQ ID NO: 1427771 - DNA, 25 bp, Homo sapien
ttcgggtgccaaaggttgggctggc

SEQ ID NO: 1427772 - DNA, 25 bp, Homo sapien
tcgggtgccaaaggttgggctggct

SEQ ID NO: 1427773 - DNA, 25 bp, Homo sapien
ggattgtctcaagaccctgttctga

SEQ ID NO: 1427774 - DNA, 25 bp, Homo sapien
ggctgacactgatgaatctccgcag

SEQ ID NO: 1427775 - DNA, 25 bp, Homo sapien
tgaatctccgcaggtctgactgaag

SEQ ID NO: 1427776 - DNA, 25 bp, Homo sapien
tccgcaggtctgactgaagtccagg

SEQ ID NO: 1427777 - DNA, 25 bp, Homo sapien
ggagttcggaacagtcatccccgct

SEQ ID NO: 1427778 - DNA, 25 bp, Homo sapien
caaagctaaagttgccgtggccact

SEQ ID NO: 1427779 - DNA, 25 bp, Homo sapien
aaaccagccttcgttgcagatgcag

SEQ ID NO: 1427780 - DNA, 25 bp, Homo sapien
taaacaggtaccgttggcacatctc

SEQ ID NO: 1427781 - DNA, 25 bp, Homo sapien
cagttggcgttgcactggtctcgca

SEQ ID NO: 1427782 - DNA, 25 bp, Homo sapien
ccaagggcacgttaatgttgtacac

SEQ ID NO: 1427783 - DNA, 25 bp, Homo sapien
tcctgtgtgtaaaggtgacctggct

SEQ ID NO: 1427784 - DNA, 25 bp, Homo sapien
gctgaactggcacatggacaggcct

SEQ ID NO: 1427785 - DNA, 25 bp, Homo sapien
gcacacagcatggagttgtgggaat

SEQ ID NO: 1427786 - DNA, 25 bp, Homo sapien
cagcacacagcatggagttgtggga

SEQ ID NO: 1427787 - DNA, 25 bp, Homo sapien
agcacacagcatggagttgtgggaa

SEQ ID NO: 1427788 - DNA, 25 bp, Homo sapien
ccatggctctgcacaagcctacaaa

SEQ ID NO: 1427789 - DNA, 25 bp, Homo sapien
tctgcacaagcctacaaagctcagg

SEQ ID NO: 1427790 - DNA, 25 bp, Homo sapien
tgagacctatgccttggcaccatgg

SEQ ID NO: 1427791 - DNA, 25 bp, Homo sapien
ggaaagagacaacctctgagaccta

SEQ ID NO: 1427792 - DNA, 25 bp, Homo sapien
gtatagtcctcatgctctgtgacca

SEQ ID NO: 1427793 - DNA, 25 bp, Homo sapien
atcttcttgtcagtatagtcctcat

SEQ ID NO: 1427794 - DNA, 25 bp, Homo sapien
ctgtgaccaccaggtgcttttcttc

SEQ ID NO: 1427795 - DNA, 25 bp, Homo sapien
gtgaccaccaggtgcttttcttcca

SEQ ID NO: 1427796 - DNA, 25 bp, Homo sapien
atgcaggctgaattcatgtccctct

SEQ ID NO: 1427797 - DNA, 25 bp, Homo sapien
gcaggctgaattcatgtccctctct

SEQ ID NO: 1427798 - DNA, 25 bp, Homo sapien
tgcaggctgaattcatgtccctctc

SEQ ID NO: 1427799 - DNA, 25 bp, Homo sapien
tagaccgtgggtttcctttgcctgc

SEQ ID NO: 1427800 - DNA, 25 bp, Homo sapien
cttcaggacggcgagagtgctcagt

SEQ ID NO: 1427801 - DNA, 25 bp, Homo sapien
tgctaagtccttgtcggtcagaccg

SEQ ID NO: 1427802 - DNA, 25 bp, Homo sapien
caatgtgtgaccgtcgcttcaggac

SEQ ID NO: 1427803 - DNA, 25 bp, Homo sapien
agaatgaaatgagcgtgaaggttgt

SEQ ID NO: 1427804 - DNA, 25 bp, Homo sapien
tgccatttgtggtccccactccgtc

SEQ ID NO: 1427805 - DNA, 25 bp, Homo sapien
aaccagaactatatctgtggaaaat

SEQ ID NO: 1427806 - DNA, 25 bp, Homo sapien
ggttgggtggctggtgctcgatttg

SEQ ID NO: 1427807 - DNA, 25 bp, Homo sapien
ctttgaaaattgtactcatccacat

SEQ ID NO: 1427808 - DNA, 25 bp, Homo sapien
gaattgaccatttagctacatgcag

SEQ ID NO: 1427809 - DNA, 25 bp, Homo sapien
gacagcgtaagaatacagatggcac

SEQ ID NO: 1427810 - DNA, 25 bp, Homo sapien
acagagcacgttttgagggttccca

SEQ ID NO: 1427811 - DNA, 25 bp, Homo sapien
tgcatggtgtccaattcctctgtgg

SEQ ID NO: 1427812 - DNA, 25 bp, Homo sapien
tggacacagttccctcactgaccaa

SEQ ID NO: 1427813 - DNA, 25 bp, Homo sapien
tcaacgagacctgaccacctggaca

SEQ ID NO: 1427814 - DNA, 25 bp, Homo sapien
tctttggggctcaacttcaacgaga

SEQ ID NO: 1427815 - DNA, 25 bp, Homo sapien
actgaccaacccgtggctgtcctgt

SEQ ID NO: 1427816 - DNA, 25 bp, Homo sapien
gcagagctggacatgggttgagtct

SEQ ID NO: 1427817 - DNA, 25 bp, Homo sapien
cagagctggacatgggttgagtctg

SEQ ID NO: 1427818 - DNA, 25 bp, Homo sapien
agagctggacatgggttgagtctgc

SEQ ID NO: 1427819 - DNA, 25 bp, Homo sapien
agctggacatgggttgagtctgcag

SEQ ID NO: 1427820 - DNA, 25 bp, Homo sapien
cctcatgggccagaggttcattatg

SEQ ID NO: 1427821 - DNA, 25 bp, Homo sapien
tcattatgggccatccagctgtggg

SEQ ID NO: 1427822 - DNA, 25 bp, Homo sapien
gttcatttcctcatgggccagaggt

SEQ ID NO: 1427823 - DNA, 25 bp, Homo sapien
ccagaggttcattatgggccatcca

SEQ ID NO: 1427824 - DNA, 25 bp, Homo sapien
cggggaagcactgcccaatgactgt

SEQ ID NO: 1427825 - DNA, 25 bp, Homo sapien
atgactgtgccccaactcgggcagg

SEQ ID NO: 1427826 - DNA, 25 bp, Homo sapien
ccagaagacaggtctaaggttgact

SEQ ID NO: 1427827 - DNA, 25 bp, Homo sapien
ggtcttgctatctccggggaagcac

SEQ ID NO: 1427828 - DNA, 25 bp, Homo sapien
tggagcacgtgctcagaaagagctt

SEQ ID NO: 1427829 - DNA, 25 bp, Homo sapien
cagaaagagcttcagatacttggaa

SEQ ID NO: 1427830 - DNA, 25 bp, Homo sapien
caccagccagttgccgccagagtat

SEQ ID NO: 1427831 - DNA, 25 bp, Homo sapien
cagttgccgccagagtatcagaagc

SEQ ID NO: 1427832 - DNA, 25 bp, Homo sapien
cctttagtgcaacctcaggagagct

SEQ ID NO: 1427833 - DNA, 25 bp, Homo sapien
tgaggaggtggtgcaactgcccttc

SEQ ID NO: 1427834 - DNA, 25 bp, Homo sapien
agagcttgcaaagtttccacgggca

SEQ ID NO: 1427835 - DNA, 25 bp, Homo sapien
tccacgggcagaacttgaaagtgac

SEQ ID NO: 1427836 - DNA, 25 bp, Homo sapien
gatggataataacatttagtcactg

SEQ ID NO: 1427837 - DNA, 25 bp, Homo sapien
cagagcagccaacagatggataata

SEQ ID NO: 1427838 - DNA, 25 bp, Homo sapien
aagaagaaataagtacatttcctgc

SEQ ID NO: 1427839 - DNA, 25 bp, Homo sapien
cactgccgactggtaattacagtat

SEQ ID NO: 1427840 - DNA, 25 bp, Homo sapien
gagtaaagagtgacgggaactgatt

SEQ ID NO: 1427841 - DNA, 25 bp, Homo sapien
tggaagaactgtaagggagtaaaga

SEQ ID NO: 1427842 - DNA, 25 bp, Homo sapien
gctcaaatgtccattgagggataaa

SEQ ID NO: 1427843 - DNA, 25 bp, Homo sapien
cccaggccatgctttgggtgtgtga

SEQ ID NO: 1427844 - DNA, 25 bp, Homo sapien
ttgagctgtcagtgcacaagccgtt

SEQ ID NO: 1427845 - DNA, 25 bp, Homo sapien
tcatggccgcctgtatgcttttatc

SEQ ID NO: 1427846 - DNA, 25 bp, Homo sapien
aggagattcatggccgcctgtatgc

SEQ ID NO: 1427847 - DNA, 25 bp, Homo sapien
tatcaccattgcctccccttgagct

SEQ ID NO: 1427848 - DNA, 25 bp, Homo sapien
tctggactgatccttggctccattc

SEQ ID NO: 1427849 - DNA, 25 bp, Homo sapien
atagtcaggagcttggatgtgccct

SEQ ID NO: 1427850 - DNA, 25 bp, Homo sapien
aggagcttggatgtgccctgaatcc

SEQ ID NO: 1427851 - DNA, 25 bp, Homo sapien
gtctctggactgatccttggctcca

SEQ ID NO: 1427852 - DNA, 25 bp, Homo sapien
cagacaagggattatcccctctgct

SEQ ID NO: 1427853 - DNA, 25 bp, Homo sapien
tttcccagcccgtggatggccaatg

SEQ ID NO: 1427854 - DNA, 25 bp, Homo sapien
tgattttgggcgtaagattctgaga

SEQ ID NO: 1427855 - DNA, 25 bp, Homo sapien
tcagtaagaccctcgttggaggaat

SEQ ID NO: 1427856 - DNA, 25 bp, Homo sapien
gcctttctgatggtagcactactag

SEQ ID NO: 1427857 - DNA, 25 bp, Homo sapien
tagaagacagtattccaggtcatcc

SEQ ID NO: 1427858 - DNA, 25 bp, Homo sapien
tggagggattgaccattggctaaat

SEQ ID NO: 1427859 - DNA, 25 bp, Homo sapien
cctgatcagactacatgcttgtggc

SEQ ID NO: 1427860 - DNA, 25 bp, Homo sapien
gacccaactgaatagtgtctaaggg

SEQ ID NO: 1427861 - DNA, 25 bp, Homo sapien
gaacttgggaatctagattgacgca

SEQ ID NO: 1427862 - DNA, 25 bp, Homo sapien
gctggaagttgggaaccatatctgt

SEQ ID NO: 1427863 - DNA, 25 bp, Homo sapien
tgtctaagggttgcctcttctgtga

SEQ ID NO: 1427864 - DNA, 25 bp, Homo sapien
tgcaagcacttcagtatggctggaa

SEQ ID NO: 1427865 - DNA, 25 bp, Homo sapien
ggatgttaggagtttgcaattgatc

SEQ ID NO: 1427866 - DNA, 25 bp, Homo sapien
tgtgtaaatacaagccagaaggaaa

SEQ ID NO: 1427867 - DNA, 25 bp, Homo sapien
ccagaaggaaaagggcctggatgtt

SEQ ID NO: 1427868 - DNA, 25 bp, Homo sapien
cactgagtccaccattaggcataag

SEQ ID NO: 1427869 - DNA, 25 bp, Homo sapien
tctttgatagccattggctcccaga

SEQ ID NO: 1427870 - DNA, 25 bp, Homo sapien
caaagacgtaagtagcaaagaatgc

SEQ ID NO: 1427871 - DNA, 25 bp, Homo sapien
taagggagcaggcacaagagagctt

SEQ ID NO: 1427872 - DNA, 25 bp, Homo sapien
tcaaatttctggtctgcccctaaat

SEQ ID NO: 1427873 - DNA, 25 bp, Homo sapien
tgcccctaaatacgtagaaggtgtg

SEQ ID NO: 1427874 - DNA, 25 bp, Homo sapien
aatttctggtctgcccctaaatacg

SEQ ID NO: 1427875 - DNA, 25 bp, Homo sapien
tggtctgcccctaaatacgtagaag

SEQ ID NO: 1427876 - DNA, 25 bp, Homo sapien
agctgccaccgaagttctactatgg

SEQ ID NO: 1427877 - DNA, 25 bp, Homo sapien
ggaaagtcacttgggtgaagacact

SEQ ID NO: 1427878 - DNA, 25 bp, Homo sapien
tgggcagatttgctatgggtccagc

SEQ ID NO: 1427879 - DNA, 25 bp, Homo sapien
gaagacactgaatattgatccccag

SEQ ID NO: 1427880 - DNA, 25 bp, Homo sapien
aagcagcggctagctttccacagga

SEQ ID NO: 1427881 - DNA, 25 bp, Homo sapien
tccattcccgactccggttggtgtc

SEQ ID NO: 1427882 - DNA, 25 bp, Homo sapien
tccaaaaccaaaggtgctccgcact

SEQ ID NO: 1427883 - DNA, 25 bp, Homo sapien
tccgcactaagcttgtaaatgacct

SEQ ID NO: 1427884 - DNA, 25 bp, Homo sapien
gttaatctggggcgggagctgattc

SEQ ID NO: 1427885 - DNA, 25 bp, Homo sapien
aggccctctgtctgaatgttaatct

SEQ ID NO: 1427886 - DNA, 25 bp, Homo sapien
tgaatgttaatctggggcgggagct

SEQ ID NO: 1427887 - DNA, 25 bp, Homo sapien
caggccctctgtctgaatgttaatc

SEQ ID NO: 1427888 - DNA, 25 bp, Homo sapien
ctggggaggacatgcttttgtaggg

SEQ ID NO: 1427889 - DNA, 25 bp, Homo sapien
ggacatgcttttgtagggcagtcac

SEQ ID NO: 1427890 - DNA, 25 bp, Homo sapien
gaggacatgcttttgtagggcagtc

SEQ ID NO: 1427891 - DNA, 25 bp, Homo sapien
ggaggacatgcttttgtagggcagt

SEQ ID NO: 1427892 - DNA, 25 bp, Homo sapien
gagagatcatgtgctcctccgcttg

SEQ ID NO: 1427893 - DNA, 25 bp, Homo sapien
gaacgcatactttgcggccagccct

SEQ ID NO: 1427894 - DNA, 25 bp, Homo sapien
tctcaccgtcaattacagcaaatgt

SEQ ID NO: 1427895 - DNA, 25 bp, Homo sapien
tttggcgtgggagcagaatccgcta

SEQ ID NO: 1427896 - DNA, 25 bp, Homo sapien
catgacagggtatccagttagctgg

SEQ ID NO: 1427897 - DNA, 25 bp, Homo sapien
ccgatatctgcttaacaaggttttt

SEQ ID NO: 1427898 - DNA, 25 bp, Homo sapien
ttccaattgtgcattctcttggata

SEQ ID NO: 1427899 - DNA, 25 bp, Homo sapien
ttagctggggaacaacaattgcttc

SEQ ID NO: 1427900 - DNA, 25 bp, Homo sapien
tgccagtgctccgtggataaggaca

SEQ ID NO: 1427901 - DNA, 25 bp, Homo sapien
tccctctgcagtggtgcgtgtgccc

SEQ ID NO: 1427902 - DNA, 25 bp, Homo sapien
tgctcagtgtttgcaaagcccttgc

SEQ ID NO: 1427903 - DNA, 25 bp, Homo sapien
catttgggttcgctgctcagtgttt

SEQ ID NO: 1427904 - DNA, 25 bp, Homo sapien
acttctcaagtggtgggtcagcatc

SEQ ID NO: 1427905 - DNA, 25 bp, Homo sapien
gcaaggtcctggtttccgcaaggta

SEQ ID NO: 1427906 - DNA, 25 bp, Homo sapien
gaggaaagtggcacttctcaagtgg

SEQ ID NO: 1427907 - DNA, 25 bp, Homo sapien
gctaacaaatgacagcgtggcccag

SEQ ID NO: 1427908 - DNA, 25 bp, Homo sapien
ctgctcagcacggaaacaccagcag

SEQ ID NO: 1427909 - DNA, 25 bp, Homo sapien
ttagctagtctacccactgtgcatg

SEQ ID NO: 1427910 - DNA, 25 bp, Homo sapien
gagatcctagtgcatacccattccc

SEQ ID NO: 1427911 - DNA, 25 bp, Homo sapien
tgtgggtctgggatcatttgtctgt

SEQ ID NO: 1427912 - DNA, 25 bp, Homo sapien
ttgctgccattaagatgatcatctt

SEQ ID NO: 1427913 - DNA, 25 bp, Homo sapien
cttgctgccattaagatgatcatct

SEQ ID NO: 1427914 - DNA, 25 bp, Homo sapien
tgctgccattaagatgatcatcttt

SEQ ID NO: 1427915 - DNA, 25 bp, Homo sapien
tgtgattactgaggcaacaaaaccc

SEQ ID NO: 1427916 - DNA, 25 bp, Homo sapien
cgcagaaatattttcggcctctaaa

SEQ ID NO: 1427917 - DNA, 25 bp, Homo sapien
gcgtagatcactgggaccgcagaaa

SEQ ID NO: 1427918 - DNA, 25 bp, Homo sapien
ccaaggcaatccaagggttggcaca

SEQ ID NO: 1427919 - DNA, 25 bp, Homo sapien
tttttttcatagtctgaggtgtcat

SEQ ID NO: 1427920 - DNA, 25 bp, Homo sapien
tttcatagtctgaggtgtcatgctc

SEQ ID NO: 1427921 - DNA, 25 bp, Homo sapien
tttttcatagtctgaggtgtcatgc

SEQ ID NO: 1427922 - DNA, 25 bp, Homo sapien
tcatagtctgaggtgtcatgctcat

SEQ ID NO: 1427923 - DNA, 25 bp, Homo sapien
caaggcccagctcaatgattgtggc

SEQ ID NO: 1427924 - DNA, 25 bp, Homo sapien
ctgggtttgtatcacctctattttc

SEQ ID NO: 1427925 - DNA, 25 bp, Homo sapien
tggccttcctgggtttgtatcacct

SEQ ID NO: 1427926 - DNA, 25 bp, Homo sapien
cccagctcaatgattgtggcctctc

SEQ ID NO: 1427927 - DNA, 25 bp, Homo sapien
caggctgggagtcaagtctagcttc

SEQ ID NO: 1427928 - DNA, 25 bp, Homo sapien
ttatcactgattcatgcgggcccag

SEQ ID NO: 1427929 - DNA, 25 bp, Homo sapien
gcttcttggagggactgagcacagt

SEQ ID NO: 1427930 - DNA, 25 bp, Homo sapien
ctccagaaattttagagcgagactg

SEQ ID NO: 1427931 - DNA, 25 bp, Homo sapien
atttcaaggagactagcccccaggg

SEQ ID NO: 1427932 - DNA, 25 bp, Homo sapien
tccagtaacaaaaggtctcagatcc

SEQ ID NO: 1427933 - DNA, 25 bp, Homo sapien
gactagcccccagggtgttgttcca

SEQ ID NO: 1427934 - DNA, 25 bp, Homo sapien
cccagaggagctaatgctgttgacc

SEQ ID NO: 1427935 - DNA, 25 bp, Homo sapien
aatatgcagttacatatgaaagcca

SEQ ID NO: 1427936 - DNA, 25 bp, Homo sapien
ggaatatgcagttacatatgaaagc

SEQ ID NO: 1427937 - DNA, 25 bp, Homo sapien
gaatatgcagttacatatgaaagcc

SEQ ID NO: 1427938 - DNA, 25 bp, Homo sapien
gatggtgtcttcgatgctttctctt

SEQ ID NO: 1427939 - DNA, 25 bp, Homo sapien
tatgcagttaaaacgatacagccac

SEQ ID NO: 1427940 - DNA, 25 bp, Homo sapien
taatcctaattccaaaagagacctg

SEQ ID NO: 1427941 - DNA, 25 bp, Homo sapien
caaaagagacctgccctctatgcag

SEQ ID NO: 1427942 - DNA, 25 bp, Homo sapien
tacaaataactctagggcagcagag

SEQ ID NO: 1427943 - DNA, 25 bp, Homo sapien
tgaggccgggttatccactgatgcc

SEQ ID NO: 1427944 - DNA, 25 bp, Homo sapien
gaaggattcgtgtgcttcactaggc

SEQ ID NO: 1427945 - DNA, 25 bp, Homo sapien
tggtagcaccacagatgagtcaatg

SEQ ID NO: 1427946 - DNA, 25 bp, Homo sapien
cagctactttcttggcatacaggaa

SEQ ID NO: 1427947 - DNA, 25 bp, Homo sapien
tacaggaaggttgctaatgtcccag

SEQ ID NO: 1427948 - DNA, 25 bp, Homo sapien
gattttcaggacaaggccatcctca

SEQ ID NO: 1427949 - DNA, 25 bp, Homo sapien
ccccagtcggtgagggcctgatgaa

SEQ ID NO: 1427950 - DNA, 25 bp, Homo sapien
gcaggtgaatttcccaagattggca

SEQ ID NO: 1427951 - DNA, 25 bp, Homo sapien
gagttgtcagatcaccccatgtcag

SEQ ID NO: 1427952 - DNA, 25 bp, Homo sapien
tcatcactatcgagtctgtgggaca

SEQ ID NO: 1427953 - DNA, 25 bp, Homo sapien
tgtcagctcagtgttcagaggatgc

SEQ ID NO: 1427954 - DNA, 25 bp, Homo sapien
ctttcttggttgtttagcctctcag

SEQ ID NO: 1427955 - DNA, 25 bp, Homo sapien
ttcttggttgtttagcctctcagcc

SEQ ID NO: 1427956 - DNA, 25 bp, Homo sapien
actctgctttcttggttgtttagcc

SEQ ID NO: 1427957 - DNA, 25 bp, Homo sapien
ctctgaactctgctttcttggttgt

SEQ ID NO: 1427958 - DNA, 25 bp, Homo sapien
cagggaggcactaatactccggtgt

SEQ ID NO: 1427959 - DNA, 25 bp, Homo sapien
taatactccggtgtcctcagcacag

SEQ ID NO: 1427960 - DNA, 25 bp, Homo sapien
ccttccttggatagacaaactcaga

SEQ ID NO: 1427961 - DNA, 25 bp, Homo sapien
cagcacagtccccttccttggatag

SEQ ID NO: 1427962 - DNA, 25 bp, Homo sapien
catacccaaggaattcttgcagaaa

SEQ ID NO: 1427963 - DNA, 25 bp, Homo sapien
tgctgtctttctaagagtgggcgag

SEQ ID NO: 1427964 - DNA, 25 bp, Homo sapien
agtgggcgaggatacgttgcttctt

SEQ ID NO: 1427965 - DNA, 25 bp, Homo sapien
acaaacaggatgactctgccaagcc

SEQ ID NO: 1427966 - DNA, 25 bp, Homo sapien
cgaggatacgttgcttctttctggg

SEQ ID NO: 1427967 - DNA, 25 bp, Homo sapien
tgccctcaaggaagtagccaccaat

SEQ ID NO: 1427968 - DNA, 25 bp, Homo sapien
ggaaccaggcctatttgccctcaag

SEQ ID NO: 1427969 - DNA, 25 bp, Homo sapien
tcaggcagagtagggactgtcaaag

SEQ ID NO: 1427970 - DNA, 25 bp, Homo sapien
tatgtagggagtatgcatgctttcc

SEQ ID NO: 1427971 - DNA, 25 bp, Homo sapien
gcagtctcatgagaagcaccctcac

SEQ ID NO: 1427972 - DNA, 25 bp, Homo sapien
gttgttgaacaaacttcatgatgcc

SEQ ID NO: 1427973 - DNA, 25 bp, Homo sapien
ttgttgaacaaacttcatgatgcct

SEQ ID NO: 1427974 - DNA, 25 bp, Homo sapien
tgttgttgaacaaacttcatgatgc

SEQ ID NO: 1427975 - DNA, 25 bp, Homo sapien
ctgtgctgtctgagcaccttctaca

SEQ ID NO: 1427976 - DNA, 25 bp, Homo sapien
tgtgctgtctgagcaccttctacac

SEQ ID NO: 1427977 - DNA, 25 bp, Homo sapien
tctgtgctgtctgagcaccttctac

SEQ ID NO: 1427978 - DNA, 25 bp, Homo sapien
gtctgtgctgtctgagcaccttcta

SEQ ID NO: 1427979 - DNA, 25 bp, Homo sapien
cctggcaaagcttatccgattgtat

SEQ ID NO: 1427980 - DNA, 25 bp, Homo sapien
cagccataaacctggcaaagcttat

SEQ ID NO: 1427981 - DNA, 25 bp, Homo sapien
gcttatccgattgtatgttgcaatc

SEQ ID NO: 1427982 - DNA, 25 bp, Homo sapien
taaacctggcaaagcttatccgatt

SEQ ID NO: 1427983 - DNA, 25 bp, Homo sapien
aagctggcaatgcatactcctggcc

SEQ ID NO: 1427984 - DNA, 25 bp, Homo sapien
tgggcgtgggagttgatgcagaagc

SEQ ID NO: 1427985 - DNA, 25 bp, Homo sapien
ctcctggccgtagggtacagatggt

SEQ ID NO: 1427986 - DNA, 25 bp, Homo sapien
cagggtgggcgtgggagttgatgca

SEQ ID NO: 1427987 - DNA, 25 bp, Homo sapien
ttttcctttattccccagcactgct

SEQ ID NO: 1427988 - DNA, 25 bp, Homo sapien
ccagcactgctgtggtaggatggca

SEQ ID NO: 1427989 - DNA, 25 bp, Homo sapien
tgaaatttaatgctaagaattttcc

SEQ ID NO: 1427990 - DNA, 25 bp, Homo sapien
tgctgtgtgcagctgcgggatttca

SEQ ID NO: 1427991 - DNA, 25 bp, Homo sapien
tgacagggtctatcaccatgggcag

SEQ ID NO: 1427992 - DNA, 25 bp, Homo sapien
tgtgacagggtctatcaccatgggc

SEQ ID NO: 1427993 - DNA, 25 bp, Homo sapien
ctgtgacagggtctatcaccatggg

SEQ ID NO: 1427994 - DNA, 25 bp, Homo sapien
acagggtctatcaccatgggcaggg

SEQ ID NO: 1427995 - DNA, 25 bp, Homo sapien
cctaacacacaacagacaatcaatt

SEQ ID NO: 1427996 - DNA, 25 bp, Homo sapien
cttgggccatgacggttccatttcc

SEQ ID NO: 1427997 - DNA, 25 bp, Homo sapien
acagacaatcaattactcttgccat

SEQ ID NO: 1427998 - DNA, 25 bp, Homo sapien
ttccatttccgggatctccctgctg

SEQ ID NO: 1427999 - DNA, 25 bp, Homo sapien
gaacttctatgtgcccaatgctcat

SEQ ID NO: 1428000 - DNA, 25 bp, Homo sapien
tggttgggaagagcaaggaaccctc

SEQ ID NO: 1428001 - DNA, 25 bp, Homo sapien
gggtcgagcatttgcacttgtccac

SEQ ID NO: 1428002 - DNA, 25 bp, Homo sapien
gcaaagaaacggaggtcccagctca

SEQ ID NO: 1428003 - DNA, 25 bp, Homo sapien
tgcaagaattgcgagacacccagca

SEQ ID NO: 1428004 - DNA, 25 bp, Homo sapien
ggacaatgacaagcatcctgcaaga

SEQ ID NO: 1428005 - DNA, 25 bp, Homo sapien
cacagtgcctgtgagagctgaagta

SEQ ID NO: 1428006 - DNA, 25 bp, Homo sapien
ctagaggagcctgttgagctgaccc

SEQ ID NO: 1428007 - DNA, 25 bp, Homo sapien
tctttgtcttcttctcctttgtaag

SEQ ID NO: 1428008 - DNA, 25 bp, Homo sapien
tttctttgtcttcttctcctttgta

SEQ ID NO: 1428009 - DNA, 25 bp, Homo sapien
ctttgtcttcttctcctttgtaagt

SEQ ID NO: 1428010 - DNA, 25 bp, Homo sapien
ttctttgtcttcttctcctttgtaa

SEQ ID NO: 1428011 - DNA, 25 bp, Homo sapien
atgtccagagaaacacaagatgtag

SEQ ID NO: 1428012 - DNA, 25 bp, Homo sapien
tgcctaggggaagaatgtccagaga

SEQ ID NO: 1428013 - DNA, 25 bp, Homo sapien
tgtaagtgcctaggggaagaatgtc

SEQ ID NO: 1428014 - DNA, 25 bp, Homo sapien
gaaacacaagatgtagctcttggag

SEQ ID NO: 1428015 - DNA, 25 bp, Homo sapien
tcaggcaagaagctgggcagttccc

SEQ ID NO: 1428016 - DNA, 25 bp, Homo sapien
acagcttcttggaaggggaattttg

SEQ ID NO: 1428017 - DNA, 25 bp, Homo sapien
ggggtaactgtggtctcatcctgac

SEQ ID NO: 1428018 - DNA, 25 bp, Homo sapien
gctccttggggtaactgtggtctca

SEQ ID NO: 1428019 - DNA, 25 bp, Homo sapien
cactcctccttggtatttacagctt

SEQ ID NO: 1428020 - DNA, 25 bp, Homo sapien
tgtgctctgggatccagacatgtga

SEQ ID NO: 1428021 - DNA, 25 bp, Homo sapien
gacactgatccttagccctctgcag

SEQ ID NO: 1428022 - DNA, 25 bp, Homo sapien
gcatgcaggcattacagccctcagg

SEQ ID NO: 1428023 - DNA, 25 bp, Homo sapien
cagacatgtgaaagtggccacctct

SEQ ID NO: 1428024 - DNA, 25 bp, Homo sapien
ctggaaatcaaacaggtggtgttca

SEQ ID NO: 1428025 - DNA, 25 bp, Homo sapien
ggaaatcaaacaggtggtgttcaga

SEQ ID NO: 1428026 - DNA, 25 bp, Homo sapien
tggaaatcaaacaggtggtgttcag

SEQ ID NO: 1428027 - DNA, 25 bp, Homo sapien
gaaatcaaacaggtggtgttcagag

SEQ ID NO: 1428028 - DNA, 25 bp, Homo sapien
gctttataatctacagaggaaccca

SEQ ID NO: 1428029 - DNA, 25 bp, Homo sapien
ggtagacactctccttagccctagg

SEQ ID NO: 1428030 - DNA, 25 bp, Homo sapien
aacctggttggcctgaatacgccag

SEQ ID NO: 1428031 - DNA, 25 bp, Homo sapien
gccatagggccgttgcttacagcag

SEQ ID NO: 1428032 - DNA, 25 bp, Homo sapien
attcaggacggcattgccattgtcc

SEQ ID NO: 1428033 - DNA, 25 bp, Homo sapien
tcttctttccagctgaccgctctgt

SEQ ID NO: 1428034 - DNA, 25 bp, Homo sapien
tccctttgctatcgctcttgccttg

SEQ ID NO: 1428035 - DNA, 25 bp, Homo sapien
cagctgaccgctctgttctggcaca

SEQ ID NO: 1428036 - DNA, 25 bp, Homo sapien
tttatccttggattgttcttaaaga

SEQ ID NO: 1428037 - DNA, 25 bp, Homo sapien
ttatccttggattgttcttaaagag

SEQ ID NO: 1428038 - DNA, 25 bp, Homo sapien
tgcaggcccaagtctaggaacaagg

SEQ ID NO: 1428039 - DNA, 25 bp, Homo sapien
agtctaggaacaagggctttgcagg

SEQ ID NO: 1428040 - DNA, 25 bp, Homo sapien
cccaagtctaggaacaagggctttg

SEQ ID NO: 1428041 - DNA, 25 bp, Homo sapien
gaagtgcaggcccaagtctaggaac

SEQ ID NO: 1428042 - DNA, 25 bp, Homo sapien
catgcttctgttttgacgctgagga

SEQ ID NO: 1428043 - DNA, 25 bp, Homo sapien
tgtgttgctactgaggccttgcagg

SEQ ID NO: 1428044 - DNA, 25 bp, Homo sapien
tgttcactgttacagcccatgtata

SEQ ID NO: 1428045 - DNA, 25 bp, Homo sapien
tagctttatggtgcactggaattgt

SEQ ID NO: 1428046 - DNA, 25 bp, Homo sapien
ctgctaaatcatgggctgcaaaggc

SEQ ID NO: 1428047 - DNA, 25 bp, Homo sapien
cttcggcacagctgctaaatcatgg

SEQ ID NO: 1428048 - DNA, 25 bp, Homo sapien
cacagctgctaaatcatgggctgca

SEQ ID NO: 1428049 - DNA, 25 bp, Homo sapien
tcggcacagctgctaaatcatgggc

SEQ ID NO: 1428050 - DNA, 25 bp, Homo sapien
ggtggttcataagagcagccacaca

SEQ ID NO: 1428051 - DNA, 25 bp, Homo sapien
gtggtgtcacctcatagcacatttg

SEQ ID NO: 1428052 - DNA, 25 bp, Homo sapien
gtccactcatatcctggagggtcca

SEQ ID NO: 1428053 - DNA, 25 bp, Homo sapien
ctttttatcagggtggttcataaga

SEQ ID NO: 1428054 - DNA, 25 bp, Homo sapien
ctgattgttcatgcacccacttcct

SEQ ID NO: 1428055 - DNA, 25 bp, Homo sapien
tgattgttcatgcacccacttcctt

SEQ ID NO: 1428056 - DNA, 25 bp, Homo sapien
ccacttccttctctcctcctgcctg

SEQ ID NO: 1428057 - DNA, 25 bp, Homo sapien
cttccttctctcctcctgcctgtac

SEQ ID NO: 1428058 - DNA, 25 bp, Homo sapien
ttggtcagatacacttttcttgtat

SEQ ID NO: 1428059 - DNA, 25 bp, Homo sapien
ctcttggtcagatacacttttcttg

SEQ ID NO: 1428060 - DNA, 25 bp, Homo sapien
tcttggtcagatacacttttcttgt

SEQ ID NO: 1428061 - DNA, 25 bp, Homo sapien
cctcttggtcagatacacttttctt

SEQ ID NO: 1428062 - DNA, 25 bp, Homo sapien
ctttagtgggagcagactcagaatc

SEQ ID NO: 1428063 - DNA, 25 bp, Homo sapien
tgatgagctttagtgggagcagact

SEQ ID NO: 1428064 - DNA, 25 bp, Homo sapien
gagctttagtgggagcagactcaga

SEQ ID NO: 1428065 - DNA, 25 bp, Homo sapien
gatgagctttagtgggagcagactc

SEQ ID NO: 1428066 - DNA, 25 bp, Homo sapien
ttgagggaaattaacagataaagta

SEQ ID NO: 1428067 - DNA, 25 bp, Homo sapien
cttgagggaaattaacagataaagt

SEQ ID NO: 1428068 - DNA, 25 bp, Homo sapien
tgagggaaattaacagataaagtat

SEQ ID NO: 1428069 - DNA, 25 bp, Homo sapien
ctggcatctcaaaaagagtcaggga

SEQ ID NO: 1428070 - DNA, 25 bp, Homo sapien
cctttgcgggaggtagaacgatgca

SEQ ID NO: 1428071 - DNA, 25 bp, Homo sapien
aacttgctggctgtcacgaatactg

SEQ ID NO: 1428072 - DNA, 25 bp, Homo sapien
tgagaagcaatccaccctttgcggg

SEQ ID NO: 1428073 - DNA, 25 bp, Homo sapien
agccccacttgctcagttccagtgt

SEQ ID NO: 1428074 - DNA, 25 bp, Homo sapien
cctggtgtgcatagccccctggggt

SEQ ID NO: 1428075 - DNA, 25 bp, Homo sapien
cttggcctggtgtgcatagccccct

SEQ ID NO: 1428076 - DNA, 25 bp, Homo sapien
ggcctggtgtgcatagccccctggg

SEQ ID NO: 1428077 - DNA, 25 bp, Homo sapien
gcttctgagcatctccagtgcagga

SEQ ID NO: 1428078 - DNA, 25 bp, Homo sapien
tccccagggaactctacactctgtt

SEQ ID NO: 1428079 - DNA, 25 bp, Homo sapien
cttctgagcatctccagtgcaggaa

SEQ ID NO: 1428080 - DNA, 25 bp, Homo sapien
gtcaggcttgggcccttggtcctcc

SEQ ID NO: 1428081 - DNA, 25 bp, Homo sapien
gtggttcacaccatgccaggcctcc

SEQ ID NO: 1428082 - DNA, 25 bp, Homo sapien
ctgtgtggttcacaccatgccaggc

SEQ ID NO: 1428083 - DNA, 25 bp, Homo sapien
gtgtggttcacaccatgccaggcct

SEQ ID NO: 1428084 - DNA, 25 bp, Homo sapien
ggttcacaccatgccaggcctccat

SEQ ID NO: 1428085 - DNA, 25 bp, Homo sapien
gctgccttttgggcaagctggccat

SEQ ID NO: 1428086 - DNA, 25 bp, Homo sapien
tgctgccttttgggcaagctggcca

SEQ ID NO: 1428087 - DNA, 25 bp, Homo sapien
ttgctgccttttgggcaagctggcc

SEQ ID NO: 1428088 - DNA, 25 bp, Homo sapien
agtgaagacagccacatacaggcca

SEQ ID NO: 1428089 - DNA, 25 bp, Homo sapien
tatccattgactgacaagccttcac

SEQ ID NO: 1428090 - DNA, 25 bp, Homo sapien
gctgacagcacttgagaaacttcca

SEQ ID NO: 1428091 - DNA, 25 bp, Homo sapien
ggtgaattctaaccagacaagagga

SEQ ID NO: 1428092 - DNA, 25 bp, Homo sapien
ccattgtgcatatcggcttgtcgcc

SEQ ID NO: 1428093 - DNA, 25 bp, Homo sapien
gaacgggctttgtggatcctctaaa

SEQ ID NO: 1428094 - DNA, 25 bp, Homo sapien
gcttgtcgccgctggcttgttagca

SEQ ID NO: 1428095 - DNA, 25 bp, Homo sapien
tagcaatgcctgaatgaacgggctt

SEQ ID NO: 1428096 - DNA, 25 bp, Homo sapien
ttgtggaaccccactgtcatggcag

SEQ ID NO: 1428097 - DNA, 25 bp, Homo sapien
ctttgtggaaccccactgtcatggc

SEQ ID NO: 1428098 - DNA, 25 bp, Homo sapien
acagagggtagcacggcttggcact

SEQ ID NO: 1428099 - DNA, 25 bp, Homo sapien
gagggtagcacggcttggcactgcc

SEQ ID NO: 1428100 - DNA, 25 bp, Homo sapien
accagcaagcggagcaggccatgca

SEQ ID NO: 1428101 - DNA, 25 bp, Homo sapien
agtgttgagaccagcaagcggagca

SEQ ID NO: 1428102 - DNA, 25 bp, Homo sapien
acaaaggacaagtctcccaatagga

SEQ ID NO: 1428103 - DNA, 25 bp, Homo sapien
ctggtgagtgttgagaccagcaagc

SEQ ID NO: 1428104 - DNA, 25 bp, Homo sapien
ggatgaggatcacagctggaaaggc

SEQ ID NO: 1428105 - DNA, 25 bp, Homo sapien
acagcatcccttcctaaggatgagg

SEQ ID NO: 1428106 - DNA, 25 bp, Homo sapien
ctagaaacagcatcccttcctaagg

SEQ ID NO: 1428107 - DNA, 25 bp, Homo sapien
agggaggtggcgttgagtaccccat

SEQ ID NO: 1428108 - DNA, 25 bp, Homo sapien
atcccttcctaaggatgagggaggt

SEQ ID NO: 1428109 - DNA, 25 bp, Homo sapien
aatgatggaattttgtgctccccag

SEQ ID NO: 1428110 - DNA, 25 bp, Homo sapien
gatggaattttgtgctccccagaca

SEQ ID NO: 1428111 - DNA, 25 bp, Homo sapien
ggaatgatggaattttgtgctcccc

SEQ ID NO: 1428112 - DNA, 25 bp, Homo sapien
ggtggaatgatggaattttgtgctc

SEQ ID NO: 1428113 - DNA, 25 bp, Homo sapien
ctcactcaaagccttcgtccgcctc

SEQ ID NO: 1428114 - DNA, 25 bp, Homo sapien
tcactcaaagccttcgtccgcctcc

SEQ ID NO: 1428115 - DNA, 25 bp, Homo sapien
gaccaaagctctcaatagttcagtg

SEQ ID NO: 1428116 - DNA, 25 bp, Homo sapien
aaacacatcccagatgtcaacatcc

SEQ ID NO: 1428117 - DNA, 25 bp, Homo sapien
tcttcatcaataacagtcatggcaa

SEQ ID NO: 1428118 - DNA, 25 bp, Homo sapien
gatgtcaacatccacgatgaccaaa

SEQ ID NO: 1428119 - DNA, 25 bp, Homo sapien
ttctgtacttcagaatatgtcatgg

SEQ ID NO: 1428120 - DNA, 25 bp, Homo sapien
gatgggaggaagcattagaggtgcc

SEQ ID NO: 1428121 - DNA, 25 bp, Homo sapien
ttgagggctctacaatgtgttcttg

SEQ ID NO: 1428122 - DNA, 25 bp, Homo sapien
ggaagcattagaggtgccaagtaca

SEQ ID NO: 1428123 - DNA, 25 bp, Homo sapien
tgggtggctataaagtgctgaacat

SEQ ID NO: 1428124 - DNA, 25 bp, Homo sapien
taaagtgctgaacattccacctgct

SEQ ID NO: 1428125 - DNA, 25 bp, Homo sapien
tgcttcttctgctgacaccctgctg

SEQ ID NO: 1428126 - DNA, 25 bp, Homo sapien
ctggtaggaatctgcctcttggcat

SEQ ID NO: 1428127 - DNA, 25 bp, Homo sapien
ctggcctctcgagggtccagtctgg

SEQ ID NO: 1428128 - DNA, 25 bp, Homo sapien
gatttgctggcctctcgagggtcca

SEQ ID NO: 1428129 - DNA, 25 bp, Homo sapien
agggcatccctagtcacccaagaca

SEQ ID NO: 1428130 - DNA, 25 bp, Homo sapien
ttggagggtggcccacaatgaaact

SEQ ID NO: 1428131 - DNA, 25 bp, Homo sapien
ccaccaagggcaacttcatggagat

SEQ ID NO: 1428132 - DNA, 25 bp, Homo sapien
tcagttatgaggacatagccaggcc

SEQ ID NO: 1428133 - DNA, 25 bp, Homo sapien
gatcagagaagtcaatggatttccc

SEQ ID NO: 1428134 - DNA, 25 bp, Homo sapien
aggccactgcctgtctcaagaatgc

SEQ ID NO: 1428135 - DNA, 25 bp, Homo sapien
gaaatgaaacccaagctgtcagggc

SEQ ID NO: 1428136 - DNA, 25 bp, Homo sapien
taattccttgggtcagagaggaccc

SEQ ID NO: 1428137 - DNA, 25 bp, Homo sapien
tcaaaaagtcaggtggcttcactcc

SEQ ID NO: 1428138 - DNA, 25 bp, Homo sapien
tgttgagccaacagccttagcacag

SEQ ID NO: 1428139 - DNA, 25 bp, Homo sapien
gctaggtctacagatgctcatcacc

SEQ ID NO: 1428140 - DNA, 25 bp, Homo sapien
tagctaggtctacagatgctcatca

SEQ ID NO: 1428141 - DNA, 25 bp, Homo sapien
taggtctacagatgctcatcaccat

SEQ ID NO: 1428142 - DNA, 25 bp, Homo sapien
aggtctacagatgctcatcaccatg

SEQ ID NO: 1428143 - DNA, 25 bp, Homo sapien
cagaccccgataaaaccaaagctgg

SEQ ID NO: 1428144 - DNA, 25 bp, Homo sapien
gcaactcctgttagcaaagctgctg

SEQ ID NO: 1428145 - DNA, 25 bp, Homo sapien
taacagtgttgccactaacgcccgg

SEQ ID NO: 1428146 - DNA, 25 bp, Homo sapien
gctcctgtcactgttagtacccgaa

SEQ ID NO: 1428147 - DNA, 25 bp, Homo sapien
ccacagcaggcccttaggcttgggc

SEQ ID NO: 1428148 - DNA, 25 bp, Homo sapien
ttatgatatcaaagtgttcaaggcc

SEQ ID NO: 1428149 - DNA, 25 bp, Homo sapien
cacctcctcttatgatatcaaagtg

SEQ ID NO: 1428150 - DNA, 25 bp, Homo sapien
ggcccttaggcttgggctgtccttg

SEQ ID NO: 1428151 - DNA, 25 bp, Homo sapien
tgaagatggtcaaagcagccagaag

SEQ ID NO: 1428152 - DNA, 25 bp, Homo sapien
acatgaagatggtcaaagcagccag

SEQ ID NO: 1428153 - DNA, 25 bp, Homo sapien
gatcctggagcagtctcttgtggca

SEQ ID NO: 1428154 - DNA, 25 bp, Homo sapien
cccttgatcctggagcagtctcttg

SEQ ID NO: 1428155 - DNA, 25 bp, Homo sapien
gaatgctgcggcttaattctcaggg

SEQ ID NO: 1428156 - DNA, 25 bp, Homo sapien
gctccttgcgatggaggaaagatga

SEQ ID NO: 1428157 - DNA, 25 bp, Homo sapien
agtgtgagggtaaggcaccctgcag

SEQ ID NO: 1428158 - DNA, 25 bp, Homo sapien
aaagatgagcttagaatgctgcggc

SEQ ID NO: 1428159 - DNA, 25 bp, Homo sapien
tcaccattgcccaggtcatccacgt

SEQ ID NO: 1428160 - DNA, 25 bp, Homo sapien
actgtctggatctgtctcctgatgt

SEQ ID NO: 1428161 - DNA, 25 bp, Homo sapien
tcactgtctggatctgtctcctgat

SEQ ID NO: 1428162 - DNA, 25 bp, Homo sapien
caccattgcccaggtcatccacgtc

SEQ ID NO: 1428163 - DNA, 25 bp, Homo sapien
actcccttagcgtagggcagcccag

SEQ ID NO: 1428164 - DNA, 25 bp, Homo sapien
tcaactcatctttgatacacagggt

SEQ ID NO: 1428165 - DNA, 25 bp, Homo sapien
ttgatacacagggtatggcctgaga

SEQ ID NO: 1428166 - DNA, 25 bp, Homo sapien
ggtggaactctttggaactgaactc

SEQ ID NO: 1428167 - DNA, 25 bp, Homo sapien
gagaatactcgatggcagggactcc

SEQ ID NO: 1428168 - DNA, 25 bp, Homo sapien
cagggactccagtcggttggcctct

SEQ ID NO: 1428169 - DNA, 25 bp, Homo sapien
ttgtagcatggctgatttcactggg

SEQ ID NO: 1428170 - DNA, 25 bp, Homo sapien
tgctctatgagctcactggctgctt

SEQ ID NO: 1428171 - DNA, 25 bp, Homo sapien
gaggatatagggatgccattcaaca

SEQ ID NO: 1428172 - DNA, 25 bp, Homo sapien
aagtgacacgtgatcattccaaggg

SEQ ID NO: 1428173 - DNA, 25 bp, Homo sapien
aagctggaatccaagaggcaaagga

SEQ ID NO: 1428174 - DNA, 25 bp, Homo sapien
tcttgccaaaagtctagcgatcagc

SEQ ID NO: 1428175 - DNA, 25 bp, Homo sapien
tcacactgccctacaccacccttcc

SEQ ID NO: 1428176 - DNA, 25 bp, Homo sapien
cactgccctacaccacccttcccct

SEQ ID NO: 1428177 - DNA, 25 bp, Homo sapien
ctgccctacaccacccttccccttg

SEQ ID NO: 1428178 - DNA, 25 bp, Homo sapien
tgccctacaccacccttccccttgc

SEQ ID NO: 1428179 - DNA, 25 bp, Homo sapien
gctaaagatggatctgagaccccaa

SEQ ID NO: 1428180 - DNA, 25 bp, Homo sapien
gaccccaatagaagatgtcaccagg

SEQ ID NO: 1428181 - DNA, 25 bp, Homo sapien
tagaatttgctcatgcaagctgtgg

SEQ ID NO: 1428182 - DNA, 25 bp, Homo sapien
ttctctgccatcagggatagggtca

SEQ ID NO: 1428183 - DNA, 25 bp, Homo sapien
ctgtaatcctatagagtcttgctgt

SEQ ID NO: 1428184 - DNA, 25 bp, Homo sapien
actgtaatcctatagagtcttgctg

SEQ ID NO: 1428185 - DNA, 25 bp, Homo sapien
actactgtaatcctatagagtcttg

SEQ ID NO: 1428186 - DNA, 25 bp, Homo sapien
tactgtaatcctatagagtcttgct

SEQ ID NO: 1428187 - DNA, 25 bp, Homo sapien
ttccctactggactcctcatagggg

SEQ ID NO: 1428188 - DNA, 25 bp, Homo sapien
ccaccctgacccagcaaccttgaca

SEQ ID NO: 1428189 - DNA, 25 bp, Homo sapien
agcctgaatgaccacctgaaaggct

SEQ ID NO: 1428190 - DNA, 25 bp, Homo sapien
taggggtgcaacttccaggctagat

SEQ ID NO: 1428191 - DNA, 25 bp, Homo sapien
ctaccaacagaagtcaagtcctaac

SEQ ID NO: 1428192 - DNA, 25 bp, Homo sapien
ttccctgctcccaagacctgaacat

SEQ ID NO: 1428193 - DNA, 25 bp, Homo sapien
ttcttttcctccattacaactttgc

SEQ ID NO: 1428194 - DNA, 25 bp, Homo sapien
caagacctgaacatgctgctcttct

SEQ ID NO: 1428195 - DNA, 25 bp, Homo sapien
ttttcctccattacaactttgccat

SEQ ID NO: 1428196 - DNA, 25 bp, Homo sapien
gaggaggtacgcagggaactgctgt

SEQ ID NO: 1428197 - DNA, 25 bp, Homo sapien
gaggctgtgagggtttggaggaggt

SEQ ID NO: 1428198 - DNA, 25 bp, Homo sapien
tcagagctgagattgagcaaggtga

SEQ ID NO: 1428199 - DNA, 25 bp, Homo sapien
aggcctcggaagtggagtcctgaag

SEQ ID NO: 1428200 - DNA, 25 bp, Homo sapien
ggaaatggcctcccttgccactgca

SEQ ID NO: 1428201 - DNA, 25 bp, Homo sapien
cgcagaggaaatggcctcccttgcc

SEQ ID NO: 1428202 - DNA, 25 bp, Homo sapien
ttgccactgcaggtagcagatggct

SEQ ID NO: 1428203 - DNA, 25 bp, Homo sapien
ctgtgcagccgcagaggaaatggcc

SEQ ID NO: 1428204 - DNA, 25 bp, Homo sapien
ctggttttgggcagctgagttcctg

SEQ ID NO: 1428205 - DNA, 25 bp, Homo sapien
aattgtcattctgggagcaaaaagg

SEQ ID NO: 1428206 - DNA, 25 bp, Homo sapien
gaccaccagggcaagagtgtttgcc

SEQ ID NO: 1428207 - DNA, 25 bp, Homo sapien
gggcttcttattctgcgtgaatcat

SEQ ID NO: 1428208 - DNA, 25 bp, Homo sapien
agcacagcaggtcagtcagaaccat

SEQ ID NO: 1428209 - DNA, 25 bp, Homo sapien
cccataggatcaattgcaatttgtg

SEQ ID NO: 1428210 - DNA, 25 bp, Homo sapien
tcacatgttgtggactgccagctct

SEQ ID NO: 1428211 - DNA, 25 bp, Homo sapien
ctctgctctcaggggctctctcatg

SEQ ID NO: 1428212 - DNA, 25 bp, Homo sapien
tgctctcaggggctctctcatgtca

SEQ ID NO: 1428213 - DNA, 25 bp, Homo sapien
gctctcaggggctctctcatgtcat

SEQ ID NO: 1428214 - DNA, 25 bp, Homo sapien
ctgtcctccacttcccatgcctgac

SEQ ID NO: 1428215 - DNA, 25 bp, Homo sapien
gttgccacagtatgtcgcaccagta

SEQ ID NO: 1428216 - DNA, 25 bp, Homo sapien
agggttgccacagtatgtcgcacca

SEQ ID NO: 1428217 - DNA, 25 bp, Homo sapien
cacagtatgtcgcaccagtaggtaa

SEQ ID NO: 1428218 - DNA, 25 bp, Homo sapien
tgtcgcaccagtaggtaaaatggtt

SEQ ID NO: 1428219 - DNA, 25 bp, Homo sapien
aactactgtccactgagtgtggagc

SEQ ID NO: 1428220 - DNA, 25 bp, Homo sapien
ctactgtccactgagtgtggagcac

SEQ ID NO: 1428221 - DNA, 25 bp, Homo sapien
ctgagagcctgaactactgtccact

SEQ ID NO: 1428222 - DNA, 25 bp, Homo sapien
actactgtccactgagtgtggagca

SEQ ID NO: 1428223 - DNA, 25 bp, Homo sapien
actcctcaagaaccctgaaaggcag

SEQ ID NO: 1428224 - DNA, 25 bp, Homo sapien
gactcctcaagaaccctgaaaggca

SEQ ID NO: 1428225 - DNA, 25 bp, Homo sapien
tagactcctcaagaaccctgaaagg

SEQ ID NO: 1428226 - DNA, 25 bp, Homo sapien
cttagactcctcaagaaccctgaaa

SEQ ID NO: 1428227 - DNA, 25 bp, Homo sapien
tttttaggaccagtggcttgatttc

SEQ ID NO: 1428228 - DNA, 25 bp, Homo sapien
ctaaatctttggtgtcatcattttt

SEQ ID NO: 1428229 - DNA, 25 bp, Homo sapien
atctttggtgtcatcattttttagg

SEQ ID NO: 1428230 - DNA, 25 bp, Homo sapien
tcattttttaggaccagtggcttga

SEQ ID NO: 1428231 - DNA, 25 bp, Homo sapien
gggactggagtatcccagccatttg

SEQ ID NO: 1428232 - DNA, 25 bp, Homo sapien
tgcctcgcagtgcactgtagctgga

SEQ ID NO: 1428233 - DNA, 25 bp, Homo sapien
cactgtagctggaaaatgttcaggg

SEQ ID NO: 1428234 - DNA, 25 bp, Homo sapien
tgacttggcgtctgggcactttcca

SEQ ID NO: 1428235 - DNA, 25 bp, Homo sapien
cacgctgaccccatactgtgtggca

SEQ ID NO: 1428236 - DNA, 25 bp, Homo sapien
catatctgttaccagggaccactcc

SEQ ID NO: 1428237 - DNA, 25 bp, Homo sapien
tactgtgtggcaaccctcatatctg

SEQ ID NO: 1428238 - DNA, 25 bp, Homo sapien
ggcaaccctcatatctgttaccagg

SEQ ID NO: 1428239 - DNA, 25 bp, Homo sapien
aggactgtgagcagccgcctctgct

SEQ ID NO: 1428240 - DNA, 25 bp, Homo sapien
tctgagggagatacctcgacgtccc

SEQ ID NO: 1428241 - DNA, 25 bp, Homo sapien
ggagatacctcgacgtccctctgtc

SEQ ID NO: 1428242 - DNA, 25 bp, Homo sapien
gaggactgtgagcagccgcctctgc

SEQ ID NO: 1428243 - DNA, 25 bp, Homo sapien
gggtcatcgacagcactttaaaggg

SEQ ID NO: 1428244 - DNA, 25 bp, Homo sapien
agatgaagtctcctagtccagaggg

SEQ ID NO: 1428245 - DNA, 25 bp, Homo sapien
cactgatagccttatgggtcatcga

SEQ ID NO: 1428246 - DNA, 25 bp, Homo sapien
ttcacataggaagcctggattcagc

SEQ ID NO: 1428247 - DNA, 25 bp, Homo sapien
caggttctagatcataatgggtttc

SEQ ID NO: 1428248 - DNA, 25 bp, Homo sapien
gatgtttttagaaggctcagtctcc

SEQ ID NO: 1428249 - DNA, 25 bp, Homo sapien
ggtttcattgtcttcagttagtgca

SEQ ID NO: 1428250 - DNA, 25 bp, Homo sapien
gtggatctaattgtaatcaatctgc

SEQ ID NO: 1428251 - DNA, 25 bp, Homo sapien
ttctatcctttccatgaacgtttta

SEQ ID NO: 1428252 - DNA, 25 bp, Homo sapien
gagacacaatactttagcaatttac

SEQ ID NO: 1428253 - DNA, 25 bp, Homo sapien
ccagcgcaaatgatgtcagggtcct

SEQ ID NO: 1428254 - DNA, 25 bp, Homo sapien
tcagaaaatgcatcagggctgggca

SEQ ID NO: 1428255 - DNA, 25 bp, Homo sapien
cccaaagttagtgtgaggtcaaaat

SEQ ID NO: 1428256 - DNA, 25 bp, Homo sapien
tgttttggatgctgcaggcacccac

SEQ ID NO: 1428257 - DNA, 25 bp, Homo sapien
caacctcaggcagcttttgaacata

SEQ ID NO: 1428258 - DNA, 25 bp, Homo sapien
aatccgaaggcctaataaagacagc

SEQ ID NO: 1428259 - DNA, 25 bp, Homo sapien
tgggctctttcgtaagtaaaagcaa

SEQ ID NO: 1428260 - DNA, 25 bp, Homo sapien
ttgggctctttcgtaagtaaaagca

SEQ ID NO: 1428261 - DNA, 25 bp, Homo sapien
cacagatattgggctctttcgtaag

SEQ ID NO: 1428262 - DNA, 25 bp, Homo sapien
gatattgggctctttcgtaagtaaa

SEQ ID NO: 1428263 - DNA, 25 bp, Homo sapien
gaaactgccagtcatcttaccttca

SEQ ID NO: 1428264 - DNA, 25 bp, Homo sapien
taaaaatcagggtctcttacctgac

SEQ ID NO: 1428265 - DNA, 25 bp, Homo sapien
tcccctccacaaaggtagtagagaa

SEQ ID NO: 1428266 - DNA, 25 bp, Homo sapien
aaccaagatcttgtccaacccagaa

SEQ ID NO: 1428267 - DNA, 25 bp, Homo sapien
gagatgtcacccatttccattggta

SEQ ID NO: 1428268 - DNA, 25 bp, Homo sapien
aggctagcgacaaacttctgggttc

SEQ ID NO: 1428269 - DNA, 25 bp, Homo sapien
tacttgctatcacattagggagaga

SEQ ID NO: 1428270 - DNA, 25 bp, Homo sapien
agttgtctggtcacctctgatgatc

SEQ ID NO: 1428271 - DNA, 25 bp, Homo sapien
tatcttacctgcctaaagctccatg

SEQ ID NO: 1428272 - DNA, 25 bp, Homo sapien
catttcactataacacatgcagcaa

SEQ ID NO: 1428273 - DNA, 25 bp, Homo sapien
tttaagaaagcataatacttacttc

SEQ ID NO: 1428274 - DNA, 25 bp, Homo sapien
taaattattttccatgcggtatatc

SEQ ID NO: 1428275 - DNA, 25 bp, Homo sapien
actgagagctggatttctgttcaag

SEQ ID NO: 1428276 - DNA, 25 bp, Homo sapien
tcaagttcttgacgcttctttccca

SEQ ID NO: 1428277 - DNA, 25 bp, Homo sapien
tctgttcaagttcttgacgcttctt

SEQ ID NO: 1428278 - DNA, 25 bp, Homo sapien
gtactgagagctggatttctgttca

SEQ ID NO: 1428279 - DNA, 25 bp, Homo sapien
gatgtttcatctacagagaaagacc

SEQ ID NO: 1428280 - DNA, 25 bp, Homo sapien
tgatcccgtgatccactccctgtgg

SEQ ID NO: 1428281 - DNA, 25 bp, Homo sapien
ggcccctacatctgttgaaaattcc

SEQ ID NO: 1428282 - DNA, 25 bp, Homo sapien
agcacccggctgagtgtctgacaca

SEQ ID NO: 1428283 - DNA, 25 bp, Homo sapien
tgagctgctcgagaaaattaaaccc

SEQ ID NO: 1428284 - DNA, 25 bp, Homo sapien
tagcagaatgcatctatgcgacagg

SEQ ID NO: 1428285 - DNA, 25 bp, Homo sapien
tccagctctactgggatggaagtgc

SEQ ID NO: 1428286 - DNA, 25 bp, Homo sapien
catgacaactcacacttcagtggtt

SEQ ID NO: 1428287 - DNA, 25 bp, Homo sapien
cactgccagtaactcggatatcttc

SEQ ID NO: 1428288 - DNA, 25 bp, Homo sapien
gctttcacatactacaatagcagag

SEQ ID NO: 1428289 - DNA, 25 bp, Homo sapien
tccatcagtaacatctccaggtaga

SEQ ID NO: 1428290 - DNA, 25 bp, Homo sapien
gatgacgactttctggcccacaaag

SEQ ID NO: 1428291 - DNA, 25 bp, Homo sapien
attccttcggaataactgctcatac

SEQ ID NO: 1428292 - DNA, 25 bp, Homo sapien
gcaagtggttcaacaactttactca

SEQ ID NO: 1428293 - DNA, 25 bp, Homo sapien
ctaccgaagtactggtatcacaggg

SEQ ID NO: 1428294 - DNA, 25 bp, Homo sapien
aggaatgaaaccaccatattgcaag

SEQ ID NO: 1428295 - DNA, 25 bp, Homo sapien
ctaaggtatcaaagaagggagtgaa

SEQ ID NO: 1428296 - DNA, 25 bp, Homo sapien
taaggtatcaaagaagggagtgaac

SEQ ID NO: 1428297 - DNA, 25 bp, Homo sapien
taatgtctgagaaacccctacaagt

SEQ ID NO: 1428298 - DNA, 25 bp, Homo sapien
tgcagcccacgtaacagtgcgagaa

SEQ ID NO: 1428299 - DNA, 25 bp, Homo sapien
taaatggccccacaatgtagacggt

SEQ ID NO: 1428300 - DNA, 25 bp, Homo sapien
tgagccccaaggagtttatgagcag

SEQ ID NO: 1428301 - DNA, 25 bp, Homo sapien
tacttcccagccatgcacatttgtt

SEQ ID NO: 1428302 - DNA, 25 bp, Homo sapien
tttcctgctatactggccaaactga

SEQ ID NO: 1428303 - DNA, 25 bp, Homo sapien
gcttagaaatttggataacagggct

SEQ ID NO: 1428304 - DNA, 25 bp, Homo sapien
gctgttgaactatagtctgtgggcc

SEQ ID NO: 1428305 - DNA, 25 bp, Homo sapien
ttattcactgttacattatagttca

SEQ ID NO: 1428306 - DNA, 25 bp, Homo sapien
ttgctgcatttgacaaaaactttcc

SEQ ID NO: 1428307 - DNA, 25 bp, Homo sapien
cttaaaaagagttatctcttgctgc

SEQ ID NO: 1428308 - DNA, 25 bp, Homo sapien
tatagttcacatatgctacttctta

SEQ ID NO: 1428309 - DNA, 25 bp, Homo sapien
aattagataacaccaccaagagcag

SEQ ID NO: 1428310 - DNA, 25 bp, Homo sapien
aaaattagataacaccaccaagagc

SEQ ID NO: 1428311 - DNA, 25 bp, Homo sapien
cccatgatgactttggggagagaca

SEQ ID NO: 1428312 - DNA, 25 bp, Homo sapien
tagataacaccaccaagagcagcaa

SEQ ID NO: 1428313 - DNA, 25 bp, Homo sapien
tagcagcaatcagcacattggactc

SEQ ID NO: 1428314 - DNA, 25 bp, Homo sapien
ttaattgtaccctgactgttagcag

SEQ ID NO: 1428315 - DNA, 25 bp, Homo sapien
gactgttagcagcaatcagcacatt

SEQ ID NO: 1428316 - DNA, 25 bp, Homo sapien
taccctgactgttagcagcaatcag

SEQ ID NO: 1428317 - DNA, 25 bp, Homo sapien
cttcaattcctaagacaattgaatc

SEQ ID NO: 1428318 - DNA, 25 bp, Homo sapien
caattcctaagacaattgaatctaa

SEQ ID NO: 1428319 - DNA, 25 bp, Homo sapien
ttcctaagacaattgaatctaatat

SEQ ID NO: 1428320 - DNA, 25 bp, Homo sapien
cctaagacaattgaatctaatatga

SEQ ID NO: 1428321 - DNA, 25 bp, Homo sapien
tctttggaattagtcagcagcatca

SEQ ID NO: 1428322 - DNA, 25 bp, Homo sapien
gaattgttgatcttttcctagctga

SEQ ID NO: 1428323 - DNA, 25 bp, Homo sapien
gaaatgtgcatcttgttactaatgg

SEQ ID NO: 1428324 - DNA, 25 bp, Homo sapien
catatgcaagttgcgctttacaaac

SEQ ID NO: 1428325 - DNA, 25 bp, Homo sapien
tattgagcactataggtcagtgact

SEQ ID NO: 1428326 - DNA, 25 bp, Homo sapien
aaatgtcataaacctaggctcctaa

SEQ ID NO: 1428327 - DNA, 25 bp, Homo sapien
tctgtatcatattgacccagtaagc

SEQ ID NO: 1428328 - DNA, 25 bp, Homo sapien
tatgtacaagagagcctcagttctc

SEQ ID NO: 1428329 - DNA, 25 bp, Homo sapien
cagttcagacggatacagaggtaac

SEQ ID NO: 1428330 - DNA, 25 bp, Homo sapien
ttttcaaaactcgtaagatacctca

SEQ ID NO: 1428331 - DNA, 25 bp, Homo sapien
caaaaaccagttcagacggatacag

SEQ ID NO: 1428332 - DNA, 25 bp, Homo sapien
ctcgtaagatacctcaaaaaccagt

SEQ ID NO: 1428333 - DNA, 25 bp, Homo sapien
taggatcgctgcaatctgtagacaa

SEQ ID NO: 1428334 - DNA, 25 bp, Homo sapien
gaaaccaagtatttagagtggcagt

SEQ ID NO: 1428335 - DNA, 25 bp, Homo sapien
taatacagtactcataaccagcaga

SEQ ID NO: 1428336 - DNA, 25 bp, Homo sapien
ggaacgatcagacttagccagctgt

SEQ ID NO: 1428337 - DNA, 25 bp, Homo sapien
aaagaaccattaagaaggcacactt

SEQ ID NO: 1428338 - DNA, 25 bp, Homo sapien
tttccaaagtcttctcgccaactgg

SEQ ID NO: 1428339 - DNA, 25 bp, Homo sapien
ttagcatacaaagtcaaagtgatcc

SEQ ID NO: 1428340 - DNA, 25 bp, Homo sapien
tgatccttattcagggagaaaaggc

SEQ ID NO: 1428341 - DNA, 25 bp, Homo sapien
atgacaagaatttctagcctcagga

SEQ ID NO: 1428342 - DNA, 25 bp, Homo sapien
gctttttagctcattgagaataact

SEQ ID NO: 1428343 - DNA, 25 bp, Homo sapien
aataactgcacataagccttattta

SEQ ID NO: 1428344 - DNA, 25 bp, Homo sapien
ttagctcattgagaataactgcaca

SEQ ID NO: 1428345 - DNA, 25 bp, Homo sapien
ttttatcagagagcaaaagatcctg

SEQ ID NO: 1428346 - DNA, 25 bp, Homo sapien
ggtgagtcatggcattactgcttca

SEQ ID NO: 1428347 - DNA, 25 bp, Homo sapien
tataggagagtgtcatgagaacaac

SEQ ID NO: 1428348 - DNA, 25 bp, Homo sapien
ggttcagtttgcaccactatagtcc

SEQ ID NO: 1428349 - DNA, 25 bp, Homo sapien
tattctggatactgagggaagagtg

SEQ ID NO: 1428350 - DNA, 25 bp, Homo sapien
ccccactctattctggatactgagg

SEQ ID NO: 1428351 - DNA, 25 bp, Homo sapien
ctctattctggatactgagggaaga

SEQ ID NO: 1428352 - DNA, 25 bp, Homo sapien
cccactctattctggatactgaggg

SEQ ID NO: 1428353 - DNA, 25 bp, Homo sapien
ttcagattggccctcttccagtcag

SEQ ID NO: 1428354 - DNA, 25 bp, Homo sapien
tataaacaatccagtcagaggaaag

SEQ ID NO: 1428355 - DNA, 25 bp, Homo sapien
tcttcctgaggtaggtgagggatca

SEQ ID NO: 1428356 - DNA, 25 bp, Homo sapien
tgtcttctccgcactcattgaggaa

SEQ ID NO: 1428357 - DNA, 25 bp, Homo sapien
acagacaagcatgaatgcatcaaac

SEQ ID NO: 1428358 - DNA, 25 bp, Homo sapien
tcaatataaagcttcctcacaacaa

SEQ ID NO: 1428359 - DNA, 25 bp, Homo sapien
actccaacacctaaacagcaagaaa

SEQ ID NO: 1428360 - DNA, 25 bp, Homo sapien
gattagaggcttaaacataagactg

SEQ ID NO: 1428361 - DNA, 25 bp, Homo sapien
tacagaatggcaatatgacctagca

SEQ ID NO: 1428362 - DNA, 25 bp, Homo sapien
tgaactgtgaggaaccacttatatg

SEQ ID NO: 1428363 - DNA, 25 bp, Homo sapien
agagaactcttgtaacgttggtggg

SEQ ID NO: 1428364 - DNA, 25 bp, Homo sapien
gaaaacatggtatacagctgaccct

SEQ ID NO: 1428365 - DNA, 25 bp, Homo sapien
caaagtttcagctaattagacaaaa

SEQ ID NO: 1428366 - DNA, 25 bp, Homo sapien
tgtacatgtatatgaaaataccaca

SEQ ID NO: 1428367 - DNA, 25 bp, Homo sapien
gatgccaagatgttggtccaaggct

SEQ ID NO: 1428368 - DNA, 25 bp, Homo sapien
aaaaaagcatgtgagatgaccgata

SEQ ID NO: 1428369 - DNA, 25 bp, Homo sapien
cttatcttttttcagaggatttaag

SEQ ID NO: 1428370 - DNA, 25 bp, Homo sapien
ttagatgatcttatcttttttcaga

SEQ ID NO: 1428371 - DNA, 25 bp, Homo sapien
ttttcagaggatttaagtttgcatc

SEQ ID NO: 1428372 - DNA, 25 bp, Homo sapien
tagatgatcttatcttttttcagag

SEQ ID NO: 1428373 - DNA, 25 bp, Homo sapien
tatgaagacttatcttctggtttcc

SEQ ID NO: 1428374 - DNA, 25 bp, Homo sapien
ctatgaagacttatcttctggtttc

SEQ ID NO: 1428375 - DNA, 25 bp, Homo sapien
atgaagacttatcttctggtttccc

SEQ ID NO: 1428376 - DNA, 25 bp, Homo sapien
tcttttcggtctttgtcgagaacac

SEQ ID NO: 1428377 - DNA, 25 bp, Homo sapien
ttcttttcggtctttgtcgagaaca

SEQ ID NO: 1428378 - DNA, 25 bp, Homo sapien
atcttcttttcggtctttgtcgaga

SEQ ID NO: 1428379 - DNA, 25 bp, Homo sapien
tcttcttttcggtctttgtcgagaa

SEQ ID NO: 1428380 - DNA, 25 bp, Homo sapien
aaaactcggaattaggacatcacag

SEQ ID NO: 1428381 - DNA, 25 bp, Homo sapien
tagaaaaactcggaattaggacatc

SEQ ID NO: 1428382 - DNA, 25 bp, Homo sapien
aaactcggaattaggacatcacagt

SEQ ID NO: 1428383 - DNA, 25 bp, Homo sapien
gaaaaactcggaattaggacatcac

SEQ ID NO: 1428384 - DNA, 25 bp, Homo sapien
cttgaaggaacgtaggcagtatggt

SEQ ID NO: 1428385 - DNA, 25 bp, Homo sapien
ccttgaaggaacgtaggcagtatgg

SEQ ID NO: 1428386 - DNA, 25 bp, Homo sapien
tgaaggaacgtaggcagtatggttt

SEQ ID NO: 1428387 - DNA, 25 bp, Homo sapien
gaaggaacgtaggcagtatggtttc

SEQ ID NO: 1428388 - DNA, 25 bp, Homo sapien
taaaagtgcacaatacagaccagaa

SEQ ID NO: 1428389 - DNA, 25 bp, Homo sapien
gaccatgtcagtgtaaaagccaacc

SEQ ID NO: 1428390 - DNA, 25 bp, Homo sapien
tagcacgttcatctgtcggccaggc

SEQ ID NO: 1428391 - DNA, 25 bp, Homo sapien
ttccaagcaatttggtaggccgagg

SEQ ID NO: 1428392 - DNA, 25 bp, Homo sapien
gctttacggtgtcctttgaatacca

SEQ ID NO: 1428393 - DNA, 25 bp, Homo sapien
gactgctttacggtgtcctttgaat

SEQ ID NO: 1428394 - DNA, 25 bp, Homo sapien
ataagagactgctttacggtgtcct

SEQ ID NO: 1428395 - DNA, 25 bp, Homo sapien
gagactgctttacggtgtcctttga

SEQ ID NO: 1428396 - DNA, 25 bp, Homo sapien
cagcaacacttagcagtaacaagat

SEQ ID NO: 1428397 - DNA, 25 bp, Homo sapien
gccttgattgcccaactggtactag

SEQ ID NO: 1428398 - DNA, 25 bp, Homo sapien
cactacacctggcacatgtgcatag

SEQ ID NO: 1428399 - DNA, 25 bp, Homo sapien
ttctacagctaggtacacgtcagag

SEQ ID NO: 1428400 - DNA, 25 bp, Homo sapien
aaatcagcagatgcccaagggtaca

SEQ ID NO: 1428401 - DNA, 25 bp, Homo sapien
cggttcagaaatttacttagctagg

SEQ ID NO: 1428402 - DNA, 25 bp, Homo sapien
cagagggctgagtatgtaactcatc

SEQ ID NO: 1428403 - DNA, 25 bp, Homo sapien
aaacacaagatgatgatgggttcta

SEQ ID NO: 1428404 - DNA, 25 bp, Homo sapien
caggtaagtatcaatccaggtgata

SEQ ID NO: 1428405 - DNA, 25 bp, Homo sapien
gaagctaatcaaaagtatgcactaa

SEQ ID NO: 1428406 - DNA, 25 bp, Homo sapien
cagattgggacacaatcagtctaga

SEQ ID NO: 1428407 - DNA, 25 bp, Homo sapien
gccagtctaggaacacattaggtaa

SEQ ID NO: 1428408 - DNA, 25 bp, Homo sapien
tataaaagtcctcaatgccctagct

SEQ ID NO: 1428409 - DNA, 25 bp, Homo sapien
atccctgctaggtttttcttaggcg

SEQ ID NO: 1428410 - DNA, 25 bp, Homo sapien
tacacaggtccactggttactaata

SEQ ID NO: 1428411 - DNA, 25 bp, Homo sapien
cttttggatactgcgacaggactgg

SEQ ID NO: 1428412 - DNA, 25 bp, Homo sapien
gcacaagtaggaatcagaacccttt

SEQ ID NO: 1428413 - DNA, 25 bp, Homo sapien
tactctcaatccttgaggaacataa

SEQ ID NO: 1428414 - DNA, 25 bp, Homo sapien
gaagagctgctcagcttaaagcaca

SEQ ID NO: 1428415 - DNA, 25 bp, Homo sapien
tgaaaccctatgatataaaacagat

SEQ ID NO: 1428416 - DNA, 25 bp, Homo sapien
ggtccagccaggaatcagtttctat

SEQ ID NO: 1428417 - DNA, 25 bp, Homo sapien
cctctaaatggcctagtttgctaag

SEQ ID NO: 1428418 - DNA, 25 bp, Homo sapien
gcccacaccagaagtaaaagcatta

SEQ ID NO: 1428419 - DNA, 25 bp, Homo sapien
catttagaggcaatgccttccaaat

SEQ ID NO: 1428420 - DNA, 25 bp, Homo sapien
gaaattatgtcagtagcccagtgac

SEQ ID NO: 1428421 - DNA, 25 bp, Homo sapien
ggcaaacaccgacatatggtcaccc

SEQ ID NO: 1428422 - DNA, 25 bp, Homo sapien
caaacggtgtgaactaggactgtcc

SEQ ID NO: 1428423 - DNA, 25 bp, Homo sapien
tgtcctccttaaactgaactatgaa

SEQ ID NO: 1428424 - DNA, 25 bp, Homo sapien
tgcacagccgaaagccaaatggtat

SEQ ID NO: 1428425 - DNA, 25 bp, Homo sapien
ctgcacagccgaaagccaaatggta

SEQ ID NO: 1428426 - DNA, 25 bp, Homo sapien
gagttgtctagattggtagaccaca

SEQ ID NO: 1428427 - DNA, 25 bp, Homo sapien
ctgagttgtctagattggtagacca

SEQ ID NO: 1428428 - DNA, 25 bp, Homo sapien
tgagttgtctagattggtagaccac

SEQ ID NO: 1428429 - DNA, 25 bp, Homo sapien
actgagttgtctagattggtagacc

SEQ ID NO: 1428430 - DNA, 25 bp, Homo sapien
acatcagattcagttccagtgtgca

SEQ ID NO: 1428431 - DNA, 25 bp, Homo sapien
ttccagtgtgcaaggtttatgtttc

SEQ ID NO: 1428432 - DNA, 25 bp, Homo sapien
tgagtttctctgacagcgcctactg

SEQ ID NO: 1428433 - DNA, 25 bp, Homo sapien
gcctactgcatgtctatttgcacca

SEQ ID NO: 1428434 - DNA, 25 bp, Homo sapien
cagtagtttgataagtatgtgacaa

SEQ ID NO: 1428435 - DNA, 25 bp, Homo sapien
tcagaggaatattgacagggatagt

SEQ ID NO: 1428436 - DNA, 25 bp, Homo sapien
atatattaacaaatgattcagtcca

SEQ ID NO: 1428437 - DNA, 25 bp, Homo sapien
gtccaccaagacataacaatcccaa

SEQ ID NO: 1428438 - DNA, 25 bp, Homo sapien
taggatccatcaaattaaagtcaac

SEQ ID NO: 1428439 - DNA, 25 bp, Homo sapien
tccatcaaattaaagtcaacactcc

SEQ ID NO: 1428440 - DNA, 25 bp, Homo sapien
tcaaattaaagtcaacactccaaca

SEQ ID NO: 1428441 - DNA, 25 bp, Homo sapien
taaagtcaacactccaacacctctt

SEQ ID NO: 1428442 - DNA, 25 bp, Homo sapien
tgccttcataatcactgctagctaa

SEQ ID NO: 1428443 - DNA, 25 bp, Homo sapien
tatggtaactactccaactgataca

SEQ ID NO: 1428444 - DNA, 25 bp, Homo sapien
gctagctaacaggttcttatggtaa

SEQ ID NO: 1428445 - DNA, 25 bp, Homo sapien
caggttcttatggtaactactccaa

SEQ ID NO: 1428446 - DNA, 25 bp, Homo sapien
ctgattttcgaattgcaggtcattt

SEQ ID NO: 1428447 - DNA, 25 bp, Homo sapien
tccagcaatcgcaaaatagtcacaa

SEQ ID NO: 1428448 - DNA, 25 bp, Homo sapien
cgaattgcaggtcatttcattctca

SEQ ID NO: 1428449 - DNA, 25 bp, Homo sapien
ttctttgtaactccagcaatcgcaa

SEQ ID NO: 1428450 - DNA, 25 bp, Homo sapien
catgtcactgaaggagaaatactac

SEQ ID NO: 1428451 - DNA, 25 bp, Homo sapien
gatttcaggcgtcagacatggtgcc

SEQ ID NO: 1428452 - DNA, 25 bp, Homo sapien
tgtacaacctcaattgaactgctgc

SEQ ID NO: 1428453 - DNA, 25 bp, Homo sapien
gttaagtgtcactgactagggcaca

SEQ ID NO: 1428454 - DNA, 25 bp, Homo sapien
cagggagaaaactgacacataagta

SEQ ID NO: 1428455 - DNA, 25 bp, Homo sapien
tgctgtcaaaagaattaagggccgg

SEQ ID NO: 1428456 - DNA, 25 bp, Homo sapien
aaatgctgtcaaaagaattaagggc

SEQ ID NO: 1428457 - DNA, 25 bp, Homo sapien
atagcttaaatacattacagggaga

SEQ ID NO: 1428458 - DNA, 25 bp, Homo sapien
tactgctatacaacgttcatttctg

SEQ ID NO: 1428459 - DNA, 25 bp, Homo sapien
tagtcaagtgattaagcagcaaggc

SEQ ID NO: 1428460 - DNA, 25 bp, Homo sapien
ttaaacagtgactagttaggctgag

SEQ ID NO: 1428461 - DNA, 25 bp, Homo sapien
gaaatacgtaattcagctgtaggaa

SEQ ID NO: 1428462 - DNA, 25 bp, Homo sapien
taagtcccatccttgcttacctact

SEQ ID NO: 1428463 - DNA, 25 bp, Homo sapien
gatgtgctcctagatgtaaccaaca

SEQ ID NO: 1428464 - DNA, 25 bp, Homo sapien
tcttgtcattccgaacgatgtgctc

SEQ ID NO: 1428465 - DNA, 25 bp, Homo sapien
gtaaccaacatttatacttgtgcgg

SEQ ID NO: 1428466 - DNA, 25 bp, Homo sapien
tatccattatattgtctaatgcagg

SEQ ID NO: 1428467 - DNA, 25 bp, Homo sapien
tacctgctatgtagctccgaaatga

SEQ ID NO: 1428468 - DNA, 25 bp, Homo sapien
cacaatctacgttatacctccaaaa

SEQ ID NO: 1428469 - DNA, 25 bp, Homo sapien
tgctgaacattccaaacttactaat

SEQ ID NO: 1428470 - DNA, 25 bp, Homo sapien
gaattaatggacagactttattcca

SEQ ID NO: 1428471 - DNA, 25 bp, Homo sapien
caacctgctagataattgctgacct

SEQ ID NO: 1428472 - DNA, 25 bp, Homo sapien
tgaaatttgactcgcaggtattagt

SEQ ID NO: 1428473 - DNA, 25 bp, Homo sapien
ggtgtgagccattgatatctattaa

SEQ ID NO: 1428474 - DNA, 25 bp, Homo sapien
tgtccccaaaatatcagttaacaca

SEQ ID NO: 1428475 - DNA, 25 bp, Homo sapien
gataaatcccttcaaaccattgcag

SEQ ID NO: 1428476 - DNA, 25 bp, Homo sapien
cccttcaaaccattgcagcaagaaa

SEQ ID NO: 1428477 - DNA, 25 bp, Homo sapien
aaatgtgagttttaccagataaatc

SEQ ID NO: 1428478 - DNA, 25 bp, Homo sapien
cctgtagctctcgttaaaccaatga

SEQ ID NO: 1428479 - DNA, 25 bp, Homo sapien
tatagctaagttgcctaaacatagg

SEQ ID NO: 1428480 - DNA, 25 bp, Homo sapien
gcgcctggcccgaaaatgttttatg

SEQ ID NO: 1428481 - DNA, 25 bp, Homo sapien
tactatatgacaggccaagtgacag

SEQ ID NO: 1428482 - DNA, 25 bp, Homo sapien
acattctttactaccttcatatgaa

SEQ ID NO: 1428483 - DNA, 25 bp, Homo sapien
actgctctaagacaatatatgctca

SEQ ID NO: 1428484 - DNA, 25 bp, Homo sapien
tagttcagtaaattctggaaccaac

SEQ ID NO: 1428485 - DNA, 25 bp, Homo sapien
ttttaaaggctaatggacacactag

SEQ ID NO: 1428486 - DNA, 25 bp, Homo sapien
ctcccagactcaatcgatgcccctg

SEQ ID NO: 1428487 - DNA, 25 bp, Homo sapien
cctaaagcttaggattttaagcgtg

SEQ ID NO: 1428488 - DNA, 25 bp, Homo sapien
agactcaatcgatgcccctgcctca

SEQ ID NO: 1428489 - DNA, 25 bp, Homo sapien
ccctttttcaagcttgtagtagcta

SEQ ID NO: 1428490 - DNA, 25 bp, Homo sapien
taagaagcccatatctaccatcagt

SEQ ID NO: 1428491 - DNA, 25 bp, Homo sapien
tgtaagggatcaaaacttgccaccc

SEQ ID NO: 1428492 - DNA, 25 bp, Homo sapien
taaacataggatgagctttctgtcc

SEQ ID NO: 1428493 - DNA, 25 bp, Homo sapien
ccaaaatatgtcactctgccataaa

SEQ ID NO: 1428494 - DNA, 25 bp, Homo sapien
aatgtgtccaggaaactagaagcca

SEQ ID NO: 1428495 - DNA, 25 bp, Homo sapien
tagtaaatcaggattgcacgactgc

SEQ ID NO: 1428496 - DNA, 25 bp, Homo sapien
gaagccatcacctcaagagaactct

SEQ ID NO: 1428497 - DNA, 25 bp, Homo sapien
ttgctaagtacaacaacagcccagc

SEQ ID NO: 1428498 - DNA, 25 bp, Homo sapien
gactgaagggtatggtcttaactcc

SEQ ID NO: 1428499 - DNA, 25 bp, Homo sapien
taggaccatcttctacttatgagag

SEQ ID NO: 1428500 - DNA, 25 bp, Homo sapien
agtaaacaaatgctgccaccttgtg

SEQ ID NO: 1428501 - DNA, 25 bp, Homo sapien
gtatgtcaccaattccgtaccttgt

SEQ ID NO: 1428502 - DNA, 25 bp, Homo sapien
catatgacaatgtggctaaaggtcg

SEQ ID NO: 1428503 - DNA, 25 bp, Homo sapien
tatagagatcactagcatatgacaa

SEQ ID NO: 1428504 - DNA, 25 bp, Homo sapien
taaaggtcgtactgaattatatcga

SEQ ID NO: 1428505 - DNA, 25 bp, Homo sapien
tcgagtaaacttggacaagcattcc

SEQ ID NO: 1428506 - DNA, 25 bp, Homo sapien
aatgagcagtaagtcgttttcgtct

SEQ ID NO: 1428507 - DNA, 25 bp, Homo sapien
cgtgctattataccaaggctgtttc

SEQ ID NO: 1428508 - DNA, 25 bp, Homo sapien
gttttcgtcttgatgctaacgtgct

SEQ ID NO: 1428509 - DNA, 25 bp, Homo sapien
tccttgtagaaaagtaacactgctc

SEQ ID NO: 1428510 - DNA, 25 bp, Homo sapien
gggagaagggtatgaacacacactt

SEQ ID NO: 1428511 - DNA, 25 bp, Homo sapien
ttcatctgacaaacggctaaaatct

SEQ ID NO: 1428512 - DNA, 25 bp, Homo sapien
gtgatcatcatcattggccatcaga

SEQ ID NO: 1428513 - DNA, 25 bp, Homo sapien
cggctaaaatctagaatctacaaag

SEQ ID NO: 1428514 - DNA, 25 bp, Homo sapien
tcatctcggtattgtgggatcacat

SEQ ID NO: 1428515 - DNA, 25 bp, Homo sapien
tttgaaaggagcataaggcaagatg

SEQ ID NO: 1428516 - DNA, 25 bp, Homo sapien
agtataatatttgcccctgaagaac

SEQ ID NO: 1428517 - DNA, 25 bp, Homo sapien
tgtgttttacctccatttcaaagaa

SEQ ID NO: 1428518 - DNA, 25 bp, Homo sapien
aggtgtggaggcaggcgccggtaat

SEQ ID NO: 1428519 - DNA, 25 bp, Homo sapien
tgcagtgagccaagatagcgccatt

SEQ ID NO: 1428520 - DNA, 25 bp, Homo sapien
ggagaatcgcttgtacctgggaggt

SEQ ID NO: 1428521 - DNA, 25 bp, Homo sapien
cccagctacttgggagggtgaggca

SEQ ID NO: 1428522 - DNA, 25 bp, Homo sapien
ggggacaagagcgagactttgtctc

SEQ ID NO: 1428523 - DNA, 25 bp, Homo sapien
gggacaagagcgagactttgtctca

SEQ ID NO: 1428524 - DNA, 25 bp, Homo sapien
gggaataaacagaatgcccgtcact

SEQ ID NO: 1428525 - DNA, 25 bp, Homo sapien
gcttgttcctgtgaaccaaacagta

SEQ ID NO: 1428526 - DNA, 25 bp, Homo sapien
aatgcccgtcactcggaggtttcct

SEQ ID NO: 1428527 - DNA, 25 bp, Homo sapien
agcaattatcctgccgggtgatggg

SEQ ID NO: 1428528 - DNA, 25 bp, Homo sapien
taataatcaattagggtaactggta

SEQ ID NO: 1428529 - DNA, 25 bp, Homo sapien
tcttgattcaaggatctacattttt

SEQ ID NO: 1428530 - DNA, 25 bp, Homo sapien
tatcaaatgctacaactcattcacc

SEQ ID NO: 1428531 - DNA, 25 bp, Homo sapien
tttagaaaagttgctatatcatggt

SEQ ID NO: 1428532 - DNA, 25 bp, Homo sapien
tgactataaccacggcctcctgggt

SEQ ID NO: 1428533 - DNA, 25 bp, Homo sapien
tctcagctgactataaccacggcct

SEQ ID NO: 1428534 - DNA, 25 bp, Homo sapien
tgatctcagctgactataaccacgg

SEQ ID NO: 1428535 - DNA, 25 bp, Homo sapien
gttgcccaggctatattagggtaat

SEQ ID NO: 1428536 - DNA, 25 bp, Homo sapien
gaaatccatctagatctacagtaag

SEQ ID NO: 1428537 - DNA, 25 bp, Homo sapien
tggtggtgcacttccatagggccag

SEQ ID NO: 1428538 - DNA, 25 bp, Homo sapien
gcctattaggcctcaaaaataagct

SEQ ID NO: 1428539 - DNA, 25 bp, Homo sapien
actgccagggatagtgattttcacc

SEQ ID NO: 1428540 - DNA, 25 bp, Homo sapien
ttatactcatggtatcattaaagca

SEQ ID NO: 1428541 - DNA, 25 bp, Homo sapien
attatactcatggtatcattaaagc

SEQ ID NO: 1428542 - DNA, 25 bp, Homo sapien
ccactgaaacctggaggttggctgt

SEQ ID NO: 1428543 - DNA, 25 bp, Homo sapien
cactgaaacctggaggttggctgta

SEQ ID NO: 1428544 - DNA, 25 bp, Homo sapien
actgaaacctggaggttggctgtat

SEQ ID NO: 1428545 - DNA, 25 bp, Homo sapien
catcactttttaagtatcaactgaa

SEQ ID NO: 1428546 - DNA, 25 bp, Homo sapien
gagaacagggttctagggtctgtca

SEQ ID NO: 1428547 - DNA, 25 bp, Homo sapien
tcaagaacccaaggatattttatag

SEQ ID NO: 1428548 - DNA, 25 bp, Homo sapien
tggaatcaaaaagtctatttacacc

SEQ ID NO: 1428549 - DNA, 25 bp, Homo sapien
gactttggcatcaagttcaactcct

SEQ ID NO: 1428550 - DNA, 25 bp, Homo sapien
catggtttagggtcagaattaagga

SEQ ID NO: 1428551 - DNA, 25 bp, Homo sapien
gagtatcccctatattattgccatg

SEQ ID NO: 1428552 - DNA, 25 bp, Homo sapien
cagtgttttatacacgctggctcaa

SEQ ID NO: 1428553 - DNA, 25 bp, Homo sapien
agatcctgtgcatatcagaactgaa

SEQ ID NO: 1428554 - DNA, 25 bp, Homo sapien
aaagatcctgtgcatatcagaactg

SEQ ID NO: 1428555 - DNA, 25 bp, Homo sapien
gtattccattgacaaagatcctgtg

SEQ ID NO: 1428556 - DNA, 25 bp, Homo sapien
atcctgtgcatatcagaactgaatt

SEQ ID NO: 1428557 - DNA, 25 bp, Homo sapien
taaaactatttgtctgataagattc

SEQ ID NO: 1428558 - DNA, 25 bp, Homo sapien
aaaactatttgtctgataagattcc

SEQ ID NO: 1428559 - DNA, 25 bp, Homo sapien
aaactatttgtctgataagattcca

SEQ ID NO: 1428560 - DNA, 25 bp, Homo sapien
ctaaaactatttgtctgataagatt

SEQ ID NO: 1428561 - DNA, 25 bp, Homo sapien
tcaattgcaagtgtgaagcttgtac

SEQ ID NO: 1428562 - DNA, 25 bp, Homo sapien
gtgatggagaaggagcttcaaattg

SEQ ID NO: 1428563 - DNA, 25 bp, Homo sapien
gagaaggagcttcaaattgaggcac

SEQ ID NO: 1428564 - DNA, 25 bp, Homo sapien
tgatggagaaggagcttcaaattga

SEQ ID NO: 1428565 - DNA, 25 bp, Homo sapien
tggagaaggagcttcaaattgaggc

SEQ ID NO: 1428566 - DNA, 25 bp, Homo sapien
ttccaaaacacttagctccttctgg

SEQ ID NO: 1428567 - DNA, 25 bp, Homo sapien
tccaaaacacttagctccttctgga

SEQ ID NO: 1428568 - DNA, 25 bp, Homo sapien
caaacgctgttaataggcaagttct

SEQ ID NO: 1428569 - DNA, 25 bp, Homo sapien
gcaattctgagtgtggaatgaacca

SEQ ID NO: 1428570 - DNA, 25 bp, Homo sapien
gagctatcctatggagaagcccctg

SEQ ID NO: 1428571 - DNA, 25 bp, Homo sapien
tacttgttccttttgagaggcagcc

SEQ ID NO: 1428572 - DNA, 25 bp, Homo sapien
ctccagaaatgcagattgccaggct

SEQ ID NO: 1428573 - DNA, 25 bp, Homo sapien
tcaagcgaaaaagttctacggcatg

SEQ ID NO: 1428574 - DNA, 25 bp, Homo sapien
tcatccagaagtttaataacggaaa

SEQ ID NO: 1428575 - DNA, 25 bp, Homo sapien
ggccaaatgaagatcacacggaaga

SEQ ID NO: 1428576 - DNA, 25 bp, Homo sapien
ttccataagaatctgtagttgggct

SEQ ID NO: 1428577 - DNA, 25 bp, Homo sapien
gaattccataagaatctgtagttgg

SEQ ID NO: 1428578 - DNA, 25 bp, Homo sapien
tgaggaattccataagaatctgtag

SEQ ID NO: 1428579 - DNA, 25 bp, Homo sapien
gaggaattccataagaatctgtagt

SEQ ID NO: 1428580 - DNA, 25 bp, Homo sapien
cgctccccaaggtgaagcaattctt

SEQ ID NO: 1428581 - DNA, 25 bp, Homo sapien
gcagcctccgctccccaaggtgaag

SEQ ID NO: 1428582 - DNA, 25 bp, Homo sapien
aaaaccctagataactttatgtgtg

SEQ ID NO: 1428583 - DNA, 25 bp, Homo sapien
ctacttgggttcagattccctacct

SEQ ID NO: 1428584 - DNA, 25 bp, Homo sapien
tacaagtgagaactaaacgatgagg

SEQ ID NO: 1428585 - DNA, 25 bp, Homo sapien
catacacgatagaatgctatgcagc

SEQ ID NO: 1428586 - DNA, 25 bp, Homo sapien
aaatgtggtgtacatacacgataga

SEQ ID NO: 1428587 - DNA, 25 bp, Homo sapien
tatgtgaccaggatacccaaaggaa

SEQ ID NO: 1428588 - DNA, 25 bp, Homo sapien
gaaatattacatgttcccagcagcc

SEQ ID NO: 1428589 - DNA, 25 bp, Homo sapien
caggcactcaaaaaggttgtctcag

SEQ ID NO: 1428590 - DNA, 25 bp, Homo sapien
taaacacatgcaaattgagcttccc

SEQ ID NO: 1428591 - DNA, 25 bp, Homo sapien
cagccagagtagaaaaaccaagaaa

SEQ ID NO: 1428592 - DNA, 25 bp, Homo sapien
caaatgatccatcaggaaaatggac

SEQ ID NO: 1428593 - DNA, 25 bp, Homo sapien
tatggcacaaatccacagaagagca

SEQ ID NO: 1428594 - DNA, 25 bp, Homo sapien
aataccaagtgcttatatggcacaa

SEQ ID NO: 1428595 - DNA, 25 bp, Homo sapien
cacataccctaatgcgagcacaagg

SEQ ID NO: 1428596 - DNA, 25 bp, Homo sapien
agggcctctgctccacaatataaat

SEQ ID NO: 1428597 - DNA, 25 bp, Homo sapien
gatacctgatggtcccaatcccagg

SEQ ID NO: 1428598 - DNA, 25 bp, Homo sapien
ctccctattgctggtgtagcattca

SEQ ID NO: 1428599 - DNA, 25 bp, Homo sapien
taaatagggtcagttcttagctttc

SEQ ID NO: 1428600 - DNA, 25 bp, Homo sapien
tactgctaccaatggacacctgctg

SEQ ID NO: 1428601 - DNA, 25 bp, Homo sapien
catgtacttgtagtcttccagagaa

SEQ ID NO: 1428602 - DNA, 25 bp, Homo sapien
tcagagctgtcccaatcaaacaggc

SEQ ID NO: 1428603 - DNA, 25 bp, Homo sapien
acctcagggtagtatttgcttatgc

SEQ ID NO: 1428604 - DNA, 25 bp, Homo sapien
tagtaactccaacataagattgaca

SEQ ID NO: 1428605 - DNA, 25 bp, Homo sapien
cattggccaaatcaaggttatcttg

SEQ ID NO: 1428606 - DNA, 25 bp, Homo sapien
tcaaggttatcttggtcagttccca

SEQ ID NO: 1428607 - DNA, 25 bp, Homo sapien
gttcccaaccaatcttgaaatatct

SEQ ID NO: 1428608 - DNA, 25 bp, Homo sapien
aagaaacacaacaacttcctatgaa

SEQ ID NO: 1428609 - DNA, 25 bp, Homo sapien
gaagaaacacaacaacttcctatga

SEQ ID NO: 1428610 - DNA, 25 bp, Homo sapien
gaagactgttttagagactaaaaca

SEQ ID NO: 1428611 - DNA, 25 bp, Homo sapien
actgttttagagactaaaacaaatg

SEQ ID NO: 1428612 - DNA, 25 bp, Homo sapien
tgagtggtccaatttgaacctcttt

SEQ ID NO: 1428613 - DNA, 25 bp, Homo sapien
atttgaacctcttttcctcaaatct

SEQ ID NO: 1428614 - DNA, 25 bp, Homo sapien
gacagagtatgcacactggagggaa

SEQ ID NO: 1428615 - DNA, 25 bp, Homo sapien
gagaggagcagacagagtatgcaca

SEQ ID NO: 1428616 - DNA, 25 bp, Homo sapien
aatcagcctttcaggatcaggagag

SEQ ID NO: 1428617 - DNA, 25 bp, Homo sapien
agtatgcacactggagggaagtaag

SEQ ID NO: 1428618 - DNA, 25 bp, Homo sapien
cagatggtcaatattgtccacaaca

SEQ ID NO: 1428619 - DNA, 25 bp, Homo sapien
gaaattaggatacagatggtcaata

SEQ ID NO: 1428620 - DNA, 25 bp, Homo sapien
ccaagaaattaggatacagatggtc

SEQ ID NO: 1428621 - DNA, 25 bp, Homo sapien
gatacagatggtcaatattgtccac

SEQ ID NO: 1428622 - DNA, 25 bp, Homo sapien
atctattattgtcctccaaactctg

SEQ ID NO: 1428623 - DNA, 25 bp, Homo sapien
tcctccaaactctgatgaatacact

SEQ ID NO: 1428624 - DNA, 25 bp, Homo sapien
cacttgggacatctattattgtcct

SEQ ID NO: 1428625 - DNA, 25 bp, Homo sapien
caaactctgatgaatacacttgtag

SEQ ID NO: 1428626 - DNA, 25 bp, Homo sapien
tcacagggacctaaagactgaagta

SEQ ID NO: 1428627 - DNA, 25 bp, Homo sapien
tctgacaaggctaggattaccataa

SEQ ID NO: 1428628 - DNA, 25 bp, Homo sapien
taagtattactggtaacactcagga

SEQ ID NO: 1428629 - DNA, 25 bp, Homo sapien
aatgccaggcacataacggatatgc

SEQ ID NO: 1428630 - DNA, 25 bp, Homo sapien
agttccatagccctcacatgttagg

SEQ ID NO: 1428631 - DNA, 25 bp, Homo sapien
gaggctacggttaatgactgaagtt

SEQ ID NO: 1428632 - DNA, 25 bp, Homo sapien
ttactagaaagttgacacaagaggc

SEQ ID NO: 1428633 - DNA, 25 bp, Homo sapien
cagccagaatttacgttactagaaa

SEQ ID NO: 1428634 - DNA, 25 bp, Homo sapien
tttgtcatgtatgcttcttcaatca

SEQ ID NO: 1428635 - DNA, 25 bp, Homo sapien
catgtatgcttcttcaatcatatca

SEQ ID NO: 1428636 - DNA, 25 bp, Homo sapien
tatgcttcttcaatcatatcaaagc

SEQ ID NO: 1428637 - DNA, 25 bp, Homo sapien
cttcaatcatatcaaagcagatggg

SEQ ID NO: 1428638 - DNA, 25 bp, Homo sapien
gcagagagctgttaaagtcacacag

SEQ ID NO: 1428639 - DNA, 25 bp, Homo sapien
taggtaccaactactaggcacagtt

SEQ ID NO: 1428640 - DNA, 25 bp, Homo sapien
tctgaccatgaagacaaaaacctta

SEQ ID NO: 1428641 - DNA, 25 bp, Homo sapien
gcagtgttcagagatacaacagcca

SEQ ID NO: 1428642 - DNA, 25 bp, Homo sapien
caccctgcctcgctactccaacatt

SEQ ID NO: 1428643 - DNA, 25 bp, Homo sapien
ctgcctcgctactccaacattcctt

SEQ ID NO: 1428644 - DNA, 25 bp, Homo sapien
ctccaacattccttcaccccaccaa

SEQ ID NO: 1428645 - DNA, 25 bp, Homo sapien
accccaccaaccaggagctcgaatg

SEQ ID NO: 1428646 - DNA, 25 bp, Homo sapien
gagaggtcgcttcctgctgccgctg

SEQ ID NO: 1428647 - DNA, 25 bp, Homo sapien
gggcttgtcccagcggagcccgacc

SEQ ID NO: 1428648 - DNA, 25 bp, Homo sapien
agtcgttgcttttgtcctcgtagga

SEQ ID NO: 1428649 - DNA, 25 bp, Homo sapien
gataaagacgaggaggcggaagtca

SEQ ID NO: 1428650 - DNA, 25 bp, Homo sapien
ctaaaaaagcggagtagaaggcact

SEQ ID NO: 1428651 - DNA, 25 bp, Homo sapien
tctgtctgtcccaagccgctttcgt

SEQ ID NO: 1428652 - DNA, 25 bp, Homo sapien
gttccagaaaacgtgccagagggca

SEQ ID NO: 1428653 - DNA, 25 bp, Homo sapien
gagggcaggccgtcttaatacagtg

SEQ ID NO: 1428654 - DNA, 25 bp, Homo sapien
caggccatgaggagatgcgcgaagg

SEQ ID NO: 1428655 - DNA, 25 bp, Homo sapien
tctttttgcttttatgccaaagagc

SEQ ID NO: 1428656 - DNA, 25 bp, Homo sapien
tcctcctcagtgatgactagggctt

SEQ ID NO: 1428657 - DNA, 25 bp, Homo sapien
ttgcttttatgccaaagagctgggc

SEQ ID NO: 1428658 - DNA, 25 bp, Homo sapien
gatgccagtggtttgggccacattc

SEQ ID NO: 1428659 - DNA, 25 bp, Homo sapien
ctggatggccaatatcagttcttca

SEQ ID NO: 1428660 - DNA, 25 bp, Homo sapien
gatggccaatatcagttcttcaaca

SEQ ID NO: 1428661 - DNA, 25 bp, Homo sapien
ccaatcaatagagatgccagtggtt

SEQ ID NO: 1428662 - DNA, 25 bp, Homo sapien
ttggtgtgatagtgtatagtgtggc

SEQ ID NO: 1428663 - DNA, 25 bp, Homo sapien
caccttggtgtgatagtgtatagtg

SEQ ID NO: 1428664 - DNA, 25 bp, Homo sapien
ggtgtgatagtgtatagtgtggcac

SEQ ID NO: 1428665 - DNA, 25 bp, Homo sapien
ccttggtgtgatagtgtatagtgtg

SEQ ID NO: 1428666 - DNA, 25 bp, Homo sapien
gatgggtcctgactcggggtatggg

SEQ ID NO: 1428667 - DNA, 25 bp, Homo sapien
gggctggatgggtcctgactcgggg

SEQ ID NO: 1428668 - DNA, 25 bp, Homo sapien
ctgactcggggtatggggcagtgcg

SEQ ID NO: 1428669 - DNA, 25 bp, Homo sapien
tggggcagtgcggtgtgcttttgct

SEQ ID NO: 1428670 - DNA, 25 bp, Homo sapien
taatgggccagctggttgaaccact

SEQ ID NO: 1428671 - DNA, 25 bp, Homo sapien
ctaatgggccagctggttgaaccac

SEQ ID NO: 1428672 - DNA, 25 bp, Homo sapien
ctggttgaaccacttggccacacat

SEQ ID NO: 1428673 - DNA, 25 bp, Homo sapien
cagctggttgaaccacttggccaca

SEQ ID NO: 1428674 - DNA, 25 bp, Homo sapien
ttcagccatgggtcaagtaacttgc

SEQ ID NO: 1428675 - DNA, 25 bp, Homo sapien
tcaagtaacttgctctcatgtctct

SEQ ID NO: 1428676 - DNA, 25 bp, Homo sapien
gttcagccatgggtcaagtaacttg

SEQ ID NO: 1428677 - DNA, 25 bp, Homo sapien
ttgttcagccatgggtcaagtaact

SEQ ID NO: 1428678 - DNA, 25 bp, Homo sapien
cattgtctgattccttagaaccagg

SEQ ID NO: 1428679 - DNA, 25 bp, Homo sapien
tgtgctagaaggaccattgccccag

SEQ ID NO: 1428680 - DNA, 25 bp, Homo sapien
cttgccccccatagggtggagagag

SEQ ID NO: 1428681 - DNA, 25 bp, Homo sapien
ccaatccagccagggtaataagggt

SEQ ID NO: 1428682 - DNA, 25 bp, Homo sapien
ccccggctaagctgttgttatcttt

SEQ ID NO: 1428683 - DNA, 25 bp, Homo sapien
cctcccccggctaagctgttgttat

SEQ ID NO: 1428684 - DNA, 25 bp, Homo sapien
tcccccggctaagctgttgttatct

SEQ ID NO: 1428685 - DNA, 25 bp, Homo sapien
cccggctaagctgttgttatctttt

SEQ ID NO: 1428686 - DNA, 25 bp, Homo sapien
cacataatagtctgttgcagcagag

SEQ ID NO: 1428687 - DNA, 25 bp, Homo sapien
ggtccaaagcagactcacataatag

SEQ ID NO: 1428688 - DNA, 25 bp, Homo sapien
tcaggatccgtgtcatagagtcatc

SEQ ID NO: 1428689 - DNA, 25 bp, Homo sapien
tgttatttcaaatccagtggtccaa

SEQ ID NO: 1428690 - DNA, 25 bp, Homo sapien
taagcagacattagctcatctatgc

SEQ ID NO: 1428691 - DNA, 25 bp, Homo sapien
ttttcaagtttgtacaggtatgacc

SEQ ID NO: 1428692 - DNA, 25 bp, Homo sapien
caaatagtctactcccctttcaggc

SEQ ID NO: 1428693 - DNA, 25 bp, Homo sapien
ccctatgcaggttaatcagaaacaa

SEQ ID NO: 1428694 - DNA, 25 bp, Homo sapien
tgctcccgccaaaccttgttttcat

SEQ ID NO: 1428695 - DNA, 25 bp, Homo sapien
catcaacaagtatggctctggcagt

SEQ ID NO: 1428696 - DNA, 25 bp, Homo sapien
gacccgtcctactatagaggtggta

SEQ ID NO: 1428697 - DNA, 25 bp, Homo sapien
gaggtggtaaaatgctcccgccaaa

SEQ ID NO: 1428698 - DNA, 25 bp, Homo sapien
taagggcagatcatggttctcatgc

SEQ ID NO: 1428699 - DNA, 25 bp, Homo sapien
ttttgaacgcggagacagatttggg

SEQ ID NO: 1428700 - DNA, 25 bp, Homo sapien
taacttgcttggttactaaggacca

SEQ ID NO: 1428701 - DNA, 25 bp, Homo sapien
tttgggtccactgaatatctgctgg

SEQ ID NO: 1428702 - DNA, 25 bp, Homo sapien
gatgaagtatatggagtactacagg

SEQ ID NO: 1428703 - DNA, 25 bp, Homo sapien
tatatggagtactacaggggaaaat

SEQ ID NO: 1428704 - DNA, 25 bp, Homo sapien
tggagtactacaggggaaaatggaa

SEQ ID NO: 1428705 - DNA, 25 bp, Homo sapien
atgaagtatatggagtactacaggg

SEQ ID NO: 1428706 - DNA, 25 bp, Homo sapien
tggttgtaaaagaagcctcagcatc

SEQ ID NO: 1428707 - DNA, 25 bp, Homo sapien
ttcaagatccagatcaacttccgtg

SEQ ID NO: 1428708 - DNA, 25 bp, Homo sapien
gctgcagtttgcttaacgttcccca

SEQ ID NO: 1428709 - DNA, 25 bp, Homo sapien
tgcttgctccagtttgcctcaaaat

SEQ ID NO: 1428710 - DNA, 25 bp, Homo sapien
ttcttcctacagttgaaggattctg

SEQ ID NO: 1428711 - DNA, 25 bp, Homo sapien
ttcctacagttgaaggattctgcta

SEQ ID NO: 1428712 - DNA, 25 bp, Homo sapien
tctttagaagttgcagaatggagaa

SEQ ID NO: 1428713 - DNA, 25 bp, Homo sapien
gttgtttctttagaagttgcagaat

SEQ ID NO: 1428714 - DNA, 25 bp, Homo sapien
taactgtgcagtattcaaaattcca

SEQ ID NO: 1428715 - DNA, 25 bp, Homo sapien
cactgtcccaatgcaaactgcctag

SEQ ID NO: 1428716 - DNA, 25 bp, Homo sapien
aactgcctagctctgtggtaatgtg

SEQ ID NO: 1428717 - DNA, 25 bp, Homo sapien
tgtggctcattgtcagagataatcc

SEQ ID NO: 1428718 - DNA, 25 bp, Homo sapien
gcagaaactgtctagtttggttaga

SEQ ID NO: 1428719 - DNA, 25 bp, Homo sapien
tctagtttggttagatctcatttgt

SEQ ID NO: 1428720 - DNA, 25 bp, Homo sapien
aactgtctagtttggttagatctca

SEQ ID NO: 1428721 - DNA, 25 bp, Homo sapien
tgtgcagaaactgtctagtttggtt

SEQ ID NO: 1428722 - DNA, 25 bp, Homo sapien
gatactccttacatgcctctgcaga

SEQ ID NO: 1428723 - DNA, 25 bp, Homo sapien
gggatgcgtcagacacttcaccaca

SEQ ID NO: 1428724 - DNA, 25 bp, Homo sapien
gctctttgctcactctaacgtgtga

SEQ ID NO: 1428725 - DNA, 25 bp, Homo sapien
tgtactgctggccattggttcccat

SEQ ID NO: 1428726 - DNA, 25 bp, Homo sapien
ctgtccagaaaacatgatggaattt

SEQ ID NO: 1428727 - DNA, 25 bp, Homo sapien
gtgaagatgactccacatccatcca

SEQ ID NO: 1428728 - DNA, 25 bp, Homo sapien
ttcctggtgaagatgactccacatc

SEQ ID NO: 1428729 - DNA, 25 bp, Homo sapien
cacatttttcacctagcctttctag

SEQ ID NO: 1428730 - DNA, 25 bp, Homo sapien
tcttcacctcaatggacagttgtgt

SEQ ID NO: 1428731 - DNA, 25 bp, Homo sapien
ctgctcttggcccaacataagttgt

SEQ ID NO: 1428732 - DNA, 25 bp, Homo sapien
cataagttgttactggcctcagtgc

SEQ ID NO: 1428733 - DNA, 25 bp, Homo sapien
tggcccaacataagttgttactggc

SEQ ID NO: 1428734 - DNA, 25 bp, Homo sapien
taatggagtgttactgaaaagaaaa

SEQ ID NO: 1428735 - DNA, 25 bp, Homo sapien
agagggctacctcctttagtaagca

SEQ ID NO: 1428736 - DNA, 25 bp, Homo sapien
ttttgtccttatggagtcctccagg

SEQ ID NO: 1428737 - DNA, 25 bp, Homo sapien
ctgggaataactctggctacagatg

SEQ ID NO: 1428738 - DNA, 25 bp, Homo sapien
cactgagaaccatatgtgctttcac

SEQ ID NO: 1428739 - DNA, 25 bp, Homo sapien
gtcctgaatccaaaagctgaagctc

SEQ ID NO: 1428740 - DNA, 25 bp, Homo sapien
tggtcctgaatccaaaagctgaagc

SEQ ID NO: 1428741 - DNA, 25 bp, Homo sapien
ctgtggtcctgaatccaaaagctga

SEQ ID NO: 1428742 - DNA, 25 bp, Homo sapien
cctgaatccaaaagctgaagctcat

SEQ ID NO: 1428743 - DNA, 25 bp, Homo sapien
tattgtaatgggacagtgtcaggga

SEQ ID NO: 1428744 - DNA, 25 bp, Homo sapien
gttttattgtaatgggacagtgtca

SEQ ID NO: 1428745 - DNA, 25 bp, Homo sapien
ttttattgtaatgggacagtgtcag

SEQ ID NO: 1428746 - DNA, 25 bp, Homo sapien
ttattgtaatgggacagtgtcaggg

SEQ ID NO: 1428747 - DNA, 25 bp, Homo sapien
tcacaagcttggatttgaagtttta

SEQ ID NO: 1428748 - DNA, 25 bp, Homo sapien
cacaagcttggatttgaagttttag

SEQ ID NO: 1428749 - DNA, 25 bp, Homo sapien
acaagcttggatttgaagttttagc

SEQ ID NO: 1428750 - DNA, 25 bp, Homo sapien
ctctctcgacctgtaactgggcctc

SEQ ID NO: 1428751 - DNA, 25 bp, Homo sapien
agcttggcttggcagtattgctctg

SEQ ID NO: 1428752 - DNA, 25 bp, Homo sapien
aagaagtctctatgcctccccagct

SEQ ID NO: 1428753 - DNA, 25 bp, Homo sapien
ttgctctgtgcaacagtctccaaga

SEQ ID NO: 1428754 - DNA, 25 bp, Homo sapien
gccgctccatggcttttgggcaggc

SEQ ID NO: 1428755 - DNA, 25 bp, Homo sapien
cagcgctggataagtctcagtaaca

SEQ ID NO: 1428756 - DNA, 25 bp, Homo sapien
aagggcagcgctggataagtctcag

SEQ ID NO: 1428757 - DNA, 25 bp, Homo sapien
ttttgggcaggctgacctggaatga

SEQ ID NO: 1428758 - DNA, 25 bp, Homo sapien
gactgcatctgggagtactcctctc

SEQ ID NO: 1428759 - DNA, 25 bp, Homo sapien
actgcatctgggagtactcctctct

SEQ ID NO: 1428760 - DNA, 25 bp, Homo sapien
cgctttcctcttgtcacctcgttct

SEQ ID NO: 1428761 - DNA, 25 bp, Homo sapien
tctgcccttggcctacctgcaccac

SEQ ID NO: 1428762 - DNA, 25 bp, Homo sapien
agctgggaacacatgtgcctgccac

SEQ ID NO: 1428763 - DNA, 25 bp, Homo sapien
gggaacacatgtgcctgccaccacg

SEQ ID NO: 1428764 - DNA, 25 bp, Homo sapien
gtagctgggaacacatgtgcctgcc

SEQ ID NO: 1428765 - DNA, 25 bp, Homo sapien
ctgggaacacatgtgcctgccacca

SEQ ID NO: 1428766 - DNA, 25 bp, Homo sapien
gaccttgctactgttctttgctaga

SEQ ID NO: 1428767 - DNA, 25 bp, Homo sapien
ggtactcagaatccaactgggaagt

SEQ ID NO: 1428768 - DNA, 25 bp, Homo sapien
gattttggcaaccttggccaggtac

SEQ ID NO: 1428769 - DNA, 25 bp, Homo sapien
ctttgctagagttggtttgattttg

SEQ ID NO: 1428770 - DNA, 25 bp, Homo sapien
gattttcttagcctgaaacctgatt

SEQ ID NO: 1428771 - DNA, 25 bp, Homo sapien
tggtgactatgtggtgattttctta

SEQ ID NO: 1428772 - DNA, 25 bp, Homo sapien
tatgtggtgattttcttagcctgaa

SEQ ID NO: 1428773 - DNA, 25 bp, Homo sapien
gactatgtggtgattttcttagcct

SEQ ID NO: 1428774 - DNA, 25 bp, Homo sapien
agtggagtctgttcagcaccaccag

SEQ ID NO: 1428775 - DNA, 25 bp, Homo sapien
cagcaccaccagctgattttggcat

SEQ ID NO: 1428776 - DNA, 25 bp, Homo sapien
atcatctaaggtggggagtggagtc

SEQ ID NO: 1428777 - DNA, 25 bp, Homo sapien
cgatcatctaaggtggggagtggag

SEQ ID NO: 1428778 - DNA, 25 bp, Homo sapien
actataccctgttgcctctccttgg

SEQ ID NO: 1428779 - DNA, 25 bp, Homo sapien
aactctgaagctgtttatggattcc

SEQ ID NO: 1428780 - DNA, 25 bp, Homo sapien
ccttggtgactgctgactgagggct

SEQ ID NO: 1428781 - DNA, 25 bp, Homo sapien
tatggattcctctactccttgcaac

SEQ ID NO: 1428782 - DNA, 25 bp, Homo sapien
tgcatggtcaaatctgcgtccaggt

SEQ ID NO: 1428783 - DNA, 25 bp, Homo sapien
ggtttgtgtattagggaagccaagc

SEQ ID NO: 1428784 - DNA, 25 bp, Homo sapien
gaaaaaggcacctgcttaaacagtg

SEQ ID NO: 1428785 - DNA, 25 bp, Homo sapien
tgtgacggagctttcccatctgggc

SEQ ID NO: 1428786 - DNA, 25 bp, Homo sapien
tttgtctaatgttttcttttctctc

SEQ ID NO: 1428787 - DNA, 25 bp, Homo sapien
ttgtctaatgttttcttttctctct

SEQ ID NO: 1428788 - DNA, 25 bp, Homo sapien
gctttgtctaatgttttcttttctc

SEQ ID NO: 1428789 - DNA, 25 bp, Homo sapien
ttgctttgtctaatgttttcttttc

SEQ ID NO: 1428790 - DNA, 25 bp, Homo sapien
cacactctcaagtgtcaggattacc

SEQ ID NO: 1428791 - DNA, 25 bp, Homo sapien
tccccaacagttgggatggacccca

SEQ ID NO: 1428792 - DNA, 25 bp, Homo sapien
ttcctaccatttcattccgttcata

SEQ ID NO: 1428793 - DNA, 25 bp, Homo sapien
ccaacagttgggatggaccccagga

SEQ ID NO: 1428794 - DNA, 25 bp, Homo sapien
tggctgccaggatttgtatggaacg

SEQ ID NO: 1428795 - DNA, 25 bp, Homo sapien
actcaggagtcgctccaatttcctc

SEQ ID NO: 1428796 - DNA, 25 bp, Homo sapien
tcatccagttcaaatgcccgggtgc

SEQ ID NO: 1428797 - DNA, 25 bp, Homo sapien
ctggtgcagttaggcagacgagaat

SEQ ID NO: 1428798 - DNA, 25 bp, Homo sapien
cattctcaggagaactcatgctgga

SEQ ID NO: 1428799 - DNA, 25 bp, Homo sapien
ggaatccactttggtcctgttccat

SEQ ID NO: 1428800 - DNA, 25 bp, Homo sapien
gctttcaggtctagccttggctgag

SEQ ID NO: 1428801 - DNA, 25 bp, Homo sapien
actttggtcctgttccattctcagg

SEQ ID NO: 1428802 - DNA, 25 bp, Homo sapien
ccccttctaactttgtggttgatgt

SEQ ID NO: 1428803 - DNA, 25 bp, Homo sapien
ctggagtttaccctcaatccccttg

SEQ ID NO: 1428804 - DNA, 25 bp, Homo sapien
gccttctcaatattgagccccacat

SEQ ID NO: 1428805 - DNA, 25 bp, Homo sapien
gagcctcagactccccttctaactt

SEQ ID NO: 1428806 - DNA, 25 bp, Homo sapien
ccagggaatgtagatctctggcata

SEQ ID NO: 1428807 - DNA, 25 bp, Homo sapien
gaatgtagatctctggcatattgct

SEQ ID NO: 1428808 - DNA, 25 bp, Homo sapien
gatctctggcatattgctttcacca

SEQ ID NO: 1428809 - DNA, 25 bp, Homo sapien
gtagatctctggcatattgctttca

SEQ ID NO: 1428810 - DNA, 25 bp, Homo sapien
ctgtgtgtccttaaatccattccct

SEQ ID NO: 1428811 - DNA, 25 bp, Homo sapien
ataaaatgaatccagccagctcctg

SEQ ID NO: 1428812 - DNA, 25 bp, Homo sapien
cattccctctagcttcgctggtttg

SEQ ID NO: 1428813 - DNA, 25 bp, Homo sapien
tgaaagcctgtaccctagaaggggc

SEQ ID NO: 1428814 - DNA, 25 bp, Homo sapien
tgacagattatttgaatccagccca

SEQ ID NO: 1428815 - DNA, 25 bp, Homo sapien
gatctgattcacttgacagattatt

SEQ ID NO: 1428816 - DNA, 25 bp, Homo sapien
ggggttgctgtgtttttgatctgat

SEQ ID NO: 1428817 - DNA, 25 bp, Homo sapien
tatttgaatccagcccacctttccg

SEQ ID NO: 1428818 - DNA, 25 bp, Homo sapien
gaaatcactgagtacagggctccct

SEQ ID NO: 1428819 - DNA, 25 bp, Homo sapien
gcttctgaggggaaatcactgagta

SEQ ID NO: 1428820 - DNA, 25 bp, Homo sapien
gaaactggagtctctttgtgggatc

SEQ ID NO: 1428821 - DNA, 25 bp, Homo sapien
cagctgactgtccattaaggatgaa

SEQ ID NO: 1428822 - DNA, 25 bp, Homo sapien
ctggcagcaggtgcaatgtaagtac

SEQ ID NO: 1428823 - DNA, 25 bp, Homo sapien
taagtacgtcttgcacagtgcaggc

SEQ ID NO: 1428824 - DNA, 25 bp, Homo sapien
gtgcaggcagtttcatggaccaagg

SEQ ID NO: 1428825 - DNA, 25 bp, Homo sapien
cccaggcgctgtgctctgaaacaca

SEQ ID NO: 1428826 - DNA, 25 bp, Homo sapien
actgcattttcactgaggccacaga

SEQ ID NO: 1428827 - DNA, 25 bp, Homo sapien
cactgcattttcactgaggccacag

SEQ ID NO: 1428828 - DNA, 25 bp, Homo sapien
gcattttcactgaggccacagatcc

SEQ ID NO: 1428829 - DNA, 25 bp, Homo sapien
tgcattttcactgaggccacagatc

SEQ ID NO: 1428830 - DNA, 25 bp, Homo sapien
cccatcctctgggagctgtgtgttc

SEQ ID NO: 1428831 - DNA, 25 bp, Homo sapien
catcctctgggagctgtgtgttctt

SEQ ID NO: 1428832 - DNA, 25 bp, Homo sapien
ctccccatcctctgggagctgtgtg

SEQ ID NO: 1428833 - DNA, 25 bp, Homo sapien
tccccatcctctgggagctgtgtgt

SEQ ID NO: 1428834 - DNA, 25 bp, Homo sapien
gagatggaaacccatggagactctg

SEQ ID NO: 1428835 - DNA, 25 bp, Homo sapien
gaatgagatggaaacccatggagac

SEQ ID NO: 1428836 - DNA, 25 bp, Homo sapien
caggaatgagatggaaacccatgga

SEQ ID NO: 1428837 - DNA, 25 bp, Homo sapien
atgagatggaaacccatggagactc

SEQ ID NO: 1428838 - DNA, 25 bp, Homo sapien
tggaaatattcaggagtgacagagg

SEQ ID NO: 1428839 - DNA, 25 bp, Homo sapien
ggagcaaagattgtcaggttggaaa

SEQ ID NO: 1428840 - DNA, 25 bp, Homo sapien
gtaggaatcacttttggcagcccac

SEQ ID NO: 1428841 - DNA, 25 bp, Homo sapien
aggttggaaatattcaggagtgaca

SEQ ID NO: 1428842 - DNA, 25 bp, Homo sapien
tcttgtcaccagcaataatttgtcc

SEQ ID NO: 1428843 - DNA, 25 bp, Homo sapien
atccaactattctcttgtcaccagc

SEQ ID NO: 1428844 - DNA, 25 bp, Homo sapien
tccaactattctcttgtcaccagca

SEQ ID NO: 1428845 - DNA, 25 bp, Homo sapien
ttctcttgtcaccagcaataatttg

SEQ ID NO: 1428846 - DNA, 25 bp, Homo sapien
tgtgattcactcagaatgtgtgtgc

SEQ ID NO: 1428847 - DNA, 25 bp, Homo sapien
attcactcagaatgtgtgtgccagg

SEQ ID NO: 1428848 - DNA, 25 bp, Homo sapien
gtttctttgggctgaccatgtgatt

SEQ ID NO: 1428849 - DNA, 25 bp, Homo sapien
ccatgtgattcactcagaatgtgtg

SEQ ID NO: 1428850 - DNA, 25 bp, Homo sapien
cagtggaagccttcagattgtctgt

SEQ ID NO: 1428851 - DNA, 25 bp, Homo sapien
gccttcagattgtctgtaggcttct

SEQ ID NO: 1428852 - DNA, 25 bp, Homo sapien
ggaagccttcagattgtctgtaggc

SEQ ID NO: 1428853 - DNA, 25 bp, Homo sapien
cttcagattgtctgtaggcttctgg

SEQ ID NO: 1428854 - DNA, 25 bp, Homo sapien
ctgtgtgcccctccaacacccaggg

SEQ ID NO: 1428855 - DNA, 25 bp, Homo sapien
gtgtgcccctccaacacccagggca

SEQ ID NO: 1428856 - DNA, 25 bp, Homo sapien
tgtgtgcccctccaacacccagggc

SEQ ID NO: 1428857 - DNA, 25 bp, Homo sapien
tgtctgccaggtttgcttgatcttt

SEQ ID NO: 1428858 - DNA, 25 bp, Homo sapien
gtctgccaggtttgcttgatctttg

SEQ ID NO: 1428859 - DNA, 25 bp, Homo sapien
tctgccaggtttgcttgatctttga

SEQ ID NO: 1428860 - DNA, 25 bp, Homo sapien
ctgtctgccaggtttgcttgatctt

SEQ ID NO: 1428861 - DNA, 25 bp, Homo sapien
gctacaggcataacatcctgagagg

SEQ ID NO: 1428862 - DNA, 25 bp, Homo sapien
gagggaccttgcctcgtagcttgtt

SEQ ID NO: 1428863 - DNA, 25 bp, Homo sapien
cctcgtagcttgttgatttatggtc

SEQ ID NO: 1428864 - DNA, 25 bp, Homo sapien
tgtgtgggacggctacaggcataac

SEQ ID NO: 1428865 - DNA, 25 bp, Homo sapien
ctaacctggccctgtttttgctcat

SEQ ID NO: 1428866 - DNA, 25 bp, Homo sapien
cctaacctggccctgtttttgctca

SEQ ID NO: 1428867 - DNA, 25 bp, Homo sapien
ccaaatgtctaaataggttgactgt

SEQ ID NO: 1428868 - DNA, 25 bp, Homo sapien
gccaaatgtctaaataggttgactg

SEQ ID NO: 1428869 - DNA, 25 bp, Homo sapien
tgccaaatgtctaaataggttgact

SEQ ID NO: 1428870 - DNA, 25 bp, Homo sapien
tattgaatgcaacagttgtttatat

SEQ ID NO: 1428871 - DNA, 25 bp, Homo sapien
ttgaatgcaacagttgtttatatga

SEQ ID NO: 1428872 - DNA, 25 bp, Homo sapien
tgaatgcaacagttgtttatatgac

SEQ ID NO: 1428873 - DNA, 25 bp, Homo sapien
ttattgaatgcaacagttgtttata

SEQ ID NO: 1428874 - DNA, 25 bp, Homo sapien
ttcccaaggcctacaatgcaattaa

SEQ ID NO: 1428875 - DNA, 25 bp, Homo sapien
ctttcccaaggcctacaatgcaatt

SEQ ID NO: 1428876 - DNA, 25 bp, Homo sapien
tttcccaaggcctacaatgcaatta

SEQ ID NO: 1428877 - DNA, 25 bp, Homo sapien
tgttcttgtatgtgactttcacagg

SEQ ID NO: 1428878 - DNA, 25 bp, Homo sapien
ctttcacaggagctgggtggttcat

SEQ ID NO: 1428879 - DNA, 25 bp, Homo sapien
taataggaaatctcatgttcttgta

SEQ ID NO: 1428880 - DNA, 25 bp, Homo sapien
gtcacattggttggattgtgtgtaa

SEQ ID NO: 1428881 - DNA, 25 bp, Homo sapien
gatctcatggtgttctctgcccaga

SEQ ID NO: 1428882 - DNA, 25 bp, Homo sapien
ttcatagtgcttctgagacactggg

SEQ ID NO: 1428883 - DNA, 25 bp, Homo sapien
aattagggtttagaacacatgcagg

SEQ ID NO: 1428884 - DNA, 25 bp, Homo sapien
tgcccagaatgctgagaattagacc

SEQ ID NO: 1428885 - DNA, 25 bp, Homo sapien
ttctcagacctctttggcagttttt

SEQ ID NO: 1428886 - DNA, 25 bp, Homo sapien
ggatttcttcgtacctcttcattac

SEQ ID NO: 1428887 - DNA, 25 bp, Homo sapien
tcttcgtacctcttcattactgttt

SEQ ID NO: 1428888 - DNA, 25 bp, Homo sapien
ctgctggatttcttcgtacctcttc

SEQ ID NO: 1428889 - DNA, 25 bp, Homo sapien
ttgccccgtagcttgtttctgaaga

SEQ ID NO: 1428890 - DNA, 25 bp, Homo sapien
cccgtagcttgtttctgaagaccca

SEQ ID NO: 1428891 - DNA, 25 bp, Homo sapien
ccgtagcttgtttctgaagacccac

SEQ ID NO: 1428892 - DNA, 25 bp, Homo sapien
gccccgtagcttgtttctgaagacc

SEQ ID NO: 1428893 - DNA, 25 bp, Homo sapien
gaatacctcaaaggctaaagtagca

SEQ ID NO: 1428894 - DNA, 25 bp, Homo sapien
tagttttttggactctctattgcca

SEQ ID NO: 1428895 - DNA, 25 bp, Homo sapien
caactaaaagcttggattaggacct

SEQ ID NO: 1428896 - DNA, 25 bp, Homo sapien
cattgcttaggatttgaagaatacc

SEQ ID NO: 1428897 - DNA, 25 bp, Homo sapien
ggcatctgctcaacatcgggtgaaa

SEQ ID NO: 1428898 - DNA, 25 bp, Homo sapien
tgttcatgacagcagagtcctcatg

SEQ ID NO: 1428899 - DNA, 25 bp, Homo sapien
tcatgacccaattgcctttgaaagg

SEQ ID NO: 1428900 - DNA, 25 bp, Homo sapien
gcatcaaaacatggtaccagggtag

SEQ ID NO: 1428901 - DNA, 25 bp, Homo sapien
acgggtcggcatctcagctgtggct

SEQ ID NO: 1428902 - DNA, 25 bp, Homo sapien
ggtctttcggctcccagtaactgca

SEQ ID NO: 1428903 - DNA, 25 bp, Homo sapien
tgaatttctcatccccacgggtcgg

SEQ ID NO: 1428904 - DNA, 25 bp, Homo sapien
gctctaaggacatcctcccgcattg

SEQ ID NO: 1428905 - DNA, 25 bp, Homo sapien
gggcactgttagagtaatacttggt

SEQ ID NO: 1428906 - DNA, 25 bp, Homo sapien
tcacattcaaggagactgggtctag

SEQ ID NO: 1428907 - DNA, 25 bp, Homo sapien
tcttgatgggttttggtccattgtt

SEQ ID NO: 1428908 - DNA, 25 bp, Homo sapien
tttggtccgcatgaacagccaaggt

SEQ ID NO: 1428909 - DNA, 25 bp, Homo sapien
cagatcttgactgcgggctacaagg

SEQ ID NO: 1428910 - DNA, 25 bp, Homo sapien
cttgactgcgggctacaaggggcct

SEQ ID NO: 1428911 - DNA, 25 bp, Homo sapien
gccagatcttgactgcgggctacaa

SEQ ID NO: 1428912 - DNA, 25 bp, Homo sapien
aggccagatcttgactgcgggctac

SEQ ID NO: 1428913 - DNA, 25 bp, Homo sapien
tagaataggacatcaggagacctgg

SEQ ID NO: 1428914 - DNA, 25 bp, Homo sapien
tcttgttggatagtcctgctgatgc

SEQ ID NO: 1428915 - DNA, 25 bp, Homo sapien
taccatgtctgaagtctgcttgctc

SEQ ID NO: 1428916 - DNA, 25 bp, Homo sapien
tcttatcctgtagaaagggctagaa

SEQ ID NO: 1428917 - DNA, 25 bp, Homo sapien
caataatagtccctatcacacagag

SEQ ID NO: 1428918 - DNA, 25 bp, Homo sapien
ggcttttaagttccaagcttgagca

SEQ ID NO: 1428919 - DNA, 25 bp, Homo sapien
gctaatatctggagtgagggaatca

SEQ ID NO: 1428920 - DNA, 25 bp, Homo sapien
actaatctttgctgactggctggga

SEQ ID NO: 1428921 - DNA, 25 bp, Homo sapien
ctcctgtaggtgctgcagagagacc

SEQ ID NO: 1428922 - DNA, 25 bp, Homo sapien
tcctgtaggtgctgcagagagaccc

SEQ ID NO: 1428923 - DNA, 25 bp, Homo sapien
gctcctgtaggtgctgcagagagac

SEQ ID NO: 1428924 - DNA, 25 bp, Homo sapien
ttatggctcctgtaggtgctgcaga

SEQ ID NO: 1428925 - DNA, 25 bp, Homo sapien
acacccaacccacatgcatgtcaag

SEQ ID NO: 1428926 - DNA, 25 bp, Homo sapien
tgtgtttcttgatctaattctggga

SEQ ID NO: 1428927 - DNA, 25 bp, Homo sapien
tcttgatctaattctgggaatccag

SEQ ID NO: 1428928 - DNA, 25 bp, Homo sapien
cccaacccacatgcatgtcaagtcc

SEQ ID NO: 1428929 - DNA, 25 bp, Homo sapien
tgtttctgggaatgttttgccttcc

SEQ ID NO: 1428930 - DNA, 25 bp, Homo sapien
acaggtccttctcttatagggcctc

SEQ ID NO: 1428931 - DNA, 25 bp, Homo sapien
cttgtttctgggaatgttttgcctt

SEQ ID NO: 1428932 - DNA, 25 bp, Homo sapien
ccttctcttatagggcctcttttca

SEQ ID NO: 1428933 - DNA, 25 bp, Homo sapien
cagcaatgagcagcaaaacgtctgg

SEQ ID NO: 1428934 - DNA, 25 bp, Homo sapien
gccaggcagcctatttgggataaac

SEQ ID NO: 1428935 - DNA, 25 bp, Homo sapien
gtctccgaaggagcaacagtgccag

SEQ ID NO: 1428936 - DNA, 25 bp, Homo sapien
gaagacttgcagacccacaaatgtg

SEQ ID NO: 1428937 - DNA, 25 bp, Homo sapien
cagggccacactatctctatggcta

SEQ ID NO: 1428938 - DNA, 25 bp, Homo sapien
tattcgtagggcagactgacagtct

SEQ ID NO: 1428939 - DNA, 25 bp, Homo sapien
aactccccacagcaacttcaaaatg

SEQ ID NO: 1428940 - DNA, 25 bp, Homo sapien
ttcgtattccaccacttgcacacag

SEQ ID NO: 1428941 - DNA, 25 bp, Homo sapien
tattatccacactatcacgtaggga

SEQ ID NO: 1428942 - DNA, 25 bp, Homo sapien
caatggctgtgcaaataggaatagg

SEQ ID NO: 1428943 - DNA, 25 bp, Homo sapien
taggaaatactaccacaatgataga

SEQ ID NO: 1428944 - DNA, 25 bp, Homo sapien
tcttcccatcaacactagagcaatg

SEQ ID NO: 1428945 - DNA, 25 bp, Homo sapien
tttctttctatgtcactccagaagg

SEQ ID NO: 1428946 - DNA, 25 bp, Homo sapien
tggtggtggtgagaatctcgtatcc

SEQ ID NO: 1428947 - DNA, 25 bp, Homo sapien
tcccagtggttagctcagaagaaaa

SEQ ID NO: 1428948 - DNA, 25 bp, Homo sapien
tctcgtatcccataacggtccatgc

SEQ ID NO: 1428949 - DNA, 25 bp, Homo sapien
tgtacataatccatgcatatccttc

SEQ ID NO: 1428950 - DNA, 25 bp, Homo sapien
ttgtacataatccatgcatatcctt

SEQ ID NO: 1428951 - DNA, 25 bp, Homo sapien
gtacataatccatgcatatccttca

SEQ ID NO: 1428952 - DNA, 25 bp, Homo sapien
tacataatccatgcatatccttcac

SEQ ID NO: 1428953 - DNA, 25 bp, Homo sapien
gctggcatcgcttctggaacgggcc

SEQ ID NO: 1428954 - DNA, 25 bp, Homo sapien
tcgcttctggaacgggccatggtaa

SEQ ID NO: 1428955 - DNA, 25 bp, Homo sapien
tctggaacgggccatggtaaagtct

SEQ ID NO: 1428956 - DNA, 25 bp, Homo sapien
gaacgggccatggtaaagtctccaa

SEQ ID NO: 1428957 - DNA, 25 bp, Homo sapien
ttcatgtagggaagagtgccccagg

SEQ ID NO: 1428958 - DNA, 25 bp, Homo sapien
gaagagtgccccaggcaatggtcat

SEQ ID NO: 1428959 - DNA, 25 bp, Homo sapien
caatggtcattgcttggggagagta

SEQ ID NO: 1428960 - DNA, 25 bp, Homo sapien
gggaagagtgccccaggcaatggtc

SEQ ID NO: 1428961 - DNA, 25 bp, Homo sapien
tacagtcccactgctaacatatgtc

SEQ ID NO: 1428962 - DNA, 25 bp, Homo sapien
tgtcatctacagtcccactgctaac

SEQ ID NO: 1428963 - DNA, 25 bp, Homo sapien
gtcccactgctaacatatgtcttct

SEQ ID NO: 1428964 - DNA, 25 bp, Homo sapien
catctacagtcccactgctaacata

SEQ ID NO: 1428965 - DNA, 25 bp, Homo sapien
tgttgaactaatgtagaaaggaagg

SEQ ID NO: 1428966 - DNA, 25 bp, Homo sapien
gaactaatgtagaaaggaaggtgat

SEQ ID NO: 1428967 - DNA, 25 bp, Homo sapien
ttgaactaatgtagaaaggaaggtg

SEQ ID NO: 1428968 - DNA, 25 bp, Homo sapien
catgttgaactaatgtagaaaggaa

SEQ ID NO: 1428969 - DNA, 25 bp, Homo sapien
cagaggaagttcaagatgagaaacc

SEQ ID NO: 1428970 - DNA, 25 bp, Homo sapien
catcagggcgcagctcctgctttga

SEQ ID NO: 1428971 - DNA, 25 bp, Homo sapien
taggagcaacctatcagattagcaa

SEQ ID NO: 1428972 - DNA, 25 bp, Homo sapien
taatcaagacctagtcaggaaagca

SEQ ID NO: 1428973 - DNA, 25 bp, Homo sapien
taaggcccattatgtctggaatctg

SEQ ID NO: 1428974 - DNA, 25 bp, Homo sapien
aagttccctgatgagtctaaccagt

SEQ ID NO: 1428975 - DNA, 25 bp, Homo sapien
taaccagttcactcagattactgaa

SEQ ID NO: 1428976 - DNA, 25 bp, Homo sapien
gatgagtctaaccagttcactcaga

SEQ ID NO: 1428977 - DNA, 25 bp, Homo sapien
caagggtgctctagctccaaaggct

SEQ ID NO: 1428978 - DNA, 25 bp, Homo sapien
tgccacaggtgggacagccaatttt

SEQ ID NO: 1428979 - DNA, 25 bp, Homo sapien
taaagtgcttacatcagcgcctggc

SEQ ID NO: 1428980 - DNA, 25 bp, Homo sapien
gaggcactttaactgaggctccagc

SEQ ID NO: 1428981 - DNA, 25 bp, Homo sapien
tatgaaagtgttgacccctcctggt

SEQ ID NO: 1428982 - DNA, 25 bp, Homo sapien
tgcggcaggcctaacaactttctgg

SEQ ID NO: 1428983 - DNA, 25 bp, Homo sapien
tatggcactgcatgaagccactggc

SEQ ID NO: 1428984 - DNA, 25 bp, Homo sapien
cagagtgagacgcttcctgaggaat

SEQ ID NO: 1428985 - DNA, 25 bp, Homo sapien
tagggtttgatctcgctgtagcggc

SEQ ID NO: 1428986 - DNA, 25 bp, Homo sapien
gcccagtcaagtccgtagggtttga

SEQ ID NO: 1428987 - DNA, 25 bp, Homo sapien
aggtacttgagtgagctgcgccgca

SEQ ID NO: 1428988 - DNA, 25 bp, Homo sapien
tttgctgtccccatagtcgttgtag

SEQ ID NO: 1428989 - DNA, 25 bp, Homo sapien
ttaacctccaggtgagctcatgctc

SEQ ID NO: 1428990 - DNA, 25 bp, Homo sapien
caattatgcctggatggaagtagcc

SEQ ID NO: 1428991 - DNA, 25 bp, Homo sapien
gactgtcagttgcacacatcacctg

SEQ ID NO: 1428992 - DNA, 25 bp, Homo sapien
gcctttgggaatatgcagactgtca

SEQ ID NO: 1428993 - DNA, 25 bp, Homo sapien
ttccaagcactctaatctgtctgtg

SEQ ID NO: 1428994 - DNA, 25 bp, Homo sapien
caagcactctaatctgtctgtgcaa

SEQ ID NO: 1428995 - DNA, 25 bp, Homo sapien
ttactttccaagcactctaatctgt

SEQ ID NO: 1428996 - DNA, 25 bp, Homo sapien
ctttccaagcactctaatctgtctg

SEQ ID NO: 1428997 - DNA, 25 bp, Homo sapien
taactcatcctcacatcgccaggtg

SEQ ID NO: 1428998 - DNA, 25 bp, Homo sapien
tcccactagtgtagccattgaagag

SEQ ID NO: 1428999 - DNA, 25 bp, Homo sapien
tatagtggtagaggacccggtgtaa

SEQ ID NO: 1429000 - DNA, 25 bp, Homo sapien
tcgccaggtgaattccccaaaactc

SEQ ID NO: 1429001 - DNA, 25 bp, Homo sapien
tgacatcatccaccacggggcatgg

SEQ ID NO: 1429002 - DNA, 25 bp, Homo sapien
tgtgttgtccactccccacagcgtg

SEQ ID NO: 1429003 - DNA, 25 bp, Homo sapien
gggcatggggtcttcacgatcacgt

SEQ ID NO: 1429004 - DNA, 25 bp, Homo sapien
cctggagcgccgtcctgtgttgtcc

SEQ ID NO: 1429005 - DNA, 25 bp, Homo sapien
ttggcttgcctgtggctagactctt

SEQ ID NO: 1429006 - DNA, 25 bp, Homo sapien
tgtggctagactcttcattccccac

SEQ ID NO: 1429007 - DNA, 25 bp, Homo sapien
ccatgtgcagtcaacacctctatgc

SEQ ID NO: 1429008 - DNA, 25 bp, Homo sapien
tctatgcaaaggaccggggacagct

SEQ ID NO: 1429009 - DNA, 25 bp, Homo sapien
tgtgaagacatgattctaaggagcc

SEQ ID NO: 1429010 - DNA, 25 bp, Homo sapien
cagagtggaaacatcgcagtctcca

SEQ ID NO: 1429011 - DNA, 25 bp, Homo sapien
tggaaacatcgcagtctccatgaca

SEQ ID NO: 1429012 - DNA, 25 bp, Homo sapien
agacatgattctaaggagccccttc

SEQ ID NO: 1429013 - DNA, 25 bp, Homo sapien
ctgctcccctccaataaagggccac

SEQ ID NO: 1429014 - DNA, 25 bp, Homo sapien
ttaggtggtctgcactcccaaatcc

SEQ ID NO: 1429015 - DNA, 25 bp, Homo sapien
ggtctgcactcccaaatccttgttc

SEQ ID NO: 1429016 - DNA, 25 bp, Homo sapien
ggtggtctgcactcccaaatccttg

SEQ ID NO: 1429017 - DNA, 25 bp, Homo sapien
atggtgtcaggttccaggcatcgta

SEQ ID NO: 1429018 - DNA, 25 bp, Homo sapien
ttgtccggcacctgagatggcattg

SEQ ID NO: 1429019 - DNA, 25 bp, Homo sapien
gcatcgtatgatcagagagatggtg

SEQ ID NO: 1429020 - DNA, 25 bp, Homo sapien
gatgatgtcgtccacaaagctcagc

SEQ ID NO: 1429021 - DNA, 25 bp, Homo sapien
ctgtgcgcatcaggcaaagggcctt

SEQ ID NO: 1429022 - DNA, 25 bp, Homo sapien
gcgcatcaggcaaagggccttggaa

SEQ ID NO: 1429023 - DNA, 25 bp, Homo sapien
agaagcggtaggcagctctctatgc

SEQ ID NO: 1429024 - DNA, 25 bp, Homo sapien
ccttggaagaagcggtaggcagctc

SEQ ID NO: 1429025 - DNA, 25 bp, Homo sapien
tcttaaatggacaagatggctgctg

SEQ ID NO: 1429026 - DNA, 25 bp, Homo sapien
cctcctgcattgccctgggatactg

SEQ ID NO: 1429027 - DNA, 25 bp, Homo sapien
cttggatcaagacaagcccatgaag

SEQ ID NO: 1429028 - DNA, 25 bp, Homo sapien
gacaagcccatgaagtagaaggtgc

SEQ ID NO: 1429029 - DNA, 25 bp, Homo sapien
caagacaagcccatgaagtagaagg

SEQ ID NO: 1429030 - DNA, 25 bp, Homo sapien
ggatcaagacaagcccatgaagtag

SEQ ID NO: 1429031 - DNA, 25 bp, Homo sapien
cggaggaggtaatctacaatctgca

SEQ ID NO: 1429032 - DNA, 25 bp, Homo sapien
cagtgactttctcttgacggaggag

SEQ ID NO: 1429033 - DNA, 25 bp, Homo sapien
caagagtgctgctgggctcgtgaac

SEQ ID NO: 1429034 - DNA, 25 bp, Homo sapien
gctcgtgaaccgtggagagtctcag

SEQ ID NO: 1429035 - DNA, 25 bp, Homo sapien
aggccatctgctagctggaccttgg

SEQ ID NO: 1429036 - DNA, 25 bp, Homo sapien
gaagtaatattcatagggggcttta

SEQ ID NO: 1429037 - DNA, 25 bp, Homo sapien
gaacaggttcagtttggaagtaata

SEQ ID NO: 1429038 - DNA, 25 bp, Homo sapien
catctgctagctggaccttggaaca

SEQ ID NO: 1429039 - DNA, 25 bp, Homo sapien
aaaagcagtggagtcacatcgacac

SEQ ID NO: 1429040 - DNA, 25 bp, Homo sapien
ctgagcaccagagagagctcatggt

SEQ ID NO: 1429041 - DNA, 25 bp, Homo sapien
cagtccctgagcaccagagagagct

SEQ ID NO: 1429042 - DNA, 25 bp, Homo sapien
accagagagagctcatggtagcctc

SEQ ID NO: 1429043 - DNA, 25 bp, Homo sapien
tccctgagcaccagagagagctcat

SEQ ID NO: 1429044 - DNA, 25 bp, Homo sapien
aagattgagtgttgagaagccaggg

SEQ ID NO: 1429045 - DNA, 25 bp, Homo sapien
aaagattgagtgttgagaagccagg

SEQ ID NO: 1429046 - DNA, 25 bp, Homo sapien
gggcatcgtcccttgctgtggcact

SEQ ID NO: 1429047 - DNA, 25 bp, Homo sapien
catgtgcttggtgccggagtctgac

SEQ ID NO: 1429048 - DNA, 25 bp, Homo sapien
tgttggtcactagttcatagatggg

SEQ ID NO: 1429049 - DNA, 25 bp, Homo sapien
attctgggaatgtcagcaccttggg

SEQ ID NO: 1429050 - DNA, 25 bp, Homo sapien
tgtggctacgggtatttgcaaagtg

SEQ ID NO: 1429051 - DNA, 25 bp, Homo sapien
gcaacccagtcaactgtgtggctac

SEQ ID NO: 1429052 - DNA, 25 bp, Homo sapien
cagtcaactgtgtggctacgggtat

SEQ ID NO: 1429053 - DNA, 25 bp, Homo sapien
atttgcaaagtggccacaagctgac

SEQ ID NO: 1429054 - DNA, 25 bp, Homo sapien
tgttgagaatttgttcgagtctggg

SEQ ID NO: 1429055 - DNA, 25 bp, Homo sapien
tgagaatttgttcgagtctgggaaa

SEQ ID NO: 1429056 - DNA, 25 bp, Homo sapien
gaatttgttcgagtctgggaaaaga

SEQ ID NO: 1429057 - DNA, 25 bp, Homo sapien
ccttgttgagaatttgttcgagtct

SEQ ID NO: 1429058 - DNA, 25 bp, Homo sapien
tgctactgttttctggcgatcccaa

SEQ ID NO: 1429059 - DNA, 25 bp, Homo sapien
tgctcatgacaaatgcggccactag

SEQ ID NO: 1429060 - DNA, 25 bp, Homo sapien
cgaccacaaacactccggagctgag

SEQ ID NO: 1429061 - DNA, 25 bp, Homo sapien
ggccatcgctgggtcctgtcatagc

SEQ ID NO: 1429062 - DNA, 25 bp, Homo sapien
tgcttacgttccctccaatccctgt

SEQ ID NO: 1429063 - DNA, 25 bp, Homo sapien
aatgcttacgttccctccaatccct

SEQ ID NO: 1429064 - DNA, 25 bp, Homo sapien
gaaaatgcttacgttccctccaatc

SEQ ID NO: 1429065 - DNA, 25 bp, Homo sapien
ccagaaaatgcttacgttccctcca

SEQ ID NO: 1429066 - DNA, 25 bp, Homo sapien
catgtaggggcttgcagtccatccc

SEQ ID NO: 1429067 - DNA, 25 bp, Homo sapien
tgtaggggcttgcagtccatcccct

SEQ ID NO: 1429068 - DNA, 25 bp, Homo sapien
atgtaggggcttgcagtccatcccc

SEQ ID NO: 1429069 - DNA, 25 bp, Homo sapien
agaagttcccggctccatcggcgtc

SEQ ID NO: 1429070 - DNA, 25 bp, Homo sapien
aaagaagttcccggctccatcggcg

SEQ ID NO: 1429071 - DNA, 25 bp, Homo sapien
tgaaaagaagttcccggctccatcg

SEQ ID NO: 1429072 - DNA, 25 bp, Homo sapien
agtgaaaagaagttcccggctccat

SEQ ID NO: 1429073 - DNA, 25 bp, Homo sapien
tcacagctccgggatgtggagatct

SEQ ID NO: 1429074 - DNA, 25 bp, Homo sapien
tgctgtgtcgccacagacagagcag

SEQ ID NO: 1429075 - DNA, 25 bp, Homo sapien
ttatccctgctgtgtcgccacagac

SEQ ID NO: 1429076 - DNA, 25 bp, Homo sapien
ctgacatagagattcggagtcacag

SEQ ID NO: 1429077 - DNA, 25 bp, Homo sapien
gaaagacaacgtgaatgagtgggca

SEQ ID NO: 1429078 - DNA, 25 bp, Homo sapien
cacctgcgggatttgctatttccaa

SEQ ID NO: 1429079 - DNA, 25 bp, Homo sapien
gaaaatgaggaacacctgcgggatt

SEQ ID NO: 1429080 - DNA, 25 bp, Homo sapien
aaaatgaggaacacctgcgggattt

SEQ ID NO: 1429081 - DNA, 25 bp, Homo sapien
caggtgatatcaggaaagcagaccc

SEQ ID NO: 1429082 - DNA, 25 bp, Homo sapien
cactggcaaataaggacatggtcta

SEQ ID NO: 1429083 - DNA, 25 bp, Homo sapien
gagactcctgagtttggacagcagg

SEQ ID NO: 1429084 - DNA, 25 bp, Homo sapien
gaagaccaagtctctgagactcctg

SEQ ID NO: 1429085 - DNA, 25 bp, Homo sapien
gccatcttctgaactacctcctgga

SEQ ID NO: 1429086 - DNA, 25 bp, Homo sapien
ccatcttctgaactacctcctggaa

SEQ ID NO: 1429087 - DNA, 25 bp, Homo sapien
tgtcccactggcaggtctctagggg

SEQ ID NO: 1429088 - DNA, 25 bp, Homo sapien
ctctaggggcagtaagatgcttgga

SEQ ID NO: 1429089 - DNA, 25 bp, Homo sapien
taggaaggttctcttcagtcctgcc

SEQ ID NO: 1429090 - DNA, 25 bp, Homo sapien
tctggtagcccctgtcatacctcat

SEQ ID NO: 1429091 - DNA, 25 bp, Homo sapien
cattcagtgcggtagcactcctgct

SEQ ID NO: 1429092 - DNA, 25 bp, Homo sapien
ctgccccatccagatctggagcctc

SEQ ID NO: 1429093 - DNA, 25 bp, Homo sapien
aaatacaatgccatgtaggtggttt

SEQ ID NO: 1429094 - DNA, 25 bp, Homo sapien
gacatgacatcttgtctgctggaaa

SEQ ID NO: 1429095 - DNA, 25 bp, Homo sapien
caatgccatgtaggtggtttactcc

SEQ ID NO: 1429096 - DNA, 25 bp, Homo sapien
tgggctttatccacataaaaacgtg

SEQ ID NO: 1429097 - DNA, 25 bp, Homo sapien
gagaccctgttgaagacatacttag

SEQ ID NO: 1429098 - DNA, 25 bp, Homo sapien
tggagttcacaaatctaccacagtg

SEQ ID NO: 1429099 - DNA, 25 bp, Homo sapien
ccatcattgaggtgcctggagaatt

SEQ ID NO: 1429100 - DNA, 25 bp, Homo sapien
cacacgagggaacgattgcaatagt

SEQ ID NO: 1429101 - DNA, 25 bp, Homo sapien
gaattaggagcaacagcagaggtag

SEQ ID NO: 1429102 - DNA, 25 bp, Homo sapien
gagaattaggagcaacagcagaggt

SEQ ID NO: 1429103 - DNA, 25 bp, Homo sapien
aaaaaggagagaattaggagcaaca

SEQ ID NO: 1429104 - DNA, 25 bp, Homo sapien
aaaggagagaattaggagcaacagc

SEQ ID NO: 1429105 - DNA, 25 bp, Homo sapien
gagggagagactcactaaggacaaa

SEQ ID NO: 1429106 - DNA, 25 bp, Homo sapien
tctttagaggagtatgggcaaaaaa

SEQ ID NO: 1429107 - DNA, 25 bp, Homo sapien
ctcactaaggacaaaaccccatgaa

SEQ ID NO: 1429108 - DNA, 25 bp, Homo sapien
acatggtttctttagaggagtatgg

SEQ ID NO: 1429109 - DNA, 25 bp, Homo sapien
ctaattaagaagctgtagggtaggc

SEQ ID NO: 1429110 - DNA, 25 bp, Homo sapien
cttccttctccagcgctgtttttgt

SEQ ID NO: 1429111 - DNA, 25 bp, Homo sapien
tccagcgctgtttttgtagagtaaa

SEQ ID NO: 1429112 - DNA, 25 bp, Homo sapien
cacaggattgacatcagggaatctc

SEQ ID NO: 1429113 - DNA, 25 bp, Homo sapien
tgcctgttaaatgggaggctgcctt

SEQ ID NO: 1429114 - DNA, 25 bp, Homo sapien
tcagtcaggcataactaaagcaagt

SEQ ID NO: 1429115 - DNA, 25 bp, Homo sapien
tgactaaagcaatatcacctggatg

SEQ ID NO: 1429116 - DNA, 25 bp, Homo sapien
tcctcaatgttggtatggcaaacca

SEQ ID NO: 1429117 - DNA, 25 bp, Homo sapien
atacaagcagtctgatactttgtcc

SEQ ID NO: 1429118 - DNA, 25 bp, Homo sapien
acaagcagtctgatactttgtcctc

SEQ ID NO: 1429119 - DNA, 25 bp, Homo sapien
tacaagcagtctgatactttgtcct

SEQ ID NO: 1429120 - DNA, 25 bp, Homo sapien
caagcagtctgatactttgtcctcc

SEQ ID NO: 1429121 - DNA, 25 bp, Homo sapien
tagcttcctggatgtaatggttgcc

SEQ ID NO: 1429122 - DNA, 25 bp, Homo sapien
aaaatctgcacgagatgtagcccca

SEQ ID NO: 1429123 - DNA, 25 bp, Homo sapien
tgatgtcttcatactccagccagag

SEQ ID NO: 1429124 - DNA, 25 bp, Homo sapien
catccagcgagtggagagcattgct

SEQ ID NO: 1429125 - DNA, 25 bp, Homo sapien
tgagtttgatgtggtacatcacaga

SEQ ID NO: 1429126 - DNA, 25 bp, Homo sapien
ggtacatcacagaccggaccttcca

SEQ ID NO: 1429127 - DNA, 25 bp, Homo sapien
gatggccacttggttgagtttgatg

SEQ ID NO: 1429128 - DNA, 25 bp, Homo sapien
tttgatgtggtacatcacagaccgg

SEQ ID NO: 1429129 - DNA, 25 bp, Homo sapien
tctaggcattgattctccaggggca

SEQ ID NO: 1429130 - DNA, 25 bp, Homo sapien
tcaggggtgggctccgagatctcct

SEQ ID NO: 1429131 - DNA, 25 bp, Homo sapien
gctggtctaaaccacgagcaaagtt

SEQ ID NO: 1429132 - DNA, 25 bp, Homo sapien
accatctggcagttgctggtctaaa

SEQ ID NO: 1429133 - DNA, 25 bp, Homo sapien
tgttgtaaccaaagaacatctcccc

SEQ ID NO: 1429134 - DNA, 25 bp, Homo sapien
tgagttggcaagagcgtccatccac

SEQ ID NO: 1429135 - DNA, 25 bp, Homo sapien
tccacaccaagcttgtagtcctcga

SEQ ID NO: 1429136 - DNA, 25 bp, Homo sapien
gacaggtctccgtgatgagttggca

SEQ ID NO: 1429137 - DNA, 25 bp, Homo sapien
ccacagaacatgaggatgttataca

SEQ ID NO: 1429138 - DNA, 25 bp, Homo sapien
gtcggaacagtccaccccgatgtgg

SEQ ID NO: 1429139 - DNA, 25 bp, Homo sapien
cccgatgtggcggtcatagcagcca

SEQ ID NO: 1429140 - DNA, 25 bp, Homo sapien
tcacagccgccgttgaagccgtcgg

SEQ ID NO: 1429141 - DNA, 25 bp, Homo sapien
tgattaagagctggtcatcagcagt

SEQ ID NO: 1429142 - DNA, 25 bp, Homo sapien
tagctgaccatgatgcttggaaccc

SEQ ID NO: 1429143 - DNA, 25 bp, Homo sapien
ccgtctggcttggaatggtgtgact

SEQ ID NO: 1429144 - DNA, 25 bp, Homo sapien
aatccgtggctactggagggccgtc

SEQ ID NO: 1429145 - DNA, 25 bp, Homo sapien
tgggagtccatgcataactgagaaa

SEQ ID NO: 1429146 - DNA, 25 bp, Homo sapien
tagcaattaaccctgtgggagtcca

SEQ ID NO: 1429147 - DNA, 25 bp, Homo sapien
caatagggcaattaactgtgtagca

SEQ ID NO: 1429148 - DNA, 25 bp, Homo sapien
cagagactatatgaacaatagggca

SEQ ID NO: 1429149 - DNA, 25 bp, Homo sapien
aacagaaactactagcttgcagggc

SEQ ID NO: 1429150 - DNA, 25 bp, Homo sapien
caaacagaaactactagcttgcagg

SEQ ID NO: 1429151 - DNA, 25 bp, Homo sapien
aaacagaaactactagcttgcaggg

SEQ ID NO: 1429152 - DNA, 25 bp, Homo sapien
tcaaacagaaactactagcttgcag

SEQ ID NO: 1429153 - DNA, 25 bp, Homo sapien
gaaatacagcggaaattcttactgc

SEQ ID NO: 1429154 - DNA, 25 bp, Homo sapien
tggagtccagcttgcgatctgaaat

SEQ ID NO: 1429155 - DNA, 25 bp, Homo sapien
gcaccggcccaaaggaatctaagag

SEQ ID NO: 1429156 - DNA, 25 bp, Homo sapien
atctttgctgcagtcgcgcaccggc

SEQ ID NO: 1429157 - DNA, 25 bp, Homo sapien
tggccagttcggctggtggaatcac

SEQ ID NO: 1429158 - DNA, 25 bp, Homo sapien
gcatcctccatcacagtcatgtccg

SEQ ID NO: 1429159 - DNA, 25 bp, Homo sapien
ctggtggaatcacaaagctcttgct

SEQ ID NO: 1429160 - DNA, 25 bp, Homo sapien
tccatcacagtcatgtccgtcttgc

SEQ ID NO: 1429161 - DNA, 25 bp, Homo sapien
gccctccccaagagtgtaggtgaat

SEQ ID NO: 1429162 - DNA, 25 bp, Homo sapien
ccacttaatgtgcagggaggaacaa

SEQ ID NO: 1429163 - DNA, 25 bp, Homo sapien
caattaaacagaaccaagcgctggc

SEQ ID NO: 1429164 - DNA, 25 bp, Homo sapien
caaatgctctgtgttcatagtcaaa

SEQ ID NO: 1429165 - DNA, 25 bp, Homo sapien
gctggctccattagcatgctgctcg

SEQ ID NO: 1429166 - DNA, 25 bp, Homo sapien
cagagagtgctctcacagaacaagg

SEQ ID NO: 1429167 - DNA, 25 bp, Homo sapien
aacggatcaattgctcttgacctgg

SEQ ID NO: 1429168 - DNA, 25 bp, Homo sapien
tcaccatggcttgccattaaatgga

SEQ ID NO: 1429169 - DNA, 25 bp, Homo sapien
taaatggaatgtgaggaaacggatc

SEQ ID NO: 1429170 - DNA, 25 bp, Homo sapien
atgtcaatcagccagattccactag

SEQ ID NO: 1429171 - DNA, 25 bp, Homo sapien
gccttatctttatcacgctttgaag

SEQ ID NO: 1429172 - DNA, 25 bp, Homo sapien
ttagggaatggggaacttatccatg

SEQ ID NO: 1429173 - DNA, 25 bp, Homo sapien
agccagattccactaggctcctcat

SEQ ID NO: 1429174 - DNA, 25 bp, Homo sapien
ctgaaatattgtgtaaggccatggc

SEQ ID NO: 1429175 - DNA, 25 bp, Homo sapien
cgctgaaatattgtgtaaggccatg

SEQ ID NO: 1429176 - DNA, 25 bp, Homo sapien
aagcctcgctgaaatattgtgtaag

SEQ ID NO: 1429177 - DNA, 25 bp, Homo sapien
cctcgctgaaatattgtgtaaggcc

SEQ ID NO: 1429178 - DNA, 25 bp, Homo sapien
cagcacctgtcttagagggagaagg

SEQ ID NO: 1429179 - DNA, 25 bp, Homo sapien
tgtcataggccccagttattcagga

SEQ ID NO: 1429180 - DNA, 25 bp, Homo sapien
gaactttttgtcatcacactcggcc

SEQ ID NO: 1429181 - DNA, 25 bp, Homo sapien
tagccaacaaagagcaagtcagaga

SEQ ID NO: 1429182 - DNA, 25 bp, Homo sapien
aaatgcatctacaggtacagatgcc

SEQ ID NO: 1429183 - DNA, 25 bp, Homo sapien
tggtcgtgcacatgtgacacacact

SEQ ID NO: 1429184 - DNA, 25 bp, Homo sapien
agtcagatggctggtgagactcacg

SEQ ID NO: 1429185 - DNA, 25 bp, Homo sapien
tttctttgtgggtagggagtcagat

SEQ ID NO: 1429186 - DNA, 25 bp, Homo sapien
cctgcagtctcccatacaaatcacc

SEQ ID NO: 1429187 - DNA, 25 bp, Homo sapien
gggtccgtcgctgaccaacactgac

SEQ ID NO: 1429188 - DNA, 25 bp, Homo sapien
ccatacaaatcaccccaagacagtc

SEQ ID NO: 1429189 - DNA, 25 bp, Homo sapien
agcagggtccgtcgctgaccaacac

SEQ ID NO: 1429190 - DNA, 25 bp, Homo sapien
gaagtcagatagatctccattcaag

SEQ ID NO: 1429191 - DNA, 25 bp, Homo sapien
ggttttgtgggttagctctgaagtc

SEQ ID NO: 1429192 - DNA, 25 bp, Homo sapien
gataatagtaactactgtcttcctc

SEQ ID NO: 1429193 - DNA, 25 bp, Homo sapien
gatatttgacctttccaagcttcag

SEQ ID NO: 1429194 - DNA, 25 bp, Homo sapien
ggtcctgaaagcttgttcagctcgc

SEQ ID NO: 1429195 - DNA, 25 bp, Homo sapien
cctgggctcatatagccaaggtctc

SEQ ID NO: 1429196 - DNA, 25 bp, Homo sapien
tactcccgtcaatgggcacagtctg

SEQ ID NO: 1429197 - DNA, 25 bp, Homo sapien
tctcaagttcagtggtcctgaaagc

SEQ ID NO: 1429198 - DNA, 25 bp, Homo sapien
gcttggcaatggacctgtgcaaatc

SEQ ID NO: 1429199 - DNA, 25 bp, Homo sapien
tttgctcacaaatgaacaggacaag

SEQ ID NO: 1429200 - DNA, 25 bp, Homo sapien
tcacaaatgaacaggacaagagctt

SEQ ID NO: 1429201 - DNA, 25 bp, Homo sapien
gcaatggacctgtgcaaatccatcc

SEQ ID NO: 1429202 - DNA, 25 bp, Homo sapien
cacagacgctcacattaaattccag

SEQ ID NO: 1429203 - DNA, 25 bp, Homo sapien
tattcacgactgaatgttacatccc

SEQ ID NO: 1429204 - DNA, 25 bp, Homo sapien
taaattccagtgacaaggtaggaga

SEQ ID NO: 1429205 - DNA, 25 bp, Homo sapien
ctgtactaagtacggtgcaaacctg

SEQ ID NO: 1429206 - DNA, 25 bp, Homo sapien
ttatcactcacctctgatgagacag

SEQ ID NO: 1429207 - DNA, 25 bp, Homo sapien
gaagaatgtcattaacgcactgatt

SEQ ID NO: 1429208 - DNA, 25 bp, Homo sapien
tgagacaggtgctatggagagcact

SEQ ID NO: 1429209 - DNA, 25 bp, Homo sapien
ttggctaaatacagtcaagggacac

SEQ ID NO: 1429210 - DNA, 25 bp, Homo sapien
aaatctatacttgggtagcgaatgg

SEQ ID NO: 1429211 - DNA, 25 bp, Homo sapien
gcaaatctatacttgggtagcgaat

SEQ ID NO: 1429212 - DNA, 25 bp, Homo sapien
aagcaaatctatacttgggtagcga

SEQ ID NO: 1429213 - DNA, 25 bp, Homo sapien
ttgggtagcgaatggggagccactg

SEQ ID NO: 1429214 - DNA, 25 bp, Homo sapien
ccttttaagaggatggccacgtgag

SEQ ID NO: 1429215 - DNA, 25 bp, Homo sapien
tagttcggcttgaataccaggtggt

SEQ ID NO: 1429216 - DNA, 25 bp, Homo sapien
ggaatgcctgtagcaatcagagctg

SEQ ID NO: 1429217 - DNA, 25 bp, Homo sapien
tctggcatgattctcatagttcggc

SEQ ID NO: 1429218 - DNA, 25 bp, Homo sapien
ggaagtccagtgattgtaacagccc

SEQ ID NO: 1429219 - DNA, 25 bp, Homo sapien
tcaggcctctgcactaacaaaagat

SEQ ID NO: 1429220 - DNA, 25 bp, Homo sapien
gggcctgccactgtttaattgtgct

SEQ ID NO: 1429221 - DNA, 25 bp, Homo sapien
ccgactgcaagaggagacttcagga

SEQ ID NO: 1429222 - DNA, 25 bp, Homo sapien
gagtgttggaaagtgccattctgca

SEQ ID NO: 1429223 - DNA, 25 bp, Homo sapien
gcaggcagcaacaaaacgctgaggt

SEQ ID NO: 1429224 - DNA, 25 bp, Homo sapien
catcgataccgtgaatgctttgcaa

SEQ ID NO: 1429225 - DNA, 25 bp, Homo sapien
tcttgggcctcttagcattctgcaa

SEQ ID NO: 1429226 - DNA, 25 bp, Homo sapien
gggagaagtcacctgttccgtgtgc

SEQ ID NO: 1429227 - DNA, 25 bp, Homo sapien
tgttccgtgtgcactgaaggccctc

SEQ ID NO: 1429228 - DNA, 25 bp, Homo sapien
cacctgttccgtgtgcactgaaggc

SEQ ID NO: 1429229 - DNA, 25 bp, Homo sapien
gaagtcacctgttccgtgtgcactg

SEQ ID NO: 1429230 - DNA, 25 bp, Homo sapien
tctcccctcttacgagtcctcaagg

SEQ ID NO: 1429231 - DNA, 25 bp, Homo sapien
gcttgtctcccctcttacgagtcct

SEQ ID NO: 1429232 - DNA, 25 bp, Homo sapien
ccccgcttgtctcccctcttacgag

SEQ ID NO: 1429233 - DNA, 25 bp, Homo sapien
ctcttacgagtcctcaaggtttttg

SEQ ID NO: 1429234 - DNA, 25 bp, Homo sapien
gtcccagatgctaaaagcccctcta

SEQ ID NO: 1429235 - DNA, 25 bp, Homo sapien
cagtcccagatgctaaaagcccctc

SEQ ID NO: 1429236 - DNA, 25 bp, Homo sapien
tccagtcccagatgctaaaagcccc

SEQ ID NO: 1429237 - DNA, 25 bp, Homo sapien
gctccagtcccagatgctaaaagcc

SEQ ID NO: 1429238 - DNA, 25 bp, Homo sapien
ttcagcctggatttccaacaaatgc

SEQ ID NO: 1429239 - DNA, 25 bp, Homo sapien
tgctaatactaccattttcagcctg

SEQ ID NO: 1429240 - DNA, 25 bp, Homo sapien
tccttcagctttcttggactgcctg

SEQ ID NO: 1429241 - DNA, 25 bp, Homo sapien
caaaagggagttctgactctcagtg

SEQ ID NO: 1429242 - DNA, 25 bp, Homo sapien
gcagggcacctctagagagaagaaa

SEQ ID NO: 1429243 - DNA, 25 bp, Homo sapien
tgttggacacagaaaaacgtaagag

SEQ ID NO: 1429244 - DNA, 25 bp, Homo sapien
tagaatcaggtttcagcagggcacc

SEQ ID NO: 1429245 - DNA, 25 bp, Homo sapien
aagagcccctttggtctgttggaca

SEQ ID NO: 1429246 - DNA, 25 bp, Homo sapien
cgagtcagaggctcgtaaatggaga

SEQ ID NO: 1429247 - DNA, 25 bp, Homo sapien
ggctgcgagtcagaggctcgtaaat

SEQ ID NO: 1429248 - DNA, 25 bp, Homo sapien
cagggctgcgagtcagaggctcgta

SEQ ID NO: 1429249 - DNA, 25 bp, Homo sapien
tcagaggctcgtaaatggagaaaaa

SEQ ID NO: 1429250 - DNA, 25 bp, Homo sapien
gcaaaggtgcttatgtactggatcc

SEQ ID NO: 1429251 - DNA, 25 bp, Homo sapien
tatgtactggatccttcatgtagcc

SEQ ID NO: 1429252 - DNA, 25 bp, Homo sapien
ccttcatgtagccttcatagcagag

SEQ ID NO: 1429253 - DNA, 25 bp, Homo sapien
cccattcgttccgaatgcaaaggtg

SEQ ID NO: 1429254 - DNA, 25 bp, Homo sapien
catgaggcgccgactccatggtggt

SEQ ID NO: 1429255 - DNA, 25 bp, Homo sapien
ccagccagacagagtgtgccctgca

SEQ ID NO: 1429256 - DNA, 25 bp, Homo sapien
caacggagagacgtgtcatggtacg

SEQ ID NO: 1429257 - DNA, 25 bp, Homo sapien
ccatggtggtgtacataggactcca

SEQ ID NO: 1429258 - DNA, 25 bp, Homo sapien
gtttcggggtcacattggtgttcac

SEQ ID NO: 1429259 - DNA, 25 bp, Homo sapien
ggagccgccgggcacagaggtccat

SEQ ID NO: 1429260 - DNA, 25 bp, Homo sapien
ccgggcacagaggtccatggcccag

SEQ ID NO: 1429261 - DNA, 25 bp, Homo sapien
agtttcggggtcacattggtgttca

SEQ ID NO: 1429262 - DNA, 25 bp, Homo sapien
gcagggttcagccagtcactggcat

SEQ ID NO: 1429263 - DNA, 25 bp, Homo sapien
cagggttcagccagtcactggcatc

SEQ ID NO: 1429264 - DNA, 25 bp, Homo sapien
agggttcagccagtcactggcatcc

SEQ ID NO: 1429265 - DNA, 25 bp, Homo sapien
agcacacgaggccaatcacacagct

SEQ ID NO: 1429266 - DNA, 25 bp, Homo sapien
cagttgacgtgagaggagcacacga

SEQ ID NO: 1429267 - DNA, 25 bp, Homo sapien
gacatgcagggtgatcttgacaacg

SEQ ID NO: 1429268 - DNA, 25 bp, Homo sapien
gtggtcttattcacaggacttcggg

SEQ ID NO: 1429269 - DNA, 25 bp, Homo sapien
tcagaacctccaatggttccttaca

SEQ ID NO: 1429270 - DNA, 25 bp, Homo sapien
cagaacctccaatggttccttacac

SEQ ID NO: 1429271 - DNA, 25 bp, Homo sapien
ttcagaacctccaatggttccttac

SEQ ID NO: 1429272 - DNA, 25 bp, Homo sapien
aggatccgtgtaaaaggtcagctgg

SEQ ID NO: 1429273 - DNA, 25 bp, Homo sapien
ctctactacgcctcctgctccttga

SEQ ID NO: 1429274 - DNA, 25 bp, Homo sapien
ccagaatccccttcagggttcaaga

SEQ ID NO: 1429275 - DNA, 25 bp, Homo sapien
tcagggttcaagaaggcggaaccag

SEQ ID NO: 1429276 - DNA, 25 bp, Homo sapien
gttgttgatccgctttctctggctg

SEQ ID NO: 1429277 - DNA, 25 bp, Homo sapien
gggctagtggctataatattatctt

SEQ ID NO: 1429278 - DNA, 25 bp, Homo sapien
tggcttgctggtggttggagtccac

SEQ ID NO: 1429279 - DNA, 25 bp, Homo sapien
ctttgttgttgatccgctttctctg

SEQ ID NO: 1429280 - DNA, 25 bp, Homo sapien
ctgtataaggaaaagacgaggcaaa

SEQ ID NO: 1429281 - DNA, 25 bp, Homo sapien
tcctctgttgaacgttaaagtatgt

SEQ ID NO: 1429282 - DNA, 25 bp, Homo sapien
gaagtgaaagaagatccaatttaca

SEQ ID NO: 1429283 - DNA, 25 bp, Homo sapien
tgttgaacgttaaagtatgttgctt

SEQ ID NO: 1429284 - DNA, 25 bp, Homo sapien
gatccaatttacacggttcttctgg

SEQ ID NO: 1429285 - DNA, 25 bp, Homo sapien
tgacctggctggcaaagtcctcccc

SEQ ID NO: 1429286 - DNA, 25 bp, Homo sapien
gagggtgcgcgtgacctggctggca

SEQ ID NO: 1429287 - DNA, 25 bp, Homo sapien
tggctggcaaagtcctcccctccgt

SEQ ID NO: 1429288 - DNA, 25 bp, Homo sapien
ggagtcgagggtgcgcgtgacctgg

SEQ ID NO: 1429289 - DNA, 25 bp, Homo sapien
cgccgatcagcacagaaggaatgta

SEQ ID NO: 1429290 - DNA, 25 bp, Homo sapien
cgccggcgagtatacaggatcatca

SEQ ID NO: 1429291 - DNA, 25 bp, Homo sapien
ggataggtgtctcccggatgctcag

SEQ ID NO: 1429292 - DNA, 25 bp, Homo sapien
tactcatagccgtccaggataggtg

SEQ ID NO: 1429293 - DNA, 25 bp, Homo sapien
ccaaagatgggctgtagcaaaggga

SEQ ID NO: 1429294 - DNA, 25 bp, Homo sapien
agatgggctgtagcaaagggaagtt

SEQ ID NO: 1429295 - DNA, 25 bp, Homo sapien
aaagatgggctgtagcaaagggaag

SEQ ID NO: 1429296 - DNA, 25 bp, Homo sapien
gccaaagatgggctgtagcaaaggg

SEQ ID NO: 1429297 - DNA, 25 bp, Homo sapien
tctgagccacggagcattgaggaaa

SEQ ID NO: 1429298 - DNA, 25 bp, Homo sapien
ggtggtcctgccgtggaaagactgg

SEQ ID NO: 1429299 - DNA, 25 bp, Homo sapien
tttgaaagctacaagcagagccctg

SEQ ID NO: 1429300 - DNA, 25 bp, Homo sapien
gacctgttggtgttgccttatccga

SEQ ID NO: 1429301 - DNA, 25 bp, Homo sapien
cagggataatgactgggatgtatac

SEQ ID NO: 1429302 - DNA, 25 bp, Homo sapien
gcccagggataatgactgggatgta

SEQ ID NO: 1429303 - DNA, 25 bp, Homo sapien
taatgactgggatgtatacattcca

SEQ ID NO: 1429304 - DNA, 25 bp, Homo sapien
tgaaagcccagggataatgactggg

SEQ ID NO: 1429305 - DNA, 25 bp, Homo sapien
tggaggctcccataggtgtcttctg

SEQ ID NO: 1429306 - DNA, 25 bp, Homo sapien
gactctgggactgtataatggcacc

SEQ ID NO: 1429307 - DNA, 25 bp, Homo sapien
tgctcaggcaactggactgaacttg

SEQ ID NO: 1429308 - DNA, 25 bp, Homo sapien
gtagaaagttgttatgcagcactgg

SEQ ID NO: 1429309 - DNA, 25 bp, Homo sapien
agcctgggggcaggctaaggcctct

SEQ ID NO: 1429310 - DNA, 25 bp, Homo sapien
gcctgggggcaggctaaggcctctg

SEQ ID NO: 1429311 - DNA, 25 bp, Homo sapien
ctgggggcaggctaaggcctctgat

SEQ ID NO: 1429312 - DNA, 25 bp, Homo sapien
cctgggggcaggctaaggcctctga

SEQ ID NO: 1429313 - DNA, 25 bp, Homo sapien
tgcccttttgtcctctgtctcttta

SEQ ID NO: 1429314 - DNA, 25 bp, Homo sapien
cccttttgtcctctgtctctttagc

SEQ ID NO: 1429315 - DNA, 25 bp, Homo sapien
tatgcccttttgtcctctgtctctt

SEQ ID NO: 1429316 - DNA, 25 bp, Homo sapien
ctatgcccttttgtcctctgtctct

SEQ ID NO: 1429317 - DNA, 25 bp, Homo sapien
tgcctccagcgcaccaaagggatat

SEQ ID NO: 1429318 - DNA, 25 bp, Homo sapien
catgactgagatgtggaggatcctc

SEQ ID NO: 1429319 - DNA, 25 bp, Homo sapien
gatgtggaggatcctcagctcctct

SEQ ID NO: 1429320 - DNA, 25 bp, Homo sapien
agctcctcttctgccgactcatgtt

SEQ ID NO: 1429321 - DNA, 25 bp, Homo sapien
attaggatgggaccaagtttttcat

SEQ ID NO: 1429322 - DNA, 25 bp, Homo sapien
ttaggatgggaccaagtttttcatc

SEQ ID NO: 1429323 - DNA, 25 bp, Homo sapien
ttcttcctcgccacttgtaccaatt

SEQ ID NO: 1429324 - DNA, 25 bp, Homo sapien
ttcctcgccacttgtaccaattagc

SEQ ID NO: 1429325 - DNA, 25 bp, Homo sapien
gatcacccacatatagatgcttcca

SEQ ID NO: 1429326 - DNA, 25 bp, Homo sapien
catgagagtgacctattgaaactcc

SEQ ID NO: 1429327 - DNA, 25 bp, Homo sapien
tagaatgtttcagctcaatccagcc

SEQ ID NO: 1429328 - DNA, 25 bp, Homo sapien
ggctggtcacaatatcccggctcaa

SEQ ID NO: 1429329 - DNA, 25 bp, Homo sapien
gagtccatagtttgttgtctctggg

SEQ ID NO: 1429330 - DNA, 25 bp, Homo sapien
gaaaaatgcagccaaaaggttctga

SEQ ID NO: 1429331 - DNA, 25 bp, Homo sapien
ggttctgacacaaccagacagatga

SEQ ID NO: 1429332 - DNA, 25 bp, Homo sapien
caaacctctgcaaagagtttatcca

SEQ ID NO: 1429333 - DNA, 25 bp, Homo sapien
gacagatgaggaggcattcgaatga

SEQ ID NO: 1429334 - DNA, 25 bp, Homo sapien
gaagcccagggcaagtcgtatttgt

SEQ ID NO: 1429335 - DNA, 25 bp, Homo sapien
taaacgtcttcataagtccaggaac

SEQ ID NO: 1429336 - DNA, 25 bp, Homo sapien
taaatagcttcagctgcttaaacgt

SEQ ID NO: 1429337 - DNA, 25 bp, Homo sapien
actataagtccaggaatcagctcag

SEQ ID NO: 1429338 - DNA, 25 bp, Homo sapien
ttcttgcacatacaaacagccaggg

SEQ ID NO: 1429339 - DNA, 25 bp, Homo sapien
ggagggccagtcatttctcttggct

SEQ ID NO: 1429340 - DNA, 25 bp, Homo sapien
tcttgcacatacaaacagccaggga

SEQ ID NO: 1429341 - DNA, 25 bp, Homo sapien
cctacaggacactcattcaggcttg

SEQ ID NO: 1429342 - DNA, 25 bp, Homo sapien
ctacaggacactcattcaggcttgg

SEQ ID NO: 1429343 - DNA, 25 bp, Homo sapien
ccctacaggacactcattcaggctt

SEQ ID NO: 1429344 - DNA, 25 bp, Homo sapien
catttgatcggtcaaaaggaacaaa

SEQ ID NO: 1429345 - DNA, 25 bp, Homo sapien
ctgaggtgtcacttttgccctttgt

SEQ ID NO: 1429346 - DNA, 25 bp, Homo sapien
gaacaaaagggccactatctagaga

SEQ ID NO: 1429347 - DNA, 25 bp, Homo sapien
gagacttagtactctgaggtgtcac

SEQ ID NO: 1429348 - DNA, 25 bp, Homo sapien
caaattgattgctggcagtctgcag

SEQ ID NO: 1429349 - DNA, 25 bp, Homo sapien
cattttcaaattgattgctggcagt

SEQ ID NO: 1429350 - DNA, 25 bp, Homo sapien
cagtctgcagtatctgaaatgggtc

SEQ ID NO: 1429351 - DNA, 25 bp, Homo sapien
tctgcagtatctgaaatgggtccca

SEQ ID NO: 1429352 - DNA, 25 bp, Homo sapien
catccacaggggtcggcaacactgg

SEQ ID NO: 1429353 - DNA, 25 bp, Homo sapien
tccacaggggtcggcaacactgggc

SEQ ID NO: 1429354 - DNA, 25 bp, Homo sapien
atccacaggggtcggcaacactggg

SEQ ID NO: 1429355 - DNA, 25 bp, Homo sapien
acatccacaggggtcggcaacactg

SEQ ID NO: 1429356 - DNA, 25 bp, Homo sapien
ttggggccctccgaaccttgctgca

SEQ ID NO: 1429357 - DNA, 25 bp, Homo sapien
gtctcccaagtctcgccacaggatt

SEQ ID NO: 1429358 - DNA, 25 bp, Homo sapien
ccagattgccagttttggggccctc

SEQ ID NO: 1429359 - DNA, 25 bp, Homo sapien
ctccgaaccttgctgcagtctccca

SEQ ID NO: 1429360 - DNA, 25 bp, Homo sapien
gcccacagaactgccccaaggatgt

SEQ ID NO: 1429361 - DNA, 25 bp, Homo sapien
cctcttccagatggctatcaaccag

SEQ ID NO: 1429362 - DNA, 25 bp, Homo sapien
catggtccactagagtgtcaggctc

SEQ ID NO: 1429363 - DNA, 25 bp, Homo sapien
caatcttagcagtaatgtttggctc

SEQ ID NO: 1429364 - DNA, 25 bp, Homo sapien
tattgccgatacttgtgcagggcag

SEQ ID NO: 1429365 - DNA, 25 bp, Homo sapien
cttcaatggaaggtgacctgagggc

SEQ ID NO: 1429366 - DNA, 25 bp, Homo sapien
ccctctgaagatccctgggtattgc

SEQ ID NO: 1429367 - DNA, 25 bp, Homo sapien
agtgactcagggttctcattcagga

SEQ ID NO: 1429368 - DNA, 25 bp, Homo sapien
tatgaagacagtacctgctaatcca

SEQ ID NO: 1429369 - DNA, 25 bp, Homo sapien
atatgaagacagtacctgctaatcc

SEQ ID NO: 1429370 - DNA, 25 bp, Homo sapien
acctgctaatccagccaatacccca

SEQ ID NO: 1429371 - DNA, 25 bp, Homo sapien
catatgaagacagtacctgctaatc

SEQ ID NO: 1429372 - DNA, 25 bp, Homo sapien
ttcctgcattctccagattcactcc

SEQ ID NO: 1429373 - DNA, 25 bp, Homo sapien
cgagccctgcttcctgcattctcca

SEQ ID NO: 1429374 - DNA, 25 bp, Homo sapien
cctgcttcctgcattctccagattc

SEQ ID NO: 1429375 - DNA, 25 bp, Homo sapien
tgcttcctgcattctccagattcac

SEQ ID NO: 1429376 - DNA, 25 bp, Homo sapien
aaagagccacaagcaacgtgaccat

SEQ ID NO: 1429377 - DNA, 25 bp, Homo sapien
gcaggaaaagagccacaagcaacgt

SEQ ID NO: 1429378 - DNA, 25 bp, Homo sapien
gaaaagagccacaagcaacgtgacc

SEQ ID NO: 1429379 - DNA, 25 bp, Homo sapien
ggaaaagagccacaagcaacgtgac

SEQ ID NO: 1429380 - DNA, 25 bp, Homo sapien
tgccaataaccaaaacaagctccag

SEQ ID NO: 1429381 - DNA, 25 bp, Homo sapien
taaccaaaacaagctccagacctgg

SEQ ID NO: 1429382 - DNA, 25 bp, Homo sapien
gacctggtgctcagatcaactctcc

SEQ ID NO: 1429383 - DNA, 25 bp, Homo sapien
caagctccagacctggtgctcagat

SEQ ID NO: 1429384 - DNA, 25 bp, Homo sapien
cattgtaatgtgagaattataggga

SEQ ID NO: 1429385 - DNA, 25 bp, Homo sapien
taccataatcatcaatctacattgt

SEQ ID NO: 1429386 - DNA, 25 bp, Homo sapien
tcagatttgctatggccacgcgcag

SEQ ID NO: 1429387 - DNA, 25 bp, Homo sapien
taacttccatcatcactaccataat

SEQ ID NO: 1429388 - DNA, 25 bp, Homo sapien
ttcctagtgttttcagtgtgaagac

SEQ ID NO: 1429389 - DNA, 25 bp, Homo sapien
tcctagtgttttcagtgtgaagaca

SEQ ID NO: 1429390 - DNA, 25 bp, Homo sapien
ctagtgttttcagtgtgaagacatc

SEQ ID NO: 1429391 - DNA, 25 bp, Homo sapien
agtgttttcagtgtgaagacatctc

SEQ ID NO: 1429392 - DNA, 25 bp, Homo sapien
cgttgcgcaccgagaagaggagctt

SEQ ID NO: 1429393 - DNA, 25 bp, Homo sapien
gaagtagggcagctccgtgttctcc

SEQ ID NO: 1429394 - DNA, 25 bp, Homo sapien
tttctcccgggaagtcgttgcgcac

SEQ ID NO: 1429395 - DNA, 25 bp, Homo sapien
catgatgctcaggtcgttctcgcgc

SEQ ID NO: 1429396 - DNA, 25 bp, Homo sapien
tgagccccggccgccttcctcctag

SEQ ID NO: 1429397 - DNA, 25 bp, Homo sapien
agccccggccgccttcctcctagcg

SEQ ID NO: 1429398 - DNA, 25 bp, Homo sapien
cttgagccccggccgccttcctcct

SEQ ID NO: 1429399 - DNA, 25 bp, Homo sapien
ttgagccccggccgccttcctccta

SEQ ID NO: 1429400 - DNA, 25 bp, Homo sapien
gcagagtcctgggtttaagctctga

SEQ ID NO: 1429401 - DNA, 25 bp, Homo sapien
taagctctgatgtctggagagcccc

SEQ ID NO: 1429402 - DNA, 25 bp, Homo sapien
gagagccctggaccccggaatgaga

SEQ ID NO: 1429403 - DNA, 25 bp, Homo sapien
tgagatgccgcttgcagagtcctgg

SEQ ID NO: 1429404 - DNA, 25 bp, Homo sapien
gctgcgctggcagcgcttacgctga

SEQ ID NO: 1429405 - DNA, 25 bp, Homo sapien
tgcagctctgggatgcaatccgcct

SEQ ID NO: 1429406 - DNA, 25 bp, Homo sapien
tatcttaagacactcatctggtgtc

SEQ ID NO: 1429407 - DNA, 25 bp, Homo sapien
caggtgacactgcttaggtacggag

SEQ ID NO: 1429408 - DNA, 25 bp, Homo sapien
gggatgtgcacctgccgtgcgctcc

SEQ ID NO: 1429409 - DNA, 25 bp, Homo sapien
ttaggacttgcccggggatgtgcac

SEQ ID NO: 1429410 - DNA, 25 bp, Homo sapien
ccattaggacttgcccggggatgtg

SEQ ID NO: 1429411 - DNA, 25 bp, Homo sapien
atcccattaggacttgcccggggat

SEQ ID NO: 1429412 - DNA, 25 bp, Homo sapien
gggagcggtgaagccggaagacctg

SEQ ID NO: 1429413 - DNA, 25 bp, Homo sapien
gccgagggagcggtgaagccggaag

SEQ ID NO: 1429414 - DNA, 25 bp, Homo sapien
cgagggagcggtgaagccggaagac

SEQ ID NO: 1429415 - DNA, 25 bp, Homo sapien
agcggtgaagccggaagacctgtct

SEQ ID NO: 1429416 - DNA, 25 bp, Homo sapien
caagcatgtccagcaccctgtccaa

SEQ ID NO: 1429417 - DNA, 25 bp, Homo sapien
agcaccctgtccaaatcacggatgc

SEQ ID NO: 1429418 - DNA, 25 bp, Homo sapien
tcacggatgcctggagtgttcctgc

SEQ ID NO: 1429419 - DNA, 25 bp, Homo sapien
gctgtatgcaggaaacaggctgccc

SEQ ID NO: 1429420 - DNA, 25 bp, Homo sapien
ggaacacgaacttgtgagctgttgt

SEQ ID NO: 1429421 - DNA, 25 bp, Homo sapien
gaacttgtgagctgttgttccagcc

SEQ ID NO: 1429422 - DNA, 25 bp, Homo sapien
tgagctgttgttccagcccagagga

SEQ ID NO: 1429423 - DNA, 25 bp, Homo sapien
ctagtaggaacacgaacttgtgagc

SEQ ID NO: 1429424 - DNA, 25 bp, Homo sapien
tggcgccaaagtgtttgacagctgg

SEQ ID NO: 1429425 - DNA, 25 bp, Homo sapien
ctggaggtcagctggcgccaaagtg

SEQ ID NO: 1429426 - DNA, 25 bp, Homo sapien
gtcagctggcgccaaagtgtttgac

SEQ ID NO: 1429427 - DNA, 25 bp, Homo sapien
gccaaagtgtttgacagctgggctg

SEQ ID NO: 1429428 - DNA, 25 bp, Homo sapien
catttatcatcaatacgtcgttagg

SEQ ID NO: 1429429 - DNA, 25 bp, Homo sapien
agcaagggcagcctcctccggaagc

SEQ ID NO: 1429430 - DNA, 25 bp, Homo sapien
tttcggatttgagccgcgagggacc

SEQ ID NO: 1429431 - DNA, 25 bp, Homo sapien
tttctgaaatctccgacctttcgga

SEQ ID NO: 1429432 - DNA, 25 bp, Homo sapien
tgaaatgttacccatactcggtttg

SEQ ID NO: 1429433 - DNA, 25 bp, Homo sapien
tggtagaatattaacgtcgcctaag

SEQ ID NO: 1429434 - DNA, 25 bp, Homo sapien
cgcctaagtggttaatggttgtcat

SEQ ID NO: 1429435 - DNA, 25 bp, Homo sapien
cccatactcggtttggtagaatatt

SEQ ID NO: 1429436 - DNA, 25 bp, Homo sapien
cccttctccaaaacagcccacatac

SEQ ID NO: 1429437 - DNA, 25 bp, Homo sapien
tcagccagcaaaaatctccttcttc

SEQ ID NO: 1429438 - DNA, 25 bp, Homo sapien
ttcccttctccaaaacagcccacat

SEQ ID NO: 1429439 - DNA, 25 bp, Homo sapien
ttcttcccttctccaaaacagccca

SEQ ID NO: 1429440 - DNA, 25 bp, Homo sapien
catctgttgaggttggcagtctccc

SEQ ID NO: 1429441 - DNA, 25 bp, Homo sapien
tgaggttggcagtctcccgttctct

SEQ ID NO: 1429442 - DNA, 25 bp, Homo sapien
tgttgaggttggcagtctcccgttc

SEQ ID NO: 1429443 - DNA, 25 bp, Homo sapien
tctgttgaggttggcagtctcccgt

SEQ ID NO: 1429444 - DNA, 25 bp, Homo sapien
actggaccctgctgatagttcttca

SEQ ID NO: 1429445 - DNA, 25 bp, Homo sapien
aatggaccttagtttcacaggacag

SEQ ID NO: 1429446 - DNA, 25 bp, Homo sapien
gatccctctttggagcagctatagg

SEQ ID NO: 1429447 - DNA, 25 bp, Homo sapien
tcttcactaatggaccttagtttca

SEQ ID NO: 1429448 - DNA, 25 bp, Homo sapien
tagaattccagatgtcagttgccga

SEQ ID NO: 1429449 - DNA, 25 bp, Homo sapien
gacatggtggccgttttcctggaat

SEQ ID NO: 1429450 - DNA, 25 bp, Homo sapien
cagatgtcagttgccgacatggtgg

SEQ ID NO: 1429451 - DNA, 25 bp, Homo sapien
tatttctctggctacattggttaca

SEQ ID NO: 1429452 - DNA, 25 bp, Homo sapien
taagttccagagcagagacagccat

SEQ ID NO: 1429453 - DNA, 25 bp, Homo sapien
ctaagttccagagcagagacagcca

SEQ ID NO: 1429454 - DNA, 25 bp, Homo sapien
gagtaacattgagggctgcaggtca

SEQ ID NO: 1429455 - DNA, 25 bp, Homo sapien
gtttgtgccaaggtccaaatagggc

SEQ ID NO: 1429456 - DNA, 25 bp, Homo sapien
cagagcttgggctaaaagttcagat

SEQ ID NO: 1429457 - DNA, 25 bp, Homo sapien
gattcaatgacaggcctggcagaaa

SEQ ID NO: 1429458 - DNA, 25 bp, Homo sapien
ggcaccagagcaacaaccctaagaa

SEQ ID NO: 1429459 - DNA, 25 bp, Homo sapien
tgaatgaggcagtaaacaaggcacc

SEQ ID NO: 1429460 - DNA, 25 bp, Homo sapien
aagacttggcaatagcttagacgtg

SEQ ID NO: 1429461 - DNA, 25 bp, Homo sapien
tgtagggctaccagggatagaatca

SEQ ID NO: 1429462 - DNA, 25 bp, Homo sapien
gccattgccaagatgcagtatctta

SEQ ID NO: 1429463 - DNA, 25 bp, Homo sapien
agtatcttacttcttgcctggccat

SEQ ID NO: 1429464 - DNA, 25 bp, Homo sapien
gatgcagtatcttacttcttgcctg

SEQ ID NO: 1429465 - DNA, 25 bp, Homo sapien
tgccaagatgcagtatcttacttct

SEQ ID NO: 1429466 - DNA, 25 bp, Homo sapien
tcctctgagcccagaagtgtgcctc

SEQ ID NO: 1429467 - DNA, 25 bp, Homo sapien
gagcccagaagtgtgcctctttcct

SEQ ID NO: 1429468 - DNA, 25 bp, Homo sapien
aatgctctatgatcctgccaccctg

SEQ ID NO: 1429469 - DNA, 25 bp, Homo sapien
ctgtttaatgctctatgatcctgcc

SEQ ID NO: 1429470 - DNA, 25 bp, Homo sapien
gagaaacgcagaatagtgagcaggc

SEQ ID NO: 1429471 - DNA, 25 bp, Homo sapien
ttgcaaaatgggttccgtggctgcc

SEQ ID NO: 1429472 - DNA, 25 bp, Homo sapien
aacaaatgtctcctagtatgcaggg

SEQ ID NO: 1429473 - DNA, 25 bp, Homo sapien
cctggagtctaatgcaggaggaaca

SEQ ID NO: 1429474 - DNA, 25 bp, Homo sapien
gctggtttgacccttcctggaggaa

SEQ ID NO: 1429475 - DNA, 25 bp, Homo sapien
tagccgcattgaggtacactccatc

SEQ ID NO: 1429476 - DNA, 25 bp, Homo sapien
tcagcaatgacatgcggctgggcag

SEQ ID NO: 1429477 - DNA, 25 bp, Homo sapien
tgaagagcaacaagtacaagcctgg

SEQ ID NO: 1429478 - DNA, 25 bp, Homo sapien
aatagcacatcttaagagcacttac

SEQ ID NO: 1429479 - DNA, 25 bp, Homo sapien
tgcagtcaatccctggttgaattct

SEQ ID NO: 1429480 - DNA, 25 bp, Homo sapien
tctttgatgaggaaccagggtgcag

SEQ ID NO: 1429481 - DNA, 25 bp, Homo sapien
ggcaagtaccggattgcagtcaatc

SEQ ID NO: 1429482 - DNA, 25 bp, Homo sapien
ggaaccagggtgcagtactgccata

SEQ ID NO: 1429483 - DNA, 25 bp, Homo sapien
aatgtcagcaattctgctttctgcc

SEQ ID NO: 1429484 - DNA, 25 bp, Homo sapien
tgcctggaatgtcagcaattctgct

SEQ ID NO: 1429485 - DNA, 25 bp, Homo sapien
ccagcctccccaagacagttaggtg

SEQ ID NO: 1429486 - DNA, 25 bp, Homo sapien
caagacagttaggtgctcatgtccc

SEQ ID NO: 1429487 - DNA, 25 bp, Homo sapien
cagggttctatgtgcaaggattcaa

SEQ ID NO: 1429488 - DNA, 25 bp, Homo sapien
tctgttgtttgtcaggcagggttct

SEQ ID NO: 1429489 - DNA, 25 bp, Homo sapien
tgcatcctgaggtatcgatctgttg

SEQ ID NO: 1429490 - DNA, 25 bp, Homo sapien
ttctcccagaaagctattgtgacac

SEQ ID NO: 1429491 - DNA, 25 bp, Homo sapien
gacagctgacagctttcccgaacag

SEQ ID NO: 1429492 - DNA, 25 bp, Homo sapien
gaacaggttgtcagttaagcagacc

SEQ ID NO: 1429493 - DNA, 25 bp, Homo sapien
cccctgttgttgttgcaagactgga

SEQ ID NO: 1429494 - DNA, 25 bp, Homo sapien
cgaacagccggagcacggttagctt

SEQ ID NO: 1429495 - DNA, 25 bp, Homo sapien
ctgctgcacccctactccaggagat

SEQ ID NO: 1429496 - DNA, 25 bp, Homo sapien
gagatcccatgccagctttcagagc

SEQ ID NO: 1429497 - DNA, 25 bp, Homo sapien
ctggtgacaaatgatcagagcatcc

SEQ ID NO: 1429498 - DNA, 25 bp, Homo sapien
tgctggtgacaaatgatcagagcat

SEQ ID NO: 1429499 - DNA, 25 bp, Homo sapien
gactttaccactcaagcaaagaggc

SEQ ID NO: 1429500 - DNA, 25 bp, Homo sapien
tgtaggccattaagactttaccact

SEQ ID NO: 1429501 - DNA, 25 bp, Homo sapien
tcacatgaatggttggctataaagc

SEQ ID NO: 1429502 - DNA, 25 bp, Homo sapien
ttattgccatttgccttatgtaggc

SEQ ID NO: 1429503 - DNA, 25 bp, Homo sapien
agaggaatgacttctttggttggtg

SEQ ID NO: 1429504 - DNA, 25 bp, Homo sapien
tcaagtatccaaatgaagggaccat

SEQ ID NO: 1429505 - DNA, 25 bp, Homo sapien
tgagtaagctgtctggcttcgcctc

SEQ ID NO: 1429506 - DNA, 25 bp, Homo sapien
gcttcgcctctggtacccaggggaa

SEQ ID NO: 1429507 - DNA, 25 bp, Homo sapien
ctgtgacctgagtcctcattgcaaa

SEQ ID NO: 1429508 - DNA, 25 bp, Homo sapien
tgacctgagtcctcattgcaaacta

SEQ ID NO: 1429509 - DNA, 25 bp, Homo sapien
tgtgacctgagtcctcattgcaaac

SEQ ID NO: 1429510 - DNA, 25 bp, Homo sapien
cctgagtcctcattgcaaactatat

SEQ ID NO: 1429511 - DNA, 25 bp, Homo sapien
atgggaaactgcaaaggatcggagg

SEQ ID NO: 1429512 - DNA, 25 bp, Homo sapien
aactgcaaaggatcggagggaggga

SEQ ID NO: 1429513 - DNA, 25 bp, Homo sapien
gagatggcagttgggggccgcgtac

SEQ ID NO: 1429514 - DNA, 25 bp, Homo sapien
tcggagggagggagatggcagttgg

SEQ ID NO: 1429515 - DNA, 25 bp, Homo sapien
tgtgttcgtcttctccccgtgaccc

SEQ ID NO: 1429516 - DNA, 25 bp, Homo sapien
ttctccccgtgacccatgatcccta

SEQ ID NO: 1429517 - DNA, 25 bp, Homo sapien
cacgttgtacgtgaaaaatgcaaag

SEQ ID NO: 1429518 - DNA, 25 bp, Homo sapien
tacaaataagggcacgttgtacgtg

SEQ ID NO: 1429519 - DNA, 25 bp, Homo sapien
aggagctgccatcccaactgatgtc

SEQ ID NO: 1429520 - DNA, 25 bp, Homo sapien
tggttctgagaagcacgaaagctgc

SEQ ID NO: 1429521 - DNA, 25 bp, Homo sapien
gctgctgctgttggttctgagaagc

SEQ ID NO: 1429522 - DNA, 25 bp, Homo sapien
gaagcacgaaagctgcagcagcaca

SEQ ID NO: 1429523 - DNA, 25 bp, Homo sapien
ctttccttggtttgttggcttgagc

SEQ ID NO: 1429524 - DNA, 25 bp, Homo sapien
tatgcagtacgtagggaataccctt

SEQ ID NO: 1429525 - DNA, 25 bp, Homo sapien
ccccagggcctgatgacaatgtttt

SEQ ID NO: 1429526 - DNA, 25 bp, Homo sapien
tgatagctagaccaaaccaggattc

SEQ ID NO: 1429527 - DNA, 25 bp, Homo sapien
cctggaggtcatatcttggcagcac

SEQ ID NO: 1429528 - DNA, 25 bp, Homo sapien
tcttgggctgatctccggagaacag

SEQ ID NO: 1429529 - DNA, 25 bp, Homo sapien
cctcttgggctgatctccggagaac

SEQ ID NO: 1429530 - DNA, 25 bp, Homo sapien
ttctttgctggtgtgtttgtatcct

SEQ ID NO: 1429531 - DNA, 25 bp, Homo sapien
tttgctggtgtgtttgtatcctggc

SEQ ID NO: 1429532 - DNA, 25 bp, Homo sapien
aatgaatatattcctcggtcagtgc

SEQ ID NO: 1429533 - DNA, 25 bp, Homo sapien
cagagcttattttccactccattga

SEQ ID NO: 1429534 - DNA, 25 bp, Homo sapien
ccattgaatcccatgttactgcaaa

SEQ ID NO: 1429535 - DNA, 25 bp, Homo sapien
tgatacaatttcgtggcaagagcaa

SEQ ID NO: 1429536 - DNA, 25 bp, Homo sapien
ccaatattgtcctgaaggactgcag

SEQ ID NO: 1429537 - DNA, 25 bp, Homo sapien
cattcacttgagtgtcatgaaggag

SEQ ID NO: 1429538 - DNA, 25 bp, Homo sapien
ctattcattaagtgtgctaggacag

SEQ ID NO: 1429539 - DNA, 25 bp, Homo sapien
caaccgtcttatgtggtgaatccaa

SEQ ID NO: 1429540 - DNA, 25 bp, Homo sapien
gtgaaaatcaggataggagcagtag

SEQ ID NO: 1429541 - DNA, 25 bp, Homo sapien
tgaaaatcaggataggagcagtagg

SEQ ID NO: 1429542 - DNA, 25 bp, Homo sapien
taggggtggagatgtatggatttcc

SEQ ID NO: 1429543 - DNA, 25 bp, Homo sapien
gggtggagatgtatggatttcccct

SEQ ID NO: 1429544 - DNA, 25 bp, Homo sapien
tcaggtgcctgttcttgtcacagaa

SEQ ID NO: 1429545 - DNA, 25 bp, Homo sapien
tcacagaacttatggtaaaagaaca

SEQ ID NO: 1429546 - DNA, 25 bp, Homo sapien
tgagccagctaacagtcaggtgcct

SEQ ID NO: 1429547 - DNA, 25 bp, Homo sapien
gaaggttaagcaggcaagcagagtc

SEQ ID NO: 1429548 - DNA, 25 bp, Homo sapien
gaatataagctggagaggatgaccc

SEQ ID NO: 1429549 - DNA, 25 bp, Homo sapien
gctgctttcggtcaccattgactgc

SEQ ID NO: 1429550 - DNA, 25 bp, Homo sapien
gatggcatgtgtggctaggagaggg

SEQ ID NO: 1429551 - DNA, 25 bp, Homo sapien
tcacttccgacagaggatggcatgt

SEQ ID NO: 1429552 - DNA, 25 bp, Homo sapien
agttagacacatggccagatctgcc

SEQ ID NO: 1429553 - DNA, 25 bp, Homo sapien
gcactttttggacaccatgtggccc

SEQ ID NO: 1429554 - DNA, 25 bp, Homo sapien
gtttatcccagtatctcccagttag

SEQ ID NO: 1429555 - DNA, 25 bp, Homo sapien
tcccagtgttgagcatgaagcgaaa

SEQ ID NO: 1429556 - DNA, 25 bp, Homo sapien
caccctaaagtaggcccagtgtctg

SEQ ID NO: 1429557 - DNA, 25 bp, Homo sapien
gaagttggtagtgatatcctctgta

SEQ ID NO: 1429558 - DNA, 25 bp, Homo sapien
tgtttctctcctagtatccatgtgt

SEQ ID NO: 1429559 - DNA, 25 bp, Homo sapien
cccttttgcacttggtcattctaga

SEQ ID NO: 1429560 - DNA, 25 bp, Homo sapien
gaatgctgggttgcaatgctgccat

SEQ ID NO: 1429561 - DNA, 25 bp, Homo sapien
cctgaatgctgggttgcaatgctgc

SEQ ID NO: 1429562 - DNA, 25 bp, Homo sapien
cttcctgaatgctgggttgcaatgc

SEQ ID NO: 1429563 - DNA, 25 bp, Homo sapien
tgaatgctgggttgcaatgctgcca

SEQ ID NO: 1429564 - DNA, 25 bp, Homo sapien
gccctgctgctccttttgtgtttct

SEQ ID NO: 1429565 - DNA, 25 bp, Homo sapien
cctgctgctccttttgtgtttctta

SEQ ID NO: 1429566 - DNA, 25 bp, Homo sapien
ctgctccttttgtgtttcttagcat

SEQ ID NO: 1429567 - DNA, 25 bp, Homo sapien
cagtgttgtctctgctgccctgctg

SEQ ID NO: 1429568 - DNA, 25 bp, Homo sapien
tcttggacaagtcttagcatgctgg

SEQ ID NO: 1429569 - DNA, 25 bp, Homo sapien
tatcctcaagtcatgctgtttgacc

SEQ ID NO: 1429570 - DNA, 25 bp, Homo sapien
ccttgggatccaagctttacatgtc

SEQ ID NO: 1429571 - DNA, 25 bp, Homo sapien
tatgactaggctgcggaagttgctg

SEQ ID NO: 1429572 - DNA, 25 bp, Homo sapien
tcagggatatagcaacctgggcaga

SEQ ID NO: 1429573 - DNA, 25 bp, Homo sapien
tggtcactgtgacattctgagaatg

SEQ ID NO: 1429574 - DNA, 25 bp, Homo sapien
gaggcgtacatggtaaccagcagct

SEQ ID NO: 1429575 - DNA, 25 bp, Homo sapien
ggtgttgccaaagagccctcatgca

SEQ ID NO: 1429576 - DNA, 25 bp, Homo sapien
tctgcttaatgccacaggctttggt

SEQ ID NO: 1429577 - DNA, 25 bp, Homo sapien
gtctttttcggcctcctccctgatg

SEQ ID NO: 1429578 - DNA, 25 bp, Homo sapien
tggacgtcccctgctgttcgcttcg

SEQ ID NO: 1429579 - DNA, 25 bp, Homo sapien
taggggctagcgtccctttctgctc

SEQ ID NO: 1429580 - DNA, 25 bp, Homo sapien
gggtggactagcctgaagaaattca

SEQ ID NO: 1429581 - DNA, 25 bp, Homo sapien
caggggtggactagcctgaagaaat

SEQ ID NO: 1429582 - DNA, 25 bp, Homo sapien
cttgcaggggtggactagcctgaag

SEQ ID NO: 1429583 - DNA, 25 bp, Homo sapien
gtggactagcctgaagaaattcaga

SEQ ID NO: 1429584 - DNA, 25 bp, Homo sapien
cactcatattacacagcccaaaagt

SEQ ID NO: 1429585 - DNA, 25 bp, Homo sapien
tcactcatattacacagcccaaaag

SEQ ID NO: 1429586 - DNA, 25 bp, Homo sapien
ctcatattacacagcccaaaagtct

SEQ ID NO: 1429587 - DNA, 25 bp, Homo sapien
catattacacagcccaaaagtctga

SEQ ID NO: 1429588 - DNA, 25 bp, Homo sapien
gcacatttgtatattcattgagctg

SEQ ID NO: 1429589 - DNA, 25 bp, Homo sapien
agtccacagcctcctgacagctgca

SEQ ID NO: 1429590 - DNA, 25 bp, Homo sapien
cattgagctgtactcccaagtccac

SEQ ID NO: 1429591 - DNA, 25 bp, Homo sapien
gcagatggcaaagccatttttcata

SEQ ID NO: 1429592 - DNA, 25 bp, Homo sapien
gccccatttcctatccagatctaga

SEQ ID NO: 1429593 - DNA, 25 bp, Homo sapien
ttccaagggcgaagtgaacagcacc

SEQ ID NO: 1429594 - DNA, 25 bp, Homo sapien
tgtctctgtgggaagacgatgcccc

SEQ ID NO: 1429595 - DNA, 25 bp, Homo sapien
cctatccagatctagagagagaagt

SEQ ID NO: 1429596 - DNA, 25 bp, Homo sapien
aaccacactagttccccagcaatga

SEQ ID NO: 1429597 - DNA, 25 bp, Homo sapien
cactagttccccagcaatgattctt

SEQ ID NO: 1429598 - DNA, 25 bp, Homo sapien
acaaccacactagttccccagcaat

SEQ ID NO: 1429599 - DNA, 25 bp, Homo sapien
ccacactagttccccagcaatgatt

SEQ ID NO: 1429600 - DNA, 25 bp, Homo sapien
tcagaggtgcatattgccaagcatt

SEQ ID NO: 1429601 - DNA, 25 bp, Homo sapien
aacaaaagccgaagaacagatggct

SEQ ID NO: 1429602 - DNA, 25 bp, Homo sapien
aagtaatgccaatccttctcacact

SEQ ID NO: 1429603 - DNA, 25 bp, Homo sapien
agccgaagaacagatggcttcagag

SEQ ID NO: 1429604 - DNA, 25 bp, Homo sapien
gtgaggtccttcttgctacatcatc

SEQ ID NO: 1429605 - DNA, 25 bp, Homo sapien
agactgggaagtctaacatcaaggt

SEQ ID NO: 1429606 - DNA, 25 bp, Homo sapien
gaggtccttcttgctacatcatccc

SEQ ID NO: 1429607 - DNA, 25 bp, Homo sapien
cattgtggagactgggaagtctaac

SEQ ID NO: 1429608 - DNA, 25 bp, Homo sapien
cccattccattcaatgtggttccac

SEQ ID NO: 1429609 - DNA, 25 bp, Homo sapien
ccattccattcaatgtggttccaca

SEQ ID NO: 1429610 - DNA, 25 bp, Homo sapien
tgtgtagaagcctcgaaatgtattt

SEQ ID NO: 1429611 - DNA, 25 bp, Homo sapien
ttccaccttccgagctctagtgatg

SEQ ID NO: 1429612 - DNA, 25 bp, Homo sapien
atgtatttaataacaacttccacct

SEQ ID NO: 1429613 - DNA, 25 bp, Homo sapien
agctctagtgatggtctagtgggat

SEQ ID NO: 1429614 - DNA, 25 bp, Homo sapien
caacacagaccctaacaactcccaa

SEQ ID NO: 1429615 - DNA, 25 bp, Homo sapien
tggcaacacagaccctaacaactcc

SEQ ID NO: 1429616 - DNA, 25 bp, Homo sapien
acaactcccaaggtaaacaggctca

SEQ ID NO: 1429617 - DNA, 25 bp, Homo sapien
gcctggcaacacagaccctaacaac

SEQ ID NO: 1429618 - DNA, 25 bp, Homo sapien
ctgggattcaaaaagcagtgtactt

SEQ ID NO: 1429619 - DNA, 25 bp, Homo sapien
gattcaaaaagcagtgtacttgcag

SEQ ID NO: 1429620 - DNA, 25 bp, Homo sapien
aaaagcagtgtacttgcagagctca

SEQ ID NO: 1429621 - DNA, 25 bp, Homo sapien
cagtgtacttgcagagctcagtgtc

SEQ ID NO: 1429622 - DNA, 25 bp, Homo sapien
ttccatgctctggagatgctcctct

SEQ ID NO: 1429623 - DNA, 25 bp, Homo sapien
ccaggagtgggagttttgccttgga

SEQ ID NO: 1429624 - DNA, 25 bp, Homo sapien
gccatggggagctgacattcttctc

SEQ ID NO: 1429625 - DNA, 25 bp, Homo sapien
tctgtctgaagtaatggatggattt

SEQ ID NO: 1429626 - DNA, 25 bp, Homo sapien
acagtcgttagctgttccaagagag

SEQ ID NO: 1429627 - DNA, 25 bp, Homo sapien
aaaagggagtgtaatgtcatcttca

SEQ ID NO: 1429628 - DNA, 25 bp, Homo sapien
gagaattgtgcatcatcaactgaca

SEQ ID NO: 1429629 - DNA, 25 bp, Homo sapien
tagtaaatacagtcgttagctgttc

SEQ ID NO: 1429630 - DNA, 25 bp, Homo sapien
tgcttgttctaactgccgaaagctg

SEQ ID NO: 1429631 - DNA, 25 bp, Homo sapien
tctaactgccgaaagctgcaggctc

SEQ ID NO: 1429632 - DNA, 25 bp, Homo sapien
tcatgcttgttctaactgccgaaag

SEQ ID NO: 1429633 - DNA, 25 bp, Homo sapien
gttctaactgccgaaagctgcaggc

SEQ ID NO: 1429634 - DNA, 25 bp, Homo sapien
tatgtttcctccaactccctgcccc

SEQ ID NO: 1429635 - DNA, 25 bp, Homo sapien
tattgttttatgtttcctccaactc

SEQ ID NO: 1429636 - DNA, 25 bp, Homo sapien
tttatgtttcctccaactccctgcc

SEQ ID NO: 1429637 - DNA, 25 bp, Homo sapien
ttttatgtttcctccaactccctgc

SEQ ID NO: 1429638 - DNA, 25 bp, Homo sapien
tttcagcctctcttaaccaatcctg

SEQ ID NO: 1429639 - DNA, 25 bp, Homo sapien
ctctcttaaccaatcctgagagaag

SEQ ID NO: 1429640 - DNA, 25 bp, Homo sapien
tttctgcatcacttatcaaatgaca

SEQ ID NO: 1429641 - DNA, 25 bp, Homo sapien
tttttctgcatcacttatcaaatga

SEQ ID NO: 1429642 - DNA, 25 bp, Homo sapien
tttgcatctctaacaactataatct

SEQ ID NO: 1429643 - DNA, 25 bp, Homo sapien
gaaatgcagattggactcattgctg

SEQ ID NO: 1429644 - DNA, 25 bp, Homo sapien
agaaatgcagattggactcattgct

SEQ ID NO: 1429645 - DNA, 25 bp, Homo sapien
ggaggttgttacagatgcaaaggct

SEQ ID NO: 1429646 - DNA, 25 bp, Homo sapien
tgcaggtgttaactggatatctcag

SEQ ID NO: 1429647 - DNA, 25 bp, Homo sapien
atgcacaaattacagaggaggttgt

SEQ ID NO: 1429648 - DNA, 25 bp, Homo sapien
gagggtattctgaattgcaggtgtt

SEQ ID NO: 1429649 - DNA, 25 bp, Homo sapien
catgaccatttctcagtaacttgca

SEQ ID NO: 1429650 - DNA, 25 bp, Homo sapien
aagccttttcagagggtttgatgat

SEQ ID NO: 1429651 - DNA, 25 bp, Homo sapien
ccttttcagagggtttgatgatcca

SEQ ID NO: 1429652 - DNA, 25 bp, Homo sapien
tccatgaccatttctcagtaacttg

SEQ ID NO: 1429653 - DNA, 25 bp, Homo sapien
ggaacttaggcaatcacttcacctc

SEQ ID NO: 1429654 - DNA, 25 bp, Homo sapien
caacttccatccaaggaacttaggc

SEQ ID NO: 1429655 - DNA, 25 bp, Homo sapien
ccaaggaacttaggcaatcacttca

SEQ ID NO: 1429656 - DNA, 25 bp, Homo sapien
tccatccaaggaacttaggcaatca

SEQ ID NO: 1429657 - DNA, 25 bp, Homo sapien
aaaagccccaggaatagcagaacgc

SEQ ID NO: 1429658 - DNA, 25 bp, Homo sapien
cagaacgctgcaggagaccgtggtt

SEQ ID NO: 1429659 - DNA, 25 bp, Homo sapien
tggtagcccaggtccacatatacga

SEQ ID NO: 1429660 - DNA, 25 bp, Homo sapien
ggttcagttcccataagggtcaggc

SEQ ID NO: 1429661 - DNA, 25 bp, Homo sapien
cacctaaaagatatgggtgcctgcc

SEQ ID NO: 1429662 - DNA, 25 bp, Homo sapien
agattcagtgcacaaggaggagccc

SEQ ID NO: 1429663 - DNA, 25 bp, Homo sapien
catacatgccacaatcaaggtgcca

SEQ ID NO: 1429664 - DNA, 25 bp, Homo sapien
gagaatatgaattggattaagcccc

SEQ ID NO: 1429665 - DNA, 25 bp, Homo sapien
tcagtgtcggccatagccttgccat

SEQ ID NO: 1429666 - DNA, 25 bp, Homo sapien
tgccaccgccagcactgcctttctg

SEQ ID NO: 1429667 - DNA, 25 bp, Homo sapien
tcccgcagacctgttcatctcagtg

SEQ ID NO: 1429668 - DNA, 25 bp, Homo sapien
ggagtgctggtcattttgtgcaaag

SEQ ID NO: 1429669 - DNA, 25 bp, Homo sapien
tgggccatatgaagtgaccacatac

SEQ ID NO: 1429670 - DNA, 25 bp, Homo sapien
acttgggccatatgaagtgaccaca

SEQ ID NO: 1429671 - DNA, 25 bp, Homo sapien
gggccatatgaagtgaccacatact

SEQ ID NO: 1429672 - DNA, 25 bp, Homo sapien
cttgggccatatgaagtgaccacat

SEQ ID NO: 1429673 - DNA, 25 bp, Homo sapien
cctcctagactggaacttgtttagt

SEQ ID NO: 1429674 - DNA, 25 bp, Homo sapien
tcctcctagactggaacttgtttag

SEQ ID NO: 1429675 - DNA, 25 bp, Homo sapien
gtctcctcctagactggaacttgtt

SEQ ID NO: 1429676 - DNA, 25 bp, Homo sapien
gactggaacttgtttagtttatcat

SEQ ID NO: 1429677 - DNA, 25 bp, Homo sapien
gattattaaactcctcattaactga

SEQ ID NO: 1429678 - DNA, 25 bp, Homo sapien
gggctgtgagcacgcagatgcctca

SEQ ID NO: 1429679 - DNA, 25 bp, Homo sapien
agattattaaactcctcattaactg

SEQ ID NO: 1429680 - DNA, 25 bp, Homo sapien
tgagcacgcagatgcctcacacaag

SEQ ID NO: 1429681 - DNA, 25 bp, Homo sapien
tagtgtctgttctggtactgtggag

SEQ ID NO: 1429682 - DNA, 25 bp, Homo sapien
tgaaatagtgtctgttctggtactg

SEQ ID NO: 1429683 - DNA, 25 bp, Homo sapien
aatagtgtctgttctggtactgtgg

SEQ ID NO: 1429684 - DNA, 25 bp, Homo sapien
gaaatagtgtctgttctggtactgt

SEQ ID NO: 1429685 - DNA, 25 bp, Homo sapien
caaacttctgactaccccatacttt

SEQ ID NO: 1429686 - DNA, 25 bp, Homo sapien
gacgttgtattcttgttgcagctca

SEQ ID NO: 1429687 - DNA, 25 bp, Homo sapien
gcagctcacttaggcctggatttcc

SEQ ID NO: 1429688 - DNA, 25 bp, Homo sapien
ctttaaccttcagttctgggccctg

SEQ ID NO: 1429689 - DNA, 25 bp, Homo sapien
caagctcaagccactatgacgaaag

SEQ ID NO: 1429690 - DNA, 25 bp, Homo sapien
cctgttgcctgtgtagtgaaccaaa

SEQ ID NO: 1429691 - DNA, 25 bp, Homo sapien
tcaaccagctgcaagacattaccag

SEQ ID NO: 1429692 - DNA, 25 bp, Homo sapien
gacgaaagctgatccctgcactggt

SEQ ID NO: 1429693 - DNA, 25 bp, Homo sapien
catttggagaagaaccagtgtgcgt

SEQ ID NO: 1429694 - DNA, 25 bp, Homo sapien
gaagaaccagtgtgcgttagagaga

SEQ ID NO: 1429695 - DNA, 25 bp, Homo sapien
accagtgtgcgttagagagatttct

SEQ ID NO: 1429696 - DNA, 25 bp, Homo sapien
tggagaagaaccagtgtgcgttaga

SEQ ID NO: 1429697 - DNA, 25 bp, Homo sapien
acctgtccaggctatgttcaatgca

SEQ ID NO: 1429698 - DNA, 25 bp, Homo sapien
tgcctagcaacactgaatagccccg

SEQ ID NO: 1429699 - DNA, 25 bp, Homo sapien
gatgctttatcccttcgaagctgaa

SEQ ID NO: 1429700 - DNA, 25 bp, Homo sapien
aatagccccgttagtccagcgagtg

SEQ ID NO: 1429701 - DNA, 25 bp, Homo sapien
ctcagatgaatgtacctggcctgct

SEQ ID NO: 1429702 - DNA, 25 bp, Homo sapien
tggctgtcctcagatgaatgtacct

SEQ ID NO: 1429703 - DNA, 25 bp, Homo sapien
gctgtcctcagatgaatgtacctgg

SEQ ID NO: 1429704 - DNA, 25 bp, Homo sapien
tgtcctcagatgaatgtacctggcc

SEQ ID NO: 1429705 - DNA, 25 bp, Homo sapien
ctgatgaaggtgttgtcaacatcaa

SEQ ID NO: 1429706 - DNA, 25 bp, Homo sapien
tgatgaaggtgttgtcaacatcaaa

SEQ ID NO: 1429707 - DNA, 25 bp, Homo sapien
gatgaaggtgttgtcaacatcaaaa

SEQ ID NO: 1429708 - DNA, 25 bp, Homo sapien
atgaaggtgttgtcaacatcaaaac

SEQ ID NO: 1429709 - DNA, 25 bp, Homo sapien
cctgaaaatggccatacagcccaag

SEQ ID NO: 1429710 - DNA, 25 bp, Homo sapien
atatcctgaaaatggccatacagcc

SEQ ID NO: 1429711 - DNA, 25 bp, Homo sapien
aaaagagcccgcattgccaagtcaa

SEQ ID NO: 1429712 - DNA, 25 bp, Homo sapien
caaaaaagagcccgcattgccaagt

SEQ ID NO: 1429713 - DNA, 25 bp, Homo sapien
gaaattaaactgatccttgcagtca

SEQ ID NO: 1429714 - DNA, 25 bp, Homo sapien
tgggccgctgctcagacagagattt

SEQ ID NO: 1429715 - DNA, 25 bp, Homo sapien
actgatccttgcagtcagcagaaat

SEQ ID NO: 1429716 - DNA, 25 bp, Homo sapien
gagcaaaattttaccatgggagaaa

SEQ ID NO: 1429717 - DNA, 25 bp, Homo sapien
tcttcaaagtgaaggctgtaggacc

SEQ ID NO: 1429718 - DNA, 25 bp, Homo sapien
aatcttcaaagtgaaggctgtagga

SEQ ID NO: 1429719 - DNA, 25 bp, Homo sapien
atcttcaaagtgaaggctgtaggac

SEQ ID NO: 1429720 - DNA, 25 bp, Homo sapien
ttcctatgcatagccggatcccacg

SEQ ID NO: 1429721 - DNA, 25 bp, Homo sapien
caaatcttcaagtgatgcccactgc

SEQ ID NO: 1429722 - DNA, 25 bp, Homo sapien
gaagatatgccactcaaaagggaag

SEQ ID NO: 1429723 - DNA, 25 bp, Homo sapien
ccttctgatgatagagccatttcct

SEQ ID NO: 1429724 - DNA, 25 bp, Homo sapien
tattttcttccaacgtcactgccac

SEQ ID NO: 1429725 - DNA, 25 bp, Homo sapien
gatacaggtgaccactccatcttta

SEQ ID NO: 1429726 - DNA, 25 bp, Homo sapien
caaatctctaaacgttggtgtgccc

SEQ ID NO: 1429727 - DNA, 25 bp, Homo sapien
taaacgttggtgtgccccaggatgg

SEQ ID NO: 1429728 - DNA, 25 bp, Homo sapien
catggaatcatcgtggagatctggt

SEQ ID NO: 1429729 - DNA, 25 bp, Homo sapien
tcagactttcatggaatcatcgtgg

SEQ ID NO: 1429730 - DNA, 25 bp, Homo sapien
atcatcgtggagatctggtgacaca

SEQ ID NO: 1429731 - DNA, 25 bp, Homo sapien
ctttcatggaatcatcgtggagatc

SEQ ID NO: 1429732 - DNA, 25 bp, Homo sapien
ggagctctatcctaatgtaatcagg

SEQ ID NO: 1429733 - DNA, 25 bp, Homo sapien
cagaagatctgagagggaaatgcct

SEQ ID NO: 1429734 - DNA, 25 bp, Homo sapien
taatcaggcgatcgtacatgagatg

SEQ ID NO: 1429735 - DNA, 25 bp, Homo sapien
gagatgatgcctcataggagccgag

SEQ ID NO: 1429736 - DNA, 25 bp, Homo sapien
tgagcagctcacactgtcttgtccc

SEQ ID NO: 1429737 - DNA, 25 bp, Homo sapien
acccacagttgaaagtccccagtca

SEQ ID NO: 1429738 - DNA, 25 bp, Homo sapien
gggagcaaaactaccactttcagaa

SEQ ID NO: 1429739 - DNA, 25 bp, Homo sapien
ccagggagcaaaactaccactttca

SEQ ID NO: 1429740 - DNA, 25 bp, Homo sapien
cctggaatcattcttctagtgggca

SEQ ID NO: 1429741 - DNA, 25 bp, Homo sapien
caccattcccttagtagcgtaacaa

SEQ ID NO: 1429742 - DNA, 25 bp, Homo sapien
tcagggtgtccaatacctggaatca

SEQ ID NO: 1429743 - DNA, 25 bp, Homo sapien
cagacatgaagcagtatcgccacac

SEQ ID NO: 1429744 - DNA, 25 bp, Homo sapien
gggcagctgctaggtcaagaatgta

SEQ ID NO: 1429745 - DNA, 25 bp, Homo sapien
taggactgtgctgcgtgtaaatacc

SEQ ID NO: 1429746 - DNA, 25 bp, Homo sapien
gaaactattgctccctcttgtccct

SEQ ID NO: 1429747 - DNA, 25 bp, Homo sapien
tcaagaatgtatatcagcgtacgtc

SEQ ID NO: 1429748 - DNA, 25 bp, Homo sapien
ccattgtagccacatttttaggaaa

SEQ ID NO: 1429749 - DNA, 25 bp, Homo sapien
gcaggcaggccttgcatgcgtgcct

SEQ ID NO: 1429750 - DNA, 25 bp, Homo sapien
ggctgttggatgcatttcggggcca

SEQ ID NO: 1429751 - DNA, 25 bp, Homo sapien
ttctccccctgaacagcttcatttt

SEQ ID NO: 1429752 - DNA, 25 bp, Homo sapien
caggaagttacagagggtgccagcc

SEQ ID NO: 1429753 - DNA, 25 bp, Homo sapien
tggccaaattgcaaggaatcctgcg

SEQ ID NO: 1429754 - DNA, 25 bp, Homo sapien
tcctgcgaaaggatgagaatcccag

SEQ ID NO: 1429755 - DNA, 25 bp, Homo sapien
cacgtcccaggaacatgtagtttga

SEQ ID NO: 1429756 - DNA, 25 bp, Homo sapien
tggacacgccagacatgtcgtaagg

SEQ ID NO: 1429757 - DNA, 25 bp, Homo sapien
ccggacacccatgacaggtccagga

SEQ ID NO: 1429758 - DNA, 25 bp, Homo sapien
tgtggtgaatgtggacacgccagac

SEQ ID NO: 1429759 - DNA, 25 bp, Homo sapien
gacacccatgacaggtccaggattg

SEQ ID NO: 1429760 - DNA, 25 bp, Homo sapien
aagggaagatttacaggaccatatt

SEQ ID NO: 1429761 - DNA, 25 bp, Homo sapien
catttcccttgatttgcagctccct

SEQ ID NO: 1429762 - DNA, 25 bp, Homo sapien
acagcacagccctcgaatttaaagg

SEQ ID NO: 1429763 - DNA, 25 bp, Homo sapien
ccaggcagttcatacgtacacattt

SEQ ID NO: 1429764 - DNA, 25 bp, Homo sapien
cataggccaagctaatcatgggaga

SEQ ID NO: 1429765 - DNA, 25 bp, Homo sapien
cacaagattaagattatgggaggaa

SEQ ID NO: 1429766 - DNA, 25 bp, Homo sapien
aaactatcccccaacactgttcagg

SEQ ID NO: 1429767 - DNA, 25 bp, Homo sapien
ctgttcagggaccaaaacctgtgta

SEQ ID NO: 1429768 - DNA, 25 bp, Homo sapien
acttttacattctgtcaactgacaa

SEQ ID NO: 1429769 - DNA, 25 bp, Homo sapien
ccccacccagacctatgatttatga

SEQ ID NO: 1429770 - DNA, 25 bp, Homo sapien
cctatgatttatgactcaactggtc

SEQ ID NO: 1429771 - DNA, 25 bp, Homo sapien
tacattctgtcaactgacaaacccc

SEQ ID NO: 1429772 - DNA, 25 bp, Homo sapien
aagggacagtcccagtcttgagtga

SEQ ID NO: 1429773 - DNA, 25 bp, Homo sapien
aatgtgaaatatgccttccactgct

SEQ ID NO: 1429774 - DNA, 25 bp, Homo sapien
gacacaattgtgtcgtaattcacat

SEQ ID NO: 1429775 - DNA, 25 bp, Homo sapien
tccattcttgttggtaagaagaggg

SEQ ID NO: 1429776 - DNA, 25 bp, Homo sapien
tccccgacaaggtctgacatagcac

SEQ ID NO: 1429777 - DNA, 25 bp, Homo sapien
tttttgtccccgacaaggtctgaca

SEQ ID NO: 1429778 - DNA, 25 bp, Homo sapien
tttgtccccgacaaggtctgacata

SEQ ID NO: 1429779 - DNA, 25 bp, Homo sapien
tgtccccgacaaggtctgacatagc

SEQ ID NO: 1429780 - DNA, 25 bp, Homo sapien
accaggcccgtcaacatttccagca

SEQ ID NO: 1429781 - DNA, 25 bp, Homo sapien
aaggctgacaccaggcccgtcaaca

SEQ ID NO: 1429782 - DNA, 25 bp, Homo sapien
taaatattcaaacaccaagattttg
